United States Patent Application Publication US 2005/0244851 A1 - sequence listing, part 117

SEQ ID NO: 4564257 - DNA, 25 bp, Homo sapien
cacttctgataagtgtttaccaggt

SEQ ID NO: 4564258 - DNA, 25 bp, Homo sapien
gaataagttcaaggttcttgcaagc

SEQ ID NO: 4564259 - DNA, 25 bp, Homo sapien
gacatcatgagagcaaatatttgtc

SEQ ID NO: 4564260 - DNA, 25 bp, Homo sapien
atatttgtctgaggatagttttaag

SEQ ID NO: 4564261 - DNA, 25 bp, Homo sapien
agagcaaatatttgtctgaggatag

SEQ ID NO: 4564262 - DNA, 25 bp, Homo sapien
ttgtctgaggatagttttaagttac

SEQ ID NO: 4564263 - DNA, 25 bp, Homo sapien
cggctttctccacatgcttgactaa

SEQ ID NO: 4564264 - DNA, 25 bp, Homo sapien
caaatctagacacagtgtccaagag

SEQ ID NO: 4564265 - DNA, 25 bp, Homo sapien
cattacttaaagttgcactgtccca

SEQ ID NO: 4564266 - DNA, 25 bp, Homo sapien
gacacagtgtccaagagtgactcat

SEQ ID NO: 4564267 - DNA, 25 bp, Homo sapien
tttactaacagcatagtcctgcatg

SEQ ID NO: 4564268 - DNA, 25 bp, Homo sapien
tgcatgctgatccaaaggcttcggg

SEQ ID NO: 4564269 - DNA, 25 bp, Homo sapien
gctctttagaacaacccaatgccaa

SEQ ID NO: 4564270 - DNA, 25 bp, Homo sapien
gaaagtgctacttctaacaggcaac

SEQ ID NO: 4564271 - DNA, 25 bp, Homo sapien
cagcaggatcaattagttctggccc

SEQ ID NO: 4564272 - DNA, 25 bp, Homo sapien
ttctagatccacaagccatacccag

SEQ ID NO: 4564273 - DNA, 25 bp, Homo sapien
tgaggagtgtccatttctacaccgt

SEQ ID NO: 4564274 - DNA, 25 bp, Homo sapien
cgcccaataaggagagcaattgttc

SEQ ID NO: 4564275 - DNA, 25 bp, Homo sapien
gttcttgacttcacgaaatgacagc

SEQ ID NO: 4564276 - DNA, 25 bp, Homo sapien
tgccagagtctgtctacaaacaaaa

SEQ ID NO: 4564277 - DNA, 25 bp, Homo sapien
caccagggccagatagtttcacaga

SEQ ID NO: 4564278 - DNA, 25 bp, Homo sapien
gaaagttccgcgttcatgttatgag

SEQ ID NO: 4564279 - DNA, 25 bp, Homo sapien
gaggtaactcaataaaggccgagcc

SEQ ID NO: 4564280 - DNA, 25 bp, Homo sapien
catgaagaggccactgtaactcctg

SEQ ID NO: 4564281 - DNA, 25 bp, Homo sapien
gccgagccactgacacagggagtaa

SEQ ID NO: 4564282 - DNA, 25 bp, Homo sapien
cagctggcaggagtctattaaggca

SEQ ID NO: 4564283 - DNA, 25 bp, Homo sapien
taggcctctgtcatgccaagtagac

SEQ ID NO: 4564284 - DNA, 25 bp, Homo sapien
caagaccattcctattccagaggct

SEQ ID NO: 4564285 - DNA, 25 bp, Homo sapien
gagtttatatcatccagtgccttta

SEQ ID NO: 4564286 - DNA, 25 bp, Homo sapien
cttcaatagaaggaaattcaagacc

SEQ ID NO: 4564287 - DNA, 25 bp, Homo sapien
aatttttctccaacactgccattcc

SEQ ID NO: 4564288 - DNA, 25 bp, Homo sapien
tgagcaaatttgcagaacgtgaata

SEQ ID NO: 4564289 - DNA, 25 bp, Homo sapien
gagcaaatttgcagaacgtgaataa

SEQ ID NO: 4564290 - DNA, 25 bp, Homo sapien
acactgccattccaaggactttctt

SEQ ID NO: 4564291 - DNA, 25 bp, Homo sapien
gatgtttatgaagcaatgccacact

SEQ ID NO: 4564292 - DNA, 25 bp, Homo sapien
atgtttatgaagcaatgccacactg

SEQ ID NO: 4564293 - DNA, 25 bp, Homo sapien
agatgtttatgaagcaatgccacac

SEQ ID NO: 4564294 - DNA, 25 bp, Homo sapien
tttctagctctccaaatgcttgatc

SEQ ID NO: 4564295 - DNA, 25 bp, Homo sapien
catagcagttcatgaagatgagcag

SEQ ID NO: 4564296 - DNA, 25 bp, Homo sapien
gctacgtgggtatgatcttgcaaac

SEQ ID NO: 4564297 - DNA, 25 bp, Homo sapien
ctgagtgccgtaaggttgatctgac

SEQ ID NO: 4564298 - DNA, 25 bp, Homo sapien
cagtacacacagaagataggtcagc

SEQ ID NO: 4564299 - DNA, 25 bp, Homo sapien
cagcatcagagggtgaactatagcc

SEQ ID NO: 4564300 - DNA, 25 bp, Homo sapien
agtccaaatttttaggatactactg

SEQ ID NO: 4564301 - DNA, 25 bp, Homo sapien
taggatactactggtttacttacac

SEQ ID NO: 4564302 - DNA, 25 bp, Homo sapien
acttacacagcaagcaaaggcctac

SEQ ID NO: 4564303 - DNA, 25 bp, Homo sapien
ctactggtttacttacacagcaagc

SEQ ID NO: 4564304 - DNA, 25 bp, Homo sapien
taatggaggtaacagcatggttgct

SEQ ID NO: 4564305 - DNA, 25 bp, Homo sapien
taagctttcccatctatcaggtcct

SEQ ID NO: 4564306 - DNA, 25 bp, Homo sapien
ggttgctcccactgataaagtttca

SEQ ID NO: 4564307 - DNA, 25 bp, Homo sapien
aatgaagtaattccatccgttctcg

SEQ ID NO: 4564308 - DNA, 25 bp, Homo sapien
atgcgccaccagactcaactaattt

SEQ ID NO: 4564309 - DNA, 25 bp, Homo sapien
gctagcatgcagtggtatgatgtca

SEQ ID NO: 4564310 - DNA, 25 bp, Homo sapien
tagcatgcagtggtatgatgtcagc

SEQ ID NO: 4564311 - DNA, 25 bp, Homo sapien
aggctagcatgcagtggtatgatgt

SEQ ID NO: 4564312 - DNA, 25 bp, Homo sapien
gtacagacctagtagtggaactgct

SEQ ID NO: 4564313 - DNA, 25 bp, Homo sapien
gctcttgggtacagacctagtagtg

SEQ ID NO: 4564314 - DNA, 25 bp, Homo sapien
caatgctcttgggtacagacctagt

SEQ ID NO: 4564315 - DNA, 25 bp, Homo sapien
tacattctcatgcaatgcatgaagg

SEQ ID NO: 4564316 - DNA, 25 bp, Homo sapien
tcagtaagccacagatgtatgagtt

SEQ ID NO: 4564317 - DNA, 25 bp, Homo sapien
tacagttgtccaagtaccatgagac

SEQ ID NO: 4564318 - DNA, 25 bp, Homo sapien
aatagttttggcactcttgtagaaa

SEQ ID NO: 4564319 - DNA, 25 bp, Homo sapien
gttggaaagtgtgagccttctaact

SEQ ID NO: 4564320 - DNA, 25 bp, Homo sapien
gtacatttatcttttaccctgaagc

SEQ ID NO: 4564321 - DNA, 25 bp, Homo sapien
tctgctgaactcgtttattagccct

SEQ ID NO: 4564322 - DNA, 25 bp, Homo sapien
attagccctaatagttgtgtatgag

SEQ ID NO: 4564323 - DNA, 25 bp, Homo sapien
tcttatataattgccccagctagaa

SEQ ID NO: 4564324 - DNA, 25 bp, Homo sapien
tgtgaagaactagtcttaatccttc

SEQ ID NO: 4564325 - DNA, 25 bp, Homo sapien
gggaagtattagcttctcttctaca

SEQ ID NO: 4564326 - DNA, 25 bp, Homo sapien
cctcacaaaatatagttgggaagta

SEQ ID NO: 4564327 - DNA, 25 bp, Homo sapien
tgcccagctcactaagtctttcttc

SEQ ID NO: 4564328 - DNA, 25 bp, Homo sapien
cactctaatctacattagttccttt

SEQ ID NO: 4564329 - DNA, 25 bp, Homo sapien
gaaggttaaattactgattcgatat

SEQ ID NO: 4564330 - DNA, 25 bp, Homo sapien
ctttgatccactgataatttaggag

SEQ ID NO: 4564331 - DNA, 25 bp, Homo sapien
actgataatttaggagtgcactggt

SEQ ID NO: 4564332 - DNA, 25 bp, Homo sapien
tttcatctgggacagttgagtccat

SEQ ID NO: 4564333 - DNA, 25 bp, Homo sapien
catctgggacagttgagtccatcag

SEQ ID NO: 4564334 - DNA, 25 bp, Homo sapien
gatttcatctgggacagttgagtcc

SEQ ID NO: 4564335 - DNA, 25 bp, Homo sapien
cttggatttcatctgggacagttga

SEQ ID NO: 4564336 - DNA, 25 bp, Homo sapien
aaatttcgaagtggacctgcctgcc

SEQ ID NO: 4564337 - DNA, 25 bp, Homo sapien
acccctcccgcaagtgcaagagcaa

SEQ ID NO: 4564338 - DNA, 25 bp, Homo sapien
caagagcaaggtgatttgaaagtag

SEQ ID NO: 4564339 - DNA, 25 bp, Homo sapien
gcctgcctcccgagaatgctggtag

SEQ ID NO: 4564340 - DNA, 25 bp, Homo sapien
taaggtcggtgccatgcaacaactt

SEQ ID NO: 4564341 - DNA, 25 bp, Homo sapien
agtatctctcaagaaaagaacgcag

SEQ ID NO: 4564342 - DNA, 25 bp, Homo sapien
gaaggtactctcttcaagatctaca

SEQ ID NO: 4564343 - DNA, 25 bp, Homo sapien
agaacgcaggtgtgagaaggtactc

SEQ ID NO: 4564344 - DNA, 25 bp, Homo sapien
ccaaccagattgagagcactgaggt

SEQ ID NO: 4564345 - DNA, 25 bp, Homo sapien
tacctgatggactaaacacgtacag

SEQ ID NO: 4564346 - DNA, 25 bp, Homo sapien
cacgtacagttagcactttcggaaa

SEQ ID NO: 4564347 - DNA, 25 bp, Homo sapien
tactgggtatgacttcttgcttcgg

SEQ ID NO: 4564348 - DNA, 25 bp, Homo sapien
tagtaataggacctgtggaatttcc

SEQ ID NO: 4564349 - DNA, 25 bp, Homo sapien
gctgaatagctatgccatctaagcc

SEQ ID NO: 4564350 - DNA, 25 bp, Homo sapien
cattgccccattgagttattgcccc

SEQ ID NO: 4564351 - DNA, 25 bp, Homo sapien
tgtgatgttccagccgaaatctgct

SEQ ID NO: 4564352 - DNA, 25 bp, Homo sapien
gaaacatcaactattcttgtggcag

SEQ ID NO: 4564353 - DNA, 25 bp, Homo sapien
tcttcaataagcttgggtctcaaag

SEQ ID NO: 4564354 - DNA, 25 bp, Homo sapien
caactattcttgtggcagccagttc

SEQ ID NO: 4564355 - DNA, 25 bp, Homo sapien
ccaatagaaacatcaactattcttg

SEQ ID NO: 4564356 - DNA, 25 bp, Homo sapien
tattttaggaaagactgctgctgag

SEQ ID NO: 4564357 - DNA, 25 bp, Homo sapien
aattggtcaagcattgtggcacagg

SEQ ID NO: 4564358 - DNA, 25 bp, Homo sapien
tgtccggatgtagtggcttaagcct

SEQ ID NO: 4564359 - DNA, 25 bp, Homo sapien
tgctgagagattaaaccacttcaat

SEQ ID NO: 4564360 - DNA, 25 bp, Homo sapien
tacatgacagaataagtggccagct

SEQ ID NO: 4564361 - DNA, 25 bp, Homo sapien
gagatattcttaaggcagcaactag

SEQ ID NO: 4564362 - DNA, 25 bp, Homo sapien
tggatacacagggacaaatattgtc

SEQ ID NO: 4564363 - DNA, 25 bp, Homo sapien
caaggtggcctcctatacatgacag

SEQ ID NO: 4564364 - DNA, 25 bp, Homo sapien
cactctgttggtatcaccatgacca

SEQ ID NO: 4564365 - DNA, 25 bp, Homo sapien
actttaggtttatacactctgttgg

SEQ ID NO: 4564366 - DNA, 25 bp, Homo sapien
tgccctgttgatgtcaaagcaagtg

SEQ ID NO: 4564367 - DNA, 25 bp, Homo sapien
gaacattccttgtaaagcttcaata

SEQ ID NO: 4564368 - DNA, 25 bp, Homo sapien
tagtatgtgaactgccacaagaaac

SEQ ID NO: 4564369 - DNA, 25 bp, Homo sapien
caaaagaccatacagttctcccatc

SEQ ID NO: 4564370 - DNA, 25 bp, Homo sapien
gttacgactattgctgtcaccatga

SEQ ID NO: 4564371 - DNA, 25 bp, Homo sapien
tactaatgttggaatgttacgacta

SEQ ID NO: 4564372 - DNA, 25 bp, Homo sapien
gcagcactatgtctgtatccagctg

SEQ ID NO: 4564373 - DNA, 25 bp, Homo sapien
tcaccccatgtgtataattccccat

SEQ ID NO: 4564374 - DNA, 25 bp, Homo sapien
tctccttcaccccatgtgtataatt

SEQ ID NO: 4564375 - DNA, 25 bp, Homo sapien
gtctgtatccagctgacacacaaac

SEQ ID NO: 4564376 - DNA, 25 bp, Homo sapien
gacaaaagtgcagtactgtccagct

SEQ ID NO: 4564377 - DNA, 25 bp, Homo sapien
cagagccatccgtagaaatgacaaa

SEQ ID NO: 4564378 - DNA, 25 bp, Homo sapien
tcgtaaaggctaaagtgtgaccatc

SEQ ID NO: 4564379 - DNA, 25 bp, Homo sapien
ttttaatggatctgtgaggctcgaa

SEQ ID NO: 4564380 - DNA, 25 bp, Homo sapien
tgtgcatcagagaaactaggagcca

SEQ ID NO: 4564381 - DNA, 25 bp, Homo sapien
cagagaaactaggagccagtttggg

SEQ ID NO: 4564382 - DNA, 25 bp, Homo sapien
cagtttgggttgcagtattttctcc

SEQ ID NO: 4564383 - DNA, 25 bp, Homo sapien
gtattttctcctgtgtaccttctac

SEQ ID NO: 4564384 - DNA, 25 bp, Homo sapien
caccagtctgaatgctatctgggct

SEQ ID NO: 4564385 - DNA, 25 bp, Homo sapien
tatctgggctagcacatgttctcga

SEQ ID NO: 4564386 - DNA, 25 bp, Homo sapien
cacaggtttcggagacaatgggagc

SEQ ID NO: 4564387 - DNA, 25 bp, Homo sapien
tctcgaataatcagaagccattctg

SEQ ID NO: 4564388 - DNA, 25 bp, Homo sapien
tctctagaggtaacaactggtgcca

SEQ ID NO: 4564389 - DNA, 25 bp, Homo sapien
taaggatgcacatctggttgacaga

SEQ ID NO: 4564390 - DNA, 25 bp, Homo sapien
gaaagggcttctgcaatgactaaga

SEQ ID NO: 4564391 - DNA, 25 bp, Homo sapien
gaaaagaggttatgacaaggctgtg

SEQ ID NO: 4564392 - DNA, 25 bp, Homo sapien
acaagccatccgatgttctggttgg

SEQ ID NO: 4564393 - DNA, 25 bp, Homo sapien
cataatgctgcctcgtaaagggagc

SEQ ID NO: 4564394 - DNA, 25 bp, Homo sapien
taaagggagcacaagccatccgatg

SEQ ID NO: 4564395 - DNA, 25 bp, Homo sapien
actgactccgatcagcagatgaacc

SEQ ID NO: 4564396 - DNA, 25 bp, Homo sapien
acctcgagttatcccatcctttcag

SEQ ID NO: 4564397 - DNA, 25 bp, Homo sapien
tcctttcagatcaaaccaataagat

SEQ ID NO: 4564398 - DNA, 25 bp, Homo sapien
tactgattgatatattatgtcgccc

SEQ ID NO: 4564399 - DNA, 25 bp, Homo sapien
caacgaacggccaatcagaatatgt

SEQ ID NO: 4564400 - DNA, 25 bp, Homo sapien
tttctaggagctggcaccagggcca

SEQ ID NO: 4564401 - DNA, 25 bp, Homo sapien
ctttctaggagctggcaccagggcc

SEQ ID NO: 4564402 - DNA, 25 bp, Homo sapien
taggagctggcaccagggccatcat

SEQ ID NO: 4564403 - DNA, 25 bp, Homo sapien
tctaggagctggcaccagggccatc

SEQ ID NO: 4564404 - DNA, 25 bp, Homo sapien
ttaaagttgagacttatagtacgta

SEQ ID NO: 4564405 - DNA, 25 bp, Homo sapien
taaagttgagacttatagtacgtac

SEQ ID NO: 4564406 - DNA, 25 bp, Homo sapien
tataagtgcatcagtgcttgaccgg

SEQ ID NO: 4564407 - DNA, 25 bp, Homo sapien
tgcgataagcagtccaagcccatag

SEQ ID NO: 4564408 - DNA, 25 bp, Homo sapien
tagctggctgctaagaagggcatcc

SEQ ID NO: 4564409 - DNA, 25 bp, Homo sapien
gcaatgagcctcgttgagctgccaa

SEQ ID NO: 4564410 - DNA, 25 bp, Homo sapien
gttgatttatccttcagccattagt

SEQ ID NO: 4564411 - DNA, 25 bp, Homo sapien
taagcatttgttgaaacgcagagga

SEQ ID NO: 4564412 - DNA, 25 bp, Homo sapien
gaaatatttagtgtcctgcaaggca

SEQ ID NO: 4564413 - DNA, 25 bp, Homo sapien
cagaaggcacggtttaagacagcag

SEQ ID NO: 4564414 - DNA, 25 bp, Homo sapien
gggcagatcagagcacagactacag

SEQ ID NO: 4564415 - DNA, 25 bp, Homo sapien
tgactggtaaggcaagtcccaaaag

SEQ ID NO: 4564416 - DNA, 25 bp, Homo sapien
cagtgacttgattacaataggctta

SEQ ID NO: 4564417 - DNA, 25 bp, Homo sapien
agatgatattattcaggccaggcac

SEQ ID NO: 4564418 - DNA, 25 bp, Homo sapien
ggtccacttgtctattcttacaaca

SEQ ID NO: 4564419 - DNA, 25 bp, Homo sapien
agacattaccttgacaaaatgttta

SEQ ID NO: 4564420 - DNA, 25 bp, Homo sapien
catagcaagacattaccttgacaaa

SEQ ID NO: 4564421 - DNA, 25 bp, Homo sapien
gcaagacattaccttgacaaaatgt

SEQ ID NO: 4564422 - DNA, 25 bp, Homo sapien
tagcaagacattaccttgacaaaat

SEQ ID NO: 4564423 - DNA, 25 bp, Homo sapien
taaatacctgagagatgacatatct

SEQ ID NO: 4564424 - DNA, 25 bp, Homo sapien
tatagaaggcttgtttttacgaaca

SEQ ID NO: 4564425 - DNA, 25 bp, Homo sapien
caaagggttgactgtatctatcacg

SEQ ID NO: 4564426 - DNA, 25 bp, Homo sapien
tcctcggacatacagaaatttgcag

SEQ ID NO: 4564427 - DNA, 25 bp, Homo sapien
aaggcaatggactgagaatagcaaa

SEQ ID NO: 4564428 - DNA, 25 bp, Homo sapien
taaaatacattcctcctaaccactc

SEQ ID NO: 4564429 - DNA, 25 bp, Homo sapien
gtggcagcgacacaatcataattca

SEQ ID NO: 4564430 - DNA, 25 bp, Homo sapien
gaaggttttaatgaaccaattgcca

SEQ ID NO: 4564431 - DNA, 25 bp, Homo sapien
tcataaaaaagataacggcccacga

SEQ ID NO: 4564432 - DNA, 25 bp, Homo sapien
gaatgagcaaattttgagaaggcag

SEQ ID NO: 4564433 - DNA, 25 bp, Homo sapien
cattatacatgactgaatacttggt

SEQ ID NO: 4564434 - DNA, 25 bp, Homo sapien
ttatatgtgcatctgtctactcccc

SEQ ID NO: 4564435 - DNA, 25 bp, Homo sapien
gcccggctccgcagaggctgcggcg

SEQ ID NO: 4564436 - DNA, 25 bp, Homo sapien
cgagcccggctccgcagaggctgcg

SEQ ID NO: 4564437 - DNA, 25 bp, Homo sapien
ggcgcggctccggcgacccgagccc

SEQ ID NO: 4564438 - DNA, 25 bp, Homo sapien
ctccggcgacccgagcccggctccg

SEQ ID NO: 4564439 - DNA, 25 bp, Homo sapien
acctggtggatccttaagctgctca

SEQ ID NO: 4564440 - DNA, 25 bp, Homo sapien
ggagcacacctggaacatgtcaaca

SEQ ID NO: 4564441 - DNA, 25 bp, Homo sapien
ccttgtttgtagaactgtgcccagc

SEQ ID NO: 4564442 - DNA, 25 bp, Homo sapien
gtataataaacagcaccaatccctg

SEQ ID NO: 4564443 - DNA, 25 bp, Homo sapien
ccttccggaggtgaggctttcaagt

SEQ ID NO: 4564444 - DNA, 25 bp, Homo sapien
tcagagtccatgaaccagtgacaat

SEQ ID NO: 4564445 - DNA, 25 bp, Homo sapien
tactaaatcaaagacaccagctgca

SEQ ID NO: 4564446 - DNA, 25 bp, Homo sapien
caggaacagtggatcttctaggtgc

SEQ ID NO: 4564447 - DNA, 25 bp, Homo sapien
agtgccctggatcaaagagcagaac

SEQ ID NO: 4564448 - DNA, 25 bp, Homo sapien
gagtctgcaagcaaagttccaggca

SEQ ID NO: 4564449 - DNA, 25 bp, Homo sapien
cacatggactttgagtctgcaagca

SEQ ID NO: 4564450 - DNA, 25 bp, Homo sapien
ctctgagtttgtgtagcagaggaca

SEQ ID NO: 4564451 - DNA, 25 bp, Homo sapien
ctgagtttgtgtagcagaggacagc

SEQ ID NO: 4564452 - DNA, 25 bp, Homo sapien
tctcttgttggtagcagggtgcagc

SEQ ID NO: 4564453 - DNA, 25 bp, Homo sapien
agtttgccccgagaattagtgacag

SEQ ID NO: 4564454 - DNA, 25 bp, Homo sapien
gggtgcagctagtgtccaaactaat

SEQ ID NO: 4564455 - DNA, 25 bp, Homo sapien
agtgtctggcacatatgaggtaaca

SEQ ID NO: 4564456 - DNA, 25 bp, Homo sapien
taggcaaaacttgagaggacactgg

SEQ ID NO: 4564457 - DNA, 25 bp, Homo sapien
gagtacaccaagagaaggctagcct

SEQ ID NO: 4564458 - DNA, 25 bp, Homo sapien
gacctcttcagagagctacccttgt

SEQ ID NO: 4564459 - DNA, 25 bp, Homo sapien
agggacccagatctcaacagctgtg

SEQ ID NO: 4564460 - DNA, 25 bp, Homo sapien
tgcccggcccagaggttacaatttg

SEQ ID NO: 4564461 - DNA, 25 bp, Homo sapien
tgtttagacacggatggaactgcct

SEQ ID NO: 4564462 - DNA, 25 bp, Homo sapien
taggcataagaccttctggtgggca

SEQ ID NO: 4564463 - DNA, 25 bp, Homo sapien
ccagcctgcttttgtagggcaaaga

SEQ ID NO: 4564464 - DNA, 25 bp, Homo sapien
tctggcctttttcacgtagcattct

SEQ ID NO: 4564465 - DNA, 25 bp, Homo sapien
ccatctgtgctatgggaatctatgc

SEQ ID NO: 4564466 - DNA, 25 bp, Homo sapien
tctgcctgggccattgaaacaaggc

SEQ ID NO: 4564467 - DNA, 25 bp, Homo sapien
tatgtgtaaccatcatcgtagtcaa

SEQ ID NO: 4564468 - DNA, 25 bp, Homo sapien
tcaacgtgatgctttctcctgtgtt

SEQ ID NO: 4564469 - DNA, 25 bp, Homo sapien
tgagagcctccagcatcaacgtgat

SEQ ID NO: 4564470 - DNA, 25 bp, Homo sapien
agccagctgagaggcccctcgctga

SEQ ID NO: 4564471 - DNA, 25 bp, Homo sapien
ctgagaggcccctcgctgagagcct

SEQ ID NO: 4564472 - DNA, 25 bp, Homo sapien
ggtaagaggtgcactgatctccagg

SEQ ID NO: 4564473 - DNA, 25 bp, Homo sapien
agagtcggagaggtaagaggtgcac

SEQ ID NO: 4564474 - DNA, 25 bp, Homo sapien
ctgagagtcggagaggtaagaggtg

SEQ ID NO: 4564475 - DNA, 25 bp, Homo sapien
gagaggtaagaggtgcactgatctc

SEQ ID NO: 4564476 - DNA, 25 bp, Homo sapien
aatatgcgaagggaaaaggcaaatg

SEQ ID NO: 4564477 - DNA, 25 bp, Homo sapien
tctgtggagtccagggcctgacttt

SEQ ID NO: 4564478 - DNA, 25 bp, Homo sapien
ctcttacagtatggccttcatttgc

SEQ ID NO: 4564479 - DNA, 25 bp, Homo sapien
gagatgttgtagttcacctcttaca

SEQ ID NO: 4564480 - DNA, 25 bp, Homo sapien
tgtcagctggtcaacacatccttct

SEQ ID NO: 4564481 - DNA, 25 bp, Homo sapien
gagaatgctgtggtctctttcagcc

SEQ ID NO: 4564482 - DNA, 25 bp, Homo sapien
ttcagagccaacagaacacacgtgg

SEQ ID NO: 4564483 - DNA, 25 bp, Homo sapien
tctttcagccctgtaagtgtcagct

SEQ ID NO: 4564484 - DNA, 25 bp, Homo sapien
gggcccctgtctgggaggcgcatgg

SEQ ID NO: 4564485 - DNA, 25 bp, Homo sapien
aaagtcatcctcaaaggattgtgca

SEQ ID NO: 4564486 - DNA, 25 bp, Homo sapien
aaaggattgtgcatcctcaaaggcc

SEQ ID NO: 4564487 - DNA, 25 bp, Homo sapien
tctgggaggcgcatgggtgcctggc

SEQ ID NO: 4564488 - DNA, 25 bp, Homo sapien
gcccacatcgttaggaattctcctg

SEQ ID NO: 4564489 - DNA, 25 bp, Homo sapien
aaaaacagggcccacatttcgatgc

SEQ ID NO: 4564490 - DNA, 25 bp, Homo sapien
ttcgatgccattgagtgagcttccc

SEQ ID NO: 4564491 - DNA, 25 bp, Homo sapien
ggcctcgccctgactttatttctga

SEQ ID NO: 4564492 - DNA, 25 bp, Homo sapien
cgcggacggttcaggaggaccttct

SEQ ID NO: 4564493 - DNA, 25 bp, Homo sapien
cagtgatattctgtggtaccaaggg

SEQ ID NO: 4564494 - DNA, 25 bp, Homo sapien
agttacaggcacacgggctaaagga

SEQ ID NO: 4564495 - DNA, 25 bp, Homo sapien
catgggcatactcgtctctggcaac

SEQ ID NO: 4564496 - DNA, 25 bp, Homo sapien
tcaccccgtgatgatgaggatgtcc

SEQ ID NO: 4564497 - DNA, 25 bp, Homo sapien
caaaattacaacatggcgggccagc

SEQ ID NO: 4564498 - DNA, 25 bp, Homo sapien
tgttggtcagcctgacgtcctggct

SEQ ID NO: 4564499 - DNA, 25 bp, Homo sapien
ccccagactctgaggatggcagaca

SEQ ID NO: 4564500 - DNA, 25 bp, Homo sapien
attaagagctttgggaatgctggag

SEQ ID NO: 4564501 - DNA, 25 bp, Homo sapien
tgggaatgctggagcctcctccaca

SEQ ID NO: 4564502 - DNA, 25 bp, Homo sapien
gctttgggaatgctggagcctcctc

SEQ ID NO: 4564503 - DNA, 25 bp, Homo sapien
taagagctttgggaatgctggagcc

SEQ ID NO: 4564504 - DNA, 25 bp, Homo sapien
caggacgcccgggtgctggtgctga

SEQ ID NO: 4564505 - DNA, 25 bp, Homo sapien
ctggtgctgagctgggtccaaaagt

SEQ ID NO: 4564506 - DNA, 25 bp, Homo sapien
gtgctggtgctgagctgggtccaaa

SEQ ID NO: 4564507 - DNA, 25 bp, Homo sapien
tcaggacgcccgggtgctggtgctg

SEQ ID NO: 4564508 - DNA, 25 bp, Homo sapien
gcacagaagggagccccgctgggcc

SEQ ID NO: 4564509 - DNA, 25 bp, Homo sapien
ctgcacagaagggagccccgctggg

SEQ ID NO: 4564510 - DNA, 25 bp, Homo sapien
gaagggagccccgctgggcccagac

SEQ ID NO: 4564511 - DNA, 25 bp, Homo sapien
cagaagggagccccgctgggcccag

SEQ ID NO: 4564512 - DNA, 25 bp, Homo sapien
ctccctggcggccactgcaggtcag

SEQ ID NO: 4564513 - DNA, 25 bp, Homo sapien
tccctggcggccactgcaggtcagg

SEQ ID NO: 4564514 - DNA, 25 bp, Homo sapien
tggcggccactgcaggtcaggccag

SEQ ID NO: 4564515 - DNA, 25 bp, Homo sapien
cctggcggccactgcaggtcaggcc

SEQ ID NO: 4564516 - DNA, 25 bp, Homo sapien
ctcctggcgatgtcctcctcagtgt

SEQ ID NO: 4564517 - DNA, 25 bp, Homo sapien
ccgtgggtggagggctttcctcctg

SEQ ID NO: 4564518 - DNA, 25 bp, Homo sapien
gagggctttcctcctggcgatgtcc

SEQ ID NO: 4564519 - DNA, 25 bp, Homo sapien
ctcctcagtgtcactctcacagttc

SEQ ID NO: 4564520 - DNA, 25 bp, Homo sapien
atcatgagacgccaggaatggggct

SEQ ID NO: 4564521 - DNA, 25 bp, Homo sapien
gaggatcatgagacgccaggaatgg

SEQ ID NO: 4564522 - DNA, 25 bp, Homo sapien
aggatcatgagacgccaggaatggg

SEQ ID NO: 4564523 - DNA, 25 bp, Homo sapien
aggaggatcatgagacgccaggaat

SEQ ID NO: 4564524 - DNA, 25 bp, Homo sapien
gaggccagaccaactgcttggagga

SEQ ID NO: 4564525 - DNA, 25 bp, Homo sapien
gagggatctgaaacgaggccagacc

SEQ ID NO: 4564526 - DNA, 25 bp, Homo sapien
ctggaccacgggactacaagccagg

SEQ ID NO: 4564527 - DNA, 25 bp, Homo sapien
ccacgggactacaagccagggaggt

SEQ ID NO: 4564528 - DNA, 25 bp, Homo sapien
ttgatgggctgcaccttcagccgcc

SEQ ID NO: 4564529 - DNA, 25 bp, Homo sapien
ggtgtgagccacaaggtactcccca

SEQ ID NO: 4564530 - DNA, 25 bp, Homo sapien
ccaccccgaggccataatgtctttt

SEQ ID NO: 4564531 - DNA, 25 bp, Homo sapien
aattacatctagttccctttgtggc

SEQ ID NO: 4564532 - DNA, 25 bp, Homo sapien
gaacctttgagctgatggtgcttgc

SEQ ID NO: 4564533 - DNA, 25 bp, Homo sapien
cttgctatttgagtaaaaagagtac

SEQ ID NO: 4564534 - DNA, 25 bp, Homo sapien
tccacttctaggatgaacctttgag

SEQ ID NO: 4564535 - DNA, 25 bp, Homo sapien
aactgcataacagatatctgggacc

SEQ ID NO: 4564536 - DNA, 25 bp, Homo sapien
catcctagaccaagcccggctataa

SEQ ID NO: 4564537 - DNA, 25 bp, Homo sapien
ctggaaatccaaggtcaagatcaac

SEQ ID NO: 4564538 - DNA, 25 bp, Homo sapien
agcggctcagcctgcgaggcatgcc

SEQ ID NO: 4564539 - DNA, 25 bp, Homo sapien
cacagattgtatctgtcagggaaga

SEQ ID NO: 4564540 - DNA, 25 bp, Homo sapien
ctgcttgtcattatcagggattctc

SEQ ID NO: 4564541 - DNA, 25 bp, Homo sapien
tcaagctctgctgaatagcaacttt

SEQ ID NO: 4564542 - DNA, 25 bp, Homo sapien
taagctgggtaaagtctgcttgtca

SEQ ID NO: 4564543 - DNA, 25 bp, Homo sapien
gcaactttttagcttgagtcagagc

SEQ ID NO: 4564544 - DNA, 25 bp, Homo sapien
tccccttctgtcctgacctgtgcca

SEQ ID NO: 4564545 - DNA, 25 bp, Homo sapien
ccccttctgtcctgacctgtgccat

SEQ ID NO: 4564546 - DNA, 25 bp, Homo sapien
cgtccccttctgtcctgacctgtgc

SEQ ID NO: 4564547 - DNA, 25 bp, Homo sapien
gtccccttctgtcctgacctgtgcc

SEQ ID NO: 4564548 - DNA, 25 bp, Homo sapien
cagaaatacattttgggttgtctgt

SEQ ID NO: 4564549 - DNA, 25 bp, Homo sapien
atcagtggtcccctcccggcaccac

SEQ ID NO: 4564550 - DNA, 25 bp, Homo sapien
ggttgtctgtggtcagccggcagca

SEQ ID NO: 4564551 - DNA, 25 bp, Homo sapien
ctgcatcagtggtcccctcccggca

SEQ ID NO: 4564552 - DNA, 25 bp, Homo sapien
cctgagctccaggctaccccagaat

SEQ ID NO: 4564553 - DNA, 25 bp, Homo sapien
tgagctccaggctaccccagaattc

SEQ ID NO: 4564554 - DNA, 25 bp, Homo sapien
agctccaggctaccccagaattctg

SEQ ID NO: 4564555 - DNA, 25 bp, Homo sapien
ccaggctaccccagaattctgccca

SEQ ID NO: 4564556 - DNA, 25 bp, Homo sapien
tcagcgagcgggtgaggtggttgca

SEQ ID NO: 4564557 - DNA, 25 bp, Homo sapien
cgggtgaggtggttgcacagggaca

SEQ ID NO: 4564558 - DNA, 25 bp, Homo sapien
aggtcctcatccggcctcaggtgca

SEQ ID NO: 4564559 - DNA, 25 bp, Homo sapien
acagggacacgatgctgaaggaaag

SEQ ID NO: 4564560 - DNA, 25 bp, Homo sapien
cgcctgcggacatactgcttcctga

SEQ ID NO: 4564561 - DNA, 25 bp, Homo sapien
agattgaccacagactccctgcgca

SEQ ID NO: 4564562 - DNA, 25 bp, Homo sapien
ccatggcttgctggttgtccaccgg

SEQ ID NO: 4564563 - DNA, 25 bp, Homo sapien
tccctgcgcaccatggcttgctggt

SEQ ID NO: 4564564 - DNA, 25 bp, Homo sapien
catggcatcagggaccggaagaaag

SEQ ID NO: 4564565 - DNA, 25 bp, Homo sapien
tggcatcagggaccggaagaaagcc

SEQ ID NO: 4564566 - DNA, 25 bp, Homo sapien
gcaggaggtccatcccatggcagcc

SEQ ID NO: 4564567 - DNA, 25 bp, Homo sapien
atcagggaccggaagaaagccagtg

SEQ ID NO: 4564568 - DNA, 25 bp, Homo sapien
cccaaagctggagggggagtgcatg

SEQ ID NO: 4564569 - DNA, 25 bp, Homo sapien
cccaggagtcagtaggatgtacagc

SEQ ID NO: 4564570 - DNA, 25 bp, Homo sapien
agtcagtaggatgtacagctccggg

SEQ ID NO: 4564571 - DNA, 25 bp, Homo sapien
caggagtcagtaggatgtacagctc

SEQ ID NO: 4564572 - DNA, 25 bp, Homo sapien
tgattggcaccctcacccaggggag

SEQ ID NO: 4564573 - DNA, 25 bp, Homo sapien
cacccaggggaggaagagctaagcc

SEQ ID NO: 4564574 - DNA, 25 bp, Homo sapien
ccaggggaggaagagctaagcccat

SEQ ID NO: 4564575 - DNA, 25 bp, Homo sapien
ctcacccaggggaggaagagctaag

SEQ ID NO: 4564576 - DNA, 25 bp, Homo sapien
tccagcaagggccgggccacctgtg

SEQ ID NO: 4564577 - DNA, 25 bp, Homo sapien
aagattgacagtaggggtgacagct

SEQ ID NO: 4564578 - DNA, 25 bp, Homo sapien
gagtgaggtaggaagccaccatctt

SEQ ID NO: 4564579 - DNA, 25 bp, Homo sapien
aaaaaaggcatccagtcccacagac

SEQ ID NO: 4564580 - DNA, 25 bp, Homo sapien
taagaccttggagagactgtagaca

SEQ ID NO: 4564581 - DNA, 25 bp, Homo sapien
agcaaacctgcatgagtaccaccgg

SEQ ID NO: 4564582 - DNA, 25 bp, Homo sapien
actgtttttgccagccatccagggc

SEQ ID NO: 4564583 - DNA, 25 bp, Homo sapien
aagtatacaacttcccgtgacaggg

SEQ ID NO: 4564584 - DNA, 25 bp, Homo sapien
ctgacagggattcactggtgtcctg

SEQ ID NO: 4564585 - DNA, 25 bp, Homo sapien
ctctgacagggattcactggtgtcc

SEQ ID NO: 4564586 - DNA, 25 bp, Homo sapien
ttccagcctgccagaaattcctcag

SEQ ID NO: 4564587 - DNA, 25 bp, Homo sapien
gcttccagcctgccagaaattcctc

SEQ ID NO: 4564588 - DNA, 25 bp, Homo sapien
tcgtcctggatggtatcgtgggcct

SEQ ID NO: 4564589 - DNA, 25 bp, Homo sapien
atgcttccgaggctacatcccgtgg

SEQ ID NO: 4564590 - DNA, 25 bp, Homo sapien
gaactcatacctgagctgggacagg

SEQ ID NO: 4564591 - DNA, 25 bp, Homo sapien
cacacaggcaaaacgctcgaagttg

SEQ ID NO: 4564592 - DNA, 25 bp, Homo sapien
gggatgagcacctccttaggccata

SEQ ID NO: 4564593 - DNA, 25 bp, Homo sapien
taaggggtgctcacgcagacaagca

SEQ ID NO: 4564594 - DNA, 25 bp, Homo sapien
cattcactgcatgcgtcaggccatg

SEQ ID NO: 4564595 - DNA, 25 bp, Homo sapien
ggcagaaggcacacaagcggcctct

SEQ ID NO: 4564596 - DNA, 25 bp, Homo sapien
agcctcttggattgtgagccgtttc

SEQ ID NO: 4564597 - DNA, 25 bp, Homo sapien
atccaggggtgtctgagagcctctt

SEQ ID NO: 4564598 - DNA, 25 bp, Homo sapien
ggggtgtctgagagcctcttggatt

SEQ ID NO: 4564599 - DNA, 25 bp, Homo sapien
gagcctcttggattgtgagccgttt

SEQ ID NO: 4564600 - DNA, 25 bp, Homo sapien
ggtctctttaaccagaagcttccga

SEQ ID NO: 4564601 - DNA, 25 bp, Homo sapien
tcctcatcaaagtcgtaactcactg

SEQ ID NO: 4564602 - DNA, 25 bp, Homo sapien
gcttccgaataaagtccttggccag

SEQ ID NO: 4564603 - DNA, 25 bp, Homo sapien
cgctcgtctggctgaagaattcctc

SEQ ID NO: 4564604 - DNA, 25 bp, Homo sapien
ctgagtacgacagacagggaatcaa

SEQ ID NO: 4564605 - DNA, 25 bp, Homo sapien
gagtacgacagacagggaatcaaat

SEQ ID NO: 4564606 - DNA, 25 bp, Homo sapien
tgagtacgacagacagggaatcaaa

SEQ ID NO: 4564607 - DNA, 25 bp, Homo sapien
taatggaaggccagccaaaggatag

SEQ ID NO: 4564608 - DNA, 25 bp, Homo sapien
gaataaagaggttgtcagcagtcag

SEQ ID NO: 4564609 - DNA, 25 bp, Homo sapien
tgtgatccccagcaagacaagcaga

SEQ ID NO: 4564610 - DNA, 25 bp, Homo sapien
ttacaggagcaacttgagcagagcc

SEQ ID NO: 4564611 - DNA, 25 bp, Homo sapien
tcagggacctggctcatagggatca

SEQ ID NO: 4564612 - DNA, 25 bp, Homo sapien
gactcttactccagggtgctataaa

SEQ ID NO: 4564613 - DNA, 25 bp, Homo sapien
actgtgcatgttccagagtcagggc

SEQ ID NO: 4564614 - DNA, 25 bp, Homo sapien
tcagggctaggagacttgcgcatgt

SEQ ID NO: 4564615 - DNA, 25 bp, Homo sapien
ggatgtaggtgatgacgcctatgct

SEQ ID NO: 4564616 - DNA, 25 bp, Homo sapien
aggatgtaggtgatgacgcctatgc

SEQ ID NO: 4564617 - DNA, 25 bp, Homo sapien
gatgtaggtgatgacgcctatgctc

SEQ ID NO: 4564618 - DNA, 25 bp, Homo sapien
cagaccctggatgccgtctcatgct

SEQ ID NO: 4564619 - DNA, 25 bp, Homo sapien
tggatgccgtctcatgctccacacc

SEQ ID NO: 4564620 - DNA, 25 bp, Homo sapien
agcagaccctggatgccgtctcatg

SEQ ID NO: 4564621 - DNA, 25 bp, Homo sapien
cctggatgccgtctcatgctccaca

SEQ ID NO: 4564622 - DNA, 25 bp, Homo sapien
aggggctcgtagttcacaatttctg

SEQ ID NO: 4564623 - DNA, 25 bp, Homo sapien
caggggctcgtagttcacaatttct

SEQ ID NO: 4564624 - DNA, 25 bp, Homo sapien
ggtgcagagactaggagagatggct

SEQ ID NO: 4564625 - DNA, 25 bp, Homo sapien
caggagctgagccaacgatgtgatg

SEQ ID NO: 4564626 - DNA, 25 bp, Homo sapien
ctccaggggagtggtccagagccat

SEQ ID NO: 4564627 - DNA, 25 bp, Homo sapien
cagagccatcacgtttggagccatc

SEQ ID NO: 4564628 - DNA, 25 bp, Homo sapien
tcaactgcgaatggaaaaggtggag

SEQ ID NO: 4564629 - DNA, 25 bp, Homo sapien
cagagttcatttaaatggctcccat

SEQ ID NO: 4564630 - DNA, 25 bp, Homo sapien
tactttaagactcagggaactacgc

SEQ ID NO: 4564631 - DNA, 25 bp, Homo sapien
gctatacggtaatccatcgtgtgaa

SEQ ID NO: 4564632 - DNA, 25 bp, Homo sapien
caaggcacctgttggagaaaataat

SEQ ID NO: 4564633 - DNA, 25 bp, Homo sapien
gcattctacggtggctgcagagcct

SEQ ID NO: 4564634 - DNA, 25 bp, Homo sapien
tgcctactggttgggttgccttgaa

SEQ ID NO: 4564635 - DNA, 25 bp, Homo sapien
tacaggctatttcttcatgacccca

SEQ ID NO: 4564636 - DNA, 25 bp, Homo sapien
tctatttcgtgagccagaccaaagt

SEQ ID NO: 4564637 - DNA, 25 bp, Homo sapien
tcaatcagcttgatgtgtggaatgg

SEQ ID NO: 4564638 - DNA, 25 bp, Homo sapien
tgggaatattcttgtctaacaacat

SEQ ID NO: 4564639 - DNA, 25 bp, Homo sapien
tcaactccatcttctatttcgtgag

SEQ ID NO: 4564640 - DNA, 25 bp, Homo sapien
ggcgtcttgcatcctgcatgttcca

SEQ ID NO: 4564641 - DNA, 25 bp, Homo sapien
taggattcctggtatcccctgtggc

SEQ ID NO: 4564642 - DNA, 25 bp, Homo sapien
gaggaaatgaattgaaagaatccag

SEQ ID NO: 4564643 - DNA, 25 bp, Homo sapien
ggctccagagtgcattcctcctata

SEQ ID NO: 4564644 - DNA, 25 bp, Homo sapien
gtgcctgctgtggtgccgaccagaa

SEQ ID NO: 4564645 - DNA, 25 bp, Homo sapien
gagaggccaacgtgctcctttgtgt

SEQ ID NO: 4564646 - DNA, 25 bp, Homo sapien
cagggaggcacccatgggagaggcc

SEQ ID NO: 4564647 - DNA, 25 bp, Homo sapien
cgaccagaaggtggttgtccggtgg

SEQ ID NO: 4564648 - DNA, 25 bp, Homo sapien
tccatcccgtggaaggtacatctag

SEQ ID NO: 4564649 - DNA, 25 bp, Homo sapien
tgcggttcctgggtgatactgagcc

SEQ ID NO: 4564650 - DNA, 25 bp, Homo sapien
ctagtgctaccaggtaccgaagggc

SEQ ID NO: 4564651 - DNA, 25 bp, Homo sapien
tgtttcctggtgatccatcccgtgg

SEQ ID NO: 4564652 - DNA, 25 bp, Homo sapien
tccttggcagcgagcatttgtttgt

SEQ ID NO: 4564653 - DNA, 25 bp, Homo sapien
tctgtggtggatgtacaacacacac

SEQ ID NO: 4564654 - DNA, 25 bp, Homo sapien
ggatgatttccactctgcagagaca

SEQ ID NO: 4564655 - DNA, 25 bp, Homo sapien
agacagagagcgcactccttggcag

SEQ ID NO: 4564656 - DNA, 25 bp, Homo sapien
ccttgagtgattagcaggaaatcca

SEQ ID NO: 4564657 - DNA, 25 bp, Homo sapien
ggtggcaaggatggtgaaagtgttc

SEQ ID NO: 4564658 - DNA, 25 bp, Homo sapien
tgaaagtgttccggaggaaatggca

SEQ ID NO: 4564659 - DNA, 25 bp, Homo sapien
aatggcaattctgttgggccttgag

SEQ ID NO: 4564660 - DNA, 25 bp, Homo sapien
tcaggatgaacagggtatccatcat

SEQ ID NO: 4564661 - DNA, 25 bp, Homo sapien
taatcatatcaggatgaacagggta

SEQ ID NO: 4564662 - DNA, 25 bp, Homo sapien
tattgttggctatactctattgtgc

SEQ ID NO: 4564663 - DNA, 25 bp, Homo sapien
caaagcaattatgctcttttagtaa

SEQ ID NO: 4564664 - DNA, 25 bp, Homo sapien
ctttttagctattgtaagtgagatt

SEQ ID NO: 4564665 - DNA, 25 bp, Homo sapien
gtttctttttagctattgtaagtga

SEQ ID NO: 4564666 - DNA, 25 bp, Homo sapien
tagagatctttcacatattttgttc

SEQ ID NO: 4564667 - DNA, 25 bp, Homo sapien
atcctaggtttctttttagctattg

SEQ ID NO: 4564668 - DNA, 25 bp, Homo sapien
aggctttcaggttttacccactcag

SEQ ID NO: 4564669 - DNA, 25 bp, Homo sapien
gttggtataatgcatcaatgttcat

SEQ ID NO: 4564670 - DNA, 25 bp, Homo sapien
gctttcaggttttacccactcagta

SEQ ID NO: 4564671 - DNA, 25 bp, Homo sapien
ttccttaactctgttggtataatgc

SEQ ID NO: 4564672 - DNA, 25 bp, Homo sapien
taaagacttttattgtggcctaaca

SEQ ID NO: 4564673 - DNA, 25 bp, Homo sapien
agccactgcacctggccaaaaattt

SEQ ID NO: 4564674 - DNA, 25 bp, Homo sapien
aaagacttttattgtggcctaacat

SEQ ID NO: 4564675 - DNA, 25 bp, Homo sapien
cactgcacctggccaaaaatttttt

SEQ ID NO: 4564676 - DNA, 25 bp, Homo sapien
gaaagcaaggtcctccaatgttgga

SEQ ID NO: 4564677 - DNA, 25 bp, Homo sapien
atcttcttgcttaactgaccctttt

SEQ ID NO: 4564678 - DNA, 25 bp, Homo sapien
tgtctctctaaagtttttatcctga

SEQ ID NO: 4564679 - DNA, 25 bp, Homo sapien
gtccaatgctgaaagcaaggtcctc

SEQ ID NO: 4564680 - DNA, 25 bp, Homo sapien
ctcttttcttattagccttgatagc

SEQ ID NO: 4564681 - DNA, 25 bp, Homo sapien
cttattagccttgatagcagtctat

SEQ ID NO: 4564682 - DNA, 25 bp, Homo sapien
tttcttattagccttgatagcagtc

SEQ ID NO: 4564683 - DNA, 25 bp, Homo sapien
tcttttcttattagccttgatagca

SEQ ID NO: 4564684 - DNA, 25 bp, Homo sapien
tctgacgcattcttcagtacatcaa

SEQ ID NO: 4564685 - DNA, 25 bp, Homo sapien
ttctgctgctaacagactctgacgc

SEQ ID NO: 4564686 - DNA, 25 bp, Homo sapien
tgatgcttgtggacgtttattgatg

SEQ ID NO: 4564687 - DNA, 25 bp, Homo sapien
cctctgtgtattttcgaatagtcta

SEQ ID NO: 4564688 - DNA, 25 bp, Homo sapien
tcggctccctgcaacgaggctagga

SEQ ID NO: 4564689 - DNA, 25 bp, Homo sapien
gattaaataccagcctgaagagagg

SEQ ID NO: 4564690 - DNA, 25 bp, Homo sapien
cagtgaaggcttctattcggtcatc

SEQ ID NO: 4564691 - DNA, 25 bp, Homo sapien
tccaaaggtaggcaagagagtgaac

SEQ ID NO: 4564692 - DNA, 25 bp, Homo sapien
gaaggtggacatttccgtggcatca

SEQ ID NO: 4564693 - DNA, 25 bp, Homo sapien
agaaagaagggctggtcggcactgg

SEQ ID NO: 4564694 - DNA, 25 bp, Homo sapien
agaagggctggtcggcactgggccc

SEQ ID NO: 4564695 - DNA, 25 bp, Homo sapien
aaagaagggctggtcggcactgggc

SEQ ID NO: 4564696 - DNA, 25 bp, Homo sapien
agggctggtcggcactgggcccatc

SEQ ID NO: 4564697 - DNA, 25 bp, Homo sapien
tctttgtgtgaaggtagttcacccc

SEQ ID NO: 4564698 - DNA, 25 bp, Homo sapien
tctgggccaggaaatcgaagagctc

SEQ ID NO: 4564699 - DNA, 25 bp, Homo sapien
gatctgcttaatgaagctggtggcc

SEQ ID NO: 4564700 - DNA, 25 bp, Homo sapien
tgagatcaaagtgagcaattttctt

SEQ ID NO: 4564701 - DNA, 25 bp, Homo sapien
acattgtggtgcagcacctgccgca

SEQ ID NO: 4564702 - DNA, 25 bp, Homo sapien
gatgagcaccacgtcggtgcggttc

SEQ ID NO: 4564703 - DNA, 25 bp, Homo sapien
ggtgcggttctcatagacgtcgtgc

SEQ ID NO: 4564704 - DNA, 25 bp, Homo sapien
acttcttcacgatggcaaactggcc

SEQ ID NO: 4564705 - DNA, 25 bp, Homo sapien
cagatgaaatcacaatgtccataag

SEQ ID NO: 4564706 - DNA, 25 bp, Homo sapien
tttgggtagagtttggagaggaggc

SEQ ID NO: 4564707 - DNA, 25 bp, Homo sapien
ggaggcagcctaacaaggttaatca

SEQ ID NO: 4564708 - DNA, 25 bp, Homo sapien
tccaggtttgggtagagtttggaga

SEQ ID NO: 4564709 - DNA, 25 bp, Homo sapien
caagcagccgctggcagggcctggc

SEQ ID NO: 4564710 - DNA, 25 bp, Homo sapien
agcagccgctggcagggcctggcat

SEQ ID NO: 4564711 - DNA, 25 bp, Homo sapien
tcaagcagccgctggcagggcctgg

SEQ ID NO: 4564712 - DNA, 25 bp, Homo sapien
ctcaagcagccgctggcagggcctg

SEQ ID NO: 4564713 - DNA, 25 bp, Homo sapien
ctgctcaacctgtagaggggagcct

SEQ ID NO: 4564714 - DNA, 25 bp, Homo sapien
tgctcaacctgtagaggggagcctc

SEQ ID NO: 4564715 - DNA, 25 bp, Homo sapien
tctgctcaacctgtagaggggagcc

SEQ ID NO: 4564716 - DNA, 25 bp, Homo sapien
ctctgctcaacctgtagaggggagc

SEQ ID NO: 4564717 - DNA, 25 bp, Homo sapien
cacccgggccttattacacatttgc

SEQ ID NO: 4564718 - DNA, 25 bp, Homo sapien
catgcatgagcaagaggaatcataa

SEQ ID NO: 4564719 - DNA, 25 bp, Homo sapien
cactccaggacacgagcatggagaa

SEQ ID NO: 4564720 - DNA, 25 bp, Homo sapien
tatgtgcctctcatcataggttgcc

SEQ ID NO: 4564721 - DNA, 25 bp, Homo sapien
agcatacctggactttgtccccaca

SEQ ID NO: 4564722 - DNA, 25 bp, Homo sapien
cacacccagactcctgagatgtcac

SEQ ID NO: 4564723 - DNA, 25 bp, Homo sapien
ttctccctgaacaaatacgtgcacc

SEQ ID NO: 4564724 - DNA, 25 bp, Homo sapien
tacgtgcaccaagcatacctggact

SEQ ID NO: 4564725 - DNA, 25 bp, Homo sapien
cagcatcaccaggattcgcctactt

SEQ ID NO: 4564726 - DNA, 25 bp, Homo sapien
caggattcgcctacttctttgctga

SEQ ID NO: 4564727 - DNA, 25 bp, Homo sapien
catcaccaggattcgcctacttctt

SEQ ID NO: 4564728 - DNA, 25 bp, Homo sapien
accaggattcgcctacttctttgct

SEQ ID NO: 4564729 - DNA, 25 bp, Homo sapien
gctgagtgatcaagagcaaatcagt

SEQ ID NO: 4564730 - DNA, 25 bp, Homo sapien
gagtgatcaagagcaaatcagtcat

SEQ ID NO: 4564731 - DNA, 25 bp, Homo sapien
aatcagctgagtgatcaagagcaaa

SEQ ID NO: 4564732 - DNA, 25 bp, Homo sapien
tcagctgagtgatcaagagcaaatc

SEQ ID NO: 4564733 - DNA, 25 bp, Homo sapien
cccatagggagcccgactccaggaa

SEQ ID NO: 4564734 - DNA, 25 bp, Homo sapien
aagtagacattattcttccctccca

SEQ ID NO: 4564735 - DNA, 25 bp, Homo sapien
gccaagaaggaagtagacattattc

SEQ ID NO: 4564736 - DNA, 25 bp, Homo sapien
cctcccacccatagggagcccgact

SEQ ID NO: 4564737 - DNA, 25 bp, Homo sapien
gagccaatttgccacagatctagaa

SEQ ID NO: 4564738 - DNA, 25 bp, Homo sapien
aaggaccgcatgttgtatgattgca

SEQ ID NO: 4564739 - DNA, 25 bp, Homo sapien
aaaatactcacatgctttcaccagg

SEQ ID NO: 4564740 - DNA, 25 bp, Homo sapien
ccccattatagagatcaggaagttg

SEQ ID NO: 4564741 - DNA, 25 bp, Homo sapien
cttgcattcagtcctatggaagcaa

SEQ ID NO: 4564742 - DNA, 25 bp, Homo sapien
tgcattcagtcctatggaagcaaat

SEQ ID NO: 4564743 - DNA, 25 bp, Homo sapien
cattcagtcctatggaagcaaatac

SEQ ID NO: 4564744 - DNA, 25 bp, Homo sapien
gcattcagtcctatggaagcaaata

SEQ ID NO: 4564745 - DNA, 25 bp, Homo sapien
cccatggcccagtaagaacacttca

SEQ ID NO: 4564746 - DNA, 25 bp, Homo sapien
agtggcacccgcaggctttactgtg

SEQ ID NO: 4564747 - DNA, 25 bp, Homo sapien
cactgtgtctaatctcagcagaagc

SEQ ID NO: 4564748 - DNA, 25 bp, Homo sapien
gccatggctctagatgagtgattcc

SEQ ID NO: 4564749 - DNA, 25 bp, Homo sapien
gagaaaatcctgtgagccagcttct

SEQ ID NO: 4564750 - DNA, 25 bp, Homo sapien
gcaggagttccaggtcccttaagga

SEQ ID NO: 4564751 - DNA, 25 bp, Homo sapien
tgcttcgccaaatggtacgctctca

SEQ ID NO: 4564752 - DNA, 25 bp, Homo sapien
cagaccccttggcaggagttccagg

SEQ ID NO: 4564753 - DNA, 25 bp, Homo sapien
tccaaccctgaactgggccatagtc

SEQ ID NO: 4564754 - DNA, 25 bp, Homo sapien
cctgtttgtggccactctccaaccc

SEQ ID NO: 4564755 - DNA, 25 bp, Homo sapien
tcctgtggctacaagtctcatgggt

SEQ ID NO: 4564756 - DNA, 25 bp, Homo sapien
tctcatgggtttaagaacctcatca

SEQ ID NO: 4564757 - DNA, 25 bp, Homo sapien
ctccatgtttggactcctcattgag

SEQ ID NO: 4564758 - DNA, 25 bp, Homo sapien
agctcctctccgatgtcataaaagt

SEQ ID NO: 4564759 - DNA, 25 bp, Homo sapien
cttctgctgcttgaatggctccatg

SEQ ID NO: 4564760 - DNA, 25 bp, Homo sapien
ctctccgatgtcataaaagtcctcc

SEQ ID NO: 4564761 - DNA, 25 bp, Homo sapien
ggaagaaacctgtggttaggacagc

SEQ ID NO: 4564762 - DNA, 25 bp, Homo sapien
agaaacctgtggttaggacagccat

SEQ ID NO: 4564763 - DNA, 25 bp, Homo sapien
tgggaagaaacctgtggttaggaca

SEQ ID NO: 4564764 - DNA, 25 bp, Homo sapien
tgaaatgggaagaaacctgtggtta

SEQ ID NO: 4564765 - DNA, 25 bp, Homo sapien
aaagactgtctgcatcgtctcctgg

SEQ ID NO: 4564766 - DNA, 25 bp, Homo sapien
ctgtctgcatcgtctcctgggatcc

SEQ ID NO: 4564767 - DNA, 25 bp, Homo sapien
gactgtctgcatcgtctcctgggat

SEQ ID NO: 4564768 - DNA, 25 bp, Homo sapien
ccagaaaagactgtctgcatcgtct

SEQ ID NO: 4564769 - DNA, 25 bp, Homo sapien
aacatcccaagagcagggcgcaggg

SEQ ID NO: 4564770 - DNA, 25 bp, Homo sapien
gacaacatcccaagagcagggcgca

SEQ ID NO: 4564771 - DNA, 25 bp, Homo sapien
gccatgtgccactctggacaacatc

SEQ ID NO: 4564772 - DNA, 25 bp, Homo sapien
cactctggacaacatcccaagagca

SEQ ID NO: 4564773 - DNA, 25 bp, Homo sapien
ggagcagacctccagccacatccac

SEQ ID NO: 4564774 - DNA, 25 bp, Homo sapien
cagacctccagccacatccacacac

SEQ ID NO: 4564775 - DNA, 25 bp, Homo sapien
agcagacctccagccacatccacac

SEQ ID NO: 4564776 - DNA, 25 bp, Homo sapien
cccagaggagcagacctccagccac

SEQ ID NO: 4564777 - DNA, 25 bp, Homo sapien
aacatcttgggagatgagcggtttg

SEQ ID NO: 4564778 - DNA, 25 bp, Homo sapien
taggtcaacaggactctcccaggaa

SEQ ID NO: 4564779 - DNA, 25 bp, Homo sapien
gaaggtgctgaatcatcagtggtgc

SEQ ID NO: 4564780 - DNA, 25 bp, Homo sapien
tgagggtgctcaaaaaacatcttgg

SEQ ID NO: 4564781 - DNA, 25 bp, Homo sapien
aatgccccgggccacggcgtcaggc

SEQ ID NO: 4564782 - DNA, 25 bp, Homo sapien
gcagctcccgcgctcgggtgccggc

SEQ ID NO: 4564783 - DNA, 25 bp, Homo sapien
tgccccgggccacggcgtcaggcat

SEQ ID NO: 4564784 - DNA, 25 bp, Homo sapien
tcgggtgccggccacaatgccccgg

SEQ ID NO: 4564785 - DNA, 25 bp, Homo sapien
ccatcgagcccgcagacgggtgcta

SEQ ID NO: 4564786 - DNA, 25 bp, Homo sapien
cgagcccgcagacgggtgctactca

SEQ ID NO: 4564787 - DNA, 25 bp, Homo sapien
gtcccgcccatcgagcccgcagacg

SEQ ID NO: 4564788 - DNA, 25 bp, Homo sapien
atcgagcccgcagacgggtgctact

SEQ ID NO: 4564789 - DNA, 25 bp, Homo sapien
ctgccgcggtcgcggccgcggcagg

SEQ ID NO: 4564790 - DNA, 25 bp, Homo sapien
tgccgcggtcgcggccgcggcaggc

SEQ ID NO: 4564791 - DNA, 25 bp, Homo sapien
tgggctcggccctgcagtcctctcc

SEQ ID NO: 4564792 - DNA, 25 bp, Homo sapien
gctgccgcggtcgcggccgcggcag

SEQ ID NO: 4564793 - DNA, 25 bp, Homo sapien
ctctaatagaggacttgggaatggg

SEQ ID NO: 4564794 - DNA, 25 bp, Homo sapien
tctctaatagaggacttgggaatgg

SEQ ID NO: 4564795 - DNA, 25 bp, Homo sapien
tgtgctcaatgctgaagggccagga

SEQ ID NO: 4564796 - DNA, 25 bp, Homo sapien
ttgtgctgagttggcaagaacctga

SEQ ID NO: 4564797 - DNA, 25 bp, Homo sapien
cttttgtgctgagttggcaagaacc

SEQ ID NO: 4564798 - DNA, 25 bp, Homo sapien
atgatactgggagacacgagaatgt

SEQ ID NO: 4564799 - DNA, 25 bp, Homo sapien
ttgaggcagaagtttgagaccagcc

SEQ ID NO: 4564800 - DNA, 25 bp, Homo sapien
agcctgggcaacatagcgagaccct

SEQ ID NO: 4564801 - DNA, 25 bp, Homo sapien
ccaattccggacactggaggattgc

SEQ ID NO: 4564802 - DNA, 25 bp, Homo sapien
cctgggcaacatagcgagaccctct

SEQ ID NO: 4564803 - DNA, 25 bp, Homo sapien
aatgctcgactggaaatcaggcctc

SEQ ID NO: 4564804 - DNA, 25 bp, Homo sapien
tggacacgtcactcaacatttcctg

SEQ ID NO: 4564805 - DNA, 25 bp, Homo sapien
tatcctaagcccataggtcctgacc

SEQ ID NO: 4564806 - DNA, 25 bp, Homo sapien
catgctatgtgagtatggacacgtc

SEQ ID NO: 4564807 - DNA, 25 bp, Homo sapien
gatccactcattatgaccaaggtga

SEQ ID NO: 4564808 - DNA, 25 bp, Homo sapien
gccaagattaaaggtcaggcctctt

SEQ ID NO: 4564809 - DNA, 25 bp, Homo sapien
aaacacaccagtagctgtaggagac

SEQ ID NO: 4564810 - DNA, 25 bp, Homo sapien
tggaaggccaatatgcaaaaaacac

SEQ ID NO: 4564811 - DNA, 25 bp, Homo sapien
acaacagagcatatggcttgaaaag

SEQ ID NO: 4564812 - DNA, 25 bp, Homo sapien
taacccttgccaaacatggaccaga

SEQ ID NO: 4564813 - DNA, 25 bp, Homo sapien
tacagactatcagctgcttttgtgc

SEQ ID NO: 4564814 - DNA, 25 bp, Homo sapien
acttctgactatatatgtacctcta

SEQ ID NO: 4564815 - DNA, 25 bp, Homo sapien
cactccgtgtggaattctccacagg

SEQ ID NO: 4564816 - DNA, 25 bp, Homo sapien
ctcagctgcactccgtgtggaattc

SEQ ID NO: 4564817 - DNA, 25 bp, Homo sapien
gctgcactccgtgtggaattctcca

SEQ ID NO: 4564818 - DNA, 25 bp, Homo sapien
ccgtgtggaattctccacagggtgg

SEQ ID NO: 4564819 - DNA, 25 bp, Homo sapien
atatcaaacaattacaggccagtgg

SEQ ID NO: 4564820 - DNA, 25 bp, Homo sapien
cacagtagatatttgacacgaaaaa

SEQ ID NO: 4564821 - DNA, 25 bp, Homo sapien
atagttgtatcagaatgagcatcag

SEQ ID NO: 4564822 - DNA, 25 bp, Homo sapien
aaatatatcaaacaattacaggcca

SEQ ID NO: 4564823 - DNA, 25 bp, Homo sapien
gtcaggttcaaggacacactgttcc

SEQ ID NO: 4564824 - DNA, 25 bp, Homo sapien
catgcccgggcaatagctggtatta

SEQ ID NO: 4564825 - DNA, 25 bp, Homo sapien
tattgtcaacaccaatacatgagct

SEQ ID NO: 4564826 - DNA, 25 bp, Homo sapien
tacatgagctatcagtttggcaaca

SEQ ID NO: 4564827 - DNA, 25 bp, Homo sapien
tgaagactatgctacaatgaatacc

SEQ ID NO: 4564828 - DNA, 25 bp, Homo sapien
gagacgactatattcttaatgtgga

SEQ ID NO: 4564829 - DNA, 25 bp, Homo sapien
tccacaaaggcaggaatgtatctca

SEQ ID NO: 4564830 - DNA, 25 bp, Homo sapien
tggaaaacggctcaatattattgtc

SEQ ID NO: 4564831 - DNA, 25 bp, Homo sapien
tctgggctgccgctgaaatgtctca

SEQ ID NO: 4564832 - DNA, 25 bp, Homo sapien
cgtgggctctagtgcactcggagtc

SEQ ID NO: 4564833 - DNA, 25 bp, Homo sapien
agagctcataagtcaaggtccccag

SEQ ID NO: 4564834 - DNA, 25 bp, Homo sapien
ggaagagccaataaccaattgtgca

SEQ ID NO: 4564835 - DNA, 25 bp, Homo sapien
taaaccagtcaacatccgtgggctc

SEQ ID NO: 4564836 - DNA, 25 bp, Homo sapien
tgttgagtgggttccttcagaaatg

SEQ ID NO: 4564837 - DNA, 25 bp, Homo sapien
ttgagtgggttccttcagaaatgta

SEQ ID NO: 4564838 - DNA, 25 bp, Homo sapien
tgagtgggttccttcagaaatgtag

SEQ ID NO: 4564839 - DNA, 25 bp, Homo sapien
gttgagtgggttccttcagaaatgt

SEQ ID NO: 4564840 - DNA, 25 bp, Homo sapien
catcagagacatagggacaaatccc

SEQ ID NO: 4564841 - DNA, 25 bp, Homo sapien
tacttcttcccaactcggtatctaa

SEQ ID NO: 4564842 - DNA, 25 bp, Homo sapien
catatcagggttggaagtttcttca

SEQ ID NO: 4564843 - DNA, 25 bp, Homo sapien
cctgccctgctactgactcaggaaa

SEQ ID NO: 4564844 - DNA, 25 bp, Homo sapien
taaagacgtctactttccagagaac

SEQ ID NO: 4564845 - DNA, 25 bp, Homo sapien
tagacatgagctaccctccaagacc

SEQ ID NO: 4564846 - DNA, 25 bp, Homo sapien
tactggttaagctatccctcctggc

SEQ ID NO: 4564847 - DNA, 25 bp, Homo sapien
ggccctgctgcacctatagacatga

SEQ ID NO: 4564848 - DNA, 25 bp, Homo sapien
tttttgtaaagaccgcgtatcgcca

SEQ ID NO: 4564849 - DNA, 25 bp, Homo sapien
accgcgtatcgccatattgcccaag

SEQ ID NO: 4564850 - DNA, 25 bp, Homo sapien
aagaccgcgtatcgccatattgccc

SEQ ID NO: 4564851 - DNA, 25 bp, Homo sapien
tgtaaagaccgcgtatcgccatatt

SEQ ID NO: 4564852 - DNA, 25 bp, Homo sapien
tatgaactatacttcagggtaacca

SEQ ID NO: 4564853 - DNA, 25 bp, Homo sapien
aatgcacaaactgaatctaaccagg

SEQ ID NO: 4564854 - DNA, 25 bp, Homo sapien
caaagcaacaggtatagaatcactc

SEQ ID NO: 4564855 - DNA, 25 bp, Homo sapien
aatttataggcctctgatgtgatgc

SEQ ID NO: 4564856 - DNA, 25 bp, Homo sapien
tgaatcttgacttcaagaagctgac

SEQ ID NO: 4564857 - DNA, 25 bp, Homo sapien
tataagatcatagcaggaacacaga

SEQ ID NO: 4564858 - DNA, 25 bp, Homo sapien
tttacagggcatcataaaccactag

SEQ ID NO: 4564859 - DNA, 25 bp, Homo sapien
gaagctgacagctagctggtcaggc

SEQ ID NO: 4564860 - DNA, 25 bp, Homo sapien
gacaagggacttgtatttagactat

SEQ ID NO: 4564861 - DNA, 25 bp, Homo sapien
tactatgaattaactgtgatatcca

SEQ ID NO: 4564862 - DNA, 25 bp, Homo sapien
tccatattcttgctcaatagtaggg

SEQ ID NO: 4564863 - DNA, 25 bp, Homo sapien
ttttgtactgtaaaggacaccatca

SEQ ID NO: 4564864 - DNA, 25 bp, Homo sapien
gtaaacatcgctgaagttttactct

SEQ ID NO: 4564865 - DNA, 25 bp, Homo sapien
taaacatcgctgaagttttactctt

SEQ ID NO: 4564866 - DNA, 25 bp, Homo sapien
aaacatcgctgaagttttactctta

SEQ ID NO: 4564867 - DNA, 25 bp, Homo sapien
caggcattatagtatcagctgggca

SEQ ID NO: 4564868 - DNA, 25 bp, Homo sapien
gagcatcattatcctcaagagaggt

SEQ ID NO: 4564869 - DNA, 25 bp, Homo sapien
cataactgagatactttgggtttca

SEQ ID NO: 4564870 - DNA, 25 bp, Homo sapien
catactcgctgtgatcctgcataag

SEQ ID NO: 4564871 - DNA, 25 bp, Homo sapien
gttccttaactcctgcgtcaaacag

SEQ ID NO: 4564872 - DNA, 25 bp, Homo sapien
gggatttaccaatatataccatgag

SEQ ID NO: 4564873 - DNA, 25 bp, Homo sapien
taacccaattattccacgtatagga

SEQ ID NO: 4564874 - DNA, 25 bp, Homo sapien
tatataaagttgttcggtcaggcgc

SEQ ID NO: 4564875 - DNA, 25 bp, Homo sapien
gagccgccatgccaatgggaatttt

SEQ ID NO: 4564876 - DNA, 25 bp, Homo sapien
tgtgagccgccatgccaatgggaat

SEQ ID NO: 4564877 - DNA, 25 bp, Homo sapien
gtgagccgccatgccaatgggaatt

SEQ ID NO: 4564878 - DNA, 25 bp, Homo sapien
gccgccatgccaatgggaatttttt

SEQ ID NO: 4564879 - DNA, 25 bp, Homo sapien
cctcctaccaggacttctacccata

SEQ ID NO: 4564880 - DNA, 25 bp, Homo sapien
tccaaaatactgggaatccaacctc

SEQ ID NO: 4564881 - DNA, 25 bp, Homo sapien
acaaatccaaaatactgggaatcca

SEQ ID NO: 4564882 - DNA, 25 bp, Homo sapien
acctcctaccaggacttctacccat

SEQ ID NO: 4564883 - DNA, 25 bp, Homo sapien
ctatgtagaaaccagaagagtcact

SEQ ID NO: 4564884 - DNA, 25 bp, Homo sapien
tatgtagaaaccagaagagtcactg

SEQ ID NO: 4564885 - DNA, 25 bp, Homo sapien
tggtgatggaagcaatgctagtctg

SEQ ID NO: 4564886 - DNA, 25 bp, Homo sapien
agcaatgctagtctgacaccaccca

SEQ ID NO: 4564887 - DNA, 25 bp, Homo sapien
ggcgtgaacctgataataaccagat

SEQ ID NO: 4564888 - DNA, 25 bp, Homo sapien
tgaacttccacacaactttccgaga

SEQ ID NO: 4564889 - DNA, 25 bp, Homo sapien
aatgaggtactgttggcgtgaacct

SEQ ID NO: 4564890 - DNA, 25 bp, Homo sapien
ataagagtcgccaaagagcaatgag

SEQ ID NO: 4564891 - DNA, 25 bp, Homo sapien
aaagaatcatcagagataagatatt

SEQ ID NO: 4564892 - DNA, 25 bp, Homo sapien
ctaaagaatcatcagagataagata

SEQ ID NO: 4564893 - DNA, 25 bp, Homo sapien
taaagaatcatcagagataagatat

SEQ ID NO: 4564894 - DNA, 25 bp, Homo sapien
ccgagatcccgccattgcattccaa

SEQ ID NO: 4564895 - DNA, 25 bp, Homo sapien
cgagatcccgccattgcattccaac

SEQ ID NO: 4564896 - DNA, 25 bp, Homo sapien
gggccagtccccaactcgactgtca

SEQ ID NO: 4564897 - DNA, 25 bp, Homo sapien
cagcggtagcaagagtgcgtgtcca

SEQ ID NO: 4564898 - DNA, 25 bp, Homo sapien
acaagcgccctcagcggtagcaaga

SEQ ID NO: 4564899 - DNA, 25 bp, Homo sapien
tgactttgccggatagagtggctgt

SEQ ID NO: 4564900 - DNA, 25 bp, Homo sapien
agtagtgcaatcaggccagctttgc

SEQ ID NO: 4564901 - DNA, 25 bp, Homo sapien
ctagtagtgcaatcaggccagcttt

SEQ ID NO: 4564902 - DNA, 25 bp, Homo sapien
tagtgcaatcaggccagctttgctt

SEQ ID NO: 4564903 - DNA, 25 bp, Homo sapien
tagtagtgcaatcaggccagctttg

SEQ ID NO: 4564904 - DNA, 25 bp, Homo sapien
ggcagctcccggctcagagaggccg

SEQ ID NO: 4564905 - DNA, 25 bp, Homo sapien
gctcccggctcagagaggccggaga

SEQ ID NO: 4564906 - DNA, 25 bp, Homo sapien
cagctcccggctcagagaggccgga

SEQ ID NO: 4564907 - DNA, 25 bp, Homo sapien
tcccggctcagagaggccggagagc

SEQ ID NO: 4564908 - DNA, 25 bp, Homo sapien
ttcctggtcttcaaatgggccgaga

SEQ ID NO: 4564909 - DNA, 25 bp, Homo sapien
cagcctcgggattgatcaacttcct

SEQ ID NO: 4564910 - DNA, 25 bp, Homo sapien
tggcgactgtcccaatcgcgccacc

SEQ ID NO: 4564911 - DNA, 25 bp, Homo sapien
accgtctctcagcagcctcgggatt

SEQ ID NO: 4564912 - DNA, 25 bp, Homo sapien
cagacggagtagctcgaaggaccta

SEQ ID NO: 4564913 - DNA, 25 bp, Homo sapien
gccagacggagtagctcgaaggacc

SEQ ID NO: 4564914 - DNA, 25 bp, Homo sapien
tgctttgctcgatttcggcgggaca

SEQ ID NO: 4564915 - DNA, 25 bp, Homo sapien
gggcctcaaggactacaagttccag

SEQ ID NO: 4564916 - DNA, 25 bp, Homo sapien
gaagaagatggcgtcgggtggtggt

SEQ ID NO: 4564917 - DNA, 25 bp, Homo sapien
ggcgctatctctcgataaagttgtt

SEQ ID NO: 4564918 - DNA, 25 bp, Homo sapien
gctgtagcgcttcggagagactgcc

SEQ ID NO: 4564919 - DNA, 25 bp, Homo sapien
ttgttgcggcttccgccgcgggtgg

SEQ ID NO: 4564920 - DNA, 25 bp, Homo sapien
cacctataagccatttttcaagctg

SEQ ID NO: 4564921 - DNA, 25 bp, Homo sapien
ttgagttgctaaggaaactaaaatg

SEQ ID NO: 4564922 - DNA, 25 bp, Homo sapien
gaatgaccttgttctactgcagaaa

SEQ ID NO: 4564923 - DNA, 25 bp, Homo sapien
tatgatctaggaaaattgagttgct

SEQ ID NO: 4564924 - DNA, 25 bp, Homo sapien
aaagtcaaaactattattagcctgg

SEQ ID NO: 4564925 - DNA, 25 bp, Homo sapien
gcatcaaatagacacttaatgactt

SEQ ID NO: 4564926 - DNA, 25 bp, Homo sapien
tagtcccgcatacttgtgaagctga

SEQ ID NO: 4564927 - DNA, 25 bp, Homo sapien
cctgtagtcccgcatacttgtgaag

SEQ ID NO: 4564928 - DNA, 25 bp, Homo sapien
caaacaagggtttcgatctgtaact

SEQ ID NO: 4564929 - DNA, 25 bp, Homo sapien
tcaaacaagggtttcgatctgtaac

SEQ ID NO: 4564930 - DNA, 25 bp, Homo sapien
ttaagcaaaagacctacaataggtg

SEQ ID NO: 4564931 - DNA, 25 bp, Homo sapien
cctacaataggtggtggaattatgg

SEQ ID NO: 4564932 - DNA, 25 bp, Homo sapien
tctgttactcctgatggtgccatga

SEQ ID NO: 4564933 - DNA, 25 bp, Homo sapien
tacctaagagaatagtttcctgctt

SEQ ID NO: 4564934 - DNA, 25 bp, Homo sapien
cgagctgctgactgccactatggga

SEQ ID NO: 4564935 - DNA, 25 bp, Homo sapien
tcgtcagtcaaggatgggcttcccc

SEQ ID NO: 4564936 - DNA, 25 bp, Homo sapien
gggtgttcacacagatctctgccgg

SEQ ID NO: 4564937 - DNA, 25 bp, Homo sapien
tctagatagggtgatccaagagctc

SEQ ID NO: 4564938 - DNA, 25 bp, Homo sapien
aaaacgcagtaaacattctgattcc

SEQ ID NO: 4564939 - DNA, 25 bp, Homo sapien
tccctgtacacagatgcagcaccag

SEQ ID NO: 4564940 - DNA, 25 bp, Homo sapien
ggccagtggtgcaagtatttctttt

SEQ ID NO: 4564941 - DNA, 25 bp, Homo sapien
agtcactctccctacccctcagtat

SEQ ID NO: 4564942 - DNA, 25 bp, Homo sapien
attctcagaattacacctgtctgaa

SEQ ID NO: 4564943 - DNA, 25 bp, Homo sapien
ttctcagaattacacctgtctgaag

SEQ ID NO: 4564944 - DNA, 25 bp, Homo sapien
cattctcagaattacacctgtctga

SEQ ID NO: 4564945 - DNA, 25 bp, Homo sapien
tctcagaattacacctgtctgaagc

SEQ ID NO: 4564946 - DNA, 25 bp, Homo sapien
tgggccctgcgtctgtcgtcctctt

SEQ ID NO: 4564947 - DNA, 25 bp, Homo sapien
actggagttgggccctgcgtctgtc

SEQ ID NO: 4564948 - DNA, 25 bp, Homo sapien
gtgtggtgtcagctctgaggcggtc

SEQ ID NO: 4564949 - DNA, 25 bp, Homo sapien
gagttgggccctgcgtctgtcgtcc

SEQ ID NO: 4564950 - DNA, 25 bp, Homo sapien
agctgctcgccttccacaggatgct

SEQ ID NO: 4564951 - DNA, 25 bp, Homo sapien
ggaagccagctgctcgccttccaca

SEQ ID NO: 4564952 - DNA, 25 bp, Homo sapien
gccagctgctcgccttccacaggat

SEQ ID NO: 4564953 - DNA, 25 bp, Homo sapien
tgctcgccttccacaggatgctctt

SEQ ID NO: 4564954 - DNA, 25 bp, Homo sapien
gaaaaaccctgtccaatccgagaca

SEQ ID NO: 4564955 - DNA, 25 bp, Homo sapien
aaaaccctgtccaatccgagacagg

SEQ ID NO: 4564956 - DNA, 25 bp, Homo sapien
acagaaaaaccctgtccaatccgag

SEQ ID NO: 4564957 - DNA, 25 bp, Homo sapien
aaccctgtccaatccgagacaggac

SEQ ID NO: 4564958 - DNA, 25 bp, Homo sapien
ttccaaatgactgccccttcggggc

SEQ ID NO: 4564959 - DNA, 25 bp, Homo sapien
aatgactgccccttcggggcttcag

SEQ ID NO: 4564960 - DNA, 25 bp, Homo sapien
tccataaagagatgtgactgtttcc

SEQ ID NO: 4564961 - DNA, 25 bp, Homo sapien
ccataaagagatgtgactgtttcca

SEQ ID NO: 4564962 - DNA, 25 bp, Homo sapien
ctggtaagcattggagcttctctga

SEQ ID NO: 4564963 - DNA, 25 bp, Homo sapien
taagcattggagcttctctgacccc

SEQ ID NO: 4564964 - DNA, 25 bp, Homo sapien
ggttgcccagtggagtagtagcaga

SEQ ID NO: 4564965 - DNA, 25 bp, Homo sapien
tctctgacccctgcaagacattctt

SEQ ID NO: 4564966 - DNA, 25 bp, Homo sapien
tgagggacccaagtgtgtctttgtt

SEQ ID NO: 4564967 - DNA, 25 bp, Homo sapien
ttgagggacccaagtgtgtctttgt

SEQ ID NO: 4564968 - DNA, 25 bp, Homo sapien
tctttgtttcttgaaccccagtgct

SEQ ID NO: 4564969 - DNA, 25 bp, Homo sapien
tgtctttgtttcttgaaccccagtg

SEQ ID NO: 4564970 - DNA, 25 bp, Homo sapien
gacctgagtcgtgttgtctgaagca

SEQ ID NO: 4564971 - DNA, 25 bp, Homo sapien
gcctggagagctgtgccgtcaaagt

SEQ ID NO: 4564972 - DNA, 25 bp, Homo sapien
cactgggagttgctgtatcaccaca

SEQ ID NO: 4564973 - DNA, 25 bp, Homo sapien
cacttggttgattggctgacatggc

SEQ ID NO: 4564974 - DNA, 25 bp, Homo sapien
tatttttggttgcacaatatggagg

SEQ ID NO: 4564975 - DNA, 25 bp, Homo sapien
acttattaacaaggtaatcagtagg

SEQ ID NO: 4564976 - DNA, 25 bp, Homo sapien
tttttggttgcacaatatggaggaa

SEQ ID NO: 4564977 - DNA, 25 bp, Homo sapien
aatgtacttattaacaaggtaatca

SEQ ID NO: 4564978 - DNA, 25 bp, Homo sapien
cagcagaagccttgccggtgaaagg

SEQ ID NO: 4564979 - DNA, 25 bp, Homo sapien
tcctgagcagcctttgtggcgcagc

SEQ ID NO: 4564980 - DNA, 25 bp, Homo sapien
tttgtgtgactgcaatggaagccag

SEQ ID NO: 4564981 - DNA, 25 bp, Homo sapien
ggctttgtgtgactgcaatggaagc

SEQ ID NO: 4564982 - DNA, 25 bp, Homo sapien
caggaatggggcgagtcggggtaca

SEQ ID NO: 4564983 - DNA, 25 bp, Homo sapien
cgcaggaatggggcgagtcggggta

SEQ ID NO: 4564984 - DNA, 25 bp, Homo sapien
ccgtgcgcaggaatggggcgagtcg

SEQ ID NO: 4564985 - DNA, 25 bp, Homo sapien
gtgcgcaggaatggggcgagtcggg

SEQ ID NO: 4564986 - DNA, 25 bp, Homo sapien
aagtggcaaactgccggctctatgc

SEQ ID NO: 4564987 - DNA, 25 bp, Homo sapien
ctgcactcttgtgcggtggaacact

SEQ ID NO: 4564988 - DNA, 25 bp, Homo sapien
gacaagtcagttgcatggaatctct

SEQ ID NO: 4564989 - DNA, 25 bp, Homo sapien
tgtgcggtggaacactgtgcaatta

SEQ ID NO: 4564990 - DNA, 25 bp, Homo sapien
ccctatcacatgtttgacaagtcag

SEQ ID NO: 4564991 - DNA, 25 bp, Homo sapien
tgatagcagctctccgacagctgaa

SEQ ID NO: 4564992 - DNA, 25 bp, Homo sapien
ctgatagcagctctccgacagctga

SEQ ID NO: 4564993 - DNA, 25 bp, Homo sapien
agttctggatcaaaatcctgccaca

SEQ ID NO: 4564994 - DNA, 25 bp, Homo sapien
gttctggatcaaaatcctgccacat

SEQ ID NO: 4564995 - DNA, 25 bp, Homo sapien
tggttcgagctcttgagggacccca

SEQ ID NO: 4564996 - DNA, 25 bp, Homo sapien
ctgggtgaacgagcgctgcgggctg

SEQ ID NO: 4564997 - DNA, 25 bp, Homo sapien
aggtgtgcgggagcggagagtcccc

SEQ ID NO: 4564998 - DNA, 25 bp, Homo sapien
atttgccagcctcgcggaccatggt

SEQ ID NO: 4564999 - DNA, 25 bp, Homo sapien
ggcactgcgctatgcaaattagtag

SEQ ID NO: 4565000 - DNA, 25 bp, Homo sapien
tactggaattcctgagacttcggca

SEQ ID NO: 4565001 - DNA, 25 bp, Homo sapien
tcctgtacctgaaccaggaggtgcc

SEQ ID NO: 4565002 - DNA, 25 bp, Homo sapien
cagcaaagctatgccgcgtcatggg

SEQ ID NO: 4565003 - DNA, 25 bp, Homo sapien
aatagaagcagtggtcccctgggag

SEQ ID NO: 4565004 - DNA, 25 bp, Homo sapien
cttcagcaccctgagggagttcctg

SEQ ID NO: 4565005 - DNA, 25 bp, Homo sapien
ccctgggaggtgcagttctgggctc

SEQ ID NO: 4565006 - DNA, 25 bp, Homo sapien
catccccaggcagcttacagtgttt

SEQ ID NO: 4565007 - DNA, 25 bp, Homo sapien
ttagaggtaggctatgaaaaagtac

SEQ ID NO: 4565008 - DNA, 25 bp, Homo sapien
agaggtaggctatgaaaaagtacag

SEQ ID NO: 4565009 - DNA, 25 bp, Homo sapien
caatttagaggtaggctatgaaaaa

SEQ ID NO: 4565010 - DNA, 25 bp, Homo sapien
aaatcaatttagaggtaggctatga

SEQ ID NO: 4565011 - DNA, 25 bp, Homo sapien
ttttattggtcagtgttggtaggag

SEQ ID NO: 4565012 - DNA, 25 bp, Homo sapien
tcagagccctgtggcggactacagg

SEQ ID NO: 4565013 - DNA, 25 bp, Homo sapien
agacggtcactcaaagaaagatgtc

SEQ ID NO: 4565014 - DNA, 25 bp, Homo sapien
tgggtccgctccaccagatgccagc

SEQ ID NO: 4565015 - DNA, 25 bp, Homo sapien
tccacctcgatcttgccgcagtctg

SEQ ID NO: 4565016 - DNA, 25 bp, Homo sapien
tctgcgatgatcacatccttcaggg

SEQ ID NO: 4565017 - DNA, 25 bp, Homo sapien
tatcccggctgtctgtcttggtgct

SEQ ID NO: 4565018 - DNA, 25 bp, Homo sapien
ccttggcgatggcaaagggcttctc

SEQ ID NO: 4565019 - DNA, 25 bp, Homo sapien
aattctaacagactcctggccagag

SEQ ID NO: 4565020 - DNA, 25 bp, Homo sapien
tgggaccagcacgtcactgagtgaa

SEQ ID NO: 4565021 - DNA, 25 bp, Homo sapien
cttctcagggacattgcgttcagct

SEQ ID NO: 4565022 - DNA, 25 bp, Homo sapien
tccccggtgaggattgcccagtagt

SEQ ID NO: 4565023 - DNA, 25 bp, Homo sapien
tgactgtcgtgatgaagaactggga

SEQ ID NO: 4565024 - DNA, 25 bp, Homo sapien
tctagccaggctgtcttgactgtcg

SEQ ID NO: 4565025 - DNA, 25 bp, Homo sapien
gggaagcgctcaccgtagatgctct

SEQ ID NO: 4565026 - DNA, 25 bp, Homo sapien
gccaggcccgtagtgcttcagtttg

SEQ ID NO: 4565027 - DNA, 25 bp, Homo sapien
tgttttcctatgagcacaaaagaca

SEQ ID NO: 4565028 - DNA, 25 bp, Homo sapien
gttttcctatgagcacaaaagacac

SEQ ID NO: 4565029 - DNA, 25 bp, Homo sapien
tgagtgtgtgtgacgcgtctgtcca

SEQ ID NO: 4565030 - DNA, 25 bp, Homo sapien
caaagcctcttaacaaggaatgaac

SEQ ID NO: 4565031 - DNA, 25 bp, Homo sapien
gagagtcaaagcctcttaacaagga

SEQ ID NO: 4565032 - DNA, 25 bp, Homo sapien
gaataaaagacagctgtgagtgtgt

SEQ ID NO: 4565033 - DNA, 25 bp, Homo sapien
taggtaagtaataagtaggcctgcc

SEQ ID NO: 4565034 - DNA, 25 bp, Homo sapien
aagggtgccgctggtctcaaagtag

SEQ ID NO: 4565035 - DNA, 25 bp, Homo sapien
gattctcttagatctaccatcaggt

SEQ ID NO: 4565036 - DNA, 25 bp, Homo sapien
cactgtggaggctacactgacatac

SEQ ID NO: 4565037 - DNA, 25 bp, Homo sapien
tccttggcccagaggacctgtggtt

SEQ ID NO: 4565038 - DNA, 25 bp, Homo sapien
ccttggcccagaggacctgtggtta

SEQ ID NO: 4565039 - DNA, 25 bp, Homo sapien
cttggcccagaggacctgtggttac

SEQ ID NO: 4565040 - DNA, 25 bp, Homo sapien
ccctggtgaagtctccgccctggat

SEQ ID NO: 4565041 - DNA, 25 bp, Homo sapien
ccttgattacacgatggaatttgct

SEQ ID NO: 4565042 - DNA, 25 bp, Homo sapien
ctccgccctggatcatgaagtcctt

SEQ ID NO: 4565043 - DNA, 25 bp, Homo sapien
tttgctgtttttgtagccaaatcct

SEQ ID NO: 4565044 - DNA, 25 bp, Homo sapien
tgctcgcagaagagacaccactgct

SEQ ID NO: 4565045 - DNA, 25 bp, Homo sapien
tcagtgtgctactaagtgagcgggc

SEQ ID NO: 4565046 - DNA, 25 bp, Homo sapien
taggcctcacaggaacaagtccaca

SEQ ID NO: 4565047 - DNA, 25 bp, Homo sapien
gcctccatacaattcccaagcttta

SEQ ID NO: 4565048 - DNA, 25 bp, Homo sapien
agaccaaagatcacccggcctacat

SEQ ID NO: 4565049 - DNA, 25 bp, Homo sapien
ttggaacagtctttccgaagagacc

SEQ ID NO: 4565050 - DNA, 25 bp, Homo sapien
ctccaattcgtaggtcaaaatacac

SEQ ID NO: 4565051 - DNA, 25 bp, Homo sapien
tcctgtagctaaggccacaaaatta

SEQ ID NO: 4565052 - DNA, 25 bp, Homo sapien
gatccaactaactccctgggtcagg

SEQ ID NO: 4565053 - DNA, 25 bp, Homo sapien
gggatccaactaactccctgggtca

SEQ ID NO: 4565054 - DNA, 25 bp, Homo sapien
ctctgagactgccagtgtcggcccc

SEQ ID NO: 4565055 - DNA, 25 bp, Homo sapien
ccagatgggtatccggggatccaac

SEQ ID NO: 4565056 - DNA, 25 bp, Homo sapien
cagcaggaagaagacggaccccgcg

SEQ ID NO: 4565057 - DNA, 25 bp, Homo sapien
ttcttcttctcatcggccgcagaag

SEQ ID NO: 4565058 - DNA, 25 bp, Homo sapien
gccgcagaaggtcccggcagcagca

SEQ ID NO: 4565059 - DNA, 25 bp, Homo sapien
tgagggcggcggcaaggagcacctt

SEQ ID NO: 4565060 - DNA, 25 bp, Homo sapien
acaggcggaggcgaaagcagcccgg

SEQ ID NO: 4565061 - DNA, 25 bp, Homo sapien
ccacaggcggaggcgaaagcagccc

SEQ ID NO: 4565062 - DNA, 25 bp, Homo sapien
cacaggcggaggcgaaagcagcccg

SEQ ID NO: 4565063 - DNA, 25 bp, Homo sapien
caggcggaggcgaaagcagcccgga

SEQ ID NO: 4565064 - DNA, 25 bp, Homo sapien
aagagggtggggccgcggtggctag

SEQ ID NO: 4565065 - DNA, 25 bp, Homo sapien
gtggggccgcggtggctagggagcc

SEQ ID NO: 4565066 - DNA, 25 bp, Homo sapien
actggggttgctcgcgggctccggg

SEQ ID NO: 4565067 - DNA, 25 bp, Homo sapien
gactggggttgctcgcgggctccgg

SEQ ID NO: 4565068 - DNA, 25 bp, Homo sapien
gcccgggctccgagaagaccacaag

SEQ ID NO: 4565069 - DNA, 25 bp, Homo sapien
gggctccgagaagaccacaagcccc

SEQ ID NO: 4565070 - DNA, 25 bp, Homo sapien
ctccgagaagaccacaagccccggc

SEQ ID NO: 4565071 - DNA, 25 bp, Homo sapien
gggcccgggctccgagaagaccaca

SEQ ID NO: 4565072 - DNA, 25 bp, Homo sapien
tacaaatgagccgagggagattaaa

SEQ ID NO: 4565073 - DNA, 25 bp, Homo sapien
cacaggagtcttgaatcgcatcaaa

SEQ ID NO: 4565074 - DNA, 25 bp, Homo sapien
tttgaagtgactcacaggagaagac

SEQ ID NO: 4565075 - DNA, 25 bp, Homo sapien
tcaaagttagtcctagctagattgt

SEQ ID NO: 4565076 - DNA, 25 bp, Homo sapien
ctgagatcacatatcagaacccatt

SEQ ID NO: 4565077 - DNA, 25 bp, Homo sapien
tccatggtgccctaggaaatgggct

SEQ ID NO: 4565078 - DNA, 25 bp, Homo sapien
tacaaaaagggtgcaaactgagtcc

SEQ ID NO: 4565079 - DNA, 25 bp, Homo sapien
gggaagaggtatacttaaagatcac

SEQ ID NO: 4565080 - DNA, 25 bp, Homo sapien
tgagctttgtgaccagtgccagggt

SEQ ID NO: 4565081 - DNA, 25 bp, Homo sapien
ttcacagctgagctttgtgaccagt

SEQ ID NO: 4565082 - DNA, 25 bp, Homo sapien
caaatacacttgaaattgacattca

SEQ ID NO: 4565083 - DNA, 25 bp, Homo sapien
cagtgccagggtttatgaaacatta

SEQ ID NO: 4565084 - DNA, 25 bp, Homo sapien
aaaaaggcttttggtgcaagggctg

SEQ ID NO: 4565085 - DNA, 25 bp, Homo sapien
gtacaatgggcaaagatcaaagaca

SEQ ID NO: 4565086 - DNA, 25 bp, Homo sapien
tgagaatactcaggaacacatggtt

SEQ ID NO: 4565087 - DNA, 25 bp, Homo sapien
gcctgggatttggtctggagctcat

SEQ ID NO: 4565088 - DNA, 25 bp, Homo sapien
tgttactggaatggctgcaccacac

SEQ ID NO: 4565089 - DNA, 25 bp, Homo sapien
accatgaataatcctctgctctgag

SEQ ID NO: 4565090 - DNA, 25 bp, Homo sapien
tgggtgttactggaatggctgcacc

SEQ ID NO: 4565091 - DNA, 25 bp, Homo sapien
tgctctgagaccttatagatggtga

SEQ ID NO: 4565092 - DNA, 25 bp, Homo sapien
catttttaagactgcttgctggaca

SEQ ID NO: 4565093 - DNA, 25 bp, Homo sapien
cactgtgtattatccagggaaccta

SEQ ID NO: 4565094 - DNA, 25 bp, Homo sapien
tcaacccctcatgggaaagactagg

SEQ ID NO: 4565095 - DNA, 25 bp, Homo sapien
gactaggagtctctgccatcgacct

SEQ ID NO: 4565096 - DNA, 25 bp, Homo sapien
tggaattcatctgcccaccataggg

SEQ ID NO: 4565097 - DNA, 25 bp, Homo sapien
gatgcatcaaacgaaagttcctctg

SEQ ID NO: 4565098 - DNA, 25 bp, Homo sapien
gaagacgttttcttggctgccatgg

SEQ ID NO: 4565099 - DNA, 25 bp, Homo sapien
caagaacccgagagataagtgcctg

SEQ ID NO: 4565100 - DNA, 25 bp, Homo sapien
taaggcagtcatgagtgcacactgg

SEQ ID NO: 4565101 - DNA, 25 bp, Homo sapien
cagtctggagtgagatctctggaaa

SEQ ID NO: 4565102 - DNA, 25 bp, Homo sapien
ggtgcgtagagcaacttgaccaact

SEQ ID NO: 4565103 - DNA, 25 bp, Homo sapien
gacaggctccataatagcagaagaa

SEQ ID NO: 4565104 - DNA, 25 bp, Homo sapien
ctctgcatgctaaagggacctggga

SEQ ID NO: 4565105 - DNA, 25 bp, Homo sapien
caagtgataccctggtcaaaaggga

SEQ ID NO: 4565106 - DNA, 25 bp, Homo sapien
cctgattcgctgatgggcctgaaac

SEQ ID NO: 4565107 - DNA, 25 bp, Homo sapien
aaaagtcgcaaatccagctgcaagg

SEQ ID NO: 4565108 - DNA, 25 bp, Homo sapien
tactgctatggacctgctgggagaa

SEQ ID NO: 4565109 - DNA, 25 bp, Homo sapien
aaaacatgcttagaggcacggccac

SEQ ID NO: 4565110 - DNA, 25 bp, Homo sapien
tggctatctagttggaagtccctgg

SEQ ID NO: 4565111 - DNA, 25 bp, Homo sapien
tctggtagggacattcttcagctgc

SEQ ID NO: 4565112 - DNA, 25 bp, Homo sapien
tgggatacggagaaggttcttctcc

SEQ ID NO: 4565113 - DNA, 25 bp, Homo sapien
ctgggatacggagaaggttcttctc

SEQ ID NO: 4565114 - DNA, 25 bp, Homo sapien
gcagacaaagcctttagctcactag

SEQ ID NO: 4565115 - DNA, 25 bp, Homo sapien
gacaaagcctttagctcactaggtt

SEQ ID NO: 4565116 - DNA, 25 bp, Homo sapien
cttctgcagacaaagcctttagctc

SEQ ID NO: 4565117 - DNA, 25 bp, Homo sapien
agcctttagctcactaggttttatg

SEQ ID NO: 4565118 - DNA, 25 bp, Homo sapien
gggaagaaggagaatagcagtcctt

SEQ ID NO: 4565119 - DNA, 25 bp, Homo sapien
agaaggagaatagcagtccttgagt

SEQ ID NO: 4565120 - DNA, 25 bp, Homo sapien
taaggggaagaaggagaatagcagt

SEQ ID NO: 4565121 - DNA, 25 bp, Homo sapien
gaagaaggagaatagcagtccttga

SEQ ID NO: 4565122 - DNA, 25 bp, Homo sapien
gcaggcggagatggccaatgaccca

SEQ ID NO: 4565123 - DNA, 25 bp, Homo sapien
caggcagccctatgggcaagcagtg

SEQ ID NO: 4565124 - DNA, 25 bp, Homo sapien
agagccttaggcaggcggagatggc

SEQ ID NO: 4565125 - DNA, 25 bp, Homo sapien
gaaggagagtcaaccaggcagccct

SEQ ID NO: 4565126 - DNA, 25 bp, Homo sapien
aagaggagtcccttccaatgagaaa

SEQ ID NO: 4565127 - DNA, 25 bp, Homo sapien
gaggagtcccttccaatgagaaatg

SEQ ID NO: 4565128 - DNA, 25 bp, Homo sapien
caaagaggagtcccttccaatgaga

SEQ ID NO: 4565129 - DNA, 25 bp, Homo sapien
tggtttggatatccaccctccccca

SEQ ID NO: 4565130 - DNA, 25 bp, Homo sapien
caggtacaattgagtcagagtcccc

SEQ ID NO: 4565131 - DNA, 25 bp, Homo sapien
gcctgaggactcctgggaggcactg

SEQ ID NO: 4565132 - DNA, 25 bp, Homo sapien
ggtacaattgagtcagagtccccag

SEQ ID NO: 4565133 - DNA, 25 bp, Homo sapien
ctgcaggtacaattgagtcagagtc

SEQ ID NO: 4565134 - DNA, 25 bp, Homo sapien
tcacttgtggcgctgagcagtcttc

SEQ ID NO: 4565135 - DNA, 25 bp, Homo sapien
cattgcaagtcagtgcgggaggcct

SEQ ID NO: 4565136 - DNA, 25 bp, Homo sapien
tcaggcagtccagaagcaggtgatg

SEQ ID NO: 4565137 - DNA, 25 bp, Homo sapien
tatcaagatggtgcaggctaggcag

SEQ ID NO: 4565138 - DNA, 25 bp, Homo sapien
taattattgcaggtgtaaagccagc

SEQ ID NO: 4565139 - DNA, 25 bp, Homo sapien
aaatagtgtttttctatacgtaatg

SEQ ID NO: 4565140 - DNA, 25 bp, Homo sapien
agttgaatgtcctgaaattaacaat

SEQ ID NO: 4565141 - DNA, 25 bp, Homo sapien
tgtttttctatacgtaatgctttag

SEQ ID NO: 4565142 - DNA, 25 bp, Homo sapien
gttgaatgtcctgaaattaacaata

SEQ ID NO: 4565143 - DNA, 25 bp, Homo sapien
gactctagaccaagtccactgattg

SEQ ID NO: 4565144 - DNA, 25 bp, Homo sapien
tgtggtgactactagcaacaggatc

SEQ ID NO: 4565145 - DNA, 25 bp, Homo sapien
tattaaactgggtcagactctagac

SEQ ID NO: 4565146 - DNA, 25 bp, Homo sapien
gatgtgcaatgctgaacccacctaa

SEQ ID NO: 4565147 - DNA, 25 bp, Homo sapien
atcttcttgaagtctaaatctggat

SEQ ID NO: 4565148 - DNA, 25 bp, Homo sapien
ggtatcttcttgaagtctaaatctg

SEQ ID NO: 4565149 - DNA, 25 bp, Homo sapien
tatcttcttgaagtctaaatctgga

SEQ ID NO: 4565150 - DNA, 25 bp, Homo sapien
ctggtatcttcttgaagtctaaatc

SEQ ID NO: 4565151 - DNA, 25 bp, Homo sapien
cctccacctcggcatgagctgtgat

SEQ ID NO: 4565152 - DNA, 25 bp, Homo sapien
gagtgggctcccgtgggatcatcaa

SEQ ID NO: 4565153 - DNA, 25 bp, Homo sapien
gctctccattggttgagctaaccac

SEQ ID NO: 4565154 - DNA, 25 bp, Homo sapien
catgagctgtgattggtgcattgga

SEQ ID NO: 4565155 - DNA, 25 bp, Homo sapien
ttgccagcgccagacagggtcgcta

SEQ ID NO: 4565156 - DNA, 25 bp, Homo sapien
aacagaaatctcttgccagcgccag

SEQ ID NO: 4565157 - DNA, 25 bp, Homo sapien
tggcaacagaaatctcttgccagcg

SEQ ID NO: 4565158 - DNA, 25 bp, Homo sapien
cagggtcgctaaacaggcagtgtct

SEQ ID NO: 4565159 - DNA, 25 bp, Homo sapien
cgaagttacaaataacaagattgtc

SEQ ID NO: 4565160 - DNA, 25 bp, Homo sapien
tcatggctttgagcactggttcgaa

SEQ ID NO: 4565161 - DNA, 25 bp, Homo sapien
catcctctccgacaagagggaagat

SEQ ID NO: 4565162 - DNA, 25 bp, Homo sapien
taaataatcacactttccttcagaa

SEQ ID NO: 4565163 - DNA, 25 bp, Homo sapien
tccccgaaatgtaagtgaaggctct

SEQ ID NO: 4565164 - DNA, 25 bp, Homo sapien
tatttcaggttcactgccatcccag

SEQ ID NO: 4565165 - DNA, 25 bp, Homo sapien
cagttctcactgatggtccccgaaa

SEQ ID NO: 4565166 - DNA, 25 bp, Homo sapien
tgtggacccaatcaggcttctcttg

SEQ ID NO: 4565167 - DNA, 25 bp, Homo sapien
tcatttccagcacattattcctgtt

SEQ ID NO: 4565168 - DNA, 25 bp, Homo sapien
acactctgcttgttaaagaccttgg

SEQ ID NO: 4565169 - DNA, 25 bp, Homo sapien
ccatgaatcactccttgtaacagca

SEQ ID NO: 4565170 - DNA, 25 bp, Homo sapien
ggtgtcacttaccagtatgagaaca

SEQ ID NO: 4565171 - DNA, 25 bp, Homo sapien
gttcactgtgtgtcccaactgatgg

SEQ ID NO: 4565172 - DNA, 25 bp, Homo sapien
gatgatcaaggctaccaagatgcat

SEQ ID NO: 4565173 - DNA, 25 bp, Homo sapien
gctgccgaaggttcagaagcaagcc

SEQ ID NO: 4565174 - DNA, 25 bp, Homo sapien
ccgaaggttcagaagcaagccaaca

SEQ ID NO: 4565175 - DNA, 25 bp, Homo sapien
aggttcagaagcaagccaacattcc

SEQ ID NO: 4565176 - DNA, 25 bp, Homo sapien
ctaaggctgccgaaggttcagaagc

SEQ ID NO: 4565177 - DNA, 25 bp, Homo sapien
actgatcccccatggcggtctgcag

SEQ ID NO: 4565178 - DNA, 25 bp, Homo sapien
gcagccaagtgagacgttaggtatg

SEQ ID NO: 4565179 - DNA, 25 bp, Homo sapien
ttaggtatgaggtattggtctgccg

SEQ ID NO: 4565180 - DNA, 25 bp, Homo sapien
tattggtctgccggctgggctgaat

SEQ ID NO: 4565181 - DNA, 25 bp, Homo sapien
ttttacatctgctactattctgatc

SEQ ID NO: 4565182 - DNA, 25 bp, Homo sapien
tctgctactattctgatcttgctca

SEQ ID NO: 4565183 - DNA, 25 bp, Homo sapien
tatgtgacttttgtccagaagaatc

SEQ ID NO: 4565184 - DNA, 25 bp, Homo sapien
gatcttgctcatatgtgacttttgt

SEQ ID NO: 4565185 - DNA, 25 bp, Homo sapien
gagttgttaacatcataatgctcag

SEQ ID NO: 4565186 - DNA, 25 bp, Homo sapien
gttaacatcataatgctcagctgta

SEQ ID NO: 4565187 - DNA, 25 bp, Homo sapien
tgccagatggctgagttgttaacat

SEQ ID NO: 4565188 - DNA, 25 bp, Homo sapien
gctcagctgtaacagtcctaaggct

SEQ ID NO: 4565189 - DNA, 25 bp, Homo sapien
tctatgtggagctgtggccatcctg

SEQ ID NO: 4565190 - DNA, 25 bp, Homo sapien
gaaactgcacgcaggtcacaaggag

SEQ ID NO: 4565191 - DNA, 25 bp, Homo sapien
ttcaactagcaaaccctgagcctcg

SEQ ID NO: 4565192 - DNA, 25 bp, Homo sapien
gagcctcggtcagaactaaacagta

SEQ ID NO: 4565193 - DNA, 25 bp, Homo sapien
cccttacagtctagatacaaacaaa

SEQ ID NO: 4565194 - DNA, 25 bp, Homo sapien
taaatgtattcccttacagtctaga

SEQ ID NO: 4565195 - DNA, 25 bp, Homo sapien
tattcccttacagtctagatacaaa

SEQ ID NO: 4565196 - DNA, 25 bp, Homo sapien
tgtcctttaaatgtattcccttaca

SEQ ID NO: 4565197 - DNA, 25 bp, Homo sapien
aattggagaatttgcaagggaacag

SEQ ID NO: 4565198 - DNA, 25 bp, Homo sapien
caaattggagaatttgcaagggaac

SEQ ID NO: 4565199 - DNA, 25 bp, Homo sapien
ttggagaatttgcaagggaacagtc

SEQ ID NO: 4565200 - DNA, 25 bp, Homo sapien
tagtcaaattggagaatttgcaagg

SEQ ID NO: 4565201 - DNA, 25 bp, Homo sapien
aagcaggcagaactattaaggtttt

SEQ ID NO: 4565202 - DNA, 25 bp, Homo sapien
gattgaatttgatcagataatgcaa

SEQ ID NO: 4565203 - DNA, 25 bp, Homo sapien
cctttctgccggattgtaatacgca

SEQ ID NO: 4565204 - DNA, 25 bp, Homo sapien
caaaggacgttttgccaggtagaag

SEQ ID NO: 4565205 - DNA, 25 bp, Homo sapien
gacccatggcaagatttacaacttt

SEQ ID NO: 4565206 - DNA, 25 bp, Homo sapien
cagacccatggcaagatttacaact

SEQ ID NO: 4565207 - DNA, 25 bp, Homo sapien
tcagacccatggcaagatttacaac

SEQ ID NO: 4565208 - DNA, 25 bp, Homo sapien
ccatggcaagatttacaacttttgg

SEQ ID NO: 4565209 - DNA, 25 bp, Homo sapien
gatgcttcatatagggcacctggcc

SEQ ID NO: 4565210 - DNA, 25 bp, Homo sapien
gtgcaactatacatgccctgagggt

SEQ ID NO: 4565211 - DNA, 25 bp, Homo sapien
tgcaaatgcggaagcaatcttggct

SEQ ID NO: 4565212 - DNA, 25 bp, Homo sapien
caggctgactctttagactggatgc

SEQ ID NO: 4565213 - DNA, 25 bp, Homo sapien
tattagccaagaagaagggtagtgt

SEQ ID NO: 4565214 - DNA, 25 bp, Homo sapien
aatggcaagcatttgatctttattt

SEQ ID NO: 4565215 - DNA, 25 bp, Homo sapien
taaagcggagaagctgaagaatttg

SEQ ID NO: 4565216 - DNA, 25 bp, Homo sapien
ttcagtacatacactaaagcggaga

SEQ ID NO: 4565217 - DNA, 25 bp, Homo sapien
tgaaagaatggaggatcaacacata

SEQ ID NO: 4565218 - DNA, 25 bp, Homo sapien
ctgaaagaatggaggatcaacacat

SEQ ID NO: 4565219 - DNA, 25 bp, Homo sapien
gaaagaatggaggatcaacacatac

SEQ ID NO: 4565220 - DNA, 25 bp, Homo sapien
tctcgagttattgcagatgcaccag

SEQ ID NO: 4565221 - DNA, 25 bp, Homo sapien
gatgcaccagaatctacgtgaactg

SEQ ID NO: 4565222 - DNA, 25 bp, Homo sapien
ctatgtgtgtggctttctcgagtta

SEQ ID NO: 4565223 - DNA, 25 bp, Homo sapien
gctgctgttgtgatggccgatccct

SEQ ID NO: 4565224 - DNA, 25 bp, Homo sapien
tgacatatcgaaggtaggttgccat

SEQ ID NO: 4565225 - DNA, 25 bp, Homo sapien
tcataggcatagtcaaaggtgtagc

SEQ ID NO: 4565226 - DNA, 25 bp, Homo sapien
tctgtgaagagggtccgtaaatact

SEQ ID NO: 4565227 - DNA, 25 bp, Homo sapien
caaagaagtccagtcgcctgacata

SEQ ID NO: 4565228 - DNA, 25 bp, Homo sapien
ttttgatatctctcttttaatgtgt

SEQ ID NO: 4565229 - DNA, 25 bp, Homo sapien
caatgggagtattccttttggtgtc

SEQ ID NO: 4565230 - DNA, 25 bp, Homo sapien
gcttcaatgggagtattccttttgg

SEQ ID NO: 4565231 - DNA, 25 bp, Homo sapien
gagagcttcaatgggagtattcctt

SEQ ID NO: 4565232 - DNA, 25 bp, Homo sapien
ccaggggaggctgcctcgaaggaaa

SEQ ID NO: 4565233 - DNA, 25 bp, Homo sapien
atacatgaacatatggcctagggct

SEQ ID NO: 4565234 - DNA, 25 bp, Homo sapien
atggcctagggcttccaaatcatct

SEQ ID NO: 4565235 - DNA, 25 bp, Homo sapien
caggggaggctgcctcgaaggaaat

SEQ ID NO: 4565236 - DNA, 25 bp, Homo sapien
ctaaaagggaagacagatcacacat

SEQ ID NO: 4565237 - DNA, 25 bp, Homo sapien
tttaaacagttgagcactagagggc

SEQ ID NO: 4565238 - DNA, 25 bp, Homo sapien
tttatatccacttcctgtaacaaga

SEQ ID NO: 4565239 - DNA, 25 bp, Homo sapien
aaaattcactggacaaatgtttgaa

SEQ ID NO: 4565240 - DNA, 25 bp, Homo sapien
cactagagggcgaaaactctccaca

SEQ ID NO: 4565241 - DNA, 25 bp, Homo sapien
ctcaatgagggaacttagtagatat

SEQ ID NO: 4565242 - DNA, 25 bp, Homo sapien
cactatcacttgaattcctcaggtg

SEQ ID NO: 4565243 - DNA, 25 bp, Homo sapien
tagtagatattacattagtctttaa

SEQ ID NO: 4565244 - DNA, 25 bp, Homo sapien
tatcatactactttgtaatgccatt

SEQ ID NO: 4565245 - DNA, 25 bp, Homo sapien
cttagtgtgcaatagttcactaata

SEQ ID NO: 4565246 - DNA, 25 bp, Homo sapien
tagtgtgcaatagttcactaatatt

SEQ ID NO: 4565247 - DNA, 25 bp, Homo sapien
tcttagtgtgcaatagttcactaat

SEQ ID NO: 4565248 - DNA, 25 bp, Homo sapien
atcttagtgtgcaatagttcactaa

SEQ ID NO: 4565249 - DNA, 25 bp, Homo sapien
ggccagtccaaagtctataatgtgt

SEQ ID NO: 4565250 - DNA, 25 bp, Homo sapien
gccaagatgcgtgttgatagacata

SEQ ID NO: 4565251 - DNA, 25 bp, Homo sapien
gaggttctttgagtgcacgtattcc

SEQ ID NO: 4565252 - DNA, 25 bp, Homo sapien
cttgtcgaccaatcaggaagttctc

SEQ ID NO: 4565253 - DNA, 25 bp, Homo sapien
gaaagagaaacaaatgatagaaaga

SEQ ID NO: 4565254 - DNA, 25 bp, Homo sapien
ctgaaagagaaacaaatgatagaaa

SEQ ID NO: 4565255 - DNA, 25 bp, Homo sapien
tgaaagagaaacaaatgatagaaag

SEQ ID NO: 4565256 - DNA, 25 bp, Homo sapien
tggctatcattaacaccgtcttcaa

SEQ ID NO: 4565257 - DNA, 25 bp, Homo sapien
aagctagggccaaggagctccagca

SEQ ID NO: 4565258 - DNA, 25 bp, Homo sapien
gtaaatgttcggtcacagaggtcaa

SEQ ID NO: 4565259 - DNA, 25 bp, Homo sapien
tcaaacaagtcctccaagctagggc

SEQ ID NO: 4565260 - DNA, 25 bp, Homo sapien
ggttcatgagcactctctatgctta

SEQ ID NO: 4565261 - DNA, 25 bp, Homo sapien
cattatctggttcatgagcactctc

SEQ ID NO: 4565262 - DNA, 25 bp, Homo sapien
tctggttcatgagcactctctatgc

SEQ ID NO: 4565263 - DNA, 25 bp, Homo sapien
gagcactctctatgcttactgccat

SEQ ID NO: 4565264 - DNA, 25 bp, Homo sapien
actgttgccctatggacaactcaga

SEQ ID NO: 4565265 - DNA, 25 bp, Homo sapien
agccacatgggctatttggaactgt

SEQ ID NO: 4565266 - DNA, 25 bp, Homo sapien
acatgggctatttggaactgttgcc

SEQ ID NO: 4565267 - DNA, 25 bp, Homo sapien
tttggaactgttgccctatggacaa

SEQ ID NO: 4565268 - DNA, 25 bp, Homo sapien
gaattaagagttcctgctcgctgca

SEQ ID NO: 4565269 - DNA, 25 bp, Homo sapien
aacttggaagaattaagagttcctg

SEQ ID NO: 4565270 - DNA, 25 bp, Homo sapien
gaagaattaagagttcctgctcgct

SEQ ID NO: 4565271 - DNA, 25 bp, Homo sapien
tggaagaattaagagttcctgctcg

SEQ ID NO: 4565272 - DNA, 25 bp, Homo sapien
ctgtggttctcaagccttgtcaatt

SEQ ID NO: 4565273 - DNA, 25 bp, Homo sapien
tgtggttctcaagccttgtcaattc

SEQ ID NO: 4565274 - DNA, 25 bp, Homo sapien
gcatctctacatcccaataacaaac

SEQ ID NO: 4565275 - DNA, 25 bp, Homo sapien
ccggggggagacatcccttgttcat

SEQ ID NO: 4565276 - DNA, 25 bp, Homo sapien
taaattagtagcatctctacatccc

SEQ ID NO: 4565277 - DNA, 25 bp, Homo sapien
tctatagcttcaacacaatccatat

SEQ ID NO: 4565278 - DNA, 25 bp, Homo sapien
catgttctcgctcatgtgaaaactt

SEQ ID NO: 4565279 - DNA, 25 bp, Homo sapien
tgaaccgcctactaggtatttaaca

SEQ ID NO: 4565280 - DNA, 25 bp, Homo sapien
taaattctagtgttgatagcacagc

SEQ ID NO: 4565281 - DNA, 25 bp, Homo sapien
tgaggtaatgagtagcttaaccacc

SEQ ID NO: 4565282 - DNA, 25 bp, Homo sapien
atatttgagaaattagagctttttg

SEQ ID NO: 4565283 - DNA, 25 bp, Homo sapien
aatggataaaatgacggttctgtaa

SEQ ID NO: 4565284 - DNA, 25 bp, Homo sapien
ggttattacaatcatatggatagct

SEQ ID NO: 4565285 - DNA, 25 bp, Homo sapien
attgccgaaggtcataggttattac

SEQ ID NO: 4565286 - DNA, 25 bp, Homo sapien
catactaagtaagtggagagaaaag

SEQ ID NO: 4565287 - DNA, 25 bp, Homo sapien
atactaagtaagtggagagaaaaga

SEQ ID NO: 4565288 - DNA, 25 bp, Homo sapien
gctgtggagcacgtgattttattgg

SEQ ID NO: 4565289 - DNA, 25 bp, Homo sapien
tgtggagcacgtgattttattggtt

SEQ ID NO: 4565290 - DNA, 25 bp, Homo sapien
ctgtggagcacgtgattttattggt

SEQ ID NO: 4565291 - DNA, 25 bp, Homo sapien
tttgattgctacatattcattggtg

SEQ ID NO: 4565292 - DNA, 25 bp, Homo sapien
gagagcagctaagcaacatatgaga

SEQ ID NO: 4565293 - DNA, 25 bp, Homo sapien
tgagagcagctaagcaacatatgag

SEQ ID NO: 4565294 - DNA, 25 bp, Homo sapien
cctattactgccagcactttagcag

SEQ ID NO: 4565295 - DNA, 25 bp, Homo sapien
gtggcttatgcctattactgccagc

SEQ ID NO: 4565296 - DNA, 25 bp, Homo sapien
aaccctctgcatgaagacttcctgt

SEQ ID NO: 4565297 - DNA, 25 bp, Homo sapien
ctggatgtgatgctgtccataaaac

SEQ ID NO: 4565298 - DNA, 25 bp, Homo sapien
gatgctgtccataaaaccctctgca

SEQ ID NO: 4565299 - DNA, 25 bp, Homo sapien
tcaaagcagcagtcctggatgtgat

SEQ ID NO: 4565300 - DNA, 25 bp, Homo sapien
gacaatttcctaaagggtctggcac

SEQ ID NO: 4565301 - DNA, 25 bp, Homo sapien
aaacgttaactgtagagctcggtga

SEQ ID NO: 4565302 - DNA, 25 bp, Homo sapien
gaacattttcagcataccagtaggt

SEQ ID NO: 4565303 - DNA, 25 bp, Homo sapien
gattacgtccgtgagattcatgcac

SEQ ID NO: 4565304 - DNA, 25 bp, Homo sapien
cctacattagaggacgatactgtta

SEQ ID NO: 4565305 - DNA, 25 bp, Homo sapien
taaaggtttcagcttgttcaagccc

SEQ ID NO: 4565306 - DNA, 25 bp, Homo sapien
gagctgatataacaatcgtcactga

SEQ ID NO: 4565307 - DNA, 25 bp, Homo sapien
gaagtacacgtatatacgcgcgcac

SEQ ID NO: 4565308 - DNA, 25 bp, Homo sapien
tctttttgttactggatctgttcat

SEQ ID NO: 4565309 - DNA, 25 bp, Homo sapien
ctttttgttactggatctgttcatt

SEQ ID NO: 4565310 - DNA, 25 bp, Homo sapien
tttttgttactggatctgttcattt

SEQ ID NO: 4565311 - DNA, 25 bp, Homo sapien
taaaatctagatttaactggaagcc

SEQ ID NO: 4565312 - DNA, 25 bp, Homo sapien
ttatggttaacagttctagtactcc

SEQ ID NO: 4565313 - DNA, 25 bp, Homo sapien
gccgaatcccaaagtatatccaaca

SEQ ID NO: 4565314 - DNA, 25 bp, Homo sapien
tctagtactccacttgaagaaatag

SEQ ID NO: 4565315 - DNA, 25 bp, Homo sapien
ttttgtgatgacattgcaatattgc

SEQ ID NO: 4565316 - DNA, 25 bp, Homo sapien
ctaatttttgtgatgacattgcaat

SEQ ID NO: 4565317 - DNA, 25 bp, Homo sapien
aatttttgtgatgacattgcaatat

SEQ ID NO: 4565318 - DNA, 25 bp, Homo sapien
caaagtctttgttctaatttttgtg

SEQ ID NO: 4565319 - DNA, 25 bp, Homo sapien
ataaattagaattatcctaaacctg

SEQ ID NO: 4565320 - DNA, 25 bp, Homo sapien
caaaaaagctccataaattagaatt

SEQ ID NO: 4565321 - DNA, 25 bp, Homo sapien
acaaaaaagctccataaattagaat

SEQ ID NO: 4565322 - DNA, 25 bp, Homo sapien
ctccataaattagaattatcctaaa

SEQ ID NO: 4565323 - DNA, 25 bp, Homo sapien
gcagagctttgtaggtggtagccat

SEQ ID NO: 4565324 - DNA, 25 bp, Homo sapien
tagccatgatgtaggctgactgcac

SEQ ID NO: 4565325 - DNA, 25 bp, Homo sapien
tgcagcccactctattgtcaggaag

SEQ ID NO: 4565326 - DNA, 25 bp, Homo sapien
tgcacctgccttgactttggaattt

SEQ ID NO: 4565327 - DNA, 25 bp, Homo sapien
taatctgagctctccgaagttccca

SEQ ID NO: 4565328 - DNA, 25 bp, Homo sapien
agaaccccagaggacgatgaggagc

SEQ ID NO: 4565329 - DNA, 25 bp, Homo sapien
cctgaagttgggtcccaccataaga

SEQ ID NO: 4565330 - DNA, 25 bp, Homo sapien
ccagatggtcgagagcagtgtgcac

SEQ ID NO: 4565331 - DNA, 25 bp, Homo sapien
tatctccgggagatgaaaaaccatt

SEQ ID NO: 4565332 - DNA, 25 bp, Homo sapien
gagtctcctatagtacagcaagtag

SEQ ID NO: 4565333 - DNA, 25 bp, Homo sapien
gttcccgtaggaaatgtagtcacta

SEQ ID NO: 4565334 - DNA, 25 bp, Homo sapien
cactaggtctcaatcttaggtgaac

SEQ ID NO: 4565335 - DNA, 25 bp, Homo sapien
ttcattcccactgagccaaaagtgc

SEQ ID NO: 4565336 - DNA, 25 bp, Homo sapien
tcattcccactgagccaaaagtgca

SEQ ID NO: 4565337 - DNA, 25 bp, Homo sapien
caaacgtggtctatctttagcctac

SEQ ID NO: 4565338 - DNA, 25 bp, Homo sapien
gaaaaggatttcgagactgctgcca

SEQ ID NO: 4565339 - DNA, 25 bp, Homo sapien
taagcaactgctacatagctgggaa

SEQ ID NO: 4565340 - DNA, 25 bp, Homo sapien
tcttccaggtagaagtaagccaact

SEQ ID NO: 4565341 - DNA, 25 bp, Homo sapien
gcaaaaggaatactagtgttcttaa

SEQ ID NO: 4565342 - DNA, 25 bp, Homo sapien
gcctggccaattactgactatactt

SEQ ID NO: 4565343 - DNA, 25 bp, Homo sapien
ttcaaaacgccattatccccttatc

SEQ ID NO: 4565344 - DNA, 25 bp, Homo sapien
atcttctcactctatagctatgtgg

SEQ ID NO: 4565345 - DNA, 25 bp, Homo sapien
aaattaggtattgatgggacgtatt

SEQ ID NO: 4565346 - DNA, 25 bp, Homo sapien
ttaggtattgatgggacgtatttca

SEQ ID NO: 4565347 - DNA, 25 bp, Homo sapien
ccctctctcactgctcctattcaac

SEQ ID NO: 4565348 - DNA, 25 bp, Homo sapien
ctctcactgctcctattcaacatag

SEQ ID NO: 4565349 - DNA, 25 bp, Homo sapien
caagaggctttagaggcagagattc

SEQ ID NO: 4565350 - DNA, 25 bp, Homo sapien
tcgtggctctccagatattattagc

SEQ ID NO: 4565351 - DNA, 25 bp, Homo sapien
gtatgcactatttcccttccgacag

SEQ ID NO: 4565352 - DNA, 25 bp, Homo sapien
gagattcttgagcttgacatcctgg

SEQ ID NO: 4565353 - DNA, 25 bp, Homo sapien
gaacctttaatgtggtgatgtccat

SEQ ID NO: 4565354 - DNA, 25 bp, Homo sapien
cttgaatacatacagatacttcctg

SEQ ID NO: 4565355 - DNA, 25 bp, Homo sapien
catccagggataaagcaacccttgt

SEQ ID NO: 4565356 - DNA, 25 bp, Homo sapien
tactctctagcttaagaacctttaa

SEQ ID NO: 4565357 - DNA, 25 bp, Homo sapien
cacttatctaaaaccactgaagcag

SEQ ID NO: 4565358 - DNA, 25 bp, Homo sapien
aactatcattccacaaattcaaaag

SEQ ID NO: 4565359 - DNA, 25 bp, Homo sapien
taaatcacagctccataaaagaaat

SEQ ID NO: 4565360 - DNA, 25 bp, Homo sapien
ctatcaatatgtagtactaaaatct

SEQ ID NO: 4565361 - DNA, 25 bp, Homo sapien
ggcaatggaagcacgggatagcccc

SEQ ID NO: 4565362 - DNA, 25 bp, Homo sapien
tgtgccctaagctccgccaagggcg

SEQ ID NO: 4565363 - DNA, 25 bp, Homo sapien
cagtcaccctgacgagatctgtgcc

SEQ ID NO: 4565364 - DNA, 25 bp, Homo sapien
ggtccacaccggctagagtcagttt

SEQ ID NO: 4565365 - DNA, 25 bp, Homo sapien
gaggcgccaagtgcttctctaccca

SEQ ID NO: 4565366 - DNA, 25 bp, Homo sapien
ccgcagcggtggtttctctctttcc

SEQ ID NO: 4565367 - DNA, 25 bp, Homo sapien
tctacccacccgcagcggtggtttc

SEQ ID NO: 4565368 - DNA, 25 bp, Homo sapien
tgctgcaaggcgcaaatgaggcggg

SEQ ID NO: 4565369 - DNA, 25 bp, Homo sapien
agaggcacgaaacccatcccgcttt

SEQ ID NO: 4565370 - DNA, 25 bp, Homo sapien
gatcttagaccaagtacacgcttcg

SEQ ID NO: 4565371 - DNA, 25 bp, Homo sapien
ccaagtacacgcttcgctgccagag

SEQ ID NO: 4565372 - DNA, 25 bp, Homo sapien
tcccacccttaatcccgtggctgac

SEQ ID NO: 4565373 - DNA, 25 bp, Homo sapien
ccctcgagggaattattttctgacg

SEQ ID NO: 4565374 - DNA, 25 bp, Homo sapien
tctctcaggtccctcgagggaatta

SEQ ID NO: 4565375 - DNA, 25 bp, Homo sapien
tattttctgacggtttagcaagcat

SEQ ID NO: 4565376 - DNA, 25 bp, Homo sapien
ggaattattttctgacggtttagca

SEQ ID NO: 4565377 - DNA, 25 bp, Homo sapien
aaactccaggcacttttgtataggt

SEQ ID NO: 4565378 - DNA, 25 bp, Homo sapien
gattaaatgtgatagcgtaagccaa

SEQ ID NO: 4565379 - DNA, 25 bp, Homo sapien
ggtgtatgaataactggcttgactc

SEQ ID NO: 4565380 - DNA, 25 bp, Homo sapien
aactatgatagactaggatgtttca

SEQ ID NO: 4565381 - DNA, 25 bp, Homo sapien
gaaagtcacttaggatacacataac

SEQ ID NO: 4565382 - DNA, 25 bp, Homo sapien
ataattgaaggttgcggccgggcac

SEQ ID NO: 4565383 - DNA, 25 bp, Homo sapien
tgaagacataacagccttaggaagg

SEQ ID NO: 4565384 - DNA, 25 bp, Homo sapien
tgaaccaaggctcagttgaacattt

SEQ ID NO: 4565385 - DNA, 25 bp, Homo sapien
ttgaatgtaggcatgtaattgtttc

SEQ ID NO: 4565386 - DNA, 25 bp, Homo sapien
tttgaatcttggccggctgcagtga

SEQ ID NO: 4565387 - DNA, 25 bp, Homo sapien
aagttgaatgtaggcatgtaattgt

SEQ ID NO: 4565388 - DNA, 25 bp, Homo sapien
atttgaatcttggccggctgcagtg

SEQ ID NO: 4565389 - DNA, 25 bp, Homo sapien
tagctcttaggagttttgccatgcc

SEQ ID NO: 4565390 - DNA, 25 bp, Homo sapien
ggtgatgaggaatattatacccact

SEQ ID NO: 4565391 - DNA, 25 bp, Homo sapien
cctatgggtttatggcatgatttgc

SEQ ID NO: 4565392 - DNA, 25 bp, Homo sapien
caggctgctgcaaaaagggtgatga

SEQ ID NO: 4565393 - DNA, 25 bp, Homo sapien
cattgcgtatttgtcctccttgcca

SEQ ID NO: 4565394 - DNA, 25 bp, Homo sapien
gcattatcaaccgtttaaaccctca

SEQ ID NO: 4565395 - DNA, 25 bp, Homo sapien
tttcttgttgttgtagaggcattat

SEQ ID NO: 4565396 - DNA, 25 bp, Homo sapien
tgcccaccatgattctatcctagta

SEQ ID NO: 4565397 - DNA, 25 bp, Homo sapien
ttaatactgaattttttaatgtgca

SEQ ID NO: 4565398 - DNA, 25 bp, Homo sapien
tttaatgtgcaaaaatctaactctg

SEQ ID NO: 4565399 - DNA, 25 bp, Homo sapien
taactctgctttttaaagcaagtag

SEQ ID NO: 4565400 - DNA, 25 bp, Homo sapien
tttttaatgtgcaaaaatctaactc

SEQ ID NO: 4565401 - DNA, 25 bp, Homo sapien
caacaaagctaattggaacaaacac

SEQ ID NO: 4565402 - DNA, 25 bp, Homo sapien
cagcagtacaacaatctaagcaaat

SEQ ID NO: 4565403 - DNA, 25 bp, Homo sapien
gattttagcaagaactagacactta

SEQ ID NO: 4565404 - DNA, 25 bp, Homo sapien
tattgaatactaagctaagttacca

SEQ ID NO: 4565405 - DNA, 25 bp, Homo sapien
aaacaaggagacgttattcaaagat

SEQ ID NO: 4565406 - DNA, 25 bp, Homo sapien
aggagacgttattcaaagatgaatg

SEQ ID NO: 4565407 - DNA, 25 bp, Homo sapien
acaaggagacgttattcaaagatga

SEQ ID NO: 4565408 - DNA, 25 bp, Homo sapien
caaggagacgttattcaaagatgaa

SEQ ID NO: 4565409 - DNA, 25 bp, Homo sapien
catcatttgtgtgatcaggttgcaa

SEQ ID NO: 4565410 - DNA, 25 bp, Homo sapien
ttttcatcatttgtgtgatcaggtt

SEQ ID NO: 4565411 - DNA, 25 bp, Homo sapien
tttcatcatttgtgtgatcaggttg

SEQ ID NO: 4565412 - DNA, 25 bp, Homo sapien
ttcatcatttgtgtgatcaggttgc

SEQ ID NO: 4565413 - DNA, 25 bp, Homo sapien
gctaggcatgcctggcctcatggag

SEQ ID NO: 4565414 - DNA, 25 bp, Homo sapien
tgtgtagagaccatgcctaagctgg

SEQ ID NO: 4565415 - DNA, 25 bp, Homo sapien
caccttaacctccagagtagtcagg

SEQ ID NO: 4565416 - DNA, 25 bp, Homo sapien
aagtgctaggcatgcctggcctcat

SEQ ID NO: 4565417 - DNA, 25 bp, Homo sapien
ctcaccaccacgcccagttaatatt

SEQ ID NO: 4565418 - DNA, 25 bp, Homo sapien
gtgattgtcctgcttcagccacctg

SEQ ID NO: 4565419 - DNA, 25 bp, Homo sapien
cactcaccaccacgcccagttaata

SEQ ID NO: 4565420 - DNA, 25 bp, Homo sapien
agccactgcacttggcttttttttt

SEQ ID NO: 4565421 - DNA, 25 bp, Homo sapien
aatagaatcatggaagctttttcta

SEQ ID NO: 4565422 - DNA, 25 bp, Homo sapien
tagtaacacctggtagtttcttcca

SEQ ID NO: 4565423 - DNA, 25 bp, Homo sapien
ggtagtttcttccaatgcacatata

SEQ ID NO: 4565424 - DNA, 25 bp, Homo sapien
agaatcatggaagctttttctatta

SEQ ID NO: 4565425 - DNA, 25 bp, Homo sapien
ctaatcattttacagccttgtagat

SEQ ID NO: 4565426 - DNA, 25 bp, Homo sapien
tatacgtgaaactccaacagattta

SEQ ID NO: 4565427 - DNA, 25 bp, Homo sapien
tgtcttatacgtgaaactccaacag

SEQ ID NO: 4565428 - DNA, 25 bp, Homo sapien
tcctctgtcttatacgtgaaactcc

SEQ ID NO: 4565429 - DNA, 25 bp, Homo sapien
tggagaactgtagctgtttcttgac

SEQ ID NO: 4565430 - DNA, 25 bp, Homo sapien
tgaacttctaggcaccatttggatt

SEQ ID NO: 4565431 - DNA, 25 bp, Homo sapien
taaaccagtccagtttgagactctc

SEQ ID NO: 4565432 - DNA, 25 bp, Homo sapien
tttatcatctagtcaaatccttcag

SEQ ID NO: 4565433 - DNA, 25 bp, Homo sapien
tccggcatactggttaaaggaacaa

SEQ ID NO: 4565434 - DNA, 25 bp, Homo sapien
caaatgaagaaacctgcacgggtag

SEQ ID NO: 4565435 - DNA, 25 bp, Homo sapien
caagaccacaaggagaccggctgta

SEQ ID NO: 4565436 - DNA, 25 bp, Homo sapien
cagaagtagcagacccagaatgagc

SEQ ID NO: 4565437 - DNA, 25 bp, Homo sapien
ggatcagtgtgccgtgtgtccagct

SEQ ID NO: 4565438 - DNA, 25 bp, Homo sapien
tggatcagtgtgccgtgtgtccagc

SEQ ID NO: 4565439 - DNA, 25 bp, Homo sapien
ttggatcagtgtgccgtgtgtccag

SEQ ID NO: 4565440 - DNA, 25 bp, Homo sapien
gtcccatatgaccttcagaaatttt

SEQ ID NO: 4565441 - DNA, 25 bp, Homo sapien
tatgagaagaggtttttacccagag

SEQ ID NO: 4565442 - DNA, 25 bp, Homo sapien
cctacatccagacaagtactttgtt

SEQ ID NO: 4565443 - DNA, 25 bp, Homo sapien
gaaagcctggaccttattaattaca

SEQ ID NO: 4565444 - DNA, 25 bp, Homo sapien
gggacaggattaatggaattcaagt

SEQ ID NO: 4565445 - DNA, 25 bp, Homo sapien
ggaattcaagttatataagccaaca

SEQ ID NO: 4565446 - DNA, 25 bp, Homo sapien
ttaagggacaggattaatggaattc

SEQ ID NO: 4565447 - DNA, 25 bp, Homo sapien
tatataagccaacaaggaaattgcc

SEQ ID NO: 4565448 - DNA, 25 bp, Homo sapien
ctccaattcctttttgccacttggg

SEQ ID NO: 4565449 - DNA, 25 bp, Homo sapien
ttcagaatctttaggggacaaccta

SEQ ID NO: 4565450 - DNA, 25 bp, Homo sapien
cacttgggagttgggcgcacgcaaa

SEQ ID NO: 4565451 - DNA, 25 bp, Homo sapien
tttttgccacttgggagttgggcgc

SEQ ID NO: 4565452 - DNA, 25 bp, Homo sapien
cctggttatttttcaacagtaatat

SEQ ID NO: 4565453 - DNA, 25 bp, Homo sapien
ccaaaggaaccttacaggaatgctt

SEQ ID NO: 4565454 - DNA, 25 bp, Homo sapien
cctgcccggccaattcctggttatt

SEQ ID NO: 4565455 - DNA, 25 bp, Homo sapien
actctagttgttaaagaatgcttac

SEQ ID NO: 4565456 - DNA, 25 bp, Homo sapien
tcaacatatattcagtaagggccta

SEQ ID NO: 4565457 - DNA, 25 bp, Homo sapien
ggctctggtgattcaacagtggacc

SEQ ID NO: 4565458 - DNA, 25 bp, Homo sapien
taagggcctatttagttggctctgg

SEQ ID NO: 4565459 - DNA, 25 bp, Homo sapien
tggaccagacgatgagatgcggctc

SEQ ID NO: 4565460 - DNA, 25 bp, Homo sapien
ttcctcgatgaaactgatgtcgaat

SEQ ID NO: 4565461 - DNA, 25 bp, Homo sapien
cctcgatgaaactgatgtcgaatta

SEQ ID NO: 4565462 - DNA, 25 bp, Homo sapien
tcctcgatgaaactgatgtcgaatt

SEQ ID NO: 4565463 - DNA, 25 bp, Homo sapien
ctcgatgaaactgatgtcgaattag

SEQ ID NO: 4565464 - DNA, 25 bp, Homo sapien
ggcaggagggttccgacaccgagtc

SEQ ID NO: 4565465 - DNA, 25 bp, Homo sapien
gagggttccgacaccgagtcctgga

SEQ ID NO: 4565466 - DNA, 25 bp, Homo sapien
cgacaccgagtcctggaccccagca

SEQ ID NO: 4565467 - DNA, 25 bp, Homo sapien
aggagggttccgacaccgagtcctg

SEQ ID NO: 4565468 - DNA, 25 bp, Homo sapien
acactgtctgctttagtccgcacca

SEQ ID NO: 4565469 - DNA, 25 bp, Homo sapien
cactgtctgctttagtccgcaccat

SEQ ID NO: 4565470 - DNA, 25 bp, Homo sapien
cttttctgtaagtgcctggaacact

SEQ ID NO: 4565471 - DNA, 25 bp, Homo sapien
gtaagtgcctggaacactgtctgct

SEQ ID NO: 4565472 - DNA, 25 bp, Homo sapien
actatcccgccacagtttatattgg

SEQ ID NO: 4565473 - DNA, 25 bp, Homo sapien
ttatattggtctctttcccgcgcgc

SEQ ID NO: 4565474 - DNA, 25 bp, Homo sapien
ggtgtttcactggacaaggacccga

SEQ ID NO: 4565475 - DNA, 25 bp, Homo sapien
gagagaacgaactgacttcccagcc

SEQ ID NO: 4565476 - DNA, 25 bp, Homo sapien
gcttaccttctaattactcacaaca

SEQ ID NO: 4565477 - DNA, 25 bp, Homo sapien
aaaagaccctgccaaatgtggtaag

SEQ ID NO: 4565478 - DNA, 25 bp, Homo sapien
ataaaacagaatcggtcaggcatgg

SEQ ID NO: 4565479 - DNA, 25 bp, Homo sapien
gtcacacagtgagcataactctagg

SEQ ID NO: 4565480 - DNA, 25 bp, Homo sapien
gtcctacgtttagcgattggcaaga

SEQ ID NO: 4565481 - DNA, 25 bp, Homo sapien
aatggccttcctcgagtcctacgtt

SEQ ID NO: 4565482 - DNA, 25 bp, Homo sapien
ccatgacgattaaaaagctggcctc

SEQ ID NO: 4565483 - DNA, 25 bp, Homo sapien
tggcaagaatcatgcactgacagag

SEQ ID NO: 4565484 - DNA, 25 bp, Homo sapien
tatagacctcttggttcaactggat

SEQ ID NO: 4565485 - DNA, 25 bp, Homo sapien
tgggatattccaggaaactagaatt

SEQ ID NO: 4565486 - DNA, 25 bp, Homo sapien
attagtggacagagttcatcctcaa

SEQ ID NO: 4565487 - DNA, 25 bp, Homo sapien
cacagaggacgactttggatagcag

SEQ ID NO: 4565488 - DNA, 25 bp, Homo sapien
taacagccgcatattctcctttcaa

SEQ ID NO: 4565489 - DNA, 25 bp, Homo sapien
aaggtaacagccgcatattctcctt

SEQ ID NO: 4565490 - DNA, 25 bp, Homo sapien
ggaaaggtaacagccgcatattctc

SEQ ID NO: 4565491 - DNA, 25 bp, Homo sapien
ggtaacagccgcatattctcctttc

SEQ ID NO: 4565492 - DNA, 25 bp, Homo sapien
gttgaggtgaaatctgggacatctt

SEQ ID NO: 4565493 - DNA, 25 bp, Homo sapien
tcttgcttgttgagcataatcctct

SEQ ID NO: 4565494 - DNA, 25 bp, Homo sapien
tcagagatggcaggcaatagactgt

SEQ ID NO: 4565495 - DNA, 25 bp, Homo sapien
caaagcttgtcccaactatcctgaa

SEQ ID NO: 4565496 - DNA, 25 bp, Homo sapien
tgcagtagtaaggaatggggaaaaa

SEQ ID NO: 4565497 - DNA, 25 bp, Homo sapien
agtgcagtagtaaggaatggggaaa

SEQ ID NO: 4565498 - DNA, 25 bp, Homo sapien
aggtaacccactacctttggatcag

SEQ ID NO: 4565499 - DNA, 25 bp, Homo sapien
cagttgaggtaacccactacctttg

SEQ ID NO: 4565500 - DNA, 25 bp, Homo sapien
cataatctttgatggtctaattttc

SEQ ID NO: 4565501 - DNA, 25 bp, Homo sapien
tgcatcttacttgtctagattttta

SEQ ID NO: 4565502 - DNA, 25 bp, Homo sapien
tttgtcttgcatcttacttgtctag

SEQ ID NO: 4565503 - DNA, 25 bp, Homo sapien
agtcataatctttgatggtctaatt

SEQ ID NO: 4565504 - DNA, 25 bp, Homo sapien
aattgcacagaaacaataggtagtg

SEQ ID NO: 4565505 - DNA, 25 bp, Homo sapien
tctacaccttcaggacctatagggc

SEQ ID NO: 4565506 - DNA, 25 bp, Homo sapien
tagactagacaaggttaaaaattgc

SEQ ID NO: 4565507 - DNA, 25 bp, Homo sapien
tccataaggtttcatgatggtgagg

SEQ ID NO: 4565508 - DNA, 25 bp, Homo sapien
caatgcagagctcattggcacacat

SEQ ID NO: 4565509 - DNA, 25 bp, Homo sapien
ttcagaagaataagggatgccagcc

SEQ ID NO: 4565510 - DNA, 25 bp, Homo sapien
gcagagctcattggcacacattttt

SEQ ID NO: 4565511 - DNA, 25 bp, Homo sapien
ctttttgagtgaggaacaatgcaga

SEQ ID NO: 4565512 - DNA, 25 bp, Homo sapien
gacatttgccgaagtatgacgaaca

SEQ ID NO: 4565513 - DNA, 25 bp, Homo sapien
tttgccgaagtatgacgaacaaggg

SEQ ID NO: 4565514 - DNA, 25 bp, Homo sapien
ttaatgctgaaaatgcacgttgatg

SEQ ID NO: 4565515 - DNA, 25 bp, Homo sapien
tgcacgttgatgacatttgccgaag

SEQ ID NO: 4565516 - DNA, 25 bp, Homo sapien
ccttttctaactcttctacttcatt

SEQ ID NO: 4565517 - DNA, 25 bp, Homo sapien
taactcttctacttcattatttttc

SEQ ID NO: 4565518 - DNA, 25 bp, Homo sapien
tctacttcattatttttcttgttac

SEQ ID NO: 4565519 - DNA, 25 bp, Homo sapien
ttttctaactcttctacttcattat

SEQ ID NO: 4565520 - DNA, 25 bp, Homo sapien
accgtagtgggccatgatagcgcca

SEQ ID NO: 4565521 - DNA, 25 bp, Homo sapien
gacctagtttcctccagtggtaaca

SEQ ID NO: 4565522 - DNA, 25 bp, Homo sapien
cagagggatcctttgtacccttgac

SEQ ID NO: 4565523 - DNA, 25 bp, Homo sapien
gtggaaaccgtagtgggccatgata

SEQ ID NO: 4565524 - DNA, 25 bp, Homo sapien
gcttttaccagcagagctcatccag

SEQ ID NO: 4565525 - DNA, 25 bp, Homo sapien
ccagtgtgaacttgtatttttgcca

SEQ ID NO: 4565526 - DNA, 25 bp, Homo sapien
caagccatgcttgagtaacccgcct

SEQ ID NO: 4565527 - DNA, 25 bp, Homo sapien
ggcttgggatgtggcagtaacatac

SEQ ID NO: 4565528 - DNA, 25 bp, Homo sapien
aaggcagttagagagccaggctccc

SEQ ID NO: 4565529 - DNA, 25 bp, Homo sapien
tatcatattcgctccaaggtaagac

SEQ ID NO: 4565530 - DNA, 25 bp, Homo sapien
tccaggcaggtgagtagtttcatct

SEQ ID NO: 4565531 - DNA, 25 bp, Homo sapien
cctttctggagaagcagtacaggaa

SEQ ID NO: 4565532 - DNA, 25 bp, Homo sapien
gcacagtcttggcttggatcactgc

SEQ ID NO: 4565533 - DNA, 25 bp, Homo sapien
ctctcatgctgtcgctgggctggtg

SEQ ID NO: 4565534 - DNA, 25 bp, Homo sapien
gtcttcctctcatgctgtcgctggg

SEQ ID NO: 4565535 - DNA, 25 bp, Homo sapien
tcctctcatgctgtcgctgggctgg

SEQ ID NO: 4565536 - DNA, 25 bp, Homo sapien
tcttcctctcatgctgtcgctgggc

SEQ ID NO: 4565537 - DNA, 25 bp, Homo sapien
tagcttgacagagtggtccttgagg

SEQ ID NO: 4565538 - DNA, 25 bp, Homo sapien
aattagcttgacagagtggtccttg

SEQ ID NO: 4565539 - DNA, 25 bp, Homo sapien
ggaaattagcttgacagagtggtcc

SEQ ID NO: 4565540 - DNA, 25 bp, Homo sapien
gtccttgaggacaatggctgcccca

SEQ ID NO: 4565541 - DNA, 25 bp, Homo sapien
tcgaaggagaccatctggtgctcat

SEQ ID NO: 4565542 - DNA, 25 bp, Homo sapien
tgaagtcgaaggagaccatctggtg

SEQ ID NO: 4565543 - DNA, 25 bp, Homo sapien
tgttgaagtcgaaggagaccatctg

SEQ ID NO: 4565544 - DNA, 25 bp, Homo sapien
ctgttgaagtcgaaggagaccatct

SEQ ID NO: 4565545 - DNA, 25 bp, Homo sapien
gcaggtttttccagacgacaggtca

SEQ ID NO: 4565546 - DNA, 25 bp, Homo sapien
tttccagacgacaggtcaggtccgc

SEQ ID NO: 4565547 - DNA, 25 bp, Homo sapien
tttttccagacgacaggtcaggtcc

SEQ ID NO: 4565548 - DNA, 25 bp, Homo sapien
tccagacgacaggtcaggtccgcca

SEQ ID NO: 4565549 - DNA, 25 bp, Homo sapien
gcttggcagcgccagtagagacagg

SEQ ID NO: 4565550 - DNA, 25 bp, Homo sapien
acaggcttggcagcgccagtagaga

SEQ ID NO: 4565551 - DNA, 25 bp, Homo sapien
aggcttggcagcgccagtagagaca

SEQ ID NO: 4565552 - DNA, 25 bp, Homo sapien
ttacccacaggcttggcagcgccag

SEQ ID NO: 4565553 - DNA, 25 bp, Homo sapien
ctgcagccatcacgtgacagtttcc

SEQ ID NO: 4565554 - DNA, 25 bp, Homo sapien
tgcagccatcacgtgacagtttccc

SEQ ID NO: 4565555 - DNA, 25 bp, Homo sapien
gcagccatcacgtgacagtttcccg

SEQ ID NO: 4565556 - DNA, 25 bp, Homo sapien
ctaagcagttggtgatgcaggaggc

SEQ ID NO: 4565557 - DNA, 25 bp, Homo sapien
ttggtgatgcaggaggcattgctga

SEQ ID NO: 4565558 - DNA, 25 bp, Homo sapien
agcagttggtgatgcaggaggcatt

SEQ ID NO: 4565559 - DNA, 25 bp, Homo sapien
tggtgatgcaggaggcattgctgac

SEQ ID NO: 4565560 - DNA, 25 bp, Homo sapien
accagtgaactctacgacgtactca

SEQ ID NO: 4565561 - DNA, 25 bp, Homo sapien
acaccagtgaactctacgacgtact

SEQ ID NO: 4565562 - DNA, 25 bp, Homo sapien
gaggacagagatgttgacccttttg

SEQ ID NO: 4565563 - DNA, 25 bp, Homo sapien
agaggacagagatgttgaccctttt

SEQ ID NO: 4565564 - DNA, 25 bp, Homo sapien
cccatttgattttggagggatcttg

SEQ ID NO: 4565565 - DNA, 25 bp, Homo sapien
catttgattttggagggatcttggt

SEQ ID NO: 4565566 - DNA, 25 bp, Homo sapien
ccatttgattttggagggatcttgg

SEQ ID NO: 4565567 - DNA, 25 bp, Homo sapien
atttgattttggagggatcttggtc

SEQ ID NO: 4565568 - DNA, 25 bp, Homo sapien
aatgggtgatggggtttccattgat

SEQ ID NO: 4565569 - DNA, 25 bp, Homo sapien
gggtgatggggtttccattgatgac

SEQ ID NO: 4565570 - DNA, 25 bp, Homo sapien
tggaaaatgggtgatggggtttcca

SEQ ID NO: 4565571 - DNA, 25 bp, Homo sapien
aaaatgggtgatggggtttccattg

SEQ ID NO: 4565572 - DNA, 25 bp, Homo sapien
catgtgtagaatcatacaggaacat

SEQ ID NO: 4565573 - DNA, 25 bp, Homo sapien
tgccatgtgtagaatcatacaggaa

SEQ ID NO: 4565574 - DNA, 25 bp, Homo sapien
tttgccatgtgtagaatcatacagg

SEQ ID NO: 4565575 - DNA, 25 bp, Homo sapien
ccatgtgtagaatcatacaggaaca

SEQ ID NO: 4565576 - DNA, 25 bp, Homo sapien
gcacccagtacgaccaaatctgttg

SEQ ID NO: 4565577 - DNA, 25 bp, Homo sapien
agagttaaaagcagtcatggtgcac

SEQ ID NO: 4565578 - DNA, 25 bp, Homo sapien
ggtgcaccaggcacccagtacgacc

SEQ ID NO: 4565579 - DNA, 25 bp, Homo sapien
taaaagcagtcatggtgcaccaggc

SEQ ID NO: 4565580 - DNA, 25 bp, Homo sapien
cagtctctggattccaagtcagtgc

SEQ ID NO: 4565581 - DNA, 25 bp, Homo sapien
caggctgtccagagttctttcaaca

SEQ ID NO: 4565582 - DNA, 25 bp, Homo sapien
tcagaccatcaagttgtaggtaggt

SEQ ID NO: 4565583 - DNA, 25 bp, Homo sapien
taagctgtcagcaagcgaacccctt

SEQ ID NO: 4565584 - DNA, 25 bp, Homo sapien
tagtttcagcttcatagggtggttg

SEQ ID NO: 4565585 - DNA, 25 bp, Homo sapien
catttctctacctgtcaccctttga

SEQ ID NO: 4565586 - DNA, 25 bp, Homo sapien
taattcaaggtgtaagtagccccag

SEQ ID NO: 4565587 - DNA, 25 bp, Homo sapien
tagccccagcttaatatagtttctc

SEQ ID NO: 4565588 - DNA, 25 bp, Homo sapien
tcaaagcgggcttagtacatgatgt

SEQ ID NO: 4565589 - DNA, 25 bp, Homo sapien
tgttaatgctatgtttccactcctg

SEQ ID NO: 4565590 - DNA, 25 bp, Homo sapien
ggtagacctcctaatgcctgtgaaa

SEQ ID NO: 4565591 - DNA, 25 bp, Homo sapien
cagtatggccaaaaacctatcctgg

SEQ ID NO: 4565592 - DNA, 25 bp, Homo sapien
ctccaagatgacaaagaaaagaagg

SEQ ID NO: 4565593 - DNA, 25 bp, Homo sapien
aagatgacaaagaaaagaaggaaca

SEQ ID NO: 4565594 - DNA, 25 bp, Homo sapien
tgcctccaagatgacaaagaaaaga

SEQ ID NO: 4565595 - DNA, 25 bp, Homo sapien
caagatgacaaagaaaagaaggaac

SEQ ID NO: 4565596 - DNA, 25 bp, Homo sapien
tgtcattcactcagatttaagctcc

SEQ ID NO: 4565597 - DNA, 25 bp, Homo sapien
tcccataatgtacttccaggcttct

SEQ ID NO: 4565598 - DNA, 25 bp, Homo sapien
tggtttttgagaagatatcaaacaa

SEQ ID NO: 4565599 - DNA, 25 bp, Homo sapien
aaaaatactcacatgaccccttcag

SEQ ID NO: 4565600 - DNA, 25 bp, Homo sapien
aatgtgttcctctagaagtccagcc

SEQ ID NO: 4565601 - DNA, 25 bp, Homo sapien
aaactctgcttcgttccacggcctg

SEQ ID NO: 4565602 - DNA, 25 bp, Homo sapien
aatgcctatctacctaggtccgtgg

SEQ ID NO: 4565603 - DNA, 25 bp, Homo sapien
gtcatgtgctcttccgccacgtgtg

SEQ ID NO: 4565604 - DNA, 25 bp, Homo sapien
ttatgctgtgaatttgtagggaaga

SEQ ID NO: 4565605 - DNA, 25 bp, Homo sapien
ctgcttcaggtgaacccagatgcct

SEQ ID NO: 4565606 - DNA, 25 bp, Homo sapien
ctgtgaatttgtagggaagaggttc

SEQ ID NO: 4565607 - DNA, 25 bp, Homo sapien
tctgggtagaggctgctgcttcagg

SEQ ID NO: 4565608 - DNA, 25 bp, Homo sapien
cagtcttgccccaggcagtactcac

SEQ ID NO: 4565609 - DNA, 25 bp, Homo sapien
tatttcctttagttgctgccttcac

SEQ ID NO: 4565610 - DNA, 25 bp, Homo sapien
tcctgccagatcctttatttccttt

SEQ ID NO: 4565611 - DNA, 25 bp, Homo sapien
tagttgctgccttcacggccttctc

SEQ ID NO: 4565612 - DNA, 25 bp, Homo sapien
tcctttagttgctgccttcacggcc

SEQ ID NO: 4565613 - DNA, 25 bp, Homo sapien
tacagtcagatccatgaattgagga

SEQ ID NO: 4565614 - DNA, 25 bp, Homo sapien
taatttgacccttccttacagtcag

SEQ ID NO: 4565615 - DNA, 25 bp, Homo sapien
ggaagtatcctctctaaaggaacag

SEQ ID NO: 4565616 - DNA, 25 bp, Homo sapien
tggaagactcgtacgtaatttgacc

SEQ ID NO: 4565617 - DNA, 25 bp, Homo sapien
cacctagttctgctaccttgaggca

SEQ ID NO: 4565618 - DNA, 25 bp, Homo sapien
taatatagcagtcatagggacacac

SEQ ID NO: 4565619 - DNA, 25 bp, Homo sapien
catgaatacatgaagtggcacaaca

SEQ ID NO: 4565620 - DNA, 25 bp, Homo sapien
caggtatatcgtggcatgtgccagt

SEQ ID NO: 4565621 - DNA, 25 bp, Homo sapien
taactccatgtccagtgatttttag

SEQ ID NO: 4565622 - DNA, 25 bp, Homo sapien
aaggttacactataacaaagccagg

SEQ ID NO: 4565623 - DNA, 25 bp, Homo sapien
tagtgggtggccgtagacaaacaaa

SEQ ID NO: 4565624 - DNA, 25 bp, Homo sapien
catagaaaatatgccttggagctgg

SEQ ID NO: 4565625 - DNA, 25 bp, Homo sapien
ggttctactgggaccttgggcttga

SEQ ID NO: 4565626 - DNA, 25 bp, Homo sapien
cacaagtagtgactgcaagctgccc

SEQ ID NO: 4565627 - DNA, 25 bp, Homo sapien
caagctgcccacgtcagaggagtct

SEQ ID NO: 4565628 - DNA, 25 bp, Homo sapien
gcagagccccggatgtggacatatg

SEQ ID NO: 4565629 - DNA, 25 bp, Homo sapien
agagtaggagctgctcagaagagca

SEQ ID NO: 4565630 - DNA, 25 bp, Homo sapien
tggcagatcctgatgcctgccgggc

SEQ ID NO: 4565631 - DNA, 25 bp, Homo sapien
cccctgaagagtaggagctgctcag

SEQ ID NO: 4565632 - DNA, 25 bp, Homo sapien
cctcatatccaagtctcccctgaag

SEQ ID NO: 4565633 - DNA, 25 bp, Homo sapien
gaccaagcctgtttatgagccaccc

SEQ ID NO: 4565634 - DNA, 25 bp, Homo sapien
ggtgggagctacctgtggcatccat

SEQ ID NO: 4565635 - DNA, 25 bp, Homo sapien
aatttgctaccaagggccaagacca

SEQ ID NO: 4565636 - DNA, 25 bp, Homo sapien
gagtgaaagatttgctgcccacctc

SEQ ID NO: 4565637 - DNA, 25 bp, Homo sapien
ttagagttgcgagttaagactgcag

SEQ ID NO: 4565638 - DNA, 25 bp, Homo sapien
taattacttgggcatcccaggaagc

SEQ ID NO: 4565639 - DNA, 25 bp, Homo sapien
caaagaaccacacgcttagaagggt

SEQ ID NO: 4565640 - DNA, 25 bp, Homo sapien
gctttgaggccacccatgtcactta

SEQ ID NO: 4565641 - DNA, 25 bp, Homo sapien
acttgcctccctgacatccccgtcc

SEQ ID NO: 4565642 - DNA, 25 bp, Homo sapien
acacttgcctccctgacatccccgt

SEQ ID NO: 4565643 - DNA, 25 bp, Homo sapien
acacaacacacttgcctccctgaca

SEQ ID NO: 4565644 - DNA, 25 bp, Homo sapien
aacacacttgcctccctgacatccc

SEQ ID NO: 4565645 - DNA, 25 bp, Homo sapien
cagtccctaagaacggattgcccca

SEQ ID NO: 4565646 - DNA, 25 bp, Homo sapien
tcagacactactcggaacctggtgg

SEQ ID NO: 4565647 - DNA, 25 bp, Homo sapien
gctagtactatactcagccagccag

SEQ ID NO: 4565648 - DNA, 25 bp, Homo sapien
tgctgtttgtgaccccaagaaggag

SEQ ID NO: 4565649 - DNA, 25 bp, Homo sapien
taattagagtttggctagtgtttta

SEQ ID NO: 4565650 - DNA, 25 bp, Homo sapien
taagccagcttaaccaaatgccaga

SEQ ID NO: 4565651 - DNA, 25 bp, Homo sapien
aaatgtactgataacattaaacaga

SEQ ID NO: 4565652 - DNA, 25 bp, Homo sapien
cctggtggtgggagtaaatttcaat

SEQ ID NO: 4565653 - DNA, 25 bp, Homo sapien
gaaacctgagcctgacagtgctgcc

SEQ ID NO: 4565654 - DNA, 25 bp, Homo sapien
aaagcctatactcaggagcccctgg

SEQ ID NO: 4565655 - DNA, 25 bp, Homo sapien
cagagaagcccaggtaagagtgtca

SEQ ID NO: 4565656 - DNA, 25 bp, Homo sapien
cagtgtccttccctagacagcgagg

SEQ ID NO: 4565657 - DNA, 25 bp, Homo sapien
tagtcctcatcggacaagttctggt

SEQ ID NO: 4565658 - DNA, 25 bp, Homo sapien
aagaagctgaaggtcttcaggagtg

SEQ ID NO: 4565659 - DNA, 25 bp, Homo sapien
tgaacatcacatctggccgagaggg

SEQ ID NO: 4565660 - DNA, 25 bp, Homo sapien
cagggatggcctggacgtacaatct

SEQ ID NO: 4565661 - DNA, 25 bp, Homo sapien
ctgcagaagacagagtgtaaaaaag

SEQ ID NO: 4565662 - DNA, 25 bp, Homo sapien
tgcagaagacagagtgtaaaaaagt

SEQ ID NO: 4565663 - DNA, 25 bp, Homo sapien
gcagaagacagagtgtaaaaaagtc

SEQ ID NO: 4565664 - DNA, 25 bp, Homo sapien
agaagacagagtgtaaaaaagtctg

SEQ ID NO: 4565665 - DNA, 25 bp, Homo sapien
agcaaactctagcagtgctaacaat

SEQ ID NO: 4565666 - DNA, 25 bp, Homo sapien
tgttacaaaacggtatctgcttggg

SEQ ID NO: 4565667 - DNA, 25 bp, Homo sapien
tctggaatgggacctcctttccctc

SEQ ID NO: 4565668 - DNA, 25 bp, Homo sapien
aaacatatactcttctctggaatgg

SEQ ID NO: 4565669 - DNA, 25 bp, Homo sapien
agtctagagctaagggagaaggcac

SEQ ID NO: 4565670 - DNA, 25 bp, Homo sapien
gtggacgatgtgaggttttccatca

SEQ ID NO: 4565671 - DNA, 25 bp, Homo sapien
ctggctggacaggactgcatcccaa

SEQ ID NO: 4565672 - DNA, 25 bp, Homo sapien
aagaagagaccttcacctcggtgac

SEQ ID NO: 4565673 - DNA, 25 bp, Homo sapien
gacctcatactggaagtggacgatg

SEQ ID NO: 4565674 - DNA, 25 bp, Homo sapien
aaattgtccactaggtgccaagtac

SEQ ID NO: 4565675 - DNA, 25 bp, Homo sapien
gaataatgaagcaactgacccaagg

SEQ ID NO: 4565676 - DNA, 25 bp, Homo sapien
gggtccgtgttatctcccttgggca

SEQ ID NO: 4565677 - DNA, 25 bp, Homo sapien
cagcctcagctgaaagagtccttca

SEQ ID NO: 4565678 - DNA, 25 bp, Homo sapien
cttatatattagagctgagagagaa

SEQ ID NO: 4565679 - DNA, 25 bp, Homo sapien
ctgagagagaaggatccctgccgcc

SEQ ID NO: 4565680 - DNA, 25 bp, Homo sapien
agctgagagagaaggatccctgccg

SEQ ID NO: 4565681 - DNA, 25 bp, Homo sapien
agagctgagagagaaggatccctgc

SEQ ID NO: 4565682 - DNA, 25 bp, Homo sapien
gaacaatgtgcctgcagcactggag

SEQ ID NO: 4565683 - DNA, 25 bp, Homo sapien
cagaggccctggaacaatgtgcctg

SEQ ID NO: 4565684 - DNA, 25 bp, Homo sapien
ggaacaatgtgcctgcagcactgga

SEQ ID NO: 4565685 - DNA, 25 bp, Homo sapien
aggccctggaacaatgtgcctgcag

SEQ ID NO: 4565686 - DNA, 25 bp, Homo sapien
ctggggacagttactcaaaggcaaa

SEQ ID NO: 4565687 - DNA, 25 bp, Homo sapien
tggggacagttactcaaaggcaaaa

SEQ ID NO: 4565688 - DNA, 25 bp, Homo sapien
ttttcggatggacccaacagggctg

SEQ ID NO: 4565689 - DNA, 25 bp, Homo sapien
tttatttgaccggaggagcacctag

SEQ ID NO: 4565690 - DNA, 25 bp, Homo sapien
gaaggcttatgaacgctcccagctg

SEQ ID NO: 4565691 - DNA, 25 bp, Homo sapien
gatcctttcgtgacctgagcgtggg

SEQ ID NO: 4565692 - DNA, 25 bp, Homo sapien
ctggtcacaccacttgagggcaggc

SEQ ID NO: 4565693 - DNA, 25 bp, Homo sapien
ggtcacaccacttgagggcaggcat

SEQ ID NO: 4565694 - DNA, 25 bp, Homo sapien
tcctggtcacaccacttgagggcag

SEQ ID NO: 4565695 - DNA, 25 bp, Homo sapien
ctcctggtcacaccacttgagggca

SEQ ID NO: 4565696 - DNA, 25 bp, Homo sapien
ttaatctcaaccacctaaaggatga

SEQ ID NO: 4565697 - DNA, 25 bp, Homo sapien
tttaatctcaaccacctaaaggatg

SEQ ID NO: 4565698 - DNA, 25 bp, Homo sapien
aatctcaaccacctaaaggatgatt

SEQ ID NO: 4565699 - DNA, 25 bp, Homo sapien
tgtttaatctcaaccacctaaagga

SEQ ID NO: 4565700 - DNA, 25 bp, Homo sapien
aatcatggcaccaacttgaatcaac

SEQ ID NO: 4565701 - DNA, 25 bp, Homo sapien
ttcataaccttctaaatcatggcac

SEQ ID NO: 4565702 - DNA, 25 bp, Homo sapien
ttgaatcaacactgcatactctttc

SEQ ID NO: 4565703 - DNA, 25 bp, Homo sapien
gaatcaacactgcatactctttcaa

SEQ ID NO: 4565704 - DNA, 25 bp, Homo sapien
aatgggagctaaattcccagccagc

SEQ ID NO: 4565705 - DNA, 25 bp, Homo sapien
gaacatccggctcttatcagaatcc

SEQ ID NO: 4565706 - DNA, 25 bp, Homo sapien
gaaacactcgagaacactgactggg

SEQ ID NO: 4565707 - DNA, 25 bp, Homo sapien
tagttaggactctaccaggattcct

SEQ ID NO: 4565708 - DNA, 25 bp, Homo sapien
ggccgagcgcctccttttgcctcag

SEQ ID NO: 4565709 - DNA, 25 bp, Homo sapien
gtgggtgtggggtcacgcgcgcggg

SEQ ID NO: 4565710 - DNA, 25 bp, Homo sapien
gggtcgatctctgcgggctaagtcc

SEQ ID NO: 4565711 - DNA, 25 bp, Homo sapien
cgagcgcctgcctccaactgaccct

SEQ ID NO: 4565712 - DNA, 25 bp, Homo sapien
catgaccaaggcggtgggtctgccc

SEQ ID NO: 4565713 - DNA, 25 bp, Homo sapien
cgcggcccagaagatgcgttgtgtt

SEQ ID NO: 4565714 - DNA, 25 bp, Homo sapien
ctattccttgttggcgtggggccga

SEQ ID NO: 4565715 - DNA, 25 bp, Homo sapien
tgtgaggattgactcaacctggtcc

SEQ ID NO: 4565716 - DNA, 25 bp, Homo sapien
gcagagttggagagatgtaacttac

SEQ ID NO: 4565717 - DNA, 25 bp, Homo sapien
agcagagttggagagatgtaactta

SEQ ID NO: 4565718 - DNA, 25 bp, Homo sapien
gaagaacaggtgtcagctctctgct

SEQ ID NO: 4565719 - DNA, 25 bp, Homo sapien
tgaaacaaggcagaagcacgagaag

SEQ ID NO: 4565720 - DNA, 25 bp, Homo sapien
acaattcaacgccactttttcaagg

SEQ ID NO: 4565721 - DNA, 25 bp, Homo sapien
gaagcacgagaagacagcagcatca

SEQ ID NO: 4565722 - DNA, 25 bp, Homo sapien
caaaatccccatcaaagcctggctt

SEQ ID NO: 4565723 - DNA, 25 bp, Homo sapien
gccaaaatccccatcaaagcctggc

SEQ ID NO: 4565724 - DNA, 25 bp, Homo sapien
aaaatccccatcaaagcctggcttc

SEQ ID NO: 4565725 - DNA, 25 bp, Homo sapien
aaatccccatcaaagcctggcttca

SEQ ID NO: 4565726 - DNA, 25 bp, Homo sapien
atcagagcccacggcctgctgggga

SEQ ID NO: 4565727 - DNA, 25 bp, Homo sapien
cagagcccacggcctgctggggacc

SEQ ID NO: 4565728 - DNA, 25 bp, Homo sapien
tcagagcccacggcctgctggggac

SEQ ID NO: 4565729 - DNA, 25 bp, Homo sapien
gatcagagcccacggcctgctgggg

SEQ ID NO: 4565730 - DNA, 25 bp, Homo sapien
gtgccacattgttctgctacttcct

SEQ ID NO: 4565731 - DNA, 25 bp, Homo sapien
ctgatgtgccacattgttctgctac

SEQ ID NO: 4565732 - DNA, 25 bp, Homo sapien
tgtgccacattgttctgctacttcc

SEQ ID NO: 4565733 - DNA, 25 bp, Homo sapien
gatgtgccacattgttctgctactt

SEQ ID NO: 4565734 - DNA, 25 bp, Homo sapien
gaggaggctgcggttcattcccacg

SEQ ID NO: 4565735 - DNA, 25 bp, Homo sapien
ttgggggtgggacagcacggccagg

SEQ ID NO: 4565736 - DNA, 25 bp, Homo sapien
agctgcccttctggccgccctggga

SEQ ID NO: 4565737 - DNA, 25 bp, Homo sapien
aggctgcggttcattcccacgacca

SEQ ID NO: 4565738 - DNA, 25 bp, Homo sapien
cacagccacgtagatcgtagagcca

SEQ ID NO: 4565739 - DNA, 25 bp, Homo sapien
agccacgtagatcgtagagccagtg

SEQ ID NO: 4565740 - DNA, 25 bp, Homo sapien
aggatcctccacagccacgtagatc

SEQ ID NO: 4565741 - DNA, 25 bp, Homo sapien
tcctccacagccacgtagatcgtag

SEQ ID NO: 4565742 - DNA, 25 bp, Homo sapien
aatacaacttatattgagagagatg

SEQ ID NO: 4565743 - DNA, 25 bp, Homo sapien
ccaagaattcttaaatataagacac

SEQ ID NO: 4565744 - DNA, 25 bp, Homo sapien
tgagacagtgataagcatcaatgtt

SEQ ID NO: 4565745 - DNA, 25 bp, Homo sapien
cacaaaattgtataggaaatacaac

SEQ ID NO: 4565746 - DNA, 25 bp, Homo sapien
ggatcagcatcccaatactccactt

SEQ ID NO: 4565747 - DNA, 25 bp, Homo sapien
tctgagaaactggatggtccagctt

SEQ ID NO: 4565748 - DNA, 25 bp, Homo sapien
gctttatgtaacaaggagctattga

SEQ ID NO: 4565749 - DNA, 25 bp, Homo sapien
gctattgaaggctcttgacaaggtc

SEQ ID NO: 4565750 - DNA, 25 bp, Homo sapien
caatgcccgatctagtagagaggaa

SEQ ID NO: 4565751 - DNA, 25 bp, Homo sapien
aggaaggcaatgcccgatctagtag

SEQ ID NO: 4565752 - DNA, 25 bp, Homo sapien
ggcaatgcccgatctagtagagagg

SEQ ID NO: 4565753 - DNA, 25 bp, Homo sapien
aaggcaatgcccgatctagtagaga

SEQ ID NO: 4565754 - DNA, 25 bp, Homo sapien
cggtgaaagcggcgtcttggcacga

SEQ ID NO: 4565755 - DNA, 25 bp, Homo sapien
gtgaaagcggcgtcttggcacgatt

SEQ ID NO: 4565756 - DNA, 25 bp, Homo sapien
aaagcggcgtcttggcacgattcac

SEQ ID NO: 4565757 - DNA, 25 bp, Homo sapien
gaaagcggcgtcttggcacgattca

SEQ ID NO: 4565758 - DNA, 25 bp, Homo sapien
gcggccgtagacaggagagatttca

SEQ ID NO: 4565759 - DNA, 25 bp, Homo sapien
caggagagatttcagtgcgtaggcc

SEQ ID NO: 4565760 - DNA, 25 bp, Homo sapien
ggccgtagacaggagagatttcagt

SEQ ID NO: 4565761 - DNA, 25 bp, Homo sapien
ctggcggccgtagacaggagagatt

SEQ ID NO: 4565762 - DNA, 25 bp, Homo sapien
cacccatgcagttctgcgaggccaa

SEQ ID NO: 4565763 - DNA, 25 bp, Homo sapien
ttctgcgaggccaagcacagaacca

SEQ ID NO: 4565764 - DNA, 25 bp, Homo sapien
ggacccagagcagtactctggacct

SEQ ID NO: 4565765 - DNA, 25 bp, Homo sapien
aaccacgataccatgggacccagag

SEQ ID NO: 4565766 - DNA, 25 bp, Homo sapien
cttcccagtggctcacaagcatctg

SEQ ID NO: 4565767 - DNA, 25 bp, Homo sapien
tctctgttgcgagaagagctggctc

SEQ ID NO: 4565768 - DNA, 25 bp, Homo sapien
tttcatcgctgctgggaagggacct

SEQ ID NO: 4565769 - DNA, 25 bp, Homo sapien
tttagtactggcctcacttgtgtgc

SEQ ID NO: 4565770 - DNA, 25 bp, Homo sapien
ggtcgccagctgacgcattcaccag

SEQ ID NO: 4565771 - DNA, 25 bp, Homo sapien
ccagcactgacatcttagacccaag

SEQ ID NO: 4565772 - DNA, 25 bp, Homo sapien
agagcacctgggtcgccagctgacg

SEQ ID NO: 4565773 - DNA, 25 bp, Homo sapien
acatcttagacccaagccgacctgt

SEQ ID NO: 4565774 - DNA, 25 bp, Homo sapien
tgggattcaggagacggggtaaggc

SEQ ID NO: 4565775 - DNA, 25 bp, Homo sapien
acattaaacttatctgacagggcga

SEQ ID NO: 4565776 - DNA, 25 bp, Homo sapien
gacacaaaggcgtactgctgaagaa

SEQ ID NO: 4565777 - DNA, 25 bp, Homo sapien
taatggtacgcacatgaaaaatcct

SEQ ID NO: 4565778 - DNA, 25 bp, Homo sapien
gctgcggctgacagtaaagcactga

SEQ ID NO: 4565779 - DNA, 25 bp, Homo sapien
agagggctttcttacgactgttggc

SEQ ID NO: 4565780 - DNA, 25 bp, Homo sapien
caggcaggatgaaccactgggagcc

SEQ ID NO: 4565781 - DNA, 25 bp, Homo sapien
cggaggagccccatgtgaaatgaaa

SEQ ID NO: 4565782 - DNA, 25 bp, Homo sapien
actgttggcccatccgagaaggcag

SEQ ID NO: 4565783 - DNA, 25 bp, Homo sapien
cagaaccacctccccggtgaccaga

SEQ ID NO: 4565784 - DNA, 25 bp, Homo sapien
ggtgtcagaggaagggtaccagcgc

SEQ ID NO: 4565785 - DNA, 25 bp, Homo sapien
ccatccttgctgggtggtgtcagag

SEQ ID NO: 4565786 - DNA, 25 bp, Homo sapien
ggtggtgtcagaggaagggtaccag

SEQ ID NO: 4565787 - DNA, 25 bp, Homo sapien
tgtcagaggaagggtaccagcgcac

SEQ ID NO: 4565788 - DNA, 25 bp, Homo sapien
ttgggtaggtgaacgcagcatggga

SEQ ID NO: 4565789 - DNA, 25 bp, Homo sapien
cggcagtggcagttgggtaggtgaa

SEQ ID NO: 4565790 - DNA, 25 bp, Homo sapien
tgaacgcagcatgggagatggctgg

SEQ ID NO: 4565791 - DNA, 25 bp, Homo sapien
cagcggcagtggcagttgggtaggt

SEQ ID NO: 4565792 - DNA, 25 bp, Homo sapien
gggatcagagcagcccccatcaggt

SEQ ID NO: 4565793 - DNA, 25 bp, Homo sapien
gcagggatcagagcagcccccatca

SEQ ID NO: 4565794 - DNA, 25 bp, Homo sapien
gatgcagggatcagagcagccccca

SEQ ID NO: 4565795 - DNA, 25 bp, Homo sapien
agggatcagagcagcccccatcagg

SEQ ID NO: 4565796 - DNA, 25 bp, Homo sapien
ctgaatgcaactccatgagggcctg

SEQ ID NO: 4565797 - DNA, 25 bp, Homo sapien
ccctgaatgcaactccatgagggcc

SEQ ID NO: 4565798 - DNA, 25 bp, Homo sapien
tcaaaaatgggtggccgtggacaca

SEQ ID NO: 4565799 - DNA, 25 bp, Homo sapien
tgggtggccgtggacacaaaaagcc

SEQ ID NO: 4565800 - DNA, 25 bp, Homo sapien
tcccgtgcgatgaagtgtgctccta

SEQ ID NO: 4565801 - DNA, 25 bp, Homo sapien
gggtcccgtgcgatgaagtgtgctc

SEQ ID NO: 4565802 - DNA, 25 bp, Homo sapien
ggtcccgtgcgatgaagtgtgctcc

SEQ ID NO: 4565803 - DNA, 25 bp, Homo sapien
ccgtgcgatgaagtgtgctcctagg

SEQ ID NO: 4565804 - DNA, 25 bp, Homo sapien
gtctgtggattttcgggatcaaagc

SEQ ID NO: 4565805 - DNA, 25 bp, Homo sapien
gagtctgtggattttcgggatcaaa

SEQ ID NO: 4565806 - DNA, 25 bp, Homo sapien
tcagagtctgtggattttcgggatc

SEQ ID NO: 4565807 - DNA, 25 bp, Homo sapien
cagagtctgtggattttcgggatca

SEQ ID NO: 4565808 - DNA, 25 bp, Homo sapien
gctcctgcacggctgtcaaagatca

SEQ ID NO: 4565809 - DNA, 25 bp, Homo sapien
tgctcctgcacggctgtcaaagatc

SEQ ID NO: 4565810 - DNA, 25 bp, Homo sapien
tcctgcacggctgtcaaagatcaca

SEQ ID NO: 4565811 - DNA, 25 bp, Homo sapien
ctgcacggctgtcaaagatcacaaa

SEQ ID NO: 4565812 - DNA, 25 bp, Homo sapien
gcttgatcagggacccttcataccc

SEQ ID NO: 4565813 - DNA, 25 bp, Homo sapien
gggaggccgctgacaaacagtgtcc

SEQ ID NO: 4565814 - DNA, 25 bp, Homo sapien
gtccacagggaggccgctgacaaac

SEQ ID NO: 4565815 - DNA, 25 bp, Homo sapien
ggccgctgacaaacagtgtccggac

SEQ ID NO: 4565816 - DNA, 25 bp, Homo sapien
acagggaggccgctgacaaacagtg

SEQ ID NO: 4565817 - DNA, 25 bp, Homo sapien
ctcacgtgagcttttgccaagccca

SEQ ID NO: 4565818 - DNA, 25 bp, Homo sapien
cattcagcagaatctcgggccgctt

SEQ ID NO: 4565819 - DNA, 25 bp, Homo sapien
ttttgccaagcccattcagcagaat

SEQ ID NO: 4565820 - DNA, 25 bp, Homo sapien
gaatctcgggccgcttgggacgcat

SEQ ID NO: 4565821 - DNA, 25 bp, Homo sapien
gccagagaccagatacgatccagca

SEQ ID NO: 4565822 - DNA, 25 bp, Homo sapien
ccagagaccagatacgatccagcat

SEQ ID NO: 4565823 - DNA, 25 bp, Homo sapien
aatgttcaagtaacgaatgcacgtg

SEQ ID NO: 4565824 - DNA, 25 bp, Homo sapien
gaatgcacgtgcttcagcagtcccc

SEQ ID NO: 4565825 - DNA, 25 bp, Homo sapien
actgcttcgagcgagctctcccggt

SEQ ID NO: 4565826 - DNA, 25 bp, Homo sapien
ttcgagcgagctctcccggtgtcat

SEQ ID NO: 4565827 - DNA, 25 bp, Homo sapien
acaaagaggacagacacagtatctt

SEQ ID NO: 4565828 - DNA, 25 bp, Homo sapien
ccactggatgatgccacggtgaatc

SEQ ID NO: 4565829 - DNA, 25 bp, Homo sapien
aaggttggggtaggtatgatggtga

SEQ ID NO: 4565830 - DNA, 25 bp, Homo sapien
ggtcttcagctcatgaacaaagagg

SEQ ID NO: 4565831 - DNA, 25 bp, Homo sapien
cctgcctccagctcgcaggattgtc

SEQ ID NO: 4565832 - DNA, 25 bp, Homo sapien
tgaagtttggcagcactgatacagc

SEQ ID NO: 4565833 - DNA, 25 bp, Homo sapien
ccccggacaggttcatgtactgtat

SEQ ID NO: 4565834 - DNA, 25 bp, Homo sapien
tgtactgtattacctcatgtcgtcc

SEQ ID NO: 4565835 - DNA, 25 bp, Homo sapien
tgtattacctcatgtcgtccccagc

SEQ ID NO: 4565836 - DNA, 25 bp, Homo sapien
ctctgccaaagcccaggttctgggg

SEQ ID NO: 4565837 - DNA, 25 bp, Homo sapien
ctcgccgtccggcttcaggttgctc

SEQ ID NO: 4565838 - DNA, 25 bp, Homo sapien
gccgtgctcgccgtccggcttcagg

SEQ ID NO: 4565839 - DNA, 25 bp, Homo sapien
cgtgctcgccgtccggcttcaggtt

SEQ ID NO: 4565840 - DNA, 25 bp, Homo sapien
cgccgtccggcttcaggttgctcat

SEQ ID NO: 4565841 - DNA, 25 bp, Homo sapien
ctccgcgtcgggccagggtcacatc

SEQ ID NO: 4565842 - DNA, 25 bp, Homo sapien
cgccttttcactgcgaccggcgagt

SEQ ID NO: 4565843 - DNA, 25 bp, Homo sapien
cacatcaagtttggcgggtgcggaa

SEQ ID NO: 4565844 - DNA, 25 bp, Homo sapien
gcgctcgcgggtgcggagcgggtgg

SEQ ID NO: 4565845 - DNA, 25 bp, Homo sapien
tggctttcgggtcttctcgctcctc

SEQ ID NO: 4565846 - DNA, 25 bp, Homo sapien
ctcaacacgcctggctttcgggtct

SEQ ID NO: 4565847 - DNA, 25 bp, Homo sapien
cacgcctggctttcgggtcttctcg

SEQ ID NO: 4565848 - DNA, 25 bp, Homo sapien
gcccaccttgccctcaacacgcctg

SEQ ID NO: 4565849 - DNA, 25 bp, Homo sapien
cacgatcatgatttttatcgttaat

SEQ ID NO: 4565850 - DNA, 25 bp, Homo sapien
gccggcccatatacacgatcatgat

SEQ ID NO: 4565851 - DNA, 25 bp, Homo sapien
ggcccatatacacgatcatgatttt

SEQ ID NO: 4565852 - DNA, 25 bp, Homo sapien
gcggccggcccatatacacgatcat

SEQ ID NO: 4565853 - DNA, 25 bp, Homo sapien
tatacacctgctgccccaatcaaga

SEQ ID NO: 4565854 - DNA, 25 bp, Homo sapien
ttcccagactaccccctgggatgat

SEQ ID NO: 4565855 - DNA, 25 bp, Homo sapien
tcagccttatatacacctgctgccc

SEQ ID NO: 4565856 - DNA, 25 bp, Homo sapien
ttatatacacctgctgccccaatca

SEQ ID NO: 4565857 - DNA, 25 bp, Homo sapien
ccgaagacctgggaaaggcagctct

SEQ ID NO: 4565858 - DNA, 25 bp, Homo sapien
acctgggaaaggcagctctggtggg

SEQ ID NO: 4565859 - DNA, 25 bp, Homo sapien
ggaccgaagacctgggaaaggcagc

SEQ ID NO: 4565860 - DNA, 25 bp, Homo sapien
cctgggaaaggcagctctggtgggt

SEQ ID NO: 4565861 - DNA, 25 bp, Homo sapien
ccttctcttgcattaaagcctttaa

SEQ ID NO: 4565862 - DNA, 25 bp, Homo sapien
caccttctcttgcattaaagccttt

SEQ ID NO: 4565863 - DNA, 25 bp, Homo sapien
ctcttgcattaaagcctttaaagtg

SEQ ID NO: 4565864 - DNA, 25 bp, Homo sapien
ttctcttgcattaaagcctttaaag

SEQ ID NO: 4565865 - DNA, 25 bp, Homo sapien
tccaactcgtccacctggcaaagtc

SEQ ID NO: 4565866 - DNA, 25 bp, Homo sapien
tcaaggatagttcacatctctgtgc

SEQ ID NO: 4565867 - DNA, 25 bp, Homo sapien
aactcgtccacctggcaaagtcaac

SEQ ID NO: 4565868 - DNA, 25 bp, Homo sapien
aaggatagttcacatctctgtgcat

SEQ ID NO: 4565869 - DNA, 25 bp, Homo sapien
agtggagaggagagtgcgaaatccc

SEQ ID NO: 4565870 - DNA, 25 bp, Homo sapien
gagaggagagtgcgaaatcccccaa

SEQ ID NO: 4565871 - DNA, 25 bp, Homo sapien
tggagaggagagtgcgaaatccccc

SEQ ID NO: 4565872 - DNA, 25 bp, Homo sapien
gtggagaggagagtgcgaaatcccc

SEQ ID NO: 4565873 - DNA, 25 bp, Homo sapien
caggtaaagttccttgagaggatga

SEQ ID NO: 4565874 - DNA, 25 bp, Homo sapien
ggtaaagttccttgagaggatgatg

SEQ ID NO: 4565875 - DNA, 25 bp, Homo sapien
aggtaaagttccttgagaggatgat

SEQ ID NO: 4565876 - DNA, 25 bp, Homo sapien
tgtccagcccttgcagagagctttg

SEQ ID NO: 4565877 - DNA, 25 bp, Homo sapien
tctgcagcctgaaaggagggatgtt

SEQ ID NO: 4565878 - DNA, 25 bp, Homo sapien
tgtagagacacacctaagttccgtt

SEQ ID NO: 4565879 - DNA, 25 bp, Homo sapien
taggctgggcctagctgtagagaca

SEQ ID NO: 4565880 - DNA, 25 bp, Homo sapien
tcagaggattgggtccatgttctcc

SEQ ID NO: 4565881 - DNA, 25 bp, Homo sapien
cccaggaccataacctgggggccag

SEQ ID NO: 4565882 - DNA, 25 bp, Homo sapien
cagtcatgggtttgtgctgttcccc

SEQ ID NO: 4565883 - DNA, 25 bp, Homo sapien
ccaggaccataacctgggggccagc

SEQ ID NO: 4565884 - DNA, 25 bp, Homo sapien
ccaccactggatgactccctcttac

SEQ ID NO: 4565885 - DNA, 25 bp, Homo sapien
ccacagcccaccactggatgactcc

SEQ ID NO: 4565886 - DNA, 25 bp, Homo sapien
agcccaccactggatgactccctct

SEQ ID NO: 4565887 - DNA, 25 bp, Homo sapien
tgcccgtggccacagcccaccactg

SEQ ID NO: 4565888 - DNA, 25 bp, Homo sapien
cagggtggcatagaagtgcagcaca

SEQ ID NO: 4565889 - DNA, 25 bp, Homo sapien
caaagtccagcacacgtaggccctg

SEQ ID NO: 4565890 - DNA, 25 bp, Homo sapien
tgcgggcccgagaaagggccacata

SEQ ID NO: 4565891 - DNA, 25 bp, Homo sapien
aatctccacacaatccagggtcatg

SEQ ID NO: 4565892 - DNA, 25 bp, Homo sapien
ttggctcttgtggatggacatcgcc

SEQ ID NO: 4565893 - DNA, 25 bp, Homo sapien
cagcgtggatgacctcagtgactcc

SEQ ID NO: 4565894 - DNA, 25 bp, Homo sapien
atggacatcgcccaggccagctgga

SEQ ID NO: 4565895 - DNA, 25 bp, Homo sapien
ctgcaccgtccagcggtcagcgtgg

SEQ ID NO: 4565896 - DNA, 25 bp, Homo sapien
cttctgcctcgaacccaactaccac

SEQ ID NO: 4565897 - DNA, 25 bp, Homo sapien
caggccccgagacaccgataagttt

SEQ ID NO: 4565898 - DNA, 25 bp, Homo sapien
caactaccacccctcgggcaccatt

SEQ ID NO: 4565899 - DNA, 25 bp, Homo sapien
ctcgggcaccattcaccaggccccg

SEQ ID NO: 4565900 - DNA, 25 bp, Homo sapien
actgggcatccagggtactggccag

SEQ ID NO: 4565901 - DNA, 25 bp, Homo sapien
agttgaaggagctggctaacaggac

SEQ ID NO: 4565902 - DNA, 25 bp, Homo sapien
cccagctttagttgaaggagctggc

SEQ ID NO: 4565903 - DNA, 25 bp, Homo sapien
ctgggcccccagctttagttgaagg

SEQ ID NO: 4565904 - DNA, 25 bp, Homo sapien
gccgcctctcgttggtgagggccac

SEQ ID NO: 4565905 - DNA, 25 bp, Homo sapien
ctggcagctcctgaagccgcctctc

SEQ ID NO: 4565906 - DNA, 25 bp, Homo sapien
gcagctcctgaagccgcctctcgtt

SEQ ID NO: 4565907 - DNA, 25 bp, Homo sapien
cagctcctgaagccgcctctcgttg

SEQ ID NO: 4565908 - DNA, 25 bp, Homo sapien
gtgcagagcctcgtggccacaatcc

SEQ ID NO: 4565909 - DNA, 25 bp, Homo sapien
acaatcccatctcgccccaccttgt

SEQ ID NO: 4565910 - DNA, 25 bp, Homo sapien
cgccccaccttgtgggaagctgtgg

SEQ ID NO: 4565911 - DNA, 25 bp, Homo sapien
atctcgccccaccttgtgggaagct

SEQ ID NO: 4565912 - DNA, 25 bp, Homo sapien
ctcacggcctgcagtagagagatga

SEQ ID NO: 4565913 - DNA, 25 bp, Homo sapien
cctcacggcctgcagtagagagatg

SEQ ID NO: 4565914 - DNA, 25 bp, Homo sapien
tcacggcctgcagtagagagatgaa

SEQ ID NO: 4565915 - DNA, 25 bp, Homo sapien
gcctcacggcctgcagtagagagat

SEQ ID NO: 4565916 - DNA, 25 bp, Homo sapien
tccagggtcactggcacacacctct

SEQ ID NO: 4565917 - DNA, 25 bp, Homo sapien
ctccagggtcactggcacacacctc

SEQ ID NO: 4565918 - DNA, 25 bp, Homo sapien
cagggtcactggcacacacctcttc

SEQ ID NO: 4565919 - DNA, 25 bp, Homo sapien
agggtcactggcacacacctcttcc

SEQ ID NO: 4565920 - DNA, 25 bp, Homo sapien
gaaagtccccacagatgatgagctg

SEQ ID NO: 4565921 - DNA, 25 bp, Homo sapien
tgagctggatccctccgaatggctt

SEQ ID NO: 4565922 - DNA, 25 bp, Homo sapien
gctgggagcccttggtcacaggtgg

SEQ ID NO: 4565923 - DNA, 25 bp, Homo sapien
cagatgatgagctggatccctccga

SEQ ID NO: 4565924 - DNA, 25 bp, Homo sapien
tgcctccaccattgagatctcgtca

SEQ ID NO: 4565925 - DNA, 25 bp, Homo sapien
cattgagatctcgtcaatgaccaac

SEQ ID NO: 4565926 - DNA, 25 bp, Homo sapien
ggccacggcctccagtttgtcaaac

SEQ ID NO: 4565927 - DNA, 25 bp, Homo sapien
tcgtcaatgaccaaccgctggcagt

SEQ ID NO: 4565928 - DNA, 25 bp, Homo sapien
ctagaggagcctggcctgagccgat

SEQ ID NO: 4565929 - DNA, 25 bp, Homo sapien
tagaggagcctggcctgagccgatg

SEQ ID NO: 4565930 - DNA, 25 bp, Homo sapien
agaggagcctggcctgagccgatgc

SEQ ID NO: 4565931 - DNA, 25 bp, Homo sapien
cactgtaacctgggcctcatgggct

SEQ ID NO: 4565932 - DNA, 25 bp, Homo sapien
tagctcaagccctaggggttcctac

SEQ ID NO: 4565933 - DNA, 25 bp, Homo sapien
ttgctcttagctcaagccctagggg

SEQ ID NO: 4565934 - DNA, 25 bp, Homo sapien
aaaactccctctttatgcagacctc

SEQ ID NO: 4565935 - DNA, 25 bp, Homo sapien
gtggtgcccccgatgtggcaggctg

SEQ ID NO: 4565936 - DNA, 25 bp, Homo sapien
atggagggtggtgcccccgatgtgg

SEQ ID NO: 4565937 - DNA, 25 bp, Homo sapien
catggagggtggtgcccccgatgtg

SEQ ID NO: 4565938 - DNA, 25 bp, Homo sapien
agggtggtgcccccgatgtggcagg

SEQ ID NO: 4565939 - DNA, 25 bp, Homo sapien
ctgtggggggcagtgagcccaggat

SEQ ID NO: 4565940 - DNA, 25 bp, Homo sapien
tggggggcagtgagcccaggattcg

SEQ ID NO: 4565941 - DNA, 25 bp, Homo sapien
tgtggggggcagtgagcccaggatt

SEQ ID NO: 4565942 - DNA, 25 bp, Homo sapien
gggggcagtgagcccaggattcgct

SEQ ID NO: 4565943 - DNA, 25 bp, Homo sapien
actgtccccctacctcctctctgcc

SEQ ID NO: 4565944 - DNA, 25 bp, Homo sapien
gacaggggcaaagttagacaggtct

SEQ ID NO: 4565945 - DNA, 25 bp, Homo sapien
ttcctctatcccaccccaccactgt

SEQ ID NO: 4565946 - DNA, 25 bp, Homo sapien
ggcaaagttagacaggtctccctgt

SEQ ID NO: 4565947 - DNA, 25 bp, Homo sapien
tggcttggtggagggcaagctcagc

SEQ ID NO: 4565948 - DNA, 25 bp, Homo sapien
cactcccagtgaagaagatgctctg

SEQ ID NO: 4565949 - DNA, 25 bp, Homo sapien
agatgctctggcctttcaggacggc

SEQ ID NO: 4565950 - DNA, 25 bp, Homo sapien
cagcacagcagcctgttcctcagaa

SEQ ID NO: 4565951 - DNA, 25 bp, Homo sapien
cataagctcctctactctgggccta

SEQ ID NO: 4565952 - DNA, 25 bp, Homo sapien
taatgtagccaggtcccatttcctg

SEQ ID NO: 4565953 - DNA, 25 bp, Homo sapien
gttggctgcccaggacacgaatgac

SEQ ID NO: 4565954 - DNA, 25 bp, Homo sapien
tcaaacttgggtctctaggtctctg

SEQ ID NO: 4565955 - DNA, 25 bp, Homo sapien
gccgcagccagcttgaggcgcaatg

SEQ ID NO: 4565956 - DNA, 25 bp, Homo sapien
cacaggccgcttcaccagcgtagtg

SEQ ID NO: 4565957 - DNA, 25 bp, Homo sapien
cagccagcttgaggcgcaatgtgcg

SEQ ID NO: 4565958 - DNA, 25 bp, Homo sapien
ttcaccagcgtagtgtccggaaccc

SEQ ID NO: 4565959 - DNA, 25 bp, Homo sapien
gcgaaacgcgtgaagaggcgcgcgg

SEQ ID NO: 4565960 - DNA, 25 bp, Homo sapien
aaacgcgtgaagaggcgcgcggcgc

SEQ ID NO: 4565961 - DNA, 25 bp, Homo sapien
gccctggcgcttgcagccgcagcat

SEQ ID NO: 4565962 - DNA, 25 bp, Homo sapien
gggagccgcagggtgctgcgcccgg

SEQ ID NO: 4565963 - DNA, 25 bp, Homo sapien
gagtcctcatattcccctgccgccg

SEQ ID NO: 4565964 - DNA, 25 bp, Homo sapien
cgcagctccgagtcctcatattccc

SEQ ID NO: 4565965 - DNA, 25 bp, Homo sapien
ctcagctccgcggtgcgcagggcct

SEQ ID NO: 4565966 - DNA, 25 bp, Homo sapien
aggctcagctccgcggtgcgcaggg

SEQ ID NO: 4565967 - DNA, 25 bp, Homo sapien
gaagacaccggagcacaggggtcat

SEQ ID NO: 4565968 - DNA, 25 bp, Homo sapien
cgaagacaccggagcacaggggtca

SEQ ID NO: 4565969 - DNA, 25 bp, Homo sapien
ctgcgaagacaccggagcacagggg

SEQ ID NO: 4565970 - DNA, 25 bp, Homo sapien
gcgaagacaccggagcacaggggtc

SEQ ID NO: 4565971 - DNA, 25 bp, Homo sapien
cctgctcgcttaatcactccatggg

SEQ ID NO: 4565972 - DNA, 25 bp, Homo sapien
gggcttagctactacaccacactgc

SEQ ID NO: 4565973 - DNA, 25 bp, Homo sapien
catagctgatatggagagcaaaacc

SEQ ID NO: 4565974 - DNA, 25 bp, Homo sapien
tgctcccagtctgttagcggtagag

SEQ ID NO: 4565975 - DNA, 25 bp, Homo sapien
gcctggctggaaagaaatcttgaga

SEQ ID NO: 4565976 - DNA, 25 bp, Homo sapien
gaatatcagtggcatgcgtcattgt

SEQ ID NO: 4565977 - DNA, 25 bp, Homo sapien
tatgagtaaatgagtaggttaagaa

SEQ ID NO: 4565978 - DNA, 25 bp, Homo sapien
ccagtgttgtcttgacatatattga

SEQ ID NO: 4565979 - DNA, 25 bp, Homo sapien
gattttgtctgagcaacaaagtccc

SEQ ID NO: 4565980 - DNA, 25 bp, Homo sapien
catgtaactagacactgcctggtgg

SEQ ID NO: 4565981 - DNA, 25 bp, Homo sapien
tccctgaagggaaaggtatcgaaca

SEQ ID NO: 4565982 - DNA, 25 bp, Homo sapien
gaaaggtatcgaacatgtaactaga

SEQ ID NO: 4565983 - DNA, 25 bp, Homo sapien
gctcgctgtcattgagaggtctcag

SEQ ID NO: 4565984 - DNA, 25 bp, Homo sapien
aatatccttccacacgtcttatctg

SEQ ID NO: 4565985 - DNA, 25 bp, Homo sapien
tcagtccctggctcattaataatag

SEQ ID NO: 4565986 - DNA, 25 bp, Homo sapien
tgaaatttcctcctcggaatatcct

SEQ ID NO: 4565987 - DNA, 25 bp, Homo sapien
tttttggcattatctcatgtgatac

SEQ ID NO: 4565988 - DNA, 25 bp, Homo sapien
gcacagagggggttataaaatgcat

SEQ ID NO: 4565989 - DNA, 25 bp, Homo sapien
gtgatactactcaaaaggccccgtc

SEQ ID NO: 4565990 - DNA, 25 bp, Homo sapien
tacaatgacattagcacagaggggg

SEQ ID NO: 4565991 - DNA, 25 bp, Homo sapien
tcgcagcccgaagcttacaaggaca

SEQ ID NO: 4565992 - DNA, 25 bp, Homo sapien
tagaagagctgaacgggaaacggta

SEQ ID NO: 4565993 - DNA, 25 bp, Homo sapien
agagcaggacggcaccttgcactgt

SEQ ID NO: 4565994 - DNA, 25 bp, Homo sapien
tacaaggacagtctgtagaagagct

SEQ ID NO: 4565995 - DNA, 25 bp, Homo sapien
cgtataaatcagattttgcagctgg

SEQ ID NO: 4565996 - DNA, 25 bp, Homo sapien
ggtcttttaagacgtataaatcaga

SEQ ID NO: 4565997 - DNA, 25 bp, Homo sapien
aatgcctccctaagactattcatct

SEQ ID NO: 4565998 - DNA, 25 bp, Homo sapien
gccctcaatgcctccctaagactat

SEQ ID NO: 4565999 - DNA, 25 bp, Homo sapien
tactttttcatcaaagtccttctca

SEQ ID NO: 4566000 - DNA, 25 bp, Homo sapien
aagtccttctcagggctgggtacca

SEQ ID NO: 4566001 - DNA, 25 bp, Homo sapien
atgtactttttcatcaaagtccttc

SEQ ID NO: 4566002 - DNA, 25 bp, Homo sapien
ttttcatcaaagtccttctcagggc

SEQ ID NO: 4566003 - DNA, 25 bp, Homo sapien
ggtatgttggaatccgaagccactt

SEQ ID NO: 4566004 - DNA, 25 bp, Homo sapien
acatccagtctccatcgtgctgcag

SEQ ID NO: 4566005 - DNA, 25 bp, Homo sapien
cctgtaactttctaggagaagagac

SEQ ID NO: 4566006 - DNA, 25 bp, Homo sapien
cagagcctgtaggtgcagaggccct

SEQ ID NO: 4566007 - DNA, 25 bp, Homo sapien
ctctgtgagaaccatggacagaccc

SEQ ID NO: 4566008 - DNA, 25 bp, Homo sapien
catgtgggaaagcacgactgtgctc

SEQ ID NO: 4566009 - DNA, 25 bp, Homo sapien
aaagcacgactgtgctcaccaaagc

SEQ ID NO: 4566010 - DNA, 25 bp, Homo sapien
cctctgtgagaaccatggacagacc

SEQ ID NO: 4566011 - DNA, 25 bp, Homo sapien
tggctatcatcagacaggacccagg

SEQ ID NO: 4566012 - DNA, 25 bp, Homo sapien
gcccggctaggatatgtacatattt

SEQ ID NO: 4566013 - DNA, 25 bp, Homo sapien
catggagcccggctaggatatgtac

SEQ ID NO: 4566014 - DNA, 25 bp, Homo sapien
atcacaaggtggctatcatcagaca

SEQ ID NO: 4566015 - DNA, 25 bp, Homo sapien
tcgatgcctggaatcaggaagcagg

SEQ ID NO: 4566016 - DNA, 25 bp, Homo sapien
catttgtgctgttgtctcagacacc

SEQ ID NO: 4566017 - DNA, 25 bp, Homo sapien
tcatttgtgctgttgtctcagacac

SEQ ID NO: 4566018 - DNA, 25 bp, Homo sapien
agctcagcatcgatgcctggaatca

SEQ ID NO: 4566019 - DNA, 25 bp, Homo sapien
tacaactgcgattatgacagggcct

SEQ ID NO: 4566020 - DNA, 25 bp, Homo sapien
aatgagctgtgaactggtcttccgg

SEQ ID NO: 4566021 - DNA, 25 bp, Homo sapien
aatcctggttgatcttccaatgagc

SEQ ID NO: 4566022 - DNA, 25 bp, Homo sapien
aggcagcttgtggaaaccaggcccc

SEQ ID NO: 4566023 - DNA, 25 bp, Homo sapien
acgtaccctcactggcaatcttggg

SEQ ID NO: 4566024 - DNA, 25 bp, Homo sapien
actggcaatcttggggaaagcctca

SEQ ID NO: 4566025 - DNA, 25 bp, Homo sapien
tcacgtaccctcactggcaatcttg

SEQ ID NO: 4566026 - DNA, 25 bp, Homo sapien
attcacgtaccctcactggcaatct

SEQ ID NO: 4566027 - DNA, 25 bp, Homo sapien
tctcctctatgacctggaaagcggg

SEQ ID NO: 4566028 - DNA, 25 bp, Homo sapien
taacctttctggctggttgaatggc

SEQ ID NO: 4566029 - DNA, 25 bp, Homo sapien
tcagggtcacaagctagtacgaggc

SEQ ID NO: 4566030 - DNA, 25 bp, Homo sapien
gattataggcgggatagccattgca

SEQ ID NO: 4566031 - DNA, 25 bp, Homo sapien
tgcaactttcacgtaaaactaaata

SEQ ID NO: 4566032 - DNA, 25 bp, Homo sapien
aaactgcagaataggccagaaatgg

SEQ ID NO: 4566033 - DNA, 25 bp, Homo sapien
gggtatgtgggaactctgttatctt

SEQ ID NO: 4566034 - DNA, 25 bp, Homo sapien
tgaagactctgaatagagtatggat

SEQ ID NO: 4566035 - DNA, 25 bp, Homo sapien
gatgatctcatgtatgtaaaaccaa

SEQ ID NO: 4566036 - DNA, 25 bp, Homo sapien
cacgcctggcaggacatagcagata

SEQ ID NO: 4566037 - DNA, 25 bp, Homo sapien
taaggtacctctgcttacaacccac

SEQ ID NO: 4566038 - DNA, 25 bp, Homo sapien
ggtagtgggccacccctacatgctt

SEQ ID NO: 4566039 - DNA, 25 bp, Homo sapien
aattgcagcagggaaaaaccgccct

SEQ ID NO: 4566040 - DNA, 25 bp, Homo sapien
agctggctttgaaccctaggcctga

SEQ ID NO: 4566041 - DNA, 25 bp, Homo sapien
tgtacccctcctgtagaaactctgg

SEQ ID NO: 4566042 - DNA, 25 bp, Homo sapien
tacggaggcctcacgcttgatcttt

SEQ ID NO: 4566043 - DNA, 25 bp, Homo sapien
ggtccccgattacaatggttcagct

SEQ ID NO: 4566044 - DNA, 25 bp, Homo sapien
ggtaggctaagctaaactattgatg

SEQ ID NO: 4566045 - DNA, 25 bp, Homo sapien
tttgagtacctatacagccatgctg

SEQ ID NO: 4566046 - DNA, 25 bp, Homo sapien
gtcttttgagtaatgttgggtccca

SEQ ID NO: 4566047 - DNA, 25 bp, Homo sapien
tctagagaccaagacacaaaccctt

SEQ ID NO: 4566048 - DNA, 25 bp, Homo sapien
tatacaatttgtgcatcatggtacc

SEQ ID NO: 4566049 - DNA, 25 bp, Homo sapien
catggtaccacaacgatgaaagtca

SEQ ID NO: 4566050 - DNA, 25 bp, Homo sapien
gagtgacaccaacagagtgcatagt

SEQ ID NO: 4566051 - DNA, 25 bp, Homo sapien
ggccagaccttcaggcacgtgggac

SEQ ID NO: 4566052 - DNA, 25 bp, Homo sapien
tttcatgaggatgggtccaagggcc

SEQ ID NO: 4566053 - DNA, 25 bp, Homo sapien
tgtaatcccgtccaacaggtatggt

SEQ ID NO: 4566054 - DNA, 25 bp, Homo sapien
gaggtgcacagccatgtaaccggag

SEQ ID NO: 4566055 - DNA, 25 bp, Homo sapien
ttcttccttcgtcaccgtcttctcc

SEQ ID NO: 4566056 - DNA, 25 bp, Homo sapien
ccttcttcttccttcgtcaccgtct

SEQ ID NO: 4566057 - DNA, 25 bp, Homo sapien
cttcttccttcgtcaccgtcttctc

SEQ ID NO: 4566058 - DNA, 25 bp, Homo sapien
ttcttcttccttcgtcaccgtcttc

SEQ ID NO: 4566059 - DNA, 25 bp, Homo sapien
cctttcttctccttgtctcttctcc

SEQ ID NO: 4566060 - DNA, 25 bp, Homo sapien
tcttcctttcttctccttgtctctt

SEQ ID NO: 4566061 - DNA, 25 bp, Homo sapien
tctccttgtctcttctccttcttct

SEQ ID NO: 4566062 - DNA, 25 bp, Homo sapien
ttcctttcttctccttgtctcttct

SEQ ID NO: 4566063 - DNA, 25 bp, Homo sapien
tcttccgctttctactttcttcttc

SEQ ID NO: 4566064 - DNA, 25 bp, Homo sapien
tctcctttcttgttccttattcttc

SEQ ID NO: 4566065 - DNA, 25 bp, Homo sapien
ttcctctccttcttcttagttcttc

SEQ ID NO: 4566066 - DNA, 25 bp, Homo sapien
tcttcttagttcttcttagttcttc

SEQ ID NO: 4566067 - DNA, 25 bp, Homo sapien
cttcttcctctccttcgtcttctta

SEQ ID NO: 4566068 - DNA, 25 bp, Homo sapien
tcctctttcttcttgttccttatta

SEQ ID NO: 4566069 - DNA, 25 bp, Homo sapien
tcttcttgttccttattattctttc

SEQ ID NO: 4566070 - DNA, 25 bp, Homo sapien
ctttcttcttgttccttattattct

SEQ ID NO: 4566071 - DNA, 25 bp, Homo sapien
tcttcttctcctttcttcttccttc

SEQ ID NO: 4566072 - DNA, 25 bp, Homo sapien
ttcttccttcctcttcttcctcctc

SEQ ID NO: 4566073 - DNA, 25 bp, Homo sapien
tctcttccttcttagttcttcttcc

SEQ ID NO: 4566074 - DNA, 25 bp, Homo sapien
tcctctccttctcttcttcttctcc

SEQ ID NO: 4566075 - DNA, 25 bp, Homo sapien
caggagctttggtagtcacacatgc

SEQ ID NO: 4566076 - DNA, 25 bp, Homo sapien
tttgaggtgccaggcaagcacagct

SEQ ID NO: 4566077 - DNA, 25 bp, Homo sapien
agagtagctgcttgccacctgaggc

SEQ ID NO: 4566078 - DNA, 25 bp, Homo sapien
gcttcacggtttcccagaatgtgga

SEQ ID NO: 4566079 - DNA, 25 bp, Homo sapien
gaaattggttcagaggatagctgca

SEQ ID NO: 4566080 - DNA, 25 bp, Homo sapien
cattggtccagcaatcctactctag

SEQ ID NO: 4566081 - DNA, 25 bp, Homo sapien
tagagtatgttccatccacacagtg

SEQ ID NO: 4566082 - DNA, 25 bp, Homo sapien
caagtgttgttatggaaagagctcc

SEQ ID NO: 4566083 - DNA, 25 bp, Homo sapien
attacaggtgcatgccatcacagct

SEQ ID NO: 4566084 - DNA, 25 bp, Homo sapien
acaggtgcatgccatcacagctggc

SEQ ID NO: 4566085 - DNA, 25 bp, Homo sapien
ggtgcatgccatcacagctggctaa

SEQ ID NO: 4566086 - DNA, 25 bp, Homo sapien
gtgcatgccatcacagctggctaat

SEQ ID NO: 4566087 - DNA, 25 bp, Homo sapien
tgtaccatatgggactgaaatcatt

SEQ ID NO: 4566088 - DNA, 25 bp, Homo sapien
cactgatgccagatgttaataatcg

SEQ ID NO: 4566089 - DNA, 25 bp, Homo sapien
tgctgaagagtacgtgggagctctc

SEQ ID NO: 4566090 - DNA, 25 bp, Homo sapien
tgtacagcacaaagcgtttgctcta

SEQ ID NO: 4566091 - DNA, 25 bp, Homo sapien
taataaacatcttgcacccaaattt

SEQ ID NO: 4566092 - DNA, 25 bp, Homo sapien
cacagatgttgatccttaataaaca

SEQ ID NO: 4566093 - DNA, 25 bp, Homo sapien
gttgatccttaataaacatcttgca

SEQ ID NO: 4566094 - DNA, 25 bp, Homo sapien
acatcttgcacccaaattttcatct

SEQ ID NO: 4566095 - DNA, 25 bp, Homo sapien
acctgaaggaaaaggccggctgacg

SEQ ID NO: 4566096 - DNA, 25 bp, Homo sapien
cggtgagcctgacgaacctgaagga

SEQ ID NO: 4566097 - DNA, 25 bp, Homo sapien
ctgactatacaagaacacaccgggt

SEQ ID NO: 4566098 - DNA, 25 bp, Homo sapien
gacgggtgctgatgccactgactat

SEQ ID NO: 4566099 - DNA, 25 bp, Homo sapien
tggttccatggaattgcagcaaatg

SEQ ID NO: 4566100 - DNA, 25 bp, Homo sapien
gctcctcggcactgaccattgatgg

SEQ ID NO: 4566101 - DNA, 25 bp, Homo sapien
ttgatgggtcaatggccgcgtattt

SEQ ID NO: 4566102 - DNA, 25 bp, Homo sapien
caagctcctcggcactgaccattga

SEQ ID NO: 4566103 - DNA, 25 bp, Homo sapien
taaaattagatcaagaagtcacttc

SEQ ID NO: 4566104 - DNA, 25 bp, Homo sapien
ttaggtctggtgtcttgctctgatg

SEQ ID NO: 4566105 - DNA, 25 bp, Homo sapien
cagagggcaaggtcacatcatacca

SEQ ID NO: 4566106 - DNA, 25 bp, Homo sapien
tcacaggactcagattgaccccatt

SEQ ID NO: 4566107 - DNA, 25 bp, Homo sapien
tgctctgggtttcaagctaggcctt

SEQ ID NO: 4566108 - DNA, 25 bp, Homo sapien
gtgctctgggtttcaagctaggcct

SEQ ID NO: 4566109 - DNA, 25 bp, Homo sapien
gcacaggtatgggaaattgcctcct

SEQ ID NO: 4566110 - DNA, 25 bp, Homo sapien
taggatacagcttgtacatttcttc

SEQ ID NO: 4566111 - DNA, 25 bp, Homo sapien
ttgaaagcgcactctgatcaaacac

SEQ ID NO: 4566112 - DNA, 25 bp, Homo sapien
gagctcttcgggcattaggatacag

SEQ ID NO: 4566113 - DNA, 25 bp, Homo sapien
tggtgacttataactccaaccgaag

SEQ ID NO: 4566114 - DNA, 25 bp, Homo sapien
tacctccactgctgatccctggtga

SEQ ID NO: 4566115 - DNA, 25 bp, Homo sapien
gctacagattttgctgcacagcatc

SEQ ID NO: 4566116 - DNA, 25 bp, Homo sapien
tccaaccgaagacattagctacaga

SEQ ID NO: 4566117 - DNA, 25 bp, Homo sapien
gaaaatggtgatggttgccgaactg

SEQ ID NO: 4566118 - DNA, 25 bp, Homo sapien
taaaaccgttgattatcagaggccg

SEQ ID NO: 4566119 - DNA, 25 bp, Homo sapien
tacatcaaatgggtagactcccttg

SEQ ID NO: 4566120 - DNA, 25 bp, Homo sapien
ggcagcatttgaagaggcacattga

SEQ ID NO: 4566121 - DNA, 25 bp, Homo sapien
tatgtcccgaattttatgaggttcc

SEQ ID NO: 4566122 - DNA, 25 bp, Homo sapien
cataatagttacaggtatgtcccga

SEQ ID NO: 4566123 - DNA, 25 bp, Homo sapien
ttttgacaattcaaggtaagtcttg

SEQ ID NO: 4566124 - DNA, 25 bp, Homo sapien
gaggttccacataagaattttgaca

SEQ ID NO: 4566125 - DNA, 25 bp, Homo sapien
agaaaagtcatcagtgaggaaccac

SEQ ID NO: 4566126 - DNA, 25 bp, Homo sapien
tggaaacctgggtacaaaccaatga

SEQ ID NO: 4566127 - DNA, 25 bp, Homo sapien
catttgtgcttataaaggtggtatc

SEQ ID NO: 4566128 - DNA, 25 bp, Homo sapien
cacaacttaggtgagagaccatgaa

SEQ ID NO: 4566129 - DNA, 25 bp, Homo sapien
taaatgcaagccaacagacctggtt

SEQ ID NO: 4566130 - DNA, 25 bp, Homo sapien
gaagcactaatgtaggcaagccctt

SEQ ID NO: 4566131 - DNA, 25 bp, Homo sapien
aaaatagattcccagatcccatgcc

SEQ ID NO: 4566132 - DNA, 25 bp, Homo sapien
gctgtgaggccttacaatctgtatt

SEQ ID NO: 4566133 - DNA, 25 bp, Homo sapien
tcatagggtccaccgggccagatga

SEQ ID NO: 4566134 - DNA, 25 bp, Homo sapien
ttgagcataaatgcaggcatcagcc

SEQ ID NO: 4566135 - DNA, 25 bp, Homo sapien
aatcaatggcatcagccatcatagg

SEQ ID NO: 4566136 - DNA, 25 bp, Homo sapien
ttttgagcataaatgcaggcatcag

SEQ ID NO: 4566137 - DNA, 25 bp, Homo sapien
gaagatagaggtgtcactgaaggaa

SEQ ID NO: 4566138 - DNA, 25 bp, Homo sapien
cagaggattagggaatggactctag

SEQ ID NO: 4566139 - DNA, 25 bp, Homo sapien
aaggaattgcagaggattagggaat

SEQ ID NO: 4566140 - DNA, 25 bp, Homo sapien
ggactctaggagatttgtgagtgta

SEQ ID NO: 4566141 - DNA, 25 bp, Homo sapien
ccaaagaagcgccaaaaagatgaac

SEQ ID NO: 4566142 - DNA, 25 bp, Homo sapien
cagaactcgagatggtcccaataaa

SEQ ID NO: 4566143 - DNA, 25 bp, Homo sapien
ccatcacagaactcgagatggtccc

SEQ ID NO: 4566144 - DNA, 25 bp, Homo sapien
tggtcccaataaactggatactgca

SEQ ID NO: 4566145 - DNA, 25 bp, Homo sapien
ggtcccaataaactggatactgcaa

SEQ ID NO: 4566146 - DNA, 25 bp, Homo sapien
gcaggaatatgagaggacacctgat

SEQ ID NO: 4566147 - DNA, 25 bp, Homo sapien
aaatctgccggaaaaagacatctgc

SEQ ID NO: 4566148 - DNA, 25 bp, Homo sapien
gacacctgatacttcgggggcccgc

SEQ ID NO: 4566149 - DNA, 25 bp, Homo sapien
ggcccgcgtcatagagcgaccatat

SEQ ID NO: 4566150 - DNA, 25 bp, Homo sapien
tgacaattttactactactgccttg

SEQ ID NO: 4566151 - DNA, 25 bp, Homo sapien
tcagggctaacgtattccacagaac

SEQ ID NO: 4566152 - DNA, 25 bp, Homo sapien
tccacagaactacttagaactactt

SEQ ID NO: 4566153 - DNA, 25 bp, Homo sapien
tacaaggtaacctggagctcacacc

SEQ ID NO: 4566154 - DNA, 25 bp, Homo sapien
cacagcttactgcaagcttgtcttc

SEQ ID NO: 4566155 - DNA, 25 bp, Homo sapien
agagaaagggtctcatcatattgcc

SEQ ID NO: 4566156 - DNA, 25 bp, Homo sapien
ctgagtgtccgggactacaggcgtg

SEQ ID NO: 4566157 - DNA, 25 bp, Homo sapien
agcttactgcaagcttgtcttcctg

SEQ ID NO: 4566158 - DNA, 25 bp, Homo sapien
tgtgaccccattcttaaatctgagg

SEQ ID NO: 4566159 - DNA, 25 bp, Homo sapien
tgcctttgtctagtgtgatccccaa

SEQ ID NO: 4566160 - DNA, 25 bp, Homo sapien
tggattctaacactcctgcaaggga

SEQ ID NO: 4566161 - DNA, 25 bp, Homo sapien
acagaagctctataatgtgacccca

SEQ ID NO: 4566162 - DNA, 25 bp, Homo sapien
ccagttataatcaggagagacttta

SEQ ID NO: 4566163 - DNA, 25 bp, Homo sapien
actgtacctctaaaccagttataat

SEQ ID NO: 4566164 - DNA, 25 bp, Homo sapien
taaaccagttataatcaggagagac

SEQ ID NO: 4566165 - DNA, 25 bp, Homo sapien
taatcaggagagactttaatctctc

SEQ ID NO: 4566166 - DNA, 25 bp, Homo sapien
gccactcatatggacgtgattaaaa

SEQ ID NO: 4566167 - DNA, 25 bp, Homo sapien
acttgaaggcactataactaacaac

SEQ ID NO: 4566168 - DNA, 25 bp, Homo sapien
tttgttgtgagcttagtgacttctg

SEQ ID NO: 4566169 - DNA, 25 bp, Homo sapien
cgtgccccgcctacatgtagttctt

SEQ ID NO: 4566170 - DNA, 25 bp, Homo sapien
aataattcacaaccacctcaggatg

SEQ ID NO: 4566171 - DNA, 25 bp, Homo sapien
ttaaaagtaatcttacaagatggag

SEQ ID NO: 4566172 - DNA, 25 bp, Homo sapien
gatggagagattccactccgctgtg

SEQ ID NO: 4566173 - DNA, 25 bp, Homo sapien
ccacctcaggatgccaacgtgttaa

SEQ ID NO: 4566174 - DNA, 25 bp, Homo sapien
tcctcagtggccagccgcgatggct

SEQ ID NO: 4566175 - DNA, 25 bp, Homo sapien
ggaatttggacacagctattaagtt

SEQ ID NO: 4566176 - DNA, 25 bp, Homo sapien
ggacacagctattaagttactcctc

SEQ ID NO: 4566177 - DNA, 25 bp, Homo sapien
taagttactcctcagtggccagccg

SEQ ID NO: 4566178 - DNA, 25 bp, Homo sapien
cctggcccacactcagtaacaacaa

SEQ ID NO: 4566179 - DNA, 25 bp, Homo sapien
ctggcccacactcagtaacaacaaa

SEQ ID NO: 4566180 - DNA, 25 bp, Homo sapien
tctatcactttcaggccgaggtcct

SEQ ID NO: 4566181 - DNA, 25 bp, Homo sapien
tttcaggccgaggtcctgtctccaa

SEQ ID NO: 4566182 - DNA, 25 bp, Homo sapien
caccggtgacagccacacaaaggca

SEQ ID NO: 4566183 - DNA, 25 bp, Homo sapien
ggcagggtcacaagcacaccgacca

SEQ ID NO: 4566184 - DNA, 25 bp, Homo sapien
ccccgccagtcccaccggtgacagc

SEQ ID NO: 4566185 - DNA, 25 bp, Homo sapien
caaaggcagggtcacaagcacaccg

SEQ ID NO: 4566186 - DNA, 25 bp, Homo sapien
gcgcgtggccgagcgagcttgggcc

SEQ ID NO: 4566187 - DNA, 25 bp, Homo sapien
gcgagactcccgcttccgggttctc

SEQ ID NO: 4566188 - DNA, 25 bp, Homo sapien
accgccgctcagctggcgcgagact

SEQ ID NO: 4566189 - DNA, 25 bp, Homo sapien
tcttcgctccagtacgagcgcgggc

SEQ ID NO: 4566190 - DNA, 25 bp, Homo sapien
tgttagcacgttcctacttcaagaa

SEQ ID NO: 4566191 - DNA, 25 bp, Homo sapien
cttggttaaatctagctggtagtga

SEQ ID NO: 4566192 - DNA, 25 bp, Homo sapien
tatagtacagatcaatgtggcagag

SEQ ID NO: 4566193 - DNA, 25 bp, Homo sapien
taagcagtgtttcacgccactggac

SEQ ID NO: 4566194 - DNA, 25 bp, Homo sapien
gaaagtccagataattccaggccag

SEQ ID NO: 4566195 - DNA, 25 bp, Homo sapien
tctttgaaagtccagataattccag

SEQ ID NO: 4566196 - DNA, 25 bp, Homo sapien
agtggaaagtgaggcaatccatctt

SEQ ID NO: 4566197 - DNA, 25 bp, Homo sapien
catcttttcggcaataatcttctct

SEQ ID NO: 4566198 - DNA, 25 bp, Homo sapien
aatatgtaataggtttttatccatc

SEQ ID NO: 4566199 - DNA, 25 bp, Homo sapien
caaatatgtaataggtttttatcca

SEQ ID NO: 4566200 - DNA, 25 bp, Homo sapien
atatgtaataggtttttatccatct

SEQ ID NO: 4566201 - DNA, 25 bp, Homo sapien
tacaaatatgtaataggtttttatc

SEQ ID NO: 4566202 - DNA, 25 bp, Homo sapien
gttgagcttgggaatttttctggta

SEQ ID NO: 4566203 - DNA, 25 bp, Homo sapien
tactcaatgcattgttgcatagcaa

SEQ ID NO: 4566204 - DNA, 25 bp, Homo sapien
gaaatctgcattggcttggttgagc

SEQ ID NO: 4566205 - DNA, 25 bp, Homo sapien
tctgagagtctgaaatctgcattgg

SEQ ID NO: 4566206 - DNA, 25 bp, Homo sapien
aagtcagtagctgttagtgatttct

SEQ ID NO: 4566207 - DNA, 25 bp, Homo sapien
atttcttgagcatcactgatcgaac

SEQ ID NO: 4566208 - DNA, 25 bp, Homo sapien
actgatcgaacaccaatccaaccat

SEQ ID NO: 4566209 - DNA, 25 bp, Homo sapien
cagtagctgttagtgatttcttgag

SEQ ID NO: 4566210 - DNA, 25 bp, Homo sapien
ctgatcctggaataagagcctgtcc

SEQ ID NO: 4566211 - DNA, 25 bp, Homo sapien
gcaataaaccaatagtatttgtgac

SEQ ID NO: 4566212 - DNA, 25 bp, Homo sapien
gtttgtggtatattactgatcctgg

SEQ ID NO: 4566213 - DNA, 25 bp, Homo sapien
agagcctgtcccgttaattttggat

SEQ ID NO: 4566214 - DNA, 25 bp, Homo sapien
aatccagaagtttaatggtattcgc

SEQ ID NO: 4566215 - DNA, 25 bp, Homo sapien
agtttaatggtattcgccatccaga

SEQ ID NO: 4566216 - DNA, 25 bp, Homo sapien
ggtattcgccatccagagcgtctgc

SEQ ID NO: 4566217 - DNA, 25 bp, Homo sapien
aatggtattcgccatccagagcgtc

SEQ ID NO: 4566218 - DNA, 25 bp, Homo sapien
cctgagatcctacagcctgatttaa

SEQ ID NO: 4566219 - DNA, 25 bp, Homo sapien
caaggttggacccagctagttagta

SEQ ID NO: 4566220 - DNA, 25 bp, Homo sapien
aatgcagctattttcccaaggttgg

SEQ ID NO: 4566221 - DNA, 25 bp, Homo sapien
caatggttggccagttatcccaata

SEQ ID NO: 4566222 - DNA, 25 bp, Homo sapien
ttgttcttcgggaggtaaagctcac

SEQ ID NO: 4566223 - DNA, 25 bp, Homo sapien
taaacatgctaggtacatactcaga

SEQ ID NO: 4566224 - DNA, 25 bp, Homo sapien
catgcttactgactaaaaaagattt

SEQ ID NO: 4566225 - DNA, 25 bp, Homo sapien
aaaagatttctatttactgagagta

SEQ ID NO: 4566226 - DNA, 25 bp, Homo sapien
aggaaagggatggtaagaatataat

SEQ ID NO: 4566227 - DNA, 25 bp, Homo sapien
ggaaagggatggtaagaatataatc

SEQ ID NO: 4566228 - DNA, 25 bp, Homo sapien
tcatcagagcattgtagaaaggaaa

SEQ ID NO: 4566229 - DNA, 25 bp, Homo sapien
agggatggtaagaatataatcattt

SEQ ID NO: 4566230 - DNA, 25 bp, Homo sapien
atcttgccagttgtgtacatggtca

SEQ ID NO: 4566231 - DNA, 25 bp, Homo sapien
tagtaaagggcaactctaggaacca

SEQ ID NO: 4566232 - DNA, 25 bp, Homo sapien
cctagttcatttcctttgatcttgc

SEQ ID NO: 4566233 - DNA, 25 bp, Homo sapien
ggtcattaatcccactttagaggta

SEQ ID NO: 4566234 - DNA, 25 bp, Homo sapien
gacccttaattcgattctaatgagc

SEQ ID NO: 4566235 - DNA, 25 bp, Homo sapien
aactgaaaactatgagtcctccaat

SEQ ID NO: 4566236 - DNA, 25 bp, Homo sapien
tctaatgagctatagccagtaccac

SEQ ID NO: 4566237 - DNA, 25 bp, Homo sapien
ttgtacaaagaagccaattgggatt

SEQ ID NO: 4566238 - DNA, 25 bp, Homo sapien
gttttgtactagctgttcctctgcc

SEQ ID NO: 4566239 - DNA, 25 bp, Homo sapien
ctctgttctaggcatggctggctcc

SEQ ID NO: 4566240 - DNA, 25 bp, Homo sapien
tctgtggaggacttgtgcatctata

SEQ ID NO: 4566241 - DNA, 25 bp, Homo sapien
tcagggatatcagtctggagtttcc

SEQ ID NO: 4566242 - DNA, 25 bp, Homo sapien
cactgcttgacacataataggcctt

SEQ ID NO: 4566243 - DNA, 25 bp, Homo sapien
tataccagccctgatattccaagga

SEQ ID NO: 4566244 - DNA, 25 bp, Homo sapien
gagtcaagatggaacccagcactgt

SEQ ID NO: 4566245 - DNA, 25 bp, Homo sapien
tacgacgttaggaagtagcagagtc

SEQ ID NO: 4566246 - DNA, 25 bp, Homo sapien
actgcaacctgacttcccaacttac

SEQ ID NO: 4566247 - DNA, 25 bp, Homo sapien
tagaaaaccaactaggtagaactgc

SEQ ID NO: 4566248 - DNA, 25 bp, Homo sapien
cacggtaaagtctgaatatttgttc

SEQ ID NO: 4566249 - DNA, 25 bp, Homo sapien
cattttatacaactggtaccagcag

SEQ ID NO: 4566250 - DNA, 25 bp, Homo sapien
tatatttccaatggcacggtaaagt

SEQ ID NO: 4566251 - DNA, 25 bp, Homo sapien
ccattttatacaactggtaccagca

SEQ ID NO: 4566252 - DNA, 25 bp, Homo sapien
cattgctcagactttcaggcaaatt

SEQ ID NO: 4566253 - DNA, 25 bp, Homo sapien
gccttccattgctcagactttcagg

SEQ ID NO: 4566254 - DNA, 25 bp, Homo sapien
gtaagtcgccccctccattggctgc

SEQ ID NO: 4566255 - DNA, 25 bp, Homo sapien
gctcagactttcaggcaaatttttc

SEQ ID NO: 4566256 - DNA, 25 bp, Homo sapien
tggcacccagtcttgacaacactgc

SEQ ID NO: 4566257 - DNA, 25 bp, Homo sapien
cctttgcagtgctcttgggtggcac

SEQ ID NO: 4566258 - DNA, 25 bp, Homo sapien
ttcttgtttgagaattgggcctaca

SEQ ID NO: 4566259 - DNA, 25 bp, Homo sapien
cttgggtggcacaggaacagtttct

SEQ ID NO: 4566260 - DNA, 25 bp, Homo sapien
cttttaggtctaatttgcataattg

SEQ ID NO: 4566261 - DNA, 25 bp, Homo sapien
taggtctaatttgcataattgttac

SEQ ID NO: 4566262 - DNA, 25 bp, Homo sapien
ttaggtctaatttgcataattgtta

SEQ ID NO: 4566263 - DNA, 25 bp, Homo sapien
ttttaggtctaatttgcataattgt

SEQ ID NO: 4566264 - DNA, 25 bp, Homo sapien
aactgtgtctccgtgaagcactgta

SEQ ID NO: 4566265 - DNA, 25 bp, Homo sapien
tgtctccgtgaagcactgtatggat

SEQ ID NO: 4566266 - DNA, 25 bp, Homo sapien
tccgtgaagcactgtatggattaca

SEQ ID NO: 4566267 - DNA, 25 bp, Homo sapien
tccagtaactgtgtctccgtgaagc

SEQ ID NO: 4566268 - DNA, 25 bp, Homo sapien
actgggatgaacattcaatatgcca

SEQ ID NO: 4566269 - DNA, 25 bp, Homo sapien
caactgggatgaacattcaatatgc

SEQ ID NO: 4566270 - DNA, 25 bp, Homo sapien
aactgggatgaacattcaatatgcc

SEQ ID NO: 4566271 - DNA, 25 bp, Homo sapien
taaagaccaaggtttctatactgta

SEQ ID NO: 4566272 - DNA, 25 bp, Homo sapien
atacaaggtccatttataaagacca

SEQ ID NO: 4566273 - DNA, 25 bp, Homo sapien
gaccaaggtttctatactgtatttc

SEQ ID NO: 4566274 - DNA, 25 bp, Homo sapien
tacaaggtccatttataaagaccaa

SEQ ID NO: 4566275 - DNA, 25 bp, Homo sapien
tcattcaaaagtcggccaaacgaag

SEQ ID NO: 4566276 - DNA, 25 bp, Homo sapien
cctcattcaaaagtcggccaaacga

SEQ ID NO: 4566277 - DNA, 25 bp, Homo sapien
agcctcattcaaaagtcggccaaac

SEQ ID NO: 4566278 - DNA, 25 bp, Homo sapien
tcaaaagtcggccaaacgaagccac

SEQ ID NO: 4566279 - DNA, 25 bp, Homo sapien
ccaacatcatattctccagatccca

SEQ ID NO: 4566280 - DNA, 25 bp, Homo sapien
caacatcatattctccagatcccac

SEQ ID NO: 4566281 - DNA, 25 bp, Homo sapien
tccaacatcatattctccagatccc

SEQ ID NO: 4566282 - DNA, 25 bp, Homo sapien
cagcatattgcttcactggcagtcc

SEQ ID NO: 4566283 - DNA, 25 bp, Homo sapien
atccggccactcatatacgggaagc

SEQ ID NO: 4566284 - DNA, 25 bp, Homo sapien
ctgagactgcacagcatattgcttc

SEQ ID NO: 4566285 - DNA, 25 bp, Homo sapien
catatacgggaagctgagactgcac

SEQ ID NO: 4566286 - DNA, 25 bp, Homo sapien
cacctccagtttgtcgattaactct

SEQ ID NO: 4566287 - DNA, 25 bp, Homo sapien
tttgtcgattaactcttcttctttg

SEQ ID NO: 4566288 - DNA, 25 bp, Homo sapien
cctccagtttgtcgattaactcttc

SEQ ID NO: 4566289 - DNA, 25 bp, Homo sapien
cagtttgtcgattaactcttcttct

SEQ ID NO: 4566290 - DNA, 25 bp, Homo sapien
tggctgtctctggataaaggaactg

SEQ ID NO: 4566291 - DNA, 25 bp, Homo sapien
ggaactgggaactgctaaacagagg

SEQ ID NO: 4566292 - DNA, 25 bp, Homo sapien
cattccatggcagtacctgtagcac

SEQ ID NO: 4566293 - DNA, 25 bp, Homo sapien
taatggagctgccaagtgaagcatc

SEQ ID NO: 4566294 - DNA, 25 bp, Homo sapien
cgcctcgcgggcgaactggtccgtg

SEQ ID NO: 4566295 - DNA, 25 bp, Homo sapien
tcgcggactctggagtcccggcagt

SEQ ID NO: 4566296 - DNA, 25 bp, Homo sapien
aggcttctcgcggactctggagtcc

SEQ ID NO: 4566297 - DNA, 25 bp, Homo sapien
gtgccgaagaagagcacccgccagg

SEQ ID NO: 4566298 - DNA, 25 bp, Homo sapien
aacagcgccgcaccaacaccctcat

SEQ ID NO: 4566299 - DNA, 25 bp, Homo sapien
atgagccagcggaggaccccaacag

SEQ ID NO: 4566300 - DNA, 25 bp, Homo sapien
gtgctcgccactggggactcggcct

SEQ ID NO: 4566301 - DNA, 25 bp, Homo sapien
ctcccagccgagtcgggccagtgct

SEQ ID NO: 4566302 - DNA, 25 bp, Homo sapien
ggcatatgttcccatgcatgagtgt

SEQ ID NO: 4566303 - DNA, 25 bp, Homo sapien
tctcaggtctctttcggccaaaact

SEQ ID NO: 4566304 - DNA, 25 bp, Homo sapien
aacttagaggaccacttatgactgc

SEQ ID NO: 4566305 - DNA, 25 bp, Homo sapien
gaagttgcaatcacttctcaggtct

SEQ ID NO: 4566306 - DNA, 25 bp, Homo sapien
gaagttgtgatgacatgatgaacac

SEQ ID NO: 4566307 - DNA, 25 bp, Homo sapien
gatgacatgatgaacacccgtctgt

SEQ ID NO: 4566308 - DNA, 25 bp, Homo sapien
ttggtgatgtgctctcatctccatg

SEQ ID NO: 4566309 - DNA, 25 bp, Homo sapien
gatgaacacccgtctgtctgttctg

SEQ ID NO: 4566310 - DNA, 25 bp, Homo sapien
cctctgactttattccatgccactt

SEQ ID NO: 4566311 - DNA, 25 bp, Homo sapien
gctatattggccacctttttgttcc

SEQ ID NO: 4566312 - DNA, 25 bp, Homo sapien
ggagtggatactcctgtctgtcctc

SEQ ID NO: 4566313 - DNA, 25 bp, Homo sapien
cactatgattcagctatattggcca

SEQ ID NO: 4566314 - DNA, 25 bp, Homo sapien
tcaaactcgggtgggatatccagtc

SEQ ID NO: 4566315 - DNA, 25 bp, Homo sapien
caggtcaggcggtacatttcctcca

SEQ ID NO: 4566316 - DNA, 25 bp, Homo sapien
tgtgattggctaccgcatgacaccc

SEQ ID NO: 4566317 - DNA, 25 bp, Homo sapien
gagatgtcctttgcaagggtcccag

SEQ ID NO: 4566318 - DNA, 25 bp, Homo sapien
caatgaatgaactgcaagcaaacta

SEQ ID NO: 4566319 - DNA, 25 bp, Homo sapien
gatacaatgaatgaactgcaagcaa

SEQ ID NO: 4566320 - DNA, 25 bp, Homo sapien
tgaatgaactgcaagcaaactaaaa

SEQ ID NO: 4566321 - DNA, 25 bp, Homo sapien
cagatacaatgaatgaactgcaagc

SEQ ID NO: 4566322 - DNA, 25 bp, Homo sapien
caacagtagtcctgagacggctgag

SEQ ID NO: 4566323 - DNA, 25 bp, Homo sapien
tgttctcgggcctgacattgacaga

SEQ ID NO: 4566324 - DNA, 25 bp, Homo sapien
ggtgtgtcctgatcccatgtctgag

SEQ ID NO: 4566325 - DNA, 25 bp, Homo sapien
caaaatccgtagctggcctgtgggt

SEQ ID NO: 4566326 - DNA, 25 bp, Homo sapien
cactgcctcgtggaagacatgctgc

SEQ ID NO: 4566327 - DNA, 25 bp, Homo sapien
catgctgcacgtgctcaaagtccag

SEQ ID NO: 4566328 - DNA, 25 bp, Homo sapien
cttgaagcccttcaggagagtcagg

SEQ ID NO: 4566329 - DNA, 25 bp, Homo sapien
gacttcacggtgaccagcttggcct

SEQ ID NO: 4566330 - DNA, 25 bp, Homo sapien
ctcgaaaaacaggcacccaaacctg

SEQ ID NO: 4566331 - DNA, 25 bp, Homo sapien
tcgaaaaacaggcacccaaacctgc

SEQ ID NO: 4566332 - DNA, 25 bp, Homo sapien
cacaccctctgccttggtgacttgc

SEQ ID NO: 4566333 - DNA, 25 bp, Homo sapien
ctgccaaagccacaccctctgcctt

SEQ ID NO: 4566334 - DNA, 25 bp, Homo sapien
gccacaccctctgccttggtgactt

SEQ ID NO: 4566335 - DNA, 25 bp, Homo sapien
aaagccacaccctctgccttggtga

SEQ ID NO: 4566336 - DNA, 25 bp, Homo sapien
taagggtaagaagctactccaaatc

SEQ ID NO: 4566337 - DNA, 25 bp, Homo sapien
ctctcagggttgttaggattacgaa

SEQ ID NO: 4566338 - DNA, 25 bp, Homo sapien
tcgtttggactgaagggttagacca

SEQ ID NO: 4566339 - DNA, 25 bp, Homo sapien
cttgtgggatcagctctagagagaa

SEQ ID NO: 4566340 - DNA, 25 bp, Homo sapien
gatcttggggccaagactccactgg

SEQ ID NO: 4566341 - DNA, 25 bp, Homo sapien
gaaaaagaagactggccttgcatag

SEQ ID NO: 4566342 - DNA, 25 bp, Homo sapien
ggccttgcataggtcggatgtctac

SEQ ID NO: 4566343 - DNA, 25 bp, Homo sapien
ccatgggaatcgaggcgggaagaaa

SEQ ID NO: 4566344 - DNA, 25 bp, Homo sapien
attcccgaggataatggcacagcca

SEQ ID NO: 4566345 - DNA, 25 bp, Homo sapien
tgcccattcccgaggataatggcac

SEQ ID NO: 4566346 - DNA, 25 bp, Homo sapien
ccgctgcccattcccgaggataatg

SEQ ID NO: 4566347 - DNA, 25 bp, Homo sapien
tgagctgtcccgctgcccattcccg

SEQ ID NO: 4566348 - DNA, 25 bp, Homo sapien
ggatgctgcgctgtgtctccttcgc

SEQ ID NO: 4566349 - DNA, 25 bp, Homo sapien
tccttcgcgtgcaaggcaagcagct

SEQ ID NO: 4566350 - DNA, 25 bp, Homo sapien
tgtccagcttgttgcccagcagcag

SEQ ID NO: 4566351 - DNA, 25 bp, Homo sapien
ccagttcaggtagcgctcgcagttc

SEQ ID NO: 4566352 - DNA, 25 bp, Homo sapien
ggtggtccacagtctcctcggagct

SEQ ID NO: 4566353 - DNA, 25 bp, Homo sapien
gcagtgtccatgaccctcaggtgga

SEQ ID NO: 4566354 - DNA, 25 bp, Homo sapien
ctcaggtggacaggctggtggtcca

SEQ ID NO: 4566355 - DNA, 25 bp, Homo sapien
agtctcctcggagctgtaggtgtcc

SEQ ID NO: 4566356 - DNA, 25 bp, Homo sapien
gctctgtaagaactggatgggcccc

SEQ ID NO: 4566357 - DNA, 25 bp, Homo sapien
gatggtgttccaaagttaatagggc

SEQ ID NO: 4566358 - DNA, 25 bp, Homo sapien
taatagggcaggatcacattcccag

SEQ ID NO: 4566359 - DNA, 25 bp, Homo sapien
ggtattaaacccaatgtcagctgct

SEQ ID NO: 4566360 - DNA, 25 bp, Homo sapien
ccagcctgctttggggacttggata

SEQ ID NO: 4566361 - DNA, 25 bp, Homo sapien
tcacagacagcttcttgtccccagc

SEQ ID NO: 4566362 - DNA, 25 bp, Homo sapien
agacagcttcttgtccccagcctgc

SEQ ID NO: 4566363 - DNA, 25 bp, Homo sapien
ttggggacttggataaatagctgct

SEQ ID NO: 4566364 - DNA, 25 bp, Homo sapien
ttcactgataaacctcttggtcaga

SEQ ID NO: 4566365 - DNA, 25 bp, Homo sapien
ttggtcagaaacttcacggtcaggg

SEQ ID NO: 4566366 - DNA, 25 bp, Homo sapien
gggtcatattcactgataaacctct

SEQ ID NO: 4566367 - DNA, 25 bp, Homo sapien
caagttggggtcatattcactgata

SEQ ID NO: 4566368 - DNA, 25 bp, Homo sapien
ggccaggttgacctcgaggggcgcg

SEQ ID NO: 4566369 - DNA, 25 bp, Homo sapien
ccaggttgacctcgaggggcgcgct

SEQ ID NO: 4566370 - DNA, 25 bp, Homo sapien
ggttgacctcgaggggcgcgctctg

SEQ ID NO: 4566371 - DNA, 25 bp, Homo sapien
cgcgctctgaggcccgctgcccgcg

SEQ ID NO: 4566372 - DNA, 25 bp, Homo sapien
ccacgcaggtctgcggccggtgggc

SEQ ID NO: 4566373 - DNA, 25 bp, Homo sapien
tggacggccacgcaggtctgcggcc

SEQ ID NO: 4566374 - DNA, 25 bp, Homo sapien
gccctggacggccacgcaggtctgc

SEQ ID NO: 4566375 - DNA, 25 bp, Homo sapien
gggcccaggggagcgggatgcaggc

SEQ ID NO: 4566376 - DNA, 25 bp, Homo sapien
aattccttgtaagggctgcggagcc

SEQ ID NO: 4566377 - DNA, 25 bp, Homo sapien
ctcggccccgcgtccagcgggctgc

SEQ ID NO: 4566378 - DNA, 25 bp, Homo sapien
caccccaagcgccaccaaattcctt

SEQ ID NO: 4566379 - DNA, 25 bp, Homo sapien
agcgccaccaaattccttgtaaggg

SEQ ID NO: 4566380 - DNA, 25 bp, Homo sapien
cccactggtccccaagattgggact

SEQ ID NO: 4566381 - DNA, 25 bp, Homo sapien
gcaaggacacagtcaagacccagca

SEQ ID NO: 4566382 - DNA, 25 bp, Homo sapien
tggtccccaagattgggactgtcat

SEQ ID NO: 4566383 - DNA, 25 bp, Homo sapien
gacacagtcaagacccagcactgag

SEQ ID NO: 4566384 - DNA, 25 bp, Homo sapien
acaggagtatcatttctggcagggc

SEQ ID NO: 4566385 - DNA, 25 bp, Homo sapien
aagttgctgtcacatcccaggaacg

SEQ ID NO: 4566386 - DNA, 25 bp, Homo sapien
aatggctcctcttggcggcggaata

SEQ ID NO: 4566387 - DNA, 25 bp, Homo sapien
ccctagaggaggtcttgtcccagca

SEQ ID NO: 4566388 - DNA, 25 bp, Homo sapien
gattcttatggatagccgccagggc

SEQ ID NO: 4566389 - DNA, 25 bp, Homo sapien
ccccgcaaatgaggaaagactgtca

SEQ ID NO: 4566390 - DNA, 25 bp, Homo sapien
taattgttgcaggtctgcgcagggc

SEQ ID NO: 4566391 - DNA, 25 bp, Homo sapien
gacttctgaacgataggccttgggt

SEQ ID NO: 4566392 - DNA, 25 bp, Homo sapien
taactgtcacccttggtattatttg

SEQ ID NO: 4566393 - DNA, 25 bp, Homo sapien
tgcagaggcaactatttcaactctt

SEQ ID NO: 4566394 - DNA, 25 bp, Homo sapien
ggttactaatgcacacagtgtaaag

SEQ ID NO: 4566395 - DNA, 25 bp, Homo sapien
ggcatgcatgaagaacatagctccc

SEQ ID NO: 4566396 - DNA, 25 bp, Homo sapien
ggcattgggcctagatgcccaggca

SEQ ID NO: 4566397 - DNA, 25 bp, Homo sapien
tgccaggtctggcattgggcctaga

SEQ ID NO: 4566398 - DNA, 25 bp, Homo sapien
ccaggcatcgtggagtgcctccgtg

SEQ ID NO: 4566399 - DNA, 25 bp, Homo sapien
aatacagttaggatgggttgccagg

SEQ ID NO: 4566400 - DNA, 25 bp, Homo sapien
ccagggcttgctctcggcggttgcc

SEQ ID NO: 4566401 - DNA, 25 bp, Homo sapien
tcggcggttgccatggaccagcagc

SEQ ID NO: 4566402 - DNA, 25 bp, Homo sapien
cctccttgatccggtcctgctggaa

SEQ ID NO: 4566403 - DNA, 25 bp, Homo sapien
tgtcactgaactgctcccagaggcg

SEQ ID NO: 4566404 - DNA, 25 bp, Homo sapien
gtgatgtaggttccgacctcccttc

SEQ ID NO: 4566405 - DNA, 25 bp, Homo sapien
cacgtgagcctgatcctgggccaca

SEQ ID NO: 4566406 - DNA, 25 bp, Homo sapien
tgcacctagtcccaaaaagctgtgg

SEQ ID NO: 4566407 - DNA, 25 bp, Homo sapien
ttttctgtacctgtagggtgatgta

SEQ ID NO: 4566408 - DNA, 25 bp, Homo sapien
gaggggggcagaccgtacacctgca

SEQ ID NO: 4566409 - DNA, 25 bp, Homo sapien
aggggggcagaccgtacacctgcac

SEQ ID NO: 4566410 - DNA, 25 bp, Homo sapien
ggaggggggcagaccgtacacctgc

SEQ ID NO: 4566411 - DNA, 25 bp, Homo sapien
tgtggaggtatcacagcgcagcctg

SEQ ID NO: 4566412 - DNA, 25 bp, Homo sapien
cactctctccttctcgaggcctcac

SEQ ID NO: 4566413 - DNA, 25 bp, Homo sapien
ccatggggcacttagaagtgactac

SEQ ID NO: 4566414 - DNA, 25 bp, Homo sapien
cctgcccgtgccctgaacactgtgg

SEQ ID NO: 4566415 - DNA, 25 bp, Homo sapien
ctggctctcggagaactggaacatc

SEQ ID NO: 4566416 - DNA, 25 bp, Homo sapien
gacgtaacaggcggtcacaggcact

SEQ ID NO: 4566417 - DNA, 25 bp, Homo sapien
ccctgacgtaacaggcggtcacagg

SEQ ID NO: 4566418 - DNA, 25 bp, Homo sapien
cttcctcatatccctgacgtaacag

SEQ ID NO: 4566419 - DNA, 25 bp, Homo sapien
aggcaacagggcaagccaccacctg

SEQ ID NO: 4566420 - DNA, 25 bp, Homo sapien
gagctgagggccaggcaacagggca

SEQ ID NO: 4566421 - DNA, 25 bp, Homo sapien
gagaggcactccaagggcctgagct

SEQ ID NO: 4566422 - DNA, 25 bp, Homo sapien
ctgggccggaagcgggcagagaggg

SEQ ID NO: 4566423 - DNA, 25 bp, Homo sapien
tctctgagtgcctggcgataggcag

SEQ ID NO: 4566424 - DNA, 25 bp, Homo sapien
gaagggggatagaggctttctctga

SEQ ID NO: 4566425 - DNA, 25 bp, Homo sapien
caatgggtcttcaccaactatgcca

SEQ ID NO: 4566426 - DNA, 25 bp, Homo sapien
gcagacaatgggtcttcaccaacta

SEQ ID NO: 4566427 - DNA, 25 bp, Homo sapien
tgtctgggagcacccattcgtgtga

SEQ ID NO: 4566428 - DNA, 25 bp, Homo sapien
gggtttccgtagaccttcagagctg

SEQ ID NO: 4566429 - DNA, 25 bp, Homo sapien
gatcagctgctagaggacgggcttt

SEQ ID NO: 4566430 - DNA, 25 bp, Homo sapien
tacagctagacctgctctgagcacg

SEQ ID NO: 4566431 - DNA, 25 bp, Homo sapien
tgcaatatgcggctttcagtgggag

SEQ ID NO: 4566432 - DNA, 25 bp, Homo sapien
cagtgtgggcacatcaagccttgtg

SEQ ID NO: 4566433 - DNA, 25 bp, Homo sapien
tagatgaagtcatccaaaggcccct

SEQ ID NO: 4566434 - DNA, 25 bp, Homo sapien
ggcttgttcagttaccaggacttca

SEQ ID NO: 4566435 - DNA, 25 bp, Homo sapien
aatgaaaagtgccaactaccctggg

SEQ ID NO: 4566436 - DNA, 25 bp, Homo sapien
caagactggtcagatcagggcctcc

SEQ ID NO: 4566437 - DNA, 25 bp, Homo sapien
tgactggctgtatgaacttccctgg

SEQ ID NO: 4566438 - DNA, 25 bp, Homo sapien
tatcatccgaaggtaggcgtgactt

SEQ ID NO: 4566439 - DNA, 25 bp, Homo sapien
cttcagttgtctgccccttcaggga

SEQ ID NO: 4566440 - DNA, 25 bp, Homo sapien
ccttcagggattaccttaactgcag

SEQ ID NO: 4566441 - DNA, 25 bp, Homo sapien
gggtataaaggcctgaccatctcag

SEQ ID NO: 4566442 - DNA, 25 bp, Homo sapien
tgttgggcctatgtcacagctcaaa

SEQ ID NO: 4566443 - DNA, 25 bp, Homo sapien
gggatatcccagggcgaccactggc

SEQ ID NO: 4566444 - DNA, 25 bp, Homo sapien
gcggacagcaggtcagccgcagtat

SEQ ID NO: 4566445 - DNA, 25 bp, Homo sapien
cactggcccaatgaggtcttgctcc

SEQ ID NO: 4566446 - DNA, 25 bp, Homo sapien
gcagagctatgatggcccttcgcag

SEQ ID NO: 4566447 - DNA, 25 bp, Homo sapien
aatacagacagactggacatgtcag

SEQ ID NO: 4566448 - DNA, 25 bp, Homo sapien
tacagacagactggacatgtcagtt

SEQ ID NO: 4566449 - DNA, 25 bp, Homo sapien
tgaaatacagacagactggacatgt

SEQ ID NO: 4566450 - DNA, 25 bp, Homo sapien
acagacagactggacatgtcagtta

SEQ ID NO: 4566451 - DNA, 25 bp, Homo sapien
gaagtgacactcagttgggctggac

SEQ ID NO: 4566452 - DNA, 25 bp, Homo sapien
ctgtacagagtgtaggggctaatat

SEQ ID NO: 4566453 - DNA, 25 bp, Homo sapien
tgacactcagttgggctggacattt

SEQ ID NO: 4566454 - DNA, 25 bp, Homo sapien
aagtgacactcagttgggctggaca

SEQ ID NO: 4566455 - DNA, 25 bp, Homo sapien
aaccaggccctccttcttgaatttg

SEQ ID NO: 4566456 - DNA, 25 bp, Homo sapien
agcaggggtaggtcttcccaaccag

SEQ ID NO: 4566457 - DNA, 25 bp, Homo sapien
cccaaccaggccctccttcttgaat

SEQ ID NO: 4566458 - DNA, 25 bp, Homo sapien
tggtgacagatgagcaggggtaggt

SEQ ID NO: 4566459 - DNA, 25 bp, Homo sapien
tatgctctaaacaaccgtgtgaagg

SEQ ID NO: 4566460 - DNA, 25 bp, Homo sapien
gggcagaaagctgtgccccgctgcc

SEQ ID NO: 4566461 - DNA, 25 bp, Homo sapien
caagccggtgcatgtaagaaaccag

SEQ ID NO: 4566462 - DNA, 25 bp, Homo sapien
tgcagattgaattctaccttggcct

SEQ ID NO: 4566463 - DNA, 25 bp, Homo sapien
accgtaggcttgtggctccgcagcg

SEQ ID NO: 4566464 - DNA, 25 bp, Homo sapien
cgcgaccgtaggcttgtggctccgc

SEQ ID NO: 4566465 - DNA, 25 bp, Homo sapien
tggctccgcagcggggggatggcgc

SEQ ID NO: 4566466 - DNA, 25 bp, Homo sapien
gcgaccgtaggcttgtggctccgca

SEQ ID NO: 4566467 - DNA, 25 bp, Homo sapien
ctgccgtggagggccgcgggggcga

SEQ ID NO: 4566468 - DNA, 25 bp, Homo sapien
ggcggcggggtgctggggcgcgggc

SEQ ID NO: 4566469 - DNA, 25 bp, Homo sapien
cgcgggccccgggggtgatgcagac

SEQ ID NO: 4566470 - DNA, 25 bp, Homo sapien
cgtggagggccgcgggggcgacgcg

SEQ ID NO: 4566471 - DNA, 25 bp, Homo sapien
cgggagaccagcttcccctcggaga

SEQ ID NO: 4566472 - DNA, 25 bp, Homo sapien
gggagaccagcttcccctcggagag

SEQ ID NO: 4566473 - DNA, 25 bp, Homo sapien
gcttcccctcggagagccgccgccg

SEQ ID NO: 4566474 - DNA, 25 bp, Homo sapien
ctgggggccggctcttcctcgctgc

SEQ ID NO: 4566475 - DNA, 25 bp, Homo sapien
acgtccagcgagcacaggcgacggc

SEQ ID NO: 4566476 - DNA, 25 bp, Homo sapien
gtagcacgtccagcgagcacaggcg

SEQ ID NO: 4566477 - DNA, 25 bp, Homo sapien
cgcgtagcacgtccagcgagcacag

SEQ ID NO: 4566478 - DNA, 25 bp, Homo sapien
gctgactagcaagagccaggctgga

SEQ ID NO: 4566479 - DNA, 25 bp, Homo sapien
ggtctctgattgtggtgggcgcagg

SEQ ID NO: 4566480 - DNA, 25 bp, Homo sapien
tcaccgcactggtacgggctgggtc

SEQ ID NO: 4566481 - DNA, 25 bp, Homo sapien
tgtccggcctccgggtctctgattg

SEQ ID NO: 4566482 - DNA, 25 bp, Homo sapien
gagaggctctgtgcctatcacaaag

SEQ ID NO: 4566483 - DNA, 25 bp, Homo sapien
tatcacaaagcccttgggcaacttg

SEQ ID NO: 4566484 - DNA, 25 bp, Homo sapien
cccgcaggccgggacgctgagttct

SEQ ID NO: 4566485 - DNA, 25 bp, Homo sapien
atagaacccagcagaacttccccgc

SEQ ID NO: 4566486 - DNA, 25 bp, Homo sapien
tcgagtcctgaggaccaggctcagg

SEQ ID NO: 4566487 - DNA, 25 bp, Homo sapien
agagtcgagtcctgaggaccaggct

SEQ ID NO: 4566488 - DNA, 25 bp, Homo sapien
gtcctgaggaccaggctcaggcctc

SEQ ID NO: 4566489 - DNA, 25 bp, Homo sapien
agtcgagtcctgaggaccaggctca

SEQ ID NO: 4566490 - DNA, 25 bp, Homo sapien
catatttcagtcatgctctagacca

SEQ ID NO: 4566491 - DNA, 25 bp, Homo sapien
acaagagcattcacacggacagaaa

SEQ ID NO: 4566492 - DNA, 25 bp, Homo sapien
cagtcatgctctagaccactgtttt

SEQ ID NO: 4566493 - DNA, 25 bp, Homo sapien
caaaactagttctcatgcatttcat

SEQ ID NO: 4566494 - DNA, 25 bp, Homo sapien
tgtcatacctaaaaatcaattccag

SEQ ID NO: 4566495 - DNA, 25 bp, Homo sapien
actcttggagaagcaacacagtgga

SEQ ID NO: 4566496 - DNA, 25 bp, Homo sapien
caaaattggctctgtagagtagctg

SEQ ID NO: 4566497 - DNA, 25 bp, Homo sapien
tccagaaacatatccacacatgaat

SEQ ID NO: 4566498 - DNA, 25 bp, Homo sapien
aagggctaacgggccaggcacgttg

SEQ ID NO: 4566499 - DNA, 25 bp, Homo sapien
aactccaaaagagactaaccatgaa

SEQ ID NO: 4566500 - DNA, 25 bp, Homo sapien
gattgagatgagcatgggcaacaaa

SEQ ID NO: 4566501 - DNA, 25 bp, Homo sapien
aagagactaaccatgaaggaaaatt

SEQ ID NO: 4566502 - DNA, 25 bp, Homo sapien
cctaattcataatctcagaaccatg

SEQ ID NO: 4566503 - DNA, 25 bp, Homo sapien
cttcactctaaactccaggaggtca

SEQ ID NO: 4566504 - DNA, 25 bp, Homo sapien
cacagaacgcttttgaagaaaaatc

SEQ ID NO: 4566505 - DNA, 25 bp, Homo sapien
tattctgtatgaggttagggagtat

SEQ ID NO: 4566506 - DNA, 25 bp, Homo sapien
ggattctgaacaactagacccttag

SEQ ID NO: 4566507 - DNA, 25 bp, Homo sapien
tctacagcaaaagatggcaccatcg

SEQ ID NO: 4566508 - DNA, 25 bp, Homo sapien
caggaggttttgcatcaagcttgcc

SEQ ID NO: 4566509 - DNA, 25 bp, Homo sapien
cctaagctgcactaaaactgggatt

SEQ ID NO: 4566510 - DNA, 25 bp, Homo sapien
catccttggggaacgaagttgcctt

SEQ ID NO: 4566511 - DNA, 25 bp, Homo sapien
ctttgggatgatcggatggcaccag

SEQ ID NO: 4566512 - DNA, 25 bp, Homo sapien
ggcaccaggtactgatcccaatcat

SEQ ID NO: 4566513 - DNA, 25 bp, Homo sapien
acagcagttgcccagatgtcgttgc

SEQ ID NO: 4566514 - DNA, 25 bp, Homo sapien
ctccaagaggtgagcaagtgggaac

SEQ ID NO: 4566515 - DNA, 25 bp, Homo sapien
taatactgtcggaaaggctccaaga

SEQ ID NO: 4566516 - DNA, 25 bp, Homo sapien
ggagtgctcggcttggagataatac

SEQ ID NO: 4566517 - DNA, 25 bp, Homo sapien
ccaagaggtgagcaagtgggaactc

SEQ ID NO: 4566518 - DNA, 25 bp, Homo sapien
gaagagcgtcaatctagtattttca

SEQ ID NO: 4566519 - DNA, 25 bp, Homo sapien
tgagatcacccgtgatgagaagagc

SEQ ID NO: 4566520 - DNA, 25 bp, Homo sapien
tcacccgtgatgagaagagcgtcaa

SEQ ID NO: 4566521 - DNA, 25 bp, Homo sapien
cttagcttgagatcacccgtgatga

SEQ ID NO: 4566522 - DNA, 25 bp, Homo sapien
ctggatccccaaacaacttggactc

SEQ ID NO: 4566523 - DNA, 25 bp, Homo sapien
cttcctcttgttctccttctagcat

SEQ ID NO: 4566524 - DNA, 25 bp, Homo sapien
tctcttcctcttgttctccttctag

SEQ ID NO: 4566525 - DNA, 25 bp, Homo sapien
tcttttctaattctcttttcctctc

SEQ ID NO: 4566526 - DNA, 25 bp, Homo sapien
tcctctcttcctcttgttctccttc

SEQ ID NO: 4566527 - DNA, 25 bp, Homo sapien
agcttcatacagttcagagcgcttt

SEQ ID NO: 4566528 - DNA, 25 bp, Homo sapien
cagttcagagcgctttttaatgagt

SEQ ID NO: 4566529 - DNA, 25 bp, Homo sapien
tgatgcgtaaaagtctcatctgctg

SEQ ID NO: 4566530 - DNA, 25 bp, Homo sapien
taatgagttttctcagtcgctgaag

SEQ ID NO: 4566531 - DNA, 25 bp, Homo sapien
ttgagacaaggcctcgctctaacac

SEQ ID NO: 4566532 - DNA, 25 bp, Homo sapien
caagtagctacaagtacaagtgtgc

SEQ ID NO: 4566533 - DNA, 25 bp, Homo sapien
tagctacaagtacaagtgtgcacca

SEQ ID NO: 4566534 - DNA, 25 bp, Homo sapien
tgggcagacaggacaaaatggcatt

SEQ ID NO: 4566535 - DNA, 25 bp, Homo sapien
tttgtatgaggtctcacgaggtcag

SEQ ID NO: 4566536 - DNA, 25 bp, Homo sapien
tgtatgaggtctcacgaggtcagga

SEQ ID NO: 4566537 - DNA, 25 bp, Homo sapien
agcccaaatggccttttacacacgt

SEQ ID NO: 4566538 - DNA, 25 bp, Homo sapien
gcggcagcatgaccacgactcactg

SEQ ID NO: 4566539 - DNA, 25 bp, Homo sapien
caaagcccgtagaatgtccaccatt

SEQ ID NO: 4566540 - DNA, 25 bp, Homo sapien
tttcctcacttcagatagtacgcca

SEQ ID NO: 4566541 - DNA, 25 bp, Homo sapien
tagtacgccatcagcggctgctttg

SEQ ID NO: 4566542 - DNA, 25 bp, Homo sapien
tctccaaagcccgtagaatgtccac

SEQ ID NO: 4566543 - DNA, 25 bp, Homo sapien
agagcccggagcaatcgcgcgcgca

SEQ ID NO: 4566544 - DNA, 25 bp, Homo sapien
agcggcgcggtctgggagtacagca

SEQ ID NO: 4566545 - DNA, 25 bp, Homo sapien
acataggcagcctgggtcaacggct

SEQ ID NO: 4566546 - DNA, 25 bp, Homo sapien
gtcaacggctgtagccgctcggcca

SEQ ID NO: 4566547 - DNA, 25 bp, Homo sapien
catgcgtgcgctggggcaccggaca

SEQ ID NO: 4566548 - DNA, 25 bp, Homo sapien
ccggcatgcgtgcgctggggcaccg

SEQ ID NO: 4566549 - DNA, 25 bp, Homo sapien
ggcatgcgtgcgctggggcaccgga

SEQ ID NO: 4566550 - DNA, 25 bp, Homo sapien
gcccggcatgcgtgcgctggggcac

SEQ ID NO: 4566551 - DNA, 25 bp, Homo sapien
gggtcccgaacaccgcctccagcca

SEQ ID NO: 4566552 - DNA, 25 bp, Homo sapien
ggtcccgaacaccgcctccagccac

SEQ ID NO: 4566553 - DNA, 25 bp, Homo sapien
gttggagggccgcatccccgagcac

SEQ ID NO: 4566554 - DNA, 25 bp, Homo sapien
cggtggcggacagccgaaaggagca

SEQ ID NO: 4566555 - DNA, 25 bp, Homo sapien
gcgcctcaggccaccgcgggctcca

SEQ ID NO: 4566556 - DNA, 25 bp, Homo sapien
tgccggtcgcgcaggcgttggaggg

SEQ ID NO: 4566557 - DNA, 25 bp, Homo sapien
tggccgaagaatggtggcagggcca

SEQ ID NO: 4566558 - DNA, 25 bp, Homo sapien
ggccgaagaatggtggcagggccat

SEQ ID NO: 4566559 - DNA, 25 bp, Homo sapien
ctggccgaagaatggtggcagggcc

SEQ ID NO: 4566560 - DNA, 25 bp, Homo sapien
tccggaaggctcagtgcataagtgg

SEQ ID NO: 4566561 - DNA, 25 bp, Homo sapien
tcatgagaaccttccgacggaagtg

SEQ ID NO: 4566562 - DNA, 25 bp, Homo sapien
gctttgagaagtgacaggaatctga

SEQ ID NO: 4566563 - DNA, 25 bp, Homo sapien
gaatctgagtggctcctcatgagaa

SEQ ID NO: 4566564 - DNA, 25 bp, Homo sapien
cttccactactttagcccaagccat

SEQ ID NO: 4566565 - DNA, 25 bp, Homo sapien
ttccacttccactactttagcccaa

SEQ ID NO: 4566566 - DNA, 25 bp, Homo sapien
cacttccactactttagcccaagcc

SEQ ID NO: 4566567 - DNA, 25 bp, Homo sapien
ttcttccacttccactactttagcc

SEQ ID NO: 4566568 - DNA, 25 bp, Homo sapien
tgaaccattactagggagaccaagg

SEQ ID NO: 4566569 - DNA, 25 bp, Homo sapien
tgttgtgactaaaatgcctccccag

SEQ ID NO: 4566570 - DNA, 25 bp, Homo sapien
gaaagctcgagtctataaaccaaaa

SEQ ID NO: 4566571 - DNA, 25 bp, Homo sapien
gttccatactatagcaaccagcctt

SEQ ID NO: 4566572 - DNA, 25 bp, Homo sapien
gacttcaattccatgtactcaccca

SEQ ID NO: 4566573 - DNA, 25 bp, Homo sapien
gatacaattttcattaagaccccaa

SEQ ID NO: 4566574 - DNA, 25 bp, Homo sapien
catggctgttactatgactgatact

SEQ ID NO: 4566575 - DNA, 25 bp, Homo sapien
gtgtgaacacatttactttggctga

SEQ ID NO: 4566576 - DNA, 25 bp, Homo sapien
atggattaaagatggtaaataaggc

SEQ ID NO: 4566577 - DNA, 25 bp, Homo sapien
ctaaaatggattaaagatggtaaat

SEQ ID NO: 4566578 - DNA, 25 bp, Homo sapien
tggattaaagatggtaaataaggcc

SEQ ID NO: 4566579 - DNA, 25 bp, Homo sapien
aaatggattaaagatggtaaataag

SEQ ID NO: 4566580 - DNA, 25 bp, Homo sapien
acagggtgaaaccctgtctctacta

SEQ ID NO: 4566581 - DNA, 25 bp, Homo sapien
ggctgaggccagcagatcacaaggt

SEQ ID NO: 4566582 - DNA, 25 bp, Homo sapien
aaaatacaaaaattagccaggtgtg

SEQ ID NO: 4566583 - DNA, 25 bp, Homo sapien
caggagttacagactagcctggcca

SEQ ID NO: 4566584 - DNA, 25 bp, Homo sapien
ccaattgggaagttagtgtcatgca

SEQ ID NO: 4566585 - DNA, 25 bp, Homo sapien
ctacttgaaaactacctggtccaat

SEQ ID NO: 4566586 - DNA, 25 bp, Homo sapien
gtgtcatgcattagcagataagact

SEQ ID NO: 4566587 - DNA, 25 bp, Homo sapien
aggaatacagctaaaccaattatca

SEQ ID NO: 4566588 - DNA, 25 bp, Homo sapien
tttaagatgaataaaattccaatat

SEQ ID NO: 4566589 - DNA, 25 bp, Homo sapien
ccacgcccggcctacctggtccaat

SEQ ID NO: 4566590 - DNA, 25 bp, Homo sapien
ctacctggtccaatttttaagatga

SEQ ID NO: 4566591 - DNA, 25 bp, Homo sapien
aaattccaatattttcagaaacaca

SEQ ID NO: 4566592 - DNA, 25 bp, Homo sapien
gatatccaagatagatccaatgcct

SEQ ID NO: 4566593 - DNA, 25 bp, Homo sapien
cagactgtagagacaattatgatcc

SEQ ID NO: 4566594 - DNA, 25 bp, Homo sapien
tctctgaccatgtatgatatccaag

SEQ ID NO: 4566595 - DNA, 25 bp, Homo sapien
tacagttatcgcaatacctgcattg

SEQ ID NO: 4566596 - DNA, 25 bp, Homo sapien
agcatctgcttggcggggccatcct

SEQ ID NO: 4566597 - DNA, 25 bp, Homo sapien
gcatctgcttggcggggccatcctt

SEQ ID NO: 4566598 - DNA, 25 bp, Homo sapien
ttagctgtttgcagcatctgcttgg

SEQ ID NO: 4566599 - DNA, 25 bp, Homo sapien
cagcatctgcttggcggggccatcc

SEQ ID NO: 4566600 - DNA, 25 bp, Homo sapien
aacctccacacatacgatatcagaa

SEQ ID NO: 4566601 - DNA, 25 bp, Homo sapien
cacacatacgatatcagaattaggg

SEQ ID NO: 4566602 - DNA, 25 bp, Homo sapien
tcagaattagggacttcaaacattg

SEQ ID NO: 4566603 - DNA, 25 bp, Homo sapien
cagaattagggacttcaaacattgg

SEQ ID NO: 4566604 - DNA, 25 bp, Homo sapien
cacctgtttttcgttctagtgccaa

SEQ ID NO: 4566605 - DNA, 25 bp, Homo sapien
gctttcaaagcatcctcagtaacat

SEQ ID NO: 4566606 - DNA, 25 bp, Homo sapien
tagtgccaatctggctatagctttc

SEQ ID NO: 4566607 - DNA, 25 bp, Homo sapien
cattatggaccgaaggcctcgtgca

SEQ ID NO: 4566608 - DNA, 25 bp, Homo sapien
tggtactgaggaataacagcatttc

SEQ ID NO: 4566609 - DNA, 25 bp, Homo sapien
tccatgctgaataaggcctggtact

SEQ ID NO: 4566610 - DNA, 25 bp, Homo sapien
cctggtactgaggaataacagcatt

SEQ ID NO: 4566611 - DNA, 25 bp, Homo sapien
cttatccatgctgaataaggcctgg

SEQ ID NO: 4566612 - DNA, 25 bp, Homo sapien
tggcttccacatgacgcaataaccg

SEQ ID NO: 4566613 - DNA, 25 bp, Homo sapien
tgtcttggtgagtattcgattcccc

SEQ ID NO: 4566614 - DNA, 25 bp, Homo sapien
tcatctaggctatgcaatggaacca

SEQ ID NO: 4566615 - DNA, 25 bp, Homo sapien
gattccccacttcgattagcaaggt

SEQ ID NO: 4566616 - DNA, 25 bp, Homo sapien
gaatggaaactgagtgtacatcctt

SEQ ID NO: 4566617 - DNA, 25 bp, Homo sapien
taaaactatgactggtagcccgcag

SEQ ID NO: 4566618 - DNA, 25 bp, Homo sapien
tagcccgcagatatgagaatggaaa

SEQ ID NO: 4566619 - DNA, 25 bp, Homo sapien
tataggcattgagtcaccgcaccct

SEQ ID NO: 4566620 - DNA, 25 bp, Homo sapien
caaacaggatgtttgttgtatcaac

SEQ ID NO: 4566621 - DNA, 25 bp, Homo sapien
gctgatgattctgtctaaaccattg

SEQ ID NO: 4566622 - DNA, 25 bp, Homo sapien
aacttgaactgtttctccacggagc

SEQ ID NO: 4566623 - DNA, 25 bp, Homo sapien
taaaccattgaaagcaccagatgcc

SEQ ID NO: 4566624 - DNA, 25 bp, Homo sapien
tgagactacctatatttggagatgc

SEQ ID NO: 4566625 - DNA, 25 bp, Homo sapien
aaaaatttccagcacgtaagtgtga

SEQ ID NO: 4566626 - DNA, 25 bp, Homo sapien
gaaatggttacagaacttgatgcat

SEQ ID NO: 4566627 - DNA, 25 bp, Homo sapien
aatggtgttcaagcacggtgggaac

SEQ ID NO: 4566628 - DNA, 25 bp, Homo sapien
tgggaggttgatgtattcccttcct

SEQ ID NO: 4566629 - DNA, 25 bp, Homo sapien
agtgggcttgaacaaaatactcaac

SEQ ID NO: 4566630 - DNA, 25 bp, Homo sapien
ttgatgtattcccttccttttagtg

SEQ ID NO: 4566631 - DNA, 25 bp, Homo sapien
tttagtgggcttgaacaaaatactc

SEQ ID NO: 4566632 - DNA, 25 bp, Homo sapien
cgtaattgatgaatgcctggcacac

SEQ ID NO: 4566633 - DNA, 25 bp, Homo sapien
ttctccacctacatcccgtaattga

SEQ ID NO: 4566634 - DNA, 25 bp, Homo sapien
cctacatcccgtaattgatgaatgc

SEQ ID NO: 4566635 - DNA, 25 bp, Homo sapien
gccaatcttatctacttcatccaga

SEQ ID NO: 4566636 - DNA, 25 bp, Homo sapien
aaagttgtacagtcacagatagcaa

SEQ ID NO: 4566637 - DNA, 25 bp, Homo sapien
catttagctagggtttgtgccagca

SEQ ID NO: 4566638 - DNA, 25 bp, Homo sapien
tatccagcctgagtcaaagttgtac

SEQ ID NO: 4566639 - DNA, 25 bp, Homo sapien
caatcacagattcaatatcttcgcc

SEQ ID NO: 4566640 - DNA, 25 bp, Homo sapien
gtgggctaattccagcaatctgaag

SEQ ID NO: 4566641 - DNA, 25 bp, Homo sapien
ggctaattccagcaatctgaagcaa

SEQ ID NO: 4566642 - DNA, 25 bp, Homo sapien
cctgaggtatttgttgatttacctg

SEQ ID NO: 4566643 - DNA, 25 bp, Homo sapien
ctgacccagttggtccaagcagcaa

SEQ ID NO: 4566644 - DNA, 25 bp, Homo sapien
tgtactcatcctcccgtcttcttat

SEQ ID NO: 4566645 - DNA, 25 bp, Homo sapien
ttgtaaatctgtactcatcctcccg

SEQ ID NO: 4566646 - DNA, 25 bp, Homo sapien
tgtaaatctgtactcatcctcccgt

SEQ ID NO: 4566647 - DNA, 25 bp, Homo sapien
gcaactgaaagcaccttcttagcaa

SEQ ID NO: 4566648 - DNA, 25 bp, Homo sapien
tgactggccaacaacatacttgtcg

SEQ ID NO: 4566649 - DNA, 25 bp, Homo sapien
gatgtctgcttctcaacctctgctt

SEQ ID NO: 4566650 - DNA, 25 bp, Homo sapien
tcttataatgattgtacacagcaac

SEQ ID NO: 4566651 - DNA, 25 bp, Homo sapien
tagtgaatagaaatgaaatggttgg

SEQ ID NO: 4566652 - DNA, 25 bp, Homo sapien
tctattctacagttggttattgcca

SEQ ID NO: 4566653 - DNA, 25 bp, Homo sapien
caagctcagccctaaaaactttatt

SEQ ID NO: 4566654 - DNA, 25 bp, Homo sapien
tattcttaatagtagctaaagctct

SEQ ID NO: 4566655 - DNA, 25 bp, Homo sapien
caaattcgtatagaatataaagccc

SEQ ID NO: 4566656 - DNA, 25 bp, Homo sapien
tttaactcacatgtctaaagtctac

SEQ ID NO: 4566657 - DNA, 25 bp, Homo sapien
tattccttacaaattataccaatga

SEQ ID NO: 4566658 - DNA, 25 bp, Homo sapien
acaggagtgaaccaaaccaccgcac

SEQ ID NO: 4566659 - DNA, 25 bp, Homo sapien
tttcacacttgacaaaacgggtgga

SEQ ID NO: 4566660 - DNA, 25 bp, Homo sapien
ggaatgccaattttacagcttctgc

SEQ ID NO: 4566661 - DNA, 25 bp, Homo sapien
tctgcttcagatagcacaacaaaaa

SEQ ID NO: 4566662 - DNA, 25 bp, Homo sapien
gctgctgattcaggttctttaatta

SEQ ID NO: 4566663 - DNA, 25 bp, Homo sapien
gattatagggaacactgcactagca

SEQ ID NO: 4566664 - DNA, 25 bp, Homo sapien
taactcagcctaaccctactaatgg

SEQ ID NO: 4566665 - DNA, 25 bp, Homo sapien
tgtgtaacccaactagaaagagaga

SEQ ID NO: 4566666 - DNA, 25 bp, Homo sapien
gaatctcttataggtacaggtggca

SEQ ID NO: 4566667 - DNA, 25 bp, Homo sapien
cagaaggattcaaaaggatgcattc

SEQ ID NO: 4566668 - DNA, 25 bp, Homo sapien
ggcctacaaatagttagaggacagg

SEQ ID NO: 4566669 - DNA, 25 bp, Homo sapien
tcactgcactgctagggcctacaaa

SEQ ID NO: 4566670 - DNA, 25 bp, Homo sapien
tgagcctagtgatgtctgaatcaac

SEQ ID NO: 4566671 - DNA, 25 bp, Homo sapien
cttactacttccctcacttgctgat

SEQ ID NO: 4566672 - DNA, 25 bp, Homo sapien
acaagtcgccacatttaggacagcg

SEQ ID NO: 4566673 - DNA, 25 bp, Homo sapien
catgtgtgcacaagtcgccacattt

SEQ ID NO: 4566674 - DNA, 25 bp, Homo sapien
cccagagcctgatttcttactactt

SEQ ID NO: 4566675 - DNA, 25 bp, Homo sapien
tttaaaggagggaactcacaatgtg

SEQ ID NO: 4566676 - DNA, 25 bp, Homo sapien
cacaatgtgtacagatgccaataag

SEQ ID NO: 4566677 - DNA, 25 bp, Homo sapien
ttcctacagaaaacatataagccag

SEQ ID NO: 4566678 - DNA, 25 bp, Homo sapien
cagatcattttagctatctcatatt

SEQ ID NO: 4566679 - DNA, 25 bp, Homo sapien
cccaagccttcctaaaactgacata

SEQ ID NO: 4566680 - DNA, 25 bp, Homo sapien
ttcaaatgtcccaagccttcctaaa

SEQ ID NO: 4566681 - DNA, 25 bp, Homo sapien
aaactgacatatgaatgcgaccacc

SEQ ID NO: 4566682 - DNA, 25 bp, Homo sapien
catatgaatgcgaccaccagaaata

SEQ ID NO: 4566683 - DNA, 25 bp, Homo sapien
ctgaaaataaaaggaaatctacatc

SEQ ID NO: 4566684 - DNA, 25 bp, Homo sapien
gaaaataaaaggaaatctacatcaa

SEQ ID NO: 4566685 - DNA, 25 bp, Homo sapien
aaataaaaggaaatctacatcaaat

SEQ ID NO: 4566686 - DNA, 25 bp, Homo sapien
aataaaaggaaatctacatcaaata

SEQ ID NO: 4566687 - DNA, 25 bp, Homo sapien
ctctctgcgcggaggcgagtgagga

SEQ ID NO: 4566688 - DNA, 25 bp, Homo sapien
gcgccgcaagtacaagcaccgcagc

SEQ ID NO: 4566689 - DNA, 25 bp, Homo sapien
ggtgatgagccggacggccgccgcg

SEQ ID NO: 4566690 - DNA, 25 bp, Homo sapien
cgccgcgccgcaagtacaagcaccg

SEQ ID NO: 4566691 - DNA, 25 bp, Homo sapien
ccgcgaggcctaggccggggcttcg

SEQ ID NO: 4566692 - DNA, 25 bp, Homo sapien
tccgcgaggcctaggccggggcttc

SEQ ID NO: 4566693 - DNA, 25 bp, Homo sapien
ctccgcgaggcctaggccggggctt

SEQ ID NO: 4566694 - DNA, 25 bp, Homo sapien
gcgaggcctaggccggggcttcgcc

SEQ ID NO: 4566695 - DNA, 25 bp, Homo sapien
cacagccgtctattcaccagagtag

SEQ ID NO: 4566696 - DNA, 25 bp, Homo sapien
aaggcgcgctgactcggttccgaac

SEQ ID NO: 4566697 - DNA, 25 bp, Homo sapien
acctccgggtcacagcggcgtgaat

SEQ ID NO: 4566698 - DNA, 25 bp, Homo sapien
tagaccccgtggagagttcacctgc

SEQ ID NO: 4566699 - DNA, 25 bp, Homo sapien
gtttttagtcttgctcaggagccca

SEQ ID NO: 4566700 - DNA, 25 bp, Homo sapien
tacactgggtttctagcaagaacag

SEQ ID NO: 4566701 - DNA, 25 bp, Homo sapien
gacagtggcctcagaatcgaaatac

SEQ ID NO: 4566702 - DNA, 25 bp, Homo sapien
gggcgaggacttacaccacctgtga

SEQ ID NO: 4566703 - DNA, 25 bp, Homo sapien
gtggagcaaggccaagaaatatgct

SEQ ID NO: 4566704 - DNA, 25 bp, Homo sapien
tatatgtatgaactatgatcaaggc

SEQ ID NO: 4566705 - DNA, 25 bp, Homo sapien
ggagcaaggccaagaaatatgcttt

SEQ ID NO: 4566706 - DNA, 25 bp, Homo sapien
tgatcaaggcttgcctatgtcctgt

SEQ ID NO: 4566707 - DNA, 25 bp, Homo sapien
ggcagaagagggtgaagtaccacaa

SEQ ID NO: 4566708 - DNA, 25 bp, Homo sapien
gattatcactattgcagaggtgggc

SEQ ID NO: 4566709 - DNA, 25 bp, Homo sapien
ccaagtgacagtttgtgcatcagtc

SEQ ID NO: 4566710 - DNA, 25 bp, Homo sapien
cacgtgccaatcagtagcatgggac

SEQ ID NO: 4566711 - DNA, 25 bp, Homo sapien
gcaactctaggaaatctcagagagg

SEQ ID NO: 4566712 - DNA, 25 bp, Homo sapien
tgatcaggggctgttgagcaactct

SEQ ID NO: 4566713 - DNA, 25 bp, Homo sapien
ggaaatctcagagaggccaccactc

SEQ ID NO: 4566714 - DNA, 25 bp, Homo sapien
tctaggaaatctcagagaggccacc

SEQ ID NO: 4566715 - DNA, 25 bp, Homo sapien
gatgtgccatcaaagcaccggccga

SEQ ID NO: 4566716 - DNA, 25 bp, Homo sapien
gggatcgcacattcacttccagtgg

SEQ ID NO: 4566717 - DNA, 25 bp, Homo sapien
ggtccacacggtcctgatcatagag

SEQ ID NO: 4566718 - DNA, 25 bp, Homo sapien
ttctggaggagccatcggatgtgcc

SEQ ID NO: 4566719 - DNA, 25 bp, Homo sapien
gcttgccaagacataggcagagtag

SEQ ID NO: 4566720 - DNA, 25 bp, Homo sapien
ggcttgccaagacataggcagagta

SEQ ID NO: 4566721 - DNA, 25 bp, Homo sapien
caggccctagggttggacaagaagc

SEQ ID NO: 4566722 - DNA, 25 bp, Homo sapien
caccttggtgggtagcgtgtagcca

SEQ ID NO: 4566723 - DNA, 25 bp, Homo sapien
caagtcttaacagggcagcgtccca

SEQ ID NO: 4566724 - DNA, 25 bp, Homo sapien
gagaacatgccatacgtccgaaggg

SEQ ID NO: 4566725 - DNA, 25 bp, Homo sapien
cagctgggcaaccttggacttcaca

SEQ ID NO: 4566726 - DNA, 25 bp, Homo sapien
ttgcaaaagtactccccagcctggt

SEQ ID NO: 4566727 - DNA, 25 bp, Homo sapien
atcactctgggccttgcaaaagtac

SEQ ID NO: 4566728 - DNA, 25 bp, Homo sapien
caatcagctgggcaaccttggactt

SEQ ID NO: 4566729 - DNA, 25 bp, Homo sapien
gatccagcaatgtgtcattatgata

SEQ ID NO: 4566730 - DNA, 25 bp, Homo sapien
ctcatgcttgtagagggaaggatcc

SEQ ID NO: 4566731 - DNA, 25 bp, Homo sapien
tcatgcttgtagagggaaggatcca

SEQ ID NO: 4566732 - DNA, 25 bp, Homo sapien
ggaaggatccagcaatgtgtcatta

SEQ ID NO: 4566733 - DNA, 25 bp, Homo sapien
ttccctgtggccttacagcacagag

SEQ ID NO: 4566734 - DNA, 25 bp, Homo sapien
ttttgtctcagggttcatcaccatg

SEQ ID NO: 4566735 - DNA, 25 bp, Homo sapien
cagcacagagacacgctctgcccag

SEQ ID NO: 4566736 - DNA, 25 bp, Homo sapien
gctctccgtgcttttgtctcagggt

SEQ ID NO: 4566737 - DNA, 25 bp, Homo sapien
gtcagcattcacctggcccattggg

SEQ ID NO: 4566738 - DNA, 25 bp, Homo sapien
ccatgaagcatgaagtcctggcaca

SEQ ID NO: 4566739 - DNA, 25 bp, Homo sapien
tgccatcagggcacaagccagggat

SEQ ID NO: 4566740 - DNA, 25 bp, Homo sapien
gatcttcaggatgcttttgccatca

SEQ ID NO: 4566741 - DNA, 25 bp, Homo sapien
tgggctccagatgcgctctgtgtct

SEQ ID NO: 4566742 - DNA, 25 bp, Homo sapien
caagcaaatgcgtgtgcgagtctgg

SEQ ID NO: 4566743 - DNA, 25 bp, Homo sapien
gtcctggcccatgcagtgctgaccc

SEQ ID NO: 4566744 - DNA, 25 bp, Homo sapien
cagtgctgaccctcttcgctggcct

SEQ ID NO: 4566745 - DNA, 25 bp, Homo sapien
caggtgtccagtcagtggtccgagc

SEQ ID NO: 4566746 - DNA, 25 bp, Homo sapien
tagtagaagcgaatggcgtccagcc

SEQ ID NO: 4566747 - DNA, 25 bp, Homo sapien
ttgaggcaccagaaaccctcacggg

SEQ ID NO: 4566748 - DNA, 25 bp, Homo sapien
cccgcctgggtagtcgatgttgaac

SEQ ID NO: 4566749 - DNA, 25 bp, Homo sapien
actgctgaggcctccattcaagctc

SEQ ID NO: 4566750 - DNA, 25 bp, Homo sapien
aagctctcatcagcctgactgaacc

SEQ ID NO: 4566751 - DNA, 25 bp, Homo sapien
gctctcatcagcctgactgaaccat

SEQ ID NO: 4566752 - DNA, 25 bp, Homo sapien
caagctctcatcagcctgactgaac

SEQ ID NO: 4566753 - DNA, 25 bp, Homo sapien
agctttcttcatgtggctcgggcca

SEQ ID NO: 4566754 - DNA, 25 bp, Homo sapien
tcttcatgtggctcgggccacatca

SEQ ID NO: 4566755 - DNA, 25 bp, Homo sapien
gtgagctttcttcatgtggctcggg

SEQ ID NO: 4566756 - DNA, 25 bp, Homo sapien
gctttcttcatgtggctcgggccac

SEQ ID NO: 4566757 - DNA, 25 bp, Homo sapien
tgactgggtgagcatcgtctgtctc

SEQ ID NO: 4566758 - DNA, 25 bp, Homo sapien
tcttcttactgactgggtgagcatc

SEQ ID NO: 4566759 - DNA, 25 bp, Homo sapien
tggactcttcttactgactgggtga

SEQ ID NO: 4566760 - DNA, 25 bp, Homo sapien
cagggtgtcggcaggcttggcaaag

SEQ ID NO: 4566761 - DNA, 25 bp, Homo sapien
tctgttccaccagacaaattctttc

SEQ ID NO: 4566762 - DNA, 25 bp, Homo sapien
tctttctacgagttccttccagagc

SEQ ID NO: 4566763 - DNA, 25 bp, Homo sapien
caccagaggatgcagtcagagggca

SEQ ID NO: 4566764 - DNA, 25 bp, Homo sapien
gagggctgacgcttagatgccttgg

SEQ ID NO: 4566765 - DNA, 25 bp, Homo sapien
gacacaacctcactgtggcaagtgg

SEQ ID NO: 4566766 - DNA, 25 bp, Homo sapien
ggcagatgcatagttcagtcccaga

SEQ ID NO: 4566767 - DNA, 25 bp, Homo sapien
ggagccagcagatacttagcctata

SEQ ID NO: 4566768 - DNA, 25 bp, Homo sapien
caagtggaagatttgggagccagca

SEQ ID NO: 4566769 - DNA, 25 bp, Homo sapien
ccaacacagatgtgacttccaggac

SEQ ID NO: 4566770 - DNA, 25 bp, Homo sapien
gaaggagaacacccaggccttggtc

SEQ ID NO: 4566771 - DNA, 25 bp, Homo sapien
gagaacacccaggccttggtcccca

SEQ ID NO: 4566772 - DNA, 25 bp, Homo sapien
gatgtgggtgcttcacagagtcact

SEQ ID NO: 4566773 - DNA, 25 bp, Homo sapien
ccaagcccgtgggaacgtggcaaga

SEQ ID NO: 4566774 - DNA, 25 bp, Homo sapien
cgtggcaagaggtagatgtgggtgc

SEQ ID NO: 4566775 - DNA, 25 bp, Homo sapien
tgggaagtttctcagatccagtgac

SEQ ID NO: 4566776 - DNA, 25 bp, Homo sapien
tttggggcctgactgggagttacac

SEQ ID NO: 4566777 - DNA, 25 bp, Homo sapien
cattcccagatgtgcacgggctgca

SEQ ID NO: 4566778 - DNA, 25 bp, Homo sapien
gcctgactgggagttacacagccag

SEQ ID NO: 4566779 - DNA, 25 bp, Homo sapien
gggcctgactgggagttacacagcc

SEQ ID NO: 4566780 - DNA, 25 bp, Homo sapien
cagtaactgctgagcgtgggtgagg

SEQ ID NO: 4566781 - DNA, 25 bp, Homo sapien
ctgacggaaagcagaggggatgcat

SEQ ID NO: 4566782 - DNA, 25 bp, Homo sapien
aaagcagaggggatgcattgtgaga

SEQ ID NO: 4566783 - DNA, 25 bp, Homo sapien
agtaactgctgagcgtgggtgagga

SEQ ID NO: 4566784 - DNA, 25 bp, Homo sapien
tcagcatatgccctgatggttaggc

SEQ ID NO: 4566785 - DNA, 25 bp, Homo sapien
gaaagggaagagtcctcctctctaa

SEQ ID NO: 4566786 - DNA, 25 bp, Homo sapien
tctcggatgagggagcagagtcacc

SEQ ID NO: 4566787 - DNA, 25 bp, Homo sapien
ggtttctcagcatctccgccgtttc

SEQ ID NO: 4566788 - DNA, 25 bp, Homo sapien
cagtgccggccttatatagcacagc

SEQ ID NO: 4566789 - DNA, 25 bp, Homo sapien
gctgggggtccaagccttcgcctct

SEQ ID NO: 4566790 - DNA, 25 bp, Homo sapien
tcttgagcaggactcctcagctggg

SEQ ID NO: 4566791 - DNA, 25 bp, Homo sapien
cttatatagcacagctggtggctca

SEQ ID NO: 4566792 - DNA, 25 bp, Homo sapien
gaagcagcagcgaaaccagatctga

SEQ ID NO: 4566793 - DNA, 25 bp, Homo sapien
gaggaagcagcagcgaaaccagatc

SEQ ID NO: 4566794 - DNA, 25 bp, Homo sapien
gcagcagcgaaaccagatctgagca

SEQ ID NO: 4566795 - DNA, 25 bp, Homo sapien
gcagcgaaaccagatctgagcatga

SEQ ID NO: 4566796 - DNA, 25 bp, Homo sapien
gactctcttgagaggtcccagatgg

SEQ ID NO: 4566797 - DNA, 25 bp, Homo sapien
tgacccgaggcctcttcatgactct

SEQ ID NO: 4566798 - DNA, 25 bp, Homo sapien
ctctcttgagaggtcccagatggct

SEQ ID NO: 4566799 - DNA, 25 bp, Homo sapien
atgacccgaggcctcttcatgactc

SEQ ID NO: 4566800 - DNA, 25 bp, Homo sapien
ttttacatgggggatgtccagttgt

SEQ ID NO: 4566801 - DNA, 25 bp, Homo sapien
agaagtatgggtgagggttcatttt

SEQ ID NO: 4566802 - DNA, 25 bp, Homo sapien
aaatcagccgggctgggaccacatg

SEQ ID NO: 4566803 - DNA, 25 bp, Homo sapien
agaaagaagtatgggtgagggttca

SEQ ID NO: 4566804 - DNA, 25 bp, Homo sapien
tatgctcagataagacacagactgt

SEQ ID NO: 4566805 - DNA, 25 bp, Homo sapien
tcagaacaagactgcgtatgctcag

SEQ ID NO: 4566806 - DNA, 25 bp, Homo sapien
gaccattatgattgccaaggacatg

SEQ ID NO: 4566807 - DNA, 25 bp, Homo sapien
acatgtctgggtctaaaaaactgcc

SEQ ID NO: 4566808 - DNA, 25 bp, Homo sapien
gcctgggccagataggttttaaatc

SEQ ID NO: 4566809 - DNA, 25 bp, Homo sapien
aatgccccgagagtgcatcagctgc

SEQ ID NO: 4566810 - DNA, 25 bp, Homo sapien
gctacttcacccatcaatgctgttg

SEQ ID NO: 4566811 - DNA, 25 bp, Homo sapien
taaccagcttccatcaaacagaggg

SEQ ID NO: 4566812 - DNA, 25 bp, Homo sapien
ttccagtgagaggaaccggaagctg

SEQ ID NO: 4566813 - DNA, 25 bp, Homo sapien
tgtggaggttctggacccacccgta

SEQ ID NO: 4566814 - DNA, 25 bp, Homo sapien
aggttctggacccacccgtattctg

SEQ ID NO: 4566815 - DNA, 25 bp, Homo sapien
aagctggatgtggaggttctggacc

SEQ ID NO: 4566816 - DNA, 25 bp, Homo sapien
tgctgggcaggctaggtcctctcca

SEQ ID NO: 4566817 - DNA, 25 bp, Homo sapien
ctttgatgatcaagggtgtcacacc

SEQ ID NO: 4566818 - DNA, 25 bp, Homo sapien
tctaaggtgacctgtacaggtgcca

SEQ ID NO: 4566819 - DNA, 25 bp, Homo sapien
agtaaggggtcctccagatgagttc

SEQ ID NO: 4566820 - DNA, 25 bp, Homo sapien
tcatgattctgggagtaactgggct

SEQ ID NO: 4566821 - DNA, 25 bp, Homo sapien
gggcttctggctgtaaaacctacat

SEQ ID NO: 4566822 - DNA, 25 bp, Homo sapien
actctctctatgtggcctgggtgtc

SEQ ID NO: 4566823 - DNA, 25 bp, Homo sapien
tcagctaggtagctcttgctctggg

SEQ ID NO: 4566824 - DNA, 25 bp, Homo sapien
actctgtggggttggtctgtatgac

SEQ ID NO: 4566825 - DNA, 25 bp, Homo sapien
tactctgtggggttggtctgtatga

SEQ ID NO: 4566826 - DNA, 25 bp, Homo sapien
ctctgtggggttggtctgtatgact

SEQ ID NO: 4566827 - DNA, 25 bp, Homo sapien
tgcccatctctatttagagtcttac

SEQ ID NO: 4566828 - DNA, 25 bp, Homo sapien
ctaagaagattcttgcccatctcta

SEQ ID NO: 4566829 - DNA, 25 bp, Homo sapien
ggaggctatagagcctgtcccaaac

SEQ ID NO: 4566830 - DNA, 25 bp, Homo sapien
ggctatagagcctgtcccaaactgg

SEQ ID NO: 4566831 - DNA, 25 bp, Homo sapien
gggaggctatagagcctgtcccaaa

SEQ ID NO: 4566832 - DNA, 25 bp, Homo sapien
tggggaggctatagagcctgtccca

SEQ ID NO: 4566833 - DNA, 25 bp, Homo sapien
tcgtggctgcaaggctcaggaagag

SEQ ID NO: 4566834 - DNA, 25 bp, Homo sapien
cgtggctgcaaggctcaggaagagc

SEQ ID NO: 4566835 - DNA, 25 bp, Homo sapien
ctcgtggctgcaaggctcaggaaga

SEQ ID NO: 4566836 - DNA, 25 bp, Homo sapien
aggacacgttgccactatctgctct

SEQ ID NO: 4566837 - DNA, 25 bp, Homo sapien
tggaaagtccccctctggacctggc

SEQ ID NO: 4566838 - DNA, 25 bp, Homo sapien
tcatggaaagtccccctctggacct

SEQ ID NO: 4566839 - DNA, 25 bp, Homo sapien
cccaggagacaggcggtaggacacg

SEQ ID NO: 4566840 - DNA, 25 bp, Homo sapien
tatcaatcatgggaggcagacgccc

SEQ ID NO: 4566841 - DNA, 25 bp, Homo sapien
aggagcagagcgatgcgctcccagc

SEQ ID NO: 4566842 - DNA, 25 bp, Homo sapien
tccgcctgtctggatgtgcccatac

SEQ ID NO: 4566843 - DNA, 25 bp, Homo sapien
tctccttggtctctcaggtgctcta

SEQ ID NO: 4566844 - DNA, 25 bp, Homo sapien
agacacctcttcagattcccagtgc

SEQ ID NO: 4566845 - DNA, 25 bp, Homo sapien
tctggctttactctggccacagaca

SEQ ID NO: 4566846 - DNA, 25 bp, Homo sapien
tgggcccaccctttagatggccaca

SEQ ID NO: 4566847 - DNA, 25 bp, Homo sapien
tctactttccacagttcctttccat

SEQ ID NO: 4566848 - DNA, 25 bp, Homo sapien
aatgtcactcccaaatcgtaccggg

SEQ ID NO: 4566849 - DNA, 25 bp, Homo sapien
tcgtaccgggccctattatggctaa

SEQ ID NO: 4566850 - DNA, 25 bp, Homo sapien
gaaatgttccaataatcaatgtaaa

SEQ ID NO: 4566851 - DNA, 25 bp, Homo sapien
aaaaactgtggtagtggctctttca

SEQ ID NO: 4566852 - DNA, 25 bp, Homo sapien
ctgtgacccctctgaaggaggctcc

SEQ ID NO: 4566853 - DNA, 25 bp, Homo sapien
gacctgtgacccctctgaaggaggc

SEQ ID NO: 4566854 - DNA, 25 bp, Homo sapien
tcaaagacctgtgacccctctgaag

SEQ ID NO: 4566855 - DNA, 25 bp, Homo sapien
aaagacctgtgacccctctgaagga

SEQ ID NO: 4566856 - DNA, 25 bp, Homo sapien
ggcactcgtggttgcaggccacagt

SEQ ID NO: 4566857 - DNA, 25 bp, Homo sapien
aaagcatggcactcgtggttgcagg

SEQ ID NO: 4566858 - DNA, 25 bp, Homo sapien
catggcactcgtggttgcaggccac

SEQ ID NO: 4566859 - DNA, 25 bp, Homo sapien
ctgaaagcatggcactcgtggttgc

SEQ ID NO: 4566860 - DNA, 25 bp, Homo sapien
tctcaagtcaaaacaaggcaaccgc

SEQ ID NO: 4566861 - DNA, 25 bp, Homo sapien
gcaagtacagctataggagaaggct

SEQ ID NO: 4566862 - DNA, 25 bp, Homo sapien
gcattagagaaagggccaacctctg

SEQ ID NO: 4566863 - DNA, 25 bp, Homo sapien
tctgccaggagagattgtaaacaca

SEQ ID NO: 4566864 - DNA, 25 bp, Homo sapien
tcctttggccctggctgaaaagcca

SEQ ID NO: 4566865 - DNA, 25 bp, Homo sapien
cactgacagcttggacactttgttt

SEQ ID NO: 4566866 - DNA, 25 bp, Homo sapien
catatgaaaattgtcctgtggtccc

SEQ ID NO: 4566867 - DNA, 25 bp, Homo sapien
taagagtgagggactagtagtcccc

SEQ ID NO: 4566868 - DNA, 25 bp, Homo sapien
tagtccccgttgactggagtatggc

SEQ ID NO: 4566869 - DNA, 25 bp, Homo sapien
gagcagatggaaggactcccctaaa

SEQ ID NO: 4566870 - DNA, 25 bp, Homo sapien
ttcgcacgattccaaaagtgttgga

SEQ ID NO: 4566871 - DNA, 25 bp, Homo sapien
ttatcttttcgcacgattccaaaag

SEQ ID NO: 4566872 - DNA, 25 bp, Homo sapien
tcttttcgcacgattccaaaagtgt

SEQ ID NO: 4566873 - DNA, 25 bp, Homo sapien
ttttcgcacgattccaaaagtgttg

SEQ ID NO: 4566874 - DNA, 25 bp, Homo sapien
tacagggatatcatgacggtaaacc

SEQ ID NO: 4566875 - DNA, 25 bp, Homo sapien
cagatacagggatatcatgacggta

SEQ ID NO: 4566876 - DNA, 25 bp, Homo sapien
cagcagcagatacagggatatcatg

SEQ ID NO: 4566877 - DNA, 25 bp, Homo sapien
gggatatcatgacggtaaaccaatg

SEQ ID NO: 4566878 - DNA, 25 bp, Homo sapien
tggaaaaccaggagagctggctcga

SEQ ID NO: 4566879 - DNA, 25 bp, Homo sapien
gaaaaccaggagagctggctcgaag

SEQ ID NO: 4566880 - DNA, 25 bp, Homo sapien
aaaccaggagagctggctcgaagcc

SEQ ID NO: 4566881 - DNA, 25 bp, Homo sapien
ctggaaaaccaggagagctggctcg

SEQ ID NO: 4566882 - DNA, 25 bp, Homo sapien
tctaaatgcgcaaagacagctatgc

SEQ ID NO: 4566883 - DNA, 25 bp, Homo sapien
tataacaatgacctagctcagggtg

SEQ ID NO: 4566884 - DNA, 25 bp, Homo sapien
gcttcgtgcttccttgctcaagaaa

SEQ ID NO: 4566885 - DNA, 25 bp, Homo sapien
tttaagtgtgtacaacaagtctggc

SEQ ID NO: 4566886 - DNA, 25 bp, Homo sapien
tatgtttgattctcgctcgtctgcg

SEQ ID NO: 4566887 - DNA, 25 bp, Homo sapien
tggcttctgtgaatacaccaggagg

SEQ ID NO: 4566888 - DNA, 25 bp, Homo sapien
cacgaagtacttgggagggatgtct

SEQ ID NO: 4566889 - DNA, 25 bp, Homo sapien
aggaggtacttcactcgcagcagct

SEQ ID NO: 4566890 - DNA, 25 bp, Homo sapien
tctgcctttgaggagagccacacaa

SEQ ID NO: 4566891 - DNA, 25 bp, Homo sapien
tggccccaacaagccagctctggag

SEQ ID NO: 4566892 - DNA, 25 bp, Homo sapien
caaatagtctcagggacacagtagg

SEQ ID NO: 4566893 - DNA, 25 bp, Homo sapien
tgaggtagccagctagtcatcactc

SEQ ID NO: 4566894 - DNA, 25 bp, Homo sapien
tcttggtttggcacttgacgtccgg

SEQ ID NO: 4566895 - DNA, 25 bp, Homo sapien
taggtcccctctccgaacaaggatg

SEQ ID NO: 4566896 - DNA, 25 bp, Homo sapien
aagtcactggtgaggtaggtcccct

SEQ ID NO: 4566897 - DNA, 25 bp, Homo sapien
ggctgtatatgagggccaggctcaa

SEQ ID NO: 4566898 - DNA, 25 bp, Homo sapien
gcacggcaagacgacacaggtctct

SEQ ID NO: 4566899 - DNA, 25 bp, Homo sapien
agttggcacggcaagacgacacagg

SEQ ID NO: 4566900 - DNA, 25 bp, Homo sapien
tgtacagttggcacggcaagacgac

SEQ ID NO: 4566901 - DNA, 25 bp, Homo sapien
ttgaatgtacagttggcacggcaag

SEQ ID NO: 4566902 - DNA, 25 bp, Homo sapien
taaaatttggcgttggctgggtcaa

SEQ ID NO: 4566903 - DNA, 25 bp, Homo sapien
taggcggctaccatgaaatgcatag

SEQ ID NO: 4566904 - DNA, 25 bp, Homo sapien
aacaggcgtgtgaggagccccagtc

SEQ ID NO: 4566905 - DNA, 25 bp, Homo sapien
ggcagtgcaggccattgtggataat

SEQ ID NO: 4566906 - DNA, 25 bp, Homo sapien
ctgtggattgtcaggacctttgagg

SEQ ID NO: 4566907 - DNA, 25 bp, Homo sapien
actgtggattgtcaggacctttgag

SEQ ID NO: 4566908 - DNA, 25 bp, Homo sapien
tgtggattgtcaggacctttgagga

SEQ ID NO: 4566909 - DNA, 25 bp, Homo sapien
gtggattgtcaggacctttgaggat

SEQ ID NO: 4566910 - DNA, 25 bp, Homo sapien
tcccaggcccgtttgtggttgtctc

SEQ ID NO: 4566911 - DNA, 25 bp, Homo sapien
cgtttgtggttgtctccggaggact

SEQ ID NO: 4566912 - DNA, 25 bp, Homo sapien
tgtctccggaggactggagaagttc

SEQ ID NO: 4566913 - DNA, 25 bp, Homo sapien
ctccggaggactggagaagttcttt

SEQ ID NO: 4566914 - DNA, 25 bp, Homo sapien
tgggggcaaagactagctcttggac

SEQ ID NO: 4566915 - DNA, 25 bp, Homo sapien
ttgggggcaaagactagctcttgga

SEQ ID NO: 4566916 - DNA, 25 bp, Homo sapien
cccgtgggacctgtgataggactca

SEQ ID NO: 4566917 - DNA, 25 bp, Homo sapien
cctaatgctgtgctgctgaaagctg

SEQ ID NO: 4566918 - DNA, 25 bp, Homo sapien
gatttaggctgatgtcccgtgggac

SEQ ID NO: 4566919 - DNA, 25 bp, Homo sapien
aagctgtcatcagtcctagagcctt

SEQ ID NO: 4566920 - DNA, 25 bp, Homo sapien
cctggatccccatgccagcctggaa

SEQ ID NO: 4566921 - DNA, 25 bp, Homo sapien
ctggatccccatgccagcctggaac

SEQ ID NO: 4566922 - DNA, 25 bp, Homo sapien
agtcgtctaaggccaaccaaccctg

SEQ ID NO: 4566923 - DNA, 25 bp, Homo sapien
tcgtctaaggccaaccaaccctgag

SEQ ID NO: 4566924 - DNA, 25 bp, Homo sapien
gtctaaggccaaccaaccctgagct

SEQ ID NO: 4566925 - DNA, 25 bp, Homo sapien
gtcgtctaaggccaaccaaccctga

SEQ ID NO: 4566926 - DNA, 25 bp, Homo sapien
agccaagaatctatgtagtctgggc

SEQ ID NO: 4566927 - DNA, 25 bp, Homo sapien
tgtagtctgggctattttcctcaac

SEQ ID NO: 4566928 - DNA, 25 bp, Homo sapien
cagtcttgctgctgacggccatgcc

SEQ ID NO: 4566929 - DNA, 25 bp, Homo sapien
ggccatgcctacagacagccaagaa

SEQ ID NO: 4566930 - DNA, 25 bp, Homo sapien
cctgatacaccacactcagaaaatt

SEQ ID NO: 4566931 - DNA, 25 bp, Homo sapien
ctgatacaccacactcagaaaattg

SEQ ID NO: 4566932 - DNA, 25 bp, Homo sapien
ttgctggtaaacaagaatatgctct

SEQ ID NO: 4566933 - DNA, 25 bp, Homo sapien
tttgctggtaaacaagaatatgctc

SEQ ID NO: 4566934 - DNA, 25 bp, Homo sapien
gctttgctggtaaacaagaatatgc

SEQ ID NO: 4566935 - DNA, 25 bp, Homo sapien
gctggtaaacaagaatatgctcttc

SEQ ID NO: 4566936 - DNA, 25 bp, Homo sapien
gtgggcagcgccaggacaaagcaca

SEQ ID NO: 4566937 - DNA, 25 bp, Homo sapien
cacttggtccaggacgcagtgggca

SEQ ID NO: 4566938 - DNA, 25 bp, Homo sapien
agtgggcagcgccaggacaaagcac

SEQ ID NO: 4566939 - DNA, 25 bp, Homo sapien
cagggcacttggtccaggacgcagt

SEQ ID NO: 4566940 - DNA, 25 bp, Homo sapien
tctgcagggccgaggcgaagaggct

SEQ ID NO: 4566941 - DNA, 25 bp, Homo sapien
ccgagtcgcgcttgtagctctgcag

SEQ ID NO: 4566942 - DNA, 25 bp, Homo sapien
ttcaaagtccttacagtcgccgcgg

SEQ ID NO: 4566943 - DNA, 25 bp, Homo sapien
ccgcagcaccgagtcgcgcttgtag

SEQ ID NO: 4566944 - DNA, 25 bp, Homo sapien
ccgccgcctccctggcggccgccca

SEQ ID NO: 4566945 - DNA, 25 bp, Homo sapien
gcggcccgccgcctccctggcggcc

SEQ ID NO: 4566946 - DNA, 25 bp, Homo sapien
gtcgcggcccgccgcctccctggcg

SEQ ID NO: 4566947 - DNA, 25 bp, Homo sapien
cgccgcctccctggcggccgcccag

SEQ ID NO: 4566948 - DNA, 25 bp, Homo sapien
tatgacaatggaatgacaaccgcgg

SEQ ID NO: 4566949 - DNA, 25 bp, Homo sapien
aaccgcgggaacgtgctgacacgtg

SEQ ID NO: 4566950 - DNA, 25 bp, Homo sapien
ctcgccgccgaagagagagaccgag

SEQ ID NO: 4566951 - DNA, 25 bp, Homo sapien
tgagaacgtgccgacaagtgtcctc

SEQ ID NO: 4566952 - DNA, 25 bp, Homo sapien
gcagctacgagagttgccgccgcca

SEQ ID NO: 4566953 - DNA, 25 bp, Homo sapien
gctacgagagttgccgccgccagtg

SEQ ID NO: 4566954 - DNA, 25 bp, Homo sapien
ccgcagctacgagagttgccgccgc

SEQ ID NO: 4566955 - DNA, 25 bp, Homo sapien
agttgccgccgccagtgtgtgccgg

SEQ ID NO: 4566956 - DNA, 25 bp, Homo sapien
actgagcctacctctcttccttggg

SEQ ID NO: 4566957 - DNA, 25 bp, Homo sapien
gcagccctggtagaaattgatgtgg

SEQ ID NO: 4566958 - DNA, 25 bp, Homo sapien
aatgctacctattgtctctcttgaa

SEQ ID NO: 4566959 - DNA, 25 bp, Homo sapien
gcttagagtgctgcaatgcttgccc

SEQ ID NO: 4566960 - DNA, 25 bp, Homo sapien
actacacaccccacccgtggaagtg

SEQ ID NO: 4566961 - DNA, 25 bp, Homo sapien
aacgaacaattctacatgttggaga

SEQ ID NO: 4566962 - DNA, 25 bp, Homo sapien
tccttaaacaggcacttcaccaaag

SEQ ID NO: 4566963 - DNA, 25 bp, Homo sapien
gatacatggatgacaattaagcact

SEQ ID NO: 4566964 - DNA, 25 bp, Homo sapien
ctgagcactaaatggaacttgggcc

SEQ ID NO: 4566965 - DNA, 25 bp, Homo sapien
taaatggaacttgggccctcttgtg

SEQ ID NO: 4566966 - DNA, 25 bp, Homo sapien
gcactaaatggaacttgggccctct

SEQ ID NO: 4566967 - DNA, 25 bp, Homo sapien
gagcactaaatggaacttgggccct

SEQ ID NO: 4566968 - DNA, 25 bp, Homo sapien
gaatctcagggttcttaaaggcggc

SEQ ID NO: 4566969 - DNA, 25 bp, Homo sapien
cacggtgagcattacaactctttaa

SEQ ID NO: 4566970 - DNA, 25 bp, Homo sapien
tctgaccttcagatgcattcggagt

SEQ ID NO: 4566971 - DNA, 25 bp, Homo sapien
taaaggcggcgtatccagagcttgt

SEQ ID NO: 4566972 - DNA, 25 bp, Homo sapien
actgcttctgcccaagagaatcatg

SEQ ID NO: 4566973 - DNA, 25 bp, Homo sapien
gagggagcaactgcttctgcccaag

SEQ ID NO: 4566974 - DNA, 25 bp, Homo sapien
ggagagaggagggagcaactgcttc

SEQ ID NO: 4566975 - DNA, 25 bp, Homo sapien
agaggagggagcaactgcttctgcc

SEQ ID NO: 4566976 - DNA, 25 bp, Homo sapien
ccgtggagtagcactaagagcctga

SEQ ID NO: 4566977 - DNA, 25 bp, Homo sapien
tcagtgccgccgtggagtagcacta

SEQ ID NO: 4566978 - DNA, 25 bp, Homo sapien
tgccgccgtggagtagcactaagag

SEQ ID NO: 4566979 - DNA, 25 bp, Homo sapien
agtagcactaagagcctgaagtggc

SEQ ID NO: 4566980 - DNA, 25 bp, Homo sapien
cactttggcaacaggacttttattc

SEQ ID NO: 4566981 - DNA, 25 bp, Homo sapien
actttggcaacaggacttttattca

SEQ ID NO: 4566982 - DNA, 25 bp, Homo sapien
gtccacgcggacacagctctagttt

SEQ ID NO: 4566983 - DNA, 25 bp, Homo sapien
cactgccttggagctttgtggagcc

SEQ ID NO: 4566984 - DNA, 25 bp, Homo sapien
taaaaatagcttccggccatggctg

SEQ ID NO: 4566985 - DNA, 25 bp, Homo sapien
caaaaagtcacaagaacataaccct

SEQ ID NO: 4566986 - DNA, 25 bp, Homo sapien
caaggatgggctggctcaaaatggg

SEQ ID NO: 4566987 - DNA, 25 bp, Homo sapien
ggtggctcgtttggacaatttatac

SEQ ID NO: 4566988 - DNA, 25 bp, Homo sapien
gctgggaggtggctcgtttggacaa

SEQ ID NO: 4566989 - DNA, 25 bp, Homo sapien
ctcatgggcatccccatcaaggatg

SEQ ID NO: 4566990 - DNA, 25 bp, Homo sapien
gagccagcgagccttgaggtagaca

SEQ ID NO: 4566991 - DNA, 25 bp, Homo sapien
tttctgtaggccacaagagttcccc

SEQ ID NO: 4566992 - DNA, 25 bp, Homo sapien
tcattccggctgaggtaggtgctga

SEQ ID NO: 4566993 - DNA, 25 bp, Homo sapien
aggaactgctccaactcctgatggg

SEQ ID NO: 4566994 - DNA, 25 bp, Homo sapien
ctactgttccgagtgagctggctgg

SEQ ID NO: 4566995 - DNA, 25 bp, Homo sapien
gctggctgggtaacccgggccgctg

SEQ ID NO: 4566996 - DNA, 25 bp, Homo sapien
tgtggtcttcgcctccgtcgtcttc

SEQ ID NO: 4566997 - DNA, 25 bp, Homo sapien
gcgcagggagccgtggcctctgtgg

SEQ ID NO: 4566998 - DNA, 25 bp, Homo sapien
ctcctcacacggagcgggggctgca

SEQ ID NO: 4566999 - DNA, 25 bp, Homo sapien
agctgggtctcctcacacggagcgg

SEQ ID NO: 4567000 - DNA, 25 bp, Homo sapien
tgaagtggcagcacggagagctggg

SEQ ID NO: 4567001 - DNA, 25 bp, Homo sapien
gagagctgggtctcctcacacggag

SEQ ID NO: 4567002 - DNA, 25 bp, Homo sapien
tgctgcgctggccggggggaacagc

SEQ ID NO: 4567003 - DNA, 25 bp, Homo sapien
ctgctgcgctggccggggggaacag

SEQ ID NO: 4567004 - DNA, 25 bp, Homo sapien
acgtttctcgtctcggcccagctgg

SEQ ID NO: 4567005 - DNA, 25 bp, Homo sapien
ccccatttagggctagaatgccagg

SEQ ID NO: 4567006 - DNA, 25 bp, Homo sapien
catttagggctagaatgccagggtc

SEQ ID NO: 4567007 - DNA, 25 bp, Homo sapien
ccgtctcgccccatttagggctaga

SEQ ID NO: 4567008 - DNA, 25 bp, Homo sapien
atgacgatgcctgtggtggacgtct

SEQ ID NO: 4567009 - DNA, 25 bp, Homo sapien
ggcctcctccttccggcagtcacat

SEQ ID NO: 4567010 - DNA, 25 bp, Homo sapien
gcaagtgaccccgatgtggatgccg

SEQ ID NO: 4567011 - DNA, 25 bp, Homo sapien
tgtggatgccgatgacgatgcctgt

SEQ ID NO: 4567012 - DNA, 25 bp, Homo sapien
ggttgtaggcgagcagcttcacctc

SEQ ID NO: 4567013 - DNA, 25 bp, Homo sapien
agcttcacctcatacactgcagtgg

SEQ ID NO: 4567014 - DNA, 25 bp, Homo sapien
gacacaaagcggactgtggcattgc

SEQ ID NO: 4567015 - DNA, 25 bp, Homo sapien
gccatctccatgctggttgtaggcg

SEQ ID NO: 4567016 - DNA, 25 bp, Homo sapien
tgggcggtaaaacagcttgaagccg

SEQ ID NO: 4567017 - DNA, 25 bp, Homo sapien
gccggtgaaggaggtcttgcttgct

SEQ ID NO: 4567018 - DNA, 25 bp, Homo sapien
gcttgctgggcggtaaaacagcttg

SEQ ID NO: 4567019 - DNA, 25 bp, Homo sapien
aggtcttgcttgctgggcggtaaaa

SEQ ID NO: 4567020 - DNA, 25 bp, Homo sapien
tggttttgtgctccacacccaggcc

SEQ ID NO: 4567021 - DNA, 25 bp, Homo sapien
gcacagcgcacaaccagaacaagtg

SEQ ID NO: 4567022 - DNA, 25 bp, Homo sapien
ggttctgctctgataccctgagtga

SEQ ID NO: 4567023 - DNA, 25 bp, Homo sapien
ggacccagtggaagctctatctttc

SEQ ID NO: 4567024 - DNA, 25 bp, Homo sapien
ttcacccagggtgctagctagggtg

SEQ ID NO: 4567025 - DNA, 25 bp, Homo sapien
ccagggtgctagctagggtgggcac

SEQ ID NO: 4567026 - DNA, 25 bp, Homo sapien
gctgaccaggtgctgaaaggtgctc

SEQ ID NO: 4567027 - DNA, 25 bp, Homo sapien
gctgactgcctcctgatactccagc

SEQ ID NO: 4567028 - DNA, 25 bp, Homo sapien
cacgcacctcagtggaagacacaga

SEQ ID NO: 4567029 - DNA, 25 bp, Homo sapien
ggacgtagccgatgatctccttggt

SEQ ID NO: 4567030 - DNA, 25 bp, Homo sapien
tcctcaggaccgattccagaaatgg

SEQ ID NO: 4567031 - DNA, 25 bp, Homo sapien
acagtacggtcagcctggcactggc

SEQ ID NO: 4567032 - DNA, 25 bp, Homo sapien
ttcagccacgtgacatgaggcggtg

SEQ ID NO: 4567033 - DNA, 25 bp, Homo sapien
tcttgagcctgacgtggcctcctgg

SEQ ID NO: 4567034 - DNA, 25 bp, Homo sapien
tattcttgagcctgacgtggcctcc

SEQ ID NO: 4567035 - DNA, 25 bp, Homo sapien
ccatttttcagccacgtgacatgag

SEQ ID NO: 4567036 - DNA, 25 bp, Homo sapien
tgttggctgcacagacgtagacgcc

SEQ ID NO: 4567037 - DNA, 25 bp, Homo sapien
cacagacgtagacgccagagtgctg

SEQ ID NO: 4567038 - DNA, 25 bp, Homo sapien
cacccgggtgccaggtctgttggct

SEQ ID NO: 4567039 - DNA, 25 bp, Homo sapien
gagtgctggaccgtcacgtctgaga

SEQ ID NO: 4567040 - DNA, 25 bp, Homo sapien
cagggatagaatggacccccacaga

SEQ ID NO: 4567041 - DNA, 25 bp, Homo sapien
acagggatagaatggacccccacag

SEQ ID NO: 4567042 - DNA, 25 bp, Homo sapien
gttgcccgtggcgacacactcaagc

SEQ ID NO: 4567043 - DNA, 25 bp, Homo sapien
gctggctccttgtaggccccagagc

SEQ ID NO: 4567044 - DNA, 25 bp, Homo sapien
agggtgaggttctcaggccccacga

SEQ ID NO: 4567045 - DNA, 25 bp, Homo sapien
caagcaccgcggtctggtgcactgt

SEQ ID NO: 4567046 - DNA, 25 bp, Homo sapien
gaagtcctgtgatctgcaggacccc

SEQ ID NO: 4567047 - DNA, 25 bp, Homo sapien
acagtggaagatgccaccgtcctca

SEQ ID NO: 4567048 - DNA, 25 bp, Homo sapien
tggctgatccggatactggcgatgt

SEQ ID NO: 4567049 - DNA, 25 bp, Homo sapien
tactggcgatgtttgaggccacaca

SEQ ID NO: 4567050 - DNA, 25 bp, Homo sapien
caattgggactctgttcttctccca

SEQ ID NO: 4567051 - DNA, 25 bp, Homo sapien
tgggaagcccatggatttggcactg

SEQ ID NO: 4567052 - DNA, 25 bp, Homo sapien
ggatgcacgtggaagtccgacatgg

SEQ ID NO: 4567053 - DNA, 25 bp, Homo sapien
ctctcattgtccgtgtcaattggga

SEQ ID NO: 4567054 - DNA, 25 bp, Homo sapien
gcaggtaatcaatcacacacatccc

SEQ ID NO: 4567055 - DNA, 25 bp, Homo sapien
gtgcaggtaatcaatcacacacatc

SEQ ID NO: 4567056 - DNA, 25 bp, Homo sapien
acacacatccccacgtaggtacagc

SEQ ID NO: 4567057 - DNA, 25 bp, Homo sapien
cacgtaggtacagcccttataaaca

SEQ ID NO: 4567058 - DNA, 25 bp, Homo sapien
cctttggccatagccagactcctat

SEQ ID NO: 4567059 - DNA, 25 bp, Homo sapien
gactcctatccggtctgtgatggta

SEQ ID NO: 4567060 - DNA, 25 bp, Homo sapien
tccggtctgtgatggtaaaaagatc

SEQ ID NO: 4567061 - DNA, 25 bp, Homo sapien
tagccagactcctatccggtctgtg

SEQ ID NO: 4567062 - DNA, 25 bp, Homo sapien
caccaggaagagtgctagtggggca

SEQ ID NO: 4567063 - DNA, 25 bp, Homo sapien
agccaccaggaagagtgctagtggg

SEQ ID NO: 4567064 - DNA, 25 bp, Homo sapien
gccaccaggaagagtgctagtgggg

SEQ ID NO: 4567065 - DNA, 25 bp, Homo sapien
ctaacttccgtcgttctggtcagga

SEQ ID NO: 4567066 - DNA, 25 bp, Homo sapien
ttccgtcgttctggtcaggacaccg

SEQ ID NO: 4567067 - DNA, 25 bp, Homo sapien
cgtcgttctggtcaggacaccggat

SEQ ID NO: 4567068 - DNA, 25 bp, Homo sapien
gttctggtcaggacaccggatctcc

SEQ ID NO: 4567069 - DNA, 25 bp, Homo sapien
cattgtcctcgcacgccaaacgagg

SEQ ID NO: 4567070 - DNA, 25 bp, Homo sapien
gaatccggcattgtgcgcggcgaat

SEQ ID NO: 4567071 - DNA, 25 bp, Homo sapien
tcgctcgcaccaccgcgggtgaatg

SEQ ID NO: 4567072 - DNA, 25 bp, Homo sapien
cacgccaaacgagggtttgatgtcg

SEQ ID NO: 4567073 - DNA, 25 bp, Homo sapien
ctcccccagagcctcggattcccca

SEQ ID NO: 4567074 - DNA, 25 bp, Homo sapien
ctggggcgagcgaggcaccatttcc

SEQ ID NO: 4567075 - DNA, 25 bp, Homo sapien
tcccccagagcctcggattccccag

SEQ ID NO: 4567076 - DNA, 25 bp, Homo sapien
gggcgagcgaggcaccatttcccgc

SEQ ID NO: 4567077 - DNA, 25 bp, Homo sapien
cctgaaaggactgccgaggtttagg

SEQ ID NO: 4567078 - DNA, 25 bp, Homo sapien
gctgtgtgccaccaacctgaaagga

SEQ ID NO: 4567079 - DNA, 25 bp, Homo sapien
aaggactgccgaggtttaggcaatg

SEQ ID NO: 4567080 - DNA, 25 bp, Homo sapien
tgccaccaacctgaaaggactgccg

SEQ ID NO: 4567081 - DNA, 25 bp, Homo sapien
agcctggactgatgaagggactaga

SEQ ID NO: 4567082 - DNA, 25 bp, Homo sapien
agagatgcgggtagagaaggcagga

SEQ ID NO: 4567083 - DNA, 25 bp, Homo sapien
gagatgcgggtagagaaggcaggag

SEQ ID NO: 4567084 - DNA, 25 bp, Homo sapien
gggagcctggactgatgaagggact

SEQ ID NO: 4567085 - DNA, 25 bp, Homo sapien
gacgaggcatcattttcggagcctg

SEQ ID NO: 4567086 - DNA, 25 bp, Homo sapien
tgcgaccagggatctgcgaccgcat

SEQ ID NO: 4567087 - DNA, 25 bp, Homo sapien
tgctgcagggctgcttccgcggccg

SEQ ID NO: 4567088 - DNA, 25 bp, Homo sapien
ggcagagccagacgttctgcgacca

SEQ ID NO: 4567089 - DNA, 25 bp, Homo sapien
atctgagcattctcccatgggacca

SEQ ID NO: 4567090 - DNA, 25 bp, Homo sapien
gaagtgagaaaagcggatccagccg

SEQ ID NO: 4567091 - DNA, 25 bp, Homo sapien
gatccagccgcaccgttgcttggca

SEQ ID NO: 4567092 - DNA, 25 bp, Homo sapien
gcaccgttgcttggcatctgagcat

SEQ ID NO: 4567093 - DNA, 25 bp, Homo sapien
ctggtgatgcaaaggcctcagcagg

SEQ ID NO: 4567094 - DNA, 25 bp, Homo sapien
ggatttatctcccaggattctaggc

SEQ ID NO: 4567095 - DNA, 25 bp, Homo sapien
catctctctgatctgcaaatcttac

SEQ ID NO: 4567096 - DNA, 25 bp, Homo sapien
gggccatctatatctcagcattgac

SEQ ID NO: 4567097 - DNA, 25 bp, Homo sapien
caccctctgtccacgcttcccttcc

SEQ ID NO: 4567098 - DNA, 25 bp, Homo sapien
aactgtgcaaatgccctcagagcca

SEQ ID NO: 4567099 - DNA, 25 bp, Homo sapien
ttcatcactcaccagccgttcagag

SEQ ID NO: 4567100 - DNA, 25 bp, Homo sapien
gggctcctgcctcaaactgattcat

SEQ ID NO: 4567101 - DNA, 25 bp, Homo sapien
tgcctcccagcgaactccatatggg

SEQ ID NO: 4567102 - DNA, 25 bp, Homo sapien
ccagagatatgagatggagaacaat

SEQ ID NO: 4567103 - DNA, 25 bp, Homo sapien
gccaaaacttctgccctttttcagc

SEQ ID NO: 4567104 - DNA, 25 bp, Homo sapien
ttttcagccatgaccccactgccca

SEQ ID NO: 4567105 - DNA, 25 bp, Homo sapien
cagaggtccagagatatgagatgga

SEQ ID NO: 4567106 - DNA, 25 bp, Homo sapien
tagtcaccttcatccgaagggctgc

SEQ ID NO: 4567107 - DNA, 25 bp, Homo sapien
ggatcatcaaggacccattggccag

SEQ ID NO: 4567108 - DNA, 25 bp, Homo sapien
agtccagcactataggctgcccggg

SEQ ID NO: 4567109 - DNA, 25 bp, Homo sapien
tccagcctgaagtgacggatcatca

SEQ ID NO: 4567110 - DNA, 25 bp, Homo sapien
caagttccttgggtctatgcacccc

SEQ ID NO: 4567111 - DNA, 25 bp, Homo sapien
aagttccttgggtctatgcacccca

SEQ ID NO: 4567112 - DNA, 25 bp, Homo sapien
agttccttgggtctatgcaccccat

SEQ ID NO: 4567113 - DNA, 25 bp, Homo sapien
cagctccaaatgcaggtcgtgccat

SEQ ID NO: 4567114 - DNA, 25 bp, Homo sapien
ctggctccgtccgcaaccgcccggt

SEQ ID NO: 4567115 - DNA, 25 bp, Homo sapien
tcccctggctccgtccgcaaccgcc

SEQ ID NO: 4567116 - DNA, 25 bp, Homo sapien
cttcccctggctccgtccgcaaccg

SEQ ID NO: 4567117 - DNA, 25 bp, Homo sapien
ccctggctccgtccgcaaccgcccg

SEQ ID NO: 4567118 - DNA, 25 bp, Homo sapien
cgcggagacgcggcgcgctgcacag

SEQ ID NO: 4567119 - DNA, 25 bp, Homo sapien
tctcgcggctcacagcgtcccgcgg

SEQ ID NO: 4567120 - DNA, 25 bp, Homo sapien
gctctcggtcagctcggctcggcga

SEQ ID NO: 4567121 - DNA, 25 bp, Homo sapien
ggagcgccgcttgcgccatcttgca

SEQ ID NO: 4567122 - DNA, 25 bp, Homo sapien
actggggccgcatgcctgctcagca

SEQ ID NO: 4567123 - DNA, 25 bp, Homo sapien
cagacaggcattggagacactctca

SEQ ID NO: 4567124 - DNA, 25 bp, Homo sapien
aagtcaagcttgtccctgtgcggca

SEQ ID NO: 4567125 - DNA, 25 bp, Homo sapien
tatttcgaatttggcccagaaggca

SEQ ID NO: 4567126 - DNA, 25 bp, Homo sapien
gcaccgttctgacctggaggaccaa

SEQ ID NO: 4567127 - DNA, 25 bp, Homo sapien
ctcctctagcacctcgcctggctgg

SEQ ID NO: 4567128 - DNA, 25 bp, Homo sapien
tccaggggtctcctctagcacctcg

SEQ ID NO: 4567129 - DNA, 25 bp, Homo sapien
aagcaggtaagtctgtctggcccgg

SEQ ID NO: 4567130 - DNA, 25 bp, Homo sapien
aggtccgggtaggagcaggaagcac

SEQ ID NO: 4567131 - DNA, 25 bp, Homo sapien
cctcccaactccctgtccagccagg

SEQ ID NO: 4567132 - DNA, 25 bp, Homo sapien
tcccaactccctgtccagccaggct

SEQ ID NO: 4567133 - DNA, 25 bp, Homo sapien
gccccctgccctggatccccaacac

SEQ ID NO: 4567134 - DNA, 25 bp, Homo sapien
ctgccccctgccctggatccccaac

SEQ ID NO: 4567135 - DNA, 25 bp, Homo sapien
gagatggaggtcagggttcccgtta

SEQ ID NO: 4567136 - DNA, 25 bp, Homo sapien
gagtggacaatgacttcagcctcca

SEQ ID NO: 4567137 - DNA, 25 bp, Homo sapien
gaggtcagggttcccgttagatgca

SEQ ID NO: 4567138 - DNA, 25 bp, Homo sapien
gttcccgttagatgcactaaagtca

SEQ ID NO: 4567139 - DNA, 25 bp, Homo sapien
ctttatggcgtcgtacaccagagcc

SEQ ID NO: 4567140 - DNA, 25 bp, Homo sapien
agcccagctcagcccgcttggttga

SEQ ID NO: 4567141 - DNA, 25 bp, Homo sapien
agagcctgcagcaacagcgtctgcc

SEQ ID NO: 4567142 - DNA, 25 bp, Homo sapien
gctcagcccgcttggttgagcccag

SEQ ID NO: 4567143 - DNA, 25 bp, Homo sapien
gacgctctgcaaagcccgcggtgtc

SEQ ID NO: 4567144 - DNA, 25 bp, Homo sapien
aaagcccgcggtgtccgagccaggc

SEQ ID NO: 4567145 - DNA, 25 bp, Homo sapien
cagacgctctgcaaagcccgcggtg

SEQ ID NO: 4567146 - DNA, 25 bp, Homo sapien
gcaaagcccgcggtgtccgagccag

SEQ ID NO: 4567147 - DNA, 25 bp, Homo sapien
tattccgccgggatatggaggccca

SEQ ID NO: 4567148 - DNA, 25 bp, Homo sapien
tatggaggcccatgtgcttccctga

SEQ ID NO: 4567149 - DNA, 25 bp, Homo sapien
cagccaaccattccgtggaggaggg

SEQ ID NO: 4567150 - DNA, 25 bp, Homo sapien
tttccttcgtgagaaccaagctgac

SEQ ID NO: 4567151 - DNA, 25 bp, Homo sapien
tttggagtgactccggccttcagaa

SEQ ID NO: 4567152 - DNA, 25 bp, Homo sapien
gggccaagccgagctctggagtaca

SEQ ID NO: 4567153 - DNA, 25 bp, Homo sapien
ctctggagtacagcgcgggattccc

SEQ ID NO: 4567154 - DNA, 25 bp, Homo sapien
agaaacaccgccacccataaggctg

SEQ ID NO: 4567155 - DNA, 25 bp, Homo sapien
gtgactgagtgcatgtccagcgagt

SEQ ID NO: 4567156 - DNA, 25 bp, Homo sapien
cagacacccacgatgatgcccgtga

SEQ ID NO: 4567157 - DNA, 25 bp, Homo sapien
gacacccacgatgatgcccgtgact

SEQ ID NO: 4567158 - DNA, 25 bp, Homo sapien
gatgcccgtgactgagtgcatgtcc

SEQ ID NO: 4567159 - DNA, 25 bp, Homo sapien
gtgtcgctctccaggccatggacct

SEQ ID NO: 4567160 - DNA, 25 bp, Homo sapien
tcttgaagaagtaccgagtgtcgct

SEQ ID NO: 4567161 - DNA, 25 bp, Homo sapien
gcttctcctggagcgtgatcacatc

SEQ ID NO: 4567162 - DNA, 25 bp, Homo sapien
gatcacatcctgcaggcgggagaaa

SEQ ID NO: 4567163 - DNA, 25 bp, Homo sapien
tgcagccgaaccgtggacggtgtca

SEQ ID NO: 4567164 - DNA, 25 bp, Homo sapien
ggcaccagtgcagccgaaccgtgga

SEQ ID NO: 4567165 - DNA, 25 bp, Homo sapien
agatactccacgatctccccgttgg

SEQ ID NO: 4567166 - DNA, 25 bp, Homo sapien
ttgctgctgtacaggatcagatact

SEQ ID NO: 4567167 - DNA, 25 bp, Homo sapien
agcgctccaccacagagccgaaagg

SEQ ID NO: 4567168 - DNA, 25 bp, Homo sapien
ccgccaatgaggatgtcttctccag

SEQ ID NO: 4567169 - DNA, 25 bp, Homo sapien
catgtccacgccgtgagactgcact

SEQ ID NO: 4567170 - DNA, 25 bp, Homo sapien
tatttggtgaatggcttcaagccgc

SEQ ID NO: 4567171 - DNA, 25 bp, Homo sapien
tttttccaccgaagccagatggatg

SEQ ID NO: 4567172 - DNA, 25 bp, Homo sapien
tgtttgattccgcatggacgtgggc

SEQ ID NO: 4567173 - DNA, 25 bp, Homo sapien
taataggtgaccagggaggcattcc

SEQ ID NO: 4567174 - DNA, 25 bp, Homo sapien
ggtggtcccctctggataggcatgt

SEQ ID NO: 4567175 - DNA, 25 bp, Homo sapien
aagccacgagcttcacctcgtacag

SEQ ID NO: 4567176 - DNA, 25 bp, Homo sapien
ttgaaagccacgagcttcacctcgt

SEQ ID NO: 4567177 - DNA, 25 bp, Homo sapien
tggtgccggcgccttctccgtcttg

SEQ ID NO: 4567178 - DNA, 25 bp, Homo sapien
ttcacctcgtacagccggccaggga

SEQ ID NO: 4567179 - DNA, 25 bp, Homo sapien
tggctgccatgacacgaccagggac

SEQ ID NO: 4567180 - DNA, 25 bp, Homo sapien
cgccaatatagtttgtagccagaga

SEQ ID NO: 4567181 - DNA, 25 bp, Homo sapien
tagctgggtcagctcatactgcttc

SEQ ID NO: 4567182 - DNA, 25 bp, Homo sapien
cctggcaggcgatcgccattggcct

SEQ ID NO: 4567183 - DNA, 25 bp, Homo sapien
gtgaagtcttctgaaggatcaaaca

SEQ ID NO: 4567184 - DNA, 25 bp, Homo sapien
ggcacagaatcggcctctgtgaagt

SEQ ID NO: 4567185 - DNA, 25 bp, Homo sapien
acagaatcggcctctgtgaagtctt

SEQ ID NO: 4567186 - DNA, 25 bp, Homo sapien
ctggcacagaatcggcctctgtgaa

SEQ ID NO: 4567187 - DNA, 25 bp, Homo sapien
gttgtgcatactgggcgtcctgtga

SEQ ID NO: 4567188 - DNA, 25 bp, Homo sapien
catttcctcgcacctcagtagagaa

SEQ ID NO: 4567189 - DNA, 25 bp, Homo sapien
gaaatccgtactcgatacaccttgt

SEQ ID NO: 4567190 - DNA, 25 bp, Homo sapien
gctgctgtaccagccgaaatccgta

SEQ ID NO: 4567191 - DNA, 25 bp, Homo sapien
ctgcagggacagaaaaggtgggctg

SEQ ID NO: 4567192 - DNA, 25 bp, Homo sapien
ttctatcttgtacttcaccacctgc

SEQ ID NO: 4567193 - DNA, 25 bp, Homo sapien
cacgccaccctgatgtccgaagggt

SEQ ID NO: 4567194 - DNA, 25 bp, Homo sapien
ccaccctgatgtccgaagggttggg

SEQ ID NO: 4567195 - DNA, 25 bp, Homo sapien
ctttcccaaaccgtattctatcttg

SEQ ID NO: 4567196 - DNA, 25 bp, Homo sapien
aactcataatctgtgttgggttcca

SEQ ID NO: 4567197 - DNA, 25 bp, Homo sapien
tgggagtaggccaccacgtagaact

SEQ ID NO: 4567198 - DNA, 25 bp, Homo sapien
ttctgtggtgtcgttgttcactgca

SEQ ID NO: 4567199 - DNA, 25 bp, Homo sapien
tccaggtcccgaacctgtagttctg

SEQ ID NO: 4567200 - DNA, 25 bp, Homo sapien
tgctcagtggcgtagcagtgacccg

SEQ ID NO: 4567201 - DNA, 25 bp, Homo sapien
gagagaagccgatgatctgctcgct

SEQ ID NO: 4567202 - DNA, 25 bp, Homo sapien
cccgtgccttctggtagtggagaga

SEQ ID NO: 4567203 - DNA, 25 bp, Homo sapien
tcctgcaggccgatctgtgtgatga

SEQ ID NO: 4567204 - DNA, 25 bp, Homo sapien
cagccccacaacgaccattctcttt

SEQ ID NO: 4567205 - DNA, 25 bp, Homo sapien
ggatcccgcaactaaggtctctgcc

SEQ ID NO: 4567206 - DNA, 25 bp, Homo sapien
aactactccggctcagcgcagacct

SEQ ID NO: 4567207 - DNA, 25 bp, Homo sapien
cctcgctccccttccaatcacttta

SEQ ID NO: 4567208 - DNA, 25 bp, Homo sapien
ttgttggcgcggcagacatagacgc

SEQ ID NO: 4567209 - DNA, 25 bp, Homo sapien
gcaattagtaggttggtgcggccca

SEQ ID NO: 4567210 - DNA, 25 bp, Homo sapien
ccagggctgcgcgttggcaattagt

SEQ ID NO: 4567211 - DNA, 25 bp, Homo sapien
tgcggcccaggacgatgacatctgt

SEQ ID NO: 4567212 - DNA, 25 bp, Homo sapien
gataaagcaaacacaaccgtccctg

SEQ ID NO: 4567213 - DNA, 25 bp, Homo sapien
gtccctggtccgaatctcatttcct

SEQ ID NO: 4567214 - DNA, 25 bp, Homo sapien
tcagtctccgaacctcaggaacact

SEQ ID NO: 4567215 - DNA, 25 bp, Homo sapien
caggaacactctgcacccggataaa

SEQ ID NO: 4567216 - DNA, 25 bp, Homo sapien
ccacactctggccagacaccactgt

SEQ ID NO: 4567217 - DNA, 25 bp, Homo sapien
tccaggatctgaaggacgccgttgg

SEQ ID NO: 4567218 - DNA, 25 bp, Homo sapien
tgggccacactgagtagggcctcct

SEQ ID NO: 4567219 - DNA, 25 bp, Homo sapien
ggcgagctgagttggtggccacgca

SEQ ID NO: 4567220 - DNA, 25 bp, Homo sapien
gcggtaggggcctgcatcactctcc

SEQ ID NO: 4567221 - DNA, 25 bp, Homo sapien
ttccaaacgaagcacatacaccctg

SEQ ID NO: 4567222 - DNA, 25 bp, Homo sapien
tgcacatgtgccacgttacaccaag

SEQ ID NO: 4567223 - DNA, 25 bp, Homo sapien
tttgtgcatgcactatatctgggca

SEQ ID NO: 4567224 - DNA, 25 bp, Homo sapien
accctgacgcagtgtgtttattaac

SEQ ID NO: 4567225 - DNA, 25 bp, Homo sapien
gcgtggttctctcctgcctagctca

SEQ ID NO: 4567226 - DNA, 25 bp, Homo sapien
tcaggagtaggctctcgcgtggttc

SEQ ID NO: 4567227 - DNA, 25 bp, Homo sapien
tctgttctgggttcatggaactccc

SEQ ID NO: 4567228 - DNA, 25 bp, Homo sapien
ccgcgcccagccatattgatatgaa

SEQ ID NO: 4567229 - DNA, 25 bp, Homo sapien
tgaacctccaagtgatctcgctcag

SEQ ID NO: 4567230 - DNA, 25 bp, Homo sapien
cacatgggcaaaagtcagaggagct

SEQ ID NO: 4567231 - DNA, 25 bp, Homo sapien
tacagctaccgagatatagggagag

SEQ ID NO: 4567232 - DNA, 25 bp, Homo sapien
caccaggacgggagaaggatctagc

SEQ ID NO: 4567233 - DNA, 25 bp, Homo sapien
tggtccttctcccaagtaatgatgg

SEQ ID NO: 4567234 - DNA, 25 bp, Homo sapien
ccgtctgagactccgggtgcagaga

SEQ ID NO: 4567235 - DNA, 25 bp, Homo sapien
ggctcctcaggcaatgtcacctggt

SEQ ID NO: 4567236 - DNA, 25 bp, Homo sapien
ggcactcaaagcgagctgtcccgtt

SEQ ID NO: 4567237 - DNA, 25 bp, Homo sapien
cacagggaaccattgggcagcaggt

SEQ ID NO: 4567238 - DNA, 25 bp, Homo sapien
caggtgtaagtggtcgtgctccagc

SEQ ID NO: 4567239 - DNA, 25 bp, Homo sapien
caagcttgacgacagcagtctggct

SEQ ID NO: 4567240 - DNA, 25 bp, Homo sapien
gactgactcgtcactgccattgggt

SEQ ID NO: 4567241 - DNA, 25 bp, Homo sapien
agcacggggccatcagtgtatgtcc

SEQ ID NO: 4567242 - DNA, 25 bp, Homo sapien
ggagcacggggccatcagtgtatgt

SEQ ID NO: 4567243 - DNA, 25 bp, Homo sapien
cacggggccatcagtgtatgtcccc

SEQ ID NO: 4567244 - DNA, 25 bp, Homo sapien
gaggagcacggggccatcagtgtat

SEQ ID NO: 4567245 - DNA, 25 bp, Homo sapien
ctcccacagcctctgctcctgagtc

SEQ ID NO: 4567246 - DNA, 25 bp, Homo sapien
cacagcctctgctcctgagtcaccc

SEQ ID NO: 4567247 - DNA, 25 bp, Homo sapien
cccacagcctctgctcctgagtcac

SEQ ID NO: 4567248 - DNA, 25 bp, Homo sapien
cagcctctgctcctgagtcacccat

SEQ ID NO: 4567249 - DNA, 25 bp, Homo sapien
ccatttttcagtgaattcttaggga

SEQ ID NO: 4567250 - DNA, 25 bp, Homo sapien
aatgctgtttcgtgggattagtgga

SEQ ID NO: 4567251 - DNA, 25 bp, Homo sapien
gaggcctggcgtgagttccattttt

SEQ ID NO: 4567252 - DNA, 25 bp, Homo sapien
agaaaggagattcgctgctgagctc

SEQ ID NO: 4567253 - DNA, 25 bp, Homo sapien
gaacagctgtgatgtccctggttga

SEQ ID NO: 4567254 - DNA, 25 bp, Homo sapien
gtgatgtccctggttgatttagaca

SEQ ID NO: 4567255 - DNA, 25 bp, Homo sapien
tccctagaacagctgtgatgtccct

SEQ ID NO: 4567256 - DNA, 25 bp, Homo sapien
ttctgccccgtagaacgctggcacc

SEQ ID NO: 4567257 - DNA, 25 bp, Homo sapien
cagccttcactctaggtttttgact

SEQ ID NO: 4567258 - DNA, 25 bp, Homo sapien
ctcaactaggcaccaaagtcttggg

SEQ ID NO: 4567259 - DNA, 25 bp, Homo sapien
aatcctcggtacctggaacagtgcc

SEQ ID NO: 4567260 - DNA, 25 bp, Homo sapien
gagtgaacccatgaagacatcctca

SEQ ID NO: 4567261 - DNA, 25 bp, Homo sapien
ctttgtgcgtgtgataagaacagag

SEQ ID NO: 4567262 - DNA, 25 bp, Homo sapien
tttgtgcgtgtgataagaacagagc

SEQ ID NO: 4567263 - DNA, 25 bp, Homo sapien
gtgcgtgtgataagaacagagctcg

SEQ ID NO: 4567264 - DNA, 25 bp, Homo sapien
tgtgcgtgtgataagaacagagctc

SEQ ID NO: 4567265 - DNA, 25 bp, Homo sapien
gtcatgactcgactggagtgtcccc

SEQ ID NO: 4567266 - DNA, 25 bp, Homo sapien
gtacagatcagggtggctagtcatg

SEQ ID NO: 4567267 - DNA, 25 bp, Homo sapien
gggcaagctgttgtagccactcaca

SEQ ID NO: 4567268 - DNA, 25 bp, Homo sapien
ggtggctagtcatgactcgactgga

SEQ ID NO: 4567269 - DNA, 25 bp, Homo sapien
cacgcttccctggtcggtccctggg

SEQ ID NO: 4567270 - DNA, 25 bp, Homo sapien
tggggccggggtgacacgcgtccca

SEQ ID NO: 4567271 - DNA, 25 bp, Homo sapien
ggctgcggactggatgaggccctgc

SEQ ID NO: 4567272 - DNA, 25 bp, Homo sapien
ggccctgctgacctcgtccacgctt

SEQ ID NO: 4567273 - DNA, 25 bp, Homo sapien
cgcagctcgcagacccccgcgcagg

SEQ ID NO: 4567274 - DNA, 25 bp, Homo sapien
gcagctcgcagacccccgcgcaggc

SEQ ID NO: 4567275 - DNA, 25 bp, Homo sapien
agctcgcagacccccgcgcaggcat

SEQ ID NO: 4567276 - DNA, 25 bp, Homo sapien
ccgcagctcgcagacccccgcgcag

SEQ ID NO: 4567277 - DNA, 25 bp, Homo sapien
caggcagaaggtcaacgcgaggagc

SEQ ID NO: 4567278 - DNA, 25 bp, Homo sapien
cgcgcgcggccaacaggcagaaggt

SEQ ID NO: 4567279 - DNA, 25 bp, Homo sapien
ggcagaaggtcaacgcgaggagccc

SEQ ID NO: 4567280 - DNA, 25 bp, Homo sapien
cgcgcggccaacaggcagaaggtca

SEQ ID NO: 4567281 - DNA, 25 bp, Homo sapien
gcgcgccgggcgtcagtggcccggg

SEQ ID NO: 4567282 - DNA, 25 bp, Homo sapien
gctgccgcctcacccgcccctccat

SEQ ID NO: 4567283 - DNA, 25 bp, Homo sapien
ggagagcgcgccgggcgtcagtggc

SEQ ID NO: 4567284 - DNA, 25 bp, Homo sapien
ccgcctccccgtgcttcggccgccg

SEQ ID NO: 4567285 - DNA, 25 bp, Homo sapien
catcccaaaccaagggcttctcttg

SEQ ID NO: 4567286 - DNA, 25 bp, Homo sapien
tctgccatcccaaaccaagggcttc

SEQ ID NO: 4567287 - DNA, 25 bp, Homo sapien
tgccatcccaaaccaagggcttctc

SEQ ID NO: 4567288 - DNA, 25 bp, Homo sapien
gccatcccaaaccaagggcttctct

SEQ ID NO: 4567289 - DNA, 25 bp, Homo sapien
agtatctcacactgtgtaggtgcca

SEQ ID NO: 4567290 - DNA, 25 bp, Homo sapien
gaaggcttcacagaactattgattg

SEQ ID NO: 4567291 - DNA, 25 bp, Homo sapien
gattggacaagtgtgatacggtctg

SEQ ID NO: 4567292 - DNA, 25 bp, Homo sapien
ccctgcccacaaggatagtagtgtc

SEQ ID NO: 4567293 - DNA, 25 bp, Homo sapien
cagcatctttattgcaacaaagaac

SEQ ID NO: 4567294 - DNA, 25 bp, Homo sapien
aaaactaatgtttcactttacatga

SEQ ID NO: 4567295 - DNA, 25 bp, Homo sapien
cagcagcatctttattgcaacaaag

SEQ ID NO: 4567296 - DNA, 25 bp, Homo sapien
gaaaactaatgtttcactttacatg

SEQ ID NO: 4567297 - DNA, 25 bp, Homo sapien
gcaggcacttcatgttctaaaatta

SEQ ID NO: 4567298 - DNA, 25 bp, Homo sapien
tacaagtcaatgcttaaaacagcag

SEQ ID NO: 4567299 - DNA, 25 bp, Homo sapien
gaaatgatcacctagagcccaggac

SEQ ID NO: 4567300 - DNA, 25 bp, Homo sapien
taagcttactggagacatgcaattc

SEQ ID NO: 4567301 - DNA, 25 bp, Homo sapien
tagatccttcgaggccagttagtcc

SEQ ID NO: 4567302 - DNA, 25 bp, Homo sapien
tttaactaccatgaggcaggacacc

SEQ ID NO: 4567303 - DNA, 25 bp, Homo sapien
gatgacttactataggatcgcctgg

SEQ ID NO: 4567304 - DNA, 25 bp, Homo sapien
tagttaccacagatgagcagcttca

SEQ ID NO: 4567305 - DNA, 25 bp, Homo sapien
tagtcaccaaccttactaatggagg

SEQ ID NO: 4567306 - DNA, 25 bp, Homo sapien
aattagcacctgaaagcctatgagc

SEQ ID NO: 4567307 - DNA, 25 bp, Homo sapien
aatgtgaccaatctagcaccccaag

SEQ ID NO: 4567308 - DNA, 25 bp, Homo sapien
taacagggcagatctcaattagcac

SEQ ID NO: 4567309 - DNA, 25 bp, Homo sapien
tctgtagctgtgctggcaagacagt

SEQ ID NO: 4567310 - DNA, 25 bp, Homo sapien
ggaaaagcccactctgttaatatca

SEQ ID NO: 4567311 - DNA, 25 bp, Homo sapien
tggtcagtgccaaaacaagtgtctt

SEQ ID NO: 4567312 - DNA, 25 bp, Homo sapien
gctggatatgcccaagcaatgaagc

SEQ ID NO: 4567313 - DNA, 25 bp, Homo sapien
tagccagtgtataccagagagttct

SEQ ID NO: 4567314 - DNA, 25 bp, Homo sapien
atgtgatgatcaattctgtgttttc

SEQ ID NO: 4567315 - DNA, 25 bp, Homo sapien
ttttcaggagtagatgttacatggc

SEQ ID NO: 4567316 - DNA, 25 bp, Homo sapien
ttctgttgattaaacctcctcattt

SEQ ID NO: 4567317 - DNA, 25 bp, Homo sapien
gatgcagttcataatgttctcccga

SEQ ID NO: 4567318 - DNA, 25 bp, Homo sapien
cttgaaggtagtgcaaaagatgcag

SEQ ID NO: 4567319 - DNA, 25 bp, Homo sapien
taatgttctcccgattcaggaactc

SEQ ID NO: 4567320 - DNA, 25 bp, Homo sapien
ttagagcagcaatacgtgatccaag

SEQ ID NO: 4567321 - DNA, 25 bp, Homo sapien
taacagtgaatggacttcctgtcat

SEQ ID NO: 4567322 - DNA, 25 bp, Homo sapien
aggataacagtgaatggacttcctg

SEQ ID NO: 4567323 - DNA, 25 bp, Homo sapien
agcaaaggataacagtgaatggact

SEQ ID NO: 4567324 - DNA, 25 bp, Homo sapien
gaatggacttcctgtcatcttttcc

SEQ ID NO: 4567325 - DNA, 25 bp, Homo sapien
cacagtcatgtaatctgataggcag

SEQ ID NO: 4567326 - DNA, 25 bp, Homo sapien
taggcaggtatgtcagcctgactgc

SEQ ID NO: 4567327 - DNA, 25 bp, Homo sapien
taaaaatctggacttaccccacagc

SEQ ID NO: 4567328 - DNA, 25 bp, Homo sapien
taagcagagggtggacactctaaaa

SEQ ID NO: 4567329 - DNA, 25 bp, Homo sapien
catatggctttccagccctcactaa

SEQ ID NO: 4567330 - DNA, 25 bp, Homo sapien
atgtaagagcagtaaacgatttggt

SEQ ID NO: 4567331 - DNA, 25 bp, Homo sapien
tgtaaatcatatggctttccagccc

SEQ ID NO: 4567332 - DNA, 25 bp, Homo sapien
tatactggtatgtgcaaaatggaca

SEQ ID NO: 4567333 - DNA, 25 bp, Homo sapien
aacgttccgtgtatcctgtatcata

SEQ ID NO: 4567334 - DNA, 25 bp, Homo sapien
cagggtgacccatataacgttccgt

SEQ ID NO: 4567335 - DNA, 25 bp, Homo sapien
tgtatcatagaagatccacagagtg

SEQ ID NO: 4567336 - DNA, 25 bp, Homo sapien
ccacagatcctaagtaatagccctg

SEQ ID NO: 4567337 - DNA, 25 bp, Homo sapien
gatgacattgacagtcaagtgtggt

SEQ ID NO: 4567338 - DNA, 25 bp, Homo sapien
taagatgacattgacagtcaagtgt

SEQ ID NO: 4567339 - DNA, 25 bp, Homo sapien
ctgcataagatgacattgacagtca

SEQ ID NO: 4567340 - DNA, 25 bp, Homo sapien
gcataagatgacattgacagtcaag

SEQ ID NO: 4567341 - DNA, 25 bp, Homo sapien
tctttggcatgtatctataaacagc

SEQ ID NO: 4567342 - DNA, 25 bp, Homo sapien
ggtgtacagggcaaacaggtccctg

SEQ ID NO: 4567343 - DNA, 25 bp, Homo sapien
gcttgcagtccaacaattaagtaat

SEQ ID NO: 4567344 - DNA, 25 bp, Homo sapien
ttaagtaattacgatccatcaggta

SEQ ID NO: 4567345 - DNA, 25 bp, Homo sapien
tcgagaagctagatattggagtcct

SEQ ID NO: 4567346 - DNA, 25 bp, Homo sapien
ggagtccttccacctgatcgtcaat

SEQ ID NO: 4567347 - DNA, 25 bp, Homo sapien
tccataggaccagccgtggatgccc

SEQ ID NO: 4567348 - DNA, 25 bp, Homo sapien
tggatgcccacacgatctaagtcaa

SEQ ID NO: 4567349 - DNA, 25 bp, Homo sapien
aaggaattgctcttgaggccctgtc

SEQ ID NO: 4567350 - DNA, 25 bp, Homo sapien
tctaggaactgaacatactacttct

SEQ ID NO: 4567351 - DNA, 25 bp, Homo sapien
tgccagtgcacgcaatctcacttca

SEQ ID NO: 4567352 - DNA, 25 bp, Homo sapien
gtctatattactaggcctgccagtg

SEQ ID NO: 4567353 - DNA, 25 bp, Homo sapien
aactgccttactgtgcaaaaggaac

SEQ ID NO: 4567354 - DNA, 25 bp, Homo sapien
caaaaggaacatcggattctcatca

SEQ ID NO: 4567355 - DNA, 25 bp, Homo sapien
tcagcatgtccaataacactggcaa

SEQ ID NO: 4567356 - DNA, 25 bp, Homo sapien
cataaggtcaaagaactggctgtgg

SEQ ID NO: 4567357 - DNA, 25 bp, Homo sapien
tacaaccacataacctagagaggct

SEQ ID NO: 4567358 - DNA, 25 bp, Homo sapien
agaggctagggtattcaagcggaaa

SEQ ID NO: 4567359 - DNA, 25 bp, Homo sapien
tttaagccctcggtgacaggatccc

SEQ ID NO: 4567360 - DNA, 25 bp, Homo sapien
ggatcccctgttgtctatcactaca

SEQ ID NO: 4567361 - DNA, 25 bp, Homo sapien
taaggattgcattatgaaaagactg

SEQ ID NO: 4567362 - DNA, 25 bp, Homo sapien
attattaaagggtattactgaatct

SEQ ID NO: 4567363 - DNA, 25 bp, Homo sapien
gcaaagtgatttagagattttatgg

SEQ ID NO: 4567364 - DNA, 25 bp, Homo sapien
cagatactaaataactgggtataat

SEQ ID NO: 4567365 - DNA, 25 bp, Homo sapien
agatcatgaggcttgtagagcatcc

SEQ ID NO: 4567366 - DNA, 25 bp, Homo sapien
tgaggaccaccatatatgaacagca

SEQ ID NO: 4567367 - DNA, 25 bp, Homo sapien
acagcacagtaggatatttctttcc

SEQ ID NO: 4567368 - DNA, 25 bp, Homo sapien
tagagcatcccatacaatgtaaatc

SEQ ID NO: 4567369 - DNA, 25 bp, Homo sapien
ctggaggagtatagtcaggaagagg

SEQ ID NO: 4567370 - DNA, 25 bp, Homo sapien
tacttacttataaagaagtcacagt

SEQ ID NO: 4567371 - DNA, 25 bp, Homo sapien
tcctttgttttgcaagttgggtcat

SEQ ID NO: 4567372 - DNA, 25 bp, Homo sapien
tcttcaggacttgatagcttgtaaa

SEQ ID NO: 4567373 - DNA, 25 bp, Homo sapien
gggacacacagtgtggattcttctg

SEQ ID NO: 4567374 - DNA, 25 bp, Homo sapien
caagaatgtgagtagccacggtcag

SEQ ID NO: 4567375 - DNA, 25 bp, Homo sapien
tgagtagccacggtcagtcagcctt

SEQ ID NO: 4567376 - DNA, 25 bp, Homo sapien
tagccacggtcagtcagccttgtca

SEQ ID NO: 4567377 - DNA, 25 bp, Homo sapien
gcagcaagaatgtgagtagccacgg

SEQ ID NO: 4567378 - DNA, 25 bp, Homo sapien
tcaaaatataccagccttctgactt

SEQ ID NO: 4567379 - DNA, 25 bp, Homo sapien
gactacgtacaggtgatgctctaaa

SEQ ID NO: 4567380 - DNA, 25 bp, Homo sapien
tacgtaactgactacgtacaggtga

SEQ ID NO: 4567381 - DNA, 25 bp, Homo sapien
ctctccaggatttacgtaactgact

SEQ ID NO: 4567382 - DNA, 25 bp, Homo sapien
gaatgtgatcatccaagtgacagct

SEQ ID NO: 4567383 - DNA, 25 bp, Homo sapien
caggatggagttcctagagatctca

SEQ ID NO: 4567384 - DNA, 25 bp, Homo sapien
gggcacaagtgatccctcgacactg

SEQ ID NO: 4567385 - DNA, 25 bp, Homo sapien
catgcccagcagatactctaaagtt

SEQ ID NO: 4567386 - DNA, 25 bp, Homo sapien
gaatgaaagacaagtactacttcag

SEQ ID NO: 4567387 - DNA, 25 bp, Homo sapien
cctatcaatctaagctctgtataaa

SEQ ID NO: 4567388 - DNA, 25 bp, Homo sapien
agtactacttcagaagaagtaaatg

SEQ ID NO: 4567389 - DNA, 25 bp, Homo sapien
cataattcatttgcagcctagactt

SEQ ID NO: 4567390 - DNA, 25 bp, Homo sapien
catatgctaacttacaacttttgct

SEQ ID NO: 4567391 - DNA, 25 bp, Homo sapien
ctcatcaaggagcaataatacattt

SEQ ID NO: 4567392 - DNA, 25 bp, Homo sapien
aactatgaatatgcccctttctcat

SEQ ID NO: 4567393 - DNA, 25 bp, Homo sapien
caacttttgctaggctctaaaacta

SEQ ID NO: 4567394 - DNA, 25 bp, Homo sapien
attagatccatgccggccaagaact

SEQ ID NO: 4567395 - DNA, 25 bp, Homo sapien
cattcaccactggtaattgctatct

SEQ ID NO: 4567396 - DNA, 25 bp, Homo sapien
tagatccatgccggccaagaacttc

SEQ ID NO: 4567397 - DNA, 25 bp, Homo sapien
ccattcaccactggtaattgctatc

SEQ ID NO: 4567398 - DNA, 25 bp, Homo sapien
cagtagttagttgagagtatgacat

SEQ ID NO: 4567399 - DNA, 25 bp, Homo sapien
atatttctgccaggatactccccct

SEQ ID NO: 4567400 - DNA, 25 bp, Homo sapien
tctattccaccccagtggtaggtgg

SEQ ID NO: 4567401 - DNA, 25 bp, Homo sapien
ccctaaactcagtagttagttgaga

SEQ ID NO: 4567402 - DNA, 25 bp, Homo sapien
gacctgccataaaggcattaaaacc

SEQ ID NO: 4567403 - DNA, 25 bp, Homo sapien
cacatgacctgccataaaggcatta

SEQ ID NO: 4567404 - DNA, 25 bp, Homo sapien
tgaattaggactggcttgactccct

SEQ ID NO: 4567405 - DNA, 25 bp, Homo sapien
ggcactgaattaggactggcttgac

SEQ ID NO: 4567406 - DNA, 25 bp, Homo sapien
gacaggcctaggtggtgaggctgta

SEQ ID NO: 4567407 - DNA, 25 bp, Homo sapien
cactgcttatatctattgctgtggg

SEQ ID NO: 4567408 - DNA, 25 bp, Homo sapien
atgagcttctgtcttgatgaggctc

SEQ ID NO: 4567409 - DNA, 25 bp, Homo sapien
gaggctctctcagcggcctaaggaa

SEQ ID NO: 4567410 - DNA, 25 bp, Homo sapien
agcccaccactggatcgtttatatt

SEQ ID NO: 4567411 - DNA, 25 bp, Homo sapien
gcccaccactggatcgtttatattt

SEQ ID NO: 4567412 - DNA, 25 bp, Homo sapien
cccaccactggatcgtttatatttg

SEQ ID NO: 4567413 - DNA, 25 bp, Homo sapien
ccaccactggatcgtttatatttgc

SEQ ID NO: 4567414 - DNA, 25 bp, Homo sapien
acactatctgtaggcgagtctggga

SEQ ID NO: 4567415 - DNA, 25 bp, Homo sapien
ggcgtcacagaatcaggcactgact

SEQ ID NO: 4567416 - DNA, 25 bp, Homo sapien
ggagcgatctagtaggatggaccaa

SEQ ID NO: 4567417 - DNA, 25 bp, Homo sapien
tcatagataattagtggcgtcacag

SEQ ID NO: 4567418 - DNA, 25 bp, Homo sapien
ttagttccttatctatgacatctat

SEQ ID NO: 4567419 - DNA, 25 bp, Homo sapien
ggcaatatattcaactccttcaaat

SEQ ID NO: 4567420 - DNA, 25 bp, Homo sapien
tctggcaatatattcaactccttca

SEQ ID NO: 4567421 - DNA, 25 bp, Homo sapien
tccagctctggcaatatattcaact

SEQ ID NO: 4567422 - DNA, 25 bp, Homo sapien
gcatcaatcattatttctgacatct

SEQ ID NO: 4567423 - DNA, 25 bp, Homo sapien
tcattatttctgacatcttaaaagt

SEQ ID NO: 4567424 - DNA, 25 bp, Homo sapien
gacatcttaaaagtgactttaggat

SEQ ID NO: 4567425 - DNA, 25 bp, Homo sapien
tttctgacatcttaaaagtgacttt

SEQ ID NO: 4567426 - DNA, 25 bp, Homo sapien
taacggaatgaatctgccctccttg

SEQ ID NO: 4567427 - DNA, 25 bp, Homo sapien
gaataatttccacctcagattcatc

SEQ ID NO: 4567428 - DNA, 25 bp, Homo sapien
ccaacataggggatgtaacatgaat

SEQ ID NO: 4567429 - DNA, 25 bp, Homo sapien
tagaattctaagaattttaccacca

SEQ ID NO: 4567430 - DNA, 25 bp, Homo sapien
tagcgactccagctgatctggcatc

SEQ ID NO: 4567431 - DNA, 25 bp, Homo sapien
ggagaacaaaggtagcgactccagc

SEQ ID NO: 4567432 - DNA, 25 bp, Homo sapien
tttggacaccaccaatagccagaat

SEQ ID NO: 4567433 - DNA, 25 bp, Homo sapien
gccagaatatctatcaaattcttct

SEQ ID NO: 4567434 - DNA, 25 bp, Homo sapien
gacagtaaatcagctttgtgaacat

SEQ ID NO: 4567435 - DNA, 25 bp, Homo sapien
tgtgaacataagattaagcaaaagt

SEQ ID NO: 4567436 - DNA, 25 bp, Homo sapien
taagaaagatgacagtaaatcagct

SEQ ID NO: 4567437 - DNA, 25 bp, Homo sapien
tacaggcatgaaccgtggcggctgg

SEQ ID NO: 4567438 - DNA, 25 bp, Homo sapien
gctaaaagaacaatcatgtcagagg

SEQ ID NO: 4567439 - DNA, 25 bp, Homo sapien
aatataaagatcacccaacgtggta

SEQ ID NO: 4567440 - DNA, 25 bp, Homo sapien
catgtggtacatacaagttatcctc

SEQ ID NO: 4567441 - DNA, 25 bp, Homo sapien
ttctggcagtcttagcaagctaaaa

SEQ ID NO: 4567442 - DNA, 25 bp, Homo sapien
cattgtgcacataagtgagtctcct

SEQ ID NO: 4567443 - DNA, 25 bp, Homo sapien
tagtttccactagattgggccttaa

SEQ ID NO: 4567444 - DNA, 25 bp, Homo sapien
gatccatccgtatgttgggacaact

SEQ ID NO: 4567445 - DNA, 25 bp, Homo sapien
tcagcagggcataattttggatcca

SEQ ID NO: 4567446 - DNA, 25 bp, Homo sapien
gcaattccgactgttccaatgcgtt

SEQ ID NO: 4567447 - DNA, 25 bp, Homo sapien
cgtgataaattccactaccggcttg

SEQ ID NO: 4567448 - DNA, 25 bp, Homo sapien
cgagaatacattccatagtccagtg

SEQ ID NO: 4567449 - DNA, 25 bp, Homo sapien
taccggcttgaaacagaaatgttcc

SEQ ID NO: 4567450 - DNA, 25 bp, Homo sapien
cacctccgcctcccagcattgggat

SEQ ID NO: 4567451 - DNA, 25 bp, Homo sapien
tttagtagaaatggagtttcgccat

SEQ ID NO: 4567452 - DNA, 25 bp, Homo sapien
ccacgcccagctaatattttgcatt

SEQ ID NO: 4567453 - DNA, 25 bp, Homo sapien
taggtgggattacacacttgtgcca

SEQ ID NO: 4567454 - DNA, 25 bp, Homo sapien
agtgtattttctctgttctcaccag

SEQ ID NO: 4567455 - DNA, 25 bp, Homo sapien
gctgctctattgatagttttgggaa

SEQ ID NO: 4567456 - DNA, 25 bp, Homo sapien
atccaaaagaggcttccaagagagc

SEQ ID NO: 4567457 - DNA, 25 bp, Homo sapien
caagagagcattaagactgctgctc

SEQ ID NO: 4567458 - DNA, 25 bp, Homo sapien
tctggcatcttcgattttgaaaaac

SEQ ID NO: 4567459 - DNA, 25 bp, Homo sapien
ttaggaagaagcaatttctggcatc

SEQ ID NO: 4567460 - DNA, 25 bp, Homo sapien
catttcaagctagctttaggaagaa

SEQ ID NO: 4567461 - DNA, 25 bp, Homo sapien
ccatctaaagaaaggcatttcaagc

SEQ ID NO: 4567462 - DNA, 25 bp, Homo sapien
catgaaatcatgtggtgccttagcc

SEQ ID NO: 4567463 - DNA, 25 bp, Homo sapien
gatattttctggtatcggcaagcag

SEQ ID NO: 4567464 - DNA, 25 bp, Homo sapien
ggctccaatttaggccgatcctgtg

SEQ ID NO: 4567465 - DNA, 25 bp, Homo sapien
gaataccgctcaacataaaaaggct

SEQ ID NO: 4567466 - DNA, 25 bp, Homo sapien
aaaaatgctttttagcacagctgca

SEQ ID NO: 4567467 - DNA, 25 bp, Homo sapien
tatcagaatgattctctgagagggt

SEQ ID NO: 4567468 - DNA, 25 bp, Homo sapien
gaggtcaggtctacttcacagtgcc

SEQ ID NO: 4567469 - DNA, 25 bp, Homo sapien
cacatgaagctgttcacgggtctat

SEQ ID NO: 4567470 - DNA, 25 bp, Homo sapien
ctgcaaaccagtgcttgcaagaata

SEQ ID NO: 4567471 - DNA, 25 bp, Homo sapien
tgcaaaccagtgcttgcaagaatag

SEQ ID NO: 4567472 - DNA, 25 bp, Homo sapien
caaaccagtgcttgcaagaataggg

SEQ ID NO: 4567473 - DNA, 25 bp, Homo sapien
gcaaaccagtgcttgcaagaatagg

SEQ ID NO: 4567474 - DNA, 25 bp, Homo sapien
ctgctcttctcacaggaatctttcc

SEQ ID NO: 4567475 - DNA, 25 bp, Homo sapien
ctttttcaagtgactcgacttcaag

SEQ ID NO: 4567476 - DNA, 25 bp, Homo sapien
tcatcctgctcttctcacaggaatc

SEQ ID NO: 4567477 - DNA, 25 bp, Homo sapien
caagcatagaatccctctgctcatc

SEQ ID NO: 4567478 - DNA, 25 bp, Homo sapien
cagaaaatctgaggccgaagcccat

SEQ ID NO: 4567479 - DNA, 25 bp, Homo sapien
gaatcgacctagcatgaggcaggag

SEQ ID NO: 4567480 - DNA, 25 bp, Homo sapien
aacagcgaggttatgccagcacagc

SEQ ID NO: 4567481 - DNA, 25 bp, Homo sapien
aggaaaatcccttcgcctctgtggg

SEQ ID NO: 4567482 - DNA, 25 bp, Homo sapien
gcgagactcaattaagataacggac

SEQ ID NO: 4567483 - DNA, 25 bp, Homo sapien
cagcgagactcaattaagataacgg

SEQ ID NO: 4567484 - DNA, 25 bp, Homo sapien
cccaaccccagcgagactcaattaa

SEQ ID NO: 4567485 - DNA, 25 bp, Homo sapien
cccagcgagactcaattaagataac

SEQ ID NO: 4567486 - DNA, 25 bp, Homo sapien
cccagagctcaaggggcgcccagtg

SEQ ID NO: 4567487 - DNA, 25 bp, Homo sapien
gaacggtggttgactcggaatctca

SEQ ID NO: 4567488 - DNA, 25 bp, Homo sapien
gcgcccagtgaacggtggttgactc

SEQ ID NO: 4567489 - DNA, 25 bp, Homo sapien
gactcggaatctcagagcctcggct

SEQ ID NO: 4567490 - DNA, 25 bp, Homo sapien
gaacgcggcactaagaagcagcggc

SEQ ID NO: 4567491 - DNA, 25 bp, Homo sapien
gttgcgatccgctttccgactggcg

SEQ ID NO: 4567492 - DNA, 25 bp, Homo sapien
tatggagcgggcctgcgccgcttca

SEQ ID NO: 4567493 - DNA, 25 bp, Homo sapien
tagcacttccggttcgttgcgatcc

SEQ ID NO: 4567494 - DNA, 25 bp, Homo sapien
agcagtcaccacctggatcagtcca

SEQ ID NO: 4567495 - DNA, 25 bp, Homo sapien
ttctcacattagagtaggaaaattg

SEQ ID NO: 4567496 - DNA, 25 bp, Homo sapien
tacaactccctgaaagctcacatga

SEQ ID NO: 4567497 - DNA, 25 bp, Homo sapien
tcaacattgaggcaggacccgccac

SEQ ID NO: 4567498 - DNA, 25 bp, Homo sapien
ggcaggaggttcatgctagttccct

SEQ ID NO: 4567499 - DNA, 25 bp, Homo sapien
aattggatgcagtacccttgagagg

SEQ ID NO: 4567500 - DNA, 25 bp, Homo sapien
catagtaccttgcatgatgtggctg

SEQ ID NO: 4567501 - DNA, 25 bp, Homo sapien
tgagagggtgattggacatagtacc

SEQ ID NO: 4567502 - DNA, 25 bp, Homo sapien
tcttgtgcaattcttgggattctcc

SEQ ID NO: 4567503 - DNA, 25 bp, Homo sapien
taatcttgtgcaattcttgggattc

SEQ ID NO: 4567504 - DNA, 25 bp, Homo sapien
tataatcttgtgcaattcttgggat

SEQ ID NO: 4567505 - DNA, 25 bp, Homo sapien
atcttgtgcaattcttgggattctc

SEQ ID NO: 4567506 - DNA, 25 bp, Homo sapien
aaatccagttatcacacttatgagc

SEQ ID NO: 4567507 - DNA, 25 bp, Homo sapien
aaaatccagttatcacacttatgag

SEQ ID NO: 4567508 - DNA, 25 bp, Homo sapien
gttcagtctgtctaatacatgccag

SEQ ID NO: 4567509 - DNA, 25 bp, Homo sapien
tatagaaggctgttaaagtgactca

SEQ ID NO: 4567510 - DNA, 25 bp, Homo sapien
cgcagacggcgctatggacaaaaaa

SEQ ID NO: 4567511 - DNA, 25 bp, Homo sapien
tattatagtgctcagcagtgtgggc

SEQ ID NO: 4567512 - DNA, 25 bp, Homo sapien
caaactgtaaggctgtgcacaaaca

SEQ ID NO: 4567513 - DNA, 25 bp, Homo sapien
actacgtgtaattgggcagatcagc

SEQ ID NO: 4567514 - DNA, 25 bp, Homo sapien
taaacctgtctgcagtaggacactg

SEQ ID NO: 4567515 - DNA, 25 bp, Homo sapien
aacacccgctgatcctttaacaagg

SEQ ID NO: 4567516 - DNA, 25 bp, Homo sapien
agtctaatggttctctgttagtgat

SEQ ID NO: 4567517 - DNA, 25 bp, Homo sapien
tctctgttagtgataaagacctttg

SEQ ID NO: 4567518 - DNA, 25 bp, Homo sapien
agtgataaagacctttgttcaggca

SEQ ID NO: 4567519 - DNA, 25 bp, Homo sapien
tggttctctgttagtgataaagacc

SEQ ID NO: 4567520 - DNA, 25 bp, Homo sapien
aagcctgagagttacatggaaggtg

SEQ ID NO: 4567521 - DNA, 25 bp, Homo sapien
gagagttacatggaaggtggtgcaa

SEQ ID NO: 4567522 - DNA, 25 bp, Homo sapien
gagttacatggaaggtggtgcaaat

SEQ ID NO: 4567523 - DNA, 25 bp, Homo sapien
gttacatggaaggtggtgcaaatga

SEQ ID NO: 4567524 - DNA, 25 bp, Homo sapien
taactttggaatcggatcggtgatc

SEQ ID NO: 4567525 - DNA, 25 bp, Homo sapien
tgaatctatgccacttagaaagttg

SEQ ID NO: 4567526 - DNA, 25 bp, Homo sapien
taaagtgataagacagaccaaaagc

SEQ ID NO: 4567527 - DNA, 25 bp, Homo sapien
gaaccttgcttaggcaatgaggcct

SEQ ID NO: 4567528 - DNA, 25 bp, Homo sapien
tataaacgagggaagaggtgaagct

SEQ ID NO: 4567529 - DNA, 25 bp, Homo sapien
cattcaaaacagcaagtggtgcttc

SEQ ID NO: 4567530 - DNA, 25 bp, Homo sapien
tctcaggaaatgtgcccatcatggg

SEQ ID NO: 4567531 - DNA, 25 bp, Homo sapien
tcagcaagctccagacagtctgagt

SEQ ID NO: 4567532 - DNA, 25 bp, Homo sapien
tgttctggtcataagcggcatactc

SEQ ID NO: 4567533 - DNA, 25 bp, Homo sapien
catactcagaggtgccggtactggc

SEQ ID NO: 4567534 - DNA, 25 bp, Homo sapien
tcccagagaagtccgtgtgcaaagg

SEQ ID NO: 4567535 - DNA, 25 bp, Homo sapien
gctagagcggcctttcgcaaacggt

SEQ ID NO: 4567536 - DNA, 25 bp, Homo sapien
aataaacaggctcaagaggaggccc

SEQ ID NO: 4567537 - DNA, 25 bp, Homo sapien
ccccttagtggagtggtctgggcaa

SEQ ID NO: 4567538 - DNA, 25 bp, Homo sapien
gaaatatgaagtgccccaacaaccc

SEQ ID NO: 4567539 - DNA, 25 bp, Homo sapien
tgaaaacgctcttaaccctctgatg

SEQ ID NO: 4567540 - DNA, 25 bp, Homo sapien
tactatcatctgttaaaaaagtgga

SEQ ID NO: 4567541 - DNA, 25 bp, Homo sapien
ccaaacaagtgtgtcatcatgagta

SEQ ID NO: 4567542 - DNA, 25 bp, Homo sapien
cacccagacaaagtagcatgtatct

SEQ ID NO: 4567543 - DNA, 25 bp, Homo sapien
ccagttgaactcttgattaaagctg

SEQ ID NO: 4567544 - DNA, 25 bp, Homo sapien
tgttttttcaggtagtttccttgca

SEQ ID NO: 4567545 - DNA, 25 bp, Homo sapien
atccaacattagaattctgtggtaa

SEQ ID NO: 4567546 - DNA, 25 bp, Homo sapien
acattagaattctgtggtaaaaaag

SEQ ID NO: 4567547 - DNA, 25 bp, Homo sapien
aaaaaatccaacattagaattctgt

SEQ ID NO: 4567548 - DNA, 25 bp, Homo sapien
cattagaattctgtggtaaaaaagg

SEQ ID NO: 4567549 - DNA, 25 bp, Homo sapien
cacattctgggcataactgcgtttg

SEQ ID NO: 4567550 - DNA, 25 bp, Homo sapien
cataactgcgtttgtttttgggctg

SEQ ID NO: 4567551 - DNA, 25 bp, Homo sapien
gggaatggactcttattgtcatcct

SEQ ID NO: 4567552 - DNA, 25 bp, Homo sapien
catcctcgccataagggttttcttt

SEQ ID NO: 4567553 - DNA, 25 bp, Homo sapien
catgaattgccagatggaaagggtc

SEQ ID NO: 4567554 - DNA, 25 bp, Homo sapien
gagcctatatgtggtaactaactgg

SEQ ID NO: 4567555 - DNA, 25 bp, Homo sapien
gaaagggtccactgagtgcctagca

SEQ ID NO: 4567556 - DNA, 25 bp, Homo sapien
tactgtcattagttgtctggagcct

SEQ ID NO: 4567557 - DNA, 25 bp, Homo sapien
tgggagtagagcattccatgccatt

SEQ ID NO: 4567558 - DNA, 25 bp, Homo sapien
tgccattttccctagccatgggaga

SEQ ID NO: 4567559 - DNA, 25 bp, Homo sapien
tgggccaggctcaaagagagacatc

SEQ ID NO: 4567560 - DNA, 25 bp, Homo sapien
gagagacatcatgaggtttgatttc

SEQ ID NO: 4567561 - DNA, 25 bp, Homo sapien
cctaattgaacaatcgctaccattc

SEQ ID NO: 4567562 - DNA, 25 bp, Homo sapien
taattgaacaatcgctaccattcct

SEQ ID NO: 4567563 - DNA, 25 bp, Homo sapien
tgaacaatcgctaccattccttcca

SEQ ID NO: 4567564 - DNA, 25 bp, Homo sapien
attgaacaatcgctaccattccttc

SEQ ID NO: 4567565 - DNA, 25 bp, Homo sapien
gtgatgccagtacccacctcatcac

SEQ ID NO: 4567566 - DNA, 25 bp, Homo sapien
tcagtgatgccagtacccacctcat

SEQ ID NO: 4567567 - DNA, 25 bp, Homo sapien
agtgatgccagtacccacctcatca

SEQ ID NO: 4567568 - DNA, 25 bp, Homo sapien
catcagtgatgccagtacccacctc

SEQ ID NO: 4567569 - DNA, 25 bp, Homo sapien
tatcagctatatcaataaatcccac

SEQ ID NO: 4567570 - DNA, 25 bp, Homo sapien
cagaactgggggacttgaaatatca

SEQ ID NO: 4567571 - DNA, 25 bp, Homo sapien
tgttaagtgctataggtaagaccag

SEQ ID NO: 4567572 - DNA, 25 bp, Homo sapien
tgctataggtaagaccagatgtctg

SEQ ID NO: 4567573 - DNA, 25 bp, Homo sapien
gaaaggtctaatccctctgtgtagt

SEQ ID NO: 4567574 - DNA, 25 bp, Homo sapien
tagacgctgtagtaaagaccaaaag

SEQ ID NO: 4567575 - DNA, 25 bp, Homo sapien
gcaactacactcagcctttgaagaa

SEQ ID NO: 4567576 - DNA, 25 bp, Homo sapien
gcatcatagtcaaacacttccgcag

SEQ ID NO: 4567577 - DNA, 25 bp, Homo sapien
gtcacagtagaagagatggatgcct

SEQ ID NO: 4567578 - DNA, 25 bp, Homo sapien
catgcacctaagattcaaggagtcc

SEQ ID NO: 4567579 - DNA, 25 bp, Homo sapien
catagtattggcaacacgaaccagg

SEQ ID NO: 4567580 - DNA, 25 bp, Homo sapien
ggagtccacccaccaataggaagca

SEQ ID NO: 4567581 - DNA, 25 bp, Homo sapien
tggaaaggcgtatatgccaaatcta

SEQ ID NO: 4567582 - DNA, 25 bp, Homo sapien
acagcatggaaaggcgtatatgcca

SEQ ID NO: 4567583 - DNA, 25 bp, Homo sapien
gcatggaaaggcgtatatgccaaat

SEQ ID NO: 4567584 - DNA, 25 bp, Homo sapien
agaacagcatggaaaggcgtatatg

SEQ ID NO: 4567585 - DNA, 25 bp, Homo sapien
tagactgtacattcttcaagcacag

SEQ ID NO: 4567586 - DNA, 25 bp, Homo sapien
cattgtttaaatctatgagacgttc

SEQ ID NO: 4567587 - DNA, 25 bp, Homo sapien
gggccatcaatagtaaaaatctgcc

SEQ ID NO: 4567588 - DNA, 25 bp, Homo sapien
aaatctgcccttcaccattgtttaa

SEQ ID NO: 4567589 - DNA, 25 bp, Homo sapien
tatataacttagatgggaaaggaaa

SEQ ID NO: 4567590 - DNA, 25 bp, Homo sapien
ctccaaattcgccatgcacatgata

SEQ ID NO: 4567591 - DNA, 25 bp, Homo sapien
gccatgcacatgatatataacttag

SEQ ID NO: 4567592 - DNA, 25 bp, Homo sapien
cacatgatatataacttagatggga

SEQ ID NO: 4567593 - DNA, 25 bp, Homo sapien
tgaccctctaccaatgccaagacag

SEQ ID NO: 4567594 - DNA, 25 bp, Homo sapien
gttgctctcacttcgttgattttga

SEQ ID NO: 4567595 - DNA, 25 bp, Homo sapien
tcgttgattttgagtggctagggaa

SEQ ID NO: 4567596 - DNA, 25 bp, Homo sapien
tggctagggaatgtcgcagtgaccc

SEQ ID NO: 4567597 - DNA, 25 bp, Homo sapien
ccattcttgctgaacgatattgcaa

SEQ ID NO: 4567598 - DNA, 25 bp, Homo sapien
aacaccaactaatgcagactccaag

SEQ ID NO: 4567599 - DNA, 25 bp, Homo sapien
tggcaaggaattgcaccaccccatt

SEQ ID NO: 4567600 - DNA, 25 bp, Homo sapien
gcagactccaagcaggttttgtcat

SEQ ID NO: 4567601 - DNA, 25 bp, Homo sapien
taagggaacaactcacagctgtaac

SEQ ID NO: 4567602 - DNA, 25 bp, Homo sapien
tagctgtaccgaagaaacagtaggc

SEQ ID NO: 4567603 - DNA, 25 bp, Homo sapien
gactgctcactatgggtaagacact

SEQ ID NO: 4567604 - DNA, 25 bp, Homo sapien
gaatggaacactacatcctgagatg

SEQ ID NO: 4567605 - DNA, 25 bp, Homo sapien
gggtattataatctctcgtgaaggg

SEQ ID NO: 4567606 - DNA, 25 bp, Homo sapien
tttgtggccatgtgctcaaacagca

SEQ ID NO: 4567607 - DNA, 25 bp, Homo sapien
aaacagcatcgttaaaccatgggct

SEQ ID NO: 4567608 - DNA, 25 bp, Homo sapien
accacaagtgctgtaaattcaagct

SEQ ID NO: 4567609 - DNA, 25 bp, Homo sapien
ggtattcctcggacccctcaataga

SEQ ID NO: 4567610 - DNA, 25 bp, Homo sapien
catggaaagggatacatccattacc

SEQ ID NO: 4567611 - DNA, 25 bp, Homo sapien
gctggtattcctcggacccctcaat

SEQ ID NO: 4567612 - DNA, 25 bp, Homo sapien
cctcaatagacacaggtcgggtcat

SEQ ID NO: 4567613 - DNA, 25 bp, Homo sapien
cagtgttcccaatcagaatgcaaac

SEQ ID NO: 4567614 - DNA, 25 bp, Homo sapien
gttcccaatcagaatgcaaacagac

SEQ ID NO: 4567615 - DNA, 25 bp, Homo sapien
gatcccagtgttcccaatcagaatg

SEQ ID NO: 4567616 - DNA, 25 bp, Homo sapien
tgaaaatgatcccagtgttcccaat

SEQ ID NO: 4567617 - DNA, 25 bp, Homo sapien
tgtaaggaccactcttagaatcacc

SEQ ID NO: 4567618 - DNA, 25 bp, Homo sapien
taaagaatatgtaaggtcgggcaca

SEQ ID NO: 4567619 - DNA, 25 bp, Homo sapien
tagcagaggcaaacaccatttaagt

SEQ ID NO: 4567620 - DNA, 25 bp, Homo sapien
taagtgaccataaatcaaggaccat

SEQ ID NO: 4567621 - DNA, 25 bp, Homo sapien
agctggcagtcttgccttctctgaa

SEQ ID NO: 4567622 - DNA, 25 bp, Homo sapien
tctgctgttgacagtgatgacagct

SEQ ID NO: 4567623 - DNA, 25 bp, Homo sapien
aaaagcactttcagcccgtgaaatc

SEQ ID NO: 4567624 - DNA, 25 bp, Homo sapien
tacacagacttagatcaaatacaaa

SEQ ID NO: 4567625 - DNA, 25 bp, Homo sapien
aagtcgtgggagatcaatttagtac

SEQ ID NO: 4567626 - DNA, 25 bp, Homo sapien
cattaacagttacaaagtcgtggga

SEQ ID NO: 4567627 - DNA, 25 bp, Homo sapien
taacagttacaaagtcgtgggagat

SEQ ID NO: 4567628 - DNA, 25 bp, Homo sapien
gttacaaagtcgtgggagatcaatt

SEQ ID NO: 4567629 - DNA, 25 bp, Homo sapien
ctgaaggatagttcactcaagcagt

SEQ ID NO: 4567630 - DNA, 25 bp, Homo sapien
agttcactcaagcagtataggcctg

SEQ ID NO: 4567631 - DNA, 25 bp, Homo sapien
gaaggatagttcactcaagcagtat

SEQ ID NO: 4567632 - DNA, 25 bp, Homo sapien
ggatagttcactcaagcagtatagg

SEQ ID NO: 4567633 - DNA, 25 bp, Homo sapien
ttggctttcccgtcagcctccggga

SEQ ID NO: 4567634 - DNA, 25 bp, Homo sapien
tccccagttctcagatataatttca

SEQ ID NO: 4567635 - DNA, 25 bp, Homo sapien
cagcctccgggagtccctccccagt

SEQ ID NO: 4567636 - DNA, 25 bp, Homo sapien
tctaaaagtccagactgaaaatcac

SEQ ID NO: 4567637 - DNA, 25 bp, Homo sapien
cagtcaagaaaatgtgggatctgga

SEQ ID NO: 4567638 - DNA, 25 bp, Homo sapien
aactggcgcctcacagacagcgcgg

SEQ ID NO: 4567639 - DNA, 25 bp, Homo sapien
cagagggcgaaatcgtgcagtttac

SEQ ID NO: 4567640 - DNA, 25 bp, Homo sapien
accccaacaagcagcgaaaggcagt

SEQ ID NO: 4567641 - DNA, 25 bp, Homo sapien
tcggcataaactttccgtccgcgcg

SEQ ID NO: 4567642 - DNA, 25 bp, Homo sapien
gccacagccggaactataaggccgc

SEQ ID NO: 4567643 - DNA, 25 bp, Homo sapien
cggcataaactttccgtcggcataa

SEQ ID NO: 4567644 - DNA, 25 bp, Homo sapien
ataaggccgcgcgacagaagggaat

SEQ ID NO: 4567645 - DNA, 25 bp, Homo sapien
cgcccgggcagggttctggctcatc

SEQ ID NO: 4567646 - DNA, 25 bp, Homo sapien
tggagagcttcagggtcgcccgggc

SEQ ID NO: 4567647 - DNA, 25 bp, Homo sapien
tctcttcgcgatggccaatccgcgg

SEQ ID NO: 4567648 - DNA, 25 bp, Homo sapien
cctcccacaaatccccaacttctct

SEQ ID NO: 4567649 - DNA, 25 bp, Homo sapien
tattttcctcgtcactctttagccc

SEQ ID NO: 4567650 - DNA, 25 bp, Homo sapien
ctcacctggcccggtgactctgtgt

SEQ ID NO: 4567651 - DNA, 25 bp, Homo sapien
tctctcgtatcctctgaaccggttg

SEQ ID NO: 4567652 - DNA, 25 bp, Homo sapien
actctgtgtccgcttcacacttttg

SEQ ID NO: 4567653 - DNA, 25 bp, Homo sapien
tgttccaggccactcaaggtgaagc

SEQ ID NO: 4567654 - DNA, 25 bp, Homo sapien
gacatgtaactagcagacctcaggt

SEQ ID NO: 4567655 - DNA, 25 bp, Homo sapien
cagagggagctcgtgaccttcttac

SEQ ID NO: 4567656 - DNA, 25 bp, Homo sapien
gaaagtaacccaaagcatcatgcac

SEQ ID NO: 4567657 - DNA, 25 bp, Homo sapien
tactcccactttgatcagctccaag

SEQ ID NO: 4567658 - DNA, 25 bp, Homo sapien
ctctggggagatccattagtgccct

SEQ ID NO: 4567659 - DNA, 25 bp, Homo sapien
caggtatcttgggatgtcccagcct

SEQ ID NO: 4567660 - DNA, 25 bp, Homo sapien
cagctccaagtcatgggctggaggc

SEQ ID NO: 4567661 - DNA, 25 bp, Homo sapien
tatctcagatgaggagttgtaccag

SEQ ID NO: 4567662 - DNA, 25 bp, Homo sapien
ggctcatctgcttggctactcacta

SEQ ID NO: 4567663 - DNA, 25 bp, Homo sapien
gattccatgggttactcagctcact

SEQ ID NO: 4567664 - DNA, 25 bp, Homo sapien
gatacgagtgggcttgctgcaaagt

SEQ ID NO: 4567665 - DNA, 25 bp, Homo sapien
gattatatctcatccttaagccagc

SEQ ID NO: 4567666 - DNA, 25 bp, Homo sapien
caactttgggttcagcgtctaagac

SEQ ID NO: 4567667 - DNA, 25 bp, Homo sapien
catgagtaggtctattaccgctagc

SEQ ID NO: 4567668 - DNA, 25 bp, Homo sapien
taccgctagctcaagtaaaaaggat

SEQ ID NO: 4567669 - DNA, 25 bp, Homo sapien
agtccccgacgtccgaaggcaggtg

SEQ ID NO: 4567670 - DNA, 25 bp, Homo sapien
tcccactgtggctgacagtccccga

SEQ ID NO: 4567671 - DNA, 25 bp, Homo sapien
gtggctgacagtccccgacgtccga

SEQ ID NO: 4567672 - DNA, 25 bp, Homo sapien
tgacagtccccgacgtccgaaggca

SEQ ID NO: 4567673 - DNA, 25 bp, Homo sapien
gataatagacctaaaatgctgcctg

SEQ ID NO: 4567674 - DNA, 25 bp, Homo sapien
cctttgtatgtgaactcctgctagc

SEQ ID NO: 4567675 - DNA, 25 bp, Homo sapien
tgctgcctgaaatgtaactgactgg

SEQ ID NO: 4567676 - DNA, 25 bp, Homo sapien
caaataccgtcaaatgctctgctca

SEQ ID NO: 4567677 - DNA, 25 bp, Homo sapien
cagttattggtgagtctaaggatcc

SEQ ID NO: 4567678 - DNA, 25 bp, Homo sapien
cacaatgggcatggatcagaagacc

SEQ ID NO: 4567679 - DNA, 25 bp, Homo sapien
ggaaacacctgcagctcattgtgga

SEQ ID NO: 4567680 - DNA, 25 bp, Homo sapien
gaactgggtgacctaggacctctga

SEQ ID NO: 4567681 - DNA, 25 bp, Homo sapien
taaagagtccaaagtcagtagcgcc

SEQ ID NO: 4567682 - DNA, 25 bp, Homo sapien
tataaagtaagagatccagtgggac

SEQ ID NO: 4567683 - DNA, 25 bp, Homo sapien
ccaaggtagctagtgtaaaggacac

SEQ ID NO: 4567684 - DNA, 25 bp, Homo sapien
gcaaaatgagctcgggtgactgcag

SEQ ID NO: 4567685 - DNA, 25 bp, Homo sapien
taattaattgcctcgctaccccagg

SEQ ID NO: 4567686 - DNA, 25 bp, Homo sapien
ggtcatttggtcagaatcctcccga

SEQ ID NO: 4567687 - DNA, 25 bp, Homo sapien
gatgctactgcattgctgggtttcc

SEQ ID NO: 4567688 - DNA, 25 bp, Homo sapien
ggctaaggtgttccaagtattccat

SEQ ID NO: 4567689 - DNA, 25 bp, Homo sapien
ctttagcacgaaggacaagggtctt

SEQ ID NO: 4567690 - DNA, 25 bp, Homo sapien
taaggtaaactggtatgcagctgct

SEQ ID NO: 4567691 - DNA, 25 bp, Homo sapien
gaggcagcacatgctaactttagca

SEQ ID NO: 4567692 - DNA, 25 bp, Homo sapien
tctcagagtacaagcacatgcgcag

SEQ ID NO: 4567693 - DNA, 25 bp, Homo sapien
taaatatgctggtagtgttagggtt

SEQ ID NO: 4567694 - DNA, 25 bp, Homo sapien
cacaaatggggagacatactagaaa

SEQ ID NO: 4567695 - DNA, 25 bp, Homo sapien
gacatactagaaaaccttacaatta

SEQ ID NO: 4567696 - DNA, 25 bp, Homo sapien
aaaaccttacaattaaatatgctgg

SEQ ID NO: 4567697 - DNA, 25 bp, Homo sapien
tatttctccacctaacactaggagg

SEQ ID NO: 4567698 - DNA, 25 bp, Homo sapien
tatttgaaatacgatatggaataca

SEQ ID NO: 4567699 - DNA, 25 bp, Homo sapien
taatggtaggacgtagtaaacaagc

SEQ ID NO: 4567700 - DNA, 25 bp, Homo sapien
ggaatacaaatctgtgccatttaga

SEQ ID NO: 4567701 - DNA, 25 bp, Homo sapien
gcagatatatgtgcctagcaccaga

SEQ ID NO: 4567702 - DNA, 25 bp, Homo sapien
cacgcccagctcaagaatgattcac

SEQ ID NO: 4567703 - DNA, 25 bp, Homo sapien
gatacctccagtccaagtgtcgtgg

SEQ ID NO: 4567704 - DNA, 25 bp, Homo sapien
ttaaagctggctagggaattccttc

SEQ ID NO: 4567705 - DNA, 25 bp, Homo sapien
caaggctccatgagtcagtctgggc

SEQ ID NO: 4567706 - DNA, 25 bp, Homo sapien
tagcagcagacaaggaaaatacacg

SEQ ID NO: 4567707 - DNA, 25 bp, Homo sapien
ggacaacacttgacactagcactga

SEQ ID NO: 4567708 - DNA, 25 bp, Homo sapien
tcatggtatagtgaacctctctggc

SEQ ID NO: 4567709 - DNA, 25 bp, Homo sapien
acaatatacattgaatgtttacaca

SEQ ID NO: 4567710 - DNA, 25 bp, Homo sapien
gtctgagtcttttgaaccatttaca

SEQ ID NO: 4567711 - DNA, 25 bp, Homo sapien
ttctgtacataagctgtctgagtct

SEQ ID NO: 4567712 - DNA, 25 bp, Homo sapien
gtgttattttatacactgactatac

SEQ ID NO: 4567713 - DNA, 25 bp, Homo sapien
tgtgtgtactcttgacttgactagg

SEQ ID NO: 4567714 - DNA, 25 bp, Homo sapien
cttgactaggtgtgagacgatcgta

SEQ ID NO: 4567715 - DNA, 25 bp, Homo sapien
caaaggtttttcgacattccatcac

SEQ ID NO: 4567716 - DNA, 25 bp, Homo sapien
tccatcacccctgtacttggtggtc

SEQ ID NO: 4567717 - DNA, 25 bp, Homo sapien
ggtgacggacctaagaacatctttc

SEQ ID NO: 4567718 - DNA, 25 bp, Homo sapien
tttgcccctcagagagccaaatggg

SEQ ID NO: 4567719 - DNA, 25 bp, Homo sapien
gcttctctagcttggaggtccggaa

SEQ ID NO: 4567720 - DNA, 25 bp, Homo sapien
ctatattatgggctacctctgggaa

SEQ ID NO: 4567721 - DNA, 25 bp, Homo sapien
cttcccagtgccacaagtgagagaa

SEQ ID NO: 4567722 - DNA, 25 bp, Homo sapien
ttcccagtgccacaagtgagagaaa

SEQ ID NO: 4567723 - DNA, 25 bp, Homo sapien
tcccagtgccacaagtgagagaaat

SEQ ID NO: 4567724 - DNA, 25 bp, Homo sapien
cacttttttgcaataaatggaccat

SEQ ID NO: 4567725 - DNA, 25 bp, Homo sapien
ttattcagtgtctctaaaatctgac

SEQ ID NO: 4567726 - DNA, 25 bp, Homo sapien
tctgactcattggtccatagacatc

SEQ ID NO: 4567727 - DNA, 25 bp, Homo sapien
ttaaaatgtggacacttattcagtg

SEQ ID NO: 4567728 - DNA, 25 bp, Homo sapien
acaaaagaacagatgaaggaaaatg

SEQ ID NO: 4567729 - DNA, 25 bp, Homo sapien
ctgtaaacgaacaaaagaacagatg

SEQ ID NO: 4567730 - DNA, 25 bp, Homo sapien
gtaaacgaacaaaagaacagatgaa

SEQ ID NO: 4567731 - DNA, 25 bp, Homo sapien
aaaagaacagatgaaggaaaatgtt

SEQ ID NO: 4567732 - DNA, 25 bp, Homo sapien
gctttctgtggtcttaaatagacaa

SEQ ID NO: 4567733 - DNA, 25 bp, Homo sapien
cagcaactgacagatattaagttac

SEQ ID NO: 4567734 - DNA, 25 bp, Homo sapien
taaattaagggcaatagataaagaa

SEQ ID NO: 4567735 - DNA, 25 bp, Homo sapien
aaaggtctaaagctttctgtggtct

SEQ ID NO: 4567736 - DNA, 25 bp, Homo sapien
tcaaacaaaagagtacgactttgac

SEQ ID NO: 4567737 - DNA, 25 bp, Homo sapien
tctcaaacaaaagagtacgactttg

SEQ ID NO: 4567738 - DNA, 25 bp, Homo sapien
ctcaaacaaaagagtacgactttga

SEQ ID NO: 4567739 - DNA, 25 bp, Homo sapien
ggctgtcccggatcctgatgtaact

SEQ ID NO: 4567740 - DNA, 25 bp, Homo sapien
agagaatgtacaagggctgtcccgg

SEQ ID NO: 4567741 - DNA, 25 bp, Homo sapien
gtcccggatcctgatgtaacttcat

SEQ ID NO: 4567742 - DNA, 25 bp, Homo sapien
tacaagggctgtcccggatcctgat

SEQ ID NO: 4567743 - DNA, 25 bp, Homo sapien
tttgctatcttcagacatacagtgg

SEQ ID NO: 4567744 - DNA, 25 bp, Homo sapien
cttcagacatacagtggcggggaat

SEQ ID NO: 4567745 - DNA, 25 bp, Homo sapien
taaaacatatttgctatcttcagac

SEQ ID NO: 4567746 - DNA, 25 bp, Homo sapien
gtcccataacatttgtattaaaaca

SEQ ID NO: 4567747 - DNA, 25 bp, Homo sapien
gcaggtggcatacacagcgtggata

SEQ ID NO: 4567748 - DNA, 25 bp, Homo sapien
tactcaatgattaacaagcaggtgg

SEQ ID NO: 4567749 - DNA, 25 bp, Homo sapien
cgtggatacaccgaacaaagggatg

SEQ ID NO: 4567750 - DNA, 25 bp, Homo sapien
ccatcacagtgggtctgataacaga

SEQ ID NO: 4567751 - DNA, 25 bp, Homo sapien
agtcaagacgtctgaaataccatac

SEQ ID NO: 4567752 - DNA, 25 bp, Homo sapien
tccaggtaagttactgggcaagtca

SEQ ID NO: 4567753 - DNA, 25 bp, Homo sapien
gaagaaagaatcaatccaggtaagt

SEQ ID NO: 4567754 - DNA, 25 bp, Homo sapien
gaatacttgttacagtgctcagaag

SEQ ID NO: 4567755 - DNA, 25 bp, Homo sapien
aattggatgatggtccacaaagtct

SEQ ID NO: 4567756 - DNA, 25 bp, Homo sapien
caaagtctgctactgttattgcatg

SEQ ID NO: 4567757 - DNA, 25 bp, Homo sapien
gtccacaaagtctgctactgttatt

SEQ ID NO: 4567758 - DNA, 25 bp, Homo sapien
actgttattgcatgatcaccttcat

SEQ ID NO: 4567759 - DNA, 25 bp, Homo sapien
gatcgggacttggaaggtgccattc

SEQ ID NO: 4567760 - DNA, 25 bp, Homo sapien
aacagtgacaggatcgggacttgga

SEQ ID NO: 4567761 - DNA, 25 bp, Homo sapien
ctaagatacggaacagtgacaggat

SEQ ID NO: 4567762 - DNA, 25 bp, Homo sapien
gggacttggaaggtgccattctaaa

SEQ ID NO: 4567763 - DNA, 25 bp, Homo sapien
gaagtactaatactcctggccattg

SEQ ID NO: 4567764 - DNA, 25 bp, Homo sapien
gggatctgaatacttcgggtgcaaa

SEQ ID NO: 4567765 - DNA, 25 bp, Homo sapien
caggctgcctgtagaaatgagcttc

SEQ ID NO: 4567766 - DNA, 25 bp, Homo sapien
gacatttagacatagctgtttttga

SEQ ID NO: 4567767 - DNA, 25 bp, Homo sapien
acagagagagcagatgtgtcaagac

SEQ ID NO: 4567768 - DNA, 25 bp, Homo sapien
gcaagactgcctcgtctgacttgaa

SEQ ID NO: 4567769 - DNA, 25 bp, Homo sapien
gactgcctcgtctgacttgaaatgg

SEQ ID NO: 4567770 - DNA, 25 bp, Homo sapien
tgtcaagaccagaggctgatgttga

SEQ ID NO: 4567771 - DNA, 25 bp, Homo sapien
tcagaaagggtaagaagatattgcc

SEQ ID NO: 4567772 - DNA, 25 bp, Homo sapien
tcatcatggacaagacaatcacaag

SEQ ID NO: 4567773 - DNA, 25 bp, Homo sapien
cagaatgggcatgtagtattgagat

SEQ ID NO: 4567774 - DNA, 25 bp, Homo sapien
ttccaggtcgtcttaaatctcttat

SEQ ID NO: 4567775 - DNA, 25 bp, Homo sapien
ccaggtaaggcaaacttcgacagag

SEQ ID NO: 4567776 - DNA, 25 bp, Homo sapien
tatttgtattactcgcgttgaagga

SEQ ID NO: 4567777 - DNA, 25 bp, Homo sapien
ggtaaggcaaacttcgacagagatc

SEQ ID NO: 4567778 - DNA, 25 bp, Homo sapien
cgcgttgaaggaagatgtcacttct

SEQ ID NO: 4567779 - DNA, 25 bp, Homo sapien
tggtctcttgagaggagataggtcc

SEQ ID NO: 4567780 - DNA, 25 bp, Homo sapien
gataggtccttccaactcatggcag

SEQ ID NO: 4567781 - DNA, 25 bp, Homo sapien
tccaggcttattcggctgagatcaa

SEQ ID NO: 4567782 - DNA, 25 bp, Homo sapien
gagatcaattctcttagtccctgaa

SEQ ID NO: 4567783 - DNA, 25 bp, Homo sapien
tgttaaagaggtagattcagaatcc

SEQ ID NO: 4567784 - DNA, 25 bp, Homo sapien
taaagaggtagattcagaatcctgg

SEQ ID NO: 4567785 - DNA, 25 bp, Homo sapien
gactggtacgatcagaactttgatc

SEQ ID NO: 4567786 - DNA, 25 bp, Homo sapien
tgaagaaagactggtacgatcagaa

SEQ ID NO: 4567787 - DNA, 25 bp, Homo sapien
tagccaccttaccagttcaaacagt

SEQ ID NO: 4567788 - DNA, 25 bp, Homo sapien
tattgtcatatccaggaaagctgtt

SEQ ID NO: 4567789 - DNA, 25 bp, Homo sapien
cctcatttatgagaatatcaagttt

SEQ ID NO: 4567790 - DNA, 25 bp, Homo sapien
cagtggtagtagataacctcattta

SEQ ID NO: 4567791 - DNA, 25 bp, Homo sapien
tttcatacctttgtgagctggagta

SEQ ID NO: 4567792 - DNA, 25 bp, Homo sapien
aattttatacttctgcctgctcacc

SEQ ID NO: 4567793 - DNA, 25 bp, Homo sapien
ttaacatcctgaaccagaagtcttg

SEQ ID NO: 4567794 - DNA, 25 bp, Homo sapien
cttatgactactttggaggctatac

SEQ ID NO: 4567795 - DNA, 25 bp, Homo sapien
acaaatgtcgcaataaagcaaacca

SEQ ID NO: 4567796 - DNA, 25 bp, Homo sapien
tgtgaaccttcagcaagtggtaatc

SEQ ID NO: 4567797 - DNA, 25 bp, Homo sapien
cttcaatgaaggcactgtacagacc

SEQ ID NO: 4567798 - DNA, 25 bp, Homo sapien
cactgaagtctactgtacaacagca

SEQ ID NO: 4567799 - DNA, 25 bp, Homo sapien
agacctcactttcggcctttcttgg

SEQ ID NO: 4567800 - DNA, 25 bp, Homo sapien
tggtgcaggagacctcactttcggc

SEQ ID NO: 4567801 - DNA, 25 bp, Homo sapien
gcaggagacctcactttcggccttt

SEQ ID NO: 4567802 - DNA, 25 bp, Homo sapien
ggctgtttggtgcaggagacctcac

SEQ ID NO: 4567803 - DNA, 25 bp, Homo sapien
cgcaatctccgcctccgggcttcaa

SEQ ID NO: 4567804 - DNA, 25 bp, Homo sapien
ttgttgctgaagctggcgtgcaatg

SEQ ID NO: 4567805 - DNA, 25 bp, Homo sapien
ccggggtcacgccatttccctgcct

SEQ ID NO: 4567806 - DNA, 25 bp, Homo sapien
ctcttgttgctgaagctggcgtgca

SEQ ID NO: 4567807 - DNA, 25 bp, Homo sapien
cctcagtaatgttctgtaactcttt

SEQ ID NO: 4567808 - DNA, 25 bp, Homo sapien
agcttaacaataccgagtcttcaat

SEQ ID NO: 4567809 - DNA, 25 bp, Homo sapien
tgttctgtaactctttacaatgtac

SEQ ID NO: 4567810 - DNA, 25 bp, Homo sapien
tttaaatagccaaacatagtttatc

SEQ ID NO: 4567811 - DNA, 25 bp, Homo sapien
tgaaaagtgcatgggtacattcaaa

SEQ ID NO: 4567812 - DNA, 25 bp, Homo sapien
aatctttatggctccgtaggtaatg

SEQ ID NO: 4567813 - DNA, 25 bp, Homo sapien
taacttccttcagcatatctcatag

SEQ ID NO: 4567814 - DNA, 25 bp, Homo sapien
tcttccaatgcgttaaaggcaccat

SEQ ID NO: 4567815 - DNA, 25 bp, Homo sapien
taaaggaaccagttatggaagctgc

SEQ ID NO: 4567816 - DNA, 25 bp, Homo sapien
tttatctgccagaggtgccatgcca

SEQ ID NO: 4567817 - DNA, 25 bp, Homo sapien
tgaaacttgtatgggattcccctca

SEQ ID NO: 4567818 - DNA, 25 bp, Homo sapien
tgtcccataactgtgcaggtcaagg

SEQ ID NO: 4567819 - DNA, 25 bp, Homo sapien
acagataacctgagtcaagtctagg

SEQ ID NO: 4567820 - DNA, 25 bp, Homo sapien
gaagaccactgctcctttgcaggta

SEQ ID NO: 4567821 - DNA, 25 bp, Homo sapien
tgagggtctctttccgttatctgct

SEQ ID NO: 4567822 - DNA, 25 bp, Homo sapien
ttcaaacatctggatcacttgaggg

SEQ ID NO: 4567823 - DNA, 25 bp, Homo sapien
ccttctcatgcagtatcaagtattt

SEQ ID NO: 4567824 - DNA, 25 bp, Homo sapien
gcagtatcaagtatttggaaaatgt

SEQ ID NO: 4567825 - DNA, 25 bp, Homo sapien
catgcagtatcaagtatttggaaaa

SEQ ID NO: 4567826 - DNA, 25 bp, Homo sapien
ttctcatgcagtatcaagtatttgg

SEQ ID NO: 4567827 - DNA, 25 bp, Homo sapien
tcaaaactgaactacaaatataacc

SEQ ID NO: 4567828 - DNA, 25 bp, Homo sapien
tgtgtgtgtgacagtaaaagtagca

SEQ ID NO: 4567829 - DNA, 25 bp, Homo sapien
ttacatacccaatgagtccttttta

SEQ ID NO: 4567830 - DNA, 25 bp, Homo sapien
gtgacactaattcttactccagcta

SEQ ID NO: 4567831 - DNA, 25 bp, Homo sapien
cttagaacatctagtttaggtacta

SEQ ID NO: 4567832 - DNA, 25 bp, Homo sapien
tcttagaacatctagtttaggtact

SEQ ID NO: 4567833 - DNA, 25 bp, Homo sapien
cagcagtgaacatactgtttcttag

SEQ ID NO: 4567834 - DNA, 25 bp, Homo sapien
agtgaacatactgtttcttagaaca

SEQ ID NO: 4567835 - DNA, 25 bp, Homo sapien
ggagaagaccaaagtctatcccttg

SEQ ID NO: 4567836 - DNA, 25 bp, Homo sapien
taaatgggcaagtaggtgagaaggc

SEQ ID NO: 4567837 - DNA, 25 bp, Homo sapien
agaagaccaaagtctatcccttggt

SEQ ID NO: 4567838 - DNA, 25 bp, Homo sapien
tcctgagattcttccctaaatgggc

SEQ ID NO: 4567839 - DNA, 25 bp, Homo sapien
caatgcttggtgtacgacttgtcaa

SEQ ID NO: 4567840 - DNA, 25 bp, Homo sapien
tcacatgcccgttgtaaatcaatgc

SEQ ID NO: 4567841 - DNA, 25 bp, Homo sapien
tagatcttctgcatgccttgaccaa

SEQ ID NO: 4567842 - DNA, 25 bp, Homo sapien
ggatcaaatcctgttgcgacatcag

SEQ ID NO: 4567843 - DNA, 25 bp, Homo sapien
ttctatttccccagaccacttgctg

SEQ ID NO: 4567844 - DNA, 25 bp, Homo sapien
tattaagagcagctcaggtgtgctt

SEQ ID NO: 4567845 - DNA, 25 bp, Homo sapien
ttcctgaagcatctactttgaatgt

SEQ ID NO: 4567846 - DNA, 25 bp, Homo sapien
ctactttgaatgtttcgtgtttcat

SEQ ID NO: 4567847 - DNA, 25 bp, Homo sapien
ttcaagagatgatattaagagcagc

SEQ ID NO: 4567848 - DNA, 25 bp, Homo sapien
agcaacttactgtcctttttcatag

SEQ ID NO: 4567849 - DNA, 25 bp, Homo sapien
cactcatatttgaaatttaagctca

SEQ ID NO: 4567850 - DNA, 25 bp, Homo sapien
tttaagctcaaaaatgatatgctga

SEQ ID NO: 4567851 - DNA, 25 bp, Homo sapien
tatatgttcttatagcaacttactg

SEQ ID NO: 4567852 - DNA, 25 bp, Homo sapien
aactgagcttaggaaggcaatcagc

SEQ ID NO: 4567853 - DNA, 25 bp, Homo sapien
tgttgttacttgtaccagtgaggcg

SEQ ID NO: 4567854 - DNA, 25 bp, Homo sapien
gataactgagcttaggaaggcaatc

SEQ ID NO: 4567855 - DNA, 25 bp, Homo sapien
tgaggcgaacgatactggaagaatt

SEQ ID NO: 4567856 - DNA, 25 bp, Homo sapien
caaacatggatgaatacccaatcat

SEQ ID NO: 4567857 - DNA, 25 bp, Homo sapien
gtggcacatctcacaaacatggatg

SEQ ID NO: 4567858 - DNA, 25 bp, Homo sapien
ggcacatctcacaaacatggatgaa

SEQ ID NO: 4567859 - DNA, 25 bp, Homo sapien
tctcacaaacatggatgaataccca

SEQ ID NO: 4567860 - DNA, 25 bp, Homo sapien
tctaatggtatttgatttgggaagt

SEQ ID NO: 4567861 - DNA, 25 bp, Homo sapien
tgggaagtgttttgccactgaggct

SEQ ID NO: 4567862 - DNA, 25 bp, Homo sapien
ggctatatacttcatacataaagca

SEQ ID NO: 4567863 - DNA, 25 bp, Homo sapien
tatttttggaattacgtagcattca

SEQ ID NO: 4567864 - DNA, 25 bp, Homo sapien
actacaatcactcccttttttatct

SEQ ID NO: 4567865 - DNA, 25 bp, Homo sapien
tcagtagatgtatcccctcttctaa

SEQ ID NO: 4567866 - DNA, 25 bp, Homo sapien
agtagatgtatcccctcttctaact

SEQ ID NO: 4567867 - DNA, 25 bp, Homo sapien
cttgaatgtcttcagtagatgtatc

SEQ ID NO: 4567868 - DNA, 25 bp, Homo sapien
gaattatatccaagatcagactggc

SEQ ID NO: 4567869 - DNA, 25 bp, Homo sapien
catatactttgattaaacccgtatt

SEQ ID NO: 4567870 - DNA, 25 bp, Homo sapien
tgtactagatctatcatcagtagca

SEQ ID NO: 4567871 - DNA, 25 bp, Homo sapien
gactaacagcatccaggtcactgcc

SEQ ID NO: 4567872 - DNA, 25 bp, Homo sapien
gtgtgtgtcccatgaccactatcca

SEQ ID NO: 4567873 - DNA, 25 bp, Homo sapien
tgaactgtgttactcctaaaacaac

SEQ ID NO: 4567874 - DNA, 25 bp, Homo sapien
gaaaatagccactacgacttcttga

SEQ ID NO: 4567875 - DNA, 25 bp, Homo sapien
tagccactacgacttcttgaaggcc

SEQ ID NO: 4567876 - DNA, 25 bp, Homo sapien
gaactgtgttactcctaaaacaaca

SEQ ID NO: 4567877 - DNA, 25 bp, Homo sapien
gatcatattgtccacagagttgcat

SEQ ID NO: 4567878 - DNA, 25 bp, Homo sapien
gttgcataagaatgcggtagcatac

SEQ ID NO: 4567879 - DNA, 25 bp, Homo sapien
gcattggggtcaataccagctttct

SEQ ID NO: 4567880 - DNA, 25 bp, Homo sapien
aaagcactcgaactgcaagcactgg

SEQ ID NO: 4567881 - DNA, 25 bp, Homo sapien
ttcaaaattgtaccgaaacacagat

SEQ ID NO: 4567882 - DNA, 25 bp, Homo sapien
tgaaatacaagttcaaaattgtacc

SEQ ID NO: 4567883 - DNA, 25 bp, Homo sapien
aaaattgtaccgaaacacagatgtc

SEQ ID NO: 4567884 - DNA, 25 bp, Homo sapien
agttcaaaattgtaccgaaacacag

SEQ ID NO: 4567885 - DNA, 25 bp, Homo sapien
tttaagcacatcatatgctgttttc

SEQ ID NO: 4567886 - DNA, 25 bp, Homo sapien
agtagacacctagaccacatctgag

SEQ ID NO: 4567887 - DNA, 25 bp, Homo sapien
ttttcagagccctgacttttgaatg

SEQ ID NO: 4567888 - DNA, 25 bp, Homo sapien
aaaccacagtccataacagtggcgc

SEQ ID NO: 4567889 - DNA, 25 bp, Homo sapien
atgggcaaagggctattaggactac

SEQ ID NO: 4567890 - DNA, 25 bp, Homo sapien
gttttgttcttctgaacatgggcaa

SEQ ID NO: 4567891 - DNA, 25 bp, Homo sapien
acatgggcaaagggctattaggact

SEQ ID NO: 4567892 - DNA, 25 bp, Homo sapien
catgggcaaagggctattaggacta

SEQ ID NO: 4567893 - DNA, 25 bp, Homo sapien
tgcttgtagaaatccttcaggtctt

SEQ ID NO: 4567894 - DNA, 25 bp, Homo sapien
tgttcttctttgcttgtagaaatcc

SEQ ID NO: 4567895 - DNA, 25 bp, Homo sapien
gaaatccttcaggtctttcaaataa

SEQ ID NO: 4567896 - DNA, 25 bp, Homo sapien
caaataaattgttcctaagaactgg

SEQ ID NO: 4567897 - DNA, 25 bp, Homo sapien
tgcagacatcattagagagcttccc

SEQ ID NO: 4567898 - DNA, 25 bp, Homo sapien
caaatcaaggccacgaagattggct

SEQ ID NO: 4567899 - DNA, 25 bp, Homo sapien
caaggagagatacttatgcagacat

SEQ ID NO: 4567900 - DNA, 25 bp, Homo sapien
aggaattgaaagtgaggaaaccagc

SEQ ID NO: 4567901 - DNA, 25 bp, Homo sapien
tagaaagctacgtcacagatgatgg

SEQ ID NO: 4567902 - DNA, 25 bp, Homo sapien
ttcaatctcaaacattctgcctctt

SEQ ID NO: 4567903 - DNA, 25 bp, Homo sapien
gatgatggattgcttctctctttca

SEQ ID NO: 4567904 - DNA, 25 bp, Homo sapien
gctacgtcacagatgatggattgct

SEQ ID NO: 4567905 - DNA, 25 bp, Homo sapien
cagttctataagtcgtacttcaccg

SEQ ID NO: 4567906 - DNA, 25 bp, Homo sapien
tataagtcgtacttcaccgctcttg

SEQ ID NO: 4567907 - DNA, 25 bp, Homo sapien
gtacttcaccgctcttgtccatatc

SEQ ID NO: 4567908 - DNA, 25 bp, Homo sapien
gattcatccagttctataagtcgta

SEQ ID NO: 4567909 - DNA, 25 bp, Homo sapien
aattttggctcaccagcaccaccgc

SEQ ID NO: 4567910 - DNA, 25 bp, Homo sapien
cagcctatatattatgattcttaat

SEQ ID NO: 4567911 - DNA, 25 bp, Homo sapien
cagtacccagcctatatattatgat

SEQ ID NO: 4567912 - DNA, 25 bp, Homo sapien
ccaggctaaaatgccatgatgcaat

SEQ ID NO: 4567913 - DNA, 25 bp, Homo sapien
gccagaggtaagaggatttgttcac

SEQ ID NO: 4567914 - DNA, 25 bp, Homo sapien
ttttctatagctaaactgccagagg

SEQ ID NO: 4567915 - DNA, 25 bp, Homo sapien
taagatacattttgagccgggcacg

SEQ ID NO: 4567916 - DNA, 25 bp, Homo sapien
gagagttctggctaataacaccacc

SEQ ID NO: 4567917 - DNA, 25 bp, Homo sapien
ggctttctgccataactgtaggttt

SEQ ID NO: 4567918 - DNA, 25 bp, Homo sapien
catgggacaaatccctcatagcttg

SEQ ID NO: 4567919 - DNA, 25 bp, Homo sapien
catgtgacatgttggctccctagtg

SEQ ID NO: 4567920 - DNA, 25 bp, Homo sapien
catatggcagtttctaccactctct

SEQ ID NO: 4567921 - DNA, 25 bp, Homo sapien
tctttgagagtaagctgctgagctg

SEQ ID NO: 4567922 - DNA, 25 bp, Homo sapien
gcatttggttgtcaagtcttcttac

SEQ ID NO: 4567923 - DNA, 25 bp, Homo sapien
cacattcaagttttgtcgattaacc

SEQ ID NO: 4567924 - DNA, 25 bp, Homo sapien
cattattactggaaatcaacacact

SEQ ID NO: 4567925 - DNA, 25 bp, Homo sapien
caaaagaacattcttcaatgaagcg

SEQ ID NO: 4567926 - DNA, 25 bp, Homo sapien
atgaagcgaataaacatttgtgttt

SEQ ID NO: 4567927 - DNA, 25 bp, Homo sapien
caatgaagcgaataaacatttgtgt

SEQ ID NO: 4567928 - DNA, 25 bp, Homo sapien
aatgaagcgaataaacatttgtgtt

SEQ ID NO: 4567929 - DNA, 25 bp, Homo sapien
ttttgatgtgaccggtcccggcttc

SEQ ID NO: 4567930 - DNA, 25 bp, Homo sapien
ttgatgtgaccggtcccggcttctt

SEQ ID NO: 4567931 - DNA, 25 bp, Homo sapien
gatgtgaccggtcccggcttcttaa

SEQ ID NO: 4567932 - DNA, 25 bp, Homo sapien
atttttgatgtgaccggtcccggct

SEQ ID NO: 4567933 - DNA, 25 bp, Homo sapien
gtatgatctgtaaccttttaaaata

SEQ ID NO: 4567934 - DNA, 25 bp, Homo sapien
caaatctatcatgtgcaacctcttt

SEQ ID NO: 4567935 - DNA, 25 bp, Homo sapien
tgtgttattggccttaagtatgatc

SEQ ID NO: 4567936 - DNA, 25 bp, Homo sapien
gctgtctcagatggggcttgtgtta

SEQ ID NO: 4567937 - DNA, 25 bp, Homo sapien
caacacctgatttggaactggatcc

SEQ ID NO: 4567938 - DNA, 25 bp, Homo sapien
ggattaggacagcagtaattctcaa

SEQ ID NO: 4567939 - DNA, 25 bp, Homo sapien
gcaaaacctgaatgtggtctgagga

SEQ ID NO: 4567940 - DNA, 25 bp, Homo sapien
gaagcatctaatgtcaaagggtcag

SEQ ID NO: 4567941 - DNA, 25 bp, Homo sapien
caggttcaagctattctccagcctc

SEQ ID NO: 4567942 - DNA, 25 bp, Homo sapien
ttggttcactgcaacctttgcctcc

SEQ ID NO: 4567943 - DNA, 25 bp, Homo sapien
ggacaacaagcgtgcaccaccacat

SEQ ID NO: 4567944 - DNA, 25 bp, Homo sapien
caccacatccgggtaatttttgtat

SEQ ID NO: 4567945 - DNA, 25 bp, Homo sapien
ttgccaattgctgatgcaaattatt

SEQ ID NO: 4567946 - DNA, 25 bp, Homo sapien
tttgccaattgctgatgcaaattat

SEQ ID NO: 4567947 - DNA, 25 bp, Homo sapien
attttgccaattgctgatgcaaatt

SEQ ID NO: 4567948 - DNA, 25 bp, Homo sapien
ttttgccaattgctgatgcaaatta

SEQ ID NO: 4567949 - DNA, 25 bp, Homo sapien
ttggagtcaaacagtaatggcttta

SEQ ID NO: 4567950 - DNA, 25 bp, Homo sapien
gatgacttccacttacaagattact

SEQ ID NO: 4567951 - DNA, 25 bp, Homo sapien
tctgacaacataagctatatgccct

SEQ ID NO: 4567952 - DNA, 25 bp, Homo sapien
aataagaactacctcggctgggcgc

SEQ ID NO: 4567953 - DNA, 25 bp, Homo sapien
gattcaaagacggtgattaccccac

SEQ ID NO: 4567954 - DNA, 25 bp, Homo sapien
tctactccattgacgcataataagg

SEQ ID NO: 4567955 - DNA, 25 bp, Homo sapien
agcctgaggatgaaaggtatagtcc

SEQ ID NO: 4567956 - DNA, 25 bp, Homo sapien
ccctttggctaaatttctaagcaag

SEQ ID NO: 4567957 - DNA, 25 bp, Homo sapien
tgaatcaatccctactatgaatgga

SEQ ID NO: 4567958 - DNA, 25 bp, Homo sapien
tgaatggacatggtgcactcaagac

SEQ ID NO: 4567959 - DNA, 25 bp, Homo sapien
tcaacacaactgacatctggtggag

SEQ ID NO: 4567960 - DNA, 25 bp, Homo sapien
gaaatagtgttggtatctacatcaa

SEQ ID NO: 4567961 - DNA, 25 bp, Homo sapien
caaacaccagtagtgtcacagcatt

SEQ ID NO: 4567962 - DNA, 25 bp, Homo sapien
tctgttactgcaaacaccagtagtg

SEQ ID NO: 4567963 - DNA, 25 bp, Homo sapien
tggccgtagggaatggataagaatt

SEQ ID NO: 4567964 - DNA, 25 bp, Homo sapien
cacactagtaagcacggatggccgt

SEQ ID NO: 4567965 - DNA, 25 bp, Homo sapien
ctgcagtagtgttgaaaacttgcca

SEQ ID NO: 4567966 - DNA, 25 bp, Homo sapien
gcagtagtgttgaaaacttgccacc

SEQ ID NO: 4567967 - DNA, 25 bp, Homo sapien
cagtagtgttgaaaacttgccacca

SEQ ID NO: 4567968 - DNA, 25 bp, Homo sapien
tgcagtagtgttgaaaacttgccac

SEQ ID NO: 4567969 - DNA, 25 bp, Homo sapien
agaatcagattatcatgtggtgata

SEQ ID NO: 4567970 - DNA, 25 bp, Homo sapien
gaatcagattatcatgtggtgataa

SEQ ID NO: 4567971 - DNA, 25 bp, Homo sapien
actaaaatccgtggtctctgaggag

SEQ ID NO: 4567972 - DNA, 25 bp, Homo sapien
ctgaactaaaatccgtggtctctga

SEQ ID NO: 4567973 - DNA, 25 bp, Homo sapien
taaaatccgtggtctctgaggagat

SEQ ID NO: 4567974 - DNA, 25 bp, Homo sapien
aatccgtggtctctgaggagatgga

SEQ ID NO: 4567975 - DNA, 25 bp, Homo sapien
cgtgaactattgcactcagccccag

SEQ ID NO: 4567976 - DNA, 25 bp, Homo sapien
attatgggcgtgaactattgcactc

SEQ ID NO: 4567977 - DNA, 25 bp, Homo sapien
tctaaacttcccaagagcattaaac

SEQ ID NO: 4567978 - DNA, 25 bp, Homo sapien
aatggagaaatactacctgactgaa

SEQ ID NO: 4567979 - DNA, 25 bp, Homo sapien
gaaagaagacagatgcatttgttag

SEQ ID NO: 4567980 - DNA, 25 bp, Homo sapien
gatggaataacgatacagaaaagtc

SEQ ID NO: 4567981 - DNA, 25 bp, Homo sapien
gtcagaaacttcctgaatgcatcaa

SEQ ID NO: 4567982 - DNA, 25 bp, Homo sapien
aggcccagagatggaataacgatac

SEQ ID NO: 4567983 - DNA, 25 bp, Homo sapien
acttcccatctgctgatgttaaacc

SEQ ID NO: 4567984 - DNA, 25 bp, Homo sapien
taaaactgaatagcagcaccataaa

SEQ ID NO: 4567985 - DNA, 25 bp, Homo sapien
tttctgtgagattctcctcagagta

SEQ ID NO: 4567986 - DNA, 25 bp, Homo sapien
tgttaaacccaaaagaagtctctgc

SEQ ID NO: 4567987 - DNA, 25 bp, Homo sapien
caggcagagggtatttgctatttga

SEQ ID NO: 4567988 - DNA, 25 bp, Homo sapien
tatttgatggccaacattcaatggt

SEQ ID NO: 4567989 - DNA, 25 bp, Homo sapien
aatggttgcacccattggtaaacaa

SEQ ID NO: 4567990 - DNA, 25 bp, Homo sapien
gattccggtagtgagaatgactcat

SEQ ID NO: 4567991 - DNA, 25 bp, Homo sapien
taagatacagtgttcgtctttgcca

SEQ ID NO: 4567992 - DNA, 25 bp, Homo sapien
cagtgttcgtctttgccaccgattt

SEQ ID NO: 4567993 - DNA, 25 bp, Homo sapien
tgccaccgattttttataacacaag

SEQ ID NO: 4567994 - DNA, 25 bp, Homo sapien
taacacaagtatactgctgatcccc

SEQ ID NO: 4567995 - DNA, 25 bp, Homo sapien
taaagcaagtcaagcaagctacctg

SEQ ID NO: 4567996 - DNA, 25 bp, Homo sapien
ggttaagctacttgtcccaggtcac

SEQ ID NO: 4567997 - DNA, 25 bp, Homo sapien
tcacacagccagtaatggtcagaga

SEQ ID NO: 4567998 - DNA, 25 bp, Homo sapien
gggtacagacccagacactctagaa

SEQ ID NO: 4567999 - DNA, 25 bp, Homo sapien
caaagtagcattactaggaatggaa

SEQ ID NO: 4568000 - DNA, 25 bp, Homo sapien
aactgccacagcgttttcagaacaa

SEQ ID NO: 4568001 - DNA, 25 bp, Homo sapien
caaaatggtcagcatactcatggac

SEQ ID NO: 4568002 - DNA, 25 bp, Homo sapien
taaactatgcctgctgggagtaaaa

SEQ ID NO: 4568003 - DNA, 25 bp, Homo sapien
tgacccctggattaggacactactg

SEQ ID NO: 4568004 - DNA, 25 bp, Homo sapien
caatagaggcgttgtgaagtggcca

SEQ ID NO: 4568005 - DNA, 25 bp, Homo sapien
gatcatgcatgggaggactttggct

SEQ ID NO: 4568006 - DNA, 25 bp, Homo sapien
catggaagtaggaacaagaaccttc

SEQ ID NO: 4568007 - DNA, 25 bp, Homo sapien
catactgttattgagattcttgtcg

SEQ ID NO: 4568008 - DNA, 25 bp, Homo sapien
tattgagattcttgtcgactttgca

SEQ ID NO: 4568009 - DNA, 25 bp, Homo sapien
tcgactttgcagaacgtgtgtggtg

SEQ ID NO: 4568010 - DNA, 25 bp, Homo sapien
tcttgtcgactttgcagaacgtgtg

SEQ ID NO: 4568011 - DNA, 25 bp, Homo sapien
gaggctcttcggtaagtgatataaa

SEQ ID NO: 4568012 - DNA, 25 bp, Homo sapien
gacagccaacgtattctgagtcatg

SEQ ID NO: 4568013 - DNA, 25 bp, Homo sapien
aataatacatatgtcagtgacagcc

SEQ ID NO: 4568014 - DNA, 25 bp, Homo sapien
tttcagaggctcttcggtaagtgat

SEQ ID NO: 4568015 - DNA, 25 bp, Homo sapien
tttcacaaccctgtttcaatctttc

SEQ ID NO: 4568016 - DNA, 25 bp, Homo sapien
ggcgcccatagggagtactctgaat

SEQ ID NO: 4568017 - DNA, 25 bp, Homo sapien
cccatagggagtactctgaataatt

SEQ ID NO: 4568018 - DNA, 25 bp, Homo sapien
taatatttgcggggcgcccataggg

SEQ ID NO: 4568019 - DNA, 25 bp, Homo sapien
acgcaccactacaccacactaagtt

SEQ ID NO: 4568020 - DNA, 25 bp, Homo sapien
accactacaccacactaagtttgtg

SEQ ID NO: 4568021 - DNA, 25 bp, Homo sapien
cactacaccacactaagtttgtgtt

SEQ ID NO: 4568022 - DNA, 25 bp, Homo sapien
ctacaccacactaagtttgtgtttt

SEQ ID NO: 4568023 - DNA, 25 bp, Homo sapien
taagatcagctgacaatccagttgg

SEQ ID NO: 4568024 - DNA, 25 bp, Homo sapien
tctgtggccccacaagacttccatt

SEQ ID NO: 4568025 - DNA, 25 bp, Homo sapien
tatagcaaaggtaaatctgtggccc

SEQ ID NO: 4568026 - DNA, 25 bp, Homo sapien
caatacagatataatcctgtgggac

SEQ ID NO: 4568027 - DNA, 25 bp, Homo sapien
cacagtcgttcagtaaacgctttta

SEQ ID NO: 4568028 - DNA, 25 bp, Homo sapien
gaatctcctgaatccgggaagctga

SEQ ID NO: 4568029 - DNA, 25 bp, Homo sapien
aataaatgcacagtcgttcagtaaa

SEQ ID NO: 4568030 - DNA, 25 bp, Homo sapien
aatctcctgaatccgggaagctgag

SEQ ID NO: 4568031 - DNA, 25 bp, Homo sapien
aaaagatgacagatttcaatgtgtg

SEQ ID NO: 4568032 - DNA, 25 bp, Homo sapien
gatttcaatgtgtgaactccgcagc

SEQ ID NO: 4568033 - DNA, 25 bp, Homo sapien
tgacagatttcaatgtgtgaactcc

SEQ ID NO: 4568034 - DNA, 25 bp, Homo sapien
aatgtgtgaactccgcagcctcaga

SEQ ID NO: 4568035 - DNA, 25 bp, Homo sapien
agagaccaggtttctccatattggt

SEQ ID NO: 4568036 - DNA, 25 bp, Homo sapien
cgggattacaggcatgtgccaccat

SEQ ID NO: 4568037 - DNA, 25 bp, Homo sapien
caccatgcccagctaattttgtatt

SEQ ID NO: 4568038 - DNA, 25 bp, Homo sapien
cccaacctcaggtgagctgcctgcc

SEQ ID NO: 4568039 - DNA, 25 bp, Homo sapien
aaaagaagaaagttagtgccaggca

SEQ ID NO: 4568040 - DNA, 25 bp, Homo sapien
aagaaagttagtgccaggcagggtg

SEQ ID NO: 4568041 - DNA, 25 bp, Homo sapien
agaagaaagttagtgccaggcaggg

SEQ ID NO: 4568042 - DNA, 25 bp, Homo sapien
aagaagaaagttagtgccaggcagg

SEQ ID NO: 4568043 - DNA, 25 bp, Homo sapien
gagagtgatcatccattaaatccca

SEQ ID NO: 4568044 - DNA, 25 bp, Homo sapien
cagtatgggcaattttgcatctgca

SEQ ID NO: 4568045 - DNA, 25 bp, Homo sapien
cagcagacagtgagggatactacac

SEQ ID NO: 4568046 - DNA, 25 bp, Homo sapien
cacgaaagctgcaaaaataggccag

SEQ ID NO: 4568047 - DNA, 25 bp, Homo sapien
taatgctacagaactacagtgagga

SEQ ID NO: 4568048 - DNA, 25 bp, Homo sapien
tcacccagaaattaggttgcagctg

SEQ ID NO: 4568049 - DNA, 25 bp, Homo sapien
tccagaccgaaaataagtggacaac

SEQ ID NO: 4568050 - DNA, 25 bp, Homo sapien
tatttactcaatggatgaggtcagc

SEQ ID NO: 4568051 - DNA, 25 bp, Homo sapien
cctggcaaatagtatatggtgaata

SEQ ID NO: 4568052 - DNA, 25 bp, Homo sapien
ttggcacaaagactcattctgtcac

SEQ ID NO: 4568053 - DNA, 25 bp, Homo sapien
gtatatggtgaatatctgttaaatg

SEQ ID NO: 4568054 - DNA, 25 bp, Homo sapien
taagttccatgagggtacagatttt

SEQ ID NO: 4568055 - DNA, 25 bp, Homo sapien
agaaaggaatctacagcaaaatagc

SEQ ID NO: 4568056 - DNA, 25 bp, Homo sapien
gaaatcagttctccgtatctcaggt

SEQ ID NO: 4568057 - DNA, 25 bp, Homo sapien
tcaaatcagtgtggagtgtagtggc

SEQ ID NO: 4568058 - DNA, 25 bp, Homo sapien
gcagggcttcatacaagttagtcac

SEQ ID NO: 4568059 - DNA, 25 bp, Homo sapien
cacaggtcgagaaatagtacattaa

SEQ ID NO: 4568060 - DNA, 25 bp, Homo sapien
tcacaaacacctcacaggtcgagaa

SEQ ID NO: 4568061 - DNA, 25 bp, Homo sapien
tgatctgcccgtgccggcatcccaa

SEQ ID NO: 4568062 - DNA, 25 bp, Homo sapien
gaaaatgtacaactccaggaattat

SEQ ID NO: 4568063 - DNA, 25 bp, Homo sapien
tttctgctcacacttgcatgtggcc

SEQ ID NO: 4568064 - DNA, 25 bp, Homo sapien
cacacttgcatgtggccaaacagat

SEQ ID NO: 4568065 - DNA, 25 bp, Homo sapien
ttacttacaaggagcttattcctat

SEQ ID NO: 4568066 - DNA, 25 bp, Homo sapien
tgcttaaatgatcaccaagaaactg

SEQ ID NO: 4568067 - DNA, 25 bp, Homo sapien
gaaaataattgtagaagcgtaacta

SEQ ID NO: 4568068 - DNA, 25 bp, Homo sapien
ggtaagccgctctaattctttacag

SEQ ID NO: 4568069 - DNA, 25 bp, Homo sapien
gcagttatttcgaatattagtcaca

SEQ ID NO: 4568070 - DNA, 25 bp, Homo sapien
cagttatttcgaatattagtcacat

SEQ ID NO: 4568071 - DNA, 25 bp, Homo sapien
ccagcagttatttcgaatattagtc

SEQ ID NO: 4568072 - DNA, 25 bp, Homo sapien
tatttcgaatattagtcacataatc

SEQ ID NO: 4568073 - DNA, 25 bp, Homo sapien
tttaatagtttgccctgttccagat

SEQ ID NO: 4568074 - DNA, 25 bp, Homo sapien
ggatagaaggaataaggaggattac

SEQ ID NO: 4568075 - DNA, 25 bp, Homo sapien
ctgggatagaaggaataaggaggat

SEQ ID NO: 4568076 - DNA, 25 bp, Homo sapien
tagaaggaataaggaggattacaga

SEQ ID NO: 4568077 - DNA, 25 bp, Homo sapien
agaaggaataaggaggattacagac

SEQ ID NO: 4568078 - DNA, 25 bp, Homo sapien
ttaataatgacacgaggatcaatac

SEQ ID NO: 4568079 - DNA, 25 bp, Homo sapien
atgacacgaggatcaatacaattat

SEQ ID NO: 4568080 - DNA, 25 bp, Homo sapien
taatgacacgaggatcaatacaatt

SEQ ID NO: 4568081 - DNA, 25 bp, Homo sapien
gcttaataatgacacgaggatcaat

SEQ ID NO: 4568082 - DNA, 25 bp, Homo sapien
gaaaaagaatgtatactacctgaag

SEQ ID NO: 4568083 - DNA, 25 bp, Homo sapien
taaatctgccattgttttggtggtt

SEQ ID NO: 4568084 - DNA, 25 bp, Homo sapien
gaaattaaatctgccattgttttgg

SEQ ID NO: 4568085 - DNA, 25 bp, Homo sapien
aattaaatctgccattgttttggtg

SEQ ID NO: 4568086 - DNA, 25 bp, Homo sapien
tggaaattaaatctgccattgtttt

SEQ ID NO: 4568087 - DNA, 25 bp, Homo sapien
gcttgttcttcattgcccgtgaggt

SEQ ID NO: 4568088 - DNA, 25 bp, Homo sapien
atgcttgttcttcattgcccgtgag

SEQ ID NO: 4568089 - DNA, 25 bp, Homo sapien
ttgttcttcattgcccgtgaggtca

SEQ ID NO: 4568090 - DNA, 25 bp, Homo sapien
ttcttcattgcccgtgaggtcatac

SEQ ID NO: 4568091 - DNA, 25 bp, Homo sapien
acagcataagcattcccaacctttt

SEQ ID NO: 4568092 - DNA, 25 bp, Homo sapien
aacagcataagcattcccaaccttt

SEQ ID NO: 4568093 - DNA, 25 bp, Homo sapien
cttctcgcggttgccagcattcaga

SEQ ID NO: 4568094 - DNA, 25 bp, Homo sapien
gagcctcctggacgatgtcgacaca

SEQ ID NO: 4568095 - DNA, 25 bp, Homo sapien
tttatatttgtttatgcgcaggcca

SEQ ID NO: 4568096 - DNA, 25 bp, Homo sapien
tgtttatgcgcaggccaagggcagt

SEQ ID NO: 4568097 - DNA, 25 bp, Homo sapien
caattatagctcaccttaacttcga

SEQ ID NO: 4568098 - DNA, 25 bp, Homo sapien
cacacagcccatatgtttactttaa

SEQ ID NO: 4568099 - DNA, 25 bp, Homo sapien
cacacacagcccatatgtttacttt

SEQ ID NO: 4568100 - DNA, 25 bp, Homo sapien
gctcaccttaacttcgaactccttg

SEQ ID NO: 4568101 - DNA, 25 bp, Homo sapien
tcccaaagtactagcattatgggtg

SEQ ID NO: 4568102 - DNA, 25 bp, Homo sapien
ctcccaaagtactagcattatgggt

SEQ ID NO: 4568103 - DNA, 25 bp, Homo sapien
cccaaagtactagcattatgggtgt

SEQ ID NO: 4568104 - DNA, 25 bp, Homo sapien
tcagttactacaattttgaccaaaa

SEQ ID NO: 4568105 - DNA, 25 bp, Homo sapien
gagattaatagggaatttcttagac

SEQ ID NO: 4568106 - DNA, 25 bp, Homo sapien
ttctggtgtccagaaaaaatgagag

SEQ ID NO: 4568107 - DNA, 25 bp, Homo sapien
tatgagtaagtatgaataaaattct

SEQ ID NO: 4568108 - DNA, 25 bp, Homo sapien
caccactgtttatgggacaggcaga

SEQ ID NO: 4568109 - DNA, 25 bp, Homo sapien
ttgtccagcgtcaatctcccaagag

SEQ ID NO: 4568110 - DNA, 25 bp, Homo sapien
ttggacctcctagaaagactaatgg

SEQ ID NO: 4568111 - DNA, 25 bp, Homo sapien
taatgacatattgcgggctcgagag

SEQ ID NO: 4568112 - DNA, 25 bp, Homo sapien
gacagctcccctttaagaaaacaga

SEQ ID NO: 4568113 - DNA, 25 bp, Homo sapien
tctaaaagtgctgtacatggacgat

SEQ ID NO: 4568114 - DNA, 25 bp, Homo sapien
catggacgatgggactgaacaaata

SEQ ID NO: 4568115 - DNA, 25 bp, Homo sapien
taatagatgtcagatggcgtgagcc

SEQ ID NO: 4568116 - DNA, 25 bp, Homo sapien
ggagcataactaaacatacttggag

SEQ ID NO: 4568117 - DNA, 25 bp, Homo sapien
cactgaaacacttcctcatggtctc

SEQ ID NO: 4568118 - DNA, 25 bp, Homo sapien
acttggagaaagtacattggaaagc

SEQ ID NO: 4568119 - DNA, 25 bp, Homo sapien
ggtccatattggtcactgttcaaga

SEQ ID NO: 4568120 - DNA, 25 bp, Homo sapien
taaaagataaactagaaggatacaa

SEQ ID NO: 4568121 - DNA, 25 bp, Homo sapien
gaacaaaagggactttaacatgatc

SEQ ID NO: 4568122 - DNA, 25 bp, Homo sapien
ataaagttctacattgctcttttag

SEQ ID NO: 4568123 - DNA, 25 bp, Homo sapien
tacaaatcaaattcattacaacaat

SEQ ID NO: 4568124 - DNA, 25 bp, Homo sapien
ttttagaagttgtatccaccatata

SEQ ID NO: 4568125 - DNA, 25 bp, Homo sapien
cctcatagggcctaatcacttctta

SEQ ID NO: 4568126 - DNA, 25 bp, Homo sapien
gattatcattaatttcaccattccc

SEQ ID NO: 4568127 - DNA, 25 bp, Homo sapien
cattcccatactataatgcatttga

SEQ ID NO: 4568128 - DNA, 25 bp, Homo sapien
ccgcacgcgcggtagcggaacacga

SEQ ID NO: 4568129 - DNA, 25 bp, Homo sapien
agctggctcccgtgcgagcagcgga

SEQ ID NO: 4568130 - DNA, 25 bp, Homo sapien
agagcggcgccggaatcccgcacgc

SEQ ID NO: 4568131 - DNA, 25 bp, Homo sapien
cagcggatcgagctcggagagcggc

SEQ ID NO: 4568132 - DNA, 25 bp, Homo sapien
tcagtcagacgggactccccctccc

SEQ ID NO: 4568133 - DNA, 25 bp, Homo sapien
gcctccgcggccaccgcgaccggcg

SEQ ID NO: 4568134 - DNA, 25 bp, Homo sapien
tccgcctctttctccgactctagcc

SEQ ID NO: 4568135 - DNA, 25 bp, Homo sapien
tttctccgactctagcctccgcggc

SEQ ID NO: 4568136 - DNA, 25 bp, Homo sapien
tattggtactcgataaatgatgatc

SEQ ID NO: 4568137 - DNA, 25 bp, Homo sapien
tactcgataaatgatgatcaactgt

SEQ ID NO: 4568138 - DNA, 25 bp, Homo sapien
tggtactcgataaatgatgatcaac

SEQ ID NO: 4568139 - DNA, 25 bp, Homo sapien
cttattggtactcgataaatgatga

SEQ ID NO: 4568140 - DNA, 25 bp, Homo sapien
actgcctccacaggggcatatgtga

SEQ ID NO: 4568141 - DNA, 25 bp, Homo sapien
cattcacggctgcatccactgcctc

SEQ ID NO: 4568142 - DNA, 25 bp, Homo sapien
gctctttcatccaccttgcgtggcc

SEQ ID NO: 4568143 - DNA, 25 bp, Homo sapien
tctgtttccacagctctttcatcca

SEQ ID NO: 4568144 - DNA, 25 bp, Homo sapien
gattcagagtccagagtgctaacca

SEQ ID NO: 4568145 - DNA, 25 bp, Homo sapien
caggttccaccgagatttgaactcg

SEQ ID NO: 4568146 - DNA, 25 bp, Homo sapien
tttgaactcggatcgctggattcag

SEQ ID NO: 4568147 - DNA, 25 bp, Homo sapien
tgaactcggatcgctggattcagag

SEQ ID NO: 4568148 - DNA, 25 bp, Homo sapien
gcaggtttgtgataattggatgtcc

SEQ ID NO: 4568149 - DNA, 25 bp, Homo sapien
caggatatctttttagcatgaacac

SEQ ID NO: 4568150 - DNA, 25 bp, Homo sapien
ctcaagttatacacttttggcagga

SEQ ID NO: 4568151 - DNA, 25 bp, Homo sapien
aatatgtccaggatatctttttagc

SEQ ID NO: 4568152 - DNA, 25 bp, Homo sapien
cagtgctgtcagaacatctaaggca

SEQ ID NO: 4568153 - DNA, 25 bp, Homo sapien
tcccctagaaggctgtgtatagtcc

SEQ ID NO: 4568154 - DNA, 25 bp, Homo sapien
tcagacagacgcgaaaatgacatgt

SEQ ID NO: 4568155 - DNA, 25 bp, Homo sapien
cacttgtcccgaatgactgcagctt

SEQ ID NO: 4568156 - DNA, 25 bp, Homo sapien
taatttctgctcaagtggtaccact

SEQ ID NO: 4568157 - DNA, 25 bp, Homo sapien
cacttgaagctcagacctattggtc

SEQ ID NO: 4568158 - DNA, 25 bp, Homo sapien
cacagagcagcttataggtaataca

SEQ ID NO: 4568159 - DNA, 25 bp, Homo sapien
tgtggtattccatctcgggtgcctc

SEQ ID NO: 4568160 - DNA, 25 bp, Homo sapien
tttgggttgcccatcagagctggtc

SEQ ID NO: 4568161 - DNA, 25 bp, Homo sapien
gctagtgaccttacatcagtgatct

SEQ ID NO: 4568162 - DNA, 25 bp, Homo sapien
tataagaagaggtgccagctagtga

SEQ ID NO: 4568163 - DNA, 25 bp, Homo sapien
tcctgaatagttagccatggtgcct

SEQ ID NO: 4568164 - DNA, 25 bp, Homo sapien
gtctttcatcatatgggccgaagaa

SEQ ID NO: 4568165 - DNA, 25 bp, Homo sapien
tgccagtctttcatcatatgggccg

SEQ ID NO: 4568166 - DNA, 25 bp, Homo sapien
ctatgccagtctttcatcatatggg

SEQ ID NO: 4568167 - DNA, 25 bp, Homo sapien
cagtctttcatcatatgggccgaag

SEQ ID NO: 4568168 - DNA, 25 bp, Homo sapien
catctgaatactgggatctggagca

SEQ ID NO: 4568169 - DNA, 25 bp, Homo sapien
caaagtattgtgttccatggcaggc

SEQ ID NO: 4568170 - DNA, 25 bp, Homo sapien
cacttgctgccctgaaatactgagg

SEQ ID NO: 4568171 - DNA, 25 bp, Homo sapien
cagagagggcgactaacttgaccag

SEQ ID NO: 4568172 - DNA, 25 bp, Homo sapien
gagttatgaccgcaaccttcttgga

SEQ ID NO: 4568173 - DNA, 25 bp, Homo sapien
ttcttggaccacactgactgtgggc

SEQ ID NO: 4568174 - DNA, 25 bp, Homo sapien
ttaagattgcttgtcctgggacggc

SEQ ID NO: 4568175 - DNA, 25 bp, Homo sapien
tcctaggtaggtcgtatgcattctg

SEQ ID NO: 4568176 - DNA, 25 bp, Homo sapien
gtgaatgtgctgtcaacatccaagc

SEQ ID NO: 4568177 - DNA, 25 bp, Homo sapien
aatacatgagggttaggactgaggc

SEQ ID NO: 4568178 - DNA, 25 bp, Homo sapien
tagctttggttgccttgttggagag

SEQ ID NO: 4568179 - DNA, 25 bp, Homo sapien
aaggagccagggatttataaatcta

SEQ ID NO: 4568180 - DNA, 25 bp, Homo sapien
ccacccccagtatttgtttcatatt

SEQ ID NO: 4568181 - DNA, 25 bp, Homo sapien
gacttgttgatgtctctgattgctt

SEQ ID NO: 4568182 - DNA, 25 bp, Homo sapien
agaaggtgatttagagacttgttga

SEQ ID NO: 4568183 - DNA, 25 bp, Homo sapien
taaaatgagatttgtatcaacaatc

SEQ ID NO: 4568184 - DNA, 25 bp, Homo sapien
gatggcacatctgtgtacggagacc

SEQ ID NO: 4568185 - DNA, 25 bp, Homo sapien
cactgctattcaaggaacaagtact

SEQ ID NO: 4568186 - DNA, 25 bp, Homo sapien
ctgcacacggattctttcatgtaat

SEQ ID NO: 4568187 - DNA, 25 bp, Homo sapien
tgtggcgtaagggttttcactgcta

SEQ ID NO: 4568188 - DNA, 25 bp, Homo sapien
ctaaagggaggccagatataggccc

SEQ ID NO: 4568189 - DNA, 25 bp, Homo sapien
aagggaggccagatataggcccaga

SEQ ID NO: 4568190 - DNA, 25 bp, Homo sapien
cagatgctggttgacttttatttca

SEQ ID NO: 4568191 - DNA, 25 bp, Homo sapien
tcaaatgctgcactagtgccctgat

SEQ ID NO: 4568192 - DNA, 25 bp, Homo sapien
ggtggtaagtccaagaaccccagca

SEQ ID NO: 4568193 - DNA, 25 bp, Homo sapien
ccacataaatttgccccttagaggg

SEQ ID NO: 4568194 - DNA, 25 bp, Homo sapien
ggttctctgaactcaccagccaagg

SEQ ID NO: 4568195 - DNA, 25 bp, Homo sapien
caaggagtaaggcaataaggcacag

SEQ ID NO: 4568196 - DNA, 25 bp, Homo sapien
gaatcaattgttggctctggagcag

SEQ ID NO: 4568197 - DNA, 25 bp, Homo sapien
gggaagtatcttccatacaggagca

SEQ ID NO: 4568198 - DNA, 25 bp, Homo sapien
cactacgtgtcttgttatccagggc

SEQ ID NO: 4568199 - DNA, 25 bp, Homo sapien
gaacctcggccagttgatagtgcct

SEQ ID NO: 4568200 - DNA, 25 bp, Homo sapien
tttgttctccagctgagtcatccac

SEQ ID NO: 4568201 - DNA, 25 bp, Homo sapien
tgttctccagctgagtcatccacct

SEQ ID NO: 4568202 - DNA, 25 bp, Homo sapien
ctcaggaagccactttgttctccag

SEQ ID NO: 4568203 - DNA, 25 bp, Homo sapien
actttgttctccagctgagtcatcc

SEQ ID NO: 4568204 - DNA, 25 bp, Homo sapien
tgaggtgccaggtcatagtcacgaa

SEQ ID NO: 4568205 - DNA, 25 bp, Homo sapien
gattgcgaatctgaaagtaaccacc

SEQ ID NO: 4568206 - DNA, 25 bp, Homo sapien
taacaaaggccgatagtgactcagc

SEQ ID NO: 4568207 - DNA, 25 bp, Homo sapien
gactagaacggtaatcagggacatc

SEQ ID NO: 4568208 - DNA, 25 bp, Homo sapien
cagtccagtctaaggtcacagttaa

SEQ ID NO: 4568209 - DNA, 25 bp, Homo sapien
cacattccggcatttaaacctaggg

SEQ ID NO: 4568210 - DNA, 25 bp, Homo sapien
ttaatgagcaacagagtggcaagtg

SEQ ID NO: 4568211 - DNA, 25 bp, Homo sapien
gagccttggaaagctcacagtccag

SEQ ID NO: 4568212 - DNA, 25 bp, Homo sapien
gagggatgatccaacttgcagttcc

SEQ ID NO: 4568213 - DNA, 25 bp, Homo sapien
ttgctagtgcaacgacaggaggcct

SEQ ID NO: 4568214 - DNA, 25 bp, Homo sapien
catttccgaagacatttagttggca

SEQ ID NO: 4568215 - DNA, 25 bp, Homo sapien
cctgtagacttcctagagggatgat

SEQ ID NO: 4568216 - DNA, 25 bp, Homo sapien
aagacagcaggattggatactctac

SEQ ID NO: 4568217 - DNA, 25 bp, Homo sapien
ctaagccctctgtaataagacagca

SEQ ID NO: 4568218 - DNA, 25 bp, Homo sapien
gccctctgtaataagacagcaggat

SEQ ID NO: 4568219 - DNA, 25 bp, Homo sapien
aagccctctgtaataagacagcagg

SEQ ID NO: 4568220 - DNA, 25 bp, Homo sapien
tctgacgtctatccattccacaagc

SEQ ID NO: 4568221 - DNA, 25 bp, Homo sapien
tttgaagcctttgtccataatgtat

SEQ ID NO: 4568222 - DNA, 25 bp, Homo sapien
gaagcctttgtccataatgtatgtg

SEQ ID NO: 4568223 - DNA, 25 bp, Homo sapien
tgtatgtgttctgacgtctatccat

SEQ ID NO: 4568224 - DNA, 25 bp, Homo sapien
tggtcctgtctgtcctctcctggat

SEQ ID NO: 4568225 - DNA, 25 bp, Homo sapien
ctgtctgtcctctcctggatccaag

SEQ ID NO: 4568226 - DNA, 25 bp, Homo sapien
gtcctctcctggatccaaggcttat

SEQ ID NO: 4568227 - DNA, 25 bp, Homo sapien
tcagctctggtcctgtctgtcctct

SEQ ID NO: 4568228 - DNA, 25 bp, Homo sapien
agtgtggctcagcggggcggctgag

SEQ ID NO: 4568229 - DNA, 25 bp, Homo sapien
gagtgtggctcagcggggcggctga

SEQ ID NO: 4568230 - DNA, 25 bp, Homo sapien
tgagtgtggctcagcggggcggctg

SEQ ID NO: 4568231 - DNA, 25 bp, Homo sapien
ggtacctggcctccagggcactgat

SEQ ID NO: 4568232 - DNA, 25 bp, Homo sapien
tcaatgtagaagtcctcgggcgggt

SEQ ID NO: 4568233 - DNA, 25 bp, Homo sapien
caatgtagaagtcctcgggcgggta

SEQ ID NO: 4568234 - DNA, 25 bp, Homo sapien
gggcgggtacctggcctccagggca

SEQ ID NO: 4568235 - DNA, 25 bp, Homo sapien
ctctgtcaagggacttgttactgag

SEQ ID NO: 4568236 - DNA, 25 bp, Homo sapien
ctaacacgttcacatagctgtaggg

SEQ ID NO: 4568237 - DNA, 25 bp, Homo sapien
cacatagctgtagggggtccagcct

SEQ ID NO: 4568238 - DNA, 25 bp, Homo sapien
tgtctctgtcaagggacttgttact

SEQ ID NO: 4568239 - DNA, 25 bp, Homo sapien
ctgggtcctaggccgttgagagaaa

SEQ ID NO: 4568240 - DNA, 25 bp, Homo sapien
gtgttccatgacaggccaccatggt

SEQ ID NO: 4568241 - DNA, 25 bp, Homo sapien
agaaagggcgagctaggtgttccat

SEQ ID NO: 4568242 - DNA, 25 bp, Homo sapien
tgttccatgacaggccaccatggtg

SEQ ID NO: 4568243 - DNA, 25 bp, Homo sapien
catgccagtgcgtggtagctggaat

SEQ ID NO: 4568244 - DNA, 25 bp, Homo sapien
tcctgtccagagtgctggcctggct

SEQ ID NO: 4568245 - DNA, 25 bp, Homo sapien
gaattggaaaagcagtgggcatggc

SEQ ID NO: 4568246 - DNA, 25 bp, Homo sapien
ggctgttcctgtccagagtgctggc

SEQ ID NO: 4568247 - DNA, 25 bp, Homo sapien
catgtccctgagtccctatttaggg

SEQ ID NO: 4568248 - DNA, 25 bp, Homo sapien
tgtttgctttgatagccttacatgt

SEQ ID NO: 4568249 - DNA, 25 bp, Homo sapien
gatagccttacatgtccctgagtcc

SEQ ID NO: 4568250 - DNA, 25 bp, Homo sapien
gagtccctatttagggctggactca

SEQ ID NO: 4568251 - DNA, 25 bp, Homo sapien
gagtagtcggtgctggtcatcctca

SEQ ID NO: 4568252 - DNA, 25 bp, Homo sapien
cgccgccgatgccaggcaaataggc

SEQ ID NO: 4568253 - DNA, 25 bp, Homo sapien
gtgccgctctgcacccagtgctggg

SEQ ID NO: 4568254 - DNA, 25 bp, Homo sapien
agcatgatgcctgtgacagcaccca

SEQ ID NO: 4568255 - DNA, 25 bp, Homo sapien
gggctggccttcttgcgcttcaggt

SEQ ID NO: 4568256 - DNA, 25 bp, Homo sapien
gcctgggttcagatgcgtgtaaccc

SEQ ID NO: 4568257 - DNA, 25 bp, Homo sapien
ctaatgttaggagatctggttctgg

SEQ ID NO: 4568258 - DNA, 25 bp, Homo sapien
gccttcttgcgcttcaggtctcctg

SEQ ID NO: 4568259 - DNA, 25 bp, Homo sapien
taacaggtgccggtgacatggtcac

SEQ ID NO: 4568260 - DNA, 25 bp, Homo sapien
gacacccatagccaaaggttcctgg

SEQ ID NO: 4568261 - DNA, 25 bp, Homo sapien
atgcactcacatagctgctgacacc

SEQ ID NO: 4568262 - DNA, 25 bp, Homo sapien
cttggtcacacctgattcctttgaa

SEQ ID NO: 4568263 - DNA, 25 bp, Homo sapien
attctgacactggcatacgcgccca

SEQ ID NO: 4568264 - DNA, 25 bp, Homo sapien
tgcacttgccactgatgtggtcaca

SEQ ID NO: 4568265 - DNA, 25 bp, Homo sapien
agtgttgcccggtgaagcctgtgcg

SEQ ID NO: 4568266 - DNA, 25 bp, Homo sapien
tgaagcctgtgcggcaggtgcactt

SEQ ID NO: 4568267 - DNA, 25 bp, Homo sapien
ggatttccagtcacgagagttgctg

SEQ ID NO: 4568268 - DNA, 25 bp, Homo sapien
aggatttccagtcacgagagttgct

SEQ ID NO: 4568269 - DNA, 25 bp, Homo sapien
cacagtggccagtaggccgcagcat

SEQ ID NO: 4568270 - DNA, 25 bp, Homo sapien
ggagtcaggtaccaccagtcctggg

SEQ ID NO: 4568271 - DNA, 25 bp, Homo sapien
cagcatggtattctaagtggctggg

SEQ ID NO: 4568272 - DNA, 25 bp, Homo sapien
gctggtctggacaatgcccacagtg

SEQ ID NO: 4568273 - DNA, 25 bp, Homo sapien
tgcagtggcaggccccgtcctcggc

SEQ ID NO: 4568274 - DNA, 25 bp, Homo sapien
gtggcaggccccgtcctcggcgctg

SEQ ID NO: 4568275 - DNA, 25 bp, Homo sapien
ggcgctgcagctcgccccgttgtgg

SEQ ID NO: 4568276 - DNA, 25 bp, Homo sapien
tgtgtgcagaagagtccagtccagc

SEQ ID NO: 4568277 - DNA, 25 bp, Homo sapien
tgcatgcgtggaagcaggcggggcc

SEQ ID NO: 4568278 - DNA, 25 bp, Homo sapien
gcatgcgtggaagcaggcggggccc

SEQ ID NO: 4568279 - DNA, 25 bp, Homo sapien
atgcgtggaagcaggcggggcccca

SEQ ID NO: 4568280 - DNA, 25 bp, Homo sapien
ctgcatgcgtggaagcaggcggggc

SEQ ID NO: 4568281 - DNA, 25 bp, Homo sapien
caggtcccgttgttggcacaggagc

SEQ ID NO: 4568282 - DNA, 25 bp, Homo sapien
agcactggcaggagccatcgatagg

SEQ ID NO: 4568283 - DNA, 25 bp, Homo sapien
cagtcctgcccaaagtatcctccag

SEQ ID NO: 4568284 - DNA, 25 bp, Homo sapien
gagccatcgatagggctgcaggtcc

SEQ ID NO: 4568285 - DNA, 25 bp, Homo sapien
ttggaggattttggtcacagacctt

SEQ ID NO: 4568286 - DNA, 25 bp, Homo sapien
aggattttggtcacagaccttcctg

SEQ ID NO: 4568287 - DNA, 25 bp, Homo sapien
ggaggattttggtcacagaccttcc

SEQ ID NO: 4568288 - DNA, 25 bp, Homo sapien
gattttggtcacagaccttcctgga

SEQ ID NO: 4568289 - DNA, 25 bp, Homo sapien
tgaagtcctgcatggtccatggagc

SEQ ID NO: 4568290 - DNA, 25 bp, Homo sapien
cttcacccaaatccacactgtcttg

SEQ ID NO: 4568291 - DNA, 25 bp, Homo sapien
gctgttccctgtagcatgcccatgt

SEQ ID NO: 4568292 - DNA, 25 bp, Homo sapien
ttccacctttcaagctaaggcccag

SEQ ID NO: 4568293 - DNA, 25 bp, Homo sapien
ctgagtggtagcagttcttggagtc

SEQ ID NO: 4568294 - DNA, 25 bp, Homo sapien
ggtggaacaccaatgcaaataagct

SEQ ID NO: 4568295 - DNA, 25 bp, Homo sapien
tctgaggtcaagtcaggaaagcata

SEQ ID NO: 4568296 - DNA, 25 bp, Homo sapien
acaaagagctggtagggtggaacac

SEQ ID NO: 4568297 - DNA, 25 bp, Homo sapien
agtaccttcccactggagacagtac

SEQ ID NO: 4568298 - DNA, 25 bp, Homo sapien
ctccccacccagtaccttcccactg

SEQ ID NO: 4568299 - DNA, 25 bp, Homo sapien
ccagtaccttcccactggagacagt

SEQ ID NO: 4568300 - DNA, 25 bp, Homo sapien
ccacccagtaccttcccactggaga

SEQ ID NO: 4568301 - DNA, 25 bp, Homo sapien
ccagagaatcctgggaggcactcac

SEQ ID NO: 4568302 - DNA, 25 bp, Homo sapien
cttggttgcagagagctccagagaa

SEQ ID NO: 4568303 - DNA, 25 bp, Homo sapien
gctccagagaatcctgggaggcact

SEQ ID NO: 4568304 - DNA, 25 bp, Homo sapien
agagctccagagaatcctgggaggc

SEQ ID NO: 4568305 - DNA, 25 bp, Homo sapien
ggcgcagccgtggccatagaaccca

SEQ ID NO: 4568306 - DNA, 25 bp, Homo sapien
cgtggccatagaacccaggggggca

SEQ ID NO: 4568307 - DNA, 25 bp, Homo sapien
gtggccatagaacccaggggggcag

SEQ ID NO: 4568308 - DNA, 25 bp, Homo sapien
gcagccgtggccatagaacccaggg

SEQ ID NO: 4568309 - DNA, 25 bp, Homo sapien
agcggccaggtggacacgtgctgtc

SEQ ID NO: 4568310 - DNA, 25 bp, Homo sapien
cagcggccaggtggacacgtgctgt

SEQ ID NO: 4568311 - DNA, 25 bp, Homo sapien
cccagcggccaggtggacacgtgct

SEQ ID NO: 4568312 - DNA, 25 bp, Homo sapien
gcggccaggtggacacgtgctgtca

SEQ ID NO: 4568313 - DNA, 25 bp, Homo sapien
gggtggtggcacagcaagggaaggt

SEQ ID NO: 4568314 - DNA, 25 bp, Homo sapien
tggtggcacagcaagggaaggttac

SEQ ID NO: 4568315 - DNA, 25 bp, Homo sapien
ctgggtggtggcacagcaagggaag

SEQ ID NO: 4568316 - DNA, 25 bp, Homo sapien
gtggtggcacagcaagggaaggtta

SEQ ID NO: 4568317 - DNA, 25 bp, Homo sapien
ctgtgacggggtcacatccatcagc

SEQ ID NO: 4568318 - DNA, 25 bp, Homo sapien
tgcagttcagcccaaatgtgccatc

SEQ ID NO: 4568319 - DNA, 25 bp, Homo sapien
tgtgacggggtcacatccatcagca

SEQ ID NO: 4568320 - DNA, 25 bp, Homo sapien
agctctcgttgcagttcaggcccca

SEQ ID NO: 4568321 - DNA, 25 bp, Homo sapien
ggccccacgtcccactgggacatgg

SEQ ID NO: 4568322 - DNA, 25 bp, Homo sapien
caggagccgtctatggggctgcagg

SEQ ID NO: 4568323 - DNA, 25 bp, Homo sapien
acgtcccactgggacatggcagggt

SEQ ID NO: 4568324 - DNA, 25 bp, Homo sapien
cagctacagatggacgagcagttgg

SEQ ID NO: 4568325 - DNA, 25 bp, Homo sapien
tacaggagccatctactggggagca

SEQ ID NO: 4568326 - DNA, 25 bp, Homo sapien
caccattgttacagctacagatgga

SEQ ID NO: 4568327 - DNA, 25 bp, Homo sapien
aggtgccaccattgttacagctaca

SEQ ID NO: 4568328 - DNA, 25 bp, Homo sapien
tgcacaggaaacggcacagacctct

SEQ ID NO: 4568329 - DNA, 25 bp, Homo sapien
ctgcacaggaaacggcacagacctc

SEQ ID NO: 4568330 - DNA, 25 bp, Homo sapien
cacaggaaacggcacagacctctcc

SEQ ID NO: 4568331 - DNA, 25 bp, Homo sapien
gcacaggaaacggcacagacctctc

SEQ ID NO: 4568332 - DNA, 25 bp, Homo sapien
tcttagcacctggaagttgatgctt

SEQ ID NO: 4568333 - DNA, 25 bp, Homo sapien
tctttctatcttcatctatccccat

SEQ ID NO: 4568334 - DNA, 25 bp, Homo sapien
ctctgaccctttcttagcacctgga

SEQ ID NO: 4568335 - DNA, 25 bp, Homo sapien
tgtctttctatcttcatctatcccc

SEQ ID NO: 4568336 - DNA, 25 bp, Homo sapien
gcacagagattgctgcggccactag

SEQ ID NO: 4568337 - DNA, 25 bp, Homo sapien
gcagaagccccatctatgctgaaga

SEQ ID NO: 4568338 - DNA, 25 bp, Homo sapien
agcccagaccccagtaatgagggta

SEQ ID NO: 4568339 - DNA, 25 bp, Homo sapien
taaagcatagatgccgcagatctgc

SEQ ID NO: 4568340 - DNA, 25 bp, Homo sapien
ggcattgggtctaccagggatttca

SEQ ID NO: 4568341 - DNA, 25 bp, Homo sapien
ctgctttaagggcattgggtctacc

SEQ ID NO: 4568342 - DNA, 25 bp, Homo sapien
cattgggtctaccagggatttcatt

SEQ ID NO: 4568343 - DNA, 25 bp, Homo sapien
taagggcattgggtctaccagggat

SEQ ID NO: 4568344 - DNA, 25 bp, Homo sapien
tgaacaggattccacttccaatgtc

SEQ ID NO: 4568345 - DNA, 25 bp, Homo sapien
gccaacagggcaggattcattgcag

SEQ ID NO: 4568346 - DNA, 25 bp, Homo sapien
gccatcgccatagtagccaacaggg

SEQ ID NO: 4568347 - DNA, 25 bp, Homo sapien
tcattgcagtggtgaccagaccagc

SEQ ID NO: 4568348 - DNA, 25 bp, Homo sapien
atgaagcccggagcacaagtgcagc

SEQ ID NO: 4568349 - DNA, 25 bp, Homo sapien
gcccttgtcccgggctcgcccattc

SEQ ID NO: 4568350 - DNA, 25 bp, Homo sapien
cttgtcccgggctcgcccattccca

SEQ ID NO: 4568351 - DNA, 25 bp, Homo sapien
ccgcccttgtcccgggctcgcccat

SEQ ID NO: 4568352 - DNA, 25 bp, Homo sapien
gtcccgggctcgcccattcccagct

SEQ ID NO: 4568353 - DNA, 25 bp, Homo sapien
tgagcactggaagccgaaggacccg

SEQ ID NO: 4568354 - DNA, 25 bp, Homo sapien
cacccgtggtgggtgaacactgccc

SEQ ID NO: 4568355 - DNA, 25 bp, Homo sapien
gcgtgggcccttgtagccaggctca

SEQ ID NO: 4568356 - DNA, 25 bp, Homo sapien
acactcgcaggcacccgtggtgggt

SEQ ID NO: 4568357 - DNA, 25 bp, Homo sapien
gtatccagctgtacagtggcactgt

SEQ ID NO: 4568358 - DNA, 25 bp, Homo sapien
ccccatgtatccagctgtacagtgg

SEQ ID NO: 4568359 - DNA, 25 bp, Homo sapien
catgtatccagctgtacagtggcac

SEQ ID NO: 4568360 - DNA, 25 bp, Homo sapien
tgtcccccatgtatccagctgtaca

SEQ ID NO: 4568361 - DNA, 25 bp, Homo sapien
ggcagggctgggcacacactgctcc

SEQ ID NO: 4568362 - DNA, 25 bp, Homo sapien
ctggtgggcagggctgggcacacac

SEQ ID NO: 4568363 - DNA, 25 bp, Homo sapien
tgggcagggctgggcacacactgct

SEQ ID NO: 4568364 - DNA, 25 bp, Homo sapien
ggtgggcagggctgggcacacactg

SEQ ID NO: 4568365 - DNA, 25 bp, Homo sapien
aacatgctggtatggagacgtgcac

SEQ ID NO: 4568366 - DNA, 25 bp, Homo sapien
tatacgaggtgctgtgtgagacact

SEQ ID NO: 4568367 - DNA, 25 bp, Homo sapien
gaagacatgcatggcggtgctccag

SEQ ID NO: 4568368 - DNA, 25 bp, Homo sapien
tttcctgggaatggcacacctgctg

SEQ ID NO: 4568369 - DNA, 25 bp, Homo sapien
ggaggtggtggactgtgtcgctgag

SEQ ID NO: 4568370 - DNA, 25 bp, Homo sapien
ggtggtggactgtgtcgctgagctt

SEQ ID NO: 4568371 - DNA, 25 bp, Homo sapien
ggtggactgtgtcgctgagcttccc

SEQ ID NO: 4568372 - DNA, 25 bp, Homo sapien
tggtggactgtgtcgctgagcttcc

SEQ ID NO: 4568373 - DNA, 25 bp, Homo sapien
ggtcaacattggctttgagacctga

SEQ ID NO: 4568374 - DNA, 25 bp, Homo sapien
tatatcagttttgtacttgggggaa

SEQ ID NO: 4568375 - DNA, 25 bp, Homo sapien
tttgagacctgaatttaggcccatg

SEQ ID NO: 4568376 - DNA, 25 bp, Homo sapien
tgagacctgaatttaggcccatgag

SEQ ID NO: 4568377 - DNA, 25 bp, Homo sapien
gcacactcgccagtgatgtggtggc

SEQ ID NO: 4568378 - DNA, 25 bp, Homo sapien
gggcaggcacactcgccagtgatgt

SEQ ID NO: 4568379 - DNA, 25 bp, Homo sapien
ttctgacaggggcagcgcagctcac

SEQ ID NO: 4568380 - DNA, 25 bp, Homo sapien
cagctcacagtgagctccatggctc

SEQ ID NO: 4568381 - DNA, 25 bp, Homo sapien
cagaggtgttagacacagcagcatt

SEQ ID NO: 4568382 - DNA, 25 bp, Homo sapien
agaagcagaggtgttagacacagca

SEQ ID NO: 4568383 - DNA, 25 bp, Homo sapien
cagtgctccagggttccctaggaat

SEQ ID NO: 4568384 - DNA, 25 bp, Homo sapien
agcagcattcagatcaggtggcagg

SEQ ID NO: 4568385 - DNA, 25 bp, Homo sapien
taggacttgggagctggccagacat

SEQ ID NO: 4568386 - DNA, 25 bp, Homo sapien
tagccaggtgcgcagaggcactcgc

SEQ ID NO: 4568387 - DNA, 25 bp, Homo sapien
gcatcccttgccgtgggtgccaggt

SEQ ID NO: 4568388 - DNA, 25 bp, Homo sapien
ttctggcactggcaccggttgctgc

SEQ ID NO: 4568389 - DNA, 25 bp, Homo sapien
actggcacggcagctggcatccctt

SEQ ID NO: 4568390 - DNA, 25 bp, Homo sapien
tattgccgtagcttccaccacagct

SEQ ID NO: 4568391 - DNA, 25 bp, Homo sapien
atctctattgccgtagcttccacca

SEQ ID NO: 4568392 - DNA, 25 bp, Homo sapien
cttcctcatctctattgccgtagct

SEQ ID NO: 4568393 - DNA, 25 bp, Homo sapien
ctcatctctattgccgtagcttcca

SEQ ID NO: 4568394 - DNA, 25 bp, Homo sapien
ttcaaccaggagtatcaccatcaac

SEQ ID NO: 4568395 - DNA, 25 bp, Homo sapien
caaccaggagtatcaccatcaacat

SEQ ID NO: 4568396 - DNA, 25 bp, Homo sapien
tcaaccaggagtatcaccatcaaca

SEQ ID NO: 4568397 - DNA, 25 bp, Homo sapien
tcaggtgcacaatcaaaaggccttt

SEQ ID NO: 4568398 - DNA, 25 bp, Homo sapien
gagctcgcagaggatttcaaggcaa

SEQ ID NO: 4568399 - DNA, 25 bp, Homo sapien
taatgagctcatggcgcaagctgtc

SEQ ID NO: 4568400 - DNA, 25 bp, Homo sapien
tgagcaaacaggaggtaggctcctc

SEQ ID NO: 4568401 - DNA, 25 bp, Homo sapien
acaggtggtgaccatcccagagctg

SEQ ID NO: 4568402 - DNA, 25 bp, Homo sapien
gagctggtatagaaatgccaggtgg

SEQ ID NO: 4568403 - DNA, 25 bp, Homo sapien
cctccaagggctttagtctcggcac

SEQ ID NO: 4568404 - DNA, 25 bp, Homo sapien
ggagctgctctgaccctccaagggc

SEQ ID NO: 4568405 - DNA, 25 bp, Homo sapien
agggattgttgtgcccacttgtggc

SEQ ID NO: 4568406 - DNA, 25 bp, Homo sapien
tgtggccaccgtaagatttcagagg

SEQ ID NO: 4568407 - DNA, 25 bp, Homo sapien
atgttctcagggattgttgtgccca

SEQ ID NO: 4568408 - DNA, 25 bp, Homo sapien
ttgttgtgcccacttgtggccaccg

SEQ ID NO: 4568409 - DNA, 25 bp, Homo sapien
taattaggttccattgattgggcct

SEQ ID NO: 4568410 - DNA, 25 bp, Homo sapien
tcccacagtttctgacattatcgat

SEQ ID NO: 4568411 - DNA, 25 bp, Homo sapien
cattgattgggcctgtagagttatc

SEQ ID NO: 4568412 - DNA, 25 bp, Homo sapien
gggcctgtagagttatcccacagtt

SEQ ID NO: 4568413 - DNA, 25 bp, Homo sapien
aaggccttataagagtgtctagcac

SEQ ID NO: 4568414 - DNA, 25 bp, Homo sapien
cattcaaatgccgtgggaattagca

SEQ ID NO: 4568415 - DNA, 25 bp, Homo sapien
gacaacctgcaacaccgacaaagtg

SEQ ID NO: 4568416 - DNA, 25 bp, Homo sapien
gctacaaatccaagctgacagctga

SEQ ID NO: 4568417 - DNA, 25 bp, Homo sapien
tcttgggtccagagagaggtttccc

SEQ ID NO: 4568418 - DNA, 25 bp, Homo sapien
gaagcccagaggctatttgctgatg

SEQ ID NO: 4568419 - DNA, 25 bp, Homo sapien
caggctcggctccacttgctagagg

SEQ ID NO: 4568420 - DNA, 25 bp, Homo sapien
tccaggcgcagaatgaccattggtc

SEQ ID NO: 4568421 - DNA, 25 bp, Homo sapien
gggtgacctcgggtatgcgacctca

SEQ ID NO: 4568422 - DNA, 25 bp, Homo sapien
gctgccttggtcttaggccaatttt

SEQ ID NO: 4568423 - DNA, 25 bp, Homo sapien
ggcctggcgctgtttccggaatgct

SEQ ID NO: 4568424 - DNA, 25 bp, Homo sapien
ctctgagggaggctagggaaccgca

SEQ ID NO: 4568425 - DNA, 25 bp, Homo sapien
ctttaagaattacagtgccggccgg

SEQ ID NO: 4568426 - DNA, 25 bp, Homo sapien
caggcccctaggattagatcattca

SEQ ID NO: 4568427 - DNA, 25 bp, Homo sapien
caaaggaaaaccgaggcaaggtgca

SEQ ID NO: 4568428 - DNA, 25 bp, Homo sapien
agatcattcaatttcctggtcgcag

SEQ ID NO: 4568429 - DNA, 25 bp, Homo sapien
ctccagcagtaggaacaatgtcctc

SEQ ID NO: 4568430 - DNA, 25 bp, Homo sapien
cagtaggaacaatgtcctcgccagt

SEQ ID NO: 4568431 - DNA, 25 bp, Homo sapien
taggaacaatgtcctcgccagtctg

SEQ ID NO: 4568432 - DNA, 25 bp, Homo sapien
gaacaatgtcctcgccagtctggct

SEQ ID NO: 4568433 - DNA, 25 bp, Homo sapien
caaatgtaacccagtcgaaacagtt

SEQ ID NO: 4568434 - DNA, 25 bp, Homo sapien
cccagtcgaaacagttgccaatggc

SEQ ID NO: 4568435 - DNA, 25 bp, Homo sapien
ggaagacaaatgtaacccagtcgaa

SEQ ID NO: 4568436 - DNA, 25 bp, Homo sapien
tgtaacccagtcgaaacagttgcca

SEQ ID NO: 4568437 - DNA, 25 bp, Homo sapien
tgaaaaagacccaataccagcccca

SEQ ID NO: 4568438 - DNA, 25 bp, Homo sapien
tatttacagatcaaccagcacgatg

SEQ ID NO: 4568439 - DNA, 25 bp, Homo sapien
gaactgagcactggggaattgaaga

SEQ ID NO: 4568440 - DNA, 25 bp, Homo sapien
ggatgaacagaagtaagcgaccaca

SEQ ID NO: 4568441 - DNA, 25 bp, Homo sapien
gtgtacaatctgccagttcccctcc

SEQ ID NO: 4568442 - DNA, 25 bp, Homo sapien
tgtgtacaatctgccagttcccctc

SEQ ID NO: 4568443 - DNA, 25 bp, Homo sapien
ctgtgtacaatctgccagttcccct

SEQ ID NO: 4568444 - DNA, 25 bp, Homo sapien
tgttaacgggtttgctggctttctg

SEQ ID NO: 4568445 - DNA, 25 bp, Homo sapien
ctttacagggtataggtcgagctgc

SEQ ID NO: 4568446 - DNA, 25 bp, Homo sapien
catgccatttgcatactttacaggg

SEQ ID NO: 4568447 - DNA, 25 bp, Homo sapien
tctggaaaagtgagtgccagtgatt

SEQ ID NO: 4568448 - DNA, 25 bp, Homo sapien
tatggcggccataactcttatttac

SEQ ID NO: 4568449 - DNA, 25 bp, Homo sapien
gtgatgccattatggcggccataac

SEQ ID NO: 4568450 - DNA, 25 bp, Homo sapien
taactcttatttactccatcagcag

SEQ ID NO: 4568451 - DNA, 25 bp, Homo sapien
taagtgatgccattatggcggccat

SEQ ID NO: 4568452 - DNA, 25 bp, Homo sapien
gttgcgttgatgcagcagctcctag

SEQ ID NO: 4568453 - DNA, 25 bp, Homo sapien
tgtgaaacacaaaagcgatcaggtc

SEQ ID NO: 4568454 - DNA, 25 bp, Homo sapien
tgtactctagccaaccatgtgaaac

SEQ ID NO: 4568455 - DNA, 25 bp, Homo sapien
tgacccctttgatctccactggagg

SEQ ID NO: 4568456 - DNA, 25 bp, Homo sapien
tgtactttaacgaggctcccaggtg

SEQ ID NO: 4568457 - DNA, 25 bp, Homo sapien
gcaaatggctctggtagggtgatcc

SEQ ID NO: 4568458 - DNA, 25 bp, Homo sapien
gcttcgggaaagcatggaggcaaat

SEQ ID NO: 4568459 - DNA, 25 bp, Homo sapien
gaagccccgaattccagagtcagga

SEQ ID NO: 4568460 - DNA, 25 bp, Homo sapien
tccttccaatcactggaagcatctg

SEQ ID NO: 4568461 - DNA, 25 bp, Homo sapien
aatccttccaatcactggaagcatc

SEQ ID NO: 4568462 - DNA, 25 bp, Homo sapien
ccttccaatcactggaagcatctga

SEQ ID NO: 4568463 - DNA, 25 bp, Homo sapien
ccaatccttccaatcactggaagca

SEQ ID NO: 4568464 - DNA, 25 bp, Homo sapien
gagcaggacttaaccttctgagcct

SEQ ID NO: 4568465 - DNA, 25 bp, Homo sapien
tctgagcctcattttacccttgtaa

SEQ ID NO: 4568466 - DNA, 25 bp, Homo sapien
ctgagcctcattttacccttgtaaa

SEQ ID NO: 4568467 - DNA, 25 bp, Homo sapien
tgtggggtggtaaaaaggagcagga

SEQ ID NO: 4568468 - DNA, 25 bp, Homo sapien
aatgggagggtgtggcttagtggca

SEQ ID NO: 4568469 - DNA, 25 bp, Homo sapien
ggtgtggcttagtggcacagccggg

SEQ ID NO: 4568470 - DNA, 25 bp, Homo sapien
agggtgtggcttagtggcacagccg

SEQ ID NO: 4568471 - DNA, 25 bp, Homo sapien
ggaccaatgggagggtgtggcttag

SEQ ID NO: 4568472 - DNA, 25 bp, Homo sapien
gacttagcctcctttacttgttcac

SEQ ID NO: 4568473 - DNA, 25 bp, Homo sapien
acacgtcagacttagcctcctttac

SEQ ID NO: 4568474 - DNA, 25 bp, Homo sapien
tggaaaggcttgacccccacacgtc

SEQ ID NO: 4568475 - DNA, 25 bp, Homo sapien
gtcagacttagcctcctttacttgt

SEQ ID NO: 4568476 - DNA, 25 bp, Homo sapien
gctgtatcaaacaacttcaaatccc

SEQ ID NO: 4568477 - DNA, 25 bp, Homo sapien
cagaatttcaggacaattaatgaat

SEQ ID NO: 4568478 - DNA, 25 bp, Homo sapien
cccaggtaatactcactacaacaga

SEQ ID NO: 4568479 - DNA, 25 bp, Homo sapien
ggaaagaaaacgctgtatcaaacaa

SEQ ID NO: 4568480 - DNA, 25 bp, Homo sapien
tctgtcatttctcatgatctgtacc

SEQ ID NO: 4568481 - DNA, 25 bp, Homo sapien
gtgtggcgtgtgctctccccagaaa

SEQ ID NO: 4568482 - DNA, 25 bp, Homo sapien
ggcctgtgtggcgtgtgctctcccc

SEQ ID NO: 4568483 - DNA, 25 bp, Homo sapien
tctgtaccatccagggctcgggttc

SEQ ID NO: 4568484 - DNA, 25 bp, Homo sapien
ggcctttgagaagcgctcagtaaat

SEQ ID NO: 4568485 - DNA, 25 bp, Homo sapien
gaggctatgctctcctcatctctga

SEQ ID NO: 4568486 - DNA, 25 bp, Homo sapien
tgttggcctttgagaagcgctcagt

SEQ ID NO: 4568487 - DNA, 25 bp, Homo sapien
ggaagatggaggctatgctctcctc

SEQ ID NO: 4568488 - DNA, 25 bp, Homo sapien
cccaggcgggtctgcgaagggccgc

SEQ ID NO: 4568489 - DNA, 25 bp, Homo sapien
aggcgggtctgcgaagggccgcggg

SEQ ID NO: 4568490 - DNA, 25 bp, Homo sapien
cacaccagatgccggcagaaggcgg

SEQ ID NO: 4568491 - DNA, 25 bp, Homo sapien
ccagatgccggcagaaggcggccca

SEQ ID NO: 4568492 - DNA, 25 bp, Homo sapien
gagtgtaattgctttgcggtgattc

SEQ ID NO: 4568493 - DNA, 25 bp, Homo sapien
aagttgctttaaccttgacagccgg

SEQ ID NO: 4568494 - DNA, 25 bp, Homo sapien
ctgcacgcgaggaacagtgagtgta

SEQ ID NO: 4568495 - DNA, 25 bp, Homo sapien
ctgaagttgctttaaccttgacagc

SEQ ID NO: 4568496 - DNA, 25 bp, Homo sapien
tggacagcatagggctcagcaggag

SEQ ID NO: 4568497 - DNA, 25 bp, Homo sapien
catagggctcagcaggagctcccac

SEQ ID NO: 4568498 - DNA, 25 bp, Homo sapien
cagcatagggctcagcaggagctcc

SEQ ID NO: 4568499 - DNA, 25 bp, Homo sapien
ctggacagcatagggctcagcagga

SEQ ID NO: 4568500 - DNA, 25 bp, Homo sapien
atcagggtggccatgagcggggtgg

SEQ ID NO: 4568501 - DNA, 25 bp, Homo sapien
ggtggccatgagcggggtggcagga

SEQ ID NO: 4568502 - DNA, 25 bp, Homo sapien
tggccatgagcggggtggcaggaag

SEQ ID NO: 4568503 - DNA, 25 bp, Homo sapien
cagggtggccatgagcggggtggca

SEQ ID NO: 4568504 - DNA, 25 bp, Homo sapien
gtcctggactttgactccttagaaa

SEQ ID NO: 4568505 - DNA, 25 bp, Homo sapien
aacatcatgagctgtcacagtggaa

SEQ ID NO: 4568506 - DNA, 25 bp, Homo sapien
catcatgagctgtcacagtggaaat

SEQ ID NO: 4568507 - DNA, 25 bp, Homo sapien
cctggactttgactccttagaaata

SEQ ID NO: 4568508 - DNA, 25 bp, Homo sapien
caggccaggggcagggacccaggcc

SEQ ID NO: 4568509 - DNA, 25 bp, Homo sapien
caggggcagggacccaggcccccat

SEQ ID NO: 4568510 - DNA, 25 bp, Homo sapien
cccaggccaggggcagggacccagg

SEQ ID NO: 4568511 - DNA, 25 bp, Homo sapien
ctgtcccaggccaggggcagggacc

SEQ ID NO: 4568512 - DNA, 25 bp, Homo sapien
aagataagaacacgctggacttggc

SEQ ID NO: 4568513 - DNA, 25 bp, Homo sapien
cttcatcactcaggcctctctgtag

SEQ ID NO: 4568514 - DNA, 25 bp, Homo sapien
cagaagctacagctggtgatgggcc

SEQ ID NO: 4568515 - DNA, 25 bp, Homo sapien
ggttccagctgccttcatcactcag

SEQ ID NO: 4568516 - DNA, 25 bp, Homo sapien
ggatcatttcccagtgcggaaataa

SEQ ID NO: 4568517 - DNA, 25 bp, Homo sapien
gtccttctccgtacagctgaaatct

SEQ ID NO: 4568518 - DNA, 25 bp, Homo sapien
tctcaatcattgtcagtgctttaat

SEQ ID NO: 4568519 - DNA, 25 bp, Homo sapien
taaatgaagtatactggatcatttc

SEQ ID NO: 4568520 - DNA, 25 bp, Homo sapien
aggtgttccatcaaaagtcagagtt

SEQ ID NO: 4568521 - DNA, 25 bp, Homo sapien
tcagagttgtccagatgatcccaca

SEQ ID NO: 4568522 - DNA, 25 bp, Homo sapien
tcaaaagtcagagttgtccagatga

SEQ ID NO: 4568523 - DNA, 25 bp, Homo sapien
caaccatcaaagaccatatctagag

SEQ ID NO: 4568524 - DNA, 25 bp, Homo sapien
gcaggtgtccggggaaacgcagcgg

SEQ ID NO: 4568525 - DNA, 25 bp, Homo sapien
tggcaggtgtccggggaaacgcagc

SEQ ID NO: 4568526 - DNA, 25 bp, Homo sapien
ggaaacgcagcggccgtgcacacac

SEQ ID NO: 4568527 - DNA, 25 bp, Homo sapien
ggcaggtgtccggggaaacgcagcg

SEQ ID NO: 4568528 - DNA, 25 bp, Homo sapien
atgggtacagataccagaattctgg

SEQ ID NO: 4568529 - DNA, 25 bp, Homo sapien
tcttcacacacatgggacatgggta

SEQ ID NO: 4568530 - DNA, 25 bp, Homo sapien
cagactcttcacacacatgggacat

SEQ ID NO: 4568531 - DNA, 25 bp, Homo sapien
cacatgggacatgggtacagatacc

SEQ ID NO: 4568532 - DNA, 25 bp, Homo sapien
caggttctggtgaagttggaggttc

SEQ ID NO: 4568533 - DNA, 25 bp, Homo sapien
tggaggttctctggcctctgagcga

SEQ ID NO: 4568534 - DNA, 25 bp, Homo sapien
ttggaggttctctggcctctgagcg

SEQ ID NO: 4568535 - DNA, 25 bp, Homo sapien
ttctggtgaagttggaggttctctg

SEQ ID NO: 4568536 - DNA, 25 bp, Homo sapien
agcactgggacctccgccggtacat

SEQ ID NO: 4568537 - DNA, 25 bp, Homo sapien
tccgctctcatagtagccagggcag

SEQ ID NO: 4568538 - DNA, 25 bp, Homo sapien
gaggcctctccgatacgccgtctta

SEQ ID NO: 4568539 - DNA, 25 bp, Homo sapien
gccggtacatggtccggaggcctct

SEQ ID NO: 4568540 - DNA, 25 bp, Homo sapien
aaccagttgaggatgtctgtgcatc

SEQ ID NO: 4568541 - DNA, 25 bp, Homo sapien
cctggtgcacttgaaccagttgagg

SEQ ID NO: 4568542 - DNA, 25 bp, Homo sapien
tagatctgatcgaaggggtgtgcat

SEQ ID NO: 4568543 - DNA, 25 bp, Homo sapien
tctgtgcatcgtgtgtaatagatct

SEQ ID NO: 4568544 - DNA, 25 bp, Homo sapien
cgattcctggacagtcacagcatag

SEQ ID NO: 4568545 - DNA, 25 bp, Homo sapien
acgattcctggacagtcacagcata

SEQ ID NO: 4568546 - DNA, 25 bp, Homo sapien
gagaaccagatgggagataggagcc

SEQ ID NO: 4568547 - DNA, 25 bp, Homo sapien
gaaccagatgggagataggagccat

SEQ ID NO: 4568548 - DNA, 25 bp, Homo sapien
agaaccagatgggagataggagcca

SEQ ID NO: 4568549 - DNA, 25 bp, Homo sapien
taggctctctgatgcctgaaaggtc

SEQ ID NO: 4568550 - DNA, 25 bp, Homo sapien
gccgggtccaggctgtaaagcacgt

SEQ ID NO: 4568551 - DNA, 25 bp, Homo sapien
gtccaggctgtaaagcacgtctgcc

SEQ ID NO: 4568552 - DNA, 25 bp, Homo sapien
cccaagtgggtccacggtaggctct

SEQ ID NO: 4568553 - DNA, 25 bp, Homo sapien
ccacacatccaagctgccacggggc

SEQ ID NO: 4568554 - DNA, 25 bp, Homo sapien
acacatccaagctgccacggggctg

SEQ ID NO: 4568555 - DNA, 25 bp, Homo sapien
gctggggccacacatccaagctgcc

SEQ ID NO: 4568556 - DNA, 25 bp, Homo sapien
cacatccaagctgccacggggctgc

SEQ ID NO: 4568557 - DNA, 25 bp, Homo sapien
tctcccagtggctgcacacgttggg

SEQ ID NO: 4568558 - DNA, 25 bp, Homo sapien
gctgcacacgttggggtcctcgggg

SEQ ID NO: 4568559 - DNA, 25 bp, Homo sapien
agtggctgcacacgttggggtcctc

SEQ ID NO: 4568560 - DNA, 25 bp, Homo sapien
cccagtggctgcacacgttggggtc

SEQ ID NO: 4568561 - DNA, 25 bp, Homo sapien
agaaggcaatgagccccgtcaggga

SEQ ID NO: 4568562 - DNA, 25 bp, Homo sapien
aggagaaggcaatgagccccgtcag

SEQ ID NO: 4568563 - DNA, 25 bp, Homo sapien
atgagccccgtcagggagagcacca

SEQ ID NO: 4568564 - DNA, 25 bp, Homo sapien
tgagccccgtcagggagagcaccat

SEQ ID NO: 4568565 - DNA, 25 bp, Homo sapien
tgagcactcttggtgcaccacctgc

SEQ ID NO: 4568566 - DNA, 25 bp, Homo sapien
ggcccaaactgagcactcttggtgc

SEQ ID NO: 4568567 - DNA, 25 bp, Homo sapien
ccaaactgagcactcttggtgcacc

SEQ ID NO: 4568568 - DNA, 25 bp, Homo sapien
aactgagcactcttggtgcaccacc

SEQ ID NO: 4568569 - DNA, 25 bp, Homo sapien
ggagctgagctgtgaggatgatggg

SEQ ID NO: 4568570 - DNA, 25 bp, Homo sapien
tgatgggctggacagcaagccacat

SEQ ID NO: 4568571 - DNA, 25 bp, Homo sapien
gagctgtgaggatgatgggctggac

SEQ ID NO: 4568572 - DNA, 25 bp, Homo sapien
atgatgggctggacagcaagccaca

SEQ ID NO: 4568573 - DNA, 25 bp, Homo sapien
aatgtgaaccacccattccttattc

SEQ ID NO: 4568574 - DNA, 25 bp, Homo sapien
cttccaactcagtaggaaattcaga

SEQ ID NO: 4568575 - DNA, 25 bp, Homo sapien
tcagaaatgtgaaccacccattcct

SEQ ID NO: 4568576 - DNA, 25 bp, Homo sapien
ggaaattcagaaatgtgaaccaccc

SEQ ID NO: 4568577 - DNA, 25 bp, Homo sapien
ctccagtcccacagtgaaaagcagc

SEQ ID NO: 4568578 - DNA, 25 bp, Homo sapien
ctctccagtcccacagtgaaaagca

SEQ ID NO: 4568579 - DNA, 25 bp, Homo sapien
tctccagtcccacagtgaaaagcag

SEQ ID NO: 4568580 - DNA, 25 bp, Homo sapien
gaccataagaatcaataacacaatt

SEQ ID NO: 4568581 - DNA, 25 bp, Homo sapien
taacaaatattgtgctattcctcag

SEQ ID NO: 4568582 - DNA, 25 bp, Homo sapien
tattcctcagaatcttgctaggaat

SEQ ID NO: 4568583 - DNA, 25 bp, Homo sapien
aataattagggcattccagaccata

SEQ ID NO: 4568584 - DNA, 25 bp, Homo sapien
ctaaaatgccgtctgtctgttggag

SEQ ID NO: 4568585 - DNA, 25 bp, Homo sapien
ccaggcctgttcttaaagacagcca

SEQ ID NO: 4568586 - DNA, 25 bp, Homo sapien
caggcctgttcttaaagacagccac

SEQ ID NO: 4568587 - DNA, 25 bp, Homo sapien
cccaggcctgttcttaaagacagcc

SEQ ID NO: 4568588 - DNA, 25 bp, Homo sapien
tcccaggcctgttcttaaagacagc

SEQ ID NO: 4568589 - DNA, 25 bp, Homo sapien
caaagctctctcttcttcactgacc

SEQ ID NO: 4568590 - DNA, 25 bp, Homo sapien
aaagctctctcttcttcactgacca

SEQ ID NO: 4568591 - DNA, 25 bp, Homo sapien
aagctctctcttcttcactgaccat

SEQ ID NO: 4568592 - DNA, 25 bp, Homo sapien
agggttgttggatttgcaggggtgg

SEQ ID NO: 4568593 - DNA, 25 bp, Homo sapien
tctagactcgagagacttggccggg

SEQ ID NO: 4568594 - DNA, 25 bp, Homo sapien
gaaaatgatgcaattgagccacctg

SEQ ID NO: 4568595 - DNA, 25 bp, Homo sapien
tgaaggattaaacgccaggctgccc

SEQ ID NO: 4568596 - DNA, 25 bp, Homo sapien
gtttcacggaggtgcacagaccgca

SEQ ID NO: 4568597 - DNA, 25 bp, Homo sapien
tccacagaaactgcataaagtgtcc

SEQ ID NO: 4568598 - DNA, 25 bp, Homo sapien
gcatcgtagaccaggatagctcctt

SEQ ID NO: 4568599 - DNA, 25 bp, Homo sapien
taatttactaagagaccgtctgccg

SEQ ID NO: 4568600 - DNA, 25 bp, Homo sapien
atagctccttcttgaccccgggtgg

SEQ ID NO: 4568601 - DNA, 25 bp, Homo sapien
tgttgctgtccatgaggttttagca

SEQ ID NO: 4568602 - DNA, 25 bp, Homo sapien
tgtccatgaggttttagcacctgaa

SEQ ID NO: 4568603 - DNA, 25 bp, Homo sapien
tccatgaggttttagcacctgaatt

SEQ ID NO: 4568604 - DNA, 25 bp, Homo sapien
gctgtccatgaggttttagcacctg

SEQ ID NO: 4568605 - DNA, 25 bp, Homo sapien
caataacgcgatgttgagtgagaaa

SEQ ID NO: 4568606 - DNA, 25 bp, Homo sapien
catcagtaaagagccgcatatcgga

SEQ ID NO: 4568607 - DNA, 25 bp, Homo sapien
tatgggtggtcacaataacgcgatg

SEQ ID NO: 4568608 - DNA, 25 bp, Homo sapien
cggatgtatgcagagcaatatgggt

SEQ ID NO: 4568609 - DNA, 25 bp, Homo sapien
aggtgtgcagtgaaccaatatcatg

SEQ ID NO: 4568610 - DNA, 25 bp, Homo sapien
gaggtgtgcagtgaaccaatatcat

SEQ ID NO: 4568611 - DNA, 25 bp, Homo sapien
gacataaagaaactatatcactcat

SEQ ID NO: 4568612 - DNA, 25 bp, Homo sapien
ggacataaagaaactatatcactca

SEQ ID NO: 4568613 - DNA, 25 bp, Homo sapien
gcggccggcccagggatcggccggc

SEQ ID NO: 4568614 - DNA, 25 bp, Homo sapien
agtcgcgcggtcctgtcctccggag

SEQ ID NO: 4568615 - DNA, 25 bp, Homo sapien
ggcccagggatcggccggccagtcg

SEQ ID NO: 4568616 - DNA, 25 bp, Homo sapien
cccgagcctggccagagcgccaggc

SEQ ID NO: 4568617 - DNA, 25 bp, Homo sapien
taacttttaggctacggcagcagct

SEQ ID NO: 4568618 - DNA, 25 bp, Homo sapien
actcgagggatacgtgccatgggca

SEQ ID NO: 4568619 - DNA, 25 bp, Homo sapien
caagcggatgcagattgggtcacac

SEQ ID NO: 4568620 - DNA, 25 bp, Homo sapien
tgataggaggcacatggcacactcg

SEQ ID NO: 4568621 - DNA, 25 bp, Homo sapien
gagatacaggctagagcaacctccg

SEQ ID NO: 4568622 - DNA, 25 bp, Homo sapien
tatgctggacctaagaatactgacc

SEQ ID NO: 4568623 - DNA, 25 bp, Homo sapien
tactgaccaccagctggagaaggcg

SEQ ID NO: 4568624 - DNA, 25 bp, Homo sapien
cacaggaggcatagtcagaagagct

SEQ ID NO: 4568625 - DNA, 25 bp, Homo sapien
tcagtcaaaggctaatgtaggtgcc

SEQ ID NO: 4568626 - DNA, 25 bp, Homo sapien
gagctttgagcactgctggctaaca

SEQ ID NO: 4568627 - DNA, 25 bp, Homo sapien
cctgatctgataaggtgaggccata

SEQ ID NO: 4568628 - DNA, 25 bp, Homo sapien
caaagattcttgaaccctggcatac

SEQ ID NO: 4568629 - DNA, 25 bp, Homo sapien
cgttcaggataatcacatgttctgc

SEQ ID NO: 4568630 - DNA, 25 bp, Homo sapien
aatgtcaggtcttaagtcgttcagg

SEQ ID NO: 4568631 - DNA, 25 bp, Homo sapien
tcataagtgtattgcacagaacagt

SEQ ID NO: 4568632 - DNA, 25 bp, Homo sapien
caataatatcaatgcagagaatgct

SEQ ID NO: 4568633 - DNA, 25 bp, Homo sapien
gaggtttctggcctacatgactgga

SEQ ID NO: 4568634 - DNA, 25 bp, Homo sapien
aacttgtggaaaactcagtggtgtc

SEQ ID NO: 4568635 - DNA, 25 bp, Homo sapien
tagaaggcagtcgttcagatggccc

SEQ ID NO: 4568636 - DNA, 25 bp, Homo sapien
gaaggtaagtctgtgagaccctacc

SEQ ID NO: 4568637 - DNA, 25 bp, Homo sapien
tagacttcgagtatatcatgcgcgg

SEQ ID NO: 4568638 - DNA, 25 bp, Homo sapien
taatccacgggatgaaggctcgaaa

SEQ ID NO: 4568639 - DNA, 25 bp, Homo sapien
tgcgcggaatgcctcactggtgtgc

SEQ ID NO: 4568640 - DNA, 25 bp, Homo sapien
tagtcagtgacatcctaatccacgg

SEQ ID NO: 4568641 - DNA, 25 bp, Homo sapien
gacgtaccctagtttgcttaagcat

SEQ ID NO: 4568642 - DNA, 25 bp, Homo sapien
cgtgcgcatcgattcctgggagtca

SEQ ID NO: 4568643 - DNA, 25 bp, Homo sapien
caaggacacctagttacagacccaa

SEQ ID NO: 4568644 - DNA, 25 bp, Homo sapien
tgtgctgtggaacaacccactgtgt

SEQ ID NO: 4568645 - DNA, 25 bp, Homo sapien
cgtatgtttgtcacttatgtatccc

SEQ ID NO: 4568646 - DNA, 25 bp, Homo sapien
tactgattaatttgtaaaagctctt

SEQ ID NO: 4568647 - DNA, 25 bp, Homo sapien
tatctgtcatcaagattgatatcac

SEQ ID NO: 4568648 - DNA, 25 bp, Homo sapien
tacatattaggaaaattagccctat

SEQ ID NO: 4568649 - DNA, 25 bp, Homo sapien
ccaactgttattgatagcacaccat

SEQ ID NO: 4568650 - DNA, 25 bp, Homo sapien
aatgcaagtaagacatgtgtaatac

SEQ ID NO: 4568651 - DNA, 25 bp, Homo sapien
aatttgctgatctctaatttcatga

SEQ ID NO: 4568652 - DNA, 25 bp, Homo sapien
catgaactataaatgggtttcattt

SEQ ID NO: 4568653 - DNA, 25 bp, Homo sapien
tgtacccaaggtgaacatgacccaa

SEQ ID NO: 4568654 - DNA, 25 bp, Homo sapien
ggtttagtcatctcatgtggcccag

SEQ ID NO: 4568655 - DNA, 25 bp, Homo sapien
ccatttgtttgaccatgtaaccgta

SEQ ID NO: 4568656 - DNA, 25 bp, Homo sapien
tacaggcctcacgttgccattctga

SEQ ID NO: 4568657 - DNA, 25 bp, Homo sapien
aattacctctactacaacagatggg

SEQ ID NO: 4568658 - DNA, 25 bp, Homo sapien
cactaagagctgtcatatgtgaatg

SEQ ID NO: 4568659 - DNA, 25 bp, Homo sapien
ggactgggtagctatttcgcatata

SEQ ID NO: 4568660 - DNA, 25 bp, Homo sapien
tatgagaggctcttacttcactaag

SEQ ID NO: 4568661 - DNA, 25 bp, Homo sapien
cactcagtgctctagtcgatcagga

SEQ ID NO: 4568662 - DNA, 25 bp, Homo sapien
gaaactgcttattacctcctaatca

SEQ ID NO: 4568663 - DNA, 25 bp, Homo sapien
agcagcagaaactgcttattacctc

SEQ ID NO: 4568664 - DNA, 25 bp, Homo sapien
agcagaaactgcttattacctccta

SEQ ID NO: 4568665 - DNA, 25 bp, Homo sapien
cagaaactgcttattacctcctaat

SEQ ID NO: 4568666 - DNA, 25 bp, Homo sapien
tgcaggacgatgacttaacagatac

SEQ ID NO: 4568667 - DNA, 25 bp, Homo sapien
gaaaaaatacatagtaacgccaagc

SEQ ID NO: 4568668 - DNA, 25 bp, Homo sapien
gatttaactaaagtgacaagcataa

SEQ ID NO: 4568669 - DNA, 25 bp, Homo sapien
ttactatctaaggattttcactcca

SEQ ID NO: 4568670 - DNA, 25 bp, Homo sapien
aaaagactggtccagcagtgtttcc

SEQ ID NO: 4568671 - DNA, 25 bp, Homo sapien
tctggatgtagcatcaagttgctgt

SEQ ID NO: 4568672 - DNA, 25 bp, Homo sapien
tattggcaatagcatcattacatgg

SEQ ID NO: 4568673 - DNA, 25 bp, Homo sapien
tcttcaaccgtgtgtgccctgggtg

SEQ ID NO: 4568674 - DNA, 25 bp, Homo sapien
atgttcattattctccgcaacttca

SEQ ID NO: 4568675 - DNA, 25 bp, Homo sapien
tgttcattattctccgcaacttcat

SEQ ID NO: 4568676 - DNA, 25 bp, Homo sapien
catgttcattattctccgcaacttc

SEQ ID NO: 4568677 - DNA, 25 bp, Homo sapien
ggagccatcgcacagaaaatctgat

SEQ ID NO: 4568678 - DNA, 25 bp, Homo sapien
tatacagaccctgtcggcaggaacc

SEQ ID NO: 4568679 - DNA, 25 bp, Homo sapien
tgcaatcaataccaggaacagtcac

SEQ ID NO: 4568680 - DNA, 25 bp, Homo sapien
gactgtctatggttgcactgtacaa

SEQ ID NO: 4568681 - DNA, 25 bp, Homo sapien
ttataaagtagataaacctatattc

SEQ ID NO: 4568682 - DNA, 25 bp, Homo sapien
tataaagtagataaacctatattct

SEQ ID NO: 4568683 - DNA, 25 bp, Homo sapien
taaagtagataaacctatattctta

SEQ ID NO: 4568684 - DNA, 25 bp, Homo sapien
ataaagtagataaacctatattctt

SEQ ID NO: 4568685 - DNA, 25 bp, Homo sapien
tgtaaaatagggagatcaagtcgaa

SEQ ID NO: 4568686 - DNA, 25 bp, Homo sapien
tagggagatcaagtcgaattcgttt

SEQ ID NO: 4568687 - DNA, 25 bp, Homo sapien
gatcaagtcgaattcgttttaaaca

SEQ ID NO: 4568688 - DNA, 25 bp, Homo sapien
tcttcatgtaaaatagggagatcaa

SEQ ID NO: 4568689 - DNA, 25 bp, Homo sapien
ttggggggagataatttgctattac

SEQ ID NO: 4568690 - DNA, 25 bp, Homo sapien
tttaccaatcatgttggggggagat

SEQ ID NO: 4568691 - DNA, 25 bp, Homo sapien
ctctttaccaatcatgttgggggga

SEQ ID NO: 4568692 - DNA, 25 bp, Homo sapien
tggggggagataatttgctattact

SEQ ID NO: 4568693 - DNA, 25 bp, Homo sapien
ggaatagcctatgtgcccagtgctc

SEQ ID NO: 4568694 - DNA, 25 bp, Homo sapien
agcctatgtgcccagtgctccatgt

SEQ ID NO: 4568695 - DNA, 25 bp, Homo sapien
aatagcctatgtgcccagtgctcca

SEQ ID NO: 4568696 - DNA, 25 bp, Homo sapien
agggaatagcctatgtgcccagtgc

SEQ ID NO: 4568697 - DNA, 25 bp, Homo sapien
tcaaatacatgccttaaggctggaa

SEQ ID NO: 4568698 - DNA, 25 bp, Homo sapien
ttatcaaatacatgccttaaggctg

SEQ ID NO: 4568699 - DNA, 25 bp, Homo sapien
caaatacatgccttaaggctggaag

SEQ ID NO: 4568700 - DNA, 25 bp, Homo sapien
tatcaaatacatgccttaaggctgg

SEQ ID NO: 4568701 - DNA, 25 bp, Homo sapien
ggaggtacacgaacaggtgctccat

SEQ ID NO: 4568702 - DNA, 25 bp, Homo sapien
agtttcatcttctacatgctcataa

SEQ ID NO: 4568703 - DNA, 25 bp, Homo sapien
aagtttcatcttctacatgctcata

SEQ ID NO: 4568704 - DNA, 25 bp, Homo sapien
aaagtttcatcttctacatgctcat

SEQ ID NO: 4568705 - DNA, 25 bp, Homo sapien
ctcacgcagaaaacacgggacacag

SEQ ID NO: 4568706 - DNA, 25 bp, Homo sapien
gcggacctcggcgtgcagactaagc

SEQ ID NO: 4568707 - DNA, 25 bp, Homo sapien
agactaagcgcgcttctcgcgatac

SEQ ID NO: 4568708 - DNA, 25 bp, Homo sapien
acgcagaaaacacgggacacagcgc

SEQ ID NO: 4568709 - DNA, 25 bp, Homo sapien
gagaatcactccaatgtggaagtgg

SEQ ID NO: 4568710 - DNA, 25 bp, Homo sapien
tgtaggagaatcactccaatgtgga

SEQ ID NO: 4568711 - DNA, 25 bp, Homo sapien
ctccaatgtggaagtggggggatgc

SEQ ID NO: 4568712 - DNA, 25 bp, Homo sapien
ggaaatagaaagaaattgaggctgg

SEQ ID NO: 4568713 - DNA, 25 bp, Homo sapien
tcaggattctgacatatacttgccc

SEQ ID NO: 4568714 - DNA, 25 bp, Homo sapien
taacaattcagttgggcaggccaga

SEQ ID NO: 4568715 - DNA, 25 bp, Homo sapien
caaactagcacccattcagagctgc

SEQ ID NO: 4568716 - DNA, 25 bp, Homo sapien
ccagagagttaagatcagttcagct

SEQ ID NO: 4568717 - DNA, 25 bp, Homo sapien
tcatgactcactctaacctggacct

SEQ ID NO: 4568718 - DNA, 25 bp, Homo sapien
gcttctctagcagtacttgtatgat

SEQ ID NO: 4568719 - DNA, 25 bp, Homo sapien
tgtgtacttatatctctgtacaagg

SEQ ID NO: 4568720 - DNA, 25 bp, Homo sapien
ccatgatcttatctagcttctctag

SEQ ID NO: 4568721 - DNA, 25 bp, Homo sapien
ggtcttaggagtcatctggcgtctt

SEQ ID NO: 4568722 - DNA, 25 bp, Homo sapien
taggtcttaggagtcatctggcgtc

SEQ ID NO: 4568723 - DNA, 25 bp, Homo sapien
cttaggagtcatctggcgtcttctt

SEQ ID NO: 4568724 - DNA, 25 bp, Homo sapien
gtaggtcttaggagtcatctggcgt

SEQ ID NO: 4568725 - DNA, 25 bp, Homo sapien
gacatagataccattcaaaaatttc

SEQ ID NO: 4568726 - DNA, 25 bp, Homo sapien
ttattcatcatcctgctgaacagtt

SEQ ID NO: 4568727 - DNA, 25 bp, Homo sapien
agacatagataccattcaaaaattt

SEQ ID NO: 4568728 - DNA, 25 bp, Homo sapien
catcatcctgctgaacagttccttt

SEQ ID NO: 4568729 - DNA, 25 bp, Homo sapien
cattctccgggataacgacgatgat

SEQ ID NO: 4568730 - DNA, 25 bp, Homo sapien
cccattctccgggataacgacgatg

SEQ ID NO: 4568731 - DNA, 25 bp, Homo sapien
acagacccattctccgggataacga

SEQ ID NO: 4568732 - DNA, 25 bp, Homo sapien
tctccgggataacgacgatgatggg

SEQ ID NO: 4568733 - DNA, 25 bp, Homo sapien
ctgattaatgagaatggtcttcact

SEQ ID NO: 4568734 - DNA, 25 bp, Homo sapien
cagtctgattaatgagaatggtctt

SEQ ID NO: 4568735 - DNA, 25 bp, Homo sapien
gtcgacagtctgattaatgagaatg

SEQ ID NO: 4568736 - DNA, 25 bp, Homo sapien
gacagtctgattaatgagaatggtc

SEQ ID NO: 4568737 - DNA, 25 bp, Homo sapien
tcaccaacacctggctgtggataac

SEQ ID NO: 4568738 - DNA, 25 bp, Homo sapien
tgtggataaccaggtgtagatgttt

SEQ ID NO: 4568739 - DNA, 25 bp, Homo sapien
ctttgttctgtacacgtttcctttg

SEQ ID NO: 4568740 - DNA, 25 bp, Homo sapien
cctggctgtggataaccaggtgtag

SEQ ID NO: 4568741 - DNA, 25 bp, Homo sapien
gacaagtttcctattccccacgctg

SEQ ID NO: 4568742 - DNA, 25 bp, Homo sapien
caaaggagcctctcgacaagtttcc

SEQ ID NO: 4568743 - DNA, 25 bp, Homo sapien
aatttatatgcgtcagtttgttggg

SEQ ID NO: 4568744 - DNA, 25 bp, Homo sapien
ttttcgtcaacacggctcggcttgg

SEQ ID NO: 4568745 - DNA, 25 bp, Homo sapien
gaggccgcgcggcacctggcctgga

SEQ ID NO: 4568746 - DNA, 25 bp, Homo sapien
aggccgcgcggcacctggcctggag

SEQ ID NO: 4568747 - DNA, 25 bp, Homo sapien
ggaggccgcgcggcacctggcctgg

SEQ ID NO: 4568748 - DNA, 25 bp, Homo sapien
tgcgccgcgctcccgtgacgtattt

SEQ ID NO: 4568749 - DNA, 25 bp, Homo sapien
gctcccgtgacgtatttccgcgtca

SEQ ID NO: 4568750 - DNA, 25 bp, Homo sapien
cacctgcttgcctcggggcgacaga

SEQ ID NO: 4568751 - DNA, 25 bp, Homo sapien
gggcgacagagggcgccacggcgtc

SEQ ID NO: 4568752 - DNA, 25 bp, Homo sapien
ctgccgccgaggcttgcccccattg

SEQ ID NO: 4568753 - DNA, 25 bp, Homo sapien
gccgaggcttgcccccattggttgt

SEQ ID NO: 4568754 - DNA, 25 bp, Homo sapien
gccgccgaggcttgcccccattggt

SEQ ID NO: 4568755 - DNA, 25 bp, Homo sapien
cgccgaggcttgcccccattggttg

SEQ ID NO: 4568756 - DNA, 25 bp, Homo sapien
gctctgcagttaacgggaccagctc

SEQ ID NO: 4568757 - DNA, 25 bp, Homo sapien
cagttaacgggaccagctctgcgga

SEQ ID NO: 4568758 - DNA, 25 bp, Homo sapien
ccccgacggctctgcagttaacggg

SEQ ID NO: 4568759 - DNA, 25 bp, Homo sapien
agaagaagccgacgcccatccagct

SEQ ID NO: 4568760 - DNA, 25 bp, Homo sapien
ccatgtctggcctgataagtaggag

SEQ ID NO: 4568761 - DNA, 25 bp, Homo sapien
gagtgcattggtgctcactataacc

SEQ ID NO: 4568762 - DNA, 25 bp, Homo sapien
gggtagttgatgcagtaactaatac

SEQ ID NO: 4568763 - DNA, 25 bp, Homo sapien
taactaatactggtgctgtctttca

SEQ ID NO: 4568764 - DNA, 25 bp, Homo sapien
cttacatctgtctggtcttgctgac

SEQ ID NO: 4568765 - DNA, 25 bp, Homo sapien
tcttacatctgtctggtcttgctga

SEQ ID NO: 4568766 - DNA, 25 bp, Homo sapien
cttcttacatctgtctggtcttgct

SEQ ID NO: 4568767 - DNA, 25 bp, Homo sapien
tacatctgtctggtcttgctgacat

SEQ ID NO: 4568768 - DNA, 25 bp, Homo sapien
gtagctatgataacaggcacacacc

SEQ ID NO: 4568769 - DNA, 25 bp, Homo sapien
caagtagctatgataacaggcacac

SEQ ID NO: 4568770 - DNA, 25 bp, Homo sapien
ccgcctcccacattttcctgcctcg

SEQ ID NO: 4568771 - DNA, 25 bp, Homo sapien
acctccgcctcccacattttcctgc

SEQ ID NO: 4568772 - DNA, 25 bp, Homo sapien
cttcagctgctctttatccaacaga

SEQ ID NO: 4568773 - DNA, 25 bp, Homo sapien
tctttatccaacagacttagaatag

SEQ ID NO: 4568774 - DNA, 25 bp, Homo sapien
ttagaatagagacaacaccgggcat

SEQ ID NO: 4568775 - DNA, 25 bp, Homo sapien
cagacttagaatagagacaacaccg

SEQ ID NO: 4568776 - DNA, 25 bp, Homo sapien
catgtcaatgcactgcttgtagtac

SEQ ID NO: 4568777 - DNA, 25 bp, Homo sapien
caatgcactgcttgtagtaccagta

SEQ ID NO: 4568778 - DNA, 25 bp, Homo sapien
gcactgcttgtagtaccagtaataa

SEQ ID NO: 4568779 - DNA, 25 bp, Homo sapien
tgtcaatgcactgcttgtagtacca

SEQ ID NO: 4568780 - DNA, 25 bp, Homo sapien
agccttctggcctggtcatggccag

SEQ ID NO: 4568781 - DNA, 25 bp, Homo sapien
gcgaaagcgccttgaggcctttctt

SEQ ID NO: 4568782 - DNA, 25 bp, Homo sapien
gagctagagcttgatgagcagcagc

SEQ ID NO: 4568783 - DNA, 25 bp, Homo sapien
gaaggatgacgactttgagaagatc

SEQ ID NO: 4568784 - DNA, 25 bp, Homo sapien
ggttctgcatgagtgcaactctccg

SEQ ID NO: 4568785 - DNA, 25 bp, Homo sapien
ctggagatcaaacccgcaatccgga

SEQ ID NO: 4568786 - DNA, 25 bp, Homo sapien
ccggaaccagatcataagggagctg

SEQ ID NO: 4568787 - DNA, 25 bp, Homo sapien
catcgtgggcttctatggtgcgttc

SEQ ID NO: 4568788 - DNA, 25 bp, Homo sapien
tagtgaggcatttcttcaagatcgc

SEQ ID NO: 4568789 - DNA, 25 bp, Homo sapien
gatacatcaggatccccttagtgag

SEQ ID NO: 4568790 - DNA, 25 bp, Homo sapien
caagatcgcaggttaaaatgtagaa

SEQ ID NO: 4568791 - DNA, 25 bp, Homo sapien
tgcaagtggtaactggctacacctg

SEQ ID NO: 4568792 - DNA, 25 bp, Homo sapien
tggaagaattcctgaacaaatttta

SEQ ID NO: 4568793 - DNA, 25 bp, Homo sapien
aattttaggaaaagttagcattgct

SEQ ID NO: 4568794 - DNA, 25 bp, Homo sapien
caagtcctgaagaaagctggaagaa

SEQ ID NO: 4568795 - DNA, 25 bp, Homo sapien
ggaggttctctggatcaagtcctga

SEQ ID NO: 4568796 - DNA, 25 bp, Homo sapien
aataaaaggcctgacatatctgagg

SEQ ID NO: 4568797 - DNA, 25 bp, Homo sapien
aaaaggcctgacatatctgagggag

SEQ ID NO: 4568798 - DNA, 25 bp, Homo sapien
taaaaggcctgacatatctgaggga

SEQ ID NO: 4568799 - DNA, 25 bp, Homo sapien
gtaataaaaggcctgacatatctga

SEQ ID NO: 4568800 - DNA, 25 bp, Homo sapien
agaactgcctgctcccattggttcc

SEQ ID NO: 4568801 - DNA, 25 bp, Homo sapien
cattggttccggataccctgcttat

SEQ ID NO: 4568802 - DNA, 25 bp, Homo sapien
ctccagattactccagtgttgtttg

SEQ ID NO: 4568803 - DNA, 25 bp, Homo sapien
ctcccattggttccggataccctgc

SEQ ID NO: 4568804 - DNA, 25 bp, Homo sapien
cttgcaccacagccttccacatatt

SEQ ID NO: 4568805 - DNA, 25 bp, Homo sapien
tgcaccacagccttccacatatttc

SEQ ID NO: 4568806 - DNA, 25 bp, Homo sapien
ttgcaccacagccttccacatattt

SEQ ID NO: 4568807 - DNA, 25 bp, Homo sapien
gacaatatgaggtggtctcttccct

SEQ ID NO: 4568808 - DNA, 25 bp, Homo sapien
tgcactggtaatcaggttggaacag

SEQ ID NO: 4568809 - DNA, 25 bp, Homo sapien
caagtggggtacacgactgggggct

SEQ ID NO: 4568810 - DNA, 25 bp, Homo sapien
attgagcaagtggggtacacgactg

SEQ ID NO: 4568811 - DNA, 25 bp, Homo sapien
gaaccttatgtatggaactgcagcc

SEQ ID NO: 4568812 - DNA, 25 bp, Homo sapien
aaaagacagggtcctagacagagaa

SEQ ID NO: 4568813 - DNA, 25 bp, Homo sapien
tttaggtttctcatgcagcagaggg

SEQ ID NO: 4568814 - DNA, 25 bp, Homo sapien
ggaaccaaacctaggctgtcatgaa

SEQ ID NO: 4568815 - DNA, 25 bp, Homo sapien
cagattcagtgacaagatgagcctc

SEQ ID NO: 4568816 - DNA, 25 bp, Homo sapien
cctgcgtgtgcaagactgtggccaa

SEQ ID NO: 4568817 - DNA, 25 bp, Homo sapien
tagctgtgagtagcctggtgtgtcc

SEQ ID NO: 4568818 - DNA, 25 bp, Homo sapien
gggatttaagtctcaggcccactga

SEQ ID NO: 4568819 - DNA, 25 bp, Homo sapien
tccgagatgaaaagtagcccaggtc

SEQ ID NO: 4568820 - DNA, 25 bp, Homo sapien
tctgaggttagatacgccattgcgt

SEQ ID NO: 4568821 - DNA, 25 bp, Homo sapien
ccaagcattgctgaggtaggccaaa

SEQ ID NO: 4568822 - DNA, 25 bp, Homo sapien
ggattagttcgtcgctgcttaagga

SEQ ID NO: 4568823 - DNA, 25 bp, Homo sapien
caacatgtgtttgcagcctcctcca

SEQ ID NO: 4568824 - DNA, 25 bp, Homo sapien
tgttctctggaagcgtatactctgg

SEQ ID NO: 4568825 - DNA, 25 bp, Homo sapien
aattgctggttacgttcccatgccg

SEQ ID NO: 4568826 - DNA, 25 bp, Homo sapien
tatgcctggtggtttgcacgtgccc

SEQ ID NO: 4568827 - DNA, 25 bp, Homo sapien
gcagcctgagtaagcatatgccaga

SEQ ID NO: 4568828 - DNA, 25 bp, Homo sapien
ggaagcaacaaagagcgagtcccct

SEQ ID NO: 4568829 - DNA, 25 bp, Homo sapien
tactgcacgagtaggctccaagagg

SEQ ID NO: 4568830 - DNA, 25 bp, Homo sapien
aatatctggacagccatagacggtg

SEQ ID NO: 4568831 - DNA, 25 bp, Homo sapien
gctgggcatactttctctctaggag

SEQ ID NO: 4568832 - DNA, 25 bp, Homo sapien
tgggtagtcattcttacaattgcac

SEQ ID NO: 4568833 - DNA, 25 bp, Homo sapien
ctctaggagggagccttgtgagatc

SEQ ID NO: 4568834 - DNA, 25 bp, Homo sapien
tattgttcccctaagtggattggct

SEQ ID NO: 4568835 - DNA, 25 bp, Homo sapien
gttgacatccaaatctagccagagc

SEQ ID NO: 4568836 - DNA, 25 bp, Homo sapien
ccatatccaagtaccaatgctgttg

SEQ ID NO: 4568837 - DNA, 25 bp, Homo sapien
tactgtggtgatctgtagacttctg

SEQ ID NO: 4568838 - DNA, 25 bp, Homo sapien
taaacaacgtgtatagtgcctaaaa

SEQ ID NO: 4568839 - DNA, 25 bp, Homo sapien
tttagccaagcaacactggtgaggg

SEQ ID NO: 4568840 - DNA, 25 bp, Homo sapien
ggaaggcagaaacaggacaccgagt

SEQ ID NO: 4568841 - DNA, 25 bp, Homo sapien
tataccaatagttgagctgagggcc

SEQ ID NO: 4568842 - DNA, 25 bp, Homo sapien
ccttgtgggacctgtgaatagatcc

SEQ ID NO: 4568843 - DNA, 25 bp, Homo sapien
tgcacaacataggacagtctgtctc

SEQ ID NO: 4568844 - DNA, 25 bp, Homo sapien
gtctgtctcctttgcgacattaagc

SEQ ID NO: 4568845 - DNA, 25 bp, Homo sapien
tctcctttgcgacattaagcaatgg

SEQ ID NO: 4568846 - DNA, 25 bp, Homo sapien
ttacacttaaccacaccttcctgga

SEQ ID NO: 4568847 - DNA, 25 bp, Homo sapien
gaggctgctggtcaatacctctccg

SEQ ID NO: 4568848 - DNA, 25 bp, Homo sapien
ccagagcttgggatattgccaggat

SEQ ID NO: 4568849 - DNA, 25 bp, Homo sapien
tcttttaggtacatttgaggctgct

SEQ ID NO: 4568850 - DNA, 25 bp, Homo sapien
tagtccaatctagaggtaccagagc

SEQ ID NO: 4568851 - DNA, 25 bp, Homo sapien
caaaaatccagtcttccggcctggt

SEQ ID NO: 4568852 - DNA, 25 bp, Homo sapien
ccttacagatgggaacgtgagttgc

SEQ ID NO: 4568853 - DNA, 25 bp, Homo sapien
agtgttttgagctcccaatgccaga

SEQ ID NO: 4568854 - DNA, 25 bp, Homo sapien
tgatccccgcatgaatcttgcagtg

SEQ ID NO: 4568855 - DNA, 25 bp, Homo sapien
ctgcttctctctgtcgctatctaga

SEQ ID NO: 4568856 - DNA, 25 bp, Homo sapien
tctctgtcgctatctagaaaccagc

SEQ ID NO: 4568857 - DNA, 25 bp, Homo sapien
gatttcaaaccatcctgttgtatct

SEQ ID NO: 4568858 - DNA, 25 bp, Homo sapien
cagtcttccaagcatggcacatctc

SEQ ID NO: 4568859 - DNA, 25 bp, Homo sapien
caaagcagtttatagcatgcaatat

SEQ ID NO: 4568860 - DNA, 25 bp, Homo sapien
tgagaggtagaaacagcttgtgctc

SEQ ID NO: 4568861 - DNA, 25 bp, Homo sapien
gtctcaagtgagaggtggtaacaga

SEQ ID NO: 4568862 - DNA, 25 bp, Homo sapien
ttgtgctctcagacggccctcagtc

SEQ ID NO: 4568863 - DNA, 25 bp, Homo sapien
cagcggcatgcaaacagtctttaat

SEQ ID NO: 4568864 - DNA, 25 bp, Homo sapien
gcttgagttaccgatggagccattt

SEQ ID NO: 4568865 - DNA, 25 bp, Homo sapien
tcctttcaagcagatcacagggccc

SEQ ID NO: 4568866 - DNA, 25 bp, Homo sapien
tccttgaggagaagtagcctgagcc

SEQ ID NO: 4568867 - DNA, 25 bp, Homo sapien
gtcacatgactctttgtgctcagct

SEQ ID NO: 4568868 - DNA, 25 bp, Homo sapien
tccgtcacatgactctttgtgctca

SEQ ID NO: 4568869 - DNA, 25 bp, Homo sapien
ctcttccgtcacatgactctttgtg

SEQ ID NO: 4568870 - DNA, 25 bp, Homo sapien
tcttccgtcacatgactctttgtgc

SEQ ID NO: 4568871 - DNA, 25 bp, Homo sapien
tcaattgcatatctatccccagtac

SEQ ID NO: 4568872 - DNA, 25 bp, Homo sapien
gactaagaggtatggccactttcct

SEQ ID NO: 4568873 - DNA, 25 bp, Homo sapien
tcacagattagcaggaaagatgctg

SEQ ID NO: 4568874 - DNA, 25 bp, Homo sapien
gacttaaaatcagatctcaattgca

SEQ ID NO: 4568875 - DNA, 25 bp, Homo sapien
agttcttcaccacccaagcagcatg

SEQ ID NO: 4568876 - DNA, 25 bp, Homo sapien
gaactggagctcatcttttagcact

SEQ ID NO: 4568877 - DNA, 25 bp, Homo sapien
tcctaggcctgcacttgattaagct

SEQ ID NO: 4568878 - DNA, 25 bp, Homo sapien
taactagacagaatggatgacgagg

SEQ ID NO: 4568879 - DNA, 25 bp, Homo sapien
tcatcccctcttctagaactgatca

SEQ ID NO: 4568880 - DNA, 25 bp, Homo sapien
atgtgactgttcaggtacagtgtga

SEQ ID NO: 4568881 - DNA, 25 bp, Homo sapien
gtgactgttcaggtacagtgtgaga

SEQ ID NO: 4568882 - DNA, 25 bp, Homo sapien
tctagaactgatcattgattggagg

SEQ ID NO: 4568883 - DNA, 25 bp, Homo sapien
tttttgtaaggccggccgcagtggc

SEQ ID NO: 4568884 - DNA, 25 bp, Homo sapien
tctgggctctctacagctttgacca

SEQ ID NO: 4568885 - DNA, 25 bp, Homo sapien
gcacaatctgggctctctacagctt

SEQ ID NO: 4568886 - DNA, 25 bp, Homo sapien
cagctttgaccacctggactttggc

SEQ ID NO: 4568887 - DNA, 25 bp, Homo sapien
cgattctgaaagatagggcctaaga

SEQ ID NO: 4568888 - DNA, 25 bp, Homo sapien
aagaagcgcacagcaaactccccag

SEQ ID NO: 4568889 - DNA, 25 bp, Homo sapien
tagggcctaagaagcgcacagcaaa

SEQ ID NO: 4568890 - DNA, 25 bp, Homo sapien
cacgattctgaaagatagggcctaa

SEQ ID NO: 4568891 - DNA, 25 bp, Homo sapien
tttgtaaacctctaaattggcgcca

SEQ ID NO: 4568892 - DNA, 25 bp, Homo sapien
aacctctaaattggcgccaccacag

SEQ ID NO: 4568893 - DNA, 25 bp, Homo sapien
tgtttgtaaacctctaaattggcgc

SEQ ID NO: 4568894 - DNA, 25 bp, Homo sapien
tgtaaacctctaaattggcgccacc

SEQ ID NO: 4568895 - DNA, 25 bp, Homo sapien
caggttggggggaaatggtcgctcg

SEQ ID NO: 4568896 - DNA, 25 bp, Homo sapien
agtgagtagcggagaactggccgca

SEQ ID NO: 4568897 - DNA, 25 bp, Homo sapien
atggtcgctcgggaggaatggagga

SEQ ID NO: 4568898 - DNA, 25 bp, Homo sapien
tagtgagtagcggagaactggccgc

SEQ ID NO: 4568899 - DNA, 25 bp, Homo sapien
tgaggcggttcagctggtcgtgcag

SEQ ID NO: 4568900 - DNA, 25 bp, Homo sapien
tgcagggctgccttcaaccgcagca

SEQ ID NO: 4568901 - DNA, 25 bp, Homo sapien
cttgaggcggttcagctggtcgtgc

SEQ ID NO: 4568902 - DNA, 25 bp, Homo sapien
gggctgccttcaaccgcagcagcgt

SEQ ID NO: 4568903 - DNA, 25 bp, Homo sapien
ccggcactcggtgatgacgccatcg

SEQ ID NO: 4568904 - DNA, 25 bp, Homo sapien
ctgtcggcccggcactcggtgatga

SEQ ID NO: 4568905 - DNA, 25 bp, Homo sapien
ggtgatgacgccatcgccgccgact

SEQ ID NO: 4568906 - DNA, 25 bp, Homo sapien
tccgggctgctgtcggcccggcact

SEQ ID NO: 4568907 - DNA, 25 bp, Homo sapien
gataggccatttgcgcaccaagtgg

SEQ ID NO: 4568908 - DNA, 25 bp, Homo sapien
taaagccgtgctaagaaacgacgtg

SEQ ID NO: 4568909 - DNA, 25 bp, Homo sapien
tgcagggtaggactcacagtggact

SEQ ID NO: 4568910 - DNA, 25 bp, Homo sapien
caaatgaccgggtgaacagcacttc

SEQ ID NO: 4568911 - DNA, 25 bp, Homo sapien
tcaagtttagctccccaccagatgg

SEQ ID NO: 4568912 - DNA, 25 bp, Homo sapien
gactctctgaaaagtaccagaagca

SEQ ID NO: 4568913 - DNA, 25 bp, Homo sapien
aaataggtgtaacaggacttggtca

SEQ ID NO: 4568914 - DNA, 25 bp, Homo sapien
tgaaaaagtgccagaaggccacact

SEQ ID NO: 4568915 - DNA, 25 bp, Homo sapien
cttggtcagaaacgcagaggctgtt

SEQ ID NO: 4568916 - DNA, 25 bp, Homo sapien
tatactaagtccatggagttcagtg

SEQ ID NO: 4568917 - DNA, 25 bp, Homo sapien
gacttagtataaatccatgccccat

SEQ ID NO: 4568918 - DNA, 25 bp, Homo sapien
gctaaacttgaacagcctctgcgtt

SEQ ID NO: 4568919 - DNA, 25 bp, Homo sapien
aacagcctctgcgtttctgaccaag

SEQ ID NO: 4568920 - DNA, 25 bp, Homo sapien
gcactttttcaaaccatgggtgaaa

SEQ ID NO: 4568921 - DNA, 25 bp, Homo sapien
gaacacagttggttaacataatcac

SEQ ID NO: 4568922 - DNA, 25 bp, Homo sapien
taaccaagctttacagagcacacca

SEQ ID NO: 4568923 - DNA, 25 bp, Homo sapien
gcttcttttgaataaagacctgatt

SEQ ID NO: 4568924 - DNA, 25 bp, Homo sapien
cattttggacagcttcttttgaata

SEQ ID NO: 4568925 - DNA, 25 bp, Homo sapien
ccataaaggtcaaatcattttggac

SEQ ID NO: 4568926 - DNA, 25 bp, Homo sapien
ggtcaaatcattttggacagcttct

SEQ ID NO: 4568927 - DNA, 25 bp, Homo sapien
aaatcattttggacagcttcttttg

SEQ ID NO: 4568928 - DNA, 25 bp, Homo sapien
cttaaatttgattattccataaagg

SEQ ID NO: 4568929 - DNA, 25 bp, Homo sapien
caaaagaagctgtccaaaatgattt

SEQ ID NO: 4568930 - DNA, 25 bp, Homo sapien
tattcaaaagaagctgtccaaaatg

SEQ ID NO: 4568931 - DNA, 25 bp, Homo sapien
tctttattcaaaagaagctgtccaa

SEQ ID NO: 4568932 - DNA, 25 bp, Homo sapien
cctttatggaataatcaaatttaag

SEQ ID NO: 4568933 - DNA, 25 bp, Homo sapien
caaaatgatttgacctttatggaat

SEQ ID NO: 4568934 - DNA, 25 bp, Homo sapien
aatcaggtctttattcaaaagaagc

SEQ ID NO: 4568935 - DNA, 25 bp, Homo sapien
ctactacagaggagaagaagcctgc

SEQ ID NO: 4568936 - DNA, 25 bp, Homo sapien
cagaggagaagaagcctgctgcata

SEQ ID NO: 4568937 - DNA, 25 bp, Homo sapien
tgcagagaagaaacctactacagag

SEQ ID NO: 4568938 - DNA, 25 bp, Homo sapien
cccctgaaaagaagcctgcagagaa

SEQ ID NO: 4568939 - DNA, 25 bp, Homo sapien
tgaaaagaagcctgcagagaagaaa

SEQ ID NO: 4568940 - DNA, 25 bp, Homo sapien
agcccctgaaaagaagcctgcagag

SEQ ID NO: 4568941 - DNA, 25 bp, Homo sapien
gcaggcttcttctcctctgtagtag

SEQ ID NO: 4568942 - DNA, 25 bp, Homo sapien
gcagcaggcttcttctcctctgtag

SEQ ID NO: 4568943 - DNA, 25 bp, Homo sapien
cttctctgcaggcttcttttcaggg

SEQ ID NO: 4568944 - DNA, 25 bp, Homo sapien
ctctgtagtaggtttcttctctgca

SEQ ID NO: 4568945 - DNA, 25 bp, Homo sapien
tatgcagcaggcttcttctcctctg

SEQ ID NO: 4568946 - DNA, 25 bp, Homo sapien
tagtaggtttcttctctgcaggctt

SEQ ID NO: 4568947 - DNA, 25 bp, Homo sapien
ggcactacaagccaaatcagatgag

SEQ ID NO: 4568948 - DNA, 25 bp, Homo sapien
gcagcagcggcactacaagccaaat

SEQ ID NO: 4568949 - DNA, 25 bp, Homo sapien
gcagcggcactacaagccaaatcag

SEQ ID NO: 4568950 - DNA, 25 bp, Homo sapien
caagctccgggtggataaggcagct

SEQ ID NO: 4568951 - DNA, 25 bp, Homo sapien
gctgctgcagcagcggcactacaag

SEQ ID NO: 4568952 - DNA, 25 bp, Homo sapien
caaatcagatgagaaggcggcggtt

SEQ ID NO: 4568953 - DNA, 25 bp, Homo sapien
aaccgccgccttctcatctgatttg

SEQ ID NO: 4568954 - DNA, 25 bp, Homo sapien
gatttggcttgtagtgccgctgctg

SEQ ID NO: 4568955 - DNA, 25 bp, Homo sapien
ctcatctgatttggcttgtagtgcc

SEQ ID NO: 4568956 - DNA, 25 bp, Homo sapien
agctgccttatccacccggagcttg

SEQ ID NO: 4568957 - DNA, 25 bp, Homo sapien
ttggcttgtagtgccgctgctgcag

SEQ ID NO: 4568958 - DNA, 25 bp, Homo sapien
cttgtagtgccgctgctgcagcagc

SEQ ID NO: 4568959 - DNA, 25 bp, Homo sapien
ttacaggcgtgagccaccgtgcccg

SEQ ID NO: 4568960 - DNA, 25 bp, Homo sapien
acctgcctcggcctcccaaagtgct

SEQ ID NO: 4568961 - DNA, 25 bp, Homo sapien
tacaggcgtgagccaccgtgcccgg

SEQ ID NO: 4568962 - DNA, 25 bp, Homo sapien
tcggcctcccaaagtgctgggatta

SEQ ID NO: 4568963 - DNA, 25 bp, Homo sapien
agcactttgggaggccgaggcaggt

SEQ ID NO: 4568964 - DNA, 25 bp, Homo sapien
cgggcacggtggctcacgcctgtaa

SEQ ID NO: 4568965 - DNA, 25 bp, Homo sapien
taatcccagcactttgggaggccga

SEQ ID NO: 4568966 - DNA, 25 bp, Homo sapien
ccgggcacggtggctcacgcctgta

SEQ ID NO: 4568967 - DNA, 25 bp, Homo sapien
atgcaaagaccatgcgccggaacac

SEQ ID NO: 4568968 - DNA, 25 bp, Homo sapien
gtgttccggcgcatggtctttgcat

SEQ ID NO: 4568969 - DNA, 25 bp, Homo sapien
agcagaatcttgaaaagcccagaga

SEQ ID NO: 4568970 - DNA, 25 bp, Homo sapien
gatgattaatacagatcttagcaga

SEQ ID NO: 4568971 - DNA, 25 bp, Homo sapien
cccatgcacaagatgattaatacag

SEQ ID NO: 4568972 - DNA, 25 bp, Homo sapien
cccagagatccaaagagcccttcga

SEQ ID NO: 4568973 - DNA, 25 bp, Homo sapien
gagatccaaagagcccttcgagcac

SEQ ID NO: 4568974 - DNA, 25 bp, Homo sapien
tcttcccatgcacaagatgattaat

SEQ ID NO: 4568975 - DNA, 25 bp, Homo sapien
ctgtattaatcatcttgtgcatggg

SEQ ID NO: 4568976 - DNA, 25 bp, Homo sapien
tctctgggcttttcaagattctgct

SEQ ID NO: 4568977 - DNA, 25 bp, Homo sapien
cgaagggctctttggatctctgggc

SEQ ID NO: 4568978 - DNA, 25 bp, Homo sapien
cgtggtgctcgaagggctctttgga

SEQ ID NO: 4568979 - DNA, 25 bp, Homo sapien
tctgctaagatctgtattaatcatc

SEQ ID NO: 4568980 - DNA, 25 bp, Homo sapien
tattaatcatcttgtgcatgggaag

SEQ ID NO: 4568981 - DNA, 25 bp, Homo sapien
gattacttttacatgtacatgtcaa

SEQ ID NO: 4568982 - DNA, 25 bp, Homo sapien
gcttcctgttctttggttgattact

SEQ ID NO: 4568983 - DNA, 25 bp, Homo sapien
cttcctgttctttggttgattactt

SEQ ID NO: 4568984 - DNA, 25 bp, Homo sapien
tgttctttggttgattacttttaca

SEQ ID NO: 4568985 - DNA, 25 bp, Homo sapien
tgtaaaagtaatcaaccaaagaaca

SEQ ID NO: 4568986 - DNA, 25 bp, Homo sapien
agtaatcaaccaaagaacaggaagc

SEQ ID NO: 4568987 - DNA, 25 bp, Homo sapien
ttgacatgtacatgtaaaagtaatc

SEQ ID NO: 4568988 - DNA, 25 bp, Homo sapien
aagtaatcaaccaaagaacaggaag

SEQ ID NO: 4568989 - DNA, 25 bp, Homo sapien
gattacttttacatgtacatgtcaa

SEQ ID NO: 4568990 - DNA, 25 bp, Homo sapien
gcttcctgttctttggttgattact

SEQ ID NO: 4568991 - DNA, 25 bp, Homo sapien
tcagttgagcttcctgttctttggt

SEQ ID NO: 4568992 - DNA, 25 bp, Homo sapien
aaagcttcagttgagcttcctgttc

SEQ ID NO: 4568993 - DNA, 25 bp, Homo sapien
cttcctgttctttggttgattactt

SEQ ID NO: 4568994 - DNA, 25 bp, Homo sapien
tgttctttggttgattacttttaca

SEQ ID NO: 4568995 - DNA, 25 bp, Homo sapien
gaagttagatgaattgtacggcact

SEQ ID NO: 4568996 - DNA, 25 bp, Homo sapien
tgtacggcacttggcgtaaagccgc

SEQ ID NO: 4568997 - DNA, 25 bp, Homo sapien
gactgaaagtgctttccggaagtta

SEQ ID NO: 4568998 - DNA, 25 bp, Homo sapien
cggcacttggcgtaaagccgcttcc

SEQ ID NO: 4568999 - DNA, 25 bp, Homo sapien
tgaattgtacggcacttggcgtaaa

SEQ ID NO: 4569000 - DNA, 25 bp, Homo sapien
gggacgtttctgcatttggactgaa

SEQ ID NO: 4569001 - DNA, 25 bp, Homo sapien
tttacgccaagtgccgtacaattca

SEQ ID NO: 4569002 - DNA, 25 bp, Homo sapien
gccaagtgccgtacaattcatctaa

SEQ ID NO: 4569003 - DNA, 25 bp, Homo sapien
tcagtccaaatgcagaaacgtccca

SEQ ID NO: 4569004 - DNA, 25 bp, Homo sapien
taacttccggaaagcactttcagtc

SEQ ID NO: 4569005 - DNA, 25 bp, Homo sapien
ggaagcggctttacgccaagtgccg

SEQ ID NO: 4569006 - DNA, 25 bp, Homo sapien
ggctttacgccaagtgccgtacaat

SEQ ID NO: 4569007 - DNA, 25 bp, Homo sapien
gtaccttttatagctcttaagccat

SEQ ID NO: 4569008 - DNA, 25 bp, Homo sapien
atggcttaagagctataaaaggtac

SEQ ID NO: 4569009 - DNA, 25 bp, Homo sapien
tgttggaatacaggctccctaattt

SEQ ID NO: 4569010 - DNA, 25 bp, Homo sapien
gtaccttttatagctcttaagccat

SEQ ID NO: 4569011 - DNA, 25 bp, Homo sapien
cttttgttggaatacaggctcccta

SEQ ID NO: 4569012 - DNA, 25 bp, Homo sapien
cttaagccataaagatgatttgtgt

SEQ ID NO: 4569013 - DNA, 25 bp, Homo sapien
agccataaagatgatttgtgtttct

SEQ ID NO: 4569014 - DNA, 25 bp, Homo sapien
tggaatacaggctccctaatttttc

SEQ ID NO: 4569015 - DNA, 25 bp, Homo sapien
atggcttaagagctataaaaggtac

SEQ ID NO: 4569016 - DNA, 25 bp, Homo sapien
aaattagggagcctgtattccaaca

SEQ ID NO: 4569017 - DNA, 25 bp, Homo sapien
gaaaaattagggagcctgtattcca

SEQ ID NO: 4569018 - DNA, 25 bp, Homo sapien
agaaacacaaatcatctttatggct

SEQ ID NO: 4569019 - DNA, 25 bp, Homo sapien
acacaaatcatctttatggcttaag

SEQ ID NO: 4569020 - DNA, 25 bp, Homo sapien
tagggagcctgtattccaacaaaag

SEQ ID NO: 4569021 - DNA, 25 bp, Homo sapien
catatattgactaggtatactctgc

SEQ ID NO: 4569022 - DNA, 25 bp, Homo sapien
ggtatactctgcaagtctactcagc

SEQ ID NO: 4569023 - DNA, 25 bp, Homo sapien
gatgagattccacttaaggtccgtg

SEQ ID NO: 4569024 - DNA, 25 bp, Homo sapien
gctgaaagagttgcaccattgatgg

SEQ ID NO: 4569025 - DNA, 25 bp, Homo sapien
tccacttaaggtccgtgtttctgaa

SEQ ID NO: 4569026 - DNA, 25 bp, Homo sapien
cagcttttgttatgatgagattcca

SEQ ID NO: 4569027 - DNA, 25 bp, Homo sapien
ccatcaatggtgcaactctttcagc

SEQ ID NO: 4569028 - DNA, 25 bp, Homo sapien
tcatttgtttcagaaacacggacct

SEQ ID NO: 4569029 - DNA, 25 bp, Homo sapien
aacacggaccttaagtggaatctca

SEQ ID NO: 4569030 - DNA, 25 bp, Homo sapien
caaaagctgagtagacttgcagagt

SEQ ID NO: 4569031 - DNA, 25 bp, Homo sapien
tggaatctcatcataacaaaagctg

SEQ ID NO: 4569032 - DNA, 25 bp, Homo sapien
cttgcagagtatacctagtcaatat

SEQ ID NO: 4569033 - DNA, 25 bp, Homo sapien
aaccgtcgccgtatccagcgcaggg

SEQ ID NO: 4569034 - DNA, 25 bp, Homo sapien
gaaaccgtcgccgtatccagcgcag

SEQ ID NO: 4569035 - DNA, 25 bp, Homo sapien
aaaccgtcgccgtatccagcgcagg

SEQ ID NO: 4569036 - DNA, 25 bp, Homo sapien
accgtcgccgtatccagcgcagggg

SEQ ID NO: 4569037 - DNA, 25 bp, Homo sapien
cccctgcgctggatacggcgacggt

SEQ ID NO: 4569038 - DNA, 25 bp, Homo sapien
ctgcgctggatacggcgacggtttc

SEQ ID NO: 4569039 - DNA, 25 bp, Homo sapien
cctgcgctggatacggcgacggttt

SEQ ID NO: 4569040 - DNA, 25 bp, Homo sapien
ccctgcgctggatacggcgacggtt

SEQ ID NO: 4569041 - DNA, 25 bp, Homo sapien
gaacttcctttggtagttgaagata

SEQ ID NO: 4569042 - DNA, 25 bp, Homo sapien
cttaaagcctggaatgatatcaaaa

SEQ ID NO: 4569043 - DNA, 25 bp, Homo sapien
tgctccttaagaaacttaaagcctg

SEQ ID NO: 4569044 - DNA, 25 bp, Homo sapien
tgaaggctacaagaagaccaaggaa

SEQ ID NO: 4569045 - DNA, 25 bp, Homo sapien
aagaccaaggaagctgttttgctcc

SEQ ID NO: 4569046 - DNA, 25 bp, Homo sapien
ggaagctgttttgctccttaagaaa

SEQ ID NO: 4569047 - DNA, 25 bp, Homo sapien
ggagcaaaacagcttccttggtctt

SEQ ID NO: 4569048 - DNA, 25 bp, Homo sapien
caggctttaagtttcttaaggagca

SEQ ID NO: 4569049 - DNA, 25 bp, Homo sapien
tttcttaaggagcaaaacagcttcc

SEQ ID NO: 4569050 - DNA, 25 bp, Homo sapien
ttccttggtcttcttgtagccttca

SEQ ID NO: 4569051 - DNA, 25 bp, Homo sapien
ctttatcttcaactaccaaaggaag

SEQ ID NO: 4569052 - DNA, 25 bp, Homo sapien
tcttcaactaccaaaggaagttcag

SEQ ID NO: 4569053 - DNA, 25 bp, Homo sapien
tgacttggcaaacggaataccattt

SEQ ID NO: 4569054 - DNA, 25 bp, Homo sapien
tttcaggataaccaagtaagtgtca

SEQ ID NO: 4569055 - DNA, 25 bp, Homo sapien
ctgacttggcaaacggaataccatt

SEQ ID NO: 4569056 - DNA, 25 bp, Homo sapien
tctgacttggcaaacggaataccat

SEQ ID NO: 4569057 - DNA, 25 bp, Homo sapien
gtttcaggataaccaagtaagtgtc

SEQ ID NO: 4569058 - DNA, 25 bp, Homo sapien
ttctgacttggcaaacggaatacca

SEQ ID NO: 4569059 - DNA, 25 bp, Homo sapien
tgacacttacttggttatcctgaaa

SEQ ID NO: 4569060 - DNA, 25 bp, Homo sapien
tggtattccgtttgccaagtcagaa

SEQ ID NO: 4569061 - DNA, 25 bp, Homo sapien
ggtattccgtttgccaagtcagaat

SEQ ID NO: 4569062 - DNA, 25 bp, Homo sapien
gacacttacttggttatcctgaaac

SEQ ID NO: 4569063 - DNA, 25 bp, Homo sapien
aatggtattccgtttgccaagtcag

SEQ ID NO: 4569064 - DNA, 25 bp, Homo sapien
aaatggtattccgtttgccaagtca

SEQ ID NO: 4569065 - DNA, 25 bp, Homo sapien
gcgccgttggcatcgtagagtgaac

SEQ ID NO: 4569066 - DNA, 25 bp, Homo sapien
aacctggcgccgttggcatcgtaga

SEQ ID NO: 4569067 - DNA, 25 bp, Homo sapien
cgccgttggcatcgtagagtgaaca

SEQ ID NO: 4569068 - DNA, 25 bp, Homo sapien
aaacctggcgccgttggcatcgtag

SEQ ID NO: 4569069 - DNA, 25 bp, Homo sapien
cctggcgccgttggcatcgtagagt

SEQ ID NO: 4569070 - DNA, 25 bp, Homo sapien
gccgttggcatcgtagagtgaacac

SEQ ID NO: 4569071 - DNA, 25 bp, Homo sapien
tgttcactctacgatgccaacggcg

SEQ ID NO: 4569072 - DNA, 25 bp, Homo sapien
gtgttcactctacgatgccaacggc

SEQ ID NO: 4569073 - DNA, 25 bp, Homo sapien
tctacgatgccaacggcgccaggtt

SEQ ID NO: 4569074 - DNA, 25 bp, Homo sapien
ctacgatgccaacggcgccaggttt

SEQ ID NO: 4569075 - DNA, 25 bp, Homo sapien
actctacgatgccaacggcgccagg

SEQ ID NO: 4569076 - DNA, 25 bp, Homo sapien
gttcactctacgatgccaacggcgc

SEQ ID NO: 4569077 - DNA, 25 bp, Homo sapien
aatgtgattcttgactggaaaaata

SEQ ID NO: 4569078 - DNA, 25 bp, Homo sapien
aaatgtgattcttgactggaaaaat

SEQ ID NO: 4569079 - DNA, 25 bp, Homo sapien
atgtgattcttgactggaaaaatag

SEQ ID NO: 4569080 - DNA, 25 bp, Homo sapien
atttttccagtcaagaatcacattt

SEQ ID NO: 4569081 - DNA, 25 bp, Homo sapien
ctatttttccagtcaagaatcacat

SEQ ID NO: 4569082 - DNA, 25 bp, Homo sapien
tatttttccagtcaagaatcacatt

SEQ ID NO: 4569083 - DNA, 25 bp, Homo sapien
cttgttgtaattactaaaatttgag

SEQ ID NO: 4569084 - DNA, 25 bp, Homo sapien
ctcaaattttagtaattacaacaag

SEQ ID NO: 4569085 - DNA, 25 bp, Homo sapien
gcctgctgtcagtaagctggtacag

SEQ ID NO: 4569086 - DNA, 25 bp, Homo sapien
gctgtcagtaagctggtacagaagg

SEQ ID NO: 4569087 - DNA, 25 bp, Homo sapien
aagctggtacagaaggttgacgaaa

SEQ ID NO: 4569088 - DNA, 25 bp, Homo sapien
cagtaagctggtacagaaggttgac

SEQ ID NO: 4569089 - DNA, 25 bp, Homo sapien
cagaaggttgacgaaaattcttact

SEQ ID NO: 4569090 - DNA, 25 bp, Homo sapien
tggtacagaaggttgacgaaaattc

SEQ ID NO: 4569091 - DNA, 25 bp, Homo sapien
caaccttctgtaccagcttactgac

SEQ ID NO: 4569092 - DNA, 25 bp, Homo sapien
ttctgtaccagcttactgacagcag

SEQ ID NO: 4569093 - DNA, 25 bp, Homo sapien
gaattttcgtcaaccttctgtacca

SEQ ID NO: 4569094 - DNA, 25 bp, Homo sapien
ctgtaccagcttactgacagcaggc

SEQ ID NO: 4569095 - DNA, 25 bp, Homo sapien
ttttcgtcaaccttctgtaccagct

SEQ ID NO: 4569096 - DNA, 25 bp, Homo sapien
agtaagaattttcgtcaaccttctg

SEQ ID NO: 4569097 - DNA, 25 bp, Homo sapien
aatttgcgtcttactctgttctcag

SEQ ID NO: 4569098 - DNA, 25 bp, Homo sapien
atgtcgtaatttgcgtcttactctg

SEQ ID NO: 4569099 - DNA, 25 bp, Homo sapien
tcgtaatttgcgtcttactctgttc

SEQ ID NO: 4569100 - DNA, 25 bp, Homo sapien
taatttgcgtcttactctgttctca

SEQ ID NO: 4569101 - DNA, 25 bp, Homo sapien
tgatgtcgtaatttgcgtcttactc

SEQ ID NO: 4569102 - DNA, 25 bp, Homo sapien
gatgtcgtaatttgcgtcttactct

SEQ ID NO: 4569103 - DNA, 25 bp, Homo sapien
gagaacagagtaagacgcaaattac

SEQ ID NO: 4569104 - DNA, 25 bp, Homo sapien
ctgagaacagagtaagacgcaaatt

SEQ ID NO: 4569105 - DNA, 25 bp, Homo sapien
aacagagtaagacgcaaattacgac

SEQ ID NO: 4569106 - DNA, 25 bp, Homo sapien
gagtaagacgcaaattacgacatca

SEQ ID NO: 4569107 - DNA, 25 bp, Homo sapien
cagagtaagacgcaaattacgacat

SEQ ID NO: 4569108 - DNA, 25 bp, Homo sapien
gaacagagtaagacgcaaattacga

SEQ ID NO: 4569109 - DNA, 25 bp, Homo sapien
tctctgatggaatttagcggcctgg

SEQ ID NO: 4569110 - DNA, 25 bp, Homo sapien
tacctaagactggtcatctctgatg

SEQ ID NO: 4569111 - DNA, 25 bp, Homo sapien
cggcctgggtctggtttattgatga

SEQ ID NO: 4569112 - DNA, 25 bp, Homo sapien
cctaagactggtcatctctgatgga

SEQ ID NO: 4569113 - DNA, 25 bp, Homo sapien
tattgatgataatacggtgtaaaaa

SEQ ID NO: 4569114 - DNA, 25 bp, Homo sapien
tgatggaatttagcggcctgggtct

SEQ ID NO: 4569115 - DNA, 25 bp, Homo sapien
catcagagatgaccagtcttaggta

SEQ ID NO: 4569116 - DNA, 25 bp, Homo sapien
tccatcagagatgaccagtcttagg

SEQ ID NO: 4569117 - DNA, 25 bp, Homo sapien
gacccaggccgctaaattccatcag

SEQ ID NO: 4569118 - DNA, 25 bp, Homo sapien
caggccgctaaattccatcagagat

SEQ ID NO: 4569119 - DNA, 25 bp, Homo sapien
ttttacaccgtattatcatcaataa

SEQ ID NO: 4569120 - DNA, 25 bp, Homo sapien
atcatcaataaaccagacccaggcc

SEQ ID NO: 4569121 - DNA, 25 bp, Homo sapien
tcatcagactagtgctgagtcttgg

SEQ ID NO: 4569122 - DNA, 25 bp, Homo sapien
gctgtggctcgaattcccagagttc

SEQ ID NO: 4569123 - DNA, 25 bp, Homo sapien
catcagactagtgctgagtcttggg

SEQ ID NO: 4569124 - DNA, 25 bp, Homo sapien
actcaccgctctggccagggtgctt

SEQ ID NO: 4569125 - DNA, 25 bp, Homo sapien
tcgaggtggtgggactcaccgctct

SEQ ID NO: 4569126 - DNA, 25 bp, Homo sapien
gcagagctgtggctcgaattcccag

SEQ ID NO: 4569127 - DNA, 25 bp, Homo sapien
caagactcagcactagtctgatgac

SEQ ID NO: 4569128 - DNA, 25 bp, Homo sapien
tctgggaattcgagccacagctctg

SEQ ID NO: 4569129 - DNA, 25 bp, Homo sapien
ccccaagactcagcactagtctgat

SEQ ID NO: 4569130 - DNA, 25 bp, Homo sapien
tggccagagcggtgagtcccaccac

SEQ ID NO: 4569131 - DNA, 25 bp, Homo sapien
cagtaccccaagactcagcactagt

SEQ ID NO: 4569132 - DNA, 25 bp, Homo sapien
aagcaccctggccagagcggtgagt

SEQ ID NO: 4569133 - DNA, 25 bp, Homo sapien
tgaaattccacttcattggtccgtg

SEQ ID NO: 4569134 - DNA, 25 bp, Homo sapien
cagtagtgatgaaattccacttcat

SEQ ID NO: 4569135 - DNA, 25 bp, Homo sapien
cattggtccgtgtttctgaaccaca

SEQ ID NO: 4569136 - DNA, 25 bp, Homo sapien
ccacttcattggtccgtgtttctga

SEQ ID NO: 4569137 - DNA, 25 bp, Homo sapien
cacatgattttctcggatgttctga

SEQ ID NO: 4569138 - DNA, 25 bp, Homo sapien
atgattttctcggatgttctgatgc

SEQ ID NO: 4569139 - DNA, 25 bp, Homo sapien
cagaacatccgagaaaatcatgtgg

SEQ ID NO: 4569140 - DNA, 25 bp, Homo sapien
tgtggttcagaaacacggaccaatg

SEQ ID NO: 4569141 - DNA, 25 bp, Homo sapien
cacggaccaatgaagtggaatttca

SEQ ID NO: 4569142 - DNA, 25 bp, Homo sapien
caatgaagtggaatttcatcactac

SEQ ID NO: 4569143 - DNA, 25 bp, Homo sapien
gcatcagaacatccgagaaaatcat

SEQ ID NO: 4569144 - DNA, 25 bp, Homo sapien
tcagaaacacggaccaatgaagtgg

SEQ ID NO: 4569145 - DNA, 25 bp, Homo sapien
tcgcccactgatatcggtgtactcc

SEQ ID NO: 4569146 - DNA, 25 bp, Homo sapien
gcccactgatatcggtgtactccga

SEQ ID NO: 4569147 - DNA, 25 bp, Homo sapien
cactgatatcggtgtactccgaaaa

SEQ ID NO: 4569148 - DNA, 25 bp, Homo sapien
cgtgtgctcgcccactgatatcggt

SEQ ID NO: 4569149 - DNA, 25 bp, Homo sapien
gtgtgctcgcccactgatatcggtg

SEQ ID NO: 4569150 - DNA, 25 bp, Homo sapien
tgatatcggtgtactccgaaaaggg

SEQ ID NO: 4569151 - DNA, 25 bp, Homo sapien
ccttttcggagtacaccgatatcag

SEQ ID NO: 4569152 - DNA, 25 bp, Homo sapien
ggagtacaccgatatcagtgggcga

SEQ ID NO: 4569153 - DNA, 25 bp, Homo sapien
caccgatatcagtgggcgagcacac

SEQ ID NO: 4569154 - DNA, 25 bp, Homo sapien
accgatatcagtgggcgagcacacg

SEQ ID NO: 4569155 - DNA, 25 bp, Homo sapien
tcggagtacaccgatatcagtgggc

SEQ ID NO: 4569156 - DNA, 25 bp, Homo sapien
ccttgaatacagcaggcaaagtgac

SEQ ID NO: 4569157 - DNA, 25 bp, Homo sapien
gagatgaggaccaaaggcgtctttt

SEQ ID NO: 4569158 - DNA, 25 bp, Homo sapien
tgtgcggcgatacggcagccatctt

SEQ ID NO: 4569159 - DNA, 25 bp, Homo sapien
ctttttctggtgtggaactgggatg

SEQ ID NO: 4569160 - DNA, 25 bp, Homo sapien
catagaatctgtaggagatagagcg

SEQ ID NO: 4569161 - DNA, 25 bp, Homo sapien
gcagccatcttagaggcaacgtggg

SEQ ID NO: 4569162 - DNA, 25 bp, Homo sapien
ttcccagcacaggacgcgccgggaa

SEQ ID NO: 4569163 - DNA, 25 bp, Homo sapien
gcactgggtcgttctcaggagcagt

SEQ ID NO: 4569164 - DNA, 25 bp, Homo sapien
agcactgggtcgttctcaggagcag

SEQ ID NO: 4569165 - DNA, 25 bp, Homo sapien
actgctcctgagaacgacccagtgc

SEQ ID NO: 4569166 - DNA, 25 bp, Homo sapien
ctgctcctgagaacgacccagtgct

SEQ ID NO: 4569167 - DNA, 25 bp, Homo sapien
agatggctgccgtatcgccgcacat

SEQ ID NO: 4569168 - DNA, 25 bp, Homo sapien
catcccagttccacaccagaaaaag

SEQ ID NO: 4569169 - DNA, 25 bp, Homo sapien
agattctatgctccgaaccccaaat

SEQ ID NO: 4569170 - DNA, 25 bp, Homo sapien
gaaaaagacgcctttggtcctcatc

SEQ ID NO: 4569171 - DNA, 25 bp, Homo sapien
cacgttgcctctaagatggctgccg

SEQ ID NO: 4569172 - DNA, 25 bp, Homo sapien
tcccggcgcgtcctgtgctgggaac

SEQ ID NO: 4569173 - DNA, 25 bp, Homo sapien
tgagaggagcgtggctgtctcctct

SEQ ID NO: 4569174 - DNA, 25 bp, Homo sapien
gaggagcgtggctgtctcctctctc

SEQ ID NO: 4569175 - DNA, 25 bp, Homo sapien
ctgagaggagcgtggctgtctcctc

SEQ ID NO: 4569176 - DNA, 25 bp, Homo sapien
ccgggctgagaggagcgtggctgtc

SEQ ID NO: 4569177 - DNA, 25 bp, Homo sapien
ggagcgtggctgtctcctctctccg

SEQ ID NO: 4569178 - DNA, 25 bp, Homo sapien
cgggctgagaggagcgtggctgtct

SEQ ID NO: 4569179 - DNA, 25 bp, Homo sapien
ggcggagagaggagacagccacgct

SEQ ID NO: 4569180 - DNA, 25 bp, Homo sapien
gagagaggagacagccacgctcctc

SEQ ID NO: 4569181 - DNA, 25 bp, Homo sapien
gaggagacagccacgctcctctcag

SEQ ID NO: 4569182 - DNA, 25 bp, Homo sapien
cggagagaggagacagccacgctcc

SEQ ID NO: 4569183 - DNA, 25 bp, Homo sapien
agaggagacagccacgctcctctca

SEQ ID NO: 4569184 - DNA, 25 bp, Homo sapien
ggagagaggagacagccacgctcct

SEQ ID NO: 4569185 - DNA, 25 bp, Homo sapien
ggtaagcacttccttttcctgtggc

SEQ ID NO: 4569186 - DNA, 25 bp, Homo sapien
gcacttccttttcctgtggcagcag

SEQ ID NO: 4569187 - DNA, 25 bp, Homo sapien
tggtaagcacttccttttcctgtgg

SEQ ID NO: 4569188 - DNA, 25 bp, Homo sapien
aagcacttccttttcctgtggcagc

SEQ ID NO: 4569189 - DNA, 25 bp, Homo sapien
taagcacttccttttcctgtggcag

SEQ ID NO: 4569190 - DNA, 25 bp, Homo sapien
gtaagcacttccttttcctgtggca

SEQ ID NO: 4569191 - DNA, 25 bp, Homo sapien
ctgccacaggaaaaggaagtgctta

SEQ ID NO: 4569192 - DNA, 25 bp, Homo sapien
ccacaggaaaaggaagtgcttacca

SEQ ID NO: 4569193 - DNA, 25 bp, Homo sapien
gccacaggaaaaggaagtgcttacc

SEQ ID NO: 4569194 - DNA, 25 bp, Homo sapien
ctgctgccacaggaaaaggaagtgc

SEQ ID NO: 4569195 - DNA, 25 bp, Homo sapien
tgctgccacaggaaaaggaagtgct

SEQ ID NO: 4569196 - DNA, 25 bp, Homo sapien
tgccacaggaaaaggaagtgcttac

SEQ ID NO: 4569197 - DNA, 25 bp, Homo sapien
cgagagtgttatttctttatttgtg

SEQ ID NO: 4569198 - DNA, 25 bp, Homo sapien
gagagtgttatttctttatttgtgg

SEQ ID NO: 4569199 - DNA, 25 bp, Homo sapien
gagtgttatttctttatttgtggga

SEQ ID NO: 4569200 - DNA, 25 bp, Homo sapien
aacgagagtgttatttctttatttg

SEQ ID NO: 4569201 - DNA, 25 bp, Homo sapien
gacatagtaaatagctctgggtggc

SEQ ID NO: 4569202 - DNA, 25 bp, Homo sapien
gaggccaactctcgcgagtcgaggt

SEQ ID NO: 4569203 - DNA, 25 bp, Homo sapien
gcagttcagtttggcggttccggta

SEQ ID NO: 4569204 - DNA, 25 bp, Homo sapien
gagtcgaggtatcttctccccaacc

SEQ ID NO: 4569205 - DNA, 25 bp, Homo sapien
ttggggcgggatgtgggagcggctg

SEQ ID NO: 4569206 - DNA, 25 bp, Homo sapien
attggggcgggatgtgggagcggct

SEQ ID NO: 4569207 - DNA, 25 bp, Homo sapien
ggggcgggatgtgggagcggctgaa

SEQ ID NO: 4569208 - DNA, 25 bp, Homo sapien
tggggcgggatgtgggagcggctga

SEQ ID NO: 4569209 - DNA, 25 bp, Homo sapien
tgccataagtagaggcaccacccgg

SEQ ID NO: 4569210 - DNA, 25 bp, Homo sapien
tgtctcaggagaaaacgtgtacgtc

SEQ ID NO: 4569211 - DNA, 25 bp, Homo sapien
gaaaactaggtgttggcatccttcc

SEQ ID NO: 4569212 - DNA, 25 bp, Homo sapien
tcaaacgagatggaaggtggcaagt

SEQ ID NO: 4569213 - DNA, 25 bp, Homo sapien
ccttgccatattgaagctccctgct

SEQ ID NO: 4569214 - DNA, 25 bp, Homo sapien
gctgaacccccaatccttgccatat

SEQ ID NO: 4569215 - DNA, 25 bp, Homo sapien
tgccatattgaagctccctgctcat

SEQ ID NO: 4569216 - DNA, 25 bp, Homo sapien
tcaacttctactgaacttccactcc

SEQ ID NO: 4569217 - DNA, 25 bp, Homo sapien
gctcggatcctgtcatactctatca

SEQ ID NO: 4569218 - DNA, 25 bp, Homo sapien
caagctccttgcttgtagctcggat

SEQ ID NO: 4569219 - DNA, 25 bp, Homo sapien
tgtgtgcatcttgatctacctggta

SEQ ID NO: 4569220 - DNA, 25 bp, Homo sapien
tgtgcatcttgatctacctggtatg

SEQ ID NO: 4569221 - DNA, 25 bp, Homo sapien
gcttttgcggcctaacttgactgct

SEQ ID NO: 4569222 - DNA, 25 bp, Homo sapien
gccagcctatggttcccacatttga

SEQ ID NO: 4569223 - DNA, 25 bp, Homo sapien
tctaccctggttgggatcacaccac

SEQ ID NO: 4569224 - DNA, 25 bp, Homo sapien
gaagatcccttgatggtttagctac

SEQ ID NO: 4569225 - DNA, 25 bp, Homo sapien
tttctacattatcaatgtcgatttg

SEQ ID NO: 4569226 - DNA, 25 bp, Homo sapien
gatgaagtcctctataaggtattta

SEQ ID NO: 4569227 - DNA, 25 bp, Homo sapien
gcagccaggtgcatttcaagtgaag

SEQ ID NO: 4569228 - DNA, 25 bp, Homo sapien
agttctttctacattatcaatgtcg

SEQ ID NO: 4569229 - DNA, 25 bp, Homo sapien
tatctatcaggtatgggacagtgct

SEQ ID NO: 4569230 - DNA, 25 bp, Homo sapien
aaacagcaatgtatggaaaccctca

SEQ ID NO: 4569231 - DNA, 25 bp, Homo sapien
aaagtgtcagaagagtgtacgtgct

SEQ ID NO: 4569232 - DNA, 25 bp, Homo sapien
gaagattctcttatgaagctccaaa

SEQ ID NO: 4569233 - DNA, 25 bp, Homo sapien
gatctccgtaaccatttgcatgtga

SEQ ID NO: 4569234 - DNA, 25 bp, Homo sapien
ggagcagacagtgggtaccacgatc

SEQ ID NO: 4569235 - DNA, 25 bp, Homo sapien
cagtgggtaccacgatctccgtaac

SEQ ID NO: 4569236 - DNA, 25 bp, Homo sapien
cctcaggaggagcattagtagaaca

SEQ ID NO: 4569237 - DNA, 25 bp, Homo sapien
cctcacgtggagttcacaggctcat

SEQ ID NO: 4569238 - DNA, 25 bp, Homo sapien
taaggcactggacatcctcacgtgg

SEQ ID NO: 4569239 - DNA, 25 bp, Homo sapien
tagtggccacttaggtaatacccac

SEQ ID NO: 4569240 - DNA, 25 bp, Homo sapien
ttatcttgtgtgctgggtactctgg

SEQ ID NO: 4569241 - DNA, 25 bp, Homo sapien
tcatcccagttggtatagtggttgg

SEQ ID NO: 4569242 - DNA, 25 bp, Homo sapien
tttccttcatcccagttggtatagt

SEQ ID NO: 4569243 - DNA, 25 bp, Homo sapien
tccttcatcccagttggtatagtgg

SEQ ID NO: 4569244 - DNA, 25 bp, Homo sapien
cagttggtatagtggttggcttttc

SEQ ID NO: 4569245 - DNA, 25 bp, Homo sapien
gcagcaagcatctgattgttgatag

SEQ ID NO: 4569246 - DNA, 25 bp, Homo sapien
agcaagcatctgattgttgatagag

SEQ ID NO: 4569247 - DNA, 25 bp, Homo sapien
tgcagcaagcatctgattgttgata

SEQ ID NO: 4569248 - DNA, 25 bp, Homo sapien
cagcaagcatctgattgttgataga

SEQ ID NO: 4569249 - DNA, 25 bp, Homo sapien
agataacattgataatgaggcctac

SEQ ID NO: 4569250 - DNA, 25 bp, Homo sapien
taaagttcagaacagataacattga

SEQ ID NO: 4569251 - DNA, 25 bp, Homo sapien
agttcagaacagataacattgataa

SEQ ID NO: 4569252 - DNA, 25 bp, Homo sapien
aacagataacattgataatgaggcc

SEQ ID NO: 4569253 - DNA, 25 bp, Homo sapien
tggatagcgaggcttatttctgtcg

SEQ ID NO: 4569254 - DNA, 25 bp, Homo sapien
cattcaaacttatccaacagagacc

SEQ ID NO: 4569255 - DNA, 25 bp, Homo sapien
ctcttggattgggaaacccattggc

SEQ ID NO: 4569256 - DNA, 25 bp, Homo sapien
ggaagtatacccctttatattagca

SEQ ID NO: 4569257 - DNA, 25 bp, Homo sapien
tcatcacataattgagtacagtgga

SEQ ID NO: 4569258 - DNA, 25 bp, Homo sapien
tctccactcatcacataattgagta

SEQ ID NO: 4569259 - DNA, 25 bp, Homo sapien
tccatcacatatatgggaggatcac

SEQ ID NO: 4569260 - DNA, 25 bp, Homo sapien
tttccatcacatatatgggaggatc

SEQ ID NO: 4569261 - DNA, 25 bp, Homo sapien
ctgaaagtgagtcatagcaacaaat

SEQ ID NO: 4569262 - DNA, 25 bp, Homo sapien
tgaaagtgagtcatagcaacaaata

SEQ ID NO: 4569263 - DNA, 25 bp, Homo sapien
tagttcctttccgtgatgtaccgag

SEQ ID NO: 4569264 - DNA, 25 bp, Homo sapien
tcacgatcgttctggtagctgggcc

SEQ ID NO: 4569265 - DNA, 25 bp, Homo sapien
cctggagtgagaacaccggtaacct

SEQ ID NO: 4569266 - DNA, 25 bp, Homo sapien
gaatatagccatttagaccccagat

SEQ ID NO: 4569267 - DNA, 25 bp, Homo sapien
tggggttggcaaaccagcccagaca

SEQ ID NO: 4569268 - DNA, 25 bp, Homo sapien
cagaactgtaggtatctctcggcag

SEQ ID NO: 4569269 - DNA, 25 bp, Homo sapien
tctcggcagcctctaggtccttggg

SEQ ID NO: 4569270 - DNA, 25 bp, Homo sapien
gacttgggggtagtcaccggcataa

SEQ ID NO: 4569271 - DNA, 25 bp, Homo sapien
gctgcgccacgtggtgttataagaa

SEQ ID NO: 4569272 - DNA, 25 bp, Homo sapien
ccacgtggtgttataagaatgccag

SEQ ID NO: 4569273 - DNA, 25 bp, Homo sapien
tggtgttataagaatgccaggcttt

SEQ ID NO: 4569274 - DNA, 25 bp, Homo sapien
cgccacgtggtgttataagaatgcc

SEQ ID NO: 4569275 - DNA, 25 bp, Homo sapien
gggagcagaaattcatcgtaggtac

SEQ ID NO: 4569276 - DNA, 25 bp, Homo sapien
cagaaattcatcgtaggtacctggc

SEQ ID NO: 4569277 - DNA, 25 bp, Homo sapien
aattcatcgtaggtacctggcccat

SEQ ID NO: 4569278 - DNA, 25 bp, Homo sapien
atcgtaggtacctggcccatccatt

SEQ ID NO: 4569279 - DNA, 25 bp, Homo sapien
cctccaccagaaggacccacctcac

SEQ ID NO: 4569280 - DNA, 25 bp, Homo sapien
ctgaggctgttcctccaccagaagg

SEQ ID NO: 4569281 - DNA, 25 bp, Homo sapien
cctgaggctgttcctccaccagaag

SEQ ID NO: 4569282 - DNA, 25 bp, Homo sapien
tgttcctccaccagaaggacccacc

SEQ ID NO: 4569283 - DNA, 25 bp, Homo sapien
tgtgctgccttgtacaggccggtgc

SEQ ID NO: 4569284 - DNA, 25 bp, Homo sapien
ctgccttgtacaggccggtgccgcg

SEQ ID NO: 4569285 - DNA, 25 bp, Homo sapien
tggtggcccgtctcatagccttttt

SEQ ID NO: 4569286 - DNA, 25 bp, Homo sapien
tcaggcccggcgcatggtggcccgt

SEQ ID NO: 4569287 - DNA, 25 bp, Homo sapien
ccgaggatcactgaacgtgatccag

SEQ ID NO: 4569288 - DNA, 25 bp, Homo sapien
gatcactgaacgtgatccagtgctt

SEQ ID NO: 4569289 - DNA, 25 bp, Homo sapien
gaacgtgatccagtgcttcacacgg

SEQ ID NO: 4569290 - DNA, 25 bp, Homo sapien
gtgatccagtgcttcacacggtccc

SEQ ID NO: 4569291 - DNA, 25 bp, Homo sapien
tcacattctgccacccaccgtattt

SEQ ID NO: 4569292 - DNA, 25 bp, Homo sapien
gaagtagttggccatgctcacattc

SEQ ID NO: 4569293 - DNA, 25 bp, Homo sapien
cattctgccacccaccgtatttgac

SEQ ID NO: 4569294 - DNA, 25 bp, Homo sapien
acattctgccacccaccgtatttga

SEQ ID NO: 4569295 - DNA, 25 bp, Homo sapien
taagatcactgtagaattcgattcc

SEQ ID NO: 4569296 - DNA, 25 bp, Homo sapien
tcagaagggcatcgataagatcact

SEQ ID NO: 4569297 - DNA, 25 bp, Homo sapien
tggcagatcccagtggtgcaaggtc

SEQ ID NO: 4569298 - DNA, 25 bp, Homo sapien
cacgatgggagtgatgttgctgctc

SEQ ID NO: 4569299 - DNA, 25 bp, Homo sapien
cttggccttggccttctggagtgca

SEQ ID NO: 4569300 - DNA, 25 bp, Homo sapien
ggccttggccttctggagtgcagca

SEQ ID NO: 4569301 - DNA, 25 bp, Homo sapien
tggccttggccttctggagtgcagc

SEQ ID NO: 4569302 - DNA, 25 bp, Homo sapien
ccttggccttctggagtgcagcatt

SEQ ID NO: 4569303 - DNA, 25 bp, Homo sapien
ggttcaagaggggcttccctagctc

SEQ ID NO: 4569304 - DNA, 25 bp, Homo sapien
tgggttcaagaggggcttccctagc

SEQ ID NO: 4569305 - DNA, 25 bp, Homo sapien
gttcaagaggggcttccctagctca

SEQ ID NO: 4569306 - DNA, 25 bp, Homo sapien
ttcaagaggggcttccctagctcac

SEQ ID NO: 4569307 - DNA, 25 bp, Homo sapien
atcggtagtggttgacgtgcagttc

SEQ ID NO: 4569308 - DNA, 25 bp, Homo sapien
gccaagacagggagaatcggtagtg

SEQ ID NO: 4569309 - DNA, 25 bp, Homo sapien
tgacgtgcagttccctcagcagaat

SEQ ID NO: 4569310 - DNA, 25 bp, Homo sapien
caagacagggagaatcggtagtggt

SEQ ID NO: 4569311 - DNA, 25 bp, Homo sapien
agacgtcccagatgctaggcccttt

SEQ ID NO: 4569312 - DNA, 25 bp, Homo sapien
tcccactgtgtgtgaagacgtccca

SEQ ID NO: 4569313 - DNA, 25 bp, Homo sapien
ctggaccttgtagtagccgtcacag

SEQ ID NO: 4569314 - DNA, 25 bp, Homo sapien
cacaggctacatctgccgtctcatt

SEQ ID NO: 4569315 - DNA, 25 bp, Homo sapien
gggtggcgacccacactggcttcat

SEQ ID NO: 4569316 - DNA, 25 bp, Homo sapien
cctgggcaccagcagtagcatccac

SEQ ID NO: 4569317 - DNA, 25 bp, Homo sapien
tagcatccacagaagggtggcgacc

SEQ ID NO: 4569318 - DNA, 25 bp, Homo sapien
agggaaggttccatagtagaaggag

SEQ ID NO: 4569319 - DNA, 25 bp, Homo sapien
ctgaaaaagtgcagctggctctgca

SEQ ID NO: 4569320 - DNA, 25 bp, Homo sapien
agcagtcgctggtagtcagagccct

SEQ ID NO: 4569321 - DNA, 25 bp, Homo sapien
ccagagcagtcgctggtagtcagag

SEQ ID NO: 4569322 - DNA, 25 bp, Homo sapien
ccagggcctacgctgtcccctgaga

SEQ ID NO: 4569323 - DNA, 25 bp, Homo sapien
ccaggatcgtccttgatcgcagaca

SEQ ID NO: 4569324 - DNA, 25 bp, Homo sapien
tgatggcagcatcggtgtcttcgcc

SEQ ID NO: 4569325 - DNA, 25 bp, Homo sapien
gcatcggtgtcttcgccatcagctc

SEQ ID NO: 4569326 - DNA, 25 bp, Homo sapien
agtgatggcagcatcggtgtcttcg

SEQ ID NO: 4569327 - DNA, 25 bp, Homo sapien
ggcagcatcggtgtcttcgccatca

SEQ ID NO: 4569328 - DNA, 25 bp, Homo sapien
tctgagagtccttcagcattgggtc

SEQ ID NO: 4569329 - DNA, 25 bp, Homo sapien
ttctgagagtccttcagcattgggt

SEQ ID NO: 4569330 - DNA, 25 bp, Homo sapien
ccaggatctgttgagggcaaggatg

SEQ ID NO: 4569331 - DNA, 25 bp, Homo sapien
caggttgccaggatctgttgagggc

SEQ ID NO: 4569332 - DNA, 25 bp, Homo sapien
ccagcagttccagcctggcggccag

SEQ ID NO: 4569333 - DNA, 25 bp, Homo sapien
acagagatgacccagccagtgccag

SEQ ID NO: 4569334 - DNA, 25 bp, Homo sapien
tcctggccgtctgactcatctccgg

SEQ ID NO: 4569335 - DNA, 25 bp, Homo sapien
gacagaaatgactcctgagagccac

SEQ ID NO: 4569336 - DNA, 25 bp, Homo sapien
agccagtgccagaggtcaccaggcc

SEQ ID NO: 4569337 - DNA, 25 bp, Homo sapien
gtgtgtttgtgaacagagttcatcg

SEQ ID NO: 4569338 - DNA, 25 bp, Homo sapien
cagagttcatcgaggtcttgctttg

SEQ ID NO: 4569339 - DNA, 25 bp, Homo sapien
ttgtgaacagagttcatcgaggtct

SEQ ID NO: 4569340 - DNA, 25 bp, Homo sapien
cactctggggaacagccctgtaggc

SEQ ID NO: 4569341 - DNA, 25 bp, Homo sapien
gaagtcactgttcagcatgtgcatc

SEQ ID NO: 4569342 - DNA, 25 bp, Homo sapien
gacctttaaggaggcaggcaagaag

SEQ ID NO: 4569343 - DNA, 25 bp, Homo sapien
caccaggtgattgggtttggatgct

SEQ ID NO: 4569344 - DNA, 25 bp, Homo sapien
tggaggatctgtagtttatcaggac

SEQ ID NO: 4569345 - DNA, 25 bp, Homo sapien
ctgcttccgaggtcttacagcgcag

SEQ ID NO: 4569346 - DNA, 25 bp, Homo sapien
cttccgaggtcttacagcgcagttc

SEQ ID NO: 4569347 - DNA, 25 bp, Homo sapien
cgaggtcttacagcgcagttcaggc

SEQ ID NO: 4569348 - DNA, 25 bp, Homo sapien
gctgagggtgcggtctcatccacca

SEQ ID NO: 4569349 - DNA, 25 bp, Homo sapien
catcccggctctgagtggggcgcat

SEQ ID NO: 4569350 - DNA, 25 bp, Homo sapien
ccggggagggcatcccggctctgag

SEQ ID NO: 4569351 - DNA, 25 bp, Homo sapien
gcatcccggctctgagtggggcgca

SEQ ID NO: 4569352 - DNA, 25 bp, Homo sapien
ggagggcatcccggctctgagtggg

SEQ ID NO: 4569353 - DNA, 25 bp, Homo sapien
cagtggtatccagtggctgtgtgtc

SEQ ID NO: 4569354 - DNA, 25 bp, Homo sapien
gagggtaagattggagcaggcattg

SEQ ID NO: 4569355 - DNA, 25 bp, Homo sapien
gctgagcagggagggtaagattgga

SEQ ID NO: 4569356 - DNA, 25 bp, Homo sapien
ccaaaggtgaatctgagcccagatt

SEQ ID NO: 4569357 - DNA, 25 bp, Homo sapien
tttcatgggcttgggttccataggc

SEQ ID NO: 4569358 - DNA, 25 bp, Homo sapien
gtgtgatcagaaagagttgctggcc

SEQ ID NO: 4569359 - DNA, 25 bp, Homo sapien
ggttccataggctttcatccagttg

SEQ ID NO: 4569360 - DNA, 25 bp, Homo sapien
tgtgatcagaaagagttgctggcca

SEQ ID NO: 4569361 - DNA, 25 bp, Homo sapien
attgcaagagtccttacaagtggca

SEQ ID NO: 4569362 - DNA, 25 bp, Homo sapien
cctagagatgtcatgccctaatccc

SEQ ID NO: 4569363 - DNA, 25 bp, Homo sapien
gtcttgggttatctgatgggaccct

SEQ ID NO: 4569364 - DNA, 25 bp, Homo sapien
tgggaccctgcctaattgcaagagt

SEQ ID NO: 4569365 - DNA, 25 bp, Homo sapien
tagcttccactgagtgcaggtcaag

SEQ ID NO: 4569366 - DNA, 25 bp, Homo sapien
ctcttagcttccactgagtgcaggt

SEQ ID NO: 4569367 - DNA, 25 bp, Homo sapien
tgagtgcaggtcaagccttcctgtt

SEQ ID NO: 4569368 - DNA, 25 bp, Homo sapien
tccactgagtgcaggtcaagccttc

SEQ ID NO: 4569369 - DNA, 25 bp, Homo sapien
gaggtgtggtgcattcacagagacc

SEQ ID NO: 4569370 - DNA, 25 bp, Homo sapien
tggtgcattcacagagacccaggtt

SEQ ID NO: 4569371 - DNA, 25 bp, Homo sapien
cctgagaggtgtggtgcattcacag

SEQ ID NO: 4569372 - DNA, 25 bp, Homo sapien
tccctgagaggtgtggtgcattcac

SEQ ID NO: 4569373 - DNA, 25 bp, Homo sapien
gagaaagtcgcttggcatcagcagc

SEQ ID NO: 4569374 - DNA, 25 bp, Homo sapien
tggatttaccatgcctgccttgccc

SEQ ID NO: 4569375 - DNA, 25 bp, Homo sapien
cagctggtatgatggatttaccatg

SEQ ID NO: 4569376 - DNA, 25 bp, Homo sapien
atgactgcacccatagtcttctgtg

SEQ ID NO: 4569377 - DNA, 25 bp, Homo sapien
cccaaggctcataaagttgagggag

SEQ ID NO: 4569378 - DNA, 25 bp, Homo sapien
tggccacagcgcatgccaggcacta

SEQ ID NO: 4569379 - DNA, 25 bp, Homo sapien
gatgggccctaggaatccaaggaca

SEQ ID NO: 4569380 - DNA, 25 bp, Homo sapien
tgtcacttaattttgtcagccacct

SEQ ID NO: 4569381 - DNA, 25 bp, Homo sapien
gtgtgtgctcgctcgcatccgtgct

SEQ ID NO: 4569382 - DNA, 25 bp, Homo sapien
tgctcgtggctcgtgtaaccctgtg

SEQ ID NO: 4569383 - DNA, 25 bp, Homo sapien
ttgcgtccgagtctcagtgggtccg

SEQ ID NO: 4569384 - DNA, 25 bp, Homo sapien
taagtttgtgcacaagccagggaga

SEQ ID NO: 4569385 - DNA, 25 bp, Homo sapien
cgcacgaagcgtccgagggcagcgt

SEQ ID NO: 4569386 - DNA, 25 bp, Homo sapien
tcggcgcacgaagcgtccgagggca

SEQ ID NO: 4569387 - DNA, 25 bp, Homo sapien
agcctcggcgcacgaagcgtccgag

SEQ ID NO: 4569388 - DNA, 25 bp, Homo sapien
gcagcctcggcgcacgaagcgtccg

SEQ ID NO: 4569389 - DNA, 25 bp, Homo sapien
gcacaacttttgaaggctcgccggc

SEQ ID NO: 4569390 - DNA, 25 bp, Homo sapien
gtatgttcaggtccaaacgctcggg

SEQ ID NO: 4569391 - DNA, 25 bp, Homo sapien
gctttgtgctcatggaccagccgca

SEQ ID NO: 4569392 - DNA, 25 bp, Homo sapien
gatcctgcgggaaaagcccatgtag

SEQ ID NO: 4569393 - DNA, 25 bp, Homo sapien
agtgactgcgagacggtgacctgct

SEQ ID NO: 4569394 - DNA, 25 bp, Homo sapien
gagctccctgctggacgtggcggag

SEQ ID NO: 4569395 - DNA, 25 bp, Homo sapien
cccgaggcccatgtcggagccaggg

SEQ ID NO: 4569396 - DNA, 25 bp, Homo sapien
gcccgggctggctgcccgagagtga

SEQ ID NO: 4569397 - DNA, 25 bp, Homo sapien
ggacatgatgtaggctccaacttca

SEQ ID NO: 4569398 - DNA, 25 bp, Homo sapien
tccaacttcataggcagtgaaaggg

SEQ ID NO: 4569399 - DNA, 25 bp, Homo sapien
caaagaagtaggtgctatttcctcc

SEQ ID NO: 4569400 - DNA, 25 bp, Homo sapien
aattccggaatctaccccagtctgt

SEQ ID NO: 4569401 - DNA, 25 bp, Homo sapien
cttgaatgccacttcagggagggct

SEQ ID NO: 4569402 - DNA, 25 bp, Homo sapien
tccaataagtagtgtgccagggcgg

SEQ ID NO: 4569403 - DNA, 25 bp, Homo sapien
gaaagggcatcccagcttaggaaac

SEQ ID NO: 4569404 - DNA, 25 bp, Homo sapien
ggcagtaaggaatgagccccacagg

SEQ ID NO: 4569405 - DNA, 25 bp, Homo sapien
catttgtgtcttgaggttgtaacca

SEQ ID NO: 4569406 - DNA, 25 bp, Homo sapien
tcagactgtgagtgacttttgggca

SEQ ID NO: 4569407 - DNA, 25 bp, Homo sapien
cccacctcatgcaggaggacatggt

SEQ ID NO: 4569408 - DNA, 25 bp, Homo sapien
tcattacccatgagtcagtcctggc

SEQ ID NO: 4569409 - DNA, 25 bp, Homo sapien
tctcatacacgaatctgttcgtgtc

SEQ ID NO: 4569410 - DNA, 25 bp, Homo sapien
gtgccactctcatacacgaatctgt

SEQ ID NO: 4569411 - DNA, 25 bp, Homo sapien
acacgtgccactctcatacacgaat

SEQ ID NO: 4569412 - DNA, 25 bp, Homo sapien
gggctgtgcacacgtgccactctca

SEQ ID NO: 4569413 - DNA, 25 bp, Homo sapien
aacacttttccatgttgcacccagg

SEQ ID NO: 4569414 - DNA, 25 bp, Homo sapien
cagggagcgtgtctgccatgaattc

SEQ ID NO: 4569415 - DNA, 25 bp, Homo sapien
ccaggcttccaaatgtctacgaata

SEQ ID NO: 4569416 - DNA, 25 bp, Homo sapien
tacgaataaccctgctttgtccagg

SEQ ID NO: 4569417 - DNA, 25 bp, Homo sapien
tcctcccggctggtctttgtgggcc

SEQ ID NO: 4569418 - DNA, 25 bp, Homo sapien
tctgggtgttccctcagggcgttca

SEQ ID NO: 4569419 - DNA, 25 bp, Homo sapien
tttggactgcctccgtcagcaggag

SEQ ID NO: 4569420 - DNA, 25 bp, Homo sapien
cccgtggggaactaagcctgctcct

SEQ ID NO: 4569421 - DNA, 25 bp, Homo sapien
tcatgacatacagctcttggaaggt

SEQ ID NO: 4569422 - DNA, 25 bp, Homo sapien
tgagaccctcccagtacttttagga

SEQ ID NO: 4569423 - DNA, 25 bp, Homo sapien
gacaagggtaacatttgctaaaggc

SEQ ID NO: 4569424 - DNA, 25 bp, Homo sapien
ctgtgggaactcagcagaattgcct

SEQ ID NO: 4569425 - DNA, 25 bp, Homo sapien
tagagttgggaaaagcgacttctgg

SEQ ID NO: 4569426 - DNA, 25 bp, Homo sapien
atgtaactcaaaagtcccggcctgc

SEQ ID NO: 4569427 - DNA, 25 bp, Homo sapien
gttgtgcgacacttgatgtaactca

SEQ ID NO: 4569428 - DNA, 25 bp, Homo sapien
tcttgcagcagtagccacaacacag

SEQ ID NO: 4569429 - DNA, 25 bp, Homo sapien
ctctgcattgccgagagcacctctg

SEQ ID NO: 4569430 - DNA, 25 bp, Homo sapien
ctgttaggcgacatagtaccaggtc

SEQ ID NO: 4569431 - DNA, 25 bp, Homo sapien
cgagagcacctctgttaggcgacat

SEQ ID NO: 4569432 - DNA, 25 bp, Homo sapien
gagcacctctgttaggcgacatagt

SEQ ID NO: 4569433 - DNA, 25 bp, Homo sapien
tgaagggagcttgtaccacagagcc

SEQ ID NO: 4569434 - DNA, 25 bp, Homo sapien
gctatagctgcctgcggagagtgta

SEQ ID NO: 4569435 - DNA, 25 bp, Homo sapien
gaggagatagctctaccaccagcct

SEQ ID NO: 4569436 - DNA, 25 bp, Homo sapien
tccgcgtggctcttcgaagctatag

SEQ ID NO: 4569437 - DNA, 25 bp, Homo sapien
tggcagcccaggcttgtgactgaga

SEQ ID NO: 4569438 - DNA, 25 bp, Homo sapien
tgcagctgtgggaagtacagagtgg

SEQ ID NO: 4569439 - DNA, 25 bp, Homo sapien
tgagtggcagcccaggcttgtgact

SEQ ID NO: 4569440 - DNA, 25 bp, Homo sapien
gcccaggcttgtgactgagaggcac

SEQ ID NO: 4569441 - DNA, 25 bp, Homo sapien
tactccatcaaggtgttcgacttcg

SEQ ID NO: 4569442 - DNA, 25 bp, Homo sapien
gtccgcatcagcttcgccaagggct

SEQ ID NO: 4569443 - DNA, 25 bp, Homo sapien
tcaacaaccccagatagtggcggcc

SEQ ID NO: 4569444 - DNA, 25 bp, Homo sapien
caaaaagctaataccagtcactcga

SEQ ID NO: 4569445 - DNA, 25 bp, Homo sapien
aaagactgaaatgggccttgagccc

SEQ ID NO: 4569446 - DNA, 25 bp, Homo sapien
tcgagccccgtagatctttttagga

SEQ ID NO: 4569447 - DNA, 25 bp, Homo sapien
tctccttggccagataactaagagg

SEQ ID NO: 4569448 - DNA, 25 bp, Homo sapien
taggaccagagccatatcattagat

SEQ ID NO: 4569449 - DNA, 25 bp, Homo sapien
aagggtgcagcatccccccagaatc

SEQ ID NO: 4569450 - DNA, 25 bp, Homo sapien
aggagaagcctggattgcccgtgtg

SEQ ID NO: 4569451 - DNA, 25 bp, Homo sapien
cctggattgcccgtgtggctcttcc

SEQ ID NO: 4569452 - DNA, 25 bp, Homo sapien
ccgacacagccgctggcagcggaag

SEQ ID NO: 4569453 - DNA, 25 bp, Homo sapien
taagtctgaagtcggtaccataacc

SEQ ID NO: 4569454 - DNA, 25 bp, Homo sapien
cgctggcttgcgtttagggtcctca

SEQ ID NO: 4569455 - DNA, 25 bp, Homo sapien
taaatgtgctaagtccagacgaccc

SEQ ID NO: 4569456 - DNA, 25 bp, Homo sapien
tgtgccagcatgtaataggagccaa

SEQ ID NO: 4569457 - DNA, 25 bp, Homo sapien
agccgagcacgggaccggctgggcc

SEQ ID NO: 4569458 - DNA, 25 bp, Homo sapien
cctgcccagtgacctaattattgtt

SEQ ID NO: 4569459 - DNA, 25 bp, Homo sapien
ctgcgagccgagcacgggaccggct

SEQ ID NO: 4569460 - DNA, 25 bp, Homo sapien
ccaacagggcgccactggcctgtcc

SEQ ID NO: 4569461 - DNA, 25 bp, Homo sapien
catggcttatcttgtttcatcccct

SEQ ID NO: 4569462 - DNA, 25 bp, Homo sapien
gaatcctagatgtcgtatcatttca

SEQ ID NO: 4569463 - DNA, 25 bp, Homo sapien
tcccacaatgaccaagttacttctg

SEQ ID NO: 4569464 - DNA, 25 bp, Homo sapien
gttacttctgaagcgaatcctagat

SEQ ID NO: 4569465 - DNA, 25 bp, Homo sapien
tggatgtggcatcggaattcacact

SEQ ID NO: 4569466 - DNA, 25 bp, Homo sapien
acgctcggcctcgacaagctcagtt

SEQ ID NO: 4569467 - DNA, 25 bp, Homo sapien
ggaattcacactgcctatattgctt

SEQ ID NO: 4569468 - DNA, 25 bp, Homo sapien
gcctcgacaagctcagtttcaagtg

SEQ ID NO: 4569469 - DNA, 25 bp, Homo sapien
tttaggggctcagcaaaaacttcca

SEQ ID NO: 4569470 - DNA, 25 bp, Homo sapien
taggggctcagcaaaaacttccact

SEQ ID NO: 4569471 - DNA, 25 bp, Homo sapien
gctcagcaaaaacttccactttaaa

SEQ ID NO: 4569472 - DNA, 25 bp, Homo sapien
gggctcagcaaaaacttccacttta

SEQ ID NO: 4569473 - DNA, 25 bp, Homo sapien
cccaggctgaggtcgcgctggaaca

SEQ ID NO: 4569474 - DNA, 25 bp, Homo sapien
attccaggaagtaaccccaggctga

SEQ ID NO: 4569475 - DNA, 25 bp, Homo sapien
ttccaggaagtaaccccaggctgag

SEQ ID NO: 4569476 - DNA, 25 bp, Homo sapien
gattccaggaagtaaccccaggctg

SEQ ID NO: 4569477 - DNA, 25 bp, Homo sapien
gttcactgtattgtctctgtggaga

SEQ ID NO: 4569478 - DNA, 25 bp, Homo sapien
ccttctcttgttcactgtattgtct

SEQ ID NO: 4569479 - DNA, 25 bp, Homo sapien
cctggtggtgggaccgctgcttctc

SEQ ID NO: 4569480 - DNA, 25 bp, Homo sapien
ccctggtggtgggaccgctgcttct

SEQ ID NO: 4569481 - DNA, 25 bp, Homo sapien
ctggccttggcttgcccaacagagc

SEQ ID NO: 4569482 - DNA, 25 bp, Homo sapien
ttggcttgcccaacagagctcctct

SEQ ID NO: 4569483 - DNA, 25 bp, Homo sapien
agggctggccttggcttgcccaaca

SEQ ID NO: 4569484 - DNA, 25 bp, Homo sapien
ccttggcttgcccaacagagctcct

SEQ ID NO: 4569485 - DNA, 25 bp, Homo sapien
tgtaggccatttgctcacaaagcgc

SEQ ID NO: 4569486 - DNA, 25 bp, Homo sapien
gggtcgcctccgagtcaagactttg

SEQ ID NO: 4569487 - DNA, 25 bp, Homo sapien
tattaaaaatcggtctccagtgccc

SEQ ID NO: 4569488 - DNA, 25 bp, Homo sapien
gaaaatgcccaaagttgctatgcca

SEQ ID NO: 4569489 - DNA, 25 bp, Homo sapien
tgaggcaatttagatatactattcc

SEQ ID NO: 4569490 - DNA, 25 bp, Homo sapien
aaacatgaggcaatttagatatact

SEQ ID NO: 4569491 - DNA, 25 bp, Homo sapien
ccaatttcacggaaactttgatgtt

SEQ ID NO: 4569492 - DNA, 25 bp, Homo sapien
atactattccaatttcacggaaact

SEQ ID NO: 4569493 - DNA, 25 bp, Homo sapien
cccaaggcttctagtgcccagcaga

SEQ ID NO: 4569494 - DNA, 25 bp, Homo sapien
tctcttgggtcagcttttggatcca

SEQ ID NO: 4569495 - DNA, 25 bp, Homo sapien
gaggtgttaagttcaaggtctcttg

SEQ ID NO: 4569496 - DNA, 25 bp, Homo sapien
tccactgttccaaagggacaggttc

SEQ ID NO: 4569497 - DNA, 25 bp, Homo sapien
gaacagctgtgtttcctcaacaaac

SEQ ID NO: 4569498 - DNA, 25 bp, Homo sapien
tctgcccataggagggaaacccatt

SEQ ID NO: 4569499 - DNA, 25 bp, Homo sapien
gaggaagagcggatggtaatgagca

SEQ ID NO: 4569500 - DNA, 25 bp, Homo sapien
aaacgtttttgaggaagagcggatg

SEQ ID NO: 4569501 - DNA, 25 bp, Homo sapien
cactctcgtggactcaattgattgg

SEQ ID NO: 4569502 - DNA, 25 bp, Homo sapien
accccactctcgtggactcaattga

SEQ ID NO: 4569503 - DNA, 25 bp, Homo sapien
cgtggactcaattgattggcccacc

SEQ ID NO: 4569504 - DNA, 25 bp, Homo sapien
tgcactgcatgagccctactacctc

SEQ ID NO: 4569505 - DNA, 25 bp, Homo sapien
ctttctttagcaatatatagcctgt

SEQ ID NO: 4569506 - DNA, 25 bp, Homo sapien
acacctctttaccaggccgctattt

SEQ ID NO: 4569507 - DNA, 25 bp, Homo sapien
tcccttttcctcagcaaggtctctc

SEQ ID NO: 4569508 - DNA, 25 bp, Homo sapien
cctcagcaaggtctctctagcttca

SEQ ID NO: 4569509 - DNA, 25 bp, Homo sapien
atggaggcatttcccgagatctact

SEQ ID NO: 4569510 - DNA, 25 bp, Homo sapien
caaacaggagattggccttcctttc

SEQ ID NO: 4569511 - DNA, 25 bp, Homo sapien
gagatctactatgcacaagatgcca

SEQ ID NO: 4569512 - DNA, 25 bp, Homo sapien
tcctttccaatagcagtcatgatgg

SEQ ID NO: 4569513 - DNA, 25 bp, Homo sapien
tggttaacaagttaacccagtgctg

SEQ ID NO: 4569514 - DNA, 25 bp, Homo sapien
gagtatttcctaggtctcatctagg

SEQ ID NO: 4569515 - DNA, 25 bp, Homo sapien
tgaatatggtgataggtatgggtcc

SEQ ID NO: 4569516 - DNA, 25 bp, Homo sapien
gcatatggttaacaagttaacccag

SEQ ID NO: 4569517 - DNA, 25 bp, Homo sapien
gccccagtatttgactggagaaaca

SEQ ID NO: 4569518 - DNA, 25 bp, Homo sapien
aaagacgctggccttcagtccggca

SEQ ID NO: 4569519 - DNA, 25 bp, Homo sapien
gaggttcacaaagacgctggccttc

SEQ ID NO: 4569520 - DNA, 25 bp, Homo sapien
ccttcagtccggcagattgaaaata

SEQ ID NO: 4569521 - DNA, 25 bp, Homo sapien
gtcctttacgaaatagaacacattc

SEQ ID NO: 4569522 - DNA, 25 bp, Homo sapien
gaaggcattcctaacaagtccttta

SEQ ID NO: 4569523 - DNA, 25 bp, Homo sapien
cacattcaggagatccattggagaa

SEQ ID NO: 4569524 - DNA, 25 bp, Homo sapien
aacacattcaggagatccattggag

SEQ ID NO: 4569525 - DNA, 25 bp, Homo sapien
gaaagtccaagactgggcagttgca

SEQ ID NO: 4569526 - DNA, 25 bp, Homo sapien
agtccaagactgggcagttgcatct

SEQ ID NO: 4569527 - DNA, 25 bp, Homo sapien
actcacattgctttgactcatggtg

SEQ ID NO: 4569528 - DNA, 25 bp, Homo sapien
aagtccaagactgggcagttgcatc

SEQ ID NO: 4569529 - DNA, 25 bp, Homo sapien
aacagagaaagcaaccgaggaagcc

SEQ ID NO: 4569530 - DNA, 25 bp, Homo sapien
aacatgctcaccctcacaagatggc

SEQ ID NO: 4569531 - DNA, 25 bp, Homo sapien
gttctcagggtaactaatccattcc

SEQ ID NO: 4569532 - DNA, 25 bp, Homo sapien
taacaacctgttctcagggtaacta

SEQ ID NO: 4569533 - DNA, 25 bp, Homo sapien
gaggataccagttagaggctctgta

SEQ ID NO: 4569534 - DNA, 25 bp, Homo sapien
ccagagtgaatgagccaagccctgt

SEQ ID NO: 4569535 - DNA, 25 bp, Homo sapien
gaaaagggaacacagtgtgaagcaa

SEQ ID NO: 4569536 - DNA, 25 bp, Homo sapien
gccctgtggaagcccgcctgggaaa

SEQ ID NO: 4569537 - DNA, 25 bp, Homo sapien
aaatccacagtttctctgagccttg

SEQ ID NO: 4569538 - DNA, 25 bp, Homo sapien
gcagttagaaatcagcatcccgaga

SEQ ID NO: 4569539 - DNA, 25 bp, Homo sapien
agagaatgcaagatgttgtgaccaa

SEQ ID NO: 4569540 - DNA, 25 bp, Homo sapien
caaggtgtctaaatatcaaacgcaa

SEQ ID NO: 4569541 - DNA, 25 bp, Homo sapien
tgcctgaggaggaccaatgcaggaa

SEQ ID NO: 4569542 - DNA, 25 bp, Homo sapien
ggcttcggctcaggccattccgggt

SEQ ID NO: 4569543 - DNA, 25 bp, Homo sapien
aactgtgcttctcgtaaaggtctaa

SEQ ID NO: 4569544 - DNA, 25 bp, Homo sapien
cggtaatgacttctcggagggagct

SEQ ID NO: 4569545 - DNA, 25 bp, Homo sapien
gacaaaactgtgcttctcgtaaagg

SEQ ID NO: 4569546 - DNA, 25 bp, Homo sapien
tagagaagtaacagagccatgccga

SEQ ID NO: 4569547 - DNA, 25 bp, Homo sapien
gagttagcctagtgagtgtctgcag

SEQ ID NO: 4569548 - DNA, 25 bp, Homo sapien
gatccagtgagtcaaagatgtcacc

SEQ ID NO: 4569549 - DNA, 25 bp, Homo sapien
agtaagccttctcctgacacgatcc

SEQ ID NO: 4569550 - DNA, 25 bp, Homo sapien
gaatgacaggacctttgctcccaag

SEQ ID NO: 4569551 - DNA, 25 bp, Homo sapien
aatgacaggacctttgctcccaagg

SEQ ID NO: 4569552 - DNA, 25 bp, Homo sapien
ggaatgacaggacctttgctcccaa

SEQ ID NO: 4569553 - DNA, 25 bp, Homo sapien
atgacaggacctttgctcccaaggc

SEQ ID NO: 4569554 - DNA, 25 bp, Homo sapien
agctttctgtgtctggtctgtttgg

SEQ ID NO: 4569555 - DNA, 25 bp, Homo sapien
tgtctggtctgtttgggcatctcca

SEQ ID NO: 4569556 - DNA, 25 bp, Homo sapien
tgtgtctggtctgtttgggcatctc

SEQ ID NO: 4569557 - DNA, 25 bp, Homo sapien
ttctgtgtctggtctgtttgggcat

SEQ ID NO: 4569558 - DNA, 25 bp, Homo sapien
tagtagaaaacctcgtggatcttct

SEQ ID NO: 4569559 - DNA, 25 bp, Homo sapien
ttagtagaaaacctcgtggatcttc

SEQ ID NO: 4569560 - DNA, 25 bp, Homo sapien
tagaaaacctcgtggatcttctctg

SEQ ID NO: 4569561 - DNA, 25 bp, Homo sapien
agcaggtttagtagaaaacctcgtg

SEQ ID NO: 4569562 - DNA, 25 bp, Homo sapien
gctctatctgctttagcatcacctt

SEQ ID NO: 4569563 - DNA, 25 bp, Homo sapien
cttggctctatctgctttagcatca

SEQ ID NO: 4569564 - DNA, 25 bp, Homo sapien
tggctctatctgctttagcatcacc

SEQ ID NO: 4569565 - DNA, 25 bp, Homo sapien
ctatctgctttagcatcaccttcag

SEQ ID NO: 4569566 - DNA, 25 bp, Homo sapien
gtggcggcaacggcggggggacata

SEQ ID NO: 4569567 - DNA, 25 bp, Homo sapien
cggcaacggcggggggacataggcg

SEQ ID NO: 4569568 - DNA, 25 bp, Homo sapien
ctgtggtggcggcaacggcgggggg

SEQ ID NO: 4569569 - DNA, 25 bp, Homo sapien
tgtggtggcggcaacggcgggggga

SEQ ID NO: 4569570 - DNA, 25 bp, Homo sapien
tgcattgcacaagggccgtcgccag

SEQ ID NO: 4569571 - DNA, 25 bp, Homo sapien
cgccagccctaactatacttcttga

SEQ ID NO: 4569572 - DNA, 25 bp, Homo sapien
tacttcttgacttgtcagtctcaat

SEQ ID NO: 4569573 - DNA, 25 bp, Homo sapien
ctctgcattgcacaagggccgtcgc

SEQ ID NO: 4569574 - DNA, 25 bp, Homo sapien
cacacaagctctgggtatcagtgca

SEQ ID NO: 4569575 - DNA, 25 bp, Homo sapien
gcaacaaaggaggtgaacagacagt

SEQ ID NO: 4569576 - DNA, 25 bp, Homo sapien
gattccactccgtaagcaacaaagg

SEQ ID NO: 4569577 - DNA, 25 bp, Homo sapien
tgaaatcatcaaaccctgaatgggt

SEQ ID NO: 4569578 - DNA, 25 bp, Homo sapien
tctgttgcctggatctcgagcccca

SEQ ID NO: 4569579 - DNA, 25 bp, Homo sapien
attccattcgttacttcctctgttg

SEQ ID NO: 4569580 - DNA, 25 bp, Homo sapien
gagccccaccttgctgaatggactt

SEQ ID NO: 4569581 - DNA, 25 bp, Homo sapien
caactttatgtccattccattcgtt

SEQ ID NO: 4569582 - DNA, 25 bp, Homo sapien
ggcctggggtcagctccctgtccat

SEQ ID NO: 4569583 - DNA, 25 bp, Homo sapien
tggcctggggtcagctccctgtcca

SEQ ID NO: 4569584 - DNA, 25 bp, Homo sapien
catggcctggggtcagctccctgtc

SEQ ID NO: 4569585 - DNA, 25 bp, Homo sapien
atggcctggggtcagctccctgtcc

SEQ ID NO: 4569586 - DNA, 25 bp, Homo sapien
aaatacatatcattaaattgttact

SEQ ID NO: 4569587 - DNA, 25 bp, Homo sapien
gaaaaaacctctgaagatttaagca

SEQ ID NO: 4569588 - DNA, 25 bp, Homo sapien
gcaccaaaataacattgtttagatc

SEQ ID NO: 4569589 - DNA, 25 bp, Homo sapien
aacctctgaagatttaagcaccaaa

SEQ ID NO: 4569590 - DNA, 25 bp, Homo sapien
gcccctctaaataataacaacgctg

SEQ ID NO: 4569591 - DNA, 25 bp, Homo sapien
taatcctcataagtagccccataaa

SEQ ID NO: 4569592 - DNA, 25 bp, Homo sapien
gctgtcagcaaggtatgtggtgcaa

SEQ ID NO: 4569593 - DNA, 25 bp, Homo sapien
cacttattatgtggcaggctgtcag

SEQ ID NO: 4569594 - DNA, 25 bp, Homo sapien
cattcctacagatacccctacagta

SEQ ID NO: 4569595 - DNA, 25 bp, Homo sapien
tagaaatatccctcttggccaagca

SEQ ID NO: 4569596 - DNA, 25 bp, Homo sapien
tctttcaaggaccagtgctatttca

SEQ ID NO: 4569597 - DNA, 25 bp, Homo sapien
gaagtgcttcatgaccgttctcggg

SEQ ID NO: 4569598 - DNA, 25 bp, Homo sapien
accagttatgtaatagtcatttgcc

SEQ ID NO: 4569599 - DNA, 25 bp, Homo sapien
gctgttcgaacagaaagatgattaa

SEQ ID NO: 4569600 - DNA, 25 bp, Homo sapien
tagtcatttgccttagtcatgcagc

SEQ ID NO: 4569601 - DNA, 25 bp, Homo sapien
tcatgcagccctgccggagtgctgt

SEQ ID NO: 4569602 - DNA, 25 bp, Homo sapien
ctaattggttctgccgctgtaattg

SEQ ID NO: 4569603 - DNA, 25 bp, Homo sapien
tctgccgctgtaattgatttgacag

SEQ ID NO: 4569604 - DNA, 25 bp, Homo sapien
tggttctgccgctgtaattgatttg

SEQ ID NO: 4569605 - DNA, 25 bp, Homo sapien
ccgctgtaattgatttgacaggtta

SEQ ID NO: 4569606 - DNA, 25 bp, Homo sapien
tactcagaatgagctgggttcctct

SEQ ID NO: 4569607 - DNA, 25 bp, Homo sapien
tgctcttgctcttcgagtccaggcc

SEQ ID NO: 4569608 - DNA, 25 bp, Homo sapien
aattgtccagatggccagatgtggc

SEQ ID NO: 4569609 - DNA, 25 bp, Homo sapien
agtccaggccggcaattgtccagat

SEQ ID NO: 4569610 - DNA, 25 bp, Homo sapien
tgtgaatgtgtgaaggtatgagtgc

SEQ ID NO: 4569611 - DNA, 25 bp, Homo sapien
ggtcctcaacctagcctggggagaa

SEQ ID NO: 4569612 - DNA, 25 bp, Homo sapien
aatgtgtgaaggtatgagtgcttgt

SEQ ID NO: 4569613 - DNA, 25 bp, Homo sapien
gggtcctcaacctagcctggggaga

SEQ ID NO: 4569614 - DNA, 25 bp, Homo sapien
aaagctgagccgagggagcatccac

SEQ ID NO: 4569615 - DNA, 25 bp, Homo sapien
ggtatagagtaagcactcaagaaac

SEQ ID NO: 4569616 - DNA, 25 bp, Homo sapien
tcattctgaagagtgtaagcctagc

SEQ ID NO: 4569617 - DNA, 25 bp, Homo sapien
tcctcccttcgactcatcaagaaag

SEQ ID NO: 4569618 - DNA, 25 bp, Homo sapien
gatccacggcagtaacctggccaag

SEQ ID NO: 4569619 - DNA, 25 bp, Homo sapien
gtttgactctccaaaatgggaaatg

SEQ ID NO: 4569620 - DNA, 25 bp, Homo sapien
tgggaaatgatccacggcagtaacc

SEQ ID NO: 4569621 - DNA, 25 bp, Homo sapien
tctccaaaatgggaaatgatccacg

SEQ ID NO: 4569622 - DNA, 25 bp, Homo sapien
cagtggcctgccatgatctggtcca

SEQ ID NO: 4569623 - DNA, 25 bp, Homo sapien
tcagtggcctgccatgatctggtcc

SEQ ID NO: 4569624 - DNA, 25 bp, Homo sapien
ctgcccaccgaacattcaggactgg

SEQ ID NO: 4569625 - DNA, 25 bp, Homo sapien
accgaacattcaggactggagagga

SEQ ID NO: 4569626 - DNA, 25 bp, Homo sapien
gcccaccgaacattcaggactggag

SEQ ID NO: 4569627 - DNA, 25 bp, Homo sapien
ccaccgaacattcaggactggagag

SEQ ID NO: 4569628 - DNA, 25 bp, Homo sapien
gcaggaatgttgagcagacggcagt

SEQ ID NO: 4569629 - DNA, 25 bp, Homo sapien
tagcctgtgacagcaatttgggagt

SEQ ID NO: 4569630 - DNA, 25 bp, Homo sapien
gctaaggaagtgaggtcatagcctg

SEQ ID NO: 4569631 - DNA, 25 bp, Homo sapien
gagcagttgtttcctatggttcggc

SEQ ID NO: 4569632 - DNA, 25 bp, Homo sapien
aaatctcaggcaggtcttgtaggtt

SEQ ID NO: 4569633 - DNA, 25 bp, Homo sapien
gatgtaacccttatatggtcaatgg

SEQ ID NO: 4569634 - DNA, 25 bp, Homo sapien
aatgatgggtgcactactatgagcc

SEQ ID NO: 4569635 - DNA, 25 bp, Homo sapien
gaattcgttgggcttggatcgcctg

SEQ ID NO: 4569636 - DNA, 25 bp, Homo sapien
ggtgtatcctcaactgtccagctaa

SEQ ID NO: 4569637 - DNA, 25 bp, Homo sapien
catccccagctagacggcttattgg

SEQ ID NO: 4569638 - DNA, 25 bp, Homo sapien
gaattaacccttcacgtgcagccct

SEQ ID NO: 4569639 - DNA, 25 bp, Homo sapien
gattcactgatgaatgaccctttga

SEQ ID NO: 4569640 - DNA, 25 bp, Homo sapien
ttaacttcacggaagatgcacctcc

SEQ ID NO: 4569641 - DNA, 25 bp, Homo sapien
tagaatttcctgttgcagccccaag

SEQ ID NO: 4569642 - DNA, 25 bp, Homo sapien
taatagatgtgcttggagtttcacc

SEQ ID NO: 4569643 - DNA, 25 bp, Homo sapien
tgctaactgaccctttatggacaag

SEQ ID NO: 4569644 - DNA, 25 bp, Homo sapien
taggtcagagctaggagagtctcaa

SEQ ID NO: 4569645 - DNA, 25 bp, Homo sapien
cccagagaagaactaagtagcagtg

SEQ ID NO: 4569646 - DNA, 25 bp, Homo sapien
cttcaagaacttcagatagggccag

SEQ ID NO: 4569647 - DNA, 25 bp, Homo sapien
tgcagcttgcaatgccagtcggctc

SEQ ID NO: 4569648 - DNA, 25 bp, Homo sapien
caactttgagttgactgtgggccac

SEQ ID NO: 4569649 - DNA, 25 bp, Homo sapien
gacagcactgctgtaaataatggca

SEQ ID NO: 4569650 - DNA, 25 bp, Homo sapien
ctgtaaattatggtggagtccctag

SEQ ID NO: 4569651 - DNA, 25 bp, Homo sapien
tccatggtgcttgaggtgtgagaaa

SEQ ID NO: 4569652 - DNA, 25 bp, Homo sapien
cactgtccaagtgtgggaaactgat

SEQ ID NO: 4569653 - DNA, 25 bp, Homo sapien
tcacttttcagagggccatttggta

SEQ ID NO: 4569654 - DNA, 25 bp, Homo sapien
aatcagggatgtacacaaacgtgta

SEQ ID NO: 4569655 - DNA, 25 bp, Homo sapien
gagaaaataatctgccccaggtgca

SEQ ID NO: 4569656 - DNA, 25 bp, Homo sapien
aactcccagaccggcaatttctgaa

SEQ ID NO: 4569657 - DNA, 25 bp, Homo sapien
tgcccccaactcccagaccggcaat

SEQ ID NO: 4569658 - DNA, 25 bp, Homo sapien
caactcccagaccggcaatttctga

SEQ ID NO: 4569659 - DNA, 25 bp, Homo sapien
cccaactcccagaccggcaatttct

SEQ ID NO: 4569660 - DNA, 25 bp, Homo sapien
gaactgaaaatagctctgtgaaccc

SEQ ID NO: 4569661 - DNA, 25 bp, Homo sapien
gggaaggagatcctgcaagagaact

SEQ ID NO: 4569662 - DNA, 25 bp, Homo sapien
gaaaatagctctgtgaaccctgccc

SEQ ID NO: 4569663 - DNA, 25 bp, Homo sapien
tgggaaggagatcctgcaagagaac

SEQ ID NO: 4569664 - DNA, 25 bp, Homo sapien
cccgatcgtgaagcgcctgctgggc

SEQ ID NO: 4569665 - DNA, 25 bp, Homo sapien
cagaacgtcaacaccaagtgcatca

SEQ ID NO: 4569666 - DNA, 25 bp, Homo sapien
gcggtcaagagcctggtcaagaaac

SEQ ID NO: 4569667 - DNA, 25 bp, Homo sapien
caacttcgccgagagttgaggcgaa

SEQ ID NO: 4569668 - DNA, 25 bp, Homo sapien
taggggtgtgtgttactccctgctg

SEQ ID NO: 4569669 - DNA, 25 bp, Homo sapien
gtgagagagtgtccctgtctttggc

SEQ ID NO: 4569670 - DNA, 25 bp, Homo sapien
ggcattgccccggtggattctaggg

SEQ ID NO: 4569671 - DNA, 25 bp, Homo sapien
agttctttggcattgccccggtgga

SEQ ID NO: 4569672 - DNA, 25 bp, Homo sapien
caatgatgcaccgtgtggaagctgg

SEQ ID NO: 4569673 - DNA, 25 bp, Homo sapien
tgaattttgtacactctccgagggc

SEQ ID NO: 4569674 - DNA, 25 bp, Homo sapien
gagggcggtcccagcagtctgaatt

SEQ ID NO: 4569675 - DNA, 25 bp, Homo sapien
taaccattccccagctgttaggtga

SEQ ID NO: 4569676 - DNA, 25 bp, Homo sapien
aaagccttcaggatccacacctctg

SEQ ID NO: 4569677 - DNA, 25 bp, Homo sapien
ttagcgggcctgtgaatataaagcc

SEQ ID NO: 4569678 - DNA, 25 bp, Homo sapien
agcctcgccacctcggtgagcctct

SEQ ID NO: 4569679 - DNA, 25 bp, Homo sapien
gggcctgtgaatataaagccttcag

SEQ ID NO: 4569680 - DNA, 25 bp, Homo sapien
tgggtgagcattaaacccagatcct

SEQ ID NO: 4569681 - DNA, 25 bp, Homo sapien
ggtggacaaaggagctgtcacacag

SEQ ID NO: 4569682 - DNA, 25 bp, Homo sapien
tagaaaggttaaagaaggccagtga

SEQ ID NO: 4569683 - DNA, 25 bp, Homo sapien
cagtattggatcctttggccgtcat

SEQ ID NO: 4569684 - DNA, 25 bp, Homo sapien
ttgtgccaaactcgttgctggattg

SEQ ID NO: 4569685 - DNA, 25 bp, Homo sapien
tcgttgctggattgccataaacact

SEQ ID NO: 4569686 - DNA, 25 bp, Homo sapien
cgttgctggattgccataaacactt

SEQ ID NO: 4569687 - DNA, 25 bp, Homo sapien
ctttctttgtgccaaactcgttgct

SEQ ID NO: 4569688 - DNA, 25 bp, Homo sapien
tggattgattagagaggctatttgc

SEQ ID NO: 4569689 - DNA, 25 bp, Homo sapien
ccgtattgaaggtggcagaattatt

SEQ ID NO: 4569690 - DNA, 25 bp, Homo sapien
gattagagaggctatttgccgtatt

SEQ ID NO: 4569691 - DNA, 25 bp, Homo sapien
gctatttgccgtattgaaggtggca

SEQ ID NO: 4569692 - DNA, 25 bp, Homo sapien
aagggtagttggtggtgactgtaca

SEQ ID NO: 4569693 - DNA, 25 bp, Homo sapien
tcaagggtagttggtggtgactgta

SEQ ID NO: 4569694 - DNA, 25 bp, Homo sapien
tagttggtggtgactgtacagaagg

SEQ ID NO: 4569695 - DNA, 25 bp, Homo sapien
ggtagttggtggtgactgtacagaa

SEQ ID NO: 4569696 - DNA, 25 bp, Homo sapien
ctcattatccctgagtccaggaaca

SEQ ID NO: 4569697 - DNA, 25 bp, Homo sapien
ccctcattatccctgagtccaggaa

SEQ ID NO: 4569698 - DNA, 25 bp, Homo sapien
tcattatccctgagtccaggaacac

SEQ ID NO: 4569699 - DNA, 25 bp, Homo sapien
cctcattatccctgagtccaggaac

SEQ ID NO: 4569700 - DNA, 25 bp, Homo sapien
gccgggctgttgggtaagcagagcc

SEQ ID NO: 4569701 - DNA, 25 bp, Homo sapien
ccgggctgttgggtaagcagagccc

SEQ ID NO: 4569702 - DNA, 25 bp, Homo sapien
gctgtatgcggtgagtccaggatgc

SEQ ID NO: 4569703 - DNA, 25 bp, Homo sapien
accttgagctgtatgcggtgagtcc

SEQ ID NO: 4569704 - DNA, 25 bp, Homo sapien
ccacccgggtctccagataacatga

SEQ ID NO: 4569705 - DNA, 25 bp, Homo sapien
gggtctccagataacatgaagccat

SEQ ID NO: 4569706 - DNA, 25 bp, Homo sapien
gctccgccggcctctcagtgatgtc

SEQ ID NO: 4569707 - DNA, 25 bp, Homo sapien
ctgccatcagcctggtggagcgtgc

SEQ ID NO: 4569708 - DNA, 25 bp, Homo sapien
actgtggttgatgggctgcctccag

SEQ ID NO: 4569709 - DNA, 25 bp, Homo sapien
gcatccttgggtgatggattatgga

SEQ ID NO: 4569710 - DNA, 25 bp, Homo sapien
gagagtgaggccctccaagcacatc

SEQ ID NO: 4569711 - DNA, 25 bp, Homo sapien
gctcccagataaaccagcgcactgt

SEQ ID NO: 4569712 - DNA, 25 bp, Homo sapien
taggtcactgctgggctgaagcgca

SEQ ID NO: 4569713 - DNA, 25 bp, Homo sapien
cactgctgggctgaagcgcactgac

SEQ ID NO: 4569714 - DNA, 25 bp, Homo sapien
ttaggtcactgctgggctgaagcgc

SEQ ID NO: 4569715 - DNA, 25 bp, Homo sapien
gtcactgctgggctgaagcgcactg

SEQ ID NO: 4569716 - DNA, 25 bp, Homo sapien
agagcaacatgtgggcaagagccgc

SEQ ID NO: 4569717 - DNA, 25 bp, Homo sapien
caccaggaaccccacacgctgggtt

SEQ ID NO: 4569718 - DNA, 25 bp, Homo sapien
caggatgcgacattcccacaggatg

SEQ ID NO: 4569719 - DNA, 25 bp, Homo sapien
gggtaatttattgccgccgctcgct

SEQ ID NO: 4569720 - DNA, 25 bp, Homo sapien
ctaggcctgctttggttggggtggt

SEQ ID NO: 4569721 - DNA, 25 bp, Homo sapien
taatcacaggttctgcctgaaaggc

SEQ ID NO: 4569722 - DNA, 25 bp, Homo sapien
ccttcggtggacagggttggtgata

SEQ ID NO: 4569723 - DNA, 25 bp, Homo sapien
ctgaaaggcagacacttttaaccct

SEQ ID NO: 4569724 - DNA, 25 bp, Homo sapien
ctttccttggcaaacacttgaccca

SEQ ID NO: 4569725 - DNA, 25 bp, Homo sapien
tccctttccttggcaaacacttgac

SEQ ID NO: 4569726 - DNA, 25 bp, Homo sapien
agctccctttccttggcaaacactt

SEQ ID NO: 4569727 - DNA, 25 bp, Homo sapien
tttccttggcaaacacttgacccat

SEQ ID NO: 4569728 - DNA, 25 bp, Homo sapien
tgaaattcggtgacccaccttggga

SEQ ID NO: 4569729 - DNA, 25 bp, Homo sapien
tgatgtttgtgataagggccctgtg

SEQ ID NO: 4569730 - DNA, 25 bp, Homo sapien
tcactcctgggttggaacatcctcc

SEQ ID NO: 4569731 - DNA, 25 bp, Homo sapien
gccagacgtccttgctggagagcca

SEQ ID NO: 4569732 - DNA, 25 bp, Homo sapien
aactccttaatgaggctgaagtaga

SEQ ID NO: 4569733 - DNA, 25 bp, Homo sapien
gtaaaactagttgtggaaagagatc

SEQ ID NO: 4569734 - DNA, 25 bp, Homo sapien
gtagacatggtaaaactagttgtgg

SEQ ID NO: 4569735 - DNA, 25 bp, Homo sapien
gcaactggtcagtgttaactcctta

SEQ ID NO: 4569736 - DNA, 25 bp, Homo sapien
cagagttgaaagggtgtcctttggc

SEQ ID NO: 4569737 - DNA, 25 bp, Homo sapien
agagcagcctccaaagattcccctg

SEQ ID NO: 4569738 - DNA, 25 bp, Homo sapien
cctttggcggggtgagaagagagca

SEQ ID NO: 4569739 - DNA, 25 bp, Homo sapien
gttacagccaggcagagttgaaagg

SEQ ID NO: 4569740 - DNA, 25 bp, Homo sapien
tgatgttggcgtcgggtttggggct

SEQ ID NO: 4569741 - DNA, 25 bp, Homo sapien
ttgatgttggcgtcgggtttggggc

SEQ ID NO: 4569742 - DNA, 25 bp, Homo sapien
ttagttgatgttggcgtcgggtttg

SEQ ID NO: 4569743 - DNA, 25 bp, Homo sapien
agttgatgttggcgtcgggtttggg

SEQ ID NO: 4569744 - DNA, 25 bp, Homo sapien
tcttgatcgggttcacaaggctggt

SEQ ID NO: 4569745 - DNA, 25 bp, Homo sapien
gaagcttaccagttgctgatgcacg

SEQ ID NO: 4569746 - DNA, 25 bp, Homo sapien
gcaggcaaagttaagctaggtttcc

SEQ ID NO: 4569747 - DNA, 25 bp, Homo sapien
tggatccctttgctatgaggcttga

SEQ ID NO: 4569748 - DNA, 25 bp, Homo sapien
cttcaccatcggctttgggctctgc

SEQ ID NO: 4569749 - DNA, 25 bp, Homo sapien
gccggttgcaggtgtcccatcggaa

SEQ ID NO: 4569750 - DNA, 25 bp, Homo sapien
gcgtgaatccctaccactaccagag

SEQ ID NO: 4569751 - DNA, 25 bp, Homo sapien
tcatgtcatctactgccgcctgtgg

SEQ ID NO: 4569752 - DNA, 25 bp, Homo sapien
catggagctgtgtgagttcgccttc

SEQ ID NO: 4569753 - DNA, 25 bp, Homo sapien
cctatccccgaatccgatgtcccca

SEQ ID NO: 4569754 - DNA, 25 bp, Homo sapien
atccgatgtccccagcacataataa

SEQ ID NO: 4569755 - DNA, 25 bp, Homo sapien
ccgaatccgatgtccccagcacata

SEQ ID NO: 4569756 - DNA, 25 bp, Homo sapien
tctccaaacctatccccgaatccga

SEQ ID NO: 4569757 - DNA, 25 bp, Homo sapien
tggctgtcccaggttcatccaggta

SEQ ID NO: 4569758 - DNA, 25 bp, Homo sapien
tgccccacagtgagtacacgcagtg

SEQ ID NO: 4569759 - DNA, 25 bp, Homo sapien
ctgttgggaacccactcggctgctg

SEQ ID NO: 4569760 - DNA, 25 bp, Homo sapien
tggtgtgtccactgcgccaacatgg

SEQ ID NO: 4569761 - DNA, 25 bp, Homo sapien
cattttctaggaaagggacctgatg

SEQ ID NO: 4569762 - DNA, 25 bp, Homo sapien
gtagggaacggctctgcagagacct

SEQ ID NO: 4569763 - DNA, 25 bp, Homo sapien
tatatctcgggctctcacagaagac

SEQ ID NO: 4569764 - DNA, 25 bp, Homo sapien
gaaaagtttggaggccatgggccta

SEQ ID NO: 4569765 - DNA, 25 bp, Homo sapien
tgtgtaacaagtactgctcccagca

SEQ ID NO: 4569766 - DNA, 25 bp, Homo sapien
ttgcaggcttggtacaaagaggtct

SEQ ID NO: 4569767 - DNA, 25 bp, Homo sapien
cggtagaggatcaccggtgacaact

SEQ ID NO: 4569768 - DNA, 25 bp, Homo sapien
taagatgatctagctcccggtagag

SEQ ID NO: 4569769 - DNA, 25 bp, Homo sapien
gacttggctagagttgggagttccc

SEQ ID NO: 4569770 - DNA, 25 bp, Homo sapien
tagggagaagaatctgcaggctgct

SEQ ID NO: 4569771 - DNA, 25 bp, Homo sapien
gcatcagccgcttctcaagtgggta

SEQ ID NO: 4569772 - DNA, 25 bp, Homo sapien
aggctgcttgtaggactgttcacca

SEQ ID NO: 4569773 - DNA, 25 bp, Homo sapien
tatactctagtattctggtgttttt

SEQ ID NO: 4569774 - DNA, 25 bp, Homo sapien
aatgtatactctagtattctggtgt

SEQ ID NO: 4569775 - DNA, 25 bp, Homo sapien
tgtatactctagtattctggtgttt

SEQ ID NO: 4569776 - DNA, 25 bp, Homo sapien
actctagtattctggtgtttttata

SEQ ID NO: 4569777 - DNA, 25 bp, Homo sapien
gccgcgtgtaaaaacagacagctct

SEQ ID NO: 4569778 - DNA, 25 bp, Homo sapien
ctggctaaacaagtggccgcgtgta

SEQ ID NO: 4569779 - DNA, 25 bp, Homo sapien
tgattaccttcactattcggccagc

SEQ ID NO: 4569780 - DNA, 25 bp, Homo sapien
gctgttgcaactcggctgttctgga

SEQ ID NO: 4569781 - DNA, 25 bp, Homo sapien
taacaacttgtggtagcatgaacat

SEQ ID NO: 4569782 - DNA, 25 bp, Homo sapien
tcatcccatatgtccctagaagagg

SEQ ID NO: 4569783 - DNA, 25 bp, Homo sapien
tatgtgccaaacactatgtgccaaa

SEQ ID NO: 4569784 - DNA, 25 bp, Homo sapien
taggtcactttagatagactgcagc

SEQ ID NO: 4569785 - DNA, 25 bp, Homo sapien
taaatggttctagagcccacctagg

SEQ ID NO: 4569786 - DNA, 25 bp, Homo sapien
tgttttttctaaccagatggcctag

SEQ ID NO: 4569787 - DNA, 25 bp, Homo sapien
cagcagtaatgatcacagtgagggc

SEQ ID NO: 4569788 - DNA, 25 bp, Homo sapien
caaaaggtcactaagcaatgtccag

SEQ ID NO: 4569789 - DNA, 25 bp, Homo sapien
cttaggtagagacttagctgcgggc

SEQ ID NO: 4569790 - DNA, 25 bp, Homo sapien
taaaaggttgaccaggaatggcctg

SEQ ID NO: 4569791 - DNA, 25 bp, Homo sapien
caagtgtgaatgctggaaatgctac

SEQ ID NO: 4569792 - DNA, 25 bp, Homo sapien
tagtcctccgaggttacaggcttgg

SEQ ID NO: 4569793 - DNA, 25 bp, Homo sapien
tctgtctcccccgattgccatccag

SEQ ID NO: 4569794 - DNA, 25 bp, Homo sapien
gatgaaaggccttcaatttcatctc

SEQ ID NO: 4569795 - DNA, 25 bp, Homo sapien
catcagatgaaaggccttcaatttc

SEQ ID NO: 4569796 - DNA, 25 bp, Homo sapien
ccgattgccatccagaatgctttgg

SEQ ID NO: 4569797 - DNA, 25 bp, Homo sapien
tagaaaggcaaacatcctgagtctc

SEQ ID NO: 4569798 - DNA, 25 bp, Homo sapien
cataccttaaactgactgagaccta

SEQ ID NO: 4569799 - DNA, 25 bp, Homo sapien
tatgacacatatcagggaacaccat

SEQ ID NO: 4569800 - DNA, 25 bp, Homo sapien
caactaagagttttctggcccaata

SEQ ID NO: 4569801 - DNA, 25 bp, Homo sapien
ctgcatgcacttttctttgctcatg

SEQ ID NO: 4569802 - DNA, 25 bp, Homo sapien
catgcacttttctttgctcatgagg

SEQ ID NO: 4569803 - DNA, 25 bp, Homo sapien
ctcatgaggaagcgtcgcagccttg

SEQ ID NO: 4569804 - DNA, 25 bp, Homo sapien
tcatgaggaagcgtcgcagccttgt

SEQ ID NO: 4569805 - DNA, 25 bp, Homo sapien
taacactagaagatgggagacgggt

SEQ ID NO: 4569806 - DNA, 25 bp, Homo sapien
cagacaagcatcaacatgggaacat

SEQ ID NO: 4569807 - DNA, 25 bp, Homo sapien
tgtctaatagcacaggataacctgg

SEQ ID NO: 4569808 - DNA, 25 bp, Homo sapien
tggtagggatcttacagtttccacc

SEQ ID NO: 4569809 - DNA, 25 bp, Homo sapien
tgaatatccagatctaacatgggat

SEQ ID NO: 4569810 - DNA, 25 bp, Homo sapien
gaaaagagtctttcaaaattctcca

SEQ ID NO: 4569811 - DNA, 25 bp, Homo sapien
cctcctccagtggtaagactggcta

SEQ ID NO: 4569812 - DNA, 25 bp, Homo sapien
gctaattcttgaatatccagatcta

SEQ ID NO: 4569813 - DNA, 25 bp, Homo sapien
cagacgcaggtgtttccaactcgga

SEQ ID NO: 4569814 - DNA, 25 bp, Homo sapien
gatcgaaggcccagtgtataccagc

SEQ ID NO: 4569815 - DNA, 25 bp, Homo sapien
tatctacccgatttagcggcatgga

SEQ ID NO: 4569816 - DNA, 25 bp, Homo sapien
tgtaacactgaatgctgccacgagg

SEQ ID NO: 4569817 - DNA, 25 bp, Homo sapien
gcaccaccccgatgatcagagaggg

SEQ ID NO: 4569818 - DNA, 25 bp, Homo sapien
cacaatgctatcaacctgggcatct

SEQ ID NO: 4569819 - DNA, 25 bp, Homo sapien
gatcagagagggattcagtactatc

SEQ ID NO: 4569820 - DNA, 25 bp, Homo sapien
tctgttgtgttagatgcaccacccc

SEQ ID NO: 4569821 - DNA, 25 bp, Homo sapien
ggtgaatgtgtcaagattcataatg

SEQ ID NO: 4569822 - DNA, 25 bp, Homo sapien
caatggtgaatgtgtcaagattcat

SEQ ID NO: 4569823 - DNA, 25 bp, Homo sapien
gtgtcaagattcataatgacaagga

SEQ ID NO: 4569824 - DNA, 25 bp, Homo sapien
gaatgtgtcaagattcataatgaca

SEQ ID NO: 4569825 - DNA, 25 bp, Homo sapien
ctgggtgacagggatctgctgaccc

SEQ ID NO: 4569826 - DNA, 25 bp, Homo sapien
gatctgctgacccaatgctatggtt

SEQ ID NO: 4569827 - DNA, 25 bp, Homo sapien
gagaaggctaaagccttggttccta

SEQ ID NO: 4569828 - DNA, 25 bp, Homo sapien
tcaatgagttgagaaggctaaagcc

SEQ ID NO: 4569829 - DNA, 25 bp, Homo sapien
gccagtggttctatttgcaaagatt

SEQ ID NO: 4569830 - DNA, 25 bp, Homo sapien
cacagactattagtccaggtggaaa

SEQ ID NO: 4569831 - DNA, 25 bp, Homo sapien
agcactaatgctttcatagccacta

SEQ ID NO: 4569832 - DNA, 25 bp, Homo sapien
tagcagggccattatgacaaacaaa

SEQ ID NO: 4569833 - DNA, 25 bp, Homo sapien
ccaggcaatatgacaagcatatgaa

SEQ ID NO: 4569834 - DNA, 25 bp, Homo sapien
tgtgtggttttatacaagctatgcc

SEQ ID NO: 4569835 - DNA, 25 bp, Homo sapien
caatcaaagtatgccttctacacac

SEQ ID NO: 4569836 - DNA, 25 bp, Homo sapien
tcagtttctacatttacgcagtagg

SEQ ID NO: 4569837 - DNA, 25 bp, Homo sapien
gtattattgacatttccagctggag

SEQ ID NO: 4569838 - DNA, 25 bp, Homo sapien
ccttgaggcattggtcacataaaac

SEQ ID NO: 4569839 - DNA, 25 bp, Homo sapien
caaatggtagacaggtggctaggct

SEQ ID NO: 4569840 - DNA, 25 bp, Homo sapien
tatccaccagatgcctataagactg

SEQ ID NO: 4569841 - DNA, 25 bp, Homo sapien
tctaatagaactgtcaggcagaggc

SEQ ID NO: 4569842 - DNA, 25 bp, Homo sapien
gaaatatccgctgaatgtctaatag

SEQ ID NO: 4569843 - DNA, 25 bp, Homo sapien
tgcagacatggacaatcgctaatgg

SEQ ID NO: 4569844 - DNA, 25 bp, Homo sapien
taatggttcttctacaccgcacagc

SEQ ID NO: 4569845 - DNA, 25 bp, Homo sapien
gaatatgagcatgttactcttcctc

SEQ ID NO: 4569846 - DNA, 25 bp, Homo sapien
tgtgtgaatatgagcatgttactct

SEQ ID NO: 4569847 - DNA, 25 bp, Homo sapien
atgagcatgttactcttcctctttg

SEQ ID NO: 4569848 - DNA, 25 bp, Homo sapien
tgtgaatatgagcatgttactcttc

SEQ ID NO: 4569849 - DNA, 25 bp, Homo sapien
tcagtctccctgaggtaaacctttc

SEQ ID NO: 4569850 - DNA, 25 bp, Homo sapien
cagctaaatctcttctcagctctgg

SEQ ID NO: 4569851 - DNA, 25 bp, Homo sapien
tcagctctggtttgtccacacttat

SEQ ID NO: 4569852 - DNA, 25 bp, Homo sapien
tatattagacaattcccattcttcc

SEQ ID NO: 4569853 - DNA, 25 bp, Homo sapien
cctataatatgtagcctctcgtgtc

SEQ ID NO: 4569854 - DNA, 25 bp, Homo sapien
taatatgtagcctctcgtgtcgggc

SEQ ID NO: 4569855 - DNA, 25 bp, Homo sapien
tctcgtgtcgggcttttttcactta

SEQ ID NO: 4569856 - DNA, 25 bp, Homo sapien
gaaatcctataatatgtagcctctc

SEQ ID NO: 4569857 - DNA, 25 bp, Homo sapien
tcttgcctatccaaattctttacca

SEQ ID NO: 4569858 - DNA, 25 bp, Homo sapien
tgctgatcctcataagatacatgtt

SEQ ID NO: 4569859 - DNA, 25 bp, Homo sapien
tcttagatcatcacagcactgaact

SEQ ID NO: 4569860 - DNA, 25 bp, Homo sapien
gcctggccaacgttaagcatctatt

SEQ ID NO: 4569861 - DNA, 25 bp, Homo sapien
tgcaattcatctcttacgtttttaa

SEQ ID NO: 4569862 - DNA, 25 bp, Homo sapien
gaattcccatatagataacacatcc

SEQ ID NO: 4569863 - DNA, 25 bp, Homo sapien
agttgttcagacttataataatcac

SEQ ID NO: 4569864 - DNA, 25 bp, Homo sapien
tccaatttatctgggtggagggcag

SEQ ID NO: 4569865 - DNA, 25 bp, Homo sapien
taagacctgggttgcatcaaaatgt

SEQ ID NO: 4569866 - DNA, 25 bp, Homo sapien
cagttcactgggcacacagacggat

SEQ ID NO: 4569867 - DNA, 25 bp, Homo sapien
aacagcataggaggtaggttaccct

SEQ ID NO: 4569868 - DNA, 25 bp, Homo sapien
tgcagggctctaaaaggatatcctt

SEQ ID NO: 4569869 - DNA, 25 bp, Homo sapien
tcagggcttggacaattcgctttac

SEQ ID NO: 4569870 - DNA, 25 bp, Homo sapien
attcttcatcactacattggaccac

SEQ ID NO: 4569871 - DNA, 25 bp, Homo sapien
cttcatcactacattggaccacaca

SEQ ID NO: 4569872 - DNA, 25 bp, Homo sapien
gacaattcgctttactcctgtagat

SEQ ID NO: 4569873 - DNA, 25 bp, Homo sapien
catgtttgatgcaccattcttgagc

SEQ ID NO: 4569874 - DNA, 25 bp, Homo sapien
tcttgagctttttgtcggtttatac

SEQ ID NO: 4569875 - DNA, 25 bp, Homo sapien
gactaagttctaccaattcaaagcc

SEQ ID NO: 4569876 - DNA, 25 bp, Homo sapien
tcaggcaactcctctggactaagtt

SEQ ID NO: 4569877 - DNA, 25 bp, Homo sapien
gatcatcacctcaggtaaccatgct

SEQ ID NO: 4569878 - DNA, 25 bp, Homo sapien
catcttcagacactctatcgcagac

SEQ ID NO: 4569879 - DNA, 25 bp, Homo sapien
gcagaccaagatcatcacctcaggt

SEQ ID NO: 4569880 - DNA, 25 bp, Homo sapien
gtaaccatgcttttgccagtggaag

SEQ ID NO: 4569881 - DNA, 25 bp, Homo sapien
caatggtccagggataaaatctcac

SEQ ID NO: 4569882 - DNA, 25 bp, Homo sapien
aaatttgtttggcaccacacataga

SEQ ID NO: 4569883 - DNA, 25 bp, Homo sapien
gtgctgtcaaagtaaaccacaaatg

SEQ ID NO: 4569884 - DNA, 25 bp, Homo sapien
ggaagtcacttccacaataagatct

SEQ ID NO: 4569885 - DNA, 25 bp, Homo sapien
ggagcagagcctaaaactggattca

SEQ ID NO: 4569886 - DNA, 25 bp, Homo sapien
tgtgcacatggctaaaggtttctgg

SEQ ID NO: 4569887 - DNA, 25 bp, Homo sapien
aagccacttgcctaataggagcaga

SEQ ID NO: 4569888 - DNA, 25 bp, Homo sapien
cactttcttcaaggctgcatatgga

SEQ ID NO: 4569889 - DNA, 25 bp, Homo sapien
ttcacagcttacaatagttaatttg

SEQ ID NO: 4569890 - DNA, 25 bp, Homo sapien
cactaggtgtttacttgccaggtct

SEQ ID NO: 4569891 - DNA, 25 bp, Homo sapien
tagactccgatatgcacaaagaaaa

SEQ ID NO: 4569892 - DNA, 25 bp, Homo sapien
gccaggtctgttactacaaactcca

SEQ ID NO: 4569893 - DNA, 25 bp, Homo sapien
gtcaatgctcaggatgacaacatct

SEQ ID NO: 4569894 - DNA, 25 bp, Homo sapien
aatgctcaggatgacaacatctgca

SEQ ID NO: 4569895 - DNA, 25 bp, Homo sapien
tcaatgctcaggatgacaacatctg

SEQ ID NO: 4569896 - DNA, 25 bp, Homo sapien
caatgctcaggatgacaacatctgc

SEQ ID NO: 4569897 - DNA, 25 bp, Homo sapien
tcatcagttgaaatcactgccctca

SEQ ID NO: 4569898 - DNA, 25 bp, Homo sapien
gatgacaactctaggcccttgtggt

SEQ ID NO: 4569899 - DNA, 25 bp, Homo sapien
cccagtcatcagttgaaatcactgc

SEQ ID NO: 4569900 - DNA, 25 bp, Homo sapien
catctactgaatcactctgtgatga

SEQ ID NO: 4569901 - DNA, 25 bp, Homo sapien
cttacactcctgtaacctagcgcaa

SEQ ID NO: 4569902 - DNA, 25 bp, Homo sapien
aatttccggagagccttcaggttca

SEQ ID NO: 4569903 - DNA, 25 bp, Homo sapien
taacctagcgcaatttccggagagc

SEQ ID NO: 4569904 - DNA, 25 bp, Homo sapien
ggttcatctcaacggatcctcgcaa

SEQ ID NO: 4569905 - DNA, 25 bp, Homo sapien
actgactggaggaagaacgcagggc

SEQ ID NO: 4569906 - DNA, 25 bp, Homo sapien
gtcggcccaggcgcctatctactca

SEQ ID NO: 4569907 - DNA, 25 bp, Homo sapien
gggtccgtcgcccgctgaggctcag

SEQ ID NO: 4569908 - DNA, 25 bp, Homo sapien
ccagagaggccgtggtgctgggtcc

SEQ ID NO: 4569909 - DNA, 25 bp, Homo sapien
gctggtgactaacgcacagggtacg

SEQ ID NO: 4569910 - DNA, 25 bp, Homo sapien
gaccagctggtctcctgagaagacg

SEQ ID NO: 4569911 - DNA, 25 bp, Homo sapien
gttggaccagctggtctcctgagaa

SEQ ID NO: 4569912 - DNA, 25 bp, Homo sapien
acgcacagggtacgccagcagccat

SEQ ID NO: 4569913 - DNA, 25 bp, Homo sapien
agctgcgctcgcgagccggttccgt

SEQ ID NO: 4569914 - DNA, 25 bp, Homo sapien
ctgcgctcgcgagccggttccgtca

SEQ ID NO: 4569915 - DNA, 25 bp, Homo sapien
cgctcgcgagccggttccgtcaggc

SEQ ID NO: 4569916 - DNA, 25 bp, Homo sapien
tgcgctcgcgagccggttccgtcag

SEQ ID NO: 4569917 - DNA, 25 bp, Homo sapien
cttcagagcagtaagtggggaagac

SEQ ID NO: 4569918 - DNA, 25 bp, Homo sapien
cagagcagtaagtggggaagaccca

SEQ ID NO: 4569919 - DNA, 25 bp, Homo sapien
tccttcttcagagcagtaagtgggg

SEQ ID NO: 4569920 - DNA, 25 bp, Homo sapien
caaactccttcttcagagcagtaag

SEQ ID NO: 4569921 - DNA, 25 bp, Homo sapien
ctggacctccttgcagacataaaca

SEQ ID NO: 4569922 - DNA, 25 bp, Homo sapien
gacctccttgcagacataaacatct

SEQ ID NO: 4569923 - DNA, 25 bp, Homo sapien
cctccttgcagacataaacatctgt

SEQ ID NO: 4569924 - DNA, 25 bp, Homo sapien
ccttgcagacataaacatctgtcat

SEQ ID NO: 4569925 - DNA, 25 bp, Homo sapien
tctaggcagtttgcataaggcgggc

SEQ ID NO: 4569926 - DNA, 25 bp, Homo sapien
gaactgttgccctctcatgctcttg

SEQ ID NO: 4569927 - DNA, 25 bp, Homo sapien
cagaaagaaaggtagtgagcgcaca

SEQ ID NO: 4569928 - DNA, 25 bp, Homo sapien
gattaactaaatgactggctcagcc

SEQ ID NO: 4569929 - DNA, 25 bp, Homo sapien
cattaactcctcacagtacaatgta

SEQ ID NO: 4569930 - DNA, 25 bp, Homo sapien
tatggactgcagacagacttgtgat

SEQ ID NO: 4569931 - DNA, 25 bp, Homo sapien
taattcattcttatggagattcccc

SEQ ID NO: 4569932 - DNA, 25 bp, Homo sapien
ggagattcccccagtttaaatgtgc

SEQ ID NO: 4569933 - DNA, 25 bp, Homo sapien
gagtgtttggcctgcaccattattg

SEQ ID NO: 4569934 - DNA, 25 bp, Homo sapien
gacagacaggccttcaggcgagtgt

SEQ ID NO: 4569935 - DNA, 25 bp, Homo sapien
gcataataggaacaggcggaggcac

SEQ ID NO: 4569936 - DNA, 25 bp, Homo sapien
ggctgtgtccccttaagagatttcc

SEQ ID NO: 4569937 - DNA, 25 bp, Homo sapien
tcccaaatgcttatgagactcttgc

SEQ ID NO: 4569938 - DNA, 25 bp, Homo sapien
cactgccaattgacttgatgactaa

SEQ ID NO: 4569939 - DNA, 25 bp, Homo sapien
aacttacttttgtgtgcaaccgatc

SEQ ID NO: 4569940 - DNA, 25 bp, Homo sapien
gcaaccgatcatatgctgaactgag

SEQ ID NO: 4569941 - DNA, 25 bp, Homo sapien
tatgctgtagaaggaatttttcact

SEQ ID NO: 4569942 - DNA, 25 bp, Homo sapien
taatattaggatatgctgtagaagg

SEQ ID NO: 4569943 - DNA, 25 bp, Homo sapien
aacagcattgaactgggtgtcaggt

SEQ ID NO: 4569944 - DNA, 25 bp, Homo sapien
caggtgactccagctcataggcttt

SEQ ID NO: 4569945 - DNA, 25 bp, Homo sapien
tattctgaccggaagattgcaaccc

SEQ ID NO: 4569946 - DNA, 25 bp, Homo sapien
taagacagtttagggagacccaggc

SEQ ID NO: 4569947 - DNA, 25 bp, Homo sapien
tatgctttacccagacagtgccttg

SEQ ID NO: 4569948 - DNA, 25 bp, Homo sapien
gaatggccctggaactaggtcacag

SEQ ID NO: 4569949 - DNA, 25 bp, Homo sapien
ggcatgggcatttggaaccgtttca

SEQ ID NO: 4569950 - DNA, 25 bp, Homo sapien
acagggatgcccttgagaaaactca

SEQ ID NO: 4569951 - DNA, 25 bp, Homo sapien
aaacagcagtgaggcgctatcgccg

SEQ ID NO: 4569952 - DNA, 25 bp, Homo sapien
cagactttcctgtgactgtgccaga

SEQ ID NO: 4569953 - DNA, 25 bp, Homo sapien
tatataatgctactacatctgcctc

SEQ ID NO: 4569954 - DNA, 25 bp, Homo sapien
tataatgctactacatctgcctcaa

SEQ ID NO: 4569955 - DNA, 25 bp, Homo sapien
aatgctactacatctgcctcaagtg

SEQ ID NO: 4569956 - DNA, 25 bp, Homo sapien
caatatataatgctactacatctgc

SEQ ID NO: 4569957 - DNA, 25 bp, Homo sapien
taattctgggagtagtgtaaacaac

SEQ ID NO: 4569958 - DNA, 25 bp, Homo sapien
catacaccatgaaccaaggacaggg

SEQ ID NO: 4569959 - DNA, 25 bp, Homo sapien
atgcagcgcgcacagggtgagccta

SEQ ID NO: 4569960 - DNA, 25 bp, Homo sapien
gaaagaaaaggatcgcaggccctca

SEQ ID NO: 4569961 - DNA, 25 bp, Homo sapien
catctcatcgaaggcaaagttggca

SEQ ID NO: 4569962 - DNA, 25 bp, Homo sapien
tcacttgccacacagccgaaatggg

SEQ ID NO: 4569963 - DNA, 25 bp, Homo sapien
tatgtgcctcagttggacaaaacgc

SEQ ID NO: 4569964 - DNA, 25 bp, Homo sapien
gaaatgggccattagctatcgaggg

SEQ ID NO: 4569965 - DNA, 25 bp, Homo sapien
tagtgctgtcaggttctagacggca

SEQ ID NO: 4569966 - DNA, 25 bp, Homo sapien
tagacggcaccctatctatggaaca

SEQ ID NO: 4569967 - DNA, 25 bp, Homo sapien
gacaccactgagatagcccacaaat

SEQ ID NO: 4569968 - DNA, 25 bp, Homo sapien
tcattatcagcagagagagcatatg

SEQ ID NO: 4569969 - DNA, 25 bp, Homo sapien
gtgtcctttcacctactccatgttt

SEQ ID NO: 4569970 - DNA, 25 bp, Homo sapien
tatgcccatattacggataaagaaa

SEQ ID NO: 4569971 - DNA, 25 bp, Homo sapien
caacaatctaatgaggtaggcttta

SEQ ID NO: 4569972 - DNA, 25 bp, Homo sapien
aataagttcagagaatgtaagctac

SEQ ID NO: 4569973 - DNA, 25 bp, Homo sapien
tatttgtgcctccaaattggaaaag

SEQ ID NO: 4569974 - DNA, 25 bp, Homo sapien
gaaaatcagcgtgctgtcgacaggg

SEQ ID NO: 4569975 - DNA, 25 bp, Homo sapien
tcagacctcagtggatccccaagtt

SEQ ID NO: 4569976 - DNA, 25 bp, Homo sapien
gctgatagagcccaacgggaaaatc

SEQ ID NO: 4569977 - DNA, 25 bp, Homo sapien
cagaggacctactctggcttcctgt

SEQ ID NO: 4569978 - DNA, 25 bp, Homo sapien
gttgaggaggatgacaagttcattg

SEQ ID NO: 4569979 - DNA, 25 bp, Homo sapien
tcagaggacctactctggcttcctg

SEQ ID NO: 4569980 - DNA, 25 bp, Homo sapien
agaggacctactctggcttcctgtt

SEQ ID NO: 4569981 - DNA, 25 bp, Homo sapien
accatcctgcgcctactgtctggca

SEQ ID NO: 4569982 - DNA, 25 bp, Homo sapien
cccaaagtattcaaaattcacactt

SEQ ID NO: 4569983 - DNA, 25 bp, Homo sapien
gagcaagactccttgggtgtaggac

SEQ ID NO: 4569984 - DNA, 25 bp, Homo sapien
ctttggctcatgcatggtgtgctgc

SEQ ID NO: 4569985 - DNA, 25 bp, Homo sapien
tcccgcctgtcaccagaaagaggca

SEQ ID NO: 4569986 - DNA, 25 bp, Homo sapien
tatttgcacagaatgtagggcctga

SEQ ID NO: 4569987 - DNA, 25 bp, Homo sapien
aggcaaaaagggctcaagaccaggc

SEQ ID NO: 4569988 - DNA, 25 bp, Homo sapien
tccatctgctgagaacacctcaggc

SEQ ID NO: 4569989 - DNA, 25 bp, Homo sapien
cggcatccagcacagtagcagtcag

SEQ ID NO: 4569990 - DNA, 25 bp, Homo sapien
cctttgcaggctacaatgcacttct

SEQ ID NO: 4569991 - DNA, 25 bp, Homo sapien
cgagagtatcatttgaacgcaggag

SEQ ID NO: 4569992 - DNA, 25 bp, Homo sapien
tccagatgcagctgtggttcacacg

SEQ ID NO: 4569993 - DNA, 25 bp, Homo sapien
ccaggaagaaccttgctcacaagaa

SEQ ID NO: 4569994 - DNA, 25 bp, Homo sapien
tgcagtcaccataaggagggcacct

SEQ ID NO: 4569995 - DNA, 25 bp, Homo sapien
ttcttcatccagttgcccaatcagg

SEQ ID NO: 4569996 - DNA, 25 bp, Homo sapien
ccagtctggatttgaataacctttg

SEQ ID NO: 4569997 - DNA, 25 bp, Homo sapien
ttagtaagaagagaagcagagttga

SEQ ID NO: 4569998 - DNA, 25 bp, Homo sapien
tagtaagaagagaagcagagttgag

SEQ ID NO: 4569999 - DNA, 25 bp, Homo sapien
cttagtaagaagagaagcagagttg

SEQ ID NO: 4570000 - DNA, 25 bp, Homo sapien
gaacagtcactaactggcgaggagg

SEQ ID NO: 4570001 - DNA, 25 bp, Homo sapien
gaaaaggcagtgaaccagtcagact

SEQ ID NO: 4570002 - DNA, 25 bp, Homo sapien
tgactctccaggcaataaaggtctg

SEQ ID NO: 4570003 - DNA, 25 bp, Homo sapien
ttatgcatcacaaaccccagtctgg

SEQ ID NO: 4570004 - DNA, 25 bp, Homo sapien
gatgacacttgcaatcctgagctta

SEQ ID NO: 4570005 - DNA, 25 bp, Homo sapien
ccagtttaacagcaagatcccgtga

SEQ ID NO: 4570006 - DNA, 25 bp, Homo sapien
cacagttaaaatggcgaccgatgca

SEQ ID NO: 4570007 - DNA, 25 bp, Homo sapien
tgcttggtgctgcaaagtgccaacc

SEQ ID NO: 4570008 - DNA, 25 bp, Homo sapien
aaagtatacatatcagctgggcgcc

SEQ ID NO: 4570009 - DNA, 25 bp, Homo sapien
gtatacatatcagctgggcgccgca

SEQ ID NO: 4570010 - DNA, 25 bp, Homo sapien
gaagtgtaatatacctatagaaaag

SEQ ID NO: 4570011 - DNA, 25 bp, Homo sapien
tacatatcagctgggcgccgcaact

SEQ ID NO: 4570012 - DNA, 25 bp, Homo sapien
agctgggaggagctcttgagcctgg

SEQ ID NO: 4570013 - DNA, 25 bp, Homo sapien
tgcaaaacaaagtgagaccatgtct

SEQ ID NO: 4570014 - DNA, 25 bp, Homo sapien
tgggcatagtggtatgcgtctgtag

SEQ ID NO: 4570015 - DNA, 25 bp, Homo sapien
gctgggcatagtggtatgcgtctgt

SEQ ID NO: 4570016 - DNA, 25 bp, Homo sapien
gaagtgagagactggcttgagttct

SEQ ID NO: 4570017 - DNA, 25 bp, Homo sapien
agtgagagactggcttgagttctgg

SEQ ID NO: 4570018 - DNA, 25 bp, Homo sapien
aagtgagagactggcttgagttctg

SEQ ID NO: 4570019 - DNA, 25 bp, Homo sapien
gtgagagactggcttgagttctgga

SEQ ID NO: 4570020 - DNA, 25 bp, Homo sapien
gtcacgcctcgtcctgtttcaacaa

SEQ ID NO: 4570021 - DNA, 25 bp, Homo sapien
gggtcacgcctcgtcctgtttcaac

SEQ ID NO: 4570022 - DNA, 25 bp, Homo sapien
caccttgcggaggtggttagttatt

SEQ ID NO: 4570023 - DNA, 25 bp, Homo sapien
tgggtttgagttctgcaccttgcgg

SEQ ID NO: 4570024 - DNA, 25 bp, Homo sapien
aaaaccagctccttgacgcaggtga

SEQ ID NO: 4570025 - DNA, 25 bp, Homo sapien
aaaccagctccttgacgcaggtgac

SEQ ID NO: 4570026 - DNA, 25 bp, Homo sapien
caaaaccagctccttgacgcaggtg

SEQ ID NO: 4570027 - DNA, 25 bp, Homo sapien
ctcaaaaccagctccttgacgcagg

SEQ ID NO: 4570028 - DNA, 25 bp, Homo sapien
cggctgcttccccttcatcaagtac

SEQ ID NO: 4570029 - DNA, 25 bp, Homo sapien
cactgctccaaggctccctggcagg

SEQ ID NO: 4570030 - DNA, 25 bp, Homo sapien
actgctccaaggctccctggcagga

SEQ ID NO: 4570031 - DNA, 25 bp, Homo sapien
ctgctccaaggctccctggcaggac

SEQ ID NO: 4570032 - DNA, 25 bp, Homo sapien
gagcacgtgacgaacgctcgcaggc

SEQ ID NO: 4570033 - DNA, 25 bp, Homo sapien
gtcaacctcggtgagtggcgactgc

SEQ ID NO: 4570034 - DNA, 25 bp, Homo sapien
ttcttcacggcgctcaaggtcgtca

SEQ ID NO: 4570035 - DNA, 25 bp, Homo sapien
tgagctcctggcacccgaagccgtt

SEQ ID NO: 4570036 - DNA, 25 bp, Homo sapien
tcaagcaccttactgttagaaggga

SEQ ID NO: 4570037 - DNA, 25 bp, Homo sapien
ggacgaacctacacattacaatttg

SEQ ID NO: 4570038 - DNA, 25 bp, Homo sapien
gaagggaaactgacaagcctcctca

SEQ ID NO: 4570039 - DNA, 25 bp, Homo sapien
gaaagtaaagccaattcgtgcacct

SEQ ID NO: 4570040 - DNA, 25 bp, Homo sapien
taaattggcttttggcggactccag

SEQ ID NO: 4570041 - DNA, 25 bp, Homo sapien
gacaaacggtctgcaatgttaagcc

SEQ ID NO: 4570042 - DNA, 25 bp, Homo sapien
taagagacgatgatgcgactactgc

SEQ ID NO: 4570043 - DNA, 25 bp, Homo sapien
ggcactcgtgcggtaaagaacttca

SEQ ID NO: 4570044 - DNA, 25 bp, Homo sapien
gagggtctcctgagcgagcaagacc

SEQ ID NO: 4570045 - DNA, 25 bp, Homo sapien
ggtctcctgagcgagcaagaccagt

SEQ ID NO: 4570046 - DNA, 25 bp, Homo sapien
tctcctgagcgagcaagaccagtct

SEQ ID NO: 4570047 - DNA, 25 bp, Homo sapien
gcgcgccggttcctcggcttcccac

SEQ ID NO: 4570048 - DNA, 25 bp, Homo sapien
gcgcatcctcccgggagctgctgcc

SEQ ID NO: 4570049 - DNA, 25 bp, Homo sapien
cccgggagctgctgcccttttccaa

SEQ ID NO: 4570050 - DNA, 25 bp, Homo sapien
tcctcccgggagctgctgccctttt

SEQ ID NO: 4570051 - DNA, 25 bp, Homo sapien
cgggggcgcatcctcccgggagctg

SEQ ID NO: 4570052 - DNA, 25 bp, Homo sapien
gtttgtgttaatcaacaatctgttt

SEQ ID NO: 4570053 - DNA, 25 bp, Homo sapien
tccacttctgggatcacggcttttc

SEQ ID NO: 4570054 - DNA, 25 bp, Homo sapien
tgggatcacggcttttcctctgaca

SEQ ID NO: 4570055 - DNA, 25 bp, Homo sapien
cctctgacactattgcatcttttta

SEQ ID NO: 4570056 - DNA, 25 bp, Homo sapien
tagtcgtagtacagagagatgttta

SEQ ID NO: 4570057 - DNA, 25 bp, Homo sapien
ctcacaatgattataaaagtgtata

SEQ ID NO: 4570058 - DNA, 25 bp, Homo sapien
gtttgccagttgatttggcacagac

SEQ ID NO: 4570059 - DNA, 25 bp, Homo sapien
gtttatagatggcttaaaaattctc

SEQ ID NO: 4570060 - DNA, 25 bp, Homo sapien
tccaagcaataggtgcgagcgagca

SEQ ID NO: 4570061 - DNA, 25 bp, Homo sapien
tataggtgaatactcgggccggacc

SEQ ID NO: 4570062 - DNA, 25 bp, Homo sapien
cgagcgagcaagtaaagtgtgccct

SEQ ID NO: 4570063 - DNA, 25 bp, Homo sapien
cagcccagcagtctcagattcactt

SEQ ID NO: 4570064 - DNA, 25 bp, Homo sapien
tccacatgaaattgcctctgaaagg

SEQ ID NO: 4570065 - DNA, 25 bp, Homo sapien
ccacatgaaattgcctctgaaaggc

SEQ ID NO: 4570066 - DNA, 25 bp, Homo sapien
catgaaattgcctctgaaaggctat

SEQ ID NO: 4570067 - DNA, 25 bp, Homo sapien
acatgaaattgcctctgaaaggcta

SEQ ID NO: 4570068 - DNA, 25 bp, Homo sapien
gtgtcaactcgtgggctgttgaaat

SEQ ID NO: 4570069 - DNA, 25 bp, Homo sapien
tctgaacaagtgtgtcaactcgtgg

SEQ ID NO: 4570070 - DNA, 25 bp, Homo sapien
caagtgtgtcaactcgtgggctgtt

SEQ ID NO: 4570071 - DNA, 25 bp, Homo sapien
ctgcattctgaggtgactgtttctt

SEQ ID NO: 4570072 - DNA, 25 bp, Homo sapien
cctcactggcatttcatgaatcaag

SEQ ID NO: 4570073 - DNA, 25 bp, Homo sapien
cactggcatttcatgaatcaagtac

SEQ ID NO: 4570074 - DNA, 25 bp, Homo sapien
catttcatgaatcaagtacttgtag

SEQ ID NO: 4570075 - DNA, 25 bp, Homo sapien
gaatcaagtacttgtagtggagcat

SEQ ID NO: 4570076 - DNA, 25 bp, Homo sapien
caagaagacaaagccaggtcctcat

SEQ ID NO: 4570077 - DNA, 25 bp, Homo sapien
tcaagaagacaaagccaggtcctca

SEQ ID NO: 4570078 - DNA, 25 bp, Homo sapien
gtcaagaagacaaagccaggtcctc

SEQ ID NO: 4570079 - DNA, 25 bp, Homo sapien
catccacagcatgacaccctttttg

SEQ ID NO: 4570080 - DNA, 25 bp, Homo sapien
gtattgatcttctcgtttttgcagc

SEQ ID NO: 4570081 - DNA, 25 bp, Homo sapien
tggacagcaaacgttgtattgatct

SEQ ID NO: 4570082 - DNA, 25 bp, Homo sapien
ccagactgcttgttgtttatggccc

SEQ ID NO: 4570083 - DNA, 25 bp, Homo sapien
tttgcgaggctgtacaattgttgta

SEQ ID NO: 4570084 - DNA, 25 bp, Homo sapien
tcctcatatctagctactttgcgag

SEQ ID NO: 4570085 - DNA, 25 bp, Homo sapien
tcattggatcttcctcatatctagc

SEQ ID NO: 4570086 - DNA, 25 bp, Homo sapien
tctagctactttgcgaggctgtaca

SEQ ID NO: 4570087 - DNA, 25 bp, Homo sapien
gaatcaggccacatcaacttgtgga

SEQ ID NO: 4570088 - DNA, 25 bp, Homo sapien
gagtgttaaaagcttgaatcaggcc

SEQ ID NO: 4570089 - DNA, 25 bp, Homo sapien
gacttgagacctaaacagtatgagg

SEQ ID NO: 4570090 - DNA, 25 bp, Homo sapien
tggaggtagtgatgaccacattaac

SEQ ID NO: 4570091 - DNA, 25 bp, Homo sapien
tcaagacaattgagatgtagtatct

SEQ ID NO: 4570092 - DNA, 25 bp, Homo sapien
catttggaaagttaagggacacact

SEQ ID NO: 4570093 - DNA, 25 bp, Homo sapien
tacaattaatgtgttgaggaaggtc

SEQ ID NO: 4570094 - DNA, 25 bp, Homo sapien
tcgactcatgcctggcattgccttt

SEQ ID NO: 4570095 - DNA, 25 bp, Homo sapien
aggcagtggcaagaaaaggggcttt

SEQ ID NO: 4570096 - DNA, 25 bp, Homo sapien
gcagtggcaagaaaaggggctttgc

SEQ ID NO: 4570097 - DNA, 25 bp, Homo sapien
ggcagtggcaagaaaaggggctttg

SEQ ID NO: 4570098 - DNA, 25 bp, Homo sapien
cagtggcaagaaaaggggctttgcc

SEQ ID NO: 4570099 - DNA, 25 bp, Homo sapien
ttcctcaatcatgtacaacgtaaag

SEQ ID NO: 4570100 - DNA, 25 bp, Homo sapien
tgtacaacgtaaagcctaagatgtc

SEQ ID NO: 4570101 - DNA, 25 bp, Homo sapien
gactccctcggcatactgaaatacc

SEQ ID NO: 4570102 - DNA, 25 bp, Homo sapien
aaatcacagatctgaccgtgtcttg

SEQ ID NO: 4570103 - DNA, 25 bp, Homo sapien
cttcatctatcttttcatggttcat

SEQ ID NO: 4570104 - DNA, 25 bp, Homo sapien
taacattgctcatccctctgatctt

SEQ ID NO: 4570105 - DNA, 25 bp, Homo sapien
aacattgctcatccctctgatcttc

SEQ ID NO: 4570106 - DNA, 25 bp, Homo sapien
tctgatcttcatctatcttttcatg

SEQ ID NO: 4570107 - DNA, 25 bp, Homo sapien
tccatggaatgcttcatattcaaat

SEQ ID NO: 4570108 - DNA, 25 bp, Homo sapien
caaattctttccagtttgaaacatt

SEQ ID NO: 4570109 - DNA, 25 bp, Homo sapien
tcacttaaccctttctccatggaat

SEQ ID NO: 4570110 - DNA, 25 bp, Homo sapien
ttccagtttgaaacatttagcactt

SEQ ID NO: 4570111 - DNA, 25 bp, Homo sapien
cagatgaatgagtttctaaatgcct

SEQ ID NO: 4570112 - DNA, 25 bp, Homo sapien
agatgaatgagtttctaaatgcctt

SEQ ID NO: 4570113 - DNA, 25 bp, Homo sapien
cctacagagagtagcctgctataaa

SEQ ID NO: 4570114 - DNA, 25 bp, Homo sapien
gccagcccaattcctacagagagta

SEQ ID NO: 4570115 - DNA, 25 bp, Homo sapien
tcctacagagagtagcctgctataa

SEQ ID NO: 4570116 - DNA, 25 bp, Homo sapien
tacagagagtagcctgctataaaat

SEQ ID NO: 4570117 - DNA, 25 bp, Homo sapien
tctaagtacctgtgttgtcctctga

SEQ ID NO: 4570118 - DNA, 25 bp, Homo sapien
tcttggtctaagtacctgtgttgtc

SEQ ID NO: 4570119 - DNA, 25 bp, Homo sapien
tttgtcttggtctaagtacctgtgt

SEQ ID NO: 4570120 - DNA, 25 bp, Homo sapien
tacctgtgttgtcctctgatcatca

SEQ ID NO: 4570121 - DNA, 25 bp, Homo sapien
tcgccactaatgaggtgagagccct

SEQ ID NO: 4570122 - DNA, 25 bp, Homo sapien
tgagagccctgcatattaataaacc

SEQ ID NO: 4570123 - DNA, 25 bp, Homo sapien
aacacctatgccatttcttgggaag

SEQ ID NO: 4570124 - DNA, 25 bp, Homo sapien
ttacaggaaacatcgcagcttcact

SEQ ID NO: 4570125 - DNA, 25 bp, Homo sapien
tgccagtatcaagtccaacactctg

SEQ ID NO: 4570126 - DNA, 25 bp, Homo sapien
aaaatccagcattcaacgacacaag

SEQ ID NO: 4570127 - DNA, 25 bp, Homo sapien
tagtagtggttactctcaactctcc

SEQ ID NO: 4570128 - DNA, 25 bp, Homo sapien
gttcagcagatatattacttgccag

SEQ ID NO: 4570129 - DNA, 25 bp, Homo sapien
tagacattcatcagactcatcaaac

SEQ ID NO: 4570130 - DNA, 25 bp, Homo sapien
gtggttgcatggatgtagacattca

SEQ ID NO: 4570131 - DNA, 25 bp, Homo sapien
attggtttgaggatgactggatgtc

SEQ ID NO: 4570132 - DNA, 25 bp, Homo sapien
gtatcttgatcatggtgtggttgca

SEQ ID NO: 4570133 - DNA, 25 bp, Homo sapien
cgtcagctttgtagttcaagctata

SEQ ID NO: 4570134 - DNA, 25 bp, Homo sapien
ctagtcgtcagctttgtagttcaag

SEQ ID NO: 4570135 - DNA, 25 bp, Homo sapien
tagttcaagctataaaaagcataag

SEQ ID NO: 4570136 - DNA, 25 bp, Homo sapien
tttgtagttcaagctataaaaagca

SEQ ID NO: 4570137 - DNA, 25 bp, Homo sapien
agtagcatccgtccactcacaggct

SEQ ID NO: 4570138 - DNA, 25 bp, Homo sapien
aggctcccttctgatttcttgcagc

SEQ ID NO: 4570139 - DNA, 25 bp, Homo sapien
tgagtagcatccgtccactcacagg

SEQ ID NO: 4570140 - DNA, 25 bp, Homo sapien
gttttcctgagtagcatccgtccac

SEQ ID NO: 4570141 - DNA, 25 bp, Homo sapien
ctgtggattagttatggaatcatta

SEQ ID NO: 4570142 - DNA, 25 bp, Homo sapien
tgtggattagttatggaatcattaa

SEQ ID NO: 4570143 - DNA, 25 bp, Homo sapien
tagtgcacttgccagttttcactgg

SEQ ID NO: 4570144 - DNA, 25 bp, Homo sapien
ctaatagtgcacttgccagttttca

SEQ ID NO: 4570145 - DNA, 25 bp, Homo sapien
gtgcacttgccagttttcactggca

SEQ ID NO: 4570146 - DNA, 25 bp, Homo sapien
cacttgccagttttcactggcatag

SEQ ID NO: 4570147 - DNA, 25 bp, Homo sapien
tgttgagatagccattctgtatgag

SEQ ID NO: 4570148 - DNA, 25 bp, Homo sapien
tcctttaggcctttgggttgcataa

SEQ ID NO: 4570149 - DNA, 25 bp, Homo sapien
tagccattctgtatgagtttcattg

SEQ ID NO: 4570150 - DNA, 25 bp, Homo sapien
aacttccttggcatgcagtttaggg

SEQ ID NO: 4570151 - DNA, 25 bp, Homo sapien
tctgccctagggaggcctcttgtat

SEQ ID NO: 4570152 - DNA, 25 bp, Homo sapien
tacctgcagggacttatttccagcc

SEQ ID NO: 4570153 - DNA, 25 bp, Homo sapien
tcccacatagggttccagtctcagg

SEQ ID NO: 4570154 - DNA, 25 bp, Homo sapien
caatagtgtcttggcttcacctggc

SEQ ID NO: 4570155 - DNA, 25 bp, Homo sapien
ttagcagagtaacgggagatccaga

SEQ ID NO: 4570156 - DNA, 25 bp, Homo sapien
ccagtgccattaaattctgggtgct

SEQ ID NO: 4570157 - DNA, 25 bp, Homo sapien
gtatttagcagagtaacgggagatc

SEQ ID NO: 4570158 - DNA, 25 bp, Homo sapien
ccattaaattctgggtgcttgtgaa

SEQ ID NO: 4570159 - DNA, 25 bp, Homo sapien
tttgtgaatctccacgacttgtaag

SEQ ID NO: 4570160 - DNA, 25 bp, Homo sapien
gagtgtgaataacaaattggatgca

SEQ ID NO: 4570161 - DNA, 25 bp, Homo sapien
cctgagattcggatgattagtgtgt

SEQ ID NO: 4570162 - DNA, 25 bp, Homo sapien
tctccacgacttgtaagcagatagc

SEQ ID NO: 4570163 - DNA, 25 bp, Homo sapien
tgtgcctgccaggtaattgctgact

SEQ ID NO: 4570164 - DNA, 25 bp, Homo sapien
atatccactcaagtactgcctccaa

SEQ ID NO: 4570165 - DNA, 25 bp, Homo sapien
tgcagagatgaaaattactgtccca

SEQ ID NO: 4570166 - DNA, 25 bp, Homo sapien
actgcctccaactggtgtgtctgca

SEQ ID NO: 4570167 - DNA, 25 bp, Homo sapien
tcagccctcttgctcatcaccatct

SEQ ID NO: 4570168 - DNA, 25 bp, Homo sapien
gaagtttactgaaacctgattgtac

SEQ ID NO: 4570169 - DNA, 25 bp, Homo sapien
tctccctccgattacttccttgaag

SEQ ID NO: 4570170 - DNA, 25 bp, Homo sapien
acaccttcagccctcttgctcatca

SEQ ID NO: 4570171 - DNA, 25 bp, Homo sapien
tgttgtattttgtgtgaaaatgcat

SEQ ID NO: 4570172 - DNA, 25 bp, Homo sapien
tcaatgctccagctgttgtattttg

SEQ ID NO: 4570173 - DNA, 25 bp, Homo sapien
ctcaatgctccagctgttgtatttt

SEQ ID NO: 4570174 - DNA, 25 bp, Homo sapien
ccagctgttgtattttgtgtgaaaa

SEQ ID NO: 4570175 - DNA, 25 bp, Homo sapien
tggctctgagctatgttacgtgaac

SEQ ID NO: 4570176 - DNA, 25 bp, Homo sapien
gaactggccttgtcctgaatcccac

SEQ ID NO: 4570177 - DNA, 25 bp, Homo sapien
gcacaatgcccaacatccttggagc

SEQ ID NO: 4570178 - DNA, 25 bp, Homo sapien
gcaagttgtgttgtatggctctgag

SEQ ID NO: 4570179 - DNA, 25 bp, Homo sapien
catccttatccattgaattccactg

SEQ ID NO: 4570180 - DNA, 25 bp, Homo sapien
tgatcatccttatccattgaattcc

SEQ ID NO: 4570181 - DNA, 25 bp, Homo sapien
gatcatccttatccattgaattcca

SEQ ID NO: 4570182 - DNA, 25 bp, Homo sapien
ttctgatcatccttatccattgaat

SEQ ID NO: 4570183 - DNA, 25 bp, Homo sapien
ccggcctgggctggcatcaaacagt

SEQ ID NO: 4570184 - DNA, 25 bp, Homo sapien
ctgggctggcatcaaacagtgcctc

SEQ ID NO: 4570185 - DNA, 25 bp, Homo sapien
ttcactgagcatccggcctgggctg

SEQ ID NO: 4570186 - DNA, 25 bp, Homo sapien
ggcctgggctggcatcaaacagtgc

SEQ ID NO: 4570187 - DNA, 25 bp, Homo sapien
taggatgagtaaaaggcgggctttc

SEQ ID NO: 4570188 - DNA, 25 bp, Homo sapien
cagctgagcggagttagaggctttc

SEQ ID NO: 4570189 - DNA, 25 bp, Homo sapien
ccttgtaacacaccgagaagtaggt

SEQ ID NO: 4570190 - DNA, 25 bp, Homo sapien
caaagcctcgctttcaccctgatgt

SEQ ID NO: 4570191 - DNA, 25 bp, Homo sapien
tcctttgtagcatgcacttcggctg

SEQ ID NO: 4570192 - DNA, 25 bp, Homo sapien
cacagctggatattgcagaggagtt

SEQ ID NO: 4570193 - DNA, 25 bp, Homo sapien
atctgtatgtaaatgcgtgaggcac

SEQ ID NO: 4570194 - DNA, 25 bp, Homo sapien
tcggctgtggtaaaagtacgtatca

SEQ ID NO: 4570195 - DNA, 25 bp, Homo sapien
ttaatcctctgaatccccagtggag

SEQ ID NO: 4570196 - DNA, 25 bp, Homo sapien
agtcattgtggaagagccttttagc

SEQ ID NO: 4570197 - DNA, 25 bp, Homo sapien
cctttgttgtagccatccctggtga

SEQ ID NO: 4570198 - DNA, 25 bp, Homo sapien
taatcctctgaatccccagtggagc

SEQ ID NO: 4570199 - DNA, 25 bp, Homo sapien
tagtaatcgggagattagggcccca

SEQ ID NO: 4570200 - DNA, 25 bp, Homo sapien
tagggccccagggacaatgagagat

SEQ ID NO: 4570201 - DNA, 25 bp, Homo sapien
ggcaaatctgccgatgtaaacaaaa

SEQ ID NO: 4570202 - DNA, 25 bp, Homo sapien
tagaagtagctttagatgtgaaatg

SEQ ID NO: 4570203 - DNA, 25 bp, Homo sapien
ccgaggggccgtagtagtcagtgag

SEQ ID NO: 4570204 - DNA, 25 bp, Homo sapien
ctggcttgggtggtgcgggagctcg

SEQ ID NO: 4570205 - DNA, 25 bp, Homo sapien
tgcgggagctcggaacagtggccga

SEQ ID NO: 4570206 - DNA, 25 bp, Homo sapien
tgggtggtgcgggagctcggaacag

SEQ ID NO: 4570207 - DNA, 25 bp, Homo sapien
tcttcataacgacagagcaccaggc

SEQ ID NO: 4570208 - DNA, 25 bp, Homo sapien
aagcccaggaccagtaaccaaggag

SEQ ID NO: 4570209 - DNA, 25 bp, Homo sapien
cagttcaatgatggaaatgccgccg

SEQ ID NO: 4570210 - DNA, 25 bp, Homo sapien
gtttgaaggcgctgacactggcaga

SEQ ID NO: 4570211 - DNA, 25 bp, Homo sapien
tgctgcctgcgccagaagagctttg

SEQ ID NO: 4570212 - DNA, 25 bp, Homo sapien
aaagagagtggcctcggcgcggagg

SEQ ID NO: 4570213 - DNA, 25 bp, Homo sapien
tggacggtgccgagccagccaaaga

SEQ ID NO: 4570214 - DNA, 25 bp, Homo sapien
tacccgacgtttcccatgttctggc

SEQ ID NO: 4570215 - DNA, 25 bp, Homo sapien
ggacgaagacggcacggacgaggcg

SEQ ID NO: 4570216 - DNA, 25 bp, Homo sapien
tagagtaattttcccgagggcgcta

SEQ ID NO: 4570217 - DNA, 25 bp, Homo sapien
tcattaaccggatgcgaaaggcgtc

SEQ ID NO: 4570218 - DNA, 25 bp, Homo sapien
gaaaggcgtcatttatgccgcggac

SEQ ID NO: 4570219 - DNA, 25 bp, Homo sapien
ctttgaacgcccctcggcttgggag

SEQ ID NO: 4570220 - DNA, 25 bp, Homo sapien
taatcaagtgtaagcggctgccagt

SEQ ID NO: 4570221 - DNA, 25 bp, Homo sapien
cactcgcccgccgatgatttggaaa

SEQ ID NO: 4570222 - DNA, 25 bp, Homo sapien
tatttaacgcgagcagggtgcaggc

SEQ ID NO: 4570223 - DNA, 25 bp, Homo sapien
tattcagcaagtgtgtttggccgcg

SEQ ID NO: 4570224 - DNA, 25 bp, Homo sapien
ttaaaagggcgacaactgactcacg

SEQ ID NO: 4570225 - DNA, 25 bp, Homo sapien
ctatgaaataacacgcaggcctccg

SEQ ID NO: 4570226 - DNA, 25 bp, Homo sapien
cagaattgtccctttagatggcgcg

SEQ ID NO: 4570227 - DNA, 25 bp, Homo sapien
gctcacggcacagggaatcattcag

SEQ ID NO: 4570228 - DNA, 25 bp, Homo sapien
ttggagtcccaggatgttccgacgg

SEQ ID NO: 4570229 - DNA, 25 bp, Homo sapien
agtcctttgcgctgggggtcggagc

SEQ ID NO: 4570230 - DNA, 25 bp, Homo sapien
ctagagtcctttgcgctgggggtcg

SEQ ID NO: 4570231 - DNA, 25 bp, Homo sapien
gggtcggagccttggagtcccagga

SEQ ID NO: 4570232 - DNA, 25 bp, Homo sapien
aactttgcggttcatctaggtgctg

SEQ ID NO: 4570233 - DNA, 25 bp, Homo sapien
tcttggttgtaagtgtctgttgccc

SEQ ID NO: 4570234 - DNA, 25 bp, Homo sapien
ctgttgccctaagactgaaagtaag

SEQ ID NO: 4570235 - DNA, 25 bp, Homo sapien
catgtgtagatgaaaggcttccaac

SEQ ID NO: 4570236 - DNA, 25 bp, Homo sapien
tgagggaaggaatccctaggtgctt

SEQ ID NO: 4570237 - DNA, 25 bp, Homo sapien
aacagccactgataagcaattaagc

SEQ ID NO: 4570238 - DNA, 25 bp, Homo sapien
catcaataggattcgttttgggagc

SEQ ID NO: 4570239 - DNA, 25 bp, Homo sapien
taaacacaggtttactgctcagaaa

SEQ ID NO: 4570240 - DNA, 25 bp, Homo sapien
ctggactattgagctttctgaagac

SEQ ID NO: 4570241 - DNA, 25 bp, Homo sapien
ggactattgagtttctggagacaca

SEQ ID NO: 4570242 - DNA, 25 bp, Homo sapien
gttggaagggcatcctgcaacgcca

SEQ ID NO: 4570243 - DNA, 25 bp, Homo sapien
taagaatctacaagcacagaggttg

SEQ ID NO: 4570244 - DNA, 25 bp, Homo sapien
aattgcccaagtggcctccaaagaa

SEQ ID NO: 4570245 - DNA, 25 bp, Homo sapien
cctatgctcggctgttacctggaaa

SEQ ID NO: 4570246 - DNA, 25 bp, Homo sapien
caaagattgtcctctaacgccttac

SEQ ID NO: 4570247 - DNA, 25 bp, Homo sapien
ccttacatcgaaggcccagagccaa

SEQ ID NO: 4570248 - DNA, 25 bp, Homo sapien
gatccccgaaactaccgagcagtgt

SEQ ID NO: 4570249 - DNA, 25 bp, Homo sapien
catgggattcccacgggtgttggac

SEQ ID NO: 4570250 - DNA, 25 bp, Homo sapien
cccgaaaaggttgcgagtcgctggt

SEQ ID NO: 4570251 - DNA, 25 bp, Homo sapien
cagtgtctgcgcgacgcgaaagcat

SEQ ID NO: 4570252 - DNA, 25 bp, Homo sapien
ccttcgtcttgcaactatctgcatg

SEQ ID NO: 4570253 - DNA, 25 bp, Homo sapien
ttcgtcttgcaactatctgcatgaa

SEQ ID NO: 4570254 - DNA, 25 bp, Homo sapien
tcttttccttcgtcttgcaactatc

SEQ ID NO: 4570255 - DNA, 25 bp, Homo sapien
tttccttcgtcttgcaactatctgc

SEQ ID NO: 4570256 - DNA, 25 bp, Homo sapien
gaggcatttgtgcattaggaacaga

SEQ ID NO: 4570257 - DNA, 25 bp, Homo sapien
ctcttctgggctttggtgatgtgca

SEQ ID NO: 4570258 - DNA, 25 bp, Homo sapien
accgggaagctcttctgggctttgg

SEQ ID NO: 4570259 - DNA, 25 bp, Homo sapien
tctgggctttggtgatgtgcagcat

SEQ ID NO: 4570260 - DNA, 25 bp, Homo sapien
cttctgggctttggtgatgtgcagc

SEQ ID NO: 4570261 - DNA, 25 bp, Homo sapien
tccaagtcccaggacgcgctggggc

SEQ ID NO: 4570262 - DNA, 25 bp, Homo sapien
gaacggaaagctggcagccttccaa

SEQ ID NO: 4570263 - DNA, 25 bp, Homo sapien
cttccaagtcccaggacgcgctggg

SEQ ID NO: 4570264 - DNA, 25 bp, Homo sapien
ctgggaacggaaagctggcagcctt

SEQ ID NO: 4570265 - DNA, 25 bp, Homo sapien
gtgatcatcaatggtttcaaatcac

SEQ ID NO: 4570266 - DNA, 25 bp, Homo sapien
ctattttctcagctctgtgatcatc

SEQ ID NO: 4570267 - DNA, 25 bp, Homo sapien
tcagctctgtgatcatcaatggttt

SEQ ID NO: 4570268 - DNA, 25 bp, Homo sapien
ttctcagctctgtgatcatcaatgg

SEQ ID NO: 4570269 - DNA, 25 bp, Homo sapien
tactcctcttctcagcattgttgat

SEQ ID NO: 4570270 - DNA, 25 bp, Homo sapien
aacctggcatttactcctcttctca

SEQ ID NO: 4570271 - DNA, 25 bp, Homo sapien
taataagaacctggcatttactcct

SEQ ID NO: 4570272 - DNA, 25 bp, Homo sapien
aagaacctggcatttactcctcttc

SEQ ID NO: 4570273 - DNA, 25 bp, Homo sapien
ttttgtgatcaatctggtctccttg

SEQ ID NO: 4570274 - DNA, 25 bp, Homo sapien
cctctgaaccatttgtcttgtcctc

SEQ ID NO: 4570275 - DNA, 25 bp, Homo sapien
tcaatctggtctccttggttccagg

SEQ ID NO: 4570276 - DNA, 25 bp, Homo sapien
ctgccctaggactttccttctgcct

SEQ ID NO: 4570277 - DNA, 25 bp, Homo sapien
accctggtgcagctaaacaatccag

SEQ ID NO: 4570278 - DNA, 25 bp, Homo sapien
gatgaccctggtgcagctaaacaat

SEQ ID NO: 4570279 - DNA, 25 bp, Homo sapien
gaccctggtgcagctaaacaatcca

SEQ ID NO: 4570280 - DNA, 25 bp, Homo sapien
tgaccctggtgcagctaaacaatcc

SEQ ID NO: 4570281 - DNA, 25 bp, Homo sapien
acatggcaatgatgctcatacaggg

SEQ ID NO: 4570282 - DNA, 25 bp, Homo sapien
ttccacatggcaatgatgctcatac

SEQ ID NO: 4570283 - DNA, 25 bp, Homo sapien
taggggactgacacaactgggcaag

SEQ ID NO: 4570284 - DNA, 25 bp, Homo sapien
cacatggcaatgatgctcatacagg

SEQ ID NO: 4570285 - DNA, 25 bp, Homo sapien
ttgtagtcacaagccagcaccgatt

SEQ ID NO: 4570286 - DNA, 25 bp, Homo sapien
gagtggcaacgtgctcctcatcaga

SEQ ID NO: 4570287 - DNA, 25 bp, Homo sapien
tgtggtaccactgagacaaccgtcg

SEQ ID NO: 4570288 - DNA, 25 bp, Homo sapien
catgtcatgtttgggattcaggcac

SEQ ID NO: 4570289 - DNA, 25 bp, Homo sapien
agcgttccgcggaccgcagagagat

SEQ ID NO: 4570290 - DNA, 25 bp, Homo sapien
cagcattgtttctgtgaccgtaggc

SEQ ID NO: 4570291 - DNA, 25 bp, Homo sapien
aggtagcaggtgctgaaaaagcctt

SEQ ID NO: 4570292 - DNA, 25 bp, Homo sapien
aagctatgcagaagcgttccgcgga

SEQ ID NO: 4570293 - DNA, 25 bp, Homo sapien
caagatggcggacagtgcggaacta

SEQ ID NO: 4570294 - DNA, 25 bp, Homo sapien
ttctaatattcggccgcggagacgg

SEQ ID NO: 4570295 - DNA, 25 bp, Homo sapien
actgcgcttgcgctgacagacgcaa

SEQ ID NO: 4570296 - DNA, 25 bp, Homo sapien
taaagcgcagctcgaattcacttct

SEQ ID NO: 4570297 - DNA, 25 bp, Homo sapien
cccgcttgtgggaagcgcgatcccg

SEQ ID NO: 4570298 - DNA, 25 bp, Homo sapien
tgctcgcttgtcaggaagcgcctgg

SEQ ID NO: 4570299 - DNA, 25 bp, Homo sapien
tgccccgcttgtgggaagcgcgatc

SEQ ID NO: 4570300 - DNA, 25 bp, Homo sapien
ctctggtaaagtttagcgagccccg

SEQ ID NO: 4570301 - DNA, 25 bp, Homo sapien
atggttcgtgtttatatccccccat

SEQ ID NO: 4570302 - DNA, 25 bp, Homo sapien
ggcgatgctgtagctgatggaggtg

SEQ ID NO: 4570303 - DNA, 25 bp, Homo sapien
gcgatgctgtagctgatggaggtga

SEQ ID NO: 4570304 - DNA, 25 bp, Homo sapien
ggcttctttaccgtagcagatatac

SEQ ID NO: 4570305 - DNA, 25 bp, Homo sapien
gatggcttctttaccgtagcagata

SEQ ID NO: 4570306 - DNA, 25 bp, Homo sapien
gcttctttaccgtagcagatatacc

SEQ ID NO: 4570307 - DNA, 25 bp, Homo sapien
atgatggcttctttaccgtagcaga

SEQ ID NO: 4570308 - DNA, 25 bp, Homo sapien
tcttgtaatccctgttgattgcggt

SEQ ID NO: 4570309 - DNA, 25 bp, Homo sapien
tcatccaccgttttctcctgggcga

SEQ ID NO: 4570310 - DNA, 25 bp, Homo sapien
cggtagtgcttagtggcgagtccat

SEQ ID NO: 4570311 - DNA, 25 bp, Homo sapien
tctcctgggcgatcccattgtcttt

SEQ ID NO: 4570312 - DNA, 25 bp, Homo sapien
cattttgtgggacctcaatgcagtc

SEQ ID NO: 4570313 - DNA, 25 bp, Homo sapien
gataattaactagaggagtaggcac

SEQ ID NO: 4570314 - DNA, 25 bp, Homo sapien
caatgcagtcaataagatggacctg

SEQ ID NO: 4570315 - DNA, 25 bp, Homo sapien
taatgttcaggttatcgtccagaag

SEQ ID NO: 4570316 - DNA, 25 bp, Homo sapien
aatgagattatcagtctaggaagac

SEQ ID NO: 4570317 - DNA, 25 bp, Homo sapien
aaatttaatgtaagcgttaggagat

SEQ ID NO: 4570318 - DNA, 25 bp, Homo sapien
taagcgttaggagataaaattgagg

SEQ ID NO: 4570319 - DNA, 25 bp, Homo sapien
ggaagacctgtgtctgaataataag

SEQ ID NO: 4570320 - DNA, 25 bp, Homo sapien
gatggtcaccctgcatcatcgccat

SEQ ID NO: 4570321 - DNA, 25 bp, Homo sapien
tcacaagagtgattatagtttacct

SEQ ID NO: 4570322 - DNA, 25 bp, Homo sapien
tctagattctagtccttcgttgggt

SEQ ID NO: 4570323 - DNA, 25 bp, Homo sapien
tgaggaagtctcatttactgatttg

SEQ ID NO: 4570324 - DNA, 25 bp, Homo sapien
tttctagtctaacaaccccacttgc

SEQ ID NO: 4570325 - DNA, 25 bp, Homo sapien
cgctctacaaatagtcttgctggga

SEQ ID NO: 4570326 - DNA, 25 bp, Homo sapien
catggtcttgattactatgtcagac

SEQ ID NO: 4570327 - DNA, 25 bp, Homo sapien
ctgcatatcaatttagggatgatta

SEQ ID NO: 4570328 - DNA, 25 bp, Homo sapien
cataaaattaggtagagtaattgct

SEQ ID NO: 4570329 - DNA, 25 bp, Homo sapien
gattccacagggtattctcaggtca

SEQ ID NO: 4570330 - DNA, 25 bp, Homo sapien
gctctctgtatgagagatttcctaa

SEQ ID NO: 4570331 - DNA, 25 bp, Homo sapien
taaatattggtggtcctagggattc

SEQ ID NO: 4570332 - DNA, 25 bp, Homo sapien
catagggtttattgattgccctgcc

SEQ ID NO: 4570333 - DNA, 25 bp, Homo sapien
cagcctgtctattgagcttttcctt

SEQ ID NO: 4570334 - DNA, 25 bp, Homo sapien
accctccaagaactttgtgtataca

SEQ ID NO: 4570335 - DNA, 25 bp, Homo sapien
attgtccagcctgtctattgagctt

SEQ ID NO: 4570336 - DNA, 25 bp, Homo sapien
tttcctttgtgcatcgtatttttac

SEQ ID NO: 4570337 - DNA, 25 bp, Homo sapien
ggctttcctctgatacttagtcgtg

SEQ ID NO: 4570338 - DNA, 25 bp, Homo sapien
tcggagcctttggaaatttatctaa

SEQ ID NO: 4570339 - DNA, 25 bp, Homo sapien
tagtcgtgctggcatgtctgttcat

SEQ ID NO: 4570340 - DNA, 25 bp, Homo sapien
aattgttgcataatctctgcctgtt

SEQ ID NO: 4570341 - DNA, 25 bp, Homo sapien
tgttagccccacttgtacaggtatt

SEQ ID NO: 4570342 - DNA, 25 bp, Homo sapien
acttttgcaggatgaaggaagggca

SEQ ID NO: 4570343 - DNA, 25 bp, Homo sapien
gaagggcagttgtctagctaactag

SEQ ID NO: 4570344 - DNA, 25 bp, Homo sapien
gcttcactgctagttgaggatgcgt

SEQ ID NO: 4570345 - DNA, 25 bp, Homo sapien
tcttctattggtaggtattttacta

SEQ ID NO: 4570346 - DNA, 25 bp, Homo sapien
gatcactcccataccaacacataga

SEQ ID NO: 4570347 - DNA, 25 bp, Homo sapien
cactttaatgatgtatcttagagag

SEQ ID NO: 4570348 - DNA, 25 bp, Homo sapien
taatattgtcgttgtcactttaatg

SEQ ID NO: 4570349 - DNA, 25 bp, Homo sapien
caccccagatcgaatgaacttggca

SEQ ID NO: 4570350 - DNA, 25 bp, Homo sapien
gatgatcaagacctcctacactcgt

SEQ ID NO: 4570351 - DNA, 25 bp, Homo sapien
ttaagtgcaggaggcagtacttctc

SEQ ID NO: 4570352 - DNA, 25 bp, Homo sapien
gcacggacacggcatccatctttgg

SEQ ID NO: 4570353 - DNA, 25 bp, Homo sapien
tctgtcccgctgcattccctgtgta

SEQ ID NO: 4570354 - DNA, 25 bp, Homo sapien
tcctcccgagtgtgcattcagttaa

SEQ ID NO: 4570355 - DNA, 25 bp, Homo sapien
taagttataaagctcatctgtcccg

SEQ ID NO: 4570356 - DNA, 25 bp, Homo sapien
gaaggtcttgaactcacgtgtgagc

SEQ ID NO: 4570357 - DNA, 25 bp, Homo sapien
tgtgcagctgacagaggtaatgtta

SEQ ID NO: 4570358 - DNA, 25 bp, Homo sapien
tgcagctgacagaggtaatgttaca

SEQ ID NO: 4570359 - DNA, 25 bp, Homo sapien
tttgtgcagctgacagaggtaatgt

SEQ ID NO: 4570360 - DNA, 25 bp, Homo sapien
cagctgacagaggtaatgttacatc

SEQ ID NO: 4570361 - DNA, 25 bp, Homo sapien
cctcatcagagaaggtatgatgttc

SEQ ID NO: 4570362 - DNA, 25 bp, Homo sapien
ctactcttattcataatggaacatg

SEQ ID NO: 4570363 - DNA, 25 bp, Homo sapien
agaaggtatgatgttctcaggtgtg

SEQ ID NO: 4570364 - DNA, 25 bp, Homo sapien
gttctactaatgttccaaaatcctc

SEQ ID NO: 4570365 - DNA, 25 bp, Homo sapien
ttctcagaatctagtcaagttgcca

SEQ ID NO: 4570366 - DNA, 25 bp, Homo sapien
tgatccagttgaaaacgtatccctc

SEQ ID NO: 4570367 - DNA, 25 bp, Homo sapien
caacattgacatgctatctgtggac

SEQ ID NO: 4570368 - DNA, 25 bp, Homo sapien
tctgtggacaaatagcagttctcag

SEQ ID NO: 4570369 - DNA, 25 bp, Homo sapien
ccatacttggttgactattttgagc

SEQ ID NO: 4570370 - DNA, 25 bp, Homo sapien
taagctctgaaaaatcggattcttt

SEQ ID NO: 4570371 - DNA, 25 bp, Homo sapien
cctttgagtcaagtgtctgaaatgg

SEQ ID NO: 4570372 - DNA, 25 bp, Homo sapien
tagacatgatcacaattctgtatct

SEQ ID NO: 4570373 - DNA, 25 bp, Homo sapien
tttgaatgctaagagcaccgtggcc

SEQ ID NO: 4570374 - DNA, 25 bp, Homo sapien
caggaccaggagtaaggtaacagcc

SEQ ID NO: 4570375 - DNA, 25 bp, Homo sapien
ggatcttagactctggaccactgaa

SEQ ID NO: 4570376 - DNA, 25 bp, Homo sapien
caccgtggccttcttgtaaacaaca

SEQ ID NO: 4570377 - DNA, 25 bp, Homo sapien
tccatgcttgaaagggccggactca

SEQ ID NO: 4570378 - DNA, 25 bp, Homo sapien
caaaagaactgtgggcctaggacct

SEQ ID NO: 4570379 - DNA, 25 bp, Homo sapien
aaatatggaagatggttctagcccc

SEQ ID NO: 4570380 - DNA, 25 bp, Homo sapien
taatgaagtttaagcaccaggaccc

SEQ ID NO: 4570381 - DNA, 25 bp, Homo sapien
tgggtaatgttgtcttgccactgtg

SEQ ID NO: 4570382 - DNA, 25 bp, Homo sapien
taattgctccaagttttcaggccca

SEQ ID NO: 4570383 - DNA, 25 bp, Homo sapien
catctctcccaagtgaaaagaacac

SEQ ID NO: 4570384 - DNA, 25 bp, Homo sapien
taaagatctactcataccatggctg

SEQ ID NO: 4570385 - DNA, 25 bp, Homo sapien
ccaggaagggtgatcttgtggataa

SEQ ID NO: 4570386 - DNA, 25 bp, Homo sapien
tagtcccgtccaggaagggtgatct

SEQ ID NO: 4570387 - DNA, 25 bp, Homo sapien
cccgtccaggaagggtgatcttgtg

SEQ ID NO: 4570388 - DNA, 25 bp, Homo sapien
tcaatagtcccgtccaggaagggtg

SEQ ID NO: 4570389 - DNA, 25 bp, Homo sapien
tttgccattgggttcgatatctgct

SEQ ID NO: 4570390 - DNA, 25 bp, Homo sapien
tgccattgggttcgatatctgcttc

SEQ ID NO: 4570391 - DNA, 25 bp, Homo sapien
gccattgggttcgatatctgcttcc

SEQ ID NO: 4570392 - DNA, 25 bp, Homo sapien
attgggttcgatatctgcttccctg

SEQ ID NO: 4570393 - DNA, 25 bp, Homo sapien
gaaaattgtctttcgatcacccaga

SEQ ID NO: 4570394 - DNA, 25 bp, Homo sapien
tgaaaacagccacgagaggtgaacc

SEQ ID NO: 4570395 - DNA, 25 bp, Homo sapien
tgaggacacctgagtagaacagcct

SEQ ID NO: 4570396 - DNA, 25 bp, Homo sapien
ataatagcttgtcccaggcgttggc

SEQ ID NO: 4570397 - DNA, 25 bp, Homo sapien
tccttgtccaccatcaacatggcta

SEQ ID NO: 4570398 - DNA, 25 bp, Homo sapien
tcggacgccatgacgtaacctttct

SEQ ID NO: 4570399 - DNA, 25 bp, Homo sapien
cagactcgtgagttttgaccgcagg

SEQ ID NO: 4570400 - DNA, 25 bp, Homo sapien
tgcatgtgcataatggtcagaaaag

SEQ ID NO: 4570401 - DNA, 25 bp, Homo sapien
ggtcaactgaccagggaatgccagg

SEQ ID NO: 4570402 - DNA, 25 bp, Homo sapien
tggacctgcacagccggttcaaggt

SEQ ID NO: 4570403 - DNA, 25 bp, Homo sapien
tcacagtgaagaggatgcatcccct

SEQ ID NO: 4570404 - DNA, 25 bp, Homo sapien
aacccgcaaacacagcagagtgagc

SEQ ID NO: 4570405 - DNA, 25 bp, Homo sapien
cttcatttcagcaacgtcctcagtg

SEQ ID NO: 4570406 - DNA, 25 bp, Homo sapien
aagtgggttcccaaccacagatgga

SEQ ID NO: 4570407 - DNA, 25 bp, Homo sapien
gtgacgatgcttatcatcaccccaa

SEQ ID NO: 4570408 - DNA, 25 bp, Homo sapien
atcaccccaaagctcaagaaagtgg

SEQ ID NO: 4570409 - DNA, 25 bp, Homo sapien
tcaagcctcagtcgcaggctgggct

SEQ ID NO: 4570410 - DNA, 25 bp, Homo sapien
tcttaccaggatggatcagcacccc

SEQ ID NO: 4570411 - DNA, 25 bp, Homo sapien
tttgacagccaccacagtacatctt

SEQ ID NO: 4570412 - DNA, 25 bp, Homo sapien
aacaggtccatgtgtgcattccacc

SEQ ID NO: 4570413 - DNA, 25 bp, Homo sapien
ctggactacaacttcctgtttggag

SEQ ID NO: 4570414 - DNA, 25 bp, Homo sapien
aacttccctggactacaacttcctg

SEQ ID NO: 4570415 - DNA, 25 bp, Homo sapien
tcaggtatcagaccactgagcaacc

SEQ ID NO: 4570416 - DNA, 25 bp, Homo sapien
tctcaggtatcagaccactgagcaa

SEQ ID NO: 4570417 - DNA, 25 bp, Homo sapien
gggctcccagcgcaactgcaggcat

SEQ ID NO: 4570418 - DNA, 25 bp, Homo sapien
gcaactgcaggcatcctctagtggg

SEQ ID NO: 4570419 - DNA, 25 bp, Homo sapien
aaccctagcagatggtggtgacccc

SEQ ID NO: 4570420 - DNA, 25 bp, Homo sapien
gggcctctggtaaccctagcagatg

SEQ ID NO: 4570421 - DNA, 25 bp, Homo sapien
catagggtttttggagctaagcaca

SEQ ID NO: 4570422 - DNA, 25 bp, Homo sapien
tataaagcaacatgggatcgctgtc

SEQ ID NO: 4570423 - DNA, 25 bp, Homo sapien
ttggaacgcctagatcccgaggtct

SEQ ID NO: 4570424 - DNA, 25 bp, Homo sapien
tgggctccgggtcaagtgctattcc

SEQ ID NO: 4570425 - DNA, 25 bp, Homo sapien
tggcgtcgggctggcccccaggcac

SEQ ID NO: 4570426 - DNA, 25 bp, Homo sapien
ggtggcttttatcttccccctctgc

SEQ ID NO: 4570427 - DNA, 25 bp, Homo sapien
tgcttgtcatacagggagaagcatt

SEQ ID NO: 4570428 - DNA, 25 bp, Homo sapien
cggtggcttttatcttccccctctg

SEQ ID NO: 4570429 - DNA, 25 bp, Homo sapien
tcatacagggagaagcattccttgt

SEQ ID NO: 4570430 - DNA, 25 bp, Homo sapien
cacacggcccagagggagggtcagc

SEQ ID NO: 4570431 - DNA, 25 bp, Homo sapien
ggcccagagggagggtcagcagcgt

SEQ ID NO: 4570432 - DNA, 25 bp, Homo sapien
cggcccagagggagggtcagcagcg

SEQ ID NO: 4570433 - DNA, 25 bp, Homo sapien
ctgcacacggcccagagggagggtc

SEQ ID NO: 4570434 - DNA, 25 bp, Homo sapien
gaaattctcccagggtctgaagccc

SEQ ID NO: 4570435 - DNA, 25 bp, Homo sapien
cctcccaagggtgctagatacagca

SEQ ID NO: 4570436 - DNA, 25 bp, Homo sapien
catattcccatgtgcggacaggaca

SEQ ID NO: 4570437 - DNA, 25 bp, Homo sapien
ttagaggcctggacaataatagccc

SEQ ID NO: 4570438 - DNA, 25 bp, Homo sapien
cactgccttcggttccagggcagac

SEQ ID NO: 4570439 - DNA, 25 bp, Homo sapien
aggccacactgccttcggttccagg

SEQ ID NO: 4570440 - DNA, 25 bp, Homo sapien
tgccttcggttccagggcagacacc

SEQ ID NO: 4570441 - DNA, 25 bp, Homo sapien
cacactgccttcggttccagggcag

SEQ ID NO: 4570442 - DNA, 25 bp, Homo sapien
tcaggcctccctggtaggatttcag

SEQ ID NO: 4570443 - DNA, 25 bp, Homo sapien
ttcgcggcctttgtggagagactga

SEQ ID NO: 4570444 - DNA, 25 bp, Homo sapien
ccatttagagacaaattcgcggcct

SEQ ID NO: 4570445 - DNA, 25 bp, Homo sapien
gcagatcgccatgtaccatttagag

SEQ ID NO: 4570446 - DNA, 25 bp, Homo sapien
ctatggctcttgctagctgtagtga

SEQ ID NO: 4570447 - DNA, 25 bp, Homo sapien
ttaataatggctggctttaacatcc

SEQ ID NO: 4570448 - DNA, 25 bp, Homo sapien
taatggctggctttaacatcctgct

SEQ ID NO: 4570449 - DNA, 25 bp, Homo sapien
cactgtttgatcctacattatttaa

SEQ ID NO: 4570450 - DNA, 25 bp, Homo sapien
tatcaccgttagacctggacaagag

SEQ ID NO: 4570451 - DNA, 25 bp, Homo sapien
cgatgtttcagcaaagacctggagg

SEQ ID NO: 4570452 - DNA, 25 bp, Homo sapien
tctccagtggtcagcgaaggactca

SEQ ID NO: 4570453 - DNA, 25 bp, Homo sapien
ccagggttctacgtggaggtgccca

SEQ ID NO: 4570454 - DNA, 25 bp, Homo sapien
caggggggctgcagccatgaggctc

SEQ ID NO: 4570455 - DNA, 25 bp, Homo sapien
caagttctttgtaacgcaactcttt

SEQ ID NO: 4570456 - DNA, 25 bp, Homo sapien
gtaacgcaactctttgctcttggcc

SEQ ID NO: 4570457 - DNA, 25 bp, Homo sapien
tctttgtaacgcaactctttgctct

SEQ ID NO: 4570458 - DNA, 25 bp, Homo sapien
acctgaggttcacgcccccagccct

SEQ ID NO: 4570459 - DNA, 25 bp, Homo sapien
ccacctgaggttcacgcccccagcc

SEQ ID NO: 4570460 - DNA, 25 bp, Homo sapien
gccaggccgacacagaccctcacac

SEQ ID NO: 4570461 - DNA, 25 bp, Homo sapien
ctggccaggccgacacagaccctca

SEQ ID NO: 4570462 - DNA, 25 bp, Homo sapien
gctgctacccgtgggcttgctgctc

SEQ ID NO: 4570463 - DNA, 25 bp, Homo sapien
cgggtaataaatgctcggctgccat

SEQ ID NO: 4570464 - DNA, 25 bp, Homo sapien
gtggaggcccgggtaataaatgctc

SEQ ID NO: 4570465 - DNA, 25 bp, Homo sapien
attctggggcctcggctgctacccg

SEQ ID NO: 4570466 - DNA, 25 bp, Homo sapien
tgggcccgacgccaccagggtcaga

SEQ ID NO: 4570467 - DNA, 25 bp, Homo sapien
ggcccgacgccaccagggtcagatt

SEQ ID NO: 4570468 - DNA, 25 bp, Homo sapien
tcctgagcacagctcatgacccgcc

SEQ ID NO: 4570469 - DNA, 25 bp, Homo sapien
gagactgggcccgacgccaccaggg

SEQ ID NO: 4570470 - DNA, 25 bp, Homo sapien
tgaccgcctctgtgtggaaagtgtg

SEQ ID NO: 4570471 - DNA, 25 bp, Homo sapien
catcaggcccctactagagttggac

SEQ ID NO: 4570472 - DNA, 25 bp, Homo sapien
tattgcagggatacaagcttcggtg

SEQ ID NO: 4570473 - DNA, 25 bp, Homo sapien
caagacggcctaactcagagatggg

SEQ ID NO: 4570474 - DNA, 25 bp, Homo sapien
gatgtccgggaagaacagactagcc

SEQ ID NO: 4570475 - DNA, 25 bp, Homo sapien
tctcctgcacggctaccagaagatg

SEQ ID NO: 4570476 - DNA, 25 bp, Homo sapien
caggcccatctagtgcaaatgaggc

SEQ ID NO: 4570477 - DNA, 25 bp, Homo sapien
caaagcctgtggctaggctgcccga

SEQ ID NO: 4570478 - DNA, 25 bp, Homo sapien
gagcgccacaagcaagagggtcagt

SEQ ID NO: 4570479 - DNA, 25 bp, Homo sapien
gggctcagggacgtagatgacaccc

SEQ ID NO: 4570480 - DNA, 25 bp, Homo sapien
gatgacacccgggtacttcttcctg

SEQ ID NO: 4570481 - DNA, 25 bp, Homo sapien
tcttcctgagaacagggtcattcca

SEQ ID NO: 4570482 - DNA, 25 bp, Homo sapien
taaagcagccgctgaagtacatgaa

SEQ ID NO: 4570483 - DNA, 25 bp, Homo sapien
gtaaagcagccgctgaagtacatga

SEQ ID NO: 4570484 - DNA, 25 bp, Homo sapien
gcagtgacccaggtactcatcataa

SEQ ID NO: 4570485 - DNA, 25 bp, Homo sapien
cccaggtactcatcataatagtaga

SEQ ID NO: 4570486 - DNA, 25 bp, Homo sapien
cataatagtagagcagctcaaagga

SEQ ID NO: 4570487 - DNA, 25 bp, Homo sapien
tcatcataatagtagagcagctcaa

SEQ ID NO: 4570488 - DNA, 25 bp, Homo sapien
ggcagggagcaggaggtggcctcac

SEQ ID NO: 4570489 - DNA, 25 bp, Homo sapien
aggcagggagcaggaggtggcctca

SEQ ID NO: 4570490 - DNA, 25 bp, Homo sapien
gacagagtcacccaccaggtggatg

SEQ ID NO: 4570491 - DNA, 25 bp, Homo sapien
gatgatggggttctcacggacagac

SEQ ID NO: 4570492 - DNA, 25 bp, Homo sapien
gacagacaggtggtgctggtagcca

SEQ ID NO: 4570493 - DNA, 25 bp, Homo sapien
ctcacgtacgtgatggagcgtggca

SEQ ID NO: 4570494 - DNA, 25 bp, Homo sapien
tcacacatgagctgtaggctggagg

SEQ ID NO: 4570495 - DNA, 25 bp, Homo sapien
cccgctgactttacccagggagcaa

SEQ ID NO: 4570496 - DNA, 25 bp, Homo sapien
ctatgaaccccggagggaatgtgga

SEQ ID NO: 4570497 - DNA, 25 bp, Homo sapien
agcaaaaagaccagagggcccaact

SEQ ID NO: 4570498 - DNA, 25 bp, Homo sapien
tacttatagtatcatgccagtgctt

SEQ ID NO: 4570499 - DNA, 25 bp, Homo sapien
cctggccgagttttctacttatagt

SEQ ID NO: 4570500 - DNA, 25 bp, Homo sapien
agtcaggacacagggcttagcatca

SEQ ID NO: 4570501 - DNA, 25 bp, Homo sapien
aaggccttacttggcaaagtgcaaa

SEQ ID NO: 4570502 - DNA, 25 bp, Homo sapien
aaagggcgtgatgacgttgtaggcc

SEQ ID NO: 4570503 - DNA, 25 bp, Homo sapien
acactgggcttgttgagtggaaacc

SEQ ID NO: 4570504 - DNA, 25 bp, Homo sapien
gtaggccatgtggaagtagtcccca

SEQ ID NO: 4570505 - DNA, 25 bp, Homo sapien
gaaaccactcgagagggaataccag

SEQ ID NO: 4570506 - DNA, 25 bp, Homo sapien
caaaatcccattatggttagaaggg

SEQ ID NO: 4570507 - DNA, 25 bp, Homo sapien
caggcaccaagcaccattaattttt

SEQ ID NO: 4570508 - DNA, 25 bp, Homo sapien
gggtgttcccgaaactgtcagcagt

SEQ ID NO: 4570509 - DNA, 25 bp, Homo sapien
tcaaatgtctacgttccaccaagtc

SEQ ID NO: 4570510 - DNA, 25 bp, Homo sapien
cttgtctgtggaggccaccactgga

SEQ ID NO: 4570511 - DNA, 25 bp, Homo sapien
cacttaattttcttcacgttcgtct

SEQ ID NO: 4570512 - DNA, 25 bp, Homo sapien
aaagcatgaagtagccttggaaggc

SEQ ID NO: 4570513 - DNA, 25 bp, Homo sapien
caaataatgacttgatacctggtga

SEQ ID NO: 4570514 - DNA, 25 bp, Homo sapien
aggtggaagggagccgtgcgggcag

SEQ ID NO: 4570515 - DNA, 25 bp, Homo sapien
tagaaccagaggtcgaggtggaagg

SEQ ID NO: 4570516 - DNA, 25 bp, Homo sapien
catggcaatgggacgcccaaagtcc

SEQ ID NO: 4570517 - DNA, 25 bp, Homo sapien
ggcagcctcatcagcgctcacagag

SEQ ID NO: 4570518 - DNA, 25 bp, Homo sapien
ttctaagtgaaaacggacacagtcc

SEQ ID NO: 4570519 - DNA, 25 bp, Homo sapien
tatggccagtacattgtttctaagt

SEQ ID NO: 4570520 - DNA, 25 bp, Homo sapien
gacaggtgagctacagtatgcggtc

SEQ ID NO: 4570521 - DNA, 25 bp, Homo sapien
gcatgtccgcagcagcagaaacgag

SEQ ID NO: 4570522 - DNA, 25 bp, Homo sapien
ggccgcccgtcgctcccaggtgctg

SEQ ID NO: 4570523 - DNA, 25 bp, Homo sapien
ctgggccgcccgtcgctcccaggtg

SEQ ID NO: 4570524 - DNA, 25 bp, Homo sapien
aaggaggcgcccagctgcgcgcctg

SEQ ID NO: 4570525 - DNA, 25 bp, Homo sapien
aggaaggaggcgcccagctgcgcgc

SEQ ID NO: 4570526 - DNA, 25 bp, Homo sapien
tttccgaggaagagaccggttcagc

SEQ ID NO: 4570527 - DNA, 25 bp, Homo sapien
aggccgccgcaaattcccagcgcgg

SEQ ID NO: 4570528 - DNA, 25 bp, Homo sapien
tcggccctgcctttccgaggaagag

SEQ ID NO: 4570529 - DNA, 25 bp, Homo sapien
aagagaccggttcagctcggctgcc

SEQ ID NO: 4570530 - DNA, 25 bp, Homo sapien
cattttccgcccaggcaaggtcctg

SEQ ID NO: 4570531 - DNA, 25 bp, Homo sapien
ctgtatctagggactgagcgcgact

SEQ ID NO: 4570532 - DNA, 25 bp, Homo sapien
gactgacgcagaggtcgcaataccg

SEQ ID NO: 4570533 - DNA, 25 bp, Homo sapien
ccagtggcttgaaggctcggctcaa

SEQ ID NO: 4570534 - DNA, 25 bp, Homo sapien
cccggctgcatctatcttgtggctc

SEQ ID NO: 4570535 - DNA, 25 bp, Homo sapien
gagaacccggctgcatctatcttgt

SEQ ID NO: 4570536 - DNA, 25 bp, Homo sapien
aaaatgggtattcctcattggtgtg

SEQ ID NO: 4570537 - DNA, 25 bp, Homo sapien
aatgggtattcctcattggtgtgtg

SEQ ID NO: 4570538 - DNA, 25 bp, Homo sapien
gataatgaatacctaagttgccctc

SEQ ID NO: 4570539 - DNA, 25 bp, Homo sapien
tgtgcctaactgcaatgaagactgg

SEQ ID NO: 4570540 - DNA, 25 bp, Homo sapien
tcttcccagagtgagcatccatcgt

SEQ ID NO: 4570541 - DNA, 25 bp, Homo sapien
tagacctcagtcaaatggttgtgcc

SEQ ID NO: 4570542 - DNA, 25 bp, Homo sapien
gccattatgaattgctgtagcagaa

SEQ ID NO: 4570543 - DNA, 25 bp, Homo sapien
aagtccaacaatcagggcatggcca

SEQ ID NO: 4570544 - DNA, 25 bp, Homo sapien
gcatggccaccgaaattataacaca

SEQ ID NO: 4570545 - DNA, 25 bp, Homo sapien
gaactctttgtgtggtatggctcca

SEQ ID NO: 4570546 - DNA, 25 bp, Homo sapien
caaattctgctcataggccactata

SEQ ID NO: 4570547 - DNA, 25 bp, Homo sapien
ggaaaaagaatgctccatggaaggc

SEQ ID NO: 4570548 - DNA, 25 bp, Homo sapien
gcatggcaaattctgctcataggcc

SEQ ID NO: 4570549 - DNA, 25 bp, Homo sapien
gctgcaggctggattgacctgactt

SEQ ID NO: 4570550 - DNA, 25 bp, Homo sapien
cggaaagcgcaggaggaggcagtgt

SEQ ID NO: 4570551 - DNA, 25 bp, Homo sapien
gcacttctgagctcggcggacgaga

SEQ ID NO: 4570552 - DNA, 25 bp, Homo sapien
tttcctccagtcagggacggcgaag

SEQ ID NO: 4570553 - DNA, 25 bp, Homo sapien
tcggcggacgagagcctgcaggttt

SEQ ID NO: 4570554 - DNA, 25 bp, Homo sapien
gccggcgacccgtagctcgggcacg

SEQ ID NO: 4570555 - DNA, 25 bp, Homo sapien
cggccggcgacccgtagctcgggca

SEQ ID NO: 4570556 - DNA, 25 bp, Homo sapien
ggcgacccgtagctcgggcacgcgc

SEQ ID NO: 4570557 - DNA, 25 bp, Homo sapien
ccggcgacccgtagctcgggcacgc

SEQ ID NO: 4570558 - DNA, 25 bp, Homo sapien
cagtagaagtgataaagggtattgt

SEQ ID NO: 4570559 - DNA, 25 bp, Homo sapien
ccactgttactgagagggcttttgt

SEQ ID NO: 4570560 - DNA, 25 bp, Homo sapien
gtaggacatttccagtaccttcaag

SEQ ID NO: 4570561 - DNA, 25 bp, Homo sapien
agcctcttctctgtaggtagccact

SEQ ID NO: 4570562 - DNA, 25 bp, Homo sapien
gcctaacgcctcttgtgtgtggtcc

SEQ ID NO: 4570563 - DNA, 25 bp, Homo sapien
caaactatagcaccaggagcattat

SEQ ID NO: 4570564 - DNA, 25 bp, Homo sapien
gctattcacgtttggcaacacctga

SEQ ID NO: 4570565 - DNA, 25 bp, Homo sapien
gcttctagcacagtagactgtctcc

SEQ ID NO: 4570566 - DNA, 25 bp, Homo sapien
gatcctcctggtatgaatcaaggaa

SEQ ID NO: 4570567 - DNA, 25 bp, Homo sapien
taaaatagagataccccacaaaatg

SEQ ID NO: 4570568 - DNA, 25 bp, Homo sapien
aactacaaggcctgcttattggaca

SEQ ID NO: 4570569 - DNA, 25 bp, Homo sapien
ggaaatactgtaccttgctcttagc

SEQ ID NO: 4570570 - DNA, 25 bp, Homo sapien
ttgaaataagtgatctacatgcctg

SEQ ID NO: 4570571 - DNA, 25 bp, Homo sapien
taaatctggatgagctagggaggcc

SEQ ID NO: 4570572 - DNA, 25 bp, Homo sapien
gatagttctatatctcagccctctg

SEQ ID NO: 4570573 - DNA, 25 bp, Homo sapien
gaaaatatgtttagccagacccttc

SEQ ID NO: 4570574 - DNA, 25 bp, Homo sapien
aacttgctgactgcaccagaggtcc

SEQ ID NO: 4570575 - DNA, 25 bp, Homo sapien
gagtaaaatctgactggcctaatcg

SEQ ID NO: 4570576 - DNA, 25 bp, Homo sapien
tccgtgcagaggaactacactgttg

SEQ ID NO: 4570577 - DNA, 25 bp, Homo sapien
gcctaatcgatggaaaagaccctgt

SEQ ID NO: 4570578 - DNA, 25 bp, Homo sapien
tagtactggaacttggtttagtgac

SEQ ID NO: 4570579 - DNA, 25 bp, Homo sapien
tgctgcagtcaacatccttaagtac

SEQ ID NO: 4570580 - DNA, 25 bp, Homo sapien
ggacaaattcattcctagtactgga

SEQ ID NO: 4570581 - DNA, 25 bp, Homo sapien
tctacctttgcaacgctattctgta

SEQ ID NO: 4570582 - DNA, 25 bp, Homo sapien
tggatgtcccagatacactaatcgt

SEQ ID NO: 4570583 - DNA, 25 bp, Homo sapien
tgtggccattccagcctctatagag

SEQ ID NO: 4570584 - DNA, 25 bp, Homo sapien
tgtcgtaactgagagtaggctctgg

SEQ ID NO: 4570585 - DNA, 25 bp, Homo sapien
tagttcaggacacaagcccagaaag

SEQ ID NO: 4570586 - DNA, 25 bp, Homo sapien
taagtccctcaaggatagtgcccat

SEQ ID NO: 4570587 - DNA, 25 bp, Homo sapien
tcatgctaaatcagcaaggctccgt

SEQ ID NO: 4570588 - DNA, 25 bp, Homo sapien
tcttttttaatgcagggccagggag

SEQ ID NO: 4570589 - DNA, 25 bp, Homo sapien
gaaaagttttagtgtccaggtgcaa

SEQ ID NO: 4570590 - DNA, 25 bp, Homo sapien
ctaatagaatagacagtgacacaaa

SEQ ID NO: 4570591 - DNA, 25 bp, Homo sapien
agatagtccccagcacagttgaagg

SEQ ID NO: 4570592 - DNA, 25 bp, Homo sapien
tcccgtggttcaaaggtgcagccag

SEQ ID NO: 4570593 - DNA, 25 bp, Homo sapien
taagccagcggtctccattagaggc

SEQ ID NO: 4570594 - DNA, 25 bp, Homo sapien
cactctttgagaagcgcagcgctgc

SEQ ID NO: 4570595 - DNA, 25 bp, Homo sapien
gctgggctcgaataacagaatctgg

SEQ ID NO: 4570596 - DNA, 25 bp, Homo sapien
tgctgtgggagcctagggctcttcc

SEQ ID NO: 4570597 - DNA, 25 bp, Homo sapien
aaggcaatgggttttgatactcaaa

SEQ ID NO: 4570598 - DNA, 25 bp, Homo sapien
acatcaagcccttctaaggctgggc

SEQ ID NO: 4570599 - DNA, 25 bp, Homo sapien
agtaaaggtcgtactatgcacaggg

SEQ ID NO: 4570600 - DNA, 25 bp, Homo sapien
gatatttgccaccaaggctgcacag

SEQ ID NO: 4570601 - DNA, 25 bp, Homo sapien
tgcatttctacctcaaaacaagact

SEQ ID NO: 4570602 - DNA, 25 bp, Homo sapien
gactaaggcataaattactccactg

SEQ ID NO: 4570603 - DNA, 25 bp, Homo sapien
ttccctgtgcactggcgggcatgag

SEQ ID NO: 4570604 - DNA, 25 bp, Homo sapien
tgctttattcagtgcattccagagg

SEQ ID NO: 4570605 - DNA, 25 bp, Homo sapien
agaggggacccctcaacagcgctgg

SEQ ID NO: 4570606 - DNA, 25 bp, Homo sapien
ccttgcacgtgctttattcagtgca

SEQ ID NO: 4570607 - DNA, 25 bp, Homo sapien
aagaagacgtgggaatgcacagccc

SEQ ID NO: 4570608 - DNA, 25 bp, Homo sapien
ccaggccggtgcgtccatgtctagg

SEQ ID NO: 4570609 - DNA, 25 bp, Homo sapien
catgtctaggggcaggctgcagcaa

SEQ ID NO: 4570610 - DNA, 25 bp, Homo sapien
tgcacagccccagggattgtgtcat

SEQ ID NO: 4570611 - DNA, 25 bp, Homo sapien
ggatccttctggaactagaggcctg

SEQ ID NO: 4570612 - DNA, 25 bp, Homo sapien
tcttgggttcattcttcgggagccc

SEQ ID NO: 4570613 - DNA, 25 bp, Homo sapien
gagttgcggtcaatgtgaatgcacg

SEQ ID NO: 4570614 - DNA, 25 bp, Homo sapien
gcagattgggttcgtatttacagtc

SEQ ID NO: 4570615 - DNA, 25 bp, Homo sapien
ggaggatggggatgattacgaattc

SEQ ID NO: 4570616 - DNA, 25 bp, Homo sapien
ctagcaccttagtagctggggcagc

SEQ ID NO: 4570617 - DNA, 25 bp, Homo sapien
tccacagagcctgagggaggccttg

SEQ ID NO: 4570618 - DNA, 25 bp, Homo sapien
gccctccacagagcctgagggaggc

SEQ ID NO: 4570619 - DNA, 25 bp, Homo sapien
gtagctggggcagcaaatgccctcc

SEQ ID NO: 4570620 - DNA, 25 bp, Homo sapien
cagtctcccagtagggcagttccac

SEQ ID NO: 4570621 - DNA, 25 bp, Homo sapien
gcaggcgccattgctcgggagatga

SEQ ID NO: 4570622 - DNA, 25 bp, Homo sapien
ggtctgtgttaaaggtgtcccagtc

SEQ ID NO: 4570623 - DNA, 25 bp, Homo sapien
gggagatgaggtcaagtgcaaagcc

SEQ ID NO: 4570624 - DNA, 25 bp, Homo sapien
cctcctgcgcctggcacttctaaag

SEQ ID NO: 4570625 - DNA, 25 bp, Homo sapien
taaccagtgtgtctgctatggcgag

SEQ ID NO: 4570626 - DNA, 25 bp, Homo sapien
gagaacgtggcagcggccacgaagt

SEQ ID NO: 4570627 - DNA, 25 bp, Homo sapien
acaggttagagccatagtctgagtg

SEQ ID NO: 4570628 - DNA, 25 bp, Homo sapien
gagtgccgtctgttggccctaacca

SEQ ID NO: 4570629 - DNA, 25 bp, Homo sapien
tgctgcctacaatgatccagatggg

SEQ ID NO: 4570630 - DNA, 25 bp, Homo sapien
cttgcttggagatctcaaacacgat

SEQ ID NO: 4570631 - DNA, 25 bp, Homo sapien
cagggtgctgcctacaatgatccag

SEQ ID NO: 4570632 - DNA, 25 bp, Homo sapien
agtcctcttgcttggagatctcaaa

SEQ ID NO: 4570633 - DNA, 25 bp, Homo sapien
ctgggatcctcctcacggaagatga

SEQ ID NO: 4570634 - DNA, 25 bp, Homo sapien
gggatcctcctcacggaagatgaag

SEQ ID NO: 4570635 - DNA, 25 bp, Homo sapien
gatcctcctcacggaagatgaaggg

SEQ ID NO: 4570636 - DNA, 25 bp, Homo sapien
tcctcctcacggaagatgaaggggc

SEQ ID NO: 4570637 - DNA, 25 bp, Homo sapien
tgcaaggctgcgttgaccatgattt

SEQ ID NO: 4570638 - DNA, 25 bp, Homo sapien
caaggctgcgttgaccatgattttc

SEQ ID NO: 4570639 - DNA, 25 bp, Homo sapien
ggctgcgttgaccatgattttcatg

SEQ ID NO: 4570640 - DNA, 25 bp, Homo sapien
ctgcaaggctgcgttgaccatgatt

SEQ ID NO: 4570641 - DNA, 25 bp, Homo sapien
ggttccccagtagatggaaattgat

SEQ ID NO: 4570642 - DNA, 25 bp, Homo sapien
gggaccagccgtatattgcagttga

SEQ ID NO: 4570643 - DNA, 25 bp, Homo sapien
aattgatttcctggttggggaccag

SEQ ID NO: 4570644 - DNA, 25 bp, Homo sapien
cagttgatggagacgacatcagagt

SEQ ID NO: 4570645 - DNA, 25 bp, Homo sapien
tgtggagcacgacgcaagtcttcct

SEQ ID NO: 4570646 - DNA, 25 bp, Homo sapien
gctgtggagcacgacgcaagtcttc

SEQ ID NO: 4570647 - DNA, 25 bp, Homo sapien
cagctgtggagcacgacgcaagtct

SEQ ID NO: 4570648 - DNA, 25 bp, Homo sapien
tggggtgggccggtactcagtgcta

SEQ ID NO: 4570649 - DNA, 25 bp, Homo sapien
tcagtaggcggttgccgctcctggt

SEQ ID NO: 4570650 - DNA, 25 bp, Homo sapien
ttcagtaggcggttgccgctcctgg

SEQ ID NO: 4570651 - DNA, 25 bp, Homo sapien
ccgtggatggggaacaagcccaagt

SEQ ID NO: 4570652 - DNA, 25 bp, Homo sapien
cttcatcatcatcccgtggatgggg

SEQ ID NO: 4570653 - DNA, 25 bp, Homo sapien
gataccatcgtatctctccagcgag

SEQ ID NO: 4570654 - DNA, 25 bp, Homo sapien
tgacctcgtagtggctcaggctgct

SEQ ID NO: 4570655 - DNA, 25 bp, Homo sapien
cgagctgttgggcttgacctcgtag

SEQ ID NO: 4570656 - DNA, 25 bp, Homo sapien
tgcagctgaagggaggcccgatacc

SEQ ID NO: 4570657 - DNA, 25 bp, Homo sapien
ggtgaagaggacgtcagcctcgtat

SEQ ID NO: 4570658 - DNA, 25 bp, Homo sapien
ggccacgttgtcttccttggtgctg

SEQ ID NO: 4570659 - DNA, 25 bp, Homo sapien
cgtcagcctcgtatttgaggtggaa

SEQ ID NO: 4570660 - DNA, 25 bp, Homo sapien
ctcgtatttgaggtggaagcgtaag

SEQ ID NO: 4570661 - DNA, 25 bp, Homo sapien
cgatctccaggtggtgtaggaagat

SEQ ID NO: 4570662 - DNA, 25 bp, Homo sapien
gctcgatctccaggtggtgtaggaa

SEQ ID NO: 4570663 - DNA, 25 bp, Homo sapien
tccaggtggtgtaggaagatggatt

SEQ ID NO: 4570664 - DNA, 25 bp, Homo sapien
ctccaggtggtgtaggaagatggat

SEQ ID NO: 4570665 - DNA, 25 bp, Homo sapien
tcccagtgcccaccctgaccctccc

SEQ ID NO: 4570666 - DNA, 25 bp, Homo sapien
cagtgcccaccctgaccctccccca

SEQ ID NO: 4570667 - DNA, 25 bp, Homo sapien
ctgtgcctcccagtgcccaccctga

SEQ ID NO: 4570668 - DNA, 25 bp, Homo sapien
gcctcccagtgcccaccctgaccct

SEQ ID NO: 4570669 - DNA, 25 bp, Homo sapien
cactcaatgctaccgtctgagtcct

SEQ ID NO: 4570670 - DNA, 25 bp, Homo sapien
tggcccggaagaagggatagctgac

SEQ ID NO: 4570671 - DNA, 25 bp, Homo sapien
cacacactcaatgctaccgtctgag

SEQ ID NO: 4570672 - DNA, 25 bp, Homo sapien
ttggcccggaagaagggatagctga

SEQ ID NO: 4570673 - DNA, 25 bp, Homo sapien
cagccatgagcgtttcctgggttgg

SEQ ID NO: 4570674 - DNA, 25 bp, Homo sapien
atgagcgtttcctgggttggggatg

SEQ ID NO: 4570675 - DNA, 25 bp, Homo sapien
tcacagccatgagcgtttcctgggt

SEQ ID NO: 4570676 - DNA, 25 bp, Homo sapien
tgagcgtttcctgggttggggatgg

SEQ ID NO: 4570677 - DNA, 25 bp, Homo sapien
tctctatgatgaagactgtggtgtc

SEQ ID NO: 4570678 - DNA, 25 bp, Homo sapien
gctgactgcgagatatttaggaccg

SEQ ID NO: 4570679 - DNA, 25 bp, Homo sapien
taggaccgtgctgtaggcgttctcg

SEQ ID NO: 4570680 - DNA, 25 bp, Homo sapien
gacagcgtgtatgcggagcagtcct

SEQ ID NO: 4570681 - DNA, 25 bp, Homo sapien
tattacagaagagactttcctgagg

SEQ ID NO: 4570682 - DNA, 25 bp, Homo sapien
gctccaagtgcaatgtttgatccat

SEQ ID NO: 4570683 - DNA, 25 bp, Homo sapien
tgggctagaacgcaggctccaagtg

SEQ ID NO: 4570684 - DNA, 25 bp, Homo sapien
tttcctgaggttatgcaggagttgg

SEQ ID NO: 4570685 - DNA, 25 bp, Homo sapien
tcatcctcattgcagccgttccaga

SEQ ID NO: 4570686 - DNA, 25 bp, Homo sapien
catccaacacaaggtcagggacaca

SEQ ID NO: 4570687 - DNA, 25 bp, Homo sapien
ccgtgggcaggtcactccgggcatc

SEQ ID NO: 4570688 - DNA, 25 bp, Homo sapien
cattgcagccgttccagaagggcac

SEQ ID NO: 4570689 - DNA, 25 bp, Homo sapien
tgggccagggagagccaggtgtggg

SEQ ID NO: 4570690 - DNA, 25 bp, Homo sapien
ccagggagagccaggtgtgggcagc

SEQ ID NO: 4570691 - DNA, 25 bp, Homo sapien
caggtgtgggcagctgggtagggac

SEQ ID NO: 4570692 - DNA, 25 bp, Homo sapien
gccaggtgtgggcagctgggtaggg

SEQ ID NO: 4570693 - DNA, 25 bp, Homo sapien
cgccctcaatgtacaccagctctgt

SEQ ID NO: 4570694 - DNA, 25 bp, Homo sapien
atagatgcttccctctttaaaacga

SEQ ID NO: 4570695 - DNA, 25 bp, Homo sapien
tttaaaacgatgctcaaagctcagc

SEQ ID NO: 4570696 - DNA, 25 bp, Homo sapien
cacactagacatgggctggctttcc

SEQ ID NO: 4570697 - DNA, 25 bp, Homo sapien
cactcacccagcagagcggttctgg

SEQ ID NO: 4570698 - DNA, 25 bp, Homo sapien
tggtgtatgaacaaatcactagtgt

SEQ ID NO: 4570699 - DNA, 25 bp, Homo sapien
caagggctttggtactggggataca

SEQ ID NO: 4570700 - DNA, 25 bp, Homo sapien
cagagcggttctggtcaacatttat

SEQ ID NO: 4570701 - DNA, 25 bp, Homo sapien
cagagttctgaaggacggtcaaggt

SEQ ID NO: 4570702 - DNA, 25 bp, Homo sapien
tcagggaagccttcgaggaagtgac

SEQ ID NO: 4570703 - DNA, 25 bp, Homo sapien
gaatgtcctgacagacctgcatgct

SEQ ID NO: 4570704 - DNA, 25 bp, Homo sapien
ttgcaactggtaggagtcgccgaat

SEQ ID NO: 4570705 - DNA, 25 bp, Homo sapien
ctccagggaatactcgactgagaag

SEQ ID NO: 4570706 - DNA, 25 bp, Homo sapien
agagtggtgggccagccgtcgtcca

SEQ ID NO: 4570707 - DNA, 25 bp, Homo sapien
gagaaggtcactggcttcacgtagt

SEQ ID NO: 4570708 - DNA, 25 bp, Homo sapien
tactcgactgagaaggtcactggct

SEQ ID NO: 4570709 - DNA, 25 bp, Homo sapien
gtataccgcctctcatccatggtgg

SEQ ID NO: 4570710 - DNA, 25 bp, Homo sapien
gaagttgatccgctcacagagctcc

SEQ ID NO: 4570711 - DNA, 25 bp, Homo sapien
tccatggtggcgttgtatctgatgc

SEQ ID NO: 4570712 - DNA, 25 bp, Homo sapien
tacggctctgttggtgaatcggtcc

SEQ ID NO: 4570713 - DNA, 25 bp, Homo sapien
tctgtggaagatgttgatcttggat

SEQ ID NO: 4570714 - DNA, 25 bp, Homo sapien
actgcgcttgcagtctctgtggaag

SEQ ID NO: 4570715 - DNA, 25 bp, Homo sapien
gctggcattgatctgaaccactggg

SEQ ID NO: 4570716 - DNA, 25 bp, Homo sapien
atggctcaaagtggaggctggcatt

SEQ ID NO: 4570717 - DNA, 25 bp, Homo sapien
agcacggggcgaaaggggctcagcc

SEQ ID NO: 4570718 - DNA, 25 bp, Homo sapien
gtcaaaggactggcaagagcgagca

SEQ ID NO: 4570719 - DNA, 25 bp, Homo sapien
atggagggggcttcggatgtcaaag

SEQ ID NO: 4570720 - DNA, 25 bp, Homo sapien
caaaggactggcaagagcgagcacg

SEQ ID NO: 4570721 - DNA, 25 bp, Homo sapien
tcaggagagcccaggaggtgggaac

SEQ ID NO: 4570722 - DNA, 25 bp, Homo sapien
agagcccaggaggtgggaacagcgg

SEQ ID NO: 4570723 - DNA, 25 bp, Homo sapien
agcccaggaggtgggaacagcgggg

SEQ ID NO: 4570724 - DNA, 25 bp, Homo sapien
aggagagcccaggaggtgggaacag

SEQ ID NO: 4570725 - DNA, 25 bp, Homo sapien
cacagaatcacagcgttgccaaggg

SEQ ID NO: 4570726 - DNA, 25 bp, Homo sapien
actgccaggtcgatgagcccatcct

SEQ ID NO: 4570727 - DNA, 25 bp, Homo sapien
gatgctgcagccaaaatactggagg

SEQ ID NO: 4570728 - DNA, 25 bp, Homo sapien
tcctcattgaggtccaattgcccgt

SEQ ID NO: 4570729 - DNA, 25 bp, Homo sapien
ggttgaggtctcgaactgaggcaat

SEQ ID NO: 4570730 - DNA, 25 bp, Homo sapien
tagatggctcctgcgtggttgtcct

SEQ ID NO: 4570731 - DNA, 25 bp, Homo sapien
tgaggcaatggaggacccaaatcgg

SEQ ID NO: 4570732 - DNA, 25 bp, Homo sapien
tgctgcctcggaagccgtggaagat

SEQ ID NO: 4570733 - DNA, 25 bp, Homo sapien
gaagctgcccagcccctgcccagct

SEQ ID NO: 4570734 - DNA, 25 bp, Homo sapien
ctgagaagctgcccagcccctgccc

SEQ ID NO: 4570735 - DNA, 25 bp, Homo sapien
agctgcccagcccctgcccagctgt

SEQ ID NO: 4570736 - DNA, 25 bp, Homo sapien
ctgcccagcccctgcccagctgtac

SEQ ID NO: 4570737 - DNA, 25 bp, Homo sapien
aggacatcagtcacgccgtcgccgt

SEQ ID NO: 4570738 - DNA, 25 bp, Homo sapien
aagtacatgggtgcgcccaccagca

SEQ ID NO: 4570739 - DNA, 25 bp, Homo sapien
acggccctcgttgaagtacatgggt

SEQ ID NO: 4570740 - DNA, 25 bp, Homo sapien
tctcagctcatagacgtacaccttg

SEQ ID NO: 4570741 - DNA, 25 bp, Homo sapien
taaactctctagcaggaccgtgctg

SEQ ID NO: 4570742 - DNA, 25 bp, Homo sapien
caagtgctacgtggtgggtgccaat

SEQ ID NO: 4570743 - DNA, 25 bp, Homo sapien
taggtgaggcgccttctaaagggcc

SEQ ID NO: 4570744 - DNA, 25 bp, Homo sapien
cccgggtcctgccaaactgagttat

SEQ ID NO: 4570745 - DNA, 25 bp, Homo sapien
taggtggatgcgcactcctgccact

SEQ ID NO: 4570746 - DNA, 25 bp, Homo sapien
tctgtaggtggatgcgcactcctgc

SEQ ID NO: 4570747 - DNA, 25 bp, Homo sapien
ggccttctgtaggtggatgcgcact

SEQ ID NO: 4570748 - DNA, 25 bp, Homo sapien
ctggttgccaaccacctccctgtgg

SEQ ID NO: 4570749 - DNA, 25 bp, Homo sapien
catggtgaacaggatgaccttgccc

SEQ ID NO: 4570750 - DNA, 25 bp, Homo sapien
tgttgtgcatggtgaacaggatgac

SEQ ID NO: 4570751 - DNA, 25 bp, Homo sapien
tgaccttgcccgtgtggttgaaccg

SEQ ID NO: 4570752 - DNA, 25 bp, Homo sapien
tgaacaggatgaccttgcccgtgtg

SEQ ID NO: 4570753 - DNA, 25 bp, Homo sapien
gacacgaccgatgtgactgtgtacc

SEQ ID NO: 4570754 - DNA, 25 bp, Homo sapien
gaggacacgaccgatgtgactgtgt

SEQ ID NO: 4570755 - DNA, 25 bp, Homo sapien
tggaggacacgaccgatgtgactgt

SEQ ID NO: 4570756 - DNA, 25 bp, Homo sapien
ctggaggacacgaccgatgtgactg

SEQ ID NO: 4570757 - DNA, 25 bp, Homo sapien
tttggtttcctcacttccagcacag

SEQ ID NO: 4570758 - DNA, 25 bp, Homo sapien
cttgctgtttaatgcctcgaggcac

SEQ ID NO: 4570759 - DNA, 25 bp, Homo sapien
gatgtgatctgccttgctgtttaat

SEQ ID NO: 4570760 - DNA, 25 bp, Homo sapien
gtttaatgcctcgaggcacctgcac

SEQ ID NO: 4570761 - DNA, 25 bp, Homo sapien
gactcgcggagaggaatgaccttcc

SEQ ID NO: 4570762 - DNA, 25 bp, Homo sapien
agctccattccagtcataggcaccg

SEQ ID NO: 4570763 - DNA, 25 bp, Homo sapien
aactctttcaggtaggactcgcgga

SEQ ID NO: 4570764 - DNA, 25 bp, Homo sapien
ccggcactcgtctcctttagcacag

SEQ ID NO: 4570765 - DNA, 25 bp, Homo sapien
tctacccaccagttgcaggacaagg

SEQ ID NO: 4570766 - DNA, 25 bp, Homo sapien
gtttctcagggcttggaaggtcttg

SEQ ID NO: 4570767 - DNA, 25 bp, Homo sapien
tggaaggtcttgttctacccaccag

SEQ ID NO: 4570768 - DNA, 25 bp, Homo sapien
agtttccaggttactgaccccatgg

SEQ ID NO: 4570769 - DNA, 25 bp, Homo sapien
ttcagcaatcgacatacctactggg

SEQ ID NO: 4570770 - DNA, 25 bp, Homo sapien
gcaatcgacatacctactgggtaca

SEQ ID NO: 4570771 - DNA, 25 bp, Homo sapien
cagcaatcgacatacctactgggta

SEQ ID NO: 4570772 - DNA, 25 bp, Homo sapien
tgcttcagcaatcgacatacctact

SEQ ID NO: 4570773 - DNA, 25 bp, Homo sapien
tctgtgcttcatggacaggcctttg

SEQ ID NO: 4570774 - DNA, 25 bp, Homo sapien
ctggcttctgtgcttcatggacagg

SEQ ID NO: 4570775 - DNA, 25 bp, Homo sapien
tgtgcttcatggacaggcctttgaa

SEQ ID NO: 4570776 - DNA, 25 bp, Homo sapien
gcttcatggacaggcctttgaagat

SEQ ID NO: 4570777 - DNA, 25 bp, Homo sapien
ccagagggggactagactcgaagac

SEQ ID NO: 4570778 - DNA, 25 bp, Homo sapien
tcgaagactcggtaatcccatgggc

SEQ ID NO: 4570779 - DNA, 25 bp, Homo sapien
gggactagactcgaagactcggtaa

SEQ ID NO: 4570780 - DNA, 25 bp, Homo sapien
tagactcgaagactcggtaatccca

SEQ ID NO: 4570781 - DNA, 25 bp, Homo sapien
cacgttgctttggttaacattagac

SEQ ID NO: 4570782 - DNA, 25 bp, Homo sapien
gatcacgttgctttggttaacatta

SEQ ID NO: 4570783 - DNA, 25 bp, Homo sapien
gttgctttggttaacattagacatg

SEQ ID NO: 4570784 - DNA, 25 bp, Homo sapien
cttgatcacgttgctttggttaaca

SEQ ID NO: 4570785 - DNA, 25 bp, Homo sapien
cacgtatcgatactgacagatgcag

SEQ ID NO: 4570786 - DNA, 25 bp, Homo sapien
tcggtacgttttcccacatgacaat

SEQ ID NO: 4570787 - DNA, 25 bp, Homo sapien
ccacaggagcacgtatcgatactga

SEQ ID NO: 4570788 - DNA, 25 bp, Homo sapien
cagatgcagtcggtacgttttccca

SEQ ID NO: 4570789 - DNA, 25 bp, Homo sapien
ctccaccacgtgcgaggaaaagccc

SEQ ID NO: 4570790 - DNA, 25 bp, Homo sapien
tccaccacgtgcgaggaaaagcccg

SEQ ID NO: 4570791 - DNA, 25 bp, Homo sapien
ccaccacgtgcgaggaaaagcccgt

SEQ ID NO: 4570792 - DNA, 25 bp, Homo sapien
cccaaaggaggtctcgttcttgttg

SEQ ID NO: 4570793 - DNA, 25 bp, Homo sapien
aaggaggtctcgttcttgttggtgc

SEQ ID NO: 4570794 - DNA, 25 bp, Homo sapien
cagcccaaaggaggtctcgttcttg

SEQ ID NO: 4570795 - DNA, 25 bp, Homo sapien
tccagcccaaaggaggtctcgttct

SEQ ID NO: 4570796 - DNA, 25 bp, Homo sapien
ggagagagtggatcccctcttagca

SEQ ID NO: 4570797 - DNA, 25 bp, Homo sapien
ggatcccctcttagcatgcattgct

SEQ ID NO: 4570798 - DNA, 25 bp, Homo sapien
agagtggatcccctcttagcatgca

SEQ ID NO: 4570799 - DNA, 25 bp, Homo sapien
gtggatcccctcttagcatgcattg

SEQ ID NO: 4570800 - DNA, 25 bp, Homo sapien
cttcaaggcagcctcatcagtgaca

SEQ ID NO: 4570801 - DNA, 25 bp, Homo sapien
gtcactggcgatgtatttgatttca

SEQ ID NO: 4570802 - DNA, 25 bp, Homo sapien
cattgaagaagtgcttgtcatcagg

SEQ ID NO: 4570803 - DNA, 25 bp, Homo sapien
aagtttctggattgatccccctgcg

SEQ ID NO: 4570804 - DNA, 25 bp, Homo sapien
tttcccatacaccacacggcctaga

SEQ ID NO: 4570805 - DNA, 25 bp, Homo sapien
catagcacagactttcccatacacc

SEQ ID NO: 4570806 - DNA, 25 bp, Homo sapien
tagcacagactttcccatacaccac

SEQ ID NO: 4570807 - DNA, 25 bp, Homo sapien
actttcccatacaccacacggccta

SEQ ID NO: 4570808 - DNA, 25 bp, Homo sapien
gtctgggctgtcgtgggactcccca

SEQ ID NO: 4570809 - DNA, 25 bp, Homo sapien
tgtctctttcgctttgctggatcac

SEQ ID NO: 4570810 - DNA, 25 bp, Homo sapien
ggccaccgcatatcttgttacgttg

SEQ ID NO: 4570811 - DNA, 25 bp, Homo sapien
tgtgatgacaatcatcaccttcttg

SEQ ID NO: 4570812 - DNA, 25 bp, Homo sapien
tacaaagcatgaaaaactggctccc

SEQ ID NO: 4570813 - DNA, 25 bp, Homo sapien
taaaatgcgtgcgatgaggcctgac

SEQ ID NO: 4570814 - DNA, 25 bp, Homo sapien
tcgaccgtcaattggcagagaggct

SEQ ID NO: 4570815 - DNA, 25 bp, Homo sapien
aaaacaggatgtgccagggtgactc

SEQ ID NO: 4570816 - DNA, 25 bp, Homo sapien
tgggattataaggtaccaggtctgt

SEQ ID NO: 4570817 - DNA, 25 bp, Homo sapien
taggtgtaacacttagacatttaaa

SEQ ID NO: 4570818 - DNA, 25 bp, Homo sapien
cctttgacacagtcatcttatgagt

SEQ ID NO: 4570819 - DNA, 25 bp, Homo sapien
ggcctaaatagctcttactttgtgg

SEQ ID NO: 4570820 - DNA, 25 bp, Homo sapien
acaatagcatctgagatctaaaaaa

SEQ ID NO: 4570821 - DNA, 25 bp, Homo sapien
agcatctgagatctaaaaaaatttt

SEQ ID NO: 4570822 - DNA, 25 bp, Homo sapien
caatagcatctgagatctaaaaaaa

SEQ ID NO: 4570823 - DNA, 25 bp, Homo sapien
atagcatctgagatctaaaaaaatt

SEQ ID NO: 4570824 - DNA, 25 bp, Homo sapien
caccacatcttttacagacctgtag

SEQ ID NO: 4570825 - DNA, 25 bp, Homo sapien
tgaaactcatgcaccacatcttcgc

SEQ ID NO: 4570826 - DNA, 25 bp, Homo sapien
tcaatgccaaatgccgtccgggtct

SEQ ID NO: 4570827 - DNA, 25 bp, Homo sapien
tttacagacctgtagtcgttgaggt

SEQ ID NO: 4570828 - DNA, 25 bp, Homo sapien
ctgccatgggtttgggtggccctgt

SEQ ID NO: 4570829 - DNA, 25 bp, Homo sapien
ccatgggtttgggtggccctgttca

SEQ ID NO: 4570830 - DNA, 25 bp, Homo sapien
tttgggtggccctgttcagaagtgg

SEQ ID NO: 4570831 - DNA, 25 bp, Homo sapien
ggccctgttcagaagtggaaagagc

SEQ ID NO: 4570832 - DNA, 25 bp, Homo sapien
gacgatgtccatgtaggtctggcac

SEQ ID NO: 4570833 - DNA, 25 bp, Homo sapien
gccatccaggacaatgacgatgtcc

SEQ ID NO: 4570834 - DNA, 25 bp, Homo sapien
atgaggaagtgctgaacctccaccc

SEQ ID NO: 4570835 - DNA, 25 bp, Homo sapien
actttttcaggatgttgatgaggaa

SEQ ID NO: 4570836 - DNA, 25 bp, Homo sapien
taggagctcccacactcatgagacc

SEQ ID NO: 4570837 - DNA, 25 bp, Homo sapien
tccctgtggtgtagtaggagctccc

SEQ ID NO: 4570838 - DNA, 25 bp, Homo sapien
gttgactcttgaacacatccctgtg

SEQ ID NO: 4570839 - DNA, 25 bp, Homo sapien
ctgaagttggagttgactcttgaac

SEQ ID NO: 4570840 - DNA, 25 bp, Homo sapien
cttgtgaagaagaaatgtgataagg

SEQ ID NO: 4570841 - DNA, 25 bp, Homo sapien
gtgaagaagaaatgtgataaggagc

SEQ ID NO: 4570842 - DNA, 25 bp, Homo sapien
ccttgtgaagaagaaatgtgataag

SEQ ID NO: 4570843 - DNA, 25 bp, Homo sapien
caccttgtgaagaagaaatgtgata

SEQ ID NO: 4570844 - DNA, 25 bp, Homo sapien
cgcatgttgtctttccgctcggaca

SEQ ID NO: 4570845 - DNA, 25 bp, Homo sapien
gactaaggccgaggcgcatgttgtc

SEQ ID NO: 4570846 - DNA, 25 bp, Homo sapien
tccgctcggacacgttggacagggt

SEQ ID NO: 4570847 - DNA, 25 bp, Homo sapien
ttggtggcgagactaaggccgaggc

SEQ ID NO: 4570848 - DNA, 25 bp, Homo sapien
catctgatggcatcacggtggcagt

SEQ ID NO: 4570849 - DNA, 25 bp, Homo sapien
agagcaagatctttagcccagaccg

SEQ ID NO: 4570850 - DNA, 25 bp, Homo sapien
gtgactgccacaaggttacctgctg

SEQ ID NO: 4570851 - DNA, 25 bp, Homo sapien
tgtgacgtttcatcccgagttctgt

SEQ ID NO: 4570852 - DNA, 25 bp, Homo sapien
ccgtggatcactggacacttgtaca

SEQ ID NO: 4570853 - DNA, 25 bp, Homo sapien
ggtgcagttcccgtggatcactgga

SEQ ID NO: 4570854 - DNA, 25 bp, Homo sapien
tctggtagccattggtttccagtgg

SEQ ID NO: 4570855 - DNA, 25 bp, Homo sapien
tacacgtctcccgtcttctggtagc

SEQ ID NO: 4570856 - DNA, 25 bp, Homo sapien
gtgtgcctgttgggcttgaggtttg

SEQ ID NO: 4570857 - DNA, 25 bp, Homo sapien
tgcctgttgggcttgaggtttggag

SEQ ID NO: 4570858 - DNA, 25 bp, Homo sapien
tgtgcctgttgggcttgaggtttgg

SEQ ID NO: 4570859 - DNA, 25 bp, Homo sapien
gtgcctgttgggcttgaggtttgga

SEQ ID NO: 4570860 - DNA, 25 bp, Homo sapien
cagcaaaccccaaaggtcgtggcga

SEQ ID NO: 4570861 - DNA, 25 bp, Homo sapien
gagcatccggccctttccattggct

SEQ ID NO: 4570862 - DNA, 25 bp, Homo sapien
aaccccaaaggtcgtggcgagcatc

SEQ ID NO: 4570863 - DNA, 25 bp, Homo sapien
ggtcgtggcgagcatccggcccttt

SEQ ID NO: 4570864 - DNA, 25 bp, Homo sapien
ccaacaaggctctttggggactcat

SEQ ID NO: 4570865 - DNA, 25 bp, Homo sapien
tccaacaaggctctttggggactca

SEQ ID NO: 4570866 - DNA, 25 bp, Homo sapien
tggctggacatagaggcggcccctt

SEQ ID NO: 4570867 - DNA, 25 bp, Homo sapien
ggacatagaggcggcccctttcagc

SEQ ID NO: 4570868 - DNA, 25 bp, Homo sapien
acatagaggcggcccctttcagctt

SEQ ID NO: 4570869 - DNA, 25 bp, Homo sapien
gctggacatagaggcggcccctttc

SEQ ID NO: 4570870 - DNA, 25 bp, Homo sapien
gttgacaagtatcatcacaaacgtc

SEQ ID NO: 4570871 - DNA, 25 bp, Homo sapien
gtcaacttcataatcaacatttggg

SEQ ID NO: 4570872 - DNA, 25 bp, Homo sapien
tggtttgcacttgacaacttttagg

SEQ ID NO: 4570873 - DNA, 25 bp, Homo sapien
aacttttaggtccacctcagctgac

SEQ ID NO: 4570874 - DNA, 25 bp, Homo sapien
aagacaagctgcatcttcactttgc

SEQ ID NO: 4570875 - DNA, 25 bp, Homo sapien
cactttgcttcttggggtgtaactg

SEQ ID NO: 4570876 - DNA, 25 bp, Homo sapien
agacaagctgcatcttcactttgct

SEQ ID NO: 4570877 - DNA, 25 bp, Homo sapien
ctctttggattcaggcactgagggc

SEQ ID NO: 4570878 - DNA, 25 bp, Homo sapien
ttgccattggtcatccctctttgga

SEQ ID NO: 4570879 - DNA, 25 bp, Homo sapien
ggttcttaacttcttgccattggtc

SEQ ID NO: 4570880 - DNA, 25 bp, Homo sapien
ggtcatccctctttggattcaggca

SEQ ID NO: 4570881 - DNA, 25 bp, Homo sapien
ggaacggagttaacctatggatcca

SEQ ID NO: 4570882 - DNA, 25 bp, Homo sapien
ctggaacggagttaacctatggatc

SEQ ID NO: 4570883 - DNA, 25 bp, Homo sapien
cggagttaacctatggatccatggg

SEQ ID NO: 4570884 - DNA, 25 bp, Homo sapien
gagttaacctatggatccatgggaa

SEQ ID NO: 4570885 - DNA, 25 bp, Homo sapien
accatctgtgggcctatgccaaccc

SEQ ID NO: 4570886 - DNA, 25 bp, Homo sapien
agacgtctggaaccattctctccct

SEQ ID NO: 4570887 - DNA, 25 bp, Homo sapien
cagacgtctggaaccattctctccc

SEQ ID NO: 4570888 - DNA, 25 bp, Homo sapien
tccagacgtctggaaccattctctc

SEQ ID NO: 4570889 - DNA, 25 bp, Homo sapien
ctcctctgacccttctctctccgcc

SEQ ID NO: 4570890 - DNA, 25 bp, Homo sapien
ctgcccccggacacagcacctcctc

SEQ ID NO: 4570891 - DNA, 25 bp, Homo sapien
tcgtcttcctcacaatcctctcctc

SEQ ID NO: 4570892 - DNA, 25 bp, Homo sapien
ctcttctgcccccggacacagcacc

SEQ ID NO: 4570893 - DNA, 25 bp, Homo sapien
agaccccaggcacagtgatttctcc

SEQ ID NO: 4570894 - DNA, 25 bp, Homo sapien
tctggctgggtttctgctgtgaaga

SEQ ID NO: 4570895 - DNA, 25 bp, Homo sapien
cttccatggagcatttccagagacc

SEQ ID NO: 4570896 - DNA, 25 bp, Homo sapien
atgatgctgtgttggctgctcttgg

SEQ ID NO: 4570897 - DNA, 25 bp, Homo sapien
tcagtgactccaacaaaaagtggga

SEQ ID NO: 4570898 - DNA, 25 bp, Homo sapien
gctggtgtccaacaggggagatggg

SEQ ID NO: 4570899 - DNA, 25 bp, Homo sapien
cactgtgtagccaaagaaggcggtc

SEQ ID NO: 4570900 - DNA, 25 bp, Homo sapien
cacttattgccactgatgtcgtgct

SEQ ID NO: 4570901 - DNA, 25 bp, Homo sapien
ctggtgtccatgttgaaggtgtccg

SEQ ID NO: 4570902 - DNA, 25 bp, Homo sapien
actgatgtcgtgctgctgcactgtg

SEQ ID NO: 4570903 - DNA, 25 bp, Homo sapien
gtggccatgggcgccggcactgggc

SEQ ID NO: 4570904 - DNA, 25 bp, Homo sapien
tccgtctggcttcggcaggggcttc

SEQ ID NO: 4570905 - DNA, 25 bp, Homo sapien
cagttgacaaagctccgtctggctt

SEQ ID NO: 4570906 - DNA, 25 bp, Homo sapien
gaaccagttgacaaagctccgtctg

SEQ ID NO: 4570907 - DNA, 25 bp, Homo sapien
gttctcaaagccactccactcccta

SEQ ID NO: 4570908 - DNA, 25 bp, Homo sapien
agttctcaaagccactccactccct

SEQ ID NO: 4570909 - DNA, 25 bp, Homo sapien
ttctcaaagccactccactccctac

SEQ ID NO: 4570910 - DNA, 25 bp, Homo sapien
ttcgctccagcttaaggagcgtctg

SEQ ID NO: 4570911 - DNA, 25 bp, Homo sapien
ctccagcttaaggagcgtctgctgt

SEQ ID NO: 4570912 - DNA, 25 bp, Homo sapien
gggagagttcgctccagcttaagga

SEQ ID NO: 4570913 - DNA, 25 bp, Homo sapien
agctcagcggggagagttcgctcca

SEQ ID NO: 4570914 - DNA, 25 bp, Homo sapien
tcttgaaagtctggatgaagcacca

SEQ ID NO: 4570915 - DNA, 25 bp, Homo sapien
gaactgactgttgactccttgatca

SEQ ID NO: 4570916 - DNA, 25 bp, Homo sapien
gatcacaacaagtggaacacagcag

SEQ ID NO: 4570917 - DNA, 25 bp, Homo sapien
tgacggccagaggaagccgatctgt

SEQ ID NO: 4570918 - DNA, 25 bp, Homo sapien
ccagggtctgcgtcagctgagagtc

SEQ ID NO: 4570919 - DNA, 25 bp, Homo sapien
gagtcttgaagattcagctggcctt

SEQ ID NO: 4570920 - DNA, 25 bp, Homo sapien
aacttgatattcatccaagaagggc

SEQ ID NO: 4570921 - DNA, 25 bp, Homo sapien
cttgatgtggatgctcagaaagagt

SEQ ID NO: 4570922 - DNA, 25 bp, Homo sapien
caactcaatgtatcaatgattgttt

SEQ ID NO: 4570923 - DNA, 25 bp, Homo sapien
cccgcagctggcttctagttgcata

SEQ ID NO: 4570924 - DNA, 25 bp, Homo sapien
tattggcctggtggcagttcttccc

SEQ ID NO: 4570925 - DNA, 25 bp, Homo sapien
tttaaactgtgactctaggattcca

SEQ ID NO: 4570926 - DNA, 25 bp, Homo sapien
gagggtggacttgcttcgcgtggta

SEQ ID NO: 4570927 - DNA, 25 bp, Homo sapien
gctcctctgtaggccgacaggaggg

SEQ ID NO: 4570928 - DNA, 25 bp, Homo sapien
gtggacttgcttcgcgtggtacccg

SEQ ID NO: 4570929 - DNA, 25 bp, Homo sapien
tgtaggccgacaggagggtggactt

SEQ ID NO: 4570930 - DNA, 25 bp, Homo sapien
ctctcccactaccaccgcatctgac

SEQ ID NO: 4570931 - DNA, 25 bp, Homo sapien
tccctgagggcacctctcccactac

SEQ ID NO: 4570932 - DNA, 25 bp, Homo sapien
ctgcgggataggggtctccacctga

SEQ ID NO: 4570933 - DNA, 25 bp, Homo sapien
gggataggggtctccacctgagctc

SEQ ID NO: 4570934 - DNA, 25 bp, Homo sapien
gcccacgcagaaggggaggcaaggt

SEQ ID NO: 4570935 - DNA, 25 bp, Homo sapien
gagcccacgcagaaggggaggcaag

SEQ ID NO: 4570936 - DNA, 25 bp, Homo sapien
ctggagcccacgcagaaggggaggc

SEQ ID NO: 4570937 - DNA, 25 bp, Homo sapien
tggagcccacgcagaaggggaggca

SEQ ID NO: 4570938 - DNA, 25 bp, Homo sapien
cggccagtaaccgaggcgctggccc

SEQ ID NO: 4570939 - DNA, 25 bp, Homo sapien
ggcccttgccggagcacttggccgt

SEQ ID NO: 4570940 - DNA, 25 bp, Homo sapien
cgtcttccgcagaacagcatcactg

SEQ ID NO: 4570941 - DNA, 25 bp, Homo sapien
acttggccgtcttccgcagaacagc

SEQ ID NO: 4570942 - DNA, 25 bp, Homo sapien
tgcgctgcgcgactgtgtcccgccg

SEQ ID NO: 4570943 - DNA, 25 bp, Homo sapien
ctgctggccgggcagacgagagcta

SEQ ID NO: 4570944 - DNA, 25 bp, Homo sapien
tggccgggcagacgagagctagccc

SEQ ID NO: 4570945 - DNA, 25 bp, Homo sapien
taacgtttcgggggtcctgcgctgc

SEQ ID NO: 4570946 - DNA, 25 bp, Homo sapien
tgaaccgctagactggggccagtcc

SEQ ID NO: 4570947 - DNA, 25 bp, Homo sapien
gcacctccctctttagcgaaacttg

SEQ ID NO: 4570948 - DNA, 25 bp, Homo sapien
ttcaatagccttcgcacctccctct

SEQ ID NO: 4570949 - DNA, 25 bp, Homo sapien
gcgaaacttgactgaaccgctagac

SEQ ID NO: 4570950 - DNA, 25 bp, Homo sapien
aggctgagcgcccaggccaccacca

SEQ ID NO: 4570951 - DNA, 25 bp, Homo sapien
cggctgggtccggtgtgcagcggcg

SEQ ID NO: 4570952 - DNA, 25 bp, Homo sapien
ccgcggcacggcggctgggtccggt

SEQ ID NO: 4570953 - DNA, 25 bp, Homo sapien
ggcacggcggctgggtccggtgtgc

SEQ ID NO: 4570954 - DNA, 25 bp, Homo sapien
ggcccgcggcacggcggctgggtcc

SEQ ID NO: 4570955 - DNA, 25 bp, Homo sapien
ccagctgagttgaatgtagaacacc

SEQ ID NO: 4570956 - DNA, 25 bp, Homo sapien
tgcatcagaacgacctggagcacgt

SEQ ID NO: 4570957 - DNA, 25 bp, Homo sapien
tatcagttatacgacagtgagtcct

SEQ ID NO: 4570958 - DNA, 25 bp, Homo sapien
tagggaatgggctgcagcccacatt

SEQ ID NO: 4570959 - DNA, 25 bp, Homo sapien
gaagagaatccatgctaaacagagg

SEQ ID NO: 4570960 - DNA, 25 bp, Homo sapien
gagattatatgccagctggttcttg

SEQ ID NO: 4570961 - DNA, 25 bp, Homo sapien
gggcagccagatgtagatcatcaga

SEQ ID NO: 4570962 - DNA, 25 bp, Homo sapien
ctggttcttgaaggacaagaaggaa

SEQ ID NO: 4570963 - DNA, 25 bp, Homo sapien
agagctcagcagttcatcggcctca

SEQ ID NO: 4570964 - DNA, 25 bp, Homo sapien
gagagctcagcagttcatcggcctc

SEQ ID NO: 4570965 - DNA, 25 bp, Homo sapien
agctcagcagttcatcggcctcatc

SEQ ID NO: 4570966 - DNA, 25 bp, Homo sapien
gagctcagcagttcatcggcctcat

SEQ ID NO: 4570967 - DNA, 25 bp, Homo sapien
ctctgaagcccatgggccctgagtt

SEQ ID NO: 4570968 - DNA, 25 bp, Homo sapien
gcccatgggccctgagttcccagag

SEQ ID NO: 4570969 - DNA, 25 bp, Homo sapien
tctgaagcccatgggccctgagttc

SEQ ID NO: 4570970 - DNA, 25 bp, Homo sapien
gaagcccatgggccctgagttccca

SEQ ID NO: 4570971 - DNA, 25 bp, Homo sapien
ttgcctgtgtttccaatgtctccac

SEQ ID NO: 4570972 - DNA, 25 bp, Homo sapien
tgtttccaatgtctccacctcatct

SEQ ID NO: 4570973 - DNA, 25 bp, Homo sapien
gccgagaattgagcaacttccttgt

SEQ ID NO: 4570974 - DNA, 25 bp, Homo sapien
cagatctctgccgagaattgagcaa

SEQ ID NO: 4570975 - DNA, 25 bp, Homo sapien
ggtgctggcgaacagcatttcccct

SEQ ID NO: 4570976 - DNA, 25 bp, Homo sapien
tgaggagtctctccaatgagcaggt

SEQ ID NO: 4570977 - DNA, 25 bp, Homo sapien
gagtctctccaatgagcaggtcaga

SEQ ID NO: 4570978 - DNA, 25 bp, Homo sapien
ttgcgctgaatagtgagctcgtgca

SEQ ID NO: 4570979 - DNA, 25 bp, Homo sapien
tgggataacagaagctgcacagggc

SEQ ID NO: 4570980 - DNA, 25 bp, Homo sapien
tacttgttactgagtggacatgagg

SEQ ID NO: 4570981 - DNA, 25 bp, Homo sapien
aatacttgttactgagtggacatga

SEQ ID NO: 4570982 - DNA, 25 bp, Homo sapien
ttgttactgagtggacatgaggtgc

SEQ ID NO: 4570983 - DNA, 25 bp, Homo sapien
caatacttgttactgagtggacatg

SEQ ID NO: 4570984 - DNA, 25 bp, Homo sapien
atccaccttcgccttgccgcctggt

SEQ ID NO: 4570985 - DNA, 25 bp, Homo sapien
gaaatccaccttcgccttgccgcct

SEQ ID NO: 4570986 - DNA, 25 bp, Homo sapien
tggaaatccaccttcgccttgccgc

SEQ ID NO: 4570987 - DNA, 25 bp, Homo sapien
caccttcgccttgccgcctggtggc

SEQ ID NO: 4570988 - DNA, 25 bp, Homo sapien
ggagaggaggatggtcgctaaaggc

SEQ ID NO: 4570989 - DNA, 25 bp, Homo sapien
taagtcctagagtctgagggcccag

SEQ ID NO: 4570990 - DNA, 25 bp, Homo sapien
ctccagacaaaagggacagcctcct

SEQ ID NO: 4570991 - DNA, 25 bp, Homo sapien
caggccacagaccagcttaagtcct

SEQ ID NO: 4570992 - DNA, 25 bp, Homo sapien
cagggcaaacacatcctgtgggcat

SEQ ID NO: 4570993 - DNA, 25 bp, Homo sapien
cacaggagcccttgcgggtggcaaa

SEQ ID NO: 4570994 - DNA, 25 bp, Homo sapien
gggtggcaaaactgttcagctgcag

SEQ ID NO: 4570995 - DNA, 25 bp, Homo sapien
ctgcacatgtgcacaggagcccttg

SEQ ID NO: 4570996 - DNA, 25 bp, Homo sapien
tgaagggtacagctgcttagccaat

SEQ ID NO: 4570997 - DNA, 25 bp, Homo sapien
tacagctgcttagccaatgcattca

SEQ ID NO: 4570998 - DNA, 25 bp, Homo sapien
cacgctgaagggtacagctgcttag

SEQ ID NO: 4570999 - DNA, 25 bp, Homo sapien
tttgaaaacacgctgaagggtacag

SEQ ID NO: 4571000 - DNA, 25 bp, Homo sapien
tgggctggtgactgtgaggaggtcc

SEQ ID NO: 4571001 - DNA, 25 bp, Homo sapien
tcagcatatgaattgctctcctttt

SEQ ID NO: 4571002 - DNA, 25 bp, Homo sapien
ggagtctgcggtggcttcagcatat

SEQ ID NO: 4571003 - DNA, 25 bp, Homo sapien
ctggcatccactactggagtctgcg

SEQ ID NO: 4571004 - DNA, 25 bp, Homo sapien
tgatcagcgaggcagttatccagca

SEQ ID NO: 4571005 - DNA, 25 bp, Homo sapien
tccccactgtaatgagaaggctctc

SEQ ID NO: 4571006 - DNA, 25 bp, Homo sapien
tagagtagcactcggtacagggcct

SEQ ID NO: 4571007 - DNA, 25 bp, Homo sapien
tatacaagggactgggcttctttgc

SEQ ID NO: 4571008 - DNA, 25 bp, Homo sapien
gattggatcaacacacaggacgcac

SEQ ID NO: 4571009 - DNA, 25 bp, Homo sapien
ttccttagggagctagcggccgagt

SEQ ID NO: 4571010 - DNA, 25 bp, Homo sapien
ggcagggcagcttctataacaagag

SEQ ID NO: 4571011 - DNA, 25 bp, Homo sapien
cactgtgccccgagtcaggattgga

SEQ ID NO: 4571012 - DNA, 25 bp, Homo sapien
cagtttcctcctctgcaaaactcac

SEQ ID NO: 4571013 - DNA, 25 bp, Homo sapien
tcagtttcctcctctgcaaaactca

SEQ ID NO: 4571014 - DNA, 25 bp, Homo sapien
taaggcggccttcgggcaagtcatc

SEQ ID NO: 4571015 - DNA, 25 bp, Homo sapien
tgcttacacaaatccgtctggccac

SEQ ID NO: 4571016 - DNA, 25 bp, Homo sapien
tcatcgcggcgggaattagattcga

SEQ ID NO: 4571017 - DNA, 25 bp, Homo sapien
tagattcgaaagagtgcttacacaa

SEQ ID NO: 4571018 - DNA, 25 bp, Homo sapien
ctgtgacttcaccagcgtccccggg

SEQ ID NO: 4571019 - DNA, 25 bp, Homo sapien
acgggccgactttgcgagcctccag

SEQ ID NO: 4571020 - DNA, 25 bp, Homo sapien
gccggcgatcgagcgggaggctcgg

SEQ ID NO: 4571021 - DNA, 25 bp, Homo sapien
cccgaccgccttctttgcccgcgca

SEQ ID NO: 4571022 - DNA, 25 bp, Homo sapien
ggcccacgtttattggagagacttc

SEQ ID NO: 4571023 - DNA, 25 bp, Homo sapien
caaagccactctgtgcagaaggcgc

SEQ ID NO: 4571024 - DNA, 25 bp, Homo sapien
tcccgggagccgctaccagagacag

SEQ ID NO: 4571025 - DNA, 25 bp, Homo sapien
ttgggccttgtcataggggcccacg

SEQ ID NO: 4571026 - DNA, 25 bp, Homo sapien
ccactgcatcgccccttcctgtcct

SEQ ID NO: 4571027 - DNA, 25 bp, Homo sapien
ttccctctgtgggacaccatctgcc

SEQ ID NO: 4571028 - DNA, 25 bp, Homo sapien
tgtcctgctggtgcctggatttccc

SEQ ID NO: 4571029 - DNA, 25 bp, Homo sapien
atttccctctgtgggacaccatctg

SEQ ID NO: 4571030 - DNA, 25 bp, Homo sapien
ggaagaagcattgcgggagtgggag

SEQ ID NO: 4571031 - DNA, 25 bp, Homo sapien
ctagatggaagaagcattgcgggag

SEQ ID NO: 4571032 - DNA, 25 bp, Homo sapien
tagatggaagaagcattgcgggagt

SEQ ID NO: 4571033 - DNA, 25 bp, Homo sapien
gatggaagaagcattgcgggagtgg

SEQ ID NO: 4571034 - DNA, 25 bp, Homo sapien
acagataggtgaaggataaggctgg

SEQ ID NO: 4571035 - DNA, 25 bp, Homo sapien
ggacagataggtgaaggataaggct

SEQ ID NO: 4571036 - DNA, 25 bp, Homo sapien
gactgggaggacagataggtgaagg

SEQ ID NO: 4571037 - DNA, 25 bp, Homo sapien
ggaggacagataggtgaaggataag

SEQ ID NO: 4571038 - DNA, 25 bp, Homo sapien
ctgaccagggggatccagtgaggac

SEQ ID NO: 4571039 - DNA, 25 bp, Homo sapien
tgggtatgagttagaagtcagtgga

SEQ ID NO: 4571040 - DNA, 25 bp, Homo sapien
ggtggtccaggcgagaggcctgagc

SEQ ID NO: 4571041 - DNA, 25 bp, Homo sapien
aggatgcagggtgacgttttggaag

SEQ ID NO: 4571042 - DNA, 25 bp, Homo sapien
gactggctaggaggcatgcccctcc

SEQ ID NO: 4571043 - DNA, 25 bp, Homo sapien
gatacttgcagatggatgatcccac

SEQ ID NO: 4571044 - DNA, 25 bp, Homo sapien
tccagtctgtctcagtgcttcaggg

SEQ ID NO: 4571045 - DNA, 25 bp, Homo sapien
caacgaggatgcatcataatgaact

SEQ ID NO: 4571046 - DNA, 25 bp, Homo sapien
tcctgagagcagctctcagtagcag

SEQ ID NO: 4571047 - DNA, 25 bp, Homo sapien
ttcctgagagcagctctcagtagca

SEQ ID NO: 4571048 - DNA, 25 bp, Homo sapien
cattgactgtggattgactcggaac

SEQ ID NO: 4571049 - DNA, 25 bp, Homo sapien
catggaagacattacgggacccctg

SEQ ID NO: 4571050 - DNA, 25 bp, Homo sapien
tgatggccccagatagaggatgagt

SEQ ID NO: 4571051 - DNA, 25 bp, Homo sapien
tccagagcataactgaacacggagt

SEQ ID NO: 4571052 - DNA, 25 bp, Homo sapien
tccatccatccgttcaacaagtgct

SEQ ID NO: 4571053 - DNA, 25 bp, Homo sapien
tgcttaccaaaactcccactgggta

SEQ ID NO: 4571054 - DNA, 25 bp, Homo sapien
ggctttgaagagttatggggctcca

SEQ ID NO: 4571055 - DNA, 25 bp, Homo sapien
tgaaattccgcactctcatcctcag

SEQ ID NO: 4571056 - DNA, 25 bp, Homo sapien
gcagagtagggtactctgaggccca

SEQ ID NO: 4571057 - DNA, 25 bp, Homo sapien
tgcagagtagggtactctgaggccc

SEQ ID NO: 4571058 - DNA, 25 bp, Homo sapien
ttgcagagtagggtactctgaggcc

SEQ ID NO: 4571059 - DNA, 25 bp, Homo sapien
cttgcagagtagggtactctgaggc

SEQ ID NO: 4571060 - DNA, 25 bp, Homo sapien
gctcagcagtgttgctggacccagg

SEQ ID NO: 4571061 - DNA, 25 bp, Homo sapien
catgaacttgactatcgctccctcg

SEQ ID NO: 4571062 - DNA, 25 bp, Homo sapien
ttttccggcaactgcatggcaggca

SEQ ID NO: 4571063 - DNA, 25 bp, Homo sapien
cattgttatcatcccctgagctgtg

SEQ ID NO: 4571064 - DNA, 25 bp, Homo sapien
gcaggtgttcaggggagggtaggtc

SEQ ID NO: 4571065 - DNA, 25 bp, Homo sapien
gccaggaaatgctgcaggtgttcag

SEQ ID NO: 4571066 - DNA, 25 bp, Homo sapien
gggcagggtggcagccaggaaatgc

SEQ ID NO: 4571067 - DNA, 25 bp, Homo sapien
gcagccaggaaatgctgcaggtgtt

SEQ ID NO: 4571068 - DNA, 25 bp, Homo sapien
ggtgctcctcgcagtcagtgtaaat

SEQ ID NO: 4571069 - DNA, 25 bp, Homo sapien
gagaaggtgctgacacctgcacaaa

SEQ ID NO: 4571070 - DNA, 25 bp, Homo sapien
tcctcgcagtcagtgtaaataggct

SEQ ID NO: 4571071 - DNA, 25 bp, Homo sapien
cttgacatcagtagctacaccagag

SEQ ID NO: 4571072 - DNA, 25 bp, Homo sapien
ccttcgttgatctggcagcggtgga

SEQ ID NO: 4571073 - DNA, 25 bp, Homo sapien
ggcccaatgcggaacccttcgttga

SEQ ID NO: 4571074 - DNA, 25 bp, Homo sapien
cagtcaggcccaatgcggaaccctt

SEQ ID NO: 4571075 - DNA, 25 bp, Homo sapien
ggtggagatgttgttccacactagc

SEQ ID NO: 4571076 - DNA, 25 bp, Homo sapien
gacaaaacattcaaccaatccagaa

SEQ ID NO: 4571077 - DNA, 25 bp, Homo sapien
gaaaaagtgttctggttatccaggc

SEQ ID NO: 4571078 - DNA, 25 bp, Homo sapien
atttttccagaacagggcactttcg

SEQ ID NO: 4571079 - DNA, 25 bp, Homo sapien
ttcttgtacaaagactaccagctgg

SEQ ID NO: 4571080 - DNA, 25 bp, Homo sapien
ctgctttgccaacagactctccgct

SEQ ID NO: 4571081 - DNA, 25 bp, Homo sapien
tgctttgccaacagactctccgctt

SEQ ID NO: 4571082 - DNA, 25 bp, Homo sapien
gccagccccggtctcttctacctgc

SEQ ID NO: 4571083 - DNA, 25 bp, Homo sapien
cttgagccagccccggtctcttcta

SEQ ID NO: 4571084 - DNA, 25 bp, Homo sapien
tgtctaggctgatctcttgaaatcc

SEQ ID NO: 4571085 - DNA, 25 bp, Homo sapien
cattagtttccgtagatggatcaga

SEQ ID NO: 4571086 - DNA, 25 bp, Homo sapien
gataaacaccaatacaccattagga

SEQ ID NO: 4571087 - DNA, 25 bp, Homo sapien
tgaggacctcatagaatcagaagat

SEQ ID NO: 4571088 - DNA, 25 bp, Homo sapien
gaatagcatcttctaggcagaggag

SEQ ID NO: 4571089 - DNA, 25 bp, Homo sapien
tccgtgagccacactgaaattggga

SEQ ID NO: 4571090 - DNA, 25 bp, Homo sapien
ggaatgtttgtaccccgcttcagca

SEQ ID NO: 4571091 - DNA, 25 bp, Homo sapien
cttcccagggaaagtaaagcctctg

SEQ ID NO: 4571092 - DNA, 25 bp, Homo sapien
gctaacatgactgctagcgtccgca

SEQ ID NO: 4571093 - DNA, 25 bp, Homo sapien
ctaacatgactgctagcgtccgcat

SEQ ID NO: 4571094 - DNA, 25 bp, Homo sapien
tcaaggccatagattcccagggtca

SEQ ID NO: 4571095 - DNA, 25 bp, Homo sapien
aaggccatagattcccagggtcatt

SEQ ID NO: 4571096 - DNA, 25 bp, Homo sapien
ttcaaggccatagattcccagggtc

SEQ ID NO: 4571097 - DNA, 25 bp, Homo sapien
ggccatagattcccagggtcattac

SEQ ID NO: 4571098 - DNA, 25 bp, Homo sapien
tctggccccttacatatccctgatg

SEQ ID NO: 4571099 - DNA, 25 bp, Homo sapien
ttacatatccctgatggagcaaggc

SEQ ID NO: 4571100 - DNA, 25 bp, Homo sapien
cctgatggagcaaggctgaagttct

SEQ ID NO: 4571101 - DNA, 25 bp, Homo sapien
ctcggaggtggtgcatctccttctc

SEQ ID NO: 4571102 - DNA, 25 bp, Homo sapien
ggcactgggcccccgcagagtgtgc

SEQ ID NO: 4571103 - DNA, 25 bp, Homo sapien
gggcactgggcccccgcagagtgtg

SEQ ID NO: 4571104 - DNA, 25 bp, Homo sapien
gcactgggcccccgcagagtgtgca

SEQ ID NO: 4571105 - DNA, 25 bp, Homo sapien
gctgactctcttgttggtccagacc

SEQ ID NO: 4571106 - DNA, 25 bp, Homo sapien
gggttcctgatgttcaggaaggcct

SEQ ID NO: 4571107 - DNA, 25 bp, Homo sapien
ccccagttgggatagattcctctag

SEQ ID NO: 4571108 - DNA, 25 bp, Homo sapien
cagggtcctccatgcctatatctct

SEQ ID NO: 4571109 - DNA, 25 bp, Homo sapien
catttcccactacgcacaaagagtt

SEQ ID NO: 4571110 - DNA, 25 bp, Homo sapien
tagatgcattatactccatacctgc

SEQ ID NO: 4571111 - DNA, 25 bp, Homo sapien
cgtaccccacagctagacagtgtca

SEQ ID NO: 4571112 - DNA, 25 bp, Homo sapien
gaaatcaagaaatgggtgtccactc

SEQ ID NO: 4571113 - DNA, 25 bp, Homo sapien
ccagaggacagtcggccatgggaac

SEQ ID NO: 4571114 - DNA, 25 bp, Homo sapien
atttaacccatgtgtggctgccagg

SEQ ID NO: 4571115 - DNA, 25 bp, Homo sapien
gaggatttaacccatgtgtggctgc

SEQ ID NO: 4571116 - DNA, 25 bp, Homo sapien
ggatttaacccatgtgtggctgcca

SEQ ID NO: 4571117 - DNA, 25 bp, Homo sapien
ccacatagctcatgtcacttttgac

SEQ ID NO: 4571118 - DNA, 25 bp, Homo sapien
ttagtacaacctatctgccacatag

SEQ ID NO: 4571119 - DNA, 25 bp, Homo sapien
tagtacaacctatctgccacatagc

SEQ ID NO: 4571120 - DNA, 25 bp, Homo sapien
tgacttgactaacaaacaagggaca

SEQ ID NO: 4571121 - DNA, 25 bp, Homo sapien
cagggcaccaagttcattgtcaaaa

SEQ ID NO: 4571122 - DNA, 25 bp, Homo sapien
gttcattgtcaaaacagctgacttg

SEQ ID NO: 4571123 - DNA, 25 bp, Homo sapien
tgactaacaaacaagggacattttc

SEQ ID NO: 4571124 - DNA, 25 bp, Homo sapien
ctcagcttcttacttctcttttctg

SEQ ID NO: 4571125 - DNA, 25 bp, Homo sapien
gcttcttacttctcttttctgactg

SEQ ID NO: 4571126 - DNA, 25 bp, Homo sapien
cagcttcttacttctcttttctgac

SEQ ID NO: 4571127 - DNA, 25 bp, Homo sapien
tcttacttctcttttctgactgcat

SEQ ID NO: 4571128 - DNA, 25 bp, Homo sapien
tggacctgagcacactcattctgcc

SEQ ID NO: 4571129 - DNA, 25 bp, Homo sapien
tcctggacctgagcacactcattct

SEQ ID NO: 4571130 - DNA, 25 bp, Homo sapien
cctggacctgagcacactcattctg

SEQ ID NO: 4571131 - DNA, 25 bp, Homo sapien
ctggacctgagcacactcattctgc

SEQ ID NO: 4571132 - DNA, 25 bp, Homo sapien
tagggacattggtgataagaactac

SEQ ID NO: 4571133 - DNA, 25 bp, Homo sapien
gggcacgccaggtcctacatctctt

SEQ ID NO: 4571134 - DNA, 25 bp, Homo sapien
tggtccaggccgaccatctaaggtg

SEQ ID NO: 4571135 - DNA, 25 bp, Homo sapien
gggaatgttcacactgccctgaagc

SEQ ID NO: 4571136 - DNA, 25 bp, Homo sapien
catccttgatgagaacctgcacggg

SEQ ID NO: 4571137 - DNA, 25 bp, Homo sapien
ttcctgagcaaaggcgttgcggagc

SEQ ID NO: 4571138 - DNA, 25 bp, Homo sapien
tgcggagctttgcagcagtatgcca

SEQ ID NO: 4571139 - DNA, 25 bp, Homo sapien
agtgttttcgttcctgtttgtagca

SEQ ID NO: 4571140 - DNA, 25 bp, Homo sapien
aagtggtgagcacgcccacagcctc

SEQ ID NO: 4571141 - DNA, 25 bp, Homo sapien
tgccttagacaatccgtggagctcc

SEQ ID NO: 4571142 - DNA, 25 bp, Homo sapien
gagctccaagtggtgagcacgccca

SEQ ID NO: 4571143 - DNA, 25 bp, Homo sapien
tagacaatccgtggagctccaagtg

SEQ ID NO: 4571144 - DNA, 25 bp, Homo sapien
caagggttggtgtccaagccagaac

SEQ ID NO: 4571145 - DNA, 25 bp, Homo sapien
atgattgaagcaagggttggtgtcc

SEQ ID NO: 4571146 - DNA, 25 bp, Homo sapien
agggttggtgtccaagccagaacct

SEQ ID NO: 4571147 - DNA, 25 bp, Homo sapien
gaagcaagggttggtgtccaagcca

SEQ ID NO: 4571148 - DNA, 25 bp, Homo sapien
ttcctagtgttggtgaccaaccagc

SEQ ID NO: 4571149 - DNA, 25 bp, Homo sapien
tggtgaccaaccagcttaggcagct

SEQ ID NO: 4571150 - DNA, 25 bp, Homo sapien
tgaccaaccagcttaggcagctcat

SEQ ID NO: 4571151 - DNA, 25 bp, Homo sapien
tagtgttggtgaccaaccagcttag

SEQ ID NO: 4571152 - DNA, 25 bp, Homo sapien
tgttggactcaaagaagccatcccc

SEQ ID NO: 4571153 - DNA, 25 bp, Homo sapien
ccctcacctagcagttcatctggaa

SEQ ID NO: 4571154 - DNA, 25 bp, Homo sapien
tttaatgaagatacaccactgagtc

SEQ ID NO: 4571155 - DNA, 25 bp, Homo sapien
aaggttggcccaacttgattgtttg

SEQ ID NO: 4571156 - DNA, 25 bp, Homo sapien
cctctttgtagagcgaagcccacca

SEQ ID NO: 4571157 - DNA, 25 bp, Homo sapien
tagctatcgcatttacagggacaaa

SEQ ID NO: 4571158 - DNA, 25 bp, Homo sapien
cgtctccagcgcttaggtccgtaaa

SEQ ID NO: 4571159 - DNA, 25 bp, Homo sapien
ttgagtaaccaaactgagaccagcc

SEQ ID NO: 4571160 - DNA, 25 bp, Homo sapien
tggcagtaaaaatagtattttattc

SEQ ID NO: 4571161 - DNA, 25 bp, Homo sapien
gcagtaaaaatagtattttattcca

SEQ ID NO: 4571162 - DNA, 25 bp, Homo sapien
ttcccctctcgttcccacagcaacg

SEQ ID NO: 4571163 - DNA, 25 bp, Homo sapien
tcccctctcgttcccacagcaacgt

SEQ ID NO: 4571164 - DNA, 25 bp, Homo sapien
cctcatcttcaggttctcgttttcg

SEQ ID NO: 4571165 - DNA, 25 bp, Homo sapien
tcatcttcaggttctcgttttcgct

SEQ ID NO: 4571166 - DNA, 25 bp, Homo sapien
ttcaggttctcgttttcgcttctga

SEQ ID NO: 4571167 - DNA, 25 bp, Homo sapien
tcttcaggttctcgttttcgcttct

SEQ ID NO: 4571168 - DNA, 25 bp, Homo sapien
agaaagcggcatttagattagttat

SEQ ID NO: 4571169 - DNA, 25 bp, Homo sapien
aagaaagcggcatttagattagtta

SEQ ID NO: 4571170 - DNA, 25 bp, Homo sapien
gaaagcggcatttagattagttatt

SEQ ID NO: 4571171 - DNA, 25 bp, Homo sapien
gctgagagtaaaaaggctgccatac

SEQ ID NO: 4571172 - DNA, 25 bp, Homo sapien
agctgagagtaaaaaggctgccata

SEQ ID NO: 4571173 - DNA, 25 bp, Homo sapien
cagctgagagtaaaaaggctgccat

SEQ ID NO: 4571174 - DNA, 25 bp, Homo sapien
tcgtcatctacctctccatcgttat

SEQ ID NO: 4571175 - DNA, 25 bp, Homo sapien
gtcatctacctctccatcgttataa

SEQ ID NO: 4571176 - DNA, 25 bp, Homo sapien
tccatcgttataaccttcttcatcc

SEQ ID NO: 4571177 - DNA, 25 bp, Homo sapien
ttcctcgtcatctacctctccatcg

SEQ ID NO: 4571178 - DNA, 25 bp, Homo sapien
cacaggcgccttgtccatgctattg

SEQ ID NO: 4571179 - DNA, 25 bp, Homo sapien
ctatctgagtgagtccgtgtggcaa

SEQ ID NO: 4571180 - DNA, 25 bp, Homo sapien
taagcagtcagacacttaccccttg

SEQ ID NO: 4571181 - DNA, 25 bp, Homo sapien
ggtgtgaacgcctacaataagcagt

SEQ ID NO: 4571182 - DNA, 25 bp, Homo sapien
cagttcaaggcagactttggttttc

SEQ ID NO: 4571183 - DNA, 25 bp, Homo sapien
catagtgtcactctctgatttggga

SEQ ID NO: 4571184 - DNA, 25 bp, Homo sapien
gacacacagcttgcgagtggtagag

SEQ ID NO: 4571185 - DNA, 25 bp, Homo sapien
gcagtgttatcctgctacctatcag

SEQ ID NO: 4571186 - DNA, 25 bp, Homo sapien
cctcgtcctcctcgtcttccactac

SEQ ID NO: 4571187 - DNA, 25 bp, Homo sapien
tccactcacgtcctcctcttcacct

SEQ ID NO: 4571188 - DNA, 25 bp, Homo sapien
tctccactcacgtcctcctcttcac

SEQ ID NO: 4571189 - DNA, 25 bp, Homo sapien
ctcctcctctccactcacgtcctcc

SEQ ID NO: 4571190 - DNA, 25 bp, Homo sapien
tgagcatcttcatcatactcctcct

SEQ ID NO: 4571191 - DNA, 25 bp, Homo sapien
ctgagcatcttcatcatactcctcc

SEQ ID NO: 4571192 - DNA, 25 bp, Homo sapien
gggcctccttgtcgtcccggtcata

SEQ ID NO: 4571193 - DNA, 25 bp, Homo sapien
ggtcatagccgtcgagatatgtgag

SEQ ID NO: 4571194 - DNA, 25 bp, Homo sapien
gtagccctcagcatccgagtcaggg

SEQ ID NO: 4571195 - DNA, 25 bp, Homo sapien
gttgcgggaggagcttgaacacatt

SEQ ID NO: 4571196 - DNA, 25 bp, Homo sapien
gaagccaacagtaagtgatttgtgg

SEQ ID NO: 4571197 - DNA, 25 bp, Homo sapien
gccaacagtaagtgatttgtgggag

SEQ ID NO: 4571198 - DNA, 25 bp, Homo sapien
atgaagccaacagtaagtgatttgt

SEQ ID NO: 4571199 - DNA, 25 bp, Homo sapien
caacagtaagtgatttgtgggagga

SEQ ID NO: 4571200 - DNA, 25 bp, Homo sapien
tctggctggtaaatcagtgaagctt

SEQ ID NO: 4571201 - DNA, 25 bp, Homo sapien
ttcactatcgcaacaaggactggtg

SEQ ID NO: 4571202 - DNA, 25 bp, Homo sapien
gcccggccttatgaggtgactctta

SEQ ID NO: 4571203 - DNA, 25 bp, Homo sapien
tcaaaggaatacagcgaatcagatc

SEQ ID NO: 4571204 - DNA, 25 bp, Homo sapien
gaaacaatagctcaattctatctca

SEQ ID NO: 4571205 - DNA, 25 bp, Homo sapien
ctctatggactcagcagaaacaata

SEQ ID NO: 4571206 - DNA, 25 bp, Homo sapien
catagcacatcatgagagtcaaaaa

SEQ ID NO: 4571207 - DNA, 25 bp, Homo sapien
tagctcaattctatctcatagcaca

SEQ ID NO: 4571208 - DNA, 25 bp, Homo sapien
cagggaggggagggtccgaatgact

SEQ ID NO: 4571209 - DNA, 25 bp, Homo sapien
tgcagggaggggagggtccgaatga

SEQ ID NO: 4571210 - DNA, 25 bp, Homo sapien
ctcctacccctgcagggaggggagg

SEQ ID NO: 4571211 - DNA, 25 bp, Homo sapien
cctgcagggaggggagggtccgaat

SEQ ID NO: 4571212 - DNA, 25 bp, Homo sapien
gagactctgttatcgcttagttcaa

SEQ ID NO: 4571213 - DNA, 25 bp, Homo sapien
gtttgccttcattcgaccgactgtt

SEQ ID NO: 4571214 - DNA, 25 bp, Homo sapien
cttcgagtttgccttcattcgaccg

SEQ ID NO: 4571215 - DNA, 25 bp, Homo sapien
gagtttgccttcattcgaccgactg

SEQ ID NO: 4571216 - DNA, 25 bp, Homo sapien
tcgagtttgccttcattcgaccgac

SEQ ID NO: 4571217 - DNA, 25 bp, Homo sapien
catgcggtttttctagacgggtcaa

SEQ ID NO: 4571218 - DNA, 25 bp, Homo sapien
tgttggccatgactcttacgacggg

SEQ ID NO: 4571219 - DNA, 25 bp, Homo sapien
gatccagatgtccaggtcaagccac

SEQ ID NO: 4571220 - DNA, 25 bp, Homo sapien
cagatagacataggtttcggagccc

SEQ ID NO: 4571221 - DNA, 25 bp, Homo sapien
tggggcacacctgcgacactgttgg

SEQ ID NO: 4571222 - DNA, 25 bp, Homo sapien
gacccagtgctctgcatgcaggtct

SEQ ID NO: 4571223 - DNA, 25 bp, Homo sapien
ctgaatgacccagtgctctgcatgc

SEQ ID NO: 4571224 - DNA, 25 bp, Homo sapien
aatgacccagtgctctgcatgcagg

SEQ ID NO: 4571225 - DNA, 25 bp, Homo sapien
cagccaccagtaaacaactccagtc

SEQ ID NO: 4571226 - DNA, 25 bp, Homo sapien
cggaagaaacagtaagccaaggtcg

SEQ ID NO: 4571227 - DNA, 25 bp, Homo sapien
tgaggagacacggaagaaacagtaa

SEQ ID NO: 4571228 - DNA, 25 bp, Homo sapien
ccgggccagggtgcattcttcaaat

SEQ ID NO: 4571229 - DNA, 25 bp, Homo sapien
acatggcccggggaagtcggtgacg

SEQ ID NO: 4571230 - DNA, 25 bp, Homo sapien
ggcaggcggggagcacatggcccgg

SEQ ID NO: 4571231 - DNA, 25 bp, Homo sapien
tggcccggggaagtcggtgacgcca

SEQ ID NO: 4571232 - DNA, 25 bp, Homo sapien
aaggcaggcggggagcacatggccc

SEQ ID NO: 4571233 - DNA, 25 bp, Homo sapien
gaagactgaagaggtaggtgctgga

SEQ ID NO: 4571234 - DNA, 25 bp, Homo sapien
aagactgaagaggtaggtgctggag

SEQ ID NO: 4571235 - DNA, 25 bp, Homo sapien
agtggatgctggaagactgaagagg

SEQ ID NO: 4571236 - DNA, 25 bp, Homo sapien
gggtggcagtcatacagcctcagag

SEQ ID NO: 4571237 - DNA, 25 bp, Homo sapien
taagcttgggcatgtcagtttgcat

SEQ ID NO: 4571238 - DNA, 25 bp, Homo sapien
gtttgcattcacctagcttacggat

SEQ ID NO: 4571239 - DNA, 25 bp, Homo sapien
ccatttctgacctacagggtggcag

SEQ ID NO: 4571240 - DNA, 25 bp, Homo sapien
cattggcagagtgagcataattcca

SEQ ID NO: 4571241 - DNA, 25 bp, Homo sapien
tgtgacctctgatttaactgtgggc

SEQ ID NO: 4571242 - DNA, 25 bp, Homo sapien
gatgacctggttttgtatccaagca

SEQ ID NO: 4571243 - DNA, 25 bp, Homo sapien
tattatcatcaaagttgccgggaga

SEQ ID NO: 4571244 - DNA, 25 bp, Homo sapien
gtggtacaaaattgggcggtgtctc

SEQ ID NO: 4571245 - DNA, 25 bp, Homo sapien
aattccactctgacagtgacggcag

SEQ ID NO: 4571246 - DNA, 25 bp, Homo sapien
gtacaaaattgggcggtgtctccgc

SEQ ID NO: 4571247 - DNA, 25 bp, Homo sapien
ctggtggtacaaaattgggcggtgt

SEQ ID NO: 4571248 - DNA, 25 bp, Homo sapien
gaattcacaccttaagctcactggg

SEQ ID NO: 4571249 - DNA, 25 bp, Homo sapien
ttacctggagggctgatcaaccgtc

SEQ ID NO: 4571250 - DNA, 25 bp, Homo sapien
ttagccaagccaagggtcaaccaga

SEQ ID NO: 4571251 - DNA, 25 bp, Homo sapien
catcagacagtagtggccaagtgct

SEQ ID NO: 4571252 - DNA, 25 bp, Homo sapien
gaactgctcattatggcttcaggcc

SEQ ID NO: 4571253 - DNA, 25 bp, Homo sapien
tgccaactgcctgccctgaatgaag

SEQ ID NO: 4571254 - DNA, 25 bp, Homo sapien
ccttctggctttaagagggcagtca

SEQ ID NO: 4571255 - DNA, 25 bp, Homo sapien
aacaccggccgctgaaactgaagga

SEQ ID NO: 4571256 - DNA, 25 bp, Homo sapien
cagctgaaagcttcacaaagtacag

SEQ ID NO: 4571257 - DNA, 25 bp, Homo sapien
tggaaggaacgcctgggtggctgtg

SEQ ID NO: 4571258 - DNA, 25 bp, Homo sapien
gtcttcagagaccacaaccagggta

SEQ ID NO: 4571259 - DNA, 25 bp, Homo sapien
aaagtacaggcctgcccagtcttca

SEQ ID NO: 4571260 - DNA, 25 bp, Homo sapien
agaacagacaggctactcccactgg

SEQ ID NO: 4571261 - DNA, 25 bp, Homo sapien
acagacaggctactcccactggcag

SEQ ID NO: 4571262 - DNA, 25 bp, Homo sapien
gccagaacagacaggctactcccac

SEQ ID NO: 4571263 - DNA, 25 bp, Homo sapien
aacagacaggctactcccactggca

SEQ ID NO: 4571264 - DNA, 25 bp, Homo sapien
cacacctaagtgagtgctattggac

SEQ ID NO: 4571265 - DNA, 25 bp, Homo sapien
tgggctctgtacaccgtcaatgctg

SEQ ID NO: 4571266 - DNA, 25 bp, Homo sapien
ctctggcagggggtatggacatata

SEQ ID NO: 4571267 - DNA, 25 bp, Homo sapien
gacatataaaggagcactgaccaga

SEQ ID NO: 4571268 - DNA, 25 bp, Homo sapien
tagaatctaaccttcagggtccgtc

SEQ ID NO: 4571269 - DNA, 25 bp, Homo sapien
gctagggtcacggagcaactgctat

SEQ ID NO: 4571270 - DNA, 25 bp, Homo sapien
caactgctatgggaaaggtgagcca

SEQ ID NO: 4571271 - DNA, 25 bp, Homo sapien
tttccgtgctaacaacaagctctgg

SEQ ID NO: 4571272 - DNA, 25 bp, Homo sapien
tccctgcagtgtatgtgctatgctc

SEQ ID NO: 4571273 - DNA, 25 bp, Homo sapien
ccctgcagtgtatgtgctatgctcc

SEQ ID NO: 4571274 - DNA, 25 bp, Homo sapien
tcatcacacactagagctggagaga

SEQ ID NO: 4571275 - DNA, 25 bp, Homo sapien
tcaccaaggatctcgggcaagctag

SEQ ID NO: 4571276 - DNA, 25 bp, Homo sapien
tgacacacggcagtggagccttgat

SEQ ID NO: 4571277 - DNA, 25 bp, Homo sapien
tattaaagggagactgtgaatgtcc

SEQ ID NO: 4571278 - DNA, 25 bp, Homo sapien
gagaggcctcacaaaggtaccaagg

SEQ ID NO: 4571279 - DNA, 25 bp, Homo sapien
taatttgtaggtccaagccagtcag

SEQ ID NO: 4571280 - DNA, 25 bp, Homo sapien
caggaatgcgtgtacataccaggga

SEQ ID NO: 4571281 - DNA, 25 bp, Homo sapien
gcaccaggaacgttggaaggcaccc

SEQ ID NO: 4571282 - DNA, 25 bp, Homo sapien
aattaatttggacccaagctctggg

SEQ ID NO: 4571283 - DNA, 25 bp, Homo sapien
tctttccaatggtattgaagaaggg

SEQ ID NO: 4571284 - DNA, 25 bp, Homo sapien
ctctgaaagctcaagcagatgtctt

SEQ ID NO: 4571285 - DNA, 25 bp, Homo sapien
caatgtgatgtaattaatttggacc

SEQ ID NO: 4571286 - DNA, 25 bp, Homo sapien
tacagaactctagacgagaagtgct

SEQ ID NO: 4571287 - DNA, 25 bp, Homo sapien
tcaggcacaagacgctagagggaaa

SEQ ID NO: 4571288 - DNA, 25 bp, Homo sapien
cattccccaggaaacacgcatggta

SEQ ID NO: 4571289 - DNA, 25 bp, Homo sapien
tcaactacaagatacacagaaggct

SEQ ID NO: 4571290 - DNA, 25 bp, Homo sapien
ttttgcagtgcgagaacccggctgt

SEQ ID NO: 4571291 - DNA, 25 bp, Homo sapien
tctcacgtgattctggtaatgggcc

SEQ ID NO: 4571292 - DNA, 25 bp, Homo sapien
gcttggcctacccttaaagagttgc

SEQ ID NO: 4571293 - DNA, 25 bp, Homo sapien
tacggtggcaccactccaaagctgg

SEQ ID NO: 4571294 - DNA, 25 bp, Homo sapien
tcagctcgtgaggtgcttaaccagc

SEQ ID NO: 4571295 - DNA, 25 bp, Homo sapien
tcctaagtcaacatccggagaaagg

SEQ ID NO: 4571296 - DNA, 25 bp, Homo sapien
gacgaattgcctggctcctaagtca

SEQ ID NO: 4571297 - DNA, 25 bp, Homo sapien
tttctgcacagataccagagttcag

SEQ ID NO: 4571298 - DNA, 25 bp, Homo sapien
cacccccgccaaaagaacctcatgt

SEQ ID NO: 4571299 - DNA, 25 bp, Homo sapien
cggatcgacaactcttccctcccgg

SEQ ID NO: 4571300 - DNA, 25 bp, Homo sapien
ttccccaacggatcgacaactcttc

SEQ ID NO: 4571301 - DNA, 25 bp, Homo sapien
tcagggccactagagtcgcgtgcgc

SEQ ID NO: 4571302 - DNA, 25 bp, Homo sapien
gcgatcggttagtccttaaggccac

SEQ ID NO: 4571303 - DNA, 25 bp, Homo sapien
ttaactacgtctgagcgcctgcagg

SEQ ID NO: 4571304 - DNA, 25 bp, Homo sapien
acttccgccgaaagagcaaacacca

SEQ ID NO: 4571305 - DNA, 25 bp, Homo sapien
gcctgcaggaggaacggcgaaaccc

SEQ ID NO: 4571306 - DNA, 25 bp, Homo sapien
ttgccatgcccgcataaacgtggac

SEQ ID NO: 4571307 - DNA, 25 bp, Homo sapien
tgcgtgtttgccatgcccgcataaa

SEQ ID NO: 4571308 - DNA, 25 bp, Homo sapien
gcataaacgtggacccagccagtac

SEQ ID NO: 4571309 - DNA, 25 bp, Homo sapien
ctagagctgcgtgtttgccatgccc

SEQ ID NO: 4571310 - DNA, 25 bp, Homo sapien
cgggcagctcgcgtcctgacaaagt

SEQ ID NO: 4571311 - DNA, 25 bp, Homo sapien
gcgtcctgacaaagtttcccgtgcc

SEQ ID NO: 4571312 - DNA, 25 bp, Homo sapien
catttattaagcaggcgccgaatgg

SEQ ID NO: 4571313 - DNA, 25 bp, Homo sapien
ccatttattaagcaggcgccgaatg

SEQ ID NO: 4571314 - DNA, 25 bp, Homo sapien
gcaccgggacgtagcctttgggcaa

SEQ ID NO: 4571315 - DNA, 25 bp, Homo sapien
gacgtagcctttgggcaacttgcac

SEQ ID NO: 4571316 - DNA, 25 bp, Homo sapien
tttgggcaacttgcaccagcgatcg

SEQ ID NO: 4571317 - DNA, 25 bp, Homo sapien
cctttgggcaacttgcaccagcgat

SEQ ID NO: 4571318 - DNA, 25 bp, Homo sapien
ttaatcttccccccagacggagtca

SEQ ID NO: 4571319 - DNA, 25 bp, Homo sapien
cccccagacggagtcacgggagcag

SEQ ID NO: 4571320 - DNA, 25 bp, Homo sapien
tcctcctcctccctcgttaatcttc

SEQ ID NO: 4571321 - DNA, 25 bp, Homo sapien
tttgttgttaaatccaggaggcagc

SEQ ID NO: 4571322 - DNA, 25 bp, Homo sapien
gcacacgcacaggtagtcacacacc

SEQ ID NO: 4571323 - DNA, 25 bp, Homo sapien
ggagcacacgcacaggtagtcacac

SEQ ID NO: 4571324 - DNA, 25 bp, Homo sapien
gagcacacgcacaggtagtcacaca

SEQ ID NO: 4571325 - DNA, 25 bp, Homo sapien
acacgcacaggtagtcacacaccaa

SEQ ID NO: 4571326 - DNA, 25 bp, Homo sapien
agagggcgtcctgttccgcagctct

SEQ ID NO: 4571327 - DNA, 25 bp, Homo sapien
tgttccgcagctctaaatgaatccg

SEQ ID NO: 4571328 - DNA, 25 bp, Homo sapien
agctctaaatgaatccgtctgccca

SEQ ID NO: 4571329 - DNA, 25 bp, Homo sapien
aatgaatccgtctgcccatctccat

SEQ ID NO: 4571330 - DNA, 25 bp, Homo sapien
cgcgccggcggaattcaatcaataa

SEQ ID NO: 4571331 - DNA, 25 bp, Homo sapien
cccgcgccggcggaattcaatcaat

SEQ ID NO: 4571332 - DNA, 25 bp, Homo sapien
ctcccgcgccggcggaattcaatca

SEQ ID NO: 4571333 - DNA, 25 bp, Homo sapien
ccgcgccggcggaattcaatcaata

SEQ ID NO: 4571334 - DNA, 25 bp, Homo sapien
cagctccgctcggttctcgagcccc

SEQ ID NO: 4571335 - DNA, 25 bp, Homo sapien
aaggctcaaccagctccgctcggtt

SEQ ID NO: 4571336 - DNA, 25 bp, Homo sapien
ggactttgaaggctcaaccagctcc

SEQ ID NO: 4571337 - DNA, 25 bp, Homo sapien
ctttgaaggctcaaccagctccgct

SEQ ID NO: 4571338 - DNA, 25 bp, Homo sapien
aacagccaatggcagtggcggcggg

SEQ ID NO: 4571339 - DNA, 25 bp, Homo sapien
gggaagggaccaatgggcgggctgc

SEQ ID NO: 4571340 - DNA, 25 bp, Homo sapien
aatcgccgccgagggtctccgggca

SEQ ID NO: 4571341 - DNA, 25 bp, Homo sapien
cagccggccagggaggctcggccat

SEQ ID NO: 4571342 - DNA, 25 bp, Homo sapien
gactctgcctaaactaagtgttctg

SEQ ID NO: 4571343 - DNA, 25 bp, Homo sapien
caagagaccgtaccacctatttagg

SEQ ID NO: 4571344 - DNA, 25 bp, Homo sapien
gctgtgaaggtttcctgatgatcca

SEQ ID NO: 4571345 - DNA, 25 bp, Homo sapien
aagtgttctggtgctaggtgaccaa

SEQ ID NO: 4571346 - DNA, 25 bp, Homo sapien
ctgtggtgggctccgtgcacaccgc

SEQ ID NO: 4571347 - DNA, 25 bp, Homo sapien
tctgcgctgcggctgtggtgggctc

SEQ ID NO: 4571348 - DNA, 25 bp, Homo sapien
cacaccgcgctaggctcatagggcg

SEQ ID NO: 4571349 - DNA, 25 bp, Homo sapien
tcaggaggacaggcggctctgcgct

SEQ ID NO: 4571350 - DNA, 25 bp, Homo sapien
ctggcaggtccagagagcggcgtgg

SEQ ID NO: 4571351 - DNA, 25 bp, Homo sapien
tccagagagcggcgtgggagcagct

SEQ ID NO: 4571352 - DNA, 25 bp, Homo sapien
ccagagagcggcgtgggagcagctg

SEQ ID NO: 4571353 - DNA, 25 bp, Homo sapien
caggtccagagagcggcgtgggagc

SEQ ID NO: 4571354 - DNA, 25 bp, Homo sapien
tgttgtctccgctcctgaagttgcc

SEQ ID NO: 4571355 - DNA, 25 bp, Homo sapien
gttgtctccgctcctgaagttgccc

SEQ ID NO: 4571356 - DNA, 25 bp, Homo sapien
cacagataccgccagatttgtcctt

SEQ ID NO: 4571357 - DNA, 25 bp, Homo sapien
tctgcctcacagataccgccagatt

SEQ ID NO: 4571358 - DNA, 25 bp, Homo sapien
aaagagctcgctagaactggtcgca

SEQ ID NO: 4571359 - DNA, 25 bp, Homo sapien
ttcgcagcgagatggagcaagtgct

SEQ ID NO: 4571360 - DNA, 25 bp, Homo sapien
gaagccccagccagattcttaatgc

SEQ ID NO: 4571361 - DNA, 25 bp, Homo sapien
gatgttggtaccaagaccaggctac

SEQ ID NO: 4571362 - DNA, 25 bp, Homo sapien
caaaatttagccatatttctatata

SEQ ID NO: 4571363 - DNA, 25 bp, Homo sapien
cagaagctgtctgtgaatggctcta

SEQ ID NO: 4571364 - DNA, 25 bp, Homo sapien
ttgcatggtacaagatcaaaacaca

SEQ ID NO: 4571365 - DNA, 25 bp, Homo sapien
gtctctctctagacaccatccaagt

SEQ ID NO: 4571366 - DNA, 25 bp, Homo sapien
aaggaggtgccaaccagtggacttt

SEQ ID NO: 4571367 - DNA, 25 bp, Homo sapien
caccaagacggcatgtgaaggaggt

SEQ ID NO: 4571368 - DNA, 25 bp, Homo sapien
tggtcagggtcaccaagacggcatg

SEQ ID NO: 4571369 - DNA, 25 bp, Homo sapien
tcaaagacgtgaagacacggagagc

SEQ ID NO: 4571370 - DNA, 25 bp, Homo sapien
tgtgacagtgtggtgttgaaaatca

SEQ ID NO: 4571371 - DNA, 25 bp, Homo sapien
ctgtgacagtgtggtgttgaaaatc

SEQ ID NO: 4571372 - DNA, 25 bp, Homo sapien
acagtgtggtgttgaaaatcaacat

SEQ ID NO: 4571373 - DNA, 25 bp, Homo sapien
tgacagtgtggtgttgaaaatcaac

SEQ ID NO: 4571374 - DNA, 25 bp, Homo sapien
cctgcatcctctggtaagtttcatt

SEQ ID NO: 4571375 - DNA, 25 bp, Homo sapien
tgttccggattctactccagcagcg

SEQ ID NO: 4571376 - DNA, 25 bp, Homo sapien
tttggcaatcttgggcagggaccac

SEQ ID NO: 4571377 - DNA, 25 bp, Homo sapien
tcagtctttctggtgttccggattc

SEQ ID NO: 4571378 - DNA, 25 bp, Homo sapien
gactaggtgcttcctcctatgttat

SEQ ID NO: 4571379 - DNA, 25 bp, Homo sapien
caaccttctgaatgagtgaaaatga

SEQ ID NO: 4571380 - DNA, 25 bp, Homo sapien
gcttcaagaagactaattagcattc

SEQ ID NO: 4571381 - DNA, 25 bp, Homo sapien
aatgagttgagtgtctgttatggac

SEQ ID NO: 4571382 - DNA, 25 bp, Homo sapien
ccaaagcagtagctgctgagggagc

SEQ ID NO: 4571383 - DNA, 25 bp, Homo sapien
gctctcaggggatacaagagaaaga

SEQ ID NO: 4571384 - DNA, 25 bp, Homo sapien
ctcaagatgagggatggtgatccag

SEQ ID NO: 4571385 - DNA, 25 bp, Homo sapien
gaaactgaccggaaccaaagcagta

SEQ ID NO: 4571386 - DNA, 25 bp, Homo sapien
gctctgatttccacgagaaggtcat

SEQ ID NO: 4571387 - DNA, 25 bp, Homo sapien
tgatttccacgagaaggtcatttga

SEQ ID NO: 4571388 - DNA, 25 bp, Homo sapien
caggggtaggccacatttcatctca

SEQ ID NO: 4571389 - DNA, 25 bp, Homo sapien
ctgctctgatttccacgagaaggtc

SEQ ID NO: 4571390 - DNA, 25 bp, Homo sapien
gacacactgcgttagaggacctggg

SEQ ID NO: 4571391 - DNA, 25 bp, Homo sapien
aaggcagttctaggcgggctcagct

SEQ ID NO: 4571392 - DNA, 25 bp, Homo sapien
caaagatgagagttcatgagggcct

SEQ ID NO: 4571393 - DNA, 25 bp, Homo sapien
taggacgtctcccaggtgtctgaga

SEQ ID NO: 4571394 - DNA, 25 bp, Homo sapien
cattggggaatttaaaatccagagt

SEQ ID NO: 4571395 - DNA, 25 bp, Homo sapien
gccattggggaatttaaaatccaga

SEQ ID NO: 4571396 - DNA, 25 bp, Homo sapien
ttgccattggggaatttaaaatcca

SEQ ID NO: 4571397 - DNA, 25 bp, Homo sapien
tgccattggggaatttaaaatccag

SEQ ID NO: 4571398 - DNA, 25 bp, Homo sapien
gtgaactccttgtgggctttgtctc

SEQ ID NO: 4571399 - DNA, 25 bp, Homo sapien
cctagtgatcagaataagtgttggt

SEQ ID NO: 4571400 - DNA, 25 bp, Homo sapien
ccttgtgggctttgtctccccagtg

SEQ ID NO: 4571401 - DNA, 25 bp, Homo sapien
cccagtgcctagtgatcagaataag

SEQ ID NO: 4571402 - DNA, 25 bp, Homo sapien
taaaaggtgtaaagcaagggcatgt

SEQ ID NO: 4571403 - DNA, 25 bp, Homo sapien
atgggcctggacgtcatgggtcaac

SEQ ID NO: 4571404 - DNA, 25 bp, Homo sapien
ctaaaatcaggcgatgagaccagac

SEQ ID NO: 4571405 - DNA, 25 bp, Homo sapien
tgggtcaacacctttaacagctgtg

SEQ ID NO: 4571406 - DNA, 25 bp, Homo sapien
ttcactttctctgggcacgggttgt

SEQ ID NO: 4571407 - DNA, 25 bp, Homo sapien
tcagttgccaccagatcccttttca

SEQ ID NO: 4571408 - DNA, 25 bp, Homo sapien
tgactgctttgaactgcgtattcag

SEQ ID NO: 4571409 - DNA, 25 bp, Homo sapien
caggcagggaaagtgcctatgacaa

SEQ ID NO: 4571410 - DNA, 25 bp, Homo sapien
ttacaatgaaaatgcatttgcatat

SEQ ID NO: 4571411 - DNA, 25 bp, Homo sapien
caatgaaaatgcatttgcatattcc

SEQ ID NO: 4571412 - DNA, 25 bp, Homo sapien
acaatgaaaatgcatttgcatattc

SEQ ID NO: 4571413 - DNA, 25 bp, Homo sapien
tacaatgaaaatgcatttgcatatt

SEQ ID NO: 4571414 - DNA, 25 bp, Homo sapien
cctcgctgtggtctttcgcttgctt

SEQ ID NO: 4571415 - DNA, 25 bp, Homo sapien
cattctcgccttttcccgctggatg

SEQ ID NO: 4571416 - DNA, 25 bp, Homo sapien
gcattgcccctagggtgctcggaga

SEQ ID NO: 4571417 - DNA, 25 bp, Homo sapien
taaagtaacagcgaggaaccgcctc

SEQ ID NO: 4571418 - DNA, 25 bp, Homo sapien
cacctcttctctcctgaagcagtag

SEQ ID NO: 4571419 - DNA, 25 bp, Homo sapien
tcacctcttctctcctgaagcagta

SEQ ID NO: 4571420 - DNA, 25 bp, Homo sapien
ctcttctctcctgaagcagtagcta

SEQ ID NO: 4571421 - DNA, 25 bp, Homo sapien
cctcttctctcctgaagcagtagct

SEQ ID NO: 4571422 - DNA, 25 bp, Homo sapien
ccggttgcgacgtgctggttttctg

SEQ ID NO: 4571423 - DNA, 25 bp, Homo sapien
tttgttcccgaagcaccggttgcga

SEQ ID NO: 4571424 - DNA, 25 bp, Homo sapien
ctggttttctgagagcagttggact

SEQ ID NO: 4571425 - DNA, 25 bp, Homo sapien
gggaagaacaagcacgctttgttcc

SEQ ID NO: 4571426 - DNA, 25 bp, Homo sapien
ctcttcttgggcctgcgattcctca

SEQ ID NO: 4571427 - DNA, 25 bp, Homo sapien
tcttcttgggcctgcgattcctcac

SEQ ID NO: 4571428 - DNA, 25 bp, Homo sapien
tggtaggcacattcatgggcacgta

SEQ ID NO: 4571429 - DNA, 25 bp, Homo sapien
taggcacattcatgggcacgtacca

SEQ ID NO: 4571430 - DNA, 25 bp, Homo sapien
tctggtaggcacattcatgggcacg

SEQ ID NO: 4571431 - DNA, 25 bp, Homo sapien
ttctggtaggcacattcatgggcac

SEQ ID NO: 4571432 - DNA, 25 bp, Homo sapien
ctgaggggttcacatctttccataa

SEQ ID NO: 4571433 - DNA, 25 bp, Homo sapien
ccactgaggggttcacatctttcca

SEQ ID NO: 4571434 - DNA, 25 bp, Homo sapien
tgaggggttcacatctttccataaa

SEQ ID NO: 4571435 - DNA, 25 bp, Homo sapien
cactgaggggttcacatctttccat

SEQ ID NO: 4571436 - DNA, 25 bp, Homo sapien
ggcagtttcttatcccgtcttcacg

SEQ ID NO: 4571437 - DNA, 25 bp, Homo sapien
gcagtttcttatcccgtcttcacga

SEQ ID NO: 4571438 - DNA, 25 bp, Homo sapien
tttcttatcccgtcttcacgaggag

SEQ ID NO: 4571439 - DNA, 25 bp, Homo sapien
agtttcttatcccgtcttcacgagg

SEQ ID NO: 4571440 - DNA, 25 bp, Homo sapien
tactcaggctcagggtagacagcgc

SEQ ID NO: 4571441 - DNA, 25 bp, Homo sapien
ttactcaggctcagggtagacagcg

SEQ ID NO: 4571442 - DNA, 25 bp, Homo sapien
aggctcagggtagacagcgcccttc

SEQ ID NO: 4571443 - DNA, 25 bp, Homo sapien
tcaggctcagggtagacagcgccct

SEQ ID NO: 4571444 - DNA, 25 bp, Homo sapien
gaactccgcatgagcctgatgctgc

SEQ ID NO: 4571445 - DNA, 25 bp, Homo sapien
gatgctgcctcttgcaccctgaatg

SEQ ID NO: 4571446 - DNA, 25 bp, Homo sapien
cactctctgtaggatagtgttcctg

SEQ ID NO: 4571447 - DNA, 25 bp, Homo sapien
cctgaatgtgtcagacagggaggca

SEQ ID NO: 4571448 - DNA, 25 bp, Homo sapien
tgccagcctacaggggagggacagc

SEQ ID NO: 4571449 - DNA, 25 bp, Homo sapien
tcatctgcttccaatgctctctgac

SEQ ID NO: 4571450 - DNA, 25 bp, Homo sapien
aatttcattttgctggatgaggaaa

SEQ ID NO: 4571451 - DNA, 25 bp, Homo sapien
tgcttttgttttcagggttggcaat

SEQ ID NO: 4571452 - DNA, 25 bp, Homo sapien
gaggaaattcagatcctcatctgct

SEQ ID NO: 4571453 - DNA, 25 bp, Homo sapien
ttgtctttggcatggttgggcaaca

SEQ ID NO: 4571454 - DNA, 25 bp, Homo sapien
gagaaatatcgcataatgatcttgc

SEQ ID NO: 4571455 - DNA, 25 bp, Homo sapien
ttggctctcagacaaggatggtcct

SEQ ID NO: 4571456 - DNA, 25 bp, Homo sapien
gatggtcctaccttaaatagttctc

SEQ ID NO: 4571457 - DNA, 25 bp, Homo sapien
gagggctctcctcacacaagcgctt

SEQ ID NO: 4571458 - DNA, 25 bp, Homo sapien
gcgcggagcgggagggctctcctca

SEQ ID NO: 4571459 - DNA, 25 bp, Homo sapien
cacacaagcgcttccttgccgagag

SEQ ID NO: 4571460 - DNA, 25 bp, Homo sapien
gtggctcggtctcccggctgcgcgc

SEQ ID NO: 4571461 - DNA, 25 bp, Homo sapien
caacttggtggttctctactcccgg

SEQ ID NO: 4571462 - DNA, 25 bp, Homo sapien
tcccactactgatcatcacactcca

SEQ ID NO: 4571463 - DNA, 25 bp, Homo sapien
cttggtggttctctactcccgggag

SEQ ID NO: 4571464 - DNA, 25 bp, Homo sapien
catggagcacagttaccagggacct

SEQ ID NO: 4571465 - DNA, 25 bp, Homo sapien
ggcattgggcccagaacttcatgga

SEQ ID NO: 4571466 - DNA, 25 bp, Homo sapien
gctggccaattatggtgacccgtaa

SEQ ID NO: 4571467 - DNA, 25 bp, Homo sapien
taagggattcctcgacaacattacc

SEQ ID NO: 4571468 - DNA, 25 bp, Homo sapien
tgagactcgatgataacagtatggt

SEQ ID NO: 4571469 - DNA, 25 bp, Homo sapien
ccactgaagaaggaaagacgttttg

SEQ ID NO: 4571470 - DNA, 25 bp, Homo sapien
caaatatcgtgccttaacaatgtgg

SEQ ID NO: 4571471 - DNA, 25 bp, Homo sapien
gccttccacattgcaacagcaagtt

SEQ ID NO: 4571472 - DNA, 25 bp, Homo sapien
ctaagaggatgagttgaatctatag

SEQ ID NO: 4571473 - DNA, 25 bp, Homo sapien
caaaagtttctggatgaaggtcaag

SEQ ID NO: 4571474 - DNA, 25 bp, Homo sapien
cacaagcacaactctccagacgtgg

SEQ ID NO: 4571475 - DNA, 25 bp, Homo sapien
gctacttcagttgtaaaaccagcca

SEQ ID NO: 4571476 - DNA, 25 bp, Homo sapien
accatccagcgcacagaagcaagtg

SEQ ID NO: 4571477 - DNA, 25 bp, Homo sapien
gccactgtatgccatgtgaccctgc

SEQ ID NO: 4571478 - DNA, 25 bp, Homo sapien
ttggcagtctgatgagtgctccttc

SEQ ID NO: 4571479 - DNA, 25 bp, Homo sapien
tggcagtctgatgagtgctccttcc

SEQ ID NO: 4571480 - DNA, 25 bp, Homo sapien
ccacaggctctggcggccactgtat

SEQ ID NO: 4571481 - DNA, 25 bp, Homo sapien
tggaagcaagaagcctcctaaggag

SEQ ID NO: 4571482 - DNA, 25 bp, Homo sapien
tgggttgactaggacacatggcaga

SEQ ID NO: 4571483 - DNA, 25 bp, Homo sapien
gcgattcgcgctcgagtagctgtga

SEQ ID NO: 4571484 - DNA, 25 bp, Homo sapien
gaagtctggacattcccaaaggagt

SEQ ID NO: 4571485 - DNA, 25 bp, Homo sapien
catctgtatatctatgcagtcatat

SEQ ID NO: 4571486 - DNA, 25 bp, Homo sapien
ccagcctgaattgcattcatctgta

SEQ ID NO: 4571487 - DNA, 25 bp, Homo sapien
catgaaaatctcatggaggatccac

SEQ ID NO: 4571488 - DNA, 25 bp, Homo sapien
ttttactaccaaatacctatggaga

SEQ ID NO: 4571489 - DNA, 25 bp, Homo sapien
tttatgagacagagagggtgttgca

SEQ ID NO: 4571490 - DNA, 25 bp, Homo sapien
tgattctttcgtgagttctaccgga

SEQ ID NO: 4571491 - DNA, 25 bp, Homo sapien
gcagctctgttaggttgaatgcaca

SEQ ID NO: 4571492 - DNA, 25 bp, Homo sapien
cagaaaggcaatgagtttagcagct

SEQ ID NO: 4571493 - DNA, 25 bp, Homo sapien
cctgtgcactctttcatgggatttc

SEQ ID NO: 4571494 - DNA, 25 bp, Homo sapien
ctttcatgggatttctaagcagtgc

SEQ ID NO: 4571495 - DNA, 25 bp, Homo sapien
gcactctttcatgggatttctaagc

SEQ ID NO: 4571496 - DNA, 25 bp, Homo sapien
cggccacctgtgcactctttcatgg

SEQ ID NO: 4571497 - DNA, 25 bp, Homo sapien
gggcttgcggttggcggcggaagtc

SEQ ID NO: 4571498 - DNA, 25 bp, Homo sapien
cgcggtctttaggtagagagtgtca

SEQ ID NO: 4571499 - DNA, 25 bp, Homo sapien
cctcaacctctgggatcggacgcgg

SEQ ID NO: 4571500 - DNA, 25 bp, Homo sapien
tctgacgcggtctttaggtagagag

SEQ ID NO: 4571501 - DNA, 25 bp, Homo sapien
ctgctcgtggtccactgggtatgtc

SEQ ID NO: 4571502 - DNA, 25 bp, Homo sapien
gctcgtggtccactgggtatgtctt

SEQ ID NO: 4571503 - DNA, 25 bp, Homo sapien
ggttctctttgagggcagccaacat

SEQ ID NO: 4571504 - DNA, 25 bp, Homo sapien
cagaaagatggggttctctttgagg

SEQ ID NO: 4571505 - DNA, 25 bp, Homo sapien
aaagacgccagccaaatttgcctgt

SEQ ID NO: 4571506 - DNA, 25 bp, Homo sapien
tgggaaatggtgctccaaagacgcc

SEQ ID NO: 4571507 - DNA, 25 bp, Homo sapien
cagacacctgacttttatcaccagg

SEQ ID NO: 4571508 - DNA, 25 bp, Homo sapien
tcccattgatgtcgtcattttccag

SEQ ID NO: 4571509 - DNA, 25 bp, Homo sapien
ggaatgcggcttcgcccttgttcac

SEQ ID NO: 4571510 - DNA, 25 bp, Homo sapien
atgcggcttcgcccttgttcaccag

SEQ ID NO: 4571511 - DNA, 25 bp, Homo sapien
cctgggaatgcggcttcgcccttgt

SEQ ID NO: 4571512 - DNA, 25 bp, Homo sapien
tgggaatgcggcttcgcccttgttc

SEQ ID NO: 4571513 - DNA, 25 bp, Homo sapien
ctgtattcatggtggagggttagtg

SEQ ID NO: 4571514 - DNA, 25 bp, Homo sapien
ctctgtattcatggtggagggttag

SEQ ID NO: 4571515 - DNA, 25 bp, Homo sapien
tctgtattcatggtggagggttagt

SEQ ID NO: 4571516 - DNA, 25 bp, Homo sapien
gctctttgtagaagtgaactgcctg

SEQ ID NO: 4571517 - DNA, 25 bp, Homo sapien
gctgaatagggccaaggctggtact

SEQ ID NO: 4571518 - DNA, 25 bp, Homo sapien
ggccagcaagtttcacaagggagag

SEQ ID NO: 4571519 - DNA, 25 bp, Homo sapien
caggtgagatatgccccatctggta

SEQ ID NO: 4571520 - DNA, 25 bp, Homo sapien
gattagacagggagagtaccacagg

SEQ ID NO: 4571521 - DNA, 25 bp, Homo sapien
tgccttccatgggagtgaaagtctg

SEQ ID NO: 4571522 - DNA, 25 bp, Homo sapien
tctggttcgctctcctagggctgtg

SEQ ID NO: 4571523 - DNA, 25 bp, Homo sapien
taaccctgcggaaacaagtccagca

SEQ ID NO: 4571524 - DNA, 25 bp, Homo sapien
tctacagggtaaggactggctgcat

SEQ ID NO: 4571525 - DNA, 25 bp, Homo sapien
tctcctgcatgataatacctgggct

SEQ ID NO: 4571526 - DNA, 25 bp, Homo sapien
tcacagcactgcaatgggaaccgca

SEQ ID NO: 4571527 - DNA, 25 bp, Homo sapien
gaacaaaacaggagtcgagacccag

SEQ ID NO: 4571528 - DNA, 25 bp, Homo sapien
cgagtcatcctccagatgaacctga

SEQ ID NO: 4571529 - DNA, 25 bp, Homo sapien
cagatgaacctgagctcacttaagt

SEQ ID NO: 4571530 - DNA, 25 bp, Homo sapien
gaacctgagctcacttaagtttgaa

SEQ ID NO: 4571531 - DNA, 25 bp, Homo sapien
catcctccagatgaacctgagctca

SEQ ID NO: 4571532 - DNA, 25 bp, Homo sapien
catcatgttagccaaaatggtctct

SEQ ID NO: 4571533 - DNA, 25 bp, Homo sapien
atcatgttagccaaaatggtctcta

SEQ ID NO: 4571534 - DNA, 25 bp, Homo sapien
gaagtgagactctgagctgatcagt

SEQ ID NO: 4571535 - DNA, 25 bp, Homo sapien
cagtgctggctctcaagagatgaac

SEQ ID NO: 4571536 - DNA, 25 bp, Homo sapien
gagactggtggataagttgttttaa

SEQ ID NO: 4571537 - DNA, 25 bp, Homo sapien
agaaaattcagccagcttctccctc

SEQ ID NO: 4571538 - DNA, 25 bp, Homo sapien
gatagctggagccatacttctgtgc

SEQ ID NO: 4571539 - DNA, 25 bp, Homo sapien
tcctggccacgcacatgcagatgga

SEQ ID NO: 4571540 - DNA, 25 bp, Homo sapien
cagctgctctgtatcggattcccaa

SEQ ID NO: 4571541 - DNA, 25 bp, Homo sapien
taagcttttcatgccagatgtcaac

SEQ ID NO: 4571542 - DNA, 25 bp, Homo sapien
cccagtccatgctaccctttttata

SEQ ID NO: 4571543 - DNA, 25 bp, Homo sapien
tttctagtcaacaatccattaaggc

SEQ ID NO: 4571544 - DNA, 25 bp, Homo sapien
tattaacacggtacaacaacacttc

SEQ ID NO: 4571545 - DNA, 25 bp, Homo sapien
aatttcggcctctgattttctagtc

SEQ ID NO: 4571546 - DNA, 25 bp, Homo sapien
aagtcagcgtgagtacgaggccgcc

SEQ ID NO: 4571547 - DNA, 25 bp, Homo sapien
cagttggccaacttagtgcgggtcg

SEQ ID NO: 4571548 - DNA, 25 bp, Homo sapien
ctgattggcccgtttgaaatgcgcc

SEQ ID NO: 4571549 - DNA, 25 bp, Homo sapien
ttcagcgtcggtcgcctaggagaca

SEQ ID NO: 4571550 - DNA, 25 bp, Homo sapien
tcaatctcatactgaccacgccgtg

SEQ ID NO: 4571551 - DNA, 25 bp, Homo sapien
cttcaatctcatactgaccacgccg

SEQ ID NO: 4571552 - DNA, 25 bp, Homo sapien
caatctcatactgaccacgccgtgt

SEQ ID NO: 4571553 - DNA, 25 bp, Homo sapien
aatctcatactgaccacgccgtgta

SEQ ID NO: 4571554 - DNA, 25 bp, Homo sapien
ggtcatgatcttagaaacatagttg

SEQ ID NO: 4571555 - DNA, 25 bp, Homo sapien
gataacatctccttcttccaaggtc

SEQ ID NO: 4571556 - DNA, 25 bp, Homo sapien
ctggtcaagataacatctccttctt

SEQ ID NO: 4571557 - DNA, 25 bp, Homo sapien
gatggaaaaagtcatggaggatgtc

SEQ ID NO: 4571558 - DNA, 25 bp, Homo sapien
gcaggaggccataaagctcttggcc

SEQ ID NO: 4571559 - DNA, 25 bp, Homo sapien
ctggcagtaatgtccaggcacaggg

SEQ ID NO: 4571560 - DNA, 25 bp, Homo sapien
ggaggccataaagctcttggccaga

SEQ ID NO: 4571561 - DNA, 25 bp, Homo sapien
gccagagcctcagattgggaggatc

SEQ ID NO: 4571562 - DNA, 25 bp, Homo sapien
cgtggtgcaggttgcagctgtacgc

SEQ ID NO: 4571563 - DNA, 25 bp, Homo sapien
agctgcgcggccatgcttgcccatc

SEQ ID NO: 4571564 - DNA, 25 bp, Homo sapien
gtgcaggttgcagctgtacgcgggc

SEQ ID NO: 4571565 - DNA, 25 bp, Homo sapien
gattacgaacaatgtcaccagggcc

SEQ ID NO: 4571566 - DNA, 25 bp, Homo sapien
caatcttgagttagctaccgggtct

SEQ ID NO: 4571567 - DNA, 25 bp, Homo sapien
tgggacatagtaagcgctctacggc

SEQ ID NO: 4571568 - DNA, 25 bp, Homo sapien
tcatggaaccaacggaggcgaagtc

SEQ ID NO: 4571569 - DNA, 25 bp, Homo sapien
tgcacgacgatgaggtgacagtcac

SEQ ID NO: 4571570 - DNA, 25 bp, Homo sapien
gggtgaggccctcacttcatccggc

SEQ ID NO: 4571571 - DNA, 25 bp, Homo sapien
tcggccctcattctgcacgacgatg

SEQ ID NO: 4571572 - DNA, 25 bp, Homo sapien
cttcatccggcgactagcaccgcgt

SEQ ID NO: 4571573 - DNA, 25 bp, Homo sapien
ggtgactttcggctctccatgcggt

SEQ ID NO: 4571574 - DNA, 25 bp, Homo sapien
tgtaacttaaaaatagccgcgtgac

SEQ ID NO: 4571575 - DNA, 25 bp, Homo sapien
tgtagaaaagctcttccgcagtgct

SEQ ID NO: 4571576 - DNA, 25 bp, Homo sapien
tctctctcagggacacttactcgga

SEQ ID NO: 4571577 - DNA, 25 bp, Homo sapien
cagccggtgtaaatgttgagccttt

SEQ ID NO: 4571578 - DNA, 25 bp, Homo sapien
taaagcagccggtgtaaatgttgag

SEQ ID NO: 4571579 - DNA, 25 bp, Homo sapien
aagcagccggtgtaaatgttgagcc

SEQ ID NO: 4571580 - DNA, 25 bp, Homo sapien
aatgttgagcctttttggcctggct

SEQ ID NO: 4571581 - DNA, 25 bp, Homo sapien
ctggccaacgtcaacattgggagcc

SEQ ID NO: 4571582 - DNA, 25 bp, Homo sapien
tcatctgcaatgtaggggccggtgg

SEQ ID NO: 4571583 - DNA, 25 bp, Homo sapien
ccaacgtcaacattgggagcctcat

SEQ ID NO: 4571584 - DNA, 25 bp, Homo sapien
catctgcaatgtaggggccggtgga

SEQ ID NO: 4571585 - DNA, 25 bp, Homo sapien
gctttcagcctattctgccatgaca

SEQ ID NO: 4571586 - DNA, 25 bp, Homo sapien
ccattgccggatgtgagatttagac

SEQ ID NO: 4571587 - DNA, 25 bp, Homo sapien
tataaggtgtgtcccctacactggg

SEQ ID NO: 4571588 - DNA, 25 bp, Homo sapien
ggagggtaatacagaccagctttag

SEQ ID NO: 4571589 - DNA, 25 bp, Homo sapien
aagagccaacctcacgctcagcaga

SEQ ID NO: 4571590 - DNA, 25 bp, Homo sapien
acaccaagagccaacctcacgctca

SEQ ID NO: 4571591 - DNA, 25 bp, Homo sapien
tgcattctctccctcggaggaagag

SEQ ID NO: 4571592 - DNA, 25 bp, Homo sapien
gaactacagaattgatgcctgaaat

SEQ ID NO: 4571593 - DNA, 25 bp, Homo sapien
tgttacttcccttttgcatacagta

SEQ ID NO: 4571594 - DNA, 25 bp, Homo sapien
caaatctccaggtctagtaggtcca

SEQ ID NO: 4571595 - DNA, 25 bp, Homo sapien
cagtacaaggaacatggctggcatc

SEQ ID NO: 4571596 - DNA, 25 bp, Homo sapien
tgaaagaggtaagtgaacattcaat

SEQ ID NO: 4571597 - DNA, 25 bp, Homo sapien
tggaagcgtacccaggtccatggct

SEQ ID NO: 4571598 - DNA, 25 bp, Homo sapien
ctagctctgcgaacctaatgcgcgg

SEQ ID NO: 4571599 - DNA, 25 bp, Homo sapien
taatgcgcggtcttgcaagcctagc

SEQ ID NO: 4571600 - DNA, 25 bp, Homo sapien
acttccttctggacacggagtcccg

SEQ ID NO: 4571601 - DNA, 25 bp, Homo sapien
agcagaagcaaaggcgtggcacctg

SEQ ID NO: 4571602 - DNA, 25 bp, Homo sapien
tgggttctagccgttcccagcgcct

SEQ ID NO: 4571603 - DNA, 25 bp, Homo sapien
cagtagtgggttctagccgttccca

SEQ ID NO: 4571604 - DNA, 25 bp, Homo sapien
cacttcccagtagtgggttctagcc

SEQ ID NO: 4571605 - DNA, 25 bp, Homo sapien
ggtctcgagcaccagatccctcttc

SEQ ID NO: 4571606 - DNA, 25 bp, Homo sapien
ttgagagaacagtgaagaatgggct

SEQ ID NO: 4571607 - DNA, 25 bp, Homo sapien
tcctttcctgactccatgtttggtg

SEQ ID NO: 4571608 - DNA, 25 bp, Homo sapien
tggcctgatgtgtaggcttggctaa

SEQ ID NO: 4571609 - DNA, 25 bp, Homo sapien
gtttggtgcctgcatgccttgctcc

SEQ ID NO: 4571610 - DNA, 25 bp, Homo sapien
aaacaagcaaagctgcgtggagctg

SEQ ID NO: 4571611 - DNA, 25 bp, Homo sapien
gcttcggggctgacagggatgagaa

SEQ ID NO: 4571612 - DNA, 25 bp, Homo sapien
gctgcgtggagctggtagcttcggg

SEQ ID NO: 4571613 - DNA, 25 bp, Homo sapien
tgtcaagagggcattggtacaagtg

SEQ ID NO: 4571614 - DNA, 25 bp, Homo sapien
gagtagaagatgcaccgtgttagct

SEQ ID NO: 4571615 - DNA, 25 bp, Homo sapien
tttgagagtagaagatgcaccgtgt

SEQ ID NO: 4571616 - DNA, 25 bp, Homo sapien
agaagatgcaccgtgttagcttttc

SEQ ID NO: 4571617 - DNA, 25 bp, Homo sapien
gagagtagaagatgcaccgtgttag

SEQ ID NO: 4571618 - DNA, 25 bp, Homo sapien
tctcgaggtgcaaatccagtaaccc

SEQ ID NO: 4571619 - DNA, 25 bp, Homo sapien
cgtaatttagaatcatgcagcagcc

SEQ ID NO: 4571620 - DNA, 25 bp, Homo sapien
gagcgtcgccccacacgtaatttag

SEQ ID NO: 4571621 - DNA, 25 bp, Homo sapien
tgagggaccctatgttctcgaggtg

SEQ ID NO: 4571622 - DNA, 25 bp, Homo sapien
ccttctctcccttggatgtccaaat

SEQ ID NO: 4571623 - DNA, 25 bp, Homo sapien
aatacatttccttctgttttgcaga

SEQ ID NO: 4571624 - DNA, 25 bp, Homo sapien
tttgtttttggatgccctctccttc

SEQ ID NO: 4571625 - DNA, 25 bp, Homo sapien
ttttgcagagcagttcagcattgct

SEQ ID NO: 4571626 - DNA, 25 bp, Homo sapien
tttcctctgcaatggcgtcttctct

SEQ ID NO: 4571627 - DNA, 25 bp, Homo sapien
tgagcatccgtgcaatcggcttctc

SEQ ID NO: 4571628 - DNA, 25 bp, Homo sapien
tggctttgagcatccgtgcaatcgg

SEQ ID NO: 4571629 - DNA, 25 bp, Homo sapien
ggagtttggctttgagcatccgtgc

SEQ ID NO: 4571630 - DNA, 25 bp, Homo sapien
ggagaactcgggagtttggctttga

SEQ ID NO: 4571631 - DNA, 25 bp, Homo sapien
ttcaggtatgccataaagactcccc

SEQ ID NO: 4571632 - DNA, 25 bp, Homo sapien
caggtatgccataaagactccccag

SEQ ID NO: 4571633 - DNA, 25 bp, Homo sapien
ggtatgccataaagactccccagtt

SEQ ID NO: 4571634 - DNA, 25 bp, Homo sapien
tttttcaggtatgccataaagactc

SEQ ID NO: 4571635 - DNA, 25 bp, Homo sapien
gtgctggcagaactagttttcaaag

SEQ ID NO: 4571636 - DNA, 25 bp, Homo sapien
gctggcagaactagttttcaaagcc

SEQ ID NO: 4571637 - DNA, 25 bp, Homo sapien
agtgctggcagaactagttttcaaa

SEQ ID NO: 4571638 - DNA, 25 bp, Homo sapien
tgctggcagaactagttttcaaagc

SEQ ID NO: 4571639 - DNA, 25 bp, Homo sapien
gattgccgcggtgatcttggtctct

SEQ ID NO: 4571640 - DNA, 25 bp, Homo sapien
catatgacgtagaagccgtcctgga

SEQ ID NO: 4571641 - DNA, 25 bp, Homo sapien
cccggttgctaagccccatatgacg

SEQ ID NO: 4571642 - DNA, 25 bp, Homo sapien
cagactgatacccttgattgccgcg

SEQ ID NO: 4571643 - DNA, 25 bp, Homo sapien
ccatgcttggttggttggctactcc

SEQ ID NO: 4571644 - DNA, 25 bp, Homo sapien
tgcttggttggttggctactcccac

SEQ ID NO: 4571645 - DNA, 25 bp, Homo sapien
catgcttggttggttggctactccc

SEQ ID NO: 4571646 - DNA, 25 bp, Homo sapien
gccatgcttggttggttggctactc

SEQ ID NO: 4571647 - DNA, 25 bp, Homo sapien
acttctgtgaaattgcccgacccat

SEQ ID NO: 4571648 - DNA, 25 bp, Homo sapien
gcccgacccatgcatgattaaatat

SEQ ID NO: 4571649 - DNA, 25 bp, Homo sapien
aagactgcttttaattacttctgtg

SEQ ID NO: 4571650 - DNA, 25 bp, Homo sapien
tattcataatgtagaacgaggcatt

SEQ ID NO: 4571651 - DNA, 25 bp, Homo sapien
cactaataaatttctggtaatgggc

SEQ ID NO: 4571652 - DNA, 25 bp, Homo sapien
taaatttctggtaatgggccacagc

SEQ ID NO: 4571653 - DNA, 25 bp, Homo sapien
ggtaatgggccacagcttttcctga

SEQ ID NO: 4571654 - DNA, 25 bp, Homo sapien
aacagcactaataaatttctggtaa

SEQ ID NO: 4571655 - DNA, 25 bp, Homo sapien
taatgcacggctcatagcaggtgtg

SEQ ID NO: 4571656 - DNA, 25 bp, Homo sapien
gagggaagcctttagactcaaacag

SEQ ID NO: 4571657 - DNA, 25 bp, Homo sapien
tgtttctcttatacacgggacctga

SEQ ID NO: 4571658 - DNA, 25 bp, Homo sapien
tgagggactggctcatgggactcct

SEQ ID NO: 4571659 - DNA, 25 bp, Homo sapien
tactgatgctggtggaattaggtcc

SEQ ID NO: 4571660 - DNA, 25 bp, Homo sapien
tggaccccttggatcactcagcagt

SEQ ID NO: 4571661 - DNA, 25 bp, Homo sapien
tgtagtgaagccctgacaagaacac

SEQ ID NO: 4571662 - DNA, 25 bp, Homo sapien
catgttaccaatacaggaggcaacc

SEQ ID NO: 4571663 - DNA, 25 bp, Homo sapien
actgtctgtagtgttgtttctcacc

SEQ ID NO: 4571664 - DNA, 25 bp, Homo sapien
tgtctgtagtgttgtttctcaccct

SEQ ID NO: 4571665 - DNA, 25 bp, Homo sapien
cactgtctgtagtgttgtttctcac

SEQ ID NO: 4571666 - DNA, 25 bp, Homo sapien
gtctgtagtgttgtttctcaccctc

SEQ ID NO: 4571667 - DNA, 25 bp, Homo sapien
cccgtttatgggtggaattccagca

SEQ ID NO: 4571668 - DNA, 25 bp, Homo sapien
ctgggaggagaagaccccgtttatg

SEQ ID NO: 4571669 - DNA, 25 bp, Homo sapien
aagccagagctttggtgacagcggt

SEQ ID NO: 4571670 - DNA, 25 bp, Homo sapien
ggcgggaacactggccttgcttcct

SEQ ID NO: 4571671 - DNA, 25 bp, Homo sapien
ggacctcggagctctaatgagttga

SEQ ID NO: 4571672 - DNA, 25 bp, Homo sapien
tgagagcttttatgggagcccaggc

SEQ ID NO: 4571673 - DNA, 25 bp, Homo sapien
aaatgtggtagtctttgtctgggct

SEQ ID NO: 4571674 - DNA, 25 bp, Homo sapien
gcatgctgcataatccttttggaac

SEQ ID NO: 4571675 - DNA, 25 bp, Homo sapien
gaaaattgcatccagtgaccgactg

SEQ ID NO: 4571676 - DNA, 25 bp, Homo sapien
gatgaaaatccggagaggtagcttg

SEQ ID NO: 4571677 - DNA, 25 bp, Homo sapien
aaggcaaaatatggttctgagtgtc

SEQ ID NO: 4571678 - DNA, 25 bp, Homo sapien
gaggtagcttggagtagaaaattgc

SEQ ID NO: 4571679 - DNA, 25 bp, Homo sapien
ggcgatgtgcaatttagcaacttgg

SEQ ID NO: 4571680 - DNA, 25 bp, Homo sapien
gttgctggcgatgtgcaatttagca

SEQ ID NO: 4571681 - DNA, 25 bp, Homo sapien
ggagttgctggcgatgtgcaattta

SEQ ID NO: 4571682 - DNA, 25 bp, Homo sapien
gctggcgatgtgcaatttagcaact

SEQ ID NO: 4571683 - DNA, 25 bp, Homo sapien
tgcatttgggactgctgccctccct

SEQ ID NO: 4571684 - DNA, 25 bp, Homo sapien
ggtcctgcatttgggactgctgccc

SEQ ID NO: 4571685 - DNA, 25 bp, Homo sapien
atttgggactgctgccctccctcat

SEQ ID NO: 4571686 - DNA, 25 bp, Homo sapien
tcctgcatttgggactgctgccctc

SEQ ID NO: 4571687 - DNA, 25 bp, Homo sapien
tctttaattgatatcaatggactgg

SEQ ID NO: 4571688 - DNA, 25 bp, Homo sapien
gactggtgctatagagctcattctg

SEQ ID NO: 4571689 - DNA, 25 bp, Homo sapien
ggtgctatagagctcattctgtatt

SEQ ID NO: 4571690 - DNA, 25 bp, Homo sapien
tatcaatggactggtgctatagagc

SEQ ID NO: 4571691 - DNA, 25 bp, Homo sapien
cgtgacagccgcagcttaaagataa

SEQ ID NO: 4571692 - DNA, 25 bp, Homo sapien
ctctttcctccggtgggatcaatac

SEQ ID NO: 4571693 - DNA, 25 bp, Homo sapien
caatacctcggttgaggttacgtgg

SEQ ID NO: 4571694 - DNA, 25 bp, Homo sapien
tctgccggggtttgtatctctctgt

SEQ ID NO: 4571695 - DNA, 25 bp, Homo sapien
tgactaaaaggacgatcaccaggcg

SEQ ID NO: 4571696 - DNA, 25 bp, Homo sapien
gactgtcccccagcttgactaaaag

SEQ ID NO: 4571697 - DNA, 25 bp, Homo sapien
ttcctgatacgaacagcaagtgtgg

SEQ ID NO: 4571698 - DNA, 25 bp, Homo sapien
aatcaataacaccaattgggttcct

SEQ ID NO: 4571699 - DNA, 25 bp, Homo sapien
ggaaagaagggcacatgagcaaaca

SEQ ID NO: 4571700 - DNA, 25 bp, Homo sapien
caggaaagaagggcacatgagcaaa

SEQ ID NO: 4571701 - DNA, 25 bp, Homo sapien
gaaagaagggcacatgagcaaacat

SEQ ID NO: 4571702 - DNA, 25 bp, Homo sapien
tccaggaaagaagggcacatgagca

SEQ ID NO: 4571703 - DNA, 25 bp, Homo sapien
gactgtccgggccaaagctcaggca

SEQ ID NO: 4571704 - DNA, 25 bp, Homo sapien
tttgctgtggcgactgtccgggcca

SEQ ID NO: 4571705 - DNA, 25 bp, Homo sapien
ccagaagattctagctgttcagggt

SEQ ID NO: 4571706 - DNA, 25 bp, Homo sapien
agccagaagattctagctgttcagg

SEQ ID NO: 4571707 - DNA, 25 bp, Homo sapien
tatcaatgttgtaccgtctgctaac

SEQ ID NO: 4571708 - DNA, 25 bp, Homo sapien
aattgtgcatcgttgtcctgtagga

SEQ ID NO: 4571709 - DNA, 25 bp, Homo sapien
gcagtattgtgaaaccagcaacttg

SEQ ID NO: 4571710 - DNA, 25 bp, Homo sapien
gatttgatcattctaggtggccggt

SEQ ID NO: 4571711 - DNA, 25 bp, Homo sapien
caattttgttgcatggaagatcggt

SEQ ID NO: 4571712 - DNA, 25 bp, Homo sapien
tagttacaccgctggttctgctccc

SEQ ID NO: 4571713 - DNA, 25 bp, Homo sapien
catggaagatcggtgagttaaaaaa

SEQ ID NO: 4571714 - DNA, 25 bp, Homo sapien
cctgggtgtcaagcacagtagttac

SEQ ID NO: 4571715 - DNA, 25 bp, Homo sapien
tatattttgccattacgggttgatc

SEQ ID NO: 4571716 - DNA, 25 bp, Homo sapien
gcttgtcagtctccaacagttctct

SEQ ID NO: 4571717 - DNA, 25 bp, Homo sapien
tacgggttgatcctgttggcttgtc

SEQ ID NO: 4571718 - DNA, 25 bp, Homo sapien
agttctctatacagacgcaaatgtt

SEQ ID NO: 4571719 - DNA, 25 bp, Homo sapien
cttctcagaggaggcgatgtttgag

SEQ ID NO: 4571720 - DNA, 25 bp, Homo sapien
cactggctcgtatgggaacattgcg

SEQ ID NO: 4571721 - DNA, 25 bp, Homo sapien
atgatggctgcactggctcgtatgg

SEQ ID NO: 4571722 - DNA, 25 bp, Homo sapien
acggtggcaagtgccctgatgatgg

SEQ ID NO: 4571723 - DNA, 25 bp, Homo sapien
cgcccctcagttattaggtaccagg

SEQ ID NO: 4571724 - DNA, 25 bp, Homo sapien
gactcaggtgtatcagatctagcgg

SEQ ID NO: 4571725 - DNA, 25 bp, Homo sapien
gatctagcgggtacagtgacctctg

SEQ ID NO: 4571726 - DNA, 25 bp, Homo sapien
ctcatcgggcagttatctgactcag

SEQ ID NO: 4571727 - DNA, 25 bp, Homo sapien
gcccaggagtctgcttaaaccccat

SEQ ID NO: 4571728 - DNA, 25 bp, Homo sapien
gagaagcccaggagtctgcttaaac

SEQ ID NO: 4571729 - DNA, 25 bp, Homo sapien
gggagaagcccaggagtctgcttaa

SEQ ID NO: 4571730 - DNA, 25 bp, Homo sapien
gaagcccaggagtctgcttaaaccc

SEQ ID NO: 4571731 - DNA, 25 bp, Homo sapien
taatgtgacaggcttcctttggtgt

SEQ ID NO: 4571732 - DNA, 25 bp, Homo sapien
tgctgctggtccactagccaggggc

SEQ ID NO: 4571733 - DNA, 25 bp, Homo sapien
ataatgtgacaggcttcctttggtg

SEQ ID NO: 4571734 - DNA, 25 bp, Homo sapien
atgtgacaggcttcctttggtgtct

SEQ ID NO: 4571735 - DNA, 25 bp, Homo sapien
tctgcagggtcacatccaggttcac

SEQ ID NO: 4571736 - DNA, 25 bp, Homo sapien
tgcagggtcacatccaggttcacct

SEQ ID NO: 4571737 - DNA, 25 bp, Homo sapien
gctctgcagggtcacatccaggttc

SEQ ID NO: 4571738 - DNA, 25 bp, Homo sapien
gcagggtcacatccaggttcacctt

SEQ ID NO: 4571739 - DNA, 25 bp, Homo sapien
ggctgtctgtgccatagtcaccagt

SEQ ID NO: 4571740 - DNA, 25 bp, Homo sapien
tgtctgtgccatagtcaccagtcct

SEQ ID NO: 4571741 - DNA, 25 bp, Homo sapien
gccatagtcaccagtcctcattgct

SEQ ID NO: 4571742 - DNA, 25 bp, Homo sapien
tgtgccatagtcaccagtcctcatt

SEQ ID NO: 4571743 - DNA, 25 bp, Homo sapien
ggagcccgtacttaggcagctgtga

SEQ ID NO: 4571744 - DNA, 25 bp, Homo sapien
ttagacactgctcctttttgaatgt

SEQ ID NO: 4571745 - DNA, 25 bp, Homo sapien
aagggaagcccgtacttggagcaga

SEQ ID NO: 4571746 - DNA, 25 bp, Homo sapien
taaatgagcattagacactgctcct

SEQ ID NO: 4571747 - DNA, 25 bp, Homo sapien
tggccttggcttcagaaagtggcat

SEQ ID NO: 4571748 - DNA, 25 bp, Homo sapien
gattgccataccattggccttggct

SEQ ID NO: 4571749 - DNA, 25 bp, Homo sapien
cattggccttggcttcagaaagtgg

SEQ ID NO: 4571750 - DNA, 25 bp, Homo sapien
tgccataccattggccttggcttca

SEQ ID NO: 4571751 - DNA, 25 bp, Homo sapien
gccccttggacctggagttgacttg

SEQ ID NO: 4571752 - DNA, 25 bp, Homo sapien
agactagaccttgggcgtcctgccc

SEQ ID NO: 4571753 - DNA, 25 bp, Homo sapien
ctcttggagcaaacacagactagac

SEQ ID NO: 4571754 - DNA, 25 bp, Homo sapien
caaacacagactagaccttgggcgt

SEQ ID NO: 4571755 - DNA, 25 bp, Homo sapien
caggatgccatgcacttcccgctct

SEQ ID NO: 4571756 - DNA, 25 bp, Homo sapien
gggggaacgtctgtaccgcctctgc

SEQ ID NO: 4571757 - DNA, 25 bp, Homo sapien
acttcccgctctgctcttttgaggc

SEQ ID NO: 4571758 - DNA, 25 bp, Homo sapien
ggctggcataagcatgagagttgct

SEQ ID NO: 4571759 - DNA, 25 bp, Homo sapien
ctgtttggtaactggtgagatggcc

SEQ ID NO: 4571760 - DNA, 25 bp, Homo sapien
atggcctgacgggagtctgtttgca

SEQ ID NO: 4571761 - DNA, 25 bp, Homo sapien
gctgacagccctccacggaagaggt

SEQ ID NO: 4571762 - DNA, 25 bp, Homo sapien
cagccctccacggaagaggtgcatc

SEQ ID NO: 4571763 - DNA, 25 bp, Homo sapien
tttggtgcattgcttgcagaagact

SEQ ID NO: 4571764 - DNA, 25 bp, Homo sapien
gatcctggagattttagaaccacca

SEQ ID NO: 4571765 - DNA, 25 bp, Homo sapien
gaaccaccatgctcttaggtgtaga

SEQ ID NO: 4571766 - DNA, 25 bp, Homo sapien
gacaactaatccaagagtgttcaat

SEQ ID NO: 4571767 - DNA, 25 bp, Homo sapien
atctaaactatgtccaagggaagtc

SEQ ID NO: 4571768 - DNA, 25 bp, Homo sapien
gggatatatggcacgctggcccagg

SEQ ID NO: 4571769 - DNA, 25 bp, Homo sapien
ctacatgaggggatatatggcacgc

SEQ ID NO: 4571770 - DNA, 25 bp, Homo sapien
cccagatgggaagctcagccgcttc

SEQ ID NO: 4571771 - DNA, 25 bp, Homo sapien
tcccacacctcacggacccagatgg

SEQ ID NO: 4571772 - DNA, 25 bp, Homo sapien
cacctcacggacccagatgggaagc

SEQ ID NO: 4571773 - DNA, 25 bp, Homo sapien
cttcatcccacacctcacggaccca

SEQ ID NO: 4571774 - DNA, 25 bp, Homo sapien
taattacacaataaactgcctttcc

SEQ ID NO: 4571775 - DNA, 25 bp, Homo sapien
ttaattacacaataaactgcctttc

SEQ ID NO: 4571776 - DNA, 25 bp, Homo sapien
attacacaataaactgcctttccag

SEQ ID NO: 4571777 - DNA, 25 bp, Homo sapien
aattacacaataaactgcctttcca

SEQ ID NO: 4571778 - DNA, 25 bp, Homo sapien
tccacggagaatgcaggttgcaaac

SEQ ID NO: 4571779 - DNA, 25 bp, Homo sapien
ggagaatgcaggttgcaaacgcaga

SEQ ID NO: 4571780 - DNA, 25 bp, Homo sapien
ggttgcaaacgcagagcattaaatg

SEQ ID NO: 4571781 - DNA, 25 bp, Homo sapien
tgcaggttgcaaacgcagagcatta

SEQ ID NO: 4571782 - DNA, 25 bp, Homo sapien
ccctgcaaccaggaatccccactgc

SEQ ID NO: 4571783 - DNA, 25 bp, Homo sapien
gtcttggatcttgacccctggctcc

SEQ ID NO: 4571784 - DNA, 25 bp, Homo sapien
caaagccgtgattgaagaaaagttt

SEQ ID NO: 4571785 - DNA, 25 bp, Homo sapien
ctgttctcaaagccgtgattgaaga

SEQ ID NO: 4571786 - DNA, 25 bp, Homo sapien
tcggagcagatgttcccggctcctt

SEQ ID NO: 4571787 - DNA, 25 bp, Homo sapien
ttcggcgatgtctgtgaaatctctc

SEQ ID NO: 4571788 - DNA, 25 bp, Homo sapien
tcctgcctcgaaaacaaacaggcgc

SEQ ID NO: 4571789 - DNA, 25 bp, Homo sapien
gactcttcttgagaggttcggcgat

SEQ ID NO: 4571790 - DNA, 25 bp, Homo sapien
agggaaggcttgaatgcacaggtaa

SEQ ID NO: 4571791 - DNA, 25 bp, Homo sapien
aaaattgcaccctcagcaattccct

SEQ ID NO: 4571792 - DNA, 25 bp, Homo sapien
ggtaggcaggataatctgggccaca

SEQ ID NO: 4571793 - DNA, 25 bp, Homo sapien
gcaggataatctgggccacagttga

SEQ ID NO: 4571794 - DNA, 25 bp, Homo sapien
ttgtgctcagtcttcttcaagggag

SEQ ID NO: 4571795 - DNA, 25 bp, Homo sapien
gagccatgcgattatgagagaaaga

SEQ ID NO: 4571796 - DNA, 25 bp, Homo sapien
tcttcttcaagggagccatgcgatt

SEQ ID NO: 4571797 - DNA, 25 bp, Homo sapien
caagggagccatgcgattatgagag

SEQ ID NO: 4571798 - DNA, 25 bp, Homo sapien
gcagccaggcatactttgcacaaat

SEQ ID NO: 4571799 - DNA, 25 bp, Homo sapien
tactttgcacaaattaaaggtgtca

SEQ ID NO: 4571800 - DNA, 25 bp, Homo sapien
aaattaaaggtgtcagcatgtaatt

SEQ ID NO: 4571801 - DNA, 25 bp, Homo sapien
tggtgccaggcgcagccaggcatac

SEQ ID NO: 4571802 - DNA, 25 bp, Homo sapien
cataaggcttgtcaatacccttggg

SEQ ID NO: 4571803 - DNA, 25 bp, Homo sapien
aaggcttgtcaatacccttgggctg

SEQ ID NO: 4571804 - DNA, 25 bp, Homo sapien
taaggcttgtcaatacccttgggct

SEQ ID NO: 4571805 - DNA, 25 bp, Homo sapien
ataaggcttgtcaatacccttgggc

SEQ ID NO: 4571806 - DNA, 25 bp, Homo sapien
ggaagtatgatcttcctgctgtggc

SEQ ID NO: 4571807 - DNA, 25 bp, Homo sapien
gccaggcaccttcgccttgggtaca

SEQ ID NO: 4571808 - DNA, 25 bp, Homo sapien
ccttcgccttgggtacatgggtgtg

SEQ ID NO: 4571809 - DNA, 25 bp, Homo sapien
catgggtgtgggaagtatgatcttc

SEQ ID NO: 4571810 - DNA, 25 bp, Homo sapien
accacaagtcacagatcagcgaggg

SEQ ID NO: 4571811 - DNA, 25 bp, Homo sapien
ttggctgactcatctagaagaaacc

SEQ ID NO: 4571812 - DNA, 25 bp, Homo sapien
agccctcacggtccttacaagacag

SEQ ID NO: 4571813 - DNA, 25 bp, Homo sapien
tcacggtccttacaagacagcctcg

SEQ ID NO: 4571814 - DNA, 25 bp, Homo sapien
atgtggtgcatgagggagggcccag

SEQ ID NO: 4571815 - DNA, 25 bp, Homo sapien
ctccatgtggtgcatgagggagggc

SEQ ID NO: 4571816 - DNA, 25 bp, Homo sapien
ggagggcccaggaggctgaggccat

SEQ ID NO: 4571817 - DNA, 25 bp, Homo sapien
ccatgtggtgcatgagggagggccc

SEQ ID NO: 4571818 - DNA, 25 bp, Homo sapien
gaggccccttttgtcatggagctga

SEQ ID NO: 4571819 - DNA, 25 bp, Homo sapien
gtctgtgaccaagacattgaaggac

SEQ ID NO: 4571820 - DNA, 25 bp, Homo sapien
ccactggagtatgaagaggcccctt

SEQ ID NO: 4571821 - DNA, 25 bp, Homo sapien
tctgtctgtgaccaagacattgaag

SEQ ID NO: 4571822 - DNA, 25 bp, Homo sapien
gctctgaacacacactactgaaata

SEQ ID NO: 4571823 - DNA, 25 bp, Homo sapien
tgaacacacactactgaaataatgg

SEQ ID NO: 4571824 - DNA, 25 bp, Homo sapien
tctgaacacacactactgaaataat

SEQ ID NO: 4571825 - DNA, 25 bp, Homo sapien
aacacacactactgaaataatgggc

SEQ ID NO: 4571826 - DNA, 25 bp, Homo sapien
caggtactcggaggggcagtgtgcc

SEQ ID NO: 4571827 - DNA, 25 bp, Homo sapien
tggggaacaggtactcggaggggca

SEQ ID NO: 4571828 - DNA, 25 bp, Homo sapien
ttcatagcatcaggggagctcctgg

SEQ ID NO: 4571829 - DNA, 25 bp, Homo sapien
tgctcctccttcatagcatcagggg

SEQ ID NO: 4571830 - DNA, 25 bp, Homo sapien
attgctgggaaacagggcttctctc

SEQ ID NO: 4571831 - DNA, 25 bp, Homo sapien
cacattgctgggaaacagggcttct

SEQ ID NO: 4571832 - DNA, 25 bp, Homo sapien
tggcacattgctgggaaacagggct

SEQ ID NO: 4571833 - DNA, 25 bp, Homo sapien
cattgctgggaaacagggcttctct

SEQ ID NO: 4571834 - DNA, 25 bp, Homo sapien
gtcaagggacatccgggtaagctcg

SEQ ID NO: 4571835 - DNA, 25 bp, Homo sapien
tattggccaggtagaattggtcaag

SEQ ID NO: 4571836 - DNA, 25 bp, Homo sapien
gccaggtagaattggtcaagggaca

SEQ ID NO: 4571837 - DNA, 25 bp, Homo sapien
tagaattggtcaagggacatccggg

SEQ ID NO: 4571838 - DNA, 25 bp, Homo sapien
caaatgtggaggattctttcccctt

SEQ ID NO: 4571839 - DNA, 25 bp, Homo sapien
gctcgaggaaccagagtcatttggt

SEQ ID NO: 4571840 - DNA, 25 bp, Homo sapien
tgggcctgcggcgttcctttgtttc

SEQ ID NO: 4571841 - DNA, 25 bp, Homo sapien
tcagatggcacacagcaccagctcg

SEQ ID NO: 4571842 - DNA, 25 bp, Homo sapien
ttctcataaacccaggcggctctgc

SEQ ID NO: 4571843 - DNA, 25 bp, Homo sapien
catatagaacgttttccctaaatag

SEQ ID NO: 4571844 - DNA, 25 bp, Homo sapien
cacagatcctgttcttgtgcttggc

SEQ ID NO: 4571845 - DNA, 25 bp, Homo sapien
ttccctaaatagctgagaaggccag

SEQ ID NO: 4571846 - DNA, 25 bp, Homo sapien
tctcctgtctgtttttcgttccttc

SEQ ID NO: 4571847 - DNA, 25 bp, Homo sapien
ggtttttagacttctatctggagac

SEQ ID NO: 4571848 - DNA, 25 bp, Homo sapien
cctctgggccagacatcaagatggt

SEQ ID NO: 4571849 - DNA, 25 bp, Homo sapien
gacacttgcattgaaggctccacct

SEQ ID NO: 4571850 - DNA, 25 bp, Homo sapien
tctccaagccttcttcggcaagcta

SEQ ID NO: 4571851 - DNA, 25 bp, Homo sapien
aagccaaggattggtgcatctccaa

SEQ ID NO: 4571852 - DNA, 25 bp, Homo sapien
ttttaagccaaggattggtgcatct

SEQ ID NO: 4571853 - DNA, 25 bp, Homo sapien
caagctagagtctgaattcttttga

SEQ ID NO: 4571854 - DNA, 25 bp, Homo sapien
tacctcagcacagcattgattcatg

SEQ ID NO: 4571855 - DNA, 25 bp, Homo sapien
ctgagcagaagtatacctcagcaca

SEQ ID NO: 4571856 - DNA, 25 bp, Homo sapien
ggtggtcgaggaagacagtgggtga

SEQ ID NO: 4571857 - DNA, 25 bp, Homo sapien
gaagtatacctcagcacagcattga

SEQ ID NO: 4571858 - DNA, 25 bp, Homo sapien
caggccaagaaccaggaaatgcagg

SEQ ID NO: 4571859 - DNA, 25 bp, Homo sapien
tgcaggttcagctcatgaacctctt

SEQ ID NO: 4571860 - DNA, 25 bp, Homo sapien
ccaggagctcgcagtctgttctttt

SEQ ID NO: 4571861 - DNA, 25 bp, Homo sapien
ctttgtctccaggagctcgcagtct

SEQ ID NO: 4571862 - DNA, 25 bp, Homo sapien
ttcttttttctggaagctgacttcc

SEQ ID NO: 4571863 - DNA, 25 bp, Homo sapien
cttttttctggaagctgacttccat

SEQ ID NO: 4571864 - DNA, 25 bp, Homo sapien
ggtggcgttctcaccgcactctcct

SEQ ID NO: 4571865 - DNA, 25 bp, Homo sapien
tctggtggtggcgttctcaccgcac

SEQ ID NO: 4571866 - DNA, 25 bp, Homo sapien
tggtggtggcgttctcaccgcactc

SEQ ID NO: 4571867 - DNA, 25 bp, Homo sapien
gtggtggcgttctcaccgcactctc

SEQ ID NO: 4571868 - DNA, 25 bp, Homo sapien
tcctcagtgaaatggttagcttccc

SEQ ID NO: 4571869 - DNA, 25 bp, Homo sapien
tctgctaaaatgaggcggtcaacca

SEQ ID NO: 4571870 - DNA, 25 bp, Homo sapien
tggatcccctgaaagcagactgact

SEQ ID NO: 4571871 - DNA, 25 bp, Homo sapien
tgtgttggtttaaatgccccagccc

SEQ ID NO: 4571872 - DNA, 25 bp, Homo sapien
gcaactgggtctgcatctcggccca

SEQ ID NO: 4571873 - DNA, 25 bp, Homo sapien
gctggcaactgggtctgcatctcgg

SEQ ID NO: 4571874 - DNA, 25 bp, Homo sapien
gaaggagcagtgtccccaacctggt

SEQ ID NO: 4571875 - DNA, 25 bp, Homo sapien
tggtaggagctcagagcaagttgct

SEQ ID NO: 4571876 - DNA, 25 bp, Homo sapien
agcagggtctcggaatgttctggcc

SEQ ID NO: 4571877 - DNA, 25 bp, Homo sapien
gctgacatgttcctaattcggcctt

SEQ ID NO: 4571878 - DNA, 25 bp, Homo sapien
tgctgatggcctgctgatggattta

SEQ ID NO: 4571879 - DNA, 25 bp, Homo sapien
caggctgacgaggatctcattttcc

SEQ ID NO: 4571880 - DNA, 25 bp, Homo sapien
ctgaatttgaaatgtctggagactg

SEQ ID NO: 4571881 - DNA, 25 bp, Homo sapien
ttaggcctgaatttgaaatgtctgg

SEQ ID NO: 4571882 - DNA, 25 bp, Homo sapien
cctgaatttgaaatgtctggagact

SEQ ID NO: 4571883 - DNA, 25 bp, Homo sapien
ggcctgaatttgaaatgtctggaga

SEQ ID NO: 4571884 - DNA, 25 bp, Homo sapien
gcttgggtagaataagacctcatcc

SEQ ID NO: 4571885 - DNA, 25 bp, Homo sapien
gtccctccctttggatacaccactc

SEQ ID NO: 4571886 - DNA, 25 bp, Homo sapien
gagatgctgccagcttgggtagaat

SEQ ID NO: 4571887 - DNA, 25 bp, Homo sapien
gaataagacctcatcctaaggtccc

SEQ ID NO: 4571888 - DNA, 25 bp, Homo sapien
aagtgcggcagtgtggagaggctga

SEQ ID NO: 4571889 - DNA, 25 bp, Homo sapien
agtgcggcagtgtggagaggctgag

SEQ ID NO: 4571890 - DNA, 25 bp, Homo sapien
cccacatgaggtgactggactggct

SEQ ID NO: 4571891 - DNA, 25 bp, Homo sapien
tctgagcccacatgaggtgactgga

SEQ ID NO: 4571892 - DNA, 25 bp, Homo sapien
catgaggtgactggactggctgcaa

SEQ ID NO: 4571893 - DNA, 25 bp, Homo sapien
tgagcccacatgaggtgactggact

SEQ ID NO: 4571894 - DNA, 25 bp, Homo sapien
ttaaaggtctcccgtagtcaggaca

SEQ ID NO: 4571895 - DNA, 25 bp, Homo sapien
taaaggtctcccgtagtcaggacag

SEQ ID NO: 4571896 - DNA, 25 bp, Homo sapien
aaaggtctcccgtagtcaggacagg

SEQ ID NO: 4571897 - DNA, 25 bp, Homo sapien
aggtctcccgtagtcaggacaggag

SEQ ID NO: 4571898 - DNA, 25 bp, Homo sapien
tcaaggtgcttttcccctggatgtc

SEQ ID NO: 4571899 - DNA, 25 bp, Homo sapien
tcccaatcttgatcactggacacag

SEQ ID NO: 4571900 - DNA, 25 bp, Homo sapien
tctcattgggatgtcacagtgttcc

SEQ ID NO: 4571901 - DNA, 25 bp, Homo sapien
ctttccactctcaaggtgcttagaa

SEQ ID NO: 4571902 - DNA, 25 bp, Homo sapien
caaaggacaagggatgctgtgatgg

SEQ ID NO: 4571903 - DNA, 25 bp, Homo sapien
cttggttgtagacagatggtgcaaa

SEQ ID NO: 4571904 - DNA, 25 bp, Homo sapien
tctgtaatctgtagtttctgacttg

SEQ ID NO: 4571905 - DNA, 25 bp, Homo sapien
taagatttccgcttcaaaggacaac

SEQ ID NO: 4571906 - DNA, 25 bp, Homo sapien
ctccatggcctggatcttggcgctg

SEQ ID NO: 4571907 - DNA, 25 bp, Homo sapien
ccatggcctggatcttggcgctgtc

SEQ ID NO: 4571908 - DNA, 25 bp, Homo sapien
tggatcttggcgctgtccccataca

SEQ ID NO: 4571909 - DNA, 25 bp, Homo sapien
tcttggcgctgtccccatacaatcg

SEQ ID NO: 4571910 - DNA, 25 bp, Homo sapien
gtgatttccatattgctcaggtcac

SEQ ID NO: 4571911 - DNA, 25 bp, Homo sapien
tgatttccatattgctcaggtcaca

SEQ ID NO: 4571912 - DNA, 25 bp, Homo sapien
agtgtatctgatggtcctgagagcc

SEQ ID NO: 4571913 - DNA, 25 bp, Homo sapien
tcatccccccggtgttgtgtagcga

SEQ ID NO: 4571914 - DNA, 25 bp, Homo sapien
tagcgaacaacagaatgtttctgag

SEQ ID NO: 4571915 - DNA, 25 bp, Homo sapien
tgagtgtatctgatggtcctgagag

SEQ ID NO: 4571916 - DNA, 25 bp, Homo sapien
aatggccagtccagtggcgcccagg

SEQ ID NO: 4571917 - DNA, 25 bp, Homo sapien
gatggtaggatgtaagagcaggtgc

SEQ ID NO: 4571918 - DNA, 25 bp, Homo sapien
tgcaggtgtggaccaagggcaggaa

SEQ ID NO: 4571919 - DNA, 25 bp, Homo sapien
acagctgacggcagagagccaggcc

SEQ ID NO: 4571920 - DNA, 25 bp, Homo sapien
gttcctggcttggtgatcgtaaaca

SEQ ID NO: 4571921 - DNA, 25 bp, Homo sapien
tggcagtgacttcccgtaaaatagg

SEQ ID NO: 4571922 - DNA, 25 bp, Homo sapien
tgggttgcaccctcgatgagtcacg

SEQ ID NO: 4571923 - DNA, 25 bp, Homo sapien
tgctggttgcctttgggcccaagcc

SEQ ID NO: 4571924 - DNA, 25 bp, Homo sapien
gaagctgtagccactcaggaccttg

SEQ ID NO: 4571925 - DNA, 25 bp, Homo sapien
ggccggtgagaatcccatttacagc

SEQ ID NO: 4571926 - DNA, 25 bp, Homo sapien
gctttggtaagattgatcggccggt

SEQ ID NO: 4571927 - DNA, 25 bp, Homo sapien
gatcaacaggcaacactggcggctt

SEQ ID NO: 4571928 - DNA, 25 bp, Homo sapien
atttcaacaccttcctctggcagac

SEQ ID NO: 4571929 - DNA, 25 bp, Homo sapien
ctgcttctgggtaactttgagggta

SEQ ID NO: 4571930 - DNA, 25 bp, Homo sapien
tttgatttcaacaccttcctctggc

SEQ ID NO: 4571931 - DNA, 25 bp, Homo sapien
ctttgagggtaagaatttgatttca

SEQ ID NO: 4571932 - DNA, 25 bp, Homo sapien
cagtgattcaggtttgtttatgccg

SEQ ID NO: 4571933 - DNA, 25 bp, Homo sapien
tatgccgccaacaaatctttgcgct

SEQ ID NO: 4571934 - DNA, 25 bp, Homo sapien
tttgcgctggtgacgttaaggtgca

SEQ ID NO: 4571935 - DNA, 25 bp, Homo sapien
gattcaggtttgtttatgccgccaa

SEQ ID NO: 4571936 - DNA, 25 bp, Homo sapien
caaccagctcgagggctaggagggc

SEQ ID NO: 4571937 - DNA, 25 bp, Homo sapien
accaaccagctcgagggctaggagg

SEQ ID NO: 4571938 - DNA, 25 bp, Homo sapien
ccaaccagctcgagggctaggaggg

SEQ ID NO: 4571939 - DNA, 25 bp, Homo sapien
gtggaccaagtccagacctccagaa

SEQ ID NO: 4571940 - DNA, 25 bp, Homo sapien
gttgtcgtaggtgacagccttcgag

SEQ ID NO: 4571941 - DNA, 25 bp, Homo sapien
gtctccgacctgagatgcttcacag

SEQ ID NO: 4571942 - DNA, 25 bp, Homo sapien
tctggactgagtccatgggttgtcg

SEQ ID NO: 4571943 - DNA, 25 bp, Homo sapien
aggctgtattgttctcgtcaattac

SEQ ID NO: 4571944 - DNA, 25 bp, Homo sapien
tcgtcaattactggtgcggcctcgg

SEQ ID NO: 4571945 - DNA, 25 bp, Homo sapien
tattgttctcgtcaattactggtgc

SEQ ID NO: 4571946 - DNA, 25 bp, Homo sapien
tactggtgcggcctcgggtttctcc

SEQ ID NO: 4571947 - DNA, 25 bp, Homo sapien
tgagtgcttctgcatcgccggctag

SEQ ID NO: 4571948 - DNA, 25 bp, Homo sapien
ccaccagggccacttggcgtgtgca

SEQ ID NO: 4571949 - DNA, 25 bp, Homo sapien
tagcacagtgatcgaagccagagct

SEQ ID NO: 4571950 - DNA, 25 bp, Homo sapien
gggccacttggcgtgtgcacaagca

SEQ ID NO: 4571951 - DNA, 25 bp, Homo sapien
aaggtgaatgtactgcagacttgca

SEQ ID NO: 4571952 - DNA, 25 bp, Homo sapien
aggtgaatgtactgcagacttgcac

SEQ ID NO: 4571953 - DNA, 25 bp, Homo sapien
gaaggtgaatgtactgcagacttgc

SEQ ID NO: 4571954 - DNA, 25 bp, Homo sapien
agaaggtgaatgtactgcagacttg

SEQ ID NO: 4571955 - DNA, 25 bp, Homo sapien
ggggtcctcggagccatccaggagc

SEQ ID NO: 4571956 - DNA, 25 bp, Homo sapien
aggcactctgaagggggtcctcgga

SEQ ID NO: 4571957 - DNA, 25 bp, Homo sapien
tccaggcactctgaagggggtcctc

SEQ ID NO: 4571958 - DNA, 25 bp, Homo sapien
gggtcctcggagccatccaggagct

SEQ ID NO: 4571959 - DNA, 25 bp, Homo sapien
cctctttgtcccccagtccctggag

SEQ ID NO: 4571960 - DNA, 25 bp, Homo sapien
caaaagggacctgtgggagcctctt

SEQ ID NO: 4571961 - DNA, 25 bp, Homo sapien
agaggcaaaagggacctgtgggagc

SEQ ID NO: 4571962 - DNA, 25 bp, Homo sapien
aagctggcttttgagaggctgggct

SEQ ID NO: 4571963 - DNA, 25 bp, Homo sapien
cggccgctccgtctgcctcttcctt

SEQ ID NO: 4571964 - DNA, 25 bp, Homo sapien
agcggccgctccgtctgcctcttcc

SEQ ID NO: 4571965 - DNA, 25 bp, Homo sapien
cagcggccgctccgtctgcctcttc

SEQ ID NO: 4571966 - DNA, 25 bp, Homo sapien
ccaggtgccaaagggatatgcagcc

SEQ ID NO: 4571967 - DNA, 25 bp, Homo sapien
gggttctgccaagaaggctgagaat

SEQ ID NO: 4571968 - DNA, 25 bp, Homo sapien
gtcacctccgctgagagcagcaaca

SEQ ID NO: 4571969 - DNA, 25 bp, Homo sapien
cgaagctgccatgcggggttctgcc

SEQ ID NO: 4571970 - DNA, 25 bp, Homo sapien
aattcacagagtgcataatgaccca

SEQ ID NO: 4571971 - DNA, 25 bp, Homo sapien
taatgacccatcagtgcggacaatg

SEQ ID NO: 4571972 - DNA, 25 bp, Homo sapien
ggatagcctaaaagattaaattcac

SEQ ID NO: 4571973 - DNA, 25 bp, Homo sapien
cattttttctgtgcggccggatagc

SEQ ID NO: 4571974 - DNA, 25 bp, Homo sapien
cttcttgtcttctgcgtaagtgttt

SEQ ID NO: 4571975 - DNA, 25 bp, Homo sapien
tctgggtccgtacaaaatgggctct

SEQ ID NO: 4571976 - DNA, 25 bp, Homo sapien
tccgtacaaaatgggctctaaggag

SEQ ID NO: 4571977 - DNA, 25 bp, Homo sapien
catacatccttctgggtccgtacaa

SEQ ID NO: 4571978 - DNA, 25 bp, Homo sapien
tacaaaatgggctctaaggagacca

SEQ ID NO: 4571979 - DNA, 25 bp, Homo sapien
gaaaagggagttggcgctgacatct

SEQ ID NO: 4571980 - DNA, 25 bp, Homo sapien
cagtcgatgcaaatgaagtagtggc

SEQ ID NO: 4571981 - DNA, 25 bp, Homo sapien
gcttgcagtctaagaagccttatcc

SEQ ID NO: 4571982 - DNA, 25 bp, Homo sapien
ccttggtggtgcctcggtctgcaat

SEQ ID NO: 4571983 - DNA, 25 bp, Homo sapien
ttctttcctattggctgagctggtc

SEQ ID NO: 4571984 - DNA, 25 bp, Homo sapien
caaaacaggtgtgcttgccatagct

SEQ ID NO: 4571985 - DNA, 25 bp, Homo sapien
gactgcaaagggcatatataaccag

SEQ ID NO: 4571986 - DNA, 25 bp, Homo sapien
cattctgtttaagctggttcgtaga

SEQ ID NO: 4571987 - DNA, 25 bp, Homo sapien
aagaccgtgtcaggtggcatggcaa

SEQ ID NO: 4571988 - DNA, 25 bp, Homo sapien
ggctgaatgcacacaagaccgtgtc

SEQ ID NO: 4571989 - DNA, 25 bp, Homo sapien
gcacacaagaccgtgtcaggtggca

SEQ ID NO: 4571990 - DNA, 25 bp, Homo sapien
gtggcatggcaaggatggcatttgg

SEQ ID NO: 4571991 - DNA, 25 bp, Homo sapien
gcttcatggtcgtcatccaccaaat

SEQ ID NO: 4571992 - DNA, 25 bp, Homo sapien
aattggccaagaaaccaacgtcagc

SEQ ID NO: 4571993 - DNA, 25 bp, Homo sapien
tggccaagaaaccaacgtcagcact

SEQ ID NO: 4571994 - DNA, 25 bp, Homo sapien
ttggccaagaaaccaacgtcagcac

SEQ ID NO: 4571995 - DNA, 25 bp, Homo sapien
tcccctgtgattcatcagagtaata

SEQ ID NO: 4571996 - DNA, 25 bp, Homo sapien
ggtgaaggctgttcccctgtgattc

SEQ ID NO: 4571997 - DNA, 25 bp, Homo sapien
cttggtgaaggctgttcccctgtga

SEQ ID NO: 4571998 - DNA, 25 bp, Homo sapien
tcagagtaataactagaaacaccat

SEQ ID NO: 4571999 - DNA, 25 bp, Homo sapien
gagaacatcacataactgagaaatg

SEQ ID NO: 4572000 - DNA, 25 bp, Homo sapien
agaacatcacataactgagaaatgt

SEQ ID NO: 4572001 - DNA, 25 bp, Homo sapien
tgagaacatcacataactgagaaat

SEQ ID NO: 4572002 - DNA, 25 bp, Homo sapien
ctgagaacatcacataactgagaaa

SEQ ID NO: 4572003 - DNA, 25 bp, Homo sapien
cttcctgtcgcttctccaggttcat

SEQ ID NO: 4572004 - DNA, 25 bp, Homo sapien
ttggcacttccttagcacagctctc

SEQ ID NO: 4572005 - DNA, 25 bp, Homo sapien
tcctgtcgcttctccaggttcattg

SEQ ID NO: 4572006 - DNA, 25 bp, Homo sapien
tccaggttcattggcacttccttag

SEQ ID NO: 4572007 - DNA, 25 bp, Homo sapien
cctttatctcggtgaagtatagaca

SEQ ID NO: 4572008 - DNA, 25 bp, Homo sapien
tcaatttcaggaccccaggagattt

SEQ ID NO: 4572009 - DNA, 25 bp, Homo sapien
gcttggagcagtcgctagcgtttgc

SEQ ID NO: 4572010 - DNA, 25 bp, Homo sapien
taatgctgtgatttgacggtgcggt

SEQ ID NO: 4572011 - DNA, 25 bp, Homo sapien
gaccccttgcaccacaaataacttg

SEQ ID NO: 4572012 - DNA, 25 bp, Homo sapien
tggccactccagatgtttgggtatc

SEQ ID NO: 4572013 - DNA, 25 bp, Homo sapien
ttatccgtgcttactggctgggcca

SEQ ID NO: 4572014 - DNA, 25 bp, Homo sapien
gctcatcaaaaacggcaacggcccg

SEQ ID NO: 4572015 - DNA, 25 bp, Homo sapien
gtcaaggcccgcatctggggcttca

SEQ ID NO: 4572016 - DNA, 25 bp, Homo sapien
agtggcgcccggaggtggccacgga

SEQ ID NO: 4572017 - DNA, 25 bp, Homo sapien
cgcgggaatgcgacggaaacccaga

SEQ ID NO: 4572018 - DNA, 25 bp, Homo sapien
gcgacggaaacccagagtcaaggcc

SEQ ID NO: 4572019 - DNA, 25 bp, Homo sapien
ccacagtgtggttcgtggcccggtt

SEQ ID NO: 4572020 - DNA, 25 bp, Homo sapien
ggcagactctaaactgtgggcaaga

SEQ ID NO: 4572021 - DNA, 25 bp, Homo sapien
tgcccttgttggatgatgtgcacat

SEQ ID NO: 4572022 - DNA, 25 bp, Homo sapien
aggagtctgggaccccacagtgtgg

SEQ ID NO: 4572023 - DNA, 25 bp, Homo sapien
ctcaagaagaagtagttcagtgtcc

SEQ ID NO: 4572024 - DNA, 25 bp, Homo sapien
gaagaagtagttcagtgtcctcatt

SEQ ID NO: 4572025 - DNA, 25 bp, Homo sapien
caagaagaagtagttcagtgtcctc

SEQ ID NO: 4572026 - DNA, 25 bp, Homo sapien
aagaagaagtagttcagtgtcctca

SEQ ID NO: 4572027 - DNA, 25 bp, Homo sapien
caggcggctctgaatgaagcttccc

SEQ ID NO: 4572028 - DNA, 25 bp, Homo sapien
ccaggcggctctgaatgaagcttcc

SEQ ID NO: 4572029 - DNA, 25 bp, Homo sapien
accaggcggctctgaatgaagcttc

SEQ ID NO: 4572030 - DNA, 25 bp, Homo sapien
ctacctgcctgactacaggagcagg

SEQ ID NO: 4572031 - DNA, 25 bp, Homo sapien
agcaccaatatccacaacccaaggg

SEQ ID NO: 4572032 - DNA, 25 bp, Homo sapien
cagcaccaatatccacaacccaagg

SEQ ID NO: 4572033 - DNA, 25 bp, Homo sapien
ctccacagcaccaatatccacaacc

SEQ ID NO: 4572034 - DNA, 25 bp, Homo sapien
cacagcaccaatatccacaacccaa

SEQ ID NO: 4572035 - DNA, 25 bp, Homo sapien
ctctggattaaggatattcagaaga

SEQ ID NO: 4572036 - DNA, 25 bp, Homo sapien
tccttagatctagcctctggattaa

SEQ ID NO: 4572037 - DNA, 25 bp, Homo sapien
tccctgccattcttatccttagatc

SEQ ID NO: 4572038 - DNA, 25 bp, Homo sapien
gattaaggatattcagaagattctg

SEQ ID NO: 4572039 - DNA, 25 bp, Homo sapien
ccagccagctatctccgggacaatt

SEQ ID NO: 4572040 - DNA, 25 bp, Homo sapien
caattcctctatagtgttcatcctc

SEQ ID NO: 4572041 - DNA, 25 bp, Homo sapien
tgtttgctcgtcaaaattagcttgg

SEQ ID NO: 4572042 - DNA, 25 bp, Homo sapien
aaaatgtttgctcgtcaaaattagc

SEQ ID NO: 4572043 - DNA, 25 bp, Homo sapien
gggttcatgtgctccacagcagggc

SEQ ID NO: 4572044 - DNA, 25 bp, Homo sapien
caaaggaaagccgaatgcgtccccg

SEQ ID NO: 4572045 - DNA, 25 bp, Homo sapien
gaaagccagcgacgagtgtggattt

SEQ ID NO: 4572046 - DNA, 25 bp, Homo sapien
ggcagggaaagccagcgacgagtgt

SEQ ID NO: 4572047 - DNA, 25 bp, Homo sapien
agaaatactccaagaagaacaatca

SEQ ID NO: 4572048 - DNA, 25 bp, Homo sapien
tgtttgggccacaagagactgcaat

SEQ ID NO: 4572049 - DNA, 25 bp, Homo sapien
tgtgaaatccctgctgcgatgctgg

SEQ ID NO: 4572050 - DNA, 25 bp, Homo sapien
gctcacatcgatgggaaatggccct

SEQ ID NO: 4572051 - DNA, 25 bp, Homo sapien
aatgtgacagcaacagtggcctggc

SEQ ID NO: 4572052 - DNA, 25 bp, Homo sapien
gaacccttccgagtctgtgagacac

SEQ ID NO: 4572053 - DNA, 25 bp, Homo sapien
tgtgcactgcacaatcggcaaagag

SEQ ID NO: 4572054 - DNA, 25 bp, Homo sapien
aagctccatttctgcgggtgtccgc

SEQ ID NO: 4572055 - DNA, 25 bp, Homo sapien
tacagcaggcgaaatacacactcag

SEQ ID NO: 4572056 - DNA, 25 bp, Homo sapien
gtagatgacctcataaactgtggcc

SEQ ID NO: 4572057 - DNA, 25 bp, Homo sapien
ttgtcatccgctgaaatgtcacaac

SEQ ID NO: 4572058 - DNA, 25 bp, Homo sapien
tcttgtcaccagagcctgttacaat

SEQ ID NO: 4572059 - DNA, 25 bp, Homo sapien
tcacaactcaagacagacgaggatt

SEQ ID NO: 4572060 - DNA, 25 bp, Homo sapien
tgaggtttgacacgctgcacaccag

SEQ ID NO: 4572061 - DNA, 25 bp, Homo sapien
gcatgtgctgtaactagagacccta

SEQ ID NO: 4572062 - DNA, 25 bp, Homo sapien
tcataatgatcagaacaggacgctt

SEQ ID NO: 4572063 - DNA, 25 bp, Homo sapien
cctgggtccagaaagcggcatgttg

SEQ ID NO: 4572064 - DNA, 25 bp, Homo sapien
gcgttgagaaggttatctttcccag

SEQ ID NO: 4572065 - DNA, 25 bp, Homo sapien
cctccaggcgttgagaaggttatct

SEQ ID NO: 4572066 - DNA, 25 bp, Homo sapien
ctggctccataaggcgtcctccagg

SEQ ID NO: 4572067 - DNA, 25 bp, Homo sapien
tatgctggctccataaggcgtcctc

SEQ ID NO: 4572068 - DNA, 25 bp, Homo sapien
cagtggaggagcagacattcccatc

SEQ ID NO: 4572069 - DNA, 25 bp, Homo sapien
catgctattcccgaccagagagaaa

SEQ ID NO: 4572070 - DNA, 25 bp, Homo sapien
tgaagacagcagtcagtgggcgacc

SEQ ID NO: 4572071 - DNA, 25 bp, Homo sapien
gataacgctgcctcaaaagattctt

SEQ ID NO: 4572072 - DNA, 25 bp, Homo sapien
aggcttggtgtggtgcagcacctcc

SEQ ID NO: 4572073 - DNA, 25 bp, Homo sapien
atcatgggagatgtctatgcagctg

SEQ ID NO: 4572074 - DNA, 25 bp, Homo sapien
ctgtccacagtttggtgccatcatg

SEQ ID NO: 4572075 - DNA, 25 bp, Homo sapien
acagtttggtgccatcatgggagat

SEQ ID NO: 4572076 - DNA, 25 bp, Homo sapien
ccatcatgggagatgtctatgcagc

SEQ ID NO: 4572077 - DNA, 25 bp, Homo sapien
gtgagtcccgggaaccacagactgc

SEQ ID NO: 4572078 - DNA, 25 bp, Homo sapien
tcccgggaaccacagactgccaggt

SEQ ID NO: 4572079 - DNA, 25 bp, Homo sapien
agtcccgggaaccacagactgccag

SEQ ID NO: 4572080 - DNA, 25 bp, Homo sapien
ccgggaaccacagactgccaggtgg

SEQ ID NO: 4572081 - DNA, 25 bp, Homo sapien
ccatgtatacaagagtcagctgggc

SEQ ID NO: 4572082 - DNA, 25 bp, Homo sapien
catgtatacaagagtcagctgggcc

SEQ ID NO: 4572083 - DNA, 25 bp, Homo sapien
tgggccaggcacccgtctgcctttg

SEQ ID NO: 4572084 - DNA, 25 bp, Homo sapien
agcccatgtatacaagagtcagctg

SEQ ID NO: 4572085 - DNA, 25 bp, Homo sapien
agcaatgttcccatcgctgcagcag

SEQ ID NO: 4572086 - DNA, 25 bp, Homo sapien
tgtgcaggtcccagacagcaatgtt

SEQ ID NO: 4572087 - DNA, 25 bp, Homo sapien
cataacaggcgggagccgaggacgt

SEQ ID NO: 4572088 - DNA, 25 bp, Homo sapien
gaagcagactttggcgtcagggcta

SEQ ID NO: 4572089 - DNA, 25 bp, Homo sapien
ggcctcgccgcccacgatgagcgtg

SEQ ID NO: 4572090 - DNA, 25 bp, Homo sapien
ccaggtcccagatggtgagcgtgct

SEQ ID NO: 4572091 - DNA, 25 bp, Homo sapien
cacgatgagcgtgcgcccatcaggg

SEQ ID NO: 4572092 - DNA, 25 bp, Homo sapien
agcagcttgcaggagcggatgtaat

SEQ ID NO: 4572093 - DNA, 25 bp, Homo sapien
tcccagatcttcacgcagcccttgc

SEQ ID NO: 4572094 - DNA, 25 bp, Homo sapien
cacctgtgtagacgtgcctcgtggg

SEQ ID NO: 4572095 - DNA, 25 bp, Homo sapien
agtgtgttgatctgccgggcgtgcc

SEQ ID NO: 4572096 - DNA, 25 bp, Homo sapien
gcccatcagcactcacatggaatga

SEQ ID NO: 4572097 - DNA, 25 bp, Homo sapien
aaaggtgagaaaccgtcactgctgc

SEQ ID NO: 4572098 - DNA, 25 bp, Homo sapien
aaggtgagaaaccgtcactgctgcc

SEQ ID NO: 4572099 - DNA, 25 bp, Homo sapien
ggtgagaaaccgtcactgctgccat

SEQ ID NO: 4572100 - DNA, 25 bp, Homo sapien
aggtgagaaaccgtcactgctgcca

SEQ ID NO: 4572101 - DNA, 25 bp, Homo sapien
gcccgcatcggggggtgagggtcaa

SEQ ID NO: 4572102 - DNA, 25 bp, Homo sapien
ggaggcctgtggcccgcatcggggg

SEQ ID NO: 4572103 - DNA, 25 bp, Homo sapien
cctgtggcccgcatcggggggtgag

SEQ ID NO: 4572104 - DNA, 25 bp, Homo sapien
aggcctgtggcccgcatcggggggt

SEQ ID NO: 4572105 - DNA, 25 bp, Homo sapien
gtcagccccgttttgcagactaaaa

SEQ ID NO: 4572106 - DNA, 25 bp, Homo sapien
ggatggaactcaggtctgctggccc

SEQ ID NO: 4572107 - DNA, 25 bp, Homo sapien
tgctggccccaaagagtgtaccctt

SEQ ID NO: 4572108 - DNA, 25 bp, Homo sapien
tgtacaaccagtcccatctacgaga

SEQ ID NO: 4572109 - DNA, 25 bp, Homo sapien
tcatcatggcgaagggcgccgcata

SEQ ID NO: 4572110 - DNA, 25 bp, Homo sapien
gactggtgagggagccgttcatctc

SEQ ID NO: 4572111 - DNA, 25 bp, Homo sapien
cattggcgatcggccataggcagcg

SEQ ID NO: 4572112 - DNA, 25 bp, Homo sapien
atggagatgggcgtgcgcagagccg

SEQ ID NO: 4572113 - DNA, 25 bp, Homo sapien
atcagattaacccagcccatggtgc

SEQ ID NO: 4572114 - DNA, 25 bp, Homo sapien
ccccaatcagattaacccagcccat

SEQ ID NO: 4572115 - DNA, 25 bp, Homo sapien
cagattaacccagcccatggtgcct

SEQ ID NO: 4572116 - DNA, 25 bp, Homo sapien
caatcagattaacccagcccatggt

SEQ ID NO: 4572117 - DNA, 25 bp, Homo sapien
tatcgggtccatgcccggaggttta

SEQ ID NO: 4572118 - DNA, 25 bp, Homo sapien
ctatcgggtccatgcccggaggttt

SEQ ID NO: 4572119 - DNA, 25 bp, Homo sapien
gggttggtgtgttggacttgagccc

SEQ ID NO: 4572120 - DNA, 25 bp, Homo sapien
ttggtgtgttggacttgagcccagg

SEQ ID NO: 4572121 - DNA, 25 bp, Homo sapien
cctggggtcgtgctggtgcctggag

SEQ ID NO: 4572122 - DNA, 25 bp, Homo sapien
gtgcctggagttggggcgtcgttcc

SEQ ID NO: 4572123 - DNA, 25 bp, Homo sapien
gctactggaagaggccaccgaggca

SEQ ID NO: 4572124 - DNA, 25 bp, Homo sapien
gtgtgctactggaagaggccaccga

SEQ ID NO: 4572125 - DNA, 25 bp, Homo sapien
atcttttttcaggctacgggccttg

SEQ ID NO: 4572126 - DNA, 25 bp, Homo sapien
tttttcaggctacgggccttgtcca

SEQ ID NO: 4572127 - DNA, 25 bp, Homo sapien
ggaggggagtgtgccgggctgaccc

SEQ ID NO: 4572128 - DNA, 25 bp, Homo sapien
tcaggaggggagtgtgccgggctga

SEQ ID NO: 4572129 - DNA, 25 bp, Homo sapien
caggaggggagtgtgccgggctgac

SEQ ID NO: 4572130 - DNA, 25 bp, Homo sapien
tttcaggaggggagtgtgccgggct

SEQ ID NO: 4572131 - DNA, 25 bp, Homo sapien
ctcattggaaacatccaccaccaga

SEQ ID NO: 4572132 - DNA, 25 bp, Homo sapien
tccaccaccagatcatcactcttgt

SEQ ID NO: 4572133 - DNA, 25 bp, Homo sapien
tcatcactcttgtctccatcactgt

SEQ ID NO: 4572134 - DNA, 25 bp, Homo sapien
ggaaacatccaccaccagatcatca

SEQ ID NO: 4572135 - DNA, 25 bp, Homo sapien
tccgcttcttggcttccatgctgta

SEQ ID NO: 4572136 - DNA, 25 bp, Homo sapien
ttccatgctgtagtccgcagagccc

SEQ ID NO: 4572137 - DNA, 25 bp, Homo sapien
gtgcttctcactggcccggaggctt

SEQ ID NO: 4572138 - DNA, 25 bp, Homo sapien
gctttccgagggtgacacagagtta

SEQ ID NO: 4572139 - DNA, 25 bp, Homo sapien
ctgctgcgtgtaacaattcacacat

SEQ ID NO: 4572140 - DNA, 25 bp, Homo sapien
taacaattcacacatccgcacacag

SEQ ID NO: 4572141 - DNA, 25 bp, Homo sapien
gcgtgtaacaattcacacatccgca

SEQ ID NO: 4572142 - DNA, 25 bp, Homo sapien
gctgcgtgtaacaattcacacatcc

SEQ ID NO: 4572143 - DNA, 25 bp, Homo sapien
caagtttctgcccgaagcaaattaa

SEQ ID NO: 4572144 - DNA, 25 bp, Homo sapien
cctatgagcgcccatgcccacccct

SEQ ID NO: 4572145 - DNA, 25 bp, Homo sapien
tgtgaggcctatgagcgcccatgcc

SEQ ID NO: 4572146 - DNA, 25 bp, Homo sapien
ggcctatgagcgcccatgcccaccc

SEQ ID NO: 4572147 - DNA, 25 bp, Homo sapien
tgaggcctatgagcgcccatgccca

SEQ ID NO: 4572148 - DNA, 25 bp, Homo sapien
ccttcaccgtcagatgggcctggct

SEQ ID NO: 4572149 - DNA, 25 bp, Homo sapien
atccttcaccgtcagatgggcctgg

SEQ ID NO: 4572150 - DNA, 25 bp, Homo sapien
ttctcatccttcaccgtcagatggg

SEQ ID NO: 4572151 - DNA, 25 bp, Homo sapien
tcatccttcaccgtcagatgggcct

SEQ ID NO: 4572152 - DNA, 25 bp, Homo sapien
ggggattcctggaggctggagacct

SEQ ID NO: 4572153 - DNA, 25 bp, Homo sapien
ctgctccctgtcactggggggattc

SEQ ID NO: 4572154 - DNA, 25 bp, Homo sapien
gattcctggaggctggagacctgac

SEQ ID NO: 4572155 - DNA, 25 bp, Homo sapien
gctccctgtcactggggggattcct

SEQ ID NO: 4572156 - DNA, 25 bp, Homo sapien
gaccggggggccgtgtgtggcatgg

SEQ ID NO: 4572157 - DNA, 25 bp, Homo sapien
caactggaccggggggccgtgtgtg

SEQ ID NO: 4572158 - DNA, 25 bp, Homo sapien
ctggaccggggggccgtgtgtggca

SEQ ID NO: 4572159 - DNA, 25 bp, Homo sapien
ccggggggccgtgtgtggcatggga

SEQ ID NO: 4572160 - DNA, 25 bp, Homo sapien
tgcaatgaagtcggtggtgagtaca

SEQ ID NO: 4572161 - DNA, 25 bp, Homo sapien
gcaatgaagtcggtggtgagtacag

SEQ ID NO: 4572162 - DNA, 25 bp, Homo sapien
ctgcaatgaagtcggtggtgagtac

SEQ ID NO: 4572163 - DNA, 25 bp, Homo sapien
atgccttcagcattagctgccagca

SEQ ID NO: 4572164 - DNA, 25 bp, Homo sapien
tgccttcagcattagctgccagcat

SEQ ID NO: 4572165 - DNA, 25 bp, Homo sapien
taatgacagggcgatggctgcattc

SEQ ID NO: 4572166 - DNA, 25 bp, Homo sapien
tcaggcgcagcgattagacggctgc

SEQ ID NO: 4572167 - DNA, 25 bp, Homo sapien
tagacggctgcctgcttaatgacag

SEQ ID NO: 4572168 - DNA, 25 bp, Homo sapien
agggcgatggctgcattcacttgga

SEQ ID NO: 4572169 - DNA, 25 bp, Homo sapien
aagcccttggggtgcttgtagaagc

SEQ ID NO: 4572170 - DNA, 25 bp, Homo sapien
ggggccgccattctttgaggccagc

SEQ ID NO: 4572171 - DNA, 25 bp, Homo sapien
ggccagctaaggtcagggtcaatct

SEQ ID NO: 4572172 - DNA, 25 bp, Homo sapien
gtgcttgtagaagccggagccctgg

SEQ ID NO: 4572173 - DNA, 25 bp, Homo sapien
ggttatgataaatgagaggaataaa

SEQ ID NO: 4572174 - DNA, 25 bp, Homo sapien
ctggttatgataaatgagaggaata

SEQ ID NO: 4572175 - DNA, 25 bp, Homo sapien
agaggaataaaagggctatacacac

SEQ ID NO: 4572176 - DNA, 25 bp, Homo sapien
tatgataaatgagaggaataaaagg

SEQ ID NO: 4572177 - DNA, 25 bp, Homo sapien
gaggcagattggggagtccacgtac

SEQ ID NO: 4572178 - DNA, 25 bp, Homo sapien
agaggcagattggggagtccacgta

SEQ ID NO: 4572179 - DNA, 25 bp, Homo sapien
aagaggcagattggggagtccacgt

SEQ ID NO: 4572180 - DNA, 25 bp, Homo sapien
taagaggcagattggggagtccacg

SEQ ID NO: 4572181 - DNA, 25 bp, Homo sapien
tgcttggcgcgctccactgcctgcg

SEQ ID NO: 4572182 - DNA, 25 bp, Homo sapien
cccgatgatggcgttcagctccgtc

SEQ ID NO: 4572183 - DNA, 25 bp, Homo sapien
ttcagctccgtcatggtgacctgct

SEQ ID NO: 4572184 - DNA, 25 bp, Homo sapien
tgatggcgttcagctccgtcatggt

SEQ ID NO: 4572185 - DNA, 25 bp, Homo sapien
attgtgttcagtctcttcgcaatct

SEQ ID NO: 4572186 - DNA, 25 bp, Homo sapien
aaaattgtgttcagtctcttcgcaa

SEQ ID NO: 4572187 - DNA, 25 bp, Homo sapien
catgatctgtgctaaaattgtgttc

SEQ ID NO: 4572188 - DNA, 25 bp, Homo sapien
tgacaggaaaggcatgatctgtgct

SEQ ID NO: 4572189 - DNA, 25 bp, Homo sapien
tgactataggtgcactgccactccc

SEQ ID NO: 4572190 - DNA, 25 bp, Homo sapien
aaatatctgtgactataggtgcact

SEQ ID NO: 4572191 - DNA, 25 bp, Homo sapien
cccaaatatctgtgactataggtgc

SEQ ID NO: 4572192 - DNA, 25 bp, Homo sapien
tgtgactataggtgcactgccactc

SEQ ID NO: 4572193 - DNA, 25 bp, Homo sapien
gacgggcctcttgggccatcaactc

SEQ ID NO: 4572194 - DNA, 25 bp, Homo sapien
acgggcctcttgggccatcaactct

SEQ ID NO: 4572195 - DNA, 25 bp, Homo sapien
aaagctattttgctggctgctatca

SEQ ID NO: 4572196 - DNA, 25 bp, Homo sapien
cactctggtacacaattatgggtgc

SEQ ID NO: 4572197 - DNA, 25 bp, Homo sapien
cattaatagcaaagtggagagctgg

SEQ ID NO: 4572198 - DNA, 25 bp, Homo sapien
tgagcacgcagttctcactctggta

SEQ ID NO: 4572199 - DNA, 25 bp, Homo sapien
gaataattcaagcactccagtcact

SEQ ID NO: 4572200 - DNA, 25 bp, Homo sapien
taaacttgtttgctcaggcctaacc

SEQ ID NO: 4572201 - DNA, 25 bp, Homo sapien
cactacaattagtggcagggctttc

SEQ ID NO: 4572202 - DNA, 25 bp, Homo sapien
tgtgtgtgccgataaaacaccagtc

SEQ ID NO: 4572203 - DNA, 25 bp, Homo sapien
atcagggttgcatttcacggcacag

SEQ ID NO: 4572204 - DNA, 25 bp, Homo sapien
ggttgcatttcacggcacaggtttc

SEQ ID NO: 4572205 - DNA, 25 bp, Homo sapien
atttcacggcacaggtttcttcacc

SEQ ID NO: 4572206 - DNA, 25 bp, Homo sapien
gcatttcacggcacaggtttcttca

SEQ ID NO: 4572207 - DNA, 25 bp, Homo sapien
tcagaccttgcatttcaaggactgg

SEQ ID NO: 4572208 - DNA, 25 bp, Homo sapien
ccttgcatttcaaggactggatcca

SEQ ID NO: 4572209 - DNA, 25 bp, Homo sapien
atttcaaggactggatccattcact

SEQ ID NO: 4572210 - DNA, 25 bp, Homo sapien
ttgcatttcaaggactggatccatt

SEQ ID NO: 4572211 - DNA, 25 bp, Homo sapien
tgcatttcaatgttcaagccatagg

SEQ ID NO: 4572212 - DNA, 25 bp, Homo sapien
gcatttcaatgttcaagccatagga

SEQ ID NO: 4572213 - DNA, 25 bp, Homo sapien
catttcaatgttcaagccataggac

SEQ ID NO: 4572214 - DNA, 25 bp, Homo sapien
atttcaatgttcaagccataggaca

SEQ ID NO: 4572215 - DNA, 25 bp, Homo sapien
tttaagagctgacaagggcgagcgt

SEQ ID NO: 4572216 - DNA, 25 bp, Homo sapien
gagcggtttaagagctgacaagggc

SEQ ID NO: 4572217 - DNA, 25 bp, Homo sapien
cgagcgttcctctcatctcaacaga

SEQ ID NO: 4572218 - DNA, 25 bp, Homo sapien
gctgacaagggcgagcgttcctctc

SEQ ID NO: 4572219 - DNA, 25 bp, Homo sapien
gtttgccagcttgtcgtactccact

SEQ ID NO: 4572220 - DNA, 25 bp, Homo sapien
cagcttgtcgtactccactttgagg

SEQ ID NO: 4572221 - DNA, 25 bp, Homo sapien
atctccgtcttctcgtttgccagct

SEQ ID NO: 4572222 - DNA, 25 bp, Homo sapien
cacataatggcgctgcatctccgtc

SEQ ID NO: 4572223 - DNA, 25 bp, Homo sapien
ggaattcgtctttgatcctgtcaca

SEQ ID NO: 4572224 - DNA, 25 bp, Homo sapien
taaatcccggctgcccgggttgatg

SEQ ID NO: 4572225 - DNA, 25 bp, Homo sapien
tgtcacaagactcagccaccgtgaa

SEQ ID NO: 4572226 - DNA, 25 bp, Homo sapien
ggaactggaattcgtctttgatcct

SEQ ID NO: 4572227 - DNA, 25 bp, Homo sapien
ctggagcccgcgaagacaagacagg

SEQ ID NO: 4572228 - DNA, 25 bp, Homo sapien
ggagcccgcgaagacaagacagggg

SEQ ID NO: 4572229 - DNA, 25 bp, Homo sapien
tggagcccgcgaagacaagacaggg

SEQ ID NO: 4572230 - DNA, 25 bp, Homo sapien
gtgagttgggagacttcagagcggg

SEQ ID NO: 4572231 - DNA, 25 bp, Homo sapien
agaccgcgctcagagcggccccggc

SEQ ID NO: 4572232 - DNA, 25 bp, Homo sapien
gcccaaccaaaagaggccaccctca

SEQ ID NO: 4572233 - DNA, 25 bp, Homo sapien
ggcgggagacaagccgggtgagttg

SEQ ID NO: 4572234 - DNA, 25 bp, Homo sapien
gaagcctccgcaaagggttctcgct

SEQ ID NO: 4572235 - DNA, 25 bp, Homo sapien
gaactccgggctcagtaggtgcaaa

SEQ ID NO: 4572236 - DNA, 25 bp, Homo sapien
taggtgcaaatcaaacgccctggca

SEQ ID NO: 4572237 - DNA, 25 bp, Homo sapien
ttctcgcagcgaaatcccagagtcg

SEQ ID NO: 4572238 - DNA, 25 bp, Homo sapien
gctgccgcgtcggagcgcacaggca

SEQ ID NO: 4572239 - DNA, 25 bp, Homo sapien
ccgctgccgcgtcggagcgcacagg

SEQ ID NO: 4572240 - DNA, 25 bp, Homo sapien
tgccgcgtcggagcgcacaggcagg

SEQ ID NO: 4572241 - DNA, 25 bp, Homo sapien
cgccgctgccgcgtcggagcgcaca

SEQ ID NO: 4572242 - DNA, 25 bp, Homo sapien
gagaccggggagctctacggcttcc

SEQ ID NO: 4572243 - DNA, 25 bp, Homo sapien
gacgagcacgaggtctgaactgccg

SEQ ID NO: 4572244 - DNA, 25 bp, Homo sapien
gtgccccggacctacggataccaca

SEQ ID NO: 4572245 - DNA, 25 bp, Homo sapien
cacacacagacaggcgaaggggacg

SEQ ID NO: 4572246 - DNA, 25 bp, Homo sapien
gccgcgcgtccccggatctatattt

SEQ ID NO: 4572247 - DNA, 25 bp, Homo sapien
gcgcgtccccggatctatattttcc

SEQ ID NO: 4572248 - DNA, 25 bp, Homo sapien
ggccctccccggcaagtccgcgagc

SEQ ID NO: 4572249 - DNA, 25 bp, Homo sapien
tccccggcaagtccgcgagcccgcg

SEQ ID NO: 4572250 - DNA, 25 bp, Homo sapien
tccaaagttgagctgaattgcatcc

SEQ ID NO: 4572251 - DNA, 25 bp, Homo sapien
tctttagcagaagcataagcctgga

SEQ ID NO: 4572252 - DNA, 25 bp, Homo sapien
tgcctcatgcccgaaccgggtaaat

SEQ ID NO: 4572253 - DNA, 25 bp, Homo sapien
tgacctctattgactaatggcacag

SEQ ID NO: 4572254 - DNA, 25 bp, Homo sapien
tcattgattaagtctctccttgtta

SEQ ID NO: 4572255 - DNA, 25 bp, Homo sapien
taagtctctccttgttattaacagc

SEQ ID NO: 4572256 - DNA, 25 bp, Homo sapien
tctgggcccagggtgtagccttgca

SEQ ID NO: 4572257 - DNA, 25 bp, Homo sapien
tgctgccctgtcatcagatgaaaag

SEQ ID NO: 4572258 - DNA, 25 bp, Homo sapien
cacagggtcccaggtgacttcagca

SEQ ID NO: 4572259 - DNA, 25 bp, Homo sapien
ccacagggtcccaggtgacttcagc

SEQ ID NO: 4572260 - DNA, 25 bp, Homo sapien
agggtcccaggtgacttcagcagcc

SEQ ID NO: 4572261 - DNA, 25 bp, Homo sapien
tccctccaaggcccacagggtccca

SEQ ID NO: 4572262 - DNA, 25 bp, Homo sapien
gggactttgagcagttaccaatgca

SEQ ID NO: 4572263 - DNA, 25 bp, Homo sapien
caattgggccagtgtgagacgatgt

SEQ ID NO: 4572264 - DNA, 25 bp, Homo sapien
gcaaataggagagaagacttatccc

SEQ ID NO: 4572265 - DNA, 25 bp, Homo sapien
gaagatccattccagacgtccagat

SEQ ID NO: 4572266 - DNA, 25 bp, Homo sapien
tgggaccaggttttacagcttctgg

SEQ ID NO: 4572267 - DNA, 25 bp, Homo sapien
tgagtggaggctttgaaggctggga

SEQ ID NO: 4572268 - DNA, 25 bp, Homo sapien
aaggctgggaccaggttttacagct

SEQ ID NO: 4572269 - DNA, 25 bp, Homo sapien
tgccttcagtgttcagtgagtggag

SEQ ID NO: 4572270 - DNA, 25 bp, Homo sapien
gactgtcccagtgtcagcatgttgt

SEQ ID NO: 4572271 - DNA, 25 bp, Homo sapien
tgttgttatgggctcgctgtttcat

SEQ ID NO: 4572272 - DNA, 25 bp, Homo sapien
cagcatgttgttatgggctcgctgt

SEQ ID NO: 4572273 - DNA, 25 bp, Homo sapien
ccagtgtcagcatgttgttatgggc

SEQ ID NO: 4572274 - DNA, 25 bp, Homo sapien
ttgatgcttttgtgtcagcttcccc

SEQ ID NO: 4572275 - DNA, 25 bp, Homo sapien
atgcttttgtgtcagcttcccccat

SEQ ID NO: 4572276 - DNA, 25 bp, Homo sapien
cttgatgcttttgtgtcagcttccc

SEQ ID NO: 4572277 - DNA, 25 bp, Homo sapien
gatgcttttgtgtcagcttccccca

SEQ ID NO: 4572278 - DNA, 25 bp, Homo sapien
taattgaaggtgtttcgagggcagc

SEQ ID NO: 4572279 - DNA, 25 bp, Homo sapien
gaccatgataaatgtccgggcttgg

SEQ ID NO: 4572280 - DNA, 25 bp, Homo sapien
aattaatgtccccagaccatgataa

SEQ ID NO: 4572281 - DNA, 25 bp, Homo sapien
tccgggcttggtgagtaatgcttcc

SEQ ID NO: 4572282 - DNA, 25 bp, Homo sapien
ttcggagcacttgatgggagcactg

SEQ ID NO: 4572283 - DNA, 25 bp, Homo sapien
atgctggattcggagcacttgatgg

SEQ ID NO: 4572284 - DNA, 25 bp, Homo sapien
cacttgatgggagcactggaaacat

SEQ ID NO: 4572285 - DNA, 25 bp, Homo sapien
ctatatgctggattcggagcacttg

SEQ ID NO: 4572286 - DNA, 25 bp, Homo sapien
tttcttccaggaagatttatgggac

SEQ ID NO: 4572287 - DNA, 25 bp, Homo sapien
gatttatgggacttgccaacctcct

SEQ ID NO: 4572288 - DNA, 25 bp, Homo sapien
ctgtcagtgccagtatactggtcta

SEQ ID NO: 4572289 - DNA, 25 bp, Homo sapien
tggtctactctagctgcatagctgt

SEQ ID NO: 4572290 - DNA, 25 bp, Homo sapien
agggatggtcactggttaccccagg

SEQ ID NO: 4572291 - DNA, 25 bp, Homo sapien
ctggttaccccaggcagggttgtct

SEQ ID NO: 4572292 - DNA, 25 bp, Homo sapien
ctggttgacgagagcccaagggatg

SEQ ID NO: 4572293 - DNA, 25 bp, Homo sapien
gtgcagattttcagtgccaggagca

SEQ ID NO: 4572294 - DNA, 25 bp, Homo sapien
tgcttgctttcttggggtgtctggt

SEQ ID NO: 4572295 - DNA, 25 bp, Homo sapien
tcagcatgccacagtcccaacactg

SEQ ID NO: 4572296 - DNA, 25 bp, Homo sapien
ctgccaaggtgtccgctcagcatgc

SEQ ID NO: 4572297 - DNA, 25 bp, Homo sapien
tgccacagtcccaacactgtgctgt

SEQ ID NO: 4572298 - DNA, 25 bp, Homo sapien
tcaatgtcattgtcccaagaaatgg

SEQ ID NO: 4572299 - DNA, 25 bp, Homo sapien
ggtggttccgtatgaaccataagca

SEQ ID NO: 4572300 - DNA, 25 bp, Homo sapien
gaaatggcccatggataattcagag

SEQ ID NO: 4572301 - DNA, 25 bp, Homo sapien
cctgggaaagccaatttcaatgtca

SEQ ID NO: 4572302 - DNA, 25 bp, Homo sapien
cagcccatcgctgttgaaagcttgc

SEQ ID NO: 4572303 - DNA, 25 bp, Homo sapien
gaaactcagcccatcgctgttgaaa

SEQ ID NO: 4572304 - DNA, 25 bp, Homo sapien
taggttgaaactcagcccatcgctg

SEQ ID NO: 4572305 - DNA, 25 bp, Homo sapien
ctcctaggttgaaactcagcccatc

SEQ ID NO: 4572306 - DNA, 25 bp, Homo sapien
gattggatatccagccgagaggaca

SEQ ID NO: 4572307 - DNA, 25 bp, Homo sapien
agtttggaccagatgcagaaggcac

SEQ ID NO: 4572308 - DNA, 25 bp, Homo sapien
caaggactcccctaaaggtgcttca

SEQ ID NO: 4572309 - DNA, 25 bp, Homo sapien
caaacagaggtaagaccagggccag

SEQ ID NO: 4572310 - DNA, 25 bp, Homo sapien
aattgctactgtcatcaatatatcc

SEQ ID NO: 4572311 - DNA, 25 bp, Homo sapien
cattagcaatattgtaattgctact

SEQ ID NO: 4572312 - DNA, 25 bp, Homo sapien
gctactgtcatcaatatatcccata

SEQ ID NO: 4572313 - DNA, 25 bp, Homo sapien
tgtaattgctactgtcatcaatata

SEQ ID NO: 4572314 - DNA, 25 bp, Homo sapien
catggctaataccaacatcactatt

SEQ ID NO: 4572315 - DNA, 25 bp, Homo sapien
atcactattcataccaccattgtca

SEQ ID NO: 4572316 - DNA, 25 bp, Homo sapien
aaaagcattgtctttagagtcatgg

SEQ ID NO: 4572317 - DNA, 25 bp, Homo sapien
caaaagcattgtctttagagtcatg

SEQ ID NO: 4572318 - DNA, 25 bp, Homo sapien
atagcaatattatggtcactgccac

SEQ ID NO: 4572319 - DNA, 25 bp, Homo sapien
caatagcaatattatggtcactgcc

SEQ ID NO: 4572320 - DNA, 25 bp, Homo sapien
gcaatattatggtcactgccaccaa

SEQ ID NO: 4572321 - DNA, 25 bp, Homo sapien
ctagcaatagcaatattatggtcac

SEQ ID NO: 4572322 - DNA, 25 bp, Homo sapien
aaagcaggatcattagggccatcac

SEQ ID NO: 4572323 - DNA, 25 bp, Homo sapien
tataaaaagcaggatcattagggcc

SEQ ID NO: 4572324 - DNA, 25 bp, Homo sapien
gcaggatcattagggccatcactaa

SEQ ID NO: 4572325 - DNA, 25 bp, Homo sapien
ggccatcactaatctcaccatccat

SEQ ID NO: 4572326 - DNA, 25 bp, Homo sapien
tgttaccttctagcaagcccattgc

SEQ ID NO: 4572327 - DNA, 25 bp, Homo sapien
gcatgtcagcttcttactcatagga

SEQ ID NO: 4572328 - DNA, 25 bp, Homo sapien
gaagtgtcttataccagcatgtcag

SEQ ID NO: 4572329 - DNA, 25 bp, Homo sapien
tgcttattaggtcagctgcacaact

SEQ ID NO: 4572330 - DNA, 25 bp, Homo sapien
ggtgctgttaatgaagggtccctct

SEQ ID NO: 4572331 - DNA, 25 bp, Homo sapien
caagagatcaattcagggctggaca

SEQ ID NO: 4572332 - DNA, 25 bp, Homo sapien
aatagcagatggctacggctttgtt

SEQ ID NO: 4572333 - DNA, 25 bp, Homo sapien
agagtggccatcagaacattccgtc

SEQ ID NO: 4572334 - DNA, 25 bp, Homo sapien
cgcactgtgagcagggaagtttctg

SEQ ID NO: 4572335 - DNA, 25 bp, Homo sapien
gcactgtgagcagggaagtttctgt

SEQ ID NO: 4572336 - DNA, 25 bp, Homo sapien
ccgcactgtgagcagggaagtttct

SEQ ID NO: 4572337 - DNA, 25 bp, Homo sapien
actgtgagcagggaagtttctgtct

SEQ ID NO: 4572338 - DNA, 25 bp, Homo sapien
tcagggagtaaaacgattcagtgtc

SEQ ID NO: 4572339 - DNA, 25 bp, Homo sapien
gggcttccccgcatccaggaaggaa

SEQ ID NO: 4572340 - DNA, 25 bp, Homo sapien
gattcagtgtcttgagggagccagc

SEQ ID NO: 4572341 - DNA, 25 bp, Homo sapien
aatgggttagggccggcattctgca

SEQ ID NO: 4572342 - DNA, 25 bp, Homo sapien
cataccagggtgtgaaccccaggct

SEQ ID NO: 4572343 - DNA, 25 bp, Homo sapien
tgctgggacacatcactctcctggc

SEQ ID NO: 4572344 - DNA, 25 bp, Homo sapien
tctcttggcagagatactgagagta

SEQ ID NO: 4572345 - DNA, 25 bp, Homo sapien
tgactcatgggcacccgggaagttt

SEQ ID NO: 4572346 - DNA, 25 bp, Homo sapien
tctggcaatacaggttaatgagcac

SEQ ID NO: 4572347 - DNA, 25 bp, Homo sapien
ggcctccttgccgacataatagcga

SEQ ID NO: 4572348 - DNA, 25 bp, Homo sapien
agcggtttcgcagtctctgctctgg

SEQ ID NO: 4572349 - DNA, 25 bp, Homo sapien
acaggcctccttgccgacataatag

SEQ ID NO: 4572350 - DNA, 25 bp, Homo sapien
tgcccactggtaatccacaaactga

SEQ ID NO: 4572351 - DNA, 25 bp, Homo sapien
tgtggtgttggagctccttggtggc

SEQ ID NO: 4572352 - DNA, 25 bp, Homo sapien
taatccacaaactgaacgtgcttct

SEQ ID NO: 4572353 - DNA, 25 bp, Homo sapien
gatgttggtgcccactggtaatcca

SEQ ID NO: 4572354 - DNA, 25 bp, Homo sapien
tggggcaatgacacagggcctggtg

SEQ ID NO: 4572355 - DNA, 25 bp, Homo sapien
gttggctggggcaatgacacagggc

SEQ ID NO: 4572356 - DNA, 25 bp, Homo sapien
ggcaaaggttggctggggcaatgac

SEQ ID NO: 4572357 - DNA, 25 bp, Homo sapien
tgacacagggcctggtgagtgtcat

SEQ ID NO: 4572358 - DNA, 25 bp, Homo sapien
gaatatttattctagacgaggaggc

SEQ ID NO: 4572359 - DNA, 25 bp, Homo sapien
cctaagacttaactgtccaagggct

SEQ ID NO: 4572360 - DNA, 25 bp, Homo sapien
tatataaaatatcagggccagacag

SEQ ID NO: 4572361 - DNA, 25 bp, Homo sapien
tactcctcatagctcagggcaaaag

SEQ ID NO: 4572362 - DNA, 25 bp, Homo sapien
ccatttatgaccagccacggtggag

SEQ ID NO: 4572363 - DNA, 25 bp, Homo sapien
gcagataattaatccttcaaccagg

SEQ ID NO: 4572364 - DNA, 25 bp, Homo sapien
agggtgtgcagtcaacctcacatca

SEQ ID NO: 4572365 - DNA, 25 bp, Homo sapien
caactttagatcaggtagcagataa

SEQ ID NO: 4572366 - DNA, 25 bp, Homo sapien
gagggcttgccgacggcgggtggct

SEQ ID NO: 4572367 - DNA, 25 bp, Homo sapien
ctgtggtgcatgtttcattagctgc

SEQ ID NO: 4572368 - DNA, 25 bp, Homo sapien
gacggcgggtggctgtggtgcatgt

SEQ ID NO: 4572369 - DNA, 25 bp, Homo sapien
agacaggagggcttgccgacggcgg

SEQ ID NO: 4572370 - DNA, 25 bp, Homo sapien
gtgtcctctccaatgggacctaccc

SEQ ID NO: 4572371 - DNA, 25 bp, Homo sapien
gtcctctccaatgggacctacccta

SEQ ID NO: 4572372 - DNA, 25 bp, Homo sapien
cctctccaatgggacctaccctata

SEQ ID NO: 4572373 - DNA, 25 bp, Homo sapien
tctccaatgggacctaccctatacc

SEQ ID NO: 4572374 - DNA, 25 bp, Homo sapien
cttaacagctattgatgtagaacat

SEQ ID NO: 4572375 - DNA, 25 bp, Homo sapien
ctttctaattggattgattgccttc

SEQ ID NO: 4572376 - DNA, 25 bp, Homo sapien
ccttaacagctattgatgtagaaca

SEQ ID NO: 4572377 - DNA, 25 bp, Homo sapien
gcaaatgtgcctgagtattcaaagt

SEQ ID NO: 4572378 - DNA, 25 bp, Homo sapien
tcttggaaggcactcactggttgta

SEQ ID NO: 4572379 - DNA, 25 bp, Homo sapien
cataaatggttacacggactagata

SEQ ID NO: 4572380 - DNA, 25 bp, Homo sapien
ggcaaaatgagctcagtaataccta

SEQ ID NO: 4572381 - DNA, 25 bp, Homo sapien
gaagctaagattcaacctgcagttt

SEQ ID NO: 4572382 - DNA, 25 bp, Homo sapien
ggctggctgattagaaaaggtgaca

SEQ ID NO: 4572383 - DNA, 25 bp, Homo sapien
catcagctaatcagaggtggcttcc

SEQ ID NO: 4572384 - DNA, 25 bp, Homo sapien
tccactgggctcatagattagcatc

SEQ ID NO: 4572385 - DNA, 25 bp, Homo sapien
caatgggtgccagttaaagatggta

SEQ ID NO: 4572386 - DNA, 25 bp, Homo sapien
agccacaggaaatttaattgcacaa

SEQ ID NO: 4572387 - DNA, 25 bp, Homo sapien
aaagatggtatgtgctcttctcggc

SEQ ID NO: 4572388 - DNA, 25 bp, Homo sapien
aatattggcagggacagccacagga

SEQ ID NO: 4572389 - DNA, 25 bp, Homo sapien
tcagcctgtgggcactaaaagggac

SEQ ID NO: 4572390 - DNA, 25 bp, Homo sapien
cctgtgggcactaaaagggaccaga

SEQ ID NO: 4572391 - DNA, 25 bp, Homo sapien
gcctgtgggcactaaaagggaccag

SEQ ID NO: 4572392 - DNA, 25 bp, Homo sapien
ctgtgggcactaaaagggaccagaa

SEQ ID NO: 4572393 - DNA, 25 bp, Homo sapien
cagatgcagatgtgttgctccctga

SEQ ID NO: 4572394 - DNA, 25 bp, Homo sapien
cattcagaactaaaccatcccggtt

SEQ ID NO: 4572395 - DNA, 25 bp, Homo sapien
gaaactgtgaacttagacggcatca

SEQ ID NO: 4572396 - DNA, 25 bp, Homo sapien
tatcatgatatgtcccacgtctggt

SEQ ID NO: 4572397 - DNA, 25 bp, Homo sapien
tggaaaactcgactatgacaatcag

SEQ ID NO: 4572398 - DNA, 25 bp, Homo sapien
tcagacaaatgtggttgacgccaga

SEQ ID NO: 4572399 - DNA, 25 bp, Homo sapien
gataaagccccaataactcagacaa

SEQ ID NO: 4572400 - DNA, 25 bp, Homo sapien
tcaagggcctggctgcaacgtctgg

SEQ ID NO: 4572401 - DNA, 25 bp, Homo sapien
ctggactcctcctccacatgttgaa

SEQ ID NO: 4572402 - DNA, 25 bp, Homo sapien
ggactcctcctccacatgttgaatc

SEQ ID NO: 4572403 - DNA, 25 bp, Homo sapien
cctggactcctcctccacatgttga

SEQ ID NO: 4572404 - DNA, 25 bp, Homo sapien
tggactcctcctccacatgttgaat

SEQ ID NO: 4572405 - DNA, 25 bp, Homo sapien
gatctttgaccctcggagactctgc

SEQ ID NO: 4572406 - DNA, 25 bp, Homo sapien
tcaagaggtaatggcgctgtctgga

SEQ ID NO: 4572407 - DNA, 25 bp, Homo sapien
gccaggacgctgagatctctgggat

SEQ ID NO: 4572408 - DNA, 25 bp, Homo sapien
gtttgccttcccagatctggactgt

SEQ ID NO: 4572409 - DNA, 25 bp, Homo sapien
acacgatcacatcgcccattttgtg

SEQ ID NO: 4572410 - DNA, 25 bp, Homo sapien
tcctccatccaacacgatcacatcg

SEQ ID NO: 4572411 - DNA, 25 bp, Homo sapien
gaacaacccactccttaggagccag

SEQ ID NO: 4572412 - DNA, 25 bp, Homo sapien
acaacccactccttaggagccagaa

SEQ ID NO: 4572413 - DNA, 25 bp, Homo sapien
gttggagggtggttctccacaagcc

SEQ ID NO: 4572414 - DNA, 25 bp, Homo sapien
agcctctgccccctgatattcaggg

SEQ ID NO: 4572415 - DNA, 25 bp, Homo sapien
gagggtggttctccacaagcctctg

SEQ ID NO: 4572416 - DNA, 25 bp, Homo sapien
ttctcagcacggctcgctgcttctg

SEQ ID NO: 4572417 - DNA, 25 bp, Homo sapien
ctttaagggaaagaccatagatggg

SEQ ID NO: 4572418 - DNA, 25 bp, Homo sapien
ctgcagggtctatggtctttaaggg

SEQ ID NO: 4572419 - DNA, 25 bp, Homo sapien
aaagaccatagatgggtggcccatg

SEQ ID NO: 4572420 - DNA, 25 bp, Homo sapien
gagacccagggcatagcgctcccag

SEQ ID NO: 4572421 - DNA, 25 bp, Homo sapien
tgcacattagggacatcccctgcat

SEQ ID NO: 4572422 - DNA, 25 bp, Homo sapien
atgcacattagggacatcccctgca

SEQ ID NO: 4572423 - DNA, 25 bp, Homo sapien
gccagccttttcccggtgtagggca

SEQ ID NO: 4572424 - DNA, 25 bp, Homo sapien
ccataaaatcgcctcacaagtgaat

SEQ ID NO: 4572425 - DNA, 25 bp, Homo sapien
accgaagcgggactgaacattttca

SEQ ID NO: 4572426 - DNA, 25 bp, Homo sapien
cccattaggacaaactgatgccggg

SEQ ID NO: 4572427 - DNA, 25 bp, Homo sapien
gcacatgagtaataccaagcccatt

SEQ ID NO: 4572428 - DNA, 25 bp, Homo sapien
tacatttgaagacgtagcacctact

SEQ ID NO: 4572429 - DNA, 25 bp, Homo sapien
gcttctacatttgaagacgtagcac

SEQ ID NO: 4572430 - DNA, 25 bp, Homo sapien
aagacgtagcacctactttgtgaca

SEQ ID NO: 4572431 - DNA, 25 bp, Homo sapien
tttgaagacgtagcacctactttgt

SEQ ID NO: 4572432 - DNA, 25 bp, Homo sapien
tggcacacgcgagcaaattgcagca

SEQ ID NO: 4572433 - DNA, 25 bp, Homo sapien
tctccaagtgtagcgtggcacacgc

SEQ ID NO: 4572434 - DNA, 25 bp, Homo sapien
gcatattcatccaaagttgtaactg

SEQ ID NO: 4572435 - DNA, 25 bp, Homo sapien
gcaccgccgctaatgcatattcatc

SEQ ID NO: 4572436 - DNA, 25 bp, Homo sapien
tcatggtgaaaagggtgtttcaaag

SEQ ID NO: 4572437 - DNA, 25 bp, Homo sapien
tcggtatttaattaaatctccattc

SEQ ID NO: 4572438 - DNA, 25 bp, Homo sapien
catggtgaaaagggtgtttcaaagt

SEQ ID NO: 4572439 - DNA, 25 bp, Homo sapien
aatcggtatttaattaaatctccat

SEQ ID NO: 4572440 - DNA, 25 bp, Homo sapien
agcctgagaagtcaatgagctcggc

SEQ ID NO: 4572441 - DNA, 25 bp, Homo sapien
agaagtcaatgagctcggcccccat

SEQ ID NO: 4572442 - DNA, 25 bp, Homo sapien
cctgagaagtcaatgagctcggccc

SEQ ID NO: 4572443 - DNA, 25 bp, Homo sapien
ccggagcctgagaagtcaatgagct

SEQ ID NO: 4572444 - DNA, 25 bp, Homo sapien
gagcctcattatgatattgtcgata

SEQ ID NO: 4572445 - DNA, 25 bp, Homo sapien
tggctcttgccaccagagggaaacg

SEQ ID NO: 4572446 - DNA, 25 bp, Homo sapien
tattgtcgatattccccgcgaaagg

SEQ ID NO: 4572447 - DNA, 25 bp, Homo sapien
aacggttttgagcatgcagcgccat

SEQ ID NO: 4572448 - DNA, 25 bp, Homo sapien
ggggaagaatggcaggcccgctgat

SEQ ID NO: 4572449 - DNA, 25 bp, Homo sapien
cttggggaagaatggcaggcccgct

SEQ ID NO: 4572450 - DNA, 25 bp, Homo sapien
tggggcgctctcctgggtgaggaag

SEQ ID NO: 4572451 - DNA, 25 bp, Homo sapien
aagaatggcaggcccgctgatggtc

SEQ ID NO: 4572452 - DNA, 25 bp, Homo sapien
ttccataacaggccagggctggtag

SEQ ID NO: 4572453 - DNA, 25 bp, Homo sapien
ctggtagcagcttcccaccgtcgcc

SEQ ID NO: 4572454 - DNA, 25 bp, Homo sapien
tggtagcagcttcccaccgtcgccg

SEQ ID NO: 4572455 - DNA, 25 bp, Homo sapien
cataacaggccagggctggtagcag

SEQ ID NO: 4572456 - DNA, 25 bp, Homo sapien
aaagttgcaaaggagccagggaagc

SEQ ID NO: 4572457 - DNA, 25 bp, Homo sapien
tctccaaaatgcgaggccaggtaga

SEQ ID NO: 4572458 - DNA, 25 bp, Homo sapien
cacgtgaacgtggagctccaaagca

SEQ ID NO: 4572459 - DNA, 25 bp, Homo sapien
taaacgatgtgtgcttgaaccaaga

SEQ ID NO: 4572460 - DNA, 25 bp, Homo sapien
ctcagcgtccccagagcaacccagc

SEQ ID NO: 4572461 - DNA, 25 bp, Homo sapien
cctgagacaggccgcgatcaagaac

SEQ ID NO: 4572462 - DNA, 25 bp, Homo sapien
gagacaggccgcgatcaagaaccct

SEQ ID NO: 4572463 - DNA, 25 bp, Homo sapien
ggccgcgatcaagaaccctcagcgt

SEQ ID NO: 4572464 - DNA, 25 bp, Homo sapien
aagacaagccatggcgggtatccac

SEQ ID NO: 4572465 - DNA, 25 bp, Homo sapien
tggcgggtatccacagcagagctca

SEQ ID NO: 4572466 - DNA, 25 bp, Homo sapien
gctccatttccaccgtgctcccagc

SEQ ID NO: 4572467 - DNA, 25 bp, Homo sapien
tgctcttctcttaaacaggcagtgg

SEQ ID NO: 4572468 - DNA, 25 bp, Homo sapien
cctggtgacgagtggcggagctaag

SEQ ID NO: 4572469 - DNA, 25 bp, Homo sapien
gtccggtgtgacctgcagaagctcc

SEQ ID NO: 4572470 - DNA, 25 bp, Homo sapien
cagaatgttcctcagggaacctctc

SEQ ID NO: 4572471 - DNA, 25 bp, Homo sapien
tcaacagagcccaacgtccggtgtg

SEQ ID NO: 4572472 - DNA, 25 bp, Homo sapien
aaaggcatttgatgagaggcagccc

SEQ ID NO: 4572473 - DNA, 25 bp, Homo sapien
tcctaggacacaaatgggaaggctc

SEQ ID NO: 4572474 - DNA, 25 bp, Homo sapien
aaggaccctgagagcagcatctgca

SEQ ID NO: 4572475 - DNA, 25 bp, Homo sapien
tcagaaggatcctcgatgtctcagg

SEQ ID NO: 4572476 - DNA, 25 bp, Homo sapien
catacattttcccactaagatattc

SEQ ID NO: 4572477 - DNA, 25 bp, Homo sapien
cattcatcatacattttcccactaa

SEQ ID NO: 4572478 - DNA, 25 bp, Homo sapien
gcctggggacattcatcatacattt

SEQ ID NO: 4572479 - DNA, 25 bp, Homo sapien
cattttcccactaagatattccaag

SEQ ID NO: 4572480 - DNA, 25 bp, Homo sapien
gccagctgtcaactccaaagaagcc

SEQ ID NO: 4572481 - DNA, 25 bp, Homo sapien
agaaagtgacagacgacgtcccggg

SEQ ID NO: 4572482 - DNA, 25 bp, Homo sapien
aactccaaagaagccggagttgctg

SEQ ID NO: 4572483 - DNA, 25 bp, Homo sapien
tcaggcacgggagcgtttgccacgg

SEQ ID NO: 4572484 - DNA, 25 bp, Homo sapien
tatgtggctttaggggctccttggg

SEQ ID NO: 4572485 - DNA, 25 bp, Homo sapien
ttatgtggctttaggggctccttgg

SEQ ID NO: 4572486 - DNA, 25 bp, Homo sapien
cttatgtggctttaggggctccttg

SEQ ID NO: 4572487 - DNA, 25 bp, Homo sapien
atgtggctttaggggctccttgggg

SEQ ID NO: 4572488 - DNA, 25 bp, Homo sapien
gctggaagttgacgcgttccaccct

SEQ ID NO: 4572489 - DNA, 25 bp, Homo sapien
ctgcgggtgcaggaaatgagaggcc

SEQ ID NO: 4572490 - DNA, 25 bp, Homo sapien
tcattgctggaagttgacgcgttcc

SEQ ID NO: 4572491 - DNA, 25 bp, Homo sapien
cctccacagcaagcctgcgggtgca

SEQ ID NO: 4572492 - DNA, 25 bp, Homo sapien
ggttgtgctgaactactctgagctt

SEQ ID NO: 4572493 - DNA, 25 bp, Homo sapien
gctgaactactctgagcttccagca

SEQ ID NO: 4572494 - DNA, 25 bp, Homo sapien
agcttccagcagcatgcgccagaca

SEQ ID NO: 4572495 - DNA, 25 bp, Homo sapien
agcatgcgccagacagtccacagag

SEQ ID NO: 4572496 - DNA, 25 bp, Homo sapien
aacgaaagtgctggacaacactggc

SEQ ID NO: 4572497 - DNA, 25 bp, Homo sapien
caagcagtataggaatgtgacgata

SEQ ID NO: 4572498 - DNA, 25 bp, Homo sapien
tttatggtagagatgcaaatgcttc

SEQ ID NO: 4572499 - DNA, 25 bp, Homo sapien
cactggctggtatgcaaatatctag

SEQ ID NO: 4572500 - DNA, 25 bp, Homo sapien
aggcctcagtgtcagtgcctgcagg

SEQ ID NO: 4572501 - DNA, 25 bp, Homo sapien
cctcagtgtcagtgcctgcaggagg

SEQ ID NO: 4572502 - DNA, 25 bp, Homo sapien
caccggtaaggcctcagtgtcagtg

SEQ ID NO: 4572503 - DNA, 25 bp, Homo sapien
taaggcctcagtgtcagtgcctgca

SEQ ID NO: 4572504 - DNA, 25 bp, Homo sapien
taaatattaggctgcaaccaaccct

SEQ ID NO: 4572505 - DNA, 25 bp, Homo sapien
gagtataaaccagttggcatcactg

SEQ ID NO: 4572506 - DNA, 25 bp, Homo sapien
caaccctagcacttccaagagtaca

SEQ ID NO: 4572507 - DNA, 25 bp, Homo sapien
cactggtttatggtactgtataggc

SEQ ID NO: 4572508 - DNA, 25 bp, Homo sapien
aaaggccctacgaagcacgtccatc

SEQ ID NO: 4572509 - DNA, 25 bp, Homo sapien
tgcggagaaaggccctacgaagcac

SEQ ID NO: 4572510 - DNA, 25 bp, Homo sapien
cggagaaaggccctacgaagcacgt

SEQ ID NO: 4572511 - DNA, 25 bp, Homo sapien
tacgaagcacgtccatcctacctgc

SEQ ID NO: 4572512 - DNA, 25 bp, Homo sapien
gaagagcaccgttcaccagctatga

SEQ ID NO: 4572513 - DNA, 25 bp, Homo sapien
ttcagaatcacagggctagagacag

SEQ ID NO: 4572514 - DNA, 25 bp, Homo sapien
tgagctgaggcctcctaagatgcaa

SEQ ID NO: 4572515 - DNA, 25 bp, Homo sapien
ccgccgatggcaagaggaaaatact

SEQ ID NO: 4572516 - DNA, 25 bp, Homo sapien
gaatgaggtcgacgccttcacagct

SEQ ID NO: 4572517 - DNA, 25 bp, Homo sapien
cacttccatccctgtagaccttgag

SEQ ID NO: 4572518 - DNA, 25 bp, Homo sapien
gtaaacaaccttcttgccagaaatg

SEQ ID NO: 4572519 - DNA, 25 bp, Homo sapien
tcaacaagcccgtcagaatgaggtc

SEQ ID NO: 4572520 - DNA, 25 bp, Homo sapien
tattggcacacgtctaacccattgg

SEQ ID NO: 4572521 - DNA, 25 bp, Homo sapien
caagggtctagctcagagtagggct

SEQ ID NO: 4572522 - DNA, 25 bp, Homo sapien
ggcctgccacctatctctgtaaacg

SEQ ID NO: 4572523 - DNA, 25 bp, Homo sapien
cagttgagtggtcgtgacagaaacc

SEQ ID NO: 4572524 - DNA, 25 bp, Homo sapien
cacgctgctcaaatatgggcaccaa

SEQ ID NO: 4572525 - DNA, 25 bp, Homo sapien
ccccacgctgctcaaatatgggcac

SEQ ID NO: 4572526 - DNA, 25 bp, Homo sapien
ccacgctgctcaaatatgggcacca

SEQ ID NO: 4572527 - DNA, 25 bp, Homo sapien
acgctgctcaaatatgggcaccaaa

SEQ ID NO: 4572528 - DNA, 25 bp, Homo sapien
atgttaccgcttttaaggcggcgcg

SEQ ID NO: 4572529 - DNA, 25 bp, Homo sapien
ccccaggttggagtgtcctgacgca

SEQ ID NO: 4572530 - DNA, 25 bp, Homo sapien
tgtggacccagggtgagcagtaaca

SEQ ID NO: 4572531 - DNA, 25 bp, Homo sapien
tagggcatcgttctgttccccaggt

SEQ ID NO: 4572532 - DNA, 25 bp, Homo sapien
aatttcctcacccagaagttcaaag

SEQ ID NO: 4572533 - DNA, 25 bp, Homo sapien
gcaatcataactggtacaaacacaa

SEQ ID NO: 4572534 - DNA, 25 bp, Homo sapien
tacaagatgtctgccagctcccagt

SEQ ID NO: 4572535 - DNA, 25 bp, Homo sapien
gatcaccactgacattaagctcctg

SEQ ID NO: 4572536 - DNA, 25 bp, Homo sapien
ctccatgaagatgggtcatatgaat

SEQ ID NO: 4572537 - DNA, 25 bp, Homo sapien
tgccatgagccatcgccaatactca

SEQ ID NO: 4572538 - DNA, 25 bp, Homo sapien
agggaatcttgagacaccccctcgc

SEQ ID NO: 4572539 - DNA, 25 bp, Homo sapien
catttgtctttccaatatacagtaa

SEQ ID NO: 4572540 - DNA, 25 bp, Homo sapien
gaggtgccttggattcagattcaaa

SEQ ID NO: 4572541 - DNA, 25 bp, Homo sapien
taagaggtgccttggattcagattc

SEQ ID NO: 4572542 - DNA, 25 bp, Homo sapien
ggtgccttggattcagattcaaagg

SEQ ID NO: 4572543 - DNA, 25 bp, Homo sapien
ccttggattcagattcaaaggaata

SEQ ID NO: 4572544 - DNA, 25 bp, Homo sapien
cactcgtagtccatgagcagctgga

SEQ ID NO: 4572545 - DNA, 25 bp, Homo sapien
tagtccatgagcagctggacagagg

SEQ ID NO: 4572546 - DNA, 25 bp, Homo sapien
tcactcgtagtccatgagcagctgg

SEQ ID NO: 4572547 - DNA, 25 bp, Homo sapien
tccatgagcagctggacagaggcca

SEQ ID NO: 4572548 - DNA, 25 bp, Homo sapien
tcccaggaggcattgaagtgcacag

SEQ ID NO: 4572549 - DNA, 25 bp, Homo sapien
gaggcattgaagtgcacagttacct

SEQ ID NO: 4572550 - DNA, 25 bp, Homo sapien
caggaggcattgaagtgcacagtta

SEQ ID NO: 4572551 - DNA, 25 bp, Homo sapien
cattgaagtgcacagttacctccct

SEQ ID NO: 4572552 - DNA, 25 bp, Homo sapien
ctgtttgcagagcctttcttcagct

SEQ ID NO: 4572553 - DNA, 25 bp, Homo sapien
ctccagcttggcggctcctcagaat

SEQ ID NO: 4572554 - DNA, 25 bp, Homo sapien
agaatcagcatttccaagctcagcc

SEQ ID NO: 4572555 - DNA, 25 bp, Homo sapien
gcttggcggctcctcagaatcagca

SEQ ID NO: 4572556 - DNA, 25 bp, Homo sapien
gggagagccggaagccacggatgcc

SEQ ID NO: 4572557 - DNA, 25 bp, Homo sapien
agccacggatgccccagcgagtcat

SEQ ID NO: 4572558 - DNA, 25 bp, Homo sapien
ttcagcaaccctgaacgtgctgttt

SEQ ID NO: 4572559 - DNA, 25 bp, Homo sapien
caaccctgaacgtgctgtttgtgtc

SEQ ID NO: 4572560 - DNA, 25 bp, Homo sapien
gctgtcaattctgtgcctcagtccc

SEQ ID NO: 4572561 - DNA, 25 bp, Homo sapien
tgtcaattctgtgcctcagtcccgt

SEQ ID NO: 4572562 - DNA, 25 bp, Homo sapien
ctgtcaattctgtgcctcagtcccg

SEQ ID NO: 4572563 - DNA, 25 bp, Homo sapien
acttgtttacatggcgctgggttcc

SEQ ID NO: 4572564 - DNA, 25 bp, Homo sapien
ggagaaataggctgcccctctggaa

SEQ ID NO: 4572565 - DNA, 25 bp, Homo sapien
tccagttgtgttggccacggcagcc

SEQ ID NO: 4572566 - DNA, 25 bp, Homo sapien
tggtgctggctatctactgggctgc

SEQ ID NO: 4572567 - DNA, 25 bp, Homo sapien
tgcagagccgctgctcagtgcatag

SEQ ID NO: 4572568 - DNA, 25 bp, Homo sapien
cagtgcatagcaggggatccgccac

SEQ ID NO: 4572569 - DNA, 25 bp, Homo sapien
gcagagccgctgctcagtgcatagc

SEQ ID NO: 4572570 - DNA, 25 bp, Homo sapien
gggatccgccacctgttctctgtgc

SEQ ID NO: 4572571 - DNA, 25 bp, Homo sapien
acaggctgtggaaggcgtcacatcc

SEQ ID NO: 4572572 - DNA, 25 bp, Homo sapien
cagacctcaacatttcgtgttatgg

SEQ ID NO: 4572573 - DNA, 25 bp, Homo sapien
tccctgaacatggtacagacctcaa

SEQ ID NO: 4572574 - DNA, 25 bp, Homo sapien
aatacccagattccactgtctactg

SEQ ID NO: 4572575 - DNA, 25 bp, Homo sapien
tcctgccaatatgggagactctcaa

SEQ ID NO: 4572576 - DNA, 25 bp, Homo sapien
atgtatgggttttcactggctttcc

SEQ ID NO: 4572577 - DNA, 25 bp, Homo sapien
taagacccgagcataagcagcggtg

SEQ ID NO: 4572578 - DNA, 25 bp, Homo sapien
ctgtagaaatcccacttcagtgggt

SEQ ID NO: 4572579 - DNA, 25 bp, Homo sapien
taagtccgatggaagcactttagga

SEQ ID NO: 4572580 - DNA, 25 bp, Homo sapien
agtccgatggaagcactttaggaaa

SEQ ID NO: 4572581 - DNA, 25 bp, Homo sapien
aagtccgatggaagcactttaggaa

SEQ ID NO: 4572582 - DNA, 25 bp, Homo sapien
ttaagtccgatggaagcactttagg

SEQ ID NO: 4572583 - DNA, 25 bp, Homo sapien
cagtgttgtaaacgcaatttctgcc

SEQ ID NO: 4572584 - DNA, 25 bp, Homo sapien
ggcagtggccagcattgtccattat

SEQ ID NO: 4572585 - DNA, 25 bp, Homo sapien
gttctcaagtaaggattgcactcca

SEQ ID NO: 4572586 - DNA, 25 bp, Homo sapien
ctcttggccatatgttcaggtctca

SEQ ID NO: 4572587 - DNA, 25 bp, Homo sapien
aatacacataaggttcccttcccat

SEQ ID NO: 4572588 - DNA, 25 bp, Homo sapien
gctgaaggacgacattaatcataat

SEQ ID NO: 4572589 - DNA, 25 bp, Homo sapien
attgaaataggtggcccaaaacttg

SEQ ID NO: 4572590 - DNA, 25 bp, Homo sapien
taaaacacttaatatgaatactcag

SEQ ID NO: 4572591 - DNA, 25 bp, Homo sapien
tttgcaatttgagaaaacctaactg

SEQ ID NO: 4572592 - DNA, 25 bp, Homo sapien
ggatgttcaaagataattgctaagg

SEQ ID NO: 4572593 - DNA, 25 bp, Homo sapien
gcaatttgagaaaacctaactgtaa

SEQ ID NO: 4572594 - DNA, 25 bp, Homo sapien
gataattgctaaggcaaattttgca

SEQ ID NO: 4572595 - DNA, 25 bp, Homo sapien
aaattcctgatatattccacccctg

SEQ ID NO: 4572596 - DNA, 25 bp, Homo sapien
cccctgcctgttcttaatctaaatg

SEQ ID NO: 4572597 - DNA, 25 bp, Homo sapien
gagtgcttggttactatagtagcga

SEQ ID NO: 4572598 - DNA, 25 bp, Homo sapien
gcaagaatagtcaccgcaagtaaaa

SEQ ID NO: 4572599 - DNA, 25 bp, Homo sapien
tcagcctaacctcgcttcatatgga

SEQ ID NO: 4572600 - DNA, 25 bp, Homo sapien
ttggccagccaagttacaacacatt

SEQ ID NO: 4572601 - DNA, 25 bp, Homo sapien
tactgtaacatgtaacttggccagc

SEQ ID NO: 4572602 - DNA, 25 bp, Homo sapien
taaaaatatgtagtcaatccagggc

SEQ ID NO: 4572603 - DNA, 25 bp, Homo sapien
gttgcacaaagaatgttcagcacca

SEQ ID NO: 4572604 - DNA, 25 bp, Homo sapien
agatactggcagtcagtgctaacgg

SEQ ID NO: 4572605 - DNA, 25 bp, Homo sapien
cccagaaagaccatggagttgcaca

SEQ ID NO: 4572606 - DNA, 25 bp, Homo sapien
taattataccagcacagtaaggccc

SEQ ID NO: 4572607 - DNA, 25 bp, Homo sapien
ccctgccgcatttgtatgatctgga

SEQ ID NO: 4572608 - DNA, 25 bp, Homo sapien
gcatttgtatgatctggagcagagc

SEQ ID NO: 4572609 - DNA, 25 bp, Homo sapien
aagcccctgccgcatttgtatgatc

SEQ ID NO: 4572610 - DNA, 25 bp, Homo sapien
tgccgcatttgtatgatctggagca

SEQ ID NO: 4572611 - DNA, 25 bp, Homo sapien
tacagagcataactagtcattgatt

SEQ ID NO: 4572612 - DNA, 25 bp, Homo sapien
ttacagagcataactagtcattgat

SEQ ID NO: 4572613 - DNA, 25 bp, Homo sapien
caaatgctaaatcctcatcattgtg

SEQ ID NO: 4572614 - DNA, 25 bp, Homo sapien
gtgatttctaaaggaattactggaa

SEQ ID NO: 4572615 - DNA, 25 bp, Homo sapien
gcatagggggtgcagctactttaaa

SEQ ID NO: 4572616 - DNA, 25 bp, Homo sapien
agcatagggggtgcagctactttaa

SEQ ID NO: 4572617 - DNA, 25 bp, Homo sapien
catagggggtgcagctactttaaac

SEQ ID NO: 4572618 - DNA, 25 bp, Homo sapien
atagggggtgcagctactttaaaca

SEQ ID NO: 4572619 - DNA, 25 bp, Homo sapien
gcagcactaagaaggtgtgtccgat

SEQ ID NO: 4572620 - DNA, 25 bp, Homo sapien
ggtgtgtccgataaattgcaattac

SEQ ID NO: 4572621 - DNA, 25 bp, Homo sapien
aaattgcaattacttcttggtgctg

SEQ ID NO: 4572622 - DNA, 25 bp, Homo sapien
taagaaggtgtgtccgataaattgc

SEQ ID NO: 4572623 - DNA, 25 bp, Homo sapien
gatcttggaacataccctcagtgga

SEQ ID NO: 4572624 - DNA, 25 bp, Homo sapien
tatattccttaccatgcctctgaga

SEQ ID NO: 4572625 - DNA, 25 bp, Homo sapien
ggacctaccagatgcagaatttcaa

SEQ ID NO: 4572626 - DNA, 25 bp, Homo sapien
ttatatagggttcattcagcaggtc

SEQ ID NO: 4572627 - DNA, 25 bp, Homo sapien
atcaatgtcatgaaaatggctatac

SEQ ID NO: 4572628 - DNA, 25 bp, Homo sapien
gaatcaatgtcatgaaaatggctat

SEQ ID NO: 4572629 - DNA, 25 bp, Homo sapien
caatgtcatgaaaatggctatactg

SEQ ID NO: 4572630 - DNA, 25 bp, Homo sapien
aatgtcatgaaaatggctatactgc

SEQ ID NO: 4572631 - DNA, 25 bp, Homo sapien
tgtgtaggtgagttgggaaaggcca

SEQ ID NO: 4572632 - DNA, 25 bp, Homo sapien
tgctgcagagtgtcaatcagctggc

SEQ ID NO: 4572633 - DNA, 25 bp, Homo sapien
agatttcacttggtgctgcagagtg

SEQ ID NO: 4572634 - DNA, 25 bp, Homo sapien
gagtgtcaatcagctggctctgcct

SEQ ID NO: 4572635 - DNA, 25 bp, Homo sapien
tttccacatcattaagcagttcagt

SEQ ID NO: 4572636 - DNA, 25 bp, Homo sapien
tatattattcacttatcatgtacaa

SEQ ID NO: 4572637 - DNA, 25 bp, Homo sapien
gaacatctttgtacagaaatcattc

SEQ ID NO: 4572638 - DNA, 25 bp, Homo sapien
cacttatcatgtacaatgaacatct

SEQ ID NO: 4572639 - DNA, 25 bp, Homo sapien
catctttgtacagaaatcattcctt

SEQ ID NO: 4572640 - DNA, 25 bp, Homo sapien
ggagggctcagtttactactatggg

SEQ ID NO: 4572641 - DNA, 25 bp, Homo sapien
tatgggtgagtaccgagatcaactc

SEQ ID NO: 4572642 - DNA, 25 bp, Homo sapien
taaaacatccaccttagaggaggaa

SEQ ID NO: 4572643 - DNA, 25 bp, Homo sapien
cttggtttcttgcagcccagaaaga

SEQ ID NO: 4572644 - DNA, 25 bp, Homo sapien
gcattcttgtattgtgtcgagctcc

SEQ ID NO: 4572645 - DNA, 25 bp, Homo sapien
ggaaagggccaacttcgctgacaat

SEQ ID NO: 4572646 - DNA, 25 bp, Homo sapien
tctggtttgacgtgctgagcaagct

SEQ ID NO: 4572647 - DNA, 25 bp, Homo sapien
acacagtttctaggcggcttacatc

SEQ ID NO: 4572648 - DNA, 25 bp, Homo sapien
tgggctggtatacctggggaagtac

SEQ ID NO: 4572649 - DNA, 25 bp, Homo sapien
gggctggtatacctggggaagtaca

SEQ ID NO: 4572650 - DNA, 25 bp, Homo sapien
atgggctggtatacctggggaagta

SEQ ID NO: 4572651 - DNA, 25 bp, Homo sapien
gtgctgacaggccactatgcatgca

SEQ ID NO: 4572652 - DNA, 25 bp, Homo sapien
acaggccactatgcatgcagatagc

SEQ ID NO: 4572653 - DNA, 25 bp, Homo sapien
aggccactatgcatgcagatagcct

SEQ ID NO: 4572654 - DNA, 25 bp, Homo sapien
tgacaggccactatgcatgcagata

SEQ ID NO: 4572655 - DNA, 25 bp, Homo sapien
tctgaactgcctttcccctggatca

SEQ ID NO: 4572656 - DNA, 25 bp, Homo sapien
tatcatcaaaaacactctagagggc

SEQ ID NO: 4572657 - DNA, 25 bp, Homo sapien
cagggtactgggatctctcaagccg

SEQ ID NO: 4572658 - DNA, 25 bp, Homo sapien
tattaaactcaagaaagcaggacca

SEQ ID NO: 4572659 - DNA, 25 bp, Homo sapien
ccatatacatctgaccttgtttaag

SEQ ID NO: 4572660 - DNA, 25 bp, Homo sapien
ctgccatatacatctgaccttgttt

SEQ ID NO: 4572661 - DNA, 25 bp, Homo sapien
tgccatatacatctgaccttgttta

SEQ ID NO: 4572662 - DNA, 25 bp, Homo sapien
gccatatacatctgaccttgtttaa

SEQ ID NO: 4572663 - DNA, 25 bp, Homo sapien
tatccatactaaagtaggctaaaca

SEQ ID NO: 4572664 - DNA, 25 bp, Homo sapien
tatttctataaacagaagtacctac

SEQ ID NO: 4572665 - DNA, 25 bp, Homo sapien
gtacctacaatctactgaacaacag

SEQ ID NO: 4572666 - DNA, 25 bp, Homo sapien
gaagcaagaggtacaacacaaaagt

SEQ ID NO: 4572667 - DNA, 25 bp, Homo sapien
tacttgcattaagaccgatttctcc

SEQ ID NO: 4572668 - DNA, 25 bp, Homo sapien
tatgtctactaatcaacaaggcaaa

SEQ ID NO: 4572669 - DNA, 25 bp, Homo sapien
tctttacttgaactaggtgaactgt

SEQ ID NO: 4572670 - DNA, 25 bp, Homo sapien
tagcagcaggaatatcttgtacagt

SEQ ID NO: 4572671 - DNA, 25 bp, Homo sapien
ctgaaatgacttcctgatcctaaat

SEQ ID NO: 4572672 - DNA, 25 bp, Homo sapien
taccactgtaggaagcagaaaccct

SEQ ID NO: 4572673 - DNA, 25 bp, Homo sapien
ggaagtggccacattcatgtcaata

SEQ ID NO: 4572674 - DNA, 25 bp, Homo sapien
gactactgtttgctactgctttacc

SEQ ID NO: 4572675 - DNA, 25 bp, Homo sapien
cactagcaacacttagagagatcag

SEQ ID NO: 4572676 - DNA, 25 bp, Homo sapien
taaaaggccctgtatatactcctaa

SEQ ID NO: 4572677 - DNA, 25 bp, Homo sapien
ttctaagtgtaaaactagcattgta

SEQ ID NO: 4572678 - DNA, 25 bp, Homo sapien
ttaagacatgcgaaagtctagctcc

SEQ ID NO: 4572679 - DNA, 25 bp, Homo sapien
cctggcctataccttacacttaaga

SEQ ID NO: 4572680 - DNA, 25 bp, Homo sapien
cagagcctcaatagtccttaagctt

SEQ ID NO: 4572681 - DNA, 25 bp, Homo sapien
tcagagcctcaatagtccttaagct

SEQ ID NO: 4572682 - DNA, 25 bp, Homo sapien
tcgctttccagatcatcagcaacca

SEQ ID NO: 4572683 - DNA, 25 bp, Homo sapien
gctttccagatcatcagcaaccata

SEQ ID NO: 4572684 - DNA, 25 bp, Homo sapien
ccagatcatcagcaaccataacttc

SEQ ID NO: 4572685 - DNA, 25 bp, Homo sapien
tttccagatcatcagcaaccataac

SEQ ID NO: 4572686 - DNA, 25 bp, Homo sapien
taactgtaaaccattgactttatcc

SEQ ID NO: 4572687 - DNA, 25 bp, Homo sapien
tgtaaaccattgactttatccaaaa

SEQ ID NO: 4572688 - DNA, 25 bp, Homo sapien
tcagctgtaactgtaaaccattgac

SEQ ID NO: 4572689 - DNA, 25 bp, Homo sapien
gctgtaactgtaaaccattgacttt

SEQ ID NO: 4572690 - DNA, 25 bp, Homo sapien
ttgatgctccctctgatgtgacttc

SEQ ID NO: 4572691 - DNA, 25 bp, Homo sapien
ttttgatgctccctctgatgtgact

SEQ ID NO: 4572692 - DNA, 25 bp, Homo sapien
gatgctccctctgatgtgacttcac

SEQ ID NO: 4572693 - DNA, 25 bp, Homo sapien
atattttgatgctccctctgatgtg

SEQ ID NO: 4572694 - DNA, 25 bp, Homo sapien
caattggcaatacacccagttagtg

SEQ ID NO: 4572695 - DNA, 25 bp, Homo sapien
ccaacattagctgcacataacacaa

SEQ ID NO: 4572696 - DNA, 25 bp, Homo sapien
aaagttgggctataaagcactgcat

SEQ ID NO: 4572697 - DNA, 25 bp, Homo sapien
aaacataagaaaacacgggtcagca

SEQ ID NO: 4572698 - DNA, 25 bp, Homo sapien
gcgatctgatcacgtgcaccactga

SEQ ID NO: 4572699 - DNA, 25 bp, Homo sapien
taagatccatcttcctgacaagcct

SEQ ID NO: 4572700 - DNA, 25 bp, Homo sapien
catctggtagtcactggtgggtaca

SEQ ID NO: 4572701 - DNA, 25 bp, Homo sapien
gactgttcttcaagtggaatctgac

SEQ ID NO: 4572702 - DNA, 25 bp, Homo sapien
gctagtacagtcatagcagtgtaca

SEQ ID NO: 4572703 - DNA, 25 bp, Homo sapien
cagggtttgcaaatgcttaggttcc

SEQ ID NO: 4572704 - DNA, 25 bp, Homo sapien
cacacttaggttatatgaggcacag

SEQ ID NO: 4572705 - DNA, 25 bp, Homo sapien
ccagatggaaaagtgtcaacagaca

SEQ ID NO: 4572706 - DNA, 25 bp, Homo sapien
caggagaggaaagctgcctacacta

SEQ ID NO: 4572707 - DNA, 25 bp, Homo sapien
tcacaaccaggatatcaaaacaggg

SEQ ID NO: 4572708 - DNA, 25 bp, Homo sapien
tgagccacggtactgtaaaccaacc

SEQ ID NO: 4572709 - DNA, 25 bp, Homo sapien
gcctacactagcttttgagccacgg

SEQ ID NO: 4572710 - DNA, 25 bp, Homo sapien
tgcaaagatggccctttcttccaaa

SEQ ID NO: 4572711 - DNA, 25 bp, Homo sapien
gttgcaaagatggccctttcttcca

SEQ ID NO: 4572712 - DNA, 25 bp, Homo sapien
caaagatggccctttcttccaaagt

SEQ ID NO: 4572713 - DNA, 25 bp, Homo sapien
ctgttgcaaagatggccctttcttc

SEQ ID NO: 4572714 - DNA, 25 bp, Homo sapien
tattcgcaacctagcatgagggcag

SEQ ID NO: 4572715 - DNA, 25 bp, Homo sapien
tatcatggccaagcgcatccagcaa

SEQ ID NO: 4572716 - DNA, 25 bp, Homo sapien
tccagcaagcttatatcagcaccat

SEQ ID NO: 4572717 - DNA, 25 bp, Homo sapien
tcttcaacaaggttagaatgtccag

SEQ ID NO: 4572718 - DNA, 25 bp, Homo sapien
cctgattgggaattgattgaaagca

SEQ ID NO: 4572719 - DNA, 25 bp, Homo sapien
gacaaaagttacaggcaaaggtata

SEQ ID NO: 4572720 - DNA, 25 bp, Homo sapien
tgccggaggtggttgagttacaact

SEQ ID NO: 4572721 - DNA, 25 bp, Homo sapien
aatgtcaggacatttcaaagtaggg

SEQ ID NO: 4572722 - DNA, 25 bp, Homo sapien
gtttgtctctggaattaacatccgc

SEQ ID NO: 4572723 - DNA, 25 bp, Homo sapien
tccgctcctctatctatcagcagtt

SEQ ID NO: 4572724 - DNA, 25 bp, Homo sapien
tgagtagccagaacaagtggtgtcc

SEQ ID NO: 4572725 - DNA, 25 bp, Homo sapien
catattgttggcctactcatctgag

SEQ ID NO: 4572726 - DNA, 25 bp, Homo sapien
tatgctagaaggacaatctgccatt

SEQ ID NO: 4572727 - DNA, 25 bp, Homo sapien
ttcacagaggccccatggtcacaaa

SEQ ID NO: 4572728 - DNA, 25 bp, Homo sapien
gctgtatgctagaaggacaatctgc

SEQ ID NO: 4572729 - DNA, 25 bp, Homo sapien
gcagctgtatgctagaaggacaatc

SEQ ID NO: 4572730 - DNA, 25 bp, Homo sapien
acatctgttggtaagacacatagtg

SEQ ID NO: 4572731 - DNA, 25 bp, Homo sapien
ttctaaattaccaagcttcacgtcc

SEQ ID NO: 4572732 - DNA, 25 bp, Homo sapien
ctaggtccatataaggaataagttt

SEQ ID NO: 4572733 - DNA, 25 bp, Homo sapien
ctcttagtttagcattataagcaca

SEQ ID NO: 4572734 - DNA, 25 bp, Homo sapien
cacgtccttcactcttagtttagca

SEQ ID NO: 4572735 - DNA, 25 bp, Homo sapien
tagaatacggctacgaccacaactc

SEQ ID NO: 4572736 - DNA, 25 bp, Homo sapien
tgggcatgtattccactaggctctc

SEQ ID NO: 4572737 - DNA, 25 bp, Homo sapien
taggtttcggaatatgactagtcac

SEQ ID NO: 4572738 - DNA, 25 bp, Homo sapien
ggctttggagatatttggaaggcca

SEQ ID NO: 4572739 - DNA, 25 bp, Homo sapien
ttgtatccaagggaaaccactgctc

SEQ ID NO: 4572740 - DNA, 25 bp, Homo sapien
atatttgtatccaagggaaaccact

SEQ ID NO: 4572741 - DNA, 25 bp, Homo sapien
taacaaatatttgtatccaagggaa

SEQ ID NO: 4572742 - DNA, 25 bp, Homo sapien
gtatccaagggaaaccactgctcac

SEQ ID NO: 4572743 - DNA, 25 bp, Homo sapien
agtgcagttcttccctgcaggtctg

SEQ ID NO: 4572744 - DNA, 25 bp, Homo sapien
gcagttcttccctgcaggtctgcat

SEQ ID NO: 4572745 - DNA, 25 bp, Homo sapien
tgcagttcttccctgcaggtctgca

SEQ ID NO: 4572746 - DNA, 25 bp, Homo sapien
gaagtgcagttcttccctgcaggtc

SEQ ID NO: 4572747 - DNA, 25 bp, Homo sapien
ccgacaatccatgaaatatgctgac

SEQ ID NO: 4572748 - DNA, 25 bp, Homo sapien
gaagctaaagactatccgacaatcc

SEQ ID NO: 4572749 - DNA, 25 bp, Homo sapien
tttgatgggaactttagccaactag

SEQ ID NO: 4572750 - DNA, 25 bp, Homo sapien
gagttctgctatgaaacttagtgaa

SEQ ID NO: 4572751 - DNA, 25 bp, Homo sapien
ggcacaatgcatgtccatacttagc

SEQ ID NO: 4572752 - DNA, 25 bp, Homo sapien
tttttgtaggcacaatgcatgtcca

SEQ ID NO: 4572753 - DNA, 25 bp, Homo sapien
atgcatgtccatacttagcagccag

SEQ ID NO: 4572754 - DNA, 25 bp, Homo sapien
tgtaggcacaatgcatgtccatact

SEQ ID NO: 4572755 - DNA, 25 bp, Homo sapien
cacagaatgggttccttatgaggca

SEQ ID NO: 4572756 - DNA, 25 bp, Homo sapien
tatttgcccctacatggaatcacag

SEQ ID NO: 4572757 - DNA, 25 bp, Homo sapien
cgacttagctactgaagggccttgg

SEQ ID NO: 4572758 - DNA, 25 bp, Homo sapien
taagctgtcaacagtcccagagaag

SEQ ID NO: 4572759 - DNA, 25 bp, Homo sapien
caagattcccctttgaggtcacaac

SEQ ID NO: 4572760 - DNA, 25 bp, Homo sapien
tgtaatatcaactccatgtataagg

SEQ ID NO: 4572761 - DNA, 25 bp, Homo sapien
gcagtgtcactggttgtaatatcaa

SEQ ID NO: 4572762 - DNA, 25 bp, Homo sapien
tataaggatggcattcaaacactca

SEQ ID NO: 4572763 - DNA, 25 bp, Homo sapien
tagatctaccctttaacccaactgc

SEQ ID NO: 4572764 - DNA, 25 bp, Homo sapien
ctataagtatagagggtcataacag

SEQ ID NO: 4572765 - DNA, 25 bp, Homo sapien
tatagagggtcataacagggactag

SEQ ID NO: 4572766 - DNA, 25 bp, Homo sapien
taagtatagagggtcataacaggga

SEQ ID NO: 4572767 - DNA, 25 bp, Homo sapien
tagcaaggattgaggtcactttttc

SEQ ID NO: 4572768 - DNA, 25 bp, Homo sapien
ctgctgctttcatcaatcggtcatc

SEQ ID NO: 4572769 - DNA, 25 bp, Homo sapien
tgaccccctttttagcaaggattga

SEQ ID NO: 4572770 - DNA, 25 bp, Homo sapien
catctagtttgcctggattgacccc

SEQ ID NO: 4572771 - DNA, 25 bp, Homo sapien
tgttgctaatggcaaactactttgc

SEQ ID NO: 4572772 - DNA, 25 bp, Homo sapien
gctacacttagcttggatctctaac

SEQ ID NO: 4572773 - DNA, 25 bp, Homo sapien
tcctgacaagtgactcagtccctca

SEQ ID NO: 4572774 - DNA, 25 bp, Homo sapien
aaaccaacagttcatcatagacagg

SEQ ID NO: 4572775 - DNA, 25 bp, Homo sapien
cagccccaagtcaggtacagtaact

SEQ ID NO: 4572776 - DNA, 25 bp, Homo sapien
tctccgccttcataacgctcgaata

SEQ ID NO: 4572777 - DNA, 25 bp, Homo sapien
gaacttgattaagagcagccccaag

SEQ ID NO: 4572778 - DNA, 25 bp, Homo sapien
cgctcgaatattatcttccttgcaa

SEQ ID NO: 4572779 - DNA, 25 bp, Homo sapien
tttgtacccctatcagtctctctgc

SEQ ID NO: 4572780 - DNA, 25 bp, Homo sapien
tattttgtacccctatcagtctctc

SEQ ID NO: 4572781 - DNA, 25 bp, Homo sapien
tgcatacaaccaggtttcagcttac

SEQ ID NO: 4572782 - DNA, 25 bp, Homo sapien
cagtctctctgcatacaaccaggtt

SEQ ID NO: 4572783 - DNA, 25 bp, Homo sapien
gaggcactgccaaaacattaaatag

SEQ ID NO: 4572784 - DNA, 25 bp, Homo sapien
tagtttccaagtttagcaccctgcc

SEQ ID NO: 4572785 - DNA, 25 bp, Homo sapien
cctagcatgttaaatgagaagagcc

SEQ ID NO: 4572786 - DNA, 25 bp, Homo sapien
ggcaaatacacattagacaacgagc

SEQ ID NO: 4572787 - DNA, 25 bp, Homo sapien
ctcttcagcatctaaggtggccatg

SEQ ID NO: 4572788 - DNA, 25 bp, Homo sapien
tcagcatctaaggtggccatgaaat

SEQ ID NO: 4572789 - DNA, 25 bp, Homo sapien
cttcagcatctaaggtggccatgaa

SEQ ID NO: 4572790 - DNA, 25 bp, Homo sapien
tcttcagcatctaaggtggccatga

SEQ ID NO: 4572791 - DNA, 25 bp, Homo sapien
tggctctgatcaagctaatctgcat

SEQ ID NO: 4572792 - DNA, 25 bp, Homo sapien
tattggctctgatcaagctaatctg

SEQ ID NO: 4572793 - DNA, 25 bp, Homo sapien
agtttattggctctgatcaagctaa

SEQ ID NO: 4572794 - DNA, 25 bp, Homo sapien
tttattggctctgatcaagctaatc

SEQ ID NO: 4572795 - DNA, 25 bp, Homo sapien
gagatgccttaggtggcaaaatgag

SEQ ID NO: 4572796 - DNA, 25 bp, Homo sapien
ggaggaatggcgttacatacaagta

SEQ ID NO: 4572797 - DNA, 25 bp, Homo sapien
tacagttagtgaggtaaagaacacc

SEQ ID NO: 4572798 - DNA, 25 bp, Homo sapien
gtagttgaatatagtgtgagatgcc

SEQ ID NO: 4572799 - DNA, 25 bp, Homo sapien
taaccaacagggatttgacatcaga

SEQ ID NO: 4572800 - DNA, 25 bp, Homo sapien
aattaaggtggcaccactcagaagc

SEQ ID NO: 4572801 - DNA, 25 bp, Homo sapien
tctggtggcaactaagagaagctat

SEQ ID NO: 4572802 - DNA, 25 bp, Homo sapien
tggcaccacagtagctcatcatggc

SEQ ID NO: 4572803 - DNA, 25 bp, Homo sapien
tactgatagatgtctttaagggaaa

SEQ ID NO: 4572804 - DNA, 25 bp, Homo sapien
tggcacgagtaagtagtttccatac

SEQ ID NO: 4572805 - DNA, 25 bp, Homo sapien
actgaaagttaatggccagatttct

SEQ ID NO: 4572806 - DNA, 25 bp, Homo sapien
tcttagcatgcttcaagtatttacg

SEQ ID NO: 4572807 - DNA, 25 bp, Homo sapien
tgcctccccctacagtttattctcc

SEQ ID NO: 4572808 - DNA, 25 bp, Homo sapien
gcctccccctacagtttattctcca

SEQ ID NO: 4572809 - DNA, 25 bp, Homo sapien
tgatagcctccatgcattaaatgag

SEQ ID NO: 4572810 - DNA, 25 bp, Homo sapien
tagcctccatgcattaaatgagata

SEQ ID NO: 4572811 - DNA, 25 bp, Homo sapien
gatagcctccatgcattaaatgaga

SEQ ID NO: 4572812 - DNA, 25 bp, Homo sapien
ctgatagcctccatgcattaaatga

SEQ ID NO: 4572813 - DNA, 25 bp, Homo sapien
ttagaataggcacacctaggtctcc

SEQ ID NO: 4572814 - DNA, 25 bp, Homo sapien
tcccttaaggtataggactgaggtc

SEQ ID NO: 4572815 - DNA, 25 bp, Homo sapien
caggctcgtttggttgttggcagaa

SEQ ID NO: 4572816 - DNA, 25 bp, Homo sapien
tattcacatggttgccaagtggcct

SEQ ID NO: 4572817 - DNA, 25 bp, Homo sapien
tgccccagactagatcagtaccttg

SEQ ID NO: 4572818 - DNA, 25 bp, Homo sapien
ggctgcagagtttgaccctgtatca

SEQ ID NO: 4572819 - DNA, 25 bp, Homo sapien
gataccacttatctccctcaggaaa

SEQ ID NO: 4572820 - DNA, 25 bp, Homo sapien
ctgcagtgcttagcccaagtgctca

SEQ ID NO: 4572821 - DNA, 25 bp, Homo sapien
gaagcacaagaaattcaacgcaggg

SEQ ID NO: 4572822 - DNA, 25 bp, Homo sapien
gccccattttaagagcagcctagag

SEQ ID NO: 4572823 - DNA, 25 bp, Homo sapien
ccagtattttttcgcagtgctgagg

SEQ ID NO: 4572824 - DNA, 25 bp, Homo sapien
caaatgcacccaaatccctcagtgg

SEQ ID NO: 4572825 - DNA, 25 bp, Homo sapien
cttctggaattacagtcccttaatt

SEQ ID NO: 4572826 - DNA, 25 bp, Homo sapien
tacaatcaaagtactctgctacgac

SEQ ID NO: 4572827 - DNA, 25 bp, Homo sapien
cctctcaggtcagagattacttcta

SEQ ID NO: 4572828 - DNA, 25 bp, Homo sapien
catcacgtcgggctaatcttgtatt

SEQ ID NO: 4572829 - DNA, 25 bp, Homo sapien
gaaagagcggagtaggggtgccaat

SEQ ID NO: 4572830 - DNA, 25 bp, Homo sapien
agaggagagcgacgagggggggtca

SEQ ID NO: 4572831 - DNA, 25 bp, Homo sapien
gcagcagggcgagcgccgggagagg

SEQ ID NO: 4572832 - DNA, 25 bp, Homo sapien
ggactggggagccaacacggccgag

SEQ ID NO: 4572833 - DNA, 25 bp, Homo sapien
agggggccagaaccgccccactgag

SEQ ID NO: 4572834 - DNA, 25 bp, Homo sapien
cagaaccgccccactgaggtttctt

SEQ ID NO: 4572835 - DNA, 25 bp, Homo sapien
ccagaaccgccccactgaggtttct

SEQ ID NO: 4572836 - DNA, 25 bp, Homo sapien
gagggggccagaaccgccccactga

SEQ ID NO: 4572837 - DNA, 25 bp, Homo sapien
cccgtagaggctcgggtgcggcggc

SEQ ID NO: 4572838 - DNA, 25 bp, Homo sapien
gaggagtcgccagggccgccgaagc

SEQ ID NO: 4572839 - DNA, 25 bp, Homo sapien
tctgggctgacggagtctccggcct

SEQ ID NO: 4572840 - DNA, 25 bp, Homo sapien
gaagagacccgtagaggctcgggtg

SEQ ID NO: 4572841 - DNA, 25 bp, Homo sapien
ctcaggcgggacttgaggctcttca

SEQ ID NO: 4572842 - DNA, 25 bp, Homo sapien
ctcctcaggcgggacttgaggctct

SEQ ID NO: 4572843 - DNA, 25 bp, Homo sapien
gcggcgccagacgacgcggggccgg

SEQ ID NO: 4572844 - DNA, 25 bp, Homo sapien
gggccgggcacgtcctgcctcctca

SEQ ID NO: 4572845 - DNA, 25 bp, Homo sapien
gctaactcttgcctggcccccgcgc

SEQ ID NO: 4572846 - DNA, 25 bp, Homo sapien
taactcttgcctggcccccgcgcga

SEQ ID NO: 4572847 - DNA, 25 bp, Homo sapien
ggctaactcttgcctggcccccgcg

SEQ ID NO: 4572848 - DNA, 25 bp, Homo sapien
actcttgcctggcccccgcgcgaac

SEQ ID NO: 4572849 - DNA, 25 bp, Homo sapien
agtgccagcgcgcaaggagtagacg

SEQ ID NO: 4572850 - DNA, 25 bp, Homo sapien
agcgcgcaaggagtagacggcagcg

SEQ ID NO: 4572851 - DNA, 25 bp, Homo sapien
ctgcggagtgccagcgcgcaaggag

SEQ ID NO: 4572852 - DNA, 25 bp, Homo sapien
gcaaggagtagacggcagcggctgc

SEQ ID NO: 4572853 - DNA, 25 bp, Homo sapien
tcagtctcctgttttactaccaaat

SEQ ID NO: 4572854 - DNA, 25 bp, Homo sapien
cctgttttactaccaaatcctggtg

SEQ ID NO: 4572855 - DNA, 25 bp, Homo sapien
ctgttttactaccaaatcctggtgc

SEQ ID NO: 4572856 - DNA, 25 bp, Homo sapien
tctcctgttttactaccaaatcctg

SEQ ID NO: 4572857 - DNA, 25 bp, Homo sapien
cactgtctcagtaattggctcttga

SEQ ID NO: 4572858 - DNA, 25 bp, Homo sapien
aagagcactgtctcagtaattggct

SEQ ID NO: 4572859 - DNA, 25 bp, Homo sapien
gcagtgttatgttgtactggttgtc

SEQ ID NO: 4572860 - DNA, 25 bp, Homo sapien
aattggctcttgagttattaattgc

SEQ ID NO: 4572861 - DNA, 25 bp, Homo sapien
cttccttggcatttacagactgtca

SEQ ID NO: 4572862 - DNA, 25 bp, Homo sapien
agatggtgtctgctccgcataacca

SEQ ID NO: 4572863 - DNA, 25 bp, Homo sapien
gcataaccatagaccctcatgtaag

SEQ ID NO: 4572864 - DNA, 25 bp, Homo sapien
cacttatgacatatcgagtgtgcca

SEQ ID NO: 4572865 - DNA, 25 bp, Homo sapien
atggccatttgtctactgcattcca

SEQ ID NO: 4572866 - DNA, 25 bp, Homo sapien
tggccatttgtctactgcattccaa

SEQ ID NO: 4572867 - DNA, 25 bp, Homo sapien
gggtggacggacctcaagttcctga

SEQ ID NO: 4572868 - DNA, 25 bp, Homo sapien
ctagaagctcttcacccgtatgggt

SEQ ID NO: 4572869 - DNA, 25 bp, Homo sapien
tagaagctcttcacccgtatgggta

SEQ ID NO: 4572870 - DNA, 25 bp, Homo sapien
agaagctcttcacccgtatgggtaa

SEQ ID NO: 4572871 - DNA, 25 bp, Homo sapien
gaagctcttcacccgtatgggtaac

SEQ ID NO: 4572872 - DNA, 25 bp, Homo sapien
gacaccagccccatgccgatggcag

SEQ ID NO: 4572873 - DNA, 25 bp, Homo sapien
caccagccccatgccgatggcagcc

SEQ ID NO: 4572874 - DNA, 25 bp, Homo sapien
acaccagccccatgccgatggcagc

SEQ ID NO: 4572875 - DNA, 25 bp, Homo sapien
ggacaccagccccatgccgatggca

SEQ ID NO: 4572876 - DNA, 25 bp, Homo sapien
gttggcagacagagatctctactct

SEQ ID NO: 4572877 - DNA, 25 bp, Homo sapien
tctgaagcctttgtagggggactgg

SEQ ID NO: 4572878 - DNA, 25 bp, Homo sapien
gaagcctttgtagggggactgggca

SEQ ID NO: 4572879 - DNA, 25 bp, Homo sapien
ctctgaagcctttgtagggggactg

SEQ ID NO: 4572880 - DNA, 25 bp, Homo sapien
ggcaagctgattgagcttgcggctg

SEQ ID NO: 4572881 - DNA, 25 bp, Homo sapien
aggcaagctgattgagcttgcggct

SEQ ID NO: 4572882 - DNA, 25 bp, Homo sapien
ccagtgtaggcaagctgattgagct

SEQ ID NO: 4572883 - DNA, 25 bp, Homo sapien
tagccagtgtaggcaagctgattga

SEQ ID NO: 4572884 - DNA, 25 bp, Homo sapien
tctgtgccgtttttggaactggtca

SEQ ID NO: 4572885 - DNA, 25 bp, Homo sapien
caccgatctttgtgactgaggtttc

SEQ ID NO: 4572886 - DNA, 25 bp, Homo sapien
gaactggtcatgtgtgttgtggttc

SEQ ID NO: 4572887 - DNA, 25 bp, Homo sapien
cccctttagagacaccgatctttgt

SEQ ID NO: 4572888 - DNA, 25 bp, Homo sapien
tcctcatgtgactgttgcagttacc

SEQ ID NO: 4572889 - DNA, 25 bp, Homo sapien
tctgtacaaggaagagactctccat

SEQ ID NO: 4572890 - DNA, 25 bp, Homo sapien
gggccgtgctatttgctctgtacaa

SEQ ID NO: 4572891 - DNA, 25 bp, Homo sapien
gttggacaacccatgccaatgagct

SEQ ID NO: 4572892 - DNA, 25 bp, Homo sapien
catgtgtggacattgcatccttctt

SEQ ID NO: 4572893 - DNA, 25 bp, Homo sapien
cttcctttagcatgtgtggacattg

SEQ ID NO: 4572894 - DNA, 25 bp, Homo sapien
tgtggacattgcatccttctttctc

SEQ ID NO: 4572895 - DNA, 25 bp, Homo sapien
tttagcatgtgtggacattgcatcc

SEQ ID NO: 4572896 - DNA, 25 bp, Homo sapien
gctgctggccacaggtgaacggttt

SEQ ID NO: 4572897 - DNA, 25 bp, Homo sapien
gctggccacaggtgaacggtttttg

SEQ ID NO: 4572898 - DNA, 25 bp, Homo sapien
tggccacaggtgaacggtttttgga

SEQ ID NO: 4572899 - DNA, 25 bp, Homo sapien
tgctggccacaggtgaacggttttt

SEQ ID NO: 4572900 - DNA, 25 bp, Homo sapien
tgtcctggcccattatcaaatagtg

SEQ ID NO: 4572901 - DNA, 25 bp, Homo sapien
aatgtcctggcccattatcaaatag

SEQ ID NO: 4572902 - DNA, 25 bp, Homo sapien
atgtcctggcccattatcaaatagt

SEQ ID NO: 4572903 - DNA, 25 bp, Homo sapien
ggaatgtcctggcccattatcaaat

SEQ ID NO: 4572904 - DNA, 25 bp, Homo sapien
caaaggcctcagaacagaagcacaa

SEQ ID NO: 4572905 - DNA, 25 bp, Homo sapien
tatttggagtgcaattcaaaggcct

SEQ ID NO: 4572906 - DNA, 25 bp, Homo sapien
tcaaaggcctcagaacagaagcaca

SEQ ID NO: 4572907 - DNA, 25 bp, Homo sapien
tggagtgcaattcaaaggcctcaga

SEQ ID NO: 4572908 - DNA, 25 bp, Homo sapien
cttggttggtggcttatcctcccca

SEQ ID NO: 4572909 - DNA, 25 bp, Homo sapien
ggttggtggcttatcctccccaagc

SEQ ID NO: 4572910 - DNA, 25 bp, Homo sapien
gtcatcagcctcgtaggtccagaaa

SEQ ID NO: 4572911 - DNA, 25 bp, Homo sapien
ggtccagaaactcagtgccgttagt

SEQ ID NO: 4572912 - DNA, 25 bp, Homo sapien
tcagtgccgttagtgcatccagagc

SEQ ID NO: 4572913 - DNA, 25 bp, Homo sapien
tgccgttagtgcatccagagctgat

SEQ ID NO: 4572914 - DNA, 25 bp, Homo sapien
tgtctatatagatggcgcacccagt

SEQ ID NO: 4572915 - DNA, 25 bp, Homo sapien
tgaaggcactggaatccagggcact

SEQ ID NO: 4572916 - DNA, 25 bp, Homo sapien
aaagctggtagagcaaagaccccga

SEQ ID NO: 4572917 - DNA, 25 bp, Homo sapien
gaagtagagggatttcatgccagat

SEQ ID NO: 4572918 - DNA, 25 bp, Homo sapien
tatagtccttcatgtagccgggccc

SEQ ID NO: 4572919 - DNA, 25 bp, Homo sapien
cgggggccctgattgcctgagttta

SEQ ID NO: 4572920 - DNA, 25 bp, Homo sapien
ctttggcatgatctgtctgtctgtg

SEQ ID NO: 4572921 - DNA, 25 bp, Homo sapien
gcagatggccaagtaggtaacccct

SEQ ID NO: 4572922 - DNA, 25 bp, Homo sapien
gatcaatgctgtgggtcctggactg

SEQ ID NO: 4572923 - DNA, 25 bp, Homo sapien
tgcagcctttgtccatccagtggtt

SEQ ID NO: 4572924 - DNA, 25 bp, Homo sapien
tgtacaccctcagtatacgccaagc

SEQ ID NO: 4572925 - DNA, 25 bp, Homo sapien
gccaagctgcctttgctcagtaaaa

SEQ ID NO: 4572926 - DNA, 25 bp, Homo sapien
aaaagaaagatgtctctgctaagct

SEQ ID NO: 4572927 - DNA, 25 bp, Homo sapien
gaaaagaaagatgtctctgctaagc

SEQ ID NO: 4572928 - DNA, 25 bp, Homo sapien
aagaaaagaaagatgtctctgctaa

SEQ ID NO: 4572929 - DNA, 25 bp, Homo sapien
aaagaaagatgtctctgctaagctc

SEQ ID NO: 4572930 - DNA, 25 bp, Homo sapien
cacagacttttgtcaggcacaatct

SEQ ID NO: 4572931 - DNA, 25 bp, Homo sapien
cttttgtcaggcacaatctataacc

SEQ ID NO: 4572932 - DNA, 25 bp, Homo sapien
tgtcaggcacaatctataacctcaa

SEQ ID NO: 4572933 - DNA, 25 bp, Homo sapien
tcaggcacaatctataacctcaaag

SEQ ID NO: 4572934 - DNA, 25 bp, Homo sapien
caggagtcctgaactagaaggtggt

SEQ ID NO: 4572935 - DNA, 25 bp, Homo sapien
ggtcttcaaaccatggcgtaccgat

SEQ ID NO: 4572936 - DNA, 25 bp, Homo sapien
tgcatggcctatcgaggacagctca

SEQ ID NO: 4572937 - DNA, 25 bp, Homo sapien
catcaaaatagtggccatgctggga

SEQ ID NO: 4572938 - DNA, 25 bp, Homo sapien
tcctctggtgttgtcaggacccctg

SEQ ID NO: 4572939 - DNA, 25 bp, Homo sapien
tggtgttgtcaggacccctgggcaa

SEQ ID NO: 4572940 - DNA, 25 bp, Homo sapien
ggtgttgtcaggacccctgggcaac

SEQ ID NO: 4572941 - DNA, 25 bp, Homo sapien
gtgttgtcaggacccctgggcaacc

SEQ ID NO: 4572942 - DNA, 25 bp, Homo sapien
gcagtctgcatcttccgggagagca

SEQ ID NO: 4572943 - DNA, 25 bp, Homo sapien
cagtctgcatcttccgggagagcag

SEQ ID NO: 4572944 - DNA, 25 bp, Homo sapien
atcttccgggagagcaggggactcg

SEQ ID NO: 4572945 - DNA, 25 bp, Homo sapien
ttccgggagagcaggggactcgtac

SEQ ID NO: 4572946 - DNA, 25 bp, Homo sapien
tctcggcttggcgacgcctccggac

SEQ ID NO: 4572947 - DNA, 25 bp, Homo sapien
acgctgctgtcagaggaataatcca

SEQ ID NO: 4572948 - DNA, 25 bp, Homo sapien
ggctgccagagggagtgacgctgct

SEQ ID NO: 4572949 - DNA, 25 bp, Homo sapien
catacacttgcggaagatctcaggg

SEQ ID NO: 4572950 - DNA, 25 bp, Homo sapien
gctggtgctgcagttcagtctacct

SEQ ID NO: 4572951 - DNA, 25 bp, Homo sapien
ggcatttggactcagaaagagattc

SEQ ID NO: 4572952 - DNA, 25 bp, Homo sapien
tggaaacgcctttgcgttgggccaa

SEQ ID NO: 4572953 - DNA, 25 bp, Homo sapien
gaagctcctcgactctcttgttcag

SEQ ID NO: 4572954 - DNA, 25 bp, Homo sapien
ggtggcttcataccaatcaggacag

SEQ ID NO: 4572955 - DNA, 25 bp, Homo sapien
cctcgaactccacgatggcgcactc

SEQ ID NO: 4572956 - DNA, 25 bp, Homo sapien
tcgaactccacgatggcgcactcct

SEQ ID NO: 4572957 - DNA, 25 bp, Homo sapien
gaactccacgatggcgcactcctgg

SEQ ID NO: 4572958 - DNA, 25 bp, Homo sapien
acgatggcgcactcctgggtcccca

SEQ ID NO: 4572959 - DNA, 25 bp, Homo sapien
tccggtggtcctcattcaactcaag

SEQ ID NO: 4572960 - DNA, 25 bp, Homo sapien
tagcggctgctgatcctccggatgt

SEQ ID NO: 4572961 - DNA, 25 bp, Homo sapien
gatcatagaccaggagcatcttgct

SEQ ID NO: 4572962 - DNA, 25 bp, Homo sapien
tctctcccaggtttgaggatccgca

SEQ ID NO: 4572963 - DNA, 25 bp, Homo sapien
gttcctcctcacgtgttttagcaaa

SEQ ID NO: 4572964 - DNA, 25 bp, Homo sapien
gtagaattcgatctgatccaccagt

SEQ ID NO: 4572965 - DNA, 25 bp, Homo sapien
tgaaggatgtgagtagcttaacgct

SEQ ID NO: 4572966 - DNA, 25 bp, Homo sapien
tgatcaactcctcatccgggggctt

SEQ ID NO: 4572967 - DNA, 25 bp, Homo sapien
aaaggaataagataaggcagctgcc

SEQ ID NO: 4572968 - DNA, 25 bp, Homo sapien
caaggatctcactgtctagggaagg

SEQ ID NO: 4572969 - DNA, 25 bp, Homo sapien
tgtgatgatagagatacgcattcag

SEQ ID NO: 4572970 - DNA, 25 bp, Homo sapien
tctcaacaccattgagtgagtgtga

SEQ ID NO: 4572971 - DNA, 25 bp, Homo sapien
gctgaagatacaatgaacgaagcaa

SEQ ID NO: 4572972 - DNA, 25 bp, Homo sapien
tccttgaattcaccgagctcctatt

SEQ ID NO: 4572973 - DNA, 25 bp, Homo sapien
atggtccttgaattcaccgagctcc

SEQ ID NO: 4572974 - DNA, 25 bp, Homo sapien
gaacgaagcaagcatggtccttgaa

SEQ ID NO: 4572975 - DNA, 25 bp, Homo sapien
caattgtggaaggtgctaggcataa

SEQ ID NO: 4572976 - DNA, 25 bp, Homo sapien
gagctgagaacattcacatcgggtg

SEQ ID NO: 4572977 - DNA, 25 bp, Homo sapien
ttgctgagactcaagccacgggagc

SEQ ID NO: 4572978 - DNA, 25 bp, Homo sapien
cacgggagcgtgaactgttgacagc

SEQ ID NO: 4572979 - DNA, 25 bp, Homo sapien
ggcctgctaccacctaaagactgag

SEQ ID NO: 4572980 - DNA, 25 bp, Homo sapien
ggaatcccccatcagcaagtgtccg

SEQ ID NO: 4572981 - DNA, 25 bp, Homo sapien
aaaggcagggcgatgatggcagtga

SEQ ID NO: 4572982 - DNA, 25 bp, Homo sapien
cagtgaagggtaagcgggaccactc

SEQ ID NO: 4572983 - DNA, 25 bp, Homo sapien
tgccccagccggggctgaggtaccg

SEQ ID NO: 4572984 - DNA, 25 bp, Homo sapien
ctcgctcgcgctgccccagccgggg

SEQ ID NO: 4572985 - DNA, 25 bp, Homo sapien
cagccggggctgaggtaccgggccg

SEQ ID NO: 4572986 - DNA, 25 bp, Homo sapien
cgctgccccagccggggctgaggta

SEQ ID NO: 4572987 - DNA, 25 bp, Homo sapien
tcggcctcctggatggcgacgcgga

SEQ ID NO: 4572988 - DNA, 25 bp, Homo sapien
tgcaccgccgtcttgggcccgggcc

SEQ ID NO: 4572989 - DNA, 25 bp, Homo sapien
tcgtcctccaactcgtccacgtcct

SEQ ID NO: 4572990 - DNA, 25 bp, Homo sapien
tggcgacgcggatctgcaccgccgt

SEQ ID NO: 4572991 - DNA, 25 bp, Homo sapien
gccggggtcctcacgccgcaaggcc

SEQ ID NO: 4572992 - DNA, 25 bp, Homo sapien
gcaaggcccagccagccggtcggca

SEQ ID NO: 4572993 - DNA, 25 bp, Homo sapien
ccagccagccggtcggcagcgactg

SEQ ID NO: 4572994 - DNA, 25 bp, Homo sapien
cggtcggcagcgactgcgacgaggg

SEQ ID NO: 4572995 - DNA, 25 bp, Homo sapien
cattatgaatggaagtcgggtcatt

SEQ ID NO: 4572996 - DNA, 25 bp, Homo sapien
agaatagcattatcagcattatgaa

SEQ ID NO: 4572997 - DNA, 25 bp, Homo sapien
tcagcattatgaatggaagtcgggt

SEQ ID NO: 4572998 - DNA, 25 bp, Homo sapien
ttctctcccttcagaagaatagcat

SEQ ID NO: 4572999 - DNA, 25 bp, Homo sapien
tcagtctaatgatgccactctcctt

SEQ ID NO: 4573000 - DNA, 25 bp, Homo sapien
tatgcatccgtgtctctactgactt

SEQ ID NO: 4573001 - DNA, 25 bp, Homo sapien
tttgtaaatcttcagtctaatgatg

SEQ ID NO: 4573002 - DNA, 25 bp, Homo sapien
ttaaaggccattccgcttgttctgg

SEQ ID NO: 4573003 - DNA, 25 bp, Homo sapien
aatagtcaagggtagatgtcctggc

SEQ ID NO: 4573004 - DNA, 25 bp, Homo sapien
taatgtgtcgcagtaagcactgatg

SEQ ID NO: 4573005 - DNA, 25 bp, Homo sapien
catttagtagtgtcaggcttggctg

SEQ ID NO: 4573006 - DNA, 25 bp, Homo sapien
cacctgcaatgggaatacgttagaa

SEQ ID NO: 4573007 - DNA, 25 bp, Homo sapien
tgttcactcttgatatcccagtctg

SEQ ID NO: 4573008 - DNA, 25 bp, Homo sapien
cattacacagtctttttccaaacgc

SEQ ID NO: 4573009 - DNA, 25 bp, Homo sapien
gaagttctagaccacaattcctctg

SEQ ID NO: 4573010 - DNA, 25 bp, Homo sapien
tcactggagtaaatgtcaaagagag

SEQ ID NO: 4573011 - DNA, 25 bp, Homo sapien
ttcacagtgagtaggtactgaagtg

SEQ ID NO: 4573012 - DNA, 25 bp, Homo sapien
tactgaagtgacagtattagatgga

SEQ ID NO: 4573013 - DNA, 25 bp, Homo sapien
gttgggtttgcacaagttcattttc

SEQ ID NO: 4573014 - DNA, 25 bp, Homo sapien
gtattagatggattatcagcatggg

SEQ ID NO: 4573015 - DNA, 25 bp, Homo sapien
cttcccagctcgggggcgtgtacag

SEQ ID NO: 4573016 - DNA, 25 bp, Homo sapien
ctgcttcccagctcgggggcgtgta

SEQ ID NO: 4573017 - DNA, 25 bp, Homo sapien
tgcttcccagctcgggggcgtgtac

SEQ ID NO: 4573018 - DNA, 25 bp, Homo sapien
cctgcttcccagctcgggggcgtgt

SEQ ID NO: 4573019 - DNA, 25 bp, Homo sapien
gatgaccgagcggtcattgcctccg

SEQ ID NO: 4573020 - DNA, 25 bp, Homo sapien
cgaagagacgtcaaaacaggctggg

SEQ ID NO: 4573021 - DNA, 25 bp, Homo sapien
aaagtggtcagagcagatgaccgag

SEQ ID NO: 4573022 - DNA, 25 bp, Homo sapien
tggagctctcctcgcgtgtccaggc

SEQ ID NO: 4573023 - DNA, 25 bp, Homo sapien
tggtgttgccgcagtgggcggccac

SEQ ID NO: 4573024 - DNA, 25 bp, Homo sapien
cagcgacttcccagacttggtggtg

SEQ ID NO: 4573025 - DNA, 25 bp, Homo sapien
gggcggccacacaacgggccggcat

SEQ ID NO: 4573026 - DNA, 25 bp, Homo sapien
aaccccgcacgaagcggtcccagag

SEQ ID NO: 4573027 - DNA, 25 bp, Homo sapien
ggatacaaatttcgcgcgggcagcg

SEQ ID NO: 4573028 - DNA, 25 bp, Homo sapien
gcactgggctctcacgaatacaact

SEQ ID NO: 4573029 - DNA, 25 bp, Homo sapien
caactagaagctgcaacgactgtgt

SEQ ID NO: 4573030 - DNA, 25 bp, Homo sapien
tctggtcaccggaagtggcgatctg

SEQ ID NO: 4573031 - DNA, 25 bp, Homo sapien
gccgggctgcgaacaacgtaagttg

SEQ ID NO: 4573032 - DNA, 25 bp, Homo sapien
tgattcccgggaaatatcgctctgt

SEQ ID NO: 4573033 - DNA, 25 bp, Homo sapien
tgtattattaggaccggcaccgctg

SEQ ID NO: 4573034 - DNA, 25 bp, Homo sapien
gactgtctcctatcatgattcccgg

SEQ ID NO: 4573035 - DNA, 25 bp, Homo sapien
taggtgaaggctagtgaaagagtcc

SEQ ID NO: 4573036 - DNA, 25 bp, Homo sapien
gaagatctacagctacatagcgatg

SEQ ID NO: 4573037 - DNA, 25 bp, Homo sapien
ccagtgagtccggaagaatgctgat

SEQ ID NO: 4573038 - DNA, 25 bp, Homo sapien
tacagattctgtcagggtgatgatg

SEQ ID NO: 4573039 - DNA, 25 bp, Homo sapien
gagcaattgagtgttcttaaaccct

SEQ ID NO: 4573040 - DNA, 25 bp, Homo sapien
cagatgtggcaatgtgaggagacta

SEQ ID NO: 4573041 - DNA, 25 bp, Homo sapien
agggacagactgtttctctataggt

SEQ ID NO: 4573042 - DNA, 25 bp, Homo sapien
tcctttcgggatatgaattttggtc

SEQ ID NO: 4573043 - DNA, 25 bp, Homo sapien
taatccccacctgacattaagacag

SEQ ID NO: 4573044 - DNA, 25 bp, Homo sapien
tccacagatgcatagagcccttatg

SEQ ID NO: 4573045 - DNA, 25 bp, Homo sapien
tgagtatttctttcgcctacccctg

SEQ ID NO: 4573046 - DNA, 25 bp, Homo sapien
tcaaagtggccttgatactgagtaa

SEQ ID NO: 4573047 - DNA, 25 bp, Homo sapien
tatagcccaaagcacgtagtatttg

SEQ ID NO: 4573048 - DNA, 25 bp, Homo sapien
gatggcgtggcactgcatccttggt

SEQ ID NO: 4573049 - DNA, 25 bp, Homo sapien
ggttcttgctttgattggtgccctg

SEQ ID NO: 4573050 - DNA, 25 bp, Homo sapien
aaaagcattattgcccactgttctc

SEQ ID NO: 4573051 - DNA, 25 bp, Homo sapien
ggagatactgtacccgatgttctgg

SEQ ID NO: 4573052 - DNA, 25 bp, Homo sapien
gtacccgatgttctggtacagcagc

SEQ ID NO: 4573053 - DNA, 25 bp, Homo sapien
agcagaaacatttagtacccccatt

SEQ ID NO: 4573054 - DNA, 25 bp, Homo sapien
agtacccccatttagggagatactg

SEQ ID NO: 4573055 - DNA, 25 bp, Homo sapien
ggatctggcatctgggaagaatttt

SEQ ID NO: 4573056 - DNA, 25 bp, Homo sapien
taaggatctggcatctgggaagaat

SEQ ID NO: 4573057 - DNA, 25 bp, Homo sapien
aaggatctggcatctgggaagaatt

SEQ ID NO: 4573058 - DNA, 25 bp, Homo sapien
aggatctggcatctgggaagaattt

SEQ ID NO: 4573059 - DNA, 25 bp, Homo sapien
gttcctaatccactttcatgttttg

SEQ ID NO: 4573060 - DNA, 25 bp, Homo sapien
ggtcgttcctaatccactttcatgt

SEQ ID NO: 4573061 - DNA, 25 bp, Homo sapien
ctaatccactttcatgttttgtcat

SEQ ID NO: 4573062 - DNA, 25 bp, Homo sapien
tcctaatccactttcatgttttgtc

SEQ ID NO: 4573063 - DNA, 25 bp, Homo sapien
ctgagttacccgatctttcttctga

SEQ ID NO: 4573064 - DNA, 25 bp, Homo sapien
agttgctgtccacaagtttattgtc

SEQ ID NO: 4573065 - DNA, 25 bp, Homo sapien
agcttgccttcttctgagttacccg

SEQ ID NO: 4573066 - DNA, 25 bp, Homo sapien
cttcttctgagttacccgatctttc

SEQ ID NO: 4573067 - DNA, 25 bp, Homo sapien
tcttcttgcattaagtagcacgtat

SEQ ID NO: 4573068 - DNA, 25 bp, Homo sapien
cttcttgcattaagtagcacgtata

SEQ ID NO: 4573069 - DNA, 25 bp, Homo sapien
ttgcattaagtagcacgtataatct

SEQ ID NO: 4573070 - DNA, 25 bp, Homo sapien
tcttgcattaagtagcacgtataat

SEQ ID NO: 4573071 - DNA, 25 bp, Homo sapien
tccacattgtattcatcgccagtca

SEQ ID NO: 4573072 - DNA, 25 bp, Homo sapien
ttccacattgtattcatcgccagtc

SEQ ID NO: 4573073 - DNA, 25 bp, Homo sapien
ctttccacattgtattcatcgccag

SEQ ID NO: 4573074 - DNA, 25 bp, Homo sapien
ccacattgtattcatcgccagtcac

SEQ ID NO: 4573075 - DNA, 25 bp, Homo sapien
ttgtccatgccaaacatattgaaaa

SEQ ID NO: 4573076 - DNA, 25 bp, Homo sapien
tccatgccaaacatattgaaaagcc

SEQ ID NO: 4573077 - DNA, 25 bp, Homo sapien
aaacatattgaaaagcctgcgggcc

SEQ ID NO: 4573078 - DNA, 25 bp, Homo sapien
tgccaaacatattgaaaagcctgcg

SEQ ID NO: 4573079 - DNA, 25 bp, Homo sapien
caccatattttggcagttcgtgtgc

SEQ ID NO: 4573080 - DNA, 25 bp, Homo sapien
acaagccaaccttcacaccatattt

SEQ ID NO: 4573081 - DNA, 25 bp, Homo sapien
ctgcagcataatttgacaagccaac

SEQ ID NO: 4573082 - DNA, 25 bp, Homo sapien
catattttggcagttcgtgtgcata

SEQ ID NO: 4573083 - DNA, 25 bp, Homo sapien
gtatcataccccctctatacaggcg

SEQ ID NO: 4573084 - DNA, 25 bp, Homo sapien
tggccagagtatcataccccctcta

SEQ ID NO: 4573085 - DNA, 25 bp, Homo sapien
cagagtatcataccccctctataca

SEQ ID NO: 4573086 - DNA, 25 bp, Homo sapien
taccccctctatacaggcgtaagca

SEQ ID NO: 4573087 - DNA, 25 bp, Homo sapien
atcaccaagcgtttccaaacttagt

SEQ ID NO: 4573088 - DNA, 25 bp, Homo sapien
ctatatttgagtgtattgtatttat

SEQ ID NO: 4573089 - DNA, 25 bp, Homo sapien
agcgtttccaaacttagtaatcagt

SEQ ID NO: 4573090 - DNA, 25 bp, Homo sapien
caagcgtttccaaacttagtaatca

SEQ ID NO: 4573091 - DNA, 25 bp, Homo sapien
caactttaacaaaccacatcctggg

SEQ ID NO: 4573092 - DNA, 25 bp, Homo sapien
caaaagacccgcgtccgcggctcaa

SEQ ID NO: 4573093 - DNA, 25 bp, Homo sapien
cgcggctcaacagagacctgcaggc

SEQ ID NO: 4573094 - DNA, 25 bp, Homo sapien
cacatcctggggaacaaaagacccg

SEQ ID NO: 4573095 - DNA, 25 bp, Homo sapien
tcttctcatatcttgctgcaaatcc

SEQ ID NO: 4573096 - DNA, 25 bp, Homo sapien
tcctctctcaacgtcaatcattttc

SEQ ID NO: 4573097 - DNA, 25 bp, Homo sapien
gcaaatcctctctcaacgtcaatca

SEQ ID NO: 4573098 - DNA, 25 bp, Homo sapien
ccaaatctctctgtagccctcttgc

SEQ ID NO: 4573099 - DNA, 25 bp, Homo sapien
tgcagtgcctgctcaacagaggcag

SEQ ID NO: 4573100 - DNA, 25 bp, Homo sapien
gatttattaagaagtccaactggcc

SEQ ID NO: 4573101 - DNA, 25 bp, Homo sapien
cacgtgtcattgcttcagaggtctt

SEQ ID NO: 4573102 - DNA, 25 bp, Homo sapien
tctgtctgaacaccctcaaagtggg

SEQ ID NO: 4573103 - DNA, 25 bp, Homo sapien
caaatccttgctgaacaggacgtag

SEQ ID NO: 4573104 - DNA, 25 bp, Homo sapien
caggacgtagcaggagttgactttc

SEQ ID NO: 4573105 - DNA, 25 bp, Homo sapien
cagagaaaagttgcttgttcctgaa

SEQ ID NO: 4573106 - DNA, 25 bp, Homo sapien
aatggtggaggttcagagtacagcc

SEQ ID NO: 4573107 - DNA, 25 bp, Homo sapien
tgaccagcaataactctttattata

SEQ ID NO: 4573108 - DNA, 25 bp, Homo sapien
agactgtttctcttcgctcacacaa

SEQ ID NO: 4573109 - DNA, 25 bp, Homo sapien
cggaaagaattaggcaatccatctg

SEQ ID NO: 4573110 - DNA, 25 bp, Homo sapien
taactctttattatatggccggaaa

SEQ ID NO: 4573111 - DNA, 25 bp, Homo sapien
gagcaatggcggtgtagtgtttggg

SEQ ID NO: 4573112 - DNA, 25 bp, Homo sapien
ttggtgacttctacgatgggatggc

SEQ ID NO: 4573113 - DNA, 25 bp, Homo sapien
taggttcttgccattccatagggga

SEQ ID NO: 4573114 - DNA, 25 bp, Homo sapien
ttccataggggaggcgactgcagtt

SEQ ID NO: 4573115 - DNA, 25 bp, Homo sapien
taaaaacggccataagcatcactgg

SEQ ID NO: 4573116 - DNA, 25 bp, Homo sapien
gcctagttaatcatcgccggaagaa

SEQ ID NO: 4573117 - DNA, 25 bp, Homo sapien
tgatcaacagccactacgtcaagct

SEQ ID NO: 4573118 - DNA, 25 bp, Homo sapien
tagacgggaaagtgactgatcagcc

SEQ ID NO: 4573119 - DNA, 25 bp, Homo sapien
aagttgtcttgtaccaggtaacaag

SEQ ID NO: 4573120 - DNA, 25 bp, Homo sapien
agttgtcttgtaccaggtaacaaga

SEQ ID NO: 4573121 - DNA, 25 bp, Homo sapien
gtaacaagaaccttcctatctcctc

SEQ ID NO: 4573122 - DNA, 25 bp, Homo sapien
ccaggtaacaagaaccttcctatct

SEQ ID NO: 4573123 - DNA, 25 bp, Homo sapien
gagagcaagtgtgaagcagaaaagg

SEQ ID NO: 4573124 - DNA, 25 bp, Homo sapien
tgagaaagaggatgagagcaagtgt

SEQ ID NO: 4573125 - DNA, 25 bp, Homo sapien
cagatgtggggtgagaaagaggatg

SEQ ID NO: 4573126 - DNA, 25 bp, Homo sapien
agaggatgagagcaagtgtgaagca

SEQ ID NO: 4573127 - DNA, 25 bp, Homo sapien
tgggaatccttgacattccgtctgg

SEQ ID NO: 4573128 - DNA, 25 bp, Homo sapien
tctcttgcccagttgtgggttacag

SEQ ID NO: 4573129 - DNA, 25 bp, Homo sapien
aggcaagggcacaggaactcagact

SEQ ID NO: 4573130 - DNA, 25 bp, Homo sapien
gttacaggtcaagtagagagtcagc

SEQ ID NO: 4573131 - DNA, 25 bp, Homo sapien
cttccaaatgctagcaacgtaggga

SEQ ID NO: 4573132 - DNA, 25 bp, Homo sapien
tctaggcccaagagatgtttcgctg

SEQ ID NO: 4573133 - DNA, 25 bp, Homo sapien
gaactcccagaaggttgctctcagc

SEQ ID NO: 4573134 - DNA, 25 bp, Homo sapien
tacatttgggacactctgcatcatc

SEQ ID NO: 4573135 - DNA, 25 bp, Homo sapien
tctataggatgtcgtatgcatcatt

SEQ ID NO: 4573136 - DNA, 25 bp, Homo sapien
cagtcttctataggatgtcgtatgc

SEQ ID NO: 4573137 - DNA, 25 bp, Homo sapien
gggtggtgacagtcttctataggat

SEQ ID NO: 4573138 - DNA, 25 bp, Homo sapien
tgtcgtatgcatcatttatcaactt

SEQ ID NO: 4573139 - DNA, 25 bp, Homo sapien
tccctgtcctgaggcaggtactcct

SEQ ID NO: 4573140 - DNA, 25 bp, Homo sapien
tttgaatcctagcaccaaggccaca

SEQ ID NO: 4573141 - DNA, 25 bp, Homo sapien
gcctcacgtggagtttcttttagaa

SEQ ID NO: 4573142 - DNA, 25 bp, Homo sapien
tttcatcttcttcgcctcacgtgga

SEQ ID NO: 4573143 - DNA, 25 bp, Homo sapien
caaggccacactcggcactgaatac

SEQ ID NO: 4573144 - DNA, 25 bp, Homo sapien
tcattgtcctctcggtatacctgca

SEQ ID NO: 4573145 - DNA, 25 bp, Homo sapien
cttcattgtcctctcggtatacctg

SEQ ID NO: 4573146 - DNA, 25 bp, Homo sapien
tgtcctctcggtatacctgcacttt

SEQ ID NO: 4573147 - DNA, 25 bp, Homo sapien
ctccttcattgtcctctcggtatac

SEQ ID NO: 4573148 - DNA, 25 bp, Homo sapien
tgttccaaatggaaggatgcccgcg

SEQ ID NO: 4573149 - DNA, 25 bp, Homo sapien
tcgcacaggtttacagcaccacttg

SEQ ID NO: 4573150 - DNA, 25 bp, Homo sapien
tccttcctgcccttagagtcaccgc

SEQ ID NO: 4573151 - DNA, 25 bp, Homo sapien
gatgctgccggaatggctgttccaa

SEQ ID NO: 4573152 - DNA, 25 bp, Homo sapien
aattcagggcctggtctcaaccgcc

SEQ ID NO: 4573153 - DNA, 25 bp, Homo sapien
tcaggataagatgaacgcggaattc

SEQ ID NO: 4573154 - DNA, 25 bp, Homo sapien
cctcgtggcctctgtctagaccgta

SEQ ID NO: 4573155 - DNA, 25 bp, Homo sapien
tttcctctcacttagacgaccctgg

SEQ ID NO: 4573156 - DNA, 25 bp, Homo sapien
ctctcggatcgcaaactctgagcca

SEQ ID NO: 4573157 - DNA, 25 bp, Homo sapien
cagggaccatcccgttgttgacctc

SEQ ID NO: 4573158 - DNA, 25 bp, Homo sapien
ctccagatgacagcgggaggccgca

SEQ ID NO: 4573159 - DNA, 25 bp, Homo sapien
tctgagccagagctctccgcgcgcg

SEQ ID NO: 4573160 - DNA, 25 bp, Homo sapien
agcgcgcgcctggtccgtgcggacg

SEQ ID NO: 4573161 - DNA, 25 bp, Homo sapien
gggagccagcgcgcgcctggtccgt

SEQ ID NO: 4573162 - DNA, 25 bp, Homo sapien
ctggtccgtgcggacggctgcgcct

SEQ ID NO: 4573163 - DNA, 25 bp, Homo sapien
cgtgcggacggctgcgcctccttct

SEQ ID NO: 4573164 - DNA, 25 bp, Homo sapien
ccctcgactctagggacagtcttaa

SEQ ID NO: 4573165 - DNA, 25 bp, Homo sapien
cctccaccctcgactctagggacag

SEQ ID NO: 4573166 - DNA, 25 bp, Homo sapien
caccctcgactctagggacagtctt

SEQ ID NO: 4573167 - DNA, 25 bp, Homo sapien
tcgactctagggacagtcttaaact

SEQ ID NO: 4573168 - DNA, 25 bp, Homo sapien
gaggctcagattggaggaacttgat

SEQ ID NO: 4573169 - DNA, 25 bp, Homo sapien
ggctcagattggaggaacttgatac

SEQ ID NO: 4573170 - DNA, 25 bp, Homo sapien
aggctcagattggaggaacttgata

SEQ ID NO: 4573171 - DNA, 25 bp, Homo sapien
cagaggtctcttggagtggaaggtc

SEQ ID NO: 4573172 - DNA, 25 bp, Homo sapien
attgcgctgctgtgcgttagtggtc

SEQ ID NO: 4573173 - DNA, 25 bp, Homo sapien
tactgttcgagtggtgactttctga

SEQ ID NO: 4573174 - DNA, 25 bp, Homo sapien
tggctgcttctgagattgcgctgct

SEQ ID NO: 4573175 - DNA, 25 bp, Homo sapien
ttgccaagctggtggtcgtggttgt

SEQ ID NO: 4573176 - DNA, 25 bp, Homo sapien
ttggtatctcgtgatgcttttttgg

SEQ ID NO: 4573177 - DNA, 25 bp, Homo sapien
ttggctttctcagttgccaagctgg

SEQ ID NO: 4573178 - DNA, 25 bp, Homo sapien
agttgccaagctggtggtcgtggtt

SEQ ID NO: 4573179 - DNA, 25 bp, Homo sapien
tgtcatcgggaacacctgctgcacc

SEQ ID NO: 4573180 - DNA, 25 bp, Homo sapien
gagtttgaatggaagacctttctgt

SEQ ID NO: 4573181 - DNA, 25 bp, Homo sapien
ctttctgtcatcgggaacacctgct

SEQ ID NO: 4573182 - DNA, 25 bp, Homo sapien
tattctagacaccagaaatataaca

SEQ ID NO: 4573183 - DNA, 25 bp, Homo sapien
ggttctcatgactatctttttgtaa

SEQ ID NO: 4573184 - DNA, 25 bp, Homo sapien
atggaattgtctggttctcatgact

SEQ ID NO: 4573185 - DNA, 25 bp, Homo sapien
gaattgtctggttctcatgactatc

SEQ ID NO: 4573186 - DNA, 25 bp, Homo sapien
catgactatctttttgtaaatcctt

SEQ ID NO: 4573187 - DNA, 25 bp, Homo sapien
gctctggaagccttgacaggcctcc

SEQ ID NO: 4573188 - DNA, 25 bp, Homo sapien
gcgggacattttgccaagaattctg

SEQ ID NO: 4573189 - DNA, 25 bp, Homo sapien
gggacattttgccaagaattctgct

SEQ ID NO: 4573190 - DNA, 25 bp, Homo sapien
ggacattttgccaagaattctgctg

SEQ ID NO: 4573191 - DNA, 25 bp, Homo sapien
tgttgtagcctcagacccctgtagt

SEQ ID NO: 4573192 - DNA, 25 bp, Homo sapien
ttcacactcctagttccctgcccgg

SEQ ID NO: 4573193 - DNA, 25 bp, Homo sapien
agcctcagacccctgtagtagggaa

SEQ ID NO: 4573194 - DNA, 25 bp, Homo sapien
agaggcggcttggttggttccttca

SEQ ID NO: 4573195 - DNA, 25 bp, Homo sapien
tccttgtaatctggtgctgctgtcc

SEQ ID NO: 4573196 - DNA, 25 bp, Homo sapien
ctgtccttggttggcagatgtccaa

SEQ ID NO: 4573197 - DNA, 25 bp, Homo sapien
caaagacgttcccagcgggactggt

SEQ ID NO: 4573198 - DNA, 25 bp, Homo sapien
ccagcgggactggtgttccttgtaa

SEQ ID NO: 4573199 - DNA, 25 bp, Homo sapien
ccatgggtataagctgtacatttac

SEQ ID NO: 4573200 - DNA, 25 bp, Homo sapien
aatctggctgactccttaagatcca

SEQ ID NO: 4573201 - DNA, 25 bp, Homo sapien
gtgcaaatctggctgactccttaag

SEQ ID NO: 4573202 - DNA, 25 bp, Homo sapien
ccagctcccgtactccatgggtata

SEQ ID NO: 4573203 - DNA, 25 bp, Homo sapien
tggagtcctttccagataacctaag

SEQ ID NO: 4573204 - DNA, 25 bp, Homo sapien
aggggggtcacctcattctggtgaa

SEQ ID NO: 4573205 - DNA, 25 bp, Homo sapien
aatctttggtggagtcctttccaga

SEQ ID NO: 4573206 - DNA, 25 bp, Homo sapien
gggtcacctcattctggtgaaaatc

SEQ ID NO: 4573207 - DNA, 25 bp, Homo sapien
tggaggggctgtatgcagcactcct

SEQ ID NO: 4573208 - DNA, 25 bp, Homo sapien
cagggcatccggatcaagctctgaa

SEQ ID NO: 4573209 - DNA, 25 bp, Homo sapien
tctgaatgttgtccctcttgcttgg

SEQ ID NO: 4573210 - DNA, 25 bp, Homo sapien
gggctgtatgcagcactcctacatc

SEQ ID NO: 4573211 - DNA, 25 bp, Homo sapien
gaaggtaagccatggccatccagag

SEQ ID NO: 4573212 - DNA, 25 bp, Homo sapien
ttctctgcccaaggggctagggcca

SEQ ID NO: 4573213 - DNA, 25 bp, Homo sapien
tggattccagttcgtctgcccacag

SEQ ID NO: 4573214 - DNA, 25 bp, Homo sapien
cctccactcaacacaggaaggtaag

SEQ ID NO: 4573215 - DNA, 25 bp, Homo sapien
ttcggctcacgaattgttttcctga

SEQ ID NO: 4573216 - DNA, 25 bp, Homo sapien
ccttctgaagtcctataatgcaaat

SEQ ID NO: 4573217 - DNA, 25 bp, Homo sapien
tgtcccataagtcccatgtgctttc

SEQ ID NO: 4573218 - DNA, 25 bp, Homo sapien
tgttgttgtcgttaaatagatttcc

SEQ ID NO: 4573219 - DNA, 25 bp, Homo sapien
gggaaaagacatctatagccagcat

SEQ ID NO: 4573220 - DNA, 25 bp, Homo sapien
gaaagtctcgtttcctgagcagtcc

SEQ ID NO: 4573221 - DNA, 25 bp, Homo sapien
ccaggactcagatgttcagtattcc

SEQ ID NO: 4573222 - DNA, 25 bp, Homo sapien
aaagactagcttcccctcaagaaga

SEQ ID NO: 4573223 - DNA, 25 bp, Homo sapien
ctttttcttgcttttttcagccttg

SEQ ID NO: 4573224 - DNA, 25 bp, Homo sapien
ttttcttgcttttttcagccttgac

SEQ ID NO: 4573225 - DNA, 25 bp, Homo sapien
tttttcttgcttttttcagccttga

SEQ ID NO: 4573226 - DNA, 25 bp, Homo sapien
gctttcctttagctcgatatgcagc

SEQ ID NO: 4573227 - DNA, 25 bp, Homo sapien
cccttttttgctgcatcaggctttc

SEQ ID NO: 4573228 - DNA, 25 bp, Homo sapien
ttcctttagctcgatatgcagcaat

SEQ ID NO: 4573229 - DNA, 25 bp, Homo sapien
gcagcaatatccttttcgtattttt

SEQ ID NO: 4573230 - DNA, 25 bp, Homo sapien
cagaagaggaagaaggccgaaggag

SEQ ID NO: 4573231 - DNA, 25 bp, Homo sapien
tgtctcccctttgggagggatgtag

SEQ ID NO: 4573232 - DNA, 25 bp, Homo sapien
ttttgggcgatactcagagcagaag

SEQ ID NO: 4573233 - DNA, 25 bp, Homo sapien
ttcctttgtctttagcagaaatggt

SEQ ID NO: 4573234 - DNA, 25 bp, Homo sapien
tcttatgctcctcccgacgtttgca

SEQ ID NO: 4573235 - DNA, 25 bp, Homo sapien
agagtcgcccagtgcccgtccggct

SEQ ID NO: 4573236 - DNA, 25 bp, Homo sapien
cgtccggctctcacttgccctggcg

SEQ ID NO: 4573237 - DNA, 25 bp, Homo sapien
cggctctcacttgccctggcgctgt

SEQ ID NO: 4573238 - DNA, 25 bp, Homo sapien
tgaagagtcatgttagatctgcctc

SEQ ID NO: 4573239 - DNA, 25 bp, Homo sapien
tgctggttacatgttgtcatcttct

SEQ ID NO: 4573240 - DNA, 25 bp, Homo sapien
tggctgctggttacatgttgtcatc

SEQ ID NO: 4573241 - DNA, 25 bp, Homo sapien
gcctcttaaaccacatgtttggagg

SEQ ID NO: 4573242 - DNA, 25 bp, Homo sapien
gacgtgtcacagagatacagacccg

SEQ ID NO: 4573243 - DNA, 25 bp, Homo sapien
cagtgggtgggtacaaacgaaagca

SEQ ID NO: 4573244 - DNA, 25 bp, Homo sapien
tatctgctaataggcaaggccctcc

SEQ ID NO: 4573245 - DNA, 25 bp, Homo sapien
ggctgatccctgacattgaatggcg

SEQ ID NO: 4573246 - DNA, 25 bp, Homo sapien
gaagggtatagctgtcaggtgcctc

SEQ ID NO: 4573247 - DNA, 25 bp, Homo sapien
taatctggactgattgacttgtcca

SEQ ID NO: 4573248 - DNA, 25 bp, Homo sapien
aacaatgcggcaaccccaagggttg

SEQ ID NO: 4573249 - DNA, 25 bp, Homo sapien
ttgtgcctttgtccccgtggacttg

SEQ ID NO: 4573250 - DNA, 25 bp, Homo sapien
caggcattggacacaaggctcattc

SEQ ID NO: 4573251 - DNA, 25 bp, Homo sapien
tctgagaaacttacatccaaaggca

SEQ ID NO: 4573252 - DNA, 25 bp, Homo sapien
ctctgagaaacttacatccaaaggc

SEQ ID NO: 4573253 - DNA, 25 bp, Homo sapien
ttgctttccaggcattggacacaag

SEQ ID NO: 4573254 - DNA, 25 bp, Homo sapien
gatactggtgtgaaatagccaaggt

SEQ ID NO: 4573255 - DNA, 25 bp, Homo sapien
tgcctccaaaccatcacaccatgct

SEQ ID NO: 4573256 - DNA, 25 bp, Homo sapien
tcaactggtcctggcgtaggactgg

SEQ ID NO: 4573257 - DNA, 25 bp, Homo sapien
ggtgaacaggaggattcaactggtc

SEQ ID NO: 4573258 - DNA, 25 bp, Homo sapien
gagtgactcgccacagggtgtttat

SEQ ID NO: 4573259 - DNA, 25 bp, Homo sapien
cagtcaggacatgcgcgatccttca

SEQ ID NO: 4573260 - DNA, 25 bp, Homo sapien
tcaactggaatcagagctaaggctc

SEQ ID NO: 4573261 - DNA, 25 bp, Homo sapien
cgatccttcagagggcctttcggga

SEQ ID NO: 4573262 - DNA, 25 bp, Homo sapien
gtcccatcgagaggaaacgttttca

SEQ ID NO: 4573263 - DNA, 25 bp, Homo sapien
tttggaatgcagaaggtcccatcga

SEQ ID NO: 4573264 - DNA, 25 bp, Homo sapien
agaggaaacgttttcacacagagac

SEQ ID NO: 4573265 - DNA, 25 bp, Homo sapien
cagaaggtcccatcgagaggaaacg

SEQ ID NO: 4573266 - DNA, 25 bp, Homo sapien
ttaggacagcagagtgagctccgct

SEQ ID NO: 4573267 - DNA, 25 bp, Homo sapien
tcatcgtgggaaagcacccagtgtg

SEQ ID NO: 4573268 - DNA, 25 bp, Homo sapien
cgctggctgaactcggtgctccatg

SEQ ID NO: 4573269 - DNA, 25 bp, Homo sapien
gcttcctggcagatgagagggtccc

SEQ ID NO: 4573270 - DNA, 25 bp, Homo sapien
gcagaatcggcttgcccacgcagtg

SEQ ID NO: 4573271 - DNA, 25 bp, Homo sapien
aactggtactgcctgtaacgtggca

SEQ ID NO: 4573272 - DNA, 25 bp, Homo sapien
taacgtggcagaatcggcttgccca

SEQ ID NO: 4573273 - DNA, 25 bp, Homo sapien
tgcctgtaacgtggcagaatcggct

SEQ ID NO: 4573274 - DNA, 25 bp, Homo sapien
tgtggccttgaaagtcgttgtttag

SEQ ID NO: 4573275 - DNA, 25 bp, Homo sapien
ttgtggccttgaaagtcgttgttta

SEQ ID NO: 4573276 - DNA, 25 bp, Homo sapien
catgaaaatgctttcggcttgcctt

SEQ ID NO: 4573277 - DNA, 25 bp, Homo sapien
acttgctgcgtgctgtgttctctgc

SEQ ID NO: 4573278 - DNA, 25 bp, Homo sapien
tcggcttgcctttgttaagcggcat

SEQ ID NO: 4573279 - DNA, 25 bp, Homo sapien
tcaaatctcaatccatttgcagcct

SEQ ID NO: 4573280 - DNA, 25 bp, Homo sapien
tgctgtctctcctgtgagcctctga

SEQ ID NO: 4573281 - DNA, 25 bp, Homo sapien
ctctcctgttcttctcaaagctcgc

SEQ ID NO: 4573282 - DNA, 25 bp, Homo sapien
ttcttctcaaagctcgcctgctgtc

SEQ ID NO: 4573283 - DNA, 25 bp, Homo sapien
tcctgttcttctcaaagctcgcctg

SEQ ID NO: 4573284 - DNA, 25 bp, Homo sapien
agttactctggctgtggtcaattac

SEQ ID NO: 4573285 - DNA, 25 bp, Homo sapien
ttccagcctttgctcgttccaggag

SEQ ID NO: 4573286 - DNA, 25 bp, Homo sapien
cgcttaatcatgaggcttctgccaa

SEQ ID NO: 4573287 - DNA, 25 bp, Homo sapien
tactgccgctaaatgactctttctg

SEQ ID NO: 4573288 - DNA, 25 bp, Homo sapien
ttggctttagctggcagggcccctg

SEQ ID NO: 4573289 - DNA, 25 bp, Homo sapien
ggctttagctggcagggcccctgaa

SEQ ID NO: 4573290 - DNA, 25 bp, Homo sapien
ctttagctggcagggcccctgaata

SEQ ID NO: 4573291 - DNA, 25 bp, Homo sapien
tagctggcagggcccctgaatacat

SEQ ID NO: 4573292 - DNA, 25 bp, Homo sapien
caccaacatgtcgttttccataatg

SEQ ID NO: 4573293 - DNA, 25 bp, Homo sapien
tccataatggaagatctcttttgtt

SEQ ID NO: 4573294 - DNA, 25 bp, Homo sapien
catccaatgttaacttcatcttcca

SEQ ID NO: 4573295 - DNA, 25 bp, Homo sapien
tcatagaaggctgaagccatccaat

SEQ ID NO: 4573296 - DNA, 25 bp, Homo sapien
ggcgtgcagacccacacttcaagag

SEQ ID NO: 4573297 - DNA, 25 bp, Homo sapien
tctggtcgggtgaggaaaactcttg

SEQ ID NO: 4573298 - DNA, 25 bp, Homo sapien
gcagtttgtggccagctctcaatga

SEQ ID NO: 4573299 - DNA, 25 bp, Homo sapien
gacccacacttcaagagcagtttgt

SEQ ID NO: 4573300 - DNA, 25 bp, Homo sapien
cttgttcttagggaaacttggctga

SEQ ID NO: 4573301 - DNA, 25 bp, Homo sapien
gagcactgtggttggcttgttctta

SEQ ID NO: 4573302 - DNA, 25 bp, Homo sapien
cagatcactctgatgcacagcagca

SEQ ID NO: 4573303 - DNA, 25 bp, Homo sapien
tccgggcccacactgaataaggcac

SEQ ID NO: 4573304 - DNA, 25 bp, Homo sapien
gctcttagcctactgggaatgcgca

SEQ ID NO: 4573305 - DNA, 25 bp, Homo sapien
gatggggatgctcttagcctactgg

SEQ ID NO: 4573306 - DNA, 25 bp, Homo sapien
gggatgctcttagcctactgggaat

SEQ ID NO: 4573307 - DNA, 25 bp, Homo sapien
tagcctactgggaatgcgcactggg

SEQ ID NO: 4573308 - DNA, 25 bp, Homo sapien
caattcagggtttatgttcagctca

SEQ ID NO: 4573309 - DNA, 25 bp, Homo sapien
gaaatctctgcatgtaccctcctgg

SEQ ID NO: 4573310 - DNA, 25 bp, Homo sapien
tagatgtggttcatgagcctctgct

SEQ ID NO: 4573311 - DNA, 25 bp, Homo sapien
gaaaactttgccaattccaggagac

SEQ ID NO: 4573312 - DNA, 25 bp, Homo sapien
caaagtcctggcgagccaccacatc

SEQ ID NO: 4573313 - DNA, 25 bp, Homo sapien
cagtgagcctgtagatattggcggc

SEQ ID NO: 4573314 - DNA, 25 bp, Homo sapien
tagtggagtatcctgcctcgtggaa

SEQ ID NO: 4573315 - DNA, 25 bp, Homo sapien
tattggcggctttgcgtgcttaaaa

SEQ ID NO: 4573316 - DNA, 25 bp, Homo sapien
tagctttggcccgtgtccagtgagc

SEQ ID NO: 4573317 - DNA, 25 bp, Homo sapien
tccggggatccacggtcttctgcat

SEQ ID NO: 4573318 - DNA, 25 bp, Homo sapien
cggggatccacggtcttctgcatgg

SEQ ID NO: 4573319 - DNA, 25 bp, Homo sapien
ccacggtcttctgcatgggggattt

SEQ ID NO: 4573320 - DNA, 25 bp, Homo sapien
gatccacggtcttctgcatggggga

SEQ ID NO: 4573321 - DNA, 25 bp, Homo sapien
ctctgaacggactgtcctgatgctg

SEQ ID NO: 4573322 - DNA, 25 bp, Homo sapien
tgatgctgcctttatgatggttcct

SEQ ID NO: 4573323 - DNA, 25 bp, Homo sapien
cctctctgaacggactgtcctgatg

SEQ ID NO: 4573324 - DNA, 25 bp, Homo sapien
tgctgcctttatgatggttcctcat

SEQ ID NO: 4573325 - DNA, 25 bp, Homo sapien
aacaggctcacatagttagggaggc

SEQ ID NO: 4573326 - DNA, 25 bp, Homo sapien
tctacatttggcaagttggagaccc

SEQ ID NO: 4573327 - DNA, 25 bp, Homo sapien
taataggtttgtccctactgccaac

SEQ ID NO: 4573328 - DNA, 25 bp, Homo sapien
ccaggagagtcgatgttgtgttcca

SEQ ID NO: 4573329 - DNA, 25 bp, Homo sapien
cctgggaggtgcacatgaaacagtc

SEQ ID NO: 4573330 - DNA, 25 bp, Homo sapien
tagctcagttaccaggagtccctgt

SEQ ID NO: 4573331 - DNA, 25 bp, Homo sapien
caagtgcccttttacagagaatgcc

SEQ ID NO: 4573332 - DNA, 25 bp, Homo sapien
cctgtgctgctgtcatgagtggcga

SEQ ID NO: 4573333 - DNA, 25 bp, Homo sapien
ccatccggacacaggctgcatgtct

SEQ ID NO: 4573334 - DNA, 25 bp, Homo sapien
tctgtgagtgtcaaagctgccatga

SEQ ID NO: 4573335 - DNA, 25 bp, Homo sapien
tggcctgaatgttccccatccggac

SEQ ID NO: 4573336 - DNA, 25 bp, Homo sapien
ggagttcaggatccacttagatggg

SEQ ID NO: 4573337 - DNA, 25 bp, Homo sapien
cccaaatagagaagaccaggtctga

SEQ ID NO: 4573338 - DNA, 25 bp, Homo sapien
ccaggttggagagcacaccagaggt

SEQ ID NO: 4573339 - DNA, 25 bp, Homo sapien
gtttgatcagattccatgggcttgg

SEQ ID NO: 4573340 - DNA, 25 bp, Homo sapien
ccaggagatcaccagaaccaaaggg

SEQ ID NO: 4573341 - DNA, 25 bp, Homo sapien
catacactcagaataaagagctgcc

SEQ ID NO: 4573342 - DNA, 25 bp, Homo sapien
tcaggcatcactagctctgggcgcc

SEQ ID NO: 4573343 - DNA, 25 bp, Homo sapien
gggcagtcagcatgggctaagtttt

SEQ ID NO: 4573344 - DNA, 25 bp, Homo sapien
taacacttcaggtagggcccacata

SEQ ID NO: 4573345 - DNA, 25 bp, Homo sapien
tctccgcaggtttgtaccgactggg

SEQ ID NO: 4573346 - DNA, 25 bp, Homo sapien
ggacctcctagctgtgtctcgcggt

SEQ ID NO: 4573347 - DNA, 25 bp, Homo sapien
gggctctccgtagctttcatgccat

SEQ ID NO: 4573348 - DNA, 25 bp, Homo sapien
gctttcatgccattgctggtatcat

SEQ ID NO: 4573349 - DNA, 25 bp, Homo sapien
tcctcagttcaacagtctctgagta

SEQ ID NO: 4573350 - DNA, 25 bp, Homo sapien
tctttattcctcagttcaacagtct

SEQ ID NO: 4573351 - DNA, 25 bp, Homo sapien
cagttcaacagtctctgagtactta

SEQ ID NO: 4573352 - DNA, 25 bp, Homo sapien
tttccttccattgcaagaccatcag

SEQ ID NO: 4573353 - DNA, 25 bp, Homo sapien
ccagtgccaaccagtcctgaagctg

SEQ ID NO: 4573354 - DNA, 25 bp, Homo sapien
cagtgccaaccagtcctgaagctga

SEQ ID NO: 4573355 - DNA, 25 bp, Homo sapien
caagaaactgattttgtctgcatgt

SEQ ID NO: 4573356 - DNA, 25 bp, Homo sapien
gagctgacagcccagtggaaggaag

SEQ ID NO: 4573357 - DNA, 25 bp, Homo sapien
gattttgtctgcatgtatgtagagc

SEQ ID NO: 4573358 - DNA, 25 bp, Homo sapien
gcatgtatgtagagctgacagccca

SEQ ID NO: 4573359 - DNA, 25 bp, Homo sapien
tcaaaccttggctcagaggcgaggc

SEQ ID NO: 4573360 - DNA, 25 bp, Homo sapien
tttcctccattacaataggccgtgt

SEQ ID NO: 4573361 - DNA, 25 bp, Homo sapien
cgaggcttgtagttcactgctgcat

SEQ ID NO: 4573362 - DNA, 25 bp, Homo sapien
taggccgtgtcctcctttctcaaac

SEQ ID NO: 4573363 - DNA, 25 bp, Homo sapien
tttcgttgacaagataatgctacag

SEQ ID NO: 4573364 - DNA, 25 bp, Homo sapien
taaggtagtaccaagcagacaacaa

SEQ ID NO: 4573365 - DNA, 25 bp, Homo sapien
caaaaatcggccagactgagggtac

SEQ ID NO: 4573366 - DNA, 25 bp, Homo sapien
agtggctggcaactgatagagtgca

SEQ ID NO: 4573367 - DNA, 25 bp, Homo sapien
gaggttgtgctgtctatctgggaca

SEQ ID NO: 4573368 - DNA, 25 bp, Homo sapien
gggaatccgttacaaaatctgcttc

SEQ ID NO: 4573369 - DNA, 25 bp, Homo sapien
gtgagcgcactcttggcaggcagct

SEQ ID NO: 4573370 - DNA, 25 bp, Homo sapien
taagtgacacactggagcagatggg

SEQ ID NO: 4573371 - DNA, 25 bp, Homo sapien
caaggggtcagtaactgagggcttc

SEQ ID NO: 4573372 - DNA, 25 bp, Homo sapien
tcaaggcccaatttcctcggtgaag

SEQ ID NO: 4573373 - DNA, 25 bp, Homo sapien
cctcggtgaagatgaatgcaaggct

SEQ ID NO: 4573374 - DNA, 25 bp, Homo sapien
gcttatttccgaagatgatgccact

SEQ ID NO: 4573375 - DNA, 25 bp, Homo sapien
tcaatcattggggagagatcacctc

SEQ ID NO: 4573376 - DNA, 25 bp, Homo sapien
gagagatcacctcggtggatggcct

SEQ ID NO: 4573377 - DNA, 25 bp, Homo sapien
cacctcggtggatggcctttcgcat

SEQ ID NO: 4573378 - DNA, 25 bp, Homo sapien
gatcacctcggtggatggcctttcg

SEQ ID NO: 4573379 - DNA, 25 bp, Homo sapien
cagggggaccgagggtagagccagg

SEQ ID NO: 4573380 - DNA, 25 bp, Homo sapien
caatgcccttgtgggagccaggagt

SEQ ID NO: 4573381 - DNA, 25 bp, Homo sapien
catacagcatgtggttgcattccag

SEQ ID NO: 4573382 - DNA, 25 bp, Homo sapien
tagagccaggcccaatgcccttgtg

SEQ ID NO: 4573383 - DNA, 25 bp, Homo sapien
gagcttctttccgaacactcagcag

SEQ ID NO: 4573384 - DNA, 25 bp, Homo sapien
tctttccgaacactcagcagtagga

SEQ ID NO: 4573385 - DNA, 25 bp, Homo sapien
cactctgagcttctttccgaacact

SEQ ID NO: 4573386 - DNA, 25 bp, Homo sapien
ttccgaacactcagcagtaggacag

SEQ ID NO: 4573387 - DNA, 25 bp, Homo sapien
gtgtcttgctccagccactggccat

SEQ ID NO: 4573388 - DNA, 25 bp, Homo sapien
tgtgtcttgctccagccactggcca

SEQ ID NO: 4573389 - DNA, 25 bp, Homo sapien
taattacatttattttaatgctgaa

SEQ ID NO: 4573390 - DNA, 25 bp, Homo sapien
aattacatttattttaatgctgaat

SEQ ID NO: 4573391 - DNA, 25 bp, Homo sapien
tttaattacatttattttaatgctg

SEQ ID NO: 4573392 - DNA, 25 bp, Homo sapien
ttaattacatttattttaatgctga

SEQ ID NO: 4573393 - DNA, 25 bp, Homo sapien
gagctctgtaggtccggcggtgcat

SEQ ID NO: 4573394 - DNA, 25 bp, Homo sapien
ttttccgtaaggatcatctcaatgt

SEQ ID NO: 4573395 - DNA, 25 bp, Homo sapien
ccatgagctctgtaggtccggcggt

SEQ ID NO: 4573396 - DNA, 25 bp, Homo sapien
atgagctctgtaggtccggcggtgc

SEQ ID NO: 4573397 - DNA, 25 bp, Homo sapien
cgtttttaagcatgtgcagcaagaa

SEQ ID NO: 4573398 - DNA, 25 bp, Homo sapien
tcagcattactctctgcgtttttaa

SEQ ID NO: 4573399 - DNA, 25 bp, Homo sapien
gcattactctctgcgtttttaagca

SEQ ID NO: 4573400 - DNA, 25 bp, Homo sapien
ttgggccaccgaccttgtgtccagc

SEQ ID NO: 4573401 - DNA, 25 bp, Homo sapien
ccgttgtaatgtcggaatggtacac

SEQ ID NO: 4573402 - DNA, 25 bp, Homo sapien
gccaactccaccgttgtaatgtcgg

SEQ ID NO: 4573403 - DNA, 25 bp, Homo sapien
caccgttgtaatgtcggaatggtac

SEQ ID NO: 4573404 - DNA, 25 bp, Homo sapien
ctgccaactccaccgttgtaatgtc

SEQ ID NO: 4573405 - DNA, 25 bp, Homo sapien
tgcctgatttcgtggggttctccgg

SEQ ID NO: 4573406 - DNA, 25 bp, Homo sapien
tctccgggtcaagtgaatagcgaac

SEQ ID NO: 4573407 - DNA, 25 bp, Homo sapien
tgatttgcctgatttcgtggggttc

SEQ ID NO: 4573408 - DNA, 25 bp, Homo sapien
tttgcctgatttcgtggggttctcc

SEQ ID NO: 4573409 - DNA, 25 bp, Homo sapien
gactggcccatcttgcatatagaag

SEQ ID NO: 4573410 - DNA, 25 bp, Homo sapien
cactttggctactctgacatgttcg

SEQ ID NO: 4573411 - DNA, 25 bp, Homo sapien
acctcagccatggacggtgcctgaa

SEQ ID NO: 4573412 - DNA, 25 bp, Homo sapien
tatagaagggtcttaagagacagcc

SEQ ID NO: 4573413 - DNA, 25 bp, Homo sapien
ttccaggaccgtcacttctggtgtc

SEQ ID NO: 4573414 - DNA, 25 bp, Homo sapien
gcttccaggaccgtcacttctggtg

SEQ ID NO: 4573415 - DNA, 25 bp, Homo sapien
tcatttggaaagactgaagcttcca

SEQ ID NO: 4573416 - DNA, 25 bp, Homo sapien
agcttccaggaccgtcacttctggt

SEQ ID NO: 4573417 - DNA, 25 bp, Homo sapien
ttatccaaagccctgacggttgcca

SEQ ID NO: 4573418 - DNA, 25 bp, Homo sapien
caggttaaggtttgatgatggatcc

SEQ ID NO: 4573419 - DNA, 25 bp, Homo sapien
ctgacggttgccagccattcttcct

SEQ ID NO: 4573420 - DNA, 25 bp, Homo sapien
ctggctgaagacacatggccggagt

SEQ ID NO: 4573421 - DNA, 25 bp, Homo sapien
caggatgtttcccacggtcatggcc

SEQ ID NO: 4573422 - DNA, 25 bp, Homo sapien
aattacaggatgtttcccacggtca

SEQ ID NO: 4573423 - DNA, 25 bp, Homo sapien
ggccccataaccaagtagcaggcat

SEQ ID NO: 4573424 - DNA, 25 bp, Homo sapien
tggccccataaccaagtagcaggca

SEQ ID NO: 4573425 - DNA, 25 bp, Homo sapien
gtgtgtgtttgtgatccctgggcag

SEQ ID NO: 4573426 - DNA, 25 bp, Homo sapien
tgtgtgtacgcgtgtgtgtgtttgt

SEQ ID NO: 4573427 - DNA, 25 bp, Homo sapien
tcactgctcctggtgtgcatgtgtg

SEQ ID NO: 4573428 - DNA, 25 bp, Homo sapien
gtgtgtttgtgatccctgggcaggg

SEQ ID NO: 4573429 - DNA, 25 bp, Homo sapien
ttttagcctttgcatagcgctgagc

SEQ ID NO: 4573430 - DNA, 25 bp, Homo sapien
catagcgctgagctttaaagcgtgt

SEQ ID NO: 4573431 - DNA, 25 bp, Homo sapien
tttagcctttgcatagcgctgagct

SEQ ID NO: 4573432 - DNA, 25 bp, Homo sapien
ctttttagcctttgcatagcgctga

SEQ ID NO: 4573433 - DNA, 25 bp, Homo sapien
cctgtgtcccaacaattgtagggag

SEQ ID NO: 4573434 - DNA, 25 bp, Homo sapien
ggagaccaaatcgaaccctctaatg

SEQ ID NO: 4573435 - DNA, 25 bp, Homo sapien
ctctaatggtctcagtgaagcgccc

SEQ ID NO: 4573436 - DNA, 25 bp, Homo sapien
caattgtagggagaccaaatcgaac

SEQ ID NO: 4573437 - DNA, 25 bp, Homo sapien
gatagtttgccctgtcactgtttgg

SEQ ID NO: 4573438 - DNA, 25 bp, Homo sapien
cactcttctgggtcttgattgatag

SEQ ID NO: 4573439 - DNA, 25 bp, Homo sapien
caccaacccttgttctgacttgcaa

SEQ ID NO: 4573440 - DNA, 25 bp, Homo sapien
catgattgagtctcccacaccagtc

SEQ ID NO: 4573441 - DNA, 25 bp, Homo sapien
caggaccacaggcagtatgtgggct

SEQ ID NO: 4573442 - DNA, 25 bp, Homo sapien
ctgacacaaagagggatgcccagtg

SEQ ID NO: 4573443 - DNA, 25 bp, Homo sapien
taaatgagtttgaggtgaaagcagg

SEQ ID NO: 4573444 - DNA, 25 bp, Homo sapien
tgtgggctaggatcaacaggaatgt

SEQ ID NO: 4573445 - DNA, 25 bp, Homo sapien
gggaggaaggagctgtggactctga

SEQ ID NO: 4573446 - DNA, 25 bp, Homo sapien
gaggaaggagctgtggactctgagc

SEQ ID NO: 4573447 - DNA, 25 bp, Homo sapien
cctaggagacagcaggaaaggggag

SEQ ID NO: 4573448 - DNA, 25 bp, Homo sapien
taggagacagcaggaaaggggagag

SEQ ID NO: 4573449 - DNA, 25 bp, Homo sapien
gatttttccatctaccagaatgtgt

SEQ ID NO: 4573450 - DNA, 25 bp, Homo sapien
actgaaaggtcttctgttgttcagc

SEQ ID NO: 4573451 - DNA, 25 bp, Homo sapien
gttttgggtcagtaatgtcatcttc

SEQ ID NO: 4573452 - DNA, 25 bp, Homo sapien
catcttcatttccaaaggacggctg

SEQ ID NO: 4573453 - DNA, 25 bp, Homo sapien
cactgtagggcgtttcctgcggctc

SEQ ID NO: 4573454 - DNA, 25 bp, Homo sapien
accacttggcttccatcgggacaca

SEQ ID NO: 4573455 - DNA, 25 bp, Homo sapien
tcgggacacattggcagacagtttc

SEQ ID NO: 4573456 - DNA, 25 bp, Homo sapien
tgtgagtgcatgctcccatggtgcc

SEQ ID NO: 4573457 - DNA, 25 bp, Homo sapien
cccaacaggaaataaccagtggttg

SEQ ID NO: 4573458 - DNA, 25 bp, Homo sapien
tatggtatcgcacactaggaacaac

SEQ ID NO: 4573459 - DNA, 25 bp, Homo sapien
tcaaaactactcagttccccagggc

SEQ ID NO: 4573460 - DNA, 25 bp, Homo sapien
tacaggagcgttttacagacactgc

SEQ ID NO: 4573461 - DNA, 25 bp, Homo sapien
caacttggcttctatcgactgatgt

SEQ ID NO: 4573462 - DNA, 25 bp, Homo sapien
aacttggcttctatcgactgatgtc

SEQ ID NO: 4573463 - DNA, 25 bp, Homo sapien
ttggcttctatcgactgatgtccaa

SEQ ID NO: 4573464 - DNA, 25 bp, Homo sapien
acttggcttctatcgactgatgtcc

SEQ ID NO: 4573465 - DNA, 25 bp, Homo sapien
tatagtgctgttactcttggtcccc

SEQ ID NO: 4573466 - DNA, 25 bp, Homo sapien
aaccacgtacagctctctgaatagg

SEQ ID NO: 4573467 - DNA, 25 bp, Homo sapien
catggcaaatagctgttcacctggc

SEQ ID NO: 4573468 - DNA, 25 bp, Homo sapien
tcagtatgttccatgatctagcccc

SEQ ID NO: 4573469 - DNA, 25 bp, Homo sapien
cagccttaccagtgtgcctgtctga

SEQ ID NO: 4573470 - DNA, 25 bp, Homo sapien
actcagttgccacatcaggactttg

SEQ ID NO: 4573471 - DNA, 25 bp, Homo sapien
gcactcatgcattgattgggaaacc

SEQ ID NO: 4573472 - DNA, 25 bp, Homo sapien
catggctgggtgaatagattggtca

SEQ ID NO: 4573473 - DNA, 25 bp, Homo sapien
tctttgatctgaagtacccagttct

SEQ ID NO: 4573474 - DNA, 25 bp, Homo sapien
cttaaactctttgatctgaagtacc

SEQ ID NO: 4573475 - DNA, 25 bp, Homo sapien
aaactctttgatctgaagtacccag

SEQ ID NO: 4573476 - DNA, 25 bp, Homo sapien
ttgatctgaagtacccagttcttac

SEQ ID NO: 4573477 - DNA, 25 bp, Homo sapien
tttgtccttggatgcctcactgtga

SEQ ID NO: 4573478 - DNA, 25 bp, Homo sapien
agggccatggagcaacacggtgtca

SEQ ID NO: 4573479 - DNA, 25 bp, Homo sapien
gcttcaggaactgatctgtcatctc

SEQ ID NO: 4573480 - DNA, 25 bp, Homo sapien
agtgttttgctgtcagacccttctg

SEQ ID NO: 4573481 - DNA, 25 bp, Homo sapien
gctgcatcacctgctgatcacgtgg

SEQ ID NO: 4573482 - DNA, 25 bp, Homo sapien
tgggccaaggcatcttttgtggctg

SEQ ID NO: 4573483 - DNA, 25 bp, Homo sapien
ccacaaatggctgcatcacctgctg

SEQ ID NO: 4573484 - DNA, 25 bp, Homo sapien
gtggggctggattttctaccatgag

SEQ ID NO: 4573485 - DNA, 25 bp, Homo sapien
ggcgagccaactcccatgagttgga

SEQ ID NO: 4573486 - DNA, 25 bp, Homo sapien
aaatatgtggccaagattggctggc

SEQ ID NO: 4573487 - DNA, 25 bp, Homo sapien
gattggctggcatgaagctttgtat

SEQ ID NO: 4573488 - DNA, 25 bp, Homo sapien
gaagctttgtatgttggcgagccaa

SEQ ID NO: 4573489 - DNA, 25 bp, Homo sapien
tccgtagtttgacacttatgctgca

SEQ ID NO: 4573490 - DNA, 25 bp, Homo sapien
ttggctgtgattccgtagtttgaca

SEQ ID NO: 4573491 - DNA, 25 bp, Homo sapien
agtttgacacttatgctgcagttaa

SEQ ID NO: 4573492 - DNA, 25 bp, Homo sapien
tgattccgtagtttgacacttatgc

SEQ ID NO: 4573493 - DNA, 25 bp, Homo sapien
tatcaagcaaacctcgtctgttgca

SEQ ID NO: 4573494 - DNA, 25 bp, Homo sapien
gtttaatctcatgggttatttccca

SEQ ID NO: 4573495 - DNA, 25 bp, Homo sapien
taatctcatgggttatttcccaaaa

SEQ ID NO: 4573496 - DNA, 25 bp, Homo sapien
gcattgtcggtattcatctcccctg

SEQ ID NO: 4573497 - DNA, 25 bp, Homo sapien
atccctctagggtttgctccacctt

SEQ ID NO: 4573498 - DNA, 25 bp, Homo sapien
ttggtaatgaccctccctgcttcca

SEQ ID NO: 4573499 - DNA, 25 bp, Homo sapien
tctttccatcccttggtagaagcct

SEQ ID NO: 4573500 - DNA, 25 bp, Homo sapien
cgatccagagaggacatgctccaag

SEQ ID NO: 4573501 - DNA, 25 bp, Homo sapien
gtcccacggacacttgctgggggct

SEQ ID NO: 4573502 - DNA, 25 bp, Homo sapien
gaagctgccaaccaacttcttctga

SEQ ID NO: 4573503 - DNA, 25 bp, Homo sapien
agtcccacggacacttgctgggggc

SEQ ID NO: 4573504 - DNA, 25 bp, Homo sapien
agaagctgccaaccaacttcttctg

SEQ ID NO: 4573505 - DNA, 25 bp, Homo sapien
tacttggagttgtcgctgtttctga

SEQ ID NO: 4573506 - DNA, 25 bp, Homo sapien
gaaccctgagcacggaattacttgg

SEQ ID NO: 4573507 - DNA, 25 bp, Homo sapien
tcaccatagtaatggtaacagcctg

SEQ ID NO: 4573508 - DNA, 25 bp, Homo sapien
cattgtaaggaatgtagtctaccac

SEQ ID NO: 4573509 - DNA, 25 bp, Homo sapien
agctcttctcccattgtttcagcct

SEQ ID NO: 4573510 - DNA, 25 bp, Homo sapien
tcccattgtttcagcctccaccttc

SEQ ID NO: 4573511 - DNA, 25 bp, Homo sapien
tgggtcagctcttctcccattgttt

SEQ ID NO: 4573512 - DNA, 25 bp, Homo sapien
agctgggtcagctcttctcccattg

SEQ ID NO: 4573513 - DNA, 25 bp, Homo sapien
gcccagatcttcctcccgtctcctg

SEQ ID NO: 4573514 - DNA, 25 bp, Homo sapien
ccagatcttcctcccgtctcctgcc

SEQ ID NO: 4573515 - DNA, 25 bp, Homo sapien
agcccagatcttcctcccgtctcct

SEQ ID NO: 4573516 - DNA, 25 bp, Homo sapien
cccagatcttcctcccgtctcctgc

SEQ ID NO: 4573517 - DNA, 25 bp, Homo sapien
tagttattactacagcccagtgaca

SEQ ID NO: 4573518 - DNA, 25 bp, Homo sapien
ttgatgttaccagccttgctgggca

SEQ ID NO: 4573519 - DNA, 25 bp, Homo sapien
tagtggccgtgtatatcaacagtgc

SEQ ID NO: 4573520 - DNA, 25 bp, Homo sapien
aaattggagacagaagtgcctggag

SEQ ID NO: 4573521 - DNA, 25 bp, Homo sapien
gctaggcattcaggtgattctactt

SEQ ID NO: 4573522 - DNA, 25 bp, Homo sapien
catattgctaggcattcaggtgatt

SEQ ID NO: 4573523 - DNA, 25 bp, Homo sapien
tccatattgctaggcattcaggtga

SEQ ID NO: 4573524 - DNA, 25 bp, Homo sapien
tattgctaggcattcaggtgattct

SEQ ID NO: 4573525 - DNA, 25 bp, Homo sapien
ccatttgcacttattgtttgtattt

SEQ ID NO: 4573526 - DNA, 25 bp, Homo sapien
atttgcacttattgtttgtatttgc

SEQ ID NO: 4573527 - DNA, 25 bp, Homo sapien
catttgcacttattgtttgtatttg

SEQ ID NO: 4573528 - DNA, 25 bp, Homo sapien
ccactctaaactgaaataggatact

SEQ ID NO: 4573529 - DNA, 25 bp, Homo sapien
catgacacgggaaagaatggaacat

SEQ ID NO: 4573530 - DNA, 25 bp, Homo sapien
taggacctgctcaaattctgctggg

SEQ ID NO: 4573531 - DNA, 25 bp, Homo sapien
gggacatccaataccagacaagtca

SEQ ID NO: 4573532 - DNA, 25 bp, Homo sapien
aattgttgcacccaaaatgaaacct

SEQ ID NO: 4573533 - DNA, 25 bp, Homo sapien
tccaaccaccaaagagtattttgcc

SEQ ID NO: 4573534 - DNA, 25 bp, Homo sapien
gccaaaggaaagatgttgtgcagtt

SEQ ID NO: 4573535 - DNA, 25 bp, Homo sapien
cattatacaggcgaatgttttccaa

SEQ ID NO: 4573536 - DNA, 25 bp, Homo sapien
taattgatgcaactcctggtaccca

SEQ ID NO: 4573537 - DNA, 25 bp, Homo sapien
tctaagttcaatccttcctccacgg

SEQ ID NO: 4573538 - DNA, 25 bp, Homo sapien
gttgctgtcctttcattgcagtttt

SEQ ID NO: 4573539 - DNA, 25 bp, Homo sapien
gacaaacccttcactctggtctaat

SEQ ID NO: 4573540 - DNA, 25 bp, Homo sapien
ccaacaatctctttctgtacagagg

SEQ ID NO: 4573541 - DNA, 25 bp, Homo sapien
tgctttagtaccaacaatctctttc

SEQ ID NO: 4573542 - DNA, 25 bp, Homo sapien
ttctgtacagaggttcgttgagtat

SEQ ID NO: 4573543 - DNA, 25 bp, Homo sapien
ctcttttgctttagtaccaacaatc

SEQ ID NO: 4573544 - DNA, 25 bp, Homo sapien
tgccatggcaggacccttctgccag

SEQ ID NO: 4573545 - DNA, 25 bp, Homo sapien
ctttcctggtctgaactggcccaag

SEQ ID NO: 4573546 - DNA, 25 bp, Homo sapien
ctggtctgaactggcccaaggctac

SEQ ID NO: 4573547 - DNA, 25 bp, Homo sapien
ggctactgccatggcaggacccttc

SEQ ID NO: 4573548 - DNA, 25 bp, Homo sapien
tgttacaacgttgcttagttcacaa

SEQ ID NO: 4573549 - DNA, 25 bp, Homo sapien
cttgtgttacaacgttgcttagttc

SEQ ID NO: 4573550 - DNA, 25 bp, Homo sapien
ctgtgaggtgcagcctgttctgtta

SEQ ID NO: 4573551 - DNA, 25 bp, Homo sapien
acaacttgtgttacaacgttgctta

SEQ ID NO: 4573552 - DNA, 25 bp, Homo sapien
ggtagaatgttatcagtgtgccatg

SEQ ID NO: 4573553 - DNA, 25 bp, Homo sapien
gaatgttatcagtgtgccatgcaag

SEQ ID NO: 4573554 - DNA, 25 bp, Homo sapien
catgcaagttagtttggttcatctg

SEQ ID NO: 4573555 - DNA, 25 bp, Homo sapien
cagtgtgccatgcaagttagtttgg

SEQ ID NO: 4573556 - DNA, 25 bp, Homo sapien
atggctaccccgctggctcagagct

SEQ ID NO: 4573557 - DNA, 25 bp, Homo sapien
gcttcctcctgtacacctgtaatgg

SEQ ID NO: 4573558 - DNA, 25 bp, Homo sapien
gacatgagcacatgcctcgggctgc

SEQ ID NO: 4573559 - DNA, 25 bp, Homo sapien
tttaatattccctgagacagactcc

SEQ ID NO: 4573560 - DNA, 25 bp, Homo sapien
catgcttaacaacagcaggtagagt

SEQ ID NO: 4573561 - DNA, 25 bp, Homo sapien
gggataaacctcatgcttaacaaca

SEQ ID NO: 4573562 - DNA, 25 bp, Homo sapien
tgtagtctggggataaacctcatgc

SEQ ID NO: 4573563 - DNA, 25 bp, Homo sapien
ttaacaacagcaggtagagtctttg

SEQ ID NO: 4573564 - DNA, 25 bp, Homo sapien
tccaagatggcgtgagccgagagct

SEQ ID NO: 4573565 - DNA, 25 bp, Homo sapien
tacttccatcaagcaaagcagtcct

SEQ ID NO: 4573566 - DNA, 25 bp, Homo sapien
tactgttccttgtacatagcgggat

SEQ ID NO: 4573567 - DNA, 25 bp, Homo sapien
caccacttctagaggctttccaaga

SEQ ID NO: 4573568 - DNA, 25 bp, Homo sapien
tcaggccaacagatctcagggctag

SEQ ID NO: 4573569 - DNA, 25 bp, Homo sapien
gcttaagtaaatgggtgagccagtg

SEQ ID NO: 4573570 - DNA, 25 bp, Homo sapien
cagatctcagggctagggccccact

SEQ ID NO: 4573571 - DNA, 25 bp, Homo sapien
ttgcttaagtaaatgggtgagccag

SEQ ID NO: 4573572 - DNA, 25 bp, Homo sapien
gcaagttgctgacgtaccctgcctg

SEQ ID NO: 4573573 - DNA, 25 bp, Homo sapien
tgtgtccccatgtctaagacaaggg

SEQ ID NO: 4573574 - DNA, 25 bp, Homo sapien
cgcgtccttgtctgtagttgtgtaa

SEQ ID NO: 4573575 - DNA, 25 bp, Homo sapien
ttgaggggggctcaatctctacatt

SEQ ID NO: 4573576 - DNA, 25 bp, Homo sapien
tctccactgaaatggggtacaggtg

SEQ ID NO: 4573577 - DNA, 25 bp, Homo sapien
aataaagtatctgctctccactgaa

SEQ ID NO: 4573578 - DNA, 25 bp, Homo sapien
cacaggaaacaggacagcggaatgc

SEQ ID NO: 4573579 - DNA, 25 bp, Homo sapien
gcttagtaatggttagcatttctaa

SEQ ID NO: 4573580 - DNA, 25 bp, Homo sapien
tcacggcttggcttaaaataccgta

SEQ ID NO: 4573581 - DNA, 25 bp, Homo sapien
ttggtcgtgagtggcccaatcacct

SEQ ID NO: 4573582 - DNA, 25 bp, Homo sapien
caccgagcaaatgcaagggttggag

SEQ ID NO: 4573583 - DNA, 25 bp, Homo sapien
tctgcaacaacctcacggcttggct

SEQ ID NO: 4573584 - DNA, 25 bp, Homo sapien
ctgactgggttttgtactgctccag

SEQ ID NO: 4573585 - DNA, 25 bp, Homo sapien
tcctctgactgggttttgtactgct

SEQ ID NO: 4573586 - DNA, 25 bp, Homo sapien
cgtgggaatgatagagacatcctct

SEQ ID NO: 4573587 - DNA, 25 bp, Homo sapien
ctgcgtgggaatgatagagacatcc

SEQ ID NO: 4573588 - DNA, 25 bp, Homo sapien
taacgaaaggacagcctttctcctg

SEQ ID NO: 4573589 - DNA, 25 bp, Homo sapien
cctgatgcctgagtaacgaaaggac

SEQ ID NO: 4573590 - DNA, 25 bp, Homo sapien
cctgagtaacgaaaggacagccttt

SEQ ID NO: 4573591 - DNA, 25 bp, Homo sapien
gaaaggacagcctttctcctgcatc

SEQ ID NO: 4573592 - DNA, 25 bp, Homo sapien
aagaggaagcgccatcagcggtcaa

SEQ ID NO: 4573593 - DNA, 25 bp, Homo sapien
ccatcagcggtcaaaaccagggaag

SEQ ID NO: 4573594 - DNA, 25 bp, Homo sapien
gaggatccacaagaggaagcgccat

SEQ ID NO: 4573595 - DNA, 25 bp, Homo sapien
gtgcatgggcagaggatccacaaga

SEQ ID NO: 4573596 - DNA, 25 bp, Homo sapien
aaggcaaggtcgcctcaccaaatcc

SEQ ID NO: 4573597 - DNA, 25 bp, Homo sapien
atgcctgtatttagcccctagaaca

SEQ ID NO: 4573598 - DNA, 25 bp, Homo sapien
caaatccccagatgtctggtatgct

SEQ ID NO: 4573599 - DNA, 25 bp, Homo sapien
tgcctgtatttagcccctagaacac

SEQ ID NO: 4573600 - DNA, 25 bp, Homo sapien
tattgtggacaggattctcctctga

SEQ ID NO: 4573601 - DNA, 25 bp, Homo sapien
ttgtggacaggattctcctctgagc

SEQ ID NO: 4573602 - DNA, 25 bp, Homo sapien
ctattgtggacaggattctcctctg

SEQ ID NO: 4573603 - DNA, 25 bp, Homo sapien
tgtggacaggattctcctctgagcc

SEQ ID NO: 4573604 - DNA, 25 bp, Homo sapien
acacagtataccactttcttccctg

SEQ ID NO: 4573605 - DNA, 25 bp, Homo sapien
gtagccacttacacagtataccact

SEQ ID NO: 4573606 - DNA, 25 bp, Homo sapien
tagtagtggctgttgcaaggtagcc

SEQ ID NO: 4573607 - DNA, 25 bp, Homo sapien
ggctgttgcaaggtagccacttaca

SEQ ID NO: 4573608 - DNA, 25 bp, Homo sapien
ggaaagcacagcctggcactgggct

SEQ ID NO: 4573609 - DNA, 25 bp, Homo sapien
agcacagcctggcactgggctggct

SEQ ID NO: 4573610 - DNA, 25 bp, Homo sapien
gctggaaagcacagcctggcactgg

SEQ ID NO: 4573611 - DNA, 25 bp, Homo sapien
aaagcacagcctggcactgggctgg

SEQ ID NO: 4573612 - DNA, 25 bp, Homo sapien
atccttctcaatgccgtttgcactg

SEQ ID NO: 4573613 - DNA, 25 bp, Homo sapien
taaatccttctcaatgccgtttgca

SEQ ID NO: 4573614 - DNA, 25 bp, Homo sapien
ttcctaaatccttctcaatgccgtt

SEQ ID NO: 4573615 - DNA, 25 bp, Homo sapien
cttctcaatgccgtttgcactggcc

SEQ ID NO: 4573616 - DNA, 25 bp, Homo sapien
gcatttgcagttgagctcctattaa

SEQ ID NO: 4573617 - DNA, 25 bp, Homo sapien
catttgcagttgagctcctattaaa

SEQ ID NO: 4573618 - DNA, 25 bp, Homo sapien
atttgcagttgagctcctattaaaa

SEQ ID NO: 4573619 - DNA, 25 bp, Homo sapien
tcacacagcaagagcattgctatac

SEQ ID NO: 4573620 - DNA, 25 bp, Homo sapien
cagcaagagcattgctataccgatc

SEQ ID NO: 4573621 - DNA, 25 bp, Homo sapien
tataccgatcctcttggctgactcc

SEQ ID NO: 4573622 - DNA, 25 bp, Homo sapien
agcattgctataccgatcctcttgg

SEQ ID NO: 4573623 - DNA, 25 bp, Homo sapien
tgggcttccctgtcacacatgtgac

SEQ ID NO: 4573624 - DNA, 25 bp, Homo sapien
ctaagccaacatgtggccaccatgg

SEQ ID NO: 4573625 - DNA, 25 bp, Homo sapien
atttctaagccaacatgtggccacc

SEQ ID NO: 4573626 - DNA, 25 bp, Homo sapien
tcttgacagttgttgaggtgaatgc

SEQ ID NO: 4573627 - DNA, 25 bp, Homo sapien
agcagagaggaagtttggatctttt

SEQ ID NO: 4573628 - DNA, 25 bp, Homo sapien
cagagccatctgagcgtgtgcacag

SEQ ID NO: 4573629 - DNA, 25 bp, Homo sapien
cccagagccatctgagcgtgtgcac

SEQ ID NO: 4573630 - DNA, 25 bp, Homo sapien
ccagagccatctgagcgtgtgcaca

SEQ ID NO: 4573631 - DNA, 25 bp, Homo sapien
ccccagagccatctgagcgtgtgca

SEQ ID NO: 4573632 - DNA, 25 bp, Homo sapien
acctatcatgcctatcttaaagatg

SEQ ID NO: 4573633 - DNA, 25 bp, Homo sapien
cttgcccaacaaccagtgagataat

SEQ ID NO: 4573634 - DNA, 25 bp, Homo sapien
aacttgcccaacaaccagtgagata

SEQ ID NO: 4573635 - DNA, 25 bp, Homo sapien
tacccaacctatcatgcctatctta

SEQ ID NO: 4573636 - DNA, 25 bp, Homo sapien
cagttgtgcaatcagtaagtatgcc

SEQ ID NO: 4573637 - DNA, 25 bp, Homo sapien
taagtatgccacaaatagcagagac

SEQ ID NO: 4573638 - DNA, 25 bp, Homo sapien
gagacagccagtttcagcgcatgga

SEQ ID NO: 4573639 - DNA, 25 bp, Homo sapien
ccttgtgtatcctctgccctttggg

SEQ ID NO: 4573640 - DNA, 25 bp, Homo sapien
cttcttgcatttcctcgccaccatt

SEQ ID NO: 4573641 - DNA, 25 bp, Homo sapien
acttcttgcatttcctcgccaccat

SEQ ID NO: 4573642 - DNA, 25 bp, Homo sapien
caattttttggtgggaccagtgaag

SEQ ID NO: 4573643 - DNA, 25 bp, Homo sapien
accaaatccgtagccaaacatttgg

SEQ ID NO: 4573644 - DNA, 25 bp, Homo sapien
ctcagccgaaccctggaaaccaaat

SEQ ID NO: 4573645 - DNA, 25 bp, Homo sapien
cctttcatactcagccgaaccctgg

SEQ ID NO: 4573646 - DNA, 25 bp, Homo sapien
caaagcttggaaacactttcagtca

SEQ ID NO: 4573647 - DNA, 25 bp, Homo sapien
ctctgaacaacaagggtccgtattt

SEQ ID NO: 4573648 - DNA, 25 bp, Homo sapien
tctctgttcctagcccaaagcttgg

SEQ ID NO: 4573649 - DNA, 25 bp, Homo sapien
tcctagcccaaagcttggaaacact

SEQ ID NO: 4573650 - DNA, 25 bp, Homo sapien
ttcactagatgagaagtaggtttag

SEQ ID NO: 4573651 - DNA, 25 bp, Homo sapien
tgcacaagctcaggccgtaccacaa

SEQ ID NO: 4573652 - DNA, 25 bp, Homo sapien
gcagccccttcactagatgagaagt

SEQ ID NO: 4573653 - DNA, 25 bp, Homo sapien
agagaatctgagcttgcacaagctc

SEQ ID NO: 4573654 - DNA, 25 bp, Homo sapien
aaagcctgatcccattaagaccgtc

SEQ ID NO: 4573655 - DNA, 25 bp, Homo sapien
ccaccatgacaaatgaatactccat

SEQ ID NO: 4573656 - DNA, 25 bp, Homo sapien
cattaagaccgtcagatatttcctg

SEQ ID NO: 4573657 - DNA, 25 bp, Homo sapien
tgatcccattaagaccgtcagatat

SEQ ID NO: 4573658 - DNA, 25 bp, Homo sapien
taatgtgaacatcggagaaaagcca

SEQ ID NO: 4573659 - DNA, 25 bp, Homo sapien
tatgcactgcccattaattaaggcc

SEQ ID NO: 4573660 - DNA, 25 bp, Homo sapien
ggcctcctgctcacaaacatttgat

SEQ ID NO: 4573661 - DNA, 25 bp, Homo sapien
tcagcaaatatgcatcggtcacatg

SEQ ID NO: 4573662 - DNA, 25 bp, Homo sapien
tcataaacaatctctgccaagcagg

SEQ ID NO: 4573663 - DNA, 25 bp, Homo sapien
tctaaaggaaacacgtcatggattg

SEQ ID NO: 4573664 - DNA, 25 bp, Homo sapien
ggcaccctggaaaatgaaaagctat

SEQ ID NO: 4573665 - DNA, 25 bp, Homo sapien
gatggccttgaagatagcagcttga

SEQ ID NO: 4573666 - DNA, 25 bp, Homo sapien
ttcagcatggggacccttggagccc

SEQ ID NO: 4573667 - DNA, 25 bp, Homo sapien
agtaccattcagcatggggaccctt

SEQ ID NO: 4573668 - DNA, 25 bp, Homo sapien
accattcagcatggggacccttgga

SEQ ID NO: 4573669 - DNA, 25 bp, Homo sapien
agcatggggacccttggagcccctg

SEQ ID NO: 4573670 - DNA, 25 bp, Homo sapien
aagtcagtagtgatggaggacatgg

SEQ ID NO: 4573671 - DNA, 25 bp, Homo sapien
gggaagtcagtagtgatggaggaca

SEQ ID NO: 4573672 - DNA, 25 bp, Homo sapien
tcagtagtgatggaggacatggtgc

SEQ ID NO: 4573673 - DNA, 25 bp, Homo sapien
gaaggggaagtcagtagtgatggag

SEQ ID NO: 4573674 - DNA, 25 bp, Homo sapien
cagagtgatctttgcagaagggcca

SEQ ID NO: 4573675 - DNA, 25 bp, Homo sapien
gcttcacgcctaaccagagaggtgt

SEQ ID NO: 4573676 - DNA, 25 bp, Homo sapien
tcccggcccatgagataaagctcag

SEQ ID NO: 4573677 - DNA, 25 bp, Homo sapien
gctcagtagctctgggcttccggaa

SEQ ID NO: 4573678 - DNA, 25 bp, Homo sapien
taatgggtaattgcctgagccttac

SEQ ID NO: 4573679 - DNA, 25 bp, Homo sapien
ttaatgggtaattgcctgagcctta

SEQ ID NO: 4573680 - DNA, 25 bp, Homo sapien
ttcttcggaatcacaaaagcccaga

SEQ ID NO: 4573681 - DNA, 25 bp, Homo sapien
gggtccttgtggcatgcagctgcag

SEQ ID NO: 4573682 - DNA, 25 bp, Homo sapien
gctctttcttcggaatcacaaaagc

SEQ ID NO: 4573683 - DNA, 25 bp, Homo sapien
taagatcttttggtggaactgtcct

SEQ ID NO: 4573684 - DNA, 25 bp, Homo sapien
gagccaagagtcagtatacatgcct

SEQ ID NO: 4573685 - DNA, 25 bp, Homo sapien
agatggcaaggaggaccgagtctta

SEQ ID NO: 4573686 - DNA, 25 bp, Homo sapien
gatagtcacaaggtcgtctagcaga

SEQ ID NO: 4573687 - DNA, 25 bp, Homo sapien
tactgatactcactatggtagacag

SEQ ID NO: 4573688 - DNA, 25 bp, Homo sapien
caggcaaaaaaaggttgtgcaggga

SEQ ID NO: 4573689 - DNA, 25 bp, Homo sapien
gatggcagcaggcaaaaaaaggttg

SEQ ID NO: 4573690 - DNA, 25 bp, Homo sapien
ggcagcaggcaaaaaaaggttgtgc

SEQ ID NO: 4573691 - DNA, 25 bp, Homo sapien
gcaggcaaaaaaaggttgtgcaggg

SEQ ID NO: 4573692 - DNA, 25 bp, Homo sapien
cagcttgtctggacgggaaggagca

SEQ ID NO: 4573693 - DNA, 25 bp, Homo sapien
tgttagctgatcgttaaggagcagc

SEQ ID NO: 4573694 - DNA, 25 bp, Homo sapien
gctactcaaggcagggacttcacct

SEQ ID NO: 4573695 - DNA, 25 bp, Homo sapien
ttcctttatcatcaacacatcctgc

SEQ ID NO: 4573696 - DNA, 25 bp, Homo sapien
gtagggcacatccaaggggctctgc

SEQ ID NO: 4573697 - DNA, 25 bp, Homo sapien
gccagaggatcccagggccggcagg

SEQ ID NO: 4573698 - DNA, 25 bp, Homo sapien
aggcaggcaaagaagtagggcacat

SEQ ID NO: 4573699 - DNA, 25 bp, Homo sapien
ctgccagaggatcccagggccggca

SEQ ID NO: 4573700 - DNA, 25 bp, Homo sapien
tcagcacgtgaatgagacacagaag

SEQ ID NO: 4573701 - DNA, 25 bp, Homo sapien
gccacacagataaataagtaccatt

SEQ ID NO: 4573702 - DNA, 25 bp, Homo sapien
tgcagtagatgttggagccacacag

SEQ ID NO: 4573703 - DNA, 25 bp, Homo sapien
tgcccttggataactcagtctagag

SEQ ID NO: 4573704 - DNA, 25 bp, Homo sapien
gggacagcccagagtttgccaaagc

SEQ ID NO: 4573705 - DNA, 25 bp, Homo sapien
agggacagcccagagtttgccaaag

SEQ ID NO: 4573706 - DNA, 25 bp, Homo sapien
tcttggcctgtgtacgggattgcct

SEQ ID NO: 4573707 - DNA, 25 bp, Homo sapien
aatcagggccttgggtatttccagt

SEQ ID NO: 4573708 - DNA, 25 bp, Homo sapien
aaagctgtcatatggtttcctcaca

SEQ ID NO: 4573709 - DNA, 25 bp, Homo sapien
tgttctttaactggccgtaatgtgg

SEQ ID NO: 4573710 - DNA, 25 bp, Homo sapien
cagttgctcggtgggcttggttaga

SEQ ID NO: 4573711 - DNA, 25 bp, Homo sapien
tagagccgtgggtgaggcaggtggc

SEQ ID NO: 4573712 - DNA, 25 bp, Homo sapien
cccactaaatactccgtcacctcca

SEQ ID NO: 4573713 - DNA, 25 bp, Homo sapien
tgtggggcctgtgaactgcacagcc

SEQ ID NO: 4573714 - DNA, 25 bp, Homo sapien
tctcttcagcaaaaatgactatttt

SEQ ID NO: 4573715 - DNA, 25 bp, Homo sapien
caggtgaaaggtagaaggcgaatta

SEQ ID NO: 4573716 - DNA, 25 bp, Homo sapien
taaattattacataagcaggtgaaa

SEQ ID NO: 4573717 - DNA, 25 bp, Homo sapien
ggtagaaggcgaattatgtgagtaa

SEQ ID NO: 4573718 - DNA, 25 bp, Homo sapien
gcaatgtagccgtcactcttggtga

SEQ ID NO: 4573719 - DNA, 25 bp, Homo sapien
gggatgggcagtcgtccctgtccac

SEQ ID NO: 4573720 - DNA, 25 bp, Homo sapien
accacggcaatgtagccgtcactct

SEQ ID NO: 4573721 - DNA, 25 bp, Homo sapien
gaaagccacaaataggcctttgtag

SEQ ID NO: 4573722 - DNA, 25 bp, Homo sapien
ttggccccattgataagagccagag

SEQ ID NO: 4573723 - DNA, 25 bp, Homo sapien
gtttggccccattgataagagccag

SEQ ID NO: 4573724 - DNA, 25 bp, Homo sapien
tttggccccattgataagagccaga

SEQ ID NO: 4573725 - DNA, 25 bp, Homo sapien
aagtttggccccattgataagagcc

SEQ ID NO: 4573726 - DNA, 25 bp, Homo sapien
gcgcgcgtcacctggttcagtttag

SEQ ID NO: 4573727 - DNA, 25 bp, Homo sapien
tggtccaccgactggcccggcagtt

SEQ ID NO: 4573728 - DNA, 25 bp, Homo sapien
ggcccctctcgctgcgctttttgtc

SEQ ID NO: 4573729 - DNA, 25 bp, Homo sapien
cggcagttccccagtagcaccgggg

SEQ ID NO: 4573730 - DNA, 25 bp, Homo sapien
ggtgatcacagatcggggagacccc

SEQ ID NO: 4573731 - DNA, 25 bp, Homo sapien
tcagcagattcagggctttgggctg

SEQ ID NO: 4573732 - DNA, 25 bp, Homo sapien
gggctttgggctgagtaatcctttg

SEQ ID NO: 4573733 - DNA, 25 bp, Homo sapien
gggctgagtaatcctttggcgtctg

SEQ ID NO: 4573734 - DNA, 25 bp, Homo sapien
atgtaagacaagttcctccttccct

SEQ ID NO: 4573735 - DNA, 25 bp, Homo sapien
gatgtaagacaagttcctccttccc

SEQ ID NO: 4573736 - DNA, 25 bp, Homo sapien
caggccgaagttccatttatgcaga

SEQ ID NO: 4573737 - DNA, 25 bp, Homo sapien
gaattacggatacatgtggcaacac

SEQ ID NO: 4573738 - DNA, 25 bp, Homo sapien
ggcaacacaggtaaacttcacagac

SEQ ID NO: 4573739 - DNA, 25 bp, Homo sapien
catgggagccctctggtgtaccaga

SEQ ID NO: 4573740 - DNA, 25 bp, Homo sapien
cagagtggcctcagttaatcggtca

SEQ ID NO: 4573741 - DNA, 25 bp, Homo sapien
taatgctgcttaactttggcaccgc

SEQ ID NO: 4573742 - DNA, 25 bp, Homo sapien
gagaggactcaaaccttggtgtgac

SEQ ID NO: 4573743 - DNA, 25 bp, Homo sapien
caggaactcagaaccgctagggctg

SEQ ID NO: 4573744 - DNA, 25 bp, Homo sapien
gagttttactaccaaggccagcatg

SEQ ID NO: 4573745 - DNA, 25 bp, Homo sapien
gaggactctcacagataccaaggag

SEQ ID NO: 4573746 - DNA, 25 bp, Homo sapien
catacagaatgatgcatgccccgca

SEQ ID NO: 4573747 - DNA, 25 bp, Homo sapien
tgactagcaaggtgacaggcccatt

SEQ ID NO: 4573748 - DNA, 25 bp, Homo sapien
gatttagaaggaagaacatgtgcca

SEQ ID NO: 4573749 - DNA, 25 bp, Homo sapien
tacgttgtaaactaagcctccctga

SEQ ID NO: 4573750 - DNA, 25 bp, Homo sapien
gacataactttaccatgcagagggc

SEQ ID NO: 4573751 - DNA, 25 bp, Homo sapien
gatggatgcagacacagcgtttggt

SEQ ID NO: 4573752 - DNA, 25 bp, Homo sapien
gggctggccaataaccactgaggca

SEQ ID NO: 4573753 - DNA, 25 bp, Homo sapien
caggacaagatgaacaaggtggcag

SEQ ID NO: 4573754 - DNA, 25 bp, Homo sapien
aacacagactgtgcaacctggcacg

SEQ ID NO: 4573755 - DNA, 25 bp, Homo sapien
tgtgtatgaagaccacccagtggtg

SEQ ID NO: 4573756 - DNA, 25 bp, Homo sapien
tatttggcaggaactaaacaggagt

SEQ ID NO: 4573757 - DNA, 25 bp, Homo sapien
gaacaggctcatatgcggttttcgg

SEQ ID NO: 4573758 - DNA, 25 bp, Homo sapien
acacgctctgatggcttaatggaaa

SEQ ID NO: 4573759 - DNA, 25 bp, Homo sapien
tagaagaatctgatcctaggaccaa

SEQ ID NO: 4573760 - DNA, 25 bp, Homo sapien
cccaggccctaggtggctttgtata

SEQ ID NO: 4573761 - DNA, 25 bp, Homo sapien
tattgtggacgaggtgatgaaacgc

SEQ ID NO: 4573762 - DNA, 25 bp, Homo sapien
gaggcaggaccacaattaggattga

SEQ ID NO: 4573763 - DNA, 25 bp, Homo sapien
actctgtagccacggagggacacac

SEQ ID NO: 4573764 - DNA, 25 bp, Homo sapien
cataaagaggagaccgaagagtcca

SEQ ID NO: 4573765 - DNA, 25 bp, Homo sapien
tcttcagggagctaagggctaagct

SEQ ID NO: 4573766 - DNA, 25 bp, Homo sapien
tttctgcggccagacatgactgtcc

SEQ ID NO: 4573767 - DNA, 25 bp, Homo sapien
tctggtcccatgagatgatgccgtg

SEQ ID NO: 4573768 - DNA, 25 bp, Homo sapien
tcagagatagcatattcagactcca

SEQ ID NO: 4573769 - DNA, 25 bp, Homo sapien
ggttccagtacaagcatctcaaatg

SEQ ID NO: 4573770 - DNA, 25 bp, Homo sapien
catcatcagaggcacggggttccag

SEQ ID NO: 4573771 - DNA, 25 bp, Homo sapien
caaattctctgagctatcagcagtc

SEQ ID NO: 4573772 - DNA, 25 bp, Homo sapien
cagcattacaattgtctgaggccat

SEQ ID NO: 4573773 - DNA, 25 bp, Homo sapien
accagcattacaattgtctgaggcc

SEQ ID NO: 4573774 - DNA, 25 bp, Homo sapien
gagatccatgaacaatcatttcaag

SEQ ID NO: 4573775 - DNA, 25 bp, Homo sapien
tggcttgagatccatgaacaatcat

SEQ ID NO: 4573776 - DNA, 25 bp, Homo sapien
gagtcatcaatgtcgaccagaacta

SEQ ID NO: 4573777 - DNA, 25 bp, Homo sapien
gtcgaccagaactattacacagcac

SEQ ID NO: 4573778 - DNA, 25 bp, Homo sapien
catcaatgtcgaccagaactattac

SEQ ID NO: 4573779 - DNA, 25 bp, Homo sapien
ctaagagtcatcaatgtcgaccaga

SEQ ID NO: 4573780 - DNA, 25 bp, Homo sapien
gagacgatggacctggatagtttcc

SEQ ID NO: 4573781 - DNA, 25 bp, Homo sapien
tggctgcctcactagtcaaggtctc

SEQ ID NO: 4573782 - DNA, 25 bp, Homo sapien
gatagtttcctcgacgaatacgccc

SEQ ID NO: 4573783 - DNA, 25 bp, Homo sapien
gaaggcaaccgaactacaacaggag

SEQ ID NO: 4573784 - DNA, 25 bp, Homo sapien
gattaaggagacactagtccagcat

SEQ ID NO: 4573785 - DNA, 25 bp, Homo sapien
tatagcccgtgtggcaaatctagcc

SEQ ID NO: 4573786 - DNA, 25 bp, Homo sapien
gaataaaagttggagccagacccac

SEQ ID NO: 4573787 - DNA, 25 bp, Homo sapien
ttgacatgctacagcagaggacggc

SEQ ID NO: 4573788 - DNA, 25 bp, Homo sapien
ggcaaaacctccgtgcctgacactg

SEQ ID NO: 4573789 - DNA, 25 bp, Homo sapien
caaataatcaaaggtaacaggcaca

SEQ ID NO: 4573790 - DNA, 25 bp, Homo sapien
gcttcaagtcatctgaatggtccag

SEQ ID NO: 4573791 - DNA, 25 bp, Homo sapien
cttgcagatactgtagtctagcttc

SEQ ID NO: 4573792 - DNA, 25 bp, Homo sapien
tatctatatgatgtttataagagac

SEQ ID NO: 4573793 - DNA, 25 bp, Homo sapien
ggaacatatatcaggcaggacaaat

SEQ ID NO: 4573794 - DNA, 25 bp, Homo sapien
ttttaagcccaaatatattggtgag

SEQ ID NO: 4573795 - DNA, 25 bp, Homo sapien
aaaatttgaagattgttgggccata

SEQ ID NO: 4573796 - DNA, 25 bp, Homo sapien
actctaggcctagatttcagtggca

SEQ ID NO: 4573797 - DNA, 25 bp, Homo sapien
tacaaatcctgtagacccaaagagg

SEQ ID NO: 4573798 - DNA, 25 bp, Homo sapien
gaggcaggcgttaagtttgataaca

SEQ ID NO: 4573799 - DNA, 25 bp, Homo sapien
cctaacttgtctttagaggcaggcg

SEQ ID NO: 4573800 - DNA, 25 bp, Homo sapien
cactatactggaggttctaacttac

SEQ ID NO: 4573801 - DNA, 25 bp, Homo sapien
caactcttagaaaacctggaatgga

SEQ ID NO: 4573802 - DNA, 25 bp, Homo sapien
catgaatgatatgactgtacaggta

SEQ ID NO: 4573803 - DNA, 25 bp, Homo sapien
catcacacttggtggtaaaaggttg

SEQ ID NO: 4573804 - DNA, 25 bp, Homo sapien
cagttatgaaaatgagctacaacaa

SEQ ID NO: 4573805 - DNA, 25 bp, Homo sapien
caggttactgcttacctttggagga

SEQ ID NO: 4573806 - DNA, 25 bp, Homo sapien
tatggaaatatacgaatagcctttg

SEQ ID NO: 4573807 - DNA, 25 bp, Homo sapien
tacacacataaggttgactgaaatg

SEQ ID NO: 4573808 - DNA, 25 bp, Homo sapien
gttccagataaaggtctagtctgcc

SEQ ID NO: 4573809 - DNA, 25 bp, Homo sapien
taagttccagataaaggtctagtct

SEQ ID NO: 4573810 - DNA, 25 bp, Homo sapien
agttccagataaaggtctagtctgc

SEQ ID NO: 4573811 - DNA, 25 bp, Homo sapien
ttaagttccagataaaggtctagtc

SEQ ID NO: 4573812 - DNA, 25 bp, Homo sapien
tgaatctaactgcaattagtacagg

SEQ ID NO: 4573813 - DNA, 25 bp, Homo sapien
gaattgcgggtaatgttcatgaatc

SEQ ID NO: 4573814 - DNA, 25 bp, Homo sapien
gaatctaactgcaattagtacaggt

SEQ ID NO: 4573815 - DNA, 25 bp, Homo sapien
cgagactgaattgcgggtaatgttc

SEQ ID NO: 4573816 - DNA, 25 bp, Homo sapien
ccactattccatgtgttgcatctta

SEQ ID NO: 4573817 - DNA, 25 bp, Homo sapien
tttttccactattccatgtgttgca

SEQ ID NO: 4573818 - DNA, 25 bp, Homo sapien
catttttccactattccatgtgttg

SEQ ID NO: 4573819 - DNA, 25 bp, Homo sapien
tttccactattccatgtgttgcatc

SEQ ID NO: 4573820 - DNA, 25 bp, Homo sapien
gatctacgaatcagtgacaacctgg

SEQ ID NO: 4573821 - DNA, 25 bp, Homo sapien
ttgagacgagccttgtatttattca

SEQ ID NO: 4573822 - DNA, 25 bp, Homo sapien
cattgatctacgaatcagtgacaac

SEQ ID NO: 4573823 - DNA, 25 bp, Homo sapien
aattccaagctactgatatctttga

SEQ ID NO: 4573824 - DNA, 25 bp, Homo sapien
aatggccaaagcattagcagacatt

SEQ ID NO: 4573825 - DNA, 25 bp, Homo sapien
atggccaaagcattagcagacattc

SEQ ID NO: 4573826 - DNA, 25 bp, Homo sapien
gaatgcagggcgcaaacacaatggc

SEQ ID NO: 4573827 - DNA, 25 bp, Homo sapien
gagaatgcagggcgcaaacacaatg

SEQ ID NO: 4573828 - DNA, 25 bp, Homo sapien
gaggcgttccagtgtattgagatga

SEQ ID NO: 4573829 - DNA, 25 bp, Homo sapien
gactagatgaaagatgaggcgttcc

SEQ ID NO: 4573830 - DNA, 25 bp, Homo sapien
gatcaatcacagagtatacaccacg

SEQ ID NO: 4573831 - DNA, 25 bp, Homo sapien
gagttcgggagagttgatcaatcac

SEQ ID NO: 4573832 - DNA, 25 bp, Homo sapien
ttcaaaggtcatgagaggattgggc

SEQ ID NO: 4573833 - DNA, 25 bp, Homo sapien
ggcaaatctcgaagccattgtttga

SEQ ID NO: 4573834 - DNA, 25 bp, Homo sapien
catagctcgaagaaattcctcatag

SEQ ID NO: 4573835 - DNA, 25 bp, Homo sapien
gtttgaatacacttgcaatgacgtg

SEQ ID NO: 4573836 - DNA, 25 bp, Homo sapien
tcaaggtatcagagacaaagtcagt

SEQ ID NO: 4573837 - DNA, 25 bp, Homo sapien
cttattggcgatcagtctttgggca

SEQ ID NO: 4573838 - DNA, 25 bp, Homo sapien
aactgtcatcagtgtaggcaggcaa

SEQ ID NO: 4573839 - DNA, 25 bp, Homo sapien
tgatacacaggaaagagtacccctt

SEQ ID NO: 4573840 - DNA, 25 bp, Homo sapien
gactttcgataaataccttctgtat

SEQ ID NO: 4573841 - DNA, 25 bp, Homo sapien
ttattagtcgaaccagactttcgat

SEQ ID NO: 4573842 - DNA, 25 bp, Homo sapien
tgtatctagaccctgccgaagctcc

SEQ ID NO: 4573843 - DNA, 25 bp, Homo sapien
gccgaagctccttgattttattagt

SEQ ID NO: 4573844 - DNA, 25 bp, Homo sapien
cactggtcaaacgggacagttcaac

SEQ ID NO: 4573845 - DNA, 25 bp, Homo sapien
gttcaaccccaaattgtcgagatga

SEQ ID NO: 4573846 - DNA, 25 bp, Homo sapien
caaccccaaattgtcgagatgacag

SEQ ID NO: 4573847 - DNA, 25 bp, Homo sapien
cactactaaaggaacagttcggtct

SEQ ID NO: 4573848 - DNA, 25 bp, Homo sapien
gacagcacttcttatggcaagcata

SEQ ID NO: 4573849 - DNA, 25 bp, Homo sapien
cacttcttatggcaagcatacttgc

SEQ ID NO: 4573850 - DNA, 25 bp, Homo sapien
cagacagcacttcttatggcaagca

SEQ ID NO: 4573851 - DNA, 25 bp, Homo sapien
ttttcagacagcacttcttatggca

SEQ ID NO: 4573852 - DNA, 25 bp, Homo sapien
tattgggtggctttaaagatgtgac

SEQ ID NO: 4573853 - DNA, 25 bp, Homo sapien
tccattatccatatcaaagaagaac

SEQ ID NO: 4573854 - DNA, 25 bp, Homo sapien
caaacagaggctcggtccattatcc

SEQ ID NO: 4573855 - DNA, 25 bp, Homo sapien
cagtattcacagtatgtagggatgc

SEQ ID NO: 4573856 - DNA, 25 bp, Homo sapien
aaactctcactggagattcacccag

SEQ ID NO: 4573857 - DNA, 25 bp, Homo sapien
taaaagtgttgacccaaactctcac

SEQ ID NO: 4573858 - DNA, 25 bp, Homo sapien
agtgaatcacgctgctcaagcctca

SEQ ID NO: 4573859 - DNA, 25 bp, Homo sapien
tggctgtgcaatctgaagtcttgaa

SEQ ID NO: 4573860 - DNA, 25 bp, Homo sapien
caagctattgaatgggttcaagcca

SEQ ID NO: 4573861 - DNA, 25 bp, Homo sapien
cccagaaatgaaccttgtttagatg

SEQ ID NO: 4573862 - DNA, 25 bp, Homo sapien
tagctataaaggttatttgcatccc

SEQ ID NO: 4573863 - DNA, 25 bp, Homo sapien
gtgacatgcccagaataacatcata

SEQ ID NO: 4573864 - DNA, 25 bp, Homo sapien
gctgaagatattctgccgaaattcc

SEQ ID NO: 4573865 - DNA, 25 bp, Homo sapien
agtgtatccttcttgctgtcttcat

SEQ ID NO: 4573866 - DNA, 25 bp, Homo sapien
agctgaagatattctgccgaaattc

SEQ ID NO: 4573867 - DNA, 25 bp, Homo sapien
ttttaaatacaacatccactagtgt

SEQ ID NO: 4573868 - DNA, 25 bp, Homo sapien
tcgcttgcgcttagcctttggagaa

SEQ ID NO: 4573869 - DNA, 25 bp, Homo sapien
cacgttgctaatcttcacacttcgc

SEQ ID NO: 4573870 - DNA, 25 bp, Homo sapien
tggacagagtcattttgccaatgca

SEQ ID NO: 4573871 - DNA, 25 bp, Homo sapien
gacacttgctatgatctggacagag

SEQ ID NO: 4573872 - DNA, 25 bp, Homo sapien
gaatctcatcttagctctctgaggt

SEQ ID NO: 4573873 - DNA, 25 bp, Homo sapien
tctgactgggtagtaggtttcactc

SEQ ID NO: 4573874 - DNA, 25 bp, Homo sapien
tgcctgcaaagagtggcgaaacctc

SEQ ID NO: 4573875 - DNA, 25 bp, Homo sapien
gaaactgatgagctggaatcacatc

SEQ ID NO: 4573876 - DNA, 25 bp, Homo sapien
caactgacgaaaatcgctgtgatgt

SEQ ID NO: 4573877 - DNA, 25 bp, Homo sapien
tagtcttatgaagttttgcttgttc

SEQ ID NO: 4573878 - DNA, 25 bp, Homo sapien
tcactgccaacttggtaatctctcc

SEQ ID NO: 4573879 - DNA, 25 bp, Homo sapien
tgcttgttcatcaactgacgaaaat

SEQ ID NO: 4573880 - DNA, 25 bp, Homo sapien
cacaaaaaagtaccaatcccaggtg

SEQ ID NO: 4573881 - DNA, 25 bp, Homo sapien
tactaagacacagtcaaagtgggtt

SEQ ID NO: 4573882 - DNA, 25 bp, Homo sapien
gctgcaatgctataaactggtcctg

SEQ ID NO: 4573883 - DNA, 25 bp, Homo sapien
gctgtcttaaggctgccaatccaaa

SEQ ID NO: 4573884 - DNA, 25 bp, Homo sapien
cataatttcgtatttaactgttaat

SEQ ID NO: 4573885 - DNA, 25 bp, Homo sapien
ttatttataactcaaatacagggca

SEQ ID NO: 4573886 - DNA, 25 bp, Homo sapien
ccttatttataactcaaatacaggg

SEQ ID NO: 4573887 - DNA, 25 bp, Homo sapien
tttaactgttaatcagataacacag

SEQ ID NO: 4573888 - DNA, 25 bp, Homo sapien
catgcacaaaccattacatgggaag

SEQ ID NO: 4573889 - DNA, 25 bp, Homo sapien
aaaaaatgtaaggaccactgctcta

SEQ ID NO: 4573890 - DNA, 25 bp, Homo sapien
tagcttagttgctgtgttcactgag

SEQ ID NO: 4573891 - DNA, 25 bp, Homo sapien
cactgctctagaccttttaggatac

SEQ ID NO: 4573892 - DNA, 25 bp, Homo sapien
catttcggagtcactgtgagaggcc

SEQ ID NO: 4573893 - DNA, 25 bp, Homo sapien
tccccatcggcaaaagtacctctag

SEQ ID NO: 4573894 - DNA, 25 bp, Homo sapien
gtgcaggccctagctcacagtgaga

SEQ ID NO: 4573895 - DNA, 25 bp, Homo sapien
tctagtcaagaaatcggagcgcgtc

SEQ ID NO: 4573896 - DNA, 25 bp, Homo sapien
tctacactgttctacatagccaaag

SEQ ID NO: 4573897 - DNA, 25 bp, Homo sapien
cagagggctcatgaatttcttgaaa

SEQ ID NO: 4573898 - DNA, 25 bp, Homo sapien
cctttccactagcagaagtgacagg

SEQ ID NO: 4573899 - DNA, 25 bp, Homo sapien
tgacagggatgaccaaaaggaatct

SEQ ID NO: 4573900 - DNA, 25 bp, Homo sapien
tggcccagctaacttcacaggtttc

SEQ ID NO: 4573901 - DNA, 25 bp, Homo sapien
cacaggtttccatgctggttcatct

SEQ ID NO: 4573902 - DNA, 25 bp, Homo sapien
aggtttccatgctggttcatcttct

SEQ ID NO: 4573903 - DNA, 25 bp, Homo sapien
tcacaggtttccatgctggttcatc

SEQ ID NO: 4573904 - DNA, 25 bp, Homo sapien
caaagaacacggtgacaggtcggtc

SEQ ID NO: 4573905 - DNA, 25 bp, Homo sapien
tggataattccttgacagtactaga

SEQ ID NO: 4573906 - DNA, 25 bp, Homo sapien
gactgagttggcctaaagtgttctc

SEQ ID NO: 4573907 - DNA, 25 bp, Homo sapien
cagtactagattggcatggacttcc

SEQ ID NO: 4573908 - DNA, 25 bp, Homo sapien
tcttttaatgatagggaccccagta

SEQ ID NO: 4573909 - DNA, 25 bp, Homo sapien
tctcccttatttgaggtatttaagc

SEQ ID NO: 4573910 - DNA, 25 bp, Homo sapien
cccagtacattaagttctcccttat

SEQ ID NO: 4573911 - DNA, 25 bp, Homo sapien
ttgaggtatttaagctgaggagaga

SEQ ID NO: 4573912 - DNA, 25 bp, Homo sapien
taaaatatctgtttgctggcgaatc

SEQ ID NO: 4573913 - DNA, 25 bp, Homo sapien
ttgactgataggaagatggtgccac

SEQ ID NO: 4573914 - DNA, 25 bp, Homo sapien
tctgttgctgcaactgtttttgcct

SEQ ID NO: 4573915 - DNA, 25 bp, Homo sapien
caattgtcttgaaggctttgcgctc

SEQ ID NO: 4573916 - DNA, 25 bp, Homo sapien
gataccttctagtttccctgttgat

SEQ ID NO: 4573917 - DNA, 25 bp, Homo sapien
gagcttcccccgctgtgtcttcatt

SEQ ID NO: 4573918 - DNA, 25 bp, Homo sapien
aacaatctgatcttttcctgagcag

SEQ ID NO: 4573919 - DNA, 25 bp, Homo sapien
tgtattcaaagaaggaacaatctga

SEQ ID NO: 4573920 - DNA, 25 bp, Homo sapien
tcactatcaggtgtaccccgtggag

SEQ ID NO: 4573921 - DNA, 25 bp, Homo sapien
ggtaatagactcagaactgcagacc

SEQ ID NO: 4573922 - DNA, 25 bp, Homo sapien
tagtctcatttgaggcactgagggc

SEQ ID NO: 4573923 - DNA, 25 bp, Homo sapien
tagaccatctgcgatcctctgaagg

SEQ ID NO: 4573924 - DNA, 25 bp, Homo sapien
aatttccagagatccatatccctta

SEQ ID NO: 4573925 - DNA, 25 bp, Homo sapien
ttcaccaatccaacttctggctttg

SEQ ID NO: 4573926 - DNA, 25 bp, Homo sapien
agagatccatatcccttaatattca

SEQ ID NO: 4573927 - DNA, 25 bp, Homo sapien
ttaatattcaccaatccaacttctg

SEQ ID NO: 4573928 - DNA, 25 bp, Homo sapien
gttaatgcagaggtataaacaaagt

SEQ ID NO: 4573929 - DNA, 25 bp, Homo sapien
tccattatagacaatacaatgtggg

SEQ ID NO: 4573930 - DNA, 25 bp, Homo sapien
caatgtgggttaaaatcggtatcac

SEQ ID NO: 4573931 - DNA, 25 bp, Homo sapien
tcggtatcacagtatagtggaaaag

SEQ ID NO: 4573932 - DNA, 25 bp, Homo sapien
catgttgattgcaaaaggataattt

SEQ ID NO: 4573933 - DNA, 25 bp, Homo sapien
acatgttgattgcaaaaggataatt

SEQ ID NO: 4573934 - DNA, 25 bp, Homo sapien
aatcctctacatgttgattgcaaaa

SEQ ID NO: 4573935 - DNA, 25 bp, Homo sapien
tctgaatcctctacatgttgattgc

SEQ ID NO: 4573936 - DNA, 25 bp, Homo sapien
atttctgctggataacgatggctgc

SEQ ID NO: 4573937 - DNA, 25 bp, Homo sapien
tgtgcctgcgcctatagtaatctct

SEQ ID NO: 4573938 - DNA, 25 bp, Homo sapien
tctaagtgagcacgccaggaagctt

SEQ ID NO: 4573939 - DNA, 25 bp, Homo sapien
aagtaccgctgcctctctaagtgag

SEQ ID NO: 4573940 - DNA, 25 bp, Homo sapien
acaatatgattctgcggagcacctc

SEQ ID NO: 4573941 - DNA, 25 bp, Homo sapien
cagatgcttgtctcagatggaggaa

SEQ ID NO: 4573942 - DNA, 25 bp, Homo sapien
cctgaaccatcgctgcaacaatatg

SEQ ID NO: 4573943 - DNA, 25 bp, Homo sapien
gatcttgtaagtgctgtcgttcctg

SEQ ID NO: 4573944 - DNA, 25 bp, Homo sapien
cttgataattatctggattaagatt

SEQ ID NO: 4573945 - DNA, 25 bp, Homo sapien
ccaacttgataattatctggattaa

SEQ ID NO: 4573946 - DNA, 25 bp, Homo sapien
tccaacttgataattatctggatta

SEQ ID NO: 4573947 - DNA, 25 bp, Homo sapien
aacttgataattatctggattaaga

SEQ ID NO: 4573948 - DNA, 25 bp, Homo sapien
taattcggaaaacataggaggtgga

SEQ ID NO: 4573949 - DNA, 25 bp, Homo sapien
tatcatgacatcaaaagggaatgag

SEQ ID NO: 4573950 - DNA, 25 bp, Homo sapien
caaagacttgctcagttgctgaaca

SEQ ID NO: 4573951 - DNA, 25 bp, Homo sapien
gaggctttccgtcccagtaacagca

SEQ ID NO: 4573952 - DNA, 25 bp, Homo sapien
tccagcatcccggtgtatcgaagct

SEQ ID NO: 4573953 - DNA, 25 bp, Homo sapien
tggcgaattcgaactgtttccagca

SEQ ID NO: 4573954 - DNA, 25 bp, Homo sapien
caagacatcactgaaccttaagggc

SEQ ID NO: 4573955 - DNA, 25 bp, Homo sapien
gtatcgaagctgtctaagtaccaag

SEQ ID NO: 4573956 - DNA, 25 bp, Homo sapien
cttttcagcattagagcgaatgcat

SEQ ID NO: 4573957 - DNA, 25 bp, Homo sapien
cagttttagaactcctctatcaccc

SEQ ID NO: 4573958 - DNA, 25 bp, Homo sapien
tgtagttcacaaatcaatgagtttt

SEQ ID NO: 4573959 - DNA, 25 bp, Homo sapien
tatgccactatcactacagtccagt

SEQ ID NO: 4573960 - DNA, 25 bp, Homo sapien
cctgctgctataaactatcttttaa

SEQ ID NO: 4573961 - DNA, 25 bp, Homo sapien
ttggtggtcaaagggattgactcat

SEQ ID NO: 4573962 - DNA, 25 bp, Homo sapien
ggtcaaagggattgactcattaaaa

SEQ ID NO: 4573963 - DNA, 25 bp, Homo sapien
gtttggtggtcaaagggattgactc

SEQ ID NO: 4573964 - DNA, 25 bp, Homo sapien
tgactcattaaaatctaacattagc

SEQ ID NO: 4573965 - DNA, 25 bp, Homo sapien
caaatggcccttattggttgcaaca

SEQ ID NO: 4573966 - DNA, 25 bp, Homo sapien
tgaactgtctaaccgatgttaatcc

SEQ ID NO: 4573967 - DNA, 25 bp, Homo sapien
ggttgcaacaggcagtgaaagacag

SEQ ID NO: 4573968 - DNA, 25 bp, Homo sapien
tgagaaagcgtccagagactctgtc

SEQ ID NO: 4573969 - DNA, 25 bp, Homo sapien
ggctgggtgccatccattttgacta

SEQ ID NO: 4573970 - DNA, 25 bp, Homo sapien
ttcaaggaagggcacaaagacggct

SEQ ID NO: 4573971 - DNA, 25 bp, Homo sapien
tcctgagccgtagcaaatcatcttt

SEQ ID NO: 4573972 - DNA, 25 bp, Homo sapien
tattctcagagattggagtcccgta

SEQ ID NO: 4573973 - DNA, 25 bp, Homo sapien
aacatcctagctgcaaaagaagcat

SEQ ID NO: 4573974 - DNA, 25 bp, Homo sapien
tcatatacaatgatacattagtaga

SEQ ID NO: 4573975 - DNA, 25 bp, Homo sapien
tacacctatcatgaataaggaaatt

SEQ ID NO: 4573976 - DNA, 25 bp, Homo sapien
cattagtagatagcttatgttcaaa

SEQ ID NO: 4573977 - DNA, 25 bp, Homo sapien
atgaagaagagacttggtaatgcga

SEQ ID NO: 4573978 - DNA, 25 bp, Homo sapien
tgtagtgtcagtcttgtcaggtgct

SEQ ID NO: 4573979 - DNA, 25 bp, Homo sapien
gagacttggtaatgcgatcttgtag

SEQ ID NO: 4573980 - DNA, 25 bp, Homo sapien
tggtaatgcgatcttgtagtgtcag

SEQ ID NO: 4573981 - DNA, 25 bp, Homo sapien
aagggcaggcttggatttgaaattt

SEQ ID NO: 4573982 - DNA, 25 bp, Homo sapien
ctttggaagggcaggcttggatttg

SEQ ID NO: 4573983 - DNA, 25 bp, Homo sapien
tggaagggcaggcttggatttgaaa

SEQ ID NO: 4573984 - DNA, 25 bp, Homo sapien
gaagggcaggcttggatttgaaatt

SEQ ID NO: 4573985 - DNA, 25 bp, Homo sapien
taatgtatatctctgggctagagca

SEQ ID NO: 4573986 - DNA, 25 bp, Homo sapien
gaaagacctggacaacaatctatgg

SEQ ID NO: 4573987 - DNA, 25 bp, Homo sapien
caacgcttatgaatatgggctggga

SEQ ID NO: 4573988 - DNA, 25 bp, Homo sapien
tctagctagcggtcaaacgatatgc

SEQ ID NO: 4573989 - DNA, 25 bp, Homo sapien
gctatgtcttcaaaccaactctgta

SEQ ID NO: 4573990 - DNA, 25 bp, Homo sapien
ggtagggcctgtctaaacaataaga

SEQ ID NO: 4573991 - DNA, 25 bp, Homo sapien
gattcatggctgtaaacgctaccta

SEQ ID NO: 4573992 - DNA, 25 bp, Homo sapien
cagtcatgattctcctggtaatatg

SEQ ID NO: 4573993 - DNA, 25 bp, Homo sapien
gagtttgctgctagttgaattagca

SEQ ID NO: 4573994 - DNA, 25 bp, Homo sapien
ggtgccacttgatagtctgctctgg

SEQ ID NO: 4573995 - DNA, 25 bp, Homo sapien
tctgctctggcgaatcccagttctg

SEQ ID NO: 4573996 - DNA, 25 bp, Homo sapien
gcaaggaggtgccacttgatagtct

SEQ ID NO: 4573997 - DNA, 25 bp, Homo sapien
ggtaagctttggtaatcgcactcac

SEQ ID NO: 4573998 - DNA, 25 bp, Homo sapien
tcgcactcacccaaaaaaggtattg

SEQ ID NO: 4573999 - DNA, 25 bp, Homo sapien
tatttgtggctagatacttgggctg

SEQ ID NO: 4574000 - DNA, 25 bp, Homo sapien
gacacggtgactcaattggaaaaaa

SEQ ID NO: 4574001 - DNA, 25 bp, Homo sapien
tttttcatttagagcattcatgccc

SEQ ID NO: 4574002 - DNA, 25 bp, Homo sapien
cagaaagaggtgttctgggattttt

SEQ ID NO: 4574003 - DNA, 25 bp, Homo sapien
ggagatcagaaagaggtgttctggg

SEQ ID NO: 4574004 - DNA, 25 bp, Homo sapien
ttttttcatttagagcattcatgcc

SEQ ID NO: 4574005 - DNA, 25 bp, Homo sapien
cttgctgatgcacatcatattctca

SEQ ID NO: 4574006 - DNA, 25 bp, Homo sapien
atattctcaatcatcccaaacagga

SEQ ID NO: 4574007 - DNA, 25 bp, Homo sapien
ttgctgatgcacatcatattctcaa

SEQ ID NO: 4574008 - DNA, 25 bp, Homo sapien
gcagcaaacttgcatagctcagcta

SEQ ID NO: 4574009 - DNA, 25 bp, Homo sapien
cacaagctaagcacaggcagaaaat

SEQ ID NO: 4574010 - DNA, 25 bp, Homo sapien
tcactgttacttgtgggaggattca

SEQ ID NO: 4574011 - DNA, 25 bp, Homo sapien
tactcacagcagtcgccagggatat

SEQ ID NO: 4574012 - DNA, 25 bp, Homo sapien
gaaactggtgccctcctattcaaga

SEQ ID NO: 4574013 - DNA, 25 bp, Homo sapien
gagctccaacgtccacaaaagtaga

SEQ ID NO: 4574014 - DNA, 25 bp, Homo sapien
tattcaagatccatatgtagctggc

SEQ ID NO: 4574015 - DNA, 25 bp, Homo sapien
gtagctggcatacaatcaggtctgg

SEQ ID NO: 4574016 - DNA, 25 bp, Homo sapien
catcacttggctacttgaaagacaa

SEQ ID NO: 4574017 - DNA, 25 bp, Homo sapien
taggtccattatacgcaaattgctg

SEQ ID NO: 4574018 - DNA, 25 bp, Homo sapien
catgggtgcctacatacgtcaaaac

SEQ ID NO: 4574019 - DNA, 25 bp, Homo sapien
tctaaaccagacataggaaaggctg

SEQ ID NO: 4574020 - DNA, 25 bp, Homo sapien
catgttgcccatacaatctatatcc

SEQ ID NO: 4574021 - DNA, 25 bp, Homo sapien
tgttgcccatacaatctatatccca

SEQ ID NO: 4574022 - DNA, 25 bp, Homo sapien
catacaatctatatcccaccctggt

SEQ ID NO: 4574023 - DNA, 25 bp, Homo sapien
aatctatatcccaccctggtgtagg

SEQ ID NO: 4574024 - DNA, 25 bp, Homo sapien
cctctggtggactgggtgttggaga

SEQ ID NO: 4574025 - DNA, 25 bp, Homo sapien
tatccatacttttcaaaattgcaca

SEQ ID NO: 4574026 - DNA, 25 bp, Homo sapien
gcacatggcgctgtatcatcatgtc

SEQ ID NO: 4574027 - DNA, 25 bp, Homo sapien
agaatctctaagctcctctggtgga

SEQ ID NO: 4574028 - DNA, 25 bp, Homo sapien
ccttcctatcaatactacccttgcc

SEQ ID NO: 4574029 - DNA, 25 bp, Homo sapien
aatactacccttgcccctgatccca

SEQ ID NO: 4574030 - DNA, 25 bp, Homo sapien
tcttaagtactcagtttgatgaatt

SEQ ID NO: 4574031 - DNA, 25 bp, Homo sapien
aatcctgaatcaagatagagaacat

SEQ ID NO: 4574032 - DNA, 25 bp, Homo sapien
tagatggtcactagaacgcttctcc

SEQ ID NO: 4574033 - DNA, 25 bp, Homo sapien
gattctagacttatggtgataccca

SEQ ID NO: 4574034 - DNA, 25 bp, Homo sapien
gtacagagtacagcatagagattct

SEQ ID NO: 4574035 - DNA, 25 bp, Homo sapien
gaaaaccttgaagctctctcatctg

SEQ ID NO: 4574036 - DNA, 25 bp, Homo sapien
aaaatcttctctatgcagcaatggc

SEQ ID NO: 4574037 - DNA, 25 bp, Homo sapien
caaaagtgcttatgaagttgccctc

SEQ ID NO: 4574038 - DNA, 25 bp, Homo sapien
tagtgcacatcccaaaaagccacgt

SEQ ID NO: 4574039 - DNA, 25 bp, Homo sapien
gcaatggccctatctaagactagag

SEQ ID NO: 4574040 - DNA, 25 bp, Homo sapien
cctgaaagcaaccatggctctgaaa

SEQ ID NO: 4574041 - DNA, 25 bp, Homo sapien
gaagagctacaatgtctgggcgcat

SEQ ID NO: 4574042 - DNA, 25 bp, Homo sapien
agaattgcccatcggaaaacagcta

SEQ ID NO: 4574043 - DNA, 25 bp, Homo sapien
tctgaaaaaagctcggagaattgcc

SEQ ID NO: 4574044 - DNA, 25 bp, Homo sapien
ctagcaatgtttgatttgtagcctg

SEQ ID NO: 4574045 - DNA, 25 bp, Homo sapien
catgttgatgcttaaacttgtctag

SEQ ID NO: 4574046 - DNA, 25 bp, Homo sapien
tataatgaaagcaggctccatcacg

SEQ ID NO: 4574047 - DNA, 25 bp, Homo sapien
cacggctggaaattcgatgtaagaa

SEQ ID NO: 4574048 - DNA, 25 bp, Homo sapien
aaagatgaagcagtcctgttggttt

SEQ ID NO: 4574049 - DNA, 25 bp, Homo sapien
tttttgctaataagatttatgcagc

SEQ ID NO: 4574050 - DNA, 25 bp, Homo sapien
aatctatgttgtgccagctgatacc

SEQ ID NO: 4574051 - DNA, 25 bp, Homo sapien
gcaggtattatcaatgtaatctatg

SEQ ID NO: 4574052 - DNA, 25 bp, Homo sapien
gaaatctgactttcgctttatggtc

SEQ ID NO: 4574053 - DNA, 25 bp, Homo sapien
ggtattaaaatctgtgtcatttcaa

SEQ ID NO: 4574054 - DNA, 25 bp, Homo sapien
tgtgtcatttcaatccttggaaatc

SEQ ID NO: 4574055 - DNA, 25 bp, Homo sapien
tagttactgatttcaggtataattt

SEQ ID NO: 4574056 - DNA, 25 bp, Homo sapien
ttttgaggttctgctatcaggtgct

SEQ ID NO: 4574057 - DNA, 25 bp, Homo sapien
tggcaattctagaaaacatgtatcc

SEQ ID NO: 4574058 - DNA, 25 bp, Homo sapien
caatctttagcttctagttagagca

SEQ ID NO: 4574059 - DNA, 25 bp, Homo sapien
gtctctcataagcaacaatcagttt

SEQ ID NO: 4574060 - DNA, 25 bp, Homo sapien
agggatctcaacctaaagcctatag

SEQ ID NO: 4574061 - DNA, 25 bp, Homo sapien
aaattcctatggcacatgttagacc

SEQ ID NO: 4574062 - DNA, 25 bp, Homo sapien
tttgtctgagatgtaaccctttagg

SEQ ID NO: 4574063 - DNA, 25 bp, Homo sapien
cattggctggatccactgtggtatt

SEQ ID NO: 4574064 - DNA, 25 bp, Homo sapien
gatccaatgataggagacttgatga

SEQ ID NO: 4574065 - DNA, 25 bp, Homo sapien
tctgtagacctgctagctgttgtag

SEQ ID NO: 4574066 - DNA, 25 bp, Homo sapien
ttgtcatgctattgttaaccagcca

SEQ ID NO: 4574067 - DNA, 25 bp, Homo sapien
tatgtcctttaagcaaaatagaggc

SEQ ID NO: 4574068 - DNA, 25 bp, Homo sapien
tgtttgtaaaggcacgtttcaatat

SEQ ID NO: 4574069 - DNA, 25 bp, Homo sapien
tatgactcaaagatatgtgtgatgg

SEQ ID NO: 4574070 - DNA, 25 bp, Homo sapien
tgaatatgactcaaagatatgtgtg

SEQ ID NO: 4574071 - DNA, 25 bp, Homo sapien
ttcttgtttgtaaaggcacgtttca

SEQ ID NO: 4574072 - DNA, 25 bp, Homo sapien
aagtagtgctgtaaacgttcattag

SEQ ID NO: 4574073 - DNA, 25 bp, Homo sapien
aaagatatgctgattaaagtagtgc

SEQ ID NO: 4574074 - DNA, 25 bp, Homo sapien
cgttcattagcaaaattaatacaga

SEQ ID NO: 4574075 - DNA, 25 bp, Homo sapien
tatgctgattaaagtagtgctgtaa

SEQ ID NO: 4574076 - DNA, 25 bp, Homo sapien
taatatccacaacataagtaacaaa

SEQ ID NO: 4574077 - DNA, 25 bp, Homo sapien
cacaacataagtaacaaaatgctca

SEQ ID NO: 4574078 - DNA, 25 bp, Homo sapien
caaaatgctcaattcctctaaagca

SEQ ID NO: 4574079 - DNA, 25 bp, Homo sapien
ctctaaagcagtgtacaggggattg

SEQ ID NO: 4574080 - DNA, 25 bp, Homo sapien
gattaattcgaaaaactatccagtc

SEQ ID NO: 4574081 - DNA, 25 bp, Homo sapien
tcaaacagggcactatacagagact

SEQ ID NO: 4574082 - DNA, 25 bp, Homo sapien
ctttactattcagaagtgcatgatt

SEQ ID NO: 4574083 - DNA, 25 bp, Homo sapien
agagacttagccatggagttcctca

SEQ ID NO: 4574084 - DNA, 25 bp, Homo sapien
tgtaaatacgatggatttcactccc

SEQ ID NO: 4574085 - DNA, 25 bp, Homo sapien
tcctcataagtgtaggcagaactgt

SEQ ID NO: 4574086 - DNA, 25 bp, Homo sapien
caaaacccaagatagcccacaagat

SEQ ID NO: 4574087 - DNA, 25 bp, Homo sapien
caatatgtcaccattctgcaaagca

SEQ ID NO: 4574088 - DNA, 25 bp, Homo sapien
ccttgtaactaatgcttcaaatagc

SEQ ID NO: 4574089 - DNA, 25 bp, Homo sapien
cgtcttccttgtaactaatgcttca

SEQ ID NO: 4574090 - DNA, 25 bp, Homo sapien
caccgtcttccttgtaactaatgct

SEQ ID NO: 4574091 - DNA, 25 bp, Homo sapien
tgtcaccgtcttccttgtaactaat

SEQ ID NO: 4574092 - DNA, 25 bp, Homo sapien
ttctttttgtaacagatattaccca

SEQ ID NO: 4574093 - DNA, 25 bp, Homo sapien
gtcatcccggtatgtcttctttttg

SEQ ID NO: 4574094 - DNA, 25 bp, Homo sapien
aggattacagatatcaatggagtca

SEQ ID NO: 4574095 - DNA, 25 bp, Homo sapien
tgtaacagatattacccaaatgtag

SEQ ID NO: 4574096 - DNA, 25 bp, Homo sapien
ttccatggcaagttgtaggcgctca

SEQ ID NO: 4574097 - DNA, 25 bp, Homo sapien
cgtgtcttgggaagaaatcctacca

SEQ ID NO: 4574098 - DNA, 25 bp, Homo sapien
tgtaggcgctcaaagtcatgtctca

SEQ ID NO: 4574099 - DNA, 25 bp, Homo sapien
tcttcgtgtcttgggaagaaatcct

SEQ ID NO: 4574100 - DNA, 25 bp, Homo sapien
tctgagaacccatgcatttaatttt

SEQ ID NO: 4574101 - DNA, 25 bp, Homo sapien
gctttcgataagcaattttaagaca

SEQ ID NO: 4574102 - DNA, 25 bp, Homo sapien
taagacattctactgacatgccaat

SEQ ID NO: 4574103 - DNA, 25 bp, Homo sapien
aatgacgcgatgtctgctcagtgca

SEQ ID NO: 4574104 - DNA, 25 bp, Homo sapien
ggtagttatgattgcctttcacaca

SEQ ID NO: 4574105 - DNA, 25 bp, Homo sapien
tatttgatccttataaaacctctgg

SEQ ID NO: 4574106 - DNA, 25 bp, Homo sapien
tgttaatagtgtagctgggattcca

SEQ ID NO: 4574107 - DNA, 25 bp, Homo sapien
ccaattgctcctatggtggtgaagc

SEQ ID NO: 4574108 - DNA, 25 bp, Homo sapien
tgaaagcactataggaggtctacct

SEQ ID NO: 4574109 - DNA, 25 bp, Homo sapien
cctggccagatgtgaagtgcttttt

SEQ ID NO: 4574110 - DNA, 25 bp, Homo sapien
aagacatgtttaagggcgtgaccac

SEQ ID NO: 4574111 - DNA, 25 bp, Homo sapien
gagaccttatactagaccggcagag

SEQ ID NO: 4574112 - DNA, 25 bp, Homo sapien
ccagctctgtctgaggggtttcttt

SEQ ID NO: 4574113 - DNA, 25 bp, Homo sapien
gagtcatagcaataatcatcccagc

SEQ ID NO: 4574114 - DNA, 25 bp, Homo sapien
cggctcagagtcatagcaataatca

SEQ ID NO: 4574115 - DNA, 25 bp, Homo sapien
catagcaataatcatcccagctctg

SEQ ID NO: 4574116 - DNA, 25 bp, Homo sapien
aaagtaaggcagattagttaggtag

SEQ ID NO: 4574117 - DNA, 25 bp, Homo sapien
aaggcagattagttaggtagaagta

SEQ ID NO: 4574118 - DNA, 25 bp, Homo sapien
cagattagttaggtagaagtaatgg

SEQ ID NO: 4574119 - DNA, 25 bp, Homo sapien
tggttattatactcttctaatgatc

SEQ ID NO: 4574120 - DNA, 25 bp, Homo sapien
tgcttaagatggaatgctgatctct

SEQ ID NO: 4574121 - DNA, 25 bp, Homo sapien
ctggttgcttaagatggaatgctga

SEQ ID NO: 4574122 - DNA, 25 bp, Homo sapien
ggttgcttaagatggaatgctgatc

SEQ ID NO: 4574123 - DNA, 25 bp, Homo sapien
ctctggttgcttaagatggaatgct

SEQ ID NO: 4574124 - DNA, 25 bp, Homo sapien
tgataaacgagtctggacttctcca

SEQ ID NO: 4574125 - DNA, 25 bp, Homo sapien
cgttcattatgctcctgataaacga

SEQ ID NO: 4574126 - DNA, 25 bp, Homo sapien
tgctcctgataaacgagtctggact

SEQ ID NO: 4574127 - DNA, 25 bp, Homo sapien
ttatgctcctgataaacgagtctgg

SEQ ID NO: 4574128 - DNA, 25 bp, Homo sapien
gctcttacctgtctaaaatgggaga

SEQ ID NO: 4574129 - DNA, 25 bp, Homo sapien
taataccaaacccacatatatatcc

SEQ ID NO: 4574130 - DNA, 25 bp, Homo sapien
tcacaaccaccttgcgtggcaaata

SEQ ID NO: 4574131 - DNA, 25 bp, Homo sapien
taagatgccaaccacaaataatacc

SEQ ID NO: 4574132 - DNA, 25 bp, Homo sapien
aattgttattatgagctgtctttgc

SEQ ID NO: 4574133 - DNA, 25 bp, Homo sapien
attgttattatgagctgtctttgca

SEQ ID NO: 4574134 - DNA, 25 bp, Homo sapien
cttgaattgttattatgagctgtct

SEQ ID NO: 4574135 - DNA, 25 bp, Homo sapien
tgaattgttattatgagctgtcttt

SEQ ID NO: 4574136 - DNA, 25 bp, Homo sapien
catgacagacacctgtacatcttca

SEQ ID NO: 4574137 - DNA, 25 bp, Homo sapien
tcttcactcattgcacacatgacag

SEQ ID NO: 4574138 - DNA, 25 bp, Homo sapien
ttatttgcagggttttatggctaca

SEQ ID NO: 4574139 - DNA, 25 bp, Homo sapien
tatggctacagcatattcttcactc

SEQ ID NO: 4574140 - DNA, 25 bp, Homo sapien
ttctggcagtttaagatcctcagga

SEQ ID NO: 4574141 - DNA, 25 bp, Homo sapien
tctggcagtttaagatcctcaggaa

SEQ ID NO: 4574142 - DNA, 25 bp, Homo sapien
ctggcagtttaagatcctcaggaac

SEQ ID NO: 4574143 - DNA, 25 bp, Homo sapien
tttctggcagtttaagatcctcagg

SEQ ID NO: 4574144 - DNA, 25 bp, Homo sapien
tcggcagggaaaggcaactatcttg

SEQ ID NO: 4574145 - DNA, 25 bp, Homo sapien
gaagtcacttttccgcaaggttgag

SEQ ID NO: 4574146 - DNA, 25 bp, Homo sapien
gaacatccacgttgtgaacagaagg

SEQ ID NO: 4574147 - DNA, 25 bp, Homo sapien
gtagttaaatcaatttcgtacacca

SEQ ID NO: 4574148 - DNA, 25 bp, Homo sapien
ctttcacctgcgtacctgcacaggt

SEQ ID NO: 4574149 - DNA, 25 bp, Homo sapien
tttcacctgcgtacctgcacaggtc

SEQ ID NO: 4574150 - DNA, 25 bp, Homo sapien
agagctcctttcacctgcgtacctg

SEQ ID NO: 4574151 - DNA, 25 bp, Homo sapien
ggcaaagagctcctttcacctgcgt

SEQ ID NO: 4574152 - DNA, 25 bp, Homo sapien
ttggcaagcaaaaaccgcatatatt

SEQ ID NO: 4574153 - DNA, 25 bp, Homo sapien
tgtaatgagactaattaaaatcttc

SEQ ID NO: 4574154 - DNA, 25 bp, Homo sapien
tagaatggcaaaatcaacctactta

SEQ ID NO: 4574155 - DNA, 25 bp, Homo sapien
tatatgtctgcagtgtagaatggca

SEQ ID NO: 4574156 - DNA, 25 bp, Homo sapien
tgggagatggaacagtatcttgctt

SEQ ID NO: 4574157 - DNA, 25 bp, Homo sapien
gatctactccacacatcgacctggt

SEQ ID NO: 4574158 - DNA, 25 bp, Homo sapien
tggtattgcagtacctccaggaatg

SEQ ID NO: 4574159 - DNA, 25 bp, Homo sapien
cagtacctccaggaatggtacaccc

SEQ ID NO: 4574160 - DNA, 25 bp, Homo sapien
tctctctcagaaggaagcggtagtc

SEQ ID NO: 4574161 - DNA, 25 bp, Homo sapien
tctgttacccgtagccatgactgca

SEQ ID NO: 4574162 - DNA, 25 bp, Homo sapien
gcggtagtcctctccacttaagcga

SEQ ID NO: 4574163 - DNA, 25 bp, Homo sapien
taagcgattttccagagccattcgg

SEQ ID NO: 4574164 - DNA, 25 bp, Homo sapien
gtcccatcagcatggatagtatatg

SEQ ID NO: 4574165 - DNA, 25 bp, Homo sapien
tagtatatgttcaaagtcgtgcaaa

SEQ ID NO: 4574166 - DNA, 25 bp, Homo sapien
ttcaaagtcgtgcaaaccattttct

SEQ ID NO: 4574167 - DNA, 25 bp, Homo sapien
catcagcatggatagtatatgttca

SEQ ID NO: 4574168 - DNA, 25 bp, Homo sapien
aaacttagaaggcagtctaggccac

SEQ ID NO: 4574169 - DNA, 25 bp, Homo sapien
gagaggaattgtccatcccagtggt

SEQ ID NO: 4574170 - DNA, 25 bp, Homo sapien
taggccactaggacttcaattcctg

SEQ ID NO: 4574171 - DNA, 25 bp, Homo sapien
cctaccatggcaagctaaagtactc

SEQ ID NO: 4574172 - DNA, 25 bp, Homo sapien
aggtggtagccacagggagagactc

SEQ ID NO: 4574173 - DNA, 25 bp, Homo sapien
tggtagccacagggagagactcctt

SEQ ID NO: 4574174 - DNA, 25 bp, Homo sapien
agccacagggagagactccttctgc

SEQ ID NO: 4574175 - DNA, 25 bp, Homo sapien
caggcctggggaggtggtagccaca

SEQ ID NO: 4574176 - DNA, 25 bp, Homo sapien
tatgttgaattaggcagtgatggag

SEQ ID NO: 4574177 - DNA, 25 bp, Homo sapien
aatactatgttgaattaggcagtga

SEQ ID NO: 4574178 - DNA, 25 bp, Homo sapien
gtcttgtgccagattaagacaaatg

SEQ ID NO: 4574179 - DNA, 25 bp, Homo sapien
gatgtcatcagcttaagcagctttt

SEQ ID NO: 4574180 - DNA, 25 bp, Homo sapien
ggagctcttgtaagacacgtctgac

SEQ ID NO: 4574181 - DNA, 25 bp, Homo sapien
cgtctgacggtatcaaattccctca

SEQ ID NO: 4574182 - DNA, 25 bp, Homo sapien
taggagatgcactacacaccttagt

SEQ ID NO: 4574183 - DNA, 25 bp, Homo sapien
tggttgttatgcagacttgtgtggc

SEQ ID NO: 4574184 - DNA, 25 bp, Homo sapien
aggcagcatggcttaagcgggcccc

SEQ ID NO: 4574185 - DNA, 25 bp, Homo sapien
tgtgctagcagatgccagagtgtca

SEQ ID NO: 4574186 - DNA, 25 bp, Homo sapien
tcaatgttaggaacccactgcactg

SEQ ID NO: 4574187 - DNA, 25 bp, Homo sapien
cgtttgtagcagtggtacaggcagc

SEQ ID NO: 4574188 - DNA, 25 bp, Homo sapien
tctccaataacatggccaattacac

SEQ ID NO: 4574189 - DNA, 25 bp, Homo sapien
tgggaaagaatacgcaagcctaact

SEQ ID NO: 4574190 - DNA, 25 bp, Homo sapien
tgctcacactcctagatcataaata

SEQ ID NO: 4574191 - DNA, 25 bp, Homo sapien
cacatggctaaaacagtagaaatcc

SEQ ID NO: 4574192 - DNA, 25 bp, Homo sapien
gaagccaggttagctactgacagaa

SEQ ID NO: 4574193 - DNA, 25 bp, Homo sapien
tcgcgcccggcgaaaaatatatatt

SEQ ID NO: 4574194 - DNA, 25 bp, Homo sapien
taagatagggcaggaattcagagag

SEQ ID NO: 4574195 - DNA, 25 bp, Homo sapien
tataagcccaaaacataagataggg

SEQ ID NO: 4574196 - DNA, 25 bp, Homo sapien
gaacaccatgacagcggctatctga

SEQ ID NO: 4574197 - DNA, 25 bp, Homo sapien
gacaccacatctaccgggagtaaga

SEQ ID NO: 4574198 - DNA, 25 bp, Homo sapien
caaagaaaggatcgcgactaaggag

SEQ ID NO: 4574199 - DNA, 25 bp, Homo sapien
gccaaagtctgtgacggtgtctaga

SEQ ID NO: 4574200 - DNA, 25 bp, Homo sapien
tccgggctgtcctgtactctctcaa

SEQ ID NO: 4574201 - DNA, 25 bp, Homo sapien
tgtcagagagactccgcccggcctg

SEQ ID NO: 4574202 - DNA, 25 bp, Homo sapien
cgcccagagagcacgcgttggaccg

SEQ ID NO: 4574203 - DNA, 25 bp, Homo sapien
cccagggtaggaccggagatggcag

SEQ ID NO: 4574204 - DNA, 25 bp, Homo sapien
gccccgcgcgactccccggctgcag

SEQ ID NO: 4574205 - DNA, 25 bp, Homo sapien
cccgccccgcgcgactccccggctg

SEQ ID NO: 4574206 - DNA, 25 bp, Homo sapien
ccgcgcgactccccggctgcaggcg

SEQ ID NO: 4574207 - DNA, 25 bp, Homo sapien
ccccgcgcgactccccggctgcagg

SEQ ID NO: 4574208 - DNA, 25 bp, Homo sapien
acgtgacgccactggagagtacagc

SEQ ID NO: 4574209 - DNA, 25 bp, Homo sapien
cactggagagtacagcgtgcgcttg

SEQ ID NO: 4574210 - DNA, 25 bp, Homo sapien
tacagcgtgcgcttgcgcagacacg

SEQ ID NO: 4574211 - DNA, 25 bp, Homo sapien
ctactgccagcacgggtcggccccg

SEQ ID NO: 4574212 - DNA, 25 bp, Homo sapien
agctttagattctccctgtactgga

SEQ ID NO: 4574213 - DNA, 25 bp, Homo sapien
gaccgtagctgtcgctttccggcca

SEQ ID NO: 4574214 - DNA, 25 bp, Homo sapien
aacctctgagtttgcgaccgtagct

SEQ ID NO: 4574215 - DNA, 25 bp, Homo sapien
tactggaaagggatgtcgcaaggtt

SEQ ID NO: 4574216 - DNA, 25 bp, Homo sapien
tccccacttcggtttgtctcggcag

SEQ ID NO: 4574217 - DNA, 25 bp, Homo sapien
gaggcaggtaagaagcctcctcccc

SEQ ID NO: 4574218 - DNA, 25 bp, Homo sapien
ttgtctcggcagtggatcgctctcc

SEQ ID NO: 4574219 - DNA, 25 bp, Homo sapien
aggcccgaggcaggtaagaagcctc

SEQ ID NO: 4574220 - DNA, 25 bp, Homo sapien
ttctggacctggattctcagcgccg

SEQ ID NO: 4574221 - DNA, 25 bp, Homo sapien
cagattctggcgtatccgtgctccc

SEQ ID NO: 4574222 - DNA, 25 bp, Homo sapien
gattctggcgtatccgtgctccctc

SEQ ID NO: 4574223 - DNA, 25 bp, Homo sapien
gacctggattctcagcgccgccggt

SEQ ID NO: 4574224 - DNA, 25 bp, Homo sapien
gagtttacagtgatacccagcatga

SEQ ID NO: 4574225 - DNA, 25 bp, Homo sapien
tgccaaatgactaacacaaagggaa

SEQ ID NO: 4574226 - DNA, 25 bp, Homo sapien
agtttacagtgatacccagcatgat

SEQ ID NO: 4574227 - DNA, 25 bp, Homo sapien
gccaaatgactaacacaaagggaaa

SEQ ID NO: 4574228 - DNA, 25 bp, Homo sapien
tattacacacagggtttacgtaaga

SEQ ID NO: 4574229 - DNA, 25 bp, Homo sapien
gaacatttattacacacagggttta

SEQ ID NO: 4574230 - DNA, 25 bp, Homo sapien
agacttttcttattggtatataatt

SEQ ID NO: 4574231 - DNA, 25 bp, Homo sapien
gacttttcttattggtatataatta

SEQ ID NO: 4574232 - DNA, 25 bp, Homo sapien
cttgagcacattatctgaagctttg

SEQ ID NO: 4574233 - DNA, 25 bp, Homo sapien
tctctatgccattaagttctttggc

SEQ ID NO: 4574234 - DNA, 25 bp, Homo sapien
cctctagaggtttctaataggcaga

SEQ ID NO: 4574235 - DNA, 25 bp, Homo sapien
taagttctttggcactgatgatgaa

SEQ ID NO: 4574236 - DNA, 25 bp, Homo sapien
ccattttttacttttatcagctatt

SEQ ID NO: 4574237 - DNA, 25 bp, Homo sapien
accattttttacttttatcagctat

SEQ ID NO: 4574238 - DNA, 25 bp, Homo sapien
ggctgccaataggatatcagtatgc

SEQ ID NO: 4574239 - DNA, 25 bp, Homo sapien
ccaataggatatcagtatgccacac

SEQ ID NO: 4574240 - DNA, 25 bp, Homo sapien
tgccaataggatatcagtatgccac

SEQ ID NO: 4574241 - DNA, 25 bp, Homo sapien
aaggctgccaataggatatcagtat

SEQ ID NO: 4574242 - DNA, 25 bp, Homo sapien
gctttcagccggtggagagtctgat

SEQ ID NO: 4574243 - DNA, 25 bp, Homo sapien
tttcagccggtggagagtctgatgt

SEQ ID NO: 4574244 - DNA, 25 bp, Homo sapien
tgctttcagccggtggagagtctga

SEQ ID NO: 4574245 - DNA, 25 bp, Homo sapien
tctgctttcagccggtggagagtct

SEQ ID NO: 4574246 - DNA, 25 bp, Homo sapien
tggcattccgagcagcccaggtttg

SEQ ID NO: 4574247 - DNA, 25 bp, Homo sapien
aacacattccgggaaggcaaggagc

SEQ ID NO: 4574248 - DNA, 25 bp, Homo sapien
gaagagagccttgtctcagatcctg

SEQ ID NO: 4574249 - DNA, 25 bp, Homo sapien
aggctgcagcgagagcctggccttt

SEQ ID NO: 4574250 - DNA, 25 bp, Homo sapien
ggctctgctgggtaccaggtgttcc

SEQ ID NO: 4574251 - DNA, 25 bp, Homo sapien
tctgctgggtaccaggtgttccttg

SEQ ID NO: 4574252 - DNA, 25 bp, Homo sapien
cagcagcgaaagcagggctctgctg

SEQ ID NO: 4574253 - DNA, 25 bp, Homo sapien
gctctgctgggtaccaggtgttcct

SEQ ID NO: 4574254 - DNA, 25 bp, Homo sapien
ttccccaggtgatgagagaagagag

SEQ ID NO: 4574255 - DNA, 25 bp, Homo sapien
aaagcggaagcggatagagccattc

SEQ ID NO: 4574256 - DNA, 25 bp, Homo sapien
gaaacgccgtcctttcagaatcagc

SEQ ID NO: 4574257 - DNA, 25 bp, Homo sapien
tcttactttggataggtaggtgacc

SEQ ID NO: 4574258 - DNA, 25 bp, Homo sapien
ggccacacgagctttctggctctga

SEQ ID NO: 4574259 - DNA, 25 bp, Homo sapien
ctgggtcatagaaaaggccacacga

SEQ ID NO: 4574260 - DNA, 25 bp, Homo sapien
ctccttacataggctctgggtcata

SEQ ID NO: 4574261 - DNA, 25 bp, Homo sapien
tgaactccgtatgttaattcctgga

SEQ ID NO: 4574262 - DNA, 25 bp, Homo sapien
tccccagaggtatgagatagacccc

SEQ ID NO: 4574263 - DNA, 25 bp, Homo sapien
cattcatggaacagtgagtttcacc

SEQ ID NO: 4574264 - DNA, 25 bp, Homo sapien
catggcctctgacaaccaagcaagg

SEQ ID NO: 4574265 - DNA, 25 bp, Homo sapien
catacagatttggtgcaagcaacac

SEQ ID NO: 4574266 - DNA, 25 bp, Homo sapien
taggccccatggagtggaggtccct

SEQ ID NO: 4574267 - DNA, 25 bp, Homo sapien
gatggctcaacaccatcacacgcaa

SEQ ID NO: 4574268 - DNA, 25 bp, Homo sapien
caacccaatgactatgggggtgaca

SEQ ID NO: 4574269 - DNA, 25 bp, Homo sapien
cccctcaacgggctgctgttggcca

SEQ ID NO: 4574270 - DNA, 25 bp, Homo sapien
agcaagacctcagatccaagcctcc

SEQ ID NO: 4574271 - DNA, 25 bp, Homo sapien
gcttgggacaccttagaaatgtttg

SEQ ID NO: 4574272 - DNA, 25 bp, Homo sapien
ggcaaaacccagtaccaggtctgtg

SEQ ID NO: 4574273 - DNA, 25 bp, Homo sapien
tagaaatgtttgagcacacaagggc

SEQ ID NO: 4574274 - DNA, 25 bp, Homo sapien
gccacctcatgaggggccggcacag

SEQ ID NO: 4574275 - DNA, 25 bp, Homo sapien
accatctccgccgtgggcagcatct

SEQ ID NO: 4574276 - DNA, 25 bp, Homo sapien
aggacacagaattcaggtacctctg

SEQ ID NO: 4574277 - DNA, 25 bp, Homo sapien
cagcatctccccataatgcagccag

SEQ ID NO: 4574278 - DNA, 25 bp, Homo sapien
tcataggcagtcttagcacagcagc

SEQ ID NO: 4574279 - DNA, 25 bp, Homo sapien
ggagacttagcacccagaacattct

SEQ ID NO: 4574280 - DNA, 25 bp, Homo sapien
tgaccccaccataggagtgagctgt

SEQ ID NO: 4574281 - DNA, 25 bp, Homo sapien
tccaaatgcgaaagcatggcctctg

SEQ ID NO: 4574282 - DNA, 25 bp, Homo sapien
aatacggaacgccaggtaggatgag

SEQ ID NO: 4574283 - DNA, 25 bp, Homo sapien
tagccgagaaatacggaacgccagg

SEQ ID NO: 4574284 - DNA, 25 bp, Homo sapien
tgggtcatcccaactcaaggagcat

SEQ ID NO: 4574285 - DNA, 25 bp, Homo sapien
gcataactgctgctctagccgagaa

SEQ ID NO: 4574286 - DNA, 25 bp, Homo sapien
cagtgggagagcagttcggcatctt

SEQ ID NO: 4574287 - DNA, 25 bp, Homo sapien
gaagaccttgaggagccggtaatcc

SEQ ID NO: 4574288 - DNA, 25 bp, Homo sapien
gcagtgggagagcagttcggcatct

SEQ ID NO: 4574289 - DNA, 25 bp, Homo sapien
agaccttgaggagccggtaatccca

SEQ ID NO: 4574290 - DNA, 25 bp, Homo sapien
ctggcatgggccatgcccacctccc

SEQ ID NO: 4574291 - DNA, 25 bp, Homo sapien
tttctgaagctacttgggctcttga

SEQ ID NO: 4574292 - DNA, 25 bp, Homo sapien
ccattttctgaagctacttgggctc

SEQ ID NO: 4574293 - DNA, 25 bp, Homo sapien
tgcccacctcccaccattttctgaa

SEQ ID NO: 4574294 - DNA, 25 bp, Homo sapien
catggacaagccctcccgaacttac

SEQ ID NO: 4574295 - DNA, 25 bp, Homo sapien
gacagaaagtctggcctttgcaagt

SEQ ID NO: 4574296 - DNA, 25 bp, Homo sapien
tgagccctttttatggaactgggaa

SEQ ID NO: 4574297 - DNA, 25 bp, Homo sapien
ttgcaagtagttgccatggacaagc

SEQ ID NO: 4574298 - DNA, 25 bp, Homo sapien
gtctgtggagtccacggatgatgga

SEQ ID NO: 4574299 - DNA, 25 bp, Homo sapien
ggagtccacggatgatggagggata

SEQ ID NO: 4574300 - DNA, 25 bp, Homo sapien
tccacggatgatggagggatacaag

SEQ ID NO: 4574301 - DNA, 25 bp, Homo sapien
gatggagggatacaagggatgttgt

SEQ ID NO: 4574302 - DNA, 25 bp, Homo sapien
agagacagggacctggaggaagggc

SEQ ID NO: 4574303 - DNA, 25 bp, Homo sapien
agacagggacctggaggaagggcat

SEQ ID NO: 4574304 - DNA, 25 bp, Homo sapien
tgggagagacagggacctggaggaa

SEQ ID NO: 4574305 - DNA, 25 bp, Homo sapien
acagggacctggaggaagggcatac

SEQ ID NO: 4574306 - DNA, 25 bp, Homo sapien
tccacttcatctcagggatgaggac

SEQ ID NO: 4574307 - DNA, 25 bp, Homo sapien
ctttctccacttcatctcagggatg

SEQ ID NO: 4574308 - DNA, 25 bp, Homo sapien
tctccacttcatctcagggatgagg

SEQ ID NO: 4574309 - DNA, 25 bp, Homo sapien
ccacttcatctcagggatgaggact

SEQ ID NO: 4574310 - DNA, 25 bp, Homo sapien
taagagatgccctggcatagcatgg

SEQ ID NO: 4574311 - DNA, 25 bp, Homo sapien
tggtgccccagttctgcattgtggg

SEQ ID NO: 4574312 - DNA, 25 bp, Homo sapien
tgccccagttctgcattgtgggccc

SEQ ID NO: 4574313 - DNA, 25 bp, Homo sapien
gtccagcagtctttgctcccagctt

SEQ ID NO: 4574314 - DNA, 25 bp, Homo sapien
tcagtccagcagtctttgctcccag

SEQ ID NO: 4574315 - DNA, 25 bp, Homo sapien
agactcaggttcccctgaaaattct

SEQ ID NO: 4574316 - DNA, 25 bp, Homo sapien
gagactcaggttcccctgaaaattc

SEQ ID NO: 4574317 - DNA, 25 bp, Homo sapien
ctgggaccatacagccattgttttt

SEQ ID NO: 4574318 - DNA, 25 bp, Homo sapien
caggattcaataagttatataagat

SEQ ID NO: 4574319 - DNA, 25 bp, Homo sapien
cacattcagtacaggattcaataag

SEQ ID NO: 4574320 - DNA, 25 bp, Homo sapien
gctttgcctgagatgcttttgccca

SEQ ID NO: 4574321 - DNA, 25 bp, Homo sapien
gactctcctcagcaggtcatataca

SEQ ID NO: 4574322 - DNA, 25 bp, Homo sapien
catatacactgtcccgggagagcag

SEQ ID NO: 4574323 - DNA, 25 bp, Homo sapien
ccgggagagcagtgacacaaagata

SEQ ID NO: 4574324 - DNA, 25 bp, Homo sapien
tctcctcagcaggtcatatacactg

SEQ ID NO: 4574325 - DNA, 25 bp, Homo sapien
tttgatcatttgcacagacaccaca

SEQ ID NO: 4574326 - DNA, 25 bp, Homo sapien
ggtggtgatggccagtccattggga

SEQ ID NO: 4574327 - DNA, 25 bp, Homo sapien
ggaaggagccgtgccatcttgtgtt

SEQ ID NO: 4574328 - DNA, 25 bp, Homo sapien
ttttgatcatttgcacagacaccac

SEQ ID NO: 4574329 - DNA, 25 bp, Homo sapien
gtcatggcagccctcaccactcatt

SEQ ID NO: 4574330 - DNA, 25 bp, Homo sapien
catggcagccctcaccactcattac

SEQ ID NO: 4574331 - DNA, 25 bp, Homo sapien
ggtcatggcagccctcaccactcat

SEQ ID NO: 4574332 - DNA, 25 bp, Homo sapien
agggtcatggcagccctcaccactc

SEQ ID NO: 4574333 - DNA, 25 bp, Homo sapien
tgggggagatgtagagccggccctg

SEQ ID NO: 4574334 - DNA, 25 bp, Homo sapien
ggcagaatccctgacctttccctgc

SEQ ID NO: 4574335 - DNA, 25 bp, Homo sapien
cctgccctgatctccaagcctgcat

SEQ ID NO: 4574336 - DNA, 25 bp, Homo sapien
cctgatctccaagcctgcattctca

SEQ ID NO: 4574337 - DNA, 25 bp, Homo sapien
ccccaagggccttgattgtgcaaat

SEQ ID NO: 4574338 - DNA, 25 bp, Homo sapien
ttaaacagcttgtggtattgctggt

SEQ ID NO: 4574339 - DNA, 25 bp, Homo sapien
gaacatccttaaacagcttgtggta

SEQ ID NO: 4574340 - DNA, 25 bp, Homo sapien
tccttaaacagcttgtggtattgct

SEQ ID NO: 4574341 - DNA, 25 bp, Homo sapien
ccaagggaacatccttaaacagctt

SEQ ID NO: 4574342 - DNA, 25 bp, Homo sapien
ccttcaagccttctggccagtgcag

SEQ ID NO: 4574343 - DNA, 25 bp, Homo sapien
cccttcaagccttctggccagtgca

SEQ ID NO: 4574344 - DNA, 25 bp, Homo sapien
gccagaagcttgaggcagagatcag

SEQ ID NO: 4574345 - DNA, 25 bp, Homo sapien
gacattccatttcgggaacaaggaa

SEQ ID NO: 4574346 - DNA, 25 bp, Homo sapien
agacattccatttcgggaacaagga

SEQ ID NO: 4574347 - DNA, 25 bp, Homo sapien
tgggtgaggtgaaggtgtcagactc

SEQ ID NO: 4574348 - DNA, 25 bp, Homo sapien
tgggtgtcaaagaccctgtcccatt

SEQ ID NO: 4574349 - DNA, 25 bp, Homo sapien
tgtcagactcacagcgccggggcct

SEQ ID NO: 4574350 - DNA, 25 bp, Homo sapien
ttggcacagactcacctgacctggc

SEQ ID NO: 4574351 - DNA, 25 bp, Homo sapien
tagtccgggggctcctcaactctgt

SEQ ID NO: 4574352 - DNA, 25 bp, Homo sapien
ctgtagtccgggggctcctcaactc

SEQ ID NO: 4574353 - DNA, 25 bp, Homo sapien
tcagagaagctgtctttctgtgcat

SEQ ID NO: 4574354 - DNA, 25 bp, Homo sapien
gtttctctttgcaggacacaggact

SEQ ID NO: 4574355 - DNA, 25 bp, Homo sapien
tctgtcccatcacatccttgaagga

SEQ ID NO: 4574356 - DNA, 25 bp, Homo sapien
cgactagcactggtgagcgctgtgt

SEQ ID NO: 4574357 - DNA, 25 bp, Homo sapien
aggacgtccccgactagcactggtg

SEQ ID NO: 4574358 - DNA, 25 bp, Homo sapien
gctactgtgaggatctgcaagaggt

SEQ ID NO: 4574359 - DNA, 25 bp, Homo sapien
ggtgtgagccaacgcgccaggccgt

SEQ ID NO: 4574360 - DNA, 25 bp, Homo sapien
gtgtgagccaacgcgccaggccgtg

SEQ ID NO: 4574361 - DNA, 25 bp, Homo sapien
tgtgagccaacgcgccaggccgtgc

SEQ ID NO: 4574362 - DNA, 25 bp, Homo sapien
gatggctgcagaattgagggaaatc

SEQ ID NO: 4574363 - DNA, 25 bp, Homo sapien
gctgcagaattgagggaaatcattt

SEQ ID NO: 4574364 - DNA, 25 bp, Homo sapien
tggctgcagaattgagggaaatcat

SEQ ID NO: 4574365 - DNA, 25 bp, Homo sapien
agatggctgcagaattgagggaaat

SEQ ID NO: 4574366 - DNA, 25 bp, Homo sapien
gcgcccggctcaaattcatacttta

SEQ ID NO: 4574367 - DNA, 25 bp, Homo sapien
tcagcaaagagccaggtatgctgca

SEQ ID NO: 4574368 - DNA, 25 bp, Homo sapien
tcatactttaaatgcctatttgcaa

SEQ ID NO: 4574369 - DNA, 25 bp, Homo sapien
taaatgcctatttgcaatcagcaaa

SEQ ID NO: 4574370 - DNA, 25 bp, Homo sapien
aagacatcaggttgcgagggtaccc

SEQ ID NO: 4574371 - DNA, 25 bp, Homo sapien
ctctcgttccctaggagcctggccc

SEQ ID NO: 4574372 - DNA, 25 bp, Homo sapien
ctttagagccggctacaggtggaca

SEQ ID NO: 4574373 - DNA, 25 bp, Homo sapien
gttgcgagggtaccctctctcgttc

SEQ ID NO: 4574374 - DNA, 25 bp, Homo sapien
gctccggcttaaagcggtcatcccg

SEQ ID NO: 4574375 - DNA, 25 bp, Homo sapien
cgccctcctcggtggcctcgctccg

SEQ ID NO: 4574376 - DNA, 25 bp, Homo sapien
cgctccggcttaaagcggtcatccc

SEQ ID NO: 4574377 - DNA, 25 bp, Homo sapien
tcggtggcctcgctccggcttaaag

SEQ ID NO: 4574378 - DNA, 25 bp, Homo sapien
tagtcttgcggcttgggtccctctg

SEQ ID NO: 4574379 - DNA, 25 bp, Homo sapien
ccacgcacttttgccggagttaaca

SEQ ID NO: 4574380 - DNA, 25 bp, Homo sapien
tcccaacatagagctccggataagt

SEQ ID NO: 4574381 - DNA, 25 bp, Homo sapien
tattgaacaccatggtctgacagcc

SEQ ID NO: 4574382 - DNA, 25 bp, Homo sapien
aggtgctgcagtagtgggggaaaat

SEQ ID NO: 4574383 - DNA, 25 bp, Homo sapien
ctggaggtgctgcagtagtggggga

SEQ ID NO: 4574384 - DNA, 25 bp, Homo sapien
ggcctggaggtgctgcagtagtggg

SEQ ID NO: 4574385 - DNA, 25 bp, Homo sapien
gtgctgcagtagtgggggaaaatgg

SEQ ID NO: 4574386 - DNA, 25 bp, Homo sapien
ggaacaacagcccagtgccctaagg

SEQ ID NO: 4574387 - DNA, 25 bp, Homo sapien
cagagtcggcttcaatggaacaaca

SEQ ID NO: 4574388 - DNA, 25 bp, Homo sapien
agtcggcttcaatggaacaacagcc

SEQ ID NO: 4574389 - DNA, 25 bp, Homo sapien
actggagaggcctagagagctagag

SEQ ID NO: 4574390 - DNA, 25 bp, Homo sapien
gtcccaacctaccagtgccacgtta

SEQ ID NO: 4574391 - DNA, 25 bp, Homo sapien
caacctaccagtgccacgttacagc

SEQ ID NO: 4574392 - DNA, 25 bp, Homo sapien
tgccacgttacagcccagagtgagt

SEQ ID NO: 4574393 - DNA, 25 bp, Homo sapien
gttacagcccagagtgagttctaca

SEQ ID NO: 4574394 - DNA, 25 bp, Homo sapien
tgggacaggggctggaggaggggct

SEQ ID NO: 4574395 - DNA, 25 bp, Homo sapien
gctggaggaggggctctggggtcca

SEQ ID NO: 4574396 - DNA, 25 bp, Homo sapien
ggctggaggaggggctctggggtcc

SEQ ID NO: 4574397 - DNA, 25 bp, Homo sapien
gacaggggctggaggaggggctctg

SEQ ID NO: 4574398 - DNA, 25 bp, Homo sapien
cccttcttgaagaagcctcgggcct

SEQ ID NO: 4574399 - DNA, 25 bp, Homo sapien
tgaagccggagccagggcgccatcc

SEQ ID NO: 4574400 - DNA, 25 bp, Homo sapien
ggcgccatccggtcagcacaatgac

SEQ ID NO: 4574401 - DNA, 25 bp, Homo sapien
ggcacaggaacaacacgcatggtgt

SEQ ID NO: 4574402 - DNA, 25 bp, Homo sapien
agtactgaactaggctggctgacca

SEQ ID NO: 4574403 - DNA, 25 bp, Homo sapien
gaggttggtgagtaaaagccaagcc

SEQ ID NO: 4574404 - DNA, 25 bp, Homo sapien
gctggctgaccactacttcctcaca

SEQ ID NO: 4574405 - DNA, 25 bp, Homo sapien
ctgccccatagcctgagtactgaac

SEQ ID NO: 4574406 - DNA, 25 bp, Homo sapien
atggcaaagttcacccggaggtcca

SEQ ID NO: 4574407 - DNA, 25 bp, Homo sapien
gattccgggtcacagcaatgatggg

SEQ ID NO: 4574408 - DNA, 25 bp, Homo sapien
gcggtatctggccacctggtgagca

SEQ ID NO: 4574409 - DNA, 25 bp, Homo sapien
agctgtctggggattccgggtcaca

SEQ ID NO: 4574410 - DNA, 25 bp, Homo sapien
tcagggcgttcaaacagctcaccct

SEQ ID NO: 4574411 - DNA, 25 bp, Homo sapien
cgaggccccaggaagtaccctcagg

SEQ ID NO: 4574412 - DNA, 25 bp, Homo sapien
catgctaggttaccatttgccctct

SEQ ID NO: 4574413 - DNA, 25 bp, Homo sapien
tacagaagagaccattacacgaggc

SEQ ID NO: 4574414 - DNA, 25 bp, Homo sapien
tgccaatgacagtgacaagccaagc

SEQ ID NO: 4574415 - DNA, 25 bp, Homo sapien
atggttggcagaacccctcctacac

SEQ ID NO: 4574416 - DNA, 25 bp, Homo sapien
tcctacaccctgaactctgacacag

SEQ ID NO: 4574417 - DNA, 25 bp, Homo sapien
cgtgactagcacctgactcttgaca

SEQ ID NO: 4574418 - DNA, 25 bp, Homo sapien
gagtgaaaccccagaagactagagc

SEQ ID NO: 4574419 - DNA, 25 bp, Homo sapien
gaaatctaggtgctactcagcaggc

SEQ ID NO: 4574420 - DNA, 25 bp, Homo sapien
ggtgtcagggaaacttaagccacat

SEQ ID NO: 4574421 - DNA, 25 bp, Homo sapien
caaggagcagtagcagagctgacca

SEQ ID NO: 4574422 - DNA, 25 bp, Homo sapien
gagcttgtgtcctggttctctgggc

SEQ ID NO: 4574423 - DNA, 25 bp, Homo sapien
ggctggagccctctgctgagggcat

SEQ ID NO: 4574424 - DNA, 25 bp, Homo sapien
agtgcatgggcactgcctgtttgct

SEQ ID NO: 4574425 - DNA, 25 bp, Homo sapien
cctacgggttggagctgttcagcca

SEQ ID NO: 4574426 - DNA, 25 bp, Homo sapien
gaggtaccactgagcagggcattcc

SEQ ID NO: 4574427 - DNA, 25 bp, Homo sapien
attaactcaatgtcctgggccaagg

SEQ ID NO: 4574428 - DNA, 25 bp, Homo sapien
cattgttcaatggactgctcccagg

SEQ ID NO: 4574429 - DNA, 25 bp, Homo sapien
gctacctagagtcctttgggcccag

SEQ ID NO: 4574430 - DNA, 25 bp, Homo sapien
tcaaataattgcaagtggtagatgg

SEQ ID NO: 4574431 - DNA, 25 bp, Homo sapien
ctcaaataattgcaagtggtagatg

SEQ ID NO: 4574432 - DNA, 25 bp, Homo sapien
tcctcaaataattgcaagtggtaga

SEQ ID NO: 4574433 - DNA, 25 bp, Homo sapien
cctcaaataattgcaagtggtagat

SEQ ID NO: 4574434 - DNA, 25 bp, Homo sapien
tttgtcagagctttgtcacaaaagg

SEQ ID NO: 4574435 - DNA, 25 bp, Homo sapien
aacatccgtccagagggacgagagg

SEQ ID NO: 4574436 - DNA, 25 bp, Homo sapien
cagagctttgtcacaaaaggagagg

SEQ ID NO: 4574437 - DNA, 25 bp, Homo sapien
ctaggggagcaacatccgtccagag

SEQ ID NO: 4574438 - DNA, 25 bp, Homo sapien
cggacagctggtgaggaacatgttc

SEQ ID NO: 4574439 - DNA, 25 bp, Homo sapien
aggccaagaggagcccaatcactgg

SEQ ID NO: 4574440 - DNA, 25 bp, Homo sapien
ggccaagaggagcccaatcactgga

SEQ ID NO: 4574441 - DNA, 25 bp, Homo sapien
gcccaatcactggagattctgagct

SEQ ID NO: 4574442 - DNA, 25 bp, Homo sapien
gacatctactgtgcctactgagcca

SEQ ID NO: 4574443 - DNA, 25 bp, Homo sapien
tgacatctactgtgcctactgagcc

SEQ ID NO: 4574444 - DNA, 25 bp, Homo sapien
catctactgtgcctactgagccaca

SEQ ID NO: 4574445 - DNA, 25 bp, Homo sapien
ctactgtgcctactgagccacagga

SEQ ID NO: 4574446 - DNA, 25 bp, Homo sapien
tcctacagacgagaagaggctctgt

SEQ ID NO: 4574447 - DNA, 25 bp, Homo sapien
tgttcctacagacgagaagaggctc

SEQ ID NO: 4574448 - DNA, 25 bp, Homo sapien
ggtgttcctacagacgagaagaggc

SEQ ID NO: 4574449 - DNA, 25 bp, Homo sapien
gcggtgttcctacagacgagaagag

SEQ ID NO: 4574450 - DNA, 25 bp, Homo sapien
taacagtgttacctgcccttagggc

SEQ ID NO: 4574451 - DNA, 25 bp, Homo sapien
tatcctaacagtgttacctgccctt

SEQ ID NO: 4574452 - DNA, 25 bp, Homo sapien
ggagcaagaggctggttatcctaac

SEQ ID NO: 4574453 - DNA, 25 bp, Homo sapien
caagaggctggttatcctaacagtg

SEQ ID NO: 4574454 - DNA, 25 bp, Homo sapien
gactccgtcagaactatcaaagctg

SEQ ID NO: 4574455 - DNA, 25 bp, Homo sapien
taaacacttataagaagcctccacg

SEQ ID NO: 4574456 - DNA, 25 bp, Homo sapien
cttgcggtggaacatggctgcctca

SEQ ID NO: 4574457 - DNA, 25 bp, Homo sapien
aagttcttcaaacagcttgcggtgg

SEQ ID NO: 4574458 - DNA, 25 bp, Homo sapien
tgtaagaacggaatgcatgcagccc

SEQ ID NO: 4574459 - DNA, 25 bp, Homo sapien
tatggaatttagaccctgagcctga

SEQ ID NO: 4574460 - DNA, 25 bp, Homo sapien
gaaaggaaaggtctagccacctgga

SEQ ID NO: 4574461 - DNA, 25 bp, Homo sapien
taggctctagcaccctggcatgaaa

SEQ ID NO: 4574462 - DNA, 25 bp, Homo sapien
tgagcatgacctaagactactggga

SEQ ID NO: 4574463 - DNA, 25 bp, Homo sapien
ggcactcgacatgacaagctggaag

SEQ ID NO: 4574464 - DNA, 25 bp, Homo sapien
cagggatccctgagttagctccaga

SEQ ID NO: 4574465 - DNA, 25 bp, Homo sapien
gcagcgggtctttcactggctagaa

SEQ ID NO: 4574466 - DNA, 25 bp, Homo sapien
agagcttgcatccatcccaggccca

SEQ ID NO: 4574467 - DNA, 25 bp, Homo sapien
aggataatgaaaggctgtgcataag

SEQ ID NO: 4574468 - DNA, 25 bp, Homo sapien
tcttgctgctgtaacttggaggata

SEQ ID NO: 4574469 - DNA, 25 bp, Homo sapien
tgtgcataagaggatggagaaacct

SEQ ID NO: 4574470 - DNA, 25 bp, Homo sapien
tgggggatggggcaggccccagaac

SEQ ID NO: 4574471 - DNA, 25 bp, Homo sapien
ggatggggcaggccccagaactcac

SEQ ID NO: 4574472 - DNA, 25 bp, Homo sapien
ctgggggatggggcaggccccagaa

SEQ ID NO: 4574473 - DNA, 25 bp, Homo sapien
ggggatggggcaggccccagaactc

SEQ ID NO: 4574474 - DNA, 25 bp, Homo sapien
tgtttctccagacagcatgatgcag

SEQ ID NO: 4574475 - DNA, 25 bp, Homo sapien
ctgtttctccagacagcatgatgca

SEQ ID NO: 4574476 - DNA, 25 bp, Homo sapien
tgggaagagatcagacagcctccag

SEQ ID NO: 4574477 - DNA, 25 bp, Homo sapien
ggaagagatcagacagcctccagag

SEQ ID NO: 4574478 - DNA, 25 bp, Homo sapien
catgggaagagatcagacagcctcc

SEQ ID NO: 4574479 - DNA, 25 bp, Homo sapien
agagatcagacagcctccagagctt

SEQ ID NO: 4574480 - DNA, 25 bp, Homo sapien
aacatgcgagtgtgcacatgagaat

SEQ ID NO: 4574481 - DNA, 25 bp, Homo sapien
catgcgagtgtgcacatgagaatgt

SEQ ID NO: 4574482 - DNA, 25 bp, Homo sapien
aaacatgcgagtgtgcacatgagaa

SEQ ID NO: 4574483 - DNA, 25 bp, Homo sapien
tgcgagtgtgcacatgagaatgtgg

SEQ ID NO: 4574484 - DNA, 25 bp, Homo sapien
ctcggttgcaccgtccaatcatcat

SEQ ID NO: 4574485 - DNA, 25 bp, Homo sapien
gctcggttgcaccgtccaatcatca

SEQ ID NO: 4574486 - DNA, 25 bp, Homo sapien
gatcccatcactggcctccaggatt

SEQ ID NO: 4574487 - DNA, 25 bp, Homo sapien
cactggcctccaggatttcatcaaa

SEQ ID NO: 4574488 - DNA, 25 bp, Homo sapien
cccatcactggcctccaggatttca

SEQ ID NO: 4574489 - DNA, 25 bp, Homo sapien
ccatcactggcctccaggatttcat

SEQ ID NO: 4574490 - DNA, 25 bp, Homo sapien
ccctgggattccctaacttagatgt

SEQ ID NO: 4574491 - DNA, 25 bp, Homo sapien
tatggcagtagacaagaagtttccc

SEQ ID NO: 4574492 - DNA, 25 bp, Homo sapien
agaggccacaagtatggcagtagac

SEQ ID NO: 4574493 - DNA, 25 bp, Homo sapien
cagtagacaagaagtttccctggga

SEQ ID NO: 4574494 - DNA, 25 bp, Homo sapien
ggaggaccccaaattgcctggtaca

SEQ ID NO: 4574495 - DNA, 25 bp, Homo sapien
tacacaaagctcagacagtaaggcc

SEQ ID NO: 4574496 - DNA, 25 bp, Homo sapien
tagggccaagttcagctagcctatg

SEQ ID NO: 4574497 - DNA, 25 bp, Homo sapien
gcctggtacagaggatatctacaca

SEQ ID NO: 4574498 - DNA, 25 bp, Homo sapien
ctgggaatcagacattcacaggatg

SEQ ID NO: 4574499 - DNA, 25 bp, Homo sapien
gctgggaatcagacattcacaggat

SEQ ID NO: 4574500 - DNA, 25 bp, Homo sapien
ggctgggaatcagacattcacagga

SEQ ID NO: 4574501 - DNA, 25 bp, Homo sapien
gctgcgctgggactggagcagggac

SEQ ID NO: 4574502 - DNA, 25 bp, Homo sapien
gggactggagcagggacaacgggga

SEQ ID NO: 4574503 - DNA, 25 bp, Homo sapien
catgcccttcggagagctgcgctgg

SEQ ID NO: 4574504 - DNA, 25 bp, Homo sapien
cccttcggagagctgcgctgggact

SEQ ID NO: 4574505 - DNA, 25 bp, Homo sapien
catgattctcgattttgctgataat

SEQ ID NO: 4574506 - DNA, 25 bp, Homo sapien
tgattctcgattttgctgataatct

SEQ ID NO: 4574507 - DNA, 25 bp, Homo sapien
tcatgattctcgattttgctgataa

SEQ ID NO: 4574508 - DNA, 25 bp, Homo sapien
attctcgattttgctgataatcttg

SEQ ID NO: 4574509 - DNA, 25 bp, Homo sapien
tcccttctctcccaggaccttccta

SEQ ID NO: 4574510 - DNA, 25 bp, Homo sapien
atgtccttctccgacacagcaggca

SEQ ID NO: 4574511 - DNA, 25 bp, Homo sapien
gtccttctccgacacagcaggcaag

SEQ ID NO: 4574512 - DNA, 25 bp, Homo sapien
tggatgtccttctccgacacagcag

SEQ ID NO: 4574513 - DNA, 25 bp, Homo sapien
ggatgtccttctccgacacagcagg

SEQ ID NO: 4574514 - DNA, 25 bp, Homo sapien
ggcagagcacgagggcacaggtcaa

SEQ ID NO: 4574515 - DNA, 25 bp, Homo sapien
aggcagagcacgagggcacaggtca

SEQ ID NO: 4574516 - DNA, 25 bp, Homo sapien
tataaaagggattcctgagaacaca

SEQ ID NO: 4574517 - DNA, 25 bp, Homo sapien
ccttgtgtcaaggaagtttagagac

SEQ ID NO: 4574518 - DNA, 25 bp, Homo sapien
tgttttagacaactggactccagct

SEQ ID NO: 4574519 - DNA, 25 bp, Homo sapien
acagactcaatctcactgccaggca

SEQ ID NO: 4574520 - DNA, 25 bp, Homo sapien
cacaggatgttctcgtcacactttt

SEQ ID NO: 4574521 - DNA, 25 bp, Homo sapien
ccacaggatgttctcgtcacacttt

SEQ ID NO: 4574522 - DNA, 25 bp, Homo sapien
catggcaacccagcgctttggagga

SEQ ID NO: 4574523 - DNA, 25 bp, Homo sapien
tagtactgggaagaaacatggcaac

SEQ ID NO: 4574524 - DNA, 25 bp, Homo sapien
cagtagcagcatcacctcagaagga

SEQ ID NO: 4574525 - DNA, 25 bp, Homo sapien
tcctcccgggaacaatgctcaagtc

SEQ ID NO: 4574526 - DNA, 25 bp, Homo sapien
caggtcctttagtgtctagagccac

SEQ ID NO: 4574527 - DNA, 25 bp, Homo sapien
ggtcagaagcaaagctttccgtggc

SEQ ID NO: 4574528 - DNA, 25 bp, Homo sapien
ccttgatgagcccagttcggatctc

SEQ ID NO: 4574529 - DNA, 25 bp, Homo sapien
tagagccacagcaacgggccggtag

SEQ ID NO: 4574530 - DNA, 25 bp, Homo sapien
cctgtttcctacaggccatcacaat

SEQ ID NO: 4574531 - DNA, 25 bp, Homo sapien
tcctacaggccatcacaatggccat

SEQ ID NO: 4574532 - DNA, 25 bp, Homo sapien
tgtggctaaacgaacactgcacccc

SEQ ID NO: 4574533 - DNA, 25 bp, Homo sapien
agtccactgtggctaaacgaacact

SEQ ID NO: 4574534 - DNA, 25 bp, Homo sapien
aacgtctccactgatcgggaagctg

SEQ ID NO: 4574535 - DNA, 25 bp, Homo sapien
ttcaacgtctccactgatcgggaag

SEQ ID NO: 4574536 - DNA, 25 bp, Homo sapien
gtctccactgatcgggaagctgggc

SEQ ID NO: 4574537 - DNA, 25 bp, Homo sapien
tccttcaacgtctccactgatcggg

SEQ ID NO: 4574538 - DNA, 25 bp, Homo sapien
tgggacacttcgaccatttccttca

SEQ ID NO: 4574539 - DNA, 25 bp, Homo sapien
ttcttgatctactgggacacttcga

SEQ ID NO: 4574540 - DNA, 25 bp, Homo sapien
tcttgatctactgggacacttcgac

SEQ ID NO: 4574541 - DNA, 25 bp, Homo sapien
gggacacttcgaccatttccttcaa

SEQ ID NO: 4574542 - DNA, 25 bp, Homo sapien
tttcaggagagaaaggtcactgccc

SEQ ID NO: 4574543 - DNA, 25 bp, Homo sapien
tgcaacttcctatgacctgagtcct

SEQ ID NO: 4574544 - DNA, 25 bp, Homo sapien
ggtctcaaatttcgaggctcaggca

SEQ ID NO: 4574545 - DNA, 25 bp, Homo sapien
gtagtatcccatgtagcacctaggt

SEQ ID NO: 4574546 - DNA, 25 bp, Homo sapien
ggtgaatcaatgtccaggcggcaca

SEQ ID NO: 4574547 - DNA, 25 bp, Homo sapien
gtgaatcaatgtccaggcggcacat

SEQ ID NO: 4574548 - DNA, 25 bp, Homo sapien
ggtggtgaatcaatgtccaggcggc

SEQ ID NO: 4574549 - DNA, 25 bp, Homo sapien
tggtgaatcaatgtccaggcggcac

SEQ ID NO: 4574550 - DNA, 25 bp, Homo sapien
ctccaggaatgtgtcagccatggct

SEQ ID NO: 4574551 - DNA, 25 bp, Homo sapien
gaatgaaggcagtcccggcttcact

SEQ ID NO: 4574552 - DNA, 25 bp, Homo sapien
gctgggtctgaatgaaggcagtccc

SEQ ID NO: 4574553 - DNA, 25 bp, Homo sapien
aatgtgtcagccatggctgcgtgca

SEQ ID NO: 4574554 - DNA, 25 bp, Homo sapien
gatgtgaaccagaccaggcagtgtt

SEQ ID NO: 4574555 - DNA, 25 bp, Homo sapien
caggtaattaactagcccaggtcac

SEQ ID NO: 4574556 - DNA, 25 bp, Homo sapien
gaagcttgctacacgtctcatcaga

SEQ ID NO: 4574557 - DNA, 25 bp, Homo sapien
gcttcggccaagcaaggctcaggaa

SEQ ID NO: 4574558 - DNA, 25 bp, Homo sapien
ctctctgggtggctcgagtagagta

SEQ ID NO: 4574559 - DNA, 25 bp, Homo sapien
cgagtagagtatacatctaaatcca

SEQ ID NO: 4574560 - DNA, 25 bp, Homo sapien
tgaaggcagtagtgaacagtctgtt

SEQ ID NO: 4574561 - DNA, 25 bp, Homo sapien
tctccaaagaaggcccgctgaggtc

SEQ ID NO: 4574562 - DNA, 25 bp, Homo sapien
cggctaacggttcaacatggcaaat

SEQ ID NO: 4574563 - DNA, 25 bp, Homo sapien
gttttgtatctcctagcacctagta

SEQ ID NO: 4574564 - DNA, 25 bp, Homo sapien
ggccacaagtcctcaaccacagatt

SEQ ID NO: 4574565 - DNA, 25 bp, Homo sapien
taagcccctaatatctactacgtac

SEQ ID NO: 4574566 - DNA, 25 bp, Homo sapien
agctgaatacggtgtgccctggaga

SEQ ID NO: 4574567 - DNA, 25 bp, Homo sapien
gttgggcttccggtgacataatgct

SEQ ID NO: 4574568 - DNA, 25 bp, Homo sapien
ggtgacataatgctccccttttggc

SEQ ID NO: 4574569 - DNA, 25 bp, Homo sapien
gcctcactagcaaagaccgctcaga

SEQ ID NO: 4574570 - DNA, 25 bp, Homo sapien
ctagagttgtatgtaaaacactcac

SEQ ID NO: 4574571 - DNA, 25 bp, Homo sapien
gccttggtttctcagggcggacttc

SEQ ID NO: 4574572 - DNA, 25 bp, Homo sapien
ggtttctcagggcggacttctggga

SEQ ID NO: 4574573 - DNA, 25 bp, Homo sapien
cttggtttctcagggcggacttctg

SEQ ID NO: 4574574 - DNA, 25 bp, Homo sapien
tttctcagggcggacttctgggaaa

SEQ ID NO: 4574575 - DNA, 25 bp, Homo sapien
gacagtgcctgccaggacatgtggc

SEQ ID NO: 4574576 - DNA, 25 bp, Homo sapien
tggacagtgcctgccaggacatgtg

SEQ ID NO: 4574577 - DNA, 25 bp, Homo sapien
gtgcctgccaggacatgtggcccca

SEQ ID NO: 4574578 - DNA, 25 bp, Homo sapien
cagtgcctgccaggacatgtggccc

SEQ ID NO: 4574579 - DNA, 25 bp, Homo sapien
agtctgactcactattgcatcctcc

SEQ ID NO: 4574580 - DNA, 25 bp, Homo sapien
ccagtctgactcactattgcatcct

SEQ ID NO: 4574581 - DNA, 25 bp, Homo sapien
cagtctgactcactattgcatcctc

SEQ ID NO: 4574582 - DNA, 25 bp, Homo sapien
gccagtctgactcactattgcatcc

SEQ ID NO: 4574583 - DNA, 25 bp, Homo sapien
ggaaggcacagacatgcagagccaa

SEQ ID NO: 4574584 - DNA, 25 bp, Homo sapien
ctaggaaggcacagacatgcagagc

SEQ ID NO: 4574585 - DNA, 25 bp, Homo sapien
taggaaggcacagacatgcagagcc

SEQ ID NO: 4574586 - DNA, 25 bp, Homo sapien
gaaggcacagacatgcagagccaac

SEQ ID NO: 4574587 - DNA, 25 bp, Homo sapien
tgcagtaagatcttcctcagagcca

SEQ ID NO: 4574588 - DNA, 25 bp, Homo sapien
ggaagcctggcgtatccactgatag

SEQ ID NO: 4574589 - DNA, 25 bp, Homo sapien
gagccttattcttgagcccgagccc

SEQ ID NO: 4574590 - DNA, 25 bp, Homo sapien
tccactgatagcagcacacaccatg

SEQ ID NO: 4574591 - DNA, 25 bp, Homo sapien
cctccaagccatcatgaaggcgttt

SEQ ID NO: 4574592 - DNA, 25 bp, Homo sapien
gcgtttcgatccacaactcttccga

SEQ ID NO: 4574593 - DNA, 25 bp, Homo sapien
tgcatccgttagaaagtctgcatca

SEQ ID NO: 4574594 - DNA, 25 bp, Homo sapien
tcttccgaacacctgcatccgttag

SEQ ID NO: 4574595 - DNA, 25 bp, Homo sapien
caagctcctccaaccctttccacct

SEQ ID NO: 4574596 - DNA, 25 bp, Homo sapien
ccatccccaagctcctccaaccctt

SEQ ID NO: 4574597 - DNA, 25 bp, Homo sapien
tccaaccctttccacctccatctta

SEQ ID NO: 4574598 - DNA, 25 bp, Homo sapien
attttttctccatccccaagctcct

SEQ ID NO: 4574599 - DNA, 25 bp, Homo sapien
gaaatgctaggactggcaacctcac

SEQ ID NO: 4574600 - DNA, 25 bp, Homo sapien
cagtgtgaaatgctaggactggcaa

SEQ ID NO: 4574601 - DNA, 25 bp, Homo sapien
gagaatcttgactgcagtattcagc

SEQ ID NO: 4574602 - DNA, 25 bp, Homo sapien
tggtccacagtgtgaaatgctagga

SEQ ID NO: 4574603 - DNA, 25 bp, Homo sapien
aggaaagaggcttagggctccccag

SEQ ID NO: 4574604 - DNA, 25 bp, Homo sapien
cttccaagactgcttgctggcatga

SEQ ID NO: 4574605 - DNA, 25 bp, Homo sapien
gaggaaagaggcttagggctcccca

SEQ ID NO: 4574606 - DNA, 25 bp, Homo sapien
aaagaggcttagggctccccaggag

SEQ ID NO: 4574607 - DNA, 25 bp, Homo sapien
tcaagtcagtaactgagaaatgagt

SEQ ID NO: 4574608 - DNA, 25 bp, Homo sapien
cacagacggcattagctgggcaccg

SEQ ID NO: 4574609 - DNA, 25 bp, Homo sapien
atcattaatcaagtcccaggagagg

SEQ ID NO: 4574610 - DNA, 25 bp, Homo sapien
tgtgcccgctacaaaagggccagga

SEQ ID NO: 4574611 - DNA, 25 bp, Homo sapien
attgaaaggttgagtcatcttcccc

SEQ ID NO: 4574612 - DNA, 25 bp, Homo sapien
aaaagcagaataattgaaaggttga

SEQ ID NO: 4574613 - DNA, 25 bp, Homo sapien
ttggtgatacgttacatttcccttc

SEQ ID NO: 4574614 - DNA, 25 bp, Homo sapien
cagatttggtgatacgttacatttc

SEQ ID NO: 4574615 - DNA, 25 bp, Homo sapien
ggcctcactttaacccgtaccagca

SEQ ID NO: 4574616 - DNA, 25 bp, Homo sapien
ccgtaccagcaaaggtccaagccct

SEQ ID NO: 4574617 - DNA, 25 bp, Homo sapien
tgattctaaacgcctttttgacaac

SEQ ID NO: 4574618 - DNA, 25 bp, Homo sapien
gtggaccttcactgtcggcctcact

SEQ ID NO: 4574619 - DNA, 25 bp, Homo sapien
gctcggtgggctatgactcgtctag

SEQ ID NO: 4574620 - DNA, 25 bp, Homo sapien
gacccacaccgtttgcgttcagtga

SEQ ID NO: 4574621 - DNA, 25 bp, Homo sapien
tcagtgaacgcgacagatttcctgc

SEQ ID NO: 4574622 - DNA, 25 bp, Homo sapien
cattttaagattgtgagctcggtgg

SEQ ID NO: 4574623 - DNA, 25 bp, Homo sapien
gggattccgcactagccgggcgact

SEQ ID NO: 4574624 - DNA, 25 bp, Homo sapien
gccccaggcgtgaggagccgttctc

SEQ ID NO: 4574625 - DNA, 25 bp, Homo sapien
ctgatctggaaggaacggcgctggg

SEQ ID NO: 4574626 - DNA, 25 bp, Homo sapien
ggactgatggcgtagcctcctgcac

SEQ ID NO: 4574627 - DNA, 25 bp, Homo sapien
tacgctgcaaagacgaagagatccg

SEQ ID NO: 4574628 - DNA, 25 bp, Homo sapien
gaccgactcgggctacgctgcaaag

SEQ ID NO: 4574629 - DNA, 25 bp, Homo sapien
agacgaagagatccggagccacggc

SEQ ID NO: 4574630 - DNA, 25 bp, Homo sapien
agcctcaaggttatcccgctgcggg

SEQ ID NO: 4574631 - DNA, 25 bp, Homo sapien
gcaggttgccctttcggtgggacta

SEQ ID NO: 4574632 - DNA, 25 bp, Homo sapien
gcggcggaacgcgcgggcaggttgc

SEQ ID NO: 4574633 - DNA, 25 bp, Homo sapien
gcggaacgcgcgggcaggttgccct

SEQ ID NO: 4574634 - DNA, 25 bp, Homo sapien
aacgcgcgggcaggttgccctttcg

SEQ ID NO: 4574635 - DNA, 25 bp, Homo sapien
ctgcggcggaaggacacagattcag

SEQ ID NO: 4574636 - DNA, 25 bp, Homo sapien
acctgatgaccaatggggacgcggc

SEQ ID NO: 4574637 - DNA, 25 bp, Homo sapien
gagtcacattttaagaaacctgatg

SEQ ID NO: 4574638 - DNA, 25 bp, Homo sapien
ggcgccgggccacctgttgccgcca

SEQ ID NO: 4574639 - DNA, 25 bp, Homo sapien
tgggcagggcccagatttatgggtt

SEQ ID NO: 4574640 - DNA, 25 bp, Homo sapien
ggttccggggcagcattctcccggc

SEQ ID NO: 4574641 - DNA, 25 bp, Homo sapien
actcctccgggtgtctgctctggcg

SEQ ID NO: 4574642 - DNA, 25 bp, Homo sapien
gcagggcccagatttatgggttccg

SEQ ID NO: 4574643 - DNA, 25 bp, Homo sapien
tgcgtggttggaggtcctggccgcc

SEQ ID NO: 4574644 - DNA, 25 bp, Homo sapien
acttgtgcgtggttggaggtcctgg

SEQ ID NO: 4574645 - DNA, 25 bp, Homo sapien
agagctgcagacttgtgcgtggttg

SEQ ID NO: 4574646 - DNA, 25 bp, Homo sapien
gagactgagctgaacggaaagttgg

SEQ ID NO: 4574647 - DNA, 25 bp, Homo sapien
taggaccattcattgtgttaggacc

SEQ ID NO: 4574648 - DNA, 25 bp, Homo sapien
gccgttttcctcttaggaccattca

SEQ ID NO: 4574649 - DNA, 25 bp, Homo sapien
cattgtgttaggaccgcggaacaag

SEQ ID NO: 4574650 - DNA, 25 bp, Homo sapien
gaactagggactgcgaagtgggcct

SEQ ID NO: 4574651 - DNA, 25 bp, Homo sapien
tcagtctgggccatccgaatgtgga

SEQ ID NO: 4574652 - DNA, 25 bp, Homo sapien
gatggagtcagtctgggccatccga

SEQ ID NO: 4574653 - DNA, 25 bp, Homo sapien
gtagttcttgggtcaagctctacca

SEQ ID NO: 4574654 - DNA, 25 bp, Homo sapien
catccgaatgtggagtagttcttgg

SEQ ID NO: 4574655 - DNA, 25 bp, Homo sapien
tgccccttggtaatggccccttgat

SEQ ID NO: 4574656 - DNA, 25 bp, Homo sapien
agggcagatggatcctggggtaaca

SEQ ID NO: 4574657 - DNA, 25 bp, Homo sapien
atggccccttgattcctcagggcag

SEQ ID NO: 4574658 - DNA, 25 bp, Homo sapien
tggtaatggccccttgattcctcag

SEQ ID NO: 4574659 - DNA, 25 bp, Homo sapien
tgagttccgatcacacgcatgattt

SEQ ID NO: 4574660 - DNA, 25 bp, Homo sapien
gggtcctgagtattaatgttggcat

SEQ ID NO: 4574661 - DNA, 25 bp, Homo sapien
ttaatgttggcatcgcccacctgac

SEQ ID NO: 4574662 - DNA, 25 bp, Homo sapien
ccgatcacacgcatgatttccttct

SEQ ID NO: 4574663 - DNA, 25 bp, Homo sapien
cactcaggtagccaaggacatgtct

SEQ ID NO: 4574664 - DNA, 25 bp, Homo sapien
actgtatttcaaggtatggccatcc

SEQ ID NO: 4574665 - DNA, 25 bp, Homo sapien
ccaaagatagggcaagtgtgagcat

SEQ ID NO: 4574666 - DNA, 25 bp, Homo sapien
gagcataagagggagaacaatacca

SEQ ID NO: 4574667 - DNA, 25 bp, Homo sapien
atggtcggacacagggcacacccag

SEQ ID NO: 4574668 - DNA, 25 bp, Homo sapien
ggcacacccagatgttcccatgctt

SEQ ID NO: 4574669 - DNA, 25 bp, Homo sapien
agacatggtcggacacagggcacac

SEQ ID NO: 4574670 - DNA, 25 bp, Homo sapien
tgtgcagacatggtcggacacaggg

SEQ ID NO: 4574671 - DNA, 25 bp, Homo sapien
gaaagagggccagaaatcatagata

SEQ ID NO: 4574672 - DNA, 25 bp, Homo sapien
aaaaacaggacatgggcaagctacc

SEQ ID NO: 4574673 - DNA, 25 bp, Homo sapien
tacaatgcttaaggcacagagtcca

SEQ ID NO: 4574674 - DNA, 25 bp, Homo sapien
caacatcactcttggccagatcatg

SEQ ID NO: 4574675 - DNA, 25 bp, Homo sapien
tatacagtttagattccgactctgc

SEQ ID NO: 4574676 - DNA, 25 bp, Homo sapien
cttcacaaagtgctatacagtttag

SEQ ID NO: 4574677 - DNA, 25 bp, Homo sapien
cgactctgcaggaaccgtgactgaa

SEQ ID NO: 4574678 - DNA, 25 bp, Homo sapien
caggaaccgtgactgaatggatcgg

SEQ ID NO: 4574679 - DNA, 25 bp, Homo sapien
agctttccctagagaggctggttag

SEQ ID NO: 4574680 - DNA, 25 bp, Homo sapien
agccaggtagatgggtacagctttc

SEQ ID NO: 4574681 - DNA, 25 bp, Homo sapien
ggctggttagctgatgattgggagt

SEQ ID NO: 4574682 - DNA, 25 bp, Homo sapien
ctggttagctgatgattgggagtgg

SEQ ID NO: 4574683 - DNA, 25 bp, Homo sapien
gagggcatcctgtgctgtccttttc

SEQ ID NO: 4574684 - DNA, 25 bp, Homo sapien
tcatcctgttgtatctctggaccag

SEQ ID NO: 4574685 - DNA, 25 bp, Homo sapien
cctgttgtatctctggaccagctca

SEQ ID NO: 4574686 - DNA, 25 bp, Homo sapien
ggaccagctcatccttggagggcat

SEQ ID NO: 4574687 - DNA, 25 bp, Homo sapien
cagattatagagcatggtgtgagcc

SEQ ID NO: 4574688 - DNA, 25 bp, Homo sapien
tctcgtgacagatttaggtagggcc

SEQ ID NO: 4574689 - DNA, 25 bp, Homo sapien
cattcaggttatactccagaggagg

SEQ ID NO: 4574690 - DNA, 25 bp, Homo sapien
taggatcagatcaagccggctttgc

SEQ ID NO: 4574691 - DNA, 25 bp, Homo sapien
taagccaatggaaaggacgcaagcc

SEQ ID NO: 4574692 - DNA, 25 bp, Homo sapien
tagtgaacatgcaactacatggtga

SEQ ID NO: 4574693 - DNA, 25 bp, Homo sapien
tagaatctggacctcatctttagaa

SEQ ID NO: 4574694 - DNA, 25 bp, Homo sapien
gactcatctcctgattagaatctgg

SEQ ID NO: 4574695 - DNA, 25 bp, Homo sapien
ggaggaacagacagcacaaatcatg

SEQ ID NO: 4574696 - DNA, 25 bp, Homo sapien
tatccataatgagggaggaacagac

SEQ ID NO: 4574697 - DNA, 25 bp, Homo sapien
caatgtaaatagagtcaaggtggcc

SEQ ID NO: 4574698 - DNA, 25 bp, Homo sapien
atgtattcacaaatggaggcaatgt

SEQ ID NO: 4574699 - DNA, 25 bp, Homo sapien
caggtagatgcctttgccataggct

SEQ ID NO: 4574700 - DNA, 25 bp, Homo sapien
aggtagatgcctttgccataggctg

SEQ ID NO: 4574701 - DNA, 25 bp, Homo sapien
ggtagatgcctttgccataggctgc

SEQ ID NO: 4574702 - DNA, 25 bp, Homo sapien
tgaaaagtggatgcaggttaacctg

SEQ ID NO: 4574703 - DNA, 25 bp, Homo sapien
catactgacacattcgagagtggga

SEQ ID NO: 4574704 - DNA, 25 bp, Homo sapien
gatgagtaatatgagcctgggccct

SEQ ID NO: 4574705 - DNA, 25 bp, Homo sapien
taagcacctattctcggaaagccaa

SEQ ID NO: 4574706 - DNA, 25 bp, Homo sapien
tctagggaactccacaagacaggtt

SEQ ID NO: 4574707 - DNA, 25 bp, Homo sapien
caaaaacagcttactctagagcagc

SEQ ID NO: 4574708 - DNA, 25 bp, Homo sapien
tcacagtggctacaatcagcaattc

SEQ ID NO: 4574709 - DNA, 25 bp, Homo sapien
acagccacgttctctattcatacag

SEQ ID NO: 4574710 - DNA, 25 bp, Homo sapien
cgcaggatcgaatgccagttctcaa

SEQ ID NO: 4574711 - DNA, 25 bp, Homo sapien
cagcccattgcgcaggatcgaatgc

SEQ ID NO: 4574712 - DNA, 25 bp, Homo sapien
cagtttggtgtaggatgcattgacc

SEQ ID NO: 4574713 - DNA, 25 bp, Homo sapien
cattgaccagcccattgcgcaggat

SEQ ID NO: 4574714 - DNA, 25 bp, Homo sapien
gatacagtcacaggcatgcaagatg

SEQ ID NO: 4574715 - DNA, 25 bp, Homo sapien
gacatgaagatggacaggtacacct

SEQ ID NO: 4574716 - DNA, 25 bp, Homo sapien
aaggcagggtagaatacatgtctcc

SEQ ID NO: 4574717 - DNA, 25 bp, Homo sapien
ggtacacctagtgatggacatgcac

SEQ ID NO: 4574718 - DNA, 25 bp, Homo sapien
tagcatttagtaagtatctgctgac

SEQ ID NO: 4574719 - DNA, 25 bp, Homo sapien
aataaagaccacattatatgtacct

SEQ ID NO: 4574720 - DNA, 25 bp, Homo sapien
tagcacctaccacaatagcatttag

SEQ ID NO: 4574721 - DNA, 25 bp, Homo sapien
tggacacatgtaacacaaactcata

SEQ ID NO: 4574722 - DNA, 25 bp, Homo sapien
aaggtgctgccatagagcttcttgg

SEQ ID NO: 4574723 - DNA, 25 bp, Homo sapien
agcttcttggcggtccggaaccgag

SEQ ID NO: 4574724 - DNA, 25 bp, Homo sapien
ctggtgtgaggtgtgcatgaacttc

SEQ ID NO: 4574725 - DNA, 25 bp, Homo sapien
gtccggaaccgagcctccttggcag

SEQ ID NO: 4574726 - DNA, 25 bp, Homo sapien
cagagcagaaatcgagatcagggag

SEQ ID NO: 4574727 - DNA, 25 bp, Homo sapien
gcaatgtaggcagatctaggaccaa

SEQ ID NO: 4574728 - DNA, 25 bp, Homo sapien
caaagactaagttgatggacagagc

SEQ ID NO: 4574729 - DNA, 25 bp, Homo sapien
cacacaagggaaatatgctaaggcc

SEQ ID NO: 4574730 - DNA, 25 bp, Homo sapien
atgtgtgacctgttgctagagatga

SEQ ID NO: 4574731 - DNA, 25 bp, Homo sapien
agaggtagtttgacaatgtgtgacc

SEQ ID NO: 4574732 - DNA, 25 bp, Homo sapien
gtgtgacctgttgctagagatgatc

SEQ ID NO: 4574733 - DNA, 25 bp, Homo sapien
ggtagtttgacaatgtgtgacctgt

SEQ ID NO: 4574734 - DNA, 25 bp, Homo sapien
tgtgaaatgtcaaggtcactatctg

SEQ ID NO: 4574735 - DNA, 25 bp, Homo sapien
tcctgtgggtgatagtgcttatgaa

SEQ ID NO: 4574736 - DNA, 25 bp, Homo sapien
cctgggctgtccaaattgtgtgaaa

SEQ ID NO: 4574737 - DNA, 25 bp, Homo sapien
tctgaacaagccagtcttcctctgc

SEQ ID NO: 4574738 - DNA, 25 bp, Homo sapien
gccaggggatccaacttgtccatct

SEQ ID NO: 4574739 - DNA, 25 bp, Homo sapien
gatgggccaggggatccaacttgtc

SEQ ID NO: 4574740 - DNA, 25 bp, Homo sapien
tgggccaggggatccaacttgtcca

SEQ ID NO: 4574741 - DNA, 25 bp, Homo sapien
gggccaggggatccaacttgtccat

SEQ ID NO: 4574742 - DNA, 25 bp, Homo sapien
ggagaggtgggagcctacctgcttt

SEQ ID NO: 4574743 - DNA, 25 bp, Homo sapien
aaaacaacatgcaggtgggtctccc

SEQ ID NO: 4574744 - DNA, 25 bp, Homo sapien
gagtcaaaggatggtcaccgctcca

SEQ ID NO: 4574745 - DNA, 25 bp, Homo sapien
caaaggatggtcaccgctccatgtg

SEQ ID NO: 4574746 - DNA, 25 bp, Homo sapien
gacagccttgagtcaaaggatggtc

SEQ ID NO: 4574747 - DNA, 25 bp, Homo sapien
gtaaatgagtacaaatgaatgtcta

SEQ ID NO: 4574748 - DNA, 25 bp, Homo sapien
gggtcatctcccgaatagacatcac

SEQ ID NO: 4574749 - DNA, 25 bp, Homo sapien
tctgaagccgctcataattcttctt

SEQ ID NO: 4574750 - DNA, 25 bp, Homo sapien
acatcacactatccagagctttctg

SEQ ID NO: 4574751 - DNA, 25 bp, Homo sapien
cccgaatagacatcacactatccag

SEQ ID NO: 4574752 - DNA, 25 bp, Homo sapien
tgaaaaggggctagatgtaccaaaa

SEQ ID NO: 4574753 - DNA, 25 bp, Homo sapien
taagatgtgatgaaaaggggctaga

SEQ ID NO: 4574754 - DNA, 25 bp, Homo sapien
aagtaagatgtgatgaaaaggggct

SEQ ID NO: 4574755 - DNA, 25 bp, Homo sapien
atgtgatgaaaaggggctagatgta

SEQ ID NO: 4574756 - DNA, 25 bp, Homo sapien
ggactctaaagctgccctacacatg

SEQ ID NO: 4574757 - DNA, 25 bp, Homo sapien
ccaccacagagggataaggctcaaa

SEQ ID NO: 4574758 - DNA, 25 bp, Homo sapien
gatgatgctctttctaggggactct

SEQ ID NO: 4574759 - DNA, 25 bp, Homo sapien
tctaaagctgccctacacatggcca

SEQ ID NO: 4574760 - DNA, 25 bp, Homo sapien
tgcagctccagacatgacgcccagt

SEQ ID NO: 4574761 - DNA, 25 bp, Homo sapien
atagttcacgagtacagacagctgg

SEQ ID NO: 4574762 - DNA, 25 bp, Homo sapien
gacatgacgcccagtgtgtagaagg

SEQ ID NO: 4574763 - DNA, 25 bp, Homo sapien
tgtgtagaaggagaaaacgcatagt

SEQ ID NO: 4574764 - DNA, 25 bp, Homo sapien
caatgttggaatcctctgttctgca

SEQ ID NO: 4574765 - DNA, 25 bp, Homo sapien
tgctcatcacacaccacacagtact

SEQ ID NO: 4574766 - DNA, 25 bp, Homo sapien
ctcattcaatgttggaatcctctgt

SEQ ID NO: 4574767 - DNA, 25 bp, Homo sapien
catcacacaccacacagtactcatt

SEQ ID NO: 4574768 - DNA, 25 bp, Homo sapien
tgaacgaggaatccatactccagag

SEQ ID NO: 4574769 - DNA, 25 bp, Homo sapien
aacgaggaatccatactccagagtg

SEQ ID NO: 4574770 - DNA, 25 bp, Homo sapien
gaacgaggaatccatactccagagt

SEQ ID NO: 4574771 - DNA, 25 bp, Homo sapien
ctgaacgaggaatccatactccaga

SEQ ID NO: 4574772 - DNA, 25 bp, Homo sapien
cattttgagaaactacactcccaca

SEQ ID NO: 4574773 - DNA, 25 bp, Homo sapien
ttgagaaactacactcccacagttc

SEQ ID NO: 4574774 - DNA, 25 bp, Homo sapien
cccattttgagaaactacactccca

SEQ ID NO: 4574775 - DNA, 25 bp, Homo sapien
ttttgagaaactacactcccacagt

SEQ ID NO: 4574776 - DNA, 25 bp, Homo sapien
tccgtgctgggggagggaggcccac

SEQ ID NO: 4574777 - DNA, 25 bp, Homo sapien
ggagaggtccgtgctgggggaggga

SEQ ID NO: 4574778 - DNA, 25 bp, Homo sapien
gtccgtgctgggggagggaggccca

SEQ ID NO: 4574779 - DNA, 25 bp, Homo sapien
caaaggagaggtccgtgctggggga

SEQ ID NO: 4574780 - DNA, 25 bp, Homo sapien
ttgcctttcagcatggagtcctgta

SEQ ID NO: 4574781 - DNA, 25 bp, Homo sapien
aacccgaagctctggtacacctagt

SEQ ID NO: 4574782 - DNA, 25 bp, Homo sapien
gctgggagggtagccaaacacttcc

SEQ ID NO: 4574783 - DNA, 25 bp, Homo sapien
gatggaacggttcatgaggcgccca

SEQ ID NO: 4574784 - DNA, 25 bp, Homo sapien
taaaactggggatttcataggatcc

SEQ ID NO: 4574785 - DNA, 25 bp, Homo sapien
agaagtgataaaactggggatttca

SEQ ID NO: 4574786 - DNA, 25 bp, Homo sapien
agcaaagagaagtgataaaactggg

SEQ ID NO: 4574787 - DNA, 25 bp, Homo sapien
gagagagcaaagagaagtgataaaa

SEQ ID NO: 4574788 - DNA, 25 bp, Homo sapien
gccttgaaccaactgtgcctcttct

SEQ ID NO: 4574789 - DNA, 25 bp, Homo sapien
taccacttgccttgaaccaactgtg

SEQ ID NO: 4574790 - DNA, 25 bp, Homo sapien
acttcttgatggtaccacttgcctt

SEQ ID NO: 4574791 - DNA, 25 bp, Homo sapien
gaggccagctcggaacttcttgatg

SEQ ID NO: 4574792 - DNA, 25 bp, Homo sapien
tttttcaactgaagacccagcccaa

SEQ ID NO: 4574793 - DNA, 25 bp, Homo sapien
aatccttccttatttgatggctgga

SEQ ID NO: 4574794 - DNA, 25 bp, Homo sapien
tttgatggctggaaaacctcaatgg

SEQ ID NO: 4574795 - DNA, 25 bp, Homo sapien
ttcaactgaagacccagcccaaatc

SEQ ID NO: 4574796 - DNA, 25 bp, Homo sapien
aatagcctgcagattgagcccaagg

SEQ ID NO: 4574797 - DNA, 25 bp, Homo sapien
taaaaagcccctaccaatagcctgc

SEQ ID NO: 4574798 - DNA, 25 bp, Homo sapien
taacttagggctttggattagacca

SEQ ID NO: 4574799 - DNA, 25 bp, Homo sapien
tcattaggcaagaaggcctttaggg

SEQ ID NO: 4574800 - DNA, 25 bp, Homo sapien
gcctcaacacaataggttctgtccg

SEQ ID NO: 4574801 - DNA, 25 bp, Homo sapien
gaaaatcgcagcctcaacacaatag

SEQ ID NO: 4574802 - DNA, 25 bp, Homo sapien
cacaataggttctgtccggaggacc

SEQ ID NO: 4574803 - DNA, 25 bp, Homo sapien
aggttctgtccggaggaccttccag

SEQ ID NO: 4574804 - DNA, 25 bp, Homo sapien
gatgtggaggtcaatgtccacgtca

SEQ ID NO: 4574805 - DNA, 25 bp, Homo sapien
agctgatgttgatgtggaggtcaat

SEQ ID NO: 4574806 - DNA, 25 bp, Homo sapien
ggtcaatgtccacgtcatcgatagt

SEQ ID NO: 4574807 - DNA, 25 bp, Homo sapien
tgtccacgtcatcgatagttccata

SEQ ID NO: 4574808 - DNA, 25 bp, Homo sapien
tgagactcattaagggagaaagaag

SEQ ID NO: 4574809 - DNA, 25 bp, Homo sapien
gagatacaggtgacaacaggtgaga

SEQ ID NO: 4574810 - DNA, 25 bp, Homo sapien
caacaggtgagactcattaagggag

SEQ ID NO: 4574811 - DNA, 25 bp, Homo sapien
ggtgacaacaggtgagactcattaa

SEQ ID NO: 4574812 - DNA, 25 bp, Homo sapien
aagcatttcttacctgaaaggtgaa

SEQ ID NO: 4574813 - DNA, 25 bp, Homo sapien
ctgatcaggatctacttccaggcca

SEQ ID NO: 4574814 - DNA, 25 bp, Homo sapien
ggatctacttccaggccaaaagcat

SEQ ID NO: 4574815 - DNA, 25 bp, Homo sapien
aaggtgaaactactggcccagaggg

SEQ ID NO: 4574816 - DNA, 25 bp, Homo sapien
tgatggatacagagttctcactgta

SEQ ID NO: 4574817 - DNA, 25 bp, Homo sapien
ctgatggatacagagttctcactgt

SEQ ID NO: 4574818 - DNA, 25 bp, Homo sapien
ctcactgtagatctccttcacggct

SEQ ID NO: 4574819 - DNA, 25 bp, Homo sapien
tagatctccttcacggcttcaatgt

SEQ ID NO: 4574820 - DNA, 25 bp, Homo sapien
ggtgtcgatacaggtcagctgcaca

SEQ ID NO: 4574821 - DNA, 25 bp, Homo sapien
tgggtgtcgatacaggtcagctgca

SEQ ID NO: 4574822 - DNA, 25 bp, Homo sapien
ctgtgggtgtcgatacaggtcagct

SEQ ID NO: 4574823 - DNA, 25 bp, Homo sapien
gtgtcgatacaggtcagctgcacag

SEQ ID NO: 4574824 - DNA, 25 bp, Homo sapien
ctccgagtcgtcatcattccagaac

SEQ ID NO: 4574825 - DNA, 25 bp, Homo sapien
tcattccagaactggcctttgatgt

SEQ ID NO: 4574826 - DNA, 25 bp, Homo sapien
tcattatctccctccgagtcgtcat

SEQ ID NO: 4574827 - DNA, 25 bp, Homo sapien
atcattccagaactggcctttgatg

SEQ ID NO: 4574828 - DNA, 25 bp, Homo sapien
cctattatcccatggaaaggcgtgg

SEQ ID NO: 4574829 - DNA, 25 bp, Homo sapien
ggttgactcctaagcatatctgggt

SEQ ID NO: 4574830 - DNA, 25 bp, Homo sapien
gatatcatgctttgttaggtcccta

SEQ ID NO: 4574831 - DNA, 25 bp, Homo sapien
taccaagaaagggtgagatctgcac

SEQ ID NO: 4574832 - DNA, 25 bp, Homo sapien
ttgaacaatcagttggagaggtggg

SEQ ID NO: 4574833 - DNA, 25 bp, Homo sapien
ggagaggtgggcagtcagttctcac

SEQ ID NO: 4574834 - DNA, 25 bp, Homo sapien
ttggagaggtgggcagtcagttctc

SEQ ID NO: 4574835 - DNA, 25 bp, Homo sapien
cctttgaacaatcagttggagaggt

SEQ ID NO: 4574836 - DNA, 25 bp, Homo sapien
gctgttgcggtggtaacaagtcact

SEQ ID NO: 4574837 - DNA, 25 bp, Homo sapien
tagggcacgatgtcagggacaactg

SEQ ID NO: 4574838 - DNA, 25 bp, Homo sapien
actctcaggtcagtgctaggcagca

SEQ ID NO: 4574839 - DNA, 25 bp, Homo sapien
caacgagatgggcatttaggagacc

SEQ ID NO: 4574840 - DNA, 25 bp, Homo sapien
agatccagaatgtgaagatcttggg

SEQ ID NO: 4574841 - DNA, 25 bp, Homo sapien
ggtgaggttcgtgagatttgaaaat

SEQ ID NO: 4574842 - DNA, 25 bp, Homo sapien
tgaaaataaacagtcaagtgctgat

SEQ ID NO: 4574843 - DNA, 25 bp, Homo sapien
cttcaagagcagctgagatccagaa

SEQ ID NO: 4574844 - DNA, 25 bp, Homo sapien
aatgtccagcctgggttgccctggg

SEQ ID NO: 4574845 - DNA, 25 bp, Homo sapien
cactaaatgtccagcctgggttgcc

SEQ ID NO: 4574846 - DNA, 25 bp, Homo sapien
taaatgtccagcctgggttgccctg

SEQ ID NO: 4574847 - DNA, 25 bp, Homo sapien
gtaggatgacggcagcgttaggcca

SEQ ID NO: 4574848 - DNA, 25 bp, Homo sapien
gaacgctttatgagtttccacgaga

SEQ ID NO: 4574849 - DNA, 25 bp, Homo sapien
accaggctgctttagtgaaagggac

SEQ ID NO: 4574850 - DNA, 25 bp, Homo sapien
gaaggtgttaaaactcagcggctaa

SEQ ID NO: 4574851 - DNA, 25 bp, Homo sapien
aagagacagttcagagattaccggc

SEQ ID NO: 4574852 - DNA, 25 bp, Homo sapien
ttgggctcccggctttgtggtcctg

SEQ ID NO: 4574853 - DNA, 25 bp, Homo sapien
gaggaggttactccactccatcccg

SEQ ID NO: 4574854 - DNA, 25 bp, Homo sapien
tcacgtctagtcaaagcagcttcag

SEQ ID NO: 4574855 - DNA, 25 bp, Homo sapien
catgggcgcttctctaggtgtgaca

SEQ ID NO: 4574856 - DNA, 25 bp, Homo sapien
ctatctcgggcaccccgcagggaga

SEQ ID NO: 4574857 - DNA, 25 bp, Homo sapien
cgactcccgcaggttagcgctatct

SEQ ID NO: 4574858 - DNA, 25 bp, Homo sapien
aagaatcactgaggggcgactcccg

SEQ ID NO: 4574859 - DNA, 25 bp, Homo sapien
agaggacacggctgccccgcgaaaa

SEQ ID NO: 4574860 - DNA, 25 bp, Homo sapien
gaaagacgctctgggcccgatctat

SEQ ID NO: 4574861 - DNA, 25 bp, Homo sapien
ggcctgagtgaagcctgtccagcct

SEQ ID NO: 4574862 - DNA, 25 bp, Homo sapien
gaacctcccggtccaagcctctcac

SEQ ID NO: 4574863 - DNA, 25 bp, Homo sapien
ccgccgggcctgagtgaagcctgtc

SEQ ID NO: 4574864 - DNA, 25 bp, Homo sapien
tgcccgtggtggcggccacacaggc

SEQ ID NO: 4574865 - DNA, 25 bp, Homo sapien
cggccgcaccgccctgtgcccgtgg

SEQ ID NO: 4574866 - DNA, 25 bp, Homo sapien
gtggcccggccgcaccgccctgtgc

SEQ ID NO: 4574867 - DNA, 25 bp, Homo sapien
gtggtggcggccacacaggccagcc

SEQ ID NO: 4574868 - DNA, 25 bp, Homo sapien
ggcggagcggcaggccaaggggcgg

SEQ ID NO: 4574869 - DNA, 25 bp, Homo sapien
cgcaccccacgcctcgtcgttccgt

SEQ ID NO: 4574870 - DNA, 25 bp, Homo sapien
cggccgcagccgacgggacgagcgg

SEQ ID NO: 4574871 - DNA, 25 bp, Homo sapien
gtcgttccgtcacgggcgcgctcag

SEQ ID NO: 4574872 - DNA, 25 bp, Homo sapien
agcagccgacgccagccttgagacg

SEQ ID NO: 4574873 - DNA, 25 bp, Homo sapien
ctgcgcggcggtcgctagtcgggaa

SEQ ID NO: 4574874 - DNA, 25 bp, Homo sapien
ggagccttccaaaggagaatacttg

SEQ ID NO: 4574875 - DNA, 25 bp, Homo sapien
ctcgcgcggtgacacgatggcacgt

SEQ ID NO: 4574876 - DNA, 25 bp, Homo sapien
gcaggtagagactgagggaagtcct

SEQ ID NO: 4574877 - DNA, 25 bp, Homo sapien
tctctggttcgacaatggaagtcga

SEQ ID NO: 4574878 - DNA, 25 bp, Homo sapien
gcaacccaggttgcctgtaggccgg

SEQ ID NO: 4574879 - DNA, 25 bp, Homo sapien
tgcaggattctctggttcgacaatg

SEQ ID NO: 4574880 - DNA, 25 bp, Homo sapien
catcaagggccccgtaatagctttt

SEQ ID NO: 4574881 - DNA, 25 bp, Homo sapien
tcaagggccccgtaatagcttttga

SEQ ID NO: 4574882 - DNA, 25 bp, Homo sapien
gaaccaagtatgtatgggagtgttt

SEQ ID NO: 4574883 - DNA, 25 bp, Homo sapien
caagggccccgtaatagcttttgag

SEQ ID NO: 4574884 - DNA, 25 bp, Homo sapien
ttggcttggaattcagacagtgttg

SEQ ID NO: 4574885 - DNA, 25 bp, Homo sapien
tttggcttggaattcagacagtgtt

SEQ ID NO: 4574886 - DNA, 25 bp, Homo sapien
atttggcttggaattcagacagtgt

SEQ ID NO: 4574887 - DNA, 25 bp, Homo sapien
tcactggagcgtgagtcagccaagt

SEQ ID NO: 4574888 - DNA, 25 bp, Homo sapien
gaccaaggtcactggagcgtgagtc

SEQ ID NO: 4574889 - DNA, 25 bp, Homo sapien
gagccagtactgctcaggtattttg

SEQ ID NO: 4574890 - DNA, 25 bp, Homo sapien
gaatatctggtcaagaccaaggtca

SEQ ID NO: 4574891 - DNA, 25 bp, Homo sapien
ccacacagtcctgatgaagttgtca

SEQ ID NO: 4574892 - DNA, 25 bp, Homo sapien
taagaagtcatatccagacctgagc

SEQ ID NO: 4574893 - DNA, 25 bp, Homo sapien
gaggactcaataaagcaactggatg

SEQ ID NO: 4574894 - DNA, 25 bp, Homo sapien
gcaagaattgcccatcaccaaggga

SEQ ID NO: 4574895 - DNA, 25 bp, Homo sapien
gccccgacacgtagcacagtgctta

SEQ ID NO: 4574896 - DNA, 25 bp, Homo sapien
tagggtggtcactctaggtgtcagc

SEQ ID NO: 4574897 - DNA, 25 bp, Homo sapien
tgcttccatgtgaatattagtttga

SEQ ID NO: 4574898 - DNA, 25 bp, Homo sapien
gtgtctctatttgtgtctagggtgg

SEQ ID NO: 4574899 - DNA, 25 bp, Homo sapien
gtgctggtgcacatacaccctctgg

SEQ ID NO: 4574900 - DNA, 25 bp, Homo sapien
gctggtgcacatacaccctctggtt

SEQ ID NO: 4574901 - DNA, 25 bp, Homo sapien
ggtgcacatacaccctctggttctt

SEQ ID NO: 4574902 - DNA, 25 bp, Homo sapien
caccctctggttcttccctcggttg

SEQ ID NO: 4574903 - DNA, 25 bp, Homo sapien
gaatctactttacaggtgggcaaac

SEQ ID NO: 4574904 - DNA, 25 bp, Homo sapien
catgttatcagatcagaggccttca

SEQ ID NO: 4574905 - DNA, 25 bp, Homo sapien
gaagcacctcggttaagcacatgtg

SEQ ID NO: 4574906 - DNA, 25 bp, Homo sapien
gatcagctttatatggcacccactg

SEQ ID NO: 4574907 - DNA, 25 bp, Homo sapien
gggaaacaggaggtgtctcagctca

SEQ ID NO: 4574908 - DNA, 25 bp, Homo sapien
ggaaacaggaggtgtctcagctcag

SEQ ID NO: 4574909 - DNA, 25 bp, Homo sapien
gcctctgtctacctggattggcaag

SEQ ID NO: 4574910 - DNA, 25 bp, Homo sapien
caggtggccagaactccctctttct

SEQ ID NO: 4574911 - DNA, 25 bp, Homo sapien
cattacctgcatgtgagcctagacc

SEQ ID NO: 4574912 - DNA, 25 bp, Homo sapien
gcaggcacagaacaacccacttgat

SEQ ID NO: 4574913 - DNA, 25 bp, Homo sapien
taaatctgggcttcccttgcggaga

SEQ ID NO: 4574914 - DNA, 25 bp, Homo sapien
caatccttagagtggccttagcccc

SEQ ID NO: 4574915 - DNA, 25 bp, Homo sapien
tctgtggctggtcagtgaaagcagg

SEQ ID NO: 4574916 - DNA, 25 bp, Homo sapien
tttctgtggctggtcagtgaaagca

SEQ ID NO: 4574917 - DNA, 25 bp, Homo sapien
ttctgtggctggtcagtgaaagcag

SEQ ID NO: 4574918 - DNA, 25 bp, Homo sapien
ctttctgtggctggtcagtgaaagc

SEQ ID NO: 4574919 - DNA, 25 bp, Homo sapien
catcgcctgaatagcagtctgggca

SEQ ID NO: 4574920 - DNA, 25 bp, Homo sapien
gtctgggcactagttggattgtcaa

SEQ ID NO: 4574921 - DNA, 25 bp, Homo sapien
gccattcatcgcctgaatagcagtc

SEQ ID NO: 4574922 - DNA, 25 bp, Homo sapien
cctgaatagcagtctgggcactagt

SEQ ID NO: 4574923 - DNA, 25 bp, Homo sapien
tcactgcattatggaagggcaatcg

SEQ ID NO: 4574924 - DNA, 25 bp, Homo sapien
catgcccggccaaggcttgttgttg

SEQ ID NO: 4574925 - DNA, 25 bp, Homo sapien
taaacttaggcccatcactggtttg

SEQ ID NO: 4574926 - DNA, 25 bp, Homo sapien
caaactttccctctcggattcaaga

SEQ ID NO: 4574927 - DNA, 25 bp, Homo sapien
ggtgatagatgaagaggttacagcc

SEQ ID NO: 4574928 - DNA, 25 bp, Homo sapien
tatgagttccgcatcaccaaactcc

SEQ ID NO: 4574929 - DNA, 25 bp, Homo sapien
gttggtggctcgatccacaaagact

SEQ ID NO: 4574930 - DNA, 25 bp, Homo sapien
gtctgtatgagttccgcatcaccaa

SEQ ID NO: 4574931 - DNA, 25 bp, Homo sapien
gtgctcactggggcataggccgacg

SEQ ID NO: 4574932 - DNA, 25 bp, Homo sapien
tcactggggcataggccgacggata

SEQ ID NO: 4574933 - DNA, 25 bp, Homo sapien
ctcactggggcataggccgacggat

SEQ ID NO: 4574934 - DNA, 25 bp, Homo sapien
ggggcataggccgacggataggctg

SEQ ID NO: 4574935 - DNA, 25 bp, Homo sapien
tgcgtagtggtgcatcccagcgtag

SEQ ID NO: 4574936 - DNA, 25 bp, Homo sapien
cgtagtggtgcatcccagcgtaggc

SEQ ID NO: 4574937 - DNA, 25 bp, Homo sapien
gcgtagtggtgcatcccagcgtagg

SEQ ID NO: 4574938 - DNA, 25 bp, Homo sapien
ctgcgtagtggtgcatcccagcgta

SEQ ID NO: 4574939 - DNA, 25 bp, Homo sapien
gagagcccgttattgtagagcgtgt

SEQ ID NO: 4574940 - DNA, 25 bp, Homo sapien
ttattgtagagcgtgtcggagcccg

SEQ ID NO: 4574941 - DNA, 25 bp, Homo sapien
cccgttattgtagagcgtgtcggag

SEQ ID NO: 4574942 - DNA, 25 bp, Homo sapien
ctggataaggggagagcccgttatt

SEQ ID NO: 4574943 - DNA, 25 bp, Homo sapien
cgaatccattgaccccgatgggcgc

SEQ ID NO: 4574944 - DNA, 25 bp, Homo sapien
gagggccgaatccattgaccccgat

SEQ ID NO: 4574945 - DNA, 25 bp, Homo sapien
ggtcagagggccgaatccattgacc

SEQ ID NO: 4574946 - DNA, 25 bp, Homo sapien
attgaccccgatgggcgccggaaga

SEQ ID NO: 4574947 - DNA, 25 bp, Homo sapien
ctgggagggtgccagggccgctgcc

SEQ ID NO: 4574948 - DNA, 25 bp, Homo sapien
ccagggccgctgccaggcggggagt

SEQ ID NO: 4574949 - DNA, 25 bp, Homo sapien
gggccgctgccaggcggggagttgg

SEQ ID NO: 4574950 - DNA, 25 bp, Homo sapien
tgggagggtgccagggccgctgcca

SEQ ID NO: 4574951 - DNA, 25 bp, Homo sapien
acgtgttgcatctgggccgccactg

SEQ ID NO: 4574952 - DNA, 25 bp, Homo sapien
ccgcgggcaacagaggcgcagctac

SEQ ID NO: 4574953 - DNA, 25 bp, Homo sapien
gctaaaggccgccacgtgttgcatc

SEQ ID NO: 4574954 - DNA, 25 bp, Homo sapien
agaggcgcagctaccaggctaaagg

SEQ ID NO: 4574955 - DNA, 25 bp, Homo sapien
ggtgtccgccagcttgaccacgagg

SEQ ID NO: 4574956 - DNA, 25 bp, Homo sapien
cgccgtggtgtaggcgccgcaggcc

SEQ ID NO: 4574957 - DNA, 25 bp, Homo sapien
ccgccagcttgaccacgaggctgga

SEQ ID NO: 4574958 - DNA, 25 bp, Homo sapien
tcccggtcggtgtccgccagcttga

SEQ ID NO: 4574959 - DNA, 25 bp, Homo sapien
ctcagcccagggaacccgccctcac

SEQ ID NO: 4574960 - DNA, 25 bp, Homo sapien
gtgcagaccccggatggccgcctga

SEQ ID NO: 4574961 - DNA, 25 bp, Homo sapien
ccttgactcccgaacttcacaaagg

SEQ ID NO: 4574962 - DNA, 25 bp, Homo sapien
gccatggtccggctgccgtgcagac

SEQ ID NO: 4574963 - DNA, 25 bp, Homo sapien
tgactcccgaacttcacaaaggcac

SEQ ID NO: 4574964 - DNA, 25 bp, Homo sapien
tcaggactccgcaggaccgtgcact

SEQ ID NO: 4574965 - DNA, 25 bp, Homo sapien
tttactggtgccgtcaggactccgc

SEQ ID NO: 4574966 - DNA, 25 bp, Homo sapien
agggctggaacaggcgtctgacgtc

SEQ ID NO: 4574967 - DNA, 25 bp, Homo sapien
gaacaggcgtctgacgtcctcctca

SEQ ID NO: 4574968 - DNA, 25 bp, Homo sapien
catgctatgagagaacaagttctgc

SEQ ID NO: 4574969 - DNA, 25 bp, Homo sapien
gagagaacaagttctgcctatagac

SEQ ID NO: 4574970 - DNA, 25 bp, Homo sapien
gcaagcttctagtgccctgtctgta

SEQ ID NO: 4574971 - DNA, 25 bp, Homo sapien
cctcccaaaatgttcatgctatgag

SEQ ID NO: 4574972 - DNA, 25 bp, Homo sapien
gaaccagtctgattcctccctgtgt

SEQ ID NO: 4574973 - DNA, 25 bp, Homo sapien
ggattgccaccagagaaccagtctg

SEQ ID NO: 4574974 - DNA, 25 bp, Homo sapien
ctggattgccaccagagaaccagtc

SEQ ID NO: 4574975 - DNA, 25 bp, Homo sapien
agagaaccagtctgattcctccctg

SEQ ID NO: 4574976 - DNA, 25 bp, Homo sapien
tgtccctcgaagaaagctggagagc

SEQ ID NO: 4574977 - DNA, 25 bp, Homo sapien
gggcctgtgtccctcgaagaaagct

SEQ ID NO: 4574978 - DNA, 25 bp, Homo sapien
gaaactagggttttgccgcacatcc

SEQ ID NO: 4574979 - DNA, 25 bp, Homo sapien
ccagcaagttaggcctcaggaacac

SEQ ID NO: 4574980 - DNA, 25 bp, Homo sapien
cctgctgttaaagtctggggctctt

SEQ ID NO: 4574981 - DNA, 25 bp, Homo sapien
gagcgtggggtagaggggtccagcc

SEQ ID NO: 4574982 - DNA, 25 bp, Homo sapien
gcgtggggtagaggggtccagcctg

SEQ ID NO: 4574983 - DNA, 25 bp, Homo sapien
gtccagcctgctgttaaagtctggg

SEQ ID NO: 4574984 - DNA, 25 bp, Homo sapien
gagagaaggagtgggtaggaaactg

SEQ ID NO: 4574985 - DNA, 25 bp, Homo sapien
acaatacaagttgggagagaaggag

SEQ ID NO: 4574986 - DNA, 25 bp, Homo sapien
gggacaatacaagttgggagagaag

SEQ ID NO: 4574987 - DNA, 25 bp, Homo sapien
gtaggaaactggtttcaggcttcat

SEQ ID NO: 4574988 - DNA, 25 bp, Homo sapien
taatggacttgtggctggaattctg

SEQ ID NO: 4574989 - DNA, 25 bp, Homo sapien
ccacagaatagtgcccttggaacag

SEQ ID NO: 4574990 - DNA, 25 bp, Homo sapien
gggatggataatggacttgtggctg

SEQ ID NO: 4574991 - DNA, 25 bp, Homo sapien
agaatagtgcccttggaacagatca

SEQ ID NO: 4574992 - DNA, 25 bp, Homo sapien
gatagagaacagagttccagctgtt

SEQ ID NO: 4574993 - DNA, 25 bp, Homo sapien
ctagaagatagagaacagagttcca

SEQ ID NO: 4574994 - DNA, 25 bp, Homo sapien
ccagctgttgtttgaggggggatct

SEQ ID NO: 4574995 - DNA, 25 bp, Homo sapien
tccagctgttgtttgaggggggatc

SEQ ID NO: 4574996 - DNA, 25 bp, Homo sapien
tctagggcctccatagtcccaaggg

SEQ ID NO: 4574997 - DNA, 25 bp, Homo sapien
cctaatttgtagtggagctgtgtca

SEQ ID NO: 4574998 - DNA, 25 bp, Homo sapien
gatggcaccccaataagatatcata

SEQ ID NO: 4574999 - DNA, 25 bp, Homo sapien
gatagagcccataagacagaaaaga

SEQ ID NO: 4575000 - DNA, 25 bp, Homo sapien
gaagtacatgctggacccctaacag

SEQ ID NO: 4575001 - DNA, 25 bp, Homo sapien
tgaccctatggatctggactactgg

SEQ ID NO: 4575002 - DNA, 25 bp, Homo sapien
gatcacagtggtcatgagcctcagg

SEQ ID NO: 4575003 - DNA, 25 bp, Homo sapien
catttggataaaaagcggacgctac

SEQ ID NO: 4575004 - DNA, 25 bp, Homo sapien
cttaggcatcttggatacatgaata

SEQ ID NO: 4575005 - DNA, 25 bp, Homo sapien
catcttggatacatgaatatttgct

SEQ ID NO: 4575006 - DNA, 25 bp, Homo sapien
ggcatcttggatacatgaatatttg

SEQ ID NO: 4575007 - DNA, 25 bp, Homo sapien
taggcatcttggatacatgaatatt

SEQ ID NO: 4575008 - DNA, 25 bp, Homo sapien
tggcttcacttggatcggacgattc

SEQ ID NO: 4575009 - DNA, 25 bp, Homo sapien
gcttcacttggatcggacgattcat

SEQ ID NO: 4575010 - DNA, 25 bp, Homo sapien
ggcttcacttggatcggacgattca

SEQ ID NO: 4575011 - DNA, 25 bp, Homo sapien
ctggcttcacttggatcggacgatt

SEQ ID NO: 4575012 - DNA, 25 bp, Homo sapien
aagacatcggaccaacacacccatt

SEQ ID NO: 4575013 - DNA, 25 bp, Homo sapien
caacacacccattcagcgtgactgc

SEQ ID NO: 4575014 - DNA, 25 bp, Homo sapien
ggaccaacacacccattcagcgtga

SEQ ID NO: 4575015 - DNA, 25 bp, Homo sapien
ctgaaagacatcggaccaacacacc

SEQ ID NO: 4575016 - DNA, 25 bp, Homo sapien
agcggccttcccgttcatggaggaa

SEQ ID NO: 4575017 - DNA, 25 bp, Homo sapien
caaaaggtctttgtaaactgccaag

SEQ ID NO: 4575018 - DNA, 25 bp, Homo sapien
tcacatgaggtaatggggacgcaaa

SEQ ID NO: 4575019 - DNA, 25 bp, Homo sapien
aactgccaagagctgggtgcgtggg

SEQ ID NO: 4575020 - DNA, 25 bp, Homo sapien
tcctgttaccatagccacaagtgct

SEQ ID NO: 4575021 - DNA, 25 bp, Homo sapien
ccctggcagtcacagttgagcaatt

SEQ ID NO: 4575022 - DNA, 25 bp, Homo sapien
gtaaccatggtaacgccctggcagt

SEQ ID NO: 4575023 - DNA, 25 bp, Homo sapien
tcgttgccgagacaacaggcagctt

SEQ ID NO: 4575024 - DNA, 25 bp, Homo sapien
gagcttgacaggtctggactggcct

SEQ ID NO: 4575025 - DNA, 25 bp, Homo sapien
caagcagatcagggcgagcttgaca

SEQ ID NO: 4575026 - DNA, 25 bp, Homo sapien
ctagaggggatgacagatcaatcca

SEQ ID NO: 4575027 - DNA, 25 bp, Homo sapien
gggatgacagatcaatccaagcaga

SEQ ID NO: 4575028 - DNA, 25 bp, Homo sapien
tcaggtgagctcttgccctggctga

SEQ ID NO: 4575029 - DNA, 25 bp, Homo sapien
aggtgagctcttgccctggctgagc

SEQ ID NO: 4575030 - DNA, 25 bp, Homo sapien
gtgagctcttgccctggctgagcac

SEQ ID NO: 4575031 - DNA, 25 bp, Homo sapien
caggtgagctcttgccctggctgag

SEQ ID NO: 4575032 - DNA, 25 bp, Homo sapien
gtccaggcccatgtctgcttcagag

SEQ ID NO: 4575033 - DNA, 25 bp, Homo sapien
taagaatttcccaggtggagtccag

SEQ ID NO: 4575034 - DNA, 25 bp, Homo sapien
ccaggtggagtccaggcccatgtct

SEQ ID NO: 4575035 - DNA, 25 bp, Homo sapien
gaatttcccaggtggagtccaggcc

SEQ ID NO: 4575036 - DNA, 25 bp, Homo sapien
agctgtgctcaggacccaatggcag

SEQ ID NO: 4575037 - DNA, 25 bp, Homo sapien
gattaaagtcttgtccctgcttctc

SEQ ID NO: 4575038 - DNA, 25 bp, Homo sapien
atggtgacagtcctgcctgatgcca

SEQ ID NO: 4575039 - DNA, 25 bp, Homo sapien
cccatggtgacagtcctgcctgatg

SEQ ID NO: 4575040 - DNA, 25 bp, Homo sapien
tgtgtctgcacctttaccatgctgt

SEQ ID NO: 4575041 - DNA, 25 bp, Homo sapien
ccttctgtgtctgcacctttaccat

SEQ ID NO: 4575042 - DNA, 25 bp, Homo sapien
ccacatggaatgttacagcttgtct

SEQ ID NO: 4575043 - DNA, 25 bp, Homo sapien
ttaccatgctgtttcccacatggaa

SEQ ID NO: 4575044 - DNA, 25 bp, Homo sapien
gggccttgagagcagagtcccgggc

SEQ ID NO: 4575045 - DNA, 25 bp, Homo sapien
agagtcccgggcgcagtaggtgagg

SEQ ID NO: 4575046 - DNA, 25 bp, Homo sapien
tcgtgcagtgcactctgggccttga

SEQ ID NO: 4575047 - DNA, 25 bp, Homo sapien
cctggcagggtcttctgctcgtgca

SEQ ID NO: 4575048 - DNA, 25 bp, Homo sapien
gtgtggccgaacaggaccgtgtatc

SEQ ID NO: 4575049 - DNA, 25 bp, Homo sapien
ttctgcatgtaaacaagcctcctcc

SEQ ID NO: 4575050 - DNA, 25 bp, Homo sapien
gaacaggaccgtgtatctctctaga

SEQ ID NO: 4575051 - DNA, 25 bp, Homo sapien
gcctggacagacttttctgcatgta

SEQ ID NO: 4575052 - DNA, 25 bp, Homo sapien
agaatgggcctggactgggaccagc

SEQ ID NO: 4575053 - DNA, 25 bp, Homo sapien
cctgagaatgggcctggactgggac

SEQ ID NO: 4575054 - DNA, 25 bp, Homo sapien
ctgagaatgggcctggactgggacc

SEQ ID NO: 4575055 - DNA, 25 bp, Homo sapien
tgagaatgggcctggactgggacca

SEQ ID NO: 4575056 - DNA, 25 bp, Homo sapien
ctttgtggaggccggtgagccggtc

SEQ ID NO: 4575057 - DNA, 25 bp, Homo sapien
tttgtggaggccggtgagccggtcc

SEQ ID NO: 4575058 - DNA, 25 bp, Homo sapien
tagatgcggccgaactcctcgaaca

SEQ ID NO: 4575059 - DNA, 25 bp, Homo sapien
ccccacgaagagcttgatggcgtcg

SEQ ID NO: 4575060 - DNA, 25 bp, Homo sapien
agcttgatggcgtcgtggtccttca

SEQ ID NO: 4575061 - DNA, 25 bp, Homo sapien
cttgaggtcctgctcgtccaagccc

SEQ ID NO: 4575062 - DNA, 25 bp, Homo sapien
ggccagcgggctgcgctgaccctcc

SEQ ID NO: 4575063 - DNA, 25 bp, Homo sapien
ggaccggggtttagcccgctcatgc

SEQ ID NO: 4575064 - DNA, 25 bp, Homo sapien
gggtttagcccgctcatgccgacgc

SEQ ID NO: 4575065 - DNA, 25 bp, Homo sapien
gggctgcgctgaccctcccggcgcc

SEQ ID NO: 4575066 - DNA, 25 bp, Homo sapien
ggaccctcgaatgccctgtgtgtgt

SEQ ID NO: 4575067 - DNA, 25 bp, Homo sapien
tggccgccgagtctacgcaaatgat

SEQ ID NO: 4575068 - DNA, 25 bp, Homo sapien
tttgcataatgaggaagcagccgcc

SEQ ID NO: 4575069 - DNA, 25 bp, Homo sapien
gaagcagcttcgtcatgcgtgatgg

SEQ ID NO: 4575070 - DNA, 25 bp, Homo sapien
gaacacggattcctccttaggagag

SEQ ID NO: 4575071 - DNA, 25 bp, Homo sapien
tcgaggatgttagggccaggcccac

SEQ ID NO: 4575072 - DNA, 25 bp, Homo sapien
ccaacatttgttgggcccagcgcaa

SEQ ID NO: 4575073 - DNA, 25 bp, Homo sapien
gggaacttagccgtatttactcaga

SEQ ID NO: 4575074 - DNA, 25 bp, Homo sapien
actggaatcatcaaaaagttcttaa

SEQ ID NO: 4575075 - DNA, 25 bp, Homo sapien
tattcaattcagaagcaaatcatga

SEQ ID NO: 4575076 - DNA, 25 bp, Homo sapien
tccattgactattctaagaaactgc

SEQ ID NO: 4575077 - DNA, 25 bp, Homo sapien
gagattttaacataacttgtgtcca

SEQ ID NO: 4575078 - DNA, 25 bp, Homo sapien
tgtaataatcctataggtccctgag

SEQ ID NO: 4575079 - DNA, 25 bp, Homo sapien
tccatgacaggagtgttagatcttt

SEQ ID NO: 4575080 - DNA, 25 bp, Homo sapien
gtgtaccggtattgacattttgcca

SEQ ID NO: 4575081 - DNA, 25 bp, Homo sapien
ggctttatcctgtttggcgctcact

SEQ ID NO: 4575082 - DNA, 25 bp, Homo sapien
gttatctcagtgttagtgcctattg

SEQ ID NO: 4575083 - DNA, 25 bp, Homo sapien
taaacatgtttagcaggcctccttt

SEQ ID NO: 4575084 - DNA, 25 bp, Homo sapien
tatgatgcatttcatgatggctgct

SEQ ID NO: 4575085 - DNA, 25 bp, Homo sapien
ggacactgccttggttattgtgaga

SEQ ID NO: 4575086 - DNA, 25 bp, Homo sapien
tagtgaaacttctagaatagacttc

SEQ ID NO: 4575087 - DNA, 25 bp, Homo sapien
tgagttctgtaacctcacttttaaa

SEQ ID NO: 4575088 - DNA, 25 bp, Homo sapien
catttattctaattccctcctgagt

SEQ ID NO: 4575089 - DNA, 25 bp, Homo sapien
agggcagatcacctccatttaatct

SEQ ID NO: 4575090 - DNA, 25 bp, Homo sapien
aaagagcaataggaagaatagcctt

SEQ ID NO: 4575091 - DNA, 25 bp, Homo sapien
aacaagacacaaattattaatgtca

SEQ ID NO: 4575092 - DNA, 25 bp, Homo sapien
gaccactccaatatctccagaactt

SEQ ID NO: 4575093 - DNA, 25 bp, Homo sapien
gatttgttagtctcaagatctcata

SEQ ID NO: 4575094 - DNA, 25 bp, Homo sapien
gatctcataaagttcagaccactcc

SEQ ID NO: 4575095 - DNA, 25 bp, Homo sapien
ttagattgtgaccactggattgagg

SEQ ID NO: 4575096 - DNA, 25 bp, Homo sapien
gctgattagattgtgaccactggat

SEQ ID NO: 4575097 - DNA, 25 bp, Homo sapien
catacatatggaggaacaatacttt

SEQ ID NO: 4575098 - DNA, 25 bp, Homo sapien
gagtatcgactcaaacaatcacaag

SEQ ID NO: 4575099 - DNA, 25 bp, Homo sapien
gtgttagcatgatgcatctttctcc

SEQ ID NO: 4575100 - DNA, 25 bp, Homo sapien
gattagtgttagcatgatgcatctt

SEQ ID NO: 4575101 - DNA, 25 bp, Homo sapien
tagcatgatgcatctttctccattc

SEQ ID NO: 4575102 - DNA, 25 bp, Homo sapien
ttagtgttagcatgatgcatctttc

SEQ ID NO: 4575103 - DNA, 25 bp, Homo sapien
catttataagtaatccaagtctcct

SEQ ID NO: 4575104 - DNA, 25 bp, Homo sapien
gaccattgataaaattgccattgct

SEQ ID NO: 4575105 - DNA, 25 bp, Homo sapien
aatatagcagttatacttttttggg

SEQ ID NO: 4575106 - DNA, 25 bp, Homo sapien
tgtcttctttggttttaactgatca

SEQ ID NO: 4575107 - DNA, 25 bp, Homo sapien
ctgctatttgttacatcacttcaga

SEQ ID NO: 4575108 - DNA, 25 bp, Homo sapien
cataaggtaatcactgaatacattg

SEQ ID NO: 4575109 - DNA, 25 bp, Homo sapien
ggtaatcactgaatacattgctggt

SEQ ID NO: 4575110 - DNA, 25 bp, Homo sapien
ggtattattatttcgaacaaactgc

SEQ ID NO: 4575111 - DNA, 25 bp, Homo sapien
ctgagactcttggatctgtggtttg

SEQ ID NO: 4575112 - DNA, 25 bp, Homo sapien
ttctgaagagaaggccaatgtaatc

SEQ ID NO: 4575113 - DNA, 25 bp, Homo sapien
tcttcatgtgcctggttatttctga

SEQ ID NO: 4575114 - DNA, 25 bp, Homo sapien
cctgcttggtgctatctgagactct

SEQ ID NO: 4575115 - DNA, 25 bp, Homo sapien
tcaaagtgtatactggctggatatc

SEQ ID NO: 4575116 - DNA, 25 bp, Homo sapien
gtgtgaatgagatcactcaaagtgt

SEQ ID NO: 4575117 - DNA, 25 bp, Homo sapien
gtagctgaagatacactgagtgtga

SEQ ID NO: 4575118 - DNA, 25 bp, Homo sapien
ggtgtgagtctgtgacttcatatga

SEQ ID NO: 4575119 - DNA, 25 bp, Homo sapien
actctgcagcacaccagcgagcatg

SEQ ID NO: 4575120 - DNA, 25 bp, Homo sapien
tatcctctttcataatagatcatcc

SEQ ID NO: 4575121 - DNA, 25 bp, Homo sapien
ctttcataatagatcatccagacac

SEQ ID NO: 4575122 - DNA, 25 bp, Homo sapien
cagcagttgagttcctatgttcaaa

SEQ ID NO: 4575123 - DNA, 25 bp, Homo sapien
tgaccctgacatttcgatttttaaa

SEQ ID NO: 4575124 - DNA, 25 bp, Homo sapien
caccattcttagctaatctttttaa

SEQ ID NO: 4575125 - DNA, 25 bp, Homo sapien
accattcttagctaatctttttaat

SEQ ID NO: 4575126 - DNA, 25 bp, Homo sapien
tagagtgctaggaatgttgccataa

SEQ ID NO: 4575127 - DNA, 25 bp, Homo sapien
gcacctgaaaacaccagtgacctag

SEQ ID NO: 4575128 - DNA, 25 bp, Homo sapien
tacggcaatcctttgagaagcacct

SEQ ID NO: 4575129 - DNA, 25 bp, Homo sapien
tgactctccatcactagtgctgtgg

SEQ ID NO: 4575130 - DNA, 25 bp, Homo sapien
cctcagctcctaccaaggagaggag

SEQ ID NO: 4575131 - DNA, 25 bp, Homo sapien
gcctgctttgcctccttaatagact

SEQ ID NO: 4575132 - DNA, 25 bp, Homo sapien
tttgctttgatacccgttaggcctg

SEQ ID NO: 4575133 - DNA, 25 bp, Homo sapien
tgatacccgttaggcctgctttgcc

SEQ ID NO: 4575134 - DNA, 25 bp, Homo sapien
ccatccattccctgcgaagatgctt

SEQ ID NO: 4575135 - DNA, 25 bp, Homo sapien
ccattccctgcgaagatgctttggg

SEQ ID NO: 4575136 - DNA, 25 bp, Homo sapien
tctgggtccacgacgagacatttcc

SEQ ID NO: 4575137 - DNA, 25 bp, Homo sapien
ggcagtctgggtccacgacgagaca

SEQ ID NO: 4575138 - DNA, 25 bp, Homo sapien
cacgtgcctattaattccagttact

SEQ ID NO: 4575139 - DNA, 25 bp, Homo sapien
cctgggcgacagagtttttgagaca

SEQ ID NO: 4575140 - DNA, 25 bp, Homo sapien
gtggcacgtgcctattaattccagt

SEQ ID NO: 4575141 - DNA, 25 bp, Homo sapien
tatatatatgaattagatggacatg

SEQ ID NO: 4575142 - DNA, 25 bp, Homo sapien
caaaggctataggtttcattcccag

SEQ ID NO: 4575143 - DNA, 25 bp, Homo sapien
tctttttccatataccaacgccttg

SEQ ID NO: 4575144 - DNA, 25 bp, Homo sapien
caacgccttggagatataatgcaga

SEQ ID NO: 4575145 - DNA, 25 bp, Homo sapien
tcattcccagccctcaacttaaaag

SEQ ID NO: 4575146 - DNA, 25 bp, Homo sapien
ttactctttattgaatgcgagcgcc

SEQ ID NO: 4575147 - DNA, 25 bp, Homo sapien
gccacattactctttattgaatgcg

SEQ ID NO: 4575148 - DNA, 25 bp, Homo sapien
cattactctttattgaatgcgagcg

SEQ ID NO: 4575149 - DNA, 25 bp, Homo sapien
actctttattgaatgcgagcgccag

SEQ ID NO: 4575150 - DNA, 25 bp, Homo sapien
caaggggcacgaaggcaaggggctc

SEQ ID NO: 4575151 - DNA, 25 bp, Homo sapien
actaccattcacctacagccagcac

SEQ ID NO: 4575152 - DNA, 25 bp, Homo sapien
ggctccactaccattcacctacagc

SEQ ID NO: 4575153 - DNA, 25 bp, Homo sapien
ggggcacgcaggcaaggggcacgaa

SEQ ID NO: 4575154 - DNA, 25 bp, Homo sapien
tgctcacagaagcctacattgaggg

SEQ ID NO: 4575155 - DNA, 25 bp, Homo sapien
cattgaggggttgggcctggacacc

SEQ ID NO: 4575156 - DNA, 25 bp, Homo sapien
cacagaagcctacattgaggggttg

SEQ ID NO: 4575157 - DNA, 25 bp, Homo sapien
tcacagaagcctacattgaggggtt

SEQ ID NO: 4575158 - DNA, 25 bp, Homo sapien
gaaatggcaagataagcccctcaga

SEQ ID NO: 4575159 - DNA, 25 bp, Homo sapien
cactgtacaccaaatgcacctggga

SEQ ID NO: 4575160 - DNA, 25 bp, Homo sapien
ttccccatttcggtgactctcaaac

SEQ ID NO: 4575161 - DNA, 25 bp, Homo sapien
gaatctgcaagctgaacaggtgcct

SEQ ID NO: 4575162 - DNA, 25 bp, Homo sapien
tataagcctctgtaagtgttagcta

SEQ ID NO: 4575163 - DNA, 25 bp, Homo sapien
ttcctgaatactttttatcgcagtt

SEQ ID NO: 4575164 - DNA, 25 bp, Homo sapien
ttgttaattattgtcttcctctctc

SEQ ID NO: 4575165 - DNA, 25 bp, Homo sapien
tgcgaaggccccacagcttgcttac

SEQ ID NO: 4575166 - DNA, 25 bp, Homo sapien
cgttcataggcaaatgtcaggtcag

SEQ ID NO: 4575167 - DNA, 25 bp, Homo sapien
caattcacagcggaagtgtgacaaa

SEQ ID NO: 4575168 - DNA, 25 bp, Homo sapien
tgtcaggtcagatgtcaacttgttg

SEQ ID NO: 4575169 - DNA, 25 bp, Homo sapien
ttgctccacagcctttcggcaacag

SEQ ID NO: 4575170 - DNA, 25 bp, Homo sapien
caggctgctacctcttgtctaggca

SEQ ID NO: 4575171 - DNA, 25 bp, Homo sapien
tggactcactcaggccaaaggaagt

SEQ ID NO: 4575172 - DNA, 25 bp, Homo sapien
acatccacaggctgctacctcttgt

SEQ ID NO: 4575173 - DNA, 25 bp, Homo sapien
tgtctaggcaccctggactcactca

SEQ ID NO: 4575174 - DNA, 25 bp, Homo sapien
gatggctcccagagagttctacggc

SEQ ID NO: 4575175 - DNA, 25 bp, Homo sapien
atcttcagaaggctcgttgcacggc

SEQ ID NO: 4575176 - DNA, 25 bp, Homo sapien
tatcccacataccaaagggcagctg

SEQ ID NO: 4575177 - DNA, 25 bp, Homo sapien
caggcctcattatctctctgggaag

SEQ ID NO: 4575178 - DNA, 25 bp, Homo sapien
catattctccccacatacaagcctc

SEQ ID NO: 4575179 - DNA, 25 bp, Homo sapien
ctccaccaatcaccagagccttctg

SEQ ID NO: 4575180 - DNA, 25 bp, Homo sapien
atacaagcctctccaccaatcacca

SEQ ID NO: 4575181 - DNA, 25 bp, Homo sapien
cacatacaagcctctccaccaatca

SEQ ID NO: 4575182 - DNA, 25 bp, Homo sapien
tccagtcagggccataggatatacg

SEQ ID NO: 4575183 - DNA, 25 bp, Homo sapien
aagccggccttggtgaccagttcca

SEQ ID NO: 4575184 - DNA, 25 bp, Homo sapien
tggaatatcctctcgccacacctgt

SEQ ID NO: 4575185 - DNA, 25 bp, Homo sapien
acctgtatgattgtgtctggctgaa

SEQ ID NO: 4575186 - DNA, 25 bp, Homo sapien
gagaccagagggaggcactgctggt

SEQ ID NO: 4575187 - DNA, 25 bp, Homo sapien
tcagtctctgtagaggcagggagga

SEQ ID NO: 4575188 - DNA, 25 bp, Homo sapien
ctggggagaccagagggaggcactg

SEQ ID NO: 4575189 - DNA, 25 bp, Homo sapien
ggatcagtctctgtagaggcaggga

SEQ ID NO: 4575190 - DNA, 25 bp, Homo sapien
ataagaagagacgatgtccagcagc

SEQ ID NO: 4575191 - DNA, 25 bp, Homo sapien
catagcccttgccataagaagagac

SEQ ID NO: 4575192 - DNA, 25 bp, Homo sapien
tgccataagaagagacgatgtccag

SEQ ID NO: 4575193 - DNA, 25 bp, Homo sapien
gcccttgccataagaagagacgatg

SEQ ID NO: 4575194 - DNA, 25 bp, Homo sapien
gggttctagactgtttgtgccagtg

SEQ ID NO: 4575195 - DNA, 25 bp, Homo sapien
agtgtctgcttagctcagatgggtt

SEQ ID NO: 4575196 - DNA, 25 bp, Homo sapien
gaggagtgtctagtaagtgtctgct

SEQ ID NO: 4575197 - DNA, 25 bp, Homo sapien
gctcagatgggttctagactgtttg

SEQ ID NO: 4575198 - DNA, 25 bp, Homo sapien
ttgaagtcctcaccgaagcctttct

SEQ ID NO: 4575199 - DNA, 25 bp, Homo sapien
tgaagtcctcaccgaagcctttctt

SEQ ID NO: 4575200 - DNA, 25 bp, Homo sapien
gggattcactggtccaaaggtgcca

SEQ ID NO: 4575201 - DNA, 25 bp, Homo sapien
gctcagacccagagtagcaaggagt

SEQ ID NO: 4575202 - DNA, 25 bp, Homo sapien
tctaagaagaatgtgctcatgaact

SEQ ID NO: 4575203 - DNA, 25 bp, Homo sapien
caaggagtcagtaatccagggatac

SEQ ID NO: 4575204 - DNA, 25 bp, Homo sapien
tgcaagcacacggataccccggagc

SEQ ID NO: 4575205 - DNA, 25 bp, Homo sapien
gagccgtgcgtattcaatgacctcc

SEQ ID NO: 4575206 - DNA, 25 bp, Homo sapien
ccaggagtgtcaaactctgcaagca

SEQ ID NO: 4575207 - DNA, 25 bp, Homo sapien
acggataccccggagccgtgcgtat

SEQ ID NO: 4575208 - DNA, 25 bp, Homo sapien
tggtctgagtgaaacgggaacatac

SEQ ID NO: 4575209 - DNA, 25 bp, Homo sapien
cctatattggtctaaaactggctgg

SEQ ID NO: 4575210 - DNA, 25 bp, Homo sapien
gagattctctcctgaaggtcacaag

SEQ ID NO: 4575211 - DNA, 25 bp, Homo sapien
gatgagagaccctgttcttgccagc

SEQ ID NO: 4575212 - DNA, 25 bp, Homo sapien
ctcatatgggaaggaaggatcatct

SEQ ID NO: 4575213 - DNA, 25 bp, Homo sapien
taccagatgccagtggaacacgttc

SEQ ID NO: 4575214 - DNA, 25 bp, Homo sapien
gaacacgttcaatttattgtacgcc

SEQ ID NO: 4575215 - DNA, 25 bp, Homo sapien
aaagtgaagctctcatatgggaagg

SEQ ID NO: 4575216 - DNA, 25 bp, Homo sapien
tcagcctcaaacttgcgatgttggg

SEQ ID NO: 4575217 - DNA, 25 bp, Homo sapien
ggtctatcaaaccttcccatcaggg

SEQ ID NO: 4575218 - DNA, 25 bp, Homo sapien
atgttgggcgagctctcaggccgct

SEQ ID NO: 4575219 - DNA, 25 bp, Homo sapien
acagtctctccggtttcagcctcaa

SEQ ID NO: 4575220 - DNA, 25 bp, Homo sapien
gctagagagtggcaggtaatggcga

SEQ ID NO: 4575221 - DNA, 25 bp, Homo sapien
cagagtgtccaggatgctagagagt

SEQ ID NO: 4575222 - DNA, 25 bp, Homo sapien
gggaaagtcctcaatctcagtcttg

SEQ ID NO: 4575223 - DNA, 25 bp, Homo sapien
tggcgagatgtatccaacagcaagc

SEQ ID NO: 4575224 - DNA, 25 bp, Homo sapien
ttccaaacaagctggctaaaagtct

SEQ ID NO: 4575225 - DNA, 25 bp, Homo sapien
tcagcagatttccaaacaagctggc

SEQ ID NO: 4575226 - DNA, 25 bp, Homo sapien
tgtgccctcagcagatttccaaaca

SEQ ID NO: 4575227 - DNA, 25 bp, Homo sapien
acaagctggctaaaagtctccagac

SEQ ID NO: 4575228 - DNA, 25 bp, Homo sapien
tatcagagtccccagtttcaaagtg

SEQ ID NO: 4575229 - DNA, 25 bp, Homo sapien
cagtgtctgtggtagcatcattccc

SEQ ID NO: 4575230 - DNA, 25 bp, Homo sapien
gataacccctatcaggagctaagag

SEQ ID NO: 4575231 - DNA, 25 bp, Homo sapien
gctaagtctgtatctaggcaccaaa

SEQ ID NO: 4575232 - DNA, 25 bp, Homo sapien
tctctcttttaatcagccccaattt

SEQ ID NO: 4575233 - DNA, 25 bp, Homo sapien
tctctctcttttaatcagccccaat

SEQ ID NO: 4575234 - DNA, 25 bp, Homo sapien
tctcttttaatcagccccaatttgt

SEQ ID NO: 4575235 - DNA, 25 bp, Homo sapien
ctcttttaatcagccccaatttgtt

SEQ ID NO: 4575236 - DNA, 25 bp, Homo sapien
actggtcatcatttatggtcagggt

SEQ ID NO: 4575237 - DNA, 25 bp, Homo sapien
cactggtcatcatttatggtcaggg

SEQ ID NO: 4575238 - DNA, 25 bp, Homo sapien
ctggtcatcatttatggtcagggta

SEQ ID NO: 4575239 - DNA, 25 bp, Homo sapien
ctcatgggtcagtttccacagcaga

SEQ ID NO: 4575240 - DNA, 25 bp, Homo sapien
ggtcagtttccacagcagaaagatg

SEQ ID NO: 4575241 - DNA, 25 bp, Homo sapien
tctcctggcaaagggaacagggatg

SEQ ID NO: 4575242 - DNA, 25 bp, Homo sapien
aaagatgaaagaagtcttctcctgg

SEQ ID NO: 4575243 - DNA, 25 bp, Homo sapien
cactggttaagtttctgcataggaa

SEQ ID NO: 4575244 - DNA, 25 bp, Homo sapien
tccaggccgagcatcagcagtttag

SEQ ID NO: 4575245 - DNA, 25 bp, Homo sapien
cttccatggctctcagcacttggtg

SEQ ID NO: 4575246 - DNA, 25 bp, Homo sapien
tcagcacttggtgaccctcggtccc

SEQ ID NO: 4575247 - DNA, 25 bp, Homo sapien
tgactacagagacaaccaacacatt

SEQ ID NO: 4575248 - DNA, 25 bp, Homo sapien
caaagtaggaagctggttacatcca

SEQ ID NO: 4575249 - DNA, 25 bp, Homo sapien
tacagagacaaccaacacattcttc

SEQ ID NO: 4575250 - DNA, 25 bp, Homo sapien
aggtgtgactacagagacaaccaac

SEQ ID NO: 4575251 - DNA, 25 bp, Homo sapien
tgagggctccagatgaagggtttcc

SEQ ID NO: 4575252 - DNA, 25 bp, Homo sapien
tagagcactgctactccaagtatgg

SEQ ID NO: 4575253 - DNA, 25 bp, Homo sapien
ctcagagaagatcagggtcacccac

SEQ ID NO: 4575254 - DNA, 25 bp, Homo sapien
cagggtaagcttggtgcggccaacc

SEQ ID NO: 4575255 - DNA, 25 bp, Homo sapien
accctggatccccacaccaatacct

SEQ ID NO: 4575256 - DNA, 25 bp, Homo sapien
aataccctggatccccacaccaata

SEQ ID NO: 4575257 - DNA, 25 bp, Homo sapien
aaataccctggatccccacaccaat

SEQ ID NO: 4575258 - DNA, 25 bp, Homo sapien
gtaaataccctggatccccacacca

SEQ ID NO: 4575259 - DNA, 25 bp, Homo sapien
ggctcgctgccctcatgacaaaata

SEQ ID NO: 4575260 - DNA, 25 bp, Homo sapien
catatgcaactaccatggctcgctg

SEQ ID NO: 4575261 - DNA, 25 bp, Homo sapien
agagaggccacacaaacaccaggtt

SEQ ID NO: 4575262 - DNA, 25 bp, Homo sapien
ggaatctgaggcaactctgggccag

SEQ ID NO: 4575263 - DNA, 25 bp, Homo sapien
tgtttctccagaattacaattcttc

SEQ ID NO: 4575264 - DNA, 25 bp, Homo sapien
cctgtccgaagttctctcagtgact

SEQ ID NO: 4575265 - DNA, 25 bp, Homo sapien
ctcatggtgaagaatccctgtccga

SEQ ID NO: 4575266 - DNA, 25 bp, Homo sapien
tttggagagtcacagactcctttgc

SEQ ID NO: 4575267 - DNA, 25 bp, Homo sapien
gggacagtagtacagccgcctctac

SEQ ID NO: 4575268 - DNA, 25 bp, Homo sapien
gtggttttccgcctccaagttgcta

SEQ ID NO: 4575269 - DNA, 25 bp, Homo sapien
caggagggacactaggtcattgtaa

SEQ ID NO: 4575270 - DNA, 25 bp, Homo sapien
tactttgcctggctatgaagagggc

SEQ ID NO: 4575271 - DNA, 25 bp, Homo sapien
cacagtatggcaaacagcccggtca

SEQ ID NO: 4575272 - DNA, 25 bp, Homo sapien
cagtatggcaaacagcccggtcagc

SEQ ID NO: 4575273 - DNA, 25 bp, Homo sapien
agcacagtatggcaaacagcccggt

SEQ ID NO: 4575274 - DNA, 25 bp, Homo sapien
gaagcacagtatggcaaacagcccg

SEQ ID NO: 4575275 - DNA, 25 bp, Homo sapien
gcggtggctcaggtccatgatctca

SEQ ID NO: 4575276 - DNA, 25 bp, Homo sapien
caaaacagttgtataggcctggtgc

SEQ ID NO: 4575277 - DNA, 25 bp, Homo sapien
caatggcagggtgggaccagattcc

SEQ ID NO: 4575278 - DNA, 25 bp, Homo sapien
gctgggaaatcaggacaggttgctt

SEQ ID NO: 4575279 - DNA, 25 bp, Homo sapien
ggctactgtaccctactggagggaa

SEQ ID NO: 4575280 - DNA, 25 bp, Homo sapien
taacaaggacgctctatcaccaaag

SEQ ID NO: 4575281 - DNA, 25 bp, Homo sapien
tcttctgtcacaaccaatgggcaaa

SEQ ID NO: 4575282 - DNA, 25 bp, Homo sapien
ggctgggcccttgatgctaccctga

SEQ ID NO: 4575283 - DNA, 25 bp, Homo sapien
gagttcctcaacaggagggaccaat

SEQ ID NO: 4575284 - DNA, 25 bp, Homo sapien
tcctcaacaggagggaccaatctca

SEQ ID NO: 4575285 - DNA, 25 bp, Homo sapien
ttgtgagttcctcaacaggagggac

SEQ ID NO: 4575286 - DNA, 25 bp, Homo sapien
aacaggagggaccaatctcagtgtc

SEQ ID NO: 4575287 - DNA, 25 bp, Homo sapien
catgagcctcttataggagactgaa

SEQ ID NO: 4575288 - DNA, 25 bp, Homo sapien
cccaataagacagttttgccccagc

SEQ ID NO: 4575289 - DNA, 25 bp, Homo sapien
gcagggtctcctatggcaaagccac

SEQ ID NO: 4575290 - DNA, 25 bp, Homo sapien
tctaggagcagcttccctgaagggt

SEQ ID NO: 4575291 - DNA, 25 bp, Homo sapien
cagtactatacagggatactagaaa

SEQ ID NO: 4575292 - DNA, 25 bp, Homo sapien
gaaaagtatcatgctttaggtaata

SEQ ID NO: 4575293 - DNA, 25 bp, Homo sapien
ggatactagaaaagtatcatgcttt

SEQ ID NO: 4575294 - DNA, 25 bp, Homo sapien
agtcctagctactcatcagtgaggc

SEQ ID NO: 4575295 - DNA, 25 bp, Homo sapien
acagggcgggacaagtccgactcac

SEQ ID NO: 4575296 - DNA, 25 bp, Homo sapien
ggaaggcctcgtcgaggactgagca

SEQ ID NO: 4575297 - DNA, 25 bp, Homo sapien
ccggaaccgaaaagcaggtcacgat

SEQ ID NO: 4575298 - DNA, 25 bp, Homo sapien
gctgcgcggccgagctgacatcgta

SEQ ID NO: 4575299 - DNA, 25 bp, Homo sapien
gtcacgatagcgctggaaggcctcg

SEQ ID NO: 4575300 - DNA, 25 bp, Homo sapien
cgtagcgctggtcggaggtttggaa

SEQ ID NO: 4575301 - DNA, 25 bp, Homo sapien
tgttcgggtaaaggacgtagcgctg

SEQ ID NO: 4575302 - DNA, 25 bp, Homo sapien
gtcctgcgaacgctgccgccagcag

SEQ ID NO: 4575303 - DNA, 25 bp, Homo sapien
cagcgaaaaccaaagcctggagctt

SEQ ID NO: 4575304 - DNA, 25 bp, Homo sapien
ccggccgtgatggaactagacagct

SEQ ID NO: 4575305 - DNA, 25 bp, Homo sapien
tgttcacgggcccagtagagcagta

SEQ ID NO: 4575306 - DNA, 25 bp, Homo sapien
tagagcagtaaataaccggccaccc

SEQ ID NO: 4575307 - DNA, 25 bp, Homo sapien
tatcggcgaatcacgtgaccagagg

SEQ ID NO: 4575308 - DNA, 25 bp, Homo sapien
tcccagatggctctagggtgaatct

SEQ ID NO: 4575309 - DNA, 25 bp, Homo sapien
ttgtgatgcagctcgccaggcctac

SEQ ID NO: 4575310 - DNA, 25 bp, Homo sapien
tcttgaatgttgtgatgcagctcgc

SEQ ID NO: 4575311 - DNA, 25 bp, Homo sapien
gggaggtaaaggacttgccaggctg

SEQ ID NO: 4575312 - DNA, 25 bp, Homo sapien
tgagggtgctggccatcaacattac

SEQ ID NO: 4575313 - DNA, 25 bp, Homo sapien
gtcatgagggtgctggccatcaaca

SEQ ID NO: 4575314 - DNA, 25 bp, Homo sapien
tgctggccatcaacattacagccca

SEQ ID NO: 4575315 - DNA, 25 bp, Homo sapien
gggtgctggccatcaacattacagc

SEQ ID NO: 4575316 - DNA, 25 bp, Homo sapien
ctctctcggtggttctttgagggct

SEQ ID NO: 4575317 - DNA, 25 bp, Homo sapien
tacaactttgatctcgttggggtca

SEQ ID NO: 4575318 - DNA, 25 bp, Homo sapien
gaagtggcaccgacttcacctccag

SEQ ID NO: 4575319 - DNA, 25 bp, Homo sapien
gatctcgttggggtcaaactttggc

SEQ ID NO: 4575320 - DNA, 25 bp, Homo sapien
cgttggggtcaaactttggcggcat

SEQ ID NO: 4575321 - DNA, 25 bp, Homo sapien
cgagccaaaagctgagagctatttt

SEQ ID NO: 4575322 - DNA, 25 bp, Homo sapien
ctcctccgagccaaaagctgagagc

SEQ ID NO: 4575323 - DNA, 25 bp, Homo sapien
tccgagccaaaagctgagagctatt

SEQ ID NO: 4575324 - DNA, 25 bp, Homo sapien
cctccgagccaaaagctgagagcta

SEQ ID NO: 4575325 - DNA, 25 bp, Homo sapien
cagacatgcacaaaagaagaactat

SEQ ID NO: 4575326 - DNA, 25 bp, Homo sapien
tgtacatgccatgcaaattggtata

SEQ ID NO: 4575327 - DNA, 25 bp, Homo sapien
gataatgcaactgctatcactccca

SEQ ID NO: 4575328 - DNA, 25 bp, Homo sapien
aatatgattaggtgtatccagagac

SEQ ID NO: 4575329 - DNA, 25 bp, Homo sapien
gcttcatctcaggtacagacctaga

SEQ ID NO: 4575330 - DNA, 25 bp, Homo sapien
gatccttaatcgaggaagcatgacc

SEQ ID NO: 4575331 - DNA, 25 bp, Homo sapien
tcactggactaaccacggtcttcct

SEQ ID NO: 4575332 - DNA, 25 bp, Homo sapien
ttggatctgaaggtatccatgctca

SEQ ID NO: 4575333 - DNA, 25 bp, Homo sapien
tctcttctcaactacttaacttcca

SEQ ID NO: 4575334 - DNA, 25 bp, Homo sapien
tattcccttcccgtagggatcatct

SEQ ID NO: 4575335 - DNA, 25 bp, Homo sapien
tcccgtagggatcatctctcttctc

SEQ ID NO: 4575336 - DNA, 25 bp, Homo sapien
tacttaacttccagatcgcctgcct

SEQ ID NO: 4575337 - DNA, 25 bp, Homo sapien
cacctgctaaagatgaagggccaag

SEQ ID NO: 4575338 - DNA, 25 bp, Homo sapien
tatcacctgctaaagatgaagggcc

SEQ ID NO: 4575339 - DNA, 25 bp, Homo sapien
cagtatcacctgctaaagatgaagg

SEQ ID NO: 4575340 - DNA, 25 bp, Homo sapien
cctgctaaagatgaagggccaaggt

SEQ ID NO: 4575341 - DNA, 25 bp, Homo sapien
caagtggccttagttcagaggctct

SEQ ID NO: 4575342 - DNA, 25 bp, Homo sapien
caatcaggtgagtttcgttatggca

SEQ ID NO: 4575343 - DNA, 25 bp, Homo sapien
tgagtttcgttatggcagaattact

SEQ ID NO: 4575344 - DNA, 25 bp, Homo sapien
tacttgtgcctccttgcttcaagtg

SEQ ID NO: 4575345 - DNA, 25 bp, Homo sapien
caacttgttctagaatgatgaagac

SEQ ID NO: 4575346 - DNA, 25 bp, Homo sapien
tagcccagccaaacatagacaagcc

SEQ ID NO: 4575347 - DNA, 25 bp, Homo sapien
gaagattggagtccagcctagccca

SEQ ID NO: 4575348 - DNA, 25 bp, Homo sapien
agaatgtatctcaggcaggcaactt

SEQ ID NO: 4575349 - DNA, 25 bp, Homo sapien
tcgacacatctgacctttgggaagg

SEQ ID NO: 4575350 - DNA, 25 bp, Homo sapien
catccttaagcaggtggtggttcgc

SEQ ID NO: 4575351 - DNA, 25 bp, Homo sapien
ggctgcagaagcaatcacccagaga

SEQ ID NO: 4575352 - DNA, 25 bp, Homo sapien
tgaccttatggagcagtagccacat

SEQ ID NO: 4575353 - DNA, 25 bp, Homo sapien
gaaaaaggcaaccatgatatctgct

SEQ ID NO: 4575354 - DNA, 25 bp, Homo sapien
agcagaaaaaggcaaccatgatatc

SEQ ID NO: 4575355 - DNA, 25 bp, Homo sapien
aaggcaaccatgatatctgctgagg

SEQ ID NO: 4575356 - DNA, 25 bp, Homo sapien
gccactgtggggacttgcctgatgg

SEQ ID NO: 4575357 - DNA, 25 bp, Homo sapien
cacgtgccagctcttatgctcctga

SEQ ID NO: 4575358 - DNA, 25 bp, Homo sapien
ctgaggcggggcagtacctgctcct

SEQ ID NO: 4575359 - DNA, 25 bp, Homo sapien
ccagctcttatgctcctgaggcggg

SEQ ID NO: 4575360 - DNA, 25 bp, Homo sapien
tgccagctcttatgctcctgaggcg

SEQ ID NO: 4575361 - DNA, 25 bp, Homo sapien
gctcctcataggctgttaagccaag

SEQ ID NO: 4575362 - DNA, 25 bp, Homo sapien
tttcaggatctctcgcaaagatgca

SEQ ID NO: 4575363 - DNA, 25 bp, Homo sapien
tatttcagagtatccctgggtcaga

SEQ ID NO: 4575364 - DNA, 25 bp, Homo sapien
cagggctgcgatcgcatctgcagga

SEQ ID NO: 4575365 - DNA, 25 bp, Homo sapien
gtgccacggagaacatgcatatcag

SEQ ID NO: 4575366 - DNA, 25 bp, Homo sapien
aaatcctagataaggagtgccacgg

SEQ ID NO: 4575367 - DNA, 25 bp, Homo sapien
gagcatttgccctagagaaatccta

SEQ ID NO: 4575368 - DNA, 25 bp, Homo sapien
tcttgccatgaagtattaaaggctg

SEQ ID NO: 4575369 - DNA, 25 bp, Homo sapien
tgctaagattaagtcaggtgcagtg

SEQ ID NO: 4575370 - DNA, 25 bp, Homo sapien
agaatgccaagaaaggtgctttgca

SEQ ID NO: 4575371 - DNA, 25 bp, Homo sapien
tgtagaatatgccagtctagtgact

SEQ ID NO: 4575372 - DNA, 25 bp, Homo sapien
cagttacaaaggcaggacgcataag

SEQ ID NO: 4575373 - DNA, 25 bp, Homo sapien
tacttgacaccttctgcgcttttgc

SEQ ID NO: 4575374 - DNA, 25 bp, Homo sapien
tcagattatctcaagagggagcctt

SEQ ID NO: 4575375 - DNA, 25 bp, Homo sapien
tgacatgacccctgactaacttgcc

SEQ ID NO: 4575376 - DNA, 25 bp, Homo sapien
tttgcttgttctctgcggctagacc

SEQ ID NO: 4575377 - DNA, 25 bp, Homo sapien
tataaaatgggtactatggctccgt

SEQ ID NO: 4575378 - DNA, 25 bp, Homo sapien
tgtttagggccctcaagaggcgctc

SEQ ID NO: 4575379 - DNA, 25 bp, Homo sapien
taaagtgggttcacctgtcatacag

SEQ ID NO: 4575380 - DNA, 25 bp, Homo sapien
catccagcggttaaaatagggcaag

SEQ ID NO: 4575381 - DNA, 25 bp, Homo sapien
ggaggccgcaatctcttcacataaa

SEQ ID NO: 4575382 - DNA, 25 bp, Homo sapien
ccctctctcggtgactggtgaccag

SEQ ID NO: 4575383 - DNA, 25 bp, Homo sapien
caggaaagcaattcccgctcggctc

SEQ ID NO: 4575384 - DNA, 25 bp, Homo sapien
gactgcctaagtgggctggatccct

SEQ ID NO: 4575385 - DNA, 25 bp, Homo sapien
caaagaggagtgacgcgacgacgca

SEQ ID NO: 4575386 - DNA, 25 bp, Homo sapien
actgttttctctcggaggccggagc

SEQ ID NO: 4575387 - DNA, 25 bp, Homo sapien
acgcggtgacgcacgcccctttgtt

SEQ ID NO: 4575388 - DNA, 25 bp, Homo sapien
ctcagtagcgatagcagcggccgtg

SEQ ID NO: 4575389 - DNA, 25 bp, Homo sapien
ccgccgccaccagccgtcaaacgcc

SEQ ID NO: 4575390 - DNA, 25 bp, Homo sapien
ccgccaccagccgtcaaacgccaac

SEQ ID NO: 4575391 - DNA, 25 bp, Homo sapien
gccgccaccagccgtcaaacgccaa

SEQ ID NO: 4575392 - DNA, 25 bp, Homo sapien
cgccgccaccagccgtcaaacgcca

SEQ ID NO: 4575393 - DNA, 25 bp, Homo sapien
cgcgcgtcgcgccatggactcggac

SEQ ID NO: 4575394 - DNA, 25 bp, Homo sapien
gcctgcgtccggacatcagccggag

SEQ ID NO: 4575395 - DNA, 25 bp, Homo sapien
cgtccggacatcagccggagccgga

SEQ ID NO: 4575396 - DNA, 25 bp, Homo sapien
aggcctgcgtccggacatcagccgg

SEQ ID NO: 4575397 - DNA, 25 bp, Homo sapien
tatccgggaggtcaacgaggtcatc

SEQ ID NO: 4575398 - DNA, 25 bp, Homo sapien
tacaactacgagttcgacgaggacg

SEQ ID NO: 4575399 - DNA, 25 bp, Homo sapien
ggattaccgctacgaggtgctcacg

SEQ ID NO: 4575400 - DNA, 25 bp, Homo sapien
gacgatgataccctggatctgggcg

SEQ ID NO: 4575401 - DNA, 25 bp, Homo sapien
taagaaggaagttgaggattgtaga

SEQ ID NO: 4575402 - DNA, 25 bp, Homo sapien
ggaagttgaggattgtagaagataa

SEQ ID NO: 4575403 - DNA, 25 bp, Homo sapien
gagaacacagtctaagaaggaagtt

SEQ ID NO: 4575404 - DNA, 25 bp, Homo sapien
taatctagagaacacagtctaagaa

SEQ ID NO: 4575405 - DNA, 25 bp, Homo sapien
ctgattggggagtcagttatagccc

SEQ ID NO: 4575406 - DNA, 25 bp, Homo sapien
tttactctgtctagttaatatctca

SEQ ID NO: 4575407 - DNA, 25 bp, Homo sapien
gtctagttaatatctcagaaccttc

SEQ ID NO: 4575408 - DNA, 25 bp, Homo sapien
gagtcagttatagccctggttttta

SEQ ID NO: 4575409 - DNA, 25 bp, Homo sapien
ctttatctctcggtttattcttaca

SEQ ID NO: 4575410 - DNA, 25 bp, Homo sapien
ccagcacttgggcaagtgccagtga

SEQ ID NO: 4575411 - DNA, 25 bp, Homo sapien
gcatccattctgctttatagtcgta

SEQ ID NO: 4575412 - DNA, 25 bp, Homo sapien
tgtttattcaacagtatccatctta

SEQ ID NO: 4575413 - DNA, 25 bp, Homo sapien
tgatttacatagaagccagcaaact

SEQ ID NO: 4575414 - DNA, 25 bp, Homo sapien
caaaccatgttgatagcagaaagaa

SEQ ID NO: 4575415 - DNA, 25 bp, Homo sapien
gcccaggtaaacagtgtggatagtt

SEQ ID NO: 4575416 - DNA, 25 bp, Homo sapien
gaacttccagatagtgcccaggtaa

SEQ ID NO: 4575417 - DNA, 25 bp, Homo sapien
taactgttggctgatgtttgctctc

SEQ ID NO: 4575418 - DNA, 25 bp, Homo sapien
tatcagataaactaagggtggaacc

SEQ ID NO: 4575419 - DNA, 25 bp, Homo sapien
tttgctctcacgtcctggtggtcca

SEQ ID NO: 4575420 - DNA, 25 bp, Homo sapien
gaaccttgtcctaataactgttggc

SEQ ID NO: 4575421 - DNA, 25 bp, Homo sapien
catacatgatatttaattaaagtta

SEQ ID NO: 4575422 - DNA, 25 bp, Homo sapien
acatacatgatatttaattaaagtt

SEQ ID NO: 4575423 - DNA, 25 bp, Homo sapien
caaatgcattggagtttactccgcc

SEQ ID NO: 4575424 - DNA, 25 bp, Homo sapien
tttgaatgccaaccgtgtacccagc

SEQ ID NO: 4575425 - DNA, 25 bp, Homo sapien
tactccgcctagcttggttctgtta

SEQ ID NO: 4575426 - DNA, 25 bp, Homo sapien
cgatcactaatctaatgagcaagca

SEQ ID NO: 4575427 - DNA, 25 bp, Homo sapien
taggcagcaagaggattcaacaaac

SEQ ID NO: 4575428 - DNA, 25 bp, Homo sapien
tggacaaagcaagcgtggcacgtgt

SEQ ID NO: 4575429 - DNA, 25 bp, Homo sapien
cccaaggtcatgagtgaatgatgct

SEQ ID NO: 4575430 - DNA, 25 bp, Homo sapien
tatagcgcatatgcatggacaaagc

SEQ ID NO: 4575431 - DNA, 25 bp, Homo sapien
tagcacctctggaagacctatctag

SEQ ID NO: 4575432 - DNA, 25 bp, Homo sapien
gtgtgtcggtttagcacctctggaa

SEQ ID NO: 4575433 - DNA, 25 bp, Homo sapien
ggaagacctatctagagctctttca

SEQ ID NO: 4575434 - DNA, 25 bp, Homo sapien
gataaaggtgtgtcggtttagcacc

SEQ ID NO: 4575435 - DNA, 25 bp, Homo sapien
ttagttatggctcgtctgctcaccc

SEQ ID NO: 4575436 - DNA, 25 bp, Homo sapien
tacatcctattactccattgggaag

SEQ ID NO: 4575437 - DNA, 25 bp, Homo sapien
gaaataccagttgaggctgaggacc

SEQ ID NO: 4575438 - DNA, 25 bp, Homo sapien
tgaaggcaaacacccctagaacatg

SEQ ID NO: 4575439 - DNA, 25 bp, Homo sapien
caggtgcaaatctgaactcagtgtc

SEQ ID NO: 4575440 - DNA, 25 bp, Homo sapien
gcagtcagagttgctatatagatat

SEQ ID NO: 4575441 - DNA, 25 bp, Homo sapien
aatccacgtgttcctgttgcaacaa

SEQ ID NO: 4575442 - DNA, 25 bp, Homo sapien
ttgcagtgtctaggtttgagtgtca

SEQ ID NO: 4575443 - DNA, 25 bp, Homo sapien
gcagttgtgggtgcattccctaatt

SEQ ID NO: 4575444 - DNA, 25 bp, Homo sapien
ggcatactgcctgagggtattgcag

SEQ ID NO: 4575445 - DNA, 25 bp, Homo sapien
tccaagcttttaacagataccacca

SEQ ID NO: 4575446 - DNA, 25 bp, Homo sapien
taataccagtcttcacccatggagg

SEQ ID NO: 4575447 - DNA, 25 bp, Homo sapien
gctgggataggcaagccatgacagc

SEQ ID NO: 4575448 - DNA, 25 bp, Homo sapien
agtgaattgcttgtgttattagtag

SEQ ID NO: 4575449 - DNA, 25 bp, Homo sapien
gggataggcaagccatgacagcttc

SEQ ID NO: 4575450 - DNA, 25 bp, Homo sapien
cccagctgggataggcaagccatga

SEQ ID NO: 4575451 - DNA, 25 bp, Homo sapien
caaaccccggtaatagagcacttgg

SEQ ID NO: 4575452 - DNA, 25 bp, Homo sapien
tgctgtgtaataaagtggttcaacc

SEQ ID NO: 4575453 - DNA, 25 bp, Homo sapien
gagcaccctatgctgtggaaataac

SEQ ID NO: 4575454 - DNA, 25 bp, Homo sapien
gactgttcaggttgcccagagggaa

SEQ ID NO: 4575455 - DNA, 25 bp, Homo sapien
gcatagactcggtggattgcccaag

SEQ ID NO: 4575456 - DNA, 25 bp, Homo sapien
tccttgaggtcatcctgttagtaag

SEQ ID NO: 4575457 - DNA, 25 bp, Homo sapien
gtttgtctgaagctctcaaccttga

SEQ ID NO: 4575458 - DNA, 25 bp, Homo sapien
ggccactcaaccagttaatatcaga

SEQ ID NO: 4575459 - DNA, 25 bp, Homo sapien
tgaaggaacgtagaatcagaactct

SEQ ID NO: 4575460 - DNA, 25 bp, Homo sapien
cagagatctgactttgcttcatagc

SEQ ID NO: 4575461 - DNA, 25 bp, Homo sapien
caccagggcctgagttttgggcatt

SEQ ID NO: 4575462 - DNA, 25 bp, Homo sapien
tcagaactctcatatcaccagggcc

SEQ ID NO: 4575463 - DNA, 25 bp, Homo sapien
gctcacgacataaatgctgggtttg

SEQ ID NO: 4575464 - DNA, 25 bp, Homo sapien
ggtgccagtctcgtgtcgcccactt

SEQ ID NO: 4575465 - DNA, 25 bp, Homo sapien
ctcccaggttatcccgataacctgg

SEQ ID NO: 4575466 - DNA, 25 bp, Homo sapien
tgtagaggtgccagtctcgtgtcgc

SEQ ID NO: 4575467 - DNA, 25 bp, Homo sapien
ttaaacccaggtactgtgagtcctc

SEQ ID NO: 4575468 - DNA, 25 bp, Homo sapien
tgtgagtcctcgcctaatttttggt

SEQ ID NO: 4575469 - DNA, 25 bp, Homo sapien
tggtggaaacagttgttaaatttga

SEQ ID NO: 4575470 - DNA, 25 bp, Homo sapien
tttcagcgacatgaagttaaaccca

SEQ ID NO: 4575471 - DNA, 25 bp, Homo sapien
tatggcagaagacacctcttcacag

SEQ ID NO: 4575472 - DNA, 25 bp, Homo sapien
gagagagaaggagagccgagcaaag

SEQ ID NO: 4575473 - DNA, 25 bp, Homo sapien
gagagaaggagagccgagcaaaggg

SEQ ID NO: 4575474 - DNA, 25 bp, Homo sapien
aattatggcagaagacacctcttca

SEQ ID NO: 4575475 - DNA, 25 bp, Homo sapien
tcagttaaaccggcggttggcgctg

SEQ ID NO: 4575476 - DNA, 25 bp, Homo sapien
tgtctttcgtaatgccttaaatccg

SEQ ID NO: 4575477 - DNA, 25 bp, Homo sapien
ttcgtaatgccttaaatccgtcctc

SEQ ID NO: 4575478 - DNA, 25 bp, Homo sapien
gtaatgccttaaatccgtcctcagt

SEQ ID NO: 4575479 - DNA, 25 bp, Homo sapien
tggaattcctccaccaccgcttggt

SEQ ID NO: 4575480 - DNA, 25 bp, Homo sapien
attcctccaccaccgcttggtcaaa

SEQ ID NO: 4575481 - DNA, 25 bp, Homo sapien
cctccaccaccgcttggtcaaagtt

SEQ ID NO: 4575482 - DNA, 25 bp, Homo sapien
gaattcctccaccaccgcttggtca

SEQ ID NO: 4575483 - DNA, 25 bp, Homo sapien
gcaggacagactgtaattatctaga

SEQ ID NO: 4575484 - DNA, 25 bp, Homo sapien
ttaacataaacaggagcaggacaga

SEQ ID NO: 4575485 - DNA, 25 bp, Homo sapien
tgcctattttctggccaagctccca

SEQ ID NO: 4575486 - DNA, 25 bp, Homo sapien
cacagcgtcgtactcctgagctgaa

SEQ ID NO: 4575487 - DNA, 25 bp, Homo sapien
agttatggttacaggaagggtcact

SEQ ID NO: 4575488 - DNA, 25 bp, Homo sapien
tggttacaggaagggtcacttcctc

SEQ ID NO: 4575489 - DNA, 25 bp, Homo sapien
cccaacgacacagggacctctcaaa

SEQ ID NO: 4575490 - DNA, 25 bp, Homo sapien
aaaaatctttcagttatggttacag

SEQ ID NO: 4575491 - DNA, 25 bp, Homo sapien
cgtgcacaggaaacctatgggtacc

SEQ ID NO: 4575492 - DNA, 25 bp, Homo sapien
gcggcgatctgggtgtgcatcataa

SEQ ID NO: 4575493 - DNA, 25 bp, Homo sapien
taagccgtgaacattggctgttgcc

SEQ ID NO: 4575494 - DNA, 25 bp, Homo sapien
tccggagtcacaaagccgagagtcg

SEQ ID NO: 4575495 - DNA, 25 bp, Homo sapien
atggaacagtggaaagtgccaacag

SEQ ID NO: 4575496 - DNA, 25 bp, Homo sapien
cagctggtggagtctacagcctatt

SEQ ID NO: 4575497 - DNA, 25 bp, Homo sapien
aatagtccatcaaccaaagtttagg

SEQ ID NO: 4575498 - DNA, 25 bp, Homo sapien
ttcttcccattcttacccagctggt

SEQ ID NO: 4575499 - DNA, 25 bp, Homo sapien
ctacagcctatttcaggtttgacct

SEQ ID NO: 4575500 - DNA, 25 bp, Homo sapien
tggcgggagaactaggctgccatcc

SEQ ID NO: 4575501 - DNA, 25 bp, Homo sapien
gcttctcgggataaaggcagcgagt

SEQ ID NO: 4575502 - DNA, 25 bp, Homo sapien
tgattccttaggtcactcggcgatt

SEQ ID NO: 4575503 - DNA, 25 bp, Homo sapien
acagaccatgtacagaccacggcga

SEQ ID NO: 4575504 - DNA, 25 bp, Homo sapien
gtagccacgtacaggtgtatttcag

SEQ ID NO: 4575505 - DNA, 25 bp, Homo sapien
tgatgaagcctaaagctgactcgcc

SEQ ID NO: 4575506 - DNA, 25 bp, Homo sapien
gagatgcagcaagacaagctgttta

SEQ ID NO: 4575507 - DNA, 25 bp, Homo sapien
gaagtaacattagactgtcagctcc

SEQ ID NO: 4575508 - DNA, 25 bp, Homo sapien
tgatgttgccctcaccaaatacaga

SEQ ID NO: 4575509 - DNA, 25 bp, Homo sapien
tgatgggcctgctgagtatagactc

SEQ ID NO: 4575510 - DNA, 25 bp, Homo sapien
tgtagagtgcaaggacattcctcag

SEQ ID NO: 4575511 - DNA, 25 bp, Homo sapien
tctttggcaagaagaaatatgtggc

SEQ ID NO: 4575512 - DNA, 25 bp, Homo sapien
tcctgttacacaggcacgtgtgtca

SEQ ID NO: 4575513 - DNA, 25 bp, Homo sapien
tgtgcatcctgttacacaggcacgt

SEQ ID NO: 4575514 - DNA, 25 bp, Homo sapien
gcatcctgttacacaggcacgtgtg

SEQ ID NO: 4575515 - DNA, 25 bp, Homo sapien
gtacatgtgcatcctgttacacagg

SEQ ID NO: 4575516 - DNA, 25 bp, Homo sapien
tctttggggaattgccagattgctt

SEQ ID NO: 4575517 - DNA, 25 bp, Homo sapien
tgctgggtcgaagggtagttgtatt

SEQ ID NO: 4575518 - DNA, 25 bp, Homo sapien
ggacacgatcttgttcttttgtatg

SEQ ID NO: 4575519 - DNA, 25 bp, Homo sapien
tagctctttggggaattgccagatt

SEQ ID NO: 4575520 - DNA, 25 bp, Homo sapien
caagagtcataagtaagctctcagg

SEQ ID NO: 4575521 - DNA, 25 bp, Homo sapien
gtattacacgttcatggctgttctg

SEQ ID NO: 4575522 - DNA, 25 bp, Homo sapien
gttcatcaattaataacagcctgag

SEQ ID NO: 4575523 - DNA, 25 bp, Homo sapien
gcccagatcatccaaatccaaggta

SEQ ID NO: 4575524 - DNA, 25 bp, Homo sapien
gcccggtaatgcaccaggcttgaat

SEQ ID NO: 4575525 - DNA, 25 bp, Homo sapien
ggctctaatcaagctctaggacagg

SEQ ID NO: 4575526 - DNA, 25 bp, Homo sapien
gaaatgcactgtttggcccggtaat

SEQ ID NO: 4575527 - DNA, 25 bp, Homo sapien
tgcctcaactgctagtacgaccaga

SEQ ID NO: 4575528 - DNA, 25 bp, Homo sapien
aactctactagggtgtgcagggtca

SEQ ID NO: 4575529 - DNA, 25 bp, Homo sapien
taaactctactagggtgtgcagggt

SEQ ID NO: 4575530 - DNA, 25 bp, Homo sapien
aaactctactagggtgtgcagggtc

SEQ ID NO: 4575531 - DNA, 25 bp, Homo sapien
tgagcaatggactgttcatttatcg

SEQ ID NO: 4575532 - DNA, 25 bp, Homo sapien
tggactgttcatttatcgatgttgg

SEQ ID NO: 4575533 - DNA, 25 bp, Homo sapien
ctggtgaggatattgagcaatggac

SEQ ID NO: 4575534 - DNA, 25 bp, Homo sapien
attcacagttgccaaaacctggagg

SEQ ID NO: 4575535 - DNA, 25 bp, Homo sapien
taaaattaaacattgacaactccag

SEQ ID NO: 4575536 - DNA, 25 bp, Homo sapien
gtaaaattaaacattgacaactcca

SEQ ID NO: 4575537 - DNA, 25 bp, Homo sapien
aaatttgtgcagtttcactatataa

SEQ ID NO: 4575538 - DNA, 25 bp, Homo sapien
atttgtgcagtttcactatataaac

SEQ ID NO: 4575539 - DNA, 25 bp, Homo sapien
aatggcacacttaaaatttgtgcag

SEQ ID NO: 4575540 - DNA, 25 bp, Homo sapien
caaatggcacacttaaaatttgtgc

SEQ ID NO: 4575541 - DNA, 25 bp, Homo sapien
ttccagagtggtgatggagacaaaa

SEQ ID NO: 4575542 - DNA, 25 bp, Homo sapien
tccagagtggtgatggagacaaaaa

SEQ ID NO: 4575543 - DNA, 25 bp, Homo sapien
atctggttccagagtggtgatggag

SEQ ID NO: 4575544 - DNA, 25 bp, Homo sapien
tatctggttccagagtggtgatgga

SEQ ID NO: 4575545 - DNA, 25 bp, Homo sapien
tccttgaaggctcagaacgaacaaa

SEQ ID NO: 4575546 - DNA, 25 bp, Homo sapien
tgaaagagtccctcagaggctcccc

SEQ ID NO: 4575547 - DNA, 25 bp, Homo sapien
tgccatcataaagcacgggagggat

SEQ ID NO: 4575548 - DNA, 25 bp, Homo sapien
tataacctatggagccaggacagga

SEQ ID NO: 4575549 - DNA, 25 bp, Homo sapien
ttttatggagttgccaacaggctgg

SEQ ID NO: 4575550 - DNA, 25 bp, Homo sapien
tgagtgggcgtgcacttctcaagtg

SEQ ID NO: 4575551 - DNA, 25 bp, Homo sapien
cacatgaggctttcctagagaccag

SEQ ID NO: 4575552 - DNA, 25 bp, Homo sapien
tacctgatggcgctgcataaactgg

SEQ ID NO: 4575553 - DNA, 25 bp, Homo sapien
ctaatagtgagggtgtacttccgaa

SEQ ID NO: 4575554 - DNA, 25 bp, Homo sapien
tacttccgaatagaagagtccttcg

SEQ ID NO: 4575555 - DNA, 25 bp, Homo sapien
agtccttcggctgaaatggcatctc

SEQ ID NO: 4575556 - DNA, 25 bp, Homo sapien
ctccaaggcctacagttcgaatggg

SEQ ID NO: 4575557 - DNA, 25 bp, Homo sapien
gctcctgttcattcagcccaaggga

SEQ ID NO: 4575558 - DNA, 25 bp, Homo sapien
tgggtttaatacaatcctggagcct

SEQ ID NO: 4575559 - DNA, 25 bp, Homo sapien
agttgccaggatgtggtagaccagc

SEQ ID NO: 4575560 - DNA, 25 bp, Homo sapien
gagcctgcctccgaatgggaagtca

SEQ ID NO: 4575561 - DNA, 25 bp, Homo sapien
gaccagtaaaatggagacctcaagc

SEQ ID NO: 4575562 - DNA, 25 bp, Homo sapien
catcatttgggagaaactggaaagc

SEQ ID NO: 4575563 - DNA, 25 bp, Homo sapien
aaagattaccaaacaggtgcccgtg

SEQ ID NO: 4575564 - DNA, 25 bp, Homo sapien
cagccagtgactaaatgacagggaa

SEQ ID NO: 4575565 - DNA, 25 bp, Homo sapien
tgcagcactgtgtgtaacagcaaag

SEQ ID NO: 4575566 - DNA, 25 bp, Homo sapien
taagtaaacggaggtacatctacac

SEQ ID NO: 4575567 - DNA, 25 bp, Homo sapien
ccatccagaaggttcaggttaagta

SEQ ID NO: 4575568 - DNA, 25 bp, Homo sapien
tactctccatgttagtgatgcagga

SEQ ID NO: 4575569 - DNA, 25 bp, Homo sapien
gttagtcatactggccagctctagg

SEQ ID NO: 4575570 - DNA, 25 bp, Homo sapien
tctaggtgaactggaataccagtgg

SEQ ID NO: 4575571 - DNA, 25 bp, Homo sapien
cagctctaggtgaactggaatacca

SEQ ID NO: 4575572 - DNA, 25 bp, Homo sapien
gatggacaatgctgctcatgagctc

SEQ ID NO: 4575573 - DNA, 25 bp, Homo sapien
agatcagatcctgagaggcggttcc

SEQ ID NO: 4575574 - DNA, 25 bp, Homo sapien
ggccttctttgcatgctcacgggag

SEQ ID NO: 4575575 - DNA, 25 bp, Homo sapien
gagctacaagcaatgtgggtcccca

SEQ ID NO: 4575576 - DNA, 25 bp, Homo sapien
tcagagatggcagttcacttcgact

SEQ ID NO: 4575577 - DNA, 25 bp, Homo sapien
cagaggctcaggcaagaagatgttc

SEQ ID NO: 4575578 - DNA, 25 bp, Homo sapien
agcaggaggcaagctccacagccag

SEQ ID NO: 4575579 - DNA, 25 bp, Homo sapien
cagccagctgccaagatatgtccct

SEQ ID NO: 4575580 - DNA, 25 bp, Homo sapien
cccacatctgaagggatacagtgag

SEQ ID NO: 4575581 - DNA, 25 bp, Homo sapien
tgaaattctgtaacagtgccattac

SEQ ID NO: 4575582 - DNA, 25 bp, Homo sapien
caagagaggctggaacctgaagaaa

SEQ ID NO: 4575583 - DNA, 25 bp, Homo sapien
gaggctggaacctgaagaaaaccac

SEQ ID NO: 4575584 - DNA, 25 bp, Homo sapien
ccagctgagatctgtgaaattctgt

SEQ ID NO: 4575585 - DNA, 25 bp, Homo sapien
catggggagcttttaactggcccca

SEQ ID NO: 4575586 - DNA, 25 bp, Homo sapien
aatcggttggcatggggagctttta

SEQ ID NO: 4575587 - DNA, 25 bp, Homo sapien
gccccgttggagaggtcgtgagaga

SEQ ID NO: 4575588 - DNA, 25 bp, Homo sapien
ggtcgtgagagaagatgaatcggtt

SEQ ID NO: 4575589 - DNA, 25 bp, Homo sapien
gaaaaacccagtcaacacaatggga

SEQ ID NO: 4575590 - DNA, 25 bp, Homo sapien
caatgggaagaaaaggaagaggctt

SEQ ID NO: 4575591 - DNA, 25 bp, Homo sapien
ctggaaaaacccagtcaacacaatg

SEQ ID NO: 4575592 - DNA, 25 bp, Homo sapien
aaaacccagtcaacacaatgggaag

SEQ ID NO: 4575593 - DNA, 25 bp, Homo sapien
ggcactttcaggcacctcacaggag

SEQ ID NO: 4575594 - DNA, 25 bp, Homo sapien
acaggagccttggctccaagcaggc

SEQ ID NO: 4575595 - DNA, 25 bp, Homo sapien
ctgaggagaccccagcaacaatggc

SEQ ID NO: 4575596 - DNA, 25 bp, Homo sapien
ccaagcaggctggtttctggctgag

SEQ ID NO: 4575597 - DNA, 25 bp, Homo sapien
gagacagtacagaatggcagcatga

SEQ ID NO: 4575598 - DNA, 25 bp, Homo sapien
tggtttctgggcacctgatccaaag

SEQ ID NO: 4575599 - DNA, 25 bp, Homo sapien
taccagcatacagtgtgcagcacgc

SEQ ID NO: 4575600 - DNA, 25 bp, Homo sapien
gaacagactgatgacctaaatgccc

SEQ ID NO: 4575601 - DNA, 25 bp, Homo sapien
tctgtgaaattctgtaacagtgcca

SEQ ID NO: 4575602 - DNA, 25 bp, Homo sapien
tgaaattctgtaacagtgccattac

SEQ ID NO: 4575603 - DNA, 25 bp, Homo sapien
cagctgagatctgtgaaattctgta

SEQ ID NO: 4575604 - DNA, 25 bp, Homo sapien
tgtgaaattctgtaacagtgccatt

SEQ ID NO: 4575605 - DNA, 25 bp, Homo sapien
gggcagatgcaaatggatctaattc

SEQ ID NO: 4575606 - DNA, 25 bp, Homo sapien
agggggcagatgcaaatggatctaa

SEQ ID NO: 4575607 - DNA, 25 bp, Homo sapien
tccatcatgtgcaatccagaaagga

SEQ ID NO: 4575608 - DNA, 25 bp, Homo sapien
atcatgtgcaatccagaaaggacca

SEQ ID NO: 4575609 - DNA, 25 bp, Homo sapien
gaactcatggcagcaatacctcagg

SEQ ID NO: 4575610 - DNA, 25 bp, Homo sapien
tgtaatggtagttagcgcccctctt

SEQ ID NO: 4575611 - DNA, 25 bp, Homo sapien
aaaacctctgcgtagtgactcactg

SEQ ID NO: 4575612 - DNA, 25 bp, Homo sapien
cttaactacatacgaggcacagctg

SEQ ID NO: 4575613 - DNA, 25 bp, Homo sapien
cacgtgcggccaggtcatcttttca

SEQ ID NO: 4575614 - DNA, 25 bp, Homo sapien
gattctagtaagcacccgaaagaga

SEQ ID NO: 4575615 - DNA, 25 bp, Homo sapien
tatgaattgcctacgtcaacgctgt

SEQ ID NO: 4575616 - DNA, 25 bp, Homo sapien
tgggaaaactaaagctgagaaactc

SEQ ID NO: 4575617 - DNA, 25 bp, Homo sapien
gagttgaatggatgctacctgcctt

SEQ ID NO: 4575618 - DNA, 25 bp, Homo sapien
gacaacggccagtatcagctcagta

SEQ ID NO: 4575619 - DNA, 25 bp, Homo sapien
tcagaaaggcctagggcagaatcca

SEQ ID NO: 4575620 - DNA, 25 bp, Homo sapien
gagcaattctgcttgtagacctggg

SEQ ID NO: 4575621 - DNA, 25 bp, Homo sapien
caatctgacaatacacagccccttg

SEQ ID NO: 4575622 - DNA, 25 bp, Homo sapien
gccaccattacttactcatttcctt

SEQ ID NO: 4575623 - DNA, 25 bp, Homo sapien
caaagataaatttccggcacagtca

SEQ ID NO: 4575624 - DNA, 25 bp, Homo sapien
cccttgactggtcttgccaccatta

SEQ ID NO: 4575625 - DNA, 25 bp, Homo sapien
taaaatgaggtggaactcatccact

SEQ ID NO: 4575626 - DNA, 25 bp, Homo sapien
gctcatgtagctttggaccaactgg

SEQ ID NO: 4575627 - DNA, 25 bp, Homo sapien
cctgcaatgactctggtggaacaaa

SEQ ID NO: 4575628 - DNA, 25 bp, Homo sapien
ggaccaactggaccgcaaagaagaa

SEQ ID NO: 4575629 - DNA, 25 bp, Homo sapien
cctggctggaattttgtcaagtcta

SEQ ID NO: 4575630 - DNA, 25 bp, Homo sapien
gattgattctaaccctcttggacgc

SEQ ID NO: 4575631 - DNA, 25 bp, Homo sapien
ttggacgccttttgagattcaagac

SEQ ID NO: 4575632 - DNA, 25 bp, Homo sapien
tcaagacttcagtaaactgcagtaa

SEQ ID NO: 4575633 - DNA, 25 bp, Homo sapien
gctggaatggctatttcaatcaaaa

SEQ ID NO: 4575634 - DNA, 25 bp, Homo sapien
aagtacacacagaacctcaccaaga

SEQ ID NO: 4575635 - DNA, 25 bp, Homo sapien
ggtctcaaaaacttagtaggattca

SEQ ID NO: 4575636 - DNA, 25 bp, Homo sapien
tacagttggagacgtcaacatacct

SEQ ID NO: 4575637 - DNA, 25 bp, Homo sapien
aatctgagttggctgcaaatttctg

SEQ ID NO: 4575638 - DNA, 25 bp, Homo sapien
atttctgtccaattaaagctgcatt

SEQ ID NO: 4575639 - DNA, 25 bp, Homo sapien
aatttctgtccaattaaagctgcat

SEQ ID NO: 4575640 - DNA, 25 bp, Homo sapien
tccttatcactgaagaagcgctcag

SEQ ID NO: 4575641 - DNA, 25 bp, Homo sapien
ggcaatgtcgtgaaaagtttcctta

SEQ ID NO: 4575642 - DNA, 25 bp, Homo sapien
actgaagaagcgctcagcagctgct

SEQ ID NO: 4575643 - DNA, 25 bp, Homo sapien
tcctgggaactctgatgcaacctgg

SEQ ID NO: 4575644 - DNA, 25 bp, Homo sapien
ccagatcattccttgaatgcagaat

SEQ ID NO: 4575645 - DNA, 25 bp, Homo sapien
gatcattccttgaatgcagaatgct

SEQ ID NO: 4575646 - DNA, 25 bp, Homo sapien
caccacatcaacacatgcattgact

SEQ ID NO: 4575647 - DNA, 25 bp, Homo sapien
gagcaccacatcaacacatgcattg

SEQ ID NO: 4575648 - DNA, 25 bp, Homo sapien
tagtgatacgggtgactgggcttca

SEQ ID NO: 4575649 - DNA, 25 bp, Homo sapien
tggcatgacctctcctatgtgtgta

SEQ ID NO: 4575650 - DNA, 25 bp, Homo sapien
gaggttggattaccacacaggcagc

SEQ ID NO: 4575651 - DNA, 25 bp, Homo sapien
gcaaactgagaccacccctagtgat

SEQ ID NO: 4575652 - DNA, 25 bp, Homo sapien
tccaaatggatttgggtcccgagtc

SEQ ID NO: 4575653 - DNA, 25 bp, Homo sapien
taggttcctaagtttcagacagtga

SEQ ID NO: 4575654 - DNA, 25 bp, Homo sapien
gagtaaggagggataccatttcctc

SEQ ID NO: 4575655 - DNA, 25 bp, Homo sapien
cagaaatggagggaaacctgtcttt

SEQ ID NO: 4575656 - DNA, 25 bp, Homo sapien
tacagaaatgcatcaccacgcctaa

SEQ ID NO: 4575657 - DNA, 25 bp, Homo sapien
acagaaatgcatcaccacgcctaat

SEQ ID NO: 4575658 - DNA, 25 bp, Homo sapien
attacagaaatgcatcaccacgcct

SEQ ID NO: 4575659 - DNA, 25 bp, Homo sapien
ttacagaaatgcatcaccacgccta

SEQ ID NO: 4575660 - DNA, 25 bp, Homo sapien
agccgtgccgagtgaatagcaggga

SEQ ID NO: 4575661 - DNA, 25 bp, Homo sapien
gccgtgccgagtgaatagcagggaa

SEQ ID NO: 4575662 - DNA, 25 bp, Homo sapien
cgtgccgagtgaatagcagggaaga

SEQ ID NO: 4575663 - DNA, 25 bp, Homo sapien
tgccgagtgaatagcagggaagagc

SEQ ID NO: 4575664 - DNA, 25 bp, Homo sapien
tgggtaaaggcagacatcacgcgtc

SEQ ID NO: 4575665 - DNA, 25 bp, Homo sapien
cttaagaacctagcacagacctgac

SEQ ID NO: 4575666 - DNA, 25 bp, Homo sapien
gtttctagactacacggcgtttcga

SEQ ID NO: 4575667 - DNA, 25 bp, Homo sapien
tgattgcaaaacaacagtcgccaga

SEQ ID NO: 4575668 - DNA, 25 bp, Homo sapien
caaggccgacctcggaggctcagag

SEQ ID NO: 4575669 - DNA, 25 bp, Homo sapien
gaagccctgtttctgcgcggctccg

SEQ ID NO: 4575670 - DNA, 25 bp, Homo sapien
agcagcggtgacgaaccgggttcca

SEQ ID NO: 4575671 - DNA, 25 bp, Homo sapien
gacgtccgacacttctcgccaaggg

SEQ ID NO: 4575672 - DNA, 25 bp, Homo sapien
gcaggaagacgcagcccacggccag

SEQ ID NO: 4575673 - DNA, 25 bp, Homo sapien
cgagctccagagagagcgcagcgcc

SEQ ID NO: 4575674 - DNA, 25 bp, Homo sapien
cagcgccggactggccgcacgataa

SEQ ID NO: 4575675 - DNA, 25 bp, Homo sapien
acgataagcgcgtcccaggctgccg

SEQ ID NO: 4575676 - DNA, 25 bp, Homo sapien
taggctcacagaatagcggcgctgc

SEQ ID NO: 4575677 - DNA, 25 bp, Homo sapien
tgtgaagaagcggacaaacctcgcg

SEQ ID NO: 4575678 - DNA, 25 bp, Homo sapien
taatattcgaaccagtgggtgtccc

SEQ ID NO: 4575679 - DNA, 25 bp, Homo sapien
tagtgctcggcgcttctgagaggaa

SEQ ID NO: 4575680 - DNA, 25 bp, Homo sapien
gcttctggtcacatacagagtcaca

SEQ ID NO: 4575681 - DNA, 25 bp, Homo sapien
ccaggcctggcggagcctgatgtgg

SEQ ID NO: 4575682 - DNA, 25 bp, Homo sapien
gatgtggcttctggtcacatacaga

SEQ ID NO: 4575683 - DNA, 25 bp, Homo sapien
tcaattccaactgagaactgaagag

SEQ ID NO: 4575684 - DNA, 25 bp, Homo sapien
gatgaaagaaatatggcccgcttgc

SEQ ID NO: 4575685 - DNA, 25 bp, Homo sapien
atttctgagtcaaagcctgaggagg

SEQ ID NO: 4575686 - DNA, 25 bp, Homo sapien
tctgagaccagaagacagcccatct

SEQ ID NO: 4575687 - DNA, 25 bp, Homo sapien
gctgattagtagctgaccactgaca

SEQ ID NO: 4575688 - DNA, 25 bp, Homo sapien
gagtgttccatggtatggctgcccc

SEQ ID NO: 4575689 - DNA, 25 bp, Homo sapien
aatcattaggtttaagggtagctgc

SEQ ID NO: 4575690 - DNA, 25 bp, Homo sapien
tttggctaggcttctattaacagac

SEQ ID NO: 4575691 - DNA, 25 bp, Homo sapien
gaggtccacctcagcattttaagtg

SEQ ID NO: 4575692 - DNA, 25 bp, Homo sapien
accagggagtccacgtacagctgat

SEQ ID NO: 4575693 - DNA, 25 bp, Homo sapien
gggagtccacgtacagctgatgcct

SEQ ID NO: 4575694 - DNA, 25 bp, Homo sapien
cagggagtccacgtacagctgatgc

SEQ ID NO: 4575695 - DNA, 25 bp, Homo sapien
gagtccacgtacagctgatgcctcc

SEQ ID NO: 4575696 - DNA, 25 bp, Homo sapien
cacgtgctcccaggaaatcatacat

SEQ ID NO: 4575697 - DNA, 25 bp, Homo sapien
gggtgatgtccagtggctctgtact

SEQ ID NO: 4575698 - DNA, 25 bp, Homo sapien
tagcatcatattcaagaagagtgtg

SEQ ID NO: 4575699 - DNA, 25 bp, Homo sapien
ggatgttgttagcatcatattcaag

SEQ ID NO: 4575700 - DNA, 25 bp, Homo sapien
tcccaggaagccttgtcaggctgct

SEQ ID NO: 4575701 - DNA, 25 bp, Homo sapien
gagtgggaaacaccaagaccttgag

SEQ ID NO: 4575702 - DNA, 25 bp, Homo sapien
tgggaaacaccaagaccttgagagg

SEQ ID NO: 4575703 - DNA, 25 bp, Homo sapien
ggagtgggaaacaccaagaccttga

SEQ ID NO: 4575704 - DNA, 25 bp, Homo sapien
agtgggaaacaccaagaccttgaga

SEQ ID NO: 4575705 - DNA, 25 bp, Homo sapien
gtatgagagtctatagaagcaggag

SEQ ID NO: 4575706 - DNA, 25 bp, Homo sapien
tctaagccaaaagtatgagagtcta

SEQ ID NO: 4575707 - DNA, 25 bp, Homo sapien
taacccttctaagccaaaagtatga

SEQ ID NO: 4575708 - DNA, 25 bp, Homo sapien
caaaagtatgagagtctatagaagc

SEQ ID NO: 4575709 - DNA, 25 bp, Homo sapien
aaacatccactgtagtagaagcgag

SEQ ID NO: 4575710 - DNA, 25 bp, Homo sapien
tagaagcgaggacctgccactgtac

SEQ ID NO: 4575711 - DNA, 25 bp, Homo sapien
actgtagtagaagcgaggacctgcc

SEQ ID NO: 4575712 - DNA, 25 bp, Homo sapien
catccactgtagtagaagcgaggac

SEQ ID NO: 4575713 - DNA, 25 bp, Homo sapien
gaaatgctttcccaacagagtgtaa

SEQ ID NO: 4575714 - DNA, 25 bp, Homo sapien
ttcacaggatttttgtcgtagaaaa

SEQ ID NO: 4575715 - DNA, 25 bp, Homo sapien
ccaacagagtgtaaagccaaggctg

SEQ ID NO: 4575716 - DNA, 25 bp, Homo sapien
gatttttgtcgtagaaaatgatgaa

SEQ ID NO: 4575717 - DNA, 25 bp, Homo sapien
tctgttatactccagccatttgctg

SEQ ID NO: 4575718 - DNA, 25 bp, Homo sapien
cattggagccattgtaacttcattg

SEQ ID NO: 4575719 - DNA, 25 bp, Homo sapien
tatattgacacagctgagcactacc

SEQ ID NO: 4575720 - DNA, 25 bp, Homo sapien
tccaacagttccctccatgactagt

SEQ ID NO: 4575721 - DNA, 25 bp, Homo sapien
ccttgttacggctgcactataagca

SEQ ID NO: 4575722 - DNA, 25 bp, Homo sapien
gcgtacactcatgattgcagctgga

SEQ ID NO: 4575723 - DNA, 25 bp, Homo sapien
taagcagttcagatcgccaaagggc

SEQ ID NO: 4575724 - DNA, 25 bp, Homo sapien
tgtgggatgagatgagcgtacactc

SEQ ID NO: 4575725 - DNA, 25 bp, Homo sapien
gatccaaacacaagtcccctgaagc

SEQ ID NO: 4575726 - DNA, 25 bp, Homo sapien
tgtggcctttgtacctatgatctca

SEQ ID NO: 4575727 - DNA, 25 bp, Homo sapien
agtgtctggtgagcgcctgctatgc

SEQ ID NO: 4575728 - DNA, 25 bp, Homo sapien
taatcaagttacacccgatagacag

SEQ ID NO: 4575729 - DNA, 25 bp, Homo sapien
gatgctgccgaaatctgagcttgtc

SEQ ID NO: 4575730 - DNA, 25 bp, Homo sapien
cctcctggcttggaattcatgagaa

SEQ ID NO: 4575731 - DNA, 25 bp, Homo sapien
ctgagcttgtcagcgatggccctgc

SEQ ID NO: 4575732 - DNA, 25 bp, Homo sapien
tctcaaatgtctctcggagcactgg

SEQ ID NO: 4575733 - DNA, 25 bp, Homo sapien
ggcccagcggcagaaacaggaggag

SEQ ID NO: 4575734 - DNA, 25 bp, Homo sapien
tggatccttcaccttccagagtcat

SEQ ID NO: 4575735 - DNA, 25 bp, Homo sapien
ctattggatccttcaccttccagag

SEQ ID NO: 4575736 - DNA, 25 bp, Homo sapien
ttggatccttcaccttccagagtca

SEQ ID NO: 4575737 - DNA, 25 bp, Homo sapien
tattggatccttcaccttccagagt

SEQ ID NO: 4575738 - DNA, 25 bp, Homo sapien
agacaattctttacataattgacga

SEQ ID NO: 4575739 - DNA, 25 bp, Homo sapien
acttctgtgcattttcggctggagc

SEQ ID NO: 4575740 - DNA, 25 bp, Homo sapien
gtcattcatccagagacaattcttt

SEQ ID NO: 4575741 - DNA, 25 bp, Homo sapien
ttctgtgcattttcggctggagcat

SEQ ID NO: 4575742 - DNA, 25 bp, Homo sapien
tatgcactggccccgaaccaagctt

SEQ ID NO: 4575743 - DNA, 25 bp, Homo sapien
atatgcactggccccgaaccaagct

SEQ ID NO: 4575744 - DNA, 25 bp, Homo sapien
aatatgcactggccccgaaccaagc

SEQ ID NO: 4575745 - DNA, 25 bp, Homo sapien
tttgcaccagctcctaaactgactg

SEQ ID NO: 4575746 - DNA, 25 bp, Homo sapien
tgcaccagctcctaaactgactgtt

SEQ ID NO: 4575747 - DNA, 25 bp, Homo sapien
atcctttgcaccagctcctaaactg

SEQ ID NO: 4575748 - DNA, 25 bp, Homo sapien
gtgcagttcatcctttgcaccagct

SEQ ID NO: 4575749 - DNA, 25 bp, Homo sapien
tccatcgaatcttccttgggatggt

SEQ ID NO: 4575750 - DNA, 25 bp, Homo sapien
catcgaatcttccttgggatggtgg

SEQ ID NO: 4575751 - DNA, 25 bp, Homo sapien
tcgaatcttccttgggatggtggca

SEQ ID NO: 4575752 - DNA, 25 bp, Homo sapien
tagttcgcaaccaaaaagatagctc

SEQ ID NO: 4575753 - DNA, 25 bp, Homo sapien
gcttgcacagtacaataaagatctg

SEQ ID NO: 4575754 - DNA, 25 bp, Homo sapien
tcccagcttggaagcaaaagcttgt

SEQ ID NO: 4575755 - DNA, 25 bp, Homo sapien
gaggagttcgacttggcttgcacag

SEQ ID NO: 4575756 - DNA, 25 bp, Homo sapien
gggccagcatggatcagcagagtca

SEQ ID NO: 4575757 - DNA, 25 bp, Homo sapien
tatacaatgttccatcgtcctggaa

SEQ ID NO: 4575758 - DNA, 25 bp, Homo sapien
ttccttatacaatgttccatcgtcc

SEQ ID NO: 4575759 - DNA, 25 bp, Homo sapien
gctggttaaggcaggaggacttagg

SEQ ID NO: 4575760 - DNA, 25 bp, Homo sapien
tgttccatcgtcctggaagaaggtg

SEQ ID NO: 4575761 - DNA, 25 bp, Homo sapien
ttggctatagtaaccatattctcca

SEQ ID NO: 4575762 - DNA, 25 bp, Homo sapien
ggctatagtaaccatattctccaat

SEQ ID NO: 4575763 - DNA, 25 bp, Homo sapien
tatagtaaccatattctccaatctg

SEQ ID NO: 4575764 - DNA, 25 bp, Homo sapien
tagtaaccatattctccaatctggg

SEQ ID NO: 4575765 - DNA, 25 bp, Homo sapien
tcttggagtcgttccttttgcacct

SEQ ID NO: 4575766 - DNA, 25 bp, Homo sapien
tggagtcgttccttttgcacctctg

SEQ ID NO: 4575767 - DNA, 25 bp, Homo sapien
gagtcgttccttttgcacctctgca

SEQ ID NO: 4575768 - DNA, 25 bp, Homo sapien
ttctcttggagtcgttccttttgca

SEQ ID NO: 4575769 - DNA, 25 bp, Homo sapien
ccagggtaaagccttggcagatgcc

SEQ ID NO: 4575770 - DNA, 25 bp, Homo sapien
ccagagggctcataggtcagggacc

SEQ ID NO: 4575771 - DNA, 25 bp, Homo sapien
gaaccaagggaagatattccagagg

SEQ ID NO: 4575772 - DNA, 25 bp, Homo sapien
tggtcactatcctttcagcacagct

SEQ ID NO: 4575773 - DNA, 25 bp, Homo sapien
tcaggagtggtccacggccatgttt

SEQ ID NO: 4575774 - DNA, 25 bp, Homo sapien
caggagtggtccacggccatgtttt

SEQ ID NO: 4575775 - DNA, 25 bp, Homo sapien
ggaaatgcaggcataagagcccccg

SEQ ID NO: 4575776 - DNA, 25 bp, Homo sapien
gcccccggagggagccagtagtcat

SEQ ID NO: 4575777 - DNA, 25 bp, Homo sapien
ggagggagccagtagtcatcacagc

SEQ ID NO: 4575778 - DNA, 25 bp, Homo sapien
ctggaaatgcaggcataagagcccc

SEQ ID NO: 4575779 - DNA, 25 bp, Homo sapien
gtatgccttgccaatctcgagctcc

SEQ ID NO: 4575780 - DNA, 25 bp, Homo sapien
ccaatctcgagctccccaggcttgg

SEQ ID NO: 4575781 - DNA, 25 bp, Homo sapien
ggtatgccttgccaatctcgagctc

SEQ ID NO: 4575782 - DNA, 25 bp, Homo sapien
ttgccaatctcgagctccccaggct

SEQ ID NO: 4575783 - DNA, 25 bp, Homo sapien
tagtttgaccagtaacctggtaaga

SEQ ID NO: 4575784 - DNA, 25 bp, Homo sapien
gagtgtgcccaacaatgccaatgag

SEQ ID NO: 4575785 - DNA, 25 bp, Homo sapien
caccctcggcttctgtagtttgacc

SEQ ID NO: 4575786 - DNA, 25 bp, Homo sapien
ggcacctcctttgacaacccgagtg

SEQ ID NO: 4575787 - DNA, 25 bp, Homo sapien
tagcggagcctcctccggctgagaa

SEQ ID NO: 4575788 - DNA, 25 bp, Homo sapien
ccgaggggtctgtactgttcaggcc

SEQ ID NO: 4575789 - DNA, 25 bp, Homo sapien
tcttctctcttagcggagcctcctc

SEQ ID NO: 4575790 - DNA, 25 bp, Homo sapien
cctcctccggctgagaagtaatctg

SEQ ID NO: 4575791 - DNA, 25 bp, Homo sapien
ccttggcttcgttgtccagatgcat

SEQ ID NO: 4575792 - DNA, 25 bp, Homo sapien
cttccccttggcttcgttgtccaga

SEQ ID NO: 4575793 - DNA, 25 bp, Homo sapien
tgtagctcagcacatccaaggacag

SEQ ID NO: 4575794 - DNA, 25 bp, Homo sapien
tgatctgtgtagctcagcacatcca

SEQ ID NO: 4575795 - DNA, 25 bp, Homo sapien
tgtgccaccatccttgcccactgac

SEQ ID NO: 4575796 - DNA, 25 bp, Homo sapien
ttgtgccaccatccttgcccactga

SEQ ID NO: 4575797 - DNA, 25 bp, Homo sapien
cttgtgccaccatccttgcccactg

SEQ ID NO: 4575798 - DNA, 25 bp, Homo sapien
atggtcgtagtccaggtggttgtat

SEQ ID NO: 4575799 - DNA, 25 bp, Homo sapien
aatggtcgtagtccaggtggttgta

SEQ ID NO: 4575800 - DNA, 25 bp, Homo sapien
caaatggtcgtagtccaggtggttg

SEQ ID NO: 4575801 - DNA, 25 bp, Homo sapien
tcaaatggtcgtagtccaggtggtt

SEQ ID NO: 4575802 - DNA, 25 bp, Homo sapien
tgtgaccgcttttccagcccatatt

SEQ ID NO: 4575803 - DNA, 25 bp, Homo sapien
ctggtagaagttccgcatacttcct

SEQ ID NO: 4575804 - DNA, 25 bp, Homo sapien
agaagttccgcatacttcctagcat

SEQ ID NO: 4575805 - DNA, 25 bp, Homo sapien
aggtggaaggtgaaatcttgtgacc

SEQ ID NO: 4575806 - DNA, 25 bp, Homo sapien
taaagggcatgtcgacagtgtcagt

SEQ ID NO: 4575807 - DNA, 25 bp, Homo sapien
tattaacctgatatacacagtgggc

SEQ ID NO: 4575808 - DNA, 25 bp, Homo sapien
gattagcagtatacgtgcaggctga

SEQ ID NO: 4575809 - DNA, 25 bp, Homo sapien
tctaatttaacaggtcaatcacggg

SEQ ID NO: 4575810 - DNA, 25 bp, Homo sapien
cagttactgcgagaagactggcccc

SEQ ID NO: 4575811 - DNA, 25 bp, Homo sapien
caagtgtcccgcaaaggtacaggta

SEQ ID NO: 4575812 - DNA, 25 bp, Homo sapien
gggtgctgcctcacgattactaagt

SEQ ID NO: 4575813 - DNA, 25 bp, Homo sapien
tatcagcgaaagacgtgattcccag

SEQ ID NO: 4575814 - DNA, 25 bp, Homo sapien
tctgaggccctatatagaggctcca

SEQ ID NO: 4575815 - DNA, 25 bp, Homo sapien
tttggcgagcacataaatccccggg

SEQ ID NO: 4575816 - DNA, 25 bp, Homo sapien
agtcgggcgggatcgctattgtttt

SEQ ID NO: 4575817 - DNA, 25 bp, Homo sapien
gaggcctttcggtttcctctgaggc

SEQ ID NO: 4575818 - DNA, 25 bp, Homo sapien
ccccgcacccgtcagcggctccggg

SEQ ID NO: 4575819 - DNA, 25 bp, Homo sapien
tctccggggtttccctgacgccagc

SEQ ID NO: 4575820 - DNA, 25 bp, Homo sapien
tccggggtttccctgacgccagcag

SEQ ID NO: 4575821 - DNA, 25 bp, Homo sapien
gcgggcccgccacggcccgagaggc

SEQ ID NO: 4575822 - DNA, 25 bp, Homo sapien
tgatttaacgatgaggacgccttgg

SEQ ID NO: 4575823 - DNA, 25 bp, Homo sapien
ggatttcccagcttccgaagtctcg

SEQ ID NO: 4575824 - DNA, 25 bp, Homo sapien
gagctggctagtctcgagggactcc

SEQ ID NO: 4575825 - DNA, 25 bp, Homo sapien
cgaagtctcgaggaagagctggcta

SEQ ID NO: 4575826 - DNA, 25 bp, Homo sapien
ctttggcttttctttctttttgcat

SEQ ID NO: 4575827 - DNA, 25 bp, Homo sapien
cagatttgtccctttggcttttctt

SEQ ID NO: 4575828 - DNA, 25 bp, Homo sapien
tattatcagtagaacagcgaagctc

SEQ ID NO: 4575829 - DNA, 25 bp, Homo sapien
aaggttattatcagtgtgtggccac

SEQ ID NO: 4575830 - DNA, 25 bp, Homo sapien
ggtggatacactctcagttagaggc

SEQ ID NO: 4575831 - DNA, 25 bp, Homo sapien
tatcagatgatcgacgccagcttct

SEQ ID NO: 4575832 - DNA, 25 bp, Homo sapien
gaaccttcctcagtttatgctggga

SEQ ID NO: 4575833 - DNA, 25 bp, Homo sapien
tccaagtggaatgctggttatcagc

SEQ ID NO: 4575834 - DNA, 25 bp, Homo sapien
ttatcgctgcgtagtggaaagtggt

SEQ ID NO: 4575835 - DNA, 25 bp, Homo sapien
caactgaaggagatggcgggcttta

SEQ ID NO: 4575836 - DNA, 25 bp, Homo sapien
ttgaaggattcttgatcttggtgtt

SEQ ID NO: 4575837 - DNA, 25 bp, Homo sapien
tgaaggattcttgatcttggtgttg

SEQ ID NO: 4575838 - DNA, 25 bp, Homo sapien
ttaagatggtaatgtttgtcagcct

SEQ ID NO: 4575839 - DNA, 25 bp, Homo sapien
gatggtaatgtttgtcagcctttgg

SEQ ID NO: 4575840 - DNA, 25 bp, Homo sapien
acaatgaaaaacatggtcctcaggc

SEQ ID NO: 4575841 - DNA, 25 bp, Homo sapien
ttatccaccttaagatggtaatgtt

SEQ ID NO: 4575842 - DNA, 25 bp, Homo sapien
atttcatcttcatcgctgataccct

SEQ ID NO: 4575843 - DNA, 25 bp, Homo sapien
tttgaatttcctcctgtagcttgga

SEQ ID NO: 4575844 - DNA, 25 bp, Homo sapien
tgaatttcctcctgtagcttggagt

SEQ ID NO: 4575845 - DNA, 25 bp, Homo sapien
ccttcatttcatcttcatcgctgat

SEQ ID NO: 4575846 - DNA, 25 bp, Homo sapien
aaccgtctatgggtttctcagctgc

SEQ ID NO: 4575847 - DNA, 25 bp, Homo sapien
gggtttctcagctgcggataccagc

SEQ ID NO: 4575848 - DNA, 25 bp, Homo sapien
tgttgttcaggtactttggtcccat

SEQ ID NO: 4575849 - DNA, 25 bp, Homo sapien
gtcagagggaacatctagagctgaa

SEQ ID NO: 4575850 - DNA, 25 bp, Homo sapien
gggcggggctagatggtgtctgagc

SEQ ID NO: 4575851 - DNA, 25 bp, Homo sapien
gatgggggtgagttaatggagttgt

SEQ ID NO: 4575852 - DNA, 25 bp, Homo sapien
tctccttgggcgcgtctccctgcgg

SEQ ID NO: 4575853 - DNA, 25 bp, Homo sapien
gactctccttgggcgcgtctccctg

SEQ ID NO: 4575854 - DNA, 25 bp, Homo sapien
tagaacagaaaagattagagttcat

SEQ ID NO: 4575855 - DNA, 25 bp, Homo sapien
taccgctcttacgtaaacacacatg

SEQ ID NO: 4575856 - DNA, 25 bp, Homo sapien
tagagttcattgcacttagtaaggg

SEQ ID NO: 4575857 - DNA, 25 bp, Homo sapien
tttcatgaaactcagctaaatctta

SEQ ID NO: 4575858 - DNA, 25 bp, Homo sapien
aatatggtttcaccctggagatcac

SEQ ID NO: 4575859 - DNA, 25 bp, Homo sapien
ggatccacatgtgtatctaatatgg

SEQ ID NO: 4575860 - DNA, 25 bp, Homo sapien
gaatcctcccgtcttcctcaaggag

SEQ ID NO: 4575861 - DNA, 25 bp, Homo sapien
acatgggaaccagattgagtgcttt

SEQ ID NO: 4575862 - DNA, 25 bp, Homo sapien
taggaaactccaaagcgtgttggta

SEQ ID NO: 4575863 - DNA, 25 bp, Homo sapien
ccaaaaggtgtgagttatctgtagc

SEQ ID NO: 4575864 - DNA, 25 bp, Homo sapien
cagggcatgtttaatctcgggacaa

SEQ ID NO: 4575865 - DNA, 25 bp, Homo sapien
tttgtcactcaatagagcccatctg

SEQ ID NO: 4575866 - DNA, 25 bp, Homo sapien
gttactgacggtggcaataaatgca

SEQ ID NO: 4575867 - DNA, 25 bp, Homo sapien
taaaatatctctaaaggccgggtgc

SEQ ID NO: 4575868 - DNA, 25 bp, Homo sapien
gattcgtgaacccaacatcatttgg

SEQ ID NO: 4575869 - DNA, 25 bp, Homo sapien
tagccacctgagttggttaggaaag

SEQ ID NO: 4575870 - DNA, 25 bp, Homo sapien
ggtttgaggatttagcggccctgat

SEQ ID NO: 4575871 - DNA, 25 bp, Homo sapien
tattgtcactacgttgcaactggag

SEQ ID NO: 4575872 - DNA, 25 bp, Homo sapien
gatgtcttggtcatagcctggtaag

SEQ ID NO: 4575873 - DNA, 25 bp, Homo sapien
cacagaatagggtaagagcctgacc

SEQ ID NO: 4575874 - DNA, 25 bp, Homo sapien
tgcttctgttacctcagggccttgg

SEQ ID NO: 4575875 - DNA, 25 bp, Homo sapien
tacctggatactgccacagaattgg

SEQ ID NO: 4575876 - DNA, 25 bp, Homo sapien
gaagagagctgtcccagcactctgg

SEQ ID NO: 4575877 - DNA, 25 bp, Homo sapien
cacttaaactgatcctgaagagagc

SEQ ID NO: 4575878 - DNA, 25 bp, Homo sapien
cacacccagataaagaattgaacat

SEQ ID NO: 4575879 - DNA, 25 bp, Homo sapien
ccatcagaaacattaggctaaagga

SEQ ID NO: 4575880 - DNA, 25 bp, Homo sapien
gacacagaccatatgctttatgatg

SEQ ID NO: 4575881 - DNA, 25 bp, Homo sapien
ctttagtgacagaaggcagactggc

SEQ ID NO: 4575882 - DNA, 25 bp, Homo sapien
tactctgtgagtcagttattccact

SEQ ID NO: 4575883 - DNA, 25 bp, Homo sapien
caattctcatactctgcaggtggga

SEQ ID NO: 4575884 - DNA, 25 bp, Homo sapien
tagatacagagcctagagatcctct

SEQ ID NO: 4575885 - DNA, 25 bp, Homo sapien
gaatatacgaacaagcatccaacct

SEQ ID NO: 4575886 - DNA, 25 bp, Homo sapien
gtcaccatacatcagcaattctgga

SEQ ID NO: 4575887 - DNA, 25 bp, Homo sapien
aattcttgccacaaaggcagctact

SEQ ID NO: 4575888 - DNA, 25 bp, Homo sapien
ggcccacccctaatgcaggtaataa

SEQ ID NO: 4575889 - DNA, 25 bp, Homo sapien
gaataataaaactgaccaaaatctg

SEQ ID NO: 4575890 - DNA, 25 bp, Homo sapien
gatggataatgtgggaccagccctt

SEQ ID NO: 4575891 - DNA, 25 bp, Homo sapien
tgagccagcacagtagagaccagta

SEQ ID NO: 4575892 - DNA, 25 bp, Homo sapien
acatcccaggatagctcaaggcaaa

SEQ ID NO: 4575893 - DNA, 25 bp, Homo sapien
gaaatcggtttgtctcacatcccag

SEQ ID NO: 4575894 - DNA, 25 bp, Homo sapien
gagtggctatctacatggctctaca

SEQ ID NO: 4575895 - DNA, 25 bp, Homo sapien
gagagagaacgtccctagaccatgc

SEQ ID NO: 4575896 - DNA, 25 bp, Homo sapien
gattaaactagaccgcacacgtgtg

SEQ ID NO: 4575897 - DNA, 25 bp, Homo sapien
caaggtcgcaggcttctgaggctcc

SEQ ID NO: 4575898 - DNA, 25 bp, Homo sapien
tggcagtttggagcgcactggctca

SEQ ID NO: 4575899 - DNA, 25 bp, Homo sapien
ggcagtttggagcgcactggctcag

SEQ ID NO: 4575900 - DNA, 25 bp, Homo sapien
atggcagtttggagcgcactggctc

SEQ ID NO: 4575901 - DNA, 25 bp, Homo sapien
tcttccgaggcagagtgacgtgctg

SEQ ID NO: 4575902 - DNA, 25 bp, Homo sapien
agtctgcgccccgtcctgaggcagg

SEQ ID NO: 4575903 - DNA, 25 bp, Homo sapien
ggctgagacgcggagatgagcttga

SEQ ID NO: 4575904 - DNA, 25 bp, Homo sapien
aggctctgcggagagtctgcgcccc

SEQ ID NO: 4575905 - DNA, 25 bp, Homo sapien
tccagccagctgttggatgtggaag

SEQ ID NO: 4575906 - DNA, 25 bp, Homo sapien
tgtctctggcgtgctcagtgggcca

SEQ ID NO: 4575907 - DNA, 25 bp, Homo sapien
agtggccagacctagggacaactcc

SEQ ID NO: 4575908 - DNA, 25 bp, Homo sapien
tgtggaagtggccaaacccggctat

SEQ ID NO: 4575909 - DNA, 25 bp, Homo sapien
ttctcctggtagttgaagacgccgg

SEQ ID NO: 4575910 - DNA, 25 bp, Homo sapien
tctcccggtcatgctgcacaatctg

SEQ ID NO: 4575911 - DNA, 25 bp, Homo sapien
gactgcagccgtttcaggtgccttg

SEQ ID NO: 4575912 - DNA, 25 bp, Homo sapien
cccagcgcagaagggatcagggact

SEQ ID NO: 4575913 - DNA, 25 bp, Homo sapien
gaaggcccttcgcatcatggggtac

SEQ ID NO: 4575914 - DNA, 25 bp, Homo sapien
aggtgtcggccctcacgctggctgt

SEQ ID NO: 4575915 - DNA, 25 bp, Homo sapien
gcagtaggtgtcggccctcacgctg

SEQ ID NO: 4575916 - DNA, 25 bp, Homo sapien
ggtccagcgccacggtctcgaaggc

SEQ ID NO: 4575917 - DNA, 25 bp, Homo sapien
ggactcaggatgaggcatgcacagc

SEQ ID NO: 4575918 - DNA, 25 bp, Homo sapien
caggactcaggatgaggcatgcaca

SEQ ID NO: 4575919 - DNA, 25 bp, Homo sapien
ctgccagagcatcaggactcaggat

SEQ ID NO: 4575920 - DNA, 25 bp, Homo sapien
gccagagcatcaggactcaggatga

SEQ ID NO: 4575921 - DNA, 25 bp, Homo sapien
ccggatgatgtagtccccaggctgg

SEQ ID NO: 4575922 - DNA, 25 bp, Homo sapien
ccagcttccgacagttaaagttgat

SEQ ID NO: 4575923 - DNA, 25 bp, Homo sapien
gacgtcacgaagttggggtccgcat

SEQ ID NO: 4575924 - DNA, 25 bp, Homo sapien
ctccaaagtaggagccgtcggccag

SEQ ID NO: 4575925 - DNA, 25 bp, Homo sapien
cggacagggtggattgggacacggg

SEQ ID NO: 4575926 - DNA, 25 bp, Homo sapien
acagggtggattgggacacgggaag

SEQ ID NO: 4575927 - DNA, 25 bp, Homo sapien
gccggacagggtggattgggacacg

SEQ ID NO: 4575928 - DNA, 25 bp, Homo sapien
ctgccggacagggtggattgggaca

SEQ ID NO: 4575929 - DNA, 25 bp, Homo sapien
gtggatgcgctgccgggtgtcgggc

SEQ ID NO: 4575930 - DNA, 25 bp, Homo sapien
ggtgtcgggcgggagcttgtgaaag

SEQ ID NO: 4575931 - DNA, 25 bp, Homo sapien
gcgggagcttgtgaaaggacatgta

SEQ ID NO: 4575932 - DNA, 25 bp, Homo sapien
cgcaggggctcgcttagctcgccca

SEQ ID NO: 4575933 - DNA, 25 bp, Homo sapien
gagcgcgtaggagtactgcttcccc

SEQ ID NO: 4575934 - DNA, 25 bp, Homo sapien
agacgtcggacatgcccacgggcgc

SEQ ID NO: 4575935 - DNA, 25 bp, Homo sapien
cttgaagagcgcgtaggagtactgc

SEQ ID NO: 4575936 - DNA, 25 bp, Homo sapien
agccagacgtcggacatgcccacgg

SEQ ID NO: 4575937 - DNA, 25 bp, Homo sapien
ggctgaaagccttgggtgagaagca

SEQ ID NO: 4575938 - DNA, 25 bp, Homo sapien
ccagtaaaggtacgggagccagcgt

SEQ ID NO: 4575939 - DNA, 25 bp, Homo sapien
tcttgtgccttcctcttgcaatggg

SEQ ID NO: 4575940 - DNA, 25 bp, Homo sapien
gctgccagcgagtcctcctcttgtg

SEQ ID NO: 4575941 - DNA, 25 bp, Homo sapien
tcgtcagggaagtcctgtagcatgg

SEQ ID NO: 4575942 - DNA, 25 bp, Homo sapien
catcatgccgatgaggttcacgatg

SEQ ID NO: 4575943 - DNA, 25 bp, Homo sapien
atgaggttcacgatgcgcaccacgg

SEQ ID NO: 4575944 - DNA, 25 bp, Homo sapien
cagtcgtcagggaagtcctgtagca

SEQ ID NO: 4575945 - DNA, 25 bp, Homo sapien
ccgagaacaaggctggacgttgctg

SEQ ID NO: 4575946 - DNA, 25 bp, Homo sapien
gttgccgagaacaaggctggacgtt

SEQ ID NO: 4575947 - DNA, 25 bp, Homo sapien
gaagtggttgccgagaacaaggctg

SEQ ID NO: 4575948 - DNA, 25 bp, Homo sapien
tgggaagtggttgccgagaacaagg

SEQ ID NO: 4575949 - DNA, 25 bp, Homo sapien
cactctgccacacatggaacttggg

SEQ ID NO: 4575950 - DNA, 25 bp, Homo sapien
aggccactacaagccttgcccgtca

SEQ ID NO: 4575951 - DNA, 25 bp, Homo sapien
tgcaggggttgagcaccttcatttc

SEQ ID NO: 4575952 - DNA, 25 bp, Homo sapien
gatgttggttctgactgcaggggtt

SEQ ID NO: 4575953 - DNA, 25 bp, Homo sapien
tgtccagccactggcatctctgcca

SEQ ID NO: 4575954 - DNA, 25 bp, Homo sapien
cctgtccagccactggcatctctgc

SEQ ID NO: 4575955 - DNA, 25 bp, Homo sapien
tccagccactggcatctctgccaac

SEQ ID NO: 4575956 - DNA, 25 bp, Homo sapien
cagccactggcatctctgccaactc

SEQ ID NO: 4575957 - DNA, 25 bp, Homo sapien
gacgcctctgaccatcagccatagg

SEQ ID NO: 4575958 - DNA, 25 bp, Homo sapien
atgcgttcatgacgcctctgaccat

SEQ ID NO: 4575959 - DNA, 25 bp, Homo sapien
ctctgaccatcagccataggtgctg

SEQ ID NO: 4575960 - DNA, 25 bp, Homo sapien
ttctcctatggcacatgcgttcatg

SEQ ID NO: 4575961 - DNA, 25 bp, Homo sapien
tggcctttcccccaagaggtttgca

SEQ ID NO: 4575962 - DNA, 25 bp, Homo sapien
ttatctgaggttccctgccagttcc

SEQ ID NO: 4575963 - DNA, 25 bp, Homo sapien
tccctgccagttcctcactccctct

SEQ ID NO: 4575964 - DNA, 25 bp, Homo sapien
cactccctctgtggggagtggcctt

SEQ ID NO: 4575965 - DNA, 25 bp, Homo sapien
ggtacttcattttaatccgctgcgg

SEQ ID NO: 4575966 - DNA, 25 bp, Homo sapien
cattgaagacaatccagggtgtggt

SEQ ID NO: 4575967 - DNA, 25 bp, Homo sapien
cgatgcgtgtctccacaatgaggaa

SEQ ID NO: 4575968 - DNA, 25 bp, Homo sapien
ttgtagacctccgagtcgatgcgtg

SEQ ID NO: 4575969 - DNA, 25 bp, Homo sapien
gctgagagaacccaactaaggcctg

SEQ ID NO: 4575970 - DNA, 25 bp, Homo sapien
cccagtacccatatgccagctgaga

SEQ ID NO: 4575971 - DNA, 25 bp, Homo sapien
tacccatatgccagctgagagaacc

SEQ ID NO: 4575972 - DNA, 25 bp, Homo sapien
gagaacccaactaaggcctgaggac

SEQ ID NO: 4575973 - DNA, 25 bp, Homo sapien
aagtgatgccttaatatctctgagc

SEQ ID NO: 4575974 - DNA, 25 bp, Homo sapien
tgccagccccgttcagtgggtttag

SEQ ID NO: 4575975 - DNA, 25 bp, Homo sapien
catttccaatcctgctggtcgaagc

SEQ ID NO: 4575976 - DNA, 25 bp, Homo sapien
gctggtcgaagcatctcaagtgatg

SEQ ID NO: 4575977 - DNA, 25 bp, Homo sapien
ctggccatcagcaatcactcggtca

SEQ ID NO: 4575978 - DNA, 25 bp, Homo sapien
tcagcaatcactcggtcacggtcac

SEQ ID NO: 4575979 - DNA, 25 bp, Homo sapien
aatcactcggtcacggtcacacatg

SEQ ID NO: 4575980 - DNA, 25 bp, Homo sapien
ccatcagcaatcactcggtcacggt

SEQ ID NO: 4575981 - DNA, 25 bp, Homo sapien
cctgctgtctcctacagccaacgac

SEQ ID NO: 4575982 - DNA, 25 bp, Homo sapien
tgctgtctcctacagccaacgactc

SEQ ID NO: 4575983 - DNA, 25 bp, Homo sapien
ctgtctcctacagccaacgactcca

SEQ ID NO: 4575984 - DNA, 25 bp, Homo sapien
gtctcctacagccaacgactccaga

SEQ ID NO: 4575985 - DNA, 25 bp, Homo sapien
gcagtcaccatgtctagtctagctg

SEQ ID NO: 4575986 - DNA, 25 bp, Homo sapien
cagcagtcaccatgtctagtctagc

SEQ ID NO: 4575987 - DNA, 25 bp, Homo sapien
ccacccctacagcaacacccccagc

SEQ ID NO: 4575988 - DNA, 25 bp, Homo sapien
ccctacagcaacacccccagcagtc

SEQ ID NO: 4575989 - DNA, 25 bp, Homo sapien
tcatcccggcctgaggccccagtga

SEQ ID NO: 4575990 - DNA, 25 bp, Homo sapien
catcccggcctgaggccccagtgac

SEQ ID NO: 4575991 - DNA, 25 bp, Homo sapien
tgcaggctgaatgacccggagctgc

SEQ ID NO: 4575992 - DNA, 25 bp, Homo sapien
ccgttgctaagaggtctgtctctct

SEQ ID NO: 4575993 - DNA, 25 bp, Homo sapien
gaaagcagacataaatgcctgctgt

SEQ ID NO: 4575994 - DNA, 25 bp, Homo sapien
acccaaggagctggcccgttgctaa

SEQ ID NO: 4575995 - DNA, 25 bp, Homo sapien
tccactttgatagcggtgtccaccg

SEQ ID NO: 4575996 - DNA, 25 bp, Homo sapien
gataatccaaaatccggccgacttg

SEQ ID NO: 4575997 - DNA, 25 bp, Homo sapien
gcctccctccactttgatagcggtg

SEQ ID NO: 4575998 - DNA, 25 bp, Homo sapien
ttgaccccgggttggagcatggccc

SEQ ID NO: 4575999 - DNA, 25 bp, Homo sapien
ctgggggcgtcctgtcctcgccggg

SEQ ID NO: 4576000 - DNA, 25 bp, Homo sapien
gcggcggcgaggctgcgggctgcgc

SEQ ID NO: 4576001 - DNA, 25 bp, Homo sapien
gctcggccgccaggcctgggggcgt

SEQ ID NO: 4576002 - DNA, 25 bp, Homo sapien
tgcgccgaggcgccggggcgctcgg

SEQ ID NO: 4576003 - DNA, 25 bp, Homo sapien
gtcatgcaggtgtccgtgactgctg

SEQ ID NO: 4576004 - DNA, 25 bp, Homo sapien
cgctcctccgcggagtcatgcaggt

SEQ ID NO: 4576005 - DNA, 25 bp, Homo sapien
aggtgtccgtgactgctgccgctcc

SEQ ID NO: 4576006 - DNA, 25 bp, Homo sapien
atgcaggtgtccgtgactgctgccg

SEQ ID NO: 4576007 - DNA, 25 bp, Homo sapien
cccttcgctgtccgctgccccgagg

SEQ ID NO: 4576008 - DNA, 25 bp, Homo sapien
gctgccccgagggccgagctccggg

SEQ ID NO: 4576009 - DNA, 25 bp, Homo sapien
ggcccttcgctgtccgctgccccga

SEQ ID NO: 4576010 - DNA, 25 bp, Homo sapien
ctgccccgagggccgagctccggga

SEQ ID NO: 4576011 - DNA, 25 bp, Homo sapien
cagtggccgcagccggatgctcctg

SEQ ID NO: 4576012 - DNA, 25 bp, Homo sapien
gagccgcttgcgcatggacggcggc

SEQ ID NO: 4576013 - DNA, 25 bp, Homo sapien
agccgcttgcgcatggacggcggca

SEQ ID NO: 4576014 - DNA, 25 bp, Homo sapien
agagccgcttgcgcatggacggcgg

SEQ ID NO: 4576015 - DNA, 25 bp, Homo sapien
aaccgctccggagtgcagagcgcac

SEQ ID NO: 4576016 - DNA, 25 bp, Homo sapien
ggaggatcctagtcccgctccgagt

SEQ ID NO: 4576017 - DNA, 25 bp, Homo sapien
tttgtggctggccacccgcgagctc

SEQ ID NO: 4576018 - DNA, 25 bp, Homo sapien
tcaggcgcccatgcttgggcaggct

SEQ ID NO: 4576019 - DNA, 25 bp, Homo sapien
gaatattcatgaagccgccgcagct

SEQ ID NO: 4576020 - DNA, 25 bp, Homo sapien
ccccggaatattcatgaagccgccg

SEQ ID NO: 4576021 - DNA, 25 bp, Homo sapien
gcgccccggaatattcatgaagccg

SEQ ID NO: 4576022 - DNA, 25 bp, Homo sapien
tcccgcgccccggaatattcatgaa

SEQ ID NO: 4576023 - DNA, 25 bp, Homo sapien
gggagtgcgccccaagtctgaagct

SEQ ID NO: 4576024 - DNA, 25 bp, Homo sapien
aggttagaccctcgctagaccttcg

SEQ ID NO: 4576025 - DNA, 25 bp, Homo sapien
ttccccatcctaagattgaagggtg

SEQ ID NO: 4576026 - DNA, 25 bp, Homo sapien
agctccggcttcagttgcgaattcc

SEQ ID NO: 4576027 - DNA, 25 bp, Homo sapien
gggatcagggacatatagacttcct

SEQ ID NO: 4576028 - DNA, 25 bp, Homo sapien
tgctctgccccaaggcaggtctgct

SEQ ID NO: 4576029 - DNA, 25 bp, Homo sapien
ggtggtggcaagtggtatccataca

SEQ ID NO: 4576030 - DNA, 25 bp, Homo sapien
tcagagggccacatcgttgaccctg

SEQ ID NO: 4576031 - DNA, 25 bp, Homo sapien
tgctattacatgagccttctgctgg

SEQ ID NO: 4576032 - DNA, 25 bp, Homo sapien
ctgctattacatgagccttctgctg

SEQ ID NO: 4576033 - DNA, 25 bp, Homo sapien
ctattacatgagccttctgctggat

SEQ ID NO: 4576034 - DNA, 25 bp, Homo sapien
gctattacatgagccttctgctgga

SEQ ID NO: 4576035 - DNA, 25 bp, Homo sapien
gagggcaatggagactgccacataa

SEQ ID NO: 4576036 - DNA, 25 bp, Homo sapien
gactgccacataatctatgacagat

SEQ ID NO: 4576037 - DNA, 25 bp, Homo sapien
agactgccacataatctatgacaga

SEQ ID NO: 4576038 - DNA, 25 bp, Homo sapien
ctgccacataatctatgacagatgt

SEQ ID NO: 4576039 - DNA, 25 bp, Homo sapien
tctggtatttctggaactctatctt

SEQ ID NO: 4576040 - DNA, 25 bp, Homo sapien
tctggaactctatcttctctctgcc

SEQ ID NO: 4576041 - DNA, 25 bp, Homo sapien
cctgcctgaggcactaagttgggga

SEQ ID NO: 4576042 - DNA, 25 bp, Homo sapien
gataagcaggatatgattttctgcc

SEQ ID NO: 4576043 - DNA, 25 bp, Homo sapien
aggctcccacagctggtcccctcat

SEQ ID NO: 4576044 - DNA, 25 bp, Homo sapien
cagaggctcccacagctggtcccct

SEQ ID NO: 4576045 - DNA, 25 bp, Homo sapien
ctgctcctcagaggctcccacagct

SEQ ID NO: 4576046 - DNA, 25 bp, Homo sapien
tcctcagaggctcccacagctggtc

SEQ ID NO: 4576047 - DNA, 25 bp, Homo sapien
ctgacacttctgatacagacaacat

SEQ ID NO: 4576048 - DNA, 25 bp, Homo sapien
ctgatggtctgacccccaacacagg

SEQ ID NO: 4576049 - DNA, 25 bp, Homo sapien
ctggagccctgacacttctgataca

SEQ ID NO: 4576050 - DNA, 25 bp, Homo sapien
tacccagggctgatggtctgacccc

SEQ ID NO: 4576051 - DNA, 25 bp, Homo sapien
caagagtggacactttaaggtgctg

SEQ ID NO: 4576052 - DNA, 25 bp, Homo sapien
aagagtggacactttaaggtgctga

SEQ ID NO: 4576053 - DNA, 25 bp, Homo sapien
tcaattccagggatggtctggtggt

SEQ ID NO: 4576054 - DNA, 25 bp, Homo sapien
ctcaattccagggatggtctggtgg

SEQ ID NO: 4576055 - DNA, 25 bp, Homo sapien
gtttctggatggtgtatctgctgca

SEQ ID NO: 4576056 - DNA, 25 bp, Homo sapien
tggtcctgtctaggccagactggtt

SEQ ID NO: 4576057 - DNA, 25 bp, Homo sapien
tgagcagcatggaaaggggaaggtc

SEQ ID NO: 4576058 - DNA, 25 bp, Homo sapien
ggaaggtcatggtcctgtctaggcc

SEQ ID NO: 4576059 - DNA, 25 bp, Homo sapien
ttcttatcttcctggcttttcagct

SEQ ID NO: 4576060 - DNA, 25 bp, Homo sapien
tcctggcttttcagctccctttggg

SEQ ID NO: 4576061 - DNA, 25 bp, Homo sapien
ctttcttatcttcctggcttttcag

SEQ ID NO: 4576062 - DNA, 25 bp, Homo sapien
tggcttttcagctccctttgggaat

SEQ ID NO: 4576063 - DNA, 25 bp, Homo sapien
tctctttagcaccttgaccatcctg

SEQ ID NO: 4576064 - DNA, 25 bp, Homo sapien
cctgctattagaatgcctgcaaata

SEQ ID NO: 4576065 - DNA, 25 bp, Homo sapien
tagatgccaacacatcataggtgtt

SEQ ID NO: 4576066 - DNA, 25 bp, Homo sapien
tccatgacctctctaagcaaagtga

SEQ ID NO: 4576067 - DNA, 25 bp, Homo sapien
gagatcacgcatggaggagccttct

SEQ ID NO: 4576068 - DNA, 25 bp, Homo sapien
cactttgtgtcaggtgtccccatgg

SEQ ID NO: 4576069 - DNA, 25 bp, Homo sapien
ggatagcagtacctttggcagcagg

SEQ ID NO: 4576070 - DNA, 25 bp, Homo sapien
tttagggaggagtcatctggcttac

SEQ ID NO: 4576071 - DNA, 25 bp, Homo sapien
ggttcaaatggataagggactacat

SEQ ID NO: 4576072 - DNA, 25 bp, Homo sapien
aagttgcaactttcaccatactgag

SEQ ID NO: 4576073 - DNA, 25 bp, Homo sapien
caccatactgagatttaggcagagg

SEQ ID NO: 4576074 - DNA, 25 bp, Homo sapien
gcatcaaagaattaaccctcactgt

SEQ ID NO: 4576075 - DNA, 25 bp, Homo sapien
tcatctaccccttgcagagttaagt

SEQ ID NO: 4576076 - DNA, 25 bp, Homo sapien
ggattcagctgttaactcagacttg

SEQ ID NO: 4576077 - DNA, 25 bp, Homo sapien
tcagacttgctttcagacagcccct

SEQ ID NO: 4576078 - DNA, 25 bp, Homo sapien
aaaactatggttgtgtgacgtccac

SEQ ID NO: 4576079 - DNA, 25 bp, Homo sapien
cagtattcttcattaaagtagaatc

SEQ ID NO: 4576080 - DNA, 25 bp, Homo sapien
ttaaagtagaatctcaactttgcaa

SEQ ID NO: 4576081 - DNA, 25 bp, Homo sapien
gtagaatctcaactttgcaaacatt

SEQ ID NO: 4576082 - DNA, 25 bp, Homo sapien
gaatctcaactttgcaaacatttca

SEQ ID NO: 4576083 - DNA, 25 bp, Homo sapien
tacatgcatctacaattacgcaccg

SEQ ID NO: 4576084 - DNA, 25 bp, Homo sapien
catctttatgtaccagaactgcaca

SEQ ID NO: 4576085 - DNA, 25 bp, Homo sapien
caattcattatacccattcagtgga

SEQ ID NO: 4576086 - DNA, 25 bp, Homo sapien
tacgcaccgcatgagaaccgttagg

SEQ ID NO: 4576087 - DNA, 25 bp, Homo sapien
gcaggtcatgttgccaccagtttca

SEQ ID NO: 4576088 - DNA, 25 bp, Homo sapien
ggctagatcacccttacaggagagg

SEQ ID NO: 4576089 - DNA, 25 bp, Homo sapien
aaatggcgcatgcatgatctgatcc

SEQ ID NO: 4576090 - DNA, 25 bp, Homo sapien
caggagaggctaaataaggcatgct

SEQ ID NO: 4576091 - DNA, 25 bp, Homo sapien
gcctctgggaataagccacctaaga

SEQ ID NO: 4576092 - DNA, 25 bp, Homo sapien
ccccagacgtgaggtaagactagta

SEQ ID NO: 4576093 - DNA, 25 bp, Homo sapien
tgctacctggccattcttgtcttgc

SEQ ID NO: 4576094 - DNA, 25 bp, Homo sapien
taacaagatgacattctggccctgc

SEQ ID NO: 4576095 - DNA, 25 bp, Homo sapien
tgtgtttctctggcgcaagttttta

SEQ ID NO: 4576096 - DNA, 25 bp, Homo sapien
ttttatctttgtgattgttggtaga

SEQ ID NO: 4576097 - DNA, 25 bp, Homo sapien
tctctggcgcaagtttttatctttg

SEQ ID NO: 4576098 - DNA, 25 bp, Homo sapien
tttctctggcgcaagtttttatctt

SEQ ID NO: 4576099 - DNA, 25 bp, Homo sapien
caaggcagacgagtactttcccttc

SEQ ID NO: 4576100 - DNA, 25 bp, Homo sapien
aggcagacgagtactttcccttcga

SEQ ID NO: 4576101 - DNA, 25 bp, Homo sapien
cccaaggcagacgagtactttccct

SEQ ID NO: 4576102 - DNA, 25 bp, Homo sapien
gcagacgagtactttcccttcgaat

SEQ ID NO: 4576103 - DNA, 25 bp, Homo sapien
gaaaactgttagattctgcataagg

SEQ ID NO: 4576104 - DNA, 25 bp, Homo sapien
tagcaaactgcaagtggcaatcatg

SEQ ID NO: 4576105 - DNA, 25 bp, Homo sapien
ccatctggaggtgcaaaacactcat

SEQ ID NO: 4576106 - DNA, 25 bp, Homo sapien
cataaggattaacagaatagcaaac

SEQ ID NO: 4576107 - DNA, 25 bp, Homo sapien
gaagcagttatggagattacagtct

SEQ ID NO: 4576108 - DNA, 25 bp, Homo sapien
tatggagattacagtctcagtgtag

SEQ ID NO: 4576109 - DNA, 25 bp, Homo sapien
agcaggattccacaagggggcttgg

SEQ ID NO: 4576110 - DNA, 25 bp, Homo sapien
cagttatggagattacagtctcagt

SEQ ID NO: 4576111 - DNA, 25 bp, Homo sapien
tgtgatagcaacctcataagcgcgg

SEQ ID NO: 4576112 - DNA, 25 bp, Homo sapien
gactgcccaaaatatgacgactgtg

SEQ ID NO: 4576113 - DNA, 25 bp, Homo sapien
taagcgcggtgacttcttagggcaa

SEQ ID NO: 4576114 - DNA, 25 bp, Homo sapien
aaagactagacctctgctgggaaca

SEQ ID NO: 4576115 - DNA, 25 bp, Homo sapien
ggctgctgcatcactctcaccagtg

SEQ ID NO: 4576116 - DNA, 25 bp, Homo sapien
ctaggctgctgcatcactctcacca

SEQ ID NO: 4576117 - DNA, 25 bp, Homo sapien
gctgctgcatcactctcaccagtgg

SEQ ID NO: 4576118 - DNA, 25 bp, Homo sapien
gctgcatcactctcaccagtggcag

SEQ ID NO: 4576119 - DNA, 25 bp, Homo sapien
aatcaggttctgaagtccatctctg

SEQ ID NO: 4576120 - DNA, 25 bp, Homo sapien
aaatcaggttctgaagtccatctct

SEQ ID NO: 4576121 - DNA, 25 bp, Homo sapien
aaaatcaggttctgaagtccatctc

SEQ ID NO: 4576122 - DNA, 25 bp, Homo sapien
aggaaggtggtattggcaaagcaaa

SEQ ID NO: 4576123 - DNA, 25 bp, Homo sapien
ggctgaggaaggtggtattggcaaa

SEQ ID NO: 4576124 - DNA, 25 bp, Homo sapien
tagcttctcaacctttccaaaaggc

SEQ ID NO: 4576125 - DNA, 25 bp, Homo sapien
ggtggtattggcaaagcaaaagcat

SEQ ID NO: 4576126 - DNA, 25 bp, Homo sapien
gaatgaggcataactgatcccacag

SEQ ID NO: 4576127 - DNA, 25 bp, Homo sapien
aggcccttttcaggaatgaggcata

SEQ ID NO: 4576128 - DNA, 25 bp, Homo sapien
aggcataactgatcccacagagcca

SEQ ID NO: 4576129 - DNA, 25 bp, Homo sapien
tgaggcataactgatcccacagagc

SEQ ID NO: 4576130 - DNA, 25 bp, Homo sapien
gaaaacacacgaaagacaggcaact

SEQ ID NO: 4576131 - DNA, 25 bp, Homo sapien
gagattcatttgcagaggccgtctg

SEQ ID NO: 4576132 - DNA, 25 bp, Homo sapien
tactcccaggtctaaataaaggtgc

SEQ ID NO: 4576133 - DNA, 25 bp, Homo sapien
tcactgctgagtgcacatctggagg

SEQ ID NO: 4576134 - DNA, 25 bp, Homo sapien
catgtcctcccagagagtctaaagc

SEQ ID NO: 4576135 - DNA, 25 bp, Homo sapien
ggctgttgctctcaaacatgtcctc

SEQ ID NO: 4576136 - DNA, 25 bp, Homo sapien
gggctgttgctctcaaacatgtcct

SEQ ID NO: 4576137 - DNA, 25 bp, Homo sapien
cccagagagtctaaagccactggca

SEQ ID NO: 4576138 - DNA, 25 bp, Homo sapien
ctgatgatctgtattgaaggaggac

SEQ ID NO: 4576139 - DNA, 25 bp, Homo sapien
ctcaagctcaatctgcctgatgatc

SEQ ID NO: 4576140 - DNA, 25 bp, Homo sapien
taggcttgacttggattctcctcaa

SEQ ID NO: 4576141 - DNA, 25 bp, Homo sapien
cattcaccacatggggcctgaaagg

SEQ ID NO: 4576142 - DNA, 25 bp, Homo sapien
aatgatcaccacaaggatgataatt

SEQ ID NO: 4576143 - DNA, 25 bp, Homo sapien
tcatacacaacaatgatcaccacaa

SEQ ID NO: 4576144 - DNA, 25 bp, Homo sapien
cttcctcttctcatacacaacaatg

SEQ ID NO: 4576145 - DNA, 25 bp, Homo sapien
tgatcaccacaaggatgataatttc

SEQ ID NO: 4576146 - DNA, 25 bp, Homo sapien
tgacaacagaggcggagccaatggc

SEQ ID NO: 4576147 - DNA, 25 bp, Homo sapien
caacagaggcggagccaatggcgtt

SEQ ID NO: 4576148 - DNA, 25 bp, Homo sapien
acaacagaggcggagccaatggcgt

SEQ ID NO: 4576149 - DNA, 25 bp, Homo sapien
agtgacaacagaggcggagccaatg

SEQ ID NO: 4576150 - DNA, 25 bp, Homo sapien
attcatactcgccagggtcttccgt

SEQ ID NO: 4576151 - DNA, 25 bp, Homo sapien
ccgtgatctgcaggttcacaatgtt

SEQ ID NO: 4576152 - DNA, 25 bp, Homo sapien
caggttcacaatgttcaactcagtg

SEQ ID NO: 4576153 - DNA, 25 bp, Homo sapien
tcgccagggtcttccgtgatctgca

SEQ ID NO: 4576154 - DNA, 25 bp, Homo sapien
tgaagaagcggccagaggtattgac

SEQ ID NO: 4576155 - DNA, 25 bp, Homo sapien
agaagcggccagaggtattgacaat

SEQ ID NO: 4576156 - DNA, 25 bp, Homo sapien
ttgatgatgaagaagcggccagagg

SEQ ID NO: 4576157 - DNA, 25 bp, Homo sapien
tgatgaagaagcggccagaggtatt

SEQ ID NO: 4576158 - DNA, 25 bp, Homo sapien
agaactcactcctagtcagactggg

SEQ ID NO: 4576159 - DNA, 25 bp, Homo sapien
aatgctgcctccaacaccaggtaag

SEQ ID NO: 4576160 - DNA, 25 bp, Homo sapien
gggtacaacccctacagtcaggcat

SEQ ID NO: 4576161 - DNA, 25 bp, Homo sapien
acttccacgaagtgagtgcaggtcc

SEQ ID NO: 4576162 - DNA, 25 bp, Homo sapien
ccagtgccttagaaagttcagtgtc

SEQ ID NO: 4576163 - DNA, 25 bp, Homo sapien
ctttggcaaaagctcaagggcactc

SEQ ID NO: 4576164 - DNA, 25 bp, Homo sapien
taacgggtctctgaaatcatcgctg

SEQ ID NO: 4576165 - DNA, 25 bp, Homo sapien
tgagtgcaggtacatctgaaatggg

SEQ ID NO: 4576166 - DNA, 25 bp, Homo sapien
tctcactccgtttatggccagtgat

SEQ ID NO: 4576167 - DNA, 25 bp, Homo sapien
tccttcttgcgccatatccagtctg

SEQ ID NO: 4576168 - DNA, 25 bp, Homo sapien
cttcttgcgccatatccagtctggg

SEQ ID NO: 4576169 - DNA, 25 bp, Homo sapien
ccttcattcttgttctcactccgtt

SEQ ID NO: 4576170 - DNA, 25 bp, Homo sapien
tattatctcttctatcggcccaagt

SEQ ID NO: 4576171 - DNA, 25 bp, Homo sapien
atctcttctatcggcccaagttttt

SEQ ID NO: 4576172 - DNA, 25 bp, Homo sapien
ctattatctcttctatcggcccaag

SEQ ID NO: 4576173 - DNA, 25 bp, Homo sapien
ttatctcttctatcggcccaagttt

SEQ ID NO: 4576174 - DNA, 25 bp, Homo sapien
tggacacctgatttgcaacagtttc

SEQ ID NO: 4576175 - DNA, 25 bp, Homo sapien
aacttaagaatctgccttggacacc

SEQ ID NO: 4576176 - DNA, 25 bp, Homo sapien
aacagtttcctagactgaacccaat

SEQ ID NO: 4576177 - DNA, 25 bp, Homo sapien
ttcaagacatgctagaggccgttgg

SEQ ID NO: 4576178 - DNA, 25 bp, Homo sapien
gcccagccgggttacagtaatctga

SEQ ID NO: 4576179 - DNA, 25 bp, Homo sapien
tatcaaatggagacacctcgtgtcc

SEQ ID NO: 4576180 - DNA, 25 bp, Homo sapien
gatgaacaggatgtcaaaacattca

SEQ ID NO: 4576181 - DNA, 25 bp, Homo sapien
gagaatcgatatgccttggtcccaa

SEQ ID NO: 4576182 - DNA, 25 bp, Homo sapien
ggactgcttaaccagattttgttgg

SEQ ID NO: 4576183 - DNA, 25 bp, Homo sapien
tttaataagggactgcttaaccaga

SEQ ID NO: 4576184 - DNA, 25 bp, Homo sapien
caggtctgagcgtctaactaagcct

SEQ ID NO: 4576185 - DNA, 25 bp, Homo sapien
aaaagcaggtctgagcgtctaacta

SEQ ID NO: 4576186 - DNA, 25 bp, Homo sapien
aaatgaacacttggctgacggcagt

SEQ ID NO: 4576187 - DNA, 25 bp, Homo sapien
gatgtgccttaatctgatgcccgag

SEQ ID NO: 4576188 - DNA, 25 bp, Homo sapien
ggatgcaggcttttggctcaacaag

SEQ ID NO: 4576189 - DNA, 25 bp, Homo sapien
taagggaacctagaccgtcaagagc

SEQ ID NO: 4576190 - DNA, 25 bp, Homo sapien
taaaaacctgctccagatacaaggc

SEQ ID NO: 4576191 - DNA, 25 bp, Homo sapien
tctgaagagtcacaagctgaggaca

SEQ ID NO: 4576192 - DNA, 25 bp, Homo sapien
gatgccctcctcagtattagctgag

SEQ ID NO: 4576193 - DNA, 25 bp, Homo sapien
gatcacctgccgaatacctgagaaa

SEQ ID NO: 4576194 - DNA, 25 bp, Homo sapien
ccacaattggaggttagcttagaat

SEQ ID NO: 4576195 - DNA, 25 bp, Homo sapien
tcctttcagccaagaggccactgat

SEQ ID NO: 4576196 - DNA, 25 bp, Homo sapien
cagtccctggctaggctaaatgctt

SEQ ID NO: 4576197 - DNA, 25 bp, Homo sapien
tgtactactctaaatgcaaggcagt

SEQ ID NO: 4576198 - DNA, 25 bp, Homo sapien
gaagactgggactccagaccaaggt

SEQ ID NO: 4576199 - DNA, 25 bp, Homo sapien
tcttggaaggagagtgagaggctca

SEQ ID NO: 4576200 - DNA, 25 bp, Homo sapien
gactccagaccaaggtactgtcttg

SEQ ID NO: 4576201 - DNA, 25 bp, Homo sapien
cagaccaaggtactgtcttggaagg

SEQ ID NO: 4576202 - DNA, 25 bp, Homo sapien
gtttgctttaggagcgctgacaaag

SEQ ID NO: 4576203 - DNA, 25 bp, Homo sapien
gaatcctcagctctcggcttattga

SEQ ID NO: 4576204 - DNA, 25 bp, Homo sapien
tgacaaagtgatatacgcagtggta

SEQ ID NO: 4576205 - DNA, 25 bp, Homo sapien
tacgcagtggtattcgcctgaatcc

SEQ ID NO: 4576206 - DNA, 25 bp, Homo sapien
gagaatcaaaggggcaatcagggat

SEQ ID NO: 4576207 - DNA, 25 bp, Homo sapien
gggatcctgctctccgaacccttaa

SEQ ID NO: 4576208 - DNA, 25 bp, Homo sapien
ctaaaacattaatgtcttgctcttt

SEQ ID NO: 4576209 - DNA, 25 bp, Homo sapien
gcaactcacctccttctaactaaaa

SEQ ID NO: 4576210 - DNA, 25 bp, Homo sapien
caaatatttgggtgctgggtaactc

SEQ ID NO: 4576211 - DNA, 25 bp, Homo sapien
ccttaaagcagccaagagtcactct

SEQ ID NO: 4576212 - DNA, 25 bp, Homo sapien
gatcattcaagagccctgcatctgc

SEQ ID NO: 4576213 - DNA, 25 bp, Homo sapien
gttaactaccttgccactaagtgga

SEQ ID NO: 4576214 - DNA, 25 bp, Homo sapien
tatgaatgtcaagtaagctcagcca

SEQ ID NO: 4576215 - DNA, 25 bp, Homo sapien
tcccttctgcatggcgcaactatgg

SEQ ID NO: 4576216 - DNA, 25 bp, Homo sapien
gaatcttttctagactactgggcct

SEQ ID NO: 4576217 - DNA, 25 bp, Homo sapien
tactgggccttacctgagatactgg

SEQ ID NO: 4576218 - DNA, 25 bp, Homo sapien
tgtccagtagctgtatgtaagggtg

SEQ ID NO: 4576219 - DNA, 25 bp, Homo sapien
gttgctggcattcttacgagtggca

SEQ ID NO: 4576220 - DNA, 25 bp, Homo sapien
cccattctttgtccagtagctgtat

SEQ ID NO: 4576221 - DNA, 25 bp, Homo sapien
ggcattcttacgagtggcactcagt

SEQ ID NO: 4576222 - DNA, 25 bp, Homo sapien
gagaacagggctgtctcgaataatg

SEQ ID NO: 4576223 - DNA, 25 bp, Homo sapien
gctgtctcgaataatgacctcttca

SEQ ID NO: 4576224 - DNA, 25 bp, Homo sapien
tcgaataatgacctcttcactggtg

SEQ ID NO: 4576225 - DNA, 25 bp, Homo sapien
cctcttcactggtgacaatccttgg

SEQ ID NO: 4576226 - DNA, 25 bp, Homo sapien
caaacaattcggcttcaattagaca

SEQ ID NO: 4576227 - DNA, 25 bp, Homo sapien
agaaccaccaaacaattcggcttca

SEQ ID NO: 4576228 - DNA, 25 bp, Homo sapien
gcttcaattagacaaccaggctcca

SEQ ID NO: 4576229 - DNA, 25 bp, Homo sapien
aattagacaaccaggctccaccttg

SEQ ID NO: 4576230 - DNA, 25 bp, Homo sapien
ttaagaagtcgagcagaacggctgc

SEQ ID NO: 4576231 - DNA, 25 bp, Homo sapien
aagtcgagcagaacggctgcaaacc

SEQ ID NO: 4576232 - DNA, 25 bp, Homo sapien
tgggccttaagaagtcgagcagaac

SEQ ID NO: 4576233 - DNA, 25 bp, Homo sapien
ccctgggccttaagaagtcgagcag

SEQ ID NO: 4576234 - DNA, 25 bp, Homo sapien
attctttgaaggcaaaggaaagcac

SEQ ID NO: 4576235 - DNA, 25 bp, Homo sapien
aagcaacctggtagactttctgcca

SEQ ID NO: 4576236 - DNA, 25 bp, Homo sapien
cctggtagactttctgccaagtatt

SEQ ID NO: 4576237 - DNA, 25 bp, Homo sapien
taagaagttgatgaaagcaacctgg

SEQ ID NO: 4576238 - DNA, 25 bp, Homo sapien
gatacctaaaaactgggcacacttc

SEQ ID NO: 4576239 - DNA, 25 bp, Homo sapien
catgctatggccagagagataccta

SEQ ID NO: 4576240 - DNA, 25 bp, Homo sapien
ttaaaagcagtggataggagaccct

SEQ ID NO: 4576241 - DNA, 25 bp, Homo sapien
ttagatagaacacctgatgtcccca

SEQ ID NO: 4576242 - DNA, 25 bp, Homo sapien
ctaagtatatagactcaaggcccat

SEQ ID NO: 4576243 - DNA, 25 bp, Homo sapien
gcatggccattctagctatgagtca

SEQ ID NO: 4576244 - DNA, 25 bp, Homo sapien
ggtaggtaggtaccccaatgcctca

SEQ ID NO: 4576245 - DNA, 25 bp, Homo sapien
gatttgattcaaccacatgcagaca

SEQ ID NO: 4576246 - DNA, 25 bp, Homo sapien
agaaggtgaaaaacccagaggatct

SEQ ID NO: 4576247 - DNA, 25 bp, Homo sapien
tcccctcaattataaccaggtttga

SEQ ID NO: 4576248 - DNA, 25 bp, Homo sapien
tcttggccaggaacgttggttctgt

SEQ ID NO: 4576249 - DNA, 25 bp, Homo sapien
caacataaggtagcaagtcactttc

SEQ ID NO: 4576250 - DNA, 25 bp, Homo sapien
acctgctacaaggagaggattctga

SEQ ID NO: 4576251 - DNA, 25 bp, Homo sapien
cctgctacaaggagaggattctgag

SEQ ID NO: 4576252 - DNA, 25 bp, Homo sapien
tggacagtcacggatttcctcaagt

SEQ ID NO: 4576253 - DNA, 25 bp, Homo sapien
ttaaaaccatagaggtgaaggcagc

SEQ ID NO: 4576254 - DNA, 25 bp, Homo sapien
gatgacaccaagtcacagttaaagg

SEQ ID NO: 4576255 - DNA, 25 bp, Homo sapien
tcagcaaaagtatagcaggaaacct

SEQ ID NO: 4576256 - DNA, 25 bp, Homo sapien
tctgacatgggcgacttgacaaacc

SEQ ID NO: 4576257 - DNA, 25 bp, Homo sapien
tcacagtacagctcaaaggcgtccc

SEQ ID NO: 4576258 - DNA, 25 bp, Homo sapien
tgtttacggtgacacggcgcttccg

SEQ ID NO: 4576259 - DNA, 25 bp, Homo sapien
gttattctcagcacactcacgccgt

SEQ ID NO: 4576260 - DNA, 25 bp, Homo sapien
tccctgggcctatggcaaacaaaca

SEQ ID NO: 4576261 - DNA, 25 bp, Homo sapien
cccagttgtttagcgttaggcagcc

SEQ ID NO: 4576262 - DNA, 25 bp, Homo sapien
ctctcttttggatgggcaaacgctt

SEQ ID NO: 4576263 - DNA, 25 bp, Homo sapien
tcctgggttcgattagactttctcc

SEQ ID NO: 4576264 - DNA, 25 bp, Homo sapien
gccagctaatggagggactgtgccc

SEQ ID NO: 4576265 - DNA, 25 bp, Homo sapien
tgccagctaatggagggactgtgcc

SEQ ID NO: 4576266 - DNA, 25 bp, Homo sapien
actgtggtcaatgtgtctcactggc

SEQ ID NO: 4576267 - DNA, 25 bp, Homo sapien
cacaactgtggtcaatgtgtctcac

SEQ ID NO: 4576268 - DNA, 25 bp, Homo sapien
caactgtggtcaatgtgtctcactg

SEQ ID NO: 4576269 - DNA, 25 bp, Homo sapien
aactgtggtcaatgtgtctcactgg

SEQ ID NO: 4576270 - DNA, 25 bp, Homo sapien
ctctaattccctgtggctggctcat

SEQ ID NO: 4576271 - DNA, 25 bp, Homo sapien
caaaagccataggtaattactgctc

SEQ ID NO: 4576272 - DNA, 25 bp, Homo sapien
taactgaaagaggtagtaagctact

SEQ ID NO: 4576273 - DNA, 25 bp, Homo sapien
gcagtccaagctgatagtctaagta

SEQ ID NO: 4576274 - DNA, 25 bp, Homo sapien
tgacaacacagtaacaatcaggact

SEQ ID NO: 4576275 - DNA, 25 bp, Homo sapien
aactgtgtcactatgatttcaaaac

SEQ ID NO: 4576276 - DNA, 25 bp, Homo sapien
tataaagattctcccaacagctggg

SEQ ID NO: 4576277 - DNA, 25 bp, Homo sapien
cactgacaggatgcttcaatttacc

SEQ ID NO: 4576278 - DNA, 25 bp, Homo sapien
tattgaggtcctgtttaccaaggac

SEQ ID NO: 4576279 - DNA, 25 bp, Homo sapien
cacggaccagtgattctagagaaaa

SEQ ID NO: 4576280 - DNA, 25 bp, Homo sapien
tagtaacccctattttagactgtga

SEQ ID NO: 4576281 - DNA, 25 bp, Homo sapien
tcccactctgcagtaaagagtactg

SEQ ID NO: 4576282 - DNA, 25 bp, Homo sapien
caagcggaatctcagcctaaagccc

SEQ ID NO: 4576283 - DNA, 25 bp, Homo sapien
aaattgaggatgctcagcagaactt

SEQ ID NO: 4576284 - DNA, 25 bp, Homo sapien
gactccgttacatatggaccatatg

SEQ ID NO: 4576285 - DNA, 25 bp, Homo sapien
catatggacaatgtgctgaaactgc

SEQ ID NO: 4576286 - DNA, 25 bp, Homo sapien
aacattcccactacttaagttgtga

SEQ ID NO: 4576287 - DNA, 25 bp, Homo sapien
gcttttgccattctacacagtacag

SEQ ID NO: 4576288 - DNA, 25 bp, Homo sapien
tatactgcctcactgacagcaatgc

SEQ ID NO: 4576289 - DNA, 25 bp, Homo sapien
ggcagtatacttccagagcttgcaa

SEQ ID NO: 4576290 - DNA, 25 bp, Homo sapien
cacagtacagaggaatgatgcacac

SEQ ID NO: 4576291 - DNA, 25 bp, Homo sapien
cgatattaaccttccctagtagaga

SEQ ID NO: 4576292 - DNA, 25 bp, Homo sapien
aactgtatcggtctgaatttgtagc

SEQ ID NO: 4576293 - DNA, 25 bp, Homo sapien
gaaaagactggcctattaacaacca

SEQ ID NO: 4576294 - DNA, 25 bp, Homo sapien
ttcactttcagtcacctatctcggg

SEQ ID NO: 4576295 - DNA, 25 bp, Homo sapien
aaggcccgaccaatatcatacagca

SEQ ID NO: 4576296 - DNA, 25 bp, Homo sapien
aattagttgcagctatgtgtccctg

SEQ ID NO: 4576297 - DNA, 25 bp, Homo sapien
tgttcctcggaaataacgtctcttc

SEQ ID NO: 4576298 - DNA, 25 bp, Homo sapien
gcagaaacaggttcacaatcctaga

SEQ ID NO: 4576299 - DNA, 25 bp, Homo sapien
ccggaacacaaacgccggtcttgtg

SEQ ID NO: 4576300 - DNA, 25 bp, Homo sapien
ccggtcttgtgccaccctccctaag

SEQ ID NO: 4576301 - DNA, 25 bp, Homo sapien
ttaaggatgtcaccagtcctacggg

SEQ ID NO: 4576302 - DNA, 25 bp, Homo sapien
tcctacggggcctcagtagaatcct

SEQ ID NO: 4576303 - DNA, 25 bp, Homo sapien
gcggcgcctggccctgggaggaggg

SEQ ID NO: 4576304 - DNA, 25 bp, Homo sapien
cggcgcctggccctgggaggaggga

SEQ ID NO: 4576305 - DNA, 25 bp, Homo sapien
tggccctgggaggagggagccagag

SEQ ID NO: 4576306 - DNA, 25 bp, Homo sapien
gcctggccctgggaggagggagcca

SEQ ID NO: 4576307 - DNA, 25 bp, Homo sapien
gccagggcgctgggcagcgacgaac

SEQ ID NO: 4576308 - DNA, 25 bp, Homo sapien
caacagcgagagggccagggcgctg

SEQ ID NO: 4576309 - DNA, 25 bp, Homo sapien
agggccagggcgctgggcagcgacg

SEQ ID NO: 4576310 - DNA, 25 bp, Homo sapien
aacagcgagagggccagggcgctgg

SEQ ID NO: 4576311 - DNA, 25 bp, Homo sapien
gcgagggaggcagccgcggctcggc

SEQ ID NO: 4576312 - DNA, 25 bp, Homo sapien
cgcggctcggctccgtccttccccg

SEQ ID NO: 4576313 - DNA, 25 bp, Homo sapien
gcgggcgagtgcgcgagggagtgag

SEQ ID NO: 4576314 - DNA, 25 bp, Homo sapien
gcgagtgcgcgagggagtgagcgag

SEQ ID NO: 4576315 - DNA, 25 bp, Homo sapien
tgccgccgcagcgcccaggcctcgc

SEQ ID NO: 4576316 - DNA, 25 bp, Homo sapien
tcctgccgccgcagcgcccaggcct

SEQ ID NO: 4576317 - DNA, 25 bp, Homo sapien
tcctcctgccgccgcagcgcccagg

SEQ ID NO: 4576318 - DNA, 25 bp, Homo sapien
ccgccgcagcgcccaggcctcgcga

SEQ ID NO: 4576319 - DNA, 25 bp, Homo sapien
taggctctccgttgctgatcgcgcc

SEQ ID NO: 4576320 - DNA, 25 bp, Homo sapien
gcctcgagggactgcttgtagttag

SEQ ID NO: 4576321 - DNA, 25 bp, Homo sapien
ctggcctcgagggactgcttgtagt

SEQ ID NO: 4576322 - DNA, 25 bp, Homo sapien
tgcttgtagttaggctctccgttgc

SEQ ID NO: 4576323 - DNA, 25 bp, Homo sapien
ccttcttcaagctgggcattgagga

SEQ ID NO: 4576324 - DNA, 25 bp, Homo sapien
ccagctcctctgcgaacccttccct

SEQ ID NO: 4576325 - DNA, 25 bp, Homo sapien
tccttcttcaagctgggcattgagg

SEQ ID NO: 4576326 - DNA, 25 bp, Homo sapien
agctcctctgcgaacccttccctga

SEQ ID NO: 4576327 - DNA, 25 bp, Homo sapien
ttgaagttatgtttgtgatggtctc

SEQ ID NO: 4576328 - DNA, 25 bp, Homo sapien
tttgaagttatgtttgtgatggtct

SEQ ID NO: 4576329 - DNA, 25 bp, Homo sapien
tgaagttatgtttgtgatggtctca

SEQ ID NO: 4576330 - DNA, 25 bp, Homo sapien
tgaccttctctaggcatagggagct

SEQ ID NO: 4576331 - DNA, 25 bp, Homo sapien
gaatctgaccttctctaggcatagg

SEQ ID NO: 4576332 - DNA, 25 bp, Homo sapien
ccattgggaatctgaccttctctag

SEQ ID NO: 4576333 - DNA, 25 bp, Homo sapien
ccttctctaggcatagggagcttaa

SEQ ID NO: 4576334 - DNA, 25 bp, Homo sapien
ggacgggtggcacatgctgactcca

SEQ ID NO: 4576335 - DNA, 25 bp, Homo sapien
tccaggatccagagtctaggaaagg

SEQ ID NO: 4576336 - DNA, 25 bp, Homo sapien
gcagcatgaggcctgcgtggctcca

SEQ ID NO: 4576337 - DNA, 25 bp, Homo sapien
tctctgggtgccgtggactcttctg

SEQ ID NO: 4576338 - DNA, 25 bp, Homo sapien
ggcttgggacagcaacctagggccc

SEQ ID NO: 4576339 - DNA, 25 bp, Homo sapien
ttgtgctatgaagtggtcccactct

SEQ ID NO: 4576340 - DNA, 25 bp, Homo sapien
cgtgtgcgccttcctttttttacag

SEQ ID NO: 4576341 - DNA, 25 bp, Homo sapien
atggttcctccctcaccgtgtgcgc

SEQ ID NO: 4576342 - DNA, 25 bp, Homo sapien
ccttcctgtgatagtgtgagcatag

SEQ ID NO: 4576343 - DNA, 25 bp, Homo sapien
ctgctctgatgggacccaaatacga

SEQ ID NO: 4576344 - DNA, 25 bp, Homo sapien
gagtaaccaaggtcccagctgctct

SEQ ID NO: 4576345 - DNA, 25 bp, Homo sapien
ccaaatacgacagaggcttaagcag

SEQ ID NO: 4576346 - DNA, 25 bp, Homo sapien
gggcccctgccgtgtcactctcagg

SEQ ID NO: 4576347 - DNA, 25 bp, Homo sapien
agtggggtctgaaagatgagtcttt

SEQ ID NO: 4576348 - DNA, 25 bp, Homo sapien
cagagccccaagaatgggtgaggga

SEQ ID NO: 4576349 - DNA, 25 bp, Homo sapien
tggccctccacatggagacaggaag

SEQ ID NO: 4576350 - DNA, 25 bp, Homo sapien
tcctggagtctagaagctgtttcct

SEQ ID NO: 4576351 - DNA, 25 bp, Homo sapien
ctggagtctagaagctgtttccttt

SEQ ID NO: 4576352 - DNA, 25 bp, Homo sapien
tcttgctctagccttaatactggcc

SEQ ID NO: 4576353 - DNA, 25 bp, Homo sapien
tgaagacagggcactctgcgcccac

SEQ ID NO: 4576354 - DNA, 25 bp, Homo sapien
tattgagcaactacagatgtcagca

SEQ ID NO: 4576355 - DNA, 25 bp, Homo sapien
cctcgccacggctagagaatctggt

SEQ ID NO: 4576356 - DNA, 25 bp, Homo sapien
ccctgcgtgggaagataaagttcct

SEQ ID NO: 4576357 - DNA, 25 bp, Homo sapien
cagacgttctgatgccttccggatg

SEQ ID NO: 4576358 - DNA, 25 bp, Homo sapien
tggtgtcagggccatacgtccttgt

SEQ ID NO: 4576359 - DNA, 25 bp, Homo sapien
tactgcctacctccagggcacactg

SEQ ID NO: 4576360 - DNA, 25 bp, Homo sapien
tgcaggtgtcataatcaccatactg

SEQ ID NO: 4576361 - DNA, 25 bp, Homo sapien
gtgtcagggccatacgtccttgtgg

SEQ ID NO: 4576362 - DNA, 25 bp, Homo sapien
tgccagtgcgaataaatgagtccct

SEQ ID NO: 4576363 - DNA, 25 bp, Homo sapien
ggaatcagcctcatatgcctgcagg

SEQ ID NO: 4576364 - DNA, 25 bp, Homo sapien
gaggcacacttaagacgcagcaagg

SEQ ID NO: 4576365 - DNA, 25 bp, Homo sapien
ggttctgtgcggaaatgccagccca

SEQ ID NO: 4576366 - DNA, 25 bp, Homo sapien
gattcggtggtctcgctcgttcaga

SEQ ID NO: 4576367 - DNA, 25 bp, Homo sapien
cgaagctacagactttctccgtgag

SEQ ID NO: 4576368 - DNA, 25 bp, Homo sapien
tagtactgtctctacggaaacggta

SEQ ID NO: 4576369 - DNA, 25 bp, Homo sapien
cccgctaggtctacaggaggaaata

SEQ ID NO: 4576370 - DNA, 25 bp, Homo sapien
gactaccagacccattatacagagg

SEQ ID NO: 4576371 - DNA, 25 bp, Homo sapien
tggatagcacctcttcaggcaggag

SEQ ID NO: 4576372 - DNA, 25 bp, Homo sapien
tgtgtctaccccaaggacagggagc

SEQ ID NO: 4576373 - DNA, 25 bp, Homo sapien
gacttcccggaagcagagagatctg

SEQ ID NO: 4576374 - DNA, 25 bp, Homo sapien
atatttatttatagctctatgtgcc

SEQ ID NO: 4576375 - DNA, 25 bp, Homo sapien
tttatttatagctctatgtgcccac

SEQ ID NO: 4576376 - DNA, 25 bp, Homo sapien
tatttatagctctatgtgcccaccg

SEQ ID NO: 4576377 - DNA, 25 bp, Homo sapien
tttatagctctatgtgcccaccgcc

SEQ ID NO: 4576378 - DNA, 25 bp, Homo sapien
gtgctgctgttcctcgtgacccttc

SEQ ID NO: 4576379 - DNA, 25 bp, Homo sapien
tgtagggcagaaccgtctgcgtgct

SEQ ID NO: 4576380 - DNA, 25 bp, Homo sapien
cgtctgcgtgctcttgtctgacact

SEQ ID NO: 4576381 - DNA, 25 bp, Homo sapien
tgctgttcctcgtgacccttcgagt

SEQ ID NO: 4576382 - DNA, 25 bp, Homo sapien
gggccaaggtagagcctgagtggcg

SEQ ID NO: 4576383 - DNA, 25 bp, Homo sapien
gtggagagcgccgtgacttgtaggg

SEQ ID NO: 4576384 - DNA, 25 bp, Homo sapien
cctgagtggcggctggtcagtggag

SEQ ID NO: 4576385 - DNA, 25 bp, Homo sapien
gctggtcagtggagagcgccgtgac

SEQ ID NO: 4576386 - DNA, 25 bp, Homo sapien
acagagcatggtagagcactttgtc

SEQ ID NO: 4576387 - DNA, 25 bp, Homo sapien
gagcatggtagagcactttgtcact

SEQ ID NO: 4576388 - DNA, 25 bp, Homo sapien
agagcatggtagagcactttgtcac

SEQ ID NO: 4576389 - DNA, 25 bp, Homo sapien
cagagcatggtagagcactttgtca

SEQ ID NO: 4576390 - DNA, 25 bp, Homo sapien
agctggctcttcaccgtggggccag

SEQ ID NO: 4576391 - DNA, 25 bp, Homo sapien
tggctcttcaccgtggggccagcac

SEQ ID NO: 4576392 - DNA, 25 bp, Homo sapien
gctcttcaccgtggggccagcacca

SEQ ID NO: 4576393 - DNA, 25 bp, Homo sapien
gctggctcttcaccgtggggccagc

SEQ ID NO: 4576394 - DNA, 25 bp, Homo sapien
attcatgaggcggtagtcagggcca

SEQ ID NO: 4576395 - DNA, 25 bp, Homo sapien
tcgggaccatccacggagtccgagg

SEQ ID NO: 4576396 - DNA, 25 bp, Homo sapien
ggatgggcgtgccaccattcatgag

SEQ ID NO: 4576397 - DNA, 25 bp, Homo sapien
agcccctggccgagtcgactcggga

SEQ ID NO: 4576398 - DNA, 25 bp, Homo sapien
ctgagaggatatcggctgtcatgaa

SEQ ID NO: 4576399 - DNA, 25 bp, Homo sapien
tgtcactgctagaggtgctgctcac

SEQ ID NO: 4576400 - DNA, 25 bp, Homo sapien
catgcccgccttgtcactgctagag

SEQ ID NO: 4576401 - DNA, 25 bp, Homo sapien
gaggatatcggctgtcatgaagtcc

SEQ ID NO: 4576402 - DNA, 25 bp, Homo sapien
gttagcttatcgatctggctcacca

SEQ ID NO: 4576403 - DNA, 25 bp, Homo sapien
tggccgtggtccagtcgtccggctc

SEQ ID NO: 4576404 - DNA, 25 bp, Homo sapien
cagttcaaagtcgaagtccgaggtt

SEQ ID NO: 4576405 - DNA, 25 bp, Homo sapien
tccgaggttagcttatcgatctggc

SEQ ID NO: 4576406 - DNA, 25 bp, Homo sapien
caggccatatgctcgagaggatgag

SEQ ID NO: 4576407 - DNA, 25 bp, Homo sapien
ccatatgctcgagaggatgaggaga

SEQ ID NO: 4576408 - DNA, 25 bp, Homo sapien
atttcaggccatatgctcgagagga

SEQ ID NO: 4576409 - DNA, 25 bp, Homo sapien
ttcaggccatatgctcgagaggatg

SEQ ID NO: 4576410 - DNA, 25 bp, Homo sapien
cagcgggcaggcagtggcatacggg

SEQ ID NO: 4576411 - DNA, 25 bp, Homo sapien
ggcagtggcatacggggtaggctct

SEQ ID NO: 4576412 - DNA, 25 bp, Homo sapien
ccagctgggtgccattggcagcggg

SEQ ID NO: 4576413 - DNA, 25 bp, Homo sapien
ggtgccattggcagcgggcaggcag

SEQ ID NO: 4576414 - DNA, 25 bp, Homo sapien
gccaaagtcttgggtggaggcacat

SEQ ID NO: 4576415 - DNA, 25 bp, Homo sapien
tgccaaagtcttgggtggaggcaca

SEQ ID NO: 4576416 - DNA, 25 bp, Homo sapien
ctgccaaagtcttgggtggaggcac

SEQ ID NO: 4576417 - DNA, 25 bp, Homo sapien
atttatgagtacgtttttgtgccaa

SEQ ID NO: 4576418 - DNA, 25 bp, Homo sapien
caagaaggttggcttagggtctgtc

SEQ ID NO: 4576419 - DNA, 25 bp, Homo sapien
cccaagaaggttggcttagggtctg

SEQ ID NO: 4576420 - DNA, 25 bp, Homo sapien
tggcttagggtctgtctggtccctc

SEQ ID NO: 4576421 - DNA, 25 bp, Homo sapien
tcttcatgcgctgtcgaatccgctc

SEQ ID NO: 4576422 - DNA, 25 bp, Homo sapien
ccttgagctcgcgaaggatgccctc

SEQ ID NO: 4576423 - DNA, 25 bp, Homo sapien
gctgcccgatgaccatcttcatgcg

SEQ ID NO: 4576424 - DNA, 25 bp, Homo sapien
ccactgctggggtcgtcactgggct

SEQ ID NO: 4576425 - DNA, 25 bp, Homo sapien
tggatgcaactgacacctgcagagg

SEQ ID NO: 4576426 - DNA, 25 bp, Homo sapien
caactcctaggcagttgcaaaggca

SEQ ID NO: 4576427 - DNA, 25 bp, Homo sapien
tccaggtcttgaagtgcctgtgggt

SEQ ID NO: 4576428 - DNA, 25 bp, Homo sapien
cagggactaagggtaagagatgccc

SEQ ID NO: 4576429 - DNA, 25 bp, Homo sapien
aaaaatctttctcaagcctctccag

SEQ ID NO: 4576430 - DNA, 25 bp, Homo sapien
ggctcagttcacgttccgaaaggtc

SEQ ID NO: 4576431 - DNA, 25 bp, Homo sapien
cgggattcgctctgtccagtccaga

SEQ ID NO: 4576432 - DNA, 25 bp, Homo sapien
tccgagccgtgaccggagacatctg

SEQ ID NO: 4576433 - DNA, 25 bp, Homo sapien
tcaaggctcagtgtacgatcagggt

SEQ ID NO: 4576434 - DNA, 25 bp, Homo sapien
gaatgcgatcagagttcagcctgga

SEQ ID NO: 4576435 - DNA, 25 bp, Homo sapien
tctatgaccagagtcagggctcagt

SEQ ID NO: 4576436 - DNA, 25 bp, Homo sapien
gacagagtcacgactcagtctatga

SEQ ID NO: 4576437 - DNA, 25 bp, Homo sapien
taacatggggcgtgatgactgctcc

SEQ ID NO: 4576438 - DNA, 25 bp, Homo sapien
gaggcagttggtgggacatattcca

SEQ ID NO: 4576439 - DNA, 25 bp, Homo sapien
gaacagcagccgtgtctaacatggg

SEQ ID NO: 4576440 - DNA, 25 bp, Homo sapien
tccacaaatagaaaggtggccaggg

SEQ ID NO: 4576441 - DNA, 25 bp, Homo sapien
tgatttattaccaatacagatggga

SEQ ID NO: 4576442 - DNA, 25 bp, Homo sapien
ggatcacaggaaacagtggcctgca

SEQ ID NO: 4576443 - DNA, 25 bp, Homo sapien
taaaagttaggtctgcagagggcca

SEQ ID NO: 4576444 - DNA, 25 bp, Homo sapien
agggccataaccaggaggtgctctg

SEQ ID NO: 4576445 - DNA, 25 bp, Homo sapien
gagatcactgtggtcataccaagcc

SEQ ID NO: 4576446 - DNA, 25 bp, Homo sapien
ggactgagcaggcaaaataccttca

SEQ ID NO: 4576447 - DNA, 25 bp, Homo sapien
tgacaatgctaaggggactttggcc

SEQ ID NO: 4576448 - DNA, 25 bp, Homo sapien
cctcggtgtccataggggactgagc

SEQ ID NO: 4576449 - DNA, 25 bp, Homo sapien
ctcctccaggaagcgctctcttatt

SEQ ID NO: 4576450 - DNA, 25 bp, Homo sapien
tctgcctgtcttcctcaaggcttgt

SEQ ID NO: 4576451 - DNA, 25 bp, Homo sapien
gaggaagccgccctacgtggtccca

SEQ ID NO: 4576452 - DNA, 25 bp, Homo sapien
aattccttgcgcacactgctggctg

SEQ ID NO: 4576453 - DNA, 25 bp, Homo sapien
agcccctgtcggaccaggcactgag

SEQ ID NO: 4576454 - DNA, 25 bp, Homo sapien
gatggaggcgcgatggtgaaggtgg

SEQ ID NO: 4576455 - DNA, 25 bp, Homo sapien
tggcggtgacccagttagagatgtt

SEQ ID NO: 4576456 - DNA, 25 bp, Homo sapien
gacccagttagagatgttcagcccc

SEQ ID NO: 4576457 - DNA, 25 bp, Homo sapien
tgctggccaattgccccaggaatgc

SEQ ID NO: 4576458 - DNA, 25 bp, Homo sapien
cgtgctggccaattgccccaggaat

SEQ ID NO: 4576459 - DNA, 25 bp, Homo sapien
ctgggcgtgctggccaattgcccca

SEQ ID NO: 4576460 - DNA, 25 bp, Homo sapien
ggcgtgctggccaattgccccagga

SEQ ID NO: 4576461 - DNA, 25 bp, Homo sapien
ggcaacccggctggctgcctggagg

SEQ ID NO: 4576462 - DNA, 25 bp, Homo sapien
ggctggctgcctggaggtctctcat

SEQ ID NO: 4576463 - DNA, 25 bp, Homo sapien
cccggctggctgcctggaggtctct

SEQ ID NO: 4576464 - DNA, 25 bp, Homo sapien
cggcaacccggctggctgcctggag

SEQ ID NO: 4576465 - DNA, 25 bp, Homo sapien
gatgctgactcgcacttacagcctg

SEQ ID NO: 4576466 - DNA, 25 bp, Homo sapien
ttagctccaatggtccctggtcagg

SEQ ID NO: 4576467 - DNA, 25 bp, Homo sapien
tacagcctgtcacccgacagagcag

SEQ ID NO: 4576468 - DNA, 25 bp, Homo sapien
ggctgctgagatgcgccggctattt

SEQ ID NO: 4576469 - DNA, 25 bp, Homo sapien
tcagggaagccttaagaggactggc

SEQ ID NO: 4576470 - DNA, 25 bp, Homo sapien
gacagagctcaccaacagtaggaag

SEQ ID NO: 4576471 - DNA, 25 bp, Homo sapien
gaatatgtgcagtcaggtgcccaac

SEQ ID NO: 4576472 - DNA, 25 bp, Homo sapien
acatctcggtgtgcctaggcctgag

SEQ ID NO: 4576473 - DNA, 25 bp, Homo sapien
gcagctgaaatgattgaggagcaga

SEQ ID NO: 4576474 - DNA, 25 bp, Homo sapien
agcagaagctgtgtaggagccaatg

SEQ ID NO: 4576475 - DNA, 25 bp, Homo sapien
gagcagaagctgtgtaggagccaat

SEQ ID NO: 4576476 - DNA, 25 bp, Homo sapien
atgtgcagctgaaatgattgaggag

SEQ ID NO: 4576477 - DNA, 25 bp, Homo sapien
gtggcagggaggactttcttggatg

SEQ ID NO: 4576478 - DNA, 25 bp, Homo sapien
agggaggactttcttggatgcagct

SEQ ID NO: 4576479 - DNA, 25 bp, Homo sapien
ggtgaggtggttgctggtgggacaa

SEQ ID NO: 4576480 - DNA, 25 bp, Homo sapien
ccaggtgaggtggttgctggtggga

SEQ ID NO: 4576481 - DNA, 25 bp, Homo sapien
cattttctttgtgactagaaggtat

SEQ ID NO: 4576482 - DNA, 25 bp, Homo sapien
tgactagaaggtatggcaccaactg

SEQ ID NO: 4576483 - DNA, 25 bp, Homo sapien
ttgtgactagaaggtatggcaccaa

SEQ ID NO: 4576484 - DNA, 25 bp, Homo sapien
tctttgtgactagaaggtatggcac

SEQ ID NO: 4576485 - DNA, 25 bp, Homo sapien
cacagggaccgatggcatggtcggt

SEQ ID NO: 4576486 - DNA, 25 bp, Homo sapien
gtcggtggctatgccggcacttctg

SEQ ID NO: 4576487 - DNA, 25 bp, Homo sapien
tggtcggtggctatgccggcacttc

SEQ ID NO: 4576488 - DNA, 25 bp, Homo sapien
catggtcggtggctatgccggcact

SEQ ID NO: 4576489 - DNA, 25 bp, Homo sapien
cttgttcccccacgcagcagcaggg

SEQ ID NO: 4576490 - DNA, 25 bp, Homo sapien
ctgctggtcccaacattagccacat

SEQ ID NO: 4576491 - DNA, 25 bp, Homo sapien
tgaagtcataggaggggaccccgct

SEQ ID NO: 4576492 - DNA, 25 bp, Homo sapien
gaccccgctgctgaagccttttatg

SEQ ID NO: 4576493 - DNA, 25 bp, Homo sapien
tcataggaggggaccccgctgctga

SEQ ID NO: 4576494 - DNA, 25 bp, Homo sapien
tctgtgaagtcataggaggggaccc

SEQ ID NO: 4576495 - DNA, 25 bp, Homo sapien
ctggaacaatgtggcaggaggaaaa

SEQ ID NO: 4576496 - DNA, 25 bp, Homo sapien
aaaaggaggatagacagctgtttcc

SEQ ID NO: 4576497 - DNA, 25 bp, Homo sapien
gggccactctctcattaagcataca

SEQ ID NO: 4576498 - DNA, 25 bp, Homo sapien
ccattctcccacctaaagctttgag

SEQ ID NO: 4576499 - DNA, 25 bp, Homo sapien
agcctggccagtcctttggatagtg

SEQ ID NO: 4576500 - DNA, 25 bp, Homo sapien
tgggttcttttgactgccagcatct

SEQ ID NO: 4576501 - DNA, 25 bp, Homo sapien
tttggatagtggtggctaatgagct

SEQ ID NO: 4576502 - DNA, 25 bp, Homo sapien
gcctggccagtcctttggatagtgg

SEQ ID NO: 4576503 - DNA, 25 bp, Homo sapien
tgcttggctagtggagcagcatcct

SEQ ID NO: 4576504 - DNA, 25 bp, Homo sapien
gcttggtcaaggactgaagacagca

SEQ ID NO: 4576505 - DNA, 25 bp, Homo sapien
agagggtttgcagggtcactctgcc

SEQ ID NO: 4576506 - DNA, 25 bp, Homo sapien
ggaacaattcccatcagtgctgcct

SEQ ID NO: 4576507 - DNA, 25 bp, Homo sapien
caggccagatctgaacctcttctct

SEQ ID NO: 4576508 - DNA, 25 bp, Homo sapien
ctgagggtgtcagtgtagatctcca

SEQ ID NO: 4576509 - DNA, 25 bp, Homo sapien
tgagggtgtcagtgtagatctccat

SEQ ID NO: 4576510 - DNA, 25 bp, Homo sapien
gactgagggtgtcagtgtagatctc

SEQ ID NO: 4576511 - DNA, 25 bp, Homo sapien
gacacaaggtgacggtctgcacaca

SEQ ID NO: 4576512 - DNA, 25 bp, Homo sapien
tgcagcagcgggtggaccctgtttc

SEQ ID NO: 4576513 - DNA, 25 bp, Homo sapien
taagatcagctgcaatcatgggttc

SEQ ID NO: 4576514 - DNA, 25 bp, Homo sapien
tcatgggttcagtcccgcatggcca

SEQ ID NO: 4576515 - DNA, 25 bp, Homo sapien
gtgcctgccacatgacgcacaagct

SEQ ID NO: 4576516 - DNA, 25 bp, Homo sapien
gcagaacaaagagtacacgctgagt

SEQ ID NO: 4576517 - DNA, 25 bp, Homo sapien
aacagatataacagtggggttggcc

SEQ ID NO: 4576518 - DNA, 25 bp, Homo sapien
gcctgccacatgacgcacaagctta

SEQ ID NO: 4576519 - DNA, 25 bp, Homo sapien
ggaacaattgcagtgaatcctcagt

SEQ ID NO: 4576520 - DNA, 25 bp, Homo sapien
agatgtttccaattcccgacctgat

SEQ ID NO: 4576521 - DNA, 25 bp, Homo sapien
gaagccaggttgaattgagccctca

SEQ ID NO: 4576522 - DNA, 25 bp, Homo sapien
caccatgttcgttttagaagccagg

SEQ ID NO: 4576523 - DNA, 25 bp, Homo sapien
cacagcccacactgatccccatgtc

SEQ ID NO: 4576524 - DNA, 25 bp, Homo sapien
atgtgtttagcccaatatattcata

SEQ ID NO: 4576525 - DNA, 25 bp, Homo sapien
tatattgtttcaatgtgggctgggc

SEQ ID NO: 4576526 - DNA, 25 bp, Homo sapien
cataatatattgtttcaatgtgggc

SEQ ID NO: 4576527 - DNA, 25 bp, Homo sapien
aaaaaatgtgtttagcccaatatat

SEQ ID NO: 4576528 - DNA, 25 bp, Homo sapien
tgagggctcccgctcacaggaagct

SEQ ID NO: 4576529 - DNA, 25 bp, Homo sapien
agggctcccgctcacaggaagctgc

SEQ ID NO: 4576530 - DNA, 25 bp, Homo sapien
aggaagctgccatctggtgcagtcc

SEQ ID NO: 4576531 - DNA, 25 bp, Homo sapien
gaagctgccatctggtgcagtccct

SEQ ID NO: 4576532 - DNA, 25 bp, Homo sapien
gggccatgctcccacttgatgccag

SEQ ID NO: 4576533 - DNA, 25 bp, Homo sapien
cgggtcattcaaggccccaggctgc

SEQ ID NO: 4576534 - DNA, 25 bp, Homo sapien
tccgggtcattcaaggccccaggct

SEQ ID NO: 4576535 - DNA, 25 bp, Homo sapien
tgccagggctgtgcttccgctctgt

SEQ ID NO: 4576536 - DNA, 25 bp, Homo sapien
ggatgcgtagctgtgcctccgaggc

SEQ ID NO: 4576537 - DNA, 25 bp, Homo sapien
ctccgaggcctgcttcgggaccaag

SEQ ID NO: 4576538 - DNA, 25 bp, Homo sapien
cctgcttcgggaccaaggtgagcat

SEQ ID NO: 4576539 - DNA, 25 bp, Homo sapien
tctggggatgcgtagctgtgcctcc

SEQ ID NO: 4576540 - DNA, 25 bp, Homo sapien
ttctcagctcagttgttctagccat

SEQ ID NO: 4576541 - DNA, 25 bp, Homo sapien
tacttcaccgggctgctctcaagtt

SEQ ID NO: 4576542 - DNA, 25 bp, Homo sapien
tgctcctgatacttcaccgggctgc

SEQ ID NO: 4576543 - DNA, 25 bp, Homo sapien
tcaccgggctgctctcaagttcatc

SEQ ID NO: 4576544 - DNA, 25 bp, Homo sapien
caaaatcagtgttatggattgttat

SEQ ID NO: 4576545 - DNA, 25 bp, Homo sapien
gacaatttgatgagtgtaacacaca

SEQ ID NO: 4576546 - DNA, 25 bp, Homo sapien
gttatagacacagtatctgtccctg

SEQ ID NO: 4576547 - DNA, 25 bp, Homo sapien
gactgtggggctgtcaaatgtgctt

SEQ ID NO: 4576548 - DNA, 25 bp, Homo sapien
gcacatttgtgagtgcactgcaggc

SEQ ID NO: 4576549 - DNA, 25 bp, Homo sapien
gcgccctctgctgactgcggtcctc

SEQ ID NO: 4576550 - DNA, 25 bp, Homo sapien
cttgtgttgagaggctttggcgccc

SEQ ID NO: 4576551 - DNA, 25 bp, Homo sapien
aaatgggggaatccacagggcgcac

SEQ ID NO: 4576552 - DNA, 25 bp, Homo sapien
gactgtctagagaccctgtggtggc

SEQ ID NO: 4576553 - DNA, 25 bp, Homo sapien
aagtccatgtggcagaaccatcaac

SEQ ID NO: 4576554 - DNA, 25 bp, Homo sapien
tcaaccagaccagtgaacttttcca

SEQ ID NO: 4576555 - DNA, 25 bp, Homo sapien
ggctgtgatgccttgtaagtccatg

SEQ ID NO: 4576556 - DNA, 25 bp, Homo sapien
aggacagagtttcatcagggcctct

SEQ ID NO: 4576557 - DNA, 25 bp, Homo sapien
tgttgcccttgccacgggcttcacg

SEQ ID NO: 4576558 - DNA, 25 bp, Homo sapien
tgaaggacagagtttcatcagggcc

SEQ ID NO: 4576559 - DNA, 25 bp, Homo sapien
gtggttgttgcccttgccacgggct

SEQ ID NO: 4576560 - DNA, 25 bp, Homo sapien
gcatagccctgttcctctgcaggac

SEQ ID NO: 4576561 - DNA, 25 bp, Homo sapien
ggtggcatagccctgttcctctgca

SEQ ID NO: 4576562 - DNA, 25 bp, Homo sapien
ttctttcttctagggtggcatagcc

SEQ ID NO: 4576563 - DNA, 25 bp, Homo sapien
tttcttctagggtggcatagccctg

SEQ ID NO: 4576564 - DNA, 25 bp, Homo sapien
tggtaatggcccttggacgctctac

SEQ ID NO: 4576565 - DNA, 25 bp, Homo sapien
agttgtcccagctagatccctgagc

SEQ ID NO: 4576566 - DNA, 25 bp, Homo sapien
atccctgagctggtaatggcccttg

SEQ ID NO: 4576567 - DNA, 25 bp, Homo sapien
acagttgtcccagctagatccctga

SEQ ID NO: 4576568 - DNA, 25 bp, Homo sapien
tttagctcggtgcggtggtgcctgc

SEQ ID NO: 4576569 - DNA, 25 bp, Homo sapien
ttttagctcggtgcggtggtgcctg

SEQ ID NO: 4576570 - DNA, 25 bp, Homo sapien
agcccaggcaatatggtgggaccca

SEQ ID NO: 4576571 - DNA, 25 bp, Homo sapien
cccaggcaatatggtgggacccagt

SEQ ID NO: 4576572 - DNA, 25 bp, Homo sapien
agctcaagtaaacgggaaatcaaag

SEQ ID NO: 4576573 - DNA, 25 bp, Homo sapien
caagtagcattccaccaaatctgag

SEQ ID NO: 4576574 - DNA, 25 bp, Homo sapien
gaatggcagtgaactgatttaccac

SEQ ID NO: 4576575 - DNA, 25 bp, Homo sapien
ttaccacagcaataggtcaaaggag

SEQ ID NO: 4576576 - DNA, 25 bp, Homo sapien
tctaagttccctcacatggctgctg

SEQ ID NO: 4576577 - DNA, 25 bp, Homo sapien
ggctgctggcagcatgtggttcctc

SEQ ID NO: 4576578 - DNA, 25 bp, Homo sapien
ctgctggcagcatgtggttcctcac

SEQ ID NO: 4576579 - DNA, 25 bp, Homo sapien
gaaggatttgcttctaagttccctc

SEQ ID NO: 4576580 - DNA, 25 bp, Homo sapien
gggttttccataaggtggctcacaa

SEQ ID NO: 4576581 - DNA, 25 bp, Homo sapien
cacatgggttttccataaggtggct

SEQ ID NO: 4576582 - DNA, 25 bp, Homo sapien
caccaccctcggttctctgccacat

SEQ ID NO: 4576583 - DNA, 25 bp, Homo sapien
ccataaggtggctcacaacacagca

SEQ ID NO: 4576584 - DNA, 25 bp, Homo sapien
agcaagagggttagagagacaaaat

SEQ ID NO: 4576585 - DNA, 25 bp, Homo sapien
gtaaggatcattgggagccatttca

SEQ ID NO: 4576586 - DNA, 25 bp, Homo sapien
gaaattcgcctcttataacctaatc

SEQ ID NO: 4576587 - DNA, 25 bp, Homo sapien
ggtgactatcagaaggtaaggatca

SEQ ID NO: 4576588 - DNA, 25 bp, Homo sapien
aaatggcctttcagatcattggaaa

SEQ ID NO: 4576589 - DNA, 25 bp, Homo sapien
tctcaccacacatgaagacaaaatg

SEQ ID NO: 4576590 - DNA, 25 bp, Homo sapien
taagaacgatgtgataggccaacgg

SEQ ID NO: 4576591 - DNA, 25 bp, Homo sapien
acaatgggacttgtattctcagtca

SEQ ID NO: 4576592 - DNA, 25 bp, Homo sapien
cctggtgaaggcagcggttatgcaa

SEQ ID NO: 4576593 - DNA, 25 bp, Homo sapien
caaagagtgatatatgaaaaggtgc

SEQ ID NO: 4576594 - DNA, 25 bp, Homo sapien
tagacggtgataagtactactggca

SEQ ID NO: 4576595 - DNA, 25 bp, Homo sapien
ccaagttggctagaacagaaagagc

SEQ ID NO: 4576596 - DNA, 25 bp, Homo sapien
aggccttgaacaggactttggcttt

SEQ ID NO: 4576597 - DNA, 25 bp, Homo sapien
gcaacatgttcactctcacgggtaa

SEQ ID NO: 4576598 - DNA, 25 bp, Homo sapien
taatccagaggtgtgctcacgttgg

SEQ ID NO: 4576599 - DNA, 25 bp, Homo sapien
gaccagctgggtattctgtgccaaa

SEQ ID NO: 4576600 - DNA, 25 bp, Homo sapien
gaaaactcgtttccgatccagccag

SEQ ID NO: 4576601 - DNA, 25 bp, Homo sapien
tgctccacgtggaaatggctctcaa

SEQ ID NO: 4576602 - DNA, 25 bp, Homo sapien
aagcctggtccttcccatactgcag

SEQ ID NO: 4576603 - DNA, 25 bp, Homo sapien
tcctacagggacacaagaaggctgt

SEQ ID NO: 4576604 - DNA, 25 bp, Homo sapien
gatgaggccctagttatgtagaccc

SEQ ID NO: 4576605 - DNA, 25 bp, Homo sapien
ttccacctctaagtgaaactggcaa

SEQ ID NO: 4576606 - DNA, 25 bp, Homo sapien
cacctctaagtgaaactggcaatct

SEQ ID NO: 4576607 - DNA, 25 bp, Homo sapien
aagtgaaactggcaatctgactgca

SEQ ID NO: 4576608 - DNA, 25 bp, Homo sapien
tctaagtgaaactggcaatctgact

SEQ ID NO: 4576609 - DNA, 25 bp, Homo sapien
tgagggagacaaggtcctaacaggg

SEQ ID NO: 4576610 - DNA, 25 bp, Homo sapien
gagtgggggacaaagtcttgacctc

SEQ ID NO: 4576611 - DNA, 25 bp, Homo sapien
ggtatcttgcggagtgggggacaaa

SEQ ID NO: 4576612 - DNA, 25 bp, Homo sapien
tccggaacagagagggtatcttgcg

SEQ ID NO: 4576613 - DNA, 25 bp, Homo sapien
cgctccggaacagagagggtatctt

SEQ ID NO: 4576614 - DNA, 25 bp, Homo sapien
ccccacttccggagtggagttccag

SEQ ID NO: 4576615 - DNA, 25 bp, Homo sapien
ccacttccggagtggagttccagcc

SEQ ID NO: 4576616 - DNA, 25 bp, Homo sapien
cctgaagaaacacttccaaacccat

SEQ ID NO: 4576617 - DNA, 25 bp, Homo sapien
ccagccctgaagaaacacttccaaa

SEQ ID NO: 4576618 - DNA, 25 bp, Homo sapien
cccaggaacacggttggagaaggca

SEQ ID NO: 4576619 - DNA, 25 bp, Homo sapien
cttggatgccaaagcgttcaaactt

SEQ ID NO: 4576620 - DNA, 25 bp, Homo sapien
caatttctgcccttcggttcccagg

SEQ ID NO: 4576621 - DNA, 25 bp, Homo sapien
atcttccattggtaagccgtggcac

SEQ ID NO: 4576622 - DNA, 25 bp, Homo sapien
ttccagcccaaacgagaagccagtg

SEQ ID NO: 4576623 - DNA, 25 bp, Homo sapien
caaagcagagaggaatgggcggggt

SEQ ID NO: 4576624 - DNA, 25 bp, Homo sapien
ccagggatgctgtgaccaaagcaga

SEQ ID NO: 4576625 - DNA, 25 bp, Homo sapien
aggcccattccagcccaaacgagaa

SEQ ID NO: 4576626 - DNA, 25 bp, Homo sapien
ccctgctcgattcccttcctcagag

SEQ ID NO: 4576627 - DNA, 25 bp, Homo sapien
ccctcctactccctgctcgattccc

SEQ ID NO: 4576628 - DNA, 25 bp, Homo sapien
cctcctactccctgctcgattccct

SEQ ID NO: 4576629 - DNA, 25 bp, Homo sapien
ctccctgctcgattcccttcctcag

SEQ ID NO: 4576630 - DNA, 25 bp, Homo sapien
atggcggagacccacgcctgggctg

SEQ ID NO: 4576631 - DNA, 25 bp, Homo sapien
gcctgggctggtacccgccctacgc

SEQ ID NO: 4576632 - DNA, 25 bp, Homo sapien
cccatggcggagacccacgcctggg

SEQ ID NO: 4576633 - DNA, 25 bp, Homo sapien
cgcccgaggcgtacgggccgccgcg

SEQ ID NO: 4576634 - DNA, 25 bp, Homo sapien
aaccagaacggccgcggtgagtacg

SEQ ID NO: 4576635 - DNA, 25 bp, Homo sapien
gggcagcgtgtaccggcccaaccag

SEQ ID NO: 4576636 - DNA, 25 bp, Homo sapien
gtggggagcggaacggcgcgcagca

SEQ ID NO: 4576637 - DNA, 25 bp, Homo sapien
ctgccggtgcgcagctccgacacgc

SEQ ID NO: 4576638 - DNA, 25 bp, Homo sapien
ctcccagcttaacccgcacccaggc

SEQ ID NO: 4576639 - DNA, 25 bp, Homo sapien
actagccgagctttgggaggaggct

SEQ ID NO: 4576640 - DNA, 25 bp, Homo sapien
tcctggctttggtggagggactagc

SEQ ID NO: 4576641 - DNA, 25 bp, Homo sapien
tgtgggctctgatcctggctttggt

SEQ ID NO: 4576642 - DNA, 25 bp, Homo sapien
caacatggggagacatccttatctc

SEQ ID NO: 4576643 - DNA, 25 bp, Homo sapien
agaattttcataatatgctttccta

SEQ ID NO: 4576644 - DNA, 25 bp, Homo sapien
gaaggcatgggaaatatgtgtggag

SEQ ID NO: 4576645 - DNA, 25 bp, Homo sapien
aattaccaagaaactaatcgcaggg

SEQ ID NO: 4576646 - DNA, 25 bp, Homo sapien
aatccccgcagagcttagagcctgg

SEQ ID NO: 4576647 - DNA, 25 bp, Homo sapien
ttgttagggcctcaactctctgtgg

SEQ ID NO: 4576648 - DNA, 25 bp, Homo sapien
catgcttggtccctcacacaaggac

SEQ ID NO: 4576649 - DNA, 25 bp, Homo sapien
tctctgtggtgcagatgaacacctc

SEQ ID NO: 4576650 - DNA, 25 bp, Homo sapien
ccgcaggtctgcctcggccatctcc

SEQ ID NO: 4576651 - DNA, 25 bp, Homo sapien
agggatgccatcaggcaccccgtgt

SEQ ID NO: 4576652 - DNA, 25 bp, Homo sapien
accttcagccgtccactcatgtagg

SEQ ID NO: 4576653 - DNA, 25 bp, Homo sapien
gggccgcagctctctgcatagcagg

SEQ ID NO: 4576654 - DNA, 25 bp, Homo sapien
actggacctggcaccaacttgaggg

SEQ ID NO: 4576655 - DNA, 25 bp, Homo sapien
cgacattgaactggtagcaggcccc

SEQ ID NO: 4576656 - DNA, 25 bp, Homo sapien
gggcaggtggctcaacttcactcac

SEQ ID NO: 4576657 - DNA, 25 bp, Homo sapien
aggccccgacttggctgaccagggc

SEQ ID NO: 4576658 - DNA, 25 bp, Homo sapien
tgctggagggtgctgtccaggttgg

SEQ ID NO: 4576659 - DNA, 25 bp, Homo sapien
ggcacctcctgccattgagttcatg

SEQ ID NO: 4576660 - DNA, 25 bp, Homo sapien
ggtgctgtccaggttgggcccagct

SEQ ID NO: 4576661 - DNA, 25 bp, Homo sapien
caggccctggtcacatcgttgatct

SEQ ID NO: 4576662 - DNA, 25 bp, Homo sapien
gaaaacctggcatgttcgtggagct

SEQ ID NO: 4576663 - DNA, 25 bp, Homo sapien
tttaaggcaagatcctcctggctgc

SEQ ID NO: 4576664 - DNA, 25 bp, Homo sapien
tttagctggaccctcacatgtcggc

SEQ ID NO: 4576665 - DNA, 25 bp, Homo sapien
tgaataagtgtacgcctgaaccagg

SEQ ID NO: 4576666 - DNA, 25 bp, Homo sapien
tctgggctgtcatgcgtgtggctgt

SEQ ID NO: 4576667 - DNA, 25 bp, Homo sapien
caccgggtcccagatgcgaaactgg

SEQ ID NO: 4576668 - DNA, 25 bp, Homo sapien
agaagctggtcgctgatcttgagct

SEQ ID NO: 4576669 - DNA, 25 bp, Homo sapien
tcccgcagcggcctcttgagcaggg

SEQ ID NO: 4576670 - DNA, 25 bp, Homo sapien
tgcttggcagctagctcctcaaggg

SEQ ID NO: 4576671 - DNA, 25 bp, Homo sapien
ttaggtgtatgaagcaaggatgtcc

SEQ ID NO: 4576672 - DNA, 25 bp, Homo sapien
ggatgtcctcctagcttccatcaat

SEQ ID NO: 4576673 - DNA, 25 bp, Homo sapien
tggtgtcaccaagtatgtagggtta

SEQ ID NO: 4576674 - DNA, 25 bp, Homo sapien
cctggcaccacagtacattctggac

SEQ ID NO: 4576675 - DNA, 25 bp, Homo sapien
ctggcaccacagtacattctggaca

SEQ ID NO: 4576676 - DNA, 25 bp, Homo sapien
gacgttgaaggctcgtgtcctcaga

SEQ ID NO: 4576677 - DNA, 25 bp, Homo sapien
ggaacacaatcatccgctcgtaggt

SEQ ID NO: 4576678 - DNA, 25 bp, Homo sapien
tcatccgctcgtaggtgggcacaat

SEQ ID NO: 4576679 - DNA, 25 bp, Homo sapien
aagagcagaaccatgccaggtccct

SEQ ID NO: 4576680 - DNA, 25 bp, Homo sapien
tcctattatgcactaccagctgggc

SEQ ID NO: 4576681 - DNA, 25 bp, Homo sapien
gactttagacaagcccaagccttag

SEQ ID NO: 4576682 - DNA, 25 bp, Homo sapien
cagtgtccagatcccaggacttagg

SEQ ID NO: 4576683 - DNA, 25 bp, Homo sapien
tgcgtgtaccttaaagccagtgtcc

SEQ ID NO: 4576684 - DNA, 25 bp, Homo sapien
agcagcaagaaccccaggaaactga

SEQ ID NO: 4576685 - DNA, 25 bp, Homo sapien
cagcaagaaccccaggaaactgatg

SEQ ID NO: 4576686 - DNA, 25 bp, Homo sapien
gcaagaaccccaggaaactgatgag

SEQ ID NO: 4576687 - DNA, 25 bp, Homo sapien
caagaaccccaggaaactgatgagg

SEQ ID NO: 4576688 - DNA, 25 bp, Homo sapien
tagttcccgggcttctagaggtgcc

SEQ ID NO: 4576689 - DNA, 25 bp, Homo sapien
tccaggagatgcctagttcccgggc

SEQ ID NO: 4576690 - DNA, 25 bp, Homo sapien
tcttctatgcgaaatagaaacctga

SEQ ID NO: 4576691 - DNA, 25 bp, Homo sapien
tctgcctagacctcggtttcttcta

SEQ ID NO: 4576692 - DNA, 25 bp, Homo sapien
cttctgcgagcccagaaagccgaag

SEQ ID NO: 4576693 - DNA, 25 bp, Homo sapien
gctggaagcggtcaaaatcacccag

SEQ ID NO: 4576694 - DNA, 25 bp, Homo sapien
gaaagccgaagctcgactgctggaa

SEQ ID NO: 4576695 - DNA, 25 bp, Homo sapien
tggaagcggtcaaaatcacccaggg

SEQ ID NO: 4576696 - DNA, 25 bp, Homo sapien
ggcttttgacaggagacacgccccg

SEQ ID NO: 4576697 - DNA, 25 bp, Homo sapien
tggccagtgggccctacgcggcccc

SEQ ID NO: 4576698 - DNA, 25 bp, Homo sapien
ttttgacaggagacacgccccgcgc

SEQ ID NO: 4576699 - DNA, 25 bp, Homo sapien
gccagtgggccctacgcggccccgc

SEQ ID NO: 4576700 - DNA, 25 bp, Homo sapien
tcagcggtaggtctgcagctctccg

SEQ ID NO: 4576701 - DNA, 25 bp, Homo sapien
cgtaagtcagcggtaggtctgcagc

SEQ ID NO: 4576702 - DNA, 25 bp, Homo sapien
agtcagcggtaggtctgcagctctc

SEQ ID NO: 4576703 - DNA, 25 bp, Homo sapien
taagtcagcggtaggtctgcagctc

SEQ ID NO: 4576704 - DNA, 25 bp, Homo sapien
tgtttgccctcagcaacatgtcgta

SEQ ID NO: 4576705 - DNA, 25 bp, Homo sapien
actgtcttctgtattatgtttgccc

SEQ ID NO: 4576706 - DNA, 25 bp, Homo sapien
gcaacatgtcgtatctggcacaggg

SEQ ID NO: 4576707 - DNA, 25 bp, Homo sapien
tcttctgtattatgtttgccctcag

SEQ ID NO: 4576708 - DNA, 25 bp, Homo sapien
gatattcagattgtgtcaccaggag

SEQ ID NO: 4576709 - DNA, 25 bp, Homo sapien
ccagaggtcccagaagatacgttca

SEQ ID NO: 4576710 - DNA, 25 bp, Homo sapien
agaatgcctgccttcgaagcttgaa

SEQ ID NO: 4576711 - DNA, 25 bp, Homo sapien
tacgttcagatcaagtgctgtggca

SEQ ID NO: 4576712 - DNA, 25 bp, Homo sapien
tttatcctgtaactttttcatccca

SEQ ID NO: 4576713 - DNA, 25 bp, Homo sapien
tcctgtaactttttcatcccacaac

SEQ ID NO: 4576714 - DNA, 25 bp, Homo sapien
tatcctgtaactttttcatcccaca

SEQ ID NO: 4576715 - DNA, 25 bp, Homo sapien
ttatcctgtaactttttcatcccac

SEQ ID NO: 4576716 - DNA, 25 bp, Homo sapien
cttattttaaaacttaagatagcag

SEQ ID NO: 4576717 - DNA, 25 bp, Homo sapien
aagctttgcattggaattggcattt

SEQ ID NO: 4576718 - DNA, 25 bp, Homo sapien
aggcaacagtgtttcagtatttcca

SEQ ID NO: 4576719 - DNA, 25 bp, Homo sapien
acttggcaaataaagctttgcattg

SEQ ID NO: 4576720 - DNA, 25 bp, Homo sapien
gacatatactcgtgattaaaacagg

SEQ ID NO: 4576721 - DNA, 25 bp, Homo sapien
tgtgtactgggacatatactcgtga

SEQ ID NO: 4576722 - DNA, 25 bp, Homo sapien
tactgggacatatactcgtgattaa

SEQ ID NO: 4576723 - DNA, 25 bp, Homo sapien
gtgctcaattgagggcaaaccacat

SEQ ID NO: 4576724 - DNA, 25 bp, Homo sapien
gaatggcacgcagggtttgctgggc

SEQ ID NO: 4576725 - DNA, 25 bp, Homo sapien
cacgcagggtttgctgggcaagcct

SEQ ID NO: 4576726 - DNA, 25 bp, Homo sapien
tgcctggtagaagaatggcacgcag

SEQ ID NO: 4576727 - DNA, 25 bp, Homo sapien
ctgcctggtagaagaatggcacgca

SEQ ID NO: 4576728 - DNA, 25 bp, Homo sapien
tcctgcatgacaggagacagctgca

SEQ ID NO: 4576729 - DNA, 25 bp, Homo sapien
ctaggtgtcctgcatgacaggagac

SEQ ID NO: 4576730 - DNA, 25 bp, Homo sapien
gacagctgcacgatctgctgtacag

SEQ ID NO: 4576731 - DNA, 25 bp, Homo sapien
tgcaggctccacgttgttgtccagg

SEQ ID NO: 4576732 - DNA, 25 bp, Homo sapien
atgcccctcatggttgcccacaagg

SEQ ID NO: 4576733 - DNA, 25 bp, Homo sapien
ggcaacaccaactcttgcagctcca

SEQ ID NO: 4576734 - DNA, 25 bp, Homo sapien
gggttctgggcagcgatgaggaatt

SEQ ID NO: 4576735 - DNA, 25 bp, Homo sapien
ggcagcgatgaggaatttgccatgc

SEQ ID NO: 4576736 - DNA, 25 bp, Homo sapien
ctttcatatacggtgaaggactctc

SEQ ID NO: 4576737 - DNA, 25 bp, Homo sapien
ggctttcatatacggtgaaggactc

SEQ ID NO: 4576738 - DNA, 25 bp, Homo sapien
ctggctttcatatacggtgaaggac

SEQ ID NO: 4576739 - DNA, 25 bp, Homo sapien
ccctggctttcatatacggtgaagg

SEQ ID NO: 4576740 - DNA, 25 bp, Homo sapien
ggacgaatccaagctctcgtctctc

SEQ ID NO: 4576741 - DNA, 25 bp, Homo sapien
aaggctggacgaatccaagctctcg

SEQ ID NO: 4576742 - DNA, 25 bp, Homo sapien
gctggacgaatccaagctctcgtct

SEQ ID NO: 4576743 - DNA, 25 bp, Homo sapien
tccagaaggctggacgaatccaagc

SEQ ID NO: 4576744 - DNA, 25 bp, Homo sapien
tccctttcagcttcaccatggcctc

SEQ ID NO: 4576745 - DNA, 25 bp, Homo sapien
catggcctccttcagggcccggtag

SEQ ID NO: 4576746 - DNA, 25 bp, Homo sapien
tggcctccttcagggcccggtagct

SEQ ID NO: 4576747 - DNA, 25 bp, Homo sapien
acacacaaactcacccccactccct

SEQ ID NO: 4576748 - DNA, 25 bp, Homo sapien
gagcaatcagaaggtgggaaaacca

SEQ ID NO: 4576749 - DNA, 25 bp, Homo sapien
gccagagcaatcagaaggtgggaaa

SEQ ID NO: 4576750 - DNA, 25 bp, Homo sapien
cacaggtgacaaagtgtctgaccac

SEQ ID NO: 4576751 - DNA, 25 bp, Homo sapien
gttggtcacaggtgacaaagtgtct

SEQ ID NO: 4576752 - DNA, 25 bp, Homo sapien
ggtcctctgggatgtttggcgtggg

SEQ ID NO: 4576753 - DNA, 25 bp, Homo sapien
tcctctgggatgtttggcgtgggcc

SEQ ID NO: 4576754 - DNA, 25 bp, Homo sapien
ccaggtcctctgggatgtttggcgt

SEQ ID NO: 4576755 - DNA, 25 bp, Homo sapien
ctctgggatgtttggcgtgggccga

SEQ ID NO: 4576756 - DNA, 25 bp, Homo sapien
ccctttctgatctggtccagttcat

SEQ ID NO: 4576757 - DNA, 25 bp, Homo sapien
tgatctggtccagttcattcatcct

SEQ ID NO: 4576758 - DNA, 25 bp, Homo sapien
ttctgatctggtccagttcattcat

SEQ ID NO: 4576759 - DNA, 25 bp, Homo sapien
gtgcggacacccggttggcataacg

SEQ ID NO: 4576760 - DNA, 25 bp, Homo sapien
cacgaggcttagctgggtctctagc

SEQ ID NO: 4576761 - DNA, 25 bp, Homo sapien
ccacgaggcttagctgggtctctag

SEQ ID NO: 4576762 - DNA, 25 bp, Homo sapien
tggtccacgaactgggtctgcagca

SEQ ID NO: 4576763 - DNA, 25 bp, Homo sapien
tgcagctggtccacgaactgggtct

SEQ ID NO: 4576764 - DNA, 25 bp, Homo sapien
tgcagcagtaactgcctgtgcagcg

SEQ ID NO: 4576765 - DNA, 25 bp, Homo sapien
agcagtaactgcctgtgcagcgcct

SEQ ID NO: 4576766 - DNA, 25 bp, Homo sapien
tgctgctgcagactctgagactctt

SEQ ID NO: 4576767 - DNA, 25 bp, Homo sapien
tcgctgctgctgcagactctgagac

SEQ ID NO: 4576768 - DNA, 25 bp, Homo sapien
ctgctgcagactctgagactcttgg

SEQ ID NO: 4576769 - DNA, 25 bp, Homo sapien
gctgctgctgcagactctgagactc

SEQ ID NO: 4576770 - DNA, 25 bp, Homo sapien
aactgcagtgcgctctttttctcgt

SEQ ID NO: 4576771 - DNA, 25 bp, Homo sapien
gcagtgcgctctttttctcgttgtt

SEQ ID NO: 4576772 - DNA, 25 bp, Homo sapien
caactgcagtgcgctctttttctcg

SEQ ID NO: 4576773 - DNA, 25 bp, Homo sapien
ctgcagtgcgctctttttctcgttg

SEQ ID NO: 4576774 - DNA, 25 bp, Homo sapien
gccagctgcttgtcgagcttgtggt

SEQ ID NO: 4576775 - DNA, 25 bp, Homo sapien
ggccagctgcttgtcgagcttgtgg

SEQ ID NO: 4576776 - DNA, 25 bp, Homo sapien
tcccgaagcctctcgttttgttcac

SEQ ID NO: 4576777 - DNA, 25 bp, Homo sapien
ctcccgaagcctctcgttttgttca

SEQ ID NO: 4576778 - DNA, 25 bp, Homo sapien
ctgggggcgccagggatgggggctc

SEQ ID NO: 4576779 - DNA, 25 bp, Homo sapien
gggggcgccagggatgggggctcag

SEQ ID NO: 4576780 - DNA, 25 bp, Homo sapien
tgggggcgccagggatgggggctca

SEQ ID NO: 4576781 - DNA, 25 bp, Homo sapien
tatccgatgtatgtcacgcttcttc

SEQ ID NO: 4576782 - DNA, 25 bp, Homo sapien
cgatgtatgtcacgcttcttctctt

SEQ ID NO: 4576783 - DNA, 25 bp, Homo sapien
cagctcctgtatccgatgtatgtca

SEQ ID NO: 4576784 - DNA, 25 bp, Homo sapien
cctgtatccgatgtatgtcacgctt

SEQ ID NO: 4576785 - DNA, 25 bp, Homo sapien
tagctggacttgttttagtgactct

SEQ ID NO: 4576786 - DNA, 25 bp, Homo sapien
tttagcatattcgtctcgctctagc

SEQ ID NO: 4576787 - DNA, 25 bp, Homo sapien
tgtgtttagcatattcgtctcgctc

SEQ ID NO: 4576788 - DNA, 25 bp, Homo sapien
tagcatattcgtctcgctctagctg

SEQ ID NO: 4576789 - DNA, 25 bp, Homo sapien
tgtcacgtgtgcgttcagcagcgcc

SEQ ID NO: 4576790 - DNA, 25 bp, Homo sapien
gcagcgcccgctcctttatggtctg

SEQ ID NO: 4576791 - DNA, 25 bp, Homo sapien
tcctttatggtctgctgtaaccacc

SEQ ID NO: 4576792 - DNA, 25 bp, Homo sapien
tgtaaccaccgctggaggaccgctt

SEQ ID NO: 4576793 - DNA, 25 bp, Homo sapien
gaagttttgatctggggagctcagg

SEQ ID NO: 4576794 - DNA, 25 bp, Homo sapien
agtgagaagttttgatctggggagc

SEQ ID NO: 4576795 - DNA, 25 bp, Homo sapien
gagaagttttgatctggggagctca

SEQ ID NO: 4576796 - DNA, 25 bp, Homo sapien
ttttgatctggggagctcaggcagt

SEQ ID NO: 4576797 - DNA, 25 bp, Homo sapien
gaatacgctgtaaggagtattgcag

SEQ ID NO: 4576798 - DNA, 25 bp, Homo sapien
gagagcccgctccaattcttgaata

SEQ ID NO: 4576799 - DNA, 25 bp, Homo sapien
ccaattcttgaatacgctgtaagga

SEQ ID NO: 4576800 - DNA, 25 bp, Homo sapien
ctgtaaggagtattgcaggcggcca

SEQ ID NO: 4576801 - DNA, 25 bp, Homo sapien
tgtcgggcagcacgtttagtatggt

SEQ ID NO: 4576802 - DNA, 25 bp, Homo sapien
cttcgaagtgtcgggcagcacgttt

SEQ ID NO: 4576803 - DNA, 25 bp, Homo sapien
cagcacgtttagtatggtaaagggt

SEQ ID NO: 4576804 - DNA, 25 bp, Homo sapien
tagtatggtaaagggtggtcttcaa

SEQ ID NO: 4576805 - DNA, 25 bp, Homo sapien
aaccgctccatttgtgctttgtgta

SEQ ID NO: 4576806 - DNA, 25 bp, Homo sapien
gctttgtgtatttcattgtttgttt

SEQ ID NO: 4576807 - DNA, 25 bp, Homo sapien
ctctaaccgctccatttgtgctttg

SEQ ID NO: 4576808 - DNA, 25 bp, Homo sapien
ctaaccgctccatttgtgctttgtg

SEQ ID NO: 4576809 - DNA, 25 bp, Homo sapien
tgttccacttgtttcttctgctgtt

SEQ ID NO: 4576810 - DNA, 25 bp, Homo sapien
gttccacttgtttcttctgctgttt

SEQ ID NO: 4576811 - DNA, 25 bp, Homo sapien
ttcttccagctgatgttccacttgt

SEQ ID NO: 4576812 - DNA, 25 bp, Homo sapien
ttccagctgatgttccacttgtttc

SEQ ID NO: 4576813 - DNA, 25 bp, Homo sapien
agagtcaaattcaggtgactgagag

SEQ ID NO: 4576814 - DNA, 25 bp, Homo sapien
aattcaggtgactgagagtggcccc

SEQ ID NO: 4576815 - DNA, 25 bp, Homo sapien
agtcaaattcaggtgactgagagtg

SEQ ID NO: 4576816 - DNA, 25 bp, Homo sapien
tcaaattcaggtgactgagagtggc

SEQ ID NO: 4576817 - DNA, 25 bp, Homo sapien
ttgtcactgagcttgactccagggc

SEQ ID NO: 4576818 - DNA, 25 bp, Homo sapien
gactgattgtcactgagcttgactc

SEQ ID NO: 4576819 - DNA, 25 bp, Homo sapien
ttcattgagttgactgattgtcact

SEQ ID NO: 4576820 - DNA, 25 bp, Homo sapien
cattgagttgactgattgtcactga

SEQ ID NO: 4576821 - DNA, 25 bp, Homo sapien
agttggaagaggattgtggggagag

SEQ ID NO: 4576822 - DNA, 25 bp, Homo sapien
aggagttggaagaggattgtgggga

SEQ ID NO: 4576823 - DNA, 25 bp, Homo sapien
ggaagaggattgtggggagaggtag

SEQ ID NO: 4576824 - DNA, 25 bp, Homo sapien
tggaagaggattgtggggagaggta

SEQ ID NO: 4576825 - DNA, 25 bp, Homo sapien
tgtgtgtgggctgtctcagctggca

SEQ ID NO: 4576826 - DNA, 25 bp, Homo sapien
ctggcagagggtcacccagccccca

SEQ ID NO: 4576827 - DNA, 25 bp, Homo sapien
ggtgtgtgtgggctgtctcagctgg

SEQ ID NO: 4576828 - DNA, 25 bp, Homo sapien
tcagctggcagagggtcacccagcc

SEQ ID NO: 4576829 - DNA, 25 bp, Homo sapien
cacttgtccaatgggggagcactac

SEQ ID NO: 4576830 - DNA, 25 bp, Homo sapien
cttccacttgtccaatgggggagca

SEQ ID NO: 4576831 - DNA, 25 bp, Homo sapien
ttccacttgtccaatgggggagcac

SEQ ID NO: 4576832 - DNA, 25 bp, Homo sapien
ccacttgtccaatgggggagcacta

SEQ ID NO: 4576833 - DNA, 25 bp, Homo sapien
gagtggttaaggttggacacccgca

SEQ ID NO: 4576834 - DNA, 25 bp, Homo sapien
ccattggagtggttaaggttggaca

SEQ ID NO: 4576835 - DNA, 25 bp, Homo sapien
cattggagtggttaaggttggacac

SEQ ID NO: 4576836 - DNA, 25 bp, Homo sapien
ggaataccagggctcttcctttgct

SEQ ID NO: 4576837 - DNA, 25 bp, Homo sapien
gttgtctcagggctactgtcagttt

SEQ ID NO: 4576838 - DNA, 25 bp, Homo sapien
gtctttgctcctgctggaataccag

SEQ ID NO: 4576839 - DNA, 25 bp, Homo sapien
gtggttgtctcagggctactgtcag

SEQ ID NO: 4576840 - DNA, 25 bp, Homo sapien
gctgccaatttattctgtcgagatt

SEQ ID NO: 4576841 - DNA, 25 bp, Homo sapien
tattctgtcgagattcttctaacat

SEQ ID NO: 4576842 - DNA, 25 bp, Homo sapien
ctgctgccaatttattctgtcgaga

SEQ ID NO: 4576843 - DNA, 25 bp, Homo sapien
ccaatttattctgtcgagattcttc

SEQ ID NO: 4576844 - DNA, 25 bp, Homo sapien
agtcacctacaaggctgctgtgtga

SEQ ID NO: 4576845 - DNA, 25 bp, Homo sapien
acctccagtcacctacaaggctgct

SEQ ID NO: 4576846 - DNA, 25 bp, Homo sapien
agcgaacacctccagtcacctacaa

SEQ ID NO: 4576847 - DNA, 25 bp, Homo sapien
tccagtcacctacaaggctgctgtg

SEQ ID NO: 4576848 - DNA, 25 bp, Homo sapien
ataccatttacaccctcttccctct

SEQ ID NO: 4576849 - DNA, 25 bp, Homo sapien
caataccatttacaccctcttccct

SEQ ID NO: 4576850 - DNA, 25 bp, Homo sapien
gaaaagtggaatcactggctgtatt

SEQ ID NO: 4576851 - DNA, 25 bp, Homo sapien
aaaagtggaatcactggctgtattt

SEQ ID NO: 4576852 - DNA, 25 bp, Homo sapien
agaaaagtggaatcactggctgtat

SEQ ID NO: 4576853 - DNA, 25 bp, Homo sapien
aaagtggaatcactggctgtatttt

SEQ ID NO: 4576854 - DNA, 25 bp, Homo sapien
tccaaagcctctagccaggcaaagt

SEQ ID NO: 4576855 - DNA, 25 bp, Homo sapien
taaagcagagtcctggtaggcacat

SEQ ID NO: 4576856 - DNA, 25 bp, Homo sapien
tctagccaggcaaagttttactgta

SEQ ID NO: 4576857 - DNA, 25 bp, Homo sapien
tacttcttgctttcaatagatataa

SEQ ID NO: 4576858 - DNA, 25 bp, Homo sapien
ggctgcagtggagtggtggatctca

SEQ ID NO: 4576859 - DNA, 25 bp, Homo sapien
ccaggctgcagtggagtggtggatc

SEQ ID NO: 4576860 - DNA, 25 bp, Homo sapien
cacccagaaaactccaaaacagtga

SEQ ID NO: 4576861 - DNA, 25 bp, Homo sapien
tcacccagaaaactccaaaacagtg

SEQ ID NO: 4576862 - DNA, 25 bp, Homo sapien
ggtggaacccaggaatggtctttga

SEQ ID NO: 4576863 - DNA, 25 bp, Homo sapien
gaaggggagccaaggatagtcctgg

SEQ ID NO: 4576864 - DNA, 25 bp, Homo sapien
ggtagaaagatcatcacataggggt

SEQ ID NO: 4576865 - DNA, 25 bp, Homo sapien
gtagaaagatcatcacataggggtt

SEQ ID NO: 4576866 - DNA, 25 bp, Homo sapien
gggtagaaagatcatcacatagggg

SEQ ID NO: 4576867 - DNA, 25 bp, Homo sapien
tatccctgaagtgcccctgccccta

SEQ ID NO: 4576868 - DNA, 25 bp, Homo sapien
tccttcctatccctgaagtgcccct

SEQ ID NO: 4576869 - DNA, 25 bp, Homo sapien
ttcctatccctgaagtgcccctgcc

SEQ ID NO: 4576870 - DNA, 25 bp, Homo sapien
ctggaacacacaggcccctccttcc

SEQ ID NO: 4576871 - DNA, 25 bp, Homo sapien
gctggatggccaccgccagagcctg

SEQ ID NO: 4576872 - DNA, 25 bp, Homo sapien
cacatgaggacagagggtccacctg

SEQ ID NO: 4576873 - DNA, 25 bp, Homo sapien
aggagtggatcagccagatggccac

SEQ ID NO: 4576874 - DNA, 25 bp, Homo sapien
gtccacctggaggagtggatcagcc

SEQ ID NO: 4576875 - DNA, 25 bp, Homo sapien
cccattggaaacctggaatccacac

SEQ ID NO: 4576876 - DNA, 25 bp, Homo sapien
acccattggaaacctggaatccaca

SEQ ID NO: 4576877 - DNA, 25 bp, Homo sapien
atgggcaagaacatcatgctcagcc

SEQ ID NO: 4576878 - DNA, 25 bp, Homo sapien
cagatgtgatgtccccaagtggttc

SEQ ID NO: 4576879 - DNA, 25 bp, Homo sapien
gaaatgggcaagaacatcatgctca

SEQ ID NO: 4576880 - DNA, 25 bp, Homo sapien
caagtggttctataaaccttttgag

SEQ ID NO: 4576881 - DNA, 25 bp, Homo sapien
tccggcaagctgctttctttgcctg

SEQ ID NO: 4576882 - DNA, 25 bp, Homo sapien
cggcaagctgctttctttgcctggg

SEQ ID NO: 4576883 - DNA, 25 bp, Homo sapien
ggcaagctgctttctttgcctgggg

SEQ ID NO: 4576884 - DNA, 25 bp, Homo sapien
ctccggcaagctgctttctttgcct

SEQ ID NO: 4576885 - DNA, 25 bp, Homo sapien
gagtccctgggattgcaaaggtgag

SEQ ID NO: 4576886 - DNA, 25 bp, Homo sapien
agtccctgggattgcaaaggtgagg

SEQ ID NO: 4576887 - DNA, 25 bp, Homo sapien
ctgggattgcaaaggtgagggacag

SEQ ID NO: 4576888 - DNA, 25 bp, Homo sapien
ggattgcaaaggtgagggacagctt

SEQ ID NO: 4576889 - DNA, 25 bp, Homo sapien
tctaattctaaggtctctgagttcc

SEQ ID NO: 4576890 - DNA, 25 bp, Homo sapien
gccagatgtggcctctaattctaag

SEQ ID NO: 4576891 - DNA, 25 bp, Homo sapien
tctaaggtctctgagttccaggcca

SEQ ID NO: 4576892 - DNA, 25 bp, Homo sapien
tgggcagaccatgctggtccaccct

SEQ ID NO: 4576893 - DNA, 25 bp, Homo sapien
gaagtctgtgataatcctctcagca

SEQ ID NO: 4576894 - DNA, 25 bp, Homo sapien
cctgaagtctgtgataatcctctca

SEQ ID NO: 4576895 - DNA, 25 bp, Homo sapien
tctgtgataatcctctcagcaggct

SEQ ID NO: 4576896 - DNA, 25 bp, Homo sapien
tgataatcctctcagcaggctggac

SEQ ID NO: 4576897 - DNA, 25 bp, Homo sapien
tggcgccagcccaggccgtcatgtg

SEQ ID NO: 4576898 - DNA, 25 bp, Homo sapien
caggccgtcatgtggcactgtgcac

SEQ ID NO: 4576899 - DNA, 25 bp, Homo sapien
cttcttcagggtggcgccagcccag

SEQ ID NO: 4576900 - DNA, 25 bp, Homo sapien
tgtggcactgtgcacgccagggcct

SEQ ID NO: 4576901 - DNA, 25 bp, Homo sapien
cacacacggctagaccacacagagg

SEQ ID NO: 4576902 - DNA, 25 bp, Homo sapien
tgtcccttctgccactcgtgctgcc

SEQ ID NO: 4576903 - DNA, 25 bp, Homo sapien
gccactcgtgctgccagggaccacg

SEQ ID NO: 4576904 - DNA, 25 bp, Homo sapien
acggctagaccacacagaggtctta

SEQ ID NO: 4576905 - DNA, 25 bp, Homo sapien
agacccgcaagtgcttctgcaaggg

SEQ ID NO: 4576906 - DNA, 25 bp, Homo sapien
tgcgtaggctgcagacccgcaagtg

SEQ ID NO: 4576907 - DNA, 25 bp, Homo sapien
gtaggctgcagacccgcaagtgctt

SEQ ID NO: 4576908 - DNA, 25 bp, Homo sapien
gctgcagacccgcaagtgcttctgc

SEQ ID NO: 4576909 - DNA, 25 bp, Homo sapien
actgtggccttcacatcgcctgact

SEQ ID NO: 4576910 - DNA, 25 bp, Homo sapien
tccctgttgccctattaacttcagc

SEQ ID NO: 4576911 - DNA, 25 bp, Homo sapien
tggagccataggcactgctactgct

SEQ ID NO: 4576912 - DNA, 25 bp, Homo sapien
gccctattaacttcagctcaaagcc

SEQ ID NO: 4576913 - DNA, 25 bp, Homo sapien
gaaggtgggactgtcaatgtctttc

SEQ ID NO: 4576914 - DNA, 25 bp, Homo sapien
aggcaccaggccgaggtcccagggt

SEQ ID NO: 4576915 - DNA, 25 bp, Homo sapien
cctgtgaactcagcggggtgctcac

SEQ ID NO: 4576916 - DNA, 25 bp, Homo sapien
caccaggccgaggtcccagggttgc

SEQ ID NO: 4576917 - DNA, 25 bp, Homo sapien
gttgcctggggcctgtgaactcagc

SEQ ID NO: 4576918 - DNA, 25 bp, Homo sapien
caaacttggcatcagctgtgagttt

SEQ ID NO: 4576919 - DNA, 25 bp, Homo sapien
ctgtgagtttcaggatcttcttata

SEQ ID NO: 4576920 - DNA, 25 bp, Homo sapien
aaacttggcatcagctgtgagtttc

SEQ ID NO: 4576921 - DNA, 25 bp, Homo sapien
cagctgtgagtttcaggatcttctt

SEQ ID NO: 4576922 - DNA, 25 bp, Homo sapien
agcctggatcctgcaataaggaaca

SEQ ID NO: 4576923 - DNA, 25 bp, Homo sapien
gatcctgcaataaggaacagacagg

SEQ ID NO: 4576924 - DNA, 25 bp, Homo sapien
tggatcctgcaataaggaacagaca

SEQ ID NO: 4576925 - DNA, 25 bp, Homo sapien
cctggatcctgcaataaggaacaga

SEQ ID NO: 4576926 - DNA, 25 bp, Homo sapien
gggcctagtgcagagtttcagggca

SEQ ID NO: 4576927 - DNA, 25 bp, Homo sapien
aatggggtgctggatcttgtactca

SEQ ID NO: 4576928 - DNA, 25 bp, Homo sapien
gacaatggggtgctggatcttgtac

SEQ ID NO: 4576929 - DNA, 25 bp, Homo sapien
cctagtgcagagtttcagggcagtg

SEQ ID NO: 4576930 - DNA, 25 bp, Homo sapien
ttccctgtcccagcagctcctttag

SEQ ID NO: 4576931 - DNA, 25 bp, Homo sapien
tccctgtcccagcagctcctttagt

SEQ ID NO: 4576932 - DNA, 25 bp, Homo sapien
aattccctgtcccagcagctccttt

SEQ ID NO: 4576933 - DNA, 25 bp, Homo sapien
atcaattccctgtcccagcagctcc

SEQ ID NO: 4576934 - DNA, 25 bp, Homo sapien
gctgcagagcagctgcaacttcaca

SEQ ID NO: 4576935 - DNA, 25 bp, Homo sapien
tgcagagcagctgcaacttcacaga

SEQ ID NO: 4576936 - DNA, 25 bp, Homo sapien
agagcagctgcaacttcacagagga

SEQ ID NO: 4576937 - DNA, 25 bp, Homo sapien
cagagcagctgcaacttcacagagg

SEQ ID NO: 4576938 - DNA, 25 bp, Homo sapien
acccagtgtagaccctgtgcactca

SEQ ID NO: 4576939 - DNA, 25 bp, Homo sapien
tccacccagtgtagaccctgtgcac

SEQ ID NO: 4576940 - DNA, 25 bp, Homo sapien
tcctccacccagtgtagaccctgtg

SEQ ID NO: 4576941 - DNA, 25 bp, Homo sapien
cacccagtgtagaccctgtgcactc

SEQ ID NO: 4576942 - DNA, 25 bp, Homo sapien
ctgatctctgccaggacccggtcag

SEQ ID NO: 4576943 - DNA, 25 bp, Homo sapien
gctgatctctgccaggacccggtca

SEQ ID NO: 4576944 - DNA, 25 bp, Homo sapien
tggcctttacttgtccagactcatc

SEQ ID NO: 4576945 - DNA, 25 bp, Homo sapien
ggtcatctgcacactttggcctctc

SEQ ID NO: 4576946 - DNA, 25 bp, Homo sapien
ggccggtggatatattcgttatctt

SEQ ID NO: 4576947 - DNA, 25 bp, Homo sapien
ggggccggtggatatattcgttatc

SEQ ID NO: 4576948 - DNA, 25 bp, Homo sapien
atacatcgcgcgaggaagccagggc

SEQ ID NO: 4576949 - DNA, 25 bp, Homo sapien
catacatcgcgcgaggaagccaggg

SEQ ID NO: 4576950 - DNA, 25 bp, Homo sapien
tgcctcatacatcgcgcgaggaagc

SEQ ID NO: 4576951 - DNA, 25 bp, Homo sapien
cctggtgcctcatacatcgcgcgag

SEQ ID NO: 4576952 - DNA, 25 bp, Homo sapien
ctagctcagcttctaccacctgagt

SEQ ID NO: 4576953 - DNA, 25 bp, Homo sapien
cttgggtacagcttccaagactggt

SEQ ID NO: 4576954 - DNA, 25 bp, Homo sapien
ttccaagactggtgaggccttactc

SEQ ID NO: 4576955 - DNA, 25 bp, Homo sapien
actggtgaggccttactcaggacca

SEQ ID NO: 4576956 - DNA, 25 bp, Homo sapien
aggggcttgtggcagatgatgtgtg

SEQ ID NO: 4576957 - DNA, 25 bp, Homo sapien
tgtggcagatgatgtgtgtctgggc

SEQ ID NO: 4576958 - DNA, 25 bp, Homo sapien
tgtgggtatggctgtccattggtcc

SEQ ID NO: 4576959 - DNA, 25 bp, Homo sapien
tgatgtgtgtctgggcttggaaata

SEQ ID NO: 4576960 - DNA, 25 bp, Homo sapien
cctgatgtttgcccgcaccagtcaa

SEQ ID NO: 4576961 - DNA, 25 bp, Homo sapien
ctcctgatgtttgcccgcaccagtc

SEQ ID NO: 4576962 - DNA, 25 bp, Homo sapien
gatgtttgcccgcaccagtcaagtt

SEQ ID NO: 4576963 - DNA, 25 bp, Homo sapien
tttgcccgcaccagtcaagttccat

SEQ ID NO: 4576964 - DNA, 25 bp, Homo sapien
gaggagctggctgcctcagaaaatc

SEQ ID NO: 4576965 - DNA, 25 bp, Homo sapien
gcttcctgctttgtgagacgataca

SEQ ID NO: 4576966 - DNA, 25 bp, Homo sapien
ggaatcttgttatttgccgatggaa

SEQ ID NO: 4576967 - DNA, 25 bp, Homo sapien
catggcaagtcctgccacggaggag

SEQ ID NO: 4576968 - DNA, 25 bp, Homo sapien
tcctcaaggtgaccgaaaagcatag

SEQ ID NO: 4576969 - DNA, 25 bp, Homo sapien
catagaacctgtacaaggaaaggcc

SEQ ID NO: 4576970 - DNA, 25 bp, Homo sapien
aacttgtgtcccactctgcaaggca

SEQ ID NO: 4576971 - DNA, 25 bp, Homo sapien
taatggagtctgacgctaggacctg

SEQ ID NO: 4576972 - DNA, 25 bp, Homo sapien
gctgatacctgggacatagactggg

SEQ ID NO: 4576973 - DNA, 25 bp, Homo sapien
ttgaagttaagggtcgatccgcaga

SEQ ID NO: 4576974 - DNA, 25 bp, Homo sapien
tcaagaattaggagacgccctgggc

SEQ ID NO: 4576975 - DNA, 25 bp, Homo sapien
gattctgaatctgggaccctctgcg

SEQ ID NO: 4576976 - DNA, 25 bp, Homo sapien
ttaatgatcaaagacgtgggcggcg

SEQ ID NO: 4576977 - DNA, 25 bp, Homo sapien
tgctgtagagtgagctagagcctcc

SEQ ID NO: 4576978 - DNA, 25 bp, Homo sapien
tataaacattagacccgcttctgcg

SEQ ID NO: 4576979 - DNA, 25 bp, Homo sapien
tctagctgagctcggaggcagatcc

SEQ ID NO: 4576980 - DNA, 25 bp, Homo sapien
gcccctcactcagtcccgaaaagtc

SEQ ID NO: 4576981 - DNA, 25 bp, Homo sapien
catgccggaccggactcagctcccg

SEQ ID NO: 4576982 - DNA, 25 bp, Homo sapien
cgaaaagtcccctggacacgccatg

SEQ ID NO: 4576983 - DNA, 25 bp, Homo sapien
cggaccggactcagctcccgctgct

SEQ ID NO: 4576984 - DNA, 25 bp, Homo sapien
ggctgagcaagatgcgatggtctca

SEQ ID NO: 4576985 - DNA, 25 bp, Homo sapien
agggacgggtcacagtgctctcacc

SEQ ID NO: 4576986 - DNA, 25 bp, Homo sapien
gggctagggacccaatcctggctgt

SEQ ID NO: 4576987 - DNA, 25 bp, Homo sapien
caggcggtgtgaagttctgtgttct

SEQ ID NO: 4576988 - DNA, 25 bp, Homo sapien
gggcttggtgctcccagagagctca

SEQ ID NO: 4576989 - DNA, 25 bp, Homo sapien
caaaccctcgccatcgagagacccc

SEQ ID NO: 4576990 - DNA, 25 bp, Homo sapien
aagccccaaaccctcgccatcgaga

SEQ ID NO: 4576991 - DNA, 25 bp, Homo sapien
tattgatctccacggaagccccaaa

SEQ ID NO: 4576992 - DNA, 25 bp, Homo sapien
cagggctaacgtgggcagcgcaggg

SEQ ID NO: 4576993 - DNA, 25 bp, Homo sapien
tctccagggctaacgtgggcagcgc

SEQ ID NO: 4576994 - DNA, 25 bp, Homo sapien
tgtctccagggctaacgtgggcagc

SEQ ID NO: 4576995 - DNA, 25 bp, Homo sapien
tccagggctaacgtgggcagcgcag

SEQ ID NO: 4576996 - DNA, 25 bp, Homo sapien
gccatagaggaggttaccggagccc

SEQ ID NO: 4576997 - DNA, 25 bp, Homo sapien
cctgtggttggtctgggcgcttcta

SEQ ID NO: 4576998 - DNA, 25 bp, Homo sapien
aactagtgctaaacgggcttgcgga

SEQ ID NO: 4576999 - DNA, 25 bp, Homo sapien
cgtgcgcctgcgtggacaagtacgc

SEQ ID NO: 4577000 - DNA, 25 bp, Homo sapien
gcctcctgccggcagggaaccaaat

SEQ ID NO: 4577001 - DNA, 25 bp, Homo sapien
cacttctggccagttggagtccagc

SEQ ID NO: 4577002 - DNA, 25 bp, Homo sapien
agccgggattcgtggcaacccctag

SEQ ID NO: 4577003 - DNA, 25 bp, Homo sapien
tttcaatccctactcccagaagccg

SEQ ID NO: 4577004 - DNA, 25 bp, Homo sapien
tcctgaagcctctacaaaccagtga

SEQ ID NO: 4577005 - DNA, 25 bp, Homo sapien
ttctatatggttaaatttgcggcta

SEQ ID NO: 4577006 - DNA, 25 bp, Homo sapien
tttgcggctaattacagagtttgtc

SEQ ID NO: 4577007 - DNA, 25 bp, Homo sapien
gattataaaagtagtgcaggccagg

SEQ ID NO: 4577008 - DNA, 25 bp, Homo sapien
tcttctcccgcggttgataattacc

SEQ ID NO: 4577009 - DNA, 25 bp, Homo sapien
tttgatggagcacattctctagaga

SEQ ID NO: 4577010 - DNA, 25 bp, Homo sapien
tgcagaagtataaatttcccctcaa

SEQ ID NO: 4577011 - DNA, 25 bp, Homo sapien
tctttcttggagacactcccagagc

SEQ ID NO: 4577012 - DNA, 25 bp, Homo sapien
ctgctttggcttggccaaggtttag

SEQ ID NO: 4577013 - DNA, 25 bp, Homo sapien
caaggtttaggcagcttctctcttt

SEQ ID NO: 4577014 - DNA, 25 bp, Homo sapien
ttggcttggccaaggtttaggcagc

SEQ ID NO: 4577015 - DNA, 25 bp, Homo sapien
cttggccaaggtttaggcagcttct

SEQ ID NO: 4577016 - DNA, 25 bp, Homo sapien
tttggaaaaggggtcacatatcctc

SEQ ID NO: 4577017 - DNA, 25 bp, Homo sapien
tggaaaaggggtcacatatcctcac

SEQ ID NO: 4577018 - DNA, 25 bp, Homo sapien
ttggaaaaggggtcacatatcctca

SEQ ID NO: 4577019 - DNA, 25 bp, Homo sapien
agctcagagaggccgatgctgaccg

SEQ ID NO: 4577020 - DNA, 25 bp, Homo sapien
aggccgatgctgaccgcgtagatgt

SEQ ID NO: 4577021 - DNA, 25 bp, Homo sapien
tccagcaccaacagtgggattttgg

SEQ ID NO: 4577022 - DNA, 25 bp, Homo sapien
tcagagaggccgatgctgaccgcgt

SEQ ID NO: 4577023 - DNA, 25 bp, Homo sapien
gcttccaggcctttgccaatggcag

SEQ ID NO: 4577024 - DNA, 25 bp, Homo sapien
cccagtggcattgtggagatcacca

SEQ ID NO: 4577025 - DNA, 25 bp, Homo sapien
tggcacatccagatacccagtggca

SEQ ID NO: 4577026 - DNA, 25 bp, Homo sapien
cactgcactgtgatgtggacgggca

SEQ ID NO: 4577027 - DNA, 25 bp, Homo sapien
tcagcctgcaacctctatcctggaa

SEQ ID NO: 4577028 - DNA, 25 bp, Homo sapien
caactatgcatctgttgtctgctcc

SEQ ID NO: 4577029 - DNA, 25 bp, Homo sapien
gggcgacgtcctaatccaactggga

SEQ ID NO: 4577030 - DNA, 25 bp, Homo sapien
gggagtccctttgtcctcatctgag

SEQ ID NO: 4577031 - DNA, 25 bp, Homo sapien
acacctggagtcacactgcttcccc

SEQ ID NO: 4577032 - DNA, 25 bp, Homo sapien
cacacctggagtcacactgcttccc

SEQ ID NO: 4577033 - DNA, 25 bp, Homo sapien
tccacacctggagtcacactgcttc

SEQ ID NO: 4577034 - DNA, 25 bp, Homo sapien
ccacacctggagtcacactgcttcc

SEQ ID NO: 4577035 - DNA, 25 bp, Homo sapien
tgggacctggtctgagtcatgactt

SEQ ID NO: 4577036 - DNA, 25 bp, Homo sapien
aatatctggctctcgagtgtgggca

SEQ ID NO: 4577037 - DNA, 25 bp, Homo sapien
ggaacatgcctcagcacagatgggc

SEQ ID NO: 4577038 - DNA, 25 bp, Homo sapien
tctcccatagccaagtgggtggagc

SEQ ID NO: 4577039 - DNA, 25 bp, Homo sapien
catggagtcctttgtctgtagcagc

SEQ ID NO: 4577040 - DNA, 25 bp, Homo sapien
agggctgggcaccattggcacccaa

SEQ ID NO: 4577041 - DNA, 25 bp, Homo sapien
attggcacccaacagggccgtcttg

SEQ ID NO: 4577042 - DNA, 25 bp, Homo sapien
ttgggttgtgcagcagcgtgtaggc

SEQ ID NO: 4577043 - DNA, 25 bp, Homo sapien
gagacggactttctgtgagtcactc

SEQ ID NO: 4577044 - DNA, 25 bp, Homo sapien
agagagacggactttctgtgagtca

SEQ ID NO: 4577045 - DNA, 25 bp, Homo sapien
ctgagagagacggactttctgtgag

SEQ ID NO: 4577046 - DNA, 25 bp, Homo sapien
gagagacggactttctgtgagtcac

SEQ ID NO: 4577047 - DNA, 25 bp, Homo sapien
ggctctgcgcttgcaggagcaggga

SEQ ID NO: 4577048 - DNA, 25 bp, Homo sapien
ctgtcatggctggatgcgactggct

SEQ ID NO: 4577049 - DNA, 25 bp, Homo sapien
caagaagtttcggtacgtgtagtag

SEQ ID NO: 4577050 - DNA, 25 bp, Homo sapien
gatgcgactggctgacttcaatctt

SEQ ID NO: 4577051 - DNA, 25 bp, Homo sapien
agaagaaaggtggctgcatagagca

SEQ ID NO: 4577052 - DNA, 25 bp, Homo sapien
aaggtggatggcgttgtagagggca

SEQ ID NO: 4577053 - DNA, 25 bp, Homo sapien
ggtcgagagtggcggctctcggtgg

SEQ ID NO: 4577054 - DNA, 25 bp, Homo sapien
atggcgttgtagagggcagagagga

SEQ ID NO: 4577055 - DNA, 25 bp, Homo sapien
ggaagacccaatgggctgccatgtt

SEQ ID NO: 4577056 - DNA, 25 bp, Homo sapien
tgtccatcatgagtctccaggaaga

SEQ ID NO: 4577057 - DNA, 25 bp, Homo sapien
gtccatcatgagtctccaggaagac

SEQ ID NO: 4577058 - DNA, 25 bp, Homo sapien
ggtgtccatcatgagtctccaggaa

SEQ ID NO: 4577059 - DNA, 25 bp, Homo sapien
tccagggaacggaagagcaggaggt

SEQ ID NO: 4577060 - DNA, 25 bp, Homo sapien
atggggactccgatgcaagggactc

SEQ ID NO: 4577061 - DNA, 25 bp, Homo sapien
gtctggtaggcactgaagctcatcc

SEQ ID NO: 4577062 - DNA, 25 bp, Homo sapien
actccgatgcaagggactcaagtcc

SEQ ID NO: 4577063 - DNA, 25 bp, Homo sapien
tcctcggtgcagagctcgaaggttg

SEQ ID NO: 4577064 - DNA, 25 bp, Homo sapien
aaggtgagtaagcaggacaagacca

SEQ ID NO: 4577065 - DNA, 25 bp, Homo sapien
gtgagtaagcaggacaagaccaagg

SEQ ID NO: 4577066 - DNA, 25 bp, Homo sapien
ggtgagtaagcaggacaagaccaag

SEQ ID NO: 4577067 - DNA, 25 bp, Homo sapien
aggtgagtaagcaggacaagaccaa

SEQ ID NO: 4577068 - DNA, 25 bp, Homo sapien
tggatagtgggtaccacgcccacca

SEQ ID NO: 4577069 - DNA, 25 bp, Homo sapien
gccctcaccttctggatagtgggta

SEQ ID NO: 4577070 - DNA, 25 bp, Homo sapien
ggtaggagacatccgtggtgacccc

SEQ ID NO: 4577071 - DNA, 25 bp, Homo sapien
tcggagagcacgattccaaagccgg

SEQ ID NO: 4577072 - DNA, 25 bp, Homo sapien
ccatcccaggaaagggttttctgtg

SEQ ID NO: 4577073 - DNA, 25 bp, Homo sapien
ctggaagagccccacagtgagggcc

SEQ ID NO: 4577074 - DNA, 25 bp, Homo sapien
cagtgagggccccatcccaggaaag

SEQ ID NO: 4577075 - DNA, 25 bp, Homo sapien
gaagagccccacagtgagggcccca

SEQ ID NO: 4577076 - DNA, 25 bp, Homo sapien
taatgctccgagtcacttcatgagt

SEQ ID NO: 4577077 - DNA, 25 bp, Homo sapien
tacagatgagctaacaggttcagag

SEQ ID NO: 4577078 - DNA, 25 bp, Homo sapien
taaattcgtgtttatgtggcctcca

SEQ ID NO: 4577079 - DNA, 25 bp, Homo sapien
tcatgagtccaagagtgaacacccc

SEQ ID NO: 4577080 - DNA, 25 bp, Homo sapien
agctgggttgggccggaactgctcc

SEQ ID NO: 4577081 - DNA, 25 bp, Homo sapien
gctgggttgggccggaactgctcca

SEQ ID NO: 4577082 - DNA, 25 bp, Homo sapien
ctggtaaatggccgtccctgtcagt

SEQ ID NO: 4577083 - DNA, 25 bp, Homo sapien
aatggccgtccctgtcagtgtagct

SEQ ID NO: 4577084 - DNA, 25 bp, Homo sapien
tgtcagtgtagctgaaagcaccagc

SEQ ID NO: 4577085 - DNA, 25 bp, Homo sapien
gcaccagcttcagcgggagatggaa

SEQ ID NO: 4577086 - DNA, 25 bp, Homo sapien
gggtcttcccgctgtcccaagctgg

SEQ ID NO: 4577087 - DNA, 25 bp, Homo sapien
tggtagttgtccctcttgatgacaa

SEQ ID NO: 4577088 - DNA, 25 bp, Homo sapien
caagctggtagttgtccctcttgat

SEQ ID NO: 4577089 - DNA, 25 bp, Homo sapien
gcaggaccctaaatgaccaaggcca

SEQ ID NO: 4577090 - DNA, 25 bp, Homo sapien
tgtctcaagcagacgcgggcccagg

SEQ ID NO: 4577091 - DNA, 25 bp, Homo sapien
gtggagtgtagatgcagtgtctcaa

SEQ ID NO: 4577092 - DNA, 25 bp, Homo sapien
tagatgcagtgtctcaagcagacgc

SEQ ID NO: 4577093 - DNA, 25 bp, Homo sapien
tgcagtgtctcaagcagacgcgggc

SEQ ID NO: 4577094 - DNA, 25 bp, Homo sapien
aggaggttcctcagatattcctcag

SEQ ID NO: 4577095 - DNA, 25 bp, Homo sapien
tcagatattcctcagagtagctgct

SEQ ID NO: 4577096 - DNA, 25 bp, Homo sapien
ttcctcagatattcctcagagtagc

SEQ ID NO: 4577097 - DNA, 25 bp, Homo sapien
gaggttcctcagatattcctcagag

SEQ ID NO: 4577098 - DNA, 25 bp, Homo sapien
gcctgctcctgtcctacggctgaag

SEQ ID NO: 4577099 - DNA, 25 bp, Homo sapien
ctgctcctgtcctacggctgaagct

SEQ ID NO: 4577100 - DNA, 25 bp, Homo sapien
gctcctgtcctacggctgaagcttc

SEQ ID NO: 4577101 - DNA, 25 bp, Homo sapien
cctgtcctacggctgaagcttctca

SEQ ID NO: 4577102 - DNA, 25 bp, Homo sapien
agggcggcccatcatagaatcagag

SEQ ID NO: 4577103 - DNA, 25 bp, Homo sapien
tggtgttatcagctccatggacgga

SEQ ID NO: 4577104 - DNA, 25 bp, Homo sapien
gaaacggtctcagaaaggtggcact

SEQ ID NO: 4577105 - DNA, 25 bp, Homo sapien
cctaggccattgtgatcagcggtta

SEQ ID NO: 4577106 - DNA, 25 bp, Homo sapien
gcccaggacagcgtgctgccgagca

SEQ ID NO: 4577107 - DNA, 25 bp, Homo sapien
tagtagagggcagcataatagaaca

SEQ ID NO: 4577108 - DNA, 25 bp, Homo sapien
atagaacagtcccagtatcttccag

SEQ ID NO: 4577109 - DNA, 25 bp, Homo sapien
gctgtgtggccagccgtggcacagg

SEQ ID NO: 4577110 - DNA, 25 bp, Homo sapien
acgttcagtgggcaagaacactagg

SEQ ID NO: 4577111 - DNA, 25 bp, Homo sapien
gtgaaacaagcagagagacccatgc

SEQ ID NO: 4577112 - DNA, 25 bp, Homo sapien
ggaaggtgaaacaagcagagagacc

SEQ ID NO: 4577113 - DNA, 25 bp, Homo sapien
ttccaagcccttcagcacgttcagt

SEQ ID NO: 4577114 - DNA, 25 bp, Homo sapien
atccaggctctgactagtctcaact

SEQ ID NO: 4577115 - DNA, 25 bp, Homo sapien
ggctctgactagtctcaactctgtg

SEQ ID NO: 4577116 - DNA, 25 bp, Homo sapien
tctgactagtctcaactctgtgatc

SEQ ID NO: 4577117 - DNA, 25 bp, Homo sapien
caggctctgactagtctcaactctg

SEQ ID NO: 4577118 - DNA, 25 bp, Homo sapien
gactggatggtctaaaaaggtcacg

SEQ ID NO: 4577119 - DNA, 25 bp, Homo sapien
gtcacgtctcaggatagcagcccat

SEQ ID NO: 4577120 - DNA, 25 bp, Homo sapien
ttgtagcatcgttgtaaagactgga

SEQ ID NO: 4577121 - DNA, 25 bp, Homo sapien
gggctaatatgcatactttgtagca

SEQ ID NO: 4577122 - DNA, 25 bp, Homo sapien
ggtgctgaggcgagagtcaggaagg

SEQ ID NO: 4577123 - DNA, 25 bp, Homo sapien
tcaggaagggcaatgcgtcctcgtc

SEQ ID NO: 4577124 - DNA, 25 bp, Homo sapien
aatgcgtcctcgtcggggagcagca

SEQ ID NO: 4577125 - DNA, 25 bp, Homo sapien
gtgctgaggcgagagtcaggaaggg

SEQ ID NO: 4577126 - DNA, 25 bp, Homo sapien
tgtccccagccaagaaatccacagg

SEQ ID NO: 4577127 - DNA, 25 bp, Homo sapien
ctgtccccagccaagaaatccacag

SEQ ID NO: 4577128 - DNA, 25 bp, Homo sapien
gtccccagccaagaaatccacaggg

SEQ ID NO: 4577129 - DNA, 25 bp, Homo sapien
tcaaggaggtggagtcagtcccact

SEQ ID NO: 4577130 - DNA, 25 bp, Homo sapien
ttccataaatcaaggaggtggagtc

SEQ ID NO: 4577131 - DNA, 25 bp, Homo sapien
aaatcaaggaggtggagtcagtccc

SEQ ID NO: 4577132 - DNA, 25 bp, Homo sapien
ctgtattccataaatcaaggaggtg

SEQ ID NO: 4577133 - DNA, 25 bp, Homo sapien
ggcaggccgggcctgccacgcacac

SEQ ID NO: 4577134 - DNA, 25 bp, Homo sapien
ggccgggcctgccacgcacacagtc

SEQ ID NO: 4577135 - DNA, 25 bp, Homo sapien
caggccgggcctgccacgcacacag

SEQ ID NO: 4577136 - DNA, 25 bp, Homo sapien
ccgggcctgccacgcacacagtcag

SEQ ID NO: 4577137 - DNA, 25 bp, Homo sapien
cagcatggccaggagcagcagcaca

SEQ ID NO: 4577138 - DNA, 25 bp, Homo sapien
tggccaggagcagcagcacaaggat

SEQ ID NO: 4577139 - DNA, 25 bp, Homo sapien
catggccaggagcagcagcacaagg

SEQ ID NO: 4577140 - DNA, 25 bp, Homo sapien
agcatggccaggagcagcagcacaa

SEQ ID NO: 4577141 - DNA, 25 bp, Homo sapien
gcaggcgtggtacaggccgggtggt

SEQ ID NO: 4577142 - DNA, 25 bp, Homo sapien
caggcgtggtacaggccgggtggta

SEQ ID NO: 4577143 - DNA, 25 bp, Homo sapien
ccaggcaggcgtggtacaggccggg

SEQ ID NO: 4577144 - DNA, 25 bp, Homo sapien
aggcaggcgtggtacaggccgggtg

SEQ ID NO: 4577145 - DNA, 25 bp, Homo sapien
agagcaaatgaaggctggctcaggc

SEQ ID NO: 4577146 - DNA, 25 bp, Homo sapien
tgcagagcaaatgaaggctggctca

SEQ ID NO: 4577147 - DNA, 25 bp, Homo sapien
ctggctcaggcctgcgtcaggcccc

SEQ ID NO: 4577148 - DNA, 25 bp, Homo sapien
ctgcagagcaaatgaaggctggctc

SEQ ID NO: 4577149 - DNA, 25 bp, Homo sapien
cccccctggggctcatcgatgtacc

SEQ ID NO: 4577150 - DNA, 25 bp, Homo sapien
ccccctggggctcatcgatgtacca

SEQ ID NO: 4577151 - DNA, 25 bp, Homo sapien
tgccataggagtagtcctctgtggc

SEQ ID NO: 4577152 - DNA, 25 bp, Homo sapien
agctgccataggagtagtcctctgt

SEQ ID NO: 4577153 - DNA, 25 bp, Homo sapien
aacatttctctttaatcctgaaggt

SEQ ID NO: 4577154 - DNA, 25 bp, Homo sapien
ctacagatgtgaaaagaggcttaaa

SEQ ID NO: 4577155 - DNA, 25 bp, Homo sapien
cagatgtgaaaagaggcttaaaaga

SEQ ID NO: 4577156 - DNA, 25 bp, Homo sapien
aagaaacatttctctttaatcctga

SEQ ID NO: 4577157 - DNA, 25 bp, Homo sapien
gaaaagcccgtctgggactgagggc

SEQ ID NO: 4577158 - DNA, 25 bp, Homo sapien
agcaagctggcacgggaagaggaca

SEQ ID NO: 4577159 - DNA, 25 bp, Homo sapien
cagggcctctcgtgtcccctcctcc

SEQ ID NO: 4577160 - DNA, 25 bp, Homo sapien
gcctgagcaagctggcacgggaaga

SEQ ID NO: 4577161 - DNA, 25 bp, Homo sapien
gaaagggtaggcagcccacggccag

SEQ ID NO: 4577162 - DNA, 25 bp, Homo sapien
agagatgaaagggtaggcagcccac

SEQ ID NO: 4577163 - DNA, 25 bp, Homo sapien
gatgaaagggtaggcagcccacggc

SEQ ID NO: 4577164 - DNA, 25 bp, Homo sapien
cagagatgaaagggtaggcagccca

SEQ ID NO: 4577165 - DNA, 25 bp, Homo sapien
tcttctcctagggtttccatgaagg

SEQ ID NO: 4577166 - DNA, 25 bp, Homo sapien
acaaccgagtgagacggaccgctgg

SEQ ID NO: 4577167 - DNA, 25 bp, Homo sapien
acatctgcagtgccgcacacagaca

SEQ ID NO: 4577168 - DNA, 25 bp, Homo sapien
gaggcaacatgtgtctcattggtaa

SEQ ID NO: 4577169 - DNA, 25 bp, Homo sapien
gcctcccagacttggctccagccta

SEQ ID NO: 4577170 - DNA, 25 bp, Homo sapien
ctggcctcccagacttggctccagc

SEQ ID NO: 4577171 - DNA, 25 bp, Homo sapien
tggcctcccagacttggctccagcc

SEQ ID NO: 4577172 - DNA, 25 bp, Homo sapien
cctcccagacttggctccagcctac

SEQ ID NO: 4577173 - DNA, 25 bp, Homo sapien
cggcagttggccctgagaagtgtcc

SEQ ID NO: 4577174 - DNA, 25 bp, Homo sapien
tgatctctcccggaaacttgtccct

SEQ ID NO: 4577175 - DNA, 25 bp, Homo sapien
cagggtgctcccaacacggggcctt

SEQ ID NO: 4577176 - DNA, 25 bp, Homo sapien
ctgctttaaaaggtgtttgatctgc

SEQ ID NO: 4577177 - DNA, 25 bp, Homo sapien
tcccgcccttgattccgggatcaga

SEQ ID NO: 4577178 - DNA, 25 bp, Homo sapien
ccttgattccgggatcagaggaacc

SEQ ID NO: 4577179 - DNA, 25 bp, Homo sapien
tgattccgggatcagaggaacccac

SEQ ID NO: 4577180 - DNA, 25 bp, Homo sapien
ccgcccttgattccgggatcagagg

SEQ ID NO: 4577181 - DNA, 25 bp, Homo sapien
taggaaaaacaagagggagactaca

SEQ ID NO: 4577182 - DNA, 25 bp, Homo sapien
caagagggagactacagcgccttgg

SEQ ID NO: 4577183 - DNA, 25 bp, Homo sapien
gagacaagagggaacaatgaccata

SEQ ID NO: 4577184 - DNA, 25 bp, Homo sapien
caatgaccataacctggaaaggcac

SEQ ID NO: 4577185 - DNA, 25 bp, Homo sapien
tggagactacttgaggcaccaagag

SEQ ID NO: 4577186 - DNA, 25 bp, Homo sapien
gatcaagctgcaacactcttgagag

SEQ ID NO: 4577187 - DNA, 25 bp, Homo sapien
cacgatggctggtagattcttcaac

SEQ ID NO: 4577188 - DNA, 25 bp, Homo sapien
gaagtagctgttttaccgatcaagc

SEQ ID NO: 4577189 - DNA, 25 bp, Homo sapien
ttcctatggctgagtgatagaaatg

SEQ ID NO: 4577190 - DNA, 25 bp, Homo sapien
gctgagtgatagaaatggccacccc

SEQ ID NO: 4577191 - DNA, 25 bp, Homo sapien
cacatgatctcaacctgcctcctgg

SEQ ID NO: 4577192 - DNA, 25 bp, Homo sapien
tagaaatggccaccccacatgatct

SEQ ID NO: 4577193 - DNA, 25 bp, Homo sapien
ctgggagacagacccggagcttcaa

SEQ ID NO: 4577194 - DNA, 25 bp, Homo sapien
tggccccaccaaggattaacactgg

SEQ ID NO: 4577195 - DNA, 25 bp, Homo sapien
gatgccataaatgaggctcgctgta

SEQ ID NO: 4577196 - DNA, 25 bp, Homo sapien
tgcaagagcacgcaggatgccataa

SEQ ID NO: 4577197 - DNA, 25 bp, Homo sapien
ggatctcttggtgcccgtcacctca

SEQ ID NO: 4577198 - DNA, 25 bp, Homo sapien
aactccctctgatgtgccctgcggg

SEQ ID NO: 4577199 - DNA, 25 bp, Homo sapien
tccccaaatgtgagctgattgaagc

SEQ ID NO: 4577200 - DNA, 25 bp, Homo sapien
gaggcaatgctgaccctaaagaagg

SEQ ID NO: 4577201 - DNA, 25 bp, Homo sapien
cagaatgccagggtagtctgcagat

SEQ ID NO: 4577202 - DNA, 25 bp, Homo sapien
ctacagaatgccagggtagtctgca

SEQ ID NO: 4577203 - DNA, 25 bp, Homo sapien
atgccagggtagtctgcagatgtca

SEQ ID NO: 4577204 - DNA, 25 bp, Homo sapien
gaatgccagggtagtctgcagatgt

SEQ ID NO: 4577205 - DNA, 25 bp, Homo sapien
tcatcgattggtgagggtgaggtgg

SEQ ID NO: 4577206 - DNA, 25 bp, Homo sapien
catcgattggtgagggtgaggtgga

SEQ ID NO: 4577207 - DNA, 25 bp, Homo sapien
ccagcagcgagagtgctgcccccag

SEQ ID NO: 4577208 - DNA, 25 bp, Homo sapien
cagcagcgagagtgctgcccccagg

SEQ ID NO: 4577209 - DNA, 25 bp, Homo sapien
ccgccagcagcgagagtgctgcccc

SEQ ID NO: 4577210 - DNA, 25 bp, Homo sapien
gccagcagcgagagtgctgccccca

SEQ ID NO: 4577211 - DNA, 25 bp, Homo sapien
cccatgtctccgctgaactaaagag

SEQ ID NO: 4577212 - DNA, 25 bp, Homo sapien
caaccagtagaggtgttcccagagc

SEQ ID NO: 4577213 - DNA, 25 bp, Homo sapien
agatgggttggctcgcctagcagca

SEQ ID NO: 4577214 - DNA, 25 bp, Homo sapien
gctttggcccttagatgcccgtggt

SEQ ID NO: 4577215 - DNA, 25 bp, Homo sapien
ttagaggactcagctcgacgctggg

SEQ ID NO: 4577216 - DNA, 25 bp, Homo sapien
tcctggccatcagggattagccctg

SEQ ID NO: 4577217 - DNA, 25 bp, Homo sapien
tctcgggaaggtgtcaagcccacat

SEQ ID NO: 4577218 - DNA, 25 bp, Homo sapien
agaagcaggatctggccacacggct

SEQ ID NO: 4577219 - DNA, 25 bp, Homo sapien
tgagaacccattcaacctgctgagc

SEQ ID NO: 4577220 - DNA, 25 bp, Homo sapien
ggacttgggacagacgactgaagat

SEQ ID NO: 4577221 - DNA, 25 bp, Homo sapien
gaacccattcaacctgctgagcagg

SEQ ID NO: 4577222 - DNA, 25 bp, Homo sapien
tgggacagacgactgaagatgcaga

SEQ ID NO: 4577223 - DNA, 25 bp, Homo sapien
tggtgcccacatcgctgaggtgttg

SEQ ID NO: 4577224 - DNA, 25 bp, Homo sapien
catcgctgaggtgttggatttcaac

SEQ ID NO: 4577225 - DNA, 25 bp, Homo sapien
gcatcagaatgaggttgaatgtggt

SEQ ID NO: 4577226 - DNA, 25 bp, Homo sapien
aatgaggttgaatgtggtgcccaca

SEQ ID NO: 4577227 - DNA, 25 bp, Homo sapien
gatgagtggttgagcccgaaagagg

SEQ ID NO: 4577228 - DNA, 25 bp, Homo sapien
atcagtgggtgatgagtggttgagc

SEQ ID NO: 4577229 - DNA, 25 bp, Homo sapien
catcaccaccatggggaatggatgg

SEQ ID NO: 4577230 - DNA, 25 bp, Homo sapien
ggtgatgagtggttgagcccgaaag

SEQ ID NO: 4577231 - DNA, 25 bp, Homo sapien
agagcgagagcaagtaactggaggt

SEQ ID NO: 4577232 - DNA, 25 bp, Homo sapien
gaggaggaagattggtgccttcatt

SEQ ID NO: 4577233 - DNA, 25 bp, Homo sapien
ccagcactgacatccttgggctctg

SEQ ID NO: 4577234 - DNA, 25 bp, Homo sapien
taactggaggtagatgcgccccagc

SEQ ID NO: 4577235 - DNA, 25 bp, Homo sapien
ctttgctcagccatcgggttgggtc

SEQ ID NO: 4577236 - DNA, 25 bp, Homo sapien
caagttccggaagtaggtgatgttc

SEQ ID NO: 4577237 - DNA, 25 bp, Homo sapien
tgaggaagatggtcatctctagctc

SEQ ID NO: 4577238 - DNA, 25 bp, Homo sapien
cccagagcatagatggccacttgca

SEQ ID NO: 4577239 - DNA, 25 bp, Homo sapien
ctggggcaaggtgatcagaggcctg

SEQ ID NO: 4577240 - DNA, 25 bp, Homo sapien
tcagaggcctgagtaagccccactt

SEQ ID NO: 4577241 - DNA, 25 bp, Homo sapien
gatcagaggcctgagtaagccccac

SEQ ID NO: 4577242 - DNA, 25 bp, Homo sapien
agaggcctgagtaagccccacttcc

SEQ ID NO: 4577243 - DNA, 25 bp, Homo sapien
ctgtaatccttacccaccaaatggg

SEQ ID NO: 4577244 - DNA, 25 bp, Homo sapien
agacttagactgctgccatcaaggg

SEQ ID NO: 4577245 - DNA, 25 bp, Homo sapien
gatgattgtcccaccctttcctcag

SEQ ID NO: 4577246 - DNA, 25 bp, Homo sapien
aataacatcctagaggtcaccgccc

SEQ ID NO: 4577247 - DNA, 25 bp, Homo sapien
tgtaatctcgaagaaccaagtcatt

SEQ ID NO: 4577248 - DNA, 25 bp, Homo sapien
aaccaagtcatttacaagatatctc

SEQ ID NO: 4577249 - DNA, 25 bp, Homo sapien
agtcatttacaagatatctctgcag

SEQ ID NO: 4577250 - DNA, 25 bp, Homo sapien
gcaggaatcatgtaatctcgaagaa

SEQ ID NO: 4577251 - DNA, 25 bp, Homo sapien
ggggcggcatgggtggttgtgggct

SEQ ID NO: 4577252 - DNA, 25 bp, Homo sapien
ccagggattggagttgggggcggca

SEQ ID NO: 4577253 - DNA, 25 bp, Homo sapien
tgggggcggcatgggtggttgtggg

SEQ ID NO: 4577254 - DNA, 25 bp, Homo sapien
gagttgggggcggcatgggtggttg

SEQ ID NO: 4577255 - DNA, 25 bp, Homo sapien
ccgcagcatatcctgcaccttcagg

SEQ ID NO: 4577256 - DNA, 25 bp, Homo sapien
caccttcaggttgcgtgccatctca

SEQ ID NO: 4577257 - DNA, 25 bp, Homo sapien
tgccatctcatacaagtgccactgc

SEQ ID NO: 4577258 - DNA, 25 bp, Homo sapien
gggaccagctgtagcatcgtggcca

SEQ ID NO: 4577259 - DNA, 25 bp, Homo sapien
tcctcgaaggacatcttgctgtctc

SEQ ID NO: 4577260 - DNA, 25 bp, Homo sapien
gatgtcctcgaaggacatcttgctg

SEQ ID NO: 4577261 - DNA, 25 bp, Homo sapien
tgtcctcgaaggacatcttgctgtc

SEQ ID NO: 4577262 - DNA, 25 bp, Homo sapien
cttgatgtcctcgaaggacatcttg

SEQ ID NO: 4577263 - DNA, 25 bp, Homo sapien
gtctcaattcccagtagaagttctg

SEQ ID NO: 4577264 - DNA, 25 bp, Homo sapien
cggtaatcgtggtgaacacttcctt

SEQ ID NO: 4577265 - DNA, 25 bp, Homo sapien
tgtagaggatgccacggtaatcgtg

SEQ ID NO: 4577266 - DNA, 25 bp, Homo sapien
ccagtagaagttctgggtgtatatg

SEQ ID NO: 4577267 - DNA, 25 bp, Homo sapien
gcatcaatgaatcgctgggcctcgg

SEQ ID NO: 4577268 - DNA, 25 bp, Homo sapien
tggtccttccaggtcttggtcctga

SEQ ID NO: 4577269 - DNA, 25 bp, Homo sapien
cctgaacagacggaacaggtctggg

SEQ ID NO: 4577270 - DNA, 25 bp, Homo sapien
aaatcacgtcccatgcagccacatg

SEQ ID NO: 4577271 - DNA, 25 bp, Homo sapien
ggcaaagcggaacaggtcatcactg

SEQ ID NO: 4577272 - DNA, 25 bp, Homo sapien
gcaaagcggaacaggtcatcactga

SEQ ID NO: 4577273 - DNA, 25 bp, Homo sapien
caaagcggaacaggtcatcactgat

SEQ ID NO: 4577274 - DNA, 25 bp, Homo sapien
aatttccggagcccgccttcttgat

SEQ ID NO: 4577275 - DNA, 25 bp, Homo sapien
taatttccggagcccgccttcttga

SEQ ID NO: 4577276 - DNA, 25 bp, Homo sapien
caacaggggcaaaaagttcttggtg

SEQ ID NO: 4577277 - DNA, 25 bp, Homo sapien
tgacgaagtcccgagacactgcatc

SEQ ID NO: 4577278 - DNA, 25 bp, Homo sapien
tcccgagacactgcatccaacaggg

SEQ ID NO: 4577279 - DNA, 25 bp, Homo sapien
tgtgcaggacactgacgaagtcccg

SEQ ID NO: 4577280 - DNA, 25 bp, Homo sapien
tagcctgtatgggactcacggtggc

SEQ ID NO: 4577281 - DNA, 25 bp, Homo sapien
aaatgtctcactgcccctttagcct

SEQ ID NO: 4577282 - DNA, 25 bp, Homo sapien
aaccagtcagtgagaactttgccag

SEQ ID NO: 4577283 - DNA, 25 bp, Homo sapien
cagtaaggtgggactcagtgagcaa

SEQ ID NO: 4577284 - DNA, 25 bp, Homo sapien
tcggacttaaagagaagggccacat

SEQ ID NO: 4577285 - DNA, 25 bp, Homo sapien
ggactcctatgggtctctggtaata

SEQ ID NO: 4577286 - DNA, 25 bp, Homo sapien
cacatcttcagggtcgatgacataa

SEQ ID NO: 4577287 - DNA, 25 bp, Homo sapien
taatactggtgataggcgacccagg

SEQ ID NO: 4577288 - DNA, 25 bp, Homo sapien
actgtgggacctgagtcgaggccct

SEQ ID NO: 4577289 - DNA, 25 bp, Homo sapien
caaatacagtacctgtctcgcagcg

SEQ ID NO: 4577290 - DNA, 25 bp, Homo sapien
agtcgaggcccttaacccctctgag

SEQ ID NO: 4577291 - DNA, 25 bp, Homo sapien
tccgaggagagctatggatacaggc

SEQ ID NO: 4577292 - DNA, 25 bp, Homo sapien
aatcaattggaattgattgtatctg

SEQ ID NO: 4577293 - DNA, 25 bp, Homo sapien
tcaattggaattgattgtatctgac

SEQ ID NO: 4577294 - DNA, 25 bp, Homo sapien
ttggaattgattgtatctgacttca

SEQ ID NO: 4577295 - DNA, 25 bp, Homo sapien
caattggaattgattgtatctgact

SEQ ID NO: 4577296 - DNA, 25 bp, Homo sapien
gacaccctgctttgaagtcgtggga

SEQ ID NO: 4577297 - DNA, 25 bp, Homo sapien
tgatccctacatgcggtgctgctcg

SEQ ID NO: 4577298 - DNA, 25 bp, Homo sapien
cctaagattggaccccacaggagga

SEQ ID NO: 4577299 - DNA, 25 bp, Homo sapien
aataattgcgctgccccaaagcggg

SEQ ID NO: 4577300 - DNA, 25 bp, Homo sapien
cctgtcgctttgcagatgccgtcac

SEQ ID NO: 4577301 - DNA, 25 bp, Homo sapien
aatagtttataacctgtcgctttgc

SEQ ID NO: 4577302 - DNA, 25 bp, Homo sapien
ttcatgttaaaccagctaatactga

SEQ ID NO: 4577303 - DNA, 25 bp, Homo sapien
aaagactttcatgttaaaccagcta

SEQ ID NO: 4577304 - DNA, 25 bp, Homo sapien
tttgacatcgcagtcacggcgagcc

SEQ ID NO: 4577305 - DNA, 25 bp, Homo sapien
ctttgacatcgcagtcacggcgagc

SEQ ID NO: 4577306 - DNA, 25 bp, Homo sapien
acatcgcagtcacggcgagcccttg

SEQ ID NO: 4577307 - DNA, 25 bp, Homo sapien
tgacatcgcagtcacggcgagccct

SEQ ID NO: 4577308 - DNA, 25 bp, Homo sapien
agggtggtgacttcatatgccataa

SEQ ID NO: 4577309 - DNA, 25 bp, Homo sapien
ggtgacttcatatgccataatggca

SEQ ID NO: 4577310 - DNA, 25 bp, Homo sapien
aggatttatgtgtcagggtggtgac

SEQ ID NO: 4577311 - DNA, 25 bp, Homo sapien
tccaggatttatgtgtcagggtggt

SEQ ID NO: 4577312 - DNA, 25 bp, Homo sapien
cactgacaagactgagtggtggatg

SEQ ID NO: 4577313 - DNA, 25 bp, Homo sapien
actgacaagactgagtggtggatgg

SEQ ID NO: 4577314 - DNA, 25 bp, Homo sapien
gcactgacaagactgagtggtggat

SEQ ID NO: 4577315 - DNA, 25 bp, Homo sapien
gctcgggtgagctcgggtgaacgca

SEQ ID NO: 4577316 - DNA, 25 bp, Homo sapien
tgagctcgggtgaacgcagcgagcg

SEQ ID NO: 4577317 - DNA, 25 bp, Homo sapien
tcgggtgaacgcagcgagcgagggc

SEQ ID NO: 4577318 - DNA, 25 bp, Homo sapien
cggtgggctcgggtgagctcgggtg

SEQ ID NO: 4577319 - DNA, 25 bp, Homo sapien
cgtaacacctcaaagcgcacggagt

SEQ ID NO: 4577320 - DNA, 25 bp, Homo sapien
tcgccctgaggtaaacgcgggtcga

SEQ ID NO: 4577321 - DNA, 25 bp, Homo sapien
agagtgactgggacctaggacctgc

SEQ ID NO: 4577322 - DNA, 25 bp, Homo sapien
cagggccagcgaagccagtgctcca

SEQ ID NO: 4577323 - DNA, 25 bp, Homo sapien
ggaggtgagcgacccgcgaagagcg

SEQ ID NO: 4577324 - DNA, 25 bp, Homo sapien
cacgctagggcggacccaatttcgg

SEQ ID NO: 4577325 - DNA, 25 bp, Homo sapien
caatttcggaatagcgcggcccggg

SEQ ID NO: 4577326 - DNA, 25 bp, Homo sapien
cggcggcgtgcgctgggaggaatgc

SEQ ID NO: 4577327 - DNA, 25 bp, Homo sapien
ttggacccattaaagagcttcctta

SEQ ID NO: 4577328 - DNA, 25 bp, Homo sapien
tggacccattaaagagcttccttac

SEQ ID NO: 4577329 - DNA, 25 bp, Homo sapien
aaagtagatgtctggtttagagtac

SEQ ID NO: 4577330 - DNA, 25 bp, Homo sapien
ttcaaaagtagatgtctggtttaga

SEQ ID NO: 4577331 - DNA, 25 bp, Homo sapien
gtcttgccaccaattgtttcaaaag

SEQ ID NO: 4577332 - DNA, 25 bp, Homo sapien
agatggctggcggtcttgccaccaa

SEQ ID NO: 4577333 - DNA, 25 bp, Homo sapien
ggagtttggaaccagagaacagcct

SEQ ID NO: 4577334 - DNA, 25 bp, Homo sapien
tggaaccagagaacagcctgttggg

SEQ ID NO: 4577335 - DNA, 25 bp, Homo sapien
tacagcagggctacccaggcccctc

SEQ ID NO: 4577336 - DNA, 25 bp, Homo sapien
gaagttagacaggagtttggaacca

SEQ ID NO: 4577337 - DNA, 25 bp, Homo sapien
aaaggtctggcagcctttgaccagg

SEQ ID NO: 4577338 - DNA, 25 bp, Homo sapien
gtctccctccagaaatggtacaggt

SEQ ID NO: 4577339 - DNA, 25 bp, Homo sapien
aaggtggactttgtgtgtgcccgtc

SEQ ID NO: 4577340 - DNA, 25 bp, Homo sapien
tttagccagccattgtcaccaggag

SEQ ID NO: 4577341 - DNA, 25 bp, Homo sapien
ctgtgactgtacctgctccacttca

SEQ ID NO: 4577342 - DNA, 25 bp, Homo sapien
ggactgctaggatgactgtagccct

SEQ ID NO: 4577343 - DNA, 25 bp, Homo sapien
aagattataactaccagctcaaggc

SEQ ID NO: 4577344 - DNA, 25 bp, Homo sapien
gctcaaggccataccagaagctgat

SEQ ID NO: 4577345 - DNA, 25 bp, Homo sapien
caagagtggttgttgctcttcccgc

SEQ ID NO: 4577346 - DNA, 25 bp, Homo sapien
tatgtgtcagcccatagatcaccca

SEQ ID NO: 4577347 - DNA, 25 bp, Homo sapien
ggtcagaaaacatacatgtgccatg

SEQ ID NO: 4577348 - DNA, 25 bp, Homo sapien
ggcaaaagttgtccttacacagcca

SEQ ID NO: 4577349 - DNA, 25 bp, Homo sapien
gttgtggggcactgaccgcctcccc

SEQ ID NO: 4577350 - DNA, 25 bp, Homo sapien
cgggctggaggttattgcctcatcc

SEQ ID NO: 4577351 - DNA, 25 bp, Homo sapien
ggctggaggttattgcctcatcctc

SEQ ID NO: 4577352 - DNA, 25 bp, Homo sapien
gcccgggctggaggttattgcctca

SEQ ID NO: 4577353 - DNA, 25 bp, Homo sapien
gatgtcaatgaagacgagttccttt

SEQ ID NO: 4577354 - DNA, 25 bp, Homo sapien
gggatgtcaatgaagacgagttcct

SEQ ID NO: 4577355 - DNA, 25 bp, Homo sapien
gtcaatgaagacgagttccttttcc

SEQ ID NO: 4577356 - DNA, 25 bp, Homo sapien
cagggatgtcaatgaagacgagttc

SEQ ID NO: 4577357 - DNA, 25 bp, Homo sapien
tcatctggcccattgtcctgaaagg

SEQ ID NO: 4577358 - DNA, 25 bp, Homo sapien
tccaccgtgggctggacgaagacat

SEQ ID NO: 4577359 - DNA, 25 bp, Homo sapien
ccatggcatgttgtgctctctcgca

SEQ ID NO: 4577360 - DNA, 25 bp, Homo sapien
tggcaccagagctactgcaggctac

SEQ ID NO: 4577361 - DNA, 25 bp, Homo sapien
gacatcatctactccagggcatcca

SEQ ID NO: 4577362 - DNA, 25 bp, Homo sapien
tcaataaacatgcaaggcggctgtc

SEQ ID NO: 4577363 - DNA, 25 bp, Homo sapien
gaacacggtgaaactagggctcagt

SEQ ID NO: 4577364 - DNA, 25 bp, Homo sapien
tgtgagacgttctagtgccctgggc

SEQ ID NO: 4577365 - DNA, 25 bp, Homo sapien
taaagtcttgggtcatcgatgcccc

SEQ ID NO: 4577366 - DNA, 25 bp, Homo sapien
actgctgcgccgtgaggttctcgat

SEQ ID NO: 4577367 - DNA, 25 bp, Homo sapien
tcctgggcctcgcagaagtagtggc

SEQ ID NO: 4577368 - DNA, 25 bp, Homo sapien
cacgttctccttgtggcgccatgag

SEQ ID NO: 4577369 - DNA, 25 bp, Homo sapien
tggtgaccaggttcgcagctctgct

SEQ ID NO: 4577370 - DNA, 25 bp, Homo sapien
ctcagaccaggacaatcagggcagg

SEQ ID NO: 4577371 - DNA, 25 bp, Homo sapien
tgtgtcctccccacggactgggatc

SEQ ID NO: 4577372 - DNA, 25 bp, Homo sapien
gggcagtaccccactcattgggcca

SEQ ID NO: 4577373 - DNA, 25 bp, Homo sapien
ggactgtatcctgccccatgtacct

SEQ ID NO: 4577374 - DNA, 25 bp, Homo sapien
ttgggacactccttgtgtggctcgg

SEQ ID NO: 4577375 - DNA, 25 bp, Homo sapien
tggattaatggattgcagcactgac

SEQ ID NO: 4577376 - DNA, 25 bp, Homo sapien
tgggacactccttgtgtggctcggc

SEQ ID NO: 4577377 - DNA, 25 bp, Homo sapien
ctcggctggattaatggattgcagc

SEQ ID NO: 4577378 - DNA, 25 bp, Homo sapien
cagggacgagggatcccggccaacg

SEQ ID NO: 4577379 - DNA, 25 bp, Homo sapien
tcccagggacgagggatcccggcca

SEQ ID NO: 4577380 - DNA, 25 bp, Homo sapien
tctcccagggacgagggatcccggc

SEQ ID NO: 4577381 - DNA, 25 bp, Homo sapien
cttctcccagggacgagggatcccg

SEQ ID NO: 4577382 - DNA, 25 bp, Homo sapien
ggacatgaggcaaccgtggcagccc

SEQ ID NO: 4577383 - DNA, 25 bp, Homo sapien
ggagatgcagcggccttggtcccag

SEQ ID NO: 4577384 - DNA, 25 bp, Homo sapien
cgttcggagctgtagatggagatgc

SEQ ID NO: 4577385 - DNA, 25 bp, Homo sapien
cccgccatagacctcacacaggtcc

SEQ ID NO: 4577386 - DNA, 25 bp, Homo sapien
cggcggaagggctggatctccatga

SEQ ID NO: 4577387 - DNA, 25 bp, Homo sapien
cgcggcggaagggctggatctccat

SEQ ID NO: 4577388 - DNA, 25 bp, Homo sapien
tgttgaaggcgaagctgtgctcctg

SEQ ID NO: 4577389 - DNA, 25 bp, Homo sapien
ctgctcccccggttccaccaccttg

SEQ ID NO: 4577390 - DNA, 25 bp, Homo sapien
tcaggactccacgttgcatttgatc

SEQ ID NO: 4577391 - DNA, 25 bp, Homo sapien
tcacaattagggaccaatgggcacc

SEQ ID NO: 4577392 - DNA, 25 bp, Homo sapien
ggtcttataaccgagctgcctgcct

SEQ ID NO: 4577393 - DNA, 25 bp, Homo sapien
gttctaggatccaattcaggactcc

SEQ ID NO: 4577394 - DNA, 25 bp, Homo sapien
cttgcatgcggtggacggccacttt

SEQ ID NO: 4577395 - DNA, 25 bp, Homo sapien
aacaatggcgtcttcagaggcccca

SEQ ID NO: 4577396 - DNA, 25 bp, Homo sapien
aggtctccccgtggctggcttgcat

SEQ ID NO: 4577397 - DNA, 25 bp, Homo sapien
gtaaagcacatgaaaggtctccccg

SEQ ID NO: 4577398 - DNA, 25 bp, Homo sapien
tggtagcccttgagtgaggaggtac

SEQ ID NO: 4577399 - DNA, 25 bp, Homo sapien
caatgtcaccgagggaatacacaca

SEQ ID NO: 4577400 - DNA, 25 bp, Homo sapien
tgaggaggtacggaagaccttgtca

SEQ ID NO: 4577401 - DNA, 25 bp, Homo sapien
ttgggaaggcttgagtggtagccct

SEQ ID NO: 4577402 - DNA, 25 bp, Homo sapien
ggaagacgtcttgcagcctgttgaa

SEQ ID NO: 4577403 - DNA, 25 bp, Homo sapien
gagactgacagtgaactttccccac

SEQ ID NO: 4577404 - DNA, 25 bp, Homo sapien
tcactgcataccagcatggctttca

SEQ ID NO: 4577405 - DNA, 25 bp, Homo sapien
aaaagtgttccacttggagactgac

SEQ ID NO: 4577406 - DNA, 25 bp, Homo sapien
taagcctggtcttggtgcacgatgg

SEQ ID NO: 4577407 - DNA, 25 bp, Homo sapien
cacgatggtggctttgatgaactgt

SEQ ID NO: 4577408 - DNA, 25 bp, Homo sapien
tagatcttgtcatcgtaagcctggt

SEQ ID NO: 4577409 - DNA, 25 bp, Homo sapien
cacacgggacacattgagaggagcc

SEQ ID NO: 4577410 - DNA, 25 bp, Homo sapien
ctcagcccagccggagcctgactca

SEQ ID NO: 4577411 - DNA, 25 bp, Homo sapien
cctcagcccagccggagcctgactc

SEQ ID NO: 4577412 - DNA, 25 bp, Homo sapien
tcagcccagccggagcctgactcac

SEQ ID NO: 4577413 - DNA, 25 bp, Homo sapien
cactggtgtacagctcactctcgcc

SEQ ID NO: 4577414 - DNA, 25 bp, Homo sapien
actctcgccccggatgcggcggaac

SEQ ID NO: 4577415 - DNA, 25 bp, Homo sapien
gcttccggatggtggaatacacctc

SEQ ID NO: 4577416 - DNA, 25 bp, Homo sapien
tgcggcggaaccgagggatcttccc

SEQ ID NO: 4577417 - DNA, 25 bp, Homo sapien
gccaagtggcaccacagtgccattc

SEQ ID NO: 4577418 - DNA, 25 bp, Homo sapien
tcatctcgccaagtggcaccacagt

SEQ ID NO: 4577419 - DNA, 25 bp, Homo sapien
ctgaagggggcgtagcctctcatct

SEQ ID NO: 4577420 - DNA, 25 bp, Homo sapien
gtagcctctcatctcgccaagtggc

SEQ ID NO: 4577421 - DNA, 25 bp, Homo sapien
gggtgccgggcgttggtgccacagg

SEQ ID NO: 4577422 - DNA, 25 bp, Homo sapien
ggagagtgatgtagttctcgcagtc

SEQ ID NO: 4577423 - DNA, 25 bp, Homo sapien
tctccaggagagtgatgtagttctc

SEQ ID NO: 4577424 - DNA, 25 bp, Homo sapien
tccaggagagtgatgtagttctcgc

SEQ ID NO: 4577425 - DNA, 25 bp, Homo sapien
agacaggacccctttgtggagccga

SEQ ID NO: 4577426 - DNA, 25 bp, Homo sapien
gacccctttgtggagccgatattca

SEQ ID NO: 4577427 - DNA, 25 bp, Homo sapien
ttatccagacaggacccctttgtgg

SEQ ID NO: 4577428 - DNA, 25 bp, Homo sapien
cgcttatccagacaggacccctttg

SEQ ID NO: 4577429 - DNA, 25 bp, Homo sapien
gagctgcctggctcgtggaaaagca

SEQ ID NO: 4577430 - DNA, 25 bp, Homo sapien
gcacagatgcgttcttgccctcggg

SEQ ID NO: 4577431 - DNA, 25 bp, Homo sapien
caaagaggtagaccttgccacgtcc

SEQ ID NO: 4577432 - DNA, 25 bp, Homo sapien
ccgtgtgcggctcagtctggccaaa

SEQ ID NO: 4577433 - DNA, 25 bp, Homo sapien
aggaggaccagggctccttggccat

SEQ ID NO: 4577434 - DNA, 25 bp, Homo sapien
ttttgagggctgggctaaggcagga

SEQ ID NO: 4577435 - DNA, 25 bp, Homo sapien
ggcaggaggaccagggctccttggc

SEQ ID NO: 4577436 - DNA, 25 bp, Homo sapien
taaggcaggaggaccagggctcctt

SEQ ID NO: 4577437 - DNA, 25 bp, Homo sapien
ctttgttcaggttggcaggagcggg

SEQ ID NO: 4577438 - DNA, 25 bp, Homo sapien
gcctgaggccctcaaaaggcctgat

SEQ ID NO: 4577439 - DNA, 25 bp, Homo sapien
cagcagcagctcgatgaatacatga

SEQ ID NO: 4577440 - DNA, 25 bp, Homo sapien
aaaaggcctgattgtgcccgggaag

SEQ ID NO: 4577441 - DNA, 25 bp, Homo sapien
ccagcccagcaggttccaaaagccc

SEQ ID NO: 4577442 - DNA, 25 bp, Homo sapien
gtggggccgaagtcgctggtggctc

SEQ ID NO: 4577443 - DNA, 25 bp, Homo sapien
agcccagcaggttccaaaagcccca

SEQ ID NO: 4577444 - DNA, 25 bp, Homo sapien
cagagtggggccgaagtcgctggtg

SEQ ID NO: 4577445 - DNA, 25 bp, Homo sapien
cagacaaagggtagcggtgcagggc

SEQ ID NO: 4577446 - DNA, 25 bp, Homo sapien
tcaaagcagacaaagggtagcggtg

SEQ ID NO: 4577447 - DNA, 25 bp, Homo sapien
cttcaaagcagacaaagggtagcgg

SEQ ID NO: 4577448 - DNA, 25 bp, Homo sapien
aaagcagacaaagggtagcggtgca

SEQ ID NO: 4577449 - DNA, 25 bp, Homo sapien
cagggcaggggtcggggagagggcg

SEQ ID NO: 4577450 - DNA, 25 bp, Homo sapien
gcaggggtcggggagagggcggaga

SEQ ID NO: 4577451 - DNA, 25 bp, Homo sapien
cacagccagggcaggggtcggggag

SEQ ID NO: 4577452 - DNA, 25 bp, Homo sapien
agccagggcaggggtcggggagagg

SEQ ID NO: 4577453 - DNA, 25 bp, Homo sapien
taccacaaaccatctggcaccacca

SEQ ID NO: 4577454 - DNA, 25 bp, Homo sapien
tgtaccacaaaccatctggcaccac

SEQ ID NO: 4577455 - DNA, 25 bp, Homo sapien
gtaccacaaaccatctggcaccacc

SEQ ID NO: 4577456 - DNA, 25 bp, Homo sapien
accacaaaccatctggcaccaccat

SEQ ID NO: 4577457 - DNA, 25 bp, Homo sapien
ccgaacacagacctaggctggctgc

SEQ ID NO: 4577458 - DNA, 25 bp, Homo sapien
gaggagccgaacacagacctaggct

SEQ ID NO: 4577459 - DNA, 25 bp, Homo sapien
cccagaggagccgaacacagaccta

SEQ ID NO: 4577460 - DNA, 25 bp, Homo sapien
ggagccgaacacagacctaggctgg

SEQ ID NO: 4577461 - DNA, 25 bp, Homo sapien
cagaacctggactggtcctgtgcca

SEQ ID NO: 4577462 - DNA, 25 bp, Homo sapien
atggtccctgaaccacctaaatcct

SEQ ID NO: 4577463 - DNA, 25 bp, Homo sapien
ctccatgtacaggcggccggagctc

SEQ ID NO: 4577464 - DNA, 25 bp, Homo sapien
ggccggagctctagcagcactgctc

SEQ ID NO: 4577465 - DNA, 25 bp, Homo sapien
tgttcccgctgccgaagcgcggcgg

SEQ ID NO: 4577466 - DNA, 25 bp, Homo sapien
ctttgttcccgctgccgaagcgcgg

SEQ ID NO: 4577467 - DNA, 25 bp, Homo sapien
cgccccgcgcgccagcagagcccgc

SEQ ID NO: 4577468 - DNA, 25 bp, Homo sapien
gccccgcgcgccagcagagcccgca

SEQ ID NO: 4577469 - DNA, 25 bp, Homo sapien
atcccgcgcctgaccggccgcgcgg

SEQ ID NO: 4577470 - DNA, 25 bp, Homo sapien
agagctgcgcgcacgcactccctcc

SEQ ID NO: 4577471 - DNA, 25 bp, Homo sapien
cgggtgcagcacactccgcacccgc

SEQ ID NO: 4577472 - DNA, 25 bp, Homo sapien
ccccgcgcagcgtctgatcccgcgc

SEQ ID NO: 4577473 - DNA, 25 bp, Homo sapien
cgaagatgcggggtccgctccttag

SEQ ID NO: 4577474 - DNA, 25 bp, Homo sapien
gacggcgaagatgcggggtccgctc

SEQ ID NO: 4577475 - DNA, 25 bp, Homo sapien
tttccagacggcgaagatgcggggt

SEQ ID NO: 4577476 - DNA, 25 bp, Homo sapien
tgcggggtccgctccttaggtggcc

SEQ ID NO: 4577477 - DNA, 25 bp, Homo sapien
agcggaagccccaaccgagccggcg

SEQ ID NO: 4577478 - DNA, 25 bp, Homo sapien
gcagccgcagcggaagccccaaccg

SEQ ID NO: 4577479 - DNA, 25 bp, Homo sapien
agccccaaccgagccggcgggccag

SEQ ID NO: 4577480 - DNA, 25 bp, Homo sapien
ctgggggcggcacgtccgggcggag

SEQ ID NO: 4577481 - DNA, 25 bp, Homo sapien
ggaacatgagtgagcacaggcagat

SEQ ID NO: 4577482 - DNA, 25 bp, Homo sapien
ctacctcctggcgaagctctgaggc

SEQ ID NO: 4577483 - DNA, 25 bp, Homo sapien
tcaacttggacatgtctgcgatgcc

SEQ ID NO: 4577484 - DNA, 25 bp, Homo sapien
cagggaacatcacagggaacgccat

SEQ ID NO: 4577485 - DNA, 25 bp, Homo sapien
gagagttgaccatcaggtatattgg

SEQ ID NO: 4577486 - DNA, 25 bp, Homo sapien
gaggcaccttcatgagtgcctccca

SEQ ID NO: 4577487 - DNA, 25 bp, Homo sapien
gcagtagcctctgcaacttgctggg

SEQ ID NO: 4577488 - DNA, 25 bp, Homo sapien
cttcatgagtgcctcccaagggcag

SEQ ID NO: 4577489 - DNA, 25 bp, Homo sapien
tcagctcatcgtcctggatgcccat

SEQ ID NO: 4577490 - DNA, 25 bp, Homo sapien
gctcctccagcaaagatgagctcca

SEQ ID NO: 4577491 - DNA, 25 bp, Homo sapien
gcttggatgtccccaccggtggcct

SEQ ID NO: 4577492 - DNA, 25 bp, Homo sapien
gcccatgtcacgtagctgctgcagc

SEQ ID NO: 4577493 - DNA, 25 bp, Homo sapien
agctgggatccagtgaagactcact

SEQ ID NO: 4577494 - DNA, 25 bp, Homo sapien
tggaaagataggaatgggcagaagc

SEQ ID NO: 4577495 - DNA, 25 bp, Homo sapien
ggcagaagctgttagctgggatcca

SEQ ID NO: 4577496 - DNA, 25 bp, Homo sapien
cacttaggtctgtgctttccgggga

SEQ ID NO: 4577497 - DNA, 25 bp, Homo sapien
gctgaagagatcattggtgatgggc

SEQ ID NO: 4577498 - DNA, 25 bp, Homo sapien
gatcattggtgatgggcgtccctga

SEQ ID NO: 4577499 - DNA, 25 bp, Homo sapien
aagagatcattggtgatgggcgtcc

SEQ ID NO: 4577500 - DNA, 25 bp, Homo sapien
gagatcattggtgatgggcgtccct

SEQ ID NO: 4577501 - DNA, 25 bp, Homo sapien
acaccagaggacattggtgaggtcc

SEQ ID NO: 4577502 - DNA, 25 bp, Homo sapien
gacaccagaggacattggtgaggtc

SEQ ID NO: 4577503 - DNA, 25 bp, Homo sapien
tggacaccagaggacattggtgagg

SEQ ID NO: 4577504 - DNA, 25 bp, Homo sapien
ctggacaccagaggacattggtgag

SEQ ID NO: 4577505 - DNA, 25 bp, Homo sapien
agctccactgtaccccagggaggct

SEQ ID NO: 4577506 - DNA, 25 bp, Homo sapien
agctgctctccggagtgctggccag

SEQ ID NO: 4577507 - DNA, 25 bp, Homo sapien
gctgggagtactgctagagggtgtg

SEQ ID NO: 4577508 - DNA, 25 bp, Homo sapien
tgtgagagctgctctccggagtgct

SEQ ID NO: 4577509 - DNA, 25 bp, Homo sapien
cctcatcatctgagagcccttcaaa

SEQ ID NO: 4577510 - DNA, 25 bp, Homo sapien
atctgagagcccttcaaacaggaag

SEQ ID NO: 4577511 - DNA, 25 bp, Homo sapien
catcatctgagagcccttcaaacag

SEQ ID NO: 4577512 - DNA, 25 bp, Homo sapien
catctgagagcccttcaaacaggaa

SEQ ID NO: 4577513 - DNA, 25 bp, Homo sapien
ctccgggaagaggagtcagtcccag

SEQ ID NO: 4577514 - DNA, 25 bp, Homo sapien
cctgctacggagtgcagaaccagga

SEQ ID NO: 4577515 - DNA, 25 bp, Homo sapien
caggacaatggcattgacgagggct

SEQ ID NO: 4577516 - DNA, 25 bp, Homo sapien
tggcatatcccggtatgagctggag

SEQ ID NO: 4577517 - DNA, 25 bp, Homo sapien
catattgggatcagcgaagacagag

SEQ ID NO: 4577518 - DNA, 25 bp, Homo sapien
gtatcaagcatattgggatcagcga

SEQ ID NO: 4577519 - DNA, 25 bp, Homo sapien
ttgggatcagcgaagacagagaaga

SEQ ID NO: 4577520 - DNA, 25 bp, Homo sapien
caagcatattgggatcagcgaagac

SEQ ID NO: 4577521 - DNA, 25 bp, Homo sapien
ctatttcctcaaattcagtcctgca

SEQ ID NO: 4577522 - DNA, 25 bp, Homo sapien
ttttccgacaactcctatttcctca

SEQ ID NO: 4577523 - DNA, 25 bp, Homo sapien
tcctcaaattcagtcctgcacttac

SEQ ID NO: 4577524 - DNA, 25 bp, Homo sapien
atttcctcaaattcagtcctgcact

SEQ ID NO: 4577525 - DNA, 25 bp, Homo sapien
ccttattgctgagcatcttaaagac

SEQ ID NO: 4577526 - DNA, 25 bp, Homo sapien
caagagcaatagggtcactgctgag

SEQ ID NO: 4577527 - DNA, 25 bp, Homo sapien
tccttattgctgagcatcttaaaga

SEQ ID NO: 4577528 - DNA, 25 bp, Homo sapien
ggcagtgtgcaacacccggaactct

SEQ ID NO: 4577529 - DNA, 25 bp, Homo sapien
tgtgcagggcagtgtgcaacacccg

SEQ ID NO: 4577530 - DNA, 25 bp, Homo sapien
aacacccggaactctctcatggcag

SEQ ID NO: 4577531 - DNA, 25 bp, Homo sapien
gtgcaacacccggaactctctcatg

SEQ ID NO: 4577532 - DNA, 25 bp, Homo sapien
ccaggactttcgcagaacatggaca

SEQ ID NO: 4577533 - DNA, 25 bp, Homo sapien
tagcttccgaccacagtagatcaga

SEQ ID NO: 4577534 - DNA, 25 bp, Homo sapien
tctgatcaggttcaggccaggactt

SEQ ID NO: 4577535 - DNA, 25 bp, Homo sapien
acatggacagtggacccaggttgaa

SEQ ID NO: 4577536 - DNA, 25 bp, Homo sapien
caaaataggatgaacccaatccagg

SEQ ID NO: 4577537 - DNA, 25 bp, Homo sapien
tactcagtcaaccaagcaaaaatcc

SEQ ID NO: 4577538 - DNA, 25 bp, Homo sapien
ttaacattatgaggcaacaaatccc

SEQ ID NO: 4577539 - DNA, 25 bp, Homo sapien
taatacatggctgaaatggcaacca

SEQ ID NO: 4577540 - DNA, 25 bp, Homo sapien
aatcagctcagggtctggaacagac

SEQ ID NO: 4577541 - DNA, 25 bp, Homo sapien
ttcaccgccaggtgccagtctgaga

SEQ ID NO: 4577542 - DNA, 25 bp, Homo sapien
tctggcaaccgaagaatagactttg

SEQ ID NO: 4577543 - DNA, 25 bp, Homo sapien
ctttggagtaagtggctggtcagcc

SEQ ID NO: 4577544 - DNA, 25 bp, Homo sapien
cctctctctttcgcgctctctcttt

SEQ ID NO: 4577545 - DNA, 25 bp, Homo sapien
tctctttcgcgctctctctttctcc

SEQ ID NO: 4577546 - DNA, 25 bp, Homo sapien
tctctctttcgcgctctctctttct

SEQ ID NO: 4577547 - DNA, 25 bp, Homo sapien
ctctctttcgcgctctctctttctc

SEQ ID NO: 4577548 - DNA, 25 bp, Homo sapien
gggttctctctctactcatactgtg

SEQ ID NO: 4577549 - DNA, 25 bp, Homo sapien
tgatggacagctctctaggcctcag

SEQ ID NO: 4577550 - DNA, 25 bp, Homo sapien
tctctactcatactgtgatggacag

SEQ ID NO: 4577551 - DNA, 25 bp, Homo sapien
tcaggaggccagaactagaatctgg

SEQ ID NO: 4577552 - DNA, 25 bp, Homo sapien
gaatcttgcaaagcaagataagttc

SEQ ID NO: 4577553 - DNA, 25 bp, Homo sapien
atcagaaactctgacggcggaagaa

SEQ ID NO: 4577554 - DNA, 25 bp, Homo sapien
gcaagataagttcttgttatagtca

SEQ ID NO: 4577555 - DNA, 25 bp, Homo sapien
gacggcggaagaatcttgcaaagca

SEQ ID NO: 4577556 - DNA, 25 bp, Homo sapien
caggaacactatccggtggcgacct

SEQ ID NO: 4577557 - DNA, 25 bp, Homo sapien
tagcagaccttcaagcatcctcaag

SEQ ID NO: 4577558 - DNA, 25 bp, Homo sapien
caaggtcacagatcgctagtaatgg

SEQ ID NO: 4577559 - DNA, 25 bp, Homo sapien
tcaagtttatgccagaaggaggtcg

SEQ ID NO: 4577560 - DNA, 25 bp, Homo sapien
cagtgggaccagctacttggctgac

SEQ ID NO: 4577561 - DNA, 25 bp, Homo sapien
gtgggaccagctacttggctgacac

SEQ ID NO: 4577562 - DNA, 25 bp, Homo sapien
ccagtgggaccagctacttggctga

SEQ ID NO: 4577563 - DNA, 25 bp, Homo sapien
tccagtgggaccagctacttggctg

SEQ ID NO: 4577564 - DNA, 25 bp, Homo sapien
atcgagcccgcgctgcccagggccc

SEQ ID NO: 4577565 - DNA, 25 bp, Homo sapien
tcgagcccgcgctgcccagggcccc

SEQ ID NO: 4577566 - DNA, 25 bp, Homo sapien
ctgcccagggccccagcgccctcac

SEQ ID NO: 4577567 - DNA, 25 bp, Homo sapien
gcgctgcccagggccccagcgccct

SEQ ID NO: 4577568 - DNA, 25 bp, Homo sapien
gccgcactgccgccggtgtaaacac

SEQ ID NO: 4577569 - DNA, 25 bp, Homo sapien
cgcactgccgccggtgtaaacactc

SEQ ID NO: 4577570 - DNA, 25 bp, Homo sapien
cactgccgccggtgtaaacactcac

SEQ ID NO: 4577571 - DNA, 25 bp, Homo sapien
gcactgccgccggtgtaaacactca

SEQ ID NO: 4577572 - DNA, 25 bp, Homo sapien
tttagacacatccaagcggttgccg

SEQ ID NO: 4577573 - DNA, 25 bp, Homo sapien
gacggccctcacgatgaaaactgct

SEQ ID NO: 4577574 - DNA, 25 bp, Homo sapien
tcccctgaggagcatatgaagtacg

SEQ ID NO: 4577575 - DNA, 25 bp, Homo sapien
gctctttgaaatgtccggcgccgga

SEQ ID NO: 4577576 - DNA, 25 bp, Homo sapien
tgaagtatgccctgttctgtgcccc

SEQ ID NO: 4577577 - DNA, 25 bp, Homo sapien
tgtgcccctaaggtgctctgtgatc

SEQ ID NO: 4577578 - DNA, 25 bp, Homo sapien
aatcctgaaggggatatgtacatgc

SEQ ID NO: 4577579 - DNA, 25 bp, Homo sapien
tgtgcccggcctgatgcaaagttgt

SEQ ID NO: 4577580 - DNA, 25 bp, Homo sapien
tggcctattctctccttctcacaga

SEQ ID NO: 4577581 - DNA, 25 bp, Homo sapien
gagctaaggatgtcaatgtggccaa

SEQ ID NO: 4577582 - DNA, 25 bp, Homo sapien
tgtggccaataaggtacaagtgaaa

SEQ ID NO: 4577583 - DNA, 25 bp, Homo sapien
gcagtgatggcgtctcaatatgttg

SEQ ID NO: 4577584 - DNA, 25 bp, Homo sapien
tctctgcgttagcacaggcatccag

SEQ ID NO: 4577585 - DNA, 25 bp, Homo sapien
gactctcggtagtttttgcgttcca

SEQ ID NO: 4577586 - DNA, 25 bp, Homo sapien
gaatcacacttaagcccaggcagag

SEQ ID NO: 4577587 - DNA, 25 bp, Homo sapien
tgcgttccaagaagtagagcctaga

SEQ ID NO: 4577588 - DNA, 25 bp, Homo sapien
gcccattggtgctgcccgtggacgg

SEQ ID NO: 4577589 - DNA, 25 bp, Homo sapien
ctgcccgtggacggctggcacaggg

SEQ ID NO: 4577590 - DNA, 25 bp, Homo sapien
tgcccattggtgctgcccgtggacg

SEQ ID NO: 4577591 - DNA, 25 bp, Homo sapien
ccagaatagctctaccagtgcccat

SEQ ID NO: 4577592 - DNA, 25 bp, Homo sapien
gccagaatagctctaccagtgccca

SEQ ID NO: 4577593 - DNA, 25 bp, Homo sapien
cacagccagaatagctctaccagtg

SEQ ID NO: 4577594 - DNA, 25 bp, Homo sapien
cagccagaatagctctaccagtgcc

SEQ ID NO: 4577595 - DNA, 25 bp, Homo sapien
tcctggaatccaaaggccgagaagt

SEQ ID NO: 4577596 - DNA, 25 bp, Homo sapien
ggagccactgatgtaagtcctggaa

SEQ ID NO: 4577597 - DNA, 25 bp, Homo sapien
aaagtcccacaatgagccatatgca

SEQ ID NO: 4577598 - DNA, 25 bp, Homo sapien
aagggtgtaactctcaggccgagcc

SEQ ID NO: 4577599 - DNA, 25 bp, Homo sapien
agtggtctccatggctgtactcggt

SEQ ID NO: 4577600 - DNA, 25 bp, Homo sapien
tccatggctgtactcggtatggcgc

SEQ ID NO: 4577601 - DNA, 25 bp, Homo sapien
tggctgtactcggtatggcgcctcc

SEQ ID NO: 4577602 - DNA, 25 bp, Homo sapien
tgtactcggtatggcgcctcccagc

SEQ ID NO: 4577603 - DNA, 25 bp, Homo sapien
tgctgaacgatgcaactgtcacagt

SEQ ID NO: 4577604 - DNA, 25 bp, Homo sapien
catctcttcgtgactcaatctgctg

SEQ ID NO: 4577605 - DNA, 25 bp, Homo sapien
tcagacagatggtatacatctcttc

SEQ ID NO: 4577606 - DNA, 25 bp, Homo sapien
cgtgactcaatctgctgaacgatgc

SEQ ID NO: 4577607 - DNA, 25 bp, Homo sapien
ttgagatttttgtacatcgggatat

SEQ ID NO: 4577608 - DNA, 25 bp, Homo sapien
gagatttttgtacatcgggatatat

SEQ ID NO: 4577609 - DNA, 25 bp, Homo sapien
ttttgaattgatattatataccata

SEQ ID NO: 4577610 - DNA, 25 bp, Homo sapien
ttgtacatcgggatatatagctcat

SEQ ID NO: 4577611 - DNA, 25 bp, Homo sapien
tccattaggttagtaggagttatcc

SEQ ID NO: 4577612 - DNA, 25 bp, Homo sapien
gcctggatggtctagaatgctcttg

SEQ ID NO: 4577613 - DNA, 25 bp, Homo sapien
cctcgtggtagtggaagaggtcaca

SEQ ID NO: 4577614 - DNA, 25 bp, Homo sapien
gcaagagaaagcaaccccctgttgt

SEQ ID NO: 4577615 - DNA, 25 bp, Homo sapien
tcctatggattttaacacatgtaca

SEQ ID NO: 4577616 - DNA, 25 bp, Homo sapien
caaaatcaggattcaaaagagttcc

SEQ ID NO: 4577617 - DNA, 25 bp, Homo sapien
tgtacagattgaagtaactactacc

SEQ ID NO: 4577618 - DNA, 25 bp, Homo sapien
ggcaatcactgacttactctccaaa

SEQ ID NO: 4577619 - DNA, 25 bp, Homo sapien
tcagtaactgaggagtttggcagcc

SEQ ID NO: 4577620 - DNA, 25 bp, Homo sapien
tcaatatctgtaccgagctcatgtc

SEQ ID NO: 4577621 - DNA, 25 bp, Homo sapien
tgaacagactgtcacttgggaaagg

SEQ ID NO: 4577622 - DNA, 25 bp, Homo sapien
agagagcttggttgcccttgtagac

SEQ ID NO: 4577623 - DNA, 25 bp, Homo sapien
gcttgcttgctctagtactttggac

SEQ ID NO: 4577624 - DNA, 25 bp, Homo sapien
tttttgaagctaccgtcgtccctca

SEQ ID NO: 4577625 - DNA, 25 bp, Homo sapien
tttggacaagcgttctaatctgcct

SEQ ID NO: 4577626 - DNA, 25 bp, Homo sapien
cagggttagggcgaattgtcatcaa

SEQ ID NO: 4577627 - DNA, 25 bp, Homo sapien
tgcatttccgacaacggtattttct

SEQ ID NO: 4577628 - DNA, 25 bp, Homo sapien
taagccgtagtgctgccaagtcaga

SEQ ID NO: 4577629 - DNA, 25 bp, Homo sapien
ctttctgtcaccagcgggtccattg

SEQ ID NO: 4577630 - DNA, 25 bp, Homo sapien
tccattgaagtgttcttgtgctggg

SEQ ID NO: 4577631 - DNA, 25 bp, Homo sapien
aagttcaggtggtagctcaagggtt

SEQ ID NO: 4577632 - DNA, 25 bp, Homo sapien
ggtatcagggtgtcctcatcaccaa

SEQ ID NO: 4577633 - DNA, 25 bp, Homo sapien
ctgggccagttcatgccttggtatc

SEQ ID NO: 4577634 - DNA, 25 bp, Homo sapien
tacctctgtggctctcggacttgga

SEQ ID NO: 4577635 - DNA, 25 bp, Homo sapien
tttctgccacctttggtaggaacat

SEQ ID NO: 4577636 - DNA, 25 bp, Homo sapien
tcagagagagcatgattaattaccc

SEQ ID NO: 4577637 - DNA, 25 bp, Homo sapien
agtgactgacagtccacaggcttcc

SEQ ID NO: 4577638 - DNA, 25 bp, Homo sapien
tgattaattaccctcaatcccagct

SEQ ID NO: 4577639 - DNA, 25 bp, Homo sapien
cagtctcctttattgaggagggaac

SEQ ID NO: 4577640 - DNA, 25 bp, Homo sapien
cctgggagcatgctctggatctctg

SEQ ID NO: 4577641 - DNA, 25 bp, Homo sapien
cagagcaccgccctgcaggcctcct

SEQ ID NO: 4577642 - DNA, 25 bp, Homo sapien
ctcctgggagcatgctctggatctc

SEQ ID NO: 4577643 - DNA, 25 bp, Homo sapien
gggccacactccctcagagcaccgc

SEQ ID NO: 4577644 - DNA, 25 bp, Homo sapien
ggaagtaggaattcaaggcctggat

SEQ ID NO: 4577645 - DNA, 25 bp, Homo sapien
tgggggttggaattaggtccatgga

SEQ ID NO: 4577646 - DNA, 25 bp, Homo sapien
ctggatcttgatatccttttgtcct

SEQ ID NO: 4577647 - DNA, 25 bp, Homo sapien
tcatcccggggcacccccagcgcag

SEQ ID NO: 4577648 - DNA, 25 bp, Homo sapien
tgatgggcaggacccagcttcccac

SEQ ID NO: 4577649 - DNA, 25 bp, Homo sapien
gttcaccaagtcctacctcatcccg

SEQ ID NO: 4577650 - DNA, 25 bp, Homo sapien
gctggtccctctgatgggcaggacc

SEQ ID NO: 4577651 - DNA, 25 bp, Homo sapien
cattgagagtttggacgtgtccgtc

SEQ ID NO: 4577652 - DNA, 25 bp, Homo sapien
gcaccatttggccagacattgagag

SEQ ID NO: 4577653 - DNA, 25 bp, Homo sapien
agagcccacgtcgacgagcaccatt

SEQ ID NO: 4577654 - DNA, 25 bp, Homo sapien
tggacgtgtccgtctgtccaggctc

SEQ ID NO: 4577655 - DNA, 25 bp, Homo sapien
ctggaatgttcagcagaacaccacc

SEQ ID NO: 4577656 - DNA, 25 bp, Homo sapien
aatgttcagcagaacaccaccactg

SEQ ID NO: 4577657 - DNA, 25 bp, Homo sapien
ctcagtcgaggaagccctggaatgt

SEQ ID NO: 4577658 - DNA, 25 bp, Homo sapien
ggaagccctggaatgttcagcagaa

SEQ ID NO: 4577659 - DNA, 25 bp, Homo sapien
gtgtggcagcgtggctcgcattcag

SEQ ID NO: 4577660 - DNA, 25 bp, Homo sapien
ggcagtgggagacaccgcgcgtggc

SEQ ID NO: 4577661 - DNA, 25 bp, Homo sapien
gacaccgcgcgtggcgtgggtgtgt

SEQ ID NO: 4577662 - DNA, 25 bp, Homo sapien
gtggcagcgtggctcgcattcagtc

SEQ ID NO: 4577663 - DNA, 25 bp, Homo sapien
cactgggcccatttgaaggtgtctc

SEQ ID NO: 4577664 - DNA, 25 bp, Homo sapien
gcacactgtgtctttccggtcattg

SEQ ID NO: 4577665 - DNA, 25 bp, Homo sapien
tttggtcacaaaggatggactcttc

SEQ ID NO: 4577666 - DNA, 25 bp, Homo sapien
tggccacaccgttggagtgaaccct

SEQ ID NO: 4577667 - DNA, 25 bp, Homo sapien
ttctctggcgttaccccagaagctc

SEQ ID NO: 4577668 - DNA, 25 bp, Homo sapien
aagcctgcccggcagcaagccacag

SEQ ID NO: 4577669 - DNA, 25 bp, Homo sapien
ccagaagctcctagaaaagcctgcc

SEQ ID NO: 4577670 - DNA, 25 bp, Homo sapien
gcaggtttctctggcgttaccccag

SEQ ID NO: 4577671 - DNA, 25 bp, Homo sapien
cgccggcggctgaactaaaatctca

SEQ ID NO: 4577672 - DNA, 25 bp, Homo sapien
tgaagaactcagcacgaacgcagct

SEQ ID NO: 4577673 - DNA, 25 bp, Homo sapien
tgtgtccaatcttcagccctggagg

SEQ ID NO: 4577674 - DNA, 25 bp, Homo sapien
tcacgaggtgaataacagggcagtt

SEQ ID NO: 4577675 - DNA, 25 bp, Homo sapien
tcagaatggccagatgacctcgagg

SEQ ID NO: 4577676 - DNA, 25 bp, Homo sapien
ggcactgtccgatggcattagggca

SEQ ID NO: 4577677 - DNA, 25 bp, Homo sapien
gaaatgtctaaagcccagtgcctaa

SEQ ID NO: 4577678 - DNA, 25 bp, Homo sapien
cattagggcagtaattgggccaacc

SEQ ID NO: 4577679 - DNA, 25 bp, Homo sapien
aggacccttcagctcactgggcggg

SEQ ID NO: 4577680 - DNA, 25 bp, Homo sapien
caattcagcttttctatgccaggac

SEQ ID NO: 4577681 - DNA, 25 bp, Homo sapien
tgacctcaatctcttgtgctgcaga

SEQ ID NO: 4577682 - DNA, 25 bp, Homo sapien
gctcaggaatccatttagaaccagt

SEQ ID NO: 4577683 - DNA, 25 bp, Homo sapien
gaaatggtatttaagcacaagccag

SEQ ID NO: 4577684 - DNA, 25 bp, Homo sapien
tctagagggtccacatatgctacct

SEQ ID NO: 4577685 - DNA, 25 bp, Homo sapien
cctattgagctcctcattgcaggag

SEQ ID NO: 4577686 - DNA, 25 bp, Homo sapien
caagccagtagctgttgccatcctg

SEQ ID NO: 4577687 - DNA, 25 bp, Homo sapien
tgtgcaggtgactgaagtccagaac

SEQ ID NO: 4577688 - DNA, 25 bp, Homo sapien
tccagaacacttgccctgaacccct

SEQ ID NO: 4577689 - DNA, 25 bp, Homo sapien
ctgaacccctgatccttcactccct

SEQ ID NO: 4577690 - DNA, 25 bp, Homo sapien
ttcactccctcttttaccctgagtc

SEQ ID NO: 4577691 - DNA, 25 bp, Homo sapien
aggcctcacatcgccctccatctcc

SEQ ID NO: 4577692 - DNA, 25 bp, Homo sapien
gggcaggcctcacatcgccctccat

SEQ ID NO: 4577693 - DNA, 25 bp, Homo sapien
agggcaggcctcacatcgccctcca

SEQ ID NO: 4577694 - DNA, 25 bp, Homo sapien
tggtggagtccacactgcagactcc

SEQ ID NO: 4577695 - DNA, 25 bp, Homo sapien
ggtggagtccacactgcagactcca

SEQ ID NO: 4577696 - DNA, 25 bp, Homo sapien
catttgcagactccgggggctggcc

SEQ ID NO: 4577697 - DNA, 25 bp, Homo sapien
tcatttgcagactccgggggctggc

SEQ ID NO: 4577698 - DNA, 25 bp, Homo sapien
ttcatttgcagactccgggggctgg

SEQ ID NO: 4577699 - DNA, 25 bp, Homo sapien
tttcatttgcagactccgggggctg

SEQ ID NO: 4577700 - DNA, 25 bp, Homo sapien
cgggcctccactttattgcacaagg

SEQ ID NO: 4577701 - DNA, 25 bp, Homo sapien
acagcccgggcctccactttattgc

SEQ ID NO: 4577702 - DNA, 25 bp, Homo sapien
ggagcttgggacccattaaacaatc

SEQ ID NO: 4577703 - DNA, 25 bp, Homo sapien
tggggagcttgggacccattaaaca

SEQ ID NO: 4577704 - DNA, 25 bp, Homo sapien
ggcagctcctcctgcgtgcactctg

SEQ ID NO: 4577705 - DNA, 25 bp, Homo sapien
tcctgcgtgcactctggcctgtgca

SEQ ID NO: 4577706 - DNA, 25 bp, Homo sapien
agctcctcctgcgtgcactctggcc

SEQ ID NO: 4577707 - DNA, 25 bp, Homo sapien
ctcctcctgcgtgcactctggcctg

SEQ ID NO: 4577708 - DNA, 25 bp, Homo sapien
caggacctggagtgtactggaagaa

SEQ ID NO: 4577709 - DNA, 25 bp, Homo sapien
gccagcgtgccttccaatattcagc

SEQ ID NO: 4577710 - DNA, 25 bp, Homo sapien
tcagccatctcctcatgaagcctgg

SEQ ID NO: 4577711 - DNA, 25 bp, Homo sapien
tgattcttgtgcctctagctctttc

SEQ ID NO: 4577712 - DNA, 25 bp, Homo sapien
gcttcaataatgaggaccagagaat

SEQ ID NO: 4577713 - DNA, 25 bp, Homo sapien
ggatccctctcttggctggactaag

SEQ ID NO: 4577714 - DNA, 25 bp, Homo sapien
gatcccagggtattcccaaatgttg

SEQ ID NO: 4577715 - DNA, 25 bp, Homo sapien
caacaggctgttgggtcatttggtc

SEQ ID NO: 4577716 - DNA, 25 bp, Homo sapien
gtagaagggatggtctgcctgttcc

SEQ ID NO: 4577717 - DNA, 25 bp, Homo sapien
tgggtagaagggatggtctgcctgt

SEQ ID NO: 4577718 - DNA, 25 bp, Homo sapien
gtgggtagaagggatggtctgcctg

SEQ ID NO: 4577719 - DNA, 25 bp, Homo sapien
gaagggatggtctgcctgttccctg

SEQ ID NO: 4577720 - DNA, 25 bp, Homo sapien
gggatccctgcatctggtgcctctc

SEQ ID NO: 4577721 - DNA, 25 bp, Homo sapien
tgggatccctgcatctggtgcctct

SEQ ID NO: 4577722 - DNA, 25 bp, Homo sapien
agctgggcccgagatacaccgcctc

SEQ ID NO: 4577723 - DNA, 25 bp, Homo sapien
ggcccgagatacaccgcctctccag

SEQ ID NO: 4577724 - DNA, 25 bp, Homo sapien
ctgggcccgagatacaccgcctctc

SEQ ID NO: 4577725 - DNA, 25 bp, Homo sapien
ccagctgggcccgagatacaccgcc

SEQ ID NO: 4577726 - DNA, 25 bp, Homo sapien
gcttgtgctcccgcctctgcagcac

SEQ ID NO: 4577727 - DNA, 25 bp, Homo sapien
tccggcactgcccgaagacggcttg

SEQ ID NO: 4577728 - DNA, 25 bp, Homo sapien
gcccgaagacggcttgccagctcgg

SEQ ID NO: 4577729 - DNA, 25 bp, Homo sapien
actgcccgaagacggcttgccagct

SEQ ID NO: 4577730 - DNA, 25 bp, Homo sapien
gctgggcatcaagtccatgggctct

SEQ ID NO: 4577731 - DNA, 25 bp, Homo sapien
gcttggtgggcagacacggtccaat

SEQ ID NO: 4577732 - DNA, 25 bp, Homo sapien
cccgaggaaataggagttccagaga

SEQ ID NO: 4577733 - DNA, 25 bp, Homo sapien
acacggtccaatgccccgaggaaat

SEQ ID NO: 4577734 - DNA, 25 bp, Homo sapien
gccagttagaagtgacaggctttcc

SEQ ID NO: 4577735 - DNA, 25 bp, Homo sapien
tgccagttagaagtgacaggctttc

SEQ ID NO: 4577736 - DNA, 25 bp, Homo sapien
ctgtcttgccagttagaagtgacag

SEQ ID NO: 4577737 - DNA, 25 bp, Homo sapien
tgtcttgccagttagaagtgacagg

SEQ ID NO: 4577738 - DNA, 25 bp, Homo sapien
tggaggtggagcaagcctcctctga

SEQ ID NO: 4577739 - DNA, 25 bp, Homo sapien
gagatatgctacagacctcaactcc

SEQ ID NO: 4577740 - DNA, 25 bp, Homo sapien
ggatgcagggcagcggcacctcccc

SEQ ID NO: 4577741 - DNA, 25 bp, Homo sapien
ctgaggggcagtggaggtggagcaa

SEQ ID NO: 4577742 - DNA, 25 bp, Homo sapien
ctgggggcagatctttctccaagtt

SEQ ID NO: 4577743 - DNA, 25 bp, Homo sapien
tgggggcagatctttctccaagttt

SEQ ID NO: 4577744 - DNA, 25 bp, Homo sapien
gaagctctaagggtagaatctcagg

SEQ ID NO: 4577745 - DNA, 25 bp, Homo sapien
ggtagaatctcaggcaggatggcct

SEQ ID NO: 4577746 - DNA, 25 bp, Homo sapien
aaagaatgaagctctaagggtagaa

SEQ ID NO: 4577747 - DNA, 25 bp, Homo sapien
taagggtagaatctcaggcaggatg

SEQ ID NO: 4577748 - DNA, 25 bp, Homo sapien
gaagcggggggctcccctgcgacac

SEQ ID NO: 4577749 - DNA, 25 bp, Homo sapien
cgcagccgcagctcggaagcggggg

SEQ ID NO: 4577750 - DNA, 25 bp, Homo sapien
cctgcgacacctccccgcttcaggg

SEQ ID NO: 4577751 - DNA, 25 bp, Homo sapien
cgcagctcggaagcggggggctccc

SEQ ID NO: 4577752 - DNA, 25 bp, Homo sapien
gcttcactgcgcgacgctcgcgagg

SEQ ID NO: 4577753 - DNA, 25 bp, Homo sapien
ggacgcgcacgctcacagtgaggtc

SEQ ID NO: 4577754 - DNA, 25 bp, Homo sapien
aattaggcgccacgccctgtcgctt

SEQ ID NO: 4577755 - DNA, 25 bp, Homo sapien
tgtcagggattttggtgaccccacg

SEQ ID NO: 4577756 - DNA, 25 bp, Homo sapien
gagaacaatgcccgtcctctccgcg

SEQ ID NO: 4577757 - DNA, 25 bp, Homo sapien
gaacaatgcccgtcctctccgcgcg

SEQ ID NO: 4577758 - DNA, 25 bp, Homo sapien
gtcggggcgacggagcgggcccagc

SEQ ID NO: 4577759 - DNA, 25 bp, Homo sapien
ctctccgcgcgcaggagggagttgg

SEQ ID NO: 4577760 - DNA, 25 bp, Homo sapien
tcttcaggagcaaccgggaagcccc

SEQ ID NO: 4577761 - DNA, 25 bp, Homo sapien
gttcctcgtggcctagatgcatcac

SEQ ID NO: 4577762 - DNA, 25 bp, Homo sapien
gatgcatcactgtaagcgataccgc

SEQ ID NO: 4577763 - DNA, 25 bp, Homo sapien
ggccgccttcaaacagaacaatggg

SEQ ID NO: 4577764 - DNA, 25 bp, Homo sapien
gacagcgatacataccggtgtgaag

SEQ ID NO: 4577765 - DNA, 25 bp, Homo sapien
gggagcgccgtgacagcgatacata

SEQ ID NO: 4577766 - DNA, 25 bp, Homo sapien
tacataccggtgtgaagagcggagc

SEQ ID NO: 4577767 - DNA, 25 bp, Homo sapien
aagagcggagcccatcctttggaga

SEQ ID NO: 4577768 - DNA, 25 bp, Homo sapien
cgtcatcgtcggcgatcgcgggaga

SEQ ID NO: 4577769 - DNA, 25 bp, Homo sapien
ctcgtcatcgtcggcgatcgcggga

SEQ ID NO: 4577770 - DNA, 25 bp, Homo sapien
cggcgatcgcgggagagggggccat

SEQ ID NO: 4577771 - DNA, 25 bp, Homo sapien
catcgtcggcgatcgcgggagaggg

SEQ ID NO: 4577772 - DNA, 25 bp, Homo sapien
cggatcggcgattggctccaagagc

SEQ ID NO: 4577773 - DNA, 25 bp, Homo sapien
aagatgacaaggagggtcacctggt

SEQ ID NO: 4577774 - DNA, 25 bp, Homo sapien
cagcagccggagtgtggaagatgac

SEQ ID NO: 4577775 - DNA, 25 bp, Homo sapien
gtcacctggtgtgccggatcggcga

SEQ ID NO: 4577776 - DNA, 25 bp, Homo sapien
tgggtgaaggcacctttggcaaggt

SEQ ID NO: 4577777 - DNA, 25 bp, Homo sapien
gatcatccgcaacgtgggcaagtac

SEQ ID NO: 4577778 - DNA, 25 bp, Homo sapien
aatcaacgtgctcaaaaaaatcaag

SEQ ID NO: 4577779 - DNA, 25 bp, Homo sapien
gaggctgcccggctagaaatcaacg

SEQ ID NO: 4577780 - DNA, 25 bp, Homo sapien
gggaagtctcaggttgccctgaaga

SEQ ID NO: 4577781 - DNA, 25 bp, Homo sapien
gatgtctgactggttcaacttccac

SEQ ID NO: 4577782 - DNA, 25 bp, Homo sapien
ggttcaacttccacggtcacatgtg

SEQ ID NO: 4577783 - DNA, 25 bp, Homo sapien
gactggttcaacttccacggtcaca

SEQ ID NO: 4577784 - DNA, 25 bp, Homo sapien
ctgtgtgtcttgatgtctgactggt

SEQ ID NO: 4577785 - DNA, 25 bp, Homo sapien
catgatccaccgtaccaggtaagga

SEQ ID NO: 4577786 - DNA, 25 bp, Homo sapien
tagggcccatcccatcacacatgat

SEQ ID NO: 4577787 - DNA, 25 bp, Homo sapien
atcacacatgatccaccgtaccagg

SEQ ID NO: 4577788 - DNA, 25 bp, Homo sapien
atgatggagaagatcctagggccca

SEQ ID NO: 4577789 - DNA, 25 bp, Homo sapien
ggcctagtttgggatgagaacagct

SEQ ID NO: 4577790 - DNA, 25 bp, Homo sapien
cggccggtatgtgaaggagaactgc

SEQ ID NO: 4577791 - DNA, 25 bp, Homo sapien
gatgagaacagctctgacggccggt

SEQ ID NO: 4577792 - DNA, 25 bp, Homo sapien
gaacagctctgacggccggtatgtg

SEQ ID NO: 4577793 - DNA, 25 bp, Homo sapien
tgctgagcagtcctagatggcacct

SEQ ID NO: 4577794 - DNA, 25 bp, Homo sapien
tgttagaatttgaccctgcccagcg

SEQ ID NO: 4577795 - DNA, 25 bp, Homo sapien
gcaagacacctagtagcctggcaag

SEQ ID NO: 4577796 - DNA, 25 bp, Homo sapien
agttacatgctccaagactccctgg

SEQ ID NO: 4577797 - DNA, 25 bp, Homo sapien
tcatgacagcctacagagcaagtca

SEQ ID NO: 4577798 - DNA, 25 bp, Homo sapien
agacagcacctcatgacagcctaca

SEQ ID NO: 4577799 - DNA, 25 bp, Homo sapien
gcacctcatgacagcctacagagca

SEQ ID NO: 4577800 - DNA, 25 bp, Homo sapien
ctacagagcaagtcacacggcacag

SEQ ID NO: 4577801 - DNA, 25 bp, Homo sapien
catgaatggagagtgcaggtctgcc

SEQ ID NO: 4577802 - DNA, 25 bp, Homo sapien
gaaagacttccctggctaagagcaa

SEQ ID NO: 4577803 - DNA, 25 bp, Homo sapien
tcctacaagggaagtgataacagcc

SEQ ID NO: 4577804 - DNA, 25 bp, Homo sapien
tggttccctaagagctgcatgagtg

SEQ ID NO: 4577805 - DNA, 25 bp, Homo sapien
cacaaatagatacggcctgcgtgct

SEQ ID NO: 4577806 - DNA, 25 bp, Homo sapien
ttgtaccagggttgatcgcgcagga

SEQ ID NO: 4577807 - DNA, 25 bp, Homo sapien
cgttctcagggcaatccaggcagtt

SEQ ID NO: 4577808 - DNA, 25 bp, Homo sapien
tctatgctgagtactggtgcccggt

SEQ ID NO: 4577809 - DNA, 25 bp, Homo sapien
gaaagagtgccatctgaaagtccct

SEQ ID NO: 4577810 - DNA, 25 bp, Homo sapien
gaaagtccctatgagcagagagcag

SEQ ID NO: 4577811 - DNA, 25 bp, Homo sapien
gaaccattgtcgtcctgagtgtgca

SEQ ID NO: 4577812 - DNA, 25 bp, Homo sapien
tagagaccaagtgcatgtcagccca

SEQ ID NO: 4577813 - DNA, 25 bp, Homo sapien
tgtgacagcatatccaggctcctca

SEQ ID NO: 4577814 - DNA, 25 bp, Homo sapien
tccaataggtgtctcaagctgagct

SEQ ID NO: 4577815 - DNA, 25 bp, Homo sapien
cactatgtgacctctggtggagtcc

SEQ ID NO: 4577816 - DNA, 25 bp, Homo sapien
gggcttgctgacacactgaccacat

SEQ ID NO: 4577817 - DNA, 25 bp, Homo sapien
taagactccttagaggcgaagcacc

SEQ ID NO: 4577818 - DNA, 25 bp, Homo sapien
cactgggtggcatgacgagaccatc

SEQ ID NO: 4577819 - DNA, 25 bp, Homo sapien
gaagcaccatccttacacacgtagt

SEQ ID NO: 4577820 - DNA, 25 bp, Homo sapien
gagaccatcaaactgctaaggaggg

SEQ ID NO: 4577821 - DNA, 25 bp, Homo sapien
tcttgctgaagagcgacagctcatt

SEQ ID NO: 4577822 - DNA, 25 bp, Homo sapien
gctagacacttgttggccttgggtc

SEQ ID NO: 4577823 - DNA, 25 bp, Homo sapien
gccactgtaggcctctggtgaacat

SEQ ID NO: 4577824 - DNA, 25 bp, Homo sapien
tggacatcatggttggctaggtgcc

SEQ ID NO: 4577825 - DNA, 25 bp, Homo sapien
agaagcagtatcagctacatacttg

SEQ ID NO: 4577826 - DNA, 25 bp, Homo sapien
ccttgcaccctataccagacaattg

SEQ ID NO: 4577827 - DNA, 25 bp, Homo sapien
ctataccagacaattgcctgtagca

SEQ ID NO: 4577828 - DNA, 25 bp, Homo sapien
gcagtatcagctacatacttgccaa

SEQ ID NO: 4577829 - DNA, 25 bp, Homo sapien
ctctcctcaactcctaataagctca

SEQ ID NO: 4577830 - DNA, 25 bp, Homo sapien
tcctcaactcctaataagctcacag

SEQ ID NO: 4577831 - DNA, 25 bp, Homo sapien
ctcctaataagctcacagcaagtac

SEQ ID NO: 4577832 - DNA, 25 bp, Homo sapien
ctaataagctcacagcaagtaccat

SEQ ID NO: 4577833 - DNA, 25 bp, Homo sapien
gctaagagactatttggatatctca

SEQ ID NO: 4577834 - DNA, 25 bp, Homo sapien
tatttggatatctcacaggtattcc

SEQ ID NO: 4577835 - DNA, 25 bp, Homo sapien
aagtttcagatccttatagctaaga

SEQ ID NO: 4577836 - DNA, 25 bp, Homo sapien
ccttatagctaagagactatttgga

SEQ ID NO: 4577837 - DNA, 25 bp, Homo sapien
agcaggagtctcaggcccgatggct

SEQ ID NO: 4577838 - DNA, 25 bp, Homo sapien
taatgaggacatctaggagatgggt

SEQ ID NO: 4577839 - DNA, 25 bp, Homo sapien
gatagttagcaggagtctcaggccc

SEQ ID NO: 4577840 - DNA, 25 bp, Homo sapien
aaaaggcagcttgccagaagaataa

SEQ ID NO: 4577841 - DNA, 25 bp, Homo sapien
gtcctccgaggagggtcagtgccat

SEQ ID NO: 4577842 - DNA, 25 bp, Homo sapien
ctgttaggtcctccgaggagggtca

SEQ ID NO: 4577843 - DNA, 25 bp, Homo sapien
agggtcagtgccatctgactggcac

SEQ ID NO: 4577844 - DNA, 25 bp, Homo sapien
tcagtgccatctgactggcacacac

SEQ ID NO: 4577845 - DNA, 25 bp, Homo sapien
tttatgcagctcataggaaatactt

SEQ ID NO: 4577846 - DNA, 25 bp, Homo sapien
tcatctccagtctccgctcaagggt

SEQ ID NO: 4577847 - DNA, 25 bp, Homo sapien
ttctcagccacggacaacagctttt

SEQ ID NO: 4577848 - DNA, 25 bp, Homo sapien
aatacttgggacaaccaggccagag

SEQ ID NO: 4577849 - DNA, 25 bp, Homo sapien
gtcaacagctgattaaaacagccat

SEQ ID NO: 4577850 - DNA, 25 bp, Homo sapien
aatgtcagtcattggtatctcaggt

SEQ ID NO: 4577851 - DNA, 25 bp, Homo sapien
gtcattggtatctcaggtgccagtg

SEQ ID NO: 4577852 - DNA, 25 bp, Homo sapien
gcatgtcaacagctgattaaaacag

SEQ ID NO: 4577853 - DNA, 25 bp, Homo sapien
ttatatgccataggtttgaagaaaa

SEQ ID NO: 4577854 - DNA, 25 bp, Homo sapien
tatatgccataggtttgaagaaaag

SEQ ID NO: 4577855 - DNA, 25 bp, Homo sapien
tatgccataggtttgaagaaaaggt

SEQ ID NO: 4577856 - DNA, 25 bp, Homo sapien
tgccataggtttgaagaaaaggttc

SEQ ID NO: 4577857 - DNA, 25 bp, Homo sapien
tcatcatggcggtaccgagtgggcc

SEQ ID NO: 4577858 - DNA, 25 bp, Homo sapien
tatgatccgtcgatagacaatgggc

SEQ ID NO: 4577859 - DNA, 25 bp, Homo sapien
cacagctgccttgtcaaaaagagcc

SEQ ID NO: 4577860 - DNA, 25 bp, Homo sapien
tgcagaactccttgctcacgttgtg

SEQ ID NO: 4577861 - DNA, 25 bp, Homo sapien
tataaaagagttacgaagcaagggc

SEQ ID NO: 4577862 - DNA, 25 bp, Homo sapien
gaactgaaaatgaactatcctggaa

SEQ ID NO: 4577863 - DNA, 25 bp, Homo sapien
aaagggcaacttgagattaactaca

SEQ ID NO: 4577864 - DNA, 25 bp, Homo sapien
gccaactttgttacatgactgaaaa

SEQ ID NO: 4577865 - DNA, 25 bp, Homo sapien
caagggccatgcaagtactgcaggc

SEQ ID NO: 4577866 - DNA, 25 bp, Homo sapien
aattacaagggccatgcaagtactg

SEQ ID NO: 4577867 - DNA, 25 bp, Homo sapien
ctttcaattacaagggccatgcaag

SEQ ID NO: 4577868 - DNA, 25 bp, Homo sapien
ttacaagggccatgcaagtactgca

SEQ ID NO: 4577869 - DNA, 25 bp, Homo sapien
gtaacattttactgccctatgatct

SEQ ID NO: 4577870 - DNA, 25 bp, Homo sapien
tatagcttcatcaatctactagtct

SEQ ID NO: 4577871 - DNA, 25 bp, Homo sapien
tattctgagccacgtcttattgcca

SEQ ID NO: 4577872 - DNA, 25 bp, Homo sapien
tacttacagggctcaatgagtggaa

SEQ ID NO: 4577873 - DNA, 25 bp, Homo sapien
ttttaactccgtaatgtcacctgcc

SEQ ID NO: 4577874 - DNA, 25 bp, Homo sapien
ggaaacttttggactgactcaagga

SEQ ID NO: 4577875 - DNA, 25 bp, Homo sapien
cattctgattgatgcccacttggca

SEQ ID NO: 4577876 - DNA, 25 bp, Homo sapien
gtgcctgtcgacatagctctttgag

SEQ ID NO: 4577877 - DNA, 25 bp, Homo sapien
caaatgcaagatctaagggagaggg

SEQ ID NO: 4577878 - DNA, 25 bp, Homo sapien
agcagattatttggctctgacaagg

SEQ ID NO: 4577879 - DNA, 25 bp, Homo sapien
caacaatacctagtggcaaatgcaa

SEQ ID NO: 4577880 - DNA, 25 bp, Homo sapien
tactgtcagtgaatttggccattag

SEQ ID NO: 4577881 - DNA, 25 bp, Homo sapien
cagacctaggttcaagctccacaga

SEQ ID NO: 4577882 - DNA, 25 bp, Homo sapien
cagaagagtcagtcaggacactcac

SEQ ID NO: 4577883 - DNA, 25 bp, Homo sapien
ccaccaggttggattcagaagagtc

SEQ ID NO: 4577884 - DNA, 25 bp, Homo sapien
gagaatactagcaatcagacctagg

SEQ ID NO: 4577885 - DNA, 25 bp, Homo sapien
tcttccctgatagacacccaagcta

SEQ ID NO: 4577886 - DNA, 25 bp, Homo sapien
ggctgacctgatccacagctgacac

SEQ ID NO: 4577887 - DNA, 25 bp, Homo sapien
gctatctccacaattgatggacaca

SEQ ID NO: 4577888 - DNA, 25 bp, Homo sapien
tcactccattatggaaaggccgggt

SEQ ID NO: 4577889 - DNA, 25 bp, Homo sapien
gtggagcaacaaaaaccgtcattca

SEQ ID NO: 4577890 - DNA, 25 bp, Homo sapien
ctgtcagaatggccgaaatccaaaa

SEQ ID NO: 4577891 - DNA, 25 bp, Homo sapien
tgtcagaatggccgaaatccaaaac

SEQ ID NO: 4577892 - DNA, 25 bp, Homo sapien
gagcaacaaaaaccgtcattcattg

SEQ ID NO: 4577893 - DNA, 25 bp, Homo sapien
caaattcggaagcaatcaagacatc

SEQ ID NO: 4577894 - DNA, 25 bp, Homo sapien
tatgattccagctacaaggttttct

SEQ ID NO: 4577895 - DNA, 25 bp, Homo sapien
tgaatgaactatggcacacccagac

SEQ ID NO: 4577896 - DNA, 25 bp, Homo sapien
caccataaatctgcacgtggatgtt

SEQ ID NO: 4577897 - DNA, 25 bp, Homo sapien
ttgtaattccaggagtttgggaagc

SEQ ID NO: 4577898 - DNA, 25 bp, Homo sapien
ccaggctgggcaacacagcaagacc

SEQ ID NO: 4577899 - DNA, 25 bp, Homo sapien
aggaattcaagaccaggctgggcaa

SEQ ID NO: 4577900 - DNA, 25 bp, Homo sapien
caaggcaggagcatcacttgagtcc

SEQ ID NO: 4577901 - DNA, 25 bp, Homo sapien
gaaatgttttaagactagtgaccca

SEQ ID NO: 4577902 - DNA, 25 bp, Homo sapien
tataagatctaacagattccacagt

SEQ ID NO: 4577903 - DNA, 25 bp, Homo sapien
tagtgacccagcctatacctgaaag

SEQ ID NO: 4577904 - DNA, 25 bp, Homo sapien
gatgaaaagtttcaggtgccaactt

SEQ ID NO: 4577905 - DNA, 25 bp, Homo sapien
acagcatcggccttcaccaccgccg

SEQ ID NO: 4577906 - DNA, 25 bp, Homo sapien
accagaggacccacagaagaattct

SEQ ID NO: 4577907 - DNA, 25 bp, Homo sapien
aagccgaccactcaacaccagagga

SEQ ID NO: 4577908 - DNA, 25 bp, Homo sapien
ctccgcgccgacgggcctggagctc

SEQ ID NO: 4577909 - DNA, 25 bp, Homo sapien
ctccccagcctcgatgcctgggccc

SEQ ID NO: 4577910 - DNA, 25 bp, Homo sapien
ggaatcggggctctacccacgactc

SEQ ID NO: 4577911 - DNA, 25 bp, Homo sapien
tggctggaatcggggctctacccac

SEQ ID NO: 4577912 - DNA, 25 bp, Homo sapien
ccacgactccccagcctcgatgcct

SEQ ID NO: 4577913 - DNA, 25 bp, Homo sapien
tcagcctagttcaagcagtgagact

SEQ ID NO: 4577914 - DNA, 25 bp, Homo sapien
tcacagagccagctaggtactgggc

SEQ ID NO: 4577915 - DNA, 25 bp, Homo sapien
ttagaccacataggccagcctgctg

SEQ ID NO: 4577916 - DNA, 25 bp, Homo sapien
tggcagctcccaattgtcaaagatt

SEQ ID NO: 4577917 - DNA, 25 bp, Homo sapien
gcgcagctgcatttggaagtgctca

SEQ ID NO: 4577918 - DNA, 25 bp, Homo sapien
ctaagagcgcagctgcatttggaag

SEQ ID NO: 4577919 - DNA, 25 bp, Homo sapien
agagcgcagctgcatttggaagtgc

SEQ ID NO: 4577920 - DNA, 25 bp, Homo sapien
cgcagctgcatttggaagtgctcac

SEQ ID NO: 4577921 - DNA, 25 bp, Homo sapien
agagaaagacctcccagcgggcaat

SEQ ID NO: 4577922 - DNA, 25 bp, Homo sapien
caccttgtcgatagcaccatcaggg

SEQ ID NO: 4577923 - DNA, 25 bp, Homo sapien
ttccacccgttgcagcaggatagcc

SEQ ID NO: 4577924 - DNA, 25 bp, Homo sapien
ggtctcaccgatacacttccgcttg

SEQ ID NO: 4577925 - DNA, 25 bp, Homo sapien
atgtaaaagcctttcaaacttgtgt

SEQ ID NO: 4577926 - DNA, 25 bp, Homo sapien
gacacaacgccccttggggatgtaa

SEQ ID NO: 4577927 - DNA, 25 bp, Homo sapien
tggtcatggttgatctgccactggt

SEQ ID NO: 4577928 - DNA, 25 bp, Homo sapien
cactggtttacaaagacacaacgcc

SEQ ID NO: 4577929 - DNA, 25 bp, Homo sapien
tatgtggtccggagtaagatcagta

SEQ ID NO: 4577930 - DNA, 25 bp, Homo sapien
tcccactaaccctaatcaggtatgt

SEQ ID NO: 4577931 - DNA, 25 bp, Homo sapien
taagatcagtaacagacagcagtgg

SEQ ID NO: 4577932 - DNA, 25 bp, Homo sapien
cctaatcaggtatgtggtccggagt

SEQ ID NO: 4577933 - DNA, 25 bp, Homo sapien
gagtgtcggaaggtctccaggatga

SEQ ID NO: 4577934 - DNA, 25 bp, Homo sapien
gaacacagggacaagatggatgcag

SEQ ID NO: 4577935 - DNA, 25 bp, Homo sapien
tgacccctttgaagggagccactac

SEQ ID NO: 4577936 - DNA, 25 bp, Homo sapien
ccctggcactgacccctttgaaggg

SEQ ID NO: 4577937 - DNA, 25 bp, Homo sapien
caggggctgcctagacctggccaga

SEQ ID NO: 4577938 - DNA, 25 bp, Homo sapien
ccaggagatagcagttgtgactgtg

SEQ ID NO: 4577939 - DNA, 25 bp, Homo sapien
tgtaccctggggttcatcaccaaat

SEQ ID NO: 4577940 - DNA, 25 bp, Homo sapien
tcatcaccaaatacatgaggctcca

SEQ ID NO: 4577941 - DNA, 25 bp, Homo sapien
gatagcagttgtgactgtgtcaaac

SEQ ID NO: 4577942 - DNA, 25 bp, Homo sapien
cattggcgttctcatccagctgctt

SEQ ID NO: 4577943 - DNA, 25 bp, Homo sapien
ctggacattggcgttctcatccagc

SEQ ID NO: 4577944 - DNA, 25 bp, Homo sapien
caagacgatgttaatgatcttctca

SEQ ID NO: 4577945 - DNA, 25 bp, Homo sapien
gctccaaagaggtccaagacgatgt

SEQ ID NO: 4577946 - DNA, 25 bp, Homo sapien
tcagcatgtgcccaatcagaggcca

SEQ ID NO: 4577947 - DNA, 25 bp, Homo sapien
tgcaacgtgcttatcaggacctcag

SEQ ID NO: 4577948 - DNA, 25 bp, Homo sapien
tgtggagccaattcggatctgcagc

SEQ ID NO: 4577949 - DNA, 25 bp, Homo sapien
tgggctgaaggacatgctctgacca

SEQ ID NO: 4577950 - DNA, 25 bp, Homo sapien
ccagaagaaactccgtggccgacat

SEQ ID NO: 4577951 - DNA, 25 bp, Homo sapien
agaggccagaagaaactccgtggcc

SEQ ID NO: 4577952 - DNA, 25 bp, Homo sapien
gattacccagaataccagacagaag

SEQ ID NO: 4577953 - DNA, 25 bp, Homo sapien
tgaggccctgattacccagaatacc

SEQ ID NO: 4577954 - DNA, 25 bp, Homo sapien
gatcagtgtagggatcttggaggtg

SEQ ID NO: 4577955 - DNA, 25 bp, Homo sapien
gggtggactcttggagcctgggatc

SEQ ID NO: 4577956 - DNA, 25 bp, Homo sapien
ggaagggtggactcttggagcctgg

SEQ ID NO: 4577957 - DNA, 25 bp, Homo sapien
aagggtggactcttggagcctggga

SEQ ID NO: 4577958 - DNA, 25 bp, Homo sapien
gtggactcttggagcctgggatcac

SEQ ID NO: 4577959 - DNA, 25 bp, Homo sapien
gccacctttataggcgggcttgtac

SEQ ID NO: 4577960 - DNA, 25 bp, Homo sapien
ggcttgtacgtgtggccacgcctcc

SEQ ID NO: 4577961 - DNA, 25 bp, Homo sapien
tataggcgggcttgtacgtgtggcc

SEQ ID NO: 4577962 - DNA, 25 bp, Homo sapien
actgccacctttataggcgggcttg

SEQ ID NO: 4577963 - DNA, 25 bp, Homo sapien
cactggggttacaagagatgttgca

SEQ ID NO: 4577964 - DNA, 25 bp, Homo sapien
tccacacccctggactggtgcactg

SEQ ID NO: 4577965 - DNA, 25 bp, Homo sapien
ccgtatcttggctaacagttcacaa

SEQ ID NO: 4577966 - DNA, 25 bp, Homo sapien
acttctcatcaccaagccgtatctt

SEQ ID NO: 4577967 - DNA, 25 bp, Homo sapien
caaattgtatctccagaagacccca

SEQ ID NO: 4577968 - DNA, 25 bp, Homo sapien
taaatggccaccatccgaaccactg

SEQ ID NO: 4577969 - DNA, 25 bp, Homo sapien
gaaccactgtgggaggcaaattgta

SEQ ID NO: 4577970 - DNA, 25 bp, Homo sapien
catccgaaccactgtgggaggcaaa

SEQ ID NO: 4577971 - DNA, 25 bp, Homo sapien
cagttccgcgtgggtggggaggcct

SEQ ID NO: 4577972 - DNA, 25 bp, Homo sapien
gttccgcgtgggtggggaggcctca

SEQ ID NO: 4577973 - DNA, 25 bp, Homo sapien
ttccgcgtgggtggggaggcctcac

SEQ ID NO: 4577974 - DNA, 25 bp, Homo sapien
tccgcgtgggtggggaggcctcaca

SEQ ID NO: 4577975 - DNA, 25 bp, Homo sapien
cattcttaaagtgtcgaatgacttc

SEQ ID NO: 4577976 - DNA, 25 bp, Homo sapien
cttctagtgtagaattgtgcaacca

SEQ ID NO: 4577977 - DNA, 25 bp, Homo sapien
acttacattcttaaagtgtcgaatg

SEQ ID NO: 4577978 - DNA, 25 bp, Homo sapien
gtgtcgaatgacttctagtgtagaa

SEQ ID NO: 4577979 - DNA, 25 bp, Homo sapien
cacccattagcagtccctccacatt

SEQ ID NO: 4577980 - DNA, 25 bp, Homo sapien
caccagccctggcaactgctaatct

SEQ ID NO: 4577981 - DNA, 25 bp, Homo sapien
tgcccggcccacaattaattttaga

SEQ ID NO: 4577982 - DNA, 25 bp, Homo sapien
ctatggatttgccttctctaaacat

SEQ ID NO: 4577983 - DNA, 25 bp, Homo sapien
ggcagacccacctgggtgcggttct

SEQ ID NO: 4577984 - DNA, 25 bp, Homo sapien
tttcggggacagaatgcagcttcct

SEQ ID NO: 4577985 - DNA, 25 bp, Homo sapien
atgtgcttttcattggtgagcttgg

SEQ ID NO: 4577986 - DNA, 25 bp, Homo sapien
gagacccaggatccacagtgtgaca

SEQ ID NO: 4577987 - DNA, 25 bp, Homo sapien
tgttggagggcacaagcaacttggc

SEQ ID NO: 4577988 - DNA, 25 bp, Homo sapien
cattttctcatggtgctacgcggtc

SEQ ID NO: 4577989 - DNA, 25 bp, Homo sapien
ccaactgaatgtgggttccaggccc

SEQ ID NO: 4577990 - DNA, 25 bp, Homo sapien
gttactatgagtcccaaaagcagcc

SEQ ID NO: 4577991 - DNA, 25 bp, Homo sapien
gcttggatttcgtgtgccgctgcca

SEQ ID NO: 4577992 - DNA, 25 bp, Homo sapien
ttgtaataaaccacgccatgaggac

SEQ ID NO: 4577993 - DNA, 25 bp, Homo sapien
cccgccttgtgagatggaattgtaa

SEQ ID NO: 4577994 - DNA, 25 bp, Homo sapien
gttgcactgtttgcatgcgcccgag

SEQ ID NO: 4577995 - DNA, 25 bp, Homo sapien
agagaaacaatgaatgatactcttt

SEQ ID NO: 4577996 - DNA, 25 bp, Homo sapien
agaaacaatgaatgatactctttac

SEQ ID NO: 4577997 - DNA, 25 bp, Homo sapien
gagaaacaatgaatgatactcttta

SEQ ID NO: 4577998 - DNA, 25 bp, Homo sapien
tagagaaacaatgaatgatactctt

SEQ ID NO: 4577999 - DNA, 25 bp, Homo sapien
tacaaatcaccaacacccgctgatt

SEQ ID NO: 4578000 - DNA, 25 bp, Homo sapien
ggacagacagctcttgcccaaggaa

SEQ ID NO: 4578001 - DNA, 25 bp, Homo sapien
ggcagaagggctacaaatcaccaac

SEQ ID NO: 4578002 - DNA, 25 bp, Homo sapien
gtcctcataagtgcccatgctgtgg

SEQ ID NO: 4578003 - DNA, 25 bp, Homo sapien
ttggagtgccccattccagtgcaaa

SEQ ID NO: 4578004 - DNA, 25 bp, Homo sapien
tgaggaccaaggaaccctcctgagt

SEQ ID NO: 4578005 - DNA, 25 bp, Homo sapien
gattaacctaaagtaccaagatggc

SEQ ID NO: 4578006 - DNA, 25 bp, Homo sapien
caaaaatgatagagggctgcatgcc

SEQ ID NO: 4578007 - DNA, 25 bp, Homo sapien
ttctagggtcactgaagggtgcaag

SEQ ID NO: 4578008 - DNA, 25 bp, Homo sapien
tcttctagggtcactgaagggtgca

SEQ ID NO: 4578009 - DNA, 25 bp, Homo sapien
cttctagggtcactgaagggtgcaa

SEQ ID NO: 4578010 - DNA, 25 bp, Homo sapien
ctccttggatggaggatcgacccca

SEQ ID NO: 4578011 - DNA, 25 bp, Homo sapien
ccttggatggaggatcgaccccagg

SEQ ID NO: 4578012 - DNA, 25 bp, Homo sapien
atggaggatcgaccccagggcagga

SEQ ID NO: 4578013 - DNA, 25 bp, Homo sapien
ccctccttggatggaggatcgaccc

SEQ ID NO: 4578014 - DNA, 25 bp, Homo sapien
gattccgacagtccctctttgtcca

SEQ ID NO: 4578015 - DNA, 25 bp, Homo sapien
gaacagattccgacagtccctcttt

SEQ ID NO: 4578016 - DNA, 25 bp, Homo sapien
agctacgaacagattccgacagtcc

SEQ ID NO: 4578017 - DNA, 25 bp, Homo sapien
tccgacagtccctctttgtccaggg

SEQ ID NO: 4578018 - DNA, 25 bp, Homo sapien
ctgtgggatgtgaaggcagcacaag

SEQ ID NO: 4578019 - DNA, 25 bp, Homo sapien
acgagccacagcgcagtgccgagca

SEQ ID NO: 4578020 - DNA, 25 bp, Homo sapien
cgagccacagcgcagtgccgagcaa

SEQ ID NO: 4578021 - DNA, 25 bp, Homo sapien
acacgagccacagcgcagtgccgag

SEQ ID NO: 4578022 - DNA, 25 bp, Homo sapien
gagccacagcgcagtgccgagcaag

SEQ ID NO: 4578023 - DNA, 25 bp, Homo sapien
tccttcaagtattcagctcgggcca

SEQ ID NO: 4578024 - DNA, 25 bp, Homo sapien
gctccttcaagtattcagctcgggc

SEQ ID NO: 4578025 - DNA, 25 bp, Homo sapien
aagtattcagctcgggccatgaggt

SEQ ID NO: 4578026 - DNA, 25 bp, Homo sapien
ttcaagtattcagctcgggccatga

SEQ ID NO: 4578027 - DNA, 25 bp, Homo sapien
catcagaacaacttgcctcctgagt

SEQ ID NO: 4578028 - DNA, 25 bp, Homo sapien
ccatcagaacaacttgcctcctgag

SEQ ID NO: 4578029 - DNA, 25 bp, Homo sapien
atcagaacaacttgcctcctgagtc

SEQ ID NO: 4578030 - DNA, 25 bp, Homo sapien
aggctgtgctggtacaggtccaggg

SEQ ID NO: 4578031 - DNA, 25 bp, Homo sapien
gctgtgctggtacaggtccagggca

SEQ ID NO: 4578032 - DNA, 25 bp, Homo sapien
agcaacagcagtagctcccccaggc

SEQ ID NO: 4578033 - DNA, 25 bp, Homo sapien
ctgtgctggtacaggtccagggcat

SEQ ID NO: 4578034 - DNA, 25 bp, Homo sapien
gtcatggcctgggtatctccctgcc

SEQ ID NO: 4578035 - DNA, 25 bp, Homo sapien
ccaggctgcttagggtcatggcctg

SEQ ID NO: 4578036 - DNA, 25 bp, Homo sapien
caggctgcttagggtcatggcctgg

SEQ ID NO: 4578037 - DNA, 25 bp, Homo sapien
gggtcatggcctgggtatctccctg

SEQ ID NO: 4578038 - DNA, 25 bp, Homo sapien
ctggacccctcccactggcacaaac

SEQ ID NO: 4578039 - DNA, 25 bp, Homo sapien
aggaggcgtggcttgtcccgggcca

SEQ ID NO: 4578040 - DNA, 25 bp, Homo sapien
ccagggcagctaggaggcgtggctt

SEQ ID NO: 4578041 - DNA, 25 bp, Homo sapien
cagctaggaggcgtggcttgtcccg

SEQ ID NO: 4578042 - DNA, 25 bp, Homo sapien
aggcgtggcttgtcccgggccatct

SEQ ID NO: 4578043 - DNA, 25 bp, Homo sapien
ttgagctcctcagcccgggacacgt

SEQ ID NO: 4578044 - DNA, 25 bp, Homo sapien
cctcagcagggcctgattggaagag

SEQ ID NO: 4578045 - DNA, 25 bp, Homo sapien
tcagcccgggacacgtactgcccca

SEQ ID NO: 4578046 - DNA, 25 bp, Homo sapien
ggcctgattggaagaggagacgatg

SEQ ID NO: 4578047 - DNA, 25 bp, Homo sapien
gggctgtctcaccagctacccttgc

SEQ ID NO: 4578048 - DNA, 25 bp, Homo sapien
cattgttagtgactgcctcaagcta

SEQ ID NO: 4578049 - DNA, 25 bp, Homo sapien
gcctcaagctataaacatgtcaggg

SEQ ID NO: 4578050 - DNA, 25 bp, Homo sapien
tctccctttgcattgttagtgactg

SEQ ID NO: 4578051 - DNA, 25 bp, Homo sapien
cccacttcctcatggggactctcac

SEQ ID NO: 4578052 - DNA, 25 bp, Homo sapien
ccctgcccccccacttcctcatggg

SEQ ID NO: 4578053 - DNA, 25 bp, Homo sapien
tgcccccccacttcctcatggggac

SEQ ID NO: 4578054 - DNA, 25 bp, Homo sapien
ccccccacttcctcatggggactct

SEQ ID NO: 4578055 - DNA, 25 bp, Homo sapien
tttgccttaattgcctccttccgct

SEQ ID NO: 4578056 - DNA, 25 bp, Homo sapien
ctccttccgctgggcatccacttca

SEQ ID NO: 4578057 - DNA, 25 bp, Homo sapien
tccttccgctgggcatccacttcat

SEQ ID NO: 4578058 - DNA, 25 bp, Homo sapien
taattgcctccttccgctgggcatc

SEQ ID NO: 4578059 - DNA, 25 bp, Homo sapien
ggcttcaggcatggcctgggactca

SEQ ID NO: 4578060 - DNA, 25 bp, Homo sapien
gcttcaggcatggcctgggactcac

SEQ ID NO: 4578061 - DNA, 25 bp, Homo sapien
gggcttcaggcatggcctgggactc

SEQ ID NO: 4578062 - DNA, 25 bp, Homo sapien
tacaaagaagtccagagccttgcag

SEQ ID NO: 4578063 - DNA, 25 bp, Homo sapien
caaagaagtccagagccttgcagta

SEQ ID NO: 4578064 - DNA, 25 bp, Homo sapien
acaaagaagtccagagccttgcagt

SEQ ID NO: 4578065 - DNA, 25 bp, Homo sapien
ccacactcaccaagatgggagatca

SEQ ID NO: 4578066 - DNA, 25 bp, Homo sapien
tgttgggtgagtcaccaattcacca

SEQ ID NO: 4578067 - DNA, 25 bp, Homo sapien
gatgggagatcagctcccctgagcc

SEQ ID NO: 4578068 - DNA, 25 bp, Homo sapien
caattcaccaccaacgggggcaagg

SEQ ID NO: 4578069 - DNA, 25 bp, Homo sapien
agccgctgcagtaggtcccggcagt

SEQ ID NO: 4578070 - DNA, 25 bp, Homo sapien
tcccggcagtctcgggagagcaggg

SEQ ID NO: 4578071 - DNA, 25 bp, Homo sapien
cccaggggtgcgcaaaaaagtcctg

SEQ ID NO: 4578072 - DNA, 25 bp, Homo sapien
tcctggaaggagatgcgacggctgg

SEQ ID NO: 4578073 - DNA, 25 bp, Homo sapien
gcagggacagatcacactgggctcc

SEQ ID NO: 4578074 - DNA, 25 bp, Homo sapien
cggcagggacagatcacactgggct

SEQ ID NO: 4578075 - DNA, 25 bp, Homo sapien
gaacggcagggacagatcacactgg

SEQ ID NO: 4578076 - DNA, 25 bp, Homo sapien
gggaacggcagggacagatcacact

SEQ ID NO: 4578077 - DNA, 25 bp, Homo sapien
accccagaggtacgcgttggacagg

SEQ ID NO: 4578078 - DNA, 25 bp, Homo sapien
gaaccccagaggtacgcgttggaca

SEQ ID NO: 4578079 - DNA, 25 bp, Homo sapien
cagaggtacgcgttggacaggtggg

SEQ ID NO: 4578080 - DNA, 25 bp, Homo sapien
aggggtctgcgaggaaccccagagg

SEQ ID NO: 4578081 - DNA, 25 bp, Homo sapien
caaaatgggcactgtgctgccagct

SEQ ID NO: 4578082 - DNA, 25 bp, Homo sapien
gctagaatcgtgtttctgggtcctt

SEQ ID NO: 4578083 - DNA, 25 bp, Homo sapien
ctatgctcctaggaaggctgggcct

SEQ ID NO: 4578084 - DNA, 25 bp, Homo sapien
tggagccctgagctgagctagaatc

SEQ ID NO: 4578085 - DNA, 25 bp, Homo sapien
cagcctggagcccatactccagtct

SEQ ID NO: 4578086 - DNA, 25 bp, Homo sapien
gacagcctggcacctcgacttccag

SEQ ID NO: 4578087 - DNA, 25 bp, Homo sapien
agcctggcacctcgacttccagcct

SEQ ID NO: 4578088 - DNA, 25 bp, Homo sapien
ctggcacctcgacttccagcctaga

SEQ ID NO: 4578089 - DNA, 25 bp, Homo sapien
tgcaggtcagaacgaggtctaaacc

SEQ ID NO: 4578090 - DNA, 25 bp, Homo sapien
ctgcaggtcagaacgaggtctaaac

SEQ ID NO: 4578091 - DNA, 25 bp, Homo sapien
gtcagaacgaggtctaaaccctcag

SEQ ID NO: 4578092 - DNA, 25 bp, Homo sapien
caggtcagaacgaggtctaaaccct

SEQ ID NO: 4578093 - DNA, 25 bp, Homo sapien
cggttgctacggatcttctcttcca

SEQ ID NO: 4578094 - DNA, 25 bp, Homo sapien
tccgagaacgacctggaggcaaagg

SEQ ID NO: 4578095 - DNA, 25 bp, Homo sapien
ctcgatgacccggttgctacggatc

SEQ ID NO: 4578096 - DNA, 25 bp, Homo sapien
ttccagctccgagaacgacctggag

SEQ ID NO: 4578097 - DNA, 25 bp, Homo sapien
atgggtcaagcctggcctgacgccc

SEQ ID NO: 4578098 - DNA, 25 bp, Homo sapien
tcaagcctggcctgacgcccctcag

SEQ ID NO: 4578099 - DNA, 25 bp, Homo sapien
gtcaagcctggcctgacgcccctca

SEQ ID NO: 4578100 - DNA, 25 bp, Homo sapien
ggaatgggtcaagcctggcctgacg

SEQ ID NO: 4578101 - DNA, 25 bp, Homo sapien
gggtgagaagcagggaaaagaggtc

SEQ ID NO: 4578102 - DNA, 25 bp, Homo sapien
gtgagaagcagggaaaagaggtctc

SEQ ID NO: 4578103 - DNA, 25 bp, Homo sapien
gagaagcagggaaaagaggtctcac

SEQ ID NO: 4578104 - DNA, 25 bp, Homo sapien
tcagggtgagaagcagggaaaagag

SEQ ID NO: 4578105 - DNA, 25 bp, Homo sapien
gcttctcatcccacggggacatgtg

SEQ ID NO: 4578106 - DNA, 25 bp, Homo sapien
ccatggaccagaggtccacgcgggc

SEQ ID NO: 4578107 - DNA, 25 bp, Homo sapien
cgggcgtcatactgccgctggcaca

SEQ ID NO: 4578108 - DNA, 25 bp, Homo sapien
gacatgtgttgtgcgaaaccaaagt

SEQ ID NO: 4578109 - DNA, 25 bp, Homo sapien
gagagatattccgttcatgcaggaa

SEQ ID NO: 4578110 - DNA, 25 bp, Homo sapien
ccgttcatgcaggaattgcagggcg

SEQ ID NO: 4578111 - DNA, 25 bp, Homo sapien
tattccgttcatgcaggaattgcag

SEQ ID NO: 4578112 - DNA, 25 bp, Homo sapien
atccaggtgagagatattccgttca

SEQ ID NO: 4578113 - DNA, 25 bp, Homo sapien
caggcagaatcctgcgggtatggat

SEQ ID NO: 4578114 - DNA, 25 bp, Homo sapien
tatggatgaagcgagacaggtcgcc

SEQ ID NO: 4578115 - DNA, 25 bp, Homo sapien
tgcatgaagacacgcgccaccttct

SEQ ID NO: 4578116 - DNA, 25 bp, Homo sapien
ccctgcgcaaaactccatgatgagg

SEQ ID NO: 4578117 - DNA, 25 bp, Homo sapien
agagaggcggcctgaagagagtgtc

SEQ ID NO: 4578118 - DNA, 25 bp, Homo sapien
cggcctgaagagagtgtcccttctc

SEQ ID NO: 4578119 - DNA, 25 bp, Homo sapien
ggcggcctgaagagagtgtcccttc

SEQ ID NO: 4578120 - DNA, 25 bp, Homo sapien
cctgaagagagtgtcccttctccag

SEQ ID NO: 4578121 - DNA, 25 bp, Homo sapien
gggatgtcgaatgcccttgaggatc

SEQ ID NO: 4578122 - DNA, 25 bp, Homo sapien
tatggctaccacttcacgagtgtcc

SEQ ID NO: 4578123 - DNA, 25 bp, Homo sapien
tctccgtgaggaggttctccaccga

SEQ ID NO: 4578124 - DNA, 25 bp, Homo sapien
ctccaccgatgccttgttcagactt

SEQ ID NO: 4578125 - DNA, 25 bp, Homo sapien
ggccagtgaggaatgctgattctgg

SEQ ID NO: 4578126 - DNA, 25 bp, Homo sapien
ggaatgctgattctggaatcctggc

SEQ ID NO: 4578127 - DNA, 25 bp, Homo sapien
gcacaccagcaccgggcttcccagc

SEQ ID NO: 4578128 - DNA, 25 bp, Homo sapien
gaatcctggcttcccgacacagcct

SEQ ID NO: 4578129 - DNA, 25 bp, Homo sapien
cgctcggtgaggatgaagccgtcca

SEQ ID NO: 4578130 - DNA, 25 bp, Homo sapien
ttggcgtaggccttgtacaccgtgg

SEQ ID NO: 4578131 - DNA, 25 bp, Homo sapien
gtacaccgtggcgtacgtgccgctg

SEQ ID NO: 4578132 - DNA, 25 bp, Homo sapien
taggccttgtacaccgtggcgtacg

SEQ ID NO: 4578133 - DNA, 25 bp, Homo sapien
gggtcacgcgccccgccagttcctg

SEQ ID NO: 4578134 - DNA, 25 bp, Homo sapien
cccgcgcgggcgcttcctcgctgcg

SEQ ID NO: 4578135 - DNA, 25 bp, Homo sapien
gccggaaatgcagcgcgcatcgggg

SEQ ID NO: 4578136 - DNA, 25 bp, Homo sapien
atcggggacgcggatccgcccggct

SEQ ID NO: 4578137 - DNA, 25 bp, Homo sapien
gggtagtcacagcaaacagggccaa

SEQ ID NO: 4578138 - DNA, 25 bp, Homo sapien
taagggtggactcctacgtgtccca

SEQ ID NO: 4578139 - DNA, 25 bp, Homo sapien
gaacctgtgagaggcttattcccag

SEQ ID NO: 4578140 - DNA, 25 bp, Homo sapien
cacggaaagtgcagctcagaaggca

SEQ ID NO: 4578141 - DNA, 25 bp, Homo sapien
tggaagctggcccctgtccgtcggt

SEQ ID NO: 4578142 - DNA, 25 bp, Homo sapien
tggcccctgtccgtcggtagaggga

SEQ ID NO: 4578143 - DNA, 25 bp, Homo sapien
agctggcccctgtccgtcggtagag

SEQ ID NO: 4578144 - DNA, 25 bp, Homo sapien
aagctggcccctgtccgtcggtaga

SEQ ID NO: 4578145 - DNA, 25 bp, Homo sapien
tgcccaactgcagtggtgaaaaaca

SEQ ID NO: 4578146 - DNA, 25 bp, Homo sapien
gtcctttgggcccaccaggaagcca

SEQ ID NO: 4578147 - DNA, 25 bp, Homo sapien
cctggagaaaggtactggacctttg

SEQ ID NO: 4578148 - DNA, 25 bp, Homo sapien
aaaacatctcgtggcaagggcagga

SEQ ID NO: 4578149 - DNA, 25 bp, Homo sapien
aggaagactgagagcacggcacaga

SEQ ID NO: 4578150 - DNA, 25 bp, Homo sapien
gagcacggcacagagggtgaagaag

SEQ ID NO: 4578151 - DNA, 25 bp, Homo sapien
gggtgaagaagccagccaccaccat

SEQ ID NO: 4578152 - DNA, 25 bp, Homo sapien
ctgagagcacggcacagagggtgaa

SEQ ID NO: 4578153 - DNA, 25 bp, Homo sapien
ccagggaatgattatccagtgtaga

SEQ ID NO: 4578154 - DNA, 25 bp, Homo sapien
aatcttctggttatgtgaggtctga

SEQ ID NO: 4578155 - DNA, 25 bp, Homo sapien
tgggctccaaaagtcagcataaggg

SEQ ID NO: 4578156 - DNA, 25 bp, Homo sapien
cagagtcagaagtagcaccgggctg

SEQ ID NO: 4578157 - DNA, 25 bp, Homo sapien
agacctccgtgaaggctgacaggcc

SEQ ID NO: 4578158 - DNA, 25 bp, Homo sapien
ccaatagtgagtgtcttttgatgcc

SEQ ID NO: 4578159 - DNA, 25 bp, Homo sapien
ctgcacctgaccaatagtgagtgtc

SEQ ID NO: 4578160 - DNA, 25 bp, Homo sapien
caatagtgagtgtcttttgatgcct

SEQ ID NO: 4578161 - DNA, 25 bp, Homo sapien
cctgaccaatagtgagtgtcttttg

SEQ ID NO: 4578162 - DNA, 25 bp, Homo sapien
ggaaaagcagggcactggcggggct

SEQ ID NO: 4578163 - DNA, 25 bp, Homo sapien
ccactccccgccatgggaaaagcag

SEQ ID NO: 4578164 - DNA, 25 bp, Homo sapien
cactccccgccatgggaaaagcagg

SEQ ID NO: 4578165 - DNA, 25 bp, Homo sapien
aaagcagggcactggcggggctctg

SEQ ID NO: 4578166 - DNA, 25 bp, Homo sapien
attccctctgtgatgcccaggtctc

SEQ ID NO: 4578167 - DNA, 25 bp, Homo sapien
ggccagggatgccaaccaactggat

SEQ ID NO: 4578168 - DNA, 25 bp, Homo sapien
gccagggatgccaaccaactggatg

SEQ ID NO: 4578169 - DNA, 25 bp, Homo sapien
aggccagggatgccaaccaactgga

SEQ ID NO: 4578170 - DNA, 25 bp, Homo sapien
acaaagaagctgaaagagttgtcgg

SEQ ID NO: 4578171 - DNA, 25 bp, Homo sapien
aaatacaaagaagaacacaaagaag

SEQ ID NO: 4578172 - DNA, 25 bp, Homo sapien
aaagaagctgaaagagttgtcggac

SEQ ID NO: 4578173 - DNA, 25 bp, Homo sapien
acaaagaagaacacaaagaagctga

SEQ ID NO: 4578174 - DNA, 25 bp, Homo sapien
ctaaaggccttatagatgggtcggt

SEQ ID NO: 4578175 - DNA, 25 bp, Homo sapien
cagggagtgaagatcagaaaccaca

SEQ ID NO: 4578176 - DNA, 25 bp, Homo sapien
tcggtaccaacaaaggaaggcacag

SEQ ID NO: 4578177 - DNA, 25 bp, Homo sapien
agctgttgcccgagaaccaggccag

SEQ ID NO: 4578178 - DNA, 25 bp, Homo sapien
tccgctggtagtcggcagggatctc

SEQ ID NO: 4578179 - DNA, 25 bp, Homo sapien
catcttgcatatccgctggtagtcg

SEQ ID NO: 4578180 - DNA, 25 bp, Homo sapien
gtagagcatcttgcatatccgctgg

SEQ ID NO: 4578181 - DNA, 25 bp, Homo sapien
tccacagatagtagagcatcttgca

SEQ ID NO: 4578182 - DNA, 25 bp, Homo sapien
aaagagtgacgaggtaagggcccag

SEQ ID NO: 4578183 - DNA, 25 bp, Homo sapien
gcaaaaagagtgacgaggtaagggc

SEQ ID NO: 4578184 - DNA, 25 bp, Homo sapien
aagagtgacgaggtaagggcccagc

SEQ ID NO: 4578185 - DNA, 25 bp, Homo sapien
tcccgctccttgcgttccagctcgg

SEQ ID NO: 4578186 - DNA, 25 bp, Homo sapien
tcttcctgctgccggagcaggcctg

SEQ ID NO: 4578187 - DNA, 25 bp, Homo sapien
cttcctgctgccggagcaggcctgc

SEQ ID NO: 4578188 - DNA, 25 bp, Homo sapien
cgctccttgcgttccagctcggcag

SEQ ID NO: 4578189 - DNA, 25 bp, Homo sapien
ccacagagtgtcttaggtaccagag

SEQ ID NO: 4578190 - DNA, 25 bp, Homo sapien
caggcagggacagccatcaaggagt

SEQ ID NO: 4578191 - DNA, 25 bp, Homo sapien
caaggcagcgctcagtgattgtgac

SEQ ID NO: 4578192 - DNA, 25 bp, Homo sapien
gaccaccttagagaggccaacctgt

SEQ ID NO: 4578193 - DNA, 25 bp, Homo sapien
gctgctgccatttgggccaggttcc

SEQ ID NO: 4578194 - DNA, 25 bp, Homo sapien
ggcagctgctgccatttgggccagg

SEQ ID NO: 4578195 - DNA, 25 bp, Homo sapien
ctggcagctgctgccatttgggcca

SEQ ID NO: 4578196 - DNA, 25 bp, Homo sapien
cagctgctgccatttgggccaggtt

SEQ ID NO: 4578197 - DNA, 25 bp, Homo sapien
tctgtgacgccagctgagaaggacc

SEQ ID NO: 4578198 - DNA, 25 bp, Homo sapien
tcaaagacctaaggctgacgtggag

SEQ ID NO: 4578199 - DNA, 25 bp, Homo sapien
cagaaaggcaactccgcatgtaagg

SEQ ID NO: 4578200 - DNA, 25 bp, Homo sapien
tagggagagatctcaaactggtcat

SEQ ID NO: 4578201 - DNA, 25 bp, Homo sapien
agctttcgcatgtagctgtctctga

SEQ ID NO: 4578202 - DNA, 25 bp, Homo sapien
gaagctttcgcatgtagctgtctct

SEQ ID NO: 4578203 - DNA, 25 bp, Homo sapien
cggaagctttcgcatgtagctgtct

SEQ ID NO: 4578204 - DNA, 25 bp, Homo sapien
cttcggaagctttcgcatgtagctg

SEQ ID NO: 4578205 - DNA, 25 bp, Homo sapien
tgccaggaattgggcaggcgggaac

SEQ ID NO: 4578206 - DNA, 25 bp, Homo sapien
ccaggaattgggcaggcgggaactt

SEQ ID NO: 4578207 - DNA, 25 bp, Homo sapien
gccaggaattgggcaggcgggaact

SEQ ID NO: 4578208 - DNA, 25 bp, Homo sapien
cccggcctggtgagtagagcttatt

SEQ ID NO: 4578209 - DNA, 25 bp, Homo sapien
tccaccatgggtcacgctcataggg

SEQ ID NO: 4578210 - DNA, 25 bp, Homo sapien
tgtaggtgaccagctccgaacaaat

SEQ ID NO: 4578211 - DNA, 25 bp, Homo sapien
cgaacaaattagcaagagggccctt

SEQ ID NO: 4578212 - DNA, 25 bp, Homo sapien
ggccagagttctttgtcagcactac

SEQ ID NO: 4578213 - DNA, 25 bp, Homo sapien
aaggccagagttctttgtcagcact

SEQ ID NO: 4578214 - DNA, 25 bp, Homo sapien
ggagagaaaaggccagagttctttg

SEQ ID NO: 4578215 - DNA, 25 bp, Homo sapien
agagaaaaggccagagttctttgtc

SEQ ID NO: 4578216 - DNA, 25 bp, Homo sapien
gtcggctgggttggttccactgatg

SEQ ID NO: 4578217 - DNA, 25 bp, Homo sapien
tgggttggttccactgatggctgga

SEQ ID NO: 4578218 - DNA, 25 bp, Homo sapien
cggctgggttggttccactgatggc

SEQ ID NO: 4578219 - DNA, 25 bp, Homo sapien
gctgggttggttccactgatggctg

SEQ ID NO: 4578220 - DNA, 25 bp, Homo sapien
caggaactgttgtcgctgcatttgt

SEQ ID NO: 4578221 - DNA, 25 bp, Homo sapien
ggtgacaggaactgttgtcgctgca

SEQ ID NO: 4578222 - DNA, 25 bp, Homo sapien
ttgggtgacaggaactgttgtcgct

SEQ ID NO: 4578223 - DNA, 25 bp, Homo sapien
gacaggaactgttgtcgctgcattt

SEQ ID NO: 4578224 - DNA, 25 bp, Homo sapien
tgcggggcgttggtcagctgggtca

SEQ ID NO: 4578225 - DNA, 25 bp, Homo sapien
ccctgcggggcgttggtcagctggg

SEQ ID NO: 4578226 - DNA, 25 bp, Homo sapien
tgaattccgccaggccgccctgcgg

SEQ ID NO: 4578227 - DNA, 25 bp, Homo sapien
ggttgaattccgccaggccgccctg

SEQ ID NO: 4578228 - DNA, 25 bp, Homo sapien
gggccggcaggcgagccggtgacgc

SEQ ID NO: 4578229 - DNA, 25 bp, Homo sapien
aaaagcccttagacacagtggagaa

SEQ ID NO: 4578230 - DNA, 25 bp, Homo sapien
gccggcaggcgagccggtgacgcct

SEQ ID NO: 4578231 - DNA, 25 bp, Homo sapien
tgaaaaaaagcccttagacacagtg

SEQ ID NO: 4578232 - DNA, 25 bp, Homo sapien
tcctagtaacagatgcagggctcag

SEQ ID NO: 4578233 - DNA, 25 bp, Homo sapien
ccttcctagtaacagatgcagggct

SEQ ID NO: 4578234 - DNA, 25 bp, Homo sapien
ctccccttcctagtaacagatgcag

SEQ ID NO: 4578235 - DNA, 25 bp, Homo sapien
tagtaacagatgcagggctcaggtc

SEQ ID NO: 4578236 - DNA, 25 bp, Homo sapien
tcctcataaacaaatctgatctcca

SEQ ID NO: 4578237 - DNA, 25 bp, Homo sapien
gggctcctcataaacaaatctgatc

SEQ ID NO: 4578238 - DNA, 25 bp, Homo sapien
cgggctcctcataaacaaatctgat

SEQ ID NO: 4578239 - DNA, 25 bp, Homo sapien
gctcctcataaacaaatctgatctc

SEQ ID NO: 4578240 - DNA, 25 bp, Homo sapien
taattgaaaaccacacttgtcactg

SEQ ID NO: 4578241 - DNA, 25 bp, Homo sapien
ctcataccatgcgtttcacaggtgc

SEQ ID NO: 4578242 - DNA, 25 bp, Homo sapien
tcccttcctgtattccacccaggct

SEQ ID NO: 4578243 - DNA, 25 bp, Homo sapien
actggtttggaaacctcataccatg

SEQ ID NO: 4578244 - DNA, 25 bp, Homo sapien
ctcagtgatgtgcactaacgtgaac

SEQ ID NO: 4578245 - DNA, 25 bp, Homo sapien
taacgtgaacatctcaaagcagcac

SEQ ID NO: 4578246 - DNA, 25 bp, Homo sapien
acctcagtgatgtgcactaacgtga

SEQ ID NO: 4578247 - DNA, 25 bp, Homo sapien
cagagcagcatgacctcagtgatgt

SEQ ID NO: 4578248 - DNA, 25 bp, Homo sapien
ttctctgacacctgcaggaaactta

SEQ ID NO: 4578249 - DNA, 25 bp, Homo sapien
tctctgacacctgcaggaaacttaa

SEQ ID NO: 4578250 - DNA, 25 bp, Homo sapien
attcaccagtcagcacaaacaagct

SEQ ID NO: 4578251 - DNA, 25 bp, Homo sapien
ataattcaccagtcagcacaaacaa

SEQ ID NO: 4578252 - DNA, 25 bp, Homo sapien
tcaccagtcagcacaaacaagcttc

SEQ ID NO: 4578253 - DNA, 25 bp, Homo sapien
tcataattcaccagtcagcacaaac

SEQ ID NO: 4578254 - DNA, 25 bp, Homo sapien
tcacgcgttacgataggccagacct

SEQ ID NO: 4578255 - DNA, 25 bp, Homo sapien
ccgtgggccctagggaaatctgaga

SEQ ID NO: 4578256 - DNA, 25 bp, Homo sapien
agcctccgggtgctagaagacccca

SEQ ID NO: 4578257 - DNA, 25 bp, Homo sapien
tctcccattgggcagatgacccgtc

SEQ ID NO: 4578258 - DNA, 25 bp, Homo sapien
ctggaaggggtttacatccactggg

SEQ ID NO: 4578259 - DNA, 25 bp, Homo sapien
aggggttggtgtcgaaagccgacat

SEQ ID NO: 4578260 - DNA, 25 bp, Homo sapien
ggccagcgggcgaactccgcgaacg

SEQ ID NO: 4578261 - DNA, 25 bp, Homo sapien
ggcacccagacccagcggcgcttcg

SEQ ID NO: 4578262 - DNA, 25 bp, Homo sapien
cacccagacccagcggcgcttcgtg

SEQ ID NO: 4578263 - DNA, 25 bp, Homo sapien
agacccagcggcgcttcgtgtagac

SEQ ID NO: 4578264 - DNA, 25 bp, Homo sapien
ccagacccagcggcgcttcgtgtag

SEQ ID NO: 4578265 - DNA, 25 bp, Homo sapien
ttccgggagcgaggcagcggttctg

SEQ ID NO: 4578266 - DNA, 25 bp, Homo sapien
tgggtgggcattcggcttccgtcca

SEQ ID NO: 4578267 - DNA, 25 bp, Homo sapien
ccagcccacaatagtgcggtgggtg

SEQ ID NO: 4578268 - DNA, 25 bp, Homo sapien
ggttctggcgcaggcgcgatgccct

SEQ ID NO: 4578269 - DNA, 25 bp, Homo sapien
gaagatgtatgttaacccctgaaag

SEQ ID NO: 4578270 - DNA, 25 bp, Homo sapien
taagccagtggattgctgagaacca

SEQ ID NO: 4578271 - DNA, 25 bp, Homo sapien
cagcataacggattgggacaggcca

SEQ ID NO: 4578272 - DNA, 25 bp, Homo sapien
gtcttcatagatggctagaggccga

SEQ ID NO: 4578273 - DNA, 25 bp, Homo sapien
cagggttctagcgatgggactgccc

SEQ ID NO: 4578274 - DNA, 25 bp, Homo sapien
tgacccagcattagctcagcatctg

SEQ ID NO: 4578275 - DNA, 25 bp, Homo sapien
ggtaggcctgtagactaacgctgtt

SEQ ID NO: 4578276 - DNA, 25 bp, Homo sapien
ggctagctgttaaatatgtgaccca

SEQ ID NO: 4578277 - DNA, 25 bp, Homo sapien
ccatatggtaccactcctgctggga

SEQ ID NO: 4578278 - DNA, 25 bp, Homo sapien
aggtaagcctggatacacccctctc

SEQ ID NO: 4578279 - DNA, 25 bp, Homo sapien
tgtacagagctgtagaagtgcaagc

SEQ ID NO: 4578280 - DNA, 25 bp, Homo sapien
tctatagagtagtacataaacacca

SEQ ID NO: 4578281 - DNA, 25 bp, Homo sapien
ttaaggcagtttggccctgggcaca

SEQ ID NO: 4578282 - DNA, 25 bp, Homo sapien
tgcagaacacacagcactcagaatt

SEQ ID NO: 4578283 - DNA, 25 bp, Homo sapien
ggccctgggcacattggtggtattt

SEQ ID NO: 4578284 - DNA, 25 bp, Homo sapien
cagcactcagaattaaggcagtttg

SEQ ID NO: 4578285 - DNA, 25 bp, Homo sapien
gacagttgcagctgaatatgccaga

SEQ ID NO: 4578286 - DNA, 25 bp, Homo sapien
tacaaggtaacaccctcctacatgg

SEQ ID NO: 4578287 - DNA, 25 bp, Homo sapien
tattacaacaacgatgcagagggcc

SEQ ID NO: 4578288 - DNA, 25 bp, Homo sapien
tatgccagagctgattattacaaca

SEQ ID NO: 4578289 - DNA, 25 bp, Homo sapien
gtctatacttaccttccacagccac

SEQ ID NO: 4578290 - DNA, 25 bp, Homo sapien
ggcactcacaggattaccatcgtaa

SEQ ID NO: 4578291 - DNA, 25 bp, Homo sapien
tcctagctagtagagtaagtcagcc

SEQ ID NO: 4578292 - DNA, 25 bp, Homo sapien
cagaatgttggccactgcatagagc

SEQ ID NO: 4578293 - DNA, 25 bp, Homo sapien
gcagagtcccattccagaacagagt

SEQ ID NO: 4578294 - DNA, 25 bp, Homo sapien
gggaaccctgtctatgcccattcaa

SEQ ID NO: 4578295 - DNA, 25 bp, Homo sapien
tcaccccttgtggtagagcgaaaag

SEQ ID NO: 4578296 - DNA, 25 bp, Homo sapien
tgtgttgtccctctcatgcctctgg

SEQ ID NO: 4578297 - DNA, 25 bp, Homo sapien
caatcccgactattgggctgggaac

SEQ ID NO: 4578298 - DNA, 25 bp, Homo sapien
ggctgcagtgagctgtgattacacc

SEQ ID NO: 4578299 - DNA, 25 bp, Homo sapien
gaggactgcttgggcctgggaggtt

SEQ ID NO: 4578300 - DNA, 25 bp, Homo sapien
tgtgattacaccactgcactccagc

SEQ ID NO: 4578301 - DNA, 25 bp, Homo sapien
ggactgcttgggcctgggaggttga

SEQ ID NO: 4578302 - DNA, 25 bp, Homo sapien
agaggcttggtatagagtatagcaa

SEQ ID NO: 4578303 - DNA, 25 bp, Homo sapien
agcaagatatactctccaatttgtg

SEQ ID NO: 4578304 - DNA, 25 bp, Homo sapien
caaagcagaacgctcaccatggttc

SEQ ID NO: 4578305 - DNA, 25 bp, Homo sapien
tagggggtgtcacagcagaaattat

SEQ ID NO: 4578306 - DNA, 25 bp, Homo sapien
caatcctgagtatccagtaaggccc

SEQ ID NO: 4578307 - DNA, 25 bp, Homo sapien
agtaaggcccatgctgtgaccagaa

SEQ ID NO: 4578308 - DNA, 25 bp, Homo sapien
gaggtctgcttaaagcccaatcctg

SEQ ID NO: 4578309 - DNA, 25 bp, Homo sapien
cacacccagaggtctgcttaaagcc

SEQ ID NO: 4578310 - DNA, 25 bp, Homo sapien
ggccctctacactggtggactgatt

SEQ ID NO: 4578311 - DNA, 25 bp, Homo sapien
tctctaactagggaagggcaaacca

SEQ ID NO: 4578312 - DNA, 25 bp, Homo sapien
gtgaagaaactcacccagaccaagg

SEQ ID NO: 4578313 - DNA, 25 bp, Homo sapien
taagcctcagtctaggacaaagccc

SEQ ID NO: 4578314 - DNA, 25 bp, Homo sapien
cattaagcaacctgctatgatccct

SEQ ID NO: 4578315 - DNA, 25 bp, Homo sapien
ccagttggggatgccccaggtccag

SEQ ID NO: 4578316 - DNA, 25 bp, Homo sapien
caggatcctgctgtatcattaagca

SEQ ID NO: 4578317 - DNA, 25 bp, Homo sapien
cctgtcatagttagacaggtgcaac

SEQ ID NO: 4578318 - DNA, 25 bp, Homo sapien
catcttagagctaggaagaatagag

SEQ ID NO: 4578319 - DNA, 25 bp, Homo sapien
cttgaaggtcaagcctgcaaaccat

SEQ ID NO: 4578320 - DNA, 25 bp, Homo sapien
caaaaggactcactttatgctgtct

SEQ ID NO: 4578321 - DNA, 25 bp, Homo sapien
gaatttctcgaactggtctcaaaca

SEQ ID NO: 4578322 - DNA, 25 bp, Homo sapien
taccaatcaagctgtctgcaagtgt

SEQ ID NO: 4578323 - DNA, 25 bp, Homo sapien
tatgagtggccaacagggctctgta

SEQ ID NO: 4578324 - DNA, 25 bp, Homo sapien
tgagaagcaacaggtaagggctacc

SEQ ID NO: 4578325 - DNA, 25 bp, Homo sapien
gctctgtaggcctcatggtgagcag

SEQ ID NO: 4578326 - DNA, 25 bp, Homo sapien
ctactggagggtacaggaagaagag

SEQ ID NO: 4578327 - DNA, 25 bp, Homo sapien
aagagtccccaagacagcaccagca

SEQ ID NO: 4578328 - DNA, 25 bp, Homo sapien
agaagagtccccaagacagcaccag

SEQ ID NO: 4578329 - DNA, 25 bp, Homo sapien
cagcaggagcatgttgaagaggcca

SEQ ID NO: 4578330 - DNA, 25 bp, Homo sapien
cgtcatctggaatctcatccaggtg

SEQ ID NO: 4578331 - DNA, 25 bp, Homo sapien
tggaatctcatccaggtgataccca

SEQ ID NO: 4578332 - DNA, 25 bp, Homo sapien
gtccaagtcctcgtcatctggaatc

SEQ ID NO: 4578333 - DNA, 25 bp, Homo sapien
gcagctgccggctcacatcctggtt

SEQ ID NO: 4578334 - DNA, 25 bp, Homo sapien
gcctcagccagcagtaagccttagt

SEQ ID NO: 4578335 - DNA, 25 bp, Homo sapien
gaagtaactgctacccaaaagacag

SEQ ID NO: 4578336 - DNA, 25 bp, Homo sapien
ggagggaactataggccaagatgca

SEQ ID NO: 4578337 - DNA, 25 bp, Homo sapien
gacagaaccacattccgttaccagg

SEQ ID NO: 4578338 - DNA, 25 bp, Homo sapien
tgagtctaaatggtctcctcgattc

SEQ ID NO: 4578339 - DNA, 25 bp, Homo sapien
aatggtctcctcgattctcaacagc

SEQ ID NO: 4578340 - DNA, 25 bp, Homo sapien
ttctagccctgagtctaaatggtct

SEQ ID NO: 4578341 - DNA, 25 bp, Homo sapien
tctgagatcatttctagccctgagt

SEQ ID NO: 4578342 - DNA, 25 bp, Homo sapien
agagtggaagatcgtagaacagacc

SEQ ID NO: 4578343 - DNA, 25 bp, Homo sapien
ggaagatcgtagaacagaccagaag

SEQ ID NO: 4578344 - DNA, 25 bp, Homo sapien
acagaccagaagtctggcacagtgc

SEQ ID NO: 4578345 - DNA, 25 bp, Homo sapien
gtggaagatcgtagaacagaccaga

SEQ ID NO: 4578346 - DNA, 25 bp, Homo sapien
gcgggcaccaaacaagcatttggca

SEQ ID NO: 4578347 - DNA, 25 bp, Homo sapien
agtggtggtaatgctgcctgcagcc

SEQ ID NO: 4578348 - DNA, 25 bp, Homo sapien
caagcatttggcagtggtggtaatg

SEQ ID NO: 4578349 - DNA, 25 bp, Homo sapien
agcgggcaccaaacaagcatttggc

SEQ ID NO: 4578350 - DNA, 25 bp, Homo sapien
gatgaatacccggaggagtatctgg

SEQ ID NO: 4578351 - DNA, 25 bp, Homo sapien
tacccggaggagtatctggatccca

SEQ ID NO: 4578352 - DNA, 25 bp, Homo sapien
ggaggagtatctggatcccagctcc

SEQ ID NO: 4578353 - DNA, 25 bp, Homo sapien
ctctgcagatgaatacccggaggag

SEQ ID NO: 4578354 - DNA, 25 bp, Homo sapien
tcagttccgggaggtacctgtggtg

SEQ ID NO: 4578355 - DNA, 25 bp, Homo sapien
ttccgggaggtacctgtggtgcaca

SEQ ID NO: 4578356 - DNA, 25 bp, Homo sapien
aacagtcagttccgggaggtacctg

SEQ ID NO: 4578357 - DNA, 25 bp, Homo sapien
cagtcagttccgggaggtacctgtg

SEQ ID NO: 4578358 - DNA, 25 bp, Homo sapien
caggccttgaataatactggttccc

SEQ ID NO: 4578359 - DNA, 25 bp, Homo sapien
gaactcaagtccgaacaggccttga

SEQ ID NO: 4578360 - DNA, 25 bp, Homo sapien
tggtgctccgaattctagagcagca

SEQ ID NO: 4578361 - DNA, 25 bp, Homo sapien
caatgcaaacataacagggcaggat

SEQ ID NO: 4578362 - DNA, 25 bp, Homo sapien
tcctgggaagggatattgttcagaa

SEQ ID NO: 4578363 - DNA, 25 bp, Homo sapien
ctgggaagggatattgttcagaaga

SEQ ID NO: 4578364 - DNA, 25 bp, Homo sapien
catcctgggaagggatattgttcag

SEQ ID NO: 4578365 - DNA, 25 bp, Homo sapien
ttgttcagaagagaacggccctgga

SEQ ID NO: 4578366 - DNA, 25 bp, Homo sapien
tcccagccaagttgcttcccaaggg

SEQ ID NO: 4578367 - DNA, 25 bp, Homo sapien
gacagggaacaagcaaaggcatcag

SEQ ID NO: 4578368 - DNA, 25 bp, Homo sapien
agtcccagccaagttgcttcccaag

SEQ ID NO: 4578369 - DNA, 25 bp, Homo sapien
ggcatcaggcgatcttcagtcccag

SEQ ID NO: 4578370 - DNA, 25 bp, Homo sapien
ttcatctggactctggctaagagca

SEQ ID NO: 4578371 - DNA, 25 bp, Homo sapien
ggttttcatctggactctggctaag

SEQ ID NO: 4578372 - DNA, 25 bp, Homo sapien
tctggctaagagcagtatagccctt

SEQ ID NO: 4578373 - DNA, 25 bp, Homo sapien
gcagtatagcccttgttaaacttca

SEQ ID NO: 4578374 - DNA, 25 bp, Homo sapien
gaatcgctagctcggccttaaacca

SEQ ID NO: 4578375 - DNA, 25 bp, Homo sapien
agagtcctcgccctgaaggagaaag

SEQ ID NO: 4578376 - DNA, 25 bp, Homo sapien
aagcataggcatttcacagggatag

SEQ ID NO: 4578377 - DNA, 25 bp, Homo sapien
aaagccttctctaaagctgctggca

SEQ ID NO: 4578378 - DNA, 25 bp, Homo sapien
ttctccgcagaacggccttggccag

SEQ ID NO: 4578379 - DNA, 25 bp, Homo sapien
agagtctgggcggttcggcgaggcc

SEQ ID NO: 4578380 - DNA, 25 bp, Homo sapien
cttttctccgcagaacggccttggc

SEQ ID NO: 4578381 - DNA, 25 bp, Homo sapien
gccttttctccgcagaacggccttg

SEQ ID NO: 4578382 - DNA, 25 bp, Homo sapien
ccagacggagggctctattaccgat

SEQ ID NO: 4578383 - DNA, 25 bp, Homo sapien
ctctattaccgatctgcccggaggg

SEQ ID NO: 4578384 - DNA, 25 bp, Homo sapien
gtgcgcgcgtcaccatgtatggccc

SEQ ID NO: 4578385 - DNA, 25 bp, Homo sapien
cggggtagacaaccgcaacgcgcgc

SEQ ID NO: 4578386 - DNA, 25 bp, Homo sapien
ggagctctccggttcggtagtctga

SEQ ID NO: 4578387 - DNA, 25 bp, Homo sapien
gaggacttggccgaaatgttccgcc

SEQ ID NO: 4578388 - DNA, 25 bp, Homo sapien
aggcgcaggtagtcccctttcggag

SEQ ID NO: 4578389 - DNA, 25 bp, Homo sapien
ttttaacaagatggcggtgcgcagg

SEQ ID NO: 4578390 - DNA, 25 bp, Homo sapien
taatttacaagctagggcacccaaa

SEQ ID NO: 4578391 - DNA, 25 bp, Homo sapien
caaggctaatacaccactgcaaggg

SEQ ID NO: 4578392 - DNA, 25 bp, Homo sapien
cctaagcctagggtgtcaacaagaa

SEQ ID NO: 4578393 - DNA, 25 bp, Homo sapien
gagaggaacacaccgtaagagggct

SEQ ID NO: 4578394 - DNA, 25 bp, Homo sapien
tccaggtaactgttcacactcaagt

SEQ ID NO: 4578395 - DNA, 25 bp, Homo sapien
ctgttcacactcaagtagcaatgtc

SEQ ID NO: 4578396 - DNA, 25 bp, Homo sapien
taaggtaatatgttatcatcagtat

SEQ ID NO: 4578397 - DNA, 25 bp, Homo sapien
ggtaactgttcacactcaagtagca

SEQ ID NO: 4578398 - DNA, 25 bp, Homo sapien
taacgctagccctttggaaagccga

SEQ ID NO: 4578399 - DNA, 25 bp, Homo sapien
tactgtcaacccacaagcgactagc

SEQ ID NO: 4578400 - DNA, 25 bp, Homo sapien
aataacccttagtgctacaaccagg

SEQ ID NO: 4578401 - DNA, 25 bp, Homo sapien
cgaatggattgcctgagcatagaag

SEQ ID NO: 4578402 - DNA, 25 bp, Homo sapien
ctccggagtggagattcccagttca

SEQ ID NO: 4578403 - DNA, 25 bp, Homo sapien
tccggagtggagattcccagttcat

SEQ ID NO: 4578404 - DNA, 25 bp, Homo sapien
tcctccggagtggagattcccagtt

SEQ ID NO: 4578405 - DNA, 25 bp, Homo sapien
cggagtggagattcccagttcattt

SEQ ID NO: 4578406 - DNA, 25 bp, Homo sapien
cgaactgtactagcaaaatcattta

SEQ ID NO: 4578407 - DNA, 25 bp, Homo sapien
cctctaggatacgaactgtactagc

SEQ ID NO: 4578408 - DNA, 25 bp, Homo sapien
aacaacctctaggatacgaactgta

SEQ ID NO: 4578409 - DNA, 25 bp, Homo sapien
taggatacgaactgtactagcaaaa

SEQ ID NO: 4578410 - DNA, 25 bp, Homo sapien
gacccatgggaatagcagcgaactg

SEQ ID NO: 4578411 - DNA, 25 bp, Homo sapien
gcttgttgaagtatgttacccagcg

SEQ ID NO: 4578412 - DNA, 25 bp, Homo sapien
gttacccagcgagcatcaaactcct

SEQ ID NO: 4578413 - DNA, 25 bp, Homo sapien
catctgtctcctgtgacccatggga

SEQ ID NO: 4578414 - DNA, 25 bp, Homo sapien
gatgaccaccaacagcaaatccaag

SEQ ID NO: 4578415 - DNA, 25 bp, Homo sapien
ggatttgactacatgagtgctaggc

SEQ ID NO: 4578416 - DNA, 25 bp, Homo sapien
cctaactgtgaataagatgaccacc

SEQ ID NO: 4578417 - DNA, 25 bp, Homo sapien
tgcagtggcactagcctcggagaca

SEQ ID NO: 4578418 - DNA, 25 bp, Homo sapien
cagcataccctgaaacgagtttctg

SEQ ID NO: 4578419 - DNA, 25 bp, Homo sapien
aatttttaacttcagcataccctga

SEQ ID NO: 4578420 - DNA, 25 bp, Homo sapien
taccctgaaacgagtttctgagttc

SEQ ID NO: 4578421 - DNA, 25 bp, Homo sapien
taacttcagcataccctgaaacgag

SEQ ID NO: 4578422 - DNA, 25 bp, Homo sapien
tataatcgtgtgtcccatacggaag

SEQ ID NO: 4578423 - DNA, 25 bp, Homo sapien
ggccactctcggtcaggtggccgca

SEQ ID NO: 4578424 - DNA, 25 bp, Homo sapien
gaggctcaatgtcaccttcgccgag

SEQ ID NO: 4578425 - DNA, 25 bp, Homo sapien
tatattgtgtcctcggaccccaagc

SEQ ID NO: 4578426 - DNA, 25 bp, Homo sapien
caggtcaccgcaaggacacgagggc

SEQ ID NO: 4578427 - DNA, 25 bp, Homo sapien
ccaggtcaccgcaaggacacgaggg

SEQ ID NO: 4578428 - DNA, 25 bp, Homo sapien
gggtccgggcggagtgcaggaggcc

SEQ ID NO: 4578429 - DNA, 25 bp, Homo sapien
gtcggcccgggtggttgcggccaca

SEQ ID NO: 4578430 - DNA, 25 bp, Homo sapien
gcccgggtggttgcggccacagcgc

SEQ ID NO: 4578431 - DNA, 25 bp, Homo sapien
ccgggcggagtgcaggaggcctcga

SEQ ID NO: 4578432 - DNA, 25 bp, Homo sapien
gggccggacaggctcacagcgggcg

SEQ ID NO: 4578433 - DNA, 25 bp, Homo sapien
acagcgggcggagcacgtaggcccg

SEQ ID NO: 4578434 - DNA, 25 bp, Homo sapien
agagagaagccggtgtaagctcgcg

SEQ ID NO: 4578435 - DNA, 25 bp, Homo sapien
ctcgcgggttgctccggagcgggcg

SEQ ID NO: 4578436 - DNA, 25 bp, Homo sapien
tgatcaagttccacagttgttgcat

SEQ ID NO: 4578437 - DNA, 25 bp, Homo sapien
gagggctcctgaatccacgatggct

SEQ ID NO: 4578438 - DNA, 25 bp, Homo sapien
ccatctcctacaggagggctcctga

SEQ ID NO: 4578439 - DNA, 25 bp, Homo sapien
ggctctgaaatagggttgatcaagt

SEQ ID NO: 4578440 - DNA, 25 bp, Homo sapien
catttcctaccttgaaatccttcgc

SEQ ID NO: 4578441 - DNA, 25 bp, Homo sapien
taccttgaaatccttcgctgtccct

SEQ ID NO: 4578442 - DNA, 25 bp, Homo sapien
agaagccacacctggacttttgctt

SEQ ID NO: 4578443 - DNA, 25 bp, Homo sapien
gaaatccttcgctgtccctctggag

SEQ ID NO: 4578444 - DNA, 25 bp, Homo sapien
aaagactcaggacgcaaggctggag

SEQ ID NO: 4578445 - DNA, 25 bp, Homo sapien
cagtttattgtctggaggctgcaga

SEQ ID NO: 4578446 - DNA, 25 bp, Homo sapien
tccagcagtggatttgtgctcagtc

SEQ ID NO: 4578447 - DNA, 25 bp, Homo sapien
tccaggagagttcatcgatgctgtc

SEQ ID NO: 4578448 - DNA, 25 bp, Homo sapien
gctagaaccctcagagatgctcctc

SEQ ID NO: 4578449 - DNA, 25 bp, Homo sapien
cttgttttattggaagcaagactcc

SEQ ID NO: 4578450 - DNA, 25 bp, Homo sapien
ggtgttaaaagagctagaaccctca

SEQ ID NO: 4578451 - DNA, 25 bp, Homo sapien
ttggaagcaagactccagccagctg

SEQ ID NO: 4578452 - DNA, 25 bp, Homo sapien
gcagttaattctcaccccctgcctt

SEQ ID NO: 4578453 - DNA, 25 bp, Homo sapien
gggagcggaatagggcccccacatc

SEQ ID NO: 4578454 - DNA, 25 bp, Homo sapien
ccttcctctgtcaacggtgggggtg

SEQ ID NO: 4578455 - DNA, 25 bp, Homo sapien
ccacatctcagactctcctaccctc

SEQ ID NO: 4578456 - DNA, 25 bp, Homo sapien
ggtccatgctacctgtcttgaggag

SEQ ID NO: 4578457 - DNA, 25 bp, Homo sapien
tcaggtgctcttcgtgaatgctggg

SEQ ID NO: 4578458 - DNA, 25 bp, Homo sapien
tatcgcacgaagtttccctagggtg

SEQ ID NO: 4578459 - DNA, 25 bp, Homo sapien
tgtcttcacgcaacacgggcataag

SEQ ID NO: 4578460 - DNA, 25 bp, Homo sapien
ggatctcggcgcacgtgacggtttt

SEQ ID NO: 4578461 - DNA, 25 bp, Homo sapien
gcgaggccgggcacgttcttaagta

SEQ ID NO: 4578462 - DNA, 25 bp, Homo sapien
tcggagcgcaccttacggaagttct

SEQ ID NO: 4578463 - DNA, 25 bp, Homo sapien
taagtacgctgagactagcggccgg

SEQ ID NO: 4578464 - DNA, 25 bp, Homo sapien
gaccgccggctttgccatggggcgg

SEQ ID NO: 4578465 - DNA, 25 bp, Homo sapien
ccgggaccgccggctttgccatggg

SEQ ID NO: 4578466 - DNA, 25 bp, Homo sapien
cgccggctttgccatggggcggcct

SEQ ID NO: 4578467 - DNA, 25 bp, Homo sapien
ccggctttgccatggggcggcctca

SEQ ID NO: 4578468 - DNA, 25 bp, Homo sapien
gggtaagggcgccggagcagcgcag

SEQ ID NO: 4578469 - DNA, 25 bp, Homo sapien
ggcgccggagcagcgcagacgccgg

SEQ ID NO: 4578470 - DNA, 25 bp, Homo sapien
ccagcaggggtaagggcgccggagc

SEQ ID NO: 4578471 - DNA, 25 bp, Homo sapien
gagcagcgcagacgccggcgggcgg

SEQ ID NO: 4578472 - DNA, 25 bp, Homo sapien
cactgcttcaaatccggtatccgag

SEQ ID NO: 4578473 - DNA, 25 bp, Homo sapien
ccagggagagatttccaagaggctt

SEQ ID NO: 4578474 - DNA, 25 bp, Homo sapien
taaataaaagctgcgcttgccgtgc

SEQ ID NO: 4578475 - DNA, 25 bp, Homo sapien
gaagttccactataatcgccatcag

SEQ ID NO: 4578476 - DNA, 25 bp, Homo sapien
tcccaagagcctgctgtgatgccca

SEQ ID NO: 4578477 - DNA, 25 bp, Homo sapien
aggagagctcctattcctgaaagac

SEQ ID NO: 4578478 - DNA, 25 bp, Homo sapien
aacattagtgttcccaggagagctc

SEQ ID NO: 4578479 - DNA, 25 bp, Homo sapien
tattcctgaaagacttcccaagagc

SEQ ID NO: 4578480 - DNA, 25 bp, Homo sapien
aactagttataatcaaatacttgta

SEQ ID NO: 4578481 - DNA, 25 bp, Homo sapien
tgacaaacctctgttgaggccaggg

SEQ ID NO: 4578482 - DNA, 25 bp, Homo sapien
tctgggtgaaaagtctcgagtgtca

SEQ ID NO: 4578483 - DNA, 25 bp, Homo sapien
caagaggaggctgtagtcaagaagc

SEQ ID NO: 4578484 - DNA, 25 bp, Homo sapien
gagtgtcaagtgtcagtccagtaga

SEQ ID NO: 4578485 - DNA, 25 bp, Homo sapien
gggcttctgactttggacctgctca

SEQ ID NO: 4578486 - DNA, 25 bp, Homo sapien
aaattgtccgtggtcatcagacggg

SEQ ID NO: 4578487 - DNA, 25 bp, Homo sapien
caatctactgggacaaaggtgggct

SEQ ID NO: 4578488 - DNA, 25 bp, Homo sapien
cagcatgtgggtcaaccagggacag

SEQ ID NO: 4578489 - DNA, 25 bp, Homo sapien
tctggctctacccttgggaagcctg

SEQ ID NO: 4578490 - DNA, 25 bp, Homo sapien
ccatgacctgttggatgttacctcc

SEQ ID NO: 4578491 - DNA, 25 bp, Homo sapien
cctctttggcttggacctatatggc

SEQ ID NO: 4578492 - DNA, 25 bp, Homo sapien
tgtgatccagctccctgcctagcat

SEQ ID NO: 4578493 - DNA, 25 bp, Homo sapien
tgaacgtataccctgtctggccttg

SEQ ID NO: 4578494 - DNA, 25 bp, Homo sapien
ccttcctgtattgagcttgaacgta

SEQ ID NO: 4578495 - DNA, 25 bp, Homo sapien
cataatggatcttggatccctgcct

SEQ ID NO: 4578496 - DNA, 25 bp, Homo sapien
cccatatagggactggcaggtatcc

SEQ ID NO: 4578497 - DNA, 25 bp, Homo sapien
ctggccaagcattgccctggttggg

SEQ ID NO: 4578498 - DNA, 25 bp, Homo sapien
ctccaactctggccaagcattgccc

SEQ ID NO: 4578499 - DNA, 25 bp, Homo sapien
caactctggccaagcattgccctgg

SEQ ID NO: 4578500 - DNA, 25 bp, Homo sapien
gccaagcattgccctggttggggcc

SEQ ID NO: 4578501 - DNA, 25 bp, Homo sapien
cagctgcctgggtttcccttgccat

SEQ ID NO: 4578502 - DNA, 25 bp, Homo sapien
cagcgctgcttcctgggcagctgcc

SEQ ID NO: 4578503 - DNA, 25 bp, Homo sapien
tgggcagctgcctgggtttcccttg

SEQ ID NO: 4578504 - DNA, 25 bp, Homo sapien
tgcttcctgggcagctgcctgggtt

SEQ ID NO: 4578505 - DNA, 25 bp, Homo sapien
gagctttcgcctaccacgtactgta

SEQ ID NO: 4578506 - DNA, 25 bp, Homo sapien
tcacccatgccgttgggaagggagt

SEQ ID NO: 4578507 - DNA, 25 bp, Homo sapien
tatggagtcaccaccttgcatagtg

SEQ ID NO: 4578508 - DNA, 25 bp, Homo sapien
gaatgccaggcttgatcacccatgc

SEQ ID NO: 4578509 - DNA, 25 bp, Homo sapien
tgctgagattacatggtgatgcttt

SEQ ID NO: 4578510 - DNA, 25 bp, Homo sapien
gctgagattacatggtgatgctttg

SEQ ID NO: 4578511 - DNA, 25 bp, Homo sapien
tagcctagacagcaggtccttaggg

SEQ ID NO: 4578512 - DNA, 25 bp, Homo sapien
caggtccttagggactggaggccca

SEQ ID NO: 4578513 - DNA, 25 bp, Homo sapien
agacagcaggtccttagggactgga

SEQ ID NO: 4578514 - DNA, 25 bp, Homo sapien
ctagcctagacagcaggtccttagg

SEQ ID NO: 4578515 - DNA, 25 bp, Homo sapien
gcaggggagaagttgaattctggtg

SEQ ID NO: 4578516 - DNA, 25 bp, Homo sapien
gggagaagttgaattctggtgtgcc

SEQ ID NO: 4578517 - DNA, 25 bp, Homo sapien
tttcttggtaatggctccaactcat

SEQ ID NO: 4578518 - DNA, 25 bp, Homo sapien
tctttcttggtaatggctccaactc

SEQ ID NO: 4578519 - DNA, 25 bp, Homo sapien
cttctttcttggtaatggctccaac

SEQ ID NO: 4578520 - DNA, 25 bp, Homo sapien
ggtaatggctccaactcattcccat

SEQ ID NO: 4578521 - DNA, 25 bp, Homo sapien
atcctgagtgccttgtggccagcca

SEQ ID NO: 4578522 - DNA, 25 bp, Homo sapien
catcctgagtgccttgtggccagcc

SEQ ID NO: 4578523 - DNA, 25 bp, Homo sapien
ctggtcactaagagcagggcagcag

SEQ ID NO: 4578524 - DNA, 25 bp, Homo sapien
gaagctcctggaaatcatattgcag

SEQ ID NO: 4578525 - DNA, 25 bp, Homo sapien
tggaagctcctggaaatcatattgc

SEQ ID NO: 4578526 - DNA, 25 bp, Homo sapien
agctcctggaaatcatattgcagaa

SEQ ID NO: 4578527 - DNA, 25 bp, Homo sapien
tgagagaggcagtccgcttgttatc

SEQ ID NO: 4578528 - DNA, 25 bp, Homo sapien
gtgttggcttcctggcgagttatca

SEQ ID NO: 4578529 - DNA, 25 bp, Homo sapien
tgggtttcaaagctgccctctgagc

SEQ ID NO: 4578530 - DNA, 25 bp, Homo sapien
ctggcgagttatcagggagactttg

SEQ ID NO: 4578531 - DNA, 25 bp, Homo sapien
gtgcttcccgtggcacactcacact

SEQ ID NO: 4578532 - DNA, 25 bp, Homo sapien
catcattcacactcaggtcaggcat

SEQ ID NO: 4578533 - DNA, 25 bp, Homo sapien
cgtgcttcccgtggcacactcacac

SEQ ID NO: 4578534 - DNA, 25 bp, Homo sapien
tctcttatctccttccagttcaaaa

SEQ ID NO: 4578535 - DNA, 25 bp, Homo sapien
ttccagccttagcacaaccttcttt

SEQ ID NO: 4578536 - DNA, 25 bp, Homo sapien
tgcatctcttaatggccagcatcct

SEQ ID NO: 4578537 - DNA, 25 bp, Homo sapien
tctgcagttaggctcaacacattcc

SEQ ID NO: 4578538 - DNA, 25 bp, Homo sapien
cacacttcttaccgaaggctcttcg

SEQ ID NO: 4578539 - DNA, 25 bp, Homo sapien
tgccacacttcttaccgaaggctct

SEQ ID NO: 4578540 - DNA, 25 bp, Homo sapien
gctcttcgggttttaggtacattga

SEQ ID NO: 4578541 - DNA, 25 bp, Homo sapien
cacttcttaccgaaggctcttcggg

SEQ ID NO: 4578542 - DNA, 25 bp, Homo sapien
acaagaaacagcgtctgagaccctt

SEQ ID NO: 4578543 - DNA, 25 bp, Homo sapien
aaaacaagaaacagcgtctgagacc

SEQ ID NO: 4578544 - DNA, 25 bp, Homo sapien
aacagcgtctgagacccttacctcg

SEQ ID NO: 4578545 - DNA, 25 bp, Homo sapien
gaaacagcgtctgagacccttacct

SEQ ID NO: 4578546 - DNA, 25 bp, Homo sapien
cccctcaaatccattggtgcactgg

SEQ ID NO: 4578547 - DNA, 25 bp, Homo sapien
agccagtcatggagcccctcaaatc

SEQ ID NO: 4578548 - DNA, 25 bp, Homo sapien
ggtggctcagccttcagtaggccct

SEQ ID NO: 4578549 - DNA, 25 bp, Homo sapien
agaggtggctcagccttcagtaggc

SEQ ID NO: 4578550 - DNA, 25 bp, Homo sapien
caggtcctatccaacccagatccct

SEQ ID NO: 4578551 - DNA, 25 bp, Homo sapien
aacccagatccctacgacgctctga

SEQ ID NO: 4578552 - DNA, 25 bp, Homo sapien
agatccctacgacgctctgagtcca

SEQ ID NO: 4578553 - DNA, 25 bp, Homo sapien
tcctgcccaggtcctatccaaccca

SEQ ID NO: 4578554 - DNA, 25 bp, Homo sapien
agtgaccacagatgccatgccaagg

SEQ ID NO: 4578555 - DNA, 25 bp, Homo sapien
tgtggccttcatgttccgaaagttc

SEQ ID NO: 4578556 - DNA, 25 bp, Homo sapien
cgaaagttcaagatcctccgtccgg

SEQ ID NO: 4578557 - DNA, 25 bp, Homo sapien
acatctgggcccattggactgcgga

SEQ ID NO: 4578558 - DNA, 25 bp, Homo sapien
tgctgacaggagtggagctagcaag

SEQ ID NO: 4578559 - DNA, 25 bp, Homo sapien
gacaggagtggagctagcaaggtag

SEQ ID NO: 4578560 - DNA, 25 bp, Homo sapien
cccaatacaaaaggcaaagggcctg

SEQ ID NO: 4578561 - DNA, 25 bp, Homo sapien
cctgtcttgggggactcggagagta

SEQ ID NO: 4578562 - DNA, 25 bp, Homo sapien
cagttcctgtgccggagaagggagg

SEQ ID NO: 4578563 - DNA, 25 bp, Homo sapien
cctgcagttcctgtgccggagaagg

SEQ ID NO: 4578564 - DNA, 25 bp, Homo sapien
gttcctgtgccggagaagggagggc

SEQ ID NO: 4578565 - DNA, 25 bp, Homo sapien
tgcagttcctgtgccggagaaggga

SEQ ID NO: 4578566 - DNA, 25 bp, Homo sapien
ctacttgaggccggtgtccaggaac

SEQ ID NO: 4578567 - DNA, 25 bp, Homo sapien
ctgttgggacctggcttcagcggct

SEQ ID NO: 4578568 - DNA, 25 bp, Homo sapien
gcttcagcggcttcaatgtgggcaa

SEQ ID NO: 4578569 - DNA, 25 bp, Homo sapien
gacctggcttcagcggcttcaatgt

SEQ ID NO: 4578570 - DNA, 25 bp, Homo sapien
tgggacctggcttcagcggcttcaa

SEQ ID NO: 4578571 - DNA, 25 bp, Homo sapien
ttcctggctgtgagatgcgtctctc

SEQ ID NO: 4578572 - DNA, 25 bp, Homo sapien
ttgttagcgggaactgagtcccaga

SEQ ID NO: 4578573 - DNA, 25 bp, Homo sapien
ctggacctgggtctgagtcgcagtt

SEQ ID NO: 4578574 - DNA, 25 bp, Homo sapien
caggcagagccatcgagaaagcact

SEQ ID NO: 4578575 - DNA, 25 bp, Homo sapien
ccagcggactggagacttcagggct

SEQ ID NO: 4578576 - DNA, 25 bp, Homo sapien
gagccacggcatagcaagggatgga

SEQ ID NO: 4578577 - DNA, 25 bp, Homo sapien
catagcaagggatggaggcgtccag

SEQ ID NO: 4578578 - DNA, 25 bp, Homo sapien
aggcgtccagcggactggagacttc

SEQ ID NO: 4578579 - DNA, 25 bp, Homo sapien
tggcgcaaacggtcccacatgagag

SEQ ID NO: 4578580 - DNA, 25 bp, Homo sapien
tgtgcagaccctggcgcaaacggtc

SEQ ID NO: 4578581 - DNA, 25 bp, Homo sapien
cgaggtctgggatgaccatctccac

SEQ ID NO: 4578582 - DNA, 25 bp, Homo sapien
agggtgtgcagaccctggcgcaaac

SEQ ID NO: 4578583 - DNA, 25 bp, Homo sapien
tcacccagggccaccctgaacccac

SEQ ID NO: 4578584 - DNA, 25 bp, Homo sapien
caccaccacttggtcaaagttctgc

SEQ ID NO: 4578585 - DNA, 25 bp, Homo sapien
atcttcccgaggcctcttcctcgac

SEQ ID NO: 4578586 - DNA, 25 bp, Homo sapien
catcttcccgaggcctcttcctcga

SEQ ID NO: 4578587 - DNA, 25 bp, Homo sapien
cagctgcccttgaagtgcccagaac

SEQ ID NO: 4578588 - DNA, 25 bp, Homo sapien
caaacttcatacagcaccagctctg

SEQ ID NO: 4578589 - DNA, 25 bp, Homo sapien
ccatctcgtcagctgcccttgaagt

SEQ ID NO: 4578590 - DNA, 25 bp, Homo sapien
aaagccttggtgtagggctggacca

SEQ ID NO: 4578591 - DNA, 25 bp, Homo sapien
gcctgcatcccctctcctggaagcc

SEQ ID NO: 4578592 - DNA, 25 bp, Homo sapien
gggtggaggtggcatcagcctgcat

SEQ ID NO: 4578593 - DNA, 25 bp, Homo sapien
ggaggtggcatcagcctgcatcccc

SEQ ID NO: 4578594 - DNA, 25 bp, Homo sapien
gtggaggtggcatcagcctgcatcc

SEQ ID NO: 4578595 - DNA, 25 bp, Homo sapien
tagtgatgggagtctggaacttgta

SEQ ID NO: 4578596 - DNA, 25 bp, Homo sapien
tgtattcgatataaacacccaccca

SEQ ID NO: 4578597 - DNA, 25 bp, Homo sapien
tgttttgggccaagtgattagccag

SEQ ID NO: 4578598 - DNA, 25 bp, Homo sapien
gatttctggaggatgggatctgtta

SEQ ID NO: 4578599 - DNA, 25 bp, Homo sapien
gccttgtagaatcctgacaccaccg

SEQ ID NO: 4578600 - DNA, 25 bp, Homo sapien
cttgtagaatcctgacaccaccggt

SEQ ID NO: 4578601 - DNA, 25 bp, Homo sapien
tcgccttgtagaatcctgacaccac

SEQ ID NO: 4578602 - DNA, 25 bp, Homo sapien
gtagaatcctgacaccaccggtgtg

SEQ ID NO: 4578603 - DNA, 25 bp, Homo sapien
ctgttggaggatctgcctttccagc

SEQ ID NO: 4578604 - DNA, 25 bp, Homo sapien
ctcatggctgtgaagcggatgctga

SEQ ID NO: 4578605 - DNA, 25 bp, Homo sapien
gctgtgaagcggatgctgatggtct

SEQ ID NO: 4578606 - DNA, 25 bp, Homo sapien
tgcggcaggaaggacctcatggctg

SEQ ID NO: 4578607 - DNA, 25 bp, Homo sapien
ctgtagagccatgggtgagagttcc

SEQ ID NO: 4578608 - DNA, 25 bp, Homo sapien
gtgagagttccggaggcgccaagac

SEQ ID NO: 4578609 - DNA, 25 bp, Homo sapien
tagagccatgggtgagagttccgga

SEQ ID NO: 4578610 - DNA, 25 bp, Homo sapien
tgagagttccggaggcgccaagacc

SEQ ID NO: 4578611 - DNA, 25 bp, Homo sapien
catcagaggtgaggctgttctcagc

SEQ ID NO: 4578612 - DNA, 25 bp, Homo sapien
tgaggctgttctcagccaatgagag

SEQ ID NO: 4578613 - DNA, 25 bp, Homo sapien
gaggttccccagcatgtgccctgag

SEQ ID NO: 4578614 - DNA, 25 bp, Homo sapien
gccaatgagaggttccccagcatgt

SEQ ID NO: 4578615 - DNA, 25 bp, Homo sapien
ccaaatacaagggaggcgttcaccg

SEQ ID NO: 4578616 - DNA, 25 bp, Homo sapien
accaggacaccgatgccctggaagc

SEQ ID NO: 4578617 - DNA, 25 bp, Homo sapien
ctgaagaccaggacaccgatgccct

SEQ ID NO: 4578618 - DNA, 25 bp, Homo sapien
aagaccaggacaccgatgccctgga

SEQ ID NO: 4578619 - DNA, 25 bp, Homo sapien
caccgatgccctggaagccggggaa

SEQ ID NO: 4578620 - DNA, 25 bp, Homo sapien
aagagtgcagccgagaaggcttcat

SEQ ID NO: 4578621 - DNA, 25 bp, Homo sapien
acggagcgcgtcatgtgactgggtc

SEQ ID NO: 4578622 - DNA, 25 bp, Homo sapien
gtggatgatcttacgcagcagctgg

SEQ ID NO: 4578623 - DNA, 25 bp, Homo sapien
cattggtgattgtgaaggtcacgga

SEQ ID NO: 4578624 - DNA, 25 bp, Homo sapien
ggaagactggatggggtcagcaccc

SEQ ID NO: 4578625 - DNA, 25 bp, Homo sapien
gactggatggggtcagcacccccag

SEQ ID NO: 4578626 - DNA, 25 bp, Homo sapien
taaggcagggcggaagactggatgg

SEQ ID NO: 4578627 - DNA, 25 bp, Homo sapien
ctgcgataaggcagggcggaagact

SEQ ID NO: 4578628 - DNA, 25 bp, Homo sapien
cagatacctcgggagagagggcttc

SEQ ID NO: 4578629 - DNA, 25 bp, Homo sapien
cctggtccgaggaggaatccaaaga

SEQ ID NO: 4578630 - DNA, 25 bp, Homo sapien
tctggagatccagggaccaacatct

SEQ ID NO: 4578631 - DNA, 25 bp, Homo sapien
caaagacaaggcgagaggagcttcc

SEQ ID NO: 4578632 - DNA, 25 bp, Homo sapien
cagccagaagccactgcacgcccat

SEQ ID NO: 4578633 - DNA, 25 bp, Homo sapien
ccaggagaatcccagcagccagaag

SEQ ID NO: 4578634 - DNA, 25 bp, Homo sapien
cagccaggagaatcccagcagccag

SEQ ID NO: 4578635 - DNA, 25 bp, Homo sapien
gcagccagaagccactgcacgccca

SEQ ID NO: 4578636 - DNA, 25 bp, Homo sapien
ctgccgagagtctgtcagtgctgag

SEQ ID NO: 4578637 - DNA, 25 bp, Homo sapien
agctttccgctgatacgttgactcc

SEQ ID NO: 4578638 - DNA, 25 bp, Homo sapien
cagctttccgctgatacgttgactc

SEQ ID NO: 4578639 - DNA, 25 bp, Homo sapien
taagtgcaggttctgattatacatt

SEQ ID NO: 4578640 - DNA, 25 bp, Homo sapien
gctcttgtgtaagtgcaggttctga

SEQ ID NO: 4578641 - DNA, 25 bp, Homo sapien
ctcttgtgtaagtgcaggttctgat

SEQ ID NO: 4578642 - DNA, 25 bp, Homo sapien
agctcttgtgtaagtgcaggttctg

SEQ ID NO: 4578643 - DNA, 25 bp, Homo sapien
gatagtctgaaccttgtaacagtgc

SEQ ID NO: 4578644 - DNA, 25 bp, Homo sapien
tcaccaaacatgtagttgttcattg

SEQ ID NO: 4578645 - DNA, 25 bp, Homo sapien
tgactctccaagagtctttcaccaa

SEQ ID NO: 4578646 - DNA, 25 bp, Homo sapien
gtggcataaaatgactctccaagag

SEQ ID NO: 4578647 - DNA, 25 bp, Homo sapien
taggttaggtaggtggcgcacatag

SEQ ID NO: 4578648 - DNA, 25 bp, Homo sapien
gtaggttaggtaggtggcgcacata

SEQ ID NO: 4578649 - DNA, 25 bp, Homo sapien
agtaggttaggtaggtggcgcacat

SEQ ID NO: 4578650 - DNA, 25 bp, Homo sapien
tgggttcagtgacaggataggccca

SEQ ID NO: 4578651 - DNA, 25 bp, Homo sapien
ccagccaggctggaaaaggccgcca

SEQ ID NO: 4578652 - DNA, 25 bp, Homo sapien
cagccaggctggaaaaggccgccat

SEQ ID NO: 4578653 - DNA, 25 bp, Homo sapien
ctgtgggttcagtgacaggataggc

SEQ ID NO: 4578654 - DNA, 25 bp, Homo sapien
caaaagcggctgacaccaactccat

SEQ ID NO: 4578655 - DNA, 25 bp, Homo sapien
gccaaaagcggctgacaccaactcc

SEQ ID NO: 4578656 - DNA, 25 bp, Homo sapien
ccaaaagcggctgacaccaactcca

SEQ ID NO: 4578657 - DNA, 25 bp, Homo sapien
tatttgaggctttggtgctagtgct

SEQ ID NO: 4578658 - DNA, 25 bp, Homo sapien
gctagtgctgaagtattacactcac

SEQ ID NO: 4578659 - DNA, 25 bp, Homo sapien
gctcctggccgagggctcattttgt

SEQ ID NO: 4578660 - DNA, 25 bp, Homo sapien
gagatgcgaattcactatgctgccc

SEQ ID NO: 4578661 - DNA, 25 bp, Homo sapien
gtgcctaccaggactctgctttata

SEQ ID NO: 4578662 - DNA, 25 bp, Homo sapien
caggcatacaaaatgtgcctaccag

SEQ ID NO: 4578663 - DNA, 25 bp, Homo sapien
tacaaaatgtgcctaccaggactct

SEQ ID NO: 4578664 - DNA, 25 bp, Homo sapien
ttttaatattgaatagatggaactg

SEQ ID NO: 4578665 - DNA, 25 bp, Homo sapien
ttttcttctctagtaagtttggaca

SEQ ID NO: 4578666 - DNA, 25 bp, Homo sapien
tttcttctctagtaagtttggacat

SEQ ID NO: 4578667 - DNA, 25 bp, Homo sapien
cttgaaaatacagccagtgattcca

SEQ ID NO: 4578668 - DNA, 25 bp, Homo sapien
cctgttgaatgcaacttgaaaatac

SEQ ID NO: 4578669 - DNA, 25 bp, Homo sapien
gctcctggccgagggctcattttgt

SEQ ID NO: 4578670 - DNA, 25 bp, Homo sapien
actcaccatccgaggtttgcaggac

SEQ ID NO: 4578671 - DNA, 25 bp, Homo sapien
tggtgctagtgctgaagtattacac

SEQ ID NO: 4578672 - DNA, 25 bp, Homo sapien
gagatgcgaattcactatgctgccc

SEQ ID NO: 4578673 - DNA, 25 bp, Homo sapien
aagcacagagcacaggcgtgctgca

SEQ ID NO: 4578674 - DNA, 25 bp, Homo sapien
tggatcagctcaccactatgacaga

SEQ ID NO: 4578675 - DNA, 25 bp, Homo sapien
cctggatcagctcaccactatgaca

SEQ ID NO: 4578676 - DNA, 25 bp, Homo sapien
gatcagctcaccactatgacagact

SEQ ID NO: 4578677 - DNA, 25 bp, Homo sapien
gttgtgcccaggtgacattcctagg

SEQ ID NO: 4578678 - DNA, 25 bp, Homo sapien
aagagcccacagtcttagccatgga

SEQ ID NO: 4578679 - DNA, 25 bp, Homo sapien
cagactgggaactggataccctgcc

SEQ ID NO: 4578680 - DNA, 25 bp, Homo sapien
ctggattgccaacatatagaggagg

SEQ ID NO: 4578681 - DNA, 25 bp, Homo sapien
gcatgttcttgtccccatgcaagta

SEQ ID NO: 4578682 - DNA, 25 bp, Homo sapien
aggctctgggtggtctccatctgcc

SEQ ID NO: 4578683 - DNA, 25 bp, Homo sapien
gatggtcttgggtgtgagaccaacc

SEQ ID NO: 4578684 - DNA, 25 bp, Homo sapien
tcttgggtgtgagaccaaccatgag

SEQ ID NO: 4578685 - DNA, 25 bp, Homo sapien
gttggaaccattctcctcggccttg

SEQ ID NO: 4578686 - DNA, 25 bp, Homo sapien
cagggcggccaggccatgcagccag

SEQ ID NO: 4578687 - DNA, 25 bp, Homo sapien
ggccatgcagccaggctccaggcat

SEQ ID NO: 4578688 - DNA, 25 bp, Homo sapien
ggcggccaggccatgcagccaggct

SEQ ID NO: 4578689 - DNA, 25 bp, Homo sapien
aggccatgcagccaggctccaggca

SEQ ID NO: 4578690 - DNA, 25 bp, Homo sapien
caggatctcagccccctccaagggt

SEQ ID NO: 4578691 - DNA, 25 bp, Homo sapien
cccaggatctcagccccctccaagg

SEQ ID NO: 4578692 - DNA, 25 bp, Homo sapien
ggatctcagccccctccaagggtac

SEQ ID NO: 4578693 - DNA, 25 bp, Homo sapien
ccccaggatctcagccccctccaag

SEQ ID NO: 4578694 - DNA, 25 bp, Homo sapien
gggagaaacaactggccagaacaca

SEQ ID NO: 4578695 - DNA, 25 bp, Homo sapien
gctccccacacaatctagagggttt

SEQ ID NO: 4578696 - DNA, 25 bp, Homo sapien
tctagtacccagaatttgcctccat

SEQ ID NO: 4578697 - DNA, 25 bp, Homo sapien
agcctcgtcttagttctgactctag

SEQ ID NO: 4578698 - DNA, 25 bp, Homo sapien
cccacacaccaacattgccgccacc

SEQ ID NO: 4578699 - DNA, 25 bp, Homo sapien
cacaccaacattgccgccaccgctg

SEQ ID NO: 4578700 - DNA, 25 bp, Homo sapien
ctgggaggcccacacaccaacattg

SEQ ID NO: 4578701 - DNA, 25 bp, Homo sapien
acacaccaacattgccgccaccgct

SEQ ID NO: 4578702 - DNA, 25 bp, Homo sapien
ggagacatgggtgagacccacttcc

SEQ ID NO: 4578703 - DNA, 25 bp, Homo sapien
gacaggagacatgggtgagacccac

SEQ ID NO: 4578704 - DNA, 25 bp, Homo sapien
cacattgacaccaggctatggtcat

SEQ ID NO: 4578705 - DNA, 25 bp, Homo sapien
gctgccccacattgacaccaggcta

SEQ ID NO: 4578706 - DNA, 25 bp, Homo sapien
caggatgaggtgtgtcgtcattgct

SEQ ID NO: 4578707 - DNA, 25 bp, Homo sapien
ccccacattgacaccaggctatggt

SEQ ID NO: 4578708 - DNA, 25 bp, Homo sapien
catcttcgtcatctccttctacatt

SEQ ID NO: 4578709 - DNA, 25 bp, Homo sapien
tcttcgtcatctccttctacatttt

SEQ ID NO: 4578710 - DNA, 25 bp, Homo sapien
atcttcgtcatctccttctacattt

SEQ ID NO: 4578711 - DNA, 25 bp, Homo sapien
tcagcatctgagtcaggttcctcct

SEQ ID NO: 4578712 - DNA, 25 bp, Homo sapien
tggtcctcttggtcatagccatcca

SEQ ID NO: 4578713 - DNA, 25 bp, Homo sapien
ttggtcatagccatccatgtaggta

SEQ ID NO: 4578714 - DNA, 25 bp, Homo sapien
tcctcttggtcatagccatccatgt

SEQ ID NO: 4578715 - DNA, 25 bp, Homo sapien
ctggggcaggagcttgaagacactc

SEQ ID NO: 4578716 - DNA, 25 bp, Homo sapien
cagctaacatgtccagacctccaaa

SEQ ID NO: 4578717 - DNA, 25 bp, Homo sapien
gtccagacctccaaagattctattt

SEQ ID NO: 4578718 - DNA, 25 bp, Homo sapien
tgagatcaagcctacatttattaaa

SEQ ID NO: 4578719 - DNA, 25 bp, Homo sapien
aaactgagatcaagcctacatttat

SEQ ID NO: 4578720 - DNA, 25 bp, Homo sapien
gccgtcagaagggtttgttcgcggc

SEQ ID NO: 4578721 - DNA, 25 bp, Homo sapien
gggagaggcatcctggcctgcacag

SEQ ID NO: 4578722 - DNA, 25 bp, Homo sapien
tttgttcgcggcagaggccggcggc

SEQ ID NO: 4578723 - DNA, 25 bp, Homo sapien
gaagggtttgttcgcggcagaggcc

SEQ ID NO: 4578724 - DNA, 25 bp, Homo sapien
atacccaatactttaacatgcatct

SEQ ID NO: 4578725 - DNA, 25 bp, Homo sapien
agtaaattagacaaatcatgacatt

SEQ ID NO: 4578726 - DNA, 25 bp, Homo sapien
actttaacatgcatctctaaaaacc

SEQ ID NO: 4578727 - DNA, 25 bp, Homo sapien
taaattagacaaatcatgacatttc

SEQ ID NO: 4578728 - DNA, 25 bp, Homo sapien
gaatgaagtgcagactccacacgga

SEQ ID NO: 4578729 - DNA, 25 bp, Homo sapien
cgcaacagaaccatctcaagtgggt

SEQ ID NO: 4578730 - DNA, 25 bp, Homo sapien
aatcgtggcgatgggttaggtatac

SEQ ID NO: 4578731 - DNA, 25 bp, Homo sapien
gcctaataaggagacgtagcagggt

SEQ ID NO: 4578732 - DNA, 25 bp, Homo sapien
cggccagatccaggcgggtcctaag

SEQ ID NO: 4578733 - DNA, 25 bp, Homo sapien
tcgctgcggccaagcggccgattcg

SEQ ID NO: 4578734 - DNA, 25 bp, Homo sapien
ggaagtctccctcaagtgtctggga

SEQ ID NO: 4578735 - DNA, 25 bp, Homo sapien
tttccctcggtggtgagcggccaga

SEQ ID NO: 4578736 - DNA, 25 bp, Homo sapien
tccagggagaatgtgctacgaaacc

SEQ ID NO: 4578737 - DNA, 25 bp, Homo sapien
ttgcctggactagcctcaaactggg

SEQ ID NO: 4578738 - DNA, 25 bp, Homo sapien
gacatcccatccttggaaccagagg

SEQ ID NO: 4578739 - DNA, 25 bp, Homo sapien
tatctgaaggtgcaaacaggcccta

SEQ ID NO: 4578740 - DNA, 25 bp, Homo sapien
ccccaagcgtgaggatgggccctaa

SEQ ID NO: 4578741 - DNA, 25 bp, Homo sapien
ggcttttggtggctcgaggtcccca

SEQ ID NO: 4578742 - DNA, 25 bp, Homo sapien
gaacttcttggcacctcttggtctg

SEQ ID NO: 4578743 - DNA, 25 bp, Homo sapien
gactctatcagaggacagtttgcct

SEQ ID NO: 4578744 - DNA, 25 bp, Homo sapien
tccacaagaaaagactgatccctgc

SEQ ID NO: 4578745 - DNA, 25 bp, Homo sapien
ccacaagaaaagactgatccctgct

SEQ ID NO: 4578746 - DNA, 25 bp, Homo sapien
ttccacaagaaaagactgatccctg

SEQ ID NO: 4578747 - DNA, 25 bp, Homo sapien
gggaagcagaaattaggagtcccca

SEQ ID NO: 4578748 - DNA, 25 bp, Homo sapien
ggaagcagaaattaggagtccccag

SEQ ID NO: 4578749 - DNA, 25 bp, Homo sapien
agcttcaggcggttgtcccgaaggg

SEQ ID NO: 4578750 - DNA, 25 bp, Homo sapien
gagcaacagggacagcacttggaag

SEQ ID NO: 4578751 - DNA, 25 bp, Homo sapien
aggctgaagcacgagcaacagggac

SEQ ID NO: 4578752 - DNA, 25 bp, Homo sapien
gtcccgaagggtcaagtggccagca

SEQ ID NO: 4578753 - DNA, 25 bp, Homo sapien
ctcctgaaccggcagcgacaagtgc

SEQ ID NO: 4578754 - DNA, 25 bp, Homo sapien
ccgtgggcctcatacagcctcagga

SEQ ID NO: 4578755 - DNA, 25 bp, Homo sapien
accggcagcgacaagtgcagccagc

SEQ ID NO: 4578756 - DNA, 25 bp, Homo sapien
tgggcctcatacagcctcaggacca

SEQ ID NO: 4578757 - DNA, 25 bp, Homo sapien
gggccgagggcaggcccagttcgga

SEQ ID NO: 4578758 - DNA, 25 bp, Homo sapien
gccgagggcaggcccagttcggaac

SEQ ID NO: 4578759 - DNA, 25 bp, Homo sapien
gaggggccgagggcaggcccagttc

SEQ ID NO: 4578760 - DNA, 25 bp, Homo sapien
tgggaggggccgagggcaggcccag

SEQ ID NO: 4578761 - DNA, 25 bp, Homo sapien
aagacacggaaaacgcactccagga

SEQ ID NO: 4578762 - DNA, 25 bp, Homo sapien
acacggaaaacgcactccaggaggt

SEQ ID NO: 4578763 - DNA, 25 bp, Homo sapien
gaagacacggaaaacgcactccagg

SEQ ID NO: 4578764 - DNA, 25 bp, Homo sapien
agacacggaaaacgcactccaggag

SEQ ID NO: 4578765 - DNA, 25 bp, Homo sapien
ggcagagccaacagggggaagttta

SEQ ID NO: 4578766 - DNA, 25 bp, Homo sapien
aggcagcttggataacgccagcatc

SEQ ID NO: 4578767 - DNA, 25 bp, Homo sapien
gtaggcagcttggataacgccagca

SEQ ID NO: 4578768 - DNA, 25 bp, Homo sapien
gggaagtttaggctgtaggcagctt

SEQ ID NO: 4578769 - DNA, 25 bp, Homo sapien
ggtacgaccaggaaacaatgctggt

SEQ ID NO: 4578770 - DNA, 25 bp, Homo sapien
ctggggtacgaccaggaaacaatgc

SEQ ID NO: 4578771 - DNA, 25 bp, Homo sapien
gggtacgaccaggaaacaatgctgg

SEQ ID NO: 4578772 - DNA, 25 bp, Homo sapien
tggggtacgaccaggaaacaatgct

SEQ ID NO: 4578773 - DNA, 25 bp, Homo sapien
aagggcagagaggtgtctagggctg

SEQ ID NO: 4578774 - DNA, 25 bp, Homo sapien
tggggtttgggctcagggaagggca

SEQ ID NO: 4578775 - DNA, 25 bp, Homo sapien
cagagaggtgtctagggctgcagga

SEQ ID NO: 4578776 - DNA, 25 bp, Homo sapien
agaaggggcaggaagccaggttgct

SEQ ID NO: 4578777 - DNA, 25 bp, Homo sapien
ccttgtgcggcatcagtgcataggt

SEQ ID NO: 4578778 - DNA, 25 bp, Homo sapien
tcgtggcgccccgtgtcagcagtag

SEQ ID NO: 4578779 - DNA, 25 bp, Homo sapien
gtgcataggtgaactcgtggcgccc

SEQ ID NO: 4578780 - DNA, 25 bp, Homo sapien
ccccgtgtcagcagtagcgtccggg

SEQ ID NO: 4578781 - DNA, 25 bp, Homo sapien
gtggtcgggaagacccatttctcca

SEQ ID NO: 4578782 - DNA, 25 bp, Homo sapien
ttgtggtcgggaagacccatttctc

SEQ ID NO: 4578783 - DNA, 25 bp, Homo sapien
ggggccacgctgaagctgttggagt

SEQ ID NO: 4578784 - DNA, 25 bp, Homo sapien
tggagttgtggtcgggaagacccat

SEQ ID NO: 4578785 - DNA, 25 bp, Homo sapien
tacttgcagtcgttgagcagggcca

SEQ ID NO: 4578786 - DNA, 25 bp, Homo sapien
tgaggatgctgcctcgcactgacgc

SEQ ID NO: 4578787 - DNA, 25 bp, Homo sapien
tgacagatccatccagcgatgggcc

SEQ ID NO: 4578788 - DNA, 25 bp, Homo sapien
gcactgacgcgccatacttgcagtc

SEQ ID NO: 4578789 - DNA, 25 bp, Homo sapien
tggagggcagatccaagacccactt

SEQ ID NO: 4578790 - DNA, 25 bp, Homo sapien
caagctctagaaccacacaactgaa

SEQ ID NO: 4578791 - DNA, 25 bp, Homo sapien
taatagtactcaccccatcgaatga

SEQ ID NO: 4578792 - DNA, 25 bp, Homo sapien
tcactaggccgagcacaagctctag

SEQ ID NO: 4578793 - DNA, 25 bp, Homo sapien
gcctggcacacacgttaggaagcag

SEQ ID NO: 4578794 - DNA, 25 bp, Homo sapien
cctggcacacacgttaggaagcagc

SEQ ID NO: 4578795 - DNA, 25 bp, Homo sapien
gtgccttgccaatgtaaagcattta

SEQ ID NO: 4578796 - DNA, 25 bp, Homo sapien
tgcctggcacacacgttaggaagca

SEQ ID NO: 4578797 - DNA, 25 bp, Homo sapien
ggtaggtcgctgcaggtgcccaaac

SEQ ID NO: 4578798 - DNA, 25 bp, Homo sapien
aactccgcacgcgagcagggaactc

SEQ ID NO: 4578799 - DNA, 25 bp, Homo sapien
aactggatctcataggtggcctggg

SEQ ID NO: 4578800 - DNA, 25 bp, Homo sapien
gcccagtcccaagaggtattgtagt

SEQ ID NO: 4578801 - DNA, 25 bp, Homo sapien
ccaagcacacttggggaaaacagcc

SEQ ID NO: 4578802 - DNA, 25 bp, Homo sapien
accaagcacacttggggaaaacagc

SEQ ID NO: 4578803 - DNA, 25 bp, Homo sapien
taccaagcacacttggggaaaacag

SEQ ID NO: 4578804 - DNA, 25 bp, Homo sapien
cggacataggggcagccaacgtcca

SEQ ID NO: 4578805 - DNA, 25 bp, Homo sapien
cctcctggctaagccgactgttggg

SEQ ID NO: 4578806 - DNA, 25 bp, Homo sapien
ataggggcagccaacgtccagcaca

SEQ ID NO: 4578807 - DNA, 25 bp, Homo sapien
tagcaagaaccaggcgctgccccgc

SEQ ID NO: 4578808 - DNA, 25 bp, Homo sapien
gggtccctgcctggcccagcacagg

SEQ ID NO: 4578809 - DNA, 25 bp, Homo sapien
tccctgcctggcccagcacaggctt

SEQ ID NO: 4578810 - DNA, 25 bp, Homo sapien
cactgccagggtccctgcctggccc

SEQ ID NO: 4578811 - DNA, 25 bp, Homo sapien
agggtccctgcctggcccagcacag

SEQ ID NO: 4578812 - DNA, 25 bp, Homo sapien
aggggtggacatactgatccagagc

SEQ ID NO: 4578813 - DNA, 25 bp, Homo sapien
gcatcccagtacaaggggacatcat

SEQ ID NO: 4578814 - DNA, 25 bp, Homo sapien
gtggtagtccatgacgtcccatgca

SEQ ID NO: 4578815 - DNA, 25 bp, Homo sapien
aatagcacaaactggttccccacgg

SEQ ID NO: 4578816 - DNA, 25 bp, Homo sapien
gggacatcatcaaatagcacaaact

SEQ ID NO: 4578817 - DNA, 25 bp, Homo sapien
gacatgggattggtgctgtacaacc

SEQ ID NO: 4578818 - DNA, 25 bp, Homo sapien
tgtacaaccaactgacctcgctgtc

SEQ ID NO: 4578819 - DNA, 25 bp, Homo sapien
ggagtgagtagacccagtggacagg

SEQ ID NO: 4578820 - DNA, 25 bp, Homo sapien
ccatgtgtgggttccagcccagagc

SEQ ID NO: 4578821 - DNA, 25 bp, Homo sapien
gacgtcaggcgaccagttgggtcca

SEQ ID NO: 4578822 - DNA, 25 bp, Homo sapien
aggcgaccagttgggtccagcttca

SEQ ID NO: 4578823 - DNA, 25 bp, Homo sapien
cagcttcactcggatgatgccattg

SEQ ID NO: 4578824 - DNA, 25 bp, Homo sapien
accaggaccaaggacgtcaggcgac

SEQ ID NO: 4578825 - DNA, 25 bp, Homo sapien
cagttgtaagaaagtatcccagcac

SEQ ID NO: 4578826 - DNA, 25 bp, Homo sapien
gacaggggagctcaggaccctcagt

SEQ ID NO: 4578827 - DNA, 25 bp, Homo sapien
gaaagtatcccagcacagttcctgc

SEQ ID NO: 4578828 - DNA, 25 bp, Homo sapien
ggaccctcagttgtaagaaagtatc

SEQ ID NO: 4578829 - DNA, 25 bp, Homo sapien
aacaggagcatagcccatgctgggc

SEQ ID NO: 4578830 - DNA, 25 bp, Homo sapien
ggaacaggagcatagcccatgctgg

SEQ ID NO: 4578831 - DNA, 25 bp, Homo sapien
ttgcactacgaacacaggctgctgg

SEQ ID NO: 4578832 - DNA, 25 bp, Homo sapien
ctcttgcactacgaacacaggctgc

SEQ ID NO: 4578833 - DNA, 25 bp, Homo sapien
atgtgctactactctccagtcaggg

SEQ ID NO: 4578834 - DNA, 25 bp, Homo sapien
ggttggtggaagatgtgctactact

SEQ ID NO: 4578835 - DNA, 25 bp, Homo sapien
tccctcggggtatcccaggcctgat

SEQ ID NO: 4578836 - DNA, 25 bp, Homo sapien
ttcctgctgcagtagcaacccttcc

SEQ ID NO: 4578837 - DNA, 25 bp, Homo sapien
ttcgatccgcttccagggcagtgtg

SEQ ID NO: 4578838 - DNA, 25 bp, Homo sapien
gcagcttccagtcaccacatcatgg

SEQ ID NO: 4578839 - DNA, 25 bp, Homo sapien
atctggatgcagcttccagtcacca

SEQ ID NO: 4578840 - DNA, 25 bp, Homo sapien
tggatgcagcttccagtcaccacat

SEQ ID NO: 4578841 - DNA, 25 bp, Homo sapien
gcttccagtcaccacatcatggaac

SEQ ID NO: 4578842 - DNA, 25 bp, Homo sapien
ctgcaggggccaagggcagggatgg

SEQ ID NO: 4578843 - DNA, 25 bp, Homo sapien
caggggccaagggcagggatgggaa

SEQ ID NO: 4578844 - DNA, 25 bp, Homo sapien
tgcaggggccaagggcagggatggg

SEQ ID NO: 4578845 - DNA, 25 bp, Homo sapien
aggggccaagggcagggatgggaag

SEQ ID NO: 4578846 - DNA, 25 bp, Homo sapien
gagcagctccacgtcgtgcaggatc

SEQ ID NO: 4578847 - DNA, 25 bp, Homo sapien
cacattcccggttccccttcttgat

SEQ ID NO: 4578848 - DNA, 25 bp, Homo sapien
tcacattcccggttccccttcttga

SEQ ID NO: 4578849 - DNA, 25 bp, Homo sapien
agctccacgtcgtgcaggatccgct

SEQ ID NO: 4578850 - DNA, 25 bp, Homo sapien
gagtcactctccagtgctgagaaga

SEQ ID NO: 4578851 - DNA, 25 bp, Homo sapien
atgtgccattgtgcagctccaagaa

SEQ ID NO: 4578852 - DNA, 25 bp, Homo sapien
gccattgtgcagctccaagaagagc

SEQ ID NO: 4578853 - DNA, 25 bp, Homo sapien
agaagagctccccaacccacgtgca

SEQ ID NO: 4578854 - DNA, 25 bp, Homo sapien
aggcactgtggttggcccgcccctt

SEQ ID NO: 4578855 - DNA, 25 bp, Homo sapien
tgggcagcccatccgtattgctcag

SEQ ID NO: 4578856 - DNA, 25 bp, Homo sapien
gcttcaggcggtccagcatggtctg

SEQ ID NO: 4578857 - DNA, 25 bp, Homo sapien
tcccggttgttggccacggtcttca

SEQ ID NO: 4578858 - DNA, 25 bp, Homo sapien
aagtggaccagtacacgggagccat

SEQ ID NO: 4578859 - DNA, 25 bp, Homo sapien
tcccataggagtcgccaggtgggaa

SEQ ID NO: 4578860 - DNA, 25 bp, Homo sapien
cctgcatcccataggagtcgccagg

SEQ ID NO: 4578861 - DNA, 25 bp, Homo sapien
caggtgggaagtggaccagtacacg

SEQ ID NO: 4578862 - DNA, 25 bp, Homo sapien
gtctgtctaggaccccacaataagg

SEQ ID NO: 4578863 - DNA, 25 bp, Homo sapien
tggtggtctgtctaggaccccacaa

SEQ ID NO: 4578864 - DNA, 25 bp, Homo sapien
ggagaggcaaatgggccaggcggga

SEQ ID NO: 4578865 - DNA, 25 bp, Homo sapien
tggtctgtctaggaccccacaataa

SEQ ID NO: 4578866 - DNA, 25 bp, Homo sapien
aggagttcaccaaattccagctcaa

SEQ ID NO: 4578867 - DNA, 25 bp, Homo sapien
tgagtagccaaaggtgtccggcagc

SEQ ID NO: 4578868 - DNA, 25 bp, Homo sapien
tctgggtgagaaagcgcctgatgcc

SEQ ID NO: 4578869 - DNA, 25 bp, Homo sapien
gatgccacagccgtgcatgatctgg

SEQ ID NO: 4578870 - DNA, 25 bp, Homo sapien
cctgcaaaaactgcctcaccatggc

SEQ ID NO: 4578871 - DNA, 25 bp, Homo sapien
ctggccctgcaaaaactgcctcacc

SEQ ID NO: 4578872 - DNA, 25 bp, Homo sapien
tcagagcacatcttcccaaactcct

SEQ ID NO: 4578873 - DNA, 25 bp, Homo sapien
ctcagagcacatcttcccaaactcc

SEQ ID NO: 4578874 - DNA, 25 bp, Homo sapien
gctggacggggagcaggcaggcgct

SEQ ID NO: 4578875 - DNA, 25 bp, Homo sapien
tggacggggagcaggcaggcgctca

SEQ ID NO: 4578876 - DNA, 25 bp, Homo sapien
ccaggtcagcgctggacggggagca

SEQ ID NO: 4578877 - DNA, 25 bp, Homo sapien
aggtcagcgctggacggggagcagg

SEQ ID NO: 4578878 - DNA, 25 bp, Homo sapien
ccagaactcaggaagggcccctgtc

SEQ ID NO: 4578879 - DNA, 25 bp, Homo sapien
gccagaactcaggaagggcccctgt

SEQ ID NO: 4578880 - DNA, 25 bp, Homo sapien
cagggtagcggctcttcacccattc

SEQ ID NO: 4578881 - DNA, 25 bp, Homo sapien
aaactcctggatgcgggagtacagg

SEQ ID NO: 4578882 - DNA, 25 bp, Homo sapien
ggagtacaggccagggtagcggctc

SEQ ID NO: 4578883 - DNA, 25 bp, Homo sapien
acaggcacaaactgcccacggcacg

SEQ ID NO: 4578884 - DNA, 25 bp, Homo sapien
caaagatgaactcagggttccgctc

SEQ ID NO: 4578885 - DNA, 25 bp, Homo sapien
agcaggcaaagatgaactcagggtt

SEQ ID NO: 4578886 - DNA, 25 bp, Homo sapien
tcacccagctccgggcacatttcct

SEQ ID NO: 4578887 - DNA, 25 bp, Homo sapien
cctcacagtctctttgaagggccaa

SEQ ID NO: 4578888 - DNA, 25 bp, Homo sapien
ctgtggtgtccctcctaagtggtca

SEQ ID NO: 4578889 - DNA, 25 bp, Homo sapien
tcccctagaggatcctacgagaagt

SEQ ID NO: 4578890 - DNA, 25 bp, Homo sapien
tgctatgaggccaattatacaggtc

SEQ ID NO: 4578891 - DNA, 25 bp, Homo sapien
tgtcctaccagaggtgctacagcct

SEQ ID NO: 4578892 - DNA, 25 bp, Homo sapien
gatcccaaaacttcggctgcatcag

SEQ ID NO: 4578893 - DNA, 25 bp, Homo sapien
tgtgatcccaaaacttcggctgcat

SEQ ID NO: 4578894 - DNA, 25 bp, Homo sapien
gttctgtgatcccaaaacttcggct

SEQ ID NO: 4578895 - DNA, 25 bp, Homo sapien
ccaaaacttcggctgcatcagaatc

SEQ ID NO: 4578896 - DNA, 25 bp, Homo sapien
tgtctctgtaatcctaccctcaata

SEQ ID NO: 4578897 - DNA, 25 bp, Homo sapien
ccccatgaggcatcagattttgttg

SEQ ID NO: 4578898 - DNA, 25 bp, Homo sapien
gatttcccgtaaaactcagacactg

SEQ ID NO: 4578899 - DNA, 25 bp, Homo sapien
cagacactgcaaacttgtccaggaa

SEQ ID NO: 4578900 - DNA, 25 bp, Homo sapien
gaagctgcgctggttgtccttcccg

SEQ ID NO: 4578901 - DNA, 25 bp, Homo sapien
tgccctgtggcatgaatggtgtgtt

SEQ ID NO: 4578902 - DNA, 25 bp, Homo sapien
tgttggctttcacccccatgttggc

SEQ ID NO: 4578903 - DNA, 25 bp, Homo sapien
ggcagggtcacacacgttcaccatc

SEQ ID NO: 4578904 - DNA, 25 bp, Homo sapien
acacagctagctcagcccggctcag

SEQ ID NO: 4578905 - DNA, 25 bp, Homo sapien
ctgcaatcatgcttcccttcccggc

SEQ ID NO: 4578906 - DNA, 25 bp, Homo sapien
gggtcaggggctgcaatcatgcttc

SEQ ID NO: 4578907 - DNA, 25 bp, Homo sapien
gagcatgtggacatcccggtggaac

SEQ ID NO: 4578908 - DNA, 25 bp, Homo sapien
gtcaggatacaatcttaactagtaa

SEQ ID NO: 4578909 - DNA, 25 bp, Homo sapien
ggagactcaggcaagtggatagcct

SEQ ID NO: 4578910 - DNA, 25 bp, Homo sapien
aaactataccgggatgagccgggca

SEQ ID NO: 4578911 - DNA, 25 bp, Homo sapien
catggaatgtaagaagtcaggatac

SEQ ID NO: 4578912 - DNA, 25 bp, Homo sapien
aaaactatgccggaaagatacacca

SEQ ID NO: 4578913 - DNA, 25 bp, Homo sapien
aaactatgccggaaagatacaccaa

SEQ ID NO: 4578914 - DNA, 25 bp, Homo sapien
cagcctgtcagtcaggacatagctg

SEQ ID NO: 4578915 - DNA, 25 bp, Homo sapien
agcctgtcagtcaggacatagctgg

SEQ ID NO: 4578916 - DNA, 25 bp, Homo sapien
ccagcctgtcagtcaggacatagct

SEQ ID NO: 4578917 - DNA, 25 bp, Homo sapien
atggtcagctccacccggaaccagc

SEQ ID NO: 4578918 - DNA, 25 bp, Homo sapien
tggtcagctccacccggaaccagca

SEQ ID NO: 4578919 - DNA, 25 bp, Homo sapien
tcacgccacaccagaccttctccat

SEQ ID NO: 4578920 - DNA, 25 bp, Homo sapien
ctggacaggttctccatcacgccac

SEQ ID NO: 4578921 - DNA, 25 bp, Homo sapien
ggcggaagtcccgctggactgcctc

SEQ ID NO: 4578922 - DNA, 25 bp, Homo sapien
ggtccgaagctgtcgccgacctgcg

SEQ ID NO: 4578923 - DNA, 25 bp, Homo sapien
gtgggtccgaagctgtcgccgacct

SEQ ID NO: 4578924 - DNA, 25 bp, Homo sapien
ggaagtcccgctggactgcctcctg

SEQ ID NO: 4578925 - DNA, 25 bp, Homo sapien
ccacagggcagctggccccaaaaag

SEQ ID NO: 4578926 - DNA, 25 bp, Homo sapien
agagcacagccacagggcagctggc

SEQ ID NO: 4578927 - DNA, 25 bp, Homo sapien
ctggagagcacagccacagggcagc

SEQ ID NO: 4578928 - DNA, 25 bp, Homo sapien
cacagggcagctggccccaaaaagc

SEQ ID NO: 4578929 - DNA, 25 bp, Homo sapien
tgcagcttaggtttctccccggaag

SEQ ID NO: 4578930 - DNA, 25 bp, Homo sapien
aggaaagcttgaggcgcacggttgc

SEQ ID NO: 4578931 - DNA, 25 bp, Homo sapien
tttgtcccgcggcccgggtggctgc

SEQ ID NO: 4578932 - DNA, 25 bp, Homo sapien
gctccgcggcacagtccattcccta

SEQ ID NO: 4578933 - DNA, 25 bp, Homo sapien
cgctccagcgtggtgcgccagtgct

SEQ ID NO: 4578934 - DNA, 25 bp, Homo sapien
agtagagcggcgacacgaacttctc

SEQ ID NO: 4578935 - DNA, 25 bp, Homo sapien
ctgccgcggaggttacagtcggtaa

SEQ ID NO: 4578936 - DNA, 25 bp, Homo sapien
cgccagtgcttcaaggccggcgcag

SEQ ID NO: 4578937 - DNA, 25 bp, Homo sapien
aggttccggcgtccagagggcgcct

SEQ ID NO: 4578938 - DNA, 25 bp, Homo sapien
tgtctgaactttgagccgagttgga

SEQ ID NO: 4578939 - DNA, 25 bp, Homo sapien
cgctccacggcaggaaaccaaaggt

SEQ ID NO: 4578940 - DNA, 25 bp, Homo sapien
cttttcttggaacaccggcggctct

SEQ ID NO: 4578941 - DNA, 25 bp, Homo sapien
ttaatggaaatactgaccaagttta

SEQ ID NO: 4578942 - DNA, 25 bp, Homo sapien
aatggaaatactgaccaagtttaca

SEQ ID NO: 4578943 - DNA, 25 bp, Homo sapien
taatggaaatactgaccaagtttac

SEQ ID NO: 4578944 - DNA, 25 bp, Homo sapien
ttgaaatcctatcctgacctgcagg

SEQ ID NO: 4578945 - DNA, 25 bp, Homo sapien
aaatgctacttgtgaaaacccaggc

SEQ ID NO: 4578946 - DNA, 25 bp, Homo sapien
tcaaatgcagatcacacggaaaggt

SEQ ID NO: 4578947 - DNA, 25 bp, Homo sapien
ccagtgtgggtcataaagcgagaca

SEQ ID NO: 4578948 - DNA, 25 bp, Homo sapien
tatggtacacaagaagctagagcag

SEQ ID NO: 4578949 - DNA, 25 bp, Homo sapien
taacaggtagcccacttggtgccag

SEQ ID NO: 4578950 - DNA, 25 bp, Homo sapien
taggcagcaagggaatcgtcaggaa

SEQ ID NO: 4578951 - DNA, 25 bp, Homo sapien
gatcttagatgtgctcgagtgacca

SEQ ID NO: 4578952 - DNA, 25 bp, Homo sapien
tctctgtatcacaggtggtggtaca

SEQ ID NO: 4578953 - DNA, 25 bp, Homo sapien
acccatgagccacttgctggtctct

SEQ ID NO: 4578954 - DNA, 25 bp, Homo sapien
tgttaatgctcacaaaatgcagggt

SEQ ID NO: 4578955 - DNA, 25 bp, Homo sapien
gaatactgtgccgtatttgacacga

SEQ ID NO: 4578956 - DNA, 25 bp, Homo sapien
tacactccagcttatccagactatc

SEQ ID NO: 4578957 - DNA, 25 bp, Homo sapien
tgacacttccggatccgccgtagat

SEQ ID NO: 4578958 - DNA, 25 bp, Homo sapien
caccatcttgtaggaattcagcttg

SEQ ID NO: 4578959 - DNA, 25 bp, Homo sapien
gcagggcggtcctccgatacatata

SEQ ID NO: 4578960 - DNA, 25 bp, Homo sapien
taatgagaaacttctaggcctctgt

SEQ ID NO: 4578961 - DNA, 25 bp, Homo sapien
gatgagagctcgtccagatgcagat

SEQ ID NO: 4578962 - DNA, 25 bp, Homo sapien
ttaccagctacagttctgctttggg

SEQ ID NO: 4578963 - DNA, 25 bp, Homo sapien
gattcccgtgacttccccaaagtga

SEQ ID NO: 4578964 - DNA, 25 bp, Homo sapien
tggtggcgccaaactgtatttgcaa

SEQ ID NO: 4578965 - DNA, 25 bp, Homo sapien
gaacaaaaatgctggtggtggcgcc

SEQ ID NO: 4578966 - DNA, 25 bp, Homo sapien
tgcactggcaccattaaagtaatgg

SEQ ID NO: 4578967 - DNA, 25 bp, Homo sapien
gattttgcaccttcatgcgactgca

SEQ ID NO: 4578968 - DNA, 25 bp, Homo sapien
tgttcacgaagctcaggcgaggtag

SEQ ID NO: 4578969 - DNA, 25 bp, Homo sapien
gtatcgctccacgtagtctgaccag

SEQ ID NO: 4578970 - DNA, 25 bp, Homo sapien
tctgtgctagatgttcacgaagctc

SEQ ID NO: 4578971 - DNA, 25 bp, Homo sapien
gcgaggtagtatctgaattcatgta

SEQ ID NO: 4578972 - DNA, 25 bp, Homo sapien
caatactgctaagtttctgaggtgc

SEQ ID NO: 4578973 - DNA, 25 bp, Homo sapien
tcatttccccacagagcattttgtt

SEQ ID NO: 4578974 - DNA, 25 bp, Homo sapien
ctatgattacaatgccccgaattca

SEQ ID NO: 4578975 - DNA, 25 bp, Homo sapien
aaacagctcctaatgcattgggcac

SEQ ID NO: 4578976 - DNA, 25 bp, Homo sapien
ctcaatagtcagctggacctggcct

SEQ ID NO: 4578977 - DNA, 25 bp, Homo sapien
tgtgtccagaagctcaatagtcagc

SEQ ID NO: 4578978 - DNA, 25 bp, Homo sapien
gcttccacagggtcatccgaattct

SEQ ID NO: 4578979 - DNA, 25 bp, Homo sapien
gtcatccgaattctcctcttctgtg

SEQ ID NO: 4578980 - DNA, 25 bp, Homo sapien
cccggctttaacttctggttcagag

SEQ ID NO: 4578981 - DNA, 25 bp, Homo sapien
gattgtccaggaagacaattacttc

SEQ ID NO: 4578982 - DNA, 25 bp, Homo sapien
tccaggagtagaatcacaggtcaaa

SEQ ID NO: 4578983 - DNA, 25 bp, Homo sapien
ggtgaactcattaaaaggtccagga

SEQ ID NO: 4578984 - DNA, 25 bp, Homo sapien
agctttccgctgatacgttgactcc

SEQ ID NO: 4578985 - DNA, 25 bp, Homo sapien
cagctttccgctgatacgttgactc

SEQ ID NO: 4578986 - DNA, 25 bp, Homo sapien
ggtgggtggagatagtatttattac

SEQ ID NO: 4578987 - DNA, 25 bp, Homo sapien
ttactgattcaaaatcataaccaga

SEQ ID NO: 4578988 - DNA, 25 bp, Homo sapien
ctattgtttcgaaaaccaacctcag

SEQ ID NO: 4578989 - DNA, 25 bp, Homo sapien
gttttctggatgaaacctgtttcca

SEQ ID NO: 4578990 - DNA, 25 bp, Homo sapien
gatcagtttgtccatggtaaaggca

SEQ ID NO: 4578991 - DNA, 25 bp, Homo sapien
ggtaaaggcaatgtaggcatgaatg

SEQ ID NO: 4578992 - DNA, 25 bp, Homo sapien
tggtgaacatctctctcagtgaatc

SEQ ID NO: 4578993 - DNA, 25 bp, Homo sapien
agctgggtaataatcttctacatca

SEQ ID NO: 4578994 - DNA, 25 bp, Homo sapien
gggaacaaatccgtagcagcctcag

SEQ ID NO: 4578995 - DNA, 25 bp, Homo sapien
tctttgagacgtagctgaatggcag

SEQ ID NO: 4578996 - DNA, 25 bp, Homo sapien
tgtcttcatacgcaagtgagaggtg

SEQ ID NO: 4578997 - DNA, 25 bp, Homo sapien
tgtgcttcttaactgcccctgtggc

SEQ ID NO: 4578998 - DNA, 25 bp, Homo sapien
ctcattgagtaagctcttagacctc

SEQ ID NO: 4578999 - DNA, 25 bp, Homo sapien
tcttagacctcaggaccttggtgtc

SEQ ID NO: 4579000 - DNA, 25 bp, Homo sapien
cattctgtttaaagttgatcccctg

SEQ ID NO: 4579001 - DNA, 25 bp, Homo sapien
tactttgttaaagcctctctgagct

SEQ ID NO: 4579002 - DNA, 25 bp, Homo sapien
gaaagagaggtctcatgggacaacc

SEQ ID NO: 4579003 - DNA, 25 bp, Homo sapien
gagccttccaccatgaacttacaag

SEQ ID NO: 4579004 - DNA, 25 bp, Homo sapien
taatgttggttacacaggaccccca

SEQ ID NO: 4579005 - DNA, 25 bp, Homo sapien
taatgagacactgaaccggtagtga

SEQ ID NO: 4579006 - DNA, 25 bp, Homo sapien
actaagggcacatttgctcatgtac

SEQ ID NO: 4579007 - DNA, 25 bp, Homo sapien
actaaagcactaagggcacatttgc

SEQ ID NO: 4579008 - DNA, 25 bp, Homo sapien
cactaagggcacatttgctcatgta

SEQ ID NO: 4579009 - DNA, 25 bp, Homo sapien
ccagaacccggattgttgccagatt

SEQ ID NO: 4579010 - DNA, 25 bp, Homo sapien
ctatggatgacttctgatgtgcccc

SEQ ID NO: 4579011 - DNA, 25 bp, Homo sapien
tatcagcatatatcctctggagtgc

SEQ ID NO: 4579012 - DNA, 25 bp, Homo sapien
ttcagcagacaagcgggaaagcttc

SEQ ID NO: 4579013 - DNA, 25 bp, Homo sapien
gtagttattaccaccaccgtcgctg

SEQ ID NO: 4579014 - DNA, 25 bp, Homo sapien
ctggcacataagaaccacaggatga

SEQ ID NO: 4579015 - DNA, 25 bp, Homo sapien
ggataacagcacctattactctcac

SEQ ID NO: 4579016 - DNA, 25 bp, Homo sapien
ggttctgccctactagctacataag

SEQ ID NO: 4579017 - DNA, 25 bp, Homo sapien
aacttcaaatgccaaacaagcttgt

SEQ ID NO: 4579018 - DNA, 25 bp, Homo sapien
caacttcaaatgccaaacaagcttg

SEQ ID NO: 4579019 - DNA, 25 bp, Homo sapien
ccaacttcaaatgccaaacaagctt

SEQ ID NO: 4579020 - DNA, 25 bp, Homo sapien
caaaggtagagtcctcagaccacga

SEQ ID NO: 4579021 - DNA, 25 bp, Homo sapien
ggtagagtcctcagaccacgaaggg

SEQ ID NO: 4579022 - DNA, 25 bp, Homo sapien
tcacaaaggtagagtcctcagacca

SEQ ID NO: 4579023 - DNA, 25 bp, Homo sapien
cacaacgataaatatgttcttcata

SEQ ID NO: 4579024 - DNA, 25 bp, Homo sapien
ggagtccgtcctgtacacttgggct

SEQ ID NO: 4579025 - DNA, 25 bp, Homo sapien
taactctttggtaaggctcgatagc

SEQ ID NO: 4579026 - DNA, 25 bp, Homo sapien
tggagcccaatcgtttacaagaagc

SEQ ID NO: 4579027 - DNA, 25 bp, Homo sapien
tgtacagactccttatagcccagaa

SEQ ID NO: 4579028 - DNA, 25 bp, Homo sapien
tagttgcacaagctcagcacgagag

SEQ ID NO: 4579029 - DNA, 25 bp, Homo sapien
aattttcgtaggcttctgcactccg

SEQ ID NO: 4579030 - DNA, 25 bp, Homo sapien
gcacgagagatcacctcctggttaa

SEQ ID NO: 4579031 - DNA, 25 bp, Homo sapien
caagacagcgtaggaaattttcgta

SEQ ID NO: 4579032 - DNA, 25 bp, Homo sapien
taacgaacctatgtactcaccccaa

SEQ ID NO: 4579033 - DNA, 25 bp, Homo sapien
tatacttacttctcctaccactgca

SEQ ID NO: 4579034 - DNA, 25 bp, Homo sapien
aaaccaagtggcttatcagcaaccc

SEQ ID NO: 4579035 - DNA, 25 bp, Homo sapien
tcaatggcatagacaaagtaaaact

SEQ ID NO: 4579036 - DNA, 25 bp, Homo sapien
taacgattctgttccaccaccatgt

SEQ ID NO: 4579037 - DNA, 25 bp, Homo sapien
ttctgttccaccaccatgtttgctg

SEQ ID NO: 4579038 - DNA, 25 bp, Homo sapien
tgttccaccaccatgtttgctggca

SEQ ID NO: 4579039 - DNA, 25 bp, Homo sapien
tcaaaaaataacgattctgttccac

SEQ ID NO: 4579040 - DNA, 25 bp, Homo sapien
ttcagattgagcagtttgggtttct

SEQ ID NO: 4579041 - DNA, 25 bp, Homo sapien
gggcctctgcggcttgttgttcagt

SEQ ID NO: 4579042 - DNA, 25 bp, Homo sapien
ggttcctgtaggatgtctgcggatc

SEQ ID NO: 4579043 - DNA, 25 bp, Homo sapien
cacagaatcaaccttctcagcagtt

SEQ ID NO: 4579044 - DNA, 25 bp, Homo sapien
tgtctgcggatctggcagccattct

SEQ ID NO: 4579045 - DNA, 25 bp, Homo sapien
catctggtaggaattgtccaaactc

SEQ ID NO: 4579046 - DNA, 25 bp, Homo sapien
ggaattgtccaaactctgacaacaa

SEQ ID NO: 4579047 - DNA, 25 bp, Homo sapien
ttttaaagagacgagcaacctgggc

SEQ ID NO: 4579048 - DNA, 25 bp, Homo sapien
tcaatgctggagtgtagtttcctcc

SEQ ID NO: 4579049 - DNA, 25 bp, Homo sapien
ggaatgctttgtagatgtctggttg

SEQ ID NO: 4579050 - DNA, 25 bp, Homo sapien
agttgatggcatgattaaactccac

SEQ ID NO: 4579051 - DNA, 25 bp, Homo sapien
tgctttgtagatgtctggttggccc

SEQ ID NO: 4579052 - DNA, 25 bp, Homo sapien
gaaatctgttcttgatcttattaac

SEQ ID NO: 4579053 - DNA, 25 bp, Homo sapien
cgttcccaacgagattgtcactggt

SEQ ID NO: 4579054 - DNA, 25 bp, Homo sapien
gatggggccgttcccaacgagattg

SEQ ID NO: 4579055 - DNA, 25 bp, Homo sapien
caacgagattgtcactggtgtgtga

SEQ ID NO: 4579056 - DNA, 25 bp, Homo sapien
gggccgttcccaacgagattgtcac

SEQ ID NO: 4579057 - DNA, 25 bp, Homo sapien
ctgactggccggagtatgtgcttgc

SEQ ID NO: 4579058 - DNA, 25 bp, Homo sapien
ccggcggagaacgtggggatgcata

SEQ ID NO: 4579059 - DNA, 25 bp, Homo sapien
gggagtctgctgactggccggagta

SEQ ID NO: 4579060 - DNA, 25 bp, Homo sapien
ctggccggagtatgtgcttgcagtt

SEQ ID NO: 4579061 - DNA, 25 bp, Homo sapien
ggctgactgggctgaaggctgggaa

SEQ ID NO: 4579062 - DNA, 25 bp, Homo sapien
aggctgtggctggatgccatgggtg

SEQ ID NO: 4579063 - DNA, 25 bp, Homo sapien
tgccatgggtgggaatctgatgaac

SEQ ID NO: 4579064 - DNA, 25 bp, Homo sapien
gctggatgccatgggtgggaatctg

SEQ ID NO: 4579065 - DNA, 25 bp, Homo sapien
tgttgaatcccattatcagatcggg

SEQ ID NO: 4579066 - DNA, 25 bp, Homo sapien
ggacacacgactaatcactcctggg

SEQ ID NO: 4579067 - DNA, 25 bp, Homo sapien
ttgcacctcaattttgtagccaggg

SEQ ID NO: 4579068 - DNA, 25 bp, Homo sapien
ggcaagaaggtgttgaatcccatta

SEQ ID NO: 4579069 - DNA, 25 bp, Homo sapien
tcacctggtcaagataagatagcgc

SEQ ID NO: 4579070 - DNA, 25 bp, Homo sapien
ggaaatcattgtagacctgaggctg

SEQ ID NO: 4579071 - DNA, 25 bp, Homo sapien
ccttcatgatgtcaaggaaatcatt

SEQ ID NO: 4579072 - DNA, 25 bp, Homo sapien
ggctgactaccaaactgcagcttca

SEQ ID NO: 4579073 - DNA, 25 bp, Homo sapien
taagctatgagtctgatttaggaca

SEQ ID NO: 4579074 - DNA, 25 bp, Homo sapien
aaactgacctatcacaaagaagaac

SEQ ID NO: 4579075 - DNA, 25 bp, Homo sapien
cagagacacccaaaagaaatcccca

SEQ ID NO: 4579076 - DNA, 25 bp, Homo sapien
gaagaacaggttggaaaggctaagc

SEQ ID NO: 4579077 - DNA, 25 bp, Homo sapien
gattgtatagttggtcaatacccac

SEQ ID NO: 4579078 - DNA, 25 bp, Homo sapien
taatcagtgtttcggtgttgctaga

SEQ ID NO: 4579079 - DNA, 25 bp, Homo sapien
cattacggccatggttaatcagtgt

SEQ ID NO: 4579080 - DNA, 25 bp, Homo sapien
cccggccccgagacaaatggctgtt

SEQ ID NO: 4579081 - DNA, 25 bp, Homo sapien
ctacagatttaaggaagcacttggg

SEQ ID NO: 4579082 - DNA, 25 bp, Homo sapien
tataaggtaactactgcagagacgg

SEQ ID NO: 4579083 - DNA, 25 bp, Homo sapien
gccccgaatctcctgaagtctacaa

SEQ ID NO: 4579084 - DNA, 25 bp, Homo sapien
gggagacccttagactctgctgata

SEQ ID NO: 4579085 - DNA, 25 bp, Homo sapien
cagagatacaaggttagctgggaac

SEQ ID NO: 4579086 - DNA, 25 bp, Homo sapien
tagagagttcaaaaggaagcagcca

SEQ ID NO: 4579087 - DNA, 25 bp, Homo sapien
tatttctcattcgtgcctgcaagca

SEQ ID NO: 4579088 - DNA, 25 bp, Homo sapien
aatccacaccaacgagggcagggat

SEQ ID NO: 4579089 - DNA, 25 bp, Homo sapien
cgacatgcattcatacagtccacaa

SEQ ID NO: 4579090 - DNA, 25 bp, Homo sapien
taaaatggccccacaatcctgataa

SEQ ID NO: 4579091 - DNA, 25 bp, Homo sapien
tcctgataacatttgaccgacatgc

SEQ ID NO: 4579092 - DNA, 25 bp, Homo sapien
ggcactgatgccaagataggaaaca

SEQ ID NO: 4579093 - DNA, 25 bp, Homo sapien
tatctcaggttagaagttgtaccac

SEQ ID NO: 4579094 - DNA, 25 bp, Homo sapien
ctcaggttagaagttgtaccaccac

SEQ ID NO: 4579095 - DNA, 25 bp, Homo sapien
gtatctcaggttagaagttgtacca

SEQ ID NO: 4579096 - DNA, 25 bp, Homo sapien
ctagtatctcaggttagaagttgta

SEQ ID NO: 4579097 - DNA, 25 bp, Homo sapien
ctgtccctgcactggtgcaactggt

SEQ ID NO: 4579098 - DNA, 25 bp, Homo sapien
ctggatgagcatgactctggaccac

SEQ ID NO: 4579099 - DNA, 25 bp, Homo sapien
gggctggatgagcatgactctggac

SEQ ID NO: 4579100 - DNA, 25 bp, Homo sapien
cctctgaaattgctgctgtccctgc

SEQ ID NO: 4579101 - DNA, 25 bp, Homo sapien
ccggagctctgtggcatggctgaaa

SEQ ID NO: 4579102 - DNA, 25 bp, Homo sapien
gatgatggctgctatgaactgctgc

SEQ ID NO: 4579103 - DNA, 25 bp, Homo sapien
ctatagcgggcccatgactgccgga

SEQ ID NO: 4579104 - DNA, 25 bp, Homo sapien
gctgcaccgctgttgggtgatgatg

SEQ ID NO: 4579105 - DNA, 25 bp, Homo sapien
tcattctagtcccttggttggctcc

SEQ ID NO: 4579106 - DNA, 25 bp, Homo sapien
cctcattctagtcccttggttggct

SEQ ID NO: 4579107 - DNA, 25 bp, Homo sapien
cattctagtcccttggttggctcca

SEQ ID NO: 4579108 - DNA, 25 bp, Homo sapien
ccctcattctagtcccttggttggc

SEQ ID NO: 4579109 - DNA, 25 bp, Homo sapien
caagcacccggtgctggtgaggaaa

SEQ ID NO: 4579110 - DNA, 25 bp, Homo sapien
agacactgcttcatacacaggaggg

SEQ ID NO: 4579111 - DNA, 25 bp, Homo sapien
tgaattcccgtagctgactgcatgg

SEQ ID NO: 4579112 - DNA, 25 bp, Homo sapien
tgcatacaccggtgactcctggtca

SEQ ID NO: 4579113 - DNA, 25 bp, Homo sapien
tggaggaggctttaattggtacagc

SEQ ID NO: 4579114 - DNA, 25 bp, Homo sapien
tacagcctatttagctggcaacttg

SEQ ID NO: 4579115 - DNA, 25 bp, Homo sapien
tgggtaaggatacagggaaacactg

SEQ ID NO: 4579116 - DNA, 25 bp, Homo sapien
gcctgtatcctacacatctgctgag

SEQ ID NO: 4579117 - DNA, 25 bp, Homo sapien
cgagtccggcgttacccgccaccag

SEQ ID NO: 4579118 - DNA, 25 bp, Homo sapien
tccggcgttacccgccaccaggctc

SEQ ID NO: 4579119 - DNA, 25 bp, Homo sapien
tcgagtccggcgttacccgccacca

SEQ ID NO: 4579120 - DNA, 25 bp, Homo sapien
gcttcggccgctcgtcactgcgtgt

SEQ ID NO: 4579121 - DNA, 25 bp, Homo sapien
cactgcgtgtccctctcagcgtgag

SEQ ID NO: 4579122 - DNA, 25 bp, Homo sapien
ccgaagcggactgccagctacctct

SEQ ID NO: 4579123 - DNA, 25 bp, Homo sapien
tccactaacgaagcggtcacaggct

SEQ ID NO: 4579124 - DNA, 25 bp, Homo sapien
tcattggaggacaccacataacccg

SEQ ID NO: 4579125 - DNA, 25 bp, Homo sapien
tcatcgcattggaaggctacccctg

SEQ ID NO: 4579126 - DNA, 25 bp, Homo sapien
gactcagcttcgttccaatacagga

SEQ ID NO: 4579127 - DNA, 25 bp, Homo sapien
cgcctattggagacggactgctgaa

SEQ ID NO: 4579128 - DNA, 25 bp, Homo sapien
taaacacaaatatccggagcagctg

SEQ ID NO: 4579129 - DNA, 25 bp, Homo sapien
gagaagtaaactccctagagctgaa

SEQ ID NO: 4579130 - DNA, 25 bp, Homo sapien
tcctttcagccaagtagagtacaga

SEQ ID NO: 4579131 - DNA, 25 bp, Homo sapien
tctggagacctaggcggagaagtaa

SEQ ID NO: 4579132 - DNA, 25 bp, Homo sapien
tgacgggattacgttgttaccgctc

SEQ ID NO: 4579133 - DNA, 25 bp, Homo sapien
ggcctgacgctgatcttactttggg

SEQ ID NO: 4579134 - DNA, 25 bp, Homo sapien
accaaatagggcgtgggcctgacgc

SEQ ID NO: 4579135 - DNA, 25 bp, Homo sapien
cgctctcccgaataagtagaaccct

SEQ ID NO: 4579136 - DNA, 25 bp, Homo sapien
cagcagcgaattgtgaactccaagg

SEQ ID NO: 4579137 - DNA, 25 bp, Homo sapien
ccaggaacgagctctggcagcaggt

SEQ ID NO: 4579138 - DNA, 25 bp, Homo sapien
tccctctgcaatccagcggaaacgg

SEQ ID NO: 4579139 - DNA, 25 bp, Homo sapien
aactccaagggtagccgacaggtgg

SEQ ID NO: 4579140 - DNA, 25 bp, Homo sapien
tgcgctaagatctcgcctaagggcc

SEQ ID NO: 4579141 - DNA, 25 bp, Homo sapien
caggccagggcactaggttgtcaga

SEQ ID NO: 4579142 - DNA, 25 bp, Homo sapien
gggcattcccaccatggtatcaaga

SEQ ID NO: 4579143 - DNA, 25 bp, Homo sapien
cactagactgagtaccacagggcat

SEQ ID NO: 4579144 - DNA, 25 bp, Homo sapien
gatacagccaactaaggacagccgc

SEQ ID NO: 4579145 - DNA, 25 bp, Homo sapien
agatacagccaactaaggacagccg

SEQ ID NO: 4579146 - DNA, 25 bp, Homo sapien
tcagatacagccaactaaggacagc

SEQ ID NO: 4579147 - DNA, 25 bp, Homo sapien
atacagccaactaaggacagccgct

SEQ ID NO: 4579148 - DNA, 25 bp, Homo sapien
tgcagcgtctgcagagttctcgagc

SEQ ID NO: 4579149 - DNA, 25 bp, Homo sapien
cacggaaatagccaagcgacagggt

SEQ ID NO: 4579150 - DNA, 25 bp, Homo sapien
caccccgaaggctactaggtctcga

SEQ ID NO: 4579151 - DNA, 25 bp, Homo sapien
tcgagcctcggtggaacctttgtgt

SEQ ID NO: 4579152 - DNA, 25 bp, Homo sapien
gcaggcagctccatgtttgcaaggg

SEQ ID NO: 4579153 - DNA, 25 bp, Homo sapien
cggggccgcggacgaagccgccgag

SEQ ID NO: 4579154 - DNA, 25 bp, Homo sapien
ttgcaaggggatcagccggggccgc

SEQ ID NO: 4579155 - DNA, 25 bp, Homo sapien
gccgcggacgaagccgccgagtttc

SEQ ID NO: 4579156 - DNA, 25 bp, Homo sapien
caccgatgcgagctccttgctgggt

SEQ ID NO: 4579157 - DNA, 25 bp, Homo sapien
gcctgacgggttccggcaccgaatg

SEQ ID NO: 4579158 - DNA, 25 bp, Homo sapien
ttccggcaccgaatgctgactcgac

SEQ ID NO: 4579159 - DNA, 25 bp, Homo sapien
ctccttgctgggtcgcggcctgacg

SEQ ID NO: 4579160 - DNA, 25 bp, Homo sapien
cgcccctcccgcaagtccggtgttg

SEQ ID NO: 4579161 - DNA, 25 bp, Homo sapien
ggctctttccggtggcctctcccgc

SEQ ID NO: 4579162 - DNA, 25 bp, Homo sapien
gcccctcccgcaagtccggtgttgc

SEQ ID NO: 4579163 - DNA, 25 bp, Homo sapien
tccgagcctcccctcagctcggtcc

SEQ ID NO: 4579164 - DNA, 25 bp, Homo sapien
ggcccacaccacgtcgggccggcca

SEQ ID NO: 4579165 - DNA, 25 bp, Homo sapien
ctcggccgcggaactccgagcctcc

SEQ ID NO: 4579166 - DNA, 25 bp, Homo sapien
gccggccagaccgagcggccggcgg

SEQ ID NO: 4579167 - DNA, 25 bp, Homo sapien
tgaggcagacattcatacgtacctg

SEQ ID NO: 4579168 - DNA, 25 bp, Homo sapien
taggagcaccctagtcactggctgg

SEQ ID NO: 4579169 - DNA, 25 bp, Homo sapien
tcagccgaggagattctacgtaagg

SEQ ID NO: 4579170 - DNA, 25 bp, Homo sapien
ggctgtgtgacctaaccgtgttcgg

SEQ ID NO: 4579171 - DNA, 25 bp, Homo sapien
gccacatttagctcaaacaggagga

SEQ ID NO: 4579172 - DNA, 25 bp, Homo sapien
cgcagcagcattagagaagtagtag

SEQ ID NO: 4579173 - DNA, 25 bp, Homo sapien
gaaatggctgacctttactcaggtg

SEQ ID NO: 4579174 - DNA, 25 bp, Homo sapien
ctttaagacaaactacgcagcagca

SEQ ID NO: 4579175 - DNA, 25 bp, Homo sapien
ttgttcactaagtctcctgtatgag

SEQ ID NO: 4579176 - DNA, 25 bp, Homo sapien
cactaagtctcctgtatgagaaccc

SEQ ID NO: 4579177 - DNA, 25 bp, Homo sapien
tgctttgttcactaagtctcctgta

SEQ ID NO: 4579178 - DNA, 25 bp, Homo sapien
ctaagtctcctgtatgagaaccctg

SEQ ID NO: 4579179 - DNA, 25 bp, Homo sapien
aatatctcactgaattgttgtgagg

SEQ ID NO: 4579180 - DNA, 25 bp, Homo sapien
gcagaccaacttgagctcgttttag

SEQ ID NO: 4579181 - DNA, 25 bp, Homo sapien
gaccacaggctttgtaagcagacca

SEQ ID NO: 4579182 - DNA, 25 bp, Homo sapien
caaatcactgtaaccctctggacct

SEQ ID NO: 4579183 - DNA, 25 bp, Homo sapien
cagtttgagggtctagcaggctagc

SEQ ID NO: 4579184 - DNA, 25 bp, Homo sapien
tgcttggcactcaggacgatctcta

SEQ ID NO: 4579185 - DNA, 25 bp, Homo sapien
caaggagtcctgaactgcaacacgg

SEQ ID NO: 4579186 - DNA, 25 bp, Homo sapien
ccatccctgggatagtgaaagcaaa

SEQ ID NO: 4579187 - DNA, 25 bp, Homo sapien
gggagacaggagacctcagaaaaag

SEQ ID NO: 4579188 - DNA, 25 bp, Homo sapien
gagacctcagaaaaagaatggcggg

SEQ ID NO: 4579189 - DNA, 25 bp, Homo sapien
cagaaaaagaatggcgggagaaagg

SEQ ID NO: 4579190 - DNA, 25 bp, Homo sapien
gacaggagacctcagaaaaagaatg

SEQ ID NO: 4579191 - DNA, 25 bp, Homo sapien
gcaaaaatcaatagccacaatttgg

SEQ ID NO: 4579192 - DNA, 25 bp, Homo sapien
caatttggttttaataaggcacagt

SEQ ID NO: 4579193 - DNA, 25 bp, Homo sapien
caatagccacaatttggttttaata

SEQ ID NO: 4579194 - DNA, 25 bp, Homo sapien
ctcggggaccctagcaaaaatcaat

SEQ ID NO: 4579195 - DNA, 25 bp, Homo sapien
gatggcaacctataggctcagcggt

SEQ ID NO: 4579196 - DNA, 25 bp, Homo sapien
aattaagaacacattgctactggcc

SEQ ID NO: 4579197 - DNA, 25 bp, Homo sapien
tgcacacgtgtgctgggagacacaa

SEQ ID NO: 4579198 - DNA, 25 bp, Homo sapien
gctcagcggtgtccagggtagttta

SEQ ID NO: 4579199 - DNA, 25 bp, Homo sapien
ctccacggccagcaggttttggcca

SEQ ID NO: 4579200 - DNA, 25 bp, Homo sapien
ccacggccagcaggttttggccaga

SEQ ID NO: 4579201 - DNA, 25 bp, Homo sapien
cggccagcaggttttggccagagga

SEQ ID NO: 4579202 - DNA, 25 bp, Homo sapien
ccagcaggttttggccagaggatac

SEQ ID NO: 4579203 - DNA, 25 bp, Homo sapien
ccaggatggccttgtagcaaaaata

SEQ ID NO: 4579204 - DNA, 25 bp, Homo sapien
tctggatgctgaaggccctctgggt

SEQ ID NO: 4579205 - DNA, 25 bp, Homo sapien
cagatgtccagtgagcagaaggtac

SEQ ID NO: 4579206 - DNA, 25 bp, Homo sapien
tgacaccgtctggaacacattaagg

SEQ ID NO: 4579207 - DNA, 25 bp, Homo sapien
catagtctggccagctcaagaactg

SEQ ID NO: 4579208 - DNA, 25 bp, Homo sapien
gaccactctcaagaagtcaatgagg

SEQ ID NO: 4579209 - DNA, 25 bp, Homo sapien
gcctgcactgcaatggaccacaatg

SEQ ID NO: 4579210 - DNA, 25 bp, Homo sapien
aagtgggtcacctggcgtttctgcc

SEQ ID NO: 4579211 - DNA, 25 bp, Homo sapien
gttgtgaatttctagcgttgttttc

SEQ ID NO: 4579212 - DNA, 25 bp, Homo sapien
ttttctaaaggccagtactggccac

SEQ ID NO: 4579213 - DNA, 25 bp, Homo sapien
aatcggatccgagagtctttttcta

SEQ ID NO: 4579214 - DNA, 25 bp, Homo sapien
gtcactgtgaggaagccaaatcgga

SEQ ID NO: 4579215 - DNA, 25 bp, Homo sapien
gcagtaacctggcttccccaaagac

SEQ ID NO: 4579216 - DNA, 25 bp, Homo sapien
cacacagagcaaggtaagccttcca

SEQ ID NO: 4579217 - DNA, 25 bp, Homo sapien
caatagtacgtctcacatatgtggg

SEQ ID NO: 4579218 - DNA, 25 bp, Homo sapien
gagcacttactacagcatttggtct

SEQ ID NO: 4579219 - DNA, 25 bp, Homo sapien
tcacgataggtattctccaaaggac

SEQ ID NO: 4579220 - DNA, 25 bp, Homo sapien
tggtcatgacaatcaccaagacttt

SEQ ID NO: 4579221 - DNA, 25 bp, Homo sapien
cgggtggtcatgacaatcaccaaga

SEQ ID NO: 4579222 - DNA, 25 bp, Homo sapien
catgagccagaaatcacgataggta

SEQ ID NO: 4579223 - DNA, 25 bp, Homo sapien
tgcttgtagccatccatgaaactgg

SEQ ID NO: 4579224 - DNA, 25 bp, Homo sapien
gcttgtagccatccatgaaactggc

SEQ ID NO: 4579225 - DNA, 25 bp, Homo sapien
ttgtagccatccatgaaactggcat

SEQ ID NO: 4579226 - DNA, 25 bp, Homo sapien
tctgcttgtagccatccatgaaact

SEQ ID NO: 4579227 - DNA, 25 bp, Homo sapien
accgccgccccacagccgggaggat

SEQ ID NO: 4579228 - DNA, 25 bp, Homo sapien
agccaccgccgccccacagccggga

SEQ ID NO: 4579229 - DNA, 25 bp, Homo sapien
cagccaccgccgccccacagccggg

SEQ ID NO: 4579230 - DNA, 25 bp, Homo sapien
ccaccgccgccccacagccgggagg

SEQ ID NO: 4579231 - DNA, 25 bp, Homo sapien
ttcggcccgcaaagtaaataatgtc

SEQ ID NO: 4579232 - DNA, 25 bp, Homo sapien
ccttcagggcatatacgatgatgat

SEQ ID NO: 4579233 - DNA, 25 bp, Homo sapien
tctaggtactggagacagggaagtc

SEQ ID NO: 4579234 - DNA, 25 bp, Homo sapien
gccagccagtctcttagctcaaatg

SEQ ID NO: 4579235 - DNA, 25 bp, Homo sapien
ttactgtgtgtcatgttaaagaggc

SEQ ID NO: 4579236 - DNA, 25 bp, Homo sapien
gggtcccaacccacatgtcatatat

SEQ ID NO: 4579237 - DNA, 25 bp, Homo sapien
aaattactttactttgccggcgcag

SEQ ID NO: 4579238 - DNA, 25 bp, Homo sapien
caagagagttggaaaccatgatcct

SEQ ID NO: 4579239 - DNA, 25 bp, Homo sapien
aggcagggtacatccccataacggt

SEQ ID NO: 4579240 - DNA, 25 bp, Homo sapien
ctttgttagcttcactctagtttgg

SEQ ID NO: 4579241 - DNA, 25 bp, Homo sapien
tgagtatggccacttcgctttgtta

SEQ ID NO: 4579242 - DNA, 25 bp, Homo sapien
agcttcactctagtttggtccaggc

SEQ ID NO: 4579243 - DNA, 25 bp, Homo sapien
tatagttatcaactagttacgagcc

SEQ ID NO: 4579244 - DNA, 25 bp, Homo sapien
ggttttgtgataggatttgagtaga

SEQ ID NO: 4579245 - DNA, 25 bp, Homo sapien
caactagttacgagccagagttata

SEQ ID NO: 4579246 - DNA, 25 bp, Homo sapien
cagagttataaactagcgagatggt

SEQ ID NO: 4579247 - DNA, 25 bp, Homo sapien
tgatctcatcgaagggatctgggtg

SEQ ID NO: 4579248 - DNA, 25 bp, Homo sapien
gtactgagtcccagtctaaggcagg

SEQ ID NO: 4579249 - DNA, 25 bp, Homo sapien
gatcaattttgacgtacccacccag

SEQ ID NO: 4579250 - DNA, 25 bp, Homo sapien
actggaaattccaagtggcgagatc

SEQ ID NO: 4579251 - DNA, 25 bp, Homo sapien
caggaggagactgatgatggaatag

SEQ ID NO: 4579252 - DNA, 25 bp, Homo sapien
tcttcaaacgagctggaaatgctcc

SEQ ID NO: 4579253 - DNA, 25 bp, Homo sapien
agcaccttcttcaaacgagctggaa

SEQ ID NO: 4579254 - DNA, 25 bp, Homo sapien
gcactcggaaccatatgggtgcccc

SEQ ID NO: 4579255 - DNA, 25 bp, Homo sapien
gatatctgctcaagggttcaaccaa

SEQ ID NO: 4579256 - DNA, 25 bp, Homo sapien
caatatcctggggaataaatatgac

SEQ ID NO: 4579257 - DNA, 25 bp, Homo sapien
aacaaagtcacaatatcctggggaa

SEQ ID NO: 4579258 - DNA, 25 bp, Homo sapien
taattaaccatgtaaccatcattct

SEQ ID NO: 4579259 - DNA, 25 bp, Homo sapien
ccttggacatttaggtcctgaaata

SEQ ID NO: 4579260 - DNA, 25 bp, Homo sapien
ttgctggtaaaaggaccttggacat

SEQ ID NO: 4579261 - DNA, 25 bp, Homo sapien
tccaaatcagtagaactaaagggta

SEQ ID NO: 4579262 - DNA, 25 bp, Homo sapien
gaaagtagtttatcacacttcagtg

SEQ ID NO: 4579263 - DNA, 25 bp, Homo sapien
aagttggcataattagaaccacaca

SEQ ID NO: 4579264 - DNA, 25 bp, Homo sapien
ttgccaagatccagctcaaagttgg

SEQ ID NO: 4579265 - DNA, 25 bp, Homo sapien
caagatccagctcaaagttggcata

SEQ ID NO: 4579266 - DNA, 25 bp, Homo sapien
caaagttggcataattagaaccaca

SEQ ID NO: 4579267 - DNA, 25 bp, Homo sapien
tcatagataaacaccagtccattcc

SEQ ID NO: 4579268 - DNA, 25 bp, Homo sapien
gtcatagataaacaccagtccattc

SEQ ID NO: 4579269 - DNA, 25 bp, Homo sapien
tgccgataattgactttctcagctt

SEQ ID NO: 4579270 - DNA, 25 bp, Homo sapien
gaagattgccgataattgactttct

SEQ ID NO: 4579271 - DNA, 25 bp, Homo sapien
ttccatacactgaagattgccgata

SEQ ID NO: 4579272 - DNA, 25 bp, Homo sapien
acactgaagattgccgataattgac

SEQ ID NO: 4579273 - DNA, 25 bp, Homo sapien
tgtctagcaagtaaaacagagcctg

SEQ ID NO: 4579274 - DNA, 25 bp, Homo sapien
caacctggcagtaaagagggcaatg

SEQ ID NO: 4579275 - DNA, 25 bp, Homo sapien
cagagcctgaagtaccacatgttgg

SEQ ID NO: 4579276 - DNA, 25 bp, Homo sapien
gaggctcctgttgggtcccgaacat

SEQ ID NO: 4579277 - DNA, 25 bp, Homo sapien
tcagaacgaagaggttcctcatgag

SEQ ID NO: 4579278 - DNA, 25 bp, Homo sapien
cactgaggatctcagaacgaagagg

SEQ ID NO: 4579279 - DNA, 25 bp, Homo sapien
tcctcatgaggtttcagctttacaa

SEQ ID NO: 4579280 - DNA, 25 bp, Homo sapien
catgaggtttcagctttacaatgcc

SEQ ID NO: 4579281 - DNA, 25 bp, Homo sapien
tctcttcgagaaactgcttggtagc

SEQ ID NO: 4579282 - DNA, 25 bp, Homo sapien
catcaaacttccttgccatgaggaa

SEQ ID NO: 4579283 - DNA, 25 bp, Homo sapien
gacagcggggaaacattgtactgaa

SEQ ID NO: 4579284 - DNA, 25 bp, Homo sapien
gaacaattctatggcacggagcaca

SEQ ID NO: 4579285 - DNA, 25 bp, Homo sapien
acaaactacttttctgtttcttcat

SEQ ID NO: 4579286 - DNA, 25 bp, Homo sapien
gacaaactacttttctgtttcttca

SEQ ID NO: 4579287 - DNA, 25 bp, Homo sapien
ccccggccgagacatggtacctgtt

SEQ ID NO: 4579288 - DNA, 25 bp, Homo sapien
acagttctctagtgggcctctctga

SEQ ID NO: 4579289 - DNA, 25 bp, Homo sapien
gccgagacatggtacctgtttttta

SEQ ID NO: 4579290 - DNA, 25 bp, Homo sapien
aaatacagttctctagtgggcctct

SEQ ID NO: 4579291 - DNA, 25 bp, Homo sapien
ccaggccttgcatgtagagtccagt

SEQ ID NO: 4579292 - DNA, 25 bp, Homo sapien
tacaaatacacatgcgtagcacctg

SEQ ID NO: 4579293 - DNA, 25 bp, Homo sapien
gcacacccatccctctggtggaaga

SEQ ID NO: 4579294 - DNA, 25 bp, Homo sapien
gcacctgctctgttcagcctcagat

SEQ ID NO: 4579295 - DNA, 25 bp, Homo sapien
caggaaaccagggttgaccaagtga

SEQ ID NO: 4579296 - DNA, 25 bp, Homo sapien
ggattaatatcccactgggaacgga

SEQ ID NO: 4579297 - DNA, 25 bp, Homo sapien
tatcccactgggaacggatcaacag

SEQ ID NO: 4579298 - DNA, 25 bp, Homo sapien
tgggaacggatcaacaggaaaccag

SEQ ID NO: 4579299 - DNA, 25 bp, Homo sapien
catgccgctaaagagtgagtgaacc

SEQ ID NO: 4579300 - DNA, 25 bp, Homo sapien
taagaaactggtagcatcagctgtc

SEQ ID NO: 4579301 - DNA, 25 bp, Homo sapien
gatgcttcaacgaggagtgtgccac

SEQ ID NO: 4579302 - DNA, 25 bp, Homo sapien
tgtttcacgaactgctagccttaga

SEQ ID NO: 4579303 - DNA, 25 bp, Homo sapien
gcatagtgacaccattctgataagt

SEQ ID NO: 4579304 - DNA, 25 bp, Homo sapien
cactaaactgtaagcttgggaagat

SEQ ID NO: 4579305 - DNA, 25 bp, Homo sapien
tgcatactcaacaccaagcatagtg

SEQ ID NO: 4579306 - DNA, 25 bp, Homo sapien
ggccaagggttctgtgccacaactg

SEQ ID NO: 4579307 - DNA, 25 bp, Homo sapien
agaaaagtaacagcccataatgagg

SEQ ID NO: 4579308 - DNA, 25 bp, Homo sapien
gggaacaatctgaagagactagcac

SEQ ID NO: 4579309 - DNA, 25 bp, Homo sapien
gaactgtctagaccttggaaggctg

SEQ ID NO: 4579310 - DNA, 25 bp, Homo sapien
tgttaaaaggccactcacaaacacg

SEQ ID NO: 4579311 - DNA, 25 bp, Homo sapien
acaggcccatttgtagatattaaga

SEQ ID NO: 4579312 - DNA, 25 bp, Homo sapien
tttttcagacatgaaatctcactgt

SEQ ID NO: 4579313 - DNA, 25 bp, Homo sapien
gagtgcttatagtgtgctgggccat

SEQ ID NO: 4579314 - DNA, 25 bp, Homo sapien
ttccaacaggcccatttgtagatat

SEQ ID NO: 4579315 - DNA, 25 bp, Homo sapien
gcacagtgtccaaaacaaggagtcc

SEQ ID NO: 4579316 - DNA, 25 bp, Homo sapien
gatactgtctttagtcctgagtgct

SEQ ID NO: 4579317 - DNA, 25 bp, Homo sapien
gagggtcaccggcaaattagaatca

SEQ ID NO: 4579318 - DNA, 25 bp, Homo sapien
gaatcaacagcttgctaagactgcc

SEQ ID NO: 4579319 - DNA, 25 bp, Homo sapien
tgaaatagaatttcgctcttattgc

SEQ ID NO: 4579320 - DNA, 25 bp, Homo sapien
caccatgcccggctgaaaaaagaaa

SEQ ID NO: 4579321 - DNA, 25 bp, Homo sapien
tttttgaaatagaatttcgctctta

SEQ ID NO: 4579322 - DNA, 25 bp, Homo sapien
ttgaaatagaatttcgctcttattg

SEQ ID NO: 4579323 - DNA, 25 bp, Homo sapien
cgtatggtaacttccagggagacag

SEQ ID NO: 4579324 - DNA, 25 bp, Homo sapien
gacagatgacatttagcacaggaca

SEQ ID NO: 4579325 - DNA, 25 bp, Homo sapien
gaagacctcaatttaacatcataaa

SEQ ID NO: 4579326 - DNA, 25 bp, Homo sapien
catttggtccttgacgtatggtaac

SEQ ID NO: 4579327 - DNA, 25 bp, Homo sapien
catatttgtcctcgtagcccaattg

SEQ ID NO: 4579328 - DNA, 25 bp, Homo sapien
tatttgtcctcgtagcccaattgta

SEQ ID NO: 4579329 - DNA, 25 bp, Homo sapien
atttgtcctcgtagcccaattgtag

SEQ ID NO: 4579330 - DNA, 25 bp, Homo sapien
atcatatttgtcctcgtagcccaat

SEQ ID NO: 4579331 - DNA, 25 bp, Homo sapien
tcgctctgtcggcgggatctcggct

SEQ ID NO: 4579332 - DNA, 25 bp, Homo sapien
cctccggggtcagctccggcgccat

SEQ ID NO: 4579333 - DNA, 25 bp, Homo sapien
tcctccggggtcagctccggcgcca

SEQ ID NO: 4579334 - DNA, 25 bp, Homo sapien
ctcgctcgcgagcgcgggagcccgg

SEQ ID NO: 4579335 - DNA, 25 bp, Homo sapien
cgcgagcgcgggagcccggcgcgct

SEQ ID NO: 4579336 - DNA, 25 bp, Homo sapien
gctcgcgagcgcgggagcccggcgc

SEQ ID NO: 4579337 - DNA, 25 bp, Homo sapien
tcgcgagcgcgggagcccggcgcgc

SEQ ID NO: 4579338 - DNA, 25 bp, Homo sapien
tctcattcacaagctggcggcgagg

SEQ ID NO: 4579339 - DNA, 25 bp, Homo sapien
taagaaaaatctctccgaactgccg

SEQ ID NO: 4579340 - DNA, 25 bp, Homo sapien
aactgccgctctcttccgggaggaa

SEQ ID NO: 4579341 - DNA, 25 bp, Homo sapien
tatttcgtgaggctcagatcctcgg

SEQ ID NO: 4579342 - DNA, 25 bp, Homo sapien
ttggtaagaatcagagacgatatcc

SEQ ID NO: 4579343 - DNA, 25 bp, Homo sapien
tatttgaatctttatctcagctagg

SEQ ID NO: 4579344 - DNA, 25 bp, Homo sapien
taaaaacaatccctgacctcaacta

SEQ ID NO: 4579345 - DNA, 25 bp, Homo sapien
tgcaataggaacttcaggctgccct

SEQ ID NO: 4579346 - DNA, 25 bp, Homo sapien
tattgtgtccttacatttaccccac

SEQ ID NO: 4579347 - DNA, 25 bp, Homo sapien
caaaaagcatatatagtagatccat

SEQ ID NO: 4579348 - DNA, 25 bp, Homo sapien
gactttcattgatttactctcacca

SEQ ID NO: 4579349 - DNA, 25 bp, Homo sapien
tacatttaccccacacactgttcta

SEQ ID NO: 4579350 - DNA, 25 bp, Homo sapien
gcccagaacagacattttataaaat

SEQ ID NO: 4579351 - DNA, 25 bp, Homo sapien
cacccagcccagaacagacatttta

SEQ ID NO: 4579352 - DNA, 25 bp, Homo sapien
ataagacatttaaatctcaacaggc

SEQ ID NO: 4579353 - DNA, 25 bp, Homo sapien
catttaaatctcaacaggcatataa

SEQ ID NO: 4579354 - DNA, 25 bp, Homo sapien
gttctcacttattttgtaggagcta

SEQ ID NO: 4579355 - DNA, 25 bp, Homo sapien
cacttattttgtaggagctaaaaat

SEQ ID NO: 4579356 - DNA, 25 bp, Homo sapien
gaaagacaaacttcccatgttctca

SEQ ID NO: 4579357 - DNA, 25 bp, Homo sapien
gagagagagggatcctgtcatttgc

SEQ ID NO: 4579358 - DNA, 25 bp, Homo sapien
tgtcaggctcataactcaagatggg

SEQ ID NO: 4579359 - DNA, 25 bp, Homo sapien
tattgccatggcctaccttgcttgc

SEQ ID NO: 4579360 - DNA, 25 bp, Homo sapien
tatctcaagtactgctggaacccat

SEQ ID NO: 4579361 - DNA, 25 bp, Homo sapien
cacggtccctaactgatactattgc

SEQ ID NO: 4579362 - DNA, 25 bp, Homo sapien
cagactaccgttactttggatacca

SEQ ID NO: 4579363 - DNA, 25 bp, Homo sapien
tggttatataattcgccacaaggac

SEQ ID NO: 4579364 - DNA, 25 bp, Homo sapien
tcagggaatagtccacagactaccg

SEQ ID NO: 4579365 - DNA, 25 bp, Homo sapien
cctaagactaccctctggttatata

SEQ ID NO: 4579366 - DNA, 25 bp, Homo sapien
aaatctgtccacaggacactagtgc

SEQ ID NO: 4579367 - DNA, 25 bp, Homo sapien
aagagctgacctggatccctgtgaa

SEQ ID NO: 4579368 - DNA, 25 bp, Homo sapien
gggaatggtgaagtacttgtatcca

SEQ ID NO: 4579369 - DNA, 25 bp, Homo sapien
taatcaacatgcagggaccactgca

SEQ ID NO: 4579370 - DNA, 25 bp, Homo sapien
tccataacccctctacttggcaggg

SEQ ID NO: 4579371 - DNA, 25 bp, Homo sapien
tggtaaaacctttcggcggcagcag

SEQ ID NO: 4579372 - DNA, 25 bp, Homo sapien
tgaagccacaggaagtgggatccat

SEQ ID NO: 4579373 - DNA, 25 bp, Homo sapien
caatatgggagctgactgaagccac

SEQ ID NO: 4579374 - DNA, 25 bp, Homo sapien
caagacttgaacagccatggttgaa

SEQ ID NO: 4579375 - DNA, 25 bp, Homo sapien
aaagagtgaaatgggccaagacttg

SEQ ID NO: 4579376 - DNA, 25 bp, Homo sapien
cagccatggttgaagtagcccaggg

SEQ ID NO: 4579377 - DNA, 25 bp, Homo sapien
gattcatggctatctaaagcttaag

SEQ ID NO: 4579378 - DNA, 25 bp, Homo sapien
taggagctgctcaaatcaatctgaa

SEQ ID NO: 4579379 - DNA, 25 bp, Homo sapien
gaatgctacgcaatctgggaacctc

SEQ ID NO: 4579380 - DNA, 25 bp, Homo sapien
tcactctaaagaatgaagtcacctg

SEQ ID NO: 4579381 - DNA, 25 bp, Homo sapien
tgggaacctccccataactgtttga

SEQ ID NO: 4579382 - DNA, 25 bp, Homo sapien
cagggtggtctgggctatgggaaga

SEQ ID NO: 4579383 - DNA, 25 bp, Homo sapien
gggtggtctgggctatgggaagaac

SEQ ID NO: 4579384 - DNA, 25 bp, Homo sapien
ttaattctccatgaggcatccaggg

SEQ ID NO: 4579385 - DNA, 25 bp, Homo sapien
tctccatgaggcatccagggtggtc

SEQ ID NO: 4579386 - DNA, 25 bp, Homo sapien
ggcacagctacaccaaggacatctg

SEQ ID NO: 4579387 - DNA, 25 bp, Homo sapien
tcaacttgggagtagacaggtgctc

SEQ ID NO: 4579388 - DNA, 25 bp, Homo sapien
tggtgcccagcatagtctggcttgg

SEQ ID NO: 4579389 - DNA, 25 bp, Homo sapien
agcccaccaagggagtgcttccggg

SEQ ID NO: 4579390 - DNA, 25 bp, Homo sapien
taccaccttcttaattgactcccag

SEQ ID NO: 4579391 - DNA, 25 bp, Homo sapien
tacatccagttcaagcaaatgcttg

SEQ ID NO: 4579392 - DNA, 25 bp, Homo sapien
gaagctgtgatccttatataaaatt

SEQ ID NO: 4579393 - DNA, 25 bp, Homo sapien
taaagatggtattcttaccaccttc

SEQ ID NO: 4579394 - DNA, 25 bp, Homo sapien
cctagagaaggtagctgcaggttct

SEQ ID NO: 4579395 - DNA, 25 bp, Homo sapien
tgcaggttctgaggctgacaagact

SEQ ID NO: 4579396 - DNA, 25 bp, Homo sapien
tgcttgttgagcctagagaaggtag

SEQ ID NO: 4579397 - DNA, 25 bp, Homo sapien
gaggctgacaagactgttgaggact

SEQ ID NO: 4579398 - DNA, 25 bp, Homo sapien
cattctgacttatccagcatgggtg

SEQ ID NO: 4579399 - DNA, 25 bp, Homo sapien
gacgagctgtccattaagggccctt

SEQ ID NO: 4579400 - DNA, 25 bp, Homo sapien
caagaaggatctaggcatgcaagtc

SEQ ID NO: 4579401 - DNA, 25 bp, Homo sapien
cctgggtctcagcttgcagtaggaa

SEQ ID NO: 4579402 - DNA, 25 bp, Homo sapien
aaatccatagatagcacatcacaca

SEQ ID NO: 4579403 - DNA, 25 bp, Homo sapien
tcgggagtgcaagggaagttcttta

SEQ ID NO: 4579404 - DNA, 25 bp, Homo sapien
ctttcgggagtgcaagggaagttct

SEQ ID NO: 4579405 - DNA, 25 bp, Homo sapien
atccatagatagcacatcacacagg

SEQ ID NO: 4579406 - DNA, 25 bp, Homo sapien
gattgatactcttccctttatacca

SEQ ID NO: 4579407 - DNA, 25 bp, Homo sapien
gaacataggatgttaaattagtaat

SEQ ID NO: 4579408 - DNA, 25 bp, Homo sapien
aaaatggaattcagatctacatgat

SEQ ID NO: 4579409 - DNA, 25 bp, Homo sapien
cataaggaactcagtgatcctaaca

SEQ ID NO: 4579410 - DNA, 25 bp, Homo sapien
ctttgaatgcatccagtagaatcgg

SEQ ID NO: 4579411 - DNA, 25 bp, Homo sapien
cttcttctggtaactttgaatgcat

SEQ ID NO: 4579412 - DNA, 25 bp, Homo sapien
ggtaactttgaatgcatccagtaga

SEQ ID NO: 4579413 - DNA, 25 bp, Homo sapien
gcatccagtagaatcggaaatcagt

SEQ ID NO: 4579414 - DNA, 25 bp, Homo sapien
aatactttccatttcaaactctaat

SEQ ID NO: 4579415 - DNA, 25 bp, Homo sapien
aacagaaagatgaaatactttccat

SEQ ID NO: 4579416 - DNA, 25 bp, Homo sapien
cacagagaagggaaacagaaagatg

SEQ ID NO: 4579417 - DNA, 25 bp, Homo sapien
tcaaactctaatataaacaaaaaca

SEQ ID NO: 4579418 - DNA, 25 bp, Homo sapien
ccttgccccacaatcttcactgcca

SEQ ID NO: 4579419 - DNA, 25 bp, Homo sapien
tcactgccagaaatcctcccatact

SEQ ID NO: 4579420 - DNA, 25 bp, Homo sapien
gctgctgcacaaggtggcatcccca

SEQ ID NO: 4579421 - DNA, 25 bp, Homo sapien
gggctgctgcacaaggtggcatccc

SEQ ID NO: 4579422 - DNA, 25 bp, Homo sapien
tccagaacgtagtaggtctggttta

SEQ ID NO: 4579423 - DNA, 25 bp, Homo sapien
ttacctcattgtaaatgcaatctag

SEQ ID NO: 4579424 - DNA, 25 bp, Homo sapien
taaatgcaatctagaatggtgtagt

SEQ ID NO: 4579425 - DNA, 25 bp, Homo sapien
gcaatcataaaaagggtgtccccgc

SEQ ID NO: 4579426 - DNA, 25 bp, Homo sapien
ttgagtttcgcctgttgcctcctgg

SEQ ID NO: 4579427 - DNA, 25 bp, Homo sapien
tgttgacacagtagccactcttggt

SEQ ID NO: 4579428 - DNA, 25 bp, Homo sapien
aagaaaacctgttgacacagtagcc

SEQ ID NO: 4579429 - DNA, 25 bp, Homo sapien
tcttggtgtaggcactggtagaacc

SEQ ID NO: 4579430 - DNA, 25 bp, Homo sapien
gaggccacgataagggctctttttc

SEQ ID NO: 4579431 - DNA, 25 bp, Homo sapien
cctggaggccacgataagggctctt

SEQ ID NO: 4579432 - DNA, 25 bp, Homo sapien
ctgccccaaatctgaaggaacgtca

SEQ ID NO: 4579433 - DNA, 25 bp, Homo sapien
tcaattaaccactcagaaagcatca

SEQ ID NO: 4579434 - DNA, 25 bp, Homo sapien
tgccaccacctgagtgtgaaatttc

SEQ ID NO: 4579435 - DNA, 25 bp, Homo sapien
ctcatagtacactgcctgggaaaga

SEQ ID NO: 4579436 - DNA, 25 bp, Homo sapien
aatttcaagactggcctcatagtac

SEQ ID NO: 4579437 - DNA, 25 bp, Homo sapien
ggcagctgtacttcccacttgccac

SEQ ID NO: 4579438 - DNA, 25 bp, Homo sapien
cttctggcatggttcacataatcca

SEQ ID NO: 4579439 - DNA, 25 bp, Homo sapien
cagtcttctggcatggttcacataa

SEQ ID NO: 4579440 - DNA, 25 bp, Homo sapien
tcttgacagtgtcaatgtccatttc

SEQ ID NO: 4579441 - DNA, 25 bp, Homo sapien
ttggtaacttcttgacagtgtcaat

SEQ ID NO: 4579442 - DNA, 25 bp, Homo sapien
gaaaagctactagccagggcctgac

SEQ ID NO: 4579443 - DNA, 25 bp, Homo sapien
ggcagctgtgctgttcagatcttga

SEQ ID NO: 4579444 - DNA, 25 bp, Homo sapien
tacttggacttgtactgggataggc

SEQ ID NO: 4579445 - DNA, 25 bp, Homo sapien
ttccagtaacctccggcggcgctca

SEQ ID NO: 4579446 - DNA, 25 bp, Homo sapien
ctccagtagtgtgaagaacttccat

SEQ ID NO: 4579447 - DNA, 25 bp, Homo sapien
gaacttccataaagtacattaggga

SEQ ID NO: 4579448 - DNA, 25 bp, Homo sapien
caagacaggcatggagtagatgtca

SEQ ID NO: 4579449 - DNA, 25 bp, Homo sapien
caagtaacgtcaatgctccagtagt

SEQ ID NO: 4579450 - DNA, 25 bp, Homo sapien
gtgctctgagcatcaaaatcaacag

SEQ ID NO: 4579451 - DNA, 25 bp, Homo sapien
tgagcatcaaaatcaacaggttcat

SEQ ID NO: 4579452 - DNA, 25 bp, Homo sapien
caggccaggtccagtgctctgagca

SEQ ID NO: 4579453 - DNA, 25 bp, Homo sapien
ggtccagtgctctgagcatcaaaat

SEQ ID NO: 4579454 - DNA, 25 bp, Homo sapien
ttcaaggctgttcttggcgggttcc

SEQ ID NO: 4579455 - DNA, 25 bp, Homo sapien
tccttcaaggctgttcttggcgggt

SEQ ID NO: 4579456 - DNA, 25 bp, Homo sapien
aaggctgttcttggcgggttcctgc

SEQ ID NO: 4579457 - DNA, 25 bp, Homo sapien
cttccttcaaggctgttcttggcgg

SEQ ID NO: 4579458 - DNA, 25 bp, Homo sapien
tcctggccggacagcacggaataga

SEQ ID NO: 4579459 - DNA, 25 bp, Homo sapien
tcatctaggccatgcatgattcgcc

SEQ ID NO: 4579460 - DNA, 25 bp, Homo sapien
ggcctggctctatccctccagatga

SEQ ID NO: 4579461 - DNA, 25 bp, Homo sapien
gacgctatctgcttcactcggccgt

SEQ ID NO: 4579462 - DNA, 25 bp, Homo sapien
caaaccgaggtgaccgtcgcacgcg

SEQ ID NO: 4579463 - DNA, 25 bp, Homo sapien
aaaccgaggtgaccgtcgcacgcgc

SEQ ID NO: 4579464 - DNA, 25 bp, Homo sapien
gggccgacgaatcacctgccctggg

SEQ ID NO: 4579465 - DNA, 25 bp, Homo sapien
tgccctgggaagctaggtccgccct

SEQ ID NO: 4579466 - DNA, 25 bp, Homo sapien
tgtccgggactcttcctgctagatg

SEQ ID NO: 4579467 - DNA, 25 bp, Homo sapien
aacgctgggagttccgttgcctaca

SEQ ID NO: 4579468 - DNA, 25 bp, Homo sapien
tgctagatgacttgaccaggccgag

SEQ ID NO: 4579469 - DNA, 25 bp, Homo sapien
cctttcgccaatgggaggaggctga

SEQ ID NO: 4579470 - DNA, 25 bp, Homo sapien
tagccagagtccagcacaagggatg

SEQ ID NO: 4579471 - DNA, 25 bp, Homo sapien
caaaagactagggtaagcggcagag

SEQ ID NO: 4579472 - DNA, 25 bp, Homo sapien
tcagtagaccctgcgtgaaggaatg

SEQ ID NO: 4579473 - DNA, 25 bp, Homo sapien
agcttctttcccactcggctgcggg

SEQ ID NO: 4579474 - DNA, 25 bp, Homo sapien
cagagaggctcggtaaaacaatcaa

SEQ ID NO: 4579475 - DNA, 25 bp, Homo sapien
cagactaggctatttggctccagag

SEQ ID NO: 4579476 - DNA, 25 bp, Homo sapien
tcaatgttacacagctagctaagca

SEQ ID NO: 4579477 - DNA, 25 bp, Homo sapien
gggtcaggactcagactaggctatt

SEQ ID NO: 4579478 - DNA, 25 bp, Homo sapien
caagactccgtctctagagaaaaaa

SEQ ID NO: 4579479 - DNA, 25 bp, Homo sapien
agactccgtctctagagaaaaaaag

SEQ ID NO: 4579480 - DNA, 25 bp, Homo sapien
gactccgtctctagagaaaaaaaga

SEQ ID NO: 4579481 - DNA, 25 bp, Homo sapien
gacatttaaacaagggaggagatcc

SEQ ID NO: 4579482 - DNA, 25 bp, Homo sapien
gaggagatcctgaacactagtctcg

SEQ ID NO: 4579483 - DNA, 25 bp, Homo sapien
ctagtctcgctcagtttataaaaac

SEQ ID NO: 4579484 - DNA, 25 bp, Homo sapien
tctgtacacagcttaaccacggcca

SEQ ID NO: 4579485 - DNA, 25 bp, Homo sapien
caagacgataaagggaaacagggcg

SEQ ID NO: 4579486 - DNA, 25 bp, Homo sapien
tacgaccgtctgatacccttgagga

SEQ ID NO: 4579487 - DNA, 25 bp, Homo sapien
tgtttcccaaggcacagtcaattaa

SEQ ID NO: 4579488 - DNA, 25 bp, Homo sapien
gagagcaccctcatagaatctccag

SEQ ID NO: 4579489 - DNA, 25 bp, Homo sapien
tcccgtggctctatgcatggcctgc

SEQ ID NO: 4579490 - DNA, 25 bp, Homo sapien
tcattgtactctagcacgtgccgct

SEQ ID NO: 4579491 - DNA, 25 bp, Homo sapien
gaagtcatcgcgctcctcattgtac

SEQ ID NO: 4579492 - DNA, 25 bp, Homo sapien
tgccgcttgatcttggacgagtcca

SEQ ID NO: 4579493 - DNA, 25 bp, Homo sapien
tccatgctgcgcgtgacaaggaagg

SEQ ID NO: 4579494 - DNA, 25 bp, Homo sapien
gccccaagacctggacggcctggga

SEQ ID NO: 4579495 - DNA, 25 bp, Homo sapien
ccgcagccgcaggacccgaagctga

SEQ ID NO: 4579496 - DNA, 25 bp, Homo sapien
cccgaagctgagagcgcgttctggc

SEQ ID NO: 4579497 - DNA, 25 bp, Homo sapien
gcgttctggcatccgcgcgatttcc

SEQ ID NO: 4579498 - DNA, 25 bp, Homo sapien
aagactgtatccctttctgcggcaa

SEQ ID NO: 4579499 - DNA, 25 bp, Homo sapien
tcaagttgggataggtggcaccgaa

SEQ ID NO: 4579500 - DNA, 25 bp, Homo sapien
tccgcgcggtttttagtagccaaga

SEQ ID NO: 4579501 - DNA, 25 bp, Homo sapien
gagcgatctctcattgtcaagttgg

SEQ ID NO: 4579502 - DNA, 25 bp, Homo sapien
ttcctccggaaaacaatctctgagc

SEQ ID NO: 4579503 - DNA, 25 bp, Homo sapien
tcagacgcctggaacgcgcaggccg

SEQ ID NO: 4579504 - DNA, 25 bp, Homo sapien
gcaggccgtttctgttcctccggaa

SEQ ID NO: 4579505 - DNA, 25 bp, Homo sapien
cctggaacgcgcaggccgtttctgt

SEQ ID NO: 4579506 - DNA, 25 bp, Homo sapien
cctttggcgatcccctccttcctca

SEQ ID NO: 4579507 - DNA, 25 bp, Homo sapien
ggcgatcccctccttcctcaggacg

SEQ ID NO: 4579508 - DNA, 25 bp, Homo sapien
gcgatcccctccttcctcaggacgc

SEQ ID NO: 4579509 - DNA, 25 bp, Homo sapien
atcccctccttcctcaggacgccac

SEQ ID NO: 4579510 - DNA, 25 bp, Homo sapien
acggacagacggctggccgcgccat

SEQ ID NO: 4579511 - DNA, 25 bp, Homo sapien
gcggagaggaggacggacggacaga

SEQ ID NO: 4579512 - DNA, 25 bp, Homo sapien
ttctcgctggcggagcggagggtct

SEQ ID NO: 4579513 - DNA, 25 bp, Homo sapien
tgttttggagctgccttctcgctgg

SEQ ID NO: 4579514 - DNA, 25 bp, Homo sapien
ttcagagcagggtcagcgtcaggct

SEQ ID NO: 4579515 - DNA, 25 bp, Homo sapien
cttggactcgattcaggcggctgct

SEQ ID NO: 4579516 - DNA, 25 bp, Homo sapien
cgagagccgccaaaagaatctggga

SEQ ID NO: 4579517 - DNA, 25 bp, Homo sapien
tcagcgagtggctagaagtcgcccg

SEQ ID NO: 4579518 - DNA, 25 bp, Homo sapien
cctggggtggatgttaactgtctcc

SEQ ID NO: 4579519 - DNA, 25 bp, Homo sapien
ggagcttagggaatatccctgggac

SEQ ID NO: 4579520 - DNA, 25 bp, Homo sapien
tcagctctcaggttaagtcttaagt

SEQ ID NO: 4579521 - DNA, 25 bp, Homo sapien
gcattagcattagctggtcctggcc

SEQ ID NO: 4579522 - DNA, 25 bp, Homo sapien
ataactccccacactcgaagcaggt

SEQ ID NO: 4579523 - DNA, 25 bp, Homo sapien
gtgctgaggtataagccctgggccc

SEQ ID NO: 4579524 - DNA, 25 bp, Homo sapien
aagatccttcctgttgcacaatggg

SEQ ID NO: 4579525 - DNA, 25 bp, Homo sapien
gtgactgtatatttgagttcaccag

SEQ ID NO: 4579526 - DNA, 25 bp, Homo sapien
tgcggaggctcccacattggaaact

SEQ ID NO: 4579527 - DNA, 25 bp, Homo sapien
tgccctgatcaggatgagcggacct

SEQ ID NO: 4579528 - DNA, 25 bp, Homo sapien
aggatgagcggaccttgctcttgga

SEQ ID NO: 4579529 - DNA, 25 bp, Homo sapien
gagaggagggtactggttgagactt

SEQ ID NO: 4579530 - DNA, 25 bp, Homo sapien
cagtgactcaggagctccgtttaca

SEQ ID NO: 4579531 - DNA, 25 bp, Homo sapien
tggtgaacccaacggctgaaatgtg

SEQ ID NO: 4579532 - DNA, 25 bp, Homo sapien
tctgaagatggcactgcacggtgac

SEQ ID NO: 4579533 - DNA, 25 bp, Homo sapien
gcagatttcccctctagatgagtga

SEQ ID NO: 4579534 - DNA, 25 bp, Homo sapien
ggttgcttcttgcagaactcctgga

SEQ ID NO: 4579535 - DNA, 25 bp, Homo sapien
gttgcttcttgcagaactcctggac

SEQ ID NO: 4579536 - DNA, 25 bp, Homo sapien
gggttgcttcttgcagaactcctgg

SEQ ID NO: 4579537 - DNA, 25 bp, Homo sapien
cattgggcctgcgatgcccgccatg

SEQ ID NO: 4579538 - DNA, 25 bp, Homo sapien
ctggtcagcattgggccctccgatc

SEQ ID NO: 4579539 - DNA, 25 bp, Homo sapien
gcccgccatggtcctggtcagcatt

SEQ ID NO: 4579540 - DNA, 25 bp, Homo sapien
tgcgatgcccgccatggtcctggtc

SEQ ID NO: 4579541 - DNA, 25 bp, Homo sapien
gcttctcagggcagattagggagca

SEQ ID NO: 4579542 - DNA, 25 bp, Homo sapien
tcaatactctctcgaaccagtggtc

SEQ ID NO: 4579543 - DNA, 25 bp, Homo sapien
gagctttgccttaacactgaccctt

SEQ ID NO: 4579544 - DNA, 25 bp, Homo sapien
tgtacaagctcaccaagtggacagt

SEQ ID NO: 4579545 - DNA, 25 bp, Homo sapien
gccagagcagccatcgagagcccag

SEQ ID NO: 4579546 - DNA, 25 bp, Homo sapien
gggccagagcagccatcgagagccc

SEQ ID NO: 4579547 - DNA, 25 bp, Homo sapien
cagagcagccatcgagagcccagcc

SEQ ID NO: 4579548 - DNA, 25 bp, Homo sapien
gagcagccatcgagagcccagccag

SEQ ID NO: 4579549 - DNA, 25 bp, Homo sapien
caagggcccagtgcatagttaagac

SEQ ID NO: 4579550 - DNA, 25 bp, Homo sapien
tgtatgcaagccgacgcagacaagg

SEQ ID NO: 4579551 - DNA, 25 bp, Homo sapien
tatgccttctagactggaggcgctc

SEQ ID NO: 4579552 - DNA, 25 bp, Homo sapien
tcatgacccatgtaggaggttaccc

SEQ ID NO: 4579553 - DNA, 25 bp, Homo sapien
tgcgaaaggtctcggtgtcaccagc

SEQ ID NO: 4579554 - DNA, 25 bp, Homo sapien
gatgatgacgctgaacatgttggcc

SEQ ID NO: 4579555 - DNA, 25 bp, Homo sapien
gatgcattgacacccctagccagtg

SEQ ID NO: 4579556 - DNA, 25 bp, Homo sapien
tctatctggaattggctgaaggccg

SEQ ID NO: 4579557 - DNA, 25 bp, Homo sapien
gtgggacataggctatgagggtcca

SEQ ID NO: 4579558 - DNA, 25 bp, Homo sapien
tgggacataggctatgagggtccag

SEQ ID NO: 4579559 - DNA, 25 bp, Homo sapien
gggcatctcatgctcatacagaata

SEQ ID NO: 4579560 - DNA, 25 bp, Homo sapien
cacagcaagggtggcggccacgtcc

SEQ ID NO: 4579561 - DNA, 25 bp, Homo sapien
gctcatacagaatattcccagcgta

SEQ ID NO: 4579562 - DNA, 25 bp, Homo sapien
gctctagggtatcatgggcctccca

SEQ ID NO: 4579563 - DNA, 25 bp, Homo sapien
tgggtcacatcaggcaatgcagtgc

SEQ ID NO: 4579564 - DNA, 25 bp, Homo sapien
caggtctgtgcgtgtgacccgctgt

SEQ ID NO: 4579565 - DNA, 25 bp, Homo sapien
tctgtgcgtgtgacccgctgtctcc

SEQ ID NO: 4579566 - DNA, 25 bp, Homo sapien
catcaggcaatgcagtgcagagctg

SEQ ID NO: 4579567 - DNA, 25 bp, Homo sapien
cctgagggtctgactgctgagtggc

SEQ ID NO: 4579568 - DNA, 25 bp, Homo sapien
tcagcgagaggagcacttgcttctg

SEQ ID NO: 4579569 - DNA, 25 bp, Homo sapien
gggaagtgtgctcgccgtcagagag

SEQ ID NO: 4579570 - DNA, 25 bp, Homo sapien
ctgcccttcagcgagaggagcactt

SEQ ID NO: 4579571 - DNA, 25 bp, Homo sapien
gaggcggaagcggaagcctccatcc

SEQ ID NO: 4579572 - DNA, 25 bp, Homo sapien
ccgttgctgggctgctcgatggtgt

SEQ ID NO: 4579573 - DNA, 25 bp, Homo sapien
ctcagacccagagtcgccgtccgtg

SEQ ID NO: 4579574 - DNA, 25 bp, Homo sapien
tcgatggtgtagaccagatcctcag

SEQ ID NO: 4579575 - DNA, 25 bp, Homo sapien
gagtcgccgtccgtgctcctcagag

SEQ ID NO: 4579576 - DNA, 25 bp, Homo sapien
ccataatgttgcggggcaggacccc

SEQ ID NO: 4579577 - DNA, 25 bp, Homo sapien
ccagagcactgtgtcccactctttg

SEQ ID NO: 4579578 - DNA, 25 bp, Homo sapien
cactaggcttctggagcaaacacag

SEQ ID NO: 4579579 - DNA, 25 bp, Homo sapien
gtgtcccactctttggcggcttccg

SEQ ID NO: 4579580 - DNA, 25 bp, Homo sapien
gcgaagttcaccagggccttccctg

SEQ ID NO: 4579581 - DNA, 25 bp, Homo sapien
tgagcgaagttcaccagggccttcc

SEQ ID NO: 4579582 - DNA, 25 bp, Homo sapien
cctgagcgaagttcaccagggcctt

SEQ ID NO: 4579583 - DNA, 25 bp, Homo sapien
gagcgaagttcaccagggccttccc

SEQ ID NO: 4579584 - DNA, 25 bp, Homo sapien
gtggaacagccttgtgcaggagttt

SEQ ID NO: 4579585 - DNA, 25 bp, Homo sapien
ggagccaagccatggccttcacttg

SEQ ID NO: 4579586 - DNA, 25 bp, Homo sapien
gtttggggagccaagccatggcctt

SEQ ID NO: 4579587 - DNA, 25 bp, Homo sapien
ctgggcgtggaacagccttgtgcag

SEQ ID NO: 4579588 - DNA, 25 bp, Homo sapien
ccccgtgaggcatgtggcagcgtcc

SEQ ID NO: 4579589 - DNA, 25 bp, Homo sapien
cgctggcctctttctcgaagcagac

SEQ ID NO: 4579590 - DNA, 25 bp, Homo sapien
catgtggcagcgtccccattttgca

SEQ ID NO: 4579591 - DNA, 25 bp, Homo sapien
tcgaagcagacatgggggtgttccc

SEQ ID NO: 4579592 - DNA, 25 bp, Homo sapien
tctgtcagtgtctcgctcccgtcat

SEQ ID NO: 4579593 - DNA, 25 bp, Homo sapien
caggcctgtgtttgtagtgaggatg

SEQ ID NO: 4579594 - DNA, 25 bp, Homo sapien
tcccgtcatgcacgtagcggatcag

SEQ ID NO: 4579595 - DNA, 25 bp, Homo sapien
atcaggacaaaactgtctgtcagtg

SEQ ID NO: 4579596 - DNA, 25 bp, Homo sapien
taagttctggctccgaggagttgtg

SEQ ID NO: 4579597 - DNA, 25 bp, Homo sapien
acccttcatgccctgcctttgggtg

SEQ ID NO: 4579598 - DNA, 25 bp, Homo sapien
agactgactcttttagggcttcatt

SEQ ID NO: 4579599 - DNA, 25 bp, Homo sapien
ggtatttaaagcataggtgcttctg

SEQ ID NO: 4579600 - DNA, 25 bp, Homo sapien
ctgagaatacgatgtctgcaggtgg

SEQ ID NO: 4579601 - DNA, 25 bp, Homo sapien
cactgagaatacgatgtctgcaggt

SEQ ID NO: 4579602 - DNA, 25 bp, Homo sapien
agggacgctgaagttttgcgcctct

SEQ ID NO: 4579603 - DNA, 25 bp, Homo sapien
ctctagtgggatggcagcgggcagc

SEQ ID NO: 4579604 - DNA, 25 bp, Homo sapien
cggaaacggaaggtgtcctcgactg

SEQ ID NO: 4579605 - DNA, 25 bp, Homo sapien
tcagcccctgagtgcacgaacagta

SEQ ID NO: 4579606 - DNA, 25 bp, Homo sapien
ctcaggcaccacgaggaggacattg

SEQ ID NO: 4579607 - DNA, 25 bp, Homo sapien
tacggccacgatactgccaaagagg

SEQ ID NO: 4579608 - DNA, 25 bp, Homo sapien
aaccacctcataatggaaggttggg

SEQ ID NO: 4579609 - DNA, 25 bp, Homo sapien
gtctcctgctgggtgttctgagtgt

SEQ ID NO: 4579610 - DNA, 25 bp, Homo sapien
tctgagtgtgcagtggctccagccg

SEQ ID NO: 4579611 - DNA, 25 bp, Homo sapien
gggctgtggtgagggtctcctgctg

SEQ ID NO: 4579612 - DNA, 25 bp, Homo sapien
tccacggtgtcgtaagcgtggtgct

SEQ ID NO: 4579613 - DNA, 25 bp, Homo sapien
agggcatgggcacccgagccgtcac

SEQ ID NO: 4579614 - DNA, 25 bp, Homo sapien
gccttgggccagtcgcaaccctgtg

SEQ ID NO: 4579615 - DNA, 25 bp, Homo sapien
ccagtcgcaaccctgtgctgcggtg

SEQ ID NO: 4579616 - DNA, 25 bp, Homo sapien
ttaggcatgtgcagggaacgggaga

SEQ ID NO: 4579617 - DNA, 25 bp, Homo sapien
cacactgagacttcaaggagaggct

SEQ ID NO: 4579618 - DNA, 25 bp, Homo sapien
actgtcgtggacagaccatggtgct

SEQ ID NO: 4579619 - DNA, 25 bp, Homo sapien
tgcagggaacgggagaggcgcacac

SEQ ID NO: 4579620 - DNA, 25 bp, Homo sapien
tgtcggtcagagccgtggccacagg

SEQ ID NO: 4579621 - DNA, 25 bp, Homo sapien
cggtcagagccgtggccacaggcac

SEQ ID NO: 4579622 - DNA, 25 bp, Homo sapien
tccaggtggttctcaccgaagaagg

SEQ ID NO: 4579623 - DNA, 25 bp, Homo sapien
aggtggttctcaccgaagaaggaag

SEQ ID NO: 4579624 - DNA, 25 bp, Homo sapien
gggagctgtggtcaaggctcagact

SEQ ID NO: 4579625 - DNA, 25 bp, Homo sapien
ggagctgtggtcaaggctcagactc

SEQ ID NO: 4579626 - DNA, 25 bp, Homo sapien
gagagggagctgtggtcaaggctca

SEQ ID NO: 4579627 - DNA, 25 bp, Homo sapien
gagggagctgtggtcaaggctcaga

SEQ ID NO: 4579628 - DNA, 25 bp, Homo sapien
gcccgggtcccagcatcttcttggt

SEQ ID NO: 4579629 - DNA, 25 bp, Homo sapien
cccgggtcccagcatcttcttggtc

SEQ ID NO: 4579630 - DNA, 25 bp, Homo sapien
cggggtgccttatctgcaaagacat

SEQ ID NO: 4579631 - DNA, 25 bp, Homo sapien
gtgccttatctgcaaagacattgat

SEQ ID NO: 4579632 - DNA, 25 bp, Homo sapien
gggtgccttatctgcaaagacattg

SEQ ID NO: 4579633 - DNA, 25 bp, Homo sapien
gccttatctgcaaagacattgattc

SEQ ID NO: 4579634 - DNA, 25 bp, Homo sapien
cgttgattctcctgggtcaagagga

SEQ ID NO: 4579635 - DNA, 25 bp, Homo sapien
gccgttgattctcctgggtcaagag

SEQ ID NO: 4579636 - DNA, 25 bp, Homo sapien
gattctcctgggtcaagaggaccca

SEQ ID NO: 4579637 - DNA, 25 bp, Homo sapien
tgattctcctgggtcaagaggaccc

SEQ ID NO: 4579638 - DNA, 25 bp, Homo sapien
tgtgatgagggaggtgatgtcagca

SEQ ID NO: 4579639 - DNA, 25 bp, Homo sapien
ctgtgatgagggaggtgatgtcagc

SEQ ID NO: 4579640 - DNA, 25 bp, Homo sapien
gtgatgagggaggtgatgtcagcat

SEQ ID NO: 4579641 - DNA, 25 bp, Homo sapien
ccgctggctgataccctctccagag

SEQ ID NO: 4579642 - DNA, 25 bp, Homo sapien
ctggctgataccctctccagagccc

SEQ ID NO: 4579643 - DNA, 25 bp, Homo sapien
agccgctggctgataccctctccag

SEQ ID NO: 4579644 - DNA, 25 bp, Homo sapien
caggcagccgctggctgataccctc

SEQ ID NO: 4579645 - DNA, 25 bp, Homo sapien
tgggtgtcaggctgaagaaggtcat

SEQ ID NO: 4579646 - DNA, 25 bp, Homo sapien
atctgtaggacaagccccgctgagg

SEQ ID NO: 4579647 - DNA, 25 bp, Homo sapien
cagagctatctgtaggacaagcccc

SEQ ID NO: 4579648 - DNA, 25 bp, Homo sapien
tatctgtaggacaagccccgctgag

SEQ ID NO: 4579649 - DNA, 25 bp, Homo sapien
ggtggtccagagctatctgtaggac

SEQ ID NO: 4579650 - DNA, 25 bp, Homo sapien
cgcggatgcaagtctggccaacata

SEQ ID NO: 4579651 - DNA, 25 bp, Homo sapien
ccgcggatgcaagtctggccaacat

SEQ ID NO: 4579652 - DNA, 25 bp, Homo sapien
tggccaacatagtcagggtcaaagc

SEQ ID NO: 4579653 - DNA, 25 bp, Homo sapien
ccaacatagtcagggtcaaagccaa

SEQ ID NO: 4579654 - DNA, 25 bp, Homo sapien
ggacttgcgaggagccagcggagtc

SEQ ID NO: 4579655 - DNA, 25 bp, Homo sapien
cttgcgaggagccagcggagtcctg

SEQ ID NO: 4579656 - DNA, 25 bp, Homo sapien
gcggcaggacttgcgaggagccagc

SEQ ID NO: 4579657 - DNA, 25 bp, Homo sapien
gctgggcggcaggacttgcgaggag

SEQ ID NO: 4579658 - DNA, 25 bp, Homo sapien
gattgccctttagacagtgcacagg

SEQ ID NO: 4579659 - DNA, 25 bp, Homo sapien
atgttcagatgagaggtggccccgc

SEQ ID NO: 4579660 - DNA, 25 bp, Homo sapien
gggcagcgctgtctcaatcttcaag

SEQ ID NO: 4579661 - DNA, 25 bp, Homo sapien
aatcaaagggatgccgactccaggg

SEQ ID NO: 4579662 - DNA, 25 bp, Homo sapien
catttagcttgggattgacctttgg

SEQ ID NO: 4579663 - DNA, 25 bp, Homo sapien
tgcaaaatgacagggtcatttagct

SEQ ID NO: 4579664 - DNA, 25 bp, Homo sapien
gattgacctttggatgaagcagtcc

SEQ ID NO: 4579665 - DNA, 25 bp, Homo sapien
gaagcagtcccatcacttgacattg

SEQ ID NO: 4579666 - DNA, 25 bp, Homo sapien
ttatgctctagaataatgatcgaca

SEQ ID NO: 4579667 - DNA, 25 bp, Homo sapien
tctagaataatgatcgacattttca

SEQ ID NO: 4579668 - DNA, 25 bp, Homo sapien
gctctagaataatgatcgacatttt

SEQ ID NO: 4579669 - DNA, 25 bp, Homo sapien
gaataatgatcgacattttcaatta

SEQ ID NO: 4579670 - DNA, 25 bp, Homo sapien
ggcggaggacggctgcatgggcgtg

SEQ ID NO: 4579671 - DNA, 25 bp, Homo sapien
agtaacagccgttcttggggcctgg

SEQ ID NO: 4579672 - DNA, 25 bp, Homo sapien
gggcctggcggaggacggctgcatg

SEQ ID NO: 4579673 - DNA, 25 bp, Homo sapien
tgggcacgggcgctggtttgagtgt

SEQ ID NO: 4579674 - DNA, 25 bp, Homo sapien
acacggtgggagatcacggcccagt

SEQ ID NO: 4579675 - DNA, 25 bp, Homo sapien
ttgtagtagacagtggtagaaggaa

SEQ ID NO: 4579676 - DNA, 25 bp, Homo sapien
tggaccctacatggcctggagggtt

SEQ ID NO: 4579677 - DNA, 25 bp, Homo sapien
acggtgggagatcacggcccagtct

SEQ ID NO: 4579678 - DNA, 25 bp, Homo sapien
tcagggtctgatgtactagtcaaat

SEQ ID NO: 4579679 - DNA, 25 bp, Homo sapien
cctgctttaggtttagagtggctct

SEQ ID NO: 4579680 - DNA, 25 bp, Homo sapien
gtgaaacaaagcaggttcagatggc

SEQ ID NO: 4579681 - DNA, 25 bp, Homo sapien
taccatgcacatacacgctcagaca

SEQ ID NO: 4579682 - DNA, 25 bp, Homo sapien
gatgctcacagtcacagcctggcct

SEQ ID NO: 4579683 - DNA, 25 bp, Homo sapien
tcctgtgggccagtggccagacacc

SEQ ID NO: 4579684 - DNA, 25 bp, Homo sapien
cagacaccccctgggatggctcaaa

SEQ ID NO: 4579685 - DNA, 25 bp, Homo sapien
ggctcaaaggagtcaggacttggaa

SEQ ID NO: 4579686 - DNA, 25 bp, Homo sapien
catctcggggttcagactctctgac

SEQ ID NO: 4579687 - DNA, 25 bp, Homo sapien
gaacatctcggggttcagactctct

SEQ ID NO: 4579688 - DNA, 25 bp, Homo sapien
acatctcggggttcagactctctga

SEQ ID NO: 4579689 - DNA, 25 bp, Homo sapien
ccagaacatctcggggttcagactc

SEQ ID NO: 4579690 - DNA, 25 bp, Homo sapien
aagaaacgaggaggaatgcaacgtg

SEQ ID NO: 4579691 - DNA, 25 bp, Homo sapien
ggcggccgccaagagtgaaaataga

SEQ ID NO: 4579692 - DNA, 25 bp, Homo sapien
gaggacagcgggaagaagaaacgag

SEQ ID NO: 4579693 - DNA, 25 bp, Homo sapien
aaaatagagggaagcgccatgcaag

SEQ ID NO: 4579694 - DNA, 25 bp, Homo sapien
agaccacttccgggactcagtgctc

SEQ ID NO: 4579695 - DNA, 25 bp, Homo sapien
aaaagaccacttccgggactcagtg

SEQ ID NO: 4579696 - DNA, 25 bp, Homo sapien
caaaaagaccacttccgggactcag

SEQ ID NO: 4579697 - DNA, 25 bp, Homo sapien
aaagaccacttccgggactcagtgc

SEQ ID NO: 4579698 - DNA, 25 bp, Homo sapien
ggcgcttcccccagggtggacgcag

SEQ ID NO: 4579699 - DNA, 25 bp, Homo sapien
ttcccccagggtggacgcagcaggc

SEQ ID NO: 4579700 - DNA, 25 bp, Homo sapien
tcccccagggtggacgcagcaggca

SEQ ID NO: 4579701 - DNA, 25 bp, Homo sapien
gcttcccccagggtggacgcagcag

SEQ ID NO: 4579702 - DNA, 25 bp, Homo sapien
cggggagtcggcactgcgtcgtggg

SEQ ID NO: 4579703 - DNA, 25 bp, Homo sapien
gggcacggcggggagtcggcactgc

SEQ ID NO: 4579704 - DNA, 25 bp, Homo sapien
gcactgcgtcgtggggctggacttg

SEQ ID NO: 4579705 - DNA, 25 bp, Homo sapien
cggcactgcgtcgtggggctggact

SEQ ID NO: 4579706 - DNA, 25 bp, Homo sapien
gccgcatctcgttgcgcccctgtgc

SEQ ID NO: 4579707 - DNA, 25 bp, Homo sapien
gcgccgcatctcgttgcgcccctgt

SEQ ID NO: 4579708 - DNA, 25 bp, Homo sapien
gatggtcgtcttgatgtcaccgatg

SEQ ID NO: 4579709 - DNA, 25 bp, Homo sapien
gcatgcgccgcatctcgttgcgccc

SEQ ID NO: 4579710 - DNA, 25 bp, Homo sapien
ccgggccctgttgggactgtgcgct

SEQ ID NO: 4579711 - DNA, 25 bp, Homo sapien
tacaccgcttagactcgaagatccg

SEQ ID NO: 4579712 - DNA, 25 bp, Homo sapien
gcgagtatggcttttcagacgcggc

SEQ ID NO: 4579713 - DNA, 25 bp, Homo sapien
aggagactgggacctgattgatgct

SEQ ID NO: 4579714 - DNA, 25 bp, Homo sapien
ttgggcatgaggtcctgcatgttct

SEQ ID NO: 4579715 - DNA, 25 bp, Homo sapien
catgtacgagtccaccaggttctga

SEQ ID NO: 4579716 - DNA, 25 bp, Homo sapien
tggtcttgggcatgaggtcctgcat

SEQ ID NO: 4579717 - DNA, 25 bp, Homo sapien
aggtcctgcatgttcttgttgacaa

SEQ ID NO: 4579718 - DNA, 25 bp, Homo sapien
aagcaactggcctaaacagacaccc

SEQ ID NO: 4579719 - DNA, 25 bp, Homo sapien
gaagcaactggcctaaacagacacc

SEQ ID NO: 4579720 - DNA, 25 bp, Homo sapien
cagccctcagaaagtaggacttcca

SEQ ID NO: 4579721 - DNA, 25 bp, Homo sapien
aaagtaggacttccagctgttcacc

SEQ ID NO: 4579722 - DNA, 25 bp, Homo sapien
ccaacacactcaaggtacacaccag

SEQ ID NO: 4579723 - DNA, 25 bp, Homo sapien
ccctcagaaagtaggacttccagct

SEQ ID NO: 4579724 - DNA, 25 bp, Homo sapien
tgcgggctgtggtccgcttccggcc

SEQ ID NO: 4579725 - DNA, 25 bp, Homo sapien
cacgtgatcgtcgaatctgttgacc

SEQ ID NO: 4579726 - DNA, 25 bp, Homo sapien
tcccagaggccgtttgtccaagtca

SEQ ID NO: 4579727 - DNA, 25 bp, Homo sapien
tgacctggcgccaccggaaaaagaa

SEQ ID NO: 4579728 - DNA, 25 bp, Homo sapien
gccttggaggacaaaaccagccttg

SEQ ID NO: 4579729 - DNA, 25 bp, Homo sapien
aaagccattcttagcgcgtgggcca

SEQ ID NO: 4579730 - DNA, 25 bp, Homo sapien
taaacagtacattaggccgggcatt

SEQ ID NO: 4579731 - DNA, 25 bp, Homo sapien
catgtcaacagataagcgtggccac

SEQ ID NO: 4579732 - DNA, 25 bp, Homo sapien
ttcttcagggcggcatcagcccagg

SEQ ID NO: 4579733 - DNA, 25 bp, Homo sapien
aggctctcgtgtgggtctgcacacc

SEQ ID NO: 4579734 - DNA, 25 bp, Homo sapien
cttcttcagggcggcatcagcccag

SEQ ID NO: 4579735 - DNA, 25 bp, Homo sapien
taggcactgctagccttgaagcctc

SEQ ID NO: 4579736 - DNA, 25 bp, Homo sapien
cttgagccttgagccaagctgagga

SEQ ID NO: 4579737 - DNA, 25 bp, Homo sapien
tagacacggtcatctcagacctcgg

SEQ ID NO: 4579738 - DNA, 25 bp, Homo sapien
caaggtgctaaagtggagggcctcc

SEQ ID NO: 4579739 - DNA, 25 bp, Homo sapien
ggtggaacccaggaatggtctttga

SEQ ID NO: 4579740 - DNA, 25 bp, Homo sapien
ggtagaaagatcatcacataggggt

SEQ ID NO: 4579741 - DNA, 25 bp, Homo sapien
gtagaaagatcatcacataggggtt

SEQ ID NO: 4579742 - DNA, 25 bp, Homo sapien
gggtagaaagatcatcacatagggg

SEQ ID NO: 4579743 - DNA, 25 bp, Homo sapien
ctgaagcgcccatgcccccaccccg

SEQ ID NO: 4579744 - DNA, 25 bp, Homo sapien
tgaagcgcccatgcccccaccccgg

SEQ ID NO: 4579745 - DNA, 25 bp, Homo sapien
aagcgcccatgcccccaccccggca

SEQ ID NO: 4579746 - DNA, 25 bp, Homo sapien
gcgcccatgcccccaccccggcacc

SEQ ID NO: 4579747 - DNA, 25 bp, Homo sapien
gctggatggccaccgtcagagcctg

SEQ ID NO: 4579748 - DNA, 25 bp, Homo sapien
ggaagactggaccagccagatggcc

SEQ ID NO: 4579749 - DNA, 25 bp, Homo sapien
ggacagagggtccacctggaagact

SEQ ID NO: 4579750 - DNA, 25 bp, Homo sapien
atggccaccgtcagagcctgcagga

SEQ ID NO: 4579751 - DNA, 25 bp, Homo sapien
gtgacctcgggcaagctgctttctt

SEQ ID NO: 4579752 - DNA, 25 bp, Homo sapien
ggtgacctcgggcaagctgctttct

SEQ ID NO: 4579753 - DNA, 25 bp, Homo sapien
ctgacaggtgacctcgggcaagctg

SEQ ID NO: 4579754 - DNA, 25 bp, Homo sapien
acctcgggcaagctgctttctttgc

SEQ ID NO: 4579755 - DNA, 25 bp, Homo sapien
aggcacctcagcaggtttgggtcca

SEQ ID NO: 4579756 - DNA, 25 bp, Homo sapien
tcatcatgatcagggagtgggtccc

SEQ ID NO: 4579757 - DNA, 25 bp, Homo sapien
ctcagcaggtttgggtccaccttca

SEQ ID NO: 4579758 - DNA, 25 bp, Homo sapien
tgggtccctgggatcacaaaggtga

SEQ ID NO: 4579759 - DNA, 25 bp, Homo sapien
tggagtcaaagtaggtaagccaggg

SEQ ID NO: 4579760 - DNA, 25 bp, Homo sapien
agtaggtaagccagggtaaccagag

SEQ ID NO: 4579761 - DNA, 25 bp, Homo sapien
gagtcaaagtaggtaagccagggta

SEQ ID NO: 4579762 - DNA, 25 bp, Homo sapien
ttggagtcaaagtaggtaagccagg

SEQ ID NO: 4579763 - DNA, 25 bp, Homo sapien
tcaggtctgtcatttccaagcccat

SEQ ID NO: 4579764 - DNA, 25 bp, Homo sapien
aggacttttgcggtaatattgaaca

SEQ ID NO: 4579765 - DNA, 25 bp, Homo sapien
cttttgcggtaatattgaacagatg

SEQ ID NO: 4579766 - DNA, 25 bp, Homo sapien
taaaggacttttgcggtaatattga

SEQ ID NO: 4579767 - DNA, 25 bp, Homo sapien
gacttttgcggtaatattgaacaga

SEQ ID NO: 4579768 - DNA, 25 bp, Homo sapien
tctctatatccataactgtttccca

SEQ ID NO: 4579769 - DNA, 25 bp, Homo sapien
gcatcatctgttaccctgaaggatc

SEQ ID NO: 4579770 - DNA, 25 bp, Homo sapien
cctggctcattgctgtttttatact

SEQ ID NO: 4579771 - DNA, 25 bp, Homo sapien
cttctgcatcatctgttaccctgaa

SEQ ID NO: 4579772 - DNA, 25 bp, Homo sapien
catgggcccccgtgggcatgctgac

SEQ ID NO: 4579773 - DNA, 25 bp, Homo sapien
tcatccatgggcccccgtgggcatg

SEQ ID NO: 4579774 - DNA, 25 bp, Homo sapien
ccatgggcccccgtgggcatgctga

SEQ ID NO: 4579775 - DNA, 25 bp, Homo sapien
atccatgggcccccgtgggcatgct

SEQ ID NO: 4579776 - DNA, 25 bp, Homo sapien
ggtgcatgcacagcgtctcgttgca

SEQ ID NO: 4579777 - DNA, 25 bp, Homo sapien
catggttgttttgatgtcgccgatg

SEQ ID NO: 4579778 - DNA, 25 bp, Homo sapien
acagcgtctcgttgcaccattttgc

SEQ ID NO: 4579779 - DNA, 25 bp, Homo sapien
tcgtctccacatgagtacagtttgg

SEQ ID NO: 4579780 - DNA, 25 bp, Homo sapien
tggttgtcatctctgccaggccaac

SEQ ID NO: 4579781 - DNA, 25 bp, Homo sapien
tgtgtccccagtgctacaggagccc

SEQ ID NO: 4579782 - DNA, 25 bp, Homo sapien
ggtgcatgcatgttgttgatcatga

SEQ ID NO: 4579783 - DNA, 25 bp, Homo sapien
tgtcatctctgccaggccaacacag

SEQ ID NO: 4579784 - DNA, 25 bp, Homo sapien
tgagtggtctccatttgccacacca

SEQ ID NO: 4579785 - DNA, 25 bp, Homo sapien
ctctgagtggtctccatttgccaca

SEQ ID NO: 4579786 - DNA, 25 bp, Homo sapien
gtggtctccatttgccacaccagct

SEQ ID NO: 4579787 - DNA, 25 bp, Homo sapien
tctccatttgccacaccagctgtgg

SEQ ID NO: 4579788 - DNA, 25 bp, Homo sapien
ggagacatgggtgagacccacttcc

SEQ ID NO: 4579789 - DNA, 25 bp, Homo sapien
gacaggagacatgggtgagacccac

SEQ ID NO: 4579790 - DNA, 25 bp, Homo sapien
caggcaatgaagtggaacctgctcc

SEQ ID NO: 4579791 - DNA, 25 bp, Homo sapien
ttcccagaagataaggaggatgctt

SEQ ID NO: 4579792 - DNA, 25 bp, Homo sapien
cagtgctgtggtgcacttgcaaagg

SEQ ID NO: 4579793 - DNA, 25 bp, Homo sapien
atgtcaacaaggcaaccatggaggg

SEQ ID NO: 4579794 - DNA, 25 bp, Homo sapien
ctctgttcacgtcatttggcttccg

SEQ ID NO: 4579795 - DNA, 25 bp, Homo sapien
cacgtcatttggcttccgtgcctgc

SEQ ID NO: 4579796 - DNA, 25 bp, Homo sapien
tgttcacgtcatttggcttccgtgc

SEQ ID NO: 4579797 - DNA, 25 bp, Homo sapien
cgtcatttggcttccgtgcctgcat

SEQ ID NO: 4579798 - DNA, 25 bp, Homo sapien
agacctttaagaccccgaactgcat

SEQ ID NO: 4579799 - DNA, 25 bp, Homo sapien
tattgttatccaatggggccacagg

SEQ ID NO: 4579800 - DNA, 25 bp, Homo sapien
cttgctggcatcattcgaataggta

SEQ ID NO: 4579801 - DNA, 25 bp, Homo sapien
ctaaatataattgtgctgtcttgaa

SEQ ID NO: 4579802 - DNA, 25 bp, Homo sapien
gcagcctaagtcagtgtccctggga

SEQ ID NO: 4579803 - DNA, 25 bp, Homo sapien
tgcactacgggacttgaccaaactt

SEQ ID NO: 4579804 - DNA, 25 bp, Homo sapien
caaactttaacatggcttctggcag

SEQ ID NO: 4579805 - DNA, 25 bp, Homo sapien
gagttctgacttctgcattgaggag

SEQ ID NO: 4579806 - DNA, 25 bp, Homo sapien
cgaatttcaaaatggcgacaccaga

SEQ ID NO: 4579807 - DNA, 25 bp, Homo sapien
ggaaaatgcggagcccctttctgaa

SEQ ID NO: 4579808 - DNA, 25 bp, Homo sapien
gaatattaaaccaagctcgaagccc

SEQ ID NO: 4579809 - DNA, 25 bp, Homo sapien
gaatgccatgcctgttagggtccca

SEQ ID NO: 4579810 - DNA, 25 bp, Homo sapien
gattccagataagagcgagcattca

SEQ ID NO: 4579811 - DNA, 25 bp, Homo sapien
tacagctctgaacacattaacacgg

SEQ ID NO: 4579812 - DNA, 25 bp, Homo sapien
gatcagatagtgacaggtgcccaac

SEQ ID NO: 4579813 - DNA, 25 bp, Homo sapien
tttagtgaaaatagtgggcagccct

SEQ ID NO: 4579814 - DNA, 25 bp, Homo sapien
gcgggggcggcgtcgctgttgccct

SEQ ID NO: 4579815 - DNA, 25 bp, Homo sapien
aaatcaaaatggcttgctcttcata

SEQ ID NO: 4579816 - DNA, 25 bp, Homo sapien
tattgtaaagtaaatctggtgacag

SEQ ID NO: 4579817 - DNA, 25 bp, Homo sapien
actattgtaaagtaaatctggtgac

SEQ ID NO: 4579818 - DNA, 25 bp, Homo sapien
atcaaaatggcttgctcttcatagt

SEQ ID NO: 4579819 - DNA, 25 bp, Homo sapien
tagtgagacagccttccaaagccgg

SEQ ID NO: 4579820 - DNA, 25 bp, Homo sapien
tgaggtaactgaagcatacagaagt

SEQ ID NO: 4579821 - DNA, 25 bp, Homo sapien
tgagagcaagccatgggacataagg

SEQ ID NO: 4579822 - DNA, 25 bp, Homo sapien
tcagttaacctgaagcataggctgt

SEQ ID NO: 4579823 - DNA, 25 bp, Homo sapien
gagtgataaagatatgccagtatac

SEQ ID NO: 4579824 - DNA, 25 bp, Homo sapien
gaagcaagtctatataaatcagtca

SEQ ID NO: 4579825 - DNA, 25 bp, Homo sapien
gatgcagctttagtatcaaacaaaa

SEQ ID NO: 4579826 - DNA, 25 bp, Homo sapien
gttgtaaaggtgatagaagcaagtc

SEQ ID NO: 4579827 - DNA, 25 bp, Homo sapien
gactgatagctgcacatttggcatg

SEQ ID NO: 4579828 - DNA, 25 bp, Homo sapien
taactttgtaaaccacatctgagag

SEQ ID NO: 4579829 - DNA, 25 bp, Homo sapien
taaagttctgattgccagttgctca

SEQ ID NO: 4579830 - DNA, 25 bp, Homo sapien
tttattgccttacctgaatcagtcc

SEQ ID NO: 4579831 - DNA, 25 bp, Homo sapien
gccattttactcattcgaaacttta

SEQ ID NO: 4579832 - DNA, 25 bp, Homo sapien
tatgccattttactcattcgaaact

SEQ ID NO: 4579833 - DNA, 25 bp, Homo sapien
ttatgccattttactcattcgaaac

SEQ ID NO: 4579834 - DNA, 25 bp, Homo sapien
tgccattttactcattcgaaacttt

SEQ ID NO: 4579835 - DNA, 25 bp, Homo sapien
tatgctggcgtaatcgggttcctcc

SEQ ID NO: 4579836 - DNA, 25 bp, Homo sapien
ctccgagccgccgtaggactggttc

SEQ ID NO: 4579837 - DNA, 25 bp, Homo sapien
ccttcgtgttgagtaacctggcgga

SEQ ID NO: 4579838 - DNA, 25 bp, Homo sapien
gtggtggagcgtgtgctcaccttcc

SEQ ID NO: 4579839 - DNA, 25 bp, Homo sapien
ctttggatcccgcagggatctcctg

SEQ ID NO: 4579840 - DNA, 25 bp, Homo sapien
ggatcccgcagggatctcctgctgc

SEQ ID NO: 4579841 - DNA, 25 bp, Homo sapien
gggactttggatcccgcagggatct

SEQ ID NO: 4579842 - DNA, 25 bp, Homo sapien
tgcgccagcgggtgggggtttgtga

SEQ ID NO: 4579843 - DNA, 25 bp, Homo sapien
tgtgcgtttgcgtcctcagcgtgtg

SEQ ID NO: 4579844 - DNA, 25 bp, Homo sapien
gtattgcggacccatcggagcgtaa

SEQ ID NO: 4579845 - DNA, 25 bp, Homo sapien
gtccgttcgcaatcctttgtgcgtt

SEQ ID NO: 4579846 - DNA, 25 bp, Homo sapien
ggagcgtaacctggatctccgcagg

SEQ ID NO: 4579847 - DNA, 25 bp, Homo sapien
gggcattgcttggttcgcgtggtag

SEQ ID NO: 4579848 - DNA, 25 bp, Homo sapien
ctggaggggcattgcttggttcgcg

SEQ ID NO: 4579849 - DNA, 25 bp, Homo sapien
cttggttcgcgtggtagcagaggag

SEQ ID NO: 4579850 - DNA, 25 bp, Homo sapien
cattgcttggttcgcgtggtagcag

SEQ ID NO: 4579851 - DNA, 25 bp, Homo sapien
agggagctggccagtatccaaaggc

SEQ ID NO: 4579852 - DNA, 25 bp, Homo sapien
agtatccaaaggcaggcttgtagaa

SEQ ID NO: 4579853 - DNA, 25 bp, Homo sapien
ccaaaggcaggcttgtagaaaactt

SEQ ID NO: 4579854 - DNA, 25 bp, Homo sapien
cttgtttgggctctggaactctcat

SEQ ID NO: 4579855 - DNA, 25 bp, Homo sapien
tttataccaataaaacatagcgtgg

SEQ ID NO: 4579856 - DNA, 25 bp, Homo sapien
aacccagaatagttggtatgtcagc

SEQ ID NO: 4579857 - DNA, 25 bp, Homo sapien
tggtagaccagagtattacatcatc

SEQ ID NO: 4579858 - DNA, 25 bp, Homo sapien
catagcgtggaactcattcaggtaa

SEQ ID NO: 4579859 - DNA, 25 bp, Homo sapien
tgtcattttatacccagtctggccc

SEQ ID NO: 4579860 - DNA, 25 bp, Homo sapien
tgtagaaactgggtatgagttggct

SEQ ID NO: 4579861 - DNA, 25 bp, Homo sapien
cccaggtttgcactgccataaattc

SEQ ID NO: 4579862 - DNA, 25 bp, Homo sapien
gttttaatgggaacagaagactcca

SEQ ID NO: 4579863 - DNA, 25 bp, Homo sapien
aacaaaacactcaaccaatgggtca

SEQ ID NO: 4579864 - DNA, 25 bp, Homo sapien
aaaagacctcatgtcaacaacctga

SEQ ID NO: 4579865 - DNA, 25 bp, Homo sapien
gaaacaacaaatcaagcctacatag

SEQ ID NO: 4579866 - DNA, 25 bp, Homo sapien
tggtgcatttttgaaccacaacagg

SEQ ID NO: 4579867 - DNA, 25 bp, Homo sapien
gctggataaccacatggctaactaa

SEQ ID NO: 4579868 - DNA, 25 bp, Homo sapien
gaccaatgggatagactggagaacc

SEQ ID NO: 4579869 - DNA, 25 bp, Homo sapien
taaaggcagacggatagaccaatgg

SEQ ID NO: 4579870 - DNA, 25 bp, Homo sapien
tggaggacttaaacctgcagagttt

SEQ ID NO: 4579871 - DNA, 25 bp, Homo sapien
catgaaaaagttccggaggtgcata

SEQ ID NO: 4579872 - DNA, 25 bp, Homo sapien
catagtggtgactggtacatacaac

SEQ ID NO: 4579873 - DNA, 25 bp, Homo sapien
gaaatatagtggtatgcagctgctg

SEQ ID NO: 4579874 - DNA, 25 bp, Homo sapien
aaagattacgttttgtcacagggag

SEQ ID NO: 4579875 - DNA, 25 bp, Homo sapien
gcatcccagccttgacgaggacata

SEQ ID NO: 4579876 - DNA, 25 bp, Homo sapien
gaattggtgacactagtgacccact

SEQ ID NO: 4579877 - DNA, 25 bp, Homo sapien
ttcacagcacttacactgggccaga

SEQ ID NO: 4579878 - DNA, 25 bp, Homo sapien
cagaggtatctatcagtcagcgctt

SEQ ID NO: 4579879 - DNA, 25 bp, Homo sapien
aatgatttggttcactttgacgttt

SEQ ID NO: 4579880 - DNA, 25 bp, Homo sapien
acaatgatttggttcactttgacgt

SEQ ID NO: 4579881 - DNA, 25 bp, Homo sapien
aacaatgatttggttcactttgacg

SEQ ID NO: 4579882 - DNA, 25 bp, Homo sapien
caatgatttggttcactttgacgtt

SEQ ID NO: 4579883 - DNA, 25 bp, Homo sapien
gaataaacctatcgatgaagtaagg

SEQ ID NO: 4579884 - DNA, 25 bp, Homo sapien
gcacacaaggcgacatgaataaacc

SEQ ID NO: 4579885 - DNA, 25 bp, Homo sapien
ggcgacatgaataaacctatcgatg

SEQ ID NO: 4579886 - DNA, 25 bp, Homo sapien
cctatcgatgaagtaaggcttgatg

SEQ ID NO: 4579887 - DNA, 25 bp, Homo sapien
tctttcaactgtcatatgcctggaa

SEQ ID NO: 4579888 - DNA, 25 bp, Homo sapien
gactgggtcctttacttcagcatgt

SEQ ID NO: 4579889 - DNA, 25 bp, Homo sapien
catctgatattgtccttttgcctga

SEQ ID NO: 4579890 - DNA, 25 bp, Homo sapien
taggcaaacattaatctactgtctg

SEQ ID NO: 4579891 - DNA, 25 bp, Homo sapien
gtgggcactggtactgctcgtctct

SEQ ID NO: 4579892 - DNA, 25 bp, Homo sapien
gggcactggtactgctcgtctctac

SEQ ID NO: 4579893 - DNA, 25 bp, Homo sapien
tgggcactggtactgctcgtctcta

SEQ ID NO: 4579894 - DNA, 25 bp, Homo sapien
caggttgatatcatactggactgaa

SEQ ID NO: 4579895 - DNA, 25 bp, Homo sapien
ctggactgaactggctctctgaaag

SEQ ID NO: 4579896 - DNA, 25 bp, Homo sapien
gttgatatcatactggactgaactg

SEQ ID NO: 4579897 - DNA, 25 bp, Homo sapien
actggctctctgaaagtggcctttc

SEQ ID NO: 4579898 - DNA, 25 bp, Homo sapien
ggcaaggtcacactacagaagagta

SEQ ID NO: 4579899 - DNA, 25 bp, Homo sapien
ggcttcttacaacatggcggctgat

SEQ ID NO: 4579900 - DNA, 25 bp, Homo sapien
tagtctatgatcaaggcagtcacgg

SEQ ID NO: 4579901 - DNA, 25 bp, Homo sapien
cacggtgcctgcctagattcaagga

SEQ ID NO: 4579902 - DNA, 25 bp, Homo sapien
tagtatacaaacttctcaagcccac

SEQ ID NO: 4579903 - DNA, 25 bp, Homo sapien
gaaaaatatctagaactaagggcat

SEQ ID NO: 4579904 - DNA, 25 bp, Homo sapien
tatgcctagcacaatagtgggcact

SEQ ID NO: 4579905 - DNA, 25 bp, Homo sapien
ggcactagatagctgaccctgcata

SEQ ID NO: 4579906 - DNA, 25 bp, Homo sapien
aaaacctcttcacaacgagctcctg

SEQ ID NO: 4579907 - DNA, 25 bp, Homo sapien
gagctcctgtatagttttcaacgca

SEQ ID NO: 4579908 - DNA, 25 bp, Homo sapien
tactaggaccgccaatgccacaaaa

SEQ ID NO: 4579909 - DNA, 25 bp, Homo sapien
gaagtagaaggctccaatgataagt

SEQ ID NO: 4579910 - DNA, 25 bp, Homo sapien
tagcaaacagttgtgccacctaatg

SEQ ID NO: 4579911 - DNA, 25 bp, Homo sapien
cagttgtgccacctaatgaggtgaa

SEQ ID NO: 4579912 - DNA, 25 bp, Homo sapien
tgttttagcaaacagttgtgccacc

SEQ ID NO: 4579913 - DNA, 25 bp, Homo sapien
acctaatgaggtgaataccaagcaa

SEQ ID NO: 4579914 - DNA, 25 bp, Homo sapien
caaccttctaatgcagggaaaatct

SEQ ID NO: 4579915 - DNA, 25 bp, Homo sapien
tgcagggaaaatctcatgcccaact

SEQ ID NO: 4579916 - DNA, 25 bp, Homo sapien
ttcaggtctcaacaaccttctaatg

SEQ ID NO: 4579917 - DNA, 25 bp, Homo sapien
tgcccaacttggaataagacaaaga

SEQ ID NO: 4579918 - DNA, 25 bp, Homo sapien
cactctcgataattattccaatggt

SEQ ID NO: 4579919 - DNA, 25 bp, Homo sapien
caatggtaattctttgccaagttaa

SEQ ID NO: 4579920 - DNA, 25 bp, Homo sapien
cttaccaggtcactctcgataatta

SEQ ID NO: 4579921 - DNA, 25 bp, Homo sapien
tattccaatggtaattctttgccaa

SEQ ID NO: 4579922 - DNA, 25 bp, Homo sapien
gataggtgaagacaaactccttgcc

SEQ ID NO: 4579923 - DNA, 25 bp, Homo sapien
taggtgaagacaaactccttgcccc

SEQ ID NO: 4579924 - DNA, 25 bp, Homo sapien
ggataggtgaagacaaactccttgc

SEQ ID NO: 4579925 - DNA, 25 bp, Homo sapien
gggataggtgaagacaaactccttg

SEQ ID NO: 4579926 - DNA, 25 bp, Homo sapien
ttagcaataattgcgcctcagataa

SEQ ID NO: 4579927 - DNA, 25 bp, Homo sapien
tcaattagcaataattgcgcctcag

SEQ ID NO: 4579928 - DNA, 25 bp, Homo sapien
ctacaatactgccactgcacaaagc

SEQ ID NO: 4579929 - DNA, 25 bp, Homo sapien
tggctacaatactgccactgcacaa

SEQ ID NO: 4579930 - DNA, 25 bp, Homo sapien
cagcagaaagtataaggaagaatac

SEQ ID NO: 4579931 - DNA, 25 bp, Homo sapien
tacactcagtatgaatgtcaggcgt

SEQ ID NO: 4579932 - DNA, 25 bp, Homo sapien
tgttgccacatagcatccagagccc

SEQ ID NO: 4579933 - DNA, 25 bp, Homo sapien
gcgtaatctagggtatctccaagcc

SEQ ID NO: 4579934 - DNA, 25 bp, Homo sapien
gctgggaatagtaggtatcacataa

SEQ ID NO: 4579935 - DNA, 25 bp, Homo sapien
aacgacttgtgactgggaccacagg

SEQ ID NO: 4579936 - DNA, 25 bp, Homo sapien
ccccattcaggcaaaacgacttgtg

SEQ ID NO: 4579937 - DNA, 25 bp, Homo sapien
tagtaggtatcacataacaaagccc

SEQ ID NO: 4579938 - DNA, 25 bp, Homo sapien
taaatagtttcattcttggtcaaga

SEQ ID NO: 4579939 - DNA, 25 bp, Homo sapien
gtaaatagtttcattcttggtcaag

SEQ ID NO: 4579940 - DNA, 25 bp, Homo sapien
tctcaatctactaacacagttgtaa

SEQ ID NO: 4579941 - DNA, 25 bp, Homo sapien
cccagttctgttctataaagaacac

SEQ ID NO: 4579942 - DNA, 25 bp, Homo sapien
taacacagttgtaataccaaggtct

SEQ ID NO: 4579943 - DNA, 25 bp, Homo sapien
cagaaatctcaatctactaacacag

SEQ ID NO: 4579944 - DNA, 25 bp, Homo sapien
ttgttggacatgcagtgtttcaaaa

SEQ ID NO: 4579945 - DNA, 25 bp, Homo sapien
ttttgaataccgcagacaacagcag

SEQ ID NO: 4579946 - DNA, 25 bp, Homo sapien
caaaagtttttgaataccgcagaca

SEQ ID NO: 4579947 - DNA, 25 bp, Homo sapien
aaaataaattttgttggacatgcag

SEQ ID NO: 4579948 - DNA, 25 bp, Homo sapien
tttcttgttgatctaatatgaacag

SEQ ID NO: 4579949 - DNA, 25 bp, Homo sapien
tatcaagtgcaaatacggcaattcc

SEQ ID NO: 4579950 - DNA, 25 bp, Homo sapien
tatctctaagccatcctcctttgtt

SEQ ID NO: 4579951 - DNA, 25 bp, Homo sapien
taagatatctatctctaagccatcc

SEQ ID NO: 4579952 - DNA, 25 bp, Homo sapien
cggcaattcctatctgaccatctga

SEQ ID NO: 4579953 - DNA, 25 bp, Homo sapien
gccctctttggcgacatctaaggta

SEQ ID NO: 4579954 - DNA, 25 bp, Homo sapien
tctaaggtagtttctaaacagacac

SEQ ID NO: 4579955 - DNA, 25 bp, Homo sapien
cacttcacactggtttgacttagag

SEQ ID NO: 4579956 - DNA, 25 bp, Homo sapien
taggtcctgctataagtctcaggag

SEQ ID NO: 4579957 - DNA, 25 bp, Homo sapien
tgattataatttgggtttcccatct

SEQ ID NO: 4579958 - DNA, 25 bp, Homo sapien
attataatttgggtttcccatctag

SEQ ID NO: 4579959 - DNA, 25 bp, Homo sapien
tcttgattataatttgggtttccca

SEQ ID NO: 4579960 - DNA, 25 bp, Homo sapien
cttgattataatttgggtttcccat

SEQ ID NO: 4579961 - DNA, 25 bp, Homo sapien
ccctttccttgctcctacatgagat

SEQ ID NO: 4579962 - DNA, 25 bp, Homo sapien
ctttccttgctcctacatgagattt

SEQ ID NO: 4579963 - DNA, 25 bp, Homo sapien
ttccttgctcctacatgagattttc

SEQ ID NO: 4579964 - DNA, 25 bp, Homo sapien
tccttgctcctacatgagattttca

SEQ ID NO: 4579965 - DNA, 25 bp, Homo sapien
cttttatggttcaccactatttctt

SEQ ID NO: 4579966 - DNA, 25 bp, Homo sapien
gaatagagaggaaactggttctctt

SEQ ID NO: 4579967 - DNA, 25 bp, Homo sapien
tcttttatggttcaccactatttct

SEQ ID NO: 4579968 - DNA, 25 bp, Homo sapien
ctcttttatggttcaccactatttc

SEQ ID NO: 4579969 - DNA, 25 bp, Homo sapien
cttcaaatttgatgctggttcttta

SEQ ID NO: 4579970 - DNA, 25 bp, Homo sapien
tctttatttttctgattcactttta

SEQ ID NO: 4579971 - DNA, 25 bp, Homo sapien
caaatttgatgctggttctttattt

SEQ ID NO: 4579972 - DNA, 25 bp, Homo sapien
ctttatttttctgattcacttttag

SEQ ID NO: 4579973 - DNA, 25 bp, Homo sapien
ggcaccagcgttgaatttaaagtct

SEQ ID NO: 4579974 - DNA, 25 bp, Homo sapien
gagcaggctacttaatccctctgtg

SEQ ID NO: 4579975 - DNA, 25 bp, Homo sapien
aggcagtgaggcaccagcgttgaat

SEQ ID NO: 4579976 - DNA, 25 bp, Homo sapien
gtgtgatcttgagcaggctacttaa

SEQ ID NO: 4579977 - DNA, 25 bp, Homo sapien
tatgagagagaatgccaactacagc

SEQ ID NO: 4579978 - DNA, 25 bp, Homo sapien
gccacgttagaaacgaacagttatg

SEQ ID NO: 4579979 - DNA, 25 bp, Homo sapien
gccaactacagccacgttagaaacg

SEQ ID NO: 4579980 - DNA, 25 bp, Homo sapien
gtatcttggtatgagagagaatgcc

SEQ ID NO: 4579981 - DNA, 25 bp, Homo sapien
ctctgcgtggcagccccggagacag

SEQ ID NO: 4579982 - DNA, 25 bp, Homo sapien
tgccagccgacgccgcggtttccta

SEQ ID NO: 4579983 - DNA, 25 bp, Homo sapien
cagccgacgccgcggtttcctagac

SEQ ID NO: 4579984 - DNA, 25 bp, Homo sapien
acgccacgaagcccgctctgcgtgg

SEQ ID NO: 4579985 - DNA, 25 bp, Homo sapien
tgcgtgctcggaagggctgggatct

SEQ ID NO: 4579986 - DNA, 25 bp, Homo sapien
agggctgggatcttgccgctgacct

SEQ ID NO: 4579987 - DNA, 25 bp, Homo sapien
tcaaggtttgcaggatgcgtgctcg

SEQ ID NO: 4579988 - DNA, 25 bp, Homo sapien
tgctcggaagggctgggatcttgcc

SEQ ID NO: 4579989 - DNA, 25 bp, Homo sapien
agaggtggaaatcccacaccctgag

SEQ ID NO: 4579990 - DNA, 25 bp, Homo sapien
gttggtcgtgaccacttcctagtgg

SEQ ID NO: 4579991 - DNA, 25 bp, Homo sapien
tttcggttttcagacgtggtataga

SEQ ID NO: 4579992 - DNA, 25 bp, Homo sapien
gtgccccagcggcagaatgggctgt

SEQ ID NO: 4579993 - DNA, 25 bp, Homo sapien
agggatggtgggtcttcaccgtcag

SEQ ID NO: 4579994 - DNA, 25 bp, Homo sapien
gatggtgggtcttcaccgtcaggcc

SEQ ID NO: 4579995 - DNA, 25 bp, Homo sapien
ggtcttcaccgtcaggccagaatcc

SEQ ID NO: 4579996 - DNA, 25 bp, Homo sapien
ggtgggtcttcaccgtcaggccaga

SEQ ID NO: 4579997 - DNA, 25 bp, Homo sapien
cattaaaatcaagcttatgcatgag

SEQ ID NO: 4579998 - DNA, 25 bp, Homo sapien
cttttcattaaaatcaagcttatgc

SEQ ID NO: 4579999 - DNA, 25 bp, Homo sapien
ttcattaaaatcaagcttatgcatg

SEQ ID NO: 4580000 - DNA, 25 bp, Homo sapien
taaaatcaagcttatgcatgagcat

SEQ ID NO: 4580001 - DNA, 25 bp, Homo sapien
tatgatcagataaactcaagatgag

SEQ ID NO: 4580002 - DNA, 25 bp, Homo sapien
gaaacactcagtttaggaggagcac

SEQ ID NO: 4580003 - DNA, 25 bp, Homo sapien
catagtattcttgcctcgtgggaaa

SEQ ID NO: 4580004 - DNA, 25 bp, Homo sapien
ggaggagcacattccctggtgttta

SEQ ID NO: 4580005 - DNA, 25 bp, Homo sapien
tcgcaggtgctgcataaagtaggac

SEQ ID NO: 4580006 - DNA, 25 bp, Homo sapien
taaagccactctaagacagcactcg

SEQ ID NO: 4580007 - DNA, 25 bp, Homo sapien
gtaggactgacaaggtactttgtgc

SEQ ID NO: 4580008 - DNA, 25 bp, Homo sapien
gccacaattgctcagtaatcttcat

SEQ ID NO: 4580009 - DNA, 25 bp, Homo sapien
tatatgataaagggggttgtcttgg

SEQ ID NO: 4580010 - DNA, 25 bp, Homo sapien
ctatatgataaagggggttgtcttg

SEQ ID NO: 4580011 - DNA, 25 bp, Homo sapien
ctgcagaagttcctgggtagatccc

SEQ ID NO: 4580012 - DNA, 25 bp, Homo sapien
agttcctgggtagatcccttgctac

SEQ ID NO: 4580013 - DNA, 25 bp, Homo sapien
ctttgtgtagtgccaaggctttaca

SEQ ID NO: 4580014 - DNA, 25 bp, Homo sapien
tctttgtgtagtgccaaggctttac

SEQ ID NO: 4580015 - DNA, 25 bp, Homo sapien
ttcctctttgtgtagtgccaaggct

SEQ ID NO: 4580016 - DNA, 25 bp, Homo sapien
cctctttgtgtagtgccaaggcttt

SEQ ID NO: 4580017 - DNA, 25 bp, Homo sapien
gatgctaggtggtaagtattcccac

SEQ ID NO: 4580018 - DNA, 25 bp, Homo sapien
tttgtgaagatgctaggtggtaagt

SEQ ID NO: 4580019 - DNA, 25 bp, Homo sapien
gattcctgtcatgggatgtcgaatg

SEQ ID NO: 4580020 - DNA, 25 bp, Homo sapien
tgtcgaatgggatattttgtgaaga

SEQ ID NO: 4580021 - DNA, 25 bp, Homo sapien
ttcttgtggagatgaggccgttgaa

SEQ ID NO: 4580022 - DNA, 25 bp, Homo sapien
tgaggccgttgaaattgaccacact

SEQ ID NO: 4580023 - DNA, 25 bp, Homo sapien
tgaaattgaccacactcaatgggat

SEQ ID NO: 4580024 - DNA, 25 bp, Homo sapien
tgaccacactcaatgggatgtttga

SEQ ID NO: 4580025 - DNA, 25 bp, Homo sapien
tctcctccagacagggtcacaagaa

SEQ ID NO: 4580026 - DNA, 25 bp, Homo sapien
cctggctacgtgaggctccaaggaa

SEQ ID NO: 4580027 - DNA, 25 bp, Homo sapien
gtgacaacttgagccatttccctgg

SEQ ID NO: 4580028 - DNA, 25 bp, Homo sapien
cgaatctccgagagggtcacactaa

SEQ ID NO: 4580029 - DNA, 25 bp, Homo sapien
gaagagcctggtccattgaactggg

SEQ ID NO: 4580030 - DNA, 25 bp, Homo sapien
tcaagaaacacagagggcttctttg

SEQ ID NO: 4580031 - DNA, 25 bp, Homo sapien
ggtccattgaactgggggcctgtgc

SEQ ID NO: 4580032 - DNA, 25 bp, Homo sapien
cttctttgtgaagagcctggtccat

SEQ ID NO: 4580033 - DNA, 25 bp, Homo sapien
cgggtcacctgagaagatctttgta

SEQ ID NO: 4580034 - DNA, 25 bp, Homo sapien
tcagatgttcctgggatcaaaggca

SEQ ID NO: 4580035 - DNA, 25 bp, Homo sapien
ctgggaccgggtcacctgagaagat

SEQ ID NO: 4580036 - DNA, 25 bp, Homo sapien
tttgtatcagatgttcctgggatca

SEQ ID NO: 4580037 - DNA, 25 bp, Homo sapien
cgtacatgaaatttactgttatgac

SEQ ID NO: 4580038 - DNA, 25 bp, Homo sapien
gaaaccccattaaagtcactctctc

SEQ ID NO: 4580039 - DNA, 25 bp, Homo sapien
catttagcgcatccacagtgttgtg

SEQ ID NO: 4580040 - DNA, 25 bp, Homo sapien
tgtgttcaaggttcatcatgtctag

SEQ ID NO: 4580041 - DNA, 25 bp, Homo sapien
ctgatggcttctcagagacaaggtc

SEQ ID NO: 4580042 - DNA, 25 bp, Homo sapien
ttctcagagacaaggtcatcacgtg

SEQ ID NO: 4580043 - DNA, 25 bp, Homo sapien
aggtcatcacgtgccgtaccaccat

SEQ ID NO: 4580044 - DNA, 25 bp, Homo sapien
cagagacaaggtcatcacgtgccgt

SEQ ID NO: 4580045 - DNA, 25 bp, Homo sapien
aacaaacgaatccaaatgaagcgcc

SEQ ID NO: 4580046 - DNA, 25 bp, Homo sapien
tgcctctaaattgggcctttgcaag

SEQ ID NO: 4580047 - DNA, 25 bp, Homo sapien
ttgggtaaataggaagcagcccgag

SEQ ID NO: 4580048 - DNA, 25 bp, Homo sapien
gaatccaaatgaagcgcctgcaagg

SEQ ID NO: 4580049 - DNA, 25 bp, Homo sapien
tgcccatgaagctactgctgccgat

SEQ ID NO: 4580050 - DNA, 25 bp, Homo sapien
caccctggagtctgtgttcctcctc

SEQ ID NO: 4580051 - DNA, 25 bp, Homo sapien
tcctgaccatgtccagtgcccatga

SEQ ID NO: 4580052 - DNA, 25 bp, Homo sapien
tgtccagtgcccatgaagctactgc

SEQ ID NO: 4580053 - DNA, 25 bp, Homo sapien
gtacagcggcgggtgaccgctagat

SEQ ID NO: 4580054 - DNA, 25 bp, Homo sapien
cgggtgaccgctagatggcggcgga

SEQ ID NO: 4580055 - DNA, 25 bp, Homo sapien
tagatggcggcggagcgcctccgac

SEQ ID NO: 4580056 - DNA, 25 bp, Homo sapien
gagcgcctccgaccacctgggtcgg

SEQ ID NO: 4580057 - DNA, 25 bp, Homo sapien
cgcatctcagagtctgtgtgctgct

SEQ ID NO: 4580058 - DNA, 25 bp, Homo sapien
gtgtgtttatgagcccgcatctcag

SEQ ID NO: 4580059 - DNA, 25 bp, Homo sapien
tctggtttcgtggtgtgtgtttatg

SEQ ID NO: 4580060 - DNA, 25 bp, Homo sapien
agttctggtttcgtggtgtgtgttt

SEQ ID NO: 4580061 - DNA, 25 bp, Homo sapien
gaagcttaacagtgtttttcctgtg

SEQ ID NO: 4580062 - DNA, 25 bp, Homo sapien
ctggaattgggtacagggaacaaag

SEQ ID NO: 4580063 - DNA, 25 bp, Homo sapien
agcttaacagtgtttttcctgtggt

SEQ ID NO: 4580064 - DNA, 25 bp, Homo sapien
tgtttttcctgtggttctggttctc

SEQ ID NO: 4580065 - DNA, 25 bp, Homo sapien
aaaccattggcaaagtcagctgtga

SEQ ID NO: 4580066 - DNA, 25 bp, Homo sapien
aaccattggcaaagtcagctgtgac

SEQ ID NO: 4580067 - DNA, 25 bp, Homo sapien
accattggcaaagtcagctgtgaca

SEQ ID NO: 4580068 - DNA, 25 bp, Homo sapien
aaaaccattggcaaagtcagctgtg

SEQ ID NO: 4580069 - DNA, 25 bp, Homo sapien
cacttccgtcgagtcacccccatgt

SEQ ID NO: 4580070 - DNA, 25 bp, Homo sapien
tccttgacagtggtcttctgtcctt

SEQ ID NO: 4580071 - DNA, 25 bp, Homo sapien
cactgtatcccctgggtaccatctt

SEQ ID NO: 4580072 - DNA, 25 bp, Homo sapien
tgtccttccacttccgtcgagtcac

SEQ ID NO: 4580073 - DNA, 25 bp, Homo sapien
tcctacctgtctttctgggagcagc

SEQ ID NO: 4580074 - DNA, 25 bp, Homo sapien
gggcctatcattcccagaggagtta

SEQ ID NO: 4580075 - DNA, 25 bp, Homo sapien
tgatgtgaataagcccagtgtcctg

SEQ ID NO: 4580076 - DNA, 25 bp, Homo sapien
gagctttgtctgtccttccaatggc

SEQ ID NO: 4580077 - DNA, 25 bp, Homo sapien
tcagatattttatcatcatcgtcgt

SEQ ID NO: 4580078 - DNA, 25 bp, Homo sapien
catcagatattttatcatcatcgtc

SEQ ID NO: 4580079 - DNA, 25 bp, Homo sapien
gtcatcatcaccaatccatttcagc

SEQ ID NO: 4580080 - DNA, 25 bp, Homo sapien
tcgtcatcatcaccaatccatttca

SEQ ID NO: 4580081 - DNA, 25 bp, Homo sapien
ggttttatcctgtcccgtgcgcact

SEQ ID NO: 4580082 - DNA, 25 bp, Homo sapien
tgctggagtcggctagtagagacca

SEQ ID NO: 4580083 - DNA, 25 bp, Homo sapien
aaagtttatggagatccgcaggccc

SEQ ID NO: 4580084 - DNA, 25 bp, Homo sapien
tttcatggcggtgagtgacacttcc

SEQ ID NO: 4580085 - DNA, 25 bp, Homo sapien
gtttcatgtggaaaactggtttctc

SEQ ID NO: 4580086 - DNA, 25 bp, Homo sapien
gccaggccgccggtagcaggggcca

SEQ ID NO: 4580087 - DNA, 25 bp, Homo sapien
cagcgtgaatggagggccggtgcat

SEQ ID NO: 4580088 - DNA, 25 bp, Homo sapien
ctgccagtgtccagcgtgaatggag

SEQ ID NO: 4580089 - DNA, 25 bp, Homo sapien
gtggagccaggccgccggtagcagg

SEQ ID NO: 4580090 - DNA, 25 bp, Homo sapien
ggagatcgagtgacgaatgaatgag

SEQ ID NO: 4580091 - DNA, 25 bp, Homo sapien
gatcgagtgacgaatgaatgaggca

SEQ ID NO: 4580092 - DNA, 25 bp, Homo sapien
atcgagtgacgaatgaatgaggcac

SEQ ID NO: 4580093 - DNA, 25 bp, Homo sapien
agatcgagtgacgaatgaatgaggc

SEQ ID NO: 4580094 - DNA, 25 bp, Homo sapien
gtcagctaccacacagatcttcaca

SEQ ID NO: 4580095 - DNA, 25 bp, Homo sapien
actggtgacagtgtcagctaccaca

SEQ ID NO: 4580096 - DNA, 25 bp, Homo sapien
agtgtcagctaccacacagatcttc

SEQ ID NO: 4580097 - DNA, 25 bp, Homo sapien
gactggtgacagtgtcagctaccac

SEQ ID NO: 4580098 - DNA, 25 bp, Homo sapien
cttgccattgtagtttaaccccagg

SEQ ID NO: 4580099 - DNA, 25 bp, Homo sapien
cagggaaaatttgtccaagagcaga

SEQ ID NO: 4580100 - DNA, 25 bp, Homo sapien
tcttgccattgtagtttaaccccag

SEQ ID NO: 4580101 - DNA, 25 bp, Homo sapien
aaaatttgtccaagagcagatctgc

SEQ ID NO: 4580102 - DNA, 25 bp, Homo sapien
tcagccagcagtgcctggtacccat

SEQ ID NO: 4580103 - DNA, 25 bp, Homo sapien
cttaaggaagtgccaggggtcagcc

SEQ ID NO: 4580104 - DNA, 25 bp, Homo sapien
gtcagccagcagtgcctggtaccca

SEQ ID NO: 4580105 - DNA, 25 bp, Homo sapien
ggggtcagccagcagtgcctggtac

SEQ ID NO: 4580106 - DNA, 25 bp, Homo sapien
aatctggctgcccacaagcccattg

SEQ ID NO: 4580107 - DNA, 25 bp, Homo sapien
aaggacaatctggctgcccacaagc

SEQ ID NO: 4580108 - DNA, 25 bp, Homo sapien
atctggctgcccacaagcccattga

SEQ ID NO: 4580109 - DNA, 25 bp, Homo sapien
gacaatctggctgcccacaagccca

SEQ ID NO: 4580110 - DNA, 25 bp, Homo sapien
tccaccctgcgaacactgtgggatt

SEQ ID NO: 4580111 - DNA, 25 bp, Homo sapien
tgttccaccctgcgaacactgtggg

SEQ ID NO: 4580112 - DNA, 25 bp, Homo sapien
cactgtgggatttggtcctgatgaa

SEQ ID NO: 4580113 - DNA, 25 bp, Homo sapien
tgtgggatttggtcctgatgaagat

SEQ ID NO: 4580114 - DNA, 25 bp, Homo sapien
tcactgatgtatagcccagccaggc

SEQ ID NO: 4580115 - DNA, 25 bp, Homo sapien
tctagatccacagaaatggcccagg

SEQ ID NO: 4580116 - DNA, 25 bp, Homo sapien
gatggttatccagcagtacgagaag

SEQ ID NO: 4580117 - DNA, 25 bp, Homo sapien
taaagccatgggttgctagagctgc

SEQ ID NO: 4580118 - DNA, 25 bp, Homo sapien
ttgcattctgcacaggaaagagcca

SEQ ID NO: 4580119 - DNA, 25 bp, Homo sapien
gtctcagccggagggagactccctt

SEQ ID NO: 4580120 - DNA, 25 bp, Homo sapien
gacagattccctctaggtagcgaca

SEQ ID NO: 4580121 - DNA, 25 bp, Homo sapien
caggttcctgccgtcctggttcaag

SEQ ID NO: 4580122 - DNA, 25 bp, Homo sapien
gatctcttctggttgtggacacacc

SEQ ID NO: 4580123 - DNA, 25 bp, Homo sapien
gtcacaggcccacatgcaaggtgct

SEQ ID NO: 4580124 - DNA, 25 bp, Homo sapien
tgaggccaggacgaaaacaggtctc

SEQ ID NO: 4580125 - DNA, 25 bp, Homo sapien
tatataacagatgaaaggtccctgg

SEQ ID NO: 4580126 - DNA, 25 bp, Homo sapien
caaggttgggcacggttgcttccct

SEQ ID NO: 4580127 - DNA, 25 bp, Homo sapien
gcacatggcgtcctctctatgcaca

SEQ ID NO: 4580128 - DNA, 25 bp, Homo sapien
ggagtgagaatctgtcccacgcctc

SEQ ID NO: 4580129 - DNA, 25 bp, Homo sapien
taagggccccagtcatataaggacc

SEQ ID NO: 4580130 - DNA, 25 bp, Homo sapien
ttaacccttccagcgacactgtgag

SEQ ID NO: 4580131 - DNA, 25 bp, Homo sapien
tgggctagtgctgctacctcacagg

SEQ ID NO: 4580132 - DNA, 25 bp, Homo sapien
ccttgctgagctgtgactggccttc

SEQ ID NO: 4580133 - DNA, 25 bp, Homo sapien
tgcaaagggcaagagtggctaacct

SEQ ID NO: 4580134 - DNA, 25 bp, Homo sapien
tgccttcatgttgtgttggaactgc

SEQ ID NO: 4580135 - DNA, 25 bp, Homo sapien
acaagttgctgtaaggtgagaccct

SEQ ID NO: 4580136 - DNA, 25 bp, Homo sapien
ttggaactgcctcacagatagaggc

SEQ ID NO: 4580137 - DNA, 25 bp, Homo sapien
agataacaggtggtccccaagtcca

SEQ ID NO: 4580138 - DNA, 25 bp, Homo sapien
tgtccagaatcaaaccaggtgccac

SEQ ID NO: 4580139 - DNA, 25 bp, Homo sapien
gaaagtgggcgctatcttccctgct

SEQ ID NO: 4580140 - DNA, 25 bp, Homo sapien
cagctcttgacggaagccagagtca

SEQ ID NO: 4580141 - DNA, 25 bp, Homo sapien
tgtctcctgctagaacaagagggtg

SEQ ID NO: 4580142 - DNA, 25 bp, Homo sapien
tctggtttgctatgaggctccaagc

SEQ ID NO: 4580143 - DNA, 25 bp, Homo sapien
taacaagctgacagtaccctgtgcc

SEQ ID NO: 4580144 - DNA, 25 bp, Homo sapien
gccactgtacctatgcacgggatgt

SEQ ID NO: 4580145 - DNA, 25 bp, Homo sapien
tgaggtaagagagcactgttatccc

SEQ ID NO: 4580146 - DNA, 25 bp, Homo sapien
gctgtgcagtcgcactgtcccttga

SEQ ID NO: 4580147 - DNA, 25 bp, Homo sapien
agaaagggttcactagtcagctggg

SEQ ID NO: 4580148 - DNA, 25 bp, Homo sapien
gagtgccagaggtgactacacaggc

SEQ ID NO: 4580149 - DNA, 25 bp, Homo sapien
tggtgacactcttggacctcagctg

SEQ ID NO: 4580150 - DNA, 25 bp, Homo sapien
cacaggcctgggtgcttcctaagag

SEQ ID NO: 4580151 - DNA, 25 bp, Homo sapien
tttctctagaggctaggcatatttc

SEQ ID NO: 4580152 - DNA, 25 bp, Homo sapien
ctctagaggctaggcatatttctga

SEQ ID NO: 4580153 - DNA, 25 bp, Homo sapien
aattttctctagaggctaggcatat

SEQ ID NO: 4580154 - DNA, 25 bp, Homo sapien
tctctagaggctaggcatatttctg

SEQ ID NO: 4580155 - DNA, 25 bp, Homo sapien
gaaacacagcaatcccataaacaag

SEQ ID NO: 4580156 - DNA, 25 bp, Homo sapien
aattatgaaatgtagctctccatgc

SEQ ID NO: 4580157 - DNA, 25 bp, Homo sapien
ccatgctttccaatgattgttataa

SEQ ID NO: 4580158 - DNA, 25 bp, Homo sapien
tccaatgattgttataatacccaca

SEQ ID NO: 4580159 - DNA, 25 bp, Homo sapien
ttcttcaatatctcagtcatttcag

SEQ ID NO: 4580160 - DNA, 25 bp, Homo sapien
ttcaatatctcagtcatttcaggaa

SEQ ID NO: 4580161 - DNA, 25 bp, Homo sapien
tcttcaatatctcagtcatttcagg

SEQ ID NO: 4580162 - DNA, 25 bp, Homo sapien
ttttcttcaatatctcagtcatttc

SEQ ID NO: 4580163 - DNA, 25 bp, Homo sapien
ccaccaacctgtctaattcttgtag

SEQ ID NO: 4580164 - DNA, 25 bp, Homo sapien
caccaacctgtctaattcttgtaga

SEQ ID NO: 4580165 - DNA, 25 bp, Homo sapien
accaacctgtctaattcttgtagag

SEQ ID NO: 4580166 - DNA, 25 bp, Homo sapien
tctagcttactgcaattatgactcc

SEQ ID NO: 4580167 - DNA, 25 bp, Homo sapien
tccaagtccacaccaaagtctctag

SEQ ID NO: 4580168 - DNA, 25 bp, Homo sapien
agcatgctactatcatctggcacac

SEQ ID NO: 4580169 - DNA, 25 bp, Homo sapien
tatgactcctgccaacctcctttat

SEQ ID NO: 4580170 - DNA, 25 bp, Homo sapien
gcttccagtgtagagctgctttgtg

SEQ ID NO: 4580171 - DNA, 25 bp, Homo sapien
tggagcttccagtgtagagctgctt

SEQ ID NO: 4580172 - DNA, 25 bp, Homo sapien
cagtgtagagctgctttgtgactgc

SEQ ID NO: 4580173 - DNA, 25 bp, Homo sapien
tccagtgtagagctgctttgtgact

SEQ ID NO: 4580174 - DNA, 25 bp, Homo sapien
tttcggctgccttagctcacaaaga

SEQ ID NO: 4580175 - DNA, 25 bp, Homo sapien
gtttcttccgaatgtcactgtctcc

SEQ ID NO: 4580176 - DNA, 25 bp, Homo sapien
gagagctacatttccattaggtgga

SEQ ID NO: 4580177 - DNA, 25 bp, Homo sapien
gaactcaccactgatgaatacagcc

SEQ ID NO: 4580178 - DNA, 25 bp, Homo sapien
gacatgctaactgagtttcacacgg

SEQ ID NO: 4580179 - DNA, 25 bp, Homo sapien
ccatgagctcatgccagtcacacag

SEQ ID NO: 4580180 - DNA, 25 bp, Homo sapien
catgtttaccatggagccagcaggc

SEQ ID NO: 4580181 - DNA, 25 bp, Homo sapien
tcctcagtggagagaccatgagctc

SEQ ID NO: 4580182 - DNA, 25 bp, Homo sapien
cacatgatgccttatttaggaaaaa

SEQ ID NO: 4580183 - DNA, 25 bp, Homo sapien
aagcataccacatgatgccttattt

SEQ ID NO: 4580184 - DNA, 25 bp, Homo sapien
cataccacatgatgccttatttagg

SEQ ID NO: 4580185 - DNA, 25 bp, Homo sapien
accacatgatgccttatttaggaaa

SEQ ID NO: 4580186 - DNA, 25 bp, Homo sapien
tccctactcagtaagacccaataaa

SEQ ID NO: 4580187 - DNA, 25 bp, Homo sapien
agctccctactcagtaagacccaat

SEQ ID NO: 4580188 - DNA, 25 bp, Homo sapien
aaaagacaacctactgatataaatc

SEQ ID NO: 4580189 - DNA, 25 bp, Homo sapien
aaaaagacaacctactgatataaat

SEQ ID NO: 4580190 - DNA, 25 bp, Homo sapien
tcacttagtacttcctccaggtagt

SEQ ID NO: 4580191 - DNA, 25 bp, Homo sapien
ttcacttagtacttcctccaggtag

SEQ ID NO: 4580192 - DNA, 25 bp, Homo sapien
cctcctagttggcaagcatagacag

SEQ ID NO: 4580193 - DNA, 25 bp, Homo sapien
agaagctctctgtcactgtgggagt

SEQ ID NO: 4580194 - DNA, 25 bp, Homo sapien
agcatagacagagaggcctatgaac

SEQ ID NO: 4580195 - DNA, 25 bp, Homo sapien
gaagctctctgtcactgtgggagtg

SEQ ID NO: 4580196 - DNA, 25 bp, Homo sapien
acatgatatcttggtctgaagtctc

SEQ ID NO: 4580197 - DNA, 25 bp, Homo sapien
gccttaacacaattctagctaaaag

SEQ ID NO: 4580198 - DNA, 25 bp, Homo sapien
tcagaacttctaagctgtaggagat

SEQ ID NO: 4580199 - DNA, 25 bp, Homo sapien
taagctgtaggagatagtcattgcc

SEQ ID NO: 4580200 - DNA, 25 bp, Homo sapien
tgcaactattccataatctgccact

SEQ ID NO: 4580201 - DNA, 25 bp, Homo sapien
tggaaaattggagcttctgggtctt

SEQ ID NO: 4580202 - DNA, 25 bp, Homo sapien
ctgggtctttattaattgccacaat

SEQ ID NO: 4580203 - DNA, 25 bp, Homo sapien
ctgccacttggaaaattggagcttc

SEQ ID NO: 4580204 - DNA, 25 bp, Homo sapien
tagcccatctcagtattaaagagtt

SEQ ID NO: 4580205 - DNA, 25 bp, Homo sapien
aatgtctaccaaataagatttgagg

SEQ ID NO: 4580206 - DNA, 25 bp, Homo sapien
caaatccacagcctttgtagtgcaa

SEQ ID NO: 4580207 - DNA, 25 bp, Homo sapien
tttcacacagactgatagttctatt

SEQ ID NO: 4580208 - DNA, 25 bp, Homo sapien
cgttaaacagctttaagtccttatg

SEQ ID NO: 4580209 - DNA, 25 bp, Homo sapien
ccttatgtacatagcaaatagatta

SEQ ID NO: 4580210 - DNA, 25 bp, Homo sapien
aaatattcttaaatgcaggccaggc

SEQ ID NO: 4580211 - DNA, 25 bp, Homo sapien
tgaaagctaaagtatcttgtcagcc

SEQ ID NO: 4580212 - DNA, 25 bp, Homo sapien
tgtctaagattggaacatggtatag

SEQ ID NO: 4580213 - DNA, 25 bp, Homo sapien
ttaaaatacaggctacaggatatcc

SEQ ID NO: 4580214 - DNA, 25 bp, Homo sapien
tttgatgtagcctgacttaaaatac

SEQ ID NO: 4580215 - DNA, 25 bp, Homo sapien
tgcagaagatgccagaatgtctaag

SEQ ID NO: 4580216 - DNA, 25 bp, Homo sapien
aaatcaagtgtttcctggccgggcg

SEQ ID NO: 4580217 - DNA, 25 bp, Homo sapien
tacaaagaggtagtgcatgcatttc

SEQ ID NO: 4580218 - DNA, 25 bp, Homo sapien
tatgttcagaatcattacacaggac

SEQ ID NO: 4580219 - DNA, 25 bp, Homo sapien
taaaatctgactggttttgggccag

SEQ ID NO: 4580220 - DNA, 25 bp, Homo sapien
gcagtggagctataactcaggttca

SEQ ID NO: 4580221 - DNA, 25 bp, Homo sapien
cacagattgtgatagctgaagggca

SEQ ID NO: 4580222 - DNA, 25 bp, Homo sapien
gcctgatgctccaacccaaaatgtg

SEQ ID NO: 4580223 - DNA, 25 bp, Homo sapien
tcagttcccagatctacgttagtgt

SEQ ID NO: 4580224 - DNA, 25 bp, Homo sapien
gctaaatgttggatggctccagata

SEQ ID NO: 4580225 - DNA, 25 bp, Homo sapien
cagctaaatgttggatggctccaga

SEQ ID NO: 4580226 - DNA, 25 bp, Homo sapien
catcccagctaaatgttggatggct

SEQ ID NO: 4580227 - DNA, 25 bp, Homo sapien
cccagctaaatgttggatggctcca

SEQ ID NO: 4580228 - DNA, 25 bp, Homo sapien
acatggctagtgttctctggtggat

SEQ ID NO: 4580229 - DNA, 25 bp, Homo sapien
gattcaacatggctagtgttctctg

SEQ ID NO: 4580230 - DNA, 25 bp, Homo sapien
tcaacatggctagtgttctctggtg

SEQ ID NO: 4580231 - DNA, 25 bp, Homo sapien
gtggattcaacatggctagtgttct

SEQ ID NO: 4580232 - DNA, 25 bp, Homo sapien
tggagtacaggtccatacagcattt

SEQ ID NO: 4580233 - DNA, 25 bp, Homo sapien
taactcaggcaactctttaatcagt

SEQ ID NO: 4580234 - DNA, 25 bp, Homo sapien
tacattatggtacgtgtttggagca

SEQ ID NO: 4580235 - DNA, 25 bp, Homo sapien
cactgaaccgcaaccatgataacag

SEQ ID NO: 4580236 - DNA, 25 bp, Homo sapien
tacgtggtcttggttattcactaag

SEQ ID NO: 4580237 - DNA, 25 bp, Homo sapien
aagagtacacaagggttttcaacag

SEQ ID NO: 4580238 - DNA, 25 bp, Homo sapien
tttcaacagtactgtaatattgttt

SEQ ID NO: 4580239 - DNA, 25 bp, Homo sapien
aaatgtgtattaaaggaagagtaca

SEQ ID NO: 4580240 - DNA, 25 bp, Homo sapien
tgcccagccagtaatggttactttt

SEQ ID NO: 4580241 - DNA, 25 bp, Homo sapien
tcagttcccatagacacatttgtag

SEQ ID NO: 4580242 - DNA, 25 bp, Homo sapien
cacaggtgtagtacagactgtctca

SEQ ID NO: 4580243 - DNA, 25 bp, Homo sapien
tcagggcgctagtcattccgcacag

SEQ ID NO: 4580244 - DNA, 25 bp, Homo sapien
gaataagcctgaacagcagatacga

SEQ ID NO: 4580245 - DNA, 25 bp, Homo sapien
gttccattcgcagacaagtaaagct

SEQ ID NO: 4580246 - DNA, 25 bp, Homo sapien
gctctctcgatgttgatgtataagg

SEQ ID NO: 4580247 - DNA, 25 bp, Homo sapien
gttctccagttccattcgcagacaa

SEQ ID NO: 4580248 - DNA, 25 bp, Homo sapien
ctctctcgatgttgatgtataaggg

SEQ ID NO: 4580249 - DNA, 25 bp, Homo sapien
aaaggtcgtctgaaggcctaaggag

SEQ ID NO: 4580250 - DNA, 25 bp, Homo sapien
agatcatacaaaaggtcgtctgaag

SEQ ID NO: 4580251 - DNA, 25 bp, Homo sapien
ctaaggagaccttggcttggatgga

SEQ ID NO: 4580252 - DNA, 25 bp, Homo sapien
tctgaaggcctaaggagaccttggc

SEQ ID NO: 4580253 - DNA, 25 bp, Homo sapien
tgttttcgatgccagcgtatggtgt

SEQ ID NO: 4580254 - DNA, 25 bp, Homo sapien
agctgtttcaggtgattcccgccaa

SEQ ID NO: 4580255 - DNA, 25 bp, Homo sapien
ggaagctgtttcaggtgattcccgc

SEQ ID NO: 4580256 - DNA, 25 bp, Homo sapien
agtgttttcgatgccagcgtatggt

SEQ ID NO: 4580257 - DNA, 25 bp, Homo sapien
cactgtgcacagtatacaggttgtc

SEQ ID NO: 4580258 - DNA, 25 bp, Homo sapien
cacagtatacaggttgtcagccagg

SEQ ID NO: 4580259 - DNA, 25 bp, Homo sapien
tatacaggttgtcagccaggctctc

SEQ ID NO: 4580260 - DNA, 25 bp, Homo sapien
tgtgcacagtatacaggttgtcagc

SEQ ID NO: 4580261 - DNA, 25 bp, Homo sapien
tgacgggcaatttggaggcacagcc

SEQ ID NO: 4580262 - DNA, 25 bp, Homo sapien
cttgacgggcaatttggaggcacag

SEQ ID NO: 4580263 - DNA, 25 bp, Homo sapien
ttgacgggcaatttggaggcacagc

SEQ ID NO: 4580264 - DNA, 25 bp, Homo sapien
tagccccgctgtagatcttccagga

SEQ ID NO: 4580265 - DNA, 25 bp, Homo sapien
gccccgctgtagatcttccaggaga

SEQ ID NO: 4580266 - DNA, 25 bp, Homo sapien
aatagtagccccgctgtagatcttc

SEQ ID NO: 4580267 - DNA, 25 bp, Homo sapien
cttccaggagagtccaaagtcagcc

SEQ ID NO: 4580268 - DNA, 25 bp, Homo sapien
cggtggatgaagttccgagagctca

SEQ ID NO: 4580269 - DNA, 25 bp, Homo sapien
ctcggtggatgaagttccgagagct

SEQ ID NO: 4580270 - DNA, 25 bp, Homo sapien
tggatgaagttccgagagctcaggt

SEQ ID NO: 4580271 - DNA, 25 bp, Homo sapien
gatgaagttccgagagctcaggtac

SEQ ID NO: 4580272 - DNA, 25 bp, Homo sapien
tcatgaagggcaagatgaccacggg

SEQ ID NO: 4580273 - DNA, 25 bp, Homo sapien
cttcatgaagggcaagatgaccacg

SEQ ID NO: 4580274 - DNA, 25 bp, Homo sapien
gggtgacagcctttagccctgctcc

SEQ ID NO: 4580275 - DNA, 25 bp, Homo sapien
tttagccctgctccagaggctcaga

SEQ ID NO: 4580276 - DNA, 25 bp, Homo sapien
gtcacttgaggcaatgagatcagct

SEQ ID NO: 4580277 - DNA, 25 bp, Homo sapien
ctgaggaactcttcaatgtcacttg

SEQ ID NO: 4580278 - DNA, 25 bp, Homo sapien
ttcaatgtcacttgaggcaatgaga

SEQ ID NO: 4580279 - DNA, 25 bp, Homo sapien
caaactccttcatgcaagctgcttt

SEQ ID NO: 4580280 - DNA, 25 bp, Homo sapien
tttcacaaaggagccatcctcctgc

SEQ ID NO: 4580281 - DNA, 25 bp, Homo sapien
tcacaaaggagccatcctcctgctt

SEQ ID NO: 4580282 - DNA, 25 bp, Homo sapien
caaaggagccatcctcctgcttcag

SEQ ID NO: 4580283 - DNA, 25 bp, Homo sapien
ctttcacaaaggagccatcctcctg

SEQ ID NO: 4580284 - DNA, 25 bp, Homo sapien
tcctttgccctatatccagccaggg

SEQ ID NO: 4580285 - DNA, 25 bp, Homo sapien
tttcctttagttcgctgttgatgcc

SEQ ID NO: 4580286 - DNA, 25 bp, Homo sapien
tgccctatatccagccagggtgaac

SEQ ID NO: 4580287 - DNA, 25 bp, Homo sapien
ttcgctgttgatgcccaagctttcc

SEQ ID NO: 4580288 - DNA, 25 bp, Homo sapien
gggatcccagcctgtcaaattggcc

SEQ ID NO: 4580289 - DNA, 25 bp, Homo sapien
gatcccagcctgtcaaattggccct

SEQ ID NO: 4580290 - DNA, 25 bp, Homo sapien
ttttggggatcccagcctgtcaaat

SEQ ID NO: 4580291 - DNA, 25 bp, Homo sapien
tcccagcctgtcaaattggccctgg

SEQ ID NO: 4580292 - DNA, 25 bp, Homo sapien
ccaggacagtttatagggtcccagg

SEQ ID NO: 4580293 - DNA, 25 bp, Homo sapien
gccctcggggatcacttcttcccac

SEQ ID NO: 4580294 - DNA, 25 bp, Homo sapien
caaagggccctcggggatcacttct

SEQ ID NO: 4580295 - DNA, 25 bp, Homo sapien
caggacagtttatagggtcccaggg

SEQ ID NO: 4580296 - DNA, 25 bp, Homo sapien
catggaggttttggggagcgctggc

SEQ ID NO: 4580297 - DNA, 25 bp, Homo sapien
caagatgaggcctgaatctgtgtgg

SEQ ID NO: 4580298 - DNA, 25 bp, Homo sapien
tccaagatgaggcctgaatctgtgt

SEQ ID NO: 4580299 - DNA, 25 bp, Homo sapien
agatgaggcctgaatctgtgtggat

SEQ ID NO: 4580300 - DNA, 25 bp, Homo sapien
aggagagggccccaaagcattggca

SEQ ID NO: 4580301 - DNA, 25 bp, Homo sapien
acccagtcagcataaggagagggcc

SEQ ID NO: 4580302 - DNA, 25 bp, Homo sapien
ggccccaaagcattggcacagcaca

SEQ ID NO: 4580303 - DNA, 25 bp, Homo sapien
agcataaggagagggccccaaagca

SEQ ID NO: 4580304 - DNA, 25 bp, Homo sapien
ggcctgtgtcacctgaactgtacag

SEQ ID NO: 4580305 - DNA, 25 bp, Homo sapien
gcctgtgtcacctgaactgtacagg

SEQ ID NO: 4580306 - DNA, 25 bp, Homo sapien
cctgtgtcacctgaactgtacagga

SEQ ID NO: 4580307 - DNA, 25 bp, Homo sapien
gggcctgtgtcacctgaactgtaca

SEQ ID NO: 4580308 - DNA, 25 bp, Homo sapien
cattttaggctgtgaacttcacagg

SEQ ID NO: 4580309 - DNA, 25 bp, Homo sapien
aggaaaacatgggtgctctgggtca

SEQ ID NO: 4580310 - DNA, 25 bp, Homo sapien
ctatgcgagaagaggccaggcattt

SEQ ID NO: 4580311 - DNA, 25 bp, Homo sapien
ttcacaggaaaacatgggtgctctg

SEQ ID NO: 4580312 - DNA, 25 bp, Homo sapien
gatcttcgtagttcctctccaccag

SEQ ID NO: 4580313 - DNA, 25 bp, Homo sapien
gtagttcctctccaccagacaatgg

SEQ ID NO: 4580314 - DNA, 25 bp, Homo sapien
cagatcttttggctccactgtgaaa

SEQ ID NO: 4580315 - DNA, 25 bp, Homo sapien
ccagacaatggtaacaggttcaggg

SEQ ID NO: 4580316 - DNA, 25 bp, Homo sapien
tgcaccagtactggcccgtgtcaga

SEQ ID NO: 4580317 - DNA, 25 bp, Homo sapien
tactggcccgtgtcagagcgctcca

SEQ ID NO: 4580318 - DNA, 25 bp, Homo sapien
gagatctgggtttcgcccccatcca

SEQ ID NO: 4580319 - DNA, 25 bp, Homo sapien
accttgcaccagtactggcccgtgt

SEQ ID NO: 4580320 - DNA, 25 bp, Homo sapien
ccctccatgctgcagctgagcttta

SEQ ID NO: 4580321 - DNA, 25 bp, Homo sapien
ggaccacagacccatccttcaccca

SEQ ID NO: 4580322 - DNA, 25 bp, Homo sapien
tgggatgaaccagttctggaccaca

SEQ ID NO: 4580323 - DNA, 25 bp, Homo sapien
ttcacccactggatgtcaggctcct

SEQ ID NO: 4580324 - DNA, 25 bp, Homo sapien
ggactcccacgagcttcagacctgc

SEQ ID NO: 4580325 - DNA, 25 bp, Homo sapien
cgggactcccacgagcttcagacct

SEQ ID NO: 4580326 - DNA, 25 bp, Homo sapien
gggactcccacgagcttcagacctg

SEQ ID NO: 4580327 - DNA, 25 bp, Homo sapien
gccgggactcccacgagcttcagac

SEQ ID NO: 4580328 - DNA, 25 bp, Homo sapien
agcagagaagtcagagccgccagca

SEQ ID NO: 4580329 - DNA, 25 bp, Homo sapien
gagcagcagagaagtcagagccgcc

SEQ ID NO: 4580330 - DNA, 25 bp, Homo sapien
gcagagaagtcagagccgccagcag

SEQ ID NO: 4580331 - DNA, 25 bp, Homo sapien
gcagcagagaagtcagagccgccag

SEQ ID NO: 4580332 - DNA, 25 bp, Homo sapien
caaacttctaaagatctacgataaa

SEQ ID NO: 4580333 - DNA, 25 bp, Homo sapien
atggctgagctctcattagaaacaa

SEQ ID NO: 4580334 - DNA, 25 bp, Homo sapien
cacccggcctatcataatcaaactt

SEQ ID NO: 4580335 - DNA, 25 bp, Homo sapien
aatacaaataatggctgagctctca

SEQ ID NO: 4580336 - DNA, 25 bp, Homo sapien
aatgggagacaacgggaagagattt

SEQ ID NO: 4580337 - DNA, 25 bp, Homo sapien
tcctgagccatttcaaacgatgatg

SEQ ID NO: 4580338 - DNA, 25 bp, Homo sapien
cactaataaaggtagctcctgagcc

SEQ ID NO: 4580339 - DNA, 25 bp, Homo sapien
catttggtcagtgtgggcactaata

SEQ ID NO: 4580340 - DNA, 25 bp, Homo sapien
gaacaattgcaaaagggacatacag

SEQ ID NO: 4580341 - DNA, 25 bp, Homo sapien
gatgggcaagctacaaccagggctg

SEQ ID NO: 4580342 - DNA, 25 bp, Homo sapien
ttagcagtggccattgttgagcctc

SEQ ID NO: 4580343 - DNA, 25 bp, Homo sapien
taatgctgtaattcaaccgatgggc

SEQ ID NO: 4580344 - DNA, 25 bp, Homo sapien
aatgacatattcaccatggtactgg

SEQ ID NO: 4580345 - DNA, 25 bp, Homo sapien
gaacactgagtaaggtaaatcactg

SEQ ID NO: 4580346 - DNA, 25 bp, Homo sapien
tactggctaactgctcaggaacact

SEQ ID NO: 4580347 - DNA, 25 bp, Homo sapien
actgctgggcattttactaggatca

SEQ ID NO: 4580348 - DNA, 25 bp, Homo sapien
gctactatttttcccgtctgtccaa

SEQ ID NO: 4580349 - DNA, 25 bp, Homo sapien
tcccgtctgtccaacttgcatgtca

SEQ ID NO: 4580350 - DNA, 25 bp, Homo sapien
tcattgggaacaaagccagcatcaa

SEQ ID NO: 4580351 - DNA, 25 bp, Homo sapien
cttgcatgtcattgggaacaaagcc

SEQ ID NO: 4580352 - DNA, 25 bp, Homo sapien
tctttcgtggatttctagccctctg

SEQ ID NO: 4580353 - DNA, 25 bp, Homo sapien
ggtttctactgagatatcctaaagc

SEQ ID NO: 4580354 - DNA, 25 bp, Homo sapien
tagccctctgcttatattgcacatc

SEQ ID NO: 4580355 - DNA, 25 bp, Homo sapien
ggccatatccagtctactaagaagt

SEQ ID NO: 4580356 - DNA, 25 bp, Homo sapien
taccaactgcttaactgacatgtct

SEQ ID NO: 4580357 - DNA, 25 bp, Homo sapien
gagtatctcccacctagacgactga

SEQ ID NO: 4580358 - DNA, 25 bp, Homo sapien
caatctgtcgggaaatcctgatggc

SEQ ID NO: 4580359 - DNA, 25 bp, Homo sapien
tatagcctgctaattgatctcccca

SEQ ID NO: 4580360 - DNA, 25 bp, Homo sapien
tactaatctatggtgttaagtgtct

SEQ ID NO: 4580361 - DNA, 25 bp, Homo sapien
gaaaatggcccctccaatgatatat

SEQ ID NO: 4580362 - DNA, 25 bp, Homo sapien
tgttaagtgtctgtagtaggcaaga

SEQ ID NO: 4580363 - DNA, 25 bp, Homo sapien
gtgaatattacctacgtggcagcag

SEQ ID NO: 4580364 - DNA, 25 bp, Homo sapien
tgatctgccaagtcatataacaact

SEQ ID NO: 4580365 - DNA, 25 bp, Homo sapien
tgccaagtcatataacaacttaaag

SEQ ID NO: 4580366 - DNA, 25 bp, Homo sapien
tataacaacttaaagttctctccac

SEQ ID NO: 4580367 - DNA, 25 bp, Homo sapien
tgtagttgatctgccaagtcatata

SEQ ID NO: 4580368 - DNA, 25 bp, Homo sapien
cacttggcaataagcctgtcataga

SEQ ID NO: 4580369 - DNA, 25 bp, Homo sapien
gcctgtcatagaacagataaccaat

SEQ ID NO: 4580370 - DNA, 25 bp, Homo sapien
tgaatgggagtcatctcaaggactt

SEQ ID NO: 4580371 - DNA, 25 bp, Homo sapien
caaggactttaaactcctcgagagg

SEQ ID NO: 4580372 - DNA, 25 bp, Homo sapien
gaccaacatgcagaacctccgtctc

SEQ ID NO: 4580373 - DNA, 25 bp, Homo sapien
ctgaccaacatgcagaacctccgtc

SEQ ID NO: 4580374 - DNA, 25 bp, Homo sapien
tgaccaacatgcagaacctccgtct

SEQ ID NO: 4580375 - DNA, 25 bp, Homo sapien
ccaacatgcagaacctccgtctcta

SEQ ID NO: 4580376 - DNA, 25 bp, Homo sapien
cagagattgtgccattgcactccag

SEQ ID NO: 4580377 - DNA, 25 bp, Homo sapien
ggtggaggtggcggtgagcagagat

SEQ ID NO: 4580378 - DNA, 25 bp, Homo sapien
agagattgtgccattgcactccagc

SEQ ID NO: 4580379 - DNA, 25 bp, Homo sapien
ggaggtggcggtgagcagagattgt

SEQ ID NO: 4580380 - DNA, 25 bp, Homo sapien
tacttgcaatagaaggctgtctgaa

SEQ ID NO: 4580381 - DNA, 25 bp, Homo sapien
caaggagcatgatgtataaaaataa

SEQ ID NO: 4580382 - DNA, 25 bp, Homo sapien
taggaattatacacaagatggccct

SEQ ID NO: 4580383 - DNA, 25 bp, Homo sapien
cgaaaaacaagtcagatatatcact

SEQ ID NO: 4580384 - DNA, 25 bp, Homo sapien
ggcacctgttagctctggtcgatca

SEQ ID NO: 4580385 - DNA, 25 bp, Homo sapien
cctgttagctctggtcgatcacttt

SEQ ID NO: 4580386 - DNA, 25 bp, Homo sapien
gctctggtcgatcactttttgttaa

SEQ ID NO: 4580387 - DNA, 25 bp, Homo sapien
actttggcacctgttagctctggtc

SEQ ID NO: 4580388 - DNA, 25 bp, Homo sapien
gatatttccactggtgaagtacttg

SEQ ID NO: 4580389 - DNA, 25 bp, Homo sapien
ctgatatttccactggtgaagtact

SEQ ID NO: 4580390 - DNA, 25 bp, Homo sapien
tatttccactggtgaagtacttgat

SEQ ID NO: 4580391 - DNA, 25 bp, Homo sapien
atttccactggtgaagtacttgatg

SEQ ID NO: 4580392 - DNA, 25 bp, Homo sapien
tggcactaccgccacttgttgctgc

SEQ ID NO: 4580393 - DNA, 25 bp, Homo sapien
gcagcatcaaaggatgttccacgga

SEQ ID NO: 4580394 - DNA, 25 bp, Homo sapien
tttctgaactggcactaccgccact

SEQ ID NO: 4580395 - DNA, 25 bp, Homo sapien
gatgttccacggacagaaaacactt

SEQ ID NO: 4580396 - DNA, 25 bp, Homo sapien
ttaacatgttgattaattatcttcc

SEQ ID NO: 4580397 - DNA, 25 bp, Homo sapien
tgattaattatcttccttgagtact

SEQ ID NO: 4580398 - DNA, 25 bp, Homo sapien
ttcactaaaatttaacatgttgatt

SEQ ID NO: 4580399 - DNA, 25 bp, Homo sapien
acatgttgattaattatcttccttg

SEQ ID NO: 4580400 - DNA, 25 bp, Homo sapien
ctcaagtttggctgctactctgggc

SEQ ID NO: 4580401 - DNA, 25 bp, Homo sapien
aatcggggcaacctcaagtttggct

SEQ ID NO: 4580402 - DNA, 25 bp, Homo sapien
atgatgtcagaaatcggggcaacct

SEQ ID NO: 4580403 - DNA, 25 bp, Homo sapien
gtgtcaggtgacttgattgcaatga

SEQ ID NO: 4580404 - DNA, 25 bp, Homo sapien
gctctgtcaccctggagcacaggct

SEQ ID NO: 4580405 - DNA, 25 bp, Homo sapien
gtcaccctggagcacaggctggagt

SEQ ID NO: 4580406 - DNA, 25 bp, Homo sapien
tctgtcaccctggagcacaggctgg

SEQ ID NO: 4580407 - DNA, 25 bp, Homo sapien
tgtcaccctggagcacaggctggag

SEQ ID NO: 4580408 - DNA, 25 bp, Homo sapien
tctgttgcatactttcagcacaatg

SEQ ID NO: 4580409 - DNA, 25 bp, Homo sapien
gattggctacataaacagtctgttg

SEQ ID NO: 4580410 - DNA, 25 bp, Homo sapien
gaaatctaaccctttcaagcagtga

SEQ ID NO: 4580411 - DNA, 25 bp, Homo sapien
tagcaaaactaccacatcaattcag

SEQ ID NO: 4580412 - DNA, 25 bp, Homo sapien
tctgagttgccaaaatcaatggtgt

SEQ ID NO: 4580413 - DNA, 25 bp, Homo sapien
cttctgagttgccaaaatcaatggt

SEQ ID NO: 4580414 - DNA, 25 bp, Homo sapien
gcttctgagttgccaaaatcaatgg

SEQ ID NO: 4580415 - DNA, 25 bp, Homo sapien
ttctgagttgccaaaatcaatggtg

SEQ ID NO: 4580416 - DNA, 25 bp, Homo sapien
caagcgtaatttagacactacattt

SEQ ID NO: 4580417 - DNA, 25 bp, Homo sapien
tattcaagcgtaatttagacactac

SEQ ID NO: 4580418 - DNA, 25 bp, Homo sapien
tattcatatattcaagcgtaattta

SEQ ID NO: 4580419 - DNA, 25 bp, Homo sapien
tcatatattcaagcgtaatttagac

SEQ ID NO: 4580420 - DNA, 25 bp, Homo sapien
ctggaagtaggcctttgtacacatc

SEQ ID NO: 4580421 - DNA, 25 bp, Homo sapien
tggaagtaggcctttgtacacatca

SEQ ID NO: 4580422 - DNA, 25 bp, Homo sapien
gctgagccaccagaacttttgctat

SEQ ID NO: 4580423 - DNA, 25 bp, Homo sapien
ctgctactttacagagatcttgtgc

SEQ ID NO: 4580424 - DNA, 25 bp, Homo sapien
ctactttacagagatcttgtgccac

SEQ ID NO: 4580425 - DNA, 25 bp, Homo sapien
gaacttttgctatgcctgctacttt

SEQ ID NO: 4580426 - DNA, 25 bp, Homo sapien
taaagtaatgggtgctagggaatca

SEQ ID NO: 4580427 - DNA, 25 bp, Homo sapien
acttcacctccaaggcgtgtggctg

SEQ ID NO: 4580428 - DNA, 25 bp, Homo sapien
cagggtactctgaaatcgtagcaat

SEQ ID NO: 4580429 - DNA, 25 bp, Homo sapien
tagggaatcatttgcatgctcagct

SEQ ID NO: 4580430 - DNA, 25 bp, Homo sapien
taactacctaactaggaactggtca

SEQ ID NO: 4580431 - DNA, 25 bp, Homo sapien
tctacatctgataagaaactactat

SEQ ID NO: 4580432 - DNA, 25 bp, Homo sapien
gaactggtcaaattctactaccaat

SEQ ID NO: 4580433 - DNA, 25 bp, Homo sapien
caaataatgggtttgaaatcagtca

SEQ ID NO: 4580434 - DNA, 25 bp, Homo sapien
aggagccaccacatgggataaggta

SEQ ID NO: 4580435 - DNA, 25 bp, Homo sapien
taaggtagggactaggcatgtacag

SEQ ID NO: 4580436 - DNA, 25 bp, Homo sapien
taggcatgtacagctgctagaatgc

SEQ ID NO: 4580437 - DNA, 25 bp, Homo sapien
ctacccaactttgctttaaccagat

SEQ ID NO: 4580438 - DNA, 25 bp, Homo sapien
tcacttaggccagacttgtaatctg

SEQ ID NO: 4580439 - DNA, 25 bp, Homo sapien
tgtctagatccccaaccgggagaaa

SEQ ID NO: 4580440 - DNA, 25 bp, Homo sapien
ttgtttatgtctagatccccaaccg

SEQ ID NO: 4580441 - DNA, 25 bp, Homo sapien
ttatgtctagatccccaaccgggag

SEQ ID NO: 4580442 - DNA, 25 bp, Homo sapien
gaaaaaagatgtctaaggccaggtg

SEQ ID NO: 4580443 - DNA, 25 bp, Homo sapien
tagctcaggcctgtaattccaggac

SEQ ID NO: 4580444 - DNA, 25 bp, Homo sapien
aagaaaaaagatgtctaaggccagg

SEQ ID NO: 4580445 - DNA, 25 bp, Homo sapien
aaaagatgtctaaggccaggtgcgg

SEQ ID NO: 4580446 - DNA, 25 bp, Homo sapien
tcattcggggtcaccctgaccccaa

SEQ ID NO: 4580447 - DNA, 25 bp, Homo sapien
cgaactggcgttccgcagggagtcc

SEQ ID NO: 4580448 - DNA, 25 bp, Homo sapien
tctgacttctgccccgaactggcgt

SEQ ID NO: 4580449 - DNA, 25 bp, Homo sapien
ccccgaactggcgttccgcagggag

SEQ ID NO: 4580450 - DNA, 25 bp, Homo sapien
tgacttctgccccgaactggcgttc

SEQ ID NO: 4580451 - DNA, 25 bp, Homo sapien
cgcccgccggagctgccccggagcc

SEQ ID NO: 4580452 - DNA, 25 bp, Homo sapien
gctgccccggagccgccgctcggaa

SEQ ID NO: 4580453 - DNA, 25 bp, Homo sapien
gcccgccggagctgccccggagccg

SEQ ID NO: 4580454 - DNA, 25 bp, Homo sapien
gccccggagccgccgctcggaacat

SEQ ID NO: 4580455 - DNA, 25 bp, Homo sapien
ggtctccgcttccgccgcaacctcg

SEQ ID NO: 4580456 - DNA, 25 bp, Homo sapien
tctccgcttccgccgcaacctcggc

SEQ ID NO: 4580457 - DNA, 25 bp, Homo sapien
gtctccgcttccgccgcaacctcgg

SEQ ID NO: 4580458 - DNA, 25 bp, Homo sapien
gcgaacgagataagacgccctaggc

SEQ ID NO: 4580459 - DNA, 25 bp, Homo sapien
agccagtcacctaatgctcgcgaga

SEQ ID NO: 4580460 - DNA, 25 bp, Homo sapien
taatgctcgcgagacgcgcgaacga

SEQ ID NO: 4580461 - DNA, 25 bp, Homo sapien
ataagacgccctaggccgggagcac

SEQ ID NO: 4580462 - DNA, 25 bp, Homo sapien
cgctgttgctactaaccgtttggaa

SEQ ID NO: 4580463 - DNA, 25 bp, Homo sapien
tgggtggtcccttctgctatttctg

SEQ ID NO: 4580464 - DNA, 25 bp, Homo sapien
tggaagctgatggagatcggacccc

SEQ ID NO: 4580465 - DNA, 25 bp, Homo sapien
catcagcatggctcgaattacactg

SEQ ID NO: 4580466 - DNA, 25 bp, Homo sapien
gttatttataattcatgggccggtc

SEQ ID NO: 4580467 - DNA, 25 bp, Homo sapien
gaatggcggtggagacactttatcc

SEQ ID NO: 4580468 - DNA, 25 bp, Homo sapien
gccgcctcgcagataccactgtaaa

SEQ ID NO: 4580469 - DNA, 25 bp, Homo sapien
aatgcctggactgtgctcagagctc

SEQ ID NO: 4580470 - DNA, 25 bp, Homo sapien
gagtttatcagaacccaggtggtca

SEQ ID NO: 4580471 - DNA, 25 bp, Homo sapien
ccagtcccgggtgagcgcttttgga

SEQ ID NO: 4580472 - DNA, 25 bp, Homo sapien
tacactctctctagcttggacccga

SEQ ID NO: 4580473 - DNA, 25 bp, Homo sapien
tggaagttggacacgcaatcgaccc

SEQ ID NO: 4580474 - DNA, 25 bp, Homo sapien
ccatcagcccctggatccccatcac

SEQ ID NO: 4580475 - DNA, 25 bp, Homo sapien
tctggggaagcttcgtgacgccaca

SEQ ID NO: 4580476 - DNA, 25 bp, Homo sapien
cccggggctagtgcgtgttgacgtc

SEQ ID NO: 4580477 - DNA, 25 bp, Homo sapien
cagttctggggaagcttcgtgacgc

SEQ ID NO: 4580478 - DNA, 25 bp, Homo sapien
gaagcttcgtgacgccacaggtccc

SEQ ID NO: 4580479 - DNA, 25 bp, Homo sapien
ggctgttcggcatcaagtgcgccaa

SEQ ID NO: 4580480 - DNA, 25 bp, Homo sapien
gcagaatcgtgttctccatgaccag

SEQ ID NO: 4580481 - DNA, 25 bp, Homo sapien
tgtaccacatcgagtgcttccgctg

SEQ ID NO: 4580482 - DNA, 25 bp, Homo sapien
caacagggaatcttaagtggtgtcc

SEQ ID NO: 4580483 - DNA, 25 bp, Homo sapien
agcctcgcaactgctggcgtctgga

SEQ ID NO: 4580484 - DNA, 25 bp, Homo sapien
gccaggttcagggttcgaggtccca

SEQ ID NO: 4580485 - DNA, 25 bp, Homo sapien
gaagctgcggctccgacgtacagtt

SEQ ID NO: 4580486 - DNA, 25 bp, Homo sapien
tccgacgtacagttgcgagtctggg

SEQ ID NO: 4580487 - DNA, 25 bp, Homo sapien
taattttctgtttgcaaagaagtaa

SEQ ID NO: 4580488 - DNA, 25 bp, Homo sapien
cgccccgcagtgtcgagtcgaatac

SEQ ID NO: 4580489 - DNA, 25 bp, Homo sapien
tatgtaacccggcagctctgtgagg

SEQ ID NO: 4580490 - DNA, 25 bp, Homo sapien
tcagatctttttccccaaccggatc

SEQ ID NO: 4580491 - DNA, 25 bp, Homo sapien
gatgtcactcagtgaacggcttagc

SEQ ID NO: 4580492 - DNA, 25 bp, Homo sapien
tgtcactcagtgaacggcttagcac

SEQ ID NO: 4580493 - DNA, 25 bp, Homo sapien
tcactcagtgaacggcttagcactg

SEQ ID NO: 4580494 - DNA, 25 bp, Homo sapien
tgatgtcactcagtgaacggcttag

SEQ ID NO: 4580495 - DNA, 25 bp, Homo sapien
gtaatttcagctcggcaatgccaag

SEQ ID NO: 4580496 - DNA, 25 bp, Homo sapien
gattatctgctaggagagttcgggc

SEQ ID NO: 4580497 - DNA, 25 bp, Homo sapien
gaaccatcgcgactttctgtgtgac

SEQ ID NO: 4580498 - DNA, 25 bp, Homo sapien
tcgggcagaccaatgaatacaacgc

SEQ ID NO: 4580499 - DNA, 25 bp, Homo sapien
caagagctggagttaacatttttct

SEQ ID NO: 4580500 - DNA, 25 bp, Homo sapien
tttaagatacttcaagagctggagt

SEQ ID NO: 4580501 - DNA, 25 bp, Homo sapien
ttcagattcgtatttccttaacatg

SEQ ID NO: 4580502 - DNA, 25 bp, Homo sapien
tcagattcgtatttccttaacatga

SEQ ID NO: 4580503 - DNA, 25 bp, Homo sapien
ttcacccatatcacaaatgcaaagt

SEQ ID NO: 4580504 - DNA, 25 bp, Homo sapien
ttaccaaactccaagatactctgca

SEQ ID NO: 4580505 - DNA, 25 bp, Homo sapien
tacatgccatatctacagtgtggga

SEQ ID NO: 4580506 - DNA, 25 bp, Homo sapien
gaacattcaagtatctacagtcatt

SEQ ID NO: 4580507 - DNA, 25 bp, Homo sapien
aaaactgtcgagcttcttcccaggc

SEQ ID NO: 4580508 - DNA, 25 bp, Homo sapien
gaaaaactgtcgagcttcttcccag

SEQ ID NO: 4580509 - DNA, 25 bp, Homo sapien
aaaaactgtcgagcttcttcccagg

SEQ ID NO: 4580510 - DNA, 25 bp, Homo sapien
agaaaaactgtcgagcttcttccca

SEQ ID NO: 4580511 - DNA, 25 bp, Homo sapien
tagtcttgggaaccaaggcatttcc

SEQ ID NO: 4580512 - DNA, 25 bp, Homo sapien
aagatagtcttgggaaccaaggcat

SEQ ID NO: 4580513 - DNA, 25 bp, Homo sapien
gatagtcttgggaaccaaggcattt

SEQ ID NO: 4580514 - DNA, 25 bp, Homo sapien
atagtcttgggaaccaaggcatttc

SEQ ID NO: 4580515 - DNA, 25 bp, Homo sapien
taaacaattgcagctagacaggcag

SEQ ID NO: 4580516 - DNA, 25 bp, Homo sapien
tctgggtgcctgagtcaataaaacg

SEQ ID NO: 4580517 - DNA, 25 bp, Homo sapien
tcttgctcagacaaatggtaccgac

SEQ ID NO: 4580518 - DNA, 25 bp, Homo sapien
acatagtgatgaccctttctgagca

SEQ ID NO: 4580519 - DNA, 25 bp, Homo sapien
tgtgtgtgaaagagtccaaggtaac

SEQ ID NO: 4580520 - DNA, 25 bp, Homo sapien
tgggagtgtacctctaaatggccac

SEQ ID NO: 4580521 - DNA, 25 bp, Homo sapien
ctttaaagactatcaaactaatgga

SEQ ID NO: 4580522 - DNA, 25 bp, Homo sapien
gaattgaagaagatctggattaggt

SEQ ID NO: 4580523 - DNA, 25 bp, Homo sapien
acacccaaagagcaacttgtacttc

SEQ ID NO: 4580524 - DNA, 25 bp, Homo sapien
aacacccaaagagcaacttgtactt

SEQ ID NO: 4580525 - DNA, 25 bp, Homo sapien
tgaacatggataaggaaccaaacct

SEQ ID NO: 4580526 - DNA, 25 bp, Homo sapien
cagtattaatgatctggctcctgta

SEQ ID NO: 4580527 - DNA, 25 bp, Homo sapien
tataatgtagcagttccagaggaaa

SEQ ID NO: 4580528 - DNA, 25 bp, Homo sapien
ggaaactgtgggctactattactga

SEQ ID NO: 4580529 - DNA, 25 bp, Homo sapien
gctggttttccgcttgacctggagt

SEQ ID NO: 4580530 - DNA, 25 bp, Homo sapien
ggttttccgcttgacctggagtctg

SEQ ID NO: 4580531 - DNA, 25 bp, Homo sapien
tttccgcttgacctggagtctgtgc

SEQ ID NO: 4580532 - DNA, 25 bp, Homo sapien
taaggctggttttccgcttgacctg

SEQ ID NO: 4580533 - DNA, 25 bp, Homo sapien
tagctatcctctagttcccagccag

SEQ ID NO: 4580534 - DNA, 25 bp, Homo sapien
tctaatacaggatagtttggaaaac

SEQ ID NO: 4580535 - DNA, 25 bp, Homo sapien
gagatagatgtatattcaccagaat

SEQ ID NO: 4580536 - DNA, 25 bp, Homo sapien
tgttgtctaagatgaagagggctcg

SEQ ID NO: 4580537 - DNA, 25 bp, Homo sapien
ccagaatgatcttgttctgatggtt

SEQ ID NO: 4580538 - DNA, 25 bp, Homo sapien
taacaagcagcgataagtgaaggga

SEQ ID NO: 4580539 - DNA, 25 bp, Homo sapien
tctgatggttgttgtaacaagcagc

SEQ ID NO: 4580540 - DNA, 25 bp, Homo sapien
cagtactttgatcagccgtgggtca

SEQ ID NO: 4580541 - DNA, 25 bp, Homo sapien
gccacggagtaaggacgcctatgaa

SEQ ID NO: 4580542 - DNA, 25 bp, Homo sapien
gaaaaagactcctgactccgtacca

SEQ ID NO: 4580543 - DNA, 25 bp, Homo sapien
cacagtgtcggctagtaccatggaa

SEQ ID NO: 4580544 - DNA, 25 bp, Homo sapien
cacgattaaaggtgtagctgccacg

SEQ ID NO: 4580545 - DNA, 25 bp, Homo sapien
tagggcaatgcaacgaatgggcttg

SEQ ID NO: 4580546 - DNA, 25 bp, Homo sapien
cccacttcgtggtataggaggaagc

SEQ ID NO: 4580547 - DNA, 25 bp, Homo sapien
ggaacactgtaaacctaaggtcaga

SEQ ID NO: 4580548 - DNA, 25 bp, Homo sapien
gaagctcctagatggttgggaacac

SEQ ID NO: 4580549 - DNA, 25 bp, Homo sapien
gacttgttaataccttcaaatccag

SEQ ID NO: 4580550 - DNA, 25 bp, Homo sapien
ttttcgttcaatagctaaaatgaca

SEQ ID NO: 4580551 - DNA, 25 bp, Homo sapien
cgttcaatagctaaaatgacatcaa

SEQ ID NO: 4580552 - DNA, 25 bp, Homo sapien
tttagagactgttgatagggacttg

SEQ ID NO: 4580553 - DNA, 25 bp, Homo sapien
cacatggctatgtgctgccatttct

SEQ ID NO: 4580554 - DNA, 25 bp, Homo sapien
catttactttattgataaaggcatt

SEQ ID NO: 4580555 - DNA, 25 bp, Homo sapien
tcatttactttattgataaaggcat

SEQ ID NO: 4580556 - DNA, 25 bp, Homo sapien
tcaaggaacagagctagttatcagc

SEQ ID NO: 4580557 - DNA, 25 bp, Homo sapien
gacctgttggttccctcaaggaaca

SEQ ID NO: 4580558 - DNA, 25 bp, Homo sapien
tgtagtgagatgacttgccagaagc

SEQ ID NO: 4580559 - DNA, 25 bp, Homo sapien
tatcagctgccgtttacagagcgag

SEQ ID NO: 4580560 - DNA, 25 bp, Homo sapien
caaagtcagtggagtcatcatggaa

SEQ ID NO: 4580561 - DNA, 25 bp, Homo sapien
gatgaaccgtcagctgaattggact

SEQ ID NO: 4580562 - DNA, 25 bp, Homo sapien
aaagggctgcccataagtcctaagg

SEQ ID NO: 4580563 - DNA, 25 bp, Homo sapien
attggactaagcactaccctttggg

SEQ ID NO: 4580564 - DNA, 25 bp, Homo sapien
ctttcaaatatgatgcccaccttca

SEQ ID NO: 4580565 - DNA, 25 bp, Homo sapien
gcatgcatggcctcaatagtaatca

SEQ ID NO: 4580566 - DNA, 25 bp, Homo sapien
cctcaatagtaatcagaagcagtct

SEQ ID NO: 4580567 - DNA, 25 bp, Homo sapien
gaagcagtctttcaaatatgatgcc

SEQ ID NO: 4580568 - DNA, 25 bp, Homo sapien
tctggagacaagaccgtaggtgcat

SEQ ID NO: 4580569 - DNA, 25 bp, Homo sapien
taccaactggctttgtgaccctagg

SEQ ID NO: 4580570 - DNA, 25 bp, Homo sapien
gaaaggctaccatctctaaccaggt

SEQ ID NO: 4580571 - DNA, 25 bp, Homo sapien
tcagagtcagttgagtggctttccc

SEQ ID NO: 4580572 - DNA, 25 bp, Homo sapien
cagaaaacctgttactggcagagat

SEQ ID NO: 4580573 - DNA, 25 bp, Homo sapien
taggcttgtcaacctgaaaacagag

SEQ ID NO: 4580574 - DNA, 25 bp, Homo sapien
taagtatatgtagctgaatcccaag

SEQ ID NO: 4580575 - DNA, 25 bp, Homo sapien
tataagagttctggaaaagcctcct

SEQ ID NO: 4580576 - DNA, 25 bp, Homo sapien
tccatgactggctgccagccagctt

SEQ ID NO: 4580577 - DNA, 25 bp, Homo sapien
ttccatgactggctgccagccagct

SEQ ID NO: 4580578 - DNA, 25 bp, Homo sapien
ctggctgccagccagcttcttgcat

SEQ ID NO: 4580579 - DNA, 25 bp, Homo sapien
tgactggctgccagccagcttcttg

SEQ ID NO: 4580580 - DNA, 25 bp, Homo sapien
ctctgccagcccggatgaagatgag

SEQ ID NO: 4580581 - DNA, 25 bp, Homo sapien
gctctgccagcccggatgaagatga

SEQ ID NO: 4580582 - DNA, 25 bp, Homo sapien
ggctctgccagcccggatgaagatg

SEQ ID NO: 4580583 - DNA, 25 bp, Homo sapien
aagtttgtcacacctgaagaccagg

SEQ ID NO: 4580584 - DNA, 25 bp, Homo sapien
agtttgtcacacctgaagaccaggc

SEQ ID NO: 4580585 - DNA, 25 bp, Homo sapien
agtcttctgtgttagggcctctttt

SEQ ID NO: 4580586 - DNA, 25 bp, Homo sapien
tcttctgtgttagggcctctttttc

SEQ ID NO: 4580587 - DNA, 25 bp, Homo sapien
aaggaacgtatctgtcacacaaaga

SEQ ID NO: 4580588 - DNA, 25 bp, Homo sapien
ataatattgagagtaacttggttcc

SEQ ID NO: 4580589 - DNA, 25 bp, Homo sapien
aaagctgaatgcttgtgtgacagct

SEQ ID NO: 4580590 - DNA, 25 bp, Homo sapien
ctaaagaataagctgccaactctgg

SEQ ID NO: 4580591 - DNA, 25 bp, Homo sapien
ttctgggaggcaaggtgttgaaaca

SEQ ID NO: 4580592 - DNA, 25 bp, Homo sapien
tcttcctcagcatgagcttacctct

SEQ ID NO: 4580593 - DNA, 25 bp, Homo sapien
tttagtattccatccttctgggagg

SEQ ID NO: 4580594 - DNA, 25 bp, Homo sapien
gcatgagcttacctctcaccaagga

SEQ ID NO: 4580595 - DNA, 25 bp, Homo sapien
tcagggaatgcactgaacatacact

SEQ ID NO: 4580596 - DNA, 25 bp, Homo sapien
gcactgaacatacactttgcctcca

SEQ ID NO: 4580597 - DNA, 25 bp, Homo sapien
tgcctccatgcttacttgaggtatc

SEQ ID NO: 4580598 - DNA, 25 bp, Homo sapien
tacttgaggtatcagaggcatcaac

SEQ ID NO: 4580599 - DNA, 25 bp, Homo sapien
acagcttctcaccttgtacttggct

SEQ ID NO: 4580600 - DNA, 25 bp, Homo sapien
gtacagcttctcaccttgtacttgg

SEQ ID NO: 4580601 - DNA, 25 bp, Homo sapien
tcagctctcgttgtacagcttctca

SEQ ID NO: 4580602 - DNA, 25 bp, Homo sapien
ttgtacagcttctcaccttgtactt

SEQ ID NO: 4580603 - DNA, 25 bp, Homo sapien
gtgccggaatgcaagggacaagccc

SEQ ID NO: 4580604 - DNA, 25 bp, Homo sapien
gccatgtgccggaatgcaagggaca

SEQ ID NO: 4580605 - DNA, 25 bp, Homo sapien
agtgaagtagcccacacagacgatg

SEQ ID NO: 4580606 - DNA, 25 bp, Homo sapien
cctcatgaaggaggctttcacagga

SEQ ID NO: 4580607 - DNA, 25 bp, Homo sapien
cagcccacactggaatgaagcacca

SEQ ID NO: 4580608 - DNA, 25 bp, Homo sapien
actggaatgaagcaccactgctggc

SEQ ID NO: 4580609 - DNA, 25 bp, Homo sapien
tcgcagcccacactggaatgaagca

SEQ ID NO: 4580610 - DNA, 25 bp, Homo sapien
ccacactggaatgaagcaccactgc

SEQ ID NO: 4580611 - DNA, 25 bp, Homo sapien
tgtttccagacagaatacggtgggc

SEQ ID NO: 4580612 - DNA, 25 bp, Homo sapien
cttaaaggcactagggagcaggtct

SEQ ID NO: 4580613 - DNA, 25 bp, Homo sapien
cctttcgacgcagctgatgggtaga

SEQ ID NO: 4580614 - DNA, 25 bp, Homo sapien
tggagtgactgaccgaacagctgac

SEQ ID NO: 4580615 - DNA, 25 bp, Homo sapien
gaaacgtaaactctgaatggccact

SEQ ID NO: 4580616 - DNA, 25 bp, Homo sapien
agtagagcatatgaagaactccagc

SEQ ID NO: 4580617 - DNA, 25 bp, Homo sapien
cagctgtcagccctgtgggatcctg

SEQ ID NO: 4580618 - DNA, 25 bp, Homo sapien
cagccaggtcggttgcctgaagagc

SEQ ID NO: 4580619 - DNA, 25 bp, Homo sapien
cccactgactctgggattaagagtc

SEQ ID NO: 4580620 - DNA, 25 bp, Homo sapien
gaggcttgaacccactgactctggg

SEQ ID NO: 4580621 - DNA, 25 bp, Homo sapien
tgaacccactgactctgggattaag

SEQ ID NO: 4580622 - DNA, 25 bp, Homo sapien
atgtgaggcttgaacccactgactc

SEQ ID NO: 4580623 - DNA, 25 bp, Homo sapien
aagatttctaaggaatcacctctcc

SEQ ID NO: 4580624 - DNA, 25 bp, Homo sapien
tctgaattaaggtatatgtgaagca

SEQ ID NO: 4580625 - DNA, 25 bp, Homo sapien
gccaagagcaggcagttatagtaaa

SEQ ID NO: 4580626 - DNA, 25 bp, Homo sapien
tatatgtgaagcatctagaggccaa

SEQ ID NO: 4580627 - DNA, 25 bp, Homo sapien
ggcaaaaacagcatgatttgtgtgg

SEQ ID NO: 4580628 - DNA, 25 bp, Homo sapien
tgggcaaaaacagcatgatttgtgt

SEQ ID NO: 4580629 - DNA, 25 bp, Homo sapien
aaaaacagcatgatttgtgtgggca

SEQ ID NO: 4580630 - DNA, 25 bp, Homo sapien
gggcatgaagtgccatccattccat

SEQ ID NO: 4580631 - DNA, 25 bp, Homo sapien
cacttgctaatggtctgttttggtt

SEQ ID NO: 4580632 - DNA, 25 bp, Homo sapien
ccgcgcccggtcaggagacttttat

SEQ ID NO: 4580633 - DNA, 25 bp, Homo sapien
gcttcaatctcatcacttgctaatg

SEQ ID NO: 4580634 - DNA, 25 bp, Homo sapien
gcccggtcaggagacttttattata

SEQ ID NO: 4580635 - DNA, 25 bp, Homo sapien
aatgacaatggtgataatagtggcc

SEQ ID NO: 4580636 - DNA, 25 bp, Homo sapien
tgagcctcataaggatctgcaagca

SEQ ID NO: 4580637 - DNA, 25 bp, Homo sapien
tctaaaaaacagctaatccccacag

SEQ ID NO: 4580638 - DNA, 25 bp, Homo sapien
tccatctttcaagggccatgttaaa

SEQ ID NO: 4580639 - DNA, 25 bp, Homo sapien
gcacacagtttgtcaatcagaccca

SEQ ID NO: 4580640 - DNA, 25 bp, Homo sapien
cagaaatatggccatcttgggattc

SEQ ID NO: 4580641 - DNA, 25 bp, Homo sapien
tcctgcggcatgctgcagaaatatg

SEQ ID NO: 4580642 - DNA, 25 bp, Homo sapien
cattgcatgtaagagtcctgcggca

SEQ ID NO: 4580643 - DNA, 25 bp, Homo sapien
tatgtatctacctgggctactgagc

SEQ ID NO: 4580644 - DNA, 25 bp, Homo sapien
caccagacctcttctagtaaaggaa

SEQ ID NO: 4580645 - DNA, 25 bp, Homo sapien
ggaagtatgaaatgacgaccaccag

SEQ ID NO: 4580646 - DNA, 25 bp, Homo sapien
tgttgaaggtacaaaatagtgcctc

SEQ ID NO: 4580647 - DNA, 25 bp, Homo sapien
gcttgctaatgcaggagtgagcatg

SEQ ID NO: 4580648 - DNA, 25 bp, Homo sapien
taatgcaggagtgagcatgtgcttc

SEQ ID NO: 4580649 - DNA, 25 bp, Homo sapien
gagcatgtgcttcaggacagtcaaa

SEQ ID NO: 4580650 - DNA, 25 bp, Homo sapien
tcaggacagtcaaagtactcatcat

SEQ ID NO: 4580651 - DNA, 25 bp, Homo sapien
agggtatgcatatttttagggctct

SEQ ID NO: 4580652 - DNA, 25 bp, Homo sapien
tagggctcttgatatacatagccac

SEQ ID NO: 4580653 - DNA, 25 bp, Homo sapien
gaaaaccttgccagatttcagacta

SEQ ID NO: 4580654 - DNA, 25 bp, Homo sapien
gctgtgccaaacattttgagtagaa

SEQ ID NO: 4580655 - DNA, 25 bp, Homo sapien
gctaatcacatttgtgataaccttt

SEQ ID NO: 4580656 - DNA, 25 bp, Homo sapien
tcactgtgattaataatcaactgct

SEQ ID NO: 4580657 - DNA, 25 bp, Homo sapien
tgctttctcttgagatatattccaa

SEQ ID NO: 4580658 - DNA, 25 bp, Homo sapien
aattctattgtctatccttcacatc

SEQ ID NO: 4580659 - DNA, 25 bp, Homo sapien
tcagtgccaggagataatcctcaaa

SEQ ID NO: 4580660 - DNA, 25 bp, Homo sapien
ccctgtgttgtttccgtgggacctg

SEQ ID NO: 4580661 - DNA, 25 bp, Homo sapien
aaaggtcagttatgttggctgtcca

SEQ ID NO: 4580662 - DNA, 25 bp, Homo sapien
tgtgagcagatgaactaacagcttt

SEQ ID NO: 4580663 - DNA, 25 bp, Homo sapien
ccttagtctcctgcgctcctgagta

SEQ ID NO: 4580664 - DNA, 25 bp, Homo sapien
gccttagtctcctgcgctcctgagt

SEQ ID NO: 4580665 - DNA, 25 bp, Homo sapien
tgccttagtctcctgcgctcctgag

SEQ ID NO: 4580666 - DNA, 25 bp, Homo sapien
ctggcacatgatcttacatacagaa

SEQ ID NO: 4580667 - DNA, 25 bp, Homo sapien
taatccactctatcaatgatgtaca

SEQ ID NO: 4580668 - DNA, 25 bp, Homo sapien
ccactctatcaatgatgtacatctg

SEQ ID NO: 4580669 - DNA, 25 bp, Homo sapien
gttaactcaccatttacattcggta

SEQ ID NO: 4580670 - DNA, 25 bp, Homo sapien
cccgttaactcaccatttacattcg

SEQ ID NO: 4580671 - DNA, 25 bp, Homo sapien
tcagagagcaacaaattgcatggat

SEQ ID NO: 4580672 - DNA, 25 bp, Homo sapien
gagcaacaaattgcatggatttggg

SEQ ID NO: 4580673 - DNA, 25 bp, Homo sapien
tggaacaggtaattgattaacacca

SEQ ID NO: 4580674 - DNA, 25 bp, Homo sapien
taattgattaacaccagatgaaact

SEQ ID NO: 4580675 - DNA, 25 bp, Homo sapien
agatgccaaagtaggagtaaatttc

SEQ ID NO: 4580676 - DNA, 25 bp, Homo sapien
tcagatgccaaagtaggagtaaatt

SEQ ID NO: 4580677 - DNA, 25 bp, Homo sapien
gatgccaaagtaggagtaaatttcc

SEQ ID NO: 4580678 - DNA, 25 bp, Homo sapien
cagatgccaaagtaggagtaaattt

SEQ ID NO: 4580679 - DNA, 25 bp, Homo sapien
ggctggcagtttccatctggtcgat

SEQ ID NO: 4580680 - DNA, 25 bp, Homo sapien
tgataaggtcctgaactcgattgtt

SEQ ID NO: 4580681 - DNA, 25 bp, Homo sapien
gagaagtccagttgtcaagccttca

SEQ ID NO: 4580682 - DNA, 25 bp, Homo sapien
aaaaggatcaccttgtgagggtttg

SEQ ID NO: 4580683 - DNA, 25 bp, Homo sapien
accagcctttgcctcattttcactg

SEQ ID NO: 4580684 - DNA, 25 bp, Homo sapien
ttggtgacaaccagcctttgcctca

SEQ ID NO: 4580685 - DNA, 25 bp, Homo sapien
tgcctcattttcactgtttatctgt

SEQ ID NO: 4580686 - DNA, 25 bp, Homo sapien
tggtgacaaccagcctttgcctcat

SEQ ID NO: 4580687 - DNA, 25 bp, Homo sapien
aacacattccattctggggtgggtg

SEQ ID NO: 4580688 - DNA, 25 bp, Homo sapien
ttctttaagcactctaaagatggtc

SEQ ID NO: 4580689 - DNA, 25 bp, Homo sapien
tctttaagcactctaaagatggtca

SEQ ID NO: 4580690 - DNA, 25 bp, Homo sapien
tttaagcactctaaagatggtcact

SEQ ID NO: 4580691 - DNA, 25 bp, Homo sapien
ctttaagcactctaaagatggtcac

SEQ ID NO: 4580692 - DNA, 25 bp, Homo sapien
ctttcaatagtttgtctcttcactc

SEQ ID NO: 4580693 - DNA, 25 bp, Homo sapien
ccctttcaatagtttgtctcttcac

SEQ ID NO: 4580694 - DNA, 25 bp, Homo sapien
tactctggatattaattgcttgttg

SEQ ID NO: 4580695 - DNA, 25 bp, Homo sapien
agttggctgcaaataagtggattta

SEQ ID NO: 4580696 - DNA, 25 bp, Homo sapien
tactaaagagggtgtccattcccca

SEQ ID NO: 4580697 - DNA, 25 bp, Homo sapien
catggatatctttcctcggtcctca

SEQ ID NO: 4580698 - DNA, 25 bp, Homo sapien
tctcttccatcgatctgtatggctg

SEQ ID NO: 4580699 - DNA, 25 bp, Homo sapien
cttccatatgtgcttatagagaata

SEQ ID NO: 4580700 - DNA, 25 bp, Homo sapien
tgttgtacataggattctatgtgca

SEQ ID NO: 4580701 - DNA, 25 bp, Homo sapien
ttatctatcagtatttgtaagcagt

SEQ ID NO: 4580702 - DNA, 25 bp, Homo sapien
tatattctctaatgttgtacatagg

SEQ ID NO: 4580703 - DNA, 25 bp, Homo sapien
gttgtccctcagtatacacaggcga

SEQ ID NO: 4580704 - DNA, 25 bp, Homo sapien
cacaggcgattggttcagtgctccc

SEQ ID NO: 4580705 - DNA, 25 bp, Homo sapien
tcttgtgaataatgccgaggtgaac

SEQ ID NO: 4580706 - DNA, 25 bp, Homo sapien
tttgaatacgtacccagaagcagga

SEQ ID NO: 4580707 - DNA, 25 bp, Homo sapien
ttggatttgcgtccctgcccagatg

SEQ ID NO: 4580708 - DNA, 25 bp, Homo sapien
gggatacaacttctctaggccaatg

SEQ ID NO: 4580709 - DNA, 25 bp, Homo sapien
tctacgtctcgaaagctttgttggg

SEQ ID NO: 4580710 - DNA, 25 bp, Homo sapien
tgttgggatctgtgcacttgacaaa

SEQ ID NO: 4580711 - DNA, 25 bp, Homo sapien
gacagatagcaatctctcaggcagc

SEQ ID NO: 4580712 - DNA, 25 bp, Homo sapien
caagacagatagcaatctctcaggc

SEQ ID NO: 4580713 - DNA, 25 bp, Homo sapien
atgctagccccaagtcaggcaagac

SEQ ID NO: 4580714 - DNA, 25 bp, Homo sapien
ctagccccaagtcaggcaagacaga

SEQ ID NO: 4580715 - DNA, 25 bp, Homo sapien
tatagatcttacttgaatttccaag

SEQ ID NO: 4580716 - DNA, 25 bp, Homo sapien
gagcattcctttaacccagtgtccc

SEQ ID NO: 4580717 - DNA, 25 bp, Homo sapien
taacattgagccaataaaacagact

SEQ ID NO: 4580718 - DNA, 25 bp, Homo sapien
tatgttgcaaaaatagagcattcct

SEQ ID NO: 4580719 - DNA, 25 bp, Homo sapien
aaccttaactgcttctaactcaaag

SEQ ID NO: 4580720 - DNA, 25 bp, Homo sapien
tctcaaaccttaactgcttctaact

SEQ ID NO: 4580721 - DNA, 25 bp, Homo sapien
caaaccttaactgcttctaactcaa

SEQ ID NO: 4580722 - DNA, 25 bp, Homo sapien
accttaactgcttctaactcaaagc

SEQ ID NO: 4580723 - DNA, 25 bp, Homo sapien
cagttattgcaggtgaggttgtaaa

SEQ ID NO: 4580724 - DNA, 25 bp, Homo sapien
aacattgattgcattgcagagagac

SEQ ID NO: 4580725 - DNA, 25 bp, Homo sapien
caggaggtccattaagaaggtaatc

SEQ ID NO: 4580726 - DNA, 25 bp, Homo sapien
cgtcaactggtgtatcaggaggtcc

SEQ ID NO: 4580727 - DNA, 25 bp, Homo sapien
ctaaaaagtcccctgcaaaggagag

SEQ ID NO: 4580728 - DNA, 25 bp, Homo sapien
gagagagaggaggtacccaaaaaga

SEQ ID NO: 4580729 - DNA, 25 bp, Homo sapien
aaggaaaatgctgacactggcaggg

SEQ ID NO: 4580730 - DNA, 25 bp, Homo sapien
aaaagtcccctgcaaaggagagaga

SEQ ID NO: 4580731 - DNA, 25 bp, Homo sapien
gtgaagcgtgtgcatttttggtgac

SEQ ID NO: 4580732 - DNA, 25 bp, Homo sapien
ttttggtgactgtgtacttctggtg

SEQ ID NO: 4580733 - DNA, 25 bp, Homo sapien
gtacttctggtgactgtatagtttg

SEQ ID NO: 4580734 - DNA, 25 bp, Homo sapien
gactgtgtacttctggtgactgtat

SEQ ID NO: 4580735 - DNA, 25 bp, Homo sapien
tactaagttccctctctgagtaaaa

SEQ ID NO: 4580736 - DNA, 25 bp, Homo sapien
gaaattaattgacaggctacttgcg

SEQ ID NO: 4580737 - DNA, 25 bp, Homo sapien
cacctagccgtccaagaattttcta

SEQ ID NO: 4580738 - DNA, 25 bp, Homo sapien
cagaattcttagttgcaagccatgg

SEQ ID NO: 4580739 - DNA, 25 bp, Homo sapien
aagcaaatacttggcactctcaggt

SEQ ID NO: 4580740 - DNA, 25 bp, Homo sapien
tcttagacactaaagactgggaagc

SEQ ID NO: 4580741 - DNA, 25 bp, Homo sapien
gagagccatcttatatgactgagaa

SEQ ID NO: 4580742 - DNA, 25 bp, Homo sapien
caggttctatagtgagagagccatc

SEQ ID NO: 4580743 - DNA, 25 bp, Homo sapien
tgactagtgcaaacctacgctatct

SEQ ID NO: 4580744 - DNA, 25 bp, Homo sapien
tagtagggagaaccaccatgctgca

SEQ ID NO: 4580745 - DNA, 25 bp, Homo sapien
tgcaatagcaaaccagctccagaga

SEQ ID NO: 4580746 - DNA, 25 bp, Homo sapien
tctgaagccagaacacttagagtgg

SEQ ID NO: 4580747 - DNA, 25 bp, Homo sapien
tagaacaagtagtattcataaaaca

SEQ ID NO: 4580748 - DNA, 25 bp, Homo sapien
ctagaacaagtagtattcataaaac

SEQ ID NO: 4580749 - DNA, 25 bp, Homo sapien
tgacagctctacatggaaatcaaat

SEQ ID NO: 4580750 - DNA, 25 bp, Homo sapien
ctgacagctctacatggaaatcaaa

SEQ ID NO: 4580751 - DNA, 25 bp, Homo sapien
cacagaccaaagagatttcctttat

SEQ ID NO: 4580752 - DNA, 25 bp, Homo sapien
gctcaatttgagtttcgtaagtgac

SEQ ID NO: 4580753 - DNA, 25 bp, Homo sapien
gacgttgagcacctctgtttttctc

SEQ ID NO: 4580754 - DNA, 25 bp, Homo sapien
tcctttataaggctttttaggctca

SEQ ID NO: 4580755 - DNA, 25 bp, Homo sapien
gtgttcaagggctgttaatccacca

SEQ ID NO: 4580756 - DNA, 25 bp, Homo sapien
gactactgcttgaaggatgtgttca

SEQ ID NO: 4580757 - DNA, 25 bp, Homo sapien
tgttcaagggctgttaatccaccag

SEQ ID NO: 4580758 - DNA, 25 bp, Homo sapien
gctgggactactgcttgaaggatgt

SEQ ID NO: 4580759 - DNA, 25 bp, Homo sapien
ctcctcaagagtggcatctgactca

SEQ ID NO: 4580760 - DNA, 25 bp, Homo sapien
aagctcctcaagagtggcatctgac

SEQ ID NO: 4580761 - DNA, 25 bp, Homo sapien
tctgcaagctcctcaagagtggcat

SEQ ID NO: 4580762 - DNA, 25 bp, Homo sapien
tctcttgtctgcaagctcctcaaga

SEQ ID NO: 4580763 - DNA, 25 bp, Homo sapien
ggcacagagcaggaatggtaaatac

SEQ ID NO: 4580764 - DNA, 25 bp, Homo sapien
ctggcacagagcaggaatggtaaat

SEQ ID NO: 4580765 - DNA, 25 bp, Homo sapien
tggcacagagcaggaatggtaaata

SEQ ID NO: 4580766 - DNA, 25 bp, Homo sapien
aataaacatcaatggagccccacag

SEQ ID NO: 4580767 - DNA, 25 bp, Homo sapien
tatcgctaagatgaagtttgctacc

SEQ ID NO: 4580768 - DNA, 25 bp, Homo sapien
gtttttggcagctcttatcgctaag

SEQ ID NO: 4580769 - DNA, 25 bp, Homo sapien
gttcccaccaacagagtagacgcat

SEQ ID NO: 4580770 - DNA, 25 bp, Homo sapien
ctgacatcatgactagtgaagcagt

SEQ ID NO: 4580771 - DNA, 25 bp, Homo sapien
taaacaactgacatcatgactagtg

SEQ ID NO: 4580772 - DNA, 25 bp, Homo sapien
caactgacatcatgactagtgaagc

SEQ ID NO: 4580773 - DNA, 25 bp, Homo sapien
tgtaaacaactgacatcatgactag

SEQ ID NO: 4580774 - DNA, 25 bp, Homo sapien
acaattcagcatctatcctaggcca

SEQ ID NO: 4580775 - DNA, 25 bp, Homo sapien
gacatcatcgagattttcctcacca

SEQ ID NO: 4580776 - DNA, 25 bp, Homo sapien
cctaggccattagctgaggaaaatc

SEQ ID NO: 4580777 - DNA, 25 bp, Homo sapien
ggattccttgacttgctagttaaca

SEQ ID NO: 4580778 - DNA, 25 bp, Homo sapien
tttatatactacctttcttcaagag

SEQ ID NO: 4580779 - DNA, 25 bp, Homo sapien
ataaaaccgatacttgagggaagtg

SEQ ID NO: 4580780 - DNA, 25 bp, Homo sapien
caggtatggacaaaaacttaggatt

SEQ ID NO: 4580781 - DNA, 25 bp, Homo sapien
gtatcttttgcacaggtatggacaa

SEQ ID NO: 4580782 - DNA, 25 bp, Homo sapien
tataaacaatgctgccattgaacat

SEQ ID NO: 4580783 - DNA, 25 bp, Homo sapien
tatatgcattgctttccatacagta

SEQ ID NO: 4580784 - DNA, 25 bp, Homo sapien
aacatttgtgtatatcttgcctggt

SEQ ID NO: 4580785 - DNA, 25 bp, Homo sapien
agctgttgatggattcttgcactat

SEQ ID NO: 4580786 - DNA, 25 bp, Homo sapien
gaaactatctgaggcctagaatgaa

SEQ ID NO: 4580787 - DNA, 25 bp, Homo sapien
tatttcctcagaagatagcaggcat

SEQ ID NO: 4580788 - DNA, 25 bp, Homo sapien
gatcatcaacggtacctagtcccaa

SEQ ID NO: 4580789 - DNA, 25 bp, Homo sapien
gactagtaataacatagccttgcag

SEQ ID NO: 4580790 - DNA, 25 bp, Homo sapien
ggtccgatccaaagcagacacttta

SEQ ID NO: 4580791 - DNA, 25 bp, Homo sapien
gaacttgtacttgttttagaagatc

SEQ ID NO: 4580792 - DNA, 25 bp, Homo sapien
gacactttattgtttgcccatgagc

SEQ ID NO: 4580793 - DNA, 25 bp, Homo sapien
tagtgatctctcctagggtccgatc

SEQ ID NO: 4580794 - DNA, 25 bp, Homo sapien
caggacccagtttctagcggtaata

SEQ ID NO: 4580795 - DNA, 25 bp, Homo sapien
gcttatacatacatgagaggacact

SEQ ID NO: 4580796 - DNA, 25 bp, Homo sapien
tgacaacgtcaaatattaccaagga

SEQ ID NO: 4580797 - DNA, 25 bp, Homo sapien
ctcacacattgttggaaagtaggta

SEQ ID NO: 4580798 - DNA, 25 bp, Homo sapien
ccagtctatggttcttggacattta

SEQ ID NO: 4580799 - DNA, 25 bp, Homo sapien
ttgcagtcccactcacagtgtaaaa

SEQ ID NO: 4580800 - DNA, 25 bp, Homo sapien
aactagtttgcagtcccactcacag

SEQ ID NO: 4580801 - DNA, 25 bp, Homo sapien
tctatggttcttggacatttaggtt

SEQ ID NO: 4580802 - DNA, 25 bp, Homo sapien
acaagaggagggagagcatcaagac

SEQ ID NO: 4580803 - DNA, 25 bp, Homo sapien
ggcctgtcgaggggggacaagagga

SEQ ID NO: 4580804 - DNA, 25 bp, Homo sapien
gaggagggagagcatcaagacaaat

SEQ ID NO: 4580805 - DNA, 25 bp, Homo sapien
aagaggagggagagcatcaagacaa

SEQ ID NO: 4580806 - DNA, 25 bp, Homo sapien
tttggtttccattaaactctcatat

SEQ ID NO: 4580807 - DNA, 25 bp, Homo sapien
gtgaatcagagccagaatttttggt

SEQ ID NO: 4580808 - DNA, 25 bp, Homo sapien
ttgctttataaggtgaatcagagcc

SEQ ID NO: 4580809 - DNA, 25 bp, Homo sapien
cattaaactctcatattccttagcc

SEQ ID NO: 4580810 - DNA, 25 bp, Homo sapien
agcctgctgctgacctttaaatggg

SEQ ID NO: 4580811 - DNA, 25 bp, Homo sapien
ggacgctgccgaacaacaaagatgg

SEQ ID NO: 4580812 - DNA, 25 bp, Homo sapien
gggatctactccagacgctatttcc

SEQ ID NO: 4580813 - DNA, 25 bp, Homo sapien
tctggcgaactctattgggacatct

SEQ ID NO: 4580814 - DNA, 25 bp, Homo sapien
ctggacactgaagctgatgtccaag

SEQ ID NO: 4580815 - DNA, 25 bp, Homo sapien
ttttttgccgctcttctccatcttt

SEQ ID NO: 4580816 - DNA, 25 bp, Homo sapien
actttcaaccacaatgtcaataatg

SEQ ID NO: 4580817 - DNA, 25 bp, Homo sapien
ttctgctggagctgtactttcaacc

SEQ ID NO: 4580818 - DNA, 25 bp, Homo sapien
accacaatgtcaataatgtacttct

SEQ ID NO: 4580819 - DNA, 25 bp, Homo sapien
ttcaaatctatgcaatgcagtttat

SEQ ID NO: 4580820 - DNA, 25 bp, Homo sapien
tgagacggggtagagggaaggagag

SEQ ID NO: 4580821 - DNA, 25 bp, Homo sapien
atcattcaactgagacggggtagag

SEQ ID NO: 4580822 - DNA, 25 bp, Homo sapien
attcaactgagacggggtagaggga

SEQ ID NO: 4580823 - DNA, 25 bp, Homo sapien
gagacggggtagagggaaggagaga

SEQ ID NO: 4580824 - DNA, 25 bp, Homo sapien
tcaggcgaacccaaatgagagacat

SEQ ID NO: 4580825 - DNA, 25 bp, Homo sapien
gaaactgtcacaaaccagagagtac

SEQ ID NO: 4580826 - DNA, 25 bp, Homo sapien
gttagagaaactgctccagaacaca

SEQ ID NO: 4580827 - DNA, 25 bp, Homo sapien
tcctcaaaaccgatagggccatgaa

SEQ ID NO: 4580828 - DNA, 25 bp, Homo sapien
tctaaggtcactttgcactccgaat

SEQ ID NO: 4580829 - DNA, 25 bp, Homo sapien
tagctactagtgtaactctaaggtc

SEQ ID NO: 4580830 - DNA, 25 bp, Homo sapien
tgcaaattagaaagtaacagggtaa

SEQ ID NO: 4580831 - DNA, 25 bp, Homo sapien
aaaacacataccaggaactttccat

SEQ ID NO: 4580832 - DNA, 25 bp, Homo sapien
gcaagcagacagtaccagtcttagt

SEQ ID NO: 4580833 - DNA, 25 bp, Homo sapien
cttgaatgactatgatgcctaaaaa

SEQ ID NO: 4580834 - DNA, 25 bp, Homo sapien
agcagacagtaccagtcttagtgag

SEQ ID NO: 4580835 - DNA, 25 bp, Homo sapien
aggacttgaatgactatgatgccta

SEQ ID NO: 4580836 - DNA, 25 bp, Homo sapien
taaaacagcacatattgggtactca

SEQ ID NO: 4580837 - DNA, 25 bp, Homo sapien
cacatattgggtactcaataaacaa

SEQ ID NO: 4580838 - DNA, 25 bp, Homo sapien
atacaaacacggaattctttataat

SEQ ID NO: 4580839 - DNA, 25 bp, Homo sapien
tattgtagtagctattaagtgctaa

SEQ ID NO: 4580840 - DNA, 25 bp, Homo sapien
gtgttttctccctttaacatggcta

SEQ ID NO: 4580841 - DNA, 25 bp, Homo sapien
taaaaagatatacctctgaagagat

SEQ ID NO: 4580842 - DNA, 25 bp, Homo sapien
tcttcatctgacagttcacgcccct

SEQ ID NO: 4580843 - DNA, 25 bp, Homo sapien
gctggtattctctctcacggcttgc

SEQ ID NO: 4580844 - DNA, 25 bp, Homo sapien
attcagtccagtatatgatatgtga

SEQ ID NO: 4580845 - DNA, 25 bp, Homo sapien
tatatgatatgtgagttgagatcca

SEQ ID NO: 4580846 - DNA, 25 bp, Homo sapien
gatatgtgagttgagatccacctag

SEQ ID NO: 4580847 - DNA, 25 bp, Homo sapien
tcagtccagtatatgatatgtgagt

SEQ ID NO: 4580848 - DNA, 25 bp, Homo sapien
tgtgccttcgaatactttcatcatg

SEQ ID NO: 4580849 - DNA, 25 bp, Homo sapien
tgcatgtcgcccactgcttagctca

SEQ ID NO: 4580850 - DNA, 25 bp, Homo sapien
tctgttccatgtgccttcgaatact

SEQ ID NO: 4580851 - DNA, 25 bp, Homo sapien
gggcataatcagtatttgcatgtcg

SEQ ID NO: 4580852 - DNA, 25 bp, Homo sapien
agctgtgagtgctgccaatcgttct

SEQ ID NO: 4580853 - DNA, 25 bp, Homo sapien
tgctgccaatcgttcttccctgtct

SEQ ID NO: 4580854 - DNA, 25 bp, Homo sapien
gagtgctgccaatcgttcttccctg

SEQ ID NO: 4580855 - DNA, 25 bp, Homo sapien
tgtgagtgctgccaatcgttcttcc

SEQ ID NO: 4580856 - DNA, 25 bp, Homo sapien
ccgggctgcatcctcacgggctttt

SEQ ID NO: 4580857 - DNA, 25 bp, Homo sapien
ctagctctttcccgggctgcatcct

SEQ ID NO: 4580858 - DNA, 25 bp, Homo sapien
tttcccgggctgcatcctcacgggc

SEQ ID NO: 4580859 - DNA, 25 bp, Homo sapien
gggctgcatcctcacgggctttttc

SEQ ID NO: 4580860 - DNA, 25 bp, Homo sapien
aattcttctacacgggcctgccgct

SEQ ID NO: 4580861 - DNA, 25 bp, Homo sapien
aacaattcttctacacgggcctgcc

SEQ ID NO: 4580862 - DNA, 25 bp, Homo sapien
ctgttgttcaattcgggcttcttgt

SEQ ID NO: 4580863 - DNA, 25 bp, Homo sapien
cattaacaattcttctacacgggcc

SEQ ID NO: 4580864 - DNA, 25 bp, Homo sapien
tgtcttctctgacgctcttcctgta

SEQ ID NO: 4580865 - DNA, 25 bp, Homo sapien
ctgcacagcttcatcacgtgcttgc

SEQ ID NO: 4580866 - DNA, 25 bp, Homo sapien
ctgtagctcattaagcctctgttca

SEQ ID NO: 4580867 - DNA, 25 bp, Homo sapien
aacatcatgacgtttattctgggct

SEQ ID NO: 4580868 - DNA, 25 bp, Homo sapien
tcctgcgtcgttgatctagcaattc

SEQ ID NO: 4580869 - DNA, 25 bp, Homo sapien
gcacttctcgcttaaactcagcatg

SEQ ID NO: 4580870 - DNA, 25 bp, Homo sapien
ccatcatcctgcgtcgttgatctag

SEQ ID NO: 4580871 - DNA, 25 bp, Homo sapien
ttttcacaattgcttgtaactgcac

SEQ ID NO: 4580872 - DNA, 25 bp, Homo sapien
gtggcatctgataaggttcttctta

SEQ ID NO: 4580873 - DNA, 25 bp, Homo sapien
ggtggcatctgataaggttcttctt

SEQ ID NO: 4580874 - DNA, 25 bp, Homo sapien
gaagaacgtttcatgcgcacttgag

SEQ ID NO: 4580875 - DNA, 25 bp, Homo sapien
tccactgcggtctaaaagatattgg

SEQ ID NO: 4580876 - DNA, 25 bp, Homo sapien
gagagtggaccactgaagtctccta

SEQ ID NO: 4580877 - DNA, 25 bp, Homo sapien
aagatattccttcgtgttcagccaa

SEQ ID NO: 4580878 - DNA, 25 bp, Homo sapien
tcaatggcctacaaaactctgcact

SEQ ID NO: 4580879 - DNA, 25 bp, Homo sapien
ggtgcctaccaccataactgataat

SEQ ID NO: 4580880 - DNA, 25 bp, Homo sapien
cactctaccttagtaacaggatgcg

SEQ ID NO: 4580881 - DNA, 25 bp, Homo sapien
acaggatgcggctctatttcccagg

SEQ ID NO: 4580882 - DNA, 25 bp, Homo sapien
catgtttcttcttagattctgcaat

SEQ ID NO: 4580883 - DNA, 25 bp, Homo sapien
ctaacaatttctgaagcttcaatgt

SEQ ID NO: 4580884 - DNA, 25 bp, Homo sapien
caatgttttctcttcgcgtaacttt

SEQ ID NO: 4580885 - DNA, 25 bp, Homo sapien
ttcgcgtaacttttcccttagctgc

SEQ ID NO: 4580886 - DNA, 25 bp, Homo sapien
tcatgcatgtgaattccatgccctg

SEQ ID NO: 4580887 - DNA, 25 bp, Homo sapien
gtattttggcgccaagactcacgag

SEQ ID NO: 4580888 - DNA, 25 bp, Homo sapien
aattccatgccctggaggtctagca

SEQ ID NO: 4580889 - DNA, 25 bp, Homo sapien
tgtccccccaggatgtattttggcg

SEQ ID NO: 4580890 - DNA, 25 bp, Homo sapien
gacatcgttccagtccatggacata

SEQ ID NO: 4580891 - DNA, 25 bp, Homo sapien
ccagtccatggacataccacagaaa

SEQ ID NO: 4580892 - DNA, 25 bp, Homo sapien
gacataccacagaaagaaacactcc

SEQ ID NO: 4580893 - DNA, 25 bp, Homo sapien
cataatctgcaaggacatcgttcca

SEQ ID NO: 4580894 - DNA, 25 bp, Homo sapien
cttttttagcaaggacttctgccat

SEQ ID NO: 4580895 - DNA, 25 bp, Homo sapien
cttttctagacgatctgctagctct

SEQ ID NO: 4580896 - DNA, 25 bp, Homo sapien
caatagcactagcaatggcttcttc

SEQ ID NO: 4580897 - DNA, 25 bp, Homo sapien
tgttcttcttcagcaatagcactag

SEQ ID NO: 4580898 - DNA, 25 bp, Homo sapien
ttgatctagaatcataaaagctggg

SEQ ID NO: 4580899 - DNA, 25 bp, Homo sapien
tactagctgtgtgccttagaagctt

SEQ ID NO: 4580900 - DNA, 25 bp, Homo sapien
gggttccatacaggctcatccactt

SEQ ID NO: 4580901 - DNA, 25 bp, Homo sapien
tatgttctaacatgaactcaacagt

SEQ ID NO: 4580902 - DNA, 25 bp, Homo sapien
aatttcatttgagtgccaaaattca

SEQ ID NO: 4580903 - DNA, 25 bp, Homo sapien
taaataacaggtagtgtgaatttca

SEQ ID NO: 4580904 - DNA, 25 bp, Homo sapien
tatatgctgtactggtgatgatgct

SEQ ID NO: 4580905 - DNA, 25 bp, Homo sapien
cgaaatagtatactataatgggaac

SEQ ID NO: 4580906 - DNA, 25 bp, Homo sapien
cattaattaataaatcctcatgaga

SEQ ID NO: 4580907 - DNA, 25 bp, Homo sapien
agcagatatttcagaagttcgaaca

SEQ ID NO: 4580908 - DNA, 25 bp, Homo sapien
taaaggaggtgtaccagcttgcagc

SEQ ID NO: 4580909 - DNA, 25 bp, Homo sapien
tgaagggtccatttcattttctatc

SEQ ID NO: 4580910 - DNA, 25 bp, Homo sapien
acataattgtctcgaatactgccag

SEQ ID NO: 4580911 - DNA, 25 bp, Homo sapien
ggttttttcggcaagaggatggtca

SEQ ID NO: 4580912 - DNA, 25 bp, Homo sapien
cacaagagtgtaatgagtctttggg

SEQ ID NO: 4580913 - DNA, 25 bp, Homo sapien
gaggatggtcacaagagtgtaatga

SEQ ID NO: 4580914 - DNA, 25 bp, Homo sapien
gtctttgggatgagattctatagta

SEQ ID NO: 4580915 - DNA, 25 bp, Homo sapien
ctttctgtatgctttcatcaggtaa

SEQ ID NO: 4580916 - DNA, 25 bp, Homo sapien
ctgtatgctttcatcaggtaaaaga

SEQ ID NO: 4580917 - DNA, 25 bp, Homo sapien
ttctgtatgctttcatcaggtaaaa

SEQ ID NO: 4580918 - DNA, 25 bp, Homo sapien
tgctttcatcaggtaaaagacatac

SEQ ID NO: 4580919 - DNA, 25 bp, Homo sapien
tctgttgccaatgaaacttttggca

SEQ ID NO: 4580920 - DNA, 25 bp, Homo sapien
catcctttgatcttgtggcttctgt

SEQ ID NO: 4580921 - DNA, 25 bp, Homo sapien
gcttctgttgccaatgaaacttttg

SEQ ID NO: 4580922 - DNA, 25 bp, Homo sapien
ctttatcactgtcatcctttgatct

SEQ ID NO: 4580923 - DNA, 25 bp, Homo sapien
cactgctgttgatcgagaacgaata

SEQ ID NO: 4580924 - DNA, 25 bp, Homo sapien
gctgttgatcgagaacgaataggcc

SEQ ID NO: 4580925 - DNA, 25 bp, Homo sapien
cgagaacgaataggccttcctctct

SEQ ID NO: 4580926 - DNA, 25 bp, Homo sapien
ttgatcgagaacgaataggccttcc

SEQ ID NO: 4580927 - DNA, 25 bp, Homo sapien
tctcaagtctcctggcatgcaactc

SEQ ID NO: 4580928 - DNA, 25 bp, Homo sapien
cccaaaatgatgtgtctttttgtat

SEQ ID NO: 4580929 - DNA, 25 bp, Homo sapien
atatatttggtcttcatctcaagtc

SEQ ID NO: 4580930 - DNA, 25 bp, Homo sapien
ttcatctcaagtctcctggcatgca

SEQ ID NO: 4580931 - DNA, 25 bp, Homo sapien
ctttctgaaccgaaaagttccaatg

SEQ ID NO: 4580932 - DNA, 25 bp, Homo sapien
gaaccgaaaagttccaatggcatct

SEQ ID NO: 4580933 - DNA, 25 bp, Homo sapien
ccgaaaagttccaatggcatcttcc

SEQ ID NO: 4580934 - DNA, 25 bp, Homo sapien
tctgaaccgaaaagttccaatggca

SEQ ID NO: 4580935 - DNA, 25 bp, Homo sapien
tttactacacaaaatggctaattcg

SEQ ID NO: 4580936 - DNA, 25 bp, Homo sapien
ttactacacaaaatggctaattcga

SEQ ID NO: 4580937 - DNA, 25 bp, Homo sapien
aagactgggcgggtgttatttctga

SEQ ID NO: 4580938 - DNA, 25 bp, Homo sapien
tagagcctgtatgatgagcctttac

SEQ ID NO: 4580939 - DNA, 25 bp, Homo sapien
catttttgcgtgaggccttctgcac

SEQ ID NO: 4580940 - DNA, 25 bp, Homo sapien
gaggccttctgcactgtcattggtg

SEQ ID NO: 4580941 - DNA, 25 bp, Homo sapien
tgtgggagccagacgaggagctggc

SEQ ID NO: 4580942 - DNA, 25 bp, Homo sapien
gtgggagccagacgaggagctggca

SEQ ID NO: 4580943 - DNA, 25 bp, Homo sapien
ctgtgggagccagacgaggagctgg

SEQ ID NO: 4580944 - DNA, 25 bp, Homo sapien
agtagagtccaaaacaacttagtct

SEQ ID NO: 4580945 - DNA, 25 bp, Homo sapien
taccatttgaagcaaacaaagagct

SEQ ID NO: 4580946 - DNA, 25 bp, Homo sapien
agctcaagaatgagacatccatggg

SEQ ID NO: 4580947 - DNA, 25 bp, Homo sapien
gcaggttgtgtgcatacctaggaaa

SEQ ID NO: 4580948 - DNA, 25 bp, Homo sapien
aatttaagcttcgtcgagcatttga

SEQ ID NO: 4580949 - DNA, 25 bp, Homo sapien
aagcttcgtcgagcatttgatgtta

SEQ ID NO: 4580950 - DNA, 25 bp, Homo sapien
tttaagcttcgtcgagcatttgatg

SEQ ID NO: 4580951 - DNA, 25 bp, Homo sapien
caaaatttaagcttcgtcgagcatt

SEQ ID NO: 4580952 - DNA, 25 bp, Homo sapien
catggcgtcccggagacatcttctt

SEQ ID NO: 4580953 - DNA, 25 bp, Homo sapien
ttctttacttcccatgccaatgatg

SEQ ID NO: 4580954 - DNA, 25 bp, Homo sapien
tacttcccatgccaatgatgttggt

SEQ ID NO: 4580955 - DNA, 25 bp, Homo sapien
gtcccggagacatcttctttacttc

SEQ ID NO: 4580956 - DNA, 25 bp, Homo sapien
ccagggactgtggatgaagtaggca

SEQ ID NO: 4580957 - DNA, 25 bp, Homo sapien
tgctttgaaatctcttacatagtta

SEQ ID NO: 4580958 - DNA, 25 bp, Homo sapien
ttacatagttatccagcatcattag

SEQ ID NO: 4580959 - DNA, 25 bp, Homo sapien
tcctgaagctgaatccagtcaatca

SEQ ID NO: 4580960 - DNA, 25 bp, Homo sapien
agcatctgtcttctctagcttttcc

SEQ ID NO: 4580961 - DNA, 25 bp, Homo sapien
tagatttcatctactgctcggcgaa

SEQ ID NO: 4580962 - DNA, 25 bp, Homo sapien
tcaaagtgtttatctccagtcgtag

SEQ ID NO: 4580963 - DNA, 25 bp, Homo sapien
cttagatcaattttccgagggtgcc

SEQ ID NO: 4580964 - DNA, 25 bp, Homo sapien
gaaatgcccagtatcgagctcttag

SEQ ID NO: 4580965 - DNA, 25 bp, Homo sapien
caccatatggagaggagaccaacct

SEQ ID NO: 4580966 - DNA, 25 bp, Homo sapien
catttcttggaggtggagcccctag

SEQ ID NO: 4580967 - DNA, 25 bp, Homo sapien
ggagcgtcaagccacaatctaaagg

SEQ ID NO: 4580968 - DNA, 25 bp, Homo sapien
tctaaaggcaatgggagaggaaccc

SEQ ID NO: 4580969 - DNA, 25 bp, Homo sapien
gatagtatccatgataactttccca

SEQ ID NO: 4580970 - DNA, 25 bp, Homo sapien
tttcccaaccttgatagagaggcca

SEQ ID NO: 4580971 - DNA, 25 bp, Homo sapien
aagatcacaataggacaatacagga

SEQ ID NO: 4580972 - DNA, 25 bp, Homo sapien
ttaacagaatagaccaagctgagga

SEQ ID NO: 4580973 - DNA, 25 bp, Homo sapien
tagttcggccattatggaaagaagt

SEQ ID NO: 4580974 - DNA, 25 bp, Homo sapien
ttatggaaagaagtatggcgattcc

SEQ ID NO: 4580975 - DNA, 25 bp, Homo sapien
aattagttcggccattatggaaaga

SEQ ID NO: 4580976 - DNA, 25 bp, Homo sapien
ggccattatggaaagaagtatggcg

SEQ ID NO: 4580977 - DNA, 25 bp, Homo sapien
gtttagtagttttatgagtgccttg

SEQ ID NO: 4580978 - DNA, 25 bp, Homo sapien
gtgccttgaatggtcctcttagatt

SEQ ID NO: 4580979 - DNA, 25 bp, Homo sapien
tatgagtgccttgaatggtcctctt

SEQ ID NO: 4580980 - DNA, 25 bp, Homo sapien
cttgaatggtcctcttagattttcc

SEQ ID NO: 4580981 - DNA, 25 bp, Homo sapien
aatagctccttgtggaaagattagc

SEQ ID NO: 4580982 - DNA, 25 bp, Homo sapien
cagaataacccatggaaaatgagag

SEQ ID NO: 4580983 - DNA, 25 bp, Homo sapien
tagtatgacacacatgaattaggta

SEQ ID NO: 4580984 - DNA, 25 bp, Homo sapien
tctaaaaatagctaggaaaactgag

SEQ ID NO: 4580985 - DNA, 25 bp, Homo sapien
gataccagacaaacctaactgtgag

SEQ ID NO: 4580986 - DNA, 25 bp, Homo sapien
caacatcctcaaaacagtggcttca

SEQ ID NO: 4580987 - DNA, 25 bp, Homo sapien
aatttcaaagtgaggtatgccaacc

SEQ ID NO: 4580988 - DNA, 25 bp, Homo sapien
tgcctctagccattaaagggagggt

SEQ ID NO: 4580989 - DNA, 25 bp, Homo sapien
gggcaagcaaggcgccttctttaca

SEQ ID NO: 4580990 - DNA, 25 bp, Homo sapien
gagaagggcaagcaaggcgccttct

SEQ ID NO: 4580991 - DNA, 25 bp, Homo sapien
aggagaagggcaagcaaggcgcctt

SEQ ID NO: 4580992 - DNA, 25 bp, Homo sapien
aaggagaagggcaagcaaggcgcct

SEQ ID NO: 4580993 - DNA, 25 bp, Homo sapien
ggaacactccaagctattaggtttc

SEQ ID NO: 4580994 - DNA, 25 bp, Homo sapien
tcctctgcaactattctccttactt

SEQ ID NO: 4580995 - DNA, 25 bp, Homo sapien
catcatctttgctttctagtggaac

SEQ ID NO: 4580996 - DNA, 25 bp, Homo sapien
ttctccttactttgtcatgactatt

SEQ ID NO: 4580997 - DNA, 25 bp, Homo sapien
aacttcgtcctttagcttaagcaca

SEQ ID NO: 4580998 - DNA, 25 bp, Homo sapien
aaatagatggcctacttttcagctc

SEQ ID NO: 4580999 - DNA, 25 bp, Homo sapien
caatgtaacaccagaaaacttcgtc

SEQ ID NO: 4581000 - DNA, 25 bp, Homo sapien
cattgttctaaccaagggtatcact

SEQ ID NO: 4581001 - DNA, 25 bp, Homo sapien
gatcatttatcacataaacccatgg

SEQ ID NO: 4581002 - DNA, 25 bp, Homo sapien
aattctcttctatgccaagatcatt

SEQ ID NO: 4581003 - DNA, 25 bp, Homo sapien
taaattctcttctatgccaagatca

SEQ ID NO: 4581004 - DNA, 25 bp, Homo sapien
cacataaacccatggagtatgactc

SEQ ID NO: 4581005 - DNA, 25 bp, Homo sapien
gctaataagcacacggtttctttag

SEQ ID NO: 4581006 - DNA, 25 bp, Homo sapien
ctaataagcacacggtttctttagg

SEQ ID NO: 4581007 - DNA, 25 bp, Homo sapien
tctggaagacggagaggccattcct

SEQ ID NO: 4581008 - DNA, 25 bp, Homo sapien
actcccaggtgcgagaggctcttcg

SEQ ID NO: 4581009 - DNA, 25 bp, Homo sapien
aacggtgtagaggaaaggcgccaag

SEQ ID NO: 4581010 - DNA, 25 bp, Homo sapien
aggaggctgggtcccactactccca

SEQ ID NO: 4581011 - DNA, 25 bp, Homo sapien
cgaccgccctgcttagttcggggcg

SEQ ID NO: 4581012 - DNA, 25 bp, Homo sapien
cttcccggcgcaccacgtgatctca

SEQ ID NO: 4581013 - DNA, 25 bp, Homo sapien
gcggctcaaagcgtcccgccgggaa

SEQ ID NO: 4581014 - DNA, 25 bp, Homo sapien
cacgtgatctcagccgctgccgcgc

SEQ ID NO: 4581015 - DNA, 25 bp, Homo sapien
gagtgtaaagatgaacccagaaacc

SEQ ID NO: 4581016 - DNA, 25 bp, Homo sapien
taacgtcctaaaaattgatgtggag

SEQ ID NO: 4581017 - DNA, 25 bp, Homo sapien
gaaagtctgttataactgacgaaag

SEQ ID NO: 4581018 - DNA, 25 bp, Homo sapien
tttgacagcctaggaatatgtctct

SEQ ID NO: 4581019 - DNA, 25 bp, Homo sapien
actgggttgtttagactcgtgtcac

SEQ ID NO: 4581020 - DNA, 25 bp, Homo sapien
tatgacaaagataacgatggcaggc

SEQ ID NO: 4581021 - DNA, 25 bp, Homo sapien
cttgttgagaaagacagattcgtga

SEQ ID NO: 4581022 - DNA, 25 bp, Homo sapien
gatggcaggcttgatccccaagagc

SEQ ID NO: 4581023 - DNA, 25 bp, Homo sapien
tattgtgccatatgacaacaaagtc

SEQ ID NO: 4581024 - DNA, 25 bp, Homo sapien
taagtagtatgtgaccgagctataa

SEQ ID NO: 4581025 - DNA, 25 bp, Homo sapien
caggacaatgtttttaggtttagca

SEQ ID NO: 4581026 - DNA, 25 bp, Homo sapien
cctttagaaggacttagacctcaca

SEQ ID NO: 4581027 - DNA, 25 bp, Homo sapien
tgtggacatccaatcagcacagcac

SEQ ID NO: 4581028 - DNA, 25 bp, Homo sapien
ctgctccattttggatctgggctgg

SEQ ID NO: 4581029 - DNA, 25 bp, Homo sapien
tccattttggatctgggctggttca

SEQ ID NO: 4581030 - DNA, 25 bp, Homo sapien
gggaggtcaccttgttgatgtcaaa

SEQ ID NO: 4581031 - DNA, 25 bp, Homo sapien
tagcccgagctcagcacatcagcat

SEQ ID NO: 4581032 - DNA, 25 bp, Homo sapien
tcagcacatcagcatagccactggt

SEQ ID NO: 4581033 - DNA, 25 bp, Homo sapien
tcagcatagccactggtagtcttcg

SEQ ID NO: 4581034 - DNA, 25 bp, Homo sapien
ccactggtagtcttcgtttggatac

SEQ ID NO: 4581035 - DNA, 25 bp, Homo sapien
cctgtaggtgggatttccatgtcca

SEQ ID NO: 4581036 - DNA, 25 bp, Homo sapien
gcttcctgtaggtgggatttccatg

SEQ ID NO: 4581037 - DNA, 25 bp, Homo sapien
tttccatgtccaggaccagcctgac

SEQ ID NO: 4581038 - DNA, 25 bp, Homo sapien
gtgggatttccatgtccaggaccag

SEQ ID NO: 4581039 - DNA, 25 bp, Homo sapien
gctcggacaacttggcattggcgtc

SEQ ID NO: 4581040 - DNA, 25 bp, Homo sapien
caacttggcattggcgtccttaaca

SEQ ID NO: 4581041 - DNA, 25 bp, Homo sapien
gacaacttggcattggcgtccttaa

SEQ ID NO: 4581042 - DNA, 25 bp, Homo sapien
cggacaacttggcattggcgtcctt

SEQ ID NO: 4581043 - DNA, 25 bp, Homo sapien
tgtgcactgcaagtcatcgccgtgc

SEQ ID NO: 4581044 - DNA, 25 bp, Homo sapien
tctttgtgcactgcaagtcatcgcc

SEQ ID NO: 4581045 - DNA, 25 bp, Homo sapien
gcactgcaagtcatcgccgtgcttc

SEQ ID NO: 4581046 - DNA, 25 bp, Homo sapien
tttgtgcactgcaagtcatcgccgt

SEQ ID NO: 4581047 - DNA, 25 bp, Homo sapien
gcaccacaggcgtgtgggaaatctg

SEQ ID NO: 4581048 - DNA, 25 bp, Homo sapien
caccacaggcgtgtgggaaatctgg

SEQ ID NO: 4581049 - DNA, 25 bp, Homo sapien
ggaaatctgggacggcagctcctgg

SEQ ID NO: 4581050 - DNA, 25 bp, Homo sapien
tgtgggaaatctgggacggcagctc

SEQ ID NO: 4581051 - DNA, 25 bp, Homo sapien
cagactccagctgtaccttgtttat

SEQ ID NO: 4581052 - DNA, 25 bp, Homo sapien
tcatcagtcagcgcttccaggccag

SEQ ID NO: 4581053 - DNA, 25 bp, Homo sapien
gccagactccagctgtaccttgttt

SEQ ID NO: 4581054 - DNA, 25 bp, Homo sapien
atcagtcagcgcttccaggccagac

SEQ ID NO: 4581055 - DNA, 25 bp, Homo sapien
ttgaggaggacaaattcattctcca

SEQ ID NO: 4581056 - DNA, 25 bp, Homo sapien
tgaggaggacaaattcattctccat

SEQ ID NO: 4581057 - DNA, 25 bp, Homo sapien
cttgaggaggacaaattcattctcc

SEQ ID NO: 4581058 - DNA, 25 bp, Homo sapien
ctctgcacgctcattgatctcatca

SEQ ID NO: 4581059 - DNA, 25 bp, Homo sapien
ctgcacgctcattgatctcatcatc

SEQ ID NO: 4581060 - DNA, 25 bp, Homo sapien
tctgcacgctcattgatctcatcat

SEQ ID NO: 4581061 - DNA, 25 bp, Homo sapien
agctctcgaactggtggtccacgtt

SEQ ID NO: 4581062 - DNA, 25 bp, Homo sapien
ctcgaactggtggtccacgttgctc

SEQ ID NO: 4581063 - DNA, 25 bp, Homo sapien
tgtagctctcgaactggtggtccac

SEQ ID NO: 4581064 - DNA, 25 bp, Homo sapien
ctctcgaactggtggtccacgttgc

SEQ ID NO: 4581065 - DNA, 25 bp, Homo sapien
tggaacagtcactaaaaagcggtga

SEQ ID NO: 4581066 - DNA, 25 bp, Homo sapien
gaggcacaactgcacagacctcaag

SEQ ID NO: 4581067 - DNA, 25 bp, Homo sapien
gatgtgttcagataccaggcaaaac

SEQ ID NO: 4581068 - DNA, 25 bp, Homo sapien
tgaagtgtcttcaggagcggagtcc

SEQ ID NO: 4581069 - DNA, 25 bp, Homo sapien
gttggctttcggcatccccggctgc

SEQ ID NO: 4581070 - DNA, 25 bp, Homo sapien
catggggaagtatgagcacgtgacc

SEQ ID NO: 4581071 - DNA, 25 bp, Homo sapien
tgcccattcgcaaggccaaccatgg

SEQ ID NO: 4581072 - DNA, 25 bp, Homo sapien
gaaggttgtggtggtcacgtggttg

SEQ ID NO: 4581073 - DNA, 25 bp, Homo sapien
ccggtgctgggtaagtactccaaag

SEQ ID NO: 4581074 - DNA, 25 bp, Homo sapien
gaattggctgtctggtcgcccagcc

SEQ ID NO: 4581075 - DNA, 25 bp, Homo sapien
caaagccgaattggctgtctggtcg

SEQ ID NO: 4581076 - DNA, 25 bp, Homo sapien
taagtactccaaagccgaattggct

SEQ ID NO: 4581077 - DNA, 25 bp, Homo sapien
tcaggtcctatgaactctaatttca

SEQ ID NO: 4581078 - DNA, 25 bp, Homo sapien
tgcacagtacctgatatacagttgg

SEQ ID NO: 4581079 - DNA, 25 bp, Homo sapien
tcttttagcctatagatgtagcaat

SEQ ID NO: 4581080 - DNA, 25 bp, Homo sapien
tacagttggcgatggataaatgctg

SEQ ID NO: 4581081 - DNA, 25 bp, Homo sapien
gtagcaattagtggcagtctgcaca

SEQ ID NO: 4581082 - DNA, 25 bp, Homo sapien
tctgagaggagcagtatctcaactg

SEQ ID NO: 4581083 - DNA, 25 bp, Homo sapien
gaaggaagccatagttcagtgccgg

SEQ ID NO: 4581084 - DNA, 25 bp, Homo sapien
agtatctcaactgtgccatcctctc

SEQ ID NO: 4581085 - DNA, 25 bp, Homo sapien
aaggaagccatagttcagtgccggg

SEQ ID NO: 4581086 - DNA, 25 bp, Homo sapien
tttgctgagtgcctgttccatgcca

SEQ ID NO: 4581087 - DNA, 25 bp, Homo sapien
tgctgagtgcctgttccatgccagg

SEQ ID NO: 4581088 - DNA, 25 bp, Homo sapien
catttgctgagtgcctgttccatgc

SEQ ID NO: 4581089 - DNA, 25 bp, Homo sapien
gccatttgctgagtgcctgttccat

SEQ ID NO: 4581090 - DNA, 25 bp, Homo sapien
tgttagaagattgcagaggtttgtg

SEQ ID NO: 4581091 - DNA, 25 bp, Homo sapien
ctggggaccaagaacttcgttcatc

SEQ ID NO: 4581092 - DNA, 25 bp, Homo sapien
cccattccacaggacgtggccggct

SEQ ID NO: 4581093 - DNA, 25 bp, Homo sapien
gccggctgctcaggtgttagaagat

SEQ ID NO: 4581094 - DNA, 25 bp, Homo sapien
catgacacagggtgatgaaagtgct

SEQ ID NO: 4581095 - DNA, 25 bp, Homo sapien
tatagcatggtgaatgtactcaagg

SEQ ID NO: 4581096 - DNA, 25 bp, Homo sapien
taacaagaatccacccttggagttc

SEQ ID NO: 4581097 - DNA, 25 bp, Homo sapien
tacaggcagtggttctatagcatgg

SEQ ID NO: 4581098 - DNA, 25 bp, Homo sapien
tcgctggccaagtcgggaactatct

SEQ ID NO: 4581099 - DNA, 25 bp, Homo sapien
gaaacgtcgcttggcagtcatcata

SEQ ID NO: 4581100 - DNA, 25 bp, Homo sapien
gacacatgccattgctgaactgctg

SEQ ID NO: 4581101 - DNA, 25 bp, Homo sapien
caaacactgatccatggctggtgcc

SEQ ID NO: 4581102 - DNA, 25 bp, Homo sapien
tgaagacaaggacagtatcgccact

SEQ ID NO: 4581103 - DNA, 25 bp, Homo sapien
tggacacaccctagagcaccttaga

SEQ ID NO: 4581104 - DNA, 25 bp, Homo sapien
aagtgccccggtgcttccaatgtgc

SEQ ID NO: 4581105 - DNA, 25 bp, Homo sapien
gacagggtacccacaggatggttca

SEQ ID NO: 4581106 - DNA, 25 bp, Homo sapien
gaactgaaatatcccccaaataatg

SEQ ID NO: 4581107 - DNA, 25 bp, Homo sapien
aactgaaatatcccccaaataatga

SEQ ID NO: 4581108 - DNA, 25 bp, Homo sapien
tgaaatatcccccaaataatgaaaa

SEQ ID NO: 4581109 - DNA, 25 bp, Homo sapien
actgaaatatcccccaaataatgaa

SEQ ID NO: 4581110 - DNA, 25 bp, Homo sapien
tattttgctagtctacatgggtaca

SEQ ID NO: 4581111 - DNA, 25 bp, Homo sapien
gacttaccatgaatgggctcattca

SEQ ID NO: 4581112 - DNA, 25 bp, Homo sapien
catgggtacattatttccaacaagc

SEQ ID NO: 4581113 - DNA, 25 bp, Homo sapien
tctatttacaactgagatcacatct

SEQ ID NO: 4581114 - DNA, 25 bp, Homo sapien
tggccaagagttctccactgtgaag

SEQ ID NO: 4581115 - DNA, 25 bp, Homo sapien
aaggacctggtgacatttcggcatc

SEQ ID NO: 4581116 - DNA, 25 bp, Homo sapien
tgaagatgaaccaagatatacgcca

SEQ ID NO: 4581117 - DNA, 25 bp, Homo sapien
tcagtcctgttaccacttggaggta

SEQ ID NO: 4581118 - DNA, 25 bp, Homo sapien
taccacactacatgactcgcaattg

SEQ ID NO: 4581119 - DNA, 25 bp, Homo sapien
gttcaccatcgtacttaaaatctta

SEQ ID NO: 4581120 - DNA, 25 bp, Homo sapien
catgactcgcaattggttctgaaat

SEQ ID NO: 4581121 - DNA, 25 bp, Homo sapien
tctgaaattagaacgttcaccatcg

SEQ ID NO: 4581122 - DNA, 25 bp, Homo sapien
aagtaggtgggcacatgaaaagcca

SEQ ID NO: 4581123 - DNA, 25 bp, Homo sapien
aaaaagctcaggcttgagttgtcaa

SEQ ID NO: 4581124 - DNA, 25 bp, Homo sapien
caagctgctctgtccaacaccagtg

SEQ ID NO: 4581125 - DNA, 25 bp, Homo sapien
gaaagtcgcaggtagtaggtaagta

SEQ ID NO: 4581126 - DNA, 25 bp, Homo sapien
cataggttccgccagtgatgaggag

SEQ ID NO: 4581127 - DNA, 25 bp, Homo sapien
gagctcgtaagcaggatctctactc

SEQ ID NO: 4581128 - DNA, 25 bp, Homo sapien
aacacgatgcaagcacacagcatgc

SEQ ID NO: 4581129 - DNA, 25 bp, Homo sapien
tccttctgcacaacacgatgcaagc

SEQ ID NO: 4581130 - DNA, 25 bp, Homo sapien
gaactcttcgtaaagccagcaggga

SEQ ID NO: 4581131 - DNA, 25 bp, Homo sapien
ggctgaaaaccctctcatggcaggt

SEQ ID NO: 4581132 - DNA, 25 bp, Homo sapien
ttctgcagcgatggagacataccac

SEQ ID NO: 4581133 - DNA, 25 bp, Homo sapien
tctagcgagtgctgtccgaaagaac

SEQ ID NO: 4581134 - DNA, 25 bp, Homo sapien
acagagtgagaccttgtctctattt

SEQ ID NO: 4581135 - DNA, 25 bp, Homo sapien
cctgggtgacagagtgagaccttgt

SEQ ID NO: 4581136 - DNA, 25 bp, Homo sapien
ctattatcatgtcattgcactcaag

SEQ ID NO: 4581137 - DNA, 25 bp, Homo sapien
gtgacagagtgagaccttgtctcta

SEQ ID NO: 4581138 - DNA, 25 bp, Homo sapien
ccagtgctgtagtaccagttcttga

SEQ ID NO: 4581139 - DNA, 25 bp, Homo sapien
aaagttgttgtgtttagtgcaagag

SEQ ID NO: 4581140 - DNA, 25 bp, Homo sapien
caagagaccagtgctgtagtaccag

SEQ ID NO: 4581141 - DNA, 25 bp, Homo sapien
agttcttgatttacgtatatgaata

SEQ ID NO: 4581142 - DNA, 25 bp, Homo sapien
tggaggccagtacctcagtcacttc

SEQ ID NO: 4581143 - DNA, 25 bp, Homo sapien
gaacaggtcactcactaatcaagaa

SEQ ID NO: 4581144 - DNA, 25 bp, Homo sapien
gaatacactaagacaacagttcgtt

SEQ ID NO: 4581145 - DNA, 25 bp, Homo sapien
gaccattccgggtctaggtgtatag

SEQ ID NO: 4581146 - DNA, 25 bp, Homo sapien
tcttgtagcttcttcactactagag

SEQ ID NO: 4581147 - DNA, 25 bp, Homo sapien
agctgcaaatgccagtgcggcccag

SEQ ID NO: 4581148 - DNA, 25 bp, Homo sapien
gcttcttcactactagagcctcaca

SEQ ID NO: 4581149 - DNA, 25 bp, Homo sapien
agtgcggcccagatcacatgcatca

SEQ ID NO: 4581150 - DNA, 25 bp, Homo sapien
ttggtttctttgaaccaatctgtat

SEQ ID NO: 4581151 - DNA, 25 bp, Homo sapien
tggtttctttgaaccaatctgtatt

SEQ ID NO: 4581152 - DNA, 25 bp, Homo sapien
ctcagcatagaggtcggaagggtgg

SEQ ID NO: 4581153 - DNA, 25 bp, Homo sapien
catagaggtcggaagggtgggccag

SEQ ID NO: 4581154 - DNA, 25 bp, Homo sapien
tttctgaatgctgcgatcaacctca

SEQ ID NO: 4581155 - DNA, 25 bp, Homo sapien
tgtctctgtacataatcaatagccc

SEQ ID NO: 4581156 - DNA, 25 bp, Homo sapien
cagggttggttccattgtaggtctt

SEQ ID NO: 4581157 - DNA, 25 bp, Homo sapien
aatagcccggctagcagcatcaggg

SEQ ID NO: 4581158 - DNA, 25 bp, Homo sapien
taaagtttgcttgtaccagatcctc

SEQ ID NO: 4581159 - DNA, 25 bp, Homo sapien
taaaagtaacattagtcaaggctcc

SEQ ID NO: 4581160 - DNA, 25 bp, Homo sapien
acccctcggaggactggacttatct

SEQ ID NO: 4581161 - DNA, 25 bp, Homo sapien
cagatcataggtagggacataatcc

SEQ ID NO: 4581162 - DNA, 25 bp, Homo sapien
tgtaaacatatcccaaaaccactac

SEQ ID NO: 4581163 - DNA, 25 bp, Homo sapien
acatatcccaaaaccactacaacaa

SEQ ID NO: 4581164 - DNA, 25 bp, Homo sapien
taaacatatcccaaaaccactacaa

SEQ ID NO: 4581165 - DNA, 25 bp, Homo sapien
aacatatcccaaaaccactacaaca

SEQ ID NO: 4581166 - DNA, 25 bp, Homo sapien
catggtttaaaattatatacaaatg

SEQ ID NO: 4581167 - DNA, 25 bp, Homo sapien
atggtttaaaattatatacaaatga

SEQ ID NO: 4581168 - DNA, 25 bp, Homo sapien
tggtttaaaattatatacaaatgaa

SEQ ID NO: 4581169 - DNA, 25 bp, Homo sapien
acatggtttaaaattatatacaaat

SEQ ID NO: 4581170 - DNA, 25 bp, Homo sapien
cagcagccaattagcccaatgatga

SEQ ID NO: 4581171 - DNA, 25 bp, Homo sapien
tatgatcactacagcagggatgagc

SEQ ID NO: 4581172 - DNA, 25 bp, Homo sapien
taagtgatgaagacataggctccca

SEQ ID NO: 4581173 - DNA, 25 bp, Homo sapien
gcagggctcctacagctatgatcac

SEQ ID NO: 4581174 - DNA, 25 bp, Homo sapien
gcgcactctgagtaacaaggtatta

SEQ ID NO: 4581175 - DNA, 25 bp, Homo sapien
tgccactggctcatatacaaacaag

SEQ ID NO: 4581176 - DNA, 25 bp, Homo sapien
aatggcaaagctagagggctcagtc

SEQ ID NO: 4581177 - DNA, 25 bp, Homo sapien
aacaagcagattgattcaggaggtc

SEQ ID NO: 4581178 - DNA, 25 bp, Homo sapien
aggtctgtgtggctttgactcatcc

SEQ ID NO: 4581179 - DNA, 25 bp, Homo sapien
tgtggctttgactcatcctgtacat

SEQ ID NO: 4581180 - DNA, 25 bp, Homo sapien
tttctcaggtctgtgtggctttgac

SEQ ID NO: 4581181 - DNA, 25 bp, Homo sapien
acttttctcaggtctgtgtggcttt

SEQ ID NO: 4581182 - DNA, 25 bp, Homo sapien
ggagattaaccaattgccattgcca

SEQ ID NO: 4581183 - DNA, 25 bp, Homo sapien
gatgatatgccaaaggtcatgctcc

SEQ ID NO: 4581184 - DNA, 25 bp, Homo sapien
aatatctactggctgaacaactcaa

SEQ ID NO: 4581185 - DNA, 25 bp, Homo sapien
ccaagcctggctaagagtttaaagt

SEQ ID NO: 4581186 - DNA, 25 bp, Homo sapien
tgagaccagccatgagtaagatttc

SEQ ID NO: 4581187 - DNA, 25 bp, Homo sapien
taaactgcaactagagagagcgccc

SEQ ID NO: 4581188 - DNA, 25 bp, Homo sapien
gcaaagttagctgaaggtgtgtccc

SEQ ID NO: 4581189 - DNA, 25 bp, Homo sapien
cacaaggctcttggtcagtggacag

SEQ ID NO: 4581190 - DNA, 25 bp, Homo sapien
cattagctacattgcactgtgacac

SEQ ID NO: 4581191 - DNA, 25 bp, Homo sapien
tctctagagtatgggacaacctggg

SEQ ID NO: 4581192 - DNA, 25 bp, Homo sapien
gaaagctgtgaggatatgccatgta

SEQ ID NO: 4581193 - DNA, 25 bp, Homo sapien
tgaacgcaggctgtatcacaccttg

SEQ ID NO: 4581194 - DNA, 25 bp, Homo sapien
gagttgaaccttattctaccgctga

SEQ ID NO: 4581195 - DNA, 25 bp, Homo sapien
ttttcagatcaagtgatgtgataga

SEQ ID NO: 4581196 - DNA, 25 bp, Homo sapien
gcaaggtgatttgggaccagactga

SEQ ID NO: 4581197 - DNA, 25 bp, Homo sapien
tatccgggtgcaaagtccagatggg

SEQ ID NO: 4581198 - DNA, 25 bp, Homo sapien
gaccagcacggtcttggaggaggtg

SEQ ID NO: 4581199 - DNA, 25 bp, Homo sapien
atgaggttgagaaagaccagcacgg

SEQ ID NO: 4581200 - DNA, 25 bp, Homo sapien
aggaggtgatgccgcactggcccat

SEQ ID NO: 4581201 - DNA, 25 bp, Homo sapien
ttggaggaggtgatgccgcactggc

SEQ ID NO: 4581202 - DNA, 25 bp, Homo sapien
cgcgaaggcccggcccggagagcgg

SEQ ID NO: 4581203 - DNA, 25 bp, Homo sapien
aggcccggcccggagagcggggctg

SEQ ID NO: 4581204 - DNA, 25 bp, Homo sapien
ccggcccggagagcggggctgcgct

SEQ ID NO: 4581205 - DNA, 25 bp, Homo sapien
ccgcgaaggcccggcccggagagcg

SEQ ID NO: 4581206 - DNA, 25 bp, Homo sapien
gcccctgcgccgtcgcgcagccccg

SEQ ID NO: 4581207 - DNA, 25 bp, Homo sapien
gaactgcacggcctgcgcggcgctc

SEQ ID NO: 4581208 - DNA, 25 bp, Homo sapien
gcaagtgcctcgctcctccgcgcag

SEQ ID NO: 4581209 - DNA, 25 bp, Homo sapien
ggcgcctcctcgctaggaactgcac

SEQ ID NO: 4581210 - DNA, 25 bp, Homo sapien
gtttttcgtgtcatcaaacatggca

SEQ ID NO: 4581211 - DNA, 25 bp, Homo sapien
tctcttattggcaagtgctggaata

SEQ ID NO: 4581212 - DNA, 25 bp, Homo sapien
tgaattatgtagcttgggaaacact

SEQ ID NO: 4581213 - DNA, 25 bp, Homo sapien
caaagatgtcgcatgaattgcagga

SEQ ID NO: 4581214 - DNA, 25 bp, Homo sapien
gtcggtcggtcggtgcctctgcgcc

SEQ ID NO: 4581215 - DNA, 25 bp, Homo sapien
tcggtcggtcggtgcctctgcgcct

SEQ ID NO: 4581216 - DNA, 25 bp, Homo sapien
gttggtcggtcggtcggtgcctctg

SEQ ID NO: 4581217 - DNA, 25 bp, Homo sapien
tggtcggtcggtcggtgcctctgcg

SEQ ID NO: 4581218 - DNA, 25 bp, Homo sapien
gcccatgagccagtgtagatctata

SEQ ID NO: 4581219 - DNA, 25 bp, Homo sapien
tgggagagtaacactgcagctgtgc

SEQ ID NO: 4581220 - DNA, 25 bp, Homo sapien
caagggtgaccgaggaaagagactt

SEQ ID NO: 4581221 - DNA, 25 bp, Homo sapien
tcagttctgagcgatccatgcacat

SEQ ID NO: 4581222 - DNA, 25 bp, Homo sapien
tcctgcaaggatggcaacttctgcc

SEQ ID NO: 4581223 - DNA, 25 bp, Homo sapien
gcccatccaaatactctgacctttg

SEQ ID NO: 4581224 - DNA, 25 bp, Homo sapien
agcagcattcaggaaagttcagaag

SEQ ID NO: 4581225 - DNA, 25 bp, Homo sapien
caccagatggtcatccagcttcctg

SEQ ID NO: 4581226 - DNA, 25 bp, Homo sapien
catactatccacacactaacgggca

SEQ ID NO: 4581227 - DNA, 25 bp, Homo sapien
gaggaactttgtatctgccagggct

SEQ ID NO: 4581228 - DNA, 25 bp, Homo sapien
caagttatcatgagtgcggacacac

SEQ ID NO: 4581229 - DNA, 25 bp, Homo sapien
catgatgccacggagtacacagcaa

SEQ ID NO: 4581230 - DNA, 25 bp, Homo sapien
gcaccgtttttggtccatggaatcc

SEQ ID NO: 4581231 - DNA, 25 bp, Homo sapien
ccttatggcaccgtttttggtccat

SEQ ID NO: 4581232 - DNA, 25 bp, Homo sapien
atggcaccgtttttggtccatggaa

SEQ ID NO: 4581233 - DNA, 25 bp, Homo sapien
ccaggatcttgcactgcaactcttc

SEQ ID NO: 4581234 - DNA, 25 bp, Homo sapien
taatctgataatgggaggctactcc

SEQ ID NO: 4581235 - DNA, 25 bp, Homo sapien
gatttgtctcggcacagcactttgg

SEQ ID NO: 4581236 - DNA, 25 bp, Homo sapien
ttgaaatttacatgggcaaggcacc

SEQ ID NO: 4581237 - DNA, 25 bp, Homo sapien
aaattgagacgcttagtaggaccca

SEQ ID NO: 4581238 - DNA, 25 bp, Homo sapien
aaggcgcggccatgccacaggacac

SEQ ID NO: 4581239 - DNA, 25 bp, Homo sapien
acaccaagagcagactgctggcctg

SEQ ID NO: 4581240 - DNA, 25 bp, Homo sapien
cttcaaggcaaggcgcggccatgcc

SEQ ID NO: 4581241 - DNA, 25 bp, Homo sapien
acaggacaccaagagcagactgctg

SEQ ID NO: 4581242 - DNA, 25 bp, Homo sapien
tcacggacagggatagaggtttgcc

SEQ ID NO: 4581243 - DNA, 25 bp, Homo sapien
ggtcagctctgtaatgggccacaag

SEQ ID NO: 4581244 - DNA, 25 bp, Homo sapien
gaatagacccacttgttcacggaca

SEQ ID NO: 4581245 - DNA, 25 bp, Homo sapien
tcctgatggcccctagagaattgca

SEQ ID NO: 4581246 - DNA, 25 bp, Homo sapien
taagacatggaacctccctggtgat

SEQ ID NO: 4581247 - DNA, 25 bp, Homo sapien
agcagacggttagggacttcagcaa

SEQ ID NO: 4581248 - DNA, 25 bp, Homo sapien
gagagtctcgcacaaaatcagccac

SEQ ID NO: 4581249 - DNA, 25 bp, Homo sapien
tcagctctgggttctcatcaaaggg

SEQ ID NO: 4581250 - DNA, 25 bp, Homo sapien
tcataatggagaccaaaatacctta

SEQ ID NO: 4581251 - DNA, 25 bp, Homo sapien
caatggactcataatggagaccaaa

SEQ ID NO: 4581252 - DNA, 25 bp, Homo sapien
gtagcccagaatgatacagcaggcc

SEQ ID NO: 4581253 - DNA, 25 bp, Homo sapien
aggccaatggactcataatggagac

SEQ ID NO: 4581254 - DNA, 25 bp, Homo sapien
tgaatgacctgactacacaaatgag

SEQ ID NO: 4581255 - DNA, 25 bp, Homo sapien
cacagagcaaggcacgtagtacttg

SEQ ID NO: 4581256 - DNA, 25 bp, Homo sapien
gatacttgtatctttagggcctagc

SEQ ID NO: 4581257 - DNA, 25 bp, Homo sapien
catagggcttatttactcggaacag

SEQ ID NO: 4581258 - DNA, 25 bp, Homo sapien
gcacagagtagtccaataaccagct

SEQ ID NO: 4581259 - DNA, 25 bp, Homo sapien
tataaaacgctgtgtgggcccaaag

SEQ ID NO: 4581260 - DNA, 25 bp, Homo sapien
tgcccaggatgttcacactagagaa

SEQ ID NO: 4581261 - DNA, 25 bp, Homo sapien
taagacccacacacactcaatgctg

SEQ ID NO: 4581262 - DNA, 25 bp, Homo sapien
aatgtactgcatttaccacaaagaa

SEQ ID NO: 4581263 - DNA, 25 bp, Homo sapien
tagcaaagtggatacaaaaggccct

SEQ ID NO: 4581264 - DNA, 25 bp, Homo sapien
ctgcatttaccacaaagaatagcaa

SEQ ID NO: 4581265 - DNA, 25 bp, Homo sapien
ggccccaagatatgtgttaataact

SEQ ID NO: 4581266 - DNA, 25 bp, Homo sapien
tgcccgccacaatgactggctattt

SEQ ID NO: 4581267 - DNA, 25 bp, Homo sapien
ggagtgcagtgcctcagcttactgc

SEQ ID NO: 4581268 - DNA, 25 bp, Homo sapien
ggtgcccgccacaatgactggctat

SEQ ID NO: 4581269 - DNA, 25 bp, Homo sapien
agtgcagtgcctcagcttactgcaa

SEQ ID NO: 4581270 - DNA, 25 bp, Homo sapien
cctagtatataaccacttgccatct

SEQ ID NO: 4581271 - DNA, 25 bp, Homo sapien
gccatctgttctttggagattggtt

SEQ ID NO: 4581272 - DNA, 25 bp, Homo sapien
ctgccaacaactcctagtatataac

SEQ ID NO: 4581273 - DNA, 25 bp, Homo sapien
tctgttctttggagattggttttac

SEQ ID NO: 4581274 - DNA, 25 bp, Homo sapien
agcctacttcttggagcttcatttt

SEQ ID NO: 4581275 - DNA, 25 bp, Homo sapien
aacattagttatcctcctctataaa

SEQ ID NO: 4581276 - DNA, 25 bp, Homo sapien
aacaaaaatatagttccaggaacat

SEQ ID NO: 4581277 - DNA, 25 bp, Homo sapien
aatgtttctctagggagcaaaggag

SEQ ID NO: 4581278 - DNA, 25 bp, Homo sapien
aaaacggagctggtctttctgccca

SEQ ID NO: 4581279 - DNA, 25 bp, Homo sapien
tgggattagccatgacacaaagact

SEQ ID NO: 4581280 - DNA, 25 bp, Homo sapien
tgttttccctccaaaggcgatggca

SEQ ID NO: 4581281 - DNA, 25 bp, Homo sapien
aaaggtcttcgcatttaacagccag

SEQ ID NO: 4581282 - DNA, 25 bp, Homo sapien
tcttgggccctcagatagaccctgt

SEQ ID NO: 4581283 - DNA, 25 bp, Homo sapien
ccagtgtgggccctgtaagaagctt

SEQ ID NO: 4581284 - DNA, 25 bp, Homo sapien
tgtgtacccaagaccaagcaaagaa

SEQ ID NO: 4581285 - DNA, 25 bp, Homo sapien
gaaggtctatcatcatcagcagctc

SEQ ID NO: 4581286 - DNA, 25 bp, Homo sapien
cacagcaggtatgcagtaagtggct

SEQ ID NO: 4581287 - DNA, 25 bp, Homo sapien
cgcacagcaggtatgcagtaagtgg

SEQ ID NO: 4581288 - DNA, 25 bp, Homo sapien
tgatgtgatgtaaggcgcacagcag

SEQ ID NO: 4581289 - DNA, 25 bp, Homo sapien
tcagaacctgatgtgatgtaaggcg

SEQ ID NO: 4581290 - DNA, 25 bp, Homo sapien
tacatgcggctactaggcatttgaa

SEQ ID NO: 4581291 - DNA, 25 bp, Homo sapien
gcagtagctactatctacatgcggc

SEQ ID NO: 4581292 - DNA, 25 bp, Homo sapien
gatcttatatgatcaccacccagag

SEQ ID NO: 4581293 - DNA, 25 bp, Homo sapien
taaagcagagctgttcaatagaact

SEQ ID NO: 4581294 - DNA, 25 bp, Homo sapien
tctgatatattatgctgtctgaggg

SEQ ID NO: 4581295 - DNA, 25 bp, Homo sapien
gaaaagtccaataagctgtttgatg

SEQ ID NO: 4581296 - DNA, 25 bp, Homo sapien
ttatttccaagtacactagctagtg

SEQ ID NO: 4581297 - DNA, 25 bp, Homo sapien
tattaaagtattatctcccacagtg

SEQ ID NO: 4581298 - DNA, 25 bp, Homo sapien
cactatcttagttgaggcctccctt

SEQ ID NO: 4581299 - DNA, 25 bp, Homo sapien
caggcacctctgaagtaatttagct

SEQ ID NO: 4581300 - DNA, 25 bp, Homo sapien
cctgaaatgcatgacactggctaac

SEQ ID NO: 4581301 - DNA, 25 bp, Homo sapien
tcactgagcattcaaggaagacgag

SEQ ID NO: 4581302 - DNA, 25 bp, Homo sapien
gttgcactacaagggttcgggtcca

SEQ ID NO: 4581303 - DNA, 25 bp, Homo sapien
tcttgcttcccaacaacagttcttg

SEQ ID NO: 4581304 - DNA, 25 bp, Homo sapien
cagttcttggatcccgaggagaaaa

SEQ ID NO: 4581305 - DNA, 25 bp, Homo sapien
tccagttcaggtagggacaatgctg

SEQ ID NO: 4581306 - DNA, 25 bp, Homo sapien
ccagccgtggggtggtaatttaatg

SEQ ID NO: 4581307 - DNA, 25 bp, Homo sapien
aatgatcacactgccatcaagcctg

SEQ ID NO: 4581308 - DNA, 25 bp, Homo sapien
ttgacatttgatggtaatgttttcc

SEQ ID NO: 4581309 - DNA, 25 bp, Homo sapien
ccgtggggtggtaatttaatgatca

SEQ ID NO: 4581310 - DNA, 25 bp, Homo sapien
cagatgaatggagtactcagggcat

SEQ ID NO: 4581311 - DNA, 25 bp, Homo sapien
gatgaatggagtactcagggcatat

SEQ ID NO: 4581312 - DNA, 25 bp, Homo sapien
tcagatgaatggagtactcagggca

SEQ ID NO: 4581313 - DNA, 25 bp, Homo sapien
agatgaatggagtactcagggcata

SEQ ID NO: 4581314 - DNA, 25 bp, Homo sapien
taggctacttaagccaaagatccag

SEQ ID NO: 4581315 - DNA, 25 bp, Homo sapien
aaccttgttcagtgcagtaagatca

SEQ ID NO: 4581316 - DNA, 25 bp, Homo sapien
gagtgctacttacaaacagaaatgg

SEQ ID NO: 4581317 - DNA, 25 bp, Homo sapien
cattcaccagaatgcagtaggctac

SEQ ID NO: 4581318 - DNA, 25 bp, Homo sapien
gatggagaagaatgactcctcttct

SEQ ID NO: 4581319 - DNA, 25 bp, Homo sapien
gagcagggtcgcacctgtacatgaa

SEQ ID NO: 4581320 - DNA, 25 bp, Homo sapien
tgcctggtctgtcctagccttgctc

SEQ ID NO: 4581321 - DNA, 25 bp, Homo sapien
agtcctgtagtaatgcattctctgc

SEQ ID NO: 4581322 - DNA, 25 bp, Homo sapien
aacatcagcatctggaggaatggca

SEQ ID NO: 4581323 - DNA, 25 bp, Homo sapien
cctctgtgaaccagtgatggcgctg

SEQ ID NO: 4581324 - DNA, 25 bp, Homo sapien
tgtaaagagagatttgggccggact

SEQ ID NO: 4581325 - DNA, 25 bp, Homo sapien
cggactggcgtactcttaggtgtgc

SEQ ID NO: 4581326 - DNA, 25 bp, Homo sapien
gctgctgctgcccaccatctgagac

SEQ ID NO: 4581327 - DNA, 25 bp, Homo sapien
ggtgctgctgctgcccaccatctga

SEQ ID NO: 4581328 - DNA, 25 bp, Homo sapien
tgctgctgctgcccaccatctgaga

SEQ ID NO: 4581329 - DNA, 25 bp, Homo sapien
gtgctgctgctgcccaccatctgag

SEQ ID NO: 4581330 - DNA, 25 bp, Homo sapien
tgaagactgacctctgttgagacag

SEQ ID NO: 4581331 - DNA, 25 bp, Homo sapien
ttggaactccgagcataagttggct

SEQ ID NO: 4581332 - DNA, 25 bp, Homo sapien
tgagagttctccacttgttcccaga

SEQ ID NO: 4581333 - DNA, 25 bp, Homo sapien
ggaactatagcttctctgtggtgaa

SEQ ID NO: 4581334 - DNA, 25 bp, Homo sapien
cttggggctgttaacagggccctcg

SEQ ID NO: 4581335 - DNA, 25 bp, Homo sapien
gttaacagggccctcgaggtgctca

SEQ ID NO: 4581336 - DNA, 25 bp, Homo sapien
gctgttaacagggccctcgaggtgc

SEQ ID NO: 4581337 - DNA, 25 bp, Homo sapien
cagggccctcgaggtgctcactggc

SEQ ID NO: 4581338 - DNA, 25 bp, Homo sapien
cacgacagtatatggcttgcacaat

SEQ ID NO: 4581339 - DNA, 25 bp, Homo sapien
ttctaatcggagagcaaggactgct

SEQ ID NO: 4581340 - DNA, 25 bp, Homo sapien
tcttctgggataaactactggctgt

SEQ ID NO: 4581341 - DNA, 25 bp, Homo sapien
gcttgcccagcaacatctgtagagg

SEQ ID NO: 4581342 - DNA, 25 bp, Homo sapien
gcctgctatctcctttaacacttca

SEQ ID NO: 4581343 - DNA, 25 bp, Homo sapien
ttattgccataaggcttaggaacat

SEQ ID NO: 4581344 - DNA, 25 bp, Homo sapien
cacttcagttagtccattattgtta

SEQ ID NO: 4581345 - DNA, 25 bp, Homo sapien
ccattattgttatctgacatcttct

SEQ ID NO: 4581346 - DNA, 25 bp, Homo sapien
cactatcatagtgggcttcacagct

SEQ ID NO: 4581347 - DNA, 25 bp, Homo sapien
gaaattgcccgtgttcctgatgcgg

SEQ ID NO: 4581348 - DNA, 25 bp, Homo sapien
ttagccacaggaggccggaaattgc

SEQ ID NO: 4581349 - DNA, 25 bp, Homo sapien
cacagtgttcttggatgctaagctc

SEQ ID NO: 4581350 - DNA, 25 bp, Homo sapien
tcacttcccctatgtgttacagcag

SEQ ID NO: 4581351 - DNA, 25 bp, Homo sapien
gtgttacagcagctcttctaagaat

SEQ ID NO: 4581352 - DNA, 25 bp, Homo sapien
cctatgtgttacagcagctcttcta

SEQ ID NO: 4581353 - DNA, 25 bp, Homo sapien
tctgttagttttcacttcccctatg

SEQ ID NO: 4581354 - DNA, 25 bp, Homo sapien
ttaaagcagccattatctcctccat

SEQ ID NO: 4581355 - DNA, 25 bp, Homo sapien
atttttaaagcagccattatctcct

SEQ ID NO: 4581356 - DNA, 25 bp, Homo sapien
catttttaaagcagccattatctcc

SEQ ID NO: 4581357 - DNA, 25 bp, Homo sapien
ttttaaagcagccattatctcctcc

SEQ ID NO: 4581358 - DNA, 25 bp, Homo sapien
ttaattagatcgcatcacactacct

SEQ ID NO: 4581359 - DNA, 25 bp, Homo sapien
gtttaattagatcgcatcacactac

SEQ ID NO: 4581360 - DNA, 25 bp, Homo sapien
taattagatcgcatcacactacctg

SEQ ID NO: 4581361 - DNA, 25 bp, Homo sapien
tagtttaattagatcgcatcacact

SEQ ID NO: 4581362 - DNA, 25 bp, Homo sapien
cttggtacgtatgttaagaattgtg

SEQ ID NO: 4581363 - DNA, 25 bp, Homo sapien
tagaagaaccttgaatgcacattat

SEQ ID NO: 4581364 - DNA, 25 bp, Homo sapien
aaaatgcttacagtagttttagtca

SEQ ID NO: 4581365 - DNA, 25 bp, Homo sapien
aatactatctaatgacaaaaatgag

SEQ ID NO: 4581366 - DNA, 25 bp, Homo sapien
tgtctatttgaggaggattgccatc

SEQ ID NO: 4581367 - DNA, 25 bp, Homo sapien
gagggatcttcgaaaagttcatgga

SEQ ID NO: 4581368 - DNA, 25 bp, Homo sapien
tgtaacaaacacatttccctatggt

SEQ ID NO: 4581369 - DNA, 25 bp, Homo sapien
gttgcccctgcacctagccaatgat

SEQ ID NO: 4581370 - DNA, 25 bp, Homo sapien
tgcacagactgcacttagttcctgg

SEQ ID NO: 4581371 - DNA, 25 bp, Homo sapien
tagttcctggttgcaaatgagtgtg

SEQ ID NO: 4581372 - DNA, 25 bp, Homo sapien
tgattcactagaccagaaaggctat

SEQ ID NO: 4581373 - DNA, 25 bp, Homo sapien
ttttccatgtgtgggccattgctac

SEQ ID NO: 4581374 - DNA, 25 bp, Homo sapien
tagcaggtactctttagtcaggata

SEQ ID NO: 4581375 - DNA, 25 bp, Homo sapien
tagtgagggctattatacaagcaaa

SEQ ID NO: 4581376 - DNA, 25 bp, Homo sapien
tagtatcagttaccatatagcaggt

SEQ ID NO: 4581377 - DNA, 25 bp, Homo sapien
catactgtgatcataaggactttag

SEQ ID NO: 4581378 - DNA, 25 bp, Homo sapien
taaatgcctactataatgcagacag

SEQ ID NO: 4581379 - DNA, 25 bp, Homo sapien
tccactcagtgacaaggatgtttgt

SEQ ID NO: 4581380 - DNA, 25 bp, Homo sapien
tgcagacagtatactatccaagtgt

SEQ ID NO: 4581381 - DNA, 25 bp, Homo sapien
tacaaatgaaatgcctcacactgag

SEQ ID NO: 4581382 - DNA, 25 bp, Homo sapien
catatggaacaacaatgaagactgc

SEQ ID NO: 4581383 - DNA, 25 bp, Homo sapien
gactgtcaaccttgcttagaagagg

SEQ ID NO: 4581384 - DNA, 25 bp, Homo sapien
cagcacttacgggagatttccactg

SEQ ID NO: 4581385 - DNA, 25 bp, Homo sapien
tatcagctggagtccccagaattta

SEQ ID NO: 4581386 - DNA, 25 bp, Homo sapien
tcatttgtatggagagaggtgtttc

SEQ ID NO: 4581387 - DNA, 25 bp, Homo sapien
gctgcacctttcacgtctagtttgt

SEQ ID NO: 4581388 - DNA, 25 bp, Homo sapien
tctaatgtctttgcctctaggtcct

SEQ ID NO: 4581389 - DNA, 25 bp, Homo sapien
tagtttgttctggtggtctcctatc

SEQ ID NO: 4581390 - DNA, 25 bp, Homo sapien
agaagaaaacggaggcactttgaag

SEQ ID NO: 4581391 - DNA, 25 bp, Homo sapien
gcccagggttacatagttagaggaa

SEQ ID NO: 4581392 - DNA, 25 bp, Homo sapien
gagtttaggctttcaagtatcacac

SEQ ID NO: 4581393 - DNA, 25 bp, Homo sapien
tatttccccaaccacattattctga

SEQ ID NO: 4581394 - DNA, 25 bp, Homo sapien
gtactcaacagagatcaggtaccaa

SEQ ID NO: 4581395 - DNA, 25 bp, Homo sapien
gagactgtggagtactcaacagaga

SEQ ID NO: 4581396 - DNA, 25 bp, Homo sapien
agaaaaccattccaagagactgtgg

SEQ ID NO: 4581397 - DNA, 25 bp, Homo sapien
agcagccagtcaggacctacttccc

SEQ ID NO: 4581398 - DNA, 25 bp, Homo sapien
gtgtctggaaagacatcatgcaagt

SEQ ID NO: 4581399 - DNA, 25 bp, Homo sapien
ggaaagacatcatgcaagtgacagc

SEQ ID NO: 4581400 - DNA, 25 bp, Homo sapien
gtgacagcatttgagataagtcttt

SEQ ID NO: 4581401 - DNA, 25 bp, Homo sapien
tctggaaagacatcatgcaagtgac

SEQ ID NO: 4581402 - DNA, 25 bp, Homo sapien
agaaaaggtgttaatattagtggag

SEQ ID NO: 4581403 - DNA, 25 bp, Homo sapien
caatgtcccattacccagaaagaaa

SEQ ID NO: 4581404 - DNA, 25 bp, Homo sapien
ggtgttaatattagtggagtaccat

SEQ ID NO: 4581405 - DNA, 25 bp, Homo sapien
aaggaataaatcaaccaatgtccca

SEQ ID NO: 4581406 - DNA, 25 bp, Homo sapien
taagcatctggcgttgcccttgctt

SEQ ID NO: 4581407 - DNA, 25 bp, Homo sapien
ttataagcatctggcgttgcccttg

SEQ ID NO: 4581408 - DNA, 25 bp, Homo sapien
gcatctggcgttgcccttgcttgca

SEQ ID NO: 4581409 - DNA, 25 bp, Homo sapien
ataaattggtaccaaggtcacaggg

SEQ ID NO: 4581410 - DNA, 25 bp, Homo sapien
taattgccctatcgtttccgacttg

SEQ ID NO: 4581411 - DNA, 25 bp, Homo sapien
gcgtctggaagagcggcagacattc

SEQ ID NO: 4581412 - DNA, 25 bp, Homo sapien
taagatttaataattgccctatcgt

SEQ ID NO: 4581413 - DNA, 25 bp, Homo sapien
cagcttgcactgtgcgtctggaaga

SEQ ID NO: 4581414 - DNA, 25 bp, Homo sapien
tccaggaggctagacataaagaatc

SEQ ID NO: 4581415 - DNA, 25 bp, Homo sapien
caaactgatttgagaggctaccctt

SEQ ID NO: 4581416 - DNA, 25 bp, Homo sapien
caaacctaattacaaccagctggag

SEQ ID NO: 4581417 - DNA, 25 bp, Homo sapien
tctgtggtctgtgaacatggcgcct

SEQ ID NO: 4581418 - DNA, 25 bp, Homo sapien
ttgtttccatggcaactgcataaac

SEQ ID NO: 4581419 - DNA, 25 bp, Homo sapien
ttccatggcaactgcataaacattt

SEQ ID NO: 4581420 - DNA, 25 bp, Homo sapien
acattttcctcataaaacacagcca

SEQ ID NO: 4581421 - DNA, 25 bp, Homo sapien
ataaacattttcctcataaaacaca

SEQ ID NO: 4581422 - DNA, 25 bp, Homo sapien
taaccactgagtaattatatgggtc

SEQ ID NO: 4581423 - DNA, 25 bp, Homo sapien
caccattaagtgttacatcagctct

SEQ ID NO: 4581424 - DNA, 25 bp, Homo sapien
tcgagagattcttgggcctcaacat

SEQ ID NO: 4581425 - DNA, 25 bp, Homo sapien
gaattaatgcagtatctaaccactg

SEQ ID NO: 4581426 - DNA, 25 bp, Homo sapien
taaatctgaagcacttcattcattc

SEQ ID NO: 4581427 - DNA, 25 bp, Homo sapien
tctggtgacaaaggtggttttagca

SEQ ID NO: 4581428 - DNA, 25 bp, Homo sapien
gttttagcagctagcaaaacattcc

SEQ ID NO: 4581429 - DNA, 25 bp, Homo sapien
gctttgggtctttccaagatgaatg

SEQ ID NO: 4581430 - DNA, 25 bp, Homo sapien
gagtttactgaccttcattctgtga

SEQ ID NO: 4581431 - DNA, 25 bp, Homo sapien
gctcaagtgccacgatattggctca

SEQ ID NO: 4581432 - DNA, 25 bp, Homo sapien
tctttggactttagtagtgcgacta

SEQ ID NO: 4581433 - DNA, 25 bp, Homo sapien
gtagtgcgactattatatgtctaga

SEQ ID NO: 4581434 - DNA, 25 bp, Homo sapien
ttctaaccaagtaagcagcaatgag

SEQ ID NO: 4581435 - DNA, 25 bp, Homo sapien
gctctcacagagtttacgtttacct

SEQ ID NO: 4581436 - DNA, 25 bp, Homo sapien
tatttatgcatccttctagtcaacc

SEQ ID NO: 4581437 - DNA, 25 bp, Homo sapien
gcagtgttctaagtagtagagaaac

SEQ ID NO: 4581438 - DNA, 25 bp, Homo sapien
tcagagaaacgcaaaactaaaccgc

SEQ ID NO: 4581439 - DNA, 25 bp, Homo sapien
caaagattctgtatccagaatctac

SEQ ID NO: 4581440 - DNA, 25 bp, Homo sapien
acgcaaaactaaaccgcaatgagat

SEQ ID NO: 4581441 - DNA, 25 bp, Homo sapien
tctgacaaagattctgtatccagaa

SEQ ID NO: 4581442 - DNA, 25 bp, Homo sapien
ttaaatcaactcatagaccttatta

SEQ ID NO: 4581443 - DNA, 25 bp, Homo sapien
actcatagaccttattacttgccac

SEQ ID NO: 4581444 - DNA, 25 bp, Homo sapien
tcaactcatagaccttattacttgc

SEQ ID NO: 4581445 - DNA, 25 bp, Homo sapien
taaatcaactcatagaccttattac

SEQ ID NO: 4581446 - DNA, 25 bp, Homo sapien
ttatttatatagctgtagtcattac

SEQ ID NO: 4581447 - DNA, 25 bp, Homo sapien
tcattgaaggatgtaattagtctca

SEQ ID NO: 4581448 - DNA, 25 bp, Homo sapien
gctgtagtcattactactttcatat

SEQ ID NO: 4581449 - DNA, 25 bp, Homo sapien
aaatcattgaattctcactttctca

SEQ ID NO: 4581450 - DNA, 25 bp, Homo sapien
gagaattactcgaacccggaaggca

SEQ ID NO: 4581451 - DNA, 25 bp, Homo sapien
agaattactcgaacccggaaggcag

SEQ ID NO: 4581452 - DNA, 25 bp, Homo sapien
aggttgcagtgagccaagatcacgc

SEQ ID NO: 4581453 - DNA, 25 bp, Homo sapien
tgagccaagatcacgccaccgcact

SEQ ID NO: 4581454 - DNA, 25 bp, Homo sapien
gcggtctattttgctgatcttttca

SEQ ID NO: 4581455 - DNA, 25 bp, Homo sapien
tagcggtctattttgctgatctttt

SEQ ID NO: 4581456 - DNA, 25 bp, Homo sapien
tggctagcggtctattttgctgatc

SEQ ID NO: 4581457 - DNA, 25 bp, Homo sapien
tctggctagcggtctattttgctga

SEQ ID NO: 4581458 - DNA, 25 bp, Homo sapien
ccatactactatggcaaggtttaaa

SEQ ID NO: 4581459 - DNA, 25 bp, Homo sapien
tttgcattagttgcaaatagtttga

SEQ ID NO: 4581460 - DNA, 25 bp, Homo sapien
agagcatgtcttattcacctttatc

SEQ ID NO: 4581461 - DNA, 25 bp, Homo sapien
aagacaggagattaataaaagagat

SEQ ID NO: 4581462 - DNA, 25 bp, Homo sapien
ttccttacaaatggatctcaagtat

SEQ ID NO: 4581463 - DNA, 25 bp, Homo sapien
ctttccttacaaatggatctcaagt

SEQ ID NO: 4581464 - DNA, 25 bp, Homo sapien
tttccttacaaatggatctcaagta

SEQ ID NO: 4581465 - DNA, 25 bp, Homo sapien
atatagcttcatcagctaaagcttc

SEQ ID NO: 4581466 - DNA, 25 bp, Homo sapien
catatagcttcatcagctaaagctt

SEQ ID NO: 4581467 - DNA, 25 bp, Homo sapien
taaagcttcaacagtgaatatttct

SEQ ID NO: 4581468 - DNA, 25 bp, Homo sapien
ttccccaaagcatatgtcacttcag

SEQ ID NO: 4581469 - DNA, 25 bp, Homo sapien
cttggaggaattcaatcacctcatc

SEQ ID NO: 4581470 - DNA, 25 bp, Homo sapien
caatagtactggtcaagcagatgaa

SEQ ID NO: 4581471 - DNA, 25 bp, Homo sapien
cacctcatcaatagtactggtcaag

SEQ ID NO: 4581472 - DNA, 25 bp, Homo sapien
gattatcgtggccttacagtaagcc

SEQ ID NO: 4581473 - DNA, 25 bp, Homo sapien
gggactgtgtcaagtctatagatca

SEQ ID NO: 4581474 - DNA, 25 bp, Homo sapien
tgttgacgtctacaaaatagcttgc

SEQ ID NO: 4581475 - DNA, 25 bp, Homo sapien
agtgtgagtactacaactttgccaa

SEQ ID NO: 4581476 - DNA, 25 bp, Homo sapien
tggacaaatcacaaaagagggacat

SEQ ID NO: 4581477 - DNA, 25 bp, Homo sapien
aaaaacattggacaaatcacaaaag

SEQ ID NO: 4581478 - DNA, 25 bp, Homo sapien
ataaagattatcagagaaatcatca

SEQ ID NO: 4581479 - DNA, 25 bp, Homo sapien
gaagaataagaagacctgaaaacta

SEQ ID NO: 4581480 - DNA, 25 bp, Homo sapien
gcagcacaaatgagttgaatcatga

SEQ ID NO: 4581481 - DNA, 25 bp, Homo sapien
gcagcagcacaaatgagttgaatca

SEQ ID NO: 4581482 - DNA, 25 bp, Homo sapien
agcagcacaaatgagttgaatcatg

SEQ ID NO: 4581483 - DNA, 25 bp, Homo sapien
cagcagcacaaatgagttgaatcat

SEQ ID NO: 4581484 - DNA, 25 bp, Homo sapien
ttaacagactagctatggaacagca

SEQ ID NO: 4581485 - DNA, 25 bp, Homo sapien
ttaaccttcaggtcagaactaaatc

SEQ ID NO: 4581486 - DNA, 25 bp, Homo sapien
gaaccaatttagtaaggctctacaa

SEQ ID NO: 4581487 - DNA, 25 bp, Homo sapien
aaccatgcatttctatctaagctaa

SEQ ID NO: 4581488 - DNA, 25 bp, Homo sapien
gttaagaggctcaatatcatatatt

SEQ ID NO: 4581489 - DNA, 25 bp, Homo sapien
gatagtttggcaacttctcacaaag

SEQ ID NO: 4581490 - DNA, 25 bp, Homo sapien
atgatgcagtaacttcagaagatag

SEQ ID NO: 4581491 - DNA, 25 bp, Homo sapien
gaacttagtctcactgtatgatcca

SEQ ID NO: 4581492 - DNA, 25 bp, Homo sapien
tcactgcagctgcaatttccgggct

SEQ ID NO: 4581493 - DNA, 25 bp, Homo sapien
acacctggcttgcatatgtcttttt

SEQ ID NO: 4581494 - DNA, 25 bp, Homo sapien
ccacacctggcttgcatatgtcttt

SEQ ID NO: 4581495 - DNA, 25 bp, Homo sapien
tgcagctgcaatttccgggctcaag

SEQ ID NO: 4581496 - DNA, 25 bp, Homo sapien
cctgtgcatttggtgttataactaa

SEQ ID NO: 4581497 - DNA, 25 bp, Homo sapien
tagttttaccagcacgattcgttga

SEQ ID NO: 4581498 - DNA, 25 bp, Homo sapien
tataagcaaggatttagttcttggc

SEQ ID NO: 4581499 - DNA, 25 bp, Homo sapien
tgtatgtggaataaggtaggactcc

SEQ ID NO: 4581500 - DNA, 25 bp, Homo sapien
ggatcttagagcaaaaccttacagt

SEQ ID NO: 4581501 - DNA, 25 bp, Homo sapien
gttttccaccattgattaagatgtt

SEQ ID NO: 4581502 - DNA, 25 bp, Homo sapien
caatacgatggtgaatataagtggt

SEQ ID NO: 4581503 - DNA, 25 bp, Homo sapien
tgccttgtccctggatcttagagca

SEQ ID NO: 4581504 - DNA, 25 bp, Homo sapien
aaatagatggaaacagtcacatctc

SEQ ID NO: 4581505 - DNA, 25 bp, Homo sapien
tagatggaaacagtcacatctcaag

SEQ ID NO: 4581506 - DNA, 25 bp, Homo sapien
gatggaaacagtcacatctcaagag

SEQ ID NO: 4581507 - DNA, 25 bp, Homo sapien
acatctcaagaggtttttcccttct

SEQ ID NO: 4581508 - DNA, 25 bp, Homo sapien
tctgagtgtcacgaagaaaatatac

SEQ ID NO: 4581509 - DNA, 25 bp, Homo sapien
ggagaggagccaactgaacaatatg

SEQ ID NO: 4581510 - DNA, 25 bp, Homo sapien
gaacaatatggtatctaaaaaacag

SEQ ID NO: 4581511 - DNA, 25 bp, Homo sapien
aaaaggatcaagcattataggaaga

SEQ ID NO: 4581512 - DNA, 25 bp, Homo sapien
aaccacaaagaaatgtctacagcat

SEQ ID NO: 4581513 - DNA, 25 bp, Homo sapien
ctacagcataagttccagtttgggc

SEQ ID NO: 4581514 - DNA, 25 bp, Homo sapien
acagcataagttccagtttgggcag

SEQ ID NO: 4581515 - DNA, 25 bp, Homo sapien
aatgtctacagcataagttccagtt

SEQ ID NO: 4581516 - DNA, 25 bp, Homo sapien
aacctgtctggcaagtttctactca

SEQ ID NO: 4581517 - DNA, 25 bp, Homo sapien
gatctctgaatccactatgctctct

SEQ ID NO: 4581518 - DNA, 25 bp, Homo sapien
tatgctctcttatgcccctatgcct

SEQ ID NO: 4581519 - DNA, 25 bp, Homo sapien
caatcttcccctatgcacgtttata

SEQ ID NO: 4581520 - DNA, 25 bp, Homo sapien
cactgcctagcttatcaggcttcta

SEQ ID NO: 4581521 - DNA, 25 bp, Homo sapien
tcaggcttctaattctttggcaaaa

SEQ ID NO: 4581522 - DNA, 25 bp, Homo sapien
agcacaggacactgcctagcttatc

SEQ ID NO: 4581523 - DNA, 25 bp, Homo sapien
gccatcttaactggttggtccctat

SEQ ID NO: 4581524 - DNA, 25 bp, Homo sapien
caggtctatcaatggcccagggtca

SEQ ID NO: 4581525 - DNA, 25 bp, Homo sapien
tctatcaatggcccagggtcaatgg

SEQ ID NO: 4581526 - DNA, 25 bp, Homo sapien
aggtctatcaatggcccagggtcaa

SEQ ID NO: 4581527 - DNA, 25 bp, Homo sapien
atcaatggcccagggtcaatgggca

SEQ ID NO: 4581528 - DNA, 25 bp, Homo sapien
tgtcaaaactatgcagacaatgatc

SEQ ID NO: 4581529 - DNA, 25 bp, Homo sapien
tccagatactaaagtactagaaaag

SEQ ID NO: 4581530 - DNA, 25 bp, Homo sapien
aatgatcagtgatcagactgtcaag

SEQ ID NO: 4581531 - DNA, 25 bp, Homo sapien
aaatcttcaatgtgatactttatag

SEQ ID NO: 4581532 - DNA, 25 bp, Homo sapien
gaagttgagtaatgacagaagccta

SEQ ID NO: 4581533 - DNA, 25 bp, Homo sapien
tggccctccaccagatccatttagg

SEQ ID NO: 4581534 - DNA, 25 bp, Homo sapien
tatttatactacttggaacccatgt

SEQ ID NO: 4581535 - DNA, 25 bp, Homo sapien
gattcagcaactcaggtgaacctaa

SEQ ID NO: 4581536 - DNA, 25 bp, Homo sapien
ccgactgtgaaagggatctgaacat

SEQ ID NO: 4581537 - DNA, 25 bp, Homo sapien
atgttcagatccctttcacagtcgg

SEQ ID NO: 4581538 - DNA, 25 bp, Homo sapien
ctttcaactgctaatattctcttca

SEQ ID NO: 4581539 - DNA, 25 bp, Homo sapien
tacatatagctatcacttagaacat

SEQ ID NO: 4581540 - DNA, 25 bp, Homo sapien
tccgtgtatcaaacaatacatgcaa

SEQ ID NO: 4581541 - DNA, 25 bp, Homo sapien
ctctgaaccatatctacatatagct

SEQ ID NO: 4581542 - DNA, 25 bp, Homo sapien
gacttgaaacgaacatggtttggac

SEQ ID NO: 4581543 - DNA, 25 bp, Homo sapien
caaaattgttgagttagtgttagga

SEQ ID NO: 4581544 - DNA, 25 bp, Homo sapien
cagggtgtgtctgaatatgttattt

SEQ ID NO: 4581545 - DNA, 25 bp, Homo sapien
ctatcttatcctctgacttgaaacg

SEQ ID NO: 4581546 - DNA, 25 bp, Homo sapien
cggcaagtccccatcgaaggaggaa

SEQ ID NO: 4581547 - DNA, 25 bp, Homo sapien
aaaacgaaatcaagctcccagacgg

SEQ ID NO: 4581548 - DNA, 25 bp, Homo sapien
agtaacatttaacaggccagaggca

SEQ ID NO: 4581549 - DNA, 25 bp, Homo sapien
tcccagacggatggtgcatgcgacg

SEQ ID NO: 4581550 - DNA, 25 bp, Homo sapien
cacagacggcgcgtgagtagaagac

SEQ ID NO: 4581551 - DNA, 25 bp, Homo sapien
cctggtcccacagacggcgcgtgag

SEQ ID NO: 4581552 - DNA, 25 bp, Homo sapien
gcgcgtgagtagaagacaaccgagc

SEQ ID NO: 4581553 - DNA, 25 bp, Homo sapien
gtgagtagaagacaaccgagcggac

SEQ ID NO: 4581554 - DNA, 25 bp, Homo sapien
gccgcggcgaccaccatcaccgtcc

SEQ ID NO: 4581555 - DNA, 25 bp, Homo sapien
ctgttacctgaggggcgcacacgcc

SEQ ID NO: 4581556 - DNA, 25 bp, Homo sapien
cccttcctggtgaccacggccgccg

SEQ ID NO: 4581557 - DNA, 25 bp, Homo sapien
cgaccaccatcaccgtccgtcccgt

SEQ ID NO: 4581558 - DNA, 25 bp, Homo sapien
tgactaacaacaactaactaactac

SEQ ID NO: 4581559 - DNA, 25 bp, Homo sapien
acactgactaacaacaactaactaa

SEQ ID NO: 4581560 - DNA, 25 bp, Homo sapien
cactgactaacaacaactaactaac

SEQ ID NO: 4581561 - DNA, 25 bp, Homo sapien
tcgccgcggccgagtccaccgcgcg

SEQ ID NO: 4581562 - DNA, 25 bp, Homo sapien
aagacacataatcttcaaaggaaca

SEQ ID NO: 4581563 - DNA, 25 bp, Homo sapien
aacaattagactgacatctgacttg

SEQ ID NO: 4581564 - DNA, 25 bp, Homo sapien
aaggaacaattagactgacatctga

SEQ ID NO: 4581565 - DNA, 25 bp, Homo sapien
gacacataatcttcaaaggaacaat

SEQ ID NO: 4581566 - DNA, 25 bp, Homo sapien
gcctttgacctcactactcagatga

SEQ ID NO: 4581567 - DNA, 25 bp, Homo sapien
ctccaagacttttctaaaggctgct

SEQ ID NO: 4581568 - DNA, 25 bp, Homo sapien
tccaggcattagatagaaagcattg

SEQ ID NO: 4581569 - DNA, 25 bp, Homo sapien
acctcgttgatatccgcctttgacc

SEQ ID NO: 4581570 - DNA, 25 bp, Homo sapien
cacctttcttgtagctgagtagtac

SEQ ID NO: 4581571 - DNA, 25 bp, Homo sapien
cattgttgctgaactggaacagggc

SEQ ID NO: 4581572 - DNA, 25 bp, Homo sapien
ctcccattgttgctgaactggaaca

SEQ ID NO: 4581573 - DNA, 25 bp, Homo sapien
tgttgctgaactggaacagggccat

SEQ ID NO: 4581574 - DNA, 25 bp, Homo sapien
ccattgttgctgaactggaacaggg

SEQ ID NO: 4581575 - DNA, 25 bp, Homo sapien
taggtgacccggatgctgacatctg

SEQ ID NO: 4581576 - DNA, 25 bp, Homo sapien
ctaggtgacccggatgctgacatct

SEQ ID NO: 4581577 - DNA, 25 bp, Homo sapien
aggtgacccggatgctgacatctgc

SEQ ID NO: 4581578 - DNA, 25 bp, Homo sapien
ggtgacccggatgctgacatctgct

SEQ ID NO: 4581579 - DNA, 25 bp, Homo sapien
tgtctatggcagaaggacatccaga

SEQ ID NO: 4581580 - DNA, 25 bp, Homo sapien
tgaagttacaggctagcacaatacc

SEQ ID NO: 4581581 - DNA, 25 bp, Homo sapien
tctgactctagatgggacacttgac

SEQ ID NO: 4581582 - DNA, 25 bp, Homo sapien
gaaaaggccataacatggtccagga

SEQ ID NO: 4581583 - DNA, 25 bp, Homo sapien
gggagctttgcagccgtaaagagga

SEQ ID NO: 4581584 - DNA, 25 bp, Homo sapien
atgagtctgccacatgagatttctg

SEQ ID NO: 4581585 - DNA, 25 bp, Homo sapien
cagccgtaaagaggatgctaaacat

SEQ ID NO: 4581586 - DNA, 25 bp, Homo sapien
tgagtctgccacatgagatttctgc

SEQ ID NO: 4581587 - DNA, 25 bp, Homo sapien
tacatgcaaggagcaagcagctgac

SEQ ID NO: 4581588 - DNA, 25 bp, Homo sapien
gtacatgcaaggagcaagcagctga

SEQ ID NO: 4581589 - DNA, 25 bp, Homo sapien
catgcaaggagcaagcagctgactc

SEQ ID NO: 4581590 - DNA, 25 bp, Homo sapien
gcaaggagcaagcagctgactccag

SEQ ID NO: 4581591 - DNA, 25 bp, Homo sapien
tgtgtaaagttgtgtccgcccctac

SEQ ID NO: 4581592 - DNA, 25 bp, Homo sapien
aaagagaagtgtcatccccccttat

SEQ ID NO: 4581593 - DNA, 25 bp, Homo sapien
catctctgttgtaatggctgcctca

SEQ ID NO: 4581594 - DNA, 25 bp, Homo sapien
tgctgggatgcatgtcctgaccctc

SEQ ID NO: 4581595 - DNA, 25 bp, Homo sapien
ggatgctgcctcacgtcctgaacct

SEQ ID NO: 4581596 - DNA, 25 bp, Homo sapien
cacgaatggtaggtggctgtcctgc

SEQ ID NO: 4581597 - DNA, 25 bp, Homo sapien
cctgaacctcgccacaaattcctgc

SEQ ID NO: 4581598 - DNA, 25 bp, Homo sapien
agacaggatgctgcctcacgtcctg

SEQ ID NO: 4581599 - DNA, 25 bp, Homo sapien
cctttggaagatgccggagcctcag

SEQ ID NO: 4581600 - DNA, 25 bp, Homo sapien
gcttctgcgagaaaatgtggacatt

SEQ ID NO: 4581601 - DNA, 25 bp, Homo sapien
tgcatgcagctttcagaagtctagg

SEQ ID NO: 4581602 - DNA, 25 bp, Homo sapien
tttggccaagggaagtaccgattgc

SEQ ID NO: 4581603 - DNA, 25 bp, Homo sapien
ttgcacatacctttggtatttctga

SEQ ID NO: 4581604 - DNA, 25 bp, Homo sapien
cactgcaatggtgggaaagaacctg

SEQ ID NO: 4581605 - DNA, 25 bp, Homo sapien
gatccctggccttatttcgcaagag

SEQ ID NO: 4581606 - DNA, 25 bp, Homo sapien
tgtatgcgtgctcactcgggtgcca

SEQ ID NO: 4581607 - DNA, 25 bp, Homo sapien
caagactcagatgtgttggccgcct

SEQ ID NO: 4581608 - DNA, 25 bp, Homo sapien
cagaaagacttcattaccggatcct

SEQ ID NO: 4581609 - DNA, 25 bp, Homo sapien
gccggcactttcttctccctgcgct

SEQ ID NO: 4581610 - DNA, 25 bp, Homo sapien
gagctgctgccggcactttcttctc

SEQ ID NO: 4581611 - DNA, 25 bp, Homo sapien
ttcattaccggatcctcagccctga

SEQ ID NO: 4581612 - DNA, 25 bp, Homo sapien
gctcaggtagccgaagaagttctgc

SEQ ID NO: 4581613 - DNA, 25 bp, Homo sapien
gtagctcaggtagccgaagaagttc

SEQ ID NO: 4581614 - DNA, 25 bp, Homo sapien
tgtagctcaggtagccgaagaagtt

SEQ ID NO: 4581615 - DNA, 25 bp, Homo sapien
tcaggtagccgaagaagttctgcat

SEQ ID NO: 4581616 - DNA, 25 bp, Homo sapien
gcaggtggaccaatgttatattctt

SEQ ID NO: 4581617 - DNA, 25 bp, Homo sapien
acagagcaggtggaccaatgttata

SEQ ID NO: 4581618 - DNA, 25 bp, Homo sapien
gtgggtggcgtatgtctccaaatgc

SEQ ID NO: 4581619 - DNA, 25 bp, Homo sapien
agcagggtgcaagggcctatcccat

SEQ ID NO: 4581620 - DNA, 25 bp, Homo sapien
agtttctacagtactctgaggctcc

SEQ ID NO: 4581621 - DNA, 25 bp, Homo sapien
tttctacagtactctgaggctccat

SEQ ID NO: 4581622 - DNA, 25 bp, Homo sapien
tctacagtactctgaggctccatca

SEQ ID NO: 4581623 - DNA, 25 bp, Homo sapien
tacagtactctgaggctccatcatc

SEQ ID NO: 4581624 - DNA, 25 bp, Homo sapien
gaacacctgtttggacacagaatcc

SEQ ID NO: 4581625 - DNA, 25 bp, Homo sapien
cactgaacaggggatgtgaacacct

SEQ ID NO: 4581626 - DNA, 25 bp, Homo sapien
cccccatgtgaataggaggaagaag

SEQ ID NO: 4581627 - DNA, 25 bp, Homo sapien
tcctggactggccttgatcaaacgc

SEQ ID NO: 4581628 - DNA, 25 bp, Homo sapien
caaggtcgtgtagggacagcatgct

SEQ ID NO: 4581629 - DNA, 25 bp, Homo sapien
tccaggttcgaggtaaagggcctca

SEQ ID NO: 4581630 - DNA, 25 bp, Homo sapien
cagcaatgcatgagttgggacgtcc

SEQ ID NO: 4581631 - DNA, 25 bp, Homo sapien
catgctgagcccgatggccttgatc

SEQ ID NO: 4581632 - DNA, 25 bp, Homo sapien
gcttctccgcatgttcaagaaatac

SEQ ID NO: 4581633 - DNA, 25 bp, Homo sapien
cctgcttctccgcatgttcaagaaa

SEQ ID NO: 4581634 - DNA, 25 bp, Homo sapien
acctgcttctccgcatgttcaagaa

SEQ ID NO: 4581635 - DNA, 25 bp, Homo sapien
tgcttctccgcatgttcaagaaata

SEQ ID NO: 4581636 - DNA, 25 bp, Homo sapien
ggtctttctggagtacgattggccc

SEQ ID NO: 4581637 - DNA, 25 bp, Homo sapien
tgaccagtctcagggacgtgtgtcc

SEQ ID NO: 4581638 - DNA, 25 bp, Homo sapien
aacaatctggcgtagaagtgggaag

SEQ ID NO: 4581639 - DNA, 25 bp, Homo sapien
caggagaacaatctggcgtagaagt

SEQ ID NO: 4581640 - DNA, 25 bp, Homo sapien
tctgccgggcttccacagcgttgtg

SEQ ID NO: 4581641 - DNA, 25 bp, Homo sapien
ggcttccacagcgttgtggtttcca

SEQ ID NO: 4581642 - DNA, 25 bp, Homo sapien
tccacagcgttgtggtttccacttg

SEQ ID NO: 4581643 - DNA, 25 bp, Homo sapien
cagcgttgtggtttccacttggaag

SEQ ID NO: 4581644 - DNA, 25 bp, Homo sapien
agatctctagctccaacatcctgtg

SEQ ID NO: 4581645 - DNA, 25 bp, Homo sapien
gatctctagctccaacatcctgtgt

SEQ ID NO: 4581646 - DNA, 25 bp, Homo sapien
tctctagctccaacatcctgtgtga

SEQ ID NO: 4581647 - DNA, 25 bp, Homo sapien
tcagatctctagctccaacatcctg

SEQ ID NO: 4581648 - DNA, 25 bp, Homo sapien
atggccattgccatgatcttgtcca

SEQ ID NO: 4581649 - DNA, 25 bp, Homo sapien
tcttgtccacgggtccactttcagc

SEQ ID NO: 4581650 - DNA, 25 bp, Homo sapien
ttgtccacgggtccactttcagcag

SEQ ID NO: 4581651 - DNA, 25 bp, Homo sapien
atgatcttgtccacgggtccacttt

SEQ ID NO: 4581652 - DNA, 25 bp, Homo sapien
tgtccttgagccataatctgagcca

SEQ ID NO: 4581653 - DNA, 25 bp, Homo sapien
tctgagccattctctaggataagga

SEQ ID NO: 4581654 - DNA, 25 bp, Homo sapien
gatcctctcacttctgatgtccttg

SEQ ID NO: 4581655 - DNA, 25 bp, Homo sapien
ctgttccagaagaatagtattccct

SEQ ID NO: 4581656 - DNA, 25 bp, Homo sapien
ttagaatcggcttagcaaccccaca

SEQ ID NO: 4581657 - DNA, 25 bp, Homo sapien
gcttaaagcacaagatgtctggcaa

SEQ ID NO: 4581658 - DNA, 25 bp, Homo sapien
tagagactattttgctgcagtcgaa

SEQ ID NO: 4581659 - DNA, 25 bp, Homo sapien
ccctggaacctggaagcttaaagca

SEQ ID NO: 4581660 - DNA, 25 bp, Homo sapien
atttcacagccgtgtcctccacaca

SEQ ID NO: 4581661 - DNA, 25 bp, Homo sapien
cacacagatagaagggctggaacat

SEQ ID NO: 4581662 - DNA, 25 bp, Homo sapien
ctccacacagatagaagggctggaa

SEQ ID NO: 4581663 - DNA, 25 bp, Homo sapien
gtcctccacacagatagaagggctg

SEQ ID NO: 4581664 - DNA, 25 bp, Homo sapien
atcagcatgcaaggagctaggcggc

SEQ ID NO: 4581665 - DNA, 25 bp, Homo sapien
tgctacagataagacagccaggacg

SEQ ID NO: 4581666 - DNA, 25 bp, Homo sapien
agaaggcactgcattcgaccctggt

SEQ ID NO: 4581667 - DNA, 25 bp, Homo sapien
agccagcttgtagccctgccattca

SEQ ID NO: 4581668 - DNA, 25 bp, Homo sapien
ctgtgagccagaccacatgccctgc

SEQ ID NO: 4581669 - DNA, 25 bp, Homo sapien
ccagctggaggctcttaggtaacac

SEQ ID NO: 4581670 - DNA, 25 bp, Homo sapien
cagtccaaggaaacaggactaccca

SEQ ID NO: 4581671 - DNA, 25 bp, Homo sapien
caaggaaacaggactacccagctgg

SEQ ID NO: 4581672 - DNA, 25 bp, Homo sapien
gaggctcttaggtaacaccttcctg

SEQ ID NO: 4581673 - DNA, 25 bp, Homo sapien
ctggagagcaggtgacagtgcccat

SEQ ID NO: 4581674 - DNA, 25 bp, Homo sapien
ttctaccacccaagccaggagggct

SEQ ID NO: 4581675 - DNA, 25 bp, Homo sapien
cagctccacccagtttctaccaccc

SEQ ID NO: 4581676 - DNA, 25 bp, Homo sapien
ccctggagagcaggtgacagtgccc

SEQ ID NO: 4581677 - DNA, 25 bp, Homo sapien
ctggtgtgagctggggtccactgcc

SEQ ID NO: 4581678 - DNA, 25 bp, Homo sapien
tgagctggggtccactgccagcctc

SEQ ID NO: 4581679 - DNA, 25 bp, Homo sapien
gagctggggtccactgccagcctct

SEQ ID NO: 4581680 - DNA, 25 bp, Homo sapien
gtgtgagctggggtccactgccagc

SEQ ID NO: 4581681 - DNA, 25 bp, Homo sapien
tgtcccgggatcaggggtcgcctac

SEQ ID NO: 4581682 - DNA, 25 bp, Homo sapien
tcactggggctccaactgccaaggg

SEQ ID NO: 4581683 - DNA, 25 bp, Homo sapien
acttcctcgcagctgaagtccagtg

SEQ ID NO: 4581684 - DNA, 25 bp, Homo sapien
caagggaatggcagctgtcccggga

SEQ ID NO: 4581685 - DNA, 25 bp, Homo sapien
gcaatgacaggacagccttgtatgt

SEQ ID NO: 4581686 - DNA, 25 bp, Homo sapien
acaggacagccttgtatgttgggag

SEQ ID NO: 4581687 - DNA, 25 bp, Homo sapien
tgacaggacagccttgtatgttggg

SEQ ID NO: 4581688 - DNA, 25 bp, Homo sapien
ctgcaatgacaggacagccttgtat

SEQ ID NO: 4581689 - DNA, 25 bp, Homo sapien
cagacttctccacgaagccctttga

SEQ ID NO: 4581690 - DNA, 25 bp, Homo sapien
cccttggtgacagcagttttggact

SEQ ID NO: 4581691 - DNA, 25 bp, Homo sapien
gtgacagcagttttggacttgggca

SEQ ID NO: 4581692 - DNA, 25 bp, Homo sapien
agacttctccacgaagccctttgac

SEQ ID NO: 4581693 - DNA, 25 bp, Homo sapien
cagacatgcccagaccccgcggggc

SEQ ID NO: 4581694 - DNA, 25 bp, Homo sapien
catgcccagaccccgcggggcagaa

SEQ ID NO: 4581695 - DNA, 25 bp, Homo sapien
gacatgcccagaccccgcggggcag

SEQ ID NO: 4581696 - DNA, 25 bp, Homo sapien
agacatgcccagaccccgcggggca

SEQ ID NO: 4581697 - DNA, 25 bp, Homo sapien
agccatcgtggggaaccagttgagc

SEQ ID NO: 4581698 - DNA, 25 bp, Homo sapien
ccgccagccatcgtggggaaccagt

SEQ ID NO: 4581699 - DNA, 25 bp, Homo sapien
tcgtggggaaccagttgagcctgct

SEQ ID NO: 4581700 - DNA, 25 bp, Homo sapien
catcgtggggaaccagttgagcctg

SEQ ID NO: 4581701 - DNA, 25 bp, Homo sapien
ggtcacagctcccatagcgggtttc

SEQ ID NO: 4581702 - DNA, 25 bp, Homo sapien
gggcctctcgtcttgagccttctgc

SEQ ID NO: 4581703 - DNA, 25 bp, Homo sapien
ttcttgatcttgggtgctttcagct

SEQ ID NO: 4581704 - DNA, 25 bp, Homo sapien
tcacaggggcctctcgtcttgagcc

SEQ ID NO: 4581705 - DNA, 25 bp, Homo sapien
gctggcgtcggcctgtgagtataaa

SEQ ID NO: 4581706 - DNA, 25 bp, Homo sapien
ggcggcccgcgagcaaggctggcgt

SEQ ID NO: 4581707 - DNA, 25 bp, Homo sapien
tgagtataaaagtgacaagaggtgc

SEQ ID NO: 4581708 - DNA, 25 bp, Homo sapien
ttatgtctgtacatcgggcggcccg

SEQ ID NO: 4581709 - DNA, 25 bp, Homo sapien
taaagagcatttggtgaaccacagg

SEQ ID NO: 4581710 - DNA, 25 bp, Homo sapien
gagcatttggtgaaccacagggcct

SEQ ID NO: 4581711 - DNA, 25 bp, Homo sapien
ttgttactgtcgctgtcatccaggc

SEQ ID NO: 4581712 - DNA, 25 bp, Homo sapien
aagagcatttggtgaaccacagggc

SEQ ID NO: 4581713 - DNA, 25 bp, Homo sapien
caatcaggacgtcaaaagtttgcat

SEQ ID NO: 4581714 - DNA, 25 bp, Homo sapien
ccatttgtacagatgtggagactga

SEQ ID NO: 4581715 - DNA, 25 bp, Homo sapien
tgttttcctgagtgatccctcccca

SEQ ID NO: 4581716 - DNA, 25 bp, Homo sapien
ttgcattccgactagctataggaaa

SEQ ID NO: 4581717 - DNA, 25 bp, Homo sapien
ttcataaaaatccataattattgaa

SEQ ID NO: 4581718 - DNA, 25 bp, Homo sapien
aaatccataattattgaaacccaag

SEQ ID NO: 4581719 - DNA, 25 bp, Homo sapien
tttcaagttttcataaaaatccata

SEQ ID NO: 4581720 - DNA, 25 bp, Homo sapien
tcaagttttcataaaaatccataat

SEQ ID NO: 4581721 - DNA, 25 bp, Homo sapien
ggttcgtcggctttcaactccagtc

SEQ ID NO: 4581722 - DNA, 25 bp, Homo sapien
cagtctgtcaatgcccctgtgtagg

SEQ ID NO: 4581723 - DNA, 25 bp, Homo sapien
gaaagagaacgtgtgtagaagggta

SEQ ID NO: 4581724 - DNA, 25 bp, Homo sapien
actctgccgcgtgtcggttcgtcgg

SEQ ID NO: 4581725 - DNA, 25 bp, Homo sapien
tgggcagtagcacatcagggaagtc

SEQ ID NO: 4581726 - DNA, 25 bp, Homo sapien
cattgatgttgaggtgccggagcct

SEQ ID NO: 4581727 - DNA, 25 bp, Homo sapien
caggttgcatttctccagcgtcagc

SEQ ID NO: 4581728 - DNA, 25 bp, Homo sapien
gcctcttgaaggagtagtcccggat

SEQ ID NO: 4581729 - DNA, 25 bp, Homo sapien
tgacaggaggcccattctggatgag

SEQ ID NO: 4581730 - DNA, 25 bp, Homo sapien
gaatcctggaccactctgggccctt

SEQ ID NO: 4581731 - DNA, 25 bp, Homo sapien
catgtcttgagatgccaacccaggc

SEQ ID NO: 4581732 - DNA, 25 bp, Homo sapien
gcttctatatataggctctgccctc

SEQ ID NO: 4581733 - DNA, 25 bp, Homo sapien
gaaaaggcagcgtggaatcaatcgt

SEQ ID NO: 4581734 - DNA, 25 bp, Homo sapien
ggtgctcgtctttaaccagctccag

SEQ ID NO: 4581735 - DNA, 25 bp, Homo sapien
tggaatcaatcgttggtgtaccagg

SEQ ID NO: 4581736 - DNA, 25 bp, Homo sapien
ggcataattattccgccagccccgg

SEQ ID NO: 4581737 - DNA, 25 bp, Homo sapien
gctgctccaaattagcctgccagca

SEQ ID NO: 4581738 - DNA, 25 bp, Homo sapien
gatctggagggcctcgcgggtcggg

SEQ ID NO: 4581739 - DNA, 25 bp, Homo sapien
ggagctgctccaaattagcctgcca

SEQ ID NO: 4581740 - DNA, 25 bp, Homo sapien
ctggcaaggatctggagggcctcgc

SEQ ID NO: 4581741 - DNA, 25 bp, Homo sapien
attgtgcttctccagatatctgcgg

SEQ ID NO: 4581742 - DNA, 25 bp, Homo sapien
atgcctccgtgggaccctgcacgaa

SEQ ID NO: 4581743 - DNA, 25 bp, Homo sapien
gcacgaatgactgcactgccttatc

SEQ ID NO: 4581744 - DNA, 25 bp, Homo sapien
tctccagatatctgcggctgaaggc

SEQ ID NO: 4581745 - DNA, 25 bp, Homo sapien
ggtcaccaatcgcatgtctctccag

SEQ ID NO: 4581746 - DNA, 25 bp, Homo sapien
ctgtccgtctgtccgccccgcgcgg

SEQ ID NO: 4581747 - DNA, 25 bp, Homo sapien
gccttcggtccgctcggctcggtca

SEQ ID NO: 4581748 - DNA, 25 bp, Homo sapien
gctcggctcggtcaccaatcgcatg

SEQ ID NO: 4581749 - DNA, 25 bp, Homo sapien
tccttgaagccagacgccctttacc

SEQ ID NO: 4581750 - DNA, 25 bp, Homo sapien
ttaccaccaagccagttttattaga

SEQ ID NO: 4581751 - DNA, 25 bp, Homo sapien
aataaccatcaatgctgacaccgcc

SEQ ID NO: 4581752 - DNA, 25 bp, Homo sapien
ttagaataaccatcaatgctgacac

SEQ ID NO: 4581753 - DNA, 25 bp, Homo sapien
tctcagtctctctggcacaccgttg

SEQ ID NO: 4581754 - DNA, 25 bp, Homo sapien
caccatttctgggtacttctcagtc

SEQ ID NO: 4581755 - DNA, 25 bp, Homo sapien
catttctgggtacttctcagtctct

SEQ ID NO: 4581756 - DNA, 25 bp, Homo sapien
ctgcaccatttctgggtacttctca

SEQ ID NO: 4581757 - DNA, 25 bp, Homo sapien
cccaagttggtgtggagatatgcag

SEQ ID NO: 4581758 - DNA, 25 bp, Homo sapien
ttggtgtggagatatgcaggttccc

SEQ ID NO: 4581759 - DNA, 25 bp, Homo sapien
tggtgtggagatatgcaggttccca

SEQ ID NO: 4581760 - DNA, 25 bp, Homo sapien
gctggcccaagttggtgtggagata

SEQ ID NO: 4581761 - DNA, 25 bp, Homo sapien
tacaaattacacctgactgaagtct

SEQ ID NO: 4581762 - DNA, 25 bp, Homo sapien
ggctctagcctaaggtccctttcag

SEQ ID NO: 4581763 - DNA, 25 bp, Homo sapien
acaccctgagggcttggattcatct

SEQ ID NO: 4581764 - DNA, 25 bp, Homo sapien
tgaagtctcttaatcaggaaggccc

SEQ ID NO: 4581765 - DNA, 25 bp, Homo sapien
gctgtgtgggctggactaggcagga

SEQ ID NO: 4581766 - DNA, 25 bp, Homo sapien
tcagataggggatggagatgtcttt

SEQ ID NO: 4581767 - DNA, 25 bp, Homo sapien
tgtgggctggactaggcaggagagc

SEQ ID NO: 4581768 - DNA, 25 bp, Homo sapien
cagataggggatggagatgtctttc

SEQ ID NO: 4581769 - DNA, 25 bp, Homo sapien
gggagagtccttgtgaccgtgaatc

SEQ ID NO: 4581770 - DNA, 25 bp, Homo sapien
ggcagcggcatctgctttgcgaatg

SEQ ID NO: 4581771 - DNA, 25 bp, Homo sapien
ccttgtgaccgtgaatctagctggg

SEQ ID NO: 4581772 - DNA, 25 bp, Homo sapien
catctgctttgcgaatgtatctacg

SEQ ID NO: 4581773 - DNA, 25 bp, Homo sapien
taggtgtcccgagcagaacttttct

SEQ ID NO: 4581774 - DNA, 25 bp, Homo sapien
gagtttaggaaggatacgtagctgt

SEQ ID NO: 4581775 - DNA, 25 bp, Homo sapien
tgttgtgttgtcgaactctgtggta

SEQ ID NO: 4581776 - DNA, 25 bp, Homo sapien
tgtgtcatgttgaacatgtgtgtgg

SEQ ID NO: 4581777 - DNA, 25 bp, Homo sapien
catggcacccacattggcaccctct

SEQ ID NO: 4581778 - DNA, 25 bp, Homo sapien
atggcacccacattggcaccctctg

SEQ ID NO: 4581779 - DNA, 25 bp, Homo sapien
atggacatggcacccacattggcac

SEQ ID NO: 4581780 - DNA, 25 bp, Homo sapien
caggatggacatggcacccacattg

SEQ ID NO: 4581781 - DNA, 25 bp, Homo sapien
gaactagctgctttggcccttgttt

SEQ ID NO: 4581782 - DNA, 25 bp, Homo sapien
aagggtagccttgggacatgtctca

SEQ ID NO: 4581783 - DNA, 25 bp, Homo sapien
gaatctacatcccattcgtgccaga

SEQ ID NO: 4581784 - DNA, 25 bp, Homo sapien
tttggtcaggcccttagggactgtg

SEQ ID NO: 4581785 - DNA, 25 bp, Homo sapien
tcaggaaatgcccttgattgtggcc

SEQ ID NO: 4581786 - DNA, 25 bp, Homo sapien
aatgcccttgattgtggcctgggca

SEQ ID NO: 4581787 - DNA, 25 bp, Homo sapien
gggatcaggaaatgcccttgattgt

SEQ ID NO: 4581788 - DNA, 25 bp, Homo sapien
ggaaatgcccttgattgtggcctgg

SEQ ID NO: 4581789 - DNA, 25 bp, Homo sapien
gggtcagatggcgttgggaggcaaa

SEQ ID NO: 4581790 - DNA, 25 bp, Homo sapien
gggtgcggcagcctgtccgtcgcgg

SEQ ID NO: 4581791 - DNA, 25 bp, Homo sapien
ctgtccgtcgcggtcccagcatgca

SEQ ID NO: 4581792 - DNA, 25 bp, Homo sapien
tcagatggcgttgggaggcaaacag

SEQ ID NO: 4581793 - DNA, 25 bp, Homo sapien
tcagccccagcaccgctcaagatcc

SEQ ID NO: 4581794 - DNA, 25 bp, Homo sapien
cccagcaccgctcaagatccccagc

SEQ ID NO: 4581795 - DNA, 25 bp, Homo sapien
accgctcaagatccccagcaaggtc

SEQ ID NO: 4581796 - DNA, 25 bp, Homo sapien
cctcagccccagcaccgctcaagat

SEQ ID NO: 4581797 - DNA, 25 bp, Homo sapien
gtctccaatgtcctccataggccac

SEQ ID NO: 4581798 - DNA, 25 bp, Homo sapien
cagtctccaatgtcctccataggcc

SEQ ID NO: 4581799 - DNA, 25 bp, Homo sapien
tctccaatgtcctccataggccacc

SEQ ID NO: 4581800 - DNA, 25 bp, Homo sapien
agtctccaatgtcctccataggcca

SEQ ID NO: 4581801 - DNA, 25 bp, Homo sapien
tagactctctaaactgcccatgggc

SEQ ID NO: 4581802 - DNA, 25 bp, Homo sapien
agactctctaaactgcccatgggca

SEQ ID NO: 4581803 - DNA, 25 bp, Homo sapien
actctctaaactgcccatgggcacc

SEQ ID NO: 4581804 - DNA, 25 bp, Homo sapien
cctagactctctaaactgcccatgg

SEQ ID NO: 4581805 - DNA, 25 bp, Homo sapien
gtcagggctcattgtaaaaccagga

SEQ ID NO: 4581806 - DNA, 25 bp, Homo sapien
gaaggttcagttgattcaggatcag

SEQ ID NO: 4581807 - DNA, 25 bp, Homo sapien
cagtgcgcaactgaggtcagggctc

SEQ ID NO: 4581808 - DNA, 25 bp, Homo sapien
tgtgaggctgggatcaacgctcagt

SEQ ID NO: 4581809 - DNA, 25 bp, Homo sapien
ggtcaggagtagacttgggagctgg

SEQ ID NO: 4581810 - DNA, 25 bp, Homo sapien
ctgctgggtcccaaagcttgagaag

SEQ ID NO: 4581811 - DNA, 25 bp, Homo sapien
tcccaaagcttgagaagtccccttg

SEQ ID NO: 4581812 - DNA, 25 bp, Homo sapien
gctgtgtagccccacagactcaagg

SEQ ID NO: 4581813 - DNA, 25 bp, Homo sapien
gatctgtcggcttctattaggctaa

SEQ ID NO: 4581814 - DNA, 25 bp, Homo sapien
ttgaagccggagtacattactgccc

SEQ ID NO: 4581815 - DNA, 25 bp, Homo sapien
attactgccctgaatgatctgtcgg

SEQ ID NO: 4581816 - DNA, 25 bp, Homo sapien
tgaggaaactacacgcttgaagccg

SEQ ID NO: 4581817 - DNA, 25 bp, Homo sapien
ccattaggcccagcggactgtgggc

SEQ ID NO: 4581818 - DNA, 25 bp, Homo sapien
gaatggcagggccattaggcccagc

SEQ ID NO: 4581819 - DNA, 25 bp, Homo sapien
ggtgagaagggtcgggtgggcacag

SEQ ID NO: 4581820 - DNA, 25 bp, Homo sapien
acagcaggaggatcgggagcagggc

SEQ ID NO: 4581821 - DNA, 25 bp, Homo sapien
ccaagctctcccctaataagagcat

SEQ ID NO: 4581822 - DNA, 25 bp, Homo sapien
gtctaccaagctctcccctaataag

SEQ ID NO: 4581823 - DNA, 25 bp, Homo sapien
ctaccaagctctcccctaataagag

SEQ ID NO: 4581824 - DNA, 25 bp, Homo sapien
tgtctaccaagctctcccctaataa

SEQ ID NO: 4581825 - DNA, 25 bp, Homo sapien
tgccgcggtgctggcttttgtttcg

SEQ ID NO: 4581826 - DNA, 25 bp, Homo sapien
gagctggaacacctcacacagccca

SEQ ID NO: 4581827 - DNA, 25 bp, Homo sapien
gctggcttttgtttcgctgaagaag

SEQ ID NO: 4581828 - DNA, 25 bp, Homo sapien
agaagacttcacagagctggaacac

SEQ ID NO: 4581829 - DNA, 25 bp, Homo sapien
tacggctctggtgtctcacggtcag

SEQ ID NO: 4581830 - DNA, 25 bp, Homo sapien
aggctggtacggctctggtgtctca

SEQ ID NO: 4581831 - DNA, 25 bp, Homo sapien
tccactggcacgctgtgcacatcag

SEQ ID NO: 4581832 - DNA, 25 bp, Homo sapien
gcacgctgtgcacatcaggtgtttg

SEQ ID NO: 4581833 - DNA, 25 bp, Homo sapien
ttgccgtggccctcagcttcacacg

SEQ ID NO: 4581834 - DNA, 25 bp, Homo sapien
gtggccctcagcttcacacgcagac

SEQ ID NO: 4581835 - DNA, 25 bp, Homo sapien
gtcttgccgtggccctcagcttcac

SEQ ID NO: 4581836 - DNA, 25 bp, Homo sapien
gccgtggccctcagcttcacacgca

SEQ ID NO: 4581837 - DNA, 25 bp, Homo sapien
gatccccaagttcaaggctggctgg

SEQ ID NO: 4581838 - DNA, 25 bp, Homo sapien
ggatccccaagttcaaggctggctg

SEQ ID NO: 4581839 - DNA, 25 bp, Homo sapien
caggatccccaagttcaaggctggc

SEQ ID NO: 4581840 - DNA, 25 bp, Homo sapien
ctccaggatccccaagttcaaggct

SEQ ID NO: 4581841 - DNA, 25 bp, Homo sapien
cgggctcaagatcagggcctcctcg

SEQ ID NO: 4581842 - DNA, 25 bp, Homo sapien
ggctccgggctcaagatcagggcct

SEQ ID NO: 4581843 - DNA, 25 bp, Homo sapien
gatcagggcctcctcggtgggacac

SEQ ID NO: 4581844 - DNA, 25 bp, Homo sapien
tcagggctccgggctcaagatcagg

SEQ ID NO: 4581845 - DNA, 25 bp, Homo sapien
ctgccaacagctggtgccgctgcca

SEQ ID NO: 4581846 - DNA, 25 bp, Homo sapien
cccttggagctgcaagacccagaag

SEQ ID NO: 4581847 - DNA, 25 bp, Homo sapien
cagcggaaattggtccagggagttt

SEQ ID NO: 4581848 - DNA, 25 bp, Homo sapien
tgccaggcagcccagtaattgtgtt

SEQ ID NO: 4581849 - DNA, 25 bp, Homo sapien
aagacagcttttgttcctacaagtg

SEQ ID NO: 4581850 - DNA, 25 bp, Homo sapien
ctacaagtggttctttaaagagcca

SEQ ID NO: 4581851 - DNA, 25 bp, Homo sapien
ccactgaggtgctgccaaagacagc

SEQ ID NO: 4581852 - DNA, 25 bp, Homo sapien
gaggtgctgccaaagacagcttttg

SEQ ID NO: 4581853 - DNA, 25 bp, Homo sapien
acacaggtcacgctgtggggcctct

SEQ ID NO: 4581854 - DNA, 25 bp, Homo sapien
cacaggtcacgctgtggggcctctg

SEQ ID NO: 4581855 - DNA, 25 bp, Homo sapien
ccacacaggtcacgctgtggggcct

SEQ ID NO: 4581856 - DNA, 25 bp, Homo sapien
gcccacacaggtcacgctgtggggc

SEQ ID NO: 4581857 - DNA, 25 bp, Homo sapien
gagcataagacctgtgatagttggg

SEQ ID NO: 4581858 - DNA, 25 bp, Homo sapien
cagagatgggagtgagcataagacc

SEQ ID NO: 4581859 - DNA, 25 bp, Homo sapien
tggggttcacgagtcacaggtatga

SEQ ID NO: 4581860 - DNA, 25 bp, Homo sapien
cttgcccgtggggttcacgagtcac

SEQ ID NO: 4581861 - DNA, 25 bp, Homo sapien
ttggtgaggaagtgaacgtgaccat

SEQ ID NO: 4581862 - DNA, 25 bp, Homo sapien
tctggcgtctaactgtctggctttc

SEQ ID NO: 4581863 - DNA, 25 bp, Homo sapien
cattttcccgcatctggcgtctaac

SEQ ID NO: 4581864 - DNA, 25 bp, Homo sapien
gaacgtgaccattttcccgcatctg

SEQ ID NO: 4581865 - DNA, 25 bp, Homo sapien
cagataagaggagactgggtgcggg

SEQ ID NO: 4581866 - DNA, 25 bp, Homo sapien
cccagataagaggagactgggtgcg

SEQ ID NO: 4581867 - DNA, 25 bp, Homo sapien
ccagataagaggagactgggtgcgg

SEQ ID NO: 4581868 - DNA, 25 bp, Homo sapien
ccccagataagaggagactgggtgc

SEQ ID NO: 4581869 - DNA, 25 bp, Homo sapien
ctaccctgtggcccatctgcaagct

SEQ ID NO: 4581870 - DNA, 25 bp, Homo sapien
atttcctctaccctgtggcccatct

SEQ ID NO: 4581871 - DNA, 25 bp, Homo sapien
tgacctttcttgggtatttcctcta

SEQ ID NO: 4581872 - DNA, 25 bp, Homo sapien
tcttgggtatttcctctaccctgtg

SEQ ID NO: 4581873 - DNA, 25 bp, Homo sapien
tgagaggagaatggccaagacagcc

SEQ ID NO: 4581874 - DNA, 25 bp, Homo sapien
ctgagaggagaatggccaagacagc

SEQ ID NO: 4581875 - DNA, 25 bp, Homo sapien
gaggagaatggccaagacagccacc

SEQ ID NO: 4581876 - DNA, 25 bp, Homo sapien
gagaggagaatggccaagacagcca

SEQ ID NO: 4581877 - DNA, 25 bp, Homo sapien
taagacgggatgtttgaagagaaac

SEQ ID NO: 4581878 - DNA, 25 bp, Homo sapien
gagaaacataatccccgtttctgtg

SEQ ID NO: 4581879 - DNA, 25 bp, Homo sapien
tcggcgggcacaacagtaattaacg

SEQ ID NO: 4581880 - DNA, 25 bp, Homo sapien
taattaacgtctcattaacattcgc

SEQ ID NO: 4581881 - DNA, 25 bp, Homo sapien
agtgagaaggcacgttcccatggga

SEQ ID NO: 4581882 - DNA, 25 bp, Homo sapien
tcccatgggaggagctatcagggtc

SEQ ID NO: 4581883 - DNA, 25 bp, Homo sapien
cagggtctgactctccccatatcca

SEQ ID NO: 4581884 - DNA, 25 bp, Homo sapien
tatccagccataccccaggttgagc

SEQ ID NO: 4581885 - DNA, 25 bp, Homo sapien
tggtctatgggcatctgctcttggg

SEQ ID NO: 4581886 - DNA, 25 bp, Homo sapien
cacctggtcgagagccaaggcgggt

SEQ ID NO: 4581887 - DNA, 25 bp, Homo sapien
gcatctgctcttgggtgacacctgg

SEQ ID NO: 4581888 - DNA, 25 bp, Homo sapien
cccatggcaacggagaataggctca

SEQ ID NO: 4581889 - DNA, 25 bp, Homo sapien
ccagggatgccatgggcatcgatgc

SEQ ID NO: 4581890 - DNA, 25 bp, Homo sapien
tccagggatgccatgggcatcgatg

SEQ ID NO: 4581891 - DNA, 25 bp, Homo sapien
cagggatgccatgggcatcgatgcc

SEQ ID NO: 4581892 - DNA, 25 bp, Homo sapien
gggatgccatgggcatcgatgccct

SEQ ID NO: 4581893 - DNA, 25 bp, Homo sapien
cacacccagctcttgacagggtcgt

SEQ ID NO: 4581894 - DNA, 25 bp, Homo sapien
cagctcttgacagggtcgtgcacag

SEQ ID NO: 4581895 - DNA, 25 bp, Homo sapien
tcttgacagggtcgtgcacagcagg

SEQ ID NO: 4581896 - DNA, 25 bp, Homo sapien
acccagctcttgacagggtcgtgca

SEQ ID NO: 4581897 - DNA, 25 bp, Homo sapien
aggccttcgttcctccgtcagcatc

SEQ ID NO: 4581898 - DNA, 25 bp, Homo sapien
ccaggcctggtgagttacagcccat

SEQ ID NO: 4581899 - DNA, 25 bp, Homo sapien
tgcacatctgtcagcctgtggccgc

SEQ ID NO: 4581900 - DNA, 25 bp, Homo sapien
atgccctcattagcacaacctgatg

SEQ ID NO: 4581901 - DNA, 25 bp, Homo sapien
cagctgtagcaatttgctcctgggg

SEQ ID NO: 4581902 - DNA, 25 bp, Homo sapien
gctgtagcaatttgctcctggggaa

SEQ ID NO: 4581903 - DNA, 25 bp, Homo sapien
ttcagctgtagcaatttgctcctgg

SEQ ID NO: 4581904 - DNA, 25 bp, Homo sapien
ctgtagcaatttgctcctggggaaa

SEQ ID NO: 4581905 - DNA, 25 bp, Homo sapien
gggtcatcacctctaaaatccacag

SEQ ID NO: 4581906 - DNA, 25 bp, Homo sapien
tgtggagttcgatttgaaacacggc

SEQ ID NO: 4581907 - DNA, 25 bp, Homo sapien
catgagtagtcttacacctgggaag

SEQ ID NO: 4581908 - DNA, 25 bp, Homo sapien
gagaagggatcatggcacatgccct

SEQ ID NO: 4581909 - DNA, 25 bp, Homo sapien
tccctggtggcccagactgctggat

SEQ ID NO: 4581910 - DNA, 25 bp, Homo sapien
tggatatttacacagacggcctcgg

SEQ ID NO: 4581911 - DNA, 25 bp, Homo sapien
cgtggctatttgacctttcagaggg

SEQ ID NO: 4581912 - DNA, 25 bp, Homo sapien
ggagtgcctgcgtggctatttgacc

SEQ ID NO: 4581913 - DNA, 25 bp, Homo sapien
gaggggatggcaggtatgggctaca

SEQ ID NO: 4581914 - DNA, 25 bp, Homo sapien
gtatgggctacaaacactcccgccg

SEQ ID NO: 4581915 - DNA, 25 bp, Homo sapien
aggtatgggctacaaacactcccgc

SEQ ID NO: 4581916 - DNA, 25 bp, Homo sapien
ggtatgggctacaaacactcccgcc

SEQ ID NO: 4581917 - DNA, 25 bp, Homo sapien
tctttgcttagtgacctggagggcc

SEQ ID NO: 4581918 - DNA, 25 bp, Homo sapien
cagttcttctttgcttagtgacctg

SEQ ID NO: 4581919 - DNA, 25 bp, Homo sapien
catctcctcgaatgaccttggcaac

SEQ ID NO: 4581920 - DNA, 25 bp, Homo sapien
tcgaatgaccttggcaactactggg

SEQ ID NO: 4581921 - DNA, 25 bp, Homo sapien
ggacagaggatgacaagtcctttca

SEQ ID NO: 4581922 - DNA, 25 bp, Homo sapien
gaggatgacaagtcctttcagcaag

SEQ ID NO: 4581923 - DNA, 25 bp, Homo sapien
gacaagtcctttcagcaagaacccc

SEQ ID NO: 4581924 - DNA, 25 bp, Homo sapien
ctggaggacagaggatgacaagtcc

SEQ ID NO: 4581925 - DNA, 25 bp, Homo sapien
tcagggcactctgcacactggtcag

SEQ ID NO: 4581926 - DNA, 25 bp, Homo sapien
cctcttctataagaagggtggtggt

SEQ ID NO: 4581927 - DNA, 25 bp, Homo sapien
ggtggtggtagctgcctctcagctg

SEQ ID NO: 4581928 - DNA, 25 bp, Homo sapien
tgctgtgaagatgggaagcacccag

SEQ ID NO: 4581929 - DNA, 25 bp, Homo sapien
tgaaggcgatgatagccccgccctg

SEQ ID NO: 4581930 - DNA, 25 bp, Homo sapien
ctggagtggaggacggcaggtagct

SEQ ID NO: 4581931 - DNA, 25 bp, Homo sapien
gacggcaggtagctcaaagatgaag

SEQ ID NO: 4581932 - DNA, 25 bp, Homo sapien
ctcaaagatgaaggcgatgatagcc

SEQ ID NO: 4581933 - DNA, 25 bp, Homo sapien
ggactcagtcgccctctctgcctgt

SEQ ID NO: 4581934 - DNA, 25 bp, Homo sapien
gggctggactcagtcgccctctctg

SEQ ID NO: 4581935 - DNA, 25 bp, Homo sapien
gctggactcagtcgccctctctgcc

SEQ ID NO: 4581936 - DNA, 25 bp, Homo sapien
tggactcagtcgccctctctgcctg

SEQ ID NO: 4581937 - DNA, 25 bp, Homo sapien
ctggcggccctgagcccagctccac

SEQ ID NO: 4581938 - DNA, 25 bp, Homo sapien
gctggcggccctgagcccagctcca

SEQ ID NO: 4581939 - DNA, 25 bp, Homo sapien
tggctggcggccctgagcccagctc

SEQ ID NO: 4581940 - DNA, 25 bp, Homo sapien
ctggctggcggccctgagcccagct

SEQ ID NO: 4581941 - DNA, 25 bp, Homo sapien
gggtaagccatccccacagtgccat

SEQ ID NO: 4581942 - DNA, 25 bp, Homo sapien
ctgagctggcagggtaagccatccc

SEQ ID NO: 4581943 - DNA, 25 bp, Homo sapien
tgagctggcagggtaagccatcccc

SEQ ID NO: 4581944 - DNA, 25 bp, Homo sapien
gcagggtaagccatccccacagtgc

SEQ ID NO: 4581945 - DNA, 25 bp, Homo sapien
aactctcaggtggaaggaccatgga

SEQ ID NO: 4581946 - DNA, 25 bp, Homo sapien
aggacagcgacagcccatctgattg

SEQ ID NO: 4581947 - DNA, 25 bp, Homo sapien
aaagtgggtgggatctccacggaca

SEQ ID NO: 4581948 - DNA, 25 bp, Homo sapien
cacggacagggatgggggagaactc

SEQ ID NO: 4581949 - DNA, 25 bp, Homo sapien
agtccatgacagcctgtccttgtac

SEQ ID NO: 4581950 - DNA, 25 bp, Homo sapien
tgctggaactgggccacctgccaag

SEQ ID NO: 4581951 - DNA, 25 bp, Homo sapien
gctggaactgggccacctgccaagg

SEQ ID NO: 4581952 - DNA, 25 bp, Homo sapien
ggtgctggaactgggccacctgcca

SEQ ID NO: 4581953 - DNA, 25 bp, Homo sapien
gtgctggaactgggccacctgccaa

SEQ ID NO: 4581954 - DNA, 25 bp, Homo sapien
ctggacaccgaagttccactttagc

SEQ ID NO: 4581955 - DNA, 25 bp, Homo sapien
gacaccgaagttccactttagcctc

SEQ ID NO: 4581956 - DNA, 25 bp, Homo sapien
gccctgaccctggtggctagcagtg

SEQ ID NO: 4581957 - DNA, 25 bp, Homo sapien
actttagcctcctctcgccctgacc

SEQ ID NO: 4581958 - DNA, 25 bp, Homo sapien
ctcctccagcggctggcacctcccc

SEQ ID NO: 4581959 - DNA, 25 bp, Homo sapien
aagtctggagcttagggagccacag

SEQ ID NO: 4581960 - DNA, 25 bp, Homo sapien
caacactcaggaggcaaaagtctgg

SEQ ID NO: 4581961 - DNA, 25 bp, Homo sapien
gcaaaagtctggagcttagggagcc

SEQ ID NO: 4581962 - DNA, 25 bp, Homo sapien
caaaagtctggagcttagggagcca

SEQ ID NO: 4581963 - DNA, 25 bp, Homo sapien
cagtgcacatttagatctccacggg

SEQ ID NO: 4581964 - DNA, 25 bp, Homo sapien
cccagtgcacatttagatctccacg

SEQ ID NO: 4581965 - DNA, 25 bp, Homo sapien
attcccccagtgcacatttagatct

SEQ ID NO: 4581966 - DNA, 25 bp, Homo sapien
tggccacaatagccaccagagtccc

SEQ ID NO: 4581967 - DNA, 25 bp, Homo sapien
ggcgcgccttgcggcaagttccctt

SEQ ID NO: 4581968 - DNA, 25 bp, Homo sapien
ggtggggcgcgccttgcggcaagtt

SEQ ID NO: 4581969 - DNA, 25 bp, Homo sapien
gtggggcgcgccttgcggcaagttc

SEQ ID NO: 4581970 - DNA, 25 bp, Homo sapien
ggggcgcgccttgcggcaagttccc

SEQ ID NO: 4581971 - DNA, 25 bp, Homo sapien
ccctggccccgctgcagcgtcccgg

SEQ ID NO: 4581972 - DNA, 25 bp, Homo sapien
ggcctgcgcccctgcggccctggcc

SEQ ID NO: 4581973 - DNA, 25 bp, Homo sapien
gctccccggcctgcgcccctgcggc

SEQ ID NO: 4581974 - DNA, 25 bp, Homo sapien
tggccccgctgcagcgtcccggccc

SEQ ID NO: 4581975 - DNA, 25 bp, Homo sapien
cgggcgcgccgtccgcgcgcggctc

SEQ ID NO: 4581976 - DNA, 25 bp, Homo sapien
gtccgcgcgcggctccgctccgggc

SEQ ID NO: 4581977 - DNA, 25 bp, Homo sapien
tccgcgcgcggctccgctccgggcc

SEQ ID NO: 4581978 - DNA, 25 bp, Homo sapien
cgtcccgggcgcgccgtccgcgcgc

SEQ ID NO: 4581979 - DNA, 25 bp, Homo sapien
ctgcctccggtccccgctccggcct

SEQ ID NO: 4581980 - DNA, 25 bp, Homo sapien
ctcggctccgcgatggtggccgcgg

SEQ ID NO: 4581981 - DNA, 25 bp, Homo sapien
gctcggctccgcgatggtggccgcg

SEQ ID NO: 4581982 - DNA, 25 bp, Homo sapien
gctgcctccggtccccgctccggcc

SEQ ID NO: 4581983 - DNA, 25 bp, Homo sapien
ccacgatgcgatgccggcagaatct

SEQ ID NO: 4581984 - DNA, 25 bp, Homo sapien
tgctcgccacgatgcgatgccggca

SEQ ID NO: 4581985 - DNA, 25 bp, Homo sapien
tcgccacgatgcgatgccggcagaa

SEQ ID NO: 4581986 - DNA, 25 bp, Homo sapien
tcctgctcgccacgatgcgatgccg

SEQ ID NO: 4581987 - DNA, 25 bp, Homo sapien
gttcgagcgcgcagtgggcggcgag

SEQ ID NO: 4581988 - DNA, 25 bp, Homo sapien
gcccgggcttaaagggatagcgcac

SEQ ID NO: 4581989 - DNA, 25 bp, Homo sapien
ttctccgcattacagcgggtgccgc

SEQ ID NO: 4581990 - DNA, 25 bp, Homo sapien
tagctccggcctggcgctagggtgg

SEQ ID NO: 4581991 - DNA, 25 bp, Homo sapien
acctcgctgcgcgggaacagtccgg

SEQ ID NO: 4581992 - DNA, 25 bp, Homo sapien
gccgtgcgggcgacgccctctccgc

SEQ ID NO: 4581993 - DNA, 25 bp, Homo sapien
agggacctcgctgcgcgggaacagt

SEQ ID NO: 4581994 - DNA, 25 bp, Homo sapien
gggaagggacctcgctgcgcgggaa

SEQ ID NO: 4581995 - DNA, 25 bp, Homo sapien
tgagtgggcggcctcgtgagggagc

SEQ ID NO: 4581996 - DNA, 25 bp, Homo sapien
tcagatgctagctggatgcctccag

SEQ ID NO: 4581997 - DNA, 25 bp, Homo sapien
ccccagaactatgaagaatggactg

SEQ ID NO: 4581998 - DNA, 25 bp, Homo sapien
gaatggactgattgtcttctgccgt

SEQ ID NO: 4581999 - DNA, 25 bp, Homo sapien
ctgtagaagggtgtcattctgtact

SEQ ID NO: 4582000 - DNA, 25 bp, Homo sapien
tgtagaagggtgtcattctgtactc

SEQ ID NO: 4582001 - DNA, 25 bp, Homo sapien
tgctgtgagcagtcgttggatgcag

SEQ ID NO: 4582002 - DNA, 25 bp, Homo sapien
gtgagcagtcgttggatgcagctgc

SEQ ID NO: 4582003 - DNA, 25 bp, Homo sapien
ctgctgtgagcagtcgttggatgca

SEQ ID NO: 4582004 - DNA, 25 bp, Homo sapien
ctgtgagcagtcgttggatgcagct

SEQ ID NO: 4582005 - DNA, 25 bp, Homo sapien
ccagctctggcatgaggatgggatg

SEQ ID NO: 4582006 - DNA, 25 bp, Homo sapien
tccagctctggcatgaggatgggat

SEQ ID NO: 4582007 - DNA, 25 bp, Homo sapien
gtccagctctggcatgaggatggga

SEQ ID NO: 4582008 - DNA, 25 bp, Homo sapien
aaaacgcgagggtcgatggcctcct

SEQ ID NO: 4582009 - DNA, 25 bp, Homo sapien
ggtatcttcaaaacgcgagggtcga

SEQ ID NO: 4582010 - DNA, 25 bp, Homo sapien
tcttcaaaacgcgagggtcgatggc

SEQ ID NO: 4582011 - DNA, 25 bp, Homo sapien
cttctcttggtatcttcaaaacgcg

SEQ ID NO: 4582012 - DNA, 25 bp, Homo sapien
agccacctggagttcccatggcgac

SEQ ID NO: 4582013 - DNA, 25 bp, Homo sapien
tcagccacctggagttcccatggcg

SEQ ID NO: 4582014 - DNA, 25 bp, Homo sapien
acctggagttcccatggcgaccacg

SEQ ID NO: 4582015 - DNA, 25 bp, Homo sapien
ccatggcgaccacgggagaggagcc

SEQ ID NO: 4582016 - DNA, 25 bp, Homo sapien
ccaggcccccatggctcctggctgc

SEQ ID NO: 4582017 - DNA, 25 bp, Homo sapien
ctccaggcccccatggctcctggct

SEQ ID NO: 4582018 - DNA, 25 bp, Homo sapien
caggcccccatggctcctggctgcc

SEQ ID NO: 4582019 - DNA, 25 bp, Homo sapien
tccaggcccccatggctcctggctg

SEQ ID NO: 4582020 - DNA, 25 bp, Homo sapien
cactgcagccagacgcctggctgca

SEQ ID NO: 4582021 - DNA, 25 bp, Homo sapien
actgcagccagacgcctggctgcac

SEQ ID NO: 4582022 - DNA, 25 bp, Homo sapien
tgcagccagacgcctggctgcacac

SEQ ID NO: 4582023 - DNA, 25 bp, Homo sapien
cagccagacgcctggctgcacacac

SEQ ID NO: 4582024 - DNA, 25 bp, Homo sapien
ccagagaacagattcggtgaagacc

SEQ ID NO: 4582025 - DNA, 25 bp, Homo sapien
ggtgaagaccattccatttaactgg

SEQ ID NO: 4582026 - DNA, 25 bp, Homo sapien
caaagtgggatcattcccgcagagt

SEQ ID NO: 4582027 - DNA, 25 bp, Homo sapien
cccgcagagtggaaaagagcttttc

SEQ ID NO: 4582028 - DNA, 25 bp, Homo sapien
aggtgccctgagctggagcccacag

SEQ ID NO: 4582029 - DNA, 25 bp, Homo sapien
gcagacgtctatcctgctgcccaga

SEQ ID NO: 4582030 - DNA, 25 bp, Homo sapien
gtggaagaactgaacgagaagcagc

SEQ ID NO: 4582031 - DNA, 25 bp, Homo sapien
ctcctcgtggaagaactgaacgaga

SEQ ID NO: 4582032 - DNA, 25 bp, Homo sapien
ctgaacgagaagcagcacgcaaggg

SEQ ID NO: 4582033 - DNA, 25 bp, Homo sapien
cagtggcagtgtgggtatcaggagc

SEQ ID NO: 4582034 - DNA, 25 bp, Homo sapien
ccatcgtgccgcatctctggagtga

SEQ ID NO: 4582035 - DNA, 25 bp, Homo sapien
ttgccaccctgcacacatctccttc

SEQ ID NO: 4582036 - DNA, 25 bp, Homo sapien
tggctcccttgagctagcagccttg

SEQ ID NO: 4582037 - DNA, 25 bp, Homo sapien
aggccccacatgcaaaccagcgccc

SEQ ID NO: 4582038 - DNA, 25 bp, Homo sapien
agcgcccgtgcccacgcccgtgcag

SEQ ID NO: 4582039 - DNA, 25 bp, Homo sapien
acatgcaaaccagcgcccgtgccca

SEQ ID NO: 4582040 - DNA, 25 bp, Homo sapien
cccacatgcaaaccagcgcccgtgc

SEQ ID NO: 4582041 - DNA, 25 bp, Homo sapien
tggggactgtccactctacttccaa

SEQ ID NO: 4582042 - DNA, 25 bp, Homo sapien
atattcacaaatttttcatccaggt

SEQ ID NO: 4582043 - DNA, 25 bp, Homo sapien
tgtccactctacttccaagaggctc

SEQ ID NO: 4582044 - DNA, 25 bp, Homo sapien
gactgtccactctacttccaagagg

SEQ ID NO: 4582045 - DNA, 25 bp, Homo sapien
cttgcacacggccactctcacagac

SEQ ID NO: 4582046 - DNA, 25 bp, Homo sapien
ccctaccttaaagatctgggccagt

SEQ ID NO: 4582047 - DNA, 25 bp, Homo sapien
tcccctaccttaaagatctgggcca

SEQ ID NO: 4582048 - DNA, 25 bp, Homo sapien
caagtcccctaccttaaagatctgg

SEQ ID NO: 4582049 - DNA, 25 bp, Homo sapien
ccaagtcccctaccttaaagatctg

SEQ ID NO: 4582050 - DNA, 25 bp, Homo sapien
cagctcgctgaggactccagatgtt

SEQ ID NO: 4582051 - DNA, 25 bp, Homo sapien
ggactccagatgtttgttctgtctc

SEQ ID NO: 4582052 - DNA, 25 bp, Homo sapien
cagacagctcgctgaggactccaga

SEQ ID NO: 4582053 - DNA, 25 bp, Homo sapien
actccagatgtttgttctgtctccc

SEQ ID NO: 4582054 - DNA, 25 bp, Homo sapien
tctgaggacacctccgaccagtgtc

SEQ ID NO: 4582055 - DNA, 25 bp, Homo sapien
gcaaccgagttctcctgccgggagt

SEQ ID NO: 4582056 - DNA, 25 bp, Homo sapien
cgttctgggtcagcgatggactgca

SEQ ID NO: 4582057 - DNA, 25 bp, Homo sapien
tgtcagtgacggctcgggtgcctca

SEQ ID NO: 4582058 - DNA, 25 bp, Homo sapien
gctggcagtgccacccaggaaagcg

SEQ ID NO: 4582059 - DNA, 25 bp, Homo sapien
tgccacccaggaaagcggggaagag

SEQ ID NO: 4582060 - DNA, 25 bp, Homo sapien
cagtgccacccaggaaagcggggaa

SEQ ID NO: 4582061 - DNA, 25 bp, Homo sapien
caggggggcaggctggcagtgccac

SEQ ID NO: 4582062 - DNA, 25 bp, Homo sapien
tgagcaacaccggtggtcctctgag

SEQ ID NO: 4582063 - DNA, 25 bp, Homo sapien
ctcggtgtgcgggtgagcttccgcg

SEQ ID NO: 4582064 - DNA, 25 bp, Homo sapien
gagcttccgcgttgtgactctgccc

SEQ ID NO: 4582065 - DNA, 25 bp, Homo sapien
tgtctccatgagcaacaccggtggt

SEQ ID NO: 4582066 - DNA, 25 bp, Homo sapien
cgcctgctgcatgaacggtgttccc

SEQ ID NO: 4582067 - DNA, 25 bp, Homo sapien
tgggacctcagatccaggctccctg

SEQ ID NO: 4582068 - DNA, 25 bp, Homo sapien
tgcaagccatgggactcagcgccac

SEQ ID NO: 4582069 - DNA, 25 bp, Homo sapien
ggcgcacctgggacctcagatccag

SEQ ID NO: 4582070 - DNA, 25 bp, Homo sapien
cctttggtgccggtatctgtcttcc

SEQ ID NO: 4582071 - DNA, 25 bp, Homo sapien
ccctttggtgccggtatctgtcttc

SEQ ID NO: 4582072 - DNA, 25 bp, Homo sapien
ttggtgccggtatctgtcttcccgg

SEQ ID NO: 4582073 - DNA, 25 bp, Homo sapien
ctttggtgccggtatctgtcttccc

SEQ ID NO: 4582074 - DNA, 25 bp, Homo sapien
ttaaactctacccttctaatgttgc

SEQ ID NO: 4582075 - DNA, 25 bp, Homo sapien
tttctgattaaactctacccttcta

SEQ ID NO: 4582076 - DNA, 25 bp, Homo sapien
ttctgattaaactctacccttctaa

SEQ ID NO: 4582077 - DNA, 25 bp, Homo sapien
tgattaaactctacccttctaatgt

SEQ ID NO: 4582078 - DNA, 25 bp, Homo sapien
tatatgtgctgcaataacatttaaa

SEQ ID NO: 4582079 - DNA, 25 bp, Homo sapien
atatatgtgctgcaataacatttaa

SEQ ID NO: 4582080 - DNA, 25 bp, Homo sapien
aatatatgtgctgcaataacattta

SEQ ID NO: 4582081 - DNA, 25 bp, Homo sapien
gaatatatgtgctgcaataacattt

SEQ ID NO: 4582082 - DNA, 25 bp, Homo sapien
tcctgcattacaggagacagctgca

SEQ ID NO: 4582083 - DNA, 25 bp, Homo sapien
ctggtgcaggctccacattgttgtc

SEQ ID NO: 4582084 - DNA, 25 bp, Homo sapien
gtgcaggctccacattgttgtccag

SEQ ID NO: 4582085 - DNA, 25 bp, Homo sapien
ggagacagctgcacgatctgctgtg

SEQ ID NO: 4582086 - DNA, 25 bp, Homo sapien
tttgccatgcccctcatggttgccc

SEQ ID NO: 4582087 - DNA, 25 bp, Homo sapien
tgcccctcatggttgcccacaaggg

SEQ ID NO: 4582088 - DNA, 25 bp, Homo sapien
cacaaggggcaacaccagctcttgc

SEQ ID NO: 4582089 - DNA, 25 bp, Homo sapien
tctgggcagcggtgaggaatttgcc

SEQ ID NO: 4582090 - DNA, 25 bp, Homo sapien
ggccagcctgatgacatcttccatc

SEQ ID NO: 4582091 - DNA, 25 bp, Homo sapien
tctcctggtgccacgtgtttggcac

SEQ ID NO: 4582092 - DNA, 25 bp, Homo sapien
ttccatctcctggtgccacgtgttt

SEQ ID NO: 4582093 - DNA, 25 bp, Homo sapien
gggccagcctgatgacatcttccat

SEQ ID NO: 4582094 - DNA, 25 bp, Homo sapien
ggctttcatatacggtgaaggactc

SEQ ID NO: 4582095 - DNA, 25 bp, Homo sapien
ctggctttcatatacggtgaaggac

SEQ ID NO: 4582096 - DNA, 25 bp, Homo sapien
tggctttcatatacggtgaaggact

SEQ ID NO: 4582097 - DNA, 25 bp, Homo sapien
ctttcatatacggtgaaggactctc

SEQ ID NO: 4582098 - DNA, 25 bp, Homo sapien
ggacgaatccaagctctcgtctctc

SEQ ID NO: 4582099 - DNA, 25 bp, Homo sapien
aaggctggacgaatccaagctctcg

SEQ ID NO: 4582100 - DNA, 25 bp, Homo sapien
tccagaaggctggacgaatccaagc

SEQ ID NO: 4582101 - DNA, 25 bp, Homo sapien
gctggacgaatccaagctctcgtct

SEQ ID NO: 4582102 - DNA, 25 bp, Homo sapien
acacacaaactcatctccagtcctc

SEQ ID NO: 4582103 - DNA, 25 bp, Homo sapien
acacaaactcatctccagtcctccc

SEQ ID NO: 4582104 - DNA, 25 bp, Homo sapien
cacacaaactcatctccagtcctcc

SEQ ID NO: 4582105 - DNA, 25 bp, Homo sapien
cacaaactcatctccagtcctccct

SEQ ID NO: 4582106 - DNA, 25 bp, Homo sapien
cctgctcctcctgggaactggctcc

SEQ ID NO: 4582107 - DNA, 25 bp, Homo sapien
gcccacatagccgggcctgctcctc

SEQ ID NO: 4582108 - DNA, 25 bp, Homo sapien
ctgcccacatagccgggcctgctcc

SEQ ID NO: 4582109 - DNA, 25 bp, Homo sapien
gaactggctccagcggagttgaaaa

SEQ ID NO: 4582110 - DNA, 25 bp, Homo sapien
tcctctgggatgtttggcgtgggcc

SEQ ID NO: 4582111 - DNA, 25 bp, Homo sapien
ggtcctctgggatgtttggcgtggg

SEQ ID NO: 4582112 - DNA, 25 bp, Homo sapien
ccaggtcctctgggatgtttggcgt

SEQ ID NO: 4582113 - DNA, 25 bp, Homo sapien
ctctgggatgtttggcgtgggccga

SEQ ID NO: 4582114 - DNA, 25 bp, Homo sapien
tgatctggtccagttcattcatcct

SEQ ID NO: 4582115 - DNA, 25 bp, Homo sapien
acagtcccactaccagtcggtgcgg

SEQ ID NO: 4582116 - DNA, 25 bp, Homo sapien
ttctgatctggtccagttcattcat

SEQ ID NO: 4582117 - DNA, 25 bp, Homo sapien
cagtcccactaccagtcggtgcggg

SEQ ID NO: 4582118 - DNA, 25 bp, Homo sapien
gccacgaggctcaaccgggtctcta

SEQ ID NO: 4582119 - DNA, 25 bp, Homo sapien
cacgaggctcaaccgggtctctagc

SEQ ID NO: 4582120 - DNA, 25 bp, Homo sapien
aggctcaaccgggtctctagctgtt

SEQ ID NO: 4582121 - DNA, 25 bp, Homo sapien
agagccacgaggctcaaccgggtct

SEQ ID NO: 4582122 - DNA, 25 bp, Homo sapien
tgcagctggtccacgagctgggtct

SEQ ID NO: 4582123 - DNA, 25 bp, Homo sapien
tgcagcagtaactgcctgtgcagcg

SEQ ID NO: 4582124 - DNA, 25 bp, Homo sapien
agcagtaactgcctgtgcagcgcct

SEQ ID NO: 4582125 - DNA, 25 bp, Homo sapien
ctggtccacgagctgggtctgcagc

SEQ ID NO: 4582126 - DNA, 25 bp, Homo sapien
catgtccttcttcccaccatttaaa

SEQ ID NO: 4582127 - DNA, 25 bp, Homo sapien
caccatttaaactgtaggccacaga

SEQ ID NO: 4582128 - DNA, 25 bp, Homo sapien
cttcttcccaccatttaaactgtag

SEQ ID NO: 4582129 - DNA, 25 bp, Homo sapien
tcttcccaccatttaaactgtaggc

SEQ ID NO: 4582130 - DNA, 25 bp, Homo sapien
cccagctggagctgcctttggcctg

SEQ ID NO: 4582131 - DNA, 25 bp, Homo sapien
gcctcccagctggagctgcctttgg

SEQ ID NO: 4582132 - DNA, 25 bp, Homo sapien
tcccagctggagctgcctttggcct

SEQ ID NO: 4582133 - DNA, 25 bp, Homo sapien
ctgcctcccagctggagctgccttt

SEQ ID NO: 4582134 - DNA, 25 bp, Homo sapien
tgctccaactgcagtgcgctctttt

SEQ ID NO: 4582135 - DNA, 25 bp, Homo sapien
ctcgtctagcttctcctgcagctcc

SEQ ID NO: 4582136 - DNA, 25 bp, Homo sapien
caactgcagtgcgctctttttctca

SEQ ID NO: 4582137 - DNA, 25 bp, Homo sapien
ctgcagtgcgctctttttctcattg

SEQ ID NO: 4582138 - DNA, 25 bp, Homo sapien
gccagctgcttgtcgagcttgtggt

SEQ ID NO: 4582139 - DNA, 25 bp, Homo sapien
ggccagctgcttgtcgagcttgtgg

SEQ ID NO: 4582140 - DNA, 25 bp, Homo sapien
tggaagagcacgagcctctcctcct

SEQ ID NO: 4582141 - DNA, 25 bp, Homo sapien
ggaagagcacgagcctctcctcctg

SEQ ID NO: 4582142 - DNA, 25 bp, Homo sapien
tcctcctgcttttgtagcctgtcct

SEQ ID NO: 4582143 - DNA, 25 bp, Homo sapien
cttttgtagcctgtcctccttcttc

SEQ ID NO: 4582144 - DNA, 25 bp, Homo sapien
tcccgaagcctctcgttttgttcac

SEQ ID NO: 4582145 - DNA, 25 bp, Homo sapien
ctcccgaagcctctcgttttgttca

SEQ ID NO: 4582146 - DNA, 25 bp, Homo sapien
tcccgcaccctctgcgcctcctgct

SEQ ID NO: 4582147 - DNA, 25 bp, Homo sapien
tctgcttttgttccttgctcaggac

SEQ ID NO: 4582148 - DNA, 25 bp, Homo sapien
tctcctcctgctctcggatcatctc

SEQ ID NO: 4582149 - DNA, 25 bp, Homo sapien
cctgctctcggagcatctcctcctg

SEQ ID NO: 4582150 - DNA, 25 bp, Homo sapien
ctcctgcctcaggtgtttggcctca

SEQ ID NO: 4582151 - DNA, 25 bp, Homo sapien
ccacctgggattggagctttccctc

SEQ ID NO: 4582152 - DNA, 25 bp, Homo sapien
tgtagctgttccaccacagaggtca

SEQ ID NO: 4582153 - DNA, 25 bp, Homo sapien
ttgttttccacctgggattggagct

SEQ ID NO: 4582154 - DNA, 25 bp, Homo sapien
ctgggggcgccagggataggggctc

SEQ ID NO: 4582155 - DNA, 25 bp, Homo sapien
gggggcgccagggataggggctcag

SEQ ID NO: 4582156 - DNA, 25 bp, Homo sapien
tgggggcgccagggataggggctca

SEQ ID NO: 4582157 - DNA, 25 bp, Homo sapien
tatccgatgtatgtcacgcttcttc

SEQ ID NO: 4582158 - DNA, 25 bp, Homo sapien
cgatgtatgtcacgcttcttctctt

SEQ ID NO: 4582159 - DNA, 25 bp, Homo sapien
cagctcctgtatccgatgtatgtca

SEQ ID NO: 4582160 - DNA, 25 bp, Homo sapien
cctgtatccgatgtatgtcacgctt

SEQ ID NO: 4582161 - DNA, 25 bp, Homo sapien
gcatattcgtcctgctctagctgga

SEQ ID NO: 4582162 - DNA, 25 bp, Homo sapien
attcgtcctgctctagctggacttg

SEQ ID NO: 4582163 - DNA, 25 bp, Homo sapien
gtttagcatattcgtcctgctctag

SEQ ID NO: 4582164 - DNA, 25 bp, Homo sapien
tgtgtttagcatattcgtcctgctc

SEQ ID NO: 4582165 - DNA, 25 bp, Homo sapien
tcacgtgtgcgttcagcagtgcctg

SEQ ID NO: 4582166 - DNA, 25 bp, Homo sapien
actggaggaccgcttctctgcagct

SEQ ID NO: 4582167 - DNA, 25 bp, Homo sapien
tgtaaccgccactggaggaccgctt

SEQ ID NO: 4582168 - DNA, 25 bp, Homo sapien
gtgcctgctcctttatggtctgctg

SEQ ID NO: 4582169 - DNA, 25 bp, Homo sapien
gaagttttgatctggggagctcagg

SEQ ID NO: 4582170 - DNA, 25 bp, Homo sapien
agtgagaagttttgatctggggagc

SEQ ID NO: 4582171 - DNA, 25 bp, Homo sapien
gagaagttttgatctggggagctca

SEQ ID NO: 4582172 - DNA, 25 bp, Homo sapien
ttttgatctggggagctcaggcagt

SEQ ID NO: 4582173 - DNA, 25 bp, Homo sapien
ctgcaaggcgtattgcaggcggcca

SEQ ID NO: 4582174 - DNA, 25 bp, Homo sapien
aattcttgaatacgctgcaaggcgt

SEQ ID NO: 4582175 - DNA, 25 bp, Homo sapien
aatacgctgcaaggcgtattgcagg

SEQ ID NO: 4582176 - DNA, 25 bp, Homo sapien
cgctccaattcttgaatacgctgca

SEQ ID NO: 4582177 - DNA, 25 bp, Homo sapien
cttcgaagtgtcgggcagcacgttt

SEQ ID NO: 4582178 - DNA, 25 bp, Homo sapien
cagcacgtttagtatggtaaagggt

SEQ ID NO: 4582179 - DNA, 25 bp, Homo sapien
tagtatggtaaagggtggtcttcaa

SEQ ID NO: 4582180 - DNA, 25 bp, Homo sapien
tgtcgggcagcacgtttagtatggt

SEQ ID NO: 4582181 - DNA, 25 bp, Homo sapien
ttttgggagaaaagccaagcaagtg

SEQ ID NO: 4582182 - DNA, 25 bp, Homo sapien
gaacttttgggagaaaagccaagca

SEQ ID NO: 4582183 - DNA, 25 bp, Homo sapien
tgaacttttgggagaaaagccaagc

SEQ ID NO: 4582184 - DNA, 25 bp, Homo sapien
acttttgggagaaaagccaagcaag

SEQ ID NO: 4582185 - DNA, 25 bp, Homo sapien
ctaactgctctgtttgtgctttgtg

SEQ ID NO: 4582186 - DNA, 25 bp, Homo sapien
ctctaactgctctgtttgtgctttg

SEQ ID NO: 4582187 - DNA, 25 bp, Homo sapien
gtgctttgtgtatttcattgtttgc

SEQ ID NO: 4582188 - DNA, 25 bp, Homo sapien
gctttgtgtatttcattgtttgctt

SEQ ID NO: 4582189 - DNA, 25 bp, Homo sapien
tatttcttccagctgatgttccact

SEQ ID NO: 4582190 - DNA, 25 bp, Homo sapien
gttccacttgtttcttctgctgttt

SEQ ID NO: 4582191 - DNA, 25 bp, Homo sapien
tttcttccagctgatgttccacttg

SEQ ID NO: 4582192 - DNA, 25 bp, Homo sapien
gttatttcttccagctgatgttcca

SEQ ID NO: 4582193 - DNA, 25 bp, Homo sapien
gttgattgattgtcacggagcttga

SEQ ID NO: 4582194 - DNA, 25 bp, Homo sapien
ttgtcacggagcttgactccagggc

SEQ ID NO: 4582195 - DNA, 25 bp, Homo sapien
tgattgtcacggagcttgactccag

SEQ ID NO: 4582196 - DNA, 25 bp, Homo sapien
gattgattgtcacggagcttgactc

SEQ ID NO: 4582197 - DNA, 25 bp, Homo sapien
agttggaagaggattgtggggagag

SEQ ID NO: 4582198 - DNA, 25 bp, Homo sapien
ctggcagagggtcacccagccccca

SEQ ID NO: 4582199 - DNA, 25 bp, Homo sapien
gctggcagagggtcacccagccccc

SEQ ID NO: 4582200 - DNA, 25 bp, Homo sapien
aggagttggaagaggattgtgggga

SEQ ID NO: 4582201 - DNA, 25 bp, Homo sapien
aggcagaggccaagtattccccaaa

SEQ ID NO: 4582202 - DNA, 25 bp, Homo sapien
ccaatcaatcaagcaggtgaagaag

SEQ ID NO: 4582203 - DNA, 25 bp, Homo sapien
aaacaggctgaaggttaatggcagc

SEQ ID NO: 4582204 - DNA, 25 bp, Homo sapien
taatggcagcaacataaaacaaggc

SEQ ID NO: 4582205 - DNA, 25 bp, Homo sapien
tcttcctttgctgatattcttttag

SEQ ID NO: 4582206 - DNA, 25 bp, Homo sapien
ttgtctcagggctactgccagtttt

SEQ ID NO: 4582207 - DNA, 25 bp, Homo sapien
tggaacaccagggctcttcctttgc

SEQ ID NO: 4582208 - DNA, 25 bp, Homo sapien
gtctcagggctactgccagtttttt

SEQ ID NO: 4582209 - DNA, 25 bp, Homo sapien
gctgccaatttgttccatcgagttt

SEQ ID NO: 4582210 - DNA, 25 bp, Homo sapien
tttgttccatcgagtttcttctggc

SEQ ID NO: 4582211 - DNA, 25 bp, Homo sapien
gactgctgccaatttgttccatcga

SEQ ID NO: 4582212 - DNA, 25 bp, Homo sapien
caatttgttccatcgagtttcttct

SEQ ID NO: 4582213 - DNA, 25 bp, Homo sapien
ggccacatcagcgaacacctccagt

SEQ ID NO: 4582214 - DNA, 25 bp, Homo sapien
acctccagtcacctacaaggctgct

SEQ ID NO: 4582215 - DNA, 25 bp, Homo sapien
agtcacctacaaggctgctgtgtga

SEQ ID NO: 4582216 - DNA, 25 bp, Homo sapien
cacatcagcgaacacctccagtcac

SEQ ID NO: 4582217 - DNA, 25 bp, Homo sapien
tttaaaaagtgtcttcacaatgtaa

SEQ ID NO: 4582218 - DNA, 25 bp, Homo sapien
tgtcttcacaatgtaagtctcaggc

SEQ ID NO: 4582219 - DNA, 25 bp, Homo sapien
taaaaagtgtcttcacaatgtaagt

SEQ ID NO: 4582220 - DNA, 25 bp, Homo sapien
aagtgtcttcacaatgtaagtctca

SEQ ID NO: 4582221 - DNA, 25 bp, Homo sapien
gaaaagtggaatcactggctgtatt

SEQ ID NO: 4582222 - DNA, 25 bp, Homo sapien
aaaagtggaatcactggctgtattt

SEQ ID NO: 4582223 - DNA, 25 bp, Homo sapien
agaaaagtggaatcactggctgtat

SEQ ID NO: 4582224 - DNA, 25 bp, Homo sapien
aaagtggaatcactggctgtatttt

SEQ ID NO: 4582225 - DNA, 25 bp, Homo sapien
tcaaggatagtcctggcccaaaggc

SEQ ID NO: 4582226 - DNA, 25 bp, Homo sapien
aaggatagtcctggcccaaaggctc

SEQ ID NO: 4582227 - DNA, 25 bp, Homo sapien
ggatagtcctggcccaaaggctccc

SEQ ID NO: 4582228 - DNA, 25 bp, Homo sapien
atagtcctggcccaaaggctcccct

SEQ ID NO: 4582229 - DNA, 25 bp, Homo sapien
ggtagaaagatcatcacataggggt

SEQ ID NO: 4582230 - DNA, 25 bp, Homo sapien
gggtagaaagatcatcacatagggg

SEQ ID NO: 4582231 - DNA, 25 bp, Homo sapien
gtagaaagatcatcacataggggtt

SEQ ID NO: 4582232 - DNA, 25 bp, Homo sapien
tatccttgaagtgcccctgccccta

SEQ ID NO: 4582233 - DNA, 25 bp, Homo sapien
tccttcctatccttgaagtgcccct

SEQ ID NO: 4582234 - DNA, 25 bp, Homo sapien
ttcctatccttgaagtgcccctgcc

SEQ ID NO: 4582235 - DNA, 25 bp, Homo sapien
ctatccttgaagtgcccctgcccct

SEQ ID NO: 4582236 - DNA, 25 bp, Homo sapien
gctggatggccaccgccagagcctg

SEQ ID NO: 4582237 - DNA, 25 bp, Homo sapien
ccaaatgaggacagagggtccacct

SEQ ID NO: 4582238 - DNA, 25 bp, Homo sapien
aggacagagggtccacctggaagag

SEQ ID NO: 4582239 - DNA, 25 bp, Homo sapien
cagagggtccacctggaagagtgga

SEQ ID NO: 4582240 - DNA, 25 bp, Homo sapien
ccgacacccattggaaacctggaat

SEQ ID NO: 4582241 - DNA, 25 bp, Homo sapien
cacccattggaaacctggaatccac

SEQ ID NO: 4582242 - DNA, 25 bp, Homo sapien
cccattggaaacctggaatccacac

SEQ ID NO: 4582243 - DNA, 25 bp, Homo sapien
gacacccattggaaacctggaatcc

SEQ ID NO: 4582244 - DNA, 25 bp, Homo sapien
ggaaatgggcaagaccatcacgctt

SEQ ID NO: 4582245 - DNA, 25 bp, Homo sapien
tgggcaagaccatcacgcttagcca

SEQ ID NO: 4582246 - DNA, 25 bp, Homo sapien
gcaagaccatcacgcttagccaaga

SEQ ID NO: 4582247 - DNA, 25 bp, Homo sapien
aagaccatcacgcttagccaagaac

SEQ ID NO: 4582248 - DNA, 25 bp, Homo sapien
ctcagcgggtttcggtctgccttca

SEQ ID NO: 4582249 - DNA, 25 bp, Homo sapien
cagcgggtttcggtctgccttcatc

SEQ ID NO: 4582250 - DNA, 25 bp, Homo sapien
agcgggtttcggtctgccttcatca

SEQ ID NO: 4582251 - DNA, 25 bp, Homo sapien
tcagcgggtttcggtctgccttcat

SEQ ID NO: 4582252 - DNA, 25 bp, Homo sapien
tgcccagggctcgagtatccaggct

SEQ ID NO: 4582253 - DNA, 25 bp, Homo sapien
tggtgccaagtagcctctctgcttg

SEQ ID NO: 4582254 - DNA, 25 bp, Homo sapien
tcagcccaaggagtaagagcctggt

SEQ ID NO: 4582255 - DNA, 25 bp, Homo sapien
tgcttgcgaagacagtcctgggatc

SEQ ID NO: 4582256 - DNA, 25 bp, Homo sapien
tgtgggactgtgcacgccagggcct

SEQ ID NO: 4582257 - DNA, 25 bp, Homo sapien
cttcttcagggtggcgccagcccag

SEQ ID NO: 4582258 - DNA, 25 bp, Homo sapien
cagcccaggccgtcgtgtgggactg

SEQ ID NO: 4582259 - DNA, 25 bp, Homo sapien
gactgtgcacgccagggcctgcaca

SEQ ID NO: 4582260 - DNA, 25 bp, Homo sapien
ctgccctccatgctacaggtatcgg

SEQ ID NO: 4582261 - DNA, 25 bp, Homo sapien
tccatgctacaggtatcggtctcat

SEQ ID NO: 4582262 - DNA, 25 bp, Homo sapien
tacaggtatcggtctcatttacaga

SEQ ID NO: 4582263 - DNA, 25 bp, Homo sapien
tacagacggggaaatggtggccaaa

SEQ ID NO: 4582264 - DNA, 25 bp, Homo sapien
tgtcccttctgccactcgtgctgcc

SEQ ID NO: 4582265 - DNA, 25 bp, Homo sapien
gccactcgtgctgccagggaccacg

SEQ ID NO: 4582266 - DNA, 25 bp, Homo sapien
cccttctgccactcgtgctgccagg

SEQ ID NO: 4582267 - DNA, 25 bp, Homo sapien
tgccactcgtgctgccagggaccac

SEQ ID NO: 4582268 - DNA, 25 bp, Homo sapien
agacccgcaagtgcttctgcaaggg

SEQ ID NO: 4582269 - DNA, 25 bp, Homo sapien
tgcgtaggctgcagacccgcaagtg

SEQ ID NO: 4582270 - DNA, 25 bp, Homo sapien
gtaggctgcagacccgcaagtgctt

SEQ ID NO: 4582271 - DNA, 25 bp, Homo sapien
gctgcagacccgcaagtgcttctgc

SEQ ID NO: 4582272 - DNA, 25 bp, Homo sapien
tgcttggcagttccggagagcatga

SEQ ID NO: 4582273 - DNA, 25 bp, Homo sapien
cagttccggagagcatgaaactcag

SEQ ID NO: 4582274 - DNA, 25 bp, Homo sapien
ttggcagttccggagagcatgaaac

SEQ ID NO: 4582275 - DNA, 25 bp, Homo sapien
tggcagttccggagagcatgaaact

SEQ ID NO: 4582276 - DNA, 25 bp, Homo sapien
ttaaggatactgctgggatgtgtgt

SEQ ID NO: 4582277 - DNA, 25 bp, Homo sapien
catgctcctccactagggaaggcag

SEQ ID NO: 4582278 - DNA, 25 bp, Homo sapien
ctcatgctcctccactagggaaggc

SEQ ID NO: 4582279 - DNA, 25 bp, Homo sapien
ctagggaaggcaggttaaggatact

SEQ ID NO: 4582280 - DNA, 25 bp, Homo sapien
aggcaccaggccgaggtcccagggt

SEQ ID NO: 4582281 - DNA, 25 bp, Homo sapien
cctgtgaactcagtggggtgctcac

SEQ ID NO: 4582282 - DNA, 25 bp, Homo sapien
caccaggccgaggtcccagggttgc

SEQ ID NO: 4582283 - DNA, 25 bp, Homo sapien
gttgcctggggcctgtgaactcagt

SEQ ID NO: 4582284 - DNA, 25 bp, Homo sapien
caaacttggcatcagccgtgagttt

SEQ ID NO: 4582285 - DNA, 25 bp, Homo sapien
gcatcagccgtgagtttcaggatct

SEQ ID NO: 4582286 - DNA, 25 bp, Homo sapien
ttggcatcagccgtgagtttcagga

SEQ ID NO: 4582287 - DNA, 25 bp, Homo sapien
aacttggcatcagccgtgagtttca

SEQ ID NO: 4582288 - DNA, 25 bp, Homo sapien
accttcaggcggtgccaggcccctg

SEQ ID NO: 4582289 - DNA, 25 bp, Homo sapien
gaccttcaggcggtgccaggcccct

SEQ ID NO: 4582290 - DNA, 25 bp, Homo sapien
gggaaaggagaccttcaggcggtgc

SEQ ID NO: 4582291 - DNA, 25 bp, Homo sapien
aaaggagaccttcaggcggtgccag

SEQ ID NO: 4582292 - DNA, 25 bp, Homo sapien
cagcccctcacctacagcctggatc

SEQ ID NO: 4582293 - DNA, 25 bp, Homo sapien
agcagctcctttagtacctggctgc

SEQ ID NO: 4582294 - DNA, 25 bp, Homo sapien
gctcctttagtacctggctgcagag

SEQ ID NO: 4582295 - DNA, 25 bp, Homo sapien
cagctcctttagtacctggctgcag

SEQ ID NO: 4582296 - DNA, 25 bp, Homo sapien
ctcctttagtacctggctgcagagc

SEQ ID NO: 4582297 - DNA, 25 bp, Homo sapien
cacccctcctccactcagactacac

SEQ ID NO: 4582298 - DNA, 25 bp, Homo sapien
aacacccctcctccactcagactac

SEQ ID NO: 4582299 - DNA, 25 bp, Homo sapien
ccccaacacccctcctccactcaga

SEQ ID NO: 4582300 - DNA, 25 bp, Homo sapien
ccaacacccctcctccactcagact

SEQ ID NO: 4582301 - DNA, 25 bp, Homo sapien
cacccagtcgggacagtccagatca

SEQ ID NO: 4582302 - DNA, 25 bp, Homo sapien
gccagcgtgctgatctctgccagca

SEQ ID NO: 4582303 - DNA, 25 bp, Homo sapien
tctgccagcacccagtcgggacagt

SEQ ID NO: 4582304 - DNA, 25 bp, Homo sapien
agcacccagtcgggacagtccagat

SEQ ID NO: 4582305 - DNA, 25 bp, Homo sapien
cctgtctcgggagcggagtagcggt

SEQ ID NO: 4582306 - DNA, 25 bp, Homo sapien
gtggacttttctcacgcccgcacac

SEQ ID NO: 4582307 - DNA, 25 bp, Homo sapien
ccgcccctgtctcgggagcggagta

SEQ ID NO: 4582308 - DNA, 25 bp, Homo sapien
gcccctgtctcgggagcggagtagc

SEQ ID NO: 4582309 - DNA, 25 bp, Homo sapien
agaggccagggcagacaacctccac

SEQ ID NO: 4582310 - DNA, 25 bp, Homo sapien
gaggccagggcagacaacctccacc

SEQ ID NO: 4582311 - DNA, 25 bp, Homo sapien
aggccagggcagacaacctccaccc

SEQ ID NO: 4582312 - DNA, 25 bp, Homo sapien
gtccgacagggtcaactgagtcgac

SEQ ID NO: 4582313 - DNA, 25 bp, Homo sapien
ggtccgacagggtcaactgagtcga

SEQ ID NO: 4582314 - DNA, 25 bp, Homo sapien
tccgacagggtcaactgagtcgacg

SEQ ID NO: 4582315 - DNA, 25 bp, Homo sapien
gctggaggtgccgggggcgaaatgc

SEQ ID NO: 4582316 - DNA, 25 bp, Homo sapien
gcccgctggaggtgccgggggcgaa

SEQ ID NO: 4582317 - DNA, 25 bp, Homo sapien
cgcagcccgctggaggtgccggggg

SEQ ID NO: 4582318 - DNA, 25 bp, Homo sapien
gaggtgccgggggcgaaatgctggc

SEQ ID NO: 4582319 - DNA, 25 bp, Homo sapien
aggattgtgcattttgacgggcagg

SEQ ID NO: 4582320 - DNA, 25 bp, Homo sapien
aagaaccaggattgtgcattttgac

SEQ ID NO: 4582321 - DNA, 25 bp, Homo sapien
ctgcaagaaccaggattgtgcattt

SEQ ID NO: 4582322 - DNA, 25 bp, Homo sapien
accaggattgtgcattttgacgggc

SEQ ID NO: 4582323 - DNA, 25 bp, Homo sapien
tgctttttgggcactcggataaaga

SEQ ID NO: 4582324 - DNA, 25 bp, Homo sapien
gctttttgggcactcggataaagac

SEQ ID NO: 4582325 - DNA, 25 bp, Homo sapien
gcccagcatgggtgtggctgcccat

SEQ ID NO: 4582326 - DNA, 25 bp, Homo sapien
aggtgtatgtctgggcttggaagca

SEQ ID NO: 4582327 - DNA, 25 bp, Homo sapien
aggatgtcccgcagccagaaggcag

SEQ ID NO: 4582328 - DNA, 25 bp, Homo sapien
tgcccattggtcctctgaagagcct

SEQ ID NO: 4582329 - DNA, 25 bp, Homo sapien
cctgtgaaacgtggaactggttcca

SEQ ID NO: 4582330 - DNA, 25 bp, Homo sapien
cgtggaactggttccacctgggcca

SEQ ID NO: 4582331 - DNA, 25 bp, Homo sapien
tggctttcctgtgaaacgtggaact

SEQ ID NO: 4582332 - DNA, 25 bp, Homo sapien
gtggaactggttccacctgggccag

SEQ ID NO: 4582333 - DNA, 25 bp, Homo sapien
gtgcatgcctccacgctggattttt

SEQ ID NO: 4582334 - DNA, 25 bp, Homo sapien
ggtgcatgcctccacgctggatttt

SEQ ID NO: 4582335 - DNA, 25 bp, Homo sapien
aagagtcttgtaccatgagtccagg

SEQ ID NO: 4582336 - DNA, 25 bp, Homo sapien
tctgacctttgtcctagactcctgg

SEQ ID NO: 4582337 - DNA, 25 bp, Homo sapien
ataatatccttacccaccaattagg

SEQ ID NO: 4582338 - DNA, 25 bp, Homo sapien
ggatcgactgtgcaaccttgcccca

SEQ ID NO: 4582339 - DNA, 25 bp, Homo sapien
aacaagtccgtgagagcatggcgtc

SEQ ID NO: 4582340 - DNA, 25 bp, Homo sapien
gagcatctaccattccaaagcacag

SEQ ID NO: 4582341 - DNA, 25 bp, Homo sapien
tgcagggtacagagcagcaaacaag

SEQ ID NO: 4582342 - DNA, 25 bp, Homo sapien
tatctgcggagggtcgggttctggg

SEQ ID NO: 4582343 - DNA, 25 bp, Homo sapien
ggattgggcccaccttgtcacttgc

SEQ ID NO: 4582344 - DNA, 25 bp, Homo sapien
ctgttccacagggattgggcccacc

SEQ ID NO: 4582345 - DNA, 25 bp, Homo sapien
ctgcctctagctcggctcccagctt

SEQ ID NO: 4582346 - DNA, 25 bp, Homo sapien
tccacagggattgggcccaccttgt

SEQ ID NO: 4582347 - DNA, 25 bp, Homo sapien
cacacaggaaagcaagttgctgggc

SEQ ID NO: 4582348 - DNA, 25 bp, Homo sapien
agtaactggcccaagggcacatgcc

SEQ ID NO: 4582349 - DNA, 25 bp, Homo sapien
aactcaacatgctcacctcatttca

SEQ ID NO: 4582350 - DNA, 25 bp, Homo sapien
tggcccgctgtgctctactgtgtct

SEQ ID NO: 4582351 - DNA, 25 bp, Homo sapien
cgtaacttgaaggtcagcacaggag

SEQ ID NO: 4582352 - DNA, 25 bp, Homo sapien
gaagacaacactataggatggcagg

SEQ ID NO: 4582353 - DNA, 25 bp, Homo sapien
gaaaacccaaccgaggatctgtcta

SEQ ID NO: 4582354 - DNA, 25 bp, Homo sapien
cagcagtgggacgttcagtggcaca

SEQ ID NO: 4582355 - DNA, 25 bp, Homo sapien
tacagctgtcagcatgactacaggc

SEQ ID NO: 4582356 - DNA, 25 bp, Homo sapien
tcttggcggctactgtacagctgtc

SEQ ID NO: 4582357 - DNA, 25 bp, Homo sapien
gtcagcagtcttggcggctactgta

SEQ ID NO: 4582358 - DNA, 25 bp, Homo sapien
cccgaggctatctggggtaagaagt

SEQ ID NO: 4582359 - DNA, 25 bp, Homo sapien
cattggctcggaaagtaaaacctca

SEQ ID NO: 4582360 - DNA, 25 bp, Homo sapien
gctaaatatagaggccagctccgtc

SEQ ID NO: 4582361 - DNA, 25 bp, Homo sapien
tagccactggtaagcctgaggatcc

SEQ ID NO: 4582362 - DNA, 25 bp, Homo sapien
tgctttgcaatatgacggtccactg

SEQ ID NO: 4582363 - DNA, 25 bp, Homo sapien
aggtatcctcctcctcgtcactgac

SEQ ID NO: 4582364 - DNA, 25 bp, Homo sapien
caggtatcctcctcctcgtcactga

SEQ ID NO: 4582365 - DNA, 25 bp, Homo sapien
tcaggtatcctcctcctcgtcactg

SEQ ID NO: 4582366 - DNA, 25 bp, Homo sapien
cgcaggaagtcctcacggatggcct

SEQ ID NO: 4582367 - DNA, 25 bp, Homo sapien
cacccttgtcagggctggtgtcccg

SEQ ID NO: 4582368 - DNA, 25 bp, Homo sapien
gtgtcccgctcacgcaggaagtcct

SEQ ID NO: 4582369 - DNA, 25 bp, Homo sapien
gctggtgtcccgctcacgcaggaag

SEQ ID NO: 4582370 - DNA, 25 bp, Homo sapien
tccagccggactttctccaagtggt

SEQ ID NO: 4582371 - DNA, 25 bp, Homo sapien
gccggactttctccaagtggtaggc

SEQ ID NO: 4582372 - DNA, 25 bp, Homo sapien
agctccagccggactttctccaagt

SEQ ID NO: 4582373 - DNA, 25 bp, Homo sapien
cagccggactttctccaagtggtag

SEQ ID NO: 4582374 - DNA, 25 bp, Homo sapien
ccccaaaggagatactgatcagctt

SEQ ID NO: 4582375 - DNA, 25 bp, Homo sapien
ggtccccaaaggagatactgatcag

SEQ ID NO: 4582376 - DNA, 25 bp, Homo sapien
gtccccaaaggagatactgatcagc

SEQ ID NO: 4582377 - DNA, 25 bp, Homo sapien
tccccaaaggagatactgatcagct

SEQ ID NO: 4582378 - DNA, 25 bp, Homo sapien
agagctcccggcacttgcatggtga

SEQ ID NO: 4582379 - DNA, 25 bp, Homo sapien
gacaagtgtccagatgcagtctaca

SEQ ID NO: 4582380 - DNA, 25 bp, Homo sapien
tagcactaatgggtcagccacactg

SEQ ID NO: 4582381 - DNA, 25 bp, Homo sapien
gagacaagagaatcagcggcgctcc

SEQ ID NO: 4582382 - DNA, 25 bp, Homo sapien
gcggagatacttaaatatagacatc

SEQ ID NO: 4582383 - DNA, 25 bp, Homo sapien
tccttgtacttaaaaagtgccagag

SEQ ID NO: 4582384 - DNA, 25 bp, Homo sapien
tatagacatcgaatcttgcaatttc

SEQ ID NO: 4582385 - DNA, 25 bp, Homo sapien
catcaaggatagtgcgagtgaagta

SEQ ID NO: 4582386 - DNA, 25 bp, Homo sapien
tcataagttccaggtgagccagccg

SEQ ID NO: 4582387 - DNA, 25 bp, Homo sapien
tggtttcctgataccctggacccag

SEQ ID NO: 4582388 - DNA, 25 bp, Homo sapien
tgtgcccggctaaggtaaagaataa

SEQ ID NO: 4582389 - DNA, 25 bp, Homo sapien
gccatttgacagatggtgaggctca

SEQ ID NO: 4582390 - DNA, 25 bp, Homo sapien
gaggatgtcactaacgacactatcc

SEQ ID NO: 4582391 - DNA, 25 bp, Homo sapien
taccaccagaaaccagttgaaagtg

SEQ ID NO: 4582392 - DNA, 25 bp, Homo sapien
tcaaagtggccatgcaaccgaggca

SEQ ID NO: 4582393 - DNA, 25 bp, Homo sapien
cataaggtctctgaacacccgctgg

SEQ ID NO: 4582394 - DNA, 25 bp, Homo sapien
aacaaaggggagaagtgtatcaggc

SEQ ID NO: 4582395 - DNA, 25 bp, Homo sapien
gggagaagtgtatcaggcctgccag

SEQ ID NO: 4582396 - DNA, 25 bp, Homo sapien
caggtcaccgggtaagcagacgagc

SEQ ID NO: 4582397 - DNA, 25 bp, Homo sapien
agaagtgtatcaggcctgccaggtc

SEQ ID NO: 4582398 - DNA, 25 bp, Homo sapien
ccaggccctggtaacgatgtgttca

SEQ ID NO: 4582399 - DNA, 25 bp, Homo sapien
ggagaaaccgctcctacagctagag

SEQ ID NO: 4582400 - DNA, 25 bp, Homo sapien
ggactccggcgtcacatgaacctga

SEQ ID NO: 4582401 - DNA, 25 bp, Homo sapien
tatataaactacctgcgcacgacag

SEQ ID NO: 4582402 - DNA, 25 bp, Homo sapien
tccactatggtaacgagacaccaga

SEQ ID NO: 4582403 - DNA, 25 bp, Homo sapien
ctttgtataatagtctcgaggcatg

SEQ ID NO: 4582404 - DNA, 25 bp, Homo sapien
tagtctcgaggcatgaaaacttcca

SEQ ID NO: 4582405 - DNA, 25 bp, Homo sapien
tcctaaaagagtctttgtataatag

SEQ ID NO: 4582406 - DNA, 25 bp, Homo sapien
acttgaccccagtggagacttcctg

SEQ ID NO: 4582407 - DNA, 25 bp, Homo sapien
tgttgggcagagttcgcagcaagtc

SEQ ID NO: 4582408 - DNA, 25 bp, Homo sapien
tagagagtcttcagatccaacgcgc

SEQ ID NO: 4582409 - DNA, 25 bp, Homo sapien
gccttgacagtagccgatatctgga

SEQ ID NO: 4582410 - DNA, 25 bp, Homo sapien
tggctctcaacctgcagagcatcct

SEQ ID NO: 4582411 - DNA, 25 bp, Homo sapien
tgctcttggctctcaacctgcagag

SEQ ID NO: 4582412 - DNA, 25 bp, Homo sapien
tcttggctctcaacctgcagagcat

SEQ ID NO: 4582413 - DNA, 25 bp, Homo sapien
ctgctcttggctctcaacctgcaga

SEQ ID NO: 4582414 - DNA, 25 bp, Homo sapien
caggtatttactttctatctggcag

SEQ ID NO: 4582415 - DNA, 25 bp, Homo sapien
tatttactttctatctggcagagct

SEQ ID NO: 4582416 - DNA, 25 bp, Homo sapien
ggtatttactttctatctggcagag

SEQ ID NO: 4582417 - DNA, 25 bp, Homo sapien
tactttctatctggcagagcttggc

SEQ ID NO: 4582418 - DNA, 25 bp, Homo sapien
tctttaggtacgcaaatgaccagtg

SEQ ID NO: 4582419 - DNA, 25 bp, Homo sapien
cccaaaactattaggaagtgagcca

SEQ ID NO: 4582420 - DNA, 25 bp, Homo sapien
acaaatgcatcacctctggacagag

SEQ ID NO: 4582421 - DNA, 25 bp, Homo sapien
gcaggaaccaggctacatgccaatt

SEQ ID NO: 4582422 - DNA, 25 bp, Homo sapien
caaaatctccttatttagaaatttg

SEQ ID NO: 4582423 - DNA, 25 bp, Homo sapien
gagctgagagttccaaaatctcctt

SEQ ID NO: 4582424 - DNA, 25 bp, Homo sapien
tgcatttcttcgtagagctgagagt

SEQ ID NO: 4582425 - DNA, 25 bp, Homo sapien
tttgccatcagatccctctctctcc

SEQ ID NO: 4582426 - DNA, 25 bp, Homo sapien
cctgaaaggtactgctaggcatgaa

SEQ ID NO: 4582427 - DNA, 25 bp, Homo sapien
tcagggtccctagcatgcctatcat

SEQ ID NO: 4582428 - DNA, 25 bp, Homo sapien
tctgggcctcacatatccaatgggt

SEQ ID NO: 4582429 - DNA, 25 bp, Homo sapien
taggtgagaccagtagctacagaca

SEQ ID NO: 4582430 - DNA, 25 bp, Homo sapien
gaagctcgagcgtgtcctttgggac

SEQ ID NO: 4582431 - DNA, 25 bp, Homo sapien
gatgaccggactgtctgctggagca

SEQ ID NO: 4582432 - DNA, 25 bp, Homo sapien
gatgatgacctcgtccttggcttgg

SEQ ID NO: 4582433 - DNA, 25 bp, Homo sapien
gatggtctccatgagcattcccagc

SEQ ID NO: 4582434 - DNA, 25 bp, Homo sapien
tgcagttgcatttcggaggccggct

SEQ ID NO: 4582435 - DNA, 25 bp, Homo sapien
ggcttcctgatgctgacgctgccac

SEQ ID NO: 4582436 - DNA, 25 bp, Homo sapien
actgcctgatgtgccttcacttgaa

SEQ ID NO: 4582437 - DNA, 25 bp, Homo sapien
gctgtgacgatttttgtacgaccca

SEQ ID NO: 4582438 - DNA, 25 bp, Homo sapien
gttcccactcttcattggtataaaa

SEQ ID NO: 4582439 - DNA, 25 bp, Homo sapien
gaaaactgtatcaaggcatatcata

SEQ ID NO: 4582440 - DNA, 25 bp, Homo sapien
taaactgtcaaaaggtaagaggcat

SEQ ID NO: 4582441 - DNA, 25 bp, Homo sapien
ggacatgctcacatgaaccacctta

SEQ ID NO: 4582442 - DNA, 25 bp, Homo sapien
tcatttgagcagtcggtaagtggag

SEQ ID NO: 4582443 - DNA, 25 bp, Homo sapien
aattaatggaatttggatgccctgg

SEQ ID NO: 4582444 - DNA, 25 bp, Homo sapien
agctcattgccccactgtttcaaag

SEQ ID NO: 4582445 - DNA, 25 bp, Homo sapien
ggcacagtctccacagctaggacat

SEQ ID NO: 4582446 - DNA, 25 bp, Homo sapien
ggcgggctgatttgcagcttgttct

SEQ ID NO: 4582447 - DNA, 25 bp, Homo sapien
aaaattcgtttctaatcagagaagc

SEQ ID NO: 4582448 - DNA, 25 bp, Homo sapien
gaaaaattcgtttctaatcagagaa

SEQ ID NO: 4582449 - DNA, 25 bp, Homo sapien
attcgtttctaatcagagaagcaca

SEQ ID NO: 4582450 - DNA, 25 bp, Homo sapien
aagaaaaattcgtttctaatcagag

SEQ ID NO: 4582451 - DNA, 25 bp, Homo sapien
tcactgagcactggtaaaggaaaca

SEQ ID NO: 4582452 - DNA, 25 bp, Homo sapien
tggagagcaacgtcctgaatgccac

SEQ ID NO: 4582453 - DNA, 25 bp, Homo sapien
cattcctgtgctgcgcaggcttgga

SEQ ID NO: 4582454 - DNA, 25 bp, Homo sapien
tgacttgaccacaatcagtgtagga

SEQ ID NO: 4582455 - DNA, 25 bp, Homo sapien
ctgcccctgcagtatacaaatattg

SEQ ID NO: 4582456 - DNA, 25 bp, Homo sapien
aggacactagagtccagagccaggg

SEQ ID NO: 4582457 - DNA, 25 bp, Homo sapien
gatgagtgtacctactagagagcac

SEQ ID NO: 4582458 - DNA, 25 bp, Homo sapien
tctacaggcacatggggtaaaggtg

SEQ ID NO: 4582459 - DNA, 25 bp, Homo sapien
ccagtcaggaggaatagaaatatct

SEQ ID NO: 4582460 - DNA, 25 bp, Homo sapien
aagtcccaccaaatctaggctgagg

SEQ ID NO: 4582461 - DNA, 25 bp, Homo sapien
tccaagtgaggacatagcatacatc

SEQ ID NO: 4582462 - DNA, 25 bp, Homo sapien
gcatatccaacacctagcatagagg

SEQ ID NO: 4582463 - DNA, 25 bp, Homo sapien
ctctggctctccaatcacagcattt

SEQ ID NO: 4582464 - DNA, 25 bp, Homo sapien
tctctggctctccaatcacagcatt

SEQ ID NO: 4582465 - DNA, 25 bp, Homo sapien
aggaggagaaacaaatatgggcttc

SEQ ID NO: 4582466 - DNA, 25 bp, Homo sapien
ttctctggctctccaatcacagcat

SEQ ID NO: 4582467 - DNA, 25 bp, Homo sapien
ggcactggccttgcctgattccaag

SEQ ID NO: 4582468 - DNA, 25 bp, Homo sapien
caaggctgtcactgggcttgcataa

SEQ ID NO: 4582469 - DNA, 25 bp, Homo sapien
tagtcgtatcttccatatgcttggc

SEQ ID NO: 4582470 - DNA, 25 bp, Homo sapien
cacatgctgaccttagtcgtatctt

SEQ ID NO: 4582471 - DNA, 25 bp, Homo sapien
ctttgtacatggaggcgctgggtaa

SEQ ID NO: 4582472 - DNA, 25 bp, Homo sapien
tccactcataaggtagcatcattat

SEQ ID NO: 4582473 - DNA, 25 bp, Homo sapien
gctgtccactcataaggtagcatca

SEQ ID NO: 4582474 - DNA, 25 bp, Homo sapien
ggaatgctgtccactcataaggtag

SEQ ID NO: 4582475 - DNA, 25 bp, Homo sapien
ctgtggaatgctgtccactcataag

SEQ ID NO: 4582476 - DNA, 25 bp, Homo sapien
ccagctcccctttatttctgcctta

SEQ ID NO: 4582477 - DNA, 25 bp, Homo sapien
cagctcccctttatttctgccttac

SEQ ID NO: 4582478 - DNA, 25 bp, Homo sapien
tctgctgaagctcctgtaaccagta

SEQ ID NO: 4582479 - DNA, 25 bp, Homo sapien
tctggctacaagacccttaggaaaa

SEQ ID NO: 4582480 - DNA, 25 bp, Homo sapien
gtcctgctgtcccacttgaccatgt

SEQ ID NO: 4582481 - DNA, 25 bp, Homo sapien
ccacttgaccatgtcaagactgtta

SEQ ID NO: 4582482 - DNA, 25 bp, Homo sapien
aggtgagctaagcaccctgggagcc

SEQ ID NO: 4582483 - DNA, 25 bp, Homo sapien
tctaggtcatacagggagtcaatac

SEQ ID NO: 4582484 - DNA, 25 bp, Homo sapien
cctctgacaatgcaggcaccatgaa

SEQ ID NO: 4582485 - DNA, 25 bp, Homo sapien
tcactagggcatatctgaaccaacc

SEQ ID NO: 4582486 - DNA, 25 bp, Homo sapien
gcctagtctgctctccgtgtggcca

SEQ ID NO: 4582487 - DNA, 25 bp, Homo sapien
ccgtgtggccagctttgagagcact

SEQ ID NO: 4582488 - DNA, 25 bp, Homo sapien
gcccaaccctgttgctctggagaaa

SEQ ID NO: 4582489 - DNA, 25 bp, Homo sapien
gagagcactttcatacatcccagcc

SEQ ID NO: 4582490 - DNA, 25 bp, Homo sapien
gcgtcgaacacgaaccagcggctgc

SEQ ID NO: 4582491 - DNA, 25 bp, Homo sapien
gcagcgcgtcctgcggactcttgaa

SEQ ID NO: 4582492 - DNA, 25 bp, Homo sapien
aggcgtccgcgatgtccaagtggcc

SEQ ID NO: 4582493 - DNA, 25 bp, Homo sapien
cctgcggactcttgaaatagtaaag

SEQ ID NO: 4582494 - DNA, 25 bp, Homo sapien
cgcgctggctcccgcgccggacccg

SEQ ID NO: 4582495 - DNA, 25 bp, Homo sapien
gatagccacacagccgcgctggctc

SEQ ID NO: 4582496 - DNA, 25 bp, Homo sapien
cacacagccgcgctggctcccgcgc

SEQ ID NO: 4582497 - DNA, 25 bp, Homo sapien
ctgcagatagccacacagccgcgct

SEQ ID NO: 4582498 - DNA, 25 bp, Homo sapien
gtgactaattggcttgtggggtagg

SEQ ID NO: 4582499 - DNA, 25 bp, Homo sapien
gactaattggcttgtggggtaggca

SEQ ID NO: 4582500 - DNA, 25 bp, Homo sapien
tgactaattggcttgtggggtaggc

SEQ ID NO: 4582501 - DNA, 25 bp, Homo sapien
gggagaacccggtctgtattgccat

SEQ ID NO: 4582502 - DNA, 25 bp, Homo sapien
aagagctgggagaacccggtctgta

SEQ ID NO: 4582503 - DNA, 25 bp, Homo sapien
ctgggagaacccggtctgtattgcc

SEQ ID NO: 4582504 - DNA, 25 bp, Homo sapien
gagctgggagaacccggtctgtatt

SEQ ID NO: 4582505 - DNA, 25 bp, Homo sapien
tggacaatgctatcctcgtaggtcc

SEQ ID NO: 4582506 - DNA, 25 bp, Homo sapien
atcctcgtaggtccttgtgaaggaa

SEQ ID NO: 4582507 - DNA, 25 bp, Homo sapien
ggagctgtgaatgggccgagcgctg

SEQ ID NO: 4582508 - DNA, 25 bp, Homo sapien
aagaaggttgggggactggagctgt

SEQ ID NO: 4582509 - DNA, 25 bp, Homo sapien
aaactgagaggtacactgacaaggg

SEQ ID NO: 4582510 - DNA, 25 bp, Homo sapien
ggtacactgacaagggagcctctct

SEQ ID NO: 4582511 - DNA, 25 bp, Homo sapien
aaattaacttgcgtcttgttcttgc

SEQ ID NO: 4582512 - DNA, 25 bp, Homo sapien
gagcctctctgatctaaggggtggt

SEQ ID NO: 4582513 - DNA, 25 bp, Homo sapien
aatctgacctctggcccgtagccat

SEQ ID NO: 4582514 - DNA, 25 bp, Homo sapien
ttggaatctgacctctggcccgtag

SEQ ID NO: 4582515 - DNA, 25 bp, Homo sapien
gacccgccttatttgcctgactttg

SEQ ID NO: 4582516 - DNA, 25 bp, Homo sapien
ttccactgagtatagagacccgcct

SEQ ID NO: 4582517 - DNA, 25 bp, Homo sapien
accaagcatctctgtcttacttcag

SEQ ID NO: 4582518 - DNA, 25 bp, Homo sapien
cagagatagttatatatcaagggct

SEQ ID NO: 4582519 - DNA, 25 bp, Homo sapien
aatcacttcagtcatattgtaacag

SEQ ID NO: 4582520 - DNA, 25 bp, Homo sapien
ggggaaatgacaacaaatcacttca

SEQ ID NO: 4582521 - DNA, 25 bp, Homo sapien
caataattggtgcaggagcaattgg

SEQ ID NO: 4582522 - DNA, 25 bp, Homo sapien
gaccgcccaaaggtatacaaataga

SEQ ID NO: 4582523 - DNA, 25 bp, Homo sapien
ccaggtgagatcttagggagaatac

SEQ ID NO: 4582524 - DNA, 25 bp, Homo sapien
ggttaccagatttacaacagaggca

SEQ ID NO: 4582525 - DNA, 25 bp, Homo sapien
tgtcatcaaccagcttcgaaaccgg

SEQ ID NO: 4582526 - DNA, 25 bp, Homo sapien
tgttctggatcaagagctgggaccc

SEQ ID NO: 4582527 - DNA, 25 bp, Homo sapien
gagcaggcttaggtacttcccagga

SEQ ID NO: 4582528 - DNA, 25 bp, Homo sapien
gaaaccggcgttacatcatctcagg

SEQ ID NO: 4582529 - DNA, 25 bp, Homo sapien
gaggccacacccatgtgactgcagg

SEQ ID NO: 4582530 - DNA, 25 bp, Homo sapien
tgtggacagcacaccagtgaggatt

SEQ ID NO: 4582531 - DNA, 25 bp, Homo sapien
tatttgtggtgtaaaccccagaggc

SEQ ID NO: 4582532 - DNA, 25 bp, Homo sapien
gattgcatagctcgttaaaaccctg

SEQ ID NO: 4582533 - DNA, 25 bp, Homo sapien
gacaaaggccagtcacacgtctagg

SEQ ID NO: 4582534 - DNA, 25 bp, Homo sapien
ttagggaaccctgcatagtggatgc

SEQ ID NO: 4582535 - DNA, 25 bp, Homo sapien
catgctggacagtgcctcattaggg

SEQ ID NO: 4582536 - DNA, 25 bp, Homo sapien
caagggtggcttgaacgtgacctcc

SEQ ID NO: 4582537 - DNA, 25 bp, Homo sapien
tcctcaatgaccttgtcgcacacaa

SEQ ID NO: 4582538 - DNA, 25 bp, Homo sapien
cttgcagatgaagttgtcagtgttg

SEQ ID NO: 4582539 - DNA, 25 bp, Homo sapien
ggcaatcatgtcctcgaagtcagca

SEQ ID NO: 4582540 - DNA, 25 bp, Homo sapien
ctgacttagtgagccgggccagcgt

SEQ ID NO: 4582541 - DNA, 25 bp, Homo sapien
cgccacgatcctttctttgaaggga

SEQ ID NO: 4582542 - DNA, 25 bp, Homo sapien
cacaaagtcgttgaaagtgaggttc

SEQ ID NO: 4582543 - DNA, 25 bp, Homo sapien
gactcgcagagcacggaaaacatgt

SEQ ID NO: 4582544 - DNA, 25 bp, Homo sapien
ggcatagtttgccttgagctctcgg

SEQ ID NO: 4582545 - DNA, 25 bp, Homo sapien
ggtgcaggataagcaggagggcccc

SEQ ID NO: 4582546 - DNA, 25 bp, Homo sapien
caatcactgtgggtgcaggataagc

SEQ ID NO: 4582547 - DNA, 25 bp, Homo sapien
atcactgtgggtgcaggataagcag

SEQ ID NO: 4582548 - DNA, 25 bp, Homo sapien
aacacacacagcaatcactgtgggt

SEQ ID NO: 4582549 - DNA, 25 bp, Homo sapien
gggaacttgctcgaaaagcagaatc

SEQ ID NO: 4582550 - DNA, 25 bp, Homo sapien
ctgggaacttgctcgaaaagcagaa

SEQ ID NO: 4582551 - DNA, 25 bp, Homo sapien
cctgactctactccacatgtactga

SEQ ID NO: 4582552 - DNA, 25 bp, Homo sapien
gtactgagcctgaattggcatttgg

SEQ ID NO: 4582553 - DNA, 25 bp, Homo sapien
cagctcatagaatcgcgaatgcagc

SEQ ID NO: 4582554 - DNA, 25 bp, Homo sapien
tggatgatgaggctcatgggcacgt

SEQ ID NO: 4582555 - DNA, 25 bp, Homo sapien
ggccagctcatagaatcgcgaatgc

SEQ ID NO: 4582556 - DNA, 25 bp, Homo sapien
tcctgtagtccattgggacgaggtt

SEQ ID NO: 4582557 - DNA, 25 bp, Homo sapien
tgcatggaccctcaaaggtgtaagg

SEQ ID NO: 4582558 - DNA, 25 bp, Homo sapien
acaagctgcatggaccctcaaaggt

SEQ ID NO: 4582559 - DNA, 25 bp, Homo sapien
catggaccctcaaaggtgtaaggca

SEQ ID NO: 4582560 - DNA, 25 bp, Homo sapien
gctgcatggaccctcaaaggtgtaa

SEQ ID NO: 4582561 - DNA, 25 bp, Homo sapien
ctgaatagggtgggctgcccactcg

SEQ ID NO: 4582562 - DNA, 25 bp, Homo sapien
cctcaatgtgggaatgcaggagctg

SEQ ID NO: 4582563 - DNA, 25 bp, Homo sapien
ctcaatgtgggaatgcaggagctgt

SEQ ID NO: 4582564 - DNA, 25 bp, Homo sapien
aatagggtgggctgcccactcggcc

SEQ ID NO: 4582565 - DNA, 25 bp, Homo sapien
agggaacccgaagctccctgtgagg

SEQ ID NO: 4582566 - DNA, 25 bp, Homo sapien
gggaacccgaagctccctgtgaggc

SEQ ID NO: 4582567 - DNA, 25 bp, Homo sapien
gtagggaacccgaagctccctgtga

SEQ ID NO: 4582568 - DNA, 25 bp, Homo sapien
tagggaacccgaagctccctgtgag

SEQ ID NO: 4582569 - DNA, 25 bp, Homo sapien
gaggatgtccttcttattgaagaag

SEQ ID NO: 4582570 - DNA, 25 bp, Homo sapien
ccttcttattgaagaaggtgcagtc

SEQ ID NO: 4582571 - DNA, 25 bp, Homo sapien
ttgaggatgtccttcttattgaaga

SEQ ID NO: 4582572 - DNA, 25 bp, Homo sapien
gatgtccttcttattgaagaaggtg

SEQ ID NO: 4582573 - DNA, 25 bp, Homo sapien
agttgtctagctgctcttcggtgaa

SEQ ID NO: 4582574 - DNA, 25 bp, Homo sapien
tgtctagctgctcttcggtgaagat

SEQ ID NO: 4582575 - DNA, 25 bp, Homo sapien
tgctcttcggtgaagatggtctgct

SEQ ID NO: 4582576 - DNA, 25 bp, Homo sapien
ctggtagttgtctagctgctcttcg

SEQ ID NO: 4582577 - DNA, 25 bp, Homo sapien
gagtccaggtcgcacggcgtgaggg

SEQ ID NO: 4582578 - DNA, 25 bp, Homo sapien
ccgggagacgctgcccggcacgaac

SEQ ID NO: 4582579 - DNA, 25 bp, Homo sapien
acgggaacccggagcggcagcgact

SEQ ID NO: 4582580 - DNA, 25 bp, Homo sapien
gaagaggtgtgagcccgggtcccgc

SEQ ID NO: 4582581 - DNA, 25 bp, Homo sapien
caagcagtgcgccataaattggatg

SEQ ID NO: 4582582 - DNA, 25 bp, Homo sapien
tggaaatgtataaggccagccaagc

SEQ ID NO: 4582583 - DNA, 25 bp, Homo sapien
cttttgaaggctgcatgatggtcca

SEQ ID NO: 4582584 - DNA, 25 bp, Homo sapien
gcatgcatttgactattgttaagat

SEQ ID NO: 4582585 - DNA, 25 bp, Homo sapien
actacacagtgcaagggacaaggaa

SEQ ID NO: 4582586 - DNA, 25 bp, Homo sapien
gatggtatctctgggcactacacag

SEQ ID NO: 4582587 - DNA, 25 bp, Homo sapien
ggagaactgccttagtacttaggaa

SEQ ID NO: 4582588 - DNA, 25 bp, Homo sapien
cacagtgcacttgctagagaatggc

SEQ ID NO: 4582589 - DNA, 25 bp, Homo sapien
gtaacaatccaaagatacggcatct

SEQ ID NO: 4582590 - DNA, 25 bp, Homo sapien
agtatgcccggaacaaccaccggag

SEQ ID NO: 4582591 - DNA, 25 bp, Homo sapien
gcatctctcttctgtcggagtctcc

SEQ ID NO: 4582592 - DNA, 25 bp, Homo sapien
tcacggcggtgcacaaagccaacat

SEQ ID NO: 4582593 - DNA, 25 bp, Homo sapien
tgatgatgctacttttcccgatgtg

SEQ ID NO: 4582594 - DNA, 25 bp, Homo sapien
catgggacggctccagacattgcag

SEQ ID NO: 4582595 - DNA, 25 bp, Homo sapien
tgctcagtgccgtgatgatgctgcg

SEQ ID NO: 4582596 - DNA, 25 bp, Homo sapien
tgatgctgcgccacatgggactttt

SEQ ID NO: 4582597 - DNA, 25 bp, Homo sapien
tacactatgagattggatcccgatc

SEQ ID NO: 4582598 - DNA, 25 bp, Homo sapien
ttttatgagaatgcgccacttgacc

SEQ ID NO: 4582599 - DNA, 25 bp, Homo sapien
gaaagagcagccgagtaacttgccc

SEQ ID NO: 4582600 - DNA, 25 bp, Homo sapien
tccaaagactggaggcaactcagcc

SEQ ID NO: 4582601 - DNA, 25 bp, Homo sapien
tccagagtaagtcaggtcgctaggt

SEQ ID NO: 4582602 - DNA, 25 bp, Homo sapien
taagcatcaagtcagttggcatgtg

SEQ ID NO: 4582603 - DNA, 25 bp, Homo sapien
gatgcccgccaagattccagagtaa

SEQ ID NO: 4582604 - DNA, 25 bp, Homo sapien
gaataatagggtcggcgatgcccgc

SEQ ID NO: 4582605 - DNA, 25 bp, Homo sapien
actacccacacgtgaagcttcttgg

SEQ ID NO: 4582606 - DNA, 25 bp, Homo sapien
ctattgttggcgtaagacctggtaa

SEQ ID NO: 4582607 - DNA, 25 bp, Homo sapien
tgcagcgcacgtgagcagtatcagc

SEQ ID NO: 4582608 - DNA, 25 bp, Homo sapien
tatagaaactgcaggcataggccct

SEQ ID NO: 4582609 - DNA, 25 bp, Homo sapien
cattttttgctcttggtaaaaggag

SEQ ID NO: 4582610 - DNA, 25 bp, Homo sapien
ttttgctcttggtaaaaggagtcaa

SEQ ID NO: 4582611 - DNA, 25 bp, Homo sapien
tttttgctcttggtaaaaggagtca

SEQ ID NO: 4582612 - DNA, 25 bp, Homo sapien
tgctcttggtaaaaggagtcaatga

SEQ ID NO: 4582613 - DNA, 25 bp, Homo sapien
actgtgagccgtttcagtttcatcg

SEQ ID NO: 4582614 - DNA, 25 bp, Homo sapien
agccgtttcagtttcatcgtgggac

SEQ ID NO: 4582615 - DNA, 25 bp, Homo sapien
tccaaaactgtgagccgtttcagtt

SEQ ID NO: 4582616 - DNA, 25 bp, Homo sapien
tgagccgtttcagtttcatcgtggg

SEQ ID NO: 4582617 - DNA, 25 bp, Homo sapien
gaagtctctctcgagaatggcccac

SEQ ID NO: 4582618 - DNA, 25 bp, Homo sapien
cgcgttcatgttgaccctccggatc

SEQ ID NO: 4582619 - DNA, 25 bp, Homo sapien
tccacccgaaatggagaagtctctc

SEQ ID NO: 4582620 - DNA, 25 bp, Homo sapien
ttctctatgatctcggacactgtgg

SEQ ID NO: 4582621 - DNA, 25 bp, Homo sapien
ggcctcctcgatgggcacagggggc

SEQ ID NO: 4582622 - DNA, 25 bp, Homo sapien
agcatggcgttgctgatgatgggca

SEQ ID NO: 4582623 - DNA, 25 bp, Homo sapien
acggcctcctcgatgggcacagggg

SEQ ID NO: 4582624 - DNA, 25 bp, Homo sapien
ctggtccccaatgagcatggcgttg

SEQ ID NO: 4582625 - DNA, 25 bp, Homo sapien
ccccggcacagaatgtagtccaggt

SEQ ID NO: 4582626 - DNA, 25 bp, Homo sapien
aagtttccctctcctcggcttgtca

SEQ ID NO: 4582627 - DNA, 25 bp, Homo sapien
gacaaatgctcacccaagtttccct

SEQ ID NO: 4582628 - DNA, 25 bp, Homo sapien
tggcagcaccccgacgacaaatgct

SEQ ID NO: 4582629 - DNA, 25 bp, Homo sapien
taatgataagttagtgaatgcttct

SEQ ID NO: 4582630 - DNA, 25 bp, Homo sapien
atgataagttagtgaatgcttctcc

SEQ ID NO: 4582631 - DNA, 25 bp, Homo sapien
aatgataagttagtgaatgcttctc

SEQ ID NO: 4582632 - DNA, 25 bp, Homo sapien
acagccgggcaccaacttgcctgag

SEQ ID NO: 4582633 - DNA, 25 bp, Homo sapien
tagcccatgaatatggtgcggcccc

SEQ ID NO: 4582634 - DNA, 25 bp, Homo sapien
gtcgatggcctcacaagtcttgtcc

SEQ ID NO: 4582635 - DNA, 25 bp, Homo sapien
tcctccatgttcaggtagcccatga

SEQ ID NO: 4582636 - DNA, 25 bp, Homo sapien
cttggcaaatcccagtgcctggcga

SEQ ID NO: 4582637 - DNA, 25 bp, Homo sapien
ggcgaaccttggctagcaccaggta

SEQ ID NO: 4582638 - DNA, 25 bp, Homo sapien
catacaagcggatgttgagacccag

SEQ ID NO: 4582639 - DNA, 25 bp, Homo sapien
gggccgctccatagaagttcttttg

SEQ ID NO: 4582640 - DNA, 25 bp, Homo sapien
atgaagccagactgagccgccacct

SEQ ID NO: 4582641 - DNA, 25 bp, Homo sapien
tctttcgccggatgaagccagactg

SEQ ID NO: 4582642 - DNA, 25 bp, Homo sapien
ccacagcagcatctttcgccggatg

SEQ ID NO: 4582643 - DNA, 25 bp, Homo sapien
caggtgaggttctgctccaaggtca

SEQ ID NO: 4582644 - DNA, 25 bp, Homo sapien
gcaggtagctgactaccacctcctg

SEQ ID NO: 4582645 - DNA, 25 bp, Homo sapien
cgtcgggttcggcaaagcaaacctg

SEQ ID NO: 4582646 - DNA, 25 bp, Homo sapien
tgctggacttctgccggccggatgt

SEQ ID NO: 4582647 - DNA, 25 bp, Homo sapien
cacaggtcgtagatctgggcggcaa

SEQ ID NO: 4582648 - DNA, 25 bp, Homo sapien
attgtcttgactcagcatcacgccc

SEQ ID NO: 4582649 - DNA, 25 bp, Homo sapien
tcaatgatggcgtccagggcttcct

SEQ ID NO: 4582650 - DNA, 25 bp, Homo sapien
tgtagactagcacacagcactggtt

SEQ ID NO: 4582651 - DNA, 25 bp, Homo sapien
ccagtggtgccggaagtgtagacta

SEQ ID NO: 4582652 - DNA, 25 bp, Homo sapien
cgactgcctttagatgtggcaactg

SEQ ID NO: 4582653 - DNA, 25 bp, Homo sapien
tacacattggccatcttgtttggag

SEQ ID NO: 4582654 - DNA, 25 bp, Homo sapien
cgtgtacacattggccatcttgttt

SEQ ID NO: 4582655 - DNA, 25 bp, Homo sapien
tatcacgactgcctttagatgtggc

SEQ ID NO: 4582656 - DNA, 25 bp, Homo sapien
ggtttcagtaagagaaatgtcacct

SEQ ID NO: 4582657 - DNA, 25 bp, Homo sapien
aaagtaccccatctccctgtgtgag

SEQ ID NO: 4582658 - DNA, 25 bp, Homo sapien
ctgcattgacaggaaaaatagatca

SEQ ID NO: 4582659 - DNA, 25 bp, Homo sapien
gacaggaaaaatagatcaggtttca

SEQ ID NO: 4582660 - DNA, 25 bp, Homo sapien
gaccatgatgacattggcgcagcag

SEQ ID NO: 4582661 - DNA, 25 bp, Homo sapien
cattggcgcagcagtcataagcgat

SEQ ID NO: 4582662 - DNA, 25 bp, Homo sapien
agctgcttctgcgtgtcgaccatga

SEQ ID NO: 4582663 - DNA, 25 bp, Homo sapien
taagcgatgtactggcaggcctctg

SEQ ID NO: 4582664 - DNA, 25 bp, Homo sapien
gagaagaaccactccggggagttga

SEQ ID NO: 4582665 - DNA, 25 bp, Homo sapien
actgtgcccactgccgagaagaacc

SEQ ID NO: 4582666 - DNA, 25 bp, Homo sapien
accactccggggagttgaagccgag

SEQ ID NO: 4582667 - DNA, 25 bp, Homo sapien
gttgaagccgaggatggccacactg

SEQ ID NO: 4582668 - DNA, 25 bp, Homo sapien
tgttcccacttgtcctggcgcttga

SEQ ID NO: 4582669 - DNA, 25 bp, Homo sapien
tgaggtccccatacttatccagggc

SEQ ID NO: 4582670 - DNA, 25 bp, Homo sapien
cttgaagcccaaagcgatgaggtcc

SEQ ID NO: 4582671 - DNA, 25 bp, Homo sapien
tccagggcctcgtagaacatccgat

SEQ ID NO: 4582672 - DNA, 25 bp, Homo sapien
tgggagtgacgaaccgagggaggcc

SEQ ID NO: 4582673 - DNA, 25 bp, Homo sapien
caagcattgtatcaggcctctttct

SEQ ID NO: 4582674 - DNA, 25 bp, Homo sapien
ggctgagcacctagcttcccaattg

SEQ ID NO: 4582675 - DNA, 25 bp, Homo sapien
tttctggctccctagcgcatagctc

SEQ ID NO: 4582676 - DNA, 25 bp, Homo sapien
gctgtagcgcagaggctccccctcc

SEQ ID NO: 4582677 - DNA, 25 bp, Homo sapien
acgctgtagcgcagaggctccccct

SEQ ID NO: 4582678 - DNA, 25 bp, Homo sapien
cacgctgtagcgcagaggctccccc

SEQ ID NO: 4582679 - DNA, 25 bp, Homo sapien
ccacgctgtagcgcagaggctcccc

SEQ ID NO: 4582680 - DNA, 25 bp, Homo sapien
ggcccccgagccaggtctgtgggag

SEQ ID NO: 4582681 - DNA, 25 bp, Homo sapien
gctgggcagagcatggcccccgagc

SEQ ID NO: 4582682 - DNA, 25 bp, Homo sapien
agagcatggcccccgagccaggtct

SEQ ID NO: 4582683 - DNA, 25 bp, Homo sapien
cccgagccaggtctgtgggagccca

SEQ ID NO: 4582684 - DNA, 25 bp, Homo sapien
ctcagaaaccagttggtcctcttct

SEQ ID NO: 4582685 - DNA, 25 bp, Homo sapien
tctcagaaaccagttggtcctcttc

SEQ ID NO: 4582686 - DNA, 25 bp, Homo sapien
tcagaaaccagttggtcctcttctt

SEQ ID NO: 4582687 - DNA, 25 bp, Homo sapien
ttctcagaaaccagttggtcctctt

SEQ ID NO: 4582688 - DNA, 25 bp, Homo sapien
tatctctggcctctcttcttcccag

SEQ ID NO: 4582689 - DNA, 25 bp, Homo sapien
ctgtctctctatctctggcctctct

SEQ ID NO: 4582690 - DNA, 25 bp, Homo sapien
ctctctatctctggcctctcttctt

SEQ ID NO: 4582691 - DNA, 25 bp, Homo sapien
gtctctctatctctggcctctcttc

SEQ ID NO: 4582692 - DNA, 25 bp, Homo sapien
gagcatcccactgggcattattcac

SEQ ID NO: 4582693 - DNA, 25 bp, Homo sapien
cactgagagctcgagagcatggttc

SEQ ID NO: 4582694 - DNA, 25 bp, Homo sapien
accttctctggcactgagagctcga

SEQ ID NO: 4582695 - DNA, 25 bp, Homo sapien
ctggagcatcccactgggcattatt

SEQ ID NO: 4582696 - DNA, 25 bp, Homo sapien
ctaagtttgtgaacacacctaggcc

SEQ ID NO: 4582697 - DNA, 25 bp, Homo sapien
actccttgtcggcactgcaggttcc

SEQ ID NO: 4582698 - DNA, 25 bp, Homo sapien
caaaactaagtttgtgaacacacct

SEQ ID NO: 4582699 - DNA, 25 bp, Homo sapien
ctgcaggttccgaacaaaactaagt

SEQ ID NO: 4582700 - DNA, 25 bp, Homo sapien
cttctgtttatagggacgatgaggc

SEQ ID NO: 4582701 - DNA, 25 bp, Homo sapien
caccttcttgctgcgggtgggtgcc

SEQ ID NO: 4582702 - DNA, 25 bp, Homo sapien
tgtttatagggacgatgaggctgtt

SEQ ID NO: 4582703 - DNA, 25 bp, Homo sapien
agcaccttcttgctgcgggtgggtg

SEQ ID NO: 4582704 - DNA, 25 bp, Homo sapien
gtcctcaggatggagctggcagacc

SEQ ID NO: 4582705 - DNA, 25 bp, Homo sapien
acctgagcaggagcacctctggcat

SEQ ID NO: 4582706 - DNA, 25 bp, Homo sapien
gcagtcctcaggatggagctggcag

SEQ ID NO: 4582707 - DNA, 25 bp, Homo sapien
gatggagctggcagacctgagcagg

SEQ ID NO: 4582708 - DNA, 25 bp, Homo sapien
cccagagaggcccggctccaccgga

SEQ ID NO: 4582709 - DNA, 25 bp, Homo sapien
agagaggcccggctccaccggaccg

SEQ ID NO: 4582710 - DNA, 25 bp, Homo sapien
cagagaacatgtcacggagtccccc

SEQ ID NO: 4582711 - DNA, 25 bp, Homo sapien
gagaacatgtcacggagtccccccg

SEQ ID NO: 4582712 - DNA, 25 bp, Homo sapien
gaagctctatgaggtccttggcacc

SEQ ID NO: 4582713 - DNA, 25 bp, Homo sapien
ggctttctgcagtacatcgtgtccc

SEQ ID NO: 4582714 - DNA, 25 bp, Homo sapien
tagatagcacttcatgcctggtagg

SEQ ID NO: 4582715 - DNA, 25 bp, Homo sapien
gggaccggtacactcagcatgtgag

SEQ ID NO: 4582716 - DNA, 25 bp, Homo sapien
aagatttagtataaggctgtagtag

SEQ ID NO: 4582717 - DNA, 25 bp, Homo sapien
gatttagtataaggctgtagtagtg

SEQ ID NO: 4582718 - DNA, 25 bp, Homo sapien
atttagtataaggctgtagtagtgg

SEQ ID NO: 4582719 - DNA, 25 bp, Homo sapien
tcaagatttagtataaggctgtagt

SEQ ID NO: 4582720 - DNA, 25 bp, Homo sapien
gaatttcagcactagaaagcccaga

SEQ ID NO: 4582721 - DNA, 25 bp, Homo sapien
tcttcagtgcttagcgcaatgcctg

SEQ ID NO: 4582722 - DNA, 25 bp, Homo sapien
tgcaagcatgcaaactccttaaggt

SEQ ID NO: 4582723 - DNA, 25 bp, Homo sapien
tacgattgcccctcgtaggctagca

SEQ ID NO: 4582724 - DNA, 25 bp, Homo sapien
gcttgtagcagcctcctgcgaccgt

SEQ ID NO: 4582725 - DNA, 25 bp, Homo sapien
cctgcgaccgttccacatccctggc

SEQ ID NO: 4582726 - DNA, 25 bp, Homo sapien
atccctggctcttagggggctcctc

SEQ ID NO: 4582727 - DNA, 25 bp, Homo sapien
ttgtagcagcctcctgcgaccgttc

SEQ ID NO: 4582728 - DNA, 25 bp, Homo sapien
catgtgttgtgagacagaccaggtg

SEQ ID NO: 4582729 - DNA, 25 bp, Homo sapien
tatggaggaatgcagacccgccttt

SEQ ID NO: 4582730 - DNA, 25 bp, Homo sapien
caaacgggcaggactgagatagagc

SEQ ID NO: 4582731 - DNA, 25 bp, Homo sapien
taagtcgcacaagatctgaggatta

SEQ ID NO: 4582732 - DNA, 25 bp, Homo sapien
ttgggtggtcctcacaatcatgtcc

SEQ ID NO: 4582733 - DNA, 25 bp, Homo sapien
tgggcagccgtatccagctccagaa

SEQ ID NO: 4582734 - DNA, 25 bp, Homo sapien
tccccgtgtgggcagccgtatccag

SEQ ID NO: 4582735 - DNA, 25 bp, Homo sapien
cttgggtggtcctcacaatcatgtc

SEQ ID NO: 4582736 - DNA, 25 bp, Homo sapien
tagtggttctcagcacaaatccaga

SEQ ID NO: 4582737 - DNA, 25 bp, Homo sapien
gcaactagagtgacccaaagaggct

SEQ ID NO: 4582738 - DNA, 25 bp, Homo sapien
agatcctgaagtggctgctacccct

SEQ ID NO: 4582739 - DNA, 25 bp, Homo sapien
tttgatgcaaatccgctccgcttct

SEQ ID NO: 4582740 - DNA, 25 bp, Homo sapien
ggtgccacgccgtggtgtgcacctg

SEQ ID NO: 4582741 - DNA, 25 bp, Homo sapien
gctgggtgccacgccgtggtgtgca

SEQ ID NO: 4582742 - DNA, 25 bp, Homo sapien
tgggtgccacgccgtggtgtgcacc

SEQ ID NO: 4582743 - DNA, 25 bp, Homo sapien
agctgggtgccacgccgtggtgtgc

SEQ ID NO: 4582744 - DNA, 25 bp, Homo sapien
tagggccttccctgatgccaaagaa

SEQ ID NO: 4582745 - DNA, 25 bp, Homo sapien
gctgggctgccttctaacaaactca

SEQ ID NO: 4582746 - DNA, 25 bp, Homo sapien
tgtccccaagaagaaataggtccag

SEQ ID NO: 4582747 - DNA, 25 bp, Homo sapien
tgttgaaggtacactgagcaggtcg

SEQ ID NO: 4582748 - DNA, 25 bp, Homo sapien
catgcgtatgtattaccaggagacg

SEQ ID NO: 4582749 - DNA, 25 bp, Homo sapien
gacgagcaggagaacaatgggcctc

SEQ ID NO: 4582750 - DNA, 25 bp, Homo sapien
cacaggactgggatcttgcgccact

SEQ ID NO: 4582751 - DNA, 25 bp, Homo sapien
gctctggattgaggcctcgcagtcg

SEQ ID NO: 4582752 - DNA, 25 bp, Homo sapien
aagtggcgtctctggagttgttcat

SEQ ID NO: 4582753 - DNA, 25 bp, Homo sapien
tcttaaagtggcgtctctggagttg

SEQ ID NO: 4582754 - DNA, 25 bp, Homo sapien
ccccggggggctcgcggtcttgctg

SEQ ID NO: 4582755 - DNA, 25 bp, Homo sapien
caagactgacgccgcagaccctcgc

SEQ ID NO: 4582756 - DNA, 25 bp, Homo sapien
ccgaggtgggaggatagtatgaatc

SEQ ID NO: 4582757 - DNA, 25 bp, Homo sapien
agggtgaagcaagacttcagtccca

SEQ ID NO: 4582758 - DNA, 25 bp, Homo sapien
aaattagctgggtagggtgaagcaa

SEQ ID NO: 4582759 - DNA, 25 bp, Homo sapien
gaggatagtatgaatccaggagttc

SEQ ID NO: 4582760 - DNA, 25 bp, Homo sapien
tgtaattttctaggcaccatactta

SEQ ID NO: 4582761 - DNA, 25 bp, Homo sapien
ctactgctgagataggactggccga

SEQ ID NO: 4582762 - DNA, 25 bp, Homo sapien
acttaacaccggccactactgctga

SEQ ID NO: 4582763 - DNA, 25 bp, Homo sapien
gatgaagtcaactttccttcctggt

SEQ ID NO: 4582764 - DNA, 25 bp, Homo sapien
tctgtgaagcagatgttcttatccc

SEQ ID NO: 4582765 - DNA, 25 bp, Homo sapien
cagacacatagctgctgtgcacaaa

SEQ ID NO: 4582766 - DNA, 25 bp, Homo sapien
gagaaagctaatttgcccagggtca

SEQ ID NO: 4582767 - DNA, 25 bp, Homo sapien
tgagaacacgtgctttctgcacatg

SEQ ID NO: 4582768 - DNA, 25 bp, Homo sapien
gcattcaaggctctagcacacctgt

SEQ ID NO: 4582769 - DNA, 25 bp, Homo sapien
tagttacacctctcagaacgcaggt

SEQ ID NO: 4582770 - DNA, 25 bp, Homo sapien
tctacaaaccggcatgcccagcttg

SEQ ID NO: 4582771 - DNA, 25 bp, Homo sapien
tgcttctccgatggctgttgctcct

SEQ ID NO: 4582772 - DNA, 25 bp, Homo sapien
gtgggcattcgagaggatactgtcc

SEQ ID NO: 4582773 - DNA, 25 bp, Homo sapien
tggggccagcaaaggacccctgtac

SEQ ID NO: 4582774 - DNA, 25 bp, Homo sapien
taagggttcccagtggtgggcattc

SEQ ID NO: 4582775 - DNA, 25 bp, Homo sapien
cgagaggatactgtccacatctggg

SEQ ID NO: 4582776 - DNA, 25 bp, Homo sapien
ttaggccgcagcctggctgtgaccg

SEQ ID NO: 4582777 - DNA, 25 bp, Homo sapien
gccgcagcctggctgtgaccgaaca

SEQ ID NO: 4582778 - DNA, 25 bp, Homo sapien
gcagcctggctgtgaccgaacagac

SEQ ID NO: 4582779 - DNA, 25 bp, Homo sapien
agcctggctgtgaccgaacagacgg

SEQ ID NO: 4582780 - DNA, 25 bp, Homo sapien
tagtgggtcaccaagatagtccctt

SEQ ID NO: 4582781 - DNA, 25 bp, Homo sapien
ccaagctttccccagtatgatcata

SEQ ID NO: 4582782 - DNA, 25 bp, Homo sapien
ccgggccgggagctgaattagactt

SEQ ID NO: 4582783 - DNA, 25 bp, Homo sapien
gatcatggtctgaaaggcaagctca

SEQ ID NO: 4582784 - DNA, 25 bp, Homo sapien
tagcataacctttcagccctaagtg

SEQ ID NO: 4582785 - DNA, 25 bp, Homo sapien
cttttcgtacaattgggttccagtg

SEQ ID NO: 4582786 - DNA, 25 bp, Homo sapien
ggacatccttgtacataaccatagt

SEQ ID NO: 4582787 - DNA, 25 bp, Homo sapien
ttttgggaggaagctacctatagca

SEQ ID NO: 4582788 - DNA, 25 bp, Homo sapien
taccaaaggagtaggtagacaggca

SEQ ID NO: 4582789 - DNA, 25 bp, Homo sapien
gatgtatagactggctagttcaagg

SEQ ID NO: 4582790 - DNA, 25 bp, Homo sapien
gatgtttatgaccaaggcggagagc

SEQ ID NO: 4582791 - DNA, 25 bp, Homo sapien
aaagtttaaactcatatcccaggca

SEQ ID NO: 4582792 - DNA, 25 bp, Homo sapien
aatataaaaatagtccgaggcccat

SEQ ID NO: 4582793 - DNA, 25 bp, Homo sapien
taaaaatagtccgaggcccatccat

SEQ ID NO: 4582794 - DNA, 25 bp, Homo sapien
tagtccgaggcccatccatatatga

SEQ ID NO: 4582795 - DNA, 25 bp, Homo sapien
ggcccatccatatatgatttgtctg

SEQ ID NO: 4582796 - DNA, 25 bp, Homo sapien
tcttcacccctcttttgtgttggct

SEQ ID NO: 4582797 - DNA, 25 bp, Homo sapien
tccaggaaacctgccgttggagagt

SEQ ID NO: 4582798 - DNA, 25 bp, Homo sapien
gccttttagcctgttatgagcattg

SEQ ID NO: 4582799 - DNA, 25 bp, Homo sapien
gtgttggcttatttcttgtttctcc

SEQ ID NO: 4582800 - DNA, 25 bp, Homo sapien
gcttgagagcagcaagaagcgacac

SEQ ID NO: 4582801 - DNA, 25 bp, Homo sapien
tttccatgcttggtcagtttcccag

SEQ ID NO: 4582802 - DNA, 25 bp, Homo sapien
agggcttgagagcagcaagaagcga

SEQ ID NO: 4582803 - DNA, 25 bp, Homo sapien
cagctcccagcaagctagaagcaga

SEQ ID NO: 4582804 - DNA, 25 bp, Homo sapien
ggtttcactatgttgatcaacctgg

SEQ ID NO: 4582805 - DNA, 25 bp, Homo sapien
cggggtttcactatgttgatcaacc

SEQ ID NO: 4582806 - DNA, 25 bp, Homo sapien
gtttcactatgttgatcaacctggt

SEQ ID NO: 4582807 - DNA, 25 bp, Homo sapien
cactatgttgatcaacctggtctcg

SEQ ID NO: 4582808 - DNA, 25 bp, Homo sapien
caagagccagtttttatgccaggca

SEQ ID NO: 4582809 - DNA, 25 bp, Homo sapien
ttaaacctacctgtgatggcagctg

SEQ ID NO: 4582810 - DNA, 25 bp, Homo sapien
gatgccttccaaagtcacgtagctg

SEQ ID NO: 4582811 - DNA, 25 bp, Homo sapien
tcatcgctgagctgaagagcatgct

SEQ ID NO: 4582812 - DNA, 25 bp, Homo sapien
gcaaaggcatagaactccccagtgt

SEQ ID NO: 4582813 - DNA, 25 bp, Homo sapien
tgataactgtttgcctgtgaccctc

SEQ ID NO: 4582814 - DNA, 25 bp, Homo sapien
tgaaccttccaagctctgtggtgag

SEQ ID NO: 4582815 - DNA, 25 bp, Homo sapien
tccgtggatcggacatggctgcatg

SEQ ID NO: 4582816 - DNA, 25 bp, Homo sapien
gcagatcagaccatgcaggtaaggt

SEQ ID NO: 4582817 - DNA, 25 bp, Homo sapien
gtaaggtgaaccagctgcacggacc

SEQ ID NO: 4582818 - DNA, 25 bp, Homo sapien
ccttaggagggtcaaagtgcagatc

SEQ ID NO: 4582819 - DNA, 25 bp, Homo sapien
ggaagaaggcctctaccaggagctg

SEQ ID NO: 4582820 - DNA, 25 bp, Homo sapien
gatagacaggagtacataatgttcc

SEQ ID NO: 4582821 - DNA, 25 bp, Homo sapien
tgttaaggcagcaagaatagcagcc

SEQ ID NO: 4582822 - DNA, 25 bp, Homo sapien
ttaatacatcaagtggaaggatgcc

SEQ ID NO: 4582823 - DNA, 25 bp, Homo sapien
tacccacctagcgagttagagacct

SEQ ID NO: 4582824 - DNA, 25 bp, Homo sapien
agttaaagaaatacctggatctctt

SEQ ID NO: 4582825 - DNA, 25 bp, Homo sapien
ctcttgatggctaaggcagagattt

SEQ ID NO: 4582826 - DNA, 25 bp, Homo sapien
gatctcttgatggctaaggcagaga

SEQ ID NO: 4582827 - DNA, 25 bp, Homo sapien
aagttaaagaaatacctggatctct

SEQ ID NO: 4582828 - DNA, 25 bp, Homo sapien
tgtcatgatcaatccgtacattctc

SEQ ID NO: 4582829 - DNA, 25 bp, Homo sapien
ggtaaggaatgtcatgatcaatccg

SEQ ID NO: 4582830 - DNA, 25 bp, Homo sapien
aacaagcctaagaaggtaaggaatg

SEQ ID NO: 4582831 - DNA, 25 bp, Homo sapien
agctttatgttaaagtatgaacagc

SEQ ID NO: 4582832 - DNA, 25 bp, Homo sapien
tggacaatcatagatgtgaatttcc

SEQ ID NO: 4582833 - DNA, 25 bp, Homo sapien
ttggacaatcatagatgtgaatttc

SEQ ID NO: 4582834 - DNA, 25 bp, Homo sapien
tattagtggcctatggagcctgcct

SEQ ID NO: 4582835 - DNA, 25 bp, Homo sapien
tatagggaaagtcacaaactgcgct

SEQ ID NO: 4582836 - DNA, 25 bp, Homo sapien
caggaactctggctacatggatgac

SEQ ID NO: 4582837 - DNA, 25 bp, Homo sapien
gaatggaggctttaaccgagcacct

SEQ ID NO: 4582838 - DNA, 25 bp, Homo sapien
ctgatcctggtgatcaaagaaggtg

SEQ ID NO: 4582839 - DNA, 25 bp, Homo sapien
tcctggtgatcaaagaaggtgtgaa

SEQ ID NO: 4582840 - DNA, 25 bp, Homo sapien
aaagaaggtgtgaacacaagtcctc

SEQ ID NO: 4582841 - DNA, 25 bp, Homo sapien
gaacacaagtcctcgttccaacatc

SEQ ID NO: 4582842 - DNA, 25 bp, Homo sapien
gcatcattgggtggctttctctcct

SEQ ID NO: 4582843 - DNA, 25 bp, Homo sapien
gcttcaaaaccaaggctcgcaggag

SEQ ID NO: 4582844 - DNA, 25 bp, Homo sapien
ggaaatggccaggtatcagcatcat

SEQ ID NO: 4582845 - DNA, 25 bp, Homo sapien
cccatgcctcggtacaggaaatggc

SEQ ID NO: 4582846 - DNA, 25 bp, Homo sapien
gacttttgttccagctaaggtcaac

SEQ ID NO: 4582847 - DNA, 25 bp, Homo sapien
ttggaacacaagtctaccttagagt

SEQ ID NO: 4582848 - DNA, 25 bp, Homo sapien
tatacaagaagactgctctcatctc

SEQ ID NO: 4582849 - DNA, 25 bp, Homo sapien
gtcactttggtagaagcctcaattt

SEQ ID NO: 4582850 - DNA, 25 bp, Homo sapien
aatgcaacgttcagcacccaggagg

SEQ ID NO: 4582851 - DNA, 25 bp, Homo sapien
gccgctcagcgtgccagccaaattg

SEQ ID NO: 4582852 - DNA, 25 bp, Homo sapien
tcaggacagaatgcaacgttcagca

SEQ ID NO: 4582853 - DNA, 25 bp, Homo sapien
ggaaacaaagtgagtgtcatcagga

SEQ ID NO: 4582854 - DNA, 25 bp, Homo sapien
ggagaaccaccataagacctaactg

SEQ ID NO: 4582855 - DNA, 25 bp, Homo sapien
gtgctcccagtccaaggaaagtgtc

SEQ ID NO: 4582856 - DNA, 25 bp, Homo sapien
gaaccacactacagaggcttcgcaa

SEQ ID NO: 4582857 - DNA, 25 bp, Homo sapien
cagcttggagagaccagtttaaacc

SEQ ID NO: 4582858 - DNA, 25 bp, Homo sapien
catagatcttgatgtagccatcatc

SEQ ID NO: 4582859 - DNA, 25 bp, Homo sapien
aaaaggtcaaggagcgaatgggcat

SEQ ID NO: 4582860 - DNA, 25 bp, Homo sapien
acatcatagatcttgatgtagccat

SEQ ID NO: 4582861 - DNA, 25 bp, Homo sapien
gaaaaggtcaaggagcgaatgggca

SEQ ID NO: 4582862 - DNA, 25 bp, Homo sapien
ttccagaggccaccggtgtggacag

SEQ ID NO: 4582863 - DNA, 25 bp, Homo sapien
cagtgggcacaatactttcatccac

SEQ ID NO: 4582864 - DNA, 25 bp, Homo sapien
accggtgtggacagtgggcacaata

SEQ ID NO: 4582865 - DNA, 25 bp, Homo sapien
tttccagaggccaccggtgtggaca

SEQ ID NO: 4582866 - DNA, 25 bp, Homo sapien
tccagttgcaatatcaaaaatattg

SEQ ID NO: 4582867 - DNA, 25 bp, Homo sapien
tattgatgattccatctatggctcc

SEQ ID NO: 4582868 - DNA, 25 bp, Homo sapien
aaatattgatgattccatctatggc

SEQ ID NO: 4582869 - DNA, 25 bp, Homo sapien
aaaatattgatgattccatctatgg

SEQ ID NO: 4582870 - DNA, 25 bp, Homo sapien
gaattttcctctcgtgtccaaagaa

SEQ ID NO: 4582871 - DNA, 25 bp, Homo sapien
aaatgttcactttcccgacatgagt

SEQ ID NO: 4582872 - DNA, 25 bp, Homo sapien
tcctctcgtgtccaaagaatattcc

SEQ ID NO: 4582873 - DNA, 25 bp, Homo sapien
ctaagaatgaattttcctctcgtgt

SEQ ID NO: 4582874 - DNA, 25 bp, Homo sapien
tgtggccagatactgggaatcagga

SEQ ID NO: 4582875 - DNA, 25 bp, Homo sapien
gtggccagatactgggaatcaggag

SEQ ID NO: 4582876 - DNA, 25 bp, Homo sapien
cctgtgtggtggttcagattctcca

SEQ ID NO: 4582877 - DNA, 25 bp, Homo sapien
tacttccttacttctccacgactgg

SEQ ID NO: 4582878 - DNA, 25 bp, Homo sapien
ttatgcagagtcctatccaaaaaga

SEQ ID NO: 4582879 - DNA, 25 bp, Homo sapien
aatgcttgcttttgttactggacca

SEQ ID NO: 4582880 - DNA, 25 bp, Homo sapien
ggtggcataatctcgagttcaagct

SEQ ID NO: 4582881 - DNA, 25 bp, Homo sapien
ttgccacacttggagaatatccagt

SEQ ID NO: 4582882 - DNA, 25 bp, Homo sapien
tacgccatccttttacttggaacca

SEQ ID NO: 4582883 - DNA, 25 bp, Homo sapien
gaaagtgagctagatacatacgcca

SEQ ID NO: 4582884 - DNA, 25 bp, Homo sapien
tagcagttaccacccattctggcag

SEQ ID NO: 4582885 - DNA, 25 bp, Homo sapien
ataactggcgggaggcgaatccatc

SEQ ID NO: 4582886 - DNA, 25 bp, Homo sapien
tccatccagggcaccaatcaaggga

SEQ ID NO: 4582887 - DNA, 25 bp, Homo sapien
tgttcatggaacacctaagcagctc

SEQ ID NO: 4582888 - DNA, 25 bp, Homo sapien
caggtcctgcatctatggactttat

SEQ ID NO: 4582889 - DNA, 25 bp, Homo sapien
tttgccattttccaagtcccaaaga

SEQ ID NO: 4582890 - DNA, 25 bp, Homo sapien
catctatggactttatctgtttgcc

SEQ ID NO: 4582891 - DNA, 25 bp, Homo sapien
cccaaagacgaatatgagcatcaag

SEQ ID NO: 4582892 - DNA, 25 bp, Homo sapien
ctggatgcagcaatgggcagggtgt

SEQ ID NO: 4582893 - DNA, 25 bp, Homo sapien
actgtaggtccagcctctcatcacg

SEQ ID NO: 4582894 - DNA, 25 bp, Homo sapien
tccctccagactccactgtaggtcc

SEQ ID NO: 4582895 - DNA, 25 bp, Homo sapien
cagggtgtggctgatgtccacagac

SEQ ID NO: 4582896 - DNA, 25 bp, Homo sapien
cctgtgactatgcaataccaatggt

SEQ ID NO: 4582897 - DNA, 25 bp, Homo sapien
cacactttacctggcatctgaaatt

SEQ ID NO: 4582898 - DNA, 25 bp, Homo sapien
caaagaacacactttacctggcatc

SEQ ID NO: 4582899 - DNA, 25 bp, Homo sapien
gggtccctgtgactatgcaatacca

SEQ ID NO: 4582900 - DNA, 25 bp, Homo sapien
aagtatttcccggactgcaactgga

SEQ ID NO: 4582901 - DNA, 25 bp, Homo sapien
tacagagtaacaggaaaacaagtgg

SEQ ID NO: 4582902 - DNA, 25 bp, Homo sapien
accatattgctattgctttcttgcc

SEQ ID NO: 4582903 - DNA, 25 bp, Homo sapien
caactggagagttcagaagcaaaac

SEQ ID NO: 4582904 - DNA, 25 bp, Homo sapien
gtttgtcccccaagcaactgaccaa

SEQ ID NO: 4582905 - DNA, 25 bp, Homo sapien
catttccagaccttcaccaggtcat

SEQ ID NO: 4582906 - DNA, 25 bp, Homo sapien
ccaggtcatctagggagcctgtgac

SEQ ID NO: 4582907 - DNA, 25 bp, Homo sapien
ttgtttgtcccccaagcaactgacc

SEQ ID NO: 4582908 - DNA, 25 bp, Homo sapien
agtcttcttgcatacgacttaatga

SEQ ID NO: 4582909 - DNA, 25 bp, Homo sapien
tgaagccgagatactgttcaacaat

SEQ ID NO: 4582910 - DNA, 25 bp, Homo sapien
caacaattgtgaggtaacatttatt

SEQ ID NO: 4582911 - DNA, 25 bp, Homo sapien
caaagtgctttcctatacagctttt

SEQ ID NO: 4582912 - DNA, 25 bp, Homo sapien
tgagtagcccatgcacaaacatggc

SEQ ID NO: 4582913 - DNA, 25 bp, Homo sapien
tcacctacttagagagcaagagctt

SEQ ID NO: 4582914 - DNA, 25 bp, Homo sapien
cagatgagccggcattaacagagtt

SEQ ID NO: 4582915 - DNA, 25 bp, Homo sapien
tgaattgcttaaacaggcaggctac

SEQ ID NO: 4582916 - DNA, 25 bp, Homo sapien
tgctcttgtttgaagagaataccgt

SEQ ID NO: 4582917 - DNA, 25 bp, Homo sapien
gctcttgtttgaagagaataccgta

SEQ ID NO: 4582918 - DNA, 25 bp, Homo sapien
gaaccaatcctcctctcagtatttg

SEQ ID NO: 4582919 - DNA, 25 bp, Homo sapien
gactacacatccagaaaacctactg

SEQ ID NO: 4582920 - DNA, 25 bp, Homo sapien
taggagccaggcaagaatgagatgc

SEQ ID NO: 4582921 - DNA, 25 bp, Homo sapien
ggtaaagacttggatgaaccaatcc

SEQ ID NO: 4582922 - DNA, 25 bp, Homo sapien
tccttaaccaaggatcaaggacaaa

SEQ ID NO: 4582923 - DNA, 25 bp, Homo sapien
aaggatcaaggacaaaaggccagac

SEQ ID NO: 4582924 - DNA, 25 bp, Homo sapien
tgtcatcaggatagaaggcacacag

SEQ ID NO: 4582925 - DNA, 25 bp, Homo sapien
gtggaaacaacaccaggatttcagt

SEQ ID NO: 4582926 - DNA, 25 bp, Homo sapien
tgtggaaacaacaccaggatttcag

SEQ ID NO: 4582927 - DNA, 25 bp, Homo sapien
gtcatcaggatagaaggcacacagg

SEQ ID NO: 4582928 - DNA, 25 bp, Homo sapien
tttctcaggctacattaagggctaa

SEQ ID NO: 4582929 - DNA, 25 bp, Homo sapien
gaaaaatgtagcaccaaagactgca

SEQ ID NO: 4582930 - DNA, 25 bp, Homo sapien
tcacctcaagtgtgactgcagagag

SEQ ID NO: 4582931 - DNA, 25 bp, Homo sapien
gaacctagggactcaactaacagct

SEQ ID NO: 4582932 - DNA, 25 bp, Homo sapien
acctcgctcactcgccctctggcct

SEQ ID NO: 4582933 - DNA, 25 bp, Homo sapien
cctggactgtcaacggccctaatga

SEQ ID NO: 4582934 - DNA, 25 bp, Homo sapien
tcgggcccaacctcgctcactcgcc

SEQ ID NO: 4582935 - DNA, 25 bp, Homo sapien
tccccaacggccctgcgctccaact

SEQ ID NO: 4582936 - DNA, 25 bp, Homo sapien
gcgcgactgcgacgcgcaaagatga

SEQ ID NO: 4582937 - DNA, 25 bp, Homo sapien
ggctccgcgcgactgcgacgcgcaa

SEQ ID NO: 4582938 - DNA, 25 bp, Homo sapien
actgcgacgcgcaaagatgagctat

SEQ ID NO: 4582939 - DNA, 25 bp, Homo sapien
ggctgcacgtcggaagccgggctcc

SEQ ID NO: 4582940 - DNA, 25 bp, Homo sapien
gagcactccgcagcgcccgttgccg

SEQ ID NO: 4582941 - DNA, 25 bp, Homo sapien
gctcggagcactccgcagcgcccgt

SEQ ID NO: 4582942 - DNA, 25 bp, Homo sapien
ggccccgccctcacggctcggagca

SEQ ID NO: 4582943 - DNA, 25 bp, Homo sapien
tcacggctcggagcactccgcagcg

SEQ ID NO: 4582944 - DNA, 25 bp, Homo sapien
cagggacataattgttccctgagtc

SEQ ID NO: 4582945 - DNA, 25 bp, Homo sapien
gggacataattgttccctgagtcat

SEQ ID NO: 4582946 - DNA, 25 bp, Homo sapien
agggacataattgttccctgagtca

SEQ ID NO: 4582947 - DNA, 25 bp, Homo sapien
acagggacataattgttccctgagt

SEQ ID NO: 4582948 - DNA, 25 bp, Homo sapien
ttcccgggaaagacatgaatcagca

SEQ ID NO: 4582949 - DNA, 25 bp, Homo sapien
ttgacttcccgggaaagacatgaat

SEQ ID NO: 4582950 - DNA, 25 bp, Homo sapien
gacttcccgggaaagacatgaatca

SEQ ID NO: 4582951 - DNA, 25 bp, Homo sapien
cttcccgggaaagacatgaatcagc

SEQ ID NO: 4582952 - DNA, 25 bp, Homo sapien
tagggacactccaaagagccttttg

SEQ ID NO: 4582953 - DNA, 25 bp, Homo sapien
tcccttgccttcagagatgatttct

SEQ ID NO: 4582954 - DNA, 25 bp, Homo sapien
gggtgtggaatagggacactccaaa

SEQ ID NO: 4582955 - DNA, 25 bp, Homo sapien
ttttgcagccgtcgggagaaggcca

SEQ ID NO: 4582956 - DNA, 25 bp, Homo sapien
gaaggcaggaactctaccctcaaca

SEQ ID NO: 4582957 - DNA, 25 bp, Homo sapien
tgaaggcaggaactctaccctcaac

SEQ ID NO: 4582958 - DNA, 25 bp, Homo sapien
aaggcaggaactctaccctcaacac

SEQ ID NO: 4582959 - DNA, 25 bp, Homo sapien
gtgaaggcaggaactctaccctcaa

SEQ ID NO: 4582960 - DNA, 25 bp, Homo sapien
agctgcatggagggggaccaggctc

SEQ ID NO: 4582961 - DNA, 25 bp, Homo sapien
gctgcatggagggggaccaggctcc

SEQ ID NO: 4582962 - DNA, 25 bp, Homo sapien
aagctgcatggagggggaccaggct

SEQ ID NO: 4582963 - DNA, 25 bp, Homo sapien
ctgcatggagggggaccaggctcca

SEQ ID NO: 4582964 - DNA, 25 bp, Homo sapien
ggcgcctccagccaccaccgcgccc

SEQ ID NO: 4582965 - DNA, 25 bp, Homo sapien
caccaccgcgcccttctcctcccca

SEQ ID NO: 4582966 - DNA, 25 bp, Homo sapien
cgcctccagccaccaccgcgccctt

SEQ ID NO: 4582967 - DNA, 25 bp, Homo sapien
ctccagccaccaccgcgcccttctc

SEQ ID NO: 4582968 - DNA, 25 bp, Homo sapien
tttcagaataggatcccggactggg

SEQ ID NO: 4582969 - DNA, 25 bp, Homo sapien
gcttttgcaaaacaggccgcaccta

SEQ ID NO: 4582970 - DNA, 25 bp, Homo sapien
caagatttgattaacccgatgagga

SEQ ID NO: 4582971 - DNA, 25 bp, Homo sapien
tctcctagtgactcaaggcgcgcag

SEQ ID NO: 4582972 - DNA, 25 bp, Homo sapien
atgtttggcgccctcctcgatggtg

SEQ ID NO: 4582973 - DNA, 25 bp, Homo sapien
gtttgctgaatgtttggcgccctcc

SEQ ID NO: 4582974 - DNA, 25 bp, Homo sapien
tcgatggtgcggactttatctcgtg

SEQ ID NO: 4582975 - DNA, 25 bp, Homo sapien
ccctcctcgatggtgcggactttat

SEQ ID NO: 4582976 - DNA, 25 bp, Homo sapien
tacagttttagcagtcccgatggcc

SEQ ID NO: 4582977 - DNA, 25 bp, Homo sapien
taaagttagggtatgaccagtgccc

SEQ ID NO: 4582978 - DNA, 25 bp, Homo sapien
tcaaatttgggaccaggctctgcca

SEQ ID NO: 4582979 - DNA, 25 bp, Homo sapien
gtctctcatctcgaaaacaagggcg

SEQ ID NO: 4582980 - DNA, 25 bp, Homo sapien
gacctaatggtggtgactgcgggag

SEQ ID NO: 4582981 - DNA, 25 bp, Homo sapien
cctaatggtggtgactgcgggagga

SEQ ID NO: 4582982 - DNA, 25 bp, Homo sapien
agcaggagtggtactcaagttctgg

SEQ ID NO: 4582983 - DNA, 25 bp, Homo sapien
agcaatagcaggagtggtactcaag

SEQ ID NO: 4582984 - DNA, 25 bp, Homo sapien
attgtccccgggttcctcagaggag

SEQ ID NO: 4582985 - DNA, 25 bp, Homo sapien
tgatgtccgcttcccttgggcacag

SEQ ID NO: 4582986 - DNA, 25 bp, Homo sapien
tagcaataaacatatcagccccggc

SEQ ID NO: 4582987 - DNA, 25 bp, Homo sapien
gaattccaggcacttgggtccacgt

SEQ ID NO: 4582988 - DNA, 25 bp, Homo sapien
caatacgggtcttgttggaagctgc

SEQ ID NO: 4582989 - DNA, 25 bp, Homo sapien
gctgtacgaaattgtgatggctttt

SEQ ID NO: 4582990 - DNA, 25 bp, Homo sapien
tgttggaagctgctgtacgaaattg

SEQ ID NO: 4582991 - DNA, 25 bp, Homo sapien
tactcaatacgggtcttgttggaag

SEQ ID NO: 4582992 - DNA, 25 bp, Homo sapien
ggaacattttcttcgcagattgaga

SEQ ID NO: 4582993 - DNA, 25 bp, Homo sapien
taggccgaaactcaggaacattttc

SEQ ID NO: 4582994 - DNA, 25 bp, Homo sapien
tctggagaactaggccgaaactcag

SEQ ID NO: 4582995 - DNA, 25 bp, Homo sapien
tcttcgcagattgagaatacaccca

SEQ ID NO: 4582996 - DNA, 25 bp, Homo sapien
aagatgagagcataacctttggcac

SEQ ID NO: 4582997 - DNA, 25 bp, Homo sapien
tatgaagccacaggttatagtgacc

SEQ ID NO: 4582998 - DNA, 25 bp, Homo sapien
ttttataactggcacatcgtaagtg

SEQ ID NO: 4582999 - DNA, 25 bp, Homo sapien
gagtagctaagagtaatgtccattc

SEQ ID NO: 4583000 - DNA, 25 bp, Homo sapien
ggtttggtattgtatccccagctcc

SEQ ID NO: 4583001 - DNA, 25 bp, Homo sapien
tcctagaacaattgctggcacatag

SEQ ID NO: 4583002 - DNA, 25 bp, Homo sapien
tgaatttgtgtgctactttgggcaa

SEQ ID NO: 4583003 - DNA, 25 bp, Homo sapien
aatgaatccatataggacccataga

SEQ ID NO: 4583004 - DNA, 25 bp, Homo sapien
tcaaattgctgggatacagacatga

SEQ ID NO: 4583005 - DNA, 25 bp, Homo sapien
gggatacagacatgagccgccgcgc

SEQ ID NO: 4583006 - DNA, 25 bp, Homo sapien
tctcaaattgctgggatacagacat

SEQ ID NO: 4583007 - DNA, 25 bp, Homo sapien
ctgggatacagacatgagccgccgc

SEQ ID NO: 4583008 - DNA, 25 bp, Homo sapien
catatatggtaacaaggtcgtgtgc

SEQ ID NO: 4583009 - DNA, 25 bp, Homo sapien
tcaggagatgatggtaaagctagct

SEQ ID NO: 4583010 - DNA, 25 bp, Homo sapien
catttgaaagaaggtactagtatcc

SEQ ID NO: 4583011 - DNA, 25 bp, Homo sapien
caataagatggactagagttcgaca

SEQ ID NO: 4583012 - DNA, 25 bp, Homo sapien
tattacagtatcaggagccaatacc

SEQ ID NO: 4583013 - DNA, 25 bp, Homo sapien
ggttgtccccatggcatagattgct

SEQ ID NO: 4583014 - DNA, 25 bp, Homo sapien
caataccttgtgagcagttggttac

SEQ ID NO: 4583015 - DNA, 25 bp, Homo sapien
caaacacttgtgttgggagccttcc

SEQ ID NO: 4583016 - DNA, 25 bp, Homo sapien
tgcagatggacgttttgaagggacc

SEQ ID NO: 4583017 - DNA, 25 bp, Homo sapien
gcagggtccctatgtagcacgtata

SEQ ID NO: 4583018 - DNA, 25 bp, Homo sapien
taagactaagcatagattgagggcc

SEQ ID NO: 4583019 - DNA, 25 bp, Homo sapien
gaaacacattggaagctgcgctcga

SEQ ID NO: 4583020 - DNA, 25 bp, Homo sapien
tcctaacaggttgttgaagattgga

SEQ ID NO: 4583021 - DNA, 25 bp, Homo sapien
tttcctaacaggttgttgaagattg

SEQ ID NO: 4583022 - DNA, 25 bp, Homo sapien
cctaacaggttgttgaagattggaa

SEQ ID NO: 4583023 - DNA, 25 bp, Homo sapien
taacaggttgttgaagattggaaat

SEQ ID NO: 4583024 - DNA, 25 bp, Homo sapien
cccaggttcttgatcggatgtttct

SEQ ID NO: 4583025 - DNA, 25 bp, Homo sapien
ttcttgatcggatgtttctgtggac

SEQ ID NO: 4583026 - DNA, 25 bp, Homo sapien
tcatagcccaggttcttgatcggat

SEQ ID NO: 4583027 - DNA, 25 bp, Homo sapien
cttgatcggatgtttctgtggactt

SEQ ID NO: 4583028 - DNA, 25 bp, Homo sapien
tgttatttataaatgggcaaatata

SEQ ID NO: 4583029 - DNA, 25 bp, Homo sapien
ctgttatttataaatgggcaaatat

SEQ ID NO: 4583030 - DNA, 25 bp, Homo sapien
gttatttataaatgggcaaatatat

SEQ ID NO: 4583031 - DNA, 25 bp, Homo sapien
aaatctagtatttgtatcctggcaa

SEQ ID NO: 4583032 - DNA, 25 bp, Homo sapien
cctttgactgtgctggagaattcca

SEQ ID NO: 4583033 - DNA, 25 bp, Homo sapien
taacagactaagttgctaacctcaa

SEQ ID NO: 4583034 - DNA, 25 bp, Homo sapien
aaatattatctgaactggactagtg

SEQ ID NO: 4583035 - DNA, 25 bp, Homo sapien
cccagcgtgattgtcttagatagaa

SEQ ID NO: 4583036 - DNA, 25 bp, Homo sapien
cagagatagctagtcccttcagtca

SEQ ID NO: 4583037 - DNA, 25 bp, Homo sapien
aatggaggcatagccctttagaccc

SEQ ID NO: 4583038 - DNA, 25 bp, Homo sapien
gaggctagggtactgctaaagatcc

SEQ ID NO: 4583039 - DNA, 25 bp, Homo sapien
acaaggaagtctcccaggcaggcac

SEQ ID NO: 4583040 - DNA, 25 bp, Homo sapien
tgctgtccctagaatgcacaccagg

SEQ ID NO: 4583041 - DNA, 25 bp, Homo sapien
ggcaacatacttccaatcatcttga

SEQ ID NO: 4583042 - DNA, 25 bp, Homo sapien
aaatacgatcaatcaccatggcaac

SEQ ID NO: 4583043 - DNA, 25 bp, Homo sapien
caggggttgcagaaacaatcctgct

SEQ ID NO: 4583044 - DNA, 25 bp, Homo sapien
gcaatatacttgacactttggatgg

SEQ ID NO: 4583045 - DNA, 25 bp, Homo sapien
gaactagagcttctcgtgaggttag

SEQ ID NO: 4583046 - DNA, 25 bp, Homo sapien
ttcagcaatatacttgacactttgg

SEQ ID NO: 4583047 - DNA, 25 bp, Homo sapien
gcttctcgtgaggttagcactgaaa

SEQ ID NO: 4583048 - DNA, 25 bp, Homo sapien
gactctgcgcggctgaagcaattca

SEQ ID NO: 4583049 - DNA, 25 bp, Homo sapien
gagcgttgccctcgttgcttgttgg

SEQ ID NO: 4583050 - DNA, 25 bp, Homo sapien
tgcggtggtggcagtaaccacacat

SEQ ID NO: 4583051 - DNA, 25 bp, Homo sapien
cagatttgagagctcggcaccgtag

SEQ ID NO: 4583052 - DNA, 25 bp, Homo sapien
ccatgagggcattgtgtgtgtcgtc

SEQ ID NO: 4583053 - DNA, 25 bp, Homo sapien
gaggacagaaatgcacagggtcacc

SEQ ID NO: 4583054 - DNA, 25 bp, Homo sapien
tgatcaccaggagaaacaccgtcag

SEQ ID NO: 4583055 - DNA, 25 bp, Homo sapien
gaatacagtcttcacccatgagggc

SEQ ID NO: 4583056 - DNA, 25 bp, Homo sapien
gatggccggaggtatccaagtcacc

SEQ ID NO: 4583057 - DNA, 25 bp, Homo sapien
ccttgaggttcatggaagagccgat

SEQ ID NO: 4583058 - DNA, 25 bp, Homo sapien
gggtagatctcctcgcagcagttgt

SEQ ID NO: 4583059 - DNA, 25 bp, Homo sapien
gattttcgccttatcgtaggaccag

SEQ ID NO: 4583060 - DNA, 25 bp, Homo sapien
tagcagggtaactgtctgatggcag

SEQ ID NO: 4583061 - DNA, 25 bp, Homo sapien
aggcctgcagggtacaccgtgtagc

SEQ ID NO: 4583062 - DNA, 25 bp, Homo sapien
gggctatcaatcctttctccaaggc

SEQ ID NO: 4583063 - DNA, 25 bp, Homo sapien
ccagaccttttcccagtgggaggag

SEQ ID NO: 4583064 - DNA, 25 bp, Homo sapien
aatgtctggcttccagatcttctgt

SEQ ID NO: 4583065 - DNA, 25 bp, Homo sapien
agaggggttccatttcagcttgtag

SEQ ID NO: 4583066 - DNA, 25 bp, Homo sapien
agggacacgcatgaactctgcccca

SEQ ID NO: 4583067 - DNA, 25 bp, Homo sapien
tgccccaccatagtcagaggggttc

SEQ ID NO: 4583068 - DNA, 25 bp, Homo sapien
tccacagaagtaaatgaagcctggt

SEQ ID NO: 4583069 - DNA, 25 bp, Homo sapien
gcagcagtgcctagggtctggtcac

SEQ ID NO: 4583070 - DNA, 25 bp, Homo sapien
tatatctgccagtcagtggacccca

SEQ ID NO: 4583071 - DNA, 25 bp, Homo sapien
tagggcagtgcatgtgacctcaagc

SEQ ID NO: 4583072 - DNA, 25 bp, Homo sapien
tgcttgagccacaggttggtctcca

SEQ ID NO: 4583073 - DNA, 25 bp, Homo sapien
ttgcttgagccacaggttggtctcc

SEQ ID NO: 4583074 - DNA, 25 bp, Homo sapien
gcttgagccacaggttggtctccat

SEQ ID NO: 4583075 - DNA, 25 bp, Homo sapien
cttgagccacaggttggtctccatg

SEQ ID NO: 4583076 - DNA, 25 bp, Homo sapien
cctcgaaatggatgatgactgggtc

SEQ ID NO: 4583077 - DNA, 25 bp, Homo sapien
tgggtcagacacgttggctacaggc

SEQ ID NO: 4583078 - DNA, 25 bp, Homo sapien
ggctacaggccggatgatctcattg

SEQ ID NO: 4583079 - DNA, 25 bp, Homo sapien
tcaaatagacggtgctcagcctctg

SEQ ID NO: 4583080 - DNA, 25 bp, Homo sapien
ctgtgggaagcagccctgtcagtcc

SEQ ID NO: 4583081 - DNA, 25 bp, Homo sapien
caggggcagcgagagcgggccagag

SEQ ID NO: 4583082 - DNA, 25 bp, Homo sapien
aggacaggaaccatccggagtgaag

SEQ ID NO: 4583083 - DNA, 25 bp, Homo sapien
cgctgggtttccagcgccctcggac

SEQ ID NO: 4583084 - DNA, 25 bp, Homo sapien
catccggagtgaagctgcgccaggc

SEQ ID NO: 4583085 - DNA, 25 bp, Homo sapien
gcggcggtcgcagagacggcctctc

SEQ ID NO: 4583086 - DNA, 25 bp, Homo sapien
ttctccgccgggctgggtgctccgg

SEQ ID NO: 4583087 - DNA, 25 bp, Homo sapien
gcgtccgaccagatctgagcaggtg

SEQ ID NO: 4583088 - DNA, 25 bp, Homo sapien
gagctccttctccgccgggctgggt

SEQ ID NO: 4583089 - DNA, 25 bp, Homo sapien
ggccggcggcgtccgaccagatctg

SEQ ID NO: 4583090 - DNA, 25 bp, Homo sapien
gtaggagagacgctaacacaccctg

SEQ ID NO: 4583091 - DNA, 25 bp, Homo sapien
taggcgggcgccgtaggagagacgc

SEQ ID NO: 4583092 - DNA, 25 bp, Homo sapien
ggcgccgtaggagagacgctaacac

SEQ ID NO: 4583093 - DNA, 25 bp, Homo sapien
gacgctaacacaccctgggaaggac

SEQ ID NO: 4583094 - DNA, 25 bp, Homo sapien
cagggatggggggcaccttgatgtt

SEQ ID NO: 4583095 - DNA, 25 bp, Homo sapien
tcctggcattcagcaaatggagagt

SEQ ID NO: 4583096 - DNA, 25 bp, Homo sapien
cctggcattcagcaaatggagagtc

SEQ ID NO: 4583097 - DNA, 25 bp, Homo sapien
ctcctggcattcagcaaatggagag

SEQ ID NO: 4583098 - DNA, 25 bp, Homo sapien
tacagcattctcaactcttggcaaa

SEQ ID NO: 4583099 - DNA, 25 bp, Homo sapien
gccatcagggacacgcaaattaaaa

SEQ ID NO: 4583100 - DNA, 25 bp, Homo sapien
tctctcatactttggtgggattgca

SEQ ID NO: 4583101 - DNA, 25 bp, Homo sapien
tggattctggtggtaagcttacgac

SEQ ID NO: 4583102 - DNA, 25 bp, Homo sapien
gcatccgtgtgggagacagacctga

SEQ ID NO: 4583103 - DNA, 25 bp, Homo sapien
cagtatgtgcgaggagtgaatcaga

SEQ ID NO: 4583104 - DNA, 25 bp, Homo sapien
aaagtgaccagcaccgcagtcatgg

SEQ ID NO: 4583105 - DNA, 25 bp, Homo sapien
ggagcaggtcatgcctttcagatgg

SEQ ID NO: 4583106 - DNA, 25 bp, Homo sapien
gattggagccatgccctgactgatg

SEQ ID NO: 4583107 - DNA, 25 bp, Homo sapien
taagagcgacaggtacacaggagtg

SEQ ID NO: 4583108 - DNA, 25 bp, Homo sapien
catacatgccaccagataagagcga

SEQ ID NO: 4583109 - DNA, 25 bp, Homo sapien
ccacgaatgtgaaggagcaggtccc

SEQ ID NO: 4583110 - DNA, 25 bp, Homo sapien
cccctcagaagctgcatgggtctgg

SEQ ID NO: 4583111 - DNA, 25 bp, Homo sapien
caccaccatagccacgtacttccag

SEQ ID NO: 4583112 - DNA, 25 bp, Homo sapien
aggaacagccggtccaccaccatag

SEQ ID NO: 4583113 - DNA, 25 bp, Homo sapien
aacatgaacacccacaggaacagcc

SEQ ID NO: 4583114 - DNA, 25 bp, Homo sapien
atagccacgtacttccagtcctcaa

SEQ ID NO: 4583115 - DNA, 25 bp, Homo sapien
gacagaggagttggtcacaggtgcc

SEQ ID NO: 4583116 - DNA, 25 bp, Homo sapien
caggtgccaagtactggggtccctc

SEQ ID NO: 4583117 - DNA, 25 bp, Homo sapien
gtcacaggtgccaagtactggggtc

SEQ ID NO: 4583118 - DNA, 25 bp, Homo sapien
ggcagacagaggagttggtcacagg

SEQ ID NO: 4583119 - DNA, 25 bp, Homo sapien
gaagtcgtaagtcacgtccacgtag

SEQ ID NO: 4583120 - DNA, 25 bp, Homo sapien
cgttggaccggactatcaagttggt

SEQ ID NO: 4583121 - DNA, 25 bp, Homo sapien
tgggagtaaagtcatccatgctggc

SEQ ID NO: 4583122 - DNA, 25 bp, Homo sapien
ttcatgaagaggaaggtaggcagct

SEQ ID NO: 4583123 - DNA, 25 bp, Homo sapien
ggagaacatcgtgaaacccatacac

SEQ ID NO: 4583124 - DNA, 25 bp, Homo sapien
agggtcagggcatggagaacatcgt

SEQ ID NO: 4583125 - DNA, 25 bp, Homo sapien
ggcatggagaacatcgtgaaaccca

SEQ ID NO: 4583126 - DNA, 25 bp, Homo sapien
cagggcatggagaacatcgtgaaac

SEQ ID NO: 4583127 - DNA, 25 bp, Homo sapien
gatggcctggaaggctgggtaaagc

SEQ ID NO: 4583128 - DNA, 25 bp, Homo sapien
tcttctagcttgatggcctggaagg

SEQ ID NO: 4583129 - DNA, 25 bp, Homo sapien
ctggatgactcttagggctgggcct

SEQ ID NO: 4583130 - DNA, 25 bp, Homo sapien
ctcagggttggactcaggcctggat

SEQ ID NO: 4583131 - DNA, 25 bp, Homo sapien
gatcctcaggatgttcacaccctcg

SEQ ID NO: 4583132 - DNA, 25 bp, Homo sapien
ttgttgtaaagcacgatgtcaggca

SEQ ID NO: 4583133 - DNA, 25 bp, Homo sapien
ccctcgtagcgggagctgttccagg

SEQ ID NO: 4583134 - DNA, 25 bp, Homo sapien
cagatgcgctttgcagggatcctca

SEQ ID NO: 4583135 - DNA, 25 bp, Homo sapien
cctgtcacttgcaggtccactgcca

SEQ ID NO: 4583136 - DNA, 25 bp, Homo sapien
tgtcacttgcaggtccactgccacc

SEQ ID NO: 4583137 - DNA, 25 bp, Homo sapien
agacaggcaaggccctgtcacttgc

SEQ ID NO: 4583138 - DNA, 25 bp, Homo sapien
acaggcaaggccctgtcacttgcag

SEQ ID NO: 4583139 - DNA, 25 bp, Homo sapien
agacattggtggtcatgatctgctc

SEQ ID NO: 4583140 - DNA, 25 bp, Homo sapien
cagacattggtggtcatgatctgct

SEQ ID NO: 4583141 - DNA, 25 bp, Homo sapien
ccagacattggtggtcatgatctgc

SEQ ID NO: 4583142 - DNA, 25 bp, Homo sapien
agaatgtgtcaagtacaggggagat

SEQ ID NO: 4583143 - DNA, 25 bp, Homo sapien
cttgccaagtggcatttgggtcttt

SEQ ID NO: 4583144 - DNA, 25 bp, Homo sapien
gccaagtggcatttgggtctttatg

SEQ ID NO: 4583145 - DNA, 25 bp, Homo sapien
caagtggcatttgggtctttatgtc

SEQ ID NO: 4583146 - DNA, 25 bp, Homo sapien
tgcactctccccttgtgaatgttcc

SEQ ID NO: 4583147 - DNA, 25 bp, Homo sapien
ggtctctttcccctggctggacaca

SEQ ID NO: 4583148 - DNA, 25 bp, Homo sapien
gcttcttccagggacggagttctaa

SEQ ID NO: 4583149 - DNA, 25 bp, Homo sapien
agggtcagcccccttggtggtctct

SEQ ID NO: 4583150 - DNA, 25 bp, Homo sapien
ttacttctcccaacaagtaagaagc

SEQ ID NO: 4583151 - DNA, 25 bp, Homo sapien
tcccaacaagtaagaagcatgtaag

SEQ ID NO: 4583152 - DNA, 25 bp, Homo sapien
gaagcatgtaaggttatctgagcag

SEQ ID NO: 4583153 - DNA, 25 bp, Homo sapien
aagaagcatgtaaggttatctgagc

SEQ ID NO: 4583154 - DNA, 25 bp, Homo sapien
cctgagccacagctgccctctgcac

SEQ ID NO: 4583155 - DNA, 25 bp, Homo sapien
agcctgagccacagctgccctctgc

SEQ ID NO: 4583156 - DNA, 25 bp, Homo sapien
tgagcctgagccacagctgccctct

SEQ ID NO: 4583157 - DNA, 25 bp, Homo sapien
ctgagcctgagccacagctgccctc

SEQ ID NO: 4583158 - DNA, 25 bp, Homo sapien
tccgcattggccacgcggcagttcc

SEQ ID NO: 4583159 - DNA, 25 bp, Homo sapien
ttcctccgcattggccacgcggcag

SEQ ID NO: 4583160 - DNA, 25 bp, Homo sapien
gcttttcctccgcattggccacgcg

SEQ ID NO: 4583161 - DNA, 25 bp, Homo sapien
ttttcctccgcattggccacgcggc

SEQ ID NO: 4583162 - DNA, 25 bp, Homo sapien
cgcccgcaaagggcgaccaggaaga

SEQ ID NO: 4583163 - DNA, 25 bp, Homo sapien
cgcgcccgcaaagggcgaccaggaa

SEQ ID NO: 4583164 - DNA, 25 bp, Homo sapien
gcccgcaaagggcgaccaggaagaa

SEQ ID NO: 4583165 - DNA, 25 bp, Homo sapien
cgcaaagggcgaccaggaagaaaag

SEQ ID NO: 4583166 - DNA, 25 bp, Homo sapien
gcggtcgagtgagcgccggtcctgg

SEQ ID NO: 4583167 - DNA, 25 bp, Homo sapien
agggcacccgtgagccgcgcggtcg

SEQ ID NO: 4583168 - DNA, 25 bp, Homo sapien
tcctggcccccgaggtttgctggcg

SEQ ID NO: 4583169 - DNA, 25 bp, Homo sapien
ccgcgagctccgctgtggggtcaca

SEQ ID NO: 4583170 - DNA, 25 bp, Homo sapien
tgtcctcacaagaagctactgcccc

SEQ ID NO: 4583171 - DNA, 25 bp, Homo sapien
ctggtagctacttggtgctagatac

SEQ ID NO: 4583172 - DNA, 25 bp, Homo sapien
ggtgaggaagccacaatatacctgg

SEQ ID NO: 4583173 - DNA, 25 bp, Homo sapien
aggtggtgaggaagccacaatatac

SEQ ID NO: 4583174 - DNA, 25 bp, Homo sapien
tttgattctccatagcttgcctcac

SEQ ID NO: 4583175 - DNA, 25 bp, Homo sapien
tccatatttgattctccatagcttg

SEQ ID NO: 4583176 - DNA, 25 bp, Homo sapien
tatttgattctccatagcttgcctc

SEQ ID NO: 4583177 - DNA, 25 bp, Homo sapien
ttactccatatttgattctccatag

SEQ ID NO: 4583178 - DNA, 25 bp, Homo sapien
ctggcggaaaacctgctgggtgttt

SEQ ID NO: 4583179 - DNA, 25 bp, Homo sapien
cactgacagccaggcaaaggctggc

SEQ ID NO: 4583180 - DNA, 25 bp, Homo sapien
agtgctggcggaaaacctgctgggt

SEQ ID NO: 4583181 - DNA, 25 bp, Homo sapien
ttcttcccttttgtgactgtgacca

SEQ ID NO: 4583182 - DNA, 25 bp, Homo sapien
gcacgttgctgggaaagcctaatac

SEQ ID NO: 4583183 - DNA, 25 bp, Homo sapien
caaagagaattgaggtaacattgct

SEQ ID NO: 4583184 - DNA, 25 bp, Homo sapien
gagagaagaagcctaatgctctgta

SEQ ID NO: 4583185 - DNA, 25 bp, Homo sapien
taacattgctgggtgctccacgtaa

SEQ ID NO: 4583186 - DNA, 25 bp, Homo sapien
tttgtagtctcggctggccctttga

SEQ ID NO: 4583187 - DNA, 25 bp, Homo sapien
ttgtagtctcggctggccctttgac

SEQ ID NO: 4583188 - DNA, 25 bp, Homo sapien
caaagagcggaatggtgctgctgcc

SEQ ID NO: 4583189 - DNA, 25 bp, Homo sapien
tcttggcccttgagagaaccaaaga

SEQ ID NO: 4583190 - DNA, 25 bp, Homo sapien
gagaaccaaagagcggaatggtgct

SEQ ID NO: 4583191 - DNA, 25 bp, Homo sapien
ctcttggcccttgagagaaccaaag

SEQ ID NO: 4583192 - DNA, 25 bp, Homo sapien
ggcagcccggctggtcacacacagt

SEQ ID NO: 4583193 - DNA, 25 bp, Homo sapien
gcagcccggctggtcacacacagtg

SEQ ID NO: 4583194 - DNA, 25 bp, Homo sapien
cggcagcccggctggtcacacacag

SEQ ID NO: 4583195 - DNA, 25 bp, Homo sapien
agcccggctggtcacacacagtgca

SEQ ID NO: 4583196 - DNA, 25 bp, Homo sapien
tcaggttgagaacctcctgaacccg

SEQ ID NO: 4583197 - DNA, 25 bp, Homo sapien
tcatccattatggtccccaagacca

SEQ ID NO: 4583198 - DNA, 25 bp, Homo sapien
cttcaggttgagaacctcctgaacc

SEQ ID NO: 4583199 - DNA, 25 bp, Homo sapien
gcacatcatccattatggtccccaa

SEQ ID NO: 4583200 - DNA, 25 bp, Homo sapien
ttgttttcccggccaggaagcttca

SEQ ID NO: 4583201 - DNA, 25 bp, Homo sapien
tgttttcccggccaggaagcttcat

SEQ ID NO: 4583202 - DNA, 25 bp, Homo sapien
aacagagtgaccggttggtgcgact

SEQ ID NO: 4583203 - DNA, 25 bp, Homo sapien
gcaacagagtgaccggttggtgcga

SEQ ID NO: 4583204 - DNA, 25 bp, Homo sapien
gagcaacagagtgaccggttggtgc

SEQ ID NO: 4583205 - DNA, 25 bp, Homo sapien
ttggtccttgttggggcggatgtca

SEQ ID NO: 4583206 - DNA, 25 bp, Homo sapien
gtatggtgtccttgagtggagtctc

SEQ ID NO: 4583207 - DNA, 25 bp, Homo sapien
cactgtgtgtagctcccctcttaga

SEQ ID NO: 4583208 - DNA, 25 bp, Homo sapien
ccctcttagactgggaatgctctca

SEQ ID NO: 4583209 - DNA, 25 bp, Homo sapien
tttgcaggaacaactccttttatca

SEQ ID NO: 4583210 - DNA, 25 bp, Homo sapien
aacaggtctcggtaagtaatggcca

SEQ ID NO: 4583211 - DNA, 25 bp, Homo sapien
tggggggtctaagacgatgcccagc

SEQ ID NO: 4583212 - DNA, 25 bp, Homo sapien
tgcccagcagcttgataggaattct

SEQ ID NO: 4583213 - DNA, 25 bp, Homo sapien
tcaacaggtctcggtaagtaatggc

SEQ ID NO: 4583214 - DNA, 25 bp, Homo sapien
tcctctgccacaccccgggggtcag

SEQ ID NO: 4583215 - DNA, 25 bp, Homo sapien
gttctctgaagtgtggggctcagct

SEQ ID NO: 4583216 - DNA, 25 bp, Homo sapien
gggtcagtgtccctctttgtgggtg

SEQ ID NO: 4583217 - DNA, 25 bp, Homo sapien
tcagtgtccctctttgtgggtgcca

SEQ ID NO: 4583218 - DNA, 25 bp, Homo sapien
caaaactagttatggtggaggcatg

SEQ ID NO: 4583219 - DNA, 25 bp, Homo sapien
ttgattaactgtagcctgtgggcca

SEQ ID NO: 4583220 - DNA, 25 bp, Homo sapien
ggttgtcacatactcccactggagg

SEQ ID NO: 4583221 - DNA, 25 bp, Homo sapien
cagccactgcccgttgttactggaa

SEQ ID NO: 4583222 - DNA, 25 bp, Homo sapien
agatccctgaataatgcatcaaagc

SEQ ID NO: 4583223 - DNA, 25 bp, Homo sapien
tccagctcatagtgaatcacatgtt

SEQ ID NO: 4583224 - DNA, 25 bp, Homo sapien
cacatgttgggaatcagctgagagc

SEQ ID NO: 4583225 - DNA, 25 bp, Homo sapien
ggccctgaagatccctgaataatgc

SEQ ID NO: 4583226 - DNA, 25 bp, Homo sapien
tttttagcatccatataaaagttgt

SEQ ID NO: 4583227 - DNA, 25 bp, Homo sapien
tttagcatccatataaaagttgtat

SEQ ID NO: 4583228 - DNA, 25 bp, Homo sapien
ttttagcatccatataaaagttgta

SEQ ID NO: 4583229 - DNA, 25 bp, Homo sapien
actcccagaaccgtacaggctgagc

SEQ ID NO: 4583230 - DNA, 25 bp, Homo sapien
gcagtccaggccaattcaggtaccc

SEQ ID NO: 4583231 - DNA, 25 bp, Homo sapien
cctggaaaagtcgaagtccctcctg

SEQ ID NO: 4583232 - DNA, 25 bp, Homo sapien
gaaaagtcgaagtccctcctggaga

SEQ ID NO: 4583233 - DNA, 25 bp, Homo sapien
ctatctcactgtgactgtaggtcag

SEQ ID NO: 4583234 - DNA, 25 bp, Homo sapien
agcagggtgcaccagtgtttctcct

SEQ ID NO: 4583235 - DNA, 25 bp, Homo sapien
cagggtgcaccagtgtttctccttc

SEQ ID NO: 4583236 - DNA, 25 bp, Homo sapien
actatctcactgtgactgtaggtca

SEQ ID NO: 4583237 - DNA, 25 bp, Homo sapien
aaagcgccagcaggtttgtagtcta

SEQ ID NO: 4583238 - DNA, 25 bp, Homo sapien
gatcaaagcgccagcaggtttgtag

SEQ ID NO: 4583239 - DNA, 25 bp, Homo sapien
agatcaaagcgccagcaggtttgta

SEQ ID NO: 4583240 - DNA, 25 bp, Homo sapien
tcaaagcgccagcaggtttgtagtc

SEQ ID NO: 4583241 - DNA, 25 bp, Homo sapien
tgacaaaattcaacaacccttcacg

SEQ ID NO: 4583242 - DNA, 25 bp, Homo sapien
gtaccattccttctgaaactattcc

SEQ ID NO: 4583243 - DNA, 25 bp, Homo sapien
ctaccagaggtacaaggaggaaccg

SEQ ID NO: 4583244 - DNA, 25 bp, Homo sapien
caaaattcaacaacccttcacgcta

SEQ ID NO: 4583245 - DNA, 25 bp, Homo sapien
tgactttgggctggtgactcctcgg

SEQ ID NO: 4583246 - DNA, 25 bp, Homo sapien
tctttgggctggtgtctccgtggac

SEQ ID NO: 4583247 - DNA, 25 bp, Homo sapien
tgggctggtgactcctcgggcttcc

SEQ ID NO: 4583248 - DNA, 25 bp, Homo sapien
ctctttgggctggtgtctccgtgga

SEQ ID NO: 4583249 - DNA, 25 bp, Homo sapien
agagcacgggcatgtcgcagcagct

SEQ ID NO: 4583250 - DNA, 25 bp, Homo sapien
caatcagttggcagttggagaaaag

SEQ ID NO: 4583251 - DNA, 25 bp, Homo sapien
gcaggtgcgggtgtagcaaaggttc

SEQ ID NO: 4583252 - DNA, 25 bp, Homo sapien
tcagttggcagttggagaaaagcag

SEQ ID NO: 4583253 - DNA, 25 bp, Homo sapien
tcctctccagattgacatcacctga

SEQ ID NO: 4583254 - DNA, 25 bp, Homo sapien
gagcagctagtacatgagttcggag

SEQ ID NO: 4583255 - DNA, 25 bp, Homo sapien
gggctactgaccagagtcccaacat

SEQ ID NO: 4583256 - DNA, 25 bp, Homo sapien
caaggtctgtttttacatcagagca

SEQ ID NO: 4583257 - DNA, 25 bp, Homo sapien
acatctgccagcttgggcacggagc

SEQ ID NO: 4583258 - DNA, 25 bp, Homo sapien
ggctcagccatggagcctgggggac

SEQ ID NO: 4583259 - DNA, 25 bp, Homo sapien
ggcacggagcctgtttcaagagccc

SEQ ID NO: 4583260 - DNA, 25 bp, Homo sapien
ctcagccatggagcctgggggactt

SEQ ID NO: 4583261 - DNA, 25 bp, Homo sapien
ctgcgtccagctgggatgctctgca

SEQ ID NO: 4583262 - DNA, 25 bp, Homo sapien
tgcgtccagctgggatgctctgcac

SEQ ID NO: 4583263 - DNA, 25 bp, Homo sapien
tgcctccgtcagcacgtggcgcttg

SEQ ID NO: 4583264 - DNA, 25 bp, Homo sapien
ggtcgtgttgatgttcaccgatgtt

SEQ ID NO: 4583265 - DNA, 25 bp, Homo sapien
gtggcgcttgcgcagcatctcgccg

SEQ ID NO: 4583266 - DNA, 25 bp, Homo sapien
gttcaccgatgttgctgggtgcctc

SEQ ID NO: 4583267 - DNA, 25 bp, Homo sapien
gaagagccctgtgtttctggcctgg

SEQ ID NO: 4583268 - DNA, 25 bp, Homo sapien
ttggaagagccctgtgtttctggcc

SEQ ID NO: 4583269 - DNA, 25 bp, Homo sapien
gcctgggcagccaagtattcaggaa

SEQ ID NO: 4583270 - DNA, 25 bp, Homo sapien
cctgggcagccaagtattcaggaac

SEQ ID NO: 4583271 - DNA, 25 bp, Homo sapien
ggtcattgcctgttctgggccaccc

SEQ ID NO: 4583272 - DNA, 25 bp, Homo sapien
ccctgagagccgatttggacaatgg

SEQ ID NO: 4583273 - DNA, 25 bp, Homo sapien
agctgttggctgctctgaccctgag

SEQ ID NO: 4583274 - DNA, 25 bp, Homo sapien
atatcccctggaccgcagctgttgg

SEQ ID NO: 4583275 - DNA, 25 bp, Homo sapien
gctcctgtgctgaccttcaagttat

SEQ ID NO: 4583276 - DNA, 25 bp, Homo sapien
ggaggccatacagagacccagtgtg

SEQ ID NO: 4583277 - DNA, 25 bp, Homo sapien
tgtattgcacagatccccacctgcc

SEQ ID NO: 4583278 - DNA, 25 bp, Homo sapien
accgctgctgggcaactggaggact

SEQ ID NO: 4583279 - DNA, 25 bp, Homo sapien
cgctcatcgccgaggggttcagcct

SEQ ID NO: 4583280 - DNA, 25 bp, Homo sapien
gccgaggggttcagcctctgatact

SEQ ID NO: 4583281 - DNA, 25 bp, Homo sapien
tgggacagacgctcatcgccgaggg

SEQ ID NO: 4583282 - DNA, 25 bp, Homo sapien
cttccaagtcctgggacagacgctc

SEQ ID NO: 4583283 - DNA, 25 bp, Homo sapien
aatgtgagaggtgacccctgtaggc

SEQ ID NO: 4583284 - DNA, 25 bp, Homo sapien
agagtagaatgtgagaggtgacccc

SEQ ID NO: 4583285 - DNA, 25 bp, Homo sapien
tggagaaggggcgtaacaccttcca

SEQ ID NO: 4583286 - DNA, 25 bp, Homo sapien
ggttgtcatacgctggagagtagaa

SEQ ID NO: 4583287 - DNA, 25 bp, Homo sapien
catagatcagcgtggtaggaacctg

SEQ ID NO: 4583288 - DNA, 25 bp, Homo sapien
tgccaggtgctggaccatagatcag

SEQ ID NO: 4583289 - DNA, 25 bp, Homo sapien
tcaaagcaccttcatgcccatctgt

SEQ ID NO: 4583290 - DNA, 25 bp, Homo sapien
gcactactgtctggctccatgggac

SEQ ID NO: 4583291 - DNA, 25 bp, Homo sapien
ataaatgttacacaaactgttagaa

SEQ ID NO: 4583292 - DNA, 25 bp, Homo sapien
cggtcggtctgtgcatcctggcgca

SEQ ID NO: 4583293 - DNA, 25 bp, Homo sapien
ggaatggtagatgctcatttatgta

SEQ ID NO: 4583294 - DNA, 25 bp, Homo sapien
gggttagcaccattagggcgcaggg

SEQ ID NO: 4583295 - DNA, 25 bp, Homo sapien
tgggcggagagcacgagcggcagca

SEQ ID NO: 4583296 - DNA, 25 bp, Homo sapien
cctggctccctacgccaaccacctt

SEQ ID NO: 4583297 - DNA, 25 bp, Homo sapien
tggctccctacgccaaccaccttaa

SEQ ID NO: 4583298 - DNA, 25 bp, Homo sapien
tacgccaaccaccttaaggaggctc

SEQ ID NO: 4583299 - DNA, 25 bp, Homo sapien
ctacgccaaccaccttaaggaggct

SEQ ID NO: 4583300 - DNA, 25 bp, Homo sapien
acacggccgggagctctcaggccag

SEQ ID NO: 4583301 - DNA, 25 bp, Homo sapien
ccacacggccgggagctctcaggcc

SEQ ID NO: 4583302 - DNA, 25 bp, Homo sapien
ggccgggagctctcaggccaggcct

SEQ ID NO: 4583303 - DNA, 25 bp, Homo sapien
gtgccacacggccgggagctctcag

SEQ ID NO: 4583304 - DNA, 25 bp, Homo sapien
cctggctccgggcaggtcactagac

SEQ ID NO: 4583305 - DNA, 25 bp, Homo sapien
ggccgcagtggccggaggtcccgtg

SEQ ID NO: 4583306 - DNA, 25 bp, Homo sapien
gcagtggccggaggtcccgtgtgtc

SEQ ID NO: 4583307 - DNA, 25 bp, Homo sapien
ccgcagtggccggaggtcccgtgtg

SEQ ID NO: 4583308 - DNA, 25 bp, Homo sapien
agggccgcagtggccggaggtcccg

SEQ ID NO: 4583309 - DNA, 25 bp, Homo sapien
cagaatccggtgtgatcgggcacac

SEQ ID NO: 4583310 - DNA, 25 bp, Homo sapien
cccagcccgggggaatagctgaaga

SEQ ID NO: 4583311 - DNA, 25 bp, Homo sapien
gagacgtgtatggacacatccccat

SEQ ID NO: 4583312 - DNA, 25 bp, Homo sapien
agagattcagaatccggtgtgatcg

SEQ ID NO: 4583313 - DNA, 25 bp, Homo sapien
tccagttgcctgagtgccaggtggc

SEQ ID NO: 4583314 - DNA, 25 bp, Homo sapien
ccagttgcctgagtgccaggtggca

SEQ ID NO: 4583315 - DNA, 25 bp, Homo sapien
agttgcctgagtgccaggtggcaca

SEQ ID NO: 4583316 - DNA, 25 bp, Homo sapien
cagttgcctgagtgccaggtggcac

SEQ ID NO: 4583317 - DNA, 25 bp, Homo sapien
cagcgcaccggcctccagaccgcac

SEQ ID NO: 4583318 - DNA, 25 bp, Homo sapien
ctacagcgcaccggcctccagaccg

SEQ ID NO: 4583319 - DNA, 25 bp, Homo sapien
agcgcaccggcctccagaccgcacc

SEQ ID NO: 4583320 - DNA, 25 bp, Homo sapien
cgcaccggcctccagaccgcaccca

SEQ ID NO: 4583321 - DNA, 25 bp, Homo sapien
gggcagagacccgtgaaagccaggc

SEQ ID NO: 4583322 - DNA, 25 bp, Homo sapien
cagagacccgtgaaagccaggcaga

SEQ ID NO: 4583323 - DNA, 25 bp, Homo sapien
ctgcggggcagagacccgtgaaagc

SEQ ID NO: 4583324 - DNA, 25 bp, Homo sapien
tgcggggcagagacccgtgaaagcc

SEQ ID NO: 4583325 - DNA, 25 bp, Homo sapien
accccgaccagctatcttgaccagc

SEQ ID NO: 4583326 - DNA, 25 bp, Homo sapien
cagccaaatcgctgggtatccctgc

SEQ ID NO: 4583327 - DNA, 25 bp, Homo sapien
gcagccaaatcgctgggtatccctg

SEQ ID NO: 4583328 - DNA, 25 bp, Homo sapien
gtgggcaccccgaccagctatcttg

SEQ ID NO: 4583329 - DNA, 25 bp, Homo sapien
agatgaggaaatagtcaccaaggtc

SEQ ID NO: 4583330 - DNA, 25 bp, Homo sapien
atgaggaaatagtcaccaaggtcct

SEQ ID NO: 4583331 - DNA, 25 bp, Homo sapien
caccaaggtcctgcgcaaactccct

SEQ ID NO: 4583332 - DNA, 25 bp, Homo sapien
aaggtcctgcgcaaactccctgccc

SEQ ID NO: 4583333 - DNA, 25 bp, Homo sapien
agtttcccgcttgccagccggcgtt

SEQ ID NO: 4583334 - DNA, 25 bp, Homo sapien
cccggctccagggaactgtccctga

SEQ ID NO: 4583335 - DNA, 25 bp, Homo sapien
ccagcggctgggtctcagggactct

SEQ ID NO: 4583336 - DNA, 25 bp, Homo sapien
ggagccagcggctgggtctcaggga

SEQ ID NO: 4583337 - DNA, 25 bp, Homo sapien
tccgccacgtcaggactaggagagg

SEQ ID NO: 4583338 - DNA, 25 bp, Homo sapien
ctccgccacgtcaggactaggagag

SEQ ID NO: 4583339 - DNA, 25 bp, Homo sapien
gaggctctgtggcaggcacggggct

SEQ ID NO: 4583340 - DNA, 25 bp, Homo sapien
ggctctgtggcaggcacggggctac

SEQ ID NO: 4583341 - DNA, 25 bp, Homo sapien
cctcctccttggctgcaggaggctc

SEQ ID NO: 4583342 - DNA, 25 bp, Homo sapien
ccttggctgcaggaggctctgtggc

SEQ ID NO: 4583343 - DNA, 25 bp, Homo sapien
ccaggtctagatcgggctcctcaga

SEQ ID NO: 4583344 - DNA, 25 bp, Homo sapien
atcgggctcctcagagggcccgtag

SEQ ID NO: 4583345 - DNA, 25 bp, Homo sapien
ctgtccccgccaggtctagatcggg

SEQ ID NO: 4583346 - DNA, 25 bp, Homo sapien
gggctcctcagagggcccgtaggac

SEQ ID NO: 4583347 - DNA, 25 bp, Homo sapien
tcctcctcaatggcgttgcccatgg

SEQ ID NO: 4583348 - DNA, 25 bp, Homo sapien
ctcctcctcaatggcgttgcccatg

SEQ ID NO: 4583349 - DNA, 25 bp, Homo sapien
gagtgccctccccacatgtcactga

SEQ ID NO: 4583350 - DNA, 25 bp, Homo sapien
agtgccctccccacatgtcactgag

SEQ ID NO: 4583351 - DNA, 25 bp, Homo sapien
gacatttcggcgctgagtgccctcc

SEQ ID NO: 4583352 - DNA, 25 bp, Homo sapien
gaggacatttcggcgctgagtgccc

SEQ ID NO: 4583353 - DNA, 25 bp, Homo sapien
ccaggtggccggacagggtacatgg

SEQ ID NO: 4583354 - DNA, 25 bp, Homo sapien
gcccaggtggccggacagggtacat

SEQ ID NO: 4583355 - DNA, 25 bp, Homo sapien
caggtggccggacagggtacatggc

SEQ ID NO: 4583356 - DNA, 25 bp, Homo sapien
ggtggccggacagggtacatggcgg

SEQ ID NO: 4583357 - DNA, 25 bp, Homo sapien
ggatgcagagcacggcccggcggga

SEQ ID NO: 4583358 - DNA, 25 bp, Homo sapien
agagcacggcccggcgggagaggcc

SEQ ID NO: 4583359 - DNA, 25 bp, Homo sapien
gcagagcacggcccggcgggagagg

SEQ ID NO: 4583360 - DNA, 25 bp, Homo sapien
gcggatgcagagcacggcccggcgg

SEQ ID NO: 4583361 - DNA, 25 bp, Homo sapien
ctgttggtcatcaggccggcccagg

SEQ ID NO: 4583362 - DNA, 25 bp, Homo sapien
tctgttggtcatcaggccggcccag

SEQ ID NO: 4583363 - DNA, 25 bp, Homo sapien
ggctgctcgctgcacttcctctgtt

SEQ ID NO: 4583364 - DNA, 25 bp, Homo sapien
gctgcacttcctctgttggtcatca

SEQ ID NO: 4583365 - DNA, 25 bp, Homo sapien
ccgagagtaagttgtccctcccctg

SEQ ID NO: 4583366 - DNA, 25 bp, Homo sapien
agtaagttgtccctcccctgagctg

SEQ ID NO: 4583367 - DNA, 25 bp, Homo sapien
tggtcccgagagtaagttgtccctc

SEQ ID NO: 4583368 - DNA, 25 bp, Homo sapien
ctgccccgtggtcccgagagtaagt

SEQ ID NO: 4583369 - DNA, 25 bp, Homo sapien
gggccactggactggtctatcgagg

SEQ ID NO: 4583370 - DNA, 25 bp, Homo sapien
gagggagaacgccaagagctggagc

SEQ ID NO: 4583371 - DNA, 25 bp, Homo sapien
actgaacatgcgccgcgagccagca

SEQ ID NO: 4583372 - DNA, 25 bp, Homo sapien
taatgaaattgccctactttttata

SEQ ID NO: 4583373 - DNA, 25 bp, Homo sapien
cagtgtccctgtccagacactaagc

SEQ ID NO: 4583374 - DNA, 25 bp, Homo sapien
ttccaaacccgtggtggcccagcag

SEQ ID NO: 4583375 - DNA, 25 bp, Homo sapien
tgggacacagggcaatcgctagcct

SEQ ID NO: 4583376 - DNA, 25 bp, Homo sapien
atccatgtaccctcccagcgggcct

SEQ ID NO: 4583377 - DNA, 25 bp, Homo sapien
atggtgtactcgtagtgcaccccag

SEQ ID NO: 4583378 - DNA, 25 bp, Homo sapien
tgtactcgtagtgcaccccagggtt

SEQ ID NO: 4583379 - DNA, 25 bp, Homo sapien
ggtgtactcgtagtgcaccccaggg

SEQ ID NO: 4583380 - DNA, 25 bp, Homo sapien
gtgtactcgtagtgcaccccagggt

SEQ ID NO: 4583381 - DNA, 25 bp, Homo sapien
tccaggacgagacctgccatggagg

SEQ ID NO: 4583382 - DNA, 25 bp, Homo sapien
actgcagctacaagattgggccatt

SEQ ID NO: 4583383 - DNA, 25 bp, Homo sapien
gcagctacaagattgggccatttta

SEQ ID NO: 4583384 - DNA, 25 bp, Homo sapien
gctcactcctccaggacgagacctg

SEQ ID NO: 4583385 - DNA, 25 bp, Homo sapien
ctcggcaacctcttggatgcggatc

SEQ ID NO: 4583386 - DNA, 25 bp, Homo sapien
cctcggcaacctcttggatgcggat

SEQ ID NO: 4583387 - DNA, 25 bp, Homo sapien
cagcctcggcaacctcttggatgcg

SEQ ID NO: 4583388 - DNA, 25 bp, Homo sapien
gcctcggcaacctcttggatgcgga

SEQ ID NO: 4583389 - DNA, 25 bp, Homo sapien
tcctccatagcaccggagtcaatct

SEQ ID NO: 4583390 - DNA, 25 bp, Homo sapien
tagcaccggagtcaatctcgaagtc

SEQ ID NO: 4583391 - DNA, 25 bp, Homo sapien
caatctcgaagtcacagcccacgtt

SEQ ID NO: 4583392 - DNA, 25 bp, Homo sapien
accggagtcaatctcgaagtcacag

SEQ ID NO: 4583393 - DNA, 25 bp, Homo sapien
ttgatgcagaggtcccggctggctc

SEQ ID NO: 4583394 - DNA, 25 bp, Homo sapien
ctggctcggacctggtagcaggggg

SEQ ID NO: 4583395 - DNA, 25 bp, Homo sapien
ggcaaagtactcattcgcgggccgg

SEQ ID NO: 4583396 - DNA, 25 bp, Homo sapien
aaagtactcattcgcgggccggcag

SEQ ID NO: 4583397 - DNA, 25 bp, Homo sapien
cctccgtgacacacatccatggcag

SEQ ID NO: 4583398 - DNA, 25 bp, Homo sapien
gcgggagtatggaggccaccaggaa

SEQ ID NO: 4583399 - DNA, 25 bp, Homo sapien
gggcccaagtagaagagtcatcagc

SEQ ID NO: 4583400 - DNA, 25 bp, Homo sapien
agtagaagagtcatcagcaacagct

SEQ ID NO: 4583401 - DNA, 25 bp, Homo sapien
tcaaagtggctgcactggacgtggc

SEQ ID NO: 4583402 - DNA, 25 bp, Homo sapien
tagcgtcaaagtggctgcactggac

SEQ ID NO: 4583403 - DNA, 25 bp, Homo sapien
gagcatagcgtcaaagtggctgcac

SEQ ID NO: 4583404 - DNA, 25 bp, Homo sapien
gtagagcatagcgtcaaagtggctg

SEQ ID NO: 4583405 - DNA, 25 bp, Homo sapien
ccgctcggcgctctgtacgcccatg

SEQ ID NO: 4583406 - DNA, 25 bp, Homo sapien
cggcgctctgtacgcccatgccaca

SEQ ID NO: 4583407 - DNA, 25 bp, Homo sapien
gctcggcgctctgtacgcccatgcc

SEQ ID NO: 4583408 - DNA, 25 bp, Homo sapien
ctcggcgctctgtacgcccatgcca

SEQ ID NO: 4583409 - DNA, 25 bp, Homo sapien
gtgacaggtggtccccacagagcac

SEQ ID NO: 4583410 - DNA, 25 bp, Homo sapien
agcttggagtgacaggtggtcccca

SEQ ID NO: 4583411 - DNA, 25 bp, Homo sapien
tggagtgacaggtggtccccacaga

SEQ ID NO: 4583412 - DNA, 25 bp, Homo sapien
cttacatcatagaggacgccaggtg

SEQ ID NO: 4583413 - DNA, 25 bp, Homo sapien
gcttacatcatagaggacgccaggt

SEQ ID NO: 4583414 - DNA, 25 bp, Homo sapien
catgatgaaaggtcgtttcccaacg

SEQ ID NO: 4583415 - DNA, 25 bp, Homo sapien
ctcacagtcattgccgcttccgtca

SEQ ID NO: 4583416 - DNA, 25 bp, Homo sapien
tgtggagacatgatgaaaggtcgtt

SEQ ID NO: 4583417 - DNA, 25 bp, Homo sapien
tttcccaacgggctcacagtcattg

SEQ ID NO: 4583418 - DNA, 25 bp, Homo sapien
ggcaggcccgtgtcctcgttgatgc

SEQ ID NO: 4583419 - DNA, 25 bp, Homo sapien
gatgctgcagctgcggtgcggctgg

SEQ ID NO: 4583420 - DNA, 25 bp, Homo sapien
gcccgagctcgtgggctacagtgaa

SEQ ID NO: 4583421 - DNA, 25 bp, Homo sapien
tgcccgccacatgggacagtcccag

SEQ ID NO: 4583422 - DNA, 25 bp, Homo sapien
gatgggcatcccccttcatgttgat

SEQ ID NO: 4583423 - DNA, 25 bp, Homo sapien
atgggcatcccccttcatgttgatg

SEQ ID NO: 4583424 - DNA, 25 bp, Homo sapien
ggatgggcatcccccttcatgttga

SEQ ID NO: 4583425 - DNA, 25 bp, Homo sapien
gggatgggcatcccccttcatgttg

SEQ ID NO: 4583426 - DNA, 25 bp, Homo sapien
atgtggatggggttcccaatgctgg

SEQ ID NO: 4583427 - DNA, 25 bp, Homo sapien
aaacagggttatatggtggcctgcc

SEQ ID NO: 4583428 - DNA, 25 bp, Homo sapien
atggtggcctgccaaccaggtggct

SEQ ID NO: 4583429 - DNA, 25 bp, Homo sapien
agagaaacagggttatatggtggcc

SEQ ID NO: 4583430 - DNA, 25 bp, Homo sapien
gggttatatggtggcctgccaacca

SEQ ID NO: 4583431 - DNA, 25 bp, Homo sapien
ggctgtccgtggtactccaccattt

SEQ ID NO: 4583432 - DNA, 25 bp, Homo sapien
tttggcatcagctactaccagggtc

SEQ ID NO: 4583433 - DNA, 25 bp, Homo sapien
catgttcatgatggtcagcacatag

SEQ ID NO: 4583434 - DNA, 25 bp, Homo sapien
cacatagctctcaacctgcggctgt

SEQ ID NO: 4583435 - DNA, 25 bp, Homo sapien
ctggtgtagacgcctcagccgtggc

SEQ ID NO: 4583436 - DNA, 25 bp, Homo sapien
ccgctgctcccaacgctcccgtcga

SEQ ID NO: 4583437 - DNA, 25 bp, Homo sapien
gtgtagacgcctcagccgtggccgc

SEQ ID NO: 4583438 - DNA, 25 bp, Homo sapien
ctgctcccaacgctcccgtcgagac

SEQ ID NO: 4583439 - DNA, 25 bp, Homo sapien
gaacggctggcagagccaggtacca

SEQ ID NO: 4583440 - DNA, 25 bp, Homo sapien
cctgggcactggaggaagaacggct

SEQ ID NO: 4583441 - DNA, 25 bp, Homo sapien
cggcctgggcactggaggaagaacg

SEQ ID NO: 4583442 - DNA, 25 bp, Homo sapien
tgggcactggaggaagaacggctgg

SEQ ID NO: 4583443 - DNA, 25 bp, Homo sapien
cgagaactgggagcagaagagcata

SEQ ID NO: 4583444 - DNA, 25 bp, Homo sapien
ccgagaactgggagcagaagagcat

SEQ ID NO: 4583445 - DNA, 25 bp, Homo sapien
gagaactgggagcagaagagcatac

SEQ ID NO: 4583446 - DNA, 25 bp, Homo sapien
cttggagcactggaatcaccccgct

SEQ ID NO: 4583447 - DNA, 25 bp, Homo sapien
gagcactggaatcaccccgctgtgc

SEQ ID NO: 4583448 - DNA, 25 bp, Homo sapien
tggagcactggaatcaccccgctgt

SEQ ID NO: 4583449 - DNA, 25 bp, Homo sapien
gaatcaccccgctgtgccagcctct

SEQ ID NO: 4583450 - DNA, 25 bp, Homo sapien
tatcctagagatcaacgaggcctgc

SEQ ID NO: 4583451 - DNA, 25 bp, Homo sapien
caccagacaagtgcgtggcaaggct

SEQ ID NO: 4583452 - DNA, 25 bp, Homo sapien
tacaggcgtgaataccgaggctggc

SEQ ID NO: 4583453 - DNA, 25 bp, Homo sapien
tgccccaagtatacatgtcccagct

SEQ ID NO: 4583454 - DNA, 25 bp, Homo sapien
ccgtcgcaggcgctgatggccgcca

SEQ ID NO: 4583455 - DNA, 25 bp, Homo sapien
caggccgtcgcaggcgctgatggcc

SEQ ID NO: 4583456 - DNA, 25 bp, Homo sapien
tcgcaggcgctgatggccgccaggc

SEQ ID NO: 4583457 - DNA, 25 bp, Homo sapien
ggccgtcgcaggcgctgatggccgc

SEQ ID NO: 4583458 - DNA, 25 bp, Homo sapien
gggtgtgggcccggatgtgcgcgcg

SEQ ID NO: 4583459 - DNA, 25 bp, Homo sapien
ggggtgtgggcccggatgtgcgcgc

SEQ ID NO: 4583460 - DNA, 25 bp, Homo sapien
cgtcgactcgaaccgggtgcacgat

SEQ ID NO: 4583461 - DNA, 25 bp, Homo sapien
tcgcgcccgcggtattgtagctcgt

SEQ ID NO: 4583462 - DNA, 25 bp, Homo sapien
gccacagctcgtaggacaggaagga

SEQ ID NO: 4583463 - DNA, 25 bp, Homo sapien
cgcggtattgtagctcgtagaaggc

SEQ ID NO: 4583464 - DNA, 25 bp, Homo sapien
tacaatctcgatgctgtcgtgagga

SEQ ID NO: 4583465 - DNA, 25 bp, Homo sapien
taaccacagcacttacaatctcgat

SEQ ID NO: 4583466 - DNA, 25 bp, Homo sapien
aggaagtgtccagaacttagtcctt

SEQ ID NO: 4583467 - DNA, 25 bp, Homo sapien
ctctgtagaatgcagataaccacag

SEQ ID NO: 4583468 - DNA, 25 bp, Homo sapien
tcaagttcacggatcccctcagttc

SEQ ID NO: 4583469 - DNA, 25 bp, Homo sapien
tattggtaacaaaaccacaggtgct

SEQ ID NO: 4583470 - DNA, 25 bp, Homo sapien
tgtggaccccaggttaggacacctg

SEQ ID NO: 4583471 - DNA, 25 bp, Homo sapien
tcagttcacggtcccttaggctgtg

SEQ ID NO: 4583472 - DNA, 25 bp, Homo sapien
gcctcgctaaggagtgtgagaaacc

SEQ ID NO: 4583473 - DNA, 25 bp, Homo sapien
aggaagtgcaaggaccgcgcaagac

SEQ ID NO: 4583474 - DNA, 25 bp, Homo sapien
cccatggccgggaaaagaagctcct

SEQ ID NO: 4583475 - DNA, 25 bp, Homo sapien
caaacaagagtctggacgcaggcca

SEQ ID NO: 4583476 - DNA, 25 bp, Homo sapien
ggagggggcgcagcaaaggcgcggg

SEQ ID NO: 4583477 - DNA, 25 bp, Homo sapien
ggcgccgggagccagagcgcagagg

SEQ ID NO: 4583478 - DNA, 25 bp, Homo sapien
tgcggggactggggccgccgggcat

SEQ ID NO: 4583479 - DNA, 25 bp, Homo sapien
gccagagcgcagaggagcaggagga

SEQ ID NO: 4583480 - DNA, 25 bp, Homo sapien
cgtccgtcccgtccggtcgctgcct

SEQ ID NO: 4583481 - DNA, 25 bp, Homo sapien
gctgcgctcggtccgcgggcaacaa

SEQ ID NO: 4583482 - DNA, 25 bp, Homo sapien
ggccccgactccgttcggctgcgct

SEQ ID NO: 4583483 - DNA, 25 bp, Homo sapien
ctgcctggtcccaggtccggctcag

SEQ ID NO: 4583484 - DNA, 25 bp, Homo sapien
catctccagtgaccttccactccac

SEQ ID NO: 4583485 - DNA, 25 bp, Homo sapien
tccagtgaccttccactccacctca

SEQ ID NO: 4583486 - DNA, 25 bp, Homo sapien
cagtgaccttccactccacctcagc

SEQ ID NO: 4583487 - DNA, 25 bp, Homo sapien
tctccagtgaccttccactccacct

SEQ ID NO: 4583488 - DNA, 25 bp, Homo sapien
gagtgtgcaggacatttctccgcag

SEQ ID NO: 4583489 - DNA, 25 bp, Homo sapien
tctaagtcacacgatgccgagaggc

SEQ ID NO: 4583490 - DNA, 25 bp, Homo sapien
ttccaattgtttccagagagtgtgc

SEQ ID NO: 4583491 - DNA, 25 bp, Homo sapien
agttgaaccaccgtcatgccaaaga

SEQ ID NO: 4583492 - DNA, 25 bp, Homo sapien
tctttaggatgaactggaagcaccc

SEQ ID NO: 4583493 - DNA, 25 bp, Homo sapien
ctattctccgggctggagtcggcat

SEQ ID NO: 4583494 - DNA, 25 bp, Homo sapien
gggtgggcgctctgccggcgggaat

SEQ ID NO: 4583495 - DNA, 25 bp, Homo sapien
acgagggtgctgagaacctctctgg

SEQ ID NO: 4583496 - DNA, 25 bp, Homo sapien
gctcaggctccttcgcattggttct

SEQ ID NO: 4583497 - DNA, 25 bp, Homo sapien
ggctccttcgcattggttctcacaa

SEQ ID NO: 4583498 - DNA, 25 bp, Homo sapien
caggctccttcgcattggttctcac

SEQ ID NO: 4583499 - DNA, 25 bp, Homo sapien
ctcaggctccttcgcattggttctc

SEQ ID NO: 4583500 - DNA, 25 bp, Homo sapien
agtgcttaatgtgctcaatacgcac

SEQ ID NO: 4583501 - DNA, 25 bp, Homo sapien
agagtgcttaatgtgctcaatacgc

SEQ ID NO: 4583502 - DNA, 25 bp, Homo sapien
tcagcttttagagtgcttaatgtgc

SEQ ID NO: 4583503 - DNA, 25 bp, Homo sapien
ttagagtgcttaatgtgctcaatac

SEQ ID NO: 4583504 - DNA, 25 bp, Homo sapien
gctgggggacattatagactcttcc

SEQ ID NO: 4583505 - DNA, 25 bp, Homo sapien
ctgggggacattatagactcttcca

SEQ ID NO: 4583506 - DNA, 25 bp, Homo sapien
gcatgctgggggacattatagactc

SEQ ID NO: 4583507 - DNA, 25 bp, Homo sapien
aacagcatgctgggggacattatag

SEQ ID NO: 4583508 - DNA, 25 bp, Homo sapien
cgcgtctgacgcggagttgggtggg

SEQ ID NO: 4583509 - DNA, 25 bp, Homo sapien
cgtctgacgcggagttgggtggggt

SEQ ID NO: 4583510 - DNA, 25 bp, Homo sapien
ggcgcgtctgacgcggagttgggtg

SEQ ID NO: 4583511 - DNA, 25 bp, Homo sapien
ctgacgcggagttgggtggggtaga

SEQ ID NO: 4583512 - DNA, 25 bp, Homo sapien
aacctccgcctcaggggttcaggtg

SEQ ID NO: 4583513 - DNA, 25 bp, Homo sapien
tggagtgtgcaatggtgtgagctcg

SEQ ID NO: 4583514 - DNA, 25 bp, Homo sapien
gagtgtgcaatggtgtgagctcggc

SEQ ID NO: 4583515 - DNA, 25 bp, Homo sapien
acctccgcctcaggggttcaggtga

SEQ ID NO: 4583516 - DNA, 25 bp, Homo sapien
ttatggtgcttaaagtaaagagccc

SEQ ID NO: 4583517 - DNA, 25 bp, Homo sapien
tgccaaaggttcaattcagtgtata

SEQ ID NO: 4583518 - DNA, 25 bp, Homo sapien
cagagggatatgctgtagagtgttt

SEQ ID NO: 4583519 - DNA, 25 bp, Homo sapien
tacttaggcattttatcttggctca

SEQ ID NO: 4583520 - DNA, 25 bp, Homo sapien
caggtgcgtgctttgttttctggta

SEQ ID NO: 4583521 - DNA, 25 bp, Homo sapien
ggaatgagacgctttagctttggta

SEQ ID NO: 4583522 - DNA, 25 bp, Homo sapien
tagctttggtacgtagcgctaatcc

SEQ ID NO: 4583523 - DNA, 25 bp, Homo sapien
tctggtatggcctttatggaatgag

SEQ ID NO: 4583524 - DNA, 25 bp, Homo sapien
tcaagaatttacgtgtcattcttgg

SEQ ID NO: 4583525 - DNA, 25 bp, Homo sapien
caagaatttacgtgtcattcttggc

SEQ ID NO: 4583526 - DNA, 25 bp, Homo sapien
aagaatttacgtgtcattcttggca

SEQ ID NO: 4583527 - DNA, 25 bp, Homo sapien
agaatttacgtgtcattcttggcac

SEQ ID NO: 4583528 - DNA, 25 bp, Homo sapien
acagggccgaggtggcatcctactc

SEQ ID NO: 4583529 - DNA, 25 bp, Homo sapien
ggcatcctactccagtgccctaaag

SEQ ID NO: 4583530 - DNA, 25 bp, Homo sapien
gtttccccacaatccatgggctcag

SEQ ID NO: 4583531 - DNA, 25 bp, Homo sapien
catagtggccataaggtgtcgctgt

SEQ ID NO: 4583532 - DNA, 25 bp, Homo sapien
tatctcagttggatgtagccatgtc

SEQ ID NO: 4583533 - DNA, 25 bp, Homo sapien
tgctgcttgtttcacaacagtcctg

SEQ ID NO: 4583534 - DNA, 25 bp, Homo sapien
tgccgatctctttaaatccaaacag

SEQ ID NO: 4583535 - DNA, 25 bp, Homo sapien
agtcctgccaacactggatgttata

SEQ ID NO: 4583536 - DNA, 25 bp, Homo sapien
cataggacaaagagctggtggactc

SEQ ID NO: 4583537 - DNA, 25 bp, Homo sapien
tggtgtggaaacgacaggagcatct

SEQ ID NO: 4583538 - DNA, 25 bp, Homo sapien
tttcaggaagcccaaataagatgac

SEQ ID NO: 4583539 - DNA, 25 bp, Homo sapien
tctcaaaaggcaagataagggaagg

SEQ ID NO: 4583540 - DNA, 25 bp, Homo sapien
gaaagaatattcgtggtccatgtgg

SEQ ID NO: 4583541 - DNA, 25 bp, Homo sapien
cacgggtgagctcatggtggaactc

SEQ ID NO: 4583542 - DNA, 25 bp, Homo sapien
tctgttaagaaggacactaaggcac

SEQ ID NO: 4583543 - DNA, 25 bp, Homo sapien
tctttgcgtcatagacacgggtgag

SEQ ID NO: 4583544 - DNA, 25 bp, Homo sapien
gttctttccgcgctcgatgaggaag

SEQ ID NO: 4583545 - DNA, 25 bp, Homo sapien
cacatgttctttccgcgctcgatga

SEQ ID NO: 4583546 - DNA, 25 bp, Homo sapien
cacacatgttctttccgcgctcgat

SEQ ID NO: 4583547 - DNA, 25 bp, Homo sapien
ctttccgcgctcgatgaggaagtac

SEQ ID NO: 4583548 - DNA, 25 bp, Homo sapien
cccagaagtgggacctgggagctgc

SEQ ID NO: 4583549 - DNA, 25 bp, Homo sapien
gaagtgggacctgggagctgcttac

SEQ ID NO: 4583550 - DNA, 25 bp, Homo sapien
cagaagtgggacctgggagctgctt

SEQ ID NO: 4583551 - DNA, 25 bp, Homo sapien
ccagaagtgggacctgggagctgct

SEQ ID NO: 4583552 - DNA, 25 bp, Homo sapien
ccaagagtttttcacgatccagtaa

SEQ ID NO: 4583553 - DNA, 25 bp, Homo sapien
ccaacagccagtactgcatggttta

SEQ ID NO: 4583554 - DNA, 25 bp, Homo sapien
ttactttatctggagttttatggca

SEQ ID NO: 4583555 - DNA, 25 bp, Homo sapien
cacgatccagtaagggatcccattt

SEQ ID NO: 4583556 - DNA, 25 bp, Homo sapien
tgcaccaccacacccagctaatttt

SEQ ID NO: 4583557 - DNA, 25 bp, Homo sapien
caccgcacccggccctttcagttct

SEQ ID NO: 4583558 - DNA, 25 bp, Homo sapien
tcagactcccgagtagcctgattac

SEQ ID NO: 4583559 - DNA, 25 bp, Homo sapien
aggcgtgcaccaccacacccagcta

SEQ ID NO: 4583560 - DNA, 25 bp, Homo sapien
gtaagtgggccataggctcgcgcca

SEQ ID NO: 4583561 - DNA, 25 bp, Homo sapien
tgaactagcctccataaggaaattc

SEQ ID NO: 4583562 - DNA, 25 bp, Homo sapien
tattactttatacctatggcaaaaa

SEQ ID NO: 4583563 - DNA, 25 bp, Homo sapien
tacaaaagtgaactagcctccataa

SEQ ID NO: 4583564 - DNA, 25 bp, Homo sapien
gagtagatgccggttctatacatca

SEQ ID NO: 4583565 - DNA, 25 bp, Homo sapien
tacatcatgaagtcctgagtcacct

SEQ ID NO: 4583566 - DNA, 25 bp, Homo sapien
ctcacagggttgtagagggccacag

SEQ ID NO: 4583567 - DNA, 25 bp, Homo sapien
agtcacctcaaaggcaaagctcaca

SEQ ID NO: 4583568 - DNA, 25 bp, Homo sapien
aatgctagttctggcctggtcgtca

SEQ ID NO: 4583569 - DNA, 25 bp, Homo sapien
ggtagaaccccatgcagaaccttaa

SEQ ID NO: 4583570 - DNA, 25 bp, Homo sapien
gcatatctgagacatggagggcaca

SEQ ID NO: 4583571 - DNA, 25 bp, Homo sapien
caacagtatctgcagggtgggtccc

SEQ ID NO: 4583572 - DNA, 25 bp, Homo sapien
tccaggttggaacttgcaataacca

SEQ ID NO: 4583573 - DNA, 25 bp, Homo sapien
gccgatggcctttccaggttggaac

SEQ ID NO: 4583574 - DNA, 25 bp, Homo sapien
tacatccttgacaaagccgatggcc

SEQ ID NO: 4583575 - DNA, 25 bp, Homo sapien
gattgtgatgttggctacatccttg

SEQ ID NO: 4583576 - DNA, 25 bp, Homo sapien
catttaggaaccagcatgtggctgg

SEQ ID NO: 4583577 - DNA, 25 bp, Homo sapien
aggcagcaggacaagggacagaact

SEQ ID NO: 4583578 - DNA, 25 bp, Homo sapien
gaagcgcagccctttcaaggcagga

SEQ ID NO: 4583579 - DNA, 25 bp, Homo sapien
ttaagaagggagagttggccgggca

SEQ ID NO: 4583580 - DNA, 25 bp, Homo sapien
ggatatactcgaaagcctggctggg

SEQ ID NO: 4583581 - DNA, 25 bp, Homo sapien
cccatgatccccttgttgtacagga

SEQ ID NO: 4583582 - DNA, 25 bp, Homo sapien
cccttgttgtacaggatatactcga

SEQ ID NO: 4583583 - DNA, 25 bp, Homo sapien
gggtaggtgtcttcacccatgatcc

SEQ ID NO: 4583584 - DNA, 25 bp, Homo sapien
ctgtcgaagcggtcagtgggaaatg

SEQ ID NO: 4583585 - DNA, 25 bp, Homo sapien
tattgaagtcctgggcgcagtccac

SEQ ID NO: 4583586 - DNA, 25 bp, Homo sapien
cgtgattattgaagtcctgggcgca

SEQ ID NO: 4583587 - DNA, 25 bp, Homo sapien
ccttggcagccgtgattattgaagt

SEQ ID NO: 4583588 - DNA, 25 bp, Homo sapien
cagccgtgattattgaagtcctggg

SEQ ID NO: 4583589 - DNA, 25 bp, Homo sapien
ggcaggggctaggatagttccttca

SEQ ID NO: 4583590 - DNA, 25 bp, Homo sapien
gttccttcaggggcatcatccgtct

SEQ ID NO: 4583591 - DNA, 25 bp, Homo sapien
ggtcctcatggcatcaccaggccgg

SEQ ID NO: 4583592 - DNA, 25 bp, Homo sapien
caggccggctgtgcactgtccctcc

SEQ ID NO: 4583593 - DNA, 25 bp, Homo sapien
caaggacagcatctttccggttgcg

SEQ ID NO: 4583594 - DNA, 25 bp, Homo sapien
cagtggtggagaaagtccagcaact

SEQ ID NO: 4583595 - DNA, 25 bp, Homo sapien
atctttccggttgcgatggcgatcg

SEQ ID NO: 4583596 - DNA, 25 bp, Homo sapien
gatggcgatcgcagactccagggcc

SEQ ID NO: 4583597 - DNA, 25 bp, Homo sapien
agcaggtggcctctgaccagtgcct

SEQ ID NO: 4583598 - DNA, 25 bp, Homo sapien
cagagctcccgagtccccaggtgcc

SEQ ID NO: 4583599 - DNA, 25 bp, Homo sapien
tctgagcctcgcaagtcctgagagg

SEQ ID NO: 4583600 - DNA, 25 bp, Homo sapien
agtgcctgtggactcccaatcacca

SEQ ID NO: 4583601 - DNA, 25 bp, Homo sapien
tcttcccttcacatatctctctcag

SEQ ID NO: 4583602 - DNA, 25 bp, Homo sapien
ggagtgtggccgttttgcagggaga

SEQ ID NO: 4583603 - DNA, 25 bp, Homo sapien
ggagaggatggagattgccaggcat

SEQ ID NO: 4583604 - DNA, 25 bp, Homo sapien
agaggatggagattgccaggcatac

SEQ ID NO: 4583605 - DNA, 25 bp, Homo sapien
tgttcttcctggtgtattgtctggg

SEQ ID NO: 4583606 - DNA, 25 bp, Homo sapien
cgccagtccacggaaggtgggtagg

SEQ ID NO: 4583607 - DNA, 25 bp, Homo sapien
gaaggtagttacttttggtggctga

SEQ ID NO: 4583608 - DNA, 25 bp, Homo sapien
ttcacaggtgagacaaaatttcctt

SEQ ID NO: 4583609 - DNA, 25 bp, Homo sapien
ttttcacaggtgagacaaaatttcc

SEQ ID NO: 4583610 - DNA, 25 bp, Homo sapien
ggctctgaccagagatacttgtgtt

SEQ ID NO: 4583611 - DNA, 25 bp, Homo sapien
ctgaggctctgaccagagatacttg

SEQ ID NO: 4583612 - DNA, 25 bp, Homo sapien
gaggctctgaccagagatacttgtg

SEQ ID NO: 4583613 - DNA, 25 bp, Homo sapien
tctgaccagagatacttgtgtttta

SEQ ID NO: 4583614 - DNA, 25 bp, Homo sapien
ttacgatcccacattacacagagag

SEQ ID NO: 4583615 - DNA, 25 bp, Homo sapien
gctttgtcccaaatttacgatccca

SEQ ID NO: 4583616 - DNA, 25 bp, Homo sapien
gagtctcttgtaaacttcacaacca

SEQ ID NO: 4583617 - DNA, 25 bp, Homo sapien
gagtaacagcggagccacaatctga

SEQ ID NO: 4583618 - DNA, 25 bp, Homo sapien
gttgtgggcgtttatcttcctccag

SEQ ID NO: 4583619 - DNA, 25 bp, Homo sapien
cctgtggtggtactcctccgtactg

SEQ ID NO: 4583620 - DNA, 25 bp, Homo sapien
cctccgtactgtaggtcttacggtg

SEQ ID NO: 4583621 - DNA, 25 bp, Homo sapien
tccagttgctggcaaacgtctgcag

SEQ ID NO: 4583622 - DNA, 25 bp, Homo sapien
aacaggctgcagctccctagaggga

SEQ ID NO: 4583623 - DNA, 25 bp, Homo sapien
aagtcatggaaacaggctgcagctc

SEQ ID NO: 4583624 - DNA, 25 bp, Homo sapien
gaaacaggctgcagctccctagagg

SEQ ID NO: 4583625 - DNA, 25 bp, Homo sapien
caagtcatggaaacaggctgcagct

SEQ ID NO: 4583626 - DNA, 25 bp, Homo sapien
caaccagtacacagtgtgctttggt

SEQ ID NO: 4583627 - DNA, 25 bp, Homo sapien
ggcactcctggacgccactgctggt

SEQ ID NO: 4583628 - DNA, 25 bp, Homo sapien
actcctggacgccactgctggtgct

SEQ ID NO: 4583629 - DNA, 25 bp, Homo sapien
ggtgctgggtcaagtttacagcaaa

SEQ ID NO: 4583630 - DNA, 25 bp, Homo sapien
tagacatccatgacttgaagtgaaa

SEQ ID NO: 4583631 - DNA, 25 bp, Homo sapien
gacatccatgacttgaagtgaaact

SEQ ID NO: 4583632 - DNA, 25 bp, Homo sapien
acatccatgacttgaagtgaaactt

SEQ ID NO: 4583633 - DNA, 25 bp, Homo sapien
cttagacatccatgacttgaagtga

SEQ ID NO: 4583634 - DNA, 25 bp, Homo sapien
tgttccagagaccaatctatggccg

SEQ ID NO: 4583635 - DNA, 25 bp, Homo sapien
tctgccggcatcacttgaaatatct

SEQ ID NO: 4583636 - DNA, 25 bp, Homo sapien
tatacccatgggttcaggttcagat

SEQ ID NO: 4583637 - DNA, 25 bp, Homo sapien
aaggatccatacctccagtgtgaag

SEQ ID NO: 4583638 - DNA, 25 bp, Homo sapien
gagctgcgggctcctttggtattct

SEQ ID NO: 4583639 - DNA, 25 bp, Homo sapien
gacagatcagagtcctctgtgtgac

SEQ ID NO: 4583640 - DNA, 25 bp, Homo sapien
ctggctaggtgggaccctggacact

SEQ ID NO: 4583641 - DNA, 25 bp, Homo sapien
gtattctaggctggagagccacctg

SEQ ID NO: 4583642 - DNA, 25 bp, Homo sapien
cctggccaagttctcccagcgtcca

SEQ ID NO: 4583643 - DNA, 25 bp, Homo sapien
gcgtccactctagggcctgctagca

SEQ ID NO: 4583644 - DNA, 25 bp, Homo sapien
tagggcctgctagcaccctctcggg

SEQ ID NO: 4583645 - DNA, 25 bp, Homo sapien
tctgccccgttcctccggagcccag

SEQ ID NO: 4583646 - DNA, 25 bp, Homo sapien
accgcagacggggactcccaggagc

SEQ ID NO: 4583647 - DNA, 25 bp, Homo sapien
cggcaccgcagacggggactcccag

SEQ ID NO: 4583648 - DNA, 25 bp, Homo sapien
gcaccgcagacggggactcccagga

SEQ ID NO: 4583649 - DNA, 25 bp, Homo sapien
cgcagacggggactcccaggagcca

SEQ ID NO: 4583650 - DNA, 25 bp, Homo sapien
agagcagcggcagcgtggcccacat

SEQ ID NO: 4583651 - DNA, 25 bp, Homo sapien
cggcgcagagcagcggcagcgtggc

SEQ ID NO: 4583652 - DNA, 25 bp, Homo sapien
cagagcagcggcagcgtggcccaca

SEQ ID NO: 4583653 - DNA, 25 bp, Homo sapien
cgcagagcagcggcagcgtggccca

SEQ ID NO: 4583654 - DNA, 25 bp, Homo sapien
ctggcggcttggctcttgcgctcag

SEQ ID NO: 4583655 - DNA, 25 bp, Homo sapien
tgcgctcagggtccgcggaggtggc

SEQ ID NO: 4583656 - DNA, 25 bp, Homo sapien
ttggctcttgcgctcagggtccgcg

SEQ ID NO: 4583657 - DNA, 25 bp, Homo sapien
cagcgctggcggcttggctcttgcg

SEQ ID NO: 4583658 - DNA, 25 bp, Homo sapien
cggggggggagcggcacgagcgtgg

SEQ ID NO: 4583659 - DNA, 25 bp, Homo sapien
ctgggagcgcggggggggagcggca

SEQ ID NO: 4583660 - DNA, 25 bp, Homo sapien
ggagcgcggggggggagcggcacga

SEQ ID NO: 4583661 - DNA, 25 bp, Homo sapien
gcgcggggggggagcggcacgagcg

SEQ ID NO: 4583662 - DNA, 25 bp, Homo sapien
aataggagtccgctaaccacaggtc

SEQ ID NO: 4583663 - DNA, 25 bp, Homo sapien
cccagaaacatcaataggagtccgc

SEQ ID NO: 4583664 - DNA, 25 bp, Homo sapien
gtccgctaaccacaggtcctggaat

SEQ ID NO: 4583665 - DNA, 25 bp, Homo sapien
ccaggtctagagttcccagaaacat

SEQ ID NO: 4583666 - DNA, 25 bp, Homo sapien
tatagcatgcgttagtacttatttc

SEQ ID NO: 4583667 - DNA, 25 bp, Homo sapien
gtatggctatactatgttttgtgtg

SEQ ID NO: 4583668 - DNA, 25 bp, Homo sapien
ttctggacacttcatgtaagaggaa

SEQ ID NO: 4583669 - DNA, 25 bp, Homo sapien
catatgataagagaccttttgtgtc

SEQ ID NO: 4583670 - DNA, 25 bp, Homo sapien
agcttccggactgtgaggagcccaa

SEQ ID NO: 4583671 - DNA, 25 bp, Homo sapien
gatgactccagtcccagttgctgag

SEQ ID NO: 4583672 - DNA, 25 bp, Homo sapien
tgctggaacagtcgctcttggaacc

SEQ ID NO: 4583673 - DNA, 25 bp, Homo sapien
ccttgactgaacgaatgaaacccat

SEQ ID NO: 4583674 - DNA, 25 bp, Homo sapien
gagcatgcctgccacttcggagtta

SEQ ID NO: 4583675 - DNA, 25 bp, Homo sapien
gaaattgacatcaccatcagcggga

SEQ ID NO: 4583676 - DNA, 25 bp, Homo sapien
taagcttgtagtgaccgttaggcag

SEQ ID NO: 4583677 - DNA, 25 bp, Homo sapien
catttcctcgggaagtctagggcct

SEQ ID NO: 4583678 - DNA, 25 bp, Homo sapien
aagactcgtagaggctttcttcatc

SEQ ID NO: 4583679 - DNA, 25 bp, Homo sapien
ggagttttggttctattcggagaga

SEQ ID NO: 4583680 - DNA, 25 bp, Homo sapien
tacaaaagattggtccagtaaatat

SEQ ID NO: 4583681 - DNA, 25 bp, Homo sapien
attcggagagaagactcgtagaggc

SEQ ID NO: 4583682 - DNA, 25 bp, Homo sapien
gtacttttccatagttgtacctatg

SEQ ID NO: 4583683 - DNA, 25 bp, Homo sapien
ttattgtagaataaaggacatgaca

SEQ ID NO: 4583684 - DNA, 25 bp, Homo sapien
tgtgtgatcgtctcgttcttagaat

SEQ ID NO: 4583685 - DNA, 25 bp, Homo sapien
tatggaatggacagcacttggtatg

SEQ ID NO: 4583686 - DNA, 25 bp, Homo sapien
gtggcttcgccgggatttgaaccca

SEQ ID NO: 4583687 - DNA, 25 bp, Homo sapien
taacacagttggtgagtggcttcgc

SEQ ID NO: 4583688 - DNA, 25 bp, Homo sapien
caggtgttccctggtcgactgagag

SEQ ID NO: 4583689 - DNA, 25 bp, Homo sapien
gcttgctgctgttaattggccaggg

SEQ ID NO: 4583690 - DNA, 25 bp, Homo sapien
ggcatttgagctgggctcgagagaa

SEQ ID NO: 4583691 - DNA, 25 bp, Homo sapien
catttgagctgggctcgagagaatt

SEQ ID NO: 4583692 - DNA, 25 bp, Homo sapien
agggatggcatttgagctgggctcg

SEQ ID NO: 4583693 - DNA, 25 bp, Homo sapien
atggcatttgagctgggctcgagag

SEQ ID NO: 4583694 - DNA, 25 bp, Homo sapien
agtttgttgaaactggcgaatctct

SEQ ID NO: 4583695 - DNA, 25 bp, Homo sapien
gaaactggcgaatctctcggataat

SEQ ID NO: 4583696 - DNA, 25 bp, Homo sapien
gttgaaactggcgaatctctcggat

SEQ ID NO: 4583697 - DNA, 25 bp, Homo sapien
cgaatctctcggataatatgggata

SEQ ID NO: 4583698 - DNA, 25 bp, Homo sapien
catcaagcaagtgtcgatacgaaca

SEQ ID NO: 4583699 - DNA, 25 bp, Homo sapien
tccagcaaaagttaaaggcatcagc

SEQ ID NO: 4583700 - DNA, 25 bp, Homo sapien
cctgttcctaatgggagaagtctcc

SEQ ID NO: 4583701 - DNA, 25 bp, Homo sapien
caggatggtgcctgaaaaaaccctt

SEQ ID NO: 4583702 - DNA, 25 bp, Homo sapien
gccgtcttccgtgtaattgggcgtc

SEQ ID NO: 4583703 - DNA, 25 bp, Homo sapien
gtaattgggcgtcccctcctcgatg

SEQ ID NO: 4583704 - DNA, 25 bp, Homo sapien
gtgtaattgggcgtcccctcctcga

SEQ ID NO: 4583705 - DNA, 25 bp, Homo sapien
accaggccgtcttccgtgtaattgg

SEQ ID NO: 4583706 - DNA, 25 bp, Homo sapien
ggtaagggacacagggtgggtcaca

SEQ ID NO: 4583707 - DNA, 25 bp, Homo sapien
gtaagggacacagggtgggtcacaa

SEQ ID NO: 4583708 - DNA, 25 bp, Homo sapien
caggtaagggacacagggtgggtca

SEQ ID NO: 4583709 - DNA, 25 bp, Homo sapien
tagcaacaggtgtcagaatcagagt

SEQ ID NO: 4583710 - DNA, 25 bp, Homo sapien
ttacagcaagtaagctggttttcca

SEQ ID NO: 4583711 - DNA, 25 bp, Homo sapien
acatcagtatttggccagaattcaa

SEQ ID NO: 4583712 - DNA, 25 bp, Homo sapien
ggagagcgcctcatttggtgatagt

SEQ ID NO: 4583713 - DNA, 25 bp, Homo sapien
gaatcacttgcaagtagcacgccca

SEQ ID NO: 4583714 - DNA, 25 bp, Homo sapien
gaggcctggtgactgcaagctgact

SEQ ID NO: 4583715 - DNA, 25 bp, Homo sapien
catatgcggcccttaggccacgggt

SEQ ID NO: 4583716 - DNA, 25 bp, Homo sapien
tccctggccgcattggaagaagaat

SEQ ID NO: 4583717 - DNA, 25 bp, Homo sapien
ttacaagtttctgccggctgtggtt

SEQ ID NO: 4583718 - DNA, 25 bp, Homo sapien
ctctcttacaagtttctgccggctg

SEQ ID NO: 4583719 - DNA, 25 bp, Homo sapien
gctgtggttggggatctcctctctc

SEQ ID NO: 4583720 - DNA, 25 bp, Homo sapien
gtgggatgggctattctctcttaca

SEQ ID NO: 4583721 - DNA, 25 bp, Homo sapien
gcctagcccgaattggatatcttaa

SEQ ID NO: 4583722 - DNA, 25 bp, Homo sapien
cactgtgcctagcccgaattggata

SEQ ID NO: 4583723 - DNA, 25 bp, Homo sapien
ctgtgcctagcccgaattggatatc

SEQ ID NO: 4583724 - DNA, 25 bp, Homo sapien
gtgcctagcccgaattggatatctt

SEQ ID NO: 4583725 - DNA, 25 bp, Homo sapien
tggatggagtggtgccccgggggcg

SEQ ID NO: 4583726 - DNA, 25 bp, Homo sapien
cacctgaaagagggaagacggtcag

SEQ ID NO: 4583727 - DNA, 25 bp, Homo sapien
tgaaagagggaagacggtcagggtg

SEQ ID NO: 4583728 - DNA, 25 bp, Homo sapien
aggtggatggagtggtgccccgggg

SEQ ID NO: 4583729 - DNA, 25 bp, Homo sapien
cgttaagacgtctcctgatgtcaga

SEQ ID NO: 4583730 - DNA, 25 bp, Homo sapien
caggaaatgctagcaaactctggag

SEQ ID NO: 4583731 - DNA, 25 bp, Homo sapien
tcttgtgggtagacagacgaacaga

SEQ ID NO: 4583732 - DNA, 25 bp, Homo sapien
ttttagaatcgagaaatctggcacc

SEQ ID NO: 4583733 - DNA, 25 bp, Homo sapien
taaatctgccctcagatgacacaag

SEQ ID NO: 4583734 - DNA, 25 bp, Homo sapien
tcagatgacacaagcttttggagct

SEQ ID NO: 4583735 - DNA, 25 bp, Homo sapien
agcttttggagcttatcaatcaaag

SEQ ID NO: 4583736 - DNA, 25 bp, Homo sapien
gagattcttaaatctgccctcagat

SEQ ID NO: 4583737 - DNA, 25 bp, Homo sapien
tcctcaggagttgggcacgggtcct

SEQ ID NO: 4583738 - DNA, 25 bp, Homo sapien
ctgtgtagcccgagggaaggccctt

SEQ ID NO: 4583739 - DNA, 25 bp, Homo sapien
gaactagacccaaaggatgtgaccg

SEQ ID NO: 4583740 - DNA, 25 bp, Homo sapien
tagaaggacttagtgggtgactccc

SEQ ID NO: 4583741 - DNA, 25 bp, Homo sapien
ttctggaaccaatttgtggctctgg

SEQ ID NO: 4583742 - DNA, 25 bp, Homo sapien
gcacgtttttaacttcctccacatc

SEQ ID NO: 4583743 - DNA, 25 bp, Homo sapien
tggaaccaatttgtggctctgggct

SEQ ID NO: 4583744 - DNA, 25 bp, Homo sapien
gaaccaatttgtggctctgggctgg

SEQ ID NO: 4583745 - DNA, 25 bp, Homo sapien
gattacagtccaggtctcactgcca

SEQ ID NO: 4583746 - DNA, 25 bp, Homo sapien
aagtggggattacagtccaggtctc

SEQ ID NO: 4583747 - DNA, 25 bp, Homo sapien
ccaggtgatataggggaagctattc

SEQ ID NO: 4583748 - DNA, 25 bp, Homo sapien
gctatctggtcccaggtgatatagg

SEQ ID NO: 4583749 - DNA, 25 bp, Homo sapien
ttacctgggagtgttagacctcagc

SEQ ID NO: 4583750 - DNA, 25 bp, Homo sapien
gggagtgttagacctcagcccagta

SEQ ID NO: 4583751 - DNA, 25 bp, Homo sapien
cctgggagtgttagacctcagccca

SEQ ID NO: 4583752 - DNA, 25 bp, Homo sapien
ggtcttcctgccctagccccaatcc

SEQ ID NO: 4583753 - DNA, 25 bp, Homo sapien
gagccacgtctttttgagccggaag

SEQ ID NO: 4583754 - DNA, 25 bp, Homo sapien
gattgcactgcggttcatggacgag

SEQ ID NO: 4583755 - DNA, 25 bp, Homo sapien
gaggcagcggcatatgtcagctacg

SEQ ID NO: 4583756 - DNA, 25 bp, Homo sapien
gacgaggtgatctccagtacggcat

SEQ ID NO: 4583757 - DNA, 25 bp, Homo sapien
ggctcacttcaacttgcacttcctg

SEQ ID NO: 4583758 - DNA, 25 bp, Homo sapien
gcgattctcctaccacaacctccca

SEQ ID NO: 4583759 - DNA, 25 bp, Homo sapien
tcggctcacttcaacttgcacttcc

SEQ ID NO: 4583760 - DNA, 25 bp, Homo sapien
tctcggctcacttcaacttgcactt

SEQ ID NO: 4583761 - DNA, 25 bp, Homo sapien
aattacctgggtgcagtggcatgca

SEQ ID NO: 4583762 - DNA, 25 bp, Homo sapien
gacagagggagactgtgtcttaaac

SEQ ID NO: 4583763 - DNA, 25 bp, Homo sapien
ttacctgggtgcagtggcatgcacc

SEQ ID NO: 4583764 - DNA, 25 bp, Homo sapien
agagggagactgtgtcttaaacaaa

SEQ ID NO: 4583765 - DNA, 25 bp, Homo sapien
tgagctaccacacaccagttaggag

SEQ ID NO: 4583766 - DNA, 25 bp, Homo sapien
gaacattgcaaatgctccctgtgga

SEQ ID NO: 4583767 - DNA, 25 bp, Homo sapien
tacctaaaaatgtgaggacagcccc

SEQ ID NO: 4583768 - DNA, 25 bp, Homo sapien
tgcactgtgtagcaatggaagccat

SEQ ID NO: 4583769 - DNA, 25 bp, Homo sapien
cgagtgggacatcattgccagagta

SEQ ID NO: 4583770 - DNA, 25 bp, Homo sapien
gcgagtgggacatcattgccagagt

SEQ ID NO: 4583771 - DNA, 25 bp, Homo sapien
agtgggacatcattgccagagtagc

SEQ ID NO: 4583772 - DNA, 25 bp, Homo sapien
cagcgagtgggacatcattgccaga

SEQ ID NO: 4583773 - DNA, 25 bp, Homo sapien
tggttttcatgatataaggggtcct

SEQ ID NO: 4583774 - DNA, 25 bp, Homo sapien
tcattgaagtgcttagtggttttca

SEQ ID NO: 4583775 - DNA, 25 bp, Homo sapien
ttttcatgatataaggggtcctttc

SEQ ID NO: 4583776 - DNA, 25 bp, Homo sapien
tcatccatccttgtccgaagaactc

SEQ ID NO: 4583777 - DNA, 25 bp, Homo sapien
gaaggctgaaaacactctcgtggct

SEQ ID NO: 4583778 - DNA, 25 bp, Homo sapien
tgtcccctaaatcagctactggagg

SEQ ID NO: 4583779 - DNA, 25 bp, Homo sapien
cagaacaggtaacagcaggccttgg

SEQ ID NO: 4583780 - DNA, 25 bp, Homo sapien
gcaaggatgtttaccgcagggataa

SEQ ID NO: 4583781 - DNA, 25 bp, Homo sapien
cttcttgaagacgaggtgatctagc

SEQ ID NO: 4583782 - DNA, 25 bp, Homo sapien
taaggaatcttcttgaagacgaggt

SEQ ID NO: 4583783 - DNA, 25 bp, Homo sapien
ataaggaatcttcttgaagacgagg

SEQ ID NO: 4583784 - DNA, 25 bp, Homo sapien
gaatcttcttgaagacgaggtgatc

SEQ ID NO: 4583785 - DNA, 25 bp, Homo sapien
caacattttgagttaggcccatgac

SEQ ID NO: 4583786 - DNA, 25 bp, Homo sapien
tgagttaggcccatgacggacacct

SEQ ID NO: 4583787 - DNA, 25 bp, Homo sapien
catgacggacacctcctggattccc

SEQ ID NO: 4583788 - DNA, 25 bp, Homo sapien
cattttgagttaggcccatgacgga

SEQ ID NO: 4583789 - DNA, 25 bp, Homo sapien
gacggggtatgacgctgcctcgaat

SEQ ID NO: 4583790 - DNA, 25 bp, Homo sapien
tggacggggtatgacgctgcctcga

SEQ ID NO: 4583791 - DNA, 25 bp, Homo sapien
cgggtggacggggtatgacgctgcc

SEQ ID NO: 4583792 - DNA, 25 bp, Homo sapien
ggtggacggggtatgacgctgcctc

SEQ ID NO: 4583793 - DNA, 25 bp, Homo sapien
cagcgtgatctggttgtcacctggg

SEQ ID NO: 4583794 - DNA, 25 bp, Homo sapien
gcgtgatctggttgtcacctgggtc

SEQ ID NO: 4583795 - DNA, 25 bp, Homo sapien
gtgatctggttgtcacctgggtcct

SEQ ID NO: 4583796 - DNA, 25 bp, Homo sapien
tccagcgtgatctggttgtcacctg

SEQ ID NO: 4583797 - DNA, 25 bp, Homo sapien
gcgctcttcacctcccgggcctctg

SEQ ID NO: 4583798 - DNA, 25 bp, Homo sapien
ggctgtccttgacaagggcgctctt

SEQ ID NO: 4583799 - DNA, 25 bp, Homo sapien
cgctcttcacctcccgggcctctga

SEQ ID NO: 4583800 - DNA, 25 bp, Homo sapien
cagcactcctacttggggctgtcct

SEQ ID NO: 4583801 - DNA, 25 bp, Homo sapien
tccgggtcgtgcatgacttcttcca

SEQ ID NO: 4583802 - DNA, 25 bp, Homo sapien
cagccttccgctcctgggtcaggag

SEQ ID NO: 4583803 - DNA, 25 bp, Homo sapien
tccaggaagccgatcaccttgcatt

SEQ ID NO: 4583804 - DNA, 25 bp, Homo sapien
cttgcatttgagctcatcgttggtc

SEQ ID NO: 4583805 - DNA, 25 bp, Homo sapien
gccgggaaggtgtgatgggtggctc

SEQ ID NO: 4583806 - DNA, 25 bp, Homo sapien
ccgggaaggtgtgatgggtggctct

SEQ ID NO: 4583807 - DNA, 25 bp, Homo sapien
ctgccgggaaggtgtgatgggtggc

SEQ ID NO: 4583808 - DNA, 25 bp, Homo sapien
cgggaaggtgtgatgggtggctctg

SEQ ID NO: 4583809 - DNA, 25 bp, Homo sapien
tgagagtgcttggacacccagtggc

SEQ ID NO: 4583810 - DNA, 25 bp, Homo sapien
ccagtggcggagcacgttcaagaca

SEQ ID NO: 4583811 - DNA, 25 bp, Homo sapien
tcaagacacgattggtggctgctct

SEQ ID NO: 4583812 - DNA, 25 bp, Homo sapien
tgctctgcggatcacaaactccttg

SEQ ID NO: 4583813 - DNA, 25 bp, Homo sapien
tggccccggcggttgctatggcaaa

SEQ ID NO: 4583814 - DNA, 25 bp, Homo sapien
tcacgacaggaggtcatgacgactc

SEQ ID NO: 4583815 - DNA, 25 bp, Homo sapien
cggccgacaaggcactgcggttatt

SEQ ID NO: 4583816 - DNA, 25 bp, Homo sapien
tgcactggctaaggacatcctccgg

SEQ ID NO: 4583817 - DNA, 25 bp, Homo sapien
tttttgactgatttgggtgttgttg

SEQ ID NO: 4583818 - DNA, 25 bp, Homo sapien
tgttgttggagatttagttggtgat

SEQ ID NO: 4583819 - DNA, 25 bp, Homo sapien
tgatgtttcagtatcaccatcatca

SEQ ID NO: 4583820 - DNA, 25 bp, Homo sapien
tgactcctctctcatggagacttct

SEQ ID NO: 4583821 - DNA, 25 bp, Homo sapien
gcaggagctgctgacgacctcttct

SEQ ID NO: 4583822 - DNA, 25 bp, Homo sapien
ctctgtgcccctggagcatcctcct

SEQ ID NO: 4583823 - DNA, 25 bp, Homo sapien
atcctcctgacacaagccattcgta

SEQ ID NO: 4583824 - DNA, 25 bp, Homo sapien
gccattcgtatcaggtgtccacatt

SEQ ID NO: 4583825 - DNA, 25 bp, Homo sapien
tctgcttgctgagcgctgaagggtc

SEQ ID NO: 4583826 - DNA, 25 bp, Homo sapien
tggtgtccagcgtggccttgctgaa

SEQ ID NO: 4583827 - DNA, 25 bp, Homo sapien
ctgaagggtcttcgggcttctcagg

SEQ ID NO: 4583828 - DNA, 25 bp, Homo sapien
ttctcaggggtcgtatcgccctcat

SEQ ID NO: 4583829 - DNA, 25 bp, Homo sapien
gccggcggctcggtgacgatgtctt

SEQ ID NO: 4583830 - DNA, 25 bp, Homo sapien
gggttcaccgtacaggagcttattg

SEQ ID NO: 4583831 - DNA, 25 bp, Homo sapien
cgaggagaacttgcgggtggcgcgc

SEQ ID NO: 4583832 - DNA, 25 bp, Homo sapien
tgtagccattggagttgcagctgag

SEQ ID NO: 4583833 - DNA, 25 bp, Homo sapien
gatgggctgtccacaactgggatct

SEQ ID NO: 4583834 - DNA, 25 bp, Homo sapien
cacgttgcacacaggataggattga

SEQ ID NO: 4583835 - DNA, 25 bp, Homo sapien
tatgttgactcaccccaagtaggcc

SEQ ID NO: 4583836 - DNA, 25 bp, Homo sapien
aaaccatagcttgtctcatcgaggc

SEQ ID NO: 4583837 - DNA, 25 bp, Homo sapien
aggaagtcgatgctcaggaagcgca

SEQ ID NO: 4583838 - DNA, 25 bp, Homo sapien
gcttgtccaggaccacgatggcggt

SEQ ID NO: 4583839 - DNA, 25 bp, Homo sapien
tcatcacaatataaggaggcgtcgg

SEQ ID NO: 4583840 - DNA, 25 bp, Homo sapien
actggcgtagcggatctgcagcact

SEQ ID NO: 4583841 - DNA, 25 bp, Homo sapien
cgggaaggcctggatgcatcatgtt

SEQ ID NO: 4583842 - DNA, 25 bp, Homo sapien
ctgagacgctgaccgctacatccat

SEQ ID NO: 4583843 - DNA, 25 bp, Homo sapien
ggcgtatacctttgtcttgcaaacc

SEQ ID NO: 4583844 - DNA, 25 bp, Homo sapien
caaacccaaaatcaggatgctcttg

SEQ ID NO: 4583845 - DNA, 25 bp, Homo sapien
catttctgcttccctggtcccctcc

SEQ ID NO: 4583846 - DNA, 25 bp, Homo sapien
gctcatttctgcttccctggtcccc

SEQ ID NO: 4583847 - DNA, 25 bp, Homo sapien
ttctgcttccctggtcccctccctg

SEQ ID NO: 4583848 - DNA, 25 bp, Homo sapien
tgcttccctggtcccctccctggtc

SEQ ID NO: 4583849 - DNA, 25 bp, Homo sapien
catgagcccattgcatcggatgtta

SEQ ID NO: 4583850 - DNA, 25 bp, Homo sapien
aattttcttcaaatgcgttcatcat

SEQ ID NO: 4583851 - DNA, 25 bp, Homo sapien
tgcgttcatcatgagcccattgcat

SEQ ID NO: 4583852 - DNA, 25 bp, Homo sapien
ccattgcatcggatgttatccacac

SEQ ID NO: 4583853 - DNA, 25 bp, Homo sapien
cactggcatccacaacggctgccag

SEQ ID NO: 4583854 - DNA, 25 bp, Homo sapien
tcactggcatccacaacggctgcca

SEQ ID NO: 4583855 - DNA, 25 bp, Homo sapien
tctcctgtctggacgaggccactag

SEQ ID NO: 4583856 - DNA, 25 bp, Homo sapien
tgtctggacgaggccactaggatga

SEQ ID NO: 4583857 - DNA, 25 bp, Homo sapien
tcctgtctggacgaggccactagga

SEQ ID NO: 4583858 - DNA, 25 bp, Homo sapien
cctgtctggacgaggccactaggat

SEQ ID NO: 4583859 - DNA, 25 bp, Homo sapien
aaaatccaagtgatctatgtcttgg

SEQ ID NO: 4583860 - DNA, 25 bp, Homo sapien
ggctcctccaataaagtgcagtcaa

SEQ ID NO: 4583861 - DNA, 25 bp, Homo sapien
tcctccaataaagtgcagtcaatga

SEQ ID NO: 4583862 - DNA, 25 bp, Homo sapien
caataaagtgcagtcaatgagggat

SEQ ID NO: 4583863 - DNA, 25 bp, Homo sapien
tccaataaagtgcagtcaatgaggg

SEQ ID NO: 4583864 - DNA, 25 bp, Homo sapien
ggaagcactgtcgctcgccctcttt

SEQ ID NO: 4583865 - DNA, 25 bp, Homo sapien
cctctggtacagataatcagatgct

SEQ ID NO: 4583866 - DNA, 25 bp, Homo sapien
tcaagtgaagcttccctccagagcc

SEQ ID NO: 4583867 - DNA, 25 bp, Homo sapien
tcgctcgccctctttctttagggag

SEQ ID NO: 4583868 - DNA, 25 bp, Homo sapien
gacatgggcacctgaatgagggaac

SEQ ID NO: 4583869 - DNA, 25 bp, Homo sapien
agacatgggcacctgaatgagggaa

SEQ ID NO: 4583870 - DNA, 25 bp, Homo sapien
gacactgaaaacgcttctgactcac

SEQ ID NO: 4583871 - DNA, 25 bp, Homo sapien
agacactgaaaacgcttctgactca

SEQ ID NO: 4583872 - DNA, 25 bp, Homo sapien
ccagacactgaaaacgcttctgact

SEQ ID NO: 4583873 - DNA, 25 bp, Homo sapien
cagacactgaaaacgcttctgactc

SEQ ID NO: 4583874 - DNA, 25 bp, Homo sapien
cccaaaaaggacatgtcgatgttta

SEQ ID NO: 4583875 - DNA, 25 bp, Homo sapien
catactttctccccaaaaaggacat

SEQ ID NO: 4583876 - DNA, 25 bp, Homo sapien
caactgttagctcctcatcccccgc

SEQ ID NO: 4583877 - DNA, 25 bp, Homo sapien
agagacaactgttagctcctcatcc

SEQ ID NO: 4583878 - DNA, 25 bp, Homo sapien
gatctcacagccttcgatgatcatg

SEQ ID NO: 4583879 - DNA, 25 bp, Homo sapien
gatgttctccgtctcacttacttca

SEQ ID NO: 4583880 - DNA, 25 bp, Homo sapien
tcatgcgctcgatggccaggttttt

SEQ ID NO: 4583881 - DNA, 25 bp, Homo sapien
cggatgttctccgtctcacttactt

SEQ ID NO: 4583882 - DNA, 25 bp, Homo sapien
gcgtagtccaggctgttgcgctcaa

SEQ ID NO: 4583883 - DNA, 25 bp, Homo sapien
cagtttggacttggcgtagtccagg

SEQ ID NO: 4583884 - DNA, 25 bp, Homo sapien
tgggccaggagctcatggagggtca

SEQ ID NO: 4583885 - DNA, 25 bp, Homo sapien
gctcaacgtgctcatgaggcgtgtg

SEQ ID NO: 4583886 - DNA, 25 bp, Homo sapien
ggcctcgtagtgcttcagcagcttg

SEQ ID NO: 4583887 - DNA, 25 bp, Homo sapien
ctgtactggtggttgcggacgaact

SEQ ID NO: 4583888 - DNA, 25 bp, Homo sapien
cggacgaactcttggtagatgttga

SEQ ID NO: 4583889 - DNA, 25 bp, Homo sapien
gaagtcacggttctgcttgcagtgg

SEQ ID NO: 4583890 - DNA, 25 bp, Homo sapien
ggccttggtaaaagatctgatgtaa

SEQ ID NO: 4583891 - DNA, 25 bp, Homo sapien
aggccttggtaaaagatctgatgta

SEQ ID NO: 4583892 - DNA, 25 bp, Homo sapien
caggccttggtaaaagatctgatgt

SEQ ID NO: 4583893 - DNA, 25 bp, Homo sapien
tgaccggatgtagtcctggatgatg

SEQ ID NO: 4583894 - DNA, 25 bp, Homo sapien
gttcctcttgcgcatgctgtcagca

SEQ ID NO: 4583895 - DNA, 25 bp, Homo sapien
cagcgggcgcaggaaattgttgaca

SEQ ID NO: 4583896 - DNA, 25 bp, Homo sapien
gctgacgtcgtcgtgtgtgatggga

SEQ ID NO: 4583897 - DNA, 25 bp, Homo sapien
gatccttggtagcttctgagatgtc

SEQ ID NO: 4583898 - DNA, 25 bp, Homo sapien
tgggcagatccttggtagcttctga

SEQ ID NO: 4583899 - DNA, 25 bp, Homo sapien
gcttctgagatgtctgtccctcctg

SEQ ID NO: 4583900 - DNA, 25 bp, Homo sapien
gccactgggcagatccttggtagct

SEQ ID NO: 4583901 - DNA, 25 bp, Homo sapien
gtcttcatcgttgggggcgacagtc

SEQ ID NO: 4583902 - DNA, 25 bp, Homo sapien
gggcgacagtctgggtggactggat

SEQ ID NO: 4583903 - DNA, 25 bp, Homo sapien
taattttcttgatgtcgctgtcttc

SEQ ID NO: 4583904 - DNA, 25 bp, Homo sapien
gactggatgcgctcattgtccttga

SEQ ID NO: 4583905 - DNA, 25 bp, Homo sapien
gtctttggccggtgggtggcaggaa

SEQ ID NO: 4583906 - DNA, 25 bp, Homo sapien
tgccttcagccgctcgatctcgatc

SEQ ID NO: 4583907 - DNA, 25 bp, Homo sapien
tgtctccacgatctgcagcaggtgc

SEQ ID NO: 4583908 - DNA, 25 bp, Homo sapien
gcttggccacggtcttctctgtctc

SEQ ID NO: 4583909 - DNA, 25 bp, Homo sapien
gatctccccatcctcgatctgctgc

SEQ ID NO: 4583910 - DNA, 25 bp, Homo sapien
ccttgtcctctggcgaaccaagcag

SEQ ID NO: 4583911 - DNA, 25 bp, Homo sapien
caggtaagatgctgactccttgtcc

SEQ ID NO: 4583912 - DNA, 25 bp, Homo sapien
gacagatggacatggcaggtaagat

SEQ ID NO: 4583913 - DNA, 25 bp, Homo sapien
gtcctctggcgaaccaagcagggca

SEQ ID NO: 4583914 - DNA, 25 bp, Homo sapien
gccacccattcgtcacaatcttttg

SEQ ID NO: 4583915 - DNA, 25 bp, Homo sapien
tcacaatcttttgcgtcctctgtcc

SEQ ID NO: 4583916 - DNA, 25 bp, Homo sapien
atgtgcaatggctgccacccattcg

SEQ ID NO: 4583917 - DNA, 25 bp, Homo sapien
tgtgcaatggctgccacccattcgt

SEQ ID NO: 4583918 - DNA, 25 bp, Homo sapien
ctgtatcaagaagaagacatctcca

SEQ ID NO: 4583919 - DNA, 25 bp, Homo sapien
aagaagacatctccaattaccagag

SEQ ID NO: 4583920 - DNA, 25 bp, Homo sapien
catctccaattaccagagtgtccat

SEQ ID NO: 4583921 - DNA, 25 bp, Homo sapien
tatcaagaagaagacatctccaatt

SEQ ID NO: 4583922 - DNA, 25 bp, Homo sapien
gaccaacaacgactcttgcaatcaa

SEQ ID NO: 4583923 - DNA, 25 bp, Homo sapien
acaacgactcttgcaatcaatctag

SEQ ID NO: 4583924 - DNA, 25 bp, Homo sapien
caacaacgactcttgcaatcaatct

SEQ ID NO: 4583925 - DNA, 25 bp, Homo sapien
gggaccaacaacgactcttgcaatc

SEQ ID NO: 4583926 - DNA, 25 bp, Homo sapien
aagtttccctgccatgagctgacac

SEQ ID NO: 4583927 - DNA, 25 bp, Homo sapien
ggaagtttccctgccatgagctgac

SEQ ID NO: 4583928 - DNA, 25 bp, Homo sapien
ttatgcaccattcacccaaatggaa

SEQ ID NO: 4583929 - DNA, 25 bp, Homo sapien
caccattcacccaaatggaagtttc

SEQ ID NO: 4583930 - DNA, 25 bp, Homo sapien
gatgtccccatgaggtccatggatg

SEQ ID NO: 4583931 - DNA, 25 bp, Homo sapien
caggtgctaacattctgctcaggtc

SEQ ID NO: 4583932 - DNA, 25 bp, Homo sapien
tgctcaggtcgcatttggttccaca

SEQ ID NO: 4583933 - DNA, 25 bp, Homo sapien
gggtgccttgcttctgcctgggaaa

SEQ ID NO: 4583934 - DNA, 25 bp, Homo sapien
aggcttgcctggatcccggttggat

SEQ ID NO: 4583935 - DNA, 25 bp, Homo sapien
caacaatgggaccacataggcttgc

SEQ ID NO: 4583936 - DNA, 25 bp, Homo sapien
ggaccacataggcttgcctggatcc

SEQ ID NO: 4583937 - DNA, 25 bp, Homo sapien
tgccacaacaatgggaccacatagg

SEQ ID NO: 4583938 - DNA, 25 bp, Homo sapien
tctgctgctctggttagggccagct

SEQ ID NO: 4583939 - DNA, 25 bp, Homo sapien
tcctccccgccatcattgacctttg

SEQ ID NO: 4583940 - DNA, 25 bp, Homo sapien
ggctgagggcccacaggtgctgtgc

SEQ ID NO: 4583941 - DNA, 25 bp, Homo sapien
ctgctctggttagggccagctctcc

SEQ ID NO: 4583942 - DNA, 25 bp, Homo sapien
taaggatttgtctatagtgacccag

SEQ ID NO: 4583943 - DNA, 25 bp, Homo sapien
catggtgaaggtcaagctttttaaa

SEQ ID NO: 4583944 - DNA, 25 bp, Homo sapien
cagggctcctcagaatgaggcagaa

SEQ ID NO: 4583945 - DNA, 25 bp, Homo sapien
tactatgaaggaggagtgatggcac

SEQ ID NO: 4583946 - DNA, 25 bp, Homo sapien
gaaacagcgatgaatttttgtacac

SEQ ID NO: 4583947 - DNA, 25 bp, Homo sapien
ttttgtacacatgtgtagccggaag

SEQ ID NO: 4583948 - DNA, 25 bp, Homo sapien
aagattgagaaaagaaacagcgatg

SEQ ID NO: 4583949 - DNA, 25 bp, Homo sapien
ttgagaaaagaaacagcgatgaatt

SEQ ID NO: 4583950 - DNA, 25 bp, Homo sapien
cagctctgtgatctagtgtagtggg

SEQ ID NO: 4583951 - DNA, 25 bp, Homo sapien
tgcaggccccgggtaggtatgggta

SEQ ID NO: 4583952 - DNA, 25 bp, Homo sapien
taggtatgggtatatgggtagacac

SEQ ID NO: 4583953 - DNA, 25 bp, Homo sapien
gctcagctctgtgatctagtgtagt

SEQ ID NO: 4583954 - DNA, 25 bp, Homo sapien
ggcttttgagatctcggttgtcttt

SEQ ID NO: 4583955 - DNA, 25 bp, Homo sapien
ttcaaccaattcaatcaccaccagt

SEQ ID NO: 4583956 - DNA, 25 bp, Homo sapien
tcttttcagaacattgggacggcct

SEQ ID NO: 4583957 - DNA, 25 bp, Homo sapien
gatctctgtcctgacaattgggagg

SEQ ID NO: 4583958 - DNA, 25 bp, Homo sapien
agcgcagaccgctctccgccctcag

SEQ ID NO: 4583959 - DNA, 25 bp, Homo sapien
tagcgcagaccgctctccgccctca

SEQ ID NO: 4583960 - DNA, 25 bp, Homo sapien
ctagcgcagaccgctctccgccctc

SEQ ID NO: 4583961 - DNA, 25 bp, Homo sapien
gcagcgcgaaccacttggtttgcca

SEQ ID NO: 4583962 - DNA, 25 bp, Homo sapien
cttgctcaggtagcctttgcgcgtg

SEQ ID NO: 4583963 - DNA, 25 bp, Homo sapien
gttgtccgaactccgcttgctcagg

SEQ ID NO: 4583964 - DNA, 25 bp, Homo sapien
gcgacgtggccatcattcagccgga

SEQ ID NO: 4583965 - DNA, 25 bp, Homo sapien
agagccccagtacccggaagatgcc

SEQ ID NO: 4583966 - DNA, 25 bp, Homo sapien
tgaatccagatataccattccccgc

SEQ ID NO: 4583967 - DNA, 25 bp, Homo sapien
aatatctacactccaggatctggcg

SEQ ID NO: 4583968 - DNA, 25 bp, Homo sapien
cgagccgcggcttcttgaatccaga

SEQ ID NO: 4583969 - DNA, 25 bp, Homo sapien
ttcagcagcgcggacagggacacac

SEQ ID NO: 4583970 - DNA, 25 bp, Homo sapien
aagagcccgtttcagcagcgcggac

SEQ ID NO: 4583971 - DNA, 25 bp, Homo sapien
caggcggagtcatgtgacgccgatc

SEQ ID NO: 4583972 - DNA, 25 bp, Homo sapien
tgagggactggcgatctgcgcgctg

SEQ ID NO: 4583973 - DNA, 25 bp, Homo sapien
atttatccgagaacgtcacagcgcc

SEQ ID NO: 4583974 - DNA, 25 bp, Homo sapien
gagaacgtcacagcgcccgcatgct

SEQ ID NO: 4583975 - DNA, 25 bp, Homo sapien
ccgcatgctgcaccgggagggcgcg

SEQ ID NO: 4583976 - DNA, 25 bp, Homo sapien
cggcatttatccgagaacgtcacag

SEQ ID NO: 4583977 - DNA, 25 bp, Homo sapien
ttagcccctttctgtgatgttttgc

SEQ ID NO: 4583978 - DNA, 25 bp, Homo sapien
gtctcattgcagaattttcctctga

SEQ ID NO: 4583979 - DNA, 25 bp, Homo sapien
tgcttcgaaaactgttttggcttct

SEQ ID NO: 4583980 - DNA, 25 bp, Homo sapien
ttttcctctgaaaagctccggatac

SEQ ID NO: 4583981 - DNA, 25 bp, Homo sapien
taagatgtcagaggaatccagggtg

SEQ ID NO: 4583982 - DNA, 25 bp, Homo sapien
ctaagatgtcagaggaatccagggt

SEQ ID NO: 4583983 - DNA, 25 bp, Homo sapien
ggtggtgtgtgccaaagacattgcc

SEQ ID NO: 4583984 - DNA, 25 bp, Homo sapien
tgtgtgccaaagacattgccttatt

SEQ ID NO: 4583985 - DNA, 25 bp, Homo sapien
gggctcgaaagggtgctgagattct

SEQ ID NO: 4583986 - DNA, 25 bp, Homo sapien
agggataaagctgccgaatgtaggc

SEQ ID NO: 4583987 - DNA, 25 bp, Homo sapien
cctgatttgcagaggggctcgaaag

SEQ ID NO: 4583988 - DNA, 25 bp, Homo sapien
gttcactctgtggatcatcacctct

SEQ ID NO: 4583989 - DNA, 25 bp, Homo sapien
gtcatgtccaaacatggcagcttca

SEQ ID NO: 4583990 - DNA, 25 bp, Homo sapien
ctgtggcaggtcatgtccaaacatg

SEQ ID NO: 4583991 - DNA, 25 bp, Homo sapien
ctcccgtgccagatgttcatggctg

SEQ ID NO: 4583992 - DNA, 25 bp, Homo sapien
ggatgtccacagagctcccgtgcca

SEQ ID NO: 4583993 - DNA, 25 bp, Homo sapien
tcgtggggaaaaatgctgttggtcc

SEQ ID NO: 4583994 - DNA, 25 bp, Homo sapien
ctcgtggggaaaaatgctgttggtc

SEQ ID NO: 4583995 - DNA, 25 bp, Homo sapien
aactggtgagagctggaagacctgc

SEQ ID NO: 4583996 - DNA, 25 bp, Homo sapien
gggctcaattggacccaggtgctgc

SEQ ID NO: 4583997 - DNA, 25 bp, Homo sapien
caatcttgtcttggctgctaaaaat

SEQ ID NO: 4583998 - DNA, 25 bp, Homo sapien
gaagacctgcctcaacagggggctc

SEQ ID NO: 4583999 - DNA, 25 bp, Homo sapien
caccaccttgaagggaacactgtat

SEQ ID NO: 4584000 - DNA, 25 bp, Homo sapien
ggcttcggggccagctgcattctat

SEQ ID NO: 4584001 - DNA, 25 bp, Homo sapien
atctttgaagatattgtcgctgacc

SEQ ID NO: 4584002 - DNA, 25 bp, Homo sapien
agatattgtcgctgaccatcacctt

SEQ ID NO: 4584003 - DNA, 25 bp, Homo sapien
gttccacataggctttgaccagctt

SEQ ID NO: 4584004 - DNA, 25 bp, Homo sapien
ataggctttgaccagcttcatgtgg

SEQ ID NO: 4584005 - DNA, 25 bp, Homo sapien
actgtccttggggtggccagttcca

SEQ ID NO: 4584006 - DNA, 25 bp, Homo sapien
gggtggccagttccacataggcttt

SEQ ID NO: 4584007 - DNA, 25 bp, Homo sapien
ttaacactcctcagatatttcagat

SEQ ID NO: 4584008 - DNA, 25 bp, Homo sapien
cttaacactcctcagatatttcaga

SEQ ID NO: 4584009 - DNA, 25 bp, Homo sapien
tacatgggcatgtagaacattaatc

SEQ ID NO: 4584010 - DNA, 25 bp, Homo sapien
aaagacatgtgttacttggtggcag

SEQ ID NO: 4584011 - DNA, 25 bp, Homo sapien
aacattaatcaagggagatttcctc

SEQ ID NO: 4584012 - DNA, 25 bp, Homo sapien
tagggcagtgtatcctctagaaggg

SEQ ID NO: 4584013 - DNA, 25 bp, Homo sapien
tactgtggatccacagcatctctgg

SEQ ID NO: 4584014 - DNA, 25 bp, Homo sapien
cagcatctctggcattccgaagcat

SEQ ID NO: 4584015 - DNA, 25 bp, Homo sapien
catcttcatataggtgtttcctgtg

SEQ ID NO: 4584016 - DNA, 25 bp, Homo sapien
tgtgtagacacaaagcgacaactgt

SEQ ID NO: 4584017 - DNA, 25 bp, Homo sapien
tcactgcccggctggcatgtgccac

SEQ ID NO: 4584018 - DNA, 25 bp, Homo sapien
tgtcactgcccggctggcatgtgcc

SEQ ID NO: 4584019 - DNA, 25 bp, Homo sapien
gcctgtcactgcccggctggcatgt

SEQ ID NO: 4584020 - DNA, 25 bp, Homo sapien
ctgcctgtcactgcccggctggcat

SEQ ID NO: 4584021 - DNA, 25 bp, Homo sapien
tccttctctctccctcccttccttc

SEQ ID NO: 4584022 - DNA, 25 bp, Homo sapien
tctctctccctcccttccttctttc

SEQ ID NO: 4584023 - DNA, 25 bp, Homo sapien
tccttctttcctctcttcccctctc

SEQ ID NO: 4584024 - DNA, 25 bp, Homo sapien
ccttctttcctctcttcccctctct

SEQ ID NO: 4584025 - DNA, 25 bp, Homo sapien
ctagggagttgccacaattcactga

SEQ ID NO: 4584026 - DNA, 25 bp, Homo sapien
caccaccactgccattgttctgcat

SEQ ID NO: 4584027 - DNA, 25 bp, Homo sapien
tgctaatatttttcttgcgtctgtc

SEQ ID NO: 4584028 - DNA, 25 bp, Homo sapien
ggttggaccattgcagaaatgtcct

SEQ ID NO: 4584029 - DNA, 25 bp, Homo sapien
cactgctgtgtgtaagcgtccagga

SEQ ID NO: 4584030 - DNA, 25 bp, Homo sapien
tttcccacactgataggcatgttca

SEQ ID NO: 4584031 - DNA, 25 bp, Homo sapien
gggctgattagacctcaaggccagc

SEQ ID NO: 4584032 - DNA, 25 bp, Homo sapien
caatttcctgggtctatataaggcc

SEQ ID NO: 4584033 - DNA, 25 bp, Homo sapien
cccccacaaagctgcatttgagcat

SEQ ID NO: 4584034 - DNA, 25 bp, Homo sapien
gctgcatttgagcatgtggatgcta

SEQ ID NO: 4584035 - DNA, 25 bp, Homo sapien
catttgagcatgtggatgctaagcc

SEQ ID NO: 4584036 - DNA, 25 bp, Homo sapien
acaaagctgcatttgagcatgtgga

SEQ ID NO: 4584037 - DNA, 25 bp, Homo sapien
gccattgcggttgagaacaaaactg

SEQ ID NO: 4584038 - DNA, 25 bp, Homo sapien
ttggagccattgcggttgagaacaa

SEQ ID NO: 4584039 - DNA, 25 bp, Homo sapien
ggagccattgcggttgagaacaaaa

SEQ ID NO: 4584040 - DNA, 25 bp, Homo sapien
gagccattgcggttgagaacaaaac

SEQ ID NO: 4584041 - DNA, 25 bp, Homo sapien
gactccctggtagaggatagtgtcc

SEQ ID NO: 4584042 - DNA, 25 bp, Homo sapien
tggtgcccatggcatccgcactgtg

SEQ ID NO: 4584043 - DNA, 25 bp, Homo sapien
gtgaatctctttagctgtacccagc

SEQ ID NO: 4584044 - DNA, 25 bp, Homo sapien
taaatgatgacaatccttggtgccc

SEQ ID NO: 4584045 - DNA, 25 bp, Homo sapien
cagagatggtcttgttgtcccaccc

SEQ ID NO: 4584046 - DNA, 25 bp, Homo sapien
gctagtccccatgatgcggcctctt

SEQ ID NO: 4584047 - DNA, 25 bp, Homo sapien
gccccatttgctttcggaaccactg

SEQ ID NO: 4584048 - DNA, 25 bp, Homo sapien
cagaactgggaggacgctagtcccc

SEQ ID NO: 4584049 - DNA, 25 bp, Homo sapien
ggcatcgtcgtgctctaggcctgtg

SEQ ID NO: 4584050 - DNA, 25 bp, Homo sapien
cctggcatcgtcgtgctctaggcct

SEQ ID NO: 4584051 - DNA, 25 bp, Homo sapien
ttcgaagaccaagaccagagaacat

SEQ ID NO: 4584052 - DNA, 25 bp, Homo sapien
gcacaactccccgtagcttcgaaga

SEQ ID NO: 4584053 - DNA, 25 bp, Homo sapien
agtgccccaagcagccatgactttg

SEQ ID NO: 4584054 - DNA, 25 bp, Homo sapien
ccccaagcagccatgactttgagct

SEQ ID NO: 4584055 - DNA, 25 bp, Homo sapien
aagcagccatgactttgagctctag

SEQ ID NO: 4584056 - DNA, 25 bp, Homo sapien
ccaagcagccatgactttgagctct

SEQ ID NO: 4584057 - DNA, 25 bp, Homo sapien
aaggacggtgtcctggtcactttgg

SEQ ID NO: 4584058 - DNA, 25 bp, Homo sapien
tcagcccttctttagacgtcggctc

SEQ ID NO: 4584059 - DNA, 25 bp, Homo sapien
ttagacgtcggctcctcccaggatg

SEQ ID NO: 4584060 - DNA, 25 bp, Homo sapien
tcccaggatgtgcacaaggacggtg

SEQ ID NO: 4584061 - DNA, 25 bp, Homo sapien
aagcttgaatccgttaatgaccagg

SEQ ID NO: 4584062 - DNA, 25 bp, Homo sapien
taatgaccaggtgctgatagtagaa

SEQ ID NO: 4584063 - DNA, 25 bp, Homo sapien
gaatccgttaatgaccaggtgctga

SEQ ID NO: 4584064 - DNA, 25 bp, Homo sapien
tgctgatagtagaattagaagaggc

SEQ ID NO: 4584065 - DNA, 25 bp, Homo sapien
agagtttgtggtgagaacaatgatg

SEQ ID NO: 4584066 - DNA, 25 bp, Homo sapien
caaaccttcccgtgtcttagcagct

SEQ ID NO: 4584067 - DNA, 25 bp, Homo sapien
ttcccgtgtcttagcagctcaaaat

SEQ ID NO: 4584068 - DNA, 25 bp, Homo sapien
ttccaaaccttcccgtgtcttagca

SEQ ID NO: 4584069 - DNA, 25 bp, Homo sapien
aaccttcccgtgtcttagcagctca

SEQ ID NO: 4584070 - DNA, 25 bp, Homo sapien
caacagtctgagctaggtactacta

SEQ ID NO: 4584071 - DNA, 25 bp, Homo sapien
tggactggtccaaaaacatacatgt

SEQ ID NO: 4584072 - DNA, 25 bp, Homo sapien
taatagttgagaatactgggttcca

SEQ ID NO: 4584073 - DNA, 25 bp, Homo sapien
taactctgtctttatgcggcataag

SEQ ID NO: 4584074 - DNA, 25 bp, Homo sapien
cactgtctcatagtaagggtcctca

SEQ ID NO: 4584075 - DNA, 25 bp, Homo sapien
tcatcacacagggtcaaggagaggg

SEQ ID NO: 4584076 - DNA, 25 bp, Homo sapien
gaaggcttacctctggctggaaacg

SEQ ID NO: 4584077 - DNA, 25 bp, Homo sapien
tctggagcgcataaagctgcactgg

SEQ ID NO: 4584078 - DNA, 25 bp, Homo sapien
ctcagcttgaggctaacacatgcag

SEQ ID NO: 4584079 - DNA, 25 bp, Homo sapien
gagctgtattgggtgctcagcttga

SEQ ID NO: 4584080 - DNA, 25 bp, Homo sapien
ggctctttcaaaccggtccagcagc

SEQ ID NO: 4584081 - DNA, 25 bp, Homo sapien
agtggctctttcaaaccggtccagc

SEQ ID NO: 4584082 - DNA, 25 bp, Homo sapien
agggaacttgggtcaagtccagctc

SEQ ID NO: 4584083 - DNA, 25 bp, Homo sapien
gaacttgggtcaagtccagctcagg

SEQ ID NO: 4584084 - DNA, 25 bp, Homo sapien
ccatggagatgtgaccagggaactt

SEQ ID NO: 4584085 - DNA, 25 bp, Homo sapien
aagccatggagatgtgaccagggaa

SEQ ID NO: 4584086 - DNA, 25 bp, Homo sapien
ctggctcactcctttctcttcctcc

SEQ ID NO: 4584087 - DNA, 25 bp, Homo sapien
ggcttgacacagtggaggcttccca

SEQ ID NO: 4584088 - DNA, 25 bp, Homo sapien
gcttgacacagtggaggcttcccat

SEQ ID NO: 4584089 - DNA, 25 bp, Homo sapien
ttgggcttgacacagtggaggcttc

SEQ ID NO: 4584090 - DNA, 25 bp, Homo sapien
tgggcttgacacagtggaggcttcc

SEQ ID NO: 4584091 - DNA, 25 bp, Homo sapien
cataataagcccacaataaacgttt

SEQ ID NO: 4584092 - DNA, 25 bp, Homo sapien
caagttcagactcttccaagcaaaa

SEQ ID NO: 4584093 - DNA, 25 bp, Homo sapien
tgagaacagagtctcttagaggaag

SEQ ID NO: 4584094 - DNA, 25 bp, Homo sapien
ccctcacccatgaaagaatattctg

SEQ ID NO: 4584095 - DNA, 25 bp, Homo sapien
gagcagtggttttatgtgatatttt

SEQ ID NO: 4584096 - DNA, 25 bp, Homo sapien
agagcagtggttttatgtgatattt

SEQ ID NO: 4584097 - DNA, 25 bp, Homo sapien
tatttaaaatggtttgttcagagca

SEQ ID NO: 4584098 - DNA, 25 bp, Homo sapien
ttaaaatggtttgttcagagcagtg

SEQ ID NO: 4584099 - DNA, 25 bp, Homo sapien
ctcttgctgacagctctaaggagct

SEQ ID NO: 4584100 - DNA, 25 bp, Homo sapien
cctatggataatgactgactggtaa

SEQ ID NO: 4584101 - DNA, 25 bp, Homo sapien
ctaaggagctcagtgctcacctctg

SEQ ID NO: 4584102 - DNA, 25 bp, Homo sapien
ttctcttccctatggataatgactg

SEQ ID NO: 4584103 - DNA, 25 bp, Homo sapien
aacgaagattgtccgcgaacgactc

SEQ ID NO: 4584104 - DNA, 25 bp, Homo sapien
aggaaacgaagattgtccgcgaacg

SEQ ID NO: 4584105 - DNA, 25 bp, Homo sapien
gtccgcgaacgactccacaggaggc

SEQ ID NO: 4584106 - DNA, 25 bp, Homo sapien
aagattgtccgcgaacgactccaca

SEQ ID NO: 4584107 - DNA, 25 bp, Homo sapien
cttcctccttcctcgcagctcgcac

SEQ ID NO: 4584108 - DNA, 25 bp, Homo sapien
ccttcctccttcctcgcagctcgca

SEQ ID NO: 4584109 - DNA, 25 bp, Homo sapien
tcctccttcctcgcagctcgcacac

SEQ ID NO: 4584110 - DNA, 25 bp, Homo sapien
ttcctccttcctcgcagctcgcaca

SEQ ID NO: 4584111 - DNA, 25 bp, Homo sapien
cggccgaagaccaagccggaggtct

SEQ ID NO: 4584112 - DNA, 25 bp, Homo sapien
tcgcccgtcgcggctggagagctgc

SEQ ID NO: 4584113 - DNA, 25 bp, Homo sapien
agcagcgcgtcgtcagccagcacag

SEQ ID NO: 4584114 - DNA, 25 bp, Homo sapien
ctggagagctgctctcggcgccagc

SEQ ID NO: 4584115 - DNA, 25 bp, Homo sapien
gttcagggcagctacgtaacaccgc

SEQ ID NO: 4584116 - DNA, 25 bp, Homo sapien
aataatggacgctggcacactctgc

SEQ ID NO: 4584117 - DNA, 25 bp, Homo sapien
tccgcgccagaaagggctctcgaat

SEQ ID NO: 4584118 - DNA, 25 bp, Homo sapien
ctctcgaatcgcaaaagcaaacgtg

SEQ ID NO: 4584119 - DNA, 25 bp, Homo sapien
ttttggttcaacaactttccactca

SEQ ID NO: 4584120 - DNA, 25 bp, Homo sapien
tttggttcaacaactttccactcat

SEQ ID NO: 4584121 - DNA, 25 bp, Homo sapien
tcacgtaccgggctgaagtcaaggg

SEQ ID NO: 4584122 - DNA, 25 bp, Homo sapien
gaaacgaagaagcagtacgacagct

SEQ ID NO: 4584123 - DNA, 25 bp, Homo sapien
agtcaagggcgtttatcagttttgc

SEQ ID NO: 4584124 - DNA, 25 bp, Homo sapien
tttcaagtgggcgatgagcctccca

SEQ ID NO: 4584125 - DNA, 25 bp, Homo sapien
acatggtggtttagaggctgcctct

SEQ ID NO: 4584126 - DNA, 25 bp, Homo sapien
gcctgagaactcactgataggatag

SEQ ID NO: 4584127 - DNA, 25 bp, Homo sapien
caacgttttcccacaggcataatgt

SEQ ID NO: 4584128 - DNA, 25 bp, Homo sapien
gctttgtgaattcctctagcctgag

SEQ ID NO: 4584129 - DNA, 25 bp, Homo sapien
aaagacatttacaactaggccaggg

SEQ ID NO: 4584130 - DNA, 25 bp, Homo sapien
tcagagaccagtaatcagaaggcat

SEQ ID NO: 4584131 - DNA, 25 bp, Homo sapien
cgggcccgagcagaagaccttaata

SEQ ID NO: 4584132 - DNA, 25 bp, Homo sapien
gaaaacggtgattgactcccagacg

SEQ ID NO: 4584133 - DNA, 25 bp, Homo sapien
ttctctctggttctataaggactca

SEQ ID NO: 4584134 - DNA, 25 bp, Homo sapien
taggtgctatagacagaatattctg

SEQ ID NO: 4584135 - DNA, 25 bp, Homo sapien
gaaattcttccccacaaggtgatgg

SEQ ID NO: 4584136 - DNA, 25 bp, Homo sapien
taatagcaagaccacctgttccatg

SEQ ID NO: 4584137 - DNA, 25 bp, Homo sapien
gtctgcttagtgttgcgataaagga

SEQ ID NO: 4584138 - DNA, 25 bp, Homo sapien
ctgcttagtgttgcgataaaggaat

SEQ ID NO: 4584139 - DNA, 25 bp, Homo sapien
gcttagtgttgcgataaaggaatac

SEQ ID NO: 4584140 - DNA, 25 bp, Homo sapien
cttagtgttgcgataaaggaatacc

SEQ ID NO: 4584141 - DNA, 25 bp, Homo sapien
tacagctgcttcaaaactctcagat

SEQ ID NO: 4584142 - DNA, 25 bp, Homo sapien
gggagacaatcctgtacagctgctt

SEQ ID NO: 4584143 - DNA, 25 bp, Homo sapien
tgtggtgatgcctcgctcacacagg

SEQ ID NO: 4584144 - DNA, 25 bp, Homo sapien
tctggccaatgcgaaactcttcagc

SEQ ID NO: 4584145 - DNA, 25 bp, Homo sapien
gacaggttttaggtaggcgagccca

SEQ ID NO: 4584146 - DNA, 25 bp, Homo sapien
gactgctctgcgagttgctgaacag

SEQ ID NO: 4584147 - DNA, 25 bp, Homo sapien
cgagcccatggccaggcgtaggttt

SEQ ID NO: 4584148 - DNA, 25 bp, Homo sapien
taagagggagcttgagcttcatcct

SEQ ID NO: 4584149 - DNA, 25 bp, Homo sapien
gctgcaaggtcaggacttgaggcca

SEQ ID NO: 4584150 - DNA, 25 bp, Homo sapien
gccagcaccttcaagtgtgacatca

SEQ ID NO: 4584151 - DNA, 25 bp, Homo sapien
ccagcaccttcaagtgtgacatcat

SEQ ID NO: 4584152 - DNA, 25 bp, Homo sapien
cagctgcaaggtcaggacttgaggc

SEQ ID NO: 4584153 - DNA, 25 bp, Homo sapien
aactgaaaccatcaaagggccaggg

SEQ ID NO: 4584154 - DNA, 25 bp, Homo sapien
gaatagtcatctgcccatgcttgaa

SEQ ID NO: 4584155 - DNA, 25 bp, Homo sapien
ggttcttattgcctgctgccctgaa

SEQ ID NO: 4584156 - DNA, 25 bp, Homo sapien
taattgctctctagccaagtgagga

SEQ ID NO: 4584157 - DNA, 25 bp, Homo sapien
cattcttgggtaacttaaataagag

SEQ ID NO: 4584158 - DNA, 25 bp, Homo sapien
ctatgaagatcagaaccctgtttga

SEQ ID NO: 4584159 - DNA, 25 bp, Homo sapien
cacgcaagagaaagatttctttaag

SEQ ID NO: 4584160 - DNA, 25 bp, Homo sapien
taggagagttatgcaatgtcagaag

SEQ ID NO: 4584161 - DNA, 25 bp, Homo sapien
ggtatagagtcccatgcaaggcgat

SEQ ID NO: 4584162 - DNA, 25 bp, Homo sapien
tcactggtatagagtcccatgcaag

SEQ ID NO: 4584163 - DNA, 25 bp, Homo sapien
gagtcccatgcaaggcgattgctac

SEQ ID NO: 4584164 - DNA, 25 bp, Homo sapien
gcaaggcgattgctaccaccaggtg

SEQ ID NO: 4584165 - DNA, 25 bp, Homo sapien
ttgcaggaagaagtctctgcccttc

SEQ ID NO: 4584166 - DNA, 25 bp, Homo sapien
ggacatgaagatcaccccatcctct

SEQ ID NO: 4584167 - DNA, 25 bp, Homo sapien
tgcaggaagaagtctctgcccttct

SEQ ID NO: 4584168 - DNA, 25 bp, Homo sapien
agctatggacatgaagatcacccca

SEQ ID NO: 4584169 - DNA, 25 bp, Homo sapien
gctgatacccacatgagcccaatgc

SEQ ID NO: 4584170 - DNA, 25 bp, Homo sapien
tgctacttgctgatacccacatgag

SEQ ID NO: 4584171 - DNA, 25 bp, Homo sapien
tacttgctgatacccacatgagccc

SEQ ID NO: 4584172 - DNA, 25 bp, Homo sapien
cttgctgatacccacatgagcccaa

SEQ ID NO: 4584173 - DNA, 25 bp, Homo sapien
tcctgtgcatgctccacgggacatg

SEQ ID NO: 4584174 - DNA, 25 bp, Homo sapien
cacagctttactgccatggtgcact

SEQ ID NO: 4584175 - DNA, 25 bp, Homo sapien
agatcgccaggtacccacagcttta

SEQ ID NO: 4584176 - DNA, 25 bp, Homo sapien
gttccaactgcttgtttacctcctg

SEQ ID NO: 4584177 - DNA, 25 bp, Homo sapien
cagctacccgatttccaatgtggct

SEQ ID NO: 4584178 - DNA, 25 bp, Homo sapien
agtatagtcattgatcttcagggac

SEQ ID NO: 4584179 - DNA, 25 bp, Homo sapien
ggtaatcagtatagtcattgatctt

SEQ ID NO: 4584180 - DNA, 25 bp, Homo sapien
tcagggaccatccagctacccgatt

SEQ ID NO: 4584181 - DNA, 25 bp, Homo sapien
ctagggtctagagttgattagagcc

SEQ ID NO: 4584182 - DNA, 25 bp, Homo sapien
tagagccttctcgttatcattactg

SEQ ID NO: 4584183 - DNA, 25 bp, Homo sapien
tcattactgttagaatgttcactat

SEQ ID NO: 4584184 - DNA, 25 bp, Homo sapien
tagagttgattagagccttctcgtt

SEQ ID NO: 4584185 - DNA, 25 bp, Homo sapien
ggaaaaacgaagaacagtgacatgg

SEQ ID NO: 4584186 - DNA, 25 bp, Homo sapien
tgacatggggtagtgcgaaagagtt

SEQ ID NO: 4584187 - DNA, 25 bp, Homo sapien
gaaaaacgaagaacagtgacatggg

SEQ ID NO: 4584188 - DNA, 25 bp, Homo sapien
gggtagtgcgaaagagttacttcac

SEQ ID NO: 4584189 - DNA, 25 bp, Homo sapien
tcccatcggacgtatgagtcaccca

SEQ ID NO: 4584190 - DNA, 25 bp, Homo sapien
cccatcggacgtatgagtcacccat

SEQ ID NO: 4584191 - DNA, 25 bp, Homo sapien
cagttcctcccatcggacgtatgag

SEQ ID NO: 4584192 - DNA, 25 bp, Homo sapien
tcctcccatcggacgtatgagtcac

SEQ ID NO: 4584193 - DNA, 25 bp, Homo sapien
ttacttctcttctatgggatactgt

SEQ ID NO: 4584194 - DNA, 25 bp, Homo sapien
tcttttgaagttgcagaccaaaatc

SEQ ID NO: 4584195 - DNA, 25 bp, Homo sapien
tctgatatcaggagggtattattat

SEQ ID NO: 4584196 - DNA, 25 bp, Homo sapien
agaccaaaatcggtagtagttgcgg

SEQ ID NO: 4584197 - DNA, 25 bp, Homo sapien
gcggtaaaacctttgcactgtggac

SEQ ID NO: 4584198 - DNA, 25 bp, Homo sapien
catggtagtgtagagatcttcaaac

SEQ ID NO: 4584199 - DNA, 25 bp, Homo sapien
aataatggcaatccagtctgatggg

SEQ ID NO: 4584200 - DNA, 25 bp, Homo sapien
ttaataatggcaatccagtctgatg

SEQ ID NO: 4584201 - DNA, 25 bp, Homo sapien
cttcagcttcatggtagtgtagaga

SEQ ID NO: 4584202 - DNA, 25 bp, Homo sapien
gacccctgaatctgagtgccacaaa

SEQ ID NO: 4584203 - DNA, 25 bp, Homo sapien
gactaaatctaacaatcgacccctg

SEQ ID NO: 4584204 - DNA, 25 bp, Homo sapien
aattcacagcagtcagcgaggcagg

SEQ ID NO: 4584205 - DNA, 25 bp, Homo sapien
caaataatctgagctattgaagggc

SEQ ID NO: 4584206 - DNA, 25 bp, Homo sapien
cattgggtactctcagtgttgaatc

SEQ ID NO: 4584207 - DNA, 25 bp, Homo sapien
ccttggaaaccacattgggtactct

SEQ ID NO: 4584208 - DNA, 25 bp, Homo sapien
ctgtgatgggtccttgaaagatgac

SEQ ID NO: 4584209 - DNA, 25 bp, Homo sapien
tcagtgttgaatctgtgatgggtcc

SEQ ID NO: 4584210 - DNA, 25 bp, Homo sapien
caaaccactgcagagtccgaagccc

SEQ ID NO: 4584211 - DNA, 25 bp, Homo sapien
tcagtgagtgaagtgaccacttggc

SEQ ID NO: 4584212 - DNA, 25 bp, Homo sapien
aggagagccgaggacactcttcgcc

SEQ ID NO: 4584213 - DNA, 25 bp, Homo sapien
aagtgaccacttggccctggccttg

SEQ ID NO: 4584214 - DNA, 25 bp, Homo sapien
gcgcagcttccgctcgctttcccct

SEQ ID NO: 4584215 - DNA, 25 bp, Homo sapien
ccggcggcgctctgactcccacttt

SEQ ID NO: 4584216 - DNA, 25 bp, Homo sapien
cccgccagcttgagcgccccgggcg

SEQ ID NO: 4584217 - DNA, 25 bp, Homo sapien
cagggtgcgctcagttgctgcccgt

SEQ ID NO: 4584218 - DNA, 25 bp, Homo sapien
tcctgccagcttccctgccgcgctg

SEQ ID NO: 4584219 - DNA, 25 bp, Homo sapien
cctgccagcttccctgccgcgctgg

SEQ ID NO: 4584220 - DNA, 25 bp, Homo sapien
tgaggggatgtgactgaattgggca

SEQ ID NO: 4584221 - DNA, 25 bp, Homo sapien
taccccttgctgaagggaatgagtg

SEQ ID NO: 4584222 - DNA, 25 bp, Homo sapien
tggaggtgttgaggggatgtgactg

SEQ ID NO: 4584223 - DNA, 25 bp, Homo sapien
gagtgatgtcatctgcactgtggag

SEQ ID NO: 4584224 - DNA, 25 bp, Homo sapien
ggtttatggcgatcacaagtcaaag

SEQ ID NO: 4584225 - DNA, 25 bp, Homo sapien
aggtttatggcgatcacaagtcaaa

SEQ ID NO: 4584226 - DNA, 25 bp, Homo sapien
tcagaaaactggaggtttatggcga

SEQ ID NO: 4584227 - DNA, 25 bp, Homo sapien
caggcggcattctgagaccagcatt

SEQ ID NO: 4584228 - DNA, 25 bp, Homo sapien
catccctgtaggcatttgcctttca

SEQ ID NO: 4584229 - DNA, 25 bp, Homo sapien
agccacacagcaggcggcattctga

SEQ ID NO: 4584230 - DNA, 25 bp, Homo sapien
ggaggagctctccttgcacatccct

SEQ ID NO: 4584231 - DNA, 25 bp, Homo sapien
aagatgcaacaaaacgatcaggaca

SEQ ID NO: 4584232 - DNA, 25 bp, Homo sapien
cccacaacgatcaaagtgttctcca

SEQ ID NO: 4584233 - DNA, 25 bp, Homo sapien
acaaaggcccacaacgatcaaagtg

SEQ ID NO: 4584234 - DNA, 25 bp, Homo sapien
gaagatgcttatgaaacaaatacat

SEQ ID NO: 4584235 - DNA, 25 bp, Homo sapien
tgccaagttaaacaagtcaaacaat

SEQ ID NO: 4584236 - DNA, 25 bp, Homo sapien
cagtgccaagttaaacaagtcaaac

SEQ ID NO: 4584237 - DNA, 25 bp, Homo sapien
tttagaacaggcagctaatagcaac

SEQ ID NO: 4584238 - DNA, 25 bp, Homo sapien
acaggagggcgtttcattttcatgg

SEQ ID NO: 4584239 - DNA, 25 bp, Homo sapien
caaaaactgttcaggggcaaaaatg

SEQ ID NO: 4584240 - DNA, 25 bp, Homo sapien
atggatgtggatgaaatacaatttc

SEQ ID NO: 4584241 - DNA, 25 bp, Homo sapien
tccacaacaggagggcgtttcattt

SEQ ID NO: 4584242 - DNA, 25 bp, Homo sapien
tcctcctcattctcgttgaagtcat

SEQ ID NO: 4584243 - DNA, 25 bp, Homo sapien
tgaagtcattatcctcctcgtcgtc

SEQ ID NO: 4584244 - DNA, 25 bp, Homo sapien
cattctcgttgaagtcattatcctc

SEQ ID NO: 4584245 - DNA, 25 bp, Homo sapien
tcgtcgtcctccccgacgtaagaca

SEQ ID NO: 4584246 - DNA, 25 bp, Homo sapien
tttgtggccagcgtctcatctgcac

SEQ ID NO: 4584247 - DNA, 25 bp, Homo sapien
gtggccagcgtctcatctgcaccat

SEQ ID NO: 4584248 - DNA, 25 bp, Homo sapien
ggccagcgtctcatctgcaccattg

SEQ ID NO: 4584249 - DNA, 25 bp, Homo sapien
ccagcgtctcatctgcaccattggt

SEQ ID NO: 4584250 - DNA, 25 bp, Homo sapien
cgatgaccgtcttcttgctggtgtt

SEQ ID NO: 4584251 - DNA, 25 bp, Homo sapien
cagtcgatgaccgtcttcttgctgg

SEQ ID NO: 4584252 - DNA, 25 bp, Homo sapien
gtcgatgaccgtcttcttgctggtg

SEQ ID NO: 4584253 - DNA, 25 bp, Homo sapien
gatgaccgtcttcttgctggtgttg

SEQ ID NO: 4584254 - DNA, 25 bp, Homo sapien
tctgtctttccacctctaagttctg

SEQ ID NO: 4584255 - DNA, 25 bp, Homo sapien
tgacattcctaagccgagttggtgg

SEQ ID NO: 4584256 - DNA, 25 bp, Homo sapien
tgaagttgagactgtttctgtttta

SEQ ID NO: 4584257 - DNA, 25 bp, Homo sapien
tctaagttctgacattcctaagccg

SEQ ID NO: 4584258 - DNA, 25 bp, Homo sapien
ctcctttttctccttggagatgatg

SEQ ID NO: 4584259 - DNA, 25 bp, Homo sapien
tttttctccttggagatgatgctca

SEQ ID NO: 4584260 - DNA, 25 bp, Homo sapien
cctttttctccttggagatgatgct

SEQ ID NO: 4584261 - DNA, 25 bp, Homo sapien
ttttctccttggagatgatgctcac

SEQ ID NO: 4584262 - DNA, 25 bp, Homo sapien
tgactcgtttggtaagatgtggttg

SEQ ID NO: 4584263 - DNA, 25 bp, Homo sapien
ctgaacttcgcgaccagctcatccg

SEQ ID NO: 4584264 - DNA, 25 bp, Homo sapien
aacttcgcgaccagctcatccgcca

SEQ ID NO: 4584265 - DNA, 25 bp, Homo sapien
gaacttcgcgaccagctcatccgcc

SEQ ID NO: 4584266 - DNA, 25 bp, Homo sapien
tgaacttcgcgaccagctcatccgc

SEQ ID NO: 4584267 - DNA, 25 bp, Homo sapien
ttcctctgcaccttctcgcagacct

SEQ ID NO: 4584268 - DNA, 25 bp, Homo sapien
ctctgcaccttctcgcagaccttca

SEQ ID NO: 4584269 - DNA, 25 bp, Homo sapien
tctgcaccttctcgcagaccttcat

SEQ ID NO: 4584270 - DNA, 25 bp, Homo sapien
tgtaggaagtggtccctttcctctg

SEQ ID NO: 4584271 - DNA, 25 bp, Homo sapien
tccttttctgttgcgcttcccggca

SEQ ID NO: 4584272 - DNA, 25 bp, Homo sapien
agaaatgccgcaggcccctgccatt

SEQ ID NO: 4584273 - DNA, 25 bp, Homo sapien
gcttcccggcagaccaaggtgagga

SEQ ID NO: 4584274 - DNA, 25 bp, Homo sapien
ggagaaatgccgcaggcccctgcca

SEQ ID NO: 4584275 - DNA, 25 bp, Homo sapien
ctgagaggcaaagtgagtgctgggg

SEQ ID NO: 4584276 - DNA, 25 bp, Homo sapien
caaagtgagtgctggggtgtgtggg

SEQ ID NO: 4584277 - DNA, 25 bp, Homo sapien
gaggcaaagtgagtgctggggtgtg

SEQ ID NO: 4584278 - DNA, 25 bp, Homo sapien
gagaggcaaagtgagtgctggggtg

SEQ ID NO: 4584279 - DNA, 25 bp, Homo sapien
gaggtgtaccaactaccacttgctg

SEQ ID NO: 4584280 - DNA, 25 bp, Homo sapien
tctctgaggtgtaccaactaccact

SEQ ID NO: 4584281 - DNA, 25 bp, Homo sapien
tgaggtgtaccaactaccacttgct

SEQ ID NO: 4584282 - DNA, 25 bp, Homo sapien
tctgaggtgtaccaactaccacttg

SEQ ID NO: 4584283 - DNA, 25 bp, Homo sapien
ctatcaattttgtggctgccatagc

SEQ ID NO: 4584284 - DNA, 25 bp, Homo sapien
gaacgcggggaaactcatctatcaa

SEQ ID NO: 4584285 - DNA, 25 bp, Homo sapien
gattaatgggctcgacttcagtggg

SEQ ID NO: 4584286 - DNA, 25 bp, Homo sapien
caggcagccaaggtactgggtgaac

SEQ ID NO: 4584287 - DNA, 25 bp, Homo sapien
tgatcttagccaaaaggccaagaag

SEQ ID NO: 4584288 - DNA, 25 bp, Homo sapien
cttagccaaaaggccaagaagcgat

SEQ ID NO: 4584289 - DNA, 25 bp, Homo sapien
tcttagccaaaaggccaagaagcga

SEQ ID NO: 4584290 - DNA, 25 bp, Homo sapien
tctgataagaacagatactacactt

SEQ ID NO: 4584291 - DNA, 25 bp, Homo sapien
ctgggaggaggcctatctgaaaaca

SEQ ID NO: 4584292 - DNA, 25 bp, Homo sapien
gaggaggcctatctgaaaacagcca

SEQ ID NO: 4584293 - DNA, 25 bp, Homo sapien
ccatttgggaatccaaggaaaatca

SEQ ID NO: 4584294 - DNA, 25 bp, Homo sapien
tgtatggggtcaggcctagctgctg

SEQ ID NO: 4584295 - DNA, 25 bp, Homo sapien
ctacatcagggaagcctgaaatctg

SEQ ID NO: 4584296 - DNA, 25 bp, Homo sapien
agggaagcctgaaatctggggccca

SEQ ID NO: 4584297 - DNA, 25 bp, Homo sapien
gaagcctgaaatctggggcccatgc

SEQ ID NO: 4584298 - DNA, 25 bp, Homo sapien
tacatcagggaagcctgaaatctgg

SEQ ID NO: 4584299 - DNA, 25 bp, Homo sapien
tcttactagtgtccttcaagttgcc

SEQ ID NO: 4584300 - DNA, 25 bp, Homo sapien
taccatggctggtccggaagcagtt

SEQ ID NO: 4584301 - DNA, 25 bp, Homo sapien
cattcttctcgcatttctgacatgt

SEQ ID NO: 4584302 - DNA, 25 bp, Homo sapien
ctgagtttggggcattggttctgac

SEQ ID NO: 4584303 - DNA, 25 bp, Homo sapien
gggaacttctgtagcctcttttcat

SEQ ID NO: 4584304 - DNA, 25 bp, Homo sapien
cataggtgtatgtttcaaatggcat

SEQ ID NO: 4584305 - DNA, 25 bp, Homo sapien
ttcataggtgtatgtttcaaatggc

SEQ ID NO: 4584306 - DNA, 25 bp, Homo sapien
ctgggttagtggggaacttctgtag

SEQ ID NO: 4584307 - DNA, 25 bp, Homo sapien
tgcctgctccaaaagaccagaggaa

SEQ ID NO: 4584308 - DNA, 25 bp, Homo sapien
agaccagaggaaacttgcctgcatt

SEQ ID NO: 4584309 - DNA, 25 bp, Homo sapien
tgttctgcctgctccaaaagaccag

SEQ ID NO: 4584310 - DNA, 25 bp, Homo sapien
tctgcctgctccaaaagaccagagg

SEQ ID NO: 4584311 - DNA, 25 bp, Homo sapien
caacaaagttgatgcttcaattctc

SEQ ID NO: 4584312 - DNA, 25 bp, Homo sapien
cagagtctttccttgaccttctcct

SEQ ID NO: 4584313 - DNA, 25 bp, Homo sapien
gcattcttggctcatatctgttagg

SEQ ID NO: 4584314 - DNA, 25 bp, Homo sapien
ttcttttctgcatccaacaaagttg

SEQ ID NO: 4584315 - DNA, 25 bp, Homo sapien
atgaataaagagtccaaggatgaat

SEQ ID NO: 4584316 - DNA, 25 bp, Homo sapien
aaccgcatgtaattcagtgtagctg

SEQ ID NO: 4584317 - DNA, 25 bp, Homo sapien
gacctcgtgtgggaggaaaccgcat

SEQ ID NO: 4584318 - DNA, 25 bp, Homo sapien
tagagccttgagctgcattttgaga

SEQ ID NO: 4584319 - DNA, 25 bp, Homo sapien
acaagcaagatgcattaattgaaca

SEQ ID NO: 4584320 - DNA, 25 bp, Homo sapien
aattgaacaattacttagtgaatgg

SEQ ID NO: 4584321 - DNA, 25 bp, Homo sapien
ttaacaagcaagatgcattaattga

SEQ ID NO: 4584322 - DNA, 25 bp, Homo sapien
tcttgttgaccttgtttaacaagca

SEQ ID NO: 4584323 - DNA, 25 bp, Homo sapien
tgcctatagctagttctgtgtagga

SEQ ID NO: 4584324 - DNA, 25 bp, Homo sapien
tgtgtaggagtcacctttccaccag

SEQ ID NO: 4584325 - DNA, 25 bp, Homo sapien
cccatgacattatcatgttcaaact

SEQ ID NO: 4584326 - DNA, 25 bp, Homo sapien
gacattatcatgttcaaacttgcct

SEQ ID NO: 4584327 - DNA, 25 bp, Homo sapien
tttgctctaggtccaacaacccagg

SEQ ID NO: 4584328 - DNA, 25 bp, Homo sapien
gagacagctacctctgcttactgta

SEQ ID NO: 4584329 - DNA, 25 bp, Homo sapien
taattaattggaaggctggacaacc

SEQ ID NO: 4584330 - DNA, 25 bp, Homo sapien
gaaccctcaggaatggactagtgcc

SEQ ID NO: 4584331 - DNA, 25 bp, Homo sapien
gtggagaacccaaagacgcacaagg

SEQ ID NO: 4584332 - DNA, 25 bp, Homo sapien
actcagctgaaggatcccgggttct

SEQ ID NO: 4584333 - DNA, 25 bp, Homo sapien
gatctcagccatgaccatcatctgc

SEQ ID NO: 4584334 - DNA, 25 bp, Homo sapien
tatggcaatgtggtgcagagaatgc

SEQ ID NO: 4584335 - DNA, 25 bp, Homo sapien
cattgtcatgtcgagtttcaaggtg

SEQ ID NO: 4584336 - DNA, 25 bp, Homo sapien
tgtcatgtcgagtttcaaggtgcct

SEQ ID NO: 4584337 - DNA, 25 bp, Homo sapien
tacaagtcattgtcatgtcgagttt

SEQ ID NO: 4584338 - DNA, 25 bp, Homo sapien
caaggtgcctctcatcagcaatttg

SEQ ID NO: 4584339 - DNA, 25 bp, Homo sapien
taaatcatgtccgtaactataatcc

SEQ ID NO: 4584340 - DNA, 25 bp, Homo sapien
cgtaactataatccatagaatactc

SEQ ID NO: 4584341 - DNA, 25 bp, Homo sapien
tttggccaacattaatagatgtagg

SEQ ID NO: 4584342 - DNA, 25 bp, Homo sapien
tccatagaatactcttttggccaac

SEQ ID NO: 4584343 - DNA, 25 bp, Homo sapien
tctgtgttcccttgtcattattttc

SEQ ID NO: 4584344 - DNA, 25 bp, Homo sapien
tttctgctacctttgagaaatgttc

SEQ ID NO: 4584345 - DNA, 25 bp, Homo sapien
tctgctacctttgagaaatgttcct

SEQ ID NO: 4584346 - DNA, 25 bp, Homo sapien
tatttctatattgctatctattgtc

SEQ ID NO: 4584347 - DNA, 25 bp, Homo sapien
ttttgacactgctgatatccctccc

SEQ ID NO: 4584348 - DNA, 25 bp, Homo sapien
ccgctggggacatccaaagctcacg

SEQ ID NO: 4584349 - DNA, 25 bp, Homo sapien
gacatctctgatgattttgacactg

SEQ ID NO: 4584350 - DNA, 25 bp, Homo sapien
ggacatccaaagctcacgtccctga

SEQ ID NO: 4584351 - DNA, 25 bp, Homo sapien
tacttttccaagaacggcaggacta

SEQ ID NO: 4584352 - DNA, 25 bp, Homo sapien
ggcaggactaaatttcatccatagg

SEQ ID NO: 4584353 - DNA, 25 bp, Homo sapien
accaacctcagtgctaatccattcc

SEQ ID NO: 4584354 - DNA, 25 bp, Homo sapien
ccataggattttactgtccaggaaa

SEQ ID NO: 4584355 - DNA, 25 bp, Homo sapien
tctggtgcaccatatggaagctgga

SEQ ID NO: 4584356 - DNA, 25 bp, Homo sapien
ccagtccctgtatgactttcattgg

SEQ ID NO: 4584357 - DNA, 25 bp, Homo sapien
tggtcaacatgctcatctggtgcac

SEQ ID NO: 4584358 - DNA, 25 bp, Homo sapien
tagatgcctcttactccagtccctg

SEQ ID NO: 4584359 - DNA, 25 bp, Homo sapien
cctggagctacaggagccatctggt

SEQ ID NO: 4584360 - DNA, 25 bp, Homo sapien
gccttgaacatagccatgatgcctg

SEQ ID NO: 4584361 - DNA, 25 bp, Homo sapien
tttgtgtgtcttcccgccttgaaca

SEQ ID NO: 4584362 - DNA, 25 bp, Homo sapien
tacccataagcagacgagccaccat

SEQ ID NO: 4584363 - DNA, 25 bp, Homo sapien
tgatgggagagctcaaggtgaacag

SEQ ID NO: 4584364 - DNA, 25 bp, Homo sapien
cagtcagtgacactctgtgtcaatg

SEQ ID NO: 4584365 - DNA, 25 bp, Homo sapien
aggtgaacagaagggcacagtcagt

SEQ ID NO: 4584366 - DNA, 25 bp, Homo sapien
agtgacactctgtgtcaatgtgtca

SEQ ID NO: 4584367 - DNA, 25 bp, Homo sapien
tagaggaaaacttcatggacatcac

SEQ ID NO: 4584368 - DNA, 25 bp, Homo sapien
agaggaaaacttcatggacatcacc

SEQ ID NO: 4584369 - DNA, 25 bp, Homo sapien
ttagaggaaaacttcatggacatca

SEQ ID NO: 4584370 - DNA, 25 bp, Homo sapien
tcttgtgattaacgtgctgctgcat

SEQ ID NO: 4584371 - DNA, 25 bp, Homo sapien
ctctgctcttgtgattaacgtgctg

SEQ ID NO: 4584372 - DNA, 25 bp, Homo sapien
ctcttgtgattaacgtgctgctgca

SEQ ID NO: 4584373 - DNA, 25 bp, Homo sapien
tgctcttgtgattaacgtgctgctg

SEQ ID NO: 4584374 - DNA, 25 bp, Homo sapien
gatggatgaccccaagataggagtg

SEQ ID NO: 4584375 - DNA, 25 bp, Homo sapien
caccagggtgatgaccaaggtaacc

SEQ ID NO: 4584376 - DNA, 25 bp, Homo sapien
tagggtcctgtcagatcaccagggt

SEQ ID NO: 4584377 - DNA, 25 bp, Homo sapien
gactcagtaactctccccagagata

SEQ ID NO: 4584378 - DNA, 25 bp, Homo sapien
ctgccctgatgttctgtggatgttt

SEQ ID NO: 4584379 - DNA, 25 bp, Homo sapien
gccctgatgttctgtggatgtttcc

SEQ ID NO: 4584380 - DNA, 25 bp, Homo sapien
gtggatgtttcctaaagcatctttc

SEQ ID NO: 4584381 - DNA, 25 bp, Homo sapien
tgttctgtggatgtttcctaaagca

SEQ ID NO: 4584382 - DNA, 25 bp, Homo sapien
agactatgtttgagagaaagccaaa

SEQ ID NO: 4584383 - DNA, 25 bp, Homo sapien
tcctttccattaacgtgtgtccttc

SEQ ID NO: 4584384 - DNA, 25 bp, Homo sapien
actatgtttgagagaaagccaaatc

SEQ ID NO: 4584385 - DNA, 25 bp, Homo sapien
taacgtgtgtccttcagatgatctc

SEQ ID NO: 4584386 - DNA, 25 bp, Homo sapien
tgggaaggcaatttcatgaatgaga

SEQ ID NO: 4584387 - DNA, 25 bp, Homo sapien
agaaatgcttccctgggaaggcaat

SEQ ID NO: 4584388 - DNA, 25 bp, Homo sapien
catgaatgagatcttccaagcaaat

SEQ ID NO: 4584389 - DNA, 25 bp, Homo sapien
aggcaatttcatgaatgagatcttc

SEQ ID NO: 4584390 - DNA, 25 bp, Homo sapien
agatgctcctcaataactgtgttgg

SEQ ID NO: 4584391 - DNA, 25 bp, Homo sapien
gatgctcctcaataactgtgttggc

SEQ ID NO: 4584392 - DNA, 25 bp, Homo sapien
gttccaggacagacatcagatttgg

SEQ ID NO: 4584393 - DNA, 25 bp, Homo sapien
aaaatgagttccaggacagacatca

SEQ ID NO: 4584394 - DNA, 25 bp, Homo sapien
tggggagtgacttttacaaagacac

SEQ ID NO: 4584395 - DNA, 25 bp, Homo sapien
ctggggagtgacttttacaaagaca

SEQ ID NO: 4584396 - DNA, 25 bp, Homo sapien
gggagtgacttttacaaagacacca

SEQ ID NO: 4584397 - DNA, 25 bp, Homo sapien
ttaggcaaagtcttgcaatggttct

SEQ ID NO: 4584398 - DNA, 25 bp, Homo sapien
tttaggcaaagtcttgcaatggttc

SEQ ID NO: 4584399 - DNA, 25 bp, Homo sapien
ctttaggcaaagtcttgcaatggtt

SEQ ID NO: 4584400 - DNA, 25 bp, Homo sapien
tgtttctgctgccagaaatcatgta

SEQ ID NO: 4584401 - DNA, 25 bp, Homo sapien
tgagagcttgataaaccttcccctt

SEQ ID NO: 4584402 - DNA, 25 bp, Homo sapien
cttgtcatgtttctgctgccagaaa

SEQ ID NO: 4584403 - DNA, 25 bp, Homo sapien
ctttgagagcttgataaaccttccc

SEQ ID NO: 4584404 - DNA, 25 bp, Homo sapien
tattgtaattatttgccgagttgcc

SEQ ID NO: 4584405 - DNA, 25 bp, Homo sapien
tatttgccgagttgcctcttctcac

SEQ ID NO: 4584406 - DNA, 25 bp, Homo sapien
gcacagcagaaactggtattagggc

SEQ ID NO: 4584407 - DNA, 25 bp, Homo sapien
gaaactggtattagggctgattttg

SEQ ID NO: 4584408 - DNA, 25 bp, Homo sapien
taggctgccgttcccatagggcagt

SEQ ID NO: 4584409 - DNA, 25 bp, Homo sapien
tctctgtgtccgtgggtttagcctc

SEQ ID NO: 4584410 - DNA, 25 bp, Homo sapien
cctcccctattgagtacaggaatga

SEQ ID NO: 4584411 - DNA, 25 bp, Homo sapien
tacaggaatgaaggagcggctttca

SEQ ID NO: 4584412 - DNA, 25 bp, Homo sapien
tgcaagtcagaaaggccaggaagtc

SEQ ID NO: 4584413 - DNA, 25 bp, Homo sapien
aatgcaagtcagaaaggccaggaag

SEQ ID NO: 4584414 - DNA, 25 bp, Homo sapien
gaaatgcaagtcagaaaggccagga

SEQ ID NO: 4584415 - DNA, 25 bp, Homo sapien
gcaagtcagaaaggccaggaagtca

SEQ ID NO: 4584416 - DNA, 25 bp, Homo sapien
tttcatgcggctccctatccaacta

SEQ ID NO: 4584417 - DNA, 25 bp, Homo sapien
tcagcatttcatgcggctccctatc

SEQ ID NO: 4584418 - DNA, 25 bp, Homo sapien
cctatccaactatcacagatgggcg

SEQ ID NO: 4584419 - DNA, 25 bp, Homo sapien
gatgggcgacagctttcggctcttg

SEQ ID NO: 4584420 - DNA, 25 bp, Homo sapien
aaaatctctggatattcacagtttc

SEQ ID NO: 4584421 - DNA, 25 bp, Homo sapien
ggatattcacagtttccctcttcaa

SEQ ID NO: 4584422 - DNA, 25 bp, Homo sapien
cacagtttccctcttcaacttgtct

SEQ ID NO: 4584423 - DNA, 25 bp, Homo sapien
cctcttcaacttgtctgtattaagc

SEQ ID NO: 4584424 - DNA, 25 bp, Homo sapien
tataaaagaccatgagaaaatccct

SEQ ID NO: 4584425 - DNA, 25 bp, Homo sapien
cacccaaactcaagtgcaaataaac

SEQ ID NO: 4584426 - DNA, 25 bp, Homo sapien
tctaaaggctcaaagccatgcttaa

SEQ ID NO: 4584427 - DNA, 25 bp, Homo sapien
aagaaaggcacccaaactcaagtgc

SEQ ID NO: 4584428 - DNA, 25 bp, Homo sapien
ctggcacatccaggggcacatccct

SEQ ID NO: 4584429 - DNA, 25 bp, Homo sapien
ttaattacacgagtatagtttccag

SEQ ID NO: 4584430 - DNA, 25 bp, Homo sapien
agtagctcccattatccaccttggt

SEQ ID NO: 4584431 - DNA, 25 bp, Homo sapien
ggccaaagttaagaagtagctccca

SEQ ID NO: 4584432 - DNA, 25 bp, Homo sapien
tccaggtgccccgtctagtagactt

SEQ ID NO: 4584433 - DNA, 25 bp, Homo sapien
caatagcatcccatgcaggcatagc

SEQ ID NO: 4584434 - DNA, 25 bp, Homo sapien
cactgtggctctccatctgaatgtc

SEQ ID NO: 4584435 - DNA, 25 bp, Homo sapien
tattcacaatgaggttgagaagggc

SEQ ID NO: 4584436 - DNA, 25 bp, Homo sapien
acatcaaactgaaagccatctggct

SEQ ID NO: 4584437 - DNA, 25 bp, Homo sapien
acaattgggtgtgtgtcggagtaca

SEQ ID NO: 4584438 - DNA, 25 bp, Homo sapien
gctgtgaagacaatttgacaattgg

SEQ ID NO: 4584439 - DNA, 25 bp, Homo sapien
gacaatttgacaattgggtgtgtgt

SEQ ID NO: 4584440 - DNA, 25 bp, Homo sapien
gtgtgtgtcggagtacagataaaaa

SEQ ID NO: 4584441 - DNA, 25 bp, Homo sapien
gggtgatctggtgctcagcaacaag

SEQ ID NO: 4584442 - DNA, 25 bp, Homo sapien
tggtgctcagcaacaagggccttca

SEQ ID NO: 4584443 - DNA, 25 bp, Homo sapien
tgtcagttttacagtggtccatccc

SEQ ID NO: 4584444 - DNA, 25 bp, Homo sapien
tgatgacatcctttgccatagtcct

SEQ ID NO: 4584445 - DNA, 25 bp, Homo sapien
gatgggcccagcacttgtctaaggc

SEQ ID NO: 4584446 - DNA, 25 bp, Homo sapien
ctcattacagttgggggcagcacaa

SEQ ID NO: 4584447 - DNA, 25 bp, Homo sapien
aaggatgggcccagcacttgtctaa

SEQ ID NO: 4584448 - DNA, 25 bp, Homo sapien
agccagccacataggcaggctcatt

SEQ ID NO: 4584449 - DNA, 25 bp, Homo sapien
cagcactgatgccttcctgggccat

SEQ ID NO: 4584450 - DNA, 25 bp, Homo sapien
catggatgagggcagccttcaggac

SEQ ID NO: 4584451 - DNA, 25 bp, Homo sapien
ttaaggtccatgacacctccagcac

SEQ ID NO: 4584452 - DNA, 25 bp, Homo sapien
gcagccttcaggacctcttgtaaag

SEQ ID NO: 4584453 - DNA, 25 bp, Homo sapien
tgcttcgattgaggagctgggtgcc

SEQ ID NO: 4584454 - DNA, 25 bp, Homo sapien
cagttgaagcagactcggacgggat

SEQ ID NO: 4584455 - DNA, 25 bp, Homo sapien
agcagactcggacgggatggtccca

SEQ ID NO: 4584456 - DNA, 25 bp, Homo sapien
aaggtcaccgggctttttattgcag

SEQ ID NO: 4584457 - DNA, 25 bp, Homo sapien
tttattgcagttgaagcagactcgg

SEQ ID NO: 4584458 - DNA, 25 bp, Homo sapien
agcagttgtggagtgcaggatttca

SEQ ID NO: 4584459 - DNA, 25 bp, Homo sapien
ggtcaggcgcccagtacacaggcct

SEQ ID NO: 4584460 - DNA, 25 bp, Homo sapien
gtacacaggcctggccgcatccttt

SEQ ID NO: 4584461 - DNA, 25 bp, Homo sapien
ggcctggccgcatcctttaccaaac

SEQ ID NO: 4584462 - DNA, 25 bp, Homo sapien
tcaggcgcccagtacacaggcctgg

SEQ ID NO: 4584463 - DNA, 25 bp, Homo sapien
atccatgccctccatgtagcaggca

SEQ ID NO: 4584464 - DNA, 25 bp, Homo sapien
tgccctccatgtagcaggcactcaa

SEQ ID NO: 4584465 - DNA, 25 bp, Homo sapien
ccatgtagcaggcactcaagtgctg

SEQ ID NO: 4584466 - DNA, 25 bp, Homo sapien
ccctccatgtagcaggcactcaagt

SEQ ID NO: 4584467 - DNA, 25 bp, Homo sapien
cccctctctggtatatcttctgcat

SEQ ID NO: 4584468 - DNA, 25 bp, Homo sapien
cagaaaccacattcaataatgccat

SEQ ID NO: 4584469 - DNA, 25 bp, Homo sapien
ccccatcactaagaggacaatgctt

SEQ ID NO: 4584470 - DNA, 25 bp, Homo sapien
tctgattatctttgagcagctcccc

SEQ ID NO: 4584471 - DNA, 25 bp, Homo sapien
catgcccttgcagggacagagcctg

SEQ ID NO: 4584472 - DNA, 25 bp, Homo sapien
agggacagagcctgccccacattgc

SEQ ID NO: 4584473 - DNA, 25 bp, Homo sapien
acagagcctgccccacattgctcat

SEQ ID NO: 4584474 - DNA, 25 bp, Homo sapien
gggacagagcctgccccacattgct

SEQ ID NO: 4584475 - DNA, 25 bp, Homo sapien
aaatcatacattctgtaggaagctt

SEQ ID NO: 4584476 - DNA, 25 bp, Homo sapien
aatgtagttttgagccaggctgagc

SEQ ID NO: 4584477 - DNA, 25 bp, Homo sapien
tacattctgtaggaagcttggtaaa

SEQ ID NO: 4584478 - DNA, 25 bp, Homo sapien
aaatgtagttttgagccaggctgag

SEQ ID NO: 4584479 - DNA, 25 bp, Homo sapien
gtcagctaataacctatgtaaccag

SEQ ID NO: 4584480 - DNA, 25 bp, Homo sapien
cagcacaagaaaaccactaaaccag

SEQ ID NO: 4584481 - DNA, 25 bp, Homo sapien
ccttccctgttaagaagtatctgac

SEQ ID NO: 4584482 - DNA, 25 bp, Homo sapien
cccagtctgggtgccagtaatgtca

SEQ ID NO: 4584483 - DNA, 25 bp, Homo sapien
aatccagctattaatgtttcttcca

SEQ ID NO: 4584484 - DNA, 25 bp, Homo sapien
catttcttcaatagtctgaaagctc

SEQ ID NO: 4584485 - DNA, 25 bp, Homo sapien
ttcaatagtctgaaagctcccctgg

SEQ ID NO: 4584486 - DNA, 25 bp, Homo sapien
acccatccacagtctcagtcccaac

SEQ ID NO: 4584487 - DNA, 25 bp, Homo sapien
gaagtctgttaatataagtccccat

SEQ ID NO: 4584488 - DNA, 25 bp, Homo sapien
tagataactgtattgatgggaactt

SEQ ID NO: 4584489 - DNA, 25 bp, Homo sapien
catcttcacaagtaatagataactg

SEQ ID NO: 4584490 - DNA, 25 bp, Homo sapien
tccccataataacatagttgaagag

SEQ ID NO: 4584491 - DNA, 25 bp, Homo sapien
tacaccagggcagtatggcgatccc

SEQ ID NO: 4584492 - DNA, 25 bp, Homo sapien
aatcagcagagggttgtcacaaagc

SEQ ID NO: 4584493 - DNA, 25 bp, Homo sapien
aggaatacaccagggcagtatggcg

SEQ ID NO: 4584494 - DNA, 25 bp, Homo sapien
cagtatggcgatcccaggtacacac

SEQ ID NO: 4584495 - DNA, 25 bp, Homo sapien
agaagattcactaggttcctggggc

SEQ ID NO: 4584496 - DNA, 25 bp, Homo sapien
cagagaagattcactaggttcctgg

SEQ ID NO: 4584497 - DNA, 25 bp, Homo sapien
gagaagattcactaggttcctgggg

SEQ ID NO: 4584498 - DNA, 25 bp, Homo sapien
agagaagattcactaggttcctggg

SEQ ID NO: 4584499 - DNA, 25 bp, Homo sapien
tagtttctcagcacttgcaatatgc

SEQ ID NO: 4584500 - DNA, 25 bp, Homo sapien
ggttagtttctcagcacttgcaata

SEQ ID NO: 4584501 - DNA, 25 bp, Homo sapien
gcacttgcaatatgctgtacacaag

SEQ ID NO: 4584502 - DNA, 25 bp, Homo sapien
tgctgtacacaagcgcccagagctg

SEQ ID NO: 4584503 - DNA, 25 bp, Homo sapien
gcttaagcacctggactggctgctc

SEQ ID NO: 4584504 - DNA, 25 bp, Homo sapien
cttaagcacctggactggctgctct

SEQ ID NO: 4584505 - DNA, 25 bp, Homo sapien
ggaagtgtcagctaatggtctaatg

SEQ ID NO: 4584506 - DNA, 25 bp, Homo sapien
taatggtctaatgacggtgacggtt

SEQ ID NO: 4584507 - DNA, 25 bp, Homo sapien
tgtcagctaatggtctaatgacggt

SEQ ID NO: 4584508 - DNA, 25 bp, Homo sapien
taatgacggtgacggttggcaccat

SEQ ID NO: 4584509 - DNA, 25 bp, Homo sapien
gatttgcacgtcatctagcaaaggg

SEQ ID NO: 4584510 - DNA, 25 bp, Homo sapien
tcacagatttgcacgtcatctagca

SEQ ID NO: 4584511 - DNA, 25 bp, Homo sapien
acgtcatctagcaaaggggccatgc

SEQ ID NO: 4584512 - DNA, 25 bp, Homo sapien
aattttggtatctctactgctgagc

SEQ ID NO: 4584513 - DNA, 25 bp, Homo sapien
ccatagacctccaaagtgggaagca

SEQ ID NO: 4584514 - DNA, 25 bp, Homo sapien
tactgggtagccacggactaggaca

SEQ ID NO: 4584515 - DNA, 25 bp, Homo sapien
caactggcatgaatgtagcaacccc

SEQ ID NO: 4584516 - DNA, 25 bp, Homo sapien
gggaagcatcctcacatgagccaga

SEQ ID NO: 4584517 - DNA, 25 bp, Homo sapien
gacataatgggacatggcaagcagg

SEQ ID NO: 4584518 - DNA, 25 bp, Homo sapien
gatgggtttaatagcaaactagaca

SEQ ID NO: 4584519 - DNA, 25 bp, Homo sapien
gtgaattcagagataggtcaataga

SEQ ID NO: 4584520 - DNA, 25 bp, Homo sapien
ggcaagcaggtccaacatacatgta

SEQ ID NO: 4584521 - DNA, 25 bp, Homo sapien
taaatattgagcagagataccctgg

SEQ ID NO: 4584522 - DNA, 25 bp, Homo sapien
gaaaacttcagataccatggtctgg

SEQ ID NO: 4584523 - DNA, 25 bp, Homo sapien
agattactggaaagtgctctcagca

SEQ ID NO: 4584524 - DNA, 25 bp, Homo sapien
ggtagttctaatcacagggccctga

SEQ ID NO: 4584525 - DNA, 25 bp, Homo sapien
ttccagtaatgatgtacagaaggat

SEQ ID NO: 4584526 - DNA, 25 bp, Homo sapien
tgatgtacagaaggatgttagatgg

SEQ ID NO: 4584527 - DNA, 25 bp, Homo sapien
gaaggatgttagatgggacttctcc

SEQ ID NO: 4584528 - DNA, 25 bp, Homo sapien
ccagtaatgatgtacagaaggatgt

SEQ ID NO: 4584529 - DNA, 25 bp, Homo sapien
caacatgtctcctcttacggtacca

SEQ ID NO: 4584530 - DNA, 25 bp, Homo sapien
tattggatgacaagtagaaaacact

SEQ ID NO: 4584531 - DNA, 25 bp, Homo sapien
atttttcagggcgtgaggctgagta

SEQ ID NO: 4584532 - DNA, 25 bp, Homo sapien
aaaagaccctgacgcatctttttgt

SEQ ID NO: 4584533 - DNA, 25 bp, Homo sapien
actgtaacctcgaactccagcccct

SEQ ID NO: 4584534 - DNA, 25 bp, Homo sapien
ctgtaacctcgaactccagccccta

SEQ ID NO: 4584535 - DNA, 25 bp, Homo sapien
ctggacttcagtgccgcaatcatag

SEQ ID NO: 4584536 - DNA, 25 bp, Homo sapien
aggctggacttcagtgccgcaatca

SEQ ID NO: 4584537 - DNA, 25 bp, Homo sapien
gacaagggaaggaacactcactctg

SEQ ID NO: 4584538 - DNA, 25 bp, Homo sapien
cagccaccggaagaccttagtcagg

SEQ ID NO: 4584539 - DNA, 25 bp, Homo sapien
catctgtttgctacccaagaggctc

SEQ ID NO: 4584540 - DNA, 25 bp, Homo sapien
ccaagggaagcaggtgtgacactct

SEQ ID NO: 4584541 - DNA, 25 bp, Homo sapien
ttaaaatgcagtctgtattcacatt

SEQ ID NO: 4584542 - DNA, 25 bp, Homo sapien
taatattctactattcacacttcta

SEQ ID NO: 4584543 - DNA, 25 bp, Homo sapien
aaaatgcagtctgtattcacattaa

SEQ ID NO: 4584544 - DNA, 25 bp, Homo sapien
atgcagtctgtattcacattaatga

SEQ ID NO: 4584545 - DNA, 25 bp, Homo sapien
aacactgattatttggctgtagtaa

SEQ ID NO: 4584546 - DNA, 25 bp, Homo sapien
ttgacgagtcttcgtaaaggacttc

SEQ ID NO: 4584547 - DNA, 25 bp, Homo sapien
tgttgacgagtcttcgtaaaggact

SEQ ID NO: 4584548 - DNA, 25 bp, Homo sapien
ctgttgacgagtcttcgtaaaggac

SEQ ID NO: 4584549 - DNA, 25 bp, Homo sapien
caacgccagggtgtagggcttcact

SEQ ID NO: 4584550 - DNA, 25 bp, Homo sapien
ttttcattcactgggacctggaggc

SEQ ID NO: 4584551 - DNA, 25 bp, Homo sapien
catgtttgtcaaacccaaggcctgg

SEQ ID NO: 4584552 - DNA, 25 bp, Homo sapien
caaacagcgcttcagataggcatca

SEQ ID NO: 4584553 - DNA, 25 bp, Homo sapien
tccccagactcgtgtgagagcaggc

SEQ ID NO: 4584554 - DNA, 25 bp, Homo sapien
tgtcaggcataccaagcagttcaga

SEQ ID NO: 4584555 - DNA, 25 bp, Homo sapien
gggaatggtactccagcctctggca

SEQ ID NO: 4584556 - DNA, 25 bp, Homo sapien
cgggaaacagtcaaggaggagccat

SEQ ID NO: 4584557 - DNA, 25 bp, Homo sapien
tccagctcatttgtccctcttggga

SEQ ID NO: 4584558 - DNA, 25 bp, Homo sapien
tgaatttggactttactccctcgtg

SEQ ID NO: 4584559 - DNA, 25 bp, Homo sapien
gttgccagagcaccatcaggcttga

SEQ ID NO: 4584560 - DNA, 25 bp, Homo sapien
cctcttgggattgacagtggactgt

SEQ ID NO: 4584561 - DNA, 25 bp, Homo sapien
atgagtgtagagttcaccaggtaca

SEQ ID NO: 4584562 - DNA, 25 bp, Homo sapien
gtgtagagttcaccaggtacaggca

SEQ ID NO: 4584563 - DNA, 25 bp, Homo sapien
tgtagagttcaccaggtacaggcat

SEQ ID NO: 4584564 - DNA, 25 bp, Homo sapien
gagtgtagagttcaccaggtacagg

SEQ ID NO: 4584565 - DNA, 25 bp, Homo sapien
gtgagaatcatctattaaagacatg

SEQ ID NO: 4584566 - DNA, 25 bp, Homo sapien
ctgatgggtgagcagcaggacaatt

SEQ ID NO: 4584567 - DNA, 25 bp, Homo sapien
ggccaagacggctaactgaatcaat

SEQ ID NO: 4584568 - DNA, 25 bp, Homo sapien
ttgatcatatcagccctcacagaag

SEQ ID NO: 4584569 - DNA, 25 bp, Homo sapien
taaaccttcaaagggtacatgagag

SEQ ID NO: 4584570 - DNA, 25 bp, Homo sapien
gcatcaacttaattgggccaacagg

SEQ ID NO: 4584571 - DNA, 25 bp, Homo sapien
gtgctaggagacagtaaaagtaaca

SEQ ID NO: 4584572 - DNA, 25 bp, Homo sapien
gaaatatagcacgtactatgaaggg

SEQ ID NO: 4584573 - DNA, 25 bp, Homo sapien
taacagccaaggtgttgcatgcaaa

SEQ ID NO: 4584574 - DNA, 25 bp, Homo sapien
ctttggggtactgtgactacatcag

SEQ ID NO: 4584575 - DNA, 25 bp, Homo sapien
tacatcaggtcataaggaataaaag

SEQ ID NO: 4584576 - DNA, 25 bp, Homo sapien
gtactgtgactacatcaggtcataa

SEQ ID NO: 4584577 - DNA, 25 bp, Homo sapien
tgtgactacatcaggtcataaggaa

SEQ ID NO: 4584578 - DNA, 25 bp, Homo sapien
gaaaacaactccacaagtatcctta

SEQ ID NO: 4584579 - DNA, 25 bp, Homo sapien
gagaaggaccagtctgaagaatcag

SEQ ID NO: 4584580 - DNA, 25 bp, Homo sapien
gaatcagtgcaaatatttcccatta

SEQ ID NO: 4584581 - DNA, 25 bp, Homo sapien
tgggagtgcaagcatagctctctgc

SEQ ID NO: 4584582 - DNA, 25 bp, Homo sapien
taatgccaaacttaaaggtgattac

SEQ ID NO: 4584583 - DNA, 25 bp, Homo sapien
tataattaacgattcatttgcagtt

SEQ ID NO: 4584584 - DNA, 25 bp, Homo sapien
tataatgtttgaagtgacaatttga

SEQ ID NO: 4584585 - DNA, 25 bp, Homo sapien
aggtgattactagaaaaatagtact

SEQ ID NO: 4584586 - DNA, 25 bp, Homo sapien
gcaggaatccagttagtgctaacaa

SEQ ID NO: 4584587 - DNA, 25 bp, Homo sapien
gcagaacaggtttggagctcaacaa

SEQ ID NO: 4584588 - DNA, 25 bp, Homo sapien
caactaaaatagctgtgacaaccac

SEQ ID NO: 4584589 - DNA, 25 bp, Homo sapien
tggtagacttgaaaatcaacagcct

SEQ ID NO: 4584590 - DNA, 25 bp, Homo sapien
gcccggcctctgcttgtttatttat

SEQ ID NO: 4584591 - DNA, 25 bp, Homo sapien
cgcccggcctctgcttgtttattta

SEQ ID NO: 4584592 - DNA, 25 bp, Homo sapien
ctgaaatgaggatatattctaaagc

SEQ ID NO: 4584593 - DNA, 25 bp, Homo sapien
tctctgaaatgaggatatattctaa

SEQ ID NO: 4584594 - DNA, 25 bp, Homo sapien
cattctctgaaatgaggatatattc

SEQ ID NO: 4584595 - DNA, 25 bp, Homo sapien
gaaatgaggatatattctaaagccg

SEQ ID NO: 4584596 - DNA, 25 bp, Homo sapien
ccatgaataacggttttaatgcagt

SEQ ID NO: 4584597 - DNA, 25 bp, Homo sapien
gttccatgaataacggttttaatgc

SEQ ID NO: 4584598 - DNA, 25 bp, Homo sapien
tgaataacggttttaatgcagtatg

SEQ ID NO: 4584599 - DNA, 25 bp, Homo sapien
ctgttccatgaataacggttttaat

SEQ ID NO: 4584600 - DNA, 25 bp, Homo sapien
tctattcagcgtacagagaaggctt

SEQ ID NO: 4584601 - DNA, 25 bp, Homo sapien
cattgtttgcccaggtacacagatc

SEQ ID NO: 4584602 - DNA, 25 bp, Homo sapien
catccaatgtcccttcttttgacaa

SEQ ID NO: 4584603 - DNA, 25 bp, Homo sapien
ttttgacaacaaccagcaggaacca

SEQ ID NO: 4584604 - DNA, 25 bp, Homo sapien
acaaggcctcctcccgaacatcacc

SEQ ID NO: 4584605 - DNA, 25 bp, Homo sapien
cctcccgaacatcaccctcaccagg

SEQ ID NO: 4584606 - DNA, 25 bp, Homo sapien
tgtggacaaggcctcctcccgaaca

SEQ ID NO: 4584607 - DNA, 25 bp, Homo sapien
ggcctcctcccgaacatcaccctca

SEQ ID NO: 4584608 - DNA, 25 bp, Homo sapien
tccaggatgttttgggaagtaaaga

SEQ ID NO: 4584609 - DNA, 25 bp, Homo sapien
tttcctctggtgattctattctcac

SEQ ID NO: 4584610 - DNA, 25 bp, Homo sapien
agtaaagaaatttcctctggtgatt

SEQ ID NO: 4584611 - DNA, 25 bp, Homo sapien
ctgagggatattccaggatgttttg

SEQ ID NO: 4584612 - DNA, 25 bp, Homo sapien
gaagcagattttgcctcgttggaaa

SEQ ID NO: 4584613 - DNA, 25 bp, Homo sapien
gacttttgatactcactgtgggcaa

SEQ ID NO: 4584614 - DNA, 25 bp, Homo sapien
aaccggtaccgagggatgaagcaga

SEQ ID NO: 4584615 - DNA, 25 bp, Homo sapien
catgtgattgctctggaaccggtac

SEQ ID NO: 4584616 - DNA, 25 bp, Homo sapien
tattaaagttcgagccaggcacagt

SEQ ID NO: 4584617 - DNA, 25 bp, Homo sapien
gatgtttccagtgatgatccattgg

SEQ ID NO: 4584618 - DNA, 25 bp, Homo sapien
ttcactatggcaaaacactacacag

SEQ ID NO: 4584619 - DNA, 25 bp, Homo sapien
cactacacagtacactgatgtttcc

SEQ ID NO: 4584620 - DNA, 25 bp, Homo sapien
tggagctactgagacacagccttag

SEQ ID NO: 4584621 - DNA, 25 bp, Homo sapien
tagtgaagtccagtcaacctctgag

SEQ ID NO: 4584622 - DNA, 25 bp, Homo sapien
gaggtctgctaaccaacaaacacgg

SEQ ID NO: 4584623 - DNA, 25 bp, Homo sapien
tctgagacaggaaaagcctaggccc

SEQ ID NO: 4584624 - DNA, 25 bp, Homo sapien
tgcacagatcagcaatcgctggccg

SEQ ID NO: 4584625 - DNA, 25 bp, Homo sapien
caggccttcggagggtctgtccgcc

SEQ ID NO: 4584626 - DNA, 25 bp, Homo sapien
cgcggcttccgctacgggcggcctc

SEQ ID NO: 4584627 - DNA, 25 bp, Homo sapien
atcgctggccgccaggccttcggag

SEQ ID NO: 4584628 - DNA, 25 bp, Homo sapien
cttctggctcagtacgcgggactgg

SEQ ID NO: 4584629 - DNA, 25 bp, Homo sapien
ctggcgtagccgctcctcggcactc

SEQ ID NO: 4584630 - DNA, 25 bp, Homo sapien
agctctccccgcaggctccgcttgg

SEQ ID NO: 4584631 - DNA, 25 bp, Homo sapien
cttggcgctgctcaccgctgccgcc

SEQ ID NO: 4584632 - DNA, 25 bp, Homo sapien
ggtctccgcccctggccgctcccag

SEQ ID NO: 4584633 - DNA, 25 bp, Homo sapien
cggtctccgcccctggccgctccca

SEQ ID NO: 4584634 - DNA, 25 bp, Homo sapien
gtctccgcccctggccgctcccagg

SEQ ID NO: 4584635 - DNA, 25 bp, Homo sapien
ctccgcccctggccgctcccaggtg

SEQ ID NO: 4584636 - DNA, 25 bp, Homo sapien
cccagccctcgtgcggtccccgtgg

SEQ ID NO: 4584637 - DNA, 25 bp, Homo sapien
ctcgtgcggtccccgtggtccggct

SEQ ID NO: 4584638 - DNA, 25 bp, Homo sapien
acccagccctcgtgcggtccccgtg

SEQ ID NO: 4584639 - DNA, 25 bp, Homo sapien
tgcggtccccgtggtccggctcgcc

SEQ ID NO: 4584640 - DNA, 25 bp, Homo sapien
aaagatggccggcagtacccacggt

SEQ ID NO: 4584641 - DNA, 25 bp, Homo sapien
cactggcggggatggtaaagatggc

SEQ ID NO: 4584642 - DNA, 25 bp, Homo sapien
gggatggtaaagatggccggcagta

SEQ ID NO: 4584643 - DNA, 25 bp, Homo sapien
tggccggcagtacccacggtgcctg

SEQ ID NO: 4584644 - DNA, 25 bp, Homo sapien
tcattaaatagggacaaaatttctg

SEQ ID NO: 4584645 - DNA, 25 bp, Homo sapien
gggacaaaatttctgtaactctgga

SEQ ID NO: 4584646 - DNA, 25 bp, Homo sapien
acaaaatttctgtaactctggaagg

SEQ ID NO: 4584647 - DNA, 25 bp, Homo sapien
atagggacaaaatttctgtaactct

SEQ ID NO: 4584648 - DNA, 25 bp, Homo sapien
agaagtatgtgttggcaatcgtttt

SEQ ID NO: 4584649 - DNA, 25 bp, Homo sapien
gcaatcgttttcgtaagagtcagaa

SEQ ID NO: 4584650 - DNA, 25 bp, Homo sapien
aagtcatccagccagatttaggctc

SEQ ID NO: 4584651 - DNA, 25 bp, Homo sapien
gtcatccagccagatttaggctcaa

SEQ ID NO: 4584652 - DNA, 25 bp, Homo sapien
tatgagagaataaatttaacatttt

SEQ ID NO: 4584653 - DNA, 25 bp, Homo sapien
ctatgagagaataaatttaacattt

SEQ ID NO: 4584654 - DNA, 25 bp, Homo sapien
tgagagaataaatttaacattttaa

SEQ ID NO: 4584655 - DNA, 25 bp, Homo sapien
caaatgcctgcaagtagctcagagc

SEQ ID NO: 4584656 - DNA, 25 bp, Homo sapien
gcctggacctggattagaatgcaaa

SEQ ID NO: 4584657 - DNA, 25 bp, Homo sapien
ttcgagagctctgcggtgccttgga

SEQ ID NO: 4584658 - DNA, 25 bp, Homo sapien
taagattagccaaacccttggtgcc

SEQ ID NO: 4584659 - DNA, 25 bp, Homo sapien
ttgataaattcagccagatgaagat

SEQ ID NO: 4584660 - DNA, 25 bp, Homo sapien
cacactgataaggttgctatgatat

SEQ ID NO: 4584661 - DNA, 25 bp, Homo sapien
tattaatagtaccacccacactgat

SEQ ID NO: 4584662 - DNA, 25 bp, Homo sapien
tatttgatgcctattaaaccctcaa

SEQ ID NO: 4584663 - DNA, 25 bp, Homo sapien
caacatcagcgatccagaaagttca

SEQ ID NO: 4584664 - DNA, 25 bp, Homo sapien
gagaaggcaagtagcccttttgggc

SEQ ID NO: 4584665 - DNA, 25 bp, Homo sapien
ggatttgaatgcagggtggcctcaa

SEQ ID NO: 4584666 - DNA, 25 bp, Homo sapien
taaaaactagtgcaacaggagtcac

SEQ ID NO: 4584667 - DNA, 25 bp, Homo sapien
tgagccaagatgtagcttgacatgg

SEQ ID NO: 4584668 - DNA, 25 bp, Homo sapien
tcttcataaacgtatccagtgagcc

SEQ ID NO: 4584669 - DNA, 25 bp, Homo sapien
ggccctctacaaaaagcatacatga

SEQ ID NO: 4584670 - DNA, 25 bp, Homo sapien
gacatgggtttaggcatatcactcc

SEQ ID NO: 4584671 - DNA, 25 bp, Homo sapien
gcacggacacgacggtagtcttcaa

SEQ ID NO: 4584672 - DNA, 25 bp, Homo sapien
tgaaggggccattcgtgtgaaaacg

SEQ ID NO: 4584673 - DNA, 25 bp, Homo sapien
gtcagcacggacacgacggtagtct

SEQ ID NO: 4584674 - DNA, 25 bp, Homo sapien
acgacggtagtcttcaaatatgtga

SEQ ID NO: 4584675 - DNA, 25 bp, Homo sapien
aatatttataagctgcctggcacag

SEQ ID NO: 4584676 - DNA, 25 bp, Homo sapien
caaaatacagtgagaacagcatggg

SEQ ID NO: 4584677 - DNA, 25 bp, Homo sapien
gacagattagcatccttacctagaa

SEQ ID NO: 4584678 - DNA, 25 bp, Homo sapien
aagatactagttccttgggagctcg

SEQ ID NO: 4584679 - DNA, 25 bp, Homo sapien
taacttttaccctacacacatgcct

SEQ ID NO: 4584680 - DNA, 25 bp, Homo sapien
gcaatggctagaagttatagaaggt

SEQ ID NO: 4584681 - DNA, 25 bp, Homo sapien
tatagaaggtagattcttagcttgc

SEQ ID NO: 4584682 - DNA, 25 bp, Homo sapien
catgcctcatgcattttacatatga

SEQ ID NO: 4584683 - DNA, 25 bp, Homo sapien
acagcagcccaagacttaatcggct

SEQ ID NO: 4584684 - DNA, 25 bp, Homo sapien
gacttaatcggcttttccaagtgga

SEQ ID NO: 4584685 - DNA, 25 bp, Homo sapien
tccaagtggactcaatgtgttctaa

SEQ ID NO: 4584686 - DNA, 25 bp, Homo sapien
gaaagggtgctcctcacaggtgaaa

SEQ ID NO: 4584687 - DNA, 25 bp, Homo sapien
ttttgacactatgtttgggaggagt

SEQ ID NO: 4584688 - DNA, 25 bp, Homo sapien
gaaatgtcagttcccatattatgac

SEQ ID NO: 4584689 - DNA, 25 bp, Homo sapien
gaagcagtccaccttagacttctag

SEQ ID NO: 4584690 - DNA, 25 bp, Homo sapien
tacactggttatgttgacagctaga

SEQ ID NO: 4584691 - DNA, 25 bp, Homo sapien
taactgggagttacaaatatctctg

SEQ ID NO: 4584692 - DNA, 25 bp, Homo sapien
tgaagagtcattagcacagagcaga

SEQ ID NO: 4584693 - DNA, 25 bp, Homo sapien
actttctacaggctgatgagtgcag

SEQ ID NO: 4584694 - DNA, 25 bp, Homo sapien
gctgtcagagcataaaatgcccttc

SEQ ID NO: 4584695 - DNA, 25 bp, Homo sapien
aagtgatattaaggtgtgtgtcaca

SEQ ID NO: 4584696 - DNA, 25 bp, Homo sapien
ctcccatttcctatttatgaaagtg

SEQ ID NO: 4584697 - DNA, 25 bp, Homo sapien
caagaagtggcttatgacaatacag

SEQ ID NO: 4584698 - DNA, 25 bp, Homo sapien
caatacagctttggtttaggtatta

SEQ ID NO: 4584699 - DNA, 25 bp, Homo sapien
ctctgccagagcaagaccacgagta

SEQ ID NO: 4584700 - DNA, 25 bp, Homo sapien
caccaaccccaatagggcccagcac

SEQ ID NO: 4584701 - DNA, 25 bp, Homo sapien
caatccagagaaggagctacaagcc

SEQ ID NO: 4584702 - DNA, 25 bp, Homo sapien
gctacaagccctgtacttgcaagcc

SEQ ID NO: 4584703 - DNA, 25 bp, Homo sapien
cagagggatcctccgggacgtcctc

SEQ ID NO: 4584704 - DNA, 25 bp, Homo sapien
ctggctggctacacaaagccaggcg

SEQ ID NO: 4584705 - DNA, 25 bp, Homo sapien
tggctacacaaagccaggcgcccga

SEQ ID NO: 4584706 - DNA, 25 bp, Homo sapien
agccaggcgcccgaccagagggatc

SEQ ID NO: 4584707 - DNA, 25 bp, Homo sapien
cagcaagaaggtggcgtctcgcagc

SEQ ID NO: 4584708 - DNA, 25 bp, Homo sapien
gcgtctcgcagctcctcgttattcg

SEQ ID NO: 4584709 - DNA, 25 bp, Homo sapien
cgttattcgtccgcctcgggtccat

SEQ ID NO: 4584710 - DNA, 25 bp, Homo sapien
tagcctgacagacgctccaggtcgt

SEQ ID NO: 4584711 - DNA, 25 bp, Homo sapien
ccccgcgccgtaggagggagtggag

SEQ ID NO: 4584712 - DNA, 25 bp, Homo sapien
taggagggagtggaggagccggcga

SEQ ID NO: 4584713 - DNA, 25 bp, Homo sapien
cgtaggagggagtggaggagccggc

SEQ ID NO: 4584714 - DNA, 25 bp, Homo sapien
ggagggagtggaggagccggcgaac

SEQ ID NO: 4584715 - DNA, 25 bp, Homo sapien
agcacagcgcgagcggctcctcggc

SEQ ID NO: 4584716 - DNA, 25 bp, Homo sapien
ctcctcggctgttcgtgctgcttcc

SEQ ID NO: 4584717 - DNA, 25 bp, Homo sapien
ctcggctgttcgtgctgcttcccca

SEQ ID NO: 4584718 - DNA, 25 bp, Homo sapien
cagcacagcgcgagcggctcctcgg

SEQ ID NO: 4584719 - DNA, 25 bp, Homo sapien
tggtccgcgttcacgttagagttaa

SEQ ID NO: 4584720 - DNA, 25 bp, Homo sapien
ttcacgttagagttaacgtcctcca

SEQ ID NO: 4584721 - DNA, 25 bp, Homo sapien
ctcctggtccgcgttcacgttagag

SEQ ID NO: 4584722 - DNA, 25 bp, Homo sapien
cctggtccgcgttcacgttagagtt

SEQ ID NO: 4584723 - DNA, 25 bp, Homo sapien
agatgaaccgcctcctcagcgcagg

SEQ ID NO: 4584724 - DNA, 25 bp, Homo sapien
gggaggcagcgccaatatccggtct

SEQ ID NO: 4584725 - DNA, 25 bp, Homo sapien
tctcgcagcaacaagggaagagccg

SEQ ID NO: 4584726 - DNA, 25 bp, Homo sapien
tcctcagcgcaggtccgggattcgg

SEQ ID NO: 4584727 - DNA, 25 bp, Homo sapien
aactatgataccctgtcctctctgg

SEQ ID NO: 4584728 - DNA, 25 bp, Homo sapien
taaagtatgcatcgcagttagccca

SEQ ID NO: 4584729 - DNA, 25 bp, Homo sapien
tctggtgactcagaagcgttagagc

SEQ ID NO: 4584730 - DNA, 25 bp, Homo sapien
tagcgcttagcaaaattcctgacaa

SEQ ID NO: 4584731 - DNA, 25 bp, Homo sapien
cgaaagttggctgtgtatttgggca

SEQ ID NO: 4584732 - DNA, 25 bp, Homo sapien
tgccagttttgatgtctcagcacct

SEQ ID NO: 4584733 - DNA, 25 bp, Homo sapien
ctggatctcttgttcgaaagttggc

SEQ ID NO: 4584734 - DNA, 25 bp, Homo sapien
tctggaatccgcactgaaggaatca

SEQ ID NO: 4584735 - DNA, 25 bp, Homo sapien
aaccagatagccttcatcgcacatc

SEQ ID NO: 4584736 - DNA, 25 bp, Homo sapien
agaaaccagatagccttcatcgcac

SEQ ID NO: 4584737 - DNA, 25 bp, Homo sapien
gatagccttcatcgcacatcttcac

SEQ ID NO: 4584738 - DNA, 25 bp, Homo sapien
cctagaaaccagatagccttcatcg

SEQ ID NO: 4584739 - DNA, 25 bp, Homo sapien
cgaagtagtggccaacagagctgct

SEQ ID NO: 4584740 - DNA, 25 bp, Homo sapien
gggcacctacaaacgaagtagtggc

SEQ ID NO: 4584741 - DNA, 25 bp, Homo sapien
caaacgaagtagtggccaacagagc

SEQ ID NO: 4584742 - DNA, 25 bp, Homo sapien
cctacaaacgaagtagtggccaaca

SEQ ID NO: 4584743 - DNA, 25 bp, Homo sapien
tcagaaaaattaggccggtttcaca

SEQ ID NO: 4584744 - DNA, 25 bp, Homo sapien
ccggtttcacaatatggagtgtcct

SEQ ID NO: 4584745 - DNA, 25 bp, Homo sapien
aagtagaagtatgtgttggcaatcg

SEQ ID NO: 4584746 - DNA, 25 bp, Homo sapien
taaaagtagaagtatgtgttggcaa

SEQ ID NO: 4584747 - DNA, 25 bp, Homo sapien
caacagtattgcttcaggagagata

SEQ ID NO: 4584748 - DNA, 25 bp, Homo sapien
ttcaggagagatagcatttcacaga

SEQ ID NO: 4584749 - DNA, 25 bp, Homo sapien
gtcatccagccagatttaggttcaa

SEQ ID NO: 4584750 - DNA, 25 bp, Homo sapien
aagtcatccagccagatttaggttc

SEQ ID NO: 4584751 - DNA, 25 bp, Homo sapien
gcacagtatttgacagcttggaaag

SEQ ID NO: 4584752 - DNA, 25 bp, Homo sapien
cccacgactctcgtagttgcacagt

SEQ ID NO: 4584753 - DNA, 25 bp, Homo sapien
cctggaatttcccacgactctcgta

SEQ ID NO: 4584754 - DNA, 25 bp, Homo sapien
acagtatttgacagcttggaaagca

SEQ ID NO: 4584755 - DNA, 25 bp, Homo sapien
ctgactctaccagcataggtgtgtg

SEQ ID NO: 4584756 - DNA, 25 bp, Homo sapien
cataggtgtgtgattgtgccatttc

SEQ ID NO: 4584757 - DNA, 25 bp, Homo sapien
ccagcataggtgtgtgattgtgcca

SEQ ID NO: 4584758 - DNA, 25 bp, Homo sapien
tctaccagcataggtgtgtgattgt

SEQ ID NO: 4584759 - DNA, 25 bp, Homo sapien
cacccaaggaaaatagtattcttag

SEQ ID NO: 4584760 - DNA, 25 bp, Homo sapien
taactagcaaggaaattctcaattt

SEQ ID NO: 4584761 - DNA, 25 bp, Homo sapien
aactagcaaggaaattctcaatttc

SEQ ID NO: 4584762 - DNA, 25 bp, Homo sapien
ttaactagcaaggaaattctcaatt

SEQ ID NO: 4584763 - DNA, 25 bp, Homo sapien
caggttgtggtatctgtaggacgca

SEQ ID NO: 4584764 - DNA, 25 bp, Homo sapien
gacgttttgcttggacctgatccag

SEQ ID NO: 4584765 - DNA, 25 bp, Homo sapien
tctccttataggtatccacatccgg

SEQ ID NO: 4584766 - DNA, 25 bp, Homo sapien
gacgcactgcagatagtcctgagcc

SEQ ID NO: 4584767 - DNA, 25 bp, Homo sapien
gtggagagcaaagtcttgagctggc

SEQ ID NO: 4584768 - DNA, 25 bp, Homo sapien
tggagagcaaagtcttgagctggct

SEQ ID NO: 4584769 - DNA, 25 bp, Homo sapien
ctggtggagagcaaagtcttgagct

SEQ ID NO: 4584770 - DNA, 25 bp, Homo sapien
agagcaaagtcttgagctggctcac

SEQ ID NO: 4584771 - DNA, 25 bp, Homo sapien
caatgtgctgagaatgctcactgag

SEQ ID NO: 4584772 - DNA, 25 bp, Homo sapien
tgagcttgactgagttatgacacat

SEQ ID NO: 4584773 - DNA, 25 bp, Homo sapien
gctgagaatgctcactgagcttgac

SEQ ID NO: 4584774 - DNA, 25 bp, Homo sapien
gaatgctcactgagcttgactgagt

SEQ ID NO: 4584775 - DNA, 25 bp, Homo sapien
tagtcactttcgtgcgtaggctgtg

SEQ ID NO: 4584776 - DNA, 25 bp, Homo sapien
tcctcatcctgtgattaattcagct

SEQ ID NO: 4584777 - DNA, 25 bp, Homo sapien
tttcagagaagccacttcctcatcc

SEQ ID NO: 4584778 - DNA, 25 bp, Homo sapien
ggctgtgtttcatgtcatgtatgaa

SEQ ID NO: 4584779 - DNA, 25 bp, Homo sapien
tttatttcatgggttgtgcctttgg

SEQ ID NO: 4584780 - DNA, 25 bp, Homo sapien
ctaatacccaatacccaatgtcaca

SEQ ID NO: 4584781 - DNA, 25 bp, Homo sapien
ttatttatttcatgggttgtgcctt

SEQ ID NO: 4584782 - DNA, 25 bp, Homo sapien
tgtaaaaaagtcttcaccataacta

SEQ ID NO: 4584783 - DNA, 25 bp, Homo sapien
tagagtaacagcaagtgagccagtg

SEQ ID NO: 4584784 - DNA, 25 bp, Homo sapien
cggatcttcctatgaatgactatgg

SEQ ID NO: 4584785 - DNA, 25 bp, Homo sapien
agtgggagcaggcatgtaacatgac

SEQ ID NO: 4584786 - DNA, 25 bp, Homo sapien
aaaacattcttgagacatccgcccc

SEQ ID NO: 4584787 - DNA, 25 bp, Homo sapien
aaggaacaaactccggacacgctgc

SEQ ID NO: 4584788 - DNA, 25 bp, Homo sapien
gaaggaacaaactccggacacgctg

SEQ ID NO: 4584789 - DNA, 25 bp, Homo sapien
ggaacaaactccggacacgctgcct

SEQ ID NO: 4584790 - DNA, 25 bp, Homo sapien
acaaactccggacacgctgccttta

SEQ ID NO: 4584791 - DNA, 25 bp, Homo sapien
cctcggaagccctccattctgctga

SEQ ID NO: 4584792 - DNA, 25 bp, Homo sapien
cagaggtaagctcggggtacaggtc

SEQ ID NO: 4584793 - DNA, 25 bp, Homo sapien
ccctggtccaagtcttttcgtgtca

SEQ ID NO: 4584794 - DNA, 25 bp, Homo sapien
tggtccaagtcttttcgtgtcaggg

SEQ ID NO: 4584795 - DNA, 25 bp, Homo sapien
cgcttttcaaaatgatcagtttcac

SEQ ID NO: 4584796 - DNA, 25 bp, Homo sapien
ttcaaaatgatcagtttcaccattc

SEQ ID NO: 4584797 - DNA, 25 bp, Homo sapien
cttttcaaaatgatcagtttcacca

SEQ ID NO: 4584798 - DNA, 25 bp, Homo sapien
caaaatgatcagtttcaccattcat

SEQ ID NO: 4584799 - DNA, 25 bp, Homo sapien
tgggtacagtgcactactgcccaga

SEQ ID NO: 4584800 - DNA, 25 bp, Homo sapien
gacaccagtgggtacagtgcactac

SEQ ID NO: 4584801 - DNA, 25 bp, Homo sapien
gcaatggccatgatcccattactaa

SEQ ID NO: 4584802 - DNA, 25 bp, Homo sapien
agtgcaatggccatgatcccattac

SEQ ID NO: 4584803 - DNA, 25 bp, Homo sapien
ccattagccaaaattgggactacag

SEQ ID NO: 4584804 - DNA, 25 bp, Homo sapien
gtaatgatatgtgtgttaaatctca

SEQ ID NO: 4584805 - DNA, 25 bp, Homo sapien
ccttggacatattgaatggctgtga

SEQ ID NO: 4584806 - DNA, 25 bp, Homo sapien
ataactggaaacatggtgtcaccat

SEQ ID NO: 4584807 - DNA, 25 bp, Homo sapien
gtatgcgccctgagctcggactttg

SEQ ID NO: 4584808 - DNA, 25 bp, Homo sapien
taaagtgtcacgtacttcctgctcg

SEQ ID NO: 4584809 - DNA, 25 bp, Homo sapien
gaactgaccccgtgcttttggaaca

SEQ ID NO: 4584810 - DNA, 25 bp, Homo sapien
tgatgctcgtgagcccgaacgaagg

SEQ ID NO: 4584811 - DNA, 25 bp, Homo sapien
aagtctccgcggcacctcttaatcg

SEQ ID NO: 4584812 - DNA, 25 bp, Homo sapien
ctcttaatcgccttcccgtagctat

SEQ ID NO: 4584813 - DNA, 25 bp, Homo sapien
ccaagcccttaaagtctccgcggca

SEQ ID NO: 4584814 - DNA, 25 bp, Homo sapien
ctattggaggtagagaaaccgcggc

SEQ ID NO: 4584815 - DNA, 25 bp, Homo sapien
tatttaaaaacccctgcagttgcag

SEQ ID NO: 4584816 - DNA, 25 bp, Homo sapien
cctattgaatgttcctctgagcata

SEQ ID NO: 4584817 - DNA, 25 bp, Homo sapien
atttaaaaacccctgcagttgcagt

SEQ ID NO: 4584818 - DNA, 25 bp, Homo sapien
tgtaatcctattgaatgttcctctg

SEQ ID NO: 4584819 - DNA, 25 bp, Homo sapien
gatttttgtaagtactagatttctc

SEQ ID NO: 4584820 - DNA, 25 bp, Homo sapien
tttgtaagtactagatttctcagca

SEQ ID NO: 4584821 - DNA, 25 bp, Homo sapien
gtaatagaagttcgtagcattttgt

SEQ ID NO: 4584822 - DNA, 25 bp, Homo sapien
ctttacaaccattaagtaatagaag

SEQ ID NO: 4584823 - DNA, 25 bp, Homo sapien
cataggctgattgatgatcacttgt

SEQ ID NO: 4584824 - DNA, 25 bp, Homo sapien
tgatgatcacttgtatagactccat

SEQ ID NO: 4584825 - DNA, 25 bp, Homo sapien
gctgattgatgatcacttgtataga

SEQ ID NO: 4584826 - DNA, 25 bp, Homo sapien
gattgatgatcacttgtatagactc

SEQ ID NO: 4584827 - DNA, 25 bp, Homo sapien
cattcttgaaggtagacatttgctc

SEQ ID NO: 4584828 - DNA, 25 bp, Homo sapien
tctcactttgactgttaatgttaat

SEQ ID NO: 4584829 - DNA, 25 bp, Homo sapien
atggatagtatttatctgcaaaaca

SEQ ID NO: 4584830 - DNA, 25 bp, Homo sapien
tatctgtcccacttgcaatggatag

SEQ ID NO: 4584831 - DNA, 25 bp, Homo sapien
tgtgtagattttgccgtaacaaaag

SEQ ID NO: 4584832 - DNA, 25 bp, Homo sapien
tgtggtcaacgtaaatattctagtc

SEQ ID NO: 4584833 - DNA, 25 bp, Homo sapien
caaaagaatattctgtgtggtcaac

SEQ ID NO: 4584834 - DNA, 25 bp, Homo sapien
gtcccatctagcatattgtgataaa

SEQ ID NO: 4584835 - DNA, 25 bp, Homo sapien
ggaccgatgtctcccctcaaagaat

SEQ ID NO: 4584836 - DNA, 25 bp, Homo sapien
tcagtatggctgaatcatggagtac

SEQ ID NO: 4584837 - DNA, 25 bp, Homo sapien
cagggaaactgcaagtccttcagta

SEQ ID NO: 4584838 - DNA, 25 bp, Homo sapien
caacttatacaagagcccagaggca

SEQ ID NO: 4584839 - DNA, 25 bp, Homo sapien
ttggatgcaatgtgtgaagcatgga

SEQ ID NO: 4584840 - DNA, 25 bp, Homo sapien
cagagggaacaccattagattttca

SEQ ID NO: 4584841 - DNA, 25 bp, Homo sapien
ggaattctaaacatcagagggaaca

SEQ ID NO: 4584842 - DNA, 25 bp, Homo sapien
ttcacttaaggcagatgattggatg

SEQ ID NO: 4584843 - DNA, 25 bp, Homo sapien
tagtcgactatgttaccagtaaagc

SEQ ID NO: 4584844 - DNA, 25 bp, Homo sapien
tggttagttggaaagtagttgcagc

SEQ ID NO: 4584845 - DNA, 25 bp, Homo sapien
ggcatcctttaagagtcaactgtac

SEQ ID NO: 4584846 - DNA, 25 bp, Homo sapien
gggtctgcatgcctaaatctggcat

SEQ ID NO: 4584847 - DNA, 25 bp, Homo sapien
gcaaacctgcgtttgtagataggaa

SEQ ID NO: 4584848 - DNA, 25 bp, Homo sapien
cgttactcagatgtacacaattgct

SEQ ID NO: 4584849 - DNA, 25 bp, Homo sapien
gaggactttctctagggcaaacctg

SEQ ID NO: 4584850 - DNA, 25 bp, Homo sapien
tactgtggtgtacaccgttactcag

SEQ ID NO: 4584851 - DNA, 25 bp, Homo sapien
cattgggaatgtagagcagtgtatc

SEQ ID NO: 4584852 - DNA, 25 bp, Homo sapien
gatttgaactcctgctggaatacaa

SEQ ID NO: 4584853 - DNA, 25 bp, Homo sapien
cctttagggcacaactagttatcag

SEQ ID NO: 4584854 - DNA, 25 bp, Homo sapien
gagggcttttataacaaacgtgcag

SEQ ID NO: 4584855 - DNA, 25 bp, Homo sapien
tctccaacagctaagggactgccag

SEQ ID NO: 4584856 - DNA, 25 bp, Homo sapien
agattttatgtttcccctgtgccgg

SEQ ID NO: 4584857 - DNA, 25 bp, Homo sapien
tgcactgtcaggatggttaacccca

SEQ ID NO: 4584858 - DNA, 25 bp, Homo sapien
gaggaactgcttccaccagggaata

SEQ ID NO: 4584859 - DNA, 25 bp, Homo sapien
cttagcttgccagaaacgagttgag

SEQ ID NO: 4584860 - DNA, 25 bp, Homo sapien
cagattgtatttccctaagtgaccc

SEQ ID NO: 4584861 - DNA, 25 bp, Homo sapien
gcataatgcaacaactgaagcctga

SEQ ID NO: 4584862 - DNA, 25 bp, Homo sapien
taagtcctgggttgtggctaccttc

SEQ ID NO: 4584863 - DNA, 25 bp, Homo sapien
tgagtgttcctctgaccaagtggtt

SEQ ID NO: 4584864 - DNA, 25 bp, Homo sapien
tacattctgtacgtaggtctggagg

SEQ ID NO: 4584865 - DNA, 25 bp, Homo sapien
tggtagacgccatatcccttgaggt

SEQ ID NO: 4584866 - DNA, 25 bp, Homo sapien
gatgacaactggatagcccctgaaa

SEQ ID NO: 4584867 - DNA, 25 bp, Homo sapien
tgcatttaaaggaccgagagtctcc

SEQ ID NO: 4584868 - DNA, 25 bp, Homo sapien
tggcagggaacacacggatgcatcc

SEQ ID NO: 4584869 - DNA, 25 bp, Homo sapien
gcattccacgctggtgctcgaggga

SEQ ID NO: 4584870 - DNA, 25 bp, Homo sapien
tggaagcagcccatatcctgtgcgt

SEQ ID NO: 4584871 - DNA, 25 bp, Homo sapien
tgatcatcacgacaaggaagaggca

SEQ ID NO: 4584872 - DNA, 25 bp, Homo sapien
tacgtcgacatagacgggctcgggc

SEQ ID NO: 4584873 - DNA, 25 bp, Homo sapien
tccgcctcgggtttgactggtacca

SEQ ID NO: 4584874 - DNA, 25 bp, Homo sapien
gaagacgaagcaggccaaggtcagc

SEQ ID NO: 4584875 - DNA, 25 bp, Homo sapien
gagactcctgctgacgccagcacat

SEQ ID NO: 4584876 - DNA, 25 bp, Homo sapien
agagactcctgctgacgccagcaca

SEQ ID NO: 4584877 - DNA, 25 bp, Homo sapien
gactcctgctgacgccagcacatgg

SEQ ID NO: 4584878 - DNA, 25 bp, Homo sapien
tagagactcctgctgacgccagcac

SEQ ID NO: 4584879 - DNA, 25 bp, Homo sapien
gactggagtggtcaccacttcataa

SEQ ID NO: 4584880 - DNA, 25 bp, Homo sapien
acgaggagcggtcaggcatcatggg

SEQ ID NO: 4584881 - DNA, 25 bp, Homo sapien
acttcataaggaccctggctgttcc

SEQ ID NO: 4584882 - DNA, 25 bp, Homo sapien
gttccaggaggcacgaggagcggtc

SEQ ID NO: 4584883 - DNA, 25 bp, Homo sapien
agtggcctttcactgagagcaggca

SEQ ID NO: 4584884 - DNA, 25 bp, Homo sapien
gcactgtgctggctcgtgggggcgc

SEQ ID NO: 4584885 - DNA, 25 bp, Homo sapien
tgtgctggctcgtgggggcgctgga

SEQ ID NO: 4584886 - DNA, 25 bp, Homo sapien
tggcctttcactgagagcaggcact

SEQ ID NO: 4584887 - DNA, 25 bp, Homo sapien
tgtccttcaggaagaggtcatgtga

SEQ ID NO: 4584888 - DNA, 25 bp, Homo sapien
tgtaaaacattgcagtagctcaggg

SEQ ID NO: 4584889 - DNA, 25 bp, Homo sapien
gtgaataatattccccaaggtcttg

SEQ ID NO: 4584890 - DNA, 25 bp, Homo sapien
caaggtcttgtctcccttgaaggga

SEQ ID NO: 4584891 - DNA, 25 bp, Homo sapien
ccactttggacatccacaaaacctc

SEQ ID NO: 4584892 - DNA, 25 bp, Homo sapien
cactttggacatccacaaaacctct

SEQ ID NO: 4584893 - DNA, 25 bp, Homo sapien
ctttggacatccacaaaacctctag

SEQ ID NO: 4584894 - DNA, 25 bp, Homo sapien
caccatcattagtgtggtatgcact

SEQ ID NO: 4584895 - DNA, 25 bp, Homo sapien
taggcgaatgagtgaccctcaaaga

SEQ ID NO: 4584896 - DNA, 25 bp, Homo sapien
tgaccctcaaagaaagtggccgctg

SEQ ID NO: 4584897 - DNA, 25 bp, Homo sapien
ccctcaaagaaagtggccgctgggc

SEQ ID NO: 4584898 - DNA, 25 bp, Homo sapien
ctaggcgaatgagtgaccctcaaag

SEQ ID NO: 4584899 - DNA, 25 bp, Homo sapien
taggacacgatgaagaatccaaaca

SEQ ID NO: 4584900 - DNA, 25 bp, Homo sapien
gcagatccaagtggaaaagagtcct

SEQ ID NO: 4584901 - DNA, 25 bp, Homo sapien
ctgtgagaaagccataggacacgat

SEQ ID NO: 4584902 - DNA, 25 bp, Homo sapien
gtacttgtcaaagcgtgaaggtgta

SEQ ID NO: 4584903 - DNA, 25 bp, Homo sapien
gcccacacctgttaggccggctcac

SEQ ID NO: 4584904 - DNA, 25 bp, Homo sapien
ggcccacacctgttaggccggctca

SEQ ID NO: 4584905 - DNA, 25 bp, Homo sapien
aggcccacacctgttaggccggctc

SEQ ID NO: 4584906 - DNA, 25 bp, Homo sapien
agtaaatgccagaaggtgagagcca

SEQ ID NO: 4584907 - DNA, 25 bp, Homo sapien
ccagaaggtgagagccagttcctgg

SEQ ID NO: 4584908 - DNA, 25 bp, Homo sapien
gttcctggctggtgcccaccagctc

SEQ ID NO: 4584909 - DNA, 25 bp, Homo sapien
cagttcctggctggtgcccaccagc

SEQ ID NO: 4584910 - DNA, 25 bp, Homo sapien
aagggactgagagagcacgccactt

SEQ ID NO: 4584911 - DNA, 25 bp, Homo sapien
ctgaaaataggaagatgaagggact

SEQ ID NO: 4584912 - DNA, 25 bp, Homo sapien
atgaagggactgagagagcacgcca

SEQ ID NO: 4584913 - DNA, 25 bp, Homo sapien
gaaaataggaagatgaagggactga

SEQ ID NO: 4584914 - DNA, 25 bp, Homo sapien
ctgtggggataaacagtacgctgca

SEQ ID NO: 4584915 - DNA, 25 bp, Homo sapien
tggggataaacagtacgctgcagcg

SEQ ID NO: 4584916 - DNA, 25 bp, Homo sapien
ggataaacagtacgctgcagcgaca

SEQ ID NO: 4584917 - DNA, 25 bp, Homo sapien
gggataaacagtacgctgcagcgac

SEQ ID NO: 4584918 - DNA, 25 bp, Homo sapien
tataaattcactcagggtaagaaga

SEQ ID NO: 4584919 - DNA, 25 bp, Homo sapien
cagggtaagaagaatccgagttgac

SEQ ID NO: 4584920 - DNA, 25 bp, Homo sapien
gaccatgtgcaatcatcagctggtt

SEQ ID NO: 4584921 - DNA, 25 bp, Homo sapien
gaagaatccgagttgaccatgtgca

SEQ ID NO: 4584922 - DNA, 25 bp, Homo sapien
caatcacatcgttctgtgggactgc

SEQ ID NO: 4584923 - DNA, 25 bp, Homo sapien
gagaagatgttcagtgtcctaaccc

SEQ ID NO: 4584924 - DNA, 25 bp, Homo sapien
taccagaacaattaacaggcctgtc

SEQ ID NO: 4584925 - DNA, 25 bp, Homo sapien
tgggactgcacttggtggcctcact

SEQ ID NO: 4584926 - DNA, 25 bp, Homo sapien
ttggcccaagttgggctccagtcca

SEQ ID NO: 4584927 - DNA, 25 bp, Homo sapien
ccaagttgggctccagtccagcagc

SEQ ID NO: 4584928 - DNA, 25 bp, Homo sapien
gcagccagaccaaggccaagtccat

SEQ ID NO: 4584929 - DNA, 25 bp, Homo sapien
ggcccaagttgggctccagtccagc

SEQ ID NO: 4584930 - DNA, 25 bp, Homo sapien
ctatgaatctttctgtttcatccat

SEQ ID NO: 4584931 - DNA, 25 bp, Homo sapien
tgcttctatgaatctttctgtttca

SEQ ID NO: 4584932 - DNA, 25 bp, Homo sapien
gcttctatgaatctttctgtttcat

SEQ ID NO: 4584933 - DNA, 25 bp, Homo sapien
ttctatgaatctttctgtttcatcc

SEQ ID NO: 4584934 - DNA, 25 bp, Homo sapien
ggttgtttgacagcatttcacccac

SEQ ID NO: 4584935 - DNA, 25 bp, Homo sapien
gatttcttgcagcatgcagtgctgg

SEQ ID NO: 4584936 - DNA, 25 bp, Homo sapien
agggtcttgcctagtcgttgaaggc

SEQ ID NO: 4584937 - DNA, 25 bp, Homo sapien
ggctactaactaatcagggtggcgg

SEQ ID NO: 4584938 - DNA, 25 bp, Homo sapien
tgcatcgtggtcactctgagtgacc

SEQ ID NO: 4584939 - DNA, 25 bp, Homo sapien
cgtggtcactctgagtgaccgtccc

SEQ ID NO: 4584940 - DNA, 25 bp, Homo sapien
catcgtggtcactctgagtgaccgt

SEQ ID NO: 4584941 - DNA, 25 bp, Homo sapien
ctgcatcgtggtcactctgagtgac

SEQ ID NO: 4584942 - DNA, 25 bp, Homo sapien
tagctatagcagatgccttggacaa

SEQ ID NO: 4584943 - DNA, 25 bp, Homo sapien
gggcaggtagaaccttgcaatggta

SEQ ID NO: 4584944 - DNA, 25 bp, Homo sapien
caatggtagagtcttcacagggtgg

SEQ ID NO: 4584945 - DNA, 25 bp, Homo sapien
ggtggtgtcccagtagctatagcag

SEQ ID NO: 4584946 - DNA, 25 bp, Homo sapien
tcttttccatcacgccatcctaagg

SEQ ID NO: 4584947 - DNA, 25 bp, Homo sapien
tctaacgggacaagggcactaggag

SEQ ID NO: 4584948 - DNA, 25 bp, Homo sapien
gacagggatagaatgccattttggg

SEQ ID NO: 4584949 - DNA, 25 bp, Homo sapien
ggtctgtgggattctaacgggacaa

SEQ ID NO: 4584950 - DNA, 25 bp, Homo sapien
tgtggccctattgcacgcctggtga

SEQ ID NO: 4584951 - DNA, 25 bp, Homo sapien
tagaagacttcaactccagaccctc

SEQ ID NO: 4584952 - DNA, 25 bp, Homo sapien
gcagcacaggcttcgatggagcttt

SEQ ID NO: 4584953 - DNA, 25 bp, Homo sapien
tgcaggttcgcaaagaccacagatc

SEQ ID NO: 4584954 - DNA, 25 bp, Homo sapien
ggcgccgagcccagggcgaccgcgg

SEQ ID NO: 4584955 - DNA, 25 bp, Homo sapien
gcgaggcccgtcccgtgcgctcccg

SEQ ID NO: 4584956 - DNA, 25 bp, Homo sapien
gcggatcgccggctacggcgtttcc

SEQ ID NO: 4584957 - DNA, 25 bp, Homo sapien
agggcgaccgcggatcgccggctac

SEQ ID NO: 4584958 - DNA, 25 bp, Homo sapien
aaactacaactaagcaggagagccc

SEQ ID NO: 4584959 - DNA, 25 bp, Homo sapien
tatgcaggaagaaacgagtggtctc

SEQ ID NO: 4584960 - DNA, 25 bp, Homo sapien
gattgatgcggacaggcagacgcct

SEQ ID NO: 4584961 - DNA, 25 bp, Homo sapien
ccatggattccagacggtgcagcca

SEQ ID NO: 4584962 - DNA, 25 bp, Homo sapien
tagccttgtcatctgagtaccttgt

SEQ ID NO: 4584963 - DNA, 25 bp, Homo sapien
tgctgttagctctgatgtgggtcca

SEQ ID NO: 4584964 - DNA, 25 bp, Homo sapien
cagtgcagctttccccttagccttg

SEQ ID NO: 4584965 - DNA, 25 bp, Homo sapien
tctcactggtttatctgagccaggg

SEQ ID NO: 4584966 - DNA, 25 bp, Homo sapien
tgattgctcctcagtaagtcctgga

SEQ ID NO: 4584967 - DNA, 25 bp, Homo sapien
taacagatgtggaaccttacccaag

SEQ ID NO: 4584968 - DNA, 25 bp, Homo sapien
tcacggcactgattaggagcaagcc

SEQ ID NO: 4584969 - DNA, 25 bp, Homo sapien
tagccctgactggactggaagctcc

SEQ ID NO: 4584970 - DNA, 25 bp, Homo sapien
gcagggtgtcgatcccatgggacct

SEQ ID NO: 4584971 - DNA, 25 bp, Homo sapien
cagggtgtcgatcccatgggacctg

SEQ ID NO: 4584972 - DNA, 25 bp, Homo sapien
ccctggcagggtgtcgatcccatgg

SEQ ID NO: 4584973 - DNA, 25 bp, Homo sapien
tggcagggtgtcgatcccatgggac

SEQ ID NO: 4584974 - DNA, 25 bp, Homo sapien
tggagaactcactggcggcatcaga

SEQ ID NO: 4584975 - DNA, 25 bp, Homo sapien
gatgacttccctcggtctgtgcctg

SEQ ID NO: 4584976 - DNA, 25 bp, Homo sapien
tctgtagtgaccagctcggttggca

SEQ ID NO: 4584977 - DNA, 25 bp, Homo sapien
tatcagcatcgtgtgagcccagctc

SEQ ID NO: 4584978 - DNA, 25 bp, Homo sapien
aatccaatatctgcagggagctgcc

SEQ ID NO: 4584979 - DNA, 25 bp, Homo sapien
ttttcgcaaatctcccaaggctagg

SEQ ID NO: 4584980 - DNA, 25 bp, Homo sapien
ttcatgacattcaagcagggccagg

SEQ ID NO: 4584981 - DNA, 25 bp, Homo sapien
tcacagaggaccttggacacggact

SEQ ID NO: 4584982 - DNA, 25 bp, Homo sapien
tccgtggagtcagctggtgtttatc

SEQ ID NO: 4584983 - DNA, 25 bp, Homo sapien
tcttcatggacagttgctgccagca

SEQ ID NO: 4584984 - DNA, 25 bp, Homo sapien
tcgtgcttgttatctgccaggctcc

SEQ ID NO: 4584985 - DNA, 25 bp, Homo sapien
gagtctcttctgcatacccagtccg

SEQ ID NO: 4584986 - DNA, 25 bp, Homo sapien
aagcattcaactcggcttacaaata

SEQ ID NO: 4584987 - DNA, 25 bp, Homo sapien
ccacaaagcattcaactcggcttac

SEQ ID NO: 4584988 - DNA, 25 bp, Homo sapien
cattcaactcggcttacaaatatac

SEQ ID NO: 4584989 - DNA, 25 bp, Homo sapien
caaagcattcaactcggcttacaaa

SEQ ID NO: 4584990 - DNA, 25 bp, Homo sapien
atgaccctgagtcagctgcaggtat

SEQ ID NO: 4584991 - DNA, 25 bp, Homo sapien
cctgagtcagctgcaggtatgaagc

SEQ ID NO: 4584992 - DNA, 25 bp, Homo sapien
catgaccctgagtcagctgcaggta

SEQ ID NO: 4584993 - DNA, 25 bp, Homo sapien
gagtcagctgcaggtatgaagcagc

SEQ ID NO: 4584994 - DNA, 25 bp, Homo sapien
acaactgattgtaacttgaaaatac

SEQ ID NO: 4584995 - DNA, 25 bp, Homo sapien
tacaactgattgtaacttgaaaata

SEQ ID NO: 4584996 - DNA, 25 bp, Homo sapien
ttctgagcactgtttgaaacttcat

SEQ ID NO: 4584997 - DNA, 25 bp, Homo sapien
acccatcggtggctgtcttagaaac

SEQ ID NO: 4584998 - DNA, 25 bp, Homo sapien
gaagggttagcgagaatgctagcca

SEQ ID NO: 4584999 - DNA, 25 bp, Homo sapien
tgtgaatacgaggaggtaggaccca

SEQ ID NO: 4585000 - DNA, 25 bp, Homo sapien
tgggtgtctcacgatgctgcaatga

SEQ ID NO: 4585001 - DNA, 25 bp, Homo sapien
gaaatgcaagtcgatgacgaggaca

SEQ ID NO: 4585002 - DNA, 25 bp, Homo sapien
caagtcgatgacgaggacagggaaa

SEQ ID NO: 4585003 - DNA, 25 bp, Homo sapien
cttggcccagatttggaaatgcaag

SEQ ID NO: 4585004 - DNA, 25 bp, Homo sapien
tttggaaatgcaagtcgatgacgag

SEQ ID NO: 4585005 - DNA, 25 bp, Homo sapien
gagagtcgtcaagcgtcgggtatca

SEQ ID NO: 4585006 - DNA, 25 bp, Homo sapien
ttgtagctgcccagccggcaaggta

SEQ ID NO: 4585007 - DNA, 25 bp, Homo sapien
caaggtaggcgctgagaggtgcggc

SEQ ID NO: 4585008 - DNA, 25 bp, Homo sapien
agcccatgcaagaagccctcggatt

SEQ ID NO: 4585009 - DNA, 25 bp, Homo sapien
cagcagtgatctcgaggctcccaga

SEQ ID NO: 4585010 - DNA, 25 bp, Homo sapien
ccgggcagcagtgatctcgaggctc

SEQ ID NO: 4585011 - DNA, 25 bp, Homo sapien
ggacactatgaccgggcagcagtga

SEQ ID NO: 4585012 - DNA, 25 bp, Homo sapien
ccatcgttggggacactatgaccgg

SEQ ID NO: 4585013 - DNA, 25 bp, Homo sapien
tagagcgtgacccagtttccaaaag

SEQ ID NO: 4585014 - DNA, 25 bp, Homo sapien
gagccacggcatgaatacacctaca

SEQ ID NO: 4585015 - DNA, 25 bp, Homo sapien
ttcacactggtaccttcaaggagag

SEQ ID NO: 4585016 - DNA, 25 bp, Homo sapien
tgcacaaagttagcctcggagaggt

SEQ ID NO: 4585017 - DNA, 25 bp, Homo sapien
tgtgtccatctttcttgtgcttttt

SEQ ID NO: 4585018 - DNA, 25 bp, Homo sapien
cttgcttcaacctctttatagagaa

SEQ ID NO: 4585019 - DNA, 25 bp, Homo sapien
gactttaagactctgccatgtgtcc

SEQ ID NO: 4585020 - DNA, 25 bp, Homo sapien
ctctttatagagaaggcattcatag

SEQ ID NO: 4585021 - DNA, 25 bp, Homo sapien
tcggaggaaggcctcttccttctgt

SEQ ID NO: 4585022 - DNA, 25 bp, Homo sapien
cctcttccttctgtgttgctggctc

SEQ ID NO: 4585023 - DNA, 25 bp, Homo sapien
ttcggaggaaggcctcttccttctg

SEQ ID NO: 4585024 - DNA, 25 bp, Homo sapien
cttccttctgtgttgctggctcatc

SEQ ID NO: 4585025 - DNA, 25 bp, Homo sapien
tctgggattgggactttgcttcggc

SEQ ID NO: 4585026 - DNA, 25 bp, Homo sapien
gtctctgaaggatttctaagcctcc

SEQ ID NO: 4585027 - DNA, 25 bp, Homo sapien
tgtgactcagtagctagggcctgtc

SEQ ID NO: 4585028 - DNA, 25 bp, Homo sapien
tttcagttgtaggtgtgccccagcc

SEQ ID NO: 4585029 - DNA, 25 bp, Homo sapien
gcactacaggaaggatacaatagca

SEQ ID NO: 4585030 - DNA, 25 bp, Homo sapien
gcagttggggagaggaataacttcc

SEQ ID NO: 4585031 - DNA, 25 bp, Homo sapien
ccatttgtggctgcatacataatta

SEQ ID NO: 4585032 - DNA, 25 bp, Homo sapien
actgcaagtattactgattccctca

SEQ ID NO: 4585033 - DNA, 25 bp, Homo sapien
tgccacgggcacactcactaaggtg

SEQ ID NO: 4585034 - DNA, 25 bp, Homo sapien
tacttccgcaagtttatgccacggg

SEQ ID NO: 4585035 - DNA, 25 bp, Homo sapien
tctgatcggcaaaggtcaaaaaggt

SEQ ID NO: 4585036 - DNA, 25 bp, Homo sapien
ttgaagcaaacgttcaccagtaggg

SEQ ID NO: 4585037 - DNA, 25 bp, Homo sapien
tttcagtgtccagtcaggcatgagg

SEQ ID NO: 4585038 - DNA, 25 bp, Homo sapien
ttgttctatcgcctcatctcttcac

SEQ ID NO: 4585039 - DNA, 25 bp, Homo sapien
tttttcagtgtccagtcaggcatga

SEQ ID NO: 4585040 - DNA, 25 bp, Homo sapien
tcttttgttctatcgcctcatctct

SEQ ID NO: 4585041 - DNA, 25 bp, Homo sapien
ttgcagataattggaagccaatgag

SEQ ID NO: 4585042 - DNA, 25 bp, Homo sapien
gcccattgaagatgctaaagtgtga

SEQ ID NO: 4585043 - DNA, 25 bp, Homo sapien
aagatgctaaagtgtgatgatttgc

SEQ ID NO: 4585044 - DNA, 25 bp, Homo sapien
gatcccagggcccattgaagatgct

SEQ ID NO: 4585045 - DNA, 25 bp, Homo sapien
ctactggatatggaaactaaactca

SEQ ID NO: 4585046 - DNA, 25 bp, Homo sapien
gaagtaaagatttgttgcatcaggt

SEQ ID NO: 4585047 - DNA, 25 bp, Homo sapien
gtaaagatttgttgcatcaggtgct

SEQ ID NO: 4585048 - DNA, 25 bp, Homo sapien
catcattgctgctctactggatatg

SEQ ID NO: 4585049 - DNA, 25 bp, Homo sapien
gcatgcgagcacaatacactctcct

SEQ ID NO: 4585050 - DNA, 25 bp, Homo sapien
acacacacgcatgcgagcacaatac

SEQ ID NO: 4585051 - DNA, 25 bp, Homo sapien
gcgagcacaatacactctccttctg

SEQ ID NO: 4585052 - DNA, 25 bp, Homo sapien
aatacactctccttctgtctgaatt

SEQ ID NO: 4585053 - DNA, 25 bp, Homo sapien
tcatcacatatttgccttctgcttg

SEQ ID NO: 4585054 - DNA, 25 bp, Homo sapien
tcagacacatatttgataagggaat

SEQ ID NO: 4585055 - DNA, 25 bp, Homo sapien
atcacatatttgccttctgcttgaa

SEQ ID NO: 4585056 - DNA, 25 bp, Homo sapien
catcacatatttgccttctgcttga

SEQ ID NO: 4585057 - DNA, 25 bp, Homo sapien
gccgtaataaactgataagtctcct

SEQ ID NO: 4585058 - DNA, 25 bp, Homo sapien
ggacatcttggtcaagccgtaataa

SEQ ID NO: 4585059 - DNA, 25 bp, Homo sapien
ctcacactatgcagagggaaagcag

SEQ ID NO: 4585060 - DNA, 25 bp, Homo sapien
gacactttgtactactcaggtttag

SEQ ID NO: 4585061 - DNA, 25 bp, Homo sapien
gctgccatgtcttacaccggagatg

SEQ ID NO: 4585062 - DNA, 25 bp, Homo sapien
ctgccatgggttgcccttctgggca

SEQ ID NO: 4585063 - DNA, 25 bp, Homo sapien
atgggttcagctgccatgtcttaca

SEQ ID NO: 4585064 - DNA, 25 bp, Homo sapien
gcatggcctgctgccatgggttgcc

SEQ ID NO: 4585065 - DNA, 25 bp, Homo sapien
gcctttgggactcctatagtatctc

SEQ ID NO: 4585066 - DNA, 25 bp, Homo sapien
catggtagaagcactgacctgcctt

SEQ ID NO: 4585067 - DNA, 25 bp, Homo sapien
gctgtgtctgcttattaggccctaa

SEQ ID NO: 4585068 - DNA, 25 bp, Homo sapien
cctaaaaatgggtgctatcgtgacc

SEQ ID NO: 4585069 - DNA, 25 bp, Homo sapien
tctttgaatagctcttgtacacata

SEQ ID NO: 4585070 - DNA, 25 bp, Homo sapien
acaacagaactacaagctcataaat

SEQ ID NO: 4585071 - DNA, 25 bp, Homo sapien
taattattgaagcaattatgagagg

SEQ ID NO: 4585072 - DNA, 25 bp, Homo sapien
agcaattatgagaggaaatctgagg

SEQ ID NO: 4585073 - DNA, 25 bp, Homo sapien
cagcatgcacaatcctgattttaga

SEQ ID NO: 4585074 - DNA, 25 bp, Homo sapien
ttaggccacagatttaaggaaccat

SEQ ID NO: 4585075 - DNA, 25 bp, Homo sapien
ccatatgggaatgacttgcaattca

SEQ ID NO: 4585076 - DNA, 25 bp, Homo sapien
tcatcatgctcccaaaggttatcca

SEQ ID NO: 4585077 - DNA, 25 bp, Homo sapien
tattcagttgcccattaagtgggaa

SEQ ID NO: 4585078 - DNA, 25 bp, Homo sapien
gatgatgtgacatgtgataacagcc

SEQ ID NO: 4585079 - DNA, 25 bp, Homo sapien
cagagaagacaacatttattggcac

SEQ ID NO: 4585080 - DNA, 25 bp, Homo sapien
tgtcattaaggagccccaggtcaca

SEQ ID NO: 4585081 - DNA, 25 bp, Homo sapien
gtccagctcctgttatactgatgag

SEQ ID NO: 4585082 - DNA, 25 bp, Homo sapien
cctttgcagcaaagacgtgcccggg

SEQ ID NO: 4585083 - DNA, 25 bp, Homo sapien
ggcctcacgtaaacagccagccttg

SEQ ID NO: 4585084 - DNA, 25 bp, Homo sapien
tatttaaccttacaccttctgaggc

SEQ ID NO: 4585085 - DNA, 25 bp, Homo sapien
gggagaagagctgtgcgatggtctc

SEQ ID NO: 4585086 - DNA, 25 bp, Homo sapien
agaagagctgtgcgatggtctccat

SEQ ID NO: 4585087 - DNA, 25 bp, Homo sapien
gagaagagctgtgcgatggtctcca

SEQ ID NO: 4585088 - DNA, 25 bp, Homo sapien
gaagagctgtgcgatggtctccatg

SEQ ID NO: 4585089 - DNA, 25 bp, Homo sapien
tgtcttaatagaccagcacagcagt

SEQ ID NO: 4585090 - DNA, 25 bp, Homo sapien
tcagcattttccgagagcaaccatc

SEQ ID NO: 4585091 - DNA, 25 bp, Homo sapien
tggcagcttttctctatgacacaga

SEQ ID NO: 4585092 - DNA, 25 bp, Homo sapien
ctcagctttgggtattaggcatgtc

SEQ ID NO: 4585093 - DNA, 25 bp, Homo sapien
cagagcgggggacaacacacacaag

SEQ ID NO: 4585094 - DNA, 25 bp, Homo sapien
ttgagaactcatggacgcagagcgg

SEQ ID NO: 4585095 - DNA, 25 bp, Homo sapien
attgagaactcatggacgcagagcg

SEQ ID NO: 4585096 - DNA, 25 bp, Homo sapien
acgcagagcgggggacaacacacac

SEQ ID NO: 4585097 - DNA, 25 bp, Homo sapien
tcagaaaccatcatgccaactcagg

SEQ ID NO: 4585098 - DNA, 25 bp, Homo sapien
gaacaacctctgagacatgtcacac

SEQ ID NO: 4585099 - DNA, 25 bp, Homo sapien
acttaggtaccaggaacaaaagcag

SEQ ID NO: 4585100 - DNA, 25 bp, Homo sapien
tttgagccctgtgagtaggatgact

SEQ ID NO: 4585101 - DNA, 25 bp, Homo sapien
tacttgctaagacgtccagataatc

SEQ ID NO: 4585102 - DNA, 25 bp, Homo sapien
ttttcaattacgcaggtggcttcca

SEQ ID NO: 4585103 - DNA, 25 bp, Homo sapien
aacgtgttagcttttgcagggagac

SEQ ID NO: 4585104 - DNA, 25 bp, Homo sapien
gctctatgtatgctgccatggaaga

SEQ ID NO: 4585105 - DNA, 25 bp, Homo sapien
tgtgtgcagcgcgaaagaatgacac

SEQ ID NO: 4585106 - DNA, 25 bp, Homo sapien
tggaggaaggtgtgtgcagcgcgaa

SEQ ID NO: 4585107 - DNA, 25 bp, Homo sapien
ctgtcaggagcgatgtatcttcacc

SEQ ID NO: 4585108 - DNA, 25 bp, Homo sapien
tgtatcttcaccacgtggaggaagg

SEQ ID NO: 4585109 - DNA, 25 bp, Homo sapien
ttatgggccaccagagattgaactg

SEQ ID NO: 4585110 - DNA, 25 bp, Homo sapien
gactctgggtagcagaaatatctga

SEQ ID NO: 4585111 - DNA, 25 bp, Homo sapien
gatatcagccgagtaacatttagaa

SEQ ID NO: 4585112 - DNA, 25 bp, Homo sapien
cacgtgtcgcctgtcttttattgca

SEQ ID NO: 4585113 - DNA, 25 bp, Homo sapien
cagggatcctagtgtctggtagaaa

SEQ ID NO: 4585114 - DNA, 25 bp, Homo sapien
aaacaacagctccaagttctctgca

SEQ ID NO: 4585115 - DNA, 25 bp, Homo sapien
gatcctagtgtctggtagaaaacaa

SEQ ID NO: 4585116 - DNA, 25 bp, Homo sapien
ctctctcagggatcctagtgtctgg

SEQ ID NO: 4585117 - DNA, 25 bp, Homo sapien
atcccacgcatttttctcttccggt

SEQ ID NO: 4585118 - DNA, 25 bp, Homo sapien
catcctcgggaacccgaagggcagg

SEQ ID NO: 4585119 - DNA, 25 bp, Homo sapien
tccggtcccggcttttgtggcatca

SEQ ID NO: 4585120 - DNA, 25 bp, Homo sapien
atcacggcgtcagccagtcctggct

SEQ ID NO: 4585121 - DNA, 25 bp, Homo sapien
gaagagaaacgtgaacatctaagct

SEQ ID NO: 4585122 - DNA, 25 bp, Homo sapien
tgaacatctaagctagtacaaactt

SEQ ID NO: 4585123 - DNA, 25 bp, Homo sapien
gaaacgtgaacatctaagctagtac

SEQ ID NO: 4585124 - DNA, 25 bp, Homo sapien
tgggagaagagaaacgtgaacatct

SEQ ID NO: 4585125 - DNA, 25 bp, Homo sapien
ttattgccccatgtgaatctccatc

SEQ ID NO: 4585126 - DNA, 25 bp, Homo sapien
tcccctgaggatgatccgtggggat

SEQ ID NO: 4585127 - DNA, 25 bp, Homo sapien
atgtgttattattgccccatgtgaa

SEQ ID NO: 4585128 - DNA, 25 bp, Homo sapien
ttattattgccccatgtgaatctcc

SEQ ID NO: 4585129 - DNA, 25 bp, Homo sapien
ggtgatgttggggtcttcacgctca

SEQ ID NO: 4585130 - DNA, 25 bp, Homo sapien
catttacaatgacactcttctgtga

SEQ ID NO: 4585131 - DNA, 25 bp, Homo sapien
ggattctctagggtcttgttggtga

SEQ ID NO: 4585132 - DNA, 25 bp, Homo sapien
tcacaacagcagaaccatttacaat

SEQ ID NO: 4585133 - DNA, 25 bp, Homo sapien
cacggatttgcctgatcccaagtgt

SEQ ID NO: 4585134 - DNA, 25 bp, Homo sapien
acacacggatttgcctgatcccaag

SEQ ID NO: 4585135 - DNA, 25 bp, Homo sapien
ctaacacacggatttgcctgatccc

SEQ ID NO: 4585136 - DNA, 25 bp, Homo sapien
cggatttgcctgatcccaagtgtac

SEQ ID NO: 4585137 - DNA, 25 bp, Homo sapien
gtcacactggctttccctgggtgat

SEQ ID NO: 4585138 - DNA, 25 bp, Homo sapien
cttctttccactgtcacactggctt

SEQ ID NO: 4585139 - DNA, 25 bp, Homo sapien
tctttccactgtcacactggctttc

SEQ ID NO: 4585140 - DNA, 25 bp, Homo sapien
ctgtcacactggctttccctgggtg

SEQ ID NO: 4585141 - DNA, 25 bp, Homo sapien
gggataataggccatatctgcccac

SEQ ID NO: 4585142 - DNA, 25 bp, Homo sapien
catgcttgtgcaaacttgggataat

SEQ ID NO: 4585143 - DNA, 25 bp, Homo sapien
caaacttgggataataggccatatc

SEQ ID NO: 4585144 - DNA, 25 bp, Homo sapien
tcatgaacatgcttgtgcaaacttg

SEQ ID NO: 4585145 - DNA, 25 bp, Homo sapien
tttttgttttatcgaagagctgctc

SEQ ID NO: 4585146 - DNA, 25 bp, Homo sapien
tgtggccaagtcttggcacactggt

SEQ ID NO: 4585147 - DNA, 25 bp, Homo sapien
ctggtttttgttttatcgaagagct

SEQ ID NO: 4585148 - DNA, 25 bp, Homo sapien
ttgttttatcgaagagctgctcaca

SEQ ID NO: 4585149 - DNA, 25 bp, Homo sapien
ccttttggtgctgagggtgggcttt

SEQ ID NO: 4585150 - DNA, 25 bp, Homo sapien
cccttttggtgctgagggtgggctt

SEQ ID NO: 4585151 - DNA, 25 bp, Homo sapien
gctgcaaagattaagggcctactgt

SEQ ID NO: 4585152 - DNA, 25 bp, Homo sapien
atgaaatagtgcacccgcaccagcc

SEQ ID NO: 4585153 - DNA, 25 bp, Homo sapien
cctactgtcaataggtaaaaatgca

SEQ ID NO: 4585154 - DNA, 25 bp, Homo sapien
tccacggagaattgatgctgctgtc

SEQ ID NO: 4585155 - DNA, 25 bp, Homo sapien
tataggattagacgaaaagggcatg

SEQ ID NO: 4585156 - DNA, 25 bp, Homo sapien
cacactgggcatctatggacttgag

SEQ ID NO: 4585157 - DNA, 25 bp, Homo sapien
gaataacggaattgcctttgctgcg

SEQ ID NO: 4585158 - DNA, 25 bp, Homo sapien
cctagaaacttgaagccggaagcaa

SEQ ID NO: 4585159 - DNA, 25 bp, Homo sapien
catcttacgaggtctggactctgat

SEQ ID NO: 4585160 - DNA, 25 bp, Homo sapien
cggtaggtgaagtctcaacatctta

SEQ ID NO: 4585161 - DNA, 25 bp, Homo sapien
cttggattgatgcttcatcagcctg

SEQ ID NO: 4585162 - DNA, 25 bp, Homo sapien
gaagtctcaacatcttacgaggtct

SEQ ID NO: 4585163 - DNA, 25 bp, Homo sapien
gctgggatctgagcagtcaccaagg

SEQ ID NO: 4585164 - DNA, 25 bp, Homo sapien
tcaaagaaggcgacaaggaaagcat

SEQ ID NO: 4585165 - DNA, 25 bp, Homo sapien
gaaagcatggccatcactgaagggt

SEQ ID NO: 4585166 - DNA, 25 bp, Homo sapien
caaggcttctgggaacgccgttctg

SEQ ID NO: 4585167 - DNA, 25 bp, Homo sapien
aggaaggatggtagctgctctcgtt

SEQ ID NO: 4585168 - DNA, 25 bp, Homo sapien
atcctccagatgattaaccatctgg

SEQ ID NO: 4585169 - DNA, 25 bp, Homo sapien
tgcttcatgacttgtgtgggccctg

SEQ ID NO: 4585170 - DNA, 25 bp, Homo sapien
accatctggtatcctggcgggggct

SEQ ID NO: 4585171 - DNA, 25 bp, Homo sapien
ctctcttatcccatttttgtcttct

SEQ ID NO: 4585172 - DNA, 25 bp, Homo sapien
cttctctcctcttttgtggcctcat

SEQ ID NO: 4585173 - DNA, 25 bp, Homo sapien
tcttctctcctcttttgtggcctca

SEQ ID NO: 4585174 - DNA, 25 bp, Homo sapien
ttgtcttctctcctcttttgtggcc

SEQ ID NO: 4585175 - DNA, 25 bp, Homo sapien
ctgccaggcacctggatgagttcac

SEQ ID NO: 4585176 - DNA, 25 bp, Homo sapien
ctattggattggagaagcagcagcg

SEQ ID NO: 4585177 - DNA, 25 bp, Homo sapien
gctgctgccaggcacctggatgagt

SEQ ID NO: 4585178 - DNA, 25 bp, Homo sapien
aggcagcgctgctgccaggcacctg

SEQ ID NO: 4585179 - DNA, 25 bp, Homo sapien
catcagcgaggaggaagttgttccc

SEQ ID NO: 4585180 - DNA, 25 bp, Homo sapien
tgagatttctgtgagtggtgcatgt

SEQ ID NO: 4585181 - DNA, 25 bp, Homo sapien
tctgtggtatgtgtatgagtagtgt

SEQ ID NO: 4585182 - DNA, 25 bp, Homo sapien
tttattgatgtgaatggtgtgtgca

SEQ ID NO: 4585183 - DNA, 25 bp, Homo sapien
catgtgtgtcgatgtgactgatgtg

SEQ ID NO: 4585184 - DNA, 25 bp, Homo sapien
gggagtgtgggttgtgtgagtggta

SEQ ID NO: 4585185 - DNA, 25 bp, Homo sapien
gtgttgtgtatgttgatgtgagtgg

SEQ ID NO: 4585186 - DNA, 25 bp, Homo sapien
tgtgtgagtgttgtgtatgttgatg

SEQ ID NO: 4585187 - DNA, 25 bp, Homo sapien
cctcacgtgggggatcgtgttacga

SEQ ID NO: 4585188 - DNA, 25 bp, Homo sapien
ggatcgtgttacgagtggggtgctg

SEQ ID NO: 4585189 - DNA, 25 bp, Homo sapien
atcgtgttacgagtggggtgctgag

SEQ ID NO: 4585190 - DNA, 25 bp, Homo sapien
cacagcctcacgtgggggatcgtgt

SEQ ID NO: 4585191 - DNA, 25 bp, Homo sapien
cccatggcggccaccggacaggtga

SEQ ID NO: 4585192 - DNA, 25 bp, Homo sapien
ctggatctgtgacgttgcccgttgc

SEQ ID NO: 4585193 - DNA, 25 bp, Homo sapien
gacaggtgaggatggcgggggccat

SEQ ID NO: 4585194 - DNA, 25 bp, Homo sapien
gtgacgttgcccgttgcccccatgg

SEQ ID NO: 4585195 - DNA, 25 bp, Homo sapien
cactcgctgggtgctgatacagcca

SEQ ID NO: 4585196 - DNA, 25 bp, Homo sapien
ctcgctgggtgctgatacagccact

SEQ ID NO: 4585197 - DNA, 25 bp, Homo sapien
ttgcactcgctgggtgctgatacag

SEQ ID NO: 4585198 - DNA, 25 bp, Homo sapien
gggtgctgatacagccacttctctc

SEQ ID NO: 4585199 - DNA, 25 bp, Homo sapien
catagtgaaatcgaaaggcgcagac

SEQ ID NO: 4585200 - DNA, 25 bp, Homo sapien
aggcgcagacggaacaagatgactc

SEQ ID NO: 4585201 - DNA, 25 bp, Homo sapien
catcacatcaccattggaaagcggg

SEQ ID NO: 4585202 - DNA, 25 bp, Homo sapien
cactcagctgttaggtgttagcccc

SEQ ID NO: 4585203 - DNA, 25 bp, Homo sapien
atgatcagcctatgaaagtgatggt

SEQ ID NO: 4585204 - DNA, 25 bp, Homo sapien
tgatcagcctatgaaagtgatggta

SEQ ID NO: 4585205 - DNA, 25 bp, Homo sapien
gaggcttagagtcagcagattgctc

SEQ ID NO: 4585206 - DNA, 25 bp, Homo sapien
aatctgctgcttagtggaggagcca

SEQ ID NO: 4585207 - DNA, 25 bp, Homo sapien
tagtagccgcgatcagagcacttag

SEQ ID NO: 4585208 - DNA, 25 bp, Homo sapien
tactacttattctagccctgtgaag

SEQ ID NO: 4585209 - DNA, 25 bp, Homo sapien
agccatatttttaacacctacacta

SEQ ID NO: 4585210 - DNA, 25 bp, Homo sapien
aagccatatttttaacacctacact

SEQ ID NO: 4585211 - DNA, 25 bp, Homo sapien
caaagccatatttttaacacctaca

SEQ ID NO: 4585212 - DNA, 25 bp, Homo sapien
gccatatttttaacacctacactag

SEQ ID NO: 4585213 - DNA, 25 bp, Homo sapien
tctcctatatgcaggaatccccagc

SEQ ID NO: 4585214 - DNA, 25 bp, Homo sapien
gcagcttaccttgcgatcagcctct

SEQ ID NO: 4585215 - DNA, 25 bp, Homo sapien
ttgccaactattccagccgggattc

SEQ ID NO: 4585216 - DNA, 25 bp, Homo sapien
tagaaaggttatgtgggatgcagct

SEQ ID NO: 4585217 - DNA, 25 bp, Homo sapien
gatatagttggaatggttgtcccct

SEQ ID NO: 4585218 - DNA, 25 bp, Homo sapien
ggcagatccctcactaatggcctgg

SEQ ID NO: 4585219 - DNA, 25 bp, Homo sapien
tataccctaggtcacttgtcttctg

SEQ ID NO: 4585220 - DNA, 25 bp, Homo sapien
gccctccctgtggaaatgagtaagt

SEQ ID NO: 4585221 - DNA, 25 bp, Homo sapien
taatgggtctcctttgtacatcaaa

SEQ ID NO: 4585222 - DNA, 25 bp, Homo sapien
cacagcttctggttgtgttggaaga

SEQ ID NO: 4585223 - DNA, 25 bp, Homo sapien
tcaaacccagaacaatatctgcttc

SEQ ID NO: 4585224 - DNA, 25 bp, Homo sapien
ttccacagcttctggttgtgttgga

SEQ ID NO: 4585225 - DNA, 25 bp, Homo sapien
ttgccatttggtagatgataaagca

SEQ ID NO: 4585226 - DNA, 25 bp, Homo sapien
tttggtagatgataaagcaagtgac

SEQ ID NO: 4585227 - DNA, 25 bp, Homo sapien
ggtagatgataaagcaagtgacaat

SEQ ID NO: 4585228 - DNA, 25 bp, Homo sapien
ccatttggtagatgataaagcaagt

SEQ ID NO: 4585229 - DNA, 25 bp, Homo sapien
taacatggccgtaaaaagatgccgt

SEQ ID NO: 4585230 - DNA, 25 bp, Homo sapien
ctaacatggccgtaaaaagatgccg

SEQ ID NO: 4585231 - DNA, 25 bp, Homo sapien
ctgtgaaggagacagacaggtgtca

SEQ ID NO: 4585232 - DNA, 25 bp, Homo sapien
tgtgaaggagacagacaggtgtcaa

SEQ ID NO: 4585233 - DNA, 25 bp, Homo sapien
tgaaggagacagacaggtgtcaaac

SEQ ID NO: 4585234 - DNA, 25 bp, Homo sapien
gtgaaggagacagacaggtgtcaaa

SEQ ID NO: 4585235 - DNA, 25 bp, Homo sapien
attgctgggtctttgtagagcgcca

SEQ ID NO: 4585236 - DNA, 25 bp, Homo sapien
ttgctgggtctttgtagagcgccat

SEQ ID NO: 4585237 - DNA, 25 bp, Homo sapien
aagactgggacggtcaagaaagaag

SEQ ID NO: 4585238 - DNA, 25 bp, Homo sapien
ggctcgcggcggtctttcatctgca

SEQ ID NO: 4585239 - DNA, 25 bp, Homo sapien
atgaggatgtgcatgggctcgcggc

SEQ ID NO: 4585240 - DNA, 25 bp, Homo sapien
ctctctctcttaggccggatcttgg

SEQ ID NO: 4585241 - DNA, 25 bp, Homo sapien
ttatctctcatccccacgctctcct

SEQ ID NO: 4585242 - DNA, 25 bp, Homo sapien
tgtttatctctcatccccacgctct

SEQ ID NO: 4585243 - DNA, 25 bp, Homo sapien
tccagctgtctggttgtccctagtg

SEQ ID NO: 4585244 - DNA, 25 bp, Homo sapien
gccatcagcagacttccagctgtct

SEQ ID NO: 4585245 - DNA, 25 bp, Homo sapien
tctccaaaggacagatgcatgcttt

SEQ ID NO: 4585246 - DNA, 25 bp, Homo sapien
cactttctaaaaggccctgtgagtg

SEQ ID NO: 4585247 - DNA, 25 bp, Homo sapien
gatgtgctccgaatagtcctctcca

SEQ ID NO: 4585248 - DNA, 25 bp, Homo sapien
cagctgatgtgctccgaatagtcct

SEQ ID NO: 4585249 - DNA, 25 bp, Homo sapien
agcaccaggcaggagggaccggctc

SEQ ID NO: 4585250 - DNA, 25 bp, Homo sapien
aacagaagcactgtgtggaggcagc

SEQ ID NO: 4585251 - DNA, 25 bp, Homo sapien
caggaacagaagcactgtgtggagg

SEQ ID NO: 4585252 - DNA, 25 bp, Homo sapien
caccaggcaggagggaccggctcca

SEQ ID NO: 4585253 - DNA, 25 bp, Homo sapien
ctgctggtagctgacacttcttgtt

SEQ ID NO: 4585254 - DNA, 25 bp, Homo sapien
tgctggtagctgacacttcttgttt

SEQ ID NO: 4585255 - DNA, 25 bp, Homo sapien
tggctgctcgtcagtgttggtgtca

SEQ ID NO: 4585256 - DNA, 25 bp, Homo sapien
caagaccctggtcacgtgagtggca

SEQ ID NO: 4585257 - DNA, 25 bp, Homo sapien
agtggcaatggccacaggttcactg

SEQ ID NO: 4585258 - DNA, 25 bp, Homo sapien
tcctttacaaatgctggcccttctg

SEQ ID NO: 4585259 - DNA, 25 bp, Homo sapien
gccatctgcgtgagagcttccagca

SEQ ID NO: 4585260 - DNA, 25 bp, Homo sapien
caatacaaagttaagagaccgggtg

SEQ ID NO: 4585261 - DNA, 25 bp, Homo sapien
taaagctgatgcatagtctgggcac

SEQ ID NO: 4585262 - DNA, 25 bp, Homo sapien
tagtcggaggaggtaggcatcatca

SEQ ID NO: 4585263 - DNA, 25 bp, Homo sapien
cctcgccctcctggtaaccccatgg

SEQ ID NO: 4585264 - DNA, 25 bp, Homo sapien
caggagccgtcttcagatcctgact

SEQ ID NO: 4585265 - DNA, 25 bp, Homo sapien
ctggtaaccccatggcatttcatct

SEQ ID NO: 4585266 - DNA, 25 bp, Homo sapien
aggagccgtcttcagatcctgactg

SEQ ID NO: 4585267 - DNA, 25 bp, Homo sapien
gcagcaccccatttcaccagaaggt

SEQ ID NO: 4585268 - DNA, 25 bp, Homo sapien
gatgcagcaccccatttcaccagaa

SEQ ID NO: 4585269 - DNA, 25 bp, Homo sapien
tcaccagaaggtagacggaggagtt

SEQ ID NO: 4585270 - DNA, 25 bp, Homo sapien
tagacggaggagttcccattgcaaa

SEQ ID NO: 4585271 - DNA, 25 bp, Homo sapien
ttttctccttacagccatgccctga

SEQ ID NO: 4585272 - DNA, 25 bp, Homo sapien
aaaggttgggcaggttgagacacct

SEQ ID NO: 4585273 - DNA, 25 bp, Homo sapien
agcagccttttctccttacagccat

SEQ ID NO: 4585274 - DNA, 25 bp, Homo sapien
gcaggttgagacacctcatcaagaa

SEQ ID NO: 4585275 - DNA, 25 bp, Homo sapien
tcctaggagcataggcgggaaatct

SEQ ID NO: 4585276 - DNA, 25 bp, Homo sapien
gcattatgactaaataggcccagcc

SEQ ID NO: 4585277 - DNA, 25 bp, Homo sapien
tgaacacgctgactgtgaacctgcc

SEQ ID NO: 4585278 - DNA, 25 bp, Homo sapien
aacctgccctgtatccggagctgtg

SEQ ID NO: 4585279 - DNA, 25 bp, Homo sapien
gggcactgaccttgaaagtggcaaa

SEQ ID NO: 4585280 - DNA, 25 bp, Homo sapien
caggacggcttgcttcatctaacaa

SEQ ID NO: 4585281 - DNA, 25 bp, Homo sapien
tatggtcaacaacaggccagggtct

SEQ ID NO: 4585282 - DNA, 25 bp, Homo sapien
tttccaagcgtaggtgtccctggct

SEQ ID NO: 4585283 - DNA, 25 bp, Homo sapien
atgacctgatggcggcaggaaccga

SEQ ID NO: 4585284 - DNA, 25 bp, Homo sapien
gatgacctgatggcggcaggaaccg

SEQ ID NO: 4585285 - DNA, 25 bp, Homo sapien
agatgacctgatggcggcaggaacc

SEQ ID NO: 4585286 - DNA, 25 bp, Homo sapien
ccttctatctctccgcatcgccagg

SEQ ID NO: 4585287 - DNA, 25 bp, Homo sapien
ctccttctatctctccgcatcgcca

SEQ ID NO: 4585288 - DNA, 25 bp, Homo sapien
atctctccgcatcgccaggaccaca

SEQ ID NO: 4585289 - DNA, 25 bp, Homo sapien
tctatctctccgcatcgccaggacc

SEQ ID NO: 4585290 - DNA, 25 bp, Homo sapien
ggcagtgggtggagggctgccagga

SEQ ID NO: 4585291 - DNA, 25 bp, Homo sapien
tgggcagtgggtggagggctgccag

SEQ ID NO: 4585292 - DNA, 25 bp, Homo sapien
tgtgggcagtgggtggagggctgcc

SEQ ID NO: 4585293 - DNA, 25 bp, Homo sapien
cagtgggtggagggctgccaggaaa

SEQ ID NO: 4585294 - DNA, 25 bp, Homo sapien
taggcttgagctgtaccaggattca

SEQ ID NO: 4585295 - DNA, 25 bp, Homo sapien
ctaggcttgagctgtaccaggattc

SEQ ID NO: 4585296 - DNA, 25 bp, Homo sapien
actcctctactcatggctgtgccaa

SEQ ID NO: 4585297 - DNA, 25 bp, Homo sapien
tcagtggcaatcacttcgtcacatc

SEQ ID NO: 4585298 - DNA, 25 bp, Homo sapien
tcgtcacatccatttgtgtcttcac

SEQ ID NO: 4585299 - DNA, 25 bp, Homo sapien
ttcactttgtggtgtcattccttgg

SEQ ID NO: 4585300 - DNA, 25 bp, Homo sapien
ctgtacgagaggaatatttgacaac

SEQ ID NO: 4585301 - DNA, 25 bp, Homo sapien
tgtacgagaggaatatttgacaact

SEQ ID NO: 4585302 - DNA, 25 bp, Homo sapien
gtaagtgaaaatgactcgatagtgc

SEQ ID NO: 4585303 - DNA, 25 bp, Homo sapien
gagtatggccacattgcaagtaagt

SEQ ID NO: 4585304 - DNA, 25 bp, Homo sapien
aaaatgactcgatagtgctgctggg

SEQ ID NO: 4585305 - DNA, 25 bp, Homo sapien
acaggatacatgagagtatggccac

SEQ ID NO: 4585306 - DNA, 25 bp, Homo sapien
aagaaggtctagaatggcatccaaa

SEQ ID NO: 4585307 - DNA, 25 bp, Homo sapien
gctgaatgccagttctgaagcggat

SEQ ID NO: 4585308 - DNA, 25 bp, Homo sapien
gatactgtctaagaaggtctagaat

SEQ ID NO: 4585309 - DNA, 25 bp, Homo sapien
gaagcggatatcaagatactgtcta

SEQ ID NO: 4585310 - DNA, 25 bp, Homo sapien
tctggacggtcttgggagccagtct

SEQ ID NO: 4585311 - DNA, 25 bp, Homo sapien
tatcaggtagaatcttctaaaagtc

SEQ ID NO: 4585312 - DNA, 25 bp, Homo sapien
gagtgaatcatccacagatatcaca

SEQ ID NO: 4585313 - DNA, 25 bp, Homo sapien
gccagtctgactctgctcgagtgaa

SEQ ID NO: 4585314 - DNA, 25 bp, Homo sapien
ttggcaggccagagtgacagctgct

SEQ ID NO: 4585315 - DNA, 25 bp, Homo sapien
cttggcaggccagagtgacagctgc

SEQ ID NO: 4585316 - DNA, 25 bp, Homo sapien
gacagctgctgcccttggtgaagct

SEQ ID NO: 4585317 - DNA, 25 bp, Homo sapien
agctgctgcccttggtgaagctagc

SEQ ID NO: 4585318 - DNA, 25 bp, Homo sapien
gggaatcaagaaagtgttgaattca

SEQ ID NO: 4585319 - DNA, 25 bp, Homo sapien
agaaagtgttgaattcaatgaatac

SEQ ID NO: 4585320 - DNA, 25 bp, Homo sapien
agagggaatcaagaaagtgttgaat

SEQ ID NO: 4585321 - DNA, 25 bp, Homo sapien
aatcaagaaagtgttgaattcaatg

SEQ ID NO: 4585322 - DNA, 25 bp, Homo sapien
gggctggatactgcccggaggctga

SEQ ID NO: 4585323 - DNA, 25 bp, Homo sapien
gctggatactgcccggaggctgact

SEQ ID NO: 4585324 - DNA, 25 bp, Homo sapien
ggaaggggctggatactgcccggag

SEQ ID NO: 4585325 - DNA, 25 bp, Homo sapien
ggatactgcccggaggctgactcat

SEQ ID NO: 4585326 - DNA, 25 bp, Homo sapien
gaaagccctgtgagccaccagtcat

SEQ ID NO: 4585327 - DNA, 25 bp, Homo sapien
cgtgtgcgcaggaaacagagggttt

SEQ ID NO: 4585328 - DNA, 25 bp, Homo sapien
ggaaagccctgtgagccaccagtca

SEQ ID NO: 4585329 - DNA, 25 bp, Homo sapien
cagagggttttcactcccaggaaag

SEQ ID NO: 4585330 - DNA, 25 bp, Homo sapien
ctgaggtaccacaaaggactcagca

SEQ ID NO: 4585331 - DNA, 25 bp, Homo sapien
gtgtccactgaggtaccacaaagga

SEQ ID NO: 4585332 - DNA, 25 bp, Homo sapien
taagtgtgtccactgaggtaccaca

SEQ ID NO: 4585333 - DNA, 25 bp, Homo sapien
gaggtaccacaaaggactcagcaag

SEQ ID NO: 4585334 - DNA, 25 bp, Homo sapien
gcctgtgcttgagcgtgcaggcgct

SEQ ID NO: 4585335 - DNA, 25 bp, Homo sapien
gcgtgcaggcgctcaatcacctgca

SEQ ID NO: 4585336 - DNA, 25 bp, Homo sapien
gcttgagcgtgcaggcgctcaatca

SEQ ID NO: 4585337 - DNA, 25 bp, Homo sapien
tgtgcttgagcgtgcaggcgctcaa

SEQ ID NO: 4585338 - DNA, 25 bp, Homo sapien
gatcaggcaacagtggccagggaat

SEQ ID NO: 4585339 - DNA, 25 bp, Homo sapien
gcctctggatcaggcaacagtggcc

SEQ ID NO: 4585340 - DNA, 25 bp, Homo sapien
tctggatcaggcaacagtggccagg

SEQ ID NO: 4585341 - DNA, 25 bp, Homo sapien
tcaggcaacagtggccagggaatgt

SEQ ID NO: 4585342 - DNA, 25 bp, Homo sapien
gctggtattactattttttggaaca

SEQ ID NO: 4585343 - DNA, 25 bp, Homo sapien
ctcagcatataagaggctgctcctt

SEQ ID NO: 4585344 - DNA, 25 bp, Homo sapien
aaatccagtctattacatctttgca

SEQ ID NO: 4585345 - DNA, 25 bp, Homo sapien
tattgtgttaatgtgcaactatcca

SEQ ID NO: 4585346 - DNA, 25 bp, Homo sapien
gattagggactaatgcactcgacta

SEQ ID NO: 4585347 - DNA, 25 bp, Homo sapien
ccaatgtgtagcaagttagaaagcc

SEQ ID NO: 4585348 - DNA, 25 bp, Homo sapien
gcagggactatcttactcaccttgg

SEQ ID NO: 4585349 - DNA, 25 bp, Homo sapien
gaatcaggacgcaagaccatcttct

SEQ ID NO: 4585350 - DNA, 25 bp, Homo sapien
aagtcgtctttgatgcttctttttg

SEQ ID NO: 4585351 - DNA, 25 bp, Homo sapien
atgccatccacagaagtcgtctttg

SEQ ID NO: 4585352 - DNA, 25 bp, Homo sapien
catccacagaagtcgtctttgatgc

SEQ ID NO: 4585353 - DNA, 25 bp, Homo sapien
ccacagaagtcgtctttgatgcttc

SEQ ID NO: 4585354 - DNA, 25 bp, Homo sapien
accgttgggctatgggactgctgat

SEQ ID NO: 4585355 - DNA, 25 bp, Homo sapien
ctatgggactgctgatgagaagtga

SEQ ID NO: 4585356 - DNA, 25 bp, Homo sapien
catccaccgttgggctatgggactg

SEQ ID NO: 4585357 - DNA, 25 bp, Homo sapien
tgggactgctgatgagaagtgatct

SEQ ID NO: 4585358 - DNA, 25 bp, Homo sapien
gccaaaatcaccctgtaggcgctct

SEQ ID NO: 4585359 - DNA, 25 bp, Homo sapien
tcggatgctcgcatgaatcactgag

SEQ ID NO: 4585360 - DNA, 25 bp, Homo sapien
gctcatctggctccgtagcatcttt

SEQ ID NO: 4585361 - DNA, 25 bp, Homo sapien
gtagcatctttgatcagtgttgcca

SEQ ID NO: 4585362 - DNA, 25 bp, Homo sapien
cctgacatcagagtgtgacatcagc

SEQ ID NO: 4585363 - DNA, 25 bp, Homo sapien
cagagtgtgacatcagcttgtgggt

SEQ ID NO: 4585364 - DNA, 25 bp, Homo sapien
ttgtggctctttggtcactttctgt

SEQ ID NO: 4585365 - DNA, 25 bp, Homo sapien
tgtgggttgtggctctttggtcact

SEQ ID NO: 4585366 - DNA, 25 bp, Homo sapien
gatttctttccagcacccagaagag

SEQ ID NO: 4585367 - DNA, 25 bp, Homo sapien
ccaagatttctttccagcacccaga

SEQ ID NO: 4585368 - DNA, 25 bp, Homo sapien
cagaagagcagcaggacagctccat

SEQ ID NO: 4585369 - DNA, 25 bp, Homo sapien
ttctttccagcacccagaagagcag

SEQ ID NO: 4585370 - DNA, 25 bp, Homo sapien
gaatttctgagacaggcccgtagtg

SEQ ID NO: 4585371 - DNA, 25 bp, Homo sapien
aagtggagcctcaataaatcctggg

SEQ ID NO: 4585372 - DNA, 25 bp, Homo sapien
tctccgaacgcatccctgttgagca

SEQ ID NO: 4585373 - DNA, 25 bp, Homo sapien
tacttaatctcttttgcagccggaa

SEQ ID NO: 4585374 - DNA, 25 bp, Homo sapien
ccgcctcccaggctccaacaatcct

SEQ ID NO: 4585375 - DNA, 25 bp, Homo sapien
agtcttgttctatcgctcaggatgg

SEQ ID NO: 4585376 - DNA, 25 bp, Homo sapien
cttgttctatcgctcaggatggagt

SEQ ID NO: 4585377 - DNA, 25 bp, Homo sapien
gcagtagtgtgatctcagctcactg

SEQ ID NO: 4585378 - DNA, 25 bp, Homo sapien
gcatgagtcctttctaatccgacca

SEQ ID NO: 4585379 - DNA, 25 bp, Homo sapien
gaccaaccgctgtggcatcatcctg

SEQ ID NO: 4585380 - DNA, 25 bp, Homo sapien
tttctaatccgaccaaccgctgtgg

SEQ ID NO: 4585381 - DNA, 25 bp, Homo sapien
tttgcgtggccgatggcatgagtcc

SEQ ID NO: 4585382 - DNA, 25 bp, Homo sapien
aaaaaaccccttatcatttgtgatg

SEQ ID NO: 4585383 - DNA, 25 bp, Homo sapien
tgcctttaatcccagaaggtgggag

SEQ ID NO: 4585384 - DNA, 25 bp, Homo sapien
tgaactttcaatctttccttctccc

SEQ ID NO: 4585385 - DNA, 25 bp, Homo sapien
ttccgtgcccttgaacagctgaact

SEQ ID NO: 4585386 - DNA, 25 bp, Homo sapien
cgtgcccttgaacagctgaactttc

SEQ ID NO: 4585387 - DNA, 25 bp, Homo sapien
cttgatgtcttttccgtgcccttga

SEQ ID NO: 4585388 - DNA, 25 bp, Homo sapien
aatgcccttgttactctgtgcatta

SEQ ID NO: 4585389 - DNA, 25 bp, Homo sapien
ccttgttactctgtgcattatggta

SEQ ID NO: 4585390 - DNA, 25 bp, Homo sapien
ttactctgtgcattatggtatcatc

SEQ ID NO: 4585391 - DNA, 25 bp, Homo sapien
gcccttgttactctgtgcattatgg

SEQ ID NO: 4585392 - DNA, 25 bp, Homo sapien
tgttagctctgctcctgtgtccttg

SEQ ID NO: 4585393 - DNA, 25 bp, Homo sapien
caggctgctacttccggccacttgt

SEQ ID NO: 4585394 - DNA, 25 bp, Homo sapien
tgtccttgcttgaacagatatcccc

SEQ ID NO: 4585395 - DNA, 25 bp, Homo sapien
agcctctgctgttagctctgctcct

SEQ ID NO: 4585396 - DNA, 25 bp, Homo sapien
tgtggagcttacatcgtcattgtaa

SEQ ID NO: 4585397 - DNA, 25 bp, Homo sapien
taacttgcccaaagggagatacaat

SEQ ID NO: 4585398 - DNA, 25 bp, Homo sapien
caattttatctacccttgtggagct

SEQ ID NO: 4585399 - DNA, 25 bp, Homo sapien
catcgtcattgtaagtgtagggcat

SEQ ID NO: 4585400 - DNA, 25 bp, Homo sapien
ccggtcttccacttgcaacaggaca

SEQ ID NO: 4585401 - DNA, 25 bp, Homo sapien
ctgccggtcttccacttgcaacagg

SEQ ID NO: 4585402 - DNA, 25 bp, Homo sapien
tgtgacttctccctgccggtcttcc

SEQ ID NO: 4585403 - DNA, 25 bp, Homo sapien
tccacttgcaacaggacactgcctg

SEQ ID NO: 4585404 - DNA, 25 bp, Homo sapien
ttcttcgtaatctcacaggtagaag

SEQ ID NO: 4585405 - DNA, 25 bp, Homo sapien
tattcgaattgtcagcatcgcctct

SEQ ID NO: 4585406 - DNA, 25 bp, Homo sapien
ctaatgggcaggtagtgtagactct

SEQ ID NO: 4585407 - DNA, 25 bp, Homo sapien
tattgtagatcttaccaacttcagc

SEQ ID NO: 4585408 - DNA, 25 bp, Homo sapien
ttgtggccctgtttttgtaagctcc

SEQ ID NO: 4585409 - DNA, 25 bp, Homo sapien
caaaatctaccatgagttgtcacag

SEQ ID NO: 4585410 - DNA, 25 bp, Homo sapien
taacatgagtgtttccccacgttga

SEQ ID NO: 4585411 - DNA, 25 bp, Homo sapien
gacaacagttattaccattttcatg

SEQ ID NO: 4585412 - DNA, 25 bp, Homo sapien
tgtactgttgcttggatgcggcaca

SEQ ID NO: 4585413 - DNA, 25 bp, Homo sapien
tacaactggactgcggttgattgcc

SEQ ID NO: 4585414 - DNA, 25 bp, Homo sapien
ggaagttgcgccaaataagcatcag

SEQ ID NO: 4585415 - DNA, 25 bp, Homo sapien
taagcctcagatcgttgtacaactg

SEQ ID NO: 4585416 - DNA, 25 bp, Homo sapien
tgcctgtcccaaaagtctgggagac

SEQ ID NO: 4585417 - DNA, 25 bp, Homo sapien
gctccagtggtgatgcctgtcccaa

SEQ ID NO: 4585418 - DNA, 25 bp, Homo sapien
tcagcaaagctccagtggtgatgcc

SEQ ID NO: 4585419 - DNA, 25 bp, Homo sapien
cgagggggcatcagcaaagctccag

SEQ ID NO: 4585420 - DNA, 25 bp, Homo sapien
actgaggagggaagtttctccaact

SEQ ID NO: 4585421 - DNA, 25 bp, Homo sapien
ggatggtttgtatccactggaagca

SEQ ID NO: 4585422 - DNA, 25 bp, Homo sapien
tggaagcagctcgtgctttgccaaa

SEQ ID NO: 4585423 - DNA, 25 bp, Homo sapien
ttcatcagccaaatatcgggaaatg

SEQ ID NO: 4585424 - DNA, 25 bp, Homo sapien
aaaatcaatatttttggcctctgag

SEQ ID NO: 4585425 - DNA, 25 bp, Homo sapien
aatcaatatttttggcctctgagaa

SEQ ID NO: 4585426 - DNA, 25 bp, Homo sapien
aaatcaatatttttggcctctgaga

SEQ ID NO: 4585427 - DNA, 25 bp, Homo sapien
taaaaatcaatatttttggcctctg

SEQ ID NO: 4585428 - DNA, 25 bp, Homo sapien
tggcctccggatccaggcctgggaa

SEQ ID NO: 4585429 - DNA, 25 bp, Homo sapien
tggaaatctggcctccggatccagg

SEQ ID NO: 4585430 - DNA, 25 bp, Homo sapien
caggcctgggaatttcccttttctg

SEQ ID NO: 4585431 - DNA, 25 bp, Homo sapien
cggatccaggcctgggaatttccct

SEQ ID NO: 4585432 - DNA, 25 bp, Homo sapien
ctggagaatctggttttagacattc

SEQ ID NO: 4585433 - DNA, 25 bp, Homo sapien
cctgtttgtaattcatcagcactgc

SEQ ID NO: 4585434 - DNA, 25 bp, Homo sapien
cattcggagcctgtttgtaattcat

SEQ ID NO: 4585435 - DNA, 25 bp, Homo sapien
ggcacgccccgttcatcactgagtg

SEQ ID NO: 4585436 - DNA, 25 bp, Homo sapien
gcccggggacttgctctccgcggtc

SEQ ID NO: 4585437 - DNA, 25 bp, Homo sapien
gggacttgctctccgcggtccgccg

SEQ ID NO: 4585438 - DNA, 25 bp, Homo sapien
ttgctctccgcggtccgccgcggcc

SEQ ID NO: 4585439 - DNA, 25 bp, Homo sapien
ccttggaggcccggggacttgctct

SEQ ID NO: 4585440 - DNA, 25 bp, Homo sapien
tgcgggcgggactctgcgcacccgg

SEQ ID NO: 4585441 - DNA, 25 bp, Homo sapien
cgggctcaggtctgcgtctcccaga

SEQ ID NO: 4585442 - DNA, 25 bp, Homo sapien
ccgcgggctcaggtctgcgtctccc

SEQ ID NO: 4585443 - DNA, 25 bp, Homo sapien
ggactctgcgcacccgggctccgcg

SEQ ID NO: 4585444 - DNA, 25 bp, Homo sapien
ggcaaggcgggggcgcgtggaggga

SEQ ID NO: 4585445 - DNA, 25 bp, Homo sapien
gcaaggcgggggcgcgtggagggaa

SEQ ID NO: 4585446 - DNA, 25 bp, Homo sapien
caaggcgggggcgcgtggagggaag

SEQ ID NO: 4585447 - DNA, 25 bp, Homo sapien
gctgttccccaagggtcggacgcta

SEQ ID NO: 4585448 - DNA, 25 bp, Homo sapien
ccagctgccgggtttgaggtcctga

SEQ ID NO: 4585449 - DNA, 25 bp, Homo sapien
gaccccaagggatgcgtgtgctcat

SEQ ID NO: 4585450 - DNA, 25 bp, Homo sapien
cagtgacattctggaatggacccca

SEQ ID NO: 4585451 - DNA, 25 bp, Homo sapien
ggaagtcgtgcgctttcttcccaga

SEQ ID NO: 4585452 - DNA, 25 bp, Homo sapien
cacttcctccactcggggtctgtgg

SEQ ID NO: 4585453 - DNA, 25 bp, Homo sapien
tccatccctgcggtctggaaagtga

SEQ ID NO: 4585454 - DNA, 25 bp, Homo sapien
gaaagtgatccagggcgcgcccgag

SEQ ID NO: 4585455 - DNA, 25 bp, Homo sapien
gcagaggcggcagagggaaagtggg

SEQ ID NO: 4585456 - DNA, 25 bp, Homo sapien
agaggcggcagagggaaagtgggat

SEQ ID NO: 4585457 - DNA, 25 bp, Homo sapien
gcggcagagggaaagtgggataaag

SEQ ID NO: 4585458 - DNA, 25 bp, Homo sapien
aggcggcagagggaaagtgggataa

SEQ ID NO: 4585459 - DNA, 25 bp, Homo sapien
gggtgtggttctatgtcctttctcg

SEQ ID NO: 4585460 - DNA, 25 bp, Homo sapien
tatagcccatgtgagtcgtatggtg

SEQ ID NO: 4585461 - DNA, 25 bp, Homo sapien
tcttatagcccatgtgagtcgtatg

SEQ ID NO: 4585462 - DNA, 25 bp, Homo sapien
tggttctatgtcctttctcgccctc

SEQ ID NO: 4585463 - DNA, 25 bp, Homo sapien
gatttgtgtaaaggattggttctgg

SEQ ID NO: 4585464 - DNA, 25 bp, Homo sapien
gtgccaactcccactgattgttggt

SEQ ID NO: 4585465 - DNA, 25 bp, Homo sapien
ggttctggggcttgtagagaaagag

SEQ ID NO: 4585466 - DNA, 25 bp, Homo sapien
ctcgtgccaactcccactgattgtt

SEQ ID NO: 4585467 - DNA, 25 bp, Homo sapien
tcttgctgggttcggcttgcttatg

SEQ ID NO: 4585468 - DNA, 25 bp, Homo sapien
gatggtcactcttagggatggttcc

SEQ ID NO: 4585469 - DNA, 25 bp, Homo sapien
tatgtttgctttaatcaggatgcca

SEQ ID NO: 4585470 - DNA, 25 bp, Homo sapien
tccattaatgtcttgatcatgacag

SEQ ID NO: 4585471 - DNA, 25 bp, Homo sapien
tggcttcgacagaagctcccagtca

SEQ ID NO: 4585472 - DNA, 25 bp, Homo sapien
gcccctgaagccattgtacatccaa

SEQ ID NO: 4585473 - DNA, 25 bp, Homo sapien
cagtcaagactgaaactttgatgct

SEQ ID NO: 4585474 - DNA, 25 bp, Homo sapien
tgatgcttcttgtgcacagcttcct

SEQ ID NO: 4585475 - DNA, 25 bp, Homo sapien
tgggtctgcatgtattccccaccag

SEQ ID NO: 4585476 - DNA, 25 bp, Homo sapien
tagatcctttgatctccatttgggt

SEQ ID NO: 4585477 - DNA, 25 bp, Homo sapien
tgtgagcttgagtaaaatagatcct

SEQ ID NO: 4585478 - DNA, 25 bp, Homo sapien
tatcatcagattgggatatatgaag

SEQ ID NO: 4585479 - DNA, 25 bp, Homo sapien
gtgatgattttgttccaccatttga

SEQ ID NO: 4585480 - DNA, 25 bp, Homo sapien
gacgtgtccccagtgatgattttgt

SEQ ID NO: 4585481 - DNA, 25 bp, Homo sapien
taggtgacgtgtccccagtgatgat

SEQ ID NO: 4585482 - DNA, 25 bp, Homo sapien
ggataggtgacgtgtccccagtgat

SEQ ID NO: 4585483 - DNA, 25 bp, Homo sapien
cttctctgttctcctgatccctgcc

SEQ ID NO: 4585484 - DNA, 25 bp, Homo sapien
ctgccctgatggaggcctgacccat

SEQ ID NO: 4585485 - DNA, 25 bp, Homo sapien
tctctgttctcctgatccctgccct

SEQ ID NO: 4585486 - DNA, 25 bp, Homo sapien
ctgatccctgccctgatggaggcct

SEQ ID NO: 4585487 - DNA, 25 bp, Homo sapien
tcattcaagggcgttagtgccaaat

SEQ ID NO: 4585488 - DNA, 25 bp, Homo sapien
gggcgttagtgccaaattccttctc

SEQ ID NO: 4585489 - DNA, 25 bp, Homo sapien
tagtgccaaattccttctccctggc

SEQ ID NO: 4585490 - DNA, 25 bp, Homo sapien
tggccttcctcacgttgatctgtgt

SEQ ID NO: 4585491 - DNA, 25 bp, Homo sapien
tattatgcagagaaatttggtctgg

SEQ ID NO: 4585492 - DNA, 25 bp, Homo sapien
gcagagaaatttggtctggtgtcag

SEQ ID NO: 4585493 - DNA, 25 bp, Homo sapien
gtcagcttccacgcccagattttaa

SEQ ID NO: 4585494 - DNA, 25 bp, Homo sapien
tccaaaggcctcctgcttattatgc

SEQ ID NO: 4585495 - DNA, 25 bp, Homo sapien
agcagaagggtgggccttcagcaac

SEQ ID NO: 4585496 - DNA, 25 bp, Homo sapien
gcagcagcagcgaagccggccagac

SEQ ID NO: 4585497 - DNA, 25 bp, Homo sapien
agaagggtgggccttcagcaacggg

SEQ ID NO: 4585498 - DNA, 25 bp, Homo sapien
aagccggccagacctcctggccttc

SEQ ID NO: 4585499 - DNA, 25 bp, Homo sapien
ctgtgtccccatccgatttcagggc

SEQ ID NO: 4585500 - DNA, 25 bp, Homo sapien
agcagctccactgttgcagaattgg

SEQ ID NO: 4585501 - DNA, 25 bp, Homo sapien
tccactgttgcagaattgggctgct

SEQ ID NO: 4585502 - DNA, 25 bp, Homo sapien
tgttgcagaattgggctgcttccta

SEQ ID NO: 4585503 - DNA, 25 bp, Homo sapien
aaaacagacagttctatgaactgat

SEQ ID NO: 4585504 - DNA, 25 bp, Homo sapien
gacagttctatgaactgattttggt

SEQ ID NO: 4585505 - DNA, 25 bp, Homo sapien
ttctatgaactgattttggtgtggt

SEQ ID NO: 4585506 - DNA, 25 bp, Homo sapien
ggcattccagcctttaaccttccca

SEQ ID NO: 4585507 - DNA, 25 bp, Homo sapien
gaatgtcaaagtgcagaagggcgct

SEQ ID NO: 4585508 - DNA, 25 bp, Homo sapien
cattctggcaaaaccgtgggtttct

SEQ ID NO: 4585509 - DNA, 25 bp, Homo sapien
caggatgcttgctggccaggtagca

SEQ ID NO: 4585510 - DNA, 25 bp, Homo sapien
tcttcagaatgtcaaagtgcagaag

SEQ ID NO: 4585511 - DNA, 25 bp, Homo sapien
ggactgatgagagatttagttctgg

SEQ ID NO: 4585512 - DNA, 25 bp, Homo sapien
ggaaacggactgatgagagatttag

SEQ ID NO: 4585513 - DNA, 25 bp, Homo sapien
cagccgcccctcaactgttcctgtt

SEQ ID NO: 4585514 - DNA, 25 bp, Homo sapien
tctgggaaacggactgatgagagat

SEQ ID NO: 4585515 - DNA, 25 bp, Homo sapien
acagttgtaagtcgggcccacacag

SEQ ID NO: 4585516 - DNA, 25 bp, Homo sapien
cttctctctgggcactagaatatta

SEQ ID NO: 4585517 - DNA, 25 bp, Homo sapien
tattaaggacagttgtaagtcgggc

SEQ ID NO: 4585518 - DNA, 25 bp, Homo sapien
ctctgggcactagaatattaaggac

SEQ ID NO: 4585519 - DNA, 25 bp, Homo sapien
tgaatgaaccctgcactacgctcat

SEQ ID NO: 4585520 - DNA, 25 bp, Homo sapien
tcatgaatgaaccctgcactacgct

SEQ ID NO: 4585521 - DNA, 25 bp, Homo sapien
atgaatgaaccctgcactacgctca

SEQ ID NO: 4585522 - DNA, 25 bp, Homo sapien
catgaatgaaccctgcactacgctc

SEQ ID NO: 4585523 - DNA, 25 bp, Homo sapien
ctgatccttggcacctgctgtattc

SEQ ID NO: 4585524 - DNA, 25 bp, Homo sapien
ttgctgatccttggcacctgctgta

SEQ ID NO: 4585525 - DNA, 25 bp, Homo sapien
gctgatccttggcacctgctgtatt

SEQ ID NO: 4585526 - DNA, 25 bp, Homo sapien
ctttgctgatccttggcacctgctg

SEQ ID NO: 4585527 - DNA, 25 bp, Homo sapien
taagttcttgactggagcacctgca

SEQ ID NO: 4585528 - DNA, 25 bp, Homo sapien
taaacctgagtgtctgtacacgagg

SEQ ID NO: 4585529 - DNA, 25 bp, Homo sapien
gcacctgcaacaaatcactgattaa

SEQ ID NO: 4585530 - DNA, 25 bp, Homo sapien
gccttcataaggaaacgaggaccca

SEQ ID NO: 4585531 - DNA, 25 bp, Homo sapien
gcagtccttggataacgggtttaca

SEQ ID NO: 4585532 - DNA, 25 bp, Homo sapien
gataggaatagaacctgccctccaa

SEQ ID NO: 4585533 - DNA, 25 bp, Homo sapien
tcagtcagggtctgcggcattcagc

SEQ ID NO: 4585534 - DNA, 25 bp, Homo sapien
taaagggtctcgtttctctgacagg

SEQ ID NO: 4585535 - DNA, 25 bp, Homo sapien
tataggtttgcttgctacgaccggg

SEQ ID NO: 4585536 - DNA, 25 bp, Homo sapien
cacaatcaaatctgaggctccgagg

SEQ ID NO: 4585537 - DNA, 25 bp, Homo sapien
cattgggataatcatctcgggccgt

SEQ ID NO: 4585538 - DNA, 25 bp, Homo sapien
aaggtacaaatggacagagctgccc

SEQ ID NO: 4585539 - DNA, 25 bp, Homo sapien
actccaggctgagagttgggttcaa

SEQ ID NO: 4585540 - DNA, 25 bp, Homo sapien
ttctcacgggggagattgcaaactc

SEQ ID NO: 4585541 - DNA, 25 bp, Homo sapien
gtcacttccatatgactcccattct

SEQ ID NO: 4585542 - DNA, 25 bp, Homo sapien
ctgagagttgggttcaagtcacttc

SEQ ID NO: 4585543 - DNA, 25 bp, Homo sapien
gctagggaagcatatgtctgtcacc

SEQ ID NO: 4585544 - DNA, 25 bp, Homo sapien
taaggcctaggctcaaagatggcac

SEQ ID NO: 4585545 - DNA, 25 bp, Homo sapien
ttggctaaagtaagtcacatggtaa

SEQ ID NO: 4585546 - DNA, 25 bp, Homo sapien
gttagcaacagaatccaacttgact

SEQ ID NO: 4585547 - DNA, 25 bp, Homo sapien
gataaatggctgttccgcaaaggaa

SEQ ID NO: 4585548 - DNA, 25 bp, Homo sapien
gcttgtgtgctcaccctttggctag

SEQ ID NO: 4585549 - DNA, 25 bp, Homo sapien
tgttaaacgtatcacatgctacagg

SEQ ID NO: 4585550 - DNA, 25 bp, Homo sapien
tgctacaggaccataccacctggag

SEQ ID NO: 4585551 - DNA, 25 bp, Homo sapien
tctttttggctgcctgagatgtgct

SEQ ID NO: 4585552 - DNA, 25 bp, Homo sapien
atctttttggctgcctgagatgtgc

SEQ ID NO: 4585553 - DNA, 25 bp, Homo sapien
ctttttggctgcctgagatgtgctt

SEQ ID NO: 4585554 - DNA, 25 bp, Homo sapien
aatctttttggctgcctgagatgtg

SEQ ID NO: 4585555 - DNA, 25 bp, Homo sapien
agtccccttatcttaacactcatgg

SEQ ID NO: 4585556 - DNA, 25 bp, Homo sapien
cttaacactcatgggggaggcggac

SEQ ID NO: 4585557 - DNA, 25 bp, Homo sapien
taaaaaatctgagaacactgatgga

SEQ ID NO: 4585558 - DNA, 25 bp, Homo sapien
cctagaggtcatgtggtggaggcag

SEQ ID NO: 4585559 - DNA, 25 bp, Homo sapien
tcttgatcacgtttgactgcctggg

SEQ ID NO: 4585560 - DNA, 25 bp, Homo sapien
tcttcttgatcacgtttgactgcct

SEQ ID NO: 4585561 - DNA, 25 bp, Homo sapien
acgtttgactgcctgggtcagctgc

SEQ ID NO: 4585562 - DNA, 25 bp, Homo sapien
gatcacgtttgactgcctgggtcag

SEQ ID NO: 4585563 - DNA, 25 bp, Homo sapien
agctatctcttaggcttctcttccc

SEQ ID NO: 4585564 - DNA, 25 bp, Homo sapien
ctagggacacagctatctcttaggc

SEQ ID NO: 4585565 - DNA, 25 bp, Homo sapien
gacacggacacgatctccctgggtc

SEQ ID NO: 4585566 - DNA, 25 bp, Homo sapien
gacacagctatctcttaggcttctc

SEQ ID NO: 4585567 - DNA, 25 bp, Homo sapien
tctgcagccacgttcaagaccagat

SEQ ID NO: 4585568 - DNA, 25 bp, Homo sapien
tgcagccacgttcaagaccagatcc

SEQ ID NO: 4585569 - DNA, 25 bp, Homo sapien
cagccacgttcaagaccagatccct

SEQ ID NO: 4585570 - DNA, 25 bp, Homo sapien
agccacgttcaagaccagatccctg

SEQ ID NO: 4585571 - DNA, 25 bp, Homo sapien
aagacccggctgtggtatctaccca

SEQ ID NO: 4585572 - DNA, 25 bp, Homo sapien
caaaggtaccaagcagagatgggag

SEQ ID NO: 4585573 - DNA, 25 bp, Homo sapien
tttgagatggtgacaacaatgggct

SEQ ID NO: 4585574 - DNA, 25 bp, Homo sapien
ctggagatcattccacggccacaca

SEQ ID NO: 4585575 - DNA, 25 bp, Homo sapien
aggttaggagagctgacatgcccag

SEQ ID NO: 4585576 - DNA, 25 bp, Homo sapien
tcagccctgcagtgattgaaacgca

SEQ ID NO: 4585577 - DNA, 25 bp, Homo sapien
atgggaccctgaccttgacctggaa

SEQ ID NO: 4585578 - DNA, 25 bp, Homo sapien
tgtaagaacccagtgacgtaggtat

SEQ ID NO: 4585579 - DNA, 25 bp, Homo sapien
cagccgcagggccttcattttgcac

SEQ ID NO: 4585580 - DNA, 25 bp, Homo sapien
ccgcagggccttcattttgcacagg

SEQ ID NO: 4585581 - DNA, 25 bp, Homo sapien
gtgcccagccgcagggccttcattt

SEQ ID NO: 4585582 - DNA, 25 bp, Homo sapien
cattcattttaagaagaagggaagg

SEQ ID NO: 4585583 - DNA, 25 bp, Homo sapien
tcaaccaagggaagtgtagtcctac

SEQ ID NO: 4585584 - DNA, 25 bp, Homo sapien
tgaactttcctagcgagattttggg

SEQ ID NO: 4585585 - DNA, 25 bp, Homo sapien
tcaaaacacttggtgagcaaaatgc

SEQ ID NO: 4585586 - DNA, 25 bp, Homo sapien
gggtcaactgcttcgattcaagtca

SEQ ID NO: 4585587 - DNA, 25 bp, Homo sapien
tgcgtctaacgaaaccacaggctag

SEQ ID NO: 4585588 - DNA, 25 bp, Homo sapien
gaattaaaggacacaggccaagccc

SEQ ID NO: 4585589 - DNA, 25 bp, Homo sapien
gatgccttgttgcaaagtcctggac

SEQ ID NO: 4585590 - DNA, 25 bp, Homo sapien
acttcaacaagtgagtgggtgtcca

SEQ ID NO: 4585591 - DNA, 25 bp, Homo sapien
aatgagaccaaagcgatgaaatcgg

SEQ ID NO: 4585592 - DNA, 25 bp, Homo sapien
tttcccatacaaaagtggaggtgtc

SEQ ID NO: 4585593 - DNA, 25 bp, Homo sapien
gaaatcggccctacaatcaagctgg

SEQ ID NO: 4585594 - DNA, 25 bp, Homo sapien
gacacaccagtgaagcattcaggct

SEQ ID NO: 4585595 - DNA, 25 bp, Homo sapien
catgtaaacgcggtgagccaagtcc

SEQ ID NO: 4585596 - DNA, 25 bp, Homo sapien
catatcgaagtcctactgtgtgccg

SEQ ID NO: 4585597 - DNA, 25 bp, Homo sapien
ggagctggtctctagaaccttcagg

SEQ ID NO: 4585598 - DNA, 25 bp, Homo sapien
ggagctcaggatgttcgtcaccaca

SEQ ID NO: 4585599 - DNA, 25 bp, Homo sapien
taagatcccggttgccaaaagctga

SEQ ID NO: 4585600 - DNA, 25 bp, Homo sapien
gtatagacgtggattcccatgcccc

SEQ ID NO: 4585601 - DNA, 25 bp, Homo sapien
gcccctcggatgctcaagctgtgaa

SEQ ID NO: 4585602 - DNA, 25 bp, Homo sapien
tgatgcctagcgtttgtacagtcct

SEQ ID NO: 4585603 - DNA, 25 bp, Homo sapien
cgtcctctcatagggcttttgctca

SEQ ID NO: 4585604 - DNA, 25 bp, Homo sapien
tcaaaggcagcttccggcccatctg

SEQ ID NO: 4585605 - DNA, 25 bp, Homo sapien
tcaggagactcatcattgcttttca

SEQ ID NO: 4585606 - DNA, 25 bp, Homo sapien
ttcagagcaaatggcattcgttggc

SEQ ID NO: 4585607 - DNA, 25 bp, Homo sapien
cttcttccagggagattagtggtga

SEQ ID NO: 4585608 - DNA, 25 bp, Homo sapien
ggaaagcaacgctcctctgaaatgc

SEQ ID NO: 4585609 - DNA, 25 bp, Homo sapien
ttcaccaagagccaatatctaggca

SEQ ID NO: 4585610 - DNA, 25 bp, Homo sapien
ccttcttgtccacggttttgttgag

SEQ ID NO: 4585611 - DNA, 25 bp, Homo sapien
gattggagatgtcctttgcattgct

SEQ ID NO: 4585612 - DNA, 25 bp, Homo sapien
ggccatgtccagaacttgctgcgtc

SEQ ID NO: 4585613 - DNA, 25 bp, Homo sapien
tggctggaggccaaacacgtttgac

SEQ ID NO: 4585614 - DNA, 25 bp, Homo sapien
ttgctgcgtcctccacatttctaag

SEQ ID NO: 4585615 - DNA, 25 bp, Homo sapien
aatcaaactggcagacgagaggcag

SEQ ID NO: 4585616 - DNA, 25 bp, Homo sapien
tcctgcaggaagaatgcgggctggc

SEQ ID NO: 4585617 - DNA, 25 bp, Homo sapien
gacccgctctgctctggcataccct

SEQ ID NO: 4585618 - DNA, 25 bp, Homo sapien
tctgctctggcataccctacactgg

SEQ ID NO: 4585619 - DNA, 25 bp, Homo sapien
tcagccatgcaggtatctgagagca

SEQ ID NO: 4585620 - DNA, 25 bp, Homo sapien
caccaaggtggtgggaacggcagat

SEQ ID NO: 4585621 - DNA, 25 bp, Homo sapien
tattcttcggaactttcccgctcag

SEQ ID NO: 4585622 - DNA, 25 bp, Homo sapien
attcttcggaactttcccgctcaga

SEQ ID NO: 4585623 - DNA, 25 bp, Homo sapien
ttcttcggaactttcccgctcagac

SEQ ID NO: 4585624 - DNA, 25 bp, Homo sapien
ctattcttcggaactttcccgctca

SEQ ID NO: 4585625 - DNA, 25 bp, Homo sapien
tcttgtcagtatacaaacactatta

SEQ ID NO: 4585626 - DNA, 25 bp, Homo sapien
aaagcaaggctcagaaatgtcctac

SEQ ID NO: 4585627 - DNA, 25 bp, Homo sapien
cataaaggcggacactgtgggtgca

SEQ ID NO: 4585628 - DNA, 25 bp, Homo sapien
aaatgtcctaccctgcatgctcttg

SEQ ID NO: 4585629 - DNA, 25 bp, Homo sapien
tcacaattaagatccaccagggcgt

SEQ ID NO: 4585630 - DNA, 25 bp, Homo sapien
tcagggactcgtttatgccaccagg

SEQ ID NO: 4585631 - DNA, 25 bp, Homo sapien
tatggctatgcaggacagtaacccc

SEQ ID NO: 4585632 - DNA, 25 bp, Homo sapien
cccaaggctggcaaggatagatcta

SEQ ID NO: 4585633 - DNA, 25 bp, Homo sapien
cagtaggctctaacatgaacggcaa

SEQ ID NO: 4585634 - DNA, 25 bp, Homo sapien
ggcttcctggctacagacatctgag

SEQ ID NO: 4585635 - DNA, 25 bp, Homo sapien
tgctatctgatcagagcaggccacc

SEQ ID NO: 4585636 - DNA, 25 bp, Homo sapien
tagattttggatttacacaccctgg

SEQ ID NO: 4585637 - DNA, 25 bp, Homo sapien
cggtgtgcagttgcctgagaccact

SEQ ID NO: 4585638 - DNA, 25 bp, Homo sapien
cacagtcacatttccatgtaaggag

SEQ ID NO: 4585639 - DNA, 25 bp, Homo sapien
cactagaatgtcatccggtgtgcag

SEQ ID NO: 4585640 - DNA, 25 bp, Homo sapien
aagcagtaattctttgaccacaaac

SEQ ID NO: 4585641 - DNA, 25 bp, Homo sapien
tcccatcgcgaagcatgaagatagc

SEQ ID NO: 4585642 - DNA, 25 bp, Homo sapien
gcacacctgtcttgaccgaccaaaa

SEQ ID NO: 4585643 - DNA, 25 bp, Homo sapien
gatagcacggtctgatcccacaatg

SEQ ID NO: 4585644 - DNA, 25 bp, Homo sapien
ccttggaagaccgagatttcagatc

SEQ ID NO: 4585645 - DNA, 25 bp, Homo sapien
tggacaaaaatcctagcccttgagc

SEQ ID NO: 4585646 - DNA, 25 bp, Homo sapien
tcgtccacactcgaaaggtcccaag

SEQ ID NO: 4585647 - DNA, 25 bp, Homo sapien
caagaggacacttggttgttggaca

SEQ ID NO: 4585648 - DNA, 25 bp, Homo sapien
gaacaaagcggaaagaatgaggcct

SEQ ID NO: 4585649 - DNA, 25 bp, Homo sapien
aaaacacacactaggcatggttgcc

SEQ ID NO: 4585650 - DNA, 25 bp, Homo sapien
tcttaaaattgtacctcaggaccat

SEQ ID NO: 4585651 - DNA, 25 bp, Homo sapien
tatcggttaacagcatggtccaagc

SEQ ID NO: 4585652 - DNA, 25 bp, Homo sapien
cacaaagcactttccactgagcaga

SEQ ID NO: 4585653 - DNA, 25 bp, Homo sapien
tctggacgtcatagttggcattgaa

SEQ ID NO: 4585654 - DNA, 25 bp, Homo sapien
tctttgagaagtcgacaggtgctga

SEQ ID NO: 4585655 - DNA, 25 bp, Homo sapien
catgagagtcttcccttttttcgtc

SEQ ID NO: 4585656 - DNA, 25 bp, Homo sapien
gctttcaggcttgcttgggtctatc

SEQ ID NO: 4585657 - DNA, 25 bp, Homo sapien
acaagaatcaacgcaaagacaacca

SEQ ID NO: 4585658 - DNA, 25 bp, Homo sapien
cacaagaatcaacgcaaagacaacc

SEQ ID NO: 4585659 - DNA, 25 bp, Homo sapien
gatccgtgattgaagtggtttgaga

SEQ ID NO: 4585660 - DNA, 25 bp, Homo sapien
aagggagagcaaagctgaacagtga

SEQ ID NO: 4585661 - DNA, 25 bp, Homo sapien
ggtgaagggagagcaaagctgaaca

SEQ ID NO: 4585662 - DNA, 25 bp, Homo sapien
ggcagatccgtgattgaagtggttt

SEQ ID NO: 4585663 - DNA, 25 bp, Homo sapien
attgctccagaagacgcgccatgtc

SEQ ID NO: 4585664 - DNA, 25 bp, Homo sapien
cattgtaatcgcgaatatccttctt

SEQ ID NO: 4585665 - DNA, 25 bp, Homo sapien
aggcacaaagcaggaccacggcctt

SEQ ID NO: 4585666 - DNA, 25 bp, Homo sapien
gacccaggcggtggtagcagtagca

SEQ ID NO: 4585667 - DNA, 25 bp, Homo sapien
gcttacccgacctgcgcgggccgga

SEQ ID NO: 4585668 - DNA, 25 bp, Homo sapien
gctgcgccgcgcagcgccctagacg

SEQ ID NO: 4585669 - DNA, 25 bp, Homo sapien
cagcgccctagacgcgcttacccga

SEQ ID NO: 4585670 - DNA, 25 bp, Homo sapien
tagacgcgcttacccgacctgcgcg

SEQ ID NO: 4585671 - DNA, 25 bp, Homo sapien
cgcctctggaagccccgcccctccg

SEQ ID NO: 4585672 - DNA, 25 bp, Homo sapien
tctggaagccccgcccctccgccat

SEQ ID NO: 4585673 - DNA, 25 bp, Homo sapien
gcctctggaagccccgcccctccgc

SEQ ID NO: 4585674 - DNA, 25 bp, Homo sapien
ctctggaagccccgcccctccgcca

SEQ ID NO: 4585675 - DNA, 25 bp, Homo sapien
tgtaaactcgaaactagggctggta

SEQ ID NO: 4585676 - DNA, 25 bp, Homo sapien
gaaagattgtgtgctcatggcctaa

SEQ ID NO: 4585677 - DNA, 25 bp, Homo sapien
catgcagattacaggagatccgggc

SEQ ID NO: 4585678 - DNA, 25 bp, Homo sapien
tacacaatttgtctgaggctgcaca

SEQ ID NO: 4585679 - DNA, 25 bp, Homo sapien
tctcagaaatgcttggatatggccg

SEQ ID NO: 4585680 - DNA, 25 bp, Homo sapien
cacttcctgaagaacaaggttcggt

SEQ ID NO: 4585681 - DNA, 25 bp, Homo sapien
actggcgttttgctgggagtagccc

SEQ ID NO: 4585682 - DNA, 25 bp, Homo sapien
gctgggcaccttagaggacctgttt

SEQ ID NO: 4585683 - DNA, 25 bp, Homo sapien
ggcgccgcttcccaagagctggagg

SEQ ID NO: 4585684 - DNA, 25 bp, Homo sapien
ccaggccatgcccaagaaggcggcg

SEQ ID NO: 4585685 - DNA, 25 bp, Homo sapien
agtgagtttgctctgccccggttca

SEQ ID NO: 4585686 - DNA, 25 bp, Homo sapien
tggttcctgcaagccctctaggagg

SEQ ID NO: 4585687 - DNA, 25 bp, Homo sapien
actttcctggcagcccggcgacgag

SEQ ID NO: 4585688 - DNA, 25 bp, Homo sapien
agtgccgggacaccatcatcgcgcg

SEQ ID NO: 4585689 - DNA, 25 bp, Homo sapien
gagtccttcgagcagtgccgggaca

SEQ ID NO: 4585690 - DNA, 25 bp, Homo sapien
atcatcgcgcgcaccaaggggctct

SEQ ID NO: 4585691 - DNA, 25 bp, Homo sapien
gtgccggcgccgagtccttcgagca

SEQ ID NO: 4585692 - DNA, 25 bp, Homo sapien
caagtcacgggaccgcttttcgcgg

SEQ ID NO: 4585693 - DNA, 25 bp, Homo sapien
gctttaagggagaggtcttcgccca

SEQ ID NO: 4585694 - DNA, 25 bp, Homo sapien
caagctgggcgtcaagtgcatgagc

SEQ ID NO: 4585695 - DNA, 25 bp, Homo sapien
ccaagatgtcggaccacagggagag

SEQ ID NO: 4585696 - DNA, 25 bp, Homo sapien
tccagtgtgggcacaggtatttgtg

SEQ ID NO: 4585697 - DNA, 25 bp, Homo sapien
ccgaatgaatgtgactatggtaaca

SEQ ID NO: 4585698 - DNA, 25 bp, Homo sapien
ctttgctgagtgaacgtggaaggat

SEQ ID NO: 4585699 - DNA, 25 bp, Homo sapien
tatggtaacatgcagatcaggcaga

SEQ ID NO: 4585700 - DNA, 25 bp, Homo sapien
tctagggatcccagggatgccttct

SEQ ID NO: 4585701 - DNA, 25 bp, Homo sapien
gcaggtcggcatgcattgaattttt

SEQ ID NO: 4585702 - DNA, 25 bp, Homo sapien
aaggcttctagggatcccagggatg

SEQ ID NO: 4585703 - DNA, 25 bp, Homo sapien
agcaggtcggcatgcattgaatttt

SEQ ID NO: 4585704 - DNA, 25 bp, Homo sapien
gaagattgggctttcccaggtcacc

SEQ ID NO: 4585705 - DNA, 25 bp, Homo sapien
ccaataggatagtgaagattgggct

SEQ ID NO: 4585706 - DNA, 25 bp, Homo sapien
gatagtgaagattgggctttcccag

SEQ ID NO: 4585707 - DNA, 25 bp, Homo sapien
tggaggccaataggatagtgaagat

SEQ ID NO: 4585708 - DNA, 25 bp, Homo sapien
tcaacaaggacttccaagggacaac

SEQ ID NO: 4585709 - DNA, 25 bp, Homo sapien
gagtaataatttcaagctgggcttc

SEQ ID NO: 4585710 - DNA, 25 bp, Homo sapien
gcagaaactctcagttcacaacagg

SEQ ID NO: 4585711 - DNA, 25 bp, Homo sapien
tccgttcttgggcaaggcagaaact

SEQ ID NO: 4585712 - DNA, 25 bp, Homo sapien
tgtatggctcaaagggacaagggaa

SEQ ID NO: 4585713 - DNA, 25 bp, Homo sapien
caaatgctttatcaagaagggtcct

SEQ ID NO: 4585714 - DNA, 25 bp, Homo sapien
gaagggtcctgaacaaatggcatag

SEQ ID NO: 4585715 - DNA, 25 bp, Homo sapien
tagggaagtagtaccatcatgtggg

SEQ ID NO: 4585716 - DNA, 25 bp, Homo sapien
atgctcaaccttatttggtcttatc

SEQ ID NO: 4585717 - DNA, 25 bp, Homo sapien
gctcaaccttatttggtcttatctg

SEQ ID NO: 4585718 - DNA, 25 bp, Homo sapien
accttatttggtcttatctgcgctc

SEQ ID NO: 4585719 - DNA, 25 bp, Homo sapien
caaccttatttggtcttatctgcgc

SEQ ID NO: 4585720 - DNA, 25 bp, Homo sapien
taaaaagttggtccatgcagcagag

SEQ ID NO: 4585721 - DNA, 25 bp, Homo sapien
tcagaggagggccaagtgtccattc

SEQ ID NO: 4585722 - DNA, 25 bp, Homo sapien
gggtatcctcaacccacagatctgg

SEQ ID NO: 4585723 - DNA, 25 bp, Homo sapien
tgcttcttctcacaaagggataact

SEQ ID NO: 4585724 - DNA, 25 bp, Homo sapien
attggtgccgatatgggcacgagaa

SEQ ID NO: 4585725 - DNA, 25 bp, Homo sapien
tggtgccgatatgggcacgagaagt

SEQ ID NO: 4585726 - DNA, 25 bp, Homo sapien
taattggtgccgatatgggcacgag

SEQ ID NO: 4585727 - DNA, 25 bp, Homo sapien
ttaattggtgccgatatgggcacga

SEQ ID NO: 4585728 - DNA, 25 bp, Homo sapien
aagggcctgaggtcttgaggtatga

SEQ ID NO: 4585729 - DNA, 25 bp, Homo sapien
aagctgtaagggcctgaggtcttga

SEQ ID NO: 4585730 - DNA, 25 bp, Homo sapien
agggggctccaccagtataaggaag

SEQ ID NO: 4585731 - DNA, 25 bp, Homo sapien
caggtggaagctgtaagggcctgag

SEQ ID NO: 4585732 - DNA, 25 bp, Homo sapien
tcatttggatttagtctgagagaag

SEQ ID NO: 4585733 - DNA, 25 bp, Homo sapien
cagcttcatagagttgctctttcat

SEQ ID NO: 4585734 - DNA, 25 bp, Homo sapien
ttcagcttcatagagttgctctttc

SEQ ID NO: 4585735 - DNA, 25 bp, Homo sapien
tcttcagcttcatagagttgctctt

SEQ ID NO: 4585736 - DNA, 25 bp, Homo sapien
atctgaatgttcccaagttcttcag

SEQ ID NO: 4585737 - DNA, 25 bp, Homo sapien
cctgggacagatgagattagatttc

SEQ ID NO: 4585738 - DNA, 25 bp, Homo sapien
tactgtggtgctctttatgtcgatg

SEQ ID NO: 4585739 - DNA, 25 bp, Homo sapien
cacggccgttgggtagcagatgctc

SEQ ID NO: 4585740 - DNA, 25 bp, Homo sapien
tctgagggactcacatgggtatctt

SEQ ID NO: 4585741 - DNA, 25 bp, Homo sapien
ggtgtctagagcttccccttgctgc

SEQ ID NO: 4585742 - DNA, 25 bp, Homo sapien
ttgctgcggttccctcacctgctgg

SEQ ID NO: 4585743 - DNA, 25 bp, Homo sapien
tgtctagagcttccccttgctgcgg

SEQ ID NO: 4585744 - DNA, 25 bp, Homo sapien
tagagcttccccttgctgcggttcc

SEQ ID NO: 4585745 - DNA, 25 bp, Homo sapien
gctcgggaccaagaagggagcaccc

SEQ ID NO: 4585746 - DNA, 25 bp, Homo sapien
tttattaaggatagggaggatcttg

SEQ ID NO: 4585747 - DNA, 25 bp, Homo sapien
ggatcttggtcatggatttgtactg

SEQ ID NO: 4585748 - DNA, 25 bp, Homo sapien
ctgtactggctcgggaccaagaagg

SEQ ID NO: 4585749 - DNA, 25 bp, Homo sapien
aaatgtaatttcagcaacagttccc

SEQ ID NO: 4585750 - DNA, 25 bp, Homo sapien
agatggatgaatttccgcacagtct

SEQ ID NO: 4585751 - DNA, 25 bp, Homo sapien
agttcccttaacaacgcccgcagat

SEQ ID NO: 4585752 - DNA, 25 bp, Homo sapien
gatgaatttccgcacagtctggttc

SEQ ID NO: 4585753 - DNA, 25 bp, Homo sapien
cccaagtggtcagcttcggtggaag

SEQ ID NO: 4585754 - DNA, 25 bp, Homo sapien
caggatttcatagtataagcaggca

SEQ ID NO: 4585755 - DNA, 25 bp, Homo sapien
caccagatgatcaagggcactaaaa

SEQ ID NO: 4585756 - DNA, 25 bp, Homo sapien
taagcaggcatattacccaagtggt

SEQ ID NO: 4585757 - DNA, 25 bp, Homo sapien
ctaccaaatccatgaatagtccaaa

SEQ ID NO: 4585758 - DNA, 25 bp, Homo sapien
aggtggtctggggtcttaaccatct

SEQ ID NO: 4585759 - DNA, 25 bp, Homo sapien
tgcaggtggtctggggtcttaacca

SEQ ID NO: 4585760 - DNA, 25 bp, Homo sapien
gtggtctggggtcttaaccatcttc

SEQ ID NO: 4585761 - DNA, 25 bp, Homo sapien
gtcataggtatccaagcaggtcagc

SEQ ID NO: 4585762 - DNA, 25 bp, Homo sapien
tcataggtatccaagcaggtcagct

SEQ ID NO: 4585763 - DNA, 25 bp, Homo sapien
gggtcataggtatccaagcaggtca

SEQ ID NO: 4585764 - DNA, 25 bp, Homo sapien
ggtcataggtatccaagcaggtcag

SEQ ID NO: 4585765 - DNA, 25 bp, Homo sapien
gaagttgattataagcttaagaggg

SEQ ID NO: 4585766 - DNA, 25 bp, Homo sapien
agttgattataagcttaagagggtt

SEQ ID NO: 4585767 - DNA, 25 bp, Homo sapien
aagttgattataagcttaagagggt

SEQ ID NO: 4585768 - DNA, 25 bp, Homo sapien
ggaaggtgcacacaactcgcagttg

SEQ ID NO: 4585769 - DNA, 25 bp, Homo sapien
tgtagtatggtggtgtttggaaggt

SEQ ID NO: 4585770 - DNA, 25 bp, Homo sapien
aattcattgcggatgtcacctgtca

SEQ ID NO: 4585771 - DNA, 25 bp, Homo sapien
acaactcgcagttgcctctctgctg

SEQ ID NO: 4585772 - DNA, 25 bp, Homo sapien
tctgtgtctgactgtcaagagctcc

SEQ ID NO: 4585773 - DNA, 25 bp, Homo sapien
gatccgtgaaggtcatcctgcttcc

SEQ ID NO: 4585774 - DNA, 25 bp, Homo sapien
catgggctgccgagacatctggttc

SEQ ID NO: 4585775 - DNA, 25 bp, Homo sapien
agacatctggttctctgatccgtga

SEQ ID NO: 4585776 - DNA, 25 bp, Homo sapien
ttccagggtggaacttgacttcatc

SEQ ID NO: 4585777 - DNA, 25 bp, Homo sapien
ctggcgaaccttccagggtggaact

SEQ ID NO: 4585778 - DNA, 25 bp, Homo sapien
ccttccagggtggaacttgacttca

SEQ ID NO: 4585779 - DNA, 25 bp, Homo sapien
ttacactggcgaaccttccagggtg

SEQ ID NO: 4585780 - DNA, 25 bp, Homo sapien
cgtgggggcagaacctttgcctgca

SEQ ID NO: 4585781 - DNA, 25 bp, Homo sapien
ttgtcctcctttgaccgtgggggca

SEQ ID NO: 4585782 - DNA, 25 bp, Homo sapien
tcctcctttgaccgtgggggcagaa

SEQ ID NO: 4585783 - DNA, 25 bp, Homo sapien
gtcctcctttgaccgtgggggcaga

SEQ ID NO: 4585784 - DNA, 25 bp, Homo sapien
tccaaagtgggcacagcgggtgggc

SEQ ID NO: 4585785 - DNA, 25 bp, Homo sapien
ctccaaagtgggcacagcgggtggg

SEQ ID NO: 4585786 - DNA, 25 bp, Homo sapien
ccaaagtgggcacagcgggtgggca

SEQ ID NO: 4585787 - DNA, 25 bp, Homo sapien
caaagtgggcacagcgggtgggcat

SEQ ID NO: 4585788 - DNA, 25 bp, Homo sapien
atgtctagtaggtccaactgttcaa

SEQ ID NO: 4585789 - DNA, 25 bp, Homo sapien
gctcatccaggagttattcagaagc

SEQ ID NO: 4585790 - DNA, 25 bp, Homo sapien
tccgtgattgttgtgtggagttcta

SEQ ID NO: 4585791 - DNA, 25 bp, Homo sapien
gagacttgctttaggacttaacatg

SEQ ID NO: 4585792 - DNA, 25 bp, Homo sapien
taaatgtgtgcaattcgagtgctga

SEQ ID NO: 4585793 - DNA, 25 bp, Homo sapien
aatgttattaggtctctgctattcc

SEQ ID NO: 4585794 - DNA, 25 bp, Homo sapien
cagcagtaccaatgggccaagagca

SEQ ID NO: 4585795 - DNA, 25 bp, Homo sapien
ccttattcaatactggatgtgcgca

SEQ ID NO: 4585796 - DNA, 25 bp, Homo sapien
agttcccttcagtctggtcagtccg

SEQ ID NO: 4585797 - DNA, 25 bp, Homo sapien
tatacagagggtctcacggaagcca

SEQ ID NO: 4585798 - DNA, 25 bp, Homo sapien
tgggacactgtagcacttgaccaca

SEQ ID NO: 4585799 - DNA, 25 bp, Homo sapien
agtagcctgctcacatcagacccag

SEQ ID NO: 4585800 - DNA, 25 bp, Homo sapien
tgtgtctgttgtgggatgctgtcca

SEQ ID NO: 4585801 - DNA, 25 bp, Homo sapien
caaatgagctcaggctcatgggtcc

SEQ ID NO: 4585802 - DNA, 25 bp, Homo sapien
caatgtgggttacaagagctctcac

SEQ ID NO: 4585803 - DNA, 25 bp, Homo sapien
tcatgggtcctgcaccctctaggtg

SEQ ID NO: 4585804 - DNA, 25 bp, Homo sapien
tctggtagcgctagttctgtatgcc

SEQ ID NO: 4585805 - DNA, 25 bp, Homo sapien
gagctgaccctttgagcagatgtac

SEQ ID NO: 4585806 - DNA, 25 bp, Homo sapien
tctgtatgcctacgtagagctgacc

SEQ ID NO: 4585807 - DNA, 25 bp, Homo sapien
agatgtactcgttggcgctctgcag

SEQ ID NO: 4585808 - DNA, 25 bp, Homo sapien
tctgcagcaattagacggcatccat

SEQ ID NO: 4585809 - DNA, 25 bp, Homo sapien
catgtcaccatcttacacaaggagg

SEQ ID NO: 4585810 - DNA, 25 bp, Homo sapien
gatgtaacttggaggctggccaagc

SEQ ID NO: 4585811 - DNA, 25 bp, Homo sapien
caaatcagtctgatgtcagtccgat

SEQ ID NO: 4585812 - DNA, 25 bp, Homo sapien
ttcatcagggattggagtacaaacc

SEQ ID NO: 4585813 - DNA, 25 bp, Homo sapien
cagctctgcctgtaatgtgctgagt

SEQ ID NO: 4585814 - DNA, 25 bp, Homo sapien
tcatttgccttaccctagtcctgga

SEQ ID NO: 4585815 - DNA, 25 bp, Homo sapien
tcctcaaattggaggtctccaagcc

SEQ ID NO: 4585816 - DNA, 25 bp, Homo sapien
gctggcgtcatgcaaagtcatgcaa

SEQ ID NO: 4585817 - DNA, 25 bp, Homo sapien
cagagattggaatgggcagctcatc

SEQ ID NO: 4585818 - DNA, 25 bp, Homo sapien
cattcactcatacatctggccgttg

SEQ ID NO: 4585819 - DNA, 25 bp, Homo sapien
tgggaccacgtgagatcattcactc

SEQ ID NO: 4585820 - DNA, 25 bp, Homo sapien
gatcgcaagagccatgtagaagctg

SEQ ID NO: 4585821 - DNA, 25 bp, Homo sapien
tgaatgcttataggtggcctctcct

SEQ ID NO: 4585822 - DNA, 25 bp, Homo sapien
tactccatcagttagagctgacaca

SEQ ID NO: 4585823 - DNA, 25 bp, Homo sapien
ccttggaagttgcatggcatcacct

SEQ ID NO: 4585824 - DNA, 25 bp, Homo sapien
gaatgcctgagtgcctggccaaagg

SEQ ID NO: 4585825 - DNA, 25 bp, Homo sapien
gattcggtggagactatcagcccaa

SEQ ID NO: 4585826 - DNA, 25 bp, Homo sapien
tgctcagggctaaacgggcattgcc

SEQ ID NO: 4585827 - DNA, 25 bp, Homo sapien
tgattgccaagctcaggaccaggca

SEQ ID NO: 4585828 - DNA, 25 bp, Homo sapien
taaaccattatttccaagttgacac

SEQ ID NO: 4585829 - DNA, 25 bp, Homo sapien
attttgcggcattaaagccatatac

SEQ ID NO: 4585830 - DNA, 25 bp, Homo sapien
acaggactgagggagcggtacatgc

SEQ ID NO: 4585831 - DNA, 25 bp, Homo sapien
agccatatacaaggtctatatcaga

SEQ ID NO: 4585832 - DNA, 25 bp, Homo sapien
gatgattctctatgacagtcaggga

SEQ ID NO: 4585833 - DNA, 25 bp, Homo sapien
gagtcacgggagttctttgccaaga

SEQ ID NO: 4585834 - DNA, 25 bp, Homo sapien
gccagagtgcatcgcatggtgtcca

SEQ ID NO: 4585835 - DNA, 25 bp, Homo sapien
cagatggttagaggcctgggtctac

SEQ ID NO: 4585836 - DNA, 25 bp, Homo sapien
tatggaagaatgtgaccaggttggt

SEQ ID NO: 4585837 - DNA, 25 bp, Homo sapien
ggttggcataaaaccgggtcatgct

SEQ ID NO: 4585838 - DNA, 25 bp, Homo sapien
cacgttctgtgggaggtaaccgctg

SEQ ID NO: 4585839 - DNA, 25 bp, Homo sapien
taaccgctgaggtcggtatggaaga

SEQ ID NO: 4585840 - DNA, 25 bp, Homo sapien
ctgtgaaggcaacagcagagctgtg

SEQ ID NO: 4585841 - DNA, 25 bp, Homo sapien
ggcaacagcagagctgtgttatgat

SEQ ID NO: 4585842 - DNA, 25 bp, Homo sapien
aaggcaacagcagagctgtgttatg

SEQ ID NO: 4585843 - DNA, 25 bp, Homo sapien
gtgaaggcaacagcagagctgtgtt

SEQ ID NO: 4585844 - DNA, 25 bp, Homo sapien
cagaaatttcctggcaagagcctgg

SEQ ID NO: 4585845 - DNA, 25 bp, Homo sapien
gcatgattcccagggtaaacaaggg

SEQ ID NO: 4585846 - DNA, 25 bp, Homo sapien
acagaaatttcctggcaagagcctg

SEQ ID NO: 4585847 - DNA, 25 bp, Homo sapien
ttgctgtcaacatgcatgattccca

SEQ ID NO: 4585848 - DNA, 25 bp, Homo sapien
tcagaactgccctttaggcctgagt

SEQ ID NO: 4585849 - DNA, 25 bp, Homo sapien
actgccctttaggcctgagttccgc

SEQ ID NO: 4585850 - DNA, 25 bp, Homo sapien
tgccctttaggcctgagttccgcca

SEQ ID NO: 4585851 - DNA, 25 bp, Homo sapien
gaactgccctttaggcctgagttcc

SEQ ID NO: 4585852 - DNA, 25 bp, Homo sapien
ggtggggactgctatcctcaaagct

SEQ ID NO: 4585853 - DNA, 25 bp, Homo sapien
cataacggatgctccacatgggtgg

SEQ ID NO: 4585854 - DNA, 25 bp, Homo sapien
cctggaagaggttcacagaagcaac

SEQ ID NO: 4585855 - DNA, 25 bp, Homo sapien
cagaagcaaccacaaggatggttaa

SEQ ID NO: 4585856 - DNA, 25 bp, Homo sapien
ttaaatcctctcacaaaacctggct

SEQ ID NO: 4585857 - DNA, 25 bp, Homo sapien
tcatatctcttgactagcaccaagt

SEQ ID NO: 4585858 - DNA, 25 bp, Homo sapien
catatctcttgactagcaccaagtc

SEQ ID NO: 4585859 - DNA, 25 bp, Homo sapien
tatctcttgactagcaccaagtcca

SEQ ID NO: 4585860 - DNA, 25 bp, Homo sapien
cctcatatctcttgactagcaccaa

SEQ ID NO: 4585861 - DNA, 25 bp, Homo sapien
agcggagggagtggaggttctgctt

SEQ ID NO: 4585862 - DNA, 25 bp, Homo sapien
agggagtggaggttctgcttacaca

SEQ ID NO: 4585863 - DNA, 25 bp, Homo sapien
cagcggagggagtggaggttctgct

SEQ ID NO: 4585864 - DNA, 25 bp, Homo sapien
tatgctccccgcagagactctgttt

SEQ ID NO: 4585865 - DNA, 25 bp, Homo sapien
tcctgtgttgcctagtgcagcagcc

SEQ ID NO: 4585866 - DNA, 25 bp, Homo sapien
tcatgcaggtacgtggagctgctac

SEQ ID NO: 4585867 - DNA, 25 bp, Homo sapien
gccccacacaaggaacaggtatgct

SEQ ID NO: 4585868 - DNA, 25 bp, Homo sapien
ttggataatttcaaaaccggtcaca

SEQ ID NO: 4585869 - DNA, 25 bp, Homo sapien
gtcagtgatgctttggataatttca

SEQ ID NO: 4585870 - DNA, 25 bp, Homo sapien
tggataatttcaaaaccggtcacat

SEQ ID NO: 4585871 - DNA, 25 bp, Homo sapien
gataatttcaaaaccggtcacattc

SEQ ID NO: 4585872 - DNA, 25 bp, Homo sapien
catatacaatgccttctcctcggta

SEQ ID NO: 4585873 - DNA, 25 bp, Homo sapien
tcatcccacttcactcgtaggcctc

SEQ ID NO: 4585874 - DNA, 25 bp, Homo sapien
cacacctcctctagtgtcccatata

SEQ ID NO: 4585875 - DNA, 25 bp, Homo sapien
acttcactcgtaggcctccaacagc

SEQ ID NO: 4585876 - DNA, 25 bp, Homo sapien
gggctgaaagtcactagccccgcct

SEQ ID NO: 4585877 - DNA, 25 bp, Homo sapien
ccatgtctgtcactactctttagga

SEQ ID NO: 4585878 - DNA, 25 bp, Homo sapien
caggcctgcagaaatggacagtaag

SEQ ID NO: 4585879 - DNA, 25 bp, Homo sapien
ctggagcacgaaaaggaatttgacc

SEQ ID NO: 4585880 - DNA, 25 bp, Homo sapien
acaagtgatcacaggttatagggtt

SEQ ID NO: 4585881 - DNA, 25 bp, Homo sapien
tctggtaatctttgaacgaggcatg

SEQ ID NO: 4585882 - DNA, 25 bp, Homo sapien
ccataaagataccaggaagggtgcg

SEQ ID NO: 4585883 - DNA, 25 bp, Homo sapien
tattttaggaggcaggcccataaag

SEQ ID NO: 4585884 - DNA, 25 bp, Homo sapien
tccctggaaactccacagatggcct

SEQ ID NO: 4585885 - DNA, 25 bp, Homo sapien
cacagatggcctccaggaaactgaa

SEQ ID NO: 4585886 - DNA, 25 bp, Homo sapien
aggttccctggaaactccacagatg

SEQ ID NO: 4585887 - DNA, 25 bp, Homo sapien
gttccctggaaactccacagatggc

SEQ ID NO: 4585888 - DNA, 25 bp, Homo sapien
taagaggcctcaagagatacgactc

SEQ ID NO: 4585889 - DNA, 25 bp, Homo sapien
catacgtggaaaagctgggactagt

SEQ ID NO: 4585890 - DNA, 25 bp, Homo sapien
tgtttccttgagcaacccagggcta

SEQ ID NO: 4585891 - DNA, 25 bp, Homo sapien
gaagggctctggtcacctggcttaa

SEQ ID NO: 4585892 - DNA, 25 bp, Homo sapien
cctgaagtcattgtgagcataacag

SEQ ID NO: 4585893 - DNA, 25 bp, Homo sapien
gaagtcattgtgagcataacaggcc

SEQ ID NO: 4585894 - DNA, 25 bp, Homo sapien
cacctgaagtcattgtgagcataac

SEQ ID NO: 4585895 - DNA, 25 bp, Homo sapien
tcattgtgagcataacaggcccaat

SEQ ID NO: 4585896 - DNA, 25 bp, Homo sapien
gaagaaaacaatccccattggaatc

SEQ ID NO: 4585897 - DNA, 25 bp, Homo sapien
gggctccacgaagccgtctccgcga

SEQ ID NO: 4585898 - DNA, 25 bp, Homo sapien
aatccccattggaatccctctcaat

SEQ ID NO: 4585899 - DNA, 25 bp, Homo sapien
gaatccctctcaatcgggtccaggg

SEQ ID NO: 4585900 - DNA, 25 bp, Homo sapien
ggtactggagcatcttctcggccac

SEQ ID NO: 4585901 - DNA, 25 bp, Homo sapien
gccttcccggcaaatcttccagcct

SEQ ID NO: 4585902 - DNA, 25 bp, Homo sapien
cggccacagcctcgctcatctgggc

SEQ ID NO: 4585903 - DNA, 25 bp, Homo sapien
tctgggctgccagcgccgggtccat

SEQ ID NO: 4585904 - DNA, 25 bp, Homo sapien
ccgggactgtgagatggccaatgac

SEQ ID NO: 4585905 - DNA, 25 bp, Homo sapien
tgtcctgagtgcaccgaggctttca

SEQ ID NO: 4585906 - DNA, 25 bp, Homo sapien
caggctctccagttagcgtcagcgc

SEQ ID NO: 4585907 - DNA, 25 bp, Homo sapien
aatgacggtctgacccgttgggccg

SEQ ID NO: 4585908 - DNA, 25 bp, Homo sapien
gacagtggtgcgatttgcattagag

SEQ ID NO: 4585909 - DNA, 25 bp, Homo sapien
ttagaggtaatatgctagggcggct

SEQ ID NO: 4585910 - DNA, 25 bp, Homo sapien
gtgaaggtctctgcccccgattgtg

SEQ ID NO: 4585911 - DNA, 25 bp, Homo sapien
gaggacccatcgtagagtgtttagg

SEQ ID NO: 4585912 - DNA, 25 bp, Homo sapien
aagagatagggtgagttcagttctg

SEQ ID NO: 4585913 - DNA, 25 bp, Homo sapien
gaagagatagggtgagttcagttct

SEQ ID NO: 4585914 - DNA, 25 bp, Homo sapien
ggtgatcggcagcttccccataaaa

SEQ ID NO: 4585915 - DNA, 25 bp, Homo sapien
tgacctctaggaacgggacactgga

SEQ ID NO: 4585916 - DNA, 25 bp, Homo sapien
taagggaagaacctcgagtgagcgc

SEQ ID NO: 4585917 - DNA, 25 bp, Homo sapien
ccccggaagcatgccaacgtgtaaa

SEQ ID NO: 4585918 - DNA, 25 bp, Homo sapien
acaaatcaagtcatccagatccacg

SEQ ID NO: 4585919 - DNA, 25 bp, Homo sapien
tccagatccacggtcagctcctgcc

SEQ ID NO: 4585920 - DNA, 25 bp, Homo sapien
gaacaaatcaagtcatccagatcca

SEQ ID NO: 4585921 - DNA, 25 bp, Homo sapien
agctcctgccccgacttggccttcc

SEQ ID NO: 4585922 - DNA, 25 bp, Homo sapien
gatgcatattgtcgcacgttcctgg

SEQ ID NO: 4585923 - DNA, 25 bp, Homo sapien
gatgctgccgacacggagtcagatt

SEQ ID NO: 4585924 - DNA, 25 bp, Homo sapien
tctgctggtcactgctggatgctgc

SEQ ID NO: 4585925 - DNA, 25 bp, Homo sapien
aattccgggatcgtggctttctggg

SEQ ID NO: 4585926 - DNA, 25 bp, Homo sapien
tgcttgcacacagaccgtgcagata

SEQ ID NO: 4585927 - DNA, 25 bp, Homo sapien
gcctgggaccctgtgccagcaaagt

SEQ ID NO: 4585928 - DNA, 25 bp, Homo sapien
cagcaaagtcgaggcctgtggtcca

SEQ ID NO: 4585929 - DNA, 25 bp, Homo sapien
tgtcataggtgtgcgcgatctgttc

SEQ ID NO: 4585930 - DNA, 25 bp, Homo sapien
tgttagtttcatgctctagcctgga

SEQ ID NO: 4585931 - DNA, 25 bp, Homo sapien
cctgagtcaaaatgggccacgttgc

SEQ ID NO: 4585932 - DNA, 25 bp, Homo sapien
cactgtcgtttggaagcttcttggt

SEQ ID NO: 4585933 - DNA, 25 bp, Homo sapien
catggactgtgcgactgtctctatc

SEQ ID NO: 4585934 - DNA, 25 bp, Homo sapien
gagagggaggtgttgtgagaagaca

SEQ ID NO: 4585935 - DNA, 25 bp, Homo sapien
cagggagagggaggtgttgtgagaa

SEQ ID NO: 4585936 - DNA, 25 bp, Homo sapien
gggagagggaggtgttgtgagaaga

SEQ ID NO: 4585937 - DNA, 25 bp, Homo sapien
gcagggagagggaggtgttgtgaga

SEQ ID NO: 4585938 - DNA, 25 bp, Homo sapien
cactctgttagtggtcctgagaaac

SEQ ID NO: 4585939 - DNA, 25 bp, Homo sapien
gacttctacgccacatgcttccatt

SEQ ID NO: 4585940 - DNA, 25 bp, Homo sapien
gatccatctccttcgagctgccgtt

SEQ ID NO: 4585941 - DNA, 25 bp, Homo sapien
acagcagacttctacgccacatgct

SEQ ID NO: 4585942 - DNA, 25 bp, Homo sapien
tctaccatctgggcaacctttttct

SEQ ID NO: 4585943 - DNA, 25 bp, Homo sapien
accatctgggcaacctttttcttat

SEQ ID NO: 4585944 - DNA, 25 bp, Homo sapien
cttctaccatctgggcaaccttttt

SEQ ID NO: 4585945 - DNA, 25 bp, Homo sapien
taccatctgggcaacctttttctta

SEQ ID NO: 4585946 - DNA, 25 bp, Homo sapien
ctatggacggtatgctctgggctcg

SEQ ID NO: 4585947 - DNA, 25 bp, Homo sapien
gaccataactgtactactattgccc

SEQ ID NO: 4585948 - DNA, 25 bp, Homo sapien
cttggaccataactgtactactatt

SEQ ID NO: 4585949 - DNA, 25 bp, Homo sapien
tactattgccccctatggacggtat

SEQ ID NO: 4585950 - DNA, 25 bp, Homo sapien
gcactgaaaggctcgaggcagctgc

SEQ ID NO: 4585951 - DNA, 25 bp, Homo sapien
cactgagggcttggtgtggtcacag

SEQ ID NO: 4585952 - DNA, 25 bp, Homo sapien
ttggtgtggtcacagggtgggcact

SEQ ID NO: 4585953 - DNA, 25 bp, Homo sapien
ctgaaaggctcgaggcagctgcaag

SEQ ID NO: 4585954 - DNA, 25 bp, Homo sapien
ggaagaaaaacaggagcaggcttcc

SEQ ID NO: 4585955 - DNA, 25 bp, Homo sapien
gaggaagaaaaacaggagcaggctt

SEQ ID NO: 4585956 - DNA, 25 bp, Homo sapien
aagaaaaacaggagcaggcttcctc

SEQ ID NO: 4585957 - DNA, 25 bp, Homo sapien
cttgaggaggaagaaaaacaggagc

SEQ ID NO: 4585958 - DNA, 25 bp, Homo sapien
gggagccatccctgggtattcttag

SEQ ID NO: 4585959 - DNA, 25 bp, Homo sapien
tggccttgcaccatagtgggtggcc

SEQ ID NO: 4585960 - DNA, 25 bp, Homo sapien
tgtgacttcacttgtattcccacgc

SEQ ID NO: 4585961 - DNA, 25 bp, Homo sapien
cacgctggcgggatctcagtcatgt

SEQ ID NO: 4585962 - DNA, 25 bp, Homo sapien
gaccgtgcgatgctctggagataat

SEQ ID NO: 4585963 - DNA, 25 bp, Homo sapien
tgagctttagagaccgtgcgatgct

SEQ ID NO: 4585964 - DNA, 25 bp, Homo sapien
gcattttgagctggtggttgctgag

SEQ ID NO: 4585965 - DNA, 25 bp, Homo sapien
ggttgctgagctttagagaccgtgc

SEQ ID NO: 4585966 - DNA, 25 bp, Homo sapien
caggaaagtctttctcaatcgtttc

SEQ ID NO: 4585967 - DNA, 25 bp, Homo sapien
caatcgtttctgacacaatgtcata

SEQ ID NO: 4585968 - DNA, 25 bp, Homo sapien
accacggggctactgatgtgtccaa

SEQ ID NO: 4585969 - DNA, 25 bp, Homo sapien
aaccacggagccaaaccacacagga

SEQ ID NO: 4585970 - DNA, 25 bp, Homo sapien
ggcttgtatcggacaatagcaaaaa

SEQ ID NO: 4585971 - DNA, 25 bp, Homo sapien
aaacagcataaacaggagcattgcc

SEQ ID NO: 4585972 - DNA, 25 bp, Homo sapien
cagtttagagatggcttgtatcgga

SEQ ID NO: 4585973 - DNA, 25 bp, Homo sapien
gagcattgccaagtagaagttgttg

SEQ ID NO: 4585974 - DNA, 25 bp, Homo sapien
tgaggctcgaaatacttgctggtgg

SEQ ID NO: 4585975 - DNA, 25 bp, Homo sapien
cttgaggctcgaaatacttgctggt

SEQ ID NO: 4585976 - DNA, 25 bp, Homo sapien
cccaatgagtttgagaacgttgaac

SEQ ID NO: 4585977 - DNA, 25 bp, Homo sapien
agcccagcttctcaggtacatgagc

SEQ ID NO: 4585978 - DNA, 25 bp, Homo sapien
acatggggagaagaaggcccccatc

SEQ ID NO: 4585979 - DNA, 25 bp, Homo sapien
agacatggggagaagaaggccccca

SEQ ID NO: 4585980 - DNA, 25 bp, Homo sapien
ggagacatggggagaagaaggcccc

SEQ ID NO: 4585981 - DNA, 25 bp, Homo sapien
ctgggagacatggggagaagaaggc

SEQ ID NO: 4585982 - DNA, 25 bp, Homo sapien
ttccttggttgtagactaaatgtag

SEQ ID NO: 4585983 - DNA, 25 bp, Homo sapien
cttggttgtagactaaatgtagcac

SEQ ID NO: 4585984 - DNA, 25 bp, Homo sapien
tgtagactaaatgtagcacattctc

SEQ ID NO: 4585985 - DNA, 25 bp, Homo sapien
taaatgtagcacattctcagctatt

SEQ ID NO: 4585986 - DNA, 25 bp, Homo sapien
gaagtctatgagcagaatgctcgcc

SEQ ID NO: 4585987 - DNA, 25 bp, Homo sapien
cagtagtcacttaagtaccgcacga

SEQ ID NO: 4585988 - DNA, 25 bp, Homo sapien
taccgcacgaaaagtcctcggaaga

SEQ ID NO: 4585989 - DNA, 25 bp, Homo sapien
cacggtgaagagcatgtcaatgatg

SEQ ID NO: 4585990 - DNA, 25 bp, Homo sapien
caagcatttaggacaggacccagca

SEQ ID NO: 4585991 - DNA, 25 bp, Homo sapien
taggactcttatgaggaccaagcat

SEQ ID NO: 4585992 - DNA, 25 bp, Homo sapien
tcatctgtgcctataagggtgacaa

SEQ ID NO: 4585993 - DNA, 25 bp, Homo sapien
caagtacttgaccactgtgcctcag

SEQ ID NO: 4585994 - DNA, 25 bp, Homo sapien
tgtctcccagcactggtcttgtgga

SEQ ID NO: 4585995 - DNA, 25 bp, Homo sapien
ctgaccaacgtatgtctcccagcac

SEQ ID NO: 4585996 - DNA, 25 bp, Homo sapien
tctcccagcactggtcttgtggact

SEQ ID NO: 4585997 - DNA, 25 bp, Homo sapien
gaccaacgtatgtctcccagcactg

SEQ ID NO: 4585998 - DNA, 25 bp, Homo sapien
gtcttgttggcctttataagaggca

SEQ ID NO: 4585999 - DNA, 25 bp, Homo sapien
caaagaaggtggtggaatctatcca

SEQ ID NO: 4586000 - DNA, 25 bp, Homo sapien
aaggcccatgtgttgtttctcctga

SEQ ID NO: 4586001 - DNA, 25 bp, Homo sapien
agccccattccaggccgagatgtgg

SEQ ID NO: 4586002 - DNA, 25 bp, Homo sapien
tccaggagagcaatgatcaggctgt

SEQ ID NO: 4586003 - DNA, 25 bp, Homo sapien
tgtccaggagagcaatgatcaggct

SEQ ID NO: 4586004 - DNA, 25 bp, Homo sapien
gtccaggagagcaatgatcaggctg

SEQ ID NO: 4586005 - DNA, 25 bp, Homo sapien
ctgtgggtgggcacatgggtgagcc

SEQ ID NO: 4586006 - DNA, 25 bp, Homo sapien
gcatttctgggcaggactgttgtac

SEQ ID NO: 4586007 - DNA, 25 bp, Homo sapien
gtgggcacatgggtgagccacaggt

SEQ ID NO: 4586008 - DNA, 25 bp, Homo sapien
tgagccacaggtggcatttctgggc

SEQ ID NO: 4586009 - DNA, 25 bp, Homo sapien
tgctatcatggtgacgagggagacc

SEQ ID NO: 4586010 - DNA, 25 bp, Homo sapien
cttgcaagctggaagcgcagcgtgg

SEQ ID NO: 4586011 - DNA, 25 bp, Homo sapien
tggtgacgagggagaccaccacact

SEQ ID NO: 4586012 - DNA, 25 bp, Homo sapien
aaaggctgatggtgctatcatggtg

SEQ ID NO: 4586013 - DNA, 25 bp, Homo sapien
tggcaataatcctcaggcagatggt

SEQ ID NO: 4586014 - DNA, 25 bp, Homo sapien
caaagtagatgagataaatgctccc

SEQ ID NO: 4586015 - DNA, 25 bp, Homo sapien
cttctgggaccggtccaccacaaag

SEQ ID NO: 4586016 - DNA, 25 bp, Homo sapien
aagtgtcagctccttcttcgactgc

SEQ ID NO: 4586017 - DNA, 25 bp, Homo sapien
ttttctcctgttcttccaatatagc

SEQ ID NO: 4586018 - DNA, 25 bp, Homo sapien
tttctcctgttcttccaatatagct

SEQ ID NO: 4586019 - DNA, 25 bp, Homo sapien
tctcctgttcttccaatatagcttc

SEQ ID NO: 4586020 - DNA, 25 bp, Homo sapien
ctttttctcctgttcttccaatata

SEQ ID NO: 4586021 - DNA, 25 bp, Homo sapien
caatgaggtaatcccaggcacagaa

SEQ ID NO: 4586022 - DNA, 25 bp, Homo sapien
gactcgtgcgggagttcttagccat

SEQ ID NO: 4586023 - DNA, 25 bp, Homo sapien
ttttcattggaagcactggcaagac

SEQ ID NO: 4586024 - DNA, 25 bp, Homo sapien
gaacacccgccagcagaaggtatag

SEQ ID NO: 4586025 - DNA, 25 bp, Homo sapien
atacgccaagggcagccggtagcca

SEQ ID NO: 4586026 - DNA, 25 bp, Homo sapien
cgtaatatccgtagaagaggacaga

SEQ ID NO: 4586027 - DNA, 25 bp, Homo sapien
ggtagccagctctcccgatcttcct

SEQ ID NO: 4586028 - DNA, 25 bp, Homo sapien
actgccatccccactaggaaatacg

SEQ ID NO: 4586029 - DNA, 25 bp, Homo sapien
gggcagacgaaacctgctccttggg

SEQ ID NO: 4586030 - DNA, 25 bp, Homo sapien
gagaccagacggtgtccaggtcttg

SEQ ID NO: 4586031 - DNA, 25 bp, Homo sapien
tgtccaggtcttgggcagacgaaac

SEQ ID NO: 4586032 - DNA, 25 bp, Homo sapien
ccccagagaccagacggtgtccagg

SEQ ID NO: 4586033 - DNA, 25 bp, Homo sapien
gacaataaaagcacctgtcataatg

SEQ ID NO: 4586034 - DNA, 25 bp, Homo sapien
ggaggcaacgccagatccaaaatga

SEQ ID NO: 4586035 - DNA, 25 bp, Homo sapien
aattccaaataaccatctcaagaat

SEQ ID NO: 4586036 - DNA, 25 bp, Homo sapien
cataatggtgagcacaatattaatt

SEQ ID NO: 4586037 - DNA, 25 bp, Homo sapien
gggaatgaagatgaccacaaagtta

SEQ ID NO: 4586038 - DNA, 25 bp, Homo sapien
tacaggcgagacgagcaaatttccg

SEQ ID NO: 4586039 - DNA, 25 bp, Homo sapien
cgagacgagcaaatttccgccagag

SEQ ID NO: 4586040 - DNA, 25 bp, Homo sapien
tgaccacaaagttacaggcgagacg

SEQ ID NO: 4586041 - DNA, 25 bp, Homo sapien
ttaattttgttcacctggcttgtct

SEQ ID NO: 4586042 - DNA, 25 bp, Homo sapien
cttaattttgttcacctggcttgtc

SEQ ID NO: 4586043 - DNA, 25 bp, Homo sapien
taattttgttcacctggcttgtctc

SEQ ID NO: 4586044 - DNA, 25 bp, Homo sapien
gcagctttctcattgtaagaaatac

SEQ ID NO: 4586045 - DNA, 25 bp, Homo sapien
agctttctcattgtaagaaatacag

SEQ ID NO: 4586046 - DNA, 25 bp, Homo sapien
ctgcagctttctcattgtaagaaat

SEQ ID NO: 4586047 - DNA, 25 bp, Homo sapien
cagctttctcattgtaagaaataca

SEQ ID NO: 4586048 - DNA, 25 bp, Homo sapien
gcttggtagcctcgggtcctggtca

SEQ ID NO: 4586049 - DNA, 25 bp, Homo sapien
cttggtagcctcgggtcctggtcag

SEQ ID NO: 4586050 - DNA, 25 bp, Homo sapien
tggtagcctcgggtcctggtcagcc

SEQ ID NO: 4586051 - DNA, 25 bp, Homo sapien
tgcttggtagcctcgggtcctggtc

SEQ ID NO: 4586052 - DNA, 25 bp, Homo sapien
cattgctgtcccctgtttcatcagc

SEQ ID NO: 4586053 - DNA, 25 bp, Homo sapien
ccagggtctgcagcgaatgtttgcc

SEQ ID NO: 4586054 - DNA, 25 bp, Homo sapien
tctggaactgtatattctggaagat

SEQ ID NO: 4586055 - DNA, 25 bp, Homo sapien
tctggaagatttgttccggatcatt

SEQ ID NO: 4586056 - DNA, 25 bp, Homo sapien
gcactggctggcatttctccggatg

SEQ ID NO: 4586057 - DNA, 25 bp, Homo sapien
atttctccggatgcctctatagcgc

SEQ ID NO: 4586058 - DNA, 25 bp, Homo sapien
gatgcctctatagcgctgggatgcc

SEQ ID NO: 4586059 - DNA, 25 bp, Homo sapien
cgctgggatgccttcgaggttttca

SEQ ID NO: 4586060 - DNA, 25 bp, Homo sapien
gctaacccactgctaacaatcagaa

SEQ ID NO: 4586061 - DNA, 25 bp, Homo sapien
gagctaacccactgctaacaatcag

SEQ ID NO: 4586062 - DNA, 25 bp, Homo sapien
gggagctaacccactgctaacaatc

SEQ ID NO: 4586063 - DNA, 25 bp, Homo sapien
ctaacccactgctaacaatcagaag

SEQ ID NO: 4586064 - DNA, 25 bp, Homo sapien
ctaggaagttggcaggcaaaggtct

SEQ ID NO: 4586065 - DNA, 25 bp, Homo sapien
ctggcttcccttctattgatacctc

SEQ ID NO: 4586066 - DNA, 25 bp, Homo sapien
tggctgtctggcttcccttctattg

SEQ ID NO: 4586067 - DNA, 25 bp, Homo sapien
gcagcttctcgggtgtggctgtggc

SEQ ID NO: 4586068 - DNA, 25 bp, Homo sapien
gctgtctggcttcccttctattgat

SEQ ID NO: 4586069 - DNA, 25 bp, Homo sapien
tttgagggatgagagggcgtggggg

SEQ ID NO: 4586070 - DNA, 25 bp, Homo sapien
tgagggatgagagggcgtgggggtt

SEQ ID NO: 4586071 - DNA, 25 bp, Homo sapien
ggatgagagggcgtgggggtttcca

SEQ ID NO: 4586072 - DNA, 25 bp, Homo sapien
ctttgagggatgagagggcgtgggg

SEQ ID NO: 4586073 - DNA, 25 bp, Homo sapien
gcagaatttctgtgtttgcgccccc

SEQ ID NO: 4586074 - DNA, 25 bp, Homo sapien
ttccttttttatgctgcagaatttc

SEQ ID NO: 4586075 - DNA, 25 bp, Homo sapien
tctggcatgctgcattcatttcctt

SEQ ID NO: 4586076 - DNA, 25 bp, Homo sapien
agaatttctgtgtttgcgcccccat

SEQ ID NO: 4586077 - DNA, 25 bp, Homo sapien
tagacatctacagggttctccatgc

SEQ ID NO: 4586078 - DNA, 25 bp, Homo sapien
tacagggttctccatgcgccccata

SEQ ID NO: 4586079 - DNA, 25 bp, Homo sapien
agggttctccatgcgccccataaat

SEQ ID NO: 4586080 - DNA, 25 bp, Homo sapien
gtagacatctacagggttctccatg

SEQ ID NO: 4586081 - DNA, 25 bp, Homo sapien
cataattatttccttggaggaaagt

SEQ ID NO: 4586082 - DNA, 25 bp, Homo sapien
tgtatcctggaccacagaatggagg

SEQ ID NO: 4586083 - DNA, 25 bp, Homo sapien
aaatgtatcctggaccacagaatgg

SEQ ID NO: 4586084 - DNA, 25 bp, Homo sapien
cacagaatggaggatgtccgcatgg

SEQ ID NO: 4586085 - DNA, 25 bp, Homo sapien
cctggaccacagaatggaggatgtc

SEQ ID NO: 4586086 - DNA, 25 bp, Homo sapien
gttatgctctcgtcattttcctgca

SEQ ID NO: 4586087 - DNA, 25 bp, Homo sapien
agaaagaaaagttatgctctcgtca

SEQ ID NO: 4586088 - DNA, 25 bp, Homo sapien
aagaaaagttatgctctcgtcattt

SEQ ID NO: 4586089 - DNA, 25 bp, Homo sapien
aaaagttatgctctcgtcattttcc

SEQ ID NO: 4586090 - DNA, 25 bp, Homo sapien
tctttcccctttcctgtgcttggct

SEQ ID NO: 4586091 - DNA, 25 bp, Homo sapien
cccctttcctgtgcttggctcttct

SEQ ID NO: 4586092 - DNA, 25 bp, Homo sapien
cctttcttctactggctctatttct

SEQ ID NO: 4586093 - DNA, 25 bp, Homo sapien
ttcttctactggctctatttcttgc

SEQ ID NO: 4586094 - DNA, 25 bp, Homo sapien
ctctgtcttagcacttcttgtcttt

SEQ ID NO: 4586095 - DNA, 25 bp, Homo sapien
tgtcttagcacttcttgtctttatc

SEQ ID NO: 4586096 - DNA, 25 bp, Homo sapien
ttatccaaaggttgagtttcctcat

SEQ ID NO: 4586097 - DNA, 25 bp, Homo sapien
tcttgtctttatccaaaggttgagt

SEQ ID NO: 4586098 - DNA, 25 bp, Homo sapien
agctgtgtcacctgaaacttggcca

SEQ ID NO: 4586099 - DNA, 25 bp, Homo sapien
tgttcaaaacggtgccatctgtggg

SEQ ID NO: 4586100 - DNA, 25 bp, Homo sapien
gggcagggccattctcaagtgagca

SEQ ID NO: 4586101 - DNA, 25 bp, Homo sapien
taagtgtgctgttcctccctaggtg

SEQ ID NO: 4586102 - DNA, 25 bp, Homo sapien
gaccacgttataattgctaggctga

SEQ ID NO: 4586103 - DNA, 25 bp, Homo sapien
tagagtgctgccaagaacgaggact

SEQ ID NO: 4586104 - DNA, 25 bp, Homo sapien
gattaggatttctgactcaagccac

SEQ ID NO: 4586105 - DNA, 25 bp, Homo sapien
tcattggacaggacaagcatgtgat

SEQ ID NO: 4586106 - DNA, 25 bp, Homo sapien
tgactgagaaggcatcccgtgggcc

SEQ ID NO: 4586107 - DNA, 25 bp, Homo sapien
agaaggcatcccgtgggccttcctt

SEQ ID NO: 4586108 - DNA, 25 bp, Homo sapien
cccgtgggccttccttgacatgggt

SEQ ID NO: 4586109 - DNA, 25 bp, Homo sapien
catcccgtgggccttccttgacatg

SEQ ID NO: 4586110 - DNA, 25 bp, Homo sapien
tggttattggcgtcaaaggtacaac

SEQ ID NO: 4586111 - DNA, 25 bp, Homo sapien
caatgttggttattggcgtcaaagg

SEQ ID NO: 4586112 - DNA, 25 bp, Homo sapien
aacaatgttggttattggcgtcaaa

SEQ ID NO: 4586113 - DNA, 25 bp, Homo sapien
atgttggttattggcgtcaaaggta

SEQ ID NO: 4586114 - DNA, 25 bp, Homo sapien
ctccactccagtgtggccagtatca

SEQ ID NO: 4586115 - DNA, 25 bp, Homo sapien
ctctccactccagtgtggccagtat

SEQ ID NO: 4586116 - DNA, 25 bp, Homo sapien
tctccactccagtgtggccagtatc

SEQ ID NO: 4586117 - DNA, 25 bp, Homo sapien
tccactccagtgtggccagtatcat

SEQ ID NO: 4586118 - DNA, 25 bp, Homo sapien
aagagggccaaggagtttagcctca

SEQ ID NO: 4586119 - DNA, 25 bp, Homo sapien
ttagcctcataacatctgtggcctt

SEQ ID NO: 4586120 - DNA, 25 bp, Homo sapien
ggccaaggagtttagcctcataaca

SEQ ID NO: 4586121 - DNA, 25 bp, Homo sapien
tagcctcataacatctgtggccttg

SEQ ID NO: 4586122 - DNA, 25 bp, Homo sapien
tcagagaaggtttggtttggattca

SEQ ID NO: 4586123 - DNA, 25 bp, Homo sapien
gtcagagaaggtttggtttggattc

SEQ ID NO: 4586124 - DNA, 25 bp, Homo sapien
attgcaactggccagtccactgtca

SEQ ID NO: 4586125 - DNA, 25 bp, Homo sapien
actggccagtccactgtcagctcca

SEQ ID NO: 4586126 - DNA, 25 bp, Homo sapien
tccattggcaatacaccaatagagg

SEQ ID NO: 4586127 - DNA, 25 bp, Homo sapien
gccatctccattggcaatacaccaa

SEQ ID NO: 4586128 - DNA, 25 bp, Homo sapien
ttacaaagactccgggccatctcca

SEQ ID NO: 4586129 - DNA, 25 bp, Homo sapien
acaaagactccgggccatctccatt

SEQ ID NO: 4586130 - DNA, 25 bp, Homo sapien
caggtttaggtaccaccactctaga

SEQ ID NO: 4586131 - DNA, 25 bp, Homo sapien
gcagccaggtttaggtaccaccact

SEQ ID NO: 4586132 - DNA, 25 bp, Homo sapien
tgagcagccaggtttaggtaccacc

SEQ ID NO: 4586133 - DNA, 25 bp, Homo sapien
tttaggtaccaccactctagaatct

SEQ ID NO: 4586134 - DNA, 25 bp, Homo sapien
tggagcaggtagcatcactaacaag

SEQ ID NO: 4586135 - DNA, 25 bp, Homo sapien
attcatggagcaggtagcatcacta

SEQ ID NO: 4586136 - DNA, 25 bp, Homo sapien
ctaacaagatatcctttttcaatta

SEQ ID NO: 4586137 - DNA, 25 bp, Homo sapien
acaagatatcctttttcaattatac

SEQ ID NO: 4586138 - DNA, 25 bp, Homo sapien
aatcaccttctagtttcaggttgga

SEQ ID NO: 4586139 - DNA, 25 bp, Homo sapien
tctagtttcaggttggactctgcag

SEQ ID NO: 4586140 - DNA, 25 bp, Homo sapien
gactctgcagctgaaaccaacatat

SEQ ID NO: 4586141 - DNA, 25 bp, Homo sapien
cgttcaaaatcaccttctagtttca

SEQ ID NO: 4586142 - DNA, 25 bp, Homo sapien
gttcaatgtgattctgggtagagct

SEQ ID NO: 4586143 - DNA, 25 bp, Homo sapien
gattctgggtagagttcaatgtgat

SEQ ID NO: 4586144 - DNA, 25 bp, Homo sapien
aacagattctgggtagagttcaatg

SEQ ID NO: 4586145 - DNA, 25 bp, Homo sapien
gagttcaatgtgattctgggtagag

SEQ ID NO: 4586146 - DNA, 25 bp, Homo sapien
cagatatactggacactcgtatgtt

SEQ ID NO: 4586147 - DNA, 25 bp, Homo sapien
tactggacactcgtatgttaaattc

SEQ ID NO: 4586148 - DNA, 25 bp, Homo sapien
cactcgtatgttaaattcaggtcag

SEQ ID NO: 4586149 - DNA, 25 bp, Homo sapien
tggacactcgtatgttaaattcagg

SEQ ID NO: 4586150 - DNA, 25 bp, Homo sapien
acagagtctgggccagacagctggt

SEQ ID NO: 4586151 - DNA, 25 bp, Homo sapien
cacagagtctgggccagacagctgg

SEQ ID NO: 4586152 - DNA, 25 bp, Homo sapien
ggtctagtgattttgccttgtgcat

SEQ ID NO: 4586153 - DNA, 25 bp, Homo sapien
gctcctttggtctagtgattttgcc

SEQ ID NO: 4586154 - DNA, 25 bp, Homo sapien
cccgtgctgattccccttccccatt

SEQ ID NO: 4586155 - DNA, 25 bp, Homo sapien
caggccccgtgctgattccccttcc

SEQ ID NO: 4586156 - DNA, 25 bp, Homo sapien
cagtcattgttaatgctccctggtg

SEQ ID NO: 4586157 - DNA, 25 bp, Homo sapien
agttcccagtccgagtcccagtcat

SEQ ID NO: 4586158 - DNA, 25 bp, Homo sapien
cattgttaatgctccctggtgtctt

SEQ ID NO: 4586159 - DNA, 25 bp, Homo sapien
tgagcagttcccagtccgagtccca

SEQ ID NO: 4586160 - DNA, 25 bp, Homo sapien
gcacatcactcaaaaatgtgacagc

SEQ ID NO: 4586161 - DNA, 25 bp, Homo sapien
cagttatagccacagcgtagagcat

SEQ ID NO: 4586162 - DNA, 25 bp, Homo sapien
aaaatgtgacagcagttatagccac

SEQ ID NO: 4586163 - DNA, 25 bp, Homo sapien
gaagagaagtactgatgagggtgag

SEQ ID NO: 4586164 - DNA, 25 bp, Homo sapien
ccttgtggatctgtagtccttccat

SEQ ID NO: 4586165 - DNA, 25 bp, Homo sapien
cccttgtggatctgtagtccttcca

SEQ ID NO: 4586166 - DNA, 25 bp, Homo sapien
tttcccttgtggatctgtagtcctt

SEQ ID NO: 4586167 - DNA, 25 bp, Homo sapien
tcccttgtggatctgtagtccttcc

SEQ ID NO: 4586168 - DNA, 25 bp, Homo sapien
ctgtccaaactagcatggagtgaag

SEQ ID NO: 4586169 - DNA, 25 bp, Homo sapien
gtccaaactagcatggagtgaagcc

SEQ ID NO: 4586170 - DNA, 25 bp, Homo sapien
tgtccaaactagcatggagtgaagc

SEQ ID NO: 4586171 - DNA, 25 bp, Homo sapien
aacaccatttaatagatagtctgtg

SEQ ID NO: 4586172 - DNA, 25 bp, Homo sapien
tcctaatgcaatctgagacagtacc

SEQ ID NO: 4586173 - DNA, 25 bp, Homo sapien
gccaccagtttaaagcaaatcgcaa

SEQ ID NO: 4586174 - DNA, 25 bp, Homo sapien
ttatacttctgttgcaccactgcca

SEQ ID NO: 4586175 - DNA, 25 bp, Homo sapien
gttagaatgaaatgccatcccttca

SEQ ID NO: 4586176 - DNA, 25 bp, Homo sapien
tgttagaatgaaatgccatcccttc

SEQ ID NO: 4586177 - DNA, 25 bp, Homo sapien
ttagaatgaaatgccatcccttcat

SEQ ID NO: 4586178 - DNA, 25 bp, Homo sapien
gaacgtagcttccaaactaatgaag

SEQ ID NO: 4586179 - DNA, 25 bp, Homo sapien
acaagaaggacaaaaggtatgcaca

SEQ ID NO: 4586180 - DNA, 25 bp, Homo sapien
tctagactgaccaccaaaagaatta

SEQ ID NO: 4586181 - DNA, 25 bp, Homo sapien
gcacatagtaaggtggtagttttaa

SEQ ID NO: 4586182 - DNA, 25 bp, Homo sapien
tatctgatacaataaagagtaatcc

SEQ ID NO: 4586183 - DNA, 25 bp, Homo sapien
tatttgacttcagtacgtactgtga

SEQ ID NO: 4586184 - DNA, 25 bp, Homo sapien
aaatcaacaagagaggagatcctga

SEQ ID NO: 4586185 - DNA, 25 bp, Homo sapien
caatagagtacacatgaaagtcagc

SEQ ID NO: 4586186 - DNA, 25 bp, Homo sapien
gaacaatgccatcaggtggctcagg

SEQ ID NO: 4586187 - DNA, 25 bp, Homo sapien
aattgatagacccttcaccgagaag

SEQ ID NO: 4586188 - DNA, 25 bp, Homo sapien
tctgaactttcatccgtgtagggca

SEQ ID NO: 4586189 - DNA, 25 bp, Homo sapien
cctccatgccaacaaaggtgaattg

SEQ ID NO: 4586190 - DNA, 25 bp, Homo sapien
ctgtcttggcaagtcacgctccaat

SEQ ID NO: 4586191 - DNA, 25 bp, Homo sapien
cttggcaagtcacgctccaatccat

SEQ ID NO: 4586192 - DNA, 25 bp, Homo sapien
catttctgcagccatcaccttgggc

SEQ ID NO: 4586193 - DNA, 25 bp, Homo sapien
caagtcacgctccaatccatccatt

SEQ ID NO: 4586194 - DNA, 25 bp, Homo sapien
ggtctcatctatgtgataaaccact

SEQ ID NO: 4586195 - DNA, 25 bp, Homo sapien
tatttacttacctatgtcatcatgg

SEQ ID NO: 4586196 - DNA, 25 bp, Homo sapien
tggcctcatcactttttgagcacgt

SEQ ID NO: 4586197 - DNA, 25 bp, Homo sapien
ttttggtgctcaaaccttggcaggt

SEQ ID NO: 4586198 - DNA, 25 bp, Homo sapien
tttgagcagtgcacatggagagccc

SEQ ID NO: 4586199 - DNA, 25 bp, Homo sapien
taaagagccttacactgaaaacagt

SEQ ID NO: 4586200 - DNA, 25 bp, Homo sapien
cctctagatgaagagggcatcctga

SEQ ID NO: 4586201 - DNA, 25 bp, Homo sapien
tcttagcttgttaggtgagtgagcc

SEQ ID NO: 4586202 - DNA, 25 bp, Homo sapien
tactggcaggccgtaatagcctcgg

SEQ ID NO: 4586203 - DNA, 25 bp, Homo sapien
gcagggttccgtgaaagtgctccaa

SEQ ID NO: 4586204 - DNA, 25 bp, Homo sapien
catgttggaaagaaccgcagggttc

SEQ ID NO: 4586205 - DNA, 25 bp, Homo sapien
ttacaaacctcagtggagattcggg

SEQ ID NO: 4586206 - DNA, 25 bp, Homo sapien
aagggatgctcctggcagctagcag

SEQ ID NO: 4586207 - DNA, 25 bp, Homo sapien
tatttttgctcgtcacgatgaaggg

SEQ ID NO: 4586208 - DNA, 25 bp, Homo sapien
tgctgctaaaatgcacaggatagcc

SEQ ID NO: 4586209 - DNA, 25 bp, Homo sapien
cacccgcagaattgtaaggcttata

SEQ ID NO: 4586210 - DNA, 25 bp, Homo sapien
gtccacagggcggttttatcaattg

SEQ ID NO: 4586211 - DNA, 25 bp, Homo sapien
tgtacattgcactcgataggtagtt

SEQ ID NO: 4586212 - DNA, 25 bp, Homo sapien
ccataactcaagtaatgtacattgc

SEQ ID NO: 4586213 - DNA, 25 bp, Homo sapien
cacagatcaatcgtgtagtggtgaa

SEQ ID NO: 4586214 - DNA, 25 bp, Homo sapien
taatgacgataatgcatagccagtg

SEQ ID NO: 4586215 - DNA, 25 bp, Homo sapien
ctttcataaattaaacgggtctgtg

SEQ ID NO: 4586216 - DNA, 25 bp, Homo sapien
taggatctctcagtatcatagcact

SEQ ID NO: 4586217 - DNA, 25 bp, Homo sapien
gatttctctatgacactagtgctag

SEQ ID NO: 4586218 - DNA, 25 bp, Homo sapien
ttaaccgtcacatcttcataaagag

SEQ ID NO: 4586219 - DNA, 25 bp, Homo sapien
atccacagatacaaacttaatcagt

SEQ ID NO: 4586220 - DNA, 25 bp, Homo sapien
tcttcataaagagctgaactgtaga

SEQ ID NO: 4586221 - DNA, 25 bp, Homo sapien
cagatacaaacttaatcagtttctc

SEQ ID NO: 4586222 - DNA, 25 bp, Homo sapien
tattatgagtttcacagagccactg

SEQ ID NO: 4586223 - DNA, 25 bp, Homo sapien
ctttgaacagtgtgagggtgtgacc

SEQ ID NO: 4586224 - DNA, 25 bp, Homo sapien
tggccaaaagtgttctcctgctaac

SEQ ID NO: 4586225 - DNA, 25 bp, Homo sapien
cagtgaaggagttgcttacaggtcc

SEQ ID NO: 4586226 - DNA, 25 bp, Homo sapien
ctccaagatgagatgctcccggagg

SEQ ID NO: 4586227 - DNA, 25 bp, Homo sapien
aagatgagatgctcccggaggtctc

SEQ ID NO: 4586228 - DNA, 25 bp, Homo sapien
tgagatgctcccggaggtctctctg

SEQ ID NO: 4586229 - DNA, 25 bp, Homo sapien
agatgctcccggaggtctctctgac

SEQ ID NO: 4586230 - DNA, 25 bp, Homo sapien
tgtttctgtgagaagactccacctt

SEQ ID NO: 4586231 - DNA, 25 bp, Homo sapien
ccttgtttctgtgagaagactccac

SEQ ID NO: 4586232 - DNA, 25 bp, Homo sapien
tccttgtttctgtgagaagactcca

SEQ ID NO: 4586233 - DNA, 25 bp, Homo sapien
cttgtttctgtgagaagactccacc

SEQ ID NO: 4586234 - DNA, 25 bp, Homo sapien
caatatgttttattagccatatgcg

SEQ ID NO: 4586235 - DNA, 25 bp, Homo sapien
cctcaatatgttttattagccatat

SEQ ID NO: 4586236 - DNA, 25 bp, Homo sapien
aatatgttttattagccatatgcgt

SEQ ID NO: 4586237 - DNA, 25 bp, Homo sapien
tatgttttattagccatatgcgttg

SEQ ID NO: 4586238 - DNA, 25 bp, Homo sapien
ttccacattggtacacgtaggctta

SEQ ID NO: 4586239 - DNA, 25 bp, Homo sapien
cacgtaggcttatctgcatcttttg

SEQ ID NO: 4586240 - DNA, 25 bp, Homo sapien
caagtactacatagtccagatttac

SEQ ID NO: 4586241 - DNA, 25 bp, Homo sapien
gcatcttttgcaagtactacatagt

SEQ ID NO: 4586242 - DNA, 25 bp, Homo sapien
aatggcagcaattgctttctgacct

SEQ ID NO: 4586243 - DNA, 25 bp, Homo sapien
ttaatggcagcaattgctttctgac

SEQ ID NO: 4586244 - DNA, 25 bp, Homo sapien
ggcagcaattgctttctgacctcct

SEQ ID NO: 4586245 - DNA, 25 bp, Homo sapien
ttattaatggcagcaattgctttct

SEQ ID NO: 4586246 - DNA, 25 bp, Homo sapien
taaattgccaattatcactctttct

SEQ ID NO: 4586247 - DNA, 25 bp, Homo sapien
gtagaagtctgggtcttaaattgcc

SEQ ID NO: 4586248 - DNA, 25 bp, Homo sapien
gagctccaattcaaatgtagaagtc

SEQ ID NO: 4586249 - DNA, 25 bp, Homo sapien
ccagatctttgatgagctccaattc

SEQ ID NO: 4586250 - DNA, 25 bp, Homo sapien
atccacagatacaaacttaatcagt

SEQ ID NO: 4586251 - DNA, 25 bp, Homo sapien
tcttcataaagagctgaactgtaga

SEQ ID NO: 4586252 - DNA, 25 bp, Homo sapien
cagatacaaacttaatcagtttctc

SEQ ID NO: 4586253 - DNA, 25 bp, Homo sapien
ttaaccgtcacatcttcataaagag

SEQ ID NO: 4586254 - DNA, 25 bp, Homo sapien
ttcaaagttatatctcagccctcag

SEQ ID NO: 4586255 - DNA, 25 bp, Homo sapien
cctccaataagaaacgctgatgcag

SEQ ID NO: 4586256 - DNA, 25 bp, Homo sapien
taaatgcccttttaggcttgatcga

SEQ ID NO: 4586257 - DNA, 25 bp, Homo sapien
catcatttggagaagaagccgtctt

SEQ ID NO: 4586258 - DNA, 25 bp, Homo sapien
atgctcccggaggtctctctgacct

SEQ ID NO: 4586259 - DNA, 25 bp, Homo sapien
tgtttctgtgagaagactccacctt

SEQ ID NO: 4586260 - DNA, 25 bp, Homo sapien
tccttgtttctgtgagaagactcca

SEQ ID NO: 4586261 - DNA, 25 bp, Homo sapien
tgctcccggaggtctctctgacctt

SEQ ID NO: 4586262 - DNA, 25 bp, Homo sapien
aaatcccagttgacttaatcaataa

SEQ ID NO: 4586263 - DNA, 25 bp, Homo sapien
gacgtctaaggcaatataaagaaat

SEQ ID NO: 4586264 - DNA, 25 bp, Homo sapien
ttttaggttcatgggtaagtgtgca

SEQ ID NO: 4586265 - DNA, 25 bp, Homo sapien
tatcaagaagctgagataaagtcag

SEQ ID NO: 4586266 - DNA, 25 bp, Homo sapien
aatactcattagtgtttgcatccag

SEQ ID NO: 4586267 - DNA, 25 bp, Homo sapien
caagtcagcatacctagatactcaa

SEQ ID NO: 4586268 - DNA, 25 bp, Homo sapien
taagcttggtttagtctaggaagcc

SEQ ID NO: 4586269 - DNA, 25 bp, Homo sapien
gatatcttacttctgaaaacaggtg

SEQ ID NO: 4586270 - DNA, 25 bp, Homo sapien
gtgtgtatacagtcaggcatctctt

SEQ ID NO: 4586271 - DNA, 25 bp, Homo sapien
catgtacccctgaattctatttaaa

SEQ ID NO: 4586272 - DNA, 25 bp, Homo sapien
actaggcttaataccatcatgatga

SEQ ID NO: 4586273 - DNA, 25 bp, Homo sapien
caactttacggatgtaacaaacctg

SEQ ID NO: 4586274 - DNA, 25 bp, Homo sapien
actactccaggaaccgattgagtgg

SEQ ID NO: 4586275 - DNA, 25 bp, Homo sapien
tccaggaaccgattgagtggtctgc

SEQ ID NO: 4586276 - DNA, 25 bp, Homo sapien
acagatcactactccaggaaccgat

SEQ ID NO: 4586277 - DNA, 25 bp, Homo sapien
ggaaccgattgagtggtctgctcct

SEQ ID NO: 4586278 - DNA, 25 bp, Homo sapien
agcactagctttgtcttaattgata

SEQ ID NO: 4586279 - DNA, 25 bp, Homo sapien
tagctttgtcttaattgatagcccc

SEQ ID NO: 4586280 - DNA, 25 bp, Homo sapien
gctttgtcttaattgatagccccat

SEQ ID NO: 4586281 - DNA, 25 bp, Homo sapien
cactagctttgtcttaattgatagc

SEQ ID NO: 4586282 - DNA, 25 bp, Homo sapien
gctggatgtggagcatgccctctga

SEQ ID NO: 4586283 - DNA, 25 bp, Homo sapien
tatcaggcttcccatggtatccgga

SEQ ID NO: 4586284 - DNA, 25 bp, Homo sapien
tctgaagtgaatggccctccaagga

SEQ ID NO: 4586285 - DNA, 25 bp, Homo sapien
gagatgagccaccagtacccgtgtt

SEQ ID NO: 4586286 - DNA, 25 bp, Homo sapien
gattagccctcgtgaccatgaaaag

SEQ ID NO: 4586287 - DNA, 25 bp, Homo sapien
cagtggcagccagaatcagattagc

SEQ ID NO: 4586288 - DNA, 25 bp, Homo sapien
taacatgagcatgcagcgatttgcc

SEQ ID NO: 4586289 - DNA, 25 bp, Homo sapien
gagttcagttaacccagtgcgggac

SEQ ID NO: 4586290 - DNA, 25 bp, Homo sapien
cacctgcaaggaatgacacgctgga

SEQ ID NO: 4586291 - DNA, 25 bp, Homo sapien
gctatggaggagacaatgcggaacc

SEQ ID NO: 4586292 - DNA, 25 bp, Homo sapien
tacccctggaggcatattagcagct

SEQ ID NO: 4586293 - DNA, 25 bp, Homo sapien
tagggccctttccagaccagaatct

SEQ ID NO: 4586294 - DNA, 25 bp, Homo sapien
cattggcagcttttgcggcaggcca

SEQ ID NO: 4586295 - DNA, 25 bp, Homo sapien
ttgaagtctgattgcttggaggtcc

SEQ ID NO: 4586296 - DNA, 25 bp, Homo sapien
ggcgtgacccaattacctgaaaatg

SEQ ID NO: 4586297 - DNA, 25 bp, Homo sapien
ggaggtcccttgttgatagtttgaa

SEQ ID NO: 4586298 - DNA, 25 bp, Homo sapien
ggtcagtgggtgcgcgcaccgtgcg

SEQ ID NO: 4586299 - DNA, 25 bp, Homo sapien
ggtgcgcgcaccgtgcgcgagccga

SEQ ID NO: 4586300 - DNA, 25 bp, Homo sapien
caggtcagtgggtgcgcgcaccgtg

SEQ ID NO: 4586301 - DNA, 25 bp, Homo sapien
tcagtgggtgcgcgcaccgtgcgcg

SEQ ID NO: 4586302 - DNA, 25 bp, Homo sapien
caattagatcacgaggcttggccaa

SEQ ID NO: 4586303 - DNA, 25 bp, Homo sapien
cctagcattcttgtttggagcacag

SEQ ID NO: 4586304 - DNA, 25 bp, Homo sapien
cattgttaaatattgcctggaggca

SEQ ID NO: 4586305 - DNA, 25 bp, Homo sapien
cctaccagctgagtgatcttgaaca

SEQ ID NO: 4586306 - DNA, 25 bp, Homo sapien
tataactgcatcacaccaatctcag

SEQ ID NO: 4586307 - DNA, 25 bp, Homo sapien
cattgggtttgggacccaccctcat

SEQ ID NO: 4586308 - DNA, 25 bp, Homo sapien
cttagtgactatgtgtgtcctctcc

SEQ ID NO: 4586309 - DNA, 25 bp, Homo sapien
tcatggagacccttggcattcgttg

SEQ ID NO: 4586310 - DNA, 25 bp, Homo sapien
gtgcataggaataagagacgccaaa

SEQ ID NO: 4586311 - DNA, 25 bp, Homo sapien
taggaataagagacgccaaactctg

SEQ ID NO: 4586312 - DNA, 25 bp, Homo sapien
gagacgccaaactctgatgcaagct

SEQ ID NO: 4586313 - DNA, 25 bp, Homo sapien
aataagagacgccaaactctgatgc

SEQ ID NO: 4586314 - DNA, 25 bp, Homo sapien
atccagaagggtcccgagcaggcaa

SEQ ID NO: 4586315 - DNA, 25 bp, Homo sapien
catatcctccttgctactattatca

SEQ ID NO: 4586316 - DNA, 25 bp, Homo sapien
tctcagtagttaccattggcacagt

SEQ ID NO: 4586317 - DNA, 25 bp, Homo sapien
tatcattctcagtagttaccattgg

SEQ ID NO: 4586318 - DNA, 25 bp, Homo sapien
ggtaaagtctctaatatttagtcaa

SEQ ID NO: 4586319 - DNA, 25 bp, Homo sapien
aaatcactataattagaaaccatat

SEQ ID NO: 4586320 - DNA, 25 bp, Homo sapien
atctgatctgatacgaacatatttg

SEQ ID NO: 4586321 - DNA, 25 bp, Homo sapien
ttgctctttgggagagacatatcat

SEQ ID NO: 4586322 - DNA, 25 bp, Homo sapien
aactccagagaatttatcattgcca

SEQ ID NO: 4586323 - DNA, 25 bp, Homo sapien
tcaggaccacgtcggaatgacccat

SEQ ID NO: 4586324 - DNA, 25 bp, Homo sapien
ctgtagtacaactccagagaattta

SEQ ID NO: 4586325 - DNA, 25 bp, Homo sapien
cattgccatcaggaccacgtcggaa

SEQ ID NO: 4586326 - DNA, 25 bp, Homo sapien
gtaggaacacagaacacacgcagtc

SEQ ID NO: 4586327 - DNA, 25 bp, Homo sapien
gtttattctcacagagcgcaagagg

SEQ ID NO: 4586328 - DNA, 25 bp, Homo sapien
aaacaggtgacacaacgcagtggcc

SEQ ID NO: 4586329 - DNA, 25 bp, Homo sapien
tctaaggattgcaaaccggaagtgc

SEQ ID NO: 4586330 - DNA, 25 bp, Homo sapien
caccttggtacaggacaccaaagga

SEQ ID NO: 4586331 - DNA, 25 bp, Homo sapien
tacaggacaccaaaggatcttttgc

SEQ ID NO: 4586332 - DNA, 25 bp, Homo sapien
tggtacaggacaccaaaggatcttt

SEQ ID NO: 4586333 - DNA, 25 bp, Homo sapien
gacaccaaaggatcttttgcaggac

SEQ ID NO: 4586334 - DNA, 25 bp, Homo sapien
gaccgcaggtgttggcttctgccat

SEQ ID NO: 4586335 - DNA, 25 bp, Homo sapien
tctgtgcacgcaaacgggtattcat

SEQ ID NO: 4586336 - DNA, 25 bp, Homo sapien
gggcctggaacgtattaagtatcaa

SEQ ID NO: 4586337 - DNA, 25 bp, Homo sapien
tccccaggatgagggttgaactttg

SEQ ID NO: 4586338 - DNA, 25 bp, Homo sapien
caattcttaaaagagtagtgtacac

SEQ ID NO: 4586339 - DNA, 25 bp, Homo sapien
catgatcttggcgtcggcttactgc

SEQ ID NO: 4586340 - DNA, 25 bp, Homo sapien
tacacatactacaaccacttcacct

SEQ ID NO: 4586341 - DNA, 25 bp, Homo sapien
ccatgcctgaccttacaattcttaa

SEQ ID NO: 4586342 - DNA, 25 bp, Homo sapien
caaaagtgcattctgactgccaagc

SEQ ID NO: 4586343 - DNA, 25 bp, Homo sapien
tacaacagtctttgctaatacctgg

SEQ ID NO: 4586344 - DNA, 25 bp, Homo sapien
gctgaactactacccaaaaatgagg

SEQ ID NO: 4586345 - DNA, 25 bp, Homo sapien
tcattgctgatggtaggtgggaaac

SEQ ID NO: 4586346 - DNA, 25 bp, Homo sapien
taagaacgtgggttatgccctgcct

SEQ ID NO: 4586347 - DNA, 25 bp, Homo sapien
taaattcaggcaaggctcaaggcgt

SEQ ID NO: 4586348 - DNA, 25 bp, Homo sapien
tgtgattccggagctggcatgacca

SEQ ID NO: 4586349 - DNA, 25 bp, Homo sapien
gattcaatactcctgtctggcagag

SEQ ID NO: 4586350 - DNA, 25 bp, Homo sapien
ctacgtagcgcttcaacactacact

SEQ ID NO: 4586351 - DNA, 25 bp, Homo sapien
tattactttcaataccacgctgtgc

SEQ ID NO: 4586352 - DNA, 25 bp, Homo sapien
ctttgatctcttctccgggatttct

SEQ ID NO: 4586353 - DNA, 25 bp, Homo sapien
tgtgcttcaacactacgtagcgctt

SEQ ID NO: 4586354 - DNA, 25 bp, Homo sapien
gagagacaacatgttcaaccctagg

SEQ ID NO: 4586355 - DNA, 25 bp, Homo sapien
cctaggcaacggtcttgaacaggaa

SEQ ID NO: 4586356 - DNA, 25 bp, Homo sapien
gaagaggattttcatgcagcacgta

SEQ ID NO: 4586357 - DNA, 25 bp, Homo sapien
cacttacagacaaagatgttgggca

SEQ ID NO: 4586358 - DNA, 25 bp, Homo sapien
ccttttgtaggacgcatgtggtggc

SEQ ID NO: 4586359 - DNA, 25 bp, Homo sapien
caatgtcagcctccctgttagaaag

SEQ ID NO: 4586360 - DNA, 25 bp, Homo sapien
gcgatgagttctaccaccaagcagg

SEQ ID NO: 4586361 - DNA, 25 bp, Homo sapien
gtcaaaacaattctcaggcgatgag

SEQ ID NO: 4586362 - DNA, 25 bp, Homo sapien
ggaggaaatcggctacacacattgt

SEQ ID NO: 4586363 - DNA, 25 bp, Homo sapien
aatgccaagaatgatggatccaaac

SEQ ID NO: 4586364 - DNA, 25 bp, Homo sapien
tggatccaaaccaacaccaaagata

SEQ ID NO: 4586365 - DNA, 25 bp, Homo sapien
aatgcacgttatcctgttcctggag

SEQ ID NO: 4586366 - DNA, 25 bp, Homo sapien
aacagcatgtttgtcgttggtgacc

SEQ ID NO: 4586367 - DNA, 25 bp, Homo sapien
cagcatatgatttggtccctgagac

SEQ ID NO: 4586368 - DNA, 25 bp, Homo sapien
taaaaagaacccaagtatgcctctg

SEQ ID NO: 4586369 - DNA, 25 bp, Homo sapien
catcctggtggcattaagtcctaga

SEQ ID NO: 4586370 - DNA, 25 bp, Homo sapien
gataaaggtcacaatagacatcctt

SEQ ID NO: 4586371 - DNA, 25 bp, Homo sapien
aatggtgcaataagagcaggaagac

SEQ ID NO: 4586372 - DNA, 25 bp, Homo sapien
gcaggaagactgcactgttaggtca

SEQ ID NO: 4586373 - DNA, 25 bp, Homo sapien
catgatgtggtaaatgtacctgtac

SEQ ID NO: 4586374 - DNA, 25 bp, Homo sapien
tattgtgtggccactccattgaatc

SEQ ID NO: 4586375 - DNA, 25 bp, Homo sapien
gtgtgtgacctttacttcattgcca

SEQ ID NO: 4586376 - DNA, 25 bp, Homo sapien
ccattgaatctcattccagacttta

SEQ ID NO: 4586377 - DNA, 25 bp, Homo sapien
tttttcacatagaatgtgtgtgacc

SEQ ID NO: 4586378 - DNA, 25 bp, Homo sapien
acagtgggtccaccagacaatccag

SEQ ID NO: 4586379 - DNA, 25 bp, Homo sapien
ccagaataatctcccggtctcgagg

SEQ ID NO: 4586380 - DNA, 25 bp, Homo sapien
tctaccttcaaagctagcaattgca

SEQ ID NO: 4586381 - DNA, 25 bp, Homo sapien
gtctcgaggtccgtaatttacatct

SEQ ID NO: 4586382 - DNA, 25 bp, Homo sapien
gatataaagcgattttctcaaagtc

SEQ ID NO: 4586383 - DNA, 25 bp, Homo sapien
tactctcatgtaggcatctcacaag

SEQ ID NO: 4586384 - DNA, 25 bp, Homo sapien
tacgaatttcaagaggtgaacccag

SEQ ID NO: 4586385 - DNA, 25 bp, Homo sapien
taaactgttggtttccagatctcat

SEQ ID NO: 4586386 - DNA, 25 bp, Homo sapien
tcatggtctattggactgaaagcct

SEQ ID NO: 4586387 - DNA, 25 bp, Homo sapien
gataagggcggcagtctcatctgaa

SEQ ID NO: 4586388 - DNA, 25 bp, Homo sapien
ctgaaagcctcaagtactcgtggac

SEQ ID NO: 4586389 - DNA, 25 bp, Homo sapien
tagccaggtgcgtctgacttaagat

SEQ ID NO: 4586390 - DNA, 25 bp, Homo sapien
ttatatagaaatacttaaaaaatga

SEQ ID NO: 4586391 - DNA, 25 bp, Homo sapien
acttaaaaaatgaagtagcaccatt

SEQ ID NO: 4586392 - DNA, 25 bp, Homo sapien
atacttaaaaaatgaagtagcacca

SEQ ID NO: 4586393 - DNA, 25 bp, Homo sapien
ttaaaaaatgaagtagcaccattac

SEQ ID NO: 4586394 - DNA, 25 bp, Homo sapien
catttaagctcaagtaacatcacct

SEQ ID NO: 4586395 - DNA, 25 bp, Homo sapien
tatttgaccatgaggttaaaggccc

SEQ ID NO: 4586396 - DNA, 25 bp, Homo sapien
tactaaaactagagtggtgcaacag

SEQ ID NO: 4586397 - DNA, 25 bp, Homo sapien
tagaaaatatgctgggtgaagcaga

SEQ ID NO: 4586398 - DNA, 25 bp, Homo sapien
taagtatcataggaacccacccaca

SEQ ID NO: 4586399 - DNA, 25 bp, Homo sapien
cattactagaatgtcgccgttccta

SEQ ID NO: 4586400 - DNA, 25 bp, Homo sapien
gcatttcaggtgttcaggtttccca

SEQ ID NO: 4586401 - DNA, 25 bp, Homo sapien
tactcttgatgcagatatcctggca

SEQ ID NO: 4586402 - DNA, 25 bp, Homo sapien
gatgcggatggcctgagtgaccgcg

SEQ ID NO: 4586403 - DNA, 25 bp, Homo sapien
tggcctgagtgaccgcggtgtggca

SEQ ID NO: 4586404 - DNA, 25 bp, Homo sapien
aagatgcggatggcctgagtgaccg

SEQ ID NO: 4586405 - DNA, 25 bp, Homo sapien
cggatggcctgagtgaccgcggtgt

SEQ ID NO: 4586406 - DNA, 25 bp, Homo sapien
tcacagatgcgattggcgcactcca

SEQ ID NO: 4586407 - DNA, 25 bp, Homo sapien
gcaccagcgcggcaatcacttcgct

SEQ ID NO: 4586408 - DNA, 25 bp, Homo sapien
gattggcgcactccatgcagaagag

SEQ ID NO: 4586409 - DNA, 25 bp, Homo sapien
ctcttctcacagatgcgattggcgc

SEQ ID NO: 4586410 - DNA, 25 bp, Homo sapien
ctcgaagcacacggagcagtcgcgg

SEQ ID NO: 4586411 - DNA, 25 bp, Homo sapien
tcgaagcacacggagcagtcgcggc

SEQ ID NO: 4586412 - DNA, 25 bp, Homo sapien
cgaagcacacggagcagtcgcggct

SEQ ID NO: 4586413 - DNA, 25 bp, Homo sapien
tccgacggctgcaagccaggcagct

SEQ ID NO: 4586414 - DNA, 25 bp, Homo sapien
gcataagcggcgtaggccaggcctc

SEQ ID NO: 4586415 - DNA, 25 bp, Homo sapien
ccagcccgttggcataagcggcgta

SEQ ID NO: 4586416 - DNA, 25 bp, Homo sapien
gacgaagaggaggagcccgacgtgt

SEQ ID NO: 4586417 - DNA, 25 bp, Homo sapien
ctggtgccagggtgcagccggcggt

SEQ ID NO: 4586418 - DNA, 25 bp, Homo sapien
ggcggtgcaccaatagccccaggtt

SEQ ID NO: 4586419 - DNA, 25 bp, Homo sapien
ccccggggccatgtgcaagggtgga

SEQ ID NO: 4586420 - DNA, 25 bp, Homo sapien
aagggtggagacaggcgcgggcagc

SEQ ID NO: 4586421 - DNA, 25 bp, Homo sapien
ggaagaccacggaggaggaagaagc

SEQ ID NO: 4586422 - DNA, 25 bp, Homo sapien
agaagcagacgaagatgcagaagaa

SEQ ID NO: 4586423 - DNA, 25 bp, Homo sapien
agacgaagatgcagaagaagagcag

SEQ ID NO: 4586424 - DNA, 25 bp, Homo sapien
gaggaagaagcagacgaagatgcag

SEQ ID NO: 4586425 - DNA, 25 bp, Homo sapien
gaactgggcccagataagtggtgcc

SEQ ID NO: 4586426 - DNA, 25 bp, Homo sapien
tctgtgagctcaatgatgccgccgg

SEQ ID NO: 4586427 - DNA, 25 bp, Homo sapien
ttccgttgtgcgcaaagctcagggc

SEQ ID NO: 4586428 - DNA, 25 bp, Homo sapien
tgtaagtattggtcttcgcccgcag

SEQ ID NO: 4586429 - DNA, 25 bp, Homo sapien
ctacgaaccagggtgcggaggaggg

SEQ ID NO: 4586430 - DNA, 25 bp, Homo sapien
agagaggcgccctcgtcactgtcca

SEQ ID NO: 4586431 - DNA, 25 bp, Homo sapien
tcttgcgcggctcgctgtcgtacag

SEQ ID NO: 4586432 - DNA, 25 bp, Homo sapien
tcagaactgggtactggcacgcact

SEQ ID NO: 4586433 - DNA, 25 bp, Homo sapien
tcatgttcacgctcttcttgcgcgg

SEQ ID NO: 4586434 - DNA, 25 bp, Homo sapien
ctggtcgagcgcgagctgcagggct

SEQ ID NO: 4586435 - DNA, 25 bp, Homo sapien
gccgccgctgccgttgcgctccagg

SEQ ID NO: 4586436 - DNA, 25 bp, Homo sapien
ccgccgccgctgccgttgcgctcca

SEQ ID NO: 4586437 - DNA, 25 bp, Homo sapien
cgccgccgctgccgttgcgctccag

SEQ ID NO: 4586438 - DNA, 25 bp, Homo sapien
cttcttcctcggtgctgggaggagt

SEQ ID NO: 4586439 - DNA, 25 bp, Homo sapien
tgggaggagtgggtcgctccgtgcg

SEQ ID NO: 4586440 - DNA, 25 bp, Homo sapien
cggccacaaaggcagccgggaagcg

SEQ ID NO: 4586441 - DNA, 25 bp, Homo sapien
gaggccggtcgcctgctgagggctc

SEQ ID NO: 4586442 - DNA, 25 bp, Homo sapien
agagctctagcggtggccgcgcgtg

SEQ ID NO: 4586443 - DNA, 25 bp, Homo sapien
aaaagcgagcaggcgagcgacagaa

SEQ ID NO: 4586444 - DNA, 25 bp, Homo sapien
aatgccgagcgaaaagcgagcaggc

SEQ ID NO: 4586445 - DNA, 25 bp, Homo sapien
ctggctggccgcaatgccgagcgaa

SEQ ID NO: 4586446 - DNA, 25 bp, Homo sapien
ctcactcagcgctttttcctcctct

SEQ ID NO: 4586447 - DNA, 25 bp, Homo sapien
cccgccctcactcagcgctttttcc

SEQ ID NO: 4586448 - DNA, 25 bp, Homo sapien
cgccctcactcagcgctttttcctc

SEQ ID NO: 4586449 - DNA, 25 bp, Homo sapien
cgcccgccctcactcagcgcttttt

SEQ ID NO: 4586450 - DNA, 25 bp, Homo sapien
cgggttctgacacgcgcacgagcgc

SEQ ID NO: 4586451 - DNA, 25 bp, Homo sapien
tgacacgcgcacgagcgccgcgccg

SEQ ID NO: 4586452 - DNA, 25 bp, Homo sapien
cctgcgggttctgacacgcgcacga

SEQ ID NO: 4586453 - DNA, 25 bp, Homo sapien
ttctgacacgcgcacgagcgccgcg

SEQ ID NO: 4586454 - DNA, 25 bp, Homo sapien
gaattcatggaaagctgccgatcct

SEQ ID NO: 4586455 - DNA, 25 bp, Homo sapien
gccgatcctgaggtgcccatgttca

SEQ ID NO: 4586456 - DNA, 25 bp, Homo sapien
acctatacagagatccgcatgcttt

SEQ ID NO: 4586457 - DNA, 25 bp, Homo sapien
gtgcccatgttcatgtagcccaggt

SEQ ID NO: 4586458 - DNA, 25 bp, Homo sapien
tgcctgttgatcttacatcttttca

SEQ ID NO: 4586459 - DNA, 25 bp, Homo sapien
tttgattgcctgttgatcttacatc

SEQ ID NO: 4586460 - DNA, 25 bp, Homo sapien
gcctgttgatcttacatcttttcac

SEQ ID NO: 4586461 - DNA, 25 bp, Homo sapien
tgattgcctgttgatcttacatctt

SEQ ID NO: 4586462 - DNA, 25 bp, Homo sapien
aagccggtagcagtgatgttatcca

SEQ ID NO: 4586463 - DNA, 25 bp, Homo sapien
ctggagtgaggtctgccaaagccgg

SEQ ID NO: 4586464 - DNA, 25 bp, Homo sapien
tgccaaagccggtagcagtgatgtt

SEQ ID NO: 4586465 - DNA, 25 bp, Homo sapien
gaggtctgccaaagccggtagcagt

SEQ ID NO: 4586466 - DNA, 25 bp, Homo sapien
acctcttggcaaaagcggtgttggg

SEQ ID NO: 4586467 - DNA, 25 bp, Homo sapien
tgctacagatatggcgtggatgtcc

SEQ ID NO: 4586468 - DNA, 25 bp, Homo sapien
tatgcattgagatagccgcagctgc

SEQ ID NO: 4586469 - DNA, 25 bp, Homo sapien
gaccttgaactcagccgccttgtcg

SEQ ID NO: 4586470 - DNA, 25 bp, Homo sapien
ctactgggttgccaggaacttattc

SEQ ID NO: 4586471 - DNA, 25 bp, Homo sapien
gcatctcttatgacaaggtgagatt

SEQ ID NO: 4586472 - DNA, 25 bp, Homo sapien
gtttgcacaatacttctgattgcat

SEQ ID NO: 4586473 - DNA, 25 bp, Homo sapien
tttgattatgcagggggctactggg

SEQ ID NO: 4586474 - DNA, 25 bp, Homo sapien
taagtaatggagctagaatcccacc

SEQ ID NO: 4586475 - DNA, 25 bp, Homo sapien
gatcatggccatgcagttaggtaag

SEQ ID NO: 4586476 - DNA, 25 bp, Homo sapien
tgctacagagttgcaagcacttgct

SEQ ID NO: 4586477 - DNA, 25 bp, Homo sapien
cacgacctggctggcccttagtagg

SEQ ID NO: 4586478 - DNA, 25 bp, Homo sapien
gtgacatggcccgttccatacccag

SEQ ID NO: 4586479 - DNA, 25 bp, Homo sapien
gactcagtgtgacatggcccgttcc

SEQ ID NO: 4586480 - DNA, 25 bp, Homo sapien
tgcgaggactcagtgtgacatggcc

SEQ ID NO: 4586481 - DNA, 25 bp, Homo sapien
gttgttgcgaggactcagtgtgaca

SEQ ID NO: 4586482 - DNA, 25 bp, Homo sapien
ctgtttagagctagctatgcagctg

SEQ ID NO: 4586483 - DNA, 25 bp, Homo sapien
agctatgcagctgtttaagatgtgg

SEQ ID NO: 4586484 - DNA, 25 bp, Homo sapien
tagagctagctatgcagctgtttaa

SEQ ID NO: 4586485 - DNA, 25 bp, Homo sapien
gctagctatgcagctgtttaagatg

SEQ ID NO: 4586486 - DNA, 25 bp, Homo sapien
agacaagtcgtccattccatttctg

SEQ ID NO: 4586487 - DNA, 25 bp, Homo sapien
aggccccagcgacgacagtgtttga

SEQ ID NO: 4586488 - DNA, 25 bp, Homo sapien
tgtttgaccatgaactacacagcag

SEQ ID NO: 4586489 - DNA, 25 bp, Homo sapien
gagtcctgtaggatttcttgaaatc

SEQ ID NO: 4586490 - DNA, 25 bp, Homo sapien
ccttatacacaccaaagttgtggaa

SEQ ID NO: 4586491 - DNA, 25 bp, Homo sapien
acaccttatacacaccaaagttgtg

SEQ ID NO: 4586492 - DNA, 25 bp, Homo sapien
tggggtatcgttatacaccttatac

SEQ ID NO: 4586493 - DNA, 25 bp, Homo sapien
ttatacacaccaaagttgtggaaag

SEQ ID NO: 4586494 - DNA, 25 bp, Homo sapien
tggtggcccacaactcatcagtaca

SEQ ID NO: 4586495 - DNA, 25 bp, Homo sapien
ttggtggcccacaactcatcagtac

SEQ ID NO: 4586496 - DNA, 25 bp, Homo sapien
caactcatcagtacacattctgctg

SEQ ID NO: 4586497 - DNA, 25 bp, Homo sapien
agtacacattctgctgacatgacag

SEQ ID NO: 4586498 - DNA, 25 bp, Homo sapien
tgccattcttcactttggaaggccg

SEQ ID NO: 4586499 - DNA, 25 bp, Homo sapien
cattcttcactttggaaggccgatc

SEQ ID NO: 4586500 - DNA, 25 bp, Homo sapien
gccattcttcactttggaaggccga

SEQ ID NO: 4586501 - DNA, 25 bp, Homo sapien
ctgccattcttcactttggaaggcc

SEQ ID NO: 4586502 - DNA, 25 bp, Homo sapien
ctagagtgaagatttcagctcaatg

SEQ ID NO: 4586503 - DNA, 25 bp, Homo sapien
gctagagtgaagatttcagctcaat

SEQ ID NO: 4586504 - DNA, 25 bp, Homo sapien
ggctagagtgaagatttcagctcaa

SEQ ID NO: 4586505 - DNA, 25 bp, Homo sapien
ttcctttccttcttgctttcttgct

SEQ ID NO: 4586506 - DNA, 25 bp, Homo sapien
tcctttccttcttgctttcttgctt

SEQ ID NO: 4586507 - DNA, 25 bp, Homo sapien
cccagcagctgagaccataggcacg

SEQ ID NO: 4586508 - DNA, 25 bp, Homo sapien
ctgagaccataggcacgcaccatca

SEQ ID NO: 4586509 - DNA, 25 bp, Homo sapien
tcagctccaagtacaaaggttaacc

SEQ ID NO: 4586510 - DNA, 25 bp, Homo sapien
tgataatctgttcacctgaagggct

SEQ ID NO: 4586511 - DNA, 25 bp, Homo sapien
gaagagtttgactacttgacaacag

SEQ ID NO: 4586512 - DNA, 25 bp, Homo sapien
tagctttacctaagttcaaggcaga

SEQ ID NO: 4586513 - DNA, 25 bp, Homo sapien
ttgcccatttcatacaacaagtgtg

SEQ ID NO: 4586514 - DNA, 25 bp, Homo sapien
tccagtctgtggaaaatctgataca

SEQ ID NO: 4586515 - DNA, 25 bp, Homo sapien
aaaagtccctcacctggagttcgag

SEQ ID NO: 4586516 - DNA, 25 bp, Homo sapien
cacaaaagtcccaatagaagggaat

SEQ ID NO: 4586517 - DNA, 25 bp, Homo sapien
aggaaaagaatccaccagtagtagg

SEQ ID NO: 4586518 - DNA, 25 bp, Homo sapien
tatatggatcaactttattgaaagt

SEQ ID NO: 4586519 - DNA, 25 bp, Homo sapien
aaaagaatccaccagtagtaggtag

SEQ ID NO: 4586520 - DNA, 25 bp, Homo sapien
tatttatatggatcaactttattga

SEQ ID NO: 4586521 - DNA, 25 bp, Homo sapien
ccttccgctttcgtactgcgttcat

SEQ ID NO: 4586522 - DNA, 25 bp, Homo sapien
tgcgttcatgtacttccgggcttgg

SEQ ID NO: 4586523 - DNA, 25 bp, Homo sapien
cttccgggcttggttctcagagtca

SEQ ID NO: 4586524 - DNA, 25 bp, Homo sapien
tctccccaaagtgcaagtattcctc

SEQ ID NO: 4586525 - DNA, 25 bp, Homo sapien
tgacagaatgtgcaaggttaggcat

SEQ ID NO: 4586526 - DNA, 25 bp, Homo sapien
cttgtaaaagaagatgacagaatgt

SEQ ID NO: 4586527 - DNA, 25 bp, Homo sapien
gatgacagaatgtgcaaggttaggc

SEQ ID NO: 4586528 - DNA, 25 bp, Homo sapien
aaagaagatgacagaatgtgcaagg

SEQ ID NO: 4586529 - DNA, 25 bp, Homo sapien
gggctagcaacttcacttgcatcaa

SEQ ID NO: 4586530 - DNA, 25 bp, Homo sapien
tcaatttagatgatatgaacttgct

SEQ ID NO: 4586531 - DNA, 25 bp, Homo sapien
aatttagatgatatgaacttgctga

SEQ ID NO: 4586532 - DNA, 25 bp, Homo sapien
tgctctgggctagcaacttcacttg

SEQ ID NO: 4586533 - DNA, 25 bp, Homo sapien
tgttctggaaaaatggacccattag

SEQ ID NO: 4586534 - DNA, 25 bp, Homo sapien
gtgttctggaaaaatggacccatta

SEQ ID NO: 4586535 - DNA, 25 bp, Homo sapien
taaactcttcttaaagtgttctgga

SEQ ID NO: 4586536 - DNA, 25 bp, Homo sapien
aagtgttctggaaaaatggacccat

SEQ ID NO: 4586537 - DNA, 25 bp, Homo sapien
tgagaaagataacagcttagcattg

SEQ ID NO: 4586538 - DNA, 25 bp, Homo sapien
gaagctaaatcatgagttctgctga

SEQ ID NO: 4586539 - DNA, 25 bp, Homo sapien
aaaccatggattatctgtgtgaagc

SEQ ID NO: 4586540 - DNA, 25 bp, Homo sapien
ctgtgtgaagccctgtgcaatgaat

SEQ ID NO: 4586541 - DNA, 25 bp, Homo sapien
gaatgaatgggaacttggattttta

SEQ ID NO: 4586542 - DNA, 25 bp, Homo sapien
caatggctgaatactagttgtgggc

SEQ ID NO: 4586543 - DNA, 25 bp, Homo sapien
cttctctctttgacaagacagcata

SEQ ID NO: 4586544 - DNA, 25 bp, Homo sapien
ccttgatgatgaacatgtctgtccc

SEQ ID NO: 4586545 - DNA, 25 bp, Homo sapien
gaagtacccgaccttctctctttga

SEQ ID NO: 4586546 - DNA, 25 bp, Homo sapien
aggtatatcactcactgtccacagg

SEQ ID NO: 4586547 - DNA, 25 bp, Homo sapien
gcttctctaactgccagattctgga

SEQ ID NO: 4586548 - DNA, 25 bp, Homo sapien
ggttttgccaactctaagctcacag

SEQ ID NO: 4586549 - DNA, 25 bp, Homo sapien
agcctgtattcaaggcagtaaccca

SEQ ID NO: 4586550 - DNA, 25 bp, Homo sapien
aaaacagacacccatgagaggctcc

SEQ ID NO: 4586551 - DNA, 25 bp, Homo sapien
catcaggcgctgaggtttcacttgc

SEQ ID NO: 4586552 - DNA, 25 bp, Homo sapien
aaaggtccatagcagtcagtgagtg

SEQ ID NO: 4586553 - DNA, 25 bp, Homo sapien
tgtgtacatagctgccatcaggcgc

SEQ ID NO: 4586554 - DNA, 25 bp, Homo sapien
tattgactagtatgttgggcccaca

SEQ ID NO: 4586555 - DNA, 25 bp, Homo sapien
gaagctttgtcagctggacctgtcc

SEQ ID NO: 4586556 - DNA, 25 bp, Homo sapien
gattagcccgtcagagtcaacttgg

SEQ ID NO: 4586557 - DNA, 25 bp, Homo sapien
gtcaactgctccatagaacgaatca

SEQ ID NO: 4586558 - DNA, 25 bp, Homo sapien
aatggaataataggttcagatacac

SEQ ID NO: 4586559 - DNA, 25 bp, Homo sapien
atggaataataggttcagatacact

SEQ ID NO: 4586560 - DNA, 25 bp, Homo sapien
tggaataataggttcagatacactg

SEQ ID NO: 4586561 - DNA, 25 bp, Homo sapien
gaatggaataataggttcagataca

SEQ ID NO: 4586562 - DNA, 25 bp, Homo sapien
gacatcataggtcttgagccccagt

SEQ ID NO: 4586563 - DNA, 25 bp, Homo sapien
taatgaggcttatagcaaggctagc

SEQ ID NO: 4586564 - DNA, 25 bp, Homo sapien
taaacagctgcatgtgggtagaagc

SEQ ID NO: 4586565 - DNA, 25 bp, Homo sapien
cagaacctcaggatagctagtcaaa

SEQ ID NO: 4586566 - DNA, 25 bp, Homo sapien
caaaattattcaagtgtaggcagtg

SEQ ID NO: 4586567 - DNA, 25 bp, Homo sapien
catcaataagagaagaagtctatcc

SEQ ID NO: 4586568 - DNA, 25 bp, Homo sapien
aaataagccgcagtctaagttcaac

SEQ ID NO: 4586569 - DNA, 25 bp, Homo sapien
gagagctatcatttctccatcgcta

SEQ ID NO: 4586570 - DNA, 25 bp, Homo sapien
ctcctgctgtgactaaaacgtgctc

SEQ ID NO: 4586571 - DNA, 25 bp, Homo sapien
gtcatccaggcatcgctgaaggtgg

SEQ ID NO: 4586572 - DNA, 25 bp, Homo sapien
tgtgactaaaacgtgctctcccgtt

SEQ ID NO: 4586573 - DNA, 25 bp, Homo sapien
ccttttacgagctgaggcatttcac

SEQ ID NO: 4586574 - DNA, 25 bp, Homo sapien
gtggcttcgaagttgagtggtataa

SEQ ID NO: 4586575 - DNA, 25 bp, Homo sapien
gtggtataaatggtgggcaggatgg

SEQ ID NO: 4586576 - DNA, 25 bp, Homo sapien
gcaactctcacaataggagtggctt

SEQ ID NO: 4586577 - DNA, 25 bp, Homo sapien
agtgttgcagatttcagcacaaaat

SEQ ID NO: 4586578 - DNA, 25 bp, Homo sapien
catgcatttccttcctacacacaca

SEQ ID NO: 4586579 - DNA, 25 bp, Homo sapien
catttccttcctacacacacagcac

SEQ ID NO: 4586580 - DNA, 25 bp, Homo sapien
cagcatgcatttccttcctacacac

SEQ ID NO: 4586581 - DNA, 25 bp, Homo sapien
atgcatttccttcctacacacacag

SEQ ID NO: 4586582 - DNA, 25 bp, Homo sapien
gttctctctaccacaaagtatgcag

SEQ ID NO: 4586583 - DNA, 25 bp, Homo sapien
gatcttggtatctcccctaccaagt

SEQ ID NO: 4586584 - DNA, 25 bp, Homo sapien
cacctggagtgtactgaataagcct

SEQ ID NO: 4586585 - DNA, 25 bp, Homo sapien
gggagagcacgaacacagttctctc

SEQ ID NO: 4586586 - DNA, 25 bp, Homo sapien
cactagggttgtcagggtgcccaaa

SEQ ID NO: 4586587 - DNA, 25 bp, Homo sapien
tggagtagtggaaatgctccttcct

SEQ ID NO: 4586588 - DNA, 25 bp, Homo sapien
tagatacatgaacactagggttgtc

SEQ ID NO: 4586589 - DNA, 25 bp, Homo sapien
ccaaactctgcagtagtttctggag

SEQ ID NO: 4586590 - DNA, 25 bp, Homo sapien
actcttcatcgggaaagtatggcag

SEQ ID NO: 4586591 - DNA, 25 bp, Homo sapien
aaagtatggcagcatattttcctga

SEQ ID NO: 4586592 - DNA, 25 bp, Homo sapien
agatggtcactcttcatcgggaaag

SEQ ID NO: 4586593 - DNA, 25 bp, Homo sapien
tcatcgggaaagtatggcagcatat

SEQ ID NO: 4586594 - DNA, 25 bp, Homo sapien
aatgaacgtgacactgtgcctccat

SEQ ID NO: 4586595 - DNA, 25 bp, Homo sapien
tcatgaacatctcctgcataacaag

SEQ ID NO: 4586596 - DNA, 25 bp, Homo sapien
gcataacaagttctctggtaggcca

SEQ ID NO: 4586597 - DNA, 25 bp, Homo sapien
caaatcacgttccttattataacac

SEQ ID NO: 4586598 - DNA, 25 bp, Homo sapien
gggaaaggccattaacataacacaa

SEQ ID NO: 4586599 - DNA, 25 bp, Homo sapien
catctcttaaccatagaaaacggca

SEQ ID NO: 4586600 - DNA, 25 bp, Homo sapien
tggatgctctggcagttaaacactc

SEQ ID NO: 4586601 - DNA, 25 bp, Homo sapien
gtttaaatccatataggcacgctcc

SEQ ID NO: 4586602 - DNA, 25 bp, Homo sapien
tgttataaccgttgcttcctcgtgg

SEQ ID NO: 4586603 - DNA, 25 bp, Homo sapien
tatctactttccaggtcttgttaaa

SEQ ID NO: 4586604 - DNA, 25 bp, Homo sapien
tctgtctctacctgtatcaagaaca

SEQ ID NO: 4586605 - DNA, 25 bp, Homo sapien
ttctctctctgactagtgagtgcct

SEQ ID NO: 4586606 - DNA, 25 bp, Homo sapien
tataggtccactactcatcttaaga

SEQ ID NO: 4586607 - DNA, 25 bp, Homo sapien
cagactgttccctaactttttgaag

SEQ ID NO: 4586608 - DNA, 25 bp, Homo sapien
tcagtcatgtcctctctcaagacaa

SEQ ID NO: 4586609 - DNA, 25 bp, Homo sapien
tcttaaacaatatatggcatgtaca

SEQ ID NO: 4586610 - DNA, 25 bp, Homo sapien
ccaatggatatttagggtgtgtccc

SEQ ID NO: 4586611 - DNA, 25 bp, Homo sapien
tgacctttgcttggctcattaccgc

SEQ ID NO: 4586612 - DNA, 25 bp, Homo sapien
tctggaaagaccgaaagacctgcca

SEQ ID NO: 4586613 - DNA, 25 bp, Homo sapien
ccaaaagactattgtgtgaaccatc

SEQ ID NO: 4586614 - DNA, 25 bp, Homo sapien
tttaaagatttaaccatatggaaga

SEQ ID NO: 4586615 - DNA, 25 bp, Homo sapien
ttaaagatttaaccatatggaagag

SEQ ID NO: 4586616 - DNA, 25 bp, Homo sapien
agaagaatatcatgtttcctctcag

SEQ ID NO: 4586617 - DNA, 25 bp, Homo sapien
tagttagtggcaatactatggccag

SEQ ID NO: 4586618 - DNA, 25 bp, Homo sapien
tactcatgcttcctagtcatgcagg

SEQ ID NO: 4586619 - DNA, 25 bp, Homo sapien
cagaaccttaatggaggcacctcag

SEQ ID NO: 4586620 - DNA, 25 bp, Homo sapien
catcaccaggtgaatggaaggcgaa

SEQ ID NO: 4586621 - DNA, 25 bp, Homo sapien
gggatacagtattctacaatacact

SEQ ID NO: 4586622 - DNA, 25 bp, Homo sapien
gctctatagctgacaatgaccctaa

SEQ ID NO: 4586623 - DNA, 25 bp, Homo sapien
tctaacagtacaatgggatacagta

SEQ ID NO: 4586624 - DNA, 25 bp, Homo sapien
tgaccctaagggttcagaatctaac

SEQ ID NO: 4586625 - DNA, 25 bp, Homo sapien
ccagcttaggctagagcatttacta

SEQ ID NO: 4586626 - DNA, 25 bp, Homo sapien
taaacgacgatcaactaatcttagc

SEQ ID NO: 4586627 - DNA, 25 bp, Homo sapien
tcccctctcgctctgaaataaatgg

SEQ ID NO: 4586628 - DNA, 25 bp, Homo sapien
tattcaaaggataaaagcatgcgaa

SEQ ID NO: 4586629 - DNA, 25 bp, Homo sapien
tagaatggagtaaggataaaataaa

SEQ ID NO: 4586630 - DNA, 25 bp, Homo sapien
ctagaatggagtaaggataaaataa

SEQ ID NO: 4586631 - DNA, 25 bp, Homo sapien
ggagtaaggataaaataaacagcat

SEQ ID NO: 4586632 - DNA, 25 bp, Homo sapien
aatggagtaaggataaaataaacag

SEQ ID NO: 4586633 - DNA, 25 bp, Homo sapien
gcacatttcctggaggtacctcctc

SEQ ID NO: 4586634 - DNA, 25 bp, Homo sapien
tcccttcccatcagaagatacaggt

SEQ ID NO: 4586635 - DNA, 25 bp, Homo sapien
ctagcacatttcctggaggtacctc

SEQ ID NO: 4586636 - DNA, 25 bp, Homo sapien
gcacagtatgccatgtgggggactt

SEQ ID NO: 4586637 - DNA, 25 bp, Homo sapien
gaggactgtatttgggccccaagac

SEQ ID NO: 4586638 - DNA, 25 bp, Homo sapien
agaggactgtatttgggccccaaga

SEQ ID NO: 4586639 - DNA, 25 bp, Homo sapien
aagaggactgtatttgggccccaag

SEQ ID NO: 4586640 - DNA, 25 bp, Homo sapien
caagaggactgtatttgggccccaa

SEQ ID NO: 4586641 - DNA, 25 bp, Homo sapien
cactgaacacccgagcaaatgcaat

SEQ ID NO: 4586642 - DNA, 25 bp, Homo sapien
ccactgaacacccgagcaaatgcaa

SEQ ID NO: 4586643 - DNA, 25 bp, Homo sapien
actgaacacccgagcaaatgcaata

SEQ ID NO: 4586644 - DNA, 25 bp, Homo sapien
accactgaacacccgagcaaatgca

SEQ ID NO: 4586645 - DNA, 25 bp, Homo sapien
gtcatactttccacctgttgctcgt

SEQ ID NO: 4586646 - DNA, 25 bp, Homo sapien
ggagcacaggtttaggggtcatact

SEQ ID NO: 4586647 - DNA, 25 bp, Homo sapien
ctggagcacaggtttaggggtcata

SEQ ID NO: 4586648 - DNA, 25 bp, Homo sapien
catactttccacctgttgctcgtca

SEQ ID NO: 4586649 - DNA, 25 bp, Homo sapien
ggcactcccatcttgggtgggctcc

SEQ ID NO: 4586650 - DNA, 25 bp, Homo sapien
ggacatgtttcaatggcactcccat

SEQ ID NO: 4586651 - DNA, 25 bp, Homo sapien
ccttttggacatgtttcaatggcac

SEQ ID NO: 4586652 - DNA, 25 bp, Homo sapien
gtttcaatggcactcccatcttggg

SEQ ID NO: 4586653 - DNA, 25 bp, Homo sapien
tctctgagcaatttcttcttgagtg

SEQ ID NO: 4586654 - DNA, 25 bp, Homo sapien
gtctctgagcaatttcttcttgagt

SEQ ID NO: 4586655 - DNA, 25 bp, Homo sapien
ctgagcaatttcttcttgagtgaga

SEQ ID NO: 4586656 - DNA, 25 bp, Homo sapien
agcaatttcttcttgagtgagaggc

SEQ ID NO: 4586657 - DNA, 25 bp, Homo sapien
ggcaattttgtccaagtcctctccc

SEQ ID NO: 4586658 - DNA, 25 bp, Homo sapien
gggtaagatgaagattggtcccagc

SEQ ID NO: 4586659 - DNA, 25 bp, Homo sapien
aacagcaagcattgacatggctggg

SEQ ID NO: 4586660 - DNA, 25 bp, Homo sapien
tctcagttcatccaagtagggaaac

SEQ ID NO: 4586661 - DNA, 25 bp, Homo sapien
tcctgatgcaaagtggcctaactcc

SEQ ID NO: 4586662 - DNA, 25 bp, Homo sapien
ttccaaatggccacagacccttagg

SEQ ID NO: 4586663 - DNA, 25 bp, Homo sapien
tatttcacgtaagctaacctgcaag

SEQ ID NO: 4586664 - DNA, 25 bp, Homo sapien
tatccgcctgctggacaagacttct

SEQ ID NO: 4586665 - DNA, 25 bp, Homo sapien
ctgaggcaaggccttagcatcaact

SEQ ID NO: 4586666 - DNA, 25 bp, Homo sapien
ttctgaggcaaggccttagcatcaa

SEQ ID NO: 4586667 - DNA, 25 bp, Homo sapien
tctgaggcaaggccttagcatcaac

SEQ ID NO: 4586668 - DNA, 25 bp, Homo sapien
ggaaacaaatataataactggagca

SEQ ID NO: 4586669 - DNA, 25 bp, Homo sapien
tataataactggagcagtgtcctca

SEQ ID NO: 4586670 - DNA, 25 bp, Homo sapien
acaaatataataactggagcagtgt

SEQ ID NO: 4586671 - DNA, 25 bp, Homo sapien
aatataataactggagcagtgtcct

SEQ ID NO: 4586672 - DNA, 25 bp, Homo sapien
tgatcctgtgcacatcagtctctcc

SEQ ID NO: 4586673 - DNA, 25 bp, Homo sapien
ctgtaatatcaaggggactaggaag

SEQ ID NO: 4586674 - DNA, 25 bp, Homo sapien
atatcaaggggactaggaagtttct

SEQ ID NO: 4586675 - DNA, 25 bp, Homo sapien
tgtaatatcaaggggactaggaagt

SEQ ID NO: 4586676 - DNA, 25 bp, Homo sapien
tcaaggggactaggaagtttctgac

SEQ ID NO: 4586677 - DNA, 25 bp, Homo sapien
acagcatgggatatgggtagccact

SEQ ID NO: 4586678 - DNA, 25 bp, Homo sapien
gaacagcatgggatatgggtagcca

SEQ ID NO: 4586679 - DNA, 25 bp, Homo sapien
gcatgggatatgggtagccactgac

SEQ ID NO: 4586680 - DNA, 25 bp, Homo sapien
agaacagcatgggatatgggtagcc

SEQ ID NO: 4586681 - DNA, 25 bp, Homo sapien
tgcaaatggcgttgatctgaacttt

SEQ ID NO: 4586682 - DNA, 25 bp, Homo sapien
cgttgatctgaactttagggtctga

SEQ ID NO: 4586683 - DNA, 25 bp, Homo sapien
gatctgaactttagggtctgaatgt

SEQ ID NO: 4586684 - DNA, 25 bp, Homo sapien
aatggcgttgatctgaactttaggg

SEQ ID NO: 4586685 - DNA, 25 bp, Homo sapien
cagcatcatacaaactccatatatt

SEQ ID NO: 4586686 - DNA, 25 bp, Homo sapien
caaaacagcatcatacaaactccat

SEQ ID NO: 4586687 - DNA, 25 bp, Homo sapien
atatattttccaggatcaactgtac

SEQ ID NO: 4586688 - DNA, 25 bp, Homo sapien
gatcaactgtacaaataaaggtttc

SEQ ID NO: 4586689 - DNA, 25 bp, Homo sapien
agtaatctccccacaaggttttcat

SEQ ID NO: 4586690 - DNA, 25 bp, Homo sapien
tctttttagccttcatatttatata

SEQ ID NO: 4586691 - DNA, 25 bp, Homo sapien
tcatatttatatagtaatctcccca

SEQ ID NO: 4586692 - DNA, 25 bp, Homo sapien
tgatctttttagccttcatatttat

SEQ ID NO: 4586693 - DNA, 25 bp, Homo sapien
gactgtagattctggcgaagtgctc

SEQ ID NO: 4586694 - DNA, 25 bp, Homo sapien
tgatgccaattttttgactgtagat

SEQ ID NO: 4586695 - DNA, 25 bp, Homo sapien
gtagattctggcgaagtgctcaatt

SEQ ID NO: 4586696 - DNA, 25 bp, Homo sapien
agaacttcctttttgatgccaattt

SEQ ID NO: 4586697 - DNA, 25 bp, Homo sapien
agccagtgctccagtcatatacttg

SEQ ID NO: 4586698 - DNA, 25 bp, Homo sapien
gaagtaaaaagagtccctgtgagcg

SEQ ID NO: 4586699 - DNA, 25 bp, Homo sapien
tggtaaacaccacatttccctgttc

SEQ ID NO: 4586700 - DNA, 25 bp, Homo sapien
cccacccatctattgcactggtaaa

SEQ ID NO: 4586701 - DNA, 25 bp, Homo sapien
ttgaggtgagaataggcctcttgtg

SEQ ID NO: 4586702 - DNA, 25 bp, Homo sapien
tattcttgaggtgagaataggcctc

SEQ ID NO: 4586703 - DNA, 25 bp, Homo sapien
aatattcttgaggtgagaataggcc

SEQ ID NO: 4586704 - DNA, 25 bp, Homo sapien
tcttgaggtgagaataggcctcttg

SEQ ID NO: 4586705 - DNA, 25 bp, Homo sapien
tgttttcaagccaagcttgtcgcag

SEQ ID NO: 4586706 - DNA, 25 bp, Homo sapien
aagccaagcttgtcgcagaactgcc

SEQ ID NO: 4586707 - DNA, 25 bp, Homo sapien
caagcgatcaatcttattaatcact

SEQ ID NO: 4586708 - DNA, 25 bp, Homo sapien
attaatcactaaaaccggacggatg

SEQ ID NO: 4586709 - DNA, 25 bp, Homo sapien
gtattttctcatcacaatccattac

SEQ ID NO: 4586710 - DNA, 25 bp, Homo sapien
ttaaccatttaagtattttctcatc

SEQ ID NO: 4586711 - DNA, 25 bp, Homo sapien
aagtattttctcatcacaatccatt

SEQ ID NO: 4586712 - DNA, 25 bp, Homo sapien
tttaagtattttctcatcacaatcc

SEQ ID NO: 4586713 - DNA, 25 bp, Homo sapien
caatgatgcatccatcacaaatgcg

SEQ ID NO: 4586714 - DNA, 25 bp, Homo sapien
tggacagactccttccacagcatct

SEQ ID NO: 4586715 - DNA, 25 bp, Homo sapien
cacaaatgcgaacagcggttgatac

SEQ ID NO: 4586716 - DNA, 25 bp, Homo sapien
cacagcatctaccacaatgatgcat

SEQ ID NO: 4586717 - DNA, 25 bp, Homo sapien
tggcactggatttcatagtgatccc

SEQ ID NO: 4586718 - DNA, 25 bp, Homo sapien
ggatttcatagtgatccctcggatc

SEQ ID NO: 4586719 - DNA, 25 bp, Homo sapien
ctgttgcataatgtagggaaatggc

SEQ ID NO: 4586720 - DNA, 25 bp, Homo sapien
gatccctcggatctgttcatcttct

SEQ ID NO: 4586721 - DNA, 25 bp, Homo sapien
ggagatgattccattgctagatata

SEQ ID NO: 4586722 - DNA, 25 bp, Homo sapien
tagatataagacagtcagccagagt

SEQ ID NO: 4586723 - DNA, 25 bp, Homo sapien
tataagacagtcagccagagtagtt

SEQ ID NO: 4586724 - DNA, 25 bp, Homo sapien
ccattgctagatataagacagtcag

SEQ ID NO: 4586725 - DNA, 25 bp, Homo sapien
tttctggagttgaatcatcttatcc

SEQ ID NO: 4586726 - DNA, 25 bp, Homo sapien
atcttatccaaactgttgagcacca

SEQ ID NO: 4586727 - DNA, 25 bp, Homo sapien
gagttgaatcatcttatccaaactg

SEQ ID NO: 4586728 - DNA, 25 bp, Homo sapien
agtgtttttctggagttgaatcatc

SEQ ID NO: 4586729 - DNA, 25 bp, Homo sapien
caaggcctaagtccagttcgagcac

SEQ ID NO: 4586730 - DNA, 25 bp, Homo sapien
ccacgtacaggaagggttgcatcca

SEQ ID NO: 4586731 - DNA, 25 bp, Homo sapien
tattatccaagcaggtgcactgccg

SEQ ID NO: 4586732 - DNA, 25 bp, Homo sapien
taaccctgccggtggaggagtactc

SEQ ID NO: 4586733 - DNA, 25 bp, Homo sapien
tctcgggtcgcacccacaccgagag

SEQ ID NO: 4586734 - DNA, 25 bp, Homo sapien
tccgagagctctgcgggtccgacac

SEQ ID NO: 4586735 - DNA, 25 bp, Homo sapien
gtccgagagctctgcgggtccgaca

SEQ ID NO: 4586736 - DNA, 25 bp, Homo sapien
acaccgagagcttccgaaagtccga

SEQ ID NO: 4586737 - DNA, 25 bp, Homo sapien
taaatgttgtgccttgactctctcc

SEQ ID NO: 4586738 - DNA, 25 bp, Homo sapien
cacagaccaggactgacaagggagc

SEQ ID NO: 4586739 - DNA, 25 bp, Homo sapien
tctgcaagagcatgggaaattccct

SEQ ID NO: 4586740 - DNA, 25 bp, Homo sapien
gaatcactcgtctcttccaaggtca

SEQ ID NO: 4586741 - DNA, 25 bp, Homo sapien
gaccaagagtttgactttatcaggg

SEQ ID NO: 4586742 - DNA, 25 bp, Homo sapien
tggtgaacaaaagcagtcatgatct

SEQ ID NO: 4586743 - DNA, 25 bp, Homo sapien
gaagcactatactagtcacctggta

SEQ ID NO: 4586744 - DNA, 25 bp, Homo sapien
tgaaggacaggcacaggtaccttga

SEQ ID NO: 4586745 - DNA, 25 bp, Homo sapien
gagggcaggaatgacttgatcagat

SEQ ID NO: 4586746 - DNA, 25 bp, Homo sapien
tctgactatgcgtctgaaaggatgg

SEQ ID NO: 4586747 - DNA, 25 bp, Homo sapien
tcaggtgccatgtggagaaaagatt

SEQ ID NO: 4586748 - DNA, 25 bp, Homo sapien
aaagggtgagtcctagatttctgac

SEQ ID NO: 4586749 - DNA, 25 bp, Homo sapien
tttagtccattttaagccataaata

SEQ ID NO: 4586750 - DNA, 25 bp, Homo sapien
caagaacaggacctttagtccattt

SEQ ID NO: 4586751 - DNA, 25 bp, Homo sapien
tcaaagaatgcaaaagcggcaagtt

SEQ ID NO: 4586752 - DNA, 25 bp, Homo sapien
gacctttagtccattttaagccata

SEQ ID NO: 4586753 - DNA, 25 bp, Homo sapien
aaaatccatcttctagcctcaaata

SEQ ID NO: 4586754 - DNA, 25 bp, Homo sapien
taaaatccatcttctagcctcaaat

SEQ ID NO: 4586755 - DNA, 25 bp, Homo sapien
gtgctccacctttaaacaactgtaa

SEQ ID NO: 4586756 - DNA, 25 bp, Homo sapien
tgctccacctttaaacaactgtaaa

SEQ ID NO: 4586757 - DNA, 25 bp, Homo sapien
gaatatacaggctgtactaacatta

SEQ ID NO: 4586758 - DNA, 25 bp, Homo sapien
atgaatatacaggctgtactaacat

SEQ ID NO: 4586759 - DNA, 25 bp, Homo sapien
atatacaggctgtactaacattaaa

SEQ ID NO: 4586760 - DNA, 25 bp, Homo sapien
gtgtgcatacagtgggtctttgtgt

SEQ ID NO: 4586761 - DNA, 25 bp, Homo sapien
tctcccggtgcagcctccatgctat

SEQ ID NO: 4586762 - DNA, 25 bp, Homo sapien
ctccatgctatcagtgaggctcagc

SEQ ID NO: 4586763 - DNA, 25 bp, Homo sapien
tgcagcctccatgctatcagtgagg

SEQ ID NO: 4586764 - DNA, 25 bp, Homo sapien
ccatgctatcagtgaggctcagctc

SEQ ID NO: 4586765 - DNA, 25 bp, Homo sapien
ttgtccgcacatccaagctccttgt

SEQ ID NO: 4586766 - DNA, 25 bp, Homo sapien
cccaggctgcagctgcctgtggcct

SEQ ID NO: 4586767 - DNA, 25 bp, Homo sapien
gctgcagctgcctgtggcctggcac

SEQ ID NO: 4586768 - DNA, 25 bp, Homo sapien
tccccaggctgcagctgcctgtggc

SEQ ID NO: 4586769 - DNA, 25 bp, Homo sapien
tgtccccaggctgcagctgcctgtg

SEQ ID NO: 4586770 - DNA, 25 bp, Homo sapien
ctcccacatcttcttggatgggtcg

SEQ ID NO: 4586771 - DNA, 25 bp, Homo sapien
cacatcttcttggatgggtcggagg

SEQ ID NO: 4586772 - DNA, 25 bp, Homo sapien
catcttcttggatgggtcggaggtt

SEQ ID NO: 4586773 - DNA, 25 bp, Homo sapien
ggtgcccgcctcccacatcttcttg

SEQ ID NO: 4586774 - DNA, 25 bp, Homo sapien
ccgacttctccagctcctttacttg

SEQ ID NO: 4586775 - DNA, 25 bp, Homo sapien
gcagtgtgctcttgttctcgttgtt

SEQ ID NO: 4586776 - DNA, 25 bp, Homo sapien
aactgcagtgtgctcttgttctcgt

SEQ ID NO: 4586777 - DNA, 25 bp, Homo sapien
ctgcagtgtgctcttgttctcgttg

SEQ ID NO: 4586778 - DNA, 25 bp, Homo sapien
caggagactcaacatctgattgttt

SEQ ID NO: 4586779 - DNA, 25 bp, Homo sapien
tcctcccaagcttctgtaccagatg

SEQ ID NO: 4586780 - DNA, 25 bp, Homo sapien
gcggagcttgaatccagggccactg

SEQ ID NO: 4586781 - DNA, 25 bp, Homo sapien
tattgcggagcttgaatccagggcc

SEQ ID NO: 4586782 - DNA, 25 bp, Homo sapien
gaattgatgttttcagtgagttgac

SEQ ID NO: 4586783 - DNA, 25 bp, Homo sapien
attgatgttttcagtgagttgactg

SEQ ID NO: 4586784 - DNA, 25 bp, Homo sapien
gtagaggatgcacggccctccccgt

SEQ ID NO: 4586785 - DNA, 25 bp, Homo sapien
ggatgcacggccctccccgtagata

SEQ ID NO: 4586786 - DNA, 25 bp, Homo sapien
cagggtagtagaggatgcacggccc

SEQ ID NO: 4586787 - DNA, 25 bp, Homo sapien
ctccagatcctgcagggtagtagag

SEQ ID NO: 4586788 - DNA, 25 bp, Homo sapien
agggctactgccattgactttcttt

SEQ ID NO: 4586789 - DNA, 25 bp, Homo sapien
ggctcttcctctgccaatatgcttt

SEQ ID NO: 4586790 - DNA, 25 bp, Homo sapien
ctgtgtcagggctactgccattgac

SEQ ID NO: 4586791 - DNA, 25 bp, Homo sapien
tgttagctcctgctggaatgccagg

SEQ ID NO: 4586792 - DNA, 25 bp, Homo sapien
tggctgcggccaatttcccctgttg

SEQ ID NO: 4586793 - DNA, 25 bp, Homo sapien
cttggctgcggccaatttcccctgt

SEQ ID NO: 4586794 - DNA, 25 bp, Homo sapien
gctgcggccaatttcccctgttgtg

SEQ ID NO: 4586795 - DNA, 25 bp, Homo sapien
tgcggccaatttcccctgttgtgtt

SEQ ID NO: 4586796 - DNA, 25 bp, Homo sapien
agaaggatcttcacaatgtaagact

SEQ ID NO: 4586797 - DNA, 25 bp, Homo sapien
aggatcttcacaatgtaagactcag

SEQ ID NO: 4586798 - DNA, 25 bp, Homo sapien
ttagagaaggatcttcacaatgtaa

SEQ ID NO: 4586799 - DNA, 25 bp, Homo sapien
gatcttcacaatgtaagactcaggc

SEQ ID NO: 4586800 - DNA, 25 bp, Homo sapien
tcctcggccgccgttggtacacgga

SEQ ID NO: 4586801 - DNA, 25 bp, Homo sapien
caatccgatgatttctgaggtcctt

SEQ ID NO: 4586802 - DNA, 25 bp, Homo sapien
gtttctcaaagcaatccgatgattt

SEQ ID NO: 4586803 - DNA, 25 bp, Homo sapien
cgttggtacacggaccacattttgt

SEQ ID NO: 4586804 - DNA, 25 bp, Homo sapien
gcagctctgccgtgcaatcccagct

SEQ ID NO: 4586805 - DNA, 25 bp, Homo sapien
cgtgcaatcccagctcgcagccctt

SEQ ID NO: 4586806 - DNA, 25 bp, Homo sapien
tctgccgtgcaatcccagctcgcag

SEQ ID NO: 4586807 - DNA, 25 bp, Homo sapien
tggagcgggatgggcagctctgccg

SEQ ID NO: 4586808 - DNA, 25 bp, Homo sapien
tgtagccggtgcgcggggtggctgg

SEQ ID NO: 4586809 - DNA, 25 bp, Homo sapien
gggaggactcgcagacgttactgcc

SEQ ID NO: 4586810 - DNA, 25 bp, Homo sapien
ttgtagccggtgcgcggggtggctg

SEQ ID NO: 4586811 - DNA, 25 bp, Homo sapien
tggagaagcgttcctgggcttttct

SEQ ID NO: 4586812 - DNA, 25 bp, Homo sapien
tgatttctcgtgctaagtgagtcct

SEQ ID NO: 4586813 - DNA, 25 bp, Homo sapien
gagtgatttctcgtgctaagtgagt

SEQ ID NO: 4586814 - DNA, 25 bp, Homo sapien
tggtgggccttgtgttataaaacca

SEQ ID NO: 4586815 - DNA, 25 bp, Homo sapien
tctggagccttctggggtcattact

SEQ ID NO: 4586816 - DNA, 25 bp, Homo sapien
caagcttggttttcagtgtggattt

SEQ ID NO: 4586817 - DNA, 25 bp, Homo sapien
ctatttgaatctgatgggcttgata

SEQ ID NO: 4586818 - DNA, 25 bp, Homo sapien
gaatctgatgggcttgatattgacc

SEQ ID NO: 4586819 - DNA, 25 bp, Homo sapien
gtaaaaatgttggttattgctgcct

SEQ ID NO: 4586820 - DNA, 25 bp, Homo sapien
gtaggtcttaagtgtcatctggcat

SEQ ID NO: 4586821 - DNA, 25 bp, Homo sapien
agtaggtcttaagtgtcatctggca

SEQ ID NO: 4586822 - DNA, 25 bp, Homo sapien
ggtcttaagtgtcatctggcatctt

SEQ ID NO: 4586823 - DNA, 25 bp, Homo sapien
taggtcttaagtgtcatctggcatc

SEQ ID NO: 4586824 - DNA, 25 bp, Homo sapien
attcatcagcctgctgaacagttcc

SEQ ID NO: 4586825 - DNA, 25 bp, Homo sapien
acatagataccatccaaaaatttcc

SEQ ID NO: 4586826 - DNA, 25 bp, Homo sapien
agataccatccaaaaatttcctgat

SEQ ID NO: 4586827 - DNA, 25 bp, Homo sapien
ttattcatcagcctgctgaacagtt

SEQ ID NO: 4586828 - DNA, 25 bp, Homo sapien
gtcatttccttcaaggattaattca

SEQ ID NO: 4586829 - DNA, 25 bp, Homo sapien
tgaaacaagctcaatgtcatttcct

SEQ ID NO: 4586830 - DNA, 25 bp, Homo sapien
gggcttgagatactgaacaagcaac

SEQ ID NO: 4586831 - DNA, 25 bp, Homo sapien
ctttctgggcttgagatactgaaca

SEQ ID NO: 4586832 - DNA, 25 bp, Homo sapien
gactacaaatagtccgaacggtagc

SEQ ID NO: 4586833 - DNA, 25 bp, Homo sapien
cattctcctggataacaacgttgat

SEQ ID NO: 4586834 - DNA, 25 bp, Homo sapien
aagaaggctgagttctacattgatg

SEQ ID NO: 4586835 - DNA, 25 bp, Homo sapien
tcgacagtctgattgctgagaatag

SEQ ID NO: 4586836 - DNA, 25 bp, Homo sapien
gaagatcgtgctgaaagataatgcc

SEQ ID NO: 4586837 - DNA, 25 bp, Homo sapien
gataatgccaactcagaacctagga

SEQ ID NO: 4586838 - DNA, 25 bp, Homo sapien
tgaaccttctagcaggcagttttgc

SEQ ID NO: 4586839 - DNA, 25 bp, Homo sapien
gaaagtgtgaaggtaacgcgtccca

SEQ ID NO: 4586840 - DNA, 25 bp, Homo sapien
catgtgagaatcacctcagagagat

SEQ ID NO: 4586841 - DNA, 25 bp, Homo sapien
tgacagacccagatgcatgtgagaa

SEQ ID NO: 4586842 - DNA, 25 bp, Homo sapien
taaaatgaaggctagtaactgggct

SEQ ID NO: 4586843 - DNA, 25 bp, Homo sapien
taactgggctagtggtgacagaccc

SEQ ID NO: 4586844 - DNA, 25 bp, Homo sapien
tccattggtgccctggttacgccac

SEQ ID NO: 4586845 - DNA, 25 bp, Homo sapien
tccgatgacaagaccggtgccagag

SEQ ID NO: 4586846 - DNA, 25 bp, Homo sapien
cttatgatgctacaggtccctctgg

SEQ ID NO: 4586847 - DNA, 25 bp, Homo sapien
ggtatttcgctgatgtggccccaac

SEQ ID NO: 4586848 - DNA, 25 bp, Homo sapien
caagaatgagcgctgtactacggta

SEQ ID NO: 4586849 - DNA, 25 bp, Homo sapien
tacatgtcccagtacacaaaagggc

SEQ ID NO: 4586850 - DNA, 25 bp, Homo sapien
tcttgctggtttgggataggctgcc

SEQ ID NO: 4586851 - DNA, 25 bp, Homo sapien
gatcgaatcctaatcacagtgagct

SEQ ID NO: 4586852 - DNA, 25 bp, Homo sapien
tgtactatattaactcaaataccac

SEQ ID NO: 4586853 - DNA, 25 bp, Homo sapien
tcatcaggtacctgtggattaaatc

SEQ ID NO: 4586854 - DNA, 25 bp, Homo sapien
tagttcaaatcgcttcacttttacc

SEQ ID NO: 4586855 - DNA, 25 bp, Homo sapien
acctgtggattaaatcacatactgg

SEQ ID NO: 4586856 - DNA, 25 bp, Homo sapien
ccttcccccgtgtacatactgtagc

SEQ ID NO: 4586857 - DNA, 25 bp, Homo sapien
cgggacagtggagttaactgtagac

SEQ ID NO: 4586858 - DNA, 25 bp, Homo sapien
ggttgcagctggcatatgaggaaga

SEQ ID NO: 4586859 - DNA, 25 bp, Homo sapien
cagctgaggcgggacagtggagtta

SEQ ID NO: 4586860 - DNA, 25 bp, Homo sapien
agcagtagtgcttcagcaggggcca

SEQ ID NO: 4586861 - DNA, 25 bp, Homo sapien
ttcagtcgcacgctagcagctatca

SEQ ID NO: 4586862 - DNA, 25 bp, Homo sapien
cagtcgcacgctagcagctatcatg

SEQ ID NO: 4586863 - DNA, 25 bp, Homo sapien
gctggccagcagtagtgcttcagca

SEQ ID NO: 4586864 - DNA, 25 bp, Homo sapien
gagcaaagtgagacaaccagcagca

SEQ ID NO: 4586865 - DNA, 25 bp, Homo sapien
cagtgagacttgtacctaccatggc

SEQ ID NO: 4586866 - DNA, 25 bp, Homo sapien
gggcgggcagaccattcatgcagca

SEQ ID NO: 4586867 - DNA, 25 bp, Homo sapien
gaaagacagcatcaaatcacatggc

SEQ ID NO: 4586868 - DNA, 25 bp, Homo sapien
ctcccgccagaggtgagagtaaaat

SEQ ID NO: 4586869 - DNA, 25 bp, Homo sapien
ccctcccgccagaggtgagagtaaa

SEQ ID NO: 4586870 - DNA, 25 bp, Homo sapien
cctcccgccagaggtgagagtaaaa

SEQ ID NO: 4586871 - DNA, 25 bp, Homo sapien
gacattccgggtcagcaatggactg

SEQ ID NO: 4586872 - DNA, 25 bp, Homo sapien
ttcctagtgaccatccagagagcca

SEQ ID NO: 4586873 - DNA, 25 bp, Homo sapien
agtggtgggtcacacaggcgttcca

SEQ ID NO: 4586874 - DNA, 25 bp, Homo sapien
cggtgactgagttctcctgctggga

SEQ ID NO: 4586875 - DNA, 25 bp, Homo sapien
gaggcatgccttctcgctggatgtg

SEQ ID NO: 4586876 - DNA, 25 bp, Homo sapien
gacagggagtcacatttcagaaaga

SEQ ID NO: 4586877 - DNA, 25 bp, Homo sapien
tcagaaagacctatgctttagatgc

SEQ ID NO: 4586878 - DNA, 25 bp, Homo sapien
aggatgggcctcaagccaggaccct

SEQ ID NO: 4586879 - DNA, 25 bp, Homo sapien
gcaggcacagcagcatgacgagatg

SEQ ID NO: 4586880 - DNA, 25 bp, Homo sapien
gaagcccgtgtgaaaagccatactc

SEQ ID NO: 4586881 - DNA, 25 bp, Homo sapien
gataagtcttaagtcccctcccaga

SEQ ID NO: 4586882 - DNA, 25 bp, Homo sapien
cagtcgaagcggtatagaagcccgt

SEQ ID NO: 4586883 - DNA, 25 bp, Homo sapien
gggctgaatgcggctgaagaggccg

SEQ ID NO: 4586884 - DNA, 25 bp, Homo sapien
gctgaatgcggctgaagaggccgct

SEQ ID NO: 4586885 - DNA, 25 bp, Homo sapien
gaatgcggctgaagaggccgctgga

SEQ ID NO: 4586886 - DNA, 25 bp, Homo sapien
tgaatgcggctgaagaggccgctgg

SEQ ID NO: 4586887 - DNA, 25 bp, Homo sapien
tctgaactccgagatgctctgggtg

SEQ ID NO: 4586888 - DNA, 25 bp, Homo sapien
ccgggggcgcctacttcaggtctga

SEQ ID NO: 4586889 - DNA, 25 bp, Homo sapien
cagtcccgggggcgcctacttcagg

SEQ ID NO: 4586890 - DNA, 25 bp, Homo sapien
agagtctgaactccgagatgctctg

SEQ ID NO: 4586891 - DNA, 25 bp, Homo sapien
accacaggagcagaggcgagtctgt

SEQ ID NO: 4586892 - DNA, 25 bp, Homo sapien
cacaggagcagaggcgagtctgtga

SEQ ID NO: 4586893 - DNA, 25 bp, Homo sapien
ggaccacaggagcagaggcgagtct

SEQ ID NO: 4586894 - DNA, 25 bp, Homo sapien
ctggaccacaggagcagaggcgagt

SEQ ID NO: 4586895 - DNA, 25 bp, Homo sapien
cgtgagcgagcacacgagtgtaaag

SEQ ID NO: 4586896 - DNA, 25 bp, Homo sapien
agcacacgagtgtaaagaatggcac

SEQ ID NO: 4586897 - DNA, 25 bp, Homo sapien
gagcgagcacacgagtgtaaagaat

SEQ ID NO: 4586898 - DNA, 25 bp, Homo sapien
gatttccagtgtgccgtctccactg

SEQ ID NO: 4586899 - DNA, 25 bp, Homo sapien
cagatgcggctgtaggagcactttg

SEQ ID NO: 4586900 - DNA, 25 bp, Homo sapien
gagataggcatacgttgtgaggaac

SEQ ID NO: 4586901 - DNA, 25 bp, Homo sapien
gcttcaatgcagtccggggcatgac

SEQ ID NO: 4586902 - DNA, 25 bp, Homo sapien
ctggcttcaatgcagtccggggcat

SEQ ID NO: 4586903 - DNA, 25 bp, Homo sapien
taggcatacgttgtgaggaactgga

SEQ ID NO: 4586904 - DNA, 25 bp, Homo sapien
cctctgtgtgcgggtgagcatctgt

SEQ ID NO: 4586905 - DNA, 25 bp, Homo sapien
tgcccacgcatgtgcttcagtgtgc

SEQ ID NO: 4586906 - DNA, 25 bp, Homo sapien
aatgacagccggacattagtgagca

SEQ ID NO: 4586907 - DNA, 25 bp, Homo sapien
ccatggaaggctcttaggtggagaa

SEQ ID NO: 4586908 - DNA, 25 bp, Homo sapien
caaatccactgcagattaggggtga

SEQ ID NO: 4586909 - DNA, 25 bp, Homo sapien
gccaaatccactgcagattaggggt

SEQ ID NO: 4586910 - DNA, 25 bp, Homo sapien
tccactgcagattaggggtgatagt

SEQ ID NO: 4586911 - DNA, 25 bp, Homo sapien
cactgcagattaggggtgatagtca

SEQ ID NO: 4586912 - DNA, 25 bp, Homo sapien
ccctgctcgtcagcacacccaagct

SEQ ID NO: 4586913 - DNA, 25 bp, Homo sapien
accctgctcgtcagcacacccaagc

SEQ ID NO: 4586914 - DNA, 25 bp, Homo sapien
caccctgctcgtcagcacacccaag

SEQ ID NO: 4586915 - DNA, 25 bp, Homo sapien
agcctgacgatgtcctcctctccca

SEQ ID NO: 4586916 - DNA, 25 bp, Homo sapien
ccccagcggtgccctagcctctcac

SEQ ID NO: 4586917 - DNA, 25 bp, Homo sapien
gggcccctcagacggcctggcagct

SEQ ID NO: 4586918 - DNA, 25 bp, Homo sapien
ctggcagctccccccagcggtgccc

SEQ ID NO: 4586919 - DNA, 25 bp, Homo sapien
atgctggggcccctcagacggcctg

SEQ ID NO: 4586920 - DNA, 25 bp, Homo sapien
gatgaattgaagctctagtttctct

SEQ ID NO: 4586921 - DNA, 25 bp, Homo sapien
gaagctctagtttctctacccgctc

SEQ ID NO: 4586922 - DNA, 25 bp, Homo sapien
gtctgtcctgagaggtggatgaatt

SEQ ID NO: 4586923 - DNA, 25 bp, Homo sapien
cctgagaggtggatgaattgaagct

SEQ ID NO: 4586924 - DNA, 25 bp, Homo sapien
catgtcaggagtcacctgccttgtc

SEQ ID NO: 4586925 - DNA, 25 bp, Homo sapien
ctgcagggcccggtgggtctcccca

SEQ ID NO: 4586926 - DNA, 25 bp, Homo sapien
tgcagggcccggtgggtctccccaa

SEQ ID NO: 4586927 - DNA, 25 bp, Homo sapien
cggtgggtctccccaaacacagact

SEQ ID NO: 4586928 - DNA, 25 bp, Homo sapien
tgggtctccccaaacacagactcac

SEQ ID NO: 4586929 - DNA, 25 bp, Homo sapien
cctttgttcctcctgggcattggct

SEQ ID NO: 4586930 - DNA, 25 bp, Homo sapien
cacaccctttgttcctcctgggcat

SEQ ID NO: 4586931 - DNA, 25 bp, Homo sapien
caccctttgttcctcctgggcattg

SEQ ID NO: 4586932 - DNA, 25 bp, Homo sapien
gctttttctgggacgaggccactgg

SEQ ID NO: 4586933 - DNA, 25 bp, Homo sapien
agtattcttgtaggggtatacacat

SEQ ID NO: 4586934 - DNA, 25 bp, Homo sapien
ttcttgtaggggtatacacataaca

SEQ ID NO: 4586935 - DNA, 25 bp, Homo sapien
gagtattcttgtaggggtatacaca

SEQ ID NO: 4586936 - DNA, 25 bp, Homo sapien
tattcttgtaggggtatacacataa

SEQ ID NO: 4586937 - DNA, 25 bp, Homo sapien
catggcctcccggctctccaggtcc

SEQ ID NO: 4586938 - DNA, 25 bp, Homo sapien
atggcctcccggctctccaggtccc

SEQ ID NO: 4586939 - DNA, 25 bp, Homo sapien
gctcactgtccagatgtcctcctcc

SEQ ID NO: 4586940 - DNA, 25 bp, Homo sapien
ctgctcactgtccagatgtcctcct

SEQ ID NO: 4586941 - DNA, 25 bp, Homo sapien
gggccgaagcgcctcctgctcactg

SEQ ID NO: 4586942 - DNA, 25 bp, Homo sapien
actgtccagatgtcctcctccatct

SEQ ID NO: 4586943 - DNA, 25 bp, Homo sapien
taggcaagccgatgacctgttccca

SEQ ID NO: 4586944 - DNA, 25 bp, Homo sapien
cttaggcaagccgatgacctgttcc

SEQ ID NO: 4586945 - DNA, 25 bp, Homo sapien
ccatccttaggcaagccgatgacct

SEQ ID NO: 4586946 - DNA, 25 bp, Homo sapien
aagccgatgacctgttcccaggagg

SEQ ID NO: 4586947 - DNA, 25 bp, Homo sapien
ggccagttttgctacctctctccca

SEQ ID NO: 4586948 - DNA, 25 bp, Homo sapien
tgaggccagttttgctacctctctc

SEQ ID NO: 4586949 - DNA, 25 bp, Homo sapien
gaggccagttttgctacctctctcc

SEQ ID NO: 4586950 - DNA, 25 bp, Homo sapien
cagttttgctacctctctcccatct

SEQ ID NO: 4586951 - DNA, 25 bp, Homo sapien
ttatgttatccaccttccaacaggg

SEQ ID NO: 4586952 - DNA, 25 bp, Homo sapien
tgctggcctagatttagaagatcct

SEQ ID NO: 4586953 - DNA, 25 bp, Homo sapien
tcccgagagccaaaacctataaaga

SEQ ID NO: 4586954 - DNA, 25 bp, Homo sapien
ggaccatcccacgaacgagcttctt

SEQ ID NO: 4586955 - DNA, 25 bp, Homo sapien
gcgggccgagccgagacagctcctc

SEQ ID NO: 4586956 - DNA, 25 bp, Homo sapien
ccccgcgggccgagccgagacagct

SEQ ID NO: 4586957 - DNA, 25 bp, Homo sapien
gggccgagccgagacagctcctcac

SEQ ID NO: 4586958 - DNA, 25 bp, Homo sapien
ccgcgggccgagccgagacagctcc

SEQ ID NO: 4586959 - DNA, 25 bp, Homo sapien
tgggcacggcggtctcggccgagcc

SEQ ID NO: 4586960 - DNA, 25 bp, Homo sapien
gggcacggcggtctcggccgagccg

SEQ ID NO: 4586961 - DNA, 25 bp, Homo sapien
gcacggcggtctcggccgagccgag

SEQ ID NO: 4586962 - DNA, 25 bp, Homo sapien
ggcacggcggtctcggccgagccga

SEQ ID NO: 4586963 - DNA, 25 bp, Homo sapien
agccaccccgcgcaccggctacaag

SEQ ID NO: 4586964 - DNA, 25 bp, Homo sapien
tgcacgtagccccagccaccccgcg

SEQ ID NO: 4586965 - DNA, 25 bp, Homo sapien
gcgcaccggctacaagccgcccggg

SEQ ID NO: 4586966 - DNA, 25 bp, Homo sapien
cccgcgcaccggctacaagccgccc

SEQ ID NO: 4586967 - DNA, 25 bp, Homo sapien
gccgtgcatcctctactaccctgga

SEQ ID NO: 4586968 - DNA, 25 bp, Homo sapien
tgcagtcagcaacaggtatctacgg

SEQ ID NO: 4586969 - DNA, 25 bp, Homo sapien
ggctgtccctttaggagtcactgaa

SEQ ID NO: 4586970 - DNA, 25 bp, Homo sapien
caccgaggaaatggtcgttgctgtt

SEQ ID NO: 4586971 - DNA, 25 bp, Homo sapien
gctgagcacctctgtcagcatatgg

SEQ ID NO: 4586972 - DNA, 25 bp, Homo sapien
ccccatgggcatgctgatggtgatc

SEQ ID NO: 4586973 - DNA, 25 bp, Homo sapien
gcacagcatctcatcgccccgctgt

SEQ ID NO: 4586974 - DNA, 25 bp, Homo sapien
tcgccccgctgtacctgctctgcag

SEQ ID NO: 4586975 - DNA, 25 bp, Homo sapien
gatggtcctgggcaggagaccaacc

SEQ ID NO: 4586976 - DNA, 25 bp, Homo sapien
tggtcctgggcaggagaccaaccat

SEQ ID NO: 4586977 - DNA, 25 bp, Homo sapien
aggtgcatgatggtcctgggcagga

SEQ ID NO: 4586978 - DNA, 25 bp, Homo sapien
tcctgggcaggagaccaaccatgag

SEQ ID NO: 4586979 - DNA, 25 bp, Homo sapien
cgaggcgttttgaaattcatcccaa

SEQ ID NO: 4586980 - DNA, 25 bp, Homo sapien
tccccgaggcgttttgaaattcatc

SEQ ID NO: 4586981 - DNA, 25 bp, Homo sapien
attcatcccaactgtaggctgagtg

SEQ ID NO: 4586982 - DNA, 25 bp, Homo sapien
tcatcccaactgtaggctgagtgac

SEQ ID NO: 4586983 - DNA, 25 bp, Homo sapien
tgaaggttggacagactgccgaagt

SEQ ID NO: 4586984 - DNA, 25 bp, Homo sapien
ctgaaggttggacagactgccgaag

SEQ ID NO: 4586985 - DNA, 25 bp, Homo sapien
gaaggttggacagactgccgaagtc

SEQ ID NO: 4586986 - DNA, 25 bp, Homo sapien
ccctggctatgagaacgaaaaatgt

SEQ ID NO: 4586987 - DNA, 25 bp, Homo sapien
tcttggcaacgtagacatcctgggc

SEQ ID NO: 4586988 - DNA, 25 bp, Homo sapien
aatcaacatttgtgaagggcccaag

SEQ ID NO: 4586989 - DNA, 25 bp, Homo sapien
gtacacaaggcatcaagcagaaggg

SEQ ID NO: 4586990 - DNA, 25 bp, Homo sapien
agaaaagcaggcagattcagccagg

SEQ ID NO: 4586991 - DNA, 25 bp, Homo sapien
acacaaagggggcaacgtaagccag

SEQ ID NO: 4586992 - DNA, 25 bp, Homo sapien
catttctgagtggttagcatggaga

SEQ ID NO: 4586993 - DNA, 25 bp, Homo sapien
aggaatgccttcacagaagaaaagc

SEQ ID NO: 4586994 - DNA, 25 bp, Homo sapien
gtcctggaagccactagatttggga

SEQ ID NO: 4586995 - DNA, 25 bp, Homo sapien
gaatcatgatcttgtggcgaactaa

SEQ ID NO: 4586996 - DNA, 25 bp, Homo sapien
gctacaagtttagatgggattccca

SEQ ID NO: 4586997 - DNA, 25 bp, Homo sapien
tacaccccttatgaaagcagtccag

SEQ ID NO: 4586998 - DNA, 25 bp, Homo sapien
acttcaataatctcctgatccaagg

SEQ ID NO: 4586999 - DNA, 25 bp, Homo sapien
cttagtgtcaggatctacttcaata

SEQ ID NO: 4587000 - DNA, 25 bp, Homo sapien
gtgtcaggatctacttcaataatct

SEQ ID NO: 4587001 - DNA, 25 bp, Homo sapien
ttcaataatctcctgatccaaggct

SEQ ID NO: 4587002 - DNA, 25 bp, Homo sapien
gatagcattcctctcacaaggtgag

SEQ ID NO: 4587003 - DNA, 25 bp, Homo sapien
catttgaggattagccagaagccca

SEQ ID NO: 4587004 - DNA, 25 bp, Homo sapien
cagattcagctgaggtccctttgga

SEQ ID NO: 4587005 - DNA, 25 bp, Homo sapien
tacagtattacagaccccgatgacc

SEQ ID NO: 4587006 - DNA, 25 bp, Homo sapien
ctgaattcgcttcatcagatgcgtg

SEQ ID NO: 4587007 - DNA, 25 bp, Homo sapien
actgggcctctctgaattcgcttca

SEQ ID NO: 4587008 - DNA, 25 bp, Homo sapien
gggcctctctgaattcgcttcatca

SEQ ID NO: 4587009 - DNA, 25 bp, Homo sapien
cctctctgaattcgcttcatcagat

SEQ ID NO: 4587010 - DNA, 25 bp, Homo sapien
gactttggcactattcttccaggcc

SEQ ID NO: 4587011 - DNA, 25 bp, Homo sapien
ttggcaattaatacgttgactttgg

SEQ ID NO: 4587012 - DNA, 25 bp, Homo sapien
catatgcctataaatctctcgaaca

SEQ ID NO: 4587013 - DNA, 25 bp, Homo sapien
taaatctctcgaacagtaactgcaa

SEQ ID NO: 4587014 - DNA, 25 bp, Homo sapien
cttcacggttttggtgcgaacgcgg

SEQ ID NO: 4587015 - DNA, 25 bp, Homo sapien
taatggcgatctcctcgcacacgcg

SEQ ID NO: 4587016 - DNA, 25 bp, Homo sapien
cgcgcttgttcgtgtggaagtcgtt

SEQ ID NO: 4587017 - DNA, 25 bp, Homo sapien
tttctatgatgacccgggccgcctt

SEQ ID NO: 4587018 - DNA, 25 bp, Homo sapien
ctgcgggtggagaggacaggatcac

SEQ ID NO: 4587019 - DNA, 25 bp, Homo sapien
gggtggagaggacaggatcactcac

SEQ ID NO: 4587020 - DNA, 25 bp, Homo sapien
cgggtggagaggacaggatcactca

SEQ ID NO: 4587021 - DNA, 25 bp, Homo sapien
tgcgggtggagaggacaggatcact

SEQ ID NO: 4587022 - DNA, 25 bp, Homo sapien
gagccagcgcaaccttctgggaaga

SEQ ID NO: 4587023 - DNA, 25 bp, Homo sapien
cgccgggcttaatgcggaagccgcc

SEQ ID NO: 4587024 - DNA, 25 bp, Homo sapien
gagagggcccggctaaacagtgccg

SEQ ID NO: 4587025 - DNA, 25 bp, Homo sapien
agggctctgcgccttcccggcccag

SEQ ID NO: 4587026 - DNA, 25 bp, Homo sapien
tggcggcctcgagccaaaacaccta

SEQ ID NO: 4587027 - DNA, 25 bp, Homo sapien
gacgattgtggaggatggcggcctc

SEQ ID NO: 4587028 - DNA, 25 bp, Homo sapien
cgattgtggaggatggcggcctcga

SEQ ID NO: 4587029 - DNA, 25 bp, Homo sapien
ctgcagatgggggacgattgtggag

SEQ ID NO: 4587030 - DNA, 25 bp, Homo sapien
agcacaggcgaagcctgttaaagct

SEQ ID NO: 4587031 - DNA, 25 bp, Homo sapien
gaagcacaggcgaagcctgttaaag

SEQ ID NO: 4587032 - DNA, 25 bp, Homo sapien
aggaagcacaggcgaagcctgttaa

SEQ ID NO: 4587033 - DNA, 25 bp, Homo sapien
acaggcgaagcctgttaaagcttag

SEQ ID NO: 4587034 - DNA, 25 bp, Homo sapien
cttgggtactccagtcggactctca

SEQ ID NO: 4587035 - DNA, 25 bp, Homo sapien
gtactccagtcggactctcaactga

SEQ ID NO: 4587036 - DNA, 25 bp, Homo sapien
ccagtcggactctcaactgattggg

SEQ ID NO: 4587037 - DNA, 25 bp, Homo sapien
tgggtactccagtcggactctcaac

SEQ ID NO: 4587038 - DNA, 25 bp, Homo sapien
aaagaatcggtccaacagctgggcc

SEQ ID NO: 4587039 - DNA, 25 bp, Homo sapien
ctcagactaaattggaggttcccaa

SEQ ID NO: 4587040 - DNA, 25 bp, Homo sapien
gcttcagtatgcagggttccctcca

SEQ ID NO: 4587041 - DNA, 25 bp, Homo sapien
gagacagcttcagtatgcagggttc

SEQ ID NO: 4587042 - DNA, 25 bp, Homo sapien
cccaccattatcctgggccaggatc

SEQ ID NO: 4587043 - DNA, 25 bp, Homo sapien
gaatgaaaccaatgagacctgcgca

SEQ ID NO: 4587044 - DNA, 25 bp, Homo sapien
tatgacactggttctttggcacaca

SEQ ID NO: 4587045 - DNA, 25 bp, Homo sapien
taaataaacctaggtgtaggcatcc

SEQ ID NO: 4587046 - DNA, 25 bp, Homo sapien
tggaaaggcactgtatggcaactgc

SEQ ID NO: 4587047 - DNA, 25 bp, Homo sapien
cagagggtccttgcccttggtacac

SEQ ID NO: 4587048 - DNA, 25 bp, Homo sapien
tacagagtcgcttggagggtaagcc

SEQ ID NO: 4587049 - DNA, 25 bp, Homo sapien
caaaacctgacaaaactcaatgtgc

SEQ ID NO: 4587050 - DNA, 25 bp, Homo sapien
cagctccctggtcgccagtggcagg

SEQ ID NO: 4587051 - DNA, 25 bp, Homo sapien
tgccagctttgggcgccacaggcca

SEQ ID NO: 4587052 - DNA, 25 bp, Homo sapien
ctgccagctttgggcgccacaggcc

SEQ ID NO: 4587053 - DNA, 25 bp, Homo sapien
cggttcttctggttccgcatcaggg

SEQ ID NO: 4587054 - DNA, 25 bp, Homo sapien
ctagctggaatctcggttcttctgg

SEQ ID NO: 4587055 - DNA, 25 bp, Homo sapien
cagctccggcagaagtatttgaagc

SEQ ID NO: 4587056 - DNA, 25 bp, Homo sapien
gaatctcggttcttctggttccgca

SEQ ID NO: 4587057 - DNA, 25 bp, Homo sapien
ggaggatgccatgcctgtgtcagca

SEQ ID NO: 4587058 - DNA, 25 bp, Homo sapien
caaaaaggaggatgccatgcctgtg

SEQ ID NO: 4587059 - DNA, 25 bp, Homo sapien
ggagctgttgcacgagctgcttgtt

SEQ ID NO: 4587060 - DNA, 25 bp, Homo sapien
gacacaggagctgttgcacgagctg

SEQ ID NO: 4587061 - DNA, 25 bp, Homo sapien
aaccccttggtgaagagcgtctgtc

SEQ ID NO: 4587062 - DNA, 25 bp, Homo sapien
accccttggtgaagagcgtctgtcc

SEQ ID NO: 4587063 - DNA, 25 bp, Homo sapien
cgagaatttgcagagtctcaatacc

SEQ ID NO: 4587064 - DNA, 25 bp, Homo sapien
ccgagaatttgcagagtctcaatac

SEQ ID NO: 4587065 - DNA, 25 bp, Homo sapien
gccgagaatttgcagagtctcaata

SEQ ID NO: 4587066 - DNA, 25 bp, Homo sapien
aaaaccgattacctcatgccaagca

SEQ ID NO: 4587067 - DNA, 25 bp, Homo sapien
tgttttgattctttactccctacag

SEQ ID NO: 4587068 - DNA, 25 bp, Homo sapien
attatcatattttgcagtctttaaa

SEQ ID NO: 4587069 - DNA, 25 bp, Homo sapien
taatgccactttagacaaaaatcag

SEQ ID NO: 4587070 - DNA, 25 bp, Homo sapien
tattttgcagtctttaaataggtgt

SEQ ID NO: 4587071 - DNA, 25 bp, Homo sapien
tttatacgtgtcagggtaaaagtga

SEQ ID NO: 4587072 - DNA, 25 bp, Homo sapien
atttatacgtgtcagggtaaaagtg

SEQ ID NO: 4587073 - DNA, 25 bp, Homo sapien
aaaatccatcttctagcctcaaata

SEQ ID NO: 4587074 - DNA, 25 bp, Homo sapien
taaaatccatcttctagcctcaaat

SEQ ID NO: 4587075 - DNA, 25 bp, Homo sapien
tgctccacctttaaacaactgtaaa

SEQ ID NO: 4587076 - DNA, 25 bp, Homo sapien
gtgctccacctttaaacaactgtaa

SEQ ID NO: 4587077 - DNA, 25 bp, Homo sapien
gaatatacaggctgtactaacatta

SEQ ID NO: 4587078 - DNA, 25 bp, Homo sapien
atgaatatacaggctgtactaacat

SEQ ID NO: 4587079 - DNA, 25 bp, Homo sapien
atatacaggctgtactaacattaaa

SEQ ID NO: 4587080 - DNA, 25 bp, Homo sapien
gtgtgcatacagtgggtctttgtgt

SEQ ID NO: 4587081 - DNA, 25 bp, Homo sapien
ctgttctccgcagcccgaaaagaat

SEQ ID NO: 4587082 - DNA, 25 bp, Homo sapien
gaaaagaatggcatgcagcctcttc

SEQ ID NO: 4587083 - DNA, 25 bp, Homo sapien
ttcttgacccgctcttagatgatgg

SEQ ID NO: 4587084 - DNA, 25 bp, Homo sapien
acataagtggctctaacattcaaat

SEQ ID NO: 4587085 - DNA, 25 bp, Homo sapien
tctcccggtgcagcctccatgctat

SEQ ID NO: 4587086 - DNA, 25 bp, Homo sapien
ctccatgctatcagtgaggctcagc

SEQ ID NO: 4587087 - DNA, 25 bp, Homo sapien
tgcagcctccatgctatcagtgagg

SEQ ID NO: 4587088 - DNA, 25 bp, Homo sapien
ccatgctatcagtgaggctcagctc

SEQ ID NO: 4587089 - DNA, 25 bp, Homo sapien
ttgtccgcacatccaagctccttgt

SEQ ID NO: 4587090 - DNA, 25 bp, Homo sapien
cccaggctgcagctgcctgtggcct

SEQ ID NO: 4587091 - DNA, 25 bp, Homo sapien
tccccaggctgcagctgcctgtggc

SEQ ID NO: 4587092 - DNA, 25 bp, Homo sapien
gctgcagctgcctgtggcctggcac

SEQ ID NO: 4587093 - DNA, 25 bp, Homo sapien
tgtccccaggctgcagctgcctgtg

SEQ ID NO: 4587094 - DNA, 25 bp, Homo sapien
cacatcttcttggatgggtcagagg

SEQ ID NO: 4587095 - DNA, 25 bp, Homo sapien
ctcccacatcttcttggatgggtca

SEQ ID NO: 4587096 - DNA, 25 bp, Homo sapien
cccacatcttcttggatgggtcaga

SEQ ID NO: 4587097 - DNA, 25 bp, Homo sapien
acatcttcttggatgggtcagaggt

SEQ ID NO: 4587098 - DNA, 25 bp, Homo sapien
aactgcagtgtgctcttgttctcgt

SEQ ID NO: 4587099 - DNA, 25 bp, Homo sapien
ccgacttctccagctcctttacttg

SEQ ID NO: 4587100 - DNA, 25 bp, Homo sapien
ctgcagtgtgctcttgttctcgttg

SEQ ID NO: 4587101 - DNA, 25 bp, Homo sapien
gcagtgtgctcttgttctcgttgtt

SEQ ID NO: 4587102 - DNA, 25 bp, Homo sapien
ctcggcccgctgctcgtacagggct

SEQ ID NO: 4587103 - DNA, 25 bp, Homo sapien
cgctgctcgtacagggcttcccacc

SEQ ID NO: 4587104 - DNA, 25 bp, Homo sapien
tcggcccgctgctcgtacagggctt

SEQ ID NO: 4587105 - DNA, 25 bp, Homo sapien
gcccgctgctcgtacagggcttccc

SEQ ID NO: 4587106 - DNA, 25 bp, Homo sapien
tcctcccaagcttctgtaccagatg

SEQ ID NO: 4587107 - DNA, 25 bp, Homo sapien
tattgcggagcttgaatccagggcc

SEQ ID NO: 4587108 - DNA, 25 bp, Homo sapien
gcggagcttgaatccagggccactg

SEQ ID NO: 4587109 - DNA, 25 bp, Homo sapien
gaattgatgttttcagtgagttgac

SEQ ID NO: 4587110 - DNA, 25 bp, Homo sapien
attgatgttttcagtgagttgactg

SEQ ID NO: 4587111 - DNA, 25 bp, Homo sapien
ggtagtagaggatgcacggccctcc

SEQ ID NO: 4587112 - DNA, 25 bp, Homo sapien
ggatgcacggccctccccgtagata

SEQ ID NO: 4587113 - DNA, 25 bp, Homo sapien
ctccagatcctgcagggtagtagag

SEQ ID NO: 4587114 - DNA, 25 bp, Homo sapien
gtagaggatgcacggccctccccgt

SEQ ID NO: 4587115 - DNA, 25 bp, Homo sapien
agggctactgccattgactttcttt

SEQ ID NO: 4587116 - DNA, 25 bp, Homo sapien
ggctcttcctctgccaatatgcttt

SEQ ID NO: 4587117 - DNA, 25 bp, Homo sapien
ctgtgtcagggctactgccattgac

SEQ ID NO: 4587118 - DNA, 25 bp, Homo sapien
tgttagctcctgctggaatgccagg

SEQ ID NO: 4587119 - DNA, 25 bp, Homo sapien
tggctgcggccaatttcccctgttg

SEQ ID NO: 4587120 - DNA, 25 bp, Homo sapien
cttggctgcggccaatttcccctgt

SEQ ID NO: 4587121 - DNA, 25 bp, Homo sapien
gctgcggccaatttcccctgttgtg

SEQ ID NO: 4587122 - DNA, 25 bp, Homo sapien
tgcggccaatttcccctgttgtgtt

SEQ ID NO: 4587123 - DNA, 25 bp, Homo sapien
agaaggatcttcacaatgtaagact

SEQ ID NO: 4587124 - DNA, 25 bp, Homo sapien
gatcttcacaatgtaagactcaggc

SEQ ID NO: 4587125 - DNA, 25 bp, Homo sapien
aggatcttcacaatgtaagactcag

SEQ ID NO: 4587126 - DNA, 25 bp, Homo sapien
ttagagaaggatcttcacaatgtaa

SEQ ID NO: 4587127 - DNA, 25 bp, Homo sapien
tcctcggccgccgttggtacacgga

SEQ ID NO: 4587128 - DNA, 25 bp, Homo sapien
caatccgatgatttctgaggtcctt

SEQ ID NO: 4587129 - DNA, 25 bp, Homo sapien
gtttctcaaagcaatccgatgattt

SEQ ID NO: 4587130 - DNA, 25 bp, Homo sapien
cgttggtacacggaccacattttgt

SEQ ID NO: 4587131 - DNA, 25 bp, Homo sapien
tggagcgggatgggcagctctgccg

SEQ ID NO: 4587132 - DNA, 25 bp, Homo sapien
cgtgcaatcccagctcgcagccctt

SEQ ID NO: 4587133 - DNA, 25 bp, Homo sapien
tctgccgtgcaatcccagctcgcag

SEQ ID NO: 4587134 - DNA, 25 bp, Homo sapien
gcagctctgccgtgcaatcccagct

SEQ ID NO: 4587135 - DNA, 25 bp, Homo sapien
tgtagccggtgcgcggggtggctgg

SEQ ID NO: 4587136 - DNA, 25 bp, Homo sapien
gggaggactcgcagacgttactgcc

SEQ ID NO: 4587137 - DNA, 25 bp, Homo sapien
ttgtagccggtgcgcggggtggctg

SEQ ID NO: 4587138 - DNA, 25 bp, Homo sapien
tggtgggccttgtgttataaaacca

SEQ ID NO: 4587139 - DNA, 25 bp, Homo sapien
tggagaagcgttcctgggcttttct

SEQ ID NO: 4587140 - DNA, 25 bp, Homo sapien
gagtgatttctcgtgctaagtgagt

SEQ ID NO: 4587141 - DNA, 25 bp, Homo sapien
tgatttctcgtgctaagtgagtcct

SEQ ID NO: 4587142 - DNA, 25 bp, Homo sapien
ctgatgaagctaaagacaaattttc

SEQ ID NO: 4587143 - DNA, 25 bp, Homo sapien
aaagacaaattttcttcaggcacag

SEQ ID NO: 4587144 - DNA, 25 bp, Homo sapien
agacaaattttcttcaggcacaggc

SEQ ID NO: 4587145 - DNA, 25 bp, Homo sapien
gaagctaaagacaaattttcttcag

SEQ ID NO: 4587146 - DNA, 25 bp, Homo sapien
tggactccaatcaagacacagacac

SEQ ID NO: 4587147 - DNA, 25 bp, Homo sapien
taaggaggttaggtcctgcaaagct

SEQ ID NO: 4587148 - DNA, 25 bp, Homo sapien
gaagctgtttgatttcgggccttaa

SEQ ID NO: 4587149 - DNA, 25 bp, Homo sapien
tagcatcgtatctagggctatcctg

SEQ ID NO: 4587150 - DNA, 25 bp, Homo sapien
aaaagtagtcagcttgtacaaagga

SEQ ID NO: 4587151 - DNA, 25 bp, Homo sapien
gaaacaagccttgactcaggagcct

SEQ ID NO: 4587152 - DNA, 25 bp, Homo sapien
caggagcctaggactttttctttgg

SEQ ID NO: 4587153 - DNA, 25 bp, Homo sapien
aatgtcatattaagcacctcagtgg

SEQ ID NO: 4587154 - DNA, 25 bp, Homo sapien
taaccgagtactgttctgccacaca

SEQ ID NO: 4587155 - DNA, 25 bp, Homo sapien
tacaggctgccaagctttgatatgc

SEQ ID NO: 4587156 - DNA, 25 bp, Homo sapien
ccacgtttttctcgggctacatgaa

SEQ ID NO: 4587157 - DNA, 25 bp, Homo sapien
caaatgccagcgcttagaaactgtg

SEQ ID NO: 4587158 - DNA, 25 bp, Homo sapien
tagaaagcagtctggcattctagaa

SEQ ID NO: 4587159 - DNA, 25 bp, Homo sapien
ccagcttttatttatcagattggta

SEQ ID NO: 4587160 - DNA, 25 bp, Homo sapien
ttagaaagcgtgcaatgaaatgggc

SEQ ID NO: 4587161 - DNA, 25 bp, Homo sapien
cattctagaaacttgcctaacctct

SEQ ID NO: 4587162 - DNA, 25 bp, Homo sapien
gcaaaactggcctcaatggaactgt

SEQ ID NO: 4587163 - DNA, 25 bp, Homo sapien
tcaggttttgtgtcaagagagggat

SEQ ID NO: 4587164 - DNA, 25 bp, Homo sapien
gagggcccaaggagcttttgtgtat

SEQ ID NO: 4587165 - DNA, 25 bp, Homo sapien
catagaatggcaaaggaatgtttct

SEQ ID NO: 4587166 - DNA, 25 bp, Homo sapien
gcttcctgtaatgcaggactcccca

SEQ ID NO: 4587167 - DNA, 25 bp, Homo sapien
tcactgatagcgtggaggctgcacc

SEQ ID NO: 4587168 - DNA, 25 bp, Homo sapien
tgctgatgagcccactctaggagcc

SEQ ID NO: 4587169 - DNA, 25 bp, Homo sapien
caccatcatctgagagccgggaagg

SEQ ID NO: 4587170 - DNA, 25 bp, Homo sapien
cgtgggaccgtgactatcaccccta

SEQ ID NO: 4587171 - DNA, 25 bp, Homo sapien
gaggacgtgggaccgtgactatcac

SEQ ID NO: 4587172 - DNA, 25 bp, Homo sapien
gaccgtgactatcacccctaatctg

SEQ ID NO: 4587173 - DNA, 25 bp, Homo sapien
tgacagatagaggacgtgggaccgt

SEQ ID NO: 4587174 - DNA, 25 bp, Homo sapien
tgatgctcctcaggggccactgata

SEQ ID NO: 4587175 - DNA, 25 bp, Homo sapien
ctcaggggccactgatagtgattct

SEQ ID NO: 4587176 - DNA, 25 bp, Homo sapien
catggctgatgctcctcaggggcca

SEQ ID NO: 4587177 - DNA, 25 bp, Homo sapien
ctcctcaggggccactgatagtgat

SEQ ID NO: 4587178 - DNA, 25 bp, Homo sapien
ctcgtgcctggcgtgctcagaggac

SEQ ID NO: 4587179 - DNA, 25 bp, Homo sapien
tcgtgcctggcgtgctcagaggacc

SEQ ID NO: 4587180 - DNA, 25 bp, Homo sapien
gtgcctggcgtgctcagaggaccac

SEQ ID NO: 4587181 - DNA, 25 bp, Homo sapien
tgcctggcgtgctcagaggaccacc

SEQ ID NO: 4587182 - DNA, 25 bp, Homo sapien
agtgctcctacagccgcatctgcgg

SEQ ID NO: 4587183 - DNA, 25 bp, Homo sapien
ctcctacagccgcatctgcggttaa

SEQ ID NO: 4587184 - DNA, 25 bp, Homo sapien
tacagccgcatctgcggttaacata

SEQ ID NO: 4587185 - DNA, 25 bp, Homo sapien
cgcatctgcggttaacatagcatcc

SEQ ID NO: 4587186 - DNA, 25 bp, Homo sapien
ctcagacctgaagtaggcgcccccg

SEQ ID NO: 4587187 - DNA, 25 bp, Homo sapien
cagacctgaagtaggcgcccccggg

SEQ ID NO: 4587188 - DNA, 25 bp, Homo sapien
tcagacctgaagtaggcgcccccgg

SEQ ID NO: 4587189 - DNA, 25 bp, Homo sapien
ctgtgttcgtcagggatgctctgac

SEQ ID NO: 4587190 - DNA, 25 bp, Homo sapien
gtgttcgtcagggatgctctgacaa

SEQ ID NO: 4587191 - DNA, 25 bp, Homo sapien
tgtgttcgtcagggatgctctgaca

SEQ ID NO: 4587192 - DNA, 25 bp, Homo sapien
gcatggtgacagtggtcctgttgat

SEQ ID NO: 4587193 - DNA, 25 bp, Homo sapien
agcatctcgtcatgctgctgtgcct

SEQ ID NO: 4587194 - DNA, 25 bp, Homo sapien
gacagtggtcctgttgatgtcaccg

SEQ ID NO: 4587195 - DNA, 25 bp, Homo sapien
tgcatgtgcagcatctcgtcatgct

SEQ ID NO: 4587196 - DNA, 25 bp, Homo sapien
cgcaccacatggtagagcaggagct

SEQ ID NO: 4587197 - DNA, 25 bp, Homo sapien
tctgcctgagtgaagttcaccaggt

SEQ ID NO: 4587198 - DNA, 25 bp, Homo sapien
gtcctcccctgtgctgtcatgctgg

SEQ ID NO: 4587199 - DNA, 25 bp, Homo sapien
aagagccggcctagctggaggcccc

SEQ ID NO: 4587200 - DNA, 25 bp, Homo sapien
tggctgctgagtggctggacggact

SEQ ID NO: 4587201 - DNA, 25 bp, Homo sapien
tctgaggctctggctgctgagtggc

SEQ ID NO: 4587202 - DNA, 25 bp, Homo sapien
ctctggctgctgagtggctggacgg

SEQ ID NO: 4587203 - DNA, 25 bp, Homo sapien
gctctgaggctctggctgctgagtg

SEQ ID NO: 4587204 - DNA, 25 bp, Homo sapien
catcagcctttgtgatccaggccga

SEQ ID NO: 4587205 - DNA, 25 bp, Homo sapien
ggccatcagcctttgtgatccaggc

SEQ ID NO: 4587206 - DNA, 25 bp, Homo sapien
cagcctttgtgatccaggccgaggc

SEQ ID NO: 4587207 - DNA, 25 bp, Homo sapien
cagaggcaaaaggggccatcagcct

SEQ ID NO: 4587208 - DNA, 25 bp, Homo sapien
tctgggccgtcactcagaagctaag

SEQ ID NO: 4587209 - DNA, 25 bp, Homo sapien
tctggaggaagtatgttcaccgtca

SEQ ID NO: 4587210 - DNA, 25 bp, Homo sapien
ttcaccgtcagagaggccaaagtgg

SEQ ID NO: 4587211 - DNA, 25 bp, Homo sapien
tgccctccagcgagtgaagcacttg

SEQ ID NO: 4587212 - DNA, 25 bp, Homo sapien
ctgtgtgagaacagcacgagcccac

SEQ ID NO: 4587213 - DNA, 25 bp, Homo sapien
cagctgggtctgcttgaagctgcgc

SEQ ID NO: 4587214 - DNA, 25 bp, Homo sapien
gcacgagcccaccatccagctgggt

SEQ ID NO: 4587215 - DNA, 25 bp, Homo sapien
catccagctgggtctgcttgaagct

SEQ ID NO: 4587216 - DNA, 25 bp, Homo sapien
ctgggctgcttaatggtgtacacca

SEQ ID NO: 4587217 - DNA, 25 bp, Homo sapien
ggctgcttaatggtgtacaccaggt

SEQ ID NO: 4587218 - DNA, 25 bp, Homo sapien
gctgggctgcttaatggtgtacacc

SEQ ID NO: 4587219 - DNA, 25 bp, Homo sapien
tgggctgcttaatggtgtacaccag

SEQ ID NO: 4587220 - DNA, 25 bp, Homo sapien
tgggcacggtggccccctcccacat

SEQ ID NO: 4587221 - DNA, 25 bp, Homo sapien
tagggatgggcacggtggccccctc

SEQ ID NO: 4587222 - DNA, 25 bp, Homo sapien
ctgtagggatgggcacggtggcccc

SEQ ID NO: 4587223 - DNA, 25 bp, Homo sapien
gatgggcacggtggccccctcccac

SEQ ID NO: 4587224 - DNA, 25 bp, Homo sapien
caggacaaaaccgtcagtgtcttgc

SEQ ID NO: 4587225 - DNA, 25 bp, Homo sapien
gtgtcttgctcccatcgtgcaggta

SEQ ID NO: 4587226 - DNA, 25 bp, Homo sapien
aaccgtcagtgtcttgctcccatcg

SEQ ID NO: 4587227 - DNA, 25 bp, Homo sapien
caggcctgagtttgtatgaggtcgg

SEQ ID NO: 4587228 - DNA, 25 bp, Homo sapien
ctctctccagcagaaggtgctgagg

SEQ ID NO: 4587229 - DNA, 25 bp, Homo sapien
tgcagggccccatgccggggtggct

SEQ ID NO: 4587230 - DNA, 25 bp, Homo sapien
ggtcctggcttgaggcccatcctcc

SEQ ID NO: 4587231 - DNA, 25 bp, Homo sapien
ctgagggtcctggcttgaggcccat

SEQ ID NO: 4587232 - DNA, 25 bp, Homo sapien
tgcaggccaaggcccgggagagtgg

SEQ ID NO: 4587233 - DNA, 25 bp, Homo sapien
aaggcccgggagagtggggaagcag

SEQ ID NO: 4587234 - DNA, 25 bp, Homo sapien
ctgcaggccaaggcccgggagagtg

SEQ ID NO: 4587235 - DNA, 25 bp, Homo sapien
gcccgggagagtggggaagcaggac

SEQ ID NO: 4587236 - DNA, 25 bp, Homo sapien
cagctgcgactgtgccccctctact

SEQ ID NO: 4587237 - DNA, 25 bp, Homo sapien
agctgcgactgtgccccctctactg

SEQ ID NO: 4587238 - DNA, 25 bp, Homo sapien
gcagctgcgactgtgccccctctac

SEQ ID NO: 4587239 - DNA, 25 bp, Homo sapien
gggtgcagctgcgactgtgccccct

SEQ ID NO: 4587240 - DNA, 25 bp, Homo sapien
ctccagctccacgtgacgtcctcaa

SEQ ID NO: 4587241 - DNA, 25 bp, Homo sapien
gcgagaaggcatgcctcagggcggg

SEQ ID NO: 4587242 - DNA, 25 bp, Homo sapien
cagcgagaaggcatgcctcagggcg

SEQ ID NO: 4587243 - DNA, 25 bp, Homo sapien
agcgagaaggcatgcctcagggcgg

SEQ ID NO: 4587244 - DNA, 25 bp, Homo sapien
agatgcagaccagaagggtctccga

SEQ ID NO: 4587245 - DNA, 25 bp, Homo sapien
gatgcagaccagaagggtctccgaa

SEQ ID NO: 4587246 - DNA, 25 bp, Homo sapien
tgcagaccagaagggtctccgaaat

SEQ ID NO: 4587247 - DNA, 25 bp, Homo sapien
cagatgcagaccagaagggtctccg

SEQ ID NO: 4587248 - DNA, 25 bp, Homo sapien
gggtgagcagaagcccttgacagac

SEQ ID NO: 4587249 - DNA, 25 bp, Homo sapien
ctgggtgagcagaagcccttgacag

SEQ ID NO: 4587250 - DNA, 25 bp, Homo sapien
tgggtgagcagaagcccttgacaga

SEQ ID NO: 4587251 - DNA, 25 bp, Homo sapien
tgtggggttcctgggtgagcagaag

SEQ ID NO: 4587252 - DNA, 25 bp, Homo sapien
ggtagtgggcctcatccctactgca

SEQ ID NO: 4587253 - DNA, 25 bp, Homo sapien
gtagtgggcctcatccctactgcag

SEQ ID NO: 4587254 - DNA, 25 bp, Homo sapien
ggcctccttgaggaaccatgaggcc

SEQ ID NO: 4587255 - DNA, 25 bp, Homo sapien
cctccttgaggaaccatgaggccgg

SEQ ID NO: 4587256 - DNA, 25 bp, Homo sapien
ctgcagcgggatccagccgtggtca

SEQ ID NO: 4587257 - DNA, 25 bp, Homo sapien
ggactcgcctcttcctgaggcccct

SEQ ID NO: 4587258 - DNA, 25 bp, Homo sapien
aggactcgcctcttcctgaggcccc

SEQ ID NO: 4587259 - DNA, 25 bp, Homo sapien
gactcgcctcttcctgaggcccctc

SEQ ID NO: 4587260 - DNA, 25 bp, Homo sapien
ggctgcatgggctcatccgtggcca

SEQ ID NO: 4587261 - DNA, 25 bp, Homo sapien
tgggctcatccgtggccatgatact

SEQ ID NO: 4587262 - DNA, 25 bp, Homo sapien
gcatgggctcatccgtggccatgat

SEQ ID NO: 4587263 - DNA, 25 bp, Homo sapien
catccgtggccatgatactgccaga

SEQ ID NO: 4587264 - DNA, 25 bp, Homo sapien
tgttgtctgtagtcagcagccgcca

SEQ ID NO: 4587265 - DNA, 25 bp, Homo sapien
attgctgaaggccatgttgtctgta

SEQ ID NO: 4587266 - DNA, 25 bp, Homo sapien
agcaaagcccgaatcagcattgctg

SEQ ID NO: 4587267 - DNA, 25 bp, Homo sapien
gctgggcctcagcaaagcccgaatc

SEQ ID NO: 4587268 - DNA, 25 bp, Homo sapien
taccccaggccacgtggaagacgca

SEQ ID NO: 4587269 - DNA, 25 bp, Homo sapien
ggccacgtggaagacgcagctgatg

SEQ ID NO: 4587270 - DNA, 25 bp, Homo sapien
ccacgtggaagacgcagctgatggt

SEQ ID NO: 4587271 - DNA, 25 bp, Homo sapien
caggccacgtggaagacgcagctga

SEQ ID NO: 4587272 - DNA, 25 bp, Homo sapien
cgtggtcattcacaggctggatggc

SEQ ID NO: 4587273 - DNA, 25 bp, Homo sapien
ctgcataggggcgtggtcattcaca

SEQ ID NO: 4587274 - DNA, 25 bp, Homo sapien
gtggtcattcacaggctggatggcc

SEQ ID NO: 4587275 - DNA, 25 bp, Homo sapien
ataggggcgtggtcattcacaggct

SEQ ID NO: 4587276 - DNA, 25 bp, Homo sapien
agctggccatgcatcaggtctccat

SEQ ID NO: 4587277 - DNA, 25 bp, Homo sapien
tgcatcaggtctccattggtgaagg

SEQ ID NO: 4587278 - DNA, 25 bp, Homo sapien
tggccatgcatcaggtctccattgg

SEQ ID NO: 4587279 - DNA, 25 bp, Homo sapien
catgcatcaggtctccattggtgaa

SEQ ID NO: 4587280 - DNA, 25 bp, Homo sapien
aagtcaacctcccatggcggggctg

SEQ ID NO: 4587281 - DNA, 25 bp, Homo sapien
ccaagtcaacctcccatggcggggc

SEQ ID NO: 4587282 - DNA, 25 bp, Homo sapien
tcccatggcggggctgctccatgac

SEQ ID NO: 4587283 - DNA, 25 bp, Homo sapien
cctcccatggcggggctgctccatg

SEQ ID NO: 4587284 - DNA, 25 bp, Homo sapien
tgttgagactcttgatgaagagctg

SEQ ID NO: 4587285 - DNA, 25 bp, Homo sapien
gcactgttgagactcttgatgaaga

SEQ ID NO: 4587286 - DNA, 25 bp, Homo sapien
tggtcagcagagaggacacacccac

SEQ ID NO: 4587287 - DNA, 25 bp, Homo sapien
ctggcactgttgagactcttgatga

SEQ ID NO: 4587288 - DNA, 25 bp, Homo sapien
aacagaaggtgtcctccactgccac

SEQ ID NO: 4587289 - DNA, 25 bp, Homo sapien
agaaggtgtcctccactgccactga

SEQ ID NO: 4587290 - DNA, 25 bp, Homo sapien
tgttctgagtgtgcagtggctccag

SEQ ID NO: 4587291 - DNA, 25 bp, Homo sapien
ctgagtgtgcagtggctccagctgc

SEQ ID NO: 4587292 - DNA, 25 bp, Homo sapien
aaccacctcacagtggaaggttggg

SEQ ID NO: 4587293 - DNA, 25 bp, Homo sapien
ctgaaccacctcacagtggaaggtt

SEQ ID NO: 4587294 - DNA, 25 bp, Homo sapien
gtggatttgtatggccagctggaca

SEQ ID NO: 4587295 - DNA, 25 bp, Homo sapien
ccggaatgtcaagtcctgtgtaggg

SEQ ID NO: 4587296 - DNA, 25 bp, Homo sapien
ggaatgtcaagtcctgtgtagggcc

SEQ ID NO: 4587297 - DNA, 25 bp, Homo sapien
tcctcggtgtagtgctgtgggtcag

SEQ ID NO: 4587298 - DNA, 25 bp, Homo sapien
gcagttcaccacgtccaggagggtg

SEQ ID NO: 4587299 - DNA, 25 bp, Homo sapien
cttgcagttcaccacgtccaggagg

SEQ ID NO: 4587300 - DNA, 25 bp, Homo sapien
tcaccacgtccaggagggtgaacat

SEQ ID NO: 4587301 - DNA, 25 bp, Homo sapien
ttcaccacgtccaggagggtgaaca

SEQ ID NO: 4587302 - DNA, 25 bp, Homo sapien
tgtgccaccctcggtcaccaccact

SEQ ID NO: 4587303 - DNA, 25 bp, Homo sapien
gtgccaccctcggtcaccaccactg

SEQ ID NO: 4587304 - DNA, 25 bp, Homo sapien
ctgtgccaccctcggtcaccaccac

SEQ ID NO: 4587305 - DNA, 25 bp, Homo sapien
agccaccatgttgtgcgtcagcaag

SEQ ID NO: 4587306 - DNA, 25 bp, Homo sapien
cagctccccaagaaggagactgtca

SEQ ID NO: 4587307 - DNA, 25 bp, Homo sapien
agctccccaagaaggagactgtcac

SEQ ID NO: 4587308 - DNA, 25 bp, Homo sapien
ctgaggactcctcagttcgtgtggg

SEQ ID NO: 4587309 - DNA, 25 bp, Homo sapien
ctcctcagttcgtgtggggtactgg

SEQ ID NO: 4587310 - DNA, 25 bp, Homo sapien
gactcctcagttcgtgtggggtact

SEQ ID NO: 4587311 - DNA, 25 bp, Homo sapien
agctgaggactcctcagttcgtgtg

SEQ ID NO: 4587312 - DNA, 25 bp, Homo sapien
gggctgtgcgtcagtcacaggcaca

SEQ ID NO: 4587313 - DNA, 25 bp, Homo sapien
ggctgtgcgtcagtcacaggcacac

SEQ ID NO: 4587314 - DNA, 25 bp, Homo sapien
gctgtgcgtcagtcacaggcacact

SEQ ID NO: 4587315 - DNA, 25 bp, Homo sapien
tggggctgtgcgtcagtcacaggca

SEQ ID NO: 4587316 - DNA, 25 bp, Homo sapien
tgcatggaggcaacccctcagggga

SEQ ID NO: 4587317 - DNA, 25 bp, Homo sapien
gcatggaggcaacccctcaggggat

SEQ ID NO: 4587318 - DNA, 25 bp, Homo sapien
ctgcatggaggcaacccctcagggg

SEQ ID NO: 4587319 - DNA, 25 bp, Homo sapien
atggaggcaacccctcaggggatgg

SEQ ID NO: 4587320 - DNA, 25 bp, Homo sapien
tcccctcaggtagggcaggccaagt

SEQ ID NO: 4587321 - DNA, 25 bp, Homo sapien
ggcaggccaagtctcccagtgctcc

SEQ ID NO: 4587322 - DNA, 25 bp, Homo sapien
agtctcccagtgctcccaacaaaga

SEQ ID NO: 4587323 - DNA, 25 bp, Homo sapien
tcccaacaaagagcccatagggact

SEQ ID NO: 4587324 - DNA, 25 bp, Homo sapien
ggcattcagaaacccattgactgac

SEQ ID NO: 4587325 - DNA, 25 bp, Homo sapien
gaggaggcattcagaaacccattga

SEQ ID NO: 4587326 - DNA, 25 bp, Homo sapien
ggaggcattcagaaacccattgact

SEQ ID NO: 4587327 - DNA, 25 bp, Homo sapien
gaggcattcagaaacccattgactg

SEQ ID NO: 4587328 - DNA, 25 bp, Homo sapien
gtgggggacggagccactcagtaga

SEQ ID NO: 4587329 - DNA, 25 bp, Homo sapien
cggagccactcagtagaatttctgc

SEQ ID NO: 4587330 - DNA, 25 bp, Homo sapien
ggggacggagccactcagtagaatt

SEQ ID NO: 4587331 - DNA, 25 bp, Homo sapien
gacggagccactcagtagaatttct

SEQ ID NO: 4587332 - DNA, 25 bp, Homo sapien
ctggtatggggtaagactcaagtag

SEQ ID NO: 4587333 - DNA, 25 bp, Homo sapien
gggtaagactcaagtaggagccaca

SEQ ID NO: 4587334 - DNA, 25 bp, Homo sapien
actcaagtaggagccacaagactcc

SEQ ID NO: 4587335 - DNA, 25 bp, Homo sapien
caggagggggtctcgccgaggagga

SEQ ID NO: 4587336 - DNA, 25 bp, Homo sapien
ccaggagaaggagggcttcgggttg

SEQ ID NO: 4587337 - DNA, 25 bp, Homo sapien
gggcttcgggttgggacatggagaa

SEQ ID NO: 4587338 - DNA, 25 bp, Homo sapien
caggtgtccagagtagagctgcagc

SEQ ID NO: 4587339 - DNA, 25 bp, Homo sapien
aaggagggcttcgggttgggacatg

SEQ ID NO: 4587340 - DNA, 25 bp, Homo sapien
atggccacagtcacctccgggtggt

SEQ ID NO: 4587341 - DNA, 25 bp, Homo sapien
tgcagctgcaggtctatgtcagtca

SEQ ID NO: 4587342 - DNA, 25 bp, Homo sapien
cagctgcaggtctatgtcagtcaga

SEQ ID NO: 4587343 - DNA, 25 bp, Homo sapien
gagccatggccacagtcacctccgg

SEQ ID NO: 4587344 - DNA, 25 bp, Homo sapien
tctgaggggctgcagttgcaagaac

SEQ ID NO: 4587345 - DNA, 25 bp, Homo sapien
ctcctgatctcctttttctgcccct

SEQ ID NO: 4587346 - DNA, 25 bp, Homo sapien
tctgcccctcttacactctctgagg

SEQ ID NO: 4587347 - DNA, 25 bp, Homo sapien
gcagttgcaagaacccagaatctct

SEQ ID NO: 4587348 - DNA, 25 bp, Homo sapien
ttggctcatcagagtccacagacca

SEQ ID NO: 4587349 - DNA, 25 bp, Homo sapien
cagaccatatcggtgaagaagatga

SEQ ID NO: 4587350 - DNA, 25 bp, Homo sapien
cgaactgttgtccttagtatcttct

SEQ ID NO: 4587351 - DNA, 25 bp, Homo sapien
gaactgttgtccttagtatcttcta

SEQ ID NO: 4587352 - DNA, 25 bp, Homo sapien
gtattcaaagacagcaattgtagct

SEQ ID NO: 4587353 - DNA, 25 bp, Homo sapien
tattcaaagacagcaattgtagcta

SEQ ID NO: 4587354 - DNA, 25 bp, Homo sapien
catccagggtacaatgcgcctttcc

SEQ ID NO: 4587355 - DNA, 25 bp, Homo sapien
gcatccagggtacaatgcgcctttc

SEQ ID NO: 4587356 - DNA, 25 bp, Homo sapien
cacgattggctgaacatgcgggaac

SEQ ID NO: 4587357 - DNA, 25 bp, Homo sapien
aacacgattggctgaacatgcggga

SEQ ID NO: 4587358 - DNA, 25 bp, Homo sapien
aaacacgattggctgaacatgcggg

SEQ ID NO: 4587359 - DNA, 25 bp, Homo sapien
gattggctgaacatgcgggaacaag

SEQ ID NO: 4587360 - DNA, 25 bp, Homo sapien
cggtccaggggagcaggctagctga

SEQ ID NO: 4587361 - DNA, 25 bp, Homo sapien
agcaggctagctgactgagggcgat

SEQ ID NO: 4587362 - DNA, 25 bp, Homo sapien
aggctagctgactgagggcgatcat

SEQ ID NO: 4587363 - DNA, 25 bp, Homo sapien
tccaggggagcaggctagctgactg

SEQ ID NO: 4587364 - DNA, 25 bp, Homo sapien
gaaggtgagcccgtcgggagccgct

SEQ ID NO: 4587365 - DNA, 25 bp, Homo sapien
gtcacggccgcaaccacccgcggga

SEQ ID NO: 4587366 - DNA, 25 bp, Homo sapien
ggagccgctgtcacggccgcaacca

SEQ ID NO: 4587367 - DNA, 25 bp, Homo sapien
caaccacccgcgggacctctcggcg

SEQ ID NO: 4587368 - DNA, 25 bp, Homo sapien
caggagtccagagcatgcgcgcgct

SEQ ID NO: 4587369 - DNA, 25 bp, Homo sapien
ctcctcgccttgacccagcactgct

SEQ ID NO: 4587370 - DNA, 25 bp, Homo sapien
gcgcttccggctgccccctcctcgc

SEQ ID NO: 4587371 - DNA, 25 bp, Homo sapien
agtccagagcatgcgcgcgcttccg

SEQ ID NO: 4587372 - DNA, 25 bp, Homo sapien
ctgaggtaggcatacatggtgagga

SEQ ID NO: 4587373 - DNA, 25 bp, Homo sapien
aggtaggcatacatggtgaggaact

SEQ ID NO: 4587374 - DNA, 25 bp, Homo sapien
gcatgactgaggtaggcatacatgg

SEQ ID NO: 4587375 - DNA, 25 bp, Homo sapien
tgactgaggtaggcatacatggtga

SEQ ID NO: 4587376 - DNA, 25 bp, Homo sapien
aggcttctcaaccagttggctgtca

SEQ ID NO: 4587377 - DNA, 25 bp, Homo sapien
tgggcactggtatctgtcttccctg

SEQ ID NO: 4587378 - DNA, 25 bp, Homo sapien
ttctcaaccagttggctgtcagggc

SEQ ID NO: 4587379 - DNA, 25 bp, Homo sapien
agagtgtactccgtaggcgccatgg

SEQ ID NO: 4587380 - DNA, 25 bp, Homo sapien
tttagtccattttaagccataaata

SEQ ID NO: 4587381 - DNA, 25 bp, Homo sapien
caagaacaggacctttagtccattt

SEQ ID NO: 4587382 - DNA, 25 bp, Homo sapien
tcaaagaatgcaaaagcggcaagtt

SEQ ID NO: 4587383 - DNA, 25 bp, Homo sapien
gacctttagtccattttaagccata

SEQ ID NO: 4587384 - DNA, 25 bp, Homo sapien
aaaatccatcttctagcctcaaata

SEQ ID NO: 4587385 - DNA, 25 bp, Homo sapien
taaaatccatcttctagcctcaaat

SEQ ID NO: 4587386 - DNA, 25 bp, Homo sapien
tccccaaaatgttattactcccatc

SEQ ID NO: 4587387 - DNA, 25 bp, Homo sapien
ctcccatccccaatacacagaaaaa

SEQ ID NO: 4587388 - DNA, 25 bp, Homo sapien
ccatccccaatacacagaaaaaggg

SEQ ID NO: 4587389 - DNA, 25 bp, Homo sapien
ctccccaaaatgttattactcccat

SEQ ID NO: 4587390 - DNA, 25 bp, Homo sapien
atgaatatacaggctgtactaacat

SEQ ID NO: 4587391 - DNA, 25 bp, Homo sapien
gaatatacaggctgtactaacatta

SEQ ID NO: 4587392 - DNA, 25 bp, Homo sapien
atatacaggctgtactaacattaaa

SEQ ID NO: 4587393 - DNA, 25 bp, Homo sapien
gtgtgcatacagtgggtctttgtgt

SEQ ID NO: 4587394 - DNA, 25 bp, Homo sapien
ctgttctccgcagcccgaaaagaat

SEQ ID NO: 4587395 - DNA, 25 bp, Homo sapien
gaaaagaatggcatgcagcctcttc

SEQ ID NO: 4587396 - DNA, 25 bp, Homo sapien
acataagtggctctaacattcaaat

SEQ ID NO: 4587397 - DNA, 25 bp, Homo sapien
ttcttgacccgctcttagatgatgg

SEQ ID NO: 4587398 - DNA, 25 bp, Homo sapien
ttgtccgcacatccaagctccttgt

SEQ ID NO: 4587399 - DNA, 25 bp, Homo sapien
tccccaggctgcagctgcctgtggc

SEQ ID NO: 4587400 - DNA, 25 bp, Homo sapien
cccaggctgcagctgcctgtggcct

SEQ ID NO: 4587401 - DNA, 25 bp, Homo sapien
gctgcagctgcctgtggcctggcac

SEQ ID NO: 4587402 - DNA, 25 bp, Homo sapien
tgtccccaggctgcagctgcctgtg

SEQ ID NO: 4587403 - DNA, 25 bp, Homo sapien
cccacatcttcttggatgggtcgga

SEQ ID NO: 4587404 - DNA, 25 bp, Homo sapien
ctcccacatcttcttggatgggtcg

SEQ ID NO: 4587405 - DNA, 25 bp, Homo sapien
catcttcttggatgggtcggaggtt

SEQ ID NO: 4587406 - DNA, 25 bp, Homo sapien
cacatcttcttggatgggtcggagg

SEQ ID NO: 4587407 - DNA, 25 bp, Homo sapien
ccgacttctccagctcctttacttg

SEQ ID NO: 4587408 - DNA, 25 bp, Homo sapien
aactgcagtgtgctcttgttctcgt

SEQ ID NO: 4587409 - DNA, 25 bp, Homo sapien
ctgcagtgtgctcttgttctcgttg

SEQ ID NO: 4587410 - DNA, 25 bp, Homo sapien
gcagtgtgctcttgttctcgttgtt

SEQ ID NO: 4587411 - DNA, 25 bp, Homo sapien
ctcggcccgctgctcgtacagggct

SEQ ID NO: 4587412 - DNA, 25 bp, Homo sapien
cgctgctcgtacagggcttcccacc

SEQ ID NO: 4587413 - DNA, 25 bp, Homo sapien
gcccgctgctcgtacagggcttccc

SEQ ID NO: 4587414 - DNA, 25 bp, Homo sapien
tcggcccgctgctcgtacagggctt

SEQ ID NO: 4587415 - DNA, 25 bp, Homo sapien
tcctcccaagcttctgtaccagatg

SEQ ID NO: 4587416 - DNA, 25 bp, Homo sapien
gcggagcttgaatccagggccactg

SEQ ID NO: 4587417 - DNA, 25 bp, Homo sapien
gaattgatgttttcagtgagttgac

SEQ ID NO: 4587418 - DNA, 25 bp, Homo sapien
tattgcggagcttgaatccagggcc

SEQ ID NO: 4587419 - DNA, 25 bp, Homo sapien
attgatgttttcagtgagttgactg

SEQ ID NO: 4587420 - DNA, 25 bp, Homo sapien
ggtagtagaggatgcacggccctcc

SEQ ID NO: 4587421 - DNA, 25 bp, Homo sapien
atgcacggccctccccgtagacacc

SEQ ID NO: 4587422 - DNA, 25 bp, Homo sapien
aggatgcacggccctccccgtagac

SEQ ID NO: 4587423 - DNA, 25 bp, Homo sapien
ctccagatcctgcagggtagtagag

SEQ ID NO: 4587424 - DNA, 25 bp, Homo sapien
agggctactgccattgactttcttt

SEQ ID NO: 4587425 - DNA, 25 bp, Homo sapien
ggctcttcctctgccaatatgcttt

SEQ ID NO: 4587426 - DNA, 25 bp, Homo sapien
ctgtgtcagggctactgccattgac

SEQ ID NO: 4587427 - DNA, 25 bp, Homo sapien
tgttagctcctgctggaatgccagg

SEQ ID NO: 4587428 - DNA, 25 bp, Homo sapien
tggctgcggccaatttcccctgttg

SEQ ID NO: 4587429 - DNA, 25 bp, Homo sapien
cttggctgcggccaatttcccctgt

SEQ ID NO: 4587430 - DNA, 25 bp, Homo sapien
gctgcggccaatttcccctgttgtg

SEQ ID NO: 4587431 - DNA, 25 bp, Homo sapien
tgcggccaatttcccctgttgtgtt

SEQ ID NO: 4587432 - DNA, 25 bp, Homo sapien
agaaggatcttcacaatgtaagact

SEQ ID NO: 4587433 - DNA, 25 bp, Homo sapien
gatcttcacaatgtaagactcaggc

SEQ ID NO: 4587434 - DNA, 25 bp, Homo sapien
aggatcttcacaatgtaagactcag

SEQ ID NO: 4587435 - DNA, 25 bp, Homo sapien
ttagagaaggatcttcacaatgtaa

SEQ ID NO: 4587436 - DNA, 25 bp, Homo sapien
gtttctcaaagcaatccgatgattt

SEQ ID NO: 4587437 - DNA, 25 bp, Homo sapien
caatccgatgatttctgaggtcctt

SEQ ID NO: 4587438 - DNA, 25 bp, Homo sapien
tcctcggccgccgttggtacacgga

SEQ ID NO: 4587439 - DNA, 25 bp, Homo sapien
cgttggtacacggaccacattttgt

SEQ ID NO: 4587440 - DNA, 25 bp, Homo sapien
tctgccgtgcaatcccagctcgcag

SEQ ID NO: 4587441 - DNA, 25 bp, Homo sapien
cgtgcaatcccagctcgcagccctt

SEQ ID NO: 4587442 - DNA, 25 bp, Homo sapien
tggagcgggatgggcagctctgccg

SEQ ID NO: 4587443 - DNA, 25 bp, Homo sapien
gcagctctgccgtgcaatcccagct

SEQ ID NO: 4587444 - DNA, 25 bp, Homo sapien
tgtagccggtgcgcggggtggctgg

SEQ ID NO: 4587445 - DNA, 25 bp, Homo sapien
gggaggactcgcagacgttactgcc

SEQ ID NO: 4587446 - DNA, 25 bp, Homo sapien
ttgtagccggtgcgcggggtggctg

SEQ ID NO: 4587447 - DNA, 25 bp, Homo sapien
tggtgggccttgtgttataaaacca

SEQ ID NO: 4587448 - DNA, 25 bp, Homo sapien
tggagaagcgttcctgggcttttct

SEQ ID NO: 4587449 - DNA, 25 bp, Homo sapien
gagtgatttctcgtgctaagtgagt

SEQ ID NO: 4587450 - DNA, 25 bp, Homo sapien
tgatttctcgtgctaagtgagtcct

SEQ ID NO: 4587451 - DNA, 25 bp, Homo sapien
ctgatgaagctaaagacaaattttc

SEQ ID NO: 4587452 - DNA, 25 bp, Homo sapien
agacaaattttcttcaggcacaggc

SEQ ID NO: 4587453 - DNA, 25 bp, Homo sapien
aaagacaaattttcttcaggcacag

SEQ ID NO: 4587454 - DNA, 25 bp, Homo sapien
gaagctaaagacaaattttcttcag

SEQ ID NO: 4587455 - DNA, 25 bp, Homo sapien
tctggagccttctggggtcattact

SEQ ID NO: 4587456 - DNA, 25 bp, Homo sapien
taggtcttaagtgtcatctggcatc

SEQ ID NO: 4587457 - DNA, 25 bp, Homo sapien
gtaggtcttaagtgtcatctggcat

SEQ ID NO: 4587458 - DNA, 25 bp, Homo sapien
agtaggtcttaagtgtcatctggca

SEQ ID NO: 4587459 - DNA, 25 bp, Homo sapien
ggtcttaagtgtcatctggcatctt

SEQ ID NO: 4587460 - DNA, 25 bp, Homo sapien
tcgacagtctgattgctgagaatag

SEQ ID NO: 4587461 - DNA, 25 bp, Homo sapien
gactacaaatagtccgaacggtagc

SEQ ID NO: 4587462 - DNA, 25 bp, Homo sapien
cattctcctggataacaacgttgat

SEQ ID NO: 4587463 - DNA, 25 bp, Homo sapien
aagaaggctgagttctacattgatg

SEQ ID NO: 4587464 - DNA, 25 bp, Homo sapien
tgaaccttctagcaggcagttttgc

SEQ ID NO: 4587465 - DNA, 25 bp, Homo sapien
gataatgccaactcagaacctagga

SEQ ID NO: 4587466 - DNA, 25 bp, Homo sapien
gaagatcgtgctgaaagataatgcc

SEQ ID NO: 4587467 - DNA, 25 bp, Homo sapien
gaaagtgtgaaggtaacgcgtccca

SEQ ID NO: 4587468 - DNA, 25 bp, Homo sapien
tccattggtgccctggttacgccac

SEQ ID NO: 4587469 - DNA, 25 bp, Homo sapien
tccgatgacaagaccggtgccagag

SEQ ID NO: 4587470 - DNA, 25 bp, Homo sapien
cttatgatgctacaggtccctctgg

SEQ ID NO: 4587471 - DNA, 25 bp, Homo sapien
ggtatttcgctgatgtggccccaac

SEQ ID NO: 4587472 - DNA, 25 bp, Homo sapien
caagaatgagcgctgtactacggta

SEQ ID NO: 4587473 - DNA, 25 bp, Homo sapien
tacatgtcccagtacacaaaagggc

SEQ ID NO: 4587474 - DNA, 25 bp, Homo sapien
tcttgctggtttgggataggctgcc

SEQ ID NO: 4587475 - DNA, 25 bp, Homo sapien
gatcgaatcctaatcacagtgagct

SEQ ID NO: 4587476 - DNA, 25 bp, Homo sapien
taaagagaatggaaatcctatgaca

SEQ ID NO: 4587477 - DNA, 25 bp, Homo sapien
gagaatggaaatcctatgacaataa

SEQ ID NO: 4587478 - DNA, 25 bp, Homo sapien
aaagctaaagagaatggaaatccta

SEQ ID NO: 4587479 - DNA, 25 bp, Homo sapien
ttgcagtacctcattcagccaagta

SEQ ID NO: 4587480 - DNA, 25 bp, Homo sapien
cgggacagtggagttaactgtagac

SEQ ID NO: 4587481 - DNA, 25 bp, Homo sapien
ccttcccccgtgtacatactgtagc

SEQ ID NO: 4587482 - DNA, 25 bp, Homo sapien
ggttgcagctggcatatgaggaaga

SEQ ID NO: 4587483 - DNA, 25 bp, Homo sapien
cagctgaggcgggacagtggagtta

SEQ ID NO: 4587484 - DNA, 25 bp, Homo sapien
agcagtagtgcttcagcaggggcca

SEQ ID NO: 4587485 - DNA, 25 bp, Homo sapien
ttcagtcgcacgctagcagctatca

SEQ ID NO: 4587486 - DNA, 25 bp, Homo sapien
gctggccagcagtagtgcttcagca

SEQ ID NO: 4587487 - DNA, 25 bp, Homo sapien
cagtcgcacgctagcagctatcatg

SEQ ID NO: 4587488 - DNA, 25 bp, Homo sapien
cagtgagacttgtacctaccatggc

SEQ ID NO: 4587489 - DNA, 25 bp, Homo sapien
gagcaaagtgagacaaccagcagca

SEQ ID NO: 4587490 - DNA, 25 bp, Homo sapien
gggcgggcagaccattcatgcagca

SEQ ID NO: 4587491 - DNA, 25 bp, Homo sapien
gaaagacagcatcaaatcacatggc

SEQ ID NO: 4587492 - DNA, 25 bp, Homo sapien
ctcccgccagaggtgagagtaaaat

SEQ ID NO: 4587493 - DNA, 25 bp, Homo sapien
ccctcccgccagaggtgagagtaaa

SEQ ID NO: 4587494 - DNA, 25 bp, Homo sapien
cctcccgccagaggtgagagtaaaa

SEQ ID NO: 4587495 - DNA, 25 bp, Homo sapien
cggtgactgagttctcctgctggga

SEQ ID NO: 4587496 - DNA, 25 bp, Homo sapien
ttcctagtgaccatccagagagcca

SEQ ID NO: 4587497 - DNA, 25 bp, Homo sapien
gacattccgggtcagcaatggactg

SEQ ID NO: 4587498 - DNA, 25 bp, Homo sapien
agtggtgggtcacacaggcgttcca

SEQ ID NO: 4587499 - DNA, 25 bp, Homo sapien
gacagggagtcacatttcagaaaga

SEQ ID NO: 4587500 - DNA, 25 bp, Homo sapien
gaggcatgccttctcgctggatgtg

SEQ ID NO: 4587501 - DNA, 25 bp, Homo sapien
aggatgggcctcaagccaggaccct

SEQ ID NO: 4587502 - DNA, 25 bp, Homo sapien
tcagaaagacctatgctttagatgc

SEQ ID NO: 4587503 - DNA, 25 bp, Homo sapien
gcaggcacagcagcatgacgagatg

SEQ ID NO: 4587504 - DNA, 25 bp, Homo sapien
gaagcccgtgtgaaaagccatactc

SEQ ID NO: 4587505 - DNA, 25 bp, Homo sapien
gataagtcttaagtcccctcccaga

SEQ ID NO: 4587506 - DNA, 25 bp, Homo sapien
cagtcgaagcggtatagaagcccgt

SEQ ID NO: 4587507 - DNA, 25 bp, Homo sapien
accacaggagcagaggcgagtctgt

SEQ ID NO: 4587508 - DNA, 25 bp, Homo sapien
cacaggagcagaggcgagtctgtga

SEQ ID NO: 4587509 - DNA, 25 bp, Homo sapien
ggaccacaggagcagaggcgagtct

SEQ ID NO: 4587510 - DNA, 25 bp, Homo sapien
ctggaccacaggagcagaggcgagt

SEQ ID NO: 4587511 - DNA, 25 bp, Homo sapien
cgtgagcgagcacacgagtgtaaag

SEQ ID NO: 4587512 - DNA, 25 bp, Homo sapien
agcacacgagtgtaaagaatggcac

SEQ ID NO: 4587513 - DNA, 25 bp, Homo sapien
gagcgagcacacgagtgtaaagaat

SEQ ID NO: 4587514 - DNA, 25 bp, Homo sapien
gatttccagtgtgccgtctccactg

SEQ ID NO: 4587515 - DNA, 25 bp, Homo sapien
atgtgctgttgaccaagttagaggg

SEQ ID NO: 4587516 - DNA, 25 bp, Homo sapien
ggaccagcgcccatatataaaaatg

SEQ ID NO: 4587517 - DNA, 25 bp, Homo sapien
ggcaagcagcaaagtattgggcaag

SEQ ID NO: 4587518 - DNA, 25 bp, Homo sapien
tattgggcaagatcactggactggg

SEQ ID NO: 4587519 - DNA, 25 bp, Homo sapien
aacctttggcaaatcatgaccctgc

SEQ ID NO: 4587520 - DNA, 25 bp, Homo sapien
cacgaaacctttggcaaatcatgac

SEQ ID NO: 4587521 - DNA, 25 bp, Homo sapien
acacacgaaacctttggcaaatcat

SEQ ID NO: 4587522 - DNA, 25 bp, Homo sapien
tggcaaatcatgaccctgccttggg

SEQ ID NO: 4587523 - DNA, 25 bp, Homo sapien
gagataggcatacgttgtgaggaac

SEQ ID NO: 4587524 - DNA, 25 bp, Homo sapien
gcttcaatgcagtccggggcatgac

SEQ ID NO: 4587525 - DNA, 25 bp, Homo sapien
ctggcttcaatgcagtccggggcat

SEQ ID NO: 4587526 - DNA, 25 bp, Homo sapien
taggcatacgttgtgaggaactgga

SEQ ID NO: 4587527 - DNA, 25 bp, Homo sapien
cctctgtgtgcgggtgagcatctgt

SEQ ID NO: 4587528 - DNA, 25 bp, Homo sapien
tgcccacgcatgtgcttcagtgtgc

SEQ ID NO: 4587529 - DNA, 25 bp, Homo sapien
aatgacagccggacattagtgagca

SEQ ID NO: 4587530 - DNA, 25 bp, Homo sapien
ccatggaaggctcttaggtggagaa

SEQ ID NO: 4587531 - DNA, 25 bp, Homo sapien
caaatccactgcagattaggggtga

SEQ ID NO: 4587532 - DNA, 25 bp, Homo sapien
gccaaatccactgcagattaggggt

SEQ ID NO: 4587533 - DNA, 25 bp, Homo sapien
cactgcagattaggggtgatagtca

SEQ ID NO: 4587534 - DNA, 25 bp, Homo sapien
tccactgcagattaggggtgatagt

SEQ ID NO: 4587535 - DNA, 25 bp, Homo sapien
accctgctcgtcagcacacccaagc

SEQ ID NO: 4587536 - DNA, 25 bp, Homo sapien
caccctgctcgtcagcacacccaag

SEQ ID NO: 4587537 - DNA, 25 bp, Homo sapien
ccctgctcgtcagcacacccaagct

SEQ ID NO: 4587538 - DNA, 25 bp, Homo sapien
catgcccctccttgtggtctcccac

SEQ ID NO: 4587539 - DNA, 25 bp, Homo sapien
tttgccatgcccctccttgtggtct

SEQ ID NO: 4587540 - DNA, 25 bp, Homo sapien
cttgtggtctcccacaagctgcaac

SEQ ID NO: 4587541 - DNA, 25 bp, Homo sapien
ctccttgtggtctcccacaagctgc

SEQ ID NO: 4587542 - DNA, 25 bp, Homo sapien
agcctgacgatgtcctcctctccca

SEQ ID NO: 4587543 - DNA, 25 bp, Homo sapien
ccccagcggtgccctagcctctcac

SEQ ID NO: 4587544 - DNA, 25 bp, Homo sapien
gggcccctcagacggcctggcagct

SEQ ID NO: 4587545 - DNA, 25 bp, Homo sapien
ctggcagctccccccagcggtgccc

SEQ ID NO: 4587546 - DNA, 25 bp, Homo sapien
atgctggggcccctcagacggcctg

SEQ ID NO: 4587547 - DNA, 25 bp, Homo sapien
gaagctctagtttctctacccgctc

SEQ ID NO: 4587548 - DNA, 25 bp, Homo sapien
gatgaattgaagctctagtttctct

SEQ ID NO: 4587549 - DNA, 25 bp, Homo sapien
cctgagaggtggatgaattgaagct

SEQ ID NO: 4587550 - DNA, 25 bp, Homo sapien
gtctgtcctgagaggtggatgaatt

SEQ ID NO: 4587551 - DNA, 25 bp, Homo sapien
catgtcaggagtcacctgccttgtc

SEQ ID NO: 4587552 - DNA, 25 bp, Homo sapien
ctgcagggcccggtgggtctcccca

SEQ ID NO: 4587553 - DNA, 25 bp, Homo sapien
tgcagggcccggtgggtctccccaa

SEQ ID NO: 4587554 - DNA, 25 bp, Homo sapien
cggtgggtctccccaaacacagact

SEQ ID NO: 4587555 - DNA, 25 bp, Homo sapien
tgggtctccccaaacacagactcac

SEQ ID NO: 4587556 - DNA, 25 bp, Homo sapien
cacaccctttgttcctcctgggcat

SEQ ID NO: 4587557 - DNA, 25 bp, Homo sapien
cctttgttcctcctgggcattggct

SEQ ID NO: 4587558 - DNA, 25 bp, Homo sapien
caccctttgttcctcctgggcattg

SEQ ID NO: 4587559 - DNA, 25 bp, Homo sapien
gctttttctgggacgaggccactgg

SEQ ID NO: 4587560 - DNA, 25 bp, Homo sapien
agtattcttgtaggggtatacacat

SEQ ID NO: 4587561 - DNA, 25 bp, Homo sapien
ttcttgtaggggtatacacataaca

SEQ ID NO: 4587562 - DNA, 25 bp, Homo sapien
gagtattcttgtaggggtatacaca

SEQ ID NO: 4587563 - DNA, 25 bp, Homo sapien
tattcttgtaggggtatacacataa

SEQ ID NO: 4587564 - DNA, 25 bp, Homo sapien
atggcctcccggctctccaggtccc

SEQ ID NO: 4587565 - DNA, 25 bp, Homo sapien
catggcctcccggctctccaggtcc

SEQ ID NO: 4587566 - DNA, 25 bp, Homo sapien
gctcactgtccagatgtcctcctcc

SEQ ID NO: 4587567 - DNA, 25 bp, Homo sapien
actgtccagatgtcctcctccatct

SEQ ID NO: 4587568 - DNA, 25 bp, Homo sapien
gggccgaagcgcctcctgctcactg

SEQ ID NO: 4587569 - DNA, 25 bp, Homo sapien
ctgctcactgtccagatgtcctcct

SEQ ID NO: 4587570 - DNA, 25 bp, Homo sapien
taggcaagccgatgacctgttccca

SEQ ID NO: 4587571 - DNA, 25 bp, Homo sapien
ccatccttaggcaagccgatgacct

SEQ ID NO: 4587572 - DNA, 25 bp, Homo sapien
cttaggcaagccgatgacctgttcc

SEQ ID NO: 4587573 - DNA, 25 bp, Homo sapien
aagccgatgacctgttcccaggagg

SEQ ID NO: 4587574 - DNA, 25 bp, Homo sapien
gaggccagttttgctacctctctcc

SEQ ID NO: 4587575 - DNA, 25 bp, Homo sapien
ggccagttttgctacctctctccca

SEQ ID NO: 4587576 - DNA, 25 bp, Homo sapien
tgaggccagttttgctacctctctc

SEQ ID NO: 4587577 - DNA, 25 bp, Homo sapien
cagttttgctacctctctcccatct

SEQ ID NO: 4587578 - DNA, 25 bp, Homo sapien
ttatgttatccaccttccaacaggg

SEQ ID NO: 4587579 - DNA, 25 bp, Homo sapien
ggaccatcccacgaacgagcttctt

SEQ ID NO: 4587580 - DNA, 25 bp, Homo sapien
tcccgagagccaaaacctataaaga

SEQ ID NO: 4587581 - DNA, 25 bp, Homo sapien
tgctggcctagatttagaagatcct

SEQ ID NO: 4587582 - DNA, 25 bp, Homo sapien
gcgggccgagccgagacagctcctc

SEQ ID NO: 4587583 - DNA, 25 bp, Homo sapien
ccccgcgggccgagccgagacagct

SEQ ID NO: 4587584 - DNA, 25 bp, Homo sapien
ccgcgggccgagccgagacagctcc

SEQ ID NO: 4587585 - DNA, 25 bp, Homo sapien
gggccgagccgagacagctcctcac

SEQ ID NO: 4587586 - DNA, 25 bp, Homo sapien
tgggcacggcggtctcggccgagcc

SEQ ID NO: 4587587 - DNA, 25 bp, Homo sapien
ggcacggcggtctcggccgagccga

SEQ ID NO: 4587588 - DNA, 25 bp, Homo sapien
gggcacggcggtctcggccgagccg

SEQ ID NO: 4587589 - DNA, 25 bp, Homo sapien
gcacggcggtctcggccgagccgag

SEQ ID NO: 4587590 - DNA, 25 bp, Homo sapien
agccaccccgcgcaccggctacaag

SEQ ID NO: 4587591 - DNA, 25 bp, Homo sapien
tgcacgtagccccagccaccccgcg

SEQ ID NO: 4587592 - DNA, 25 bp, Homo sapien
cccgcgcaccggctacaagccgccc

SEQ ID NO: 4587593 - DNA, 25 bp, Homo sapien
gcgcaccggctacaagccgcccggg

SEQ ID NO: 4587594 - DNA, 25 bp, Homo sapien
tgcagtcagcaacaggtatctacgg

SEQ ID NO: 4587595 - DNA, 25 bp, Homo sapien
gccgtgcatcctctactaccctgga

SEQ ID NO: 4587596 - DNA, 25 bp, Homo sapien
ggctgtccctttaggagtcactgaa

SEQ ID NO: 4587597 - DNA, 25 bp, Homo sapien
caccgaggaaatggtcgttgctgtt

SEQ ID NO: 4587598 - DNA, 25 bp, Homo sapien
gcacagcatctcatcgccccgctgt

SEQ ID NO: 4587599 - DNA, 25 bp, Homo sapien
gctgagcacctctgtcagcatatgg

SEQ ID NO: 4587600 - DNA, 25 bp, Homo sapien
ccccatgggcatgctgatggtgatc

SEQ ID NO: 4587601 - DNA, 25 bp, Homo sapien
tcgccccgctgtacctgctctgcag

SEQ ID NO: 4587602 - DNA, 25 bp, Homo sapien
cttgttgacaatggctgtataggag

SEQ ID NO: 4587603 - DNA, 25 bp, Homo sapien
tggtcctgggcaggagaccaaccat

SEQ ID NO: 4587604 - DNA, 25 bp, Homo sapien
aggtgcatgatggtcctgggcagga

SEQ ID NO: 4587605 - DNA, 25 bp, Homo sapien
tcctgggcaggagaccaaccatgag

SEQ ID NO: 4587606 - DNA, 25 bp, Homo sapien
attcatcccaactgtaggctgagtg

SEQ ID NO: 4587607 - DNA, 25 bp, Homo sapien
cgaggcgttttgaaattcatcccaa

SEQ ID NO: 4587608 - DNA, 25 bp, Homo sapien
tccccgaggcgttttgaaattcatc

SEQ ID NO: 4587609 - DNA, 25 bp, Homo sapien
tcatcccaactgtaggctgagtgac

SEQ ID NO: 4587610 - DNA, 25 bp, Homo sapien
ctgaaggttggacagactgccgaag

SEQ ID NO: 4587611 - DNA, 25 bp, Homo sapien
tgaaggttggacagactgccgaagt

SEQ ID NO: 4587612 - DNA, 25 bp, Homo sapien
gaaggttggacagactgccgaagtc

SEQ ID NO: 4587613 - DNA, 25 bp, Homo sapien
tcttggcaacgtagacatcctgggc

SEQ ID NO: 4587614 - DNA, 25 bp, Homo sapien
aatcaacatttgtgaagggcccaag

SEQ ID NO: 4587615 - DNA, 25 bp, Homo sapien
ccctggctatgagaacgaaaaatgt

SEQ ID NO: 4587616 - DNA, 25 bp, Homo sapien
gtacacaaggcatcaagcagaaggg

SEQ ID NO: 4587617 - DNA, 25 bp, Homo sapien
aggaatgccttcacagaagaaaagc

SEQ ID NO: 4587618 - DNA, 25 bp, Homo sapien
agaaaagcaggcagattcagccagg

SEQ ID NO: 4587619 - DNA, 25 bp, Homo sapien
acacaaagggggcaacgtaagccag

SEQ ID NO: 4587620 - DNA, 25 bp, Homo sapien
catttctgagtggttagcatggaga

SEQ ID NO: 4587621 - DNA, 25 bp, Homo sapien
gtcctggaagccactagatttggga

SEQ ID NO: 4587622 - DNA, 25 bp, Homo sapien
gaatcatgatcttgtggcgaactaa

SEQ ID NO: 4587623 - DNA, 25 bp, Homo sapien
tacaccccttatgaaagcagtccag

SEQ ID NO: 4587624 - DNA, 25 bp, Homo sapien
gctacaagtttagatgggattccca

SEQ ID NO: 4587625 - DNA, 25 bp, Homo sapien
acttcaataatctcctgatccaagg

SEQ ID NO: 4587626 - DNA, 25 bp, Homo sapien
cttagtgtcaggatctacttcaata

SEQ ID NO: 4587627 - DNA, 25 bp, Homo sapien
gtgtcaggatctacttcaataatct

SEQ ID NO: 4587628 - DNA, 25 bp, Homo sapien
ttcaataatctcctgatccaaggct

SEQ ID NO: 4587629 - DNA, 25 bp, Homo sapien
gatagcattcctctcacaaggtgag

SEQ ID NO: 4587630 - DNA, 25 bp, Homo sapien
catttgaggattagccagaagccca

SEQ ID NO: 4587631 - DNA, 25 bp, Homo sapien
cagattcagctgaggtccctttgga

SEQ ID NO: 4587632 - DNA, 25 bp, Homo sapien
tacagtattacagaccccgatgacc

SEQ ID NO: 4587633 - DNA, 25 bp, Homo sapien
ctgaattcgcttcatcagatgcgtg

SEQ ID NO: 4587634 - DNA, 25 bp, Homo sapien
actgggcctctctgaattcgcttca

SEQ ID NO: 4587635 - DNA, 25 bp, Homo sapien
cctctctgaattcgcttcatcagat

SEQ ID NO: 4587636 - DNA, 25 bp, Homo sapien
gggcctctctgaattcgcttcatca

SEQ ID NO: 4587637 - DNA, 25 bp, Homo sapien
gactttggcactattcttccaggcc

SEQ ID NO: 4587638 - DNA, 25 bp, Homo sapien
catatgcctataaatctctcgaaca

SEQ ID NO: 4587639 - DNA, 25 bp, Homo sapien
ttggcaattaatacgttgactttgg

SEQ ID NO: 4587640 - DNA, 25 bp, Homo sapien
taaatctctcgaacagtaactgcaa

SEQ ID NO: 4587641 - DNA, 25 bp, Homo sapien
tttctatgatgacccgggccgcctt

SEQ ID NO: 4587642 - DNA, 25 bp, Homo sapien
taatggcgatctcctcgcacacgcg

SEQ ID NO: 4587643 - DNA, 25 bp, Homo sapien
tatcttgttgcggagctttttgctg

SEQ ID NO: 4587644 - DNA, 25 bp, Homo sapien
cgcgcttgttcgtgtggaagtcgtt

SEQ ID NO: 4587645 - DNA, 25 bp, Homo sapien
cttcacggttttggtgcgaacgcgg

SEQ ID NO: 4587646 - DNA, 25 bp, Homo sapien
tcacggttttggtgcgaacgcggcc

SEQ ID NO: 4587647 - DNA, 25 bp, Homo sapien
ttcacggttttggtgcgaacgcggc

SEQ ID NO: 4587648 - DNA, 25 bp, Homo sapien
ctgcgggtggagaggacaggatcac

SEQ ID NO: 4587649 - DNA, 25 bp, Homo sapien
gggtggagaggacaggatcactcac

SEQ ID NO: 4587650 - DNA, 25 bp, Homo sapien
cgggtggagaggacaggatcactca

SEQ ID NO: 4587651 - DNA, 25 bp, Homo sapien
tgcgggtggagaggacaggatcact

SEQ ID NO: 4587652 - DNA, 25 bp, Homo sapien
gagccagcgcaaccttctgggaaga

SEQ ID NO: 4587653 - DNA, 25 bp, Homo sapien
cgccgggcttaatgcggaagccgcc

SEQ ID NO: 4587654 - DNA, 25 bp, Homo sapien
gagagggcccggctaaacagtgccg

SEQ ID NO: 4587655 - DNA, 25 bp, Homo sapien
agggctctgcgccttcccggcccag

SEQ ID NO: 4587656 - DNA, 25 bp, Homo sapien
ctgcagatgggggacgattgtggag

SEQ ID NO: 4587657 - DNA, 25 bp, Homo sapien
tggcggcctcgagccaaaacaccta

SEQ ID NO: 4587658 - DNA, 25 bp, Homo sapien
gacgattgtggaggatggcggcctc

SEQ ID NO: 4587659 - DNA, 25 bp, Homo sapien
cgattgtggaggatggcggcctcga

SEQ ID NO: 4587660 - DNA, 25 bp, Homo sapien
agcacaggcgaagcctgttaaagct

SEQ ID NO: 4587661 - DNA, 25 bp, Homo sapien
gaagcacaggcgaagcctgttaaag

SEQ ID NO: 4587662 - DNA, 25 bp, Homo sapien
aggaagcacaggcgaagcctgttaa

SEQ ID NO: 4587663 - DNA, 25 bp, Homo sapien
acaggcgaagcctgttaaagcttag

SEQ ID NO: 4587664 - DNA, 25 bp, Homo sapien
tgggtactccagtcggactctcaac

SEQ ID NO: 4587665 - DNA, 25 bp, Homo sapien
cttgggtactccagtcggactctca

SEQ ID NO: 4587666 - DNA, 25 bp, Homo sapien
gtactccagtcggactctcaactga

SEQ ID NO: 4587667 - DNA, 25 bp, Homo sapien
ccagtcggactctcaactgattggg

SEQ ID NO: 4587668 - DNA, 25 bp, Homo sapien
aaagaatcggtccaacagctgggcc

SEQ ID NO: 4587669 - DNA, 25 bp, Homo sapien
ctcagactaaattggaggttcccaa

SEQ ID NO: 4587670 - DNA, 25 bp, Homo sapien
gcttcagtatgcagggttccctcca

SEQ ID NO: 4587671 - DNA, 25 bp, Homo sapien
gagacagcttcagtatgcagggttc

SEQ ID NO: 4587672 - DNA, 25 bp, Homo sapien
cccaccattatcctgggccaggatc

SEQ ID NO: 4587673 - DNA, 25 bp, Homo sapien
taaataaacctaggtgtaggcatcc

SEQ ID NO: 4587674 - DNA, 25 bp, Homo sapien
tggaaaggcactgtatggcaactgc

SEQ ID NO: 4587675 - DNA, 25 bp, Homo sapien
gaatgaaaccaatgagacctgcgca

SEQ ID NO: 4587676 - DNA, 25 bp, Homo sapien
tatgacactggttctttggcacaca

SEQ ID NO: 4587677 - DNA, 25 bp, Homo sapien
cagagggtccttgcccttggtacac

SEQ ID NO: 4587678 - DNA, 25 bp, Homo sapien
cagctccctggtcgccagtggcagg

SEQ ID NO: 4587679 - DNA, 25 bp, Homo sapien
tacagagtcgcttggagggtaagcc

SEQ ID NO: 4587680 - DNA, 25 bp, Homo sapien
caaaacctgacaaaactcaatgtgc

SEQ ID NO: 4587681 - DNA, 25 bp, Homo sapien
tgccagctttgggcgccacaggcca

SEQ ID NO: 4587682 - DNA, 25 bp, Homo sapien
ctgccagctttgggcgccacaggcc

SEQ ID NO: 4587683 - DNA, 25 bp, Homo sapien
cggttcttctggttccgcatcaggg

SEQ ID NO: 4587684 - DNA, 25 bp, Homo sapien
ctagctggaatctcggttcttctgg

SEQ ID NO: 4587685 - DNA, 25 bp, Homo sapien
cagctccggcagaagtatttgaagc

SEQ ID NO: 4587686 - DNA, 25 bp, Homo sapien
gaatctcggttcttctggttccgca

SEQ ID NO: 4587687 - DNA, 25 bp, Homo sapien
ggaggatgccatgcctgtgtcagca

SEQ ID NO: 4587688 - DNA, 25 bp, Homo sapien
caaaaaggaggatgccatgcctgtg

SEQ ID NO: 4587689 - DNA, 25 bp, Homo sapien
ggagctgttgcacgagctgcttgtt

SEQ ID NO: 4587690 - DNA, 25 bp, Homo sapien
gacacaggagctgttgcacgagctg

SEQ ID NO: 4587691 - DNA, 25 bp, Homo sapien
tcaaagtcgtccagaagttcagatg

SEQ ID NO: 4587692 - DNA, 25 bp, Homo sapien
tacagcccagatgcaaatatcaaag

SEQ ID NO: 4587693 - DNA, 25 bp, Homo sapien
gcaaatatcaaagtcgtccagaagt

SEQ ID NO: 4587694 - DNA, 25 bp, Homo sapien
tcagatgtaaaggaggacgaggcat

SEQ ID NO: 4587695 - DNA, 25 bp, Homo sapien
gcagatatgacacagagaatcttct

SEQ ID NO: 4587696 - DNA, 25 bp, Homo sapien
agaatcttctaggtaggggtcaatc

SEQ ID NO: 4587697 - DNA, 25 bp, Homo sapien
aactgcagatatgacacagagaatc

SEQ ID NO: 4587698 - DNA, 25 bp, Homo sapien
atctcgacagaagaaaggaccaggc

SEQ ID NO: 4587699 - DNA, 25 bp, Homo sapien
aagatgatgaagtggctcttcttac

SEQ ID NO: 4587700 - DNA, 25 bp, Homo sapien
aaaataagatgatgaagtggctctt

SEQ ID NO: 4587701 - DNA, 25 bp, Homo sapien
aataagatgatgaagtggctcttct

SEQ ID NO: 4587702 - DNA, 25 bp, Homo sapien
ctgcacaaaggcaaaataagatgat

SEQ ID NO: 4587703 - DNA, 25 bp, Homo sapien
tagaagaagggcacattattggcca

SEQ ID NO: 4587704 - DNA, 25 bp, Homo sapien
cctgttttaaaggaggcttggagag

SEQ ID NO: 4587705 - DNA, 25 bp, Homo sapien
caggaatgcgggatattggaatgca

SEQ ID NO: 4587706 - DNA, 25 bp, Homo sapien
caggaggctcgataggcgatagaag

SEQ ID NO: 4587707 - DNA, 25 bp, Homo sapien
ggttattgaaagtcacacgaccaga

SEQ ID NO: 4587708 - DNA, 25 bp, Homo sapien
aaagcagcgctgactgctttcaggt

SEQ ID NO: 4587709 - DNA, 25 bp, Homo sapien
taactccgttggttattgaaagtca

SEQ ID NO: 4587710 - DNA, 25 bp, Homo sapien
gactgctttcaggtaactccgttgg

SEQ ID NO: 4587711 - DNA, 25 bp, Homo sapien
caagcttcccttctaaccaaattct

SEQ ID NO: 4587712 - DNA, 25 bp, Homo sapien
gacacaagcttcccttctaaccaaa

SEQ ID NO: 4587713 - DNA, 25 bp, Homo sapien
acacaagcttcccttctaaccaaat

SEQ ID NO: 4587714 - DNA, 25 bp, Homo sapien
cacaagcttcccttctaaccaaatt

SEQ ID NO: 4587715 - DNA, 25 bp, Homo sapien
aaataggtcgttcaagatggctgcc

SEQ ID NO: 4587716 - DNA, 25 bp, Homo sapien
tagcattccatgcagagcaccgaca

SEQ ID NO: 4587717 - DNA, 25 bp, Homo sapien
gatgggctccggacaaagttactgt

SEQ ID NO: 4587718 - DNA, 25 bp, Homo sapien
agttactgtcggctaatacccaggg

SEQ ID NO: 4587719 - DNA, 25 bp, Homo sapien
taatattcactcaggccatctgggc

SEQ ID NO: 4587720 - DNA, 25 bp, Homo sapien
tcagcgggtcatgagagcaagcctg

SEQ ID NO: 4587721 - DNA, 25 bp, Homo sapien
aagcctgaagcaaggatcggacaga

SEQ ID NO: 4587722 - DNA, 25 bp, Homo sapien
tccttgcagcgcatccttcggctgg

SEQ ID NO: 4587723 - DNA, 25 bp, Homo sapien
agttcgaagaccagatacacatacc

SEQ ID NO: 4587724 - DNA, 25 bp, Homo sapien
tagttcgaagaccagatacacatac

SEQ ID NO: 4587725 - DNA, 25 bp, Homo sapien
ctagttcgaagaccagatacacata

SEQ ID NO: 4587726 - DNA, 25 bp, Homo sapien
ggacaccggggatgcttgccatcct

SEQ ID NO: 4587727 - DNA, 25 bp, Homo sapien
tttgggaggacaccggggatgcttg

SEQ ID NO: 4587728 - DNA, 25 bp, Homo sapien
caccggggatgcttgccatccttac

SEQ ID NO: 4587729 - DNA, 25 bp, Homo sapien
ctttgggaggacaccggggatgctt

SEQ ID NO: 4587730 - DNA, 25 bp, Homo sapien
aggccactccacactcaaagagcca

SEQ ID NO: 4587731 - DNA, 25 bp, Homo sapien
caaagagccaaaaacacggaaggtg

SEQ ID NO: 4587732 - DNA, 25 bp, Homo sapien
acacggaaggtgttaactaatccag

SEQ ID NO: 4587733 - DNA, 25 bp, Homo sapien
actccacactcaaagagccaaaaac

SEQ ID NO: 4587734 - DNA, 25 bp, Homo sapien
agtagatggggttcttatagttccg

SEQ ID NO: 4587735 - DNA, 25 bp, Homo sapien
tgtaatatcccaaggaacacctcct

SEQ ID NO: 4587736 - DNA, 25 bp, Homo sapien
aaacaccttgcaagagtagatgggg

SEQ ID NO: 4587737 - DNA, 25 bp, Homo sapien
tctgtaatatcccaaggaacacctc

SEQ ID NO: 4587738 - DNA, 25 bp, Homo sapien
tctctctatgctgaaggggtctttg

SEQ ID NO: 4587739 - DNA, 25 bp, Homo sapien
tgctcttggtccatccgagacccta

SEQ ID NO: 4587740 - DNA, 25 bp, Homo sapien
gcagcttgctcttggtccatccgag

SEQ ID NO: 4587741 - DNA, 25 bp, Homo sapien
gcagcttgtcggtgcagcctggcct

SEQ ID NO: 4587742 - DNA, 25 bp, Homo sapien
tgggaccaccccctgacagagacag

SEQ ID NO: 4587743 - DNA, 25 bp, Homo sapien
gaccaccccctgacagagacaggaa

SEQ ID NO: 4587744 - DNA, 25 bp, Homo sapien
ccaccccctgacagagacaggaagg

SEQ ID NO: 4587745 - DNA, 25 bp, Homo sapien
gggtctctgggaccaccccctgaca

SEQ ID NO: 4587746 - DNA, 25 bp, Homo sapien
ggtacatctcactgacccatactct

SEQ ID NO: 4587747 - DNA, 25 bp, Homo sapien
tttggtcagattcctagaaagccga

SEQ ID NO: 4587748 - DNA, 25 bp, Homo sapien
cctgagcaattttgattagttctag

SEQ ID NO: 4587749 - DNA, 25 bp, Homo sapien
tcatattctatttagggaacaaggt

SEQ ID NO: 4587750 - DNA, 25 bp, Homo sapien
ttgtccaccaagtcagacccaaggg

SEQ ID NO: 4587751 - DNA, 25 bp, Homo sapien
cccagtgggttatggagcatgctca

SEQ ID NO: 4587752 - DNA, 25 bp, Homo sapien
ctagatcgagagtccaggatgggcc

SEQ ID NO: 4587753 - DNA, 25 bp, Homo sapien
gggtgtccaggcgtgatcctctaac

SEQ ID NO: 4587754 - DNA, 25 bp, Homo sapien
ctgccctatgtaaggttgctgagta

SEQ ID NO: 4587755 - DNA, 25 bp, Homo sapien
tgctgagtacgcagcaccgatttcc

SEQ ID NO: 4587756 - DNA, 25 bp, Homo sapien
taaggttgctgagtacgcagcaccg

SEQ ID NO: 4587757 - DNA, 25 bp, Homo sapien
tatgtaaggttgctgagtacgcagc

SEQ ID NO: 4587758 - DNA, 25 bp, Homo sapien
cactgaatgcctgcattataagacc

SEQ ID NO: 4587759 - DNA, 25 bp, Homo sapien
tgaatgcctgcattataagaccatc

SEQ ID NO: 4587760 - DNA, 25 bp, Homo sapien
cctgcattataagaccatctgagct

SEQ ID NO: 4587761 - DNA, 25 bp, Homo sapien
tgcctgcattataagaccatctgag

SEQ ID NO: 4587762 - DNA, 25 bp, Homo sapien
ctccccatcaagggatagtgcctca

SEQ ID NO: 4587763 - DNA, 25 bp, Homo sapien
gggagggctgcatcctactccagga

SEQ ID NO: 4587764 - DNA, 25 bp, Homo sapien
gaatgtgggctgcatgttcccgcat

SEQ ID NO: 4587765 - DNA, 25 bp, Homo sapien
gctggtgagggtgcacgatctggca

SEQ ID NO: 4587766 - DNA, 25 bp, Homo sapien
aaaggcagtgtaggcactggaatgt

SEQ ID NO: 4587767 - DNA, 25 bp, Homo sapien
gaggccacgggaagattcttgcgca

SEQ ID NO: 4587768 - DNA, 25 bp, Homo sapien
cctgtcagactgagggactgcaggc

SEQ ID NO: 4587769 - DNA, 25 bp, Homo sapien
tcttgcgcagaggttgggaaaagca

SEQ ID NO: 4587770 - DNA, 25 bp, Homo sapien
ctctgggctgaggaatctgagtcct

SEQ ID NO: 4587771 - DNA, 25 bp, Homo sapien
cctgcttgtaactgtttcttcagag

SEQ ID NO: 4587772 - DNA, 25 bp, Homo sapien
ctgcttgtaactgtttcttcagagt

SEQ ID NO: 4587773 - DNA, 25 bp, Homo sapien
tgcttgtaactgtttcttcagagtc

SEQ ID NO: 4587774 - DNA, 25 bp, Homo sapien
agaaacctcagagttaagggctgtt

SEQ ID NO: 4587775 - DNA, 25 bp, Homo sapien
ggctgttttccccaatattatcaac

SEQ ID NO: 4587776 - DNA, 25 bp, Homo sapien
gcagaaacctcagagttaagggctg

SEQ ID NO: 4587777 - DNA, 25 bp, Homo sapien
gttttccccaatattatcaacagta

SEQ ID NO: 4587778 - DNA, 25 bp, Homo sapien
agagcagttgccatacaggccccct

SEQ ID NO: 4587779 - DNA, 25 bp, Homo sapien
tgcctctgcacttttggggacgctg

SEQ ID NO: 4587780 - DNA, 25 bp, Homo sapien
acccctatcccgtctgcattacaga

SEQ ID NO: 4587781 - DNA, 25 bp, Homo sapien
ccagacatccaagctggctggatgc

SEQ ID NO: 4587782 - DNA, 25 bp, Homo sapien
cagcatgtgatcaggctgctgatgc

SEQ ID NO: 4587783 - DNA, 25 bp, Homo sapien
tgggccagcatgtgatcaggctgct

SEQ ID NO: 4587784 - DNA, 25 bp, Homo sapien
tgagccgtgcaatagagagcggcat

SEQ ID NO: 4587785 - DNA, 25 bp, Homo sapien
gctgccagtgacatcagccggctga

SEQ ID NO: 4587786 - DNA, 25 bp, Homo sapien
tccggtctccagcaatggtggccaa

SEQ ID NO: 4587787 - DNA, 25 bp, Homo sapien
cagggaaagacagcacaacagctac

SEQ ID NO: 4587788 - DNA, 25 bp, Homo sapien
tctgggttgcaaggcagcgccctcc

SEQ ID NO: 4587789 - DNA, 25 bp, Homo sapien
gaatagtcccggtgcagtgccgtta

SEQ ID NO: 4587790 - DNA, 25 bp, Homo sapien
aacctggactcagctggtagcactc

SEQ ID NO: 4587791 - DNA, 25 bp, Homo sapien
caggcaggctgctcaaacctggact

SEQ ID NO: 4587792 - DNA, 25 bp, Homo sapien
tgctcaaacctggactcagctggta

SEQ ID NO: 4587793 - DNA, 25 bp, Homo sapien
tggactcagctggtagcactccacc

SEQ ID NO: 4587794 - DNA, 25 bp, Homo sapien
aaggagaagcaagcagatacgggaa

SEQ ID NO: 4587795 - DNA, 25 bp, Homo sapien
gcagggtcgagagaataatgctgcc

SEQ ID NO: 4587796 - DNA, 25 bp, Homo sapien
gaacttcctgcagtacaccctgtgt

SEQ ID NO: 4587797 - DNA, 25 bp, Homo sapien
gggaagcatgcccacctgggacctc

SEQ ID NO: 4587798 - DNA, 25 bp, Homo sapien
aggatttcttcactagctccaactc

SEQ ID NO: 4587799 - DNA, 25 bp, Homo sapien
ctagctccaactcaatgcaggccat

SEQ ID NO: 4587800 - DNA, 25 bp, Homo sapien
tctaagatttcgctgctatgtgcat

SEQ ID NO: 4587801 - DNA, 25 bp, Homo sapien
aattttacttcttacccatggagag

SEQ ID NO: 4587802 - DNA, 25 bp, Homo sapien
gctgattcaaggctagcatcatcca

SEQ ID NO: 4587803 - DNA, 25 bp, Homo sapien
ccatggagagcaaaaaagacgactg

SEQ ID NO: 4587804 - DNA, 25 bp, Homo sapien
tgaccgcatccagcccaaaggtttt

SEQ ID NO: 4587805 - DNA, 25 bp, Homo sapien
tcattattttatggcagcatggcag

SEQ ID NO: 4587806 - DNA, 25 bp, Homo sapien
gcatgtacaacttcaaacaaggagg

SEQ ID NO: 4587807 - DNA, 25 bp, Homo sapien
tcttgacttacttgggcaagcatac

SEQ ID NO: 4587808 - DNA, 25 bp, Homo sapien
tagaaatccaaggatttcaaaagat

SEQ ID NO: 4587809 - DNA, 25 bp, Homo sapien
ttagaaatccaaggatttcaaaaga

SEQ ID NO: 4587810 - DNA, 25 bp, Homo sapien
cagtgaagtcactgggctccctgga

SEQ ID NO: 4587811 - DNA, 25 bp, Homo sapien
tccctggacagctgcaaacatacac

SEQ ID NO: 4587812 - DNA, 25 bp, Homo sapien
ggacagctgcaaacatacactctgg

SEQ ID NO: 4587813 - DNA, 25 bp, Homo sapien
acatacactctggaaagctcctctc

SEQ ID NO: 4587814 - DNA, 25 bp, Homo sapien
tagtgcagactctactgaaatccag

SEQ ID NO: 4587815 - DNA, 25 bp, Homo sapien
ctcggtttataggtgtagtgcagac

SEQ ID NO: 4587816 - DNA, 25 bp, Homo sapien
gatattggcattactacacgtggag

SEQ ID NO: 4587817 - DNA, 25 bp, Homo sapien
gcaaatgatcatgaattcctcggtt

SEQ ID NO: 4587818 - DNA, 25 bp, Homo sapien
ggttgggagtgaagatttccaagac

SEQ ID NO: 4587819 - DNA, 25 bp, Homo sapien
aaggttgggagtgaagatttccaag

SEQ ID NO: 4587820 - DNA, 25 bp, Homo sapien
agacatggaccttggagaaatccaa

SEQ ID NO: 4587821 - DNA, 25 bp, Homo sapien
tggagaaatccaagagttaacatac

SEQ ID NO: 4587822 - DNA, 25 bp, Homo sapien
taaagggacaaacttgagcctcacg

SEQ ID NO: 4587823 - DNA, 25 bp, Homo sapien
tagatgatctggcaaaagggttccg

SEQ ID NO: 4587824 - DNA, 25 bp, Homo sapien
gattggtaccctctgcaaactgtga

SEQ ID NO: 4587825 - DNA, 25 bp, Homo sapien
tctgcaggatgaccttaaagggaca

SEQ ID NO: 4587826 - DNA, 25 bp, Homo sapien
gcctttaaatatcatactccccaga

SEQ ID NO: 4587827 - DNA, 25 bp, Homo sapien
gataggatggccattctggcagctc

SEQ ID NO: 4587828 - DNA, 25 bp, Homo sapien
gatatgtttgctaaagatccccaaa

SEQ ID NO: 4587829 - DNA, 25 bp, Homo sapien
tccccagacccagcattgtgatagg

SEQ ID NO: 4587830 - DNA, 25 bp, Homo sapien
tgtcgtaaatgaatgccaactatca

SEQ ID NO: 4587831 - DNA, 25 bp, Homo sapien
gtcgtaaatgaatgccaactatcat

SEQ ID NO: 4587832 - DNA, 25 bp, Homo sapien
ctgtcgtaaatgaatgccaactatc

SEQ ID NO: 4587833 - DNA, 25 bp, Homo sapien
taataccaatgctgaagacccttca

SEQ ID NO: 4587834 - DNA, 25 bp, Homo sapien
ggacaacataataccaatgctgaag

SEQ ID NO: 4587835 - DNA, 25 bp, Homo sapien
ttaatggacaacataataccaatgc

SEQ ID NO: 4587836 - DNA, 25 bp, Homo sapien
gaagacccttcaagactattactat

SEQ ID NO: 4587837 - DNA, 25 bp, Homo sapien
gggctgacgggctgaccggccagcc

SEQ ID NO: 4587838 - DNA, 25 bp, Homo sapien
gctgaccggccagccggcgggcgag

SEQ ID NO: 4587839 - DNA, 25 bp, Homo sapien
acgcgcacgcacgtgggcactattt

SEQ ID NO: 4587840 - DNA, 25 bp, Homo sapien
gcgggcgagagacgcgcacgcacgt

SEQ ID NO: 4587841 - DNA, 25 bp, Homo sapien
ctggtgtcacagtgcccagcaagtc

SEQ ID NO: 4587842 - DNA, 25 bp, Homo sapien
cagctctctggtgtcacagtgccca

SEQ ID NO: 4587843 - DNA, 25 bp, Homo sapien
tggtgtcacagtgcccagcaagtcc

SEQ ID NO: 4587844 - DNA, 25 bp, Homo sapien
tccagcagctctctggtgtcacagt

SEQ ID NO: 4587845 - DNA, 25 bp, Homo sapien
ccctggcactgcctttgttctcctt

SEQ ID NO: 4587846 - DNA, 25 bp, Homo sapien
cagggctgtcccctggcactgcctt

SEQ ID NO: 4587847 - DNA, 25 bp, Homo sapien
tgtcccctggcactgcctttgttct

SEQ ID NO: 4587848 - DNA, 25 bp, Homo sapien
gggctgtcccctggcactgcctttg

SEQ ID NO: 4587849 - DNA, 25 bp, Homo sapien
ttacccatgaacagacatgctcagg

SEQ ID NO: 4587850 - DNA, 25 bp, Homo sapien
gacatgctcagggatgcctaagtgg

SEQ ID NO: 4587851 - DNA, 25 bp, Homo sapien
caccccatcttacccatgaacagac

SEQ ID NO: 4587852 - DNA, 25 bp, Homo sapien
catgctcagggatgcctaagtggca

SEQ ID NO: 4587853 - DNA, 25 bp, Homo sapien
gacattttattgagcctgctacata

SEQ ID NO: 4587854 - DNA, 25 bp, Homo sapien
gaagacattttattgagcctgctac

SEQ ID NO: 4587855 - DNA, 25 bp, Homo sapien
tttattgagcctgctacataaatag

SEQ ID NO: 4587856 - DNA, 25 bp, Homo sapien
ttattgagcctgctacataaatagc

SEQ ID NO: 4587857 - DNA, 25 bp, Homo sapien
tgagagagactgacagcctaggtgt

SEQ ID NO: 4587858 - DNA, 25 bp, Homo sapien
tctctctgcacagatcactaaggaa

SEQ ID NO: 4587859 - DNA, 25 bp, Homo sapien
agactgacagcctaggtgtcatggg

SEQ ID NO: 4587860 - DNA, 25 bp, Homo sapien
aggtatagatgggagccaaacaggt

SEQ ID NO: 4587861 - DNA, 25 bp, Homo sapien
tcagagcctgtatcacatcctttac

SEQ ID NO: 4587862 - DNA, 25 bp, Homo sapien
tcactgggtcagagcctgtatcaca

SEQ ID NO: 4587863 - DNA, 25 bp, Homo sapien
tgggtcagagcctgtatcacatcct

SEQ ID NO: 4587864 - DNA, 25 bp, Homo sapien
cactgggtcagagcctgtatcacat

SEQ ID NO: 4587865 - DNA, 25 bp, Homo sapien
gccaatcaccattttctcgctgttg

SEQ ID NO: 4587866 - DNA, 25 bp, Homo sapien
caatcaccattttctcgctgttgac

SEQ ID NO: 4587867 - DNA, 25 bp, Homo sapien
ccagggtcagcagaacgaggcttcc

SEQ ID NO: 4587868 - DNA, 25 bp, Homo sapien
cgaggcttccaccagtcagtgtcct

SEQ ID NO: 4587869 - DNA, 25 bp, Homo sapien
actttctgcaccacaatgtggtcac

SEQ ID NO: 4587870 - DNA, 25 bp, Homo sapien
gaacacgacccaggttggcagtggc

SEQ ID NO: 4587871 - DNA, 25 bp, Homo sapien
cccacaaggaacacgacccaggttg

SEQ ID NO: 4587872 - DNA, 25 bp, Homo sapien
aatgtggtcactccgacaggtgtct

SEQ ID NO: 4587873 - DNA, 25 bp, Homo sapien
tggctgaatggagacgtagaactgt

SEQ ID NO: 4587874 - DNA, 25 bp, Homo sapien
aggtggctgaatggagacgtagaac

SEQ ID NO: 4587875 - DNA, 25 bp, Homo sapien
ctgaatggagacgtagaactgtcgg

SEQ ID NO: 4587876 - DNA, 25 bp, Homo sapien
aatggagacgtagaactgtcgggtc

SEQ ID NO: 4587877 - DNA, 25 bp, Homo sapien
cacagaaattaatgcccattacagc

SEQ ID NO: 4587878 - DNA, 25 bp, Homo sapien
gttgagtcacagaaattaatgccca

SEQ ID NO: 4587879 - DNA, 25 bp, Homo sapien
gagtcacagaaattaatgcccatta

SEQ ID NO: 4587880 - DNA, 25 bp, Homo sapien
tgggttgagtcacagaaattaatgc

SEQ ID NO: 4587881 - DNA, 25 bp, Homo sapien
agtggatgtgcacggacaccatgtg

SEQ ID NO: 4587882 - DNA, 25 bp, Homo sapien
ttggcggctgaaggtgtagtccaca

SEQ ID NO: 4587883 - DNA, 25 bp, Homo sapien
caacacccgatactggactcagaag

SEQ ID NO: 4587884 - DNA, 25 bp, Homo sapien
gagtgcccacatgcaggcccttgat

SEQ ID NO: 4587885 - DNA, 25 bp, Homo sapien
gctgggactcaaagctatcacatcc

SEQ ID NO: 4587886 - DNA, 25 bp, Homo sapien
tgggactcaaagctatcacatcctc

SEQ ID NO: 4587887 - DNA, 25 bp, Homo sapien
ggactcaaagctatcacatcctcca

SEQ ID NO: 4587888 - DNA, 25 bp, Homo sapien
ctgggactcaaagctatcacatcct

SEQ ID NO: 4587889 - DNA, 25 bp, Homo sapien
gcagccagactggtagacacaattg

SEQ ID NO: 4587890 - DNA, 25 bp, Homo sapien
accagggtggagtctgtgagtgtca

SEQ ID NO: 4587891 - DNA, 25 bp, Homo sapien
agcagccagactggtagacacaatt

SEQ ID NO: 4587892 - DNA, 25 bp, Homo sapien
taccagggtggagtctgtgagtgtc

SEQ ID NO: 4587893 - DNA, 25 bp, Homo sapien
gggggagacacaggctggacactgg

SEQ ID NO: 4587894 - DNA, 25 bp, Homo sapien
ggagacacaggctggacactgggag

SEQ ID NO: 4587895 - DNA, 25 bp, Homo sapien
acacaggctggacactgggaggggt

SEQ ID NO: 4587896 - DNA, 25 bp, Homo sapien
ctgggggagacacaggctggacact

SEQ ID NO: 4587897 - DNA, 25 bp, Homo sapien
gcaaaatacccattcctagacctca

SEQ ID NO: 4587898 - DNA, 25 bp, Homo sapien
ggagcacgcatttcagcaccatgga

SEQ ID NO: 4587899 - DNA, 25 bp, Homo sapien
tggaggctctcgcaaaatacccatt

SEQ ID NO: 4587900 - DNA, 25 bp, Homo sapien
ggttgagcagggagcctagggatca

SEQ ID NO: 4587901 - DNA, 25 bp, Homo sapien
tccttggttgcaggagcacttttgc

SEQ ID NO: 4587902 - DNA, 25 bp, Homo sapien
agatctccttggttgcaggagcact

SEQ ID NO: 4587903 - DNA, 25 bp, Homo sapien
ctctagatcaagcagggagatctcc

SEQ ID NO: 4587904 - DNA, 25 bp, Homo sapien
aatcctctagatcaagcagggagat

SEQ ID NO: 4587905 - DNA, 25 bp, Homo sapien
tcggactccgatgtcatctcggact

SEQ ID NO: 4587906 - DNA, 25 bp, Homo sapien
tgctccaggaggcaggttctaactg

SEQ ID NO: 4587907 - DNA, 25 bp, Homo sapien
ctactgctggaatcgctgccctcat

SEQ ID NO: 4587908 - DNA, 25 bp, Homo sapien
catcagaggatgacgcttctccttt

SEQ ID NO: 4587909 - DNA, 25 bp, Homo sapien
ctggtcttcattgtcggactcactg

SEQ ID NO: 4587910 - DNA, 25 bp, Homo sapien
actgctgctcttactgtccgattca

SEQ ID NO: 4587911 - DNA, 25 bp, Homo sapien
tactgtccgattcactctcagactc

SEQ ID NO: 4587912 - DNA, 25 bp, Homo sapien
cttcattgtcggactcactgctgga

SEQ ID NO: 4587913 - DNA, 25 bp, Homo sapien
ttctcccgatttgagcacttggtcc

SEQ ID NO: 4587914 - DNA, 25 bp, Homo sapien
cctttctcttctcccgatttgagca

SEQ ID NO: 4587915 - DNA, 25 bp, Homo sapien
ccctcagagtccgagtagaagggtt

SEQ ID NO: 4587916 - DNA, 25 bp, Homo sapien
cactgtctgcggactccgtggggcc

SEQ ID NO: 4587917 - DNA, 25 bp, Homo sapien
cccacgtgagtctcaataagggaga

SEQ ID NO: 4587918 - DNA, 25 bp, Homo sapien
caacaggcccacgtgagtctcaata

SEQ ID NO: 4587919 - DNA, 25 bp, Homo sapien
tctcaataagggagagatcttcttc

SEQ ID NO: 4587920 - DNA, 25 bp, Homo sapien
agtgtattcgcccaacaggcccacg

SEQ ID NO: 4587921 - DNA, 25 bp, Homo sapien
cttggcattaagcaggtgggacagt

SEQ ID NO: 4587922 - DNA, 25 bp, Homo sapien
tccacgttgcgcacagatgggtctg

SEQ ID NO: 4587923 - DNA, 25 bp, Homo sapien
gagcccagctggaagtggtcccggt

SEQ ID NO: 4587924 - DNA, 25 bp, Homo sapien
ttcctccggccagtctgggagctcc

SEQ ID NO: 4587925 - DNA, 25 bp, Homo sapien
tgactgcacctttaggcccacatgc

SEQ ID NO: 4587926 - DNA, 25 bp, Homo sapien
gagatggatgtgtgccctaatggct

SEQ ID NO: 4587927 - DNA, 25 bp, Homo sapien
tctggatcagagttgaggcactgct

SEQ ID NO: 4587928 - DNA, 25 bp, Homo sapien
gaatctccccattcgtgaggtccag

SEQ ID NO: 4587929 - DNA, 25 bp, Homo sapien
caccctgctcggaagggacgatgag

SEQ ID NO: 4587930 - DNA, 25 bp, Homo sapien
tggccagactcagcacatactgggt

SEQ ID NO: 4587931 - DNA, 25 bp, Homo sapien
tcatagttctggtcatatttggcca

SEQ ID NO: 4587932 - DNA, 25 bp, Homo sapien
gcccggtcgcgaatatcatagttct

SEQ ID NO: 4587933 - DNA, 25 bp, Homo sapien
ggaggaacaggaagaggtgggtcag

SEQ ID NO: 4587934 - DNA, 25 bp, Homo sapien
tggaggaacaggaagaggtgggtca

SEQ ID NO: 4587935 - DNA, 25 bp, Homo sapien
ctggaggaacaggaagaggtgggtc

SEQ ID NO: 4587936 - DNA, 25 bp, Homo sapien
ctgctgacataaggagcctgccctg

SEQ ID NO: 4587937 - DNA, 25 bp, Homo sapien
gatcaaaaccaccaagtggtcaaca

SEQ ID NO: 4587938 - DNA, 25 bp, Homo sapien
agcagaatgcccaagggcatcaggg

SEQ ID NO: 4587939 - DNA, 25 bp, Homo sapien
aaccaccaagtggtcaacaagcaga

SEQ ID NO: 4587940 - DNA, 25 bp, Homo sapien
accaagtggtcaacaagcagaatgc

SEQ ID NO: 4587941 - DNA, 25 bp, Homo sapien
gaggctctgaacaccctgatactac

SEQ ID NO: 4587942 - DNA, 25 bp, Homo sapien
ccaaattcagcctatgggcagtagt

SEQ ID NO: 4587943 - DNA, 25 bp, Homo sapien
aaatcgtcatggtgtttgatgtccc

SEQ ID NO: 4587944 - DNA, 25 bp, Homo sapien
gatgccagacagctaggaggctctg

SEQ ID NO: 4587945 - DNA, 25 bp, Homo sapien
aataggagctagagttcagccctgc

SEQ ID NO: 4587946 - DNA, 25 bp, Homo sapien
caaaataggagctagagttcagccc

SEQ ID NO: 4587947 - DNA, 25 bp, Homo sapien
tccaaaataggagctagagttcagc

SEQ ID NO: 4587948 - DNA, 25 bp, Homo sapien
ttttccaaaataggagctagagttc

SEQ ID NO: 4587949 - DNA, 25 bp, Homo sapien
acagtactctccgatgagccacagg

SEQ ID NO: 4587950 - DNA, 25 bp, Homo sapien
gggacatgctcacagtactctccga

SEQ ID NO: 4587951 - DNA, 25 bp, Homo sapien
caggtagagcttggctgccaggttg

SEQ ID NO: 4587952 - DNA, 25 bp, Homo sapien
ttaagacatcaggtgcaatcctggg

SEQ ID NO: 4587953 - DNA, 25 bp, Homo sapien
atctctccatgttgtgctggctgca

SEQ ID NO: 4587954 - DNA, 25 bp, Homo sapien
taatgacgaccactgactctgcaac

SEQ ID NO: 4587955 - DNA, 25 bp, Homo sapien
ccaagtgtttgatgatctctccatg

SEQ ID NO: 4587956 - DNA, 25 bp, Homo sapien
ctggatgttgtctgtaagctttgcc

SEQ ID NO: 4587957 - DNA, 25 bp, Homo sapien
aacaaaaatgagtgtgtggacccca

SEQ ID NO: 4587958 - DNA, 25 bp, Homo sapien
aaaaatgagtgtgtggaccccaaga

SEQ ID NO: 4587959 - DNA, 25 bp, Homo sapien
gtggaccccaagacagtcagatggc

SEQ ID NO: 4587960 - DNA, 25 bp, Homo sapien
agaacaaaaatgagtgtgtggaccc

SEQ ID NO: 4587961 - DNA, 25 bp, Homo sapien
ccattgaggcaggtgtcacggactc

SEQ ID NO: 4587962 - DNA, 25 bp, Homo sapien
ggactcggccgatgttagttgcaca

SEQ ID NO: 4587963 - DNA, 25 bp, Homo sapien
tagttgcacagcgtccaatggcctg

SEQ ID NO: 4587964 - DNA, 25 bp, Homo sapien
ccttgtccatgctgcgaatataggt

SEQ ID NO: 4587965 - DNA, 25 bp, Homo sapien
ctggaattcccgtaggacagtagga

SEQ ID NO: 4587966 - DNA, 25 bp, Homo sapien
cgtaggacagtaggaatgttggtct

SEQ ID NO: 4587967 - DNA, 25 bp, Homo sapien
ggaatgttggtctcattggccaggt

SEQ ID NO: 4587968 - DNA, 25 bp, Homo sapien
gaatgttggtctcattggccaggtt

SEQ ID NO: 4587969 - DNA, 25 bp, Homo sapien
taacccagggtcttcgcagatgctg

SEQ ID NO: 4587970 - DNA, 25 bp, Homo sapien
tcaccatggtctgtaagtccctgaa

SEQ ID NO: 4587971 - DNA, 25 bp, Homo sapien
agatgctgtttcctctgcgtggagc

SEQ ID NO: 4587972 - DNA, 25 bp, Homo sapien
taagtggattccctacacagtatgc

SEQ ID NO: 4587973 - DNA, 25 bp, Homo sapien
cactgtgagttatttgagtgggtac

SEQ ID NO: 4587974 - DNA, 25 bp, Homo sapien
tatgaggtgatatcaggttacttca

SEQ ID NO: 4587975 - DNA, 25 bp, Homo sapien
ggtactaggcaaagagcagttccct

SEQ ID NO: 4587976 - DNA, 25 bp, Homo sapien
cacatcctgggattattatgaggtg

SEQ ID NO: 4587977 - DNA, 25 bp, Homo sapien
ttcaggatcttaattgggtggggtc

SEQ ID NO: 4587978 - DNA, 25 bp, Homo sapien
ggtggacctgatgtagaagctcttc

SEQ ID NO: 4587979 - DNA, 25 bp, Homo sapien
gaagctcttcaggtagggctcaaac

SEQ ID NO: 4587980 - DNA, 25 bp, Homo sapien
tcttcaggtagggctcaaacatacc

SEQ ID NO: 4587981 - DNA, 25 bp, Homo sapien
tcggacagcgaggacagcccgccgt

SEQ ID NO: 4587982 - DNA, 25 bp, Homo sapien
acagccagggtattcctccatcttc

SEQ ID NO: 4587983 - DNA, 25 bp, Homo sapien
cctatctgtatttggagcctcccct

SEQ ID NO: 4587984 - DNA, 25 bp, Homo sapien
agtgcccgcagaagcggccctcgga

SEQ ID NO: 4587985 - DNA, 25 bp, Homo sapien
tctggagcacaacgtactgcacctc

SEQ ID NO: 4587986 - DNA, 25 bp, Homo sapien
cacgttctggagcacaacgtactgc

SEQ ID NO: 4587987 - DNA, 25 bp, Homo sapien
ggccacgttctggagcacaacgtac

SEQ ID NO: 4587988 - DNA, 25 bp, Homo sapien
cgttctggagcacaacgtactgcac

SEQ ID NO: 4587989 - DNA, 25 bp, Homo sapien
cggttggggcaagggtcagcggatg

SEQ ID NO: 4587990 - DNA, 25 bp, Homo sapien
ctgcggagaggacgggtcagagcac

SEQ ID NO: 4587991 - DNA, 25 bp, Homo sapien
tgcggagggcaggactacggtcagt

SEQ ID NO: 4587992 - DNA, 25 bp, Homo sapien
actacggtcagtgtggagcgggtgg

SEQ ID NO: 4587993 - DNA, 25 bp, Homo sapien
agcgccttggcgatgacgcccactt

SEQ ID NO: 4587994 - DNA, 25 bp, Homo sapien
tttccgcgttctcctctagtaggga

SEQ ID NO: 4587995 - DNA, 25 bp, Homo sapien
tcgtcctcctctgagccgtagaagg

SEQ ID NO: 4587996 - DNA, 25 bp, Homo sapien
ggtccatgacatagggctttcggga

SEQ ID NO: 4587997 - DNA, 25 bp, Homo sapien
ccgggacacacttcggcccgctctg

SEQ ID NO: 4587998 - DNA, 25 bp, Homo sapien
cgggacacacttcggcccgctctgc

SEQ ID NO: 4587999 - DNA, 25 bp, Homo sapien
cccgggacacacttcggcccgctct

SEQ ID NO: 4588000 - DNA, 25 bp, Homo sapien
ggctcaggaactgcgtgcgggcgta

SEQ ID NO: 4588001 - DNA, 25 bp, Homo sapien
ttttgtgaatcaggtcgatgcgctc

SEQ ID NO: 4588002 - DNA, 25 bp, Homo sapien
gatcagcaggttacagagtttccgg

SEQ ID NO: 4588003 - DNA, 25 bp, Homo sapien
cgggcgtagcgggtgagcatgctga

SEQ ID NO: 4588004 - DNA, 25 bp, Homo sapien
gaaagaacaaagacgagagggtgaa

SEQ ID NO: 4588005 - DNA, 25 bp, Homo sapien
ggaaagaacaaagacgagagggtga

SEQ ID NO: 4588006 - DNA, 25 bp, Homo sapien
aatgacttctatcagctgatccttc

SEQ ID NO: 4588007 - DNA, 25 bp, Homo sapien
tcaatgacttctatcagctgatcct

SEQ ID NO: 4588008 - DNA, 25 bp, Homo sapien
cttctcaatgacttctatcagctga

SEQ ID NO: 4588009 - DNA, 25 bp, Homo sapien
cagctgatccttctggtcagagtcc

SEQ ID NO: 4588010 - DNA, 25 bp, Homo sapien
tccgaggcggcttccttgatagcta

SEQ ID NO: 4588011 - DNA, 25 bp, Homo sapien
tggcacgaatcagctggttgggatc

SEQ ID NO: 4588012 - DNA, 25 bp, Homo sapien
cacatagggtgacatgtccgaggcg

SEQ ID NO: 4588013 - DNA, 25 bp, Homo sapien
gcacacggatgctagagaggacacg

SEQ ID NO: 4588014 - DNA, 25 bp, Homo sapien
ttttaatgcctgaggtgaccgccca

SEQ ID NO: 4588015 - DNA, 25 bp, Homo sapien
gcaagctggtctcccttccggagtt

SEQ ID NO: 4588016 - DNA, 25 bp, Homo sapien
tgaacaggtgttgcaatgggtagct

SEQ ID NO: 4588017 - DNA, 25 bp, Homo sapien
cacctaaaattgctgaaacacctga

SEQ ID NO: 4588018 - DNA, 25 bp, Homo sapien
tgcaaagtgcaatacaatgaggtgt

SEQ ID NO: 4588019 - DNA, 25 bp, Homo sapien
gacagaggcacaatgtgagcacata

SEQ ID NO: 4588020 - DNA, 25 bp, Homo sapien
tactcttagagaatgacgggaatag

SEQ ID NO: 4588021 - DNA, 25 bp, Homo sapien
tcatgtctgagcatggtttgtggca

SEQ ID NO: 4588022 - DNA, 25 bp, Homo sapien
gattcaggccactgctaaaggttga

SEQ ID NO: 4588023 - DNA, 25 bp, Homo sapien
tatgtaaatccaactagaggccttg

SEQ ID NO: 4588024 - DNA, 25 bp, Homo sapien
tgaaatctacctggctgtggaccac

SEQ ID NO: 4588025 - DNA, 25 bp, Homo sapien
caatgtgtggcatagagacacccaa

SEQ ID NO: 4588026 - DNA, 25 bp, Homo sapien
ctttaggccacgttggaaggtggag

SEQ ID NO: 4588027 - DNA, 25 bp, Homo sapien
ggtacacatagacaagcttcttcac

SEQ ID NO: 4588028 - DNA, 25 bp, Homo sapien
gcgtagcgtaccaggtacacataga

SEQ ID NO: 4588029 - DNA, 25 bp, Homo sapien
cttgctgctcctcagcgtagcgtac

SEQ ID NO: 4588030 - DNA, 25 bp, Homo sapien
tccacatccagttcagggacatgga

SEQ ID NO: 4588031 - DNA, 25 bp, Homo sapien
ttctcagcagaacgcttctcagcag

SEQ ID NO: 4588032 - DNA, 25 bp, Homo sapien
tcctcaccccaagcttgagtgtggt

SEQ ID NO: 4588033 - DNA, 25 bp, Homo sapien
gacaagcaatccctcaccaggtagt

SEQ ID NO: 4588034 - DNA, 25 bp, Homo sapien
caccgcgggaaacaggtctgaagca

SEQ ID NO: 4588035 - DNA, 25 bp, Homo sapien
ggaaacaggtctgaagcattctttc

SEQ ID NO: 4588036 - DNA, 25 bp, Homo sapien
tcaccaccgcgggaaacaggtctga

SEQ ID NO: 4588037 - DNA, 25 bp, Homo sapien
cgttcttcaccaccgcgggaaacag

SEQ ID NO: 4588038 - DNA, 25 bp, Homo sapien
ccttgttggtgtccagcatctcctt

SEQ ID NO: 4588039 - DNA, 25 bp, Homo sapien
gcctccagcttgagagaatccttgt

SEQ ID NO: 4588040 - DNA, 25 bp, Homo sapien
atggcctccagcttgagagaatcct

SEQ ID NO: 4588041 - DNA, 25 bp, Homo sapien
cttgagagaatccttgttggtgtcc

SEQ ID NO: 4588042 - DNA, 25 bp, Homo sapien
aggatttccctatgggtttcagagg

SEQ ID NO: 4588043 - DNA, 25 bp, Homo sapien
cgattggaaagatgcgtctacaagc

SEQ ID NO: 4588044 - DNA, 25 bp, Homo sapien
tgccgacaccttgagttcagacttt

SEQ ID NO: 4588045 - DNA, 25 bp, Homo sapien
aagacagccacttaaagagacagac

SEQ ID NO: 4588046 - DNA, 25 bp, Homo sapien
gattttttacccatattcaggagtg

SEQ ID NO: 4588047 - DNA, 25 bp, Homo sapien
gagtggaatttagtgtcatccaatt

SEQ ID NO: 4588048 - DNA, 25 bp, Homo sapien
ggaatttagtgtcatccaatttatg

SEQ ID NO: 4588049 - DNA, 25 bp, Homo sapien
aatttagtgtcatccaatttatgca

SEQ ID NO: 4588050 - DNA, 25 bp, Homo sapien
ctgaaacaagaactcggaaatcaga

SEQ ID NO: 4588051 - DNA, 25 bp, Homo sapien
ccgacttcgtaagtcctggagaact

SEQ ID NO: 4588052 - DNA, 25 bp, Homo sapien
acttcgtaagtcctggagaactcca

SEQ ID NO: 4588053 - DNA, 25 bp, Homo sapien
gacttcgtaagtcctggagaactcc

SEQ ID NO: 4588054 - DNA, 25 bp, Homo sapien
cttcgtaagtcctggagaactccac

SEQ ID NO: 4588055 - DNA, 25 bp, Homo sapien
tcgggggtcctcaaagcgcaccaag

SEQ ID NO: 4588056 - DNA, 25 bp, Homo sapien
cacaaggcagtgcccattcttaagc

SEQ ID NO: 4588057 - DNA, 25 bp, Homo sapien
ttcttaagcttgatcttgcggatcc

SEQ ID NO: 4588058 - DNA, 25 bp, Homo sapien
gcccattcttaagcttgatcttgcg

SEQ ID NO: 4588059 - DNA, 25 bp, Homo sapien
cctccccgcaatccccccgcagcgt

SEQ ID NO: 4588060 - DNA, 25 bp, Homo sapien
ctccccgcaatccccccgcagcgtc

SEQ ID NO: 4588061 - DNA, 25 bp, Homo sapien
gaaagtatggacctggctcagggaa

SEQ ID NO: 4588062 - DNA, 25 bp, Homo sapien
tagatggcctcacaacaaaagccag

SEQ ID NO: 4588063 - DNA, 25 bp, Homo sapien
tgatcccttgcacttggctgagagg

SEQ ID NO: 4588064 - DNA, 25 bp, Homo sapien
tgcctccagtatgtttccaagtcct

SEQ ID NO: 4588065 - DNA, 25 bp, Homo sapien
tattaaggtcataaaattattagca

SEQ ID NO: 4588066 - DNA, 25 bp, Homo sapien
gcagcaacaatatggctaggtttaa

SEQ ID NO: 4588067 - DNA, 25 bp, Homo sapien
cccgcatttgcttaacagttaatta

SEQ ID NO: 4588068 - DNA, 25 bp, Homo sapien
caccccaaaataaatcccgcatttg

SEQ ID NO: 4588069 - DNA, 25 bp, Homo sapien
ctgttgagtttcttagtgggtagga

SEQ ID NO: 4588070 - DNA, 25 bp, Homo sapien
gcatggtcataggtacagaccattg

SEQ ID NO: 4588071 - DNA, 25 bp, Homo sapien
catggtcataggtacagaccattga

SEQ ID NO: 4588072 - DNA, 25 bp, Homo sapien
aacacagaccagactgttgagtttc

SEQ ID NO: 4588073 - DNA, 25 bp, Homo sapien
cacctaagttccagtccactggcag

SEQ ID NO: 4588074 - DNA, 25 bp, Homo sapien
cgtccagagcccactccagtggggg

SEQ ID NO: 4588075 - DNA, 25 bp, Homo sapien
gtccagagcccactccagtgggggc

SEQ ID NO: 4588076 - DNA, 25 bp, Homo sapien
tcgtccagagcccactccagtgggg

SEQ ID NO: 4588077 - DNA, 25 bp, Homo sapien
ctcgtccagagcccactccagtggg

SEQ ID NO: 4588078 - DNA, 25 bp, Homo sapien
agatgcttctggggtcgtgtcttcc

SEQ ID NO: 4588079 - DNA, 25 bp, Homo sapien
tgggggcccaccttcgggagccagc

SEQ ID NO: 4588080 - DNA, 25 bp, Homo sapien
cggagccgcccttgtcttcgctgta

SEQ ID NO: 4588081 - DNA, 25 bp, Homo sapien
tgtagtcggaggagaagatgccgcc

SEQ ID NO: 4588082 - DNA, 25 bp, Homo sapien
gctcgcggggtcgtggccgtactcg

SEQ ID NO: 4588083 - DNA, 25 bp, Homo sapien
gggccagcggagccgcccttgtctt

SEQ ID NO: 4588084 - DNA, 25 bp, Homo sapien
ggagacttcgccgaggaggaggttg

SEQ ID NO: 4588085 - DNA, 25 bp, Homo sapien
cagggagacttcgccgaggaggagg

SEQ ID NO: 4588086 - DNA, 25 bp, Homo sapien
agacttcgccgaggaggaggttgcg

SEQ ID NO: 4588087 - DNA, 25 bp, Homo sapien
agggagacttcgccgaggaggaggt

SEQ ID NO: 4588088 - DNA, 25 bp, Homo sapien
cgcgcggatttctcaatcagggccg

SEQ ID NO: 4588089 - DNA, 25 bp, Homo sapien
gcggcgcggcaggggttcagcagag

SEQ ID NO: 4588090 - DNA, 25 bp, Homo sapien
cgcggatttctcaatcagggccgcg

SEQ ID NO: 4588091 - DNA, 25 bp, Homo sapien
tgcgcgcggatttctcaatcagggc

SEQ ID NO: 4588092 - DNA, 25 bp, Homo sapien
aaagaaggctgtgcccgcaggctgg

SEQ ID NO: 4588093 - DNA, 25 bp, Homo sapien
aaagcgggaactggaaagaaggctg

SEQ ID NO: 4588094 - DNA, 25 bp, Homo sapien
cgccgtggagggaaagcgggaactg

SEQ ID NO: 4588095 - DNA, 25 bp, Homo sapien
gaactggaaagaaggctgtgcccgc

SEQ ID NO: 4588096 - DNA, 25 bp, Homo sapien
ctttcctacaaaatctggcttggca

SEQ ID NO: 4588097 - DNA, 25 bp, Homo sapien
tcctacaaaatctggcttggcagca

SEQ ID NO: 4588098 - DNA, 25 bp, Homo sapien
tttcctacaaaatctggcttggcag

SEQ ID NO: 4588099 - DNA, 25 bp, Homo sapien
ttcctacaaaatctggcttggcagc

SEQ ID NO: 4588100 - DNA, 25 bp, Homo sapien
gtttaatgaatctttctgaagcctc

SEQ ID NO: 4588101 - DNA, 25 bp, Homo sapien
aagcctccacgtccacccaggaggg

SEQ ID NO: 4588102 - DNA, 25 bp, Homo sapien
aatctttctgaagcctccacgtcca

SEQ ID NO: 4588103 - DNA, 25 bp, Homo sapien
taagctttggaaagtagtttaatga

SEQ ID NO: 4588104 - DNA, 25 bp, Homo sapien
gggacacgtccacgtccattgacac

SEQ ID NO: 4588105 - DNA, 25 bp, Homo sapien
tccggggacacgtccacgtccattg

SEQ ID NO: 4588106 - DNA, 25 bp, Homo sapien
ggggacacgtccacgtccattgaca

SEQ ID NO: 4588107 - DNA, 25 bp, Homo sapien
taatccggggacacgtccacgtcca

SEQ ID NO: 4588108 - DNA, 25 bp, Homo sapien
ggacctgggacgagcagacacagtg

SEQ ID NO: 4588109 - DNA, 25 bp, Homo sapien
tggagctcccgtctatttgccgggg

SEQ ID NO: 4588110 - DNA, 25 bp, Homo sapien
gctggagctcccgtctatttgccgg

SEQ ID NO: 4588111 - DNA, 25 bp, Homo sapien
gacctgggacgagcagacacagtgc

SEQ ID NO: 4588112 - DNA, 25 bp, Homo sapien
acagttgctgcgcatggagtgatag

SEQ ID NO: 4588113 - DNA, 25 bp, Homo sapien
gtgggtccgcgtccgtcgcttcgct

SEQ ID NO: 4588114 - DNA, 25 bp, Homo sapien
agtgataggatggtgggtccgcgtc

SEQ ID NO: 4588115 - DNA, 25 bp, Homo sapien
gctcactctgcgcagcacgcgccag

SEQ ID NO: 4588116 - DNA, 25 bp, Homo sapien
tttggatacgatgcctttccaggag

SEQ ID NO: 4588117 - DNA, 25 bp, Homo sapien
tgtttggatacgatgcctttccagg

SEQ ID NO: 4588118 - DNA, 25 bp, Homo sapien
tggatacgatgcctttccaggagcc

SEQ ID NO: 4588119 - DNA, 25 bp, Homo sapien
ctgtttggatacgatgcctttccag

SEQ ID NO: 4588120 - DNA, 25 bp, Homo sapien
tccccgagtagccagctcactggtg

SEQ ID NO: 4588121 - DNA, 25 bp, Homo sapien
ccccagcctgggacttcagtcttta

SEQ ID NO: 4588122 - DNA, 25 bp, Homo sapien
gacttgggcctgtgtttctgctgga

SEQ ID NO: 4588123 - DNA, 25 bp, Homo sapien
gcagacttgggcctgtgtttctgct

SEQ ID NO: 4588124 - DNA, 25 bp, Homo sapien
ctgaaggcaacaccagggactgggt

SEQ ID NO: 4588125 - DNA, 25 bp, Homo sapien
gactccagaggtccagatatcacag

SEQ ID NO: 4588126 - DNA, 25 bp, Homo sapien
tcgaagtgttgacccaggaaagcct

SEQ ID NO: 4588127 - DNA, 25 bp, Homo sapien
acagtatatgccaacgtgggccccg

SEQ ID NO: 4588128 - DNA, 25 bp, Homo sapien
tatgtatcactggagtgcacgcagc

SEQ ID NO: 4588129 - DNA, 25 bp, Homo sapien
ggaagtaacacactaccgccaggtg

SEQ ID NO: 4588130 - DNA, 25 bp, Homo sapien
tatggaagacccaggtgaccaactc

SEQ ID NO: 4588131 - DNA, 25 bp, Homo sapien
ccatatgcaaatgaagagccaggct

SEQ ID NO: 4588132 - DNA, 25 bp, Homo sapien
caagacaagctgaagacttctccag

SEQ ID NO: 4588133 - DNA, 25 bp, Homo sapien
acaagctgaagacttctccagttac

SEQ ID NO: 4588134 - DNA, 25 bp, Homo sapien
gacaagctgaagacttctccagtta

SEQ ID NO: 4588135 - DNA, 25 bp, Homo sapien
ctgtggagaggacaagacaagctga

SEQ ID NO: 4588136 - DNA, 25 bp, Homo sapien
acacgacacgggactgggataccca

SEQ ID NO: 4588137 - DNA, 25 bp, Homo sapien
tgtgagtctgcactaaaatgctgga

SEQ ID NO: 4588138 - DNA, 25 bp, Homo sapien
gctgtgccacctctctatatgggac

SEQ ID NO: 4588139 - DNA, 25 bp, Homo sapien
gagctgcttgtctgtcattgcatgg

SEQ ID NO: 4588140 - DNA, 25 bp, Homo sapien
gtgacaggcagtctttctgaagccc

SEQ ID NO: 4588141 - DNA, 25 bp, Homo sapien
agcaaagtaatgagggtggtcctgc

SEQ ID NO: 4588142 - DNA, 25 bp, Homo sapien
tggccacactcacaccttgctagat

SEQ ID NO: 4588143 - DNA, 25 bp, Homo sapien
agtggccacactcacaccttgctag

SEQ ID NO: 4588144 - DNA, 25 bp, Homo sapien
gccacactcacaccttgctagatgt

SEQ ID NO: 4588145 - DNA, 25 bp, Homo sapien
cagtggccacactcacaccttgcta

SEQ ID NO: 4588146 - DNA, 25 bp, Homo sapien
acctccaatgtgctcagatgcctgc

SEQ ID NO: 4588147 - DNA, 25 bp, Homo sapien
tgacctccaatgtgctcagatgcct

SEQ ID NO: 4588148 - DNA, 25 bp, Homo sapien
ccaatgtgctcagatgcctgccaca

SEQ ID NO: 4588149 - DNA, 25 bp, Homo sapien
cttccactgacctccaatgtgctca

SEQ ID NO: 4588150 - DNA, 25 bp, Homo sapien
tctattatggacactttgtataaat

SEQ ID NO: 4588151 - DNA, 25 bp, Homo sapien
gaaccactgcgccttgccttcattc

SEQ ID NO: 4588152 - DNA, 25 bp, Homo sapien
atctattatggacactttgtataaa

SEQ ID NO: 4588153 - DNA, 25 bp, Homo sapien
tctagacgaattctggaaccctgag

SEQ ID NO: 4588154 - DNA, 25 bp, Homo sapien
gcaggtcaggcagaatcaccaagcc

SEQ ID NO: 4588155 - DNA, 25 bp, Homo sapien
aagtaacagcctaccggtgtcctgg

SEQ ID NO: 4588156 - DNA, 25 bp, Homo sapien
tgagctccgacacattagtaccctg

SEQ ID NO: 4588157 - DNA, 25 bp, Homo sapien
tgtatacattttccagggacaaatt

SEQ ID NO: 4588158 - DNA, 25 bp, Homo sapien
cctaaggctagcatgagatgtatac

SEQ ID NO: 4588159 - DNA, 25 bp, Homo sapien
tgtacttctgaattgactcaggcag

SEQ ID NO: 4588160 - DNA, 25 bp, Homo sapien
ggctacgtatctcatcacagtccat

SEQ ID NO: 4588161 - DNA, 25 bp, Homo sapien
gatccacatggaatacttgtgctca

SEQ ID NO: 4588162 - DNA, 25 bp, Homo sapien
ctgactggtggcactcccgcttgct

SEQ ID NO: 4588163 - DNA, 25 bp, Homo sapien
actggtggcactcccgcttgctgat

SEQ ID NO: 4588164 - DNA, 25 bp, Homo sapien
tgtgctcagagacagccatgatctt

SEQ ID NO: 4588165 - DNA, 25 bp, Homo sapien
ttgggtgcatggcaatgctgccaga

SEQ ID NO: 4588166 - DNA, 25 bp, Homo sapien
tgggtgcatggcaatgctgccagac

SEQ ID NO: 4588167 - DNA, 25 bp, Homo sapien
caagatggtctcctggatgcagcaa

SEQ ID NO: 4588168 - DNA, 25 bp, Homo sapien
gaagaggacacggcagtggccatct

SEQ ID NO: 4588169 - DNA, 25 bp, Homo sapien
ttttcctggatgtcacgcacaatcc

SEQ ID NO: 4588170 - DNA, 25 bp, Homo sapien
cacattggtgtacaggtccttgcag

SEQ ID NO: 4588171 - DNA, 25 bp, Homo sapien
ggtgacctgaatggccctgtacttg

SEQ ID NO: 4588172 - DNA, 25 bp, Homo sapien
cacaggatgactgggagagggtggc

SEQ ID NO: 4588173 - DNA, 25 bp, Homo sapien
aggatcttcaccacgtagtcggcca

SEQ ID NO: 4588174 - DNA, 25 bp, Homo sapien
cccatggtgccaatggcactgacag

SEQ ID NO: 4588175 - DNA, 25 bp, Homo sapien
caatggagaggaacatgacttgagg

SEQ ID NO: 4588176 - DNA, 25 bp, Homo sapien
ggtgctagatcttccccatgtggtc

SEQ ID NO: 4588177 - DNA, 25 bp, Homo sapien
cacgtgcagcccattgcggaaggta

SEQ ID NO: 4588178 - DNA, 25 bp, Homo sapien
caacaatgagcaaggtgatttctgc

SEQ ID NO: 4588179 - DNA, 25 bp, Homo sapien
aaggtccccagctctgctaggtagt

SEQ ID NO: 4588180 - DNA, 25 bp, Homo sapien
taagaaaggctaagcaaccgcccaa

SEQ ID NO: 4588181 - DNA, 25 bp, Homo sapien
cacttccgcgttctgaaaaaagcaa

SEQ ID NO: 4588182 - DNA, 25 bp, Homo sapien
caatgtcgagtgtggtctggcacca

SEQ ID NO: 4588183 - DNA, 25 bp, Homo sapien
aattcgcagagtaggagtgggctcc

SEQ ID NO: 4588184 - DNA, 25 bp, Homo sapien
aggaacctagcaacaccccttgatg

SEQ ID NO: 4588185 - DNA, 25 bp, Homo sapien
tacaccgtgaaggattggctgaaac

SEQ ID NO: 4588186 - DNA, 25 bp, Homo sapien
ccttgatgccctgtagaggcctcca

SEQ ID NO: 4588187 - DNA, 25 bp, Homo sapien
aataggttccagttctgcggtgaaa

SEQ ID NO: 4588188 - DNA, 25 bp, Homo sapien
agctggtgaataggcggtgtctgat

SEQ ID NO: 4588189 - DNA, 25 bp, Homo sapien
tccagttctgcggtgaaatgcaggg

SEQ ID NO: 4588190 - DNA, 25 bp, Homo sapien
ggttccagttctgcggtgaaatgca

SEQ ID NO: 4588191 - DNA, 25 bp, Homo sapien
aaaactggttatatcaggtgtgcca

SEQ ID NO: 4588192 - DNA, 25 bp, Homo sapien
ttctattatgctggctggttctctg

SEQ ID NO: 4588193 - DNA, 25 bp, Homo sapien
actgtacacatggtaacaaaaaaag

SEQ ID NO: 4588194 - DNA, 25 bp, Homo sapien
accctaatcttctattatgctggct

SEQ ID NO: 4588195 - DNA, 25 bp, Homo sapien
gggtcacaattcattgcatagcatt

SEQ ID NO: 4588196 - DNA, 25 bp, Homo sapien
ctaaaactattatgagaccccacct

SEQ ID NO: 4588197 - DNA, 25 bp, Homo sapien
tgagagttatgtcccagccctgtgt

SEQ ID NO: 4588198 - DNA, 25 bp, Homo sapien
cctattcagcagtatccctttgaga

SEQ ID NO: 4588199 - DNA, 25 bp, Homo sapien
taaaaatgcacttctcttacctagt

SEQ ID NO: 4588200 - DNA, 25 bp, Homo sapien
gaacttgccattgttacaactggac

SEQ ID NO: 4588201 - DNA, 25 bp, Homo sapien
ctgggtactaattctaaggaagtca

SEQ ID NO: 4588202 - DNA, 25 bp, Homo sapien
gaagacacagcgatgtccatagaaa

SEQ ID NO: 4588203 - DNA, 25 bp, Homo sapien
cactacggaatgctagaagggtcca

SEQ ID NO: 4588204 - DNA, 25 bp, Homo sapien
gaaaagttccacacaagagagctcg

SEQ ID NO: 4588205 - DNA, 25 bp, Homo sapien
aaataaagatgggtgagatcacgcc

SEQ ID NO: 4588206 - DNA, 25 bp, Homo sapien
gataggaggaacacagaccatccag

SEQ ID NO: 4588207 - DNA, 25 bp, Homo sapien
aaaagaatgattgggcttccagcag

SEQ ID NO: 4588208 - DNA, 25 bp, Homo sapien
ttcctagccccaagagtaccatgtg

SEQ ID NO: 4588209 - DNA, 25 bp, Homo sapien
tgattgctggctcccactagaagct

SEQ ID NO: 4588210 - DNA, 25 bp, Homo sapien
ggtcttccctgagtccaacgcgatt

SEQ ID NO: 4588211 - DNA, 25 bp, Homo sapien
cctcggcgcttccagtaatgtcacg

SEQ ID NO: 4588212 - DNA, 25 bp, Homo sapien
tggccgcatggagtgagtactgtct

SEQ ID NO: 4588213 - DNA, 25 bp, Homo sapien
cacgcgcaggaaacgagaagggctt

SEQ ID NO: 4588214 - DNA, 25 bp, Homo sapien
tgagcgattctgagcctgcgcgaag

SEQ ID NO: 4588215 - DNA, 25 bp, Homo sapien
tgaagaacgagcttcgtagcccacg

SEQ ID NO: 4588216 - DNA, 25 bp, Homo sapien
aagaacgagcttcgtagcccacgga

SEQ ID NO: 4588217 - DNA, 25 bp, Homo sapien
catttgaagaacgagcttcgtagcc

SEQ ID NO: 4588218 - DNA, 25 bp, Homo sapien
cctcatttgaagaacgagcttcgta

SEQ ID NO: 4588219 - DNA, 25 bp, Homo sapien
gagtagacagtccagcttggcagga

SEQ ID NO: 4588220 - DNA, 25 bp, Homo sapien
tagtgcagtctggtagctgaaccgc

SEQ ID NO: 4588221 - DNA, 25 bp, Homo sapien
tccaattctgacttgtaagggtgcc

SEQ ID NO: 4588222 - DNA, 25 bp, Homo sapien
aagtattaagaagaaggccccactg

SEQ ID NO: 4588223 - DNA, 25 bp, Homo sapien
gctgctcactattgggaaaacgagg

SEQ ID NO: 4588224 - DNA, 25 bp, Homo sapien
tgctgctggagccattaagactacc

SEQ ID NO: 4588225 - DNA, 25 bp, Homo sapien
agtacacagtggaagggacctcacc

SEQ ID NO: 4588226 - DNA, 25 bp, Homo sapien
gcccttggtgatctagcaatgaaca

SEQ ID NO: 4588227 - DNA, 25 bp, Homo sapien
taagtgccaggttcagccagctaag

SEQ ID NO: 4588228 - DNA, 25 bp, Homo sapien
tccaggttgggtgaaatgagcgcta

SEQ ID NO: 4588229 - DNA, 25 bp, Homo sapien
gagcgctagcacaccagtcagataa

SEQ ID NO: 4588230 - DNA, 25 bp, Homo sapien
taatgactatcctagcagcacacag

SEQ ID NO: 4588231 - DNA, 25 bp, Homo sapien
catgttttggcattgaaatgccatt

SEQ ID NO: 4588232 - DNA, 25 bp, Homo sapien
ttggcattgaaatgccattatgtac

SEQ ID NO: 4588233 - DNA, 25 bp, Homo sapien
gacatgttttggcattgaaatgcca

SEQ ID NO: 4588234 - DNA, 25 bp, Homo sapien
gttttggcattgaaatgccattatg

SEQ ID NO: 4588235 - DNA, 25 bp, Homo sapien
caaattcgtgaagctgacaactaaa

SEQ ID NO: 4588236 - DNA, 25 bp, Homo sapien
aaaaacagggatgcacaaattcgtg

SEQ ID NO: 4588237 - DNA, 25 bp, Homo sapien
tctggagttgttctgttgtgcagaa

SEQ ID NO: 4588238 - DNA, 25 bp, Homo sapien
ggaactgttattcttatatctggag

SEQ ID NO: 4588239 - DNA, 25 bp, Homo sapien
tgccctcggactggaattagatttc

SEQ ID NO: 4588240 - DNA, 25 bp, Homo sapien
ctcccagtaatggtgccctcggact

SEQ ID NO: 4588241 - DNA, 25 bp, Homo sapien
tcccagatcctcctgtttacggaca

SEQ ID NO: 4588242 - DNA, 25 bp, Homo sapien
cagatcctcctgtttacggacatct

SEQ ID NO: 4588243 - DNA, 25 bp, Homo sapien
agtgtcgctgggtgacagctccctg

SEQ ID NO: 4588244 - DNA, 25 bp, Homo sapien
aagtgagtgtcgctgggtgacagct

SEQ ID NO: 4588245 - DNA, 25 bp, Homo sapien
agtgagtgtcgctgggtgacagctc

SEQ ID NO: 4588246 - DNA, 25 bp, Homo sapien
tgagtgtcgctgggtgacagctccc

SEQ ID NO: 4588247 - DNA, 25 bp, Homo sapien
acagccgtaagtccgtcttcagaaa

SEQ ID NO: 4588248 - DNA, 25 bp, Homo sapien
tgtccttgtttaggcgaaagtagct

SEQ ID NO: 4588249 - DNA, 25 bp, Homo sapien
agggatggcaagtgtccttgtttag

SEQ ID NO: 4588250 - DNA, 25 bp, Homo sapien
caagtgtccttgtttaggcgaaagt

SEQ ID NO: 4588251 - DNA, 25 bp, Homo sapien
ggactgtagctggctcgctcctcac

SEQ ID NO: 4588252 - DNA, 25 bp, Homo sapien
tggactgtagctggctcgctcctca

SEQ ID NO: 4588253 - DNA, 25 bp, Homo sapien
acatagataatgtagctccgccccg

SEQ ID NO: 4588254 - DNA, 25 bp, Homo sapien
agctgcaccacggactcgcaggtcg

SEQ ID NO: 4588255 - DNA, 25 bp, Homo sapien
gcaggtcgggatgcccacaacagac

SEQ ID NO: 4588256 - DNA, 25 bp, Homo sapien
ccatattgagggctcgcacatagat

SEQ ID NO: 4588257 - DNA, 25 bp, Homo sapien
aggattcaggttcccagactcccag

SEQ ID NO: 4588258 - DNA, 25 bp, Homo sapien
tcagctccacagtgtacgagtccac

SEQ ID NO: 4588259 - DNA, 25 bp, Homo sapien
tcagttacacccgaggcttctggac

SEQ ID NO: 4588260 - DNA, 25 bp, Homo sapien
ttctggactttcagcctgggtcagc

SEQ ID NO: 4588261 - DNA, 25 bp, Homo sapien
gtatttggcacaaggtttgtcactg

SEQ ID NO: 4588262 - DNA, 25 bp, Homo sapien
aaaattcatactgggtatttggcac

SEQ ID NO: 4588263 - DNA, 25 bp, Homo sapien
cctgttgtgagctgtgacccaaaat

SEQ ID NO: 4588264 - DNA, 25 bp, Homo sapien
atgtacactgcacgctcgctagagg

SEQ ID NO: 4588265 - DNA, 25 bp, Homo sapien
aacctgtggctgagttagggacctg

SEQ ID NO: 4588266 - DNA, 25 bp, Homo sapien
gagtataagctccagcacactcgga

SEQ ID NO: 4588267 - DNA, 25 bp, Homo sapien
tgatagctctccacagtgtcgtcgg

SEQ ID NO: 4588268 - DNA, 25 bp, Homo sapien
cactggccggtaggacagctgatag

SEQ ID NO: 4588269 - DNA, 25 bp, Homo sapien
ctgccgcgaagtacacacacaggtg

SEQ ID NO: 4588270 - DNA, 25 bp, Homo sapien
cgcgaagtacacacacaggtgagca

SEQ ID NO: 4588271 - DNA, 25 bp, Homo sapien
gcgaagtacacacacaggtgagcac

SEQ ID NO: 4588272 - DNA, 25 bp, Homo sapien
gccgcgaagtacacacacaggtgag

SEQ ID NO: 4588273 - DNA, 25 bp, Homo sapien
tcagagaaatccaaggtctggtctt

SEQ ID NO: 4588274 - DNA, 25 bp, Homo sapien
gagaaatccaaggtctggtcttcaa

SEQ ID NO: 4588275 - DNA, 25 bp, Homo sapien
gcagagatttccacgtctgtttttg

SEQ ID NO: 4588276 - DNA, 25 bp, Homo sapien
gctgtgcagagatttccacgtctgt

SEQ ID NO: 4588277 - DNA, 25 bp, Homo sapien
ctgttggtataaaaagacatgctga

SEQ ID NO: 4588278 - DNA, 25 bp, Homo sapien
ccagttgtccatataaggcttccag

SEQ ID NO: 4588279 - DNA, 25 bp, Homo sapien
tgagcaagtgtttccaagatctcgt

SEQ ID NO: 4588280 - DNA, 25 bp, Homo sapien
tgtttccatcagttctttgcaagta

SEQ ID NO: 4588281 - DNA, 25 bp, Homo sapien
tcctcgtgacacatctcctctattg

SEQ ID NO: 4588282 - DNA, 25 bp, Homo sapien
gtgatgaaaacctcctccaaatgat

SEQ ID NO: 4588283 - DNA, 25 bp, Homo sapien
ctccaaatgatttgcaaagttttcc

SEQ ID NO: 4588284 - DNA, 25 bp, Homo sapien
agtgatgaaaacctcctccaaatga

SEQ ID NO: 4588285 - DNA, 25 bp, Homo sapien
cagtgatgaaaacctcctccaaatg

SEQ ID NO: 4588286 - DNA, 25 bp, Homo sapien
tattggagtcttacaagtgacacag

SEQ ID NO: 4588287 - DNA, 25 bp, Homo sapien
gctggcacggccgtgtgtgtaccta

SEQ ID NO: 4588288 - DNA, 25 bp, Homo sapien
cattgagtgggatcacttcatgctc

SEQ ID NO: 4588289 - DNA, 25 bp, Homo sapien
agcattcatactcctcgctggcacg

SEQ ID NO: 4588290 - DNA, 25 bp, Homo sapien
gggtatgttttcatcaacaaactca

SEQ ID NO: 4588291 - DNA, 25 bp, Homo sapien
gatattctgaaacccctgttctggg

SEQ ID NO: 4588292 - DNA, 25 bp, Homo sapien
tctgaaacccctgttctgggtatgt

SEQ ID NO: 4588293 - DNA, 25 bp, Homo sapien
taaggaggatattctgaaacccctg

SEQ ID NO: 4588294 - DNA, 25 bp, Homo sapien
agtccatataagtggacaagttcat

SEQ ID NO: 4588295 - DNA, 25 bp, Homo sapien
caagtccatataagtggacaagttc

SEQ ID NO: 4588296 - DNA, 25 bp, Homo sapien
tcaagtccatataagtggacaagtt

SEQ ID NO: 4588297 - DNA, 25 bp, Homo sapien
tccatataagtggacaagttcatcc

SEQ ID NO: 4588298 - DNA, 25 bp, Homo sapien
ctgctcctcttgactcattggccat

SEQ ID NO: 4588299 - DNA, 25 bp, Homo sapien
tgctcctcttgactcattggccatt

SEQ ID NO: 4588300 - DNA, 25 bp, Homo sapien
ctcctcttgactcattggccatttc

SEQ ID NO: 4588301 - DNA, 25 bp, Homo sapien
gctcctcttgactcattggccattt

SEQ ID NO: 4588302 - DNA, 25 bp, Homo sapien
ttgggagtagacctgtccagcccca

SEQ ID NO: 4588303 - DNA, 25 bp, Homo sapien
gtggaaatccttgggagtagacctg

SEQ ID NO: 4588304 - DNA, 25 bp, Homo sapien
tctggaaagaggtgcagtctgtctt

SEQ ID NO: 4588305 - DNA, 25 bp, Homo sapien
gtcatacaggtccatgtggtaaaag

SEQ ID NO: 4588306 - DNA, 25 bp, Homo sapien
agatccttcctggacacttaatagt

SEQ ID NO: 4588307 - DNA, 25 bp, Homo sapien
tataagaaagatccttcctggacac

SEQ ID NO: 4588308 - DNA, 25 bp, Homo sapien
gaaagatccttcctggacacttaat

SEQ ID NO: 4588309 - DNA, 25 bp, Homo sapien
ttatataagaaagatccttcctgga

SEQ ID NO: 4588310 - DNA, 25 bp, Homo sapien
tgtcttagagaacgttccataggca

SEQ ID NO: 4588311 - DNA, 25 bp, Homo sapien
gctgtaccctacaagttttcatgtt

SEQ ID NO: 4588312 - DNA, 25 bp, Homo sapien
gcattccattgcgaccagaaaacat

SEQ ID NO: 4588313 - DNA, 25 bp, Homo sapien
tagtcattctatccattactgaaag

SEQ ID NO: 4588314 - DNA, 25 bp, Homo sapien
atgccacctgggaccacaaacagga

SEQ ID NO: 4588315 - DNA, 25 bp, Homo sapien
gtcttggtccatgccacctgggacc

SEQ ID NO: 4588316 - DNA, 25 bp, Homo sapien
ggtccatgccacctgggaccacaaa

SEQ ID NO: 4588317 - DNA, 25 bp, Homo sapien
catgtcttggtccatgccacctggg

SEQ ID NO: 4588318 - DNA, 25 bp, Homo sapien
ctctggaaatagaacctgagaggat

SEQ ID NO: 4588319 - DNA, 25 bp, Homo sapien
gggtcatgcttcttctctatgggcc

SEQ ID NO: 4588320 - DNA, 25 bp, Homo sapien
tccccagcttaggagcagttcctca

SEQ ID NO: 4588321 - DNA, 25 bp, Homo sapien
agcagcaggtctccccagcttagga

SEQ ID NO: 4588322 - DNA, 25 bp, Homo sapien
gaggacctggagttctgctagaaaa

SEQ ID NO: 4588323 - DNA, 25 bp, Homo sapien
aggacctggagttctgctagaaaat

SEQ ID NO: 4588324 - DNA, 25 bp, Homo sapien
gctaagcgtccataaatgcttcctt

SEQ ID NO: 4588325 - DNA, 25 bp, Homo sapien
ctgctaagcgtccataaatgcttcc

SEQ ID NO: 4588326 - DNA, 25 bp, Homo sapien
catgagggagggcaaccagttttac

SEQ ID NO: 4588327 - DNA, 25 bp, Homo sapien
tattcccacttgaaggcagttaggc

SEQ ID NO: 4588328 - DNA, 25 bp, Homo sapien
taagcggaagatccaggagagccaa

SEQ ID NO: 4588329 - DNA, 25 bp, Homo sapien
ccaagatctgcagttagtaagcgga

SEQ ID NO: 4588330 - DNA, 25 bp, Homo sapien
cttaaacaggccttccgtagccagg

SEQ ID NO: 4588331 - DNA, 25 bp, Homo sapien
tgctttggcaaacggctcctgatcc

SEQ ID NO: 4588332 - DNA, 25 bp, Homo sapien
caccctgacacgtaaactggatttc

SEQ ID NO: 4588333 - DNA, 25 bp, Homo sapien
cagagagatgccctaactagagctt

SEQ ID NO: 4588334 - DNA, 25 bp, Homo sapien
catgtactcaatagggccctgatga

SEQ ID NO: 4588335 - DNA, 25 bp, Homo sapien
ggcactgacgcggtttcgattctag

SEQ ID NO: 4588336 - DNA, 25 bp, Homo sapien
aaatgatttggctcggactgtcccg

SEQ ID NO: 4588337 - DNA, 25 bp, Homo sapien
tcttaagggcgtgaaccatgtactc

SEQ ID NO: 4588338 - DNA, 25 bp, Homo sapien
taccgttcccatgactgtaccttgg

SEQ ID NO: 4588339 - DNA, 25 bp, Homo sapien
tcctacccaagaacatggtatgtct

SEQ ID NO: 4588340 - DNA, 25 bp, Homo sapien
gggagaatagtggtctttgcaattt

SEQ ID NO: 4588341 - DNA, 25 bp, Homo sapien
tgtaccttggaagcacattttaggg

SEQ ID NO: 4588342 - DNA, 25 bp, Homo sapien
cggaagtgtcgctggcctaagagaa

SEQ ID NO: 4588343 - DNA, 25 bp, Homo sapien
tgtcaagacccatcggaagtgtcgc

SEQ ID NO: 4588344 - DNA, 25 bp, Homo sapien
gagatgagagtttcacacaccagcc

SEQ ID NO: 4588345 - DNA, 25 bp, Homo sapien
cacaccagcccataggtgggatgtc

SEQ ID NO: 4588346 - DNA, 25 bp, Homo sapien
gaatgcaagggtcctcatccaggtt

SEQ ID NO: 4588347 - DNA, 25 bp, Homo sapien
ttgtgtgattagtctgggcccaccc

SEQ ID NO: 4588348 - DNA, 25 bp, Homo sapien
gccaactatggtaacatagccacag

SEQ ID NO: 4588349 - DNA, 25 bp, Homo sapien
agtgccagcagcatcgtatctgacc

SEQ ID NO: 4588350 - DNA, 25 bp, Homo sapien
ggcatgtaacttaagaaggtgggaa

SEQ ID NO: 4588351 - DNA, 25 bp, Homo sapien
ggccatactctctttgacaaggcaa

SEQ ID NO: 4588352 - DNA, 25 bp, Homo sapien
agaggaaaagtcgtaccttacaatg

SEQ ID NO: 4588353 - DNA, 25 bp, Homo sapien
gaaatacaataataggagacgaaca

SEQ ID NO: 4588354 - DNA, 25 bp, Homo sapien
ctgtgtcccaggcatgctcacggct

SEQ ID NO: 4588355 - DNA, 25 bp, Homo sapien
tctgtgtcccaggcatgctcacggc

SEQ ID NO: 4588356 - DNA, 25 bp, Homo sapien
caaactagaaatagagggcataacc

SEQ ID NO: 4588357 - DNA, 25 bp, Homo sapien
agaagggttgtctcatatggtcaaa

SEQ ID NO: 4588358 - DNA, 25 bp, Homo sapien
tacacactactctcttatgcagagg

SEQ ID NO: 4588359 - DNA, 25 bp, Homo sapien
taaaaatctactatggaccaaccaa

SEQ ID NO: 4588360 - DNA, 25 bp, Homo sapien
tgcccggcctgcacaatatactagg

SEQ ID NO: 4588361 - DNA, 25 bp, Homo sapien
gaagtttagtccaaagctatggcga

SEQ ID NO: 4588362 - DNA, 25 bp, Homo sapien
tatggcgatccaaacaatgtggtac

SEQ ID NO: 4588363 - DNA, 25 bp, Homo sapien
tgtggtaccagtgctagaatgtgca

SEQ ID NO: 4588364 - DNA, 25 bp, Homo sapien
aattgggaagacctcgccgggcttg

SEQ ID NO: 4588365 - DNA, 25 bp, Homo sapien
attgggaagacctcgccgggcttgg

SEQ ID NO: 4588366 - DNA, 25 bp, Homo sapien
gaataagatagtggtgaatatttat

SEQ ID NO: 4588367 - DNA, 25 bp, Homo sapien
tacccgtccatgcagggtggcaggt

SEQ ID NO: 4588368 - DNA, 25 bp, Homo sapien
tagggaggcgcgtacttttgagcca

SEQ ID NO: 4588369 - DNA, 25 bp, Homo sapien
cataggaccctgaatgagtacaagg

SEQ ID NO: 4588370 - DNA, 25 bp, Homo sapien
tcagaaggaaaggagccgcagatag

SEQ ID NO: 4588371 - DNA, 25 bp, Homo sapien
ggccacatgtgaggtcccaccataa

SEQ ID NO: 4588372 - DNA, 25 bp, Homo sapien
gcctcttttgagtgcctgtgctaag

SEQ ID NO: 4588373 - DNA, 25 bp, Homo sapien
cagcgcgtcctgtggttggctctca

SEQ ID NO: 4588374 - DNA, 25 bp, Homo sapien
caaaatctagtgatgtctcaaggca

SEQ ID NO: 4588375 - DNA, 25 bp, Homo sapien
ttgcaacagctgtagagctggacac

SEQ ID NO: 4588376 - DNA, 25 bp, Homo sapien
tagctccagggttgcaacagctgta

SEQ ID NO: 4588377 - DNA, 25 bp, Homo sapien
ctcttagctccagggttgcaacagc

SEQ ID NO: 4588378 - DNA, 25 bp, Homo sapien
actcttcagtgcttggtgaactggg

SEQ ID NO: 4588379 - DNA, 25 bp, Homo sapien
cagtagcgtggatgcaggcaactcc

SEQ ID NO: 4588380 - DNA, 25 bp, Homo sapien
tatttgataaaaggagcctgatggc

SEQ ID NO: 4588381 - DNA, 25 bp, Homo sapien
aaggaacactgttgcaaccgtacaa

SEQ ID NO: 4588382 - DNA, 25 bp, Homo sapien
taaagcctctcgatgttgacagaga

SEQ ID NO: 4588383 - DNA, 25 bp, Homo sapien
acagaagaacgtcctagagctatct

SEQ ID NO: 4588384 - DNA, 25 bp, Homo sapien
gaagaacgtcctagagctatctggt

SEQ ID NO: 4588385 - DNA, 25 bp, Homo sapien
agaacgtcctagagctatctggtct

SEQ ID NO: 4588386 - DNA, 25 bp, Homo sapien
agaagaacgtcctagagctatctgg

SEQ ID NO: 4588387 - DNA, 25 bp, Homo sapien
ggcggggcctgggcctcggccagcc

SEQ ID NO: 4588388 - DNA, 25 bp, Homo sapien
gggcggggcctgggcctcggccagc

SEQ ID NO: 4588389 - DNA, 25 bp, Homo sapien
acacgcttgggactcacgggcgggg

SEQ ID NO: 4588390 - DNA, 25 bp, Homo sapien
gcttgggactcacgggcggggcctg

SEQ ID NO: 4588391 - DNA, 25 bp, Homo sapien
agccctcggcggaagtcatgcaggt

SEQ ID NO: 4588392 - DNA, 25 bp, Homo sapien
agctcttcaactccaccttcaggtg

SEQ ID NO: 4588393 - DNA, 25 bp, Homo sapien
aggtcgtcaatcttcccgtccagca

SEQ ID NO: 4588394 - DNA, 25 bp, Homo sapien
caggttttgattgtctctctctgcc

SEQ ID NO: 4588395 - DNA, 25 bp, Homo sapien
gagacatattcgcactctgacatga

SEQ ID NO: 4588396 - DNA, 25 bp, Homo sapien
tctagcttctcagagacatattcgc

SEQ ID NO: 4588397 - DNA, 25 bp, Homo sapien
tgacatgagctgaggtatgatttca

SEQ ID NO: 4588398 - DNA, 25 bp, Homo sapien
tttgttttcggagatctttcagctc

SEQ ID NO: 4588399 - DNA, 25 bp, Homo sapien
tgtgaaatgttcagctcccttgtgg

SEQ ID NO: 4588400 - DNA, 25 bp, Homo sapien
ttctgaggacagatgacaaacgcat

SEQ ID NO: 4588401 - DNA, 25 bp, Homo sapien
tggcagcaaaactcaacttctgagg

SEQ ID NO: 4588402 - DNA, 25 bp, Homo sapien
tctagcggcattaatttggcagcaa

SEQ ID NO: 4588403 - DNA, 25 bp, Homo sapien
tcctcttcagctgcgtgttcttctc

SEQ ID NO: 4588404 - DNA, 25 bp, Homo sapien
cactgcattgttcttccagctcatc

SEQ ID NO: 4588405 - DNA, 25 bp, Homo sapien
tgcattgttcttccagctcatcaat

SEQ ID NO: 4588406 - DNA, 25 bp, Homo sapien
ctgcattgttcttccagctcatcaa

SEQ ID NO: 4588407 - DNA, 25 bp, Homo sapien
actgcattgttcttccagctcatca

SEQ ID NO: 4588408 - DNA, 25 bp, Homo sapien
cctcatggtacagtggctgccgaaa

SEQ ID NO: 4588409 - DNA, 25 bp, Homo sapien
tctcaagggtttaagccagcagggt

SEQ ID NO: 4588410 - DNA, 25 bp, Homo sapien
cagggacgccagcttaacattagtc

SEQ ID NO: 4588411 - DNA, 25 bp, Homo sapien
tttgcacatgatgccttaccagagg

SEQ ID NO: 4588412 - DNA, 25 bp, Homo sapien
tgcggagccggtcattctcatcacg

SEQ ID NO: 4588413 - DNA, 25 bp, Homo sapien
tctcatcacggcagatggagaactg

SEQ ID NO: 4588414 - DNA, 25 bp, Homo sapien
cattgctctcccgaagggtctgcag

SEQ ID NO: 4588415 - DNA, 25 bp, Homo sapien
agtgctgtggtcagccgtgcattgc

SEQ ID NO: 4588416 - DNA, 25 bp, Homo sapien
tgtgttggctggaccggcgtgagag

SEQ ID NO: 4588417 - DNA, 25 bp, Homo sapien
ctcagacttcaggtgtgtgttggct

SEQ ID NO: 4588418 - DNA, 25 bp, Homo sapien
aatcttcagcttgtcattctcagac

SEQ ID NO: 4588419 - DNA, 25 bp, Homo sapien
gcaatcttcagcttgtcattctcag

SEQ ID NO: 4588420 - DNA, 25 bp, Homo sapien
agtagaagatggggtttcacgccca

SEQ ID NO: 4588421 - DNA, 25 bp, Homo sapien
aagatggggtttcacgcccagattc

SEQ ID NO: 4588422 - DNA, 25 bp, Homo sapien
tagaagatggggtttcacgcccaga

SEQ ID NO: 4588423 - DNA, 25 bp, Homo sapien
gaagatggggtttcacgcccagatt

SEQ ID NO: 4588424 - DNA, 25 bp, Homo sapien
aataacatcttattaggtatacatg

SEQ ID NO: 4588425 - DNA, 25 bp, Homo sapien
tatacctggggaactatcaggaagg

SEQ ID NO: 4588426 - DNA, 25 bp, Homo sapien
acatacaataacctctatacctggg

SEQ ID NO: 4588427 - DNA, 25 bp, Homo sapien
tctggagaaattcagatattaaact

SEQ ID NO: 4588428 - DNA, 25 bp, Homo sapien
gtctcgattttctcctgcgtcttgt

SEQ ID NO: 4588429 - DNA, 25 bp, Homo sapien
cagcctctattacacatcttgatcg

SEQ ID NO: 4588430 - DNA, 25 bp, Homo sapien
gaaggatacactgcagtttaaccaa

SEQ ID NO: 4588431 - DNA, 25 bp, Homo sapien
ttaaccaatttcctagtactggatg

SEQ ID NO: 4588432 - DNA, 25 bp, Homo sapien
tgatcgctacatattaccctgaagg

SEQ ID NO: 4588433 - DNA, 25 bp, Homo sapien
catttggacaaaggggttatctgag

SEQ ID NO: 4588434 - DNA, 25 bp, Homo sapien
cagcgtgtggttaatcatttccttc

SEQ ID NO: 4588435 - DNA, 25 bp, Homo sapien
tgataatttatcagcgtgtggttaa

SEQ ID NO: 4588436 - DNA, 25 bp, Homo sapien
ttatcagcgtgtggttaatcatttc

SEQ ID NO: 4588437 - DNA, 25 bp, Homo sapien
tgcactgtggataggaccaagttac

SEQ ID NO: 4588438 - DNA, 25 bp, Homo sapien
tgctgctcagaggaaaaccccaaac

SEQ ID NO: 4588439 - DNA, 25 bp, Homo sapien
tcagctgctgctcagaggaaaaccc

SEQ ID NO: 4588440 - DNA, 25 bp, Homo sapien
gctgctgctcagaggaaaaccccaa

SEQ ID NO: 4588441 - DNA, 25 bp, Homo sapien
cagctgctgctcagaggaaaacccc

SEQ ID NO: 4588442 - DNA, 25 bp, Homo sapien
gtgaaggtcatattcggtgtgattg

SEQ ID NO: 4588443 - DNA, 25 bp, Homo sapien
ggtcatattcggtgtgattgtgctg

SEQ ID NO: 4588444 - DNA, 25 bp, Homo sapien
tgttggctctgctgtcggcccactg

SEQ ID NO: 4588445 - DNA, 25 bp, Homo sapien
gttggctctgctgtcggcccactgc

SEQ ID NO: 4588446 - DNA, 25 bp, Homo sapien
gcaggcagtttctcataaggatggc

SEQ ID NO: 4588447 - DNA, 25 bp, Homo sapien
taaggatggcagtgattaactcagt

SEQ ID NO: 4588448 - DNA, 25 bp, Homo sapien
ctgcttcaggcaagtcttgtccaca

SEQ ID NO: 4588449 - DNA, 25 bp, Homo sapien
tgcttcaggcaagtcttgtccacag

SEQ ID NO: 4588450 - DNA, 25 bp, Homo sapien
agtctgcagacagcaggcgatccat

SEQ ID NO: 4588451 - DNA, 25 bp, Homo sapien
ttccagtctgcagacagcaggcgat

SEQ ID NO: 4588452 - DNA, 25 bp, Homo sapien
ctgattccagtctgcagacagcagg

SEQ ID NO: 4588453 - DNA, 25 bp, Homo sapien
cagtctgcagacagcaggcgatcca

SEQ ID NO: 4588454 - DNA, 25 bp, Homo sapien
acatgcgctcgggtggtgaagatgg

SEQ ID NO: 4588455 - DNA, 25 bp, Homo sapien
aagtaggaaacggtgaccgcctgct

SEQ ID NO: 4588456 - DNA, 25 bp, Homo sapien
atctggaagacatgcgctcgggtgg

SEQ ID NO: 4588457 - DNA, 25 bp, Homo sapien
taggaaacggtgaccgcctgcttgc

SEQ ID NO: 4588458 - DNA, 25 bp, Homo sapien
ctccttcctttgatgttcaatgttc

SEQ ID NO: 4588459 - DNA, 25 bp, Homo sapien
gagctgaataaacaccaattgctgt

SEQ ID NO: 4588460 - DNA, 25 bp, Homo sapien
ggcagaacgcttctttagacagaca

SEQ ID NO: 4588461 - DNA, 25 bp, Homo sapien
tatgaaaaccactcggcaaagaggc

SEQ ID NO: 4588462 - DNA, 25 bp, Homo sapien
aaagcagatgtttccggatggcaga

SEQ ID NO: 4588463 - DNA, 25 bp, Homo sapien
tagaacttctgaatcatctgtactt

SEQ ID NO: 4588464 - DNA, 25 bp, Homo sapien
cagaagggcttctgctgctttcctt

SEQ ID NO: 4588465 - DNA, 25 bp, Homo sapien
tctgaatcatctgtactttcacaca

SEQ ID NO: 4588466 - DNA, 25 bp, Homo sapien
cttctagaacttctgaatcatctgt

SEQ ID NO: 4588467 - DNA, 25 bp, Homo sapien
tgtgatccgcccacctcagcctccc

SEQ ID NO: 4588468 - DNA, 25 bp, Homo sapien
tgtgcccagccaatatccaagtgat

SEQ ID NO: 4588469 - DNA, 25 bp, Homo sapien
tttcaaactcctgaccttgtgatcc

SEQ ID NO: 4588470 - DNA, 25 bp, Homo sapien
caccatattgaccaggccggtttca

SEQ ID NO: 4588471 - DNA, 25 bp, Homo sapien
ctgatatgagggtatgacttggaaa

SEQ ID NO: 4588472 - DNA, 25 bp, Homo sapien
tcttaatattgactagatacggttt

SEQ ID NO: 4588473 - DNA, 25 bp, Homo sapien
agggtatgacttggaaacattattc

SEQ ID NO: 4588474 - DNA, 25 bp, Homo sapien
tattcttaatattgactagatacgg

SEQ ID NO: 4588475 - DNA, 25 bp, Homo sapien
cgcgcccagccacaagaaacccact

SEQ ID NO: 4588476 - DNA, 25 bp, Homo sapien
gcgcccagccacaagaaacccactt

SEQ ID NO: 4588477 - DNA, 25 bp, Homo sapien
acagtcaagctttgcatgccttagg

SEQ ID NO: 4588478 - DNA, 25 bp, Homo sapien
tgaagaagcctgagctacacggaga

SEQ ID NO: 4588479 - DNA, 25 bp, Homo sapien
caacagcagcactctatcaggccat

SEQ ID NO: 4588480 - DNA, 25 bp, Homo sapien
gagagtctgacctactgcctacagc

SEQ ID NO: 4588481 - DNA, 25 bp, Homo sapien
tcacagaggttaataaacttacaga

SEQ ID NO: 4588482 - DNA, 25 bp, Homo sapien
gtcatgctggtgagaattttaatgc

SEQ ID NO: 4588483 - DNA, 25 bp, Homo sapien
acagatctcattactcaaagaggtc

SEQ ID NO: 4588484 - DNA, 25 bp, Homo sapien
aaagaggtcatgctggtgagaattt

SEQ ID NO: 4588485 - DNA, 25 bp, Homo sapien
gagaaaccacttaactttgtccaca

SEQ ID NO: 4588486 - DNA, 25 bp, Homo sapien
ccacttaactttgtccacacttgca

SEQ ID NO: 4588487 - DNA, 25 bp, Homo sapien
aaccacttaactttgtccacacttg

SEQ ID NO: 4588488 - DNA, 25 bp, Homo sapien
ttaactttgtccacacttgcacctc

SEQ ID NO: 4588489 - DNA, 25 bp, Homo sapien
aaaagcaacgagttggcagaccggt

SEQ ID NO: 4588490 - DNA, 25 bp, Homo sapien
gttggcagaccggttttcttgttga

SEQ ID NO: 4588491 - DNA, 25 bp, Homo sapien
ttcccgatcctctggctggcgacat

SEQ ID NO: 4588492 - DNA, 25 bp, Homo sapien
tcttgttgatatacatgggtcagct

SEQ ID NO: 4588493 - DNA, 25 bp, Homo sapien
ttaaagcagaattactcggccctga

SEQ ID NO: 4588494 - DNA, 25 bp, Homo sapien
caatttgagcagctgggtctcggtc

SEQ ID NO: 4588495 - DNA, 25 bp, Homo sapien
catgggtgcttcctgcttgcaaaga

SEQ ID NO: 4588496 - DNA, 25 bp, Homo sapien
ttttgtatacatccctgccaactgg

SEQ ID NO: 4588497 - DNA, 25 bp, Homo sapien
gctccgacggggcctctcgcgctcg

SEQ ID NO: 4588498 - DNA, 25 bp, Homo sapien
gcggccgctccgacggggcctctcg

SEQ ID NO: 4588499 - DNA, 25 bp, Homo sapien
ccgacggggcctctcgcgctcgctc

SEQ ID NO: 4588500 - DNA, 25 bp, Homo sapien
cggccgctccgacggggcctctcgc

SEQ ID NO: 4588501 - DNA, 25 bp, Homo sapien
cgctccattccgcggggctgcgcgg

SEQ ID NO: 4588502 - DNA, 25 bp, Homo sapien
gccgctccattccgcggggctgcgc

SEQ ID NO: 4588503 - DNA, 25 bp, Homo sapien
ccgctccattccgcggggctgcgcg

SEQ ID NO: 4588504 - DNA, 25 bp, Homo sapien
ggccctggcgcagtgccatcaacat

SEQ ID NO: 4588505 - DNA, 25 bp, Homo sapien
gcgcagtcgccgcttttctcccggg

SEQ ID NO: 4588506 - DNA, 25 bp, Homo sapien
ggccgcggcagcgagccaagaggcg

SEQ ID NO: 4588507 - DNA, 25 bp, Homo sapien
ggccacccagtcctcggtgccggcc

SEQ ID NO: 4588508 - DNA, 25 bp, Homo sapien
tctcacttgccaggcaggcattcag

SEQ ID NO: 4588509 - DNA, 25 bp, Homo sapien
cctggtacatacttcagcacataca

SEQ ID NO: 4588510 - DNA, 25 bp, Homo sapien
tttacactacaacctgcaacctggt

SEQ ID NO: 4588511 - DNA, 25 bp, Homo sapien
catactatgtctataggtatatcga

SEQ ID NO: 4588512 - DNA, 25 bp, Homo sapien
gttgggaccactctgtgaaagacct

SEQ ID NO: 4588513 - DNA, 25 bp, Homo sapien
gaccagatgaatagcccagccagct

SEQ ID NO: 4588514 - DNA, 25 bp, Homo sapien
ggactttggacctcactggctgcct

SEQ ID NO: 4588515 - DNA, 25 bp, Homo sapien
gagacacggaggcattaaaggccat

SEQ ID NO: 4588516 - DNA, 25 bp, Homo sapien
cagagatcaccctataacagaacaa

SEQ ID NO: 4588517 - DNA, 25 bp, Homo sapien
agcaacacagttccctatccagagg

SEQ ID NO: 4588518 - DNA, 25 bp, Homo sapien
tgcagtgaaaagtctccgtctcacc

SEQ ID NO: 4588519 - DNA, 25 bp, Homo sapien
tacccagatggtagtattctataca

SEQ ID NO: 4588520 - DNA, 25 bp, Homo sapien
tctgaagacatgactagctgcacgt

SEQ ID NO: 4588521 - DNA, 25 bp, Homo sapien
ggtcttgaagcaacgctgtacacag

SEQ ID NO: 4588522 - DNA, 25 bp, Homo sapien
gatctacgattcttatggctgccta

SEQ ID NO: 4588523 - DNA, 25 bp, Homo sapien
tgctatttataaagggcggatgcgg

SEQ ID NO: 4588524 - DNA, 25 bp, Homo sapien
gatactgacgactgaagctggagca

SEQ ID NO: 4588525 - DNA, 25 bp, Homo sapien
taacaaaaacgggtgcatagcctgg

SEQ ID NO: 4588526 - DNA, 25 bp, Homo sapien
cagctattttggatcacggtggtgc

SEQ ID NO: 4588527 - DNA, 25 bp, Homo sapien
gagacaggtatttcatgcaagggac

SEQ ID NO: 4588528 - DNA, 25 bp, Homo sapien
gacggcgacgttttcgactgcccag

SEQ ID NO: 4588529 - DNA, 25 bp, Homo sapien
tcaaaggagcttaatagacggcgac

SEQ ID NO: 4588530 - DNA, 25 bp, Homo sapien
cacctcatcgagctctgggcgttgt

SEQ ID NO: 4588531 - DNA, 25 bp, Homo sapien
tgaaagtgcatggagggcatcatcc

SEQ ID NO: 4588532 - DNA, 25 bp, Homo sapien
aatgaagaagttatcacaatagctt

SEQ ID NO: 4588533 - DNA, 25 bp, Homo sapien
tgaagaagttatcacaatagcttcc

SEQ ID NO: 4588534 - DNA, 25 bp, Homo sapien
ctaatgaagaagttatcacaatagc

SEQ ID NO: 4588535 - DNA, 25 bp, Homo sapien
gaagaagttatcacaatagcttcca

SEQ ID NO: 4588536 - DNA, 25 bp, Homo sapien
gaggatcaccgaagcccaagacttc

SEQ ID NO: 4588537 - DNA, 25 bp, Homo sapien
gatcaccgaagcccaagacttccag

SEQ ID NO: 4588538 - DNA, 25 bp, Homo sapien
tcaccgaagcccaagacttccagcc

SEQ ID NO: 4588539 - DNA, 25 bp, Homo sapien
aggaggatcaccgaagcccaagact

SEQ ID NO: 4588540 - DNA, 25 bp, Homo sapien
ctgccgaagctgttccaaagtttga

SEQ ID NO: 4588541 - DNA, 25 bp, Homo sapien
tcaggaatacctgaaacgccctcct

SEQ ID NO: 4588542 - DNA, 25 bp, Homo sapien
gagatgtttgctagtagattcacag

SEQ ID NO: 4588543 - DNA, 25 bp, Homo sapien
tcagaatgactgacactgccgaagc

SEQ ID NO: 4588544 - DNA, 25 bp, Homo sapien
ttttattgttgtaggttgcaagaca

SEQ ID NO: 4588545 - DNA, 25 bp, Homo sapien
caatcagtggcatggacgatcctgg

SEQ ID NO: 4588546 - DNA, 25 bp, Homo sapien
catggacgatcctggggtaacaact

SEQ ID NO: 4588547 - DNA, 25 bp, Homo sapien
gttgtaggttgcaagacaacagaca

SEQ ID NO: 4588548 - DNA, 25 bp, Homo sapien
tggttgggataagggtacacatcat

SEQ ID NO: 4588549 - DNA, 25 bp, Homo sapien
ctaacaacatagcaggtcaaaattc

SEQ ID NO: 4588550 - DNA, 25 bp, Homo sapien
agtgactatggtactttgtgattcc

SEQ ID NO: 4588551 - DNA, 25 bp, Homo sapien
ccacacttgagtctctttttagagg

SEQ ID NO: 4588552 - DNA, 25 bp, Homo sapien
aaattgatttaagcccagtagcaga

SEQ ID NO: 4588553 - DNA, 25 bp, Homo sapien
tagtagattacaacactggagccca

SEQ ID NO: 4588554 - DNA, 25 bp, Homo sapien
tagagatcccttgacttgtgcacat

SEQ ID NO: 4588555 - DNA, 25 bp, Homo sapien
aagtcttcagtcagaacagctggcc

SEQ ID NO: 4588556 - DNA, 25 bp, Homo sapien
ggacaagtcgcataattttcaccag

SEQ ID NO: 4588557 - DNA, 25 bp, Homo sapien
tgcttaggtgcaagaaggacaagtc

SEQ ID NO: 4588558 - DNA, 25 bp, Homo sapien
taaagctgttctaattgctaatggc

SEQ ID NO: 4588559 - DNA, 25 bp, Homo sapien
tcagggacacgagagccctatgtat

SEQ ID NO: 4588560 - DNA, 25 bp, Homo sapien
ggggatttggcagggaaggtcagca

SEQ ID NO: 4588561 - DNA, 25 bp, Homo sapien
gggatttggcagggaaggtcagcag

SEQ ID NO: 4588562 - DNA, 25 bp, Homo sapien
taaccctgagtggacacagcgcatg

SEQ ID NO: 4588563 - DNA, 25 bp, Homo sapien
ggctggctgataccataggtccatc

SEQ ID NO: 4588564 - DNA, 25 bp, Homo sapien
tctgtggctggctgataccataggt

SEQ ID NO: 4588565 - DNA, 25 bp, Homo sapien
gtggctggctgataccataggtcca

SEQ ID NO: 4588566 - DNA, 25 bp, Homo sapien
tgtggctggctgataccataggtcc

SEQ ID NO: 4588567 - DNA, 25 bp, Homo sapien
tgcccagcctagatccattttcaga

SEQ ID NO: 4588568 - DNA, 25 bp, Homo sapien
cactggctacgtggatttctgaaac

SEQ ID NO: 4588569 - DNA, 25 bp, Homo sapien
aattagctccttgccaattgcccag

SEQ ID NO: 4588570 - DNA, 25 bp, Homo sapien
cagaatgttctcactagcagatccc

SEQ ID NO: 4588571 - DNA, 25 bp, Homo sapien
ccagggcccagatgatgaaaagtac

SEQ ID NO: 4588572 - DNA, 25 bp, Homo sapien
gactgcctagccagtactcacttga

SEQ ID NO: 4588573 - DNA, 25 bp, Homo sapien
tcttgggcactaggtcactgggtct

SEQ ID NO: 4588574 - DNA, 25 bp, Homo sapien
gcttctacagcaggtcaaggtgccc

SEQ ID NO: 4588575 - DNA, 25 bp, Homo sapien
tgcctccagggtcccggttcacaag

SEQ ID NO: 4588576 - DNA, 25 bp, Homo sapien
acgctggagcgcagttcgcagttgt

SEQ ID NO: 4588577 - DNA, 25 bp, Homo sapien
agcgcagttcgcagttgtgcgatct

SEQ ID NO: 4588578 - DNA, 25 bp, Homo sapien
tccagggtcccggttcacaagcaat

SEQ ID NO: 4588579 - DNA, 25 bp, Homo sapien
catttgcaggcagtatatggcacag

SEQ ID NO: 4588580 - DNA, 25 bp, Homo sapien
tggacaaagcgcacaactgcagatc

SEQ ID NO: 4588581 - DNA, 25 bp, Homo sapien
tacagcacacatggcaatggtcttg

SEQ ID NO: 4588582 - DNA, 25 bp, Homo sapien
cccggcctggacttcttatatatga

SEQ ID NO: 4588583 - DNA, 25 bp, Homo sapien
tgctgattatttaagttattagagg

SEQ ID NO: 4588584 - DNA, 25 bp, Homo sapien
aggatctttggagattcataaaaac

SEQ ID NO: 4588585 - DNA, 25 bp, Homo sapien
ttaaggatctttggagattcataaa

SEQ ID NO: 4588586 - DNA, 25 bp, Homo sapien
gctgattatttaagttattagagga

SEQ ID NO: 4588587 - DNA, 25 bp, Homo sapien
tttaattacaagtcatgatttttct

SEQ ID NO: 4588588 - DNA, 25 bp, Homo sapien
ttctgtcacttgtaaactggattag

SEQ ID NO: 4588589 - DNA, 25 bp, Homo sapien
ttagaaggcaatccccagaattcca

SEQ ID NO: 4588590 - DNA, 25 bp, Homo sapien
aaatctaaggtaagactacaaagca

SEQ ID NO: 4588591 - DNA, 25 bp, Homo sapien
tctagttgccagcttgcatggtaca

SEQ ID NO: 4588592 - DNA, 25 bp, Homo sapien
atttgggttctagttgccagcttgc

SEQ ID NO: 4588593 - DNA, 25 bp, Homo sapien
caagtagtccaaggatttgggttct

SEQ ID NO: 4588594 - DNA, 25 bp, Homo sapien
gcttgcatggtacaatcttgagtaa

SEQ ID NO: 4588595 - DNA, 25 bp, Homo sapien
gctctgttattttacaacgccatga

SEQ ID NO: 4588596 - DNA, 25 bp, Homo sapien
gaaaggtgttaaatcaggtcatctt

SEQ ID NO: 4588597 - DNA, 25 bp, Homo sapien
ctggatataggaaatcaaaggcccc

SEQ ID NO: 4588598 - DNA, 25 bp, Homo sapien
gaaatcagagtaacatgttccaggc

SEQ ID NO: 4588599 - DNA, 25 bp, Homo sapien
ctgcgcccggcctcatttcttgctt

SEQ ID NO: 4588600 - DNA, 25 bp, Homo sapien
tcggggggagagagtttcactcttg

SEQ ID NO: 4588601 - DNA, 25 bp, Homo sapien
gccactgcgcccggcctcatttctt

SEQ ID NO: 4588602 - DNA, 25 bp, Homo sapien
cactgcgcccggcctcatttcttgc

SEQ ID NO: 4588603 - DNA, 25 bp, Homo sapien
ttctccaagatctcttctggagttg

SEQ ID NO: 4588604 - DNA, 25 bp, Homo sapien
caccaccttttcacgagatttacca

SEQ ID NO: 4588605 - DNA, 25 bp, Homo sapien
ctccaagatctcttctggagttgta

SEQ ID NO: 4588606 - DNA, 25 bp, Homo sapien
tagaagccaaaagcttcaccacctt

SEQ ID NO: 4588607 - DNA, 25 bp, Homo sapien
agtgagaggtagcagtgcgtcaaga

SEQ ID NO: 4588608 - DNA, 25 bp, Homo sapien
caggagtgagaggtagcagtgcgtc

SEQ ID NO: 4588609 - DNA, 25 bp, Homo sapien
tgagaggtagcagtgcgtcaagatt

SEQ ID NO: 4588610 - DNA, 25 bp, Homo sapien
ggagtgagaggtagcagtgcgtcaa

SEQ ID NO: 4588611 - DNA, 25 bp, Homo sapien
gaggtgctgcaatagctacatttac

SEQ ID NO: 4588612 - DNA, 25 bp, Homo sapien
gaccttggaaagataccgacagagc

SEQ ID NO: 4588613 - DNA, 25 bp, Homo sapien
tgatggaggtgctgcaatagctaca

SEQ ID NO: 4588614 - DNA, 25 bp, Homo sapien
gataccgacagagctcagcattagc

SEQ ID NO: 4588615 - DNA, 25 bp, Homo sapien
gacattttgtaaaagagtttttgca

SEQ ID NO: 4588616 - DNA, 25 bp, Homo sapien
tcttcatgaagcaaggacattttgt

SEQ ID NO: 4588617 - DNA, 25 bp, Homo sapien
catgaagcaaggacattttgtaaaa

SEQ ID NO: 4588618 - DNA, 25 bp, Homo sapien
tttcttcatgaagcaaggacatttt

SEQ ID NO: 4588619 - DNA, 25 bp, Homo sapien
gagccaggttttgcatggatggcta

SEQ ID NO: 4588620 - DNA, 25 bp, Homo sapien
gacgcatcctttaggatcaactgcc

SEQ ID NO: 4588621 - DNA, 25 bp, Homo sapien
tatggtgacgcatcctttaggatca

SEQ ID NO: 4588622 - DNA, 25 bp, Homo sapien
catggatggctatggtgacgcatcc

SEQ ID NO: 4588623 - DNA, 25 bp, Homo sapien
gggaggaagtggtctctctggttcc

SEQ ID NO: 4588624 - DNA, 25 bp, Homo sapien
cattgtatctcatgcagtcggagct

SEQ ID NO: 4588625 - DNA, 25 bp, Homo sapien
taggcacagaacattaccccacagg

SEQ ID NO: 4588626 - DNA, 25 bp, Homo sapien
caaactaggctcatcagtggtgtcc

SEQ ID NO: 4588627 - DNA, 25 bp, Homo sapien
gagaaagcagaatacagcctcctgg

SEQ ID NO: 4588628 - DNA, 25 bp, Homo sapien
gtcgtcgcaccagccttcttaggca

SEQ ID NO: 4588629 - DNA, 25 bp, Homo sapien
tcgtcgcaccagccttcttaggcat

SEQ ID NO: 4588630 - DNA, 25 bp, Homo sapien
cttggtcgtcgcaccagccttctta

SEQ ID NO: 4588631 - DNA, 25 bp, Homo sapien
tggtcgtcgcaccagccttcttagg

SEQ ID NO: 4588632 - DNA, 25 bp, Homo sapien
gcctcagcccgctgcggagccgcag

SEQ ID NO: 4588633 - DNA, 25 bp, Homo sapien
aagccgagcggagccccgagtattg

SEQ ID NO: 4588634 - DNA, 25 bp, Homo sapien
tcggcgcaaagaagccgagcggagc

SEQ ID NO: 4588635 - DNA, 25 bp, Homo sapien
cccgagtattgggtgttgcccgaag

SEQ ID NO: 4588636 - DNA, 25 bp, Homo sapien
tccaggggatgtcccaaagttagta

SEQ ID NO: 4588637 - DNA, 25 bp, Homo sapien
ggatctctttacaatgtcagagcag

SEQ ID NO: 4588638 - DNA, 25 bp, Homo sapien
cagaaagcgtatttttcagcaggag

SEQ ID NO: 4588639 - DNA, 25 bp, Homo sapien
cacagctgtaacactgactaatggg

SEQ ID NO: 4588640 - DNA, 25 bp, Homo sapien
gagacctcagccaccaatataccta

SEQ ID NO: 4588641 - DNA, 25 bp, Homo sapien
tgatggctgttcacccagtcgtcat

SEQ ID NO: 4588642 - DNA, 25 bp, Homo sapien
cacagagagacaggtatagtggtgc

SEQ ID NO: 4588643 - DNA, 25 bp, Homo sapien
tgcagtttagtgacagggaatccag

SEQ ID NO: 4588644 - DNA, 25 bp, Homo sapien
cttgctgtgaaggattatcacaatg

SEQ ID NO: 4588645 - DNA, 25 bp, Homo sapien
atagttaagcctatttgcccatctc

SEQ ID NO: 4588646 - DNA, 25 bp, Homo sapien
taacaacaagatacttcaaaccacc

SEQ ID NO: 4588647 - DNA, 25 bp, Homo sapien
tctgtaggaatactgacccatctct

SEQ ID NO: 4588648 - DNA, 25 bp, Homo sapien
gaccctaagtcagccaatctatgaa

SEQ ID NO: 4588649 - DNA, 25 bp, Homo sapien
tgcactactttcttcaatccttttg

SEQ ID NO: 4588650 - DNA, 25 bp, Homo sapien
aacagtcttgcttgcagcaggtgtc

SEQ ID NO: 4588651 - DNA, 25 bp, Homo sapien
caatccttttgtgccatagtgggaa

SEQ ID NO: 4588652 - DNA, 25 bp, Homo sapien
tgaagtgccattattattgccaggg

SEQ ID NO: 4588653 - DNA, 25 bp, Homo sapien
ttcccccctctttataaatggctca

SEQ ID NO: 4588654 - DNA, 25 bp, Homo sapien
cctctttataaatggctcagctgtc

SEQ ID NO: 4588655 - DNA, 25 bp, Homo sapien
cccctctttataaatggctcagctg

SEQ ID NO: 4588656 - DNA, 25 bp, Homo sapien
ctcagctgtcagtgactctcagctt

SEQ ID NO: 4588657 - DNA, 25 bp, Homo sapien
cattcaagaggaaaccatctggaac

SEQ ID NO: 4588658 - DNA, 25 bp, Homo sapien
ctggaacatagtgcatgactcttac

SEQ ID NO: 4588659 - DNA, 25 bp, Homo sapien
gaaaccatctggaacatagtgcatg

SEQ ID NO: 4588660 - DNA, 25 bp, Homo sapien
caagaggaaaccatctggaacatag

SEQ ID NO: 4588661 - DNA, 25 bp, Homo sapien
aaagccggtatcattctgtcccagg

SEQ ID NO: 4588662 - DNA, 25 bp, Homo sapien
tgtcccatcacaactaaagccggta

SEQ ID NO: 4588663 - DNA, 25 bp, Homo sapien
cattgggcaggatctctatgggttc

SEQ ID NO: 4588664 - DNA, 25 bp, Homo sapien
gaccctgaatgtgttagctgtccca

SEQ ID NO: 4588665 - DNA, 25 bp, Homo sapien
tatagagatccttctattaactgtg

SEQ ID NO: 4588666 - DNA, 25 bp, Homo sapien
atagatccatacaagccaaatccaa

SEQ ID NO: 4588667 - DNA, 25 bp, Homo sapien
agccaaatccaactatagagatcct

SEQ ID NO: 4588668 - DNA, 25 bp, Homo sapien
ttgataatctgtagggccatgaata

SEQ ID NO: 4588669 - DNA, 25 bp, Homo sapien
atactcccaactcattgtcctgagt

SEQ ID NO: 4588670 - DNA, 25 bp, Homo sapien
tactcccaactcattgtcctgagtt

SEQ ID NO: 4588671 - DNA, 25 bp, Homo sapien
ctggtctcagatgatactcccaact

SEQ ID NO: 4588672 - DNA, 25 bp, Homo sapien
ggtctcagatgatactcccaactca

SEQ ID NO: 4588673 - DNA, 25 bp, Homo sapien
ccccataaggtataacgatcatttt

SEQ ID NO: 4588674 - DNA, 25 bp, Homo sapien
ggcacagtcttaaggctttaggtaa

SEQ ID NO: 4588675 - DNA, 25 bp, Homo sapien
actgttactatttgacacaggatct

SEQ ID NO: 4588676 - DNA, 25 bp, Homo sapien
tgatagtgacaaactccatttatat

SEQ ID NO: 4588677 - DNA, 25 bp, Homo sapien
catgggatcagtaaggatctaactt

SEQ ID NO: 4588678 - DNA, 25 bp, Homo sapien
aacatttgctcatatgcttactgcc

SEQ ID NO: 4588679 - DNA, 25 bp, Homo sapien
gatacatgccaagtttagagaggtc

SEQ ID NO: 4588680 - DNA, 25 bp, Homo sapien
tacatcaatacaggtacatgggatc

SEQ ID NO: 4588681 - DNA, 25 bp, Homo sapien
attcttttaatgctcaaggaaacta

SEQ ID NO: 4588682 - DNA, 25 bp, Homo sapien
tatgcttccttcaataattaaccaa

SEQ ID NO: 4588683 - DNA, 25 bp, Homo sapien
aggaaactaactgttccttgaggat

SEQ ID NO: 4588684 - DNA, 25 bp, Homo sapien
gtctagtctgatgcctatataaggg

SEQ ID NO: 4588685 - DNA, 25 bp, Homo sapien
tccttccatggtaattggtctattc

SEQ ID NO: 4588686 - DNA, 25 bp, Homo sapien
attccttccatggtaattggtctat

SEQ ID NO: 4588687 - DNA, 25 bp, Homo sapien
ttccttccatggtaattggtctatt

SEQ ID NO: 4588688 - DNA, 25 bp, Homo sapien
gatccattccatcaacatgttcaat

SEQ ID NO: 4588689 - DNA, 25 bp, Homo sapien
tcttttaaaggaaccagcttatgga

SEQ ID NO: 4588690 - DNA, 25 bp, Homo sapien
tgtgaaaaccggcactgattctatt

SEQ ID NO: 4588691 - DNA, 25 bp, Homo sapien
taatagtcccacatccaaccagatt

SEQ ID NO: 4588692 - DNA, 25 bp, Homo sapien
gtgatgcatgccttacaggttactc

SEQ ID NO: 4588693 - DNA, 25 bp, Homo sapien
catgccttacaggttactcaggagg

SEQ ID NO: 4588694 - DNA, 25 bp, Homo sapien
aaaatcatgtaacagctgggcgtgg

SEQ ID NO: 4588695 - DNA, 25 bp, Homo sapien
tctacttgctggaatctattgatgc

SEQ ID NO: 4588696 - DNA, 25 bp, Homo sapien
taaccccagcggctttctacttgct

SEQ ID NO: 4588697 - DNA, 25 bp, Homo sapien
catcttggtcggtcaatgtattcaa

SEQ ID NO: 4588698 - DNA, 25 bp, Homo sapien
gattcgatcactcgtcccactgtaa

SEQ ID NO: 4588699 - DNA, 25 bp, Homo sapien
tggaattcacttaacgtaaattcaa

SEQ ID NO: 4588700 - DNA, 25 bp, Homo sapien
ttgatttcaattcctaactttggaa

SEQ ID NO: 4588701 - DNA, 25 bp, Homo sapien
aaagcattaattagtcaaaacttag

SEQ ID NO: 4588702 - DNA, 25 bp, Homo sapien
caaatctagaggacgtaacataaaa

SEQ ID NO: 4588703 - DNA, 25 bp, Homo sapien
acaaatctgcacgttaccccgaatt

SEQ ID NO: 4588704 - DNA, 25 bp, Homo sapien
agtgatgcaatcaactgtacctcaa

SEQ ID NO: 4588705 - DNA, 25 bp, Homo sapien
aaatcatgagagctaggcacagtgg

SEQ ID NO: 4588706 - DNA, 25 bp, Homo sapien
taactactggacactatgctcactg

SEQ ID NO: 4588707 - DNA, 25 bp, Homo sapien
gactttctcgaatactgagtgtgtc

SEQ ID NO: 4588708 - DNA, 25 bp, Homo sapien
tgcttctgcccagcgtacaacagct

SEQ ID NO: 4588709 - DNA, 25 bp, Homo sapien
cctcaattgtcatcagtgggaaccg

SEQ ID NO: 4588710 - DNA, 25 bp, Homo sapien
tacaacagctccaaaaagtcgactt

SEQ ID NO: 4588711 - DNA, 25 bp, Homo sapien
tgtctattgtatctagacaaagact

SEQ ID NO: 4588712 - DNA, 25 bp, Homo sapien
tctgcacttattgcatccattgtgc

SEQ ID NO: 4588713 - DNA, 25 bp, Homo sapien
gacaaagactagcaagctgaggttc

SEQ ID NO: 4588714 - DNA, 25 bp, Homo sapien
tatatcaatatcagtaaacccttct

SEQ ID NO: 4588715 - DNA, 25 bp, Homo sapien
aaaaattatcttattcagggtagca

SEQ ID NO: 4588716 - DNA, 25 bp, Homo sapien
aaagacattttaattggccaactca

SEQ ID NO: 4588717 - DNA, 25 bp, Homo sapien
cactccttacacaggcaatatcaaa

SEQ ID NO: 4588718 - DNA, 25 bp, Homo sapien
aaaaattgatctttcactctaggaa

SEQ ID NO: 4588719 - DNA, 25 bp, Homo sapien
agttaagtgatcgtctctacatgca

SEQ ID NO: 4588720 - DNA, 25 bp, Homo sapien
gagaccttagttttacccactgctg

SEQ ID NO: 4588721 - DNA, 25 bp, Homo sapien
aaggtgcctggcatacaatcagctc

SEQ ID NO: 4588722 - DNA, 25 bp, Homo sapien
aataaggagataataggcgaggcac

SEQ ID NO: 4588723 - DNA, 25 bp, Homo sapien
tcataactgtttctggaccaatttg

SEQ ID NO: 4588724 - DNA, 25 bp, Homo sapien
ggctgggactgcgtatttcttggca

SEQ ID NO: 4588725 - DNA, 25 bp, Homo sapien
tatttcttggcagtataaagagtgg

SEQ ID NO: 4588726 - DNA, 25 bp, Homo sapien
tatctgccctaagatgtttggtgag

SEQ ID NO: 4588727 - DNA, 25 bp, Homo sapien
acgtccggcagctcgatctcggccg

SEQ ID NO: 4588728 - DNA, 25 bp, Homo sapien
tgcgggctccacgtccggcagctcg

SEQ ID NO: 4588729 - DNA, 25 bp, Homo sapien
gcagctcgatctcggccgacgtggt

SEQ ID NO: 4588730 - DNA, 25 bp, Homo sapien
tccacgtccggcagctcgatctcgg

SEQ ID NO: 4588731 - DNA, 25 bp, Homo sapien
gccagcacgaagcggtgggcgggga

SEQ ID NO: 4588732 - DNA, 25 bp, Homo sapien
agcacgaagcggtgggcggggatgc

SEQ ID NO: 4588733 - DNA, 25 bp, Homo sapien
cagcacgaagcggtgggcggggatg

SEQ ID NO: 4588734 - DNA, 25 bp, Homo sapien
gcacgaagcggtgggcggggatgcg

SEQ ID NO: 4588735 - DNA, 25 bp, Homo sapien
cggcgccgcgacccttgcccagtac

SEQ ID NO: 4588736 - DNA, 25 bp, Homo sapien
gccttggtcgcctgccagttgtaga

SEQ ID NO: 4588737 - DNA, 25 bp, Homo sapien
tcgcctgccagttgtagagaggttc

SEQ ID NO: 4588738 - DNA, 25 bp, Homo sapien
agcgacgccttggtcgcctgccagt

SEQ ID NO: 4588739 - DNA, 25 bp, Homo sapien
cctgccagttgtagagaggttcccg

SEQ ID NO: 4588740 - DNA, 25 bp, Homo sapien
ctgcggcaggcccgagtgaggccat

SEQ ID NO: 4588741 - DNA, 25 bp, Homo sapien
gttatggacaaaactccgccgccat

SEQ ID NO: 4588742 - DNA, 25 bp, Homo sapien
tgcccacgttatggacaaaactccg

SEQ ID NO: 4588743 - DNA, 25 bp, Homo sapien
tccagctgcgcggttgcccacgtta

SEQ ID NO: 4588744 - DNA, 25 bp, Homo sapien
gcgcggttgcccacgttatggacaa

SEQ ID NO: 4588745 - DNA, 25 bp, Homo sapien
cttcagggaagactggttccagatg

SEQ ID NO: 4588746 - DNA, 25 bp, Homo sapien
tggttccagatgagctcgttaaaca

SEQ ID NO: 4588747 - DNA, 25 bp, Homo sapien
cagggaagactggttccagatgagc

SEQ ID NO: 4588748 - DNA, 25 bp, Homo sapien
ggttccagatgagctcgttaaacat

SEQ ID NO: 4588749 - DNA, 25 bp, Homo sapien
cagcctaggaaagtaatatatgtca

SEQ ID NO: 4588750 - DNA, 25 bp, Homo sapien
cattgctttctggaatccagcctag

SEQ ID NO: 4588751 - DNA, 25 bp, Homo sapien
tgctttctggaatccagcctaggaa

SEQ ID NO: 4588752 - DNA, 25 bp, Homo sapien
ctggaatccagcctaggaaagtaat

SEQ ID NO: 4588753 - DNA, 25 bp, Homo sapien
taaggctgcgattatgcccatgacc

SEQ ID NO: 4588754 - DNA, 25 bp, Homo sapien
attatgcccatgacccgactttgag

SEQ ID NO: 4588755 - DNA, 25 bp, Homo sapien
tgcgattatgcccatgacccgactt

SEQ ID NO: 4588756 - DNA, 25 bp, Homo sapien
tcataaggctgcgattatgcccatg

SEQ ID NO: 4588757 - DNA, 25 bp, Homo sapien
cctgttcctaggttccttgaggcaa

SEQ ID NO: 4588758 - DNA, 25 bp, Homo sapien
tggctggcaccagggttctaggcat

SEQ ID NO: 4588759 - DNA, 25 bp, Homo sapien
gcaataacgttccttcggatccagt

SEQ ID NO: 4588760 - DNA, 25 bp, Homo sapien
taacccaagcatctgttgcactggc

SEQ ID NO: 4588761 - DNA, 25 bp, Homo sapien
gttgtccaggatccaatgttgttca

SEQ ID NO: 4588762 - DNA, 25 bp, Homo sapien
gaaaatgccctacgattgcctttac

SEQ ID NO: 4588763 - DNA, 25 bp, Homo sapien
caaataactggtacttcggcagggt

SEQ ID NO: 4588764 - DNA, 25 bp, Homo sapien
caattaatatgactggagccaggga

SEQ ID NO: 4588765 - DNA, 25 bp, Homo sapien
cagctctcagtgttgggctgttgga

SEQ ID NO: 4588766 - DNA, 25 bp, Homo sapien
gaccactcatattttcagcgttaag

SEQ ID NO: 4588767 - DNA, 25 bp, Homo sapien
caatacctcaaacactgccatgtca

SEQ ID NO: 4588768 - DNA, 25 bp, Homo sapien
catgtagtctccaatacgcacatca

SEQ ID NO: 4588769 - DNA, 25 bp, Homo sapien
caaaggtcgtgtggctgttgacccc

SEQ ID NO: 4588770 - DNA, 25 bp, Homo sapien
tctatggtacgtctccacaaaggga

SEQ ID NO: 4588771 - DNA, 25 bp, Homo sapien
gcatcccggtggagagttactgcca

SEQ ID NO: 4588772 - DNA, 25 bp, Homo sapien
tagtgcaccttgtatgaccctgagc

SEQ ID NO: 4588773 - DNA, 25 bp, Homo sapien
ggttggggccactctgcatcaggct

SEQ ID NO: 4588774 - DNA, 25 bp, Homo sapien
aggcatgcccttctcatggcagata

SEQ ID NO: 4588775 - DNA, 25 bp, Homo sapien
ggcatgcccttctcatggcagatac

SEQ ID NO: 4588776 - DNA, 25 bp, Homo sapien
atgcccttctcatggcagatacaga

SEQ ID NO: 4588777 - DNA, 25 bp, Homo sapien
gacccttgcacacctttccagatga

SEQ ID NO: 4588778 - DNA, 25 bp, Homo sapien
gttacaactttgagtacactgcagc

SEQ ID NO: 4588779 - DNA, 25 bp, Homo sapien
agtcattagatgagctgggtccgtc

SEQ ID NO: 4588780 - DNA, 25 bp, Homo sapien
catcagcaacagcatagggagcatt

SEQ ID NO: 4588781 - DNA, 25 bp, Homo sapien
tatgatggctaatcacctgggaggc

SEQ ID NO: 4588782 - DNA, 25 bp, Homo sapien
catagtctaaggcaccaatctgtta

SEQ ID NO: 4588783 - DNA, 25 bp, Homo sapien
taagcccatttaggagatgctcaca

SEQ ID NO: 4588784 - DNA, 25 bp, Homo sapien
cacaactctggtaagattctctgac

SEQ ID NO: 4588785 - DNA, 25 bp, Homo sapien
gccatgaggcatgcagaattactta

SEQ ID NO: 4588786 - DNA, 25 bp, Homo sapien
gttccatgtcagtgtgtcaacagag

SEQ ID NO: 4588787 - DNA, 25 bp, Homo sapien
gcaaatagtcagtccacccttagtc

SEQ ID NO: 4588788 - DNA, 25 bp, Homo sapien
caacagagtaggtatgccatgaggc

SEQ ID NO: 4588789 - DNA, 25 bp, Homo sapien
tattggactgtttcacaatctctga

SEQ ID NO: 4588790 - DNA, 25 bp, Homo sapien
ctacgctatgctatacagaaccagg

SEQ ID NO: 4588791 - DNA, 25 bp, Homo sapien
gacttcagaattccactacgctatg

SEQ ID NO: 4588792 - DNA, 25 bp, Homo sapien
catggctactaaaaaaggattgaga

SEQ ID NO: 4588793 - DNA, 25 bp, Homo sapien
ttcatgccaggcaaaccacgttaaa

SEQ ID NO: 4588794 - DNA, 25 bp, Homo sapien
tctcattaccttacttcatgccagg

SEQ ID NO: 4588795 - DNA, 25 bp, Homo sapien
tctaaggataggctatgtgctctgc

SEQ ID NO: 4588796 - DNA, 25 bp, Homo sapien
tgctgtaacaaatactcagagtagc

SEQ ID NO: 4588797 - DNA, 25 bp, Homo sapien
cattaggactatgagcagtactggg

SEQ ID NO: 4588798 - DNA, 25 bp, Homo sapien
gcagcattgagttcactgagccacc

SEQ ID NO: 4588799 - DNA, 25 bp, Homo sapien
tcttcaggtcctgccatgagaggcc

SEQ ID NO: 4588800 - DNA, 25 bp, Homo sapien
cctatgccttaggagaaagctatgg

SEQ ID NO: 4588801 - DNA, 25 bp, Homo sapien
gaaaagagcctacggaatcactgac

SEQ ID NO: 4588802 - DNA, 25 bp, Homo sapien
caatgtagacaatccacgtgctggt

SEQ ID NO: 4588803 - DNA, 25 bp, Homo sapien
tcctagaatgtccagaaagcacctc

SEQ ID NO: 4588804 - DNA, 25 bp, Homo sapien
tgtatgcaggatctccagaacgcaa

SEQ ID NO: 4588805 - DNA, 25 bp, Homo sapien
agatttttctattagattgagccac

SEQ ID NO: 4588806 - DNA, 25 bp, Homo sapien
tttctattagattgagccactaatg

SEQ ID NO: 4588807 - DNA, 25 bp, Homo sapien
gccactaatgttcggtaaggggcac

SEQ ID NO: 4588808 - DNA, 25 bp, Homo sapien
tcggtaaggggcacttgatggttaa

SEQ ID NO: 4588809 - DNA, 25 bp, Homo sapien
cagaaacgtagcctgaatgaaccat

SEQ ID NO: 4588810 - DNA, 25 bp, Homo sapien
tgaacagtcatatcaagaatggccc

SEQ ID NO: 4588811 - DNA, 25 bp, Homo sapien
gaagaagtattagatcgacatccct

SEQ ID NO: 4588812 - DNA, 25 bp, Homo sapien
tcatcattattaacggccctaggct

SEQ ID NO: 4588813 - DNA, 25 bp, Homo sapien
tccactgggctggtaaatatgtaag

SEQ ID NO: 4588814 - DNA, 25 bp, Homo sapien
gcaaatcatgtagtcatctccccat

SEQ ID NO: 4588815 - DNA, 25 bp, Homo sapien
ccatcatcccctacagtgttttcaa

SEQ ID NO: 4588816 - DNA, 25 bp, Homo sapien
tcaaattacaaaatctagggtccac

SEQ ID NO: 4588817 - DNA, 25 bp, Homo sapien
ttacaacctcaaatcttactcccag

SEQ ID NO: 4588818 - DNA, 25 bp, Homo sapien
gaattacattaatacctcacgttac

SEQ ID NO: 4588819 - DNA, 25 bp, Homo sapien
tgaagccaaattacactaacttagt

SEQ ID NO: 4588820 - DNA, 25 bp, Homo sapien
cctcacgttacatatatgaagccaa

SEQ ID NO: 4588821 - DNA, 25 bp, Homo sapien
ttcaactacaaaccgtgaatacgcg

SEQ ID NO: 4588822 - DNA, 25 bp, Homo sapien
gtgttctcacaatataagctggcat

SEQ ID NO: 4588823 - DNA, 25 bp, Homo sapien
ccaaggacaagcattaacaggattg

SEQ ID NO: 4588824 - DNA, 25 bp, Homo sapien
tacgcgaaagatgttccaaggacaa

SEQ ID NO: 4588825 - DNA, 25 bp, Homo sapien
taaaatgtaaagtatccaccttgag

SEQ ID NO: 4588826 - DNA, 25 bp, Homo sapien
accttgagtgcttagctcaaaattg

SEQ ID NO: 4588827 - DNA, 25 bp, Homo sapien
atagggctgttgctgattccagctt

SEQ ID NO: 4588828 - DNA, 25 bp, Homo sapien
ggctgttgctgattccagctttaaa

SEQ ID NO: 4588829 - DNA, 25 bp, Homo sapien
caaggcaggaaaacgatgatcataa

SEQ ID NO: 4588830 - DNA, 25 bp, Homo sapien
tggttaaactttacacatggcctca

SEQ ID NO: 4588831 - DNA, 25 bp, Homo sapien
tctgtcaatgacaacaaggactatg

SEQ ID NO: 4588832 - DNA, 25 bp, Homo sapien
ggttaagggcaacttcatgcaacca

SEQ ID NO: 4588833 - DNA, 25 bp, Homo sapien
ggttgccatgcacccctatattaga

SEQ ID NO: 4588834 - DNA, 25 bp, Homo sapien
taacaatgagagctatccacaccta

SEQ ID NO: 4588835 - DNA, 25 bp, Homo sapien
ttggaacaggtggtcccatggcagc

SEQ ID NO: 4588836 - DNA, 25 bp, Homo sapien
taaaaaatggagtgcctggtgactc

SEQ ID NO: 4588837 - DNA, 25 bp, Homo sapien
tatgacggaataaggaacgcagact

SEQ ID NO: 4588838 - DNA, 25 bp, Homo sapien
gacggaataaggaacgcagacttaa

SEQ ID NO: 4588839 - DNA, 25 bp, Homo sapien
aggaacgcagacttaatcttgtggg

SEQ ID NO: 4588840 - DNA, 25 bp, Homo sapien
ggcattgtatgacggaataaggaac

SEQ ID NO: 4588841 - DNA, 25 bp, Homo sapien
tttcttgtgtcgttgcccgcatctc

SEQ ID NO: 4588842 - DNA, 25 bp, Homo sapien
tcttgtgtcgttgcccgcatctcca

SEQ ID NO: 4588843 - DNA, 25 bp, Homo sapien
tgtttcttgtgtcgttgcccgcatc

SEQ ID NO: 4588844 - DNA, 25 bp, Homo sapien
tgtgtttcttgtgtcgttgcccgca

SEQ ID NO: 4588845 - DNA, 25 bp, Homo sapien
tgtttaatggatatgcatataacat

SEQ ID NO: 4588846 - DNA, 25 bp, Homo sapien
aacattaataacaatgagaagtttc

SEQ ID NO: 4588847 - DNA, 25 bp, Homo sapien
cattaataacaatgagaagtttctt

SEQ ID NO: 4588848 - DNA, 25 bp, Homo sapien
ggatatgcatataacattaataaca

SEQ ID NO: 4588849 - DNA, 25 bp, Homo sapien
ctgaagagctctgttgctgaattgc

SEQ ID NO: 4588850 - DNA, 25 bp, Homo sapien
tctgaagagctctgttgctgaattg

SEQ ID NO: 4588851 - DNA, 25 bp, Homo sapien
ttctgaagagctctgttgctgaatt

SEQ ID NO: 4588852 - DNA, 25 bp, Homo sapien
tggtagccagtaaactttactcctg

SEQ ID NO: 4588853 - DNA, 25 bp, Homo sapien
acttgtctttgtactccttatatgg

SEQ ID NO: 4588854 - DNA, 25 bp, Homo sapien
tgtctttgtactccttatatggaaa

SEQ ID NO: 4588855 - DNA, 25 bp, Homo sapien
ctggtagccagtaaactttactcct

SEQ ID NO: 4588856 - DNA, 25 bp, Homo sapien
gacatattagaaatagaattgacac

SEQ ID NO: 4588857 - DNA, 25 bp, Homo sapien
ctgcagagacatattagaaatagaa

SEQ ID NO: 4588858 - DNA, 25 bp, Homo sapien
acatattagaaatagaattgacaca

SEQ ID NO: 4588859 - DNA, 25 bp, Homo sapien
agagacatattagaaatagaattga

SEQ ID NO: 4588860 - DNA, 25 bp, Homo sapien
acttctatcatgaaaactatttaca

SEQ ID NO: 4588861 - DNA, 25 bp, Homo sapien
cagagatcatccataacaatgtagc

SEQ ID NO: 4588862 - DNA, 25 bp, Homo sapien
tgattttaataagacgtaagatgtc

SEQ ID NO: 4588863 - DNA, 25 bp, Homo sapien
acaatgtagcatagcagagtcaagc

SEQ ID NO: 4588864 - DNA, 25 bp, Homo sapien
ctggaggcttcacagcgccctctgg

SEQ ID NO: 4588865 - DNA, 25 bp, Homo sapien
acagcgccctctgggagttcatcaa

SEQ ID NO: 4588866 - DNA, 25 bp, Homo sapien
cagcgccctctgggagttcatcaat

SEQ ID NO: 4588867 - DNA, 25 bp, Homo sapien
tacccacctcttatcaactgacttc

SEQ ID NO: 4588868 - DNA, 25 bp, Homo sapien
ccctccactacccacctcttatcaa

SEQ ID NO: 4588869 - DNA, 25 bp, Homo sapien
tccactacccacctcttatcaactg

SEQ ID NO: 4588870 - DNA, 25 bp, Homo sapien
cactacccacctcttatcaactgac

SEQ ID NO: 4588871 - DNA, 25 bp, Homo sapien
ttgtatatgttacattgagcaccac

SEQ ID NO: 4588872 - DNA, 25 bp, Homo sapien
cttgtatatgttacattgagcacca

SEQ ID NO: 4588873 - DNA, 25 bp, Homo sapien
tgtatatgttacattgagcaccacc

SEQ ID NO: 4588874 - DNA, 25 bp, Homo sapien
gaccttcaccattagtgtcactggg

SEQ ID NO: 4588875 - DNA, 25 bp, Homo sapien
tattctcagtccaaaacaaaggctt

SEQ ID NO: 4588876 - DNA, 25 bp, Homo sapien
gaatcagtgtttttaggagcctcca

SEQ ID NO: 4588877 - DNA, 25 bp, Homo sapien
gaaatttaggctcttcccttacagc

SEQ ID NO: 4588878 - DNA, 25 bp, Homo sapien
tccattaagaggtgggtaaccatta

SEQ ID NO: 4588879 - DNA, 25 bp, Homo sapien
tgtatgctgtgggtctcagcaccct

SEQ ID NO: 4588880 - DNA, 25 bp, Homo sapien
ttcactctcgtacaacaacaaacag

SEQ ID NO: 4588881 - DNA, 25 bp, Homo sapien
gtaaccattaccagacttgcaaaga

SEQ ID NO: 4588882 - DNA, 25 bp, Homo sapien
caggtcctagctcgctcactctgcg

SEQ ID NO: 4588883 - DNA, 25 bp, Homo sapien
ctttttcctcagaacatccaactct

SEQ ID NO: 4588884 - DNA, 25 bp, Homo sapien
ctcactctgcgcctcatttgccttc

SEQ ID NO: 4588885 - DNA, 25 bp, Homo sapien
gattatgctgagctcattcctactt

SEQ ID NO: 4588886 - DNA, 25 bp, Homo sapien
ctgacctgtaactcacctctttcta

SEQ ID NO: 4588887 - DNA, 25 bp, Homo sapien
atgaagacagttttgactttctgcc

SEQ ID NO: 4588888 - DNA, 25 bp, Homo sapien
cctctttctaaggatacagatatga

SEQ ID NO: 4588889 - DNA, 25 bp, Homo sapien
agatatgaagacagttttgactttc

SEQ ID NO: 4588890 - DNA, 25 bp, Homo sapien
cagaaggtactatcatttaaatttt

SEQ ID NO: 4588891 - DNA, 25 bp, Homo sapien
tcagaaggtactatcatttaaattt

SEQ ID NO: 4588892 - DNA, 25 bp, Homo sapien
caagtttctgaacttcacaaaagct

SEQ ID NO: 4588893 - DNA, 25 bp, Homo sapien
ttcaagtttctgaacttcacaaaag

SEQ ID NO: 4588894 - DNA, 25 bp, Homo sapien
tcttcaagtttctgaacttcacaaa

SEQ ID NO: 4588895 - DNA, 25 bp, Homo sapien
tcaagtttctgaacttcacaaaagc

SEQ ID NO: 4588896 - DNA, 25 bp, Homo sapien
cattcacaggacatgctttcagtag

SEQ ID NO: 4588897 - DNA, 25 bp, Homo sapien
caatgagggtacttttatgcaggag

SEQ ID NO: 4588898 - DNA, 25 bp, Homo sapien
gctactccatcaaacggctctaaaa

SEQ ID NO: 4588899 - DNA, 25 bp, Homo sapien
tatttgtaacatgaaggtcaaccca

SEQ ID NO: 4588900 - DNA, 25 bp, Homo sapien
ttcatacagtatagtgcacaaatct

SEQ ID NO: 4588901 - DNA, 25 bp, Homo sapien
catccagatcaagacagggaacatt

SEQ ID NO: 4588902 - DNA, 25 bp, Homo sapien
tacacatccatgtaacaccatccag

SEQ ID NO: 4588903 - DNA, 25 bp, Homo sapien
cagtatagtgcacaaatcttaaatg

SEQ ID NO: 4588904 - DNA, 25 bp, Homo sapien
ccatgactgtttccgttcctaaaga

SEQ ID NO: 4588905 - DNA, 25 bp, Homo sapien
cgacaaccttgttatgtaggaagag

SEQ ID NO: 4588906 - DNA, 25 bp, Homo sapien
taatctctagaatgccttgaccctc

SEQ ID NO: 4588907 - DNA, 25 bp, Homo sapien
tatgtattacatgcagacgctttct

SEQ ID NO: 4588908 - DNA, 25 bp, Homo sapien
gggacccagggtatccaccaatgac

SEQ ID NO: 4588909 - DNA, 25 bp, Homo sapien
tcggcaccggctttccaggaggaag

SEQ ID NO: 4588910 - DNA, 25 bp, Homo sapien
tttccaggatttactgcccgccggc

SEQ ID NO: 4588911 - DNA, 25 bp, Homo sapien
cgaaagtgggcggaaggatggccgc

SEQ ID NO: 4588912 - DNA, 25 bp, Homo sapien
ggccggccagtgcgggtagcccttc

SEQ ID NO: 4588913 - DNA, 25 bp, Homo sapien
gccggccagtgcgggtagcccttca

SEQ ID NO: 4588914 - DNA, 25 bp, Homo sapien
ccggccagtgcgggtagcccttcat

SEQ ID NO: 4588915 - DNA, 25 bp, Homo sapien
cgggccggccagtgcgggtagccct

SEQ ID NO: 4588916 - DNA, 25 bp, Homo sapien
cttggcgaagaccaggtcgcccgct

SEQ ID NO: 4588917 - DNA, 25 bp, Homo sapien
ggcgaagaccaggtcgcccgctttg

SEQ ID NO: 4588918 - DNA, 25 bp, Homo sapien
caggtcgcccgctttgtactcgcgg

SEQ ID NO: 4588919 - DNA, 25 bp, Homo sapien
aggtcgcccgctttgtactcgcggg

SEQ ID NO: 4588920 - DNA, 25 bp, Homo sapien
gctttcgcggagaaaccgagcgcgc

SEQ ID NO: 4588921 - DNA, 25 bp, Homo sapien
tccgaattccttctcgggcagcgac

SEQ ID NO: 4588922 - DNA, 25 bp, Homo sapien
ggtagtccttggtcgccgcgaagat

SEQ ID NO: 4588923 - DNA, 25 bp, Homo sapien
gcagcgaccgcaaacacgatcttat

SEQ ID NO: 4588924 - DNA, 25 bp, Homo sapien
tgactagctttggaagaaccgagtg

SEQ ID NO: 4588925 - DNA, 25 bp, Homo sapien
actagctttggaagaaccgagtggg

SEQ ID NO: 4588926 - DNA, 25 bp, Homo sapien
gactagctttggaagaaccgagtgg

SEQ ID NO: 4588927 - DNA, 25 bp, Homo sapien
ctagctttggaagaaccgagtgggg

SEQ ID NO: 4588928 - DNA, 25 bp, Homo sapien
atttccccagatgaggaaatcctgg

SEQ ID NO: 4588929 - DNA, 25 bp, Homo sapien
catttccccagatgaggaaatcctg

SEQ ID NO: 4588930 - DNA, 25 bp, Homo sapien
acacggtgccataggctcgcccagc

SEQ ID NO: 4588931 - DNA, 25 bp, Homo sapien
gtgccataggctcgcccagcactgt

SEQ ID NO: 4588932 - DNA, 25 bp, Homo sapien
cggtgccataggctcgcccagcact

SEQ ID NO: 4588933 - DNA, 25 bp, Homo sapien
tcacacggtgccataggctcgccca

SEQ ID NO: 4588934 - DNA, 25 bp, Homo sapien
ggggtcagcctgctgaggccaggca

SEQ ID NO: 4588935 - DNA, 25 bp, Homo sapien
tgtgtcagtagttactgacactctt

SEQ ID NO: 4588936 - DNA, 25 bp, Homo sapien
tgtcagtagttactgacactcttcc

SEQ ID NO: 4588937 - DNA, 25 bp, Homo sapien
gatgtgtcagtagttactgacactc

SEQ ID NO: 4588938 - DNA, 25 bp, Homo sapien
tcagtagttactgacactcttccct

SEQ ID NO: 4588939 - DNA, 25 bp, Homo sapien
cacttgtacaaaacgcagcccatat

SEQ ID NO: 4588940 - DNA, 25 bp, Homo sapien
tatacacttgtacaaaacgcagccc

SEQ ID NO: 4588941 - DNA, 25 bp, Homo sapien
taaggatatacacttgtacaaaacg

SEQ ID NO: 4588942 - DNA, 25 bp, Homo sapien
gtgtgtgcataaggatatacacttg

SEQ ID NO: 4588943 - DNA, 25 bp, Homo sapien
cagtgtcatcttcccacgaggtttg

SEQ ID NO: 4588944 - DNA, 25 bp, Homo sapien
aaatacttttgcctgactcgcccca

SEQ ID NO: 4588945 - DNA, 25 bp, Homo sapien
gggcccactggtgtcgatctgcaga

SEQ ID NO: 4588946 - DNA, 25 bp, Homo sapien
tgtatcagtgaaagacctcttgggc

SEQ ID NO: 4588947 - DNA, 25 bp, Homo sapien
ctatggactactttattcctgaatt

SEQ ID NO: 4588948 - DNA, 25 bp, Homo sapien
aaaaagcttatctgagcatacttgg

SEQ ID NO: 4588949 - DNA, 25 bp, Homo sapien
aaaagcttatctgagcatacttggt

SEQ ID NO: 4588950 - DNA, 25 bp, Homo sapien
aaggcaggctagcaaggctctggtc

SEQ ID NO: 4588951 - DNA, 25 bp, Homo sapien
catctttcagaaggtaagctgcacg

SEQ ID NO: 4588952 - DNA, 25 bp, Homo sapien
tcaaatccaggatggtgccctcgct

SEQ ID NO: 4588953 - DNA, 25 bp, Homo sapien
gacttcatgctcgaggtagtgctca

SEQ ID NO: 4588954 - DNA, 25 bp, Homo sapien
gtatgttcttatgagccctgtccag

SEQ ID NO: 4588955 - DNA, 25 bp, Homo sapien
cacgttttgggacgctatagtggca

SEQ ID NO: 4588956 - DNA, 25 bp, Homo sapien
cactgctatccccacggtgatgaga

SEQ ID NO: 4588957 - DNA, 25 bp, Homo sapien
taggcattacaacttggaccaagtg

SEQ ID NO: 4588958 - DNA, 25 bp, Homo sapien
tgtctctgctcctgcgggagggaaa

SEQ ID NO: 4588959 - DNA, 25 bp, Homo sapien
cttgctaatgcatgctgacccacgt

SEQ ID NO: 4588960 - DNA, 25 bp, Homo sapien
ccatcccaggtgtgaagtagtgttc

SEQ ID NO: 4588961 - DNA, 25 bp, Homo sapien
cattcccctgttggacaaagcactg

SEQ ID NO: 4588962 - DNA, 25 bp, Homo sapien
gactgtacatgctgctcctcagata

SEQ ID NO: 4588963 - DNA, 25 bp, Homo sapien
cttggcaccatgatcaatgctggtg

SEQ ID NO: 4588964 - DNA, 25 bp, Homo sapien
attactgattcacgatggcagggcc

SEQ ID NO: 4588965 - DNA, 25 bp, Homo sapien
gtttggctgatggctccactggact

SEQ ID NO: 4588966 - DNA, 25 bp, Homo sapien
caggcgtgtttgctacctcggcagg

SEQ ID NO: 4588967 - DNA, 25 bp, Homo sapien
tccttagggagctgaacaccatgtt

SEQ ID NO: 4588968 - DNA, 25 bp, Homo sapien
tcatcttcactgaccacctgtaggg

SEQ ID NO: 4588969 - DNA, 25 bp, Homo sapien
gggcaatgaccctatcagtgcagga

SEQ ID NO: 4588970 - DNA, 25 bp, Homo sapien
tctccaaaacgaaggaactgctgca

SEQ ID NO: 4588971 - DNA, 25 bp, Homo sapien
catgagttcaactatagatttggtc

SEQ ID NO: 4588972 - DNA, 25 bp, Homo sapien
tgtgactgcagctctcgatgaaagc

SEQ ID NO: 4588973 - DNA, 25 bp, Homo sapien
aaggtggtatgatgatggattgctc

SEQ ID NO: 4588974 - DNA, 25 bp, Homo sapien
taatcctgaagtgtccagtccaagg

SEQ ID NO: 4588975 - DNA, 25 bp, Homo sapien
caacacactgaagagccggtccagt

SEQ ID NO: 4588976 - DNA, 25 bp, Homo sapien
cagtccaaggcatggaggatctgga

SEQ ID NO: 4588977 - DNA, 25 bp, Homo sapien
tcaaacactacattggactggacaa

SEQ ID NO: 4588978 - DNA, 25 bp, Homo sapien
gaaaaatcaaattgaggaaatgtca

SEQ ID NO: 4588979 - DNA, 25 bp, Homo sapien
tgaaaagttctaattgtaagagaaa

SEQ ID NO: 4588980 - DNA, 25 bp, Homo sapien
ttgaaaagttctaattgtaagagaa

SEQ ID NO: 4588981 - DNA, 25 bp, Homo sapien
tggcaactacagttcagagtacagc

SEQ ID NO: 4588982 - DNA, 25 bp, Homo sapien
atccatgcttgcattggtcacactg

SEQ ID NO: 4588983 - DNA, 25 bp, Homo sapien
gtgggccacccatccatgcttgcat

SEQ ID NO: 4588984 - DNA, 25 bp, Homo sapien
gtcacactgacggtggtttattttc

SEQ ID NO: 4588985 - DNA, 25 bp, Homo sapien
ttaacacgtatttgcaaactcaggg

SEQ ID NO: 4588986 - DNA, 25 bp, Homo sapien
tggtcctatgcagtaacacatgttc

SEQ ID NO: 4588987 - DNA, 25 bp, Homo sapien
tactgtcaagccaaaatcttgtcgc

SEQ ID NO: 4588988 - DNA, 25 bp, Homo sapien
tatgtatcaacgaatctgggaaggg

SEQ ID NO: 4588989 - DNA, 25 bp, Homo sapien
tgtcagactcggagcggtggcagcc

SEQ ID NO: 4588990 - DNA, 25 bp, Homo sapien
gtggcagccccgcagccacaaagag

SEQ ID NO: 4588991 - DNA, 25 bp, Homo sapien
cccgcagccacaaagagatgcctta

SEQ ID NO: 4588992 - DNA, 25 bp, Homo sapien
gcagccacaaagagatgccttaaat

SEQ ID NO: 4588993 - DNA, 25 bp, Homo sapien
gagtgccgccgccgatttccacagg

SEQ ID NO: 4588994 - DNA, 25 bp, Homo sapien
cgcgcccgcagatccggcgcggaga

SEQ ID NO: 4588995 - DNA, 25 bp, Homo sapien
tttccacaggctggcccgccggcac

SEQ ID NO: 4588996 - DNA, 25 bp, Homo sapien
ggcgcggagaccgtttgccagctcc

SEQ ID NO: 4588997 - DNA, 25 bp, Homo sapien
aggtagccagctggccctcgggagg

SEQ ID NO: 4588998 - DNA, 25 bp, Homo sapien
tagccagctggccctcgggaggtgg

SEQ ID NO: 4588999 - DNA, 25 bp, Homo sapien
caggtagccagctggccctcgggag

SEQ ID NO: 4589000 - DNA, 25 bp, Homo sapien
ggtagccagctggccctcgggaggt

SEQ ID NO: 4589001 - DNA, 25 bp, Homo sapien
gcgcacagagaatccccgcgcccgc

SEQ ID NO: 4589002 - DNA, 25 bp, Homo sapien
gccgcctgctccgcgcacagagaat

SEQ ID NO: 4589003 - DNA, 25 bp, Homo sapien
cctgctccgcgcacagagaatcccc

SEQ ID NO: 4589004 - DNA, 25 bp, Homo sapien
gctccgcgcacagagaatccccgcg

SEQ ID NO: 4589005 - DNA, 25 bp, Homo sapien
cctgcgaccgctgcggtgccggggc

SEQ ID NO: 4589006 - DNA, 25 bp, Homo sapien
ctgcgaccgctgcggtgccggggct

SEQ ID NO: 4589007 - DNA, 25 bp, Homo sapien
gcgcgacccggcgaagtgggcggct

SEQ ID NO: 4589008 - DNA, 25 bp, Homo sapien
cacgctccggccgtcggggcgcgac

SEQ ID NO: 4589009 - DNA, 25 bp, Homo sapien
aagtgggcggctccccaagcgccca

SEQ ID NO: 4589010 - DNA, 25 bp, Homo sapien
caggctgcgcagcacgatggccgcc

SEQ ID NO: 4589011 - DNA, 25 bp, Homo sapien
gttgaattccataactgacaatagc

SEQ ID NO: 4589012 - DNA, 25 bp, Homo sapien
tccataactgacaatagcctttggg

SEQ ID NO: 4589013 - DNA, 25 bp, Homo sapien
tctttggttggatttaccacacatt

SEQ ID NO: 4589014 - DNA, 25 bp, Homo sapien
ccttcctccttaagttgaattccat

SEQ ID NO: 4589015 - DNA, 25 bp, Homo sapien
aaatgatggcagaattggtgttacc

SEQ ID NO: 4589016 - DNA, 25 bp, Homo sapien
gggacccttgtagtaatagcctctc

SEQ ID NO: 4589017 - DNA, 25 bp, Homo sapien
cacacttgagtattgatggagaagc

SEQ ID NO: 4589018 - DNA, 25 bp, Homo sapien
tgtgtagactctagccgtgatcatg

SEQ ID NO: 4589019 - DNA, 25 bp, Homo sapien
ttattgctgacatggctattgttga

SEQ ID NO: 4589020 - DNA, 25 bp, Homo sapien
tgttgaagctattgtacaagttctt

SEQ ID NO: 4589021 - DNA, 25 bp, Homo sapien
attgttgaagctattgtacaagttc

SEQ ID NO: 4589022 - DNA, 25 bp, Homo sapien
gattattgctgacatggctattgtt

SEQ ID NO: 4589023 - DNA, 25 bp, Homo sapien
ggccccatgcctggtttcccagctc

SEQ ID NO: 4589024 - DNA, 25 bp, Homo sapien
aagacagaagttgggccccatgcct

SEQ ID NO: 4589025 - DNA, 25 bp, Homo sapien
agacagaagttgggccccatgcctg

SEQ ID NO: 4589026 - DNA, 25 bp, Homo sapien
aaagacagaagttgggccccatgcc

SEQ ID NO: 4589027 - DNA, 25 bp, Homo sapien
ggttgtgaaatggttaagcaacaaa

SEQ ID NO: 4589028 - DNA, 25 bp, Homo sapien
gttaagcaacaaattcctgggaatg

SEQ ID NO: 4589029 - DNA, 25 bp, Homo sapien
caaattcctgggaatgtttgccaca

SEQ ID NO: 4589030 - DNA, 25 bp, Homo sapien
tgaaatggttaagcaacaaattcct

SEQ ID NO: 4589031 - DNA, 25 bp, Homo sapien
catctgtcattcttgtccatggcaa

SEQ ID NO: 4589032 - DNA, 25 bp, Homo sapien
tccatggcaaatgtggacatgtcat

SEQ ID NO: 4589033 - DNA, 25 bp, Homo sapien
tcattcggaatgtagcatggaggcc

SEQ ID NO: 4589034 - DNA, 25 bp, Homo sapien
tggacatgtcattcggaatgtagca

SEQ ID NO: 4589035 - DNA, 25 bp, Homo sapien
tggacaagcaaatattggctctcct

SEQ ID NO: 4589036 - DNA, 25 bp, Homo sapien
gacaagcaaatattggctctccttt

SEQ ID NO: 4589037 - DNA, 25 bp, Homo sapien
ccagatggacaagcaaatattggct

SEQ ID NO: 4589038 - DNA, 25 bp, Homo sapien
gatggacaagcaaatattggctctc

SEQ ID NO: 4589039 - DNA, 25 bp, Homo sapien
caactggatagccatcccctctgaa

SEQ ID NO: 4589040 - DNA, 25 bp, Homo sapien
taaggaagaaactggatcatgggcc

SEQ ID NO: 4589041 - DNA, 25 bp, Homo sapien
gaaactggatcatgggccaactgga

SEQ ID NO: 4589042 - DNA, 25 bp, Homo sapien
tagccatcccctctgaatcatgtgg

SEQ ID NO: 4589043 - DNA, 25 bp, Homo sapien
ataatttgatccaaagcgccatagg

SEQ ID NO: 4589044 - DNA, 25 bp, Homo sapien
ttcataatttgatccaaagcgccat

SEQ ID NO: 4589045 - DNA, 25 bp, Homo sapien
tcataatttgatccaaagcgccata

SEQ ID NO: 4589046 - DNA, 25 bp, Homo sapien
cataatttgatccaaagcgccatag

SEQ ID NO: 4589047 - DNA, 25 bp, Homo sapien
aaagcaatcatgtcttctatgaaag

SEQ ID NO: 4589048 - DNA, 25 bp, Homo sapien
ggttgggactctcttaaagcaatca

SEQ ID NO: 4589049 - DNA, 25 bp, Homo sapien
gggactctcttaaagcaatcatgtc

SEQ ID NO: 4589050 - DNA, 25 bp, Homo sapien
ttctctggttgggactctcttaaag

SEQ ID NO: 4589051 - DNA, 25 bp, Homo sapien
caagatttcccatagaaagtttggc

SEQ ID NO: 4589052 - DNA, 25 bp, Homo sapien
tcccatagaaagtttggccaaattc

SEQ ID NO: 4589053 - DNA, 25 bp, Homo sapien
taagttgaaaattcgatcctgtttg

SEQ ID NO: 4589054 - DNA, 25 bp, Homo sapien
gaaggtcctccaggcaagatttccc

SEQ ID NO: 4589055 - DNA, 25 bp, Homo sapien
taattcactaagctcagattcatta

SEQ ID NO: 4589056 - DNA, 25 bp, Homo sapien
tcaacaattaattcactaagctcag

SEQ ID NO: 4589057 - DNA, 25 bp, Homo sapien
cattagtttcctggcattcgccatc

SEQ ID NO: 4589058 - DNA, 25 bp, Homo sapien
attcattagtttcctggcattcgcc

SEQ ID NO: 4589059 - DNA, 25 bp, Homo sapien
tagtgagtctccagtatttgaaacg

SEQ ID NO: 4589060 - DNA, 25 bp, Homo sapien
tttgctcattactgcgtcctccttt

SEQ ID NO: 4589061 - DNA, 25 bp, Homo sapien
ttccgctaggtgttgccagaaatgg

SEQ ID NO: 4589062 - DNA, 25 bp, Homo sapien
ttccccaggacggttttgctcatta

SEQ ID NO: 4589063 - DNA, 25 bp, Homo sapien
agcagcggaccttttcaggctcaga

SEQ ID NO: 4589064 - DNA, 25 bp, Homo sapien
cctgaacaagggtgaagtcacagca

SEQ ID NO: 4589065 - DNA, 25 bp, Homo sapien
atctccctgaacaagggtgaagtca

SEQ ID NO: 4589066 - DNA, 25 bp, Homo sapien
ctccctgaacaagggtgaagtcaca

SEQ ID NO: 4589067 - DNA, 25 bp, Homo sapien
acgctcattgccaggcagcgccagg

SEQ ID NO: 4589068 - DNA, 25 bp, Homo sapien
caaatacctgggacgctcattgcca

SEQ ID NO: 4589069 - DNA, 25 bp, Homo sapien
cgcagacgtgggacaggtttcctca

SEQ ID NO: 4589070 - DNA, 25 bp, Homo sapien
tcatcaatggccgaaagggagccca

SEQ ID NO: 4589071 - DNA, 25 bp, Homo sapien
taagtgagaaacagccttggctggt

SEQ ID NO: 4589072 - DNA, 25 bp, Homo sapien
agccttggctggtcccccaccaacg

SEQ ID NO: 4589073 - DNA, 25 bp, Homo sapien
acagccttggctggtcccccaccaa

SEQ ID NO: 4589074 - DNA, 25 bp, Homo sapien
gtgagaaacagccttggctggtccc

SEQ ID NO: 4589075 - DNA, 25 bp, Homo sapien
gctttgccagcaggactaaccattt

SEQ ID NO: 4589076 - DNA, 25 bp, Homo sapien
ttgccagcaggactaaccatttccc

SEQ ID NO: 4589077 - DNA, 25 bp, Homo sapien
tttgccagcaggactaaccatttcc

SEQ ID NO: 4589078 - DNA, 25 bp, Homo sapien
tgctttgccagcaggactaaccatt

SEQ ID NO: 4589079 - DNA, 25 bp, Homo sapien
ggctttcccgcagcatgtaaatggc

SEQ ID NO: 4589080 - DNA, 25 bp, Homo sapien
tggctttcccgcagcatgtaaatgg

SEQ ID NO: 4589081 - DNA, 25 bp, Homo sapien
tcccgcagcatgtaaatggctgccc

SEQ ID NO: 4589082 - DNA, 25 bp, Homo sapien
ctttcccgcagcatgtaaatggctg

SEQ ID NO: 4589083 - DNA, 25 bp, Homo sapien
catatgccaccgtcagaagtcaggg

SEQ ID NO: 4589084 - DNA, 25 bp, Homo sapien
cgtctgcttagaatacccggcctga

SEQ ID NO: 4589085 - DNA, 25 bp, Homo sapien
gtacatgacatcctaacaaaccctt

SEQ ID NO: 4589086 - DNA, 25 bp, Homo sapien
tgtcatctgacttgcagacgggtgc

SEQ ID NO: 4589087 - DNA, 25 bp, Homo sapien
gtctgcgtctgacacatccacctgt

SEQ ID NO: 4589088 - DNA, 25 bp, Homo sapien
ctgagatgtctgagagtctgcgtct

SEQ ID NO: 4589089 - DNA, 25 bp, Homo sapien
tgtctgagagtctgcgtctgacaca

SEQ ID NO: 4589090 - DNA, 25 bp, Homo sapien
gagagtctgcgtctgacacatccac

SEQ ID NO: 4589091 - DNA, 25 bp, Homo sapien
cttcctggcaacttctcttccccat

SEQ ID NO: 4589092 - DNA, 25 bp, Homo sapien
tcctggcaacttctcttccccataa

SEQ ID NO: 4589093 - DNA, 25 bp, Homo sapien
ttcctggcaacttctcttccccata

SEQ ID NO: 4589094 - DNA, 25 bp, Homo sapien
cctggcaacttctcttccccataaa

SEQ ID NO: 4589095 - DNA, 25 bp, Homo sapien
ttcctggcattgggagctgctggtt

SEQ ID NO: 4589096 - DNA, 25 bp, Homo sapien
ctttcctggcattgggagctgctgg

SEQ ID NO: 4589097 - DNA, 25 bp, Homo sapien
actttcctggcattgggagctgctg

SEQ ID NO: 4589098 - DNA, 25 bp, Homo sapien
cactttcctggcattgggagctgct

SEQ ID NO: 4589099 - DNA, 25 bp, Homo sapien
caataaagaagcttagcaggtaaaa

SEQ ID NO: 4589100 - DNA, 25 bp, Homo sapien
tgaataattgttggacagaagatag

SEQ ID NO: 4589101 - DNA, 25 bp, Homo sapien
tacataagtaaatggtgtaattgca

SEQ ID NO: 4589102 - DNA, 25 bp, Homo sapien
gaagtaaattatagaagtccatgca

SEQ ID NO: 4589103 - DNA, 25 bp, Homo sapien
tagtcaagtgtgttggcacactcct

SEQ ID NO: 4589104 - DNA, 25 bp, Homo sapien
ttagtcaagtgtgttggcacactcc

SEQ ID NO: 4589105 - DNA, 25 bp, Homo sapien
gtaagagtcttcttcgttgagtctt

SEQ ID NO: 4589106 - DNA, 25 bp, Homo sapien
gagtcttcttcgttgagtcttaaaa

SEQ ID NO: 4589107 - DNA, 25 bp, Homo sapien
aagagtcttcttcgttgagtcttaa

SEQ ID NO: 4589108 - DNA, 25 bp, Homo sapien
gtcttcttcgttgagtcttaaaatg

SEQ ID NO: 4589109 - DNA, 25 bp, Homo sapien
cttctctgcactgttgataaaggaa

SEQ ID NO: 4589110 - DNA, 25 bp, Homo sapien
tctctgcactgttgataaaggaaga

SEQ ID NO: 4589111 - DNA, 25 bp, Homo sapien
gttggctctttcttgggcattccca

SEQ ID NO: 4589112 - DNA, 25 bp, Homo sapien
tgttggctctttcttgggcattccc

SEQ ID NO: 4589113 - DNA, 25 bp, Homo sapien
agccacatgggccaaatcgtagaca

SEQ ID NO: 4589114 - DNA, 25 bp, Homo sapien
catgggccaaatcgtagacatcctt

SEQ ID NO: 4589115 - DNA, 25 bp, Homo sapien
ctagagaagggcattgcccaacttg

SEQ ID NO: 4589116 - DNA, 25 bp, Homo sapien
aagggcattgcccaacttggagaag

SEQ ID NO: 4589117 - DNA, 25 bp, Homo sapien
gggctttgctcttgggcagggctgc

SEQ ID NO: 4589118 - DNA, 25 bp, Homo sapien
cagggctttgctcttgggcagggct

SEQ ID NO: 4589119 - DNA, 25 bp, Homo sapien
aatgcagggctttgctcttgggcag

SEQ ID NO: 4589120 - DNA, 25 bp, Homo sapien
tgcagggctttgctcttgggcaggg

SEQ ID NO: 4589121 - DNA, 25 bp, Homo sapien
tcacacatgctcagggaaaaattgg

SEQ ID NO: 4589122 - DNA, 25 bp, Homo sapien
cacagggcatttctcccgaggcaat

SEQ ID NO: 4589123 - DNA, 25 bp, Homo sapien
caaagcgacaccatattctgttggg

SEQ ID NO: 4589124 - DNA, 25 bp, Homo sapien
tctgttgggaagtgcagaacgcccc

SEQ ID NO: 4589125 - DNA, 25 bp, Homo sapien
aagccacaagctctgccaccaggat

SEQ ID NO: 4589126 - DNA, 25 bp, Homo sapien
ttgtaaagccacaagctctgccacc

SEQ ID NO: 4589127 - DNA, 25 bp, Homo sapien
tcacgttgtaaagccacaagctctg

SEQ ID NO: 4589128 - DNA, 25 bp, Homo sapien
ccacaagctctgccaccaggattgc

SEQ ID NO: 4589129 - DNA, 25 bp, Homo sapien
tgaccagggctgtatctcatcagtc

SEQ ID NO: 4589130 - DNA, 25 bp, Homo sapien
gagttgcagttctagggatgatcat

SEQ ID NO: 4589131 - DNA, 25 bp, Homo sapien
cttcctggtagagtcgaagaaggac

SEQ ID NO: 4589132 - DNA, 25 bp, Homo sapien
agtcgaagaaggacactcacagtgc

SEQ ID NO: 4589133 - DNA, 25 bp, Homo sapien
tctaaagctgaccagatgcaaatgg

SEQ ID NO: 4589134 - DNA, 25 bp, Homo sapien
gcaggtgctatctcttgtcatgtca

SEQ ID NO: 4589135 - DNA, 25 bp, Homo sapien
cactgtatctcatccgcttctgcag

SEQ ID NO: 4589136 - DNA, 25 bp, Homo sapien
gactttgcacatgtctgacacaagg

SEQ ID NO: 4589137 - DNA, 25 bp, Homo sapien
gggcggaggagcgttccagccgagt

SEQ ID NO: 4589138 - DNA, 25 bp, Homo sapien
cggaggagcgttccagccgagtccc

SEQ ID NO: 4589139 - DNA, 25 bp, Homo sapien
gaggagcgttccagccgagtcccgc

SEQ ID NO: 4589140 - DNA, 25 bp, Homo sapien
agcgggcggaggagcgttccagccg

SEQ ID NO: 4589141 - DNA, 25 bp, Homo sapien
gttgaccactgggtagcgagcgccc

SEQ ID NO: 4589142 - DNA, 25 bp, Homo sapien
taagcagaaacctcgcgggtccgaa

SEQ ID NO: 4589143 - DNA, 25 bp, Homo sapien
cacatttgcggatcacattagacca

SEQ ID NO: 4589144 - DNA, 25 bp, Homo sapien
tcaggtcggaaacagcagcacattt

SEQ ID NO: 4589145 - DNA, 25 bp, Homo sapien
gatggcttcctagctctctggccaa

SEQ ID NO: 4589146 - DNA, 25 bp, Homo sapien
gatctttgactgtctccactgccaa

SEQ ID NO: 4589147 - DNA, 25 bp, Homo sapien
tcgtgtatatctgaatggccctcca

SEQ ID NO: 4589148 - DNA, 25 bp, Homo sapien
tgactgtgccctgaattacaacgtg

SEQ ID NO: 4589149 - DNA, 25 bp, Homo sapien
tcacactccatagcaatttcaccat

SEQ ID NO: 4589150 - DNA, 25 bp, Homo sapien
tgatcatgtcaatcatgggcagtga

SEQ ID NO: 4589151 - DNA, 25 bp, Homo sapien
ccccagttacccctgctattgctat

SEQ ID NO: 4589152 - DNA, 25 bp, Homo sapien
ttctacagcaatctcacactccata

SEQ ID NO: 4589153 - DNA, 25 bp, Homo sapien
tttccctctaccatggaatggtacg

SEQ ID NO: 4589154 - DNA, 25 bp, Homo sapien
tccctctaccatggaatggtacggg

SEQ ID NO: 4589155 - DNA, 25 bp, Homo sapien
cctctaccatggaatggtacgggtg

SEQ ID NO: 4589156 - DNA, 25 bp, Homo sapien
tctaccatggaatggtacgggtgtg

SEQ ID NO: 4589157 - DNA, 25 bp, Homo sapien
agatgtgagttctttggagggctcc

SEQ ID NO: 4589158 - DNA, 25 bp, Homo sapien
tcagcttgccacttgctgccggggt

SEQ ID NO: 4589159 - DNA, 25 bp, Homo sapien
gagttctttggagggctccacagga

SEQ ID NO: 4589160 - DNA, 25 bp, Homo sapien
ccctctgggtagcagatgtgagttc

SEQ ID NO: 4589161 - DNA, 25 bp, Homo sapien
gcactccgggttttatgtcataaat

SEQ ID NO: 4589162 - DNA, 25 bp, Homo sapien
caatattccagtctgtgttgacact

SEQ ID NO: 4589163 - DNA, 25 bp, Homo sapien
tttcagttctgtgtagagcttttcc

SEQ ID NO: 4589164 - DNA, 25 bp, Homo sapien
atgtacttcccatgaccttgtcccc

SEQ ID NO: 4589165 - DNA, 25 bp, Homo sapien
gcagagtgtattccgtatattcata

SEQ ID NO: 4589166 - DNA, 25 bp, Homo sapien
tgaataaaggaaggatatactactc

SEQ ID NO: 4589167 - DNA, 25 bp, Homo sapien
ggatatactactctttgagagagaa

SEQ ID NO: 4589168 - DNA, 25 bp, Homo sapien
aacaggatcattagagaggttttcc

SEQ ID NO: 4589169 - DNA, 25 bp, Homo sapien
attggatgtggtcgacttgctttcc

SEQ ID NO: 4589170 - DNA, 25 bp, Homo sapien
ggatgtggtcgacttgctttcccaa

SEQ ID NO: 4589171 - DNA, 25 bp, Homo sapien
tggatgtggtcgacttgctttccca

SEQ ID NO: 4589172 - DNA, 25 bp, Homo sapien
atgtggtcgacttgctttcccaatt

SEQ ID NO: 4589173 - DNA, 25 bp, Homo sapien
gaacatgggaggcggaggtttgcag

SEQ ID NO: 4589174 - DNA, 25 bp, Homo sapien
tcaggaggttgaggtagaattgctt

SEQ ID NO: 4589175 - DNA, 25 bp, Homo sapien
tgagccgagagcgtgccattgcatt

SEQ ID NO: 4589176 - DNA, 25 bp, Homo sapien
ttgaacatgggaggcggaggtttgc

SEQ ID NO: 4589177 - DNA, 25 bp, Homo sapien
tagtccaaaggcttgtttgtagaat

SEQ ID NO: 4589178 - DNA, 25 bp, Homo sapien
tacaactatgaggaagtaatagtct

SEQ ID NO: 4589179 - DNA, 25 bp, Homo sapien
cactcttttcctacaactatgagga

SEQ ID NO: 4589180 - DNA, 25 bp, Homo sapien
ccaaatactgttagtccaaaggctt

SEQ ID NO: 4589181 - DNA, 25 bp, Homo sapien
caggtagcaaggaagctgtcaagac

SEQ ID NO: 4589182 - DNA, 25 bp, Homo sapien
aaaggaaccaggattccatggcaaa

SEQ ID NO: 4589183 - DNA, 25 bp, Homo sapien
aaccaggacatattttgcagatccc

SEQ ID NO: 4589184 - DNA, 25 bp, Homo sapien
gagcaaatggccaacttaatagcag

SEQ ID NO: 4589185 - DNA, 25 bp, Homo sapien
gatacctgcaaccacaagaatgatt

SEQ ID NO: 4589186 - DNA, 25 bp, Homo sapien
gtacatatgtgcaatagaatgccag

SEQ ID NO: 4589187 - DNA, 25 bp, Homo sapien
tgccagccggcaattaaaaaggtgc

SEQ ID NO: 4589188 - DNA, 25 bp, Homo sapien
caggaaaggtaatatcggcatagca

SEQ ID NO: 4589189 - DNA, 25 bp, Homo sapien
tagtagcccctattaccactgcaga

SEQ ID NO: 4589190 - DNA, 25 bp, Homo sapien
tgtggcacacagtaactcaagatgg

SEQ ID NO: 4589191 - DNA, 25 bp, Homo sapien
ttgctacaggagaacgcggcagtcc

SEQ ID NO: 4589192 - DNA, 25 bp, Homo sapien
gacccaggctgttatggcacagtgc

SEQ ID NO: 4589193 - DNA, 25 bp, Homo sapien
gttgtcgtcatggcccgttctcaat

SEQ ID NO: 4589194 - DNA, 25 bp, Homo sapien
aaaccgccgttgtcgtcatggcccg

SEQ ID NO: 4589195 - DNA, 25 bp, Homo sapien
aaccgccgttgtcgtcatggcccgt

SEQ ID NO: 4589196 - DNA, 25 bp, Homo sapien
gtggctgccgggcggagacgctcct

SEQ ID NO: 4589197 - DNA, 25 bp, Homo sapien
gggtggctgccgggcggagacgctc

SEQ ID NO: 4589198 - DNA, 25 bp, Homo sapien
ggggtggctgccgggcggagacgct

SEQ ID NO: 4589199 - DNA, 25 bp, Homo sapien
ggtggctgccgggcggagacgctcc

SEQ ID NO: 4589200 - DNA, 25 bp, Homo sapien
tctgtatcattagcattgtatcata

SEQ ID NO: 4589201 - DNA, 25 bp, Homo sapien
ctctgtatcattagcattgtatcat

SEQ ID NO: 4589202 - DNA, 25 bp, Homo sapien
tgataggaggtttcaggcagtctat

SEQ ID NO: 4589203 - DNA, 25 bp, Homo sapien
caggcagtctatactgagcttgtgc

SEQ ID NO: 4589204 - DNA, 25 bp, Homo sapien
ttaccaggaggccatttgtctgcaa

SEQ ID NO: 4589205 - DNA, 25 bp, Homo sapien
tactgagcttgtgctgaaccacaag

SEQ ID NO: 4589206 - DNA, 25 bp, Homo sapien
ttctctggaaccatgagcctgtgtc

SEQ ID NO: 4589207 - DNA, 25 bp, Homo sapien
gaatctagttgcacagacatgcatg

SEQ ID NO: 4589208 - DNA, 25 bp, Homo sapien
gtagtgtcatgtgcccagtacttca

SEQ ID NO: 4589209 - DNA, 25 bp, Homo sapien
ggacaagtgtcaggtaaagaccata

SEQ ID NO: 4589210 - DNA, 25 bp, Homo sapien
tatttattcaatgggtcagctacca

SEQ ID NO: 4589211 - DNA, 25 bp, Homo sapien
aggtgcacagaagcaaaaatcgagg

SEQ ID NO: 4589212 - DNA, 25 bp, Homo sapien
gggtcagaatccctacacagagtcc

SEQ ID NO: 4589213 - DNA, 25 bp, Homo sapien
agcaaaaatcgaggtttgggagcct

SEQ ID NO: 4589214 - DNA, 25 bp, Homo sapien
aagtttgctgtaagggtggagcctt

SEQ ID NO: 4589215 - DNA, 25 bp, Homo sapien
cattaattgagggtgtgggacacag

SEQ ID NO: 4589216 - DNA, 25 bp, Homo sapien
tctggcatttagcaacggatgcgtc

SEQ ID NO: 4589217 - DNA, 25 bp, Homo sapien
tatccaggagtcagcagacatatct

SEQ ID NO: 4589218 - DNA, 25 bp, Homo sapien
ggacacaggtgtcccgaggctaggg

SEQ ID NO: 4589219 - DNA, 25 bp, Homo sapien
aagatgccagccagtatcaggccaa

SEQ ID NO: 4589220 - DNA, 25 bp, Homo sapien
caaaggttggcccattgtgctcaac

SEQ ID NO: 4589221 - DNA, 25 bp, Homo sapien
ccccatggtatgagatccagggaga

SEQ ID NO: 4589222 - DNA, 25 bp, Homo sapien
tgaccttgacacatgcttctgccat

SEQ ID NO: 4589223 - DNA, 25 bp, Homo sapien
gatattaagactcatttagctcccc

SEQ ID NO: 4589224 - DNA, 25 bp, Homo sapien
cagtcctgttgagcctgtgagatgg

SEQ ID NO: 4589225 - DNA, 25 bp, Homo sapien
cttagccccttgagactacagccat

SEQ ID NO: 4589226 - DNA, 25 bp, Homo sapien
taaacacctgtacaatccacagggc

SEQ ID NO: 4589227 - DNA, 25 bp, Homo sapien
tagtatctgttcctgtgtagcctcc

SEQ ID NO: 4589228 - DNA, 25 bp, Homo sapien
caggccccgtggtgagttcttaggc

SEQ ID NO: 4589229 - DNA, 25 bp, Homo sapien
cgtttgactacactagcattggaca

SEQ ID NO: 4589230 - DNA, 25 bp, Homo sapien
gcattggacagttgctacgccctcc

SEQ ID NO: 4589231 - DNA, 25 bp, Homo sapien
gccttgatggcatcagatcctgatg

SEQ ID NO: 4589232 - DNA, 25 bp, Homo sapien
ccttgatggcatcagatcctgatgc

SEQ ID NO: 4589233 - DNA, 25 bp, Homo sapien
tatgagtgcatcctcacgtgctgcc

SEQ ID NO: 4589234 - DNA, 25 bp, Homo sapien
gcatctcggaagtcaaagaagaggg

SEQ ID NO: 4589235 - DNA, 25 bp, Homo sapien
tcacactgactgacctaagggttca

SEQ ID NO: 4589236 - DNA, 25 bp, Homo sapien
tagactagcacagagtggtacatcc

SEQ ID NO: 4589237 - DNA, 25 bp, Homo sapien
tgagcctagttcctggtcagtaata

SEQ ID NO: 4589238 - DNA, 25 bp, Homo sapien
gcctagttcctggtcagtaataact

SEQ ID NO: 4589239 - DNA, 25 bp, Homo sapien
tgccacaggctctgctgagcctagt

SEQ ID NO: 4589240 - DNA, 25 bp, Homo sapien
gctctgctgagcctagttcctggtc

SEQ ID NO: 4589241 - DNA, 25 bp, Homo sapien
gcagttgtctcacagttcttgcata

SEQ ID NO: 4589242 - DNA, 25 bp, Homo sapien
catagtttgtaacttaggtggctac

SEQ ID NO: 4589243 - DNA, 25 bp, Homo sapien
catgagatattctcaagctcagaga

SEQ ID NO: 4589244 - DNA, 25 bp, Homo sapien
agtttactaataagcctgtcaaagg

SEQ ID NO: 4589245 - DNA, 25 bp, Homo sapien
actgttacttcttctacgagaaact

SEQ ID NO: 4589246 - DNA, 25 bp, Homo sapien
ccttcactgcgggagtaatcttgca

SEQ ID NO: 4589247 - DNA, 25 bp, Homo sapien
cttcttctacgagaaactggcctga

SEQ ID NO: 4589248 - DNA, 25 bp, Homo sapien
gcgggagtaatcttgcagaagaatt

SEQ ID NO: 4589249 - DNA, 25 bp, Homo sapien
ttgcagtttcaccaaataagacccc

SEQ ID NO: 4589250 - DNA, 25 bp, Homo sapien
gcagtttcaccaaataagaccccaa

SEQ ID NO: 4589251 - DNA, 25 bp, Homo sapien
ttttgcagtttcaccaaataagacc

SEQ ID NO: 4589252 - DNA, 25 bp, Homo sapien
tgcagagttttgcagtttcaccaaa

SEQ ID NO: 4589253 - DNA, 25 bp, Homo sapien
caaagcgttggtcagttggtttgta

SEQ ID NO: 4589254 - DNA, 25 bp, Homo sapien
gagttcaagctgatgaggtatataa

SEQ ID NO: 4589255 - DNA, 25 bp, Homo sapien
atcctcaaagcgttggtcagttggt

SEQ ID NO: 4589256 - DNA, 25 bp, Homo sapien
ggcctttcaaacttgagttcaagct

SEQ ID NO: 4589257 - DNA, 25 bp, Homo sapien
cctaggctttatctcctgaggaaca

SEQ ID NO: 4589258 - DNA, 25 bp, Homo sapien
ggctgtagaacgtttgaccacagag

SEQ ID NO: 4589259 - DNA, 25 bp, Homo sapien
ttaaagctttgcctaggctttatct

SEQ ID NO: 4589260 - DNA, 25 bp, Homo sapien
gggctgtagaacgtttgaccacaga

SEQ ID NO: 4589261 - DNA, 25 bp, Homo sapien
tggaagagccatacccctatactag

SEQ ID NO: 4589262 - DNA, 25 bp, Homo sapien
tattattactgcaaggaatgcctga

SEQ ID NO: 4589263 - DNA, 25 bp, Homo sapien
cagtgagcagtccagttcctgacct

SEQ ID NO: 4589264 - DNA, 25 bp, Homo sapien
gcactactgcataccaaaatctgag

SEQ ID NO: 4589265 - DNA, 25 bp, Homo sapien
ggcaaaacaccccagaattttcata

SEQ ID NO: 4589266 - DNA, 25 bp, Homo sapien
cataaatccttgtggttccacgtgg

SEQ ID NO: 4589267 - DNA, 25 bp, Homo sapien
ttttcataaatccttgtggttccac

SEQ ID NO: 4589268 - DNA, 25 bp, Homo sapien
tccaaatattcagttgtagggcaaa

SEQ ID NO: 4589269 - DNA, 25 bp, Homo sapien
aagtacaaatgtgacacagacacca

SEQ ID NO: 4589270 - DNA, 25 bp, Homo sapien
gtacaaatgtgacacagacaccagc

SEQ ID NO: 4589271 - DNA, 25 bp, Homo sapien
ccgcaagtacaaatgtgacacagac

SEQ ID NO: 4589272 - DNA, 25 bp, Homo sapien
acaaatgtgacacagacaccagctc

SEQ ID NO: 4589273 - DNA, 25 bp, Homo sapien
gtaaccatattgtcccagattcttc

SEQ ID NO: 4589274 - DNA, 25 bp, Homo sapien
tggagaaggaaacagtagtaaccat

SEQ ID NO: 4589275 - DNA, 25 bp, Homo sapien
gaaacagtagtaaccatattgtccc

SEQ ID NO: 4589276 - DNA, 25 bp, Homo sapien
gacaagccatatgcctgttcaacaa

SEQ ID NO: 4589277 - DNA, 25 bp, Homo sapien
ggccatttgacatagaggaattcca

SEQ ID NO: 4589278 - DNA, 25 bp, Homo sapien
tagttacgttgctgttttcagtacc

SEQ ID NO: 4589279 - DNA, 25 bp, Homo sapien
ttcagtaccctctgtgccctcttct

SEQ ID NO: 4589280 - DNA, 25 bp, Homo sapien
tcctgtatttcttagttacgttgct

SEQ ID NO: 4589281 - DNA, 25 bp, Homo sapien
cagatggcttcatgaccgccagtgg

SEQ ID NO: 4589282 - DNA, 25 bp, Homo sapien
ttccagatggcttcatgaccgccag

SEQ ID NO: 4589283 - DNA, 25 bp, Homo sapien
gcttgggcacttgcacttggccgtc

SEQ ID NO: 4589284 - DNA, 25 bp, Homo sapien
tggccgtcaagaggcttttccagat

SEQ ID NO: 4589285 - DNA, 25 bp, Homo sapien
ggtggctgaagtttgcttgagccta

SEQ ID NO: 4589286 - DNA, 25 bp, Homo sapien
cttgagcctagctccctgagatggg

SEQ ID NO: 4589287 - DNA, 25 bp, Homo sapien
cgtggtcgccatgggaactccaggt

SEQ ID NO: 4589288 - DNA, 25 bp, Homo sapien
tcctctcccgtggtcgccatgggaa

SEQ ID NO: 4589289 - DNA, 25 bp, Homo sapien
gctgacaggatagtcacagctgctc

SEQ ID NO: 4589290 - DNA, 25 bp, Homo sapien
ccctggtcaccggagcatgctgggt

SEQ ID NO: 4589291 - DNA, 25 bp, Homo sapien
tcagctgacaggatagtcacagctg

SEQ ID NO: 4589292 - DNA, 25 bp, Homo sapien
gtcaccctggtcaccggagcatgct

SEQ ID NO: 4589293 - DNA, 25 bp, Homo sapien
ggataacaggaatttcccgccagga

SEQ ID NO: 4589294 - DNA, 25 bp, Homo sapien
atgttaggataacaggaatttcccg

SEQ ID NO: 4589295 - DNA, 25 bp, Homo sapien
taggataacaggaatttcccgccag

SEQ ID NO: 4589296 - DNA, 25 bp, Homo sapien
taacaggaatttcccgccaggatga

SEQ ID NO: 4589297 - DNA, 25 bp, Homo sapien
tcagatagcgtttagcaactgtaac

SEQ ID NO: 4589298 - DNA, 25 bp, Homo sapien
gactaggaatgaccttcagatagcg

SEQ ID NO: 4589299 - DNA, 25 bp, Homo sapien
ccaatctgacaataatgtgttcatc

SEQ ID NO: 4589300 - DNA, 25 bp, Homo sapien
cctgacacgtataaatgactaggaa

SEQ ID NO: 4589301 - DNA, 25 bp, Homo sapien
aggcccctgtcagcataagcctgga

SEQ ID NO: 4589302 - DNA, 25 bp, Homo sapien
tatgaggaagaggttcttataatta

SEQ ID NO: 4589303 - DNA, 25 bp, Homo sapien
ctgcctggtgatgggactcctgttt

SEQ ID NO: 4589304 - DNA, 25 bp, Homo sapien
cttataattattcgcggctgggaaa

SEQ ID NO: 4589305 - DNA, 25 bp, Homo sapien
ggcgcctacggagtacactctggcc

SEQ ID NO: 4589306 - DNA, 25 bp, Homo sapien
ccatggcgcctacggagtacactct

SEQ ID NO: 4589307 - DNA, 25 bp, Homo sapien
atggcgcctacggagtacactctgg

SEQ ID NO: 4589308 - DNA, 25 bp, Homo sapien
ctgccatggcgcctacggagtacac

SEQ ID NO: 4589309 - DNA, 25 bp, Homo sapien
gctggcctgtctcatggaacccagg

SEQ ID NO: 4589310 - DNA, 25 bp, Homo sapien
cagtcgcacgctagcagctatcatg

SEQ ID NO: 4589311 - DNA, 25 bp, Homo sapien
agcagtagtgcttcagcaggggcca

SEQ ID NO: 4589312 - DNA, 25 bp, Homo sapien
ttcagtcgcacgctagcagctatca

SEQ ID NO: 4589313 - DNA, 25 bp, Homo sapien
gctggccagcagtagtgcttcagca

SEQ ID NO: 4589314 - DNA, 25 bp, Homo sapien
ccatggcctatgaagtgtgttgtgg

SEQ ID NO: 4589315 - DNA, 25 bp, Homo sapien
gcgtgtataggactctcaggctttt

SEQ ID NO: 4589316 - DNA, 25 bp, Homo sapien
atgaccgcgtgtataggactctcag

SEQ ID NO: 4589317 - DNA, 25 bp, Homo sapien
ccttccatggcctatgaagtgtgtt

SEQ ID NO: 4589318 - DNA, 25 bp, Homo sapien
catggatctggggcgtgcagccact

SEQ ID NO: 4589319 - DNA, 25 bp, Homo sapien
gatctggggcgtgcagccactcggc

SEQ ID NO: 4589320 - DNA, 25 bp, Homo sapien
cggccggcacgtgccgcatggatct

SEQ ID NO: 4589321 - DNA, 25 bp, Homo sapien
ctggggcgtgcagccactcggcacg

SEQ ID NO: 4589322 - DNA, 25 bp, Homo sapien
ttggtggttgtgctgcccggagcct

SEQ ID NO: 4589323 - DNA, 25 bp, Homo sapien
cggagcctccagtccgcgagtgtga

SEQ ID NO: 4589324 - DNA, 25 bp, Homo sapien
cgcgagtgtgaagaacggaccagat

SEQ ID NO: 4589325 - DNA, 25 bp, Homo sapien
cggaagcgcgcgcatgctctggact

SEQ ID NO: 4589326 - DNA, 25 bp, Homo sapien
ctcccgccagaggtgagagtaaaat

SEQ ID NO: 4589327 - DNA, 25 bp, Homo sapien
ccctcccgccagaggtgagagtaaa

SEQ ID NO: 4589328 - DNA, 25 bp, Homo sapien
cctcccgccagaggtgagagtaaaa

SEQ ID NO: 4589329 - DNA, 25 bp, Homo sapien
cccacatgtactttgaaccgaggag

SEQ ID NO: 4589330 - DNA, 25 bp, Homo sapien
gaaatctccatggaccagtacccca

SEQ ID NO: 4589331 - DNA, 25 bp, Homo sapien
gaagacctcagtgtcaatggctaga

SEQ ID NO: 4589332 - DNA, 25 bp, Homo sapien
gaagccttgctgacgcacaacatgg

SEQ ID NO: 4589333 - DNA, 25 bp, Homo sapien
gacattgcttggtccccagacctca

SEQ ID NO: 4589334 - DNA, 25 bp, Homo sapien
tagaagcccgtgtgaaaagccatac

SEQ ID NO: 4589335 - DNA, 25 bp, Homo sapien
gataggtcttaagtcccctcccaga

SEQ ID NO: 4589336 - DNA, 25 bp, Homo sapien
gagcacatggcaagtaagaggcaaa

SEQ ID NO: 4589337 - DNA, 25 bp, Homo sapien
tgtccctagcccggcctgggtggca

SEQ ID NO: 4589338 - DNA, 25 bp, Homo sapien
atgtccctagcccggcctgggtggc

SEQ ID NO: 4589339 - DNA, 25 bp, Homo sapien
ctgccatgtccctagcccggcctgg

SEQ ID NO: 4589340 - DNA, 25 bp, Homo sapien
cctgccatgtccctagcccggcctg

SEQ ID NO: 4589341 - DNA, 25 bp, Homo sapien
aatgcagccaaagaggccgctggac

SEQ ID NO: 4589342 - DNA, 25 bp, Homo sapien
gaatgcagccaaagaggccgctgga

SEQ ID NO: 4589343 - DNA, 25 bp, Homo sapien
cgccttctgtccagcacttgcatga

SEQ ID NO: 4589344 - DNA, 25 bp, Homo sapien
ttctgtccagcacttgcatgacact

SEQ ID NO: 4589345 - DNA, 25 bp, Homo sapien
tgtccagcacttgcatgacacttcc

SEQ ID NO: 4589346 - DNA, 25 bp, Homo sapien
ccccagggatcactgagtcctggag

SEQ ID NO: 4589347 - DNA, 25 bp, Homo sapien
tctgaactccgagatgctctgggtg

SEQ ID NO: 4589348 - DNA, 25 bp, Homo sapien
ccgggggcgcctacttcaggtctga

SEQ ID NO: 4589349 - DNA, 25 bp, Homo sapien
agagtctgaactccgagatgctctg

SEQ ID NO: 4589350 - DNA, 25 bp, Homo sapien
cagtcccgggggcgcctacttcagg

SEQ ID NO: 4589351 - DNA, 25 bp, Homo sapien
cgtgagcgagcacacgagtgtaaag

SEQ ID NO: 4589352 - DNA, 25 bp, Homo sapien
agcacacgagtgtaaagaatggcac

SEQ ID NO: 4589353 - DNA, 25 bp, Homo sapien
gagcgagcacacgagtgtaaagaat

SEQ ID NO: 4589354 - DNA, 25 bp, Homo sapien
gatttccagtgtgccgtctccactg

SEQ ID NO: 4589355 - DNA, 25 bp, Homo sapien
tgctgcatgaatggtctgcctgccc

SEQ ID NO: 4589356 - DNA, 25 bp, Homo sapien
tcccttctagagctgcagacttgct

SEQ ID NO: 4589357 - DNA, 25 bp, Homo sapien
caatctggcgtgtgcgtgtgtccgc

SEQ ID NO: 4589358 - DNA, 25 bp, Homo sapien
gatgtggaaccatcagagagggcac

SEQ ID NO: 4589359 - DNA, 25 bp, Homo sapien
tgtcatgcagtctgagccatgctgc

SEQ ID NO: 4589360 - DNA, 25 bp, Homo sapien
ctgggagtgccgagagccaaatcca

SEQ ID NO: 4589361 - DNA, 25 bp, Homo sapien
gctgccagggcaggtatccagctcc

SEQ ID NO: 4589362 - DNA, 25 bp, Homo sapien
gcagtctgagccatgctgccagggc

SEQ ID NO: 4589363 - DNA, 25 bp, Homo sapien
tgcagattaggggtgatagtcaggg

SEQ ID NO: 4589364 - DNA, 25 bp, Homo sapien
cccacctcctctatctgtcagcaat

SEQ ID NO: 4589365 - DNA, 25 bp, Homo sapien
taggggtgatagtcagggtcccacc

SEQ ID NO: 4589366 - DNA, 25 bp, Homo sapien
ctcctctatctgtcagcaatccagt

SEQ ID NO: 4589367 - DNA, 25 bp, Homo sapien
cagggtcccttcagtggaccctggg

SEQ ID NO: 4589368 - DNA, 25 bp, Homo sapien
caggcactacctatgaagctctagc

SEQ ID NO: 4589369 - DNA, 25 bp, Homo sapien
cggttatcccacaacacacttcata

SEQ ID NO: 4589370 - DNA, 25 bp, Homo sapien
gcagtggcatctagctacctgccct

SEQ ID NO: 4589371 - DNA, 25 bp, Homo sapien
caccccacctgagggctctactcac

SEQ ID NO: 4589372 - DNA, 25 bp, Homo sapien
ggaatctgagcacagtgcgagcctc

SEQ ID NO: 4589373 - DNA, 25 bp, Homo sapien
cccaccccacctgagggctctactc

SEQ ID NO: 4589374 - DNA, 25 bp, Homo sapien
tgggaatctgagcacagtgcgagcc

SEQ ID NO: 4589375 - DNA, 25 bp, Homo sapien
ccctgctcgtcagcacacccaagct

SEQ ID NO: 4589376 - DNA, 25 bp, Homo sapien
accctgctcgtcagcacacccaagc

SEQ ID NO: 4589377 - DNA, 25 bp, Homo sapien
caccctgctcgtcagcacacccaag

SEQ ID NO: 4589378 - DNA, 25 bp, Homo sapien
cctccttgtggtcgcccacaagctg

SEQ ID NO: 4589379 - DNA, 25 bp, Homo sapien
tttgccatgcccctccttgtggtcg

SEQ ID NO: 4589380 - DNA, 25 bp, Homo sapien
cttgtggtcgcccacaagctgcaac

SEQ ID NO: 4589381 - DNA, 25 bp, Homo sapien
atgcccctccttgtggtcgcccaca

SEQ ID NO: 4589382 - DNA, 25 bp, Homo sapien
agcctgacgatgtcctcctctccca

SEQ ID NO: 4589383 - DNA, 25 bp, Homo sapien
gcaggaggacatggctcagatgctg

SEQ ID NO: 4589384 - DNA, 25 bp, Homo sapien
cccagcggtgccctagcctctcgct

SEQ ID NO: 4589385 - DNA, 25 bp, Homo sapien
aggaggacatggctcagatgctggg

SEQ ID NO: 4589386 - DNA, 25 bp, Homo sapien
ctgcaggaggacatggctcagatgc

SEQ ID NO: 4589387 - DNA, 25 bp, Homo sapien
gaagctctagtttctctacccgctc

SEQ ID NO: 4589388 - DNA, 25 bp, Homo sapien
gatgaattgaagctctagtttctct

SEQ ID NO: 4589389 - DNA, 25 bp, Homo sapien
cctgagaggtggatgaattgaagct

SEQ ID NO: 4589390 - DNA, 25 bp, Homo sapien
gtctgtcctgagaggtggatgaatt

SEQ ID NO: 4589391 - DNA, 25 bp, Homo sapien
tcaggtccaccttctccttccataa

SEQ ID NO: 4589392 - DNA, 25 bp, Homo sapien
aggtccaccttctccttccataaag

SEQ ID NO: 4589393 - DNA, 25 bp, Homo sapien
gtccaccttctccttccataaagtc

SEQ ID NO: 4589394 - DNA, 25 bp, Homo sapien
tccaccttctccttccataaagtcg

SEQ ID NO: 4589395 - DNA, 25 bp, Homo sapien
ctgcagggcccggtgggtctcccca

SEQ ID NO: 4589396 - DNA, 25 bp, Homo sapien
tgcagggcccggtgggtctccccaa

SEQ ID NO: 4589397 - DNA, 25 bp, Homo sapien
cggtgggtctccccaaacacagact

SEQ ID NO: 4589398 - DNA, 25 bp, Homo sapien
tgggtctccccaaacacagactcac

SEQ ID NO: 4589399 - DNA, 25 bp, Homo sapien
gggctggggccgctacctctggctt

SEQ ID NO: 4589400 - DNA, 25 bp, Homo sapien
tctggggctggggccgctacctctg

SEQ ID NO: 4589401 - DNA, 25 bp, Homo sapien
ctggggccgctacctctggcttctt

SEQ ID NO: 4589402 - DNA, 25 bp, Homo sapien
cactctctggggctggggccgctac

SEQ ID NO: 4589403 - DNA, 25 bp, Homo sapien
ggtgagccaggggctggcagcacac

SEQ ID NO: 4589404 - DNA, 25 bp, Homo sapien
cgaggccactgggtgagccaggggc

SEQ ID NO: 4589405 - DNA, 25 bp, Homo sapien
tgggtgagccaggggctggcagcac

SEQ ID NO: 4589406 - DNA, 25 bp, Homo sapien
actgggtgagccaggggctggcagc

SEQ ID NO: 4589407 - DNA, 25 bp, Homo sapien
ctggctccagcggagttgaaaaatg

SEQ ID NO: 4589408 - DNA, 25 bp, Homo sapien
gctccagcggagttgaaaaatgcca

SEQ ID NO: 4589409 - DNA, 25 bp, Homo sapien
ggctccagcggagttgaaaaatgcc

SEQ ID NO: 4589410 - DNA, 25 bp, Homo sapien
ctccagcggagttgaaaaatgccac

SEQ ID NO: 4589411 - DNA, 25 bp, Homo sapien
atggcctcccggctctccaggtccc

SEQ ID NO: 4589412 - DNA, 25 bp, Homo sapien
catggcctcccggctctccaggtcc

SEQ ID NO: 4589413 - DNA, 25 bp, Homo sapien
ctgctcactgtccagatgtcctcct

SEQ ID NO: 4589414 - DNA, 25 bp, Homo sapien
gctcactgtccagatgtcctcctcc

SEQ ID NO: 4589415 - DNA, 25 bp, Homo sapien
actgtccagatgtcctcctccatct

SEQ ID NO: 4589416 - DNA, 25 bp, Homo sapien
gggccgaggcgcctcctgctcactg

SEQ ID NO: 4589417 - DNA, 25 bp, Homo sapien
gtgcggacaccttgtcggcataatg

SEQ ID NO: 4589418 - DNA, 25 bp, Homo sapien
gacaccttgtcggcataatgaccga

SEQ ID NO: 4589419 - DNA, 25 bp, Homo sapien
caccttgtcggcataatgaccgaca

SEQ ID NO: 4589420 - DNA, 25 bp, Homo sapien
gcggacaccttgtcggcataatgac

SEQ ID NO: 4589421 - DNA, 25 bp, Homo sapien
atagatgtgtttaaaccaactaact

SEQ ID NO: 4589422 - DNA, 25 bp, Homo sapien
cagcctcagccttaactcttaaaat

SEQ ID NO: 4589423 - DNA, 25 bp, Homo sapien
atgtatatctatatcgagagagaga

SEQ ID NO: 4589424 - DNA, 25 bp, Homo sapien
aaatatcttcaaaccaatattcttc

SEQ ID NO: 4589425 - DNA, 25 bp, Homo sapien
gaggccagttttgctacctctctcc

SEQ ID NO: 4589426 - DNA, 25 bp, Homo sapien
ggccagttttgctacctctctccca

SEQ ID NO: 4589427 - DNA, 25 bp, Homo sapien
tgaggccagttttgctacctctctc

SEQ ID NO: 4589428 - DNA, 25 bp, Homo sapien
cagttttgctacctctctcccatct

SEQ ID NO: 4589429 - DNA, 25 bp, Homo sapien
aactccgccaactaagttgcgctct

SEQ ID NO: 4589430 - DNA, 25 bp, Homo sapien
ccaactccgccaactaagttgcgct

SEQ ID NO: 4589431 - DNA, 25 bp, Homo sapien
ccccaactccgccaactaagttgcg

SEQ ID NO: 4589432 - DNA, 25 bp, Homo sapien
tcctcaaatcacaaaacttccccca

SEQ ID NO: 4589433 - DNA, 25 bp, Homo sapien
tgggcacggcggtctcggccgagcc

SEQ ID NO: 4589434 - DNA, 25 bp, Homo sapien
gggcacggcggtctcggccgagccg

SEQ ID NO: 4589435 - DNA, 25 bp, Homo sapien
ggcacggcggtctcggccgagccga

SEQ ID NO: 4589436 - DNA, 25 bp, Homo sapien
gcacggcggtctcggccgagccgag

SEQ ID NO: 4589437 - DNA, 25 bp, Homo sapien
gcgcaccggctacaagccgcccggg

SEQ ID NO: 4589438 - DNA, 25 bp, Homo sapien
agccaccccgcgcaccggctacaag

SEQ ID NO: 4589439 - DNA, 25 bp, Homo sapien
tgcacgtagccccagccaccccgcg

SEQ ID NO: 4589440 - DNA, 25 bp, Homo sapien
cccgcgcaccggctacaagccgccc

SEQ ID NO: 4589441 - DNA, 25 bp, Homo sapien
agatggactgttgggtactggttaa

SEQ ID NO: 4589442 - DNA, 25 bp, Homo sapien
ttctggtggttaccactcacctggg

SEQ ID NO: 4589443 - DNA, 25 bp, Homo sapien
taattgttaagattgtagatggact

SEQ ID NO: 4589444 - DNA, 25 bp, Homo sapien
ggcagtagccctgacacagccactt

SEQ ID NO: 4589445 - DNA, 25 bp, Homo sapien
gccgtgcatcctctactaccctgga

SEQ ID NO: 4589446 - DNA, 25 bp, Homo sapien
gaagtcagagggcttagacagtgag

SEQ ID NO: 4589447 - DNA, 25 bp, Homo sapien
tgcagtcagcaacaggtatctacgg

SEQ ID NO: 4589448 - DNA, 25 bp, Homo sapien
caccgaggaaatggtcgttgctgtt

SEQ ID NO: 4589449 - DNA, 25 bp, Homo sapien
aaatcaaccctatccataatagatt

SEQ ID NO: 4589450 - DNA, 25 bp, Homo sapien
ctaaaactttatcttacagtcactt

SEQ ID NO: 4589451 - DNA, 25 bp, Homo sapien
tctctaaaactttatcttacagtca

SEQ ID NO: 4589452 - DNA, 25 bp, Homo sapien
tctaaaactttatcttacagtcact

SEQ ID NO: 4589453 - DNA, 25 bp, Homo sapien
ttggaggaggtctgacggccttctt

SEQ ID NO: 4589454 - DNA, 25 bp, Homo sapien
ttaagagccagaggttggtggagtt

SEQ ID NO: 4589455 - DNA, 25 bp, Homo sapien
caccttgaccaaggctgagtcctta

SEQ ID NO: 4589456 - DNA, 25 bp, Homo sapien
ggtctgacggccttcttactctcac

SEQ ID NO: 4589457 - DNA, 25 bp, Homo sapien
ttctcatgccagggttttcagctgc

SEQ ID NO: 4589458 - DNA, 25 bp, Homo sapien
cagggttttcagctgcatcaggtcc

SEQ ID NO: 4589459 - DNA, 25 bp, Homo sapien
cttctgaagccttcctctctcacct

SEQ ID NO: 4589460 - DNA, 25 bp, Homo sapien
attctagttatccgtttgtctaatt

SEQ ID NO: 4589461 - DNA, 25 bp, Homo sapien
cattgtttcataacaaggcagaaca

SEQ ID NO: 4589462 - DNA, 25 bp, Homo sapien
cagaggttcttgaacacttggaggg

SEQ ID NO: 4589463 - DNA, 25 bp, Homo sapien
cttggagggattactgcagcacaga

SEQ ID NO: 4589464 - DNA, 25 bp, Homo sapien
acatatggtaaaccctggctttgga

SEQ ID NO: 4589465 - DNA, 25 bp, Homo sapien
tgctgcagtaaacatacttgttgca

SEQ ID NO: 4589466 - DNA, 25 bp, Homo sapien
gctgcagtaaacatacttgttgcat

SEQ ID NO: 4589467 - DNA, 25 bp, Homo sapien
ctgcagtaaacatacttgttgcatg

SEQ ID NO: 4589468 - DNA, 25 bp, Homo sapien
tggtggcattaaaccagatggtgta

SEQ ID NO: 4589469 - DNA, 25 bp, Homo sapien
tagaggtggtattttttgacttcca

SEQ ID NO: 4589470 - DNA, 25 bp, Homo sapien
ccatgatatcaatccctctcagtca

SEQ ID NO: 4589471 - DNA, 25 bp, Homo sapien
ttcacatctccataatagaggtggt

SEQ ID NO: 4589472 - DNA, 25 bp, Homo sapien
tggcagcaggagactctacgggagc

SEQ ID NO: 4589473 - DNA, 25 bp, Homo sapien
ttagtgggtggccactgattgcttc

SEQ ID NO: 4589474 - DNA, 25 bp, Homo sapien
aagccctctacaagcagcgggccga

SEQ ID NO: 4589475 - DNA, 25 bp, Homo sapien
ctggaacaggagaggttttcgggag

SEQ ID NO: 4589476 - DNA, 25 bp, Homo sapien
tcacacctcaccatagatctgggtg

SEQ ID NO: 4589477 - DNA, 25 bp, Homo sapien
cacctcaccatagatctgggtgcca

SEQ ID NO: 4589478 - DNA, 25 bp, Homo sapien
accatagatctgggtgccaaatagc

SEQ ID NO: 4589479 - DNA, 25 bp, Homo sapien
tcaccatagatctgggtgccaaata

SEQ ID NO: 4589480 - DNA, 25 bp, Homo sapien
caaggcccagccaaaggatgcagta

SEQ ID NO: 4589481 - DNA, 25 bp, Homo sapien
tcttggaagagggtcacgggtcaac

SEQ ID NO: 4589482 - DNA, 25 bp, Homo sapien
cactgcgccattagtttagacaggg

SEQ ID NO: 4589483 - DNA, 25 bp, Homo sapien
gcattcagcccctactcacttggag

SEQ ID NO: 4589484 - DNA, 25 bp, Homo sapien
ggagccaccccgatgcaggggcatc

SEQ ID NO: 4589485 - DNA, 25 bp, Homo sapien
ccaccccgatgcaggggcatccctc

SEQ ID NO: 4589486 - DNA, 25 bp, Homo sapien
gccaccccgatgcaggggcatccct

SEQ ID NO: 4589487 - DNA, 25 bp, Homo sapien
gagccaccccgatgcaggggcatcc

SEQ ID NO: 4589488 - DNA, 25 bp, Homo sapien
tttgttcctcagagatgctctgcac

SEQ ID NO: 4589489 - DNA, 25 bp, Homo sapien
ctttgttcctcagagatgctctgca

SEQ ID NO: 4589490 - DNA, 25 bp, Homo sapien
tgacggtggtcctggtggtgtcact

SEQ ID NO: 4589491 - DNA, 25 bp, Homo sapien
gacggtggtcctggtggtgtcactg

SEQ ID NO: 4589492 - DNA, 25 bp, Homo sapien
tgcacccaggtgtcgtccgcgggca

SEQ ID NO: 4589493 - DNA, 25 bp, Homo sapien
acccaggtgtcgtccgcgggcaggg

SEQ ID NO: 4589494 - DNA, 25 bp, Homo sapien
cgcgagtacatattggccagtggct

SEQ ID NO: 4589495 - DNA, 25 bp, Homo sapien
gtgccactgtgcctactctgcccac

SEQ ID NO: 4589496 - DNA, 25 bp, Homo sapien
tcgtgccactgtgcctactctgccc

SEQ ID NO: 4589497 - DNA, 25 bp, Homo sapien
ctcgtcgtgccactgtgcctactct

SEQ ID NO: 4589498 - DNA, 25 bp, Homo sapien
gagggtacgcagcagctgtagacac

SEQ ID NO: 4589499 - DNA, 25 bp, Homo sapien
caactgagggtacgcagcagctgta

SEQ ID NO: 4589500 - DNA, 25 bp, Homo sapien
actgagggtacgcagcagctgtaga

SEQ ID NO: 4589501 - DNA, 25 bp, Homo sapien
agcaactgagggtacgcagcagctg

SEQ ID NO: 4589502 - DNA, 25 bp, Homo sapien
cttcttgtgccaggccagcttcagt

SEQ ID NO: 4589503 - DNA, 25 bp, Homo sapien
atgtagatcttcttgtgccaggcca

SEQ ID NO: 4589504 - DNA, 25 bp, Homo sapien
tcttcttgtgccaggccagcttcag

SEQ ID NO: 4589505 - DNA, 25 bp, Homo sapien
aagatgtagatcttcttgtgccagg

SEQ ID NO: 4589506 - DNA, 25 bp, Homo sapien
ttgagaaggccccacatccattgag

SEQ ID NO: 4589507 - DNA, 25 bp, Homo sapien
tccattgagaaggccccacatccat

SEQ ID NO: 4589508 - DNA, 25 bp, Homo sapien
cattgagaaggccccacatccattg

SEQ ID NO: 4589509 - DNA, 25 bp, Homo sapien
tagggtggcatctgtgtgcactggc

SEQ ID NO: 4589510 - DNA, 25 bp, Homo sapien
tgccattgtggccaaagagaatggc

SEQ ID NO: 4589511 - DNA, 25 bp, Homo sapien
ctgccattgtggccaaagagaatgg

SEQ ID NO: 4589512 - DNA, 25 bp, Homo sapien
tgggagaaggcagtgctggctgagt

SEQ ID NO: 4589513 - DNA, 25 bp, Homo sapien
gaaggcagtgctggctgagtggcct

SEQ ID NO: 4589514 - DNA, 25 bp, Homo sapien
tgctggctgagtggcctgcagcaac

SEQ ID NO: 4589515 - DNA, 25 bp, Homo sapien
cagcaggtcctgctgggagaaggca

SEQ ID NO: 4589516 - DNA, 25 bp, Homo sapien
gtctccttgagggaccatgaggctg

SEQ ID NO: 4589517 - DNA, 25 bp, Homo sapien
ggaccatgaggctggagccgttggc

SEQ ID NO: 4589518 - DNA, 25 bp, Homo sapien
ccccgctgcggatgtcgaggttggt

SEQ ID NO: 4589519 - DNA, 25 bp, Homo sapien
cggatgtcgaggttggtgccaaggt

SEQ ID NO: 4589520 - DNA, 25 bp, Homo sapien
acacagaggtaaggctccaaggcct

SEQ ID NO: 4589521 - DNA, 25 bp, Homo sapien
ctccagcaccatgatggcctggtgc

SEQ ID NO: 4589522 - DNA, 25 bp, Homo sapien
cacacagaggtaaggctccaaggcc

SEQ ID NO: 4589523 - DNA, 25 bp, Homo sapien
cagcaccatgatggcctggtgctgc

SEQ ID NO: 4589524 - DNA, 25 bp, Homo sapien
ggctgcatgggctcatccgtggcca

SEQ ID NO: 4589525 - DNA, 25 bp, Homo sapien
tgggctcatccgtggccatgatact

SEQ ID NO: 4589526 - DNA, 25 bp, Homo sapien
catccgtggccatgatactgccaga

SEQ ID NO: 4589527 - DNA, 25 bp, Homo sapien
gcatgggctcatccgtggccatgat

SEQ ID NO: 4589528 - DNA, 25 bp, Homo sapien
catgttgtctgtagtcagcagctgc

SEQ ID NO: 4589529 - DNA, 25 bp, Homo sapien
tgggcatccacaaagcccgaatcag

SEQ ID NO: 4589530 - DNA, 25 bp, Homo sapien
attgctgaaggccatgttgtctgta

SEQ ID NO: 4589531 - DNA, 25 bp, Homo sapien
cagctgggcatccacaaagcccgaa

SEQ ID NO: 4589532 - DNA, 25 bp, Homo sapien
aagacgcagctgatgctctgcacag

SEQ ID NO: 4589533 - DNA, 25 bp, Homo sapien
catggaagacgcagctgatgctctg

SEQ ID NO: 4589534 - DNA, 25 bp, Homo sapien
gacgcagctgatgctctgcacaggg

SEQ ID NO: 4589535 - DNA, 25 bp, Homo sapien
aggccacatggaagacgcagctgat

SEQ ID NO: 4589536 - DNA, 25 bp, Homo sapien
ctcctcccaggccacgtcaccactg

SEQ ID NO: 4589537 - DNA, 25 bp, Homo sapien
aggccacgtcaccactgctctggtc

SEQ ID NO: 4589538 - DNA, 25 bp, Homo sapien
ccaggccacgtcaccactgctctgg

SEQ ID NO: 4589539 - DNA, 25 bp, Homo sapien
ctcccaggccacgtcaccactgctc

SEQ ID NO: 4589540 - DNA, 25 bp, Homo sapien
tcctgtgtcccacgctaagaacctc

SEQ ID NO: 4589541 - DNA, 25 bp, Homo sapien
cacgctaagaacctcccatggcagg

SEQ ID NO: 4589542 - DNA, 25 bp, Homo sapien
cccacgctaagaacctcccatggca

SEQ ID NO: 4589543 - DNA, 25 bp, Homo sapien
gtgtcccacgctaagaacctcccat

SEQ ID NO: 4589544 - DNA, 25 bp, Homo sapien
aacagaaggtgtcctccactgccac

SEQ ID NO: 4589545 - DNA, 25 bp, Homo sapien
agaaggtgtcctccactgccactga

SEQ ID NO: 4589546 - DNA, 25 bp, Homo sapien
ctgagtgtgcagtggctccagctgc

SEQ ID NO: 4589547 - DNA, 25 bp, Homo sapien
tgttctgagtgtgcagtggctccag

SEQ ID NO: 4589548 - DNA, 25 bp, Homo sapien
aaccacctcacagtggaaggttggg

SEQ ID NO: 4589549 - DNA, 25 bp, Homo sapien
ctgaaccacctcacagtggaaggtt

SEQ ID NO: 4589550 - DNA, 25 bp, Homo sapien
tcctcggtgtagtgctgtgggtcag

SEQ ID NO: 4589551 - DNA, 25 bp, Homo sapien
ggaatgtcaagtcctgtgtagggcc

SEQ ID NO: 4589552 - DNA, 25 bp, Homo sapien
gtggatttgtatggccagctggaca

SEQ ID NO: 4589553 - DNA, 25 bp, Homo sapien
ccggaatgtcaagtcctgtgtaggg

SEQ ID NO: 4589554 - DNA, 25 bp, Homo sapien
gcagttcaccacgtccaggagggtg

SEQ ID NO: 4589555 - DNA, 25 bp, Homo sapien
ttcaccacgtccaggagggtgaaca

SEQ ID NO: 4589556 - DNA, 25 bp, Homo sapien
cttgcagttcaccacgtccaggagg

SEQ ID NO: 4589557 - DNA, 25 bp, Homo sapien
tcaccacgtccaggagggtgaacat

SEQ ID NO: 4589558 - DNA, 25 bp, Homo sapien
ccagctcgagctcgctgtagtgtgc

SEQ ID NO: 4589559 - DNA, 25 bp, Homo sapien
gacatccagctcgagctcgctgtag

SEQ ID NO: 4589560 - DNA, 25 bp, Homo sapien
tcgctgtagtgtgcccctcaggtca

SEQ ID NO: 4589561 - DNA, 25 bp, Homo sapien
ctcgagctcgctgtagtgtgcccct

SEQ ID NO: 4589562 - DNA, 25 bp, Homo sapien
tgtgccaccctcggtcaccaccact

SEQ ID NO: 4589563 - DNA, 25 bp, Homo sapien
gtgccaccctcggtcaccaccactg

SEQ ID NO: 4589564 - DNA, 25 bp, Homo sapien
ctgtgccaccctcggtcaccaccac

SEQ ID NO: 4589565 - DNA, 25 bp, Homo sapien
acgcatggctcagctagctccacag

SEQ ID NO: 4589566 - DNA, 25 bp, Homo sapien
tcagctagctccacagacagccaag

SEQ ID NO: 4589567 - DNA, 25 bp, Homo sapien
cataatggccataggcattgtctac

SEQ ID NO: 4589568 - DNA, 25 bp, Homo sapien
atggctcagctagctccacagacag

SEQ ID NO: 4589569 - DNA, 25 bp, Homo sapien
agccaccatgttgtgcgtcagcaag

SEQ ID NO: 4589570 - DNA, 25 bp, Homo sapien
agctccccaagaaggagactgtcac

SEQ ID NO: 4589571 - DNA, 25 bp, Homo sapien
cagctccccaagaaggagactgtca

SEQ ID NO: 4589572 - DNA, 25 bp, Homo sapien
agctgaggactcctcagttcgtgtg

SEQ ID NO: 4589573 - DNA, 25 bp, Homo sapien
ctcctcagttcgtgtggggtactgg

SEQ ID NO: 4589574 - DNA, 25 bp, Homo sapien
gactcctcagttcgtgtggggtact

SEQ ID NO: 4589575 - DNA, 25 bp, Homo sapien
ctgaggactcctcagttcgtgtggg

SEQ ID NO: 4589576 - DNA, 25 bp, Homo sapien
actcaagtaggagccacaagactcc

SEQ ID NO: 4589577 - DNA, 25 bp, Homo sapien
ctggtatggggtaagactcaagtag

SEQ ID NO: 4589578 - DNA, 25 bp, Homo sapien
gggtaagactcaagtaggagccaca

SEQ ID NO: 4589579 - DNA, 25 bp, Homo sapien
caggagggggtctcgccgaggagga

SEQ ID NO: 4589580 - DNA, 25 bp, Homo sapien
ccaggagaaggagggcttcgggttg

SEQ ID NO: 4589581 - DNA, 25 bp, Homo sapien
gggcttcgggttgggacatggagaa

SEQ ID NO: 4589582 - DNA, 25 bp, Homo sapien
caggtgtccagagtagagctgcagc

SEQ ID NO: 4589583 - DNA, 25 bp, Homo sapien
aaggagggcttcgggttgggacatg

SEQ ID NO: 4589584 - DNA, 25 bp, Homo sapien
atggccacagtcacctccgggtggt

SEQ ID NO: 4589585 - DNA, 25 bp, Homo sapien
tgcagctgcaggtctatgtcagtca

SEQ ID NO: 4589586 - DNA, 25 bp, Homo sapien
cagctgcaggtctatgtcagtcaga

SEQ ID NO: 4589587 - DNA, 25 bp, Homo sapien
gagccatggccacagtcacctccgg

SEQ ID NO: 4589588 - DNA, 25 bp, Homo sapien
aggcacagcctcaccttgtgtccag

SEQ ID NO: 4589589 - DNA, 25 bp, Homo sapien
cgtgctggtgcaccctcatggttct

SEQ ID NO: 4589590 - DNA, 25 bp, Homo sapien
gtccgtgctggtgcaccctcatggt

SEQ ID NO: 4589591 - DNA, 25 bp, Homo sapien
ccctcatggttctgccatacggtgc

SEQ ID NO: 4589592 - DNA, 25 bp, Homo sapien
gaggtcagacccagaaattcccagc

SEQ ID NO: 4589593 - DNA, 25 bp, Homo sapien
agaaattcccagcaactcaggtctc

SEQ ID NO: 4589594 - DNA, 25 bp, Homo sapien
aaattcccagcaactcaggtctcct

SEQ ID NO: 4589595 - DNA, 25 bp, Homo sapien
aggaggtcagacccagaaattccca

SEQ ID NO: 4589596 - DNA, 25 bp, Homo sapien
agagctattcacagtccccgctgag

SEQ ID NO: 4589597 - DNA, 25 bp, Homo sapien
taagggaatcaagtaagccccgcag

SEQ ID NO: 4589598 - DNA, 25 bp, Homo sapien
tatgcagtgtcaaaccaaagtgggc

SEQ ID NO: 4589599 - DNA, 25 bp, Homo sapien
tccaggaaagatcccgtaagagccc

SEQ ID NO: 4589600 - DNA, 25 bp, Homo sapien
tctgaggggctgcagttgcaagaac

SEQ ID NO: 4589601 - DNA, 25 bp, Homo sapien
ctcctgatctcctttttctgcccct

SEQ ID NO: 4589602 - DNA, 25 bp, Homo sapien
gcagttgcaagaacccagaatctct

SEQ ID NO: 4589603 - DNA, 25 bp, Homo sapien
tctgcccctcttacactctctgagg

SEQ ID NO: 4589604 - DNA, 25 bp, Homo sapien
ctagaggcgaggcaatcggtcatgt

SEQ ID NO: 4589605 - DNA, 25 bp, Homo sapien
cgcactggaagtggcgcactttgga

SEQ ID NO: 4589606 - DNA, 25 bp, Homo sapien
tggcagaggtatacaggtccccgtt

SEQ ID NO: 4589607 - DNA, 25 bp, Homo sapien
ggtgtgaccttttcatcggtcctga

SEQ ID NO: 4589608 - DNA, 25 bp, Homo sapien
ctaaatataatgttcatgaggaaaa

SEQ ID NO: 4589609 - DNA, 25 bp, Homo sapien
atataatgttcatgaggaaaagaga

SEQ ID NO: 4589610 - DNA, 25 bp, Homo sapien
taattcctctaagattatagttatt

SEQ ID NO: 4589611 - DNA, 25 bp, Homo sapien
ctttaattcctctaagattatagtt

SEQ ID NO: 4589612 - DNA, 25 bp, Homo sapien
agatttggctcatcagagtccacaa

SEQ ID NO: 4589613 - DNA, 25 bp, Homo sapien
ctcatcagagtccacaaaccatatc

SEQ ID NO: 4589614 - DNA, 25 bp, Homo sapien
gaactgttgtccttagtatcttcta

SEQ ID NO: 4589615 - DNA, 25 bp, Homo sapien
aaaccatatcggtgaagaagatgaa

SEQ ID NO: 4589616 - DNA, 25 bp, Homo sapien
gtattcaaagacagcaattgtagtt

SEQ ID NO: 4589617 - DNA, 25 bp, Homo sapien
tattcaaagacagcaattgtagtta

SEQ ID NO: 4589618 - DNA, 25 bp, Homo sapien
catccagggtacaatgcgcctttcc

SEQ ID NO: 4589619 - DNA, 25 bp, Homo sapien
gcatccagggtacaatgcgcctttc

SEQ ID NO: 4589620 - DNA, 25 bp, Homo sapien
cacgattggctgaacatgcgggaac

SEQ ID NO: 4589621 - DNA, 25 bp, Homo sapien
aaacacgattggctgaacatgcggg

SEQ ID NO: 4589622 - DNA, 25 bp, Homo sapien
gattggctgaacatgcgggaacaag

SEQ ID NO: 4589623 - DNA, 25 bp, Homo sapien
aacacgattggctgaacatgcggga

SEQ ID NO: 4589624 - DNA, 25 bp, Homo sapien
aggctagctgactgagggcgatcat

SEQ ID NO: 4589625 - DNA, 25 bp, Homo sapien
cggtccaggggagcaggctagctga

SEQ ID NO: 4589626 - DNA, 25 bp, Homo sapien
agcaggctagctgactgagggcgat

SEQ ID NO: 4589627 - DNA, 25 bp, Homo sapien
tccaggggagcaggctagctgactg

SEQ ID NO: 4589628 - DNA, 25 bp, Homo sapien
gatgcctcaactctagtcggagtag

SEQ ID NO: 4589629 - DNA, 25 bp, Homo sapien
cctgatgcctcaactctagtcggag

SEQ ID NO: 4589630 - DNA, 25 bp, Homo sapien
tccctgatgcctcaactctagtcgg

SEQ ID NO: 4589631 - DNA, 25 bp, Homo sapien
tgatgcctcaactctagtcggagta

SEQ ID NO: 4589632 - DNA, 25 bp, Homo sapien
gcgcttccggctgccccctcctcgc

SEQ ID NO: 4589633 - DNA, 25 bp, Homo sapien
ctcctcgccttgacccagcactgct

SEQ ID NO: 4589634 - DNA, 25 bp, Homo sapien
agtccagagcatgcgcgcgcttccg

SEQ ID NO: 4589635 - DNA, 25 bp, Homo sapien
caggagtccagagcatgcgcgcgct

SEQ ID NO: 4589636 - DNA, 25 bp, Homo sapien
cagctctggcttttctctaacccgt

SEQ ID NO: 4589637 - DNA, 25 bp, Homo sapien
agctctggcttttctctaacccgtt

SEQ ID NO: 4589638 - DNA, 25 bp, Homo sapien
cagctgattgggtcaggcaagtcca

SEQ ID NO: 4589639 - DNA, 25 bp, Homo sapien
tctccaactgccagctgattgggtc

SEQ ID NO: 4589640 - DNA, 25 bp, Homo sapien
ccgagaatttgcagagtctcaatac

SEQ ID NO: 4589641 - DNA, 25 bp, Homo sapien
gccgagaatttgcagagtctcaata

SEQ ID NO: 4589642 - DNA, 25 bp, Homo sapien
aaaaccgattacctcatgccaagca

SEQ ID NO: 4589643 - DNA, 25 bp, Homo sapien
cgagaatttgcagagtctcaatacc

SEQ ID NO: 4589644 - DNA, 25 bp, Homo sapien
ttgtcataggatttccattctcttt

SEQ ID NO: 4589645 - DNA, 25 bp, Homo sapien
gtcataggatttccattctctttag

SEQ ID NO: 4589646 - DNA, 25 bp, Homo sapien
tattgtcataggatttccattctct

SEQ ID NO: 4589647 - DNA, 25 bp, Homo sapien
cataggatttccattctctttagct

SEQ ID NO: 4589648 - DNA, 25 bp, Homo sapien
tttatacgtgtcagggtaaaagtga

SEQ ID NO: 4589649 - DNA, 25 bp, Homo sapien
atttatacgtgtcagggtaaaagtg

SEQ ID NO: 4589650 - DNA, 25 bp, Homo sapien
ttggctcatcagagtccacagacca

SEQ ID NO: 4589651 - DNA, 25 bp, Homo sapien
cagaccatatcggtgaagaagatga

SEQ ID NO: 4589652 - DNA, 25 bp, Homo sapien
cgaactgttctccttagtatcttct

SEQ ID NO: 4589653 - DNA, 25 bp, Homo sapien
gagtccacagaccatatcggtgaag

SEQ ID NO: 4589654 - DNA, 25 bp, Homo sapien
agttttatactaatttcaaggcctg

SEQ ID NO: 4589655 - DNA, 25 bp, Homo sapien
gaaggctgcttatgggacacattac

SEQ ID NO: 4589656 - DNA, 25 bp, Homo sapien
tcttctgaaggctgcttatgggaca

SEQ ID NO: 4589657 - DNA, 25 bp, Homo sapien
gctgcttatgggacacattactttc

SEQ ID NO: 4589658 - DNA, 25 bp, Homo sapien
tgggacacattactttcataatttg

SEQ ID NO: 4589659 - DNA, 25 bp, Homo sapien
ttagggggtggctgtcaggggcaca

SEQ ID NO: 4589660 - DNA, 25 bp, Homo sapien
tcaggggcacattctacaggggaaa

SEQ ID NO: 4589661 - DNA, 25 bp, Homo sapien
ggctgtcaggggcacattctacagg

SEQ ID NO: 4589662 - DNA, 25 bp, Homo sapien
ggtggctgtcaggggcacattctac

SEQ ID NO: 4589663 - DNA, 25 bp, Homo sapien
catccagggtacaatgcgcctttcc

SEQ ID NO: 4589664 - DNA, 25 bp, Homo sapien
gcatccagggtacaatgcgcctttc

SEQ ID NO: 4589665 - DNA, 25 bp, Homo sapien
agcaggctagctgactgagggcgat

SEQ ID NO: 4589666 - DNA, 25 bp, Homo sapien
cggtccaggggagcaggctagctga

SEQ ID NO: 4589667 - DNA, 25 bp, Homo sapien
aggctagctgactgagggcgatcat

SEQ ID NO: 4589668 - DNA, 25 bp, Homo sapien
tccaggggagcaggctagctgactg

SEQ ID NO: 4589669 - DNA, 25 bp, Homo sapien
tgagagtaagaaggccgtcagacct

SEQ ID NO: 4589670 - DNA, 25 bp, Homo sapien
taccctaatggtaaagggctgactg

SEQ ID NO: 4589671 - DNA, 25 bp, Homo sapien
cctccgctaggtacgatacagaatg

SEQ ID NO: 4589672 - DNA, 25 bp, Homo sapien
tcccagccgcgaataattataagaa

SEQ ID NO: 4589673 - DNA, 25 bp, Homo sapien
cgagaatttgcagagtctcaatacc

SEQ ID NO: 4589674 - DNA, 25 bp, Homo sapien
ccgagaatttgcagagtctcaatac

SEQ ID NO: 4589675 - DNA, 25 bp, Homo sapien
gccgagaatttgcagagtctcaata

SEQ ID NO: 4589676 - DNA, 25 bp, Homo sapien
aaaaccgattacctcatgccaagca

SEQ ID NO: 4589677 - DNA, 25 bp, Homo sapien
ttgtcataggatttccattctcttt

SEQ ID NO: 4589678 - DNA, 25 bp, Homo sapien
gtcataggatttccattctctttag

SEQ ID NO: 4589679 - DNA, 25 bp, Homo sapien
tattgtcataggatttccattctct

SEQ ID NO: 4589680 - DNA, 25 bp, Homo sapien
cataggatttccattctctttagct

SEQ ID NO: 4589681 - DNA, 25 bp, Homo sapien
caaagtaatagaccgcgcacttgag

SEQ ID NO: 4589682 - DNA, 25 bp, Homo sapien
tattacaaagtaatagaccgcgcac

SEQ ID NO: 4589683 - DNA, 25 bp, Homo sapien
gcactcattcttggcactgaaacaa

SEQ ID NO: 4589684 - DNA, 25 bp, Homo sapien
atagaccgcgcacttgagggcaaac

SEQ ID NO: 4589685 - DNA, 25 bp, Homo sapien
ctataaattagaaacacaaataaat

SEQ ID NO: 4589686 - DNA, 25 bp, Homo sapien
ctataaattagaaacacaaataaat

SEQ ID NO: 4589687 - DNA, 25 bp, Homo sapien
tcaattccttgacccgctcttagat

SEQ ID NO: 4589688 - DNA, 25 bp, Homo sapien
ctgttctccgcagcccgaaaagaat

SEQ ID NO: 4589689 - DNA, 25 bp, Homo sapien
ttagctccctgttctccgcagcccg

SEQ ID NO: 4589690 - DNA, 25 bp, Homo sapien
ttttcaattccttgacccgctctta

SEQ ID NO: 4589691 - DNA, 25 bp, Homo sapien
ttgtccgcacatccaagctccttgt

SEQ ID NO: 4589692 - DNA, 25 bp, Homo sapien
aagagactgtctcccttgcctagaa

SEQ ID NO: 4589693 - DNA, 25 bp, Homo sapien
taagagactgtctcccttgcctaga

SEQ ID NO: 4589694 - DNA, 25 bp, Homo sapien
cccacatcttcttggatgggtcgga

SEQ ID NO: 4589695 - DNA, 25 bp, Homo sapien
ctcccacatcttcttggatgggtcg

SEQ ID NO: 4589696 - DNA, 25 bp, Homo sapien
cacatcttcttggatgggtcggagg

SEQ ID NO: 4589697 - DNA, 25 bp, Homo sapien
catcttcttggatgggtcggaggtt

SEQ ID NO: 4589698 - DNA, 25 bp, Homo sapien
aactgcagtgtgctcttgttctcgt

SEQ ID NO: 4589699 - DNA, 25 bp, Homo sapien
caactgcagtgtgctcttgttctcg

SEQ ID NO: 4589700 - DNA, 25 bp, Homo sapien
ctgcagtgtgctcttgttctcgttg

SEQ ID NO: 4589701 - DNA, 25 bp, Homo sapien
gcagtgtgctcttgttctcgttgtt

SEQ ID NO: 4589702 - DNA, 25 bp, Homo sapien
gcccgctgctcgtacagggcttccc

SEQ ID NO: 4589703 - DNA, 25 bp, Homo sapien
ctcggcccgctgctcgtacagggct

SEQ ID NO: 4589704 - DNA, 25 bp, Homo sapien
cgctgctcgtacagggcttcccacc

SEQ ID NO: 4589705 - DNA, 25 bp, Homo sapien
tcggcccgctgctcgtacagggctt

SEQ ID NO: 4589706 - DNA, 25 bp, Homo sapien
gcctctcatcctgttgccgaagcct

SEQ ID NO: 4589707 - DNA, 25 bp, Homo sapien
tcctccacctcgtccaggagctcct

SEQ ID NO: 4589708 - DNA, 25 bp, Homo sapien
tctcatcctgttgccgaagcctctc

SEQ ID NO: 4589709 - DNA, 25 bp, Homo sapien
tgctgcctctcctgttctaacagct

SEQ ID NO: 4589710 - DNA, 25 bp, Homo sapien
cctcctgttcacgtagcctctcctc

SEQ ID NO: 4589711 - DNA, 25 bp, Homo sapien
taggtggttggtctcatcttgtagc

SEQ ID NO: 4589712 - DNA, 25 bp, Homo sapien
cttccttaggtggttggtctcatct

SEQ ID NO: 4589713 - DNA, 25 bp, Homo sapien
cagcctggagctgtcttcccacact

SEQ ID NO: 4589714 - DNA, 25 bp, Homo sapien
gcctggagctgtcttcccacactct

SEQ ID NO: 4589715 - DNA, 25 bp, Homo sapien
tcctcccaagcttctgtaccagatg

SEQ ID NO: 4589716 - DNA, 25 bp, Homo sapien
gcggagcttgaatccagggccactg

SEQ ID NO: 4589717 - DNA, 25 bp, Homo sapien
tattgcggagcttgaatccagggcc

SEQ ID NO: 4589718 - DNA, 25 bp, Homo sapien
gaattgatgttttcagtgagttgac

SEQ ID NO: 4589719 - DNA, 25 bp, Homo sapien
attgatgttttcagtgagttgactg

SEQ ID NO: 4589720 - DNA, 25 bp, Homo sapien
gtagaggatgcacggccctccccgt

SEQ ID NO: 4589721 - DNA, 25 bp, Homo sapien
ggtagtagaggatgcacggccctcc

SEQ ID NO: 4589722 - DNA, 25 bp, Homo sapien
ggatgcacggccctccccgtagata

SEQ ID NO: 4589723 - DNA, 25 bp, Homo sapien
tcctccagggtagtagaggatgcac

SEQ ID NO: 4589724 - DNA, 25 bp, Homo sapien
ggctcttcctctgccaatatgcttt

SEQ ID NO: 4589725 - DNA, 25 bp, Homo sapien
cctgttagctcctgctggaatgcca

SEQ ID NO: 4589726 - DNA, 25 bp, Homo sapien
ctgtgtcagggctactgccattgat

SEQ ID NO: 4589727 - DNA, 25 bp, Homo sapien
gttagctcctgctggaatgccaggg

SEQ ID NO: 4589728 - DNA, 25 bp, Homo sapien
gccacccagagatactgtgaacatt

SEQ ID NO: 4589729 - DNA, 25 bp, Homo sapien
tgaacattttgagctcacaggggaa

SEQ ID NO: 4589730 - DNA, 25 bp, Homo sapien
tgtgaacattttgagctcacagggg

SEQ ID NO: 4589731 - DNA, 25 bp, Homo sapien
ccacccagagatactgtgaacattt

SEQ ID NO: 4589732 - DNA, 25 bp, Homo sapien
ggctgattatggagcagggagcccc

SEQ ID NO: 4589733 - DNA, 25 bp, Homo sapien
ggtcctgggagacgcaagcccaaag

SEQ ID NO: 4589734 - DNA, 25 bp, Homo sapien
cctgggagacgcaagcccaaagagc

SEQ ID NO: 4589735 - DNA, 25 bp, Homo sapien
aggtgagggctgattatggagcagg

SEQ ID NO: 4589736 - DNA, 25 bp, Homo sapien
ttgggggccatgacctggtgtgttt

SEQ ID NO: 4589737 - DNA, 25 bp, Homo sapien
tctggcaccggtcttgtcatcggag

SEQ ID NO: 4589738 - DNA, 25 bp, Homo sapien
gctgactgactaggctttggttggg

SEQ ID NO: 4589739 - DNA, 25 bp, Homo sapien
gggggccccatctggtatgcctcag

SEQ ID NO: 4589740 - DNA, 25 bp, Homo sapien
tggctgcggccaatttcccctgttg

SEQ ID NO: 4589741 - DNA, 25 bp, Homo sapien
gctgcggccaatttcccctgttgtg

SEQ ID NO: 4589742 - DNA, 25 bp, Homo sapien
cttggctgcggccaatttcccctgt

SEQ ID NO: 4589743 - DNA, 25 bp, Homo sapien
tgcggccaatttcccctgttgtgtt

SEQ ID NO: 4589744 - DNA, 25 bp, Homo sapien
tggggccacatcagcgaaataccag

SEQ ID NO: 4589745 - DNA, 25 bp, Homo sapien
ggggccacatcagcgaaataccagt

SEQ ID NO: 4589746 - DNA, 25 bp, Homo sapien
tcccatgtaggctagaatccctgcc

SEQ ID NO: 4589747 - DNA, 25 bp, Homo sapien
ttcactgggtactaaaaagatgggc

SEQ ID NO: 4589748 - DNA, 25 bp, Homo sapien
tgggcagccccttagatcatttgtt

SEQ ID NO: 4589749 - DNA, 25 bp, Homo sapien
catttttgggaagtgcgctacagaa

SEQ ID NO: 4589750 - DNA, 25 bp, Homo sapien
tttatattaggtttgacatgtaact

SEQ ID NO: 4589751 - DNA, 25 bp, Homo sapien
ttatattaggtttgacatgtaacta

SEQ ID NO: 4589752 - DNA, 25 bp, Homo sapien
tttctgttgctcaatttaatgagtc

SEQ ID NO: 4589753 - DNA, 25 bp, Homo sapien
ttaatgagtccatctttcttttata

SEQ ID NO: 4589754 - DNA, 25 bp, Homo sapien
gaaggctcacaaagtagcataaaat

SEQ ID NO: 4589755 - DNA, 25 bp, Homo sapien
aaatttacaactgtagacatgtttc

SEQ ID NO: 4589756 - DNA, 25 bp, Homo sapien
tagacatgtttctctacagtaaata

SEQ ID NO: 4589757 - DNA, 25 bp, Homo sapien
gaattaagataggaagaaggctcac

SEQ ID NO: 4589758 - DNA, 25 bp, Homo sapien
caaaccgatgttctaagtgcccaac

SEQ ID NO: 4589759 - DNA, 25 bp, Homo sapien
tgagaaggcctaacaaaatggcata

SEQ ID NO: 4589760 - DNA, 25 bp, Homo sapien
aaaacatctctagagcacagcagcg

SEQ ID NO: 4589761 - DNA, 25 bp, Homo sapien
taaaggtcagtgttaatgccaatac

SEQ ID NO: 4589762 - DNA, 25 bp, Homo sapien
cattcttgaaagtaggagctacgga

SEQ ID NO: 4589763 - DNA, 25 bp, Homo sapien
acataatcaaaacactctattcagg

SEQ ID NO: 4589764 - DNA, 25 bp, Homo sapien
taatcacctgttttgtgagaggttc

SEQ ID NO: 4589765 - DNA, 25 bp, Homo sapien
ccatctacttacgatctaacttaca

SEQ ID NO: 4589766 - DNA, 25 bp, Homo sapien
taggatcatagctcaaagatatggg

SEQ ID NO: 4589767 - DNA, 25 bp, Homo sapien
taatggtaatggctgcataactctg

SEQ ID NO: 4589768 - DNA, 25 bp, Homo sapien
gaaagggttctgaaattagctaatg

SEQ ID NO: 4589769 - DNA, 25 bp, Homo sapien
cacacagagcgactgctaatgggta

SEQ ID NO: 4589770 - DNA, 25 bp, Homo sapien
tgcaagcctggtgttttattggtat

SEQ ID NO: 4589771 - DNA, 25 bp, Homo sapien
tttgattctgcctccaatgggcttt

SEQ ID NO: 4589772 - DNA, 25 bp, Homo sapien
tcttcctaagtcagccaataattcc

SEQ ID NO: 4589773 - DNA, 25 bp, Homo sapien
aatatttgactatgaagaccaagcc

SEQ ID NO: 4589774 - DNA, 25 bp, Homo sapien
tgtgtttactcttcacctacgtaaa

SEQ ID NO: 4589775 - DNA, 25 bp, Homo sapien
agagcaactctttgcagctttaaac

SEQ ID NO: 4589776 - DNA, 25 bp, Homo sapien
aattaagtccatgcttagcttttct

SEQ ID NO: 4589777 - DNA, 25 bp, Homo sapien
cagagaaattaagtccatgcttagc

SEQ ID NO: 4589778 - DNA, 25 bp, Homo sapien
tatgtcctttctccccaatcaggaa

SEQ ID NO: 4589779 - DNA, 25 bp, Homo sapien
tatttggctgggttacctaacactg

SEQ ID NO: 4589780 - DNA, 25 bp, Homo sapien
gcttggtggctagttaaaggctgct

SEQ ID NO: 4589781 - DNA, 25 bp, Homo sapien
aaccagcacataaaactaaagcaca

SEQ ID NO: 4589782 - DNA, 25 bp, Homo sapien
aggcccgtgtgcttcattcgttcac

SEQ ID NO: 4589783 - DNA, 25 bp, Homo sapien
ccagccaaaggttctatttctgaag

SEQ ID NO: 4589784 - DNA, 25 bp, Homo sapien
aagtttggtgttgcgcatatgttca

SEQ ID NO: 4589785 - DNA, 25 bp, Homo sapien
cgtgtgcttcattcgttcacccata

SEQ ID NO: 4589786 - DNA, 25 bp, Homo sapien
aagcaaaatgtctcctatctcttct

SEQ ID NO: 4589787 - DNA, 25 bp, Homo sapien
aaacataagcaaaatgtctcctatc

SEQ ID NO: 4589788 - DNA, 25 bp, Homo sapien
cataagcaaaatgtctcctatctct

SEQ ID NO: 4589789 - DNA, 25 bp, Homo sapien
taagcaaaatgtctcctatctcttc

SEQ ID NO: 4589790 - DNA, 25 bp, Homo sapien
tcactgtgcaaagaactatcagggt

SEQ ID NO: 4589791 - DNA, 25 bp, Homo sapien
gaagatcactgtgcaaagaactatc

SEQ ID NO: 4589792 - DNA, 25 bp, Homo sapien
gatcactgtgcaaagaactatcagg

SEQ ID NO: 4589793 - DNA, 25 bp, Homo sapien
tctgaagatcactgtgcaaagaact

SEQ ID NO: 4589794 - DNA, 25 bp, Homo sapien
agtccctgaactctttcttaagtct

SEQ ID NO: 4589795 - DNA, 25 bp, Homo sapien
tctgtgatctgtataagtccctgaa

SEQ ID NO: 4589796 - DNA, 25 bp, Homo sapien
tctatctgaagcttgcactgaccca

SEQ ID NO: 4589797 - DNA, 25 bp, Homo sapien
gaactctttcttaagtctatctgaa

SEQ ID NO: 4589798 - DNA, 25 bp, Homo sapien
tcactagtaggctcttctttcatct

SEQ ID NO: 4589799 - DNA, 25 bp, Homo sapien
ctccaacttcttctcactagtaggc

SEQ ID NO: 4589800 - DNA, 25 bp, Homo sapien
tcttctcactagtaggctcttcttt

SEQ ID NO: 4589801 - DNA, 25 bp, Homo sapien
ttttctctaatattgcccagttttc

SEQ ID NO: 4589802 - DNA, 25 bp, Homo sapien
tattagccgattcaacccactttcc

SEQ ID NO: 4589803 - DNA, 25 bp, Homo sapien
cagaatatatctatcctatggggag

SEQ ID NO: 4589804 - DNA, 25 bp, Homo sapien
ttattcttgactcggtgggggacag

SEQ ID NO: 4589805 - DNA, 25 bp, Homo sapien
cacaactattatgaaataagccatc

SEQ ID NO: 4589806 - DNA, 25 bp, Homo sapien
taccttcactcaaactctgcccatg

SEQ ID NO: 4589807 - DNA, 25 bp, Homo sapien
ttcactcaaactctgcccatgagtc

SEQ ID NO: 4589808 - DNA, 25 bp, Homo sapien
gacttctagaccagactaccgacta

SEQ ID NO: 4589809 - DNA, 25 bp, Homo sapien
tagaccagactaccgactaccttca

SEQ ID NO: 4589810 - DNA, 25 bp, Homo sapien
ttagtacaatggctgcctgacctat

SEQ ID NO: 4589811 - DNA, 25 bp, Homo sapien
ttcatgcagtttattccacctaagc

SEQ ID NO: 4589812 - DNA, 25 bp, Homo sapien
cctgacctatggaaaaggtttaatg

SEQ ID NO: 4589813 - DNA, 25 bp, Homo sapien
gctctgggcctgttcccacattatt

SEQ ID NO: 4589814 - DNA, 25 bp, Homo sapien
catgactgacaactggcctaggctc

SEQ ID NO: 4589815 - DNA, 25 bp, Homo sapien
cattctatttggtcaatgcagagac

SEQ ID NO: 4589816 - DNA, 25 bp, Homo sapien
ttcaaatttaaatgcaaggcttcag

SEQ ID NO: 4589817 - DNA, 25 bp, Homo sapien
gttctgaagcactctaaagtacatt

SEQ ID NO: 4589818 - DNA, 25 bp, Homo sapien
aagtcacttcttctgttgtcccatt

SEQ ID NO: 4589819 - DNA, 25 bp, Homo sapien
ttcctcttcttttgaagtcacttct

SEQ ID NO: 4589820 - DNA, 25 bp, Homo sapien
ttgaagtcacttcttctgttgtccc

SEQ ID NO: 4589821 - DNA, 25 bp, Homo sapien
tcttcttttgaagtcacttcttctg

SEQ ID NO: 4589822 - DNA, 25 bp, Homo sapien
cgcctctgataagtgatcaagataa

SEQ ID NO: 4589823 - DNA, 25 bp, Homo sapien
gtcacgcctctgataagtgatcaag

SEQ ID NO: 4589824 - DNA, 25 bp, Homo sapien
agataataaaacagtcacgcctctg

SEQ ID NO: 4589825 - DNA, 25 bp, Homo sapien
aaacagtcacgcctctgataagtga

SEQ ID NO: 4589826 - DNA, 25 bp, Homo sapien
ttccaaatgtcccatgggaggcaaa

SEQ ID NO: 4589827 - DNA, 25 bp, Homo sapien
gacaattctttgtgagggttctcct

SEQ ID NO: 4589828 - DNA, 25 bp, Homo sapien
ctggagaccaatacgcagaagaagg

SEQ ID NO: 4589829 - DNA, 25 bp, Homo sapien
gaccgtgaccagttgtgaccacaaa

SEQ ID NO: 4589830 - DNA, 25 bp, Homo sapien
ctgacccatgggtagtggttgatct

SEQ ID NO: 4589831 - DNA, 25 bp, Homo sapien
ccatgggtagtggttgatctggcat

SEQ ID NO: 4589832 - DNA, 25 bp, Homo sapien
acccatgggtagtggttgatctggc

SEQ ID NO: 4589833 - DNA, 25 bp, Homo sapien
tgacccatgggtagtggttgatctg

SEQ ID NO: 4589834 - DNA, 25 bp, Homo sapien
tcaacattcgggtgcttaggaaggt

SEQ ID NO: 4589835 - DNA, 25 bp, Homo sapien
gtccacatatcagccacttccattg

SEQ ID NO: 4589836 - DNA, 25 bp, Homo sapien
ctcaacattcgggtgcttaggaagg

SEQ ID NO: 4589837 - DNA, 25 bp, Homo sapien
taatctgcagagtccacatatcagc

SEQ ID NO: 4589838 - DNA, 25 bp, Homo sapien
aaccatattggtaaagaaaatgaag

SEQ ID NO: 4589839 - DNA, 25 bp, Homo sapien
tccacaaaccatattggtaaagaaa

SEQ ID NO: 4589840 - DNA, 25 bp, Homo sapien
tcatagtccacaaaccatattggta

SEQ ID NO: 4589841 - DNA, 25 bp, Homo sapien
accatattggtaaagaaaatgaaga

SEQ ID NO: 4589842 - DNA, 25 bp, Homo sapien
atagtaattttagggcctgtgagga

SEQ ID NO: 4589843 - DNA, 25 bp, Homo sapien
tttatagtaattttagggcctgtga

SEQ ID NO: 4589844 - DNA, 25 bp, Homo sapien
tattcaggtcctttgtttctcctcc

SEQ ID NO: 4589845 - DNA, 25 bp, Homo sapien
tgaggatgaagttctctgtgacagc

SEQ ID NO: 4589846 - DNA, 25 bp, Homo sapien
gggcacattctacaggggaaaaata

SEQ ID NO: 4589847 - DNA, 25 bp, Homo sapien
ggctgtcaggggcacattctacagg

SEQ ID NO: 4589848 - DNA, 25 bp, Homo sapien
tcagacatgtaaagacaaattgggt

SEQ ID NO: 4589849 - DNA, 25 bp, Homo sapien
catgtaaagacaaattgggtagggt

SEQ ID NO: 4589850 - DNA, 25 bp, Homo sapien
ctgctgcatccagggtacaatgtgc

SEQ ID NO: 4589851 - DNA, 25 bp, Homo sapien
gctgcatccagggtacaatgtgcct

SEQ ID NO: 4589852 - DNA, 25 bp, Homo sapien
gcatccagggtacaatgtgcctttc

SEQ ID NO: 4589853 - DNA, 25 bp, Homo sapien
gacccgggatagagggatcgctcaa

SEQ ID NO: 4589854 - DNA, 25 bp, Homo sapien
tgaacatgcgggaacaaggaaaacc

SEQ ID NO: 4589855 - DNA, 25 bp, Homo sapien
ctgaacatgcgggaacaaggaaaac

SEQ ID NO: 4589856 - DNA, 25 bp, Homo sapien
aacatgcgggaacaaggaaaacctg

SEQ ID NO: 4589857 - DNA, 25 bp, Homo sapien
acatgcgggaacaaggaaaacctga

SEQ ID NO: 4589858 - DNA, 25 bp, Homo sapien
tcgcgggagaaaggtgcgcgctcac

SEQ ID NO: 4589859 - DNA, 25 bp, Homo sapien
accatgggccccgaaagggctgcgg

SEQ ID NO: 4589860 - DNA, 25 bp, Homo sapien
cccatggactgtcaagagacggagg

SEQ ID NO: 4589861 - DNA, 25 bp, Homo sapien
taagcttaagggccttggatctggg

SEQ ID NO: 4589862 - DNA, 25 bp, Homo sapien
cgccctcgccctgccgtgtgaagcc

SEQ ID NO: 4589863 - DNA, 25 bp, Homo sapien
ctgccgtgtgaagccgccgctgggc

SEQ ID NO: 4589864 - DNA, 25 bp, Homo sapien
cctgccgtgtgaagccgccgctggg

SEQ ID NO: 4589865 - DNA, 25 bp, Homo sapien
cgccctgccgtgtgaagccgccgct

SEQ ID NO: 4589866 - DNA, 25 bp, Homo sapien
tcttgtggaaaatagaggacaacaa

SEQ ID NO: 4589867 - DNA, 25 bp, Homo sapien
cttggccttgaaccctgacacggac

SEQ ID NO: 4589868 - DNA, 25 bp, Homo sapien
agtggagcctgagctgccgcggcgg

SEQ ID NO: 4589869 - DNA, 25 bp, Homo sapien
tgtggaaaatagaggacaacaactt

SEQ ID NO: 4589870 - DNA, 25 bp, Homo sapien
tttactctcacctctggcgggaggg

SEQ ID NO: 4589871 - DNA, 25 bp, Homo sapien
tcaactctagatgagctaagggccc

SEQ ID NO: 4589872 - DNA, 25 bp, Homo sapien
gaagaccacagcaaccagaaaacaa

SEQ ID NO: 4589873 - DNA, 25 bp, Homo sapien
ccaaatgccttaggctgagcattcc

SEQ ID NO: 4589874 - DNA, 25 bp, Homo sapien
caagcagtgcaaagttgtcatcagt

SEQ ID NO: 4589875 - DNA, 25 bp, Homo sapien
taccaccagaggtcatgggataggc

SEQ ID NO: 4589876 - DNA, 25 bp, Homo sapien
ccaggcttgcttcgatgtagcaggc

SEQ ID NO: 4589877 - DNA, 25 bp, Homo sapien
ctggtcttagggtactggcttggct

SEQ ID NO: 4589878 - DNA, 25 bp, Homo sapien
taggatagttgacactggcaaggac

SEQ ID NO: 4589879 - DNA, 25 bp, Homo sapien
atatttaataaaccagcagaaaaca

SEQ ID NO: 4589880 - DNA, 25 bp, Homo sapien
caactgctgtgacaaagggataatt

SEQ ID NO: 4589881 - DNA, 25 bp, Homo sapien
tttgtaatgaacttctggatctcca

SEQ ID NO: 4589882 - DNA, 25 bp, Homo sapien
gcttcccttccggtggaggtgacca

SEQ ID NO: 4589883 - DNA, 25 bp, Homo sapien
tagctgtcgttgcttcccttccggt

SEQ ID NO: 4589884 - DNA, 25 bp, Homo sapien
tggaggtgaccagtttgtaatgaac

SEQ ID NO: 4589885 - DNA, 25 bp, Homo sapien
ggaggcccttgtcagtcagatcacc

SEQ ID NO: 4589886 - DNA, 25 bp, Homo sapien
tagaatgactcctgtgtctctctgg

SEQ ID NO: 4589887 - DNA, 25 bp, Homo sapien
tagcagcggtgtttgtaaagatagg

SEQ ID NO: 4589888 - DNA, 25 bp, Homo sapien
gagggcaacttgtgaagaactgcca

SEQ ID NO: 4589889 - DNA, 25 bp, Homo sapien
tccagaaacagcttcctgcgtacat

SEQ ID NO: 4589890 - DNA, 25 bp, Homo sapien
gattaatgtgcgtgggtcaaaggct

SEQ ID NO: 4589891 - DNA, 25 bp, Homo sapien
cttggattaatgtgcgtgggtcaaa

SEQ ID NO: 4589892 - DNA, 25 bp, Homo sapien
tgtgcgtgggtcaaaggctctttcc

SEQ ID NO: 4589893 - DNA, 25 bp, Homo sapien
agaaactttattgaagtggcaaaga

SEQ ID NO: 4589894 - DNA, 25 bp, Homo sapien
aagagaaactttattgaagtggcaa

SEQ ID NO: 4589895 - DNA, 25 bp, Homo sapien
gagaaactttattgaagtggcaaag

SEQ ID NO: 4589896 - DNA, 25 bp, Homo sapien
tgaaagagaaactttattgaagtgg

SEQ ID NO: 4589897 - DNA, 25 bp, Homo sapien
tatatgccgagctagaatcctgtcg

SEQ ID NO: 4589898 - DNA, 25 bp, Homo sapien
tacattgggtgacttgattggcccc

SEQ ID NO: 4589899 - DNA, 25 bp, Homo sapien
gagtgtagtgaagtccgagagccct

SEQ ID NO: 4589900 - DNA, 25 bp, Homo sapien
gaaacttgaggaagtacagcctgga

SEQ ID NO: 4589901 - DNA, 25 bp, Homo sapien
aataaatggtaaaaagagctggcac

SEQ ID NO: 4589902 - DNA, 25 bp, Homo sapien
acaataaatggtaaaaagagctggc

SEQ ID NO: 4589903 - DNA, 25 bp, Homo sapien
taaatggtaaaaagagctggcacag

SEQ ID NO: 4589904 - DNA, 25 bp, Homo sapien
gtctacaataaatggtaaaaagagc

SEQ ID NO: 4589905 - DNA, 25 bp, Homo sapien
tttttgaagatgcagcttgggcacc

SEQ ID NO: 4589906 - DNA, 25 bp, Homo sapien
taccacctagcttaagccctgaggg

SEQ ID NO: 4589907 - DNA, 25 bp, Homo sapien
gcagatgaggccttcccatagggaa

SEQ ID NO: 4589908 - DNA, 25 bp, Homo sapien
agaaaggccatactgctcaacagca

SEQ ID NO: 4589909 - DNA, 25 bp, Homo sapien
gattctggcctggatagtggattag

SEQ ID NO: 4589910 - DNA, 25 bp, Homo sapien
gcgcgttccttggtcagatgataaa

SEQ ID NO: 4589911 - DNA, 25 bp, Homo sapien
caagagacagatgaagcccatgatt

SEQ ID NO: 4589912 - DNA, 25 bp, Homo sapien
gtcacagataatcaaaagcccatgg

SEQ ID NO: 4589913 - DNA, 25 bp, Homo sapien
taactatatccagagacagttccct

SEQ ID NO: 4589914 - DNA, 25 bp, Homo sapien
tgaatctatataactatatccagag

SEQ ID NO: 4589915 - DNA, 25 bp, Homo sapien
tatcctttaatacagtgaatctata

SEQ ID NO: 4589916 - DNA, 25 bp, Homo sapien
cctcagagactttatcttactctta

SEQ ID NO: 4589917 - DNA, 25 bp, Homo sapien
ttaatatatagcagacaagtgtaca

SEQ ID NO: 4589918 - DNA, 25 bp, Homo sapien
agaaactacttaccagggccaggcg

SEQ ID NO: 4589919 - DNA, 25 bp, Homo sapien
tttttacaaactgcacacacttgtg

SEQ ID NO: 4589920 - DNA, 25 bp, Homo sapien
tgtggtggcgcctacctgttgtctc

SEQ ID NO: 4589921 - DNA, 25 bp, Homo sapien
ttctaaagggtcttctccatggctt

SEQ ID NO: 4589922 - DNA, 25 bp, Homo sapien
taagttcagtgggtttgtctgcact

SEQ ID NO: 4589923 - DNA, 25 bp, Homo sapien
ttccatggccctgcttcgcaactga

SEQ ID NO: 4589924 - DNA, 25 bp, Homo sapien
tgcaggcaccccgtttggtttctag

SEQ ID NO: 4589925 - DNA, 25 bp, Homo sapien
gcctgctgggctaacacttgcgatt

SEQ ID NO: 4589926 - DNA, 25 bp, Homo sapien
tgtctctgactctagaatttcaaga

SEQ ID NO: 4589927 - DNA, 25 bp, Homo sapien
gggccgaatcgtccgtattctctca

SEQ ID NO: 4589928 - DNA, 25 bp, Homo sapien
tcttatcaaacttccggaactgcca

SEQ ID NO: 4589929 - DNA, 25 bp, Homo sapien
ttgctggtcctagaacagttcccga

SEQ ID NO: 4589930 - DNA, 25 bp, Homo sapien
gaagtgtacaaaagagcagatcctg

SEQ ID NO: 4589931 - DNA, 25 bp, Homo sapien
tcaagggaattaccctggaccagag

SEQ ID NO: 4589932 - DNA, 25 bp, Homo sapien
tccagatctgggtcagacagcagca

SEQ ID NO: 4589933 - DNA, 25 bp, Homo sapien
gcacaggccgcgttctctcagccca

SEQ ID NO: 4589934 - DNA, 25 bp, Homo sapien
cgggttgccgttcgccgcacaggcc

SEQ ID NO: 4589935 - DNA, 25 bp, Homo sapien
ccgagggggccggtcttgcgctccg

SEQ ID NO: 4589936 - DNA, 25 bp, Homo sapien
cggtcttgcgctccgcaggctcgcg

SEQ ID NO: 4589937 - DNA, 25 bp, Homo sapien
gcaaccctcatgaagtacaaccagc

SEQ ID NO: 4589938 - DNA, 25 bp, Homo sapien
gcctagtttgctgacattgaaccca

SEQ ID NO: 4589939 - DNA, 25 bp, Homo sapien
cagatgagagagcacgagctaaagt

SEQ ID NO: 4589940 - DNA, 25 bp, Homo sapien
cattacgttaaagaacgggatgcca

SEQ ID NO: 4589941 - DNA, 25 bp, Homo sapien
gcttcaagttcctaagataagggct

SEQ ID NO: 4589942 - DNA, 25 bp, Homo sapien
cagatgtgatgccagtcttcttacc

SEQ ID NO: 4589943 - DNA, 25 bp, Homo sapien
gacttaatgtgcagtaactcctcag

SEQ ID NO: 4589944 - DNA, 25 bp, Homo sapien
gattacatacgccttgaaaccgaag

SEQ ID NO: 4589945 - DNA, 25 bp, Homo sapien
ggttgcccaaatctccttacccata

SEQ ID NO: 4589946 - DNA, 25 bp, Homo sapien
aaccaactctcttgccgctcagaaa

SEQ ID NO: 4589947 - DNA, 25 bp, Homo sapien
gctgtggtaatgagggattgcatta

SEQ ID NO: 4589948 - DNA, 25 bp, Homo sapien
caaaatttcatcagcctgcaaaagg

SEQ ID NO: 4589949 - DNA, 25 bp, Homo sapien
tttccctatgtctgttcttacgtat

SEQ ID NO: 4589950 - DNA, 25 bp, Homo sapien
cacccatcacccaagggtagtcttt

SEQ ID NO: 4589951 - DNA, 25 bp, Homo sapien
tcactactccagacctttttcaagt

SEQ ID NO: 4589952 - DNA, 25 bp, Homo sapien
tccatcaagtctgtacccaatgtgt

SEQ ID NO: 4589953 - DNA, 25 bp, Homo sapien
cagtcttttatcccctcagtctgta

SEQ ID NO: 4589954 - DNA, 25 bp, Homo sapien
gcagtcttttatcccctcagtctgt

SEQ ID NO: 4589955 - DNA, 25 bp, Homo sapien
ccaataccatagtcagtttcaccaa

SEQ ID NO: 4589956 - DNA, 25 bp, Homo sapien
tcctctccctggcatataaaatggt

SEQ ID NO: 4589957 - DNA, 25 bp, Homo sapien
tatttaagatagatgaacgtggata

SEQ ID NO: 4589958 - DNA, 25 bp, Homo sapien
attttatttaagatagatgaacgtg

SEQ ID NO: 4589959 - DNA, 25 bp, Homo sapien
tctcctctccctggcatataaaatg

SEQ ID NO: 4589960 - DNA, 25 bp, Homo sapien
ccaatccataggcccaaagtgaact

SEQ ID NO: 4589961 - DNA, 25 bp, Homo sapien
tttccaatccataggcccaaagtga

SEQ ID NO: 4589962 - DNA, 25 bp, Homo sapien
gaaaacccacagcatctagatcttc

SEQ ID NO: 4589963 - DNA, 25 bp, Homo sapien
tgaaaacccacagcatctagatctt

SEQ ID NO: 4589964 - DNA, 25 bp, Homo sapien
gccaggtgctaatctggagaaaagc

SEQ ID NO: 4589965 - DNA, 25 bp, Homo sapien
gtcaagtctggccaggtgctaatct

SEQ ID NO: 4589966 - DNA, 25 bp, Homo sapien
ccaagacctggagcgagctggagtg

SEQ ID NO: 4589967 - DNA, 25 bp, Homo sapien
gcctggatccacgaaaaactccgca

SEQ ID NO: 4589968 - DNA, 25 bp, Homo sapien
aggtgtaccggattatggctgagca

SEQ ID NO: 4589969 - DNA, 25 bp, Homo sapien
tgccatcgaaaccaccaggtgtacc

SEQ ID NO: 4589970 - DNA, 25 bp, Homo sapien
ccaccaggtgtaccggattatggct

SEQ ID NO: 4589971 - DNA, 25 bp, Homo sapien
aaaccaccaggtgtaccggattatg

SEQ ID NO: 4589972 - DNA, 25 bp, Homo sapien
caggcaccagtgtcttctatgatga

SEQ ID NO: 4589973 - DNA, 25 bp, Homo sapien
caaagggaaccagggcatagcacta

SEQ ID NO: 4589974 - DNA, 25 bp, Homo sapien
caatgttgctatcggttcaaaaacc

SEQ ID NO: 4589975 - DNA, 25 bp, Homo sapien
cctttgatgccttagaggtggtagg

SEQ ID NO: 4589976 - DNA, 25 bp, Homo sapien
gactcaaccctctactgaaccagta

SEQ ID NO: 4589977 - DNA, 25 bp, Homo sapien
tgctctttagccaaggagtctccct

SEQ ID NO: 4589978 - DNA, 25 bp, Homo sapien
gaaccagtagtccagggtggctcac

SEQ ID NO: 4589979 - DNA, 25 bp, Homo sapien
caaagaccactttgaggctcttgct

SEQ ID NO: 4589980 - DNA, 25 bp, Homo sapien
catgggaagggctaatagatgctga

SEQ ID NO: 4589981 - DNA, 25 bp, Homo sapien
gcagttaattatcacttaaccagcg

SEQ ID NO: 4589982 - DNA, 25 bp, Homo sapien
aattcaaccaccttaggaagcctct

SEQ ID NO: 4589983 - DNA, 25 bp, Homo sapien
tctagcatgtaattagtgttgcaca

SEQ ID NO: 4589984 - DNA, 25 bp, Homo sapien
cactatgggccctcaaaaggaaatg

SEQ ID NO: 4589985 - DNA, 25 bp, Homo sapien
cactcaagaggagcagaaatcctgt

SEQ ID NO: 4589986 - DNA, 25 bp, Homo sapien
tgtgggaaagtgcacctgtgttccc

SEQ ID NO: 4589987 - DNA, 25 bp, Homo sapien
tgtctcttgaacctagtcacctggg

SEQ ID NO: 4589988 - DNA, 25 bp, Homo sapien
aaaaaaattcacaaagcatgtttat

SEQ ID NO: 4589989 - DNA, 25 bp, Homo sapien
ttttcatgtttattggcccctctac

SEQ ID NO: 4589990 - DNA, 25 bp, Homo sapien
ttcatgtttattggcccctctacat

SEQ ID NO: 4589991 - DNA, 25 bp, Homo sapien
catgtttattggcccctctacattt

SEQ ID NO: 4589992 - DNA, 25 bp, Homo sapien
tgaggctaagtgacgctggcagact

SEQ ID NO: 4589993 - DNA, 25 bp, Homo sapien
cttgagtcctacatgagcacccttg

SEQ ID NO: 4589994 - DNA, 25 bp, Homo sapien
gaagacagggacaaaacgctaccat

SEQ ID NO: 4589995 - DNA, 25 bp, Homo sapien
tctagaggcctagatggaaagatgc

SEQ ID NO: 4589996 - DNA, 25 bp, Homo sapien
gcagagaggcatcatttgttgctga

SEQ ID NO: 4589997 - DNA, 25 bp, Homo sapien
ccacacatgcagagaggcatcattt

SEQ ID NO: 4589998 - DNA, 25 bp, Homo sapien
ccatttccatctaggaagatgtgac

SEQ ID NO: 4589999 - DNA, 25 bp, Homo sapien
ttgttgctgataacaaagtccttgg

SEQ ID NO: 4590000 - DNA, 25 bp, Homo sapien
tgagtgaagagaggttctacttggc

SEQ ID NO: 4590001 - DNA, 25 bp, Homo sapien
tggctccgtgttccatcccaagatg

SEQ ID NO: 4590002 - DNA, 25 bp, Homo sapien
ggcatcatagacctggactgtacca

SEQ ID NO: 4590003 - DNA, 25 bp, Homo sapien
ggctccgtgttccatcttggctccg

SEQ ID NO: 4590004 - DNA, 25 bp, Homo sapien
cacctgttatgcgtgaggctcgaag

SEQ ID NO: 4590005 - DNA, 25 bp, Homo sapien
taaccacgggcaagtagcatctgcc

SEQ ID NO: 4590006 - DNA, 25 bp, Homo sapien
taaccatgagcatccgttgtgcacc

SEQ ID NO: 4590007 - DNA, 25 bp, Homo sapien
gctattggatgaggaatcaaggcac

SEQ ID NO: 4590008 - DNA, 25 bp, Homo sapien
gaagaacctggagagttcgaatttc

SEQ ID NO: 4590009 - DNA, 25 bp, Homo sapien
gagacctgaattcctgctaggctag

SEQ ID NO: 4590010 - DNA, 25 bp, Homo sapien
cagtgtcttactgtctgcaggcccc

SEQ ID NO: 4590011 - DNA, 25 bp, Homo sapien
caatgtgtggaagtttagtagccag

SEQ ID NO: 4590012 - DNA, 25 bp, Homo sapien
gagatcagataacaagacgaaatcc

SEQ ID NO: 4590013 - DNA, 25 bp, Homo sapien
caagacgaaatcctgctcggcagta

SEQ ID NO: 4590014 - DNA, 25 bp, Homo sapien
tcagataacaagacgaaatcctgct

SEQ ID NO: 4590015 - DNA, 25 bp, Homo sapien
taacaagacgaaatcctgctcggca

SEQ ID NO: 4590016 - DNA, 25 bp, Homo sapien
gcaaaggtgtctgcatctaggacct

SEQ ID NO: 4590017 - DNA, 25 bp, Homo sapien
taggtacggatactgggcactggac

SEQ ID NO: 4590018 - DNA, 25 bp, Homo sapien
aacggtgcccacttctgccgggtgt

SEQ ID NO: 4590019 - DNA, 25 bp, Homo sapien
agggctgcgattctccaacggtgcc

SEQ ID NO: 4590020 - DNA, 25 bp, Homo sapien
tcccaccagtcccaggcagaataaa

SEQ ID NO: 4590021 - DNA, 25 bp, Homo sapien
cccaccagtcccaggcagaataaat

SEQ ID NO: 4590022 - DNA, 25 bp, Homo sapien
ccaccagtcccaggcagaataaatc

SEQ ID NO: 4590023 - DNA, 25 bp, Homo sapien
tgggactgcctaatcctgccccagc

SEQ ID NO: 4590024 - DNA, 25 bp, Homo sapien
tagaggccagggcttacctcttatt

SEQ ID NO: 4590025 - DNA, 25 bp, Homo sapien
agcataggagcccttagaggccagg

SEQ ID NO: 4590026 - DNA, 25 bp, Homo sapien
cttattcactgtgtatccccaacac

SEQ ID NO: 4590027 - DNA, 25 bp, Homo sapien
gagagttgaactcagtttttatagt

SEQ ID NO: 4590028 - DNA, 25 bp, Homo sapien
tttttatagtggctgagttgggctg

SEQ ID NO: 4590029 - DNA, 25 bp, Homo sapien
ggcacagagagttgaactcagtttt

SEQ ID NO: 4590030 - DNA, 25 bp, Homo sapien
gggtgatgccggctggagcagcaag

SEQ ID NO: 4590031 - DNA, 25 bp, Homo sapien
gggactccagatcaacgacctgcag

SEQ ID NO: 4590032 - DNA, 25 bp, Homo sapien
ctcgccccatggaggactccgggtg

SEQ ID NO: 4590033 - DNA, 25 bp, Homo sapien
gtgtacgtggtcttccgggactcca

SEQ ID NO: 4590034 - DNA, 25 bp, Homo sapien
ctccgggtgccaatgtggagaagac

SEQ ID NO: 4590035 - DNA, 25 bp, Homo sapien
tgtggagaacaggtagaagacaaga

SEQ ID NO: 4590036 - DNA, 25 bp, Homo sapien
tgatgttgagacataactactctgg

SEQ ID NO: 4590037 - DNA, 25 bp, Homo sapien
tcccctgtacatttagaagatcaag

SEQ ID NO: 4590038 - DNA, 25 bp, Homo sapien
tgaacatgctgctgatgtcacttac

SEQ ID NO: 4590039 - DNA, 25 bp, Homo sapien
gatgtcattgtcttgtaaggtggac

SEQ ID NO: 4590040 - DNA, 25 bp, Homo sapien
ctcgagtgacttgctaaagcctagc

SEQ ID NO: 4590041 - DNA, 25 bp, Homo sapien
tagcaagtacaggtcacattacaga

SEQ ID NO: 4590042 - DNA, 25 bp, Homo sapien
aaaacatgttccatgacctcgagtg

SEQ ID NO: 4590043 - DNA, 25 bp, Homo sapien
tatgcttaatgctgccaaagaggtg

SEQ ID NO: 4590044 - DNA, 25 bp, Homo sapien
tgcttggttagcagggaggttctcc

SEQ ID NO: 4590045 - DNA, 25 bp, Homo sapien
ggatgaactcaattccaggagcagg

SEQ ID NO: 4590046 - DNA, 25 bp, Homo sapien
ccctgcctagggagagtagttctct

SEQ ID NO: 4590047 - DNA, 25 bp, Homo sapien
ctggaaggccactggtaaccagcaa

SEQ ID NO: 4590048 - DNA, 25 bp, Homo sapien
ctgccacacctgcagataacaacct

SEQ ID NO: 4590049 - DNA, 25 bp, Homo sapien
tggaaggccactggtaaccagcaat

SEQ ID NO: 4590050 - DNA, 25 bp, Homo sapien
gagcccaagcttccatgtgtcatga

SEQ ID NO: 4590051 - DNA, 25 bp, Homo sapien
tcaactttagggagactgagcccaa

SEQ ID NO: 4590052 - DNA, 25 bp, Homo sapien
tcacctacagaggacacaagtatgg

SEQ ID NO: 4590053 - DNA, 25 bp, Homo sapien
ggagcaactccggtagaactgttac

SEQ ID NO: 4590054 - DNA, 25 bp, Homo sapien
ggcagaatacccccaggcatttgca

SEQ ID NO: 4590055 - DNA, 25 bp, Homo sapien
ggaggcagaatacccccaggcattt

SEQ ID NO: 4590056 - DNA, 25 bp, Homo sapien
gaggaggcagaatacccccaggcat

SEQ ID NO: 4590057 - DNA, 25 bp, Homo sapien
atgaggaggcagaatacccccaggc

SEQ ID NO: 4590058 - DNA, 25 bp, Homo sapien
ctgaaaatcctccatggcgcacttt

SEQ ID NO: 4590059 - DNA, 25 bp, Homo sapien
ttagatcaaagatagacctgtctga

SEQ ID NO: 4590060 - DNA, 25 bp, Homo sapien
cctccatggcgcactttgaaatctc

SEQ ID NO: 4590061 - DNA, 25 bp, Homo sapien
aagatagacctgtctgaaaatcctc

SEQ ID NO: 4590062 - DNA, 25 bp, Homo sapien
tctcttggcttcagaaacattgacc

SEQ ID NO: 4590063 - DNA, 25 bp, Homo sapien
tctgttagactagaagggcaggcct

SEQ ID NO: 4590064 - DNA, 25 bp, Homo sapien
taaatgtgttccctgaggttccgtc

SEQ ID NO: 4590065 - DNA, 25 bp, Homo sapien
tggtagataacaggagctccacaaa

SEQ ID NO: 4590066 - DNA, 25 bp, Homo sapien
tttttcaggctttcatagccagcaa

SEQ ID NO: 4590067 - DNA, 25 bp, Homo sapien
ctttttcaggctttcatagccagca

SEQ ID NO: 4590068 - DNA, 25 bp, Homo sapien
caaattgctacaagtgactctcagg

SEQ ID NO: 4590069 - DNA, 25 bp, Homo sapien
tctaggcttagctcctgaaacccag

SEQ ID NO: 4590070 - DNA, 25 bp, Homo sapien
tgttagccacgctggaatacagtgt

SEQ ID NO: 4590071 - DNA, 25 bp, Homo sapien
cactgctcccggtcagagatcttaa

SEQ ID NO: 4590072 - DNA, 25 bp, Homo sapien
tgtcatcaatccattcaaggactcg

SEQ ID NO: 4590073 - DNA, 25 bp, Homo sapien
caaggactcgagtggctcctgacag

SEQ ID NO: 4590074 - DNA, 25 bp, Homo sapien
ggctcctgacaggtcgaatgcatag

SEQ ID NO: 4590075 - DNA, 25 bp, Homo sapien
tcctgacaggtcgaatgcatagaaa

SEQ ID NO: 4590076 - DNA, 25 bp, Homo sapien
tactagtaatctcacaacgcgcgca

SEQ ID NO: 4590077 - DNA, 25 bp, Homo sapien
taactgggcactgcgtcttcacaag

SEQ ID NO: 4590078 - DNA, 25 bp, Homo sapien
tcatgtgtggacgtcccagggtacc

SEQ ID NO: 4590079 - DNA, 25 bp, Homo sapien
agaggctggcgcaaactaactgggc

SEQ ID NO: 4590080 - DNA, 25 bp, Homo sapien
ccagccagtcgtccccaggatccat

SEQ ID NO: 4590081 - DNA, 25 bp, Homo sapien
accagccagtcgtccccaggatcca

SEQ ID NO: 4590082 - DNA, 25 bp, Homo sapien
accgcttccggcgtctcacttccgc

SEQ ID NO: 4590083 - DNA, 25 bp, Homo sapien
ggcaacgaccgcttccggcgtctca

SEQ ID NO: 4590084 - DNA, 25 bp, Homo sapien
cgaccgcttccggcgtctcacttcc

SEQ ID NO: 4590085 - DNA, 25 bp, Homo sapien
caacgaccgcttccggcgtctcact

SEQ ID NO: 4590086 - DNA, 25 bp, Homo sapien
tccgcgaaagctccgggaaaagtga

SEQ ID NO: 4590087 - DNA, 25 bp, Homo sapien
tgacctgaaatcgggactttcccgc

SEQ ID NO: 4590088 - DNA, 25 bp, Homo sapien
ctccgcgaaagctccgggaaaagtg

SEQ ID NO: 4590089 - DNA, 25 bp, Homo sapien
aatcgggactttcccgctgtcagct

SEQ ID NO: 4590090 - DNA, 25 bp, Homo sapien
gtctgcatcagcgatatttctggtg

SEQ ID NO: 4590091 - DNA, 25 bp, Homo sapien
gccagaaatcacagtaatggagtaa

SEQ ID NO: 4590092 - DNA, 25 bp, Homo sapien
gaaatacagcaggaacataatctgt

SEQ ID NO: 4590093 - DNA, 25 bp, Homo sapien
caggaacataatctgtgtctgcatc

SEQ ID NO: 4590094 - DNA, 25 bp, Homo sapien
tctaagccacgctgttgtgtctgcc

SEQ ID NO: 4590095 - DNA, 25 bp, Homo sapien
ctgttgtgtctgccccattattggt

SEQ ID NO: 4590096 - DNA, 25 bp, Homo sapien
gggcacaatctaagccacgctgttg

SEQ ID NO: 4590097 - DNA, 25 bp, Homo sapien
gggccatcaacagggtcccattcag

SEQ ID NO: 4590098 - DNA, 25 bp, Homo sapien
ttctgcagtatttgtaccagcagcc

SEQ ID NO: 4590099 - DNA, 25 bp, Homo sapien
tctgcagtatttgtaccagcagcct

SEQ ID NO: 4590100 - DNA, 25 bp, Homo sapien
ctgcagtatttgtaccagcagcctc

SEQ ID NO: 4590101 - DNA, 25 bp, Homo sapien
aacatacagaagaattgagccaggg

SEQ ID NO: 4590102 - DNA, 25 bp, Homo sapien
tcggggcagtagttttctcagaaca

SEQ ID NO: 4590103 - DNA, 25 bp, Homo sapien
cagagcaccctgaattgccttggag

SEQ ID NO: 4590104 - DNA, 25 bp, Homo sapien
attcctaagtgccagatgtctgcag

SEQ ID NO: 4590105 - DNA, 25 bp, Homo sapien
cattagaggtgacattgtttccctt

SEQ ID NO: 4590106 - DNA, 25 bp, Homo sapien
gcatgtgtcagagcttcaaaaccaa

SEQ ID NO: 4590107 - DNA, 25 bp, Homo sapien
gattctctagttggtctgcatgtgt

SEQ ID NO: 4590108 - DNA, 25 bp, Homo sapien
taggccttacatctgaggtcctcag

SEQ ID NO: 4590109 - DNA, 25 bp, Homo sapien
tagggaatgcctctcccttcaaaat

SEQ ID NO: 4590110 - DNA, 25 bp, Homo sapien
aaatgcacacactatatgctaggca

SEQ ID NO: 4590111 - DNA, 25 bp, Homo sapien
ttggaccttttctagggaatgcctc

SEQ ID NO: 4590112 - DNA, 25 bp, Homo sapien
tttctagggaatgcctctcccttca

SEQ ID NO: 4590113 - DNA, 25 bp, Homo sapien
aaggcgagtctacaacaggtgccgc

SEQ ID NO: 4590114 - DNA, 25 bp, Homo sapien
ggatatgaaggcgagtctacaacag

SEQ ID NO: 4590115 - DNA, 25 bp, Homo sapien
tatgaaggcgagtctacaacaggtg

SEQ ID NO: 4590116 - DNA, 25 bp, Homo sapien
gcgagtctacaacaggtgccgccag

SEQ ID NO: 4590117 - DNA, 25 bp, Homo sapien
ctggatttggggtgcggggcggctg

SEQ ID NO: 4590118 - DNA, 25 bp, Homo sapien
ttggggtgcggggcggctgaggctc

SEQ ID NO: 4590119 - DNA, 25 bp, Homo sapien
tggatttggggtgcggggcggctga

SEQ ID NO: 4590120 - DNA, 25 bp, Homo sapien
gatttggggtgcggggcggctgagg

SEQ ID NO: 4590121 - DNA, 25 bp, Homo sapien
ggattccgagcagatcatgactcag

SEQ ID NO: 4590122 - DNA, 25 bp, Homo sapien
tcatgactcagctgcagtcgctggt

SEQ ID NO: 4590123 - DNA, 25 bp, Homo sapien
ctgcagtcgctggtccctcagggag

SEQ ID NO: 4590124 - DNA, 25 bp, Homo sapien
ccttctttagcaggaggattccgag

SEQ ID NO: 4590125 - DNA, 25 bp, Homo sapien
cgttcttgtagcgggaagacactta

SEQ ID NO: 4590126 - DNA, 25 bp, Homo sapien
tccgttcttgtagcgggaagacact

SEQ ID NO: 4590127 - DNA, 25 bp, Homo sapien
ttcttgtagcgggaagacacttaac

SEQ ID NO: 4590128 - DNA, 25 bp, Homo sapien
tttccgttcttgtagcgggaagaca

SEQ ID NO: 4590129 - DNA, 25 bp, Homo sapien
cttcctcctcttggtgcttccacct

SEQ ID NO: 4590130 - DNA, 25 bp, Homo sapien
cctcctcttggtgcttccacctcac

SEQ ID NO: 4590131 - DNA, 25 bp, Homo sapien
tcctcctcttggtgcttccacctca

SEQ ID NO: 4590132 - DNA, 25 bp, Homo sapien
ttcctcctcttggtgcttccacctc

SEQ ID NO: 4590133 - DNA, 25 bp, Homo sapien
tgtctgggtggtggcaaagcctgct

SEQ ID NO: 4590134 - DNA, 25 bp, Homo sapien
gggtggtggcaaagcctgctccctc

SEQ ID NO: 4590135 - DNA, 25 bp, Homo sapien
caaggagccacaaaggtgtctgggt

SEQ ID NO: 4590136 - DNA, 25 bp, Homo sapien
tctgggtggtggcaaagcctgctcc

SEQ ID NO: 4590137 - DNA, 25 bp, Homo sapien
gggagaaactctgctagttgtgtgg

SEQ ID NO: 4590138 - DNA, 25 bp, Homo sapien
aaagggcagggtaggaagtggagag

SEQ ID NO: 4590139 - DNA, 25 bp, Homo sapien
gagaaactctgctagttgtgtgggc

SEQ ID NO: 4590140 - DNA, 25 bp, Homo sapien
aaactctgctagttgtgtgggctgc

SEQ ID NO: 4590141 - DNA, 25 bp, Homo sapien
tggcccagaggttgcctcgcgagtg

SEQ ID NO: 4590142 - DNA, 25 bp, Homo sapien
tcggatcttgctggctcggctgcgg

SEQ ID NO: 4590143 - DNA, 25 bp, Homo sapien
cgcgagtgcactcggatcttgctgg

SEQ ID NO: 4590144 - DNA, 25 bp, Homo sapien
aggttgcctcgcgagtgcactcgga

SEQ ID NO: 4590145 - DNA, 25 bp, Homo sapien
cgggagatcccagctgagcggggcg

SEQ ID NO: 4590146 - DNA, 25 bp, Homo sapien
gctgccgaacatccgagcgcccccc

SEQ ID NO: 4590147 - DNA, 25 bp, Homo sapien
gagatcccagctgagcggggcgacg

SEQ ID NO: 4590148 - DNA, 25 bp, Homo sapien
gatcccagctgagcggggcgacgcc

SEQ ID NO: 4590149 - DNA, 25 bp, Homo sapien
gggctgccttcgatccttttaaatc

SEQ ID NO: 4590150 - DNA, 25 bp, Homo sapien
gccaaataggcacttcagccctctg

SEQ ID NO: 4590151 - DNA, 25 bp, Homo sapien
tctgccacggctttcggccaaatag

SEQ ID NO: 4590152 - DNA, 25 bp, Homo sapien
ccaccttcaggctaaggaccgggca

SEQ ID NO: 4590153 - DNA, 25 bp, Homo sapien
ccttggactctggatacctctggaa

SEQ ID NO: 4590154 - DNA, 25 bp, Homo sapien
cacaggacagggacgtttcatttct

SEQ ID NO: 4590155 - DNA, 25 bp, Homo sapien
tctgtggccggaagcaacaattctg

SEQ ID NO: 4590156 - DNA, 25 bp, Homo sapien
catctggcttgataatgggacctgc

SEQ ID NO: 4590157 - DNA, 25 bp, Homo sapien
tcgagaggagcacgaacaaagtacg

SEQ ID NO: 4590158 - DNA, 25 bp, Homo sapien
gactctgtcttaatgccctccagga

SEQ ID NO: 4590159 - DNA, 25 bp, Homo sapien
acaaagtacgggacagtgcagagca

SEQ ID NO: 4590160 - DNA, 25 bp, Homo sapien
tacaagtgatggctactacgcctgg

SEQ ID NO: 4590161 - DNA, 25 bp, Homo sapien
caagtctctgtaggcactttagaag

SEQ ID NO: 4590162 - DNA, 25 bp, Homo sapien
aagttaagacttacgaccacctcag

SEQ ID NO: 4590163 - DNA, 25 bp, Homo sapien
cctaatagaaggaggtatgacggtt

SEQ ID NO: 4590164 - DNA, 25 bp, Homo sapien
ggtttcaaactcgtgcagagctgca

SEQ ID NO: 4590165 - DNA, 25 bp, Homo sapien
gcaaaccagtgctacccagaagcac

SEQ ID NO: 4590166 - DNA, 25 bp, Homo sapien
cccgcccacacaaactctggcatgg

SEQ ID NO: 4590167 - DNA, 25 bp, Homo sapien
gtgactgaaagtcccctcgagtgca

SEQ ID NO: 4590168 - DNA, 25 bp, Homo sapien
aacatccagtaacgaaaactatggc

SEQ ID NO: 4590169 - DNA, 25 bp, Homo sapien
gatgaaccagcacgaataaacccag

SEQ ID NO: 4590170 - DNA, 25 bp, Homo sapien
taaacccagcaaaaagagaactgca

SEQ ID NO: 4590171 - DNA, 25 bp, Homo sapien
gaaccagcacgaataaacccagcaa

SEQ ID NO: 4590172 - DNA, 25 bp, Homo sapien
agcacgaataaacccagcaaaaaga

SEQ ID NO: 4590173 - DNA, 25 bp, Homo sapien
taataaaacaaataatacagactct

SEQ ID NO: 4590174 - DNA, 25 bp, Homo sapien
tgtgcctggcccaaaagattacatt

SEQ ID NO: 4590175 - DNA, 25 bp, Homo sapien
ataaaacaaataatacagactctta

SEQ ID NO: 4590176 - DNA, 25 bp, Homo sapien
tgcctggcccaaaagattacatttt

SEQ ID NO: 4590177 - DNA, 25 bp, Homo sapien
cttaaatttaggatagtcattcatg

SEQ ID NO: 4590178 - DNA, 25 bp, Homo sapien
cacaattccaatataaggaacaaat

SEQ ID NO: 4590179 - DNA, 25 bp, Homo sapien
cattcatgaggatcgtcacaattcc

SEQ ID NO: 4590180 - DNA, 25 bp, Homo sapien
aaatttaggatagtcattcatgagg

SEQ ID NO: 4590181 - DNA, 25 bp, Homo sapien
cagaatttccgatgtaaagcagctg

SEQ ID NO: 4590182 - DNA, 25 bp, Homo sapien
gaaacagatgatcatgcccaaggta

SEQ ID NO: 4590183 - DNA, 25 bp, Homo sapien
gaaccagcaccagatagagccaagg

SEQ ID NO: 4590184 - DNA, 25 bp, Homo sapien
tatttgatccttgcaaaagcccaag

SEQ ID NO: 4590185 - DNA, 25 bp, Homo sapien
gataaactcatgtgctaaagcagag

SEQ ID NO: 4590186 - DNA, 25 bp, Homo sapien
gacgaggcagttcaaagtcaaacaa

SEQ ID NO: 4590187 - DNA, 25 bp, Homo sapien
taccctccatggacagagataagca

SEQ ID NO: 4590188 - DNA, 25 bp, Homo sapien
taaggatcccagaatatgacgaggc

SEQ ID NO: 4590189 - DNA, 25 bp, Homo sapien
acactagcctgtgccaagttaatat

SEQ ID NO: 4590190 - DNA, 25 bp, Homo sapien
aactccaacactagcctgtgccaag

SEQ ID NO: 4590191 - DNA, 25 bp, Homo sapien
atgaatgccatccacaaagccaact

SEQ ID NO: 4590192 - DNA, 25 bp, Homo sapien
aatgaatgccatccacaaagccaac

SEQ ID NO: 4590193 - DNA, 25 bp, Homo sapien
cactgaactgttctcctgataaaat

SEQ ID NO: 4590194 - DNA, 25 bp, Homo sapien
tccactgaactgttctcctgataaa

SEQ ID NO: 4590195 - DNA, 25 bp, Homo sapien
ccactgaactgttctcctgataaaa

SEQ ID NO: 4590196 - DNA, 25 bp, Homo sapien
tttggtcaaaaacttgatatgccca

SEQ ID NO: 4590197 - DNA, 25 bp, Homo sapien
cctttggtcaaaaacttgatatgcc

SEQ ID NO: 4590198 - DNA, 25 bp, Homo sapien
ctttggtcaaaaacttgatatgccc

SEQ ID NO: 4590199 - DNA, 25 bp, Homo sapien
tggtcaaaaacttgatatgcccatt

SEQ ID NO: 4590200 - DNA, 25 bp, Homo sapien
tctcacaggatataattggcaagat

SEQ ID NO: 4590201 - DNA, 25 bp, Homo sapien
tacacactaccaattttctggaaac

SEQ ID NO: 4590202 - DNA, 25 bp, Homo sapien
ccaactaatgacttgcaaggaacaa

SEQ ID NO: 4590203 - DNA, 25 bp, Homo sapien
acagactatgggaaactacagaata

SEQ ID NO: 4590204 - DNA, 25 bp, Homo sapien
gaaaattattagcttaattctacta

SEQ ID NO: 4590205 - DNA, 25 bp, Homo sapien
tacagttgataaagactagctgaaa

SEQ ID NO: 4590206 - DNA, 25 bp, Homo sapien
gcttaattctactaaagaaccatga

SEQ ID NO: 4590207 - DNA, 25 bp, Homo sapien
tattttacagttgataaagactagc

SEQ ID NO: 4590208 - DNA, 25 bp, Homo sapien
tgcccaggatagaataaagtggcat

SEQ ID NO: 4590209 - DNA, 25 bp, Homo sapien
ccaggatagaataaagtggcatgat

SEQ ID NO: 4590210 - DNA, 25 bp, Homo sapien
gttgcccaggatagaataaagtggc

SEQ ID NO: 4590211 - DNA, 25 bp, Homo sapien
ggatagaataaagtggcatgatctc

SEQ ID NO: 4590212 - DNA, 25 bp, Homo sapien
tcaccatctggtctagacgcccagg

SEQ ID NO: 4590213 - DNA, 25 bp, Homo sapien
ggcattgctgagaatgaacaacaca

SEQ ID NO: 4590214 - DNA, 25 bp, Homo sapien
tttcctccagcttaaacaaggcctg

SEQ ID NO: 4590215 - DNA, 25 bp, Homo sapien
caaggcctgagcttaatttgattct

SEQ ID NO: 4590216 - DNA, 25 bp, Homo sapien
tgtgtcatacaggatgcctcccttt

SEQ ID NO: 4590217 - DNA, 25 bp, Homo sapien
tcatgcctactctttcacttctcgt

SEQ ID NO: 4590218 - DNA, 25 bp, Homo sapien
cacttctcgtctgtgtgtcatacag

SEQ ID NO: 4590219 - DNA, 25 bp, Homo sapien
aaaagaaccgaaatcatgcctactc

SEQ ID NO: 4590220 - DNA, 25 bp, Homo sapien
caagactcggtgaactataggaatc

SEQ ID NO: 4590221 - DNA, 25 bp, Homo sapien
cttcaactcgatttgttagaaagag

SEQ ID NO: 4590222 - DNA, 25 bp, Homo sapien
tttcatgaatcttcaagactcggtg

SEQ ID NO: 4590223 - DNA, 25 bp, Homo sapien
gaatcttcaagactcggtgaactat

SEQ ID NO: 4590224 - DNA, 25 bp, Homo sapien
taaaatcactaagagtggttgcgca

SEQ ID NO: 4590225 - DNA, 25 bp, Homo sapien
atggactaatacaccgtctctacaa

SEQ ID NO: 4590226 - DNA, 25 bp, Homo sapien
tttcagtcaaacaaccaagtggtaa

SEQ ID NO: 4590227 - DNA, 25 bp, Homo sapien
tgagatcctatctgctacggtttgg

SEQ ID NO: 4590228 - DNA, 25 bp, Homo sapien
tcttacaactgataagtagtgacta

SEQ ID NO: 4590229 - DNA, 25 bp, Homo sapien
tttctaagagaatgatatgccagtt

SEQ ID NO: 4590230 - DNA, 25 bp, Homo sapien
catgcaattccatgccttgaaagga

SEQ ID NO: 4590231 - DNA, 25 bp, Homo sapien
tttttctcccaagtaatgccatgca

SEQ ID NO: 4590232 - DNA, 25 bp, Homo sapien
gcaccactacaatcggactttcact

SEQ ID NO: 4590233 - DNA, 25 bp, Homo sapien
cactacaatcggactttcacttcca

SEQ ID NO: 4590234 - DNA, 25 bp, Homo sapien
ctgagcaccactacaatcggacttt

SEQ ID NO: 4590235 - DNA, 25 bp, Homo sapien
gagcaccactacaatcggactttca

SEQ ID NO: 4590236 - DNA, 25 bp, Homo sapien
aagagatcagatccaccattatccc

SEQ ID NO: 4590237 - DNA, 25 bp, Homo sapien
agatcagatccaccattatccccac

SEQ ID NO: 4590238 - DNA, 25 bp, Homo sapien
agaagagatcagatccaccattatc

SEQ ID NO: 4590239 - DNA, 25 bp, Homo sapien
gagatcagatccaccattatcccca

SEQ ID NO: 4590240 - DNA, 25 bp, Homo sapien
tggagcctcgctcttgctcagtcac

SEQ ID NO: 4590241 - DNA, 25 bp, Homo sapien
atggagcctcgctcttgctcagtca

SEQ ID NO: 4590242 - DNA, 25 bp, Homo sapien
ggagcctcgctcttgctcagtcacc

SEQ ID NO: 4590243 - DNA, 25 bp, Homo sapien
tattacttttctactatacttatcc

SEQ ID NO: 4590244 - DNA, 25 bp, Homo sapien
ctctattacttttctactatactta

SEQ ID NO: 4590245 - DNA, 25 bp, Homo sapien
cggccctctattacttttctactat

SEQ ID NO: 4590246 - DNA, 25 bp, Homo sapien
ggccctctattacttttctactata

SEQ ID NO: 4590247 - DNA, 25 bp, Homo sapien
caccagacggcatttcaatttcaaa

SEQ ID NO: 4590248 - DNA, 25 bp, Homo sapien
aattcagaacacgtggaaaaaggca

SEQ ID NO: 4590249 - DNA, 25 bp, Homo sapien
taagcttatcagtcacatagtcaag

SEQ ID NO: 4590250 - DNA, 25 bp, Homo sapien
taaggaaactgtctcgaaaagagga

SEQ ID NO: 4590251 - DNA, 25 bp, Homo sapien
ttttaatcaaaacagtatacacaca

SEQ ID NO: 4590252 - DNA, 25 bp, Homo sapien
tttaatcaaaacagtatacacacat

SEQ ID NO: 4590253 - DNA, 25 bp, Homo sapien
taatattcttatgttaagaactctg

SEQ ID NO: 4590254 - DNA, 25 bp, Homo sapien
tgtttaagggaaagcgtgcatagtg

SEQ ID NO: 4590255 - DNA, 25 bp, Homo sapien
tcttatgttaagaactctgtttgta

SEQ ID NO: 4590256 - DNA, 25 bp, Homo sapien
gaaagcgtgcatagtgttaatattc

SEQ ID NO: 4590257 - DNA, 25 bp, Homo sapien
caacaggcccagctagtatctgtat

SEQ ID NO: 4590258 - DNA, 25 bp, Homo sapien
cgagtctttcttaactatctttgca

SEQ ID NO: 4590259 - DNA, 25 bp, Homo sapien
gaaggccgagtctttcttaactatc

SEQ ID NO: 4590260 - DNA, 25 bp, Homo sapien
tccttgaaggccgagtctttcttaa

SEQ ID NO: 4590261 - DNA, 25 bp, Homo sapien
ggctccttgaaggccgagtctttct

SEQ ID NO: 4590262 - DNA, 25 bp, Homo sapien
gagtggtccaagtcaaagtcggtgc

SEQ ID NO: 4590263 - DNA, 25 bp, Homo sapien
taaaaataatgaggcggacaaggcg

SEQ ID NO: 4590264 - DNA, 25 bp, Homo sapien
tctccaaagaaagcgaatgacccgg

SEQ ID NO: 4590265 - DNA, 25 bp, Homo sapien
tcagctctactaaagggttgcaagg

SEQ ID NO: 4590266 - DNA, 25 bp, Homo sapien
cgtccaaaaagtctagagacagcat

SEQ ID NO: 4590267 - DNA, 25 bp, Homo sapien
cgcacatcgtccaaaaagtctagag

SEQ ID NO: 4590268 - DNA, 25 bp, Homo sapien
tgccgcttgttcatccgccgcacat

SEQ ID NO: 4590269 - DNA, 25 bp, Homo sapien
atccgccgcacatcgtccaaaaagt

SEQ ID NO: 4590270 - DNA, 25 bp, Homo sapien
gcaggacaccggcaggggaaagggc

SEQ ID NO: 4590271 - DNA, 25 bp, Homo sapien
acaccggcaggggaaagggcgcgat

SEQ ID NO: 4590272 - DNA, 25 bp, Homo sapien
cggcaggggaaagggcgcgatgacc

SEQ ID NO: 4590273 - DNA, 25 bp, Homo sapien
caggacaccggcaggggaaagggcg

SEQ ID NO: 4590274 - DNA, 25 bp, Homo sapien
ggaccccgcagtgcttgcacttccg

SEQ ID NO: 4590275 - DNA, 25 bp, Homo sapien
tcgggctcacactggacaggacccc

SEQ ID NO: 4590276 - DNA, 25 bp, Homo sapien
cgggctcacactggacaggaccccg

SEQ ID NO: 4590277 - DNA, 25 bp, Homo sapien
cgcagtgcttgcacttccgcttccg

SEQ ID NO: 4590278 - DNA, 25 bp, Homo sapien
ctggcacggtcgggcacggtccccg

SEQ ID NO: 4590279 - DNA, 25 bp, Homo sapien
tggcacggtcgggcacggtccccgc

SEQ ID NO: 4590280 - DNA, 25 bp, Homo sapien
tgcggagagctgacagagagactca

SEQ ID NO: 4590281 - DNA, 25 bp, Homo sapien
ctgcggagagctgacagagagactc

SEQ ID NO: 4590282 - DNA, 25 bp, Homo sapien
ggcctcgccgtgggagggttctcac

SEQ ID NO: 4590283 - DNA, 25 bp, Homo sapien
tggcctcgccgtgggagggttctca

SEQ ID NO: 4590284 - DNA, 25 bp, Homo sapien
cttggcctcgccgtgggagggttct

SEQ ID NO: 4590285 - DNA, 25 bp, Homo sapien
gcttggcctcgccgtgggagggttc

SEQ ID NO: 4590286 - DNA, 25 bp, Homo sapien
taggttctctggtcgagcaagtctc

SEQ ID NO: 4590287 - DNA, 25 bp, Homo sapien
gcagtggatgtgtcgtctgaccgta

SEQ ID NO: 4590288 - DNA, 25 bp, Homo sapien
gagcaagtctcctgcgctatgggaa

SEQ ID NO: 4590289 - DNA, 25 bp, Homo sapien
tctcgcctgccaaaaaccgactgga

SEQ ID NO: 4590290 - DNA, 25 bp, Homo sapien
caccttctcaatgtaggaagtggtg

SEQ ID NO: 4590291 - DNA, 25 bp, Homo sapien
accttctcaatgtaggaagtggtgg

SEQ ID NO: 4590292 - DNA, 25 bp, Homo sapien
tcaccttctcaatgtaggaagtggt

SEQ ID NO: 4590293 - DNA, 25 bp, Homo sapien
gggtcctgtttgtccaatttgctca

SEQ ID NO: 4590294 - DNA, 25 bp, Homo sapien
ttgggtcctgtttgtccaatttgct

SEQ ID NO: 4590295 - DNA, 25 bp, Homo sapien
tcctgtttgtccaatttgctcacca

SEQ ID NO: 4590296 - DNA, 25 bp, Homo sapien
ggtcctgtttgtccaatttgctcac

SEQ ID NO: 4590297 - DNA, 25 bp, Homo sapien
agaaatatacatgcactataaaaat

SEQ ID NO: 4590298 - DNA, 25 bp, Homo sapien
agctacttaaagataccatttccct

SEQ ID NO: 4590299 - DNA, 25 bp, Homo sapien
taagtggtacacaggtttggagtca

SEQ ID NO: 4590300 - DNA, 25 bp, Homo sapien
ccagctgccctaaggatgattgtag

SEQ ID NO: 4590301 - DNA, 25 bp, Homo sapien
tctgggatatggtgacaaatcttcc

SEQ ID NO: 4590302 - DNA, 25 bp, Homo sapien
tgtagagggtaatccaggcagctga

SEQ ID NO: 4590303 - DNA, 25 bp, Homo sapien
gctgcatgttagttccagccatctt

SEQ ID NO: 4590304 - DNA, 25 bp, Homo sapien
tccggctgcatgttagttccagcca

SEQ ID NO: 4590305 - DNA, 25 bp, Homo sapien
ggctccggctgcatgttagttccag

SEQ ID NO: 4590306 - DNA, 25 bp, Homo sapien
cggctgcatgttagttccagccatc

SEQ ID NO: 4590307 - DNA, 25 bp, Homo sapien
gtctacctcttcgaggcacccgttg

SEQ ID NO: 4590308 - DNA, 25 bp, Homo sapien
gcctgcgcgaatgtccttgtagcca

SEQ ID NO: 4590309 - DNA, 25 bp, Homo sapien
tgcacagtcatcgtttccccagtaa

SEQ ID NO: 4590310 - DNA, 25 bp, Homo sapien
ctcggttaccccagaggcaacacgt

SEQ ID NO: 4590311 - DNA, 25 bp, Homo sapien
gcaggtggggtgtaagtaggagaaa

SEQ ID NO: 4590312 - DNA, 25 bp, Homo sapien
atcctcaggttgctgaaggtgttca

SEQ ID NO: 4590313 - DNA, 25 bp, Homo sapien
aaggaaaaggaagggtcatcctcag

SEQ ID NO: 4590314 - DNA, 25 bp, Homo sapien
tcaagtgagttttggaagcaggtgg

SEQ ID NO: 4590315 - DNA, 25 bp, Homo sapien
ccaagcatgcgtgtgtgattagggt

SEQ ID NO: 4590316 - DNA, 25 bp, Homo sapien
gccagtcttagttcactcactggtg

SEQ ID NO: 4590317 - DNA, 25 bp, Homo sapien
ctcactggtgagttccttgtgcagt

SEQ ID NO: 4590318 - DNA, 25 bp, Homo sapien
ttggagtccaaagtacaggggcagc

SEQ ID NO: 4590319 - DNA, 25 bp, Homo sapien
ctggcccctgcttggccctctgctt

SEQ ID NO: 4590320 - DNA, 25 bp, Homo sapien
ccccctggcccctgcttggccctct

SEQ ID NO: 4590321 - DNA, 25 bp, Homo sapien
tggcccctgcttggccctctgcttc

SEQ ID NO: 4590322 - DNA, 25 bp, Homo sapien
ccctggcccctgcttggccctctgc

SEQ ID NO: 4590323 - DNA, 25 bp, Homo sapien
gctccaaagccgaaagaggaggtcc

SEQ ID NO: 4590324 - DNA, 25 bp, Homo sapien
tacctgccacggataccagtcaggt

SEQ ID NO: 4590325 - DNA, 25 bp, Homo sapien
ccctacctgccacggataccagtca

SEQ ID NO: 4590326 - DNA, 25 bp, Homo sapien
gaggtccctacctgccacggatacc

SEQ ID NO: 4590327 - DNA, 25 bp, Homo sapien
aaggatcagcctcttggtaaaacca

SEQ ID NO: 4590328 - DNA, 25 bp, Homo sapien
gaaaaaacttccctctagagctcat

SEQ ID NO: 4590329 - DNA, 25 bp, Homo sapien
ctgcaagatgccaaactcaaagggc

SEQ ID NO: 4590330 - DNA, 25 bp, Homo sapien
taagcaagaagtcattttcagggaa

SEQ ID NO: 4590331 - DNA, 25 bp, Homo sapien
caataaatggtaagcttccccatgg

SEQ ID NO: 4590332 - DNA, 25 bp, Homo sapien
tacatatacatggtaagacattcca

SEQ ID NO: 4590333 - DNA, 25 bp, Homo sapien
agacattccacaatacaaaagggta

SEQ ID NO: 4590334 - DNA, 25 bp, Homo sapien
tggaggtcagcctctagtcccctct

SEQ ID NO: 4590335 - DNA, 25 bp, Homo sapien
tggatagaagcatgccagagtggcc

SEQ ID NO: 4590336 - DNA, 25 bp, Homo sapien
acaaggcagtaagttcccacgggag

SEQ ID NO: 4590337 - DNA, 25 bp, Homo sapien
gctgtggcagctctatcattgagtc

SEQ ID NO: 4590338 - DNA, 25 bp, Homo sapien
gctcatcccagagcggtaggacctg

SEQ ID NO: 4590339 - DNA, 25 bp, Homo sapien
tctagaagtgttaattgagccccta

SEQ ID NO: 4590340 - DNA, 25 bp, Homo sapien
aaatggaggccgaaggagtgatcta

SEQ ID NO: 4590341 - DNA, 25 bp, Homo sapien
tcactaatggaggtggcttggcttg

SEQ ID NO: 4590342 - DNA, 25 bp, Homo sapien
tgagcccctaatctatgctagttac

SEQ ID NO: 4590343 - DNA, 25 bp, Homo sapien
gcgttattgaatactgccccagtgg

SEQ ID NO: 4590344 - DNA, 25 bp, Homo sapien
ttttagggcctgatacacagctgtt

SEQ ID NO: 4590345 - DNA, 25 bp, Homo sapien
ggtctggaccttgctctcccttgag

SEQ ID NO: 4590346 - DNA, 25 bp, Homo sapien
cagtggtttcatcaggtcctgaaga

SEQ ID NO: 4590347 - DNA, 25 bp, Homo sapien
tttggcaaaagtcaagaagttcagc

SEQ ID NO: 4590348 - DNA, 25 bp, Homo sapien
cctcagagacttggagtgctgtatc

SEQ ID NO: 4590349 - DNA, 25 bp, Homo sapien
tgaaaaactcttggaagtagccaga

SEQ ID NO: 4590350 - DNA, 25 bp, Homo sapien
tacattgtcagcagacctgttctag

SEQ ID NO: 4590351 - DNA, 25 bp, Homo sapien
catcgagtgccatggcatcctagag

SEQ ID NO: 4590352 - DNA, 25 bp, Homo sapien
gagtgccatggcatcctagagagaa

SEQ ID NO: 4590353 - DNA, 25 bp, Homo sapien
taccaccatcgagtgccatggcatc

SEQ ID NO: 4590354 - DNA, 25 bp, Homo sapien
aaacataccaccatcgagtgccatg

SEQ ID NO: 4590355 - DNA, 25 bp, Homo sapien
tcttgtgggcagaaactacgacgtc

SEQ ID NO: 4590356 - DNA, 25 bp, Homo sapien
tgcatcatcaaggtgtccagcctgc

SEQ ID NO: 4590357 - DNA, 25 bp, Homo sapien
caaggtcatctacgggctggaaccc

SEQ ID NO: 4590358 - DNA, 25 bp, Homo sapien
ccagtatcgaggcagaaggcatctc

SEQ ID NO: 4590359 - DNA, 25 bp, Homo sapien
tcccaggcctagagaggaaaatcag

SEQ ID NO: 4590360 - DNA, 25 bp, Homo sapien
gccagggacccaatcaagcattttt

SEQ ID NO: 4590361 - DNA, 25 bp, Homo sapien
ggagatcttgactttaccttggcac

SEQ ID NO: 4590362 - DNA, 25 bp, Homo sapien
tatttctcgtggcaagaagggagct

SEQ ID NO: 4590363 - DNA, 25 bp, Homo sapien
ttcctgagctacacgaaggctggct

SEQ ID NO: 4590364 - DNA, 25 bp, Homo sapien
ggaggcgctggtcaaggatgtcttt

SEQ ID NO: 4590365 - DNA, 25 bp, Homo sapien
tgtctttgcctttcaggtcagcttg

SEQ ID NO: 4590366 - DNA, 25 bp, Homo sapien
aggtcagcttgactcagggtcccag

SEQ ID NO: 4590367 - DNA, 25 bp, Homo sapien
tgattttagtatgtatgctgccgaa

SEQ ID NO: 4590368 - DNA, 25 bp, Homo sapien
tccgtatcgttctgattttagtatg

SEQ ID NO: 4590369 - DNA, 25 bp, Homo sapien
cttctccgtatcgttctgattttag

SEQ ID NO: 4590370 - DNA, 25 bp, Homo sapien
atcgttctgattttagtatgtatgc

SEQ ID NO: 4590371 - DNA, 25 bp, Homo sapien
ttaatatatgtgcacaagaagcaag

SEQ ID NO: 4590372 - DNA, 25 bp, Homo sapien
atgaatttgtgcgtcatcctcaggt

SEQ ID NO: 4590373 - DNA, 25 bp, Homo sapien
cttctttgtatcattgaagttttaa

SEQ ID NO: 4590374 - DNA, 25 bp, Homo sapien
aatttgtgcgtcatcctcaggtagg

SEQ ID NO: 4590375 - DNA, 25 bp, Homo sapien
gaaggcactaccatccacatacata

SEQ ID NO: 4590376 - DNA, 25 bp, Homo sapien
aaagatgaaggcactaccatccaca

SEQ ID NO: 4590377 - DNA, 25 bp, Homo sapien
agagacaactaaagatgaaggcact

SEQ ID NO: 4590378 - DNA, 25 bp, Homo sapien
cacatacataactaatgtgtgctgt

SEQ ID NO: 4590379 - DNA, 25 bp, Homo sapien
acatcaacaacggataggctgggat

SEQ ID NO: 4590380 - DNA, 25 bp, Homo sapien
aacatcaacaacggataggctggga

SEQ ID NO: 4590381 - DNA, 25 bp, Homo sapien
ctgcgatgcaccctgcccttgtggc

SEQ ID NO: 4590382 - DNA, 25 bp, Homo sapien
gccaggtccaacttctttcctagct

SEQ ID NO: 4590383 - DNA, 25 bp, Homo sapien
tcacccctacctgccaggtccaact

SEQ ID NO: 4590384 - DNA, 25 bp, Homo sapien
gcttccaggacctgcgatgcaccct

SEQ ID NO: 4590385 - DNA, 25 bp, Homo sapien
tgggcctggggacttcatgactcta

SEQ ID NO: 4590386 - DNA, 25 bp, Homo sapien
ctgggcctggggacttcatgactct

SEQ ID NO: 4590387 - DNA, 25 bp, Homo sapien
gacctccttctactgaattggattt

SEQ ID NO: 4590388 - DNA, 25 bp, Homo sapien
cctccttctactgaattggatttct

SEQ ID NO: 4590389 - DNA, 25 bp, Homo sapien
ttggatttctccataagactggacc

SEQ ID NO: 4590390 - DNA, 25 bp, Homo sapien
ggatttctccataagactggaccat

SEQ ID NO: 4590391 - DNA, 25 bp, Homo sapien
tcctcacggagcagtggaagactgg

SEQ ID NO: 4590392 - DNA, 25 bp, Homo sapien
ttctttggttcagcgggactgtggc

SEQ ID NO: 4590393 - DNA, 25 bp, Homo sapien
gaagctcttggaacactcgcgctgc

SEQ ID NO: 4590394 - DNA, 25 bp, Homo sapien
gaaaacatattctcctggcaggctc

SEQ ID NO: 4590395 - DNA, 25 bp, Homo sapien
gaagcagactgccaacataggagca

SEQ ID NO: 4590396 - DNA, 25 bp, Homo sapien
aaaagcaagtgcgtctgcagctgga

SEQ ID NO: 4590397 - DNA, 25 bp, Homo sapien
cagacagggccatgactagtagaaa

SEQ ID NO: 4590398 - DNA, 25 bp, Homo sapien
gggattaagccagaggcccatgctg

SEQ ID NO: 4590399 - DNA, 25 bp, Homo sapien
cacagggcacaaatggtgtagcttt

SEQ ID NO: 4590400 - DNA, 25 bp, Homo sapien
tatggattccataagacacagggca

SEQ ID NO: 4590401 - DNA, 25 bp, Homo sapien
gtgtagctttaggatgcaggagaca

SEQ ID NO: 4590402 - DNA, 25 bp, Homo sapien
caggagacagtgtggaatgctcggt

SEQ ID NO: 4590403 - DNA, 25 bp, Homo sapien
gaaaccaacagtgcagtcatgcggc

SEQ ID NO: 4590404 - DNA, 25 bp, Homo sapien
cttcggacaagaaacttccttgctg

SEQ ID NO: 4590405 - DNA, 25 bp, Homo sapien
ttccttgctgtcgtagaaaccaaca

SEQ ID NO: 4590406 - DNA, 25 bp, Homo sapien
gactgtgagagtgctagtggcatct

SEQ ID NO: 4590407 - DNA, 25 bp, Homo sapien
tgctcgggccagagatcgaggctcc

SEQ ID NO: 4590408 - DNA, 25 bp, Homo sapien
gtttcgccagtaacgtgctctcggg

SEQ ID NO: 4590409 - DNA, 25 bp, Homo sapien
taagacatcttcaccaagccagtag

SEQ ID NO: 4590410 - DNA, 25 bp, Homo sapien
taaacttggtaatagagccacgtgc

SEQ ID NO: 4590411 - DNA, 25 bp, Homo sapien
tacggagccggaattcgaatttggc

SEQ ID NO: 4590412 - DNA, 25 bp, Homo sapien
caagtagccgctaagttacggagcc

SEQ ID NO: 4590413 - DNA, 25 bp, Homo sapien
gggcgccccagctgctttgcattga

SEQ ID NO: 4590414 - DNA, 25 bp, Homo sapien
caccggcctcttttctgggtaacag

SEQ ID NO: 4590415 - DNA, 25 bp, Homo sapien
ggtgtccacatctaggcggagtctg

SEQ ID NO: 4590416 - DNA, 25 bp, Homo sapien
gcccggcgatgtgagaggcggccgt

SEQ ID NO: 4590417 - DNA, 25 bp, Homo sapien
ctgggtaaggagagcgcaaatctcc

SEQ ID NO: 4590418 - DNA, 25 bp, Homo sapien
ctatttccccggaagcgcggccgag

SEQ ID NO: 4590419 - DNA, 25 bp, Homo sapien
gccgtttgctgaccggatcgcggct

SEQ ID NO: 4590420 - DNA, 25 bp, Homo sapien
ttgctgaccggatcgcggctacccg

SEQ ID NO: 4590421 - DNA, 25 bp, Homo sapien
cgggtgggccgtttgctgaccggat

SEQ ID NO: 4590422 - DNA, 25 bp, Homo sapien
cggctacccgccagcgtgtccgcgg

SEQ ID NO: 4590423 - DNA, 25 bp, Homo sapien
cgcagggccagaagacggccgcctt

SEQ ID NO: 4590424 - DNA, 25 bp, Homo sapien
gccagtaagcaactttcccgcaggg

SEQ ID NO: 4590425 - DNA, 25 bp, Homo sapien
atttccgagcgcctggtggccgagg

SEQ ID NO: 4590426 - DNA, 25 bp, Homo sapien
cgccggcctcttggagtcggagctt

SEQ ID NO: 4590427 - DNA, 25 bp, Homo sapien
tcatgtaaatagaaccttacagtct

SEQ ID NO: 4590428 - DNA, 25 bp, Homo sapien
tatgtactatgaatctctgtcaaga

SEQ ID NO: 4590429 - DNA, 25 bp, Homo sapien
tgtgtaccatttgtgagatatgaca

SEQ ID NO: 4590430 - DNA, 25 bp, Homo sapien
ccccaaaagttctattgtgctccct

SEQ ID NO: 4590431 - DNA, 25 bp, Homo sapien
caccataagtcctggatcagacctg

SEQ ID NO: 4590432 - DNA, 25 bp, Homo sapien
gaacagcggctttagcttaccaatg

SEQ ID NO: 4590433 - DNA, 25 bp, Homo sapien
gagtgacctatgtgccaggcaaaaa

SEQ ID NO: 4590434 - DNA, 25 bp, Homo sapien
atttcccagtagtttgcccatgcat

SEQ ID NO: 4590435 - DNA, 25 bp, Homo sapien
actttcccagtgaggccgggcttgg

SEQ ID NO: 4590436 - DNA, 25 bp, Homo sapien
ggagctaggttcctgatcctgcaga

SEQ ID NO: 4590437 - DNA, 25 bp, Homo sapien
taaaccaagcatggttggcacttgc

SEQ ID NO: 4590438 - DNA, 25 bp, Homo sapien
gaatctcattctacaggatcgcact

SEQ ID NO: 4590439 - DNA, 25 bp, Homo sapien
ccaggatgggccttgtacaccttga

SEQ ID NO: 4590440 - DNA, 25 bp, Homo sapien
tccttgctgctactggatgagccag

SEQ ID NO: 4590441 - DNA, 25 bp, Homo sapien
ccatgtaggtgagggcaagtattcc

SEQ ID NO: 4590442 - DNA, 25 bp, Homo sapien
tacaccttgatgtggcagaacttcc

SEQ ID NO: 4590443 - DNA, 25 bp, Homo sapien
tcacagtttttggggagcatggaaa

SEQ ID NO: 4590444 - DNA, 25 bp, Homo sapien
tttttggggagcatggaaaagcaac

SEQ ID NO: 4590445 - DNA, 25 bp, Homo sapien
cagtttttggggagcatggaaaagc

SEQ ID NO: 4590446 - DNA, 25 bp, Homo sapien
gtttttggggagcatggaaaagcaa

SEQ ID NO: 4590447 - DNA, 25 bp, Homo sapien
cagcaggccttatggaacagtggca

SEQ ID NO: 4590448 - DNA, 25 bp, Homo sapien
gtcctttgtcaggaacctgctggtc

SEQ ID NO: 4590449 - DNA, 25 bp, Homo sapien
tggtctatgggcaacatggcagcag

SEQ ID NO: 4590450 - DNA, 25 bp, Homo sapien
gaatccataattccatctccgggga

SEQ ID NO: 4590451 - DNA, 25 bp, Homo sapien
atcaaatccacaagcattgatggct

SEQ ID NO: 4590452 - DNA, 25 bp, Homo sapien
tcccacactctggagttacagtgtg

SEQ ID NO: 4590453 - DNA, 25 bp, Homo sapien
tgttttgagggtccattgcctgggc

SEQ ID NO: 4590454 - DNA, 25 bp, Homo sapien
tttgacttagattcctgaaatggtt

SEQ ID NO: 4590455 - DNA, 25 bp, Homo sapien
taaatactggaaaggactggacgaa

SEQ ID NO: 4590456 - DNA, 25 bp, Homo sapien
cctcctgaatagtgggagacaccac

SEQ ID NO: 4590457 - DNA, 25 bp, Homo sapien
ggtcctttcagtactaggcagaaca

SEQ ID NO: 4590458 - DNA, 25 bp, Homo sapien
gacgaaatgaagctgcggaacctcc

SEQ ID NO: 4590459 - DNA, 25 bp, Homo sapien
actgtcaagtgagacttggccactg

SEQ ID NO: 4590460 - DNA, 25 bp, Homo sapien
aaggcacatgaggaccacggtttgc

SEQ ID NO: 4590461 - DNA, 25 bp, Homo sapien
cagccaccatccaatgccattactg

SEQ ID NO: 4590462 - DNA, 25 bp, Homo sapien
gcacatgaggaccacggtttgcctc

SEQ ID NO: 4590463 - DNA, 25 bp, Homo sapien
tagactctcttgttggttcgcaaag

SEQ ID NO: 4590464 - DNA, 25 bp, Homo sapien
taatgcacttcacaggtaactcccc

SEQ ID NO: 4590465 - DNA, 25 bp, Homo sapien
aatcgctcacttgggaacactactg

SEQ ID NO: 4590466 - DNA, 25 bp, Homo sapien
catcatagaaggtgcaatcgctcac

SEQ ID NO: 4590467 - DNA, 25 bp, Homo sapien
agagataagaggcacactggagaac

SEQ ID NO: 4590468 - DNA, 25 bp, Homo sapien
cctgggcacgaggtgcccattcaga

SEQ ID NO: 4590469 - DNA, 25 bp, Homo sapien
aactgacagggctctcagagatggg

SEQ ID NO: 4590470 - DNA, 25 bp, Homo sapien
tctgaatgggaattgagagataaga

SEQ ID NO: 4590471 - DNA, 25 bp, Homo sapien
aggctctggaggcacggcaataacc

SEQ ID NO: 4590472 - DNA, 25 bp, Homo sapien
agctataatgacagcttcctgattg

SEQ ID NO: 4590473 - DNA, 25 bp, Homo sapien
cagcttcctgattgtggtagaaaca

SEQ ID NO: 4590474 - DNA, 25 bp, Homo sapien
ggctctggaggcacggcaataacca

SEQ ID NO: 4590475 - DNA, 25 bp, Homo sapien
tggaggctcaatgtggacagtctaa

SEQ ID NO: 4590476 - DNA, 25 bp, Homo sapien
tccagatccgcatgtaaggaacttg

SEQ ID NO: 4590477 - DNA, 25 bp, Homo sapien
catgggaaccagtgccagggtagaa

SEQ ID NO: 4590478 - DNA, 25 bp, Homo sapien
cagagattcatgagtggaaaccacc

SEQ ID NO: 4590479 - DNA, 25 bp, Homo sapien
ggaactggccagaaacacagcacct

SEQ ID NO: 4590480 - DNA, 25 bp, Homo sapien
gaacgtcttctttgcaaaatacaca

SEQ ID NO: 4590481 - DNA, 25 bp, Homo sapien
tcatacccgtgcacactcatgtctg

SEQ ID NO: 4590482 - DNA, 25 bp, Homo sapien
tcatgtctgagaagcgtggcttaat

SEQ ID NO: 4590483 - DNA, 25 bp, Homo sapien
gggaagattcttcagcataataaag

SEQ ID NO: 4590484 - DNA, 25 bp, Homo sapien
gattcactggtgaagtcttctaaag

SEQ ID NO: 4590485 - DNA, 25 bp, Homo sapien
ttcctaacttattcagatgccagca

SEQ ID NO: 4590486 - DNA, 25 bp, Homo sapien
ggaattgaaagtcttaccagacata

SEQ ID NO: 4590487 - DNA, 25 bp, Homo sapien
gcagcgattttcaggcaacaaggaa

SEQ ID NO: 4590488 - DNA, 25 bp, Homo sapien
aacagaatagcagcgattttcaggc

SEQ ID NO: 4590489 - DNA, 25 bp, Homo sapien
tgcagggagcctatagacagatgtg

SEQ ID NO: 4590490 - DNA, 25 bp, Homo sapien
aataaacttatctgttgcgggaagt

SEQ ID NO: 4590491 - DNA, 25 bp, Homo sapien
caagcagctggctatcatttgccaa

SEQ ID NO: 4590492 - DNA, 25 bp, Homo sapien
acaagcagctggctatcatttgcca

SEQ ID NO: 4590493 - DNA, 25 bp, Homo sapien
gcagctggctatcatttgccaaact

SEQ ID NO: 4590494 - DNA, 25 bp, Homo sapien
caaggtctttgactatatgagcaac

SEQ ID NO: 4590495 - DNA, 25 bp, Homo sapien
caccagcaaggtctttgactatatg

SEQ ID NO: 4590496 - DNA, 25 bp, Homo sapien
cagcaaggtctttgactatatgagc

SEQ ID NO: 4590497 - DNA, 25 bp, Homo sapien
tctttgactatatgagcaactctca

SEQ ID NO: 4590498 - DNA, 25 bp, Homo sapien
gctcggctttctgcggatacattga

SEQ ID NO: 4590499 - DNA, 25 bp, Homo sapien
tgctcggctttctgcggatacattg

SEQ ID NO: 4590500 - DNA, 25 bp, Homo sapien
cggctttctgcggatacattgactc

SEQ ID NO: 4590501 - DNA, 25 bp, Homo sapien
tcggctttctgcggatacattgact

SEQ ID NO: 4590502 - DNA, 25 bp, Homo sapien
cactgctaggcagatcagattctct

SEQ ID NO: 4590503 - DNA, 25 bp, Homo sapien
aagccaaagcctcagcggctggagg

SEQ ID NO: 4590504 - DNA, 25 bp, Homo sapien
tctgtatggaaaggtccagtaacac

SEQ ID NO: 4590505 - DNA, 25 bp, Homo sapien
cagattctctatcctgctcattgga

SEQ ID NO: 4590506 - DNA, 25 bp, Homo sapien
gtgaatgtgtaggtgtttgagtctc

SEQ ID NO: 4590507 - DNA, 25 bp, Homo sapien
tcttcttttacacaggatatgggct

SEQ ID NO: 4590508 - DNA, 25 bp, Homo sapien
taaaacgtggccttttgtagacatc

SEQ ID NO: 4590509 - DNA, 25 bp, Homo sapien
gacatcagatgattcgtttttgaaa

SEQ ID NO: 4590510 - DNA, 25 bp, Homo sapien
aaacgtggccttttgtagacatcag

SEQ ID NO: 4590511 - DNA, 25 bp, Homo sapien
ttctcaggagtgtcaggaatgccta

SEQ ID NO: 4590512 - DNA, 25 bp, Homo sapien
cttggcaatatcctcagactcacac

SEQ ID NO: 4590513 - DNA, 25 bp, Homo sapien
gcataaaatgacactctgagagtct

SEQ ID NO: 4590514 - DNA, 25 bp, Homo sapien
aatgacactctgagagtctttcacc

SEQ ID NO: 4590515 - DNA, 25 bp, Homo sapien
tcactgacagatatgatggctgctt

SEQ ID NO: 4590516 - DNA, 25 bp, Homo sapien
tctgaaacttggcatcttccttcag

SEQ ID NO: 4590517 - DNA, 25 bp, Homo sapien
caggttcagtgactggattggccca

SEQ ID NO: 4590518 - DNA, 25 bp, Homo sapien
agtgactggattggcccagccaggt

SEQ ID NO: 4590519 - DNA, 25 bp, Homo sapien
gaaacttggcatcttccttcaggtt

SEQ ID NO: 4590520 - DNA, 25 bp, Homo sapien
gtggactctgatgagccaaatctga

SEQ ID NO: 4590521 - DNA, 25 bp, Homo sapien
ctgtggactctgatgagccaaatct

SEQ ID NO: 4590522 - DNA, 25 bp, Homo sapien
atatggtctgtggactctgatgagc

SEQ ID NO: 4590523 - DNA, 25 bp, Homo sapien
cgatatggtctgtggactctgatga

SEQ ID NO: 4590524 - DNA, 25 bp, Homo sapien
ttcctagtgaccatccagagagcca

SEQ ID NO: 4590525 - DNA, 25 bp, Homo sapien
gacattccgggtcagcaatggactg

SEQ ID NO: 4590526 - DNA, 25 bp, Homo sapien
agtggtgggtcacacaggcgttcca

SEQ ID NO: 4590527 - DNA, 25 bp, Homo sapien
cggtgactgagttctcctgctggga

SEQ ID NO: 4590528 - DNA, 25 bp, Homo sapien
cgtgtgaaaagccatactccaaggg

SEQ ID NO: 4590529 - DNA, 25 bp, Homo sapien
tgtatccaggcatcaactccaactc

SEQ ID NO: 4590530 - DNA, 25 bp, Homo sapien
ccagtcgaagcggtatagaagcccg

SEQ ID NO: 4590531 - DNA, 25 bp, Homo sapien
gataggtcttaagtcccctcccaga

SEQ ID NO: 4590532 - DNA, 25 bp, Homo sapien
tgtccctagcccggcctgggtggca

SEQ ID NO: 4590533 - DNA, 25 bp, Homo sapien
atgtccctagcccggcctgggtggc

SEQ ID NO: 4590534 - DNA, 25 bp, Homo sapien
ctgccatgtccctagcccggcctgg

SEQ ID NO: 4590535 - DNA, 25 bp, Homo sapien
cctgccatgtccctagcccggcctg

SEQ ID NO: 4590536 - DNA, 25 bp, Homo sapien
aatgcagccaaagaggccgctggac

SEQ ID NO: 4590537 - DNA, 25 bp, Homo sapien
gaatgcagccaaagaggccgctgga

SEQ ID NO: 4590538 - DNA, 25 bp, Homo sapien
cgccttctgtccagcacttgcatga

SEQ ID NO: 4590539 - DNA, 25 bp, Homo sapien
ttctgtccagcacttgcatgacact

SEQ ID NO: 4590540 - DNA, 25 bp, Homo sapien
tgtccagcacttgcatgacacttcc

SEQ ID NO: 4590541 - DNA, 25 bp, Homo sapien
ccccagggatcactgagtcctggag

SEQ ID NO: 4590542 - DNA, 25 bp, Homo sapien
ccgggggcgcctacttcaggtctga

SEQ ID NO: 4590543 - DNA, 25 bp, Homo sapien
cagtcccgggggcgcctacttcagg

SEQ ID NO: 4590544 - DNA, 25 bp, Homo sapien
agagtctgaactccgagatgctctg

SEQ ID NO: 4590545 - DNA, 25 bp, Homo sapien
tctgaactccgagatgctctgggtg

SEQ ID NO: 4590546 - DNA, 25 bp, Homo sapien
cgtgagcgagcacacgagtgtaaag

SEQ ID NO: 4590547 - DNA, 25 bp, Homo sapien
agcacacgagtgtaaagaatggcac

SEQ ID NO: 4590548 - DNA, 25 bp, Homo sapien
cgagcacacgagtgtaaagaatggc

SEQ ID NO: 4590549 - DNA, 25 bp, Homo sapien
gagcgagcacacgagtgtaaagaat

SEQ ID NO: 4590550 - DNA, 25 bp, Homo sapien
tttggctgggccttgttgacccgtg

SEQ ID NO: 4590551 - DNA, 25 bp, Homo sapien
ctaaggaaaatggttctactgcatc

SEQ ID NO: 4590552 - DNA, 25 bp, Homo sapien
tgggccttgttgacccgtgaccctc

SEQ ID NO: 4590553 - DNA, 25 bp, Homo sapien
tggctgggccttgttgacccgtgac

SEQ ID NO: 4590554 - DNA, 25 bp, Homo sapien
tcccttctagagctgcagacttgct

SEQ ID NO: 4590555 - DNA, 25 bp, Homo sapien
tgctgcatgaatggtctgcctgccc

SEQ ID NO: 4590556 - DNA, 25 bp, Homo sapien
caatctggcgtgtgcgtgtgtccgc

SEQ ID NO: 4590557 - DNA, 25 bp, Homo sapien
gatgtggaaccatcagagagggcac

SEQ ID NO: 4590558 - DNA, 25 bp, Homo sapien
tccactgcagattaggggtgatagt

SEQ ID NO: 4590559 - DNA, 25 bp, Homo sapien
caaatccactgcagattaggggtga

SEQ ID NO: 4590560 - DNA, 25 bp, Homo sapien
gccaaatccactgcagattaggggt

SEQ ID NO: 4590561 - DNA, 25 bp, Homo sapien
cactgcagattaggggtgatagtca

SEQ ID NO: 4590562 - DNA, 25 bp, Homo sapien
cagggtcccttcagtggaccctggg

SEQ ID NO: 4590563 - DNA, 25 bp, Homo sapien
caggcactacctatgaagctctagc

SEQ ID NO: 4590564 - DNA, 25 bp, Homo sapien
cggttatcccacaacacacttcata

SEQ ID NO: 4590565 - DNA, 25 bp, Homo sapien
gcagtggcatctagctacctgccct

SEQ ID NO: 4590566 - DNA, 25 bp, Homo sapien
gcagcctccacgctatcagtgaggc

SEQ ID NO: 4590567 - DNA, 25 bp, Homo sapien
gggagtcctgcattacaggaagcag

SEQ ID NO: 4590568 - DNA, 25 bp, Homo sapien
tctccctgttctcgggagcccaaaa

SEQ ID NO: 4590569 - DNA, 25 bp, Homo sapien
ttctcgggagcccaaaaagaatggc

SEQ ID NO: 4590570 - DNA, 25 bp, Homo sapien
caccccacctgagggctctactcac

SEQ ID NO: 4590571 - DNA, 25 bp, Homo sapien
ggaatctgagcacagtgcgagcctc

SEQ ID NO: 4590572 - DNA, 25 bp, Homo sapien
tgggaatctgagcacagtgcgagcc

SEQ ID NO: 4590573 - DNA, 25 bp, Homo sapien
cccaccccacctgagggctctactc

SEQ ID NO: 4590574 - DNA, 25 bp, Homo sapien
accctgctcgtcagcacacccaagc

SEQ ID NO: 4590575 - DNA, 25 bp, Homo sapien
caccctgctcgtcagcacacccaag

SEQ ID NO: 4590576 - DNA, 25 bp, Homo sapien
ccctgctcgtcagcacacccaagct

SEQ ID NO: 4590577 - DNA, 25 bp, Homo sapien
cctccttgtggtcgcccacaagctg

SEQ ID NO: 4590578 - DNA, 25 bp, Homo sapien
atgcccctccttgtggtcgcccaca

SEQ ID NO: 4590579 - DNA, 25 bp, Homo sapien
tttgccatgcccctccttgtggtcg

SEQ ID NO: 4590580 - DNA, 25 bp, Homo sapien
cttgtggtcgcccacaagctgcaac

SEQ ID NO: 4590581 - DNA, 25 bp, Homo sapien
tgccccgcagctcctgcaggttcac

SEQ ID NO: 4590582 - DNA, 25 bp, Homo sapien
ctgccccgcagctcctgcaggttca

SEQ ID NO: 4590583 - DNA, 25 bp, Homo sapien
agcctgacgatgtcctcctctccca

SEQ ID NO: 4590584 - DNA, 25 bp, Homo sapien
gcaggaggacatggctcagatgctg

SEQ ID NO: 4590585 - DNA, 25 bp, Homo sapien
aggaggacatggctcagatgctggg

SEQ ID NO: 4590586 - DNA, 25 bp, Homo sapien
ctgcaggaggacatggctcagatgc

SEQ ID NO: 4590587 - DNA, 25 bp, Homo sapien
tgctggggcccctcggatggcctgg

SEQ ID NO: 4590588 - DNA, 25 bp, Homo sapien
gaagctctagtttctctacccgctc

SEQ ID NO: 4590589 - DNA, 25 bp, Homo sapien
gatgaattgaagctctagtttctct

SEQ ID NO: 4590590 - DNA, 25 bp, Homo sapien
gtctgtcctgagaggtggatgaatt

SEQ ID NO: 4590591 - DNA, 25 bp, Homo sapien
cctgagaggtggatgaattgaagct

SEQ ID NO: 4590592 - DNA, 25 bp, Homo sapien
tgggtctccccaaacacagactcac

SEQ ID NO: 4590593 - DNA, 25 bp, Homo sapien
tgcagggcccggtgggtctccccaa

SEQ ID NO: 4590594 - DNA, 25 bp, Homo sapien
ctgcagggcccggtgggtctcccca

SEQ ID NO: 4590595 - DNA, 25 bp, Homo sapien
cggtgggtctccccaaacacagact

SEQ ID NO: 4590596 - DNA, 25 bp, Homo sapien
tctggggctggggccgctacctctg

SEQ ID NO: 4590597 - DNA, 25 bp, Homo sapien
gggctggggccgctacctctggctt

SEQ ID NO: 4590598 - DNA, 25 bp, Homo sapien
ctggggccgctacctctggcttctt

SEQ ID NO: 4590599 - DNA, 25 bp, Homo sapien
cactctctggggctggggccgctac

SEQ ID NO: 4590600 - DNA, 25 bp, Homo sapien
tgggacgaggccactgggtgagcca

SEQ ID NO: 4590601 - DNA, 25 bp, Homo sapien
gacgaggccactgggtgagccaggg

SEQ ID NO: 4590602 - DNA, 25 bp, Homo sapien
ggtgagccaggggctggcagcacac

SEQ ID NO: 4590603 - DNA, 25 bp, Homo sapien
ctgggacgaggccactgggtgagcc

SEQ ID NO: 4590604 - DNA, 25 bp, Homo sapien
cctttgttcctcctgggcactggct

SEQ ID NO: 4590605 - DNA, 25 bp, Homo sapien
ctggctccagcggagttgaaaaatg

SEQ ID NO: 4590606 - DNA, 25 bp, Homo sapien
cactggctccagcggagttgaaaaa

SEQ ID NO: 4590607 - DNA, 25 bp, Homo sapien
ggcactggctccagcggagttgaaa

SEQ ID NO: 4590608 - DNA, 25 bp, Homo sapien
catggcctcccggctctccaggtcc

SEQ ID NO: 4590609 - DNA, 25 bp, Homo sapien
atggcctcccggctctccaggtccc

SEQ ID NO: 4590610 - DNA, 25 bp, Homo sapien
ctgctcactgtccagatgtcctcct

SEQ ID NO: 4590611 - DNA, 25 bp, Homo sapien
actgtccagatgtcctcctccatct

SEQ ID NO: 4590612 - DNA, 25 bp, Homo sapien
gggccgaggcgcctcctgctcactg

SEQ ID NO: 4590613 - DNA, 25 bp, Homo sapien
gctcactgtccagatgtcctcctcc

SEQ ID NO: 4590614 - DNA, 25 bp, Homo sapien
gtgcggacaccttgtcggcataatg

SEQ ID NO: 4590615 - DNA, 25 bp, Homo sapien
gacaccttgtcggcataatgaccga

SEQ ID NO: 4590616 - DNA, 25 bp, Homo sapien
caccttgtcggcataatgaccgaca

SEQ ID NO: 4590617 - DNA, 25 bp, Homo sapien
gcggacaccttgtcggcataatgac

SEQ ID NO: 4590618 - DNA, 25 bp, Homo sapien
atagatgtgtttaaaccaactaact

SEQ ID NO: 4590619 - DNA, 25 bp, Homo sapien
cagcctcagccttaactcttaaaat

SEQ ID NO: 4590620 - DNA, 25 bp, Homo sapien
atgtatatctatatcgagagagaga

SEQ ID NO: 4590621 - DNA, 25 bp, Homo sapien
aaatatcttcaaaccaatattcttc

SEQ ID NO: 4590622 - DNA, 25 bp, Homo sapien
ccattgaggccagttttgctacctc

SEQ ID NO: 4590623 - DNA, 25 bp, Homo sapien
tccattgaggccagttttgctacct

SEQ ID NO: 4590624 - DNA, 25 bp, Homo sapien
cattgaggccagttttgctacctct

SEQ ID NO: 4590625 - DNA, 25 bp, Homo sapien
attgaggccagttttgctacctctc

SEQ ID NO: 4590626 - DNA, 25 bp, Homo sapien
ttatgttatccaccttccaacaggg

SEQ ID NO: 4590627 - DNA, 25 bp, Homo sapien
ggaccatcccacgaacgagcttctt

SEQ ID NO: 4590628 - DNA, 25 bp, Homo sapien
tcccgagagccaaaacctataaaga

SEQ ID NO: 4590629 - DNA, 25 bp, Homo sapien
tgctggcctagatttagaagatcct

SEQ ID NO: 4590630 - DNA, 25 bp, Homo sapien
ggcacggcggtctcggccgagccga

SEQ ID NO: 4590631 - DNA, 25 bp, Homo sapien
gggcacggcggtctcggccgagccg

SEQ ID NO: 4590632 - DNA, 25 bp, Homo sapien
gcacggcggtctcggccgagccgag

SEQ ID NO: 4590633 - DNA, 25 bp, Homo sapien
tgggcacggcggtctcggccgagcc

SEQ ID NO: 4590634 - DNA, 25 bp, Homo sapien
gcgcaccggctacaagccgcccggg

SEQ ID NO: 4590635 - DNA, 25 bp, Homo sapien
agccaccccgcgcaccggctacaag

SEQ ID NO: 4590636 - DNA, 25 bp, Homo sapien
tgcacgtagccccagccaccccgcg

SEQ ID NO: 4590637 - DNA, 25 bp, Homo sapien
cccgcgcaccggctacaagccgccc

SEQ ID NO: 4590638 - DNA, 25 bp, Homo sapien
ccttttctgaacttgccgcttttgc

SEQ ID NO: 4590639 - DNA, 25 bp, Homo sapien
aatatttatggcttaaaatggacta

SEQ ID NO: 4590640 - DNA, 25 bp, Homo sapien
tatggcttaaaatggactaaaggtc

SEQ ID NO: 4590641 - DNA, 25 bp, Homo sapien
tggactaaaggtcctgttcttgcct

SEQ ID NO: 4590642 - DNA, 25 bp, Homo sapien
tcagatagcgtttagcaactgtaac

SEQ ID NO: 4590643 - DNA, 25 bp, Homo sapien
gactaggaatgaccttcagatagcg

SEQ ID NO: 4590644 - DNA, 25 bp, Homo sapien
tctgacaataatgtgttcatcaggt

SEQ ID NO: 4590645 - DNA, 25 bp, Homo sapien
taccctgacacgtataaatgactag

SEQ ID NO: 4590646 - DNA, 25 bp, Homo sapien
taaagagaatggaaatcctatgaca

SEQ ID NO: 4590647 - DNA, 25 bp, Homo sapien
gagaatggaaatcctatgacaataa

SEQ ID NO: 4590648 - DNA, 25 bp, Homo sapien
aaagctaaagagaatggaaatccta

SEQ ID NO: 4590649 - DNA, 25 bp, Homo sapien
ttgcagtacctcattcagccaagta

SEQ ID NO: 4590650 - DNA, 25 bp, Homo sapien
ctgggctgtggggaatcttccaggc

SEQ ID NO: 4590651 - DNA, 25 bp, Homo sapien
tgtggggaatcttccaggcctgtta

SEQ ID NO: 4590652 - DNA, 25 bp, Homo sapien
gctgtggggaatcttccaggcctgt

SEQ ID NO: 4590653 - DNA, 25 bp, Homo sapien
gggctgtggggaatcttccaggcct

SEQ ID NO: 4590654 - DNA, 25 bp, Homo sapien
cctatggagtatagtccggccctga

SEQ ID NO: 4590655 - DNA, 25 bp, Homo sapien
ctgccatggcgcctatggagtatag

SEQ ID NO: 4590656 - DNA, 25 bp, Homo sapien
gcgcctatggagtatagtccggccc

SEQ ID NO: 4590657 - DNA, 25 bp, Homo sapien
ccatggcgcctatggagtatagtcc

SEQ ID NO: 4590658 - DNA, 25 bp, Homo sapien
aggtgtcttccattccatccccctg

SEQ ID NO: 4590659 - DNA, 25 bp, Homo sapien
cccaggtgtcttccattccatcccc

SEQ ID NO: 4590660 - DNA, 25 bp, Homo sapien
tgtcttccattccatccccctgcct

SEQ ID NO: 4590661 - DNA, 25 bp, Homo sapien
ccctgcctccctctcctgtctgcac

SEQ ID NO: 4590662 - DNA, 25 bp, Homo sapien
tgccggctgccccacaggctccttc

SEQ ID NO: 4590663 - DNA, 25 bp, Homo sapien
acaggctccttccaggctgagttca

SEQ ID NO: 4590664 - DNA, 25 bp, Homo sapien
caccctaaaaatggcttggcctctt

SEQ ID NO: 4590665 - DNA, 25 bp, Homo sapien
gccagagccggcttcataggataag

SEQ ID NO: 4590666 - DNA, 25 bp, Homo sapien
caagtgcagagtatggatgcgctgc

SEQ ID NO: 4590667 - DNA, 25 bp, Homo sapien
gaggggagggcgtaggtgtgggcat

SEQ ID NO: 4590668 - DNA, 25 bp, Homo sapien
gatggacttgcctgacccgatcagc

SEQ ID NO: 4590669 - DNA, 25 bp, Homo sapien
aaagccagagctggttgaggcaagt

SEQ ID NO: 4590670 - DNA, 25 bp, Homo sapien
ccctctgggtggtccgaaatcccag

SEQ ID NO: 4590671 - DNA, 25 bp, Homo sapien
gatggatgactggagtgagtgccag

SEQ ID NO: 4590672 - DNA, 25 bp, Homo sapien
tggatgactggagtgagtgccagag

SEQ ID NO: 4590673 - DNA, 25 bp, Homo sapien
ctctgggtggtccgaaatcccaggg

SEQ ID NO: 4590674 - DNA, 25 bp, Homo sapien
gtcaggagcaagtcgacaggccctg

SEQ ID NO: 4590675 - DNA, 25 bp, Homo sapien
tgtgggtcaggagcaagtcgacagg

SEQ ID NO: 4590676 - DNA, 25 bp, Homo sapien
gggactggttcagtgtgtgggtcag

SEQ ID NO: 4590677 - DNA, 25 bp, Homo sapien
ggatgatgttcttagggactggttc

SEQ ID NO: 4590678 - DNA, 25 bp, Homo sapien
cccagccctgagcggccgcggctgc

SEQ ID NO: 4590679 - DNA, 25 bp, Homo sapien
acccagccctgagcggccgcggctg

SEQ ID NO: 4590680 - DNA, 25 bp, Homo sapien
agggctacatttgcctttcgtccag

SEQ ID NO: 4590681 - DNA, 25 bp, Homo sapien
tcataataaatgttacacaaactgt

SEQ ID NO: 4590682 - DNA, 25 bp, Homo sapien
ggtcggtctgtgcatcctggcactg

SEQ ID NO: 4590683 - DNA, 25 bp, Homo sapien
cattagggcgtaggggtcgggagct

SEQ ID NO: 4590684 - DNA, 25 bp, Homo sapien
tgttacacaaactgttagaataaaa

SEQ ID NO: 4590685 - DNA, 25 bp, Homo sapien
tgggcggagagcacgagcggcagca

SEQ ID NO: 4590686 - DNA, 25 bp, Homo sapien
gggctgtacacagcctcgggttctg

SEQ ID NO: 4590687 - DNA, 25 bp, Homo sapien
agatcctggcacagaactgcggtcc

SEQ ID NO: 4590688 - DNA, 25 bp, Homo sapien
gttctgagtcacaggtcgcatctcc

SEQ ID NO: 4590689 - DNA, 25 bp, Homo sapien
ggtgttccccgacagatcctggcac

SEQ ID NO: 4590690 - DNA, 25 bp, Homo sapien
ggcatggcagcgaggcatggcaggg

SEQ ID NO: 4590691 - DNA, 25 bp, Homo sapien
atcccctgggatcataaccacccca

SEQ ID NO: 4590692 - DNA, 25 bp, Homo sapien
gggtagcaaggcatggcagcgaggc

SEQ ID NO: 4590693 - DNA, 25 bp, Homo sapien
catgaaggcgagagatgtgatgcca

SEQ ID NO: 4590694 - DNA, 25 bp, Homo sapien
ctccagcatgggatcctgtggcatc

SEQ ID NO: 4590695 - DNA, 25 bp, Homo sapien
ggacttctcttgactgactcccagc

SEQ ID NO: 4590696 - DNA, 25 bp, Homo sapien
ctgcgggatgttgtgtagctgggac

SEQ ID NO: 4590697 - DNA, 25 bp, Homo sapien
cagaaagctgcctgcgggatgttgt

SEQ ID NO: 4590698 - DNA, 25 bp, Homo sapien
atcctcggtgccacacagccgggag

SEQ ID NO: 4590699 - DNA, 25 bp, Homo sapien
aatcctcggtgccacacagccggga

SEQ ID NO: 4590700 - DNA, 25 bp, Homo sapien
cactgtcttcctcgggtagccccgt

SEQ ID NO: 4590701 - DNA, 25 bp, Homo sapien
tcactgtcttcctcgggtagccccg

SEQ ID NO: 4590702 - DNA, 25 bp, Homo sapien
ccagtgtgtgaccactggatgccac

SEQ ID NO: 4590703 - DNA, 25 bp, Homo sapien
acttggtgctggaaccccactctca

SEQ ID NO: 4590704 - DNA, 25 bp, Homo sapien
ggcagtgagcccctcacacgggaca

SEQ ID NO: 4590705 - DNA, 25 bp, Homo sapien
cagtgagcccctcacacgggacatg

SEQ ID NO: 4590706 - DNA, 25 bp, Homo sapien
tgggacagcccttggggcggcaggg

SEQ ID NO: 4590707 - DNA, 25 bp, Homo sapien
catgggacagcccttggggcggcag

SEQ ID NO: 4590708 - DNA, 25 bp, Homo sapien
cctgctcccccccgcagcctggctc

SEQ ID NO: 4590709 - DNA, 25 bp, Homo sapien
tgctcccccccgcagcctggctcac

SEQ ID NO: 4590710 - DNA, 25 bp, Homo sapien
tccctgctcccccccgcagcctggc

SEQ ID NO: 4590711 - DNA, 25 bp, Homo sapien
ttgctccctgctcccccccgcagcc

SEQ ID NO: 4590712 - DNA, 25 bp, Homo sapien
tgcctcctcgcagaggtctggctct

SEQ ID NO: 4590713 - DNA, 25 bp, Homo sapien
gcagggaaggagtcagggcacagcc

SEQ ID NO: 4590714 - DNA, 25 bp, Homo sapien
gggcagggaaggagtcagggcacag

SEQ ID NO: 4590715 - DNA, 25 bp, Homo sapien
ggtgggcagggaaggagtcagggca

SEQ ID NO: 4590716 - DNA, 25 bp, Homo sapien
gggaaggagtcagggcacagccagg

SEQ ID NO: 4590717 - DNA, 25 bp, Homo sapien
catgtgtccacatgctgcatgtccc

SEQ ID NO: 4590718 - DNA, 25 bp, Homo sapien
atgtgtccacatgctgcatgtccca

SEQ ID NO: 4590719 - DNA, 25 bp, Homo sapien
ccatgtgtccacatgctgcatgtcc

SEQ ID NO: 4590720 - DNA, 25 bp, Homo sapien
tgtggcaggaaaggcatcagaccca

SEQ ID NO: 4590721 - DNA, 25 bp, Homo sapien
ttgtgtggacacatccccacgtgca

SEQ ID NO: 4590722 - DNA, 25 bp, Homo sapien
ccacaggcgtgaccccgtgaggcgt

SEQ ID NO: 4590723 - DNA, 25 bp, Homo sapien
gggaccgagagacttgtgtggacac

SEQ ID NO: 4590724 - DNA, 25 bp, Homo sapien
ctgaagagccccagcgagaggccaa

SEQ ID NO: 4590725 - DNA, 25 bp, Homo sapien
ggcaggccccaggcaaaaggtggca

SEQ ID NO: 4590726 - DNA, 25 bp, Homo sapien
gcaaaaggtggcatggccaggggct

SEQ ID NO: 4590727 - DNA, 25 bp, Homo sapien
agagccccagcgagaggccaaggct

SEQ ID NO: 4590728 - DNA, 25 bp, Homo sapien
tccagttgcctgagtgccaggtggc

SEQ ID NO: 4590729 - DNA, 25 bp, Homo sapien
ccagttgcctgagtgccaggtggca

SEQ ID NO: 4590730 - DNA, 25 bp, Homo sapien
cagttgcctgagtgccaggtggcac

SEQ ID NO: 4590731 - DNA, 25 bp, Homo sapien
agttgcctgagtgccaggtggcaca

SEQ ID NO: 4590732 - DNA, 25 bp, Homo sapien
tgaccagcctcgtcgcttcccagag

SEQ ID NO: 4590733 - DNA, 25 bp, Homo sapien
agcctcgtcgcttcccagaggcacc

SEQ ID NO: 4590734 - DNA, 25 bp, Homo sapien
cagcctcgtcgcttcccagaggcac

SEQ ID NO: 4590735 - DNA, 25 bp, Homo sapien
ccagcctcgtcgcttcccagaggca

SEQ ID NO: 4590736 - DNA, 25 bp, Homo sapien
cagctcagacgtctgcaggtcactg

SEQ ID NO: 4590737 - DNA, 25 bp, Homo sapien
tcatgcagctcagacgtctgcaggt

SEQ ID NO: 4590738 - DNA, 25 bp, Homo sapien
ggagggggcactagccagcttcttt

SEQ ID NO: 4590739 - DNA, 25 bp, Homo sapien
cactagccagcttctttcatgcagc

SEQ ID NO: 4590740 - DNA, 25 bp, Homo sapien
tccagtttcccacttgtcagccggc

SEQ ID NO: 4590741 - DNA, 25 bp, Homo sapien
gtcagccggcgttcctgacaaccaa

SEQ ID NO: 4590742 - DNA, 25 bp, Homo sapien
gggctgtcccaagctggcatggaca

SEQ ID NO: 4590743 - DNA, 25 bp, Homo sapien
caagctggcatggacagcagcctag

SEQ ID NO: 4590744 - DNA, 25 bp, Homo sapien
ctcagggctgagggactcaggctga

SEQ ID NO: 4590745 - DNA, 25 bp, Homo sapien
tcagggctgagggactcaggctgac

SEQ ID NO: 4590746 - DNA, 25 bp, Homo sapien
gctcaggcgtgtgcccgaggtcagt

SEQ ID NO: 4590747 - DNA, 25 bp, Homo sapien
tgcccgaggtcagtcagggttgtgg

SEQ ID NO: 4590748 - DNA, 25 bp, Homo sapien
cgtgtgcccgaggtcagtcagggtt

SEQ ID NO: 4590749 - DNA, 25 bp, Homo sapien
aggcgtgtgcccgaggtcagtcagg

SEQ ID NO: 4590750 - DNA, 25 bp, Homo sapien
tgcaggggactgtcgttgcccttca

SEQ ID NO: 4590751 - DNA, 25 bp, Homo sapien
ccggctgcaggggactgtcgttgcc

SEQ ID NO: 4590752 - DNA, 25 bp, Homo sapien
ctgtcgttgcccttcatctctggca

SEQ ID NO: 4590753 - DNA, 25 bp, Homo sapien
tccccggctgcaggggactgtcgtt

SEQ ID NO: 4590754 - DNA, 25 bp, Homo sapien
tgaccgggtacaaagtgggcagcgt

SEQ ID NO: 4590755 - DNA, 25 bp, Homo sapien
ctgctgaccgggtacaaagtgggca

SEQ ID NO: 4590756 - DNA, 25 bp, Homo sapien
ggtgctgctgaccgggtacaaagtg

SEQ ID NO: 4590757 - DNA, 25 bp, Homo sapien
ccgggtacaaagtgggcagcgtggg

SEQ ID NO: 4590758 - DNA, 25 bp, Homo sapien
tttggctctcaggggcggcaggcat

SEQ ID NO: 4590759 - DNA, 25 bp, Homo sapien
atgatcaaagggttcccaggggtct

SEQ ID NO: 4590760 - DNA, 25 bp, Homo sapien
ggtgtctccctcaggcaggaaatga

SEQ ID NO: 4590761 - DNA, 25 bp, Homo sapien
gtgtctccctcaggcaggaaatgat

SEQ ID NO: 4590762 - DNA, 25 bp, Homo sapien
tctccctcaggcaggaaatgatcaa

SEQ ID NO: 4590763 - DNA, 25 bp, Homo sapien
ttggctgcaggaggctctgtggcag

SEQ ID NO: 4590764 - DNA, 25 bp, Homo sapien
cccgttgccccttcctccttggctg

SEQ ID NO: 4590765 - DNA, 25 bp, Homo sapien
ccttggctgcaggaggctctgtggc

SEQ ID NO: 4590766 - DNA, 25 bp, Homo sapien
ctccttggctgcaggaggctctgtg

SEQ ID NO: 4590767 - DNA, 25 bp, Homo sapien
ccaggtctagatcgggctcctcaga

SEQ ID NO: 4590768 - DNA, 25 bp, Homo sapien
atcgggctcctcagagggcccgtag

SEQ ID NO: 4590769 - DNA, 25 bp, Homo sapien
ctgtccccgccaggtctagatcggg

SEQ ID NO: 4590770 - DNA, 25 bp, Homo sapien
gggctcctcagagggcccgtaggac

SEQ ID NO: 4590771 - DNA, 25 bp, Homo sapien
gacatttcggtgctgagtcccttcc

SEQ ID NO: 4590772 - DNA, 25 bp, Homo sapien
ggacatttcggtgctgagtcccttc

SEQ ID NO: 4590773 - DNA, 25 bp, Homo sapien
catttcggtgctgagtcccttcctc

SEQ ID NO: 4590774 - DNA, 25 bp, Homo sapien
gaggacatttcggtgctgagtccct

SEQ ID NO: 4590775 - DNA, 25 bp, Homo sapien
gggaagccagggtgaggggcttagc

SEQ ID NO: 4590776 - DNA, 25 bp, Homo sapien
caggggaagccagggtgaggggctt

SEQ ID NO: 4590777 - DNA, 25 bp, Homo sapien
tgcaggggaagccagggtgaggggc

SEQ ID NO: 4590778 - DNA, 25 bp, Homo sapien
ctgcaggggaagccagggtgagggg

SEQ ID NO: 4590779 - DNA, 25 bp, Homo sapien
agccccacgctgcggatgcagagca

SEQ ID NO: 4590780 - DNA, 25 bp, Homo sapien
cagccccacgctgcggatgcagagc

SEQ ID NO: 4590781 - DNA, 25 bp, Homo sapien
aggcctatttccacatccagggacc

SEQ ID NO: 4590782 - DNA, 25 bp, Homo sapien
gaggcctatttccacatccagggac

SEQ ID NO: 4590783 - DNA, 25 bp, Homo sapien
tgaggcctatttccacatccaggga

SEQ ID NO: 4590784 - DNA, 25 bp, Homo sapien
ctgaggcctatttccacatccaggg

SEQ ID NO: 4590785 - DNA, 25 bp, Homo sapien
aggctggcccaggctggggtgaggg

SEQ ID NO: 4590786 - DNA, 25 bp, Homo sapien
ggtgtccaggctggcccaggctggg

SEQ ID NO: 4590787 - DNA, 25 bp, Homo sapien
ccaggctggcccaggctggggtgag

SEQ ID NO: 4590788 - DNA, 25 bp, Homo sapien
ggcccaggctggggtgaggggtgac

SEQ ID NO: 4590789 - DNA, 25 bp, Homo sapien
cagggcctccggggacccagatgta

SEQ ID NO: 4590790 - DNA, 25 bp, Homo sapien
gggaagagaatgaaagcccggctcc

SEQ ID NO: 4590791 - DNA, 25 bp, Homo sapien
gccttgggaagagaatgaaagcccg

SEQ ID NO: 4590792 - DNA, 25 bp, Homo sapien
aagagaatgaaagcccggctccctc

SEQ ID NO: 4590793 - DNA, 25 bp, Homo sapien
gctgctggctgcacttccgctggca

SEQ ID NO: 4590794 - DNA, 25 bp, Homo sapien
gctgcacttccgctggcagtcatcg

SEQ ID NO: 4590795 - DNA, 25 bp, Homo sapien
gctggctgcacttccgctggcagtc

SEQ ID NO: 4590796 - DNA, 25 bp, Homo sapien
tgcacttccgctggcagtcatcggg

SEQ ID NO: 4590797 - DNA, 25 bp, Homo sapien
cccctctcctatgtagcttcccctc

SEQ ID NO: 4590798 - DNA, 25 bp, Homo sapien
ccgagagtaagttgtccctcccctg

SEQ ID NO: 4590799 - DNA, 25 bp, Homo sapien
tggtcccgagagtaagttgtccctc

SEQ ID NO: 4590800 - DNA, 25 bp, Homo sapien
agtaagttgtccctcccctgagctg

SEQ ID NO: 4590801 - DNA, 25 bp, Homo sapien
ctgccccgtggtcccgagagtaagt

SEQ ID NO: 4590802 - DNA, 25 bp, Homo sapien
tgtactcgtagtgcaccccagggtt

SEQ ID NO: 4590803 - DNA, 25 bp, Homo sapien
atggtgtactcgtagtgcaccccag

SEQ ID NO: 4590804 - DNA, 25 bp, Homo sapien
ggtgtactcgtagtgcaccccaggg

SEQ ID NO: 4590805 - DNA, 25 bp, Homo sapien
gtgtactcgtagtgcaccccagggt

SEQ ID NO: 4590806 - DNA, 25 bp, Homo sapien
cagtcttaaaggagctgaccccagc

SEQ ID NO: 4590807 - DNA, 25 bp, Homo sapien
cacccagtcttaaaggagctgaccc

SEQ ID NO: 4590808 - DNA, 25 bp, Homo sapien
ccatccacccagtcttaaaggagct

SEQ ID NO: 4590809 - DNA, 25 bp, Homo sapien
tccacccagtcttaaaggagctgac

SEQ ID NO: 4590810 - DNA, 25 bp, Homo sapien
tgggcctggggactccgcctctgct

SEQ ID NO: 4590811 - DNA, 25 bp, Homo sapien
cacgcctgggcctcgggaggcaggc

SEQ ID NO: 4590812 - DNA, 25 bp, Homo sapien
tgctccccacgcctgggcctcggga

SEQ ID NO: 4590813 - DNA, 25 bp, Homo sapien
ctgggcctggggactccgcctctgc

SEQ ID NO: 4590814 - DNA, 25 bp, Homo sapien
agacaggctccttggtgggacccgg

SEQ ID NO: 4590815 - DNA, 25 bp, Homo sapien
ggacgtgaggttctcccagttgccc

SEQ ID NO: 4590816 - DNA, 25 bp, Homo sapien
cggggacgtgaggttctcccagttg

SEQ ID NO: 4590817 - DNA, 25 bp, Homo sapien
ctggatccagacaggctccttggtg

SEQ ID NO: 4590818 - DNA, 25 bp, Homo sapien
ctgcgtgcgtatgtgacggtggtcc

SEQ ID NO: 4590819 - DNA, 25 bp, Homo sapien
ggtccagccaccattgaggaagtac

SEQ ID NO: 4590820 - DNA, 25 bp, Homo sapien
tggtccagccaccattgaggaagta

SEQ ID NO: 4590821 - DNA, 25 bp, Homo sapien
gatggtccagccaccattgaggaag

SEQ ID NO: 4590822 - DNA, 25 bp, Homo sapien
tggatggtccagccaccattgagga

SEQ ID NO: 4590823 - DNA, 25 bp, Homo sapien
tgcagtgccaggaagttggcagcct

SEQ ID NO: 4590824 - DNA, 25 bp, Homo sapien
tgccaggaagttggcagcctcagcc

SEQ ID NO: 4590825 - DNA, 25 bp, Homo sapien
agtgccaggaagttggcagcctcag

SEQ ID NO: 4590826 - DNA, 25 bp, Homo sapien
ccaggaagttggcagcctcagccac

SEQ ID NO: 4590827 - DNA, 25 bp, Homo sapien
tcacgtgtgctggctgggatcagcc

SEQ ID NO: 4590828 - DNA, 25 bp, Homo sapien
ctcacgtgtgctggctgggatcagc

SEQ ID NO: 4590829 - DNA, 25 bp, Homo sapien
gggatcagccccacgtccacatacc

SEQ ID NO: 4590830 - DNA, 25 bp, Homo sapien
gctgggatcagccccacgtccacat

SEQ ID NO: 4590831 - DNA, 25 bp, Homo sapien
ttagctttaaagtctgagctcccca

SEQ ID NO: 4590832 - DNA, 25 bp, Homo sapien
agaagcttgcttatccccacctgct

SEQ ID NO: 4590833 - DNA, 25 bp, Homo sapien
ttgccattagctttaaagtctgagc

SEQ ID NO: 4590834 - DNA, 25 bp, Homo sapien
gtgagaagcttgcttatccccacct

SEQ ID NO: 4590835 - DNA, 25 bp, Homo sapien
cctcggcctcctcgaaggtcccact

SEQ ID NO: 4590836 - DNA, 25 bp, Homo sapien
caggccctcggcctcctcgaaggtc

SEQ ID NO: 4590837 - DNA, 25 bp, Homo sapien
cggcctcctcgaaggtcccactcac

SEQ ID NO: 4590838 - DNA, 25 bp, Homo sapien
gccctcggcctcctcgaaggtccca

SEQ ID NO: 4590839 - DNA, 25 bp, Homo sapien
ggcaggtggagccgttgccgtggca

SEQ ID NO: 4590840 - DNA, 25 bp, Homo sapien
gtggcaggtggagccgttgccgtgg

SEQ ID NO: 4590841 - DNA, 25 bp, Homo sapien
tgtggcaggtggagccgttgccgtg

SEQ ID NO: 4590842 - DNA, 25 bp, Homo sapien
caggtggagccgttgccgtggcaca

SEQ ID NO: 4590843 - DNA, 25 bp, Homo sapien
ctgcaacacacgaggaggggaggcc

SEQ ID NO: 4590844 - DNA, 25 bp, Homo sapien
gcccctggtgctggcggccagccct

SEQ ID NO: 4590845 - DNA, 25 bp, Homo sapien
tgcaacacacgaggaggggaggccc

SEQ ID NO: 4590846 - DNA, 25 bp, Homo sapien
gaggcccctggtgctggcggccagc

SEQ ID NO: 4590847 - DNA, 25 bp, Homo sapien
ctgggagagcctcttcctaaccagg

SEQ ID NO: 4590848 - DNA, 25 bp, Homo sapien
gcagtgctgggagagcctcttccta

SEQ ID NO: 4590849 - DNA, 25 bp, Homo sapien
agtgctgggagagcctcttcctaac

SEQ ID NO: 4590850 - DNA, 25 bp, Homo sapien
ggagagcctcttcctaaccaggcac

SEQ ID NO: 4590851 - DNA, 25 bp, Homo sapien
ttgatgcagaggtcccggctggctc

SEQ ID NO: 4590852 - DNA, 25 bp, Homo sapien
ctggctcggacctggtagcaggggg

SEQ ID NO: 4590853 - DNA, 25 bp, Homo sapien
ggcaaagtactcattcgcgggccgg

SEQ ID NO: 4590854 - DNA, 25 bp, Homo sapien
aaagtactcattcgcgggccggcag

SEQ ID NO: 4590855 - DNA, 25 bp, Homo sapien
cctccgtgacacacatccatggcag

SEQ ID NO: 4590856 - DNA, 25 bp, Homo sapien
gcgggagtatggaggccaccaggaa

SEQ ID NO: 4590857 - DNA, 25 bp, Homo sapien
gggcccaagtagaagagtcatcagc

SEQ ID NO: 4590858 - DNA, 25 bp, Homo sapien
agtagaagagtcatcagcaacagct

SEQ ID NO: 4590859 - DNA, 25 bp, Homo sapien
gagcatagcgtcaaagtggctgcac

SEQ ID NO: 4590860 - DNA, 25 bp, Homo sapien
tcaaagtggctgcactggacgtggc

SEQ ID NO: 4590861 - DNA, 25 bp, Homo sapien
tagcgtcaaagtggctgcactggac

SEQ ID NO: 4590862 - DNA, 25 bp, Homo sapien
gtagagcatagcgtcaaagtggctg

SEQ ID NO: 4590863 - DNA, 25 bp, Homo sapien
tcctccacatttaggccagggtcgc

SEQ ID NO: 4590864 - DNA, 25 bp, Homo sapien
agcctgggtctaaaggaagcgccca

SEQ ID NO: 4590865 - DNA, 25 bp, Homo sapien
cacatttaggccagggtcgctggcc

SEQ ID NO: 4590866 - DNA, 25 bp, Homo sapien
ccccagcctgggtctaaaggaagcg

SEQ ID NO: 4590867 - DNA, 25 bp, Homo sapien
tgcaggtgtagaagatgaaatttat

SEQ ID NO: 4590868 - DNA, 25 bp, Homo sapien
ttataatgtttatgatcaagcctag

SEQ ID NO: 4590869 - DNA, 25 bp, Homo sapien
gtttatgatcaagcctagagaggtg

SEQ ID NO: 4590870 - DNA, 25 bp, Homo sapien
aaatctggacaagggcatgtatggt

SEQ ID NO: 4590871 - DNA, 25 bp, Homo sapien
tttgtgtgacactagcagttcgggt

SEQ ID NO: 4590872 - DNA, 25 bp, Homo sapien
ctttaggcctttgagcttgaacctg

SEQ ID NO: 4590873 - DNA, 25 bp, Homo sapien
tatgagtcaagtcaccccaatggca

SEQ ID NO: 4590874 - DNA, 25 bp, Homo sapien
ttatgtaataggctgggacagtctc

SEQ ID NO: 4590875 - DNA, 25 bp, Homo sapien
tagtagctacatgtatatcacagat

SEQ ID NO: 4590876 - DNA, 25 bp, Homo sapien
tgacacataatcagatagtagctac

SEQ ID NO: 4590877 - DNA, 25 bp, Homo sapien
gaaggcagcttcagttacaaatctc

SEQ ID NO: 4590878 - DNA, 25 bp, Homo sapien
tatatcttgctaaccattacgggtc

SEQ ID NO: 4590879 - DNA, 25 bp, Homo sapien
tgagcccagtcaccctcatcaccag

SEQ ID NO: 4590880 - DNA, 25 bp, Homo sapien
ctatgatcatttctgagcccagtca

SEQ ID NO: 4590881 - DNA, 25 bp, Homo sapien
atttctgagcccagtcaccctcatc

SEQ ID NO: 4590882 - DNA, 25 bp, Homo sapien
gatcatttctgagcccagtcaccct

SEQ ID NO: 4590883 - DNA, 25 bp, Homo sapien
tgcagctgaagaacacactgccgcc

SEQ ID NO: 4590884 - DNA, 25 bp, Homo sapien
ctgggtgtgcagctgaagaacacac

SEQ ID NO: 4590885 - DNA, 25 bp, Homo sapien
tcagggctgggtgtgcagctgaaga

SEQ ID NO: 4590886 - DNA, 25 bp, Homo sapien
ctgaagaacacactgccgccccctc

SEQ ID NO: 4590887 - DNA, 25 bp, Homo sapien
cactccatgccaacattctgcatct

SEQ ID NO: 4590888 - DNA, 25 bp, Homo sapien
cccactccatgccaacattctgcat

SEQ ID NO: 4590889 - DNA, 25 bp, Homo sapien
catgccaacattctgcatctctgtg

SEQ ID NO: 4590890 - DNA, 25 bp, Homo sapien
tccatgccaacattctgcatctctg

SEQ ID NO: 4590891 - DNA, 25 bp, Homo sapien
gaaagactgtcccagcagatggcag

SEQ ID NO: 4590892 - DNA, 25 bp, Homo sapien
ccagcctgggtatttcagtgtgcac

SEQ ID NO: 4590893 - DNA, 25 bp, Homo sapien
accttaatgtccctgccgcggtagc

SEQ ID NO: 4590894 - DNA, 25 bp, Homo sapien
cgtcgacttcacaatcgctgctgaa

SEQ ID NO: 4590895 - DNA, 25 bp, Homo sapien
tatggtaggacacctagagactagc

SEQ ID NO: 4590896 - DNA, 25 bp, Homo sapien
taagagttgtacctaggatgcagct

SEQ ID NO: 4590897 - DNA, 25 bp, Homo sapien
tctggactggataaggtaacaaaca

SEQ ID NO: 4590898 - DNA, 25 bp, Homo sapien
gaaagagctaccctgacctctgctg

SEQ ID NO: 4590899 - DNA, 25 bp, Homo sapien
gcagaattgcaataattttatatta

SEQ ID NO: 4590900 - DNA, 25 bp, Homo sapien
tgcagaattgcaataattttatatt

SEQ ID NO: 4590901 - DNA, 25 bp, Homo sapien
gaattgcaataattttatattagta

SEQ ID NO: 4590902 - DNA, 25 bp, Homo sapien
cagaattgcaataattttatattag

SEQ ID NO: 4590903 - DNA, 25 bp, Homo sapien
tttctatcatttggggaataagtaa

SEQ ID NO: 4590904 - DNA, 25 bp, Homo sapien
tgggatactatccagtaaaacttaa

SEQ ID NO: 4590905 - DNA, 25 bp, Homo sapien
ataatgggatactatccagtaaaac

SEQ ID NO: 4590906 - DNA, 25 bp, Homo sapien
ttttctatcatttggggaataagta

SEQ ID NO: 4590907 - DNA, 25 bp, Homo sapien
tactactaagtgtgaacttccctgg

SEQ ID NO: 4590908 - DNA, 25 bp, Homo sapien
aatgtttctaccacccatgctctgc

SEQ ID NO: 4590909 - DNA, 25 bp, Homo sapien
ggctgcttagtcaccctccaaactg

SEQ ID NO: 4590910 - DNA, 25 bp, Homo sapien
tgtggtgctacctctcagttggccg

SEQ ID NO: 4590911 - DNA, 25 bp, Homo sapien
tatcctcagccatgtctattcgact

SEQ ID NO: 4590912 - DNA, 25 bp, Homo sapien
cactggtatgtcatcgcctctgggc

SEQ ID NO: 4590913 - DNA, 25 bp, Homo sapien
gcctctgggctgcttagaagactcc

SEQ ID NO: 4590914 - DNA, 25 bp, Homo sapien
tatactgaagcgtggttctcctcct

SEQ ID NO: 4590915 - DNA, 25 bp, Homo sapien
aaactcatccggtggctgttggcag

SEQ ID NO: 4590916 - DNA, 25 bp, Homo sapien
tgaaaattactccagttgggctaca

SEQ ID NO: 4590917 - DNA, 25 bp, Homo sapien
tcaactgggacaagatatacttcca

SEQ ID NO: 4590918 - DNA, 25 bp, Homo sapien
ttgggctacagtcaacacaaggttc

SEQ ID NO: 4590919 - DNA, 25 bp, Homo sapien
gcagcaagagagattcctagcaaag

SEQ ID NO: 4590920 - DNA, 25 bp, Homo sapien
cagcaagagagattcctagcaaagt

SEQ ID NO: 4590921 - DNA, 25 bp, Homo sapien
agcagcaagagagattcctagcaaa

SEQ ID NO: 4590922 - DNA, 25 bp, Homo sapien
gcaagagagattcctagcaaagtag

SEQ ID NO: 4590923 - DNA, 25 bp, Homo sapien
gcaagagttatcttggccctagtct

SEQ ID NO: 4590924 - DNA, 25 bp, Homo sapien
gacccagagcccaacaaggcggtat

SEQ ID NO: 4590925 - DNA, 25 bp, Homo sapien
gtattcccgttcacactcactgaag

SEQ ID NO: 4590926 - DNA, 25 bp, Homo sapien
gccctagtctgtagctcatctccta

SEQ ID NO: 4590927 - DNA, 25 bp, Homo sapien
tgaatcgcctctataaaaaccctgc

SEQ ID NO: 4590928 - DNA, 25 bp, Homo sapien
ccatagtctgcagcgaagcgtgctt

SEQ ID NO: 4590929 - DNA, 25 bp, Homo sapien
agcccaagccgtgttccaagttcca

SEQ ID NO: 4590930 - DNA, 25 bp, Homo sapien
gcataagcgcttccatgaatcgcct

SEQ ID NO: 4590931 - DNA, 25 bp, Homo sapien
cactgctctccaacctgggcaatgg

SEQ ID NO: 4590932 - DNA, 25 bp, Homo sapien
accactgctctccaacctgggcaat

SEQ ID NO: 4590933 - DNA, 25 bp, Homo sapien
tgctctccaacctgggcaatggagc

SEQ ID NO: 4590934 - DNA, 25 bp, Homo sapien
actgctctccaacctgggcaatgga

SEQ ID NO: 4590935 - DNA, 25 bp, Homo sapien
ctgtgggtcaggcaaaggatgtcta

SEQ ID NO: 4590936 - DNA, 25 bp, Homo sapien
gggtcaggcaaaggatgtctagcat

SEQ ID NO: 4590937 - DNA, 25 bp, Homo sapien
cagtgagtcctcagtaacagggctt

SEQ ID NO: 4590938 - DNA, 25 bp, Homo sapien
cacaattgggccatcagacaggact

SEQ ID NO: 4590939 - DNA, 25 bp, Homo sapien
tggacgtggcttcatggccaaacag

SEQ ID NO: 4590940 - DNA, 25 bp, Homo sapien
tagagacaatggacgtggcttcatg

SEQ ID NO: 4590941 - DNA, 25 bp, Homo sapien
cctagagacaatggacgtggcttca

SEQ ID NO: 4590942 - DNA, 25 bp, Homo sapien
caatggacgtggcttcatggccaaa

SEQ ID NO: 4590943 - DNA, 25 bp, Homo sapien
cgagcagggcatggagagacaatat

SEQ ID NO: 4590944 - DNA, 25 bp, Homo sapien
tattctgaactgaggacaacttgtc

SEQ ID NO: 4590945 - DNA, 25 bp, Homo sapien
tcaaagacatgtaggcagagccaga

SEQ ID NO: 4590946 - DNA, 25 bp, Homo sapien
tgaaggatggtactccagaacagcc

SEQ ID NO: 4590947 - DNA, 25 bp, Homo sapien
tagtgacctcgccactctaagtgtg

SEQ ID NO: 4590948 - DNA, 25 bp, Homo sapien
caagatgcccacgtgattcatcgta

SEQ ID NO: 4590949 - DNA, 25 bp, Homo sapien
catcgtatgcacgttaacatttgag

SEQ ID NO: 4590950 - DNA, 25 bp, Homo sapien
gcaccacctggcatctccttagaag

SEQ ID NO: 4590951 - DNA, 25 bp, Homo sapien
tgtgtcatgataaccttcccgtcct

SEQ ID NO: 4590952 - DNA, 25 bp, Homo sapien
ccacaacatcaacatagcattcctt

SEQ ID NO: 4590953 - DNA, 25 bp, Homo sapien
aagctgtgtcatgataaccttcccg

SEQ ID NO: 4590954 - DNA, 25 bp, Homo sapien
acatcaacatagcattccttgcaca

SEQ ID NO: 4590955 - DNA, 25 bp, Homo sapien
tttttgcaaagccacgaagtatgtg

SEQ ID NO: 4590956 - DNA, 25 bp, Homo sapien
ctgtcggtgcctctccgcggcttct

SEQ ID NO: 4590957 - DNA, 25 bp, Homo sapien
ggagtccgcgccgtgaacaagtgct

SEQ ID NO: 4590958 - DNA, 25 bp, Homo sapien
cggtaaacacgtcgggccgcgcctg

SEQ ID NO: 4590959 - DNA, 25 bp, Homo sapien
caaacggtgcagttcttgaaaggtc

SEQ ID NO: 4590960 - DNA, 25 bp, Homo sapien
tcagtacagtaaaaaccagtgtgcc

SEQ ID NO: 4590961 - DNA, 25 bp, Homo sapien
ttgcgcagatgaggacaaacggtgc

SEQ ID NO: 4590962 - DNA, 25 bp, Homo sapien
tagatcccggaattcacaatgaaaa

SEQ ID NO: 4590963 - DNA, 25 bp, Homo sapien
gcttggtccacgtagggctctgtca

SEQ ID NO: 4590964 - DNA, 25 bp, Homo sapien
ttaaatggaagtttggtattgacca

SEQ ID NO: 4590965 - DNA, 25 bp, Homo sapien
cgttttaacctcttcagcaacttca

SEQ ID NO: 4590966 - DNA, 25 bp, Homo sapien
gtttggtggtaaaatctatacagct

SEQ ID NO: 4590967 - DNA, 25 bp, Homo sapien
cctgtcttagggatctgggataaac

SEQ ID NO: 4590968 - DNA, 25 bp, Homo sapien
gaggattcttccttaggtctcccta

SEQ ID NO: 4590969 - DNA, 25 bp, Homo sapien
ggaccttggtatctcacatttcaga

SEQ ID NO: 4590970 - DNA, 25 bp, Homo sapien
gtaataacaattagcaggtcaacca

SEQ ID NO: 4590971 - DNA, 25 bp, Homo sapien
tgccttagaatcaatcacgacagtg

SEQ ID NO: 4590972 - DNA, 25 bp, Homo sapien
caaaggagttctgcacgtggaagta

SEQ ID NO: 4590973 - DNA, 25 bp, Homo sapien
ggtaaagctctcgtgtgatggacat

SEQ ID NO: 4590974 - DNA, 25 bp, Homo sapien
caacaatgggtgaagctgccgatgc

SEQ ID NO: 4590975 - DNA, 25 bp, Homo sapien
tagaaaatggtgacagtctcagaga

SEQ ID NO: 4590976 - DNA, 25 bp, Homo sapien
gcaactattttgtgaaatctccagg

SEQ ID NO: 4590977 - DNA, 25 bp, Homo sapien
gctttagagttcttgtggtgcacta

SEQ ID NO: 4590978 - DNA, 25 bp, Homo sapien
tgacttagaaatgcaggcggtgatt

SEQ ID NO: 4590979 - DNA, 25 bp, Homo sapien
aatgagatatgcctgtattcaggtt

SEQ ID NO: 4590980 - DNA, 25 bp, Homo sapien
tttctaggtgtgtttatataagata

SEQ ID NO: 4590981 - DNA, 25 bp, Homo sapien
tcattttaagattcctctaagaact

SEQ ID NO: 4590982 - DNA, 25 bp, Homo sapien
ctttgaagtgtaataaagtgaaatg

SEQ ID NO: 4590983 - DNA, 25 bp, Homo sapien
tgggacgcattcaaagcagtgtgta

SEQ ID NO: 4590984 - DNA, 25 bp, Homo sapien
tctgggacgcattcaaagcagtgtg

SEQ ID NO: 4590985 - DNA, 25 bp, Homo sapien
ctctgggacgcattcaaagcagtgt

SEQ ID NO: 4590986 - DNA, 25 bp, Homo sapien
ggacgcattcaaagcagtgtgtaga

SEQ ID NO: 4590987 - DNA, 25 bp, Homo sapien
gcctttgggtattctgttaccacaa

SEQ ID NO: 4590988 - DNA, 25 bp, Homo sapien
tttgcctttgggtattctgttacca

SEQ ID NO: 4590989 - DNA, 25 bp, Homo sapien
gttaactcttcatatggtacaatca

SEQ ID NO: 4590990 - DNA, 25 bp, Homo sapien
tgggtattctgttaccacaaaagga

SEQ ID NO: 4590991 - DNA, 25 bp, Homo sapien
aatggtagaatatatggatggtggt

SEQ ID NO: 4590992 - DNA, 25 bp, Homo sapien
taaattgcagccaggactaaattgc

SEQ ID NO: 4590993 - DNA, 25 bp, Homo sapien
gtagtgaacactggatctttttgtg

SEQ ID NO: 4590994 - DNA, 25 bp, Homo sapien
ggctggtttctttcggagatctgta

SEQ ID NO: 4590995 - DNA, 25 bp, Homo sapien
attggtttagcccattggacagcct

SEQ ID NO: 4590996 - DNA, 25 bp, Homo sapien
agcccattggacagcctgctttttg

SEQ ID NO: 4590997 - DNA, 25 bp, Homo sapien
ctatatttagtctttccaggtggtt

SEQ ID NO: 4590998 - DNA, 25 bp, Homo sapien
tggacagcctgctttttggttgata

SEQ ID NO: 4590999 - DNA, 25 bp, Homo sapien
tagggataggaatgtcagcactcac

SEQ ID NO: 4591000 - DNA, 25 bp, Homo sapien
cgtagggataggaatgtcagcactc

SEQ ID NO: 4591001 - DNA, 25 bp, Homo sapien
gtagggataggaatgtcagcactca

SEQ ID NO: 4591002 - DNA, 25 bp, Homo sapien
tggacctcctggcagcttatggttc

SEQ ID NO: 4591003 - DNA, 25 bp, Homo sapien
caggatacagctggtggcaaaattc

SEQ ID NO: 4591004 - DNA, 25 bp, Homo sapien
cctttggataacaggatacagctgg

SEQ ID NO: 4591005 - DNA, 25 bp, Homo sapien
cagcttatggttcccgtttcctttg

SEQ ID NO: 4591006 - DNA, 25 bp, Homo sapien
tggatgcctcttgtgactccttccc

SEQ ID NO: 4591007 - DNA, 25 bp, Homo sapien
gatcccctgcgtgcacttcctattc

SEQ ID NO: 4591008 - DNA, 25 bp, Homo sapien
tcccctgcgtgcacttcctattcat

SEQ ID NO: 4591009 - DNA, 25 bp, Homo sapien
ccacgatcccctgcgtgcacttcct

SEQ ID NO: 4591010 - DNA, 25 bp, Homo sapien
tcacacagccatataacttcatgcc

SEQ ID NO: 4591011 - DNA, 25 bp, Homo sapien
tctctgtggtcctctatagtgagtg

SEQ ID NO: 4591012 - DNA, 25 bp, Homo sapien
acttttgctattgctgatctttgta

SEQ ID NO: 4591013 - DNA, 25 bp, Homo sapien
ctctatagtgagtggtttttacata

SEQ ID NO: 4591014 - DNA, 25 bp, Homo sapien
aggtggcactatgtcattggcaaga

SEQ ID NO: 4591015 - DNA, 25 bp, Homo sapien
taggtggcactatgtcattggcaag

SEQ ID NO: 4591016 - DNA, 25 bp, Homo sapien
ggtggcactatgtcattggcaagag

SEQ ID NO: 4591017 - DNA, 25 bp, Homo sapien
gtggcactatgtcattggcaagagt

SEQ ID NO: 4591018 - DNA, 25 bp, Homo sapien
tccagaaccccaacagatctggttg

SEQ ID NO: 4591019 - DNA, 25 bp, Homo sapien
gaagagccattccaattataaaaca

SEQ ID NO: 4591020 - DNA, 25 bp, Homo sapien
acagatctggttgattatgtcgtcc

SEQ ID NO: 4591021 - DNA, 25 bp, Homo sapien
gattatgtcgtccttcctctcttgt

SEQ ID NO: 4591022 - DNA, 25 bp, Homo sapien
catttctgataggtctgctccagca

SEQ ID NO: 4591023 - DNA, 25 bp, Homo sapien
atttctgataggtctgctccagcat

SEQ ID NO: 4591024 - DNA, 25 bp, Homo sapien
tgcctttgccttaacaatacatttc

SEQ ID NO: 4591025 - DNA, 25 bp, Homo sapien
ggctggtggccttgtccagccagat

SEQ ID NO: 4591026 - DNA, 25 bp, Homo sapien
tctctttttcaaatgtaagacatac

SEQ ID NO: 4591027 - DNA, 25 bp, Homo sapien
atctctttttcaaatgtaagacata

SEQ ID NO: 4591028 - DNA, 25 bp, Homo sapien
catctctttttcaaatgtaagacat

SEQ ID NO: 4591029 - DNA, 25 bp, Homo sapien
tggggtgacctggaatgactgccat

SEQ ID NO: 4591030 - DNA, 25 bp, Homo sapien
ctctcagtggtaattggtatgtggg

SEQ ID NO: 4591031 - DNA, 25 bp, Homo sapien
tcctataaaacttgcttactctcag

SEQ ID NO: 4591032 - DNA, 25 bp, Homo sapien
tgcttactctcagtggtaattggta

SEQ ID NO: 4591033 - DNA, 25 bp, Homo sapien
gctggaaaagttttcagtgtgcttc

SEQ ID NO: 4591034 - DNA, 25 bp, Homo sapien
tggaaaagttttcagtgtgcttctt

SEQ ID NO: 4591035 - DNA, 25 bp, Homo sapien
gaaaagttttcagtgtgcttcttct

SEQ ID NO: 4591036 - DNA, 25 bp, Homo sapien
ctgctggaaaagttttcagtgtgct

SEQ ID NO: 4591037 - DNA, 25 bp, Homo sapien
tattcttcaaggtagagtttgggca

SEQ ID NO: 4591038 - DNA, 25 bp, Homo sapien
taagctttcagagagtatgcgcctg

SEQ ID NO: 4591039 - DNA, 25 bp, Homo sapien
tatgcgcctgctcgaggtgatctgt

SEQ ID NO: 4591040 - DNA, 25 bp, Homo sapien
cagcactgggcttagacatttctcc

SEQ ID NO: 4591041 - DNA, 25 bp, Homo sapien
aatcacagcagggtagatactgctc

SEQ ID NO: 4591042 - DNA, 25 bp, Homo sapien
ctttaatgtggaacacgtccacacc

SEQ ID NO: 4591043 - DNA, 25 bp, Homo sapien
tgtggaacacgtccacaccctttct

SEQ ID NO: 4591044 - DNA, 25 bp, Homo sapien
cagggtagatactgctctttagttg

SEQ ID NO: 4591045 - DNA, 25 bp, Homo sapien
tcatggaaaggtaataccctgtaat

SEQ ID NO: 4591046 - DNA, 25 bp, Homo sapien
taatttcacaattcttggagcctac

SEQ ID NO: 4591047 - DNA, 25 bp, Homo sapien
tgtcattttgtcagactgggaaata

SEQ ID NO: 4591048 - DNA, 25 bp, Homo sapien
gcagtgggtataaatcctgtcattt

SEQ ID NO: 4591049 - DNA, 25 bp, Homo sapien
ttcagatgcaacttactagtctaga

SEQ ID NO: 4591050 - DNA, 25 bp, Homo sapien
tgccattaaagttttggtgtctccc

SEQ ID NO: 4591051 - DNA, 25 bp, Homo sapien
gcacatggtgtattaaaattccacc

SEQ ID NO: 4591052 - DNA, 25 bp, Homo sapien
aacttactagtctagacaaagcagg

SEQ ID NO: 4591053 - DNA, 25 bp, Homo sapien
ttgggtaagcagaccacaagtcact

SEQ ID NO: 4591054 - DNA, 25 bp, Homo sapien
gggcctgagccatagcatagttagt

SEQ ID NO: 4591055 - DNA, 25 bp, Homo sapien
tgatgttagagctcctgccagaagg

SEQ ID NO: 4591056 - DNA, 25 bp, Homo sapien
caattgaacgatttgggagtcctga

SEQ ID NO: 4591057 - DNA, 25 bp, Homo sapien
tgtgcatgtccggttctgctttgtg

SEQ ID NO: 4591058 - DNA, 25 bp, Homo sapien
tgctgttgtttggagatgtgtagtt

SEQ ID NO: 4591059 - DNA, 25 bp, Homo sapien
ttctgtgtgcatgtccggttctgct

SEQ ID NO: 4591060 - DNA, 25 bp, Homo sapien
catgtccggttctgctttgtgatgc

SEQ ID NO: 4591061 - DNA, 25 bp, Homo sapien
ccagaggcttctttgggagcatgca

SEQ ID NO: 4591062 - DNA, 25 bp, Homo sapien
tccatagggttatgtgatgctccca

SEQ ID NO: 4591063 - DNA, 25 bp, Homo sapien
tgaatggacttctaggcaatcaggt

SEQ ID NO: 4591064 - DNA, 25 bp, Homo sapien
cttgggcataacatctgaaaggctg

SEQ ID NO: 4591065 - DNA, 25 bp, Homo sapien
gacgtgcacgtcacaagtaagcctg

SEQ ID NO: 4591066 - DNA, 25 bp, Homo sapien
gaaggcctttcgtcctgtggaaaca

SEQ ID NO: 4591067 - DNA, 25 bp, Homo sapien
ccctggatggtaacaaacctgctga

SEQ ID NO: 4591068 - DNA, 25 bp, Homo sapien
tagttgaggaggagaatacagaccg

SEQ ID NO: 4591069 - DNA, 25 bp, Homo sapien
agatgtaatgccacaccagaactca

SEQ ID NO: 4591070 - DNA, 25 bp, Homo sapien
tgaggcaatgtcaccctcagattta

SEQ ID NO: 4591071 - DNA, 25 bp, Homo sapien
tcagatttagcccttcttgggctgg

SEQ ID NO: 4591072 - DNA, 25 bp, Homo sapien
ctcttagcagcaggcataggtgagg

SEQ ID NO: 4591073 - DNA, 25 bp, Homo sapien
ccatttgttctacaactggagacga

SEQ ID NO: 4591074 - DNA, 25 bp, Homo sapien
tagttagcgagtccgaaagcaccac

SEQ ID NO: 4591075 - DNA, 25 bp, Homo sapien
gacgataaactttgtgcagactctg

SEQ ID NO: 4591076 - DNA, 25 bp, Homo sapien
acttctagtggcgatttggttgcaa

SEQ ID NO: 4591077 - DNA, 25 bp, Homo sapien
aagcctgcatgaatcactgtgaaat

SEQ ID NO: 4591078 - DNA, 25 bp, Homo sapien
cagcagatgaatgatgtgaaaaatg

SEQ ID NO: 4591079 - DNA, 25 bp, Homo sapien
ccttagggtaagatcctggtcgctc

SEQ ID NO: 4591080 - DNA, 25 bp, Homo sapien
tccaggtttgtgtaattccagcgtt

SEQ ID NO: 4591081 - DNA, 25 bp, Homo sapien
gaacgcattaaaaggagtacctgca

SEQ ID NO: 4591082 - DNA, 25 bp, Homo sapien
gcagtggctgttgcagctgaacgca

SEQ ID NO: 4591083 - DNA, 25 bp, Homo sapien
cctccttgagtgaggaaaaggattt

SEQ ID NO: 4591084 - DNA, 25 bp, Homo sapien
ggtgctgtatctgcttcacatcaag

SEQ ID NO: 4591085 - DNA, 25 bp, Homo sapien
cacactggaacagacccagtggaat

SEQ ID NO: 4591086 - DNA, 25 bp, Homo sapien
tcaggcctcctgttatactcttctc

SEQ ID NO: 4591087 - DNA, 25 bp, Homo sapien
taagtactgcactgggagctctgcc

SEQ ID NO: 4591088 - DNA, 25 bp, Homo sapien
gaattgcagtgtatctcatgtgcct

SEQ ID NO: 4591089 - DNA, 25 bp, Homo sapien
ctacatgtgagaagaagttcttgtg

SEQ ID NO: 4591090 - DNA, 25 bp, Homo sapien
catgtgagaagaagttcttgtgtca

SEQ ID NO: 4591091 - DNA, 25 bp, Homo sapien
ttctacatgtgagaagaagttcttg

SEQ ID NO: 4591092 - DNA, 25 bp, Homo sapien
atttctacatgtgagaagaagttct

SEQ ID NO: 4591093 - DNA, 25 bp, Homo sapien
tctttggtcaagtgaggctaaggaa

SEQ ID NO: 4591094 - DNA, 25 bp, Homo sapien
ggcctcggctgccagcagttggtaa

SEQ ID NO: 4591095 - DNA, 25 bp, Homo sapien
ttttctctgtgagatcacggtgatg

SEQ ID NO: 4591096 - DNA, 25 bp, Homo sapien
gcactaggtagaggcgttgtgattt

SEQ ID NO: 4591097 - DNA, 25 bp, Homo sapien
caaaagacataaggaggctctggat

SEQ ID NO: 4591098 - DNA, 25 bp, Homo sapien
gctctggattgaagacaaccacata

SEQ ID NO: 4591099 - DNA, 25 bp, Homo sapien
tatatagccactcagatactgtcca

SEQ ID NO: 4591100 - DNA, 25 bp, Homo sapien
tgtaagagatgtccgcattgcaaca

SEQ ID NO: 4591101 - DNA, 25 bp, Homo sapien
cccttgttagagaacaaagcctaga

SEQ ID NO: 4591102 - DNA, 25 bp, Homo sapien
ctttcttatatgattgacagggtcc

SEQ ID NO: 4591103 - DNA, 25 bp, Homo sapien
gattgacagggtccacccttgttag

SEQ ID NO: 4591104 - DNA, 25 bp, Homo sapien
caaagcctagattcattgtagctgt

SEQ ID NO: 4591105 - DNA, 25 bp, Homo sapien
cagcagttccagtcctaggcgtatg

SEQ ID NO: 4591106 - DNA, 25 bp, Homo sapien
gcatggcgagccttacatcttcaca

SEQ ID NO: 4591107 - DNA, 25 bp, Homo sapien
taccatgtatgtaacccagcagttc

SEQ ID NO: 4591108 - DNA, 25 bp, Homo sapien
taggcgtatgcccaggagaattgaa

SEQ ID NO: 4591109 - DNA, 25 bp, Homo sapien
taccgcatcataataggaacacttc

SEQ ID NO: 4591110 - DNA, 25 bp, Homo sapien
catgtggttctagtttgcctggtta

SEQ ID NO: 4591111 - DNA, 25 bp, Homo sapien
gtttatagtttggtgagccttgaca

SEQ ID NO: 4591112 - DNA, 25 bp, Homo sapien
tagctttctgccttatgccacttag

SEQ ID NO: 4591113 - DNA, 25 bp, Homo sapien
cttccccaggttagcagatgtatct

SEQ ID NO: 4591114 - DNA, 25 bp, Homo sapien
tcccaaagagaggtaaatcaaggtc

SEQ ID NO: 4591115 - DNA, 25 bp, Homo sapien
taacagcccgtaacgtttgtcgtga

SEQ ID NO: 4591116 - DNA, 25 bp, Homo sapien
taatctgtaggcgagacattgcaac

SEQ ID NO: 4591117 - DNA, 25 bp, Homo sapien
aaatttaatgactgcttcacgaatg

SEQ ID NO: 4591118 - DNA, 25 bp, Homo sapien
cgtctgtgcattgttccgattttag

SEQ ID NO: 4591119 - DNA, 25 bp, Homo sapien
ccatgctaatcgtctgtgcattgtt

SEQ ID NO: 4591120 - DNA, 25 bp, Homo sapien
tgcttcacgaatgtgtgcatcatcc

SEQ ID NO: 4591121 - DNA, 25 bp, Homo sapien
gagcatggtgaatgatccctacagc

SEQ ID NO: 4591122 - DNA, 25 bp, Homo sapien
ggaccactgtcctaatacctctgaa

SEQ ID NO: 4591123 - DNA, 25 bp, Homo sapien
tgcataatgtcatgggatctcctgt

SEQ ID NO: 4591124 - DNA, 25 bp, Homo sapien
tactgctagggcttacctaggacca

SEQ ID NO: 4591125 - DNA, 25 bp, Homo sapien
agaggcataagttcattccttggcc

SEQ ID NO: 4591126 - DNA, 25 bp, Homo sapien
gcacaggccctaaagtattgtcaac

SEQ ID NO: 4591127 - DNA, 25 bp, Homo sapien
aaagactttattactaggccacctg

SEQ ID NO: 4591128 - DNA, 25 bp, Homo sapien
gaagaattgtctatgtcgtgcctat

SEQ ID NO: 4591129 - DNA, 25 bp, Homo sapien
caagtgggcaaatagtgatctttcc

SEQ ID NO: 4591130 - DNA, 25 bp, Homo sapien
cagatattctcatgaatttcagata

SEQ ID NO: 4591131 - DNA, 25 bp, Homo sapien
ggagatacgtttgtctgggtcttta

SEQ ID NO: 4591132 - DNA, 25 bp, Homo sapien
tcaagtggatgctttctttaattcc

SEQ ID NO: 4591133 - DNA, 25 bp, Homo sapien
tcctggtaccttagaaaagctgtta

SEQ ID NO: 4591134 - DNA, 25 bp, Homo sapien
ctgttatatcttggccgagcacggt

SEQ ID NO: 4591135 - DNA, 25 bp, Homo sapien
ctgagccagatggattgcgtgagcc

SEQ ID NO: 4591136 - DNA, 25 bp, Homo sapien
cagaaagggcagacgttgtagacca

SEQ ID NO: 4591137 - DNA, 25 bp, Homo sapien
catgatggtcattctgtcgcaagga

SEQ ID NO: 4591138 - DNA, 25 bp, Homo sapien
taaatacccttagcaggctggttgc

SEQ ID NO: 4591139 - DNA, 25 bp, Homo sapien
gggttgcaaccacttacagatgtca

SEQ ID NO: 4591140 - DNA, 25 bp, Homo sapien
tctataaggtcatgggttggtgcag

SEQ ID NO: 4591141 - DNA, 25 bp, Homo sapien
cattgagcaagatgtggtcggtccc

SEQ ID NO: 4591142 - DNA, 25 bp, Homo sapien
aaatctgggaggcacacttgggccg

SEQ ID NO: 4591143 - DNA, 25 bp, Homo sapien
gtttcagacatactacatccccaag

SEQ ID NO: 4591144 - DNA, 25 bp, Homo sapien
caagagcttgtcagtcagactcata

SEQ ID NO: 4591145 - DNA, 25 bp, Homo sapien
ttgagttggcatcacggacgctgac

SEQ ID NO: 4591146 - DNA, 25 bp, Homo sapien
caaaaaggaacagcatctctcggac

SEQ ID NO: 4591147 - DNA, 25 bp, Homo sapien
tctatgcagtccacagacgtgagct

SEQ ID NO: 4591148 - DNA, 25 bp, Homo sapien
tctctcggacacacaaagataaggg

SEQ ID NO: 4591149 - DNA, 25 bp, Homo sapien
gacttgatctgtgtacgtacatggg

SEQ ID NO: 4591150 - DNA, 25 bp, Homo sapien
gtaaggtctgaacctccgaatgcct

SEQ ID NO: 4591151 - DNA, 25 bp, Homo sapien
tggtcaacttagcacaagggcagtg

SEQ ID NO: 4591152 - DNA, 25 bp, Homo sapien
gggcacataccacccgtgttttgca

SEQ ID NO: 4591153 - DNA, 25 bp, Homo sapien
ggtaatactattcagagtcgcccct

SEQ ID NO: 4591154 - DNA, 25 bp, Homo sapien
gatttccagaatcgagtgagcttcc

SEQ ID NO: 4591155 - DNA, 25 bp, Homo sapien
ggtgactcggactgaattccccata

SEQ ID NO: 4591156 - DNA, 25 bp, Homo sapien
gaaatcacgtgcctgaaactgtgct

SEQ ID NO: 4591157 - DNA, 25 bp, Homo sapien
ggagttgaggtttactctaatgatg

SEQ ID NO: 4591158 - DNA, 25 bp, Homo sapien
tgaggtttactctaatgatggtggc

SEQ ID NO: 4591159 - DNA, 25 bp, Homo sapien
gtttactctaatgatggtggcccag

SEQ ID NO: 4591160 - DNA, 25 bp, Homo sapien
caggtcttcccaaggattttagtat

SEQ ID NO: 4591161 - DNA, 25 bp, Homo sapien
ttcagcaggaccgtctaggtgcgca

SEQ ID NO: 4591162 - DNA, 25 bp, Homo sapien
tacctttcgtcaccacctgagggca

SEQ ID NO: 4591163 - DNA, 25 bp, Homo sapien
cattcctagttaaccagagccttgg

SEQ ID NO: 4591164 - DNA, 25 bp, Homo sapien
cgatgtgcaccctctgcgttttgga

SEQ ID NO: 4591165 - DNA, 25 bp, Homo sapien
gctctccaccgcaactggttctgag

SEQ ID NO: 4591166 - DNA, 25 bp, Homo sapien
ttctttgcagagtcttgtagccctg

SEQ ID NO: 4591167 - DNA, 25 bp, Homo sapien
cgaacttggaagtgcacgggtttct

SEQ ID NO: 4591168 - DNA, 25 bp, Homo sapien
gctgcctccccataagccagtaaaa

SEQ ID NO: 4591169 - DNA, 25 bp, Homo sapien
ggcggccacctgtgaactagcagga

SEQ ID NO: 4591170 - DNA, 25 bp, Homo sapien
cattttccgtttgaaggtccctcat

SEQ ID NO: 4591171 - DNA, 25 bp, Homo sapien
ccaagtggctcctacgaaagtggcc

SEQ ID NO: 4591172 - DNA, 25 bp, Homo sapien
tcctaacggatgctgctgtgcccag

SEQ ID NO: 4591173 - DNA, 25 bp, Homo sapien
ggaaaagaagtgggagtcgctgatg

SEQ ID NO: 4591174 - DNA, 25 bp, Homo sapien
ctgccggaaaagaagtgggagtcgc

SEQ ID NO: 4591175 - DNA, 25 bp, Homo sapien
ccggaaaagaagtgggagtcgctga

SEQ ID NO: 4591176 - DNA, 25 bp, Homo sapien
tgccggaaaagaagtgggagtcgct

SEQ ID NO: 4591177 - DNA, 25 bp, Homo sapien
gagagggctgctgggcaagtaaagc

SEQ ID NO: 4591178 - DNA, 25 bp, Homo sapien
cagcttcagagattgaggtggcggt

SEQ ID NO: 4591179 - DNA, 25 bp, Homo sapien
cggttgcctggacaacctcggttct

SEQ ID NO: 4591180 - DNA, 25 bp, Homo sapien
tctctgcggtccaaaggagagggct

SEQ ID NO: 4591181 - DNA, 25 bp, Homo sapien
tcatctggaagcatgtcagcggagc

SEQ ID NO: 4591182 - DNA, 25 bp, Homo sapien
acttcggtttaggtctctgtcttgc

SEQ ID NO: 4591183 - DNA, 25 bp, Homo sapien
agtggccccggattcatgtcccgag

SEQ ID NO: 4591184 - DNA, 25 bp, Homo sapien
tctgtcttgcagcatcagcgactcc

SEQ ID NO: 4591185 - DNA, 25 bp, Homo sapien
catgggctcgatgccgctgcttcct

SEQ ID NO: 4591186 - DNA, 25 bp, Homo sapien
catcaaggcatcagccgtatctcac

SEQ ID NO: 4591187 - DNA, 25 bp, Homo sapien
gccctgggttggcaccaggtgctga

SEQ ID NO: 4591188 - DNA, 25 bp, Homo sapien
cctcaggccaactgtgggcatgggc

SEQ ID NO: 4591189 - DNA, 25 bp, Homo sapien
gctgcacagcacaaactgaggaccc

SEQ ID NO: 4591190 - DNA, 25 bp, Homo sapien
ctgcaaagatctggccttgatcccg

SEQ ID NO: 4591191 - DNA, 25 bp, Homo sapien
tcccggagcagagctcacactactg

SEQ ID NO: 4591192 - DNA, 25 bp, Homo sapien
tggcttgactgcagtgtggcccctc

SEQ ID NO: 4591193 - DNA, 25 bp, Homo sapien
aaagcgttgaggaagctcacaggag

SEQ ID NO: 4591194 - DNA, 25 bp, Homo sapien
ctcgctctcagagcctgcatttatc

SEQ ID NO: 4591195 - DNA, 25 bp, Homo sapien
ccatggaggagtcatccgtggcact

SEQ ID NO: 4591196 - DNA, 25 bp, Homo sapien
ccaatgtgaagaaagtgcggccatg

SEQ ID NO: 4591197 - DNA, 25 bp, Homo sapien
ggtgcccatcagtagaattacttaa

SEQ ID NO: 4591198 - DNA, 25 bp, Homo sapien
cctcagctttaaaatggtgacctca

SEQ ID NO: 4591199 - DNA, 25 bp, Homo sapien
tggaagcttctctgcgtaccagagc

SEQ ID NO: 4591200 - DNA, 25 bp, Homo sapien
tacttaatctatcgtgcaacccagg

SEQ ID NO: 4591201 - DNA, 25 bp, Homo sapien
tgtgctttatctcaatgaagcaacc

SEQ ID NO: 4591202 - DNA, 25 bp, Homo sapien
gggaaagcaccatggcacgtccttt

SEQ ID NO: 4591203 - DNA, 25 bp, Homo sapien
cctttgtgctatgtgataagtgtgc

SEQ ID NO: 4591204 - DNA, 25 bp, Homo sapien
atctcaatgaagcaaccccacgggt

SEQ ID NO: 4591205 - DNA, 25 bp, Homo sapien
gtgccttcgggcagctggcctgaca

SEQ ID NO: 4591206 - DNA, 25 bp, Homo sapien
tgtgccagcagagccgtcccctggg

SEQ ID NO: 4591207 - DNA, 25 bp, Homo sapien
tgggaccacagccaagtgccttcgg

SEQ ID NO: 4591208 - DNA, 25 bp, Homo sapien
ctgagtgtgccagcagagccgtccc

SEQ ID NO: 4591209 - DNA, 25 bp, Homo sapien
agtgttcacactgcaggtgcctggg

SEQ ID NO: 4591210 - DNA, 25 bp, Homo sapien
taatcttgagccagccaagcagtgt

SEQ ID NO: 4591211 - DNA, 25 bp, Homo sapien
taggatggtcactgacaggcgccaa

SEQ ID NO: 4591212 - DNA, 25 bp, Homo sapien
cactgagtggccacgagcaactgtg

SEQ ID NO: 4591213 - DNA, 25 bp, Homo sapien
caggccaggagggaaaggatgtgtg

SEQ ID NO: 4591214 - DNA, 25 bp, Homo sapien
gaaaggatgtgtggcagtgccgcag

SEQ ID NO: 4591215 - DNA, 25 bp, Homo sapien
ccaggagggaaaggatgtgtggcag

SEQ ID NO: 4591216 - DNA, 25 bp, Homo sapien
agggaaaggatgtgtggcagtgccg

SEQ ID NO: 4591217 - DNA, 25 bp, Homo sapien
ggcacggatgcaagagatgcttctc

SEQ ID NO: 4591218 - DNA, 25 bp, Homo sapien
tggcagacaagcaaggccacgctgt

SEQ ID NO: 4591219 - DNA, 25 bp, Homo sapien
caaacaggtgatctcaaggctctgc

SEQ ID NO: 4591220 - DNA, 25 bp, Homo sapien
tcttgcctaaagctcagaacagccc

SEQ ID NO: 4591221 - DNA, 25 bp, Homo sapien
agtgattaatggtgacgctgtccgc

SEQ ID NO: 4591222 - DNA, 25 bp, Homo sapien
caggcggcttggtacttgattcgaa

SEQ ID NO: 4591223 - DNA, 25 bp, Homo sapien
gaatacagatgacagctagaggcac

SEQ ID NO: 4591224 - DNA, 25 bp, Homo sapien
tgctacctggaactaaacagccacg

SEQ ID NO: 4591225 - DNA, 25 bp, Homo sapien
aatgacagggaactcgatgcagacg

SEQ ID NO: 4591226 - DNA, 25 bp, Homo sapien
cacagtggattaatgagctcggcct

SEQ ID NO: 4591227 - DNA, 25 bp, Homo sapien
tcaaggctggcagaaatcctcaggc

SEQ ID NO: 4591228 - DNA, 25 bp, Homo sapien
gatgcagacgctcacacctatgaag

SEQ ID NO: 4591229 - DNA, 25 bp, Homo sapien
tagcgagagctggacttctcaccag

SEQ ID NO: 4591230 - DNA, 25 bp, Homo sapien
tcagtgggaagtgccatggtcacca

SEQ ID NO: 4591231 - DNA, 25 bp, Homo sapien
ttctaggtggcagacgacgatgcgc

SEQ ID NO: 4591232 - DNA, 25 bp, Homo sapien
actgctgcctgggagagtagcgtca

SEQ ID NO: 4591233 - DNA, 25 bp, Homo sapien
cctttgaagagaactcggacactga

SEQ ID NO: 4591234 - DNA, 25 bp, Homo sapien
gaagcttaagagcaacccggactca

SEQ ID NO: 4591235 - DNA, 25 bp, Homo sapien
gagcatgggaacaacccagggtcat

SEQ ID NO: 4591236 - DNA, 25 bp, Homo sapien
ggagctttgcagagcatgggaacaa

SEQ ID NO: 4591237 - DNA, 25 bp, Homo sapien
tggtgatgcagttccatgtatctga

SEQ ID NO: 4591238 - DNA, 25 bp, Homo sapien
tgaagtggggtcatagcagtccaga

SEQ ID NO: 4591239 - DNA, 25 bp, Homo sapien
gcagtccagagtcttacacctctgg

SEQ ID NO: 4591240 - DNA, 25 bp, Homo sapien
gagtcttacacctctgggtcccaaa

SEQ ID NO: 4591241 - DNA, 25 bp, Homo sapien
ggtccacctggtagatcttgtcaca

SEQ ID NO: 4591242 - DNA, 25 bp, Homo sapien
cacatagagcttgttgccggaagcc

SEQ ID NO: 4591243 - DNA, 25 bp, Homo sapien
tctcacagtcaaagcggtaggccga

SEQ ID NO: 4591244 - DNA, 25 bp, Homo sapien
aggtcgtgcttcacccactggagga

SEQ ID NO: 4591245 - DNA, 25 bp, Homo sapien
cccagagtgtgacgtcggtgaacat

SEQ ID NO: 4591246 - DNA, 25 bp, Homo sapien
tgacgtcggtgaacatgcagtgctt

SEQ ID NO: 4591247 - DNA, 25 bp, Homo sapien
cggtcgcccgcccagagtgtgacgt

SEQ ID NO: 4591248 - DNA, 25 bp, Homo sapien
catgcagtgcttgcgaagcgtgttg

SEQ ID NO: 4591249 - DNA, 25 bp, Homo sapien
gaagagggtgacgttcatggacccc

SEQ ID NO: 4591250 - DNA, 25 bp, Homo sapien
gggtctcatggacactgaccgacat

SEQ ID NO: 4591251 - DNA, 25 bp, Homo sapien
gtgctgctccgcgacttgcgggtct

SEQ ID NO: 4591252 - DNA, 25 bp, Homo sapien
gtgacgttcatggaccccgtgctgc

SEQ ID NO: 4591253 - DNA, 25 bp, Homo sapien
tctaggctgtcaacgctgatgctga

SEQ ID NO: 4591254 - DNA, 25 bp, Homo sapien
ccaagcactggccacttactggtag

SEQ ID NO: 4591255 - DNA, 25 bp, Homo sapien
tacccgctgacagagatgagagcaa

SEQ ID NO: 4591256 - DNA, 25 bp, Homo sapien
tgacaaatgcatgtgccctctgccc

SEQ ID NO: 4591257 - DNA, 25 bp, Homo sapien
tctgggtgagcctgatctagtcaat

SEQ ID NO: 4591258 - DNA, 25 bp, Homo sapien
tgttattgatgcaggtccatggatg

SEQ ID NO: 4591259 - DNA, 25 bp, Homo sapien
gtcaataagccccttaaaagcagag

SEQ ID NO: 4591260 - DNA, 25 bp, Homo sapien
ctgattcctgtgatcatgacagaga

SEQ ID NO: 4591261 - DNA, 25 bp, Homo sapien
agtgggtagtatagagcaggttctc

SEQ ID NO: 4591262 - DNA, 25 bp, Homo sapien
tgatgtattcctatatcctggtcct

SEQ ID NO: 4591263 - DNA, 25 bp, Homo sapien
ggtccttagcagagtgggtagtata

SEQ ID NO: 4591264 - DNA, 25 bp, Homo sapien
acgcccggccaactgatgtattcct

SEQ ID NO: 4591265 - DNA, 25 bp, Homo sapien
gaagtctcaccctagtcattccaga

SEQ ID NO: 4591266 - DNA, 25 bp, Homo sapien
gggacatcccaccagggaagtctca

SEQ ID NO: 4591267 - DNA, 25 bp, Homo sapien
tgctcctcaaagctcgttgtccaac

SEQ ID NO: 4591268 - DNA, 25 bp, Homo sapien
gctaatctgctgaagatctcccttg

SEQ ID NO: 4591269 - DNA, 25 bp, Homo sapien
agcctaggcgccgccaacaaactag

SEQ ID NO: 4591270 - DNA, 25 bp, Homo sapien
tccacaggcaaaaacgctctcgctg

SEQ ID NO: 4591271 - DNA, 25 bp, Homo sapien
gcagcccgcgcgagctcaacaggct

SEQ ID NO: 4591272 - DNA, 25 bp, Homo sapien
tctcgctgcgatacagcctaggcgc

SEQ ID NO: 4591273 - DNA, 25 bp, Homo sapien
caggtggaccgaccaaacaatcgta

SEQ ID NO: 4591274 - DNA, 25 bp, Homo sapien
aatcgtagacaaccgcactggtcca

SEQ ID NO: 4591275 - DNA, 25 bp, Homo sapien
gactagagggacaaaggctccaggt

SEQ ID NO: 4591276 - DNA, 25 bp, Homo sapien
tggtccaggcaagcataacaagagt

SEQ ID NO: 4591277 - DNA, 25 bp, Homo sapien
aatcatatgtatgggatgcccaagg

SEQ ID NO: 4591278 - DNA, 25 bp, Homo sapien
gggactctctgaaacaagagatagc

SEQ ID NO: 4591279 - DNA, 25 bp, Homo sapien
tcctcctatggccaccggtggaaaa

SEQ ID NO: 4591280 - DNA, 25 bp, Homo sapien
caggacaggaggtgaacgtgcatcc

SEQ ID NO: 4591281 - DNA, 25 bp, Homo sapien
ctgaggatgccgcacaagggaggac

SEQ ID NO: 4591282 - DNA, 25 bp, Homo sapien
agctggcagagcgatgatgccacct

SEQ ID NO: 4591283 - DNA, 25 bp, Homo sapien
atctgaagagggtttatgacctggg

SEQ ID NO: 4591284 - DNA, 25 bp, Homo sapien
tgtttcatctgaagagggtttatga

SEQ ID NO: 4591285 - DNA, 25 bp, Homo sapien
cagctggcagagcgatgatgccacc

SEQ ID NO: 4591286 - DNA, 25 bp, Homo sapien
gggagatgttcttccaggaaagcac

SEQ ID NO: 4591287 - DNA, 25 bp, Homo sapien
ttaagggagatgttcttccaggaaa

SEQ ID NO: 4591288 - DNA, 25 bp, Homo sapien
aagggagatgttcttccaggaaagc

SEQ ID NO: 4591289 - DNA, 25 bp, Homo sapien
ttttaagggagatgttcttccagga

SEQ ID NO: 4591290 - DNA, 25 bp, Homo sapien
aggacattctcaagaccggcctctg

SEQ ID NO: 4591291 - DNA, 25 bp, Homo sapien
gagccggtgtctacccagagaatgc

SEQ ID NO: 4591292 - DNA, 25 bp, Homo sapien
caagccctggcggtgtctatgaagc

SEQ ID NO: 4591293 - DNA, 25 bp, Homo sapien
catagctgctctaagcctgtgggca

SEQ ID NO: 4591294 - DNA, 25 bp, Homo sapien
ccttgtgcccaaattgcaggttccg

SEQ ID NO: 4591295 - DNA, 25 bp, Homo sapien
tggacaaatggtcgtgacttttttc

SEQ ID NO: 4591296 - DNA, 25 bp, Homo sapien
tctggacaaatggtcgtgacttttt

SEQ ID NO: 4591297 - DNA, 25 bp, Homo sapien
ctggacaaatggtcgtgactttttt

SEQ ID NO: 4591298 - DNA, 25 bp, Homo sapien
tgcttttcaatattcgactccccac

SEQ ID NO: 4591299 - DNA, 25 bp, Homo sapien
gcttttcaatattcgactccccaca

SEQ ID NO: 4591300 - DNA, 25 bp, Homo sapien
ttttcaatattcgactccccacatt

SEQ ID NO: 4591301 - DNA, 25 bp, Homo sapien
ttcaatattcgactccccacatttc

SEQ ID NO: 4591302 - DNA, 25 bp, Homo sapien
ctgagctctgaaacttgggaattcc

SEQ ID NO: 4591303 - DNA, 25 bp, Homo sapien
atgcagtgacctccaaccagctgag

SEQ ID NO: 4591304 - DNA, 25 bp, Homo sapien
gagctctgaaacttgggaattcctg

SEQ ID NO: 4591305 - DNA, 25 bp, Homo sapien
gcagtgacctccaaccagctgagct

SEQ ID NO: 4591306 - DNA, 25 bp, Homo sapien
tgagctgcccagtcatctgtgggag

SEQ ID NO: 4591307 - DNA, 25 bp, Homo sapien
tcccaagtgccagctgttcttttgc

SEQ ID NO: 4591308 - DNA, 25 bp, Homo sapien
ggcaggcgttccttcgtgttcccca

SEQ ID NO: 4591309 - DNA, 25 bp, Homo sapien
tgggacagttaagcctcgccaggct

SEQ ID NO: 4591310 - DNA, 25 bp, Homo sapien
tggcttccctgatgtccctgaccat

SEQ ID NO: 4591311 - DNA, 25 bp, Homo sapien
gcagacgggcaggaggaacttggag

SEQ ID NO: 4591312 - DNA, 25 bp, Homo sapien
ctggcagacgggcaggaggaacttg

SEQ ID NO: 4591313 - DNA, 25 bp, Homo sapien
cagacgggcaggaggaacttggaga

SEQ ID NO: 4591314 - DNA, 25 bp, Homo sapien
tggcagacgggcaggaggaacttgg

SEQ ID NO: 4591315 - DNA, 25 bp, Homo sapien
gggacagtggaagaaggtctgttca

SEQ ID NO: 4591316 - DNA, 25 bp, Homo sapien
aaggtctgttcagccgcttcaggtg

SEQ ID NO: 4591317 - DNA, 25 bp, Homo sapien
acttcagtgccatgaggttcctggg

SEQ ID NO: 4591318 - DNA, 25 bp, Homo sapien
ttgcacaacaaacccagtgccaact

SEQ ID NO: 4591319 - DNA, 25 bp, Homo sapien
gatccgagatccatcttggaagctc

SEQ ID NO: 4591320 - DNA, 25 bp, Homo sapien
tccttagtgtccatcagttgatccg

SEQ ID NO: 4591321 - DNA, 25 bp, Homo sapien
tgtccatcagttgatccgagatcca

SEQ ID NO: 4591322 - DNA, 25 bp, Homo sapien
tggtcattaagcactccttagtgtc

SEQ ID NO: 4591323 - DNA, 25 bp, Homo sapien
tatttgccatccgtgattcactgtg

SEQ ID NO: 4591324 - DNA, 25 bp, Homo sapien
gcttggtctgcgtgtttatttgcca

SEQ ID NO: 4591325 - DNA, 25 bp, Homo sapien
gaagactcagcaacgggcactttca

SEQ ID NO: 4591326 - DNA, 25 bp, Homo sapien
tgtggcctggtgaagactcagcaac

SEQ ID NO: 4591327 - DNA, 25 bp, Homo sapien
tgatacgcatttgggtgtctggaca

SEQ ID NO: 4591328 - DNA, 25 bp, Homo sapien
cagttcggtctgttccacgcaggag

SEQ ID NO: 4591329 - DNA, 25 bp, Homo sapien
ccttgggtctctgctacgtgatacg

SEQ ID NO: 4591330 - DNA, 25 bp, Homo sapien
tctgcctaagggtcaaaatctcgcc

SEQ ID NO: 4591331 - DNA, 25 bp, Homo sapien
gcttttgacaattttcatagcatgt

SEQ ID NO: 4591332 - DNA, 25 bp, Homo sapien
cttctgtgcttttgacaattttcat

SEQ ID NO: 4591333 - DNA, 25 bp, Homo sapien
tgtgcttttgacaattttcatagca

SEQ ID NO: 4591334 - DNA, 25 bp, Homo sapien
tctgtgcttttgacaattttcatag

SEQ ID NO: 4591335 - DNA, 25 bp, Homo sapien
ttgtgggaaatgcagtcgtttcagg

SEQ ID NO: 4591336 - DNA, 25 bp, Homo sapien
tgggaaatgcagtcgtttcaggaga

SEQ ID NO: 4591337 - DNA, 25 bp, Homo sapien
gaaatgcagtcgtttcaggagatcc

SEQ ID NO: 4591338 - DNA, 25 bp, Homo sapien
atgcagtcgtttcaggagatccacc

SEQ ID NO: 4591339 - DNA, 25 bp, Homo sapien
gcaatttggagggaaacagtggctc

SEQ ID NO: 4591340 - DNA, 25 bp, Homo sapien
tagccaaaggcaatagcctgctggg

SEQ ID NO: 4591341 - DNA, 25 bp, Homo sapien
gtagccctcacttgttcaccttgtg

SEQ ID NO: 4591342 - DNA, 25 bp, Homo sapien
ccatggggcattcttagtgcagtaa

SEQ ID NO: 4591343 - DNA, 25 bp, Homo sapien
aggaatgcaagctgtgagatgttag

SEQ ID NO: 4591344 - DNA, 25 bp, Homo sapien
gaggaatgcaagctgtgagatgtta

SEQ ID NO: 4591345 - DNA, 25 bp, Homo sapien
agatgacaagggcaaatcaggacct

SEQ ID NO: 4591346 - DNA, 25 bp, Homo sapien
gacttggaggtaccacagagatgtg

SEQ ID NO: 4591347 - DNA, 25 bp, Homo sapien
aggacctgcttcttccggtataaag

SEQ ID NO: 4591348 - DNA, 25 bp, Homo sapien
gcagagtctgcttaacttaatgctc

SEQ ID NO: 4591349 - DNA, 25 bp, Homo sapien
tgttcccaagcaccttttggtcctg

SEQ ID NO: 4591350 - DNA, 25 bp, Homo sapien
caccttttggtcctgcctggtgttc

SEQ ID NO: 4591351 - DNA, 25 bp, Homo sapien
caagcaccttttggtcctgcctggt

SEQ ID NO: 4591352 - DNA, 25 bp, Homo sapien
ctctgctgttcccaagcaccttttg

SEQ ID NO: 4591353 - DNA, 25 bp, Homo sapien
gtcagattgcggctgattcaggact

SEQ ID NO: 4591354 - DNA, 25 bp, Homo sapien
aggactgtgctttgcgcaacagagt

SEQ ID NO: 4591355 - DNA, 25 bp, Homo sapien
cttttgattctccaggtcagattgc

SEQ ID NO: 4591356 - DNA, 25 bp, Homo sapien
tgtgctttgcgcaacagagttggca

SEQ ID NO: 4591357 - DNA, 25 bp, Homo sapien
agagagtgtatcccatgaacaaggg

SEQ ID NO: 4591358 - DNA, 25 bp, Homo sapien
gcgagtcgtggtccttgtgattcca

SEQ ID NO: 4591359 - DNA, 25 bp, Homo sapien
cagtccagtgttctgcttacagcga

SEQ ID NO: 4591360 - DNA, 25 bp, Homo sapien
ggatatgattctggactggctttag

SEQ ID NO: 4591361 - DNA, 25 bp, Homo sapien
ctgcgcagggctcggagaagtaaag

SEQ ID NO: 4591362 - DNA, 25 bp, Homo sapien
aagaggattgtctattctcatcacc

SEQ ID NO: 4591363 - DNA, 25 bp, Homo sapien
catcacctgcactaagttcttctct

SEQ ID NO: 4591364 - DNA, 25 bp, Homo sapien
gctcggagaagtaaagaggattgtc

SEQ ID NO: 4591365 - DNA, 25 bp, Homo sapien
aggattctgggcattaaatccaaat

SEQ ID NO: 4591366 - DNA, 25 bp, Homo sapien
ccaggattctgggcattaaatccaa

SEQ ID NO: 4591367 - DNA, 25 bp, Homo sapien
caggattctgggcattaaatccaaa

SEQ ID NO: 4591368 - DNA, 25 bp, Homo sapien
ccatggctattttatcaatgacagc

SEQ ID NO: 4591369 - DNA, 25 bp, Homo sapien
atgaccatggctattttatcaatga

SEQ ID NO: 4591370 - DNA, 25 bp, Homo sapien
tgggccatgtttgggagtccagttt

SEQ ID NO: 4591371 - DNA, 25 bp, Homo sapien
caatgacagcatgctggggagtatg

SEQ ID NO: 4591372 - DNA, 25 bp, Homo sapien
ttggttttccaccattgtctttcag

SEQ ID NO: 4591373 - DNA, 25 bp, Homo sapien
ggaaggattggcacttggttttcca

SEQ ID NO: 4591374 - DNA, 25 bp, Homo sapien
accattgtctttcagagcctgtgac

SEQ ID NO: 4591375 - DNA, 25 bp, Homo sapien
cacatgcagggggtgaacccacttc

SEQ ID NO: 4591376 - DNA, 25 bp, Homo sapien
taggttcggtatcaccccagcctct

SEQ ID NO: 4591377 - DNA, 25 bp, Homo sapien
tactaatttcaggagaactaggttc

SEQ ID NO: 4591378 - DNA, 25 bp, Homo sapien
gagaactaggttcggtatcacccca

SEQ ID NO: 4591379 - DNA, 25 bp, Homo sapien
tcaggagaactaggttcggtatcac

SEQ ID NO: 4591380 - DNA, 25 bp, Homo sapien
cccagtgctaaatgacttatcaaag

SEQ ID NO: 4591381 - DNA, 25 bp, Homo sapien
ccatctggagccgagtgcggtcctt

SEQ ID NO: 4591382 - DNA, 25 bp, Homo sapien
ccgagtgcggtccttctgtctagaa

SEQ ID NO: 4591383 - DNA, 25 bp, Homo sapien
tcaaagaaaccaaccaggtccatct

SEQ ID NO: 4591384 - DNA, 25 bp, Homo sapien
tctcagctttctcagtttgcagagc

SEQ ID NO: 4591385 - DNA, 25 bp, Homo sapien
tgcttccatcccctggacgccccac

SEQ ID NO: 4591386 - DNA, 25 bp, Homo sapien
tttgcagagctgacttgctgcttcc

SEQ ID NO: 4591387 - DNA, 25 bp, Homo sapien
ccacctcctgttcattgctggaacc

SEQ ID NO: 4591388 - DNA, 25 bp, Homo sapien
ctttgccatctaggatgactaggtg

SEQ ID NO: 4591389 - DNA, 25 bp, Homo sapien
actttgccatctaggatgactaggt

SEQ ID NO: 4591390 - DNA, 25 bp, Homo sapien
catctaggatgactaggtgtctgtc

SEQ ID NO: 4591391 - DNA, 25 bp, Homo sapien
tgccatctaggatgactaggtgtct

SEQ ID NO: 4591392 - DNA, 25 bp, Homo sapien
ttaagtccgtgaccactgtacaagg

SEQ ID NO: 4591393 - DNA, 25 bp, Homo sapien
agtaccatctaatttcagggtaaag

SEQ ID NO: 4591394 - DNA, 25 bp, Homo sapien
tggaatgagtatcatgtcaatgcta

SEQ ID NO: 4591395 - DNA, 25 bp, Homo sapien
ctgtacaaggttctgtggaatgagt

SEQ ID NO: 4591396 - DNA, 25 bp, Homo sapien
ttagcagcattgatgttcttgaaac

SEQ ID NO: 4591397 - DNA, 25 bp, Homo sapien
tcctttacctctttagcagcattga

SEQ ID NO: 4591398 - DNA, 25 bp, Homo sapien
cagcattgatgttcttgaaacacat

SEQ ID NO: 4591399 - DNA, 25 bp, Homo sapien
ttcctttacctctttagcagcattg

SEQ ID NO: 4591400 - DNA, 25 bp, Homo sapien
tctgcaggaggcctttgctgagcag

SEQ ID NO: 4591401 - DNA, 25 bp, Homo sapien
caggatctgcaggaggcctttgctg

SEQ ID NO: 4591402 - DNA, 25 bp, Homo sapien
ctggggacatcccttccggtgtgca

SEQ ID NO: 4591403 - DNA, 25 bp, Homo sapien
gggaggacgtgctttgatttctggg

SEQ ID NO: 4591404 - DNA, 25 bp, Homo sapien
tgttcttgctcctggtaaggtcacg

SEQ ID NO: 4591405 - DNA, 25 bp, Homo sapien
attgactgttcttgctcctggtaag

SEQ ID NO: 4591406 - DNA, 25 bp, Homo sapien
ggattgactgttcttgctcctggta

SEQ ID NO: 4591407 - DNA, 25 bp, Homo sapien
ctgttcttgctcctggtaaggtcac

SEQ ID NO: 4591408 - DNA, 25 bp, Homo sapien
caagaccagccataaggaagagacc

SEQ ID NO: 4591409 - DNA, 25 bp, Homo sapien
gaccagccataaggaagagaccagg

SEQ ID NO: 4591410 - DNA, 25 bp, Homo sapien
agaccagccataaggaagagaccag

SEQ ID NO: 4591411 - DNA, 25 bp, Homo sapien
accagccataaggaagagaccaggc

SEQ ID NO: 4591412 - DNA, 25 bp, Homo sapien
tcttatgactgcagctggcattccc

SEQ ID NO: 4591413 - DNA, 25 bp, Homo sapien
aaaggtgccaccctatgggaagagc

SEQ ID NO: 4591414 - DNA, 25 bp, Homo sapien
tgcatacagctcttccaagttgtgg

SEQ ID NO: 4591415 - DNA, 25 bp, Homo sapien
gacttcctcgaagccagtgtttctc

SEQ ID NO: 4591416 - DNA, 25 bp, Homo sapien
gtgggtggcttatcaggccttgggc

SEQ ID NO: 4591417 - DNA, 25 bp, Homo sapien
tttatttccaacttcaatatatgac

SEQ ID NO: 4591418 - DNA, 25 bp, Homo sapien
ttccaacttcaatatatgacttcca

SEQ ID NO: 4591419 - DNA, 25 bp, Homo sapien
tcataacacattgtcaggagcagaa

SEQ ID NO: 4591420 - DNA, 25 bp, Homo sapien
tgaatgcgtgttcggtcagacagat

SEQ ID NO: 4591421 - DNA, 25 bp, Homo sapien
tgcgtgttcggtcagacagatgtga

SEQ ID NO: 4591422 - DNA, 25 bp, Homo sapien
gagtgaatgcgtgttcggtcagaca

SEQ ID NO: 4591423 - DNA, 25 bp, Homo sapien
ctcctgccgatggagtgaatgcgtg

SEQ ID NO: 4591424 - DNA, 25 bp, Homo sapien
gcactggaaactgagatacactctc

SEQ ID NO: 4591425 - DNA, 25 bp, Homo sapien
atagccgtgactggaacaccctggg

SEQ ID NO: 4591426 - DNA, 25 bp, Homo sapien
gggaaggttcctcacaagctgaccc

SEQ ID NO: 4591427 - DNA, 25 bp, Homo sapien
cctcacaagctgacccgatagggct

SEQ ID NO: 4591428 - DNA, 25 bp, Homo sapien
ccgcttccaggatgcacgagggtag

SEQ ID NO: 4591429 - DNA, 25 bp, Homo sapien
ggatgcacgagggtaggcgagccat

SEQ ID NO: 4591430 - DNA, 25 bp, Homo sapien
cagcaggacccgcttccaggatgca

SEQ ID NO: 4591431 - DNA, 25 bp, Homo sapien
gccaaggtgggtcgcagcaggaccc

SEQ ID NO: 4591432 - DNA, 25 bp, Homo sapien
ccatcagtggagtcattgaacttct

SEQ ID NO: 4591433 - DNA, 25 bp, Homo sapien
ctgtcttatgagcgttttcctgggg

SEQ ID NO: 4591434 - DNA, 25 bp, Homo sapien
tgtcttatgagcgttttcctggggt

SEQ ID NO: 4591435 - DNA, 25 bp, Homo sapien
cttatgagcgttttcctggggtggg

SEQ ID NO: 4591436 - DNA, 25 bp, Homo sapien
tcttatgagcgttttcctggggtgg

SEQ ID NO: 4591437 - DNA, 25 bp, Homo sapien
atccagctttactatgtaatgtaca

SEQ ID NO: 4591438 - DNA, 25 bp, Homo sapien
taaatccagctttactatgtaatgt

SEQ ID NO: 4591439 - DNA, 25 bp, Homo sapien
caggcctgatcatgcttccaaccat

SEQ ID NO: 4591440 - DNA, 25 bp, Homo sapien
ttcaggcctgatcatgcttccaacc

SEQ ID NO: 4591441 - DNA, 25 bp, Homo sapien
taacaactgcctttgctacactcct

SEQ ID NO: 4591442 - DNA, 25 bp, Homo sapien
gcctgctaaagtactgaattcagtc

SEQ ID NO: 4591443 - DNA, 25 bp, Homo sapien
ttttcaacggagtcattaacaactg

SEQ ID NO: 4591444 - DNA, 25 bp, Homo sapien
gacaatgtggctcttttggatatga

SEQ ID NO: 4591445 - DNA, 25 bp, Homo sapien
ggttcctgcaaactcacactctcag

SEQ ID NO: 4591446 - DNA, 25 bp, Homo sapien
ggctgagcctatcacccaattgttc

SEQ ID NO: 4591447 - DNA, 25 bp, Homo sapien
gcaggaacaagggtatgcttttcag

SEQ ID NO: 4591448 - DNA, 25 bp, Homo sapien
aatggttgtttgatcttcatctgcc

SEQ ID NO: 4591449 - DNA, 25 bp, Homo sapien
atggacttgtcaattgtacatgctt

SEQ ID NO: 4591450 - DNA, 25 bp, Homo sapien
agaatcattttgagggtgtctttcc

SEQ ID NO: 4591451 - DNA, 25 bp, Homo sapien
tatcttgtgaccctaatggagaatc

SEQ ID NO: 4591452 - DNA, 25 bp, Homo sapien
ttttattatcttgtgaccctaatgg

SEQ ID NO: 4591453 - DNA, 25 bp, Homo sapien
tgaccctaatggagaatcattttga

SEQ ID NO: 4591454 - DNA, 25 bp, Homo sapien
tgcaccatagatgaatcccagaaat

SEQ ID NO: 4591455 - DNA, 25 bp, Homo sapien
tcttgaactgctctaggttcccatg

SEQ ID NO: 4591456 - DNA, 25 bp, Homo sapien
cgccgtaaagagtgggaattacaga

SEQ ID NO: 4591457 - DNA, 25 bp, Homo sapien
cagaaatttccatatgcgccgtaaa

SEQ ID NO: 4591458 - DNA, 25 bp, Homo sapien
tgccccgagggagttacagcctgtg

SEQ ID NO: 4591459 - DNA, 25 bp, Homo sapien
aactttgccaagtcccgtgtggact

SEQ ID NO: 4591460 - DNA, 25 bp, Homo sapien
cttggtccgggactacactttccag

SEQ ID NO: 4591461 - DNA, 25 bp, Homo sapien
agatggctagcagctgttgctggca

SEQ ID NO: 4591462 - DNA, 25 bp, Homo sapien
ctgatccagagtgaactggaccacc

SEQ ID NO: 4591463 - DNA, 25 bp, Homo sapien
cacctggtcccggtgtctggataag

SEQ ID NO: 4591464 - DNA, 25 bp, Homo sapien
gtcccggtgtctggataagccacat

SEQ ID NO: 4591465 - DNA, 25 bp, Homo sapien
gatccagagtgaactggaccacctg

SEQ ID NO: 4591466 - DNA, 25 bp, Homo sapien
cctcctcctccctactctgggcagc

SEQ ID NO: 4591467 - DNA, 25 bp, Homo sapien
tcctcctccctactctgggcagcct

SEQ ID NO: 4591468 - DNA, 25 bp, Homo sapien
ctcctccctactctgggcagcctga

SEQ ID NO: 4591469 - DNA, 25 bp, Homo sapien
tcctccctactctgggcagcctgac

SEQ ID NO: 4591470 - DNA, 25 bp, Homo sapien
gcaagggtctgatggacattctaca

SEQ ID NO: 4591471 - DNA, 25 bp, Homo sapien
ctgatacttcagctttagggcccag

SEQ ID NO: 4591472 - DNA, 25 bp, Homo sapien
caggtctggccacggataaaacagc

SEQ ID NO: 4591473 - DNA, 25 bp, Homo sapien
cagaacccatgagcctctgggctgg

SEQ ID NO: 4591474 - DNA, 25 bp, Homo sapien
tcagcccatcctcgccacaggtttg

SEQ ID NO: 4591475 - DNA, 25 bp, Homo sapien
gctgcttcggatctctcactttaag

SEQ ID NO: 4591476 - DNA, 25 bp, Homo sapien
aaatcccctggtgttggtcagccca

SEQ ID NO: 4591477 - DNA, 25 bp, Homo sapien
cttcagcttgctgcacaggccactg

SEQ ID NO: 4591478 - DNA, 25 bp, Homo sapien
gaggagaagctagtcgctaagactc

SEQ ID NO: 4591479 - DNA, 25 bp, Homo sapien
ccccgaggatctggtttaaatgcag

SEQ ID NO: 4591480 - DNA, 25 bp, Homo sapien
ttaaatgcagtttcggacacagtag

SEQ ID NO: 4591481 - DNA, 25 bp, Homo sapien
gacgccctagcaccatactttgaga

SEQ ID NO: 4591482 - DNA, 25 bp, Homo sapien
agtcggtgggtattcacgcctgtgc

SEQ ID NO: 4591483 - DNA, 25 bp, Homo sapien
ggttgcaccgcgctgacttcacact

SEQ ID NO: 4591484 - DNA, 25 bp, Homo sapien
tccgggcagtcgtctcctgcgaggc

SEQ ID NO: 4591485 - DNA, 25 bp, Homo sapien
cctgtgccgaggtctagggttgcac

SEQ ID NO: 4591486 - DNA, 25 bp, Homo sapien
gcttaaattattgatcctcgtggga

SEQ ID NO: 4591487 - DNA, 25 bp, Homo sapien
agaggctctgggtaaaagatccgag

SEQ ID NO: 4591488 - DNA, 25 bp, Homo sapien
gaagctgacctaagtgatgctatgg

SEQ ID NO: 4591489 - DNA, 25 bp, Homo sapien
cgacgatgttgatgattgttctgct

SEQ ID NO: 4591490 - DNA, 25 bp, Homo sapien
acactctgcactgtgatatgggcac

SEQ ID NO: 4591491 - DNA, 25 bp, Homo sapien
ttggcacactctgcactgtgatatg

SEQ ID NO: 4591492 - DNA, 25 bp, Homo sapien
gtcagctttggcacactctgcactg

SEQ ID NO: 4591493 - DNA, 25 bp, Homo sapien
taagtacgtttattgaaacatgaaa

SEQ ID NO: 4591494 - DNA, 25 bp, Homo sapien
catggaacttagataacctcggctg

SEQ ID NO: 4591495 - DNA, 25 bp, Homo sapien
ctgtctggagtaagccatggaactt

SEQ ID NO: 4591496 - DNA, 25 bp, Homo sapien
gatagctgcttagatcaaaccctgg

SEQ ID NO: 4591497 - DNA, 25 bp, Homo sapien
tccaagatggcaggtgatttttagc

SEQ ID NO: 4591498 - DNA, 25 bp, Homo sapien
aaccagagttgagtcaaaaagtctc

SEQ ID NO: 4591499 - DNA, 25 bp, Homo sapien
tctcaaattgagagcagttggcatt

SEQ ID NO: 4591500 - DNA, 25 bp, Homo sapien
aattaaccagagttgagtcaaaaag

SEQ ID NO: 4591501 - DNA, 25 bp, Homo sapien
ctctcaaattgagagcagttggcat

SEQ ID NO: 4591502 - DNA, 25 bp, Homo sapien
tggaaatgcatcctcttgggtgtga

SEQ ID NO: 4591503 - DNA, 25 bp, Homo sapien
acaggcagctatgaatcaaacagac

SEQ ID NO: 4591504 - DNA, 25 bp, Homo sapien
catatttcagaaatgggtgtatgga

SEQ ID NO: 4591505 - DNA, 25 bp, Homo sapien
tgagtcccatctcctttacgccagg

SEQ ID NO: 4591506 - DNA, 25 bp, Homo sapien
acagtcagtgggttagatttggccc

SEQ ID NO: 4591507 - DNA, 25 bp, Homo sapien
ggcctttgaatcacaagcctggtgt

SEQ ID NO: 4591508 - DNA, 25 bp, Homo sapien
catagtttgttacccctggcctgaa

SEQ ID NO: 4591509 - DNA, 25 bp, Homo sapien
cggcaaactgccaagtaggaactta

SEQ ID NO: 4591510 - DNA, 25 bp, Homo sapien
ctctctgtggtggatgttctcaact

SEQ ID NO: 4591511 - DNA, 25 bp, Homo sapien
tgttctcaactcccagggtgccctt

SEQ ID NO: 4591512 - DNA, 25 bp, Homo sapien
ctgtggtggatgttctcaactccca

SEQ ID NO: 4591513 - DNA, 25 bp, Homo sapien
tctctgtggtggatgttctcaactc

SEQ ID NO: 4591514 - DNA, 25 bp, Homo sapien
ccttgttgagctatgttgacagata

SEQ ID NO: 4591515 - DNA, 25 bp, Homo sapien
gcagtcacctaagctaagtaaccag

SEQ ID NO: 4591516 - DNA, 25 bp, Homo sapien
tagatgatctattcgaagtgtaata

SEQ ID NO: 4591517 - DNA, 25 bp, Homo sapien
caatcacccaatgttgagactctgg

SEQ ID NO: 4591518 - DNA, 25 bp, Homo sapien
ctttgatgtattcctgaggctggag

SEQ ID NO: 4591519 - DNA, 25 bp, Homo sapien
gagccatctcctaactccctgctgg

SEQ ID NO: 4591520 - DNA, 25 bp, Homo sapien
gttgaactatatgagtgacacacgc

SEQ ID NO: 4591521 - DNA, 25 bp, Homo sapien
ggctagtggatctcaggacaaacat

SEQ ID NO: 4591522 - DNA, 25 bp, Homo sapien
ctttcttacaagcttaggaagctct

SEQ ID NO: 4591523 - DNA, 25 bp, Homo sapien
agaatcactttcttacaagcttagg

SEQ ID NO: 4591524 - DNA, 25 bp, Homo sapien
tcactttcttacaagcttaggaagc

SEQ ID NO: 4591525 - DNA, 25 bp, Homo sapien
agctcttcagagtgcaattcaccat

SEQ ID NO: 4591526 - DNA, 25 bp, Homo sapien
cagtgaggcgagaaacgggaggagg

SEQ ID NO: 4591527 - DNA, 25 bp, Homo sapien
tttctgttgttgggtagggctcagt

SEQ ID NO: 4591528 - DNA, 25 bp, Homo sapien
agtgaggcgagaaacgggaggagga

SEQ ID NO: 4591529 - DNA, 25 bp, Homo sapien
tttttctgttgttgggtagggctca

SEQ ID NO: 4591530 - DNA, 25 bp, Homo sapien
tgtgctcgtgatcgtgggaccttcc

SEQ ID NO: 4591531 - DNA, 25 bp, Homo sapien
tcgtgatcgtgggaccttcctgtta

SEQ ID NO: 4591532 - DNA, 25 bp, Homo sapien
tgatcgtgggaccttcctgttatga

SEQ ID NO: 4591533 - DNA, 25 bp, Homo sapien
tcgtgggaccttcctgttatgatgc

SEQ ID NO: 4591534 - DNA, 25 bp, Homo sapien
tagcagtaacttagctatccacaaa

SEQ ID NO: 4591535 - DNA, 25 bp, Homo sapien
gctagcagtaacttagctatccaca

SEQ ID NO: 4591536 - DNA, 25 bp, Homo sapien
cagtaacttagctatccacaaaagt

SEQ ID NO: 4591537 - DNA, 25 bp, Homo sapien
gcagtaacttagctatccacaaaag

SEQ ID NO: 4591538 - DNA, 25 bp, Homo sapien
ttgagctgggacattggacacttac

SEQ ID NO: 4591539 - DNA, 25 bp, Homo sapien
cttgagctgggacattggacactta

SEQ ID NO: 4591540 - DNA, 25 bp, Homo sapien
ttctctggccttcacactatgggac

SEQ ID NO: 4591541 - DNA, 25 bp, Homo sapien
acttacacaagcagagcaaccccta

SEQ ID NO: 4591542 - DNA, 25 bp, Homo sapien
tggttctctggccttcacactatgg

SEQ ID NO: 4591543 - DNA, 25 bp, Homo sapien
cacactatgggacttacacaagcag

SEQ ID NO: 4591544 - DNA, 25 bp, Homo sapien
ctccatcctgatgtgatgcatgatt

SEQ ID NO: 4591545 - DNA, 25 bp, Homo sapien
tccatcctgatgtgatgcatgatta

SEQ ID NO: 4591546 - DNA, 25 bp, Homo sapien
ccatcctgatgtgatgcatgattac

SEQ ID NO: 4591547 - DNA, 25 bp, Homo sapien
ccttgagaacaccccgggctctggg

SEQ ID NO: 4591548 - DNA, 25 bp, Homo sapien
ctgccttgagaacaccccgggctct

SEQ ID NO: 4591549 - DNA, 25 bp, Homo sapien
gctgctgggaatccccgctaaaatt

SEQ ID NO: 4591550 - DNA, 25 bp, Homo sapien
tgagaacaccccgggctctgggatg

SEQ ID NO: 4591551 - DNA, 25 bp, Homo sapien
gcaaactctcatttgaggtgctggg

SEQ ID NO: 4591552 - DNA, 25 bp, Homo sapien
ggagccctagttcatcttgtctttc

SEQ ID NO: 4591553 - DNA, 25 bp, Homo sapien
taaaagcaaactctcatttgaggtg

SEQ ID NO: 4591554 - DNA, 25 bp, Homo sapien
tggggagccctagttcatcttgtct

SEQ ID NO: 4591555 - DNA, 25 bp, Homo sapien
acactgttggccctctgcgaatcag

SEQ ID NO: 4591556 - DNA, 25 bp, Homo sapien
acgtacactgttggccctctgcgaa

SEQ ID NO: 4591557 - DNA, 25 bp, Homo sapien
agaactctgcagcaccacgtacact

SEQ ID NO: 4591558 - DNA, 25 bp, Homo sapien
tgcagcaccacgtacactgttggcc

SEQ ID NO: 4591559 - DNA, 25 bp, Homo sapien
tgttttgcagctgcgttgagaactc

SEQ ID NO: 4591560 - DNA, 25 bp, Homo sapien
tgcgttgagaactcccattctgctg

SEQ ID NO: 4591561 - DNA, 25 bp, Homo sapien
gagaactcccattctgctggcatcc

SEQ ID NO: 4591562 - DNA, 25 bp, Homo sapien
tgcagctgcgttgagaactcccatt

SEQ ID NO: 4591563 - DNA, 25 bp, Homo sapien
ttgcattgacaacgcaggacccagt

SEQ ID NO: 4591564 - DNA, 25 bp, Homo sapien
tcttggtggtgaagtaccacttgca

SEQ ID NO: 4591565 - DNA, 25 bp, Homo sapien
agtaccacttgcattgacaacgcag

SEQ ID NO: 4591566 - DNA, 25 bp, Homo sapien
gcttcactgtgggccggtggcactt

SEQ ID NO: 4591567 - DNA, 25 bp, Homo sapien
tctgctttctgttggtgagtaggcc

SEQ ID NO: 4591568 - DNA, 25 bp, Homo sapien
atcctcaaggtcctcggagatctgc

SEQ ID NO: 4591569 - DNA, 25 bp, Homo sapien
tccagtggtaagtgactctattgtg

SEQ ID NO: 4591570 - DNA, 25 bp, Homo sapien
tggtaagtgactctattgtggctct

SEQ ID NO: 4591571 - DNA, 25 bp, Homo sapien
gtggtaagtgactctattgtggctc

SEQ ID NO: 4591572 - DNA, 25 bp, Homo sapien
cagtggtaagtgactctattgtggc

SEQ ID NO: 4591573 - DNA, 25 bp, Homo sapien
tgaacaccagagagcattagggaaa

SEQ ID NO: 4591574 - DNA, 25 bp, Homo sapien
caccagagagcattagggaaaggct

SEQ ID NO: 4591575 - DNA, 25 bp, Homo sapien
ctatctcccgtatattgacctgaac

SEQ ID NO: 4591576 - DNA, 25 bp, Homo sapien
tgagtagatttgcatacacccatct

SEQ ID NO: 4591577 - DNA, 25 bp, Homo sapien
gtaacatttccatgcccaaccatga

SEQ ID NO: 4591578 - DNA, 25 bp, Homo sapien
aatcttagcctcatattccacctga

SEQ ID NO: 4591579 - DNA, 25 bp, Homo sapien
tgcatctcagcgtcaatcttagcct

SEQ ID NO: 4591580 - DNA, 25 bp, Homo sapien
ttctcttgggtcactacagttatgc

SEQ ID NO: 4591581 - DNA, 25 bp, Homo sapien
ggagagaactcattctgagagactg

SEQ ID NO: 4591582 - DNA, 25 bp, Homo sapien
tcccaagagctctattgcatgaggg

SEQ ID NO: 4591583 - DNA, 25 bp, Homo sapien
ctctattgcatgagggaatgaggtg

SEQ ID NO: 4591584 - DNA, 25 bp, Homo sapien
tgagagactgcgaagcagcagccac

SEQ ID NO: 4591585 - DNA, 25 bp, Homo sapien
caggaagtgttttgctcaagaccat

SEQ ID NO: 4591586 - DNA, 25 bp, Homo sapien
tgccccaaggacacaggaagtcagg

SEQ ID NO: 4591587 - DNA, 25 bp, Homo sapien
aggaagtcaggaagtgttttgctca

SEQ ID NO: 4591588 - DNA, 25 bp, Homo sapien
tcattttctctggagctgccccaag

SEQ ID NO: 4591589 - DNA, 25 bp, Homo sapien
catttaagctgttggcattcatcaa

SEQ ID NO: 4591590 - DNA, 25 bp, Homo sapien
ctctaccaacataggcttcatcaga

SEQ ID NO: 4591591 - DNA, 25 bp, Homo sapien
tctccatttaagctgttggcattca

SEQ ID NO: 4591592 - DNA, 25 bp, Homo sapien
tcaatactctcagatgtctctacca

SEQ ID NO: 4591593 - DNA, 25 bp, Homo sapien
tctgggataggggatttctccagtg

SEQ ID NO: 4591594 - DNA, 25 bp, Homo sapien
tgtccgatctctggctatcagagag

SEQ ID NO: 4591595 - DNA, 25 bp, Homo sapien
tccagtgtttactggtgcctctgtc

SEQ ID NO: 4591596 - DNA, 25 bp, Homo sapien
accttgagttcttgtttctctggga

SEQ ID NO: 4591597 - DNA, 25 bp, Homo sapien
cccgtgattgatgaggattcctgca

SEQ ID NO: 4591598 - DNA, 25 bp, Homo sapien
cctgctgagtgttcgtaaccaaacc

SEQ ID NO: 4591599 - DNA, 25 bp, Homo sapien
aaaaatggacgagctccatcctggg

SEQ ID NO: 4591600 - DNA, 25 bp, Homo sapien
taaccaaaccagtctgagatctggg

SEQ ID NO: 4591601 - DNA, 25 bp, Homo sapien
tgaagggtggctatttctctccact

SEQ ID NO: 4591602 - DNA, 25 bp, Homo sapien
ggcagcattgctgaaatccagtaag

SEQ ID NO: 4591603 - DNA, 25 bp, Homo sapien
ggcagccactgaagttttggcagca

SEQ ID NO: 4591604 - DNA, 25 bp, Homo sapien
cagtaagcacctcttttgaagggtg

SEQ ID NO: 4591605 - DNA, 25 bp, Homo sapien
gaaagcaggaaggtagatcttggga

SEQ ID NO: 4591606 - DNA, 25 bp, Homo sapien
acgccagcatctccagtggttccaa

SEQ ID NO: 4591607 - DNA, 25 bp, Homo sapien
tgtgtgcaagtagccacgccagcat

SEQ ID NO: 4591608 - DNA, 25 bp, Homo sapien
acttctgagtctgtgtgcaagtagc

SEQ ID NO: 4591609 - DNA, 25 bp, Homo sapien
tatcattatgacatagaagtgcctc

SEQ ID NO: 4591610 - DNA, 25 bp, Homo sapien
aaagtggatgtgtgtaagtctgagc

SEQ ID NO: 4591611 - DNA, 25 bp, Homo sapien
ttaagaagaggacttgaaacatgca

SEQ ID NO: 4591612 - DNA, 25 bp, Homo sapien
tgcaaaggcccttaaataatctggc

SEQ ID NO: 4591613 - DNA, 25 bp, Homo sapien
tgagtcccattttagtttggagagc

SEQ ID NO: 4591614 - DNA, 25 bp, Homo sapien
gctatatctctggaagatgcttcat

SEQ ID NO: 4591615 - DNA, 25 bp, Homo sapien
aacattgtcttgactgtcctcatga

SEQ ID NO: 4591616 - DNA, 25 bp, Homo sapien
tttagcctggagaaagttgagtccc

SEQ ID NO: 4591617 - DNA, 25 bp, Homo sapien
gaaaacagctccatcatcacaggct

SEQ ID NO: 4591618 - DNA, 25 bp, Homo sapien
tgtttctctttcaggatccttgcac

SEQ ID NO: 4591619 - DNA, 25 bp, Homo sapien
caggattcttatacccaaggaataa

SEQ ID NO: 4591620 - DNA, 25 bp, Homo sapien
ctcaagtggtatgagtctcctcacg

SEQ ID NO: 4591621 - DNA, 25 bp, Homo sapien
cattcgcccaggcaaagttgtagaa

SEQ ID NO: 4591622 - DNA, 25 bp, Homo sapien
gattgtcaatagcagcctctcgagg

SEQ ID NO: 4591623 - DNA, 25 bp, Homo sapien
gaaaggaagttgtttggccagacag

SEQ ID NO: 4591624 - DNA, 25 bp, Homo sapien
gaaaaccgatgtgaatgatgtggca

SEQ ID NO: 4591625 - DNA, 25 bp, Homo sapien
aataatgctcttcctgtctgactag

SEQ ID NO: 4591626 - DNA, 25 bp, Homo sapien
ggtcccttgactttctgcaggccac

SEQ ID NO: 4591627 - DNA, 25 bp, Homo sapien
gtgggtcccttgactttctgcaggc

SEQ ID NO: 4591628 - DNA, 25 bp, Homo sapien
tgctcttcctgtctgactagatttt

SEQ ID NO: 4591629 - DNA, 25 bp, Homo sapien
gggctatgagccgtcctgtgaacaa

SEQ ID NO: 4591630 - DNA, 25 bp, Homo sapien
gatctcagttgagcactcggtcttg

SEQ ID NO: 4591631 - DNA, 25 bp, Homo sapien
gctgatagcactcgtctgagctctg

SEQ ID NO: 4591632 - DNA, 25 bp, Homo sapien
gaagcttgaactgggactttcaggg

SEQ ID NO: 4591633 - DNA, 25 bp, Homo sapien
ggccgccagtctagcattatcccct

SEQ ID NO: 4591634 - DNA, 25 bp, Homo sapien
agtctagcattatcccctcttgcca

SEQ ID NO: 4591635 - DNA, 25 bp, Homo sapien
gccagtctagcattatcccctcttg

SEQ ID NO: 4591636 - DNA, 25 bp, Homo sapien
gtctagcattatcccctcttgccat

SEQ ID NO: 4591637 - DNA, 25 bp, Homo sapien
gactcagcacagatcccatgctgca

SEQ ID NO: 4591638 - DNA, 25 bp, Homo sapien
gatggactcagcacagatcccatgc

SEQ ID NO: 4591639 - DNA, 25 bp, Homo sapien
tggactcagcacagatcccatgctg

SEQ ID NO: 4591640 - DNA, 25 bp, Homo sapien
cccatgtgtttgatgatcttctgag

SEQ ID NO: 4591641 - DNA, 25 bp, Homo sapien
tgcatactgcctatgtggctgacct

SEQ ID NO: 4591642 - DNA, 25 bp, Homo sapien
aaccagggaagctcatccagtcctt

SEQ ID NO: 4591643 - DNA, 25 bp, Homo sapien
cctgtggaatcctggttggcattac

SEQ ID NO: 4591644 - DNA, 25 bp, Homo sapien
cactgccatgatgtgtgataacagg

SEQ ID NO: 4591645 - DNA, 25 bp, Homo sapien
cctgccgttcttcgctgacgtgtaa

SEQ ID NO: 4591646 - DNA, 25 bp, Homo sapien
gccgttcttcgctgacgtgtaaggg

SEQ ID NO: 4591647 - DNA, 25 bp, Homo sapien
ttttccctgccgttcttcgctgacg

SEQ ID NO: 4591648 - DNA, 25 bp, Homo sapien
gttcttcgctgacgtgtaagggcat

SEQ ID NO: 4591649 - DNA, 25 bp, Homo sapien
tgcacattccctgtatgcctatggg

SEQ ID NO: 4591650 - DNA, 25 bp, Homo sapien
catgtgggggaatgattccctttcc

SEQ ID NO: 4591651 - DNA, 25 bp, Homo sapien
cctgtatgcctatgggtgtgagttt

SEQ ID NO: 4591652 - DNA, 25 bp, Homo sapien
catgattcgctggtccacatttggc

SEQ ID NO: 4591653 - DNA, 25 bp, Homo sapien
tacacagaaggcgtcaggagcttga

SEQ ID NO: 4591654 - DNA, 25 bp, Homo sapien
ggcgtcaggagcttgaggactccat

SEQ ID NO: 4591655 - DNA, 25 bp, Homo sapien
caccatcgcctgcatacacagaagg

SEQ ID NO: 4591656 - DNA, 25 bp, Homo sapien
gcctgcatacacagaaggcgtcagg

SEQ ID NO: 4591657 - DNA, 25 bp, Homo sapien
aggggtcaagaacaatcacactggc

SEQ ID NO: 4591658 - DNA, 25 bp, Homo sapien
tcaagaacaatcacactggcactca

SEQ ID NO: 4591659 - DNA, 25 bp, Homo sapien
gggtcaagaacaatcacactggcac

SEQ ID NO: 4591660 - DNA, 25 bp, Homo sapien
gacaggggtcaagaacaatcacact

SEQ ID NO: 4591661 - DNA, 25 bp, Homo sapien
ctgctttagtgctgaaataggtttg

SEQ ID NO: 4591662 - DNA, 25 bp, Homo sapien
aatcaggttaatgaagacctgctgc

SEQ ID NO: 4591663 - DNA, 25 bp, Homo sapien
caggttaatgaagacctgctgcttt

SEQ ID NO: 4591664 - DNA, 25 bp, Homo sapien
tttccaatcaggttaatgaagacct

SEQ ID NO: 4591665 - DNA, 25 bp, Homo sapien
tatctatccgtgaagagccattctt

SEQ ID NO: 4591666 - DNA, 25 bp, Homo sapien
ttatctatccgtgaagagccattct

SEQ ID NO: 4591667 - DNA, 25 bp, Homo sapien
ccagtgcaacatctggcttgagcag

SEQ ID NO: 4591668 - DNA, 25 bp, Homo sapien
tctctcccctcaagcaagtaacaag

SEQ ID NO: 4591669 - DNA, 25 bp, Homo sapien
gaaagaggaagtatactttctctcc

SEQ ID NO: 4591670 - DNA, 25 bp, Homo sapien
caagtaacaagtgtgtgtaattgag

SEQ ID NO: 4591671 - DNA, 25 bp, Homo sapien
ctgtaattgcaagaaggcacagact

SEQ ID NO: 4591672 - DNA, 25 bp, Homo sapien
caagaaggcacagactttgggagaa

SEQ ID NO: 4591673 - DNA, 25 bp, Homo sapien
attgcaagaaggcacagactttggg

SEQ ID NO: 4591674 - DNA, 25 bp, Homo sapien
ctttgggagaaaccatgaggggaag

SEQ ID NO: 4591675 - DNA, 25 bp, Homo sapien
cttttctactcagccccaaatttgg

SEQ ID NO: 4591676 - DNA, 25 bp, Homo sapien
ggtttccagtcatattggcccacag

SEQ ID NO: 4591677 - DNA, 25 bp, Homo sapien
taagagcactaaacatcattaactc

SEQ ID NO: 4591678 - DNA, 25 bp, Homo sapien
cattaactcatcctgaacttttcta

SEQ ID NO: 4591679 - DNA, 25 bp, Homo sapien
gacccagctccagtcttgtaaatct

SEQ ID NO: 4591680 - DNA, 25 bp, Homo sapien
tttgcttctcattaggagctgaccc

SEQ ID NO: 4591681 - DNA, 25 bp, Homo sapien
ccccgagattgctgccaaaatgtga

SEQ ID NO: 4591682 - DNA, 25 bp, Homo sapien
tccagctcccaaactatgtttgctt

SEQ ID NO: 4591683 - DNA, 25 bp, Homo sapien
agtcttcatagcagaagggctgcag

SEQ ID NO: 4591684 - DNA, 25 bp, Homo sapien
cttcatagcagaagggctgcaggag

SEQ ID NO: 4591685 - DNA, 25 bp, Homo sapien
ctagtcttcatagcagaagggctgc

SEQ ID NO: 4591686 - DNA, 25 bp, Homo sapien
tcttcatagcagaagggctgcagga

SEQ ID NO: 4591687 - DNA, 25 bp, Homo sapien
cataaagtgcttcggagggcccatt

SEQ ID NO: 4591688 - DNA, 25 bp, Homo sapien
cagctatgacgtcccgctgagccat

SEQ ID NO: 4591689 - DNA, 25 bp, Homo sapien
ttcccacaaggcagctatgacgtcc

SEQ ID NO: 4591690 - DNA, 25 bp, Homo sapien
aacagctcaacataaagtgcttcgg

SEQ ID NO: 4591691 - DNA, 25 bp, Homo sapien
ggcatactggttcttccttcatttc

SEQ ID NO: 4591692 - DNA, 25 bp, Homo sapien
tctccctttcgcaggcatactggtt

SEQ ID NO: 4591693 - DNA, 25 bp, Homo sapien
gacatctcagtccttgtgacgttgg

SEQ ID NO: 4591694 - DNA, 25 bp, Homo sapien
gaacccttgacgctcactgacatct

SEQ ID NO: 4591695 - DNA, 25 bp, Homo sapien
taaggatttccagacattggctgca

SEQ ID NO: 4591696 - DNA, 25 bp, Homo sapien
gaccctttagttaggactagtgctg

SEQ ID NO: 4591697 - DNA, 25 bp, Homo sapien
ctagtgctgctgattgactcttcga

SEQ ID NO: 4591698 - DNA, 25 bp, Homo sapien
cagctggtggcttctattcagtgac

SEQ ID NO: 4591699 - DNA, 25 bp, Homo sapien
cactgagcggggaagatttgaacag

SEQ ID NO: 4591700 - DNA, 25 bp, Homo sapien
caatggctttctcccagtgctcatc

SEQ ID NO: 4591701 - DNA, 25 bp, Homo sapien
tcactgagcggggaagatttgaaca

SEQ ID NO: 4591702 - DNA, 25 bp, Homo sapien
tgagcagcattggccgaagtcccgt

SEQ ID NO: 4591703 - DNA, 25 bp, Homo sapien
ggccgaagtcccgtggtgagtcact

SEQ ID NO: 4591704 - DNA, 25 bp, Homo sapien
cattggccgaagtcccgtggtgagt

SEQ ID NO: 4591705 - DNA, 25 bp, Homo sapien
cgaagtcccgtggtgagtcacttcc

SEQ ID NO: 4591706 - DNA, 25 bp, Homo sapien
cggaagagacttgtgcatgtctgaa

SEQ ID NO: 4591707 - DNA, 25 bp, Homo sapien
tggaaataggtgaaagcaagaaata

SEQ ID NO: 4591708 - DNA, 25 bp, Homo sapien
cagaggcttccgatgaagacacgga

SEQ ID NO: 4591709 - DNA, 25 bp, Homo sapien
gggccacagggactaattttgccat

SEQ ID NO: 4591710 - DNA, 25 bp, Homo sapien
ggagagtggaaaaacgcaagaccac

SEQ ID NO: 4591711 - DNA, 25 bp, Homo sapien
agagtggaaaaacgcaagaccactc

SEQ ID NO: 4591712 - DNA, 25 bp, Homo sapien
gagagtggaaaaacgcaagaccact

SEQ ID NO: 4591713 - DNA, 25 bp, Homo sapien
tcaaatacgcgaattgagagttttg

SEQ ID NO: 4591714 - DNA, 25 bp, Homo sapien
aatacgcgaattgagagttttgtta

SEQ ID NO: 4591715 - DNA, 25 bp, Homo sapien
tttcaaatacgcgaattgagagttt

SEQ ID NO: 4591716 - DNA, 25 bp, Homo sapien
tacgcgaattgagagttttgttata

SEQ ID NO: 4591717 - DNA, 25 bp, Homo sapien
aatctattcaagtcacagtaatgcc

SEQ ID NO: 4591718 - DNA, 25 bp, Homo sapien
caagggctcctttaataacacaaat

SEQ ID NO: 4591719 - DNA, 25 bp, Homo sapien
tgtgggaccttcctgcagtgcatcc

SEQ ID NO: 4591720 - DNA, 25 bp, Homo sapien
tgtgtctcgataaaatccacctcat

SEQ ID NO: 4591721 - DNA, 25 bp, Homo sapien
tcatcccctggcagtatgggatggg

SEQ ID NO: 4591722 - DNA, 25 bp, Homo sapien
ccctggcagtatgggatgggtttac

SEQ ID NO: 4591723 - DNA, 25 bp, Homo sapien
tacagaaggcaccttaggtggattg

SEQ ID NO: 4591724 - DNA, 25 bp, Homo sapien
gattaggagagatccctgtagcctg

SEQ ID NO: 4591725 - DNA, 25 bp, Homo sapien
tagacttgacttgcaattgtagatg

SEQ ID NO: 4591726 - DNA, 25 bp, Homo sapien
acatgttgttgggtgtagacttgac

SEQ ID NO: 4591727 - DNA, 25 bp, Homo sapien
ctgctgacatgttgttgggtgtaga

SEQ ID NO: 4591728 - DNA, 25 bp, Homo sapien
tgggtgtagacttgacttgcaattg

SEQ ID NO: 4591729 - DNA, 25 bp, Homo sapien
tgagagctcttcaggagtaggtttg

SEQ ID NO: 4591730 - DNA, 25 bp, Homo sapien
tgggaacacatctgagagctcttca

SEQ ID NO: 4591731 - DNA, 25 bp, Homo sapien
tcttcaggagtaggtttgatgcagg

SEQ ID NO: 4591732 - DNA, 25 bp, Homo sapien
gaggaatgggatatgggaacacatc

SEQ ID NO: 4591733 - DNA, 25 bp, Homo sapien
ctcttggtctaacggaggggatcga

SEQ ID NO: 4591734 - DNA, 25 bp, Homo sapien
ttggtctaacggaggggatcgacat

SEQ ID NO: 4591735 - DNA, 25 bp, Homo sapien
ggctcttggtctaacggaggggatc

SEQ ID NO: 4591736 - DNA, 25 bp, Homo sapien
cttggtctaacggaggggatcgaca

SEQ ID NO: 4591737 - DNA, 25 bp, Homo sapien
tctttggacttggtggatggccaca

SEQ ID NO: 4591738 - DNA, 25 bp, Homo sapien
tgttgaggaccaagcagttgctctg

SEQ ID NO: 4591739 - DNA, 25 bp, Homo sapien
tcttcacatgcagcttcagtgtcta

SEQ ID NO: 4591740 - DNA, 25 bp, Homo sapien
taatccgaatagagagcttgcctta

SEQ ID NO: 4591741 - DNA, 25 bp, Homo sapien
tttgctgaatggatggtgtgtgtac

SEQ ID NO: 4591742 - DNA, 25 bp, Homo sapien
ctataaccaggctgcaaactccttg

SEQ ID NO: 4591743 - DNA, 25 bp, Homo sapien
ccaacagcatatgtgggaccgaggt

SEQ ID NO: 4591744 - DNA, 25 bp, Homo sapien
aactccttgaaagcttgtccttatc

SEQ ID NO: 4591745 - DNA, 25 bp, Homo sapien
cctctagcacatcttttatgcacca

SEQ ID NO: 4591746 - DNA, 25 bp, Homo sapien
gtaatactctatatacatgtcatag

SEQ ID NO: 4591747 - DNA, 25 bp, Homo sapien
taatgtgtctgaaagtgcaatgtaa

SEQ ID NO: 4591748 - DNA, 25 bp, Homo sapien
tgtctgaaagtgcaatgtaaattgt

SEQ ID NO: 4591749 - DNA, 25 bp, Homo sapien
tttttataaaccgtgcacttgagcc

SEQ ID NO: 4591750 - DNA, 25 bp, Homo sapien
tgatgagcagcgcacaatctatagc

SEQ ID NO: 4591751 - DNA, 25 bp, Homo sapien
agcgcacaatctatagctgcttggt

SEQ ID NO: 4591752 - DNA, 25 bp, Homo sapien
gacatcggatataaaccacagtgat

SEQ ID NO: 4591753 - DNA, 25 bp, Homo sapien
catggaagagggttaaatgtactca

SEQ ID NO: 4591754 - DNA, 25 bp, Homo sapien
gcctccttagctaacatgagaaggg

SEQ ID NO: 4591755 - DNA, 25 bp, Homo sapien
ctccaccaaaaggaattccacatct

SEQ ID NO: 4591756 - DNA, 25 bp, Homo sapien
gagaagggtctgttcttttacctga

SEQ ID NO: 4591757 - DNA, 25 bp, Homo sapien
ctccccagccctccatcttgcctca

SEQ ID NO: 4591758 - DNA, 25 bp, Homo sapien
cagccctccatcttgcctcagccat

SEQ ID NO: 4591759 - DNA, 25 bp, Homo sapien
tccccagccctccatcttgcctcag

SEQ ID NO: 4591760 - DNA, 25 bp, Homo sapien
cccagccctccatcttgcctcagcc

SEQ ID NO: 4591761 - DNA, 25 bp, Homo sapien
cttcctcgtttctcagtgtgatttc

SEQ ID NO: 4591762 - DNA, 25 bp, Homo sapien
tgctaatatgctcactgtctaccat

SEQ ID NO: 4591763 - DNA, 25 bp, Homo sapien
tcgtttctcagtgtgatttcttttg

SEQ ID NO: 4591764 - DNA, 25 bp, Homo sapien
ttcttttgctaatatgctcactgtc

SEQ ID NO: 4591765 - DNA, 25 bp, Homo sapien
tctcgtcgctctgagaatgtcgcat

SEQ ID NO: 4591766 - DNA, 25 bp, Homo sapien
caagtcactctcgtcgctctgagaa

SEQ ID NO: 4591767 - DNA, 25 bp, Homo sapien
agtcactctcgtcgctctgagaatg

SEQ ID NO: 4591768 - DNA, 25 bp, Homo sapien
cactctcgtcgctctgagaatgtcg

SEQ ID NO: 4591769 - DNA, 25 bp, Homo sapien
taaaatataagcaagagtgtgctgg

SEQ ID NO: 4591770 - DNA, 25 bp, Homo sapien
ctgtctcttttaaggagggtgaaca

SEQ ID NO: 4591771 - DNA, 25 bp, Homo sapien
ccagcgcatagtaaagctggaggtg

SEQ ID NO: 4591772 - DNA, 25 bp, Homo sapien
tgaacaggctgaaacattgagtgac

SEQ ID NO: 4591773 - DNA, 25 bp, Homo sapien
tccccattctaccacgatgtaaagg

SEQ ID NO: 4591774 - DNA, 25 bp, Homo sapien
taggcttcattgcttccccattcta

SEQ ID NO: 4591775 - DNA, 25 bp, Homo sapien
attgcttccccattctaccacgatg

SEQ ID NO: 4591776 - DNA, 25 bp, Homo sapien
cattctaccacgatgtaaagggtcc

SEQ ID NO: 4591777 - DNA, 25 bp, Homo sapien
tgcaaacctctgttgatctgcggag

SEQ ID NO: 4591778 - DNA, 25 bp, Homo sapien
gaaaccattgatctctctcgagaag

SEQ ID NO: 4591779 - DNA, 25 bp, Homo sapien
ggtgtgaattcagtgctagacccag

SEQ ID NO: 4591780 - DNA, 25 bp, Homo sapien
gacccaggtgccagattggtgtcat

SEQ ID NO: 4591781 - DNA, 25 bp, Homo sapien
ccgtagacgtactgctgtttgctga

SEQ ID NO: 4591782 - DNA, 25 bp, Homo sapien
tatgtctttccgtagacgtactgct

SEQ ID NO: 4591783 - DNA, 25 bp, Homo sapien
aatagagtatgtctttccgtagacg

SEQ ID NO: 4591784 - DNA, 25 bp, Homo sapien
ggaagacaaggtaatagagtatgtc

SEQ ID NO: 4591785 - DNA, 25 bp, Homo sapien
tcccagtaagggcctcccctctgcc

SEQ ID NO: 4591786 - DNA, 25 bp, Homo sapien
caccacactgtagcccaagagagtt

SEQ ID NO: 4591787 - DNA, 25 bp, Homo sapien
cacactgtagcccaagagagttttc

SEQ ID NO: 4591788 - DNA, 25 bp, Homo sapien
tccctgaagtctgttcaccacactg

SEQ ID NO: 4591789 - DNA, 25 bp, Homo sapien
ctggttatgtttcgctcttattgac

SEQ ID NO: 4591790 - DNA, 25 bp, Homo sapien
tccttcttcacatgacttatgcatg

SEQ ID NO: 4591791 - DNA, 25 bp, Homo sapien
tattgacaagatgaagtagactcct

SEQ ID NO: 4591792 - DNA, 25 bp, Homo sapien
gcatgaccttgtaagaaatggttgt

SEQ ID NO: 4591793 - DNA, 25 bp, Homo sapien
ttaaggatgacagccttctcccacc

SEQ ID NO: 4591794 - DNA, 25 bp, Homo sapien
tcccacctccaaagaatagatacct

SEQ ID NO: 4591795 - DNA, 25 bp, Homo sapien
gaatgcaggagcacaggaactcagc

SEQ ID NO: 4591796 - DNA, 25 bp, Homo sapien
gagatgcaggcagattcttccatgt

SEQ ID NO: 4591797 - DNA, 25 bp, Homo sapien
ccaatgatgaggcaccaggtacgtt

SEQ ID NO: 4591798 - DNA, 25 bp, Homo sapien
gaggcaccaggtacgtttttatgtc

SEQ ID NO: 4591799 - DNA, 25 bp, Homo sapien
tcttgctgtgttagccaaggactct

SEQ ID NO: 4591800 - DNA, 25 bp, Homo sapien
tagccaaggactctgaccaatgatg

SEQ ID NO: 4591801 - DNA, 25 bp, Homo sapien
ctctctagcacaggacatcttgctt

SEQ ID NO: 4591802 - DNA, 25 bp, Homo sapien
ctgacttctctctagcacaggacat

SEQ ID NO: 4591803 - DNA, 25 bp, Homo sapien
ttctctctagcacaggacatcttgc

SEQ ID NO: 4591804 - DNA, 25 bp, Homo sapien
gacttctctctagcacaggacatct

SEQ ID NO: 4591805 - DNA, 25 bp, Homo sapien
tgtaaatggacctatgtaaaaacca

SEQ ID NO: 4591806 - DNA, 25 bp, Homo sapien
gatggaggtgcattacggaaaaaca

SEQ ID NO: 4591807 - DNA, 25 bp, Homo sapien
aaatgatcgataacttggccagcca

SEQ ID NO: 4591808 - DNA, 25 bp, Homo sapien
cagagagatgtctttgctgcttgct

SEQ ID NO: 4591809 - DNA, 25 bp, Homo sapien
tgcaggagagcttagacccaaggta

SEQ ID NO: 4591810 - DNA, 25 bp, Homo sapien
cattgtccagtttgactgatgccct

SEQ ID NO: 4591811 - DNA, 25 bp, Homo sapien
gcttagacccaaggtatctgagtcc

SEQ ID NO: 4591812 - DNA, 25 bp, Homo sapien
ttgtccagtttgactgatgccctgg

SEQ ID NO: 4591813 - DNA, 25 bp, Homo sapien
gctctgagagggatagcacagccat

SEQ ID NO: 4591814 - DNA, 25 bp, Homo sapien
gatgtgggtgtcggcaagccccaat

SEQ ID NO: 4591815 - DNA, 25 bp, Homo sapien
tataaatctattctcagggatgtgg

SEQ ID NO: 4591816 - DNA, 25 bp, Homo sapien
ccatgggaaatgaataggctggctc

SEQ ID NO: 4591817 - DNA, 25 bp, Homo sapien
aatagtaagtcttgattacagaggg

SEQ ID NO: 4591818 - DNA, 25 bp, Homo sapien
cagatatcctgcgaaattcagccag

SEQ ID NO: 4591819 - DNA, 25 bp, Homo sapien
gacaacagccatgttacctcttctg

SEQ ID NO: 4591820 - DNA, 25 bp, Homo sapien
ctatgttccctaagggtcagccggt

SEQ ID NO: 4591821 - DNA, 25 bp, Homo sapien
aatcagtcccaaacactaaaacaag

SEQ ID NO: 4591822 - DNA, 25 bp, Homo sapien
gtatggcttctgtaaccaccaagaa

SEQ ID NO: 4591823 - DNA, 25 bp, Homo sapien
gaagttgtaatcagtcccaaacact

SEQ ID NO: 4591824 - DNA, 25 bp, Homo sapien
tgcatgaaagaagttgtaatcagtc

SEQ ID NO: 4591825 - DNA, 25 bp, Homo sapien
tagacaaatcattgcctggacggag

SEQ ID NO: 4591826 - DNA, 25 bp, Homo sapien
cattgggagcattccctgagggtcc

SEQ ID NO: 4591827 - DNA, 25 bp, Homo sapien
tcttgcttggatcccctgcattgtg

SEQ ID NO: 4591828 - DNA, 25 bp, Homo sapien
tgttgtgatatctgacagccgatct

SEQ ID NO: 4591829 - DNA, 25 bp, Homo sapien
aaaatcttcagttgttcgtggtgga

SEQ ID NO: 4591830 - DNA, 25 bp, Homo sapien
cttcagttgttcgtggtggagtttt

SEQ ID NO: 4591831 - DNA, 25 bp, Homo sapien
aatcttcagttgttcgtggtggagt

SEQ ID NO: 4591832 - DNA, 25 bp, Homo sapien
tcttcagttgttcgtggtggagttt

SEQ ID NO: 4591833 - DNA, 25 bp, Homo sapien
gaggagactttgacttaaagatttg

SEQ ID NO: 4591834 - DNA, 25 bp, Homo sapien
agaagctggtttgcttgggcagtct

SEQ ID NO: 4591835 - DNA, 25 bp, Homo sapien
gggaagaagctggtttgcttgggca

SEQ ID NO: 4591836 - DNA, 25 bp, Homo sapien
ctgaatgaggagactttgacttaaa

SEQ ID NO: 4591837 - DNA, 25 bp, Homo sapien
gttcaagttccaccatgcacctgtt

SEQ ID NO: 4591838 - DNA, 25 bp, Homo sapien
gcacctgttcctcaaatcacaaagt

SEQ ID NO: 4591839 - DNA, 25 bp, Homo sapien
tcctcaaatcacaaagtagaaccat

SEQ ID NO: 4591840 - DNA, 25 bp, Homo sapien
catgcacctgttcctcaaatcacaa

SEQ ID NO: 4591841 - DNA, 25 bp, Homo sapien
gtccatttactgtgacctacaaata

SEQ ID NO: 4591842 - DNA, 25 bp, Homo sapien
ttactgtgacctacaaatattattt

SEQ ID NO: 4591843 - DNA, 25 bp, Homo sapien
tctgaccataactgtccatttactg

SEQ ID NO: 4591844 - DNA, 25 bp, Homo sapien
ctctgaccataactgtccatttact

SEQ ID NO: 4591845 - DNA, 25 bp, Homo sapien
gaagcatagttgtagaacattcatc

SEQ ID NO: 4591846 - DNA, 25 bp, Homo sapien
cagttgacaggtgacatcgacacca

SEQ ID NO: 4591847 - DNA, 25 bp, Homo sapien
ggaaatagaagcatagttgtagaac

SEQ ID NO: 4591848 - DNA, 25 bp, Homo sapien
gaaatatcaggaggataggttaaaa

SEQ ID NO: 4591849 - DNA, 25 bp, Homo sapien
tgttctggagaactaactgttgcca

SEQ ID NO: 4591850 - DNA, 25 bp, Homo sapien
cagagagtagaagataatctcaata

SEQ ID NO: 4591851 - DNA, 25 bp, Homo sapien
taatctcaatagagatttgaggatg

SEQ ID NO: 4591852 - DNA, 25 bp, Homo sapien
aagtccgagggatgcagtgtctgcc

SEQ ID NO: 4591853 - DNA, 25 bp, Homo sapien
tctctgtgcaatccggaatgtaggg

SEQ ID NO: 4591854 - DNA, 25 bp, Homo sapien
tctgttctctgtgcaatccggaatg

SEQ ID NO: 4591855 - DNA, 25 bp, Homo sapien
tgcaatccggaatgtagggaacact

SEQ ID NO: 4591856 - DNA, 25 bp, Homo sapien
ggaatgtagggaacactgccatctt

SEQ ID NO: 4591857 - DNA, 25 bp, Homo sapien
tacacttggagagaatagagcagca

SEQ ID NO: 4591858 - DNA, 25 bp, Homo sapien
agaaggttctaggacaagcccagcg

SEQ ID NO: 4591859 - DNA, 25 bp, Homo sapien
aagcccagcgatgcgtacacttgga

SEQ ID NO: 4591860 - DNA, 25 bp, Homo sapien
aggcagctcagcatttctttggcag

SEQ ID NO: 4591861 - DNA, 25 bp, Homo sapien
gctgggatcacattcggcatagtaa

SEQ ID NO: 4591862 - DNA, 25 bp, Homo sapien
gcatagtaagtagccattccttcta

SEQ ID NO: 4591863 - DNA, 25 bp, Homo sapien
cattcggcatagtaagtagccattc

SEQ ID NO: 4591864 - DNA, 25 bp, Homo sapien
atgcacgctgggatcacattcggca

SEQ ID NO: 4591865 - DNA, 25 bp, Homo sapien
tctcctgtatagaaattctcagact

SEQ ID NO: 4591866 - DNA, 25 bp, Homo sapien
gactttccgcctagcagctcaaaga

SEQ ID NO: 4591867 - DNA, 25 bp, Homo sapien
ttctccatcttgcagtatctgggtc

SEQ ID NO: 4591868 - DNA, 25 bp, Homo sapien
tctgggtcttatctcctgtatagaa

SEQ ID NO: 4591869 - DNA, 25 bp, Homo sapien
tagaccctgtagatccgatatgtgg

SEQ ID NO: 4591870 - DNA, 25 bp, Homo sapien
tgtagatccgatatgtggataaagc

SEQ ID NO: 4591871 - DNA, 25 bp, Homo sapien
tctatttagaccctgtagatccgat

SEQ ID NO: 4591872 - DNA, 25 bp, Homo sapien
tttcataggatgtctatttagaccc

SEQ ID NO: 4591873 - DNA, 25 bp, Homo sapien
tttgaaaccattgcatcaaagtcat

SEQ ID NO: 4591874 - DNA, 25 bp, Homo sapien
tgcatcaaagtcatatctccctcct

SEQ ID NO: 4591875 - DNA, 25 bp, Homo sapien
cattgcccgcaagtttccattttga

SEQ ID NO: 4591876 - DNA, 25 bp, Homo sapien
aaataggctaatccattgcccgcaa

SEQ ID NO: 4591877 - DNA, 25 bp, Homo sapien
attctggtattgcatacaccgggac

SEQ ID NO: 4591878 - DNA, 25 bp, Homo sapien
taccttcacgctcttcaaaataaca

SEQ ID NO: 4591879 - DNA, 25 bp, Homo sapien
ccaatggttggatgctttggttcat

SEQ ID NO: 4591880 - DNA, 25 bp, Homo sapien
ggactgttgggtcacctctaccttc

SEQ ID NO: 4591881 - DNA, 25 bp, Homo sapien
ctaagaaaacctgagtcatagtacc

SEQ ID NO: 4591882 - DNA, 25 bp, Homo sapien
gccactcaacaatggacttactaag

SEQ ID NO: 4591883 - DNA, 25 bp, Homo sapien
gaaaacctgagtcatagtaccccaa

SEQ ID NO: 4591884 - DNA, 25 bp, Homo sapien
cactcaacaatggacttactaagaa

SEQ ID NO: 4591885 - DNA, 25 bp, Homo sapien
tgaactcagttgacctcttaggaca

SEQ ID NO: 4591886 - DNA, 25 bp, Homo sapien
cttgtcaaaggatacttggaatctc

SEQ ID NO: 4591887 - DNA, 25 bp, Homo sapien
ttggaatctctccttcctgttaccg

SEQ ID NO: 4591888 - DNA, 25 bp, Homo sapien
ggccggcatgctcttccatgcagaa

SEQ ID NO: 4591889 - DNA, 25 bp, Homo sapien
aaaatggtgacatttctaatgacac

SEQ ID NO: 4591890 - DNA, 25 bp, Homo sapien
tctttctccctaaggtcaaagctaa

SEQ ID NO: 4591891 - DNA, 25 bp, Homo sapien
taaggtcaaagctaaaaatggtgac

SEQ ID NO: 4591892 - DNA, 25 bp, Homo sapien
tggtgacatttctaatgacacatgt

SEQ ID NO: 4591893 - DNA, 25 bp, Homo sapien
tgatttccacatggagtttagtagc

SEQ ID NO: 4591894 - DNA, 25 bp, Homo sapien
tagctcagcgatgccacccacaaaa

SEQ ID NO: 4591895 - DNA, 25 bp, Homo sapien
tccacatggagtttagtagctcagc

SEQ ID NO: 4591896 - DNA, 25 bp, Homo sapien
tggagtttagtagctcagcgatgcc

SEQ ID NO: 4591897 - DNA, 25 bp, Homo sapien
tccttttcctgaatgcctggtcttc

SEQ ID NO: 4591898 - DNA, 25 bp, Homo sapien
gaatgcctggtcttcctcccataac

SEQ ID NO: 4591899 - DNA, 25 bp, Homo sapien
cttttcctgaatgcctggtcttcct

SEQ ID NO: 4591900 - DNA, 25 bp, Homo sapien
ctgaatgcctggtcttcctcccata

SEQ ID NO: 4591901 - DNA, 25 bp, Homo sapien
actgggatgggattctctgagtcca

SEQ ID NO: 4591902 - DNA, 25 bp, Homo sapien
cttttggctccagaaatggtgtcat

SEQ ID NO: 4591903 - DNA, 25 bp, Homo sapien
gcttttggctccagaaatggtgtca

SEQ ID NO: 4591904 - DNA, 25 bp, Homo sapien
gtgtgcatcttagaggcctgctgtg

SEQ ID NO: 4591905 - DNA, 25 bp, Homo sapien
ctgctgagtgtgcatcttagaggcc

SEQ ID NO: 4591906 - DNA, 25 bp, Homo sapien
gaaacggctctttatttagctccgc

SEQ ID NO: 4591907 - DNA, 25 bp, Homo sapien
atttagctccgctgcatgtttgtgg

SEQ ID NO: 4591908 - DNA, 25 bp, Homo sapien
cacaggcttcgtgccagggctctgg

SEQ ID NO: 4591909 - DNA, 25 bp, Homo sapien
gctctttatttagctccgctgcatg

SEQ ID NO: 4591910 - DNA, 25 bp, Homo sapien
ggcccacagagatcaaaaacttcag

SEQ ID NO: 4591911 - DNA, 25 bp, Homo sapien
aggtgcatcttgcgggagcatcaag

SEQ ID NO: 4591912 - DNA, 25 bp, Homo sapien
ggaggtgcatcttgcgggagcatca

SEQ ID NO: 4591913 - DNA, 25 bp, Homo sapien
gattcttttcgtttgggcccacaga

SEQ ID NO: 4591914 - DNA, 25 bp, Homo sapien
tcccatgccatagtttatccttatg

SEQ ID NO: 4591915 - DNA, 25 bp, Homo sapien
tatccttatgtggcttagttgacat

SEQ ID NO: 4591916 - DNA, 25 bp, Homo sapien
gcttagttgacatccagtaacccat

SEQ ID NO: 4591917 - DNA, 25 bp, Homo sapien
ctttcccatgccatagtttatcctt

SEQ ID NO: 4591918 - DNA, 25 bp, Homo sapien
agacattcatggtgagcatactcag

SEQ ID NO: 4591919 - DNA, 25 bp, Homo sapien
tcagtgtgtctgtaagtgtggatga

SEQ ID NO: 4591920 - DNA, 25 bp, Homo sapien
tggatgagttgtgtaataggctgct

SEQ ID NO: 4591921 - DNA, 25 bp, Homo sapien
tgcctcttagatggagcacagcgtt

SEQ ID NO: 4591922 - DNA, 25 bp, Homo sapien
ttttctcgcctgcaaaaactgagat

SEQ ID NO: 4591923 - DNA, 25 bp, Homo sapien
gagatgcagccagagttgcgtttca

SEQ ID NO: 4591924 - DNA, 25 bp, Homo sapien
tcagagttgctcttttctcgcctgc

SEQ ID NO: 4591925 - DNA, 25 bp, Homo sapien
tgagatgcagccagagttgcgtttc

SEQ ID NO: 4591926 - DNA, 25 bp, Homo sapien
tctgattctgagttcctactgtcat

SEQ ID NO: 4591927 - DNA, 25 bp, Homo sapien
atgatctgattctgagttcctactg

SEQ ID NO: 4591928 - DNA, 25 bp, Homo sapien
cattatgtgcttaaatgtaggctcc

SEQ ID NO: 4591929 - DNA, 25 bp, Homo sapien
tccatgtgcctagatctatccatta

SEQ ID NO: 4591930 - DNA, 25 bp, Homo sapien
tgagggatgaaaagctgctctgctg

SEQ ID NO: 4591931 - DNA, 25 bp, Homo sapien
cattagatggtaccaaagattcggg

SEQ ID NO: 4591932 - DNA, 25 bp, Homo sapien
gcgaagcgtagagattcaaagcagt

SEQ ID NO: 4591933 - DNA, 25 bp, Homo sapien
ccaggccttgtcattgcgaagcgta

SEQ ID NO: 4591934 - DNA, 25 bp, Homo sapien
tccttcaggaccttgcagcatcaat

SEQ ID NO: 4591935 - DNA, 25 bp, Homo sapien
gactgaatttattcaccgcctgggt

SEQ ID NO: 4591936 - DNA, 25 bp, Homo sapien
gcagcatcaatcagtttcatgcaaa

SEQ ID NO: 4591937 - DNA, 25 bp, Homo sapien
gaagctccagcgttgtcttgccaca

SEQ ID NO: 4591938 - DNA, 25 bp, Homo sapien
tgagtttgggtaagcatttatcctc

SEQ ID NO: 4591939 - DNA, 25 bp, Homo sapien
ccctgcagatatgccaacttatgtg

SEQ ID NO: 4591940 - DNA, 25 bp, Homo sapien
taacgtgatgtttccctgcagatat

SEQ ID NO: 4591941 - DNA, 25 bp, Homo sapien
caacttatgtgagtttgggtaagca

SEQ ID NO: 4591942 - DNA, 25 bp, Homo sapien
cattcgactggacatcgctttgctc

SEQ ID NO: 4591943 - DNA, 25 bp, Homo sapien
gaagtcataagggacgcacagtaga

SEQ ID NO: 4591944 - DNA, 25 bp, Homo sapien
tcagtcctgatgatagagagacaga

SEQ ID NO: 4591945 - DNA, 25 bp, Homo sapien
ctttagcaatgttgaagtcataagg

SEQ ID NO: 4591946 - DNA, 25 bp, Homo sapien
tcaacacattcatctctgtgctcat

SEQ ID NO: 4591947 - DNA, 25 bp, Homo sapien
tcaataccctttcacaagacttatc

SEQ ID NO: 4591948 - DNA, 25 bp, Homo sapien
tctaaagccaaaataatgatgcaca

SEQ ID NO: 4591949 - DNA, 25 bp, Homo sapien
gctcatttgcttcaataccctttca

SEQ ID NO: 4591950 - DNA, 25 bp, Homo sapien
ctgatttcctgatcaccaaatattt

SEQ ID NO: 4591951 - DNA, 25 bp, Homo sapien
tttcctgatcaccaaatatttgcat

SEQ ID NO: 4591952 - DNA, 25 bp, Homo sapien
ttctgatttcctgatcaccaaatat

SEQ ID NO: 4591953 - DNA, 25 bp, Homo sapien
gatttcctgatcaccaaatatttgc

SEQ ID NO: 4591954 - DNA, 25 bp, Homo sapien
tgttgatctcaattggtggatccct

SEQ ID NO: 4591955 - DNA, 25 bp, Homo sapien
tgatctcaattggtggatccctttg

SEQ ID NO: 4591956 - DNA, 25 bp, Homo sapien
ctcaattggtggatccctttgtggt

SEQ ID NO: 4591957 - DNA, 25 bp, Homo sapien
tagatgttgatctcaattggtggat

SEQ ID NO: 4591958 - DNA, 25 bp, Homo sapien
ctaacaaaatcattggtgtttaaca

SEQ ID NO: 4591959 - DNA, 25 bp, Homo sapien
gaccatagattgtatcactaacaaa

SEQ ID NO: 4591960 - DNA, 25 bp, Homo sapien
cattggtgtttaacatataagaata

SEQ ID NO: 4591961 - DNA, 25 bp, Homo sapien
ttacaactctttgcttgaccataga

SEQ ID NO: 4591962 - DNA, 25 bp, Homo sapien
cactctggtaggatgttgcggctga

SEQ ID NO: 4591963 - DNA, 25 bp, Homo sapien
tccgatacaaccaacactacttcag

SEQ ID NO: 4591964 - DNA, 25 bp, Homo sapien
cacaggtcctgatatttccgataca

SEQ ID NO: 4591965 - DNA, 25 bp, Homo sapien
gaagagtgacatcgatttgctgtca

SEQ ID NO: 4591966 - DNA, 25 bp, Homo sapien
atttgctgttatttaaaaaaagcat

SEQ ID NO: 4591967 - DNA, 25 bp, Homo sapien
ctgaaggcaaatatttgctgttatt

SEQ ID NO: 4591968 - DNA, 25 bp, Homo sapien
tatttgctgttatttaaaaaaagca

SEQ ID NO: 4591969 - DNA, 25 bp, Homo sapien
aggcaaatatttgctgttatttaaa

SEQ ID NO: 4591970 - DNA, 25 bp, Homo sapien
tcttcaattcccactacaatatctt

SEQ ID NO: 4591971 - DNA, 25 bp, Homo sapien
ttcttcaattcccactacaatatct

SEQ ID NO: 4591972 - DNA, 25 bp, Homo sapien
acttcttcaattcccactacaatat

SEQ ID NO: 4591973 - DNA, 25 bp, Homo sapien
tacttcttcaattcccactacaata

SEQ ID NO: 4591974 - DNA, 25 bp, Homo sapien
caaaaatggttcagtgcaagtccag

SEQ ID NO: 4591975 - DNA, 25 bp, Homo sapien
atggttcagtgcaagtccagttcat

SEQ ID NO: 4591976 - DNA, 25 bp, Homo sapien
gcatagtcaaaaatggttcagtgca

SEQ ID NO: 4591977 - DNA, 25 bp, Homo sapien
tagtcaaaaatggttcagtgcaagt

SEQ ID NO: 4591978 - DNA, 25 bp, Homo sapien
cactggttgaaaagcttcctcaaac

SEQ ID NO: 4591979 - DNA, 25 bp, Homo sapien
aagcttcctcaaacccctttctgca

SEQ ID NO: 4591980 - DNA, 25 bp, Homo sapien
tttcagcactggttgaaaagcttcc

SEQ ID NO: 4591981 - DNA, 25 bp, Homo sapien
aattgtaattgtgggcagctttcag

SEQ ID NO: 4591982 - DNA, 25 bp, Homo sapien
acagcctgtgccacgatgcattcca

SEQ ID NO: 4591983 - DNA, 25 bp, Homo sapien
gtttctctaattacgctgatgcacg

SEQ ID NO: 4591984 - DNA, 25 bp, Homo sapien
tctgaagatagctccaaaatggtca

SEQ ID NO: 4591985 - DNA, 25 bp, Homo sapien
gccacgatgcattccagacagtctt

SEQ ID NO: 4591986 - DNA, 25 bp, Homo sapien
ctggaattggcttttgcagaaatga

SEQ ID NO: 4591987 - DNA, 25 bp, Homo sapien
gaattggcttttgcagaaatgaatc

SEQ ID NO: 4591988 - DNA, 25 bp, Homo sapien
ttggcttttgcagaaatgaatctac

SEQ ID NO: 4591989 - DNA, 25 bp, Homo sapien
tggaattggcttttgcagaaatgaa

SEQ ID NO: 4591990 - DNA, 25 bp, Homo sapien
tcaaaaggtaataatcgccacgggc

SEQ ID NO: 4591991 - DNA, 25 bp, Homo sapien
cactgtgcaatgaggtttctcctgg

SEQ ID NO: 4591992 - DNA, 25 bp, Homo sapien
ccagagtgctggaggtataaagtga

SEQ ID NO: 4591993 - DNA, 25 bp, Homo sapien
tctcctggagcctcgaggagcagga

SEQ ID NO: 4591994 - DNA, 25 bp, Homo sapien
tgcacatgtgactggttacctggtt

SEQ ID NO: 4591995 - DNA, 25 bp, Homo sapien
cttgtattgcacatgtgactggtta

SEQ ID NO: 4591996 - DNA, 25 bp, Homo sapien
attgcacatgtgactggttacctgg

SEQ ID NO: 4591997 - DNA, 25 bp, Homo sapien
catgtgactggttacctggttctcc

SEQ ID NO: 4591998 - DNA, 25 bp, Homo sapien
ctgaatttggacatcgttctgggtt

SEQ ID NO: 4591999 - DNA, 25 bp, Homo sapien
acctgaatttggacatcgttctggg

SEQ ID NO: 4592000 - DNA, 25 bp, Homo sapien
gccgtcctgtggatcaacactccct

SEQ ID NO: 4592001 - DNA, 25 bp, Homo sapien
cgtcctgtggatcaacactcccttc

SEQ ID NO: 4592002 - DNA, 25 bp, Homo sapien
taggataattactatgtgacaaacg

SEQ ID NO: 4592003 - DNA, 25 bp, Homo sapien
ggataattactatgtgacaaacgaa

SEQ ID NO: 4592004 - DNA, 25 bp, Homo sapien
ttggtttgacaaaggtttgctttca

SEQ ID NO: 4592005 - DNA, 25 bp, Homo sapien
aattactatgtgacaaacgaatgcc

SEQ ID NO: 4592006 - DNA, 25 bp, Homo sapien
tcttgatacccacaagggcagtttc

SEQ ID NO: 4592007 - DNA, 25 bp, Homo sapien
accttgaccttcttgatacccacaa

SEQ ID NO: 4592008 - DNA, 25 bp, Homo sapien
aggctttgctgagacagctgaattg

SEQ ID NO: 4592009 - DNA, 25 bp, Homo sapien
gacagctgaattgtcaccttgacct

SEQ ID NO: 4592010 - DNA, 25 bp, Homo sapien
tgaaaatgaagaggcagtctctaga

SEQ ID NO: 4592011 - DNA, 25 bp, Homo sapien
gaaaatgaagaggcagtctctagat

SEQ ID NO: 4592012 - DNA, 25 bp, Homo sapien
ctgaaaatgaagaggcagtctctag

SEQ ID NO: 4592013 - DNA, 25 bp, Homo sapien
cgtgaatcccctccgtgtacataca

SEQ ID NO: 4592014 - DNA, 25 bp, Homo sapien
tgtacatacaacatatactgggcat

SEQ ID NO: 4592015 - DNA, 25 bp, Homo sapien
tgtcaatcacgtgaatcccctccgt

SEQ ID NO: 4592016 - DNA, 25 bp, Homo sapien
tgcacattttactctaccgctgtca

SEQ ID NO: 4592017 - DNA, 25 bp, Homo sapien
tatctaatgggactttccaggtcag

SEQ ID NO: 4592018 - DNA, 25 bp, Homo sapien
ctatggtatcagtcagctattgtta

SEQ ID NO: 4592019 - DNA, 25 bp, Homo sapien
tagtaactacatatccatggcatgc

SEQ ID NO: 4592020 - DNA, 25 bp, Homo sapien
cacatgccatatttcacttagtcaa

SEQ ID NO: 4592021 - DNA, 25 bp, Homo sapien
gctgccaacacagctaagcccagcc

SEQ ID NO: 4592022 - DNA, 25 bp, Homo sapien
cttgaatgtagctgaagaaggtggt

SEQ ID NO: 4592023 - DNA, 25 bp, Homo sapien
aaggcttttctgtgggtgttcttga

SEQ ID NO: 4592024 - DNA, 25 bp, Homo sapien
tctgattcccatgctgattaacaaa

SEQ ID NO: 4592025 - DNA, 25 bp, Homo sapien
gattaacaaatgactccccacagcc

SEQ ID NO: 4592026 - DNA, 25 bp, Homo sapien
aatgagcccatagacttacaccaga

SEQ ID NO: 4592027 - DNA, 25 bp, Homo sapien
gaaatgagcccatagacttacacca

SEQ ID NO: 4592028 - DNA, 25 bp, Homo sapien
aggaaatgagcccatagacttacac

SEQ ID NO: 4592029 - DNA, 25 bp, Homo sapien
atgagcccatagacttacaccagaa

SEQ ID NO: 4592030 - DNA, 25 bp, Homo sapien
cttcattccaaatggttccgtgcat

SEQ ID NO: 4592031 - DNA, 25 bp, Homo sapien
gagaatcaagcttagttctgagctg

SEQ ID NO: 4592032 - DNA, 25 bp, Homo sapien
ttcaatgaccaccttgtctgggctg

SEQ ID NO: 4592033 - DNA, 25 bp, Homo sapien
gctgctggtgagaatcaagcttagt

SEQ ID NO: 4592034 - DNA, 25 bp, Homo sapien
gtctggttcaatgaccaccttgtct

SEQ ID NO: 4592035 - DNA, 25 bp, Homo sapien
atcttttctctgccattaaggtgaa

SEQ ID NO: 4592036 - DNA, 25 bp, Homo sapien
catcttttctctgccattaaggtga

SEQ ID NO: 4592037 - DNA, 25 bp, Homo sapien
tcatcttttctctgccattaaggtg

SEQ ID NO: 4592038 - DNA, 25 bp, Homo sapien
ggcttccagtttaccatccagttca

SEQ ID NO: 4592039 - DNA, 25 bp, Homo sapien
gcaagggcttccagtttaccatcca

SEQ ID NO: 4592040 - DNA, 25 bp, Homo sapien
gctagcatggcctccacttgcaagg

SEQ ID NO: 4592041 - DNA, 25 bp, Homo sapien
tccagttcattctctttaaatgttg

SEQ ID NO: 4592042 - DNA, 25 bp, Homo sapien
acccaagctgttatcagctcctctt

SEQ ID NO: 4592043 - DNA, 25 bp, Homo sapien
tatctactggttgcacccaagctgt

SEQ ID NO: 4592044 - DNA, 25 bp, Homo sapien
aggttgtgataggcactggtttgat

SEQ ID NO: 4592045 - DNA, 25 bp, Homo sapien
cttctttaatatctactggttgcac

SEQ ID NO: 4592046 - DNA, 25 bp, Homo sapien
atgccccagataagtaggaagtgaa

SEQ ID NO: 4592047 - DNA, 25 bp, Homo sapien
aaatgccccagataagtaggaagtg

SEQ ID NO: 4592048 - DNA, 25 bp, Homo sapien
aatgccccagataagtaggaagtga

SEQ ID NO: 4592049 - DNA, 25 bp, Homo sapien
tgccccagataagtaggaagtgaag

SEQ ID NO: 4592050 - DNA, 25 bp, Homo sapien
tcagcgacaaccctgaactccaaca

SEQ ID NO: 4592051 - DNA, 25 bp, Homo sapien
ttcgatgaaaacttctaatgcaggg

SEQ ID NO: 4592052 - DNA, 25 bp, Homo sapien
ggtactggcatgtaatccccacatt

SEQ ID NO: 4592053 - DNA, 25 bp, Homo sapien
caatatttccaccactcagcgacaa

SEQ ID NO: 4592054 - DNA, 25 bp, Homo sapien
ggtttctcaggggactgtctttata

SEQ ID NO: 4592055 - DNA, 25 bp, Homo sapien
gtctttatattcaccaccagagcac

SEQ ID NO: 4592056 - DNA, 25 bp, Homo sapien
accctggtttctcaggggactgtct

SEQ ID NO: 4592057 - DNA, 25 bp, Homo sapien
actgtctttatattcaccaccagag

SEQ ID NO: 4592058 - DNA, 25 bp, Homo sapien
cactgatgaagatggacatgctcag

SEQ ID NO: 4592059 - DNA, 25 bp, Homo sapien
acactgatgaagatggacatgctca

SEQ ID NO: 4592060 - DNA, 25 bp, Homo sapien
tccgataatgagaggtatttctggg

SEQ ID NO: 4592061 - DNA, 25 bp, Homo sapien
catgctcagtgggttcctccgataa

SEQ ID NO: 4592062 - DNA, 25 bp, Homo sapien
ccggatagtcactttagtaggatct

SEQ ID NO: 4592063 - DNA, 25 bp, Homo sapien
gtcactttagtaggatctgtaagca

SEQ ID NO: 4592064 - DNA, 25 bp, Homo sapien
ttagtaggatctgtaagcaccaggt

SEQ ID NO: 4592065 - DNA, 25 bp, Homo sapien
tgccggatagtcactttagtaggat

SEQ ID NO: 4592066 - DNA, 25 bp, Homo sapien
gagaggctctgaatgacaaactaca

SEQ ID NO: 4592067 - DNA, 25 bp, Homo sapien
tgaatgcaatgggttggagccagtt

SEQ ID NO: 4592068 - DNA, 25 bp, Homo sapien
tttccctaaactttgctgagcagtg

SEQ ID NO: 4592069 - DNA, 25 bp, Homo sapien
acaaactacagagtgttgggtgcca

SEQ ID NO: 4592070 - DNA, 25 bp, Homo sapien
gaattggaagccaaatgcagctctg

SEQ ID NO: 4592071 - DNA, 25 bp, Homo sapien
gcagggcattcattgcaccgattca

SEQ ID NO: 4592072 - DNA, 25 bp, Homo sapien
gtttggtgaatcaaggcgcccttcc

SEQ ID NO: 4592073 - DNA, 25 bp, Homo sapien
ttgggagtgactcgctgagagcctc

SEQ ID NO: 4592074 - DNA, 25 bp, Homo sapien
actgggtcaacgaagaaggtgcctg

SEQ ID NO: 4592075 - DNA, 25 bp, Homo sapien
cattgtctgcgagcgtgtgctggac

SEQ ID NO: 4592076 - DNA, 25 bp, Homo sapien
tgtgctggacaaattggcttctgga

SEQ ID NO: 4592077 - DNA, 25 bp, Homo sapien
tgcctgatcgggcaaatcccaggtg

SEQ ID NO: 4592078 - DNA, 25 bp, Homo sapien
ggcctgggaaacttgcccattcaga

SEQ ID NO: 4592079 - DNA, 25 bp, Homo sapien
ctgcgcctgtatgtccaattccaga

SEQ ID NO: 4592080 - DNA, 25 bp, Homo sapien
caattccagatgtcgcttcggggcc

SEQ ID NO: 4592081 - DNA, 25 bp, Homo sapien
tgtgtttcctatatcatggaagcat

SEQ ID NO: 4592082 - DNA, 25 bp, Homo sapien
ctgcactttgattggagtcatgact

SEQ ID NO: 4592083 - DNA, 25 bp, Homo sapien
gcactttgattggagtcatgactct

SEQ ID NO: 4592084 - DNA, 25 bp, Homo sapien
aaccttgcataccaccccatttcca

SEQ ID NO: 4592085 - DNA, 25 bp, Homo sapien
ctcttaaccttgcataccaccccat

SEQ ID NO: 4592086 - DNA, 25 bp, Homo sapien
gttaatgtgacctctcttggcactg

SEQ ID NO: 4592087 - DNA, 25 bp, Homo sapien
cacattttcacaacttgttctccta

SEQ ID NO: 4592088 - DNA, 25 bp, Homo sapien
tgcacctgttaatgtgacctctctt

SEQ ID NO: 4592089 - DNA, 25 bp, Homo sapien
cctgttaatgtgacctctcttggca

SEQ ID NO: 4592090 - DNA, 25 bp, Homo sapien
caatgagagcagtcctctttgaagc

SEQ ID NO: 4592091 - DNA, 25 bp, Homo sapien
ggatcaagtcttaattccacagtca

SEQ ID NO: 4592092 - DNA, 25 bp, Homo sapien
cactcctgccggaaccgttgttgtt

SEQ ID NO: 4592093 - DNA, 25 bp, Homo sapien
tagatccccattgcattttgagtgt

SEQ ID NO: 4592094 - DNA, 25 bp, Homo sapien
ttcatcaactttcctggaacacctc

SEQ ID NO: 4592095 - DNA, 25 bp, Homo sapien
tggaacacctccctttactctcagt

SEQ ID NO: 4592096 - DNA, 25 bp, Homo sapien
cctccctttactctcagtggctttg

SEQ ID NO: 4592097 - DNA, 25 bp, Homo sapien
cttcatcaactttcctggaacacct

SEQ ID NO: 4592098 - DNA, 25 bp, Homo sapien
ttcaaccacagtattaaaagccaaa

SEQ ID NO: 4592099 - DNA, 25 bp, Homo sapien
ccacagtattaaaagccaaagtcat

SEQ ID NO: 4592100 - DNA, 25 bp, Homo sapien
accacagtattaaaagccaaagtca

SEQ ID NO: 4592101 - DNA, 25 bp, Homo sapien
ttcttcaaccacagtattaaaagcc

SEQ ID NO: 4592102 - DNA, 25 bp, Homo sapien
caactgaattggttacaggcaaata

SEQ ID NO: 4592103 - DNA, 25 bp, Homo sapien
ctgaattgattacaactgaattggt

SEQ ID NO: 4592104 - DNA, 25 bp, Homo sapien
gaattggttacaggcaaataaggtg

SEQ ID NO: 4592105 - DNA, 25 bp, Homo sapien
gattacaactgaattggttacaggc

SEQ ID NO: 4592106 - DNA, 25 bp, Homo sapien
catgagggaggactttgtcctcaga

SEQ ID NO: 4592107 - DNA, 25 bp, Homo sapien
aagagatgggtagacacgtagccac

SEQ ID NO: 4592108 - DNA, 25 bp, Homo sapien
gtgcatgagggaggactttgtcctc

SEQ ID NO: 4592109 - DNA, 25 bp, Homo sapien
gacacgtagccacaagaactgttct

SEQ ID NO: 4592110 - DNA, 25 bp, Homo sapien
gctgcagtaagaaagctctatatgg

SEQ ID NO: 4592111 - DNA, 25 bp, Homo sapien
gggacggcaaattccacagtcagct

SEQ ID NO: 4592112 - DNA, 25 bp, Homo sapien
gctctatatgggacggcaaattcca

SEQ ID NO: 4592113 - DNA, 25 bp, Homo sapien
taagaaagctctatatgggacggca

SEQ ID NO: 4592114 - DNA, 25 bp, Homo sapien
tggaaattcgtttagaatgaagaca

SEQ ID NO: 4592115 - DNA, 25 bp, Homo sapien
tataacatcatgtactctgtcagcc

SEQ ID NO: 4592116 - DNA, 25 bp, Homo sapien
tctgtcagccatcttaaactggaag

SEQ ID NO: 4592117 - DNA, 25 bp, Homo sapien
taagccataaggaggtataacatca

SEQ ID NO: 4592118 - DNA, 25 bp, Homo sapien
cttggcctgcagacaaagaaggagc

SEQ ID NO: 4592119 - DNA, 25 bp, Homo sapien
tagctgtttcttgagagtattaccc

SEQ ID NO: 4592120 - DNA, 25 bp, Homo sapien
gagaaaggctttcacgactatgcag

SEQ ID NO: 4592121 - DNA, 25 bp, Homo sapien
cttgcttctttgtgtagagaaaggc

SEQ ID NO: 4592122 - DNA, 25 bp, Homo sapien
aacaagtagagggtacacattacag

SEQ ID NO: 4592123 - DNA, 25 bp, Homo sapien
tacctgggatattgtcaaaagaatc

SEQ ID NO: 4592124 - DNA, 25 bp, Homo sapien
caccttcgtggttattggtccaaga

SEQ ID NO: 4592125 - DNA, 25 bp, Homo sapien
taagttagctgagcctcgcagagcc

SEQ ID NO: 4592126 - DNA, 25 bp, Homo sapien
aatggcattgggattctagggactc

SEQ ID NO: 4592127 - DNA, 25 bp, Homo sapien
tctagggactcgctgttatgggaca

SEQ ID NO: 4592128 - DNA, 25 bp, Homo sapien
cctgggaaaatgtggaatggcattg

SEQ ID NO: 4592129 - DNA, 25 bp, Homo sapien
gatgacattgtctcgctttctttca

SEQ ID NO: 4592130 - DNA, 25 bp, Homo sapien
aagttctttctatggtgctccactg

SEQ ID NO: 4592131 - DNA, 25 bp, Homo sapien
ctgaaagttctttctatggtgctcc

SEQ ID NO: 4592132 - DNA, 25 bp, Homo sapien
tgcttcctgaaagttctttctatgg

SEQ ID NO: 4592133 - DNA, 25 bp, Homo sapien
tccaggatcttgggggaataacaat

SEQ ID NO: 4592134 - DNA, 25 bp, Homo sapien
tcttataggcacgttgaggtatttg

SEQ ID NO: 4592135 - DNA, 25 bp, Homo sapien
cagaaccaggtcagccagtcttata

SEQ ID NO: 4592136 - DNA, 25 bp, Homo sapien
gctggaactatgaaccagaaccagg

SEQ ID NO: 4592137 - DNA, 25 bp, Homo sapien
tgtgcaatgatgctggaactatgaa

SEQ ID NO: 4592138 - DNA, 25 bp, Homo sapien
tagtaagatccattgtgtattgacg

SEQ ID NO: 4592139 - DNA, 25 bp, Homo sapien
tgcccattgaatcttagtaagatcc

SEQ ID NO: 4592140 - DNA, 25 bp, Homo sapien
cattgtgtattgacggttacaaaga

SEQ ID NO: 4592141 - DNA, 25 bp, Homo sapien
ccaaatgcccattgaatcttagtaa

SEQ ID NO: 4592142 - DNA, 25 bp, Homo sapien
tcaaatgtaaaggtcactgaggcag

SEQ ID NO: 4592143 - DNA, 25 bp, Homo sapien
actgggacatatattttggacctac

SEQ ID NO: 4592144 - DNA, 25 bp, Homo sapien
ttccacttccaactgggacatatat

SEQ ID NO: 4592145 - DNA, 25 bp, Homo sapien
ttccaactgggacatatattttgga

SEQ ID NO: 4592146 - DNA, 25 bp, Homo sapien
agccaagttttccacttccaactgg

SEQ ID NO: 4592147 - DNA, 25 bp, Homo sapien
gccttcaataatggaggggactttc

SEQ ID NO: 4592148 - DNA, 25 bp, Homo sapien
gtatctacatcattgaattggatta

SEQ ID NO: 4592149 - DNA, 25 bp, Homo sapien
gggatgcgtactccagtatctacat

SEQ ID NO: 4592150 - DNA, 25 bp, Homo sapien
ccatgctgctacatatggttgtgca

SEQ ID NO: 4592151 - DNA, 25 bp, Homo sapien
cagtttaacatttagatcatcttcc

SEQ ID NO: 4592152 - DNA, 25 bp, Homo sapien
tattgcaacctgtagcgcagaagag

SEQ ID NO: 4592153 - DNA, 25 bp, Homo sapien
caagtcaccttctgacatcacagtg

SEQ ID NO: 4592154 - DNA, 25 bp, Homo sapien
ttctagttgctttaactccacttcg

SEQ ID NO: 4592155 - DNA, 25 bp, Homo sapien
gtttcagtcaccacattgatgacac

SEQ ID NO: 4592156 - DNA, 25 bp, Homo sapien
aactgattctccagcgagtaaggga

SEQ ID NO: 4592157 - DNA, 25 bp, Homo sapien
gattctccagcgagtaagggaacag

SEQ ID NO: 4592158 - DNA, 25 bp, Homo sapien
tcactgagtttcagtcaccacattg

SEQ ID NO: 4592159 - DNA, 25 bp, Homo sapien
aagtggtttaggcatggcaatctgg

SEQ ID NO: 4592160 - DNA, 25 bp, Homo sapien
agaaagtggtttaggcatggcaatc

SEQ ID NO: 4592161 - DNA, 25 bp, Homo sapien
caaagaaagtggtttaggcatggca

SEQ ID NO: 4592162 - DNA, 25 bp, Homo sapien
gaaagtggtttaggcatggcaatct

SEQ ID NO: 4592163 - DNA, 25 bp, Homo sapien
atcctctcaatacggctttcccatt

SEQ ID NO: 4592164 - DNA, 25 bp, Homo sapien
ttcacagttctcaaacatcctctca

SEQ ID NO: 4592165 - DNA, 25 bp, Homo sapien
gttctcaaacatcctctcaatacgg

SEQ ID NO: 4592166 - DNA, 25 bp, Homo sapien
cccgtgggcagcagtaatctccttc

SEQ ID NO: 4592167 - DNA, 25 bp, Homo sapien
aataaaaagtcagatgaatatcctc

SEQ ID NO: 4592168 - DNA, 25 bp, Homo sapien
cataatactgcaaaagaagagctta

SEQ ID NO: 4592169 - DNA, 25 bp, Homo sapien
tagaagtggtataggatgttgatga

SEQ ID NO: 4592170 - DNA, 25 bp, Homo sapien
cactaacttggaggttctaaaaatg

SEQ ID NO: 4592171 - DNA, 25 bp, Homo sapien
taagatttggctagagattcctgca

SEQ ID NO: 4592172 - DNA, 25 bp, Homo sapien
gagatttccccaaagttaatgtgta

SEQ ID NO: 4592173 - DNA, 25 bp, Homo sapien
taatgtgtaagtactgatagggaag

SEQ ID NO: 4592174 - DNA, 25 bp, Homo sapien
taattcacttggctgatgacaggct

SEQ ID NO: 4592175 - DNA, 25 bp, Homo sapien
ctgggtctctcacgtgtctgggaac

SEQ ID NO: 4592176 - DNA, 25 bp, Homo sapien
ttgctgggtctctcacgtgtctggg

SEQ ID NO: 4592177 - DNA, 25 bp, Homo sapien
ggtctctcacgtgtctgggaacctt

SEQ ID NO: 4592178 - DNA, 25 bp, Homo sapien
ctgttgctgggtctctcacgtgtct

SEQ ID NO: 4592179 - DNA, 25 bp, Homo sapien
aggagagagaaagcgcaacgtcaaa

SEQ ID NO: 4592180 - DNA, 25 bp, Homo sapien
gagagaaagcgcaacgtcaaatcag

SEQ ID NO: 4592181 - DNA, 25 bp, Homo sapien
ttcaaatgacacaagtttaggagga

SEQ ID NO: 4592182 - DNA, 25 bp, Homo sapien
tcccagagtagttcactgctttcaa

SEQ ID NO: 4592183 - DNA, 25 bp, Homo sapien
ctggatcatcctccgttgctatgca

SEQ ID NO: 4592184 - DNA, 25 bp, Homo sapien
tcatcctccgttgctatgcacggga

SEQ ID NO: 4592185 - DNA, 25 bp, Homo sapien
cctccgttgctatgcacgggagata

SEQ ID NO: 4592186 - DNA, 25 bp, Homo sapien
ccgttgctatgcacgggagatacat

SEQ ID NO: 4592187 - DNA, 25 bp, Homo sapien
ttttgaaatcaacgcgtccattacc

SEQ ID NO: 4592188 - DNA, 25 bp, Homo sapien
tatgagatgtcacttgtgaaggtga

SEQ ID NO: 4592189 - DNA, 25 bp, Homo sapien
taggaccttgaaggttgagcaactc

SEQ ID NO: 4592190 - DNA, 25 bp, Homo sapien
tcttgaaaatagtcctctctgtgct

SEQ ID NO: 4592191 - DNA, 25 bp, Homo sapien
gagtgccatcctagtgcaggagcca

SEQ ID NO: 4592192 - DNA, 25 bp, Homo sapien
agtgccatcctagtgcaggagccat

SEQ ID NO: 4592193 - DNA, 25 bp, Homo sapien
ggaaacaagatgttccacctctgga

SEQ ID NO: 4592194 - DNA, 25 bp, Homo sapien
tggaaacaagatgttccacctctgg

SEQ ID NO: 4592195 - DNA, 25 bp, Homo sapien
gctattgccatgtagtcattactgt

SEQ ID NO: 4592196 - DNA, 25 bp, Homo sapien
tattgccatgtagtcattactgtgc

SEQ ID NO: 4592197 - DNA, 25 bp, Homo sapien
ttgccatgtagtcattactgtgcca

SEQ ID NO: 4592198 - DNA, 25 bp, Homo sapien
tgccatgtagtcattactgtgccac

SEQ ID NO: 4592199 - DNA, 25 bp, Homo sapien
gagcatgttggattactacatctga

SEQ ID NO: 4592200 - DNA, 25 bp, Homo sapien
ctacatctgaaaggccgtactggtg

SEQ ID NO: 4592201 - DNA, 25 bp, Homo sapien
ttgcacatgaaaagcgaagccctga

SEQ ID NO: 4592202 - DNA, 25 bp, Homo sapien
tggtgaccaaagggtgacctgacac

SEQ ID NO: 4592203 - DNA, 25 bp, Homo sapien
caatactggtatgtgagctatcagc

SEQ ID NO: 4592204 - DNA, 25 bp, Homo sapien
ctgtctccttggacactgcagtttt

SEQ ID NO: 4592205 - DNA, 25 bp, Homo sapien
gagctatcagctacttcccttctat

SEQ ID NO: 4592206 - DNA, 25 bp, Homo sapien
ttgtcactttcaatactggtatgtg

SEQ ID NO: 4592207 - DNA, 25 bp, Homo sapien
ttctgctgaggtatccatacatcca

SEQ ID NO: 4592208 - DNA, 25 bp, Homo sapien
ctgctgaggtatccatacatccatt

SEQ ID NO: 4592209 - DNA, 25 bp, Homo sapien
tcttctgctgaggtatccatacatc

SEQ ID NO: 4592210 - DNA, 25 bp, Homo sapien
tctcttctgctgaggtatccataca

SEQ ID NO: 4592211 - DNA, 25 bp, Homo sapien
gccatgaaatcacggttttcctcct

SEQ ID NO: 4592212 - DNA, 25 bp, Homo sapien
ctgggcccggccatgaaatcacggt

SEQ ID NO: 4592213 - DNA, 25 bp, Homo sapien
catttggctcctcagattctcatta

SEQ ID NO: 4592214 - DNA, 25 bp, Homo sapien
gctcctcagattctcattacttgtg

SEQ ID NO: 4592215 - DNA, 25 bp, Homo sapien
gaatgtgttgcttcatgctggccta

SEQ ID NO: 4592216 - DNA, 25 bp, Homo sapien
gaaactatcttacacaacaccaggg

SEQ ID NO: 4592217 - DNA, 25 bp, Homo sapien
tattactgtatatcctaggcaacac

SEQ ID NO: 4592218 - DNA, 25 bp, Homo sapien
cccatgaaataaggctcaatatgct

SEQ ID NO: 4592219 - DNA, 25 bp, Homo sapien
aaatgctttctgcactggaatagca

SEQ ID NO: 4592220 - DNA, 25 bp, Homo sapien
caaccccaggttttacatgaaatgc

SEQ ID NO: 4592221 - DNA, 25 bp, Homo sapien
ttacctcatgtcatcaaccccaggt

SEQ ID NO: 4592222 - DNA, 25 bp, Homo sapien
caaaaacgtcatcacaatccttgcc

SEQ ID NO: 4592223 - DNA, 25 bp, Homo sapien
taaatgcactactgggaaaaaccca

SEQ ID NO: 4592224 - DNA, 25 bp, Homo sapien
cagagtgggctttgtgaatgcaaca

SEQ ID NO: 4592225 - DNA, 25 bp, Homo sapien
caacaaagaagtgcaccaggctgtg

SEQ ID NO: 4592226 - DNA, 25 bp, Homo sapien
caactggttgtctccgcatggcaca

SEQ ID NO: 4592227 - DNA, 25 bp, Homo sapien
tcatctgtccaacggattccgactt

SEQ ID NO: 4592228 - DNA, 25 bp, Homo sapien
cgactttgtggcacattctctcctt

SEQ ID NO: 4592229 - DNA, 25 bp, Homo sapien
ctgcacccatagacaggctcttctt

SEQ ID NO: 4592230 - DNA, 25 bp, Homo sapien
ccacttcttgccctgcacccataga

SEQ ID NO: 4592231 - DNA, 25 bp, Homo sapien
taggtggctgagactggaaggtctt

SEQ ID NO: 4592232 - DNA, 25 bp, Homo sapien
agggcaggaagcttaggtggctgag

SEQ ID NO: 4592233 - DNA, 25 bp, Homo sapien
ctgacagccagagtggaatgagggc

SEQ ID NO: 4592234 - DNA, 25 bp, Homo sapien
ctgccgatgacaccaaactgacagc

SEQ ID NO: 4592235 - DNA, 25 bp, Homo sapien
acaccggtttgcaaaactggttgct

SEQ ID NO: 4592236 - DNA, 25 bp, Homo sapien
ctcttattgacaacaccggtttgca

SEQ ID NO: 4592237 - DNA, 25 bp, Homo sapien
gtgaattaattctcataaagagttc

SEQ ID NO: 4592238 - DNA, 25 bp, Homo sapien
aaggtgaattaattctcataaagag

SEQ ID NO: 4592239 - DNA, 25 bp, Homo sapien
tctctgaaaggttttccctgcacag

SEQ ID NO: 4592240 - DNA, 25 bp, Homo sapien
tcacatgcacacgagctttctgctc

SEQ ID NO: 4592241 - DNA, 25 bp, Homo sapien
ctcacatgcacacgagctttctgct

SEQ ID NO: 4592242 - DNA, 25 bp, Homo sapien
cacatgcacacgagctttctgctcc

SEQ ID NO: 4592243 - DNA, 25 bp, Homo sapien
tctcggcagactcatgaatatcaca

SEQ ID NO: 4592244 - DNA, 25 bp, Homo sapien
tggaactctcggcagactcatgaat

SEQ ID NO: 4592245 - DNA, 25 bp, Homo sapien
gctttggaactctcggcagactcat

SEQ ID NO: 4592246 - DNA, 25 bp, Homo sapien
actctcggcagactcatgaatatca

SEQ ID NO: 4592247 - DNA, 25 bp, Homo sapien
ctcctgccacaatcgttgatcctga

SEQ ID NO: 4592248 - DNA, 25 bp, Homo sapien
gccacaatcgttgatcctgatccac

SEQ ID NO: 4592249 - DNA, 25 bp, Homo sapien
tcttcctcctgccacaatcgttgat

SEQ ID NO: 4592250 - DNA, 25 bp, Homo sapien
acaatcgttgatcctgatccactaa

SEQ ID NO: 4592251 - DNA, 25 bp, Homo sapien
tctggactcagccactaaatctgac

SEQ ID NO: 4592252 - DNA, 25 bp, Homo sapien
gaggacattccttgggtacagccac

SEQ ID NO: 4592253 - DNA, 25 bp, Homo sapien
taaatctgacatgcaaggtgaactc

SEQ ID NO: 4592254 - DNA, 25 bp, Homo sapien
ccatctccgggtttctctggactca

SEQ ID NO: 4592255 - DNA, 25 bp, Homo sapien
ctgcagaagacaatatagcaggtgc

SEQ ID NO: 4592256 - DNA, 25 bp, Homo sapien
tgaggcgtgaaggtctaggcagagg

SEQ ID NO: 4592257 - DNA, 25 bp, Homo sapien
catcgctgaagtcgtggacctgatt

SEQ ID NO: 4592258 - DNA, 25 bp, Homo sapien
tgaaagatgttagttcatcgctgaa

SEQ ID NO: 4592259 - DNA, 25 bp, Homo sapien
cacgaagcgctgcagtctgtgaggc

SEQ ID NO: 4592260 - DNA, 25 bp, Homo sapien
ctcctccttcctccaatccacccat

SEQ ID NO: 4592261 - DNA, 25 bp, Homo sapien
ccttagtgggggctccactcctcct

SEQ ID NO: 4592262 - DNA, 25 bp, Homo sapien
tcctcctccttcctccaatccaccc

SEQ ID NO: 4592263 - DNA, 25 bp, Homo sapien
ctggagcaggaatgccttagtgggg

SEQ ID NO: 4592264 - DNA, 25 bp, Homo sapien
ggtgtggggtccatcaaaatggtca

SEQ ID NO: 4592265 - DNA, 25 bp, Homo sapien
tgtggggtccatcaaaatggtcatc

SEQ ID NO: 4592266 - DNA, 25 bp, Homo sapien
aggtgtggggtccatcaaaatggtc

SEQ ID NO: 4592267 - DNA, 25 bp, Homo sapien
ctgaggtgtggggtccatcaaaatg

SEQ ID NO: 4592268 - DNA, 25 bp, Homo sapien
ccaggcactcacactagggaagcta

SEQ ID NO: 4592269 - DNA, 25 bp, Homo sapien
aagtcagcgtctacagaaggttggc

SEQ ID NO: 4592270 - DNA, 25 bp, Homo sapien
gatcaaggtactgccaaagtcagcg

SEQ ID NO: 4592271 - DNA, 25 bp, Homo sapien
cagtcacttgcaaggaaaggcaggg

SEQ ID NO: 4592272 - DNA, 25 bp, Homo sapien
catccaaatggtttgctccactgat

SEQ ID NO: 4592273 - DNA, 25 bp, Homo sapien
catcagctagggcaccatttttggt

SEQ ID NO: 4592274 - DNA, 25 bp, Homo sapien
agttttgccaatgacggaagtcaca

SEQ ID NO: 4592275 - DNA, 25 bp, Homo sapien
actgatgtaaaggtatgcactggcc

SEQ ID NO: 4592276 - DNA, 25 bp, Homo sapien
tgagctactatttttggccttccaa

SEQ ID NO: 4592277 - DNA, 25 bp, Homo sapien
tccatttgggtaatggtaacagatg

SEQ ID NO: 4592278 - DNA, 25 bp, Homo sapien
tctagcaggcgctgtctggttccta

SEQ ID NO: 4592279 - DNA, 25 bp, Homo sapien
ttttcaccagaatgcatgctccatt

SEQ ID NO: 4592280 - DNA, 25 bp, Homo sapien
tccagaaaggcatcccattgaggac

SEQ ID NO: 4592281 - DNA, 25 bp, Homo sapien
cattgaggaccttatttcagcatca

SEQ ID NO: 4592282 - DNA, 25 bp, Homo sapien
tccaggtcaaggtcctcccttgagc

SEQ ID NO: 4592283 - DNA, 25 bp, Homo sapien
ctcccttgagcttgaaattggcttc

SEQ ID NO: 4592284 - DNA, 25 bp, Homo sapien
agcagcaaatgaacgaaggccactg

SEQ ID NO: 4592285 - DNA, 25 bp, Homo sapien
ggccactgctaggtcagtccagctg

SEQ ID NO: 4592286 - DNA, 25 bp, Homo sapien
cacagatgggtgataaatccagcag

SEQ ID NO: 4592287 - DNA, 25 bp, Homo sapien
tctgagtgtgagctgtacaaggtga

SEQ ID NO: 4592288 - DNA, 25 bp, Homo sapien
gcctggcatttacggctgtcctcca

SEQ ID NO: 4592289 - DNA, 25 bp, Homo sapien
gctgacctacgtgcaaattcttcag

SEQ ID NO: 4592290 - DNA, 25 bp, Homo sapien
ttgctgacctacgtgcaaattcttc

SEQ ID NO: 4592291 - DNA, 25 bp, Homo sapien
tcttcagcctggcatttacggctgt

SEQ ID NO: 4592292 - DNA, 25 bp, Homo sapien
ccagagttcttttaagatggacaaa

SEQ ID NO: 4592293 - DNA, 25 bp, Homo sapien
caagcctgctgattacatccctgta

SEQ ID NO: 4592294 - DNA, 25 bp, Homo sapien
ccctgtactggccaaccagagttct

SEQ ID NO: 4592295 - DNA, 25 bp, Homo sapien
tcaacagaacggcttgcagcaggct

SEQ ID NO: 4592296 - DNA, 25 bp, Homo sapien
ttaaccagtcccgatgacgctcctg

SEQ ID NO: 4592297 - DNA, 25 bp, Homo sapien
ccagtcccgatgacgctcctgccat

SEQ ID NO: 4592298 - DNA, 25 bp, Homo sapien
aaccagtcccgatgacgctcctgcc

SEQ ID NO: 4592299 - DNA, 25 bp, Homo sapien
taaccagtcccgatgacgctcctgc

SEQ ID NO: 4592300 - DNA, 25 bp, Homo sapien
cagacactgggagcatttggtctca

SEQ ID NO: 4592301 - DNA, 25 bp, Homo sapien
tggaatccaaactccagcggcagat

SEQ ID NO: 4592302 - DNA, 25 bp, Homo sapien
taggaggcatcaggtgagttactct

SEQ ID NO: 4592303 - DNA, 25 bp, Homo sapien
aggatggaaatttctacagcctgaa

SEQ ID NO: 4592304 - DNA, 25 bp, Homo sapien
tttcctggcaccatttgatgtgccc

SEQ ID NO: 4592305 - DNA, 25 bp, Homo sapien
cagaggacaaagaggtcactgctgc

SEQ ID NO: 4592306 - DNA, 25 bp, Homo sapien
cccagaggcagaggacaaagaggtc

SEQ ID NO: 4592307 - DNA, 25 bp, Homo sapien
tcacagcctctgcagagcattgagg

SEQ ID NO: 4592308 - DNA, 25 bp, Homo sapien
cagttgctgcactccttatctggaa

SEQ ID NO: 4592309 - DNA, 25 bp, Homo sapien
gctgcactccttatctggaacttga

SEQ ID NO: 4592310 - DNA, 25 bp, Homo sapien
acagacacacatgttctcagttgct

SEQ ID NO: 4592311 - DNA, 25 bp, Homo sapien
tctggaacttgattagggagatggt

SEQ ID NO: 4592312 - DNA, 25 bp, Homo sapien
ttttggtgaaagaaagtgtggagag

SEQ ID NO: 4592313 - DNA, 25 bp, Homo sapien
tgttcggaagtgaagagcacgtgat

SEQ ID NO: 4592314 - DNA, 25 bp, Homo sapien
gatgttgttcggaagtgaagagcac

SEQ ID NO: 4592315 - DNA, 25 bp, Homo sapien
tgttgttcggaagtgaagagcacgt

SEQ ID NO: 4592316 - DNA, 25 bp, Homo sapien
gatgaacagtcaagcataagaccca

SEQ ID NO: 4592317 - DNA, 25 bp, Homo sapien
tctaaacctccagccacgagatcat

SEQ ID NO: 4592318 - DNA, 25 bp, Homo sapien
tcattttccatgagaggaggtagga

SEQ ID NO: 4592319 - DNA, 25 bp, Homo sapien
cagtatttgcccatgctctaaacct

SEQ ID NO: 4592320 - DNA, 25 bp, Homo sapien
cacagggctctttggtttcaggcca

SEQ ID NO: 4592321 - DNA, 25 bp, Homo sapien
tcaggaccatgacccgagtgctgag

SEQ ID NO: 4592322 - DNA, 25 bp, Homo sapien
cagatagatccactttgccttggga

SEQ ID NO: 4592323 - DNA, 25 bp, Homo sapien
gagggtgacagccatttttcaagcc

SEQ ID NO: 4592324 - DNA, 25 bp, Homo sapien
gacaggaaagtccttctgtaggctc

SEQ ID NO: 4592325 - DNA, 25 bp, Homo sapien
gggtgagatagcagagcacgaactc

SEQ ID NO: 4592326 - DNA, 25 bp, Homo sapien
actctgattgacaggaaagtccttc

SEQ ID NO: 4592327 - DNA, 25 bp, Homo sapien
tagcagagcacgaactctgattgac

SEQ ID NO: 4592328 - DNA, 25 bp, Homo sapien
gatgagcctcgctgagggactcttc

SEQ ID NO: 4592329 - DNA, 25 bp, Homo sapien
cctcgctgagggactcttcaaaggc

SEQ ID NO: 4592330 - DNA, 25 bp, Homo sapien
tgagcctcgctgagggactcttcaa

SEQ ID NO: 4592331 - DNA, 25 bp, Homo sapien
ctggatgagcctcgctgagggactc

SEQ ID NO: 4592332 - DNA, 25 bp, Homo sapien
cttttgccagttgaccctacacagg

SEQ ID NO: 4592333 - DNA, 25 bp, Homo sapien
ggtgtcctggtggtgcaaggtctgg

SEQ ID NO: 4592334 - DNA, 25 bp, Homo sapien
tacacaggggatattgcagctcctc

SEQ ID NO: 4592335 - DNA, 25 bp, Homo sapien
gagagtgggtgtcctggtggtgcaa

SEQ ID NO: 4592336 - DNA, 25 bp, Homo sapien
agttaataaggctgtcgctgctgcc

SEQ ID NO: 4592337 - DNA, 25 bp, Homo sapien
cctggggagttaatagaaggccaag

SEQ ID NO: 4592338 - DNA, 25 bp, Homo sapien
tttcagttaataaggctgtcgctgc

SEQ ID NO: 4592339 - DNA, 25 bp, Homo sapien
atagaaggccaaggaagccatgtga

SEQ ID NO: 4592340 - DNA, 25 bp, Homo sapien
cagttccagttggggtgcactggcc

SEQ ID NO: 4592341 - DNA, 25 bp, Homo sapien
taatagctgcattatcaaagcgggt

SEQ ID NO: 4592342 - DNA, 25 bp, Homo sapien
tgtgagatgcagccggcacaggcaa

SEQ ID NO: 4592343 - DNA, 25 bp, Homo sapien
acaggcaaggctggccagttccagt

SEQ ID NO: 4592344 - DNA, 25 bp, Homo sapien
ctgtgggtcctggtgaaagtgattc

SEQ ID NO: 4592345 - DNA, 25 bp, Homo sapien
gggtcctggtgaaagtgattccctc

SEQ ID NO: 4592346 - DNA, 25 bp, Homo sapien
tgtgggtcctggtgaaagtgattcc

SEQ ID NO: 4592347 - DNA, 25 bp, Homo sapien
tgctgtgggtcctggtgaaagtgat

SEQ ID NO: 4592348 - DNA, 25 bp, Homo sapien
ttgttccatgcacaagtcttggact

SEQ ID NO: 4592349 - DNA, 25 bp, Homo sapien
ccatgcacaagtcttggacttccca

SEQ ID NO: 4592350 - DNA, 25 bp, Homo sapien
gacttcccagaaagacgttgaccat

SEQ ID NO: 4592351 - DNA, 25 bp, Homo sapien
ttggacttcccagaaagacgttgac

SEQ ID NO: 4592352 - DNA, 25 bp, Homo sapien
tccataacagatgtcaggctcaatc

SEQ ID NO: 4592353 - DNA, 25 bp, Homo sapien
tattcagcccaactgttccttggca

SEQ ID NO: 4592354 - DNA, 25 bp, Homo sapien
tgtcaggctcaatccaatattcagc

SEQ ID NO: 4592355 - DNA, 25 bp, Homo sapien
ctggttgaactccataacagatgtc

SEQ ID NO: 4592356 - DNA, 25 bp, Homo sapien
ggagctgccaccgatatgagaggca

SEQ ID NO: 4592357 - DNA, 25 bp, Homo sapien
cgtcaggtgtgaatccaggatagca

SEQ ID NO: 4592358 - DNA, 25 bp, Homo sapien
tctccaacgccctagtcgtttcaag

SEQ ID NO: 4592359 - DNA, 25 bp, Homo sapien
tcgtttcaagctagtgagagtgccc

SEQ ID NO: 4592360 - DNA, 25 bp, Homo sapien
cttgttcttgatataattacagtga

SEQ ID NO: 4592361 - DNA, 25 bp, Homo sapien
ggaggtgcctcttgtacgccagctc

SEQ ID NO: 4592362 - DNA, 25 bp, Homo sapien
ctgttgtttcggtgggaggtgcctc

SEQ ID NO: 4592363 - DNA, 25 bp, Homo sapien
agcagcagtgacaggtgccgccaat

SEQ ID NO: 4592364 - DNA, 25 bp, Homo sapien
ccctcttgctccttgtatttacttc

SEQ ID NO: 4592365 - DNA, 25 bp, Homo sapien
gctccttgtatttacttcccagacg

SEQ ID NO: 4592366 - DNA, 25 bp, Homo sapien
ccttgtatttacttcccagacgatc

SEQ ID NO: 4592367 - DNA, 25 bp, Homo sapien
tcttgctccttgtatttacttccca

SEQ ID NO: 4592368 - DNA, 25 bp, Homo sapien
cgcttgcgttccagctcttcgctgt

SEQ ID NO: 4592369 - DNA, 25 bp, Homo sapien
cttgcgttccagctcttcgctgtca

SEQ ID NO: 4592370 - DNA, 25 bp, Homo sapien
tgccgcttgcgttccagctcttcgc

SEQ ID NO: 4592371 - DNA, 25 bp, Homo sapien
cttctgccgcttgcgttccagctct

SEQ ID NO: 4592372 - DNA, 25 bp, Homo sapien
taatcttcagattcttgaaggtcaa

SEQ ID NO: 4592373 - DNA, 25 bp, Homo sapien
aatcttcagattcttgaaggtcaaa

SEQ ID NO: 4592374 - DNA, 25 bp, Homo sapien
tccttgtccatcagcaggccatcag

SEQ ID NO: 4592375 - DNA, 25 bp, Homo sapien
tgtccatcagcaggccatcagtagg

SEQ ID NO: 4592376 - DNA, 25 bp, Homo sapien
ctccttgtccatcagcaggccatca

SEQ ID NO: 4592377 - DNA, 25 bp, Homo sapien
cttgtccatcagcaggccatcagta

SEQ ID NO: 4592378 - DNA, 25 bp, Homo sapien
actctgcccttgaaccgctggatgg

SEQ ID NO: 4592379 - DNA, 25 bp, Homo sapien
ctggccagggcgcttgactgagcat

SEQ ID NO: 4592380 - DNA, 25 bp, Homo sapien
ccttgcgttggatgggagacacaga

SEQ ID NO: 4592381 - DNA, 25 bp, Homo sapien
aaacaaggagcggttcacactcagc

SEQ ID NO: 4592382 - DNA, 25 bp, Homo sapien
ggaacacccctgacaagtctcctgt

SEQ ID NO: 4592383 - DNA, 25 bp, Homo sapien
ctcttctggaacacccctgacaagt

SEQ ID NO: 4592384 - DNA, 25 bp, Homo sapien
tccaccttggctaaagggaagccta

SEQ ID NO: 4592385 - DNA, 25 bp, Homo sapien
cctgtccaccttggctaaagggaag

SEQ ID NO: 4592386 - DNA, 25 bp, Homo sapien
ggacaggatcaatactgacagcagc

SEQ ID NO: 4592387 - DNA, 25 bp, Homo sapien
tcaggacaggatcaatactgacagc

SEQ ID NO: 4592388 - DNA, 25 bp, Homo sapien
caggatcaatactgacagcagctcc

SEQ ID NO: 4592389 - DNA, 25 bp, Homo sapien
aggatcaatactgacagcagctccg

SEQ ID NO: 4592390 - DNA, 25 bp, Homo sapien
ttcccattgaggtgctgtttgtgtt

SEQ ID NO: 4592391 - DNA, 25 bp, Homo sapien
tccatgggcacagattaggtccagc

SEQ ID NO: 4592392 - DNA, 25 bp, Homo sapien
ccccacggggatgagttctatagct

SEQ ID NO: 4592393 - DNA, 25 bp, Homo sapien
tgaagctgtgtcctgcaccgcagcc

SEQ ID NO: 4592394 - DNA, 25 bp, Homo sapien
cagcggtgatgccacgatagaaacc

SEQ ID NO: 4592395 - DNA, 25 bp, Homo sapien
tttaagtcagcagcggtgatgccac

SEQ ID NO: 4592396 - DNA, 25 bp, Homo sapien
cacgatagaaaccagcagttgtgcc

SEQ ID NO: 4592397 - DNA, 25 bp, Homo sapien
gaaaccagcagttgtgccacattgt

SEQ ID NO: 4592398 - DNA, 25 bp, Homo sapien
cttgttctagtccgtaaacacatga

SEQ ID NO: 4592399 - DNA, 25 bp, Homo sapien
gtgacttgcctgtgaagtatgttca

SEQ ID NO: 4592400 - DNA, 25 bp, Homo sapien
ttgttctagtccgtaaacacatgag

SEQ ID NO: 4592401 - DNA, 25 bp, Homo sapien
gacttgcctgtgaagtatgttcaat

SEQ ID NO: 4592402 - DNA, 25 bp, Homo sapien
gcatgaatcaagcaccatagctgca

SEQ ID NO: 4592403 - DNA, 25 bp, Homo sapien
caggactctcttggagggctagtga

SEQ ID NO: 4592404 - DNA, 25 bp, Homo sapien
ttctagccctgggtaactctgctgg

SEQ ID NO: 4592405 - DNA, 25 bp, Homo sapien
ccaggaatcctcatcttgttttcta

SEQ ID NO: 4592406 - DNA, 25 bp, Homo sapien
aatgctgtcaggctgaacaatctgc

SEQ ID NO: 4592407 - DNA, 25 bp, Homo sapien
tctttgtaaagggattgtctgtagc

SEQ ID NO: 4592408 - DNA, 25 bp, Homo sapien
tgcttctgggagttaaaagtctttg

SEQ ID NO: 4592409 - DNA, 25 bp, Homo sapien
caatccatctattaatgctgtcagg

SEQ ID NO: 4592410 - DNA, 25 bp, Homo sapien
tgagagctggcgcaagagcttcctg

SEQ ID NO: 4592411 - DNA, 25 bp, Homo sapien
agagcttcctgggtataatgggcat

SEQ ID NO: 4592412 - DNA, 25 bp, Homo sapien
aaggcttggggtgagagctggcgca

SEQ ID NO: 4592413 - DNA, 25 bp, Homo sapien
caagagcttcctgggtataatgggc

SEQ ID NO: 4592414 - DNA, 25 bp, Homo sapien
cactgacatacagaacgctgctcaa

SEQ ID NO: 4592415 - DNA, 25 bp, Homo sapien
aacgctgctcaaagccagtgtctgt

SEQ ID NO: 4592416 - DNA, 25 bp, Homo sapien
agaacgctgctcaaagccagtgtct

SEQ ID NO: 4592417 - DNA, 25 bp, Homo sapien
gaacgctgctcaaagccagtgtctg

SEQ ID NO: 4592418 - DNA, 25 bp, Homo sapien
ggtctgttcgtccaaatgacttcca

SEQ ID NO: 4592419 - DNA, 25 bp, Homo sapien
tatggtaaatatggtcacaggagca

SEQ ID NO: 4592420 - DNA, 25 bp, Homo sapien
ctaagagttgctgaaatacagtaca

SEQ ID NO: 4592421 - DNA, 25 bp, Homo sapien
cacaggagcattagcagccattgac

SEQ ID NO: 4592422 - DNA, 25 bp, Homo sapien
gggcagttgaaatgatgtccacaca

SEQ ID NO: 4592423 - DNA, 25 bp, Homo sapien
tgtgtactcattcaccttgaccttc

SEQ ID NO: 4592424 - DNA, 25 bp, Homo sapien
gacaactggctgcctatccatgtgt

SEQ ID NO: 4592425 - DNA, 25 bp, Homo sapien
ccttcttgggcagttgaaatgatgt

SEQ ID NO: 4592426 - DNA, 25 bp, Homo sapien
gccatttgccctgtaccacctgttt

SEQ ID NO: 4592427 - DNA, 25 bp, Homo sapien
tgggctgctctcaccctccgctggc

SEQ ID NO: 4592428 - DNA, 25 bp, Homo sapien
tcaccctccgctggccagccatttg

SEQ ID NO: 4592429 - DNA, 25 bp, Homo sapien
tggccagccatttgccctgtaccac

SEQ ID NO: 4592430 - DNA, 25 bp, Homo sapien
tggggagttactaagcactgagaag

SEQ ID NO: 4592431 - DNA, 25 bp, Homo sapien
ccaaactggggagttactaagcact

SEQ ID NO: 4592432 - DNA, 25 bp, Homo sapien
actggggagttactaagcactgaga

SEQ ID NO: 4592433 - DNA, 25 bp, Homo sapien
aaactggggagttactaagcactga

SEQ ID NO: 4592434 - DNA, 25 bp, Homo sapien
ccatacagtggtgaatcctgaagtc

SEQ ID NO: 4592435 - DNA, 25 bp, Homo sapien
tgttgactttccatacagtggtgaa

SEQ ID NO: 4592436 - DNA, 25 bp, Homo sapien
gcattgttgactttccatacagtgg

SEQ ID NO: 4592437 - DNA, 25 bp, Homo sapien
taattttgcattgttgactttccat

SEQ ID NO: 4592438 - DNA, 25 bp, Homo sapien
ctccagggccagagaatttgatgtg

SEQ ID NO: 4592439 - DNA, 25 bp, Homo sapien
ggcattggattagagcatcccctgg

SEQ ID NO: 4592440 - DNA, 25 bp, Homo sapien
tcccctggtaatgagtatgcccttc

SEQ ID NO: 4592441 - DNA, 25 bp, Homo sapien
cacagtgccaagataaaagtgtgag

SEQ ID NO: 4592442 - DNA, 25 bp, Homo sapien
ctctcgctggctgtcataggaagcc

SEQ ID NO: 4592443 - DNA, 25 bp, Homo sapien
tctcgctggctgtcataggaagcca

SEQ ID NO: 4592444 - DNA, 25 bp, Homo sapien
tcgctggctgtcataggaagccact

SEQ ID NO: 4592445 - DNA, 25 bp, Homo sapien
cgctggctgtcataggaagccactg

SEQ ID NO: 4592446 - DNA, 25 bp, Homo sapien
tcaggaggatacaggtctacacacg

SEQ ID NO: 4592447 - DNA, 25 bp, Homo sapien
catgcacaatgggagaaacaacctt

SEQ ID NO: 4592448 - DNA, 25 bp, Homo sapien
gattgattctccaagactcgccagg

SEQ ID NO: 4592449 - DNA, 25 bp, Homo sapien
cacatgtttgccttgggatggaagc

SEQ ID NO: 4592450 - DNA, 25 bp, Homo sapien
tcctctcagggaacgtaatatccta

SEQ ID NO: 4592451 - DNA, 25 bp, Homo sapien
ttcattggcaaaattcctctcaggg

SEQ ID NO: 4592452 - DNA, 25 bp, Homo sapien
ccagatattgaaagtttgctgcaca

SEQ ID NO: 4592453 - DNA, 25 bp, Homo sapien
aagtaggtaccagctgattttccag

SEQ ID NO: 4592454 - DNA, 25 bp, Homo sapien
aaaaaatcccacttagccagtgccg

SEQ ID NO: 4592455 - DNA, 25 bp, Homo sapien
tataaaattgtattcgctggccagt

SEQ ID NO: 4592456 - DNA, 25 bp, Homo sapien
gcagatcgttcctccattagcagtc

SEQ ID NO: 4592457 - DNA, 25 bp, Homo sapien
tttgccttaagaacccagaagtagc

SEQ ID NO: 4592458 - DNA, 25 bp, Homo sapien
gatgcacactgagtcaaacatagac

SEQ ID NO: 4592459 - DNA, 25 bp, Homo sapien
gaaaatgattgtgtataagcagtcc

SEQ ID NO: 4592460 - DNA, 25 bp, Homo sapien
aacaactgcccttcctagtctggga

SEQ ID NO: 4592461 - DNA, 25 bp, Homo sapien
taaagtcttccaagttgaggctccg

SEQ ID NO: 4592462 - DNA, 25 bp, Homo sapien
aaaacatacacccaggcttcgctgc

SEQ ID NO: 4592463 - DNA, 25 bp, Homo sapien
tacacccaggcttcgctgcagaatt

SEQ ID NO: 4592464 - DNA, 25 bp, Homo sapien
caggcttcgctgcagaatttacact

SEQ ID NO: 4592465 - DNA, 25 bp, Homo sapien
caattcagggggttgtttgctgtcc

SEQ ID NO: 4592466 - DNA, 25 bp, Homo sapien
cacatctgatagaattggaggagcc

SEQ ID NO: 4592467 - DNA, 25 bp, Homo sapien
tgaactgcaacatgggcctctgaat

SEQ ID NO: 4592468 - DNA, 25 bp, Homo sapien
caaagtactgatgtggtagctctcc

SEQ ID NO: 4592469 - DNA, 25 bp, Homo sapien
cctgtggaacagttaatgcgtgcca

SEQ ID NO: 4592470 - DNA, 25 bp, Homo sapien
tgaaccagtgactaagccaaataga

SEQ ID NO: 4592471 - DNA, 25 bp, Homo sapien
tatgaaacttcaccctgaaccagtg

SEQ ID NO: 4592472 - DNA, 25 bp, Homo sapien
aacacgtctcaaaagcggctctcag

SEQ ID NO: 4592473 - DNA, 25 bp, Homo sapien
cattctccatggctagatactcaaa

SEQ ID NO: 4592474 - DNA, 25 bp, Homo sapien
atttgtctggccctgtacagttcac

SEQ ID NO: 4592475 - DNA, 25 bp, Homo sapien
ttatttgtctggccctgtacagttc

SEQ ID NO: 4592476 - DNA, 25 bp, Homo sapien
tatttgtctggccctgtacagttca

SEQ ID NO: 4592477 - DNA, 25 bp, Homo sapien
cccaatttggactctcatttcgaaa

SEQ ID NO: 4592478 - DNA, 25 bp, Homo sapien
aaatctcagtggtaacccaatttgg

SEQ ID NO: 4592479 - DNA, 25 bp, Homo sapien
ctgggatgctttttgtctactgaac

SEQ ID NO: 4592480 - DNA, 25 bp, Homo sapien
ctgaacagtagtccgaaacagaggt

SEQ ID NO: 4592481 - DNA, 25 bp, Homo sapien
gtggcttgtcatcacaaacacctgg

SEQ ID NO: 4592482 - DNA, 25 bp, Homo sapien
tcctggcatgaacagggtaccactt

SEQ ID NO: 4592483 - DNA, 25 bp, Homo sapien
cacgtatttttgttggcacttgggc

SEQ ID NO: 4592484 - DNA, 25 bp, Homo sapien
cagaaacatttctccgtgggaatcc

SEQ ID NO: 4592485 - DNA, 25 bp, Homo sapien
tgcaactagttgtcagatgcccaca

SEQ ID NO: 4592486 - DNA, 25 bp, Homo sapien
gggtcacaagagataaactgccata

SEQ ID NO: 4592487 - DNA, 25 bp, Homo sapien
tagcaggcttgctcctagcccagtg

SEQ ID NO: 4592488 - DNA, 25 bp, Homo sapien
tgtttcagccacaagataggttcaa

SEQ ID NO: 4592489 - DNA, 25 bp, Homo sapien
ctggaaacttccaattctcctaaag

SEQ ID NO: 4592490 - DNA, 25 bp, Homo sapien
tggaaacttccaattctcctaaaga

SEQ ID NO: 4592491 - DNA, 25 bp, Homo sapien
gctggaaacttccaattctcctaaa

SEQ ID NO: 4592492 - DNA, 25 bp, Homo sapien
caattttctcactgtttgaagtcca

SEQ ID NO: 4592493 - DNA, 25 bp, Homo sapien
aactgtttgtggctctgggattcac

SEQ ID NO: 4592494 - DNA, 25 bp, Homo sapien
tgggattcaccttgtattaagactt

SEQ ID NO: 4592495 - DNA, 25 bp, Homo sapien
tctgctttgtgtgccgaatcattcg

SEQ ID NO: 4592496 - DNA, 25 bp, Homo sapien
tggcaggtgggttcattcaacaaac

SEQ ID NO: 4592497 - DNA, 25 bp, Homo sapien
caggttggctccctaccaaagcaga

SEQ ID NO: 4592498 - DNA, 25 bp, Homo sapien
tccagattccgagcaaagcactaaa

SEQ ID NO: 4592499 - DNA, 25 bp, Homo sapien
caatcactgtactttggagtcaagg

SEQ ID NO: 4592500 - DNA, 25 bp, Homo sapien
tcaaatctaccagtcaccaggcctt

SEQ ID NO: 4592501 - DNA, 25 bp, Homo sapien
tggccaaggccacgtggataactaa

SEQ ID NO: 4592502 - DNA, 25 bp, Homo sapien
caggtgggaccagaacctagcttta

SEQ ID NO: 4592503 - DNA, 25 bp, Homo sapien
gtactctcccggcatggctgactca

SEQ ID NO: 4592504 - DNA, 25 bp, Homo sapien
tacttctgagttgagtctcgtgcag

SEQ ID NO: 4592505 - DNA, 25 bp, Homo sapien
cactagtgtattccgcaaagtaggc

SEQ ID NO: 4592506 - DNA, 25 bp, Homo sapien
cccgttggtgttggtttctgcagta

SEQ ID NO: 4592507 - DNA, 25 bp, Homo sapien
gaagctggctgacagctctcccgtt

SEQ ID NO: 4592508 - DNA, 25 bp, Homo sapien
ctcagtccaggagaggatccggtga

SEQ ID NO: 4592509 - DNA, 25 bp, Homo sapien
ccaaggtcccctcagagttcaggga

SEQ ID NO: 4592510 - DNA, 25 bp, Homo sapien
gggcagagttaggttcacatccaaa

SEQ ID NO: 4592511 - DNA, 25 bp, Homo sapien
tgactagaggaggttcagtgatgcc

SEQ ID NO: 4592512 - DNA, 25 bp, Homo sapien
tcccctcccagtccagctaaccagc

SEQ ID NO: 4592513 - DNA, 25 bp, Homo sapien
cagctaaccagcctcgttgatccca

SEQ ID NO: 4592514 - DNA, 25 bp, Homo sapien
gctaaccagcctcgttgatcccaaa

SEQ ID NO: 4592515 - DNA, 25 bp, Homo sapien
taaccagcctcgttgatcccaaatc

SEQ ID NO: 4592516 - DNA, 25 bp, Homo sapien
ttcagtactaaaccccacataggga

SEQ ID NO: 4592517 - DNA, 25 bp, Homo sapien
gcaaaggtcagtcccttaggtagct

SEQ ID NO: 4592518 - DNA, 25 bp, Homo sapien
ccttcagctaaccaggacgtccagg

SEQ ID NO: 4592519 - DNA, 25 bp, Homo sapien
caggaaggcagtgattccccagtgc

SEQ ID NO: 4592520 - DNA, 25 bp, Homo sapien
cacaggtgccaagtagattctcccc

SEQ ID NO: 4592521 - DNA, 25 bp, Homo sapien
gggcattcgttataatgacctacaa

SEQ ID NO: 4592522 - DNA, 25 bp, Homo sapien
tgacctacaagcaaccaagtctctt

SEQ ID NO: 4592523 - DNA, 25 bp, Homo sapien
ttcctgaaacactcactgctgcagc

SEQ ID NO: 4592524 - DNA, 25 bp, Homo sapien
gatgttcgcttcagtcaaggatgga

SEQ ID NO: 4592525 - DNA, 25 bp, Homo sapien
cagagtatgaattcatgaccaccag

SEQ ID NO: 4592526 - DNA, 25 bp, Homo sapien
tagcaggcacttgagtttatatgaa

SEQ ID NO: 4592527 - DNA, 25 bp, Homo sapien
tcagtgttgtatgtgtagcaggcac

SEQ ID NO: 4592528 - DNA, 25 bp, Homo sapien
gaccttgggtaatgcactcaatgac

SEQ ID NO: 4592529 - DNA, 25 bp, Homo sapien
gcatgacatcgtacacctctttggg

SEQ ID NO: 4592530 - DNA, 25 bp, Homo sapien
gatgttcaaccgctgctgtggttcc

SEQ ID NO: 4592531 - DNA, 25 bp, Homo sapien
tgtagatctccttgatgttcaaccg

SEQ ID NO: 4592532 - DNA, 25 bp, Homo sapien
aggatcaccccgaagctccatacat

SEQ ID NO: 4592533 - DNA, 25 bp, Homo sapien
ccatacatcactctctgtagtgaac

SEQ ID NO: 4592534 - DNA, 25 bp, Homo sapien
gaggatcaccccgaagctccataca

SEQ ID NO: 4592535 - DNA, 25 bp, Homo sapien
agtgaacttccggtacatgatgctt

SEQ ID NO: 4592536 - DNA, 25 bp, Homo sapien
catatacaaaaatcatttccagatg

SEQ ID NO: 4592537 - DNA, 25 bp, Homo sapien
aatcatttccagatggattaaagag

SEQ ID NO: 4592538 - DNA, 25 bp, Homo sapien
atatacaaaaatcatttccagatgg

SEQ ID NO: 4592539 - DNA, 25 bp, Homo sapien
caccatatacaaaaatcatttccag

SEQ ID NO: 4592540 - DNA, 25 bp, Homo sapien
atcattgcctttccctgacctatca

SEQ ID NO: 4592541 - DNA, 25 bp, Homo sapien
cttccaccgatcattgcctttccct

SEQ ID NO: 4592542 - DNA, 25 bp, Homo sapien
tccaccgatcattgcctttccctga

SEQ ID NO: 4592543 - DNA, 25 bp, Homo sapien
accgatcattgcctttccctgacct

SEQ ID NO: 4592544 - DNA, 25 bp, Homo sapien
gattccaggccataatctgaggcct

SEQ ID NO: 4592545 - DNA, 25 bp, Homo sapien
ggagaggactgctctgaggatgaac

SEQ ID NO: 4592546 - DNA, 25 bp, Homo sapien
ctctttataaacaagccctgcctct

SEQ ID NO: 4592547 - DNA, 25 bp, Homo sapien
caggccataatctgaggcctgcagc

SEQ ID NO: 4592548 - DNA, 25 bp, Homo sapien
catttgccccggtgccaggattctt

SEQ ID NO: 4592549 - DNA, 25 bp, Homo sapien
tgagaccggtgtctgaactaaaagc

SEQ ID NO: 4592550 - DNA, 25 bp, Homo sapien
caggattcttcagccggatgcatct

SEQ ID NO: 4592551 - DNA, 25 bp, Homo sapien
tgcctggagatctactttccattag

SEQ ID NO: 4592552 - DNA, 25 bp, Homo sapien
tgaaatcccggcgtactgctgtaaa

SEQ ID NO: 4592553 - DNA, 25 bp, Homo sapien
atctatgaccaagtctctaagcaga

SEQ ID NO: 4592554 - DNA, 25 bp, Homo sapien
gattcccagaccgaggcacactcat

SEQ ID NO: 4592555 - DNA, 25 bp, Homo sapien
aatcccggcgtactgctgtaaagga

SEQ ID NO: 4592556 - DNA, 25 bp, Homo sapien
agctgccgttgctgctagcctctgc

SEQ ID NO: 4592557 - DNA, 25 bp, Homo sapien
cacactgaacgggcccttctggcat

SEQ ID NO: 4592558 - DNA, 25 bp, Homo sapien
tgccacaccacactgaacgggccct

SEQ ID NO: 4592559 - DNA, 25 bp, Homo sapien
gtggaagctgccgttgctgctagcc

SEQ ID NO: 4592560 - DNA, 25 bp, Homo sapien
tttggactgaccaggcatggacccg

SEQ ID NO: 4592561 - DNA, 25 bp, Homo sapien
cagctcctgccaacgtgcaaagaaa

SEQ ID NO: 4592562 - DNA, 25 bp, Homo sapien
gagggatgaggaagttcgaggagcc

SEQ ID NO: 4592563 - DNA, 25 bp, Homo sapien
gcctgaaggtgtgtgcgtggattca

SEQ ID NO: 4592564 - DNA, 25 bp, Homo sapien
tgttatgacacatccgtaagggccc

SEQ ID NO: 4592565 - DNA, 25 bp, Homo sapien
tcaacaccagattcaatggtctcct

SEQ ID NO: 4592566 - DNA, 25 bp, Homo sapien
ccgaggacagaatccaatataagca

SEQ ID NO: 4592567 - DNA, 25 bp, Homo sapien
acaggagtagagagacgtgaatgac

SEQ ID NO: 4592568 - DNA, 25 bp, Homo sapien
tccagttcgtagtcctgagcccatg

SEQ ID NO: 4592569 - DNA, 25 bp, Homo sapien
caatggcctgcctttatggtcttag

SEQ ID NO: 4592570 - DNA, 25 bp, Homo sapien
tacaaactgcaagtggctttgagcc

SEQ ID NO: 4592571 - DNA, 25 bp, Homo sapien
tgtggcacaggatctcactgcctct

SEQ ID NO: 4592572 - DNA, 25 bp, Homo sapien
cagaatacctgagttgcaggtagat

SEQ ID NO: 4592573 - DNA, 25 bp, Homo sapien
gcaggtagatgtccccaacattacc

SEQ ID NO: 4592574 - DNA, 25 bp, Homo sapien
tcccagggtggaaaataccagattc

SEQ ID NO: 4592575 - DNA, 25 bp, Homo sapien
ccagattgccggagtgtcccagggt

SEQ ID NO: 4592576 - DNA, 25 bp, Homo sapien
gggactgcgcatggggccacaaccc

SEQ ID NO: 4592577 - DNA, 25 bp, Homo sapien
acaaccccttcccttttctgatgag

SEQ ID NO: 4592578 - DNA, 25 bp, Homo sapien
cttgggagaaaaagcttgtctgatt

SEQ ID NO: 4592579 - DNA, 25 bp, Homo sapien
cccttttctgatgagtatcttctcc

SEQ ID NO: 4592580 - DNA, 25 bp, Homo sapien
aatcagagcattcctccaaggcctt

SEQ ID NO: 4592581 - DNA, 25 bp, Homo sapien
tgtccgggggtatcagctcatagag

SEQ ID NO: 4592582 - DNA, 25 bp, Homo sapien
gagagaatccttcacagtattctcg

SEQ ID NO: 4592583 - DNA, 25 bp, Homo sapien
cctccaaggccttagccgatgtata

SEQ ID NO: 4592584 - DNA, 25 bp, Homo sapien
ccaggtctcggtgcacaaagtgctg

SEQ ID NO: 4592585 - DNA, 25 bp, Homo sapien
tagacatctctggacatgccgaagt

SEQ ID NO: 4592586 - DNA, 25 bp, Homo sapien
atacccgaggcgatctgactggcaa

SEQ ID NO: 4592587 - DNA, 25 bp, Homo sapien
taataatccgtgctgtagacatctc

SEQ ID NO: 4592588 - DNA, 25 bp, Homo sapien
ttatgaagttgtggaccaaggagcc

SEQ ID NO: 4592589 - DNA, 25 bp, Homo sapien
gccctggtgtacagcaaggcctctg

SEQ ID NO: 4592590 - DNA, 25 bp, Homo sapien
ccagggcccttatttatgaagttgt

SEQ ID NO: 4592591 - DNA, 25 bp, Homo sapien
aaggagccctggtgtacagcaaggc

SEQ ID NO: 4592592 - DNA, 25 bp, Homo sapien
tcccttttatcatgtatgacagtag

SEQ ID NO: 4592593 - DNA, 25 bp, Homo sapien
cctaggagctttctttaaccctgct

SEQ ID NO: 4592594 - DNA, 25 bp, Homo sapien
tatctttactctaggctctcactct

SEQ ID NO: 4592595 - DNA, 25 bp, Homo sapien
cagtagtgcagaggcacctaggagc

SEQ ID NO: 4592596 - DNA, 25 bp, Homo sapien
tccctctggaaatccttccgggcag

SEQ ID NO: 4592597 - DNA, 25 bp, Homo sapien
atcgccgcacactccatagaacttg

SEQ ID NO: 4592598 - DNA, 25 bp, Homo sapien
cactccatagaacttgacaatgtgc

SEQ ID NO: 4592599 - DNA, 25 bp, Homo sapien
gccgcacactccatagaacttgaca

SEQ ID NO: 4592600 - DNA, 25 bp, Homo sapien
tgacatccacatcccgtgcactctc

SEQ ID NO: 4592601 - DNA, 25 bp, Homo sapien
ccgcaggtgagtgtacatggcagct

SEQ ID NO: 4592602 - DNA, 25 bp, Homo sapien
ctgcagaaatagaaacccactttct

SEQ ID NO: 4592603 - DNA, 25 bp, Homo sapien
cctgggcttccgcaggtgagtgtac

SEQ ID NO: 4592604 - DNA, 25 bp, Homo sapien
agaggccctttctgcatgaggagca

SEQ ID NO: 4592605 - DNA, 25 bp, Homo sapien
cttggttagggcactgccatgggcc

SEQ ID NO: 4592606 - DNA, 25 bp, Homo sapien
atggatgccggaacaccccgtggat

SEQ ID NO: 4592607 - DNA, 25 bp, Homo sapien
agttcattctccagtccccagatgg

SEQ ID NO: 4592608 - DNA, 25 bp, Homo sapien
catttcctagggttttcagccatca

SEQ ID NO: 4592609 - DNA, 25 bp, Homo sapien
ggtactgccccttaatgccagacca

SEQ ID NO: 4592610 - DNA, 25 bp, Homo sapien
cagcacgatgtctctcctcttaatg

SEQ ID NO: 4592611 - DNA, 25 bp, Homo sapien
ctgaggttgtagcactcggccagga

SEQ ID NO: 4592612 - DNA, 25 bp, Homo sapien
acccagttctcgcttcagcacgatg

SEQ ID NO: 4592613 - DNA, 25 bp, Homo sapien
gtctctcctcttaatgtgctgcaca

SEQ ID NO: 4592614 - DNA, 25 bp, Homo sapien
gcaaaggcaaactctagcacaccag

SEQ ID NO: 4592615 - DNA, 25 bp, Homo sapien
gacagaagagtacagaggtctagcg

SEQ ID NO: 4592616 - DNA, 25 bp, Homo sapien
ggtctagcgtggagaacttggttct

SEQ ID NO: 4592617 - DNA, 25 bp, Homo sapien
cagtcctcgtttggtgacacaggga

SEQ ID NO: 4592618 - DNA, 25 bp, Homo sapien
tttttgtgagacagccaccaactgg

SEQ ID NO: 4592619 - DNA, 25 bp, Homo sapien
ttgttcccacaggacaaccggttca

SEQ ID NO: 4592620 - DNA, 25 bp, Homo sapien
actattccatatgtgtgggattcac

SEQ ID NO: 4592621 - DNA, 25 bp, Homo sapien
tctgacacaagaacagaaacaagat

SEQ ID NO: 4592622 - DNA, 25 bp, Homo sapien
aggtcttccagcctgcagcaagcgt

SEQ ID NO: 4592623 - DNA, 25 bp, Homo sapien
cactgacatcgctggacacagaggt

SEQ ID NO: 4592624 - DNA, 25 bp, Homo sapien
tggatacactgacatcgctggacac

SEQ ID NO: 4592625 - DNA, 25 bp, Homo sapien
ggaggtatacacagagccgctggat

SEQ ID NO: 4592626 - DNA, 25 bp, Homo sapien
cacagagccgctggatacactgaca

SEQ ID NO: 4592627 - DNA, 25 bp, Homo sapien
cttccagcaccagaattctgggcca

SEQ ID NO: 4592628 - DNA, 25 bp, Homo sapien
acataggttgcagggcactggagcc

SEQ ID NO: 4592629 - DNA, 25 bp, Homo sapien
cagagcacaatgtgctaaaggctgt

SEQ ID NO: 4592630 - DNA, 25 bp, Homo sapien
cagaacacgcagagcacaatgtgct

SEQ ID NO: 4592631 - DNA, 25 bp, Homo sapien
gacagctacctacaaccatgggtcc

SEQ ID NO: 4592632 - DNA, 25 bp, Homo sapien
tttgcaggacacaccattgaccttg

SEQ ID NO: 4592633 - DNA, 25 bp, Homo sapien
agaggatcccagtcacccatttgca

SEQ ID NO: 4592634 - DNA, 25 bp, Homo sapien
accagaggatcccagtcacccattt

SEQ ID NO: 4592635 - DNA, 25 bp, Homo sapien
aaaagcttgctggcctgaagaagtc

SEQ ID NO: 4592636 - DNA, 25 bp, Homo sapien
tgctggcctgaagaagtctgcttac

SEQ ID NO: 4592637 - DNA, 25 bp, Homo sapien
agaagaaaagcttgctggcctgaag

SEQ ID NO: 4592638 - DNA, 25 bp, Homo sapien
ggttccagaagaaaagcttgctggc

SEQ ID NO: 4592639 - DNA, 25 bp, Homo sapien
gattttagttaatgcacaaaggacc

SEQ ID NO: 4592640 - DNA, 25 bp, Homo sapien
gatggaaaggattttagttaatgca

SEQ ID NO: 4592641 - DNA, 25 bp, Homo sapien
ccccagcaatgaacttactgatgga

SEQ ID NO: 4592642 - DNA, 25 bp, Homo sapien
cagcaatgaacttactgatggaaag

SEQ ID NO: 4592643 - DNA, 25 bp, Homo sapien
tgtgcgcactccattattcccggca

SEQ ID NO: 4592644 - DNA, 25 bp, Homo sapien
tgacctctgcatttggacaccgttt

SEQ ID NO: 4592645 - DNA, 25 bp, Homo sapien
tccgggagtcccgagaggtcacgct

SEQ ID NO: 4592646 - DNA, 25 bp, Homo sapien
gcccctttcaaggtatatgttccca

SEQ ID NO: 4592647 - DNA, 25 bp, Homo sapien
cagcagattcgttccgcaaggcctc

SEQ ID NO: 4592648 - DNA, 25 bp, Homo sapien
cagccagcagattcgttccgcaagg

SEQ ID NO: 4592649 - DNA, 25 bp, Homo sapien
tcagcgcagccagcagattcgttcc

SEQ ID NO: 4592650 - DNA, 25 bp, Homo sapien
ggccctccgcgtgggcagccacagc

SEQ ID NO: 4592651 - DNA, 25 bp, Homo sapien
agacgattctttatcgttttcctgg

SEQ ID NO: 4592652 - DNA, 25 bp, Homo sapien
aagacgattctttatcgttttcctg

SEQ ID NO: 4592653 - DNA, 25 bp, Homo sapien
gaccagaagacgattctttatcgtt

SEQ ID NO: 4592654 - DNA, 25 bp, Homo sapien
cagaagacgattctttatcgttttc

SEQ ID NO: 4592655 - DNA, 25 bp, Homo sapien
cattggcatagagaaccctacgagg

SEQ ID NO: 4592656 - DNA, 25 bp, Homo sapien
ggagggcagccgacaacaaatgata

SEQ ID NO: 4592657 - DNA, 25 bp, Homo sapien
tgggactgcagcgagttagtagctc

SEQ ID NO: 4592658 - DNA, 25 bp, Homo sapien
tctgctgcacgctacagagggtcag

SEQ ID NO: 4592659 - DNA, 25 bp, Homo sapien
tgtgactctctggaaacatcaagcg

SEQ ID NO: 4592660 - DNA, 25 bp, Homo sapien
aacatcaagcgagagctggagatcc

SEQ ID NO: 4592661 - DNA, 25 bp, Homo sapien
gatccagcaccaactgagatggctg

SEQ ID NO: 4592662 - DNA, 25 bp, Homo sapien
gctggagatccagcaccaactgaga

SEQ ID NO: 4592663 - DNA, 25 bp, Homo sapien
tccttgattccaactacccctgctt

SEQ ID NO: 4592664 - DNA, 25 bp, Homo sapien
ccttgattccaactacccctgcttc

SEQ ID NO: 4592665 - DNA, 25 bp, Homo sapien
ttccttgattccaactacccctgct

SEQ ID NO: 4592666 - DNA, 25 bp, Homo sapien
cttccagagctggcatccattgtcc

SEQ ID NO: 4592667 - DNA, 25 bp, Homo sapien
ggccacacatggctgagtggacttc

SEQ ID NO: 4592668 - DNA, 25 bp, Homo sapien
ccacacatggctgagtggacttcca

SEQ ID NO: 4592669 - DNA, 25 bp, Homo sapien
tccagagctggcatccattgtccct

SEQ ID NO: 4592670 - DNA, 25 bp, Homo sapien
ctggcagataggaagggccagcacc

SEQ ID NO: 4592671 - DNA, 25 bp, Homo sapien
cagggatcttggaatgcacatggca

SEQ ID NO: 4592672 - DNA, 25 bp, Homo sapien
tggcagataggaagggccagcaccc

SEQ ID NO: 4592673 - DNA, 25 bp, Homo sapien
tggaatgcacatggcatcttggcag

SEQ ID NO: 4592674 - DNA, 25 bp, Homo sapien
ctaacagatgaccaacaaacagctt

SEQ ID NO: 4592675 - DNA, 25 bp, Homo sapien
agatgaccaacaaacagcttgcttg

SEQ ID NO: 4592676 - DNA, 25 bp, Homo sapien
taacagatgaccaacaaacagcttg

SEQ ID NO: 4592677 - DNA, 25 bp, Homo sapien
acagatgaccaacaaacagcttgct

SEQ ID NO: 4592678 - DNA, 25 bp, Homo sapien
gcccgtgcatatgtttgggctcttt

SEQ ID NO: 4592679 - DNA, 25 bp, Homo sapien
tgtcttgcccgtgcatatgtttggg

SEQ ID NO: 4592680 - DNA, 25 bp, Homo sapien
tctgctgtctaaagacctttccttc

SEQ ID NO: 4592681 - DNA, 25 bp, Homo sapien
ttatgcttgtcttgcccgtgcatat

SEQ ID NO: 4592682 - DNA, 25 bp, Homo sapien
ctattcaatttctccagggtcttta

SEQ ID NO: 4592683 - DNA, 25 bp, Homo sapien
tattcaatttctccagggtctttac

SEQ ID NO: 4592684 - DNA, 25 bp, Homo sapien
gacctcgagatcagtctctatggca

SEQ ID NO: 4592685 - DNA, 25 bp, Homo sapien
tgacagagagatattctcacaatag

SEQ ID NO: 4592686 - DNA, 25 bp, Homo sapien
tctcacaatagtccacagatgggga

SEQ ID NO: 4592687 - DNA, 25 bp, Homo sapien
ccagtaaataccagtcaattgtgga

SEQ ID NO: 4592688 - DNA, 25 bp, Homo sapien
ttcccagattgacatggccaattgg

SEQ ID NO: 4592689 - DNA, 25 bp, Homo sapien
ggggccttccgaatccctgcttgaa

SEQ ID NO: 4592690 - DNA, 25 bp, Homo sapien
gagatgcttcccactcatatcagag

SEQ ID NO: 4592691 - DNA, 25 bp, Homo sapien
aattggtgcccaggcccaaacggag

SEQ ID NO: 4592692 - DNA, 25 bp, Homo sapien
gagagggtctattaacccccaagca

SEQ ID NO: 4592693 - DNA, 25 bp, Homo sapien
atttcagaaaatcttgccgagaact

SEQ ID NO: 4592694 - DNA, 25 bp, Homo sapien
gaaaatcttgccgagaactcccgct

SEQ ID NO: 4592695 - DNA, 25 bp, Homo sapien
aatcttgccgagaactcccgcttgg

SEQ ID NO: 4592696 - DNA, 25 bp, Homo sapien
tgagatatcacagcgaaggtttcct

SEQ ID NO: 4592697 - DNA, 25 bp, Homo sapien
cacagcgaaggtttcctgatcttca

SEQ ID NO: 4592698 - DNA, 25 bp, Homo sapien
gtctatccatcagcaaccagaattt

SEQ ID NO: 4592699 - DNA, 25 bp, Homo sapien
gatcttcacaagagtgtctatccat

SEQ ID NO: 4592700 - DNA, 25 bp, Homo sapien
gtagtgttttctgaggtgacatgat

SEQ ID NO: 4592701 - DNA, 25 bp, Homo sapien
aggtgacatgatgttctgtccctca

SEQ ID NO: 4592702 - DNA, 25 bp, Homo sapien
tgaggtgacatgatgttctgtccct

SEQ ID NO: 4592703 - DNA, 25 bp, Homo sapien
gaggtgacatgatgttctgtccctc

SEQ ID NO: 4592704 - DNA, 25 bp, Homo sapien
tctctcaaagcagagcatgccccag

SEQ ID NO: 4592705 - DNA, 25 bp, Homo sapien
cctcgtttttgtcattcctcgccat

SEQ ID NO: 4592706 - DNA, 25 bp, Homo sapien
tgatatcttccttgtccccctcgtt

SEQ ID NO: 4592707 - DNA, 25 bp, Homo sapien
cccagtcaaaggtttgcctctgata

SEQ ID NO: 4592708 - DNA, 25 bp, Homo sapien
gcagcaatgtgcgagtctagccaga

SEQ ID NO: 4592709 - DNA, 25 bp, Homo sapien
tctagccagagcacaggagtcagta

SEQ ID NO: 4592710 - DNA, 25 bp, Homo sapien
aaaggctccggctctttgcctaatc

SEQ ID NO: 4592711 - DNA, 25 bp, Homo sapien
taatccatgtctggctccgtgcaga

SEQ ID NO: 4592712 - DNA, 25 bp, Homo sapien
tcatacaatggaggccccatgggcc

SEQ ID NO: 4592713 - DNA, 25 bp, Homo sapien
tgtggaaacacaacgccccattgtc

SEQ ID NO: 4592714 - DNA, 25 bp, Homo sapien
ccttaaagccacacttgggaggagg

SEQ ID NO: 4592715 - DNA, 25 bp, Homo sapien
ggatcctgacacgaagaaccaccat

SEQ ID NO: 4592716 - DNA, 25 bp, Homo sapien
caatcccgggatcatgggctggcag

SEQ ID NO: 4592717 - DNA, 25 bp, Homo sapien
ggacacttccattggtgccatgaga

SEQ ID NO: 4592718 - DNA, 25 bp, Homo sapien
gccaaagcttgtcggaactgcagat

SEQ ID NO: 4592719 - DNA, 25 bp, Homo sapien
gccagttcatgggtaaaacctcctg

SEQ ID NO: 4592720 - DNA, 25 bp, Homo sapien
tttcctctgagacctaacttggtgc

SEQ ID NO: 4592721 - DNA, 25 bp, Homo sapien
cattgtgagccgttccagagagaag

SEQ ID NO: 4592722 - DNA, 25 bp, Homo sapien
aacttggtgccaatacttgagcctg

SEQ ID NO: 4592723 - DNA, 25 bp, Homo sapien
aaaatgtaaagtgattggtttccat

SEQ ID NO: 4592724 - DNA, 25 bp, Homo sapien
gcgccgtctccacctctgcttaggt

SEQ ID NO: 4592725 - DNA, 25 bp, Homo sapien
tccacctctgcttaggtgctctctg

SEQ ID NO: 4592726 - DNA, 25 bp, Homo sapien
ctctgcttaggtgctctctgtgact

SEQ ID NO: 4592727 - DNA, 25 bp, Homo sapien
gtctccacctctgcttaggtgctct

SEQ ID NO: 4592728 - DNA, 25 bp, Homo sapien
gctggagcacggctggacttcatca

SEQ ID NO: 4592729 - DNA, 25 bp, Homo sapien
ccacgcttccaagcagggaaagtga

SEQ ID NO: 4592730 - DNA, 25 bp, Homo sapien
ccccacgcttccaagcagggaaagt

SEQ ID NO: 4592731 - DNA, 25 bp, Homo sapien
caggctttcttgtgatggttaggtt

SEQ ID NO: 4592732 - DNA, 25 bp, Homo sapien
gcagtttctacttagcatccctgga

SEQ ID NO: 4592733 - DNA, 25 bp, Homo sapien
gagctgcctcgtaggccgggaaaaa

SEQ ID NO: 4592734 - DNA, 25 bp, Homo sapien
ctctaaagatagtggcaggagctgc

SEQ ID NO: 4592735 - DNA, 25 bp, Homo sapien
ggtgacatcaaaacaaggaggctta

SEQ ID NO: 4592736 - DNA, 25 bp, Homo sapien
ttaagaggcttggaatgtccgggaa

SEQ ID NO: 4592737 - DNA, 25 bp, Homo sapien
aaaagccatgacgtcctttgctgaa

SEQ ID NO: 4592738 - DNA, 25 bp, Homo sapien
cgggaaggcttattggattcaacat

SEQ ID NO: 4592739 - DNA, 25 bp, Homo sapien
gacatcctcaacatagatgccatgg

SEQ ID NO: 4592740 - DNA, 25 bp, Homo sapien
gtttaatatcccatgattgtctatg

SEQ ID NO: 4592741 - DNA, 25 bp, Homo sapien
actagatgatctctattgtccttca

SEQ ID NO: 4592742 - DNA, 25 bp, Homo sapien
tatcccatgattgtctatgtttgaa

SEQ ID NO: 4592743 - DNA, 25 bp, Homo sapien
tcctcatatatatagtgagttgatg

SEQ ID NO: 4592744 - DNA, 25 bp, Homo sapien
gcaaccctgggccagaattactgca

SEQ ID NO: 4592745 - DNA, 25 bp, Homo sapien
cggtagccactcagtttatacgagg

SEQ ID NO: 4592746 - DNA, 25 bp, Homo sapien
gaaagtccgagagttctggcaaccc

SEQ ID NO: 4592747 - DNA, 25 bp, Homo sapien
tgcacagtgataacccactgcggta

SEQ ID NO: 4592748 - DNA, 25 bp, Homo sapien
tattgacatactctatctccagcca

SEQ ID NO: 4592749 - DNA, 25 bp, Homo sapien
tgtgtgatgcccaaacagcttaggc

SEQ ID NO: 4592750 - DNA, 25 bp, Homo sapien
cacatggcacacactagatgatgaa

SEQ ID NO: 4592751 - DNA, 25 bp, Homo sapien
taggctgccatcctgatattgacat

SEQ ID NO: 4592752 - DNA, 25 bp, Homo sapien
tccaattgccgttcaatcctttcac

SEQ ID NO: 4592753 - DNA, 25 bp, Homo sapien
tataagccacttggcagttaattgt

SEQ ID NO: 4592754 - DNA, 25 bp, Homo sapien
cagactccactctctgtataagcca

SEQ ID NO: 4592755 - DNA, 25 bp, Homo sapien
cctggaactgtttcagacgcataca

SEQ ID NO: 4592756 - DNA, 25 bp, Homo sapien
ccaattccaaatgcgagctgtaaac

SEQ ID NO: 4592757 - DNA, 25 bp, Homo sapien
agctgtaaacaatattcaacaagac

SEQ ID NO: 4592758 - DNA, 25 bp, Homo sapien
attccaaatgcgagctgtaaacaat

SEQ ID NO: 4592759 - DNA, 25 bp, Homo sapien
attcaacaagacagccgtgagtgtc

SEQ ID NO: 4592760 - DNA, 25 bp, Homo sapien
tccaataaccctggaaagaaatgcc

SEQ ID NO: 4592761 - DNA, 25 bp, Homo sapien
ccctggaaagaaatgccttgctggt

SEQ ID NO: 4592762 - DNA, 25 bp, Homo sapien
taaccctggaaagaaatgccttgct

SEQ ID NO: 4592763 - DNA, 25 bp, Homo sapien
gatgaagttccaataaccctggaaa

SEQ ID NO: 4592764 - DNA, 25 bp, Homo sapien
cccagagccagatctctaaggtccc

SEQ ID NO: 4592765 - DNA, 25 bp, Homo sapien
cttggccactaggatgcccagagcc

SEQ ID NO: 4592766 - DNA, 25 bp, Homo sapien
ttgttccttggccactaggatgccc

SEQ ID NO: 4592767 - DNA, 25 bp, Homo sapien
tgcccagagccagatctctaaggtc

SEQ ID NO: 4592768 - DNA, 25 bp, Homo sapien
tcacagtgctggagtattccatgtg

SEQ ID NO: 4592769 - DNA, 25 bp, Homo sapien
catcctcccaatgcctagcaaagtg

SEQ ID NO: 4592770 - DNA, 25 bp, Homo sapien
ttggctcaagtgaatgatggtctca

SEQ ID NO: 4592771 - DNA, 25 bp, Homo sapien
caatgcctagcaaagtggtatttat

SEQ ID NO: 4592772 - DNA, 25 bp, Homo sapien
ttagcagtagctcagatgtcccaga

SEQ ID NO: 4592773 - DNA, 25 bp, Homo sapien
aagattccctttccattagcagtag

SEQ ID NO: 4592774 - DNA, 25 bp, Homo sapien
tccattagcagtagctcagatgtcc

SEQ ID NO: 4592775 - DNA, 25 bp, Homo sapien
cctgctggaagattccctttccatt

SEQ ID NO: 4592776 - DNA, 25 bp, Homo sapien
tccaaacaatatagtggattccttt

SEQ ID NO: 4592777 - DNA, 25 bp, Homo sapien
aatgattagatgtcgagcttgcccc

SEQ ID NO: 4592778 - DNA, 25 bp, Homo sapien
cagaatctcctcagatccagtgaga

SEQ ID NO: 4592779 - DNA, 25 bp, Homo sapien
cactgcagtgttacaggaggcacct

SEQ ID NO: 4592780 - DNA, 25 bp, Homo sapien
tcgccagtgttggtggaagaaatgc

SEQ ID NO: 4592781 - DNA, 25 bp, Homo sapien
gcacagtggaccatcgccagtgttg

SEQ ID NO: 4592782 - DNA, 25 bp, Homo sapien
ctaggtcagagcgtaaccagataac

SEQ ID NO: 4592783 - DNA, 25 bp, Homo sapien
cgtaaccagataacagaactgtgga

SEQ ID NO: 4592784 - DNA, 25 bp, Homo sapien
ctctccggcaacaccggagcaggtt

SEQ ID NO: 4592785 - DNA, 25 bp, Homo sapien
tttgcaggaacacggtctctgattc

SEQ ID NO: 4592786 - DNA, 25 bp, Homo sapien
acaccggagcaggttctttgcagga

SEQ ID NO: 4592787 - DNA, 25 bp, Homo sapien
gcaggaacacggtctctgattcctc

SEQ ID NO: 4592788 - DNA, 25 bp, Homo sapien
ctattcccacggaatgcagctacgt

SEQ ID NO: 4592789 - DNA, 25 bp, Homo sapien
cctgtgccaaatgggttcaggccca

SEQ ID NO: 4592790 - DNA, 25 bp, Homo sapien
tcccacggaatgcagctacgtcctg

SEQ ID NO: 4592791 - DNA, 25 bp, Homo sapien
ggaatgcagctacgtcctgtccctc

SEQ ID NO: 4592792 - DNA, 25 bp, Homo sapien
gtgacttatttgatgggtgatgagg

SEQ ID NO: 4592793 - DNA, 25 bp, Homo sapien
tgagggcggagtccatcatccacca

SEQ ID NO: 4592794 - DNA, 25 bp, Homo sapien
ttgatgggtgatgagggcggagtcc

SEQ ID NO: 4592795 - DNA, 25 bp, Homo sapien
gagggcggagtccatcatccaccat

SEQ ID NO: 4592796 - DNA, 25 bp, Homo sapien
catttctcttctgggcaaagttcat

SEQ ID NO: 4592797 - DNA, 25 bp, Homo sapien
acatttctcttctgggcaaagttca

SEQ ID NO: 4592798 - DNA, 25 bp, Homo sapien
cacatttctcttctgggcaaagttc

SEQ ID NO: 4592799 - DNA, 25 bp, Homo sapien
ccatcccaccgggaaatgacattac

SEQ ID NO: 4592800 - DNA, 25 bp, Homo sapien
aaatgacattactccaagctggctg

SEQ ID NO: 4592801 - DNA, 25 bp, Homo sapien
gggaaatgacattactccaagctgg

SEQ ID NO: 4592802 - DNA, 25 bp, Homo sapien
caccgggaaatgacattactccaag

SEQ ID NO: 4592803 - DNA, 25 bp, Homo sapien
ttccgtatttcatctgcaagtccat

SEQ ID NO: 4592804 - DNA, 25 bp, Homo sapien
aaggagcccattttccgtatttcat

SEQ ID NO: 4592805 - DNA, 25 bp, Homo sapien
cctcctagacaaaggagcccatttt

SEQ ID NO: 4592806 - DNA, 25 bp, Homo sapien
gtccatcccggacttcttctagaga

SEQ ID NO: 4592807 - DNA, 25 bp, Homo sapien
ggatgagtccttggctatgctttgt

SEQ ID NO: 4592808 - DNA, 25 bp, Homo sapien
ggcaactgtgcggataacctggtat

SEQ ID NO: 4592809 - DNA, 25 bp, Homo sapien
gacaccaaaggatgttcaccaggcc

SEQ ID NO: 4592810 - DNA, 25 bp, Homo sapien
gggacacttattctgaaggcccaga

SEQ ID NO: 4592811 - DNA, 25 bp, Homo sapien
ctagccgatcacttctgtccttcca

SEQ ID NO: 4592812 - DNA, 25 bp, Homo sapien
gctctctcttgatgcagtggatcat

SEQ ID NO: 4592813 - DNA, 25 bp, Homo sapien
cgatcacttctgtccttccagctct

SEQ ID NO: 4592814 - DNA, 25 bp, Homo sapien
ctgtgctctctcttgatgcagtgga

SEQ ID NO: 4592815 - DNA, 25 bp, Homo sapien
tctcttagaaagtgggaggttggca

SEQ ID NO: 4592816 - DNA, 25 bp, Homo sapien
gacccccttcgcagaggactctggt

SEQ ID NO: 4592817 - DNA, 25 bp, Homo sapien
tgaaacaaacagggagggtctctta

SEQ ID NO: 4592818 - DNA, 25 bp, Homo sapien
cctggctcaggctattcttcaagtt

SEQ ID NO: 4592819 - DNA, 25 bp, Homo sapien
agggagagcattccatcccagtact

SEQ ID NO: 4592820 - DNA, 25 bp, Homo sapien
ggtacatggtctatcaccaaccacc

SEQ ID NO: 4592821 - DNA, 25 bp, Homo sapien
agaaccccaggtacatggtctatca

SEQ ID NO: 4592822 - DNA, 25 bp, Homo sapien
gagagcattccatcccagtacttac

SEQ ID NO: 4592823 - DNA, 25 bp, Homo sapien
catccagtgacgagggcgtggtgat

SEQ ID NO: 4592824 - DNA, 25 bp, Homo sapien
cagggatgcgagtcatgccaatgac

SEQ ID NO: 4592825 - DNA, 25 bp, Homo sapien
gcagttgtgtccctgacggaagtac

SEQ ID NO: 4592826 - DNA, 25 bp, Homo sapien
gccaatgaccacagtgtcgggcccg

SEQ ID NO: 4592827 - DNA, 25 bp, Homo sapien
ctcttactcacctttgctcttccat

SEQ ID NO: 4592828 - DNA, 25 bp, Homo sapien
caaggccctcttactcacctttgct

SEQ ID NO: 4592829 - DNA, 25 bp, Homo sapien
ggccctcttactcacctttgctctt

SEQ ID NO: 4592830 - DNA, 25 bp, Homo sapien
attcccaaggccctcttactcacct

SEQ ID NO: 4592831 - DNA, 25 bp, Homo sapien
actggcccaaccctagggcatttgc

SEQ ID NO: 4592832 - DNA, 25 bp, Homo sapien
cattgacaatcctcagaaatgtggc

SEQ ID NO: 4592833 - DNA, 25 bp, Homo sapien
ggcaccaagaaaatccagccactgg

SEQ ID NO: 4592834 - DNA, 25 bp, Homo sapien
gggcatttgcccagccaacgtgtag

SEQ ID NO: 4592835 - DNA, 25 bp, Homo sapien
gggagcaggaactcataaaacggaa

SEQ ID NO: 4592836 - DNA, 25 bp, Homo sapien
tggtgggcgagagcttcgcatcaac

SEQ ID NO: 4592837 - DNA, 25 bp, Homo sapien
acggaataagtggaagcacaacaaa

SEQ ID NO: 4592838 - DNA, 25 bp, Homo sapien
gagagcttcgcatcaacaaatctgg

SEQ ID NO: 4592839 - DNA, 25 bp, Homo sapien
aataccttctcctgtgctgggctct

SEQ ID NO: 4592840 - DNA, 25 bp, Homo sapien
ctcctgtgctgggctctgagctagg

SEQ ID NO: 4592841 - DNA, 25 bp, Homo sapien
caaataccttctcctgtgctgggct

SEQ ID NO: 4592842 - DNA, 25 bp, Homo sapien
cctgtgctgggctctgagctaggga

SEQ ID NO: 4592843 - DNA, 25 bp, Homo sapien
gcagaggctccatgggcgaggctga

SEQ ID NO: 4592844 - DNA, 25 bp, Homo sapien
tgtctacgtgcctgccctgaccgcc

SEQ ID NO: 4592845 - DNA, 25 bp, Homo sapien
gaggctccatgggcgaggctgacag

SEQ ID NO: 4592846 - DNA, 25 bp, Homo sapien
gtctacgtgcctgccctgaccgccc

SEQ ID NO: 4592847 - DNA, 25 bp, Homo sapien
tgtgctgccctccacaaggtgtggg

SEQ ID NO: 4592848 - DNA, 25 bp, Homo sapien
tggtcagaagggacacggaatgctt

SEQ ID NO: 4592849 - DNA, 25 bp, Homo sapien
gcatcttgaatgcaggcccacaaca

SEQ ID NO: 4592850 - DNA, 25 bp, Homo sapien
tcagcccgtggctgctaagagcatc

SEQ ID NO: 4592851 - DNA, 25 bp, Homo sapien
ccacagccaaacagtataggaacat

SEQ ID NO: 4592852 - DNA, 25 bp, Homo sapien
aacagaactgcaaagtcctcccagc

SEQ ID NO: 4592853 - DNA, 25 bp, Homo sapien
gcccatttcgtaggcccttgaatga

SEQ ID NO: 4592854 - DNA, 25 bp, Homo sapien
ataggaacatttgtccaacagaact

SEQ ID NO: 4592855 - DNA, 25 bp, Homo sapien
caacttaaaaggctcaaccttgcca

SEQ ID NO: 4592856 - DNA, 25 bp, Homo sapien
gcatcaacttaaaaggctcaacctt

SEQ ID NO: 4592857 - DNA, 25 bp, Homo sapien
cttaaaaggctcaaccttgccacat

SEQ ID NO: 4592858 - DNA, 25 bp, Homo sapien
ccaggctccactggcccttccacat

SEQ ID NO: 4592859 - DNA, 25 bp, Homo sapien
tcttcatgtcctaactcatcttcac

SEQ ID NO: 4592860 - DNA, 25 bp, Homo sapien
ggtgctactttcctcctgactgact

SEQ ID NO: 4592861 - DNA, 25 bp, Homo sapien
gggcagaagcgggtgctactttcct

SEQ ID NO: 4592862 - DNA, 25 bp, Homo sapien
tgcatcccagcgatgagggcagaag

SEQ ID NO: 4592863 - DNA, 25 bp, Homo sapien
catcccagcgatgagggcagaagcg

SEQ ID NO: 4592864 - DNA, 25 bp, Homo sapien
tatgctataaaggaccacaactgtg

SEQ ID NO: 4592865 - DNA, 25 bp, Homo sapien
gtgccagaagtaggaattagcaggc

SEQ ID NO: 4592866 - DNA, 25 bp, Homo sapien
ggtgccttggctcttagtagttcct

SEQ ID NO: 4592867 - DNA, 25 bp, Homo sapien
agcttttgagtcctcttttggtgcc

SEQ ID NO: 4592868 - DNA, 25 bp, Homo sapien
gagggagaggtctcactcttccaag

SEQ ID NO: 4592869 - DNA, 25 bp, Homo sapien
ctagcaatttattccggagagggag

SEQ ID NO: 4592870 - DNA, 25 bp, Homo sapien
tttttaactgctttgagtcacattt

SEQ ID NO: 4592871 - DNA, 25 bp, Homo sapien
tttaagcaagacagccaaaagctcc

SEQ ID NO: 4592872 - DNA, 25 bp, Homo sapien
tcatgggccaatccggagttatgcg

SEQ ID NO: 4592873 - DNA, 25 bp, Homo sapien
gctgagaggtttggcaacctggctt

SEQ ID NO: 4592874 - DNA, 25 bp, Homo sapien
gcacaatttgatgagacacccttgg

SEQ ID NO: 4592875 - DNA, 25 bp, Homo sapien
gaagaattcagggaagttgtaccaa

SEQ ID NO: 4592876 - DNA, 25 bp, Homo sapien
ccaggccctaatcatggaaagagca

SEQ ID NO: 4592877 - DNA, 25 bp, Homo sapien
tcaagctccgagagaagtggagaca

SEQ ID NO: 4592878 - DNA, 25 bp, Homo sapien
gatcctgtcccctggatgactcaag

SEQ ID NO: 4592879 - DNA, 25 bp, Homo sapien
gagcaacaaacaccctttggcttgg

SEQ ID NO: 4592880 - DNA, 25 bp, Homo sapien
agcaacatcttgaccccagaccaat

SEQ ID NO: 4592881 - DNA, 25 bp, Homo sapien
gttttatcttgagtcacgaactgca

SEQ ID NO: 4592882 - DNA, 25 bp, Homo sapien
cttcagttgctaaactttcccctgg

SEQ ID NO: 4592883 - DNA, 25 bp, Homo sapien
tcagttgctaaactttcccctggct

SEQ ID NO: 4592884 - DNA, 25 bp, Homo sapien
ctgcactgcacaaagacgtccccct

SEQ ID NO: 4592885 - DNA, 25 bp, Homo sapien
actgcacaaagacgtccccctgccc

SEQ ID NO: 4592886 - DNA, 25 bp, Homo sapien
ctgcacaaagacgtccccctgccct

SEQ ID NO: 4592887 - DNA, 25 bp, Homo sapien
gcactgcacaaagacgtccccctgc

SEQ ID NO: 4592888 - DNA, 25 bp, Homo sapien
gagtgaggcctagagaacgtgttaa

SEQ ID NO: 4592889 - DNA, 25 bp, Homo sapien
gggccccagatagcgggccagctat

SEQ ID NO: 4592890 - DNA, 25 bp, Homo sapien
caggagacggtaaacaacagaactt

SEQ ID NO: 4592891 - DNA, 25 bp, Homo sapien
gccagctatggcgaggttggagtga

SEQ ID NO: 4592892 - DNA, 25 bp, Homo sapien
gaccggtacagtgtattgggcagct

SEQ ID NO: 4592893 - DNA, 25 bp, Homo sapien
gcttattagtagaaagatggcagca

SEQ ID NO: 4592894 - DNA, 25 bp, Homo sapien
tgtgtaagccttggtttttccagaa

SEQ ID NO: 4592895 - DNA, 25 bp, Homo sapien
gaggctgaagatcatccaggaggct

SEQ ID NO: 4592896 - DNA, 25 bp, Homo sapien
tgaattgctagatttgaattaagca

SEQ ID NO: 4592897 - DNA, 25 bp, Homo sapien
gaggcattctagaaggtgcttctaa

SEQ ID NO: 4592898 - DNA, 25 bp, Homo sapien
tcccctggtcctatgcaacagcatt

SEQ ID NO: 4592899 - DNA, 25 bp, Homo sapien
tgtccccagcataagaggcattcta

SEQ ID NO: 4592900 - DNA, 25 bp, Homo sapien
gcaggacaaggttggcttggcttct

SEQ ID NO: 4592901 - DNA, 25 bp, Homo sapien
aagttcccctaccagaggctccctg

SEQ ID NO: 4592902 - DNA, 25 bp, Homo sapien
gtggatgacccataattgctaatgg

SEQ ID NO: 4592903 - DNA, 25 bp, Homo sapien
ctgctacagcggccggcaggacaag

SEQ ID NO: 4592904 - DNA, 25 bp, Homo sapien
tcccgtcatgtggaaagaggtggca

SEQ ID NO: 4592905 - DNA, 25 bp, Homo sapien
gggcagcagaccttacaagtcccgt

SEQ ID NO: 4592906 - DNA, 25 bp, Homo sapien
tgacagtttactgaaatcaactggg

SEQ ID NO: 4592907 - DNA, 25 bp, Homo sapien
caacagtgttgattgacctgacagt

SEQ ID NO: 4592908 - DNA, 25 bp, Homo sapien
cagttttaggaaagaagagaggcat

SEQ ID NO: 4592909 - DNA, 25 bp, Homo sapien
acagttttaggaaagaagagaggca

SEQ ID NO: 4592910 - DNA, 25 bp, Homo sapien
tgccacgcgtgcagtctctagcatg

SEQ ID NO: 4592911 - DNA, 25 bp, Homo sapien
gcagcagttcttgatgcccttcctt

SEQ ID NO: 4592912 - DNA, 25 bp, Homo sapien
tggttgctgatgaggcacttaaggc

SEQ ID NO: 4592913 - DNA, 25 bp, Homo sapien
aaggcattgccggaagcccaagcag

SEQ ID NO: 4592914 - DNA, 25 bp, Homo sapien
ggatatttcacttccacctacgtgg

SEQ ID NO: 4592915 - DNA, 25 bp, Homo sapien
ccaagaaaggaaggtctgcctggga

SEQ ID NO: 4592916 - DNA, 25 bp, Homo sapien
gacatgttctcctgacccaaccagg

SEQ ID NO: 4592917 - DNA, 25 bp, Homo sapien
taagttgcccgactttacaatagag

SEQ ID NO: 4592918 - DNA, 25 bp, Homo sapien
ggaaggaggaagagctataaaagct

SEQ ID NO: 4592919 - DNA, 25 bp, Homo sapien
gaaggaggaagagctataaaagctc

SEQ ID NO: 4592920 - DNA, 25 bp, Homo sapien
caacaggacacaggcaaaagcagca

SEQ ID NO: 4592921 - DNA, 25 bp, Homo sapien
cagcaagtccaactgctatggatac

SEQ ID NO: 4592922 - DNA, 25 bp, Homo sapien
ttggaccgtcgaccatatttgttga

SEQ ID NO: 4592923 - DNA, 25 bp, Homo sapien
tcatgacgaagagaaccaccaacag

SEQ ID NO: 4592924 - DNA, 25 bp, Homo sapien
cacagtgataggaggtgtgggactc

SEQ ID NO: 4592925 - DNA, 25 bp, Homo sapien
tgataggaggtgtgggactcacttc

SEQ ID NO: 4592926 - DNA, 25 bp, Homo sapien
ggaggtgtgggactcacttcgtcaa

SEQ ID NO: 4592927 - DNA, 25 bp, Homo sapien
tgtgggtcacagtgataggaggtgt

SEQ ID NO: 4592928 - DNA, 25 bp, Homo sapien
gaatgagagataaagttcctggttt

SEQ ID NO: 4592929 - DNA, 25 bp, Homo sapien
atgagagataaagttcctggtttca

SEQ ID NO: 4592930 - DNA, 25 bp, Homo sapien
aatgagagataaagttcctggtttc

SEQ ID NO: 4592931 - DNA, 25 bp, Homo sapien
tagggggtggtcctccaaatggaga

SEQ ID NO: 4592932 - DNA, 25 bp, Homo sapien
ggtacacgcagttcggttgcttgtt

SEQ ID NO: 4592933 - DNA, 25 bp, Homo sapien
cgtgccaacaccctcttctcaacag

SEQ ID NO: 4592934 - DNA, 25 bp, Homo sapien
acattcctgggcatacccttcgtgc

SEQ ID NO: 4592935 - DNA, 25 bp, Homo sapien
ttatggtacacgcagttcggttgct

SEQ ID NO: 4592936 - DNA, 25 bp, Homo sapien
cagaccataactcttcaagaagcgc

SEQ ID NO: 4592937 - DNA, 25 bp, Homo sapien
cgccccttctgtaaattaatcttca

SEQ ID NO: 4592938 - DNA, 25 bp, Homo sapien
caagaagcgccccttctgtaaatta

SEQ ID NO: 4592939 - DNA, 25 bp, Homo sapien
aactcttcaagaagcgccccttctg

SEQ ID NO: 4592940 - DNA, 25 bp, Homo sapien
tccgatccagctacgctgccctcac

SEQ ID NO: 4592941 - DNA, 25 bp, Homo sapien
atgccccatctcccaagcttgtaga

SEQ ID NO: 4592942 - DNA, 25 bp, Homo sapien
tgtagaaagaatccatacacctccg

SEQ ID NO: 4592943 - DNA, 25 bp, Homo sapien
atacacctccgatccagctacgctg

SEQ ID NO: 4592944 - DNA, 25 bp, Homo sapien
ccctcttggtagtattccacatgga

SEQ ID NO: 4592945 - DNA, 25 bp, Homo sapien
cattgatggtctggttggctgtgcc

SEQ ID NO: 4592946 - DNA, 25 bp, Homo sapien
gggttgccacgcaccacaaactcga

SEQ ID NO: 4592947 - DNA, 25 bp, Homo sapien
caaactcgatgcagtgctccaggcg

SEQ ID NO: 4592948 - DNA, 25 bp, Homo sapien
cagcgtcaagttgatggcatgaaca

SEQ ID NO: 4592949 - DNA, 25 bp, Homo sapien
actcgtcacattcaccagcgtcaag

SEQ ID NO: 4592950 - DNA, 25 bp, Homo sapien
gaacattggtccagttcagattggt

SEQ ID NO: 4592951 - DNA, 25 bp, Homo sapien
tctctgcaatgcacgtcagggtgaa

SEQ ID NO: 4592952 - DNA, 25 bp, Homo sapien
gttgtcaccctctcgtacggtcagg

SEQ ID NO: 4592953 - DNA, 25 bp, Homo sapien
tacggtcaggttgacgtggctcacg

SEQ ID NO: 4592954 - DNA, 25 bp, Homo sapien
gactatccagtccacatcaggaagg

SEQ ID NO: 4592955 - DNA, 25 bp, Homo sapien
gtgatccagagccattgcaagtgat

SEQ ID NO: 4592956 - DNA, 25 bp, Homo sapien
tcagcgttgatgcagtagaggttct

SEQ ID NO: 4592957 - DNA, 25 bp, Homo sapien
atgttcatgcggaagagaggaagct

SEQ ID NO: 4592958 - DNA, 25 bp, Homo sapien
atgcagtagaggttctggctgttga

SEQ ID NO: 4592959 - DNA, 25 bp, Homo sapien
cgttgatgcagtagaggttctggct

SEQ ID NO: 4592960 - DNA, 25 bp, Homo sapien
acagctgcagttgaaaaagttctgc

SEQ ID NO: 4592961 - DNA, 25 bp, Homo sapien
cacagctgcagttgaaaaagttctg

SEQ ID NO: 4592962 - DNA, 25 bp, Homo sapien
ggaacctctgaaccgaagatggccc

SEQ ID NO: 4592963 - DNA, 25 bp, Homo sapien
gaagggaacctctgaaccgaagatg

SEQ ID NO: 4592964 - DNA, 25 bp, Homo sapien
aacctctgaaccgaagatggcccag

SEQ ID NO: 4592965 - DNA, 25 bp, Homo sapien
gggaacctctgaaccgaagatggcc

SEQ ID NO: 4592966 - DNA, 25 bp, Homo sapien
caatccaaaactcagagtaaagggc

SEQ ID NO: 4592967 - DNA, 25 bp, Homo sapien
gaggaaacatgattctctttctgga

SEQ ID NO: 4592968 - DNA, 25 bp, Homo sapien
gattattaaggagacaatgaacagc

SEQ ID NO: 4592969 - DNA, 25 bp, Homo sapien
taaagggcaccggataaatctgaat

SEQ ID NO: 4592970 - DNA, 25 bp, Homo sapien
tggtcctttgttccaactgagttta

SEQ ID NO: 4592971 - DNA, 25 bp, Homo sapien
cctttgttccaactgagtttatggg

SEQ ID NO: 4592972 - DNA, 25 bp, Homo sapien
gatgcaccttgaaacctggtccttt

SEQ ID NO: 4592973 - DNA, 25 bp, Homo sapien
tgcaaaagaactgtggggtattccc

SEQ ID NO: 4592974 - DNA, 25 bp, Homo sapien
ggcaaagatgaatgcagaatcccat

SEQ ID NO: 4592975 - DNA, 25 bp, Homo sapien
ggtgtattgatcccaggcaaagatg

SEQ ID NO: 4592976 - DNA, 25 bp, Homo sapien
tggtgtattgatcccaggcaaagat

SEQ ID NO: 4592977 - DNA, 25 bp, Homo sapien
tggtgagccggttacttgacaggtt

SEQ ID NO: 4592978 - DNA, 25 bp, Homo sapien
tggaagagctgccacgagagtgtgg

SEQ ID NO: 4592979 - DNA, 25 bp, Homo sapien
aagagctgccacgagagtgtggtga

SEQ ID NO: 4592980 - DNA, 25 bp, Homo sapien
gagagtgtggtgagccggttacttg

SEQ ID NO: 4592981 - DNA, 25 bp, Homo sapien
caagattttacgagatgatgcatca

SEQ ID NO: 4592982 - DNA, 25 bp, Homo sapien
gccatctgaccattgaattaatttg

SEQ ID NO: 4592983 - DNA, 25 bp, Homo sapien
agttccgtgacactgccccttctat

SEQ ID NO: 4592984 - DNA, 25 bp, Homo sapien
tgcatcaaactcttccgcaaaatca

SEQ ID NO: 4592985 - DNA, 25 bp, Homo sapien
ctctggggtccagaggtagtaaaca

SEQ ID NO: 4592986 - DNA, 25 bp, Homo sapien
ctactgggtgctccgggaacaagga

SEQ ID NO: 4592987 - DNA, 25 bp, Homo sapien
tagtaaacaatgatgatgtggctac

SEQ ID NO: 4592988 - DNA, 25 bp, Homo sapien
tgatgtggctactgggtgctccggg

SEQ ID NO: 4592989 - DNA, 25 bp, Homo sapien
cactcagaacctcgcagaacatggg

SEQ ID NO: 4592990 - DNA, 25 bp, Homo sapien
cttcacgtctctgcgctgaggagca

SEQ ID NO: 4592991 - DNA, 25 bp, Homo sapien
cctgttccctccagtaggcatgctt

SEQ ID NO: 4592992 - DNA, 25 bp, Homo sapien
aggcatgcttttctcggtgtcagca

SEQ ID NO: 4592993 - DNA, 25 bp, Homo sapien
aaagctaaagagaacacctccaaag

SEQ ID NO: 4592994 - DNA, 25 bp, Homo sapien
aagccaactgtgaatgaacggggga

SEQ ID NO: 4592995 - DNA, 25 bp, Homo sapien
aagagaacacctccaaagccaactg

SEQ ID NO: 4592996 - DNA, 25 bp, Homo sapien
aatgaacgggggatcagccagcaga

SEQ ID NO: 4592997 - DNA, 25 bp, Homo sapien
ttccttgactgccagcaatacccat

SEQ ID NO: 4592998 - DNA, 25 bp, Homo sapien
cttccttgactgccagcaataccca

SEQ ID NO: 4592999 - DNA, 25 bp, Homo sapien
aggctcagtggcctgtacccatcag

SEQ ID NO: 4593000 - DNA, 25 bp, Homo sapien
gctgtcacctgctccataaggctgc

SEQ ID NO: 4593001 - DNA, 25 bp, Homo sapien
tcctattccgtggacaaatggctcc

SEQ ID NO: 4593002 - DNA, 25 bp, Homo sapien
cctgtgccataagcaggctgtctgc

SEQ ID NO: 4593003 - DNA, 25 bp, Homo sapien
tgtcagctatccagcatttcatggc

SEQ ID NO: 4593004 - DNA, 25 bp, Homo sapien
gtcatcttgaaactcagaatctggg

SEQ ID NO: 4593005 - DNA, 25 bp, Homo sapien
taaggctaagaccaatcctatgaag

SEQ ID NO: 4593006 - DNA, 25 bp, Homo sapien
tgcctaaggtcaacagcaggaagtg

SEQ ID NO: 4593007 - DNA, 25 bp, Homo sapien
tgcagcccaagatgtaaccctgctc

SEQ ID NO: 4593008 - DNA, 25 bp, Homo sapien
aaagacatgctctggtacaacccac

SEQ ID NO: 4593009 - DNA, 25 bp, Homo sapien
ctgagcctgggtcctgaagcctctc

SEQ ID NO: 4593010 - DNA, 25 bp, Homo sapien
tccaaaagagacagtgggtcacagc

SEQ ID NO: 4593011 - DNA, 25 bp, Homo sapien
caaatgggggttcttggcaaaggct

SEQ ID NO: 4593012 - DNA, 25 bp, Homo sapien
atgctccgaagtcctgagttcttga

SEQ ID NO: 4593013 - DNA, 25 bp, Homo sapien
gaatgctccgaagtcctgagttctt

SEQ ID NO: 4593014 - DNA, 25 bp, Homo sapien
ctgaatgctccgaagtcctgagttc

SEQ ID NO: 4593015 - DNA, 25 bp, Homo sapien
acgccccagggccccgtgaggctgg

SEQ ID NO: 4593016 - DNA, 25 bp, Homo sapien
gccccagggccccgtgaggctggga

SEQ ID NO: 4593017 - DNA, 25 bp, Homo sapien
ccagggccccgtgaggctgggaggt

SEQ ID NO: 4593018 - DNA, 25 bp, Homo sapien
gaggctgggaggtcaggggtcatac

SEQ ID NO: 4593019 - DNA, 25 bp, Homo sapien
cttctgctggtccagtaatggcagg

SEQ ID NO: 4593020 - DNA, 25 bp, Homo sapien
tctgctggtccagtaatggcagggc

SEQ ID NO: 4593021 - DNA, 25 bp, Homo sapien
gccagtaggtaaggaccagggcttc

SEQ ID NO: 4593022 - DNA, 25 bp, Homo sapien
cccatcctggccagtaggtaaggac

SEQ ID NO: 4593023 - DNA, 25 bp, Homo sapien
agatgggaattcacacaaccccctt

SEQ ID NO: 4593024 - DNA, 25 bp, Homo sapien
cttcaagatgggaattcacacaacc

SEQ ID NO: 4593025 - DNA, 25 bp, Homo sapien
atgggaattcacacaacccccttgc

SEQ ID NO: 4593026 - DNA, 25 bp, Homo sapien
tcaagatgggaattcacacaacccc

SEQ ID NO: 4593027 - DNA, 25 bp, Homo sapien
ttgaagtccggtgtagagctccatg

SEQ ID NO: 4593028 - DNA, 25 bp, Homo sapien
catgtccacggcgttgagcgtgtga

SEQ ID NO: 4593029 - DNA, 25 bp, Homo sapien
ttttgaagtccggtgtagagctcca

SEQ ID NO: 4593030 - DNA, 25 bp, Homo sapien
gcgtgtgaagactgcgccagttctc

SEQ ID NO: 4593031 - DNA, 25 bp, Homo sapien
gcaccaaaggatctcgggaaaaggc

SEQ ID NO: 4593032 - DNA, 25 bp, Homo sapien
caagaggcaccaaaggatctcggga

SEQ ID NO: 4593033 - DNA, 25 bp, Homo sapien
tcccaagaggcaccaaaggatctcg

SEQ ID NO: 4593034 - DNA, 25 bp, Homo sapien
ctgtgatcccaagaggcaccaaagg

SEQ ID NO: 4593035 - DNA, 25 bp, Homo sapien
aaggcagcaggactatgactgccag

SEQ ID NO: 4593036 - DNA, 25 bp, Homo sapien
catctgccaccaactcgagtcagag

SEQ ID NO: 4593037 - DNA, 25 bp, Homo sapien
caactcgagtcagagccagcaaggc

SEQ ID NO: 4593038 - DNA, 25 bp, Homo sapien
caccacacccgtagctctgccatct

SEQ ID NO: 4593039 - DNA, 25 bp, Homo sapien
ccagggcagtttgggtggtctggtc

SEQ ID NO: 4593040 - DNA, 25 bp, Homo sapien
cctggaagccttacagccccagggc

SEQ ID NO: 4593041 - DNA, 25 bp, Homo sapien
ggtctggtctcaccatggcagagaa

SEQ ID NO: 4593042 - DNA, 25 bp, Homo sapien
cagtttgggtggtctggtctcacca

SEQ ID NO: 4593043 - DNA, 25 bp, Homo sapien
caggaactcggtcggtgggacttag

SEQ ID NO: 4593044 - DNA, 25 bp, Homo sapien
ccctgggcacttggcaagacaggaa

SEQ ID NO: 4593045 - DNA, 25 bp, Homo sapien
ggcaagacaggaactcggtcggtgg

SEQ ID NO: 4593046 - DNA, 25 bp, Homo sapien
ctggcagaacttccctgggcacttg

SEQ ID NO: 4593047 - DNA, 25 bp, Homo sapien
cagtgtgctagatgcctggggagcc

SEQ ID NO: 4593048 - DNA, 25 bp, Homo sapien
gacagtgtgctagatgcctggggag

SEQ ID NO: 4593049 - DNA, 25 bp, Homo sapien
gtgctagatgcctggggagccagac

SEQ ID NO: 4593050 - DNA, 25 bp, Homo sapien
tgtgctagatgcctggggagccaga

SEQ ID NO: 4593051 - DNA, 25 bp, Homo sapien
ccaggggttgggacggcttgtgccg

SEQ ID NO: 4593052 - DNA, 25 bp, Homo sapien
ttgggacggcttgtgccggtgaccc

SEQ ID NO: 4593053 - DNA, 25 bp, Homo sapien
gggttgggacggcttgtgccggtga

SEQ ID NO: 4593054 - DNA, 25 bp, Homo sapien
gccaggggttgggacggcttgtgcc

SEQ ID NO: 4593055 - DNA, 25 bp, Homo sapien
tgcgccaaggaccacggtgaaccag

SEQ ID NO: 4593056 - DNA, 25 bp, Homo sapien
gctgtgcgccaaggaccacggtgaa

SEQ ID NO: 4593057 - DNA, 25 bp, Homo sapien
tgtgcgccaaggaccacggtgaacc

SEQ ID NO: 4593058 - DNA, 25 bp, Homo sapien
cagctgtgcgccaaggaccacggtg

SEQ ID NO: 4593059 - DNA, 25 bp, Homo sapien
tgtggccccgagcacaccactgaac

SEQ ID NO: 4593060 - DNA, 25 bp, Homo sapien
gagctgtggccccgagcacaccact

SEQ ID NO: 4593061 - DNA, 25 bp, Homo sapien
ctgtggccccgagcacaccactgaa

SEQ ID NO: 4593062 - DNA, 25 bp, Homo sapien
accactgaacatcccacccagggac

SEQ ID NO: 4593063 - DNA, 25 bp, Homo sapien
gagtgagcattaagctcaagtgcat

SEQ ID NO: 4593064 - DNA, 25 bp, Homo sapien
ttaatgcagaaaagtcgctccaaag

SEQ ID NO: 4593065 - DNA, 25 bp, Homo sapien
taaaggcgaattggtgagtgagcat

SEQ ID NO: 4593066 - DNA, 25 bp, Homo sapien
gacttatgagggcaatattttcgcc

SEQ ID NO: 4593067 - DNA, 25 bp, Homo sapien
tacagatgcccttttgactaagcga

SEQ ID NO: 4593068 - DNA, 25 bp, Homo sapien
aaagaacccaaaaagtgagtcagtg

SEQ ID NO: 4593069 - DNA, 25 bp, Homo sapien
gaagtcatagttggcagcaacaggc

SEQ ID NO: 4593070 - DNA, 25 bp, Homo sapien
tctgaaagctgtcccgtgctcagct

SEQ ID NO: 4593071 - DNA, 25 bp, Homo sapien
atcccagttcaaacggagcatcacg

SEQ ID NO: 4593072 - DNA, 25 bp, Homo sapien
catcccggtttgttcacggcttcct

SEQ ID NO: 4593073 - DNA, 25 bp, Homo sapien
tcacggcttccttgacaaatcccag

SEQ ID NO: 4593074 - DNA, 25 bp, Homo sapien
tttggcaatggcaattcatcagagg

SEQ ID NO: 4593075 - DNA, 25 bp, Homo sapien
tacatctccgttgacgcagagctcc

SEQ ID NO: 4593076 - DNA, 25 bp, Homo sapien
tagacactgtgtcctgcgatgccag

SEQ ID NO: 4593077 - DNA, 25 bp, Homo sapien
ccaataactgtctccctcgtgcaga

SEQ ID NO: 4593078 - DNA, 25 bp, Homo sapien
gggatggacctaagcagcatgccca

SEQ ID NO: 4593079 - DNA, 25 bp, Homo sapien
aagaccactatgttgaggcctctga

SEQ ID NO: 4593080 - DNA, 25 bp, Homo sapien
gaatgcaggtgtgcttcaagaaacc

SEQ ID NO: 4593081 - DNA, 25 bp, Homo sapien
gctgtcttggacgaacacctggaca

SEQ ID NO: 4593082 - DNA, 25 bp, Homo sapien
tagcctgactacgtccctgggcaag

SEQ ID NO: 4593083 - DNA, 25 bp, Homo sapien
taggcacaagtgactctgttgcttc

SEQ ID NO: 4593084 - DNA, 25 bp, Homo sapien
ctaggcacaagtgactctgttgctt

SEQ ID NO: 4593085 - DNA, 25 bp, Homo sapien
tttagagtgctcaggaatcccttgc

SEQ ID NO: 4593086 - DNA, 25 bp, Homo sapien
tgatgccgcattaacccctgtgaga

SEQ ID NO: 4593087 - DNA, 25 bp, Homo sapien
cattccagtgccaaggaccgtctgt

SEQ ID NO: 4593088 - DNA, 25 bp, Homo sapien
gctgcccgaaagctcaatgatgtca

SEQ ID NO: 4593089 - DNA, 25 bp, Homo sapien
gtggtctctcacaacacagcctgga

SEQ ID NO: 4593090 - DNA, 25 bp, Homo sapien
gcatcacccacgtggtctctcacaa

SEQ ID NO: 4593091 - DNA, 25 bp, Homo sapien
acgtggtctctcacaacacagcctg

SEQ ID NO: 4593092 - DNA, 25 bp, Homo sapien
acccacgtggtctctcacaacacag

SEQ ID NO: 4593093 - DNA, 25 bp, Homo sapien
caccttgccatagagattgaaagcc

SEQ ID NO: 4593094 - DNA, 25 bp, Homo sapien
ggtttgaagcctgagccatatgcag

SEQ ID NO: 4593095 - DNA, 25 bp, Homo sapien
gcaacaagggatggccaggtttgaa

SEQ ID NO: 4593096 - DNA, 25 bp, Homo sapien
tgcaagccaacaagctctctagata

SEQ ID NO: 4593097 - DNA, 25 bp, Homo sapien
ccactcatgggctgtatccacagca

SEQ ID NO: 4593098 - DNA, 25 bp, Homo sapien
gcttccgtcttgagggtcttgggcc

SEQ ID NO: 4593099 - DNA, 25 bp, Homo sapien
tctgcctcttaatgatggcttcaag

SEQ ID NO: 4593100 - DNA, 25 bp, Homo sapien
ccccagcccagagcgaaagtttgac

SEQ ID NO: 4593101 - DNA, 25 bp, Homo sapien
accttgaacaagtgacgccaccctt

SEQ ID NO: 4593102 - DNA, 25 bp, Homo sapien
tgaacaagtgacgccacccttcttc

SEQ ID NO: 4593103 - DNA, 25 bp, Homo sapien
cttgaacaagtgacgccacccttct

SEQ ID NO: 4593104 - DNA, 25 bp, Homo sapien
gaccttgaacaagtgacgccaccct

SEQ ID NO: 4593105 - DNA, 25 bp, Homo sapien
ggcactttcgtagccacctctgtgt

SEQ ID NO: 4593106 - DNA, 25 bp, Homo sapien
tacaagactgcctggaacagacaga

SEQ ID NO: 4593107 - DNA, 25 bp, Homo sapien
gacgagccaacgatactctcagaag

SEQ ID NO: 4593108 - DNA, 25 bp, Homo sapien
catggccctggtttgcaaggcactt

SEQ ID NO: 4593109 - DNA, 25 bp, Homo sapien
taagcctgtgggtcttcctgggcta

SEQ ID NO: 4593110 - DNA, 25 bp, Homo sapien
ttaagcctgtgggtcttcctgggct

SEQ ID NO: 4593111 - DNA, 25 bp, Homo sapien
aagcctgtgggtcttcctgggctac

SEQ ID NO: 4593112 - DNA, 25 bp, Homo sapien
ggtcctggagtctcacatccctgga

SEQ ID NO: 4593113 - DNA, 25 bp, Homo sapien
gctcatgagtcagaaagtccgggtc

SEQ ID NO: 4593114 - DNA, 25 bp, Homo sapien
gaagccaaaggctcatgagtcagaa

SEQ ID NO: 4593115 - DNA, 25 bp, Homo sapien
tgagtcagaaagtccgggtcctgga

SEQ ID NO: 4593116 - DNA, 25 bp, Homo sapien
ccagggctgacagtgcacttctcac

SEQ ID NO: 4593117 - DNA, 25 bp, Homo sapien
gccagggctgacagtgcacttctca

SEQ ID NO: 4593118 - DNA, 25 bp, Homo sapien
agccagggctgacagtgcacttctc

SEQ ID NO: 4593119 - DNA, 25 bp, Homo sapien
aagccagggctgacagtgcacttct

SEQ ID NO: 4593120 - DNA, 25 bp, Homo sapien
ccacacgcccggctcccgccctggg

SEQ ID NO: 4593121 - DNA, 25 bp, Homo sapien
gcccggctcccgccctgggaagcca

SEQ ID NO: 4593122 - DNA, 25 bp, Homo sapien
ctagcgccacacgcccggctcccgc

SEQ ID NO: 4593123 - DNA, 25 bp, Homo sapien
cccggctcccgccctgggaagccat

SEQ ID NO: 4593124 - DNA, 25 bp, Homo sapien
gatgaggactttcaaagcagtggcc

SEQ ID NO: 4593125 - DNA, 25 bp, Homo sapien
ccaaagctgtcatggcctcaggtcc

SEQ ID NO: 4593126 - DNA, 25 bp, Homo sapien
tggtttttgcccaaagctgtcatgg

SEQ ID NO: 4593127 - DNA, 25 bp, Homo sapien
gggccagtagatgaggactttcaaa

SEQ ID NO: 4593128 - DNA, 25 bp, Homo sapien
tgtatgacagaagcttgacctgctg

SEQ ID NO: 4593129 - DNA, 25 bp, Homo sapien
tatgacagaagcttgacctgctggg

SEQ ID NO: 4593130 - DNA, 25 bp, Homo sapien
gtgtatgacagaagcttgacctgct

SEQ ID NO: 4593131 - DNA, 25 bp, Homo sapien
gtatgacagaagcttgacctgctgg

SEQ ID NO: 4593132 - DNA, 25 bp, Homo sapien
aacagctaaagaccataccactcca

SEQ ID NO: 4593133 - DNA, 25 bp, Homo sapien
tctaacagctaaagaccataccact

SEQ ID NO: 4593134 - DNA, 25 bp, Homo sapien
taacagctaaagaccataccactcc

SEQ ID NO: 4593135 - DNA, 25 bp, Homo sapien
ttctaacagctaaagaccataccac

SEQ ID NO: 4593136 - DNA, 25 bp, Homo sapien
taaaacaagaactgaccccagctgc

SEQ ID NO: 4593137 - DNA, 25 bp, Homo sapien
catcaagagcttcaggccagtaggg

SEQ ID NO: 4593138 - DNA, 25 bp, Homo sapien
gagtgtgcccaagctataccctggg

SEQ ID NO: 4593139 - DNA, 25 bp, Homo sapien
catttcctcagaagtcaaacaggga

SEQ ID NO: 4593140 - DNA, 25 bp, Homo sapien
tggggaaaagatggggcaaggagag

SEQ ID NO: 4593141 - DNA, 25 bp, Homo sapien
tcctgatggcctctcagaatccaag

SEQ ID NO: 4593142 - DNA, 25 bp, Homo sapien
agtctgagtttccctaacagtctca

SEQ ID NO: 4593143 - DNA, 25 bp, Homo sapien
tctgagtttccctaacagtctcact

SEQ ID NO: 4593144 - DNA, 25 bp, Homo sapien
gtctgagtttccctaacagtctcac

SEQ ID NO: 4593145 - DNA, 25 bp, Homo sapien
ccattgctgagggtccccaagggct

SEQ ID NO: 4593146 - DNA, 25 bp, Homo sapien
ctggaatgcgcagccggagagcatc

SEQ ID NO: 4593147 - DNA, 25 bp, Homo sapien
atgcgcagccggagagcatctcccg

SEQ ID NO: 4593148 - DNA, 25 bp, Homo sapien
agccggagagcatctcccgagccag

SEQ ID NO: 4593149 - DNA, 25 bp, Homo sapien
agagcatctcccgagccagagcgag

SEQ ID NO: 4593150 - DNA, 25 bp, Homo sapien
gatactggcgttcccattgctgttc

SEQ ID NO: 4593151 - DNA, 25 bp, Homo sapien
attgctgttccctgaatcctgccct

SEQ ID NO: 4593152 - DNA, 25 bp, Homo sapien
tccggccgccggcaattgatctcag

SEQ ID NO: 4593153 - DNA, 25 bp, Homo sapien
tattccttgagatgtccgtgatgtt

SEQ ID NO: 4593154 - DNA, 25 bp, Homo sapien
cagacgcttcccagcaagaaaatcc

SEQ ID NO: 4593155 - DNA, 25 bp, Homo sapien
ccgccagaaactacacttggctggg

SEQ ID NO: 4593156 - DNA, 25 bp, Homo sapien
acggagcccacatagtccagccaga

SEQ ID NO: 4593157 - DNA, 25 bp, Homo sapien
ctgcagacacaatttgcagggcaag

SEQ ID NO: 4593158 - DNA, 25 bp, Homo sapien
tttgaaacgccgagcgatcagatgc

SEQ ID NO: 4593159 - DNA, 25 bp, Homo sapien
gatgcaaaatccttcagcgtctgaa

SEQ ID NO: 4593160 - DNA, 25 bp, Homo sapien
ctagtggcgcggtctgccgggcatg

SEQ ID NO: 4593161 - DNA, 25 bp, Homo sapien
tcggcgatcgctgactcgccgggtc

SEQ ID NO: 4593162 - DNA, 25 bp, Homo sapien
gaggaaaggaagagaaggaagatgc

SEQ ID NO: 4593163 - DNA, 25 bp, Homo sapien
cggagcccgaggaaaggaagagaag

SEQ ID NO: 4593164 - DNA, 25 bp, Homo sapien
aaaggaagagaaggaagatgcagta

SEQ ID NO: 4593165 - DNA, 25 bp, Homo sapien
ggaaaggaagagaaggaagatgcag

SEQ ID NO: 4593166 - DNA, 25 bp, Homo sapien
ggctgtagccggcaccgccacccgc

SEQ ID NO: 4593167 - DNA, 25 bp, Homo sapien
ctgtagccggcaccgccacccgcag

SEQ ID NO: 4593168 - DNA, 25 bp, Homo sapien
gcggctgtagccggcaccgccaccc

SEQ ID NO: 4593169 - DNA, 25 bp, Homo sapien
ccgcccgctccacgcctcgcagcgc

SEQ ID NO: 4593170 - DNA, 25 bp, Homo sapien
tcagaggccggcttctcgggctcag

SEQ ID NO: 4593171 - DNA, 25 bp, Homo sapien
accgtcagaggccggcttctcgggc

SEQ ID NO: 4593172 - DNA, 25 bp, Homo sapien
ggcgggcgggctgctttctccggat

SEQ ID NO: 4593173 - DNA, 25 bp, Homo sapien
tttctccggattcgggggcgcagaa

SEQ ID NO: 4593174 - DNA, 25 bp, Homo sapien
tatggccttgtctccagactggcat

SEQ ID NO: 4593175 - DNA, 25 bp, Homo sapien
cattatggccttgtctccagactgg

SEQ ID NO: 4593176 - DNA, 25 bp, Homo sapien
ccccgtcgccattatggccttgtct

SEQ ID NO: 4593177 - DNA, 25 bp, Homo sapien
cgtcgccattatggccttgtctcca

SEQ ID NO: 4593178 - DNA, 25 bp, Homo sapien
agagaatcaatttcatccaagaaat

SEQ ID NO: 4593179 - DNA, 25 bp, Homo sapien
cagagagaatcaatttcatccaaga

SEQ ID NO: 4593180 - DNA, 25 bp, Homo sapien
gagagaatcaatttcatccaagaaa

SEQ ID NO: 4593181 - DNA, 25 bp, Homo sapien
tcagagagaatcaatttcatccaag

SEQ ID NO: 4593182 - DNA, 25 bp, Homo sapien
cctttattctttagcatctcaactc

SEQ ID NO: 4593183 - DNA, 25 bp, Homo sapien
tattctttagcatctcaactctcct

SEQ ID NO: 4593184 - DNA, 25 bp, Homo sapien
tttattctttagcatctcaactctc

SEQ ID NO: 4593185 - DNA, 25 bp, Homo sapien
attctttagcatctcaactctcctc

SEQ ID NO: 4593186 - DNA, 25 bp, Homo sapien
tcacatatggctgtgttgtgaggtc

SEQ ID NO: 4593187 - DNA, 25 bp, Homo sapien
agtgctacatccacggaagagcatc

SEQ ID NO: 4593188 - DNA, 25 bp, Homo sapien
gtgaggtcatggtcagtgctacatc

SEQ ID NO: 4593189 - DNA, 25 bp, Homo sapien
gaggtcatggtcagtgctacatcca

SEQ ID NO: 4593190 - DNA, 25 bp, Homo sapien
gcaaggcttgtccagtccagactct

SEQ ID NO: 4593191 - DNA, 25 bp, Homo sapien
cagctggcaaggcttgtccagtcca

SEQ ID NO: 4593192 - DNA, 25 bp, Homo sapien
agagtctccaacagcattggcagca

SEQ ID NO: 4593193 - DNA, 25 bp, Homo sapien
cacaccagctggcaaggcttgtcca

SEQ ID NO: 4593194 - DNA, 25 bp, Homo sapien
ggatcttggaagcacatgccaccag

SEQ ID NO: 4593195 - DNA, 25 bp, Homo sapien
gaccccacagggcaagaaatctcct

SEQ ID NO: 4593196 - DNA, 25 bp, Homo sapien
gacatggaaccaccttcaaatgatg

SEQ ID NO: 4593197 - DNA, 25 bp, Homo sapien
tggaaggatcccttgtaccttgaca

SEQ ID NO: 4593198 - DNA, 25 bp, Homo sapien
cctggcttctacctgagctatcact

SEQ ID NO: 4593199 - DNA, 25 bp, Homo sapien
gctatcactgccatgtggatcccac

SEQ ID NO: 4593200 - DNA, 25 bp, Homo sapien
ctccagccgtccagtcttggcacct

SEQ ID NO: 4593201 - DNA, 25 bp, Homo sapien
tgcatcccagatgcttctattccca

SEQ ID NO: 4593202 - DNA, 25 bp, Homo sapien
tgcctgaggttactgtgtgtctaca

SEQ ID NO: 4593203 - DNA, 25 bp, Homo sapien
ctatacagaggatcctcttgggacc

SEQ ID NO: 4593204 - DNA, 25 bp, Homo sapien
gaaatagccatcgaatccatccggg

SEQ ID NO: 4593205 - DNA, 25 bp, Homo sapien
tacagagcattcactagggtgcctg

SEQ ID NO: 4593206 - DNA, 25 bp, Homo sapien
tgccttgactggcagagttccctga

SEQ ID NO: 4593207 - DNA, 25 bp, Homo sapien
tccctgaatgctgggaggaattcct

SEQ ID NO: 4593208 - DNA, 25 bp, Homo sapien
atgggacaatttctgccttgactgg

SEQ ID NO: 4593209 - DNA, 25 bp, Homo sapien
ccctgaatgctgggaggaattcctt

SEQ ID NO: 4593210 - DNA, 25 bp, Homo sapien
gccagtctcactggggctaccttca

SEQ ID NO: 4593211 - DNA, 25 bp, Homo sapien
ctcccttggccaagacacctgccag

SEQ ID NO: 4593212 - DNA, 25 bp, Homo sapien
cactggggctaccttcattcattcc

SEQ ID NO: 4593213 - DNA, 25 bp, Homo sapien
ttggccaagacacctgccagtctca

SEQ ID NO: 4593214 - DNA, 25 bp, Homo sapien
ctgtaattgggcacttatgtagggc

SEQ ID NO: 4593215 - DNA, 25 bp, Homo sapien
tgtaattgggcacttatgtagggca

SEQ ID NO: 4593216 - DNA, 25 bp, Homo sapien
tccatcagcctctatattcacctgt

SEQ ID NO: 4593217 - DNA, 25 bp, Homo sapien
tttccatcagcctctatattcacct

SEQ ID NO: 4593218 - DNA, 25 bp, Homo sapien
catcagcctctatattcacctgtgt

SEQ ID NO: 4593219 - DNA, 25 bp, Homo sapien
ccatcagcctctatattcacctgtg

SEQ ID NO: 4593220 - DNA, 25 bp, Homo sapien
tctgccctgagtcctatggtgtgtt

SEQ ID NO: 4593221 - DNA, 25 bp, Homo sapien
acagaagaaatgtctaggccctctg

SEQ ID NO: 4593222 - DNA, 25 bp, Homo sapien
aaaggttaggcgagagaacttctct

SEQ ID NO: 4593223 - DNA, 25 bp, Homo sapien
tagaactctggctacagagccttcg

SEQ ID NO: 4593224 - DNA, 25 bp, Homo sapien
atatgaaagcttctggagacaccag

SEQ ID NO: 4593225 - DNA, 25 bp, Homo sapien
cgctgctgaatagaatgtgtggata

SEQ ID NO: 4593226 - DNA, 25 bp, Homo sapien
gtggatatgaaagcttctggagaca

SEQ ID NO: 4593227 - DNA, 25 bp, Homo sapien
agggactcgctgctgaatagaatgt

SEQ ID NO: 4593228 - DNA, 25 bp, Homo sapien
cactccctgagcagccggtgcccac

SEQ ID NO: 4593229 - DNA, 25 bp, Homo sapien
tcactccctgagcagccggtgccca

SEQ ID NO: 4593230 - DNA, 25 bp, Homo sapien
tccctgagcagccggtgcccactgc

SEQ ID NO: 4593231 - DNA, 25 bp, Homo sapien
cctgagcagccggtgcccactgccc

SEQ ID NO: 4593232 - DNA, 25 bp, Homo sapien
accactcatgtccaaccggttggct

SEQ ID NO: 4593233 - DNA, 25 bp, Homo sapien
tattaccactcatgtccaaccggtt

SEQ ID NO: 4593234 - DNA, 25 bp, Homo sapien
actcatgtccaaccggttggctcca

SEQ ID NO: 4593235 - DNA, 25 bp, Homo sapien
ttaccactcatgtccaaccggttgg

SEQ ID NO: 4593236 - DNA, 25 bp, Homo sapien
ctgaggaggcatgcttcagggagga

SEQ ID NO: 4593237 - DNA, 25 bp, Homo sapien
ggaggcatgcttcagggaggacttc

SEQ ID NO: 4593238 - DNA, 25 bp, Homo sapien
aggcatgcttcagggaggacttcca

SEQ ID NO: 4593239 - DNA, 25 bp, Homo sapien
gaggaggcatgcttcagggaggact

SEQ ID NO: 4593240 - DNA, 25 bp, Homo sapien
catgctgcctggtgggcaatcctcc

SEQ ID NO: 4593241 - DNA, 25 bp, Homo sapien
cagggtaacttcagccggagagcag

SEQ ID NO: 4593242 - DNA, 25 bp, Homo sapien
ttccatttggccatcggtccccagt

SEQ ID NO: 4593243 - DNA, 25 bp, Homo sapien
atagggtgtcctgatgtctggcatg

SEQ ID NO: 4593244 - DNA, 25 bp, Homo sapien
gagacaacacggtctctctcagctc

SEQ ID NO: 4593245 - DNA, 25 bp, Homo sapien
ctggagacaacacggtctctctcag

SEQ ID NO: 4593246 - DNA, 25 bp, Homo sapien
ctctggagacaacacggtctctctc

SEQ ID NO: 4593247 - DNA, 25 bp, Homo sapien
ggagacaacacggtctctctcagct

SEQ ID NO: 4593248 - DNA, 25 bp, Homo sapien
tccacttcttccttatggcctactt

SEQ ID NO: 4593249 - DNA, 25 bp, Homo sapien
tgctttccatttacctccacttctt

SEQ ID NO: 4593250 - DNA, 25 bp, Homo sapien
cttcttccttatggcctactttcat

SEQ ID NO: 4593251 - DNA, 25 bp, Homo sapien
ctgctttccatttacctccacttct

SEQ ID NO: 4593252 - DNA, 25 bp, Homo sapien
tcagcaaatgtgcagagcttgctgc

SEQ ID NO: 4593253 - DNA, 25 bp, Homo sapien
aatgtgcagagcttgctgcaaggac

SEQ ID NO: 4593254 - DNA, 25 bp, Homo sapien
caaatgtgcagagcttgctgcaagg

SEQ ID NO: 4593255 - DNA, 25 bp, Homo sapien
agcaaatgtgcagagcttgctgcaa

SEQ ID NO: 4593256 - DNA, 25 bp, Homo sapien
tgattaaggaacttatcaaaccaga

SEQ ID NO: 4593257 - DNA, 25 bp, Homo sapien
gtccactcccggtatcatcagcatg

SEQ ID NO: 4593258 - DNA, 25 bp, Homo sapien
cagatcatatgtccactcccggtat

SEQ ID NO: 4593259 - DNA, 25 bp, Homo sapien
aaaagaattgatctgattaaggaac

SEQ ID NO: 4593260 - DNA, 25 bp, Homo sapien
gttggtgacttctgcctcccaatac

SEQ ID NO: 4593261 - DNA, 25 bp, Homo sapien
atgacttggttggtgacttctgcct

SEQ ID NO: 4593262 - DNA, 25 bp, Homo sapien
tgacttctgcctcccaatacagctg

SEQ ID NO: 4593263 - DNA, 25 bp, Homo sapien
cctaatgtgttaatgacttggttgg

SEQ ID NO: 4593264 - DNA, 25 bp, Homo sapien
ttccacaagggcctgactcgactga

SEQ ID NO: 4593265 - DNA, 25 bp, Homo sapien
cctgactcgactgagggttcaccct

SEQ ID NO: 4593266 - DNA, 25 bp, Homo sapien
ctctgcccaagacgaccagtgtcgt

SEQ ID NO: 4593267 - DNA, 25 bp, Homo sapien
tgcctgatgccccttgaagtttcca

SEQ ID NO: 4593268 - DNA, 25 bp, Homo sapien
atttagtttgctgcttgatattacc

SEQ ID NO: 4593269 - DNA, 25 bp, Homo sapien
acaatgtccttgaggctctaatccc

SEQ ID NO: 4593270 - DNA, 25 bp, Homo sapien
tgaggctctaatcccagacttgtct

SEQ ID NO: 4593271 - DNA, 25 bp, Homo sapien
agacttgtctgagcaccgtccacag

SEQ ID NO: 4593272 - DNA, 25 bp, Homo sapien
aaaagtctccagttaatagcagtgc

SEQ ID NO: 4593273 - DNA, 25 bp, Homo sapien
tagcagtgctttgaagaagaacacc

SEQ ID NO: 4593274 - DNA, 25 bp, Homo sapien
catgatggcccttattcccagcctg

SEQ ID NO: 4593275 - DNA, 25 bp, Homo sapien
gaggttactctctgtccgcattgcc

SEQ ID NO: 4593276 - DNA, 25 bp, Homo sapien
agaaaaatcacaattggaaggtaag

SEQ ID NO: 4593277 - DNA, 25 bp, Homo sapien
tcacaattggaaggtaaggatacag

SEQ ID NO: 4593278 - DNA, 25 bp, Homo sapien
aatcacaattggaaggtaaggatac

SEQ ID NO: 4593279 - DNA, 25 bp, Homo sapien
caattggaaggtaaggatacagcca

SEQ ID NO: 4593280 - DNA, 25 bp, Homo sapien
agtcgctatctgctggcgaatcagc

SEQ ID NO: 4593281 - DNA, 25 bp, Homo sapien
ctatctgctggcgaatcagcccagt

SEQ ID NO: 4593282 - DNA, 25 bp, Homo sapien
atctgctggcgaatcagcccagtcg

SEQ ID NO: 4593283 - DNA, 25 bp, Homo sapien
tcgctatctgctggcgaatcagccc

SEQ ID NO: 4593284 - DNA, 25 bp, Homo sapien
gaatcagcccagtcgctatctgttg

SEQ ID NO: 4593285 - DNA, 25 bp, Homo sapien
ctggtgaaggacgaggacatttggt

SEQ ID NO: 4593286 - DNA, 25 bp, Homo sapien
caaagttcatccacctttaaaatgg

SEQ ID NO: 4593287 - DNA, 25 bp, Homo sapien
catccacctttaaaatgggtgtcac

SEQ ID NO: 4593288 - DNA, 25 bp, Homo sapien
acaaagttcatccacctttaaaatg

SEQ ID NO: 4593289 - DNA, 25 bp, Homo sapien
agttcatccacctttaaaatgggtg

SEQ ID NO: 4593290 - DNA, 25 bp, Homo sapien
attctggatggttgtttcatggaca

SEQ ID NO: 4593291 - DNA, 25 bp, Homo sapien
ctggatggttgtttcatggacattt

SEQ ID NO: 4593292 - DNA, 25 bp, Homo sapien
tctggatggttgtttcatggacatt

SEQ ID NO: 4593293 - DNA, 25 bp, Homo sapien
cattctggatggttgtttcatggac

SEQ ID NO: 4593294 - DNA, 25 bp, Homo sapien
caacatatatcattattgaagttca

SEQ ID NO: 4593295 - DNA, 25 bp, Homo sapien
cacatgaacagttaagctcacatga

SEQ ID NO: 4593296 - DNA, 25 bp, Homo sapien
ataaatatcactggcccataaatac

SEQ ID NO: 4593297 - DNA, 25 bp, Homo sapien
caagcacatgaacagttaagctcac

SEQ ID NO: 4593298 - DNA, 25 bp, Homo sapien
tattccattctgtcttgatgtctct

SEQ ID NO: 4593299 - DNA, 25 bp, Homo sapien
atattccattctgtcttgatgtctc

SEQ ID NO: 4593300 - DNA, 25 bp, Homo sapien
attccattctgtcttgatgtctctc

SEQ ID NO: 4593301 - DNA, 25 bp, Homo sapien
catattccattctgtcttgatgtct

SEQ ID NO: 4593302 - DNA, 25 bp, Homo sapien
gcctggggcagtatccaaacatcct

SEQ ID NO: 4593303 - DNA, 25 bp, Homo sapien
tgtggccagggttcgttcagctgtt

SEQ ID NO: 4593304 - DNA, 25 bp, Homo sapien
ttcagctgttcctcgaagggtctcc

SEQ ID NO: 4593305 - DNA, 25 bp, Homo sapien
cagggatgttcggtcattcttttca

SEQ ID NO: 4593306 - DNA, 25 bp, Homo sapien
gtcagaggaggtaagaagactgtga

SEQ ID NO: 4593307 - DNA, 25 bp, Homo sapien
ggtcagaggaggtaagaagactgtg

SEQ ID NO: 4593308 - DNA, 25 bp, Homo sapien
gggaagagtctcacaatcttgagga

SEQ ID NO: 4593309 - DNA, 25 bp, Homo sapien
tacctctcacccgaaaataagacag

SEQ ID NO: 4593310 - DNA, 25 bp, Homo sapien
cagaactcaatctcccgctttaaga

SEQ ID NO: 4593311 - DNA, 25 bp, Homo sapien
cgtattatggtagatgtgagcaaca

SEQ ID NO: 4593312 - DNA, 25 bp, Homo sapien
ccttctggctggcctaaaaggatca

SEQ ID NO: 4593313 - DNA, 25 bp, Homo sapien
ttctggctggcctaaaaggatcaca

SEQ ID NO: 4593314 - DNA, 25 bp, Homo sapien
tcccttccttctggctggcctaaaa

SEQ ID NO: 4593315 - DNA, 25 bp, Homo sapien
ctggctggcctaaaaggatcacaac

SEQ ID NO: 4593316 - DNA, 25 bp, Homo sapien
cgaagctcgtggtctgaatacaggc

SEQ ID NO: 4593317 - DNA, 25 bp, Homo sapien
ttttcatccagagcacgaagctcgt

SEQ ID NO: 4593318 - DNA, 25 bp, Homo sapien
ttgaactgtagaaatttctgctccc

SEQ ID NO: 4593319 - DNA, 25 bp, Homo sapien
aatcttgcgccagcaatatatcctg

SEQ ID NO: 4593320 - DNA, 25 bp, Homo sapien
gacaaaaacatctcggattctgagg

SEQ ID NO: 4593321 - DNA, 25 bp, Homo sapien
tatttggttactgactgatcccctc

SEQ ID NO: 4593322 - DNA, 25 bp, Homo sapien
aaatatttgtcaagcgagcgagtaa

SEQ ID NO: 4593323 - DNA, 25 bp, Homo sapien
taacaacacttatcagggtctgcat

SEQ ID NO: 4593324 - DNA, 25 bp, Homo sapien
cagccactacactgtttttgcccat

SEQ ID NO: 4593325 - DNA, 25 bp, Homo sapien
cacagccactacactgtttttgccc

SEQ ID NO: 4593326 - DNA, 25 bp, Homo sapien
tcacagccactacactgtttttgcc

SEQ ID NO: 4593327 - DNA, 25 bp, Homo sapien
acagccactacactgtttttgccca

SEQ ID NO: 4593328 - DNA, 25 bp, Homo sapien
ggtcaacggcttggagactacaggt

SEQ ID NO: 4593329 - DNA, 25 bp, Homo sapien
tcttcctgcaatggggtcaacggct

SEQ ID NO: 4593330 - DNA, 25 bp, Homo sapien
aacggcttggagactacaggtggcc

SEQ ID NO: 4593331 - DNA, 25 bp, Homo sapien
caatggggtcaacggcttggagact

SEQ ID NO: 4593332 - DNA, 25 bp, Homo sapien
gatccgttgcttgagggtgcggctg

SEQ ID NO: 4593333 - DNA, 25 bp, Homo sapien
aacaagcgccatggggatccgttgc

SEQ ID NO: 4593334 - DNA, 25 bp, Homo sapien
ctgcaggcacaacgcgcccaacaag

SEQ ID NO: 4593335 - DNA, 25 bp, Homo sapien
caggctgcgagagcttagactgccg

SEQ ID NO: 4593336 - DNA, 25 bp, Homo sapien
acaccccaatcccacacaacggctg

SEQ ID NO: 4593337 - DNA, 25 bp, Homo sapien
cttccagtctgccatgcacggactg

SEQ ID NO: 4593338 - DNA, 25 bp, Homo sapien
acggactgatcatgggcggcctgga

SEQ ID NO: 4593339 - DNA, 25 bp, Homo sapien
ctgccgccccaggaaggctcggaag

SEQ ID NO: 4593340 - DNA, 25 bp, Homo sapien
tcctttcagcatagacgcgacgttt

SEQ ID NO: 4593341 - DNA, 25 bp, Homo sapien
ggctatcacctgacaccgagatgta

SEQ ID NO: 4593342 - DNA, 25 bp, Homo sapien
taagcctgtttaccactagagtccc

SEQ ID NO: 4593343 - DNA, 25 bp, Homo sapien
cgagatgtacggtcactgccaaaat

SEQ ID NO: 4593344 - DNA, 25 bp, Homo sapien
aaacctcaatctcacaacccacgtg

SEQ ID NO: 4593345 - DNA, 25 bp, Homo sapien
atctcacaacccacgtgcagcttcc

SEQ ID NO: 4593346 - DNA, 25 bp, Homo sapien
tcaatctcacaacccacgtgcagct

SEQ ID NO: 4593347 - DNA, 25 bp, Homo sapien
aataaaacctcaatctcacaaccca

SEQ ID NO: 4593348 - DNA, 25 bp, Homo sapien
ccctccattggggtcaagaagctga

SEQ ID NO: 4593349 - DNA, 25 bp, Homo sapien
ccattggggtcaagaagctgaaggt

SEQ ID NO: 4593350 - DNA, 25 bp, Homo sapien
gtggccatgagagcccctccattgg

SEQ ID NO: 4593351 - DNA, 25 bp, Homo sapien
gcagctttgtgggtgttgagaggtg

SEQ ID NO: 4593352 - DNA, 25 bp, Homo sapien
tgtgatttctcgaaggaccagcacc

SEQ ID NO: 4593353 - DNA, 25 bp, Homo sapien
ttgtgatttctcgaaggaccagcac

SEQ ID NO: 4593354 - DNA, 25 bp, Homo sapien
gatttctcgaaggaccagcacctca

SEQ ID NO: 4593355 - DNA, 25 bp, Homo sapien
tctcgaaggaccagcacctcaggag

SEQ ID NO: 4593356 - DNA, 25 bp, Homo sapien
taatatgtcccacatgtcattctga

SEQ ID NO: 4593357 - DNA, 25 bp, Homo sapien
gataatatgtcccacatgtcattct

SEQ ID NO: 4593358 - DNA, 25 bp, Homo sapien
agataatatgtcccacatgtcattc

SEQ ID NO: 4593359 - DNA, 25 bp, Homo sapien
atatgtcccacatgtcattctgaga

SEQ ID NO: 4593360 - DNA, 25 bp, Homo sapien
gaaatcagcagactcaaatcacggg

SEQ ID NO: 4593361 - DNA, 25 bp, Homo sapien
gagagcagcatctaattctttgtga

SEQ ID NO: 4593362 - DNA, 25 bp, Homo sapien
ggtcactaagaaatcccggcatttc

SEQ ID NO: 4593363 - DNA, 25 bp, Homo sapien
gaggagagagatcactgacttcagg

SEQ ID NO: 4593364 - DNA, 25 bp, Homo sapien
taagacaggccttatccctcggagc

SEQ ID NO: 4593365 - DNA, 25 bp, Homo sapien
tagtaatggttgtgtcgcatcccgc

SEQ ID NO: 4593366 - DNA, 25 bp, Homo sapien
tgaggttgctgggtacacttaatcc

SEQ ID NO: 4593367 - DNA, 25 bp, Homo sapien
gagacacttgctgggtgaaccgcct

SEQ ID NO: 4593368 - DNA, 25 bp, Homo sapien
actttcagaagattacttactttct

SEQ ID NO: 4593369 - DNA, 25 bp, Homo sapien
gactttcagaagattacttactttc

SEQ ID NO: 4593370 - DNA, 25 bp, Homo sapien
tgcatgttcccactggctatcttct

SEQ ID NO: 4593371 - DNA, 25 bp, Homo sapien
tgttcccactggctatcttctcatg

SEQ ID NO: 4593372 - DNA, 25 bp, Homo sapien
gagcaccacaaaccgtgtccggcat

SEQ ID NO: 4593373 - DNA, 25 bp, Homo sapien
tcttctcatgagcaccacaaaccgt

SEQ ID NO: 4593374 - DNA, 25 bp, Homo sapien
cctcttcgtggctccccagtcttgg

SEQ ID NO: 4593375 - DNA, 25 bp, Homo sapien
ttggctgggcaccatcttcccccac

SEQ ID NO: 4593376 - DNA, 25 bp, Homo sapien
ccagtcttggctgggcaccatcttc

SEQ ID NO: 4593377 - DNA, 25 bp, Homo sapien
aactggcctcttcgtggctccccag

SEQ ID NO: 4593378 - DNA, 25 bp, Homo sapien
tggtcgcccgtgtacaactgctcac

SEQ ID NO: 4593379 - DNA, 25 bp, Homo sapien
tccttcccttggtcgcccgtgtaca

SEQ ID NO: 4593380 - DNA, 25 bp, Homo sapien
ccttggtcgcccgtgtacaactgct

SEQ ID NO: 4593381 - DNA, 25 bp, Homo sapien
aactgctcactctctatatcatgcc

SEQ ID NO: 4593382 - DNA, 25 bp, Homo sapien
cactctgggaagttaatgactacac

SEQ ID NO: 4593383 - DNA, 25 bp, Homo sapien
gatcggcattcagagacattaccag

SEQ ID NO: 4593384 - DNA, 25 bp, Homo sapien
gagaaacagtacttggagaccagat

SEQ ID NO: 4593385 - DNA, 25 bp, Homo sapien
gagttaatgtgtgctactgccaggc

SEQ ID NO: 4593386 - DNA, 25 bp, Homo sapien
ggtgcaaaagcctagccttgaaatg

SEQ ID NO: 4593387 - DNA, 25 bp, Homo sapien
tagaaggtagggtcactgtaggcca

SEQ ID NO: 4593388 - DNA, 25 bp, Homo sapien
gacaaccagggatagcacctagacc

SEQ ID NO: 4593389 - DNA, 25 bp, Homo sapien
caaccatgatacgatgtgggagggc

SEQ ID NO: 4593390 - DNA, 25 bp, Homo sapien
ctaatatcaaattaaccccactgct

SEQ ID NO: 4593391 - DNA, 25 bp, Homo sapien
tcctccaatggcaaatctgtgcttt

SEQ ID NO: 4593392 - DNA, 25 bp, Homo sapien
ttcctccaatggcaaatctgtgctt

SEQ ID NO: 4593393 - DNA, 25 bp, Homo sapien
atatcaaattaaccccactgctctg

SEQ ID NO: 4593394 - DNA, 25 bp, Homo sapien
gcaggttagaggtgttctggtctcc

SEQ ID NO: 4593395 - DNA, 25 bp, Homo sapien
agtttgcacatccacaggcgacgag

SEQ ID NO: 4593396 - DNA, 25 bp, Homo sapien
caatgttgcaactgctgccttgctg

SEQ ID NO: 4593397 - DNA, 25 bp, Homo sapien
cctcagccttaggtatgcataggtg

SEQ ID NO: 4593398 - DNA, 25 bp, Homo sapien
actgtgacactaaagaggcgggaga

SEQ ID NO: 4593399 - DNA, 25 bp, Homo sapien
cacacaggccaagagatttacagag

SEQ ID NO: 4593400 - DNA, 25 bp, Homo sapien
cggcaagcttatgtcaggtggtcac

SEQ ID NO: 4593401 - DNA, 25 bp, Homo sapien
cactaggaaatgaagaggtacaacc

SEQ ID NO: 4593402 - DNA, 25 bp, Homo sapien
gagaaccgtttatgctgattaccaa

SEQ ID NO: 4593403 - DNA, 25 bp, Homo sapien
tgcttctctgcaagggctccaaatg

SEQ ID NO: 4593404 - DNA, 25 bp, Homo sapien
gcttggcactgatagctgacatgtc

SEQ ID NO: 4593405 - DNA, 25 bp, Homo sapien
tgtaaacaaaattgccctgtggaac

SEQ ID NO: 4593406 - DNA, 25 bp, Homo sapien
gaagaatctggatctgaaagtctgt

SEQ ID NO: 4593407 - DNA, 25 bp, Homo sapien
aaagtctgtccctgcttttcttata

SEQ ID NO: 4593408 - DNA, 25 bp, Homo sapien
aagtctgtccctgcttttcttataa

SEQ ID NO: 4593409 - DNA, 25 bp, Homo sapien
gaaagtctgtccctgcttttcttat

SEQ ID NO: 4593410 - DNA, 25 bp, Homo sapien
gacatggctgattacctagaacagg

SEQ ID NO: 4593411 - DNA, 25 bp, Homo sapien
tatccagtgccctatgagcgtactc

SEQ ID NO: 4593412 - DNA, 25 bp, Homo sapien
gagcagtctaaaccaatcacgatag

SEQ ID NO: 4593413 - DNA, 25 bp, Homo sapien
gaatccttggccaaaactagtctgc

SEQ ID NO: 4593414 - DNA, 25 bp, Homo sapien
aatcagctatgtccaatattgggag

SEQ ID NO: 4593415 - DNA, 25 bp, Homo sapien
caacaaagaggaccaagaagcaaca

SEQ ID NO: 4593416 - DNA, 25 bp, Homo sapien
tagaggtgaccactgtattggcaac

SEQ ID NO: 4593417 - DNA, 25 bp, Homo sapien
gaagcaacaatcattaaggcaggaa

SEQ ID NO: 4593418 - DNA, 25 bp, Homo sapien
gattgctcagcgatcttgagtgccc

SEQ ID NO: 4593419 - DNA, 25 bp, Homo sapien
cagcaaaggctagtggtccaccaaa

SEQ ID NO: 4593420 - DNA, 25 bp, Homo sapien
tgttagatcatgcaacctaggctga

SEQ ID NO: 4593421 - DNA, 25 bp, Homo sapien
cctaggctgaataacgaaagacgag

SEQ ID NO: 4593422 - DNA, 25 bp, Homo sapien
cccagtgtatgctgcagctgtattt

SEQ ID NO: 4593423 - DNA, 25 bp, Homo sapien
tatgctgcagctgtatttgcttatt

SEQ ID NO: 4593424 - DNA, 25 bp, Homo sapien
cagtgtatgctgcagctgtatttgc

SEQ ID NO: 4593425 - DNA, 25 bp, Homo sapien
tgtatgctgcagctgtatttgctta

SEQ ID NO: 4593426 - DNA, 25 bp, Homo sapien
ttggtcatacaacacattcccattg

SEQ ID NO: 4593427 - DNA, 25 bp, Homo sapien
cctttgtatatgctgggcctctcct

SEQ ID NO: 4593428 - DNA, 25 bp, Homo sapien
cttcaactcttggtcatacaacaca

SEQ ID NO: 4593429 - DNA, 25 bp, Homo sapien
tttgtatatgctgggcctctccttg

SEQ ID NO: 4593430 - DNA, 25 bp, Homo sapien
catccatggcctctcatctctttca

SEQ ID NO: 4593431 - DNA, 25 bp, Homo sapien
catggcctctcatctctttcacagt

SEQ ID NO: 4593432 - DNA, 25 bp, Homo sapien
tccatggcctctcatctctttcaca

SEQ ID NO: 4593433 - DNA, 25 bp, Homo sapien
gcatccatggcctctcatctctttc

SEQ ID NO: 4593434 - DNA, 25 bp, Homo sapien
aggaacataaagcagtcatccaacc

SEQ ID NO: 4593435 - DNA, 25 bp, Homo sapien
acccaagtacttgaaagcattgagt

SEQ ID NO: 4593436 - DNA, 25 bp, Homo sapien
cttgaaagcattgagtatgatagga

SEQ ID NO: 4593437 - DNA, 25 bp, Homo sapien
cataaagcagtcatccaaccacata

SEQ ID NO: 4593438 - DNA, 25 bp, Homo sapien
ccataatgccgaagaagtgacatga

SEQ ID NO: 4593439 - DNA, 25 bp, Homo sapien
ttcccacagggaaaacgcaagagga

SEQ ID NO: 4593440 - DNA, 25 bp, Homo sapien
aaattccattaggttgagccaccct

SEQ ID NO: 4593441 - DNA, 25 bp, Homo sapien
catctgaggtatagcaggctggaac

SEQ ID NO: 4593442 - DNA, 25 bp, Homo sapien
tgtcgcatatggaagttgacaacat

SEQ ID NO: 4593443 - DNA, 25 bp, Homo sapien
gtgcagcagtgtcgcatatggaagt

SEQ ID NO: 4593444 - DNA, 25 bp, Homo sapien
agttgacaacatactcagcattagt

SEQ ID NO: 4593445 - DNA, 25 bp, Homo sapien
gaagttgacaacatactcagcatta

SEQ ID NO: 4593446 - DNA, 25 bp, Homo sapien
tctgcacagaaatagcgaaaggctc

SEQ ID NO: 4593447 - DNA, 25 bp, Homo sapien
tagcgaaaggctcaaaagggtgaaa

SEQ ID NO: 4593448 - DNA, 25 bp, Homo sapien
ttgagcaggcccgagtcccgggcat

SEQ ID NO: 4593449 - DNA, 25 bp, Homo sapien
tgaaggcaacaaggcgtcgcactgt

SEQ ID NO: 4593450 - DNA, 25 bp, Homo sapien
tcttgggccgctccatgacagatac

SEQ ID NO: 4593451 - DNA, 25 bp, Homo sapien
gctaccgctgtaagactgagcactg

SEQ ID NO: 4593452 - DNA, 25 bp, Homo sapien
tgggtgatctccacaagtcttgggc

SEQ ID NO: 4593453 - DNA, 25 bp, Homo sapien
cacttgtcatcataactgaagagag

SEQ ID NO: 4593454 - DNA, 25 bp, Homo sapien
gaccatcctccattaatcaattggg

SEQ ID NO: 4593455 - DNA, 25 bp, Homo sapien
tgcaagctgttcaatccagaaacat

SEQ ID NO: 4593456 - DNA, 25 bp, Homo sapien
tctttcatggcccatagaccatcct

SEQ ID NO: 4593457 - DNA, 25 bp, Homo sapien
tttacagtttaatggcaactctctc

SEQ ID NO: 4593458 - DNA, 25 bp, Homo sapien
aagccgaggctgaactgtactgccg

SEQ ID NO: 4593459 - DNA, 25 bp, Homo sapien
ccaagccgaggctgaactgtactgc

SEQ ID NO: 4593460 - DNA, 25 bp, Homo sapien
ctgaaatgactcatgatccttggtg

SEQ ID NO: 4593461 - DNA, 25 bp, Homo sapien
gactcatgatccttggtgaccattt

SEQ ID NO: 4593462 - DNA, 25 bp, Homo sapien
tcatgaacttgagaccagagcccat

SEQ ID NO: 4593463 - DNA, 25 bp, Homo sapien
ctgcctggagagtacaagcctggat

SEQ ID NO: 4593464 - DNA, 25 bp, Homo sapien
agaagctctggctcataggagggcc

SEQ ID NO: 4593465 - DNA, 25 bp, Homo sapien
agagatatgtttttcccagtggcag

SEQ ID NO: 4593466 - DNA, 25 bp, Homo sapien
aagctgagcagggaaactgaacttc

SEQ ID NO: 4593467 - DNA, 25 bp, Homo sapien
tcactgtgcagggtagcattacgaa

SEQ ID NO: 4593468 - DNA, 25 bp, Homo sapien
caaaattgttgctagaagctgagca

SEQ ID NO: 4593469 - DNA, 25 bp, Homo sapien
gcaatcacctctgtcgtcaccatat

SEQ ID NO: 4593470 - DNA, 25 bp, Homo sapien
tgaatttccaaactagtgtctaagg

SEQ ID NO: 4593471 - DNA, 25 bp, Homo sapien
tgatttgctggttgttctgaatttc

SEQ ID NO: 4593472 - DNA, 25 bp, Homo sapien
aactcagttgacttcgtggtttact

SEQ ID NO: 4593473 - DNA, 25 bp, Homo sapien
gaatttccaaactagtgtctaagga

SEQ ID NO: 4593474 - DNA, 25 bp, Homo sapien
tgttgcacagacaagatggccagga

SEQ ID NO: 4593475 - DNA, 25 bp, Homo sapien
tcctcatagcaaaagcggccaatgg

SEQ ID NO: 4593476 - DNA, 25 bp, Homo sapien
gaagagactacactcccggttcagg

SEQ ID NO: 4593477 - DNA, 25 bp, Homo sapien
cataagcggccggtgtgaaggtcaa

SEQ ID NO: 4593478 - DNA, 25 bp, Homo sapien
cagccctggtactcatagatttcaa

SEQ ID NO: 4593479 - DNA, 25 bp, Homo sapien
attgccattggacaggatttctcct

SEQ ID NO: 4593480 - DNA, 25 bp, Homo sapien
ccctggtactcatagatttcaagag

SEQ ID NO: 4593481 - DNA, 25 bp, Homo sapien
cattgccattggacaggatttctcc

SEQ ID NO: 4593482 - DNA, 25 bp, Homo sapien
caggtgagaatttacgcaagaaaca

SEQ ID NO: 4593483 - DNA, 25 bp, Homo sapien
cattctgatggaacactcggacttg

SEQ ID NO: 4593484 - DNA, 25 bp, Homo sapien
taaagtagcgtccatcaggtgagaa

SEQ ID NO: 4593485 - DNA, 25 bp, Homo sapien
caaggaggcttttcaacgttgacaa

SEQ ID NO: 4593486 - DNA, 25 bp, Homo sapien
ttgcctgaactgatccgccggcgtt

SEQ ID NO: 4593487 - DNA, 25 bp, Homo sapien
ggttttggattcttcgaggcttgat

SEQ ID NO: 4593488 - DNA, 25 bp, Homo sapien
ccggcgttccaagcggtgaatgaca

SEQ ID NO: 4593489 - DNA, 25 bp, Homo sapien
cgaggcttgatggtagaaacatgat

SEQ ID NO: 4593490 - DNA, 25 bp, Homo sapien
agagcagggaactggtctaattcct

SEQ ID NO: 4593491 - DNA, 25 bp, Homo sapien
gagcagggaactggtctaattcctt

SEQ ID NO: 4593492 - DNA, 25 bp, Homo sapien
tggtctaattccttgctgtattccc

SEQ ID NO: 4593493 - DNA, 25 bp, Homo sapien
ccagcctgttctgtgcgcgcctccc

SEQ ID NO: 4593494 - DNA, 25 bp, Homo sapien
gcggctgcacgttcccgtttccgcc

SEQ ID NO: 4593495 - DNA, 25 bp, Homo sapien
gtctggtccgggctcaaagagccag

SEQ ID NO: 4593496 - DNA, 25 bp, Homo sapien
aagagccagggcgagggatgcccca

SEQ ID NO: 4593497 - DNA, 25 bp, Homo sapien
gcccggaggaaggatcgaagccgta

SEQ ID NO: 4593498 - DNA, 25 bp, Homo sapien
ggaaggatcgaagccgtagaggctc

SEQ ID NO: 4593499 - DNA, 25 bp, Homo sapien
ccttgtgcccggaggaaggatcgaa

SEQ ID NO: 4593500 - DNA, 25 bp, Homo sapien
aggatcgaagccgtagaggctccat

SEQ ID NO: 4593501 - DNA, 25 bp, Homo sapien
ccgttactgttcttgttatctgtca

SEQ ID NO: 4593502 - DNA, 25 bp, Homo sapien
tcagtttaaggcagggtcccatgta

SEQ ID NO: 4593503 - DNA, 25 bp, Homo sapien
tcttgttatctgtcagtttaaggca

SEQ ID NO: 4593504 - DNA, 25 bp, Homo sapien
cttccgttactgttcttgttatctg

SEQ ID NO: 4593505 - DNA, 25 bp, Homo sapien
ttcccctgccagtctataagtggca

SEQ ID NO: 4593506 - DNA, 25 bp, Homo sapien
agtaagggcaatcacccgggcagct

SEQ ID NO: 4593507 - DNA, 25 bp, Homo sapien
gccagtggggtgactttccagagtc

SEQ ID NO: 4593508 - DNA, 25 bp, Homo sapien
gtgccattcagtgtgaccacagtaa

SEQ ID NO: 4593509 - DNA, 25 bp, Homo sapien
ctcaggagacactgggttggaattc

SEQ ID NO: 4593510 - DNA, 25 bp, Homo sapien
ggagacactgggttggaattcccat

SEQ ID NO: 4593511 - DNA, 25 bp, Homo sapien
ctgtgggctcaggagacactgggtt

SEQ ID NO: 4593512 - DNA, 25 bp, Homo sapien
tcaggagacactgggttggaattcc

SEQ ID NO: 4593513 - DNA, 25 bp, Homo sapien
tgaaatcctagccaaggctgctggg

SEQ ID NO: 4593514 - DNA, 25 bp, Homo sapien
tgtcccaggaatgtcaagagctcgt

SEQ ID NO: 4593515 - DNA, 25 bp, Homo sapien
ggcctcctgcagtcaaaaactcatg

SEQ ID NO: 4593516 - DNA, 25 bp, Homo sapien
tgttcacggtgaaaccaggaccttc

SEQ ID NO: 4593517 - DNA, 25 bp, Homo sapien
gattaaactcccactgtcctatgaa

SEQ ID NO: 4593518 - DNA, 25 bp, Homo sapien
tatttggctaatggcgatgacagta

SEQ ID NO: 4593519 - DNA, 25 bp, Homo sapien
gtggcttctggcacggcacctaaag

SEQ ID NO: 4593520 - DNA, 25 bp, Homo sapien
taaggtcggctgagctgccaatctg

SEQ ID NO: 4593521 - DNA, 25 bp, Homo sapien
taggaggaaatatcctgctgcctgt

SEQ ID NO: 4593522 - DNA, 25 bp, Homo sapien
aggaaatatcctgctgcctgtgttg

SEQ ID NO: 4593523 - DNA, 25 bp, Homo sapien
gactaggaggaaatatcctgctgcc

SEQ ID NO: 4593524 - DNA, 25 bp, Homo sapien
agtctgactaggaggaaatatcctg

SEQ ID NO: 4593525 - DNA, 25 bp, Homo sapien
tgtgtcctgtctggttcgttggtca

SEQ ID NO: 4593526 - DNA, 25 bp, Homo sapien
ccctagatgcgcactggatcagtag

SEQ ID NO: 4593527 - DNA, 25 bp, Homo sapien
ttcgttggtcaccagtttgcgcccc

SEQ ID NO: 4593528 - DNA, 25 bp, Homo sapien
tttgcgccccctagatgcgcactgg

SEQ ID NO: 4593529 - DNA, 25 bp, Homo sapien
gacatttgatgtgaagcgcggctcc

SEQ ID NO: 4593530 - DNA, 25 bp, Homo sapien
taatgacggactctaccccagcgga

SEQ ID NO: 4593531 - DNA, 25 bp, Homo sapien
aactggattcagcactaatgacgga

SEQ ID NO: 4593532 - DNA, 25 bp, Homo sapien
ttctggtccgggcacaactggattc

SEQ ID NO: 4593533 - DNA, 25 bp, Homo sapien
gccaactggagctgatattcgggaa

SEQ ID NO: 4593534 - DNA, 25 bp, Homo sapien
tgccaggtaaaaatcccagccgagg

SEQ ID NO: 4593535 - DNA, 25 bp, Homo sapien
aaacggagagcaagtggtcttcctc

SEQ ID NO: 4593536 - DNA, 25 bp, Homo sapien
tagccgcggcgacccatgccaggta

SEQ ID NO: 4593537 - DNA, 25 bp, Homo sapien
ccatgctctctgagccgccaggata

SEQ ID NO: 4593538 - DNA, 25 bp, Homo sapien
ccaggatattgtggcttttgctaat

SEQ ID NO: 4593539 - DNA, 25 bp, Homo sapien
aattaaggagcggatgtgtcctgcc

SEQ ID NO: 4593540 - DNA, 25 bp, Homo sapien
tgtgtcctgccagcgcaattagagg

SEQ ID NO: 4593541 - DNA, 25 bp, Homo sapien
ccaccactctgacttcattctgaag

SEQ ID NO: 4593542 - DNA, 25 bp, Homo sapien
taaccacaggaagaattttcaccat

SEQ ID NO: 4593543 - DNA, 25 bp, Homo sapien
cttccagggctcagtaaccacagga

SEQ ID NO: 4593544 - DNA, 25 bp, Homo sapien
cttcattctgaagcttccagggctc

SEQ ID NO: 4593545 - DNA, 25 bp, Homo sapien
gccttaactgcatcaaccgggttta

SEQ ID NO: 4593546 - DNA, 25 bp, Homo sapien
aaattacagcgtaagtcacagcgcc

SEQ ID NO: 4593547 - DNA, 25 bp, Homo sapien
tttaggtaactccactttagcggca

SEQ ID NO: 4593548 - DNA, 25 bp, Homo sapien
aaacctcggcgatacaagggtcacg

SEQ ID NO: 4593549 - DNA, 25 bp, Homo sapien
accagcggttcatggcccggaaggc

SEQ ID NO: 4593550 - DNA, 25 bp, Homo sapien
tgcttcggaagaggcacaagagaag

SEQ ID NO: 4593551 - DNA, 25 bp, Homo sapien
acaagagaaggagccgacagcacca

SEQ ID NO: 4593552 - DNA, 25 bp, Homo sapien
atgccaaggatgtgcttcggaagag

SEQ ID NO: 4593553 - DNA, 25 bp, Homo sapien
cccagcaagtgtgtggctatcgact

SEQ ID NO: 4593554 - DNA, 25 bp, Homo sapien
gggctgctgagcatgcctccagaac

SEQ ID NO: 4593555 - DNA, 25 bp, Homo sapien
tctatgacaagtacatcaggcctga

SEQ ID NO: 4593556 - DNA, 25 bp, Homo sapien
agctggcccgctgttccattgtgag

SEQ ID NO: 4593557 - DNA, 25 bp, Homo sapien
cattgtaggaactccgtgcctggcc

SEQ ID NO: 4593558 - DNA, 25 bp, Homo sapien
tccctgctaggctacagtggaatag

SEQ ID NO: 4593559 - DNA, 25 bp, Homo sapien
ggtaagctttggacgagaactggca

SEQ ID NO: 4593560 - DNA, 25 bp, Homo sapien
tgacctggaactctggctacagcca

SEQ ID NO: 4593561 - DNA, 25 bp, Homo sapien
taacagcagggccactcgtctaggg

SEQ ID NO: 4593562 - DNA, 25 bp, Homo sapien
actcgtctagggcagtggagtctgc

SEQ ID NO: 4593563 - DNA, 25 bp, Homo sapien
gcagttacgcagtggccctgaacct

SEQ ID NO: 4593564 - DNA, 25 bp, Homo sapien
cctttgtgtaggattgtgcctgacc

SEQ ID NO: 4593565 - DNA, 25 bp, Homo sapien
gttgtaacttcttcaggataacacc

SEQ ID NO: 4593566 - DNA, 25 bp, Homo sapien
cacatggtgagccacagctactgtg

SEQ ID NO: 4593567 - DNA, 25 bp, Homo sapien
gcccagacagaactgctccggcttg

SEQ ID NO: 4593568 - DNA, 25 bp, Homo sapien
gggatagtggtacggcctacctcat

SEQ ID NO: 4593569 - DNA, 25 bp, Homo sapien
ttggcttccggtcagtgtcccgaca

SEQ ID NO: 4593570 - DNA, 25 bp, Homo sapien
acaggtttggcttccggtcagtgtc

SEQ ID NO: 4593571 - DNA, 25 bp, Homo sapien
gtttggcttccggtcagtgtcccga

SEQ ID NO: 4593572 - DNA, 25 bp, Homo sapien
caggtttggcttccggtcagtgtcc

SEQ ID NO: 4593573 - DNA, 25 bp, Homo sapien
cactgctgaaatcacactaccccac

SEQ ID NO: 4593574 - DNA, 25 bp, Homo sapien
aggggtcagggaggtacagacactg

SEQ ID NO: 4593575 - DNA, 25 bp, Homo sapien
acactgctgaaatcacactacccca

SEQ ID NO: 4593576 - DNA, 25 bp, Homo sapien
tctagattccttaaaagtcggtagc

SEQ ID NO: 4593577 - DNA, 25 bp, Homo sapien
tgaagccccacgttccacaaacttg

SEQ ID NO: 4593578 - DNA, 25 bp, Homo sapien
gggtcatagattgtccagtcactgg

SEQ ID NO: 4593579 - DNA, 25 bp, Homo sapien
aaaagtcggtagctgatgtcaaact

SEQ ID NO: 4593580 - DNA, 25 bp, Homo sapien
tcgaaggaagatggtgctgttatca

SEQ ID NO: 4593581 - DNA, 25 bp, Homo sapien
gaaggaagatggtgctgttatcagc

SEQ ID NO: 4593582 - DNA, 25 bp, Homo sapien
gggtcgaaggaagatggtgctgtta

SEQ ID NO: 4593583 - DNA, 25 bp, Homo sapien
aaggaagatggtgctgttatcagcg

SEQ ID NO: 4593584 - DNA, 25 bp, Homo sapien
tcctggatatgaactgctgaagcgg

SEQ ID NO: 4593585 - DNA, 25 bp, Homo sapien
tactgggataccagatgtcctggat

SEQ ID NO: 4593586 - DNA, 25 bp, Homo sapien
gcagcgcttgagctcactacagtaa

SEQ ID NO: 4593587 - DNA, 25 bp, Homo sapien
gtgtcacacacgttttaagcagata

SEQ ID NO: 4593588 - DNA, 25 bp, Homo sapien
tactgtcacctgatccaacaagatt

SEQ ID NO: 4593589 - DNA, 25 bp, Homo sapien
aacaagatttgtgggcgtagcctgc

SEQ ID NO: 4593590 - DNA, 25 bp, Homo sapien
cctgccgatgggtgacgccagttaa

SEQ ID NO: 4593591 - DNA, 25 bp, Homo sapien
cagttaaaggtagagcgtcggcacc

SEQ ID NO: 4593592 - DNA, 25 bp, Homo sapien
aagcaaatccgcctcagcctggagt

SEQ ID NO: 4593593 - DNA, 25 bp, Homo sapien
gattatagacactagccatcgccct

SEQ ID NO: 4593594 - DNA, 25 bp, Homo sapien
gtgtattggcactgtcatagcctca

SEQ ID NO: 4593595 - DNA, 25 bp, Homo sapien
cagagggtgctaattcctatgggaa

SEQ ID NO: 4593596 - DNA, 25 bp, Homo sapien
gcataaagtccccacacagtctgaa

SEQ ID NO: 4593597 - DNA, 25 bp, Homo sapien
tcagacctagtccttgggagatgca

SEQ ID NO: 4593598 - DNA, 25 bp, Homo sapien
taacatggtaggactcaaaggaccc

SEQ ID NO: 4593599 - DNA, 25 bp, Homo sapien
tgttctgactgagacccgaggaggt

SEQ ID NO: 4593600 - DNA, 25 bp, Homo sapien
tgtgaccccacttgtaagatttccc

SEQ ID NO: 4593601 - DNA, 25 bp, Homo sapien
gggcatctatctggatctggtccaa

SEQ ID NO: 4593602 - DNA, 25 bp, Homo sapien
tgggggccacaccatttgccgtggc

SEQ ID NO: 4593603 - DNA, 25 bp, Homo sapien
ttcccacactgctgttgggagaaag

SEQ ID NO: 4593604 - DNA, 25 bp, Homo sapien
tggcgtgaggccaagctggaccact

SEQ ID NO: 4593605 - DNA, 25 bp, Homo sapien
aatctacgacacgtccactgacagg

SEQ ID NO: 4593606 - DNA, 25 bp, Homo sapien
catgagcggctacacaatctacgac

SEQ ID NO: 4593607 - DNA, 25 bp, Homo sapien
gaagcacgacttccaggcactgaaa

SEQ ID NO: 4593608 - DNA, 25 bp, Homo sapien
agaaactggctatgggagtacatcc

SEQ ID NO: 4593609 - DNA, 25 bp, Homo sapien
tcctgccccgttgtgtaggataatc

SEQ ID NO: 4593610 - DNA, 25 bp, Homo sapien
gtaggataatcttcaaacagctggc

SEQ ID NO: 4593611 - DNA, 25 bp, Homo sapien
tatgggagtacatcctgccccgttg

SEQ ID NO: 4593612 - DNA, 25 bp, Homo sapien
agcccccctgtctgcttgcctacac

SEQ ID NO: 4593613 - DNA, 25 bp, Homo sapien
agccagccaattttgaggaaggacc

SEQ ID NO: 4593614 - DNA, 25 bp, Homo sapien
cagccaattttgaggaaggacccct

SEQ ID NO: 4593615 - DNA, 25 bp, Homo sapien
gggatgcctggccaggatgtagccc

SEQ ID NO: 4593616 - DNA, 25 bp, Homo sapien
gcccttggaggtccagaaaatccca

SEQ ID NO: 4593617 - DNA, 25 bp, Homo sapien
ctcaggatgcaggcatcctttgcca

SEQ ID NO: 4593618 - DNA, 25 bp, Homo sapien
caggatgcaggcatcctttgccaag

SEQ ID NO: 4593619 - DNA, 25 bp, Homo sapien
gccaagggcccttggaggtccagaa

SEQ ID NO: 4593620 - DNA, 25 bp, Homo sapien
tcgctgcggccgcttggtccccacg

SEQ ID NO: 4593621 - DNA, 25 bp, Homo sapien
cgcccgcggcggtgggcatcatcat

SEQ ID NO: 4593622 - DNA, 25 bp, Homo sapien
aggcgacgaggcctgcagaccggac

SEQ ID NO: 4593623 - DNA, 25 bp, Homo sapien
acccaggcgccttgccgcctcgctg

SEQ ID NO: 4593624 - DNA, 25 bp, Homo sapien
cctgagacagggagcgattgagcct

SEQ ID NO: 4593625 - DNA, 25 bp, Homo sapien
acagcacttccagccagagggttcg

SEQ ID NO: 4593626 - DNA, 25 bp, Homo sapien
gaactctctcgactctcactgtggg

SEQ ID NO: 4593627 - DNA, 25 bp, Homo sapien
tatgtgtatgccctggaggcctgca

SEQ ID NO: 4593628 - DNA, 25 bp, Homo sapien
gaagttccagggcaatcccaggacc

SEQ ID NO: 4593629 - DNA, 25 bp, Homo sapien
tctgcaatctgagtctgagcccgtt

SEQ ID NO: 4593630 - DNA, 25 bp, Homo sapien
gtcccagggagccacctaatgctgc

SEQ ID NO: 4593631 - DNA, 25 bp, Homo sapien
tggcttcttgtcaccagtcccaggg

SEQ ID NO: 4593632 - DNA, 25 bp, Homo sapien
tttcttcttgactcctggcagtgcc

SEQ ID NO: 4593633 - DNA, 25 bp, Homo sapien
ttcttcttgactcctggcagtgcca

SEQ ID NO: 4593634 - DNA, 25 bp, Homo sapien
tcttcttgactcctggcagtgccat

SEQ ID NO: 4593635 - DNA, 25 bp, Homo sapien
ctttcttcttgactcctggcagtgc

SEQ ID NO: 4593636 - DNA, 25 bp, Homo sapien
tagaaaccaccatttgggctctagg

SEQ ID NO: 4593637 - DNA, 25 bp, Homo sapien
gacgacctgcaagcttctctatggc

SEQ ID NO: 4593638 - DNA, 25 bp, Homo sapien
tacttggtgcagttccccaggaatc

SEQ ID NO: 4593639 - DNA, 25 bp, Homo sapien
tagaccacgtttgtttacacgaagc

SEQ ID NO: 4593640 - DNA, 25 bp, Homo sapien
actgtcctggctccaagtggggctg

SEQ ID NO: 4593641 - DNA, 25 bp, Homo sapien
cagaaaccagaacctgcgtctcctc

SEQ ID NO: 4593642 - DNA, 25 bp, Homo sapien
ggcaggccaggcctcggtccatctg

SEQ ID NO: 4593643 - DNA, 25 bp, Homo sapien
acagatgaccattcaccgacctggc

SEQ ID NO: 4593644 - DNA, 25 bp, Homo sapien
ggttatgtacaatactgagggaaac

SEQ ID NO: 4593645 - DNA, 25 bp, Homo sapien
gatcggatcagacaaggagcatcag

SEQ ID NO: 4593646 - DNA, 25 bp, Homo sapien
ccagcttgaagggatgcttactgat

SEQ ID NO: 4593647 - DNA, 25 bp, Homo sapien
gcaactatcacagtaaagatcggat

SEQ ID NO: 4593648 - DNA, 25 bp, Homo sapien
ttgtccaatagccgccctttcttca

SEQ ID NO: 4593649 - DNA, 25 bp, Homo sapien
tttgtccaatagccgccctttcttc

SEQ ID NO: 4593650 - DNA, 25 bp, Homo sapien
tgtccaatagccgccctttcttcat

SEQ ID NO: 4593651 - DNA, 25 bp, Homo sapien
caagcacagctgaccattgcagatc

SEQ ID NO: 4593652 - DNA, 25 bp, Homo sapien
gctctacaggtagcatgactgggaa

SEQ ID NO: 4593653 - DNA, 25 bp, Homo sapien
aatggagttagtgagactccctacc

SEQ ID NO: 4593654 - DNA, 25 bp, Homo sapien
attgcagatcaggagagagcgtgca

SEQ ID NO: 4593655 - DNA, 25 bp, Homo sapien
aggactccgcaacccagcagttgcc

SEQ ID NO: 4593656 - DNA, 25 bp, Homo sapien
agggtctccgggcacctttcagtgt

SEQ ID NO: 4593657 - DNA, 25 bp, Homo sapien
gccggcgtctgacgcgggtgccagg

SEQ ID NO: 4593658 - DNA, 25 bp, Homo sapien
agcagttgccgctgcggccacagcc

SEQ ID NO: 4593659 - DNA, 25 bp, Homo sapien
gactcagttctacctccagctgaaa

SEQ ID NO: 4593660 - DNA, 25 bp, Homo sapien
ggggaatcctaaatgtaccagaaga

SEQ ID NO: 4593661 - DNA, 25 bp, Homo sapien
ctcagccagttaaggtggctgaaca

SEQ ID NO: 4593662 - DNA, 25 bp, Homo sapien
ctgcctctggccctaccgaactctg

SEQ ID NO: 4593663 - DNA, 25 bp, Homo sapien
aacagattctttggaaccgagaggg

SEQ ID NO: 4593664 - DNA, 25 bp, Homo sapien
ctgggcaccaacctccttaagggag

SEQ ID NO: 4593665 - DNA, 25 bp, Homo sapien
gcctagaactggcttccagccctag

SEQ ID NO: 4593666 - DNA, 25 bp, Homo sapien
tcccggcggcattctagacaggcca

SEQ ID NO: 4593667 - DNA, 25 bp, Homo sapien
caggggagcaagcatgattcctgga

SEQ ID NO: 4593668 - DNA, 25 bp, Homo sapien
cccaggggagcaagcatgattcctg

SEQ ID NO: 4593669 - DNA, 25 bp, Homo sapien
aatggcccaggggagcaagcatgat

SEQ ID NO: 4593670 - DNA, 25 bp, Homo sapien
gggagcaagcatgattcctggagtg

SEQ ID NO: 4593671 - DNA, 25 bp, Homo sapien
cacaagggaaaacgaaccactcaat

SEQ ID NO: 4593672 - DNA, 25 bp, Homo sapien
cagtgagggaatgcggcaggggagg

SEQ ID NO: 4593673 - DNA, 25 bp, Homo sapien
cacagttaggatgcgggtgaaccac

SEQ ID NO: 4593674 - DNA, 25 bp, Homo sapien
taaacaccgtacaagcggctctgcg

SEQ ID NO: 4593675 - DNA, 25 bp, Homo sapien
gtgaaccacagggtagcggacgcta

SEQ ID NO: 4593676 - DNA, 25 bp, Homo sapien
caccttggcgatcgtggcatcatct

SEQ ID NO: 4593677 - DNA, 25 bp, Homo sapien
cgtagcttcgcacgccaggtgccag

SEQ ID NO: 4593678 - DNA, 25 bp, Homo sapien
gaagttgaactggtagcgcccgttg

SEQ ID NO: 4593679 - DNA, 25 bp, Homo sapien
aagagctgctcaaaggaggccacca

SEQ ID NO: 4593680 - DNA, 25 bp, Homo sapien
agcagaatacatcatagcggtgcag

SEQ ID NO: 4593681 - DNA, 25 bp, Homo sapien
ctcctgtccgttgccgcctctctcc

SEQ ID NO: 4593682 - DNA, 25 bp, Homo sapien
tcctgtccgttgccgcctctctcct

SEQ ID NO: 4593683 - DNA, 25 bp, Homo sapien
tgacagtcagcttgcagcctctacg

SEQ ID NO: 4593684 - DNA, 25 bp, Homo sapien
caaggaactttccacgtgtggcaga

SEQ ID NO: 4593685 - DNA, 25 bp, Homo sapien
caagaatgaggaatgcggcccctct

SEQ ID NO: 4593686 - DNA, 25 bp, Homo sapien
gccacaggccctgaaaagatatgtt

SEQ ID NO: 4593687 - DNA, 25 bp, Homo sapien
caacagtagcttccatgtgggttgt

SEQ ID NO: 4593688 - DNA, 25 bp, Homo sapien
gctctgtcgtttacaagctgtgtga

SEQ ID NO: 4593689 - DNA, 25 bp, Homo sapien
attctggcgtggcatcatcagctgg

SEQ ID NO: 4593690 - DNA, 25 bp, Homo sapien
cagtgggctgcctcattcgcttgtg

SEQ ID NO: 4593691 - DNA, 25 bp, Homo sapien
aacagggtctcctcgggtgtctcca

SEQ ID NO: 4593692 - DNA, 25 bp, Homo sapien
gatctccagcgagacgtcatgctct

SEQ ID NO: 4593693 - DNA, 25 bp, Homo sapien
tcaatgacctcacagcggtaacgcc

SEQ ID NO: 4593694 - DNA, 25 bp, Homo sapien
cactggccccttggtaggtgaacag

SEQ ID NO: 4593695 - DNA, 25 bp, Homo sapien
agccgttgtagaagggcagtccgta

SEQ ID NO: 4593696 - DNA, 25 bp, Homo sapien
cctaggttctggtcgttggcgctgt

SEQ ID NO: 4593697 - DNA, 25 bp, Homo sapien
cgctgttggagtagtagaagccgtt

SEQ ID NO: 4593698 - DNA, 25 bp, Homo sapien
ttgcctaggttctggtcgttggcgc

SEQ ID NO: 4593699 - DNA, 25 bp, Homo sapien
atgccagggtgacccgggccaggct

SEQ ID NO: 4593700 - DNA, 25 bp, Homo sapien
ctcctcatgccagggtgacccgggc

SEQ ID NO: 4593701 - DNA, 25 bp, Homo sapien
ccagggtgacccgggccaggctggg

SEQ ID NO: 4593702 - DNA, 25 bp, Homo sapien
ctcatgccagggtgacccgggccag

SEQ ID NO: 4593703 - DNA, 25 bp, Homo sapien
cttggcagtggatagttccccaaat

SEQ ID NO: 4593704 - DNA, 25 bp, Homo sapien
ccccaaatcttctggagtcctgtct

SEQ ID NO: 4593705 - DNA, 25 bp, Homo sapien
tccccaaatcttctggagtcctgtc

SEQ ID NO: 4593706 - DNA, 25 bp, Homo sapien
ggcagtggatagttccccaaatctt

SEQ ID NO: 4593707 - DNA, 25 bp, Homo sapien
actgcatcctgctgagtgacttcgg

SEQ ID NO: 4593708 - DNA, 25 bp, Homo sapien
atcctgctgagtgacttcgggcaag

SEQ ID NO: 4593709 - DNA, 25 bp, Homo sapien
acactgcatcctgctgagtgacttc

SEQ ID NO: 4593710 - DNA, 25 bp, Homo sapien
tgcatcctgctgagtgacttcgggc

SEQ ID NO: 4593711 - DNA, 25 bp, Homo sapien
tgggcacgagggtccggcgcccgca

SEQ ID NO: 4593712 - DNA, 25 bp, Homo sapien
gtgggcacgagggtccggcgcccgc

SEQ ID NO: 4593713 - DNA, 25 bp, Homo sapien
gggcacgagggtccggcgcccgcat

SEQ ID NO: 4593714 - DNA, 25 bp, Homo sapien
ggtccaaggcagcagtctgatttcg

SEQ ID NO: 4593715 - DNA, 25 bp, Homo sapien
tgtcccggtccaaggcagcagtctg

SEQ ID NO: 4593716 - DNA, 25 bp, Homo sapien
ccaggcagctcctcgacggctagag

SEQ ID NO: 4593717 - DNA, 25 bp, Homo sapien
ctcctcgacggctagagctctcggg

SEQ ID NO: 4593718 - DNA, 25 bp, Homo sapien
gaagaagataaatatattttggaag

SEQ ID NO: 4593719 - DNA, 25 bp, Homo sapien
gaagataaatatattttggaagctg

SEQ ID NO: 4593720 - DNA, 25 bp, Homo sapien
aagataaatatattttggaagctgc

SEQ ID NO: 4593721 - DNA, 25 bp, Homo sapien
cccgtgaagaagataaatatatttt

SEQ ID NO: 4593722 - DNA, 25 bp, Homo sapien
tcttgaggccaccatgggaatgtga

SEQ ID NO: 4593723 - DNA, 25 bp, Homo sapien
caagagaggcaaccagggagacaag

SEQ ID NO: 4593724 - DNA, 25 bp, Homo sapien
tgaaaagccagcatagagggcccca

SEQ ID NO: 4593725 - DNA, 25 bp, Homo sapien
cgacgggcaagaggctgttatctcc

SEQ ID NO: 4593726 - DNA, 25 bp, Homo sapien
ggggcagggcccgtgagaggtggag

SEQ ID NO: 4593727 - DNA, 25 bp, Homo sapien
gctggggcagggcccgtgagaggtg

SEQ ID NO: 4593728 - DNA, 25 bp, Homo sapien
ggaggggtgactgtgtggtggtgct

SEQ ID NO: 4593729 - DNA, 25 bp, Homo sapien
gcagggcccgtgagaggtggagggt

SEQ ID NO: 4593730 - DNA, 25 bp, Homo sapien
ccaagaggcagcgggcccatggaaa

SEQ ID NO: 4593731 - DNA, 25 bp, Homo sapien
ccccagccctatggtgatttaaagg

SEQ ID NO: 4593732 - DNA, 25 bp, Homo sapien
aggcagcgggcccatggaaagcagg

SEQ ID NO: 4593733 - DNA, 25 bp, Homo sapien
agcgggcccatggaaagcaggaaga

SEQ ID NO: 4593734 - DNA, 25 bp, Homo sapien
tacaggcaggatgcgcacatagcga

SEQ ID NO: 4593735 - DNA, 25 bp, Homo sapien
ggcgatgcggttgtgccaggctaca

SEQ ID NO: 4593736 - DNA, 25 bp, Homo sapien
tcttgtgggagtggttgtcccagtt

SEQ ID NO: 4593737 - DNA, 25 bp, Homo sapien
gatgggcgtctcaaacaagttcttc

SEQ ID NO: 4593738 - DNA, 25 bp, Homo sapien
gggtcctggtactcagtccagttcg

SEQ ID NO: 4593739 - DNA, 25 bp, Homo sapien
cctggggtcctggtactcagtccag

SEQ ID NO: 4593740 - DNA, 25 bp, Homo sapien
tggtactcagtccagttcgcactgt

SEQ ID NO: 4593741 - DNA, 25 bp, Homo sapien
ctcagtccagttcgcactgtcatta

SEQ ID NO: 4593742 - DNA, 25 bp, Homo sapien
cagagccaaagttacgggccccctg

SEQ ID NO: 4593743 - DNA, 25 bp, Homo sapien
ttacgggccccctgggtgatgatgc

SEQ ID NO: 4593744 - DNA, 25 bp, Homo sapien
aaccttgtaggatgccacaaactgg

SEQ ID NO: 4593745 - DNA, 25 bp, Homo sapien
cctgtcacctccttcgaggagccca

SEQ ID NO: 4593746 - DNA, 25 bp, Homo sapien
aacaagctccggttttccatggctc

SEQ ID NO: 4593747 - DNA, 25 bp, Homo sapien
ttgtcaatcctgtggcagcccatgg

SEQ ID NO: 4593748 - DNA, 25 bp, Homo sapien
aggtgtaaacccaactcactgccag

SEQ ID NO: 4593749 - DNA, 25 bp, Homo sapien
caggtgggtactaggcagatcatcg

SEQ ID NO: 4593750 - DNA, 25 bp, Homo sapien
caacccaggcgttgaagttgccctg

SEQ ID NO: 4593751 - DNA, 25 bp, Homo sapien
gcttgtccagccgtgcataggaggg

SEQ ID NO: 4593752 - DNA, 25 bp, Homo sapien
gaagagatgcaagccccaggtcttg

SEQ ID NO: 4593753 - DNA, 25 bp, Homo sapien
ctgcagccactgatcgttaccgtag

SEQ ID NO: 4593754 - DNA, 25 bp, Homo sapien
ggatgctgttattcttcaggcccag

SEQ ID NO: 4593755 - DNA, 25 bp, Homo sapien
ccgtgatctgcttgtcagggatgct

SEQ ID NO: 4593756 - DNA, 25 bp, Homo sapien
tgtcagggatgctgttattcttcag

SEQ ID NO: 4593757 - DNA, 25 bp, Homo sapien
ctggaggccgtgatctgcttgtcag

SEQ ID NO: 4593758 - DNA, 25 bp, Homo sapien
ccatccgtcccatggcacagtcact

SEQ ID NO: 4593759 - DNA, 25 bp, Homo sapien
tcccatccgtcccatggcacagtca

SEQ ID NO: 4593760 - DNA, 25 bp, Homo sapien
ctcccatccgtcccatggcacagtc

SEQ ID NO: 4593761 - DNA, 25 bp, Homo sapien
catccgtcccatggcacagtcacta

SEQ ID NO: 4593762 - DNA, 25 bp, Homo sapien
ttcagtgcttacttcagtcatttaa

SEQ ID NO: 4593763 - DNA, 25 bp, Homo sapien
tattcagtgcttacttcagtcattt

SEQ ID NO: 4593764 - DNA, 25 bp, Homo sapien
attcagtgcttacttcagtcattta

SEQ ID NO: 4593765 - DNA, 25 bp, Homo sapien
aacctgggcagctttgcagaggaca

SEQ ID NO: 4593766 - DNA, 25 bp, Homo sapien
cactcaagagtactgggagccagct

SEQ ID NO: 4593767 - DNA, 25 bp, Homo sapien
tgcctagtgacgacccagtgatgaa

SEQ ID NO: 4593768 - DNA, 25 bp, Homo sapien
catttgcctccagggtgtgttgaca

SEQ ID NO: 4593769 - DNA, 25 bp, Homo sapien
caccttctgaccgggttcaggcaat

SEQ ID NO: 4593770 - DNA, 25 bp, Homo sapien
agctcctaggtgatgacactgcggg

SEQ ID NO: 4593771 - DNA, 25 bp, Homo sapien
taggtgatgacactgcgggtccctg

SEQ ID NO: 4593772 - DNA, 25 bp, Homo sapien
tatgtttcagcaagtctaggctggg

SEQ ID NO: 4593773 - DNA, 25 bp, Homo sapien
ccaagtcatggtcatctcatcagcc

SEQ ID NO: 4593774 - DNA, 25 bp, Homo sapien
cttgcctgcagtgctctttttgcag

SEQ ID NO: 4593775 - DNA, 25 bp, Homo sapien
ggccttcccgacagagcagtccttg

SEQ ID NO: 4593776 - DNA, 25 bp, Homo sapien
attcaggcccccagtcaaaggcctt

SEQ ID NO: 4593777 - DNA, 25 bp, Homo sapien
ttagcgagccctacagttccactga

SEQ ID NO: 4593778 - DNA, 25 bp, Homo sapien
tccagccgactggaaggcctatagg

SEQ ID NO: 4593779 - DNA, 25 bp, Homo sapien
ttaatgtctgtcagcccaaacccgg

SEQ ID NO: 4593780 - DNA, 25 bp, Homo sapien
gccagcgggtaagataagaacctcc

SEQ ID NO: 4593781 - DNA, 25 bp, Homo sapien
cagctcacagcccagtagctcaaag

SEQ ID NO: 4593782 - DNA, 25 bp, Homo sapien
tagctcaaagcgcagagtgcaggcc

SEQ ID NO: 4593783 - DNA, 25 bp, Homo sapien
gcagctcgtggggtacaatctcacg

SEQ ID NO: 4593784 - DNA, 25 bp, Homo sapien
agtgcaggccgtgtggcagctcgtg

SEQ ID NO: 4593785 - DNA, 25 bp, Homo sapien
gacatgcaccgcgtttttgttccag

SEQ ID NO: 4593786 - DNA, 25 bp, Homo sapien
aggttgacatgcaccgcgtttttgt

SEQ ID NO: 4593787 - DNA, 25 bp, Homo sapien
tgcaccgcgtttttgttccagttac

SEQ ID NO: 4593788 - DNA, 25 bp, Homo sapien
agcctccacaggggtctcaaacagg

SEQ ID NO: 4593789 - DNA, 25 bp, Homo sapien
tattaacatcatggatgaaatcgaa

SEQ ID NO: 4593790 - DNA, 25 bp, Homo sapien
aaggctgtaggccaccttgaaggcc

SEQ ID NO: 4593791 - DNA, 25 bp, Homo sapien
ggtactcatgactggccaagcggct

SEQ ID NO: 4593792 - DNA, 25 bp, Homo sapien
gaattcgtgtccattaaggctgtag

SEQ ID NO: 4593793 - DNA, 25 bp, Homo sapien
cccaatgctgcaaacccaagaaggt

SEQ ID NO: 4593794 - DNA, 25 bp, Homo sapien
ccaagaaggtcacacgcacagacga

SEQ ID NO: 4593795 - DNA, 25 bp, Homo sapien
cattgaccatgcctgcgcggttcag

SEQ ID NO: 4593796 - DNA, 25 bp, Homo sapien
agctccgggacccaatgctgcaaac

SEQ ID NO: 4593797 - DNA, 25 bp, Homo sapien
tgagttggcaatgttcccattctcc

SEQ ID NO: 4593798 - DNA, 25 bp, Homo sapien
ctgtgagttggcaatgttcccattc

SEQ ID NO: 4593799 - DNA, 25 bp, Homo sapien
agttggcaatgttcccattctccag

SEQ ID NO: 4593800 - DNA, 25 bp, Homo sapien
tgtgagttggcaatgttcccattct

SEQ ID NO: 4593801 - DNA, 25 bp, Homo sapien
ccttaaggcacgtgcaggtgtacga

SEQ ID NO: 4593802 - DNA, 25 bp, Homo sapien
ttgggaaatctcctcgcataaacca

SEQ ID NO: 4593803 - DNA, 25 bp, Homo sapien
tcgcataaaccaccgttgtggcagg

SEQ ID NO: 4593804 - DNA, 25 bp, Homo sapien
tcgtctcacagtggttgcccgcgta

SEQ ID NO: 4593805 - DNA, 25 bp, Homo sapien
cctgagtccgcctagagccaaggaa

SEQ ID NO: 4593806 - DNA, 25 bp, Homo sapien
tcaaactcgcccattatctcttcct

SEQ ID NO: 4593807 - DNA, 25 bp, Homo sapien
gaagtagcagatgggtccagcccaa

SEQ ID NO: 4593808 - DNA, 25 bp, Homo sapien
caggtaagatgagcagatgatcagg

SEQ ID NO: 4593809 - DNA, 25 bp, Homo sapien
atgtgcagacatgccgctgagctct

SEQ ID NO: 4593810 - DNA, 25 bp, Homo sapien
gtttttcatcccgtagagcagtggc

SEQ ID NO: 4593811 - DNA, 25 bp, Homo sapien
gaaagtcagttccaattgcgggatg

SEQ ID NO: 4593812 - DNA, 25 bp, Homo sapien
gaaggctgaaaaggcccatgtgcag

SEQ ID NO: 4593813 - DNA, 25 bp, Homo sapien
tgtttcctccttctggaaaaggcca

SEQ ID NO: 4593814 - DNA, 25 bp, Homo sapien
cctccttctggaaaaggccacatca

SEQ ID NO: 4593815 - DNA, 25 bp, Homo sapien
taagataggtatggtgtttcctcct

SEQ ID NO: 4593816 - DNA, 25 bp, Homo sapien
ctgtgtgtaagataggtatggtgtt

SEQ ID NO: 4593817 - DNA, 25 bp, Homo sapien
gctctagccccgagggtcaggcaga

SEQ ID NO: 4593818 - DNA, 25 bp, Homo sapien
ccagctgtctttcatggtggccggg

SEQ ID NO: 4593819 - DNA, 25 bp, Homo sapien
ctagccccgagggtcaggcagatca

SEQ ID NO: 4593820 - DNA, 25 bp, Homo sapien
gcactctggaagctctagccccgag

SEQ ID NO: 4593821 - DNA, 25 bp, Homo sapien
gatggaggggccacctaaagagtcc

SEQ ID NO: 4593822 - DNA, 25 bp, Homo sapien
aatggcacggggcatccgcaagtcc

SEQ ID NO: 4593823 - DNA, 25 bp, Homo sapien
cagcgctccacggtgaatggcacgg

SEQ ID NO: 4593824 - DNA, 25 bp, Homo sapien
cacctaaagagtcctggccctgact

SEQ ID NO: 4593825 - DNA, 25 bp, Homo sapien
agcgcgccgcacagcgcggccagca

SEQ ID NO: 4593826 - DNA, 25 bp, Homo sapien
gcgcgccgcacagcgcggccagcag

SEQ ID NO: 4593827 - DNA, 25 bp, Homo sapien
gggacgcgggcgctggaatgggcac

SEQ ID NO: 4593828 - DNA, 25 bp, Homo sapien
acgcgggcgctggaatgggcacgct

SEQ ID NO: 4593829 - DNA, 25 bp, Homo sapien
gggctgctcagaccccgcggggttc

SEQ ID NO: 4593830 - DNA, 25 bp, Homo sapien
tgctcagaccccgcggggttctggc

SEQ ID NO: 4593831 - DNA, 25 bp, Homo sapien
attagctgggtgcatgtttgtagtc

SEQ ID NO: 4593832 - DNA, 25 bp, Homo sapien
tccaggagatggatgctgcagcaag

SEQ ID NO: 4593833 - DNA, 25 bp, Homo sapien
tagctgggtgcatgtttgtagtccc

SEQ ID NO: 4593834 - DNA, 25 bp, Homo sapien
gaatccaggagatggatgctgcagc

SEQ ID NO: 4593835 - DNA, 25 bp, Homo sapien
tccttctcagaaatagtactgctta

SEQ ID NO: 4593836 - DNA, 25 bp, Homo sapien
ttctcagaaatagtactgcttaacc

SEQ ID NO: 4593837 - DNA, 25 bp, Homo sapien
ttccttctcagaaatagtactgctt

SEQ ID NO: 4593838 - DNA, 25 bp, Homo sapien
ccttctcagaaatagtactgcttaa

SEQ ID NO: 4593839 - DNA, 25 bp, Homo sapien
atggcggccgggtggagacgctcct

SEQ ID NO: 4593840 - DNA, 25 bp, Homo sapien
acggggcagctgccgggcagaggcg

SEQ ID NO: 4593841 - DNA, 25 bp, Homo sapien
tcagacggggcagctgccgggcaga

SEQ ID NO: 4593842 - DNA, 25 bp, Homo sapien
acatcccagatggggcggcgggcag

SEQ ID NO: 4593843 - DNA, 25 bp, Homo sapien
ctctatgtccgtgtggaagtgtgca

SEQ ID NO: 4593844 - DNA, 25 bp, Homo sapien
tgtccgtgtggaagtgtgcattcat

SEQ ID NO: 4593845 - DNA, 25 bp, Homo sapien
ttccagcctttgtgatacggttccg

SEQ ID NO: 4593846 - DNA, 25 bp, Homo sapien
tctaagctctatgtccgtgtggaag

SEQ ID NO: 4593847 - DNA, 25 bp, Homo sapien
aattcaagctgatttgcgtaactgt

SEQ ID NO: 4593848 - DNA, 25 bp, Homo sapien
agctgatttgcgtaactgtcacaag

SEQ ID NO: 4593849 - DNA, 25 bp, Homo sapien
tttgccttgttataatacatttgtg

SEQ ID NO: 4593850 - DNA, 25 bp, Homo sapien
tacaatttgccttgttataatacat

SEQ ID NO: 4593851 - DNA, 25 bp, Homo sapien
tcttagtgcgtgtaagtagcaattg

SEQ ID NO: 4593852 - DNA, 25 bp, Homo sapien
cttagtgcgtgtaagtagcaattgt

SEQ ID NO: 4593853 - DNA, 25 bp, Homo sapien
agcaattgtcgatgtaaggctttga

SEQ ID NO: 4593854 - DNA, 25 bp, Homo sapien
taagtagcaattgtcgatgtaaggc

SEQ ID NO: 4593855 - DNA, 25 bp, Homo sapien
tctttatgactcactagctgaacat

SEQ ID NO: 4593856 - DNA, 25 bp, Homo sapien
tatctttatgactcactagctgaac

SEQ ID NO: 4593857 - DNA, 25 bp, Homo sapien
ttatgactcactagctgaacattac

SEQ ID NO: 4593858 - DNA, 25 bp, Homo sapien
atatctttatgactcactagctgaa

SEQ ID NO: 4593859 - DNA, 25 bp, Homo sapien
cctccaatgaccattccaaaagttt

SEQ ID NO: 4593860 - DNA, 25 bp, Homo sapien
ctgacctccaatgaccattccaaaa

SEQ ID NO: 4593861 - DNA, 25 bp, Homo sapien
gacctccaatgaccattccaaaagt

SEQ ID NO: 4593862 - DNA, 25 bp, Homo sapien
tgacctccaatgaccattccaaaag

SEQ ID NO: 4593863 - DNA, 25 bp, Homo sapien
gctcacagagtagtttctacttaag

SEQ ID NO: 4593864 - DNA, 25 bp, Homo sapien
cacagagtagtttctacttaagttc

SEQ ID NO: 4593865 - DNA, 25 bp, Homo sapien
acagagtagtttctacttaagttct

SEQ ID NO: 4593866 - DNA, 25 bp, Homo sapien
ctcacagagtagtttctacttaagt

SEQ ID NO: 4593867 - DNA, 25 bp, Homo sapien
ttacaggagtaaactgctccaagtt

SEQ ID NO: 4593868 - DNA, 25 bp, Homo sapien
aggagtaaactgctccaagttatac

SEQ ID NO: 4593869 - DNA, 25 bp, Homo sapien
acaggagtaaactgctccaagttat

SEQ ID NO: 4593870 - DNA, 25 bp, Homo sapien
ttttacaggagtaaactgctccaag

SEQ ID NO: 4593871 - DNA, 25 bp, Homo sapien
gcagacgcacgggctgctttttccc

SEQ ID NO: 4593872 - DNA, 25 bp, Homo sapien
tgtgcagacgcacgggctgcttttt

SEQ ID NO: 4593873 - DNA, 25 bp, Homo sapien
gtgcagacgcacgggctgctttttc

SEQ ID NO: 4593874 - DNA, 25 bp, Homo sapien
tgcagacgcacgggctgctttttcc

SEQ ID NO: 4593875 - DNA, 25 bp, Homo sapien
aaatggtcttcgtgtagtgagttgc

SEQ ID NO: 4593876 - DNA, 25 bp, Homo sapien
cctcgtggagtcatcggttgtcaga

SEQ ID NO: 4593877 - DNA, 25 bp, Homo sapien
tgacttacccctttccgtgcggtgc

SEQ ID NO: 4593878 - DNA, 25 bp, Homo sapien
tgcgcccaacccatatctttgtgta

SEQ ID NO: 4593879 - DNA, 25 bp, Homo sapien
gaccttatgtactatatgcagaaca

SEQ ID NO: 4593880 - DNA, 25 bp, Homo sapien
tactatatgcagaacactcaataaa

SEQ ID NO: 4593881 - DNA, 25 bp, Homo sapien
tccacagaccttatgtactatatgc

SEQ ID NO: 4593882 - DNA, 25 bp, Homo sapien
gtactatatgcagaacactcaataa

SEQ ID NO: 4593883 - DNA, 25 bp, Homo sapien
ctggaaacactgaggtcgctcctgt

SEQ ID NO: 4593884 - DNA, 25 bp, Homo sapien
tggaaacactgaggtcgctcctgtc

SEQ ID NO: 4593885 - DNA, 25 bp, Homo sapien
tctgctttccggatataaaggatcc

SEQ ID NO: 4593886 - DNA, 25 bp, Homo sapien
cagggatcctgcgtttggctgacga

SEQ ID NO: 4593887 - DNA, 25 bp, Homo sapien
agtctaaacacctcaatgtcggcat

SEQ ID NO: 4593888 - DNA, 25 bp, Homo sapien
atttctcttgtcagagcccaccgga

SEQ ID NO: 4593889 - DNA, 25 bp, Homo sapien
ggtccggtgctgatcagccttcaaa

SEQ ID NO: 4593890 - DNA, 25 bp, Homo sapien
tgtgatgtctacaccttcagaatgg

SEQ ID NO: 4593891 - DNA, 25 bp, Homo sapien
tggttacgctccataaaacttgagc

SEQ ID NO: 4593892 - DNA, 25 bp, Homo sapien
catgcaatgatttctggtccggtgc

SEQ ID NO: 4593893 - DNA, 25 bp, Homo sapien
tcttctcatcaactactattgttac

SEQ ID NO: 4593894 - DNA, 25 bp, Homo sapien
ggagcatgcgggaaggttaagtgac

SEQ ID NO: 4593895 - DNA, 25 bp, Homo sapien
tctcatcaactactattgttaccct

SEQ ID NO: 4593896 - DNA, 25 bp, Homo sapien
cagttgccaagtgaagggagcatgc

SEQ ID NO: 4593897 - DNA, 25 bp, Homo sapien
tctccttcgggttcggtgactcacg

SEQ ID NO: 4593898 - DNA, 25 bp, Homo sapien
tccaggcggcctccaactgggttgg

SEQ ID NO: 4593899 - DNA, 25 bp, Homo sapien
tggaagaggccatagaccgctgcct

SEQ ID NO: 4593900 - DNA, 25 bp, Homo sapien
tctctcccgggatatgacctcaaat

SEQ ID NO: 4593901 - DNA, 25 bp, Homo sapien
agtcggcctggacccataagagccc

SEQ ID NO: 4593902 - DNA, 25 bp, Homo sapien
tacacgtgagtcagtcagtcggcct

SEQ ID NO: 4593903 - DNA, 25 bp, Homo sapien
agccccagctgagctaccagcagct

SEQ ID NO: 4593904 - DNA, 25 bp, Homo sapien
tgcgaaatttgagtacacgtgagtc

SEQ ID NO: 4593905 - DNA, 25 bp, Homo sapien
tgagcccagtcgacagctgacctta

SEQ ID NO: 4593906 - DNA, 25 bp, Homo sapien
gcggtcacaattacccgtctcttca

SEQ ID NO: 4593907 - DNA, 25 bp, Homo sapien
agccctctaaagcagtttgcggtca

SEQ ID NO: 4593908 - DNA, 25 bp, Homo sapien
acatcaaacacgacccaccttctag

SEQ ID NO: 4593909 - DNA, 25 bp, Homo sapien
tgtatatccatgagcgccgctggca

SEQ ID NO: 4593910 - DNA, 25 bp, Homo sapien
caaatgtaaccaattgctgaggagc

SEQ ID NO: 4593911 - DNA, 25 bp, Homo sapien
tggatcccctcctagacgcaatgag

SEQ ID NO: 4593912 - DNA, 25 bp, Homo sapien
tgaactgcccaatgaacaagcggtt

SEQ ID NO: 4593913 - DNA, 25 bp, Homo sapien
caggtaaagccacggccgagcgagc

SEQ ID NO: 4593914 - DNA, 25 bp, Homo sapien
catcacgccgcagcctgaggggatc

SEQ ID NO: 4593915 - DNA, 25 bp, Homo sapien
gtcgaaccgaatctccgagccccga

SEQ ID NO: 4593916 - DNA, 25 bp, Homo sapien
agcacctgtagtcaatcacacgcag

SEQ ID NO: 4593917 - DNA, 25 bp, Homo sapien
cggcctttcccccattggtgctcac

SEQ ID NO: 4593918 - DNA, 25 bp, Homo sapien
gcggcctttcccccattggtgctca

SEQ ID NO: 4593919 - DNA, 25 bp, Homo sapien
cgcggcctttcccccattggtgctc

SEQ ID NO: 4593920 - DNA, 25 bp, Homo sapien
ttcaggctcggcgaagaaggtccgg

SEQ ID NO: 4593921 - DNA, 25 bp, Homo sapien
tctgccggttcaggctcggcgaaga

SEQ ID NO: 4593922 - DNA, 25 bp, Homo sapien
ggtctgccggttcaggctcggcgaa

SEQ ID NO: 4593923 - DNA, 25 bp, Homo sapien
aggggtctgccggttcaggctcggc

SEQ ID NO: 4593924 - DNA, 25 bp, Homo sapien
cctgcgtgggtctgacaaataggca

SEQ ID NO: 4593925 - DNA, 25 bp, Homo sapien
ttcatttcctttatcgcctgcgtgg

SEQ ID NO: 4593926 - DNA, 25 bp, Homo sapien
taggcactctcagtgtgccagccaa

SEQ ID NO: 4593927 - DNA, 25 bp, Homo sapien
tcatttcctttatcgcctgcgtggg

SEQ ID NO: 4593928 - DNA, 25 bp, Homo sapien
tgtcctgcctttgggcgtccaagag

SEQ ID NO: 4593929 - DNA, 25 bp, Homo sapien
tgcctttgggcgtccaagaggaagc

SEQ ID NO: 4593930 - DNA, 25 bp, Homo sapien
ttgggcgtccaagaggaagcctgcc

SEQ ID NO: 4593931 - DNA, 25 bp, Homo sapien
cgtccaagaggaagcctgccctttg

SEQ ID NO: 4593932 - DNA, 25 bp, Homo sapien
gatacagcatgacctctcttccgtg

SEQ ID NO: 4593933 - DNA, 25 bp, Homo sapien
tccatgatttggtatgcccggtaat

SEQ ID NO: 4593934 - DNA, 25 bp, Homo sapien
tggtatgcccggtaatggcccagat

SEQ ID NO: 4593935 - DNA, 25 bp, Homo sapien
gctttcctcgtgtagcaccatcaca

SEQ ID NO: 4593936 - DNA, 25 bp, Homo sapien
ctctcgggatccatagaacctgccc

SEQ ID NO: 4593937 - DNA, 25 bp, Homo sapien
gctctcgggatccatagaacctgcc

SEQ ID NO: 4593938 - DNA, 25 bp, Homo sapien
tctcgggatccatagaacctgccca

SEQ ID NO: 4593939 - DNA, 25 bp, Homo sapien
ggctctcgggatccatagaacctgc

SEQ ID NO: 4593940 - DNA, 25 bp, Homo sapien
cagtgcaggaatcgaagctctggga

SEQ ID NO: 4593941 - DNA, 25 bp, Homo sapien
ctgagtttgaaagaccccagtgcag

SEQ ID NO: 4593942 - DNA, 25 bp, Homo sapien
cccagtgcaggaatcgaagctctgg

SEQ ID NO: 4593943 - DNA, 25 bp, Homo sapien
gagtttgaaagaccccagtgcagga

SEQ ID NO: 4593944 - DNA, 25 bp, Homo sapien
tgcttgctgtagatacgtggctcca

SEQ ID NO: 4593945 - DNA, 25 bp, Homo sapien
tgtctgagtaacaagggtcctttca

SEQ ID NO: 4593946 - DNA, 25 bp, Homo sapien
cactaaggacaggagcgtggaactc

SEQ ID NO: 4593947 - DNA, 25 bp, Homo sapien
ttaggactccctccaacgagtacga

SEQ ID NO: 4593948 - DNA, 25 bp, Homo sapien
taaaacagtctagaagtcacagtgg

SEQ ID NO: 4593949 - DNA, 25 bp, Homo sapien
gtctagatctgatatggtggctcca

SEQ ID NO: 4593950 - DNA, 25 bp, Homo sapien
aaaaattagatctacccctccagag

SEQ ID NO: 4593951 - DNA, 25 bp, Homo sapien
tacatggactcacctagctaaggga

SEQ ID NO: 4593952 - DNA, 25 bp, Homo sapien
agctgagagctgtttgattgtagca

SEQ ID NO: 4593953 - DNA, 25 bp, Homo sapien
tatgccacgatctggtgagctgaga

SEQ ID NO: 4593954 - DNA, 25 bp, Homo sapien
tttgattgtagcagagagccctatg

SEQ ID NO: 4593955 - DNA, 25 bp, Homo sapien
ctatgccacgatctggtgagctgag

SEQ ID NO: 4593956 - DNA, 25 bp, Homo sapien
tgagagaacataatcaccttctttc

SEQ ID NO: 4593957 - DNA, 25 bp, Homo sapien
tgaatgctttctggacatttatggt

SEQ ID NO: 4593958 - DNA, 25 bp, Homo sapien
aatgctttctggacatttatggttc

SEQ ID NO: 4593959 - DNA, 25 bp, Homo sapien
ctctttatttgagagaacataatca

SEQ ID NO: 4593960 - DNA, 25 bp, Homo sapien
cctcctcttccttctttttcttgct

SEQ ID NO: 4593961 - DNA, 25 bp, Homo sapien
catcttcctcatcttcctcctcttc

SEQ ID NO: 4593962 - DNA, 25 bp, Homo sapien
cttcctcctcctcattcttatcctc

SEQ ID NO: 4593963 - DNA, 25 bp, Homo sapien
tcctcctcctcattcttatcctctt

SEQ ID NO: 4593964 - DNA, 25 bp, Homo sapien
gcctgtcatctgcagcaatgttatt

SEQ ID NO: 4593965 - DNA, 25 bp, Homo sapien
ttctttttataaggctgcctgtcat

SEQ ID NO: 4593966 - DNA, 25 bp, Homo sapien
gctgcctgtcatctgcagcaatgtt

SEQ ID NO: 4593967 - DNA, 25 bp, Homo sapien
tataaggctgcctgtcatctgcagc

SEQ ID NO: 4593968 - DNA, 25 bp, Homo sapien
gaaggacctgctgttgacctgctgg

SEQ ID NO: 4593969 - DNA, 25 bp, Homo sapien
gtgggatgggctcacgaaggacctg

SEQ ID NO: 4593970 - DNA, 25 bp, Homo sapien
ggctcacgaaggacctgctgttgac

SEQ ID NO: 4593971 - DNA, 25 bp, Homo sapien
acctgctgttgacctgctggcttca

SEQ ID NO: 4593972 - DNA, 25 bp, Homo sapien
tgctcagaaatatctctcctctctg

SEQ ID NO: 4593973 - DNA, 25 bp, Homo sapien
tggtgctcagaaatatctctcctct

SEQ ID NO: 4593974 - DNA, 25 bp, Homo sapien
tttggtgctcagaaatatctctcct

SEQ ID NO: 4593975 - DNA, 25 bp, Homo sapien
agatttggtgctcagaaatatctct

SEQ ID NO: 4593976 - DNA, 25 bp, Homo sapien
tgcatggatgtttcagggatcaaag

SEQ ID NO: 4593977 - DNA, 25 bp, Homo sapien
tctcaagtgaaaacgcaactctagg

SEQ ID NO: 4593978 - DNA, 25 bp, Homo sapien
gaatataagtagtgggtctgcatgg

SEQ ID NO: 4593979 - DNA, 25 bp, Homo sapien
ccgatcctgtggtacttgaatatcc

SEQ ID NO: 4593980 - DNA, 25 bp, Homo sapien
taagctttcctggtgaagacccttg

SEQ ID NO: 4593981 - DNA, 25 bp, Homo sapien
cttgatcttgtccaaagccctgtgt

SEQ ID NO: 4593982 - DNA, 25 bp, Homo sapien
ccccgttgtcatcgtaagacccttg

SEQ ID NO: 4593983 - DNA, 25 bp, Homo sapien
ttctcttcagagtccccgttgtcat

SEQ ID NO: 4593984 - DNA, 25 bp, Homo sapien
tggagggtggtcttgtgactgtggc

SEQ ID NO: 4593985 - DNA, 25 bp, Homo sapien
agggtggtcttgtgactgtggcagc

SEQ ID NO: 4593986 - DNA, 25 bp, Homo sapien
ggtagctgagcttatatgcccggca

SEQ ID NO: 4593987 - DNA, 25 bp, Homo sapien
cagcaagcagatgtctgagatgtaa

SEQ ID NO: 4593988 - DNA, 25 bp, Homo sapien
tgcccggcatctgaatgagagctct

SEQ ID NO: 4593989 - DNA, 25 bp, Homo sapien
agagctctctttgtaactgtgtgac

SEQ ID NO: 4593990 - DNA, 25 bp, Homo sapien
aatatgagtgatccagaactggccc

SEQ ID NO: 4593991 - DNA, 25 bp, Homo sapien
catttagaggccaagcaattgacag

SEQ ID NO: 4593992 - DNA, 25 bp, Homo sapien
gcttggatgcttcgaacagccatga

SEQ ID NO: 4593993 - DNA, 25 bp, Homo sapien
taacttgcctctagagaatccctgg

SEQ ID NO: 4593994 - DNA, 25 bp, Homo sapien
tcatgcatctctagtaataataagc

SEQ ID NO: 4593995 - DNA, 25 bp, Homo sapien
atgcatctctagtaataataagctg

SEQ ID NO: 4593996 - DNA, 25 bp, Homo sapien
tctctagtaataataagctgaaatt

SEQ ID NO: 4593997 - DNA, 25 bp, Homo sapien
tttcatgcatctctagtaataataa

SEQ ID NO: 4593998 - DNA, 25 bp, Homo sapien
tacaatttgtccagtagccagtttg

SEQ ID NO: 4593999 - DNA, 25 bp, Homo sapien
tcacttcctagacagtgcggcagcc

SEQ ID NO: 4594000 - DNA, 25 bp, Homo sapien
tcacttcccagaacaattctttatg

SEQ ID NO: 4594001 - DNA, 25 bp, Homo sapien
cttcatacttgcaggattgcacagc

SEQ ID NO: 4594002 - DNA, 25 bp, Homo sapien
taagagatcattaaaggcaaagcct

SEQ ID NO: 4594003 - DNA, 25 bp, Homo sapien
caatgaaatggtaggtaaacaaatc

SEQ ID NO: 4594004 - DNA, 25 bp, Homo sapien
ccaatgaaatggtaggtaaacaaat

SEQ ID NO: 4594005 - DNA, 25 bp, Homo sapien
atccagtgaaaatggctgcaattac

SEQ ID NO: 4594006 - DNA, 25 bp, Homo sapien
gaatccagtgaaaatggctgcaatt

SEQ ID NO: 4594007 - DNA, 25 bp, Homo sapien
aatccagtgaaaatggctgcaatta

SEQ ID NO: 4594008 - DNA, 25 bp, Homo sapien
cttgtttcagtatcatgaagtgaag

SEQ ID NO: 4594009 - DNA, 25 bp, Homo sapien
ttgtggcgtgggcccgtcttgctta

SEQ ID NO: 4594010 - DNA, 25 bp, Homo sapien
catgaagtgaagcactgtgtggttg

SEQ ID NO: 4594011 - DNA, 25 bp, Homo sapien
ttcatctctcaggtgttgatttgct

SEQ ID NO: 4594012 - DNA, 25 bp, Homo sapien
ttcaatttatcattttcattgggga

SEQ ID NO: 4594013 - DNA, 25 bp, Homo sapien
gtcattcaatttatcattttcattg

SEQ ID NO: 4594014 - DNA, 25 bp, Homo sapien
tcaatttatcattttcattggggat

SEQ ID NO: 4594015 - DNA, 25 bp, Homo sapien
cattcaatttatcattttcattggg

SEQ ID NO: 4594016 - DNA, 25 bp, Homo sapien
atccattaattcatgaggttttgcc

SEQ ID NO: 4594017 - DNA, 25 bp, Homo sapien
ctccatttggaatccattaattcat

SEQ ID NO: 4594018 - DNA, 25 bp, Homo sapien
cctcattccacacagcttccatatc

SEQ ID NO: 4594019 - DNA, 25 bp, Homo sapien
atgaggttttgcctcattccacaca

SEQ ID NO: 4594020 - DNA, 25 bp, Homo sapien
cagtaccggtgaggcacggtagtct

SEQ ID NO: 4594021 - DNA, 25 bp, Homo sapien
taccggtgaggcacggtagtcttca

SEQ ID NO: 4594022 - DNA, 25 bp, Homo sapien
gtgaggcacggtagtcttcactttg

SEQ ID NO: 4594023 - DNA, 25 bp, Homo sapien
cacacagtaccggtgaggcacggta

SEQ ID NO: 4594024 - DNA, 25 bp, Homo sapien
ccttttcctggttagactctgttca

SEQ ID NO: 4594025 - DNA, 25 bp, Homo sapien
aaatgctgccccgaaaatactatat

SEQ ID NO: 4594026 - DNA, 25 bp, Homo sapien
gatttttagagcaccatcactttca

SEQ ID NO: 4594027 - DNA, 25 bp, Homo sapien
gaggtgtttaagatttgcaactagc

SEQ ID NO: 4594028 - DNA, 25 bp, Homo sapien
gaggcccagagattctaactacagt

SEQ ID NO: 4594029 - DNA, 25 bp, Homo sapien
gctcactcgggcttagggagtctaa

SEQ ID NO: 4594030 - DNA, 25 bp, Homo sapien
ccccaacttgagaacagggtgacac

SEQ ID NO: 4594031 - DNA, 25 bp, Homo sapien
tcaagggcaggtggaaatataacta

SEQ ID NO: 4594032 - DNA, 25 bp, Homo sapien
gatgttctcatcgatctcctggtag

SEQ ID NO: 4594033 - DNA, 25 bp, Homo sapien
cagaaaggtcatccccgtggacaaa

SEQ ID NO: 4594034 - DNA, 25 bp, Homo sapien
gagctgctcagcaacggccttgcca

SEQ ID NO: 4594035 - DNA, 25 bp, Homo sapien
gccatcatacttgggcagcgtgccc

SEQ ID NO: 4594036 - DNA, 25 bp, Homo sapien
gaagggcttgaccacattgtaggtc

SEQ ID NO: 4594037 - DNA, 25 bp, Homo sapien
ttcaagaagggcttgaccacattgt

SEQ ID NO: 4594038 - DNA, 25 bp, Homo sapien
cacattgtaggtcgtggtgaagtac

SEQ ID NO: 4594039 - DNA, 25 bp, Homo sapien
ggcttgaccacattgtaggtcgtgg

SEQ ID NO: 4594040 - DNA, 25 bp, Homo sapien
ggatggctttgaaccgggctgggaa

SEQ ID NO: 4594041 - DNA, 25 bp, Homo sapien
gtggatggctttgaaccgggctggg

SEQ ID NO: 4594042 - DNA, 25 bp, Homo sapien
gatggctttgaaccgggctgggaag

SEQ ID NO: 4594043 - DNA, 25 bp, Homo sapien
tggatggctttgaaccgggctggga

SEQ ID NO: 4594044 - DNA, 25 bp, Homo sapien
tccaggtcagaagatgcaggttcaa

SEQ ID NO: 4594045 - DNA, 25 bp, Homo sapien
taagatggctctaagaaaggactcc

SEQ ID NO: 4594046 - DNA, 25 bp, Homo sapien
cagtgcgacatatgtggacagacaa

SEQ ID NO: 4594047 - DNA, 25 bp, Homo sapien
cctgccgaagggactgcaaactatt

SEQ ID NO: 4594048 - DNA, 25 bp, Homo sapien
gaagttctcaatgatgcagaagcca

SEQ ID NO: 4594049 - DNA, 25 bp, Homo sapien
gaagtccggagactagcagcctgct

SEQ ID NO: 4594050 - DNA, 25 bp, Homo sapien
cagcctgctgcatggtaaagccctt

SEQ ID NO: 4594051 - DNA, 25 bp, Homo sapien
gcagaagccattgatttgagtttcc

SEQ ID NO: 4594052 - DNA, 25 bp, Homo sapien
tgggcacagagagaacaggctgtaa

SEQ ID NO: 4594053 - DNA, 25 bp, Homo sapien
gcacagagagaacaggctgtaagat

SEQ ID NO: 4594054 - DNA, 25 bp, Homo sapien
ggcacagagagaacaggctgtaaga

SEQ ID NO: 4594055 - DNA, 25 bp, Homo sapien
cttgggcacagagagaacaggctgt

SEQ ID NO: 4594056 - DNA, 25 bp, Homo sapien
agggcccagtagaggccagggttga

SEQ ID NO: 4594057 - DNA, 25 bp, Homo sapien
gggagccaggcgagcccccactaac

SEQ ID NO: 4594058 - DNA, 25 bp, Homo sapien
tggagaaccaggaatgagggcccag

SEQ ID NO: 4594059 - DNA, 25 bp, Homo sapien
tgggagccaggcgagcccccactaa

SEQ ID NO: 4594060 - DNA, 25 bp, Homo sapien
tacttgtcccgactagagaggacac

SEQ ID NO: 4594061 - DNA, 25 bp, Homo sapien
gccagttctcaatgttgaagagcat

SEQ ID NO: 4594062 - DNA, 25 bp, Homo sapien
gcttcaatggtgcagcggacagcct

SEQ ID NO: 4594063 - DNA, 25 bp, Homo sapien
cagggtactgcagccggaaattcac

SEQ ID NO: 4594064 - DNA, 25 bp, Homo sapien
tattttcttccccatggggacaaga

SEQ ID NO: 4594065 - DNA, 25 bp, Homo sapien
ttccccatggggacaagacacagat

SEQ ID NO: 4594066 - DNA, 25 bp, Homo sapien
ccccatggggacaagacacagattt

SEQ ID NO: 4594067 - DNA, 25 bp, Homo sapien
catggggacaagacacagatttttc

SEQ ID NO: 4594068 - DNA, 25 bp, Homo sapien
tcctgcagctctcgcactgcctcct

SEQ ID NO: 4594069 - DNA, 25 bp, Homo sapien
aacttccgtgcgcggatgaagcgca

SEQ ID NO: 4594070 - DNA, 25 bp, Homo sapien
gttgaacttccgtgcgcggatgaag

SEQ ID NO: 4594071 - DNA, 25 bp, Homo sapien
ttccgtgcgcggatgaagcgcagga

SEQ ID NO: 4594072 - DNA, 25 bp, Homo sapien
tccagttgggcacggagctcctgtt

SEQ ID NO: 4594073 - DNA, 25 bp, Homo sapien
ctgttcctcttcaggtaccatgcgg

SEQ ID NO: 4594074 - DNA, 25 bp, Homo sapien
ctgcacgggccaaagacaggtccat

SEQ ID NO: 4594075 - DNA, 25 bp, Homo sapien
aagacaggtccatggtccttggttg

SEQ ID NO: 4594076 - DNA, 25 bp, Homo sapien
gaagacacagagtccttggaaaaag

SEQ ID NO: 4594077 - DNA, 25 bp, Homo sapien
gttgcctatggaagacacagagtcc

SEQ ID NO: 4594078 - DNA, 25 bp, Homo sapien
cagagtccttggaaaaagaagggat

SEQ ID NO: 4594079 - DNA, 25 bp, Homo sapien
aaaaagaagggatctgctttctctg

SEQ ID NO: 4594080 - DNA, 25 bp, Homo sapien
aaacttcgcagcctagtggatggcc

SEQ ID NO: 4594081 - DNA, 25 bp, Homo sapien
gaaggagtccctcagaaacttcgca

SEQ ID NO: 4594082 - DNA, 25 bp, Homo sapien
cacccgaggcatttgttagaaacgc

SEQ ID NO: 4594083 - DNA, 25 bp, Homo sapien
tgttaaaacaagttggccctgccag

SEQ ID NO: 4594084 - DNA, 25 bp, Homo sapien
cagcctgctgtggcgcaaaagttgg

SEQ ID NO: 4594085 - DNA, 25 bp, Homo sapien
gcctgctgtggcgcaaaagttggac

SEQ ID NO: 4594086 - DNA, 25 bp, Homo sapien
gtgacttcctgtcaggaccaagagg

SEQ ID NO: 4594087 - DNA, 25 bp, Homo sapien
gcagcctgctgtggcgcaaaagttg

SEQ ID NO: 4594088 - DNA, 25 bp, Homo sapien
acttgcaggctgtgagatttaaccc

SEQ ID NO: 4594089 - DNA, 25 bp, Homo sapien
gctgtgagatttaaccccagtcttg

SEQ ID NO: 4594090 - DNA, 25 bp, Homo sapien
tgagatttaaccccagtcttggttg

SEQ ID NO: 4594091 - DNA, 25 bp, Homo sapien
caggctgtgagatttaaccccagtc

SEQ ID NO: 4594092 - DNA, 25 bp, Homo sapien
ggctggtagacatccaggtatgtgg

SEQ ID NO: 4594093 - DNA, 25 bp, Homo sapien
tggtagacatccaggtatgtgggca

SEQ ID NO: 4594094 - DNA, 25 bp, Homo sapien
gctgctgtgctatcagttgggtttt

SEQ ID NO: 4594095 - DNA, 25 bp, Homo sapien
gtagacatccaggtatgtgggcaca

SEQ ID NO: 4594096 - DNA, 25 bp, Homo sapien
ggggctacctggtacctgaatgtcc

SEQ ID NO: 4594097 - DNA, 25 bp, Homo sapien
cctccttggggctacctggtacctg

SEQ ID NO: 4594098 - DNA, 25 bp, Homo sapien
tggggctacctggtacctgaatgtc

SEQ ID NO: 4594099 - DNA, 25 bp, Homo sapien
ccttggggctacctggtacctgaat

SEQ ID NO: 4594100 - DNA, 25 bp, Homo sapien
aaggaacttctcaccgcccacagtt

SEQ ID NO: 4594101 - DNA, 25 bp, Homo sapien
tccggtcagcaggttgggattagtg

SEQ ID NO: 4594102 - DNA, 25 bp, Homo sapien
tgggattagtgtgtcataaggaact

SEQ ID NO: 4594103 - DNA, 25 bp, Homo sapien
cacagtttccgttaaatcgggctca

SEQ ID NO: 4594104 - DNA, 25 bp, Homo sapien
agcccttctagtgcctctaatcttc

SEQ ID NO: 4594105 - DNA, 25 bp, Homo sapien
tcctcccttcccaagagtcacgctc

SEQ ID NO: 4594106 - DNA, 25 bp, Homo sapien
cctcctcccttcccaagagtcacgc

SEQ ID NO: 4594107 - DNA, 25 bp, Homo sapien
ctcccttcccaagagtcacgctcac

SEQ ID NO: 4594108 - DNA, 25 bp, Homo sapien
cctgtgctggcaacattggcagaca

SEQ ID NO: 4594109 - DNA, 25 bp, Homo sapien
agacacctgtgctggcaacattggc

SEQ ID NO: 4594110 - DNA, 25 bp, Homo sapien
gtgggaacaatagtgcctctgtgag

SEQ ID NO: 4594111 - DNA, 25 bp, Homo sapien
ctcccctggtgggaacaatagtgcc

SEQ ID NO: 4594112 - DNA, 25 bp, Homo sapien
tagcaggttgcaggttgtttaccac

SEQ ID NO: 4594113 - DNA, 25 bp, Homo sapien
gtttaccacaggtattgtaaatgca

SEQ ID NO: 4594114 - DNA, 25 bp, Homo sapien
caggttgtttaccacaggtattgta

SEQ ID NO: 4594115 - DNA, 25 bp, Homo sapien
ggttgcaggttgtttaccacaggta

SEQ ID NO: 4594116 - DNA, 25 bp, Homo sapien
aatttcccttaaccttgctttgcat

SEQ ID NO: 4594117 - DNA, 25 bp, Homo sapien
gtacattttcttgcaagggccagat

SEQ ID NO: 4594118 - DNA, 25 bp, Homo sapien
caggctctcatcaggcttcatgcat

SEQ ID NO: 4594119 - DNA, 25 bp, Homo sapien
gattgtttcctcacgattgggttca

SEQ ID NO: 4594120 - DNA, 25 bp, Homo sapien
cagcccacttgtcttgtgtaatgtc

SEQ ID NO: 4594121 - DNA, 25 bp, Homo sapien
cattttttatcaccctgtaagatct

SEQ ID NO: 4594122 - DNA, 25 bp, Homo sapien
tgaggcacaatttacatagcacaaa

SEQ ID NO: 4594123 - DNA, 25 bp, Homo sapien
taatctgcattagcactcccagtcc

SEQ ID NO: 4594124 - DNA, 25 bp, Homo sapien
ctagtatcttttctaggccttgaaa

SEQ ID NO: 4594125 - DNA, 25 bp, Homo sapien
tatattagggcatttaggactgtca

SEQ ID NO: 4594126 - DNA, 25 bp, Homo sapien
aagttatgattgtccagatcactag

SEQ ID NO: 4594127 - DNA, 25 bp, Homo sapien
ggcttccccaggattttactctgag

SEQ ID NO: 4594128 - DNA, 25 bp, Homo sapien
tcttcgaaggaactctcagctggct

SEQ ID NO: 4594129 - DNA, 25 bp, Homo sapien
tgagacacgacaagctacctcctgt

SEQ ID NO: 4594130 - DNA, 25 bp, Homo sapien
tacacacaacttggagaggatctca

SEQ ID NO: 4594131 - DNA, 25 bp, Homo sapien
tgtacacatacctgagggacctgac

SEQ ID NO: 4594132 - DNA, 25 bp, Homo sapien
cactgggatgttgtgcctgagacac

SEQ ID NO: 4594133 - DNA, 25 bp, Homo sapien
tcttatgttctttgcccttaggcca

SEQ ID NO: 4594134 - DNA, 25 bp, Homo sapien
gattactggtatacaactgcatttg

SEQ ID NO: 4594135 - DNA, 25 bp, Homo sapien
ccatacagttttgtaagtgacagct

SEQ ID NO: 4594136 - DNA, 25 bp, Homo sapien
tgattgggagacagactagttttcc

SEQ ID NO: 4594137 - DNA, 25 bp, Homo sapien
tccacgggagcaaatacagagcctc

SEQ ID NO: 4594138 - DNA, 25 bp, Homo sapien
tgtcctgtagtccacaccgatgttg

SEQ ID NO: 4594139 - DNA, 25 bp, Homo sapien
tgaaaaatggctggccttaggcaag

SEQ ID NO: 4594140 - DNA, 25 bp, Homo sapien
tggagcaggtttatcacgttagagc

SEQ ID NO: 4594141 - DNA, 25 bp, Homo sapien
ccaaggagcctttggtgagttcaat

SEQ ID NO: 4594142 - DNA, 25 bp, Homo sapien
tcaattatctggtaaatatccagcg

SEQ ID NO: 4594143 - DNA, 25 bp, Homo sapien
ccaggctggcttcgtttttccaagg

SEQ ID NO: 4594144 - DNA, 25 bp, Homo sapien
tatctggtaaatatccagcgcttca

SEQ ID NO: 4594145 - DNA, 25 bp, Homo sapien
gaaagatagtgcaaattggttagga

SEQ ID NO: 4594146 - DNA, 25 bp, Homo sapien
agcttaatgctaaggtcaaaaggag

SEQ ID NO: 4594147 - DNA, 25 bp, Homo sapien
ttaggatgccacctcaagaactgta

SEQ ID NO: 4594148 - DNA, 25 bp, Homo sapien
gcaaaggagcttaatgctaaggtca

SEQ ID NO: 4594149 - DNA, 25 bp, Homo sapien
gggaatcccgtatctcctttccatc

SEQ ID NO: 4594150 - DNA, 25 bp, Homo sapien
gaaggggttttacaatccatggtca

SEQ ID NO: 4594151 - DNA, 25 bp, Homo sapien
tgcactgaaaaaggcgactgactgg

SEQ ID NO: 4594152 - DNA, 25 bp, Homo sapien
ccggtcaatatcgactgcactgaaa

SEQ ID NO: 4594153 - DNA, 25 bp, Homo sapien
gagacccaatctactctcacagtca

SEQ ID NO: 4594154 - DNA, 25 bp, Homo sapien
ctgaaagagacccaatctactctca

SEQ ID NO: 4594155 - DNA, 25 bp, Homo sapien
aaagagacccaatctactctcacag

SEQ ID NO: 4594156 - DNA, 25 bp, Homo sapien
gacccaatctactctcacagtcatg

SEQ ID NO: 4594157 - DNA, 25 bp, Homo sapien
tctgttcacttagctaagtcaagaa

SEQ ID NO: 4594158 - DNA, 25 bp, Homo sapien
cctggaccaacaccccatctgttca

SEQ ID NO: 4594159 - DNA, 25 bp, Homo sapien
aaatgcaattatggactcaacatac

SEQ ID NO: 4594160 - DNA, 25 bp, Homo sapien
cacaccccttagagcagggcttccc

SEQ ID NO: 4594161 - DNA, 25 bp, Homo sapien
atgatgattaagagggcaatgggaa

SEQ ID NO: 4594162 - DNA, 25 bp, Homo sapien
ggcaatgggaacaatgttgaatatt

SEQ ID NO: 4594163 - DNA, 25 bp, Homo sapien
aattaatatacgaaatcacttccaa

SEQ ID NO: 4594164 - DNA, 25 bp, Homo sapien
cataacctcccggagatgatgatta

SEQ ID NO: 4594165 - DNA, 25 bp, Homo sapien
ggaacggtaatatttaattcatcca

SEQ ID NO: 4594166 - DNA, 25 bp, Homo sapien
aactggttctgagtggcagatcaac

SEQ ID NO: 4594167 - DNA, 25 bp, Homo sapien
gtggcagatcaacatggaacggtaa

SEQ ID NO: 4594168 - DNA, 25 bp, Homo sapien
tcatccatatgaactaggaatttta

SEQ ID NO: 4594169 - DNA, 25 bp, Homo sapien
tgcttccctcaatgatcagtcttgg

SEQ ID NO: 4594170 - DNA, 25 bp, Homo sapien
gcagtcaaataacaaacttttggca

SEQ ID NO: 4594171 - DNA, 25 bp, Homo sapien
cacatttgagtgtccccattaacag

SEQ ID NO: 4594172 - DNA, 25 bp, Homo sapien
aatagaaaagcgtgagtaccaccct

SEQ ID NO: 4594173 - DNA, 25 bp, Homo sapien
cataggagcacatggccaggctaga

SEQ ID NO: 4594174 - DNA, 25 bp, Homo sapien
ggctagaggccatgggccccgcata

SEQ ID NO: 4594175 - DNA, 25 bp, Homo sapien
caaagccccacataggagcacatgg

SEQ ID NO: 4594176 - DNA, 25 bp, Homo sapien
tggccaggctagaggccatgggccc

SEQ ID NO: 4594177 - DNA, 25 bp, Homo sapien
tgtaccacccaattcacacggctgg

SEQ ID NO: 4594178 - DNA, 25 bp, Homo sapien
caagcatgaggtgtaagtagtcaac

SEQ ID NO: 4594179 - DNA, 25 bp, Homo sapien
caagaggttggtgatctgcaaggcc

SEQ ID NO: 4594180 - DNA, 25 bp, Homo sapien
gaacctcgtcatggatgctgatgca

SEQ ID NO: 4594181 - DNA, 25 bp, Homo sapien
cgtggtatgtcagacgtagcaatgc

SEQ ID NO: 4594182 - DNA, 25 bp, Homo sapien
gctcggctgatgcagcagcccagca

SEQ ID NO: 4594183 - DNA, 25 bp, Homo sapien
acagccgagggctccagggctcggc

SEQ ID NO: 4594184 - DNA, 25 bp, Homo sapien
cagcaccggggtacgtggtatgtca

SEQ ID NO: 4594185 - DNA, 25 bp, Homo sapien
ctaaaaaacaaagcatccaagctct

SEQ ID NO: 4594186 - DNA, 25 bp, Homo sapien
taaaaaacaaagcatccaagctctt

SEQ ID NO: 4594187 - DNA, 25 bp, Homo sapien
tcagcatctcaaagctaaaaaacaa

SEQ ID NO: 4594188 - DNA, 25 bp, Homo sapien
tctttcagcatctcaaagctaaaaa

SEQ ID NO: 4594189 - DNA, 25 bp, Homo sapien
tctctggaccttgcgcagatcctgc

SEQ ID NO: 4594190 - DNA, 25 bp, Homo sapien
gcagggaaatccagccaccctcagt

SEQ ID NO: 4594191 - DNA, 25 bp, Homo sapien
actcgccctcatccgacagccgata

SEQ ID NO: 4594192 - DNA, 25 bp, Homo sapien
cctgcagggaaatccagccaccctc

SEQ ID NO: 4594193 - DNA, 25 bp, Homo sapien
gagctagaaagagatgcagcccagg

SEQ ID NO: 4594194 - DNA, 25 bp, Homo sapien
taagaataggctactccctgaaggg

SEQ ID NO: 4594195 - DNA, 25 bp, Homo sapien
caagggccatcactctagatttggg

SEQ ID NO: 4594196 - DNA, 25 bp, Homo sapien
caacacgggccttttattcaggagg

SEQ ID NO: 4594197 - DNA, 25 bp, Homo sapien
tatccactggacgatactcagctcc

SEQ ID NO: 4594198 - DNA, 25 bp, Homo sapien
tttatccactggacgatactcagct

SEQ ID NO: 4594199 - DNA, 25 bp, Homo sapien
cttttagttgttgacgagaaagtga

SEQ ID NO: 4594200 - DNA, 25 bp, Homo sapien
ttgttgacgagaaagtgaagtttcc

SEQ ID NO: 4594201 - DNA, 25 bp, Homo sapien
gcccttggtggcagcgtacatctgc

SEQ ID NO: 4594202 - DNA, 25 bp, Homo sapien
cctgctgtgtgagccggtggttaaa

SEQ ID NO: 4594203 - DNA, 25 bp, Homo sapien
gcagcgtacatctgctgggccttct

SEQ ID NO: 4594204 - DNA, 25 bp, Homo sapien
taaactgcattagtaagcgctcagc

SEQ ID NO: 4594205 - DNA, 25 bp, Homo sapien
tgcagtgtcatccacccaaaggctg

SEQ ID NO: 4594206 - DNA, 25 bp, Homo sapien
agtagtggctgtcttactgtgtaga

SEQ ID NO: 4594207 - DNA, 25 bp, Homo sapien
gcccagcaccatagatgcggccgta

SEQ ID NO: 4594208 - DNA, 25 bp, Homo sapien
tgtgtagatcagtgcccctgctctt

SEQ ID NO: 4594209 - DNA, 25 bp, Homo sapien
tcaactcactgcctactcggtcagg

SEQ ID NO: 4594210 - DNA, 25 bp, Homo sapien
catgcatgccggcaaagtgggcgtc

SEQ ID NO: 4594211 - DNA, 25 bp, Homo sapien
cacccacaagggtgtagccaggtgg

SEQ ID NO: 4594212 - DNA, 25 bp, Homo sapien
ttgggagtccacatcagcacccaca

SEQ ID NO: 4594213 - DNA, 25 bp, Homo sapien
ccgggcattgctggcggtgagccat

SEQ ID NO: 4594214 - DNA, 25 bp, Homo sapien
tgctggcggtgagccatgtgggctc

SEQ ID NO: 4594215 - DNA, 25 bp, Homo sapien
ccacagcccggcgagtgatggtgcc

SEQ ID NO: 4594216 - DNA, 25 bp, Homo sapien
gatggtgccggcagtcaccacttgg

SEQ ID NO: 4594217 - DNA, 25 bp, Homo sapien
tgatcacagcacggggcagagctga

SEQ ID NO: 4594218 - DNA, 25 bp, Homo sapien
gatcacagcacggggcagagctgac

SEQ ID NO: 4594219 - DNA, 25 bp, Homo sapien
ctgatcacagcacggggcagagctg

SEQ ID NO: 4594220 - DNA, 25 bp, Homo sapien
agcctgcagggtgccatcctccatc

SEQ ID NO: 4594221 - DNA, 25 bp, Homo sapien
attttgttgatttccagagcacggg

SEQ ID NO: 4594222 - DNA, 25 bp, Homo sapien
gggcttcccacattacagctattac

SEQ ID NO: 4594223 - DNA, 25 bp, Homo sapien
tttatgggcgttcctccagaaagaa

SEQ ID NO: 4594224 - DNA, 25 bp, Homo sapien
cttgtgaggcagcttgaaaaaccag

SEQ ID NO: 4594225 - DNA, 25 bp, Homo sapien
gcagcttgaaaaaccagcagccagg

SEQ ID NO: 4594226 - DNA, 25 bp, Homo sapien
gatgtccacgtcgttgtaaggtcca

SEQ ID NO: 4594227 - DNA, 25 bp, Homo sapien
gtccattgccatggtgatagctggg

SEQ ID NO: 4594228 - DNA, 25 bp, Homo sapien
gtgtccttggggccaccacgggcag

SEQ ID NO: 4594229 - DNA, 25 bp, Homo sapien
ctgggtgtccttggggccaccacgg

SEQ ID NO: 4594230 - DNA, 25 bp, Homo sapien
ggtgtccttggggccaccacgggca

SEQ ID NO: 4594231 - DNA, 25 bp, Homo sapien
tgtccttggggccaccacgggcagt

SEQ ID NO: 4594232 - DNA, 25 bp, Homo sapien
acctgcattcagcaagggccatggg

SEQ ID NO: 4594233 - DNA, 25 bp, Homo sapien
tgagggccacacacctatatcaggc

SEQ ID NO: 4594234 - DNA, 25 bp, Homo sapien
gctccagcacctgcattcagcaagg

SEQ ID NO: 4594235 - DNA, 25 bp, Homo sapien
gtgagggccacacacctatatcagg

SEQ ID NO: 4594236 - DNA, 25 bp, Homo sapien
ggcactgcagctcgcaagttctcca

SEQ ID NO: 4594237 - DNA, 25 bp, Homo sapien
actgcagctcgcaagttctccatct

SEQ ID NO: 4594238 - DNA, 25 bp, Homo sapien
cagctcgcaagttctccatcttggc

SEQ ID NO: 4594239 - DNA, 25 bp, Homo sapien
ctggcactgcagctcgcaagttctc

SEQ ID NO: 4594240 - DNA, 25 bp, Homo sapien
tatggcactattgtcagtgagcagg

SEQ ID NO: 4594241 - DNA, 25 bp, Homo sapien
cgtttgccatatggcactattgtca

SEQ ID NO: 4594242 - DNA, 25 bp, Homo sapien
cactattgtcagtgagcaggaactc

SEQ ID NO: 4594243 - DNA, 25 bp, Homo sapien
tgccatatggcactattgtcagtga

SEQ ID NO: 4594244 - DNA, 25 bp, Homo sapien
tgcttcctgtacagggactcgatgg

SEQ ID NO: 4594245 - DNA, 25 bp, Homo sapien
gcttcctgtacagggactcgatggc

SEQ ID NO: 4594246 - DNA, 25 bp, Homo sapien
cttcctgtacagggactcgatggct

SEQ ID NO: 4594247 - DNA, 25 bp, Homo sapien
gtccatgcagggtcgtctagccggg

SEQ ID NO: 4594248 - DNA, 25 bp, Homo sapien
ccccagccatgacgctctgagtagt

SEQ ID NO: 4594249 - DNA, 25 bp, Homo sapien
gccatgagtttaggtgtgacccgca

SEQ ID NO: 4594250 - DNA, 25 bp, Homo sapien
tggtacctgtcggcagcttggccag

SEQ ID NO: 4594251 - DNA, 25 bp, Homo sapien
caggagctctgtggtccccttcagc

SEQ ID NO: 4594252 - DNA, 25 bp, Homo sapien
ctggggccgcttgggcaggagctct

SEQ ID NO: 4594253 - DNA, 25 bp, Homo sapien
cttgggcaggagctctgtggtcccc

SEQ ID NO: 4594254 - DNA, 25 bp, Homo sapien
gggccgcttgggcaggagctctgtg

SEQ ID NO: 4594255 - DNA, 25 bp, Homo sapien
aagcaggcgcgggccatgacatctt

SEQ ID NO: 4594256 - DNA, 25 bp, Homo sapien
agcaggcgcgggccatgacatcttg

SEQ ID NO: 4594257 - DNA, 25 bp, Homo sapien
gcaggcgcgggccatgacatcttgt

SEQ ID NO: 4594258 - DNA, 25 bp, Homo sapien
caagcaggcgcgggccatgacatct

SEQ ID NO: 4594259 - DNA, 25 bp, Homo sapien
ctcgatgggcaacttgctggctgtg

SEQ ID NO: 4594260 - DNA, 25 bp, Homo sapien
agccccctcgatgggcaacttgctg

SEQ ID NO: 4594261 - DNA, 25 bp, Homo sapien
ttcctgatccatgggatcaccaggg

SEQ ID NO: 4594262 - DNA, 25 bp, Homo sapien
cttcctgatccatgggatcaccagg

SEQ ID NO: 4594263 - DNA, 25 bp, Homo sapien
agggctaaggctaagccgaaggcta

SEQ ID NO: 4594264 - DNA, 25 bp, Homo sapien
aggctaagccgaaggctaggccgcc

SEQ ID NO: 4594265 - DNA, 25 bp, Homo sapien
taaggctaagccgaaggctaggccg

SEQ ID NO: 4594266 - DNA, 25 bp, Homo sapien
gcagggctaaggctaagccgaaggc

SEQ ID NO: 4594267 - DNA, 25 bp, Homo sapien
aacgctcccagttctggttgacagg

SEQ ID NO: 4594268 - DNA, 25 bp, Homo sapien
tgccaggtaacgctcccagttctgg

SEQ ID NO: 4594269 - DNA, 25 bp, Homo sapien
tggagctcctcataagtgccctgtg

SEQ ID NO: 4594270 - DNA, 25 bp, Homo sapien
aacgacttcttcatctcccgctgga

SEQ ID NO: 4594271 - DNA, 25 bp, Homo sapien
cataaccacgctgtatgtgaagccc

SEQ ID NO: 4594272 - DNA, 25 bp, Homo sapien
gaaggtgcacagtaaaccaggaccg

SEQ ID NO: 4594273 - DNA, 25 bp, Homo sapien
gaagggctccattctttcagcctag

SEQ ID NO: 4594274 - DNA, 25 bp, Homo sapien
tacaagggtcacttcataagacaga

SEQ ID NO: 4594275 - DNA, 25 bp, Homo sapien
ctctccaagaagagcggtagctgct

SEQ ID NO: 4594276 - DNA, 25 bp, Homo sapien
tcctgggcacagtactgcatcaggt

SEQ ID NO: 4594277 - DNA, 25 bp, Homo sapien
atgggtggcccacacgtcctgggca

SEQ ID NO: 4594278 - DNA, 25 bp, Homo sapien
ccaagaagagcggtagctgctgctg

SEQ ID NO: 4594279 - DNA, 25 bp, Homo sapien
cacgaatgtccttcatggtgccctt

SEQ ID NO: 4594280 - DNA, 25 bp, Homo sapien
tctcgaggctccttctctaagggag

SEQ ID NO: 4594281 - DNA, 25 bp, Homo sapien
gaggcccccctacataaagtctgtg

SEQ ID NO: 4594282 - DNA, 25 bp, Homo sapien
ggtgcccttcacaaacagttctcga

SEQ ID NO: 4594283 - DNA, 25 bp, Homo sapien
agactgcgctggaagctgcttagcc

SEQ ID NO: 4594284 - DNA, 25 bp, Homo sapien
gtgtccaggaaacgcatgcgggaac

SEQ ID NO: 4594285 - DNA, 25 bp, Homo sapien
gcttagccctgagatggccatgtgc

SEQ ID NO: 4594286 - DNA, 25 bp, Homo sapien
tggggggctggaccttgtgtttgcc

SEQ ID NO: 4594287 - DNA, 25 bp, Homo sapien
gggatgaggtcagccggcgacagct

SEQ ID NO: 4594288 - DNA, 25 bp, Homo sapien
aggaaacattgtgccccaccactaa

SEQ ID NO: 4594289 - DNA, 25 bp, Homo sapien
ggctggtccaagagtaacgctcttc

SEQ ID NO: 4594290 - DNA, 25 bp, Homo sapien
tatgagctcggtcaaaggaaacatt

SEQ ID NO: 4594291 - DNA, 25 bp, Homo sapien
cgagggggatatggccaccgccaat

SEQ ID NO: 4594292 - DNA, 25 bp, Homo sapien
aagcagacctccacgtcgaacacca

SEQ ID NO: 4594293 - DNA, 25 bp, Homo sapien
gccaatgtggggcaagttccctctg

SEQ ID NO: 4594294 - DNA, 25 bp, Homo sapien
gcaagttccctctgccaagcagacc

SEQ ID NO: 4594295 - DNA, 25 bp, Homo sapien
ctccacgtcgggcaagggcacggct

SEQ ID NO: 4594296 - DNA, 25 bp, Homo sapien
ttctgcaggtgctcgacgctgcggc

SEQ ID NO: 4594297 - DNA, 25 bp, Homo sapien
ctccttgcccgaagatttgctcgtg

SEQ ID NO: 4594298 - DNA, 25 bp, Homo sapien
gctcgtgcagccctctcgagagcat

SEQ ID NO: 4594299 - DNA, 25 bp, Homo sapien
gatgtccaatgggttgtgccgcagc

SEQ ID NO: 4594300 - DNA, 25 bp, Homo sapien
ctggatgtccaatgggttgtgccgc

SEQ ID NO: 4594301 - DNA, 25 bp, Homo sapien
tgtccaatgggttgtgccgcagctg

SEQ ID NO: 4594302 - DNA, 25 bp, Homo sapien
tccaatgggttgtgccgcagctgcc

SEQ ID NO: 4594303 - DNA, 25 bp, Homo sapien
ctgcccgtcgctggggtcggacgcg

SEQ ID NO: 4594304 - DNA, 25 bp, Homo sapien
tccgaggatagcacttgcggctgct

SEQ ID NO: 4594305 - DNA, 25 bp, Homo sapien
ccgctgcccgtcgctggggtcggac

SEQ ID NO: 4594306 - DNA, 25 bp, Homo sapien
ctccgaggatagcacttgcggctgc

SEQ ID NO: 4594307 - DNA, 25 bp, Homo sapien
agtgaaatgggtttgaccatgcctg

SEQ ID NO: 4594308 - DNA, 25 bp, Homo sapien
gaagacgtggagagagacacgtcct

SEQ ID NO: 4594309 - DNA, 25 bp, Homo sapien
gggtttgaccatgcctgccttccac

SEQ ID NO: 4594310 - DNA, 25 bp, Homo sapien
ccccacgctgggagtcagaacacct

SEQ ID NO: 4594311 - DNA, 25 bp, Homo sapien
caagcgctcggcaaatggtggctgc

SEQ ID NO: 4594312 - DNA, 25 bp, Homo sapien
tgaccttgggcaaagctccttaggc

SEQ ID NO: 4594313 - DNA, 25 bp, Homo sapien
aacttcgtcagtgaacccacgtggg

SEQ ID NO: 4594314 - DNA, 25 bp, Homo sapien
tgggattacggattctgcctgtcac

SEQ ID NO: 4594315 - DNA, 25 bp, Homo sapien
ccacggcacggcgtcccccttcgcg

SEQ ID NO: 4594316 - DNA, 25 bp, Homo sapien
ggtgcttcccggtctgctgctcccc

SEQ ID NO: 4594317 - DNA, 25 bp, Homo sapien
gcggcctacgcagcctcggggtagc

SEQ ID NO: 4594318 - DNA, 25 bp, Homo sapien
tcggggtagcgtgtggcctccaccc

SEQ ID NO: 4594319 - DNA, 25 bp, Homo sapien
gggctcctgagtgggccatctttac

SEQ ID NO: 4594320 - DNA, 25 bp, Homo sapien
tcaagactgtctagcctcctgccag

SEQ ID NO: 4594321 - DNA, 25 bp, Homo sapien
cagactccatgaccccttcaagact

SEQ ID NO: 4594322 - DNA, 25 bp, Homo sapien
ccctgggtctgatgggccatgaaga

SEQ ID NO: 4594323 - DNA, 25 bp, Homo sapien
aggcgcccccagggcgagatccaag

SEQ ID NO: 4594324 - DNA, 25 bp, Homo sapien
gcaggcgcccccagggcgagatcca

SEQ ID NO: 4594325 - DNA, 25 bp, Homo sapien
cagggcgagatccaagcagcaaact

SEQ ID NO: 4594326 - DNA, 25 bp, Homo sapien
ccccagggcgagatccaagcagcaa

SEQ ID NO: 4594327 - DNA, 25 bp, Homo sapien
gactaacccgttagcagggctggca

SEQ ID NO: 4594328 - DNA, 25 bp, Homo sapien
acacagaagggtggcatcactgagt

SEQ ID NO: 4594329 - DNA, 25 bp, Homo sapien
gtggcatcactgagtttcgatttag

SEQ ID NO: 4594330 - DNA, 25 bp, Homo sapien
tctgcagatccatgtgctctaaggt

SEQ ID NO: 4594331 - DNA, 25 bp, Homo sapien
aagctgcaaatggactggacctgcc

SEQ ID NO: 4594332 - DNA, 25 bp, Homo sapien
cctgcagatatgagagggaccctgg

SEQ ID NO: 4594333 - DNA, 25 bp, Homo sapien
ctgcaagaatcgagggtaaggtccc

SEQ ID NO: 4594334 - DNA, 25 bp, Homo sapien
cctgacctgtagtggttgagaggca

SEQ ID NO: 4594335 - DNA, 25 bp, Homo sapien
ccactgttgcggctacttggagtga

SEQ ID NO: 4594336 - DNA, 25 bp, Homo sapien
tgagcacgaagtggtacccataggc

SEQ ID NO: 4594337 - DNA, 25 bp, Homo sapien
tggtaccaccaattcagctgccagc

SEQ ID NO: 4594338 - DNA, 25 bp, Homo sapien
aggtgaatcatagggctcaaggctg

SEQ ID NO: 4594339 - DNA, 25 bp, Homo sapien
gtgaccaatcagctctgacctaggg

SEQ ID NO: 4594340 - DNA, 25 bp, Homo sapien
gcagtgctgcccatcgcagagggca

SEQ ID NO: 4594341 - DNA, 25 bp, Homo sapien
ggatttctccaacccgggtatgcgc

SEQ ID NO: 4594342 - DNA, 25 bp, Homo sapien
caagtcttcactccgcctagatggg

SEQ ID NO: 4594343 - DNA, 25 bp, Homo sapien
tgtgaaaagctccaaaccgcctttc

SEQ ID NO: 4594344 - DNA, 25 bp, Homo sapien
ggccagggcctcaatgacaggacct

SEQ ID NO: 4594345 - DNA, 25 bp, Homo sapien
caggctaattggttttggttcaagg

SEQ ID NO: 4594346 - DNA, 25 bp, Homo sapien
aagtggtcccggcattcactggcca

SEQ ID NO: 4594347 - DNA, 25 bp, Homo sapien
ccgaggtctgttaatgagctgggga

SEQ ID NO: 4594348 - DNA, 25 bp, Homo sapien
caggtgagcctcacacgttccaact

SEQ ID NO: 4594349 - DNA, 25 bp, Homo sapien
gtgagcctcacacgttccaacttgg

SEQ ID NO: 4594350 - DNA, 25 bp, Homo sapien
ggacaggtgagcctcacacgttcca

SEQ ID NO: 4594351 - DNA, 25 bp, Homo sapien
tctttcacctcaggcccaatggata

SEQ ID NO: 4594352 - DNA, 25 bp, Homo sapien
tttcacctcaggcccaatggatata

SEQ ID NO: 4594353 - DNA, 25 bp, Homo sapien
ctttcacctcaggcccaatggatat

SEQ ID NO: 4594354 - DNA, 25 bp, Homo sapien
tcacctcaggcccaatggatatata

SEQ ID NO: 4594355 - DNA, 25 bp, Homo sapien
tgtaaaaataccaagccctccctga

SEQ ID NO: 4594356 - DNA, 25 bp, Homo sapien
gatgaaatcccttgtaaggaactca

SEQ ID NO: 4594357 - DNA, 25 bp, Homo sapien
taatggaggttgtctcttacagagg

SEQ ID NO: 4594358 - DNA, 25 bp, Homo sapien
aactcaagagaggagcgtttcctca

SEQ ID NO: 4594359 - DNA, 25 bp, Homo sapien
gttctagcaccggaggcggcttctt

SEQ ID NO: 4594360 - DNA, 25 bp, Homo sapien
tcattaccgcgaggcctagaggaaa

SEQ ID NO: 4594361 - DNA, 25 bp, Homo sapien
ggcaagagcctaagcaaagaatcct

SEQ ID NO: 4594362 - DNA, 25 bp, Homo sapien
aacaggcacaaactcggaagccgcg

SEQ ID NO: 4594363 - DNA, 25 bp, Homo sapien
tcagatgttggtgcactgggtgttc

SEQ ID NO: 4594364 - DNA, 25 bp, Homo sapien
tgtcacttagcctgatagttctcat

SEQ ID NO: 4594365 - DNA, 25 bp, Homo sapien
tctcgttttaaatgggtgcatgtcc

SEQ ID NO: 4594366 - DNA, 25 bp, Homo sapien
gggcctcaggatgcttgtcacttag

SEQ ID NO: 4594367 - DNA, 25 bp, Homo sapien
tccagttgcaccaaatcgaaagagg

SEQ ID NO: 4594368 - DNA, 25 bp, Homo sapien
tggagaaagtatcccacagtcactg

SEQ ID NO: 4594369 - DNA, 25 bp, Homo sapien
taagtgccaggcttactgtctctgg

SEQ ID NO: 4594370 - DNA, 25 bp, Homo sapien
tggcttcagccacgggccattttgg

SEQ ID NO: 4594371 - DNA, 25 bp, Homo sapien
ccgggagccttaggatgcctggctc

SEQ ID NO: 4594372 - DNA, 25 bp, Homo sapien
agattgtttggagcgcgccgggagc

SEQ ID NO: 4594373 - DNA, 25 bp, Homo sapien
tctccgagggaacgcggggatctca

SEQ ID NO: 4594374 - DNA, 25 bp, Homo sapien
gggatctcaggactcacgagcccaa

SEQ ID NO: 4594375 - DNA, 25 bp, Homo sapien
cttggtagcatatggtttcctgcca

SEQ ID NO: 4594376 - DNA, 25 bp, Homo sapien
ttatatctggtccttggagaactgt

SEQ ID NO: 4594377 - DNA, 25 bp, Homo sapien
ctctgggcatatccttggtagcata

SEQ ID NO: 4594378 - DNA, 25 bp, Homo sapien
ccatgctctgggcatatccttggta

SEQ ID NO: 4594379 - DNA, 25 bp, Homo sapien
tatcggagtttcctagcacgttcca

SEQ ID NO: 4594380 - DNA, 25 bp, Homo sapien
catttatactgaacgcaggcggccg

SEQ ID NO: 4594381 - DNA, 25 bp, Homo sapien
gactcttgctaatgactgggtagga

SEQ ID NO: 4594382 - DNA, 25 bp, Homo sapien
ttgcatgactcatggcggtggccac

SEQ ID NO: 4594383 - DNA, 25 bp, Homo sapien
ggctcgtttagtccccgtggagtca

SEQ ID NO: 4594384 - DNA, 25 bp, Homo sapien
tcctagtcctggaacaagggctcca

SEQ ID NO: 4594385 - DNA, 25 bp, Homo sapien
ttgcaaatcggacccctgcgggaaa

SEQ ID NO: 4594386 - DNA, 25 bp, Homo sapien
ggcatctcacaagcgccttcttctg

SEQ ID NO: 4594387 - DNA, 25 bp, Homo sapien
gggatctggccttgaacgggacatt

SEQ ID NO: 4594388 - DNA, 25 bp, Homo sapien
aaagcccggagactccaccttggca

SEQ ID NO: 4594389 - DNA, 25 bp, Homo sapien
gatctggccttgaacgggacattcc

SEQ ID NO: 4594390 - DNA, 25 bp, Homo sapien
cccggagactccaccttggcatggg

SEQ ID NO: 4594391 - DNA, 25 bp, Homo sapien
agcgccaggttttctcgtccactac

SEQ ID NO: 4594392 - DNA, 25 bp, Homo sapien
tctgcttccggcagcgccaggtttt

SEQ ID NO: 4594393 - DNA, 25 bp, Homo sapien
gcgccaggttttctcgtccactact

SEQ ID NO: 4594394 - DNA, 25 bp, Homo sapien
tcattctgcttccggcagcgccagg

SEQ ID NO: 4594395 - DNA, 25 bp, Homo sapien
ttcgccccagagcaggcgggtttgg

SEQ ID NO: 4594396 - DNA, 25 bp, Homo sapien
cttcgccccagagcaggcgggtttg

SEQ ID NO: 4594397 - DNA, 25 bp, Homo sapien
cgccccagagcaggcgggtttggcc

SEQ ID NO: 4594398 - DNA, 25 bp, Homo sapien
tcgccccagagcaggcgggtttggc

SEQ ID NO: 4594399 - DNA, 25 bp, Homo sapien
tggcagtatatttgcccagtcccca

SEQ ID NO: 4594400 - DNA, 25 bp, Homo sapien
ttgcccagtccccatcggaggttgc

SEQ ID NO: 4594401 - DNA, 25 bp, Homo sapien
tgcccagtccccatcggaggttgcg

SEQ ID NO: 4594402 - DNA, 25 bp, Homo sapien
tttgggtggcagtatatttgcccag

SEQ ID NO: 4594403 - DNA, 25 bp, Homo sapien
ggcaatggcagacatggtgggttta

SEQ ID NO: 4594404 - DNA, 25 bp, Homo sapien
ctgggcaatggcagacatggtgggt

SEQ ID NO: 4594405 - DNA, 25 bp, Homo sapien
tgggcaatggcagacatggtgggtt

SEQ ID NO: 4594406 - DNA, 25 bp, Homo sapien
caatggcagacatggtgggtttagc

SEQ ID NO: 4594407 - DNA, 25 bp, Homo sapien
ctcttgtcttgaccaggatgacatg

SEQ ID NO: 4594408 - DNA, 25 bp, Homo sapien
tgtcttgaccaggatgacatgtgat

SEQ ID NO: 4594409 - DNA, 25 bp, Homo sapien
gcctcttgtcttgaccaggatgaca

SEQ ID NO: 4594410 - DNA, 25 bp, Homo sapien
gtagcctcttgtcttgaccaggatg

SEQ ID NO: 4594411 - DNA, 25 bp, Homo sapien
ttagcattcagagcccttgatgaat

SEQ ID NO: 4594412 - DNA, 25 bp, Homo sapien
gagggggtctgccaaggccggctgg

SEQ ID NO: 4594413 - DNA, 25 bp, Homo sapien
aaggccggctggcagtcctgcagct

SEQ ID NO: 4594414 - DNA, 25 bp, Homo sapien
tcagagcccttgatgaataggtggg

SEQ ID NO: 4594415 - DNA, 25 bp, Homo sapien
gaggatttgctgatatgcaggcagc

SEQ ID NO: 4594416 - DNA, 25 bp, Homo sapien
aggacccaggaagacgccgtgtgct

SEQ ID NO: 4594417 - DNA, 25 bp, Homo sapien
cattcacccgctgcaaagtattttt

SEQ ID NO: 4594418 - DNA, 25 bp, Homo sapien
tggaggatttgctgatatgcaggca

SEQ ID NO: 4594419 - DNA, 25 bp, Homo sapien
tgtgggccaccccaagaggcagctg

SEQ ID NO: 4594420 - DNA, 25 bp, Homo sapien
tggtggattgagtgtgggccacccc

SEQ ID NO: 4594421 - DNA, 25 bp, Homo sapien
tggattgagtgtgggccaccccaag

SEQ ID NO: 4594422 - DNA, 25 bp, Homo sapien
ttgagtgtgggccaccccaagaggc

SEQ ID NO: 4594423 - DNA, 25 bp, Homo sapien
gcagggtcctcgtgcctgctgtgag

SEQ ID NO: 4594424 - DNA, 25 bp, Homo sapien
cagggtcctcgtgcctgctgtgagc

SEQ ID NO: 4594425 - DNA, 25 bp, Homo sapien
gcctgcagggtcctcgtgcctgctg

SEQ ID NO: 4594426 - DNA, 25 bp, Homo sapien
ggtagcggtgagagtgcagccacag

SEQ ID NO: 4594427 - DNA, 25 bp, Homo sapien
cagaagctcagggtagcggtgagag

SEQ ID NO: 4594428 - DNA, 25 bp, Homo sapien
aagctcagggtagcggtgagagtgc

SEQ ID NO: 4594429 - DNA, 25 bp, Homo sapien
ctcagggtagcggtgagagtgcagc

SEQ ID NO: 4594430 - DNA, 25 bp, Homo sapien
gcttgggttcctgggtctcacaggg

SEQ ID NO: 4594431 - DNA, 25 bp, Homo sapien
tgtgtacaggcaagacgatgtcgtc

SEQ ID NO: 4594432 - DNA, 25 bp, Homo sapien
gctgtgtacaggcaagacgatgtcg

SEQ ID NO: 4594433 - DNA, 25 bp, Homo sapien
agacgatgtcgtcttgcttgggttc

SEQ ID NO: 4594434 - DNA, 25 bp, Homo sapien
tatgtggtgccgtgcggtcagagac

SEQ ID NO: 4594435 - DNA, 25 bp, Homo sapien
atgtggtgccgtgcggtcagagacc

SEQ ID NO: 4594436 - DNA, 25 bp, Homo sapien
tgtggtatgtggtgccgtgcggtca

SEQ ID NO: 4594437 - DNA, 25 bp, Homo sapien
ggtatgtggtgccgtgcggtcagag

SEQ ID NO: 4594438 - DNA, 25 bp, Homo sapien
gggctctaggttctggttgccgcct

SEQ ID NO: 4594439 - DNA, 25 bp, Homo sapien
cgggggtagcggcaggggctctagg

SEQ ID NO: 4594440 - DNA, 25 bp, Homo sapien
ctctgtgtcagcgggggtagcggca

SEQ ID NO: 4594441 - DNA, 25 bp, Homo sapien
tctaggttctggttgccgcctgcca

SEQ ID NO: 4594442 - DNA, 25 bp, Homo sapien
gaagccattcttgcaaacaagtgcc

SEQ ID NO: 4594443 - DNA, 25 bp, Homo sapien
tccgggttgatctctttgaagccat

SEQ ID NO: 4594444 - DNA, 25 bp, Homo sapien
tgcaaagggctctccgggttgatct

SEQ ID NO: 4594445 - DNA, 25 bp, Homo sapien
ttcaccagcttgcaaagggctctcc

SEQ ID NO: 4594446 - DNA, 25 bp, Homo sapien
gattggcctagctttgtcaagtgcc

SEQ ID NO: 4594447 - DNA, 25 bp, Homo sapien
tcacaaattcagaggcaggcgatgc

SEQ ID NO: 4594448 - DNA, 25 bp, Homo sapien
gttttacaggccactctcagttggg

SEQ ID NO: 4594449 - DNA, 25 bp, Homo sapien
caaagtatgggtcaggactgggtcc

SEQ ID NO: 4594450 - DNA, 25 bp, Homo sapien
caaagacacaatatcttggagcagc

SEQ ID NO: 4594451 - DNA, 25 bp, Homo sapien
tggtgtccctgtagctgagactctg

SEQ ID NO: 4594452 - DNA, 25 bp, Homo sapien
tcacacatgtgccattgagcccaag

SEQ ID NO: 4594453 - DNA, 25 bp, Homo sapien
catttgggtagtccactctgtactc

SEQ ID NO: 4594454 - DNA, 25 bp, Homo sapien
ggaccccgtctttctggcacctctg

SEQ ID NO: 4594455 - DNA, 25 bp, Homo sapien
ctttcaggaccccgtctttctggca

SEQ ID NO: 4594456 - DNA, 25 bp, Homo sapien
tttcaggaccccgtctttctggcac

SEQ ID NO: 4594457 - DNA, 25 bp, Homo sapien
ccccgtctttctggcacctctgagt

SEQ ID NO: 4594458 - DNA, 25 bp, Homo sapien
tagagccagggtctccggcttccat

SEQ ID NO: 4594459 - DNA, 25 bp, Homo sapien
tcaatccggtgaagcaaactgtcca

SEQ ID NO: 4594460 - DNA, 25 bp, Homo sapien
cacaatgtttttcaatccggtgaag

SEQ ID NO: 4594461 - DNA, 25 bp, Homo sapien
aaactgtccaattagagccagggtc

SEQ ID NO: 4594462 - DNA, 25 bp, Homo sapien
ttggcagctgctgacaagttccaga

SEQ ID NO: 4594463 - DNA, 25 bp, Homo sapien
cagctgctgacaagttccagaaaca

SEQ ID NO: 4594464 - DNA, 25 bp, Homo sapien
ttaattaacatgctcctcttggcag

SEQ ID NO: 4594465 - DNA, 25 bp, Homo sapien
cctcttggcagctgctgacaagttc

SEQ ID NO: 4594466 - DNA, 25 bp, Homo sapien
tggtgactggcagctaagttgtctc

SEQ ID NO: 4594467 - DNA, 25 bp, Homo sapien
tagaagagcctcataggtggtgact

SEQ ID NO: 4594468 - DNA, 25 bp, Homo sapien
cgcacacaacacagagaggtctggg

SEQ ID NO: 4594469 - DNA, 25 bp, Homo sapien
gaacccggcttggatgcccactttg

SEQ ID NO: 4594470 - DNA, 25 bp, Homo sapien
ggaggcaccttgaggccaagccagc

SEQ ID NO: 4594471 - DNA, 25 bp, Homo sapien
gtggaggcaccttgaggccaagcca

SEQ ID NO: 4594472 - DNA, 25 bp, Homo sapien
gaggcaccttgaggccaagccagca

SEQ ID NO: 4594473 - DNA, 25 bp, Homo sapien
ggggtggaggcaccttgaggccaag

SEQ ID NO: 4594474 - DNA, 25 bp, Homo sapien
taggtcagcaccagctcctctgggc

SEQ ID NO: 4594475 - DNA, 25 bp, Homo sapien
ctaggtcagcaccagctcctctggg

SEQ ID NO: 4594476 - DNA, 25 bp, Homo sapien
ctctgggccccaggacagtctgtgg

SEQ ID NO: 4594477 - DNA, 25 bp, Homo sapien
tgggccccaggacagtctgtggagc

SEQ ID NO: 4594478 - DNA, 25 bp, Homo sapien
ggacaccatgggtactgagggtact

SEQ ID NO: 4594479 - DNA, 25 bp, Homo sapien
atgtagacagtgctgttcccttcag

SEQ ID NO: 4594480 - DNA, 25 bp, Homo sapien
cctcagggatgtagacagtgctgtt

SEQ ID NO: 4594481 - DNA, 25 bp, Homo sapien
accaagggtaccgaggaagccatgg

SEQ ID NO: 4594482 - DNA, 25 bp, Homo sapien
tatagagctgagaggtgtgaacttg

SEQ ID NO: 4594483 - DNA, 25 bp, Homo sapien
gagcatccccgcaagagatcctgta

SEQ ID NO: 4594484 - DNA, 25 bp, Homo sapien
tcagcaggttacacctatcacaggt

SEQ ID NO: 4594485 - DNA, 25 bp, Homo sapien
gatagtgttccttccattggcacag

SEQ ID NO: 4594486 - DNA, 25 bp, Homo sapien
tttccagattttctttaatgagcgc

SEQ ID NO: 4594487 - DNA, 25 bp, Homo sapien
ttactgtatttccagattttcttta

SEQ ID NO: 4594488 - DNA, 25 bp, Homo sapien
tgtatttccagattttctttaatga

SEQ ID NO: 4594489 - DNA, 25 bp, Homo sapien
tatttccagattttctttaatgagc

SEQ ID NO: 4594490 - DNA, 25 bp, Homo sapien
tgggtgttagaatccccgaggaagc

SEQ ID NO: 4594491 - DNA, 25 bp, Homo sapien
ctgtgattcctaacccaggctgggt

SEQ ID NO: 4594492 - DNA, 25 bp, Homo sapien
catggagactgaagctgagcactgc

SEQ ID NO: 4594493 - DNA, 25 bp, Homo sapien
gagtcccggtccctactgaatcaga

SEQ ID NO: 4594494 - DNA, 25 bp, Homo sapien
cagaatggtaatctcaaaatgagcc

SEQ ID NO: 4594495 - DNA, 25 bp, Homo sapien
agcagttctcatctgaaggttgtcc

SEQ ID NO: 4594496 - DNA, 25 bp, Homo sapien
ccccagaatggtaatctcaaaatga

SEQ ID NO: 4594497 - DNA, 25 bp, Homo sapien
ccagtagaccgcatcctcaaagcag

SEQ ID NO: 4594498 - DNA, 25 bp, Homo sapien
ttctctggctcagccattcctgctc

SEQ ID NO: 4594499 - DNA, 25 bp, Homo sapien
tgcttctccacccagggagccccac

SEQ ID NO: 4594500 - DNA, 25 bp, Homo sapien
ctctggctcagccattcctgctcac

SEQ ID NO: 4594501 - DNA, 25 bp, Homo sapien
gtgccgcatgccctttgcttctcca

SEQ ID NO: 4594502 - DNA, 25 bp, Homo sapien
aatgatgccacccatcagggccatg

SEQ ID NO: 4594503 - DNA, 25 bp, Homo sapien
ccacaatgatgccacccatcagggc

SEQ ID NO: 4594504 - DNA, 25 bp, Homo sapien
ccagggtcaccaagagaccataaat

SEQ ID NO: 4594505 - DNA, 25 bp, Homo sapien
gccagggtcaccaagagaccataaa

SEQ ID NO: 4594506 - DNA, 25 bp, Homo sapien
tgttcttgcggtccagtccccgttg

SEQ ID NO: 4594507 - DNA, 25 bp, Homo sapien
ctgtgttcttgcggtccagtccccg

SEQ ID NO: 4594508 - DNA, 25 bp, Homo sapien
tcttgcggtccagtccccgttgaaa

SEQ ID NO: 4594509 - DNA, 25 bp, Homo sapien
tgtgttcttgcggtccagtccccgt

SEQ ID NO: 4594510 - DNA, 25 bp, Homo sapien
ttccatagacttcaaggctggcgga

SEQ ID NO: 4594511 - DNA, 25 bp, Homo sapien
gctgtcacagcacccacgatgccgc

SEQ ID NO: 4594512 - DNA, 25 bp, Homo sapien
tggcggaggccgctgtcacagcacc

SEQ ID NO: 4594513 - DNA, 25 bp, Homo sapien
catagacttcaaggctggcggaggc

SEQ ID NO: 4594514 - DNA, 25 bp, Homo sapien
attgttaatgccacatgtgtcctgg

SEQ ID NO: 4594515 - DNA, 25 bp, Homo sapien
gaatgccatgcagattgttaatgcc

SEQ ID NO: 4594516 - DNA, 25 bp, Homo sapien
aggaatgccatgcagattgttaatg

SEQ ID NO: 4594517 - DNA, 25 bp, Homo sapien
agattgttaatgccacatgtgtcct

SEQ ID NO: 4594518 - DNA, 25 bp, Homo sapien
caccgtaaggcatgagcatcatctc

SEQ ID NO: 4594519 - DNA, 25 bp, Homo sapien
atgagggcaccgtaaggcatgagca

SEQ ID NO: 4594520 - DNA, 25 bp, Homo sapien
cccctcctgcgagcgtggcattctg

SEQ ID NO: 4594521 - DNA, 25 bp, Homo sapien
cagacgaagccgatgatgagggcac

SEQ ID NO: 4594522 - DNA, 25 bp, Homo sapien
tattgccaccgaggtaagcacgcag

SEQ ID NO: 4594523 - DNA, 25 bp, Homo sapien
tgtgcagggcactggatattgccac

SEQ ID NO: 4594524 - DNA, 25 bp, Homo sapien
gctgtccccatggtaggatatggct

SEQ ID NO: 4594525 - DNA, 25 bp, Homo sapien
gatatggctgagttgaagctgggcc

SEQ ID NO: 4594526 - DNA, 25 bp, Homo sapien
ttagctctagagatgaccccacacc

SEQ ID NO: 4594527 - DNA, 25 bp, Homo sapien
gaggagaggcattagatacagcccc

SEQ ID NO: 4594528 - DNA, 25 bp, Homo sapien
cctctgcagctttagtcatgcaggg

SEQ ID NO: 4594529 - DNA, 25 bp, Homo sapien
cccgggaggagaggcattagataca

SEQ ID NO: 4594530 - DNA, 25 bp, Homo sapien
tcatggtggccctcggtcatgatgg

SEQ ID NO: 4594531 - DNA, 25 bp, Homo sapien
ccctcggtcatgatggcagttctca

SEQ ID NO: 4594532 - DNA, 25 bp, Homo sapien
tggccctcggtcatgatggcagttc

SEQ ID NO: 4594533 - DNA, 25 bp, Homo sapien
cctcggtcatgatggcagttctcac

SEQ ID NO: 4594534 - DNA, 25 bp, Homo sapien
tctaggttgcgtcggtagaggatcc

SEQ ID NO: 4594535 - DNA, 25 bp, Homo sapien
catggcaaagaggtccgactggtac

SEQ ID NO: 4594536 - DNA, 25 bp, Homo sapien
tgtgagcccaaagtaggcgccaaat

SEQ ID NO: 4594537 - DNA, 25 bp, Homo sapien
taggcgccaaatgtgtggatggtca

SEQ ID NO: 4594538 - DNA, 25 bp, Homo sapien
ctcatccccattctgagccctgctc

SEQ ID NO: 4594539 - DNA, 25 bp, Homo sapien
acctcatccccattctgagccctgc

SEQ ID NO: 4594540 - DNA, 25 bp, Homo sapien
cacctcatccccattctgagccctg

SEQ ID NO: 4594541 - DNA, 25 bp, Homo sapien
catccccattctgagccctgctcac

SEQ ID NO: 4594542 - DNA, 25 bp, Homo sapien
tgactttacccagaactgccccaaa

SEQ ID NO: 4594543 - DNA, 25 bp, Homo sapien
acagcgaagagggtcacttggaaga

SEQ ID NO: 4594544 - DNA, 25 bp, Homo sapien
gaatgaactcattcacagcgaagag

SEQ ID NO: 4594545 - DNA, 25 bp, Homo sapien
gaggccacgcagaagtcagcgttga

SEQ ID NO: 4594546 - DNA, 25 bp, Homo sapien
tgtggggagacaggccagtggagaa

SEQ ID NO: 4594547 - DNA, 25 bp, Homo sapien
ctgtggggagacaggccagtggaga

SEQ ID NO: 4594548 - DNA, 25 bp, Homo sapien
gtggggagacaggccagtggagaag

SEQ ID NO: 4594549 - DNA, 25 bp, Homo sapien
catgaagaggatctatgtccaggga

SEQ ID NO: 4594550 - DNA, 25 bp, Homo sapien
atgaagaggatctatgtccagggaa

SEQ ID NO: 4594551 - DNA, 25 bp, Homo sapien
ccatgaagaggatctatgtccaggg

SEQ ID NO: 4594552 - DNA, 25 bp, Homo sapien
caggaaggagggagctggggtggta

SEQ ID NO: 4594553 - DNA, 25 bp, Homo sapien
tgcaggaaggagggagctggggtgg

SEQ ID NO: 4594554 - DNA, 25 bp, Homo sapien
ctgcaggaaggagggagctggggtg

SEQ ID NO: 4594555 - DNA, 25 bp, Homo sapien
gcaggaaggagggagctggggtggt

SEQ ID NO: 4594556 - DNA, 25 bp, Homo sapien
cccacgacgatgtagcggtcttgta

SEQ ID NO: 4594557 - DNA, 25 bp, Homo sapien
ccgtagcgctgcaggaaagtcatga

SEQ ID NO: 4594558 - DNA, 25 bp, Homo sapien
gaccatcacgtgcacgtcctggaag

SEQ ID NO: 4594559 - DNA, 25 bp, Homo sapien
tcttgtaagaagtggaaccagccct

SEQ ID NO: 4594560 - DNA, 25 bp, Homo sapien
tggcgaaggttcgtcccagccctgg

SEQ ID NO: 4594561 - DNA, 25 bp, Homo sapien
tggtctggcgaaggttcgtcccagc

SEQ ID NO: 4594562 - DNA, 25 bp, Homo sapien
actcggtggtctggcgaaggttcgt

SEQ ID NO: 4594563 - DNA, 25 bp, Homo sapien
cagcccgggactcggtggtctggcg

SEQ ID NO: 4594564 - DNA, 25 bp, Homo sapien
ggtcctttcgatgagaagggtgtca

SEQ ID NO: 4594565 - DNA, 25 bp, Homo sapien
tcagttgcctggtggtatagaggcg

SEQ ID NO: 4594566 - DNA, 25 bp, Homo sapien
cctggtggtatagaggcgacatgct

SEQ ID NO: 4594567 - DNA, 25 bp, Homo sapien
caggggcgaagctgaagaggaccaa

SEQ ID NO: 4594568 - DNA, 25 bp, Homo sapien
ggactcggatcttcttagtatacca

SEQ ID NO: 4594569 - DNA, 25 bp, Homo sapien
catccactggttggtaatggggcga

SEQ ID NO: 4594570 - DNA, 25 bp, Homo sapien
tatttggagtaagcgctcctctgga

SEQ ID NO: 4594571 - DNA, 25 bp, Homo sapien
cagggctggcgcttatttggagtaa

SEQ ID NO: 4594572 - DNA, 25 bp, Homo sapien
acagggatgttggggggctctgacg

SEQ ID NO: 4594573 - DNA, 25 bp, Homo sapien
cagggatgttggggggctctgacgg

SEQ ID NO: 4594574 - DNA, 25 bp, Homo sapien
ctgacagggatgttggggggctctg

SEQ ID NO: 4594575 - DNA, 25 bp, Homo sapien
gacagggatgttggggggctctgac

SEQ ID NO: 4594576 - DNA, 25 bp, Homo sapien
gcagaggccggcgagatgcggagtc

SEQ ID NO: 4594577 - DNA, 25 bp, Homo sapien
catctgacaatttcccacgcatgcc

SEQ ID NO: 4594578 - DNA, 25 bp, Homo sapien
ggcgagatgcggagtccgcggctgc

SEQ ID NO: 4594579 - DNA, 25 bp, Homo sapien
ggaccggcgcggatatgcctccgct

SEQ ID NO: 4594580 - DNA, 25 bp, Homo sapien
gcctcgaagtcgtagcgcacgaaca

SEQ ID NO: 4594581 - DNA, 25 bp, Homo sapien
gaatcaccataatcacctgcaggag

SEQ ID NO: 4594582 - DNA, 25 bp, Homo sapien
gctcaagttcttgtgcgtcctctct

SEQ ID NO: 4594583 - DNA, 25 bp, Homo sapien
gaattcgttctccatgtcgctcaag

SEQ ID NO: 4594584 - DNA, 25 bp, Homo sapien
cacggagcagctgactcgggcaccg

SEQ ID NO: 4594585 - DNA, 25 bp, Homo sapien
tggcagcgggcggttcggacgctcg

SEQ ID NO: 4594586 - DNA, 25 bp, Homo sapien
tggcaggggcccaacccaagccgag

SEQ ID NO: 4594587 - DNA, 25 bp, Homo sapien
gcgctcgcccaactggcaggggccc

SEQ ID NO: 4594588 - DNA, 25 bp, Homo sapien
caggctggcctgcttaaaggatagg

SEQ ID NO: 4594589 - DNA, 25 bp, Homo sapien
agggaagccggggtgtcttgctcat

SEQ ID NO: 4594590 - DNA, 25 bp, Homo sapien
ctggcctgcttaaaggatagggaag

SEQ ID NO: 4594591 - DNA, 25 bp, Homo sapien
gatagggaagccggggtgtcttgct

SEQ ID NO: 4594592 - DNA, 25 bp, Homo sapien
gaactgggcgctcctaggagtcaaa

SEQ ID NO: 4594593 - DNA, 25 bp, Homo sapien
catagggtgagcacataccaggcgc

SEQ ID NO: 4594594 - DNA, 25 bp, Homo sapien
ggagtcaaacacgaagctaagcctt

SEQ ID NO: 4594595 - DNA, 25 bp, Homo sapien
aaagccattgtggtgctatcaaccg

SEQ ID NO: 4594596 - DNA, 25 bp, Homo sapien
gagtatgaccatcccctcgttgtga

SEQ ID NO: 4594597 - DNA, 25 bp, Homo sapien
gacagggcctggtaagctctgcatt

SEQ ID NO: 4594598 - DNA, 25 bp, Homo sapien
ggttgaccctcactccgaaggagaa

SEQ ID NO: 4594599 - DNA, 25 bp, Homo sapien
gaggactgtatctctgcccctgagg

SEQ ID NO: 4594600 - DNA, 25 bp, Homo sapien
ggtcttatgctaggtgctcctctca

SEQ ID NO: 4594601 - DNA, 25 bp, Homo sapien
taggtgctcctctcaacaggttctt

SEQ ID NO: 4594602 - DNA, 25 bp, Homo sapien
tatgctaggtgctcctctcaacagg

SEQ ID NO: 4594603 - DNA, 25 bp, Homo sapien
cacaagccaggtcttatgctaggtg

SEQ ID NO: 4594604 - DNA, 25 bp, Homo sapien
gcaaatggatctgagtgcccagggt

SEQ ID NO: 4594605 - DNA, 25 bp, Homo sapien
catctttgcttaaagcccaagggct

SEQ ID NO: 4594606 - DNA, 25 bp, Homo sapien
tggtccatggtcgaagcgagagtaa

SEQ ID NO: 4594607 - DNA, 25 bp, Homo sapien
ggagggacggctttctagatgaaca

SEQ ID NO: 4594608 - DNA, 25 bp, Homo sapien
gtgaaccccggcaacatcattaaaa

SEQ ID NO: 4594609 - DNA, 25 bp, Homo sapien
aacttccttgtaaataatcgactgt

SEQ ID NO: 4594610 - DNA, 25 bp, Homo sapien
aaaggaacactgagctttcgctgtt

SEQ ID NO: 4594611 - DNA, 25 bp, Homo sapien
caaatattgtgggagaaacagaacg

SEQ ID NO: 4594612 - DNA, 25 bp, Homo sapien
tgccaccagaccattcaggtacatg

SEQ ID NO: 4594613 - DNA, 25 bp, Homo sapien
gatcaggcaagtttcagatctgttt

SEQ ID NO: 4594614 - DNA, 25 bp, Homo sapien
ctggcctgttgaggcttgaatcttc

SEQ ID NO: 4594615 - DNA, 25 bp, Homo sapien
caggtacatggtgtttttactacca

SEQ ID NO: 4594616 - DNA, 25 bp, Homo sapien
gattctgatttaggagacctgcagt

SEQ ID NO: 4594617 - DNA, 25 bp, Homo sapien
ttagatcatccagctccaattgcag

SEQ ID NO: 4594618 - DNA, 25 bp, Homo sapien
gcagcagatgttgcagtatttcaag

SEQ ID NO: 4594619 - DNA, 25 bp, Homo sapien
caggtgccacttggaatagtaaccc

SEQ ID NO: 4594620 - DNA, 25 bp, Homo sapien
gtgagagtgagccctggatagacac

SEQ ID NO: 4594621 - DNA, 25 bp, Homo sapien
tcatccatacggcagtgtggtgaga

SEQ ID NO: 4594622 - DNA, 25 bp, Homo sapien
catccatacggcagtgtggtgagag

SEQ ID NO: 4594623 - DNA, 25 bp, Homo sapien
gtgtggtgagagtgagccctggata

SEQ ID NO: 4594624 - DNA, 25 bp, Homo sapien
aacaccagaatttgtggtgtggcct

SEQ ID NO: 4594625 - DNA, 25 bp, Homo sapien
caacaccagaatttgtggtgtggcc

SEQ ID NO: 4594626 - DNA, 25 bp, Homo sapien
acaccagaatttgtggtgtggcctt

SEQ ID NO: 4594627 - DNA, 25 bp, Homo sapien
tgggagggtccccttggcctgatgc

SEQ ID NO: 4594628 - DNA, 25 bp, Homo sapien
ccttggcctgatgcttggtccccag

SEQ ID NO: 4594629 - DNA, 25 bp, Homo sapien
ccagccctggctttatggacaccat

SEQ ID NO: 4594630 - DNA, 25 bp, Homo sapien
ggtccccttggcctgatgcttggtc

SEQ ID NO: 4594631 - DNA, 25 bp, Homo sapien
tcctccaaaggctacatctttggga

SEQ ID NO: 4594632 - DNA, 25 bp, Homo sapien
gaatgctgacaaatttgtcctccaa

SEQ ID NO: 4594633 - DNA, 25 bp, Homo sapien
ttgagtcttcttcggctgccagcac

SEQ ID NO: 4594634 - DNA, 25 bp, Homo sapien
caaagtcagcgtctgcacaggtgcc

SEQ ID NO: 4594635 - DNA, 25 bp, Homo sapien
caacacttattaaagttacatcttc

SEQ ID NO: 4594636 - DNA, 25 bp, Homo sapien
caacattaagcagactacgccatgc

SEQ ID NO: 4594637 - DNA, 25 bp, Homo sapien
tattaaagttacatcttcccaccca

SEQ ID NO: 4594638 - DNA, 25 bp, Homo sapien
tacgccatgcacacattacctttaa

SEQ ID NO: 4594639 - DNA, 25 bp, Homo sapien
aacctgagaggtggaggttcctgtg

SEQ ID NO: 4594640 - DNA, 25 bp, Homo sapien
tgagaggtggaggttcctgtgagcc

SEQ ID NO: 4594641 - DNA, 25 bp, Homo sapien
tgaacctgagaggtggaggttcctg

SEQ ID NO: 4594642 - DNA, 25 bp, Homo sapien
cctgagaggtggaggttcctgtgag

SEQ ID NO: 4594643 - DNA, 25 bp, Homo sapien
gctgtggatggtctagaggataaac

SEQ ID NO: 4594644 - DNA, 25 bp, Homo sapien
ccttcaaagagatcactaaagcggg

SEQ ID NO: 4594645 - DNA, 25 bp, Homo sapien
tcaagaagaacaaaggtaccacatt

SEQ ID NO: 4594646 - DNA, 25 bp, Homo sapien
tcagaagtgaccaaagttcgaagaa

SEQ ID NO: 4594647 - DNA, 25 bp, Homo sapien
tgtggttcctcgaggtcctctgatc

SEQ ID NO: 4594648 - DNA, 25 bp, Homo sapien
gcactggtgttatcagaccctgtga

SEQ ID NO: 4594649 - DNA, 25 bp, Homo sapien
gctgcctgtctccttaataagtgtt

SEQ ID NO: 4594650 - DNA, 25 bp, Homo sapien
gagtaatccttgtgcatgtggttcc

SEQ ID NO: 4594651 - DNA, 25 bp, Homo sapien
tctgccttcacaagtccgtgctgac

SEQ ID NO: 4594652 - DNA, 25 bp, Homo sapien
gccgaagtctcgaagtgtgcaaaga

SEQ ID NO: 4594653 - DNA, 25 bp, Homo sapien
gataagtcaggtaacatacgggccc

SEQ ID NO: 4594654 - DNA, 25 bp, Homo sapien
gacgaagtcctcgaatcaagcagtt

SEQ ID NO: 4594655 - DNA, 25 bp, Homo sapien
ggaagacaactccagacataattaa

SEQ ID NO: 4594656 - DNA, 25 bp, Homo sapien
gggcgaggtcggtgcagaccttcct

SEQ ID NO: 4594657 - DNA, 25 bp, Homo sapien
caaacagatggggttccttggacac

SEQ ID NO: 4594658 - DNA, 25 bp, Homo sapien
acagtgggaagacaactccagacat

SEQ ID NO: 4594659 - DNA, 25 bp, Homo sapien
ggttcagttccctcaagaccatgat

SEQ ID NO: 4594660 - DNA, 25 bp, Homo sapien
tgcaaaacagcataaccccagagat

SEQ ID NO: 4594661 - DNA, 25 bp, Homo sapien
tattcggtgggacacagtactgact

SEQ ID NO: 4594662 - DNA, 25 bp, Homo sapien
tttggcctgttaactgccctggtta

SEQ ID NO: 4594663 - DNA, 25 bp, Homo sapien
cacaaggcggcaattgggtaccaca

SEQ ID NO: 4594664 - DNA, 25 bp, Homo sapien
gtgatgattcttggccaaacccctg

SEQ ID NO: 4594665 - DNA, 25 bp, Homo sapien
tacgcctgaaaccagaattgtcctg

SEQ ID NO: 4594666 - DNA, 25 bp, Homo sapien
tgagattcgagcaagacacaaggcg

SEQ ID NO: 4594667 - DNA, 25 bp, Homo sapien
tcagcaggctcggagtctccctcca

SEQ ID NO: 4594668 - DNA, 25 bp, Homo sapien
agcaggctcggagtctccctccaag

SEQ ID NO: 4594669 - DNA, 25 bp, Homo sapien
tttcagcaggctcggagtctccctc

SEQ ID NO: 4594670 - DNA, 25 bp, Homo sapien
aggctcggagtctccctccaaggca

SEQ ID NO: 4594671 - DNA, 25 bp, Homo sapien
gacatcaatcatccccgggctggct

SEQ ID NO: 4594672 - DNA, 25 bp, Homo sapien
tttccggacatcaatcatccccggg

SEQ ID NO: 4594673 - DNA, 25 bp, Homo sapien
gggtttttccggacatcaatcatcc

SEQ ID NO: 4594674 - DNA, 25 bp, Homo sapien
cgggctggctcgtcgcagttcccgc

SEQ ID NO: 4594675 - DNA, 25 bp, Homo sapien
tcaagggtaacggagcgtggaccaa

SEQ ID NO: 4594676 - DNA, 25 bp, Homo sapien
agccagagaagctcgggtgccaggt

SEQ ID NO: 4594677 - DNA, 25 bp, Homo sapien
ggagcgtggaccaagtcccgcgtct

SEQ ID NO: 4594678 - DNA, 25 bp, Homo sapien
tcgagcgtttccaggtcaagggtaa

SEQ ID NO: 4594679 - DNA, 25 bp, Homo sapien
cctgtctgccctccgagcacaggct

SEQ ID NO: 4594680 - DNA, 25 bp, Homo sapien
aggagcctgtctgccctccgagcac

SEQ ID NO: 4594681 - DNA, 25 bp, Homo sapien
tgccctccgagcacaggctcctctt

SEQ ID NO: 4594682 - DNA, 25 bp, Homo sapien
tgtctgccctccgagcacaggctcc

SEQ ID NO: 4594683 - DNA, 25 bp, Homo sapien
ttctccagagcttgaatccgggcct

SEQ ID NO: 4594684 - DNA, 25 bp, Homo sapien
tcacaccgccgagcttctgtttcag

SEQ ID NO: 4594685 - DNA, 25 bp, Homo sapien
tgtctgctaacccttcaccgaggtg

SEQ ID NO: 4594686 - DNA, 25 bp, Homo sapien
ggtttatccacatgtaacggcccag

SEQ ID NO: 4594687 - DNA, 25 bp, Homo sapien
ggtgctgctcctctcggagcgtcac

SEQ ID NO: 4594688 - DNA, 25 bp, Homo sapien
tgcatctccagttccgagaaggcaa

SEQ ID NO: 4594689 - DNA, 25 bp, Homo sapien
cctccagccagtacaccagcctctg

SEQ ID NO: 4594690 - DNA, 25 bp, Homo sapien
ccagttccgagaaggcaatctgctg

SEQ ID NO: 4594691 - DNA, 25 bp, Homo sapien
gccacacactatggagctgggcaga

SEQ ID NO: 4594692 - DNA, 25 bp, Homo sapien
cggcactaagaaatcaccagggtct

SEQ ID NO: 4594693 - DNA, 25 bp, Homo sapien
tattgtggccatggaccaccctgag

SEQ ID NO: 4594694 - DNA, 25 bp, Homo sapien
taggctttaaggtcaggcggccctg

SEQ ID NO: 4594695 - DNA, 25 bp, Homo sapien
tccccacacgtgccgctgaggagga

SEQ ID NO: 4594696 - DNA, 25 bp, Homo sapien
ctccccacacgtgccgctgaggagg

SEQ ID NO: 4594697 - DNA, 25 bp, Homo sapien
gaggagctggggggccatgggctgc

SEQ ID NO: 4594698 - DNA, 25 bp, Homo sapien
gaggaggagctggggggccatgggc

SEQ ID NO: 4594699 - DNA, 25 bp, Homo sapien
caaaatacttgcagaggagggctct

SEQ ID NO: 4594700 - DNA, 25 bp, Homo sapien
gagcttggccatgaggttcatctcg

SEQ ID NO: 4594701 - DNA, 25 bp, Homo sapien
cttggccatgaggttcatctcgcac

SEQ ID NO: 4594702 - DNA, 25 bp, Homo sapien
gcttggccatgaggttcatctcgca

SEQ ID NO: 4594703 - DNA, 25 bp, Homo sapien
gcctcattcttatactcaatggcag

SEQ ID NO: 4594704 - DNA, 25 bp, Homo sapien
acccgctggcggcatgtgatggcct

SEQ ID NO: 4594705 - DNA, 25 bp, Homo sapien
aggctgaggcccgaagcacccgctg

SEQ ID NO: 4594706 - DNA, 25 bp, Homo sapien
tcatccaactggaacagcgtccgct

SEQ ID NO: 4594707 - DNA, 25 bp, Homo sapien
tgctcaactgcaagcctctgtgaat

SEQ ID NO: 4594708 - DNA, 25 bp, Homo sapien
cgtagccacaactgggccttaaggg

SEQ ID NO: 4594709 - DNA, 25 bp, Homo sapien
aagtcagcccatcgagagaggtgcc

SEQ ID NO: 4594710 - DNA, 25 bp, Homo sapien
agaggtggcctgctcaactgcaagc

SEQ ID NO: 4594711 - DNA, 25 bp, Homo sapien
actcgcacgatgtcctcgttgaggg

SEQ ID NO: 4594712 - DNA, 25 bp, Homo sapien
ttctcctggcgcaggctgtcgatct

SEQ ID NO: 4594713 - DNA, 25 bp, Homo sapien
gatctccccgcggatctgctgctgg

SEQ ID NO: 4594714 - DNA, 25 bp, Homo sapien
tcagcttgccgtcgatctccaggcg

SEQ ID NO: 4594715 - DNA, 25 bp, Homo sapien
tgcgcctcctcattcttcctgcaca

SEQ ID NO: 4594716 - DNA, 25 bp, Homo sapien
ctgcgcctcctcattcttcctgcac

SEQ ID NO: 4594717 - DNA, 25 bp, Homo sapien
aggatctctcctggcagggcctcac

SEQ ID NO: 4594718 - DNA, 25 bp, Homo sapien
caggatctctcctggcagggcctca

SEQ ID NO: 4594719 - DNA, 25 bp, Homo sapien
ggcaggatctctcctggcagggcct

SEQ ID NO: 4594720 - DNA, 25 bp, Homo sapien
ctggcaggatctctcctggcagggc

SEQ ID NO: 4594721 - DNA, 25 bp, Homo sapien
gatggcctcccgcttgtggagctcc

SEQ ID NO: 4594722 - DNA, 25 bp, Homo sapien
ccaggatggcctcccgcttgtggag

SEQ ID NO: 4594723 - DNA, 25 bp, Homo sapien
ggctggatctcaggcgcttgctctc

SEQ ID NO: 4594724 - DNA, 25 bp, Homo sapien
tggctggatctcaggcgcttgctct

SEQ ID NO: 4594725 - DNA, 25 bp, Homo sapien
cagccgccactcgaggttcactggg

SEQ ID NO: 4594726 - DNA, 25 bp, Homo sapien
tgtcagccgccactcgaggttcact

SEQ ID NO: 4594727 - DNA, 25 bp, Homo sapien
cactcgaggttcactggggagaaag

SEQ ID NO: 4594728 - DNA, 25 bp, Homo sapien
caggggagccctgggtgcggacaca

SEQ ID NO: 4594729 - DNA, 25 bp, Homo sapien
ctcttcctctggaatgccgcgatct

SEQ ID NO: 4594730 - DNA, 25 bp, Homo sapien
tggaatgccgcgatctcttccgtct

SEQ ID NO: 4594731 - DNA, 25 bp, Homo sapien
ttcctctggaatgccgcgatctctt

SEQ ID NO: 4594732 - DNA, 25 bp, Homo sapien
gccgcgatctcttccgtcttaatct

SEQ ID NO: 4594733 - DNA, 25 bp, Homo sapien
ttgacgcggtgctgccgcttgctca

SEQ ID NO: 4594734 - DNA, 25 bp, Homo sapien
ctgctgccgcatgagctgcacgttc

SEQ ID NO: 4594735 - DNA, 25 bp, Homo sapien
tgcagtcgcttctcactctgggccg

SEQ ID NO: 4594736 - DNA, 25 bp, Homo sapien
ttccgctcgagctcctgcagtcgct

SEQ ID NO: 4594737 - DNA, 25 bp, Homo sapien
ggctctgggccgcagcgaccctcct

SEQ ID NO: 4594738 - DNA, 25 bp, Homo sapien
ctcccggatacgctggctgtgctgg

SEQ ID NO: 4594739 - DNA, 25 bp, Homo sapien
gagaccgctcgccagcatcctggag

SEQ ID NO: 4594740 - DNA, 25 bp, Homo sapien
gaccctcctgcggaactcctggagc

SEQ ID NO: 4594741 - DNA, 25 bp, Homo sapien
gagaggaggtaaaacaactgtggaa

SEQ ID NO: 4594742 - DNA, 25 bp, Homo sapien
taggtgtgctgatggtattacagtt

SEQ ID NO: 4594743 - DNA, 25 bp, Homo sapien
tatgggacccatggtactcgtctca

SEQ ID NO: 4594744 - DNA, 25 bp, Homo sapien
cttggtaactactaagtctggagga

SEQ ID NO: 4594745 - DNA, 25 bp, Homo sapien
ctgaactcgggccttgctcccacca

SEQ ID NO: 4594746 - DNA, 25 bp, Homo sapien
gatgttgatagccagctcccggatc

SEQ ID NO: 4594747 - DNA, 25 bp, Homo sapien
ctccttcatgcggatgttgatagcc

SEQ ID NO: 4594748 - DNA, 25 bp, Homo sapien
ggaccagctcgccaataagctcctc

SEQ ID NO: 4594749 - DNA, 25 bp, Homo sapien
caggcagcctgtcaaggttgctgcc

SEQ ID NO: 4594750 - DNA, 25 bp, Homo sapien
aacaggcagcctgtcaaggttgctg

SEQ ID NO: 4594751 - DNA, 25 bp, Homo sapien
cagcctgtcaaggttgctgccccaa

SEQ ID NO: 4594752 - DNA, 25 bp, Homo sapien
gcaacaggcagcctgtcaaggttgc

SEQ ID NO: 4594753 - DNA, 25 bp, Homo sapien
ccgccctctgactgcagttgctgat

SEQ ID NO: 4594754 - DNA, 25 bp, Homo sapien
gaatggctgcatccaactcctcaag

SEQ ID NO: 4594755 - DNA, 25 bp, Homo sapien
gcatccaactcctcaaggcaaagct

SEQ ID NO: 4594756 - DNA, 25 bp, Homo sapien
tctctggcagactccctgggcgtgc

SEQ ID NO: 4594757 - DNA, 25 bp, Homo sapien
agcctgttcacctcagtcagcaact

SEQ ID NO: 4594758 - DNA, 25 bp, Homo sapien
cctgttcacctcagtcagcaactca

SEQ ID NO: 4594759 - DNA, 25 bp, Homo sapien
ccagcctgttcacctcagtcagcaa

SEQ ID NO: 4594760 - DNA, 25 bp, Homo sapien
cagcctgttcacctcagtcagcaac

SEQ ID NO: 4594761 - DNA, 25 bp, Homo sapien
atgcccagcacatgggcgtgggcac

SEQ ID NO: 4594762 - DNA, 25 bp, Homo sapien
gggaggcaggcaggcggcaccatgc

SEQ ID NO: 4594763 - DNA, 25 bp, Homo sapien
aggcaggcaggcggcaccatgccca

SEQ ID NO: 4594764 - DNA, 25 bp, Homo sapien
accatgcccagcacatgggcgtggg

SEQ ID NO: 4594765 - DNA, 25 bp, Homo sapien
ctgtatgaggtcgaggcacaaagga

SEQ ID NO: 4594766 - DNA, 25 bp, Homo sapien
aggcaggccattcaggagccgcggg

SEQ ID NO: 4594767 - DNA, 25 bp, Homo sapien
caccagctctaaccgcagccgcagt

SEQ ID NO: 4594768 - DNA, 25 bp, Homo sapien
ctcctgctgctcacgcagccggtcg

SEQ ID NO: 4594769 - DNA, 25 bp, Homo sapien
gccagaaagtctcggttctcctcct

SEQ ID NO: 4594770 - DNA, 25 bp, Homo sapien
tccagccgcgccacctggttctgca

SEQ ID NO: 4594771 - DNA, 25 bp, Homo sapien
gcagccagaaagtctcggttctcct

SEQ ID NO: 4594772 - DNA, 25 bp, Homo sapien
tccagcgcagccagaaagtctcggt

SEQ ID NO: 4594773 - DNA, 25 bp, Homo sapien
gcctggtcctcgacggaggcgctct

SEQ ID NO: 4594774 - DNA, 25 bp, Homo sapien
acggaggcgctctcgatgccgctat

SEQ ID NO: 4594775 - DNA, 25 bp, Homo sapien
ggcgctctcgatgccgctatcgggc

SEQ ID NO: 4594776 - DNA, 25 bp, Homo sapien
ggtcctcgacggaggcgctctcgat

SEQ ID NO: 4594777 - DNA, 25 bp, Homo sapien
tcgccctcgacggcgcacagccagt

SEQ ID NO: 4594778 - DNA, 25 bp, Homo sapien
ccctcgacggcgcacagccagtcgc

SEQ ID NO: 4594779 - DNA, 25 bp, Homo sapien
ctcgacggcgcacagccagtcgcgc

SEQ ID NO: 4594780 - DNA, 25 bp, Homo sapien
tcgacggcgcacagccagtcgcgca

SEQ ID NO: 4594781 - DNA, 25 bp, Homo sapien
cggcctgcagctcgcgcaagaggct

SEQ ID NO: 4594782 - DNA, 25 bp, Homo sapien
gcaagaggctgtaggcggcgtcggt

SEQ ID NO: 4594783 - DNA, 25 bp, Homo sapien
gcgccggccgcggtggatgatgcgg

SEQ ID NO: 4594784 - DNA, 25 bp, Homo sapien
gtgcaggcccggtagcgcgcgcact

SEQ ID NO: 4594785 - DNA, 25 bp, Homo sapien
gctcggcctcgggccgccagttgac

SEQ ID NO: 4594786 - DNA, 25 bp, Homo sapien
gccgctcggcctcgggccgccagtt

SEQ ID NO: 4594787 - DNA, 25 bp, Homo sapien
tcgccgtctcttcgggtggccgctc

SEQ ID NO: 4594788 - DNA, 25 bp, Homo sapien
cgtctcttcgggtggccgctcggcc

SEQ ID NO: 4594789 - DNA, 25 bp, Homo sapien
tgagggtctcgtcgaagtcggagga

SEQ ID NO: 4594790 - DNA, 25 bp, Homo sapien
tgcggatgttctgggcgcggctggc

SEQ ID NO: 4594791 - DNA, 25 bp, Homo sapien
aagggctgacgcaggcgatcatcac

SEQ ID NO: 4594792 - DNA, 25 bp, Homo sapien
cgcggctggcgtagttgagggtgtt

SEQ ID NO: 4594793 - DNA, 25 bp, Homo sapien
gtcttggcgttcccgcccagcgagt

SEQ ID NO: 4594794 - DNA, 25 bp, Homo sapien
cccgcccagcgagtctttgaggatc

SEQ ID NO: 4594795 - DNA, 25 bp, Homo sapien
cgttcccgcccagcgagtctttgag

SEQ ID NO: 4594796 - DNA, 25 bp, Homo sapien
ggcgttcccgcccagcgagtctttg

SEQ ID NO: 4594797 - DNA, 25 bp, Homo sapien
gggccagacctgggaccggctcctg

SEQ ID NO: 4594798 - DNA, 25 bp, Homo sapien
tcctggcgcggttcccgtgggctgg

SEQ ID NO: 4594799 - DNA, 25 bp, Homo sapien
gtgtgctggacactccccgcctccc

SEQ ID NO: 4594800 - DNA, 25 bp, Homo sapien
ggttcccgtgggctggagacctcag

SEQ ID NO: 4594801 - DNA, 25 bp, Homo sapien
ttggagtcgcggtagggtatgtggc

SEQ ID NO: 4594802 - DNA, 25 bp, Homo sapien
gctcgccggtgctgcccgtcttgag

SEQ ID NO: 4594803 - DNA, 25 bp, Homo sapien
tcccccagggcgctgatgacgttgc

SEQ ID NO: 4594804 - DNA, 25 bp, Homo sapien
tctctgagcccgccaggtccacgaa

SEQ ID NO: 4594805 - DNA, 25 bp, Homo sapien
gcggggtaggcggctgggggcgcgc

SEQ ID NO: 4594806 - DNA, 25 bp, Homo sapien
ggcggctgggggcgcgcccccgctg

SEQ ID NO: 4594807 - DNA, 25 bp, Homo sapien
taggcggctgggggcgcgcccccgc

SEQ ID NO: 4594808 - DNA, 25 bp, Homo sapien
aggcggctgggggcgcgcccccgct

SEQ ID NO: 4594809 - DNA, 25 bp, Homo sapien
ggtggttgaggtgcgtggctcccgt

SEQ ID NO: 4594810 - DNA, 25 bp, Homo sapien
acgtcgacctccttcaccccgcaca

SEQ ID NO: 4594811 - DNA, 25 bp, Homo sapien
tggctcccgtgtgccgcgccgcgtt

SEQ ID NO: 4594812 - DNA, 25 bp, Homo sapien
ccgcgccgcgttgcccatctccagg

SEQ ID NO: 4594813 - DNA, 25 bp, Homo sapien
tctcatcgatgagcttgaaggcctc

SEQ ID NO: 4594814 - DNA, 25 bp, Homo sapien
gaactcctccttgtacacttccagg

SEQ ID NO: 4594815 - DNA, 25 bp, Homo sapien
cttcccggagctggatgtcacggct

SEQ ID NO: 4594816 - DNA, 25 bp, Homo sapien
acagtcaagcaggtcgttctcatcg

SEQ ID NO: 4594817 - DNA, 25 bp, Homo sapien
tgccacttcagctggacacggccca

SEQ ID NO: 4594818 - DNA, 25 bp, Homo sapien
caggcccggaagctcataggcccct

SEQ ID NO: 4594819 - DNA, 25 bp, Homo sapien
cggaagctcataggcccctgccaga

SEQ ID NO: 4594820 - DNA, 25 bp, Homo sapien
acttcagctggacacggcccatggc

SEQ ID NO: 4594821 - DNA, 25 bp, Homo sapien
aaagttagattgaagaatatttcat

SEQ ID NO: 4594822 - DNA, 25 bp, Homo sapien
aagaatatttcatgatacagagaaa

SEQ ID NO: 4594823 - DNA, 25 bp, Homo sapien
aaaagttagattgaagaatatttca

SEQ ID NO: 4594824 - DNA, 25 bp, Homo sapien
agaatatttcatgatacagagaaat

SEQ ID NO: 4594825 - DNA, 25 bp, Homo sapien
tccctgagcccgtctgaccataggc

SEQ ID NO: 4594826 - DNA, 25 bp, Homo sapien
cttccctgagcccgtctgaccatag

SEQ ID NO: 4594827 - DNA, 25 bp, Homo sapien
cctgagcccgtctgaccataggcaa

SEQ ID NO: 4594828 - DNA, 25 bp, Homo sapien
ctgagcccgtctgaccataggcaaa

SEQ ID NO: 4594829 - DNA, 25 bp, Homo sapien
tcacggcccagagtgacgcggccaa

SEQ ID NO: 4594830 - DNA, 25 bp, Homo sapien
agtggcattgaagccctcgaagaag

SEQ ID NO: 4594831 - DNA, 25 bp, Homo sapien
aagccaaagtgtcggtcacggccca

SEQ ID NO: 4594832 - DNA, 25 bp, Homo sapien
agcagtggtcgaactcgcagggcaa

SEQ ID NO: 4594833 - DNA, 25 bp, Homo sapien
cctgcaggggactcgagccagatcc

SEQ ID NO: 4594834 - DNA, 25 bp, Homo sapien
cgagccagatcctgcagctcctgac

SEQ ID NO: 4594835 - DNA, 25 bp, Homo sapien
tcgagccagatcctgcagctcctga

SEQ ID NO: 4594836 - DNA, 25 bp, Homo sapien
gcaggggactcgagccagatcctgc

SEQ ID NO: 4594837 - DNA, 25 bp, Homo sapien
acggcgccggccagtccaaggaaga

SEQ ID NO: 4594838 - DNA, 25 bp, Homo sapien
gccggccagtccaaggaagagcttc

SEQ ID NO: 4594839 - DNA, 25 bp, Homo sapien
cccagatgtcgggaagacggcgccg

SEQ ID NO: 4594840 - DNA, 25 bp, Homo sapien
agccttggcgctcgcccctccacgc

SEQ ID NO: 4594841 - DNA, 25 bp, Homo sapien
tggctgcaagcgccgtcccgggcca

SEQ ID NO: 4594842 - DNA, 25 bp, Homo sapien
tgcctggctgcaagcgccgtcccgg

SEQ ID NO: 4594843 - DNA, 25 bp, Homo sapien
ctgcctggctgcaagcgccgtcccg

SEQ ID NO: 4594844 - DNA, 25 bp, Homo sapien
tgcaagcgccgtcccgggccaggca

SEQ ID NO: 4594845 - DNA, 25 bp, Homo sapien
gagtgtgcagcatcctcatgatggc

SEQ ID NO: 4594846 - DNA, 25 bp, Homo sapien
tggcatcgccttattttctagaatt

SEQ ID NO: 4594847 - DNA, 25 bp, Homo sapien
agccggtcggcgtcgcggagtcggc

SEQ ID NO: 4594848 - DNA, 25 bp, Homo sapien
gggcccgtgctcaagggctgggcct

SEQ ID NO: 4594849 - DNA, 25 bp, Homo sapien
cctgggctgtcctattccatatgcg

SEQ ID NO: 4594850 - DNA, 25 bp, Homo sapien
tccagcacccgtgctcaggcccagg

SEQ ID NO: 4594851 - DNA, 25 bp, Homo sapien
gctgtcctattccatatgcggcctc

SEQ ID NO: 4594852 - DNA, 25 bp, Homo sapien
gtcctattccatatgcggcctccag

SEQ ID NO: 4594853 - DNA, 25 bp, Homo sapien
ttatgtggccatcaaaaagagcgag

SEQ ID NO: 4594854 - DNA, 25 bp, Homo sapien
taaaaagtgcgccttggcagcatca

SEQ ID NO: 4594855 - DNA, 25 bp, Homo sapien
gcaaatatttatccgcagaggcaga

SEQ ID NO: 4594856 - DNA, 25 bp, Homo sapien
tttgaaagtggcaacgctcgcctgg

SEQ ID NO: 4594857 - DNA, 25 bp, Homo sapien
ttgcgcagctggctgtaatgcgtgc

SEQ ID NO: 4594858 - DNA, 25 bp, Homo sapien
tgggccggaagaagctgtcgctgac

SEQ ID NO: 4594859 - DNA, 25 bp, Homo sapien
tgtcgctgaccctgcgctttggctt

SEQ ID NO: 4594860 - DNA, 25 bp, Homo sapien
gacgctgggccggaagaagctgtcg

SEQ ID NO: 4594861 - DNA, 25 bp, Homo sapien
gcgctgcgggcgtggcgacttcgtc

SEQ ID NO: 4594862 - DNA, 25 bp, Homo sapien
cgcggcgctgcgggcgtggcgactt

SEQ ID NO: 4594863 - DNA, 25 bp, Homo sapien
ggcgctgcgggcgtggcgacttcgt

SEQ ID NO: 4594864 - DNA, 25 bp, Homo sapien
gcggcgctgcgggcgtggcgacttc

SEQ ID NO: 4594865 - DNA, 25 bp, Homo sapien
ggctctgcgcgctgcgcaggctgcg

SEQ ID NO: 4594866 - DNA, 25 bp, Homo sapien
cggcggacggcgccccagacgctct

SEQ ID NO: 4594867 - DNA, 25 bp, Homo sapien
gccggcggacggcgccccagacgct

SEQ ID NO: 4594868 - DNA, 25 bp, Homo sapien
cggggctctgcgcgctgcgcaggct

SEQ ID NO: 4594869 - DNA, 25 bp, Homo sapien
ggaattcgctctcgggctccatcag

SEQ ID NO: 4594870 - DNA, 25 bp, Homo sapien
ggttgtcgatgtcccggaattcgct

SEQ ID NO: 4594871 - DNA, 25 bp, Homo sapien
gatgtcccggaattcgctctcgggc

SEQ ID NO: 4594872 - DNA, 25 bp, Homo sapien
tcggctggtgggttgtcgatgtccc

SEQ ID NO: 4594873 - DNA, 25 bp, Homo sapien
ccggcagccgccttagagtcctggc

SEQ ID NO: 4594874 - DNA, 25 bp, Homo sapien
ctcccaaagtttcaggatcccctag

SEQ ID NO: 4594875 - DNA, 25 bp, Homo sapien
gctggggagcggttcagtagtttgg

SEQ ID NO: 4594876 - DNA, 25 bp, Homo sapien
aggctgctcaggcaagccaagcctc

SEQ ID NO: 4594877 - DNA, 25 bp, Homo sapien
cttcagggcatctgatagggacatg

SEQ ID NO: 4594878 - DNA, 25 bp, Homo sapien
catctgatagggacatggccctccc

SEQ ID NO: 4594879 - DNA, 25 bp, Homo sapien
cactgtgtccaccacgttgtcagta

SEQ ID NO: 4594880 - DNA, 25 bp, Homo sapien
cgttgtcagtaacgcccttcagggc

SEQ ID NO: 4594881 - DNA, 25 bp, Homo sapien
catgtcacagccgagatggtggtct

SEQ ID NO: 4594882 - DNA, 25 bp, Homo sapien
gagatggtggtctggagggtcttct

SEQ ID NO: 4594883 - DNA, 25 bp, Homo sapien
tgcagggtatgtgccacaccaccca

SEQ ID NO: 4594884 - DNA, 25 bp, Homo sapien
tctgcagggtatgtgccacaccacc

SEQ ID NO: 4594885 - DNA, 25 bp, Homo sapien
tgtctgtctggtcctcatgatcctc

SEQ ID NO: 4594886 - DNA, 25 bp, Homo sapien
gtgtctgtctggtcctcatgatcct

SEQ ID NO: 4594887 - DNA, 25 bp, Homo sapien
ccgcacttcgctcctccgccgggac

SEQ ID NO: 4594888 - DNA, 25 bp, Homo sapien
tccgccgggacaccgcctgcatggc

SEQ ID NO: 4594889 - DNA, 25 bp, Homo sapien
gggacaccgcctgcatggccactga

SEQ ID NO: 4594890 - DNA, 25 bp, Homo sapien
gcacttcgctcctccgccgggacac

SEQ ID NO: 4594891 - DNA, 25 bp, Homo sapien
atggccacggtgtggccctgctcca

SEQ ID NO: 4594892 - DNA, 25 bp, Homo sapien
acatggccacggtgtggccctgctc

SEQ ID NO: 4594893 - DNA, 25 bp, Homo sapien
cccgggccatggtctgcacggtgta

SEQ ID NO: 4594894 - DNA, 25 bp, Homo sapien
ggtgtatcgagagagggtgttggtc

SEQ ID NO: 4594895 - DNA, 25 bp, Homo sapien
tgggcttgctggtgtccaggagcag

SEQ ID NO: 4594896 - DNA, 25 bp, Homo sapien
ctgggcttgctggtgtccaggagca

SEQ ID NO: 4594897 - DNA, 25 bp, Homo sapien
gcttgctggtgtccaggagcagggg

SEQ ID NO: 4594898 - DNA, 25 bp, Homo sapien
ggcttgctggtgtccaggagcaggg

SEQ ID NO: 4594899 - DNA, 25 bp, Homo sapien
caggccgagcctccgaatggcaggt

SEQ ID NO: 4594900 - DNA, 25 bp, Homo sapien
ccaggccgagcctccgaatggcagg

SEQ ID NO: 4594901 - DNA, 25 bp, Homo sapien
tcccaggccgagcctccgaatggca

SEQ ID NO: 4594902 - DNA, 25 bp, Homo sapien
ggccgagcctccgaatggcaggtac

SEQ ID NO: 4594903 - DNA, 25 bp, Homo sapien
tgtctgaagtgctcgcgatgggaac

SEQ ID NO: 4594904 - DNA, 25 bp, Homo sapien
aagccagtcggccagctcgagtgtt

SEQ ID NO: 4594905 - DNA, 25 bp, Homo sapien
gttggcagcaaattccgcagtgtct

SEQ ID NO: 4594906 - DNA, 25 bp, Homo sapien
tctggagggaggaggtactccacca

SEQ ID NO: 4594907 - DNA, 25 bp, Homo sapien
aggtggtccaagcctcggcaggcca

SEQ ID NO: 4594908 - DNA, 25 bp, Homo sapien
tggagggcggggatcttttcctcca

SEQ ID NO: 4594909 - DNA, 25 bp, Homo sapien
aagcattcgcaggtgccactcacca

SEQ ID NO: 4594910 - DNA, 25 bp, Homo sapien
tccaggcagccaagctactggcgct

SEQ ID NO: 4594911 - DNA, 25 bp, Homo sapien
ctcataggcattgcacacagaggcc

SEQ ID NO: 4594912 - DNA, 25 bp, Homo sapien
actgggtggacagcctgcggaccac

SEQ ID NO: 4594913 - DNA, 25 bp, Homo sapien
agggaggtctccatccagcaaggtg

SEQ ID NO: 4594914 - DNA, 25 bp, Homo sapien
tctccatccagcaaggtgaggcctt

SEQ ID NO: 4594915 - DNA, 25 bp, Homo sapien
atccagcaaggtgaggcctttgttg

SEQ ID NO: 4594916 - DNA, 25 bp, Homo sapien
aaggtgaggcctttgttgactgcca

SEQ ID NO: 4594917 - DNA, 25 bp, Homo sapien
cataaacaagccatgtaaggcaggt

SEQ ID NO: 4594918 - DNA, 25 bp, Homo sapien
ggtgccccaggaccccaacactcac

SEQ ID NO: 4594919 - DNA, 25 bp, Homo sapien
taaacaagccatgtaaggcaggtgc

SEQ ID NO: 4594920 - DNA, 25 bp, Homo sapien
caagccatgtaaggcaggtgcccca

SEQ ID NO: 4594921 - DNA, 25 bp, Homo sapien
aaacaattcctgtcactcctgggag

SEQ ID NO: 4594922 - DNA, 25 bp, Homo sapien
tcaggcagaaacaattcctgtcact

SEQ ID NO: 4594923 - DNA, 25 bp, Homo sapien
cagagtgtctcctcaggcagaaaca

SEQ ID NO: 4594924 - DNA, 25 bp, Homo sapien
ccaggctgcagagtgtctcctcagg

SEQ ID NO: 4594925 - DNA, 25 bp, Homo sapien
agagctcgctgtaccaactgtgtag

SEQ ID NO: 4594926 - DNA, 25 bp, Homo sapien
gccagcgattgacagggctactgta

SEQ ID NO: 4594927 - DNA, 25 bp, Homo sapien
catggcagcagtctagatgagttca

SEQ ID NO: 4594928 - DNA, 25 bp, Homo sapien
tcagcctggatcttctagcccagag

SEQ ID NO: 4594929 - DNA, 25 bp, Homo sapien
tactagatctgagagtgccatgcac

SEQ ID NO: 4594930 - DNA, 25 bp, Homo sapien
cagataaatgacacagctttgctgg

SEQ ID NO: 4594931 - DNA, 25 bp, Homo sapien
ctttgctgggaggactgacatcggc

SEQ ID NO: 4594932 - DNA, 25 bp, Homo sapien
tgcagtgatggtataagggccaaca

SEQ ID NO: 4594933 - DNA, 25 bp, Homo sapien
aacttaagcacagtatgacatggcc

SEQ ID NO: 4594934 - DNA, 25 bp, Homo sapien
taagctcccactatgcacataagag

SEQ ID NO: 4594935 - DNA, 25 bp, Homo sapien
tatacaaatgtctgtcccaccaaga

SEQ ID NO: 4594936 - DNA, 25 bp, Homo sapien
tgcccacatcacaggttgttaaatg

SEQ ID NO: 4594937 - DNA, 25 bp, Homo sapien
tgttgatgccagaggtgagacctac

SEQ ID NO: 4594938 - DNA, 25 bp, Homo sapien
ccagctggtccaaagggttcaggat

SEQ ID NO: 4594939 - DNA, 25 bp, Homo sapien
taagcataagcgaggtaccaggtca

SEQ ID NO: 4594940 - DNA, 25 bp, Homo sapien
tcagccacgctgaaccaaagaggat

SEQ ID NO: 4594941 - DNA, 25 bp, Homo sapien
actggactccagtttcttgagcttc

SEQ ID NO: 4594942 - DNA, 25 bp, Homo sapien
ctttgccagctttgggctctaacaa

SEQ ID NO: 4594943 - DNA, 25 bp, Homo sapien
tcttgagcttcattaccaccttctc

SEQ ID NO: 4594944 - DNA, 25 bp, Homo sapien
caacatgcatgtgtactgagtggct

SEQ ID NO: 4594945 - DNA, 25 bp, Homo sapien
tttctaccatgtacttaacctacca

SEQ ID NO: 4594946 - DNA, 25 bp, Homo sapien
taccatgtacttaacctaccatcta

SEQ ID NO: 4594947 - DNA, 25 bp, Homo sapien
tctaccatgtacttaacctaccatc

SEQ ID NO: 4594948 - DNA, 25 bp, Homo sapien
catgtacttaacctaccatctatgt

SEQ ID NO: 4594949 - DNA, 25 bp, Homo sapien
ctggttggtgaagcgggtgaaggcg

SEQ ID NO: 4594950 - DNA, 25 bp, Homo sapien
tggtgaagcgggtgaaggcgtccat

SEQ ID NO: 4594951 - DNA, 25 bp, Homo sapien
gtctggttggtgaagcgggtgaagg

SEQ ID NO: 4594952 - DNA, 25 bp, Homo sapien
gttggtgaagcgggtgaaggcgtcc

SEQ ID NO: 4594953 - DNA, 25 bp, Homo sapien
cagggaacggtcagtcccaggttat

SEQ ID NO: 4594954 - DNA, 25 bp, Homo sapien
gcccaaaggccacgagtcgcacggg

SEQ ID NO: 4594955 - DNA, 25 bp, Homo sapien
ggcttctagcccaaaggccacgagt

SEQ ID NO: 4594956 - DNA, 25 bp, Homo sapien
tcagtcccaggttatccgctgaggg

SEQ ID NO: 4594957 - DNA, 25 bp, Homo sapien
ggcctaatcatttcccagcgccgtg

SEQ ID NO: 4594958 - DNA, 25 bp, Homo sapien
taggtcagagataagccaatttcac

SEQ ID NO: 4594959 - DNA, 25 bp, Homo sapien
gatatcccgaatggtctctccagcc

SEQ ID NO: 4594960 - DNA, 25 bp, Homo sapien
gactcgggcgtttccggatgcctga

SEQ ID NO: 4594961 - DNA, 25 bp, Homo sapien
catatggtgcaaggtatggatcggc

SEQ ID NO: 4594962 - DNA, 25 bp, Homo sapien
tgtttgcatctaatttaggactccc

SEQ ID NO: 4594963 - DNA, 25 bp, Homo sapien
tctttgtctaagagaagattgccaa

SEQ ID NO: 4594964 - DNA, 25 bp, Homo sapien
taggactccctatttgatttcattg

SEQ ID NO: 4594965 - DNA, 25 bp, Homo sapien
ttcaaggccttaaagagtaccagtc

SEQ ID NO: 4594966 - DNA, 25 bp, Homo sapien
tcacttcaagtggtgtccgccaggt

SEQ ID NO: 4594967 - DNA, 25 bp, Homo sapien
tcctacctaggatggtttcttggcc

SEQ ID NO: 4594968 - DNA, 25 bp, Homo sapien
gtaaggagcaagtcactacatccag

SEQ ID NO: 4594969 - DNA, 25 bp, Homo sapien
tatgcattgtataatgctttgtgta

SEQ ID NO: 4594970 - DNA, 25 bp, Homo sapien
atgcattgtataatgctttgtgtat

SEQ ID NO: 4594971 - DNA, 25 bp, Homo sapien
atatgcattgtataatgctttgtgt

SEQ ID NO: 4594972 - DNA, 25 bp, Homo sapien
atacgcctttgcatcccatggtcag

SEQ ID NO: 4594973 - DNA, 25 bp, Homo sapien
agctgcgcctcagtccctggctggg

SEQ ID NO: 4594974 - DNA, 25 bp, Homo sapien
agcccttgaccaaaatagcttgttt

SEQ ID NO: 4594975 - DNA, 25 bp, Homo sapien
tttacttattgaaccaacagcatta

SEQ ID NO: 4594976 - DNA, 25 bp, Homo sapien
cagatacagggaattctacttagat

SEQ ID NO: 4594977 - DNA, 25 bp, Homo sapien
tgggccttacaaatttctgggacta

SEQ ID NO: 4594978 - DNA, 25 bp, Homo sapien
cttagattggcagagttaaggtcaa

SEQ ID NO: 4594979 - DNA, 25 bp, Homo sapien
tcagcctaaaagaaaccattacaga

SEQ ID NO: 4594980 - DNA, 25 bp, Homo sapien
taatctgggggaccttcaaccacta

SEQ ID NO: 4594981 - DNA, 25 bp, Homo sapien
tgtaacagagccacagctccacagg

SEQ ID NO: 4594982 - DNA, 25 bp, Homo sapien
cacaggcctgcactcggagtctggg

SEQ ID NO: 4594983 - DNA, 25 bp, Homo sapien
ggcaggcagatgtgtcacccaaata

SEQ ID NO: 4594984 - DNA, 25 bp, Homo sapien
cctgcctctacacacacagccccgc

SEQ ID NO: 4594985 - DNA, 25 bp, Homo sapien
catgtatggagctggcaaaatccca

SEQ ID NO: 4594986 - DNA, 25 bp, Homo sapien
tcccgtgcatggagaataagaccac

SEQ ID NO: 4594987 - DNA, 25 bp, Homo sapien
tgtggattccgatgcaaccccatgg

SEQ ID NO: 4594988 - DNA, 25 bp, Homo sapien
gttatataaactcaggaccgccaca

SEQ ID NO: 4594989 - DNA, 25 bp, Homo sapien
gaaccacttcgaaggtgctgaggcc

SEQ ID NO: 4594990 - DNA, 25 bp, Homo sapien
caaaaagcctcggtgctcacagaga

SEQ ID NO: 4594991 - DNA, 25 bp, Homo sapien
cagagacggcgtcagttgtcccttg

SEQ ID NO: 4594992 - DNA, 25 bp, Homo sapien
tgcctcaaagtgtctagccctatgg

SEQ ID NO: 4594993 - DNA, 25 bp, Homo sapien
actccagaggcgagaggggcatcca

SEQ ID NO: 4594994 - DNA, 25 bp, Homo sapien
aacagagccagcacgtcgcccggaa

SEQ ID NO: 4594995 - DNA, 25 bp, Homo sapien
agagccagcacgtcgcccggaagga

SEQ ID NO: 4594996 - DNA, 25 bp, Homo sapien
cactccagaggcgagaggggcatcc

SEQ ID NO: 4594997 - DNA, 25 bp, Homo sapien
gcggtggggctgtgcgcgggggcac

SEQ ID NO: 4594998 - DNA, 25 bp, Homo sapien
ggtggggctgtgcgcgggggcacgg

SEQ ID NO: 4594999 - DNA, 25 bp, Homo sapien
tggggctgtgcgcgggggcacggac

SEQ ID NO: 4595000 - DNA, 25 bp, Homo sapien
ctgtgcgcgggggcacggacgaagg

SEQ ID NO: 4595001 - DNA, 25 bp, Homo sapien
tcagcctgcgtccgtgtctgcatct

SEQ ID NO: 4595002 - DNA, 25 bp, Homo sapien
tggctccatcgcctgcccttcaggg

SEQ ID NO: 4595003 - DNA, 25 bp, Homo sapien
agggcacgccgcctcggcgaacagc

SEQ ID NO: 4595004 - DNA, 25 bp, Homo sapien
aggcgggtcgcgcggctcgggtgca

SEQ ID NO: 4595005 - DNA, 25 bp, Homo sapien
tcgctgaggcctagcacggccgaca

SEQ ID NO: 4595006 - DNA, 25 bp, Homo sapien
caggtggccgatatagcggatagcc

SEQ ID NO: 4595007 - DNA, 25 bp, Homo sapien
tagcacggccgacaggtggccgata

SEQ ID NO: 4595008 - DNA, 25 bp, Homo sapien
acggacggcggtagaaagcggcgca

SEQ ID NO: 4595009 - DNA, 25 bp, Homo sapien
agggagcggccgcagtccttgtcgg

SEQ ID NO: 4595010 - DNA, 25 bp, Homo sapien
gtcccggagggtgcctggccgcgcg

SEQ ID NO: 4595011 - DNA, 25 bp, Homo sapien
atccaggactcggagagcggcgggc

SEQ ID NO: 4595012 - DNA, 25 bp, Homo sapien
cccaggccgcagagagcatccagga

SEQ ID NO: 4595013 - DNA, 25 bp, Homo sapien
gacccttccctggtaagaacatgtg

SEQ ID NO: 4595014 - DNA, 25 bp, Homo sapien
catgcgccaattggacagtggagta

SEQ ID NO: 4595015 - DNA, 25 bp, Homo sapien
aaattcaataagctgccgagtctgg

SEQ ID NO: 4595016 - DNA, 25 bp, Homo sapien
gctttatgccgagcccgaggtgtga

SEQ ID NO: 4595017 - DNA, 25 bp, Homo sapien
ttcttcatggtatgaaattgcaggg

SEQ ID NO: 4595018 - DNA, 25 bp, Homo sapien
cttccaagccgtcaccagatgacat

SEQ ID NO: 4595019 - DNA, 25 bp, Homo sapien
tggtatgaaattgcagggattccca

SEQ ID NO: 4595020 - DNA, 25 bp, Homo sapien
cattacccgaatccagtctttctcc

SEQ ID NO: 4595021 - DNA, 25 bp, Homo sapien
tcctctgacaccttctgttcctcct

SEQ ID NO: 4595022 - DNA, 25 bp, Homo sapien
tccttcctgggatctcttctgtctc

SEQ ID NO: 4595023 - DNA, 25 bp, Homo sapien
tcacatccaggagaagcagtgccag

SEQ ID NO: 4595024 - DNA, 25 bp, Homo sapien
aatgcctatgcccaggatcacatcc

SEQ ID NO: 4595025 - DNA, 25 bp, Homo sapien
aaatgaggccttggggcagccccac

SEQ ID NO: 4595026 - DNA, 25 bp, Homo sapien
ccaaacgtgtaaggctgggaaatga

SEQ ID NO: 4595027 - DNA, 25 bp, Homo sapien
cctctgccaaacgtgtaaggctggg

SEQ ID NO: 4595028 - DNA, 25 bp, Homo sapien
ctgccaaacgtgtaaggctgggaaa

SEQ ID NO: 4595029 - DNA, 25 bp, Homo sapien
ctaagccaccaaaggcgggctggac

SEQ ID NO: 4595030 - DNA, 25 bp, Homo sapien
gggcctgtgctaagccaccaaaggc

SEQ ID NO: 4595031 - DNA, 25 bp, Homo sapien
gagaaagagcaggtgcagagctcct

SEQ ID NO: 4595032 - DNA, 25 bp, Homo sapien
gctcctgtgcgcagggctgtgggca

SEQ ID NO: 4595033 - DNA, 25 bp, Homo sapien
tcaggaactagactggctcacaggc

SEQ ID NO: 4595034 - DNA, 25 bp, Homo sapien
gatggacacatgtgggcaccttgca

SEQ ID NO: 4595035 - DNA, 25 bp, Homo sapien
caaggccgttcattgtccatcgaga

SEQ ID NO: 4595036 - DNA, 25 bp, Homo sapien
gctcaggcagcctgggtcatcagga

SEQ ID NO: 4595037 - DNA, 25 bp, Homo sapien
ctatttgctgttttctgtgaaccac

SEQ ID NO: 4595038 - DNA, 25 bp, Homo sapien
ccgggtgcctgagccgaagcctgtt

SEQ ID NO: 4595039 - DNA, 25 bp, Homo sapien
cgaagcctgtttcctcgttgtcctt

SEQ ID NO: 4595040 - DNA, 25 bp, Homo sapien
atgttggctttcgtcttctccaggg

SEQ ID NO: 4595041 - DNA, 25 bp, Homo sapien
gttggctttcgtcttctccagggct

SEQ ID NO: 4595042 - DNA, 25 bp, Homo sapien
tactcggtggagaatcgtcgtgtca

SEQ ID NO: 4595043 - DNA, 25 bp, Homo sapien
aatcgtcgtgtcactgcctggatga

SEQ ID NO: 4595044 - DNA, 25 bp, Homo sapien
agctcatactcggtggagaatcgtc

SEQ ID NO: 4595045 - DNA, 25 bp, Homo sapien
ggtggagaatcgtcgtgtcactgcc

SEQ ID NO: 4595046 - DNA, 25 bp, Homo sapien
taatgctgatgatggtagaggtggc

SEQ ID NO: 4595047 - DNA, 25 bp, Homo sapien
ccaatgacgttgttggtaatgctga

SEQ ID NO: 4595048 - DNA, 25 bp, Homo sapien
tagaggtggcgtcctgcttccggat

SEQ ID NO: 4595049 - DNA, 25 bp, Homo sapien
cagaccagaccttgcccaatgacgt

SEQ ID NO: 4595050 - DNA, 25 bp, Homo sapien
tccaggtaatggcatatgaggcaca

SEQ ID NO: 4595051 - DNA, 25 bp, Homo sapien
gggtgcccagctggatgtttgaaaa

SEQ ID NO: 4595052 - DNA, 25 bp, Homo sapien
gggaccctcatccaagggcttgagg

SEQ ID NO: 4595053 - DNA, 25 bp, Homo sapien
tttgaaaagacccaggtccagctac

SEQ ID NO: 4595054 - DNA, 25 bp, Homo sapien
ggctgcccggagcttgtcagcctca

SEQ ID NO: 4595055 - DNA, 25 bp, Homo sapien
ctgttcaggatccacaactctttgc

SEQ ID NO: 4595056 - DNA, 25 bp, Homo sapien
cgccctgggcgatagcgttgcagta

SEQ ID NO: 4595057 - DNA, 25 bp, Homo sapien
gaccagtgtggcatttcggaactgc

SEQ ID NO: 4595058 - DNA, 25 bp, Homo sapien
tccgttggagcaggcggtgctgatg

SEQ ID NO: 4595059 - DNA, 25 bp, Homo sapien
tcctcacactctggaactccgttgg

SEQ ID NO: 4595060 - DNA, 25 bp, Homo sapien
ctctggaactccgttggagcaggcg

SEQ ID NO: 4595061 - DNA, 25 bp, Homo sapien
tcacactctggaactccgttggagc

SEQ ID NO: 4595062 - DNA, 25 bp, Homo sapien
aggttttctgggatctccctccagt

SEQ ID NO: 4595063 - DNA, 25 bp, Homo sapien
tattatttctgaagtgaatgaagag

SEQ ID NO: 4595064 - DNA, 25 bp, Homo sapien
ggatctccctccagttgttggtatt

SEQ ID NO: 4595065 - DNA, 25 bp, Homo sapien
agaggggtgtgacctgcttcttcag

SEQ ID NO: 4595066 - DNA, 25 bp, Homo sapien
atgaatctcatcaaagactcatgcc

SEQ ID NO: 4595067 - DNA, 25 bp, Homo sapien
atatgaatctcatcaaagactcatg

SEQ ID NO: 4595068 - DNA, 25 bp, Homo sapien
tatgaatctcatcaaagactcatgc

SEQ ID NO: 4595069 - DNA, 25 bp, Homo sapien
acatggcaggttgatttctgtgccc

SEQ ID NO: 4595070 - DNA, 25 bp, Homo sapien
tttgtggactctggtttgacatggc

SEQ ID NO: 4595071 - DNA, 25 bp, Homo sapien
ctggatccacgtccaaatgtaaaag

SEQ ID NO: 4595072 - DNA, 25 bp, Homo sapien
tcctaacattgtagtgtaagcccca

SEQ ID NO: 4595073 - DNA, 25 bp, Homo sapien
gatgaagtcaaagtctacagaagga

SEQ ID NO: 4595074 - DNA, 25 bp, Homo sapien
tctacagaaggagtcattcaacccc

SEQ ID NO: 4595075 - DNA, 25 bp, Homo sapien
aagggacaagtcagcaagggacaga

SEQ ID NO: 4595076 - DNA, 25 bp, Homo sapien
gactcagaattaaagggacaaggcc

SEQ ID NO: 4595077 - DNA, 25 bp, Homo sapien
ggaaacacagtagagggaggcacct

SEQ ID NO: 4595078 - DNA, 25 bp, Homo sapien
caggcagaataggactccaggagga

SEQ ID NO: 4595079 - DNA, 25 bp, Homo sapien
gaaaagtcacctctcatgaaccctt

SEQ ID NO: 4595080 - DNA, 25 bp, Homo sapien
aactcctggaagatgtattccccta

SEQ ID NO: 4595081 - DNA, 25 bp, Homo sapien
gcgaactggttcttgaaccctacca

SEQ ID NO: 4595082 - DNA, 25 bp, Homo sapien
aacttcctaatagtgcactttcagg

SEQ ID NO: 4595083 - DNA, 25 bp, Homo sapien
caggagtccagtaggcaatagtcta

SEQ ID NO: 4595084 - DNA, 25 bp, Homo sapien
ttgcttttgaaggttccctgaccag

SEQ ID NO: 4595085 - DNA, 25 bp, Homo sapien
tggggccatagacctcggagcggtc

SEQ ID NO: 4595086 - DNA, 25 bp, Homo sapien
ggccatagacctcggagcggtcaaa

SEQ ID NO: 4595087 - DNA, 25 bp, Homo sapien
acatgagcttgaagtagctcaggct

SEQ ID NO: 4595088 - DNA, 25 bp, Homo sapien
catagacctcggagcggtcaaacat

SEQ ID NO: 4595089 - DNA, 25 bp, Homo sapien
ccagagtgacagggaccttatgggc

SEQ ID NO: 4595090 - DNA, 25 bp, Homo sapien
cagagtgacagggaccttatgggca

SEQ ID NO: 4595091 - DNA, 25 bp, Homo sapien
ggaagagggtgttgttcagcgccag

SEQ ID NO: 4595092 - DNA, 25 bp, Homo sapien
gggtgttgttcagcgccagagtgac

SEQ ID NO: 4595093 - DNA, 25 bp, Homo sapien
caggttgaaggcgtcattaatgatc

SEQ ID NO: 4595094 - DNA, 25 bp, Homo sapien
tggccaggttgaaggcgtcattaat

SEQ ID NO: 4595095 - DNA, 25 bp, Homo sapien
attaatgatctgtgcccgattgatg

SEQ ID NO: 4595096 - DNA, 25 bp, Homo sapien
tctgtgcccgattgatgacagggat

SEQ ID NO: 4595097 - DNA, 25 bp, Homo sapien
tctcttcgtcgtagttcacccggta

SEQ ID NO: 4595098 - DNA, 25 bp, Homo sapien
tagttcacccggtaatagcccgtca

SEQ ID NO: 4595099 - DNA, 25 bp, Homo sapien
tagcccgtcacattgaggttcagca

SEQ ID NO: 4595100 - DNA, 25 bp, Homo sapien
ttcctccagttctcttcgtcgtagt

SEQ ID NO: 4595101 - DNA, 25 bp, Homo sapien
gggctgacccctggacctcttgcaa

SEQ ID NO: 4595102 - DNA, 25 bp, Homo sapien
atgggctgacccctggacctcttgc

SEQ ID NO: 4595103 - DNA, 25 bp, Homo sapien
gctgacccctggacctcttgcaaga

SEQ ID NO: 4595104 - DNA, 25 bp, Homo sapien
ggccatgggctgacccctggacctc

SEQ ID NO: 4595105 - DNA, 25 bp, Homo sapien
gaccatcaacccatgaagatgacat

SEQ ID NO: 4595106 - DNA, 25 bp, Homo sapien
gcttcacagaccatcaacccatgaa

SEQ ID NO: 4595107 - DNA, 25 bp, Homo sapien
aacccatgaagatgacatgccaccc

SEQ ID NO: 4595108 - DNA, 25 bp, Homo sapien
tcacagaccatcaacccatgaagat

SEQ ID NO: 4595109 - DNA, 25 bp, Homo sapien
aactagagaccagagcgggatggta

SEQ ID NO: 4595110 - DNA, 25 bp, Homo sapien
ttaatcctcacataactaatggagt

SEQ ID NO: 4595111 - DNA, 25 bp, Homo sapien
accagagcgggatggtaacttgccc

SEQ ID NO: 4595112 - DNA, 25 bp, Homo sapien
ggagtattgctcttagcctcatttt

SEQ ID NO: 4595113 - DNA, 25 bp, Homo sapien
ttacatctatcagccagtagtcctg

SEQ ID NO: 4595114 - DNA, 25 bp, Homo sapien
tcttacatctatcagccagtagtcc

SEQ ID NO: 4595115 - DNA, 25 bp, Homo sapien
ctcttacatctatcagccagtagtc

SEQ ID NO: 4595116 - DNA, 25 bp, Homo sapien
acatctatcagccagtagtcctgct

SEQ ID NO: 4595117 - DNA, 25 bp, Homo sapien
ctgcaattaaagatccagaggtggt

SEQ ID NO: 4595118 - DNA, 25 bp, Homo sapien
gtggtgagagatggcggtgtggtca

SEQ ID NO: 4595119 - DNA, 25 bp, Homo sapien
caattaaagatccagaggtggtgag

SEQ ID NO: 4595120 - DNA, 25 bp, Homo sapien
gaggtggtgagagatggcggtgtgg

SEQ ID NO: 4595121 - DNA, 25 bp, Homo sapien
ggttcatgatgtcccgcacggtggt

SEQ ID NO: 4595122 - DNA, 25 bp, Homo sapien
ggtccccgtgctggtatccaccgtg

SEQ ID NO: 4595123 - DNA, 25 bp, Homo sapien
atgaccgggaagcccatctgcaggg

SEQ ID NO: 4595124 - DNA, 25 bp, Homo sapien
gagttggatggaccggttgttcaca

SEQ ID NO: 4595125 - DNA, 25 bp, Homo sapien
tagaagctggacgggaatttgaggc

SEQ ID NO: 4595126 - DNA, 25 bp, Homo sapien
gtgactctgtgacaagatcctgggt

SEQ ID NO: 4595127 - DNA, 25 bp, Homo sapien
aatttgaggctcggaactctggagg

SEQ ID NO: 4595128 - DNA, 25 bp, Homo sapien
tgggtctcgcttccctggtgagaca

SEQ ID NO: 4595129 - DNA, 25 bp, Homo sapien
ggttcaggtagatggtgttctggta

SEQ ID NO: 4595130 - DNA, 25 bp, Homo sapien
aggttcaggtagatggtgttctggt

SEQ ID NO: 4595131 - DNA, 25 bp, Homo sapien
gtggaaagacggggcacagtgagag

SEQ ID NO: 4595132 - DNA, 25 bp, Homo sapien
ctgtggaaagacggggcacagtgag

SEQ ID NO: 4595133 - DNA, 25 bp, Homo sapien
tgtggaaagacggggcacagtgaga

SEQ ID NO: 4595134 - DNA, 25 bp, Homo sapien
ctgcttgaatacgtcctcggacagg

SEQ ID NO: 4595135 - DNA, 25 bp, Homo sapien
gcttgaatacgtcctcggacaggaa

SEQ ID NO: 4595136 - DNA, 25 bp, Homo sapien
atacgtcctcggacaggaagctgga

SEQ ID NO: 4595137 - DNA, 25 bp, Homo sapien
tgaatacgtcctcggacaggaagct

SEQ ID NO: 4595138 - DNA, 25 bp, Homo sapien
cttccccgtgccccacgaggagcgg

SEQ ID NO: 4595139 - DNA, 25 bp, Homo sapien
gctcactgatctgggccggcgtgtt

SEQ ID NO: 4595140 - DNA, 25 bp, Homo sapien
tctgggccggcgtgttgatctccga

SEQ ID NO: 4595141 - DNA, 25 bp, Homo sapien
tgccatcacgcggtacacatcattc

SEQ ID NO: 4595142 - DNA, 25 bp, Homo sapien
taggagatggcgtcaaacagctcac

SEQ ID NO: 4595143 - DNA, 25 bp, Homo sapien
aattccccagggccatcaggagact

SEQ ID NO: 4595144 - DNA, 25 bp, Homo sapien
tgcaaattccccagggccatcagga

SEQ ID NO: 4595145 - DNA, 25 bp, Homo sapien
tccccagggccatcaggagactggc

SEQ ID NO: 4595146 - DNA, 25 bp, Homo sapien
ctgcaaattccccagggccatcagg

SEQ ID NO: 4595147 - DNA, 25 bp, Homo sapien
gctccgcatagtcagcacccaggta

SEQ ID NO: 4595148 - DNA, 25 bp, Homo sapien
tactccacgtaggaggcgaagccct

SEQ ID NO: 4595149 - DNA, 25 bp, Homo sapien
tctatggtcaccaggttcccgaacc

SEQ ID NO: 4595150 - DNA, 25 bp, Homo sapien
gaagccctcgttcagccacaggtca

SEQ ID NO: 4595151 - DNA, 25 bp, Homo sapien
gcagggagttctcccggtaggtcac

SEQ ID NO: 4595152 - DNA, 25 bp, Homo sapien
ccagttctccatggcgccggcgttg

SEQ ID NO: 4595153 - DNA, 25 bp, Homo sapien
tgaccacccgctccttgttgctgct

SEQ ID NO: 4595154 - DNA, 25 bp, Homo sapien
ggtaggtcaccagtccccagttctc

SEQ ID NO: 4595155 - DNA, 25 bp, Homo sapien
gtggcccgccgcaatggcactgggc

SEQ ID NO: 4595156 - DNA, 25 bp, Homo sapien
tgggtagggtgtgtcataatgacca

SEQ ID NO: 4595157 - DNA, 25 bp, Homo sapien
taatgaccagcaaagaagttaagga

SEQ ID NO: 4595158 - DNA, 25 bp, Homo sapien
gggcccgtcacgttcagggcataat

SEQ ID NO: 4595159 - DNA, 25 bp, Homo sapien
gcagaccaggggctcctgtttgatc

SEQ ID NO: 4595160 - DNA, 25 bp, Homo sapien
caaggtgtgaggaagaagcagacca

SEQ ID NO: 4595161 - DNA, 25 bp, Homo sapien
ctgcaaggtgtgaggaagaagcaga

SEQ ID NO: 4595162 - DNA, 25 bp, Homo sapien
ggtgtgaggaagaagcagaccaggg

SEQ ID NO: 4595163 - DNA, 25 bp, Homo sapien
agacaccattggatgcctgcttctc

SEQ ID NO: 4595164 - DNA, 25 bp, Homo sapien
aagacaccattggatgcctgcttct

SEQ ID NO: 4595165 - DNA, 25 bp, Homo sapien
gacaccattggatgcctgcttctcc

SEQ ID NO: 4595166 - DNA, 25 bp, Homo sapien
acaccattggatgcctgcttctcca

SEQ ID NO: 4595167 - DNA, 25 bp, Homo sapien
acatcttgggcgtggtgtggaactc

SEQ ID NO: 4595168 - DNA, 25 bp, Homo sapien
gccagcaagtacgtggacatcttgg

SEQ ID NO: 4595169 - DNA, 25 bp, Homo sapien
catcttgggcgtggtgtggaactca

SEQ ID NO: 4595170 - DNA, 25 bp, Homo sapien
atgaaggccagcaagtacgtggaca

SEQ ID NO: 4595171 - DNA, 25 bp, Homo sapien
tgggaaggacttccgggcatctgca

SEQ ID NO: 4595172 - DNA, 25 bp, Homo sapien
catggccggctcatcgaagcatggg

SEQ ID NO: 4595173 - DNA, 25 bp, Homo sapien
ctttgggaagcatgttggacagggc

SEQ ID NO: 4595174 - DNA, 25 bp, Homo sapien
tgatgttgaactcggccttcatggc

SEQ ID NO: 4595175 - DNA, 25 bp, Homo sapien
tactttggtccaaggtggtggccga

SEQ ID NO: 4595176 - DNA, 25 bp, Homo sapien
ccttgcaggtgaaacggacggtgct

SEQ ID NO: 4595177 - DNA, 25 bp, Homo sapien
catgtactcgctgcggtagaagccc

SEQ ID NO: 4595178 - DNA, 25 bp, Homo sapien
gatgatgacgtcagtggcctccttg

SEQ ID NO: 4595179 - DNA, 25 bp, Homo sapien
gggggagctgttggcgttcttgttc

SEQ ID NO: 4595180 - DNA, 25 bp, Homo sapien
ccacgggggagctgttggcgttctt

SEQ ID NO: 4595181 - DNA, 25 bp, Homo sapien
gagctgttggcgttcttgttcttct

SEQ ID NO: 4595182 - DNA, 25 bp, Homo sapien
gggagctgttggcgttcttgttctt

SEQ ID NO: 4595183 - DNA, 25 bp, Homo sapien
cactgacagtgcgatgattgtgcac

SEQ ID NO: 4595184 - DNA, 25 bp, Homo sapien
ttgtgcacacggctgccacgcccag

SEQ ID NO: 4595185 - DNA, 25 bp, Homo sapien
tgacagtgcgatgattgtgcacacg

SEQ ID NO: 4595186 - DNA, 25 bp, Homo sapien
ccaggatgcccagggacttggaaat

SEQ ID NO: 4595187 - DNA, 25 bp, Homo sapien
caggccgggcttatatccccaaagg

SEQ ID NO: 4595188 - DNA, 25 bp, Homo sapien
ggcacgctccgcctggggagaggag

SEQ ID NO: 4595189 - DNA, 25 bp, Homo sapien
caaaaattaaccagggctccaacag

SEQ ID NO: 4595190 - DNA, 25 bp, Homo sapien
ccaacaggcgaaggtcactggactg

SEQ ID NO: 4595191 - DNA, 25 bp, Homo sapien
catcctacaagtcttccgcagcgaa

SEQ ID NO: 4595192 - DNA, 25 bp, Homo sapien
gaactcagcgtggttttccctttga

SEQ ID NO: 4595193 - DNA, 25 bp, Homo sapien
tgaccaagtcaagctcctatgagct

SEQ ID NO: 4595194 - DNA, 25 bp, Homo sapien
taacttgagtcctggactgcaggcc

SEQ ID NO: 4595195 - DNA, 25 bp, Homo sapien
tgtaaggagcgccagcgtgtaacga

SEQ ID NO: 4595196 - DNA, 25 bp, Homo sapien
gcgccagcgtgtaacgaaggtctca

SEQ ID NO: 4595197 - DNA, 25 bp, Homo sapien
cagcgtgtaacgaaggtctcattcc

SEQ ID NO: 4595198 - DNA, 25 bp, Homo sapien
aacgaaggtctcattccccagaagg

SEQ ID NO: 4595199 - DNA, 25 bp, Homo sapien
gcctcaagacactgggccggtttcc

SEQ ID NO: 4595200 - DNA, 25 bp, Homo sapien
agggagggcgtggaataggctccac

SEQ ID NO: 4595201 - DNA, 25 bp, Homo sapien
gggagggcgtggaataggctccaca

SEQ ID NO: 4595202 - DNA, 25 bp, Homo sapien
ggccgccgggcgctggaacctggac

SEQ ID NO: 4595203 - DNA, 25 bp, Homo sapien
cgccgggcgctggaacctggaccct

SEQ ID NO: 4595204 - DNA, 25 bp, Homo sapien
ggcgctggaacctggaccctggacc

SEQ ID NO: 4595205 - DNA, 25 bp, Homo sapien
cctggaccctggcgggttccgagct

SEQ ID NO: 4595206 - DNA, 25 bp, Homo sapien
ctgctgcccccgacggggtccctgt

SEQ ID NO: 4595207 - DNA, 25 bp, Homo sapien
ggacccgccggccacatctggacgg

SEQ ID NO: 4595208 - DNA, 25 bp, Homo sapien
tccctgtcgccgcagcccgcgggac

SEQ ID NO: 4595209 - DNA, 25 bp, Homo sapien
cgggacccgccggccacatctggac

SEQ ID NO: 4595210 - DNA, 25 bp, Homo sapien
gagtcgggaacacgcgcttctcatt

SEQ ID NO: 4595211 - DNA, 25 bp, Homo sapien
cgaccttgcgaaaaagcaccggagt

SEQ ID NO: 4595212 - DNA, 25 bp, Homo sapien
ttcagaaggcgcagtagcacgacct

SEQ ID NO: 4595213 - DNA, 25 bp, Homo sapien
tgggactcgtagttcagaaggcgca

SEQ ID NO: 4595214 - DNA, 25 bp, Homo sapien
cagggtgggaaacgcatttttcagc

SEQ ID NO: 4595215 - DNA, 25 bp, Homo sapien
cgaaagaccagaagattaacaggct

SEQ ID NO: 4595216 - DNA, 25 bp, Homo sapien
gaaccatgtgaataccgtgtctaat

SEQ ID NO: 4595217 - DNA, 25 bp, Homo sapien
tatgtgcacgcgctgataacacgag

SEQ ID NO: 4595218 - DNA, 25 bp, Homo sapien
tttgctttgacctaatccagaaggg

SEQ ID NO: 4595219 - DNA, 25 bp, Homo sapien
gatgttcagtaatggaggattggtt

SEQ ID NO: 4595220 - DNA, 25 bp, Homo sapien
caataaatcatagctggacgcggtg

SEQ ID NO: 4595221 - DNA, 25 bp, Homo sapien
gaaaaaagtactatgctaccattct

SEQ ID NO: 4595222 - DNA, 25 bp, Homo sapien
gatgcagcactgaacacgagacaag

SEQ ID NO: 4595223 - DNA, 25 bp, Homo sapien
gaaagcccttactagagactggtcc

SEQ ID NO: 4595224 - DNA, 25 bp, Homo sapien
tgaaacacgcagatggagaaccctc

SEQ ID NO: 4595225 - DNA, 25 bp, Homo sapien
aaacatccagtacgtcagagtgcca

SEQ ID NO: 4595226 - DNA, 25 bp, Homo sapien
aggaaagcctagtattctatacaac

SEQ ID NO: 4595227 - DNA, 25 bp, Homo sapien
ctgagccacagtgtgagacccccat

SEQ ID NO: 4595228 - DNA, 25 bp, Homo sapien
aaaggaaagcctagtattctataca

SEQ ID NO: 4595229 - DNA, 25 bp, Homo sapien
gatcacttgaccccggggcttcgag

SEQ ID NO: 4595230 - DNA, 25 bp, Homo sapien
tatcccaggaaatctagcataaggg

SEQ ID NO: 4595231 - DNA, 25 bp, Homo sapien
aaaaccattggtttctggcaggcaa

SEQ ID NO: 4595232 - DNA, 25 bp, Homo sapien
tcgctttgaatctgtaggaccactc

SEQ ID NO: 4595233 - DNA, 25 bp, Homo sapien
cattcaaaatctaggctatcccagg

SEQ ID NO: 4595234 - DNA, 25 bp, Homo sapien
gggacacagacgactctttggctct

SEQ ID NO: 4595235 - DNA, 25 bp, Homo sapien
ggctcttatactctatgacatgatc

SEQ ID NO: 4595236 - DNA, 25 bp, Homo sapien
gctctggatttgtgaccctcaacat

SEQ ID NO: 4595237 - DNA, 25 bp, Homo sapien
tgggcttcggcttcaacatcagtta

SEQ ID NO: 4595238 - DNA, 25 bp, Homo sapien
gaaagaacatttatgggcgcctaag

SEQ ID NO: 4595239 - DNA, 25 bp, Homo sapien
gaagcagccctcatcttaaggtggc

SEQ ID NO: 4595240 - DNA, 25 bp, Homo sapien
tacaactgggactaggacaatgcgg

SEQ ID NO: 4595241 - DNA, 25 bp, Homo sapien
catattcttcatgaggcggtaacca

SEQ ID NO: 4595242 - DNA, 25 bp, Homo sapien
tggctataccaaaggattctggtgg

SEQ ID NO: 4595243 - DNA, 25 bp, Homo sapien
gctataccaaaggattctggtggcc

SEQ ID NO: 4595244 - DNA, 25 bp, Homo sapien
ttggctataccaaaggattctggtg

SEQ ID NO: 4595245 - DNA, 25 bp, Homo sapien
ggctataccaaaggattctggtggc

SEQ ID NO: 4595246 - DNA, 25 bp, Homo sapien
gcagtggccgtatgcatcagagaac

SEQ ID NO: 4595247 - DNA, 25 bp, Homo sapien
tgggtgcacccgagcagtgtcaata

SEQ ID NO: 4595248 - DNA, 25 bp, Homo sapien
taacaatctcagtagagccagcggg

SEQ ID NO: 4595249 - DNA, 25 bp, Homo sapien
gcgggtgactctggttctcctaaaa

SEQ ID NO: 4595250 - DNA, 25 bp, Homo sapien
cgccaatgttgatgttccgaggaat

SEQ ID NO: 4595251 - DNA, 25 bp, Homo sapien
ctttgatgttgagatcgccaatgtt

SEQ ID NO: 4595252 - DNA, 25 bp, Homo sapien
ccgaggaatctctggcaggttgatg

SEQ ID NO: 4595253 - DNA, 25 bp, Homo sapien
tgatgttccgaggaatctctggcag

SEQ ID NO: 4595254 - DNA, 25 bp, Homo sapien
ttggcacagggatccaaagcctgca

SEQ ID NO: 4595255 - DNA, 25 bp, Homo sapien
cagctcctcagaggcggagtgtggc

SEQ ID NO: 4595256 - DNA, 25 bp, Homo sapien
agcctgcagtcctactagactacca

SEQ ID NO: 4595257 - DNA, 25 bp, Homo sapien
tttggcacagggatccaaagcctgc

SEQ ID NO: 4595258 - DNA, 25 bp, Homo sapien
gttttgagcctcaatctgagccacg

SEQ ID NO: 4595259 - DNA, 25 bp, Homo sapien
tgagcctcaatctgagccacgattt

SEQ ID NO: 4595260 - DNA, 25 bp, Homo sapien
agcctcaatctgagccacgatttca

SEQ ID NO: 4595261 - DNA, 25 bp, Homo sapien
gtttccaacaccatcccacccatca

SEQ ID NO: 4595262 - DNA, 25 bp, Homo sapien
cttccaggattgcagtgaggactgg

SEQ ID NO: 4595263 - DNA, 25 bp, Homo sapien
tttaaagtgcttcagcctccttcca

SEQ ID NO: 4595264 - DNA, 25 bp, Homo sapien
agtgaggactggatgagataaatgt

SEQ ID NO: 4595265 - DNA, 25 bp, Homo sapien
atgtgtgtaaagcacctagcctggt

SEQ ID NO: 4595266 - DNA, 25 bp, Homo sapien
cagaaactggaacgggggctgccat

SEQ ID NO: 4595267 - DNA, 25 bp, Homo sapien
gtgtacagaggtgctgttttgcaag

SEQ ID NO: 4595268 - DNA, 25 bp, Homo sapien
aattctgagacacaatgtaacacgg

SEQ ID NO: 4595269 - DNA, 25 bp, Homo sapien
gagaaatagtcctctatacctgcac

SEQ ID NO: 4595270 - DNA, 25 bp, Homo sapien
tcacaaaccaacacagggaggctgg

SEQ ID NO: 4595271 - DNA, 25 bp, Homo sapien
gagtcagggcacaaagaagggttct

SEQ ID NO: 4595272 - DNA, 25 bp, Homo sapien
gatgagcgaacagctgcccgtgtta

SEQ ID NO: 4595273 - DNA, 25 bp, Homo sapien
ctgatgcgctgaccttgaggatgcc

SEQ ID NO: 4595274 - DNA, 25 bp, Homo sapien
ctctaacaatgtctattttcaaata

SEQ ID NO: 4595275 - DNA, 25 bp, Homo sapien
aagaacataatctctaacaatgtct

SEQ ID NO: 4595276 - DNA, 25 bp, Homo sapien
taacaatgtctattttcaaatatgc

SEQ ID NO: 4595277 - DNA, 25 bp, Homo sapien
aaagaacataatctctaacaatgtc

SEQ ID NO: 4595278 - DNA, 25 bp, Homo sapien
caggatctgaatgtggctctatcac

SEQ ID NO: 4595279 - DNA, 25 bp, Homo sapien
catttaggatgtcaaagcaggcggg

SEQ ID NO: 4595280 - DNA, 25 bp, Homo sapien
gagcgggtccataatcagagtccag

SEQ ID NO: 4595281 - DNA, 25 bp, Homo sapien
taaaaggatcactcactcactggct

SEQ ID NO: 4595282 - DNA, 25 bp, Homo sapien
ggattatcgtcgtgagcctccacaa

SEQ ID NO: 4595283 - DNA, 25 bp, Homo sapien
tccacaaccagcccaagtgtccttc

SEQ ID NO: 4595284 - DNA, 25 bp, Homo sapien
ttatcgtcgtgagcctccacaacca

SEQ ID NO: 4595285 - DNA, 25 bp, Homo sapien
ctggggattatcgtcgtgagcctcc

SEQ ID NO: 4595286 - DNA, 25 bp, Homo sapien
cactaagaattgaagataacataca

SEQ ID NO: 4595287 - DNA, 25 bp, Homo sapien
ctgtctttatgttaccctgagggaa

SEQ ID NO: 4595288 - DNA, 25 bp, Homo sapien
taccctgagggaataagattttggc

SEQ ID NO: 4595289 - DNA, 25 bp, Homo sapien
gccatcatgaccagccgatctctgt

SEQ ID NO: 4595290 - DNA, 25 bp, Homo sapien
tgatgactaggaaacggccacagga

SEQ ID NO: 4595291 - DNA, 25 bp, Homo sapien
gaagggctgtattcactccgagacc

SEQ ID NO: 4595292 - DNA, 25 bp, Homo sapien
gaaaaccaggctatgggactctaga

SEQ ID NO: 4595293 - DNA, 25 bp, Homo sapien
taaggacaccttagagaccagtgca

SEQ ID NO: 4595294 - DNA, 25 bp, Homo sapien
ctctggcattatctaacaaagtggc

SEQ ID NO: 4595295 - DNA, 25 bp, Homo sapien
tctacagtccagaggccttgagcct

SEQ ID NO: 4595296 - DNA, 25 bp, Homo sapien
tataaatggatacaatcactctggc

SEQ ID NO: 4595297 - DNA, 25 bp, Homo sapien
cagacttcttttgccagtgctgcag

SEQ ID NO: 4595298 - DNA, 25 bp, Homo sapien
ccatatggaagatcaaatccaattc

SEQ ID NO: 4595299 - DNA, 25 bp, Homo sapien
caattcacacacattttcgaaacac

SEQ ID NO: 4595300 - DNA, 25 bp, Homo sapien
acattttcgaaacacttatccagag

SEQ ID NO: 4595301 - DNA, 25 bp, Homo sapien
gaaacacttatccagagtttccaca

SEQ ID NO: 4595302 - DNA, 25 bp, Homo sapien
cctttctttatatggtgtccatttt

SEQ ID NO: 4595303 - DNA, 25 bp, Homo sapien
ctgtagcttaagaatagggttttgg

SEQ ID NO: 4595304 - DNA, 25 bp, Homo sapien
tctctgtagcttaagaatagggttt

SEQ ID NO: 4595305 - DNA, 25 bp, Homo sapien
aggctttctctgtagcttaagaata

SEQ ID NO: 4595306 - DNA, 25 bp, Homo sapien
ccccggaaggagctattcagtctgt

SEQ ID NO: 4595307 - DNA, 25 bp, Homo sapien
gcaaagctttgaggtggctggtact

SEQ ID NO: 4595308 - DNA, 25 bp, Homo sapien
caagatagggtagttatccaggaca

SEQ ID NO: 4595309 - DNA, 25 bp, Homo sapien
tggtactgctaaaagcggcacgtgg

SEQ ID NO: 4595310 - DNA, 25 bp, Homo sapien
aagaggctgaactgaagacattgca

SEQ ID NO: 4595311 - DNA, 25 bp, Homo sapien
ttcaagatcacaatcaaggtcaaga

SEQ ID NO: 4595312 - DNA, 25 bp, Homo sapien
aacacaaagcgcatgctgatgggca

SEQ ID NO: 4595313 - DNA, 25 bp, Homo sapien
tacacttctgaggagcataatgaca

SEQ ID NO: 4595314 - DNA, 25 bp, Homo sapien
tgttctgatgtcaggtccttgttcc

SEQ ID NO: 4595315 - DNA, 25 bp, Homo sapien
gagctagtgttccagtttgtagggt

SEQ ID NO: 4595316 - DNA, 25 bp, Homo sapien
tgttcccaaagagctagtgttccag

SEQ ID NO: 4595317 - DNA, 25 bp, Homo sapien
ttgtagggtgttgcactggcttttc

SEQ ID NO: 4595318 - DNA, 25 bp, Homo sapien
gctatgaagaaaacaacttccagat

SEQ ID NO: 4595319 - DNA, 25 bp, Homo sapien
cttgggagctatgaagaaaacaact

SEQ ID NO: 4595320 - DNA, 25 bp, Homo sapien
tgaagaaaacaacttccagatgtac

SEQ ID NO: 4595321 - DNA, 25 bp, Homo sapien
tatgaagaaaacaacttccagatgt

SEQ ID NO: 4595322 - DNA, 25 bp, Homo sapien
aataccaaagatacgcagcctcacc

SEQ ID NO: 4595323 - DNA, 25 bp, Homo sapien
caaataccaaagatacgcagcctca

SEQ ID NO: 4595324 - DNA, 25 bp, Homo sapien
tattcagggaaactctagtgaaaac

SEQ ID NO: 4595325 - DNA, 25 bp, Homo sapien
cagggaaactctagtgaaaacaatg

SEQ ID NO: 4595326 - DNA, 25 bp, Homo sapien
taacctcaaagttaggttgcagtga

SEQ ID NO: 4595327 - DNA, 25 bp, Homo sapien
gagtgagactccaaattatataaca

SEQ ID NO: 4595328 - DNA, 25 bp, Homo sapien
agtactggaggcattataaattaac

SEQ ID NO: 4595329 - DNA, 25 bp, Homo sapien
ttacatagtactggaggcattataa

SEQ ID NO: 4595330 - DNA, 25 bp, Homo sapien
cgtgcctggctaacatactctttct

SEQ ID NO: 4595331 - DNA, 25 bp, Homo sapien
caaccgtttgcataaagacttagag

SEQ ID NO: 4595332 - DNA, 25 bp, Homo sapien
ttttagcagaataggcacaaccgtt

SEQ ID NO: 4595333 - DNA, 25 bp, Homo sapien
ttaattccctttgatccaggcattc

SEQ ID NO: 4595334 - DNA, 25 bp, Homo sapien
cttttctgcactggtacacttttag

SEQ ID NO: 4595335 - DNA, 25 bp, Homo sapien
tctgcactggtacacttttagaata

SEQ ID NO: 4595336 - DNA, 25 bp, Homo sapien
atcttttctgcactggtacactttt

SEQ ID NO: 4595337 - DNA, 25 bp, Homo sapien
tttctgcactggtacacttttagaa

SEQ ID NO: 4595338 - DNA, 25 bp, Homo sapien
tgaggtccaagattccaagttcact

SEQ ID NO: 4595339 - DNA, 25 bp, Homo sapien
ctggatgaggtccaagattccaagt

SEQ ID NO: 4595340 - DNA, 25 bp, Homo sapien
aggtccaagattccaagttcactct

SEQ ID NO: 4595341 - DNA, 25 bp, Homo sapien
gatgaggtccaagattccaagttca

SEQ ID NO: 4595342 - DNA, 25 bp, Homo sapien
gtttgtagtcagagccaccaatcaa

SEQ ID NO: 4595343 - DNA, 25 bp, Homo sapien
aatacaaagtagagggtagcatagt

SEQ ID NO: 4595344 - DNA, 25 bp, Homo sapien
agggtagcatagtgccggtagatca

SEQ ID NO: 4595345 - DNA, 25 bp, Homo sapien
catagtgccggtagatcagtttgta

SEQ ID NO: 4595346 - DNA, 25 bp, Homo sapien
catcccgcttgaggactagatggaa

SEQ ID NO: 4595347 - DNA, 25 bp, Homo sapien
gaaagtctctcgaacaatctgctgt

SEQ ID NO: 4595348 - DNA, 25 bp, Homo sapien
tccaccctccaagaagttacagatg

SEQ ID NO: 4595349 - DNA, 25 bp, Homo sapien
tacagatgttgtcatcccgcttgag

SEQ ID NO: 4595350 - DNA, 25 bp, Homo sapien
cttattgagcccttatgcggcagca

SEQ ID NO: 4595351 - DNA, 25 bp, Homo sapien
tgccaggatcaagaaaagggtcagc

SEQ ID NO: 4595352 - DNA, 25 bp, Homo sapien
taaatgcttaagtagggcgagggtc

SEQ ID NO: 4595353 - DNA, 25 bp, Homo sapien
accagcctgcgcctagattaaatgc

SEQ ID NO: 4595354 - DNA, 25 bp, Homo sapien
cgtggcttcccatggttgttgaaaa

SEQ ID NO: 4595355 - DNA, 25 bp, Homo sapien
tagaagcggactagccgtggcttcc

SEQ ID NO: 4595356 - DNA, 25 bp, Homo sapien
cccatggttgttgaaaaccagaatc

SEQ ID NO: 4595357 - DNA, 25 bp, Homo sapien
gaaacgctggtagaagcggactagc

SEQ ID NO: 4595358 - DNA, 25 bp, Homo sapien
tgctgagagcggcactcggaaactt

SEQ ID NO: 4595359 - DNA, 25 bp, Homo sapien
aaatatataacagtccgggcgcggt

SEQ ID NO: 4595360 - DNA, 25 bp, Homo sapien
catgtccgtatactgcagatggagc

SEQ ID NO: 4595361 - DNA, 25 bp, Homo sapien
tcacttccggttggtgcgctgctga

SEQ ID NO: 4595362 - DNA, 25 bp, Homo sapien
tgtttgatctgtacaggaccctgga

SEQ ID NO: 4595363 - DNA, 25 bp, Homo sapien
gatacggaagtgttcatgacacctg

SEQ ID NO: 4595364 - DNA, 25 bp, Homo sapien
aaagcatggttctgcggactgcctg

SEQ ID NO: 4595365 - DNA, 25 bp, Homo sapien
gacaacccactttgctcaagattgg

SEQ ID NO: 4595366 - DNA, 25 bp, Homo sapien
taataacctaaacagaagaaagcga

SEQ ID NO: 4595367 - DNA, 25 bp, Homo sapien
aagaaagcgaaattgaataagatcc

SEQ ID NO: 4595368 - DNA, 25 bp, Homo sapien
cagtaaatactattaggataactgg

SEQ ID NO: 4595369 - DNA, 25 bp, Homo sapien
aggataactggttagcaatttgaaa

SEQ ID NO: 4595370 - DNA, 25 bp, Homo sapien
acaatgagaacggaggaagagcccc

SEQ ID NO: 4595371 - DNA, 25 bp, Homo sapien
tgaaatgctcctcacaaaaacgggt

SEQ ID NO: 4595372 - DNA, 25 bp, Homo sapien
taacaacctgtggaagatccctcag

SEQ ID NO: 4595373 - DNA, 25 bp, Homo sapien
taacatgcgtgaggatgccatgccc

SEQ ID NO: 4595374 - DNA, 25 bp, Homo sapien
agtatgtaccatgctcctgccagga

SEQ ID NO: 4595375 - DNA, 25 bp, Homo sapien
caagaaaggtcccaggttgtcattc

SEQ ID NO: 4595376 - DNA, 25 bp, Homo sapien
gagatacaactgcaccaacaccagg

SEQ ID NO: 4595377 - DNA, 25 bp, Homo sapien
gggaatagttaggttcagagccacc

SEQ ID NO: 4595378 - DNA, 25 bp, Homo sapien
tgcagcccccttcgaacacttttgg

SEQ ID NO: 4595379 - DNA, 25 bp, Homo sapien
cctgctctcggatctccgctgcagc

SEQ ID NO: 4595380 - DNA, 25 bp, Homo sapien
acacttttgggccatgatgttgtct

SEQ ID NO: 4595381 - DNA, 25 bp, Homo sapien
gatgttgtctgtccaggatgcccct

SEQ ID NO: 4595382 - DNA, 25 bp, Homo sapien
aggaagggaccatcgccccgagtct

SEQ ID NO: 4595383 - DNA, 25 bp, Homo sapien
tccatctctgactcgggcatccaga

SEQ ID NO: 4595384 - DNA, 25 bp, Homo sapien
tccagaacgccactgtgtggtcggg

SEQ ID NO: 4595385 - DNA, 25 bp, Homo sapien
agcagctctggcttgttgaccagcc

SEQ ID NO: 4595386 - DNA, 25 bp, Homo sapien
aaccagagacaaaatcaggaagaag

SEQ ID NO: 4595387 - DNA, 25 bp, Homo sapien
agacagcaaagaggctcaaccagag

SEQ ID NO: 4595388 - DNA, 25 bp, Homo sapien
caaagaggctcaaccagagacaaaa

SEQ ID NO: 4595389 - DNA, 25 bp, Homo sapien
ggctcaaccagagacaaaatcagga

SEQ ID NO: 4595390 - DNA, 25 bp, Homo sapien
tcccttggcgtcgaatttacggcga

SEQ ID NO: 4595391 - DNA, 25 bp, Homo sapien
aatttacggcgatggatgtgactgg

SEQ ID NO: 4595392 - DNA, 25 bp, Homo sapien
tgggccggatatacagcacgtagta

SEQ ID NO: 4595393 - DNA, 25 bp, Homo sapien
tgtaggacgacatgaggaagcccgt

SEQ ID NO: 4595394 - DNA, 25 bp, Homo sapien
tgctgtgccgagatacatcgatcag

SEQ ID NO: 4595395 - DNA, 25 bp, Homo sapien
tgtccaagatgctgtgccgagatac

SEQ ID NO: 4595396 - DNA, 25 bp, Homo sapien
gatacatcgatcagttctccctcca

SEQ ID NO: 4595397 - DNA, 25 bp, Homo sapien
cttcctgccatgagtgtccaagatg

SEQ ID NO: 4595398 - DNA, 25 bp, Homo sapien
gctttaagccgatctgtgtcatggg

SEQ ID NO: 4595399 - DNA, 25 bp, Homo sapien
tgtgcaaaagcagcgcggcaagtag

SEQ ID NO: 4595400 - DNA, 25 bp, Homo sapien
ggttccatatacgagatcacacagt

SEQ ID NO: 4595401 - DNA, 25 bp, Homo sapien
tggaatggtcccttcggcctcataa

SEQ ID NO: 4595402 - DNA, 25 bp, Homo sapien
ccttgttccggagcgcgccgtcgtg

SEQ ID NO: 4595403 - DNA, 25 bp, Homo sapien
cctggcagccggacgctctgcaccg

SEQ ID NO: 4595404 - DNA, 25 bp, Homo sapien
cgccgtcgtggtagatgcggctcat

SEQ ID NO: 4595405 - DNA, 25 bp, Homo sapien
ctgcaccgccttgttccggagcgcg

SEQ ID NO: 4595406 - DNA, 25 bp, Homo sapien
cccgggcaccccggcacagagccgg

SEQ ID NO: 4595407 - DNA, 25 bp, Homo sapien
ccccggcacagagccggcgcactgg

SEQ ID NO: 4595408 - DNA, 25 bp, Homo sapien
caccccggcacagagccggcgcact

SEQ ID NO: 4595409 - DNA, 25 bp, Homo sapien
ggcaccccggcacagagccggcgca

SEQ ID NO: 4595410 - DNA, 25 bp, Homo sapien
acgcgcggggacccgcgattcccag

SEQ ID NO: 4595411 - DNA, 25 bp, Homo sapien
gacgcgcggggacccgcgattccca

SEQ ID NO: 4595412 - DNA, 25 bp, Homo sapien
tgggtcctaggcacttttgttttca

SEQ ID NO: 4595413 - DNA, 25 bp, Homo sapien
ctgggattgttgaggaatctttgtt

SEQ ID NO: 4595414 - DNA, 25 bp, Homo sapien
cctgggattgttgaggaatctttgt

SEQ ID NO: 4595415 - DNA, 25 bp, Homo sapien
ggtggagagtgaaattgggcaggta

SEQ ID NO: 4595416 - DNA, 25 bp, Homo sapien
ctgtggcatttgactggtatggagc

SEQ ID NO: 4595417 - DNA, 25 bp, Homo sapien
ctgtagttcattgggggtgagctgt

SEQ ID NO: 4595418 - DNA, 25 bp, Homo sapien
ttgggcaggtaaacggggcatctgt

SEQ ID NO: 4595419 - DNA, 25 bp, Homo sapien
gaaaccacttcgcagtgacttcgtc

SEQ ID NO: 4595420 - DNA, 25 bp, Homo sapien
gcgaccttaagacgccaccagaaaa

SEQ ID NO: 4595421 - DNA, 25 bp, Homo sapien
aatatgttccaagcgtccaagagcc

SEQ ID NO: 4595422 - DNA, 25 bp, Homo sapien
cgtttgacacataatgggcgcctgg

SEQ ID NO: 4595423 - DNA, 25 bp, Homo sapien
gggaggccgtgttagacatggccag

SEQ ID NO: 4595424 - DNA, 25 bp, Homo sapien
ggccgtgttagacatggccaggcct

SEQ ID NO: 4595425 - DNA, 25 bp, Homo sapien
tgcaagctcagactgcccacggcct

SEQ ID NO: 4595426 - DNA, 25 bp, Homo sapien
ctatcctatcccggtgtccggaggg

SEQ ID NO: 4595427 - DNA, 25 bp, Homo sapien
gaattgtgctttgatcctcatctga

SEQ ID NO: 4595428 - DNA, 25 bp, Homo sapien
ttgtgctttgatcctcatctgactg

SEQ ID NO: 4595429 - DNA, 25 bp, Homo sapien
tgactgctgatccacgtacatgggc

SEQ ID NO: 4595430 - DNA, 25 bp, Homo sapien
tgatccacgtacatgggctcctgtg

SEQ ID NO: 4595431 - DNA, 25 bp, Homo sapien
cggctaaggcccagagcattctctt

SEQ ID NO: 4595432 - DNA, 25 bp, Homo sapien
aggaggccccggctaaggcccagag

SEQ ID NO: 4595433 - DNA, 25 bp, Homo sapien
ggccccggctaaggcccagagcatt

SEQ ID NO: 4595434 - DNA, 25 bp, Homo sapien
ccggctaaggcccagagcattctct

SEQ ID NO: 4595435 - DNA, 25 bp, Homo sapien
tatggtgtgcacttacatgtagcca

SEQ ID NO: 4595436 - DNA, 25 bp, Homo sapien
gcgagactcccactcacgaaagaaa

SEQ ID NO: 4595437 - DNA, 25 bp, Homo sapien
taaagaaataacagagggctgggcg

SEQ ID NO: 4595438 - DNA, 25 bp, Homo sapien
catgtgcaggtcacttggagaacca

SEQ ID NO: 4595439 - DNA, 25 bp, Homo sapien
tccctacggcccgtcttgagcctcc

SEQ ID NO: 4595440 - DNA, 25 bp, Homo sapien
cttctcgcggtcattttcctaattg

SEQ ID NO: 4595441 - DNA, 25 bp, Homo sapien
ccaggaccggcgctcgctgtctggg

SEQ ID NO: 4595442 - DNA, 25 bp, Homo sapien
cgtcttgagcctcccgcggctcagc

SEQ ID NO: 4595443 - DNA, 25 bp, Homo sapien
gcaccagcgtcagatcggggccctc

SEQ ID NO: 4595444 - DNA, 25 bp, Homo sapien
aacctctgatcggtcatctgtagct

SEQ ID NO: 4595445 - DNA, 25 bp, Homo sapien
agcagaacctctgatcggtcatctg

SEQ ID NO: 4595446 - DNA, 25 bp, Homo sapien
ctgccagtctcggagcagaacctct

SEQ ID NO: 4595447 - DNA, 25 bp, Homo sapien
gagctggctttcctgcatgagggcc

SEQ ID NO: 4595448 - DNA, 25 bp, Homo sapien
gggggaattggatgtttgggtcaca

SEQ ID NO: 4595449 - DNA, 25 bp, Homo sapien
tagggggaattggatgtttgggtca

SEQ ID NO: 4595450 - DNA, 25 bp, Homo sapien
ggggaattggatgtttgggtcacat

SEQ ID NO: 4595451 - DNA, 25 bp, Homo sapien
tgctccaggatgctggcccagcctg

SEQ ID NO: 4595452 - DNA, 25 bp, Homo sapien
cagcctgttccagaccacagcagct

SEQ ID NO: 4595453 - DNA, 25 bp, Homo sapien
cagaccacagcagctcctcattcat

SEQ ID NO: 4595454 - DNA, 25 bp, Homo sapien
tccaggatgctggcccagcctgttc

SEQ ID NO: 4595455 - DNA, 25 bp, Homo sapien
caaagtagggtattgactgcttcct

SEQ ID NO: 4595456 - DNA, 25 bp, Homo sapien
agtagggtattgactgcttcctcct

SEQ ID NO: 4595457 - DNA, 25 bp, Homo sapien
tcaaagtagggtattgactgcttcc

SEQ ID NO: 4595458 - DNA, 25 bp, Homo sapien
aagtagggtattgactgcttcctcc

SEQ ID NO: 4595459 - DNA, 25 bp, Homo sapien
tcctgcgtgacagcgcattcttcat

SEQ ID NO: 4595460 - DNA, 25 bp, Homo sapien
tcctcctgcgtgacagcgcattctt

SEQ ID NO: 4595461 - DNA, 25 bp, Homo sapien
cttcctccttttccgctgtcttcct

SEQ ID NO: 4595462 - DNA, 25 bp, Homo sapien
tgtcttcctcctgcgtgacagcgca

SEQ ID NO: 4595463 - DNA, 25 bp, Homo sapien
tcactggctgtttttcatatacctg

SEQ ID NO: 4595464 - DNA, 25 bp, Homo sapien
cagcgagtaccaccactggtggtac

SEQ ID NO: 4595465 - DNA, 25 bp, Homo sapien
cgagtaccaccactggtggtactca

SEQ ID NO: 4595466 - DNA, 25 bp, Homo sapien
agcgagtaccaccactggtggtact

SEQ ID NO: 4595467 - DNA, 25 bp, Homo sapien
ccaccactggtggtactcagagctt

SEQ ID NO: 4595468 - DNA, 25 bp, Homo sapien
cgcccactaccacgtctggcttatt

SEQ ID NO: 4595469 - DNA, 25 bp, Homo sapien
gcgcccactaccacgtctggcttat

SEQ ID NO: 4595470 - DNA, 25 bp, Homo sapien
accgtgcccggcccctgtgcctctt

SEQ ID NO: 4595471 - DNA, 25 bp, Homo sapien
gtgcccggcccctgtgcctctttgt

SEQ ID NO: 4595472 - DNA, 25 bp, Homo sapien
gctggataaccctcaccaaataagg

SEQ ID NO: 4595473 - DNA, 25 bp, Homo sapien
gactggcaggatctagacatggcct

SEQ ID NO: 4595474 - DNA, 25 bp, Homo sapien
caagctggaccgacagctgagctgg

SEQ ID NO: 4595475 - DNA, 25 bp, Homo sapien
taggtggcgtccgtgtgaacatgac

SEQ ID NO: 4595476 - DNA, 25 bp, Homo sapien
tggcaacccggaagctgccagggca

SEQ ID NO: 4595477 - DNA, 25 bp, Homo sapien
gggcaagaacgtctccttacgccca

SEQ ID NO: 4595478 - DNA, 25 bp, Homo sapien
aagaacgtctccttacgcccatgaa

SEQ ID NO: 4595479 - DNA, 25 bp, Homo sapien
catactgctggcaacccggaagctg

SEQ ID NO: 4595480 - DNA, 25 bp, Homo sapien
agccagacactcacacagctcgagg

SEQ ID NO: 4595481 - DNA, 25 bp, Homo sapien
tcgagggctcctgaagacctagggc

SEQ ID NO: 4595482 - DNA, 25 bp, Homo sapien
tcacacagctcgagggctcctgaag

SEQ ID NO: 4595483 - DNA, 25 bp, Homo sapien
cagacactcacacagctcgagggct

SEQ ID NO: 4595484 - DNA, 25 bp, Homo sapien
ttgatcccattttccaccagtgcat

SEQ ID NO: 4595485 - DNA, 25 bp, Homo sapien
ttttccaccagtgcatctcttctct

SEQ ID NO: 4595486 - DNA, 25 bp, Homo sapien
ttttttgtcgcaggggacttgatcc

SEQ ID NO: 4595487 - DNA, 25 bp, Homo sapien
tttttttgtcgcaggggacttgatc

SEQ ID NO: 4595488 - DNA, 25 bp, Homo sapien
gatttggactgtacactgcgatgag

SEQ ID NO: 4595489 - DNA, 25 bp, Homo sapien
tgacccttagagatgacccgagaga

SEQ ID NO: 4595490 - DNA, 25 bp, Homo sapien
ctcccaggtgtgaattaggccccgg

SEQ ID NO: 4595491 - DNA, 25 bp, Homo sapien
gaaagcccatccctgagagctgagg

SEQ ID NO: 4595492 - DNA, 25 bp, Homo sapien
ttaggcgaaggtgaggaagaaggca

SEQ ID NO: 4595493 - DNA, 25 bp, Homo sapien
taggcgaaggtgaggaagaaggcac

SEQ ID NO: 4595494 - DNA, 25 bp, Homo sapien
tggtcccttggcgactgtcagtttc

SEQ ID NO: 4595495 - DNA, 25 bp, Homo sapien
ttttctgtacgctggtgtctttctc

SEQ ID NO: 4595496 - DNA, 25 bp, Homo sapien
cttcccttttctgtacgctggtgtc

SEQ ID NO: 4595497 - DNA, 25 bp, Homo sapien
tcccttggcgactgtcagtttcctt

SEQ ID NO: 4595498 - DNA, 25 bp, Homo sapien
gtcccgcccactccagcttcagcct

SEQ ID NO: 4595499 - DNA, 25 bp, Homo sapien
cagggccctggactccaaggggcaa

SEQ ID NO: 4595500 - DNA, 25 bp, Homo sapien
ctccaaggggcaaaaggcccagagc

SEQ ID NO: 4595501 - DNA, 25 bp, Homo sapien
ctggttacctgtcccgcccactcca

SEQ ID NO: 4595502 - DNA, 25 bp, Homo sapien
cgtgcttggcctggtctccgaaaat

SEQ ID NO: 4595503 - DNA, 25 bp, Homo sapien
ttcatggactcagggacacagacgg

SEQ ID NO: 4595504 - DNA, 25 bp, Homo sapien
tcctagctagccgtcacgggatgga

SEQ ID NO: 4595505 - DNA, 25 bp, Homo sapien
ttggagctaccataagcgccgaggc

SEQ ID NO: 4595506 - DNA, 25 bp, Homo sapien
gccagttgcagaaccacatgctcaa

SEQ ID NO: 4595507 - DNA, 25 bp, Homo sapien
taccagtgcctcgagtgtgacaagt

SEQ ID NO: 4595508 - DNA, 25 bp, Homo sapien
tgaatgcggcatggagttcagccag

SEQ ID NO: 4595509 - DNA, 25 bp, Homo sapien
catgctcaagcaccagaacgtgcga

SEQ ID NO: 4595510 - DNA, 25 bp, Homo sapien
catgattgtacactcgcccgtgaag

SEQ ID NO: 4595511 - DNA, 25 bp, Homo sapien
tacaggcgaacatgaagcggcacat

SEQ ID NO: 4595512 - DNA, 25 bp, Homo sapien
cctttgtgatgctatggccctgccc

SEQ ID NO: 4595513 - DNA, 25 bp, Homo sapien
gcttcctggagtaagtggctctgcc

SEQ ID NO: 4595514 - DNA, 25 bp, Homo sapien
caagcatggcgtcatggacatcggc

SEQ ID NO: 4595515 - DNA, 25 bp, Homo sapien
gataccaacatgacgcactcaggag

SEQ ID NO: 4595516 - DNA, 25 bp, Homo sapien
tgagccggcacatgaaggtcaagca

SEQ ID NO: 4595517 - DNA, 25 bp, Homo sapien
taatctcaagggcaacctgagccgg

SEQ ID NO: 4595518 - DNA, 25 bp, Homo sapien
gaggttggctctgtcattgtcatcg

SEQ ID NO: 4595519 - DNA, 25 bp, Homo sapien
tgtgatcctcaaagcgaggttggct

SEQ ID NO: 4595520 - DNA, 25 bp, Homo sapien
gaacagagaacttagatagctcatg

SEQ ID NO: 4595521 - DNA, 25 bp, Homo sapien
tagctcatgcaagatgacaacacag

SEQ ID NO: 4595522 - DNA, 25 bp, Homo sapien
tacaccatgggaggtcctaagcaag

SEQ ID NO: 4595523 - DNA, 25 bp, Homo sapien
gacactttatttcgttaccgtgaga

SEQ ID NO: 4595524 - DNA, 25 bp, Homo sapien
tgagcttcccagcaaccaaggcaaa

SEQ ID NO: 4595525 - DNA, 25 bp, Homo sapien
cagccggaaagataagggagagcca

SEQ ID NO: 4595526 - DNA, 25 bp, Homo sapien
tagtgaactgtgatcggaccacggc

SEQ ID NO: 4595527 - DNA, 25 bp, Homo sapien
tgagaacctttgatccagactgcag

SEQ ID NO: 4595528 - DNA, 25 bp, Homo sapien
taactgggaccatgaagagactgtc

SEQ ID NO: 4595529 - DNA, 25 bp, Homo sapien
tccagtagacgagaatgaaaccccg

SEQ ID NO: 4595530 - DNA, 25 bp, Homo sapien
aagcccaggcttgatgcgtatgcag

SEQ ID NO: 4595531 - DNA, 25 bp, Homo sapien
gacggtgtacagagatccacaagta

SEQ ID NO: 4595532 - DNA, 25 bp, Homo sapien
ggaaggcagcatacattctagacag

SEQ ID NO: 4595533 - DNA, 25 bp, Homo sapien
gacgggaccatagacttaataaaca

SEQ ID NO: 4595534 - DNA, 25 bp, Homo sapien
gtggctcacgcctgtaatcccagca

SEQ ID NO: 4595535 - DNA, 25 bp, Homo sapien
ctttgagaggccgaggcaggcggat

SEQ ID NO: 4595536 - DNA, 25 bp, Homo sapien
aagaaaagaaatggggccaggcgca

SEQ ID NO: 4595537 - DNA, 25 bp, Homo sapien
cacctgagattgggagttcaagacc

SEQ ID NO: 4595538 - DNA, 25 bp, Homo sapien
attcaggaactctagggcacccgga

SEQ ID NO: 4595539 - DNA, 25 bp, Homo sapien
cacctatgaccttttctgatggaga

SEQ ID NO: 4595540 - DNA, 25 bp, Homo sapien
tagcttcagcctagaaacccggaga

SEQ ID NO: 4595541 - DNA, 25 bp, Homo sapien
taagcttcctaatgtgctgtgcgtg

SEQ ID NO: 4595542 - DNA, 25 bp, Homo sapien
ggtgacttggaaactcctggacaaa

SEQ ID NO: 4595543 - DNA, 25 bp, Homo sapien
tgatgaccctcaggtggcagtgacc

SEQ ID NO: 4595544 - DNA, 25 bp, Homo sapien
ctgcggtgggaggaaccaatctgca

SEQ ID NO: 4595545 - DNA, 25 bp, Homo sapien
tagagattccacttgtgcaaagccc

SEQ ID NO: 4595546 - DNA, 25 bp, Homo sapien
gaactgcaggcctagacaatgcagg

SEQ ID NO: 4595547 - DNA, 25 bp, Homo sapien
tggtgaaagtgaacccaagcctggg

SEQ ID NO: 4595548 - DNA, 25 bp, Homo sapien
tcaggcagccttggaaaggagaagt

SEQ ID NO: 4595549 - DNA, 25 bp, Homo sapien
tgagtgtccgagaactccgcagtgg

SEQ ID NO: 4595550 - DNA, 25 bp, Homo sapien
tccaagggcaatataaattacagta

SEQ ID NO: 4595551 - DNA, 25 bp, Homo sapien
tttagtagctaaatatggcaccatg

SEQ ID NO: 4595552 - DNA, 25 bp, Homo sapien
tatggcaccatgtgttccaagggca

SEQ ID NO: 4595553 - DNA, 25 bp, Homo sapien
tgactggctgaggtaaaacgcactg

SEQ ID NO: 4595554 - DNA, 25 bp, Homo sapien
tcttgatggtgtcgaggaagtccgt

SEQ ID NO: 4595555 - DNA, 25 bp, Homo sapien
caggaagtgctcgttcagcttcaca

SEQ ID NO: 4595556 - DNA, 25 bp, Homo sapien
ttgctcttgatggtgtcgaggaagt

SEQ ID NO: 4595557 - DNA, 25 bp, Homo sapien
gttcaggaagtgctcgttcagcttc

SEQ ID NO: 4595558 - DNA, 25 bp, Homo sapien
cacccgcagggtctgtcttgccagg

SEQ ID NO: 4595559 - DNA, 25 bp, Homo sapien
catgaggccaccgagattcggcagg

SEQ ID NO: 4595560 - DNA, 25 bp, Homo sapien
agggtctgtcttgccaggtaactgc

SEQ ID NO: 4595561 - DNA, 25 bp, Homo sapien
ccgagattcggcaggcacccgcagg

SEQ ID NO: 4595562 - DNA, 25 bp, Homo sapien
ctccaccgtctccacgcacaccttc

SEQ ID NO: 4595563 - DNA, 25 bp, Homo sapien
aggccgtgaatgcagcccgccaggt

SEQ ID NO: 4595564 - DNA, 25 bp, Homo sapien
accgtctccacgcacaccttctcca

SEQ ID NO: 4595565 - DNA, 25 bp, Homo sapien
ctgaggccgtgaatgcagcccgcca

SEQ ID NO: 4595566 - DNA, 25 bp, Homo sapien
aggccacgtgtccaggcaaagatgc

SEQ ID NO: 4595567 - DNA, 25 bp, Homo sapien
tgtccaggcaaagatgctggcgatg

SEQ ID NO: 4595568 - DNA, 25 bp, Homo sapien
gaggtcttggttcccatccagcttc

SEQ ID NO: 4595569 - DNA, 25 bp, Homo sapien
ctgatgaggtcttggttcccatcca

SEQ ID NO: 4595570 - DNA, 25 bp, Homo sapien
atagtggcgggtgacggtcccatga

SEQ ID NO: 4595571 - DNA, 25 bp, Homo sapien
acggacgtcatcaggccaagggagc

SEQ ID NO: 4595572 - DNA, 25 bp, Homo sapien
tgagcggcctcagcctcaatcgtct

SEQ ID NO: 4595573 - DNA, 25 bp, Homo sapien
cttctggtgctcccgatagtggcgg

SEQ ID NO: 4595574 - DNA, 25 bp, Homo sapien
taaagaacctccagtcccgcttgat

SEQ ID NO: 4595575 - DNA, 25 bp, Homo sapien
ctggaaccaaagagtcatgaggctc

SEQ ID NO: 4595576 - DNA, 25 bp, Homo sapien
tgcattcgctgtagtttaaagaacc

SEQ ID NO: 4595577 - DNA, 25 bp, Homo sapien
caaccttagggctgtcaacctagcc

SEQ ID NO: 4595578 - DNA, 25 bp, Homo sapien
caaagccacccgaagacttgaggac

SEQ ID NO: 4595579 - DNA, 25 bp, Homo sapien
cacatctccgtcatagttcttgcag

SEQ ID NO: 4595580 - DNA, 25 bp, Homo sapien
gagccaccatgtcatcaatgagccg

SEQ ID NO: 4595581 - DNA, 25 bp, Homo sapien
aatgagccggtgctcataccagatc

SEQ ID NO: 4595582 - DNA, 25 bp, Homo sapien
gagagggcagaaggctgacaggttg

SEQ ID NO: 4595583 - DNA, 25 bp, Homo sapien
aggctgacaggttggggatccctcc

SEQ ID NO: 4595584 - DNA, 25 bp, Homo sapien
tgagccaaatgcactctaatagcga

SEQ ID NO: 4595585 - DNA, 25 bp, Homo sapien
gagccaaatgcactctaatagcgac

SEQ ID NO: 4595586 - DNA, 25 bp, Homo sapien
tcccagggtaggatgggaacagcat

SEQ ID NO: 4595587 - DNA, 25 bp, Homo sapien
ccagggtaggatgggaacagcatgg

SEQ ID NO: 4595588 - DNA, 25 bp, Homo sapien
cccagggtaggatgggaacagcatg

SEQ ID NO: 4595589 - DNA, 25 bp, Homo sapien
cttggtgctcatgtacagcggccat

SEQ ID NO: 4595590 - DNA, 25 bp, Homo sapien
gatgtccttgaaacgcccatcgtag

SEQ ID NO: 4595591 - DNA, 25 bp, Homo sapien
tctggatggcatactggaagcagct

SEQ ID NO: 4595592 - DNA, 25 bp, Homo sapien
atcgtaggctttcagtatggtgttc

SEQ ID NO: 4595593 - DNA, 25 bp, Homo sapien
tctcttctgatagggtagccaagca

SEQ ID NO: 4595594 - DNA, 25 bp, Homo sapien
ggaaagcaccgccttagactacatg

SEQ ID NO: 4595595 - DNA, 25 bp, Homo sapien
tgtccctggcttatccaatcagaag

SEQ ID NO: 4595596 - DNA, 25 bp, Homo sapien
tagccaagcaggcaggagtacgcct

SEQ ID NO: 4595597 - DNA, 25 bp, Homo sapien
cattttgaaagtgccggcccggtct

SEQ ID NO: 4595598 - DNA, 25 bp, Homo sapien
gccgcctgcggggaagttgtacact

SEQ ID NO: 4595599 - DNA, 25 bp, Homo sapien
ctgccacaaagtctgtggccttgta

SEQ ID NO: 4595600 - DNA, 25 bp, Homo sapien
tcggtgttgtacatgcccatgccca

SEQ ID NO: 4595601 - DNA, 25 bp, Homo sapien
tccagccagggactaggcgtgggat

SEQ ID NO: 4595602 - DNA, 25 bp, Homo sapien
agatgatgggctcccggaagacagt

SEQ ID NO: 4595603 - DNA, 25 bp, Homo sapien
ggtcgccatgggcgtgcctgccaat

SEQ ID NO: 4595604 - DNA, 25 bp, Homo sapien
ccccaggatgttccggatagttcca

SEQ ID NO: 4595605 - DNA, 25 bp, Homo sapien
atttgaaccccaagcaacaacacag

SEQ ID NO: 4595606 - DNA, 25 bp, Homo sapien
gacagagataatagtggtcccactg

SEQ ID NO: 4595607 - DNA, 25 bp, Homo sapien
cagagataatagtggtcccactgca

SEQ ID NO: 4595608 - DNA, 25 bp, Homo sapien
aatttgaaccccaagcaacaacaca

SEQ ID NO: 4595609 - DNA, 25 bp, Homo sapien
gagcccgaggtcaaaatactttagc

SEQ ID NO: 4595610 - DNA, 25 bp, Homo sapien
tcagtctggtcacggtttgggagcc

SEQ ID NO: 4595611 - DNA, 25 bp, Homo sapien
tgtacttctgggtggccagtgcaga

SEQ ID NO: 4595612 - DNA, 25 bp, Homo sapien
tggtgacctggtcatcagtctggtc

SEQ ID NO: 4595613 - DNA, 25 bp, Homo sapien
actgccagataatacgggtcatctc

SEQ ID NO: 4595614 - DNA, 25 bp, Homo sapien
cgggcttcgccaccttgatcctttt

SEQ ID NO: 4595615 - DNA, 25 bp, Homo sapien
agataatacgggtcatctcatcacc

SEQ ID NO: 4595616 - DNA, 25 bp, Homo sapien
tccaccacgggcttcgccaccttga

SEQ ID NO: 4595617 - DNA, 25 bp, Homo sapien
ctagaagcagggacacacagcgcat

SEQ ID NO: 4595618 - DNA, 25 bp, Homo sapien
ctctctctttcttggcagggtcctg

SEQ ID NO: 4595619 - DNA, 25 bp, Homo sapien
cctgttccattggtcaggctggaat

SEQ ID NO: 4595620 - DNA, 25 bp, Homo sapien
ttccattggtcaggctggaatgcac

SEQ ID NO: 4595621 - DNA, 25 bp, Homo sapien
tttcttggcagggtcctgttccatt

SEQ ID NO: 4595622 - DNA, 25 bp, Homo sapien
aaagaacactggctagctgcggctg

SEQ ID NO: 4595623 - DNA, 25 bp, Homo sapien
taatctggctaggtagaactaccca

SEQ ID NO: 4595624 - DNA, 25 bp, Homo sapien
taactttgtctgttgcgtgcaaccc

SEQ ID NO: 4595625 - DNA, 25 bp, Homo sapien
ccaaatcagtaagaggttgtccagg

SEQ ID NO: 4595626 - DNA, 25 bp, Homo sapien
tgagagataagtggtgacaagctac

SEQ ID NO: 4595627 - DNA, 25 bp, Homo sapien
ctgagagataagtggtgacaagcta

SEQ ID NO: 4595628 - DNA, 25 bp, Homo sapien
gctgttcagcctgtatggtggagat

SEQ ID NO: 4595629 - DNA, 25 bp, Homo sapien
gaaacatcaccagcagtcgctggaa

SEQ ID NO: 4595630 - DNA, 25 bp, Homo sapien
aacatcaccagcagtcgctggaagc

SEQ ID NO: 4595631 - DNA, 25 bp, Homo sapien
agaaacatcaccagcagtcgctgga

SEQ ID NO: 4595632 - DNA, 25 bp, Homo sapien
cagaaacatcaccagcagtcgctgg

SEQ ID NO: 4595633 - DNA, 25 bp, Homo sapien
tgctcccacaatccggttaaccatt

SEQ ID NO: 4595634 - DNA, 25 bp, Homo sapien
gctaagtcttgcttattacgacccg

SEQ ID NO: 4595635 - DNA, 25 bp, Homo sapien
tatatgggaatctttgggtcctggg

SEQ ID NO: 4595636 - DNA, 25 bp, Homo sapien
ggctctagtcagctgctcccacaat

SEQ ID NO: 4595637 - DNA, 25 bp, Homo sapien
gcatgtgcctgccaaggcaggtcaa

SEQ ID NO: 4595638 - DNA, 25 bp, Homo sapien
ctgccaaggcaggtcaagtcaagga

SEQ ID NO: 4595639 - DNA, 25 bp, Homo sapien
aggatggagcctcaagtgcagcgat

SEQ ID NO: 4595640 - DNA, 25 bp, Homo sapien
ctcaagtgcagcgatgaaggcgaag

SEQ ID NO: 4595641 - DNA, 25 bp, Homo sapien
aaggctccaaaaatagctgacgtgg

SEQ ID NO: 4595642 - DNA, 25 bp, Homo sapien
tgacgtgggcctggtatcagcgcgc

SEQ ID NO: 4595643 - DNA, 25 bp, Homo sapien
gctgtcgtgtaaaaggctccaaaaa

SEQ ID NO: 4595644 - DNA, 25 bp, Homo sapien
gctcctccagctgtcgtgtaaaagg

SEQ ID NO: 4595645 - DNA, 25 bp, Homo sapien
aaggggaagtgcatgtctcccgcct

SEQ ID NO: 4595646 - DNA, 25 bp, Homo sapien
gggaagtgcatgtctcccgcctccc

SEQ ID NO: 4595647 - DNA, 25 bp, Homo sapien
gaagtgcatgtctcccgcctcccag

SEQ ID NO: 4595648 - DNA, 25 bp, Homo sapien
aggggaagtgcatgtctcccgcctc

SEQ ID NO: 4595649 - DNA, 25 bp, Homo sapien
agagcgagcgcacgacccgcaggta

SEQ ID NO: 4595650 - DNA, 25 bp, Homo sapien
gctctgcagagcgagcgcacgaccc

SEQ ID NO: 4595651 - DNA, 25 bp, Homo sapien
tgcagagcgagcgcacgacccgcag

SEQ ID NO: 4595652 - DNA, 25 bp, Homo sapien
cccaggccggccgcgagcctgaggc

SEQ ID NO: 4595653 - DNA, 25 bp, Homo sapien
gagcagggcgggagaggtccgagcg

SEQ ID NO: 4595654 - DNA, 25 bp, Homo sapien
tgcctggccgcgggctaacgctggg

SEQ ID NO: 4595655 - DNA, 25 bp, Homo sapien
ctggagagcgaacgagcagggcggg

SEQ ID NO: 4595656 - DNA, 25 bp, Homo sapien
agcgaacgagcagggcgggagaggt

SEQ ID NO: 4595657 - DNA, 25 bp, Homo sapien
caacagtggtgagagggtattggga

SEQ ID NO: 4595658 - DNA, 25 bp, Homo sapien
taggcagacagtaacatttggcaac

SEQ ID NO: 4595659 - DNA, 25 bp, Homo sapien
ttgtggtgtgcaataggcagacagt

SEQ ID NO: 4595660 - DNA, 25 bp, Homo sapien
agggcattcgttttgtggtgtgcaa

SEQ ID NO: 4595661 - DNA, 25 bp, Homo sapien
cttcacaagcctgcaccgagggtag

SEQ ID NO: 4595662 - DNA, 25 bp, Homo sapien
acaagcctgcaccgagggtaggggg

SEQ ID NO: 4595663 - DNA, 25 bp, Homo sapien
tcacaagcctgcaccgagggtaggg

SEQ ID NO: 4595664 - DNA, 25 bp, Homo sapien
ttcacaagcctgcaccgagggtagg

SEQ ID NO: 4595665 - DNA, 25 bp, Homo sapien
gggactccttcctctggcaattgtg

SEQ ID NO: 4595666 - DNA, 25 bp, Homo sapien
gactccttcctctggcaattgtgtc

SEQ ID NO: 4595667 - DNA, 25 bp, Homo sapien
ttagggactccttcctctggcaatt

SEQ ID NO: 4595668 - DNA, 25 bp, Homo sapien
ctggcaattgtgtccccctcctgga

SEQ ID NO: 4595669 - DNA, 25 bp, Homo sapien
acttgccgaatgcaccctgtcaggt

SEQ ID NO: 4595670 - DNA, 25 bp, Homo sapien
gacgtgcacgtagggcatcctggcc

SEQ ID NO: 4595671 - DNA, 25 bp, Homo sapien
tatttcaggaatgccgggacgtgca

SEQ ID NO: 4595672 - DNA, 25 bp, Homo sapien
caggtgctcacaaggtcgtccagat

SEQ ID NO: 4595673 - DNA, 25 bp, Homo sapien
cttttgccaccagagaaagacactc

SEQ ID NO: 4595674 - DNA, 25 bp, Homo sapien
ttttgccaccagagaaagacactct

SEQ ID NO: 4595675 - DNA, 25 bp, Homo sapien
gaaatatttgaggtcctccagactc

SEQ ID NO: 4595676 - DNA, 25 bp, Homo sapien
tggactgtgggaagtgcctaatgag

SEQ ID NO: 4595677 - DNA, 25 bp, Homo sapien
cctcccaaagtctgacgtccttgga

SEQ ID NO: 4595678 - DNA, 25 bp, Homo sapien
ttgctctcccctcgggccgtgaagt

SEQ ID NO: 4595679 - DNA, 25 bp, Homo sapien
cagccagttgacgaacagccagaag

SEQ ID NO: 4595680 - DNA, 25 bp, Homo sapien
ccagttgacgaacagccagaaggtg

SEQ ID NO: 4595681 - DNA, 25 bp, Homo sapien
ggccggcagccagttgacgaacagc

SEQ ID NO: 4595682 - DNA, 25 bp, Homo sapien
cggcagccagttgacgaacagccag

SEQ ID NO: 4595683 - DNA, 25 bp, Homo sapien
gatgtccctctgctctgtgcccatc

SEQ ID NO: 4595684 - DNA, 25 bp, Homo sapien
cggtgatgtccctctgctctgtgcc

SEQ ID NO: 4595685 - DNA, 25 bp, Homo sapien
gtgatgtccctctgctctgtgccca

SEQ ID NO: 4595686 - DNA, 25 bp, Homo sapien
ttcccggtgatgtccctctgctctg

SEQ ID NO: 4595687 - DNA, 25 bp, Homo sapien
gcctgtgcccatcgtttctctgtga

SEQ ID NO: 4595688 - DNA, 25 bp, Homo sapien
gtgcccatcgtttctctgtgatctg

SEQ ID NO: 4595689 - DNA, 25 bp, Homo sapien
gctgcctgtgcccatcgtttctctg

SEQ ID NO: 4595690 - DNA, 25 bp, Homo sapien
cctgtgcccatcgtttctctgtgat

SEQ ID NO: 4595691 - DNA, 25 bp, Homo sapien
gaagttgtaatagtgatgtctaact

SEQ ID NO: 4595692 - DNA, 25 bp, Homo sapien
ttgtaatagtgatgtctaacttgga

SEQ ID NO: 4595693 - DNA, 25 bp, Homo sapien
agttgtaatagtgatgtctaacttg

SEQ ID NO: 4595694 - DNA, 25 bp, Homo sapien
agaagttgtaatagtgatgtctaac

SEQ ID NO: 4595695 - DNA, 25 bp, Homo sapien
agaaccaggcaagaactgcccatga

SEQ ID NO: 4595696 - DNA, 25 bp, Homo sapien
tatggttgggcatctggccgggtgc

SEQ ID NO: 4595697 - DNA, 25 bp, Homo sapien
caagaactgcccatgaaagctggct

SEQ ID NO: 4595698 - DNA, 25 bp, Homo sapien
ctggctgccgggaactcgttgtctt

SEQ ID NO: 4595699 - DNA, 25 bp, Homo sapien
agtaaccgccctgaaagctgccgtt

SEQ ID NO: 4595700 - DNA, 25 bp, Homo sapien
gtaaccgccctgaaagctgccgttg

SEQ ID NO: 4595701 - DNA, 25 bp, Homo sapien
accgccctgaaagctgccgttgctt

SEQ ID NO: 4595702 - DNA, 25 bp, Homo sapien
tcagtaaccgccctgaaagctgccg

SEQ ID NO: 4595703 - DNA, 25 bp, Homo sapien
cggcccctctccccagaaggcgcca

SEQ ID NO: 4595704 - DNA, 25 bp, Homo sapien
ggcccctctccccagaaggcgccac

SEQ ID NO: 4595705 - DNA, 25 bp, Homo sapien
caggaggctgggcccgcgttcccat

SEQ ID NO: 4595706 - DNA, 25 bp, Homo sapien
gccgcccggggagcctgttgccatg

SEQ ID NO: 4595707 - DNA, 25 bp, Homo sapien
tgttgccatggcagcgcaggaggct

SEQ ID NO: 4595708 - DNA, 25 bp, Homo sapien
tgcacgctctgatgggcactggggc

SEQ ID NO: 4595709 - DNA, 25 bp, Homo sapien
tcatttggaattcggaaaaggcctg

SEQ ID NO: 4595710 - DNA, 25 bp, Homo sapien
gcccctgcggaatggtcgtggatat

SEQ ID NO: 4595711 - DNA, 25 bp, Homo sapien
tatgacctccgagttaggccctttg

SEQ ID NO: 4595712 - DNA, 25 bp, Homo sapien
tttgagcagcgttcacatcgcgcca

SEQ ID NO: 4595713 - DNA, 25 bp, Homo sapien
gtgagccatcaatcatcctgccact

SEQ ID NO: 4595714 - DNA, 25 bp, Homo sapien
agtgtcagctatccagggcgctgag

SEQ ID NO: 4595715 - DNA, 25 bp, Homo sapien
ctgtagtgtcagctatccagggcgc

SEQ ID NO: 4595716 - DNA, 25 bp, Homo sapien
cagtgagccatcaatcatcctgcca

SEQ ID NO: 4595717 - DNA, 25 bp, Homo sapien
ttaaaggatcctgataaactaagct

SEQ ID NO: 4595718 - DNA, 25 bp, Homo sapien
ctgaaagaacagtttaaaggatcct

SEQ ID NO: 4595719 - DNA, 25 bp, Homo sapien
tgtgaaggcagcaaccacgtcagtt

SEQ ID NO: 4595720 - DNA, 25 bp, Homo sapien
acttgagcaatacttagaaggcagc

SEQ ID NO: 4595721 - DNA, 25 bp, Homo sapien
cagccaccaggtgacctgaggtgat

SEQ ID NO: 4595722 - DNA, 25 bp, Homo sapien
tgcccactctctgggatcagcatca

SEQ ID NO: 4595723 - DNA, 25 bp, Homo sapien
agcaaggctctgtctgggagtaaga

SEQ ID NO: 4595724 - DNA, 25 bp, Homo sapien
atcagcatcagaaccaagagcaagg

SEQ ID NO: 4595725 - DNA, 25 bp, Homo sapien
ttcaacatgtactgatgctgcagct

SEQ ID NO: 4595726 - DNA, 25 bp, Homo sapien
gtgtgccagctggtgtcgcttcctc

SEQ ID NO: 4595727 - DNA, 25 bp, Homo sapien
agctggtgtcgcttcctcttcaaca

SEQ ID NO: 4595728 - DNA, 25 bp, Homo sapien
acatgtactgatgctgcagctgagc

SEQ ID NO: 4595729 - DNA, 25 bp, Homo sapien
tggccaggagccgcctggcagggac

SEQ ID NO: 4595730 - DNA, 25 bp, Homo sapien
ctggccaggagccgcctggcaggga

SEQ ID NO: 4595731 - DNA, 25 bp, Homo sapien
gccaggagccgcctggcagggacca

SEQ ID NO: 4595732 - DNA, 25 bp, Homo sapien
ccaggagccgcctggcagggaccat

SEQ ID NO: 4595733 - DNA, 25 bp, Homo sapien
ccccgtcatcctgttaactagtgtc

SEQ ID NO: 4595734 - DNA, 25 bp, Homo sapien
tgctgcctgacagaagggcctactt

SEQ ID NO: 4595735 - DNA, 25 bp, Homo sapien
gctgccaggtgtaaagctgagcttc

SEQ ID NO: 4595736 - DNA, 25 bp, Homo sapien
actgcagctcattgagacgatgtct

SEQ ID NO: 4595737 - DNA, 25 bp, Homo sapien
cctaggttggtggaacagtgctcct

SEQ ID NO: 4595738 - DNA, 25 bp, Homo sapien
tcttcgtggaacacgaccgtggtgc

SEQ ID NO: 4595739 - DNA, 25 bp, Homo sapien
tctccagtcaagtagcgaagctcct

SEQ ID NO: 4595740 - DNA, 25 bp, Homo sapien
caagacagcttcgtggaggtatccc

SEQ ID NO: 4595741 - DNA, 25 bp, Homo sapien
ctgtctcactgcagattcaggacca

SEQ ID NO: 4595742 - DNA, 25 bp, Homo sapien
tctcactgcagattcaggaccagct

SEQ ID NO: 4595743 - DNA, 25 bp, Homo sapien
ccaccggctgccctgtctcactgca

SEQ ID NO: 4595744 - DNA, 25 bp, Homo sapien
tgcagattcaggaccagcttgggct

SEQ ID NO: 4595745 - DNA, 25 bp, Homo sapien
tcagccgaggatgtagttgttgctg

SEQ ID NO: 4595746 - DNA, 25 bp, Homo sapien
gaccagagggctaggttggcactgc

SEQ ID NO: 4595747 - DNA, 25 bp, Homo sapien
ggctaggttggcactgcggccctca

SEQ ID NO: 4595748 - DNA, 25 bp, Homo sapien
tgtagttgttgctgccgtcgtccca

SEQ ID NO: 4595749 - DNA, 25 bp, Homo sapien
cactctaagggatatcaacactgcc

SEQ ID NO: 4595750 - DNA, 25 bp, Homo sapien
ttgttgcgtgagaacccgtgtgccc

SEQ ID NO: 4595751 - DNA, 25 bp, Homo sapien
cgaggaactaactgcaccctggtcc

SEQ ID NO: 4595752 - DNA, 25 bp, Homo sapien
gaattcagggaagagactgtcgcct

SEQ ID NO: 4595753 - DNA, 25 bp, Homo sapien
gctggcctctgctcgatatgctgct

SEQ ID NO: 4595754 - DNA, 25 bp, Homo sapien
agtccagtccttcctcataccagtg

SEQ ID NO: 4595755 - DNA, 25 bp, Homo sapien
gatgcatgcagagactcatctaacc

SEQ ID NO: 4595756 - DNA, 25 bp, Homo sapien
cccaatcaggatacaggcgagtccc

SEQ ID NO: 4595757 - DNA, 25 bp, Homo sapien
gcccgcactggcaacacaggcttga

SEQ ID NO: 4595758 - DNA, 25 bp, Homo sapien
tactgattagtacaaacacaaacgg

SEQ ID NO: 4595759 - DNA, 25 bp, Homo sapien
caaacacaaacggagcaatgacaac

SEQ ID NO: 4595760 - DNA, 25 bp, Homo sapien
agaggccctgacaacgagggccgcc

SEQ ID NO: 4595761 - DNA, 25 bp, Homo sapien
cagtagaaaggttcttggacagggt

SEQ ID NO: 4595762 - DNA, 25 bp, Homo sapien
gggtgccaggacacacgctggggct

SEQ ID NO: 4595763 - DNA, 25 bp, Homo sapien
agcagtagaaaggttcttggacagg

SEQ ID NO: 4595764 - DNA, 25 bp, Homo sapien
agaaaggttcttggacagggtgcca

SEQ ID NO: 4595765 - DNA, 25 bp, Homo sapien
actgccagcttagccggccctgtgt

SEQ ID NO: 4595766 - DNA, 25 bp, Homo sapien
tgggtcagagcttctaaacctttat

SEQ ID NO: 4595767 - DNA, 25 bp, Homo sapien
tgcccggggcgagactgccagctta

SEQ ID NO: 4595768 - DNA, 25 bp, Homo sapien
cacacactgggtcagagcttctaaa

SEQ ID NO: 4595769 - DNA, 25 bp, Homo sapien
tgtagccatgccctaggcccagagg

SEQ ID NO: 4595770 - DNA, 25 bp, Homo sapien
ctgtagccatgccctaggcccagag

SEQ ID NO: 4595771 - DNA, 25 bp, Homo sapien
gccatgccctaggcccagaggcagc

SEQ ID NO: 4595772 - DNA, 25 bp, Homo sapien
gtagccatgccctaggcccagaggc

SEQ ID NO: 4595773 - DNA, 25 bp, Homo sapien
ccctgtcaatgtcagactcctccag

SEQ ID NO: 4595774 - DNA, 25 bp, Homo sapien
aagtctggagaacgggagatgacgt

SEQ ID NO: 4595775 - DNA, 25 bp, Homo sapien
acgggagatgacgtgctggaactca

SEQ ID NO: 4595776 - DNA, 25 bp, Homo sapien
ggttgatggttccatccctgtcaat

SEQ ID NO: 4595777 - DNA, 25 bp, Homo sapien
aagggagagtttcaggccagagccc

SEQ ID NO: 4595778 - DNA, 25 bp, Homo sapien
ctgggaaagggagagtttcaggcca

SEQ ID NO: 4595779 - DNA, 25 bp, Homo sapien
aggccagagccccaactgctccctc

SEQ ID NO: 4595780 - DNA, 25 bp, Homo sapien
gagtttcaggccagagccccaactg

SEQ ID NO: 4595781 - DNA, 25 bp, Homo sapien
gttgtcgatgagctgcttcatctca

SEQ ID NO: 4595782 - DNA, 25 bp, Homo sapien
agccggctcaggtcttctctgttca

SEQ ID NO: 4595783 - DNA, 25 bp, Homo sapien
gtgaggcagttcaccagccggctca

SEQ ID NO: 4595784 - DNA, 25 bp, Homo sapien
tctcagacgcactaagccgtgtgtc

SEQ ID NO: 4595785 - DNA, 25 bp, Homo sapien
gacacaggaagccaaaagacacggt

SEQ ID NO: 4595786 - DNA, 25 bp, Homo sapien
gggtggtgtcctgccgggctgctcc

SEQ ID NO: 4595787 - DNA, 25 bp, Homo sapien
aacggcgcccatttcccaagcaggg

SEQ ID NO: 4595788 - DNA, 25 bp, Homo sapien
ggctctgaggttccccaaacggcgc

SEQ ID NO: 4595789 - DNA, 25 bp, Homo sapien
tcactgaacacactgaggagatcca

SEQ ID NO: 4595790 - DNA, 25 bp, Homo sapien
ggaagtcctcaaagctaaggctgtc

SEQ ID NO: 4595791 - DNA, 25 bp, Homo sapien
gaccctgcagattcgctccttgaag

SEQ ID NO: 4595792 - DNA, 25 bp, Homo sapien
tctggcgtggctgtgtcactgaaca

SEQ ID NO: 4595793 - DNA, 25 bp, Homo sapien
agcaccagcgagctcagcctcgtgg

SEQ ID NO: 4595794 - DNA, 25 bp, Homo sapien
cgtggcccaggtcacacgctcatta

SEQ ID NO: 4595795 - DNA, 25 bp, Homo sapien
acaaacgccacaggacgtggcccag

SEQ ID NO: 4595796 - DNA, 25 bp, Homo sapien
gaacagtcagtgctttggggccaac

SEQ ID NO: 4595797 - DNA, 25 bp, Homo sapien
gtgtttaacccaaaggcaggtcaca

SEQ ID NO: 4595798 - DNA, 25 bp, Homo sapien
agatggcttcctgggagtcaagtgt

SEQ ID NO: 4595799 - DNA, 25 bp, Homo sapien
tggcttcctgggagtcaagtgttta

SEQ ID NO: 4595800 - DNA, 25 bp, Homo sapien
acatacaacgtaagtgtgggcagag

SEQ ID NO: 4595801 - DNA, 25 bp, Homo sapien
aagtccttgcccctagaaaatcaga

SEQ ID NO: 4595802 - DNA, 25 bp, Homo sapien
cattctagataattctgccaggtga

SEQ ID NO: 4595803 - DNA, 25 bp, Homo sapien
agaaaatcagaactaagcagaaaaa

SEQ ID NO: 4595804 - DNA, 25 bp, Homo sapien
tcccaaagctagtggcagatggagt

SEQ ID NO: 4595805 - DNA, 25 bp, Homo sapien
aatctgctcgaagggcacttgtgcc

SEQ ID NO: 4595806 - DNA, 25 bp, Homo sapien
gaagggcacttgtgcccgaagtgac

SEQ ID NO: 4595807 - DNA, 25 bp, Homo sapien
gaagtgacgactccacgctccgctg

SEQ ID NO: 4595808 - DNA, 25 bp, Homo sapien
acttgtgcccgaagtgacgactcca

SEQ ID NO: 4595809 - DNA, 25 bp, Homo sapien
gggaactgtcggtgttctcagcgat

SEQ ID NO: 4595810 - DNA, 25 bp, Homo sapien
tcaaccaggtgaggagctaaaacca

SEQ ID NO: 4595811 - DNA, 25 bp, Homo sapien
tgctgctcattgtcaaccaggtgag

SEQ ID NO: 4595812 - DNA, 25 bp, Homo sapien
ctcagcgatcggtctccctgtgtgt

SEQ ID NO: 4595813 - DNA, 25 bp, Homo sapien
taacgcaggcaaccatttagcacag

SEQ ID NO: 4595814 - DNA, 25 bp, Homo sapien
taaatccggcaaaagggcttccagc

SEQ ID NO: 4595815 - DNA, 25 bp, Homo sapien
tgattctagagatccccaagggatg

SEQ ID NO: 4595816 - DNA, 25 bp, Homo sapien
cgagtcatcaggcaacggtaagcaa

SEQ ID NO: 4595817 - DNA, 25 bp, Homo sapien
ggatctcctgcttcgtcaggaacgt

SEQ ID NO: 4595818 - DNA, 25 bp, Homo sapien
tctcctgcttcgtcaggaacgtcaa

SEQ ID NO: 4595819 - DNA, 25 bp, Homo sapien
cctgcttcgtcaggaacgtcaagtc

SEQ ID NO: 4595820 - DNA, 25 bp, Homo sapien
gaggatctcctgcttcgtcaggaac

SEQ ID NO: 4595821 - DNA, 25 bp, Homo sapien
gggattagcggaccgctgggaggcc

SEQ ID NO: 4595822 - DNA, 25 bp, Homo sapien
aggcaaagccagagcggggattagc

SEQ ID NO: 4595823 - DNA, 25 bp, Homo sapien
cagagcggggattagcggaccgctg

SEQ ID NO: 4595824 - DNA, 25 bp, Homo sapien
attagcggaccgctgggaggccgcg

SEQ ID NO: 4595825 - DNA, 25 bp, Homo sapien
gcgagctccccagggccaggcgtcc

SEQ ID NO: 4595826 - DNA, 25 bp, Homo sapien
agctccccagggccaggcgtcccgc

SEQ ID NO: 4595827 - DNA, 25 bp, Homo sapien
ccccagggccaggcgtcccgcgcac

SEQ ID NO: 4595828 - DNA, 25 bp, Homo sapien
gctccccagggccaggcgtcccgcg

SEQ ID NO: 4595829 - DNA, 25 bp, Homo sapien
ccttggacaggcgactgcccgagcc

SEQ ID NO: 4595830 - DNA, 25 bp, Homo sapien
tccttggacaggcgactgcccgagc

SEQ ID NO: 4595831 - DNA, 25 bp, Homo sapien
ctccttggacaggcgactgcccgag

SEQ ID NO: 4595832 - DNA, 25 bp, Homo sapien
gctccttggacaggcgactgcccga

SEQ ID NO: 4595833 - DNA, 25 bp, Homo sapien
cgccgcgcgcacagctccgccaact

SEQ ID NO: 4595834 - DNA, 25 bp, Homo sapien
cgccccgccgcgcgcacagctccgc

SEQ ID NO: 4595835 - DNA, 25 bp, Homo sapien
ccccgccgcgcgcacagctccgcca

SEQ ID NO: 4595836 - DNA, 25 bp, Homo sapien
ccgccgcgcgcacagctccgccaac

SEQ ID NO: 4595837 - DNA, 25 bp, Homo sapien
tccaagcggtcctaggcgagctgga

SEQ ID NO: 4595838 - DNA, 25 bp, Homo sapien
gccgggtttggcaggcgagctgccg

SEQ ID NO: 4595839 - DNA, 25 bp, Homo sapien
gagctgccggctccaagcggtccta

SEQ ID NO: 4595840 - DNA, 25 bp, Homo sapien
gctgccaggcgttcccagccgggtt

SEQ ID NO: 4595841 - DNA, 25 bp, Homo sapien
agtggtatgaagacagctaactgca

SEQ ID NO: 4595842 - DNA, 25 bp, Homo sapien
ggtatgaagacagctaactgcaagc

SEQ ID NO: 4595843 - DNA, 25 bp, Homo sapien
gcatcctcttaactcccatgctcaa

SEQ ID NO: 4595844 - DNA, 25 bp, Homo sapien
ggcctgccacctagccttgctgatt

SEQ ID NO: 4595845 - DNA, 25 bp, Homo sapien
actgcaagctccggattcacaccat

SEQ ID NO: 4595846 - DNA, 25 bp, Homo sapien
catagctcacggcatcctcttaact

SEQ ID NO: 4595847 - DNA, 25 bp, Homo sapien
tgctgtttcgtagccgactgctgaa

SEQ ID NO: 4595848 - DNA, 25 bp, Homo sapien
tagctttctgggtgtacggagcagc

SEQ ID NO: 4595849 - DNA, 25 bp, Homo sapien
gacatggcggttaccctgagtctct

SEQ ID NO: 4595850 - DNA, 25 bp, Homo sapien
gcccggttgcccttgcgatcaaaga

SEQ ID NO: 4595851 - DNA, 25 bp, Homo sapien
gtgccatggtgaactgctttcttaa

SEQ ID NO: 4595852 - DNA, 25 bp, Homo sapien
tgtgccatggtgaactgctttctta

SEQ ID NO: 4595853 - DNA, 25 bp, Homo sapien
gccatggtgaactgctttcttaaaa

SEQ ID NO: 4595854 - DNA, 25 bp, Homo sapien
catgtgccatggtgaactgctttct

SEQ ID NO: 4595855 - DNA, 25 bp, Homo sapien
gttgctgcacccctaggtcatccaa

SEQ ID NO: 4595856 - DNA, 25 bp, Homo sapien
tgcaggccactctgtatcaggctct

SEQ ID NO: 4595857 - DNA, 25 bp, Homo sapien
tgatagagtcagacactcacaggac

SEQ ID NO: 4595858 - DNA, 25 bp, Homo sapien
gggcatgaagcctcatctaaagacc

SEQ ID NO: 4595859 - DNA, 25 bp, Homo sapien
atgtatatggaacagcctggatttc

SEQ ID NO: 4595860 - DNA, 25 bp, Homo sapien
tgtacagaatttgagtcggggcttg

SEQ ID NO: 4595861 - DNA, 25 bp, Homo sapien
tgacagcaacgggaacttcctgtac

SEQ ID NO: 4595862 - DNA, 25 bp, Homo sapien
gcttggcttatggagatgcctcgtg

SEQ ID NO: 4595863 - DNA, 25 bp, Homo sapien
tgtggtagtgctcccagtctgacct

SEQ ID NO: 4595864 - DNA, 25 bp, Homo sapien
cctgtggtagtgctcccagtctgac

SEQ ID NO: 4595865 - DNA, 25 bp, Homo sapien
tagtgctcccagtctgacctctgta

SEQ ID NO: 4595866 - DNA, 25 bp, Homo sapien
ggtagtgctcccagtctgacctctg

SEQ ID NO: 4595867 - DNA, 25 bp, Homo sapien
tagtcaattggttttccttacaaca

SEQ ID NO: 4595868 - DNA, 25 bp, Homo sapien
tgatacttgcaatttatgtttgaga

SEQ ID NO: 4595869 - DNA, 25 bp, Homo sapien
gtgttgaaagccatcccgtgttgca

SEQ ID NO: 4595870 - DNA, 25 bp, Homo sapien
gaagtgaaaagtttgccttctgacc

SEQ ID NO: 4595871 - DNA, 25 bp, Homo sapien
aggattaggagagcccttcctgtca

SEQ ID NO: 4595872 - DNA, 25 bp, Homo sapien
tcttgctaagcttcatgttgactct

SEQ ID NO: 4595873 - DNA, 25 bp, Homo sapien
tccaaacctgttgccgtggttagta

SEQ ID NO: 4595874 - DNA, 25 bp, Homo sapien
tcagatgtatctgggctctaatcat

SEQ ID NO: 4595875 - DNA, 25 bp, Homo sapien
gagactctgcctcgaaagataaaaa

SEQ ID NO: 4595876 - DNA, 25 bp, Homo sapien
tggaaaagggcaattgaagttttca

SEQ ID NO: 4595877 - DNA, 25 bp, Homo sapien
tattattttgtaagtcatggaaaag

SEQ ID NO: 4595878 - DNA, 25 bp, Homo sapien
caataaaccaggaattctaaacttg

SEQ ID NO: 4595879 - DNA, 25 bp, Homo sapien
caaggtctttgactatatgagcaag

SEQ ID NO: 4595880 - DNA, 25 bp, Homo sapien
ttaacaacttacattgtcaccagca

SEQ ID NO: 4595881 - DNA, 25 bp, Homo sapien
caccagcaaggtctttgactatatg

SEQ ID NO: 4595882 - DNA, 25 bp, Homo sapien
ctttgactatatgagcaagtctcac

SEQ ID NO: 4595883 - DNA, 25 bp, Homo sapien
agctttccgctgatacgttgactcc

SEQ ID NO: 4595884 - DNA, 25 bp, Homo sapien
cagctttccgctgatacgttgactc

SEQ ID NO: 4595885 - DNA, 25 bp, Homo sapien
aggagcctggagcacgtgccgaacg

SEQ ID NO: 4595886 - DNA, 25 bp, Homo sapien
gagcctggagcacgtgccgaacgtc

SEQ ID NO: 4595887 - DNA, 25 bp, Homo sapien
cctggagcacgtgccgaacgtccat

SEQ ID NO: 4595888 - DNA, 25 bp, Homo sapien
agcctggagcacgtgccgaacgtcc

SEQ ID NO: 4595889 - DNA, 25 bp, Homo sapien
gtgaatgtgtaggtgtttgagtctc

SEQ ID NO: 4595890 - DNA, 25 bp, Homo sapien
gatatgggctgtttgaaaactattt

SEQ ID NO: 4595891 - DNA, 25 bp, Homo sapien
ggatatgggctgtttgaaaactatt

SEQ ID NO: 4595892 - DNA, 25 bp, Homo sapien
gcctaaaacctttcgctgcttctta

SEQ ID NO: 4595893 - DNA, 25 bp, Homo sapien
tgcctaaaacctttcgctgcttctt

SEQ ID NO: 4595894 - DNA, 25 bp, Homo sapien
gtgcctaaaacctttcgctgcttct

SEQ ID NO: 4595895 - DNA, 25 bp, Homo sapien
gccctttgtagacgtctgatgattc

SEQ ID NO: 4595896 - DNA, 25 bp, Homo sapien
ctttgtagacgtctgatgattcgtt

SEQ ID NO: 4595897 - DNA, 25 bp, Homo sapien
ccctttgtagacgtctgatgattcg

SEQ ID NO: 4595898 - DNA, 25 bp, Homo sapien
cctttgtagacgtctgatgattcgt

SEQ ID NO: 4595899 - DNA, 25 bp, Homo sapien
gcttttgtgtaagtgccgattctga

SEQ ID NO: 4595900 - DNA, 25 bp, Homo sapien
cttttgtgtaagtgccgattctgat

SEQ ID NO: 4595901 - DNA, 25 bp, Homo sapien
agcttttgtgtaagtgccgattctg

SEQ ID NO: 4595902 - DNA, 25 bp, Homo sapien
aaatgacactcccagagtctttcgc

SEQ ID NO: 4595903 - DNA, 25 bp, Homo sapien
tggatatgatgcctgcttaaacgga

SEQ ID NO: 4595904 - DNA, 25 bp, Homo sapien
cggaatatcccagtctttaaagagt

SEQ ID NO: 4595905 - DNA, 25 bp, Homo sapien
tctgtctggatagtctgaagcttgt

SEQ ID NO: 4595906 - DNA, 25 bp, Homo sapien
taggtggcacacgtagaccactcca

SEQ ID NO: 4595907 - DNA, 25 bp, Homo sapien
tgggttatgcgcagaacctgtgcca

SEQ ID NO: 4595908 - DNA, 25 bp, Homo sapien
agtaggttatgtaggtggcacacgt

SEQ ID NO: 4595909 - DNA, 25 bp, Homo sapien
cacacgtagaccactccaggagtaa

SEQ ID NO: 4595910 - DNA, 25 bp, Homo sapien
ctgtgggttcagcgacaggattggc

SEQ ID NO: 4595911 - DNA, 25 bp, Homo sapien
tgggttcagcgacaggattggccca

SEQ ID NO: 4595912 - DNA, 25 bp, Homo sapien
tcagcgacaggattggcccagccgg

SEQ ID NO: 4595913 - DNA, 25 bp, Homo sapien
cagccgggccggaaaaggccgccat

SEQ ID NO: 4595914 - DNA, 25 bp, Homo sapien
acagtgccacccttaggcaaaaggg

SEQ ID NO: 4595915 - DNA, 25 bp, Homo sapien
tgacacagtgccacccttaggcaaa

SEQ ID NO: 4595916 - DNA, 25 bp, Homo sapien
cagtatgatgacacagtgccaccct

SEQ ID NO: 4595917 - DNA, 25 bp, Homo sapien
tgatgacacagtgccacccttaggc

SEQ ID NO: 4595918 - DNA, 25 bp, Homo sapien
cagaaaaaacacgacagggcaaatg

SEQ ID NO: 4595919 - DNA, 25 bp, Homo sapien
cagggcaaatgggccgcagccagga

SEQ ID NO: 4595920 - DNA, 25 bp, Homo sapien
agggcaaatgggccgcagccaggaa

SEQ ID NO: 4595921 - DNA, 25 bp, Homo sapien
agaaaaaacacgacagggcaaatgg

SEQ ID NO: 4595922 - DNA, 25 bp, Homo sapien
tgcctggtgacgcgtgggggagtcc

SEQ ID NO: 4595923 - DNA, 25 bp, Homo sapien
gctgcctggtgacgcgtgggggagt

SEQ ID NO: 4595924 - DNA, 25 bp, Homo sapien
ctggtgacgcgtgggggagtccaca

SEQ ID NO: 4595925 - DNA, 25 bp, Homo sapien
tgacgcgtgggggagtccacaggga

SEQ ID NO: 4595926 - DNA, 25 bp, Homo sapien
cgagaatcctgaatgagtgagaggt

SEQ ID NO: 4595927 - DNA, 25 bp, Homo sapien
gaccgacctttctatgaaactgcac

SEQ ID NO: 4595928 - DNA, 25 bp, Homo sapien
ttctgtctcctcacggtgggagccg

SEQ ID NO: 4595929 - DNA, 25 bp, Homo sapien
gctgcagtggataaccaagaaggga

SEQ ID NO: 4595930 - DNA, 25 bp, Homo sapien
cttcctcatgactgtcctcatatag

SEQ ID NO: 4595931 - DNA, 25 bp, Homo sapien
gtcctcatatagttggcccatggta

SEQ ID NO: 4595932 - DNA, 25 bp, Homo sapien
tcttcctcatgactgtcctcatata

SEQ ID NO: 4595933 - DNA, 25 bp, Homo sapien
tgtcctcatatagttggcccatggt

SEQ ID NO: 4595934 - DNA, 25 bp, Homo sapien
gccatcggtaaggtcggagggcact

SEQ ID NO: 4595935 - DNA, 25 bp, Homo sapien
catcggtaaggtcggagggcactag

SEQ ID NO: 4595936 - DNA, 25 bp, Homo sapien
tggccatcggtaaggtcggagggca

SEQ ID NO: 4595937 - DNA, 25 bp, Homo sapien
ctggccatcggtaaggtcggagggc

SEQ ID NO: 4595938 - DNA, 25 bp, Homo sapien
ctttttccgatactcaaagggatgg

SEQ ID NO: 4595939 - DNA, 25 bp, Homo sapien
ccctgtccggatatttcttccggat

SEQ ID NO: 4595940 - DNA, 25 bp, Homo sapien
gatatttcttccggatcttttctcc

SEQ ID NO: 4595941 - DNA, 25 bp, Homo sapien
cctttttccgatactcaaagggatg

SEQ ID NO: 4595942 - DNA, 25 bp, Homo sapien
gggtcaacagcactggtccaagtgt

SEQ ID NO: 4595943 - DNA, 25 bp, Homo sapien
gaaatgtccgcttccgggtcaacag

SEQ ID NO: 4595944 - DNA, 25 bp, Homo sapien
gacgtgtgcttagaatagctgcaga

SEQ ID NO: 4595945 - DNA, 25 bp, Homo sapien
aatcacagggcttccgtgatccccg

SEQ ID NO: 4595946 - DNA, 25 bp, Homo sapien
ggataatgtcattgatgcttgtggt

SEQ ID NO: 4595947 - DNA, 25 bp, Homo sapien
tgccagtgattccacgaaactggat

SEQ ID NO: 4595948 - DNA, 25 bp, Homo sapien
tgtaaggaaggtggtacaacctggc

SEQ ID NO: 4595949 - DNA, 25 bp, Homo sapien
gcttgtttctgtattgtaaggaagg

SEQ ID NO: 4595950 - DNA, 25 bp, Homo sapien
tggtggggcatctttccgaagaggt

SEQ ID NO: 4595951 - DNA, 25 bp, Homo sapien
aatggtggggcatctttccgaagag

SEQ ID NO: 4595952 - DNA, 25 bp, Homo sapien
ccaatggtggggcatctttccgaag

SEQ ID NO: 4595953 - DNA, 25 bp, Homo sapien
gtggggcatctttccgaagaggttc

SEQ ID NO: 4595954 - DNA, 25 bp, Homo sapien
gacacgtggagattgttacaaatca

SEQ ID NO: 4595955 - DNA, 25 bp, Homo sapien
gccacgatttaattatctccacctg

SEQ ID NO: 4595956 - DNA, 25 bp, Homo sapien
actaggcagtgtgccccattgggaa

SEQ ID NO: 4595957 - DNA, 25 bp, Homo sapien
tatgagggaaaccactgccacgatt

SEQ ID NO: 4595958 - DNA, 25 bp, Homo sapien
tctgccctatacacaggtgaaagtg

SEQ ID NO: 4595959 - DNA, 25 bp, Homo sapien
tactgagggacttccagacgatctg

SEQ ID NO: 4595960 - DNA, 25 bp, Homo sapien
gggtcctcagcagttataggcgagt

SEQ ID NO: 4595961 - DNA, 25 bp, Homo sapien
gatctggtctggtgatacatatcga

SEQ ID NO: 4595962 - DNA, 25 bp, Homo sapien
ccttatgctgggatatcatgacctc

SEQ ID NO: 4595963 - DNA, 25 bp, Homo sapien
tcaggttctgcattagccaggcatt

SEQ ID NO: 4595964 - DNA, 25 bp, Homo sapien
catggataaggagggccgactgtat

SEQ ID NO: 4595965 - DNA, 25 bp, Homo sapien
taaatgtctctagtgattccgatgc

SEQ ID NO: 4595966 - DNA, 25 bp, Homo sapien
tgtatcttgtgtgttccgagggccc

SEQ ID NO: 4595967 - DNA, 25 bp, Homo sapien
gaatccctgtcagccacctatgtgg

SEQ ID NO: 4595968 - DNA, 25 bp, Homo sapien
tgtgagtgcaccaaggacaaatggc

SEQ ID NO: 4595969 - DNA, 25 bp, Homo sapien
tgctgccacccctaaaaagtgttgt

SEQ ID NO: 4595970 - DNA, 25 bp, Homo sapien
ggtaattcctataaatgagcactgg

SEQ ID NO: 4595971 - DNA, 25 bp, Homo sapien
ccattgtgtatcctagggcactcca

SEQ ID NO: 4595972 - DNA, 25 bp, Homo sapien
accttttagtacagtggccccattg

SEQ ID NO: 4595973 - DNA, 25 bp, Homo sapien
tgaatatgactgtgtagaggcagtg

SEQ ID NO: 4595974 - DNA, 25 bp, Homo sapien
aactgccatgttagtctgctgctgc

SEQ ID NO: 4595975 - DNA, 25 bp, Homo sapien
gctgctgctatacttctggttctaa

SEQ ID NO: 4595976 - DNA, 25 bp, Homo sapien
ccctgtgaggtgcttattatctaca

SEQ ID NO: 4595977 - DNA, 25 bp, Homo sapien
taattagctattcttgaagccctgt

SEQ ID NO: 4595978 - DNA, 25 bp, Homo sapien
caccttggctgcatgtagcctgagc

SEQ ID NO: 4595979 - DNA, 25 bp, Homo sapien
ttgctcagagtggtcagactgaccc

SEQ ID NO: 4595980 - DNA, 25 bp, Homo sapien
gcaaaggcatttggctctacctggg

SEQ ID NO: 4595981 - DNA, 25 bp, Homo sapien
gagatgagaaccttaaggcctggag

SEQ ID NO: 4595982 - DNA, 25 bp, Homo sapien
caaagtccagatttgtcagtatcat

SEQ ID NO: 4595983 - DNA, 25 bp, Homo sapien
tatacggggtctgtcatggcctgct

SEQ ID NO: 4595984 - DNA, 25 bp, Homo sapien
atagcactcctatccttgaagacct

SEQ ID NO: 4595985 - DNA, 25 bp, Homo sapien
tgctgtgcctggcatagcactccta

SEQ ID NO: 4595986 - DNA, 25 bp, Homo sapien
agacacggctagacagctccatcag

SEQ ID NO: 4595987 - DNA, 25 bp, Homo sapien
gtgaagacacggctagacagctcca

SEQ ID NO: 4595988 - DNA, 25 bp, Homo sapien
caggaacatgcgggctgtgacagac

SEQ ID NO: 4595989 - DNA, 25 bp, Homo sapien
ggaacatgcgggctgtgacagacaa

SEQ ID NO: 4595990 - DNA, 25 bp, Homo sapien
ctgaaggactcgttgcatgagaagt

SEQ ID NO: 4595991 - DNA, 25 bp, Homo sapien
ttatgggatgcgcttcattgccaaa

SEQ ID NO: 4595992 - DNA, 25 bp, Homo sapien
gatgcgcttcattgccaaagtgctg

SEQ ID NO: 4595993 - DNA, 25 bp, Homo sapien
gggatgcgcttcattgccaaagtgc

SEQ ID NO: 4595994 - DNA, 25 bp, Homo sapien
ccatccgtaggaagcagaacatcag

SEQ ID NO: 4595995 - DNA, 25 bp, Homo sapien
cagagacgtgctatccgtgatgcca

SEQ ID NO: 4595996 - DNA, 25 bp, Homo sapien
taacagagcttggaaccgtggaccc

SEQ ID NO: 4595997 - DNA, 25 bp, Homo sapien
gatcaacgacattgccagggtactg

SEQ ID NO: 4595998 - DNA, 25 bp, Homo sapien
caggagctaatggaagtgacagtca

SEQ ID NO: 4595999 - DNA, 25 bp, Homo sapien
tacagtcttagaggttgcagtacta

SEQ ID NO: 4596000 - DNA, 25 bp, Homo sapien
ttagaagtggaagctattagcacca

SEQ ID NO: 4596001 - DNA, 25 bp, Homo sapien
tagcaatagggatggtaggattcaa

SEQ ID NO: 4596002 - DNA, 25 bp, Homo sapien
tactcaggtgcatggttacagccca

SEQ ID NO: 4596003 - DNA, 25 bp, Homo sapien
taaaagaggctatgaatcccaaagg

SEQ ID NO: 4596004 - DNA, 25 bp, Homo sapien
ctttagtagcacagaggatgcccca

SEQ ID NO: 4596005 - DNA, 25 bp, Homo sapien
ggagtgccatggaaggattcgccac

SEQ ID NO: 4596006 - DNA, 25 bp, Homo sapien
ttccatggaacacattcttcgaaat

SEQ ID NO: 4596007 - DNA, 25 bp, Homo sapien
tccatggaacacattcttcgaaatc

SEQ ID NO: 4596008 - DNA, 25 bp, Homo sapien
gttccatggaacacattcttcgaaa

SEQ ID NO: 4596009 - DNA, 25 bp, Homo sapien
caaaagaaggggaaattcgctgagg

SEQ ID NO: 4596010 - DNA, 25 bp, Homo sapien
ggtcaaggccgcggtgagtcgagat

SEQ ID NO: 4596011 - DNA, 25 bp, Homo sapien
gcgacagagaaagacatccattcac

SEQ ID NO: 4596012 - DNA, 25 bp, Homo sapien
cgggcgtggtgacccccgcctgtgg

SEQ ID NO: 4596013 - DNA, 25 bp, Homo sapien
ggagaggccgtagggagacttggaa

SEQ ID NO: 4596014 - DNA, 25 bp, Homo sapien
gaggccgtagggagacttggaaaga

SEQ ID NO: 4596015 - DNA, 25 bp, Homo sapien
agtggagaggccgtagggagacttg

SEQ ID NO: 4596016 - DNA, 25 bp, Homo sapien
tggagaggccgtagggagacttgga

SEQ ID NO: 4596017 - DNA, 25 bp, Homo sapien
tgcccgcgcagagtccgcgccatgg

SEQ ID NO: 4596018 - DNA, 25 bp, Homo sapien
tctgcccgcgcagagtccgcgccat

SEQ ID NO: 4596019 - DNA, 25 bp, Homo sapien
gcagagtccgcgccatggccgcctc

SEQ ID NO: 4596020 - DNA, 25 bp, Homo sapien
cttctgcccgcgcagagtccgcgcc

SEQ ID NO: 4596021 - DNA, 25 bp, Homo sapien
ccgcggaagttcagtgagaagatcg

SEQ ID NO: 4596022 - DNA, 25 bp, Homo sapien
gagaagatcgcgctgcacacgcaga

SEQ ID NO: 4596023 - DNA, 25 bp, Homo sapien
agagacaggccgaggagacgcgggc

SEQ ID NO: 4596024 - DNA, 25 bp, Homo sapien
agacgcgggccttcgagcagctcat

SEQ ID NO: 4596025 - DNA, 25 bp, Homo sapien
ttaggtaaccgctgagtgaggcagt

SEQ ID NO: 4596026 - DNA, 25 bp, Homo sapien
tcggcccgggatatttagtgagaac

SEQ ID NO: 4596027 - DNA, 25 bp, Homo sapien
ggaaatcgcaaacagctcggaggcc

SEQ ID NO: 4596028 - DNA, 25 bp, Homo sapien
tgagaactgacaagcgtcgctggtg

SEQ ID NO: 4596029 - DNA, 25 bp, Homo sapien
tttgctgttgctattgtccccttta

SEQ ID NO: 4596030 - DNA, 25 bp, Homo sapien
gctgttgctattgtcccctttaata

SEQ ID NO: 4596031 - DNA, 25 bp, Homo sapien
agcagatggcactgtcatggagtta

SEQ ID NO: 4596032 - DNA, 25 bp, Homo sapien
acttagtacaaggttaaacaagcag

SEQ ID NO: 4596033 - DNA, 25 bp, Homo sapien
cccgaaataggagctgtgaccaaga

SEQ ID NO: 4596034 - DNA, 25 bp, Homo sapien
gaatctctaatcatctgggataaag

SEQ ID NO: 4596035 - DNA, 25 bp, Homo sapien
tacgtgctctcaattgttcatgcag

SEQ ID NO: 4596036 - DNA, 25 bp, Homo sapien
cactgaattaggaacatctgtaccc

SEQ ID NO: 4596037 - DNA, 25 bp, Homo sapien
ccccaactaaggtctcagacacgta

SEQ ID NO: 4596038 - DNA, 25 bp, Homo sapien
aactaaggtctcagacacgtacaaa

SEQ ID NO: 4596039 - DNA, 25 bp, Homo sapien
taaggtctcagacacgtacaaatgg

SEQ ID NO: 4596040 - DNA, 25 bp, Homo sapien
tctcagacacgtacaaatggtgccc

SEQ ID NO: 4596041 - DNA, 25 bp, Homo sapien
tggtcacaagtgcagtccctagagt

SEQ ID NO: 4596042 - DNA, 25 bp, Homo sapien
tgaagtcttaatcggcctgtcctga

SEQ ID NO: 4596043 - DNA, 25 bp, Homo sapien
ttagctccaagttaccaggcatccg

SEQ ID NO: 4596044 - DNA, 25 bp, Homo sapien
gatgccgttttctagtcccctggaa

SEQ ID NO: 4596045 - DNA, 25 bp, Homo sapien
ttcttgagggtgagtgtcaatttca

SEQ ID NO: 4596046 - DNA, 25 bp, Homo sapien
gtcaatttcatggttggaggccaac

SEQ ID NO: 4596047 - DNA, 25 bp, Homo sapien
gtaaaatcggtcctttcatctcctg

SEQ ID NO: 4596048 - DNA, 25 bp, Homo sapien
tctctgcagccgtcatttcaccaag

SEQ ID NO: 4596049 - DNA, 25 bp, Homo sapien
cctttggcctcagaatcttcattta

SEQ ID NO: 4596050 - DNA, 25 bp, Homo sapien
gaaactagaaacatctctgcagtca

SEQ ID NO: 4596051 - DNA, 25 bp, Homo sapien
tgatgaaaggaggcaatacaaataa

SEQ ID NO: 4596052 - DNA, 25 bp, Homo sapien
taattcggtcccattgcagggtgtt

SEQ ID NO: 4596053 - DNA, 25 bp, Homo sapien
ttgttaagtatgtgctagtggtcag

SEQ ID NO: 4596054 - DNA, 25 bp, Homo sapien
ttatttgttaagtatgtgctagtgg

SEQ ID NO: 4596055 - DNA, 25 bp, Homo sapien
aaattatttgttaagtatgtgctag

SEQ ID NO: 4596056 - DNA, 25 bp, Homo sapien
atttgttaagtatgtgctagtggtc

SEQ ID NO: 4596057 - DNA, 25 bp, Homo sapien
cacgtcggaggtgcagcttgaacta

SEQ ID NO: 4596058 - DNA, 25 bp, Homo sapien
gaataagggaggcatacttcctgct

SEQ ID NO: 4596059 - DNA, 25 bp, Homo sapien
gagaggctactcagcaaacaagcag

SEQ ID NO: 4596060 - DNA, 25 bp, Homo sapien
aaacaagcagccacggcaggtatgg

SEQ ID NO: 4596061 - DNA, 25 bp, Homo sapien
tatgatagggtataatctggcactg

SEQ ID NO: 4596062 - DNA, 25 bp, Homo sapien
gggaccctatctcttatgatagggt

SEQ ID NO: 4596063 - DNA, 25 bp, Homo sapien
ccagaaggggagatgacttcttgtg

SEQ ID NO: 4596064 - DNA, 25 bp, Homo sapien
tctggcactgtatggatcaacttga

SEQ ID NO: 4596065 - DNA, 25 bp, Homo sapien
cacaactgactcttggtaaatacac

SEQ ID NO: 4596066 - DNA, 25 bp, Homo sapien
taccagccccgagctgtggcaggct

SEQ ID NO: 4596067 - DNA, 25 bp, Homo sapien
caactctccgggtagaagcagtgtc

SEQ ID NO: 4596068 - DNA, 25 bp, Homo sapien
cagaaacgtgcaggaatcgagagga

SEQ ID NO: 4596069 - DNA, 25 bp, Homo sapien
cgtattccaactgcgggagtctccc

SEQ ID NO: 4596070 - DNA, 25 bp, Homo sapien
tctggtgcaacaaggttcccgagaa

SEQ ID NO: 4596071 - DNA, 25 bp, Homo sapien
tcatttgagaccaagcccgtattcc

SEQ ID NO: 4596072 - DNA, 25 bp, Homo sapien
tcacatgaccttcgatgcttccagg

SEQ ID NO: 4596073 - DNA, 25 bp, Homo sapien
tccagtcagccgatgtgtaagagta

SEQ ID NO: 4596074 - DNA, 25 bp, Homo sapien
tcttgacatagaaggaagcaatgcc

SEQ ID NO: 4596075 - DNA, 25 bp, Homo sapien
caaagtcgtgttgcagcaggcaggc

SEQ ID NO: 4596076 - DNA, 25 bp, Homo sapien
gaaaagagtcccctggcactgatga

SEQ ID NO: 4596077 - DNA, 25 bp, Homo sapien
tagaaggtgtggaggactcaccacg

SEQ ID NO: 4596078 - DNA, 25 bp, Homo sapien
ctcactgcggcctttgtaacaaaac

SEQ ID NO: 4596079 - DNA, 25 bp, Homo sapien
tccagtgcttcatggatgggaccat

SEQ ID NO: 4596080 - DNA, 25 bp, Homo sapien
gggaccatcccagcaactaatcaga

SEQ ID NO: 4596081 - DNA, 25 bp, Homo sapien
cctggcctcccacccgggctcctga

SEQ ID NO: 4596082 - DNA, 25 bp, Homo sapien
cctggcctcccacccgggctcctgg

SEQ ID NO: 4596083 - DNA, 25 bp, Homo sapien
tggcctcgcatctgggctcctggcc

SEQ ID NO: 4596084 - DNA, 25 bp, Homo sapien
cgggctcctgagctcccagccgggc

SEQ ID NO: 4596085 - DNA, 25 bp, Homo sapien
gggctggtgaaatgtgtcacttcct

SEQ ID NO: 4596086 - DNA, 25 bp, Homo sapien
ccttctcttttggagcgggtggtag

SEQ ID NO: 4596087 - DNA, 25 bp, Homo sapien
tatgtgaccgtgaccccttcatgca

SEQ ID NO: 4596088 - DNA, 25 bp, Homo sapien
tctgaggagcttcctatgtgaccgt

SEQ ID NO: 4596089 - DNA, 25 bp, Homo sapien
tttccaagaggtcggcgtggtagtc

SEQ ID NO: 4596090 - DNA, 25 bp, Homo sapien
tcaaatctttgaaacgccagcccat

SEQ ID NO: 4596091 - DNA, 25 bp, Homo sapien
gaaacagtgaagacatgtctgcact

SEQ ID NO: 4596092 - DNA, 25 bp, Homo sapien
tttgaaacgccagcccatttccaag

SEQ ID NO: 4596093 - DNA, 25 bp, Homo sapien
gaggcactgcggctttctgccgaca

SEQ ID NO: 4596094 - DNA, 25 bp, Homo sapien
cagccttgtgaatgagacaccttga

SEQ ID NO: 4596095 - DNA, 25 bp, Homo sapien
tgtagcccctctcacattgactagg

SEQ ID NO: 4596096 - DNA, 25 bp, Homo sapien
tagggctgacccaataggatgctgc

SEQ ID NO: 4596097 - DNA, 25 bp, Homo sapien
gccggggggtgtggattcaggatcc

SEQ ID NO: 4596098 - DNA, 25 bp, Homo sapien
agtggccggggggtgtggattcagg

SEQ ID NO: 4596099 - DNA, 25 bp, Homo sapien
cacaggaaacgagcccccttcttct

SEQ ID NO: 4596100 - DNA, 25 bp, Homo sapien
tctggccgtgcctgagagttggttt

SEQ ID NO: 4596101 - DNA, 25 bp, Homo sapien
ggcccggcagctgaaagcgtaagac

SEQ ID NO: 4596102 - DNA, 25 bp, Homo sapien
tcggtcagtcaatgcatgggtgagc

SEQ ID NO: 4596103 - DNA, 25 bp, Homo sapien
agcgctggcccggatctaacttggc

SEQ ID NO: 4596104 - DNA, 25 bp, Homo sapien
tgagaaccctaggatcacagcgttg

SEQ ID NO: 4596105 - DNA, 25 bp, Homo sapien
gaaaggcggctgggcctgaccgggc

SEQ ID NO: 4596106 - DNA, 25 bp, Homo sapien
aaaggcggctgggcctgaccgggct

SEQ ID NO: 4596107 - DNA, 25 bp, Homo sapien
caccggaagggagcggcgccgcgtc

SEQ ID NO: 4596108 - DNA, 25 bp, Homo sapien
gcgtccccgccgcttcacgccctcc

SEQ ID NO: 4596109 - DNA, 25 bp, Homo sapien
accccggagcgtgcagccgccccaa

SEQ ID NO: 4596110 - DNA, 25 bp, Homo sapien
agcagcaccggaagggagcggcgcc

SEQ ID NO: 4596111 - DNA, 25 bp, Homo sapien
caagaggcagattccaattgaagca

SEQ ID NO: 4596112 - DNA, 25 bp, Homo sapien
tcatatagcttcatccactggaggt

SEQ ID NO: 4596113 - DNA, 25 bp, Homo sapien
tctaggctgcagtcatcggatgaca

SEQ ID NO: 4596114 - DNA, 25 bp, Homo sapien
tctatgcctcttaaacccaggtgtt

SEQ ID NO: 4596115 - DNA, 25 bp, Homo sapien
tgttgttgtacaatctatggacaaa

SEQ ID NO: 4596116 - DNA, 25 bp, Homo sapien
caaagccaacattggatcatatggc

SEQ ID NO: 4596117 - DNA, 25 bp, Homo sapien
atcatatggcaagagtaggtttagt

SEQ ID NO: 4596118 - DNA, 25 bp, Homo sapien
gtctctttacggcttggtagctcat

SEQ ID NO: 4596119 - DNA, 25 bp, Homo sapien
tgctaggactcatttaagggaagaa

SEQ ID NO: 4596120 - DNA, 25 bp, Homo sapien
taatcagggatacctaatgctagga

SEQ ID NO: 4596121 - DNA, 25 bp, Homo sapien
ccaagaagctatgcatttgtgaact

SEQ ID NO: 4596122 - DNA, 25 bp, Homo sapien
tcagctaaggccagacatgtccaag

SEQ ID NO: 4596123 - DNA, 25 bp, Homo sapien
aagccatggtgtggatctctgcctc

SEQ ID NO: 4596124 - DNA, 25 bp, Homo sapien
tgtacagcccagttttcagctaaga

SEQ ID NO: 4596125 - DNA, 25 bp, Homo sapien
acttatggactgcagcggtttcggc

SEQ ID NO: 4596126 - DNA, 25 bp, Homo sapien
gaaagctgtcgccagcagagagaca

SEQ ID NO: 4596127 - DNA, 25 bp, Homo sapien
tgataataagaattccattataggc

SEQ ID NO: 4596128 - DNA, 25 bp, Homo sapien
gaattccattataggctgggcctga

SEQ ID NO: 4596129 - DNA, 25 bp, Homo sapien
aaggcagaaaggctaatctgataat

SEQ ID NO: 4596130 - DNA, 25 bp, Homo sapien
gcagaaaggctaatctgataataag

SEQ ID NO: 4596131 - DNA, 25 bp, Homo sapien
cctgcatggcgtggtgtgtccctcc

SEQ ID NO: 4596132 - DNA, 25 bp, Homo sapien
gtcatcagtcagtcgcttctataaa

SEQ ID NO: 4596133 - DNA, 25 bp, Homo sapien
gctgaaacgctaataaaggttctcg

SEQ ID NO: 4596134 - DNA, 25 bp, Homo sapien
caaagccactagtctctctgtcatc

SEQ ID NO: 4596135 - DNA, 25 bp, Homo sapien
ttacttaggctcaaacagtatcccc

SEQ ID NO: 4596136 - DNA, 25 bp, Homo sapien
caggatagagacaacgcaaagatac

SEQ ID NO: 4596137 - DNA, 25 bp, Homo sapien
gagaggctggatactcacaactcga

SEQ ID NO: 4596138 - DNA, 25 bp, Homo sapien
caactcgataaagggtgacattcac

SEQ ID NO: 4596139 - DNA, 25 bp, Homo sapien
ctgaagaacaccctcatggagagca

SEQ ID NO: 4596140 - DNA, 25 bp, Homo sapien
agaacaccctcatggagagcatatt

SEQ ID NO: 4596141 - DNA, 25 bp, Homo sapien
ccattgtggtaggccctgaagaaca

SEQ ID NO: 4596142 - DNA, 25 bp, Homo sapien
gcccttctctagtgccagccattgt

SEQ ID NO: 4596143 - DNA, 25 bp, Homo sapien
taaatatataccttggccaggcaag

SEQ ID NO: 4596144 - DNA, 25 bp, Homo sapien
gcttgtgcactcatcttaatcttaa

SEQ ID NO: 4596145 - DNA, 25 bp, Homo sapien
gtagatgttagcgtagggtggtgaa

SEQ ID NO: 4596146 - DNA, 25 bp, Homo sapien
tcccacctggaaggtagatgttagc

SEQ ID NO: 4596147 - DNA, 25 bp, Homo sapien
tgtactccagtctgggtgacagagc

SEQ ID NO: 4596148 - DNA, 25 bp, Homo sapien
ttgcagtgagctgagatcacaccac

SEQ ID NO: 4596149 - DNA, 25 bp, Homo sapien
gctgctcgggaagctggggcaggaa

SEQ ID NO: 4596150 - DNA, 25 bp, Homo sapien
atcgcttgaacctgggaagtggagg

SEQ ID NO: 4596151 - DNA, 25 bp, Homo sapien
tgtgggaactggcaagtctcagctc

SEQ ID NO: 4596152 - DNA, 25 bp, Homo sapien
tggcaagtctcagctctcaaacgcc

SEQ ID NO: 4596153 - DNA, 25 bp, Homo sapien
tcagctctcaaacgcccgggctttt

SEQ ID NO: 4596154 - DNA, 25 bp, Homo sapien
gggtgcagacgcctggcttggcctg

SEQ ID NO: 4596155 - DNA, 25 bp, Homo sapien
gaaagactcccacattgtacaggac

SEQ ID NO: 4596156 - DNA, 25 bp, Homo sapien
ttagagggcaatagtctgacttcac

SEQ ID NO: 4596157 - DNA, 25 bp, Homo sapien
gaggggacgcctcaacaaaagatca

SEQ ID NO: 4596158 - DNA, 25 bp, Homo sapien
tcacttcgtatttattcatgtggga

SEQ ID NO: 4596159 - DNA, 25 bp, Homo sapien
ttggaggaactagcagcagtgacct

SEQ ID NO: 4596160 - DNA, 25 bp, Homo sapien
aacacgttgcttgtgatcactgacc

SEQ ID NO: 4596161 - DNA, 25 bp, Homo sapien
gaacagtggcagcacatcgtgggct

SEQ ID NO: 4596162 - DNA, 25 bp, Homo sapien
gatcagctggtgctattgggaaaac

SEQ ID NO: 4596163 - DNA, 25 bp, Homo sapien
ggagctgttatcttaaggtctgcaa

SEQ ID NO: 4596164 - DNA, 25 bp, Homo sapien
tggacacggtcctaacagaaggccg

SEQ ID NO: 4596165 - DNA, 25 bp, Homo sapien
tggaaggacttggtaatcggctctg

SEQ ID NO: 4596166 - DNA, 25 bp, Homo sapien
cagaatagatgaggacatgtggacc

SEQ ID NO: 4596167 - DNA, 25 bp, Homo sapien
gagcttatccctcagggtcgcaggc

SEQ ID NO: 4596168 - DNA, 25 bp, Homo sapien
gatggagcttatccctcagggtcgc

SEQ ID NO: 4596169 - DNA, 25 bp, Homo sapien
tcagggtcgcaggctgtgcctccag

SEQ ID NO: 4596170 - DNA, 25 bp, Homo sapien
ctggagatggagcttatccctcagg

SEQ ID NO: 4596171 - DNA, 25 bp, Homo sapien
aggctgtggtccaagccttctcgct

SEQ ID NO: 4596172 - DNA, 25 bp, Homo sapien
agaggctgcagaattatcagccagc

SEQ ID NO: 4596173 - DNA, 25 bp, Homo sapien
cagccgtctggaactgctctgaggc

SEQ ID NO: 4596174 - DNA, 25 bp, Homo sapien
caagccttctcgctcttcttgagaa

SEQ ID NO: 4596175 - DNA, 25 bp, Homo sapien
tctgcttctcggaaaggcttctcgg

SEQ ID NO: 4596176 - DNA, 25 bp, Homo sapien
gcttctcggaaaggcttctcggctg

SEQ ID NO: 4596177 - DNA, 25 bp, Homo sapien
tcggaaaggcttctcggctggccca

SEQ ID NO: 4596178 - DNA, 25 bp, Homo sapien
ttctcggaaaggcttctcggctggc

SEQ ID NO: 4596179 - DNA, 25 bp, Homo sapien
cagaagcccgaagtagagtccagaa

SEQ ID NO: 4596180 - DNA, 25 bp, Homo sapien
ggggtgggctgtgtaccctgcccca

SEQ ID NO: 4596181 - DNA, 25 bp, Homo sapien
gcccgaagtagagtccagaaagccc

SEQ ID NO: 4596182 - DNA, 25 bp, Homo sapien
gaagcccgaagtagagtccagaaag

SEQ ID NO: 4596183 - DNA, 25 bp, Homo sapien
cagagggttcggtgacgcctgggaa

SEQ ID NO: 4596184 - DNA, 25 bp, Homo sapien
gttcggtgacgcctgggaaggtgcc

SEQ ID NO: 4596185 - DNA, 25 bp, Homo sapien
ccccacagagggttcggtgacgcct

SEQ ID NO: 4596186 - DNA, 25 bp, Homo sapien
ccacagagggttcggtgacgcctgg

SEQ ID NO: 4596187 - DNA, 25 bp, Homo sapien
catcccagtgtccagccacccccgc

SEQ ID NO: 4596188 - DNA, 25 bp, Homo sapien
gccacccccgctgaagccaccctgt

SEQ ID NO: 4596189 - DNA, 25 bp, Homo sapien
atcccagtgtccagccacccccgct

SEQ ID NO: 4596190 - DNA, 25 bp, Homo sapien
ccccgctgaagccaccctgtgctct

SEQ ID NO: 4596191 - DNA, 25 bp, Homo sapien
gaggcggccggtcggcagcggacag

SEQ ID NO: 4596192 - DNA, 25 bp, Homo sapien
cggccggtcggcagcggacaggaca

SEQ ID NO: 4596193 - DNA, 25 bp, Homo sapien
agtggttctgcgtcatcacagacag

SEQ ID NO: 4596194 - DNA, 25 bp, Homo sapien
gggttcaggaggcggccggtcggca

SEQ ID NO: 4596195 - DNA, 25 bp, Homo sapien
tgtggaccagcatagtgcattatag

SEQ ID NO: 4596196 - DNA, 25 bp, Homo sapien
agtgtggaccagcatagtgcattat

SEQ ID NO: 4596197 - DNA, 25 bp, Homo sapien
tggaccagcatagtgcattatagcc

SEQ ID NO: 4596198 - DNA, 25 bp, Homo sapien
tagtgtggaccagcatagtgcatta

SEQ ID NO: 4596199 - DNA, 25 bp, Homo sapien
gattccgctccaccctgtttcccaa

SEQ ID NO: 4596200 - DNA, 25 bp, Homo sapien
ttggctgtgataggcgattccgctc

SEQ ID NO: 4596201 - DNA, 25 bp, Homo sapien
agagtcttgtttggctgtgataggc

SEQ ID NO: 4596202 - DNA, 25 bp, Homo sapien
ttctgggatgtagggctccccaccc

SEQ ID NO: 4596203 - DNA, 25 bp, Homo sapien
taaacggcccattgttgtgctggca

SEQ ID NO: 4596204 - DNA, 25 bp, Homo sapien
tctttaatgctacaagggctcacac

SEQ ID NO: 4596205 - DNA, 25 bp, Homo sapien
tgtttgccctgatcactaaacggcc

SEQ ID NO: 4596206 - DNA, 25 bp, Homo sapien
tcagagcttagttcccagcagacaa

SEQ ID NO: 4596207 - DNA, 25 bp, Homo sapien
tagtgactagggatgcgactgaaca

SEQ ID NO: 4596208 - DNA, 25 bp, Homo sapien
gaaaccctgttcaggatgacaaact

SEQ ID NO: 4596209 - DNA, 25 bp, Homo sapien
tagagtgcagtgtcccctacagaga

SEQ ID NO: 4596210 - DNA, 25 bp, Homo sapien
gagaattatccgacccaagatgttg

SEQ ID NO: 4596211 - DNA, 25 bp, Homo sapien
aaggccagggaggtcgcagactgag

SEQ ID NO: 4596212 - DNA, 25 bp, Homo sapien
ccagggaggtcgcagactgaggaag

SEQ ID NO: 4596213 - DNA, 25 bp, Homo sapien
tggaaggccagggaggtcgcagact

SEQ ID NO: 4596214 - DNA, 25 bp, Homo sapien
agggaggtcgcagactgaggaagac

SEQ ID NO: 4596215 - DNA, 25 bp, Homo sapien
ccctgtgaagggataggagcctgac

SEQ ID NO: 4596216 - DNA, 25 bp, Homo sapien
gaagtcattaagtcagccagtggct

SEQ ID NO: 4596217 - DNA, 25 bp, Homo sapien
ctatggacaagctctaagggaccca

SEQ ID NO: 4596218 - DNA, 25 bp, Homo sapien
tccagttccagtgcgaccagatatg

SEQ ID NO: 4596219 - DNA, 25 bp, Homo sapien
accccaaggagacaacaggagtgct

SEQ ID NO: 4596220 - DNA, 25 bp, Homo sapien
taaagagaggcctagctggactctt

SEQ ID NO: 4596221 - DNA, 25 bp, Homo sapien
ggagcctctctggattagccccaaa

SEQ ID NO: 4596222 - DNA, 25 bp, Homo sapien
tgaggtggaccagagatttcagaga

SEQ ID NO: 4596223 - DNA, 25 bp, Homo sapien
caggacttgttgcaatgagataaag

SEQ ID NO: 4596224 - DNA, 25 bp, Homo sapien
ggccagttgagagtgataaagagaa

SEQ ID NO: 4596225 - DNA, 25 bp, Homo sapien
tgagagtgataaagagaacaatacc

SEQ ID NO: 4596226 - DNA, 25 bp, Homo sapien
tgcccacaggacttgttgcaatgag

SEQ ID NO: 4596227 - DNA, 25 bp, Homo sapien
cctgaagcagcaagtattgctattt

SEQ ID NO: 4596228 - DNA, 25 bp, Homo sapien
ttttgccttatgcagattgaagagg

SEQ ID NO: 4596229 - DNA, 25 bp, Homo sapien
tctttttagcagcagaattgttgta

SEQ ID NO: 4596230 - DNA, 25 bp, Homo sapien
tacaatctcatgtgaaaccctaaaa

SEQ ID NO: 4596231 - DNA, 25 bp, Homo sapien
tctgactcagaagaggacgagggcc

SEQ ID NO: 4596232 - DNA, 25 bp, Homo sapien
gctgcgccttcatcgtgctggtctt

SEQ ID NO: 4596233 - DNA, 25 bp, Homo sapien
gagaggaccgcctttatcaaagacc

SEQ ID NO: 4596234 - DNA, 25 bp, Homo sapien
aaggtgtacaccatggaccgtggcc

SEQ ID NO: 4596235 - DNA, 25 bp, Homo sapien
ggttcataggtcactggctctccaa

SEQ ID NO: 4596236 - DNA, 25 bp, Homo sapien
gagtgaggaatagttgagccccaag

SEQ ID NO: 4596237 - DNA, 25 bp, Homo sapien
tggagaaagcactgacctgtcatgc

SEQ ID NO: 4596238 - DNA, 25 bp, Homo sapien
tgtaatttaaacaggcccagcattg

SEQ ID NO: 4596239 - DNA, 25 bp, Homo sapien
tggcatgtgcactcctctggaaggc

SEQ ID NO: 4596240 - DNA, 25 bp, Homo sapien
tagctactactgagtgagcacctgg

SEQ ID NO: 4596241 - DNA, 25 bp, Homo sapien
gctgcagagcatccgaaagcggcat

SEQ ID NO: 4596242 - DNA, 25 bp, Homo sapien
gcccttggtggagaacagtgcatcc

SEQ ID NO: 4596243 - DNA, 25 bp, Homo sapien
gcttgagaaggcgttcagcaccacg

SEQ ID NO: 4596244 - DNA, 25 bp, Homo sapien
gactcgctagagattgtcatggcca

SEQ ID NO: 4596245 - DNA, 25 bp, Homo sapien
gatcataggtcacttcaggtagcaa

SEQ ID NO: 4596246 - DNA, 25 bp, Homo sapien
gaaagcctccaagactccatgtgct

SEQ ID NO: 4596247 - DNA, 25 bp, Homo sapien
ataaactttggctttaatggatgac

SEQ ID NO: 4596248 - DNA, 25 bp, Homo sapien
taataaactttggctttaatggatg

SEQ ID NO: 4596249 - DNA, 25 bp, Homo sapien
aaactttggctttaatggatgactg

SEQ ID NO: 4596250 - DNA, 25 bp, Homo sapien
aactttggctttaatggatgactgg

SEQ ID NO: 4596251 - DNA, 25 bp, Homo sapien
gcccagcagtggttgtcagtaagcg

SEQ ID NO: 4596252 - DNA, 25 bp, Homo sapien
tttcccgcgcggcttgaggtactgg

SEQ ID NO: 4596253 - DNA, 25 bp, Homo sapien
caaccgaagtaacccgcaatgcgga

SEQ ID NO: 4596254 - DNA, 25 bp, Homo sapien
gattgcgagtcaccgagtttcccgc

SEQ ID NO: 4596255 - DNA, 25 bp, Homo sapien
gaaggaaagatatgcagcccaccag

SEQ ID NO: 4596256 - DNA, 25 bp, Homo sapien
tcttaacgggaaaggctgctaccat

SEQ ID NO: 4596257 - DNA, 25 bp, Homo sapien
ggtgactccgggacacacaattagt

SEQ ID NO: 4596258 - DNA, 25 bp, Homo sapien
ggcacgtcacagtctaacctgataa

SEQ ID NO: 4596259 - DNA, 25 bp, Homo sapien
gagttgtgcctctggatagcttcaa

SEQ ID NO: 4596260 - DNA, 25 bp, Homo sapien
gctcagcttagttagcaggagacct

SEQ ID NO: 4596261 - DNA, 25 bp, Homo sapien
cacagaaaagatggcgtatgaatcc

SEQ ID NO: 4596262 - DNA, 25 bp, Homo sapien
gtatgaatcctgtccggcctgaacg

SEQ ID NO: 4596263 - DNA, 25 bp, Homo sapien
tccagttgccggtttgttccctgaa

SEQ ID NO: 4596264 - DNA, 25 bp, Homo sapien
cgaagtattcctggactcgatgttc

SEQ ID NO: 4596265 - DNA, 25 bp, Homo sapien
tgtcagcccccgctgcttgaacaga

SEQ ID NO: 4596266 - DNA, 25 bp, Homo sapien
gaacagatgctttagagcctcttcc

SEQ ID NO: 4596267 - DNA, 25 bp, Homo sapien
tcaaggccatgagttcctgatggaa

SEQ ID NO: 4596268 - DNA, 25 bp, Homo sapien
tgctagcgtgatgtcaaggaaagca

SEQ ID NO: 4596269 - DNA, 25 bp, Homo sapien
cacttcctggcaagcttggttcaag

SEQ ID NO: 4596270 - DNA, 25 bp, Homo sapien
ctgcataagagtcgacagaaacttg

SEQ ID NO: 4596271 - DNA, 25 bp, Homo sapien
tcccttacagcccatacgaaagcgt

SEQ ID NO: 4596272 - DNA, 25 bp, Homo sapien
atttgggaattaagaatgcccaggg

SEQ ID NO: 4596273 - DNA, 25 bp, Homo sapien
catgtgtcttcagaaggcggcatcc

SEQ ID NO: 4596274 - DNA, 25 bp, Homo sapien
gaagatcaaagagtggtccagtagg

SEQ ID NO: 4596275 - DNA, 25 bp, Homo sapien
tctgtgtcctccaccgtgtcatgga

SEQ ID NO: 4596276 - DNA, 25 bp, Homo sapien
tgggcagagtcttgtcatctgttac

SEQ ID NO: 4596277 - DNA, 25 bp, Homo sapien
tgtgccccaaagtgtagctccacct

SEQ ID NO: 4596278 - DNA, 25 bp, Homo sapien
gggtgcagcgattcaggtccctcag

SEQ ID NO: 4596279 - DNA, 25 bp, Homo sapien
gatgtcagccaagggttgcccattg

SEQ ID NO: 4596280 - DNA, 25 bp, Homo sapien
acaagttcccactcagccctgagat

SEQ ID NO: 4596281 - DNA, 25 bp, Homo sapien
cctgagatgtcagccaagggttgcc

SEQ ID NO: 4596282 - DNA, 25 bp, Homo sapien
ttgctgaatggggcccctaatcccc

SEQ ID NO: 4596283 - DNA, 25 bp, Homo sapien
tcgtgggtcaggatccgtgccacac

SEQ ID NO: 4596284 - DNA, 25 bp, Homo sapien
agtgattcccgcctcgtgggtcagg

SEQ ID NO: 4596285 - DNA, 25 bp, Homo sapien
ttcccgcctcgtgggtcaggatccg

SEQ ID NO: 4596286 - DNA, 25 bp, Homo sapien
aatgtcagtgattcccgcctcgtgg

SEQ ID NO: 4596287 - DNA, 25 bp, Homo sapien
taagcttgggacaaaacaggtgctc

SEQ ID NO: 4596288 - DNA, 25 bp, Homo sapien
caaagggaacgatcatgcctaccgt

SEQ ID NO: 4596289 - DNA, 25 bp, Homo sapien
gaagtcaggtcggaggtagtcccaa

SEQ ID NO: 4596290 - DNA, 25 bp, Homo sapien
tggtcaagtaccttaccctctggga

SEQ ID NO: 4596291 - DNA, 25 bp, Homo sapien
acccaggtgccgcagccggcgctcc

SEQ ID NO: 4596292 - DNA, 25 bp, Homo sapien
ggcgctccgcggccgacgcgcccac

SEQ ID NO: 4596293 - DNA, 25 bp, Homo sapien
agccggcgctccgcggccgacgcgc

SEQ ID NO: 4596294 - DNA, 25 bp, Homo sapien
cgcagccggcgctccgcggccgacg

SEQ ID NO: 4596295 - DNA, 25 bp, Homo sapien
gagccgcgaagtcggcagcctccag

SEQ ID NO: 4596296 - DNA, 25 bp, Homo sapien
ctcggggtccttccgccgctgctgc

SEQ ID NO: 4596297 - DNA, 25 bp, Homo sapien
cgctgctgccggtgcttgcgagccg

SEQ ID NO: 4596298 - DNA, 25 bp, Homo sapien
cggtgcttgcgagccgcgaagtcgg

SEQ ID NO: 4596299 - DNA, 25 bp, Homo sapien
atcgtggaggctaattcagcgggcc

SEQ ID NO: 4596300 - DNA, 25 bp, Homo sapien
gaattcctctggagctgaccggccc

SEQ ID NO: 4596301 - DNA, 25 bp, Homo sapien
ttcagcgggccgagttgggcctgcc

SEQ ID NO: 4596302 - DNA, 25 bp, Homo sapien
gcccgcgcagagagcaagtgatgtg

SEQ ID NO: 4596303 - DNA, 25 bp, Homo sapien
gggtgcaagaagaacataagcctgg

SEQ ID NO: 4596304 - DNA, 25 bp, Homo sapien
taagcctggctctttgggagcccac

SEQ ID NO: 4596305 - DNA, 25 bp, Homo sapien
ctgttgggggtgcaagaagaacata

SEQ ID NO: 4596306 - DNA, 25 bp, Homo sapien
gcctggctctttgggagcccacagt

SEQ ID NO: 4596307 - DNA, 25 bp, Homo sapien
gatgagtgttgtcactgctgtcctg

SEQ ID NO: 4596308 - DNA, 25 bp, Homo sapien
gggaaaggctaatgaaaggagtcac

SEQ ID NO: 4596309 - DNA, 25 bp, Homo sapien
gagagacctggtgatccccatagaa

SEQ ID NO: 4596310 - DNA, 25 bp, Homo sapien
tatgctatgagagctcctatttcag

SEQ ID NO: 4596311 - DNA, 25 bp, Homo sapien
tagacctcgtgcacttctgctgcgg

SEQ ID NO: 4596312 - DNA, 25 bp, Homo sapien
tggttgtgaccctgatgaccgtaga

SEQ ID NO: 4596313 - DNA, 25 bp, Homo sapien
ctgatgaccgtagacctcgtgcact

SEQ ID NO: 4596314 - DNA, 25 bp, Homo sapien
cctcgtgcacttctgctgcggtcgg

SEQ ID NO: 4596315 - DNA, 25 bp, Homo sapien
ggccgagatgccacgcacttttaaa

SEQ ID NO: 4596316 - DNA, 25 bp, Homo sapien
cacggagtgcatgtgtaacttggcc

SEQ ID NO: 4596317 - DNA, 25 bp, Homo sapien
gaaggctgtgcccatgatagaaggc

SEQ ID NO: 4596318 - DNA, 25 bp, Homo sapien
taacttggccatgagcaaggaggtg

SEQ ID NO: 4596319 - DNA, 25 bp, Homo sapien
tgtggttctaatccgagctccagcc

SEQ ID NO: 4596320 - DNA, 25 bp, Homo sapien
agcacgttcgaggagggctaagccc

SEQ ID NO: 4596321 - DNA, 25 bp, Homo sapien
caatccgtggaaggtaaaagctgct

SEQ ID NO: 4596322 - DNA, 25 bp, Homo sapien
tatattgggagtcctctgtggcctc

SEQ ID NO: 4596323 - DNA, 25 bp, Homo sapien
tgaggaaggttcaaacagcaccgcc

SEQ ID NO: 4596324 - DNA, 25 bp, Homo sapien
ctcaggtggattggctgcggtccca

SEQ ID NO: 4596325 - DNA, 25 bp, Homo sapien
tgtgaggaaggttcaaacagcaccg

SEQ ID NO: 4596326 - DNA, 25 bp, Homo sapien
tgcatttattacaattctgtgagga

SEQ ID NO: 4596327 - DNA, 25 bp, Homo sapien
gagacaccactccatacacagaata

SEQ ID NO: 4596328 - DNA, 25 bp, Homo sapien
ttagtcattagggagttgtaaatga

SEQ ID NO: 4596329 - DNA, 25 bp, Homo sapien
tcattagggagttgtaaatgaaaac

SEQ ID NO: 4596330 - DNA, 25 bp, Homo sapien
tacataaaggctgaacataccaact

SEQ ID NO: 4596331 - DNA, 25 bp, Homo sapien
tcatcgtggaagctagagcaggaac

SEQ ID NO: 4596332 - DNA, 25 bp, Homo sapien
gaactcaggcaaagtaggcacagga

SEQ ID NO: 4596333 - DNA, 25 bp, Homo sapien
cacctctttggcagtagggcaggcc

SEQ ID NO: 4596334 - DNA, 25 bp, Homo sapien
tatgagtaaacagcgtggctaacac

SEQ ID NO: 4596335 - DNA, 25 bp, Homo sapien
catggtcatggaacctggccaaggt

SEQ ID NO: 4596336 - DNA, 25 bp, Homo sapien
cccagggatgggcatagtcaatcat

SEQ ID NO: 4596337 - DNA, 25 bp, Homo sapien
tataattaggtccagtctaggcaca

SEQ ID NO: 4596338 - DNA, 25 bp, Homo sapien
ggtagagaagtcaggccccatatgc

SEQ ID NO: 4596339 - DNA, 25 bp, Homo sapien
gttggttgaattgaggattccagaa

SEQ ID NO: 4596340 - DNA, 25 bp, Homo sapien
atgttggttgaattgaggattccag

SEQ ID NO: 4596341 - DNA, 25 bp, Homo sapien
tgttggttgaattgaggattccaga

SEQ ID NO: 4596342 - DNA, 25 bp, Homo sapien
agatttggaagcctttgaaagttct

SEQ ID NO: 4596343 - DNA, 25 bp, Homo sapien
atttggaagcctttgaaagttctcg

SEQ ID NO: 4596344 - DNA, 25 bp, Homo sapien
tcagatttggaagcctttgaaagtt

SEQ ID NO: 4596345 - DNA, 25 bp, Homo sapien
gatttggaagcctttgaaagttctc

SEQ ID NO: 4596346 - DNA, 25 bp, Homo sapien
gtttctctgagatccctagcctgca

SEQ ID NO: 4596347 - DNA, 25 bp, Homo sapien
gatgtttcagttaacgacaggccac

SEQ ID NO: 4596348 - DNA, 25 bp, Homo sapien
tcacagacagagtgcatgtgcacgc

SEQ ID NO: 4596349 - DNA, 25 bp, Homo sapien
tggttaagtgtcagcaaaaggtccc

SEQ ID NO: 4596350 - DNA, 25 bp, Homo sapien
tggagcacatggtagagcagcaaaa

SEQ ID NO: 4596351 - DNA, 25 bp, Homo sapien
gaacatatatctaccaatccctggg

SEQ ID NO: 4596352 - DNA, 25 bp, Homo sapien
tattagcagaggttagtttaccggc

SEQ ID NO: 4596353 - DNA, 25 bp, Homo sapien
tagcctaggaggaaaacgccatacc

SEQ ID NO: 4596354 - DNA, 25 bp, Homo sapien
tattctttccagctattgcaggcct

SEQ ID NO: 4596355 - DNA, 25 bp, Homo sapien
gagaatagagctggcggttaagccc

SEQ ID NO: 4596356 - DNA, 25 bp, Homo sapien
tccaggaaataatcagcacacaggc

SEQ ID NO: 4596357 - DNA, 25 bp, Homo sapien
caagagcctcattgtaggcagcaca

SEQ ID NO: 4596358 - DNA, 25 bp, Homo sapien
tggaactgtcagagagggacggatc

SEQ ID NO: 4596359 - DNA, 25 bp, Homo sapien
acagtggaactgtcagagagggacg

SEQ ID NO: 4596360 - DNA, 25 bp, Homo sapien
aactgtcagagagggacggatcctt

SEQ ID NO: 4596361 - DNA, 25 bp, Homo sapien
cagtggaactgtcagagagggacgg

SEQ ID NO: 4596362 - DNA, 25 bp, Homo sapien
cgcaaactcagaataggtgctggca

SEQ ID NO: 4596363 - DNA, 25 bp, Homo sapien
cagaattaatgctgaagttgcgctg

SEQ ID NO: 4596364 - DNA, 25 bp, Homo sapien
agttgcgctggaggggggccgagcc

SEQ ID NO: 4596365 - DNA, 25 bp, Homo sapien
ggtgctggcaacagaattaatgctg

SEQ ID NO: 4596366 - DNA, 25 bp, Homo sapien
ccctgaacaggtggaagcagcgact

SEQ ID NO: 4596367 - DNA, 25 bp, Homo sapien
caggttctccttgttggctccatgc

SEQ ID NO: 4596368 - DNA, 25 bp, Homo sapien
gatgctgccgttgagctccaggttc

SEQ ID NO: 4596369 - DNA, 25 bp, Homo sapien
catgcctgccagtacggggtgtttt

SEQ ID NO: 4596370 - DNA, 25 bp, Homo sapien
ccgaatgctactattggccgtagca

SEQ ID NO: 4596371 - DNA, 25 bp, Homo sapien
tattggccgtagcattggacatggt

SEQ ID NO: 4596372 - DNA, 25 bp, Homo sapien
gagtggtagactgtccctccaaaga

SEQ ID NO: 4596373 - DNA, 25 bp, Homo sapien
caaagataggccgaatgctactatt

SEQ ID NO: 4596374 - DNA, 25 bp, Homo sapien
tgcaaggacgcaacaagcacagaca

SEQ ID NO: 4596375 - DNA, 25 bp, Homo sapien
caccgcaccccgaatttaatgcaag

SEQ ID NO: 4596376 - DNA, 25 bp, Homo sapien
tcttttcatcgttaccagaatgttg

SEQ ID NO: 4596377 - DNA, 25 bp, Homo sapien
tttcatcgttaccagaatgttggca

SEQ ID NO: 4596378 - DNA, 25 bp, Homo sapien
cactcccttgaaatcagtgtttccc

SEQ ID NO: 4596379 - DNA, 25 bp, Homo sapien
acccactcccttgaaatcagtgttt

SEQ ID NO: 4596380 - DNA, 25 bp, Homo sapien
gaaatcagtgtttccctaagccttg

SEQ ID NO: 4596381 - DNA, 25 bp, Homo sapien
ccttgaaatcagtgtttccctaagc

SEQ ID NO: 4596382 - DNA, 25 bp, Homo sapien
gcgctgccatacagcatctctgtct

SEQ ID NO: 4596383 - DNA, 25 bp, Homo sapien
ctaggtgttcgaggagcgctgccat

SEQ ID NO: 4596384 - DNA, 25 bp, Homo sapien
cttacgtgctttgcccggtgtattg

SEQ ID NO: 4596385 - DNA, 25 bp, Homo sapien
ggtgtattgggagccagtcctcgcc

SEQ ID NO: 4596386 - DNA, 25 bp, Homo sapien
ttcccaatttgcgttcacgttcaca

SEQ ID NO: 4596387 - DNA, 25 bp, Homo sapien
tcccaatttgcgttcacgttcacac

SEQ ID NO: 4596388 - DNA, 25 bp, Homo sapien
ccaatttgcgttcacgttcacactt

SEQ ID NO: 4596389 - DNA, 25 bp, Homo sapien
tttcccaatttgcgttcacgttcac

SEQ ID NO: 4596390 - DNA, 25 bp, Homo sapien
attgttctgccacatactccatgaa

SEQ ID NO: 4596391 - DNA, 25 bp, Homo sapien
tctctttctccaatcgatgcatctc

SEQ ID NO: 4596392 - DNA, 25 bp, Homo sapien
aatcgatgcatctcccattgttctg

SEQ ID NO: 4596393 - DNA, 25 bp, Homo sapien
ccattgttctgccacatactccatg

SEQ ID NO: 4596394 - DNA, 25 bp, Homo sapien
ttctgcccattcaccataaatgcct

SEQ ID NO: 4596395 - DNA, 25 bp, Homo sapien
aattcaattcgtgccttcaactctt

SEQ ID NO: 4596396 - DNA, 25 bp, Homo sapien
tgcccattcaccataaatgcctttg

SEQ ID NO: 4596397 - DNA, 25 bp, Homo sapien
cctgttcccacaattcaattcgtgc

SEQ ID NO: 4596398 - DNA, 25 bp, Homo sapien
tagaagatttcctcctcggtttgta

SEQ ID NO: 4596399 - DNA, 25 bp, Homo sapien
aatcgatttggatctgaagcttttc

SEQ ID NO: 4596400 - DNA, 25 bp, Homo sapien
tctggagcttggctcgttgtttttc

SEQ ID NO: 4596401 - DNA, 25 bp, Homo sapien
ggagcttggctcgttgtttttcttc

SEQ ID NO: 4596402 - DNA, 25 bp, Homo sapien
tcactgacttataaacaccactaca

SEQ ID NO: 4596403 - DNA, 25 bp, Homo sapien
gatcactgacttataaacaccacta

SEQ ID NO: 4596404 - DNA, 25 bp, Homo sapien
tgatcactgacttataaacaccact

SEQ ID NO: 4596405 - DNA, 25 bp, Homo sapien
gtgatcactgacttataaacaccac

SEQ ID NO: 4596406 - DNA, 25 bp, Homo sapien
tccttgtgaacttcatagtagtttt

SEQ ID NO: 4596407 - DNA, 25 bp, Homo sapien
ttttttaaccgcacaatctcagcat

SEQ ID NO: 4596408 - DNA, 25 bp, Homo sapien
gtagttttttaaccgcacaatctca

SEQ ID NO: 4596409 - DNA, 25 bp, Homo sapien
cttctggacaccttcaaagagttcc

SEQ ID NO: 4596410 - DNA, 25 bp, Homo sapien
tgaaccagctccactcgaattgcct

SEQ ID NO: 4596411 - DNA, 25 bp, Homo sapien
ccaaccgatccacttctaattgcag

SEQ ID NO: 4596412 - DNA, 25 bp, Homo sapien
taaaagcactggtcccagtactgaa

SEQ ID NO: 4596413 - DNA, 25 bp, Homo sapien
gcattttcagttcttccaaccgatc

SEQ ID NO: 4596414 - DNA, 25 bp, Homo sapien
agggtggctgccatagttttatatt

SEQ ID NO: 4596415 - DNA, 25 bp, Homo sapien
tttatattcactcaggtttgcaaaa

SEQ ID NO: 4596416 - DNA, 25 bp, Homo sapien
gttaagggtggctgccatagtttta

SEQ ID NO: 4596417 - DNA, 25 bp, Homo sapien
agaaacttgttaagggtggctgcca

SEQ ID NO: 4596418 - DNA, 25 bp, Homo sapien
gacccagacataatggtggccacag

SEQ ID NO: 4596419 - DNA, 25 bp, Homo sapien
gtatttgcaacctgtcccagagctc

SEQ ID NO: 4596420 - DNA, 25 bp, Homo sapien
tcggatttgagtacgcagcccctca

SEQ ID NO: 4596421 - DNA, 25 bp, Homo sapien
ccttggcctttgacccagacataat

SEQ ID NO: 4596422 - DNA, 25 bp, Homo sapien
tagcctcccgcaaagaaatgtctgg

SEQ ID NO: 4596423 - DNA, 25 bp, Homo sapien
tcctaaacacgagctgtaaggctgt

SEQ ID NO: 4596424 - DNA, 25 bp, Homo sapien
gcatagaaagccagtgtcactcacg

SEQ ID NO: 4596425 - DNA, 25 bp, Homo sapien
tatatactacggagatcctagggca

SEQ ID NO: 4596426 - DNA, 25 bp, Homo sapien
tacacagtatgatctgtctctttat

SEQ ID NO: 4596427 - DNA, 25 bp, Homo sapien
tctggggtgtggtctaatgcttcca

SEQ ID NO: 4596428 - DNA, 25 bp, Homo sapien
gtctctttatactgacaaactcctc

SEQ ID NO: 4596429 - DNA, 25 bp, Homo sapien
tatgatctgtctctttatactgaca

SEQ ID NO: 4596430 - DNA, 25 bp, Homo sapien
tttaaaacaaagcaattacaagata

SEQ ID NO: 4596431 - DNA, 25 bp, Homo sapien
ctttaaaacaaagcaattacaagat

SEQ ID NO: 4596432 - DNA, 25 bp, Homo sapien
ttaaaacaaagcaattacaagatac

SEQ ID NO: 4596433 - DNA, 25 bp, Homo sapien
gggcatacaaagaatttcgcacagt

SEQ ID NO: 4596434 - DNA, 25 bp, Homo sapien
gaggcactgtcaatatcatagtggg

SEQ ID NO: 4596435 - DNA, 25 bp, Homo sapien
tctagttgcaagatggtcgtctctc

SEQ ID NO: 4596436 - DNA, 25 bp, Homo sapien
gcatcaattccacttgggtgcgcaa

SEQ ID NO: 4596437 - DNA, 25 bp, Homo sapien
cactgttataagattccaagtgaat

SEQ ID NO: 4596438 - DNA, 25 bp, Homo sapien
ctgaataagacaacgtaccactgtt

SEQ ID NO: 4596439 - DNA, 25 bp, Homo sapien
taagacaacgtaccactgttataag

SEQ ID NO: 4596440 - DNA, 25 bp, Homo sapien
cgtaccactgttataagattccaag

SEQ ID NO: 4596441 - DNA, 25 bp, Homo sapien
tcaacgttgctttctaagtctcagg

SEQ ID NO: 4596442 - DNA, 25 bp, Homo sapien
gtctagctccatccctacgaggaag

SEQ ID NO: 4596443 - DNA, 25 bp, Homo sapien
gtctcaggccccagacagatcacca

SEQ ID NO: 4596444 - DNA, 25 bp, Homo sapien
tgcaggcccaagtcaacgttgcttt

SEQ ID NO: 4596445 - DNA, 25 bp, Homo sapien
tgaaatggctcaacatgtaactcgc

SEQ ID NO: 4596446 - DNA, 25 bp, Homo sapien
ctgacagacggatatgcttttgatg

SEQ ID NO: 4596447 - DNA, 25 bp, Homo sapien
actcgctgcacagagtgttcagctc

SEQ ID NO: 4596448 - DNA, 25 bp, Homo sapien
ttctgacagacggatatgcttttga

SEQ ID NO: 4596449 - DNA, 25 bp, Homo sapien
gctcccatatttcccgaaggtgatt

SEQ ID NO: 4596450 - DNA, 25 bp, Homo sapien
aaccgctggtcctctggaatcccaa

SEQ ID NO: 4596451 - DNA, 25 bp, Homo sapien
cacctcagttctttgtaaccgctgg

SEQ ID NO: 4596452 - DNA, 25 bp, Homo sapien
agacatactatggactcctccgcca

SEQ ID NO: 4596453 - DNA, 25 bp, Homo sapien
ctttcaacaatgatctacctatgga

SEQ ID NO: 4596454 - DNA, 25 bp, Homo sapien
tattacatcatggaagctcaacctt

SEQ ID NO: 4596455 - DNA, 25 bp, Homo sapien
ctacctatggaagtataatacagaa

SEQ ID NO: 4596456 - DNA, 25 bp, Homo sapien
cctaccaaatgccactagcaataca

SEQ ID NO: 4596457 - DNA, 25 bp, Homo sapien
ttacacttgatttctgtacgtttct

SEQ ID NO: 4596458 - DNA, 25 bp, Homo sapien
caggatagtagttcttttggctcag

SEQ ID NO: 4596459 - DNA, 25 bp, Homo sapien
cagtgactggtagagggcttctggg

SEQ ID NO: 4596460 - DNA, 25 bp, Homo sapien
tgcactccaaagcaacaccctatct

SEQ ID NO: 4596461 - DNA, 25 bp, Homo sapien
tcggcgccgactgccgtgacgatct

SEQ ID NO: 4596462 - DNA, 25 bp, Homo sapien
tgccgtgacgatctaggcccgggac

SEQ ID NO: 4596463 - DNA, 25 bp, Homo sapien
ggcggacagcgcgtcaggtctcacc

SEQ ID NO: 4596464 - DNA, 25 bp, Homo sapien
gcagccgaaacgagcgtcgctccct

SEQ ID NO: 4596465 - DNA, 25 bp, Homo sapien
cgcaaaatttcaaaccgcgccacgg

SEQ ID NO: 4596466 - DNA, 25 bp, Homo sapien
gcgagccgttgagccccgcaaaatt

SEQ ID NO: 4596467 - DNA, 25 bp, Homo sapien
gcggacgctccaagcagccgtgagt

SEQ ID NO: 4596468 - DNA, 25 bp, Homo sapien
aaacaccggcgatgtcactccgcgt

SEQ ID NO: 4596469 - DNA, 25 bp, Homo sapien
cgcaatcggggtggggactcgcgag

SEQ ID NO: 4596470 - DNA, 25 bp, Homo sapien
tggcggcgggggatgacgtcactgt

SEQ ID NO: 4596471 - DNA, 25 bp, Homo sapien
cagggcctgggaagcgccggagtgg

SEQ ID NO: 4596472 - DNA, 25 bp, Homo sapien
ctgaagtcgcgggtgcgcaatcggg

SEQ ID NO: 4596473 - DNA, 25 bp, Homo sapien
gcttggaatcgatctttggtgggac

SEQ ID NO: 4596474 - DNA, 25 bp, Homo sapien
ggtgaataggtaagttagcgcctag

SEQ ID NO: 4596475 - DNA, 25 bp, Homo sapien
taagttagcgcctagtttccctcgc

SEQ ID NO: 4596476 - DNA, 25 bp, Homo sapien
tcgctcatccaagaagcgaagcttg

SEQ ID NO: 4596477 - DNA, 25 bp, Homo sapien
tatggtagaggaaactcaggtacag

SEQ ID NO: 4596478 - DNA, 25 bp, Homo sapien
aaagtccaggccaagaagcacagga

SEQ ID NO: 4596479 - DNA, 25 bp, Homo sapien
cagagtggtagagtgatttttacag

SEQ ID NO: 4596480 - DNA, 25 bp, Homo sapien
agatggaagtgcgtgtccagaacga

SEQ ID NO: 4596481 - DNA, 25 bp, Homo sapien
gatgtcaacactggccgggaaaaac

SEQ ID NO: 4596482 - DNA, 25 bp, Homo sapien
catgctcccggctcttagcaggtag

SEQ ID NO: 4596483 - DNA, 25 bp, Homo sapien
catgggttgtacttcataaacagaa

SEQ ID NO: 4596484 - DNA, 25 bp, Homo sapien
tgttctctaaatcccaacacgttcc

SEQ ID NO: 4596485 - DNA, 25 bp, Homo sapien
cgagcgctgtttgtgactgctgtcg

SEQ ID NO: 4596486 - DNA, 25 bp, Homo sapien
tggcctccataaggcgagcgctgtt

SEQ ID NO: 4596487 - DNA, 25 bp, Homo sapien
gcgagcgctgtttgtgactgctgtc

SEQ ID NO: 4596488 - DNA, 25 bp, Homo sapien
actcatggcctccataaggcgagcg

SEQ ID NO: 4596489 - DNA, 25 bp, Homo sapien
ctatgactggtataactgggctccc

SEQ ID NO: 4596490 - DNA, 25 bp, Homo sapien
ccagtttatagacagagacgtgagt

SEQ ID NO: 4596491 - DNA, 25 bp, Homo sapien
cagcccagagttaaggctatggcaa

SEQ ID NO: 4596492 - DNA, 25 bp, Homo sapien
acagcacagatcttaggccccaacg

SEQ ID NO: 4596493 - DNA, 25 bp, Homo sapien
cccaggaaccggagggctgagatct

SEQ ID NO: 4596494 - DNA, 25 bp, Homo sapien
ctctgcccaggaaccggagggctga

SEQ ID NO: 4596495 - DNA, 25 bp, Homo sapien
tcagagaatgtacaaccacccaaga

SEQ ID NO: 4596496 - DNA, 25 bp, Homo sapien
tgcccaggaaccggagggctgagat

SEQ ID NO: 4596497 - DNA, 25 bp, Homo sapien
tcactgcagttgagcagccgtacca

SEQ ID NO: 4596498 - DNA, 25 bp, Homo sapien
tgtgaatgcaaagtcactgcagttg

SEQ ID NO: 4596499 - DNA, 25 bp, Homo sapien
tgcaaagtcactgcagttgagcagc

SEQ ID NO: 4596500 - DNA, 25 bp, Homo sapien
gagcagccgtaccacctcatcaagg

SEQ ID NO: 4596501 - DNA, 25 bp, Homo sapien
ccgaagacgtaagccatgtctcggg

SEQ ID NO: 4596502 - DNA, 25 bp, Homo sapien
tttcagatcatactcgccgtccaca

SEQ ID NO: 4596503 - DNA, 25 bp, Homo sapien
tcaatgattcggcagctcaggggca

SEQ ID NO: 4596504 - DNA, 25 bp, Homo sapien
gggcacataagcaccaccgaagacg

SEQ ID NO: 4596505 - DNA, 25 bp, Homo sapien
gacagctcagctccctaacccttta

SEQ ID NO: 4596506 - DNA, 25 bp, Homo sapien
cagctcagctccctaaccctttaaa

SEQ ID NO: 4596507 - DNA, 25 bp, Homo sapien
gtgacagctcagctccctaaccctt

SEQ ID NO: 4596508 - DNA, 25 bp, Homo sapien
agctcagctccctaaccctttaaag

SEQ ID NO: 4596509 - DNA, 25 bp, Homo sapien
tgctgatggcacgaaaattgctcct

SEQ ID NO: 4596510 - DNA, 25 bp, Homo sapien
ctttttgctgatggcacgaaaattg

SEQ ID NO: 4596511 - DNA, 25 bp, Homo sapien
gatggcacgaaaattgctcctcttg

SEQ ID NO: 4596512 - DNA, 25 bp, Homo sapien
ggcacgaaaattgctcctcttggcc

SEQ ID NO: 4596513 - DNA, 25 bp, Homo sapien
ggcctgctccgttaggagcccagct

SEQ ID NO: 4596514 - DNA, 25 bp, Homo sapien
ctgcagccttgtcggtcaccagctt

SEQ ID NO: 4596515 - DNA, 25 bp, Homo sapien
gccttgtcggtcaccagcttgctca

SEQ ID NO: 4596516 - DNA, 25 bp, Homo sapien
tcttcgcagattggagaaggttagc

SEQ ID NO: 4596517 - DNA, 25 bp, Homo sapien
gatcggtaatccttggggatcaaac

SEQ ID NO: 4596518 - DNA, 25 bp, Homo sapien
gttttcagagatcggtaatccttgg

SEQ ID NO: 4596519 - DNA, 25 bp, Homo sapien
cagagatcggtaatccttggggatc

SEQ ID NO: 4596520 - DNA, 25 bp, Homo sapien
gagatcggtaatccttggggatcaa

SEQ ID NO: 4596521 - DNA, 25 bp, Homo sapien
atggacaaaaggcacatgaggcgca

SEQ ID NO: 4596522 - DNA, 25 bp, Homo sapien
ggcgcaggctttctataggcgacac

SEQ ID NO: 4596523 - DNA, 25 bp, Homo sapien
caaaaggcacatgaggcgcaggctt

SEQ ID NO: 4596524 - DNA, 25 bp, Homo sapien
gcacatgaggcgcaggctttctata

SEQ ID NO: 4596525 - DNA, 25 bp, Homo sapien
tatgtgttcctcaatgtagctggtg

SEQ ID NO: 4596526 - DNA, 25 bp, Homo sapien
gtgctctcccggatgttgaacccct

SEQ ID NO: 4596527 - DNA, 25 bp, Homo sapien
ctgccggtctatgtgttcctcaatg

SEQ ID NO: 4596528 - DNA, 25 bp, Homo sapien
caatgtagctggtgctctcccggat

SEQ ID NO: 4596529 - DNA, 25 bp, Homo sapien
catgctcagtcttgattagctcctg

SEQ ID NO: 4596530 - DNA, 25 bp, Homo sapien
tagctcctggaaatcctgcttggtt

SEQ ID NO: 4596531 - DNA, 25 bp, Homo sapien
catgatggattcacaggccccaata

SEQ ID NO: 4596532 - DNA, 25 bp, Homo sapien
cttcatgatggattcacaggcccca

SEQ ID NO: 4596533 - DNA, 25 bp, Homo sapien
gctcctgggacacgaaattcttcat

SEQ ID NO: 4596534 - DNA, 25 bp, Homo sapien
tcttcatctgcttaatgtccatgcc

SEQ ID NO: 4596535 - DNA, 25 bp, Homo sapien
ttgagctcctgggacacgaaattct

SEQ ID NO: 4596536 - DNA, 25 bp, Homo sapien
gaaattcttcatctgcttaatgtcc

SEQ ID NO: 4596537 - DNA, 25 bp, Homo sapien
aagttccgggccttctggctcaaga

SEQ ID NO: 4596538 - DNA, 25 bp, Homo sapien
gggccttctggctcaagaagccaaa

SEQ ID NO: 4596539 - DNA, 25 bp, Homo sapien
acattggagaagtgctcgttccgaa

SEQ ID NO: 4596540 - DNA, 25 bp, Homo sapien
gctcgttccgaatctcattaaacac

SEQ ID NO: 4596541 - DNA, 25 bp, Homo sapien
gcattgagtagcaccttcaggctct

SEQ ID NO: 4596542 - DNA, 25 bp, Homo sapien
acttctgggccaaagtcgacactcc

SEQ ID NO: 4596543 - DNA, 25 bp, Homo sapien
ccttcaggctcttgtcagaggatgt

SEQ ID NO: 4596544 - DNA, 25 bp, Homo sapien
cttgtcctcggcattgagtagcacc

SEQ ID NO: 4596545 - DNA, 25 bp, Homo sapien
gatgcggaaggtgtcatctactagg

SEQ ID NO: 4596546 - DNA, 25 bp, Homo sapien
acacttgatgcggaaggtgtcatct

SEQ ID NO: 4596547 - DNA, 25 bp, Homo sapien
acttgatgcggaaggtgtcatctac

SEQ ID NO: 4596548 - DNA, 25 bp, Homo sapien
ggaaggtgtcatctactaggccctc

SEQ ID NO: 4596549 - DNA, 25 bp, Homo sapien
cttgggagcaaagtgctgtcacaaa

SEQ ID NO: 4596550 - DNA, 25 bp, Homo sapien
gcaaagtgctgtcacaaagtccaca

SEQ ID NO: 4596551 - DNA, 25 bp, Homo sapien
ggagcaaagtgctgtcacaaagtcc

SEQ ID NO: 4596552 - DNA, 25 bp, Homo sapien
caaagtgctgtcacaaagtccacat

SEQ ID NO: 4596553 - DNA, 25 bp, Homo sapien
ggttcctccacaattcatatgccat

SEQ ID NO: 4596554 - DNA, 25 bp, Homo sapien
tctggccttcggcccttggtttcgc

SEQ ID NO: 4596555 - DNA, 25 bp, Homo sapien
gagaaagatatgtccaatctctggc

SEQ ID NO: 4596556 - DNA, 25 bp, Homo sapien
cggcccttggtttcgccatcctcct

SEQ ID NO: 4596557 - DNA, 25 bp, Homo sapien
tgctgagaaggtgtaaggcctgagc

SEQ ID NO: 4596558 - DNA, 25 bp, Homo sapien
acagtgttgatccaacgctgatctc

SEQ ID NO: 4596559 - DNA, 25 bp, Homo sapien
cttggcgcacctgccaattccatag

SEQ ID NO: 4596560 - DNA, 25 bp, Homo sapien
cacctgccaattccatagcagtttg

SEQ ID NO: 4596561 - DNA, 25 bp, Homo sapien
tctggtagttccatgctcagcagat

SEQ ID NO: 4596562 - DNA, 25 bp, Homo sapien
ctggtagttccatgctcagcagatc

SEQ ID NO: 4596563 - DNA, 25 bp, Homo sapien
gtggggacagagagcatcagcctcc

SEQ ID NO: 4596564 - DNA, 25 bp, Homo sapien
tgtggggacagagagcatcagcctc

SEQ ID NO: 4596565 - DNA, 25 bp, Homo sapien
ctgtggggacagagagcatcagcct

SEQ ID NO: 4596566 - DNA, 25 bp, Homo sapien
tccatagattccctcttcctcaagc

SEQ ID NO: 4596567 - DNA, 25 bp, Homo sapien
tcttcctcaagcaccatctcacacg

SEQ ID NO: 4596568 - DNA, 25 bp, Homo sapien
caagcaccatctcacacgcatagaa

SEQ ID NO: 4596569 - DNA, 25 bp, Homo sapien
catagattccctcttcctcaagcac

SEQ ID NO: 4596570 - DNA, 25 bp, Homo sapien
aagaacacgcagaggagagctaagg

SEQ ID NO: 4596571 - DNA, 25 bp, Homo sapien
gaaaacagcaacagtcaaggcagga

SEQ ID NO: 4596572 - DNA, 25 bp, Homo sapien
catggaacagctcatcttaggaggg

SEQ ID NO: 4596573 - DNA, 25 bp, Homo sapien
gacaccagtggatttgacaacggag

SEQ ID NO: 4596574 - DNA, 25 bp, Homo sapien
cttttgagggctgaagatcactttg

SEQ ID NO: 4596575 - DNA, 25 bp, Homo sapien
ttttgagggctgaagatcactttgt

SEQ ID NO: 4596576 - DNA, 25 bp, Homo sapien
tttgagggctgaagatcactttgta

SEQ ID NO: 4596577 - DNA, 25 bp, Homo sapien
tgagggctgaagatcactttgtatt

SEQ ID NO: 4596578 - DNA, 25 bp, Homo sapien
tcttgatgcggggtctgaccaagaa

SEQ ID NO: 4596579 - DNA, 25 bp, Homo sapien
gcggggtctgaccaagaagcacaat

SEQ ID NO: 4596580 - DNA, 25 bp, Homo sapien
caatgtatcgcatattcttgatgcg

SEQ ID NO: 4596581 - DNA, 25 bp, Homo sapien
ggcaatgtatcgcatattcttgatg

SEQ ID NO: 4596582 - DNA, 25 bp, Homo sapien
caccttgtatagcttgtctacttcg

SEQ ID NO: 4596583 - DNA, 25 bp, Homo sapien
ctccaccttgtatagcttgtctact

SEQ ID NO: 4596584 - DNA, 25 bp, Homo sapien
tgtatagcttgtctacttcgtgttg

SEQ ID NO: 4596585 - DNA, 25 bp, Homo sapien
ccttgtatagcttgtctacttcgtg

SEQ ID NO: 4596586 - DNA, 25 bp, Homo sapien
gggctcatgagatctgcctcaatga

SEQ ID NO: 4596587 - DNA, 25 bp, Homo sapien
gctcatgagatctgcctcaatgaat

SEQ ID NO: 4596588 - DNA, 25 bp, Homo sapien
caattcgatccaaagggctcatgag

SEQ ID NO: 4596589 - DNA, 25 bp, Homo sapien
gatggagacattggcaattcgatcc

SEQ ID NO: 4596590 - DNA, 25 bp, Homo sapien
atttattatctgtatccacagttga

SEQ ID NO: 4596591 - DNA, 25 bp, Homo sapien
ttttctgtaccagtgggaagaagac

SEQ ID NO: 4596592 - DNA, 25 bp, Homo sapien
tctgtatccacagttgacacttctc

SEQ ID NO: 4596593 - DNA, 25 bp, Homo sapien
ccttctcgttttctgtaccagtggg

SEQ ID NO: 4596594 - DNA, 25 bp, Homo sapien
tcacaaatgagtagggtgttgacat

SEQ ID NO: 4596595 - DNA, 25 bp, Homo sapien
ttcacaaatgagtagggtgttgaca

SEQ ID NO: 4596596 - DNA, 25 bp, Homo sapien
aggccttcacaaatgagtagggtgt

SEQ ID NO: 4596597 - DNA, 25 bp, Homo sapien
tccagcagatagatgagctggtctc

SEQ ID NO: 4596598 - DNA, 25 bp, Homo sapien
cagcagatagatgagctggtctcga

SEQ ID NO: 4596599 - DNA, 25 bp, Homo sapien
tagatgagctggtctcgagccagcc

SEQ ID NO: 4596600 - DNA, 25 bp, Homo sapien
cagatagatgagctggtctcgagcc

SEQ ID NO: 4596601 - DNA, 25 bp, Homo sapien
tcggagcagccttgtctcagacctg

SEQ ID NO: 4596602 - DNA, 25 bp, Homo sapien
caggcaagagagctactacctcgga

SEQ ID NO: 4596603 - DNA, 25 bp, Homo sapien
cagagactccgcagcgtacgaggag

SEQ ID NO: 4596604 - DNA, 25 bp, Homo sapien
gaaggacgcccttcgttctgagaag

SEQ ID NO: 4596605 - DNA, 25 bp, Homo sapien
aaaatgtgtccaaatcaaaagaatc

SEQ ID NO: 4596606 - DNA, 25 bp, Homo sapien
tgtctatggtctgaaaaactccttg

SEQ ID NO: 4596607 - DNA, 25 bp, Homo sapien
tctgaaaaactccttgttgggaaca

SEQ ID NO: 4596608 - DNA, 25 bp, Homo sapien
aaaaatgtgtccaaatcaaaagaat

SEQ ID NO: 4596609 - DNA, 25 bp, Homo sapien
tttcactggtgtaaacactgaaaca

SEQ ID NO: 4596610 - DNA, 25 bp, Homo sapien
tggtgtaaacactgaaacagagttg

SEQ ID NO: 4596611 - DNA, 25 bp, Homo sapien
gggaacaagagaaaagactatgaac

SEQ ID NO: 4596612 - DNA, 25 bp, Homo sapien
gaacaagagaaaagactatgaacta

SEQ ID NO: 4596613 - DNA, 25 bp, Homo sapien
ttttaccagacctataaatactctg

SEQ ID NO: 4596614 - DNA, 25 bp, Homo sapien
tgtccaggtttttaccagacctata

SEQ ID NO: 4596615 - DNA, 25 bp, Homo sapien
tccaggcttgatcgtaaacattata

SEQ ID NO: 4596616 - DNA, 25 bp, Homo sapien
ttttgtcttctccacctgcaaatcc

SEQ ID NO: 4596617 - DNA, 25 bp, Homo sapien
ctctccaggcttgatcgtaaacatt

SEQ ID NO: 4596618 - DNA, 25 bp, Homo sapien
caggcttgatcgtaaacattataaa

SEQ ID NO: 4596619 - DNA, 25 bp, Homo sapien
tccttggggttggggctgccgcctc

SEQ ID NO: 4596620 - DNA, 25 bp, Homo sapien
gggttggggctgccgcctctggctc

SEQ ID NO: 4596621 - DNA, 25 bp, Homo sapien
gccaaggccactgggtgagccaggt

SEQ ID NO: 4596622 - DNA, 25 bp, Homo sapien
actgggtgagccaggtgctggcaac

SEQ ID NO: 4596623 - DNA, 25 bp, Homo sapien
actgactaaagctgagtttaaaaag

SEQ ID NO: 4596624 - DNA, 25 bp, Homo sapien
ggcactgactaaagctgagtttaaa

SEQ ID NO: 4596625 - DNA, 25 bp, Homo sapien
tcggcactgactaaagctgagttta

SEQ ID NO: 4596626 - DNA, 25 bp, Homo sapien
ctcggcactgactaaagctgagttt

SEQ ID NO: 4596627 - DNA, 25 bp, Homo sapien
tcctcctccttactgcccagttcat

SEQ ID NO: 4596628 - DNA, 25 bp, Homo sapien
ctccaagatgctcggcatgggctga

SEQ ID NO: 4596629 - DNA, 25 bp, Homo sapien
ctcctccttactgcccagttcatcg

SEQ ID NO: 4596630 - DNA, 25 bp, Homo sapien
ccggctcttcaggtcctccaagatg

SEQ ID NO: 4596631 - DNA, 25 bp, Homo sapien
cccactagccatcggtgcgggagtt

SEQ ID NO: 4596632 - DNA, 25 bp, Homo sapien
ccactagccatcggtgcgggagttc

SEQ ID NO: 4596633 - DNA, 25 bp, Homo sapien
cagtcccactagccatcggtgcggg

SEQ ID NO: 4596634 - DNA, 25 bp, Homo sapien
ggcacagtcccactagccatcggtg

SEQ ID NO: 4596635 - DNA, 25 bp, Homo sapien
tgaggctcatctgggactgtagctg

SEQ ID NO: 4596636 - DNA, 25 bp, Homo sapien
agccatgaggctcatctgggactgt

SEQ ID NO: 4596637 - DNA, 25 bp, Homo sapien
catgaggctcatctgggactgtagc

SEQ ID NO: 4596638 - DNA, 25 bp, Homo sapien
aggctcatctgggactgtagctgct

SEQ ID NO: 4596639 - DNA, 25 bp, Homo sapien
agaggttggcaggtcgtccccctcg

SEQ ID NO: 4596640 - DNA, 25 bp, Homo sapien
cctcagtaactcccttgcctgagtt

SEQ ID NO: 4596641 - DNA, 25 bp, Homo sapien
gccctcagtaactcccttgcctgag

SEQ ID NO: 4596642 - DNA, 25 bp, Homo sapien
caggtactggcctcgaggccgctgc

SEQ ID NO: 4596643 - DNA, 25 bp, Homo sapien
ggcctcgaggccgctgcagactctg

SEQ ID NO: 4596644 - DNA, 25 bp, Homo sapien
tactggcctcgaggccgctgcagac

SEQ ID NO: 4596645 - DNA, 25 bp, Homo sapien
cctcgaggccgctgcagactctgag

SEQ ID NO: 4596646 - DNA, 25 bp, Homo sapien
tgcacggaggacctgcccgtctccc

SEQ ID NO: 4596647 - DNA, 25 bp, Homo sapien
ctgctcctcgagctggtgattctgg

SEQ ID NO: 4596648 - DNA, 25 bp, Homo sapien
tgatggtggtgcggtctttctgcac

SEQ ID NO: 4596649 - DNA, 25 bp, Homo sapien
tgattctgggagagcgcgtggctga

SEQ ID NO: 4596650 - DNA, 25 bp, Homo sapien
ctccagcgtcttccgcaggtgcttg

SEQ ID NO: 4596651 - DNA, 25 bp, Homo sapien
gctgccggttcaggtgactcgagcc

SEQ ID NO: 4596652 - DNA, 25 bp, Homo sapien
tcaggtgactcgagccctcattggc

SEQ ID NO: 4596653 - DNA, 25 bp, Homo sapien
tcttccgcaggtgcttgatctccgc

SEQ ID NO: 4596654 - DNA, 25 bp, Homo sapien
cttcttctcctccttcaatgtgtga

SEQ ID NO: 4596655 - DNA, 25 bp, Homo sapien
tcttctcctccttcaatgtgtgaac

SEQ ID NO: 4596656 - DNA, 25 bp, Homo sapien
ctgacgcatgtcatgcttcttctcc

SEQ ID NO: 4596657 - DNA, 25 bp, Homo sapien
tgcttcttctcctccttcaatgtgt

SEQ ID NO: 4596658 - DNA, 25 bp, Homo sapien
gatactcagcgtactcgtctctcca

SEQ ID NO: 4596659 - DNA, 25 bp, Homo sapien
tgcatcctctgccacacgcggcatg

SEQ ID NO: 4596660 - DNA, 25 bp, Homo sapien
cacgcggcatgctctccatggagat

SEQ ID NO: 4596661 - DNA, 25 bp, Homo sapien
tctccatggagatactcagcgtact

SEQ ID NO: 4596662 - DNA, 25 bp, Homo sapien
agctgtgcccgctcctccatggcct

SEQ ID NO: 4596663 - DNA, 25 bp, Homo sapien
gccccaggtatgcttccagctgtgc

SEQ ID NO: 4596664 - DNA, 25 bp, Homo sapien
gtgccccaggtatgcttccagctgt

SEQ ID NO: 4596665 - DNA, 25 bp, Homo sapien
cccgctcctccatggcctgctgtaa

SEQ ID NO: 4596666 - DNA, 25 bp, Homo sapien
tcaatgtacaactcagtcaataagg

SEQ ID NO: 4596667 - DNA, 25 bp, Homo sapien
tccacacagcgcctttaaaagggct

SEQ ID NO: 4596668 - DNA, 25 bp, Homo sapien
caactggatggtgaaacaggagaca

SEQ ID NO: 4596669 - DNA, 25 bp, Homo sapien
gctttgcagcatctagacaactgga

SEQ ID NO: 4596670 - DNA, 25 bp, Homo sapien
gtagcactttccctggctggaatcc

SEQ ID NO: 4596671 - DNA, 25 bp, Homo sapien
tctgagatccaagaaggcagggcag

SEQ ID NO: 4596672 - DNA, 25 bp, Homo sapien
caattgtcacagtggtctgagatcc

SEQ ID NO: 4596673 - DNA, 25 bp, Homo sapien
tggctggaatcctgcaattgtcaca

SEQ ID NO: 4596674 - DNA, 25 bp, Homo sapien
tagggcctagcactgtattctgcac

SEQ ID NO: 4596675 - DNA, 25 bp, Homo sapien
tgaactccttgtagggcctagcact

SEQ ID NO: 4596676 - DNA, 25 bp, Homo sapien
ttctgcacacttgagtccatcgtcc

SEQ ID NO: 4596677 - DNA, 25 bp, Homo sapien
gagtccatcgtccagcagatgctgg

SEQ ID NO: 4596678 - DNA, 25 bp, Homo sapien
taggtatgtcttagatctgtggtct

SEQ ID NO: 4596679 - DNA, 25 bp, Homo sapien
tctccttggagtgctcttgtaggta

SEQ ID NO: 4596680 - DNA, 25 bp, Homo sapien
gtcttagatctgtggtctgaggcat

SEQ ID NO: 4596681 - DNA, 25 bp, Homo sapien
gagtgctcttgtaggtatgtcttag

SEQ ID NO: 4596682 - DNA, 25 bp, Homo sapien
ggagagttatgcctcccagccttgt

SEQ ID NO: 4596683 - DNA, 25 bp, Homo sapien
gagtgctgctctgtaccaagatgtg

SEQ ID NO: 4596684 - DNA, 25 bp, Homo sapien
cactgttgtgcgagaggaagtcctc

SEQ ID NO: 4596685 - DNA, 25 bp, Homo sapien
tgtgccaggagcttacagtagacag

SEQ ID NO: 4596686 - DNA, 25 bp, Homo sapien
gaggtctagacgttctgataccttg

SEQ ID NO: 4596687 - DNA, 25 bp, Homo sapien
ttatcgataatctggtgtcctgagg

SEQ ID NO: 4596688 - DNA, 25 bp, Homo sapien
tgccacttggcaggtaaaaggtaat

SEQ ID NO: 4596689 - DNA, 25 bp, Homo sapien
gacgttctgataccttgccacttgg

SEQ ID NO: 4596690 - DNA, 25 bp, Homo sapien
ctgaggggaccagtactgagttgcc

SEQ ID NO: 4596691 - DNA, 25 bp, Homo sapien
ggaccagtactgagttgcctctgac

SEQ ID NO: 4596692 - DNA, 25 bp, Homo sapien
ggggaccagtactgagttgcctctg

SEQ ID NO: 4596693 - DNA, 25 bp, Homo sapien
ttgctggcaatgagagccccagggg

SEQ ID NO: 4596694 - DNA, 25 bp, Homo sapien
ttaacagcagttgatattcaaatta

SEQ ID NO: 4596695 - DNA, 25 bp, Homo sapien
aacagcagttgatattcaaattatc

SEQ ID NO: 4596696 - DNA, 25 bp, Homo sapien
taacagcagttgatattcaaattat

SEQ ID NO: 4596697 - DNA, 25 bp, Homo sapien
acagcagttgatattcaaattatct

SEQ ID NO: 4596698 - DNA, 25 bp, Homo sapien
aagagacgaagtatagcagaatact

SEQ ID NO: 4596699 - DNA, 25 bp, Homo sapien
ctaagagacgaagtatagcagaata

SEQ ID NO: 4596700 - DNA, 25 bp, Homo sapien
taagagacgaagtatagcagaatac

SEQ ID NO: 4596701 - DNA, 25 bp, Homo sapien
gagacgaagtatagcagaatactac

SEQ ID NO: 4596702 - DNA, 25 bp, Homo sapien
caatgacaagaattcggccagatga

SEQ ID NO: 4596703 - DNA, 25 bp, Homo sapien
gctttggtggctttttaggtggcaa

SEQ ID NO: 4596704 - DNA, 25 bp, Homo sapien
atgaagactcggtgtaggaaaggaa

SEQ ID NO: 4596705 - DNA, 25 bp, Homo sapien
gagctgggctgagtttttagcaatg

SEQ ID NO: 4596706 - DNA, 25 bp, Homo sapien
gcagaatttgttgtccccaatattt

SEQ ID NO: 4596707 - DNA, 25 bp, Homo sapien
gcccaactggtcatccagttttgct

SEQ ID NO: 4596708 - DNA, 25 bp, Homo sapien
aaggaggtcatccagtgctccctgc

SEQ ID NO: 4596709 - DNA, 25 bp, Homo sapien
tgctccctgcccaactggtcatcca

SEQ ID NO: 4596710 - DNA, 25 bp, Homo sapien
cattaaggcttcaaaacgaatgagg

SEQ ID NO: 4596711 - DNA, 25 bp, Homo sapien
caacaaactctatatctctgactgc

SEQ ID NO: 4596712 - DNA, 25 bp, Homo sapien
caaactctatatctctgactgcctt

SEQ ID NO: 4596713 - DNA, 25 bp, Homo sapien
caaaacgaatgaggacaacaaactc

SEQ ID NO: 4596714 - DNA, 25 bp, Homo sapien
ttctttgacatccagtactacaggg

SEQ ID NO: 4596715 - DNA, 25 bp, Homo sapien
tcatagcccctcagtctacctttaa

SEQ ID NO: 4596716 - DNA, 25 bp, Homo sapien
agtactacagggcaccttctgtgcc

SEQ ID NO: 4596717 - DNA, 25 bp, Homo sapien
tgattctagcaactgaatgatggcc

SEQ ID NO: 4596718 - DNA, 25 bp, Homo sapien
ttgtttgaatgcaccaagccttgca

SEQ ID NO: 4596719 - DNA, 25 bp, Homo sapien
taaagagtctttcggtgctgagcct

SEQ ID NO: 4596720 - DNA, 25 bp, Homo sapien
tttgagtccgcatccgaatttccag

SEQ ID NO: 4596721 - DNA, 25 bp, Homo sapien
gctggccgggtaggttctcttcagt

SEQ ID NO: 4596722 - DNA, 25 bp, Homo sapien
gcagatggcgccgaggaatggagcc

SEQ ID NO: 4596723 - DNA, 25 bp, Homo sapien
ggtgcagcagatggcgccgaggaat

SEQ ID NO: 4596724 - DNA, 25 bp, Homo sapien
ctggggtgcagcagatggcgccgag

SEQ ID NO: 4596725 - DNA, 25 bp, Homo sapien
agatggcgccgaggaatggagccca

SEQ ID NO: 4596726 - DNA, 25 bp, Homo sapien
ttctagtctggaaattttggcaggc

SEQ ID NO: 4596727 - DNA, 25 bp, Homo sapien
caagaaagatgggtggtagtacagt

SEQ ID NO: 4596728 - DNA, 25 bp, Homo sapien
ggagtagcccatgccagcaagaaag

SEQ ID NO: 4596729 - DNA, 25 bp, Homo sapien
tttagagggtttgatgtgtgccctg

SEQ ID NO: 4596730 - DNA, 25 bp, Homo sapien
gttggcactgagttccaaataccac

SEQ ID NO: 4596731 - DNA, 25 bp, Homo sapien
gaaggtgatgttggcactgagttcc

SEQ ID NO: 4596732 - DNA, 25 bp, Homo sapien
gtgatgttggcactgagttccaaat

SEQ ID NO: 4596733 - DNA, 25 bp, Homo sapien
aggtgatgttggcactgagttccaa

SEQ ID NO: 4596734 - DNA, 25 bp, Homo sapien
gctgatcatgccaagatgaggattc

SEQ ID NO: 4596735 - DNA, 25 bp, Homo sapien
tccaaatatgggttgacttcctgtg

SEQ ID NO: 4596736 - DNA, 25 bp, Homo sapien
tctccttgcagataagtaaagtgac

SEQ ID NO: 4596737 - DNA, 25 bp, Homo sapien
tctgataggaggtgctgatcatgcc

SEQ ID NO: 4596738 - DNA, 25 bp, Homo sapien
caaaggtatacgtaaaatgcagggt

SEQ ID NO: 4596739 - DNA, 25 bp, Homo sapien
gtggcaaaggtatacgtaaaatgca

SEQ ID NO: 4596740 - DNA, 25 bp, Homo sapien
gagaaatcaattgtccggagatgga

SEQ ID NO: 4596741 - DNA, 25 bp, Homo sapien
tacgtaaaatgcagggttgtgatga

SEQ ID NO: 4596742 - DNA, 25 bp, Homo sapien
tctttggaggcgatctgtttgatgt

SEQ ID NO: 4596743 - DNA, 25 bp, Homo sapien
agtggtaggtatgagggagccagcg

SEQ ID NO: 4596744 - DNA, 25 bp, Homo sapien
gggagccagcggaggcttctttgga

SEQ ID NO: 4596745 - DNA, 25 bp, Homo sapien
tggatggaggcagtataacttcgtg

SEQ ID NO: 4596746 - DNA, 25 bp, Homo sapien
agctcctgcgtgtcagtcaggatgt

SEQ ID NO: 4596747 - DNA, 25 bp, Homo sapien
tgagtcttgcagacatactgcctgc

SEQ ID NO: 4596748 - DNA, 25 bp, Homo sapien
ttgtgagtcttgcagacatactgcc

SEQ ID NO: 4596749 - DNA, 25 bp, Homo sapien
cctgcgtgtcagtcaggatgtggct

SEQ ID NO: 4596750 - DNA, 25 bp, Homo sapien
cagattagtcgggagagagcggccg

SEQ ID NO: 4596751 - DNA, 25 bp, Homo sapien
gagagagcggccgacctcagcaggt

SEQ ID NO: 4596752 - DNA, 25 bp, Homo sapien
aaggtttgatgtagggttgatgcat

SEQ ID NO: 4596753 - DNA, 25 bp, Homo sapien
agagcggccgacctcagcaggttgc

SEQ ID NO: 4596754 - DNA, 25 bp, Homo sapien
ctgaatgaaaatttgatccacgcag

SEQ ID NO: 4596755 - DNA, 25 bp, Homo sapien
ttgaccgggattttggcagatgaag

SEQ ID NO: 4596756 - DNA, 25 bp, Homo sapien
tgctcctgaatgaaaatttgatcca

SEQ ID NO: 4596757 - DNA, 25 bp, Homo sapien
cttgaccgggattttggcagatgaa

SEQ ID NO: 4596758 - DNA, 25 bp, Homo sapien
tctgcagaaccttccgggaagcatg

SEQ ID NO: 4596759 - DNA, 25 bp, Homo sapien
aaagtctgcagaaccttccgggaag

SEQ ID NO: 4596760 - DNA, 25 bp, Homo sapien
catttctactcgtcaaagtctgcag

SEQ ID NO: 4596761 - DNA, 25 bp, Homo sapien
tcaaagtctgcagaaccttccggga

SEQ ID NO: 4596762 - DNA, 25 bp, Homo sapien
ttaaccaattagataaacagtggcc

SEQ ID NO: 4596763 - DNA, 25 bp, Homo sapien
ggccaaatggaataatcagcttgac

SEQ ID NO: 4596764 - DNA, 25 bp, Homo sapien
tcagcttgacaaccatcatgaggct

SEQ ID NO: 4596765 - DNA, 25 bp, Homo sapien
gagtaaggaggtcgtcacatgtcac

SEQ ID NO: 4596766 - DNA, 25 bp, Homo sapien
tgggggtatttgcaaagtaatgtaa

SEQ ID NO: 4596767 - DNA, 25 bp, Homo sapien
tgtaagaaaattcacggcatctggt

SEQ ID NO: 4596768 - DNA, 25 bp, Homo sapien
taagaaaattcacggcatctggtct

SEQ ID NO: 4596769 - DNA, 25 bp, Homo sapien
aagtaatgtaagaaaattcacggca

SEQ ID NO: 4596770 - DNA, 25 bp, Homo sapien
tcttcctttgtgatcttgaaaaatg

SEQ ID NO: 4596771 - DNA, 25 bp, Homo sapien
ttttccattgcttgccagctgcttc

SEQ ID NO: 4596772 - DNA, 25 bp, Homo sapien
gtgatcttgaaaaatgcttactcat

SEQ ID NO: 4596773 - DNA, 25 bp, Homo sapien
tttttccattgcttgccagctgctt

SEQ ID NO: 4596774 - DNA, 25 bp, Homo sapien
ttcggcactgaacggatttttctca

SEQ ID NO: 4596775 - DNA, 25 bp, Homo sapien
tcggcactgaacggatttttctcat

SEQ ID NO: 4596776 - DNA, 25 bp, Homo sapien
cttcggcactgaacggatttttctc

SEQ ID NO: 4596777 - DNA, 25 bp, Homo sapien
gaccggcagtgaggtttgtgtaagg

SEQ ID NO: 4596778 - DNA, 25 bp, Homo sapien
gagtgaccggcagtgaggtttgtgt

SEQ ID NO: 4596779 - DNA, 25 bp, Homo sapien
cccaggtctaacagatagagtaaca

SEQ ID NO: 4596780 - DNA, 25 bp, Homo sapien
agtaacaatcctccaggccagtgtg

SEQ ID NO: 4596781 - DNA, 25 bp, Homo sapien
agagaatgggtcgtgggtttctgtt

SEQ ID NO: 4596782 - DNA, 25 bp, Homo sapien
cctctgggcagatgttaggcccttg

SEQ ID NO: 4596783 - DNA, 25 bp, Homo sapien
ttaaatgccgctttgctaaaacaca

SEQ ID NO: 4596784 - DNA, 25 bp, Homo sapien
tgggtttctgtttgttaaatgccgc

SEQ ID NO: 4596785 - DNA, 25 bp, Homo sapien
tggccacctggctagttaagtgcac

SEQ ID NO: 4596786 - DNA, 25 bp, Homo sapien
ggcagcgtggccacctggctagtta

SEQ ID NO: 4596787 - DNA, 25 bp, Homo sapien
acctggctagttaagtgcacttccc

SEQ ID NO: 4596788 - DNA, 25 bp, Homo sapien
ggctagttaagtgcacttcccacag

SEQ ID NO: 4596789 - DNA, 25 bp, Homo sapien
gtcccgaaccaagcaggaggtggta

SEQ ID NO: 4596790 - DNA, 25 bp, Homo sapien
tggtaagtagttcggtctaagctgc

SEQ ID NO: 4596791 - DNA, 25 bp, Homo sapien
ttcggtctaagctgcggagagtaca

SEQ ID NO: 4596792 - DNA, 25 bp, Homo sapien
tgaggtggagccgtaactgggcagc

SEQ ID NO: 4596793 - DNA, 25 bp, Homo sapien
gggtaaacggccttcgcaggcatcc

SEQ ID NO: 4596794 - DNA, 25 bp, Homo sapien
gaccattgttgctgaccccagggct

SEQ ID NO: 4596795 - DNA, 25 bp, Homo sapien
tctcctcttggagagctcacattcc

SEQ ID NO: 4596796 - DNA, 25 bp, Homo sapien
atagctatcccacatccggagcgct

SEQ ID NO: 4596797 - DNA, 25 bp, Homo sapien
gcaatgagtccaacccagaagaaga

SEQ ID NO: 4596798 - DNA, 25 bp, Homo sapien
tgatgtcaccgaaggccatgatgag

SEQ ID NO: 4596799 - DNA, 25 bp, Homo sapien
ccagtgatggctattaccgcggcaa

SEQ ID NO: 4596800 - DNA, 25 bp, Homo sapien
caggcagtcgcagaaccaaggaatg

SEQ ID NO: 4596801 - DNA, 25 bp, Homo sapien
agtgagtctgcaatgatcggctggc

SEQ ID NO: 4596802 - DNA, 25 bp, Homo sapien
cagtgcctgttctgtgggacaagca

SEQ ID NO: 4596803 - DNA, 25 bp, Homo sapien
aatgctctggatgtgatcacagtgg

SEQ ID NO: 4596804 - DNA, 25 bp, Homo sapien
gtggagctgtatcccaccaaccaga

SEQ ID NO: 4596805 - DNA, 25 bp, Homo sapien
tatcacggtccggaggacaccttgg

SEQ ID NO: 4596806 - DNA, 25 bp, Homo sapien
caccttggatagcacgggaggagaa

SEQ ID NO: 4596807 - DNA, 25 bp, Homo sapien
ctgattgcccttcgactgccagaga

SEQ ID NO: 4596808 - DNA, 25 bp, Homo sapien
tgccagagactcgagaacaggtcct

SEQ ID NO: 4596809 - DNA, 25 bp, Homo sapien
gcaggcaagaatcaaacaacatggg

SEQ ID NO: 4596810 - DNA, 25 bp, Homo sapien
tgacttgtgaaactcaagctcacca

SEQ ID NO: 4596811 - DNA, 25 bp, Homo sapien
taatttccacaactggtatctgcaa

SEQ ID NO: 4596812 - DNA, 25 bp, Homo sapien
tagttacttctctcccttacacaga

SEQ ID NO: 4596813 - DNA, 25 bp, Homo sapien
aaaaacttgcaggacagttagagcc

SEQ ID NO: 4596814 - DNA, 25 bp, Homo sapien
gaagacatattgactctgactggac

SEQ ID NO: 4596815 - DNA, 25 bp, Homo sapien
tgctctgtcaataatgaaaggctcg

SEQ ID NO: 4596816 - DNA, 25 bp, Homo sapien
gccacctagccaatcaagggcaatt

SEQ ID NO: 4596817 - DNA, 25 bp, Homo sapien
aattggccataaacaccgagtacga

SEQ ID NO: 4596818 - DNA, 25 bp, Homo sapien
aatccttattgagccctgaccatgg

SEQ ID NO: 4596819 - DNA, 25 bp, Homo sapien
gagtacgatgaccttacaatccgca

SEQ ID NO: 4596820 - DNA, 25 bp, Homo sapien
ggcatctgtgctaactgacctggga

SEQ ID NO: 4596821 - DNA, 25 bp, Homo sapien
ttctgcctgatcgttgggcgcacgc

SEQ ID NO: 4596822 - DNA, 25 bp, Homo sapien
tccttctgcccgatcgttgggagca

SEQ ID NO: 4596823 - DNA, 25 bp, Homo sapien
cttctgcctgatcgttgggcgcacg

SEQ ID NO: 4596824 - DNA, 25 bp, Homo sapien
ccttctgcctgatcgttgggagcac

SEQ ID NO: 4596825 - DNA, 25 bp, Homo sapien
catagacaaatatgcttgtggcatc

SEQ ID NO: 4596826 - DNA, 25 bp, Homo sapien
acaaatatgcttgtggcatcctgta

SEQ ID NO: 4596827 - DNA, 25 bp, Homo sapien
tagacaaatatgcttgtggcatcct

SEQ ID NO: 4596828 - DNA, 25 bp, Homo sapien
ttcatagacaaatatgcttgtggca

SEQ ID NO: 4596829 - DNA, 25 bp, Homo sapien
ataaacgtgagttgcctctcctgtc

SEQ ID NO: 4596830 - DNA, 25 bp, Homo sapien
ctgttgttcataaacgtgagttgcc

SEQ ID NO: 4596831 - DNA, 25 bp, Homo sapien
tcataaacgtgagttgcctctcctg

SEQ ID NO: 4596832 - DNA, 25 bp, Homo sapien
tgttcataaacgtgagttgcctctc

SEQ ID NO: 4596833 - DNA, 25 bp, Homo sapien
cctttaatctgcctccaacgctgca

SEQ ID NO: 4596834 - DNA, 25 bp, Homo sapien
taggtctgccttggccctgaagccc

SEQ ID NO: 4596835 - DNA, 25 bp, Homo sapien
acatctcttctaggtctgccttggc

SEQ ID NO: 4596836 - DNA, 25 bp, Homo sapien
tctaggtctgccttggccctgaagc

SEQ ID NO: 4596837 - DNA, 25 bp, Homo sapien
tcttctaggtctgccttggccctga

SEQ ID NO: 4596838 - DNA, 25 bp, Homo sapien
cagtctgagtttcccatcctacggt

SEQ ID NO: 4596839 - DNA, 25 bp, Homo sapien
caagattactctgccagcactctgg

SEQ ID NO: 4596840 - DNA, 25 bp, Homo sapien
cacgtggcgtcaatacagatggagg

SEQ ID NO: 4596841 - DNA, 25 bp, Homo sapien
tctggtcggcctaccttgggacagg

SEQ ID NO: 4596842 - DNA, 25 bp, Homo sapien
agtggttcttgattgtgccttggag

SEQ ID NO: 4596843 - DNA, 25 bp, Homo sapien
tttccctcggcatcctggagtgtct

SEQ ID NO: 4596844 - DNA, 25 bp, Homo sapien
tggctcccccttgactactgcagtg

SEQ ID NO: 4596845 - DNA, 25 bp, Homo sapien
tcatctccactgcaaagagcttgat

SEQ ID NO: 4596846 - DNA, 25 bp, Homo sapien
ttcccttagcttgcttcagagcctc

SEQ ID NO: 4596847 - DNA, 25 bp, Homo sapien
ttcaaaatctattcccttagcttgc

SEQ ID NO: 4596848 - DNA, 25 bp, Homo sapien
ttccagaatgctattcttgctcctg

SEQ ID NO: 4596849 - DNA, 25 bp, Homo sapien
aatctattcccttagcttgcttcag

SEQ ID NO: 4596850 - DNA, 25 bp, Homo sapien
tttcattaattccattccagtaatc

SEQ ID NO: 4596851 - DNA, 25 bp, Homo sapien
agtaatcactccctgaacccttcat

SEQ ID NO: 4596852 - DNA, 25 bp, Homo sapien
ttcattaattccattccagtaatca

SEQ ID NO: 4596853 - DNA, 25 bp, Homo sapien
ttccagtaatcactccctgaaccct

SEQ ID NO: 4596854 - DNA, 25 bp, Homo sapien
ccacccacacctcctgaccagccat

SEQ ID NO: 4596855 - DNA, 25 bp, Homo sapien
tattggctacttttgtgtactggcc

SEQ ID NO: 4596856 - DNA, 25 bp, Homo sapien
ggagctattggctacttttgtgtac

SEQ ID NO: 4596857 - DNA, 25 bp, Homo sapien
tgtgtactggccattacctggcatg

SEQ ID NO: 4596858 - DNA, 25 bp, Homo sapien
cctggcatgccgtgggagaatttgt

SEQ ID NO: 4596859 - DNA, 25 bp, Homo sapien
cttccgatagctccccttccactgg

SEQ ID NO: 4596860 - DNA, 25 bp, Homo sapien
ttggcaggtggttaaaactggcatc

SEQ ID NO: 4596861 - DNA, 25 bp, Homo sapien
gcaggtggttaaaactggcatcaca

SEQ ID NO: 4596862 - DNA, 25 bp, Homo sapien
gcatccaaggcttccgatagctccc

SEQ ID NO: 4596863 - DNA, 25 bp, Homo sapien
tatggcatctgttatcagacctcag

SEQ ID NO: 4596864 - DNA, 25 bp, Homo sapien
ccccgcactttggtttatggcatct

SEQ ID NO: 4596865 - DNA, 25 bp, Homo sapien
gctctcaccccgcactttggtttat

SEQ ID NO: 4596866 - DNA, 25 bp, Homo sapien
gtcatacaagatgctctcaccccgc

SEQ ID NO: 4596867 - DNA, 25 bp, Homo sapien
tggtcacgcagcctccagtgacgtc

SEQ ID NO: 4596868 - DNA, 25 bp, Homo sapien
agactggatggtcacgcagcctcca

SEQ ID NO: 4596869 - DNA, 25 bp, Homo sapien
gatggtcacgcagcctccagtgacg

SEQ ID NO: 4596870 - DNA, 25 bp, Homo sapien
tggatggtcacgcagcctccagtga

SEQ ID NO: 4596871 - DNA, 25 bp, Homo sapien
ggtgctcaagaaaagacttggagct

SEQ ID NO: 4596872 - DNA, 25 bp, Homo sapien
gcatctggcattagcttcccattgg

SEQ ID NO: 4596873 - DNA, 25 bp, Homo sapien
cattcgtattcaagtgtgagttgga

SEQ ID NO: 4596874 - DNA, 25 bp, Homo sapien
gaagtaatggaatctggtgctcaag

SEQ ID NO: 4596875 - DNA, 25 bp, Homo sapien
gcaggagagctgatcataaatcctg

SEQ ID NO: 4596876 - DNA, 25 bp, Homo sapien
tgatggtccaaggattagaactgtt

SEQ ID NO: 4596877 - DNA, 25 bp, Homo sapien
agtgatgttcttgacaaagacactc

SEQ ID NO: 4596878 - DNA, 25 bp, Homo sapien
cagaaacccccagagcatagtgatg

SEQ ID NO: 4596879 - DNA, 25 bp, Homo sapien
cactgcctgttacttctgctcctat

SEQ ID NO: 4596880 - DNA, 25 bp, Homo sapien
cttaatactgcaaattcactgcctg

SEQ ID NO: 4596881 - DNA, 25 bp, Homo sapien
tactgcaaattcactgcctgttact

SEQ ID NO: 4596882 - DNA, 25 bp, Homo sapien
aattcactgcctgttacttctgctc

SEQ ID NO: 4596883 - DNA, 25 bp, Homo sapien
tgctgctctttagccatccttttaa

SEQ ID NO: 4596884 - DNA, 25 bp, Homo sapien
gctctttagccatccttttaagcaa

SEQ ID NO: 4596885 - DNA, 25 bp, Homo sapien
cacatgctgctctttagccatcctt

SEQ ID NO: 4596886 - DNA, 25 bp, Homo sapien
tctttagccatccttttaagcaact

SEQ ID NO: 4596887 - DNA, 25 bp, Homo sapien
gatctttgcagatagaagcacgccg

SEQ ID NO: 4596888 - DNA, 25 bp, Homo sapien
accagcagtgcccattaagaatcct

SEQ ID NO: 4596889 - DNA, 25 bp, Homo sapien
gggtatgcagaaatggtcaaaggat

SEQ ID NO: 4596890 - DNA, 25 bp, Homo sapien
caaaggatccaagtgaatctgggtg

SEQ ID NO: 4596891 - DNA, 25 bp, Homo sapien
gcttggtccaggatttgaaaagggc

SEQ ID NO: 4596892 - DNA, 25 bp, Homo sapien
agaaaaatgtagttgcttggtccag

SEQ ID NO: 4596893 - DNA, 25 bp, Homo sapien
tgtagttgcttggtccaggatttga

SEQ ID NO: 4596894 - DNA, 25 bp, Homo sapien
aaaatgtagttgcttggtccaggat

SEQ ID NO: 4596895 - DNA, 25 bp, Homo sapien
gaaaatcttgcatagaaagcaccca

SEQ ID NO: 4596896 - DNA, 25 bp, Homo sapien
catgatgtggaccaaaagcaggacc

SEQ ID NO: 4596897 - DNA, 25 bp, Homo sapien
tctgggctcccgaattgttataggg

SEQ ID NO: 4596898 - DNA, 25 bp, Homo sapien
cagagtcacacatcatagcacagag

SEQ ID NO: 4596899 - DNA, 25 bp, Homo sapien
catgcttggctaattcttaaatttt

SEQ ID NO: 4596900 - DNA, 25 bp, Homo sapien
tgcttggctaattcttaaattttta

SEQ ID NO: 4596901 - DNA, 25 bp, Homo sapien
tgtcatatattccaggactatgata

SEQ ID NO: 4596902 - DNA, 25 bp, Homo sapien
catatattccaggactatgatattt

SEQ ID NO: 4596903 - DNA, 25 bp, Homo sapien
atattccaggactatgatatttttc

SEQ ID NO: 4596904 - DNA, 25 bp, Homo sapien
agctgtcatatattccaggactatg

SEQ ID NO: 4596905 - DNA, 25 bp, Homo sapien
ggttgttggcaatctccctgaactt

SEQ ID NO: 4596906 - DNA, 25 bp, Homo sapien
gctgcttaagggttaccattcccat

SEQ ID NO: 4596907 - DNA, 25 bp, Homo sapien
aacttctctctatccgacagctgct

SEQ ID NO: 4596908 - DNA, 25 bp, Homo sapien
tggtgagttctatcctgaggccaag

SEQ ID NO: 4596909 - DNA, 25 bp, Homo sapien
caagtcttgattgccaagcatttat

SEQ ID NO: 4596910 - DNA, 25 bp, Homo sapien
aagtcttgattgccaagcatttatt

SEQ ID NO: 4596911 - DNA, 25 bp, Homo sapien
tcaagtcttgattgccaagcattta

SEQ ID NO: 4596912 - DNA, 25 bp, Homo sapien
gaaggcgctcaacgtgtttctcaga

SEQ ID NO: 4596913 - DNA, 25 bp, Homo sapien
ccgtttgtccctggctttggcgata

SEQ ID NO: 4596914 - DNA, 25 bp, Homo sapien
tggaagcatacacctggtgacagct

SEQ ID NO: 4596915 - DNA, 25 bp, Homo sapien
gcgtttcaaagcgaatttctgcctg

SEQ ID NO: 4596916 - DNA, 25 bp, Homo sapien
cagataaagtcgtcattttgttcgc

SEQ ID NO: 4596917 - DNA, 25 bp, Homo sapien
cgctgtggtgtctctaactctcaaa

SEQ ID NO: 4596918 - DNA, 25 bp, Homo sapien
ttattctcctaggataaacagataa

SEQ ID NO: 4596919 - DNA, 25 bp, Homo sapien
atcttctgatggcactgggtaaatc

SEQ ID NO: 4596920 - DNA, 25 bp, Homo sapien
gctaagttcataacgctgctgagac

SEQ ID NO: 4596921 - DNA, 25 bp, Homo sapien
gatgaaatatgttaaccctctggct

SEQ ID NO: 4596922 - DNA, 25 bp, Homo sapien
caatatgtctaaacacagggtgtcc

SEQ ID NO: 4596923 - DNA, 25 bp, Homo sapien
tccccaggatgatggataagaaagc

SEQ ID NO: 4596924 - DNA, 25 bp, Homo sapien
tcaacccctcagaagcagagttttg

SEQ ID NO: 4596925 - DNA, 25 bp, Homo sapien
gcatctctggcattcatgtgcacag

SEQ ID NO: 4596926 - DNA, 25 bp, Homo sapien
tcatcagcggtgtttgggccacaat

SEQ ID NO: 4596927 - DNA, 25 bp, Homo sapien
tgccactggcttctacgcgatgatt

SEQ ID NO: 4596928 - DNA, 25 bp, Homo sapien
gggcaggcctttcgcaagagctgat

SEQ ID NO: 4596929 - DNA, 25 bp, Homo sapien
tccaggtggggcaggcctttcgcaa

SEQ ID NO: 4596930 - DNA, 25 bp, Homo sapien
gcaggcctttcgcaagagctgattg

SEQ ID NO: 4596931 - DNA, 25 bp, Homo sapien
gcctttcgcaagagctgattgtgct

SEQ ID NO: 4596932 - DNA, 25 bp, Homo sapien
caggtgtagtatatggacctcggtc

SEQ ID NO: 4596933 - DNA, 25 bp, Homo sapien
taccttcctcatatagagtcatccc

SEQ ID NO: 4596934 - DNA, 25 bp, Homo sapien
ctcacaatggagaagctgaaatggg

SEQ ID NO: 4596935 - DNA, 25 bp, Homo sapien
atcccagaagtgagggacacattcc

SEQ ID NO: 4596936 - DNA, 25 bp, Homo sapien
atattgtcctttgaattttccccat

SEQ ID NO: 4596937 - DNA, 25 bp, Homo sapien
ggcacactttagtctcccttgccca

SEQ ID NO: 4596938 - DNA, 25 bp, Homo sapien
aattttccccattgctaacttgcat

SEQ ID NO: 4596939 - DNA, 25 bp, Homo sapien
tctccatagaagagtattgttctgc

SEQ ID NO: 4596940 - DNA, 25 bp, Homo sapien
tattgttctgctctgttctctgcag

SEQ ID NO: 4596941 - DNA, 25 bp, Homo sapien
cctctccatagaagagtattgttct

SEQ ID NO: 4596942 - DNA, 25 bp, Homo sapien
gctctgttctctgcagttttccttc

SEQ ID NO: 4596943 - DNA, 25 bp, Homo sapien
caatgacacggagtagaatttgctc

SEQ ID NO: 4596944 - DNA, 25 bp, Homo sapien
tgtaagtgacgctgaagagagacaa

SEQ ID NO: 4596945 - DNA, 25 bp, Homo sapien
taaaggttatgactttcaatgacac

SEQ ID NO: 4596946 - DNA, 25 bp, Homo sapien
ctttcatcattgtaagtgacgctga

SEQ ID NO: 4596947 - DNA, 25 bp, Homo sapien
attattaattgtaggctgccccagg

SEQ ID NO: 4596948 - DNA, 25 bp, Homo sapien
ggcagctgccttactctgagggcaa

SEQ ID NO: 4596949 - DNA, 25 bp, Homo sapien
caggacctgggtggcatatcacagc

SEQ ID NO: 4596950 - DNA, 25 bp, Homo sapien
tccactacgtagagataggcacggt

SEQ ID NO: 4596951 - DNA, 25 bp, Homo sapien
tggctgtcccatcaaagagcagaac

SEQ ID NO: 4596952 - DNA, 25 bp, Homo sapien
tgactagacctgcactgcccagtat

SEQ ID NO: 4596953 - DNA, 25 bp, Homo sapien
tgcaattggaagaaccacgagacct

SEQ ID NO: 4596954 - DNA, 25 bp, Homo sapien
taaaaattgaaacttgagagcccag

SEQ ID NO: 4596955 - DNA, 25 bp, Homo sapien
gagctgcatgtaaaacgccctccct

SEQ ID NO: 4596956 - DNA, 25 bp, Homo sapien
ctccctggtggtcgcgtgaagaatg

SEQ ID NO: 4596957 - DNA, 25 bp, Homo sapien
aaacgccctccctggtggtcgcgtg

SEQ ID NO: 4596958 - DNA, 25 bp, Homo sapien
tcagagctgcatgtaaaacgccctc

SEQ ID NO: 4596959 - DNA, 25 bp, Homo sapien
gagagataagacaggccactatttt

SEQ ID NO: 4596960 - DNA, 25 bp, Homo sapien
gtgatcatcataggaacagttagtt

SEQ ID NO: 4596961 - DNA, 25 bp, Homo sapien
gcattttaggacacaggagtttgta

SEQ ID NO: 4596962 - DNA, 25 bp, Homo sapien
tagttagccctttgtctcactagac

SEQ ID NO: 4596963 - DNA, 25 bp, Homo sapien
ggtttctgcctgctacagcgtccat

SEQ ID NO: 4596964 - DNA, 25 bp, Homo sapien
tgtacttcttgggttgccttcaagg

SEQ ID NO: 4596965 - DNA, 25 bp, Homo sapien
ccatccacgtgatgctctggtaaat

SEQ ID NO: 4596966 - DNA, 25 bp, Homo sapien
gctctggtaaatcttctgtacttct

SEQ ID NO: 4596967 - DNA, 25 bp, Homo sapien
gaggatggagcattgttcctcccca

SEQ ID NO: 4596968 - DNA, 25 bp, Homo sapien
aggatggagcattgttcctccccat

SEQ ID NO: 4596969 - DNA, 25 bp, Homo sapien
gaagaggatggagcattgttcctcc

SEQ ID NO: 4596970 - DNA, 25 bp, Homo sapien
gacccatgggttagccttgtggaga

SEQ ID NO: 4596971 - DNA, 25 bp, Homo sapien
tcttgaatacaattgcttccattgc

SEQ ID NO: 4596972 - DNA, 25 bp, Homo sapien
agggttgaggagatcagctactgac

SEQ ID NO: 4596973 - DNA, 25 bp, Homo sapien
tccattgctaaccagcgtggagggt

SEQ ID NO: 4596974 - DNA, 25 bp, Homo sapien
cctttggccagtccaatcttgaata

SEQ ID NO: 4596975 - DNA, 25 bp, Homo sapien
cggcctctcctgtccagtgggatgc

SEQ ID NO: 4596976 - DNA, 25 bp, Homo sapien
tgtggccggcctctcctgtccagtg

SEQ ID NO: 4596977 - DNA, 25 bp, Homo sapien
ccaggctctgtggccggcctctcct

SEQ ID NO: 4596978 - DNA, 25 bp, Homo sapien
cctctcctgtccagtgggatgcagc

SEQ ID NO: 4596979 - DNA, 25 bp, Homo sapien
tgtagtaggattccgcaaggcaggt

SEQ ID NO: 4596980 - DNA, 25 bp, Homo sapien
gggttgagcataagatcttcagagt

SEQ ID NO: 4596981 - DNA, 25 bp, Homo sapien
tgagcataagatcttcagagtctcc

SEQ ID NO: 4596982 - DNA, 25 bp, Homo sapien
ggatactttcggctgtagtaggatt

SEQ ID NO: 4596983 - DNA, 25 bp, Homo sapien
ttctcccctagagcagtgatggtcg

SEQ ID NO: 4596984 - DNA, 25 bp, Homo sapien
tctcccctagagcagtgatggtcgc

SEQ ID NO: 4596985 - DNA, 25 bp, Homo sapien
tttctcccctagagcagtgatggtc

SEQ ID NO: 4596986 - DNA, 25 bp, Homo sapien
tccaggaacgttcctcaatgaagtc

SEQ ID NO: 4596987 - DNA, 25 bp, Homo sapien
cagataaaccatccaggaacgttcc

SEQ ID NO: 4596988 - DNA, 25 bp, Homo sapien
tatattccagattcttgtcttcagc

SEQ ID NO: 4596989 - DNA, 25 bp, Homo sapien
cagaaactcaatgtagctaggggac

SEQ ID NO: 4596990 - DNA, 25 bp, Homo sapien
ctcctggaaagtcctgggagaccat

SEQ ID NO: 4596991 - DNA, 25 bp, Homo sapien
tgctcctggaaagtcctgggagacc

SEQ ID NO: 4596992 - DNA, 25 bp, Homo sapien
tctgctcctggaaagtcctgggaga

SEQ ID NO: 4596993 - DNA, 25 bp, Homo sapien
gtttaatgactctgctcctggaaag

SEQ ID NO: 4596994 - DNA, 25 bp, Homo sapien
tatggcagtgccttttgctttttgc

SEQ ID NO: 4596995 - DNA, 25 bp, Homo sapien
tatctcacagatgagcttggctgaa

SEQ ID NO: 4596996 - DNA, 25 bp, Homo sapien
gatgagcttggctgaattcaataca

SEQ ID NO: 4596997 - DNA, 25 bp, Homo sapien
aattcaatacagaggaaggtatggc

SEQ ID NO: 4596998 - DNA, 25 bp, Homo sapien
cactcagtttaagcataggacataa

SEQ ID NO: 4596999 - DNA, 25 bp, Homo sapien
cccaaaatggccctcggcaatgtgt

SEQ ID NO: 4597000 - DNA, 25 bp, Homo sapien
tgccatcattgtagcactggaaact

SEQ ID NO: 4597001 - DNA, 25 bp, Homo sapien
gcaaggtcaggctgtagcatcaact

SEQ ID NO: 4597002 - DNA, 25 bp, Homo sapien
ttgggcccacagttgtgtatgccag

SEQ ID NO: 4597003 - DNA, 25 bp, Homo sapien
tgccaggtggtttaatgagaccttg

SEQ ID NO: 4597004 - DNA, 25 bp, Homo sapien
tgctatggtagccattcaccctttc

SEQ ID NO: 4597005 - DNA, 25 bp, Homo sapien
tggtagccattcaccctttcaatct

SEQ ID NO: 4597006 - DNA, 25 bp, Homo sapien
cagacagggggaatagcccatggca

SEQ ID NO: 4597007 - DNA, 25 bp, Homo sapien
tccagggtctgagcattccagacag

SEQ ID NO: 4597008 - DNA, 25 bp, Homo sapien
ccagacagggggaatagcccatggc

SEQ ID NO: 4597009 - DNA, 25 bp, Homo sapien
tccagacagggggaatagcccatgg

SEQ ID NO: 4597010 - DNA, 25 bp, Homo sapien
agagggctgcttctttgtcacttgt

SEQ ID NO: 4597011 - DNA, 25 bp, Homo sapien
ctgcttgttgcattgtttatcttca

SEQ ID NO: 4597012 - DNA, 25 bp, Homo sapien
ctgagacatattctgtgcattgaag

SEQ ID NO: 4597013 - DNA, 25 bp, Homo sapien
tgagacatattctgtgcattgaagc

SEQ ID NO: 4597014 - DNA, 25 bp, Homo sapien
ctcggcccggcgtggaggttggcga

SEQ ID NO: 4597015 - DNA, 25 bp, Homo sapien
gcgagtggtgcagaggcggccgccg

SEQ ID NO: 4597016 - DNA, 25 bp, Homo sapien
cccggcgtggaggttggcgagtggt

SEQ ID NO: 4597017 - DNA, 25 bp, Homo sapien
cggcccggcgtggaggttggcgagt

SEQ ID NO: 4597018 - DNA, 25 bp, Homo sapien
ttcctgggcctagccgaatgctggg

SEQ ID NO: 4597019 - DNA, 25 bp, Homo sapien
ggatgattcgttagcttcaaacaca

SEQ ID NO: 4597020 - DNA, 25 bp, Homo sapien
tcttcacagaaatgcggacagtccc

SEQ ID NO: 4597021 - DNA, 25 bp, Homo sapien
aatcctagacagatatgtgggtgag

SEQ ID NO: 4597022 - DNA, 25 bp, Homo sapien
agagtcattggaggcagcatgtgat

SEQ ID NO: 4597023 - DNA, 25 bp, Homo sapien
cattggaggcagcatgtgattggaa

SEQ ID NO: 4597024 - DNA, 25 bp, Homo sapien
ctggctgcggagagtcattggaggc

SEQ ID NO: 4597025 - DNA, 25 bp, Homo sapien
tcaagtggaaccgttggtgagaggc

SEQ ID NO: 4597026 - DNA, 25 bp, Homo sapien
attctgtgaatcgagtaagttgcca

SEQ ID NO: 4597027 - DNA, 25 bp, Homo sapien
gtcagggcaagcttgccagcttcct

SEQ ID NO: 4597028 - DNA, 25 bp, Homo sapien
ctggaggagcagagaatatgtgcat

SEQ ID NO: 4597029 - DNA, 25 bp, Homo sapien
gcttgcaattctgtgaatcgagtaa

SEQ ID NO: 4597030 - DNA, 25 bp, Homo sapien
ctgcgttcctgatttgaacagccag

SEQ ID NO: 4597031 - DNA, 25 bp, Homo sapien
cgttcctgatttgaacagccagcca

SEQ ID NO: 4597032 - DNA, 25 bp, Homo sapien
tgcgttcctgatttgaacagccagc

SEQ ID NO: 4597033 - DNA, 25 bp, Homo sapien
gttcctgatttgaacagccagccac

SEQ ID NO: 4597034 - DNA, 25 bp, Homo sapien
tcaaaaagtattccacagcgctgag

SEQ ID NO: 4597035 - DNA, 25 bp, Homo sapien
ttcaaaaagtattccacagcgctga

SEQ ID NO: 4597036 - DNA, 25 bp, Homo sapien
cactgcaaggtttgatattcttcag

SEQ ID NO: 4597037 - DNA, 25 bp, Homo sapien
tcagagagtggtatggtggccgaat

SEQ ID NO: 4597038 - DNA, 25 bp, Homo sapien
gtatggtggccgaatgtagaagtcc

SEQ ID NO: 4597039 - DNA, 25 bp, Homo sapien
ccgaatgtagaagtccattcaagtc

SEQ ID NO: 4597040 - DNA, 25 bp, Homo sapien
cgatagtagtgtagcatcctgatag

SEQ ID NO: 4597041 - DNA, 25 bp, Homo sapien
tacatcacagttgctacactcactt

SEQ ID NO: 4597042 - DNA, 25 bp, Homo sapien
gtagcatcctgatagtacatcacag

SEQ ID NO: 4597043 - DNA, 25 bp, Homo sapien
ccaggcaccgtgttacatgcatttc

SEQ ID NO: 4597044 - DNA, 25 bp, Homo sapien
gaggtgattggccacttcgtagtaa

SEQ ID NO: 4597045 - DNA, 25 bp, Homo sapien
tcaatcctgggaacttctgaggcct

SEQ ID NO: 4597046 - DNA, 25 bp, Homo sapien
gaaagatattcgaggtagccacatg

SEQ ID NO: 4597047 - DNA, 25 bp, Homo sapien
caggctggatgcaactacctaggtt

SEQ ID NO: 4597048 - DNA, 25 bp, Homo sapien
tactgaacacggatgttgcacgcgg

SEQ ID NO: 4597049 - DNA, 25 bp, Homo sapien
ggcccagctttggagtagacgcgtt

SEQ ID NO: 4597050 - DNA, 25 bp, Homo sapien
gaagcaggacacaccgaaatgcaga

SEQ ID NO: 4597051 - DNA, 25 bp, Homo sapien
tcaagcttgctgagataggatggtt

SEQ ID NO: 4597052 - DNA, 25 bp, Homo sapien
ttggggtagcccactgaacaggatt

SEQ ID NO: 4597053 - DNA, 25 bp, Homo sapien
tggggtagcccactgaacaggattg

SEQ ID NO: 4597054 - DNA, 25 bp, Homo sapien
atttggggtagcccactgaacagga

SEQ ID NO: 4597055 - DNA, 25 bp, Homo sapien
tttggggtagcccactgaacaggat

SEQ ID NO: 4597056 - DNA, 25 bp, Homo sapien
taaagcttagttagctcttcggagc

SEQ ID NO: 4597057 - DNA, 25 bp, Homo sapien
cataccctgggttctggttatgccc

SEQ ID NO: 4597058 - DNA, 25 bp, Homo sapien
ttatgccctctggatctaccatgaa

SEQ ID NO: 4597059 - DNA, 25 bp, Homo sapien
cactaacctttcatgggtaggcgga

SEQ ID NO: 4597060 - DNA, 25 bp, Homo sapien
tcattcgcagccactcataactcat

SEQ ID NO: 4597061 - DNA, 25 bp, Homo sapien
tagatccagccgtgcttgaagctag

SEQ ID NO: 4597062 - DNA, 25 bp, Homo sapien
gagcaaaagggcttcctagatccag

SEQ ID NO: 4597063 - DNA, 25 bp, Homo sapien
cagtagtctacagtgacaggcccca

SEQ ID NO: 4597064 - DNA, 25 bp, Homo sapien
catgagactctgaagaacccctgac

SEQ ID NO: 4597065 - DNA, 25 bp, Homo sapien
ggccataaccttttcgaattatgtg

SEQ ID NO: 4597066 - DNA, 25 bp, Homo sapien
tcatcgttggctgcttgaagctaaa

SEQ ID NO: 4597067 - DNA, 25 bp, Homo sapien
tctggcttcagaatgtcaggagtca

SEQ ID NO: 4597068 - DNA, 25 bp, Homo sapien
cgaattatgtggagatttacgtgta

SEQ ID NO: 4597069 - DNA, 25 bp, Homo sapien
cctcctggctgtgtttgtaccagtg

SEQ ID NO: 4597070 - DNA, 25 bp, Homo sapien
tgtgtttgtaccagtgtgcctgtga

SEQ ID NO: 4597071 - DNA, 25 bp, Homo sapien
cctgtgagtattgatcagggttcag

SEQ ID NO: 4597072 - DNA, 25 bp, Homo sapien
gctcatgtgagtcgactgtttcctc

SEQ ID NO: 4597073 - DNA, 25 bp, Homo sapien
gcaggtcggcgtccttctgcaaaca

SEQ ID NO: 4597074 - DNA, 25 bp, Homo sapien
aagctcctgtcatcgggtcccgagt

SEQ ID NO: 4597075 - DNA, 25 bp, Homo sapien
tctagccaacggaacctgccattgt

SEQ ID NO: 4597076 - DNA, 25 bp, Homo sapien
ccgaggctctgtggcatatggtgac

SEQ ID NO: 4597077 - DNA, 25 bp, Homo sapien
ccaccaacaggtggcttatatccaa

SEQ ID NO: 4597078 - DNA, 25 bp, Homo sapien
cctttactccaccaacaggtggctt

SEQ ID NO: 4597079 - DNA, 25 bp, Homo sapien
tactccaccaacaggtggcttatat

SEQ ID NO: 4597080 - DNA, 25 bp, Homo sapien
agccagggagccaccctttactcca

SEQ ID NO: 4597081 - DNA, 25 bp, Homo sapien
tttgtcaggcagaccgggtgtgcca

SEQ ID NO: 4597082 - DNA, 25 bp, Homo sapien
actacagggcgtggaagggaactgc

SEQ ID NO: 4597083 - DNA, 25 bp, Homo sapien
actgcgcgaagcctggtatgatgga

SEQ ID NO: 4597084 - DNA, 25 bp, Homo sapien
aggcttaggagagttacccacagga

SEQ ID NO: 4597085 - DNA, 25 bp, Homo sapien
tgagaagtgaatccaggcgcagaag

SEQ ID NO: 4597086 - DNA, 25 bp, Homo sapien
gaagtgaatccaggcgcagaaggaa

SEQ ID NO: 4597087 - DNA, 25 bp, Homo sapien
aggaagtggcccatatatgattttt

SEQ ID NO: 4597088 - DNA, 25 bp, Homo sapien
tttcctgagaagtgaatccaggcgc

SEQ ID NO: 4597089 - DNA, 25 bp, Homo sapien
tgtggttagagcccaatgagtgagg

SEQ ID NO: 4597090 - DNA, 25 bp, Homo sapien
tgacctgcgaagcaccctctgcttc

SEQ ID NO: 4597091 - DNA, 25 bp, Homo sapien
cccaatgagtgaggggggtaaagat

SEQ ID NO: 4597092 - DNA, 25 bp, Homo sapien
gaggggttgacctgcgaagcaccct

SEQ ID NO: 4597093 - DNA, 25 bp, Homo sapien
tgtatatatccctttcataagaata

SEQ ID NO: 4597094 - DNA, 25 bp, Homo sapien
cgtcctctgcctcctattgtatata

SEQ ID NO: 4597095 - DNA, 25 bp, Homo sapien
gcctcctattgtatatatccctttc

SEQ ID NO: 4597096 - DNA, 25 bp, Homo sapien
ccctttcataagaataatagcccat

SEQ ID NO: 4597097 - DNA, 25 bp, Homo sapien
tatccctaggctgaacacatagtag

SEQ ID NO: 4597098 - DNA, 25 bp, Homo sapien
ccatgtatttgtatccctaggctga

SEQ ID NO: 4597099 - DNA, 25 bp, Homo sapien
gaccatgtatttgtatccctaggct

SEQ ID NO: 4597100 - DNA, 25 bp, Homo sapien
tgtggaccatgtatttgtatcccta

SEQ ID NO: 4597101 - DNA, 25 bp, Homo sapien
ggtgtgagttcataatgcctagaca

SEQ ID NO: 4597102 - DNA, 25 bp, Homo sapien
gacaggttctaaaaccatcctggtc

SEQ ID NO: 4597103 - DNA, 25 bp, Homo sapien
ggaatctgtaattaccagctttctt

SEQ ID NO: 4597104 - DNA, 25 bp, Homo sapien
cgtattagcgtgtttggaatctgta

SEQ ID NO: 4597105 - DNA, 25 bp, Homo sapien
taacaaaggcatagtcaggactgcc

SEQ ID NO: 4597106 - DNA, 25 bp, Homo sapien
caatagtggcgtgttgtcttgaagg

SEQ ID NO: 4597107 - DNA, 25 bp, Homo sapien
tcctgattttgcctgaagggcatag

SEQ ID NO: 4597108 - DNA, 25 bp, Homo sapien
gactgccttggcaagtacttgtgtt

SEQ ID NO: 4597109 - DNA, 25 bp, Homo sapien
tgcactgtccgtggttacccttagg

SEQ ID NO: 4597110 - DNA, 25 bp, Homo sapien
ggcactgcactgtccgtggttaccc

SEQ ID NO: 4597111 - DNA, 25 bp, Homo sapien
cagcttctttgtgcgctcacagcag

SEQ ID NO: 4597112 - DNA, 25 bp, Homo sapien
gacgtgtccagcttctttgtgcgct

SEQ ID NO: 4597113 - DNA, 25 bp, Homo sapien
gagtcaacatggaacttgaggtctg

SEQ ID NO: 4597114 - DNA, 25 bp, Homo sapien
caaagttgctggagccgctgatggg

SEQ ID NO: 4597115 - DNA, 25 bp, Homo sapien
cttgaggtctgtgagcgtttgctga

SEQ ID NO: 4597116 - DNA, 25 bp, Homo sapien
cctttctctgtagtcaacacacgag

SEQ ID NO: 4597117 - DNA, 25 bp, Homo sapien
caccagtaggtgacaaggcaggcaa

SEQ ID NO: 4597118 - DNA, 25 bp, Homo sapien
cctggacctaagaaaccaggctgtg

SEQ ID NO: 4597119 - DNA, 25 bp, Homo sapien
tggacctaagaaaccaggctgtgga

SEQ ID NO: 4597120 - DNA, 25 bp, Homo sapien
accagtaggtgacaaggcaggcaag

SEQ ID NO: 4597121 - DNA, 25 bp, Homo sapien
ttgtcggtaacacacttagaggtga

SEQ ID NO: 4597122 - DNA, 25 bp, Homo sapien
gctgtctgaggatgttgtgatacgt

SEQ ID NO: 4597123 - DNA, 25 bp, Homo sapien
cacttagaggtgatatctcctggca

SEQ ID NO: 4597124 - DNA, 25 bp, Homo sapien
catggctcattgagagaagcgaagg

SEQ ID NO: 4597125 - DNA, 25 bp, Homo sapien
tgagcacgctttgatgctgcatggc

SEQ ID NO: 4597126 - DNA, 25 bp, Homo sapien
cagtggcatgtacaacccgttgccc

SEQ ID NO: 4597127 - DNA, 25 bp, Homo sapien
tgcccatggaccctcaaagcagctg

SEQ ID NO: 4597128 - DNA, 25 bp, Homo sapien
gctgcttgctggtgagcacgctttg

SEQ ID NO: 4597129 - DNA, 25 bp, Homo sapien
gttgcttgcaaagggccacaggacc

SEQ ID NO: 4597130 - DNA, 25 bp, Homo sapien
ggaccacttccagggcctgcttgtc

SEQ ID NO: 4597131 - DNA, 25 bp, Homo sapien
caggagtgtgccagttctggagggt

SEQ ID NO: 4597132 - DNA, 25 bp, Homo sapien
tctggagggtggttgcttgcaaagg

SEQ ID NO: 4597133 - DNA, 25 bp, Homo sapien
tcagggggtaaagagcctccctggc

SEQ ID NO: 4597134 - DNA, 25 bp, Homo sapien
accatgctcggcctatatttgccct

SEQ ID NO: 4597135 - DNA, 25 bp, Homo sapien
gctcggcctatatttgccctttcct

SEQ ID NO: 4597136 - DNA, 25 bp, Homo sapien
ttcctcggctactgtccaggtaggg

SEQ ID NO: 4597137 - DNA, 25 bp, Homo sapien
catgtgagcagatacttatggattg

SEQ ID NO: 4597138 - DNA, 25 bp, Homo sapien
aatatggattgcgtgattgaatgat

SEQ ID NO: 4597139 - DNA, 25 bp, Homo sapien
tgtatgtccgtagtaaatatggatt

SEQ ID NO: 4597140 - DNA, 25 bp, Homo sapien
gattgcgtgattgaatgatttagta

SEQ ID NO: 4597141 - DNA, 25 bp, Homo sapien
caaataagaccataatgagaagtcc

SEQ ID NO: 4597142 - DNA, 25 bp, Homo sapien
taatcatttcgtggaagaaccaaag

SEQ ID NO: 4597143 - DNA, 25 bp, Homo sapien
gaaaagagttgcagagtcatggtac

SEQ ID NO: 4597144 - DNA, 25 bp, Homo sapien
ccaactcagggacatgaatatcaca

SEQ ID NO: 4597145 - DNA, 25 bp, Homo sapien
ttccaaggcaggcaacgtctagaca

SEQ ID NO: 4597146 - DNA, 25 bp, Homo sapien
gtccctgataagcagccagggccct

SEQ ID NO: 4597147 - DNA, 25 bp, Homo sapien
ctgctattaccgcaggtgttaattg

SEQ ID NO: 4597148 - DNA, 25 bp, Homo sapien
ggcaacgtctagacacagtccttgg

SEQ ID NO: 4597149 - DNA, 25 bp, Homo sapien
gaggaacaactctaggattgaaata

SEQ ID NO: 4597150 - DNA, 25 bp, Homo sapien
ttgaaataagcaagagccagttctg

SEQ ID NO: 4597151 - DNA, 25 bp, Homo sapien
caactctaggattgaaataagcaag

SEQ ID NO: 4597152 - DNA, 25 bp, Homo sapien
tctaggattgaaataagcaagagcc

SEQ ID NO: 4597153 - DNA, 25 bp, Homo sapien
agaatgtctccagcacggcctgatg

SEQ ID NO: 4597154 - DNA, 25 bp, Homo sapien
ctcaggagcctggttaggtgactca

SEQ ID NO: 4597155 - DNA, 25 bp, Homo sapien
tgccagcccactcagtttctgagct

SEQ ID NO: 4597156 - DNA, 25 bp, Homo sapien
gctgcaaaagccaactcgagaatgt

SEQ ID NO: 4597157 - DNA, 25 bp, Homo sapien
gcagccctctagtgatgtgaacaga

SEQ ID NO: 4597158 - DNA, 25 bp, Homo sapien
tgagtaacggcagtggctagcagcc

SEQ ID NO: 4597159 - DNA, 25 bp, Homo sapien
agcgaatcaccagcacatgagcggg

SEQ ID NO: 4597160 - DNA, 25 bp, Homo sapien
tgttatttggaatggctcagcctgg

SEQ ID NO: 4597161 - DNA, 25 bp, Homo sapien
ttaacgatgactctgtgcaaagcaa

SEQ ID NO: 4597162 - DNA, 25 bp, Homo sapien
gtacttttattgttaacgatgactc

SEQ ID NO: 4597163 - DNA, 25 bp, Homo sapien
aaagcaagcaccaggggcaccgaga

SEQ ID NO: 4597164 - DNA, 25 bp, Homo sapien
cagggctagggacgcccgagggagg

SEQ ID NO: 4597165 - DNA, 25 bp, Homo sapien
agaaggtcaggtttcctgaatatcc

SEQ ID NO: 4597166 - DNA, 25 bp, Homo sapien
tttttccagctcatagtggtggcag

SEQ ID NO: 4597167 - DNA, 25 bp, Homo sapien
gaaggtcaggtttcctgaatatcct

SEQ ID NO: 4597168 - DNA, 25 bp, Homo sapien
ttttccagctcatagtggtggcaga

SEQ ID NO: 4597169 - DNA, 25 bp, Homo sapien
cagtggactcttcttgctttgcggg

SEQ ID NO: 4597170 - DNA, 25 bp, Homo sapien
catcctgggaatccacagtggactc

SEQ ID NO: 4597171 - DNA, 25 bp, Homo sapien
ggactcttcttgctttgcggggagc

SEQ ID NO: 4597172 - DNA, 25 bp, Homo sapien
ggaatccacagtggactcttcttgc

SEQ ID NO: 4597173 - DNA, 25 bp, Homo sapien
gatttctgagcatattgttccagca

SEQ ID NO: 4597174 - DNA, 25 bp, Homo sapien
ttagaaaagagtcaagttgaaggag

SEQ ID NO: 4597175 - DNA, 25 bp, Homo sapien
agtcaagttgaaggagatttctgag

SEQ ID NO: 4597176 - DNA, 25 bp, Homo sapien
ggagatttctgagcatattgttcca

SEQ ID NO: 4597177 - DNA, 25 bp, Homo sapien
tccccttagtggagaagtaacgatg

SEQ ID NO: 4597178 - DNA, 25 bp, Homo sapien
cctccaagagcagggtaacttcctc

SEQ ID NO: 4597179 - DNA, 25 bp, Homo sapien
taacgatgttcacgcttgggcagct

SEQ ID NO: 4597180 - DNA, 25 bp, Homo sapien
ctgcaagtgtggaaatggacacgga

SEQ ID NO: 4597181 - DNA, 25 bp, Homo sapien
gagccccagacctttaggacctgtc

SEQ ID NO: 4597182 - DNA, 25 bp, Homo sapien
aattgcaaccgtgaagtggctttta

SEQ ID NO: 4597183 - DNA, 25 bp, Homo sapien
agagtgtgaatgtccgccagtctcc

SEQ ID NO: 4597184 - DNA, 25 bp, Homo sapien
ctttaggacctgtcctttgcagagg

SEQ ID NO: 4597185 - DNA, 25 bp, Homo sapien
tcatcctgtgctcagagactgaggc

SEQ ID NO: 4597186 - DNA, 25 bp, Homo sapien
tcttaagtcgtcacctgcctaggag

SEQ ID NO: 4597187 - DNA, 25 bp, Homo sapien
tgttgcatcaagtccagcctgtctg

SEQ ID NO: 4597188 - DNA, 25 bp, Homo sapien
aaagtgccacccgatctgtccatcg

SEQ ID NO: 4597189 - DNA, 25 bp, Homo sapien
ctgccggtaagaaggctggaactcg

SEQ ID NO: 4597190 - DNA, 25 bp, Homo sapien
gccacctggactgccggtaagaagg

SEQ ID NO: 4597191 - DNA, 25 bp, Homo sapien
tcattccaagccgaaggtgctgggg

SEQ ID NO: 4597192 - DNA, 25 bp, Homo sapien
aggtgctggggcctgattgccacct

SEQ ID NO: 4597193 - DNA, 25 bp, Homo sapien
aggagcggttgggtgctgcatgcat

SEQ ID NO: 4597194 - DNA, 25 bp, Homo sapien
gatgaagacaggttgcccaagcctg

SEQ ID NO: 4597195 - DNA, 25 bp, Homo sapien
ctgagatggttgaggagcggttggg

SEQ ID NO: 4597196 - DNA, 25 bp, Homo sapien
ctgcatgcatgcgaggccggtgcct

SEQ ID NO: 4597197 - DNA, 25 bp, Homo sapien
accatcctcgcatttggcagcgagc

SEQ ID NO: 4597198 - DNA, 25 bp, Homo sapien
gatgaaatgaaagctgtagtcactt

SEQ ID NO: 4597199 - DNA, 25 bp, Homo sapien
catcctcgcatttggcagcgagcaa

SEQ ID NO: 4597200 - DNA, 25 bp, Homo sapien
aaatgaaagctgtagtcacttccct

SEQ ID NO: 4597201 - DNA, 25 bp, Homo sapien
ttttttgacagacacggcgtgagga

SEQ ID NO: 4597202 - DNA, 25 bp, Homo sapien
tggttggggtaatagcaggcctccc

SEQ ID NO: 4597203 - DNA, 25 bp, Homo sapien
tcttgggcttttcggagatggtcat

SEQ ID NO: 4597204 - DNA, 25 bp, Homo sapien
tgaggaccttcactgattaccacag

SEQ ID NO: 4597205 - DNA, 25 bp, Homo sapien
ttcagccacaccagtgaggcaggca

SEQ ID NO: 4597206 - DNA, 25 bp, Homo sapien
cttcagccacaccagtgaggcaggc

SEQ ID NO: 4597207 - DNA, 25 bp, Homo sapien
ccctggcatgagaaagcgtctggct

SEQ ID NO: 4597208 - DNA, 25 bp, Homo sapien
tgtaggcaggtcatagcctgacctc

SEQ ID NO: 4597209 - DNA, 25 bp, Homo sapien
ctcggcgcacctccgcgggcagctg

SEQ ID NO: 4597210 - DNA, 25 bp, Homo sapien
gtgcttcttgctgtaggcaggtcat

SEQ ID NO: 4597211 - DNA, 25 bp, Homo sapien
aggtcatagcctgacctcggcgcac

SEQ ID NO: 4597212 - DNA, 25 bp, Homo sapien
tttctgtaccaaaatctacgtggat

SEQ ID NO: 4597213 - DNA, 25 bp, Homo sapien
tggtatttggaccagcctgcgggtt

SEQ ID NO: 4597214 - DNA, 25 bp, Homo sapien
gatgcggtcttcattgacacaagta

SEQ ID NO: 4597215 - DNA, 25 bp, Homo sapien
caggaatcctgttcacgatgctggt

SEQ ID NO: 4597216 - DNA, 25 bp, Homo sapien
gacgctgactagtggtgactaccaa

SEQ ID NO: 4597217 - DNA, 25 bp, Homo sapien
tcaatagtgttcacacggagccctc

SEQ ID NO: 4597218 - DNA, 25 bp, Homo sapien
gaagcgaggttgaaagctgatgccc

SEQ ID NO: 4597219 - DNA, 25 bp, Homo sapien
aatgacctaggcttgtaactccacg

SEQ ID NO: 4597220 - DNA, 25 bp, Homo sapien
ggtgggttcccagtgccccagtgat

SEQ ID NO: 4597221 - DNA, 25 bp, Homo sapien
gcttcatccacaagttcctgcccag

SEQ ID NO: 4597222 - DNA, 25 bp, Homo sapien
agtgatggaaccctattaacacctg

SEQ ID NO: 4597223 - DNA, 25 bp, Homo sapien
ggaaccctattaacacctgcttcat

SEQ ID NO: 4597224 - DNA, 25 bp, Homo sapien
gcaccaacatgtaccacagtgcaaa

SEQ ID NO: 4597225 - DNA, 25 bp, Homo sapien
ccaacatgtaccacagtgcaaattc

SEQ ID NO: 4597226 - DNA, 25 bp, Homo sapien
atgtgcaccaacatgtaccacagtg

SEQ ID NO: 4597227 - DNA, 25 bp, Homo sapien
acagtgcaaattccaggttgtctct

SEQ ID NO: 4597228 - DNA, 25 bp, Homo sapien
tgggccacagagtctactttgaagg

SEQ ID NO: 4597229 - DNA, 25 bp, Homo sapien
gaatgacatcgtgcggcagggtcct

SEQ ID NO: 4597230 - DNA, 25 bp, Homo sapien
gaactctgtattagtaatccaaggg

SEQ ID NO: 4597231 - DNA, 25 bp, Homo sapien
caaattcagggaacagtggtggcca

SEQ ID NO: 4597232 - DNA, 25 bp, Homo sapien
tagattattgcttggcccttcaaac

SEQ ID NO: 4597233 - DNA, 25 bp, Homo sapien
gatccagcccctcgattatctgttt

SEQ ID NO: 4597234 - DNA, 25 bp, Homo sapien
tcatatagtaccgaacagaaaactc

SEQ ID NO: 4597235 - DNA, 25 bp, Homo sapien
tgtacatacaacactagatccagcc

SEQ ID NO: 4597236 - DNA, 25 bp, Homo sapien
gatgtggccatatccagggaaaagc

SEQ ID NO: 4597237 - DNA, 25 bp, Homo sapien
acaggatgtggccatatccagggaa

SEQ ID NO: 4597238 - DNA, 25 bp, Homo sapien
cagctcagaaactgggggcagactt

SEQ ID NO: 4597239 - DNA, 25 bp, Homo sapien
tggccatatccagggaaaagccagc

SEQ ID NO: 4597240 - DNA, 25 bp, Homo sapien
gtgtagccaacggtcttctggagga

SEQ ID NO: 4597241 - DNA, 25 bp, Homo sapien
gcaggaagaattttgatagatggga

SEQ ID NO: 4597242 - DNA, 25 bp, Homo sapien
gaagggcttcaagcggaagacagca

SEQ ID NO: 4597243 - DNA, 25 bp, Homo sapien
ttagtaattgtgtagccaacggtct

SEQ ID NO: 4597244 - DNA, 25 bp, Homo sapien
tattgatgccaaccgtgtccgatgg

SEQ ID NO: 4597245 - DNA, 25 bp, Homo sapien
aaccgtgtccgatggaatcctcctc

SEQ ID NO: 4597246 - DNA, 25 bp, Homo sapien
cagacaagcagcgagttattgatgc

SEQ ID NO: 4597247 - DNA, 25 bp, Homo sapien
caagcagcgagttattgatgccaac

SEQ ID NO: 4597248 - DNA, 25 bp, Homo sapien
ttctttagcttggtgttgcaattgc

SEQ ID NO: 4597249 - DNA, 25 bp, Homo sapien
caggactggatgtagtggatgtaca

SEQ ID NO: 4597250 - DNA, 25 bp, Homo sapien
atgcttgtgaccaccggctctgcac

SEQ ID NO: 4597251 - DNA, 25 bp, Homo sapien
aagataaatgcttgtgaccaccggc

SEQ ID NO: 4597252 - DNA, 25 bp, Homo sapien
tggctgaagataaatgcttgtgacc

SEQ ID NO: 4597253 - DNA, 25 bp, Homo sapien
actgagaaaatcagtacagccactg

SEQ ID NO: 4597254 - DNA, 25 bp, Homo sapien
acagccactggctacaggtatgcaa

SEQ ID NO: 4597255 - DNA, 25 bp, Homo sapien
tgttgggcctgtacaaaactcagat

SEQ ID NO: 4597256 - DNA, 25 bp, Homo sapien
taccatagtggccatttatttagct

SEQ ID NO: 4597257 - DNA, 25 bp, Homo sapien
taaaatccactaggagtggccttca

SEQ ID NO: 4597258 - DNA, 25 bp, Homo sapien
ttgggcagactttgggtagtacagt

SEQ ID NO: 4597259 - DNA, 25 bp, Homo sapien
gggaaatcctcatttgggcagactt

SEQ ID NO: 4597260 - DNA, 25 bp, Homo sapien
gccttcaaagagtggtgaagggaaa

SEQ ID NO: 4597261 - DNA, 25 bp, Homo sapien
gggaactgccaagcggatattaaag

SEQ ID NO: 4597262 - DNA, 25 bp, Homo sapien
gcaggactaatagccctcactcagg

SEQ ID NO: 4597263 - DNA, 25 bp, Homo sapien
tattggtggtacagaaccctaaaga

SEQ ID NO: 4597264 - DNA, 25 bp, Homo sapien
ctcactcaggcgctaaaattaggag

SEQ ID NO: 4597265 - DNA, 25 bp, Homo sapien
agataggaagatcgcgcgagcccat

SEQ ID NO: 4597266 - DNA, 25 bp, Homo sapien
aagatcgcgcgagcccataggttga

SEQ ID NO: 4597267 - DNA, 25 bp, Homo sapien
taggaagatcgcgcgagcccatagg

SEQ ID NO: 4597268 - DNA, 25 bp, Homo sapien
ggaagatcgcgcgagcccataggtt

SEQ ID NO: 4597269 - DNA, 25 bp, Homo sapien
tggagagtgagtgcgtcaagggagc

SEQ ID NO: 4597270 - DNA, 25 bp, Homo sapien
tctcccactagaaggagcaccttgg

SEQ ID NO: 4597271 - DNA, 25 bp, Homo sapien
tgagtgcgtcaagggagctgaagaa

SEQ ID NO: 4597272 - DNA, 25 bp, Homo sapien
ccactagaaggagcaccttggagag

SEQ ID NO: 4597273 - DNA, 25 bp, Homo sapien
agcagaggcttcctaaaggtctctg

SEQ ID NO: 4597274 - DNA, 25 bp, Homo sapien
gggtgagcatagatgaatgtgcccc

SEQ ID NO: 4597275 - DNA, 25 bp, Homo sapien
cttcctaaaggtctctgtgcccatg

SEQ ID NO: 4597276 - DNA, 25 bp, Homo sapien
gaggcttcctaaaggtctctgtgcc

SEQ ID NO: 4597277 - DNA, 25 bp, Homo sapien
cttgcaactcaaagatattttcaac

SEQ ID NO: 4597278 - DNA, 25 bp, Homo sapien
ctcaaagatattttcaactcccagg

SEQ ID NO: 4597279 - DNA, 25 bp, Homo sapien
gcaactcaaagatattttcaactcc

SEQ ID NO: 4597280 - DNA, 25 bp, Homo sapien
aagatattttcaactcccaggtggg

SEQ ID NO: 4597281 - DNA, 25 bp, Homo sapien
aaaagggcatgggaggaaccacata

SEQ ID NO: 4597282 - DNA, 25 bp, Homo sapien
tcccttaggtgtggacagcagtttt

SEQ ID NO: 4597283 - DNA, 25 bp, Homo sapien
ttctcaatatcatcctggaacacag

SEQ ID NO: 4597284 - DNA, 25 bp, Homo sapien
ggaacacagatctttcgttcagaat

SEQ ID NO: 4597285 - DNA, 25 bp, Homo sapien
agtgaccctcctgccacttgtaaag

SEQ ID NO: 4597286 - DNA, 25 bp, Homo sapien
agacgagaggccacatttgcagaag

SEQ ID NO: 4597287 - DNA, 25 bp, Homo sapien
taaaagacgagaggccacatttgca

SEQ ID NO: 4597288 - DNA, 25 bp, Homo sapien
aagacgagaggccacatttgcagaa

SEQ ID NO: 4597289 - DNA, 25 bp, Homo sapien
gcttgttgtcccaaggccactacca

SEQ ID NO: 4597290 - DNA, 25 bp, Homo sapien
ccaccaactcggaggcaggcttgtt

SEQ ID NO: 4597291 - DNA, 25 bp, Homo sapien
catcacacgctggtggcttcggaca

SEQ ID NO: 4597292 - DNA, 25 bp, Homo sapien
ttttctctagacatggcccaccaac

SEQ ID NO: 4597293 - DNA, 25 bp, Homo sapien
ctcgcaagttccagtgatgttcaca

SEQ ID NO: 4597294 - DNA, 25 bp, Homo sapien
cagtgatgttcacaagtgccacatt

SEQ ID NO: 4597295 - DNA, 25 bp, Homo sapien
gttccagtgatgttcacaagtgcca

SEQ ID NO: 4597296 - DNA, 25 bp, Homo sapien
gatgttcacaagtgccacatttaac

SEQ ID NO: 4597297 - DNA, 25 bp, Homo sapien
aatccaacccagtgcagggcccctg

SEQ ID NO: 4597298 - DNA, 25 bp, Homo sapien
caatccaacccagtgcagggcccct

SEQ ID NO: 4597299 - DNA, 25 bp, Homo sapien
tcaggtgctagaggggtgaggaggg

SEQ ID NO: 4597300 - DNA, 25 bp, Homo sapien
cctggccagcctgctcaggtgctag

SEQ ID NO: 4597301 - DNA, 25 bp, Homo sapien
ttacaagctggcagtcttggtcagg

SEQ ID NO: 4597302 - DNA, 25 bp, Homo sapien
aagctggcagtcttggtcagggagc

SEQ ID NO: 4597303 - DNA, 25 bp, Homo sapien
ggcagtcttggtcagggagcagatg

SEQ ID NO: 4597304 - DNA, 25 bp, Homo sapien
ctggcagtcttggtcagggagcaga

SEQ ID NO: 4597305 - DNA, 25 bp, Homo sapien
gcttgccggagctattttcccacag

SEQ ID NO: 4597306 - DNA, 25 bp, Homo sapien
gaagtgtggagtcccccccatgtgc

SEQ ID NO: 4597307 - DNA, 25 bp, Homo sapien
gcctccacttaggaggtcctcgctt

SEQ ID NO: 4597308 - DNA, 25 bp, Homo sapien
gaggtcctcgcttgccggagctatt

SEQ ID NO: 4597309 - DNA, 25 bp, Homo sapien
tgaaaactggaagtggcagatggag

SEQ ID NO: 4597310 - DNA, 25 bp, Homo sapien
ctggaagtggcagatggagaaatgg

SEQ ID NO: 4597311 - DNA, 25 bp, Homo sapien
actggaagtggcagatggagaaatg

SEQ ID NO: 4597312 - DNA, 25 bp, Homo sapien
agctggcgctgaaggagaggtgaaa

SEQ ID NO: 4597313 - DNA, 25 bp, Homo sapien
tcatagctggcgctgaaggagaggt

SEQ ID NO: 4597314 - DNA, 25 bp, Homo sapien
aatcatagctggcgctgaaggagag

SEQ ID NO: 4597315 - DNA, 25 bp, Homo sapien
tagctggcgctgaaggagaggtgaa

SEQ ID NO: 4597316 - DNA, 25 bp, Homo sapien
agcctctcatcactccccaccttcg

SEQ ID NO: 4597317 - DNA, 25 bp, Homo sapien
gcagcctctcatcactccccacctt

SEQ ID NO: 4597318 - DNA, 25 bp, Homo sapien
gcctctcatcactccccaccttcgt

SEQ ID NO: 4597319 - DNA, 25 bp, Homo sapien
cagcagcctctcatcactccccacc

SEQ ID NO: 4597320 - DNA, 25 bp, Homo sapien
ctccttttgagaacctgggagtaat

SEQ ID NO: 4597321 - DNA, 25 bp, Homo sapien
cctggagaactgactataggaatcc

SEQ ID NO: 4597322 - DNA, 25 bp, Homo sapien
tccctggagaactgactataggaat

SEQ ID NO: 4597323 - DNA, 25 bp, Homo sapien
aacctgggagtaatgggagatgcat

SEQ ID NO: 4597324 - DNA, 25 bp, Homo sapien
gggctctgaggtctcgtgcacagaa

SEQ ID NO: 4597325 - DNA, 25 bp, Homo sapien
gaggtctcgtgcacagaagccaaag

SEQ ID NO: 4597326 - DNA, 25 bp, Homo sapien
ttaagtaagtattcctaacaggcga

SEQ ID NO: 4597327 - DNA, 25 bp, Homo sapien
ggcgaatccgcagttctatatgggc

SEQ ID NO: 4597328 - DNA, 25 bp, Homo sapien
cctgtgctgagtgctggcgactgaa

SEQ ID NO: 4597329 - DNA, 25 bp, Homo sapien
cgtcaggacggtttcctggtacctg

SEQ ID NO: 4597330 - DNA, 25 bp, Homo sapien
caggtgcttacaagccctgtgctga

SEQ ID NO: 4597331 - DNA, 25 bp, Homo sapien
gctgtgtgtgagcaaagtgcatccg

SEQ ID NO: 4597332 - DNA, 25 bp, Homo sapien
ctcaggtggacgagctcaaatctgg

SEQ ID NO: 4597333 - DNA, 25 bp, Homo sapien
caggtggacgagctcaaatctggag

SEQ ID NO: 4597334 - DNA, 25 bp, Homo sapien
ggtggacgagctcaaatctggaggc

SEQ ID NO: 4597335 - DNA, 25 bp, Homo sapien
tcaggtggacgagctcaaatctgga

SEQ ID NO: 4597336 - DNA, 25 bp, Homo sapien
ccaaggggacttgtcaaactccaca

SEQ ID NO: 4597337 - DNA, 25 bp, Homo sapien
aggggacttgtcaaactccacaggc

SEQ ID NO: 4597338 - DNA, 25 bp, Homo sapien
ttccaaggggacttgtcaaactcca

SEQ ID NO: 4597339 - DNA, 25 bp, Homo sapien
caaggacagcttttccaaggggact

SEQ ID NO: 4597340 - DNA, 25 bp, Homo sapien
tccaccaaaatatcgagtgccgagg

SEQ ID NO: 4597341 - DNA, 25 bp, Homo sapien
tggcatggaaaagtgcatggatttg

SEQ ID NO: 4597342 - DNA, 25 bp, Homo sapien
tttgtagtatcccaaatcagcgaga

SEQ ID NO: 4597343 - DNA, 25 bp, Homo sapien
gagaacccctgagtttgagtaagaa

SEQ ID NO: 4597344 - DNA, 25 bp, Homo sapien
caatgaagggatgactggcccgtca

SEQ ID NO: 4597345 - DNA, 25 bp, Homo sapien
ctgctggacaaagtcaatgaaggga

SEQ ID NO: 4597346 - DNA, 25 bp, Homo sapien
aatgagactgtaatggtggagctgc

SEQ ID NO: 4597347 - DNA, 25 bp, Homo sapien
cagaatcatgaatgcttaacagaag

SEQ ID NO: 4597348 - DNA, 25 bp, Homo sapien
gtaattgttgatgactctgcctggg

SEQ ID NO: 4597349 - DNA, 25 bp, Homo sapien
tgcaatgtgaccatatccctggtgc

SEQ ID NO: 4597350 - DNA, 25 bp, Homo sapien
ctgagctagtgggtggaatttttcc

SEQ ID NO: 4597351 - DNA, 25 bp, Homo sapien
gtacaggccagctttgaatttccca

SEQ ID NO: 4597352 - DNA, 25 bp, Homo sapien
tcaggctacatagccctgggcccat

SEQ ID NO: 4597353 - DNA, 25 bp, Homo sapien
ggctgctgcggctgcctttcgaatt

SEQ ID NO: 4597354 - DNA, 25 bp, Homo sapien
gaagctgagcatccttctttgcaca

SEQ ID NO: 4597355 - DNA, 25 bp, Homo sapien
tctttgcacataccgggccacttgg

SEQ ID NO: 4597356 - DNA, 25 bp, Homo sapien
cttcactgttgaagcaagcaggcat

SEQ ID NO: 4597357 - DNA, 25 bp, Homo sapien
tcttcactgttgaagcaagcaggca

SEQ ID NO: 4597358 - DNA, 25 bp, Homo sapien
ttcttcactgttgaagcaagcaggc

SEQ ID NO: 4597359 - DNA, 25 bp, Homo sapien
cttcttcactgttgaagcaagcagg

SEQ ID NO: 4597360 - DNA, 25 bp, Homo sapien
ggtgtttggactgagtatttgacag

SEQ ID NO: 4597361 - DNA, 25 bp, Homo sapien
ccactaagcatttcgacttctttaa

SEQ ID NO: 4597362 - DNA, 25 bp, Homo sapien
tgttaagttattttgagccattccc

SEQ ID NO: 4597363 - DNA, 25 bp, Homo sapien
tatttgacagtctccttgaaggaac

SEQ ID NO: 4597364 - DNA, 25 bp, Homo sapien
tatgtgaagtcgaggataccctgct

SEQ ID NO: 4597365 - DNA, 25 bp, Homo sapien
tgtgggcaagttccagggtgcataa

SEQ ID NO: 4597366 - DNA, 25 bp, Homo sapien
gggtgcataagtaaagagctatgtg

SEQ ID NO: 4597367 - DNA, 25 bp, Homo sapien
aggtgccaatgtgggcaagttccag

SEQ ID NO: 4597368 - DNA, 25 bp, Homo sapien
tgatgtcagctgtcaacttagacat

SEQ ID NO: 4597369 - DNA, 25 bp, Homo sapien
ttgatgtcagctgtcaacttagaca

SEQ ID NO: 4597370 - DNA, 25 bp, Homo sapien
ggaaatacgtcccatgctttgtgca

SEQ ID NO: 4597371 - DNA, 25 bp, Homo sapien
gactccaggaaatacgtcccatgct

SEQ ID NO: 4597372 - DNA, 25 bp, Homo sapien
gctttgtgcagtatttgcggtcatc

SEQ ID NO: 4597373 - DNA, 25 bp, Homo sapien
tgaaagcaggggtgcctcttggagc

SEQ ID NO: 4597374 - DNA, 25 bp, Homo sapien
cttagtggggaaacaagatgtggag

SEQ ID NO: 4597375 - DNA, 25 bp, Homo sapien
tcactggacaaagagagtctcgtac

SEQ ID NO: 4597376 - DNA, 25 bp, Homo sapien
tctgtgatgcacctgtgtccagaaa

SEQ ID NO: 4597377 - DNA, 25 bp, Homo sapien
agcacatggtacatcctcataaaaa

SEQ ID NO: 4597378 - DNA, 25 bp, Homo sapien
cagtctgtgatgcacctgtgtccag

SEQ ID NO: 4597379 - DNA, 25 bp, Homo sapien
aacagtctgtgatgcacctgtgtcc

SEQ ID NO: 4597380 - DNA, 25 bp, Homo sapien
acttctggcaaatctgtcacagata

SEQ ID NO: 4597381 - DNA, 25 bp, Homo sapien
taacttctggcaaatctgtcacaga

SEQ ID NO: 4597382 - DNA, 25 bp, Homo sapien
tctggcaaatctgtcacagataaac

SEQ ID NO: 4597383 - DNA, 25 bp, Homo sapien
cctaacttctggcaaatctgtcaca

SEQ ID NO: 4597384 - DNA, 25 bp, Homo sapien
tgttcccacccccaatgtcttgatg

SEQ ID NO: 4597385 - DNA, 25 bp, Homo sapien
ccacccccaatgtcttgatgggata

SEQ ID NO: 4597386 - DNA, 25 bp, Homo sapien
ggcccccagatttcaggtgcaagtc

SEQ ID NO: 4597387 - DNA, 25 bp, Homo sapien
ttgatgggatatgttgaggccccca

SEQ ID NO: 4597388 - DNA, 25 bp, Homo sapien
caaccatattgggagcatctcagct

SEQ ID NO: 4597389 - DNA, 25 bp, Homo sapien
caaataataccagactactagaggg

SEQ ID NO: 4597390 - DNA, 25 bp, Homo sapien
catctgctttaggtggaggcttcaa

SEQ ID NO: 4597391 - DNA, 25 bp, Homo sapien
gggtcttcatgctagctgctttcca

SEQ ID NO: 4597392 - DNA, 25 bp, Homo sapien
catttctgctaggttctcttattcc

SEQ ID NO: 4597393 - DNA, 25 bp, Homo sapien
tgctaggttctcttattccattctg

SEQ ID NO: 4597394 - DNA, 25 bp, Homo sapien
tccattctgtacatgtcagaagccg

SEQ ID NO: 4597395 - DNA, 25 bp, Homo sapien
gtacatgtcagaagccgtcaggagc

SEQ ID NO: 4597396 - DNA, 25 bp, Homo sapien
gccttgacagtgcagttcttgccag

SEQ ID NO: 4597397 - DNA, 25 bp, Homo sapien
tgacagtgcagttcttgccaggtcc

SEQ ID NO: 4597398 - DNA, 25 bp, Homo sapien
gggtggcaggcgcactgcctccttg

SEQ ID NO: 4597399 - DNA, 25 bp, Homo sapien
gctgtgcttctgaactgactcttcc

SEQ ID NO: 4597400 - DNA, 25 bp, Homo sapien
cagccgggtaagactcacactttgg

SEQ ID NO: 4597401 - DNA, 25 bp, Homo sapien
gaaagtctcgtgcagtaggttccct

SEQ ID NO: 4597402 - DNA, 25 bp, Homo sapien
tcagtcagttgtaaaccagccgggt

SEQ ID NO: 4597403 - DNA, 25 bp, Homo sapien
gcccaggcagcaaatgtcagtcagt

SEQ ID NO: 4597404 - DNA, 25 bp, Homo sapien
tagaggacacctacttccagataga

SEQ ID NO: 4597405 - DNA, 25 bp, Homo sapien
catcggaggagctagcaaaagacac

SEQ ID NO: 4597406 - DNA, 25 bp, Homo sapien
tgttaaagctgataaggccattggc

SEQ ID NO: 4597407 - DNA, 25 bp, Homo sapien
tggtcaatcactgtcacatcggagg

SEQ ID NO: 4597408 - DNA, 25 bp, Homo sapien
ttagcgctatccagttctcccaagt

SEQ ID NO: 4597409 - DNA, 25 bp, Homo sapien
gacatttgctgaccaattgctgttt

SEQ ID NO: 4597410 - DNA, 25 bp, Homo sapien
tgttttctcattgtaccttagcgct

SEQ ID NO: 4597411 - DNA, 25 bp, Homo sapien
acgccccagaagaccgctgacattt

SEQ ID NO: 4597412 - DNA, 25 bp, Homo sapien
tggcccctagacttgtcctcgaagc

SEQ ID NO: 4597413 - DNA, 25 bp, Homo sapien
gacttgtcctcgaagcctgtcttgg

SEQ ID NO: 4597414 - DNA, 25 bp, Homo sapien
ccctagacttgtcctcgaagcctgt

SEQ ID NO: 4597415 - DNA, 25 bp, Homo sapien
tagacttgtcctcgaagcctgtctt

SEQ ID NO: 4597416 - DNA, 25 bp, Homo sapien
tttctgtaagtatcagcaggaagcc

SEQ ID NO: 4597417 - DNA, 25 bp, Homo sapien
tgggccctgaactgacttgtccttg

SEQ ID NO: 4597418 - DNA, 25 bp, Homo sapien
tcacttccttgtgcttcaagctgtc

SEQ ID NO: 4597419 - DNA, 25 bp, Homo sapien
ccctgaactgacttgtccttgggaa

SEQ ID NO: 4597420 - DNA, 25 bp, Homo sapien
tgcaaccatagtcgtctcagatcta

SEQ ID NO: 4597421 - DNA, 25 bp, Homo sapien
aaccatagtcgtctcagatctaaaa

SEQ ID NO: 4597422 - DNA, 25 bp, Homo sapien
ccctgcaaccatagtcgtctcagat

SEQ ID NO: 4597423 - DNA, 25 bp, Homo sapien
ttcaccccaattcaatttgtcctgc

SEQ ID NO: 4597424 - DNA, 25 bp, Homo sapien
tgaatggaacttggagatctggcaa

SEQ ID NO: 4597425 - DNA, 25 bp, Homo sapien
tgctgcagcaaacccatagaattat

SEQ ID NO: 4597426 - DNA, 25 bp, Homo sapien
cacctccctgaaatgcgcgtgtgca

SEQ ID NO: 4597427 - DNA, 25 bp, Homo sapien
taacacgctgcgcaaaggaaggctt

SEQ ID NO: 4597428 - DNA, 25 bp, Homo sapien
gatgggattcatgcaccctcatatg

SEQ ID NO: 4597429 - DNA, 25 bp, Homo sapien
cagtgggagacccttccacaggatc

SEQ ID NO: 4597430 - DNA, 25 bp, Homo sapien
cgccaaagcttcaacatgaccaggg

SEQ ID NO: 4597431 - DNA, 25 bp, Homo sapien
gagccccagcgaggaaatttctcac

SEQ ID NO: 4597432 - DNA, 25 bp, Homo sapien
tcacatgtaatagacagatccacag

SEQ ID NO: 4597433 - DNA, 25 bp, Homo sapien
tcaccaagatttataggacagctcc

SEQ ID NO: 4597434 - DNA, 25 bp, Homo sapien
aacatgacatcagctttaaaaacta

SEQ ID NO: 4597435 - DNA, 25 bp, Homo sapien
aaaaagaagggcagcaaattcacca

SEQ ID NO: 4597436 - DNA, 25 bp, Homo sapien
cagacttccccggaagaggctattt

SEQ ID NO: 4597437 - DNA, 25 bp, Homo sapien
tttcagttgtaaaagaagacatttg

SEQ ID NO: 4597438 - DNA, 25 bp, Homo sapien
ttctagacagggaggtcagacttcc

SEQ ID NO: 4597439 - DNA, 25 bp, Homo sapien
gacatttgggaaagattccatttgc

SEQ ID NO: 4597440 - DNA, 25 bp, Homo sapien
ccaggtagggccttcctgggccact

SEQ ID NO: 4597441 - DNA, 25 bp, Homo sapien
tgacctatcaggaagagggtcccac

SEQ ID NO: 4597442 - DNA, 25 bp, Homo sapien
gccactgtggatctgacctatcagg

SEQ ID NO: 4597443 - DNA, 25 bp, Homo sapien
ctatcaggaagagggtcccacagtc

SEQ ID NO: 4597444 - DNA, 25 bp, Homo sapien
aggttgagggggcaaaatctcatag

SEQ ID NO: 4597445 - DNA, 25 bp, Homo sapien
tctcaggttgagggggcaaaatctc

SEQ ID NO: 4597446 - DNA, 25 bp, Homo sapien
aaatctcatagcccaccgggatggg

SEQ ID NO: 4597447 - DNA, 25 bp, Homo sapien
tcaggttgagggggcaaaatctcat

SEQ ID NO: 4597448 - DNA, 25 bp, Homo sapien
agaaggctagtgatagaagctaaag

SEQ ID NO: 4597449 - DNA, 25 bp, Homo sapien
aaagaaactccatggaccttgggct

SEQ ID NO: 4597450 - DNA, 25 bp, Homo sapien
aaggctagtgatagaagctaaagaa

SEQ ID NO: 4597451 - DNA, 25 bp, Homo sapien
aggtgtaaacttggcagagggatct

SEQ ID NO: 4597452 - DNA, 25 bp, Homo sapien
cctcctccgctcacaccctagggca

SEQ ID NO: 4597453 - DNA, 25 bp, Homo sapien
tcctccgctcacaccctagggcaca

SEQ ID NO: 4597454 - DNA, 25 bp, Homo sapien
tccgctcacaccctagggcacagcc

SEQ ID NO: 4597455 - DNA, 25 bp, Homo sapien
cgtggcagatgaatgtagatgccgg

SEQ ID NO: 4597456 - DNA, 25 bp, Homo sapien
tcctccagcgatcctgggagcccct

SEQ ID NO: 4597457 - DNA, 25 bp, Homo sapien
tttcctccagcgatcctgggagccc

SEQ ID NO: 4597458 - DNA, 25 bp, Homo sapien
ccctttcctccagcgatcctgggag

SEQ ID NO: 4597459 - DNA, 25 bp, Homo sapien
atctgcagggatggacttccctttc

SEQ ID NO: 4597460 - DNA, 25 bp, Homo sapien
agtgacatcctcacgtgggccttcc

SEQ ID NO: 4597461 - DNA, 25 bp, Homo sapien
cctggccttgggtatctggaattgt

SEQ ID NO: 4597462 - DNA, 25 bp, Homo sapien
tcctgtcaaactaggtggcccttcc

SEQ ID NO: 4597463 - DNA, 25 bp, Homo sapien
cagggcatgtgtgtctggtcactgt

SEQ ID NO: 4597464 - DNA, 25 bp, Homo sapien
actgtgctgtgaacctgcggcttat

SEQ ID NO: 4597465 - DNA, 25 bp, Homo sapien
gactgtgtatacctgatatgcccca

SEQ ID NO: 4597466 - DNA, 25 bp, Homo sapien
caaatccgttctctggtcctgcgtg

SEQ ID NO: 4597467 - DNA, 25 bp, Homo sapien
agtggccacgcccttcatagtctga

SEQ ID NO: 4597468 - DNA, 25 bp, Homo sapien
gctctgctcaaatgacgcaaggaca

SEQ ID NO: 4597469 - DNA, 25 bp, Homo sapien
cctcgtttgacaggctccccgtggg

SEQ ID NO: 4597470 - DNA, 25 bp, Homo sapien
tgggccctcgtttgacaggctcccc

SEQ ID NO: 4597471 - DNA, 25 bp, Homo sapien
gtgggctctgctcaaatgacgcaag

SEQ ID NO: 4597472 - DNA, 25 bp, Homo sapien
gcccagcgcctaggcgggctgaatc

SEQ ID NO: 4597473 - DNA, 25 bp, Homo sapien
aatgacgggtcacagcaagtggggc

SEQ ID NO: 4597474 - DNA, 25 bp, Homo sapien
caggcgctccctggttgccatgcag

SEQ ID NO: 4597475 - DNA, 25 bp, Homo sapien
tctggtcctgatcgctgggcttggc

SEQ ID NO: 4597476 - DNA, 25 bp, Homo sapien
gtctgtcataacatcacaggcacca

SEQ ID NO: 4597477 - DNA, 25 bp, Homo sapien
ggtctgtcataacatcacaggcacc

SEQ ID NO: 4597478 - DNA, 25 bp, Homo sapien
tctgtcataacatcacaggcaccag

SEQ ID NO: 4597479 - DNA, 25 bp, Homo sapien
tctgtcttcacaaaaggtgccccgc

SEQ ID NO: 4597480 - DNA, 25 bp, Homo sapien
gtcttcacaaaaggtgccccgctgg

SEQ ID NO: 4597481 - DNA, 25 bp, Homo sapien
acatccaagcccaaggtactcatgg

SEQ ID NO: 4597482 - DNA, 25 bp, Homo sapien
cgctggccggcaccacagaaaacat

SEQ ID NO: 4597483 - DNA, 25 bp, Homo sapien
tggaaggtcactttcagcagccgcc

SEQ ID NO: 4597484 - DNA, 25 bp, Homo sapien
gaaggtcactttcagcagccgccat

SEQ ID NO: 4597485 - DNA, 25 bp, Homo sapien
ggaaggtcactttcagcagccgcca

SEQ ID NO: 4597486 - DNA, 25 bp, Homo sapien
ttctgccaggaccagtggcaagcac

SEQ ID NO: 4597487 - DNA, 25 bp, Homo sapien
cagaggaatccagcttttccatgag

SEQ ID NO: 4597488 - DNA, 25 bp, Homo sapien
tttccatgagattcagctgcagttg

SEQ ID NO: 4597489 - DNA, 25 bp, Homo sapien
agcccgggtgtttctgcgtaaggca

SEQ ID NO: 4597490 - DNA, 25 bp, Homo sapien
cagcagttccagttcaaaggttgag

SEQ ID NO: 4597491 - DNA, 25 bp, Homo sapien
agccagcagttccagttcaaaggtt

SEQ ID NO: 4597492 - DNA, 25 bp, Homo sapien
gttgagggggcgaacagctgcgagg

SEQ ID NO: 4597493 - DNA, 25 bp, Homo sapien
ggggcgaacagctgcgaggtggcca

SEQ ID NO: 4597494 - DNA, 25 bp, Homo sapien
gaatgttgctaatcacaggctgcct

SEQ ID NO: 4597495 - DNA, 25 bp, Homo sapien
caaagaaggtgaaatgcagggagca

SEQ ID NO: 4597496 - DNA, 25 bp, Homo sapien
taacgccaaaatgaggccaggacct

SEQ ID NO: 4597497 - DNA, 25 bp, Homo sapien
gaaattctttgtgaactagccacgc

SEQ ID NO: 4597498 - DNA, 25 bp, Homo sapien
ttaaagggatgcccaaagggtggca

SEQ ID NO: 4597499 - DNA, 25 bp, Homo sapien
caaagggtggcagaagcaactccat

SEQ ID NO: 4597500 - DNA, 25 bp, Homo sapien
ccaaagggtggcagaagcaactcca

SEQ ID NO: 4597501 - DNA, 25 bp, Homo sapien
tggtttcaacacctccgacgcaaga

SEQ ID NO: 4597502 - DNA, 25 bp, Homo sapien
tgagcagatgcctgacacgcacgat

SEQ ID NO: 4597503 - DNA, 25 bp, Homo sapien
tgacgtggaaacgagcttgccagtg

SEQ ID NO: 4597504 - DNA, 25 bp, Homo sapien
cacgatggagctggggttttataca

SEQ ID NO: 4597505 - DNA, 25 bp, Homo sapien
ggttgcagctgaccaactttccaca

SEQ ID NO: 4597506 - DNA, 25 bp, Homo sapien
gttgcagctgaccaactttccacag

SEQ ID NO: 4597507 - DNA, 25 bp, Homo sapien
aatttgaattgcatgttactttctc

SEQ ID NO: 4597508 - DNA, 25 bp, Homo sapien
gagaggaaatattgtaaactctgca

SEQ ID NO: 4597509 - DNA, 25 bp, Homo sapien
tctgcagatcccacaatcacggtga

SEQ ID NO: 4597510 - DNA, 25 bp, Homo sapien
ggtgataactcctcaaccctgctgt

SEQ ID NO: 4597511 - DNA, 25 bp, Homo sapien
cttgctggaaggtcaatgtcgagga

SEQ ID NO: 4597512 - DNA, 25 bp, Homo sapien
ctgcatcttgctggaaggtcaatgt

SEQ ID NO: 4597513 - DNA, 25 bp, Homo sapien
tgatcgccatagctgcgccagagca

SEQ ID NO: 4597514 - DNA, 25 bp, Homo sapien
ttttaaagaccaagaatcggagctg

SEQ ID NO: 4597515 - DNA, 25 bp, Homo sapien
cacgaggagagtgacatgtcccaac

SEQ ID NO: 4597516 - DNA, 25 bp, Homo sapien
ggttacaaccatcccacacgaggag

SEQ ID NO: 4597517 - DNA, 25 bp, Homo sapien
tacaagaagcttgtccggcaggcaa

SEQ ID NO: 4597518 - DNA, 25 bp, Homo sapien
ggaacacctgttgcagcacctgtca

SEQ ID NO: 4597519 - DNA, 25 bp, Homo sapien
atgagatggcggcttgcagagaaat

SEQ ID NO: 4597520 - DNA, 25 bp, Homo sapien
agatggcggcttgcagagaaatctg

SEQ ID NO: 4597521 - DNA, 25 bp, Homo sapien
tgagatggcggcttgcagagaaatc

SEQ ID NO: 4597522 - DNA, 25 bp, Homo sapien
tcatgagatggcggcttgcagagaa

SEQ ID NO: 4597523 - DNA, 25 bp, Homo sapien
aggtctctccacgtgcagaacaccc

SEQ ID NO: 4597524 - DNA, 25 bp, Homo sapien
tctctccacgtgcagaacaccccag

SEQ ID NO: 4597525 - DNA, 25 bp, Homo sapien
ggtctctccacgtgcagaacacccc

SEQ ID NO: 4597526 - DNA, 25 bp, Homo sapien
gtctctccacgtgcagaacacccca

SEQ ID NO: 4597527 - DNA, 25 bp, Homo sapien
tcttcatttagtggcgccatttcca

SEQ ID NO: 4597528 - DNA, 25 bp, Homo sapien
ggtgatgatatcatacttgcgtgtc

SEQ ID NO: 4597529 - DNA, 25 bp, Homo sapien
tttgatgtcgaatactgtggagtcc

SEQ ID NO: 4597530 - DNA, 25 bp, Homo sapien
tacttgcgtgtcttctttaacctct

SEQ ID NO: 4597531 - DNA, 25 bp, Homo sapien
ccagggggccacaggctttctcact

SEQ ID NO: 4597532 - DNA, 25 bp, Homo sapien
cagggggccacaggctttctcactt

SEQ ID NO: 4597533 - DNA, 25 bp, Homo sapien
cccactaaagtagttctgtagccca

SEQ ID NO: 4597534 - DNA, 25 bp, Homo sapien
ttaagcccactaaagtagttctgta

SEQ ID NO: 4597535 - DNA, 25 bp, Homo sapien
ctaaagtagttctgtagcccaagga

SEQ ID NO: 4597536 - DNA, 25 bp, Homo sapien
ctgtagcccaaggaccagcgttctg

SEQ ID NO: 4597537 - DNA, 25 bp, Homo sapien
agcagcacacagtaaatccggcaac

SEQ ID NO: 4597538 - DNA, 25 bp, Homo sapien
cagtaaatccggcaacagcaaatgc

SEQ ID NO: 4597539 - DNA, 25 bp, Homo sapien
acagcaaatgccccaagacctgttc

SEQ ID NO: 4597540 - DNA, 25 bp, Homo sapien
cacacagtaaatccggcaacagcaa

SEQ ID NO: 4597541 - DNA, 25 bp, Homo sapien
gaagtccgtagatgacaatggcacc

SEQ ID NO: 4597542 - DNA, 25 bp, Homo sapien
aatggcacctctgctgaatggcagg

SEQ ID NO: 4597543 - DNA, 25 bp, Homo sapien
ggcattaaccttcactccaactgaa

SEQ ID NO: 4597544 - DNA, 25 bp, Homo sapien
tcgggcatggagacacgaagatgaa

SEQ ID NO: 4597545 - DNA, 25 bp, Homo sapien
cagaagccagcatggcatggttgga

SEQ ID NO: 4597546 - DNA, 25 bp, Homo sapien
ctgagtgcagaagccagcatggcat

SEQ ID NO: 4597547 - DNA, 25 bp, Homo sapien
agtgcagaagccagcatggcatggt

SEQ ID NO: 4597548 - DNA, 25 bp, Homo sapien
tgcagaagccagcatggcatggttg

SEQ ID NO: 4597549 - DNA, 25 bp, Homo sapien
gcgcgcggcgacagcaggttggcga

SEQ ID NO: 4597550 - DNA, 25 bp, Homo sapien
cgcgcggcgacagcaggttggcgat

SEQ ID NO: 4597551 - DNA, 25 bp, Homo sapien
cagcaggcaggcgatgaggagggtg

SEQ ID NO: 4597552 - DNA, 25 bp, Homo sapien
ggtaaaggcgaacgccacgatcacg

SEQ ID NO: 4597553 - DNA, 25 bp, Homo sapien
aggcgaacgccacgatcacggctgc

SEQ ID NO: 4597554 - DNA, 25 bp, Homo sapien
ggtggtaaaggcgaacgccacgatc

SEQ ID NO: 4597555 - DNA, 25 bp, Homo sapien
aggaggatggaaatgcgggtcacca

SEQ ID NO: 4597556 - DNA, 25 bp, Homo sapien
cttgagggtgggtaggtcgcggagg

SEQ ID NO: 4597557 - DNA, 25 bp, Homo sapien
ggtaggtcgcggaggaggatggaaa

SEQ ID NO: 4597558 - DNA, 25 bp, Homo sapien
gaggatggaaatgcgggtcaccaag

SEQ ID NO: 4597559 - DNA, 25 bp, Homo sapien
tgccgcccgccgccccagacccaaa

SEQ ID NO: 4597560 - DNA, 25 bp, Homo sapien
ctgccgcccgccgccccagacccaa

SEQ ID NO: 4597561 - DNA, 25 bp, Homo sapien
tcgggttcgggccacggcgcggaga

SEQ ID NO: 4597562 - DNA, 25 bp, Homo sapien
tcgcgctcgggttcgggccacggcg

SEQ ID NO: 4597563 - DNA, 25 bp, Homo sapien
gctcgggttcgggccacggcgcgga

SEQ ID NO: 4597564 - DNA, 25 bp, Homo sapien
ttcgggccacggcgcggagacggac

SEQ ID NO: 4597565 - DNA, 25 bp, Homo sapien
gggcgggcagcggcacggcgcgcat

SEQ ID NO: 4597566 - DNA, 25 bp, Homo sapien
gcgggagcggccaggagcgcgagca

SEQ ID NO: 4597567 - DNA, 25 bp, Homo sapien
gggcggcgggagcggccaggagcgc

SEQ ID NO: 4597568 - DNA, 25 bp, Homo sapien
cagcggcaggagcggggcgggcagc

SEQ ID NO: 4597569 - DNA, 25 bp, Homo sapien
gtgggtcggcacaggatcgggcagg

SEQ ID NO: 4597570 - DNA, 25 bp, Homo sapien
ctgcaccgggggatcctgcggcgga

SEQ ID NO: 4597571 - DNA, 25 bp, Homo sapien
ctccaggatccgcaccagcacggag

SEQ ID NO: 4597572 - DNA, 25 bp, Homo sapien
agtgcggtgggtcggcacaggatcg

SEQ ID NO: 4597573 - DNA, 25 bp, Homo sapien
caagctcaatcagcattttttggcc

SEQ ID NO: 4597574 - DNA, 25 bp, Homo sapien
gggcccttccaacatagcaacttgc

SEQ ID NO: 4597575 - DNA, 25 bp, Homo sapien
tcaagatagcaatagaaagagtcac

SEQ ID NO: 4597576 - DNA, 25 bp, Homo sapien
tcaaagtatgcaagtcaagatagca

SEQ ID NO: 4597577 - DNA, 25 bp, Homo sapien
ttacagctggctagtatcgtcaaac

SEQ ID NO: 4597578 - DNA, 25 bp, Homo sapien
aacagcgagctgttgccaaagagaa

SEQ ID NO: 4597579 - DNA, 25 bp, Homo sapien
gctagtatcgtcaaaccatggaaac

SEQ ID NO: 4597580 - DNA, 25 bp, Homo sapien
caaaccatggaaacagcgagctgtt

SEQ ID NO: 4597581 - DNA, 25 bp, Homo sapien
gagctcaggtggaccatctgtccac

SEQ ID NO: 4597582 - DNA, 25 bp, Homo sapien
tttggatcgagaggcgaagaccagc

SEQ ID NO: 4597583 - DNA, 25 bp, Homo sapien
cctttcacagtgcagtacttttccc

SEQ ID NO: 4597584 - DNA, 25 bp, Homo sapien
ttttcccatacacatcaaagttgct

SEQ ID NO: 4597585 - DNA, 25 bp, Homo sapien
ctccggatggctgtttgtaaagtaa

SEQ ID NO: 4597586 - DNA, 25 bp, Homo sapien
aaatattgattttgagccatccccc

SEQ ID NO: 4597587 - DNA, 25 bp, Homo sapien
ggcggttcaccctccggatggctgt

SEQ ID NO: 4597588 - DNA, 25 bp, Homo sapien
aggcagggcggttcaccctccggat

SEQ ID NO: 4597589 - DNA, 25 bp, Homo sapien
tgcagctccaagtggcagtcactcc

SEQ ID NO: 4597590 - DNA, 25 bp, Homo sapien
gcagtcactcccatgtccagaaaca

SEQ ID NO: 4597591 - DNA, 25 bp, Homo sapien
tccaagtggcagtcactcccatgtc

SEQ ID NO: 4597592 - DNA, 25 bp, Homo sapien
cagctgttgcttctgcctgcagctc

SEQ ID NO: 4597593 - DNA, 25 bp, Homo sapien
gctggcatcgtcagcctctccgtga

SEQ ID NO: 4597594 - DNA, 25 bp, Homo sapien
tagacctcacgtttgcaggaatttg

SEQ ID NO: 4597595 - DNA, 25 bp, Homo sapien
gcctctccgtgacagtggagttaga

SEQ ID NO: 4597596 - DNA, 25 bp, Homo sapien
cagtggagttagacctcacgtttgc

SEQ ID NO: 4597597 - DNA, 25 bp, Homo sapien
ctgcttcctcctgtatcttcaccct

SEQ ID NO: 4597598 - DNA, 25 bp, Homo sapien
atgggaactaagaagtccaaggtca

SEQ ID NO: 4597599 - DNA, 25 bp, Homo sapien
catcatgggaactaagaagtccaag

SEQ ID NO: 4597600 - DNA, 25 bp, Homo sapien
catgggaactaagaagtccaaggtc

SEQ ID NO: 4597601 - DNA, 25 bp, Homo sapien
tcatgggaactaagaagtccaaggt

SEQ ID NO: 4597602 - DNA, 25 bp, Homo sapien
gttatagggagctgcaccatttaaa

SEQ ID NO: 4597603 - DNA, 25 bp, Homo sapien
ctgccagtactgacatgtaacagcc

SEQ ID NO: 4597604 - DNA, 25 bp, Homo sapien
gccatccattttctcgatatcccat

SEQ ID NO: 4597605 - DNA, 25 bp, Homo sapien
taagacctggaaagtaagctgccag

SEQ ID NO: 4597606 - DNA, 25 bp, Homo sapien
ccagaaattgacttggaatcagtgg

SEQ ID NO: 4597607 - DNA, 25 bp, Homo sapien
aatcagtggcgcctgacagctgctc

SEQ ID NO: 4597608 - DNA, 25 bp, Homo sapien
aattgacttggaatcagtggcgcct

SEQ ID NO: 4597609 - DNA, 25 bp, Homo sapien
cttggaatcagtggcgcctgacagc

SEQ ID NO: 4597610 - DNA, 25 bp, Homo sapien
aatggaacttggtgataggagccag

SEQ ID NO: 4597611 - DNA, 25 bp, Homo sapien
tgcccaatggaacttggtgatagga

SEQ ID NO: 4597612 - DNA, 25 bp, Homo sapien
caatggaacttggtgataggagcca

SEQ ID NO: 4597613 - DNA, 25 bp, Homo sapien
cccaatggaacttggtgataggagc

SEQ ID NO: 4597614 - DNA, 25 bp, Homo sapien
taaggccagcacgaatacagcatca

SEQ ID NO: 4597615 - DNA, 25 bp, Homo sapien
tgattgctgccccaaaaccccctac

SEQ ID NO: 4597616 - DNA, 25 bp, Homo sapien
ctgattgctgccccaaaacccccta

SEQ ID NO: 4597617 - DNA, 25 bp, Homo sapien
ggccagcacgaatacagcatcagaa

SEQ ID NO: 4597618 - DNA, 25 bp, Homo sapien
ttctgggggttacgagaagctctac

SEQ ID NO: 4597619 - DNA, 25 bp, Homo sapien
gggttacgagaagctctactttgga

SEQ ID NO: 4597620 - DNA, 25 bp, Homo sapien
cttctgggggttacgagaagctcta

SEQ ID NO: 4597621 - DNA, 25 bp, Homo sapien
gtgcttctgggggttacgagaagct

SEQ ID NO: 4597622 - DNA, 25 bp, Homo sapien
tctgcttgggatcccgtgcaagttg

SEQ ID NO: 4597623 - DNA, 25 bp, Homo sapien
gatcccgtgcaagttgcgcacagag

SEQ ID NO: 4597624 - DNA, 25 bp, Homo sapien
aagttgcgcacagaggatcccatct

SEQ ID NO: 4597625 - DNA, 25 bp, Homo sapien
gggaacagcaaaatcttctatctgc

SEQ ID NO: 4597626 - DNA, 25 bp, Homo sapien
cagctccctgactgataagccagac

SEQ ID NO: 4597627 - DNA, 25 bp, Homo sapien
ttaaatgcatgggtactggagaggc

SEQ ID NO: 4597628 - DNA, 25 bp, Homo sapien
cagtagaccctggtgcaaatgtggg

SEQ ID NO: 4597629 - DNA, 25 bp, Homo sapien
gagaggcgtagccaggtattatgaa

SEQ ID NO: 4597630 - DNA, 25 bp, Homo sapien
aggaatggccggagtccgggcgcga

SEQ ID NO: 4597631 - DNA, 25 bp, Homo sapien
aagaagaacgccagctgcggtggac

SEQ ID NO: 4597632 - DNA, 25 bp, Homo sapien
tgcggtggaccgctgaggaatggcc

SEQ ID NO: 4597633 - DNA, 25 bp, Homo sapien
tccggggatcaaagaagaacgccag

SEQ ID NO: 4597634 - DNA, 25 bp, Homo sapien
taactatttcaaggataatcttaag

SEQ ID NO: 4597635 - DNA, 25 bp, Homo sapien
gtttcctgaacatattcgtaactat

SEQ ID NO: 4597636 - DNA, 25 bp, Homo sapien
caagaaagcaaagtttacccattgt

SEQ ID NO: 4597637 - DNA, 25 bp, Homo sapien
gcaaagtttacccattgttctagca

SEQ ID NO: 4597638 - DNA, 25 bp, Homo sapien
tcaacaagtaaggtgcaagtaggca

SEQ ID NO: 4597639 - DNA, 25 bp, Homo sapien
gacaagcctttctaattctcatgga

SEQ ID NO: 4597640 - DNA, 25 bp, Homo sapien
atacaaaggcacatgcagtccaggg

SEQ ID NO: 4597641 - DNA, 25 bp, Homo sapien
cctgccccgtgatgctaacaactga

SEQ ID NO: 4597642 - DNA, 25 bp, Homo sapien
tacagtatccgctctgctcacagga

SEQ ID NO: 4597643 - DNA, 25 bp, Homo sapien
agattcatgggactcagacgcaggc

SEQ ID NO: 4597644 - DNA, 25 bp, Homo sapien
gaagtgcttccagcaagttacacgg

SEQ ID NO: 4597645 - DNA, 25 bp, Homo sapien
caaagaagtaataggatcctgcggc

SEQ ID NO: 4597646 - DNA, 25 bp, Homo sapien
tcaacattcccaagcacatccaggg

SEQ ID NO: 4597647 - DNA, 25 bp, Homo sapien
aagggccctcaatggagtgagaacc

SEQ ID NO: 4597648 - DNA, 25 bp, Homo sapien
tgcaaagacagatagcgaaaagggc

SEQ ID NO: 4597649 - DNA, 25 bp, Homo sapien
gagtgggtttcgagaagcatcctcc

SEQ ID NO: 4597650 - DNA, 25 bp, Homo sapien
gcatacaattatgcctccaacaaaa

SEQ ID NO: 4597651 - DNA, 25 bp, Homo sapien
catagtagacctgcactaacaaggc

SEQ ID NO: 4597652 - DNA, 25 bp, Homo sapien
taagatattcactttaggagtaaag

SEQ ID NO: 4597653 - DNA, 25 bp, Homo sapien
ctaaggtgatataaagcaagtgaac

SEQ ID NO: 4597654 - DNA, 25 bp, Homo sapien
ccaaacatttaaagccactatcacc

SEQ ID NO: 4597655 - DNA, 25 bp, Homo sapien
gccaaacatttaaagccactatcac

SEQ ID NO: 4597656 - DNA, 25 bp, Homo sapien
caaacatttaaagccactatcaccc

SEQ ID NO: 4597657 - DNA, 25 bp, Homo sapien
tttatcaaacttcgagtctaagaac

SEQ ID NO: 4597658 - DNA, 25 bp, Homo sapien
catgaaaaggtacttttatcaaact

SEQ ID NO: 4597659 - DNA, 25 bp, Homo sapien
ccacatatccccattatttcttctg

SEQ ID NO: 4597660 - DNA, 25 bp, Homo sapien
tacagtaattgtctatgcttttcca

SEQ ID NO: 4597661 - DNA, 25 bp, Homo sapien
ggtagccttgataagagaatccaac

SEQ ID NO: 4597662 - DNA, 25 bp, Homo sapien
agtgaggtaccccggaatcgcagcc

SEQ ID NO: 4597663 - DNA, 25 bp, Homo sapien
ggaatcgcagccctgtgcacggcag

SEQ ID NO: 4597664 - DNA, 25 bp, Homo sapien
tgaggtaccccggaatcgcagccct

SEQ ID NO: 4597665 - DNA, 25 bp, Homo sapien
ggtaccccggaatcgcagccctgtg

SEQ ID NO: 4597666 - DNA, 25 bp, Homo sapien
gcgagatactgccttagccttggcc

SEQ ID NO: 4597667 - DNA, 25 bp, Homo sapien
cgagatactgccttagccttggcct

SEQ ID NO: 4597668 - DNA, 25 bp, Homo sapien
ccgcctccgccccgccgcgcgccct

SEQ ID NO: 4597669 - DNA, 25 bp, Homo sapien
gcctccgccccgccgcgcgccctcc

SEQ ID NO: 4597670 - DNA, 25 bp, Homo sapien
gttctcggcgccgactccgcctccg

SEQ ID NO: 4597671 - DNA, 25 bp, Homo sapien
catgttctcggcgccgactccgcct

SEQ ID NO: 4597672 - DNA, 25 bp, Homo sapien
tgatagagtggattaagaaaaaaat

SEQ ID NO: 4597673 - DNA, 25 bp, Homo sapien
gatgagttgatatcctttgcagcga

SEQ ID NO: 4597674 - DNA, 25 bp, Homo sapien
aagaaaaaaatgtagcacatataca

SEQ ID NO: 4597675 - DNA, 25 bp, Homo sapien
aggatgagttgatatcctttgcagc

SEQ ID NO: 4597676 - DNA, 25 bp, Homo sapien
gggcaggtaggtctacctggatgtt

SEQ ID NO: 4597677 - DNA, 25 bp, Homo sapien
ctacctggatgttcattggttggag

SEQ ID NO: 4597678 - DNA, 25 bp, Homo sapien
acctggatgttcattggttggagag

SEQ ID NO: 4597679 - DNA, 25 bp, Homo sapien
gtggaagggcaggtaggtctacctg

SEQ ID NO: 4597680 - DNA, 25 bp, Homo sapien
tccaaggaaaggcacgaggacacca

SEQ ID NO: 4597681 - DNA, 25 bp, Homo sapien
aaggaaaggcacgaggacaccaagt

SEQ ID NO: 4597682 - DNA, 25 bp, Homo sapien
gcacgaggacaccaagtgtctcttg

SEQ ID NO: 4597683 - DNA, 25 bp, Homo sapien
gaaaggcacgaggacaccaagtgtc

SEQ ID NO: 4597684 - DNA, 25 bp, Homo sapien
tattttattacatataatgtcacaa

SEQ ID NO: 4597685 - DNA, 25 bp, Homo sapien
tattacatataatgtcacaatatat

SEQ ID NO: 4597686 - DNA, 25 bp, Homo sapien
ttttattacatataatgtcacaata

SEQ ID NO: 4597687 - DNA, 25 bp, Homo sapien
tttattacatataatgtcacaatat

SEQ ID NO: 4597688 - DNA, 25 bp, Homo sapien
ctgcctgccttggcctcccaaagtg

SEQ ID NO: 4597689 - DNA, 25 bp, Homo sapien
tctgcttcccaagttcaagtgatcc

SEQ ID NO: 4597690 - DNA, 25 bp, Homo sapien
cactgcaacctctgcttcccaagtt

SEQ ID NO: 4597691 - DNA, 25 bp, Homo sapien
atggtgcaatggcacgatctcggct

SEQ ID NO: 4597692 - DNA, 25 bp, Homo sapien
gataggtcattttaggactccctgg

SEQ ID NO: 4597693 - DNA, 25 bp, Homo sapien
tcaaaagccactggatatgcgaggc

SEQ ID NO: 4597694 - DNA, 25 bp, Homo sapien
taagttttacctatggccccaatga

SEQ ID NO: 4597695 - DNA, 25 bp, Homo sapien
catctggtaacatgggtaaccctgg

SEQ ID NO: 4597696 - DNA, 25 bp, Homo sapien
gggaagttgaggaatgagaatctct

SEQ ID NO: 4597697 - DNA, 25 bp, Homo sapien
aagttgaggaatgagaatctcttga

SEQ ID NO: 4597698 - DNA, 25 bp, Homo sapien
gaagttgaggaatgagaatctcttg

SEQ ID NO: 4597699 - DNA, 25 bp, Homo sapien
tcgggaagttgaggaatgagaatct

SEQ ID NO: 4597700 - DNA, 25 bp, Homo sapien
gtcaggactcacagccacatctcag

SEQ ID NO: 4597701 - DNA, 25 bp, Homo sapien
tctttccgctggacagcagtgaagt

SEQ ID NO: 4597702 - DNA, 25 bp, Homo sapien
ctggacagcagtgaagtcaggactc

SEQ ID NO: 4597703 - DNA, 25 bp, Homo sapien
cacagccacatctcagcttcttcca

SEQ ID NO: 4597704 - DNA, 25 bp, Homo sapien
cattaatcagccaagaggtaggtgg

SEQ ID NO: 4597705 - DNA, 25 bp, Homo sapien
caatagactataataaggtggtaga

SEQ ID NO: 4597706 - DNA, 25 bp, Homo sapien
caacaattgcagtaaacttaaaggg

SEQ ID NO: 4597707 - DNA, 25 bp, Homo sapien
ggcaaagatttttcagactagactt

SEQ ID NO: 4597708 - DNA, 25 bp, Homo sapien
ttcctcctccgatttcatgtacttc

SEQ ID NO: 4597709 - DNA, 25 bp, Homo sapien
gcactacccaggcactaccacctcc

SEQ ID NO: 4597710 - DNA, 25 bp, Homo sapien
aggcactacccaggcactaccacct

SEQ ID NO: 4597711 - DNA, 25 bp, Homo sapien
gccaggcactacccaggcactacca

SEQ ID NO: 4597712 - DNA, 25 bp, Homo sapien
gtgacatccacggtcatcacagctc

SEQ ID NO: 4597713 - DNA, 25 bp, Homo sapien
tcacagctccgttgatgacagaaca

SEQ ID NO: 4597714 - DNA, 25 bp, Homo sapien
tgcagaaatgttggccactaccagt

SEQ ID NO: 4597715 - DNA, 25 bp, Homo sapien
gtttgtgttgaggatgtaactgaga

SEQ ID NO: 4597716 - DNA, 25 bp, Homo sapien
caggaacataatgagtatattacct

SEQ ID NO: 4597717 - DNA, 25 bp, Homo sapien
ggaacataatgagtatattaccttt

SEQ ID NO: 4597718 - DNA, 25 bp, Homo sapien
aaacaggaacataatgagtatatta

SEQ ID NO: 4597719 - DNA, 25 bp, Homo sapien
tctgggaaacaggaacataatgagt

SEQ ID NO: 4597720 - DNA, 25 bp, Homo sapien
accattttataatctcatagctttg

SEQ ID NO: 4597721 - DNA, 25 bp, Homo sapien
tggatgtgccagcatgaatttacag

SEQ ID NO: 4597722 - DNA, 25 bp, Homo sapien
ctgtctgccgtggtgtggatgtgcc

SEQ ID NO: 4597723 - DNA, 25 bp, Homo sapien
ttataatctcatagctttgaatggg

SEQ ID NO: 4597724 - DNA, 25 bp, Homo sapien
tagtggacatttattagggcttcca

SEQ ID NO: 4597725 - DNA, 25 bp, Homo sapien
ttattagggcttccagaatatgaag

SEQ ID NO: 4597726 - DNA, 25 bp, Homo sapien
aggaaccagacacagatccataggt

SEQ ID NO: 4597727 - DNA, 25 bp, Homo sapien
agacacagatccataggtgaaaggg

SEQ ID NO: 4597728 - DNA, 25 bp, Homo sapien
ctcacagcaactgggtcaatctgtc

SEQ ID NO: 4597729 - DNA, 25 bp, Homo sapien
tttccctgcttggagactgtctaaa

SEQ ID NO: 4597730 - DNA, 25 bp, Homo sapien
ccctgcttggagactgtctaaaata

SEQ ID NO: 4597731 - DNA, 25 bp, Homo sapien
tttcgattagatttgtatttgttaa

SEQ ID NO: 4597732 - DNA, 25 bp, Homo sapien
caacatgcccggctggggccatgct

SEQ ID NO: 4597733 - DNA, 25 bp, Homo sapien
cttgagctcaaaattatccacccac

SEQ ID NO: 4597734 - DNA, 25 bp, Homo sapien
ccgtttgtttaggattcaagtgtct

SEQ ID NO: 4597735 - DNA, 25 bp, Homo sapien
gttcccgtcagaaaagactatgtcc

SEQ ID NO: 4597736 - DNA, 25 bp, Homo sapien
taagagtccctataataactccaca

SEQ ID NO: 4597737 - DNA, 25 bp, Homo sapien
gaatgagtcacagacagttcccgtc

SEQ ID NO: 4597738 - DNA, 25 bp, Homo sapien
cagttttacctggaacaagtaatag

SEQ ID NO: 4597739 - DNA, 25 bp, Homo sapien
ggttcacatggtccaaattcataag

SEQ ID NO: 4597740 - DNA, 25 bp, Homo sapien
actacgcctagcccagcatactttt

SEQ ID NO: 4597741 - DNA, 25 bp, Homo sapien
cgcacccggcctttagagtatattt

SEQ ID NO: 4597742 - DNA, 25 bp, Homo sapien
gaaggtccgggatagactcctaaca

SEQ ID NO: 4597743 - DNA, 25 bp, Homo sapien
cctggctggaggactatctgagaac

SEQ ID NO: 4597744 - DNA, 25 bp, Homo sapien
catacatggtacaagcaaaaggcac

SEQ ID NO: 4597745 - DNA, 25 bp, Homo sapien
tgggaaacgccctggtctgacatgg

SEQ ID NO: 4597746 - DNA, 25 bp, Homo sapien
tgctgcaaatccaacgaggcgagtc

SEQ ID NO: 4597747 - DNA, 25 bp, Homo sapien
tgatgaccgtttcccgcctttgtgc

SEQ ID NO: 4597748 - DNA, 25 bp, Homo sapien
ttgctgctccgtgcaaacaaggagg

SEQ ID NO: 4597749 - DNA, 25 bp, Homo sapien
cttcctgagcgagagattaggttgc

SEQ ID NO: 4597750 - DNA, 25 bp, Homo sapien
aagtgctgaaggcccacagcttccc

SEQ ID NO: 4597751 - DNA, 25 bp, Homo sapien
tgctgaaggcccacagcttcccctt

SEQ ID NO: 4597752 - DNA, 25 bp, Homo sapien
aaggcccacagcttccccttcgtgt

SEQ ID NO: 4597753 - DNA, 25 bp, Homo sapien
ggcccacagcttccccttcgtgtcc

SEQ ID NO: 4597754 - DNA, 25 bp, Homo sapien
ttcggattctctcatgcttgctaag

SEQ ID NO: 4597755 - DNA, 25 bp, Homo sapien
tttagaataaaggagacatttgtcc

SEQ ID NO: 4597756 - DNA, 25 bp, Homo sapien
cccagctactcagagtgtgatggta

SEQ ID NO: 4597757 - DNA, 25 bp, Homo sapien
tgtcatcttacatttgggattcgga

SEQ ID NO: 4597758 - DNA, 25 bp, Homo sapien
tttgagagggcaaatgcccctgtat

SEQ ID NO: 4597759 - DNA, 25 bp, Homo sapien
aatgcccctgtatctttccgctggc

SEQ ID NO: 4597760 - DNA, 25 bp, Homo sapien
acagaattgtatttgagagggcaaa

SEQ ID NO: 4597761 - DNA, 25 bp, Homo sapien
ccctgtatctttccgctggcattct

SEQ ID NO: 4597762 - DNA, 25 bp, Homo sapien
tgctgtaggccattagaaaccctgc

SEQ ID NO: 4597763 - DNA, 25 bp, Homo sapien
gattatctccaggtatggcgatggg

SEQ ID NO: 4597764 - DNA, 25 bp, Homo sapien
gctgtctgggctgtaaaatgccact

SEQ ID NO: 4597765 - DNA, 25 bp, Homo sapien
tcttagttaaaggaagattatctcc

SEQ ID NO: 4597766 - DNA, 25 bp, Homo sapien
ttttagtgcgccaggaacaaagcca

SEQ ID NO: 4597767 - DNA, 25 bp, Homo sapien
tttgggtaatgatgccccgggccat

SEQ ID NO: 4597768 - DNA, 25 bp, Homo sapien
aaatcaagggagtgccaccaggtgt

SEQ ID NO: 4597769 - DNA, 25 bp, Homo sapien
tttcaggcaggaaatgtcagggcgc

SEQ ID NO: 4597770 - DNA, 25 bp, Homo sapien
gtggctgtgctgataaccaagcctg

SEQ ID NO: 4597771 - DNA, 25 bp, Homo sapien
tacttgtggctgtgctgataaccaa

SEQ ID NO: 4597772 - DNA, 25 bp, Homo sapien
aagactcaggctacttgtggctgtg

SEQ ID NO: 4597773 - DNA, 25 bp, Homo sapien
caggctacttgtggctgtgctgata

SEQ ID NO: 4597774 - DNA, 25 bp, Homo sapien
caaggcagagtgttccactttgctc

SEQ ID NO: 4597775 - DNA, 25 bp, Homo sapien
gattttaaagtcattaggctgggtg

SEQ ID NO: 4597776 - DNA, 25 bp, Homo sapien
agtgttccactttgctccaaacatg

SEQ ID NO: 4597777 - DNA, 25 bp, Homo sapien
tattgactgtggaccgatgtgaagc

SEQ ID NO: 4597778 - DNA, 25 bp, Homo sapien
tattgtgtacagtcagatcccaggt

SEQ ID NO: 4597779 - DNA, 25 bp, Homo sapien
agtaaccttggctaccgttgccgca

SEQ ID NO: 4597780 - DNA, 25 bp, Homo sapien
cagaggccgctgaattaacccgtgg

SEQ ID NO: 4597781 - DNA, 25 bp, Homo sapien
tgcatgaattccagacagaggccgc

SEQ ID NO: 4597782 - DNA, 25 bp, Homo sapien
tataccgagcataagacagagcctg

SEQ ID NO: 4597783 - DNA, 25 bp, Homo sapien
tgcacttgaaaaccgtgtccttggt

SEQ ID NO: 4597784 - DNA, 25 bp, Homo sapien
tctgctgcgcctccaagataagctc

SEQ ID NO: 4597785 - DNA, 25 bp, Homo sapien
acagagcctgcgttcaagttctgca

SEQ ID NO: 4597786 - DNA, 25 bp, Homo sapien
acgacgccgaaagcgccgctgcggt

SEQ ID NO: 4597787 - DNA, 25 bp, Homo sapien
gtcggcgtcacagcccgcggcagag

SEQ ID NO: 4597788 - DNA, 25 bp, Homo sapien
cggtgagtggctccctagctccttt

SEQ ID NO: 4597789 - DNA, 25 bp, Homo sapien
tcgggtttgggcgaccaggaggtgc

SEQ ID NO: 4597790 - DNA, 25 bp, Homo sapien
tttcaggttctccaacggaggagct

SEQ ID NO: 4597791 - DNA, 25 bp, Homo sapien
gtgaatgccggcgagagcccgaagg

SEQ ID NO: 4597792 - DNA, 25 bp, Homo sapien
cctgggcccgagtcgtagggtcctg

SEQ ID NO: 4597793 - DNA, 25 bp, Homo sapien
ctctttccggtgaggtgggaactca

SEQ ID NO: 4597794 - DNA, 25 bp, Homo sapien
gaatttaaaagaatgtccactgatg

SEQ ID NO: 4597795 - DNA, 25 bp, Homo sapien
ttcacgcgcagtaggtattgggccc

SEQ ID NO: 4597796 - DNA, 25 bp, Homo sapien
tttcatgagttttcaaacaggtcca

SEQ ID NO: 4597797 - DNA, 25 bp, Homo sapien
catttgctgatcgtaggattcttaa

SEQ ID NO: 4597798 - DNA, 25 bp, Homo sapien
tatgtgacttgatggtttatgtaac

SEQ ID NO: 4597799 - DNA, 25 bp, Homo sapien
tgttgcttgacagatctgttttaga

SEQ ID NO: 4597800 - DNA, 25 bp, Homo sapien
gaaggatattctgatccttaggtta

SEQ ID NO: 4597801 - DNA, 25 bp, Homo sapien
gataaaagttttgatacataccttg

SEQ ID NO: 4597802 - DNA, 25 bp, Homo sapien
ttcttgattatgatctgtccgaatg

SEQ ID NO: 4597803 - DNA, 25 bp, Homo sapien
cttgattatgatctgtccgaatgac

SEQ ID NO: 4597804 - DNA, 25 bp, Homo sapien
tcttgattatgatctgtccgaatga

SEQ ID NO: 4597805 - DNA, 25 bp, Homo sapien
ttttttcatgtcctaagagttgtca

SEQ ID NO: 4597806 - DNA, 25 bp, Homo sapien
gattactcctaaatctctgatgcct

SEQ ID NO: 4597807 - DNA, 25 bp, Homo sapien
gctgttgtcacataaactaatatat

SEQ ID NO: 4597808 - DNA, 25 bp, Homo sapien
cacttttggctttggattggctttg

SEQ ID NO: 4597809 - DNA, 25 bp, Homo sapien
ttattactgatgctgtgacactccc

SEQ ID NO: 4597810 - DNA, 25 bp, Homo sapien
ggagacaaggaattacctaatgggc

SEQ ID NO: 4597811 - DNA, 25 bp, Homo sapien
cacaaattcagatggagagctggaa

SEQ ID NO: 4597812 - DNA, 25 bp, Homo sapien
aacagtatcctaattgttgccaagg

SEQ ID NO: 4597813 - DNA, 25 bp, Homo sapien
gaaaaactatgctatgatcgactgc

SEQ ID NO: 4597814 - DNA, 25 bp, Homo sapien
cagatatgtcgttaaagatggtgcc

SEQ ID NO: 4597815 - DNA, 25 bp, Homo sapien
tactttggcgtgcagtcttatcaag

SEQ ID NO: 4597816 - DNA, 25 bp, Homo sapien
gagtttcaaatggaccctaccactg

SEQ ID NO: 4597817 - DNA, 25 bp, Homo sapien
tttccctaactttcgggcagcctca

SEQ ID NO: 4597818 - DNA, 25 bp, Homo sapien
ccctaactttcgggcagcctcaggg

SEQ ID NO: 4597819 - DNA, 25 bp, Homo sapien
tgagagcccaggtcgttgttttttc

SEQ ID NO: 4597820 - DNA, 25 bp, Homo sapien
gttggaaagaagcagccgtactgag

SEQ ID NO: 4597821 - DNA, 25 bp, Homo sapien
gctttcttttcgtgccttgttggaa

SEQ ID NO: 4597822 - DNA, 25 bp, Homo sapien
taggagctttcttttcgtgccttgt

SEQ ID NO: 4597823 - DNA, 25 bp, Homo sapien
ggtttggacatactacatggatcag

SEQ ID NO: 4597824 - DNA, 25 bp, Homo sapien
tggatgacgcaataagatacagaga

SEQ ID NO: 4597825 - DNA, 25 bp, Homo sapien
tcaggtaagttcacgatcattggtg

SEQ ID NO: 4597826 - DNA, 25 bp, Homo sapien
atttttgtgcgctctcctaatgagg

SEQ ID NO: 4597827 - DNA, 25 bp, Homo sapien
cacagcaatgcatcgaggtatgagc

SEQ ID NO: 4597828 - DNA, 25 bp, Homo sapien
tacagcagtcaaaaggtaaggtacc

SEQ ID NO: 4597829 - DNA, 25 bp, Homo sapien
taaaaagcatcgatagaagccggga

SEQ ID NO: 4597830 - DNA, 25 bp, Homo sapien
tatctaaacttgtaactgagggcca

SEQ ID NO: 4597831 - DNA, 25 bp, Homo sapien
caacggcggcgccttcggcagcctc

SEQ ID NO: 4597832 - DNA, 25 bp, Homo sapien
ggcagcctccgccccgtgacgtcag

SEQ ID NO: 4597833 - DNA, 25 bp, Homo sapien
tccgccccgtgacgtcagacggctc

SEQ ID NO: 4597834 - DNA, 25 bp, Homo sapien
agcctccgccccgtgacgtcagacg

SEQ ID NO: 4597835 - DNA, 25 bp, Homo sapien
ggtccgcaccctgtagtgtgttctt

SEQ ID NO: 4597836 - DNA, 25 bp, Homo sapien
gcggcttctttcctggacgcgtttg

SEQ ID NO: 4597837 - DNA, 25 bp, Homo sapien
tggacgcgtttgctcctggcagtct

SEQ ID NO: 4597838 - DNA, 25 bp, Homo sapien
tcttgtccgcccttgcctgtagcgg

SEQ ID NO: 4597839 - DNA, 25 bp, Homo sapien
tggttacactgggtgtgtcacagct

SEQ ID NO: 4597840 - DNA, 25 bp, Homo sapien
catgtatacctttgcaaagctgcca

SEQ ID NO: 4597841 - DNA, 25 bp, Homo sapien
taagcgttgagttcacatgtatacc

SEQ ID NO: 4597842 - DNA, 25 bp, Homo sapien
gcacttcagcttgactaagcgttga

SEQ ID NO: 4597843 - DNA, 25 bp, Homo sapien
cagtgttcagtctaaaccataggac

SEQ ID NO: 4597844 - DNA, 25 bp, Homo sapien
tgaatactgtggtgcactgctccat

SEQ ID NO: 4597845 - DNA, 25 bp, Homo sapien
tgtgtgaatcacagcccggcttttg

SEQ ID NO: 4597846 - DNA, 25 bp, Homo sapien
cataatgccgaacatgcaagtctgc

SEQ ID NO: 4597847 - DNA, 25 bp, Homo sapien
ggacagtaatatccatgttcagagt

SEQ ID NO: 4597848 - DNA, 25 bp, Homo sapien
gagcctgtccatagaaataacctgt

SEQ ID NO: 4597849 - DNA, 25 bp, Homo sapien
tcagagtttctgtcaagagcctgtc

SEQ ID NO: 4597850 - DNA, 25 bp, Homo sapien
cagataagacttcgtggattcatat

SEQ ID NO: 4597851 - DNA, 25 bp, Homo sapien
cagtcacattttaagcgcttggtag

SEQ ID NO: 4597852 - DNA, 25 bp, Homo sapien
tactgaaatgtctgtgactgtaagc

SEQ ID NO: 4597853 - DNA, 25 bp, Homo sapien
gtatggtccccactactcacatgtg

SEQ ID NO: 4597854 - DNA, 25 bp, Homo sapien
tccttggcctagtgctgttagcaga

SEQ ID NO: 4597855 - DNA, 25 bp, Homo sapien
tagtaagtggcctaaggcaagtcat

SEQ ID NO: 4597856 - DNA, 25 bp, Homo sapien
ggtgtggatcccgttgacaatctga

SEQ ID NO: 4597857 - DNA, 25 bp, Homo sapien
ggttctcatgttaaacagttgtcca

SEQ ID NO: 4597858 - DNA, 25 bp, Homo sapien
caaaactttgtataccagttcaggg

SEQ ID NO: 4597859 - DNA, 25 bp, Homo sapien
ggcactgggctagccttcgtttctg

SEQ ID NO: 4597860 - DNA, 25 bp, Homo sapien
cctagggctgttcataggaactgcc

SEQ ID NO: 4597861 - DNA, 25 bp, Homo sapien
caaccttcagtagcatatatggacc

SEQ ID NO: 4597862 - DNA, 25 bp, Homo sapien
actgccttgggctgagatagttccc

SEQ ID NO: 4597863 - DNA, 25 bp, Homo sapien
cccccaccccatgacaggccacagt

SEQ ID NO: 4597864 - DNA, 25 bp, Homo sapien
tcctaatgctgacccttccccctcc

SEQ ID NO: 4597865 - DNA, 25 bp, Homo sapien
accccatgacaggccacagtgtgtg

SEQ ID NO: 4597866 - DNA, 25 bp, Homo sapien
atatctcctaatgctgacccttccc

SEQ ID NO: 4597867 - DNA, 25 bp, Homo sapien
tttggtaatgctggcttatgtaaca

SEQ ID NO: 4597868 - DNA, 25 bp, Homo sapien
catctggcccctgtgagtatttgag

SEQ ID NO: 4597869 - DNA, 25 bp, Homo sapien
tgagagtgcataacaatctgtgttt

SEQ ID NO: 4597870 - DNA, 25 bp, Homo sapien
gcacaatggacctgcacaatattta

SEQ ID NO: 4597871 - DNA, 25 bp, Homo sapien
tgcgcagtgttgtataagatttttg

SEQ ID NO: 4597872 - DNA, 25 bp, Homo sapien
ttttattcttaccaggtgggagtgc

SEQ ID NO: 4597873 - DNA, 25 bp, Homo sapien
tttattcttaccaggtgggagtgca

SEQ ID NO: 4597874 - DNA, 25 bp, Homo sapien
tcttaatgttatccaaattgcgcag

SEQ ID NO: 4597875 - DNA, 25 bp, Homo sapien
ggaggagaactttggactagttgat

SEQ ID NO: 4597876 - DNA, 25 bp, Homo sapien
ggccaagcaactcatttcctcactg

SEQ ID NO: 4597877 - DNA, 25 bp, Homo sapien
atatggccaagcaactcatttcctc

SEQ ID NO: 4597878 - DNA, 25 bp, Homo sapien
actttggactagttgatttgctaag

SEQ ID NO: 4597879 - DNA, 25 bp, Homo sapien
tcttgtattgctcagcttggtcttg

SEQ ID NO: 4597880 - DNA, 25 bp, Homo sapien
tagtaactaggactgtagacatgct

SEQ ID NO: 4597881 - DNA, 25 bp, Homo sapien
tctggagaggtgtcttgtattgctc

SEQ ID NO: 4597882 - DNA, 25 bp, Homo sapien
ggactgtagacatgctccaccaggc

SEQ ID NO: 4597883 - DNA, 25 bp, Homo sapien
tagtgctgtagagagtgtgattccc

SEQ ID NO: 4597884 - DNA, 25 bp, Homo sapien
tctttaatgtggaaggagttactca

SEQ ID NO: 4597885 - DNA, 25 bp, Homo sapien
gatagcactggaggtttaaaggtac

SEQ ID NO: 4597886 - DNA, 25 bp, Homo sapien
cctgttcagaggaaggttgaacctg

SEQ ID NO: 4597887 - DNA, 25 bp, Homo sapien
tggccgtaagtgatctgcatctgcc

SEQ ID NO: 4597888 - DNA, 25 bp, Homo sapien
tctgacgttccatcttaccagaggg

SEQ ID NO: 4597889 - DNA, 25 bp, Homo sapien
gaaacgtgctattatccagtgtaga

SEQ ID NO: 4597890 - DNA, 25 bp, Homo sapien
tcttgaggctgttgtatccattggc

SEQ ID NO: 4597891 - DNA, 25 bp, Homo sapien
tccattggcagtactggcaccagct

SEQ ID NO: 4597892 - DNA, 25 bp, Homo sapien
ggacactcctgttgatcacttcttt

SEQ ID NO: 4597893 - DNA, 25 bp, Homo sapien
tccacgttatccttgctaaagagtg

SEQ ID NO: 4597894 - DNA, 25 bp, Homo sapien
tagcagattgttggttgataggatc

SEQ ID NO: 4597895 - DNA, 25 bp, Homo sapien
tgatcatagatgcagacgacatatt

SEQ ID NO: 4597896 - DNA, 25 bp, Homo sapien
taaaaaatggtatttggccaggcat

SEQ ID NO: 4597897 - DNA, 25 bp, Homo sapien
gaccagcatggtctcaacatggcga

SEQ ID NO: 4597898 - DNA, 25 bp, Homo sapien
ttgagaccagcatggtctcaacatg

SEQ ID NO: 4597899 - DNA, 25 bp, Homo sapien
tccagctttctttttgggtatttga

SEQ ID NO: 4597900 - DNA, 25 bp, Homo sapien
tgtgctcctggcagttcaacagtgc

SEQ ID NO: 4597901 - DNA, 25 bp, Homo sapien
ctatctgttgcaagtagcaaggcca

SEQ ID NO: 4597902 - DNA, 25 bp, Homo sapien
ccatggttggagctataagcaggga

SEQ ID NO: 4597903 - DNA, 25 bp, Homo sapien
tgtggcactgtttcacggatgaaga

SEQ ID NO: 4597904 - DNA, 25 bp, Homo sapien
tcatgccagctggaataaaatcatc

SEQ ID NO: 4597905 - DNA, 25 bp, Homo sapien
ctgaaagaggagcatggaattgagc

SEQ ID NO: 4597906 - DNA, 25 bp, Homo sapien
tctgtcagcgaggatagtttaagtc

SEQ ID NO: 4597907 - DNA, 25 bp, Homo sapien
taagtcttcgcttaatctgtcagcg

SEQ ID NO: 4597908 - DNA, 25 bp, Homo sapien
agtatctccatcttcgtgggtgtga

SEQ ID NO: 4597909 - DNA, 25 bp, Homo sapien
tccctagtgattaatgacatggagc

SEQ ID NO: 4597910 - DNA, 25 bp, Homo sapien
gaagtagtctcattgtggcttgaac

SEQ ID NO: 4597911 - DNA, 25 bp, Homo sapien
tgagcagtttaccatggtccaagct

SEQ ID NO: 4597912 - DNA, 25 bp, Homo sapien
tcacacatcatgtggtgggcagatg

SEQ ID NO: 4597913 - DNA, 25 bp, Homo sapien
tggttgcatcaattaagcaggctct

SEQ ID NO: 4597914 - DNA, 25 bp, Homo sapien
caaaggcctttctagatggagacag

SEQ ID NO: 4597915 - DNA, 25 bp, Homo sapien
tattgttaagagtatccaaaggcct

SEQ ID NO: 4597916 - DNA, 25 bp, Homo sapien
gctccctgctacacagagcatcgca

SEQ ID NO: 4597917 - DNA, 25 bp, Homo sapien
tggatcccccgaatgaagcagatgt

SEQ ID NO: 4597918 - DNA, 25 bp, Homo sapien
ccatgaatgcctttaccaagacatg

SEQ ID NO: 4597919 - DNA, 25 bp, Homo sapien
ccaagacatgccaagttggatcccc

SEQ ID NO: 4597920 - DNA, 25 bp, Homo sapien
gaaggagctgactctgacggttccc

SEQ ID NO: 4597921 - DNA, 25 bp, Homo sapien
ggccgggcctttcagtgcattgcga

SEQ ID NO: 4597922 - DNA, 25 bp, Homo sapien
gattagaggttgaagaccctgccag

SEQ ID NO: 4597923 - DNA, 25 bp, Homo sapien
tccagcagtctgctaaggtgccaag

SEQ ID NO: 4597924 - DNA, 25 bp, Homo sapien
caggtcccgagtcctatcatacagg

SEQ ID NO: 4597925 - DNA, 25 bp, Homo sapien
gacatcctccaacgcgtagtaggcg

SEQ ID NO: 4597926 - DNA, 25 bp, Homo sapien
tgtgaagttcacgtcgcccgtggtg

SEQ ID NO: 4597927 - DNA, 25 bp, Homo sapien
ttcttagagccatccacgaaggcgg

SEQ ID NO: 4597928 - DNA, 25 bp, Homo sapien
aggtgtcagctgttttgccatggga

SEQ ID NO: 4597929 - DNA, 25 bp, Homo sapien
tttcccaggtgtcagctgttttgcc

SEQ ID NO: 4597930 - DNA, 25 bp, Homo sapien
agctgttttgccatgggagctctgg

SEQ ID NO: 4597931 - DNA, 25 bp, Homo sapien
cactcctttcccaggtgtcagctgt

SEQ ID NO: 4597932 - DNA, 25 bp, Homo sapien
atgaggactgcctgccggctctctg

SEQ ID NO: 4597933 - DNA, 25 bp, Homo sapien
cagcagatgtgtggcgagggcacag

SEQ ID NO: 4597934 - DNA, 25 bp, Homo sapien
gatgacatgcacagccgttctctgc

SEQ ID NO: 4597935 - DNA, 25 bp, Homo sapien
atgccgccgcgtgccaagggagttt

SEQ ID NO: 4597936 - DNA, 25 bp, Homo sapien
aggccgcctgggggtgccggaggtg

SEQ ID NO: 4597937 - DNA, 25 bp, Homo sapien
tgctttccaagtgccatcagtctcc

SEQ ID NO: 4597938 - DNA, 25 bp, Homo sapien
ctgctttccaagtgccatcagtctc

SEQ ID NO: 4597939 - DNA, 25 bp, Homo sapien
caccatctctcgcagagacagcctc

SEQ ID NO: 4597940 - DNA, 25 bp, Homo sapien
accatctctcgcagagacagcctcc

SEQ ID NO: 4597941 - DNA, 25 bp, Homo sapien
gactcttcttggcaccggtgccagg

SEQ ID NO: 4597942 - DNA, 25 bp, Homo sapien
gtgccagggactcaaccgcaagtaa

SEQ ID NO: 4597943 - DNA, 25 bp, Homo sapien
gactcaaccgcaagtaacagcatga

SEQ ID NO: 4597944 - DNA, 25 bp, Homo sapien
caaccgcaagtaacagcatgaaggg

SEQ ID NO: 4597945 - DNA, 25 bp, Homo sapien
caacacagccacgggcgggctgccg

SEQ ID NO: 4597946 - DNA, 25 bp, Homo sapien
ccaacacagccacgggcgggctgcc

SEQ ID NO: 4597947 - DNA, 25 bp, Homo sapien
aacacagccacgggcgggctgccgc

SEQ ID NO: 4597948 - DNA, 25 bp, Homo sapien
cccagaggcctcatcatcttggaga

SEQ ID NO: 4597949 - DNA, 25 bp, Homo sapien
tagagtctggcaggcccagagggct

SEQ ID NO: 4597950 - DNA, 25 bp, Homo sapien
tctgttggtggtagtcgaggtggtc

SEQ ID NO: 4597951 - DNA, 25 bp, Homo sapien
tggagatgaaagtcccttgcctttc

SEQ ID NO: 4597952 - DNA, 25 bp, Homo sapien
gtctttgctcttcactagcctggga

SEQ ID NO: 4597953 - DNA, 25 bp, Homo sapien
gggctccccagttctctggacagag

SEQ ID NO: 4597954 - DNA, 25 bp, Homo sapien
cggaaacttgcgctgtgcttcaggg

SEQ ID NO: 4597955 - DNA, 25 bp, Homo sapien
ccgcctgctttggatgtcgactcct

SEQ ID NO: 4597956 - DNA, 25 bp, Homo sapien
cgtctgttaagtgtttgctccatca

SEQ ID NO: 4597957 - DNA, 25 bp, Homo sapien
caaacacacctgagtaacggaggcc

SEQ ID NO: 4597958 - DNA, 25 bp, Homo sapien
aaaggtgcctgaagccagccaccga

SEQ ID NO: 4597959 - DNA, 25 bp, Homo sapien
tgggagggagggcaacaactagctc

SEQ ID NO: 4597960 - DNA, 25 bp, Homo sapien
tgagactgacttggccacagacact

SEQ ID NO: 4597961 - DNA, 25 bp, Homo sapien
cacagacactgacgctgtcactgtc

SEQ ID NO: 4597962 - DNA, 25 bp, Homo sapien
ccagtctggcccgagttctgagact

SEQ ID NO: 4597963 - DNA, 25 bp, Homo sapien
ggggaccacaataccccagtctggc

SEQ ID NO: 4597964 - DNA, 25 bp, Homo sapien
gctgggttggtgaagctctgcttca

SEQ ID NO: 4597965 - DNA, 25 bp, Homo sapien
tgggctgggttggtgaagctctgct

SEQ ID NO: 4597966 - DNA, 25 bp, Homo sapien
ggctgggttggtgaagctctgcttc

SEQ ID NO: 4597967 - DNA, 25 bp, Homo sapien
gggctgggttggtgaagctctgctt

SEQ ID NO: 4597968 - DNA, 25 bp, Homo sapien
atcacaaatcctccccggtgcgtgg

SEQ ID NO: 4597969 - DNA, 25 bp, Homo sapien
gcctccctgcacacaaatcacaaat

SEQ ID NO: 4597970 - DNA, 25 bp, Homo sapien
gttgtcgcatttggtgcttccaccc

SEQ ID NO: 4597971 - DNA, 25 bp, Homo sapien
cccatccataatgggggcagcagcc

SEQ ID NO: 4597972 - DNA, 25 bp, Homo sapien
gacacacggccttccaactggctct

SEQ ID NO: 4597973 - DNA, 25 bp, Homo sapien
acagaaacgcccttgtggtaaatct

SEQ ID NO: 4597974 - DNA, 25 bp, Homo sapien
cccttgtggtaaatctggcactgcc

SEQ ID NO: 4597975 - DNA, 25 bp, Homo sapien
aaatctggcactgcccgacacacgg

SEQ ID NO: 4597976 - DNA, 25 bp, Homo sapien
ctggtggcagtggccgctgagccgg

SEQ ID NO: 4597977 - DNA, 25 bp, Homo sapien
gctggtggcagtggccgctgagccg

SEQ ID NO: 4597978 - DNA, 25 bp, Homo sapien
tcttctcgtaatggcagatctcggg

SEQ ID NO: 4597979 - DNA, 25 bp, Homo sapien
cccgaagaggccacagtgcgtgtag

SEQ ID NO: 4597980 - DNA, 25 bp, Homo sapien
aattattgtcgatgagcggccaggc

SEQ ID NO: 4597981 - DNA, 25 bp, Homo sapien
tctggaagcggtcggtgaaagtcct

SEQ ID NO: 4597982 - DNA, 25 bp, Homo sapien
tccgccgcgtgcacagggcgtagct

SEQ ID NO: 4597983 - DNA, 25 bp, Homo sapien
ccgacgtggcgctccagaactcaga

SEQ ID NO: 4597984 - DNA, 25 bp, Homo sapien
ctatgccatggacggccgagtggta

SEQ ID NO: 4597985 - DNA, 25 bp, Homo sapien
cgtagctgcgcaaggctgcacagaa

SEQ ID NO: 4597986 - DNA, 25 bp, Homo sapien
ggaacgaacacaccgtcggggtgca

SEQ ID NO: 4597987 - DNA, 25 bp, Homo sapien
cgaacacaccgtcggggtgcagcct

SEQ ID NO: 4597988 - DNA, 25 bp, Homo sapien
ctgaggagaaaggaacgaacacacc

SEQ ID NO: 4597989 - DNA, 25 bp, Homo sapien
tgaggagaaaggaacgaacacaccg

SEQ ID NO: 4597990 - DNA, 25 bp, Homo sapien
ctgtgggccaggggagcagccacac

SEQ ID NO: 4597991 - DNA, 25 bp, Homo sapien
tgtgggccaggggagcagccacaca

SEQ ID NO: 4597992 - DNA, 25 bp, Homo sapien
gtgggccaggggagcagccacacat

SEQ ID NO: 4597993 - DNA, 25 bp, Homo sapien
cctcatctagggcagagccacccat

SEQ ID NO: 4597994 - DNA, 25 bp, Homo sapien
cgcctcatctagggcagagccaccc

SEQ ID NO: 4597995 - DNA, 25 bp, Homo sapien
gcctcatctagggcagagccaccca

SEQ ID NO: 4597996 - DNA, 25 bp, Homo sapien
tttccacacgctccataccgggcaa

SEQ ID NO: 4597997 - DNA, 25 bp, Homo sapien
ctccataccgggcaacacgaaggtg

SEQ ID NO: 4597998 - DNA, 25 bp, Homo sapien
acacgctccataccgggcaacacga

SEQ ID NO: 4597999 - DNA, 25 bp, Homo sapien
acgctccataccgggcaacacgaag

SEQ ID NO: 4598000 - DNA, 25 bp, Homo sapien
ctccagctgtggatgcactgcggca

SEQ ID NO: 4598001 - DNA, 25 bp, Homo sapien
cagtttatgcagcaggacatctccc

SEQ ID NO: 4598002 - DNA, 25 bp, Homo sapien
tgatattcctctaggaggtggccgc

SEQ ID NO: 4598003 - DNA, 25 bp, Homo sapien
gcacaccacggaattttagaacctg

SEQ ID NO: 4598004 - DNA, 25 bp, Homo sapien
taatctctgcgctcaggtatggtca

SEQ ID NO: 4598005 - DNA, 25 bp, Homo sapien
taagacttattttgcagtgcacgag

SEQ ID NO: 4598006 - DNA, 25 bp, Homo sapien
taatagcaacctagcacctctgaga

SEQ ID NO: 4598007 - DNA, 25 bp, Homo sapien
taatagcctgattattaccgccctg

SEQ ID NO: 4598008 - DNA, 25 bp, Homo sapien
agcagcagcggcccttcttccccat

SEQ ID NO: 4598009 - DNA, 25 bp, Homo sapien
tccgcctagcctgcgggtctaaatg

SEQ ID NO: 4598010 - DNA, 25 bp, Homo sapien
ggcgctgcctctagtgaccctgggc

SEQ ID NO: 4598011 - DNA, 25 bp, Homo sapien
gcctgcgggtctaaatgcctttgaa

SEQ ID NO: 4598012 - DNA, 25 bp, Homo sapien
tgaagtggcttttctccctcaatgc

SEQ ID NO: 4598013 - DNA, 25 bp, Homo sapien
ctgtgttcatgtggcatttcttagc

SEQ ID NO: 4598014 - DNA, 25 bp, Homo sapien
atttcttagcacagggagcaactgg

SEQ ID NO: 4598015 - DNA, 25 bp, Homo sapien
ccagcctgcgcacacgcgtgtgtgg

SEQ ID NO: 4598016 - DNA, 25 bp, Homo sapien
tgtgggggaagaacaaatgcaagcc

SEQ ID NO: 4598017 - DNA, 25 bp, Homo sapien
tggtgtctctgaacagtaagctccc

SEQ ID NO: 4598018 - DNA, 25 bp, Homo sapien
ttccaagaccacaggaaagcctgtt

SEQ ID NO: 4598019 - DNA, 25 bp, Homo sapien
aaacaaccaggaggaggttgagagc

SEQ ID NO: 4598020 - DNA, 25 bp, Homo sapien
actggaggttcaggtggcacatgac

SEQ ID NO: 4598021 - DNA, 25 bp, Homo sapien
ctggcagatagcagatggcagctct

SEQ ID NO: 4598022 - DNA, 25 bp, Homo sapien
gtacaggtcagttggaaaaactggc

SEQ ID NO: 4598023 - DNA, 25 bp, Homo sapien
tctgggtgtcctttgagttggaatc

SEQ ID NO: 4598024 - DNA, 25 bp, Homo sapien
ctctgggtgtcctttgagttggaat

SEQ ID NO: 4598025 - DNA, 25 bp, Homo sapien
gaccatcagcgggaccgtggctggg

SEQ ID NO: 4598026 - DNA, 25 bp, Homo sapien
gcgggaccgtggctgggcttggtct

SEQ ID NO: 4598027 - DNA, 25 bp, Homo sapien
gccctctctgctggaagtaggggtg

SEQ ID NO: 4598028 - DNA, 25 bp, Homo sapien
ctcaggccggggaccatcagcggga

SEQ ID NO: 4598029 - DNA, 25 bp, Homo sapien
ccccaccttccgtggtaggctggct

SEQ ID NO: 4598030 - DNA, 25 bp, Homo sapien
gaattgaggtaggggaacccgctca

SEQ ID NO: 4598031 - DNA, 25 bp, Homo sapien
cagaattgaggtaggggaacccgct

SEQ ID NO: 4598032 - DNA, 25 bp, Homo sapien
cccaccttccgtggtaggctggctg

SEQ ID NO: 4598033 - DNA, 25 bp, Homo sapien
ctttgggctctaccccgtcagtgct

SEQ ID NO: 4598034 - DNA, 25 bp, Homo sapien
gctctttgggctctaccccgtcagt

SEQ ID NO: 4598035 - DNA, 25 bp, Homo sapien
cagtgctctctgtaggctgttgctg

SEQ ID NO: 4598036 - DNA, 25 bp, Homo sapien
ctctctgtaggctgttgctggctgg

SEQ ID NO: 4598037 - DNA, 25 bp, Homo sapien
ccgctgcgcggagtctttggcccgt

SEQ ID NO: 4598038 - DNA, 25 bp, Homo sapien
gctgcgcggagtctttggcccgttc

SEQ ID NO: 4598039 - DNA, 25 bp, Homo sapien
tgcgcggagtctttggcccgttccc

SEQ ID NO: 4598040 - DNA, 25 bp, Homo sapien
gtctgggccgctgcgcggagtcttt

SEQ ID NO: 4598041 - DNA, 25 bp, Homo sapien
ctgagggaggccgggggatgaatcg

SEQ ID NO: 4598042 - DNA, 25 bp, Homo sapien
gggaggccgggggatgaatcggcga

SEQ ID NO: 4598043 - DNA, 25 bp, Homo sapien
gagggaggccgggggatgaatcggc

SEQ ID NO: 4598044 - DNA, 25 bp, Homo sapien
gaggccgggggatgaatcggcgaaa

SEQ ID NO: 4598045 - DNA, 25 bp, Homo sapien
acagctgcccttcacgggcacctcc

SEQ ID NO: 4598046 - DNA, 25 bp, Homo sapien
agctgcccttcacgggcacctcccc

SEQ ID NO: 4598047 - DNA, 25 bp, Homo sapien
taacagctgcccttcacgggcacct

SEQ ID NO: 4598048 - DNA, 25 bp, Homo sapien
ctgcccttcacgggcacctccccgg

SEQ ID NO: 4598049 - DNA, 25 bp, Homo sapien
tctccttccacgacatcaaattcca

SEQ ID NO: 4598050 - DNA, 25 bp, Homo sapien
ttctctccttccacgacatcaaatt

SEQ ID NO: 4598051 - DNA, 25 bp, Homo sapien
ctccttccacgacatcaaattccac

SEQ ID NO: 4598052 - DNA, 25 bp, Homo sapien
tctctccttccacgacatcaaattc

SEQ ID NO: 4598053 - DNA, 25 bp, Homo sapien
agcaccagcttgttcgcgtgactcc

SEQ ID NO: 4598054 - DNA, 25 bp, Homo sapien
cgccgtcgttgccagggctgccgcc

SEQ ID NO: 4598055 - DNA, 25 bp, Homo sapien
cagcttgttcgcgtgactccaggtg

SEQ ID NO: 4598056 - DNA, 25 bp, Homo sapien
ggctgccgccgggttgccacgggtg

SEQ ID NO: 4598057 - DNA, 25 bp, Homo sapien
agcaggttgcggctctctgcgaccc

SEQ ID NO: 4598058 - DNA, 25 bp, Homo sapien
cagtggttgagtaagccggacgcac

SEQ ID NO: 4598059 - DNA, 25 bp, Homo sapien
ctatggaacctaggtctggagagca

SEQ ID NO: 4598060 - DNA, 25 bp, Homo sapien
gtaagccggacgcacaagtctgagc

SEQ ID NO: 4598061 - DNA, 25 bp, Homo sapien
tcccagggctgaacgtcctgcccct

SEQ ID NO: 4598062 - DNA, 25 bp, Homo sapien
aaggcgagggtcggccagaatccca

SEQ ID NO: 4598063 - DNA, 25 bp, Homo sapien
aggaaggcgagggtcggccagaatc

SEQ ID NO: 4598064 - DNA, 25 bp, Homo sapien
gagaaggaaggcgagggtcggccag

SEQ ID NO: 4598065 - DNA, 25 bp, Homo sapien
ccatccagctcggcctgttaccact

SEQ ID NO: 4598066 - DNA, 25 bp, Homo sapien
cagctcggcctgttaccactagcct

SEQ ID NO: 4598067 - DNA, 25 bp, Homo sapien
atccagctcggcctgttaccactag

SEQ ID NO: 4598068 - DNA, 25 bp, Homo sapien
tcggcctgttaccactagcctctcc

SEQ ID NO: 4598069 - DNA, 25 bp, Homo sapien
atcacgctgcgaagaaagggcagcc

SEQ ID NO: 4598070 - DNA, 25 bp, Homo sapien
aaataaatcacgctgcgaagaaagg

SEQ ID NO: 4598071 - DNA, 25 bp, Homo sapien
gagccgggaggctccgtccacctcg

SEQ ID NO: 4598072 - DNA, 25 bp, Homo sapien
aaatcacgctgcgaagaaagggcag

SEQ ID NO: 4598073 - DNA, 25 bp, Homo sapien
ctggctcatcagtcgcactcagacg

SEQ ID NO: 4598074 - DNA, 25 bp, Homo sapien
caggaggctgaaaaacccacttccg

SEQ ID NO: 4598075 - DNA, 25 bp, Homo sapien
gtcgcactcagacgcgacaccggtg

SEQ ID NO: 4598076 - DNA, 25 bp, Homo sapien
ctcagacgcgacaccggtgcaggag

SEQ ID NO: 4598077 - DNA, 25 bp, Homo sapien
agggcttcagtatggtgacctttcc

SEQ ID NO: 4598078 - DNA, 25 bp, Homo sapien
tggtttggcgctctctgcgaggccc

SEQ ID NO: 4598079 - DNA, 25 bp, Homo sapien
tgcgaggcccgcaaggctgcacttg

SEQ ID NO: 4598080 - DNA, 25 bp, Homo sapien
agagagatggctatgccggtccgcg

SEQ ID NO: 4598081 - DNA, 25 bp, Homo sapien
gtgtggagaggagcaagtttgaagg

SEQ ID NO: 4598082 - DNA, 25 bp, Homo sapien
gagaggagcaagtttgaagggaggg

SEQ ID NO: 4598083 - DNA, 25 bp, Homo sapien
tgtggagaggagcaagtttgaaggg

SEQ ID NO: 4598084 - DNA, 25 bp, Homo sapien
tggagaggagcaagtttgaagggag

SEQ ID NO: 4598085 - DNA, 25 bp, Homo sapien
gaggatctgcaaaggctgaagtgcg

SEQ ID NO: 4598086 - DNA, 25 bp, Homo sapien
tgaggatctgcaaaggctgaagtgc

SEQ ID NO: 4598087 - DNA, 25 bp, Homo sapien
aggatctgcaaaggctgaagtgcgg

SEQ ID NO: 4598088 - DNA, 25 bp, Homo sapien
ctgaggatctgcaaaggctgaagtg

SEQ ID NO: 4598089 - DNA, 25 bp, Homo sapien
tgaccaagaatttgacaacatttct

SEQ ID NO: 4598090 - DNA, 25 bp, Homo sapien
acagaccacacagcgcttatgtctc

SEQ ID NO: 4598091 - DNA, 25 bp, Homo sapien
agagaacagaccacacagcgcttat

SEQ ID NO: 4598092 - DNA, 25 bp, Homo sapien
tcccgtaaaagagaacagaccacac

SEQ ID NO: 4598093 - DNA, 25 bp, Homo sapien
ttcccgtaaaagagaacagaccaca

SEQ ID NO: 4598094 - DNA, 25 bp, Homo sapien
aagttcttgggagaagaactgtctt

SEQ ID NO: 4598095 - DNA, 25 bp, Homo sapien
gggagaagaactgtcttggaaccat

SEQ ID NO: 4598096 - DNA, 25 bp, Homo sapien
ttgggagaagaactgtcttggaacc

SEQ ID NO: 4598097 - DNA, 25 bp, Homo sapien
cggtaagttcttgggagaagaactg

SEQ ID NO: 4598098 - DNA, 25 bp, Homo sapien
cagttgttaattggagatcatgtcc

SEQ ID NO: 4598099 - DNA, 25 bp, Homo sapien
ccacgtctgccccagttgttaattg

SEQ ID NO: 4598100 - DNA, 25 bp, Homo sapien
ccccagttgttaattggagatcatg

SEQ ID NO: 4598101 - DNA, 25 bp, Homo sapien
cgtctgccccagttgttaattggag

SEQ ID NO: 4598102 - DNA, 25 bp, Homo sapien
gagagcttctgtagcctccttcctg

SEQ ID NO: 4598103 - DNA, 25 bp, Homo sapien
caccttgtgcgggagactactttga

SEQ ID NO: 4598104 - DNA, 25 bp, Homo sapien
taccgtcgatactcagagagcttct

SEQ ID NO: 4598105 - DNA, 25 bp, Homo sapien
cgtcccctgagctcaatgtgctgag

SEQ ID NO: 4598106 - DNA, 25 bp, Homo sapien
gccggcgcgccgaggcaaagggccg

SEQ ID NO: 4598107 - DNA, 25 bp, Homo sapien
gacgcgagcccacgcggtgcactgc

SEQ ID NO: 4598108 - DNA, 25 bp, Homo sapien
cccacgcggtgcactgcgccgacat

SEQ ID NO: 4598109 - DNA, 25 bp, Homo sapien
gccgggacgcgagcccacgcggtgc

SEQ ID NO: 4598110 - DNA, 25 bp, Homo sapien
ctgcggcccgcggggggtggcgctg

SEQ ID NO: 4598111 - DNA, 25 bp, Homo sapien
cggcccgcggggggtggcgctggcg

SEQ ID NO: 4598112 - DNA, 25 bp, Homo sapien
tgcggcccgcggggggtggcgctgg

SEQ ID NO: 4598113 - DNA, 25 bp, Homo sapien
cctgcggcccgcggggggtggcgct

SEQ ID NO: 4598114 - DNA, 25 bp, Homo sapien
tcccgggctgcatgcctgcgagcgc

SEQ ID NO: 4598115 - DNA, 25 bp, Homo sapien
cccgggagcgaacggccagtgcttc

SEQ ID NO: 4598116 - DNA, 25 bp, Homo sapien
ggccggctcagcagcggcccgggga

SEQ ID NO: 4598117 - DNA, 25 bp, Homo sapien
gccagcgctcgggagacaactgcag

SEQ ID NO: 4598118 - DNA, 25 bp, Homo sapien
cacgcacagattgcgagtggaatct

SEQ ID NO: 4598119 - DNA, 25 bp, Homo sapien
cggtaaccttcggtcagggtgtgct

SEQ ID NO: 4598120 - DNA, 25 bp, Homo sapien
gtgaaaagaccgtatcgcactccct

SEQ ID NO: 4598121 - DNA, 25 bp, Homo sapien
tagaattgtacataactcaggagtg

SEQ ID NO: 4598122 - DNA, 25 bp, Homo sapien
tgtttctcatcaggatcatttgtag

SEQ ID NO: 4598123 - DNA, 25 bp, Homo sapien
ttctcatcaggatcatttgtaggca

SEQ ID NO: 4598124 - DNA, 25 bp, Homo sapien
ttgtgtttctcatcaggatcatttg

SEQ ID NO: 4598125 - DNA, 25 bp, Homo sapien
catttgtgtttctcatcaggatcat

SEQ ID NO: 4598126 - DNA, 25 bp, Homo sapien
tgcagacaccggcagaactgctgcc

SEQ ID NO: 4598127 - DNA, 25 bp, Homo sapien
agcaatatagggcttgcagacaccg

SEQ ID NO: 4598128 - DNA, 25 bp, Homo sapien
gaagcaagggaacgaagcaatatag

SEQ ID NO: 4598129 - DNA, 25 bp, Homo sapien
tagggtgtcccggttgacctcatta

SEQ ID NO: 4598130 - DNA, 25 bp, Homo sapien
ggagtgtcctattaaggctggcagt

SEQ ID NO: 4598131 - DNA, 25 bp, Homo sapien
gagcatggggtccattggcagaggg

SEQ ID NO: 4598132 - DNA, 25 bp, Homo sapien
tattaaggctggcagttgagcatgg

SEQ ID NO: 4598133 - DNA, 25 bp, Homo sapien
cactcaggggagtgtcctattaagg

SEQ ID NO: 4598134 - DNA, 25 bp, Homo sapien
atgtaatctgattgttccgttgggt

SEQ ID NO: 4598135 - DNA, 25 bp, Homo sapien
aatctgattgttccgttgggtcatt

SEQ ID NO: 4598136 - DNA, 25 bp, Homo sapien
gtaatctgattgttccgttgggtca

SEQ ID NO: 4598137 - DNA, 25 bp, Homo sapien
tgtaatctgattgttccgttgggtc

SEQ ID NO: 4598138 - DNA, 25 bp, Homo sapien
gcctggctagtgcaagcgcccagga

SEQ ID NO: 4598139 - DNA, 25 bp, Homo sapien
ctggctagtgcaagcgcccaggatg

SEQ ID NO: 4598140 - DNA, 25 bp, Homo sapien
agggtagggcctggctagtgcaagc

SEQ ID NO: 4598141 - DNA, 25 bp, Homo sapien
tagtgcaagcgcccaggatggattt

SEQ ID NO: 4598142 - DNA, 25 bp, Homo sapien
tctaactggttaggtctcccacagc

SEQ ID NO: 4598143 - DNA, 25 bp, Homo sapien
caggctggctttccggatgcaacag

SEQ ID NO: 4598144 - DNA, 25 bp, Homo sapien
cacagcctgctctaactggttaggt

SEQ ID NO: 4598145 - DNA, 25 bp, Homo sapien
tcccacagcccaagaatctgggagg

SEQ ID NO: 4598146 - DNA, 25 bp, Homo sapien
gacagcaagaccctctactgcatgt

SEQ ID NO: 4598147 - DNA, 25 bp, Homo sapien
caggacagcaagaccctctactgca

SEQ ID NO: 4598148 - DNA, 25 bp, Homo sapien
tccaacaggacagcaagaccctcta

SEQ ID NO: 4598149 - DNA, 25 bp, Homo sapien
aagaccctctactgcatgtcgctgc

SEQ ID NO: 4598150 - DNA, 25 bp, Homo sapien
caaacatagctcccactttcacacc

SEQ ID NO: 4598151 - DNA, 25 bp, Homo sapien
caccccccgcccatggcttccagca

SEQ ID NO: 4598152 - DNA, 25 bp, Homo sapien
tgctggctctgctccacggctcctc

SEQ ID NO: 4598153 - DNA, 25 bp, Homo sapien
acatagctcccactttcacaccctg

SEQ ID NO: 4598154 - DNA, 25 bp, Homo sapien
cctcctggggtgtaagatagcctca

SEQ ID NO: 4598155 - DNA, 25 bp, Homo sapien
tggggccatcccattgttcgtattc

SEQ ID NO: 4598156 - DNA, 25 bp, Homo sapien
ggccatcccattgttcgtattccct

SEQ ID NO: 4598157 - DNA, 25 bp, Homo sapien
ctcatggaaactctctggggccatc

SEQ ID NO: 4598158 - DNA, 25 bp, Homo sapien
tacgttgatgtaagttctggcattc

SEQ ID NO: 4598159 - DNA, 25 bp, Homo sapien
gcttgccgttgatcaatgattgtgt

SEQ ID NO: 4598160 - DNA, 25 bp, Homo sapien
tttatgcctacgttgatgtaagttc

SEQ ID NO: 4598161 - DNA, 25 bp, Homo sapien
ctggcattcttgagcttgccgttga

SEQ ID NO: 4598162 - DNA, 25 bp, Homo sapien
gccctggcaagcaaggaattctaga

SEQ ID NO: 4598163 - DNA, 25 bp, Homo sapien
aatctggtaacgcagccagtgtggc

SEQ ID NO: 4598164 - DNA, 25 bp, Homo sapien
ttggagctgtatgggccactaaggc

SEQ ID NO: 4598165 - DNA, 25 bp, Homo sapien
tgctccccagaatctggtaacgcag

SEQ ID NO: 4598166 - DNA, 25 bp, Homo sapien
ccctgggtgtcggagccccctgtgt

SEQ ID NO: 4598167 - DNA, 25 bp, Homo sapien
tctggcctggaagacaggcccgctg

SEQ ID NO: 4598168 - DNA, 25 bp, Homo sapien
tctgcagagactggatctgggacct

SEQ ID NO: 4598169 - DNA, 25 bp, Homo sapien
gcccctccagcatgttggggccaca

SEQ ID NO: 4598170 - DNA, 25 bp, Homo sapien
atgctggcacctggatccttgtgga

SEQ ID NO: 4598171 - DNA, 25 bp, Homo sapien
catgacaaatgctggcacctggatc

SEQ ID NO: 4598172 - DNA, 25 bp, Homo sapien
ctggatccttgtggaagtcctcacc

SEQ ID NO: 4598173 - DNA, 25 bp, Homo sapien
gcacctggatccttgtggaagtcct

SEQ ID NO: 4598174 - DNA, 25 bp, Homo sapien
aaggagagactatctggctcagccc

SEQ ID NO: 4598175 - DNA, 25 bp, Homo sapien
aggagagactatctggctcagcccc

SEQ ID NO: 4598176 - DNA, 25 bp, Homo sapien
gagagactatctggctcagccccac

SEQ ID NO: 4598177 - DNA, 25 bp, Homo sapien
ggagagactatctggctcagcccca

SEQ ID NO: 4598178 - DNA, 25 bp, Homo sapien
ctgagaggcagacagcttacttcct

SEQ ID NO: 4598179 - DNA, 25 bp, Homo sapien
cctccctcccggatgtgatggaatg

SEQ ID NO: 4598180 - DNA, 25 bp, Homo sapien
agcctatggaggaacttgtagttaa

SEQ ID NO: 4598181 - DNA, 25 bp, Homo sapien
gctttggaaaccattaatcctggtg

SEQ ID NO: 4598182 - DNA, 25 bp, Homo sapien
taaaatgtgcagcttaacggggacg

SEQ ID NO: 4598183 - DNA, 25 bp, Homo sapien
aatgtgcagcttaacggggacgttt

SEQ ID NO: 4598184 - DNA, 25 bp, Homo sapien
ggccgtggggccttcagtccagcca

SEQ ID NO: 4598185 - DNA, 25 bp, Homo sapien
tgtgcagcttaacggggacgttttc

SEQ ID NO: 4598186 - DNA, 25 bp, Homo sapien
tgtctgggtgttttggctggtttgc

SEQ ID NO: 4598187 - DNA, 25 bp, Homo sapien
gtgagtaccaaactttcagtgctat

SEQ ID NO: 4598188 - DNA, 25 bp, Homo sapien
tgtgagtaccaaactttcagtgcta

SEQ ID NO: 4598189 - DNA, 25 bp, Homo sapien
gttttggctggtttgcttgctttct

SEQ ID NO: 4598190 - DNA, 25 bp, Homo sapien
ctccacttcccacaatcccttgcat

SEQ ID NO: 4598191 - DNA, 25 bp, Homo sapien
aaaaccttgtcccattgctccatga

SEQ ID NO: 4598192 - DNA, 25 bp, Homo sapien
tctgctcctggaaaggaacagcctg

SEQ ID NO: 4598193 - DNA, 25 bp, Homo sapien
gtctccagctgggtttctgccaaga

SEQ ID NO: 4598194 - DNA, 25 bp, Homo sapien
tgccaagagttttcttggcttgttc

SEQ ID NO: 4598195 - DNA, 25 bp, Homo sapien
tcatcactccttctactgtccgggt

SEQ ID NO: 4598196 - DNA, 25 bp, Homo sapien
gctacgaagagtgttgcctcctccc

SEQ ID NO: 4598197 - DNA, 25 bp, Homo sapien
tgcagtttctcatcactccttctac

SEQ ID NO: 4598198 - DNA, 25 bp, Homo sapien
tctctaaggaaccaatctgagtagg

SEQ ID NO: 4598199 - DNA, 25 bp, Homo sapien
ccgcagcagagttggtggttcactc

SEQ ID NO: 4598200 - DNA, 25 bp, Homo sapien
ttccctccgaggcacatacttgtaa

SEQ ID NO: 4598201 - DNA, 25 bp, Homo sapien
tggtggttcactcccagtgtccggt

SEQ ID NO: 4598202 - DNA, 25 bp, Homo sapien
catacttgtaaaggcctccaccaaa

SEQ ID NO: 4598203 - DNA, 25 bp, Homo sapien
gaaattttccgtcttcacgcttgtg

SEQ ID NO: 4598204 - DNA, 25 bp, Homo sapien
aatgagaaattttccgtcttcacgc

SEQ ID NO: 4598205 - DNA, 25 bp, Homo sapien
ttgtctgggaagatctatattgggg

SEQ ID NO: 4598206 - DNA, 25 bp, Homo sapien
gataatgtaatccataatgagaaat

SEQ ID NO: 4598207 - DNA, 25 bp, Homo sapien
agcatccacttcaccgcttcaactt

SEQ ID NO: 4598208 - DNA, 25 bp, Homo sapien
tcaccgcttcaacttttgtggctct

SEQ ID NO: 4598209 - DNA, 25 bp, Homo sapien
cacttcaccgcttcaacttttgtgg

SEQ ID NO: 4598210 - DNA, 25 bp, Homo sapien
gtagagtccaggcttcagagcaggc

SEQ ID NO: 4598211 - DNA, 25 bp, Homo sapien
tgaaggcttgttctcggtagcaccc

SEQ ID NO: 4598212 - DNA, 25 bp, Homo sapien
tgttctcggtagcacccagcctctt

SEQ ID NO: 4598213 - DNA, 25 bp, Homo sapien
tggttctctgcggaatcgagcttct

SEQ ID NO: 4598214 - DNA, 25 bp, Homo sapien
tgcggaatcgagcttctgctgaagg

SEQ ID NO: 4598215 - DNA, 25 bp, Homo sapien
ggcggggtgagggagcacccagttg

SEQ ID NO: 4598216 - DNA, 25 bp, Homo sapien
cggggtgagggagcacccagttgca

SEQ ID NO: 4598217 - DNA, 25 bp, Homo sapien
ctgggaggggcggggtgagggagca

SEQ ID NO: 4598218 - DNA, 25 bp, Homo sapien
gaggggcggggtgagggagcaccca

SEQ ID NO: 4598219 - DNA, 25 bp, Homo sapien
gaatctgcgatgagctttcgacctc

SEQ ID NO: 4598220 - DNA, 25 bp, Homo sapien
tctgcctgcagatgtagggagctgc

SEQ ID NO: 4598221 - DNA, 25 bp, Homo sapien
gcctcagtagcgagtgatgctccat

SEQ ID NO: 4598222 - DNA, 25 bp, Homo sapien
gcttctgtgcaggattgagcccaaa

SEQ ID NO: 4598223 - DNA, 25 bp, Homo sapien
tcacatggcttgataggaccaccag

SEQ ID NO: 4598224 - DNA, 25 bp, Homo sapien
catggcttgataggaccaccagttc

SEQ ID NO: 4598225 - DNA, 25 bp, Homo sapien
tcatggctggtctgccccttggggt

SEQ ID NO: 4598226 - DNA, 25 bp, Homo sapien
gcttgataggaccaccagttcacct

SEQ ID NO: 4598227 - DNA, 25 bp, Homo sapien
tcagtgtctaatgaatggcaggtgt

SEQ ID NO: 4598228 - DNA, 25 bp, Homo sapien
aggacggccctaccagattcagtgt

SEQ ID NO: 4598229 - DNA, 25 bp, Homo sapien
tttcctgtggcaaatcctgattcac

SEQ ID NO: 4598230 - DNA, 25 bp, Homo sapien
tgccctcaggaaagcggtttagtgg

SEQ ID NO: 4598231 - DNA, 25 bp, Homo sapien
ttccaataaaatgcagtcagggcag

SEQ ID NO: 4598232 - DNA, 25 bp, Homo sapien
aaatttccaataaaatgcagtcagg

SEQ ID NO: 4598233 - DNA, 25 bp, Homo sapien
aataaaatgcagtcagggcagtgag

SEQ ID NO: 4598234 - DNA, 25 bp, Homo sapien
ctgaaatttccaataaaatgcagtc

SEQ ID NO: 4598235 - DNA, 25 bp, Homo sapien
atcaaagccaaggactttttcccag

SEQ ID NO: 4598236 - DNA, 25 bp, Homo sapien
cttgtggatcaaagccaaggacttt

SEQ ID NO: 4598237 - DNA, 25 bp, Homo sapien
tggatcaaagccaaggactttttcc

SEQ ID NO: 4598238 - DNA, 25 bp, Homo sapien
ttgtggatcaaagccaaggactttt

SEQ ID NO: 4598239 - DNA, 25 bp, Homo sapien
tctgcgcttgaagtgaagggcatca

SEQ ID NO: 4598240 - DNA, 25 bp, Homo sapien
ttcggttctcgggatctcagctgga

SEQ ID NO: 4598241 - DNA, 25 bp, Homo sapien
cccggaagtgtgaggttgcaacaaa

SEQ ID NO: 4598242 - DNA, 25 bp, Homo sapien
tctgctgctgaacgatatcaaccct

SEQ ID NO: 4598243 - DNA, 25 bp, Homo sapien
ggaaatggctcccaaccctctctgc

SEQ ID NO: 4598244 - DNA, 25 bp, Homo sapien
agggagccaggtggtgtgtcttcag

SEQ ID NO: 4598245 - DNA, 25 bp, Homo sapien
ccaggtggtgtgtcttcagggaaat

SEQ ID NO: 4598246 - DNA, 25 bp, Homo sapien
cttcagggaaatggctcccaaccct

SEQ ID NO: 4598247 - DNA, 25 bp, Homo sapien
tgccatgcacaggacatgcacggat

SEQ ID NO: 4598248 - DNA, 25 bp, Homo sapien
aggacatgcacggatcatgcacccc

SEQ ID NO: 4598249 - DNA, 25 bp, Homo sapien
ctagccatagctcaggtctggcttt

SEQ ID NO: 4598250 - DNA, 25 bp, Homo sapien
acggatcatgcacccctagccatag

SEQ ID NO: 4598251 - DNA, 25 bp, Homo sapien
catttctacacctcttctgggtgtc

SEQ ID NO: 4598252 - DNA, 25 bp, Homo sapien
acatttctacacctcttctgggtgt

SEQ ID NO: 4598253 - DNA, 25 bp, Homo sapien
tcccgagaggggacatttctacacc

SEQ ID NO: 4598254 - DNA, 25 bp, Homo sapien
gacatttctacacctcttctgggtg

SEQ ID NO: 4598255 - DNA, 25 bp, Homo sapien
ttcggcattccaacttggcctgaga

SEQ ID NO: 4598256 - DNA, 25 bp, Homo sapien
tccttgaatggttcggcattccaac

SEQ ID NO: 4598257 - DNA, 25 bp, Homo sapien
ttggctggtgttccttgaatggttc

SEQ ID NO: 4598258 - DNA, 25 bp, Homo sapien
aatggttcggcattccaacttggcc

SEQ ID NO: 4598259 - DNA, 25 bp, Homo sapien
gaaatctgtcgggaccactccctct

SEQ ID NO: 4598260 - DNA, 25 bp, Homo sapien
tggctgcacgggacactgaaatctg

SEQ ID NO: 4598261 - DNA, 25 bp, Homo sapien
ggcacagtcctcagcgggagctcca

SEQ ID NO: 4598262 - DNA, 25 bp, Homo sapien
aaaccacagacaatacctctggctg

SEQ ID NO: 4598263 - DNA, 25 bp, Homo sapien
ctattcagaaagcaaccctgcttta

SEQ ID NO: 4598264 - DNA, 25 bp, Homo sapien
caaatctgacccattgaggcgggct

SEQ ID NO: 4598265 - DNA, 25 bp, Homo sapien
gagcttctagcagccctgttgtgca

SEQ ID NO: 4598266 - DNA, 25 bp, Homo sapien
tgagctccaagtgcctggtggctga

SEQ ID NO: 4598267 - DNA, 25 bp, Homo sapien
caggctggctgattgccaaggagat

SEQ ID NO: 4598268 - DNA, 25 bp, Homo sapien
tttttgagttgttaatcttgtcctg

SEQ ID NO: 4598269 - DNA, 25 bp, Homo sapien
aggagagggccatgatctttttgag

SEQ ID NO: 4598270 - DNA, 25 bp, Homo sapien
tttgagttgttaatcttgtcctgtc

SEQ ID NO: 4598271 - DNA, 25 bp, Homo sapien
ggccatgatctttttgagttgttaa

SEQ ID NO: 4598272 - DNA, 25 bp, Homo sapien
gccctgggcctgttctggtgagcct

SEQ ID NO: 4598273 - DNA, 25 bp, Homo sapien
gcccgggaatgtgcggtggtcttcc

SEQ ID NO: 4598274 - DNA, 25 bp, Homo sapien
gcttgtgtgcaggtctaggctttct

SEQ ID NO: 4598275 - DNA, 25 bp, Homo sapien
cctgttctggtgagcctgaggcccg

SEQ ID NO: 4598276 - DNA, 25 bp, Homo sapien
cacttttctaggtgccagagggcac

SEQ ID NO: 4598277 - DNA, 25 bp, Homo sapien
catggccagtgtatgctgggcactt

SEQ ID NO: 4598278 - DNA, 25 bp, Homo sapien
gtgtatgctgggcacttttctaggt

SEQ ID NO: 4598279 - DNA, 25 bp, Homo sapien
ctatttgctgcatggccagtgtatg

SEQ ID NO: 4598280 - DNA, 25 bp, Homo sapien
tgggttctcttcttgcgccgagtgg

SEQ ID NO: 4598281 - DNA, 25 bp, Homo sapien
cattcccattgtaaggaggctcctc

SEQ ID NO: 4598282 - DNA, 25 bp, Homo sapien
tctctatgctggagggtactgtctg

SEQ ID NO: 4598283 - DNA, 25 bp, Homo sapien
tggttgtgcaggtcttgatggcttc

SEQ ID NO: 4598284 - DNA, 25 bp, Homo sapien
ctgaggacaaataggtcagaagcat

SEQ ID NO: 4598285 - DNA, 25 bp, Homo sapien
agcattgagtcttccagcgctgagg

SEQ ID NO: 4598286 - DNA, 25 bp, Homo sapien
ggttagattgattgtctaatctggt

SEQ ID NO: 4598287 - DNA, 25 bp, Homo sapien
gattgtctaatctggttgtcatggg

SEQ ID NO: 4598288 - DNA, 25 bp, Homo sapien
gttcacagcagcatacgtgtacctg

SEQ ID NO: 4598289 - DNA, 25 bp, Homo sapien
atgggacacgtccttttctggatcc

SEQ ID NO: 4598290 - DNA, 25 bp, Homo sapien
cagggacttgctactcttcataaca

SEQ ID NO: 4598291 - DNA, 25 bp, Homo sapien
cataacatctcctgtgttcacagca

SEQ ID NO: 4598292 - DNA, 25 bp, Homo sapien
ttggaaaggtcaagccacctgctca

SEQ ID NO: 4598293 - DNA, 25 bp, Homo sapien
cgatgcctggccgaagtaggtattt

SEQ ID NO: 4598294 - DNA, 25 bp, Homo sapien
gctcaaggctaggtgtctctaaacc

SEQ ID NO: 4598295 - DNA, 25 bp, Homo sapien
cagtgtagtcacgtaggactccaca

SEQ ID NO: 4598296 - DNA, 25 bp, Homo sapien
tgaaggaggcgcgttacaaacaacg

SEQ ID NO: 4598297 - DNA, 25 bp, Homo sapien
gaaagcctttccacctgggcgtgtg

SEQ ID NO: 4598298 - DNA, 25 bp, Homo sapien
gccggctaacgccagcagctgttgt

SEQ ID NO: 4598299 - DNA, 25 bp, Homo sapien
tccaacctccggttgacacagagat

SEQ ID NO: 4598300 - DNA, 25 bp, Homo sapien
agaggttcctgtaaggcttccagtt

SEQ ID NO: 4598301 - DNA, 25 bp, Homo sapien
tgagaggttcctgtaaggcttccag

SEQ ID NO: 4598302 - DNA, 25 bp, Homo sapien
tgaatattgagaggttcctgtaagg

SEQ ID NO: 4598303 - DNA, 25 bp, Homo sapien
atattgagaggttcctgtaaggctt

SEQ ID NO: 4598304 - DNA, 25 bp, Homo sapien
atgatcatgacggaactcggcagcg

SEQ ID NO: 4598305 - DNA, 25 bp, Homo sapien
tctgcctcactcttgttccgttcag

SEQ ID NO: 4598306 - DNA, 25 bp, Homo sapien
gccacatgatcatgacggaactcgg

SEQ ID NO: 4598307 - DNA, 25 bp, Homo sapien
catgacggaactcggcagcgagaca

SEQ ID NO: 4598308 - DNA, 25 bp, Homo sapien
ttcatcaaggcccaaggccttcaga

SEQ ID NO: 4598309 - DNA, 25 bp, Homo sapien
gtacttggcaggcttgcttcctgcc

SEQ ID NO: 4598310 - DNA, 25 bp, Homo sapien
gttgagcccgagaacagtacttggc

SEQ ID NO: 4598311 - DNA, 25 bp, Homo sapien
cagaaagtactgaggcgctgggctt

SEQ ID NO: 4598312 - DNA, 25 bp, Homo sapien
tctgggacttcttagtggtagcacc

SEQ ID NO: 4598313 - DNA, 25 bp, Homo sapien
tggtggcaggcctttgttatctagc

SEQ ID NO: 4598314 - DNA, 25 bp, Homo sapien
ttgttatctagctgtcacagtactg

SEQ ID NO: 4598315 - DNA, 25 bp, Homo sapien
ggctcatcctgagtggatgcccttg

SEQ ID NO: 4598316 - DNA, 25 bp, Homo sapien
aaactgtcctctaattggtatagaa

SEQ ID NO: 4598317 - DNA, 25 bp, Homo sapien
gaaactgtcctctaattggtataga

SEQ ID NO: 4598318 - DNA, 25 bp, Homo sapien
gtgactgtagcaattctgcctcctg

SEQ ID NO: 4598319 - DNA, 25 bp, Homo sapien
gactgtagcaattctgcctcctgtt

SEQ ID NO: 4598320 - DNA, 25 bp, Homo sapien
ctgtagcaattctgcctcctgttga

SEQ ID NO: 4598321 - DNA, 25 bp, Homo sapien
tagtgactgtagcaattctgcctcc

SEQ ID NO: 4598322 - DNA, 25 bp, Homo sapien
ttatcgtatccaaaagcatctcagg

SEQ ID NO: 4598323 - DNA, 25 bp, Homo sapien
tcactcgaatcctattaacgtcctc

SEQ ID NO: 4598324 - DNA, 25 bp, Homo sapien
gactctgcgtcctcaaacatactgt

SEQ ID NO: 4598325 - DNA, 25 bp, Homo sapien
gactggtgggattatcgtatccaaa

SEQ ID NO: 4598326 - DNA, 25 bp, Homo sapien
tttccaagccgccttccagtaagac

SEQ ID NO: 4598327 - DNA, 25 bp, Homo sapien
ctttaccgaaagcatcttgcagtca

SEQ ID NO: 4598328 - DNA, 25 bp, Homo sapien
taccgaaagcatcttgcagtcatcc

SEQ ID NO: 4598329 - DNA, 25 bp, Homo sapien
ccagtaagactcacaatggaaggtc

SEQ ID NO: 4598330 - DNA, 25 bp, Homo sapien
ggattccagtgagcaaatagccccg

SEQ ID NO: 4598331 - DNA, 25 bp, Homo sapien
acccattagctttctcccggtgaag

SEQ ID NO: 4598332 - DNA, 25 bp, Homo sapien
ccacaggcatgcatagcaggaactg

SEQ ID NO: 4598333 - DNA, 25 bp, Homo sapien
gaagctcaggtctaactgtgacact

SEQ ID NO: 4598334 - DNA, 25 bp, Homo sapien
ctagcaaggttaaaatcatctgttc

SEQ ID NO: 4598335 - DNA, 25 bp, Homo sapien
tcaccctctaggctgtggtctgggt

SEQ ID NO: 4598336 - DNA, 25 bp, Homo sapien
ggttaaaatcatctgttctgccaat

SEQ ID NO: 4598337 - DNA, 25 bp, Homo sapien
ctctgctcaccctctaggctgtggt

SEQ ID NO: 4598338 - DNA, 25 bp, Homo sapien
tgctcgtttgaggtaaccaccccat

SEQ ID NO: 4598339 - DNA, 25 bp, Homo sapien
tgctcatgacctttccagcagtaag

SEQ ID NO: 4598340 - DNA, 25 bp, Homo sapien
ccttgggtgctttgcttgtgtgtgc

SEQ ID NO: 4598341 - DNA, 25 bp, Homo sapien
taatgtatgactcctgcgttgccgt

SEQ ID NO: 4598342 - DNA, 25 bp, Homo sapien
ccagcgtcagtgagtggcttgccat

SEQ ID NO: 4598343 - DNA, 25 bp, Homo sapien
ggtattgccccatgaagagaggctg

SEQ ID NO: 4598344 - DNA, 25 bp, Homo sapien
gatactttatggcatcacagtgcga

SEQ ID NO: 4598345 - DNA, 25 bp, Homo sapien
ccaaatggtagctgagcaggctagt

SEQ ID NO: 4598346 - DNA, 25 bp, Homo sapien
acgctgcatcctttgataaaagcag

SEQ ID NO: 4598347 - DNA, 25 bp, Homo sapien
cacgctgcatcctttgataaaagca

SEQ ID NO: 4598348 - DNA, 25 bp, Homo sapien
tcacgctgcatcctttgataaaagc

SEQ ID NO: 4598349 - DNA, 25 bp, Homo sapien
ctgtggcactaggccacaaagggct

SEQ ID NO: 4598350 - DNA, 25 bp, Homo sapien
tgtggcactaggccacaaagggcta

SEQ ID NO: 4598351 - DNA, 25 bp, Homo sapien
tttgttctggtcacacccaagcggt

SEQ ID NO: 4598352 - DNA, 25 bp, Homo sapien
caggttagctctgttacagcagtca

SEQ ID NO: 4598353 - DNA, 25 bp, Homo sapien
ctagctggcccttcttcatcttcgc

SEQ ID NO: 4598354 - DNA, 25 bp, Homo sapien
tcatcttcgctgaaatggcattcca

SEQ ID NO: 4598355 - DNA, 25 bp, Homo sapien
ctgaaaagagggtagtgggcctctt

SEQ ID NO: 4598356 - DNA, 25 bp, Homo sapien
ggtagtgggcctcttcaccagagtg

SEQ ID NO: 4598357 - DNA, 25 bp, Homo sapien
gcagttactacatcctatgctgatg

SEQ ID NO: 4598358 - DNA, 25 bp, Homo sapien
gaagtgagtggattgaacagctgaa

SEQ ID NO: 4598359 - DNA, 25 bp, Homo sapien
ggagattggcataagcctttgggtt

SEQ ID NO: 4598360 - DNA, 25 bp, Homo sapien
tagcaccaactttaatgaacgggct

SEQ ID NO: 4598361 - DNA, 25 bp, Homo sapien
caggagagagccaactttcgaattt

SEQ ID NO: 4598362 - DNA, 25 bp, Homo sapien
ttggcataagcctttgggttcactg

SEQ ID NO: 4598363 - DNA, 25 bp, Homo sapien
ggatggcagtgtccgattgtacatg

SEQ ID NO: 4598364 - DNA, 25 bp, Homo sapien
caacgcgtctttctttgaatgctgg

SEQ ID NO: 4598365 - DNA, 25 bp, Homo sapien
catgaggcttctccctaagtgcttt

SEQ ID NO: 4598366 - DNA, 25 bp, Homo sapien
tcttttggtgccaacgcgtctttct

SEQ ID NO: 4598367 - DNA, 25 bp, Homo sapien
gcatgagggtacagtggctgctcct

SEQ ID NO: 4598368 - DNA, 25 bp, Homo sapien
catggtggagtaccttcgtggcata

SEQ ID NO: 4598369 - DNA, 25 bp, Homo sapien
tgaacccacttacagtgcatgaggg

SEQ ID NO: 4598370 - DNA, 25 bp, Homo sapien
taaggagctctgaggccttagaccc

SEQ ID NO: 4598371 - DNA, 25 bp, Homo sapien
cattcctggtttacgcttcttaata

SEQ ID NO: 4598372 - DNA, 25 bp, Homo sapien
gagaatacccagtgtgacagcgctg

SEQ ID NO: 4598373 - DNA, 25 bp, Homo sapien
taaaattctaggaacgctccatctg

SEQ ID NO: 4598374 - DNA, 25 bp, Homo sapien
gcacagaggcccacgtgtggtacca

SEQ ID NO: 4598375 - DNA, 25 bp, Homo sapien
tgtgagaggaccacaaaggaagccc

SEQ ID NO: 4598376 - DNA, 25 bp, Homo sapien
gaaagtccgtttcatcatggctgac

SEQ ID NO: 4598377 - DNA, 25 bp, Homo sapien
tgaagaggcgcacattggagtgttc

SEQ ID NO: 4598378 - DNA, 25 bp, Homo sapien
tccagcatgcatttgggctccttca

SEQ ID NO: 4598379 - DNA, 25 bp, Homo sapien
tcagacgcagaggtggaagcactta

SEQ ID NO: 4598380 - DNA, 25 bp, Homo sapien
aagaaccccggatgacaccaatgct

SEQ ID NO: 4598381 - DNA, 25 bp, Homo sapien
gacaccaatgcttcgtcagacgcag

SEQ ID NO: 4598382 - DNA, 25 bp, Homo sapien
caacgctagcctgctcatgacaaga

SEQ ID NO: 4598383 - DNA, 25 bp, Homo sapien
ttggttcgctgcacccgtcaacttg

SEQ ID NO: 4598384 - DNA, 25 bp, Homo sapien
tcgctgcacccgtcaacttgtcatt

SEQ ID NO: 4598385 - DNA, 25 bp, Homo sapien
ggttcgctgcacccgtcaacttgtc

SEQ ID NO: 4598386 - DNA, 25 bp, Homo sapien
gttggttcgctgcacccgtcaactt

SEQ ID NO: 4598387 - DNA, 25 bp, Homo sapien
tcagttagccacagaaagtccattt

SEQ ID NO: 4598388 - DNA, 25 bp, Homo sapien
ccattttgtctgtaggcgggcggac

SEQ ID NO: 4598389 - DNA, 25 bp, Homo sapien
taaaactgagccgtgattggccagg

SEQ ID NO: 4598390 - DNA, 25 bp, Homo sapien
caatcaggtctgtctatgcaatgga

SEQ ID NO: 4598391 - DNA, 25 bp, Homo sapien
taatggaatttgttactgttagctc

SEQ ID NO: 4598392 - DNA, 25 bp, Homo sapien
tgtactctatgcaaccggccacaaa

SEQ ID NO: 4598393 - DNA, 25 bp, Homo sapien
ttttgtggagcctttccataatgga

SEQ ID NO: 4598394 - DNA, 25 bp, Homo sapien
tgagtcctaatttgcccttttgtgg

SEQ ID NO: 4598395 - DNA, 25 bp, Homo sapien
taacttgtgcttatagcgtggaaaa

SEQ ID NO: 4598396 - DNA, 25 bp, Homo sapien
aaacagcatacttgaatgggggagg

SEQ ID NO: 4598397 - DNA, 25 bp, Homo sapien
gtgcttatagcgtggaaaatcttac

SEQ ID NO: 4598398 - DNA, 25 bp, Homo sapien
ccctttgttccttcgctaacttgtg

SEQ ID NO: 4598399 - DNA, 25 bp, Homo sapien
agaaatctttgctacatcagttttc

SEQ ID NO: 4598400 - DNA, 25 bp, Homo sapien
tttccagattgcaaaacagacagct

SEQ ID NO: 4598401 - DNA, 25 bp, Homo sapien
aacagacagcttgctaaggctcagg

SEQ ID NO: 4598402 - DNA, 25 bp, Homo sapien
aaggctcaggtgcttttcatgagaa

SEQ ID NO: 4598403 - DNA, 25 bp, Homo sapien
catatcaagggttagtcatctccgg

SEQ ID NO: 4598404 - DNA, 25 bp, Homo sapien
tcttagttctgtgagtggtacccac

SEQ ID NO: 4598405 - DNA, 25 bp, Homo sapien
gaagaatagcctcgtgccctggtaa

SEQ ID NO: 4598406 - DNA, 25 bp, Homo sapien
catctccgggtaagctgtctgaaaa

SEQ ID NO: 4598407 - DNA, 25 bp, Homo sapien
cattgtgactgatggctgcatgtgg

SEQ ID NO: 4598408 - DNA, 25 bp, Homo sapien
aagagcagcttgtaaggctttgtcc

SEQ ID NO: 4598409 - DNA, 25 bp, Homo sapien
tcattgtgactgatggctgcatgtg

SEQ ID NO: 4598410 - DNA, 25 bp, Homo sapien
gtaaggctttgtcccatgttcaggg

SEQ ID NO: 4598411 - DNA, 25 bp, Homo sapien
tccacgttggaagaaacgcccatgg

SEQ ID NO: 4598412 - DNA, 25 bp, Homo sapien
tgcatgtgtcatcaggtccttaggg

SEQ ID NO: 4598413 - DNA, 25 bp, Homo sapien
cattagagcaaatcacgccagtgga

SEQ ID NO: 4598414 - DNA, 25 bp, Homo sapien
aaaatgactcagagaaagaccccgg

SEQ ID NO: 4598415 - DNA, 25 bp, Homo sapien
gggtaggagcagcttgttcacaagc

SEQ ID NO: 4598416 - DNA, 25 bp, Homo sapien
cctgagacgctctggcaggtgacag

SEQ ID NO: 4598417 - DNA, 25 bp, Homo sapien
gatatggcttgaatagtgttctcac

SEQ ID NO: 4598418 - DNA, 25 bp, Homo sapien
tgtagtctggagtggctagagcatc

SEQ ID NO: 4598419 - DNA, 25 bp, Homo sapien
ggccctgtctccctctccaagcccc

SEQ ID NO: 4598420 - DNA, 25 bp, Homo sapien
gccctgtctccctctccaagcccct

SEQ ID NO: 4598421 - DNA, 25 bp, Homo sapien
ccctgtctccctctccaagcccctc

SEQ ID NO: 4598422 - DNA, 25 bp, Homo sapien
ctggccctgtctccctctccaagcc

SEQ ID NO: 4598423 - DNA, 25 bp, Homo sapien
ccctgcaacggtgtaggctcgaggc

SEQ ID NO: 4598424 - DNA, 25 bp, Homo sapien
cagtcagccctgcaacggtgtaggc

SEQ ID NO: 4598425 - DNA, 25 bp, Homo sapien
cacacagaggcagtcagccctgcaa

SEQ ID NO: 4598426 - DNA, 25 bp, Homo sapien
tgcaacggtgtaggctcgaggccat

SEQ ID NO: 4598427 - DNA, 25 bp, Homo sapien
gaagacactggcacgtgctatcctg

SEQ ID NO: 4598428 - DNA, 25 bp, Homo sapien
tatggtttggccacccattacagat

SEQ ID NO: 4598429 - DNA, 25 bp, Homo sapien
acgatccggtaaacgtaatctgtag

SEQ ID NO: 4598430 - DNA, 25 bp, Homo sapien
ggagggaacaccatcccctgttgct

SEQ ID NO: 4598431 - DNA, 25 bp, Homo sapien
agtgaatctggttagccggaagctc

SEQ ID NO: 4598432 - DNA, 25 bp, Homo sapien
ctcttgtccaattcgtaactttcgg

SEQ ID NO: 4598433 - DNA, 25 bp, Homo sapien
tagccggaagctcttgtccaattcg

SEQ ID NO: 4598434 - DNA, 25 bp, Homo sapien
gggttaaaggactcacgcgtagaca

SEQ ID NO: 4598435 - DNA, 25 bp, Homo sapien
tgaaggtagcaagacgaacagggtt

SEQ ID NO: 4598436 - DNA, 25 bp, Homo sapien
ttcaagggcatcagctacacagtag

SEQ ID NO: 4598437 - DNA, 25 bp, Homo sapien
ccagtgctgtgtttggatggatccc

SEQ ID NO: 4598438 - DNA, 25 bp, Homo sapien
tgctaccattgtggccacttcaagg

SEQ ID NO: 4598439 - DNA, 25 bp, Homo sapien
cgaaagagacccgaactcgtggcct

SEQ ID NO: 4598440 - DNA, 25 bp, Homo sapien
gaactcgtggcctcttctttacatg

SEQ ID NO: 4598441 - DNA, 25 bp, Homo sapien
gagacccgaactcgtggcctcttct

SEQ ID NO: 4598442 - DNA, 25 bp, Homo sapien
cttccgaaagagacccgaactcgtg

SEQ ID NO: 4598443 - DNA, 25 bp, Homo sapien
ggtggtggatcaacaattggtgtct

SEQ ID NO: 4598444 - DNA, 25 bp, Homo sapien
agggactgccgtgaacaagttttgg

SEQ ID NO: 4598445 - DNA, 25 bp, Homo sapien
aagggactgccgtgaacaagttttg

SEQ ID NO: 4598446 - DNA, 25 bp, Homo sapien
caattggtgtctctgaaacctctca

SEQ ID NO: 4598447 - DNA, 25 bp, Homo sapien
caggaggcttttagtaaaagtgcca

SEQ ID NO: 4598448 - DNA, 25 bp, Homo sapien
tgataccatcgcacaccaggtctgg

SEQ ID NO: 4598449 - DNA, 25 bp, Homo sapien
tcagtcacagcgcaggagggacagg

SEQ ID NO: 4598450 - DNA, 25 bp, Homo sapien
tttagtaaaagtgccagtcaccagg

SEQ ID NO: 4598451 - DNA, 25 bp, Homo sapien
agttctgtgtttctcgtagggcaga

SEQ ID NO: 4598452 - DNA, 25 bp, Homo sapien
tcttttaagaacataaagttctgtg

SEQ ID NO: 4598453 - DNA, 25 bp, Homo sapien
tctgtgtttctcgtagggcagaaga

SEQ ID NO: 4598454 - DNA, 25 bp, Homo sapien
tatcttttaagaacataaagttctg

SEQ ID NO: 4598455 - DNA, 25 bp, Homo sapien
gcaattggttactgacagcatgttg

SEQ ID NO: 4598456 - DNA, 25 bp, Homo sapien
ccagcaattggttactgacagcatg

SEQ ID NO: 4598457 - DNA, 25 bp, Homo sapien
tggttactgacagcatgttgtagcc

SEQ ID NO: 4598458 - DNA, 25 bp, Homo sapien
tcaccagcaattggttactgacagc

SEQ ID NO: 4598459 - DNA, 25 bp, Homo sapien
gaaggctctgcgctagagcactgga

SEQ ID NO: 4598460 - DNA, 25 bp, Homo sapien
cgctgtctattagtgctgggaacaa

SEQ ID NO: 4598461 - DNA, 25 bp, Homo sapien
gaagaggctccgctgtctattagtg

SEQ ID NO: 4598462 - DNA, 25 bp, Homo sapien
gaagctccggtaggaatgctgactg

SEQ ID NO: 4598463 - DNA, 25 bp, Homo sapien
cagcgaaagtcatggatccagggat

SEQ ID NO: 4598464 - DNA, 25 bp, Homo sapien
ctagagagaaggcacagcgcagcga

SEQ ID NO: 4598465 - DNA, 25 bp, Homo sapien
cagcgcagcgaaagtcatggatcca

SEQ ID NO: 4598466 - DNA, 25 bp, Homo sapien
gaaggcacagcgcagcgaaagtcat

SEQ ID NO: 4598467 - DNA, 25 bp, Homo sapien
ccagacatgtctgtgagaagtcctt

SEQ ID NO: 4598468 - DNA, 25 bp, Homo sapien
actcctactgtaatctgtttccaga

SEQ ID NO: 4598469 - DNA, 25 bp, Homo sapien
atgtctgtgagaagtccttaactcc

SEQ ID NO: 4598470 - DNA, 25 bp, Homo sapien
cctactgtaatctgtttccagagga

SEQ ID NO: 4598471 - DNA, 25 bp, Homo sapien
ttgcccaaggaacaagaacctggat

SEQ ID NO: 4598472 - DNA, 25 bp, Homo sapien
taaacattgggtcgaccatcgcctc

SEQ ID NO: 4598473 - DNA, 25 bp, Homo sapien
tctgaagagttctggaggtaccttg

SEQ ID NO: 4598474 - DNA, 25 bp, Homo sapien
ccatcgcctccaggtctgatgagca

SEQ ID NO: 4598475 - DNA, 25 bp, Homo sapien
agcaccttatatggcggctgctgag

SEQ ID NO: 4598476 - DNA, 25 bp, Homo sapien
taaggtagcaccttatatggcggct

SEQ ID NO: 4598477 - DNA, 25 bp, Homo sapien
tgcagatcataagcgcctggtaagg

SEQ ID NO: 4598478 - DNA, 25 bp, Homo sapien
ttttgcagatcataagcgcctggta

SEQ ID NO: 4598479 - DNA, 25 bp, Homo sapien
atggtgcagcagtgatataaacagt

SEQ ID NO: 4598480 - DNA, 25 bp, Homo sapien
caccaaaacggtgccagctgcttct

SEQ ID NO: 4598481 - DNA, 25 bp, Homo sapien
caatgtcccaggtatcatgggacct

SEQ ID NO: 4598482 - DNA, 25 bp, Homo sapien
tatgcgatgactgctttccaccaaa

SEQ ID NO: 4598483 - DNA, 25 bp, Homo sapien
cagtaggttgtatgaactggtacag

SEQ ID NO: 4598484 - DNA, 25 bp, Homo sapien
tgttcagtaggttgtatgaactggt

SEQ ID NO: 4598485 - DNA, 25 bp, Homo sapien
gtatgaactggtacagataaaatga

SEQ ID NO: 4598486 - DNA, 25 bp, Homo sapien
ggttgtatgaactggtacagataaa

SEQ ID NO: 4598487 - DNA, 25 bp, Homo sapien
tcacctgaacctgaacccacactga

SEQ ID NO: 4598488 - DNA, 25 bp, Homo sapien
ttcacctgaacctgaacccacactg

SEQ ID NO: 4598489 - DNA, 25 bp, Homo sapien
cacctgaacctgaacccacactgaa

SEQ ID NO: 4598490 - DNA, 25 bp, Homo sapien
tcttcacctgaacctgaacccacac

SEQ ID NO: 4598491 - DNA, 25 bp, Homo sapien
ttgatattgtaatagatatgaaagg

SEQ ID NO: 4598492 - DNA, 25 bp, Homo sapien
tattgtaatagatatgaaaggcaca

SEQ ID NO: 4598493 - DNA, 25 bp, Homo sapien
attgtaatagatatgaaaggcacac

SEQ ID NO: 4598494 - DNA, 25 bp, Homo sapien
gatattgtaatagatatgaaaggca

SEQ ID NO: 4598495 - DNA, 25 bp, Homo sapien
cctgctgaacggctgataactgatg

SEQ ID NO: 4598496 - DNA, 25 bp, Homo sapien
tgagaaatatttggctctgcaggac

SEQ ID NO: 4598497 - DNA, 25 bp, Homo sapien
gaagctctgatagtcccaaaacctg

SEQ ID NO: 4598498 - DNA, 25 bp, Homo sapien
tgagagcactgtaatttccttggca

SEQ ID NO: 4598499 - DNA, 25 bp, Homo sapien
gatatgccggccattctccagtctt

SEQ ID NO: 4598500 - DNA, 25 bp, Homo sapien
tgaaccgctgggagcaggtctgctt

SEQ ID NO: 4598501 - DNA, 25 bp, Homo sapien
acacagcctggatgtgatatgccgg

SEQ ID NO: 4598502 - DNA, 25 bp, Homo sapien
tctccagtcttcgtgtgaaccgctg

SEQ ID NO: 4598503 - DNA, 25 bp, Homo sapien
gtgccggccattgtgtcagctgcag

SEQ ID NO: 4598504 - DNA, 25 bp, Homo sapien
agctgcagatgtatccctttcaata

SEQ ID NO: 4598505 - DNA, 25 bp, Homo sapien
ccggccattgtgtcagctgcagatg

SEQ ID NO: 4598506 - DNA, 25 bp, Homo sapien
atccctttcaatagggggctgagag

SEQ ID NO: 4598507 - DNA, 25 bp, Homo sapien
tttggctcgtgaaggccacattctt

SEQ ID NO: 4598508 - DNA, 25 bp, Homo sapien
aattattgcggttggtgagctttcc

SEQ ID NO: 4598509 - DNA, 25 bp, Homo sapien
taaccctgtaatttggctcgtgaag

SEQ ID NO: 4598510 - DNA, 25 bp, Homo sapien
ttcttctttggagtacaagccactg

SEQ ID NO: 4598511 - DNA, 25 bp, Homo sapien
aagctacatgacactcatgctgtac

SEQ ID NO: 4598512 - DNA, 25 bp, Homo sapien
gctttcatgggagtttcatgactac

SEQ ID NO: 4598513 - DNA, 25 bp, Homo sapien
gctacatgacactcatgctgtacat

SEQ ID NO: 4598514 - DNA, 25 bp, Homo sapien
agggcagtttttacacctgctttca

SEQ ID NO: 4598515 - DNA, 25 bp, Homo sapien
ccacggcaggtactgtggcagatag

SEQ ID NO: 4598516 - DNA, 25 bp, Homo sapien
gatgagagaacccacggcaggtact

SEQ ID NO: 4598517 - DNA, 25 bp, Homo sapien
gaacccacggcaggtactgtggcag

SEQ ID NO: 4598518 - DNA, 25 bp, Homo sapien
ggaatgatgagagaacccacggcag

SEQ ID NO: 4598519 - DNA, 25 bp, Homo sapien
ctcaaggaggtgcgccaggacacca

SEQ ID NO: 4598520 - DNA, 25 bp, Homo sapien
tgtaagttgagttcagacaatggtg

SEQ ID NO: 4598521 - DNA, 25 bp, Homo sapien
agacaatggtggtcttgcatgctgc

SEQ ID NO: 4598522 - DNA, 25 bp, Homo sapien
ctgcagtgtaagttgagttcagaca

SEQ ID NO: 4598523 - DNA, 25 bp, Homo sapien
aagttgagttcagacaatggtggtc

SEQ ID NO: 4598524 - DNA, 25 bp, Homo sapien
tgccacagacgtgctccactcagag

SEQ ID NO: 4598525 - DNA, 25 bp, Homo sapien
tccagatcctgccacagacgtgctc

SEQ ID NO: 4598526 - DNA, 25 bp, Homo sapien
ttgtcccgtcactggccccatgcat

SEQ ID NO: 4598527 - DNA, 25 bp, Homo sapien
ctggagtccaatcccctgacagtgc

SEQ ID NO: 4598528 - DNA, 25 bp, Homo sapien
ttaaaagaaggagtgcataaaggca

SEQ ID NO: 4598529 - DNA, 25 bp, Homo sapien
taaaagaaggagtgcataaaggcat

SEQ ID NO: 4598530 - DNA, 25 bp, Homo sapien
ttgagtaattccagttttgctttcc

SEQ ID NO: 4598531 - DNA, 25 bp, Homo sapien
ctgggaatgaagtttagtatgagaa

SEQ ID NO: 4598532 - DNA, 25 bp, Homo sapien
gtttagtatgagaaatgtggatgcc

SEQ ID NO: 4598533 - DNA, 25 bp, Homo sapien
tatttgctgctcttgagtaattcca

SEQ ID NO: 4598534 - DNA, 25 bp, Homo sapien
taaaatatatatgcggccaggcgcg

SEQ ID NO: 4598535 - DNA, 25 bp, Homo sapien
tagaacggtagcttaagggagaaca

SEQ ID NO: 4598536 - DNA, 25 bp, Homo sapien
gaagtctctaccacacagaaaggga

SEQ ID NO: 4598537 - DNA, 25 bp, Homo sapien
catgattctgaagagcctggacagg

SEQ ID NO: 4598538 - DNA, 25 bp, Homo sapien
tactgtggcctttgactggagcatc

SEQ ID NO: 4598539 - DNA, 25 bp, Homo sapien
ggtctccaatccattcaggctcaag

SEQ ID NO: 4598540 - DNA, 25 bp, Homo sapien
gcaggtgggacttcactcagagcaa

SEQ ID NO: 4598541 - DNA, 25 bp, Homo sapien
ccttcatgttttggtgttggtctcc

SEQ ID NO: 4598542 - DNA, 25 bp, Homo sapien
ggaccataccccactgtaattgtgg

SEQ ID NO: 4598543 - DNA, 25 bp, Homo sapien
aggaccataccccactgtaattgtg

SEQ ID NO: 4598544 - DNA, 25 bp, Homo sapien
gaggaccataccccactgtaattgt

SEQ ID NO: 4598545 - DNA, 25 bp, Homo sapien
gcagcaagggtcctttctactttga

SEQ ID NO: 4598546 - DNA, 25 bp, Homo sapien
tctatgggaagggttatgcagcaag

SEQ ID NO: 4598547 - DNA, 25 bp, Homo sapien
tgccagaacaaaggctctcgaagtt

SEQ ID NO: 4598548 - DNA, 25 bp, Homo sapien
agttaggatcttgctatttgggaca

SEQ ID NO: 4598549 - DNA, 25 bp, Homo sapien
ttctttccggcacctggatgatcat

SEQ ID NO: 4598550 - DNA, 25 bp, Homo sapien
ctcagtaaaaaatagctcttgtttc

SEQ ID NO: 4598551 - DNA, 25 bp, Homo sapien
ctcttgtttctttccggcacctgga

SEQ ID NO: 4598552 - DNA, 25 bp, Homo sapien
tgctcagtaaaaaatagctcttgtt

SEQ ID NO: 4598553 - DNA, 25 bp, Homo sapien
caaatttgctgacctgtgaggactc

SEQ ID NO: 4598554 - DNA, 25 bp, Homo sapien
tatgtacttgtgaagaagccagagc

SEQ ID NO: 4598555 - DNA, 25 bp, Homo sapien
tacattgaggtttgagccaaggcaa

SEQ ID NO: 4598556 - DNA, 25 bp, Homo sapien
cagagcgggtattactggctgaacc

SEQ ID NO: 4598557 - DNA, 25 bp, Homo sapien
aatattagtctccgaagcacaaggg

SEQ ID NO: 4598558 - DNA, 25 bp, Homo sapien
aattaatattagtctccgaagcaca

SEQ ID NO: 4598559 - DNA, 25 bp, Homo sapien
taatattagtctccgaagcacaagg

SEQ ID NO: 4598560 - DNA, 25 bp, Homo sapien
ttaatattagtctccgaagcacaag

SEQ ID NO: 4598561 - DNA, 25 bp, Homo sapien
tatcttgctggggttcgtgtcacac

SEQ ID NO: 4598562 - DNA, 25 bp, Homo sapien
gggttcgtgtcacactagtgtgcct

SEQ ID NO: 4598563 - DNA, 25 bp, Homo sapien
gtgtcacactagtgtgcctctgcat

SEQ ID NO: 4598564 - DNA, 25 bp, Homo sapien
ttcgtgtcacactagtgtgcctctg

SEQ ID NO: 4598565 - DNA, 25 bp, Homo sapien
ggcttcaagcagcttctgaactctg

SEQ ID NO: 4598566 - DNA, 25 bp, Homo sapien
gcttcaagcagcttctgaactctga

SEQ ID NO: 4598567 - DNA, 25 bp, Homo sapien
gatgtcattcttagtttagtgaggt

SEQ ID NO: 4598568 - DNA, 25 bp, Homo sapien
ttagtgaggtaaataatgagggcca

SEQ ID NO: 4598569 - DNA, 25 bp, Homo sapien
ctaaagaaagaggacgtagagggcg

SEQ ID NO: 4598570 - DNA, 25 bp, Homo sapien
aaagaggacgtagagggcgaggcga

SEQ ID NO: 4598571 - DNA, 25 bp, Homo sapien
gagttgttccacgtgagggaaagaa

SEQ ID NO: 4598572 - DNA, 25 bp, Homo sapien
agagggcgaggcgagttgttccacg

SEQ ID NO: 4598573 - DNA, 25 bp, Homo sapien
ctttcagtgtccttttgatggttct

SEQ ID NO: 4598574 - DNA, 25 bp, Homo sapien
cactttcagtgtccttttgatggtt

SEQ ID NO: 4598575 - DNA, 25 bp, Homo sapien
gacactttcagtgtccttttgatgg

SEQ ID NO: 4598576 - DNA, 25 bp, Homo sapien
ttcagtgtccttttgatggttcttc

SEQ ID NO: 4598577 - DNA, 25 bp, Homo sapien
ggagcacgcatcagtgtacagtcta

SEQ ID NO: 4598578 - DNA, 25 bp, Homo sapien
cagtctatattagaacgaagagtgg

SEQ ID NO: 4598579 - DNA, 25 bp, Homo sapien
agcagttacagcacccgctgcagga

SEQ ID NO: 4598580 - DNA, 25 bp, Homo sapien
cgctgcaggagcacgcatcagtgta

SEQ ID NO: 4598581 - DNA, 25 bp, Homo sapien
aatagcagccaccagtcaatactcc

SEQ ID NO: 4598582 - DNA, 25 bp, Homo sapien
catggccaagtcatccgaatagcag

SEQ ID NO: 4598583 - DNA, 25 bp, Homo sapien
gccaagtcatccgaatagcagccac

SEQ ID NO: 4598584 - DNA, 25 bp, Homo sapien
atccgaatagcagccaccagtcaat

SEQ ID NO: 4598585 - DNA, 25 bp, Homo sapien
tgcctcatggtcaacttctgctcca

SEQ ID NO: 4598586 - DNA, 25 bp, Homo sapien
ccactgactagtgagagacaggatg

SEQ ID NO: 4598587 - DNA, 25 bp, Homo sapien
cagtccactgactagtgagagacag

SEQ ID NO: 4598588 - DNA, 25 bp, Homo sapien
tgctccagtccactgactagtgaga

SEQ ID NO: 4598589 - DNA, 25 bp, Homo sapien
ttccgttacctttaccacgatggca

SEQ ID NO: 4598590 - DNA, 25 bp, Homo sapien
tccgttacctttaccacgatggcat

SEQ ID NO: 4598591 - DNA, 25 bp, Homo sapien
tggaagacagccctagaaccctgtg

SEQ ID NO: 4598592 - DNA, 25 bp, Homo sapien
cgttacctttaccacgatggcattt

SEQ ID NO: 4598593 - DNA, 25 bp, Homo sapien
cctgatggctgtggaagtgaattcc

SEQ ID NO: 4598594 - DNA, 25 bp, Homo sapien
gaagtgaattcccacccatggatca

SEQ ID NO: 4598595 - DNA, 25 bp, Homo sapien
tgatggctgtggaagtgaattccca

SEQ ID NO: 4598596 - DNA, 25 bp, Homo sapien
ttcccacccatggatcagtggccat

SEQ ID NO: 4598597 - DNA, 25 bp, Homo sapien
ttctgaatagggttgcttattgtgg

SEQ ID NO: 4598598 - DNA, 25 bp, Homo sapien
cctttctgaatagggttgcttattg

SEQ ID NO: 4598599 - DNA, 25 bp, Homo sapien
gaatagggttgcttattgtggtcat

SEQ ID NO: 4598600 - DNA, 25 bp, Homo sapien
cttccctttctgaatagggttgctt

SEQ ID NO: 4598601 - DNA, 25 bp, Homo sapien
ccagctgactgtgctctgtagaggc

SEQ ID NO: 4598602 - DNA, 25 bp, Homo sapien
gctgactgtgctctgtagaggcctc

SEQ ID NO: 4598603 - DNA, 25 bp, Homo sapien
cagctgactgtgctctgtagaggcc

SEQ ID NO: 4598604 - DNA, 25 bp, Homo sapien
tgactgtgctctgtagaggcctcat

SEQ ID NO: 4598605 - DNA, 25 bp, Homo sapien
tcacaagctgcgcatcttgatgcag

SEQ ID NO: 4598606 - DNA, 25 bp, Homo sapien
caagctggacggtttagtggagaaa

SEQ ID NO: 4598607 - DNA, 25 bp, Homo sapien
aatttgaccttgtgtagatacagca

SEQ ID NO: 4598608 - DNA, 25 bp, Homo sapien
gcgttcagctgttataagtcccaag

SEQ ID NO: 4598609 - DNA, 25 bp, Homo sapien
tacaggccattaacaacagaacgga

SEQ ID NO: 4598610 - DNA, 25 bp, Homo sapien
cagaacggatgattaggctctctcc

SEQ ID NO: 4598611 - DNA, 25 bp, Homo sapien
agtggtttcaccacccagtacaggg

SEQ ID NO: 4598612 - DNA, 25 bp, Homo sapien
aataatgcatactgccagtcagtgg

SEQ ID NO: 4598613 - DNA, 25 bp, Homo sapien
tgttgaggacatccagcaaccaaac

SEQ ID NO: 4598614 - DNA, 25 bp, Homo sapien
gctgctatacagagatcatggacat

SEQ ID NO: 4598615 - DNA, 25 bp, Homo sapien
cattgataagttgctcacgtctcct

SEQ ID NO: 4598616 - DNA, 25 bp, Homo sapien
tcaaggccatggtctacatatacac

SEQ ID NO: 4598617 - DNA, 25 bp, Homo sapien
tctctgtaccgatgcccaaagactc

SEQ ID NO: 4598618 - DNA, 25 bp, Homo sapien
tgtacgggtttttagctgggcagcc

SEQ ID NO: 4598619 - DNA, 25 bp, Homo sapien
taagcaactcgcacaaaacacaggt

SEQ ID NO: 4598620 - DNA, 25 bp, Homo sapien
gtgtcactcaccgtataaagcagga

SEQ ID NO: 4598621 - DNA, 25 bp, Homo sapien
caagatgcctgttccattagcgagg

SEQ ID NO: 4598622 - DNA, 25 bp, Homo sapien
gggctccacgcctcaaggttgggac

SEQ ID NO: 4598623 - DNA, 25 bp, Homo sapien
gatagtaactgcaccaagatctcac

SEQ ID NO: 4598624 - DNA, 25 bp, Homo sapien
ttatctcttgttagttagatgccaa

SEQ ID NO: 4598625 - DNA, 25 bp, Homo sapien
gtggactcagcgcaggctcactatg

SEQ ID NO: 4598626 - DNA, 25 bp, Homo sapien
gatccttaaggaacataacaccagg

SEQ ID NO: 4598627 - DNA, 25 bp, Homo sapien
taccgagagctttgaaacaggttgc

SEQ ID NO: 4598628 - DNA, 25 bp, Homo sapien
gagattacgctccaactgcagaaac

SEQ ID NO: 4598629 - DNA, 25 bp, Homo sapien
gatccctgcaaacttttaccgagag

SEQ ID NO: 4598630 - DNA, 25 bp, Homo sapien
ttaaagaataagaccatagtggggc

SEQ ID NO: 4598631 - DNA, 25 bp, Homo sapien
gtgaggaagggtccatggagcctct

SEQ ID NO: 4598632 - DNA, 25 bp, Homo sapien
ggaagggtccatggagcctctccag

SEQ ID NO: 4598633 - DNA, 25 bp, Homo sapien
aggaagggtccatggagcctctcca

SEQ ID NO: 4598634 - DNA, 25 bp, Homo sapien
aagcaacagcagcttcagagcccca

SEQ ID NO: 4598635 - DNA, 25 bp, Homo sapien
caagcaacagcagcttcagagcccc

SEQ ID NO: 4598636 - DNA, 25 bp, Homo sapien
acagcagcttcagagccccagctgt

SEQ ID NO: 4598637 - DNA, 25 bp, Homo sapien
gcaacagcagcttcagagccccagc

SEQ ID NO: 4598638 - DNA, 25 bp, Homo sapien
cactggacggtcatggagggctttc

SEQ ID NO: 4598639 - DNA, 25 bp, Homo sapien
taggtagcatgtctgcccgtaggca

SEQ ID NO: 4598640 - DNA, 25 bp, Homo sapien
taatcatcagtgtgaaagcagggca

SEQ ID NO: 4598641 - DNA, 25 bp, Homo sapien
caatgagtgtttcaggtagaggact

SEQ ID NO: 4598642 - DNA, 25 bp, Homo sapien
caggaagacccctataagcctttgg

SEQ ID NO: 4598643 - DNA, 25 bp, Homo sapien
tgaactcagctagtaggtgcagccc

SEQ ID NO: 4598644 - DNA, 25 bp, Homo sapien
cctcttcaacacaggaaatggtgag

SEQ ID NO: 4598645 - DNA, 25 bp, Homo sapien
gggcaatgcctgctagagtttccag

SEQ ID NO: 4598646 - DNA, 25 bp, Homo sapien
ctgtcaattgatgaatgcctagcca

SEQ ID NO: 4598647 - DNA, 25 bp, Homo sapien
ccactggccctatcacacgggttca

SEQ ID NO: 4598648 - DNA, 25 bp, Homo sapien
cccccactggccctatcacacgggt

SEQ ID NO: 4598649 - DNA, 25 bp, Homo sapien
ttgaactgcccccactggccctatc

SEQ ID NO: 4598650 - DNA, 25 bp, Homo sapien
aactgcccccactggccctatcaca

SEQ ID NO: 4598651 - DNA, 25 bp, Homo sapien
gtacaagtcttcgatctgacaaagt

SEQ ID NO: 4598652 - DNA, 25 bp, Homo sapien
agtacaagtcttcgatctgacaaag

SEQ ID NO: 4598653 - DNA, 25 bp, Homo sapien
acaagtcttcgatctgacaaagttc

SEQ ID NO: 4598654 - DNA, 25 bp, Homo sapien
gaagtacaagtcttcgatctgacaa

SEQ ID NO: 4598655 - DNA, 25 bp, Homo sapien
tctgtataactgatctaacctttct

SEQ ID NO: 4598656 - DNA, 25 bp, Homo sapien
gctgattctgttgaagacgtagttt

SEQ ID NO: 4598657 - DNA, 25 bp, Homo sapien
ttctgtataactgatctaacctttc

SEQ ID NO: 4598658 - DNA, 25 bp, Homo sapien
gtataactgatctaacctttctcat

SEQ ID NO: 4598659 - DNA, 25 bp, Homo sapien
aatctcttaatccagaaagtcttgt

SEQ ID NO: 4598660 - DNA, 25 bp, Homo sapien
gaatgggatgattttgcttgtttct

SEQ ID NO: 4598661 - DNA, 25 bp, Homo sapien
ggccaggaatctcttaatccagaaa

SEQ ID NO: 4598662 - DNA, 25 bp, Homo sapien
taccagtttttgtccgaatccactg

SEQ ID NO: 4598663 - DNA, 25 bp, Homo sapien
taatcagggttcttgaatgccacac

SEQ ID NO: 4598664 - DNA, 25 bp, Homo sapien
taagaacttctgtataggccaaagg

SEQ ID NO: 4598665 - DNA, 25 bp, Homo sapien
caggagcctggactttgttgcacat

SEQ ID NO: 4598666 - DNA, 25 bp, Homo sapien
gaagtgcctacaggcctcagctgat

SEQ ID NO: 4598667 - DNA, 25 bp, Homo sapien
taaattggaagagcaaccagggctc

SEQ ID NO: 4598668 - DNA, 25 bp, Homo sapien
tagggtttgctccatagtctggctt

SEQ ID NO: 4598669 - DNA, 25 bp, Homo sapien
ttgggctaatagcacccgattctgc

SEQ ID NO: 4598670 - DNA, 25 bp, Homo sapien
ccctgacaagagtcgtgatggaaac

SEQ ID NO: 4598671 - DNA, 25 bp, Homo sapien
ggtgcacagagctcgatgccaggaa

SEQ ID NO: 4598672 - DNA, 25 bp, Homo sapien
tatctgcttgcagcgtggtctctgg

SEQ ID NO: 4598673 - DNA, 25 bp, Homo sapien
cactggctttagtgttgctagacca

SEQ ID NO: 4598674 - DNA, 25 bp, Homo sapien
taaggtcagtcagctcctatctgct

SEQ ID NO: 4598675 - DNA, 25 bp, Homo sapien
aatgtatagcttgcatttaacaacc

SEQ ID NO: 4598676 - DNA, 25 bp, Homo sapien
ttatcgggtctgcataatgtatagc

SEQ ID NO: 4598677 - DNA, 25 bp, Homo sapien
gttgcaaattatggaatgtagattt

SEQ ID NO: 4598678 - DNA, 25 bp, Homo sapien
gaatgtagattttcattatcgggtc

SEQ ID NO: 4598679 - DNA, 25 bp, Homo sapien
catggtcgctgccattgactatcag

SEQ ID NO: 4598680 - DNA, 25 bp, Homo sapien
tattgctgttgccttaatttaagca

SEQ ID NO: 4598681 - DNA, 25 bp, Homo sapien
gcacatttgccgctatatttgcatt

SEQ ID NO: 4598682 - DNA, 25 bp, Homo sapien
tctagtgtattaccatcatggtcgc

SEQ ID NO: 4598683 - DNA, 25 bp, Homo sapien
tatggagtagattgatggtattgac

SEQ ID NO: 4598684 - DNA, 25 bp, Homo sapien
tatatgcaattgctaaaacttcaac

SEQ ID NO: 4598685 - DNA, 25 bp, Homo sapien
caattgctaaaacttcaacgttatc

SEQ ID NO: 4598686 - DNA, 25 bp, Homo sapien
tgaaatagaaaacatcgcccatttc

SEQ ID NO: 4598687 - DNA, 25 bp, Homo sapien
cttctgagttgtcagtggtctgagc

SEQ ID NO: 4598688 - DNA, 25 bp, Homo sapien
gcaggaggacatctttccataaatt

SEQ ID NO: 4598689 - DNA, 25 bp, Homo sapien
tgcaggaggacatctttccataaat

SEQ ID NO: 4598690 - DNA, 25 bp, Homo sapien
caggaggacatctttccataaattt

SEQ ID NO: 4598691 - DNA, 25 bp, Homo sapien
gaggatcactgggagatctacagat

SEQ ID NO: 4598692 - DNA, 25 bp, Homo sapien
ttacaattcctcctaaggactgggc

SEQ ID NO: 4598693 - DNA, 25 bp, Homo sapien
tcttatcctgactacattgtgttga

SEQ ID NO: 4598694 - DNA, 25 bp, Homo sapien
gaatcttcctattgttcaatttccg

SEQ ID NO: 4598695 - DNA, 25 bp, Homo sapien
tttgcacctttgtgctcctcacata

SEQ ID NO: 4598696 - DNA, 25 bp, Homo sapien
ctttgtgctcctcacatatggccat

SEQ ID NO: 4598697 - DNA, 25 bp, Homo sapien
gcacctttgtgctcctcacatatgg

SEQ ID NO: 4598698 - DNA, 25 bp, Homo sapien
acctttgtgctcctcacatatggcc

SEQ ID NO: 4598699 - DNA, 25 bp, Homo sapien
actggtcaacagttagaatcttgga

SEQ ID NO: 4598700 - DNA, 25 bp, Homo sapien
tagtttgcactaatcttttcagcca

SEQ ID NO: 4598701 - DNA, 25 bp, Homo sapien
caagaaattcaaagtgtagacttcc

SEQ ID NO: 4598702 - DNA, 25 bp, Homo sapien
gacttccagcatgaatatggctgtt

SEQ ID NO: 4598703 - DNA, 25 bp, Homo sapien
ttgatgagttgagggagaccaaacc

SEQ ID NO: 4598704 - DNA, 25 bp, Homo sapien
tgcatctaagttccacgtcacggct

SEQ ID NO: 4598705 - DNA, 25 bp, Homo sapien
ttcactgggagaagagataatgtct

SEQ ID NO: 4598706 - DNA, 25 bp, Homo sapien
tcagatcatttatcccagagccaca

SEQ ID NO: 4598707 - DNA, 25 bp, Homo sapien
cgtttacagacagcgtccatctcac

SEQ ID NO: 4598708 - DNA, 25 bp, Homo sapien
caacttgctccacgtctgaatgtca

SEQ ID NO: 4598709 - DNA, 25 bp, Homo sapien
catctcactggtgggtccctatgca

SEQ ID NO: 4598710 - DNA, 25 bp, Homo sapien
gggtccctatgcagtccaacttgct

SEQ ID NO: 4598711 - DNA, 25 bp, Homo sapien
gttgtactagtgttagtcaatcaag

SEQ ID NO: 4598712 - DNA, 25 bp, Homo sapien
gacagatgaggagacaattatctca

SEQ ID NO: 4598713 - DNA, 25 bp, Homo sapien
tctccggtgcatggtaagtactata

SEQ ID NO: 4598714 - DNA, 25 bp, Homo sapien
ggtaagacacaatattggagctggg

SEQ ID NO: 4598715 - DNA, 25 bp, Homo sapien
acagttgtggctctgcgtgaggctg

SEQ ID NO: 4598716 - DNA, 25 bp, Homo sapien
tgtggctctgcgtgaggctggacca

SEQ ID NO: 4598717 - DNA, 25 bp, Homo sapien
agttgtggctctgcgtgaggctgga

SEQ ID NO: 4598718 - DNA, 25 bp, Homo sapien
ttgtggctctgcgtgaggctggacc

SEQ ID NO: 4598719 - DNA, 25 bp, Homo sapien
ttcccgcagctggtacttccgactt

SEQ ID NO: 4598720 - DNA, 25 bp, Homo sapien
tctcctttccgcaggaaggttgtcc

SEQ ID NO: 4598721 - DNA, 25 bp, Homo sapien
ccaacaagttgagaagacgcacagt

SEQ ID NO: 4598722 - DNA, 25 bp, Homo sapien
tcagtagacctgaagcaggtagctc

SEQ ID NO: 4598723 - DNA, 25 bp, Homo sapien
aagatgggcccaagctgcaacatga

SEQ ID NO: 4598724 - DNA, 25 bp, Homo sapien
tgaagatgaacaaggagtcccacaa

SEQ ID NO: 4598725 - DNA, 25 bp, Homo sapien
taaggtcaattaaccacccagtgct

SEQ ID NO: 4598726 - DNA, 25 bp, Homo sapien
gacaactatgtatctgccaggcact

SEQ ID NO: 4598727 - DNA, 25 bp, Homo sapien
taacgtacaggctccagcatccctt

SEQ ID NO: 4598728 - DNA, 25 bp, Homo sapien
gggacctaacgtacaggctccagca

SEQ ID NO: 4598729 - DNA, 25 bp, Homo sapien
cagagccttccataagggattgggg

SEQ ID NO: 4598730 - DNA, 25 bp, Homo sapien
gattggggacctaacgtacaggctc

SEQ ID NO: 4598731 - DNA, 25 bp, Homo sapien
ctagaaggaaacagagagtgcacct

SEQ ID NO: 4598732 - DNA, 25 bp, Homo sapien
tagaaggaaacagagagtgcacctt

SEQ ID NO: 4598733 - DNA, 25 bp, Homo sapien
ccatggattgtatcttgctttccct

SEQ ID NO: 4598734 - DNA, 25 bp, Homo sapien
catggattgtatcttgctttccctg

SEQ ID NO: 4598735 - DNA, 25 bp, Homo sapien
cctcttcagaactgtggcatggtgc

SEQ ID NO: 4598736 - DNA, 25 bp, Homo sapien
taatgagtgaatcagagttgtgtcc

SEQ ID NO: 4598737 - DNA, 25 bp, Homo sapien
tctagcttctggaacaatggataca

SEQ ID NO: 4598738 - DNA, 25 bp, Homo sapien
cagtgtctggactagcgtatgatcc

SEQ ID NO: 4598739 - DNA, 25 bp, Homo sapien
tggagtccggatgtgtctaacacct

SEQ ID NO: 4598740 - DNA, 25 bp, Homo sapien
cacgagggactttggcactgagctc

SEQ ID NO: 4598741 - DNA, 25 bp, Homo sapien
taacacctagtgcattcctcagacc

SEQ ID NO: 4598742 - DNA, 25 bp, Homo sapien
ggtgaacccctagcagaatctgtgg

SEQ ID NO: 4598743 - DNA, 25 bp, Homo sapien
cagcacatttaagaaccagttgtag

SEQ ID NO: 4598744 - DNA, 25 bp, Homo sapien
caaagctgaaatgcggaatcccagc

SEQ ID NO: 4598745 - DNA, 25 bp, Homo sapien
tgtagggacctgacagcgtcttgct

SEQ ID NO: 4598746 - DNA, 25 bp, Homo sapien
aattccgtgaccaagggagaagagc

SEQ ID NO: 4598747 - DNA, 25 bp, Homo sapien
gggatcctggaaatacgaggtgaaa

SEQ ID NO: 4598748 - DNA, 25 bp, Homo sapien
ggaaatacgaggtgaaaactgcaga

SEQ ID NO: 4598749 - DNA, 25 bp, Homo sapien
gatctctaaagtttgttacatcatg

SEQ ID NO: 4598750 - DNA, 25 bp, Homo sapien
tctctaaagtttgttacatcatgag

SEQ ID NO: 4598751 - DNA, 25 bp, Homo sapien
catttgaactgtatcctggggcccc

SEQ ID NO: 4598752 - DNA, 25 bp, Homo sapien
cggcaggaaccccttaattcctgag

SEQ ID NO: 4598753 - DNA, 25 bp, Homo sapien
accccttaattcctgagcagacaag

SEQ ID NO: 4598754 - DNA, 25 bp, Homo sapien
taattcctgagcagacaagctggca

SEQ ID NO: 4598755 - DNA, 25 bp, Homo sapien
ctgtcattagccagagccccgggaa

SEQ ID NO: 4598756 - DNA, 25 bp, Homo sapien
tcattagccagagccccgggaactt

SEQ ID NO: 4598757 - DNA, 25 bp, Homo sapien
tttcctgtcattagccagagccccg

SEQ ID NO: 4598758 - DNA, 25 bp, Homo sapien
ttcctgtcattagccagagccccgg

SEQ ID NO: 4598759 - DNA, 25 bp, Homo sapien
gggagttcgtgtctctccttccaat

SEQ ID NO: 4598760 - DNA, 25 bp, Homo sapien
cagagcaacggggagttcgtgtctc

SEQ ID NO: 4598761 - DNA, 25 bp, Homo sapien
ttccaattattgctgcgagtttgag

SEQ ID NO: 4598762 - DNA, 25 bp, Homo sapien
tctctccttccaattattgctgcga

SEQ ID NO: 4598763 - DNA, 25 bp, Homo sapien
tcattaggtttttctgtgagctgta

SEQ ID NO: 4598764 - DNA, 25 bp, Homo sapien
ggtttttctgtgagctgtaagatat

SEQ ID NO: 4598765 - DNA, 25 bp, Homo sapien
tttctgtgagctgtaagatattcat

SEQ ID NO: 4598766 - DNA, 25 bp, Homo sapien
tttttctgtgagctgtaagatattc

SEQ ID NO: 4598767 - DNA, 25 bp, Homo sapien
ggccaagccgacaaagaccacaaaa

SEQ ID NO: 4598768 - DNA, 25 bp, Homo sapien
gattggaacctcactcagtcatgga

SEQ ID NO: 4598769 - DNA, 25 bp, Homo sapien
tgtcctgttcttatagattggaacc

SEQ ID NO: 4598770 - DNA, 25 bp, Homo sapien
tcccacacataggtttatggattga

SEQ ID NO: 4598771 - DNA, 25 bp, Homo sapien
taggtgactactgtgaaaagtgtgg

SEQ ID NO: 4598772 - DNA, 25 bp, Homo sapien
taaggctgtggcatctacataggtg

SEQ ID NO: 4598773 - DNA, 25 bp, Homo sapien
tcagatacggtttaaggctgtggca

SEQ ID NO: 4598774 - DNA, 25 bp, Homo sapien
tgtggcatctacataggtgactact

SEQ ID NO: 4598775 - DNA, 25 bp, Homo sapien
tagcaactgggtatcctctcagtgc

SEQ ID NO: 4598776 - DNA, 25 bp, Homo sapien
aactgggtatcctctcagtgcctgt

SEQ ID NO: 4598777 - DNA, 25 bp, Homo sapien
tccatagcaactgggtatcctctca

SEQ ID NO: 4598778 - DNA, 25 bp, Homo sapien
aatgtcatccatagcaactgggtat

SEQ ID NO: 4598779 - DNA, 25 bp, Homo sapien
taaagtccaatgtctgaaccaggca

SEQ ID NO: 4598780 - DNA, 25 bp, Homo sapien
catcagatctgatttagggaacacc

SEQ ID NO: 4598781 - DNA, 25 bp, Homo sapien
tggcgcctctaaggatccccagaaa

SEQ ID NO: 4598782 - DNA, 25 bp, Homo sapien
tttcttattccaaacccggtgctca

SEQ ID NO: 4598783 - DNA, 25 bp, Homo sapien
cagctttcgttgtggagactcttcc

SEQ ID NO: 4598784 - DNA, 25 bp, Homo sapien
tcccggaggagaccatcttgaaaga

SEQ ID NO: 4598785 - DNA, 25 bp, Homo sapien
ggaagaaagccagcctaaagtccca

SEQ ID NO: 4598786 - DNA, 25 bp, Homo sapien
catctgtctggagttaaggaaacct

SEQ ID NO: 4598787 - DNA, 25 bp, Homo sapien
tcccagctcaggccaaaaagtggca

SEQ ID NO: 4598788 - DNA, 25 bp, Homo sapien
cccagctcaggccaaaaagtggcat

SEQ ID NO: 4598789 - DNA, 25 bp, Homo sapien
aaagtggcattttggggattatgtc

SEQ ID NO: 4598790 - DNA, 25 bp, Homo sapien
ggattatgtcctagtggtttattct

SEQ ID NO: 4598791 - DNA, 25 bp, Homo sapien
tgtcaatggccctcatccaagagaa

SEQ ID NO: 4598792 - DNA, 25 bp, Homo sapien
cagagcacagggtataacagttctc

SEQ ID NO: 4598793 - DNA, 25 bp, Homo sapien
caaggtttattatgcccctgtgaca

SEQ ID NO: 4598794 - DNA, 25 bp, Homo sapien
cacttagcgtagtacttggcaggca

SEQ ID NO: 4598795 - DNA, 25 bp, Homo sapien
tcatgtcgttaaggatttcacaacc

SEQ ID NO: 4598796 - DNA, 25 bp, Homo sapien
gacctggttgaatagtaactgactg

SEQ ID NO: 4598797 - DNA, 25 bp, Homo sapien
acatcaacaatggtactgaccactg

SEQ ID NO: 4598798 - DNA, 25 bp, Homo sapien
aaagccatcttcatgatccctctaa

SEQ ID NO: 4598799 - DNA, 25 bp, Homo sapien
cgttgagaacgttgctcatggcttc

SEQ ID NO: 4598800 - DNA, 25 bp, Homo sapien
gaatgttggacgttgagaacgttgc

SEQ ID NO: 4598801 - DNA, 25 bp, Homo sapien
acagagatggccaggaatagaatgg

SEQ ID NO: 4598802 - DNA, 25 bp, Homo sapien
cagagatggccaggaatagaatggt

SEQ ID NO: 4598803 - DNA, 25 bp, Homo sapien
aagtttcagcgtcagagagatttct

SEQ ID NO: 4598804 - DNA, 25 bp, Homo sapien
gaagtttcagcgtcagagagatttc

SEQ ID NO: 4598805 - DNA, 25 bp, Homo sapien
agtttcagcgtcagagagatttctc

SEQ ID NO: 4598806 - DNA, 25 bp, Homo sapien
ctggcaacttaaaaccaagtactcg

SEQ ID NO: 4598807 - DNA, 25 bp, Homo sapien
gcagacctataaggatctctctggg

SEQ ID NO: 4598808 - DNA, 25 bp, Homo sapien
tcgagcagcagacctataaggatct

SEQ ID NO: 4598809 - DNA, 25 bp, Homo sapien
ttaaaaccaagtactcgagcagcag

SEQ ID NO: 4598810 - DNA, 25 bp, Homo sapien
tttgctgcctttgggatatgaagac

SEQ ID NO: 4598811 - DNA, 25 bp, Homo sapien
cgtttgctgcctttgggatatgaag

SEQ ID NO: 4598812 - DNA, 25 bp, Homo sapien
actgcgtttgctgcctttgggatat

SEQ ID NO: 4598813 - DNA, 25 bp, Homo sapien
tgcgtttgctgcctttgggatatga

SEQ ID NO: 4598814 - DNA, 25 bp, Homo sapien
tccactgtgtatttgtcctttaatc

SEQ ID NO: 4598815 - DNA, 25 bp, Homo sapien
tatgtgtcattcgttttgatgaaca

SEQ ID NO: 4598816 - DNA, 25 bp, Homo sapien
taagaagtcgattggtgtaaagagt

SEQ ID NO: 4598817 - DNA, 25 bp, Homo sapien
gatgaacactcttcgtatttttcgg

SEQ ID NO: 4598818 - DNA, 25 bp, Homo sapien
gcagaagacgcatctgggtttggat

SEQ ID NO: 4598819 - DNA, 25 bp, Homo sapien
gacatgcagaagacgcatctgggtt

SEQ ID NO: 4598820 - DNA, 25 bp, Homo sapien
atgacatgcagaagacgcatctggg

SEQ ID NO: 4598821 - DNA, 25 bp, Homo sapien
atgcagaagacgcatctgggtttgg

SEQ ID NO: 4598822 - DNA, 25 bp, Homo sapien
tttggctggctgccactgtgaaatg

SEQ ID NO: 4598823 - DNA, 25 bp, Homo sapien
ttatgtttttggctggctgccactg

SEQ ID NO: 4598824 - DNA, 25 bp, Homo sapien
gtttttggctggctgccactgtgaa

SEQ ID NO: 4598825 - DNA, 25 bp, Homo sapien
gctggctgccactgtgaaatgtgtt

SEQ ID NO: 4598826 - DNA, 25 bp, Homo sapien
ggtaagtctagctcattctgactag

SEQ ID NO: 4598827 - DNA, 25 bp, Homo sapien
tggtcaacactgcaggtcataggta

SEQ ID NO: 4598828 - DNA, 25 bp, Homo sapien
gtctagctcattctgactaggtgaa

SEQ ID NO: 4598829 - DNA, 25 bp, Homo sapien
tgcaggtcataggtaagtctagctc

SEQ ID NO: 4598830 - DNA, 25 bp, Homo sapien
caagagtagggattaggctgtacac

SEQ ID NO: 4598831 - DNA, 25 bp, Homo sapien
cattcttcttcagtgaccagacatc

SEQ ID NO: 4598832 - DNA, 25 bp, Homo sapien
tcctccttaaacctgggctggagca

SEQ ID NO: 4598833 - DNA, 25 bp, Homo sapien
tcctctgtgataaactcttcctgct

SEQ ID NO: 4598834 - DNA, 25 bp, Homo sapien
aacctgacatgagaccttgatgttg

SEQ ID NO: 4598835 - DNA, 25 bp, Homo sapien
gaggacgggagtaccgccaacctga

SEQ ID NO: 4598836 - DNA, 25 bp, Homo sapien
tttctccccccagagggatttgcac

SEQ ID NO: 4598837 - DNA, 25 bp, Homo sapien
tggggcaccagggtcattgagacac

SEQ ID NO: 4598838 - DNA, 25 bp, Homo sapien
catcggcttcagactttgaattggc

SEQ ID NO: 4598839 - DNA, 25 bp, Homo sapien
actttgaattggcacaaatgcattg

SEQ ID NO: 4598840 - DNA, 25 bp, Homo sapien
gtcgcattgactggcctggaactaa

SEQ ID NO: 4598841 - DNA, 25 bp, Homo sapien
cttcagttggctgtattagttcatc

SEQ ID NO: 4598842 - DNA, 25 bp, Homo sapien
taagatggagtgttgtcttgctgag

SEQ ID NO: 4598843 - DNA, 25 bp, Homo sapien
ctaagatggagtgttgtcttgctga

SEQ ID NO: 4598844 - DNA, 25 bp, Homo sapien
ttgtagagtttatggcatgggcccc

SEQ ID NO: 4598845 - DNA, 25 bp, Homo sapien
aagatggtggtttatcagcctggtg

SEQ ID NO: 4598846 - DNA, 25 bp, Homo sapien
catgggcccccttgttcctctgaat

SEQ ID NO: 4598847 - DNA, 25 bp, Homo sapien
tctgtttgagtctaatgggagcatt

SEQ ID NO: 4598848 - DNA, 25 bp, Homo sapien
tgcaagcacataagagagcccaagt

SEQ ID NO: 4598849 - DNA, 25 bp, Homo sapien
taaaaaaggatagcatttgcccgtc

SEQ ID NO: 4598850 - DNA, 25 bp, Homo sapien
catcagaaatataaggtgagccacg

SEQ ID NO: 4598851 - DNA, 25 bp, Homo sapien
gctatgattatagcggccagcgctg

SEQ ID NO: 4598852 - DNA, 25 bp, Homo sapien
taaaggtctcattcaaggtaggtca

SEQ ID NO: 4598853 - DNA, 25 bp, Homo sapien
cccagatgtgtcagaagtttggagg

SEQ ID NO: 4598854 - DNA, 25 bp, Homo sapien
tggaggtgttgcttgaagccttcac

SEQ ID NO: 4598855 - DNA, 25 bp, Homo sapien
tctacagtaccgcttcccagatgtg

SEQ ID NO: 4598856 - DNA, 25 bp, Homo sapien
tacccactctgtgaagactattgtg

SEQ ID NO: 4598857 - DNA, 25 bp, Homo sapien
ctgtgaagactattgtgttggctcc

SEQ ID NO: 4598858 - DNA, 25 bp, Homo sapien
cttatgcccagagaattctgtcctc

SEQ ID NO: 4598859 - DNA, 25 bp, Homo sapien
tgttggctcctctgtgcacgtccat

SEQ ID NO: 4598860 - DNA, 25 bp, Homo sapien
gggaagttctcacagtcatggtgga

SEQ ID NO: 4598861 - DNA, 25 bp, Homo sapien
atggctggggaagttctcacagtca

SEQ ID NO: 4598862 - DNA, 25 bp, Homo sapien
gaagttctcacagtcatggtggagg

SEQ ID NO: 4598863 - DNA, 25 bp, Homo sapien
ctggggaagttctcacagtcatggt

SEQ ID NO: 4598864 - DNA, 25 bp, Homo sapien
aacacctgtgattggcagcagacac

SEQ ID NO: 4598865 - DNA, 25 bp, Homo sapien
cagtgaacacctgtgattggcagca

SEQ ID NO: 4598866 - DNA, 25 bp, Homo sapien
tcagagttcctcctcagtgaacacc

SEQ ID NO: 4598867 - DNA, 25 bp, Homo sapien
tcctcctcagtgaacacctgtgatt

SEQ ID NO: 4598868 - DNA, 25 bp, Homo sapien
tgggttctgtctccctcttgttctt

SEQ ID NO: 4598869 - DNA, 25 bp, Homo sapien
cttcttctccttcacaatgtaaaaa

SEQ ID NO: 4598870 - DNA, 25 bp, Homo sapien
aatagctataaaatgaggactctgg

SEQ ID NO: 4598871 - DNA, 25 bp, Homo sapien
cacacactgagcagctcaatagcta

SEQ ID NO: 4598872 - DNA, 25 bp, Homo sapien
catgcgtctgttctttttctacgca

SEQ ID NO: 4598873 - DNA, 25 bp, Homo sapien
ctgttctttttctacgcagaaagcc

SEQ ID NO: 4598874 - DNA, 25 bp, Homo sapien
gcgtctgttctttttctacgcagaa

SEQ ID NO: 4598875 - DNA, 25 bp, Homo sapien
gttctttttctacgcagaaagccac

SEQ ID NO: 4598876 - DNA, 25 bp, Homo sapien
ttgtctttagcactggtagccaagt

SEQ ID NO: 4598877 - DNA, 25 bp, Homo sapien
agggttgtctttagcactggtagcc

SEQ ID NO: 4598878 - DNA, 25 bp, Homo sapien
agagggttgtctttagcactggtag

SEQ ID NO: 4598879 - DNA, 25 bp, Homo sapien
ggttgtctttagcactggtagccaa

SEQ ID NO: 4598880 - DNA, 25 bp, Homo sapien
cagagaagcttgtaatccatggtaa

SEQ ID NO: 4598881 - DNA, 25 bp, Homo sapien
gggaccagctaacagcaaggacctg

SEQ ID NO: 4598882 - DNA, 25 bp, Homo sapien
aagcagggagcgtattgagtagacc

SEQ ID NO: 4598883 - DNA, 25 bp, Homo sapien
cctgggcaagttcaagaagcagaaa

SEQ ID NO: 4598884 - DNA, 25 bp, Homo sapien
gaattggccatttgcaagcagaggc

SEQ ID NO: 4598885 - DNA, 25 bp, Homo sapien
tgtacaacagttagcaatcctgggc

SEQ ID NO: 4598886 - DNA, 25 bp, Homo sapien
gaaagcttccatctaggcctgacca

SEQ ID NO: 4598887 - DNA, 25 bp, Homo sapien
tgagagatcacagacctttcagggt

SEQ ID NO: 4598888 - DNA, 25 bp, Homo sapien
taaatctttcatatcagaatccaag

SEQ ID NO: 4598889 - DNA, 25 bp, Homo sapien
tctttcatatcagaatccaaggtgg

SEQ ID NO: 4598890 - DNA, 25 bp, Homo sapien
tttccaggctgatggagtagctctt

SEQ ID NO: 4598891 - DNA, 25 bp, Homo sapien
tccaaggtgggtagtctgattctct

SEQ ID NO: 4598892 - DNA, 25 bp, Homo sapien
tgtagaatgcggcagctgggacaca

SEQ ID NO: 4598893 - DNA, 25 bp, Homo sapien
gtgtcagtcccgcaaaacattcaga

SEQ ID NO: 4598894 - DNA, 25 bp, Homo sapien
gcagggcgccacctctagtgtagaa

SEQ ID NO: 4598895 - DNA, 25 bp, Homo sapien
cacagctggtgggtaatgagtgccc

SEQ ID NO: 4598896 - DNA, 25 bp, Homo sapien
tctacagctaaagaggcacgaaccc

SEQ ID NO: 4598897 - DNA, 25 bp, Homo sapien
gaagtagttctcctattacccgcag

SEQ ID NO: 4598898 - DNA, 25 bp, Homo sapien
ctaggtccatagagcagaagttctc

SEQ ID NO: 4598899 - DNA, 25 bp, Homo sapien
gaagttctcaaactgcggcctgcat

SEQ ID NO: 4598900 - DNA, 25 bp, Homo sapien
tctggacagccatgctagtctgctg

SEQ ID NO: 4598901 - DNA, 25 bp, Homo sapien
cagccatgctagtctgctgacactg

SEQ ID NO: 4598902 - DNA, 25 bp, Homo sapien
gatctggacagccatgctagtctgc

SEQ ID NO: 4598903 - DNA, 25 bp, Homo sapien
tggacagccatgctagtctgctgac

SEQ ID NO: 4598904 - DNA, 25 bp, Homo sapien
tgttgtgttccttggatggctacgt

SEQ ID NO: 4598905 - DNA, 25 bp, Homo sapien
tgcctttgggatcaccatgtgatga

SEQ ID NO: 4598906 - DNA, 25 bp, Homo sapien
gactcaggtaactgcctttgggatc

SEQ ID NO: 4598907 - DNA, 25 bp, Homo sapien
ggatggctacgtttctgttgtagca

SEQ ID NO: 4598908 - DNA, 25 bp, Homo sapien
aaatgcgttctttacatacaatgga

SEQ ID NO: 4598909 - DNA, 25 bp, Homo sapien
gcaccattcacaacagtcaacattt

SEQ ID NO: 4598910 - DNA, 25 bp, Homo sapien
ttatatgaggtatatgaaaagccaa

SEQ ID NO: 4598911 - DNA, 25 bp, Homo sapien
aaccaaaatgttcatggatggataa

SEQ ID NO: 4598912 - DNA, 25 bp, Homo sapien
caccatgactttcaagagtacctgc

SEQ ID NO: 4598913 - DNA, 25 bp, Homo sapien
cacaccatgactttcaagagtacct

SEQ ID NO: 4598914 - DNA, 25 bp, Homo sapien
ctccacaccatgactttcaagagta

SEQ ID NO: 4598915 - DNA, 25 bp, Homo sapien
atgactttcaagagtacctgctctc

SEQ ID NO: 4598916 - DNA, 25 bp, Homo sapien
ttcacctatactctgatgttctgca

SEQ ID NO: 4598917 - DNA, 25 bp, Homo sapien
tgatctctttccctcatcatatttt

SEQ ID NO: 4598918 - DNA, 25 bp, Homo sapien
ccttggcttatactggcagcacttc

SEQ ID NO: 4598919 - DNA, 25 bp, Homo sapien
tggctgttggcaatccttagcctcc

SEQ ID NO: 4598920 - DNA, 25 bp, Homo sapien
cattagcagggttgactcctagtga

SEQ ID NO: 4598921 - DNA, 25 bp, Homo sapien
tgaaggctccaagagagaattcgct

SEQ ID NO: 4598922 - DNA, 25 bp, Homo sapien
agcagtcccactgccggatatcgat

SEQ ID NO: 4598923 - DNA, 25 bp, Homo sapien
cactgccggatatcgatccaaagga

SEQ ID NO: 4598924 - DNA, 25 bp, Homo sapien
ccggatatcgatccaaaggaaatga

SEQ ID NO: 4598925 - DNA, 25 bp, Homo sapien
gtcccactgccggatatcgatccaa

SEQ ID NO: 4598926 - DNA, 25 bp, Homo sapien
ttctgcacgatctgggcagggctct

SEQ ID NO: 4598927 - DNA, 25 bp, Homo sapien
ccttttatgactcaccaagacaggg

SEQ ID NO: 4598928 - DNA, 25 bp, Homo sapien
tgcaatctcacaagaggctgtagcg

SEQ ID NO: 4598929 - DNA, 25 bp, Homo sapien
caagacagggttaggtcccctggat

SEQ ID NO: 4598930 - DNA, 25 bp, Homo sapien
ggataatccccagtaccgtcataag

SEQ ID NO: 4598931 - DNA, 25 bp, Homo sapien
tcacatagaacgtgctggaccctag

SEQ ID NO: 4598932 - DNA, 25 bp, Homo sapien
tggaccctagaacactacgactctg

SEQ ID NO: 4598933 - DNA, 25 bp, Homo sapien
tgagggaagcccttaagaatcctac

SEQ ID NO: 4598934 - DNA, 25 bp, Homo sapien
cattcagtgaagtaattcctaccac

SEQ ID NO: 4598935 - DNA, 25 bp, Homo sapien
taccactgggaaatgcgtcattcag

SEQ ID NO: 4598936 - DNA, 25 bp, Homo sapien
aagcccatctatagataccactggg

SEQ ID NO: 4598937 - DNA, 25 bp, Homo sapien
ctgcaatttgcatacacgcgggccc

SEQ ID NO: 4598938 - DNA, 25 bp, Homo sapien
catattcctttaacacgggacagtc

SEQ ID NO: 4598939 - DNA, 25 bp, Homo sapien
cagtcggcttcctgtagtatttttc

SEQ ID NO: 4598940 - DNA, 25 bp, Homo sapien
tatttgttcgagcatattcctttaa

SEQ ID NO: 4598941 - DNA, 25 bp, Homo sapien
caaaaagaaagtaggcgtggcccat

SEQ ID NO: 4598942 - DNA, 25 bp, Homo sapien
taagtcggaattgcatgacagtggc

SEQ ID NO: 4598943 - DNA, 25 bp, Homo sapien
tacacaattagttgcccaggcagaa

SEQ ID NO: 4598944 - DNA, 25 bp, Homo sapien
taacttgactcatagcttcaggcag

SEQ ID NO: 4598945 - DNA, 25 bp, Homo sapien
taagtggttaccatggcccaggaca

SEQ ID NO: 4598946 - DNA, 25 bp, Homo sapien
ggcagaaatccaggcgtggcgtact

SEQ ID NO: 4598947 - DNA, 25 bp, Homo sapien
ttttaaaggccacacattcagtctc

SEQ ID NO: 4598948 - DNA, 25 bp, Homo sapien
tctctcaaccgaagctgggagttgg

SEQ ID NO: 4598949 - DNA, 25 bp, Homo sapien
tgagaattcagtggcgctactaccc

SEQ ID NO: 4598950 - DNA, 25 bp, Homo sapien
tcaaagagctaacaccatgaaatta

SEQ ID NO: 4598951 - DNA, 25 bp, Homo sapien
caaagagctaacaccatgaaattac

SEQ ID NO: 4598952 - DNA, 25 bp, Homo sapien
ctgtttgattggcagtgtataaaat

SEQ ID NO: 4598953 - DNA, 25 bp, Homo sapien
tggcagtgtataaaatgtagtaatt

SEQ ID NO: 4598954 - DNA, 25 bp, Homo sapien
tttgattggcagtgtataaaatgta

SEQ ID NO: 4598955 - DNA, 25 bp, Homo sapien
gattggcagtgtataaaatgtagta

SEQ ID NO: 4598956 - DNA, 25 bp, Homo sapien
gtgtgaggcgagtcaggctgcattc

SEQ ID NO: 4598957 - DNA, 25 bp, Homo sapien
cattcctgcagagctgccgtagcca

SEQ ID NO: 4598958 - DNA, 25 bp, Homo sapien
attcctgcagagctgccgtagccac

SEQ ID NO: 4598959 - DNA, 25 bp, Homo sapien
gcattcctgcagagctgccgtagcc

SEQ ID NO: 4598960 - DNA, 25 bp, Homo sapien
cctgtgttaattggtggttccacca

SEQ ID NO: 4598961 - DNA, 25 bp, Homo sapien
ctgtgttaattggtggttccaccat

SEQ ID NO: 4598962 - DNA, 25 bp, Homo sapien
ttccctgtgttaattggtggttcca

SEQ ID NO: 4598963 - DNA, 25 bp, Homo sapien
tccctgtgttaattggtggttccac

SEQ ID NO: 4598964 - DNA, 25 bp, Homo sapien
cctgtgtgtgcctcatagtaagacc

SEQ ID NO: 4598965 - DNA, 25 bp, Homo sapien
caatagatagtacatccccaggatg

SEQ ID NO: 4598966 - DNA, 25 bp, Homo sapien
atgacgcagatgacaacctttacgg

SEQ ID NO: 4598967 - DNA, 25 bp, Homo sapien
cgcttaaggctaggagatggagacc

SEQ ID NO: 4598968 - DNA, 25 bp, Homo sapien
tgtgtctcggaaggtagcctgccat

SEQ ID NO: 4598969 - DNA, 25 bp, Homo sapien
tactcttggctctgcatgtgaaggc

SEQ ID NO: 4598970 - DNA, 25 bp, Homo sapien
tgatcctgtgcgaattaacctgaac

SEQ ID NO: 4598971 - DNA, 25 bp, Homo sapien
tggtttcctaagcattgtctccggg

SEQ ID NO: 4598972 - DNA, 25 bp, Homo sapien
tgaggttttatctaaatcactccct

SEQ ID NO: 4598973 - DNA, 25 bp, Homo sapien
ggcttcactggcataaagagctgtg

SEQ ID NO: 4598974 - DNA, 25 bp, Homo sapien
agagctgtgaggttttatctaaatc

SEQ ID NO: 4598975 - DNA, 25 bp, Homo sapien
agaggctgggaaataggcttcactg

SEQ ID NO: 4598976 - DNA, 25 bp, Homo sapien
caggtagctctggaagtgtggccac

SEQ ID NO: 4598977 - DNA, 25 bp, Homo sapien
aggtagctctggaagtgtggccaca

SEQ ID NO: 4598978 - DNA, 25 bp, Homo sapien
ggtagctctggaagtgtggccacat

SEQ ID NO: 4598979 - DNA, 25 bp, Homo sapien
tcaggtagctctggaagtgtggcca

SEQ ID NO: 4598980 - DNA, 25 bp, Homo sapien
tccagttcttcaagaatttcctttg

SEQ ID NO: 4598981 - DNA, 25 bp, Homo sapien
aatctttggcatgtgggccttcagc

SEQ ID NO: 4598982 - DNA, 25 bp, Homo sapien
ttagaagattgttccttgcaggtgg

SEQ ID NO: 4598983 - DNA, 25 bp, Homo sapien
tccttgcaggtggttttccagttct

SEQ ID NO: 4598984 - DNA, 25 bp, Homo sapien
tccgcataggaagaatggccgccat

SEQ ID NO: 4598985 - DNA, 25 bp, Homo sapien
tgctgtcaatggtccaggcatggca

SEQ ID NO: 4598986 - DNA, 25 bp, Homo sapien
atggcattgagctcaccttcgttag

SEQ ID NO: 4598987 - DNA, 25 bp, Homo sapien
tcaccttcgttagcaatccgcatag

SEQ ID NO: 4598988 - DNA, 25 bp, Homo sapien
gctgctgcatccgtgactctggatt

SEQ ID NO: 4598989 - DNA, 25 bp, Homo sapien
ttttctcatcccacctaaagaagga

SEQ ID NO: 4598990 - DNA, 25 bp, Homo sapien
tcagtgatacagtaggtgaccggtg

SEQ ID NO: 4598991 - DNA, 25 bp, Homo sapien
ggccctgttgacacttgtgacctca

SEQ ID NO: 4598992 - DNA, 25 bp, Homo sapien
caaatgcgttcctatgtgtcaaaag

SEQ ID NO: 4598993 - DNA, 25 bp, Homo sapien
tcaaaaggcctaaatagccctgtgt

SEQ ID NO: 4598994 - DNA, 25 bp, Homo sapien
tctgaatcctagatccaccagtggt

SEQ ID NO: 4598995 - DNA, 25 bp, Homo sapien
ccagtggtctggttaactcaaagaa

SEQ ID NO: 4598996 - DNA, 25 bp, Homo sapien
aaaacctttttgcatcaggaggctc

SEQ ID NO: 4598997 - DNA, 25 bp, Homo sapien
gggtcatcatggctaacagtaacaa

SEQ ID NO: 4598998 - DNA, 25 bp, Homo sapien
tataatgggctcactcgccaactgg

SEQ ID NO: 4598999 - DNA, 25 bp, Homo sapien
tgtgatcttcattctaaggcccagc

SEQ ID NO: 4599000 - DNA, 25 bp, Homo sapien
tcttatggaagggatgcctgactgc

SEQ ID NO: 4599001 - DNA, 25 bp, Homo sapien
ggcccgcccagctttttcagaggtc

SEQ ID NO: 4599002 - DNA, 25 bp, Homo sapien
caggaagtgatgttctagcagcgat

SEQ ID NO: 4599003 - DNA, 25 bp, Homo sapien
tgactgcagataccgcaggaagtga

SEQ ID NO: 4599004 - DNA, 25 bp, Homo sapien
gtctgtttcagccaagtagtttcat

SEQ ID NO: 4599005 - DNA, 25 bp, Homo sapien
gacatcttggtgcttttacccgcaa

SEQ ID NO: 4599006 - DNA, 25 bp, Homo sapien
tacccgcaatccctattggtagtgg

SEQ ID NO: 4599007 - DNA, 25 bp, Homo sapien
caagccattgcagcaccctttactg

SEQ ID NO: 4599008 - DNA, 25 bp, Homo sapien
aagacatttatgtactgcccctgtg

SEQ ID NO: 4599009 - DNA, 25 bp, Homo sapien
aaatttcttgccatgctgaactgga

SEQ ID NO: 4599010 - DNA, 25 bp, Homo sapien
taaatattactaaccagcctggaga

SEQ ID NO: 4599011 - DNA, 25 bp, Homo sapien
ggatcccgttgtggagttcagatga

SEQ ID NO: 4599012 - DNA, 25 bp, Homo sapien
tttgttcctcgtgctgttgtcctcg

SEQ ID NO: 4599013 - DNA, 25 bp, Homo sapien
gcttggaatttctcggtcatcctct

SEQ ID NO: 4599014 - DNA, 25 bp, Homo sapien
cctagtaggtccagtgtcaatgcat

SEQ ID NO: 4599015 - DNA, 25 bp, Homo sapien
ggactggcattttctgggcttggaa

SEQ ID NO: 4599016 - DNA, 25 bp, Homo sapien
gacgtcacggccatgatgccagtta

SEQ ID NO: 4599017 - DNA, 25 bp, Homo sapien
cccaaagaggcttagttagtcctgt

SEQ ID NO: 4599018 - DNA, 25 bp, Homo sapien
aacctctcagacgtcacggccatga

SEQ ID NO: 4599019 - DNA, 25 bp, Homo sapien
gccagttacattatgcctagttaat

SEQ ID NO: 4599020 - DNA, 25 bp, Homo sapien
gcaacttctgagtacaatctactac

SEQ ID NO: 4599021 - DNA, 25 bp, Homo sapien
gagtacaatctactaccaagtgggt

SEQ ID NO: 4599022 - DNA, 25 bp, Homo sapien
tgttgagagcaacttctgagtacaa

SEQ ID NO: 4599023 - DNA, 25 bp, Homo sapien
gctgctgttgagagcaacttctgag

SEQ ID NO: 4599024 - DNA, 25 bp, Homo sapien
gagatcgatacgctgtgaaggttaa

SEQ ID NO: 4599025 - DNA, 25 bp, Homo sapien
actgagccccttcatgttatgcagg

SEQ ID NO: 4599026 - DNA, 25 bp, Homo sapien
gaaggttaaatctattttcacactg

SEQ ID NO: 4599027 - DNA, 25 bp, Homo sapien
tgttctatttcacagtttaatggtg

SEQ ID NO: 4599028 - DNA, 25 bp, Homo sapien
tggctcagcagtctgttctgagtgt

SEQ ID NO: 4599029 - DNA, 25 bp, Homo sapien
ctcctggctcagcagtctgttctga

SEQ ID NO: 4599030 - DNA, 25 bp, Homo sapien
tcctggctcagcagtctgttctgag

SEQ ID NO: 4599031 - DNA, 25 bp, Homo sapien
cctggctcagcagtctgttctgagt

SEQ ID NO: 4599032 - DNA, 25 bp, Homo sapien
taatgtgctggcatttaacatgcca

SEQ ID NO: 4599033 - DNA, 25 bp, Homo sapien
tttttaatgtgctggcatttaacat

SEQ ID NO: 4599034 - DNA, 25 bp, Homo sapien
ttaatgtgctggcatttaacatgcc

SEQ ID NO: 4599035 - DNA, 25 bp, Homo sapien
atgtgctggcatttaacatgccaca

SEQ ID NO: 4599036 - DNA, 25 bp, Homo sapien
aattctgacaaagaggtgcatttct

SEQ ID NO: 4599037 - DNA, 25 bp, Homo sapien
tacatctctgaaccgtaaccatggc

SEQ ID NO: 4599038 - DNA, 25 bp, Homo sapien
gcgatctgcaacattcatcagagga

SEQ ID NO: 4599039 - DNA, 25 bp, Homo sapien
gggtgctctcgtgttattacagctg

SEQ ID NO: 4599040 - DNA, 25 bp, Homo sapien
taccaaatccgagaaacagattcaa

SEQ ID NO: 4599041 - DNA, 25 bp, Homo sapien
gaaacagattcaaagggctagaaac

SEQ ID NO: 4599042 - DNA, 25 bp, Homo sapien
tcaggtaccaaatccgagaaacaga

SEQ ID NO: 4599043 - DNA, 25 bp, Homo sapien
gctagaaacaacagttctggttttc

SEQ ID NO: 4599044 - DNA, 25 bp, Homo sapien
gactgagaacttatgaacgtaatga

SEQ ID NO: 4599045 - DNA, 25 bp, Homo sapien
tggaaaatcttcaaccttacgactg

SEQ ID NO: 4599046 - DNA, 25 bp, Homo sapien
gaacttatgaacgtaatgatcacac

SEQ ID NO: 4599047 - DNA, 25 bp, Homo sapien
caaccttacgactgagaacttatga

SEQ ID NO: 4599048 - DNA, 25 bp, Homo sapien
cacattggctagtgtctagagcttc

SEQ ID NO: 4599049 - DNA, 25 bp, Homo sapien
ttttgccccacattggctagtgtct

SEQ ID NO: 4599050 - DNA, 25 bp, Homo sapien
gccccacattggctagtgtctagag

SEQ ID NO: 4599051 - DNA, 25 bp, Homo sapien
attggctagtgtctagagcttccat

SEQ ID NO: 4599052 - DNA, 25 bp, Homo sapien
tagtggctgacgtaatcatgacctc

SEQ ID NO: 4599053 - DNA, 25 bp, Homo sapien
taatcatgacctctgagatgttcat

SEQ ID NO: 4599054 - DNA, 25 bp, Homo sapien
ctggactagtggctgacgtaatcat

SEQ ID NO: 4599055 - DNA, 25 bp, Homo sapien
tgacgtaatcatgacctctgagatg

SEQ ID NO: 4599056 - DNA, 25 bp, Homo sapien
aatgtccgaaagcagcagggagtgc

SEQ ID NO: 4599057 - DNA, 25 bp, Homo sapien
tgaggaggcccacggaatgtccgaa

SEQ ID NO: 4599058 - DNA, 25 bp, Homo sapien
cggaatgtccgaaagcagcagggag

SEQ ID NO: 4599059 - DNA, 25 bp, Homo sapien
gttgaggaggcccacggaatgtccg

SEQ ID NO: 4599060 - DNA, 25 bp, Homo sapien
tcaggccccagaagtaagcctttga

SEQ ID NO: 4599061 - DNA, 25 bp, Homo sapien
caattggctgatgaagaaccgcctc

SEQ ID NO: 4599062 - DNA, 25 bp, Homo sapien
gaaagctctctcatacagtgctgcc

SEQ ID NO: 4599063 - DNA, 25 bp, Homo sapien
taagtgtgggcgtccctgtgatcca

SEQ ID NO: 4599064 - DNA, 25 bp, Homo sapien
aatatcttgggatctgggttttctg

SEQ ID NO: 4599065 - DNA, 25 bp, Homo sapien
ccaatgcgattctgaagctcagcca

SEQ ID NO: 4599066 - DNA, 25 bp, Homo sapien
atatcttgggatctgggttttctga

SEQ ID NO: 4599067 - DNA, 25 bp, Homo sapien
gaaatatcttgggatctgggttttc

SEQ ID NO: 4599068 - DNA, 25 bp, Homo sapien
gagaagatcatgcaggcccttggca

SEQ ID NO: 4599069 - DNA, 25 bp, Homo sapien
ggagaagatcatgcaggcccttggc

SEQ ID NO: 4599070 - DNA, 25 bp, Homo sapien
gccagtgaaggacaatgggcttatg

SEQ ID NO: 4599071 - DNA, 25 bp, Homo sapien
tatgtgtaaacatcgttgacagtgg

SEQ ID NO: 4599072 - DNA, 25 bp, Homo sapien
actacaaggctctccactgaggatg

SEQ ID NO: 4599073 - DNA, 25 bp, Homo sapien
tctccactgaggatggatatttggc

SEQ ID NO: 4599074 - DNA, 25 bp, Homo sapien
cacactacaaggctctccactgagg

SEQ ID NO: 4599075 - DNA, 25 bp, Homo sapien
caaggctctccactgaggatggata

SEQ ID NO: 4599076 - DNA, 25 bp, Homo sapien
gccttccgcagcttttgtacaagaa

SEQ ID NO: 4599077 - DNA, 25 bp, Homo sapien
gaaaatccagcaagaacagctctgt

SEQ ID NO: 4599078 - DNA, 25 bp, Homo sapien
catccaaggctatcctgctgttgaa

SEQ ID NO: 4599079 - DNA, 25 bp, Homo sapien
tgtcgccatacttcacgggaaaatc

SEQ ID NO: 4599080 - DNA, 25 bp, Homo sapien
gagcagggcgagtaagtggcaggag

SEQ ID NO: 4599081 - DNA, 25 bp, Homo sapien
aggagcagggcgagtaagtggcagg

SEQ ID NO: 4599082 - DNA, 25 bp, Homo sapien
cagggcgagtaagtggcaggagaca

SEQ ID NO: 4599083 - DNA, 25 bp, Homo sapien
gcagggcgagtaagtggcaggagac

SEQ ID NO: 4599084 - DNA, 25 bp, Homo sapien
gaagttcccgtaagccgcctcctca

SEQ ID NO: 4599085 - DNA, 25 bp, Homo sapien
gcttatcagcgataccctcctgtct

SEQ ID NO: 4599086 - DNA, 25 bp, Homo sapien
gttggctgggtctttgtgcttatca

SEQ ID NO: 4599087 - DNA, 25 bp, Homo sapien
gcagcttgggcttccggagttggct

SEQ ID NO: 4599088 - DNA, 25 bp, Homo sapien
tcagctcctcttagcggtgtgcagc

SEQ ID NO: 4599089 - DNA, 25 bp, Homo sapien
agatgcatttaattcgaaaacacct

SEQ ID NO: 4599090 - DNA, 25 bp, Homo sapien
gagatgcatttaattcgaaaacacc

SEQ ID NO: 4599091 - DNA, 25 bp, Homo sapien
tgagatgcatttaattcgaaaacac

SEQ ID NO: 4599092 - DNA, 25 bp, Homo sapien
tctgagatgcatttaattcgaaaac

SEQ ID NO: 4599093 - DNA, 25 bp, Homo sapien
gaaagcccgtaagtgggtgataaca

SEQ ID NO: 4599094 - DNA, 25 bp, Homo sapien
gctcccatccaaagagaactccatt

SEQ ID NO: 4599095 - DNA, 25 bp, Homo sapien
agcccgtaagtgggtgataacagct

SEQ ID NO: 4599096 - DNA, 25 bp, Homo sapien
tgggaaagcccgtaagtgggtgata

SEQ ID NO: 4599097 - DNA, 25 bp, Homo sapien
tctataaacccaagattggaagctg

SEQ ID NO: 4599098 - DNA, 25 bp, Homo sapien
gcattttcctgtctataaacccaag

SEQ ID NO: 4599099 - DNA, 25 bp, Homo sapien
gctgatcgactcttctcttgtttaa

SEQ ID NO: 4599100 - DNA, 25 bp, Homo sapien
ccaagattggaagctgatcgactct

SEQ ID NO: 4599101 - DNA, 25 bp, Homo sapien
catgcttacgaagagccacctgcat

SEQ ID NO: 4599102 - DNA, 25 bp, Homo sapien
aagcacccatgcttacgaagagcca

SEQ ID NO: 4599103 - DNA, 25 bp, Homo sapien
gccctctgcacacctggattccacg

SEQ ID NO: 4599104 - DNA, 25 bp, Homo sapien
tccacaagcacccatgcttacgaag

SEQ ID NO: 4599105 - DNA, 25 bp, Homo sapien
ataatgtcaaaagttcaaagggtgg

SEQ ID NO: 4599106 - DNA, 25 bp, Homo sapien
caaaagttcaaagggtggagagttg

SEQ ID NO: 4599107 - DNA, 25 bp, Homo sapien
atgtcaaaagttcaaagggtggaga

SEQ ID NO: 4599108 - DNA, 25 bp, Homo sapien
agggtggagagttgagaattctcac

SEQ ID NO: 4599109 - DNA, 25 bp, Homo sapien
acctggtttggaatgtagcccagtc

SEQ ID NO: 4599110 - DNA, 25 bp, Homo sapien
tcactcagctttacatgaagtgtct

SEQ ID NO: 4599111 - DNA, 25 bp, Homo sapien
aataaatgaggtctgcggattggct

SEQ ID NO: 4599112 - DNA, 25 bp, Homo sapien
tgcccttgttcttccataacctggt

SEQ ID NO: 4599113 - DNA, 25 bp, Homo sapien
gaatgaagcttggatatctcaattg

SEQ ID NO: 4599114 - DNA, 25 bp, Homo sapien
tagatacaagaatgcccagaccagt

SEQ ID NO: 4599115 - DNA, 25 bp, Homo sapien
aatccttgaagggacaccttgcagc

SEQ ID NO: 4599116 - DNA, 25 bp, Homo sapien
cagctgttgctacaaatgaaaggtt

SEQ ID NO: 4599117 - DNA, 25 bp, Homo sapien
gacaagtattacattgctcctgaaa

SEQ ID NO: 4599118 - DNA, 25 bp, Homo sapien
ttgctcctgaaatggaaccattcct

SEQ ID NO: 4599119 - DNA, 25 bp, Homo sapien
catccaggagacaagtattacattg

SEQ ID NO: 4599120 - DNA, 25 bp, Homo sapien
cctctctgatcattgcttttctcca

SEQ ID NO: 4599121 - DNA, 25 bp, Homo sapien
aagaacttgaccaaccacaattctg

SEQ ID NO: 4599122 - DNA, 25 bp, Homo sapien
caattctgctaacagtatattgaac

SEQ ID NO: 4599123 - DNA, 25 bp, Homo sapien
tattgaacagtgcattcctgtccat

SEQ ID NO: 4599124 - DNA, 25 bp, Homo sapien
gaacttgaccaaccacaattctgct

SEQ ID NO: 4599125 - DNA, 25 bp, Homo sapien
cctggtcgccagtctttctaagcat

SEQ ID NO: 4599126 - DNA, 25 bp, Homo sapien
tagcacatcccatttccatttgccg

SEQ ID NO: 4599127 - DNA, 25 bp, Homo sapien
tggcattctcaggtagatcaggcac

SEQ ID NO: 4599128 - DNA, 25 bp, Homo sapien
tgccgtttgttaccctggtcgccag

SEQ ID NO: 4599129 - DNA, 25 bp, Homo sapien
tccccagcatcactagggtctacag

SEQ ID NO: 4599130 - DNA, 25 bp, Homo sapien
ggtctacagataaagtaggaatggc

SEQ ID NO: 4599131 - DNA, 25 bp, Homo sapien
gaagctctgagaaagcgagtattca

SEQ ID NO: 4599132 - DNA, 25 bp, Homo sapien
cacatttatattggttctcattatg

SEQ ID NO: 4599133 - DNA, 25 bp, Homo sapien
ttgggagaatggggagaaggggctc

SEQ ID NO: 4599134 - DNA, 25 bp, Homo sapien
tgggagaatggggagaaggggctca

SEQ ID NO: 4599135 - DNA, 25 bp, Homo sapien
gggagaatggggagaaggggctcaa

SEQ ID NO: 4599136 - DNA, 25 bp, Homo sapien
ggaggtggggggctcacagatccct

SEQ ID NO: 4599137 - DNA, 25 bp, Homo sapien
caactgaaagaggtgacgaaggaag

SEQ ID NO: 4599138 - DNA, 25 bp, Homo sapien
gctcacagatccctgcccctccaca

SEQ ID NO: 4599139 - DNA, 25 bp, Homo sapien
aactgaaagaggtgacgaaggaagt

SEQ ID NO: 4599140 - DNA, 25 bp, Homo sapien
caaaacgatgatgcaaggaggccca

SEQ ID NO: 4599141 - DNA, 25 bp, Homo sapien
tgggtgaaattctgagtgtactaat

SEQ ID NO: 4599142 - DNA, 25 bp, Homo sapien
ttgatgatgcatcaccttgggtgaa

SEQ ID NO: 4599143 - DNA, 25 bp, Homo sapien
agtgtactaatgaccccagccaagc

SEQ ID NO: 4599144 - DNA, 25 bp, Homo sapien
acagcaggactctgattgactgtcc

SEQ ID NO: 4599145 - DNA, 25 bp, Homo sapien
taccctcatttgtcattgacctctg

SEQ ID NO: 4599146 - DNA, 25 bp, Homo sapien
ctaccctcatttgtcattgacctct

SEQ ID NO: 4599147 - DNA, 25 bp, Homo sapien
aagctcctaccctcatttgtcattg

SEQ ID NO: 4599148 - DNA, 25 bp, Homo sapien
cctcatttgtcattgacctctgcga

SEQ ID NO: 4599149 - DNA, 25 bp, Homo sapien
aggcagcagggacaatacagcaggc

SEQ ID NO: 4599150 - DNA, 25 bp, Homo sapien
ggagagggtaaacagaaggccactc

SEQ ID NO: 4599151 - DNA, 25 bp, Homo sapien
cagaaggccactcaaaggaggaaga

SEQ ID NO: 4599152 - DNA, 25 bp, Homo sapien
tccacagaggggtcacaaatgaaga

SEQ ID NO: 4599153 - DNA, 25 bp, Homo sapien
tgaccatgaagtttaggtccatcat

SEQ ID NO: 4599154 - DNA, 25 bp, Homo sapien
tgtaaggagaccgtatgccccaggt

SEQ ID NO: 4599155 - DNA, 25 bp, Homo sapien
ttctttggtgtaaggagaccgtatg

SEQ ID NO: 4599156 - DNA, 25 bp, Homo sapien
ttcttcaatcctagctctcacactt

SEQ ID NO: 4599157 - DNA, 25 bp, Homo sapien
cctttcttaggacacgctcatgagt

SEQ ID NO: 4599158 - DNA, 25 bp, Homo sapien
ggacacgctcatgagtgcacccgtt

SEQ ID NO: 4599159 - DNA, 25 bp, Homo sapien
ccgtttatggccagcagctcagggt

SEQ ID NO: 4599160 - DNA, 25 bp, Homo sapien
gagtgcacccgtttatggccagcag

SEQ ID NO: 4599161 - DNA, 25 bp, Homo sapien
taaactatgctcaaagtggaaacac

SEQ ID NO: 4599162 - DNA, 25 bp, Homo sapien
gatactaagtataagaagactggtg

SEQ ID NO: 4599163 - DNA, 25 bp, Homo sapien
tctgaacatgggtcacacaggatac

SEQ ID NO: 4599164 - DNA, 25 bp, Homo sapien
ttaactctaagagcccagactttct

SEQ ID NO: 4599165 - DNA, 25 bp, Homo sapien
catcctctcatatttccttggcttc

SEQ ID NO: 4599166 - DNA, 25 bp, Homo sapien
gcttcttgtacctgtcaagcatctc

SEQ ID NO: 4599167 - DNA, 25 bp, Homo sapien
tatggtgaggttgcagcatcctctc

SEQ ID NO: 4599168 - DNA, 25 bp, Homo sapien
tatctgagctgcatcgtgctctttc

SEQ ID NO: 4599169 - DNA, 25 bp, Homo sapien
cagttctcagcacaaatattgggct

SEQ ID NO: 4599170 - DNA, 25 bp, Homo sapien
acaaatattgggctcggttctccgg

SEQ ID NO: 4599171 - DNA, 25 bp, Homo sapien
gggctcggttctccgggtgtcacca

SEQ ID NO: 4599172 - DNA, 25 bp, Homo sapien
gttctccgggtgtcaccattagcag

SEQ ID NO: 4599173 - DNA, 25 bp, Homo sapien
agacagcaaggctcaggcctttcca

SEQ ID NO: 4599174 - DNA, 25 bp, Homo sapien
caagatttctaacagggcccagaca

SEQ ID NO: 4599175 - DNA, 25 bp, Homo sapien
tccatagaggcagtgtaaagattca

SEQ ID NO: 4599176 - DNA, 25 bp, Homo sapien
ttagcctgatatggaattcacttgg

SEQ ID NO: 4599177 - DNA, 25 bp, Homo sapien
gcaaagagtttgcaacttttggtac

SEQ ID NO: 4599178 - DNA, 25 bp, Homo sapien
acaggagcctcttgagaaacctggc

SEQ ID NO: 4599179 - DNA, 25 bp, Homo sapien
tctctgtgatgcccgaccacagcct

SEQ ID NO: 4599180 - DNA, 25 bp, Homo sapien
caggtttaatcctaagttcactctt

SEQ ID NO: 4599181 - DNA, 25 bp, Homo sapien
caggagcctcttgagaaacctggca

SEQ ID NO: 4599182 - DNA, 25 bp, Homo sapien
acacaacatgatgcgtccatgcgct

SEQ ID NO: 4599183 - DNA, 25 bp, Homo sapien
gtgatacacaacatgatgcgtccat

SEQ ID NO: 4599184 - DNA, 25 bp, Homo sapien
tacacaacatgatgcgtccatgcgc

SEQ ID NO: 4599185 - DNA, 25 bp, Homo sapien
gatacacaacatgatgcgtccatgc

SEQ ID NO: 4599186 - DNA, 25 bp, Homo sapien
tgccttttgaccaaatgggacatga

SEQ ID NO: 4599187 - DNA, 25 bp, Homo sapien
aagcactggattggaaatgcctttt

SEQ ID NO: 4599188 - DNA, 25 bp, Homo sapien
tacgggttgtataacatgttgtgat

SEQ ID NO: 4599189 - DNA, 25 bp, Homo sapien
gacatgatgttgatacgggttgtat

SEQ ID NO: 4599190 - DNA, 25 bp, Homo sapien
ctcatagacatctaggtccgctgtt

SEQ ID NO: 4599191 - DNA, 25 bp, Homo sapien
gcttatcatcttgaaaagggcttct

SEQ ID NO: 4599192 - DNA, 25 bp, Homo sapien
tatttcctgccccttattatctggt

SEQ ID NO: 4599193 - DNA, 25 bp, Homo sapien
tggtataatcgaacacagggcactt

SEQ ID NO: 4599194 - DNA, 25 bp, Homo sapien
acatttccctacagctgtcattgct

SEQ ID NO: 4599195 - DNA, 25 bp, Homo sapien
catttccctacagctgtcattgctc

SEQ ID NO: 4599196 - DNA, 25 bp, Homo sapien
taaagacgcagtatgtctctgcgag

SEQ ID NO: 4599197 - DNA, 25 bp, Homo sapien
aggaccaagtatccctgctgcctca

SEQ ID NO: 4599198 - DNA, 25 bp, Homo sapien
tgcctcacgaccattacacctaaag

SEQ ID NO: 4599199 - DNA, 25 bp, Homo sapien
tccaaaagattcagcatcaattcca

SEQ ID NO: 4599200 - DNA, 25 bp, Homo sapien
caggcccctaagagcctgatgcctg

SEQ ID NO: 4599201 - DNA, 25 bp, Homo sapien
ctgcaaagtgcaggcccctaagagc

SEQ ID NO: 4599202 - DNA, 25 bp, Homo sapien
aagtgcaggcccctaagagcctgat

SEQ ID NO: 4599203 - DNA, 25 bp, Homo sapien
tgcaggcccctaagagcctgatgcc

SEQ ID NO: 4599204 - DNA, 25 bp, Homo sapien
agggcgtttataattacctgaagag

SEQ ID NO: 4599205 - DNA, 25 bp, Homo sapien
tcccagaagaggcgctgcaactggt

SEQ ID NO: 4599206 - DNA, 25 bp, Homo sapien
tttcccagaagaggcgctgcaactg

SEQ ID NO: 4599207 - DNA, 25 bp, Homo sapien
gcgctgcaactggtgctgctgtaaa

SEQ ID NO: 4599208 - DNA, 25 bp, Homo sapien
cctttcccagaagaggcgctgcaac

SEQ ID NO: 4599209 - DNA, 25 bp, Homo sapien
cactgctacatttaaatgtgaaaag

SEQ ID NO: 4599210 - DNA, 25 bp, Homo sapien
ctgctacatttaaatgtgaaaagca

SEQ ID NO: 4599211 - DNA, 25 bp, Homo sapien
atttaaatgtgaaaagcagctgctt

SEQ ID NO: 4599212 - DNA, 25 bp, Homo sapien
acatttaaatgtgaaaagcagctgc

SEQ ID NO: 4599213 - DNA, 25 bp, Homo sapien
caatcatgtcgttttaggactctaa

SEQ ID NO: 4599214 - DNA, 25 bp, Homo sapien
aatgcccacagggtcttcagtccca

SEQ ID NO: 4599215 - DNA, 25 bp, Homo sapien
gatggtgtttgagcccatccttgcc

SEQ ID NO: 4599216 - DNA, 25 bp, Homo sapien
ttctccccattcagggatgtgcctg

SEQ ID NO: 4599217 - DNA, 25 bp, Homo sapien
gggatacaggtacgccagatggata

SEQ ID NO: 4599218 - DNA, 25 bp, Homo sapien
tctgtttcaaagacacagtgatggg

SEQ ID NO: 4599219 - DNA, 25 bp, Homo sapien
ccagatggataaatctagtgtgact

SEQ ID NO: 4599220 - DNA, 25 bp, Homo sapien
gacccattagcaggatgtgctgcaa

SEQ ID NO: 4599221 - DNA, 25 bp, Homo sapien
tccacccaaaccctacggcgctcca

SEQ ID NO: 4599222 - DNA, 25 bp, Homo sapien
tccatctgcattgaattatttatag

SEQ ID NO: 4599223 - DNA, 25 bp, Homo sapien
tttttaaatccatctgcattgaatt

SEQ ID NO: 4599224 - DNA, 25 bp, Homo sapien
ttaaatccatctgcattgaattatt

SEQ ID NO: 4599225 - DNA, 25 bp, Homo sapien
aaatctgctcaaatgggctatagga

SEQ ID NO: 4599226 - DNA, 25 bp, Homo sapien
ctcagtcggtcacacagcctcgttt

SEQ ID NO: 4599227 - DNA, 25 bp, Homo sapien
cagtggcccggagatgtgggacttt

SEQ ID NO: 4599228 - DNA, 25 bp, Homo sapien
gagaagcttgcccacactggtgggt

SEQ ID NO: 4599229 - DNA, 25 bp, Homo sapien
tccggagatctgcttgccatgtcat

SEQ ID NO: 4599230 - DNA, 25 bp, Homo sapien
ttgtcacagctccgaccatcttttt

SEQ ID NO: 4599231 - DNA, 25 bp, Homo sapien
cttgtcacagctccgaccatctttt

SEQ ID NO: 4599232 - DNA, 25 bp, Homo sapien
ctgcgtccggtaaccagcctccgct

SEQ ID NO: 4599233 - DNA, 25 bp, Homo sapien
gcgtccggtaaccagcctccgcttc

SEQ ID NO: 4599234 - DNA, 25 bp, Homo sapien
cagcctccgcttctcaacagacaca

SEQ ID NO: 4599235 - DNA, 25 bp, Homo sapien
agcctccgcttctcaacagacacac

SEQ ID NO: 4599236 - DNA, 25 bp, Homo sapien
actctccattccttctgatttcggt

SEQ ID NO: 4599237 - DNA, 25 bp, Homo sapien
ccaccagtcagtatgctgatcacca

SEQ ID NO: 4599238 - DNA, 25 bp, Homo sapien
gatttcggtgagaacagagtttccc

SEQ ID NO: 4599239 - DNA, 25 bp, Homo sapien
agtatgctgatcaccaggataccca

SEQ ID NO: 4599240 - DNA, 25 bp, Homo sapien
aactggctgcatctgttactgtaat

SEQ ID NO: 4599241 - DNA, 25 bp, Homo sapien
aatgagctggacacttgccaacaac

SEQ ID NO: 4599242 - DNA, 25 bp, Homo sapien
caggtgtatttgtccccgtttctag

SEQ ID NO: 4599243 - DNA, 25 bp, Homo sapien
ccgtttctagttaaactggctgcat

SEQ ID NO: 4599244 - DNA, 25 bp, Homo sapien
ccctaggattgacaagtgttgacac

SEQ ID NO: 4599245 - DNA, 25 bp, Homo sapien
catggttggcctcaggtaagcaaca

SEQ ID NO: 4599246 - DNA, 25 bp, Homo sapien
tagctcttgattgttggtgggcacg

SEQ ID NO: 4599247 - DNA, 25 bp, Homo sapien
taagcaacaagcctcagcagggact

SEQ ID NO: 4599248 - DNA, 25 bp, Homo sapien
ttgatcaatagcaatgatatggcca

SEQ ID NO: 4599249 - DNA, 25 bp, Homo sapien
tagcaatgatatggccagaagaata

SEQ ID NO: 4599250 - DNA, 25 bp, Homo sapien
caatagcaatgatatggccagaaga

SEQ ID NO: 4599251 - DNA, 25 bp, Homo sapien
caatgatatggccagaagaataaac

SEQ ID NO: 4599252 - DNA, 25 bp, Homo sapien
tctgtacatcccgagaactctgttt

SEQ ID NO: 4599253 - DNA, 25 bp, Homo sapien
gtgcaacgagccgtgctgcagcaga

SEQ ID NO: 4599254 - DNA, 25 bp, Homo sapien
gagaaagaggaaacccgttgagcta

SEQ ID NO: 4599255 - DNA, 25 bp, Homo sapien
tgactgtgtgtgcaacgagccgtgc

SEQ ID NO: 4599256 - DNA, 25 bp, Homo sapien
acccacgacctggaggaactgtctc

SEQ ID NO: 4599257 - DNA, 25 bp, Homo sapien
gagcaagcagctgtacttgcacgcc

SEQ ID NO: 4599258 - DNA, 25 bp, Homo sapien
gggctggcatgacaaccccttgagg

SEQ ID NO: 4599259 - DNA, 25 bp, Homo sapien
taggccttgcttttcgcctgttcag

SEQ ID NO: 4599260 - DNA, 25 bp, Homo sapien
agctagtctccatgggcctcccaaa

SEQ ID NO: 4599261 - DNA, 25 bp, Homo sapien
acaccaagctggaagccccggagct

SEQ ID NO: 4599262 - DNA, 25 bp, Homo sapien
caccaagctggaagccccggagctg

SEQ ID NO: 4599263 - DNA, 25 bp, Homo sapien
aaacaccaagctggaagccccggag

SEQ ID NO: 4599264 - DNA, 25 bp, Homo sapien
cacctcctcaaaatcaaatcctgct

SEQ ID NO: 4599265 - DNA, 25 bp, Homo sapien
gcgggaaccccgtgcgttattgatg

SEQ ID NO: 4599266 - DNA, 25 bp, Homo sapien
cctgctgattgaaaggtgatgacag

SEQ ID NO: 4599267 - DNA, 25 bp, Homo sapien
tgacagtcaggtgggtgcgggaacc

SEQ ID NO: 4599268 - DNA, 25 bp, Homo sapien
tgcctcgctgccctctatagaattg

SEQ ID NO: 4599269 - DNA, 25 bp, Homo sapien
ttcttaaaagtctccctgcctcgct

SEQ ID NO: 4599270 - DNA, 25 bp, Homo sapien
aagctctgatcgtatttagggaaaa

SEQ ID NO: 4599271 - DNA, 25 bp, Homo sapien
ttgttgttatcaaagggcaaagctc

SEQ ID NO: 4599272 - DNA, 25 bp, Homo sapien
ctctcacatttgatctctcctttct

SEQ ID NO: 4599273 - DNA, 25 bp, Homo sapien
tgggcctcctgactctgtttccaag

SEQ ID NO: 4599274 - DNA, 25 bp, Homo sapien
ctcactctctcacatttgatctctc

SEQ ID NO: 4599275 - DNA, 25 bp, Homo sapien
cttggcagaagcacccaaagaagag

SEQ ID NO: 4599276 - DNA, 25 bp, Homo sapien
ttcaggaaaacacatgctacaaggt

SEQ ID NO: 4599277 - DNA, 25 bp, Homo sapien
agaactgaacggcagatcaggagag

SEQ ID NO: 4599278 - DNA, 25 bp, Homo sapien
tacaaggttgtaaggcttctgggca

SEQ ID NO: 4599279 - DNA, 25 bp, Homo sapien
tgggcaaacataagaacaagaactg

SEQ ID NO: 4599280 - DNA, 25 bp, Homo sapien
aggtgctggtcccaaagaggaaagc

SEQ ID NO: 4599281 - DNA, 25 bp, Homo sapien
cctggtgcctgtagttcttgggcag

SEQ ID NO: 4599282 - DNA, 25 bp, Homo sapien
gcatgaatttctcagcacggcataa

SEQ ID NO: 4599283 - DNA, 25 bp, Homo sapien
aagcagcatgaatttctcagcacgg

SEQ ID NO: 4599284 - DNA, 25 bp, Homo sapien
caaggttgtgccatggaataaccaa

SEQ ID NO: 4599285 - DNA, 25 bp, Homo sapien
ccttcctacacagacaaggttgtgc

SEQ ID NO: 4599286 - DNA, 25 bp, Homo sapien
aagggcaggagagtcagtggttggc

SEQ ID NO: 4599287 - DNA, 25 bp, Homo sapien
ttggctgatgtgtaatgattgactg

SEQ ID NO: 4599288 - DNA, 25 bp, Homo sapien
ggtaggttcatatatatatcgagga

SEQ ID NO: 4599289 - DNA, 25 bp, Homo sapien
catcctcaaaggtaggttcatatat

SEQ ID NO: 4599290 - DNA, 25 bp, Homo sapien
tcatatatatatcgaggaagtgctt

SEQ ID NO: 4599291 - DNA, 25 bp, Homo sapien
agtagttcatcctcaaaggtaggtt

SEQ ID NO: 4599292 - DNA, 25 bp, Homo sapien
tgccctgccggaaacaattcttatg

SEQ ID NO: 4599293 - DNA, 25 bp, Homo sapien
gatggcaagactgagtaggatacca

SEQ ID NO: 4599294 - DNA, 25 bp, Homo sapien
catggcccttaagtcaatgttactg

SEQ ID NO: 4599295 - DNA, 25 bp, Homo sapien
taggataccaacgacatgaacatgt

SEQ ID NO: 4599296 - DNA, 25 bp, Homo sapien
catattacagacatgcttcagtaaa

SEQ ID NO: 4599297 - DNA, 25 bp, Homo sapien
taattcattgtttgtggaactggta

SEQ ID NO: 4599298 - DNA, 25 bp, Homo sapien
catgcttcagtaaaactgggcagtt

SEQ ID NO: 4599299 - DNA, 25 bp, Homo sapien
acatatgtatagatagaagcaaaca

SEQ ID NO: 4599300 - DNA, 25 bp, Homo sapien
cttttaatcagattcaacttgactg

SEQ ID NO: 4599301 - DNA, 25 bp, Homo sapien
tcagattcaacttgactgtggccat

SEQ ID NO: 4599302 - DNA, 25 bp, Homo sapien
tgaggtcaaatacccctaaacctgc

SEQ ID NO: 4599303 - DNA, 25 bp, Homo sapien
acagcactgatgaggtcaaataccc

SEQ ID NO: 4599304 - DNA, 25 bp, Homo sapien
gtaatgatgcccaagacctttttct

SEQ ID NO: 4599305 - DNA, 25 bp, Homo sapien
agtaatgatgcccaagacctttttc

SEQ ID NO: 4599306 - DNA, 25 bp, Homo sapien
tcagttacatttgcctaggagtaat

SEQ ID NO: 4599307 - DNA, 25 bp, Homo sapien
ctgtagcctgggctagagtgcactg

SEQ ID NO: 4599308 - DNA, 25 bp, Homo sapien
ctgcctcccaggttcaagtgattct

SEQ ID NO: 4599309 - DNA, 25 bp, Homo sapien
tctcactctgtagcctgggctagag

SEQ ID NO: 4599310 - DNA, 25 bp, Homo sapien
gtgtgatctcagcttactacaacct

SEQ ID NO: 4599311 - DNA, 25 bp, Homo sapien
ctcagccagaagcttactgcctcgc

SEQ ID NO: 4599312 - DNA, 25 bp, Homo sapien
cagccagaagcttactgcctcgcat

SEQ ID NO: 4599313 - DNA, 25 bp, Homo sapien
gagaagaaattccttggtgtcagtg

SEQ ID NO: 4599314 - DNA, 25 bp, Homo sapien
gaagaaattccttggtgtcagtgat

SEQ ID NO: 4599315 - DNA, 25 bp, Homo sapien
gcttcctggagtctacctgacataa

SEQ ID NO: 4599316 - DNA, 25 bp, Homo sapien
cagccctgttgatacaaagtagacc

SEQ ID NO: 4599317 - DNA, 25 bp, Homo sapien
tcctgatccagggttattgaacctt

SEQ ID NO: 4599318 - DNA, 25 bp, Homo sapien
tctgactgccgtagacatttttgcc

SEQ ID NO: 4599319 - DNA, 25 bp, Homo sapien
tcaacttatcgcatcgttcaaaaac

SEQ ID NO: 4599320 - DNA, 25 bp, Homo sapien
tatcgcatcgttcaaaaactcgaaa

SEQ ID NO: 4599321 - DNA, 25 bp, Homo sapien
gcatcgttcaaaaactcgaaaatca

SEQ ID NO: 4599322 - DNA, 25 bp, Homo sapien
ttttttctcaacttatcgcatcgtt

SEQ ID NO: 4599323 - DNA, 25 bp, Homo sapien
tctgagtactaagaattttatagct

SEQ ID NO: 4599324 - DNA, 25 bp, Homo sapien
tagctataaggattaatatttctcc

SEQ ID NO: 4599325 - DNA, 25 bp, Homo sapien
tttgacaggacggagaaaatcattt

SEQ ID NO: 4599326 - DNA, 25 bp, Homo sapien
tgatgtccagtgaaagagatacttc

SEQ ID NO: 4599327 - DNA, 25 bp, Homo sapien
atctcaacaggcacgccagcaaagg

SEQ ID NO: 4599328 - DNA, 25 bp, Homo sapien
tgagtgtgttgtgcttcccgtccat

SEQ ID NO: 4599329 - DNA, 25 bp, Homo sapien
tcagctaatgccactctgagtgtgt

SEQ ID NO: 4599330 - DNA, 25 bp, Homo sapien
tacaagacggcagcatcatcacgct

SEQ ID NO: 4599331 - DNA, 25 bp, Homo sapien
gggttgacctcatcctcgagacaca

SEQ ID NO: 4599332 - DNA, 25 bp, Homo sapien
ttcttcgtggacaccggctccaagg

SEQ ID NO: 4599333 - DNA, 25 bp, Homo sapien
gagcggcccttctacgaactctggg

SEQ ID NO: 4599334 - DNA, 25 bp, Homo sapien
gagcttcctacaacccgtactttga

SEQ ID NO: 4599335 - DNA, 25 bp, Homo sapien
aggtgttcctgctgcgcgggatcaa

SEQ ID NO: 4599336 - DNA, 25 bp, Homo sapien
cctgctgcgcgggatcaaggcccag

SEQ ID NO: 4599337 - DNA, 25 bp, Homo sapien
cggcaggcacggcggaaggccgagg

SEQ ID NO: 4599338 - DNA, 25 bp, Homo sapien
ggcacggcggaaggccgaggctgac

SEQ ID NO: 4599339 - DNA, 25 bp, Homo sapien
tctgtaataagatgaccaatttgtt

SEQ ID NO: 4599340 - DNA, 25 bp, Homo sapien
tttctgtaataagatgaccaatttg

SEQ ID NO: 4599341 - DNA, 25 bp, Homo sapien
ccctttctgtaataagatgaccaat

SEQ ID NO: 4599342 - DNA, 25 bp, Homo sapien
gttccctttctgtaataagatgacc

SEQ ID NO: 4599343 - DNA, 25 bp, Homo sapien
ggcgtacaccactatactcggctaa

SEQ ID NO: 4599344 - DNA, 25 bp, Homo sapien
ttggcacattacacactggttggca

SEQ ID NO: 4599345 - DNA, 25 bp, Homo sapien
aaggattggcacattacacactggt

SEQ ID NO: 4599346 - DNA, 25 bp, Homo sapien
catgcccggcccttagtgccatatt

SEQ ID NO: 4599347 - DNA, 25 bp, Homo sapien
tcactaatgcaatccggctagagct

SEQ ID NO: 4599348 - DNA, 25 bp, Homo sapien
gacatgtttcatttcctccgaggga

SEQ ID NO: 4599349 - DNA, 25 bp, Homo sapien
ggaacactcgagacctctgaaagta

SEQ ID NO: 4599350 - DNA, 25 bp, Homo sapien
gaatgaatagttgtgagtcccagct

SEQ ID NO: 4599351 - DNA, 25 bp, Homo sapien
tgaatgatcagtagtcaggaaaggg

SEQ ID NO: 4599352 - DNA, 25 bp, Homo sapien
cctactaagtgctaacaggctgctg

SEQ ID NO: 4599353 - DNA, 25 bp, Homo sapien
tgataatagataattacgtggcccc

SEQ ID NO: 4599354 - DNA, 25 bp, Homo sapien
ccagcgagtctgaaagtgcagttca

SEQ ID NO: 4599355 - DNA, 25 bp, Homo sapien
gtcctcctcggtgtgctgatagaag

SEQ ID NO: 4599356 - DNA, 25 bp, Homo sapien
tgcatattggaacccgcagacagag

SEQ ID NO: 4599357 - DNA, 25 bp, Homo sapien
gagtgggtcatttggcattagcaaa

SEQ ID NO: 4599358 - DNA, 25 bp, Homo sapien
gagtaagttcgcatttgcactgagc

SEQ ID NO: 4599359 - DNA, 25 bp, Homo sapien
aaggtacaactcatccctgctaaca

SEQ ID NO: 4599360 - DNA, 25 bp, Homo sapien
tatatcaatttaccaaggtacaact

SEQ ID NO: 4599361 - DNA, 25 bp, Homo sapien
ttgctagcatgactatattaggttg

SEQ ID NO: 4599362 - DNA, 25 bp, Homo sapien
tctatgtttcattaactacgtagtt

SEQ ID NO: 4599363 - DNA, 25 bp, Homo sapien
caatgccgacgtctccagtgtgaat

SEQ ID NO: 4599364 - DNA, 25 bp, Homo sapien
cattgagctgtcaaaagtagtgcac

SEQ ID NO: 4599365 - DNA, 25 bp, Homo sapien
tggtccccagactgttaactagtgt

SEQ ID NO: 4599366 - DNA, 25 bp, Homo sapien
tggacaagggcaaacatccgaacta

SEQ ID NO: 4599367 - DNA, 25 bp, Homo sapien
tgcaaaggtcctgtaagtttatacg

SEQ ID NO: 4599368 - DNA, 25 bp, Homo sapien
taacattcagaaccaccaattctta

SEQ ID NO: 4599369 - DNA, 25 bp, Homo sapien
aatggctttagctccctatattttg

SEQ ID NO: 4599370 - DNA, 25 bp, Homo sapien
ttaaccacagttgatcacgattgca

SEQ ID NO: 4599371 - DNA, 25 bp, Homo sapien
taagactccagtggcctcatattgg

SEQ ID NO: 4599372 - DNA, 25 bp, Homo sapien
catattggccaggatttcttacatc

SEQ ID NO: 4599373 - DNA, 25 bp, Homo sapien
gcagcaaacacatcatacctcatag

SEQ ID NO: 4599374 - DNA, 25 bp, Homo sapien
catcgactctggtcaagagctcctc

SEQ ID NO: 4599375 - DNA, 25 bp, Homo sapien
tatgtgggtgtatggtctcatgccc

SEQ ID NO: 4599376 - DNA, 25 bp, Homo sapien
ggtgtagacacccatagctcatgac

SEQ ID NO: 4599377 - DNA, 25 bp, Homo sapien
ggtccatgcatgaacagagggtccc

SEQ ID NO: 4599378 - DNA, 25 bp, Homo sapien
ggtgcccaacctcgatcatcttgtg

SEQ ID NO: 4599379 - DNA, 25 bp, Homo sapien
gcagggatcaggcactagaagtctt

SEQ ID NO: 4599380 - DNA, 25 bp, Homo sapien
ggaaaagacgccaggaatgtcctga

SEQ ID NO: 4599381 - DNA, 25 bp, Homo sapien
catgaggccatggataatgccggtt

SEQ ID NO: 4599382 - DNA, 25 bp, Homo sapien
tgtatagagtgagaaagggccgaaa

SEQ ID NO: 4599383 - DNA, 25 bp, Homo sapien
ctgttgcatggagattctcagtgct

SEQ ID NO: 4599384 - DNA, 25 bp, Homo sapien
ttgcatggagattctcagtgctaaa

SEQ ID NO: 4599385 - DNA, 25 bp, Homo sapien
tgttgcatggagattctcagtgcta

SEQ ID NO: 4599386 - DNA, 25 bp, Homo sapien
gttgcatggagattctcagtgctaa

SEQ ID NO: 4599387 - DNA, 25 bp, Homo sapien
tcccagagtactgcaaaaccaaaat

SEQ ID NO: 4599388 - DNA, 25 bp, Homo sapien
tttgcaccccacatccatatttctg

SEQ ID NO: 4599389 - DNA, 25 bp, Homo sapien
taactccatcccagagtactgcaaa

SEQ ID NO: 4599390 - DNA, 25 bp, Homo sapien
taattctgtatctagtaactccatc

SEQ ID NO: 4599391 - DNA, 25 bp, Homo sapien
ttaatgaagatcattgcaagctttc

SEQ ID NO: 4599392 - DNA, 25 bp, Homo sapien
ttctttgccaatagtagcgtgcaaa

SEQ ID NO: 4599393 - DNA, 25 bp, Homo sapien
cttcttaatgaagatcattgcaagc

SEQ ID NO: 4599394 - DNA, 25 bp, Homo sapien
aatagtagcgtgcaaataatcctgc

SEQ ID NO: 4599395 - DNA, 25 bp, Homo sapien
ggctggccacatgccaaggttgcag

SEQ ID NO: 4599396 - DNA, 25 bp, Homo sapien
gccaaggttgcaggccattagcaag

SEQ ID NO: 4599397 - DNA, 25 bp, Homo sapien
cctggtccctgggtaacaatggctg

SEQ ID NO: 4599398 - DNA, 25 bp, Homo sapien
gactcgcacagccagcattctgtct

SEQ ID NO: 4599399 - DNA, 25 bp, Homo sapien
taccataactgtcaaccgaaatcag

SEQ ID NO: 4599400 - DNA, 25 bp, Homo sapien
gacagatgcgtttcctgcattattg

SEQ ID NO: 4599401 - DNA, 25 bp, Homo sapien
taatctcattgtgctggacagatgc

SEQ ID NO: 4599402 - DNA, 25 bp, Homo sapien
tacaaaaggagattggccaagtcct

SEQ ID NO: 4599403 - DNA, 25 bp, Homo sapien
gaaactgcagcaggtatgttctgcc

SEQ ID NO: 4599404 - DNA, 25 bp, Homo sapien
cagctgtgtgaagtagccgctgtga

SEQ ID NO: 4599405 - DNA, 25 bp, Homo sapien
tcttgtatagagtctcaagcctgtg

SEQ ID NO: 4599406 - DNA, 25 bp, Homo sapien
ttgggaccacagataccactttgga

SEQ ID NO: 4599407 - DNA, 25 bp, Homo sapien
aaggaaagggtgtccatctcattga

SEQ ID NO: 4599408 - DNA, 25 bp, Homo sapien
gataaaatttggcttgttcacccag

SEQ ID NO: 4599409 - DNA, 25 bp, Homo sapien
ataaaatttggcttgttcacccaga

SEQ ID NO: 4599410 - DNA, 25 bp, Homo sapien
tgataaaatttggcttgttcaccca

SEQ ID NO: 4599411 - DNA, 25 bp, Homo sapien
ttgctgcttgacctgccagactact

SEQ ID NO: 4599412 - DNA, 25 bp, Homo sapien
gcttgacctgccagactactgaatt

SEQ ID NO: 4599413 - DNA, 25 bp, Homo sapien
gctgcttgacctgccagactactga

SEQ ID NO: 4599414 - DNA, 25 bp, Homo sapien
tgacctgccagactactgaattcct

SEQ ID NO: 4599415 - DNA, 25 bp, Homo sapien
tcctgagttgtggatagagcaaaag

SEQ ID NO: 4599416 - DNA, 25 bp, Homo sapien
aaaatcagggatatgaggcactcag

SEQ ID NO: 4599417 - DNA, 25 bp, Homo sapien
gcctaaagaggcacgaatggaagtt

SEQ ID NO: 4599418 - DNA, 25 bp, Homo sapien
gagactagcaagagtggacaggctt

SEQ ID NO: 4599419 - DNA, 25 bp, Homo sapien
gctttgcctgagggaggatattcca

SEQ ID NO: 4599420 - DNA, 25 bp, Homo sapien
ctttgcctgagggaggatattccaa

SEQ ID NO: 4599421 - DNA, 25 bp, Homo sapien
acatctgctcggctcacatgcatgc

SEQ ID NO: 4599422 - DNA, 25 bp, Homo sapien
gctcggctcacatgcatgcaatggt

SEQ ID NO: 4599423 - DNA, 25 bp, Homo sapien
cacgcatgtttgtatgcacatctgc

SEQ ID NO: 4599424 - DNA, 25 bp, Homo sapien
acacacacgcatgtttgtatgcaca

SEQ ID NO: 4599425 - DNA, 25 bp, Homo sapien
tgctgaaaagttggttggccaacct

SEQ ID NO: 4599426 - DNA, 25 bp, Homo sapien
agttgctgaaaagttggttggccaa

SEQ ID NO: 4599427 - DNA, 25 bp, Homo sapien
ttgctgaaaagttggttggccaacc

SEQ ID NO: 4599428 - DNA, 25 bp, Homo sapien
aagttgctgaaaagttggttggcca

SEQ ID NO: 4599429 - DNA, 25 bp, Homo sapien
cctgatgatgagcctgcatgcaccc

SEQ ID NO: 4599430 - DNA, 25 bp, Homo sapien
gcctgatgatgagcctgcatgcacc

SEQ ID NO: 4599431 - DNA, 25 bp, Homo sapien
tgatgatgagcctgcatgcacccat

SEQ ID NO: 4599432 - DNA, 25 bp, Homo sapien
tctgtgagggccaattatcttctgc

SEQ ID NO: 4599433 - DNA, 25 bp, Homo sapien
tgtttctcagaatcgcaggcctgtg

SEQ ID NO: 4599434 - DNA, 25 bp, Homo sapien
tctctggacttgtgcctgaactgcc

SEQ ID NO: 4599435 - DNA, 25 bp, Homo sapien
cctcaagggcaatggaataaactcc

SEQ ID NO: 4599436 - DNA, 25 bp, Homo sapien
gatggggccttcaatagggcactta

SEQ ID NO: 4599437 - DNA, 25 bp, Homo sapien
caatagggcacttaactttctgctc

SEQ ID NO: 4599438 - DNA, 25 bp, Homo sapien
cttcttctccgggagaagcccagac

SEQ ID NO: 4599439 - DNA, 25 bp, Homo sapien
tttctgctcaacaaatctcaactga

SEQ ID NO: 4599440 - DNA, 25 bp, Homo sapien
gagcaagattgtcacccgcttccct

SEQ ID NO: 4599441 - DNA, 25 bp, Homo sapien
ctaggcgccaaagagcaagattgtc

SEQ ID NO: 4599442 - DNA, 25 bp, Homo sapien
cgcttccctcttttcactagtgagg

SEQ ID NO: 4599443 - DNA, 25 bp, Homo sapien
ttcacttcagagactccaatggcta

SEQ ID NO: 4599444 - DNA, 25 bp, Homo sapien
gacagaggtacggtgacctccttcg

SEQ ID NO: 4599445 - DNA, 25 bp, Homo sapien
ctacacctgttagttggctccttgg

SEQ ID NO: 4599446 - DNA, 25 bp, Homo sapien
gacctccttcgatccttaatctaca

SEQ ID NO: 4599447 - DNA, 25 bp, Homo sapien
ccttaatctacacctgttagttggc

SEQ ID NO: 4599448 - DNA, 25 bp, Homo sapien
gcgacgacagcagcggatcaatgca

SEQ ID NO: 4599449 - DNA, 25 bp, Homo sapien
tccccaagcattattgatccaagtt

SEQ ID NO: 4599450 - DNA, 25 bp, Homo sapien
cgacagcagcggatcaatgcaagta

SEQ ID NO: 4599451 - DNA, 25 bp, Homo sapien
cattattgatccaagttctttgttc

SEQ ID NO: 4599452 - DNA, 25 bp, Homo sapien
tctatcatttctctacatgcagaaa

SEQ ID NO: 4599453 - DNA, 25 bp, Homo sapien
tatcatttctctacatgcagaaatc

SEQ ID NO: 4599454 - DNA, 25 bp, Homo sapien
gatgaagtatgaaagcttatttcta

SEQ ID NO: 4599455 - DNA, 25 bp, Homo sapien
cttttaagtgatgtgttgatgaagt

SEQ ID NO: 4599456 - DNA, 25 bp, Homo sapien
tcaagagaggtagcacatggcttcc

SEQ ID NO: 4599457 - DNA, 25 bp, Homo sapien
caaccatcctgcactggtggaacat

SEQ ID NO: 4599458 - DNA, 25 bp, Homo sapien
cggtgatggtaactgaaaagcaact

SEQ ID NO: 4599459 - DNA, 25 bp, Homo sapien
gctgccaggatcattagaactaaca

SEQ ID NO: 4599460 - DNA, 25 bp, Homo sapien
tttgagattttcttgcgaagtctgg

SEQ ID NO: 4599461 - DNA, 25 bp, Homo sapien
tgggctgagggagaaatactgtatt

SEQ ID NO: 4599462 - DNA, 25 bp, Homo sapien
gattttcttgcgaagtctggaaagc

SEQ ID NO: 4599463 - DNA, 25 bp, Homo sapien
gataaagaactaactttgggctgag

SEQ ID NO: 4599464 - DNA, 25 bp, Homo sapien
tgatgtgcttgcataacaaggacca

SEQ ID NO: 4599465 - DNA, 25 bp, Homo sapien
gatgtgcttgcataacaaggaccag

SEQ ID NO: 4599466 - DNA, 25 bp, Homo sapien
atgtgcttgcataacaaggaccagg

SEQ ID NO: 4599467 - DNA, 25 bp, Homo sapien
tgtgcttgcataacaaggaccagga

SEQ ID NO: 4599468 - DNA, 25 bp, Homo sapien
ctccgtttctccaaacatgactgag

SEQ ID NO: 4599469 - DNA, 25 bp, Homo sapien
actgagaacagacagcttggaagag

SEQ ID NO: 4599470 - DNA, 25 bp, Homo sapien
aagagccaaatatgtactcctccat

SEQ ID NO: 4599471 - DNA, 25 bp, Homo sapien
tccgtttctccaaacatgactgaga

SEQ ID NO: 4599472 - DNA, 25 bp, Homo sapien
cgagatcattacagcgacaagccca

SEQ ID NO: 4599473 - DNA, 25 bp, Homo sapien
acatttttattcatcgccacgagat

SEQ ID NO: 4599474 - DNA, 25 bp, Homo sapien
acgtttatgatcttgttcgctttgc

SEQ ID NO: 4599475 - DNA, 25 bp, Homo sapien
tcacaaatctgttacccggacattt

SEQ ID NO: 4599476 - DNA, 25 bp, Homo sapien
tcttgcctaggaatgcttctagcac

SEQ ID NO: 4599477 - DNA, 25 bp, Homo sapien
ttctgctgggctctactcttgccta

SEQ ID NO: 4599478 - DNA, 25 bp, Homo sapien
ctgactcaaccgcaaccagctggcg

SEQ ID NO: 4599479 - DNA, 25 bp, Homo sapien
ggctctactcttgcctaggaatgct

SEQ ID NO: 4599480 - DNA, 25 bp, Homo sapien
tgaccctggcagtcttttataatct

SEQ ID NO: 4599481 - DNA, 25 bp, Homo sapien
ttcgcagtgtatcctagagctcttc

SEQ ID NO: 4599482 - DNA, 25 bp, Homo sapien
taagggcagtacacatagcacaacg

SEQ ID NO: 4599483 - DNA, 25 bp, Homo sapien
taccattggatgagtcctctagtca

SEQ ID NO: 4599484 - DNA, 25 bp, Homo sapien
taagattgaggttccacatcttgtg

SEQ ID NO: 4599485 - DNA, 25 bp, Homo sapien
cctggtggaagtcatcatgtggcaa

SEQ ID NO: 4599486 - DNA, 25 bp, Homo sapien
cctgttgagtcataacctggtggaa

SEQ ID NO: 4599487 - DNA, 25 bp, Homo sapien
cctgccagtatcattacattgggaa

SEQ ID NO: 4599488 - DNA, 25 bp, Homo sapien
tagaccaaaaatctggccagggctc

SEQ ID NO: 4599489 - DNA, 25 bp, Homo sapien
tcaatttattgtggctgtagggact

SEQ ID NO: 4599490 - DNA, 25 bp, Homo sapien
cctgtagaccaaaaatctggccagg

SEQ ID NO: 4599491 - DNA, 25 bp, Homo sapien
gaattcaatttattgtggctgtagg

SEQ ID NO: 4599492 - DNA, 25 bp, Homo sapien
tctcgaaggagatctatatgtagac

SEQ ID NO: 4599493 - DNA, 25 bp, Homo sapien
gagtgtgattcatttaccagtagcc

SEQ ID NO: 4599494 - DNA, 25 bp, Homo sapien
ggcattgcctaggagcttgttaaaa

SEQ ID NO: 4599495 - DNA, 25 bp, Homo sapien
cttgcatatacaccattcagaaggt

SEQ ID NO: 4599496 - DNA, 25 bp, Homo sapien
tggggctgttgaatgaaacgttcct

SEQ ID NO: 4599497 - DNA, 25 bp, Homo sapien
gcttactgcaaacttatgcaaactt

SEQ ID NO: 4599498 - DNA, 25 bp, Homo sapien
tactgcaaacagacctaaatgtctg

SEQ ID NO: 4599499 - DNA, 25 bp, Homo sapien
gaaatgttcaattgtttatttgaca

SEQ ID NO: 4599500 - DNA, 25 bp, Homo sapien
tccagtctgggaagataacatgctt

SEQ ID NO: 4599501 - DNA, 25 bp, Homo sapien
cagagccaacctgcctaaattatga

SEQ ID NO: 4599502 - DNA, 25 bp, Homo sapien
caaagcaatggccagtacaattcca

SEQ ID NO: 4599503 - DNA, 25 bp, Homo sapien
ggaagataataactcctccagtctg

SEQ ID NO: 4599504 - DNA, 25 bp, Homo sapien
agagcattcccatcagcttgtccac

SEQ ID NO: 4599505 - DNA, 25 bp, Homo sapien
gtccactcttccagtagagcattcc

SEQ ID NO: 4599506 - DNA, 25 bp, Homo sapien
ttcccatcagcttgtccaccacagc

SEQ ID NO: 4599507 - DNA, 25 bp, Homo sapien
actcttccagtagagcattcccatc

SEQ ID NO: 4599508 - DNA, 25 bp, Homo sapien
cttagatcaatcacaaggtgtgccc

SEQ ID NO: 4599509 - DNA, 25 bp, Homo sapien
ctgagtggccgttatagttacattc

SEQ ID NO: 4599510 - DNA, 25 bp, Homo sapien
gctgttaagctctatctctgacctg

SEQ ID NO: 4599511 - DNA, 25 bp, Homo sapien
ggttcatctgcaaatctcagcctca

SEQ ID NO: 4599512 - DNA, 25 bp, Homo sapien
tgtaaatgggtaatataacatatga

SEQ ID NO: 4599513 - DNA, 25 bp, Homo sapien
catttgtgacactttaatagccagt

SEQ ID NO: 4599514 - DNA, 25 bp, Homo sapien
tcctcacctcacgttatagactaaa

SEQ ID NO: 4599515 - DNA, 25 bp, Homo sapien
ttacaaattacaaatactccaagga

SEQ ID NO: 4599516 - DNA, 25 bp, Homo sapien
gcaattggccaaataagagaaatgc

SEQ ID NO: 4599517 - DNA, 25 bp, Homo sapien
tgtgcaaaagtgaggtttatatcct

SEQ ID NO: 4599518 - DNA, 25 bp, Homo sapien
taatttgtccgaacatagtcaacat

SEQ ID NO: 4599519 - DNA, 25 bp, Homo sapien
cattattgcatatgatggcttgcaa

SEQ ID NO: 4599520 - DNA, 25 bp, Homo sapien
cgtgacggctccatagtgaagtgct

SEQ ID NO: 4599521 - DNA, 25 bp, Homo sapien
gttatgacaacaccttcacgccttg

SEQ ID NO: 4599522 - DNA, 25 bp, Homo sapien
agtttcccacgctctctaggtgccg

SEQ ID NO: 4599523 - DNA, 25 bp, Homo sapien
gagtttgttgtatgcctggcccttg

SEQ ID NO: 4599524 - DNA, 25 bp, Homo sapien
tgtttcctccagttcaccaatattt

SEQ ID NO: 4599525 - DNA, 25 bp, Homo sapien
tgagttttttatattggttattgta

SEQ ID NO: 4599526 - DNA, 25 bp, Homo sapien
tggcatacatgggaatttgcatccc

SEQ ID NO: 4599527 - DNA, 25 bp, Homo sapien
tactgccaggtagggtaaaagttca

SEQ ID NO: 4599528 - DNA, 25 bp, Homo sapien
caataaagcagttatctcttggcat

SEQ ID NO: 4599529 - DNA, 25 bp, Homo sapien
tcctcacagacgaaggtgggtgtcg

SEQ ID NO: 4599530 - DNA, 25 bp, Homo sapien
tcctttggctagagacagagtagtc

SEQ ID NO: 4599531 - DNA, 25 bp, Homo sapien
gatggaagtgccttgctgctgctct

SEQ ID NO: 4599532 - DNA, 25 bp, Homo sapien
tctgaacatgctaggaagttgctac

SEQ ID NO: 4599533 - DNA, 25 bp, Homo sapien
tttaacaaaatctgcacctaggtgg

SEQ ID NO: 4599534 - DNA, 25 bp, Homo sapien
tcctgagattcccttgtcaggtagc

SEQ ID NO: 4599535 - DNA, 25 bp, Homo sapien
tgtatcctgagattcccttgtcagg

SEQ ID NO: 4599536 - DNA, 25 bp, Homo sapien
gagattcccttgtcaggtagctttc

SEQ ID NO: 4599537 - DNA, 25 bp, Homo sapien
tgagattcccttgtcaggtagcttt

SEQ ID NO: 4599538 - DNA, 25 bp, Homo sapien
aaaaagtctgaatgtcgcccataag

SEQ ID NO: 4599539 - DNA, 25 bp, Homo sapien
gagggacttttactggaatgtggta

SEQ ID NO: 4599540 - DNA, 25 bp, Homo sapien
gaatgtcgcccataagtgcctttca

SEQ ID NO: 4599541 - DNA, 25 bp, Homo sapien
ccataagtgcctttcattggtatcc

SEQ ID NO: 4599542 - DNA, 25 bp, Homo sapien
cccacctcatgacctcgtatgcaca

SEQ ID NO: 4599543 - DNA, 25 bp, Homo sapien
ttcccacctcatgacctcgtatgca

SEQ ID NO: 4599544 - DNA, 25 bp, Homo sapien
ccacctcatgacctcgtatgcacat

SEQ ID NO: 4599545 - DNA, 25 bp, Homo sapien
tcccacctcatgacctcgtatgcac

SEQ ID NO: 4599546 - DNA, 25 bp, Homo sapien
aattaattgtaccactagatgattc

SEQ ID NO: 4599547 - DNA, 25 bp, Homo sapien
ctagatgattctccaagaaatctgg

SEQ ID NO: 4599548 - DNA, 25 bp, Homo sapien
caggggtatcctgccatctctgaca

SEQ ID NO: 4599549 - DNA, 25 bp, Homo sapien
cctcagaagatccatcaggggtatc

SEQ ID NO: 4599550 - DNA, 25 bp, Homo sapien
tcagttggtggtaccaaattcttct

SEQ ID NO: 4599551 - DNA, 25 bp, Homo sapien
cagttggtggtaccaaattcttctt

SEQ ID NO: 4599552 - DNA, 25 bp, Homo sapien
gaaatgtagtttcggaccagagtac

SEQ ID NO: 4599553 - DNA, 25 bp, Homo sapien
gatacatggccaacacccaaggaag

SEQ ID NO: 4599554 - DNA, 25 bp, Homo sapien
cgctgtctcctgagaactgaaaaag

SEQ ID NO: 4599555 - DNA, 25 bp, Homo sapien
gagtttgctaagtacattttccgct

SEQ ID NO: 4599556 - DNA, 25 bp, Homo sapien
ggtgagcagtagtagtaaatcctta

SEQ ID NO: 4599557 - DNA, 25 bp, Homo sapien
tacatatctttgagaatcattgttc

SEQ ID NO: 4599558 - DNA, 25 bp, Homo sapien
tcctcgcacttaataggtgagcagt

SEQ ID NO: 4599559 - DNA, 25 bp, Homo sapien
tgttcaggcttgatatccaaaggag

SEQ ID NO: 4599560 - DNA, 25 bp, Homo sapien
tgtgtccctacaccaccttccagtc

SEQ ID NO: 4599561 - DNA, 25 bp, Homo sapien
taattccttttgtgtccctacacca

SEQ ID NO: 4599562 - DNA, 25 bp, Homo sapien
accaccttccagtcccatcccataa

SEQ ID NO: 4599563 - DNA, 25 bp, Homo sapien
cagtcccatcccataagctaaacac

SEQ ID NO: 4599564 - DNA, 25 bp, Homo sapien
gaaccaaccatttactagcagccac

SEQ ID NO: 4599565 - DNA, 25 bp, Homo sapien
tcccaacatttagaacatgacacag

SEQ ID NO: 4599566 - DNA, 25 bp, Homo sapien
cagagaaacatgtactgttcaaggc

SEQ ID NO: 4599567 - DNA, 25 bp, Homo sapien
tatggaatacctgatgtatgccctc

SEQ ID NO: 4599568 - DNA, 25 bp, Homo sapien
cacatatatcttatacacagccaag

SEQ ID NO: 4599569 - DNA, 25 bp, Homo sapien
ctgaaactaataggccactgcatta

SEQ ID NO: 4599570 - DNA, 25 bp, Homo sapien
caaaaactctctggttaagcccaat

SEQ ID NO: 4599571 - DNA, 25 bp, Homo sapien
ttagtattctcttacttggtgtgtg

SEQ ID NO: 4599572 - DNA, 25 bp, Homo sapien
gagtagacttttgtacaccccagcg

SEQ ID NO: 4599573 - DNA, 25 bp, Homo sapien
cttgtactacagaacagaaggattc

SEQ ID NO: 4599574 - DNA, 25 bp, Homo sapien
caccccagcggagtttttgactcac

SEQ ID NO: 4599575 - DNA, 25 bp, Homo sapien
tactaataggccagaaaagcaccat

SEQ ID NO: 4599576 - DNA, 25 bp, Homo sapien
tttgatggggtacagaatccagcat

SEQ ID NO: 4599577 - DNA, 25 bp, Homo sapien
tgcaagcagtacatttcgatatgaa

SEQ ID NO: 4599578 - DNA, 25 bp, Homo sapien
tacatttcgatatgaagtctcatca

SEQ ID NO: 4599579 - DNA, 25 bp, Homo sapien
cagtacatttcgatatgaagtctca

SEQ ID NO: 4599580 - DNA, 25 bp, Homo sapien
tctgtacgcagattccacgatgacc

SEQ ID NO: 4599581 - DNA, 25 bp, Homo sapien
caccgaggatttggctcccatggaa

SEQ ID NO: 4599582 - DNA, 25 bp, Homo sapien
gaccagtattacgaattgcctccat

SEQ ID NO: 4599583 - DNA, 25 bp, Homo sapien
aaatgtgtcacgtgttagagctgtc

SEQ ID NO: 4599584 - DNA, 25 bp, Homo sapien
cttccacaagaatgtagagctagta

SEQ ID NO: 4599585 - DNA, 25 bp, Homo sapien
taacccagatatgctagatatacgg

SEQ ID NO: 4599586 - DNA, 25 bp, Homo sapien
tggttaacaaatcctaagtcctgct

SEQ ID NO: 4599587 - DNA, 25 bp, Homo sapien
gtaccaggtactatggcttcacaaa

SEQ ID NO: 4599588 - DNA, 25 bp, Homo sapien
cacctggatatgtgtcaaaggccaa

SEQ ID NO: 4599589 - DNA, 25 bp, Homo sapien
gaaaactgatatcatccaggtgggc

SEQ ID NO: 4599590 - DNA, 25 bp, Homo sapien
tccacattaggaatgcagaggcagc

SEQ ID NO: 4599591 - DNA, 25 bp, Homo sapien
ttgggtttcccattgctcagcagag

SEQ ID NO: 4599592 - DNA, 25 bp, Homo sapien
tggaatgagattcatagcgactcag

SEQ ID NO: 4599593 - DNA, 25 bp, Homo sapien
gattcatagcgactcaggactgttg

SEQ ID NO: 4599594 - DNA, 25 bp, Homo sapien
tcagcctgcagtgacaccttttccc

SEQ ID NO: 4599595 - DNA, 25 bp, Homo sapien
cctttggtgctctgcggagctttgg

SEQ ID NO: 4599596 - DNA, 25 bp, Homo sapien
tatgcattccctataggaccctcct

SEQ ID NO: 4599597 - DNA, 25 bp, Homo sapien
tataggaccctcctgagcttcaatt

SEQ ID NO: 4599598 - DNA, 25 bp, Homo sapien
gagcttcaatttgagcgatcgtgta

SEQ ID NO: 4599599 - DNA, 25 bp, Homo sapien
ttgagcgatcgtgtaacataaaggg

SEQ ID NO: 4599600 - DNA, 25 bp, Homo sapien
ttcgataaaacagcttggataccgc

SEQ ID NO: 4599601 - DNA, 25 bp, Homo sapien
taccgcttcttggaatgatgatact

SEQ ID NO: 4599602 - DNA, 25 bp, Homo sapien
cccatgcgcactttcgataaaacag

SEQ ID NO: 4599603 - DNA, 25 bp, Homo sapien
ttcttgacttaaaagctcccagtct

SEQ ID NO: 4599604 - DNA, 25 bp, Homo sapien
ggtgctcattgatgggtaatcttgt

SEQ ID NO: 4599605 - DNA, 25 bp, Homo sapien
tgggtaatcttgtggatgagctctc

SEQ ID NO: 4599606 - DNA, 25 bp, Homo sapien
atttggttgctattggtgctcattg

SEQ ID NO: 4599607 - DNA, 25 bp, Homo sapien
tggttgctattggtgctcattgatg

SEQ ID NO: 4599608 - DNA, 25 bp, Homo sapien
tctcagaacatggagaagtacgacc

SEQ ID NO: 4599609 - DNA, 25 bp, Homo sapien
catggagaagtacgaccatcgtcaa

SEQ ID NO: 4599610 - DNA, 25 bp, Homo sapien
gaaaaagactgtttatttactctga

SEQ ID NO: 4599611 - DNA, 25 bp, Homo sapien
actggtctcagaacatggagaagta

SEQ ID NO: 4599612 - DNA, 25 bp, Homo sapien
gggacttctcccaatcaactgtcag

SEQ ID NO: 4599613 - DNA, 25 bp, Homo sapien
catctaaggataccgtaaggcccaa

SEQ ID NO: 4599614 - DNA, 25 bp, Homo sapien
cataaagggtctggaacgcgctgac

SEQ ID NO: 4599615 - DNA, 25 bp, Homo sapien
gatgcaaaaagcgatatgtgtctcc

SEQ ID NO: 4599616 - DNA, 25 bp, Homo sapien
gcattaaagcgcagctctacactgt

SEQ ID NO: 4599617 - DNA, 25 bp, Homo sapien
agctctacactgttataaacccctg

SEQ ID NO: 4599618 - DNA, 25 bp, Homo sapien
tctacactgttataaacccctggca

SEQ ID NO: 4599619 - DNA, 25 bp, Homo sapien
cactgttataaacccctggcatatt

SEQ ID NO: 4599620 - DNA, 25 bp, Homo sapien
tctttttaatgagtttggcattggc

SEQ ID NO: 4599621 - DNA, 25 bp, Homo sapien
ctttttaatgagtttggcattggca

SEQ ID NO: 4599622 - DNA, 25 bp, Homo sapien
ctctttttaatgagtttggcattgg

SEQ ID NO: 4599623 - DNA, 25 bp, Homo sapien
tttttaatgagtttggcattggcag

SEQ ID NO: 4599624 - DNA, 25 bp, Homo sapien
ggaatccgtaataaatcttcctaga

SEQ ID NO: 4599625 - DNA, 25 bp, Homo sapien
cgacaaaggaatccgtaataaatct

SEQ ID NO: 4599626 - DNA, 25 bp, Homo sapien
tgctcatgcaaaccccgacaaagga

SEQ ID NO: 4599627 - DNA, 25 bp, Homo sapien
taaatcttcctagaacagcactcac

SEQ ID NO: 4599628 - DNA, 25 bp, Homo sapien
gtatcacataaggcatctgttttac

SEQ ID NO: 4599629 - DNA, 25 bp, Homo sapien
tatcacataaggcatctgttttaca

SEQ ID NO: 4599630 - DNA, 25 bp, Homo sapien
tcccacaggtacagtttccgcaggc

SEQ ID NO: 4599631 - DNA, 25 bp, Homo sapien
ttggatctcccacaggtacagtttc

SEQ ID NO: 4599632 - DNA, 25 bp, Homo sapien
caggtacagtttccgcaggctgtaa

SEQ ID NO: 4599633 - DNA, 25 bp, Homo sapien
gtttccgcaggctgtaatgatgatg

SEQ ID NO: 4599634 - DNA, 25 bp, Homo sapien
tcgcgttttggaactgaactttaca

SEQ ID NO: 4599635 - DNA, 25 bp, Homo sapien
gagaccaccagatgcgtttcatgtg

SEQ ID NO: 4599636 - DNA, 25 bp, Homo sapien
gattgcttccaatcctgggtggtgc

SEQ ID NO: 4599637 - DNA, 25 bp, Homo sapien
tcactagaatttggccgagaccacc

SEQ ID NO: 4599638 - DNA, 25 bp, Homo sapien
tgcctaccaacggatttaattctat

SEQ ID NO: 4599639 - DNA, 25 bp, Homo sapien
gtcaaaccaaaaatatcctcttggc

SEQ ID NO: 4599640 - DNA, 25 bp, Homo sapien
caattcatagcacactttgcctacc

SEQ ID NO: 4599641 - DNA, 25 bp, Homo sapien
tcagaaaactgccacaattcatagc

SEQ ID NO: 4599642 - DNA, 25 bp, Homo sapien
tgtgcctgcagttatccaactgtgg

SEQ ID NO: 4599643 - DNA, 25 bp, Homo sapien
gcaatcttttatagaggcacagcca

SEQ ID NO: 4599644 - DNA, 25 bp, Homo sapien
tttggagcaaagaggcctctcgtgg

SEQ ID NO: 4599645 - DNA, 25 bp, Homo sapien
gcatgcctccggttggcaaattgca

SEQ ID NO: 4599646 - DNA, 25 bp, Homo sapien
tgacatctacatagacacactcctg

SEQ ID NO: 4599647 - DNA, 25 bp, Homo sapien
catctacatagacacactcctggaa

SEQ ID NO: 4599648 - DNA, 25 bp, Homo sapien
gtaattgacatctacatagacacac

SEQ ID NO: 4599649 - DNA, 25 bp, Homo sapien
ctacatagacacactcctggaacat

SEQ ID NO: 4599650 - DNA, 25 bp, Homo sapien
ctggccttggagaacgcagtggctc

SEQ ID NO: 4599651 - DNA, 25 bp, Homo sapien
aagcggcgggctgtcgcgcaggtgc

SEQ ID NO: 4599652 - DNA, 25 bp, Homo sapien
gcgaggcgcggcgaagggagcggag

SEQ ID NO: 4599653 - DNA, 25 bp, Homo sapien
cagtggctcacaagggcaccgctag

SEQ ID NO: 4599654 - DNA, 25 bp, Homo sapien
gccgccgagggaaagacgggcgcgc

SEQ ID NO: 4599655 - DNA, 25 bp, Homo sapien
gcgccgctccgtgcccagcgcagac

SEQ ID NO: 4599656 - DNA, 25 bp, Homo sapien
ggcctgtctgccggcccgggtccga

SEQ ID NO: 4599657 - DNA, 25 bp, Homo sapien
gatggcctgtctgccggcccgggtc

SEQ ID NO: 4599658 - DNA, 25 bp, Homo sapien
gagatccaccaagcagttgtttgaa

SEQ ID NO: 4599659 - DNA, 25 bp, Homo sapien
gagctgacactccagtgtacactgg

SEQ ID NO: 4599660 - DNA, 25 bp, Homo sapien
tataatcaattctactaaggcgagc

SEQ ID NO: 4599661 - DNA, 25 bp, Homo sapien
gcatccgtggatgctattcctccag

SEQ ID NO: 4599662 - DNA, 25 bp, Homo sapien
ttatgtaccaagagtttttccattc

SEQ ID NO: 4599663 - DNA, 25 bp, Homo sapien
atggagatttatgtttccattggcc

SEQ ID NO: 4599664 - DNA, 25 bp, Homo sapien
tggagatttatgtttccattggccc

SEQ ID NO: 4599665 - DNA, 25 bp, Homo sapien
ggagatttatgtttccattggccca

SEQ ID NO: 4599666 - DNA, 25 bp, Homo sapien
gagatttatgtttccattggcccat

SEQ ID NO: 4599667 - DNA, 25 bp, Homo sapien
tctctgaatattgtggtatcatgta

SEQ ID NO: 4599668 - DNA, 25 bp, Homo sapien
gagccgcacaatccacgggagtgaa

SEQ ID NO: 4599669 - DNA, 25 bp, Homo sapien
gctttctaatgcctcaccagagccg

SEQ ID NO: 4599670 - DNA, 25 bp, Homo sapien
gagttccatatctcatacccagtag

SEQ ID NO: 4599671 - DNA, 25 bp, Homo sapien
gtcactatttttccaggcctgaagt

SEQ ID NO: 4599672 - DNA, 25 bp, Homo sapien
cctgaagtgagttatagggcgagac

SEQ ID NO: 4599673 - DNA, 25 bp, Homo sapien
tcctctgaggtgagaacatacagct

SEQ ID NO: 4599674 - DNA, 25 bp, Homo sapien
caatccactggaatagtgctgagac

SEQ ID NO: 4599675 - DNA, 25 bp, Homo sapien
ttttagggaatagtagaatcacaaa

SEQ ID NO: 4599676 - DNA, 25 bp, Homo sapien
gaatcacaaaacgaatacacttgtt

SEQ ID NO: 4599677 - DNA, 25 bp, Homo sapien
caaaacgaatacacttgtttctctg

SEQ ID NO: 4599678 - DNA, 25 bp, Homo sapien
gtagaatcacaaaacgaatacactt

SEQ ID NO: 4599679 - DNA, 25 bp, Homo sapien
gcacatccgtgaaatgatcctactt

SEQ ID NO: 4599680 - DNA, 25 bp, Homo sapien
cgtgaaatgatcctacttgccaatt

SEQ ID NO: 4599681 - DNA, 25 bp, Homo sapien
agcttcagcacatccgtgaaatgat

SEQ ID NO: 4599682 - DNA, 25 bp, Homo sapien
aagggctggggttgtgcaaattcat

SEQ ID NO: 4599683 - DNA, 25 bp, Homo sapien
tgcgaagtaagcgatttttgcagtc

SEQ ID NO: 4599684 - DNA, 25 bp, Homo sapien
aagtaagcgatttttgcagtctgcc

SEQ ID NO: 4599685 - DNA, 25 bp, Homo sapien
gtaagcgatttttgcagtctgcctg

SEQ ID NO: 4599686 - DNA, 25 bp, Homo sapien
cgaagtaagcgatttttgcagtctg

SEQ ID NO: 4599687 - DNA, 25 bp, Homo sapien
gagtgaattgtacttccagttcaca

SEQ ID NO: 4599688 - DNA, 25 bp, Homo sapien
taacttctcgtatacaactgcctga

SEQ ID NO: 4599689 - DNA, 25 bp, Homo sapien
tataaaagagaccactaacttctcg

SEQ ID NO: 4599690 - DNA, 25 bp, Homo sapien
tgagggagaacttatatgagtgaat

SEQ ID NO: 4599691 - DNA, 25 bp, Homo sapien
ttattgcaatgataccactaatatt

SEQ ID NO: 4599692 - DNA, 25 bp, Homo sapien
taacctctacaataatactttctaa

SEQ ID NO: 4599693 - DNA, 25 bp, Homo sapien
agaatactacggtaataattattgc

SEQ ID NO: 4599694 - DNA, 25 bp, Homo sapien
aatgacatgtattatctcacttaac

SEQ ID NO: 4599695 - DNA, 25 bp, Homo sapien
tcctgaaggtacaggcgaaagcatg

SEQ ID NO: 4599696 - DNA, 25 bp, Homo sapien
agcatggcgtttgggctataggtcc

SEQ ID NO: 4599697 - DNA, 25 bp, Homo sapien
cagccaacatgtggatgtccaagaa

SEQ ID NO: 4599698 - DNA, 25 bp, Homo sapien
tggagatccatccacgcacagggct

SEQ ID NO: 4599699 - DNA, 25 bp, Homo sapien
tctgtagaatcagctctatccatga

SEQ ID NO: 4599700 - DNA, 25 bp, Homo sapien
tgtagaatcagctctatccatgatt

SEQ ID NO: 4599701 - DNA, 25 bp, Homo sapien
tagaatcagctctatccatgatttc

SEQ ID NO: 4599702 - DNA, 25 bp, Homo sapien
ctgtagaatcagctctatccatgat

SEQ ID NO: 4599703 - DNA, 25 bp, Homo sapien
accaataacattaatgactgccttt

SEQ ID NO: 4599704 - DNA, 25 bp, Homo sapien
ggctaattgctctgtgaattacctc

SEQ ID NO: 4599705 - DNA, 25 bp, Homo sapien
aatacacccagatgccgtttgacag

SEQ ID NO: 4599706 - DNA, 25 bp, Homo sapien
ccagatgccgtttgacagatgaggg

SEQ ID NO: 4599707 - DNA, 25 bp, Homo sapien
gatgaggggctaattgctctgtgaa

SEQ ID NO: 4599708 - DNA, 25 bp, Homo sapien
caatagctgtaacgctatgatcact

SEQ ID NO: 4599709 - DNA, 25 bp, Homo sapien
ttattggtgattccagagagcagcg

SEQ ID NO: 4599710 - DNA, 25 bp, Homo sapien
caaacacagcttgcggtctctgatt

SEQ ID NO: 4599711 - DNA, 25 bp, Homo sapien
gagagcagcggtcaatcgcaatagc

SEQ ID NO: 4599712 - DNA, 25 bp, Homo sapien
aaatacctgggagttccacgtctga

SEQ ID NO: 4599713 - DNA, 25 bp, Homo sapien
tgtccgtccccacattgcaacttgg

SEQ ID NO: 4599714 - DNA, 25 bp, Homo sapien
ttacacggaccagtccggcaaatac

SEQ ID NO: 4599715 - DNA, 25 bp, Homo sapien
gagttccacgtctgaactgtccgtc

SEQ ID NO: 4599716 - DNA, 25 bp, Homo sapien
acacgttttgtccagggaagaacag

SEQ ID NO: 4599717 - DNA, 25 bp, Homo sapien
taaaatataggaagtagagggagcc

SEQ ID NO: 4599718 - DNA, 25 bp, Homo sapien
tatgcgcaggaaaattgggaagccc

SEQ ID NO: 4599719 - DNA, 25 bp, Homo sapien
gaagcctcgaattagcattaaatgg

SEQ ID NO: 4599720 - DNA, 25 bp, Homo sapien
tcccaaaatgaatctggaagcctcg

SEQ ID NO: 4599721 - DNA, 25 bp, Homo sapien
tgtttttgccaagcccttgcagcct

SEQ ID NO: 4599722 - DNA, 25 bp, Homo sapien
aaggaacctgctgcaaacacacagg

SEQ ID NO: 4599723 - DNA, 25 bp, Homo sapien
acaggcatccttgacactgccaccg

SEQ ID NO: 4599724 - DNA, 25 bp, Homo sapien
gccaccgcacttgcattccaaaggg

SEQ ID NO: 4599725 - DNA, 25 bp, Homo sapien
aagaggccgggagagaactttctgc

SEQ ID NO: 4599726 - DNA, 25 bp, Homo sapien
tgttgtcgcccagatattatgtcgg

SEQ ID NO: 4599727 - DNA, 25 bp, Homo sapien
gatttattaggtactcagggcggac

SEQ ID NO: 4599728 - DNA, 25 bp, Homo sapien
tagattcatgacagacgaaagaggc

SEQ ID NO: 4599729 - DNA, 25 bp, Homo sapien
caaagtggggttattcattagagca

SEQ ID NO: 4599730 - DNA, 25 bp, Homo sapien
attagagcaggcagccggccagatg

SEQ ID NO: 4599731 - DNA, 25 bp, Homo sapien
gggttattcattagagcaggcagcc

SEQ ID NO: 4599732 - DNA, 25 bp, Homo sapien
tgcacgagccaaagtggggttattc

SEQ ID NO: 4599733 - DNA, 25 bp, Homo sapien
tgaatctccatgtcaggtctgagta

SEQ ID NO: 4599734 - DNA, 25 bp, Homo sapien
tgcctcgcagacaagttgaaaagag

SEQ ID NO: 4599735 - DNA, 25 bp, Homo sapien
aatatgctgacggtctggctgctga

SEQ ID NO: 4599736 - DNA, 25 bp, Homo sapien
ggtctgagtagataaaaggtggcat

SEQ ID NO: 4599737 - DNA, 25 bp, Homo sapien
tttaccagagcttccggaatccttc

SEQ ID NO: 4599738 - DNA, 25 bp, Homo sapien
taccagagcttccggaatccttcat

SEQ ID NO: 4599739 - DNA, 25 bp, Homo sapien
ttaccagagcttccggaatccttca

SEQ ID NO: 4599740 - DNA, 25 bp, Homo sapien
tgttccatcttaccaaaagggtgtc

SEQ ID NO: 4599741 - DNA, 25 bp, Homo sapien
gtagctttaaggatcagtatgtcag

SEQ ID NO: 4599742 - DNA, 25 bp, Homo sapien
ttttggtggagctatcagattctga

SEQ ID NO: 4599743 - DNA, 25 bp, Homo sapien
tcctcttgtgaggtccaggtaaaag

SEQ ID NO: 4599744 - DNA, 25 bp, Homo sapien
tagagcaaattgatgctgagcacgt

SEQ ID NO: 4599745 - DNA, 25 bp, Homo sapien
gctgcatcatgagtggaaacgcctg

SEQ ID NO: 4599746 - DNA, 25 bp, Homo sapien
tgtagcctagcatgaaaaccagctg

SEQ ID NO: 4599747 - DNA, 25 bp, Homo sapien
tgcaggacccagtgcaagggctaaa

SEQ ID NO: 4599748 - DNA, 25 bp, Homo sapien
gggaaaatgctcaagaggaatgttg

SEQ ID NO: 4599749 - DNA, 25 bp, Homo sapien
cactccaacagtgccggggaaaatg

SEQ ID NO: 4599750 - DNA, 25 bp, Homo sapien
ctcactccaacagtgccggggaaaa

SEQ ID NO: 4599751 - DNA, 25 bp, Homo sapien
aatgctcaagaggaatgttgttgat

SEQ ID NO: 4599752 - DNA, 25 bp, Homo sapien
ctcaaattgcattaacgccaggctg

SEQ ID NO: 4599753 - DNA, 25 bp, Homo sapien
tgagtgcttgggtttggtgtaatta

SEQ ID NO: 4599754 - DNA, 25 bp, Homo sapien
taatacatgacgtctctagtcacgg

SEQ ID NO: 4599755 - DNA, 25 bp, Homo sapien
gtttagccacagaataacaggtttg

SEQ ID NO: 4599756 - DNA, 25 bp, Homo sapien
aatttaattccactgacaagttgca

SEQ ID NO: 4599757 - DNA, 25 bp, Homo sapien
tgacaagttgcaggactgacacgat

SEQ ID NO: 4599758 - DNA, 25 bp, Homo sapien
taattccactgacaagttgcaggac

SEQ ID NO: 4599759 - DNA, 25 bp, Homo sapien
gcaggactgacacgatccttcttgg

SEQ ID NO: 4599760 - DNA, 25 bp, Homo sapien
aaacttaacagccatggcaggaggg

SEQ ID NO: 4599761 - DNA, 25 bp, Homo sapien
tggtgctggaatcctcttggtttct

SEQ ID NO: 4599762 - DNA, 25 bp, Homo sapien
cttaacagccatggcaggagggaag

SEQ ID NO: 4599763 - DNA, 25 bp, Homo sapien
aggaaacttaacagccatggcagga

SEQ ID NO: 4599764 - DNA, 25 bp, Homo sapien
tctggaggtagtgttaatgagagct

SEQ ID NO: 4599765 - DNA, 25 bp, Homo sapien
cacccaggcaatgggccggcgtgtc

SEQ ID NO: 4599766 - DNA, 25 bp, Homo sapien
ctgcctctgacggtgctcatctgga

SEQ ID NO: 4599767 - DNA, 25 bp, Homo sapien
gcatagaggacccaccggggcgtcc

SEQ ID NO: 4599768 - DNA, 25 bp, Homo sapien
tctcagtggtatccagtgcgccatc

SEQ ID NO: 4599769 - DNA, 25 bp, Homo sapien
tcagtggtatccagtgcgccatcat

SEQ ID NO: 4599770 - DNA, 25 bp, Homo sapien
tgaaactctcagtggtatccagtgc

SEQ ID NO: 4599771 - DNA, 25 bp, Homo sapien
aactctcagtggtatccagtgcgcc

SEQ ID NO: 4599772 - DNA, 25 bp, Homo sapien
ggtctccgacctatccgtgatgtgg

SEQ ID NO: 4599773 - DNA, 25 bp, Homo sapien
tgatgtggcagaaacgcttggctct

SEQ ID NO: 4599774 - DNA, 25 bp, Homo sapien
tggctctgccgaagacaaatgcaag

SEQ ID NO: 4599775 - DNA, 25 bp, Homo sapien
tcttgcaaccagagtccttcgggac

SEQ ID NO: 4599776 - DNA, 25 bp, Homo sapien
caattacctggtagaattacctctc

SEQ ID NO: 4599777 - DNA, 25 bp, Homo sapien
gattcgccacatgtaccaaaggctt

SEQ ID NO: 4599778 - DNA, 25 bp, Homo sapien
aatcaaaaggaagattgccaaagcc

SEQ ID NO: 4599779 - DNA, 25 bp, Homo sapien
tagtagaccaccgttctattgttca

SEQ ID NO: 4599780 - DNA, 25 bp, Homo sapien
tagcctcttagggatcagaattgag

SEQ ID NO: 4599781 - DNA, 25 bp, Homo sapien
catcttagtcaatcaggaaccccag

SEQ ID NO: 4599782 - DNA, 25 bp, Homo sapien
ttagcaggcttacagctgggctctg

SEQ ID NO: 4599783 - DNA, 25 bp, Homo sapien
gctggagatatctggtaaacccggt

SEQ ID NO: 4599784 - DNA, 25 bp, Homo sapien
cgggctcccatgaattgagtttccc

SEQ ID NO: 4599785 - DNA, 25 bp, Homo sapien
ggctcccatgaattgagtttccctc

SEQ ID NO: 4599786 - DNA, 25 bp, Homo sapien
gctcccatgaattgagtttccctcc

SEQ ID NO: 4599787 - DNA, 25 bp, Homo sapien
ccactccactctgggtttgaacctg

SEQ ID NO: 4599788 - DNA, 25 bp, Homo sapien
acccgggagctggatatgaaagcca

SEQ ID NO: 4599789 - DNA, 25 bp, Homo sapien
acagatacccgggagctggatatga

SEQ ID NO: 4599790 - DNA, 25 bp, Homo sapien
tacccgggagctggatatgaaagcc

SEQ ID NO: 4599791 - DNA, 25 bp, Homo sapien
gatacccgggagctggatatgaaag

SEQ ID NO: 4599792 - DNA, 25 bp, Homo sapien
ctaaagcgtcgtgaacttcttgaga

SEQ ID NO: 4599793 - DNA, 25 bp, Homo sapien
taaagcgtcgtgaacttcttgagaa

SEQ ID NO: 4599794 - DNA, 25 bp, Homo sapien
tgttattcttatgcttgccccctcc

SEQ ID NO: 4599795 - DNA, 25 bp, Homo sapien
tccctgttattcttatgcttgcccc

SEQ ID NO: 4599796 - DNA, 25 bp, Homo sapien
actccctgttattcttatgcttgcc

SEQ ID NO: 4599797 - DNA, 25 bp, Homo sapien
aaactccctgttattcttatgcttg

SEQ ID NO: 4599798 - DNA, 25 bp, Homo sapien
agactcaattgtaactcacctttga

SEQ ID NO: 4599799 - DNA, 25 bp, Homo sapien
tctgtggtggactggtacattctct

SEQ ID NO: 4599800 - DNA, 25 bp, Homo sapien
tggtggactggtacattctcttttt

SEQ ID NO: 4599801 - DNA, 25 bp, Homo sapien
aagactcaattgtaactcacctttg

SEQ ID NO: 4599802 - DNA, 25 bp, Homo sapien
gacaagtccactctgccacctcctt

SEQ ID NO: 4599803 - DNA, 25 bp, Homo sapien
tttgagagctaaacatgcaaccgtc

SEQ ID NO: 4599804 - DNA, 25 bp, Homo sapien
gacctttgagagctaaacatgcaac

SEQ ID NO: 4599805 - DNA, 25 bp, Homo sapien
tgagagctaaacatgcaaccgtcaa

SEQ ID NO: 4599806 - DNA, 25 bp, Homo sapien
gtgcgttacccatgcacactcctcg

SEQ ID NO: 4599807 - DNA, 25 bp, Homo sapien
tgctgtggattggtaacacacgtgc

SEQ ID NO: 4599808 - DNA, 25 bp, Homo sapien
agggatgctgtggattggtaacaca

SEQ ID NO: 4599809 - DNA, 25 bp, Homo sapien
ggtaacacacgtgctgtgcaaaggg

SEQ ID NO: 4599810 - DNA, 25 bp, Homo sapien
gggctagaagagccttggtgccaat

SEQ ID NO: 4599811 - DNA, 25 bp, Homo sapien
cagagggctagaagagccttggtgc

SEQ ID NO: 4599812 - DNA, 25 bp, Homo sapien
tcagagggctagaagagccttggtg

SEQ ID NO: 4599813 - DNA, 25 bp, Homo sapien
gagggctagaagagccttggtgcca

SEQ ID NO: 4599814 - DNA, 25 bp, Homo sapien
cttccacttgaataaggaccattac

SEQ ID NO: 4599815 - DNA, 25 bp, Homo sapien
tcagcttccacttgaataaggacca

SEQ ID NO: 4599816 - DNA, 25 bp, Homo sapien
gcttccacttgaataaggaccatta

SEQ ID NO: 4599817 - DNA, 25 bp, Homo sapien
cagcttccacttgaataaggaccat

SEQ ID NO: 4599818 - DNA, 25 bp, Homo sapien
tccacactgcaggtcacatatcatt

SEQ ID NO: 4599819 - DNA, 25 bp, Homo sapien
agaaatgtgttcaggctgtttgagg

SEQ ID NO: 4599820 - DNA, 25 bp, Homo sapien
aggtcacatatcatttggacagcag

SEQ ID NO: 4599821 - DNA, 25 bp, Homo sapien
tgagaaatgtgttcaggctgtttga

SEQ ID NO: 4599822 - DNA, 25 bp, Homo sapien
ccttgggagggttttgcttacactg

SEQ ID NO: 4599823 - DNA, 25 bp, Homo sapien
cagatggtctgcgagtggaatgtcc

SEQ ID NO: 4599824 - DNA, 25 bp, Homo sapien
tgcagtctgcagaggtcacggcctc

SEQ ID NO: 4599825 - DNA, 25 bp, Homo sapien
tccgagctctcataactgcagtctg

SEQ ID NO: 4599826 - DNA, 25 bp, Homo sapien
tgccaaagtgtccaaacttcgtagt

SEQ ID NO: 4599827 - DNA, 25 bp, Homo sapien
tcagactttaaaatagcctcatgcc

SEQ ID NO: 4599828 - DNA, 25 bp, Homo sapien
gcttttcctaccacatcggattcag

SEQ ID NO: 4599829 - DNA, 25 bp, Homo sapien
tcgcagatgtaatctggatgtaggg

SEQ ID NO: 4599830 - DNA, 25 bp, Homo sapien
ggaaggtgagaaaaattgcctagct

SEQ ID NO: 4599831 - DNA, 25 bp, Homo sapien
cacaaggttcggagggaaggtgaga

SEQ ID NO: 4599832 - DNA, 25 bp, Homo sapien
tcggagggaaggtgagaaaaattgc

SEQ ID NO: 4599833 - DNA, 25 bp, Homo sapien
ctaagcacaaggttcggagggaagg

SEQ ID NO: 4599834 - DNA, 25 bp, Homo sapien
ttacattctcttgaccttgcagttg

SEQ ID NO: 4599835 - DNA, 25 bp, Homo sapien
agctgcttcctgatcaaccactcct

SEQ ID NO: 4599836 - DNA, 25 bp, Homo sapien
ggaaatccctggtttccagtgctgt

SEQ ID NO: 4599837 - DNA, 25 bp, Homo sapien
gcagagaaggcctcgtcctgaccag

SEQ ID NO: 4599838 - DNA, 25 bp, Homo sapien
gctaaaacacccctgatgtcatcag

SEQ ID NO: 4599839 - DNA, 25 bp, Homo sapien
ggaatcgcggtcaattttgttcata

SEQ ID NO: 4599840 - DNA, 25 bp, Homo sapien
cattatgctagcatcagccaaggaa

SEQ ID NO: 4599841 - DNA, 25 bp, Homo sapien
taatgaccatagtgtgttcactgct

SEQ ID NO: 4599842 - DNA, 25 bp, Homo sapien
ccactaacaccatgaacttgctcat

SEQ ID NO: 4599843 - DNA, 25 bp, Homo sapien
gcccacttgccactggaatctgttt

SEQ ID NO: 4599844 - DNA, 25 bp, Homo sapien
ggcccacttgccactggaatctgtt

SEQ ID NO: 4599845 - DNA, 25 bp, Homo sapien
cacttgccactggaatctgtttttc

SEQ ID NO: 4599846 - DNA, 25 bp, Homo sapien
cccacttgccactggaatctgtttt

SEQ ID NO: 4599847 - DNA, 25 bp, Homo sapien
cttggacttgtcatgccggacaccc

SEQ ID NO: 4599848 - DNA, 25 bp, Homo sapien
ctcaggacttgcaggtataacttat

SEQ ID NO: 4599849 - DNA, 25 bp, Homo sapien
tggacttgtcatgccggacacccct

SEQ ID NO: 4599850 - DNA, 25 bp, Homo sapien
ttgtcatgccggacacccctcagga

SEQ ID NO: 4599851 - DNA, 25 bp, Homo sapien
tcaagccccttccaaggaaagtgcc

SEQ ID NO: 4599852 - DNA, 25 bp, Homo sapien
tccaaggaaagtgcctccctcaaac

SEQ ID NO: 4599853 - DNA, 25 bp, Homo sapien
ttcagtttcctgaagacattcaatc

SEQ ID NO: 4599854 - DNA, 25 bp, Homo sapien
tcctgaagacattcaatcttctcac

SEQ ID NO: 4599855 - DNA, 25 bp, Homo sapien
tgagccctagcgctatcccttcttg

SEQ ID NO: 4599856 - DNA, 25 bp, Homo sapien
ttttctgagccctagcgctatccct

SEQ ID NO: 4599857 - DNA, 25 bp, Homo sapien
tagcgctatcccttcttgcttgcct

SEQ ID NO: 4599858 - DNA, 25 bp, Homo sapien
ccctagcgctatcccttcttgcttg

SEQ ID NO: 4599859 - DNA, 25 bp, Homo sapien
ccttatgcagagcaaattggcaact

SEQ ID NO: 4599860 - DNA, 25 bp, Homo sapien
gtcattttccttatgcagagcaaat

SEQ ID NO: 4599861 - DNA, 25 bp, Homo sapien
taattttcttgtggtctcaccctta

SEQ ID NO: 4599862 - DNA, 25 bp, Homo sapien
gcagagcaaattggcaactataatt

SEQ ID NO: 4599863 - DNA, 25 bp, Homo sapien
aagagtcttatcatctttcccagtg

SEQ ID NO: 4599864 - DNA, 25 bp, Homo sapien
caacatcaagagtcttatcatcttt

SEQ ID NO: 4599865 - DNA, 25 bp, Homo sapien
catcaagagtcttatcatctttccc

SEQ ID NO: 4599866 - DNA, 25 bp, Homo sapien
tcaagagtcttatcatctttcccag

SEQ ID NO: 4599867 - DNA, 25 bp, Homo sapien
gttcagggagtttaaagctctgagg

SEQ ID NO: 4599868 - DNA, 25 bp, Homo sapien
ctctgaggtcctctgaagctgcacc

SEQ ID NO: 4599869 - DNA, 25 bp, Homo sapien
cagggagtttaaagctctgaggtcc

SEQ ID NO: 4599870 - DNA, 25 bp, Homo sapien
ctgaagctgcacctaatttgggatt

SEQ ID NO: 4599871 - DNA, 25 bp, Homo sapien
tgcctggggttctgtggtggtctgg

SEQ ID NO: 4599872 - DNA, 25 bp, Homo sapien
cgatgagcatgaattcggactttgt

SEQ ID NO: 4599873 - DNA, 25 bp, Homo sapien
gaattcggactttgtcatgcttgat

SEQ ID NO: 4599874 - DNA, 25 bp, Homo sapien
catgaattcggactttgtcatgctt

SEQ ID NO: 4599875 - DNA, 25 bp, Homo sapien
tgtgtgcaattgtggaattgcccat

SEQ ID NO: 4599876 - DNA, 25 bp, Homo sapien
gagtggagtgtgtgcaattgtggaa

SEQ ID NO: 4599877 - DNA, 25 bp, Homo sapien
gagtgtgtgcaattgtggaattgcc

SEQ ID NO: 4599878 - DNA, 25 bp, Homo sapien
ggtgagtggagtgtgtgcaattgtg

SEQ ID NO: 4599879 - DNA, 25 bp, Homo sapien
taacactactcatgttctgttttga

SEQ ID NO: 4599880 - DNA, 25 bp, Homo sapien
cactactcatgttctgttttgaata

SEQ ID NO: 4599881 - DNA, 25 bp, Homo sapien
tcttctgaatgtgcatagacaaagg

SEQ ID NO: 4599882 - DNA, 25 bp, Homo sapien
tccagataacactactcatgttctg

SEQ ID NO: 4599883 - DNA, 25 bp, Homo sapien
cttggcaggccaggaactcagcaat

SEQ ID NO: 4599884 - DNA, 25 bp, Homo sapien
ggccaggaactcagcaatgagagac

SEQ ID NO: 4599885 - DNA, 25 bp, Homo sapien
ggcaggccaggaactcagcaatgag

SEQ ID NO: 4599886 - DNA, 25 bp, Homo sapien
caggccaggaactcagcaatgagag

SEQ ID NO: 4599887 - DNA, 25 bp, Homo sapien
ctccagggagagcataattggactg

SEQ ID NO: 4599888 - DNA, 25 bp, Homo sapien
tctctagccctatggcctgaattct

SEQ ID NO: 4599889 - DNA, 25 bp, Homo sapien
tatggaagttcccaacattgtggat

SEQ ID NO: 4599890 - DNA, 25 bp, Homo sapien
tgtggatgcttatctgaatgctatc

SEQ ID NO: 4599891 - DNA, 25 bp, Homo sapien
catctcttagaccaggcccatgcca

SEQ ID NO: 4599892 - DNA, 25 bp, Homo sapien
ttgcatctcttagaccaggcccatg

SEQ ID NO: 4599893 - DNA, 25 bp, Homo sapien
cctttgcatctcttagaccaggccc

SEQ ID NO: 4599894 - DNA, 25 bp, Homo sapien
tgcatctcttagaccaggcccatgc

SEQ ID NO: 4599895 - DNA, 25 bp, Homo sapien
tcttggcagttgttccggtagttaa

SEQ ID NO: 4599896 - DNA, 25 bp, Homo sapien
ttaaatgcagaatagcaacccaatt

SEQ ID NO: 4599897 - DNA, 25 bp, Homo sapien
cagttgttccggtagttaaatgcag

SEQ ID NO: 4599898 - DNA, 25 bp, Homo sapien
tatgtatagcaaatgggtaagagca

SEQ ID NO: 4599899 - DNA, 25 bp, Homo sapien
aatagataagcctgcagataatccc

SEQ ID NO: 4599900 - DNA, 25 bp, Homo sapien
agataagcctgcagataatcccact

SEQ ID NO: 4599901 - DNA, 25 bp, Homo sapien
gtaaatagataagcctgcagataat

SEQ ID NO: 4599902 - DNA, 25 bp, Homo sapien
tagataagcctgcagataatcccac

SEQ ID NO: 4599903 - DNA, 25 bp, Homo sapien
ggcaatctgatgtgatagatggctc

SEQ ID NO: 4599904 - DNA, 25 bp, Homo sapien
tctttgtaggagacaggctaaaaga

SEQ ID NO: 4599905 - DNA, 25 bp, Homo sapien
gagtgtctagatagctgcataggga

SEQ ID NO: 4599906 - DNA, 25 bp, Homo sapien
cagaagcttgggtgaacccaggaat

SEQ ID NO: 4599907 - DNA, 25 bp, Homo sapien
tattatggatcagcccctggcactg

SEQ ID NO: 4599908 - DNA, 25 bp, Homo sapien
gaaagagaacgagctccctagtgcc

SEQ ID NO: 4599909 - DNA, 25 bp, Homo sapien
ctggcactgagatgaagagcacttt

SEQ ID NO: 4599910 - DNA, 25 bp, Homo sapien
ggaaatccaacatcaggcatcagtg

SEQ ID NO: 4599911 - DNA, 25 bp, Homo sapien
tcataacctagactgtctcctgggt

SEQ ID NO: 4599912 - DNA, 25 bp, Homo sapien
cagtttcaagctgatagagagtcct

SEQ ID NO: 4599913 - DNA, 25 bp, Homo sapien
tctctccactagtctcaaacatggg

SEQ ID NO: 4599914 - DNA, 25 bp, Homo sapien
tccccatgtcttatagcaaggatca

SEQ ID NO: 4599915 - DNA, 25 bp, Homo sapien
gcaatgtttgaaaggtttacattac

SEQ ID NO: 4599916 - DNA, 25 bp, Homo sapien
catttggtttttcattaggacatgc

SEQ ID NO: 4599917 - DNA, 25 bp, Homo sapien
aaattagggctgtataaactgtgtg

SEQ ID NO: 4599918 - DNA, 25 bp, Homo sapien
gggctgtataaactgtgtgcttcat

SEQ ID NO: 4599919 - DNA, 25 bp, Homo sapien
aaaggttatgcttcatatgacttcg

SEQ ID NO: 4599920 - DNA, 25 bp, Homo sapien
tgctttgaaggacgcagggaggcag

SEQ ID NO: 4599921 - DNA, 25 bp, Homo sapien
tcctctcacccagaaaagccaggtg

SEQ ID NO: 4599922 - DNA, 25 bp, Homo sapien
gcagtttctgcagcggagaaaggtt

SEQ ID NO: 4599923 - DNA, 25 bp, Homo sapien
aagagagagttgaggcaccccctct

SEQ ID NO: 4599924 - DNA, 25 bp, Homo sapien
aacgctggtgagaatgggttgattt

SEQ ID NO: 4599925 - DNA, 25 bp, Homo sapien
cccctctagcattgggctgtctaaa

SEQ ID NO: 4599926 - DNA, 25 bp, Homo sapien
gttgatttgactgtcaattctgcag

SEQ ID NO: 4599927 - DNA, 25 bp, Homo sapien
ttagcagcgcacttctgccaaaagt

SEQ ID NO: 4599928 - DNA, 25 bp, Homo sapien
gagaaccaatgtcccgtgagaaagc

SEQ ID NO: 4599929 - DNA, 25 bp, Homo sapien
aaaagtgctcactgcccttgctctc

SEQ ID NO: 4599930 - DNA, 25 bp, Homo sapien
ggtgatctccccgaagactttatta

SEQ ID NO: 4599931 - DNA, 25 bp, Homo sapien
tccttttcctccaaatcgaatcact

SEQ ID NO: 4599932 - DNA, 25 bp, Homo sapien
ttttcctccaaatcgaatcactgag

SEQ ID NO: 4599933 - DNA, 25 bp, Homo sapien
cctccaaatcgaatcactgagaata

SEQ ID NO: 4599934 - DNA, 25 bp, Homo sapien
gagaatatctcagatgtttggccca

SEQ ID NO: 4599935 - DNA, 25 bp, Homo sapien
tccaaaagaaagctggaatgttctt

SEQ ID NO: 4599936 - DNA, 25 bp, Homo sapien
tttccaaaagaaagctggaatgttc

SEQ ID NO: 4599937 - DNA, 25 bp, Homo sapien
cattggtttttccaaaagaaagctg

SEQ ID NO: 4599938 - DNA, 25 bp, Homo sapien
caaaagaaagctggaatgttcttac

SEQ ID NO: 4599939 - DNA, 25 bp, Homo sapien
tctcccacaggttaacagacaaaac

SEQ ID NO: 4599940 - DNA, 25 bp, Homo sapien
gacaaaacccgtaagagaagcacat

SEQ ID NO: 4599941 - DNA, 25 bp, Homo sapien
catgcaatggattgagggctctatc

SEQ ID NO: 4599942 - DNA, 25 bp, Homo sapien
catcaataggtttctgtatctgcca

SEQ ID NO: 4599943 - DNA, 25 bp, Homo sapien
cttcttatgcagcatttccgatctg

SEQ ID NO: 4599944 - DNA, 25 bp, Homo sapien
tcttcttatgcagcatttccgatct

SEQ ID NO: 4599945 - DNA, 25 bp, Homo sapien
ctcttcttatgcagcatttccgatc

SEQ ID NO: 4599946 - DNA, 25 bp, Homo sapien
tcctttgaaagtcatgctggctttg

SEQ ID NO: 4599947 - DNA, 25 bp, Homo sapien
ggtttataattagtgcctggattcc

SEQ ID NO: 4599948 - DNA, 25 bp, Homo sapien
tgctggctttgcatattcagagttc

SEQ ID NO: 4599949 - DNA, 25 bp, Homo sapien
caggtttataattagtgcctggatt

SEQ ID NO: 4599950 - DNA, 25 bp, Homo sapien
gaccaatcagaagtcgctcaccata

SEQ ID NO: 4599951 - DNA, 25 bp, Homo sapien
cctatgcactcgaggatttccatga

SEQ ID NO: 4599952 - DNA, 25 bp, Homo sapien
caatcagaagtcgctcaccatagga

SEQ ID NO: 4599953 - DNA, 25 bp, Homo sapien
ctatgcactcgaggatttccatgaa

SEQ ID NO: 4599954 - DNA, 25 bp, Homo sapien
tgaaagaaagaaatcttgtgcccat

SEQ ID NO: 4599955 - DNA, 25 bp, Homo sapien
aaatgaaagaaagaaatcttgtgcc

SEQ ID NO: 4599956 - DNA, 25 bp, Homo sapien
aatgaaagaaagaaatcttgtgccc

SEQ ID NO: 4599957 - DNA, 25 bp, Homo sapien
atgaaagaaagaaatcttgtgccca

SEQ ID NO: 4599958 - DNA, 25 bp, Homo sapien
cactcacctgtctaagaatgcacag

SEQ ID NO: 4599959 - DNA, 25 bp, Homo sapien
tacagtgtctaacagatagtcctgg

SEQ ID NO: 4599960 - DNA, 25 bp, Homo sapien
tcccattcagtaacacccataagta

SEQ ID NO: 4599961 - DNA, 25 bp, Homo sapien
caatgattagtgctacatagaggat

SEQ ID NO: 4599962 - DNA, 25 bp, Homo sapien
tgggaaactcgatacatttctttca

SEQ ID NO: 4599963 - DNA, 25 bp, Homo sapien
actgattgggaaactcgatacattt

SEQ ID NO: 4599964 - DNA, 25 bp, Homo sapien
gattgggaaactcgatacatttctt

SEQ ID NO: 4599965 - DNA, 25 bp, Homo sapien
ctgattgggaaactcgatacatttc

SEQ ID NO: 4599966 - DNA, 25 bp, Homo sapien
caatgacagcgggactatcggttct

SEQ ID NO: 4599967 - DNA, 25 bp, Homo sapien
tcaggtgacagcaatccagtagtgt

SEQ ID NO: 4599968 - DNA, 25 bp, Homo sapien
gatgctcctaatattcaccacacag

SEQ ID NO: 4599969 - DNA, 25 bp, Homo sapien
gcatttgcagcagtttccgagggtg

SEQ ID NO: 4599970 - DNA, 25 bp, Homo sapien
ctgaaaaacctgatttgctccatca

SEQ ID NO: 4599971 - DNA, 25 bp, Homo sapien
ctgaaatctgaaaaacctgatttgc

SEQ ID NO: 4599972 - DNA, 25 bp, Homo sapien
acctgatttgctccatcaacacaaa

SEQ ID NO: 4599973 - DNA, 25 bp, Homo sapien
aatctgaaaaacctgatttgctcca

SEQ ID NO: 4599974 - DNA, 25 bp, Homo sapien
tttgtctgtgcctagcaaagacata

SEQ ID NO: 4599975 - DNA, 25 bp, Homo sapien
gacattcaaatgtgccaggttgtgt

SEQ ID NO: 4599976 - DNA, 25 bp, Homo sapien
tatttgcataagaagttagaggctt

SEQ ID NO: 4599977 - DNA, 25 bp, Homo sapien
cacaggggtctaagctgggcagaaa

SEQ ID NO: 4599978 - DNA, 25 bp, Homo sapien
tttgttcagatttatatggacagca

SEQ ID NO: 4599979 - DNA, 25 bp, Homo sapien
tagcgatgtcttgggtttgttcaga

SEQ ID NO: 4599980 - DNA, 25 bp, Homo sapien
ttattcttaacactagcccagggac

SEQ ID NO: 4599981 - DNA, 25 bp, Homo sapien
tgatctaatatagatagcgatgtct

SEQ ID NO: 4599982 - DNA, 25 bp, Homo sapien
atgatactgtggtgtcctaaagcaa

SEQ ID NO: 4599983 - DNA, 25 bp, Homo sapien
gcagtaatcgtggaagcaagtgatg

SEQ ID NO: 4599984 - DNA, 25 bp, Homo sapien
tcctgctgcagtaatcgtggaagca

SEQ ID NO: 4599985 - DNA, 25 bp, Homo sapien
tactgtggtgtcctaaagcaaagca

SEQ ID NO: 4599986 - DNA, 25 bp, Homo sapien
tgcagatcttttcatatctcaaaat

SEQ ID NO: 4599987 - DNA, 25 bp, Homo sapien
ctggcatagatgttcattcatgcag

SEQ ID NO: 4599988 - DNA, 25 bp, Homo sapien
tttttctggcatagatgttcattca

SEQ ID NO: 4599989 - DNA, 25 bp, Homo sapien
tttctggcatagatgttcattcatg

SEQ ID NO: 4599990 - DNA, 25 bp, Homo sapien
gctttctcacagggattgaagcatt

SEQ ID NO: 4599991 - DNA, 25 bp, Homo sapien
ttctcacagggattgaagcattttc

SEQ ID NO: 4599992 - DNA, 25 bp, Homo sapien
ctttctcacagggattgaagcattt

SEQ ID NO: 4599993 - DNA, 25 bp, Homo sapien
tttctcacagggattgaagcatttt

SEQ ID NO: 4599994 - DNA, 25 bp, Homo sapien
cttatagattattccggagtgtggc

SEQ ID NO: 4599995 - DNA, 25 bp, Homo sapien
tatttacatagtctttgctcaggcc

SEQ ID NO: 4599996 - DNA, 25 bp, Homo sapien
gcccagccagtccagtgttatttgt

SEQ ID NO: 4599997 - DNA, 25 bp, Homo sapien
tgatcaagtgcatcacgtaaagccg

SEQ ID NO: 4599998 - DNA, 25 bp, Homo sapien
aaacagttctggcattctctcttcc

SEQ ID NO: 4599999 - DNA, 25 bp, Homo sapien
cactcagaaaacattgacaacgtca

SEQ ID NO: 4600000 - DNA, 25 bp, Homo sapien
tttccttgatatttcccctgggcac

SEQ ID NO: 4600001 - DNA, 25 bp, Homo sapien
cagcatttactcgaaaaccaaacag

SEQ ID NO: 4600002 - DNA, 25 bp, Homo sapien
ggtgactgaaaatccatttgtaagg

SEQ ID NO: 4600003 - DNA, 25 bp, Homo sapien
ccagcttcgttgagtggtgactgaa

SEQ ID NO: 4600004 - DNA, 25 bp, Homo sapien
tgtggagctctgtcaaccagcttcg

SEQ ID NO: 4600005 - DNA, 25 bp, Homo sapien
cacgagtcgactagaataggtccga

SEQ ID NO: 4600006 - DNA, 25 bp, Homo sapien
acgagtgcatgagaaccctgactca

SEQ ID NO: 4600007 - DNA, 25 bp, Homo sapien
tctaaaactactactttaagcacga

SEQ ID NO: 4600008 - DNA, 25 bp, Homo sapien
tactactttaagcacgaagatgagg

SEQ ID NO: 4600009 - DNA, 25 bp, Homo sapien
ggtgactagcacgagtgcatgagaa

SEQ ID NO: 4600010 - DNA, 25 bp, Homo sapien
tgaaaagggaacgtttgccatccac

SEQ ID NO: 4600011 - DNA, 25 bp, Homo sapien
tagctttcggatggagttgagagtc

SEQ ID NO: 4600012 - DNA, 25 bp, Homo sapien
ttcctcgggagctctcaaaggcctc

SEQ ID NO: 4600013 - DNA, 25 bp, Homo sapien
aaggcctctttgtagccgaattcat

SEQ ID NO: 4600014 - DNA, 25 bp, Homo sapien
gctttttcatcttctcttgatgctg

SEQ ID NO: 4600015 - DNA, 25 bp, Homo sapien
tttcatcttctcttgatgctggtac

SEQ ID NO: 4600016 - DNA, 25 bp, Homo sapien
acaggacttcgttttgctttttcat

SEQ ID NO: 4600017 - DNA, 25 bp, Homo sapien
ttttcatcttctcttgatgctggta

SEQ ID NO: 4600018 - DNA, 25 bp, Homo sapien
gatttcaccagctcttcagctggcg

SEQ ID NO: 4600019 - DNA, 25 bp, Homo sapien
taatctctccctgcgtgtaaacaaa

SEQ ID NO: 4600020 - DNA, 25 bp, Homo sapien
gataacagatcaggccaagatttca

SEQ ID NO: 4600021 - DNA, 25 bp, Homo sapien
agctggcgcggataggccacctttc

SEQ ID NO: 4600022 - DNA, 25 bp, Homo sapien
gagtcccgaacatgcaagctgctgg

SEQ ID NO: 4600023 - DNA, 25 bp, Homo sapien
tatgttgtatagctggagtcccgaa

SEQ ID NO: 4600024 - DNA, 25 bp, Homo sapien
tgaaaagctccacggaaacctttga

SEQ ID NO: 4600025 - DNA, 25 bp, Homo sapien
ctgctggtctggatgagaaatgcct

SEQ ID NO: 4600026 - DNA, 25 bp, Homo sapien
tccatgaatttccacgagccagcat

SEQ ID NO: 4600027 - DNA, 25 bp, Homo sapien
ctccatgaatttccacgagccagca

SEQ ID NO: 4600028 - DNA, 25 bp, Homo sapien
tacccacctgtggttagcagccaca

SEQ ID NO: 4600029 - DNA, 25 bp, Homo sapien
ctgctgggtattagtctgcttaatt

SEQ ID NO: 4600030 - DNA, 25 bp, Homo sapien
cacataattggtttccctccgggct

SEQ ID NO: 4600031 - DNA, 25 bp, Homo sapien
ggcttccatacccacctgtggttag

SEQ ID NO: 4600032 - DNA, 25 bp, Homo sapien
ttcactttttaggcaaaatctcaga

SEQ ID NO: 4600033 - DNA, 25 bp, Homo sapien
cattgtcccataagagaatttcact

SEQ ID NO: 4600034 - DNA, 25 bp, Homo sapien
cagaagattggatatacgaacaggt

SEQ ID NO: 4600035 - DNA, 25 bp, Homo sapien
tcattagcaccaggtttgttatttg

SEQ ID NO: 4600036 - DNA, 25 bp, Homo sapien
caggactcatttgaggagtcagaca

SEQ ID NO: 4600037 - DNA, 25 bp, Homo sapien
tgctttttaggatcagcctcctctt

SEQ ID NO: 4600038 - DNA, 25 bp, Homo sapien
catgtgaaagagaacattgactgct

SEQ ID NO: 4600039 - DNA, 25 bp, Homo sapien
catcaggactcatttgaggagtcag

SEQ ID NO: 4600040 - DNA, 25 bp, Homo sapien
gaaagtgaaggcacaacctcactgg

SEQ ID NO: 4600041 - DNA, 25 bp, Homo sapien
gaagtggttcactttctctaggcat

SEQ ID NO: 4600042 - DNA, 25 bp, Homo sapien
cacaacctcactggtgctggaaagc

SEQ ID NO: 4600043 - DNA, 25 bp, Homo sapien
gaaagcattgcaacagaaagaagtg

SEQ ID NO: 4600044 - DNA, 25 bp, Homo sapien
gatctaaacattgtgagtgttcaga

SEQ ID NO: 4600045 - DNA, 25 bp, Homo sapien
cagtcccgaatcttatgattatcac

SEQ ID NO: 4600046 - DNA, 25 bp, Homo sapien
cacactgtggaattttgatctaaac

SEQ ID NO: 4600047 - DNA, 25 bp, Homo sapien
tgttcagaatatcgaaaagtcacca

SEQ ID NO: 4600048 - DNA, 25 bp, Homo sapien
cagcagctgtgcgttgtctttgagg

SEQ ID NO: 4600049 - DNA, 25 bp, Homo sapien
ctctagaccttgaagtgcagcagct

SEQ ID NO: 4600050 - DNA, 25 bp, Homo sapien
cctgggagttgggatcagcctctag

SEQ ID NO: 4600051 - DNA, 25 bp, Homo sapien
gagttgggatcagcctctagacctt

SEQ ID NO: 4600052 - DNA, 25 bp, Homo sapien
tcagtgtaatcacacactccccaaa

SEQ ID NO: 4600053 - DNA, 25 bp, Homo sapien
caaagtaagcacagggcaactccac

SEQ ID NO: 4600054 - DNA, 25 bp, Homo sapien
ctcagtgtaatcacacactccccaa

SEQ ID NO: 4600055 - DNA, 25 bp, Homo sapien
gtctgattgtatcattccacaagtc

SEQ ID NO: 4600056 - DNA, 25 bp, Homo sapien
gcagccaattctccggaagagcgtt

SEQ ID NO: 4600057 - DNA, 25 bp, Homo sapien
ctctctgcaccctgtctgattgtat

SEQ ID NO: 4600058 - DNA, 25 bp, Homo sapien
tccggaagagcgtttgatgatctct

SEQ ID NO: 4600059 - DNA, 25 bp, Homo sapien
tttgatactcctcatgagctataga

SEQ ID NO: 4600060 - DNA, 25 bp, Homo sapien
gcatttctagtcttttcacaagatc

SEQ ID NO: 4600061 - DNA, 25 bp, Homo sapien
gagctatagacacagcatttctagt

SEQ ID NO: 4600062 - DNA, 25 bp, Homo sapien
tgacacctctgtttgtcaccctcat

SEQ ID NO: 4600063 - DNA, 25 bp, Homo sapien
gagctttgtcccacagaagattatg

SEQ ID NO: 4600064 - DNA, 25 bp, Homo sapien
cccttgttgggcctagattgagaga

SEQ ID NO: 4600065 - DNA, 25 bp, Homo sapien
gggcccaaattgataactgtgtcca

SEQ ID NO: 4600066 - DNA, 25 bp, Homo sapien
gacaaattgcaatgacagggctgcg

SEQ ID NO: 4600067 - DNA, 25 bp, Homo sapien
caacaacgtaagagtgtaggacact

SEQ ID NO: 4600068 - DNA, 25 bp, Homo sapien
cactaatgctttttataatagccca

SEQ ID NO: 4600069 - DNA, 25 bp, Homo sapien
gccaaatcctttctcacattcaaag

SEQ ID NO: 4600070 - DNA, 25 bp, Homo sapien
gacactctttgtgagtgcttcacta

SEQ ID NO: 4600071 - DNA, 25 bp, Homo sapien
tttgatatggtgttgttgcagctgt

SEQ ID NO: 4600072 - DNA, 25 bp, Homo sapien
gaatacataaaacaggctctccaaa

SEQ ID NO: 4600073 - DNA, 25 bp, Homo sapien
cagctgtgggaccagggtggtttat

SEQ ID NO: 4600074 - DNA, 25 bp, Homo sapien
aaatgcctgtcagtgtggcaaccag

SEQ ID NO: 4600075 - DNA, 25 bp, Homo sapien
ccgcgggttggagatacatttggtc

SEQ ID NO: 4600076 - DNA, 25 bp, Homo sapien
gaccttcgcgttcagtgcgggatga

SEQ ID NO: 4600077 - DNA, 25 bp, Homo sapien
ggcccttccgcataaatctgcagct

SEQ ID NO: 4600078 - DNA, 25 bp, Homo sapien
ttcacagtgaccttcgcgttcagtg

SEQ ID NO: 4600079 - DNA, 25 bp, Homo sapien
tacgatgggcaccaaagttcaatcc

SEQ ID NO: 4600080 - DNA, 25 bp, Homo sapien
gtggtcatcaatccatcatggtcta

SEQ ID NO: 4600081 - DNA, 25 bp, Homo sapien
caatccatctgtggtcatcaatcca

SEQ ID NO: 4600082 - DNA, 25 bp, Homo sapien
tcttgagtgggtcactacgatgggc

SEQ ID NO: 4600083 - DNA, 25 bp, Homo sapien
gttcatgggatgatctgagtaatgc

SEQ ID NO: 4600084 - DNA, 25 bp, Homo sapien
tgccatcggagaagctttggcccag

SEQ ID NO: 4600085 - DNA, 25 bp, Homo sapien
gcttgaataatctcaacatgccatc

SEQ ID NO: 4600086 - DNA, 25 bp, Homo sapien
gatgatctgagtaatgcttgaataa

SEQ ID NO: 4600087 - DNA, 25 bp, Homo sapien
tcttgagggacggtgcagacattcc

SEQ ID NO: 4600088 - DNA, 25 bp, Homo sapien
tgcatgtgacagcttcagtatctca

SEQ ID NO: 4600089 - DNA, 25 bp, Homo sapien
tataataacgccatctctcagttcc

SEQ ID NO: 4600090 - DNA, 25 bp, Homo sapien
tttccagcctgagtaatccccatct

SEQ ID NO: 4600091 - DNA, 25 bp, Homo sapien
cagcacaactttcgcctaaggcagg

SEQ ID NO: 4600092 - DNA, 25 bp, Homo sapien
aggcaggaactttgtgagaccacaa

SEQ ID NO: 4600093 - DNA, 25 bp, Homo sapien
tattaaaagtcggtgcataagaact

SEQ ID NO: 4600094 - DNA, 25 bp, Homo sapien
ccgaggtagcacacagccaactttt

SEQ ID NO: 4600095 - DNA, 25 bp, Homo sapien
gcatccccaggtaaccctacaagga

SEQ ID NO: 4600096 - DNA, 25 bp, Homo sapien
tcctcagcaaccctgaggccccctg

SEQ ID NO: 4600097 - DNA, 25 bp, Homo sapien
cattcctgttgtagatggtatttcc

SEQ ID NO: 4600098 - DNA, 25 bp, Homo sapien
atccccaggtaaccctacaaggatg

SEQ ID NO: 4600099 - DNA, 25 bp, Homo sapien
tttgttgtcactttgggcccaaggc

SEQ ID NO: 4600100 - DNA, 25 bp, Homo sapien
aggcggcccttcttttcccacgctg

SEQ ID NO: 4600101 - DNA, 25 bp, Homo sapien
tgtcactttgggcccaaggcggccc

SEQ ID NO: 4600102 - DNA, 25 bp, Homo sapien
cttcttttcccacgctgacctctgc

SEQ ID NO: 4600103 - DNA, 25 bp, Homo sapien
tgcatttcgttttcttttctccacc

SEQ ID NO: 4600104 - DNA, 25 bp, Homo sapien
atggggctaaatttgcatttcgttt

SEQ ID NO: 4600105 - DNA, 25 bp, Homo sapien
tttgcatttcgttttcttttctcca

SEQ ID NO: 4600106 - DNA, 25 bp, Homo sapien
catttcgttttcttttctccaccat

SEQ ID NO: 4600107 - DNA, 25 bp, Homo sapien
tggtcctgaacaaccaaatccctct

SEQ ID NO: 4600108 - DNA, 25 bp, Homo sapien
ccagccgtggtgcttccataatctg

SEQ ID NO: 4600109 - DNA, 25 bp, Homo sapien
taacctctgatttgggaatccctct

SEQ ID NO: 4600110 - DNA, 25 bp, Homo sapien
ctggatccttggttctggtgactca

SEQ ID NO: 4600111 - DNA, 25 bp, Homo sapien
agtcacttgggccacattctatcat

SEQ ID NO: 4600112 - DNA, 25 bp, Homo sapien
gagtcacttgggccacattctatca

SEQ ID NO: 4600113 - DNA, 25 bp, Homo sapien
ttggggcttttgttagcaggtggct

SEQ ID NO: 4600114 - DNA, 25 bp, Homo sapien
ttcaatggcattggggcttttgtta

SEQ ID NO: 4600115 - DNA, 25 bp, Homo sapien
ttattcacccagagtttcaatggca

SEQ ID NO: 4600116 - DNA, 25 bp, Homo sapien
tattcacccagagtttcaatggcat

SEQ ID NO: 4600117 - DNA, 25 bp, Homo sapien
aaagagacccatcagcttcttggcc

SEQ ID NO: 4600118 - DNA, 25 bp, Homo sapien
ccagaggaagctttgttaggacagc

SEQ ID NO: 4600119 - DNA, 25 bp, Homo sapien
gttaggacagccatgtaggcgtgac

SEQ ID NO: 4600120 - DNA, 25 bp, Homo sapien
caagtgaaagagacccatcagcttc

SEQ ID NO: 4600121 - DNA, 25 bp, Homo sapien
gcacttttgcgtttcccatttatct

SEQ ID NO: 4600122 - DNA, 25 bp, Homo sapien
cctctgaagcagcacttttgcgttt

SEQ ID NO: 4600123 - DNA, 25 bp, Homo sapien
cgaaccacagctccaataccacttt

SEQ ID NO: 4600124 - DNA, 25 bp, Homo sapien
tgttctcatcaatacctcgaaccac

SEQ ID NO: 4600125 - DNA, 25 bp, Homo sapien
gatgcagcagacactttccagggaa

SEQ ID NO: 4600126 - DNA, 25 bp, Homo sapien
tgcaggcaggtagatgcagctccag

SEQ ID NO: 4600127 - DNA, 25 bp, Homo sapien
tagctcagaaatgactgaatttttg

SEQ ID NO: 4600128 - DNA, 25 bp, Homo sapien
taggatcgacggctccagatagctc

SEQ ID NO: 4600129 - DNA, 25 bp, Homo sapien
ttgggtggtgaggattgctgtatca

SEQ ID NO: 4600130 - DNA, 25 bp, Homo sapien
gattgctgtatcagtgcaacaggtt

SEQ ID NO: 4600131 - DNA, 25 bp, Homo sapien
gaggattgctgtatcagtgcaacag

SEQ ID NO: 4600132 - DNA, 25 bp, Homo sapien
tggtgaggattgctgtatcagtgca

SEQ ID NO: 4600133 - DNA, 25 bp, Homo sapien
taagttattcgagtagtcacagcca

SEQ ID NO: 4600134 - DNA, 25 bp, Homo sapien
gagcatggtcccctaagttattcga

SEQ ID NO: 4600135 - DNA, 25 bp, Homo sapien
gtccccagatcaaaccaaaagtctg

SEQ ID NO: 4600136 - DNA, 25 bp, Homo sapien
tttcaagaaaacctgatagagccat

SEQ ID NO: 4600137 - DNA, 25 bp, Homo sapien
tacgggacgacagacgaatattact

SEQ ID NO: 4600138 - DNA, 25 bp, Homo sapien
tattacttgaaatttggcacgccac

SEQ ID NO: 4600139 - DNA, 25 bp, Homo sapien
tccatgatagccaggtagaagcacc

SEQ ID NO: 4600140 - DNA, 25 bp, Homo sapien
ccaaaggtttaagagcacggatgct

SEQ ID NO: 4600141 - DNA, 25 bp, Homo sapien
tacaaataagtcacctagtttactc

SEQ ID NO: 4600142 - DNA, 25 bp, Homo sapien
cacctagtttactctggacacaaag

SEQ ID NO: 4600143 - DNA, 25 bp, Homo sapien
ttattactgtctcttgcggcaaaat

SEQ ID NO: 4600144 - DNA, 25 bp, Homo sapien
tgtctcttgcggcaaaataacattt

SEQ ID NO: 4600145 - DNA, 25 bp, Homo sapien
aatgaatcctcaataaccccctgat

SEQ ID NO: 4600146 - DNA, 25 bp, Homo sapien
tccatcctcaaagtcacaagtacaa

SEQ ID NO: 4600147 - DNA, 25 bp, Homo sapien
cagagcaaagatgccacagactgga

SEQ ID NO: 4600148 - DNA, 25 bp, Homo sapien
agcacagccaattcttcacagagca

SEQ ID NO: 4600149 - DNA, 25 bp, Homo sapien
tacagtggaatcaatagctcagcgc

SEQ ID NO: 4600150 - DNA, 25 bp, Homo sapien
ccgattagcttgtcagtcagggcct

SEQ ID NO: 4600151 - DNA, 25 bp, Homo sapien
tagtgtaaatcccagaataccaggg

SEQ ID NO: 4600152 - DNA, 25 bp, Homo sapien
cagttgctcaacagtcgaatgcctc

SEQ ID NO: 4600153 - DNA, 25 bp, Homo sapien
gagcacatgctgctagctcctgtga

SEQ ID NO: 4600154 - DNA, 25 bp, Homo sapien
tcacagtccaactctggagcacatg

SEQ ID NO: 4600155 - DNA, 25 bp, Homo sapien
ataaggagcagaactacaaatcaag

SEQ ID NO: 4600156 - DNA, 25 bp, Homo sapien
ggataaatataaggagcagaactac

SEQ ID NO: 4600157 - DNA, 25 bp, Homo sapien
cctgcaactggttccgagtgcccat

SEQ ID NO: 4600158 - DNA, 25 bp, Homo sapien
attcacagttgcctgcaactggttc

SEQ ID NO: 4600159 - DNA, 25 bp, Homo sapien
cagttgcctgcaactggttccgagt

SEQ ID NO: 4600160 - DNA, 25 bp, Homo sapien
tgcctgcaactggttccgagtgccc

SEQ ID NO: 4600161 - DNA, 25 bp, Homo sapien
taggggctgccttggcagggcccac

SEQ ID NO: 4600162 - DNA, 25 bp, Homo sapien
ttaggggctgccttggcagggccca

SEQ ID NO: 4600163 - DNA, 25 bp, Homo sapien
tccgctgacaccggctgccggagga

SEQ ID NO: 4600164 - DNA, 25 bp, Homo sapien
tggccccgggcaagccttgatccgc

SEQ ID NO: 4600165 - DNA, 25 bp, Homo sapien
ccccgaggctctcgtgctggcggca

SEQ ID NO: 4600166 - DNA, 25 bp, Homo sapien
cggtccccgaggctctcgtgctggc

SEQ ID NO: 4600167 - DNA, 25 bp, Homo sapien
ctggacacgggctcagccgcagggg

SEQ ID NO: 4600168 - DNA, 25 bp, Homo sapien
ggacacgggctcagccgcaggggcc

SEQ ID NO: 4600169 - DNA, 25 bp, Homo sapien
tcagccgcaggggcccctagtacct

SEQ ID NO: 4600170 - DNA, 25 bp, Homo sapien
ccgcaggggcccctagtacctccat

SEQ ID NO: 4600171 - DNA, 25 bp, Homo sapien
cagagaagcagtaaatccattgtcg

SEQ ID NO: 4600172 - DNA, 25 bp, Homo sapien
aaatccattgtcgttaaacagcggg

SEQ ID NO: 4600173 - DNA, 25 bp, Homo sapien
accaatatgcagagaagcagtaaat

SEQ ID NO: 4600174 - DNA, 25 bp, Homo sapien
gcagtaaatccattgtcgttaaaca

SEQ ID NO: 4600175 - DNA, 25 bp, Homo sapien
tggtgtcgacatcctccttgtttac

SEQ ID NO: 4600176 - DNA, 25 bp, Homo sapien
taagggacagattaaagtgaaattc

SEQ ID NO: 4600177 - DNA, 25 bp, Homo sapien
acggaggcgctggtgtcgacatcct

SEQ ID NO: 4600178 - DNA, 25 bp, Homo sapien
tgaaattcctgttgacggaggcgct

SEQ ID NO: 4600179 - DNA, 25 bp, Homo sapien
cctgttaatgacactctgataactt

SEQ ID NO: 4600180 - DNA, 25 bp, Homo sapien
aatgacactctgataactttcggag

SEQ ID NO: 4600181 - DNA, 25 bp, Homo sapien
gtccctgttaatgacactctgataa

SEQ ID NO: 4600182 - DNA, 25 bp, Homo sapien
actctgataactttcggaggctgcc

SEQ ID NO: 4600183 - DNA, 25 bp, Homo sapien
catgagcaatggtacttgttgaatt

SEQ ID NO: 4600184 - DNA, 25 bp, Homo sapien
catcatgagcaatggtacttgttga

SEQ ID NO: 4600185 - DNA, 25 bp, Homo sapien
atacatcataagaggtagaatcttc

SEQ ID NO: 4600186 - DNA, 25 bp, Homo sapien
agcaatggtacttgttgaattcttc

SEQ ID NO: 4600187 - DNA, 25 bp, Homo sapien
aatccttgtcctggatagaacactc

SEQ ID NO: 4600188 - DNA, 25 bp, Homo sapien
gacacaatccttgtcctggatagaa

SEQ ID NO: 4600189 - DNA, 25 bp, Homo sapien
ccttgtcctggatagaacactcatc

SEQ ID NO: 4600190 - DNA, 25 bp, Homo sapien
gtcctggatagaacactcatccaca

SEQ ID NO: 4600191 - DNA, 25 bp, Homo sapien
tctagtactgtgagaagatgtgcag

SEQ ID NO: 4600192 - DNA, 25 bp, Homo sapien
gaggttggagactttcacaggctgc

SEQ ID NO: 4600193 - DNA, 25 bp, Homo sapien
cactggagcctcgtggaagggtcca

SEQ ID NO: 4600194 - DNA, 25 bp, Homo sapien
caggctgcccttgtgctcttcgttc

SEQ ID NO: 4600195 - DNA, 25 bp, Homo sapien
ttccaggacagggttagagctgtga

SEQ ID NO: 4600196 - DNA, 25 bp, Homo sapien
gatacacctgtgagactgtactcat

SEQ ID NO: 4600197 - DNA, 25 bp, Homo sapien
agccagatacacctgtgagactgta

SEQ ID NO: 4600198 - DNA, 25 bp, Homo sapien
ggttagagctgtgatgccattcata

SEQ ID NO: 4600199 - DNA, 25 bp, Homo sapien
ctttggaaattttgcagggctcttc

SEQ ID NO: 4600200 - DNA, 25 bp, Homo sapien
tctttggaaattttgcagggctctt

SEQ ID NO: 4600201 - DNA, 25 bp, Homo sapien
ttctttcacttatctggttttactc

SEQ ID NO: 4600202 - DNA, 25 bp, Homo sapien
cacttatctggttttactctattca

SEQ ID NO: 4600203 - DNA, 25 bp, Homo sapien
tggttttactctattcatagaaaac

SEQ ID NO: 4600204 - DNA, 25 bp, Homo sapien
ctttcacttatctggttttactcta

SEQ ID NO: 4600205 - DNA, 25 bp, Homo sapien
tcaaaaagttggctaggacctcatc

SEQ ID NO: 4600206 - DNA, 25 bp, Homo sapien
gactttgttcctacaggcctctcag

SEQ ID NO: 4600207 - DNA, 25 bp, Homo sapien
tctcacagtggaggaattaggacac

SEQ ID NO: 4600208 - DNA, 25 bp, Homo sapien
ggtatattgcgtcatgaaagccagc

SEQ ID NO: 4600209 - DNA, 25 bp, Homo sapien
atgcccagctgaattccccaaaagg

SEQ ID NO: 4600210 - DNA, 25 bp, Homo sapien
caaaaggggcttgtccacctccagc

SEQ ID NO: 4600211 - DNA, 25 bp, Homo sapien
tcagctcccaggtcttcagaggcca

SEQ ID NO: 4600212 - DNA, 25 bp, Homo sapien
agctccttcagggcggcaacctcag

SEQ ID NO: 4600213 - DNA, 25 bp, Homo sapien
tctcatggggccaaatgtttcagat

SEQ ID NO: 4600214 - DNA, 25 bp, Homo sapien
gcagcagatgctaaatataagcact

SEQ ID NO: 4600215 - DNA, 25 bp, Homo sapien
cagatgctaaatataagcactgttc

SEQ ID NO: 4600216 - DNA, 25 bp, Homo sapien
tcttttccatagagctgaattttat

SEQ ID NO: 4600217 - DNA, 25 bp, Homo sapien
tatagactcctttccaactacatcc

SEQ ID NO: 4600218 - DNA, 25 bp, Homo sapien
caaagcttggcagtctcagcccaat

SEQ ID NO: 4600219 - DNA, 25 bp, Homo sapien
agcttagaaaacgtgccctctggca

SEQ ID NO: 4600220 - DNA, 25 bp, Homo sapien
tccccgttgatgttccaaagcttgg

SEQ ID NO: 4600221 - DNA, 25 bp, Homo sapien
gatgaagttaacaggcggagaaaaa

SEQ ID NO: 4600222 - DNA, 25 bp, Homo sapien
agagtgatgaagttaacaggcggag

SEQ ID NO: 4600223 - DNA, 25 bp, Homo sapien
gttaacaggcggagaaaaagagcca

SEQ ID NO: 4600224 - DNA, 25 bp, Homo sapien
gtgatgaagttaacaggcggagaaa

SEQ ID NO: 4600225 - DNA, 25 bp, Homo sapien
ggtcttcccttgaattgagaactga

SEQ ID NO: 4600226 - DNA, 25 bp, Homo sapien
cccagtccctgatatgaggctggca

SEQ ID NO: 4600227 - DNA, 25 bp, Homo sapien
cagtcaggcatacgcactgcagtca

SEQ ID NO: 4600228 - DNA, 25 bp, Homo sapien
catattactgattagtccccttgag

SEQ ID NO: 4600229 - DNA, 25 bp, Homo sapien
caaatattatgcgttctaatgtgca

SEQ ID NO: 4600230 - DNA, 25 bp, Homo sapien
tggaatttgctctgcaagtatacat

SEQ ID NO: 4600231 - DNA, 25 bp, Homo sapien
gaacagcttccaacttaaccgcaga

SEQ ID NO: 4600232 - DNA, 25 bp, Homo sapien
actcagtgattctaagtcccaccag

SEQ ID NO: 4600233 - DNA, 25 bp, Homo sapien
tgtagaacgtacacaaccttctgcg

SEQ ID NO: 4600234 - DNA, 25 bp, Homo sapien
gcgtttgatgccaaaatgcactttt

SEQ ID NO: 4600235 - DNA, 25 bp, Homo sapien
tccatcaccttgtagaacgtacaca

SEQ ID NO: 4600236 - DNA, 25 bp, Homo sapien
caaccttctgcgtttgatgccaaaa

SEQ ID NO: 4600237 - DNA, 25 bp, Homo sapien
acagcacgcatttctaagggaaaca

SEQ ID NO: 4600238 - DNA, 25 bp, Homo sapien
tggaccacagcacgcatttctaagg

SEQ ID NO: 4600239 - DNA, 25 bp, Homo sapien
cgtgcctggaccacagcacgcattt

SEQ ID NO: 4600240 - DNA, 25 bp, Homo sapien
gaccacagcacgcatttctaaggga

SEQ ID NO: 4600241 - DNA, 25 bp, Homo sapien
ggaaccataggcatttgccatgtgc

SEQ ID NO: 4600242 - DNA, 25 bp, Homo sapien
caatgtgcttggattgcacacatga

SEQ ID NO: 4600243 - DNA, 25 bp, Homo sapien
cactgattatgtatcactatataac

SEQ ID NO: 4600244 - DNA, 25 bp, Homo sapien
ttaatgaggtacatttattgggaca

SEQ ID NO: 4600245 - DNA, 25 bp, Homo sapien
caccataaagtgaactgcagccgcc

SEQ ID NO: 4600246 - DNA, 25 bp, Homo sapien
ggtgaaccatccaggcaaagagcag

SEQ ID NO: 4600247 - DNA, 25 bp, Homo sapien
gattcctaactcagccgatcagcag

SEQ ID NO: 4600248 - DNA, 25 bp, Homo sapien
tctggaacaaaagctaggagtctga

SEQ ID NO: 4600249 - DNA, 25 bp, Homo sapien
gcctttccatgatcaagcgattccc

SEQ ID NO: 4600250 - DNA, 25 bp, Homo sapien
ctccgcctttccatgatcaagcgat

SEQ ID NO: 4600251 - DNA, 25 bp, Homo sapien
tgtcgctgttgctgtttgaaacggc

SEQ ID NO: 4600252 - DNA, 25 bp, Homo sapien
ctgttgctgtttgaaacggcgtctc

SEQ ID NO: 4600253 - DNA, 25 bp, Homo sapien
caagatccaatctagaagtgcccat

SEQ ID NO: 4600254 - DNA, 25 bp, Homo sapien
tgtgattggaacgagaaacctggct

SEQ ID NO: 4600255 - DNA, 25 bp, Homo sapien
tttgagttgcattaacagagtcctc

SEQ ID NO: 4600256 - DNA, 25 bp, Homo sapien
agtgcccatgggttccaaattgtag

SEQ ID NO: 4600257 - DNA, 25 bp, Homo sapien
acaccagtccctctgtgttcccaca

SEQ ID NO: 4600258 - DNA, 25 bp, Homo sapien
ctacatcccagggacaccagtccct

SEQ ID NO: 4600259 - DNA, 25 bp, Homo sapien
cagggacaccagtccctctgtgttc

SEQ ID NO: 4600260 - DNA, 25 bp, Homo sapien
tacatcccagggacaccagtccctc

SEQ ID NO: 4600261 - DNA, 25 bp, Homo sapien
gttacacacactatcccctatccca

SEQ ID NO: 4600262 - DNA, 25 bp, Homo sapien
aaggattgacacatttgttacacac

SEQ ID NO: 4600263 - DNA, 25 bp, Homo sapien
tatcaaaaggattgacacatttgtt

SEQ ID NO: 4600264 - DNA, 25 bp, Homo sapien
ccctatcccatcctcagtaaataag

SEQ ID NO: 4600265 - DNA, 25 bp, Homo sapien
acaccacgccctgttgactcagctg

SEQ ID NO: 4600266 - DNA, 25 bp, Homo sapien
gaagcagaggtcctcctcttgaaga

SEQ ID NO: 4600267 - DNA, 25 bp, Homo sapien
gcccgaatgtatagaaatttagaga

SEQ ID NO: 4600268 - DNA, 25 bp, Homo sapien
gcctgacctctaatgagttagcccg

SEQ ID NO: 4600269 - DNA, 25 bp, Homo sapien
gaataattgtgatcctccctgagac

SEQ ID NO: 4600270 - DNA, 25 bp, Homo sapien
gctgaatactgtggacaacgtgggt

SEQ ID NO: 4600271 - DNA, 25 bp, Homo sapien
cgggaggtaagtgggaaatcatgca

SEQ ID NO: 4600272 - DNA, 25 bp, Homo sapien
ttcactctttgcagtcccattagaa

SEQ ID NO: 4600273 - DNA, 25 bp, Homo sapien
tagctcgaacatcagctgctcaggg

SEQ ID NO: 4600274 - DNA, 25 bp, Homo sapien
gatcttagctcgaacatcagctgct

SEQ ID NO: 4600275 - DNA, 25 bp, Homo sapien
tcttagctcgaacatcagctgctca

SEQ ID NO: 4600276 - DNA, 25 bp, Homo sapien
ttcagatcttagctcgaacatcagc

SEQ ID NO: 4600277 - DNA, 25 bp, Homo sapien
tgagatggttaggatccatttccat

SEQ ID NO: 4600278 - DNA, 25 bp, Homo sapien
gacttctctaggagcaagtaaggtg

SEQ ID NO: 4600279 - DNA, 25 bp, Homo sapien
tattacagacgttattagggctgcc

SEQ ID NO: 4600280 - DNA, 25 bp, Homo sapien
tgcagaacctccgattgagatcaag

SEQ ID NO: 4600281 - DNA, 25 bp, Homo sapien
taaaggattacatgtggcacagtga

SEQ ID NO: 4600282 - DNA, 25 bp, Homo sapien
tccctgcacaggatcacggagtcag

SEQ ID NO: 4600283 - DNA, 25 bp, Homo sapien
tttgaacaatatagagagcactggc

SEQ ID NO: 4600284 - DNA, 25 bp, Homo sapien
tattacggacccaaagacattaaca

SEQ ID NO: 4600285 - DNA, 25 bp, Homo sapien
gctaaacctgctctcactatttgaa

SEQ ID NO: 4600286 - DNA, 25 bp, Homo sapien
ttgacctattatcctactgggctgt

SEQ ID NO: 4600287 - DNA, 25 bp, Homo sapien
acaaagtcttgtaagctgacgcttc

SEQ ID NO: 4600288 - DNA, 25 bp, Homo sapien
tgagagatggtaatgccagtagacg

SEQ ID NO: 4600289 - DNA, 25 bp, Homo sapien
tcctgaaactattaatgccatgaag

SEQ ID NO: 4600290 - DNA, 25 bp, Homo sapien
tgcacttgtgcccattacaatggaa

SEQ ID NO: 4600291 - DNA, 25 bp, Homo sapien
tatgaacagaacattgggtgcagac

SEQ ID NO: 4600292 - DNA, 25 bp, Homo sapien
ccaggagacaacagataaatctggc

SEQ ID NO: 4600293 - DNA, 25 bp, Homo sapien
gaagaattctctatagggtaggtgc

SEQ ID NO: 4600294 - DNA, 25 bp, Homo sapien
gcagagtgaaatgtcttggagacca

SEQ ID NO: 4600295 - DNA, 25 bp, Homo sapien
cttgacaaatgagttctcagttaat

SEQ ID NO: 4600296 - DNA, 25 bp, Homo sapien
tgagtggtacactctttaagaaaaa

SEQ ID NO: 4600297 - DNA, 25 bp, Homo sapien
tttcagggcatggtaagtgagtggt

SEQ ID NO: 4600298 - DNA, 25 bp, Homo sapien
caatactgtgccctataatgctata

SEQ ID NO: 4600299 - DNA, 25 bp, Homo sapien
ggacagtgcctgttatcaatatttt

SEQ ID NO: 4600300 - DNA, 25 bp, Homo sapien
aagtcgcggacttttgcagtgagtg

SEQ ID NO: 4600301 - DNA, 25 bp, Homo sapien
tgtccatctctagtacacaggacag

SEQ ID NO: 4600302 - DNA, 25 bp, Homo sapien
tgaacagggacagtagtagtgtgtc

SEQ ID NO: 4600303 - DNA, 25 bp, Homo sapien
taacttgaatagagcagagtcagga

SEQ ID NO: 4600304 - DNA, 25 bp, Homo sapien
aaaaccatcttatcttgagtaccca

SEQ ID NO: 4600305 - DNA, 25 bp, Homo sapien
tgagtacccactacttgctaggagt

SEQ ID NO: 4600306 - DNA, 25 bp, Homo sapien
gtaaagaaatagttacatagaggtc

SEQ ID NO: 4600307 - DNA, 25 bp, Homo sapien
cactcggcttgctttttccaaagga

SEQ ID NO: 4600308 - DNA, 25 bp, Homo sapien
ctcacagagggtcatataaaaatta

SEQ ID NO: 4600309 - DNA, 25 bp, Homo sapien
tcatttagctcctgaaagcccaaca

SEQ ID NO: 4600310 - DNA, 25 bp, Homo sapien
tgcgcattgctcatccctttaaagg

SEQ ID NO: 4600311 - DNA, 25 bp, Homo sapien
cataaaccacgtagaccgagaccaa

SEQ ID NO: 4600312 - DNA, 25 bp, Homo sapien
aaagctggacgctcagatcgtgaca

SEQ ID NO: 4600313 - DNA, 25 bp, Homo sapien
tcgtgacagaacaaagatgggaacc

SEQ ID NO: 4600314 - DNA, 25 bp, Homo sapien
tatggagcggctcagagaaaccaaa

SEQ ID NO: 4600315 - DNA, 25 bp, Homo sapien
caagactcacctaggcaacttaggg

SEQ ID NO: 4600316 - DNA, 25 bp, Homo sapien
cccaaggccagaggatgactacagc

SEQ ID NO: 4600317 - DNA, 25 bp, Homo sapien
ctaggtgatccgcatataatcttca

SEQ ID NO: 4600318 - DNA, 25 bp, Homo sapien
gccagaggatgactacagcctaaga

SEQ ID NO: 4600319 - DNA, 25 bp, Homo sapien
ggagaagtggtataatagtcagtac

SEQ ID NO: 4600320 - DNA, 25 bp, Homo sapien
caatctctaccagccattagccatg

SEQ ID NO: 4600321 - DNA, 25 bp, Homo sapien
tgccttgagggcaggacccaagaac

SEQ ID NO: 4600322 - DNA, 25 bp, Homo sapien
tagtcagtacaatctctaccagcca

SEQ ID NO: 4600323 - DNA, 25 bp, Homo sapien
cttcaaggtgcattatctcataaga

SEQ ID NO: 4600324 - DNA, 25 bp, Homo sapien
cataagaaagacatatgtaagcagt

SEQ ID NO: 4600325 - DNA, 25 bp, Homo sapien
gagtgatgagttatgattatcttcc

SEQ ID NO: 4600326 - DNA, 25 bp, Homo sapien
tgtaagcagttataatccagagtga

SEQ ID NO: 4600327 - DNA, 25 bp, Homo sapien
gacttccacccggagttgtagataa

SEQ ID NO: 4600328 - DNA, 25 bp, Homo sapien
ttcctccaccaagacaaaaaagcag

SEQ ID NO: 4600329 - DNA, 25 bp, Homo sapien
ggcttgttgacacccacttccgact

SEQ ID NO: 4600330 - DNA, 25 bp, Homo sapien
acttccgactctgggattaaactga

SEQ ID NO: 4600331 - DNA, 25 bp, Homo sapien
tcatgtatctttagtgccctggcct

SEQ ID NO: 4600332 - DNA, 25 bp, Homo sapien
gaaagtcattttgctctgtgagcca

SEQ ID NO: 4600333 - DNA, 25 bp, Homo sapien
taacgggattttgtaagccatgagc

SEQ ID NO: 4600334 - DNA, 25 bp, Homo sapien
ctgttttgccaaccatgaactgtgg

SEQ ID NO: 4600335 - DNA, 25 bp, Homo sapien
agtttcccttcactaatgaaacaag

SEQ ID NO: 4600336 - DNA, 25 bp, Homo sapien
ccttcactaatgaaacaagagctgc

SEQ ID NO: 4600337 - DNA, 25 bp, Homo sapien
tagttctttatgatcgtgtgtttcc

SEQ ID NO: 4600338 - DNA, 25 bp, Homo sapien
tgattagttctttatgatcgtgtgt

SEQ ID NO: 4600339 - DNA, 25 bp, Homo sapien
ctgtgcccagagattaagctatgag

SEQ ID NO: 4600340 - DNA, 25 bp, Homo sapien
taacctctctagttgcactccaaac

SEQ ID NO: 4600341 - DNA, 25 bp, Homo sapien
ggagcagggcaagatatgagtccca

SEQ ID NO: 4600342 - DNA, 25 bp, Homo sapien
gcggtctgggaaaagtgaactgcta

SEQ ID NO: 4600343 - DNA, 25 bp, Homo sapien
cacacgatcctgcagcaccgagttt

SEQ ID NO: 4600344 - DNA, 25 bp, Homo sapien
cctgcagcaccgagtttgatgaata

SEQ ID NO: 4600345 - DNA, 25 bp, Homo sapien
tctctgaggttcacctgctttctga

SEQ ID NO: 4600346 - DNA, 25 bp, Homo sapien
tgaacactggcggtacactctcctc

SEQ ID NO: 4600347 - DNA, 25 bp, Homo sapien
gacgtgtgtgatcttggagcctcta

SEQ ID NO: 4600348 - DNA, 25 bp, Homo sapien
taattggctgtctcttgccgaccct

SEQ ID NO: 4600349 - DNA, 25 bp, Homo sapien
tgaatacctctaatggacgtgtgtg

SEQ ID NO: 4600350 - DNA, 25 bp, Homo sapien
ttaaaaaacgagtgagcaaggcatt

SEQ ID NO: 4600351 - DNA, 25 bp, Homo sapien
cacacaactgggacatggtaaaacc

SEQ ID NO: 4600352 - DNA, 25 bp, Homo sapien
cagggacagctagaaccgtaaatca

SEQ ID NO: 4600353 - DNA, 25 bp, Homo sapien
tctgagtgccactggaagaaaactg

SEQ ID NO: 4600354 - DNA, 25 bp, Homo sapien
catctaatgtttgctgcccactcag

SEQ ID NO: 4600355 - DNA, 25 bp, Homo sapien
acttctgcgctaagagggttacatt

SEQ ID NO: 4600356 - DNA, 25 bp, Homo sapien
gcgctaagagggttacattttgtac

SEQ ID NO: 4600357 - DNA, 25 bp, Homo sapien
taagagggttacattttgtacctgc

SEQ ID NO: 4600358 - DNA, 25 bp, Homo sapien
taaaacttctgcgctaagagggtta

SEQ ID NO: 4600359 - DNA, 25 bp, Homo sapien
taacacctgccttgctaggccgagg

SEQ ID NO: 4600360 - DNA, 25 bp, Homo sapien
tgtctggctctattgaaaccctctg

SEQ ID NO: 4600361 - DNA, 25 bp, Homo sapien
gatcatatacgagagtgagccccaa

SEQ ID NO: 4600362 - DNA, 25 bp, Homo sapien
gacccaatctttgtatgagcaagcc

SEQ ID NO: 4600363 - DNA, 25 bp, Homo sapien
gataaaacctttacgctccaggcac

SEQ ID NO: 4600364 - DNA, 25 bp, Homo sapien
tattttgcatggaaggactctaagc

SEQ ID NO: 4600365 - DNA, 25 bp, Homo sapien
tgacaggtcagtaacaggcagagcc

SEQ ID NO: 4600366 - DNA, 25 bp, Homo sapien
tattacgccaaagaatgacaggtca

SEQ ID NO: 4600367 - DNA, 25 bp, Homo sapien
aaaaagtccatgataatggccttac

SEQ ID NO: 4600368 - DNA, 25 bp, Homo sapien
aaagtccatgataatggccttacac

SEQ ID NO: 4600369 - DNA, 25 bp, Homo sapien
aagtccatgataatggccttacact

SEQ ID NO: 4600370 - DNA, 25 bp, Homo sapien
gtccatgataatggccttacactca

SEQ ID NO: 4600371 - DNA, 25 bp, Homo sapien
ttaccagttactctctaatgtcttt

SEQ ID NO: 4600372 - DNA, 25 bp, Homo sapien
tactaccgacttaatttcaatagtg

SEQ ID NO: 4600373 - DNA, 25 bp, Homo sapien
tttacctatgtagtacatttaccag

SEQ ID NO: 4600374 - DNA, 25 bp, Homo sapien
cagtgtaagcccataaacacagttt

SEQ ID NO: 4600375 - DNA, 25 bp, Homo sapien
gtaggattgtagtcacgagccacca

SEQ ID NO: 4600376 - DNA, 25 bp, Homo sapien
gggcatctacaatgctcagtcaggt

SEQ ID NO: 4600377 - DNA, 25 bp, Homo sapien
cttgaaacaatgagtcccctaggct

SEQ ID NO: 4600378 - DNA, 25 bp, Homo sapien
tcaggttagtcacagatgagaactc

SEQ ID NO: 4600379 - DNA, 25 bp, Homo sapien
cattcaggactaccataattgtgag

SEQ ID NO: 4600380 - DNA, 25 bp, Homo sapien
tgagtcatatcaaagacaagctgtg

SEQ ID NO: 4600381 - DNA, 25 bp, Homo sapien
agctgctaggctgcttacattcagg

SEQ ID NO: 4600382 - DNA, 25 bp, Homo sapien
gagatggaacttctccccttcagta

SEQ ID NO: 4600383 - DNA, 25 bp, Homo sapien
aaggataatgtccaagccaatccca

SEQ ID NO: 4600384 - DNA, 25 bp, Homo sapien
ctccataaatgaaggatccattttc

SEQ ID NO: 4600385 - DNA, 25 bp, Homo sapien
gataatgtccaagccaatcccactt

SEQ ID NO: 4600386 - DNA, 25 bp, Homo sapien
gctccataaatgaaggatccatttt

SEQ ID NO: 4600387 - DNA, 25 bp, Homo sapien
tcaacccagtttgcctaggactgag

SEQ ID NO: 4600388 - DNA, 25 bp, Homo sapien
ggaaccccttgaggtccagactgga

SEQ ID NO: 4600389 - DNA, 25 bp, Homo sapien
taggactgagggcttacctgggaca

SEQ ID NO: 4600390 - DNA, 25 bp, Homo sapien
tactaagatggccaatcaacccagt

SEQ ID NO: 4600391 - DNA, 25 bp, Homo sapien
gccggagaatttttccgatggatat

SEQ ID NO: 4600392 - DNA, 25 bp, Homo sapien
tcttgacctctctgtcacacagatg

SEQ ID NO: 4600393 - DNA, 25 bp, Homo sapien
gcattttgtagtcctgatcgtcatt

SEQ ID NO: 4600394 - DNA, 25 bp, Homo sapien
gtaattgactggattgcattttgta

SEQ ID NO: 4600395 - DNA, 25 bp, Homo sapien
cctcaactacaactaatagggaatt

SEQ ID NO: 4600396 - DNA, 25 bp, Homo sapien
gcttttgaaaccatccgctctaaat

SEQ ID NO: 4600397 - DNA, 25 bp, Homo sapien
ctaactctggttacattaatcacgt

SEQ ID NO: 4600398 - DNA, 25 bp, Homo sapien
ttccagagcctaaggattcacttgc

SEQ ID NO: 4600399 - DNA, 25 bp, Homo sapien
acgctggctggcttgtttcatgtcc

SEQ ID NO: 4600400 - DNA, 25 bp, Homo sapien
gcagcgacacatggacatttggtct

SEQ ID NO: 4600401 - DNA, 25 bp, Homo sapien
tgtgcactcctcacgctggctggct

SEQ ID NO: 4600402 - DNA, 25 bp, Homo sapien
gtttcatgtccacatggttacgcag

SEQ ID NO: 4600403 - DNA, 25 bp, Homo sapien
ccatttccatccatgtgcctctcca

SEQ ID NO: 4600404 - DNA, 25 bp, Homo sapien
catctccatttccatccatgtgcct

SEQ ID NO: 4600405 - DNA, 25 bp, Homo sapien
catttccatccatgtgcctctccat

SEQ ID NO: 4600406 - DNA, 25 bp, Homo sapien
tctccatctccatttccatccatgt

SEQ ID NO: 4600407 - DNA, 25 bp, Homo sapien
caaaaggagaatccaaaaggccatc

SEQ ID NO: 4600408 - DNA, 25 bp, Homo sapien
aaactgttcaacaaggtaaccatgg

SEQ ID NO: 4600409 - DNA, 25 bp, Homo sapien
caggtgacatctctgttggatgagc

SEQ ID NO: 4600410 - DNA, 25 bp, Homo sapien
taaccatggttaggtgcagaaaagg

SEQ ID NO: 4600411 - DNA, 25 bp, Homo sapien
tctaaaatgaaggacctctttggct

SEQ ID NO: 4600412 - DNA, 25 bp, Homo sapien
tgggaagaggttgtcgccaaacacc

SEQ ID NO: 4600413 - DNA, 25 bp, Homo sapien
tcaacttggtttgtgctgctttgtc

SEQ ID NO: 4600414 - DNA, 25 bp, Homo sapien
tgactcgctgaaacacccggaatgt

SEQ ID NO: 4600415 - DNA, 25 bp, Homo sapien
tatgacgacctgaagacattgcaag

SEQ ID NO: 4600416 - DNA, 25 bp, Homo sapien
agttatgtatcttgccctaggtcac

SEQ ID NO: 4600417 - DNA, 25 bp, Homo sapien
tacgtagtattgctgtgctaggcac

SEQ ID NO: 4600418 - DNA, 25 bp, Homo sapien
taggcacatgttagtatctcaacga

SEQ ID NO: 4600419 - DNA, 25 bp, Homo sapien
gacaaataggtacagggcaagctct

SEQ ID NO: 4600420 - DNA, 25 bp, Homo sapien
tgaagggcctgcacaaagtttagct

SEQ ID NO: 4600421 - DNA, 25 bp, Homo sapien
gaattcagatgccacgagtgcaggt

SEQ ID NO: 4600422 - DNA, 25 bp, Homo sapien
agctttagaggtagtgggcactccc

SEQ ID NO: 4600423 - DNA, 25 bp, Homo sapien
cactggtgtgcctcaaagtatggtc

SEQ ID NO: 4600424 - DNA, 25 bp, Homo sapien
aagacactggtgtgcctcaaagtat

SEQ ID NO: 4600425 - DNA, 25 bp, Homo sapien
cttcctgcatctgtacttccctaga

SEQ ID NO: 4600426 - DNA, 25 bp, Homo sapien
acttccctagaaggcaattgtctcc

SEQ ID NO: 4600427 - DNA, 25 bp, Homo sapien
ttgtttccaagtctcatggataggc

SEQ ID NO: 4600428 - DNA, 25 bp, Homo sapien
ccttaactgctctcatgtgagctgc

SEQ ID NO: 4600429 - DNA, 25 bp, Homo sapien
tcatggataggcagaagttcaaact

SEQ ID NO: 4600430 - DNA, 25 bp, Homo sapien
aactgctctcatgtgagctgccctg

SEQ ID NO: 4600431 - DNA, 25 bp, Homo sapien
caccaagaggcacgaaacccctcaa

SEQ ID NO: 4600432 - DNA, 25 bp, Homo sapien
caagaggcacgaaacccctcaagga

SEQ ID NO: 4600433 - DNA, 25 bp, Homo sapien
accaagaggcacgaaacccctcaag

SEQ ID NO: 4600434 - DNA, 25 bp, Homo sapien
tgcaccaagaggcacgaaacccctc

SEQ ID NO: 4600435 - DNA, 25 bp, Homo sapien
tactttctagattcaaggccagctt

SEQ ID NO: 4600436 - DNA, 25 bp, Homo sapien
gaaacacatgtgctgacttggctat

SEQ ID NO: 4600437 - DNA, 25 bp, Homo sapien
gaaaacttgccgacatagatgaagc

SEQ ID NO: 4600438 - DNA, 25 bp, Homo sapien
ggccagcttgaccatgtgagcagcc

SEQ ID NO: 4600439 - DNA, 25 bp, Homo sapien
taaagactgccgttgaaagagatgc

SEQ ID NO: 4600440 - DNA, 25 bp, Homo sapien
gtaaatggttgctaaacagcaggcc

SEQ ID NO: 4600441 - DNA, 25 bp, Homo sapien
ccttgtcatgcagtcagagttgtac

SEQ ID NO: 4600442 - DNA, 25 bp, Homo sapien
catgcataaagtacctcaacgggat

SEQ ID NO: 4600443 - DNA, 25 bp, Homo sapien
tttctacatccgttgctaagcttct

SEQ ID NO: 4600444 - DNA, 25 bp, Homo sapien
catccgttgctaagcttcttaagtt

SEQ ID NO: 4600445 - DNA, 25 bp, Homo sapien
aatatttctacatccgttgctaagc

SEQ ID NO: 4600446 - DNA, 25 bp, Homo sapien
gatgataatatttctacatccgttg

SEQ ID NO: 4600447 - DNA, 25 bp, Homo sapien
aatgcagaggttccactcactgcaa

SEQ ID NO: 4600448 - DNA, 25 bp, Homo sapien
gccaaggaacttcttaagtgattga

SEQ ID NO: 4600449 - DNA, 25 bp, Homo sapien
tataaaaagtctttcctggagcatc

SEQ ID NO: 4600450 - DNA, 25 bp, Homo sapien
tgagagttaaactgactggccttca

SEQ ID NO: 4600451 - DNA, 25 bp, Homo sapien
gccactttattcaccggctttaaga

SEQ ID NO: 4600452 - DNA, 25 bp, Homo sapien
gacagaacagtgcattcatacaagg

SEQ ID NO: 4600453 - DNA, 25 bp, Homo sapien
gagatctcaaggacaagacagaaca

SEQ ID NO: 4600454 - DNA, 25 bp, Homo sapien
cactgtcccacatgagaaatgagaa

SEQ ID NO: 4600455 - DNA, 25 bp, Homo sapien
ggcatattcaaagaccctggggtgg

SEQ ID NO: 4600456 - DNA, 25 bp, Homo sapien
caccaccactgccaccatcttcttc

SEQ ID NO: 4600457 - DNA, 25 bp, Homo sapien
accaccactgccaccatcttcttca

SEQ ID NO: 4600458 - DNA, 25 bp, Homo sapien
ccaccactgccaccatcttcttcat

SEQ ID NO: 4600459 - DNA, 25 bp, Homo sapien
accaccaccactgccaccatcttct

SEQ ID NO: 4600460 - DNA, 25 bp, Homo sapien
cattgccaatcccactgaaatttgt

SEQ ID NO: 4600461 - DNA, 25 bp, Homo sapien
tgttcacggttgtcttaaatgtggt

SEQ ID NO: 4600462 - DNA, 25 bp, Homo sapien
taaatgtggtttgatactcattgtg

SEQ ID NO: 4600463 - DNA, 25 bp, Homo sapien
tcccactgaaatttgttcacggttg

SEQ ID NO: 4600464 - DNA, 25 bp, Homo sapien
ataataatatccttccgccctgctg

SEQ ID NO: 4600465 - DNA, 25 bp, Homo sapien
tgccatttaggagcgagatagtttc

SEQ ID NO: 4600466 - DNA, 25 bp, Homo sapien
ctacagagtagctttgaacaaggca

SEQ ID NO: 4600467 - DNA, 25 bp, Homo sapien
taattataatcggtgcccatggtga

SEQ ID NO: 4600468 - DNA, 25 bp, Homo sapien
ggtcccattgattggaagagcagct

SEQ ID NO: 4600469 - DNA, 25 bp, Homo sapien
aatgagcaccacacattctgaaagg

SEQ ID NO: 4600470 - DNA, 25 bp, Homo sapien
tcaactggtttaacaagaatgagca

SEQ ID NO: 4600471 - DNA, 25 bp, Homo sapien
agctacacttgtgcgcagggccaaa

SEQ ID NO: 4600472 - DNA, 25 bp, Homo sapien
actgagagaccgagagttcacataa

SEQ ID NO: 4600473 - DNA, 25 bp, Homo sapien
gaaactgagagaccgagagttcaca

SEQ ID NO: 4600474 - DNA, 25 bp, Homo sapien
caactagaaactgagagaccgagag

SEQ ID NO: 4600475 - DNA, 25 bp, Homo sapien
ttaggcaactagaaactgagagacc

SEQ ID NO: 4600476 - DNA, 25 bp, Homo sapien
ctcaccgcaacctctcccccctggg

SEQ ID NO: 4600477 - DNA, 25 bp, Homo sapien
tcatccagccgggagtgtagtggca

SEQ ID NO: 4600478 - DNA, 25 bp, Homo sapien
gtagtggcatgatctcggctcaccg

SEQ ID NO: 4600479 - DNA, 25 bp, Homo sapien
ttcaagcaattctctgcctcagcct

SEQ ID NO: 4600480 - DNA, 25 bp, Homo sapien
tcctgacagtttagccatgggaggc

SEQ ID NO: 4600481 - DNA, 25 bp, Homo sapien
tatcacatagttgcacgccagcctg

SEQ ID NO: 4600482 - DNA, 25 bp, Homo sapien
taagaaatggactatgaaatctccc

SEQ ID NO: 4600483 - DNA, 25 bp, Homo sapien
caagacatgaattggtggcatggca

SEQ ID NO: 4600484 - DNA, 25 bp, Homo sapien
gagacacattgttgagttctggtaa

SEQ ID NO: 4600485 - DNA, 25 bp, Homo sapien
ggatttaaggattcattgaccacca

SEQ ID NO: 4600486 - DNA, 25 bp, Homo sapien
cattacaactaattggaagccttta

SEQ ID NO: 4600487 - DNA, 25 bp, Homo sapien
cactcctgcaatcaacaagttattc

SEQ ID NO: 4600488 - DNA, 25 bp, Homo sapien
tgctgacctcgttaagtttctcttc

SEQ ID NO: 4600489 - DNA, 25 bp, Homo sapien
cctggtaatttgcaaggtatttttg

SEQ ID NO: 4600490 - DNA, 25 bp, Homo sapien
tttgtttgtcaaatgtgctaaacat

SEQ ID NO: 4600491 - DNA, 25 bp, Homo sapien
tattcctcctggtaatttgcaaggt

SEQ ID NO: 4600492 - DNA, 25 bp, Homo sapien
ataaagtgtcataggtcaggttccc

SEQ ID NO: 4600493 - DNA, 25 bp, Homo sapien
aataactgagtagctgcgcgcagcc

SEQ ID NO: 4600494 - DNA, 25 bp, Homo sapien
catattgggacaagagaaccattcc

SEQ ID NO: 4600495 - DNA, 25 bp, Homo sapien
agaggcctcagctgatcttatggga

SEQ ID NO: 4600496 - DNA, 25 bp, Homo sapien
tcctggatctgtgctttaagtcacc

SEQ ID NO: 4600497 - DNA, 25 bp, Homo sapien
gcaaatgagtcgtctgtcctaacca

SEQ ID NO: 4600498 - DNA, 25 bp, Homo sapien
taagtcacctacgttttcactcatg

SEQ ID NO: 4600499 - DNA, 25 bp, Homo sapien
gcagacatcatgaacgtaggtccag

SEQ ID NO: 4600500 - DNA, 25 bp, Homo sapien
tcaggttcactatcccactggtggc

SEQ ID NO: 4600501 - DNA, 25 bp, Homo sapien
ccttggtacctcatggcttgaaggg

SEQ ID NO: 4600502 - DNA, 25 bp, Homo sapien
actggtggccttggtacctcatggc

SEQ ID NO: 4600503 - DNA, 25 bp, Homo sapien
ctcagcatccccattagcgtcaggt

SEQ ID NO: 4600504 - DNA, 25 bp, Homo sapien
aatgtgccttcttgaccagtggtag

SEQ ID NO: 4600505 - DNA, 25 bp, Homo sapien
taaccttagataggactagtgacat

SEQ ID NO: 4600506 - DNA, 25 bp, Homo sapien
ccagtggtaggttcttattcaagca

SEQ ID NO: 4600507 - DNA, 25 bp, Homo sapien
gaaacatggttggaacttagccagc

SEQ ID NO: 4600508 - DNA, 25 bp, Homo sapien
taataccaatacatgaagagctggg

SEQ ID NO: 4600509 - DNA, 25 bp, Homo sapien
gttgccatcccacttaaagacaagg

SEQ ID NO: 4600510 - DNA, 25 bp, Homo sapien
gagggtagacatcttgttgccatcc

SEQ ID NO: 4600511 - DNA, 25 bp, Homo sapien
cagtggaaccgaaaacctcctctct

SEQ ID NO: 4600512 - DNA, 25 bp, Homo sapien
gaccgaggttgtcttgcctccagaa

SEQ ID NO: 4600513 - DNA, 25 bp, Homo sapien
tcgttaacacatataagcagggctg

SEQ ID NO: 4600514 - DNA, 25 bp, Homo sapien
aatcctagaacctcctttgatgttg

SEQ ID NO: 4600515 - DNA, 25 bp, Homo sapien
aatggtcctatcactcttcgttaac

SEQ ID NO: 4600516 - DNA, 25 bp, Homo sapien
aaaactctgttgctactggtggaag

SEQ ID NO: 4600517 - DNA, 25 bp, Homo sapien
gaagctgaataagagcccgggccat

SEQ ID NO: 4600518 - DNA, 25 bp, Homo sapien
tttggcagggaagagcctagaaccc

SEQ ID NO: 4600519 - DNA, 25 bp, Homo sapien
tttgcaggaccttaaggaagacacg

SEQ ID NO: 4600520 - DNA, 25 bp, Homo sapien
aaaagatgaacaggcttcgtttgtt

SEQ ID NO: 4600521 - DNA, 25 bp, Homo sapien
agatgaacaggcttcgtttgttgac

SEQ ID NO: 4600522 - DNA, 25 bp, Homo sapien
aagatgaacaggcttcgtttgttga

SEQ ID NO: 4600523 - DNA, 25 bp, Homo sapien
ttaaaagatgaacaggcttcgtttg

SEQ ID NO: 4600524 - DNA, 25 bp, Homo sapien
tctgaatgtctggtcacctcaatgg

SEQ ID NO: 4600525 - DNA, 25 bp, Homo sapien
gccccgtttctgaacatctggctat

SEQ ID NO: 4600526 - DNA, 25 bp, Homo sapien
ttctgaatgtctggtcacctcaatg

SEQ ID NO: 4600527 - DNA, 25 bp, Homo sapien
ggctatgcccccatgattagcctgc

SEQ ID NO: 4600528 - DNA, 25 bp, Homo sapien
aaatagccagtacggggacaaagat

SEQ ID NO: 4600529 - DNA, 25 bp, Homo sapien
ggacaaagatggctaccacagctat

SEQ ID NO: 4600530 - DNA, 25 bp, Homo sapien
agctatggccatctggagccccgtg

SEQ ID NO: 4600531 - DNA, 25 bp, Homo sapien
ttcagaaatagccagtacggggaca

SEQ ID NO: 4600532 - DNA, 25 bp, Homo sapien
gatttaaatctactgcatggctgac

SEQ ID NO: 4600533 - DNA, 25 bp, Homo sapien
gaaagctgagcaagcccctttagga

SEQ ID NO: 4600534 - DNA, 25 bp, Homo sapien
ttctgaggatatgctgaccttgggc

SEQ ID NO: 4600535 - DNA, 25 bp, Homo sapien
aaggaagtctcaacccaactgcaag

SEQ ID NO: 4600536 - DNA, 25 bp, Homo sapien
gggtcctggacctgaaaatctgcag

SEQ ID NO: 4600537 - DNA, 25 bp, Homo sapien
gaagatgtcattagaaccagtggga

SEQ ID NO: 4600538 - DNA, 25 bp, Homo sapien
ggagagacccttggactttattaga

SEQ ID NO: 4600539 - DNA, 25 bp, Homo sapien
aactcattaatgactgaagatgtca

SEQ ID NO: 4600540 - DNA, 25 bp, Homo sapien
tgaaggcacttaaattgcaacaacc

SEQ ID NO: 4600541 - DNA, 25 bp, Homo sapien
caaaaacgtcagagtaaagctactg

SEQ ID NO: 4600542 - DNA, 25 bp, Homo sapien
cagtttcagtagattcctcttcggg

SEQ ID NO: 4600543 - DNA, 25 bp, Homo sapien
gggttcagcctcaggcatgtcagaa

SEQ ID NO: 4600544 - DNA, 25 bp, Homo sapien
tatgcttaaatcacctaattacatc

SEQ ID NO: 4600545 - DNA, 25 bp, Homo sapien
ttaatgccagtaaactatgaccaag

SEQ ID NO: 4600546 - DNA, 25 bp, Homo sapien
cattacatgttatggtaaacagaat

SEQ ID NO: 4600547 - DNA, 25 bp, Homo sapien
atttgcctggtggagaattatattc

SEQ ID NO: 4600548 - DNA, 25 bp, Homo sapien
tctgaacatgatgccaaacacccag

SEQ ID NO: 4600549 - DNA, 25 bp, Homo sapien
atgatgccaaacacccagatgaaac

SEQ ID NO: 4600550 - DNA, 25 bp, Homo sapien
tttcacatttctgaacatgatgcca

SEQ ID NO: 4600551 - DNA, 25 bp, Homo sapien
cacatttctgaacatgatgccaaac

SEQ ID NO: 4600552 - DNA, 25 bp, Homo sapien
ttgtggaagaccaactcgctctcgg

SEQ ID NO: 4600553 - DNA, 25 bp, Homo sapien
tagtgacaaagtgcaagtgccagca

SEQ ID NO: 4600554 - DNA, 25 bp, Homo sapien
gatgctgatattcaagaggcctcca

SEQ ID NO: 4600555 - DNA, 25 bp, Homo sapien
tattattggattgcacccttgcgcc

SEQ ID NO: 4600556 - DNA, 25 bp, Homo sapien
tactgcttcaattctacattccaat

SEQ ID NO: 4600557 - DNA, 25 bp, Homo sapien
gcttcaattctacattccaattgcc

SEQ ID NO: 4600558 - DNA, 25 bp, Homo sapien
ttcaattctacattccaattgcccc

SEQ ID NO: 4600559 - DNA, 25 bp, Homo sapien
aattctacattccaattgcccccgt

SEQ ID NO: 4600560 - DNA, 25 bp, Homo sapien
tctttaatatggatccaatttgagt

SEQ ID NO: 4600561 - DNA, 25 bp, Homo sapien
tttaatatggatccaatttgagttt

SEQ ID NO: 4600562 - DNA, 25 bp, Homo sapien
tgtttcacctctcaaacccttccta

SEQ ID NO: 4600563 - DNA, 25 bp, Homo sapien
ggtttgtgttgtctaaacaaatcca

SEQ ID NO: 4600564 - DNA, 25 bp, Homo sapien
tgaagccagtgaagacaggatttgg

SEQ ID NO: 4600565 - DNA, 25 bp, Homo sapien
ctccttcatcccagttttgaagcca

SEQ ID NO: 4600566 - DNA, 25 bp, Homo sapien
ctttgctttgctctccactaaggag

SEQ ID NO: 4600567 - DNA, 25 bp, Homo sapien
tgaagccagtgaagacaggattctt

SEQ ID NO: 4600568 - DNA, 25 bp, Homo sapien
ttcagcatagaaggtcttgcaatag

SEQ ID NO: 4600569 - DNA, 25 bp, Homo sapien
catataaacaagtgcttcagcatag

SEQ ID NO: 4600570 - DNA, 25 bp, Homo sapien
gcatagaaggtcttgcaatagaagc

SEQ ID NO: 4600571 - DNA, 25 bp, Homo sapien
agtgaagccttcatataaacaagtg

SEQ ID NO: 4600572 - DNA, 25 bp, Homo sapien
aggttatagataaaagtatcaggaa

SEQ ID NO: 4600573 - DNA, 25 bp, Homo sapien
gccagcatgcttggaccactaggac

SEQ ID NO: 4600574 - DNA, 25 bp, Homo sapien
aggtccaggagtaggaaacagcttg

SEQ ID NO: 4600575 - DNA, 25 bp, Homo sapien
ggccagcatgcttggaccactagga

SEQ ID NO: 4600576 - DNA, 25 bp, Homo sapien
tccacacgatcttttgtgtggcaag

SEQ ID NO: 4600577 - DNA, 25 bp, Homo sapien
ctctcgttccatcgaacagagaaat

SEQ ID NO: 4600578 - DNA, 25 bp, Homo sapien
ccacacgatcttttgtgtggcaagg

SEQ ID NO: 4600579 - DNA, 25 bp, Homo sapien
ttccatcgaacagagaaatttcttc

SEQ ID NO: 4600580 - DNA, 25 bp, Homo sapien
gggattttgcgtgcacactgcttgg

SEQ ID NO: 4600581 - DNA, 25 bp, Homo sapien
cactgcttggtatgcaatatggctg

SEQ ID NO: 4600582 - DNA, 25 bp, Homo sapien
ggtgaactcaagtacccaatactgt

SEQ ID NO: 4600583 - DNA, 25 bp, Homo sapien
tgcaaatgcatacgggtggatgtcg

SEQ ID NO: 4600584 - DNA, 25 bp, Homo sapien
tgcaggtctcccctctagcagatct

SEQ ID NO: 4600585 - DNA, 25 bp, Homo sapien
cctgcaggtctcccctctagcagat

SEQ ID NO: 4600586 - DNA, 25 bp, Homo sapien
ctgcaggtctcccctctagcagatc

SEQ ID NO: 4600587 - DNA, 25 bp, Homo sapien
gcaggtctcccctctagcagatctt

SEQ ID NO: 4600588 - DNA, 25 bp, Homo sapien
gttagcagctgaaccgcaaacccca

SEQ ID NO: 4600589 - DNA, 25 bp, Homo sapien
aaaggttagcagctgaaccgcaaac

SEQ ID NO: 4600590 - DNA, 25 bp, Homo sapien
caaagaaaggttagcagctgaaccg

SEQ ID NO: 4600591 - DNA, 25 bp, Homo sapien
aagaaaggttagcagctgaaccgca

SEQ ID NO: 4600592 - DNA, 25 bp, Homo sapien
tgtatctggtggagatgccgggcat

SEQ ID NO: 4600593 - DNA, 25 bp, Homo sapien
gctgtatctggtggagatgccgggc

SEQ ID NO: 4600594 - DNA, 25 bp, Homo sapien
tcatgaagatctcaaagctgtatct

SEQ ID NO: 4600595 - DNA, 25 bp, Homo sapien
ctcaaagctgtatctggtggagatg

SEQ ID NO: 4600596 - DNA, 25 bp, Homo sapien
gtggcaccagggcccactgtcccat

SEQ ID NO: 4600597 - DNA, 25 bp, Homo sapien
ggcaccagggcccactgtcccatga

SEQ ID NO: 4600598 - DNA, 25 bp, Homo sapien
caccagggcccactgtcccatgaca

SEQ ID NO: 4600599 - DNA, 25 bp, Homo sapien
tgtggcaccagggcccactgtccca

SEQ ID NO: 4600600 - DNA, 25 bp, Homo sapien
gagacggcaacattgtctcttgatc

SEQ ID NO: 4600601 - DNA, 25 bp, Homo sapien
tcatccaatagcagataagagacgg

SEQ ID NO: 4600602 - DNA, 25 bp, Homo sapien
taaatttcatccaatagcagataag

SEQ ID NO: 4600603 - DNA, 25 bp, Homo sapien
gcagataagagacggcaacattgtc

SEQ ID NO: 4600604 - DNA, 25 bp, Homo sapien
tgttctgtactgacttgattcctcc

SEQ ID NO: 4600605 - DNA, 25 bp, Homo sapien
tctctctatctataaaaggcctctg

SEQ ID NO: 4600606 - DNA, 25 bp, Homo sapien
gaatgatctttgagtcttctgtgta

SEQ ID NO: 4600607 - DNA, 25 bp, Homo sapien
agcgatgatcttggctataacatta

SEQ ID NO: 4600608 - DNA, 25 bp, Homo sapien
ctcatctggaaagcgctgttatttt

SEQ ID NO: 4600609 - DNA, 25 bp, Homo sapien
ttcgtgtagctgttccacccctctg

SEQ ID NO: 4600610 - DNA, 25 bp, Homo sapien
ttttggccaccttcggatcttcgtg

SEQ ID NO: 4600611 - DNA, 25 bp, Homo sapien
tccagggggtctgtagacagcagct

SEQ ID NO: 4600612 - DNA, 25 bp, Homo sapien
caagccgggtggtcagaagaatctc

SEQ ID NO: 4600613 - DNA, 25 bp, Homo sapien
cattgtttcggagctggagttcacc

SEQ ID NO: 4600614 - DNA, 25 bp, Homo sapien
ggaatgcatgaaccctgtggcctgg

SEQ ID NO: 4600615 - DNA, 25 bp, Homo sapien
caaacacgttgcgaaaaggaccgcg

SEQ ID NO: 4600616 - DNA, 25 bp, Homo sapien
tcttggtgatgtatgccatgcattt

SEQ ID NO: 4600617 - DNA, 25 bp, Homo sapien
tacttgcttactttaccgacctcag

SEQ ID NO: 4600618 - DNA, 25 bp, Homo sapien
aaggtagttgttagccatgcaacca

SEQ ID NO: 4600619 - DNA, 25 bp, Homo sapien
tacatagtcaattacactgccaggc

SEQ ID NO: 4600620 - DNA, 25 bp, Homo sapien
gtgtcgtacttcatctttcaaaaag

SEQ ID NO: 4600621 - DNA, 25 bp, Homo sapien
gatttccattcgacatcagccagtt

SEQ ID NO: 4600622 - DNA, 25 bp, Homo sapien
tgtgtacatgtaagcttttgcgttt

SEQ ID NO: 4600623 - DNA, 25 bp, Homo sapien
agcttttgcgtttctatatctagga

SEQ ID NO: 4600624 - DNA, 25 bp, Homo sapien
cacagaagggaaccgtggtttcctg

SEQ ID NO: 4600625 - DNA, 25 bp, Homo sapien
cacgaaggccagagattcaactgcc

SEQ ID NO: 4600626 - DNA, 25 bp, Homo sapien
gtagttttccggctgagggactcac

SEQ ID NO: 4600627 - DNA, 25 bp, Homo sapien
catacaggacgattcccagaggaac

SEQ ID NO: 4600628 - DNA, 25 bp, Homo sapien
gcagagtgacacagcccgcatctga

SEQ ID NO: 4600629 - DNA, 25 bp, Homo sapien
aaggtaggataaggcagagtgacac

SEQ ID NO: 4600630 - DNA, 25 bp, Homo sapien
ttcttgtaaggtaggataaggcaga

SEQ ID NO: 4600631 - DNA, 25 bp, Homo sapien
cagcccgcatctgaccacaagtcat

SEQ ID NO: 4600632 - DNA, 25 bp, Homo sapien
ggtgtaacccaaggtggcttatcac

SEQ ID NO: 4600633 - DNA, 25 bp, Homo sapien
acccaaggtggcttatcacctgagc

SEQ ID NO: 4600634 - DNA, 25 bp, Homo sapien
gtaacccaaggtggcttatcacctg

SEQ ID NO: 4600635 - DNA, 25 bp, Homo sapien
gaggtgtaacccaaggtggcttatc

SEQ ID NO: 4600636 - DNA, 25 bp, Homo sapien
tgtctggctggccccctctttcttt

SEQ ID NO: 4600637 - DNA, 25 bp, Homo sapien
tctggctggccccctctttctttta

SEQ ID NO: 4600638 - DNA, 25 bp, Homo sapien
cattagggttatttagtgcttagat

SEQ ID NO: 4600639 - DNA, 25 bp, Homo sapien
gattcactcgaagcctagcacttag

SEQ ID NO: 4600640 - DNA, 25 bp, Homo sapien
gaaatgtgcacactacagattcact

SEQ ID NO: 4600641 - DNA, 25 bp, Homo sapien
tagattcggctcaattcccactgga

SEQ ID NO: 4600642 - DNA, 25 bp, Homo sapien
tgctttacagggttgaccattctca

SEQ ID NO: 4600643 - DNA, 25 bp, Homo sapien
tgactttcttaattagaagctactt

SEQ ID NO: 4600644 - DNA, 25 bp, Homo sapien
gatattgtaaagcatcggaaccttt

SEQ ID NO: 4600645 - DNA, 25 bp, Homo sapien
cattctcataaggtcattgactttc

SEQ ID NO: 4600646 - DNA, 25 bp, Homo sapien
ttgacaattctcctccaaactcttt

SEQ ID NO: 4600647 - DNA, 25 bp, Homo sapien
ctttgacaattctcctccaaactct

SEQ ID NO: 4600648 - DNA, 25 bp, Homo sapien
tttgacaattctcctccaaactctt

SEQ ID NO: 4600649 - DNA, 25 bp, Homo sapien
cttgggacccagagtttaggcacct

SEQ ID NO: 4600650 - DNA, 25 bp, Homo sapien
ggtaggcctagaacccacagtgctg

SEQ ID NO: 4600651 - DNA, 25 bp, Homo sapien
ggcacctatgcgatggaactacaat

SEQ ID NO: 4600652 - DNA, 25 bp, Homo sapien
caatgattggcagtgtgcccggcaa

SEQ ID NO: 4600653 - DNA, 25 bp, Homo sapien
tgagtttgtgagtctatgccttcac

SEQ ID NO: 4600654 - DNA, 25 bp, Homo sapien
cttcttgagtttgtgagtctatgcc

SEQ ID NO: 4600655 - DNA, 25 bp, Homo sapien
cttgagtttgtgagtctatgccttc

SEQ ID NO: 4600656 - DNA, 25 bp, Homo sapien
agtgaacccggaccgccagtcttct

SEQ ID NO: 4600657 - DNA, 25 bp, Homo sapien
ttttttatctgttctcagaaagtct

SEQ ID NO: 4600658 - DNA, 25 bp, Homo sapien
ttcttttttatctgttctcagaaag

SEQ ID NO: 4600659 - DNA, 25 bp, Homo sapien
cagaaagtctgcagcttccaacacc

SEQ ID NO: 4600660 - DNA, 25 bp, Homo sapien
gaaagtctgcagcttccaacaccat

SEQ ID NO: 4600661 - DNA, 25 bp, Homo sapien
gtgtgtcccaagaatacttaatgta

SEQ ID NO: 4600662 - DNA, 25 bp, Homo sapien
ctcctgtgagtgacagaccagtgtg

SEQ ID NO: 4600663 - DNA, 25 bp, Homo sapien
gcctgtgggtcagtaaggttattaa

SEQ ID NO: 4600664 - DNA, 25 bp, Homo sapien
tattaataaacatcgcctcttgttc

SEQ ID NO: 4600665 - DNA, 25 bp, Homo sapien
tacacccctttaggatggttgctgt

SEQ ID NO: 4600666 - DNA, 25 bp, Homo sapien
taatggatagggcagtctgtgtaca

SEQ ID NO: 4600667 - DNA, 25 bp, Homo sapien
taatagcatatctggcttgggagat

SEQ ID NO: 4600668 - DNA, 25 bp, Homo sapien
cttggcccgctgagtgtaatagcat

SEQ ID NO: 4600669 - DNA, 25 bp, Homo sapien
cgtgaacggtgtctaaaacatttat

SEQ ID NO: 4600670 - DNA, 25 bp, Homo sapien
tcacatcgtgaacggtgtctaaaac

SEQ ID NO: 4600671 - DNA, 25 bp, Homo sapien
caagacctaccctgatggcaaaact

SEQ ID NO: 4600672 - DNA, 25 bp, Homo sapien
gaaactttcacatcgtgaacggtgt

SEQ ID NO: 4600673 - DNA, 25 bp, Homo sapien
ccctgatggtcatgtaacttctgag

SEQ ID NO: 4600674 - DNA, 25 bp, Homo sapien
gatttgactccaggatatggaggct

SEQ ID NO: 4600675 - DNA, 25 bp, Homo sapien
catggcgcagtggacagacactgtc

SEQ ID NO: 4600676 - DNA, 25 bp, Homo sapien
tgttttgggacacttcttaagagac

SEQ ID NO: 4600677 - DNA, 25 bp, Homo sapien
agggaagcaaatctcttgagtctat

SEQ ID NO: 4600678 - DNA, 25 bp, Homo sapien
actcagggaagcaaatctcttgagt

SEQ ID NO: 4600679 - DNA, 25 bp, Homo sapien
cagggaagcaaatctcttgagtcta

SEQ ID NO: 4600680 - DNA, 25 bp, Homo sapien
tcagggaagcaaatctcttgagtct

SEQ ID NO: 4600681 - DNA, 25 bp, Homo sapien
tgggaagttggaccaatgccctcca

SEQ ID NO: 4600682 - DNA, 25 bp, Homo sapien
gtgggaagttggaccaatgccctcc

SEQ ID NO: 4600683 - DNA, 25 bp, Homo sapien
caagcataggattccatgacttctt

SEQ ID NO: 4600684 - DNA, 25 bp, Homo sapien
tcctgaaattcgctccatctgcatc

SEQ ID NO: 4600685 - DNA, 25 bp, Homo sapien
cctggtaataacttcactgtctacc

SEQ ID NO: 4600686 - DNA, 25 bp, Homo sapien
tctcctggtaataacttcactgtct

SEQ ID NO: 4600687 - DNA, 25 bp, Homo sapien
tcctggtaataacttcactgtctac

SEQ ID NO: 4600688 - DNA, 25 bp, Homo sapien
gttctcctggtaataacttcactgt

SEQ ID NO: 4600689 - DNA, 25 bp, Homo sapien
tcagtcttttcatcggcactaaggc

SEQ ID NO: 4600690 - DNA, 25 bp, Homo sapien
agtcttttcatcggcactaaggctc

SEQ ID NO: 4600691 - DNA, 25 bp, Homo sapien
cagtcttttcatcggcactaaggct

SEQ ID NO: 4600692 - DNA, 25 bp, Homo sapien
attcagtcttttcatcggcactaag

SEQ ID NO: 4600693 - DNA, 25 bp, Homo sapien
gcagactcggtcacctcttgaagat

SEQ ID NO: 4600694 - DNA, 25 bp, Homo sapien
gaagcagggctatgtctgattccag

SEQ ID NO: 4600695 - DNA, 25 bp, Homo sapien
ttcaagccaaccactatgtgtttac

SEQ ID NO: 4600696 - DNA, 25 bp, Homo sapien
agatgtcggtcagatttcagaagca

SEQ ID NO: 4600697 - DNA, 25 bp, Homo sapien
aatatgccgcatacgatttgtgatg

SEQ ID NO: 4600698 - DNA, 25 bp, Homo sapien
atgaggtcagcaccatacgaggggt

SEQ ID NO: 4600699 - DNA, 25 bp, Homo sapien
cgcatacgatttgtgatggtcatct

SEQ ID NO: 4600700 - DNA, 25 bp, Homo sapien
gggccttttaaatatgccgcatacg

SEQ ID NO: 4600701 - DNA, 25 bp, Homo sapien
gaaatactgccaacctttgcaattg

SEQ ID NO: 4600702 - DNA, 25 bp, Homo sapien
cattcatcggtaattcatcttgtgc

SEQ ID NO: 4600703 - DNA, 25 bp, Homo sapien
tctaaacactctggcaacactggcg

SEQ ID NO: 4600704 - DNA, 25 bp, Homo sapien
tcccaacagtgacaagccctattaa

SEQ ID NO: 4600705 - DNA, 25 bp, Homo sapien
catgtgtaacgtcatttcccaggga

SEQ ID NO: 4600706 - DNA, 25 bp, Homo sapien
tttgcatccattggaggacctcctg

SEQ ID NO: 4600707 - DNA, 25 bp, Homo sapien
tgttcgaataaagcccacctgtgca

SEQ ID NO: 4600708 - DNA, 25 bp, Homo sapien
cctgtgcatcgagaaggctgaggaa

SEQ ID NO: 4600709 - DNA, 25 bp, Homo sapien
tgacatggtaatccatcatcagaga

SEQ ID NO: 4600710 - DNA, 25 bp, Homo sapien
ctgaaagcaatctagaatctgccct

SEQ ID NO: 4600711 - DNA, 25 bp, Homo sapien
gcaatctagaatctgccctgctctt

SEQ ID NO: 4600712 - DNA, 25 bp, Homo sapien
ctgtttaaattgacatggtaatcca

SEQ ID NO: 4600713 - DNA, 25 bp, Homo sapien
tacacagaaataggcttccccaatt

SEQ ID NO: 4600714 - DNA, 25 bp, Homo sapien
cacagccatgtcagttgcaatttta

SEQ ID NO: 4600715 - DNA, 25 bp, Homo sapien
tctcaatccatttacctcagtcaag

SEQ ID NO: 4600716 - DNA, 25 bp, Homo sapien
cataagtctttatcactcagaggag

SEQ ID NO: 4600717 - DNA, 25 bp, Homo sapien
tgagttcccgcctaggagaggacgc

SEQ ID NO: 4600718 - DNA, 25 bp, Homo sapien
cgaaagcgcgcctggaaaattggct

SEQ ID NO: 4600719 - DNA, 25 bp, Homo sapien
tagtgcgctgacatccttagctggg

SEQ ID NO: 4600720 - DNA, 25 bp, Homo sapien
tcacagaggaaaatcgttcgagccc

SEQ ID NO: 4600721 - DNA, 25 bp, Homo sapien
atctgctggatgacgagccgctctc

SEQ ID NO: 4600722 - DNA, 25 bp, Homo sapien
tctgctggatgacgagccgctctcc

SEQ ID NO: 4600723 - DNA, 25 bp, Homo sapien
tactttcctcgcagaaaaactcctc

SEQ ID NO: 4600724 - DNA, 25 bp, Homo sapien
gggtggaagcgttactttcctcgca

SEQ ID NO: 4600725 - DNA, 25 bp, Homo sapien
ctcgacgtccatcgggccggatggc

SEQ ID NO: 4600726 - DNA, 25 bp, Homo sapien
tactctggagactgatcctcgacgt

SEQ ID NO: 4600727 - DNA, 25 bp, Homo sapien
taagatcagaaaaagcgcttagctt

SEQ ID NO: 4600728 - DNA, 25 bp, Homo sapien
tccccgggcgcagacgatttcatta

SEQ ID NO: 4600729 - DNA, 25 bp, Homo sapien
gctgcggccgtgacaccgtctgtgt

SEQ ID NO: 4600730 - DNA, 25 bp, Homo sapien
gaattgttaggtggaggcctcctgc

SEQ ID NO: 4600731 - DNA, 25 bp, Homo sapien
gcaatgtcgcccacctgttagcgag

SEQ ID NO: 4600732 - DNA, 25 bp, Homo sapien
gcttcgggcctgaaagtctccggca

SEQ ID NO: 4600733 - DNA, 25 bp, Homo sapien
taagatgtgaggaatcccgaccctc

SEQ ID NO: 4600734 - DNA, 25 bp, Homo sapien
gctacgttgcccgagtaagatgtga

SEQ ID NO: 4600735 - DNA, 25 bp, Homo sapien
cctgcccagtgcttattgtatttag

SEQ ID NO: 4600736 - DNA, 25 bp, Homo sapien
aaaccctgcccagtgcttattgtat

SEQ ID NO: 4600737 - DNA, 25 bp, Homo sapien
tattgtatttagcaccaatacaggc

SEQ ID NO: 4600738 - DNA, 25 bp, Homo sapien
tttagcaccaatacaggcagaaaat

SEQ ID NO: 4600739 - DNA, 25 bp, Homo sapien
ccattgaagggcgttgatccgaaaa

SEQ ID NO: 4600740 - DNA, 25 bp, Homo sapien
gatttgaagcgaccctctctgtccc

SEQ ID NO: 4600741 - DNA, 25 bp, Homo sapien
agtaaaatcgatttgaagcgaccct

SEQ ID NO: 4600742 - DNA, 25 bp, Homo sapien
gttgatccgaaaagacagaaaggac

SEQ ID NO: 4600743 - DNA, 25 bp, Homo sapien
caaagtgccaagctgcaaggctgac

SEQ ID NO: 4600744 - DNA, 25 bp, Homo sapien
tctaagacaaagaccagcgccttgg

SEQ ID NO: 4600745 - DNA, 25 bp, Homo sapien
ttgacctcctagatccgagtggctg

SEQ ID NO: 4600746 - DNA, 25 bp, Homo sapien
cagccgtttagggttagtgcagccc

SEQ ID NO: 4600747 - DNA, 25 bp, Homo sapien
aactattcctcgaccttcggctggg

SEQ ID NO: 4600748 - DNA, 25 bp, Homo sapien
tctttgatccaggacgagggaagcc

SEQ ID NO: 4600749 - DNA, 25 bp, Homo sapien
gcttagataaacaccgaggaggaga

SEQ ID NO: 4600750 - DNA, 25 bp, Homo sapien
taactgatgagacaaaccgcaagga

SEQ ID NO: 4600751 - DNA, 25 bp, Homo sapien
cgaagcgttaagactgcggagcctc

SEQ ID NO: 4600752 - DNA, 25 bp, Homo sapien
tataaagcgtggttttgcaagcagc

SEQ ID NO: 4600753 - DNA, 25 bp, Homo sapien
gcaagcagcagatgactcggttttc

SEQ ID NO: 4600754 - DNA, 25 bp, Homo sapien
gctaggctcgcactaagtatcagaa

SEQ ID NO: 4600755 - DNA, 25 bp, Homo sapien
gagaaaagcctagcccggcgccctc

SEQ ID NO: 4600756 - DNA, 25 bp, Homo sapien
tcgggtaggcgagcgctcggttaag

SEQ ID NO: 4600757 - DNA, 25 bp, Homo sapien
tcggccacggttcgggtaggcgagc

SEQ ID NO: 4600758 - DNA, 25 bp, Homo sapien
tttgcaaccttgtgcaactgacagc

SEQ ID NO: 4600759 - DNA, 25 bp, Homo sapien
gaatcgcgacgagaagggtactcac

SEQ ID NO: 4600760 - DNA, 25 bp, Homo sapien
ggagaatcgcgacgagaagggtact

SEQ ID NO: 4600761 - DNA, 25 bp, Homo sapien
gaggagaatcgcgacgagaagggta

SEQ ID NO: 4600762 - DNA, 25 bp, Homo sapien
ctaggaggagaatcgcgacgagaag

SEQ ID NO: 4600763 - DNA, 25 bp, Homo sapien
caggcaaacgtttacctttttgctg

SEQ ID NO: 4600764 - DNA, 25 bp, Homo sapien
cgtttacctttttgctgtctattgc

SEQ ID NO: 4600765 - DNA, 25 bp, Homo sapien
agctggcgtgcggatttcaggcaaa

SEQ ID NO: 4600766 - DNA, 25 bp, Homo sapien
tgtctattgcaaccgcgccgggctg

SEQ ID NO: 4600767 - DNA, 25 bp, Homo sapien
ctgtccagaacattcaaggagcggt

SEQ ID NO: 4600768 - DNA, 25 bp, Homo sapien
agaacattcaaggagcggttcctca

SEQ ID NO: 4600769 - DNA, 25 bp, Homo sapien
tccagaacattcaaggagcggttcc

SEQ ID NO: 4600770 - DNA, 25 bp, Homo sapien
tgtccagaacattcaaggagcggtt

SEQ ID NO: 4600771 - DNA, 25 bp, Homo sapien
gtgagggggacgcacataaacccag

SEQ ID NO: 4600772 - DNA, 25 bp, Homo sapien
aaaagccagcgagagagacgacaga

SEQ ID NO: 4600773 - DNA, 25 bp, Homo sapien
gggacgcacataaacccagttcaaa

SEQ ID NO: 4600774 - DNA, 25 bp, Homo sapien
taaaaagccagcgagagagacgaca

SEQ ID NO: 4600775 - DNA, 25 bp, Homo sapien
tatgcctacgtgagtccaaagtcgt

SEQ ID NO: 4600776 - DNA, 25 bp, Homo sapien
gagatccgagtacggtccaaccaag

SEQ ID NO: 4600777 - DNA, 25 bp, Homo sapien
gaattttaggcagcgaggactctta

SEQ ID NO: 4600778 - DNA, 25 bp, Homo sapien
ccagtgactcgggaaacgcagaggt

SEQ ID NO: 4600779 - DNA, 25 bp, Homo sapien
ctagaagcatagtcggtgaagtctt

SEQ ID NO: 4600780 - DNA, 25 bp, Homo sapien
tgtgcgcttacatgtgtgtacagag

SEQ ID NO: 4600781 - DNA, 25 bp, Homo sapien
tgcatctgatacatgtgcgcttaca

SEQ ID NO: 4600782 - DNA, 25 bp, Homo sapien
gtctgtgtacattgacaaatgtgca

SEQ ID NO: 4600783 - DNA, 25 bp, Homo sapien
gaagggtttgccatcacccggatct

SEQ ID NO: 4600784 - DNA, 25 bp, Homo sapien
tacaagctcagttcgtggcaccttc

SEQ ID NO: 4600785 - DNA, 25 bp, Homo sapien
cgtttggaaaatgcctacaagctca

SEQ ID NO: 4600786 - DNA, 25 bp, Homo sapien
tatatgtcaccaaaccgaacaagtg

SEQ ID NO: 4600787 - DNA, 25 bp, Homo sapien
ttataaggcgcgccgtcgccatggc

SEQ ID NO: 4600788 - DNA, 25 bp, Homo sapien
ccgcagtccggccaatgacggcgag

SEQ ID NO: 4600789 - DNA, 25 bp, Homo sapien
ctcgcgctaggaccgggctgcgccc

SEQ ID NO: 4600790 - DNA, 25 bp, Homo sapien
gggccgccgcagtccggccaatgac

SEQ ID NO: 4600791 - DNA, 25 bp, Homo sapien
tgcagcagtcgtgtcaaagttcact

SEQ ID NO: 4600792 - DNA, 25 bp, Homo sapien
agccccggcgcctataaatcgcatt

SEQ ID NO: 4600793 - DNA, 25 bp, Homo sapien
gctgatcgcggagaagccacttctg

SEQ ID NO: 4600794 - DNA, 25 bp, Homo sapien
ctttctccgggtgccgtactgcctt

SEQ ID NO: 4600795 - DNA, 25 bp, Homo sapien
aagaaagatgccctcagaatgctac

SEQ ID NO: 4600796 - DNA, 25 bp, Homo sapien
ggccaattctgggtcctcggcggac

SEQ ID NO: 4600797 - DNA, 25 bp, Homo sapien
tggtcattaactgtggagtgtctcc

SEQ ID NO: 4600798 - DNA, 25 bp, Homo sapien
ggtggaccctcgtgccttttgcaaa

SEQ ID NO: 4600799 - DNA, 25 bp, Homo sapien
tttatggaccacatacggatcttcc

SEQ ID NO: 4600800 - DNA, 25 bp, Homo sapien
cgccgaccgggtggtcgcctttatg

SEQ ID NO: 4600801 - DNA, 25 bp, Homo sapien
ggtcgcctttatggaccacatacgg

SEQ ID NO: 4600802 - DNA, 25 bp, Homo sapien
cacatacggatcttccaagagcaag

SEQ ID NO: 4600803 - DNA, 25 bp, Homo sapien
gcctgtgtggagaatgcaaatcgcc

SEQ ID NO: 4600804 - DNA, 25 bp, Homo sapien
ccgagggaaggagtcctgtgcaaac

SEQ ID NO: 4600805 - DNA, 25 bp, Homo sapien
cacagttccgaggatgccgagggaa

SEQ ID NO: 4600806 - DNA, 25 bp, Homo sapien
tatgcatatgttaaccccagtcttg

SEQ ID NO: 4600807 - DNA, 25 bp, Homo sapien
caactcaaagatgatggaaacgcac

SEQ ID NO: 4600808 - DNA, 25 bp, Homo sapien
gggatatgttactgtccggcagcag

SEQ ID NO: 4600809 - DNA, 25 bp, Homo sapien
tgtaatttgaattgggtcccgctta

SEQ ID NO: 4600810 - DNA, 25 bp, Homo sapien
aaaaactcctgtgtcggtcagaaca

SEQ ID NO: 4600811 - DNA, 25 bp, Homo sapien
aataactgaactgtttggtcgagtc

SEQ ID NO: 4600812 - DNA, 25 bp, Homo sapien
tacatctagaagagcccctgtgagc

SEQ ID NO: 4600813 - DNA, 25 bp, Homo sapien
tcgagtctttgtgtgttatattcca

SEQ ID NO: 4600814 - DNA, 25 bp, Homo sapien
cactgttggcacttataggtaacgt

SEQ ID NO: 4600815 - DNA, 25 bp, Homo sapien
tagacgttggaaatctctctcgcac

SEQ ID NO: 4600816 - DNA, 25 bp, Homo sapien
ggaaatctctctcgcactcttaagt

SEQ ID NO: 4600817 - DNA, 25 bp, Homo sapien
agcatgtgttctagacgttggaaat

SEQ ID NO: 4600818 - DNA, 25 bp, Homo sapien
gtgttctagacgttggaaatctctc

SEQ ID NO: 4600819 - DNA, 25 bp, Homo sapien
tgcttctcgccactttcaaacaaac

SEQ ID NO: 4600820 - DNA, 25 bp, Homo sapien
ggtgtgagagaacccagttagacgc

SEQ ID NO: 4600821 - DNA, 25 bp, Homo sapien
tgcaacaatagtgcaaggagagaga

SEQ ID NO: 4600822 - DNA, 25 bp, Homo sapien
tagacgcgaaatgcaacaatagtgc

SEQ ID NO: 4600823 - DNA, 25 bp, Homo sapien
tgcggcagaattccgccagcgcccc

SEQ ID NO: 4600824 - DNA, 25 bp, Homo sapien
gtgcggcagaattccgccagcgccc

SEQ ID NO: 4600825 - DNA, 25 bp, Homo sapien
cagaattccgccagcgccccgggaa

SEQ ID NO: 4600826 - DNA, 25 bp, Homo sapien
cggcagaattccgccagcgccccgg

SEQ ID NO: 4600827 - DNA, 25 bp, Homo sapien
tgcggctgcctaattaatggtgaaa

SEQ ID NO: 4600828 - DNA, 25 bp, Homo sapien
cgttggtttgtaataggacctcagt

SEQ ID NO: 4600829 - DNA, 25 bp, Homo sapien
tagtgctgggcgttggtttgtaata

SEQ ID NO: 4600830 - DNA, 25 bp, Homo sapien
gctccctgcagtgcggctgcctaat

SEQ ID NO: 4600831 - DNA, 25 bp, Homo sapien
tcaaagtgaattgtaaaactgcctc

SEQ ID NO: 4600832 - DNA, 25 bp, Homo sapien
taagttagcgtcctattcaaagtga

SEQ ID NO: 4600833 - DNA, 25 bp, Homo sapien
ggagttgtaaatcttatcgtccttc

SEQ ID NO: 4600834 - DNA, 25 bp, Homo sapien
ctcatttaatatggcatctgtgtca

SEQ ID NO: 4600835 - DNA, 25 bp, Homo sapien
gtggcgcaggcttccgagaggaaaa

SEQ ID NO: 4600836 - DNA, 25 bp, Homo sapien
agcttgatcattaccccctttggaa

SEQ ID NO: 4600837 - DNA, 25 bp, Homo sapien
gcagccacgacgttaattttattgg

SEQ ID NO: 4600838 - DNA, 25 bp, Homo sapien
ttgggattactgatgggaaatgagg

SEQ ID NO: 4600839 - DNA, 25 bp, Homo sapien
gccctttggaggcccaggcatccct

SEQ ID NO: 4600840 - DNA, 25 bp, Homo sapien
cctttggaggcccaggcatccctac

SEQ ID NO: 4600841 - DNA, 25 bp, Homo sapien
aggccctttggaggcccaggcatcc

SEQ ID NO: 4600842 - DNA, 25 bp, Homo sapien
tcaggaaggcgttaggccctttgga

SEQ ID NO: 4600843 - DNA, 25 bp, Homo sapien
gaaccctctgagcaagcagatgtac

SEQ ID NO: 4600844 - DNA, 25 bp, Homo sapien
tggtttggccactccaaagggtcga

SEQ ID NO: 4600845 - DNA, 25 bp, Homo sapien
tcccaggcacgagatgatggaaggc

SEQ ID NO: 4600846 - DNA, 25 bp, Homo sapien
aaggcgcgaaagtggcatggcttcc

SEQ ID NO: 4600847 - DNA, 25 bp, Homo sapien
gccaggcagccctcgttaataacgc

SEQ ID NO: 4600848 - DNA, 25 bp, Homo sapien
gggagcgagtacttctctccgcagc

SEQ ID NO: 4600849 - DNA, 25 bp, Homo sapien
ttaataacgcctagacaccgtgccc

SEQ ID NO: 4600850 - DNA, 25 bp, Homo sapien
ccctggcagagagaatacgagccca

SEQ ID NO: 4600851 - DNA, 25 bp, Homo sapien
gtactgtcacactcggagacctcgg

SEQ ID NO: 4600852 - DNA, 25 bp, Homo sapien
ccgctatgctgagtactgtcacact

SEQ ID NO: 4600853 - DNA, 25 bp, Homo sapien
gacctccgggcaggcttcaatgctg

SEQ ID NO: 4600854 - DNA, 25 bp, Homo sapien
tccgggcaggcttcaatgctgcagt

SEQ ID NO: 4600855 - DNA, 25 bp, Homo sapien
gatctccgaccaaatcgcaggcgtg

SEQ ID NO: 4600856 - DNA, 25 bp, Homo sapien
cgccagcttgatggcggccgcgaac

SEQ ID NO: 4600857 - DNA, 25 bp, Homo sapien
gtggccgggactcttcgcttctgca

SEQ ID NO: 4600858 - DNA, 25 bp, Homo sapien
tctgcagcatacagctggccgaggg

SEQ ID NO: 4600859 - DNA, 25 bp, Homo sapien
gctgcatcgccgctttcacctgctc

SEQ ID NO: 4600860 - DNA, 25 bp, Homo sapien
tctgcataggtggaagcccgtgcca

SEQ ID NO: 4600861 - DNA, 25 bp, Homo sapien
ctcgctggctgagccctcgctgcat

SEQ ID NO: 4600862 - DNA, 25 bp, Homo sapien
gcataggtggaagcccgtgccaaag

SEQ ID NO: 4600863 - DNA, 25 bp, Homo sapien
gttcgtttaaggacttcagcgcgaa

SEQ ID NO: 4600864 - DNA, 25 bp, Homo sapien
aagaagagcgaacgtggctagaacc

SEQ ID NO: 4600865 - DNA, 25 bp, Homo sapien
ttcagcgcgaagaagagcgaacgtg

SEQ ID NO: 4600866 - DNA, 25 bp, Homo sapien
ttaaggacttcagcgcgaagaagag

SEQ ID NO: 4600867 - DNA, 25 bp, Homo sapien
cctggaagtccgcacagctcgtggc

SEQ ID NO: 4600868 - DNA, 25 bp, Homo sapien
tggaagtccgcacagctcgtggcaa

SEQ ID NO: 4600869 - DNA, 25 bp, Homo sapien
agctcgtggcaacactggacggact

SEQ ID NO: 4600870 - DNA, 25 bp, Homo sapien
aacactggacggactggttgtcagg

SEQ ID NO: 4600871 - DNA, 25 bp, Homo sapien
ctaatatgccccatccatgtcagca

SEQ ID NO: 4600872 - DNA, 25 bp, Homo sapien
gttagcaggtccctaatatgcccca

SEQ ID NO: 4600873 - DNA, 25 bp, Homo sapien
catccatgtcagcactagaggaggg

SEQ ID NO: 4600874 - DNA, 25 bp, Homo sapien
agaagggttagcaggtccctaatat

SEQ ID NO: 4600875 - DNA, 25 bp, Homo sapien
tcagacttcagcctgctcgtctcct

SEQ ID NO: 4600876 - DNA, 25 bp, Homo sapien
gctcagacttcagcctgctcgtctc

SEQ ID NO: 4600877 - DNA, 25 bp, Homo sapien
gatcccccaggctgatggatattct

SEQ ID NO: 4600878 - DNA, 25 bp, Homo sapien
tgatggatattcttcgaccggggcc

SEQ ID NO: 4600879 - DNA, 25 bp, Homo sapien
tcttgggaattccctctgagctccc

SEQ ID NO: 4600880 - DNA, 25 bp, Homo sapien
ttgggaattccctctgagctcccat

SEQ ID NO: 4600881 - DNA, 25 bp, Homo sapien
ggaattccctctgagctcccattat

SEQ ID NO: 4600882 - DNA, 25 bp, Homo sapien
gggaattccctctgagctcccatta

SEQ ID NO: 4600883 - DNA, 25 bp, Homo sapien
ctgtgggatctgtcggtcacagata

SEQ ID NO: 4600884 - DNA, 25 bp, Homo sapien
actgtgggatctgtcggtcacagat

SEQ ID NO: 4600885 - DNA, 25 bp, Homo sapien
cagaagacctgtgcgttgcggcttc

SEQ ID NO: 4600886 - DNA, 25 bp, Homo sapien
agaagacctgtgcgttgcggcttct

SEQ ID NO: 4600887 - DNA, 25 bp, Homo sapien
tcagaagacctgtgcgttgcggctt

SEQ ID NO: 4600888 - DNA, 25 bp, Homo sapien
cagcggccaccgagcaatgttaact

SEQ ID NO: 4600889 - DNA, 25 bp, Homo sapien
ttggcggcgtcattccagtttctgc

SEQ ID NO: 4600890 - DNA, 25 bp, Homo sapien
gggttttcgccaccgagcgcatccg

SEQ ID NO: 4600891 - DNA, 25 bp, Homo sapien
tccgggtgacgtacaattaggctgc

SEQ ID NO: 4600892 - DNA, 25 bp, Homo sapien
ctgtgatggcgagttccggagcaca

SEQ ID NO: 4600893 - DNA, 25 bp, Homo sapien
cggagcggtccgcagggtgggcgaa

SEQ ID NO: 4600894 - DNA, 25 bp, Homo sapien
ggcgagttccggagcacactccgcg

SEQ ID NO: 4600895 - DNA, 25 bp, Homo sapien
gggagcgctgtgatggcgagttccg

SEQ ID NO: 4600896 - DNA, 25 bp, Homo sapien
ccaatccaccacaagctcagagacg

SEQ ID NO: 4600897 - DNA, 25 bp, Homo sapien
gagcaagcgcccaatccaccacaag

SEQ ID NO: 4600898 - DNA, 25 bp, Homo sapien
ctcagagacgcagcttagggttttt

SEQ ID NO: 4600899 - DNA, 25 bp, Homo sapien
aaatatgtgttctatcgttgtcccc

SEQ ID NO: 4600900 - DNA, 25 bp, Homo sapien
ctgccttccacatgcagccgctgca

SEQ ID NO: 4600901 - DNA, 25 bp, Homo sapien
ttgagtcgcatttccggccacctca

SEQ ID NO: 4600902 - DNA, 25 bp, Homo sapien
ggatgctttgctgcgacaacaccct

SEQ ID NO: 4600903 - DNA, 25 bp, Homo sapien
gccgctgcacttctcccttgagtcg

SEQ ID NO: 4600904 - DNA, 25 bp, Homo sapien
gctgtcgaccctggagttggtctgc

SEQ ID NO: 4600905 - DNA, 25 bp, Homo sapien
cagtgaagccctgcgcctgcagtgt

SEQ ID NO: 4600906 - DNA, 25 bp, Homo sapien
ggccgcactgccaaaaggcgacatt

SEQ ID NO: 4600907 - DNA, 25 bp, Homo sapien
agcatttgctttgccggctgtcgac

SEQ ID NO: 4600908 - DNA, 25 bp, Homo sapien
gcctcggagaaattccaactcttgg

SEQ ID NO: 4600909 - DNA, 25 bp, Homo sapien
caactcttggttgaggactctgact

SEQ ID NO: 4600910 - DNA, 25 bp, Homo sapien
caaagcagcccgaagttggcgagga

SEQ ID NO: 4600911 - DNA, 25 bp, Homo sapien
aaggtgtccaacattctctccgagg

SEQ ID NO: 4600912 - DNA, 25 bp, Homo sapien
taacagacgcgaagataatcctgcc

SEQ ID NO: 4600913 - DNA, 25 bp, Homo sapien
tttcaaagaaaccagcgcggtctct

SEQ ID NO: 4600914 - DNA, 25 bp, Homo sapien
aggttctcacattcgcactcccaaa

SEQ ID NO: 4600915 - DNA, 25 bp, Homo sapien
tttggtgaccaagctcggaaagcaa

SEQ ID NO: 4600916 - DNA, 25 bp, Homo sapien
catcaatgaagggactaaggtttcg

SEQ ID NO: 4600917 - DNA, 25 bp, Homo sapien
taaagacttgccattcgatctaatg

SEQ ID NO: 4600918 - DNA, 25 bp, Homo sapien
aggtttcgtggacaataatgtggca

SEQ ID NO: 4600919 - DNA, 25 bp, Homo sapien
tcccgttctagattaggcgcagtgg

SEQ ID NO: 4600920 - DNA, 25 bp, Homo sapien
tcctgacccgacacgctggttgtgg

SEQ ID NO: 4600921 - DNA, 25 bp, Homo sapien
aacctgcggaggcatcttctggctg

SEQ ID NO: 4600922 - DNA, 25 bp, Homo sapien
gccactggtatcaagaaacgcgcca

SEQ ID NO: 4600923 - DNA, 25 bp, Homo sapien
cactccgggtcctagtcaaatgtag

SEQ ID NO: 4600924 - DNA, 25 bp, Homo sapien
gccaagtgggatttagtgggcacca

SEQ ID NO: 4600925 - DNA, 25 bp, Homo sapien
ctttagccacggaagggaacgcgag

SEQ ID NO: 4600926 - DNA, 25 bp, Homo sapien
ccttgaaggcaaggactttagccac

SEQ ID NO: 4600927 - DNA, 25 bp, Homo sapien
gaacgcgaggaacttcgggcaatct

SEQ ID NO: 4600928 - DNA, 25 bp, Homo sapien
ggcacagagagcaaaccgtagactc

SEQ ID NO: 4600929 - DNA, 25 bp, Homo sapien
gagcaaaccgtagactctgacgctc

SEQ ID NO: 4600930 - DNA, 25 bp, Homo sapien
tactcctcgcgtcttgtagaccctt

SEQ ID NO: 4600931 - DNA, 25 bp, Homo sapien
tcttgtagacccttcttggtctcca

SEQ ID NO: 4600932 - DNA, 25 bp, Homo sapien
ctgctttgggtgcggtctccagggg

SEQ ID NO: 4600933 - DNA, 25 bp, Homo sapien
gaggattccccgctgtctggtcctt

SEQ ID NO: 4600934 - DNA, 25 bp, Homo sapien
ggtgtgggaggattccccgctgtct

SEQ ID NO: 4600935 - DNA, 25 bp, Homo sapien
ctgcaaaacaaagttctgttccttt

SEQ ID NO: 4600936 - DNA, 25 bp, Homo sapien
cctttcctgtgtgccggaagatggg

SEQ ID NO: 4600937 - DNA, 25 bp, Homo sapien
aaaagcgggtcccacccaaatgcat

SEQ ID NO: 4600938 - DNA, 25 bp, Homo sapien
gagtctttgatttgcacgttgatgt

SEQ ID NO: 4600939 - DNA, 25 bp, Homo sapien
acccaaatgcatctggactcggttt

SEQ ID NO: 4600940 - DNA, 25 bp, Homo sapien
cagagtctttgatttgcacgttgat

SEQ ID NO: 4600941 - DNA, 25 bp, Homo sapien
tgagaggtgagacaggctggcagct

SEQ ID NO: 4600942 - DNA, 25 bp, Homo sapien
agaggtgagacaggctggcagctgc

SEQ ID NO: 4600943 - DNA, 25 bp, Homo sapien
ctgagaggtgagacaggctggcagc

SEQ ID NO: 4600944 - DNA, 25 bp, Homo sapien
aggtgagacaggctggcagctgcct

SEQ ID NO: 4600945 - DNA, 25 bp, Homo sapien
gaaatgtggcgagcactagcaggca

SEQ ID NO: 4600946 - DNA, 25 bp, Homo sapien
ttgaaatgtggcgagcactagcagg

SEQ ID NO: 4600947 - DNA, 25 bp, Homo sapien
tgaaatgtggcgagcactagcaggc

SEQ ID NO: 4600948 - DNA, 25 bp, Homo sapien
ctttgaaatgtggcgagcactagca

SEQ ID NO: 4600949 - DNA, 25 bp, Homo sapien
gatctgtcctgccttgaataactgc

SEQ ID NO: 4600950 - DNA, 25 bp, Homo sapien
tggtaattagtacaaagagctttgg

SEQ ID NO: 4600951 - DNA, 25 bp, Homo sapien
tcctgccttgaataactgcctggga

SEQ ID NO: 4600952 - DNA, 25 bp, Homo sapien
cctggtaattagtacaaagagcttt

SEQ ID NO: 4600953 - DNA, 25 bp, Homo sapien
gaagatgggtgaagtaggagcagag

SEQ ID NO: 4600954 - DNA, 25 bp, Homo sapien
cgtgcagatgattttgacttggatc

SEQ ID NO: 4600955 - DNA, 25 bp, Homo sapien
agcagagcaagggcgagacaacaga

SEQ ID NO: 4600956 - DNA, 25 bp, Homo sapien
tgattttgacttggatctcagaaga

SEQ ID NO: 4600957 - DNA, 25 bp, Homo sapien
tttggcttcctcctcagtgcttgtg

SEQ ID NO: 4600958 - DNA, 25 bp, Homo sapien
ctttggcttcctcctcagtgcttgt

SEQ ID NO: 4600959 - DNA, 25 bp, Homo sapien
ttggcttcctcctcagtgcttgtgc

SEQ ID NO: 4600960 - DNA, 25 bp, Homo sapien
tacaaccattgtaagtgcaattcat

SEQ ID NO: 4600961 - DNA, 25 bp, Homo sapien
gcctttgttgagaagccggcactac

SEQ ID NO: 4600962 - DNA, 25 bp, Homo sapien
tgtacaaccattgtaagtgcaattc

SEQ ID NO: 4600963 - DNA, 25 bp, Homo sapien
gccggcactaccatacccttttgta

SEQ ID NO: 4600964 - DNA, 25 bp, Homo sapien
ttcttggtgtgaacagaaatagttg

SEQ ID NO: 4600965 - DNA, 25 bp, Homo sapien
cttcttggtgtgaacagaaatagtt

SEQ ID NO: 4600966 - DNA, 25 bp, Homo sapien
tcttggtgtgaacagaaatagttgg

SEQ ID NO: 4600967 - DNA, 25 bp, Homo sapien
tcttcttggtgtgaacagaaatagt

SEQ ID NO: 4600968 - DNA, 25 bp, Homo sapien
atgctttttctagattcttcccctt

SEQ ID NO: 4600969 - DNA, 25 bp, Homo sapien
ctagaatgctttttctagattcttc

SEQ ID NO: 4600970 - DNA, 25 bp, Homo sapien
gaatgctttttctagattcttcccc

SEQ ID NO: 4600971 - DNA, 25 bp, Homo sapien
agaatgctttttctagattcttccc

SEQ ID NO: 4600972 - DNA, 25 bp, Homo sapien
tttgaggtactctttcatccatccc

SEQ ID NO: 4600973 - DNA, 25 bp, Homo sapien
cattgggaggctgataattgatgcc

SEQ ID NO: 4600974 - DNA, 25 bp, Homo sapien
gtctccaccgggtaccacattggga

SEQ ID NO: 4600975 - DNA, 25 bp, Homo sapien
gaaaaaatgcatacttggcatatgt

SEQ ID NO: 4600976 - DNA, 25 bp, Homo sapien
tacttggcatatgtgaggtcaaact

SEQ ID NO: 4600977 - DNA, 25 bp, Homo sapien
catcaggcagcaagtacatgtattt

SEQ ID NO: 4600978 - DNA, 25 bp, Homo sapien
catatttgggaacatctggtacatc

SEQ ID NO: 4600979 - DNA, 25 bp, Homo sapien
catgtatttaccatgtacttcatgg

SEQ ID NO: 4600980 - DNA, 25 bp, Homo sapien
ttaccatgtacttcatggtacaaca

SEQ ID NO: 4600981 - DNA, 25 bp, Homo sapien
gtacaacaggcagcaagccatgtat

SEQ ID NO: 4600982 - DNA, 25 bp, Homo sapien
ggtacaacaggcagcaagccatgta

SEQ ID NO: 4600983 - DNA, 25 bp, Homo sapien
caacaggcagcaagccatgtattta

SEQ ID NO: 4600984 - DNA, 25 bp, Homo sapien
aggcagcaagccatgtatttaccat

SEQ ID NO: 4600985 - DNA, 25 bp, Homo sapien
ttatttccatatacctccaacattg

SEQ ID NO: 4600986 - DNA, 25 bp, Homo sapien
tacagtagtggtcaaaacatcaatt

SEQ ID NO: 4600987 - DNA, 25 bp, Homo sapien
catatacctccaacattggttcttc

SEQ ID NO: 4600988 - DNA, 25 bp, Homo sapien
gaatacagtagtggtcaaaacatca

SEQ ID NO: 4600989 - DNA, 25 bp, Homo sapien
ctttttaccatgactcagtcagcat

SEQ ID NO: 4600990 - DNA, 25 bp, Homo sapien
tgctttttaccatgactcagtcagc

SEQ ID NO: 4600991 - DNA, 25 bp, Homo sapien
ttaccatgactcagtcagcatttta

SEQ ID NO: 4600992 - DNA, 25 bp, Homo sapien
caaagactgctttttaccatgactc

SEQ ID NO: 4600993 - DNA, 25 bp, Homo sapien
gactatgtgacatgcttctgctccc

SEQ ID NO: 4600994 - DNA, 25 bp, Homo sapien
gcttctgctcccaaatgaaaatgca

SEQ ID NO: 4600995 - DNA, 25 bp, Homo sapien
gaagactatgtgacatgcttctgct

SEQ ID NO: 4600996 - DNA, 25 bp, Homo sapien
ttagaagactatgtgacatgcttct

SEQ ID NO: 4600997 - DNA, 25 bp, Homo sapien
ttcgaatgccaaagacacaatattg

SEQ ID NO: 4600998 - DNA, 25 bp, Homo sapien
ttggttttgatgcacttgcagtagc

SEQ ID NO: 4600999 - DNA, 25 bp, Homo sapien
cgaatgccaaagacacaatattggt

SEQ ID NO: 4601000 - DNA, 25 bp, Homo sapien
cttgcagtagcacaaagtgaagtcc

SEQ ID NO: 4601001 - DNA, 25 bp, Homo sapien
caggtggaaagttctccagcaaggc

SEQ ID NO: 4601002 - DNA, 25 bp, Homo sapien
taatgcgcttatcaggcctggacac

SEQ ID NO: 4601003 - DNA, 25 bp, Homo sapien
taagtggctgatccagcacagcgga

SEQ ID NO: 4601004 - DNA, 25 bp, Homo sapien
ttctcaaaactgaattaagtggctg

SEQ ID NO: 4601005 - DNA, 25 bp, Homo sapien
tggacaccaccatattcctctgtat

SEQ ID NO: 4601006 - DNA, 25 bp, Homo sapien
cagattcctcggtgtgtctagttgt

SEQ ID NO: 4601007 - DNA, 25 bp, Homo sapien
ctgtcatgggtgctcctgaatgcac

SEQ ID NO: 4601008 - DNA, 25 bp, Homo sapien
tgtctagttgttctgtcatgggtgc

SEQ ID NO: 4601009 - DNA, 25 bp, Homo sapien
tcatgggtgctcctgaatgcaccat

SEQ ID NO: 4601010 - DNA, 25 bp, Homo sapien
gcttgagcccagaagactgaggccg

SEQ ID NO: 4601011 - DNA, 25 bp, Homo sapien
cccagaagactgaggccgcagtgag

SEQ ID NO: 4601012 - DNA, 25 bp, Homo sapien
ttgagcccagaagactgaggccgca

SEQ ID NO: 4601013 - DNA, 25 bp, Homo sapien
ctactttggagtctgaagcaggagg

SEQ ID NO: 4601014 - DNA, 25 bp, Homo sapien
tggaaggagcactaaaccaaaaaga

SEQ ID NO: 4601015 - DNA, 25 bp, Homo sapien
tctctacttcaaaccgtggaaggag

SEQ ID NO: 4601016 - DNA, 25 bp, Homo sapien
gaggactcgcttatatatgccacca

SEQ ID NO: 4601017 - DNA, 25 bp, Homo sapien
ttttctagcaaacaatgaggttgga

SEQ ID NO: 4601018 - DNA, 25 bp, Homo sapien
ggcgattcttacagttacctcttct

SEQ ID NO: 4601019 - DNA, 25 bp, Homo sapien
tcccagggcgattcttacagttacc

SEQ ID NO: 4601020 - DNA, 25 bp, Homo sapien
taggcattcccagggcgattcttac

SEQ ID NO: 4601021 - DNA, 25 bp, Homo sapien
cttggattaggcattcccagggcga

SEQ ID NO: 4601022 - DNA, 25 bp, Homo sapien
tactattgtccaaacgtgaccctcc

SEQ ID NO: 4601023 - DNA, 25 bp, Homo sapien
agtgatggatactattgtccaaacg

SEQ ID NO: 4601024 - DNA, 25 bp, Homo sapien
attaacaccacctatcagcatctgg

SEQ ID NO: 4601025 - DNA, 25 bp, Homo sapien
ccaaaatctgagtgatagcgtagta

SEQ ID NO: 4601026 - DNA, 25 bp, Homo sapien
tttattacattagcgcgggcttccc

SEQ ID NO: 4601027 - DNA, 25 bp, Homo sapien
gaccagccctgacagtaaaacggag

SEQ ID NO: 4601028 - DNA, 25 bp, Homo sapien
cagtaaaacggagtgagcatgtggc

SEQ ID NO: 4601029 - DNA, 25 bp, Homo sapien
ctttcctcttgtcgctctcgcttta

SEQ ID NO: 4601030 - DNA, 25 bp, Homo sapien
tgcacattacacactaccccaggta

SEQ ID NO: 4601031 - DNA, 25 bp, Homo sapien
tattttgattgattgttcccacccc

SEQ ID NO: 4601032 - DNA, 25 bp, Homo sapien
tgattgattgttcccaccccaaagc

SEQ ID NO: 4601033 - DNA, 25 bp, Homo sapien
gggcagcctgttcacgctgacaaga

SEQ ID NO: 4601034 - DNA, 25 bp, Homo sapien
tcattctcgaacattatcattcacc

SEQ ID NO: 4601035 - DNA, 25 bp, Homo sapien
tcgaacattatcattcaccaaagcg

SEQ ID NO: 4601036 - DNA, 25 bp, Homo sapien
ccaaagcgtatcttttggcttgatt

SEQ ID NO: 4601037 - DNA, 25 bp, Homo sapien
tcattcaccaaagcgtatcttttgg

SEQ ID NO: 4601038 - DNA, 25 bp, Homo sapien
tcccttccagctggttcgatatgag

SEQ ID NO: 4601039 - DNA, 25 bp, Homo sapien
aagccctggtcctcagcaagctgtt

SEQ ID NO: 4601040 - DNA, 25 bp, Homo sapien
gttgcagacagcttgcaaggtttcc

SEQ ID NO: 4601041 - DNA, 25 bp, Homo sapien
tccagctggttcgatatgaggttag

SEQ ID NO: 4601042 - DNA, 25 bp, Homo sapien
tcactgtgcctcctttatcccaata

SEQ ID NO: 4601043 - DNA, 25 bp, Homo sapien
caaatctcactgtgcctcctttatc

SEQ ID NO: 4601044 - DNA, 25 bp, Homo sapien
aaatctcactgtgcctcctttatcc

SEQ ID NO: 4601045 - DNA, 25 bp, Homo sapien
tctcactgtgcctcctttatcccaa

SEQ ID NO: 4601046 - DNA, 25 bp, Homo sapien
ctctgtctataaggatctctgttgg

SEQ ID NO: 4601047 - DNA, 25 bp, Homo sapien
ctctctgtctataaggatctctgtt

SEQ ID NO: 4601048 - DNA, 25 bp, Homo sapien
tcttggaaatagttcagtgatagct

SEQ ID NO: 4601049 - DNA, 25 bp, Homo sapien
tttcttggaaatagttcagtgatag

SEQ ID NO: 4601050 - DNA, 25 bp, Homo sapien
tgtgacaaccccatggtctgaatct

SEQ ID NO: 4601051 - DNA, 25 bp, Homo sapien
tagtggaattatatttaagcttcac

SEQ ID NO: 4601052 - DNA, 25 bp, Homo sapien
tgtgttctttccagtaacgttagtg

SEQ ID NO: 4601053 - DNA, 25 bp, Homo sapien
attcttcatgtatttgactgtgaca

SEQ ID NO: 4601054 - DNA, 25 bp, Homo sapien
tcaggacagggccattgtttcatat

SEQ ID NO: 4601055 - DNA, 25 bp, Homo sapien
ccaggagttgctatcttgcataggg

SEQ ID NO: 4601056 - DNA, 25 bp, Homo sapien
tacattagctacagccatccatctg

SEQ ID NO: 4601057 - DNA, 25 bp, Homo sapien
tattcttcacatggaacggcttctg

SEQ ID NO: 4601058 - DNA, 25 bp, Homo sapien
taatgttctgcagattcaacaacac

SEQ ID NO: 4601059 - DNA, 25 bp, Homo sapien
gattcaacaacactctgcctcttgc

SEQ ID NO: 4601060 - DNA, 25 bp, Homo sapien
ctcttgcttcatgagctgatgtgta

SEQ ID NO: 4601061 - DNA, 25 bp, Homo sapien
catgagctgatgtgtaatggggctc

SEQ ID NO: 4601062 - DNA, 25 bp, Homo sapien
ttcccagcattagccctcttgatgt

SEQ ID NO: 4601063 - DNA, 25 bp, Homo sapien
ttttggtggctttcccagcattagc

SEQ ID NO: 4601064 - DNA, 25 bp, Homo sapien
acaacccagtgtttggaatggcaca

SEQ ID NO: 4601065 - DNA, 25 bp, Homo sapien
ctcttgatgtcaagtgcatttgtgg

SEQ ID NO: 4601066 - DNA, 25 bp, Homo sapien
tagagcccgttcctctggggtcaga

SEQ ID NO: 4601067 - DNA, 25 bp, Homo sapien
ctgtagaagagcacgggactggctc

SEQ ID NO: 4601068 - DNA, 25 bp, Homo sapien
tgtagaagagcacgggactggctcc

SEQ ID NO: 4601069 - DNA, 25 bp, Homo sapien
ttccatggcttcacacacggtctct

SEQ ID NO: 4601070 - DNA, 25 bp, Homo sapien
tccatggcttcacacacggtctctt

SEQ ID NO: 4601071 - DNA, 25 bp, Homo sapien
actattacaggagggtagttgatct

SEQ ID NO: 4601072 - DNA, 25 bp, Homo sapien
agagtgtccttcagactattacagg

SEQ ID NO: 4601073 - DNA, 25 bp, Homo sapien
tcagactattacaggagggtagttg

SEQ ID NO: 4601074 - DNA, 25 bp, Homo sapien
gagtgtccttcagactattacagga

SEQ ID NO: 4601075 - DNA, 25 bp, Homo sapien
ctgtagaaaggatcacccggctcca

SEQ ID NO: 4601076 - DNA, 25 bp, Homo sapien
ggtccggattgttctcttaagcaga

SEQ ID NO: 4601077 - DNA, 25 bp, Homo sapien
taagcagatatcaaactcgtagcca

SEQ ID NO: 4601078 - DNA, 25 bp, Homo sapien
atcgtaccagccaccgaagcggttc

SEQ ID NO: 4601079 - DNA, 25 bp, Homo sapien
tgggttcaggttggcatcgtaccag

SEQ ID NO: 4601080 - DNA, 25 bp, Homo sapien
tgtttgtaggcggcgtggcggcggg

SEQ ID NO: 4601081 - DNA, 25 bp, Homo sapien
ctgtttgtaggcggcgtggcggcgg

SEQ ID NO: 4601082 - DNA, 25 bp, Homo sapien
catcaacaagtgtccccttgggcac

SEQ ID NO: 4601083 - DNA, 25 bp, Homo sapien
gaatactccatcaacaagtgtcccc

SEQ ID NO: 4601084 - DNA, 25 bp, Homo sapien
cccgagaatactccatcaacaagtg

SEQ ID NO: 4601085 - DNA, 25 bp, Homo sapien
tactccatcaacaagtgtccccttg

SEQ ID NO: 4601086 - DNA, 25 bp, Homo sapien
ccagctccagtccaaacgatttgca

SEQ ID NO: 4601087 - DNA, 25 bp, Homo sapien
cccatagggtctgaatgctgttttc

SEQ ID NO: 4601088 - DNA, 25 bp, Homo sapien
tcctgaagaagatacgagatgacca

SEQ ID NO: 4601089 - DNA, 25 bp, Homo sapien
tttgctcgcgttcagcccatagggt

SEQ ID NO: 4601090 - DNA, 25 bp, Homo sapien
ttattttgtcaacacaggaggagaa

SEQ ID NO: 4601091 - DNA, 25 bp, Homo sapien
aatttacattgcatgttcaacaccc

SEQ ID NO: 4601092 - DNA, 25 bp, Homo sapien
tcagagtcttggaggactgagacat

SEQ ID NO: 4601093 - DNA, 25 bp, Homo sapien
cacccaaatgggaagttcacagttc

SEQ ID NO: 4601094 - DNA, 25 bp, Homo sapien
aaacagctgctctatgttttggctg

SEQ ID NO: 4601095 - DNA, 25 bp, Homo sapien
agtgttccaatgttagtcttaattt

SEQ ID NO: 4601096 - DNA, 25 bp, Homo sapien
tgttccaatgttagtcttaattttg

SEQ ID NO: 4601097 - DNA, 25 bp, Homo sapien
ttccaatgttagtcttaattttggc

SEQ ID NO: 4601098 - DNA, 25 bp, Homo sapien
tcaggccttggagctaaatacactg

SEQ ID NO: 4601099 - DNA, 25 bp, Homo sapien
tgtctgtgacatccgtgagcgctga

SEQ ID NO: 4601100 - DNA, 25 bp, Homo sapien
tcagcggttggaagtcttgcctcag

SEQ ID NO: 4601101 - DNA, 25 bp, Homo sapien
tattcttttctaggcacagcggccc

SEQ ID NO: 4601102 - DNA, 25 bp, Homo sapien
tgttttacagtatcagcgtttccca

SEQ ID NO: 4601103 - DNA, 25 bp, Homo sapien
tgctggacaccaatgctaaaggatg

SEQ ID NO: 4601104 - DNA, 25 bp, Homo sapien
tctaaagattcggtcacagccacca

SEQ ID NO: 4601105 - DNA, 25 bp, Homo sapien
tcccaaagactgtctaagatctgga

SEQ ID NO: 4601106 - DNA, 25 bp, Homo sapien
gatggttctgatgtgtagttgggtt

SEQ ID NO: 4601107 - DNA, 25 bp, Homo sapien
caattttagagcttgcctcttgtcc

SEQ ID NO: 4601108 - DNA, 25 bp, Homo sapien
aattttagagcttgcctcttgtcct

SEQ ID NO: 4601109 - DNA, 25 bp, Homo sapien
attttagagcttgcctcttgtcctc

SEQ ID NO: 4601110 - DNA, 25 bp, Homo sapien
gtttggaagcctgggttgattgtat

SEQ ID NO: 4601111 - DNA, 25 bp, Homo sapien
ccccagtgtcataggtttggaagcc

SEQ ID NO: 4601112 - DNA, 25 bp, Homo sapien
gctaatcagccccagtgtcataggt

SEQ ID NO: 4601113 - DNA, 25 bp, Homo sapien
tccctgctaatcagccccagtgtca

SEQ ID NO: 4601114 - DNA, 25 bp, Homo sapien
agaacctggagaacaatcaggtggt

SEQ ID NO: 4601115 - DNA, 25 bp, Homo sapien
tggagaacaatcaggtggtttctgc

SEQ ID NO: 4601116 - DNA, 25 bp, Homo sapien
gggagaacctggagaacaatcaggt

SEQ ID NO: 4601117 - DNA, 25 bp, Homo sapien
tggggagaacctggagaacaatcag

SEQ ID NO: 4601118 - DNA, 25 bp, Homo sapien
tcttgtatcgttctcatagctgttc

SEQ ID NO: 4601119 - DNA, 25 bp, Homo sapien
atgcattatcttgtatcgttctcat

SEQ ID NO: 4601120 - DNA, 25 bp, Homo sapien
ttgtatcgttctcatagctgttctc

SEQ ID NO: 4601121 - DNA, 25 bp, Homo sapien
cattatcttgtatcgttctcatagc

SEQ ID NO: 4601122 - DNA, 25 bp, Homo sapien
cagctccgactctgcagtcattgtt

SEQ ID NO: 4601123 - DNA, 25 bp, Homo sapien
agctccgactctgcagtcattgttt

SEQ ID NO: 4601124 - DNA, 25 bp, Homo sapien
ccccagctccgactctgcagtcatt

SEQ ID NO: 4601125 - DNA, 25 bp, Homo sapien
ccagctccgactctgcagtcattgt

SEQ ID NO: 4601126 - DNA, 25 bp, Homo sapien
gacaagggtttgaagggagaacatc

SEQ ID NO: 4601127 - DNA, 25 bp, Homo sapien
agggtttgaagggagaacatcacag

SEQ ID NO: 4601128 - DNA, 25 bp, Homo sapien
cgaacggcagtgacaagggtttgaa

SEQ ID NO: 4601129 - DNA, 25 bp, Homo sapien
tcctgcgaacggcagtgacaagggt

SEQ ID NO: 4601130 - DNA, 25 bp, Homo sapien
ggttccacgttaggataaacagcca

SEQ ID NO: 4601131 - DNA, 25 bp, Homo sapien
tggtccctcactttgaggctttgtg

SEQ ID NO: 4601132 - DNA, 25 bp, Homo sapien
gccagttggaggttcgggacactcc

SEQ ID NO: 4601133 - DNA, 25 bp, Homo sapien
aaccataaagctgtgctgtggccag

SEQ ID NO: 4601134 - DNA, 25 bp, Homo sapien
gcaatgcaatgtcaaaagtggagtg

SEQ ID NO: 4601135 - DNA, 25 bp, Homo sapien
actgaatgggctctgccacactatg

SEQ ID NO: 4601136 - DNA, 25 bp, Homo sapien
ctggcaatgcaatgtcaaaagtgga

SEQ ID NO: 4601137 - DNA, 25 bp, Homo sapien
ctgaatgggctctgccacactatga

SEQ ID NO: 4601138 - DNA, 25 bp, Homo sapien
gctctggtctgaactccatgtggca

SEQ ID NO: 4601139 - DNA, 25 bp, Homo sapien
gtctgaggctacctttagctgttca

SEQ ID NO: 4601140 - DNA, 25 bp, Homo sapien
catgtggcagacgtctgaggctacc

SEQ ID NO: 4601141 - DNA, 25 bp, Homo sapien
caaaaatgcccggagcctctcattc

SEQ ID NO: 4601142 - DNA, 25 bp, Homo sapien
caatttctcattgccgctggtgctg

SEQ ID NO: 4601143 - DNA, 25 bp, Homo sapien
aataactgctggcaaaccgtgaccc

SEQ ID NO: 4601144 - DNA, 25 bp, Homo sapien
ttccgcctctctctggagcaatttc

SEQ ID NO: 4601145 - DNA, 25 bp, Homo sapien
gaggatctgagtttccgacttccca

SEQ ID NO: 4601146 - DNA, 25 bp, Homo sapien
caccccctgcctatagacattgttt

SEQ ID NO: 4601147 - DNA, 25 bp, Homo sapien
cctgcctatagacattgtttcttct

SEQ ID NO: 4601148 - DNA, 25 bp, Homo sapien
cccctgcctatagacattgtttctt

SEQ ID NO: 4601149 - DNA, 25 bp, Homo sapien
gccacaccccctgcctatagacatt

SEQ ID NO: 4601150 - DNA, 25 bp, Homo sapien
gggtgtgccccaggtagccattact

SEQ ID NO: 4601151 - DNA, 25 bp, Homo sapien
attactcctgtagcctgggtcccag

SEQ ID NO: 4601152 - DNA, 25 bp, Homo sapien
taccctacttgagtttctgacttct

SEQ ID NO: 4601153 - DNA, 25 bp, Homo sapien
tcttccatgaaaagggtgtgcccca

SEQ ID NO: 4601154 - DNA, 25 bp, Homo sapien
agcaaatctccacttgacccaaggt

SEQ ID NO: 4601155 - DNA, 25 bp, Homo sapien
gagcaaatctccacttgacccaagg

SEQ ID NO: 4601156 - DNA, 25 bp, Homo sapien
gagagcaaatctccacttgacccaa

SEQ ID NO: 4601157 - DNA, 25 bp, Homo sapien
ctggagagcaaatctccacttgacc

SEQ ID NO: 4601158 - DNA, 25 bp, Homo sapien
cgtgctaacgcttctaaatgccatt

SEQ ID NO: 4601159 - DNA, 25 bp, Homo sapien
ggtctgctaatgtaaccacactggg

SEQ ID NO: 4601160 - DNA, 25 bp, Homo sapien
tcccttatttggtccaccgagctaa

SEQ ID NO: 4601161 - DNA, 25 bp, Homo sapien
ccgagctaatgcatttatgtgacac

SEQ ID NO: 4601162 - DNA, 25 bp, Homo sapien
cttgaccccttccttgtagtcaaag

SEQ ID NO: 4601163 - DNA, 25 bp, Homo sapien
gtacactccagtgctggaggctaca

SEQ ID NO: 4601164 - DNA, 25 bp, Homo sapien
tgtagtcaaagtacactccagtgct

SEQ ID NO: 4601165 - DNA, 25 bp, Homo sapien
tgaccccttccttgtagtcaaagta

SEQ ID NO: 4601166 - DNA, 25 bp, Homo sapien
caatccgcaacttgtaactccagta

SEQ ID NO: 4601167 - DNA, 25 bp, Homo sapien
ccagtatcctaattgagccagaaaa

SEQ ID NO: 4601168 - DNA, 25 bp, Homo sapien
ttttatgtccacaatccgcaacttg

SEQ ID NO: 4601169 - DNA, 25 bp, Homo sapien
gctcctgagcgctggattttatgtc

SEQ ID NO: 4601170 - DNA, 25 bp, Homo sapien
cctgcccagtctgggcggtctgtag

SEQ ID NO: 4601171 - DNA, 25 bp, Homo sapien
aacagtgcccttgtgatgcctttca

SEQ ID NO: 4601172 - DNA, 25 bp, Homo sapien
ctgggaatctgaacagtgcccttgt

SEQ ID NO: 4601173 - DNA, 25 bp, Homo sapien
tacaggacaaactggaatatcctgc

SEQ ID NO: 4601174 - DNA, 25 bp, Homo sapien
taaagcatggatcccaggacagatg

SEQ ID NO: 4601175 - DNA, 25 bp, Homo sapien
ttccaggtatggtttctgagacagg

SEQ ID NO: 4601176 - DNA, 25 bp, Homo sapien
tggcaggttggtaaagcatggatcc

SEQ ID NO: 4601177 - DNA, 25 bp, Homo sapien
cagtaaataagatgggctggtggca

SEQ ID NO: 4601178 - DNA, 25 bp, Homo sapien
cctttattagatgctgactttgagc

SEQ ID NO: 4601179 - DNA, 25 bp, Homo sapien
tcctttattagatgctgactttgag

SEQ ID NO: 4601180 - DNA, 25 bp, Homo sapien
tgtttccatggctctccaatttcct

SEQ ID NO: 4601181 - DNA, 25 bp, Homo sapien
ctattggaagccatattgtttccat

SEQ ID NO: 4601182 - DNA, 25 bp, Homo sapien
tgtgaacaaggtaacatcacttccg

SEQ ID NO: 4601183 - DNA, 25 bp, Homo sapien
cctctaaggaagaaatggtccatgg

SEQ ID NO: 4601184 - DNA, 25 bp, Homo sapien
gagaaactcatgctgctcacatcag

SEQ ID NO: 4601185 - DNA, 25 bp, Homo sapien
gtatgtctcctgcaaagccccgaga

SEQ ID NO: 4601186 - DNA, 25 bp, Homo sapien
gtgagatctgacatagccaaaagcc

SEQ ID NO: 4601187 - DNA, 25 bp, Homo sapien
gccctttgtcttaagacgccattgg

SEQ ID NO: 4601188 - DNA, 25 bp, Homo sapien
catggatgtaaaggaacaccgcaca

SEQ ID NO: 4601189 - DNA, 25 bp, Homo sapien
ttggagagatcgaataaacacatgg

SEQ ID NO: 4601190 - DNA, 25 bp, Homo sapien
tgccactcggagcaaatgtatcaga

SEQ ID NO: 4601191 - DNA, 25 bp, Homo sapien
cgtgactcaataccctttgcctgca

SEQ ID NO: 4601192 - DNA, 25 bp, Homo sapien
cagaaagagcaccaaatggattgcg

SEQ ID NO: 4601193 - DNA, 25 bp, Homo sapien
cctgctctgccactcggagcaaatg

SEQ ID NO: 4601194 - DNA, 25 bp, Homo sapien
cactaggtctgcagcttttgtgcct

SEQ ID NO: 4601195 - DNA, 25 bp, Homo sapien
tcaagtccaacccaagtagcaatca

SEQ ID NO: 4601196 - DNA, 25 bp, Homo sapien
catgaacaagtgtatgatgacccca

SEQ ID NO: 4601197 - DNA, 25 bp, Homo sapien
gctttaatataagtggtcccgctat

SEQ ID NO: 4601198 - DNA, 25 bp, Homo sapien
gatgttcctacgttttcatcagagt

SEQ ID NO: 4601199 - DNA, 25 bp, Homo sapien
atgttcctacgttttcatcagagtc

SEQ ID NO: 4601200 - DNA, 25 bp, Homo sapien
tgatgttcctacgttttcatcagag

SEQ ID NO: 4601201 - DNA, 25 bp, Homo sapien
tcaggcgttacaggttctttttcca

SEQ ID NO: 4601202 - DNA, 25 bp, Homo sapien
caggcgttacaggttctttttccag

SEQ ID NO: 4601203 - DNA, 25 bp, Homo sapien
ctggggagtgacacagcaccaaggt

SEQ ID NO: 4601204 - DNA, 25 bp, Homo sapien
tcagctggccatctatcacaggcca

SEQ ID NO: 4601205 - DNA, 25 bp, Homo sapien
ctcagctggccatctatcacaggcc

SEQ ID NO: 4601206 - DNA, 25 bp, Homo sapien
gggagtgacacagcaccaaggtgtt

SEQ ID NO: 4601207 - DNA, 25 bp, Homo sapien
cagtggctccatggcttttatatca

SEQ ID NO: 4601208 - DNA, 25 bp, Homo sapien
gacatggatgaatcaggggtgactt

SEQ ID NO: 4601209 - DNA, 25 bp, Homo sapien
tgcttcctggtcattcggtccagtg

SEQ ID NO: 4601210 - DNA, 25 bp, Homo sapien
ttatatcaggtttgggacatggatg

SEQ ID NO: 4601211 - DNA, 25 bp, Homo sapien
tccagaatcccaggtaagagcattg

SEQ ID NO: 4601212 - DNA, 25 bp, Homo sapien
ccagctgacagggagagtatacatc

SEQ ID NO: 4601213 - DNA, 25 bp, Homo sapien
ccagaggttggctggatgtgcttcc

SEQ ID NO: 4601214 - DNA, 25 bp, Homo sapien
gccaagctttggaaatgcactcttc

SEQ ID NO: 4601215 - DNA, 25 bp, Homo sapien
gcagtaacctggagtatcaccttta

SEQ ID NO: 4601216 - DNA, 25 bp, Homo sapien
ctggagtatcacctttatgaagcac

SEQ ID NO: 4601217 - DNA, 25 bp, Homo sapien
gtaacctggagtatcacctttatga

SEQ ID NO: 4601218 - DNA, 25 bp, Homo sapien
aagcagtaacctggagtatcacctt

SEQ ID NO: 4601219 - DNA, 25 bp, Homo sapien
tggcttggtgtgtgtactttcccat

SEQ ID NO: 4601220 - DNA, 25 bp, Homo sapien
gatggcttggtgtgtgtactttccc

SEQ ID NO: 4601221 - DNA, 25 bp, Homo sapien
gcttggtgtgtgtactttcccatcc

SEQ ID NO: 4601222 - DNA, 25 bp, Homo sapien
atggcttggtgtgtgtactttccca

SEQ ID NO: 4601223 - DNA, 25 bp, Homo sapien
ctgatgtagtaatcccaaagaggac

SEQ ID NO: 4601224 - DNA, 25 bp, Homo sapien
ccgattgtgggatactggatttcag

SEQ ID NO: 4601225 - DNA, 25 bp, Homo sapien
taccatgagggaacattcagcgatt

SEQ ID NO: 4601226 - DNA, 25 bp, Homo sapien
ggacacagaggttaggacgaaccat

SEQ ID NO: 4601227 - DNA, 25 bp, Homo sapien
cataatgccatttgatcacaagcca

SEQ ID NO: 4601228 - DNA, 25 bp, Homo sapien
atagcataatgccatttgatcacaa

SEQ ID NO: 4601229 - DNA, 25 bp, Homo sapien
ccttgcctattgcatccatatcatc

SEQ ID NO: 4601230 - DNA, 25 bp, Homo sapien
tgcctattgcatccatatcatcata

SEQ ID NO: 4601231 - DNA, 25 bp, Homo sapien
ctgattgaccgcaccgaagcacaga

SEQ ID NO: 4601232 - DNA, 25 bp, Homo sapien
taatctgacgtgagtctgtgagcga

SEQ ID NO: 4601233 - DNA, 25 bp, Homo sapien
tcgatctcagtttgtatggaggcgg

SEQ ID NO: 4601234 - DNA, 25 bp, Homo sapien
gatcccatgaccttgcagggatttt

SEQ ID NO: 4601235 - DNA, 25 bp, Homo sapien
ctttgaactgtctcccatgtaattc

SEQ ID NO: 4601236 - DNA, 25 bp, Homo sapien
gaactgtctcccatgtaattcacag

SEQ ID NO: 4601237 - DNA, 25 bp, Homo sapien
acaggtccaccaatataagatctta

SEQ ID NO: 4601238 - DNA, 25 bp, Homo sapien
catgtaattcacaggtccaccaata

SEQ ID NO: 4601239 - DNA, 25 bp, Homo sapien
tccagtgggtgggagacctacattc

SEQ ID NO: 4601240 - DNA, 25 bp, Homo sapien
tgccaattaacccattcagtgctgt

SEQ ID NO: 4601241 - DNA, 25 bp, Homo sapien
tcaagatgtaagagtctccagtggg

SEQ ID NO: 4601242 - DNA, 25 bp, Homo sapien
catactgtgagcagtcagtgacagc

SEQ ID NO: 4601243 - DNA, 25 bp, Homo sapien
ttgagcgatttggagtttcattaga

SEQ ID NO: 4601244 - DNA, 25 bp, Homo sapien
tattgagcgatttggagtttcatta

SEQ ID NO: 4601245 - DNA, 25 bp, Homo sapien
attgagcgatttggagtttcattag

SEQ ID NO: 4601246 - DNA, 25 bp, Homo sapien
ttctcagatgaggtttgaattgagg

SEQ ID NO: 4601247 - DNA, 25 bp, Homo sapien
aatgaaaaggctcaatgttgtgctg

SEQ ID NO: 4601248 - DNA, 25 bp, Homo sapien
aatgttgtgctgacaggtccccaag

SEQ ID NO: 4601249 - DNA, 25 bp, Homo sapien
gagaggtagtgctggagatactttt

SEQ ID NO: 4601250 - DNA, 25 bp, Homo sapien
tcacagacgtgaatgctgattggaa

SEQ ID NO: 4601251 - DNA, 25 bp, Homo sapien
tcctgacttgagctttcacagacgt

SEQ ID NO: 4601252 - DNA, 25 bp, Homo sapien
cactagacactaatttttgaagacc

SEQ ID NO: 4601253 - DNA, 25 bp, Homo sapien
cttttgaaaaccgaaacagaggatg

SEQ ID NO: 4601254 - DNA, 25 bp, Homo sapien
gcaacatcgtttcctattggcagta

SEQ ID NO: 4601255 - DNA, 25 bp, Homo sapien
tctcatctgagccatatttgatagc

SEQ ID NO: 4601256 - DNA, 25 bp, Homo sapien
ttcagccaatgagatgcctcccatc

SEQ ID NO: 4601257 - DNA, 25 bp, Homo sapien
taagccccgttgtaacaaaagagca

SEQ ID NO: 4601258 - DNA, 25 bp, Homo sapien
cctctgactccttgacaaacagcat

SEQ ID NO: 4601259 - DNA, 25 bp, Homo sapien
catggaatagtcacaataaatggca

SEQ ID NO: 4601260 - DNA, 25 bp, Homo sapien
ggaatagtcacaataaatggcagca

SEQ ID NO: 4601261 - DNA, 25 bp, Homo sapien
ggcagcaaatgtaattctaacctct

SEQ ID NO: 4601262 - DNA, 25 bp, Homo sapien
tcaccctccactacatacgtgaata

SEQ ID NO: 4601263 - DNA, 25 bp, Homo sapien
cacataaagagagctttgtgaagag

SEQ ID NO: 4601264 - DNA, 25 bp, Homo sapien
gaatacattcattacccacttccca

SEQ ID NO: 4601265 - DNA, 25 bp, Homo sapien
tgaagaggtggtattcgaagcaagt

SEQ ID NO: 4601266 - DNA, 25 bp, Homo sapien
agcttgttgcttattgatgtttccg

SEQ ID NO: 4601267 - DNA, 25 bp, Homo sapien
agttgcactatccacgtctcgagca

SEQ ID NO: 4601268 - DNA, 25 bp, Homo sapien
tgacacagtgctgatttcaatcagg

SEQ ID NO: 4601269 - DNA, 25 bp, Homo sapien
ttctggagaggcctacgatttttag

SEQ ID NO: 4601270 - DNA, 25 bp, Homo sapien
tcctgcgagttattacctgaaataa

SEQ ID NO: 4601271 - DNA, 25 bp, Homo sapien
agggattctcctgcgagttattacc

SEQ ID NO: 4601272 - DNA, 25 bp, Homo sapien
tagcaaccaaaaggtgacacgtggg

SEQ ID NO: 4601273 - DNA, 25 bp, Homo sapien
gattctcctgcgagttattacctga

SEQ ID NO: 4601274 - DNA, 25 bp, Homo sapien
tatagatccctgtaattatttcatc

SEQ ID NO: 4601275 - DNA, 25 bp, Homo sapien
cagccagaaaggagtttgcctgcag

SEQ ID NO: 4601276 - DNA, 25 bp, Homo sapien
tcattcttcataaccttggcaccaa

SEQ ID NO: 4601277 - DNA, 25 bp, Homo sapien
gcaagcttcttgcaggccgaactta

SEQ ID NO: 4601278 - DNA, 25 bp, Homo sapien
tgagataactgcaattctggtcaat

SEQ ID NO: 4601279 - DNA, 25 bp, Homo sapien
ctgagatctgccagctgccacatga

SEQ ID NO: 4601280 - DNA, 25 bp, Homo sapien
gtcaatttgatcattgctctgcagg

SEQ ID NO: 4601281 - DNA, 25 bp, Homo sapien
aagtggatcttctcctagccttgag

SEQ ID NO: 4601282 - DNA, 25 bp, Homo sapien
agtcccttttgtgcatggccgcggg

SEQ ID NO: 4601283 - DNA, 25 bp, Homo sapien
tcagccaagcttcggcaaggtaaat

SEQ ID NO: 4601284 - DNA, 25 bp, Homo sapien
gctccataaataaaagccgccagct

SEQ ID NO: 4601285 - DNA, 25 bp, Homo sapien
catggccgcgggagcatgttgaaat

SEQ ID NO: 4601286 - DNA, 25 bp, Homo sapien
caacggagggctgttgcttgctttc

SEQ ID NO: 4601287 - DNA, 25 bp, Homo sapien
tataggtgtcttccatccgctagag

SEQ ID NO: 4601288 - DNA, 25 bp, Homo sapien
tccgctagagtttaaacagaaatag

SEQ ID NO: 4601289 - DNA, 25 bp, Homo sapien
ggtgcttacatcaaagcccgaggca

SEQ ID NO: 4601290 - DNA, 25 bp, Homo sapien
ttcacgggtttgtagtctggaacaa

SEQ ID NO: 4601291 - DNA, 25 bp, Homo sapien
aataaagacgcttgctcggcaggcc

SEQ ID NO: 4601292 - DNA, 25 bp, Homo sapien
cataacatgctgaaggttcacgggt

SEQ ID NO: 4601293 - DNA, 25 bp, Homo sapien
aaaataaagacgcttgctcggcagg

SEQ ID NO: 4601294 - DNA, 25 bp, Homo sapien
gccacctgtaggagcacaagccctt

SEQ ID NO: 4601295 - DNA, 25 bp, Homo sapien
cttcagccctgggggctattttgcc

SEQ ID NO: 4601296 - DNA, 25 bp, Homo sapien
aggaggccacctgtaggagcacaag

SEQ ID NO: 4601297 - DNA, 25 bp, Homo sapien
ttgcctctatcctctgcagtcaaac

SEQ ID NO: 4601298 - DNA, 25 bp, Homo sapien
tcggtctctcaggatagtatgcagg

SEQ ID NO: 4601299 - DNA, 25 bp, Homo sapien
tcagctaaagataaccacagtgtgc

SEQ ID NO: 4601300 - DNA, 25 bp, Homo sapien
gaaaatcaatcttcgtgccccagag

SEQ ID NO: 4601301 - DNA, 25 bp, Homo sapien
tctggactttcactcgcagggagaa

SEQ ID NO: 4601302 - DNA, 25 bp, Homo sapien
aatattctccaacctaaccaggagc

SEQ ID NO: 4601303 - DNA, 25 bp, Homo sapien
gcccatttgtaagacgagctaaata

SEQ ID NO: 4601304 - DNA, 25 bp, Homo sapien
taaatattctccaacctaaccagga

SEQ ID NO: 4601305 - DNA, 25 bp, Homo sapien
tatgcctgagaacgggcagcccatt

SEQ ID NO: 4601306 - DNA, 25 bp, Homo sapien
tcagtccggcacctgaccgggcttg

SEQ ID NO: 4601307 - DNA, 25 bp, Homo sapien
tattcacatcgttgcaaagtatgtc

SEQ ID NO: 4601308 - DNA, 25 bp, Homo sapien
taatgaagagctctgcgtcggcttg

SEQ ID NO: 4601309 - DNA, 25 bp, Homo sapien
cgggcttggcaaggttcctcttatg

SEQ ID NO: 4601310 - DNA, 25 bp, Homo sapien
caagtggcataggatggtgcagtca

SEQ ID NO: 4601311 - DNA, 25 bp, Homo sapien
ctttcaccggttttccaagtggcat

SEQ ID NO: 4601312 - DNA, 25 bp, Homo sapien
tgtggacctgtaccgctttcaccgg

SEQ ID NO: 4601313 - DNA, 25 bp, Homo sapien
ggagctgaactaccaaacataggaa

SEQ ID NO: 4601314 - DNA, 25 bp, Homo sapien
tcaacatgggcttgcagataacctt

SEQ ID NO: 4601315 - DNA, 25 bp, Homo sapien
caacatgggcttgcagataaccttc

SEQ ID NO: 4601316 - DNA, 25 bp, Homo sapien
ttgactctcccaactggcgttttct

SEQ ID NO: 4601317 - DNA, 25 bp, Homo sapien
ttcaacccagtgcatgggaaattgc

SEQ ID NO: 4601318 - DNA, 25 bp, Homo sapien
gaaattgcccaataagttgactctc

SEQ ID NO: 4601319 - DNA, 25 bp, Homo sapien
gctagaggcttcctgttcaacccag

SEQ ID NO: 4601320 - DNA, 25 bp, Homo sapien
cagtgcttttgtttgtgcaaagggt

SEQ ID NO: 4601321 - DNA, 25 bp, Homo sapien
cagagcccttaactgtgcgacatct

SEQ ID NO: 4601322 - DNA, 25 bp, Homo sapien
gtgtgcaagacagcttttgggagag

SEQ ID NO: 4601323 - DNA, 25 bp, Homo sapien
tgggaacttcaacacatgtgcaggt

SEQ ID NO: 4601324 - DNA, 25 bp, Homo sapien
tgaggacccacgaagtttgctttcc

SEQ ID NO: 4601325 - DNA, 25 bp, Homo sapien
ggcttcccatggatacagctgctgg

SEQ ID NO: 4601326 - DNA, 25 bp, Homo sapien
tattgtgagtcctgtgacagcaagg

SEQ ID NO: 4601327 - DNA, 25 bp, Homo sapien
tgaaaggctcttgattgggtgatga

SEQ ID NO: 4601328 - DNA, 25 bp, Homo sapien
ggctccaaagagtgcccgggaatat

SEQ ID NO: 4601329 - DNA, 25 bp, Homo sapien
tcaaagatcacaccaacagtgacgg

SEQ ID NO: 4601330 - DNA, 25 bp, Homo sapien
gctgccacttggacaataggaataa

SEQ ID NO: 4601331 - DNA, 25 bp, Homo sapien
ccacagaatcagttgggctccaaag

SEQ ID NO: 4601332 - DNA, 25 bp, Homo sapien
cttgtgccaaggaaaacaggtgcga

SEQ ID NO: 4601333 - DNA, 25 bp, Homo sapien
gcaacatagacttacccaggcaggc

SEQ ID NO: 4601334 - DNA, 25 bp, Homo sapien
tgaccaacgggcatcagggaagagt

SEQ ID NO: 4601335 - DNA, 25 bp, Homo sapien
tctaggataaagtcaggtgctgcac

SEQ ID NO: 4601336 - DNA, 25 bp, Homo sapien
taagagttgagatttgatctagttc

SEQ ID NO: 4601337 - DNA, 25 bp, Homo sapien
gagatttgatctagttctgagtttc

SEQ ID NO: 4601338 - DNA, 25 bp, Homo sapien
aaaccctggtgataccattgcccca

SEQ ID NO: 4601339 - DNA, 25 bp, Homo sapien
ttccaaaccctggtgataccattgc

SEQ ID NO: 4601340 - DNA, 25 bp, Homo sapien
tgcaatgcattctacacaaccgtgg

SEQ ID NO: 4601341 - DNA, 25 bp, Homo sapien
caaacacctgtggttaagatgcgca

SEQ ID NO: 4601342 - DNA, 25 bp, Homo sapien
tggaaaagactctcccaagctgtgg

SEQ ID NO: 4601343 - DNA, 25 bp, Homo sapien
catggagatcctagacgagttcgac

SEQ ID NO: 4601344 - DNA, 25 bp, Homo sapien
cactggacagtgaaaacggaagcct

SEQ ID NO: 4601345 - DNA, 25 bp, Homo sapien
tcatagtaggaaccgaaaccctgga

SEQ ID NO: 4601346 - DNA, 25 bp, Homo sapien
ttctgttgttactactgccctcggg

SEQ ID NO: 4601347 - DNA, 25 bp, Homo sapien
ggaatttggataccagtcactggac

SEQ ID NO: 4601348 - DNA, 25 bp, Homo sapien
cttctttgtggccattgtatcaagg

SEQ ID NO: 4601349 - DNA, 25 bp, Homo sapien
tccaggctttatggtggatgatggc

SEQ ID NO: 4601350 - DNA, 25 bp, Homo sapien
caagcttctattgtgaagagctctt

SEQ ID NO: 4601351 - DNA, 25 bp, Homo sapien
cagtagatgtttactgaaaagggaa

SEQ ID NO: 4601352 - DNA, 25 bp, Homo sapien
agcacttcagtgctcttgttttgaa

SEQ ID NO: 4601353 - DNA, 25 bp, Homo sapien
tctaacttcaactgtctcccctccc

SEQ ID NO: 4601354 - DNA, 25 bp, Homo sapien
atcttctaacttcaactgtctcccc

SEQ ID NO: 4601355 - DNA, 25 bp, Homo sapien
ccagcacttcagtgctcttgttttg

SEQ ID NO: 4601356 - DNA, 25 bp, Homo sapien
ctgtatctttcaacgcttccctcat

SEQ ID NO: 4601357 - DNA, 25 bp, Homo sapien
tgtatctttcaacgcttccctcatt

SEQ ID NO: 4601358 - DNA, 25 bp, Homo sapien
tctttcaacgcttccctcatttgcc

SEQ ID NO: 4601359 - DNA, 25 bp, Homo sapien
tatctttcaacgcttccctcatttg

SEQ ID NO: 4601360 - DNA, 25 bp, Homo sapien
cagtgtgtcagaacatctgcaatgg

SEQ ID NO: 4601361 - DNA, 25 bp, Homo sapien
gcttgtcaggtaaggcatagcttca

SEQ ID NO: 4601362 - DNA, 25 bp, Homo sapien
tattaatgtccagttcctaacgtgt

SEQ ID NO: 4601363 - DNA, 25 bp, Homo sapien
caatgcaatatccaagagtcctggg

SEQ ID NO: 4601364 - DNA, 25 bp, Homo sapien
tgggagcattttcaatggctgtctt

SEQ ID NO: 4601365 - DNA, 25 bp, Homo sapien
tcctgctgtatcctaacttgccagg

SEQ ID NO: 4601366 - DNA, 25 bp, Homo sapien
tcttggagaccgttcctgctgtatc

SEQ ID NO: 4601367 - DNA, 25 bp, Homo sapien
caatggctgtcttggagaccgttcc

SEQ ID NO: 4601368 - DNA, 25 bp, Homo sapien
agcctgacaggttatcaagtgggcc

SEQ ID NO: 4601369 - DNA, 25 bp, Homo sapien
agagttgggaaccatgaggtgcccc

SEQ ID NO: 4601370 - DNA, 25 bp, Homo sapien
tgggcctctttgaatccctttttgc

SEQ ID NO: 4601371 - DNA, 25 bp, Homo sapien
tgacaggttatcaagtgggcctctt

SEQ ID NO: 4601372 - DNA, 25 bp, Homo sapien
taacatttgggcatgtgagtccagg

SEQ ID NO: 4601373 - DNA, 25 bp, Homo sapien
gagtagagttgagagctttcatcca

SEQ ID NO: 4601374 - DNA, 25 bp, Homo sapien
tttcatccatttgacatgcaggcat

SEQ ID NO: 4601375 - DNA, 25 bp, Homo sapien
gcaggcattgaaggcatgctagaag

SEQ ID NO: 4601376 - DNA, 25 bp, Homo sapien
tcacatcctcaatcttatctctgtc

SEQ ID NO: 4601377 - DNA, 25 bp, Homo sapien
tctggtgttcacgttatgtggggct

SEQ ID NO: 4601378 - DNA, 25 bp, Homo sapien
ggctattgcattaagccagtcaggc

SEQ ID NO: 4601379 - DNA, 25 bp, Homo sapien
acatcctcaatcttatctctgtcaa

SEQ ID NO: 4601380 - DNA, 25 bp, Homo sapien
tattaatcactttatcaagcagttg

SEQ ID NO: 4601381 - DNA, 25 bp, Homo sapien
taatcaatcaccatcctaagctgtt

SEQ ID NO: 4601382 - DNA, 25 bp, Homo sapien
gatttctacctacttcatctttcca

SEQ ID NO: 4601383 - DNA, 25 bp, Homo sapien
gcattgccggttttaatagaatcca

SEQ ID NO: 4601384 - DNA, 25 bp, Homo sapien
atttggctggctcacttgagttgaa

SEQ ID NO: 4601385 - DNA, 25 bp, Homo sapien
catggcttcaggtcggcatttggct

SEQ ID NO: 4601386 - DNA, 25 bp, Homo sapien
ggctcacttgagttgaaagttgtgg

SEQ ID NO: 4601387 - DNA, 25 bp, Homo sapien
aggacagaatatagcatggcttcag

SEQ ID NO: 4601388 - DNA, 25 bp, Homo sapien
tccaatatgtccaagatgcacattc

SEQ ID NO: 4601389 - DNA, 25 bp, Homo sapien
gatcacactcagtctcataccaaga

SEQ ID NO: 4601390 - DNA, 25 bp, Homo sapien
tttgcatcctgcatccaatatgtcc

SEQ ID NO: 4601391 - DNA, 25 bp, Homo sapien
gacacaacccatagtcttatccagt

SEQ ID NO: 4601392 - DNA, 25 bp, Homo sapien
gcagccttagaccatgatcatcaga

SEQ ID NO: 4601393 - DNA, 25 bp, Homo sapien
cctctgcagccttagaccatgatca

SEQ ID NO: 4601394 - DNA, 25 bp, Homo sapien
tctgcagccttagaccatgatcatc

SEQ ID NO: 4601395 - DNA, 25 bp, Homo sapien
agccttagaccatgatcatcagagc

SEQ ID NO: 4601396 - DNA, 25 bp, Homo sapien
taccacgttgagattcatgtgtttc

SEQ ID NO: 4601397 - DNA, 25 bp, Homo sapien
catgtgtttcaaggtcctccacagg

SEQ ID NO: 4601398 - DNA, 25 bp, Homo sapien
gctgtaggtgctgtaccacgttgag

SEQ ID NO: 4601399 - DNA, 25 bp, Homo sapien
ttcaaggtcctccacaggtaaggca

SEQ ID NO: 4601400 - DNA, 25 bp, Homo sapien
tcatgatgctggagctcaaaggcct

SEQ ID NO: 4601401 - DNA, 25 bp, Homo sapien
tgccctctgcggagcctttgtactg

SEQ ID NO: 4601402 - DNA, 25 bp, Homo sapien
ccttgagggataggaatatgcagca

SEQ ID NO: 4601403 - DNA, 25 bp, Homo sapien
catgtgaaggtatatgcagctgccc

SEQ ID NO: 4601404 - DNA, 25 bp, Homo sapien
gtctgagttgcattactgtatcgaa

SEQ ID NO: 4601405 - DNA, 25 bp, Homo sapien
atgaactgggtagcaatgtctgagt

SEQ ID NO: 4601406 - DNA, 25 bp, Homo sapien
gcaatgtctgagttgcattactgta

SEQ ID NO: 4601407 - DNA, 25 bp, Homo sapien
cattactgtatcgaatatgggccat

SEQ ID NO: 4601408 - DNA, 25 bp, Homo sapien
cacattgtcagtcagatagtcatct

SEQ ID NO: 4601409 - DNA, 25 bp, Homo sapien
gcagctcaaagactcaatacccctt

SEQ ID NO: 4601410 - DNA, 25 bp, Homo sapien
ttaaggatgcatgtacaatagtgat

SEQ ID NO: 4601411 - DNA, 25 bp, Homo sapien
tgtacaatagtgatatgtaagcagc

SEQ ID NO: 4601412 - DNA, 25 bp, Homo sapien
tcatgaagactgtttgaagtttcct

SEQ ID NO: 4601413 - DNA, 25 bp, Homo sapien
ttggaagtaaaggtcagacgaggaa

SEQ ID NO: 4601414 - DNA, 25 bp, Homo sapien
cagaactaagggaacaatatccttc

SEQ ID NO: 4601415 - DNA, 25 bp, Homo sapien
taaaggtcagacgaggaaaagtgac

SEQ ID NO: 4601416 - DNA, 25 bp, Homo sapien
atttccccactctctatacttattg

SEQ ID NO: 4601417 - DNA, 25 bp, Homo sapien
ctactatagcccttaaaagggtcag

SEQ ID NO: 4601418 - DNA, 25 bp, Homo sapien
tacttattgcttgggtatagcttta

SEQ ID NO: 4601419 - DNA, 25 bp, Homo sapien
gggtatagctttaaagtagcccatg

SEQ ID NO: 4601420 - DNA, 25 bp, Homo sapien
gctgaatagcaaattgctcttgagt

SEQ ID NO: 4601421 - DNA, 25 bp, Homo sapien
gatgctgaatagcaaattgctcttg

SEQ ID NO: 4601422 - DNA, 25 bp, Homo sapien
aatagcaaattgctcttgagtgtcc

SEQ ID NO: 4601423 - DNA, 25 bp, Homo sapien
attcagatgctgaatagcaaattgc

SEQ ID NO: 4601424 - DNA, 25 bp, Homo sapien
gcaaccatacattttgttcagtgct

SEQ ID NO: 4601425 - DNA, 25 bp, Homo sapien
gagctgaaagcaaccatacattttg

SEQ ID NO: 4601426 - DNA, 25 bp, Homo sapien
ggacaaggggggagctgaaagcaac

SEQ ID NO: 4601427 - DNA, 25 bp, Homo sapien
gaaggacaaggggggagctgaaagc

SEQ ID NO: 4601428 - DNA, 25 bp, Homo sapien
ggaaagcatgctggccctgaacaca

SEQ ID NO: 4601429 - DNA, 25 bp, Homo sapien
aggaaagcatgctggccctgaacac

SEQ ID NO: 4601430 - DNA, 25 bp, Homo sapien
caaggaaagcatgctggccctgaac

SEQ ID NO: 4601431 - DNA, 25 bp, Homo sapien
aaggaaagcatgctggccctgaaca

SEQ ID NO: 4601432 - DNA, 25 bp, Homo sapien
gtttgttctctggtgggtaggagtg

SEQ ID NO: 4601433 - DNA, 25 bp, Homo sapien
ctcagtgggggtgctttttgagcca

SEQ ID NO: 4601434 - DNA, 25 bp, Homo sapien
ggtgctcagtgggggtgctttttga

SEQ ID NO: 4601435 - DNA, 25 bp, Homo sapien
aaggtgctcagtgggggtgcttttt

SEQ ID NO: 4601436 - DNA, 25 bp, Homo sapien
gtgggggtgctttttgagccaggat

SEQ ID NO: 4601437 - DNA, 25 bp, Homo sapien
atttccggcatgtgtagcaagctcc

SEQ ID NO: 4601438 - DNA, 25 bp, Homo sapien
gtggccagatttccggcatgtgtag

SEQ ID NO: 4601439 - DNA, 25 bp, Homo sapien
cagatttccggcatgtgtagcaagc

SEQ ID NO: 4601440 - DNA, 25 bp, Homo sapien
agtggccagatttccggcatgtgta

SEQ ID NO: 4601441 - DNA, 25 bp, Homo sapien
aaagaacaggagtacaggggcttga

SEQ ID NO: 4601442 - DNA, 25 bp, Homo sapien
gagcaaagaacaggagtacaggggc

SEQ ID NO: 4601443 - DNA, 25 bp, Homo sapien
ctcacggagcaaagaacaggagtac

SEQ ID NO: 4601444 - DNA, 25 bp, Homo sapien
gcaaagaacaggagtacaggggctt

SEQ ID NO: 4601445 - DNA, 25 bp, Homo sapien
tgaggccacttgtagaattcagtgt

SEQ ID NO: 4601446 - DNA, 25 bp, Homo sapien
gtacttttgaactgaggccacttgt

SEQ ID NO: 4601447 - DNA, 25 bp, Homo sapien
tacttttgaactgaggccacttgta

SEQ ID NO: 4601448 - DNA, 25 bp, Homo sapien
gaggccacttgtagaattcagtgtt

SEQ ID NO: 4601449 - DNA, 25 bp, Homo sapien
ctctttgtggggatcaccctgcgat

SEQ ID NO: 4601450 - DNA, 25 bp, Homo sapien
ttgtggggatcaccctgcgataccc

SEQ ID NO: 4601451 - DNA, 25 bp, Homo sapien
gtggggatcaccctgcgatacccac

SEQ ID NO: 4601452 - DNA, 25 bp, Homo sapien
ctttgtggggatcaccctgcgatac

SEQ ID NO: 4601453 - DNA, 25 bp, Homo sapien
tctcattgatcgtgctgctctgcag

SEQ ID NO: 4601454 - DNA, 25 bp, Homo sapien
tctttctctcattgatcgtgctgct

SEQ ID NO: 4601455 - DNA, 25 bp, Homo sapien
tctgcagtaaagtctcaaatggagt

SEQ ID NO: 4601456 - DNA, 25 bp, Homo sapien
ctgctctgcagtaaagtctcaaatg

SEQ ID NO: 4601457 - DNA, 25 bp, Homo sapien
catatcacaaaagtagggtaaattt

SEQ ID NO: 4601458 - DNA, 25 bp, Homo sapien
gcaatgaggcattttcatatcacaa

SEQ ID NO: 4601459 - DNA, 25 bp, Homo sapien
agcccagaaaagcaatgaggcattt

SEQ ID NO: 4601460 - DNA, 25 bp, Homo sapien
ttttcatatcacaaaagtagggtaa

SEQ ID NO: 4601461 - DNA, 25 bp, Homo sapien
cccagtccagggacttggataatta

SEQ ID NO: 4601462 - DNA, 25 bp, Homo sapien
tttggcacccactagcacctttttc

SEQ ID NO: 4601463 - DNA, 25 bp, Homo sapien
ggacttggataattatcttggttca

SEQ ID NO: 4601464 - DNA, 25 bp, Homo sapien
gtttcataagtttggcacccactag

SEQ ID NO: 4601465 - DNA, 25 bp, Homo sapien
ctcctccttgtattcctataaaatt

SEQ ID NO: 4601466 - DNA, 25 bp, Homo sapien
tatttccattgagttctccaacagt

SEQ ID NO: 4601467 - DNA, 25 bp, Homo sapien
cactcctctctggattaaattcttg

SEQ ID NO: 4601468 - DNA, 25 bp, Homo sapien
taggaccaatctccttctactgctc

SEQ ID NO: 4601469 - DNA, 25 bp, Homo sapien
cccatactatttctcttgtgatggc

SEQ ID NO: 4601470 - DNA, 25 bp, Homo sapien
tactatttctcttgtgatggcttcc

SEQ ID NO: 4601471 - DNA, 25 bp, Homo sapien
catactatttctcttgtgatggctt

SEQ ID NO: 4601472 - DNA, 25 bp, Homo sapien
catattgtgtgttccccatactatt

SEQ ID NO: 4601473 - DNA, 25 bp, Homo sapien
agcaatagccgccagaacctctacg

SEQ ID NO: 4601474 - DNA, 25 bp, Homo sapien
ccagaacctctacgggcatctcatt

SEQ ID NO: 4601475 - DNA, 25 bp, Homo sapien
tagttgcccaagcaatagccgccag

SEQ ID NO: 4601476 - DNA, 25 bp, Homo sapien
ttagttgcccaagcaatagccgcca

SEQ ID NO: 4601477 - DNA, 25 bp, Homo sapien
gtcacatctaattaacactggctct

SEQ ID NO: 4601478 - DNA, 25 bp, Homo sapien
acatctaattaacactggctctgta

SEQ ID NO: 4601479 - DNA, 25 bp, Homo sapien
ggctttgttaggacttcttatactc

SEQ ID NO: 4601480 - DNA, 25 bp, Homo sapien
tctcaaagtcacatctaattaacac

SEQ ID NO: 4601481 - DNA, 25 bp, Homo sapien
cagtcatcatttttgatttggccaa

SEQ ID NO: 4601482 - DNA, 25 bp, Homo sapien
catgttgatcaaaatctgggaaatg

SEQ ID NO: 4601483 - DNA, 25 bp, Homo sapien
aattgtttgtttggatggatgccta

SEQ ID NO: 4601484 - DNA, 25 bp, Homo sapien
tctgcaacctggaactaagggtggc

SEQ ID NO: 4601485 - DNA, 25 bp, Homo sapien
tgatggcttcatcgggcccttctcc

SEQ ID NO: 4601486 - DNA, 25 bp, Homo sapien
cgagccgggacgcagcatataaagt

SEQ ID NO: 4601487 - DNA, 25 bp, Homo sapien
catataaagtcatcagcctggccgg

SEQ ID NO: 4601488 - DNA, 25 bp, Homo sapien
aaggagatttgtgggtcaccgagcc

SEQ ID NO: 4601489 - DNA, 25 bp, Homo sapien
agtcagaggtcatagaaccattatc

SEQ ID NO: 4601490 - DNA, 25 bp, Homo sapien
gacccatctattccaacacttttga

SEQ ID NO: 4601491 - DNA, 25 bp, Homo sapien
aaccattatcttgaaagagtgaccc

SEQ ID NO: 4601492 - DNA, 25 bp, Homo sapien
aatcccctgcttccataacgatctt

SEQ ID NO: 4601493 - DNA, 25 bp, Homo sapien
aacgatggcataaaccctctccttg

SEQ ID NO: 4601494 - DNA, 25 bp, Homo sapien
gcctgatttcggctgtcagaagctc

SEQ ID NO: 4601495 - DNA, 25 bp, Homo sapien
gataacagccatgtgccatcgatga

SEQ ID NO: 4601496 - DNA, 25 bp, Homo sapien
catctcgtgaattgcctacctctag

SEQ ID NO: 4601497 - DNA, 25 bp, Homo sapien
ctttcttccttctctcttaactcca

SEQ ID NO: 4601498 - DNA, 25 bp, Homo sapien
tctttcttccttctctcttaactcc

SEQ ID NO: 4601499 - DNA, 25 bp, Homo sapien
tttcttccttctctcttaactccat

SEQ ID NO: 4601500 - DNA, 25 bp, Homo sapien
ctctttcttccttctctcttaactc

SEQ ID NO: 4601501 - DNA, 25 bp, Homo sapien
cttaggtctgctttcgggtttctgc

SEQ ID NO: 4601502 - DNA, 25 bp, Homo sapien
gtctgctttcgggtttctgcacaga

SEQ ID NO: 4601503 - DNA, 25 bp, Homo sapien
taggtctgctttcgggtttctgcac

SEQ ID NO: 4601504 - DNA, 25 bp, Homo sapien
tgccttaggtctgctttcgggtttc

SEQ ID NO: 4601505 - DNA, 25 bp, Homo sapien
tctggatgctcactcaggggtttta

SEQ ID NO: 4601506 - DNA, 25 bp, Homo sapien
cactcaggggttttaccaggcctga

SEQ ID NO: 4601507 - DNA, 25 bp, Homo sapien
cttcacccaactgaggccttctcat

SEQ ID NO: 4601508 - DNA, 25 bp, Homo sapien
tctccaggctgtgccgcttcaccca

SEQ ID NO: 4601509 - DNA, 25 bp, Homo sapien
gctgttctcatatgagcaaaatcaa

SEQ ID NO: 4601510 - DNA, 25 bp, Homo sapien
tgagcaaaatcaagtgaacgttgag

SEQ ID NO: 4601511 - DNA, 25 bp, Homo sapien
caagtgaacgttgaggagactcttg

SEQ ID NO: 4601512 - DNA, 25 bp, Homo sapien
gtttcaggaccatatacggatgtga

SEQ ID NO: 4601513 - DNA, 25 bp, Homo sapien
ttgttctattgatgaagggcctgag

SEQ ID NO: 4601514 - DNA, 25 bp, Homo sapien
tcttcttgttctattgatgaagggc

SEQ ID NO: 4601515 - DNA, 25 bp, Homo sapien
ctaccaaggacaaaggctgccactt

SEQ ID NO: 4601516 - DNA, 25 bp, Homo sapien
aatagagggagatgcacagatctga

SEQ ID NO: 4601517 - DNA, 25 bp, Homo sapien
actaccaaggacaaaggctgccact

SEQ ID NO: 4601518 - DNA, 25 bp, Homo sapien
tagagggagatgcacagatctgagg

SEQ ID NO: 4601519 - DNA, 25 bp, Homo sapien
cactctgcttgggtcaagctttcca

SEQ ID NO: 4601520 - DNA, 25 bp, Homo sapien
tgcttgggtcaagctttccacagcc

SEQ ID NO: 4601521 - DNA, 25 bp, Homo sapien
tctgcttgggtcaagctttccacag

SEQ ID NO: 4601522 - DNA, 25 bp, Homo sapien
tccactctgcttgggtcaagctttc

SEQ ID NO: 4601523 - DNA, 25 bp, Homo sapien
tatacacattgatacactggagacc

SEQ ID NO: 4601524 - DNA, 25 bp, Homo sapien
ctgagactttgttcctcacaggtac

SEQ ID NO: 4601525 - DNA, 25 bp, Homo sapien
tcctcacaggtacattctatacaca

SEQ ID NO: 4601526 - DNA, 25 bp, Homo sapien
cttgtagcaggagcataagatgcat

SEQ ID NO: 4601527 - DNA, 25 bp, Homo sapien
tcttttcactctgagagttctccgt

SEQ ID NO: 4601528 - DNA, 25 bp, Homo sapien
ttttcactctgagagttctccgtga

SEQ ID NO: 4601529 - DNA, 25 bp, Homo sapien
actctgagagttctccgtgagtgcc

SEQ ID NO: 4601530 - DNA, 25 bp, Homo sapien
ttcactctgagagttctccgtgagt

SEQ ID NO: 4601531 - DNA, 25 bp, Homo sapien
gaagtgtagctcttaaaaggtctct

SEQ ID NO: 4601532 - DNA, 25 bp, Homo sapien
gtagccacgaagtcaggaagtgtag

SEQ ID NO: 4601533 - DNA, 25 bp, Homo sapien
tctctgaaggcaataggtgttgaat

SEQ ID NO: 4601534 - DNA, 25 bp, Homo sapien
tcactttagaagactggtagccacg

SEQ ID NO: 4601535 - DNA, 25 bp, Homo sapien
ctgttaaacaagagaattgggagtc

SEQ ID NO: 4601536 - DNA, 25 bp, Homo sapien
caagagaattgggagtcctttgtca

SEQ ID NO: 4601537 - DNA, 25 bp, Homo sapien
tgttaaacaagagaattgggagtcc

SEQ ID NO: 4601538 - DNA, 25 bp, Homo sapien
aaacaagagaattgggagtcctttg

SEQ ID NO: 4601539 - DNA, 25 bp, Homo sapien
ttcatttggcataatttgacctgcc

SEQ ID NO: 4601540 - DNA, 25 bp, Homo sapien
gccttgtacaatttgtagccttctg

SEQ ID NO: 4601541 - DNA, 25 bp, Homo sapien
gagaccattgctgttatcgaaaact

SEQ ID NO: 4601542 - DNA, 25 bp, Homo sapien
tccacatgtagagaccattgctgtt

SEQ ID NO: 4601543 - DNA, 25 bp, Homo sapien
tgaaaagccctagttccagtaaggc

SEQ ID NO: 4601544 - DNA, 25 bp, Homo sapien
cctgccgtgggatgggtgttgaaaa

SEQ ID NO: 4601545 - DNA, 25 bp, Homo sapien
cgtaataggtaatgggtgcctgccg

SEQ ID NO: 4601546 - DNA, 25 bp, Homo sapien
ctgtcaggtaatgggtatcacgtaa

SEQ ID NO: 4601547 - DNA, 25 bp, Homo sapien
gccttcactcttgacctaactttct

SEQ ID NO: 4601548 - DNA, 25 bp, Homo sapien
tcactcttgacctaactttctgctt

SEQ ID NO: 4601549 - DNA, 25 bp, Homo sapien
cttcactcttgacctaactttctgc

SEQ ID NO: 4601550 - DNA, 25 bp, Homo sapien
agtgccttcactcttgacctaactt

SEQ ID NO: 4601551 - DNA, 25 bp, Homo sapien
tccactagagcttcaaatcctggtt

SEQ ID NO: 4601552 - DNA, 25 bp, Homo sapien
cctggtttgctggaatttaatgtta

SEQ ID NO: 4601553 - DNA, 25 bp, Homo sapien
gaaagcaagcattatcatccactag

SEQ ID NO: 4601554 - DNA, 25 bp, Homo sapien
caaatcctggtttgctggaatttaa

SEQ ID NO: 4601555 - DNA, 25 bp, Homo sapien
ttaatgatctttgacccttcagaga

SEQ ID NO: 4601556 - DNA, 25 bp, Homo sapien
gctaacattcgcaaggtatccaaat

SEQ ID NO: 4601557 - DNA, 25 bp, Homo sapien
ttgatgctgacgtcacctttttggc

SEQ ID NO: 4601558 - DNA, 25 bp, Homo sapien
cacctttttggctaacattcgcaag

SEQ ID NO: 4601559 - DNA, 25 bp, Homo sapien
tctaggtctaacctgctgaagtatg

SEQ ID NO: 4601560 - DNA, 25 bp, Homo sapien
taggtctaacctgctgaagtatgca

SEQ ID NO: 4601561 - DNA, 25 bp, Homo sapien
ctgaagtatgcatggatggctaaaa

SEQ ID NO: 4601562 - DNA, 25 bp, Homo sapien
ctgctgaagtatgcatggatggcta

SEQ ID NO: 4601563 - DNA, 25 bp, Homo sapien
cctcagtccatgacgttgacgggaa

SEQ ID NO: 4601564 - DNA, 25 bp, Homo sapien
ttgacgggaatagtcccagggagac

SEQ ID NO: 4601565 - DNA, 25 bp, Homo sapien
aattggagcccaccgatcttacagg

SEQ ID NO: 4601566 - DNA, 25 bp, Homo sapien
gggagacagcccacagcaattggag

SEQ ID NO: 4601567 - DNA, 25 bp, Homo sapien
tctatctgcgtcagtgccggcctga

SEQ ID NO: 4601568 - DNA, 25 bp, Homo sapien
ctgcattggcgtataaattaaaagc

SEQ ID NO: 4601569 - DNA, 25 bp, Homo sapien
tccatctctatctgcgtcagtgccg

SEQ ID NO: 4601570 - DNA, 25 bp, Homo sapien
agctgcattggcgtataaattaaaa

SEQ ID NO: 4601571 - DNA, 25 bp, Homo sapien
cgtggagcctatccctctctttctg

SEQ ID NO: 4601572 - DNA, 25 bp, Homo sapien
agtagcaaaaccaatagcaaaagac

SEQ ID NO: 4601573 - DNA, 25 bp, Homo sapien
ctggcagggaacgtggagcctatcc

SEQ ID NO: 4601574 - DNA, 25 bp, Homo sapien
gcaaaaccaatagcaaaagacacta

SEQ ID NO: 4601575 - DNA, 25 bp, Homo sapien
atggactatcgtacctccccagaga

SEQ ID NO: 4601576 - DNA, 25 bp, Homo sapien
ccaggtgtcagtgtctcatggacta

SEQ ID NO: 4601577 - DNA, 25 bp, Homo sapien
tgcagcatgaataggtaaactcacc

SEQ ID NO: 4601578 - DNA, 25 bp, Homo sapien
tcttgccacattacaccaggtgtca

SEQ ID NO: 4601579 - DNA, 25 bp, Homo sapien
tcctctgtgatttctcagtataata

SEQ ID NO: 4601580 - DNA, 25 bp, Homo sapien
gaccccaaagcatatatgtttcctg

SEQ ID NO: 4601581 - DNA, 25 bp, Homo sapien
cctgtaggcaccctgaaagggaaat

SEQ ID NO: 4601582 - DNA, 25 bp, Homo sapien
gaaatgaaactcttccagcttgtat

SEQ ID NO: 4601583 - DNA, 25 bp, Homo sapien
cagggaacaggtagacatatgggcc

SEQ ID NO: 4601584 - DNA, 25 bp, Homo sapien
tattcatgactcaagatcagggcag

SEQ ID NO: 4601585 - DNA, 25 bp, Homo sapien
tcagggcagtgacaaagcgtgattt

SEQ ID NO: 4601586 - DNA, 25 bp, Homo sapien
tcatcaccgacagcatcatggaccg

SEQ ID NO: 4601587 - DNA, 25 bp, Homo sapien
tccctcagagaagattttgaagtga

SEQ ID NO: 4601588 - DNA, 25 bp, Homo sapien
gaagtgaggtggttagcaatttccc

SEQ ID NO: 4601589 - DNA, 25 bp, Homo sapien
cagtctcggttcctgtgagccttac

SEQ ID NO: 4601590 - DNA, 25 bp, Homo sapien
tcaaacgttttcgtgatccaactgt

SEQ ID NO: 4601591 - DNA, 25 bp, Homo sapien
gcttctcgggcctgcaggcttcaga

SEQ ID NO: 4601592 - DNA, 25 bp, Homo sapien
agaaagaagcttctcgggcctgcag

SEQ ID NO: 4601593 - DNA, 25 bp, Homo sapien
agggagaaagaagcttctcgggcct

SEQ ID NO: 4601594 - DNA, 25 bp, Homo sapien
aaagaagcttctcgggcctgcaggc

SEQ ID NO: 4601595 - DNA, 25 bp, Homo sapien
tgttttaactgtgcccttgtattct

SEQ ID NO: 4601596 - DNA, 25 bp, Homo sapien
gctctgttttaactgtgcccttgta

SEQ ID NO: 4601597 - DNA, 25 bp, Homo sapien
ttaactgtgcccttgtattctttac

SEQ ID NO: 4601598 - DNA, 25 bp, Homo sapien
actgtgcccttgtattctttactga

SEQ ID NO: 4601599 - DNA, 25 bp, Homo sapien
gcactaaacccttcaccttgacttc

SEQ ID NO: 4601600 - DNA, 25 bp, Homo sapien
tcaccttgacttctcttagaacagc

SEQ ID NO: 4601601 - DNA, 25 bp, Homo sapien
ggagaagccgattgttttcttgccc

SEQ ID NO: 4601602 - DNA, 25 bp, Homo sapien
gttggagaagccgattgttttcttg

SEQ ID NO: 4601603 - DNA, 25 bp, Homo sapien
cttggacaaagcattcaatccttgc

SEQ ID NO: 4601604 - DNA, 25 bp, Homo sapien
gcatctcacgttggataattatagg

SEQ ID NO: 4601605 - DNA, 25 bp, Homo sapien
ttcaatccttgcatctcacgttgga

SEQ ID NO: 4601606 - DNA, 25 bp, Homo sapien
cacgttggataattataggccacat

SEQ ID NO: 4601607 - DNA, 25 bp, Homo sapien
gacagagccgaaggagcacttggaa

SEQ ID NO: 4601608 - DNA, 25 bp, Homo sapien
gattctgatctttaactgccgaaga

SEQ ID NO: 4601609 - DNA, 25 bp, Homo sapien
tctttaactgccgaagatatgcagg

SEQ ID NO: 4601610 - DNA, 25 bp, Homo sapien
tatgcaggtggctttgctctcgttc

SEQ ID NO: 4601611 - DNA, 25 bp, Homo sapien
ccagggttgtagggatgtaccccat

SEQ ID NO: 4601612 - DNA, 25 bp, Homo sapien
ctcatagctacgatgaactgatgct

SEQ ID NO: 4601613 - DNA, 25 bp, Homo sapien
gatgctttagaaagacaaaacaccc

SEQ ID NO: 4601614 - DNA, 25 bp, Homo sapien
gtgtatgtgacttgtaaaatccctg

SEQ ID NO: 4601615 - DNA, 25 bp, Homo sapien
catcactgtaattgccttgacatga

SEQ ID NO: 4601616 - DNA, 25 bp, Homo sapien
agcaccaactcagcgcgcgggcttt

SEQ ID NO: 4601617 - DNA, 25 bp, Homo sapien
cgcgggctttgaggtgttttatctt

SEQ ID NO: 4601618 - DNA, 25 bp, Homo sapien
tgacatgaaatagcagcaccaactc

SEQ ID NO: 4601619 - DNA, 25 bp, Homo sapien
ggttcaccaatcagacaaatctcgg

SEQ ID NO: 4601620 - DNA, 25 bp, Homo sapien
agataccgggcagtccacccgacat

SEQ ID NO: 4601621 - DNA, 25 bp, Homo sapien
tatgacgtgcccgtcgagataccgg

SEQ ID NO: 4601622 - DNA, 25 bp, Homo sapien
caaatctcggtgtttgatatgacgt

SEQ ID NO: 4601623 - DNA, 25 bp, Homo sapien
tgtctactgctcactgcatggttgt

SEQ ID NO: 4601624 - DNA, 25 bp, Homo sapien
gctcactgcatggttgtcaacacct

SEQ ID NO: 4601625 - DNA, 25 bp, Homo sapien
gcatggttgtcaacacctggaactc

SEQ ID NO: 4601626 - DNA, 25 bp, Homo sapien
caagtcctgtctactgctcactgca

SEQ ID NO: 4601627 - DNA, 25 bp, Homo sapien
ttctggtgcacattttggacaggtt

SEQ ID NO: 4601628 - DNA, 25 bp, Homo sapien
ccttctggtgcacattttggacagg

SEQ ID NO: 4601629 - DNA, 25 bp, Homo sapien
taattaagacaatgtctccttctgg

SEQ ID NO: 4601630 - DNA, 25 bp, Homo sapien
attaagacaatgtctccttctggtg

SEQ ID NO: 4601631 - DNA, 25 bp, Homo sapien
aataatctgatcaggtttgccaaac

SEQ ID NO: 4601632 - DNA, 25 bp, Homo sapien
taatttgctggatataatgacagca

SEQ ID NO: 4601633 - DNA, 25 bp, Homo sapien
aatgacagcaataatctgatcaggt

SEQ ID NO: 4601634 - DNA, 25 bp, Homo sapien
tgaacaatgtggtaacctgttaatt

SEQ ID NO: 4601635 - DNA, 25 bp, Homo sapien
gcagtggttttgtgggaaacacatt

SEQ ID NO: 4601636 - DNA, 25 bp, Homo sapien
tgcagtggttttgtgggaaacacat

SEQ ID NO: 4601637 - DNA, 25 bp, Homo sapien
gagaccaacagcctcgccactatca

SEQ ID NO: 4601638 - DNA, 25 bp, Homo sapien
caacagcctcgccactatcagtaag

SEQ ID NO: 4601639 - DNA, 25 bp, Homo sapien
gaccaacagcctcgccactatcagt

SEQ ID NO: 4601640 - DNA, 25 bp, Homo sapien
cagcctcgccactatcagtaagtga

SEQ ID NO: 4601641 - DNA, 25 bp, Homo sapien
cagggagtgtttgctgcgttcagac

SEQ ID NO: 4601642 - DNA, 25 bp, Homo sapien
gtcaaaagcactgctgttcagggag

SEQ ID NO: 4601643 - DNA, 25 bp, Homo sapien
ggtaacggctattgctgccactgct

SEQ ID NO: 4601644 - DNA, 25 bp, Homo sapien
cccagcttggtgcatggtaacggct

SEQ ID NO: 4601645 - DNA, 25 bp, Homo sapien
acatccagtcgagcaatctgtcagc

SEQ ID NO: 4601646 - DNA, 25 bp, Homo sapien
ttactcccacatccagtcgagcaat

SEQ ID NO: 4601647 - DNA, 25 bp, Homo sapien
catgtgtgcatctcttactcccaca

SEQ ID NO: 4601648 - DNA, 25 bp, Homo sapien
tctttcacttgcacatgtgtgcatc

SEQ ID NO: 4601649 - DNA, 25 bp, Homo sapien
agaacgctttgctgtaaggacatac

SEQ ID NO: 4601650 - DNA, 25 bp, Homo sapien
tcactcctcgcataattttgtatcc

SEQ ID NO: 4601651 - DNA, 25 bp, Homo sapien
tgtggctagtgtggtgtcaactaca

SEQ ID NO: 4601652 - DNA, 25 bp, Homo sapien
tgtcaactacaccttggctcttttg

SEQ ID NO: 4601653 - DNA, 25 bp, Homo sapien
tggcaattagactcagctgatgggc

SEQ ID NO: 4601654 - DNA, 25 bp, Homo sapien
tcaaaggaggtcgaggaacaatcag

SEQ ID NO: 4601655 - DNA, 25 bp, Homo sapien
tcatttcaaatggagacttacagcg

SEQ ID NO: 4601656 - DNA, 25 bp, Homo sapien
gagcagcagacaccatcgaaatcat

SEQ ID NO: 4601657 - DNA, 25 bp, Homo sapien
agggctttggtgatcactgatgaca

SEQ ID NO: 4601658 - DNA, 25 bp, Homo sapien
gaaatatggccgctctcagggcatc

SEQ ID NO: 4601659 - DNA, 25 bp, Homo sapien
tactgtcgacccctttcaagcaggc

SEQ ID NO: 4601660 - DNA, 25 bp, Homo sapien
aacactcgagggctttggtgatcac

SEQ ID NO: 4601661 - DNA, 25 bp, Homo sapien
tgaacccaaagcacttgacttgacc

SEQ ID NO: 4601662 - DNA, 25 bp, Homo sapien
accaccccacttgggagagagcagc

SEQ ID NO: 4601663 - DNA, 25 bp, Homo sapien
catcttgattaacagggaaagtgtt

SEQ ID NO: 4601664 - DNA, 25 bp, Homo sapien
tgaggtagctggctcttttgccacc

SEQ ID NO: 4601665 - DNA, 25 bp, Homo sapien
ggcttcttgcactgaatgagtcatt

SEQ ID NO: 4601666 - DNA, 25 bp, Homo sapien
cccaaaacaactgcccggaggtcat

SEQ ID NO: 4601667 - DNA, 25 bp, Homo sapien
gagtcatttaagcatctaccagggc

SEQ ID NO: 4601668 - DNA, 25 bp, Homo sapien
cggaggtcatcagcgcagatttcgc

SEQ ID NO: 4601669 - DNA, 25 bp, Homo sapien
tgtgagaaatagttcccataacaac

SEQ ID NO: 4601670 - DNA, 25 bp, Homo sapien
ttgtgagaaatagttcccataacaa

SEQ ID NO: 4601671 - DNA, 25 bp, Homo sapien
tttgtgagaaatagttcccataaca

SEQ ID NO: 4601672 - DNA, 25 bp, Homo sapien
gcgcccttgttgacgcacacttgca

SEQ ID NO: 4601673 - DNA, 25 bp, Homo sapien
aatcttctttgcctcggaggtaggg

SEQ ID NO: 4601674 - DNA, 25 bp, Homo sapien
agtcccgctcaggcgcccttgttga

SEQ ID NO: 4601675 - DNA, 25 bp, Homo sapien
gctcaggcgcccttgttgacgcaca

SEQ ID NO: 4601676 - DNA, 25 bp, Homo sapien
cccttccaggttgccgtaaattatg

SEQ ID NO: 4601677 - DNA, 25 bp, Homo sapien
ccttccaggttgccgtaaattatgc

SEQ ID NO: 4601678 - DNA, 25 bp, Homo sapien
tgcccttccaggttgccgtaaatta

SEQ ID NO: 4601679 - DNA, 25 bp, Homo sapien
gctgcccttccaggttgccgtaaat

SEQ ID NO: 4601680 - DNA, 25 bp, Homo sapien
agtcataaacccaaatggaccctct

SEQ ID NO: 4601681 - DNA, 25 bp, Homo sapien
gcttccaagtcataaacccaaatgg

SEQ ID NO: 4601682 - DNA, 25 bp, Homo sapien
ataaacccaaatggaccctctagct

SEQ ID NO: 4601683 - DNA, 25 bp, Homo sapien
gattttgcttccaagtcataaaccc

SEQ ID NO: 4601684 - DNA, 25 bp, Homo sapien
cttgaacacccatcactgccacgat

SEQ ID NO: 4601685 - DNA, 25 bp, Homo sapien
cagttccttgaacacccatcactgc

SEQ ID NO: 4601686 - DNA, 25 bp, Homo sapien
agttccttgaacacccatcactgcc

SEQ ID NO: 4601687 - DNA, 25 bp, Homo sapien
ccttgaacacccatcactgccacga

SEQ ID NO: 4601688 - DNA, 25 bp, Homo sapien
gcatgtacttctcgggagggcactg

SEQ ID NO: 4601689 - DNA, 25 bp, Homo sapien
ggccataaagcgcatgtacttctcg

SEQ ID NO: 4601690 - DNA, 25 bp, Homo sapien
aaagcgcatgtacttctcgggaggg

SEQ ID NO: 4601691 - DNA, 25 bp, Homo sapien
gagaggcggccataaagcgcatgta

SEQ ID NO: 4601692 - DNA, 25 bp, Homo sapien
aattgactcaacagagccagcctgt

SEQ ID NO: 4601693 - DNA, 25 bp, Homo sapien
cctactggtgtaattgactcaacag

SEQ ID NO: 4601694 - DNA, 25 bp, Homo sapien
acatccacatagagtaaatggaaca

SEQ ID NO: 4601695 - DNA, 25 bp, Homo sapien
gaacatgagtaaagaatctgatcca

SEQ ID NO: 4601696 - DNA, 25 bp, Homo sapien
gttaaaatgaaacttgagcttgtct

SEQ ID NO: 4601697 - DNA, 25 bp, Homo sapien
ttaaaatgaaacttgagcttgtctt

SEQ ID NO: 4601698 - DNA, 25 bp, Homo sapien
gggagaatggagaatcatcccatac

SEQ ID NO: 4601699 - DNA, 25 bp, Homo sapien
ggagctggtgccactgacgtgagga

SEQ ID NO: 4601700 - DNA, 25 bp, Homo sapien
tgaacagcaattaaacacatgctgg

SEQ ID NO: 4601701 - DNA, 25 bp, Homo sapien
tcttcaaaacgtcaagagagttaac

SEQ ID NO: 4601702 - DNA, 25 bp, Homo sapien
caaaagattcttcggcacatctgaa

SEQ ID NO: 4601703 - DNA, 25 bp, Homo sapien
aacaaaagattcttcggcacatctg

SEQ ID NO: 4601704 - DNA, 25 bp, Homo sapien
aagattcttcggcacatctgaagag

SEQ ID NO: 4601705 - DNA, 25 bp, Homo sapien
aaaagattcttcggcacatctgaag

SEQ ID NO: 4601706 - DNA, 25 bp, Homo sapien
catcgccagcggatagagtccaaac

SEQ ID NO: 4601707 - DNA, 25 bp, Homo sapien
ctccacatcgccagcggatagagtc

SEQ ID NO: 4601708 - DNA, 25 bp, Homo sapien
cgccagcggatagagtccaaactcc

SEQ ID NO: 4601709 - DNA, 25 bp, Homo sapien
acatcgccagcggatagagtccaaa

SEQ ID NO: 4601710 - DNA, 25 bp, Homo sapien
cagacaccatctctccagtctgcca

SEQ ID NO: 4601711 - DNA, 25 bp, Homo sapien
agacaccatctctccagtctgccac

SEQ ID NO: 4601712 - DNA, 25 bp, Homo sapien
cttccagacaccatctctccagtct

SEQ ID NO: 4601713 - DNA, 25 bp, Homo sapien
tccagacaccatctctccagtctgc

SEQ ID NO: 4601714 - DNA, 25 bp, Homo sapien
gaaggcagccgatatcataaatcca

SEQ ID NO: 4601715 - DNA, 25 bp, Homo sapien
tcattgggggccaaatctccaggcc

SEQ ID NO: 4601716 - DNA, 25 bp, Homo sapien
gaggcggtgaactgaattcatcttc

SEQ ID NO: 4601717 - DNA, 25 bp, Homo sapien
ttgaaggcagccgatatcataaatc

SEQ ID NO: 4601718 - DNA, 25 bp, Homo sapien
ctgatatggacgagaaagcaaaatc

SEQ ID NO: 4601719 - DNA, 25 bp, Homo sapien
cttttcctactcctgatttgtcaag

SEQ ID NO: 4601720 - DNA, 25 bp, Homo sapien
tttagccttcacatattgagaagtg

SEQ ID NO: 4601721 - DNA, 25 bp, Homo sapien
gatttgtcaagtttaataagttctg

SEQ ID NO: 4601722 - DNA, 25 bp, Homo sapien
tggagatgttcccatcctagttctt

SEQ ID NO: 4601723 - DNA, 25 bp, Homo sapien
ggagatgttcccatcctagttcttc

SEQ ID NO: 4601724 - DNA, 25 bp, Homo sapien
ctggagatgttcccatcctagttct

SEQ ID NO: 4601725 - DNA, 25 bp, Homo sapien
accactccccaataagagccactga

SEQ ID NO: 4601726 - DNA, 25 bp, Homo sapien
gagccactgatcctagataattcac

SEQ ID NO: 4601727 - DNA, 25 bp, Homo sapien
aaatgtgaggatactcatcatttcc

SEQ ID NO: 4601728 - DNA, 25 bp, Homo sapien
gagcttcactgatgtcttcagtgca

SEQ ID NO: 4601729 - DNA, 25 bp, Homo sapien
caccggagccatagttgtgtggaat

SEQ ID NO: 4601730 - DNA, 25 bp, Homo sapien
gccagatttcatccccttcataaag

SEQ ID NO: 4601731 - DNA, 25 bp, Homo sapien
ttaaatagggaatgacaccggagcc

SEQ ID NO: 4601732 - DNA, 25 bp, Homo sapien
tgtgtggaatattcacttcgccaga

SEQ ID NO: 4601733 - DNA, 25 bp, Homo sapien
gagccctcacccttttcatccctgc

SEQ ID NO: 4601734 - DNA, 25 bp, Homo sapien
agagccctcacccttttcatccctg

SEQ ID NO: 4601735 - DNA, 25 bp, Homo sapien
tgcaacatgctttgcacattcccat

SEQ ID NO: 4601736 - DNA, 25 bp, Homo sapien
ccctgcaacatgctttgcacattcc

SEQ ID NO: 4601737 - DNA, 25 bp, Homo sapien
catccaacacgggaacttgggattt

SEQ ID NO: 4601738 - DNA, 25 bp, Homo sapien
caaagggcaacctgacagacttggt

SEQ ID NO: 4601739 - DNA, 25 bp, Homo sapien
cttggtcatagagttttcctgtgca

SEQ ID NO: 4601740 - DNA, 25 bp, Homo sapien
tctccataacaaagcagtgtgctcc

SEQ ID NO: 4601741 - DNA, 25 bp, Homo sapien
ggaggtggtccaaagtcacactcat

SEQ ID NO: 4601742 - DNA, 25 bp, Homo sapien
catcttggtggttgtgactaaagcc

SEQ ID NO: 4601743 - DNA, 25 bp, Homo sapien
taaatagtacttatgtcagcagtcc

SEQ ID NO: 4601744 - DNA, 25 bp, Homo sapien
tgtgttcagttaaagcccagcgttc

SEQ ID NO: 4601745 - DNA, 25 bp, Homo sapien
aactgagacccatgagggcccagac

SEQ ID NO: 4601746 - DNA, 25 bp, Homo sapien
gaaactgagacccatgagggcccag

SEQ ID NO: 4601747 - DNA, 25 bp, Homo sapien
ctgagacccatgagggcccagacag

SEQ ID NO: 4601748 - DNA, 25 bp, Homo sapien
agcccatacagaaaccatctctgtc

SEQ ID NO: 4601749 - DNA, 25 bp, Homo sapien
gatcatgctttatggataattcttc

SEQ ID NO: 4601750 - DNA, 25 bp, Homo sapien
gaaaggatcatgctttatggataat

SEQ ID NO: 4601751 - DNA, 25 bp, Homo sapien
gctttatggataattcttcagaccc

SEQ ID NO: 4601752 - DNA, 25 bp, Homo sapien
ttatggataattcttcagaccctca

SEQ ID NO: 4601753 - DNA, 25 bp, Homo sapien
tcttaaattctggttgtttgatgtt

SEQ ID NO: 4601754 - DNA, 25 bp, Homo sapien
ttcttaaattctggttgtttgatgt

SEQ ID NO: 4601755 - DNA, 25 bp, Homo sapien
gatttgctaagcgctaacatcctgt

SEQ ID NO: 4601756 - DNA, 25 bp, Homo sapien
tttgctaagcgctaacatcctgttc

SEQ ID NO: 4601757 - DNA, 25 bp, Homo sapien
tgctaagcgctaacatcctgttccc

SEQ ID NO: 4601758 - DNA, 25 bp, Homo sapien
ctgatttgctaagcgctaacatcct

SEQ ID NO: 4601759 - DNA, 25 bp, Homo sapien
tagtgtaagaaaacgctgtgcccat

SEQ ID NO: 4601760 - DNA, 25 bp, Homo sapien
tatagatgtagagttcatagtagcc

SEQ ID NO: 4601761 - DNA, 25 bp, Homo sapien
taaaacataactgcccttcggtgcc

SEQ ID NO: 4601762 - DNA, 25 bp, Homo sapien
cagtcctcctgatttaagaagtata

SEQ ID NO: 4601763 - DNA, 25 bp, Homo sapien
ttttctagtattcttaaagtgtggc

SEQ ID NO: 4601764 - DNA, 25 bp, Homo sapien
tagttctgaactctgagataatgtc

SEQ ID NO: 4601765 - DNA, 25 bp, Homo sapien
cctcccgctccagggttagttctga

SEQ ID NO: 4601766 - DNA, 25 bp, Homo sapien
gataatgtcttccttgctgccatca

SEQ ID NO: 4601767 - DNA, 25 bp, Homo sapien
gctgaagatgtcgttggaccacaac

SEQ ID NO: 4601768 - DNA, 25 bp, Homo sapien
acagcatcctaaacacagccctggg

SEQ ID NO: 4601769 - DNA, 25 bp, Homo sapien
aactcaaattgacttatgtagcaga

SEQ ID NO: 4601770 - DNA, 25 bp, Homo sapien
gcaaggagccgctggttgtcagcct

SEQ ID NO: 4601771 - DNA, 25 bp, Homo sapien
ctttccacgagaaagtggtatcttc

SEQ ID NO: 4601772 - DNA, 25 bp, Homo sapien
ccgcctttccacgagaaagtggtat

SEQ ID NO: 4601773 - DNA, 25 bp, Homo sapien
ccacgagaaagtggtatcttctttc

SEQ ID NO: 4601774 - DNA, 25 bp, Homo sapien
ctcccgcctttccacgagaaagtgg

SEQ ID NO: 4601775 - DNA, 25 bp, Homo sapien
tgcacgtctgacaaagccatggcaa

SEQ ID NO: 4601776 - DNA, 25 bp, Homo sapien
tttctgcagtagactcctcctcctt

SEQ ID NO: 4601777 - DNA, 25 bp, Homo sapien
gccatggcaaagcacaactgtcttt

SEQ ID NO: 4601778 - DNA, 25 bp, Homo sapien
caggtactctgaattgtggcgtgca

SEQ ID NO: 4601779 - DNA, 25 bp, Homo sapien
ttcaccatctgtacaaatcactcca

SEQ ID NO: 4601780 - DNA, 25 bp, Homo sapien
tcttcaccatctgtacaaatcactc

SEQ ID NO: 4601781 - DNA, 25 bp, Homo sapien
cttcaccatctgtacaaatcactcc

SEQ ID NO: 4601782 - DNA, 25 bp, Homo sapien
ttcttcaccatctgtacaaatcact

SEQ ID NO: 4601783 - DNA, 25 bp, Homo sapien
tgtccacttcccacaggataggaat

SEQ ID NO: 4601784 - DNA, 25 bp, Homo sapien
tccactgaccgaatacaaatgtcca

SEQ ID NO: 4601785 - DNA, 25 bp, Homo sapien
caccttgtctctgggacctcacata

SEQ ID NO: 4601786 - DNA, 25 bp, Homo sapien
gacctcacataaagagtcctgtgca

SEQ ID NO: 4601787 - DNA, 25 bp, Homo sapien
gatagaaaggacaggcataaccact

SEQ ID NO: 4601788 - DNA, 25 bp, Homo sapien
cactaagagtgaaaggaggcgattc

SEQ ID NO: 4601789 - DNA, 25 bp, Homo sapien
tctatgacagagtgggaatggcacc

SEQ ID NO: 4601790 - DNA, 25 bp, Homo sapien
gaagagtcactttggcaggcaagca

SEQ ID NO: 4601791 - DNA, 25 bp, Homo sapien
catgactacagctgaaaatgcctgc

SEQ ID NO: 4601792 - DNA, 25 bp, Homo sapien
taaaaccgcagctagggtttgacaa

SEQ ID NO: 4601793 - DNA, 25 bp, Homo sapien
gaaacagtcatgatcctaaaaccgc

SEQ ID NO: 4601794 - DNA, 25 bp, Homo sapien
acatggaggtatggtcctggcctcg

SEQ ID NO: 4601795 - DNA, 25 bp, Homo sapien
tcccaacacgatgaattgatttaag

SEQ ID NO: 4601796 - DNA, 25 bp, Homo sapien
taagatcttagttttcaaccagtcc

SEQ ID NO: 4601797 - DNA, 25 bp, Homo sapien
ctccattcccaacacgatgaattga

SEQ ID NO: 4601798 - DNA, 25 bp, Homo sapien
cacgatgaattgatttaagatctta

SEQ ID NO: 4601799 - DNA, 25 bp, Homo sapien
tgtgttggccttattaacattgtag

SEQ ID NO: 4601800 - DNA, 25 bp, Homo sapien
gtagtgcgccaggacaagttttgtg

SEQ ID NO: 4601801 - DNA, 25 bp, Homo sapien
ttgtagtatcttgaccactcaggag

SEQ ID NO: 4601802 - DNA, 25 bp, Homo sapien
tcacaccatcctggtgttgtagtgc

SEQ ID NO: 4601803 - DNA, 25 bp, Homo sapien
aggaggacactctgctatttatctc

SEQ ID NO: 4601804 - DNA, 25 bp, Homo sapien
ccctgacacctccagcgatgggctg

SEQ ID NO: 4601805 - DNA, 25 bp, Homo sapien
gacactctgctatttatctccctga

SEQ ID NO: 4601806 - DNA, 25 bp, Homo sapien
ctgacacctccagcgatgggctgcc

SEQ ID NO: 4601807 - DNA, 25 bp, Homo sapien
tctttgtgttcaaaagcattgttcc

SEQ ID NO: 4601808 - DNA, 25 bp, Homo sapien
tgtgttcaaaagcattgttccctta

SEQ ID NO: 4601809 - DNA, 25 bp, Homo sapien
caaaagcattgttcccttaaacgcg

SEQ ID NO: 4601810 - DNA, 25 bp, Homo sapien
tggttctttgtgttcaaaagcattg

SEQ ID NO: 4601811 - DNA, 25 bp, Homo sapien
tctacattgttcactctatatttgt

SEQ ID NO: 4601812 - DNA, 25 bp, Homo sapien
tctatatttgttcaaggtacgcatg

SEQ ID NO: 4601813 - DNA, 25 bp, Homo sapien
gcatgcatctataattgttctgttg

SEQ ID NO: 4601814 - DNA, 25 bp, Homo sapien
tcaaggtacgcatgcatctataatt

SEQ ID NO: 4601815 - DNA, 25 bp, Homo sapien
acttggaacatatctgaacgtggca

SEQ ID NO: 4601816 - DNA, 25 bp, Homo sapien
gattgccctactgatctgtccaaca

SEQ ID NO: 4601817 - DNA, 25 bp, Homo sapien
caggcatagtgccagatcttttcac

SEQ ID NO: 4601818 - DNA, 25 bp, Homo sapien
cagtcacacgtttcctatataccag

SEQ ID NO: 4601819 - DNA, 25 bp, Homo sapien
cgacatctgtgaagtcccttttgca

SEQ ID NO: 4601820 - DNA, 25 bp, Homo sapien
gacaacctgttcataggttccatgg

SEQ ID NO: 4601821 - DNA, 25 bp, Homo sapien
cccttttgcaatgtgggacaacctg

SEQ ID NO: 4601822 - DNA, 25 bp, Homo sapien
cgtctcaatggccttaacttaccga

SEQ ID NO: 4601823 - DNA, 25 bp, Homo sapien
catccacgttgaaattgatgaatgc

SEQ ID NO: 4601824 - DNA, 25 bp, Homo sapien
ccacgttgaaattgatgaatgcaaa

SEQ ID NO: 4601825 - DNA, 25 bp, Homo sapien
caacatccacgttgaaattgatgaa

SEQ ID NO: 4601826 - DNA, 25 bp, Homo sapien
tcaacatccacgttgaaattgatga

SEQ ID NO: 4601827 - DNA, 25 bp, Homo sapien
cttaacggtgaacagtcaataaact

SEQ ID NO: 4601828 - DNA, 25 bp, Homo sapien
ctcagcacttaacggtgaacagtca

SEQ ID NO: 4601829 - DNA, 25 bp, Homo sapien
gagtcctcagcacttaacggtgaac

SEQ ID NO: 4601830 - DNA, 25 bp, Homo sapien
gcacttaacggtgaacagtcaataa

SEQ ID NO: 4601831 - DNA, 25 bp, Homo sapien
aatcagacaagatctgttgctttca

SEQ ID NO: 4601832 - DNA, 25 bp, Homo sapien
aaatcagacaagatctgttgctttc

SEQ ID NO: 4601833 - DNA, 25 bp, Homo sapien
tcataatgtgatgatagcacgagtg

SEQ ID NO: 4601834 - DNA, 25 bp, Homo sapien
ttagccaaatgcgtgggaatcataa

SEQ ID NO: 4601835 - DNA, 25 bp, Homo sapien
ccaaatgcgtgggaatcataatgtg

SEQ ID NO: 4601836 - DNA, 25 bp, Homo sapien
cacgagtgtaggttcgtttgggaca

SEQ ID NO: 4601837 - DNA, 25 bp, Homo sapien
gtgaacagccaaaggttagcccagt

SEQ ID NO: 4601838 - DNA, 25 bp, Homo sapien
cagccaaaggttagcccagttcttg

SEQ ID NO: 4601839 - DNA, 25 bp, Homo sapien
gatcgactgttttaccacctgtggc

SEQ ID NO: 4601840 - DNA, 25 bp, Homo sapien
ctgatcgactgttttaccacctgtg

SEQ ID NO: 4601841 - DNA, 25 bp, Homo sapien
ttgggtcatcgcaggaaatataaaa

SEQ ID NO: 4601842 - DNA, 25 bp, Homo sapien
gcatatcgtagtgcaaattgggtca

SEQ ID NO: 4601843 - DNA, 25 bp, Homo sapien
atttaagggagcatatcgtagtgca

SEQ ID NO: 4601844 - DNA, 25 bp, Homo sapien
cgtagtgcaaattgggtcatcgcag

SEQ ID NO: 4601845 - DNA, 25 bp, Homo sapien
gatagacgtccgtctccaaaaccgc

SEQ ID NO: 4601846 - DNA, 25 bp, Homo sapien
ctgtggatagatagacgtccgtctc

SEQ ID NO: 4601847 - DNA, 25 bp, Homo sapien
tttgcttcttccactaccgcttggc

SEQ ID NO: 4601848 - DNA, 25 bp, Homo sapien
ctgtagtcaatctgcatgtgattcc

SEQ ID NO: 4601849 - DNA, 25 bp, Homo sapien
caacaagggtttcagcctagagaat

SEQ ID NO: 4601850 - DNA, 25 bp, Homo sapien
acaagggtttcagcctagagaataa

SEQ ID NO: 4601851 - DNA, 25 bp, Homo sapien
agcaacaagggtttcagcctagaga

SEQ ID NO: 4601852 - DNA, 25 bp, Homo sapien
gggtttcagcctagagaataagata

SEQ ID NO: 4601853 - DNA, 25 bp, Homo sapien
tcactgaatcaactatcagcacgca

SEQ ID NO: 4601854 - DNA, 25 bp, Homo sapien
tatcactgctacatatattcactga

SEQ ID NO: 4601855 - DNA, 25 bp, Homo sapien
gagcccatgagctatcactgctaca

SEQ ID NO: 4601856 - DNA, 25 bp, Homo sapien
tgaatcaactatcagcacgcaggcc

SEQ ID NO: 4601857 - DNA, 25 bp, Homo sapien
gacagctccctgatttgccagtgct

SEQ ID NO: 4601858 - DNA, 25 bp, Homo sapien
cacaaactccgttaatggacagctg

SEQ ID NO: 4601859 - DNA, 25 bp, Homo sapien
gaggcccgttctgtattctgctgct

SEQ ID NO: 4601860 - DNA, 25 bp, Homo sapien
cacatgaatcagttgtcaccaccac

SEQ ID NO: 4601861 - DNA, 25 bp, Homo sapien
cattagaactttggtagcacaagca

SEQ ID NO: 4601862 - DNA, 25 bp, Homo sapien
cggatgtgctcgagaacacttggct

SEQ ID NO: 4601863 - DNA, 25 bp, Homo sapien
agtgcaatctgttcctcgccaatca

SEQ ID NO: 4601864 - DNA, 25 bp, Homo sapien
gctgaatgctcatacacatggtgtg

SEQ ID NO: 4601865 - DNA, 25 bp, Homo sapien
gcctttagtaagcctatcctctctg

SEQ ID NO: 4601866 - DNA, 25 bp, Homo sapien
agctgcctttagtaagcctatcctc

SEQ ID NO: 4601867 - DNA, 25 bp, Homo sapien
tgcctttagtaagcctatcctctct

SEQ ID NO: 4601868 - DNA, 25 bp, Homo sapien
gctgcctttagtaagcctatcctct

SEQ ID NO: 4601869 - DNA, 25 bp, Homo sapien
ccataggaatggccactgactccat

SEQ ID NO: 4601870 - DNA, 25 bp, Homo sapien
ccccataggaatggccactgactcc

SEQ ID NO: 4601871 - DNA, 25 bp, Homo sapien
ccctccccataggaatggccactga

SEQ ID NO: 4601872 - DNA, 25 bp, Homo sapien
ctccccataggaatggccactgact

SEQ ID NO: 4601873 - DNA, 25 bp, Homo sapien
gtatatatcacatggctttcactgc

SEQ ID NO: 4601874 - DNA, 25 bp, Homo sapien
gaaccagagatcagctatgcacaat

SEQ ID NO: 4601875 - DNA, 25 bp, Homo sapien
agtggcgacccctaacagatgtcaa

SEQ ID NO: 4601876 - DNA, 25 bp, Homo sapien
aatagtctgggcatgtgttaggccc

SEQ ID NO: 4601877 - DNA, 25 bp, Homo sapien
taagttttggcaccatgacggcatc

SEQ ID NO: 4601878 - DNA, 25 bp, Homo sapien
aacatgggctcatccggttacctac

SEQ ID NO: 4601879 - DNA, 25 bp, Homo sapien
tcagccacaaatagacgcatgagga

SEQ ID NO: 4601880 - DNA, 25 bp, Homo sapien
ggaccctggttagcagatcacagtt

SEQ ID NO: 4601881 - DNA, 25 bp, Homo sapien
gtcattaaatctgaagtttttacca

SEQ ID NO: 4601882 - DNA, 25 bp, Homo sapien
tgaggaattctccaatatgatgata

SEQ ID NO: 4601883 - DNA, 25 bp, Homo sapien
gccactctatttccacatggtcatt

SEQ ID NO: 4601884 - DNA, 25 bp, Homo sapien
gaggaattctccaatatgatgatag

SEQ ID NO: 4601885 - DNA, 25 bp, Homo sapien
caagggaacaccgagaagcattcaa

SEQ ID NO: 4601886 - DNA, 25 bp, Homo sapien
actggacaagggaacaccgagaagc

SEQ ID NO: 4601887 - DNA, 25 bp, Homo sapien
caaaactggacaagggaacaccgag

SEQ ID NO: 4601888 - DNA, 25 bp, Homo sapien
gaacaccgagaagcattcaagtggg

SEQ ID NO: 4601889 - DNA, 25 bp, Homo sapien
gctggatctctcttggcaagacaga

SEQ ID NO: 4601890 - DNA, 25 bp, Homo sapien
tcagacttattaaagaccaagaagc

SEQ ID NO: 4601891 - DNA, 25 bp, Homo sapien
gactgactctcaggtatgattgata

SEQ ID NO: 4601892 - DNA, 25 bp, Homo sapien
ggaacctgtgatttatgactgactc

SEQ ID NO: 4601893 - DNA, 25 bp, Homo sapien
tttatggattgacacccaactggtg

SEQ ID NO: 4601894 - DNA, 25 bp, Homo sapien
aagtaaaggttgcatcagttgcagg

SEQ ID NO: 4601895 - DNA, 25 bp, Homo sapien
gctttttaggtacgttcgagatcca

SEQ ID NO: 4601896 - DNA, 25 bp, Homo sapien
tactgtttgctccaaggactttaag

SEQ ID NO: 4601897 - DNA, 25 bp, Homo sapien
tagaacactctatcagaaattgaat

SEQ ID NO: 4601898 - DNA, 25 bp, Homo sapien
gatgaatcttagaataataggtcac

SEQ ID NO: 4601899 - DNA, 25 bp, Homo sapien
gaattactccatgtatcactgcaat

SEQ ID NO: 4601900 - DNA, 25 bp, Homo sapien
cacacaagcagacagaaatacctct

SEQ ID NO: 4601901 - DNA, 25 bp, Homo sapien
tagggtccaatgttgcatgtcattc

SEQ ID NO: 4601902 - DNA, 25 bp, Homo sapien
ttagtgttacaatgggatgggaccc

SEQ ID NO: 4601903 - DNA, 25 bp, Homo sapien
gattttacagcttggaagtaacact

SEQ ID NO: 4601904 - DNA, 25 bp, Homo sapien
tctttcctccagacgggaagttctc

SEQ ID NO: 4601905 - DNA, 25 bp, Homo sapien
gctccttattttcgtgtgaccacaa

SEQ ID NO: 4601906 - DNA, 25 bp, Homo sapien
tctgtcaggctcaactaaattccga

SEQ ID NO: 4601907 - DNA, 25 bp, Homo sapien
caacttcaaagtgtcgaccatgtgg

SEQ ID NO: 4601908 - DNA, 25 bp, Homo sapien
ttttaagggcccattgtgctccaag

SEQ ID NO: 4601909 - DNA, 25 bp, Homo sapien
ttcatgaaaacaaatgtgctcttca

SEQ ID NO: 4601910 - DNA, 25 bp, Homo sapien
tcatgaaaacaaatgtgctcttcaa

SEQ ID NO: 4601911 - DNA, 25 bp, Homo sapien
tttcatgaaaacaaatgtgctcttc

SEQ ID NO: 4601912 - DNA, 25 bp, Homo sapien
aaagacaactgagaaagaccttgga

SEQ ID NO: 4601913 - DNA, 25 bp, Homo sapien
gagaaagaccttggaggacgacaaa

SEQ ID NO: 4601914 - DNA, 25 bp, Homo sapien
agacaactgagaaagaccttggagg

SEQ ID NO: 4601915 - DNA, 25 bp, Homo sapien
actgagaaagaccttggaggacgac

SEQ ID NO: 4601916 - DNA, 25 bp, Homo sapien
catgaagggtgcttagagggatccc

SEQ ID NO: 4601917 - DNA, 25 bp, Homo sapien
cctgggcaaggacacgagaaagttg

SEQ ID NO: 4601918 - DNA, 25 bp, Homo sapien
tactaggtcgtatgagcaagggaag

SEQ ID NO: 4601919 - DNA, 25 bp, Homo sapien
tcacgatcagtaggaaaaccagttg

SEQ ID NO: 4601920 - DNA, 25 bp, Homo sapien
ccccgaacaagacccagtgtgtgat

SEQ ID NO: 4601921 - DNA, 25 bp, Homo sapien
ccgaacaagacccagtgtgtgatat

SEQ ID NO: 4601922 - DNA, 25 bp, Homo sapien
agccccgaacaagacccagtgtgtg

SEQ ID NO: 4601923 - DNA, 25 bp, Homo sapien
ccagccccgaacaagacccagtgtg

SEQ ID NO: 4601924 - DNA, 25 bp, Homo sapien
ttctttaactgaatatggagaaagt

SEQ ID NO: 4601925 - DNA, 25 bp, Homo sapien
agtatgtaatgtggttcacaaggga

SEQ ID NO: 4601926 - DNA, 25 bp, Homo sapien
acagatattggggttgctattatta

SEQ ID NO: 4601927 - DNA, 25 bp, Homo sapien
tgtaatgtggttcacaagggagagc

SEQ ID NO: 4601928 - DNA, 25 bp, Homo sapien
atgtgttgtcaatttgcatatttcc

SEQ ID NO: 4601929 - DNA, 25 bp, Homo sapien
cagtgagacctacaaatgtgttgtc

SEQ ID NO: 4601930 - DNA, 25 bp, Homo sapien
agaaggcagccatccgcacaatgtt

SEQ ID NO: 4601931 - DNA, 25 bp, Homo sapien
aactctgatacaaaccagtgagacc

SEQ ID NO: 4601932 - DNA, 25 bp, Homo sapien
cctttgtaggtctgcaaatgagcta

SEQ ID NO: 4601933 - DNA, 25 bp, Homo sapien
taggtctgcaaatgagctagagaag

SEQ ID NO: 4601934 - DNA, 25 bp, Homo sapien
agggcctcctttgtaggtctgcaaa

SEQ ID NO: 4601935 - DNA, 25 bp, Homo sapien
ggcctcctttgtaggtctgcaaatg

SEQ ID NO: 4601936 - DNA, 25 bp, Homo sapien
gaagggattctgcatggttagcgtt

SEQ ID NO: 4601937 - DNA, 25 bp, Homo sapien
gcttcagagctaggaaaactgacaa

SEQ ID NO: 4601938 - DNA, 25 bp, Homo sapien
tgtcatgcccatagatatgcacagc

SEQ ID NO: 4601939 - DNA, 25 bp, Homo sapien
caggataaaatagtggctgggtacc

SEQ ID NO: 4601940 - DNA, 25 bp, Homo sapien
tagagagtcaggcaatacttcacga

SEQ ID NO: 4601941 - DNA, 25 bp, Homo sapien
tacttcacgataagacaacatctgc

SEQ ID NO: 4601942 - DNA, 25 bp, Homo sapien
tcatcttagagagtcaggcaatact

SEQ ID NO: 4601943 - DNA, 25 bp, Homo sapien
caggcaatacttcacgataagacaa

SEQ ID NO: 4601944 - DNA, 25 bp, Homo sapien
tctctctccctttcgcagcgtccct

SEQ ID NO: 4601945 - DNA, 25 bp, Homo sapien
ctttcgcagcgtccctccagcttgc

SEQ ID NO: 4601946 - DNA, 25 bp, Homo sapien
tctccctttcgcagcgtccctccag

SEQ ID NO: 4601947 - DNA, 25 bp, Homo sapien
ttctctctccctttcgcagcgtccc

SEQ ID NO: 4601948 - DNA, 25 bp, Homo sapien
gctccaagtttcatctcagatggaa

SEQ ID NO: 4601949 - DNA, 25 bp, Homo sapien
gctctctgaagaggtcacattgtga

SEQ ID NO: 4601950 - DNA, 25 bp, Homo sapien
cacattgtgaaaatggaacaggtct

SEQ ID NO: 4601951 - DNA, 25 bp, Homo sapien
gagacagacacattattgattttgc

SEQ ID NO: 4601952 - DNA, 25 bp, Homo sapien
caaaatcagtctcgggtgcaggagg

SEQ ID NO: 4601953 - DNA, 25 bp, Homo sapien
taagtgggatcagcaggtgacgtca

SEQ ID NO: 4601954 - DNA, 25 bp, Homo sapien
gagaatgtcgtcatccaagcaggaa

SEQ ID NO: 4601955 - DNA, 25 bp, Homo sapien
taggttcccgcccagactaatgatg

SEQ ID NO: 4601956 - DNA, 25 bp, Homo sapien
tgttgttcttaactagaggctgtga

SEQ ID NO: 4601957 - DNA, 25 bp, Homo sapien
taacatcagaatcattccatcccgg

SEQ ID NO: 4601958 - DNA, 25 bp, Homo sapien
gctgtgaactaagcataacatcaga

SEQ ID NO: 4601959 - DNA, 25 bp, Homo sapien
caaagccatccaggcaaagtcgttt

SEQ ID NO: 4601960 - DNA, 25 bp, Homo sapien
aagcagtttgtggttattaatggcc

SEQ ID NO: 4601961 - DNA, 25 bp, Homo sapien
tactgtacatagctactggttgttg

SEQ ID NO: 4601962 - DNA, 25 bp, Homo sapien
tgtgctaattctatggtaatcaggg

SEQ ID NO: 4601963 - DNA, 25 bp, Homo sapien
gcctagaataatccacagtactcag

SEQ ID NO: 4601964 - DNA, 25 bp, Homo sapien
tctccggcccagtaaaccagtgctt

SEQ ID NO: 4601965 - DNA, 25 bp, Homo sapien
tagtatgattaacagagctcagcgt

SEQ ID NO: 4601966 - DNA, 25 bp, Homo sapien
tgcctgcctgcctaatgttacatct

SEQ ID NO: 4601967 - DNA, 25 bp, Homo sapien
tctttcatagtcaaaccatgcatgg

SEQ ID NO: 4601968 - DNA, 25 bp, Homo sapien
gccttggtgctcactgtcagcggga

SEQ ID NO: 4601969 - DNA, 25 bp, Homo sapien
agaggatctgcacacacagagagtc

SEQ ID NO: 4601970 - DNA, 25 bp, Homo sapien
gacatggcctgtctctagctgagga

SEQ ID NO: 4601971 - DNA, 25 bp, Homo sapien
tagctgaggagcttggtcacccttg

SEQ ID NO: 4601972 - DNA, 25 bp, Homo sapien
aggattaatccgaagtcaacatggc

SEQ ID NO: 4601973 - DNA, 25 bp, Homo sapien
aagatagtgcatcctaacccctgcg

SEQ ID NO: 4601974 - DNA, 25 bp, Homo sapien
taagtacccgctgttacacaaggag

SEQ ID NO: 4601975 - DNA, 25 bp, Homo sapien
gtgtttaggtcaagagtgctccgct

SEQ ID NO: 4601976 - DNA, 25 bp, Homo sapien
tacctgttgacttctactgtggggc

SEQ ID NO: 4601977 - DNA, 25 bp, Homo sapien
ctcatccctcgaaacaaaccatttt

SEQ ID NO: 4601978 - DNA, 25 bp, Homo sapien
tataaataataactttgcattgcta

SEQ ID NO: 4601979 - DNA, 25 bp, Homo sapien
tgacctttcaccctcgagatcctca

SEQ ID NO: 4601980 - DNA, 25 bp, Homo sapien
tctctaatgaactgagcatccaagg

SEQ ID NO: 4601981 - DNA, 25 bp, Homo sapien
caggtgagggcctaatgatttccta

SEQ ID NO: 4601982 - DNA, 25 bp, Homo sapien
ggaattcaaccatgtcaaggcaatc

SEQ ID NO: 4601983 - DNA, 25 bp, Homo sapien
ggcatgcacaaggatgctcatggta

SEQ ID NO: 4601984 - DNA, 25 bp, Homo sapien
ttacttacagttgtcttcacggcca

SEQ ID NO: 4601985 - DNA, 25 bp, Homo sapien
tacttacagttgtcttcacggccac

SEQ ID NO: 4601986 - DNA, 25 bp, Homo sapien
acttacagttgtcttcacggccaca

SEQ ID NO: 4601987 - DNA, 25 bp, Homo sapien
catcagcagcataagcaacctcaat

SEQ ID NO: 4601988 - DNA, 25 bp, Homo sapien
gcagcataagcaacctcaataccat

SEQ ID NO: 4601989 - DNA, 25 bp, Homo sapien
gcataagcaacctcaataccataat

SEQ ID NO: 4601990 - DNA, 25 bp, Homo sapien
taagcaacctcaataccataatgca

SEQ ID NO: 4601991 - DNA, 25 bp, Homo sapien
tcaggaaagctccaaagccttagga

SEQ ID NO: 4601992 - DNA, 25 bp, Homo sapien
gcagaattttccacatcgcagggaa

SEQ ID NO: 4601993 - DNA, 25 bp, Homo sapien
ttgaccagaagacctacatgatggg

SEQ ID NO: 4601994 - DNA, 25 bp, Homo sapien
tcaactgagtgaccataggacagag

SEQ ID NO: 4601995 - DNA, 25 bp, Homo sapien
tacatagagagcgtctcagcatgac

SEQ ID NO: 4601996 - DNA, 25 bp, Homo sapien
catgacgctcatgacgctgaaagtc

SEQ ID NO: 4601997 - DNA, 25 bp, Homo sapien
gtctcagcatgacgctcatgacgct

SEQ ID NO: 4601998 - DNA, 25 bp, Homo sapien
gctcatgacgctgaaagtcatcatc

SEQ ID NO: 4601999 - DNA, 25 bp, Homo sapien
tttcttgtgcatggaggcatccctg

SEQ ID NO: 4602000 - DNA, 25 bp, Homo sapien
aggcccataggctctgcaatccgag

SEQ ID NO: 4602001 - DNA, 25 bp, Homo sapien
gggaagttcattgccaggcccatag

SEQ ID NO: 4602002 - DNA, 25 bp, Homo sapien
tgcaatccgagaaaaggctgaattt

SEQ ID NO: 4602003 - DNA, 25 bp, Homo sapien
tcttctcgatgaggcgatggacaca

SEQ ID NO: 4602004 - DNA, 25 bp, Homo sapien
gatggacacaaataaacagccactg

SEQ ID NO: 4602005 - DNA, 25 bp, Homo sapien
tctcgatgaggcgatggacacaaat

SEQ ID NO: 4602006 - DNA, 25 bp, Homo sapien
gaggcgatggacacaaataaacagc

SEQ ID NO: 4602007 - DNA, 25 bp, Homo sapien
caaagcgtttgggaataagtgagca

SEQ ID NO: 4602008 - DNA, 25 bp, Homo sapien
ttgatagggttagaatcctgcaggc

SEQ ID NO: 4602009 - DNA, 25 bp, Homo sapien
gctccgctcacactgaatatgcaga

SEQ ID NO: 4602010 - DNA, 25 bp, Homo sapien
tatgcagcgggatgtctgcttagca

SEQ ID NO: 4602011 - DNA, 25 bp, Homo sapien
gggaaaatgatctgattggatggtc

SEQ ID NO: 4602012 - DNA, 25 bp, Homo sapien
cagcagacggccatcgttgcaaggg

SEQ ID NO: 4602013 - DNA, 25 bp, Homo sapien
aaataaacaatgcatgcaagttcat

SEQ ID NO: 4602014 - DNA, 25 bp, Homo sapien
tgcaagttcatgattgtcatcatta

SEQ ID NO: 4602015 - DNA, 25 bp, Homo sapien
tgcaaggggcagctgatctcctttt

SEQ ID NO: 4602016 - DNA, 25 bp, Homo sapien
tcaaatgctcggattttaaatcaga

SEQ ID NO: 4602017 - DNA, 25 bp, Homo sapien
caaatgctcggattttaaatcagat

SEQ ID NO: 4602018 - DNA, 25 bp, Homo sapien
tcttgcaaaatgtcccttcccactg

SEQ ID NO: 4602019 - DNA, 25 bp, Homo sapien
ccccatcttggcttcagatcttctc

SEQ ID NO: 4602020 - DNA, 25 bp, Homo sapien
tgcccccatcttggcttcagatctt

SEQ ID NO: 4602021 - DNA, 25 bp, Homo sapien
ttaggaatcctcttgcaaaatgtcc

SEQ ID NO: 4602022 - DNA, 25 bp, Homo sapien
ccctttgccgtgaaggcatcaagca

SEQ ID NO: 4602023 - DNA, 25 bp, Homo sapien
aagagaaagagcctgcgtcttccgc

SEQ ID NO: 4602024 - DNA, 25 bp, Homo sapien
gctccggtatacagtccacgttttc

SEQ ID NO: 4602025 - DNA, 25 bp, Homo sapien
ctgagcctgtctcagcgcatcctgg

SEQ ID NO: 4602026 - DNA, 25 bp, Homo sapien
tgacagcttttgcttaatccagaac

SEQ ID NO: 4602027 - DNA, 25 bp, Homo sapien
gaaaattggaccaatattgacagct

SEQ ID NO: 4602028 - DNA, 25 bp, Homo sapien
taataaaaccctgtatgtactggga

SEQ ID NO: 4602029 - DNA, 25 bp, Homo sapien
tgtactgggatcaaataactcattt

SEQ ID NO: 4602030 - DNA, 25 bp, Homo sapien
gatcatcccatttattctgaggaag

SEQ ID NO: 4602031 - DNA, 25 bp, Homo sapien
taaacagccatcaggatcatcccat

SEQ ID NO: 4602032 - DNA, 25 bp, Homo sapien
cagccatcaggatcatcccatttat

SEQ ID NO: 4602033 - DNA, 25 bp, Homo sapien
aacaaatcctctccacttaaacagc

SEQ ID NO: 4602034 - DNA, 25 bp, Homo sapien
tctattacagctatcatagctgaga

SEQ ID NO: 4602035 - DNA, 25 bp, Homo sapien
tattacagctatcatagctgagatt

SEQ ID NO: 4602036 - DNA, 25 bp, Homo sapien
ttttctattacagctatcatagctg

SEQ ID NO: 4602037 - DNA, 25 bp, Homo sapien
ttctattacagctatcatagctgag

SEQ ID NO: 4602038 - DNA, 25 bp, Homo sapien
tacaccaacacttgcgttgggaaga

SEQ ID NO: 4602039 - DNA, 25 bp, Homo sapien
caacacttgcgttgggaagatctgg

SEQ ID NO: 4602040 - DNA, 25 bp, Homo sapien
ggttcttcttcaggaccgatacacc

SEQ ID NO: 4602041 - DNA, 25 bp, Homo sapien
ggaccgatacaccaacacttgcgtt

SEQ ID NO: 4602042 - DNA, 25 bp, Homo sapien
tatccttcttgcctctcgaccacaa

SEQ ID NO: 4602043 - DNA, 25 bp, Homo sapien
ctgtatccttcttgcctctcgacca

SEQ ID NO: 4602044 - DNA, 25 bp, Homo sapien
cttgcctctcgaccacaagttttgt

SEQ ID NO: 4602045 - DNA, 25 bp, Homo sapien
cttcttgcctctcgaccacaagttt

SEQ ID NO: 4602046 - DNA, 25 bp, Homo sapien
ggtggagaacaccagatctcctagg

SEQ ID NO: 4602047 - DNA, 25 bp, Homo sapien
agggtggataagattcccagactgc

SEQ ID NO: 4602048 - DNA, 25 bp, Homo sapien
ccagactgcggctgatgttctatat

SEQ ID NO: 4602049 - DNA, 25 bp, Homo sapien
gataagattcccagactgcggctga

SEQ ID NO: 4602050 - DNA, 25 bp, Homo sapien
tgggctttcccggatgcttactgct

SEQ ID NO: 4602051 - DNA, 25 bp, Homo sapien
gatgcttactgctgcctgagcacac

SEQ ID NO: 4602052 - DNA, 25 bp, Homo sapien
gctttcccggatgcttactgctgcc

SEQ ID NO: 4602053 - DNA, 25 bp, Homo sapien
ttcccggatgcttactgctgcctga

SEQ ID NO: 4602054 - DNA, 25 bp, Homo sapien
tactcctatgtaagcaccatgtttc

SEQ ID NO: 4602055 - DNA, 25 bp, Homo sapien
agtattaggatatggcaaattggca

SEQ ID NO: 4602056 - DNA, 25 bp, Homo sapien
gatgtcatctccctctaaacctgct

SEQ ID NO: 4602057 - DNA, 25 bp, Homo sapien
gcaaattggcaagctcctttacaga

SEQ ID NO: 4602058 - DNA, 25 bp, Homo sapien
tctgactttttgccaaacctcttct

SEQ ID NO: 4602059 - DNA, 25 bp, Homo sapien
ttaatgcacagtctgactttttgcc

SEQ ID NO: 4602060 - DNA, 25 bp, Homo sapien
tagacttcttgaaagtgtgttttta

SEQ ID NO: 4602061 - DNA, 25 bp, Homo sapien
tgtgtttttaatgcacagtctgact

SEQ ID NO: 4602062 - DNA, 25 bp, Homo sapien
tcttacttctgaattgccctgcaag

SEQ ID NO: 4602063 - DNA, 25 bp, Homo sapien
tacttctgaattgccctgcaagcac

SEQ ID NO: 4602064 - DNA, 25 bp, Homo sapien
ttcttacttctgaattgccctgcaa

SEQ ID NO: 4602065 - DNA, 25 bp, Homo sapien
ttacttctgaattgccctgcaagca

SEQ ID NO: 4602066 - DNA, 25 bp, Homo sapien
tcggagacaccaaatatcatagctt

SEQ ID NO: 4602067 - DNA, 25 bp, Homo sapien
ccaaatatcatagctttaatgacct

SEQ ID NO: 4602068 - DNA, 25 bp, Homo sapien
tcatagctttaatgaccttcttctc

SEQ ID NO: 4602069 - DNA, 25 bp, Homo sapien
ttcctttcctctcggagacaccaaa

SEQ ID NO: 4602070 - DNA, 25 bp, Homo sapien
ctggaaacaaggacatacgccacct

SEQ ID NO: 4602071 - DNA, 25 bp, Homo sapien
aacaaggacatacgccacctggctg

SEQ ID NO: 4602072 - DNA, 25 bp, Homo sapien
ggaaacaaggacatacgccacctgg

SEQ ID NO: 4602073 - DNA, 25 bp, Homo sapien
aaacaaggacatacgccacctggct

SEQ ID NO: 4602074 - DNA, 25 bp, Homo sapien
caaaggttttataccctgttctcag

SEQ ID NO: 4602075 - DNA, 25 bp, Homo sapien
cagttcactttgagccctgttcaca

SEQ ID NO: 4602076 - DNA, 25 bp, Homo sapien
tataccctgttctcagttcactttg

SEQ ID NO: 4602077 - DNA, 25 bp, Homo sapien
ttcacaaatactgtcaccccaattc

SEQ ID NO: 4602078 - DNA, 25 bp, Homo sapien
gagcagtctgcattttaactacctc

SEQ ID NO: 4602079 - DNA, 25 bp, Homo sapien
aattctgagaccaggatcgagcagt

SEQ ID NO: 4602080 - DNA, 25 bp, Homo sapien
gaaccacacctcccgaattctgaga

SEQ ID NO: 4602081 - DNA, 25 bp, Homo sapien
tccacatcaagtgatagatcaaagg

SEQ ID NO: 4602082 - DNA, 25 bp, Homo sapien
gctacttcgattaacaccagctgca

SEQ ID NO: 4602083 - DNA, 25 bp, Homo sapien
aaaccctgctgtcatccgagcgtga

SEQ ID NO: 4602084 - DNA, 25 bp, Homo sapien
cagctgcacatctctggtgactgct

SEQ ID NO: 4602085 - DNA, 25 bp, Homo sapien
gatgtcccctccagctacttcgatt

SEQ ID NO: 4602086 - DNA, 25 bp, Homo sapien
tatcatcaatggagcccacacatcc

SEQ ID NO: 4602087 - DNA, 25 bp, Homo sapien
tggtcataaccatccttatcatcaa

SEQ ID NO: 4602088 - DNA, 25 bp, Homo sapien
tggactttaggcatactccctgcat

SEQ ID NO: 4602089 - DNA, 25 bp, Homo sapien
ccacccctggactttaggcatactc

SEQ ID NO: 4602090 - DNA, 25 bp, Homo sapien
aaggggccactctaaattgccatcg

SEQ ID NO: 4602091 - DNA, 25 bp, Homo sapien
tctaaattgccatcgccccctctgt

SEQ ID NO: 4602092 - DNA, 25 bp, Homo sapien
ggggccactctaaattgccatcgcc

SEQ ID NO: 4602093 - DNA, 25 bp, Homo sapien
ggccactctaaattgccatcgcccc

SEQ ID NO: 4602094 - DNA, 25 bp, Homo sapien
tgagttctgaagtacagtcacaccc

SEQ ID NO: 4602095 - DNA, 25 bp, Homo sapien
tttgatagacaggtctccgaggact

SEQ ID NO: 4602096 - DNA, 25 bp, Homo sapien
ccgaggactgtcttgtatgtcagca

SEQ ID NO: 4602097 - DNA, 25 bp, Homo sapien
tgtcagcatcggtgaaaatgagttc

SEQ ID NO: 4602098 - DNA, 25 bp, Homo sapien
gccaacagcaacatctcaaagtaca

SEQ ID NO: 4602099 - DNA, 25 bp, Homo sapien
agccaacagcaacatctcaaagtac

SEQ ID NO: 4602100 - DNA, 25 bp, Homo sapien
gaagaggcccaagcctagaatctgc

SEQ ID NO: 4602101 - DNA, 25 bp, Homo sapien
ctgaagaggcccaagcctagaatct

SEQ ID NO: 4602102 - DNA, 25 bp, Homo sapien
gcaatctgtgctacaagtttatccc

SEQ ID NO: 4602103 - DNA, 25 bp, Homo sapien
catagaaaactagttgttgatcttt

SEQ ID NO: 4602104 - DNA, 25 bp, Homo sapien
tcatggttcacagggggttccatca

SEQ ID NO: 4602105 - DNA, 25 bp, Homo sapien
tgcaggcctgcaatctgtgctacaa

SEQ ID NO: 4602106 - DNA, 25 bp, Homo sapien
gattggcacttggatgcagcacgct

SEQ ID NO: 4602107 - DNA, 25 bp, Homo sapien
gcagagcctgccgatccctctaagt

SEQ ID NO: 4602108 - DNA, 25 bp, Homo sapien
ctgattggcacttggatgcagcacg

SEQ ID NO: 4602109 - DNA, 25 bp, Homo sapien
gcctgccgatccctctaagtcaggg

SEQ ID NO: 4602110 - DNA, 25 bp, Homo sapien
gtccccacgtgatccaggctgacta

SEQ ID NO: 4602111 - DNA, 25 bp, Homo sapien
ttgctatactccaactcccagcggg

SEQ ID NO: 4602112 - DNA, 25 bp, Homo sapien
caggctgactattgctatactccaa

SEQ ID NO: 4602113 - DNA, 25 bp, Homo sapien
cgtgatccaggctgactattgctat

SEQ ID NO: 4602114 - DNA, 25 bp, Homo sapien
tgcaggaaaagatcccaggtatcca

SEQ ID NO: 4602115 - DNA, 25 bp, Homo sapien
gcaggaaaagatcccaggtatccat

SEQ ID NO: 4602116 - DNA, 25 bp, Homo sapien
catgcaggaaaagatcccaggtatc

SEQ ID NO: 4602117 - DNA, 25 bp, Homo sapien
accatgcaggaaaagatcccaggta

SEQ ID NO: 4602118 - DNA, 25 bp, Homo sapien
tcaatgcactggcagaacatttcca

SEQ ID NO: 4602119 - DNA, 25 bp, Homo sapien
gaagaaggagtctcgtctcaaggac

SEQ ID NO: 4602120 - DNA, 25 bp, Homo sapien
tgttctgtcaacgatgctgaagagc

SEQ ID NO: 4602121 - DNA, 25 bp, Homo sapien
gaagagctggctgcaactatccacc

SEQ ID NO: 4602122 - DNA, 25 bp, Homo sapien
cctgctggtgccctgtccacaccca

SEQ ID NO: 4602123 - DNA, 25 bp, Homo sapien
cctgttcccgcctgctggtgccctg

SEQ ID NO: 4602124 - DNA, 25 bp, Homo sapien
ctgctggtgccctgtccacacccac

SEQ ID NO: 4602125 - DNA, 25 bp, Homo sapien
gttcccgcctgctggtgccctgtcc

SEQ ID NO: 4602126 - DNA, 25 bp, Homo sapien
tctttcccgacattgttgcaggctg

SEQ ID NO: 4602127 - DNA, 25 bp, Homo sapien
tcccgacattgttgcaggctgaaca

SEQ ID NO: 4602128 - DNA, 25 bp, Homo sapien
tctttgttctttcccgacattgttg

SEQ ID NO: 4602129 - DNA, 25 bp, Homo sapien
ctttcccgacattgttgcaggctga

SEQ ID NO: 4602130 - DNA, 25 bp, Homo sapien
gtctccaacattcaatgaagttttt

SEQ ID NO: 4602131 - DNA, 25 bp, Homo sapien
agagatcccgcttacagttcctgcc

SEQ ID NO: 4602132 - DNA, 25 bp, Homo sapien
ccgcttacagttcctgccacattgt

SEQ ID NO: 4602133 - DNA, 25 bp, Homo sapien
gaccttcacagagatcccgcttaca

SEQ ID NO: 4602134 - DNA, 25 bp, Homo sapien
caggtggtgtacaggacctgccaca

SEQ ID NO: 4602135 - DNA, 25 bp, Homo sapien
tcactttcggcttcactgctccaaa

SEQ ID NO: 4602136 - DNA, 25 bp, Homo sapien
tttgaatgaacaggagcaaatgggt

SEQ ID NO: 4602137 - DNA, 25 bp, Homo sapien
ctggcgttttacaggacataggtaa

SEQ ID NO: 4602138 - DNA, 25 bp, Homo sapien
ctgtatccaggaggacgccatgaga

SEQ ID NO: 4602139 - DNA, 25 bp, Homo sapien
ccaggaggacgccatgagagtgcct

SEQ ID NO: 4602140 - DNA, 25 bp, Homo sapien
tgtatccaggaggacgccatgagag

SEQ ID NO: 4602141 - DNA, 25 bp, Homo sapien
tatccaggaggacgccatgagagtg

SEQ ID NO: 4602142 - DNA, 25 bp, Homo sapien
tcggcgtcttccacgtcacatgcag

SEQ ID NO: 4602143 - DNA, 25 bp, Homo sapien
aggctgccggtgctgtttattctcc

SEQ ID NO: 4602144 - DNA, 25 bp, Homo sapien
ttggcaggcccgcagcatatggtgc

SEQ ID NO: 4602145 - DNA, 25 bp, Homo sapien
cgatcttggtggacgttcccgccag

SEQ ID NO: 4602146 - DNA, 25 bp, Homo sapien
gattacaggccgcatattgctgggc

SEQ ID NO: 4602147 - DNA, 25 bp, Homo sapien
ttcattcagagagggaaccagggtg

SEQ ID NO: 4602148 - DNA, 25 bp, Homo sapien
cctctgttgggagccagcttagtca

SEQ ID NO: 4602149 - DNA, 25 bp, Homo sapien
ccctgtgactgctgacgtgatggat

SEQ ID NO: 4602150 - DNA, 25 bp, Homo sapien
ggcgagtcttccaacaaaagtggct

SEQ ID NO: 4602151 - DNA, 25 bp, Homo sapien
tccacaagaacacagtatgcagtgt

SEQ ID NO: 4602152 - DNA, 25 bp, Homo sapien
gactgagtcccacacagaatgcttt

SEQ ID NO: 4602153 - DNA, 25 bp, Homo sapien
taagaacctctagaggcctagtcac

SEQ ID NO: 4602154 - DNA, 25 bp, Homo sapien
tggacagcacccgaaacgctggcct

SEQ ID NO: 4602155 - DNA, 25 bp, Homo sapien
tcccccttgttattcagcaggaaca

SEQ ID NO: 4602156 - DNA, 25 bp, Homo sapien
tgaaacggacggttggaatcctggc

SEQ ID NO: 4602157 - DNA, 25 bp, Homo sapien
gctggcctctcataacctcgagctt

SEQ ID NO: 4602158 - DNA, 25 bp, Homo sapien
cagcacatcgtcaaaattggcagac

SEQ ID NO: 4602159 - DNA, 25 bp, Homo sapien
caggcagggtgtctgtcatgcacat

SEQ ID NO: 4602160 - DNA, 25 bp, Homo sapien
ggcagacgcttgatcagcatttgct

SEQ ID NO: 4602161 - DNA, 25 bp, Homo sapien
catgcacatcgtatgcacatgcttg

SEQ ID NO: 4602162 - DNA, 25 bp, Homo sapien
taaccaaggacggagagacacattc

SEQ ID NO: 4602163 - DNA, 25 bp, Homo sapien
agaaacctgttgagttaccctcttg

SEQ ID NO: 4602164 - DNA, 25 bp, Homo sapien
gttgagttaccctcttgcactgcaa

SEQ ID NO: 4602165 - DNA, 25 bp, Homo sapien
cattctcgaggctgaaaaattagaa

SEQ ID NO: 4602166 - DNA, 25 bp, Homo sapien
gctgtcctgatgctttcaggttgtc

SEQ ID NO: 4602167 - DNA, 25 bp, Homo sapien
gtcctgatgctttcaggttgtcctc

SEQ ID NO: 4602168 - DNA, 25 bp, Homo sapien
tgcacttttctgtacccaatcccca

SEQ ID NO: 4602169 - DNA, 25 bp, Homo sapien
tttctgtacccaatccccatgaggc

SEQ ID NO: 4602170 - DNA, 25 bp, Homo sapien
ctttaaaacactgggcttcacattc

SEQ ID NO: 4602171 - DNA, 25 bp, Homo sapien
ccctttaaaacactgggcttcacat

SEQ ID NO: 4602172 - DNA, 25 bp, Homo sapien
ttaaaacactgggcttcacattctc

SEQ ID NO: 4602173 - DNA, 25 bp, Homo sapien
aaaacactgggcttcacattctcag

SEQ ID NO: 4602174 - DNA, 25 bp, Homo sapien
gagatttgagatttacaatgatcca

SEQ ID NO: 4602175 - DNA, 25 bp, Homo sapien
agatttgagatttacaatgatccag

SEQ ID NO: 4602176 - DNA, 25 bp, Homo sapien
tctgtggatttcactgtgcaatgat

SEQ ID NO: 4602177 - DNA, 25 bp, Homo sapien
ctgagtgttacaagtggggctaggc

SEQ ID NO: 4602178 - DNA, 25 bp, Homo sapien
cttgtattgcatagaagatgaagca

SEQ ID NO: 4602179 - DNA, 25 bp, Homo sapien
gtattgcatagaagatgaagcaact

SEQ ID NO: 4602180 - DNA, 25 bp, Homo sapien
ctctgaatttgcatgtaaggcacaa

SEQ ID NO: 4602181 - DNA, 25 bp, Homo sapien
tatgtcgtttatcacagccaagccc

SEQ ID NO: 4602182 - DNA, 25 bp, Homo sapien
caagcttatgtcgtttatcacagcc

SEQ ID NO: 4602183 - DNA, 25 bp, Homo sapien
tgtaaggcacaacaagcttatgtcg

SEQ ID NO: 4602184 - DNA, 25 bp, Homo sapien
cgcacagtataaatggatcgctcat

SEQ ID NO: 4602185 - DNA, 25 bp, Homo sapien
aatggatcgctcattagcgccttcc

SEQ ID NO: 4602186 - DNA, 25 bp, Homo sapien
gctcattagcgccttccttttttcc

SEQ ID NO: 4602187 - DNA, 25 bp, Homo sapien
cttcccgcacagtataaatggatcg

SEQ ID NO: 4602188 - DNA, 25 bp, Homo sapien
cacgggacaccttgcaagacctgtt

SEQ ID NO: 4602189 - DNA, 25 bp, Homo sapien
tattagcgctctcatgtcgacacat

SEQ ID NO: 4602190 - DNA, 25 bp, Homo sapien
tcagaccacgggacaccttgcaaga

SEQ ID NO: 4602191 - DNA, 25 bp, Homo sapien
gcaagacctgttattagcgctctca

SEQ ID NO: 4602192 - DNA, 25 bp, Homo sapien
tttctctgaggaaaagtgctgtgcc

SEQ ID NO: 4602193 - DNA, 25 bp, Homo sapien
tttccccggttctcagtgaagccca

SEQ ID NO: 4602194 - DNA, 25 bp, Homo sapien
tgtgcctttccccggttctcagtga

SEQ ID NO: 4602195 - DNA, 25 bp, Homo sapien
agtgctgtgcctttccccggttctc

SEQ ID NO: 4602196 - DNA, 25 bp, Homo sapien
aaatgtgtgacctaagctcaggcca

SEQ ID NO: 4602197 - DNA, 25 bp, Homo sapien
ggttaaaaatgtgtgacctaagctc

SEQ ID NO: 4602198 - DNA, 25 bp, Homo sapien
taaaaatgtgtgacctaagctcagg

SEQ ID NO: 4602199 - DNA, 25 bp, Homo sapien
ctgtaggttaaaaatgtgtgaccta

SEQ ID NO: 4602200 - DNA, 25 bp, Homo sapien
ctgtgtcataaactttgctgaacat

SEQ ID NO: 4602201 - DNA, 25 bp, Homo sapien
cctgtgtcataaactttgctgaaca

SEQ ID NO: 4602202 - DNA, 25 bp, Homo sapien
tttccatgaacccactttaccagct

SEQ ID NO: 4602203 - DNA, 25 bp, Homo sapien
ccatgaacccactttaccagctgtt

SEQ ID NO: 4602204 - DNA, 25 bp, Homo sapien
tatagtttataaatcggcagtacgg

SEQ ID NO: 4602205 - DNA, 25 bp, Homo sapien
gaacgaaggcgatatgaactgaagg

SEQ ID NO: 4602206 - DNA, 25 bp, Homo sapien
tccaaatacgaagtgagatcctgag

SEQ ID NO: 4602207 - DNA, 25 bp, Homo sapien
gagatcatggtcatatgaggtccta

SEQ ID NO: 4602208 - DNA, 25 bp, Homo sapien
cactataactgaattcgccatgaac

SEQ ID NO: 4602209 - DNA, 25 bp, Homo sapien
caggaagagacacgctttaggcagc

SEQ ID NO: 4602210 - DNA, 25 bp, Homo sapien
tggatagaaagggttgaccagtgtc

SEQ ID NO: 4602211 - DNA, 25 bp, Homo sapien
gaaccaagacgtcttcctgaacagg

SEQ ID NO: 4602212 - DNA, 25 bp, Homo sapien
cataacaaaaaagcttggtcatgat

SEQ ID NO: 4602213 - DNA, 25 bp, Homo sapien
caggggaaactttagcagcaaatac

SEQ ID NO: 4602214 - DNA, 25 bp, Homo sapien
tggaatactgcttatcaggggaaac

SEQ ID NO: 4602215 - DNA, 25 bp, Homo sapien
gatgtcaaaagataacttatctcaa

SEQ ID NO: 4602216 - DNA, 25 bp, Homo sapien
ttcaaaaatgatcaagcagggccag

SEQ ID NO: 4602217 - DNA, 25 bp, Homo sapien
caccagatctctggaggagaatgct

SEQ ID NO: 4602218 - DNA, 25 bp, Homo sapien
tccctcgggtctgttcctggatttc

SEQ ID NO: 4602219 - DNA, 25 bp, Homo sapien
aaaggcagtgtgagacaccagatct

SEQ ID NO: 4602220 - DNA, 25 bp, Homo sapien
cttctaccaagcagccacgtcagta

SEQ ID NO: 4602221 - DNA, 25 bp, Homo sapien
ttcggaaggtcctgtatgtctactc

SEQ ID NO: 4602222 - DNA, 25 bp, Homo sapien
tgtctactccataggaccctagtgg

SEQ ID NO: 4602223 - DNA, 25 bp, Homo sapien
cataggaccctagtggtaaacttct

SEQ ID NO: 4602224 - DNA, 25 bp, Homo sapien
tcagtatccatcattgaaggtcaag

SEQ ID NO: 4602225 - DNA, 25 bp, Homo sapien
tcattgaaggtcaaggcattgacag

SEQ ID NO: 4602226 - DNA, 25 bp, Homo sapien
tctataaaaggcttcagtatccatc

SEQ ID NO: 4602227 - DNA, 25 bp, Homo sapien
taaaaggcttcagtatccatcattg

SEQ ID NO: 4602228 - DNA, 25 bp, Homo sapien
cacttgctgcctgggcatgcaggaa

SEQ ID NO: 4602229 - DNA, 25 bp, Homo sapien
acttgctgcctgggcatgcaggaag

SEQ ID NO: 4602230 - DNA, 25 bp, Homo sapien
ccagctcaaagagtgtagactgtac

SEQ ID NO: 4602231 - DNA, 25 bp, Homo sapien
ggccagctcaaagagtgtagactgt

SEQ ID NO: 4602232 - DNA, 25 bp, Homo sapien
tcaaggccagctcaaagagtgtaga

SEQ ID NO: 4602233 - DNA, 25 bp, Homo sapien
caaggccagctcaaagagtgtagac

SEQ ID NO: 4602234 - DNA, 25 bp, Homo sapien
ggtgtacagggagctgttcattaga

SEQ ID NO: 4602235 - DNA, 25 bp, Homo sapien
gtacagggagctgttcattagacct

SEQ ID NO: 4602236 - DNA, 25 bp, Homo sapien
gtggtgtacagggagctgttcatta

SEQ ID NO: 4602237 - DNA, 25 bp, Homo sapien
tggtggtgtacagggagctgttcat

SEQ ID NO: 4602238 - DNA, 25 bp, Homo sapien
tatgaccttgtaaggaggtaagcca

SEQ ID NO: 4602239 - DNA, 25 bp, Homo sapien
ctggagaacaaaggcaaactatgtg

SEQ ID NO: 4602240 - DNA, 25 bp, Homo sapien
gagtgagggttttagcagtatgacc

SEQ ID NO: 4602241 - DNA, 25 bp, Homo sapien
cagattagtcatgccagagtgaggg

SEQ ID NO: 4602242 - DNA, 25 bp, Homo sapien
actgagatatacagaacgtgcatat

SEQ ID NO: 4602243 - DNA, 25 bp, Homo sapien
agaacgtgcatatattgagaaaaac

SEQ ID NO: 4602244 - DNA, 25 bp, Homo sapien
aacgtgcatatattgagaaaaacag

SEQ ID NO: 4602245 - DNA, 25 bp, Homo sapien
ctgagatatacagaacgtgcatata

SEQ ID NO: 4602246 - DNA, 25 bp, Homo sapien
gaagcccacagataatgaatgtccc

SEQ ID NO: 4602247 - DNA, 25 bp, Homo sapien
cagatagtgaatgtggagccaaagt

SEQ ID NO: 4602248 - DNA, 25 bp, Homo sapien
cattgtttcaactgggtgacctacc

SEQ ID NO: 4602249 - DNA, 25 bp, Homo sapien
tgtgattccaattaaggtcttccca

SEQ ID NO: 4602250 - DNA, 25 bp, Homo sapien
tagaggtgcctaatctcacgaatgc

SEQ ID NO: 4602251 - DNA, 25 bp, Homo sapien
caatcatctagcaacgttgagggtc

SEQ ID NO: 4602252 - DNA, 25 bp, Homo sapien
taatgtttgggatgtgtcagcaccc

SEQ ID NO: 4602253 - DNA, 25 bp, Homo sapien
tagataccacaccaaacatgtagag

SEQ ID NO: 4602254 - DNA, 25 bp, Homo sapien
tgttctcacggattcaggaagctgg

SEQ ID NO: 4602255 - DNA, 25 bp, Homo sapien
cctggacaggtcgtcaaggcaagac

SEQ ID NO: 4602256 - DNA, 25 bp, Homo sapien
gacctgccaagggaggaagtctctg

SEQ ID NO: 4602257 - DNA, 25 bp, Homo sapien
gagaactccagatattcaactcagg

SEQ ID NO: 4602258 - DNA, 25 bp, Homo sapien
tggcttcatgcccactgttggcacc

SEQ ID NO: 4602259 - DNA, 25 bp, Homo sapien
ttgagctgctcataaacagaagggc

SEQ ID NO: 4602260 - DNA, 25 bp, Homo sapien
cttgagctgctcataaacagaaggg

SEQ ID NO: 4602261 - DNA, 25 bp, Homo sapien
ggcttcatgcccactgttggcacca

SEQ ID NO: 4602262 - DNA, 25 bp, Homo sapien
tacaaaggctcttgtcaataattcc

SEQ ID NO: 4602263 - DNA, 25 bp, Homo sapien
caactgtgaggaaaactggttggaa

SEQ ID NO: 4602264 - DNA, 25 bp, Homo sapien
ataattccaaggctcccttgcctgc

SEQ ID NO: 4602265 - DNA, 25 bp, Homo sapien
aagcctgttccttttgtggcaactg

SEQ ID NO: 4602266 - DNA, 25 bp, Homo sapien
tctcagcttcagtcttcaggtggga

SEQ ID NO: 4602267 - DNA, 25 bp, Homo sapien
ttgctgtggagtcaagaaacctgag

SEQ ID NO: 4602268 - DNA, 25 bp, Homo sapien
cggagagaactgatcttgtggtcaa

SEQ ID NO: 4602269 - DNA, 25 bp, Homo sapien
gaactcaatggcaggcagtagcaca

SEQ ID NO: 4602270 - DNA, 25 bp, Homo sapien
tcatgtatttaagattccaggatga

SEQ ID NO: 4602271 - DNA, 25 bp, Homo sapien
tgtatttaagattccaggatgagct

SEQ ID NO: 4602272 - DNA, 25 bp, Homo sapien
tatttaagattccaggatgagctcc

SEQ ID NO: 4602273 - DNA, 25 bp, Homo sapien
catgtatttaagattccaggatgag

SEQ ID NO: 4602274 - DNA, 25 bp, Homo sapien
gacctgaccgataatggaattccca

SEQ ID NO: 4602275 - DNA, 25 bp, Homo sapien
tccagagtgaggttgccgactccac

SEQ ID NO: 4602276 - DNA, 25 bp, Homo sapien
caagactggagtatgcagatagccc

SEQ ID NO: 4602277 - DNA, 25 bp, Homo sapien
tccgcaagagctgccttcatgaaag

SEQ ID NO: 4602278 - DNA, 25 bp, Homo sapien
ctataaacgtggagtttcacaagag

SEQ ID NO: 4602279 - DNA, 25 bp, Homo sapien
cattgtgatatatggatgtgatgcc

SEQ ID NO: 4602280 - DNA, 25 bp, Homo sapien
ccttctttgctgtcatacataactc

SEQ ID NO: 4602281 - DNA, 25 bp, Homo sapien
ttctttgctgtcatacataactctt

SEQ ID NO: 4602282 - DNA, 25 bp, Homo sapien
tctcttctagcctgtggacattgtg

SEQ ID NO: 4602283 - DNA, 25 bp, Homo sapien
tgggatgtgacccactgtccttcct

SEQ ID NO: 4602284 - DNA, 25 bp, Homo sapien
gcctcagagttctcttccatcttca

SEQ ID NO: 4602285 - DNA, 25 bp, Homo sapien
ggatgtgacccactgtctttactgc

SEQ ID NO: 4602286 - DNA, 25 bp, Homo sapien
tgtccttcctgtcataggaccctga

SEQ ID NO: 4602287 - DNA, 25 bp, Homo sapien
ggaacagacttaatctgaccaactc

SEQ ID NO: 4602288 - DNA, 25 bp, Homo sapien
cagatgctgcaaaggggctcgagtc

SEQ ID NO: 4602289 - DNA, 25 bp, Homo sapien
taatcgatcctcattcgggaacaga

SEQ ID NO: 4602290 - DNA, 25 bp, Homo sapien
ttagctttcattaatcgatcctcat

SEQ ID NO: 4602291 - DNA, 25 bp, Homo sapien
gctgtctaggccaaagccgtgcaga

SEQ ID NO: 4602292 - DNA, 25 bp, Homo sapien
gtctaggccaaagccgtgcagaaaa

SEQ ID NO: 4602293 - DNA, 25 bp, Homo sapien
aggatggttgtggtgtgcttggtgc

SEQ ID NO: 4602294 - DNA, 25 bp, Homo sapien
ggctgtctaggccaaagccgtgcag

SEQ ID NO: 4602295 - DNA, 25 bp, Homo sapien
agtgtctcagccgagatgaactcac

SEQ ID NO: 4602296 - DNA, 25 bp, Homo sapien
ggagtgtctcagccgagatgaactc

SEQ ID NO: 4602297 - DNA, 25 bp, Homo sapien
gagtgtctcagccgagatgaactca

SEQ ID NO: 4602298 - DNA, 25 bp, Homo sapien
aggagtgtctcagccgagatgaact

SEQ ID NO: 4602299 - DNA, 25 bp, Homo sapien
gacactgatgcggcaaattaatttt

SEQ ID NO: 4602300 - DNA, 25 bp, Homo sapien
atggacactgatgcggcaaattaat

SEQ ID NO: 4602301 - DNA, 25 bp, Homo sapien
tggacactgatgcggcaaattaatt

SEQ ID NO: 4602302 - DNA, 25 bp, Homo sapien
tatggacactgatgcggcaaattaa

SEQ ID NO: 4602303 - DNA, 25 bp, Homo sapien
ttcatttggttcaagatacttctaa

SEQ ID NO: 4602304 - DNA, 25 bp, Homo sapien
tactgctaggtaggagtagaagtcc

SEQ ID NO: 4602305 - DNA, 25 bp, Homo sapien
cgtctttgtcatctcaatgttagca

SEQ ID NO: 4602306 - DNA, 25 bp, Homo sapien
tatatggctctctttgacaccactc

SEQ ID NO: 4602307 - DNA, 25 bp, Homo sapien
ttagtccagcagataaccagccaca

SEQ ID NO: 4602308 - DNA, 25 bp, Homo sapien
aaggtatagcccttctgcagtggtt

SEQ ID NO: 4602309 - DNA, 25 bp, Homo sapien
cagagcaaaggtatagcccttctgc

SEQ ID NO: 4602310 - DNA, 25 bp, Homo sapien
gctttgggcagagcaaaggtatagc

SEQ ID NO: 4602311 - DNA, 25 bp, Homo sapien
tcacagcatactcccattaatcctg

SEQ ID NO: 4602312 - DNA, 25 bp, Homo sapien
catactcccattaatcctgacagca

SEQ ID NO: 4602313 - DNA, 25 bp, Homo sapien
cagcatactcccattaatcctgaca

SEQ ID NO: 4602314 - DNA, 25 bp, Homo sapien
tactcccattaatcctgacagcatc

SEQ ID NO: 4602315 - DNA, 25 bp, Homo sapien
gtgtcactttctgatatcagcggta

SEQ ID NO: 4602316 - DNA, 25 bp, Homo sapien
tacagaaccattttaccaagaggtg

SEQ ID NO: 4602317 - DNA, 25 bp, Homo sapien
ctcgaatttagtctgacaaaaccta

SEQ ID NO: 4602318 - DNA, 25 bp, Homo sapien
gacaaaacctataccctacaactga

SEQ ID NO: 4602319 - DNA, 25 bp, Homo sapien
caccaccaccatcaaaaggggccat

SEQ ID NO: 4602320 - DNA, 25 bp, Homo sapien
gccaaacacaatgaggagctccggc

SEQ ID NO: 4602321 - DNA, 25 bp, Homo sapien
caaacacaatgaggagctccggcag

SEQ ID NO: 4602322 - DNA, 25 bp, Homo sapien
ccaaatataacggccaaacacaatg

SEQ ID NO: 4602323 - DNA, 25 bp, Homo sapien
gagctccggcagggagcagaaattc

SEQ ID NO: 4602324 - DNA, 25 bp, Homo sapien
ccatggatgagtaagctgtggtacc

SEQ ID NO: 4602325 - DNA, 25 bp, Homo sapien
tcctcaggggagtccaagggagtcc

SEQ ID NO: 4602326 - DNA, 25 bp, Homo sapien
tgagctgccgtcttgggtgagaagc

SEQ ID NO: 4602327 - DNA, 25 bp, Homo sapien
tggttgatgagctgccgtcttgggt

SEQ ID NO: 4602328 - DNA, 25 bp, Homo sapien
tctccataagcagtattctcccaat

SEQ ID NO: 4602329 - DNA, 25 bp, Homo sapien
caagttccttctccataagcagtat

SEQ ID NO: 4602330 - DNA, 25 bp, Homo sapien
gacctccaccatgagtccaagcgta

SEQ ID NO: 4602331 - DNA, 25 bp, Homo sapien
tttcctactttgaaaggactctgac

SEQ ID NO: 4602332 - DNA, 25 bp, Homo sapien
taaccatgtaccatggattgactgg

SEQ ID NO: 4602333 - DNA, 25 bp, Homo sapien
tatataccgaaattcagtgtctcac

SEQ ID NO: 4602334 - DNA, 25 bp, Homo sapien
tctgagtcttcatagggtcctccct

SEQ ID NO: 4602335 - DNA, 25 bp, Homo sapien
tcatagggtcctccctctgtgcatt

SEQ ID NO: 4602336 - DNA, 25 bp, Homo sapien
gacttggaggtcctgactcaaggaa

SEQ ID NO: 4602337 - DNA, 25 bp, Homo sapien
tcctgagatctcctcctaaatgaac

SEQ ID NO: 4602338 - DNA, 25 bp, Homo sapien
gggaagcccaacaactagagctatg

SEQ ID NO: 4602339 - DNA, 25 bp, Homo sapien
atgaacaacttgcatccaaaccttc

SEQ ID NO: 4602340 - DNA, 25 bp, Homo sapien
gcagccagattgaccagaatcatta

SEQ ID NO: 4602341 - DNA, 25 bp, Homo sapien
caccagatgtagttccactgagcag

SEQ ID NO: 4602342 - DNA, 25 bp, Homo sapien
cacttagtacgtgccttcttgtgca

SEQ ID NO: 4602343 - DNA, 25 bp, Homo sapien
cagaatcattacagaagggccgaat

SEQ ID NO: 4602344 - DNA, 25 bp, Homo sapien
tactgcatggacatactgtaccgtg

SEQ ID NO: 4602345 - DNA, 25 bp, Homo sapien
gttcatcctctacaatgggaaatgt

SEQ ID NO: 4602346 - DNA, 25 bp, Homo sapien
ccgtgggagattcaagggtaaatca

SEQ ID NO: 4602347 - DNA, 25 bp, Homo sapien
tcaatcaaagacacatcctcgaggg

SEQ ID NO: 4602348 - DNA, 25 bp, Homo sapien
ctgctggataaatgccatggataaa

SEQ ID NO: 4602349 - DNA, 25 bp, Homo sapien
ataaaaagtgacaggctcccaaagg

SEQ ID NO: 4602350 - DNA, 25 bp, Homo sapien
catggataaaatgccatgtgggttc

SEQ ID NO: 4602351 - DNA, 25 bp, Homo sapien
agtaagacactgcttccacttggtg

SEQ ID NO: 4602352 - DNA, 25 bp, Homo sapien
tctgaatggaacaagacagcctgga

SEQ ID NO: 4602353 - DNA, 25 bp, Homo sapien
agaaggtgtccttccataaggccgt

SEQ ID NO: 4602354 - DNA, 25 bp, Homo sapien
cagcctggagctaatgaaattgcaa

SEQ ID NO: 4602355 - DNA, 25 bp, Homo sapien
gatcttaggagggtgctgtctctct

SEQ ID NO: 4602356 - DNA, 25 bp, Homo sapien
ttaccgatagggaaacagacttagc

SEQ ID NO: 4602357 - DNA, 25 bp, Homo sapien
cagacttagcaaggcgagcgtcata

SEQ ID NO: 4602358 - DNA, 25 bp, Homo sapien
aaggtccctctcaccaggaatgttg

SEQ ID NO: 4602359 - DNA, 25 bp, Homo sapien
gagcgtcatagccagcgtcagacag

SEQ ID NO: 4602360 - DNA, 25 bp, Homo sapien
ccacagagtcagaaattgccgctgc

SEQ ID NO: 4602361 - DNA, 25 bp, Homo sapien
tttccaagtgtctagtccgacagtc

SEQ ID NO: 4602362 - DNA, 25 bp, Homo sapien
gaaaagaggttgtctagaggcttgg

SEQ ID NO: 4602363 - DNA, 25 bp, Homo sapien
tagaggcttgggtggacccaattgc

SEQ ID NO: 4602364 - DNA, 25 bp, Homo sapien
tccacaatttattcctattagaagg

SEQ ID NO: 4602365 - DNA, 25 bp, Homo sapien
ggccgagctcctacaaatgacttgt

SEQ ID NO: 4602366 - DNA, 25 bp, Homo sapien
tgtcatcagctgtacaagtgcagtc

SEQ ID NO: 4602367 - DNA, 25 bp, Homo sapien
tcatgcccattgctctggcagaaag

SEQ ID NO: 4602368 - DNA, 25 bp, Homo sapien
cagcaacatctccatccacgtttaa

SEQ ID NO: 4602369 - DNA, 25 bp, Homo sapien
gcaaaacatattgggatgctggcac

SEQ ID NO: 4602370 - DNA, 25 bp, Homo sapien
cttgaaaacaaggtctgggattgag

SEQ ID NO: 4602371 - DNA, 25 bp, Homo sapien
gagttatccatgtagttctcactaa

SEQ ID NO: 4602372 - DNA, 25 bp, Homo sapien
tcaccgtaagtaccataagaaacac

SEQ ID NO: 4602373 - DNA, 25 bp, Homo sapien
gagaaaagacacgtccagggctctg

SEQ ID NO: 4602374 - DNA, 25 bp, Homo sapien
gcgggggcatccatcaccgtaagta

SEQ ID NO: 4602375 - DNA, 25 bp, Homo sapien
agctttgagtcctcagactcggaga

SEQ ID NO: 4602376 - DNA, 25 bp, Homo sapien
tgttcagatcccagttacgcactag

SEQ ID NO: 4602377 - DNA, 25 bp, Homo sapien
caagttgactgaccgataagctgcc

SEQ ID NO: 4602378 - DNA, 25 bp, Homo sapien
taaaggactgtcgttccctgcggga

SEQ ID NO: 4602379 - DNA, 25 bp, Homo sapien
tgcgggaccaaacaaacgtgttcag

SEQ ID NO: 4602380 - DNA, 25 bp, Homo sapien
cagagtggtcgaggtcatcagatga

SEQ ID NO: 4602381 - DNA, 25 bp, Homo sapien
cacaggcgaacccattggtaggcat

SEQ ID NO: 4602382 - DNA, 25 bp, Homo sapien
ctggtaaccacaggcgaacccattg

SEQ ID NO: 4602383 - DNA, 25 bp, Homo sapien
tggtaggcattctcatgccagagtg

SEQ ID NO: 4602384 - DNA, 25 bp, Homo sapien
acagaggtagtaaaagctctgggcc

SEQ ID NO: 4602385 - DNA, 25 bp, Homo sapien
gggagaggacagaggtagtaaaagc

SEQ ID NO: 4602386 - DNA, 25 bp, Homo sapien
gaggacagaggtagtaaaagctctg

SEQ ID NO: 4602387 - DNA, 25 bp, Homo sapien
gagaggacagaggtagtaaaagctc

SEQ ID NO: 4602388 - DNA, 25 bp, Homo sapien
gaactgaggctgctcttacatttct

SEQ ID NO: 4602389 - DNA, 25 bp, Homo sapien
ggctgctcttacatttctcgtacca

SEQ ID NO: 4602390 - DNA, 25 bp, Homo sapien
cccagggagattcattcgccttttc

SEQ ID NO: 4602391 - DNA, 25 bp, Homo sapien
tcctcctgggttattgggttaatca

SEQ ID NO: 4602392 - DNA, 25 bp, Homo sapien
gaacactaagtcactgataggtcgg

SEQ ID NO: 4602393 - DNA, 25 bp, Homo sapien
cactaagtcactgataggtcggtcc

SEQ ID NO: 4602394 - DNA, 25 bp, Homo sapien
taagtcactgataggtcggtccttc

SEQ ID NO: 4602395 - DNA, 25 bp, Homo sapien
gatgggaacactaagtcactgatag

SEQ ID NO: 4602396 - DNA, 25 bp, Homo sapien
caatggtgaggcacttggaaccctc

SEQ ID NO: 4602397 - DNA, 25 bp, Homo sapien
cctccaagcttgcaatggtgaggca

SEQ ID NO: 4602398 - DNA, 25 bp, Homo sapien
gtgaggcacttggaaccctcagaca

SEQ ID NO: 4602399 - DNA, 25 bp, Homo sapien
aatttatggtctcatcctccaagct

SEQ ID NO: 4602400 - DNA, 25 bp, Homo sapien
gattctgcatcttggctttcgtgta

SEQ ID NO: 4602401 - DNA, 25 bp, Homo sapien
tctgcatcttggctttcgtgtaaga

SEQ ID NO: 4602402 - DNA, 25 bp, Homo sapien
catcttggctttcgtgtaagatgat

SEQ ID NO: 4602403 - DNA, 25 bp, Homo sapien
ctgcatcttggctttcgtgtaagat

SEQ ID NO: 4602404 - DNA, 25 bp, Homo sapien
cttcttagggcccaaaatactcgag

SEQ ID NO: 4602405 - DNA, 25 bp, Homo sapien
ttagggcccaaaatactcgagttca

SEQ ID NO: 4602406 - DNA, 25 bp, Homo sapien
tagggcccaaaatactcgagttcag

SEQ ID NO: 4602407 - DNA, 25 bp, Homo sapien
tacaaaacctagacaattccttaca

SEQ ID NO: 4602408 - DNA, 25 bp, Homo sapien
tgaatatcagtgacgatgtctttac

SEQ ID NO: 4602409 - DNA, 25 bp, Homo sapien
tatcagtgacgatgtctttactgtt

SEQ ID NO: 4602410 - DNA, 25 bp, Homo sapien
tagaaactcataacctgtttttcaa

SEQ ID NO: 4602411 - DNA, 25 bp, Homo sapien
ggccattggtaagaccctggccatg

SEQ ID NO: 4602412 - DNA, 25 bp, Homo sapien
ccattggtaagaccctggccatggg

SEQ ID NO: 4602413 - DNA, 25 bp, Homo sapien
tgctggccattggtaagaccctggc

SEQ ID NO: 4602414 - DNA, 25 bp, Homo sapien
gctgctggccattggtaagaccctg

SEQ ID NO: 4602415 - DNA, 25 bp, Homo sapien
tgggtgtaggcagccagcgtcacct

SEQ ID NO: 4602416 - DNA, 25 bp, Homo sapien
gggccccaacaatgctatgggtgta

SEQ ID NO: 4602417 - DNA, 25 bp, Homo sapien
aatgctatgggtgtaggcagccagc

SEQ ID NO: 4602418 - DNA, 25 bp, Homo sapien
caacaatgctatgggtgtaggcagc

SEQ ID NO: 4602419 - DNA, 25 bp, Homo sapien
gtcatgacctctggcctcatcttgg

SEQ ID NO: 4602420 - DNA, 25 bp, Homo sapien
cagtcatgacctctggcctcatctt

SEQ ID NO: 4602421 - DNA, 25 bp, Homo sapien
cctctggcctcatcttggctgtcat

SEQ ID NO: 4602422 - DNA, 25 bp, Homo sapien
tgacctctggcctcatcttggctgt

SEQ ID NO: 4602423 - DNA, 25 bp, Homo sapien
gggtgtcctctggtttctttgcact

SEQ ID NO: 4602424 - DNA, 25 bp, Homo sapien
agcagcatggactgatgtcatcctg

SEQ ID NO: 4602425 - DNA, 25 bp, Homo sapien
tccattgcgcaggtacacggctgca

SEQ ID NO: 4602426 - DNA, 25 bp, Homo sapien
agacagtccattgcgcaggtacacg

SEQ ID NO: 4602427 - DNA, 25 bp, Homo sapien
cagtccattgcgcaggtacacggct

SEQ ID NO: 4602428 - DNA, 25 bp, Homo sapien
tgcgcaggtacacggctgcaggacc

SEQ ID NO: 4602429 - DNA, 25 bp, Homo sapien
gagtgggacatccctacagacagag

SEQ ID NO: 4602430 - DNA, 25 bp, Homo sapien
tgggtgccgtagaagcagagagtgg

SEQ ID NO: 4602431 - DNA, 25 bp, Homo sapien
ctgggtgccgtagaagcagagagtg

SEQ ID NO: 4602432 - DNA, 25 bp, Homo sapien
aattacaaaataagactgctgtatc

SEQ ID NO: 4602433 - DNA, 25 bp, Homo sapien
ccatggcccaaagaatgtgctatgt

SEQ ID NO: 4602434 - DNA, 25 bp, Homo sapien
gccagtctggacctagcatcatcag

SEQ ID NO: 4602435 - DNA, 25 bp, Homo sapien
tactgcagcaggagtcataagccca

SEQ ID NO: 4602436 - DNA, 25 bp, Homo sapien
tctattttgctacacccacatggct

SEQ ID NO: 4602437 - DNA, 25 bp, Homo sapien
tctgtttgtggaaaggcttggattt

SEQ ID NO: 4602438 - DNA, 25 bp, Homo sapien
tttgtggaaaggcttggatttggcc

SEQ ID NO: 4602439 - DNA, 25 bp, Homo sapien
gatttggccattgattctgtgttca

SEQ ID NO: 4602440 - DNA, 25 bp, Homo sapien
tgtggaaaggcttggatttggccat

SEQ ID NO: 4602441 - DNA, 25 bp, Homo sapien
gaagacatatccaatcagccgagca

SEQ ID NO: 4602442 - DNA, 25 bp, Homo sapien
cacagtgactgctgttgtgtagtca

SEQ ID NO: 4602443 - DNA, 25 bp, Homo sapien
gccaaaagcccatggaagtcacaat

SEQ ID NO: 4602444 - DNA, 25 bp, Homo sapien
gacaggtgagtctccgagaagacat

SEQ ID NO: 4602445 - DNA, 25 bp, Homo sapien
tcaaacgcttggatacaaggcaggc

SEQ ID NO: 4602446 - DNA, 25 bp, Homo sapien
gcatctgccgagtgtgtcaccagca

SEQ ID NO: 4602447 - DNA, 25 bp, Homo sapien
cacgtgcatgtcagctccgcaagaa

SEQ ID NO: 4602448 - DNA, 25 bp, Homo sapien
tgctcagcaccgttagaaaccaaga

SEQ ID NO: 4602449 - DNA, 25 bp, Homo sapien
tgtagcttttacaactaccagtggc

SEQ ID NO: 4602450 - DNA, 25 bp, Homo sapien
tagggagcaaatttacaggtgtagc

SEQ ID NO: 4602451 - DNA, 25 bp, Homo sapien
aacgaaagtatcttctagggagcaa

SEQ ID NO: 4602452 - DNA, 25 bp, Homo sapien
taccagtggcttagctccaagaaaa

SEQ ID NO: 4602453 - DNA, 25 bp, Homo sapien
caaggtttgactgaatatggatcca

SEQ ID NO: 4602454 - DNA, 25 bp, Homo sapien
gagttgtttgcagggttcagttcca

SEQ ID NO: 4602455 - DNA, 25 bp, Homo sapien
tagagccgctcacaacatagcagtt

SEQ ID NO: 4602456 - DNA, 25 bp, Homo sapien
tgttagcagagcatggtgtcccatc

SEQ ID NO: 4602457 - DNA, 25 bp, Homo sapien
ttctgggctagcttcatagtgtaag

SEQ ID NO: 4602458 - DNA, 25 bp, Homo sapien
taaaacattgcacctagaactaaac

SEQ ID NO: 4602459 - DNA, 25 bp, Homo sapien
gtactctagtcaccctcttctgggc

SEQ ID NO: 4602460 - DNA, 25 bp, Homo sapien
cctagaactaaacatgcaggaaatg

SEQ ID NO: 4602461 - DNA, 25 bp, Homo sapien
tccgtggtctccagagtgtggcttt

SEQ ID NO: 4602462 - DNA, 25 bp, Homo sapien
atcatcatatccgtggtctccagag

SEQ ID NO: 4602463 - DNA, 25 bp, Homo sapien
ggatctatggcgtcctctggatctt

SEQ ID NO: 4602464 - DNA, 25 bp, Homo sapien
gaaggtccttggatctatggcgtcc

SEQ ID NO: 4602465 - DNA, 25 bp, Homo sapien
ggatgtttccaaagcactgctgcca

SEQ ID NO: 4602466 - DNA, 25 bp, Homo sapien
aagagccaagctcgggctttcccac

SEQ ID NO: 4602467 - DNA, 25 bp, Homo sapien
ttcccacctctagggccatgaaact

SEQ ID NO: 4602468 - DNA, 25 bp, Homo sapien
gaggtcgttctctgactctatcctt

SEQ ID NO: 4602469 - DNA, 25 bp, Homo sapien
gagaggtaagataagccaatcaacc

SEQ ID NO: 4602470 - DNA, 25 bp, Homo sapien
gtctcattaaactgtgccttgtcac

SEQ ID NO: 4602471 - DNA, 25 bp, Homo sapien
aaactgtgccttgtcacactcttga

SEQ ID NO: 4602472 - DNA, 25 bp, Homo sapien
ttgacctggaggtattgaaggcagc

SEQ ID NO: 4602473 - DNA, 25 bp, Homo sapien
tcacgaaccaaggatggctgctgga

SEQ ID NO: 4602474 - DNA, 25 bp, Homo sapien
accttgtcaccttttctgcttccaa

SEQ ID NO: 4602475 - DNA, 25 bp, Homo sapien
tggagctccagtcaccttgtcacct

SEQ ID NO: 4602476 - DNA, 25 bp, Homo sapien
acgaaccaaggatggctgctggagc

SEQ ID NO: 4602477 - DNA, 25 bp, Homo sapien
tggccttggtcgttgaattactcca

SEQ ID NO: 4602478 - DNA, 25 bp, Homo sapien
ctcggagatgtgcatgcaagctgac

SEQ ID NO: 4602479 - DNA, 25 bp, Homo sapien
tcgttgaattactccaaagaggaag

SEQ ID NO: 4602480 - DNA, 25 bp, Homo sapien
caaagaggaagagggcctcggagat

SEQ ID NO: 4602481 - DNA, 25 bp, Homo sapien
caagttgagccttctctggtgctgc

SEQ ID NO: 4602482 - DNA, 25 bp, Homo sapien
ttggtgactgcctttctcagcgaca

SEQ ID NO: 4602483 - DNA, 25 bp, Homo sapien
tagcatgcctctcagtgtatcccga

SEQ ID NO: 4602484 - DNA, 25 bp, Homo sapien
gacaacactgggatgtccttggaag

SEQ ID NO: 4602485 - DNA, 25 bp, Homo sapien
tagccagtcagccattgccaaagat

SEQ ID NO: 4602486 - DNA, 25 bp, Homo sapien
tatctgtagtgttaagtgctgccac

SEQ ID NO: 4602487 - DNA, 25 bp, Homo sapien
caatctgagaactggttaggcccgg

SEQ ID NO: 4602488 - DNA, 25 bp, Homo sapien
gacctggtggagtttctgccatcaa

SEQ ID NO: 4602489 - DNA, 25 bp, Homo sapien
gggggggtgggaataaggtgcatca

SEQ ID NO: 4602490 - DNA, 25 bp, Homo sapien
ggaataaggtgcatcatccccccaa

SEQ ID NO: 4602491 - DNA, 25 bp, Homo sapien
tgggaataaggtgcatcatcccccc

SEQ ID NO: 4602492 - DNA, 25 bp, Homo sapien
gggtgggaataaggtgcatcatccc

SEQ ID NO: 4602493 - DNA, 25 bp, Homo sapien
cattaattattactacattgggagt

SEQ ID NO: 4602494 - DNA, 25 bp, Homo sapien
atcattaattattactacattggga

SEQ ID NO: 4602495 - DNA, 25 bp, Homo sapien
ggtctttcttaaccttctgatatca

SEQ ID NO: 4602496 - DNA, 25 bp, Homo sapien
cagcagaaggtctttcttaaccttc

SEQ ID NO: 4602497 - DNA, 25 bp, Homo sapien
gcaggaggcgtccatttcctccttt

SEQ ID NO: 4602498 - DNA, 25 bp, Homo sapien
cctgtagcaggaggcgtccatttcc

SEQ ID NO: 4602499 - DNA, 25 bp, Homo sapien
gcccaatttgccacctgtagcagga

SEQ ID NO: 4602500 - DNA, 25 bp, Homo sapien
agcccaatttgccacctgtagcagg

SEQ ID NO: 4602501 - DNA, 25 bp, Homo sapien
atctatggaaatctgtaaagaagcc

SEQ ID NO: 4602502 - DNA, 25 bp, Homo sapien
tatatctatggaaatctgtaaagaa

SEQ ID NO: 4602503 - DNA, 25 bp, Homo sapien
aatatatctatggaaatctgtaaag

SEQ ID NO: 4602504 - DNA, 25 bp, Homo sapien
tgaaaatatatctatggaaatctgt

SEQ ID NO: 4602505 - DNA, 25 bp, Homo sapien
ctgctggagtggtcgttgaaagcca

SEQ ID NO: 4602506 - DNA, 25 bp, Homo sapien
gtgcagagaggtttctcctgttttc

SEQ ID NO: 4602507 - DNA, 25 bp, Homo sapien
ggagtggtcgttgaaagccattcat

SEQ ID NO: 4602508 - DNA, 25 bp, Homo sapien
agtgcagagaggtttctcctgtttt

SEQ ID NO: 4602509 - DNA, 25 bp, Homo sapien
cccaagctctagccttgagggaggc

SEQ ID NO: 4602510 - DNA, 25 bp, Homo sapien
ccccaagctctagccttgagggagg

SEQ ID NO: 4602511 - DNA, 25 bp, Homo sapien
ccaagctctagccttgagggaggca

SEQ ID NO: 4602512 - DNA, 25 bp, Homo sapien
tgtttgccgggcttccatccctgta

SEQ ID NO: 4602513 - DNA, 25 bp, Homo sapien
gctgtaggttttgcttccaatgcca

SEQ ID NO: 4602514 - DNA, 25 bp, Homo sapien
cctgtaggtctttgaggtcggtgcc

SEQ ID NO: 4602515 - DNA, 25 bp, Homo sapien
ccaagctgactctgggctgtaggtt

SEQ ID NO: 4602516 - DNA, 25 bp, Homo sapien
aaaggtcgattgttcccagccacag

SEQ ID NO: 4602517 - DNA, 25 bp, Homo sapien
tgggacatcggcattttagcagcac

SEQ ID NO: 4602518 - DNA, 25 bp, Homo sapien
tcaaaacgatgtagcgaaaccaccg

SEQ ID NO: 4602519 - DNA, 25 bp, Homo sapien
gggacgactttatagcgcagcccgg

SEQ ID NO: 4602520 - DNA, 25 bp, Homo sapien
agggtgggaactgccagcatcactc

SEQ ID NO: 4602521 - DNA, 25 bp, Homo sapien
ggtgggaactgccagcatcactcat

SEQ ID NO: 4602522 - DNA, 25 bp, Homo sapien
ggaagggtgggaactgccagcatca

SEQ ID NO: 4602523 - DNA, 25 bp, Homo sapien
ttgggaagggtgggaactgccagca

SEQ ID NO: 4602524 - DNA, 25 bp, Homo sapien
tcacagcggcacgttgtttttacac

SEQ ID NO: 4602525 - DNA, 25 bp, Homo sapien
cgataggaaagtgcaacagcgccat

SEQ ID NO: 4602526 - DNA, 25 bp, Homo sapien
acagcggcacgttgtttttacactt

SEQ ID NO: 4602527 - DNA, 25 bp, Homo sapien
gccgataggaaagtgcaacagcgcc

SEQ ID NO: 4602528 - DNA, 25 bp, Homo sapien
cctgctccacctacaatggcagagt

SEQ ID NO: 4602529 - DNA, 25 bp, Homo sapien
caagatgcttacactctggaggctt

SEQ ID NO: 4602530 - DNA, 25 bp, Homo sapien
accaggagttgaagtcggacccagc

SEQ ID NO: 4602531 - DNA, 25 bp, Homo sapien
tacgatggagctgaacgtggagctc

SEQ ID NO: 4602532 - DNA, 25 bp, Homo sapien
tcacagcactgaaacgtggggatgg

SEQ ID NO: 4602533 - DNA, 25 bp, Homo sapien
gggagaacgtagttccacgttggca

SEQ ID NO: 4602534 - DNA, 25 bp, Homo sapien
ctgtttacatcgaggcggacgagca

SEQ ID NO: 4602535 - DNA, 25 bp, Homo sapien
ttccacgttggcacagatgagctgt

SEQ ID NO: 4602536 - DNA, 25 bp, Homo sapien
ccaccgcctgggggcaccgactcgg

SEQ ID NO: 4602537 - DNA, 25 bp, Homo sapien
ggggcaccgactcggggctgcggac

SEQ ID NO: 4602538 - DNA, 25 bp, Homo sapien
cgcctgggggcaccgactcggggct

SEQ ID NO: 4602539 - DNA, 25 bp, Homo sapien
cgcgtccaccgcctgggggcaccga

SEQ ID NO: 4602540 - DNA, 25 bp, Homo sapien
tctttttacgggagtccgcgctctc

SEQ ID NO: 4602541 - DNA, 25 bp, Homo sapien
tgagatcgccgttttctcccaccag

SEQ ID NO: 4602542 - DNA, 25 bp, Homo sapien
gcgctctccgcaagtctgtcctgag

SEQ ID NO: 4602543 - DNA, 25 bp, Homo sapien
tcactgctgcaacccgggtctcagt

SEQ ID NO: 4602544 - DNA, 25 bp, Homo sapien
gccagggacagagacgatgcaggtt

SEQ ID NO: 4602545 - DNA, 25 bp, Homo sapien
agagcgagaacttgccggccacaac

SEQ ID NO: 4602546 - DNA, 25 bp, Homo sapien
atgcaggttgagagcgagaacttgc

SEQ ID NO: 4602547 - DNA, 25 bp, Homo sapien
gaacttgccggccacaacgtcactt

SEQ ID NO: 4602548 - DNA, 25 bp, Homo sapien
gtagaagcatccgcagacaccagca

SEQ ID NO: 4602549 - DNA, 25 bp, Homo sapien
ggtagaagcatccgcagacaccagc

SEQ ID NO: 4602550 - DNA, 25 bp, Homo sapien
ggtttgagctcggtagaatacccag

SEQ ID NO: 4602551 - DNA, 25 bp, Homo sapien
gaatacccagctccaatccctcttg

SEQ ID NO: 4602552 - DNA, 25 bp, Homo sapien
ctgtggtttgagctcggtagaatac

SEQ ID NO: 4602553 - DNA, 25 bp, Homo sapien
tgagctcggtagaatacccagctcc

SEQ ID NO: 4602554 - DNA, 25 bp, Homo sapien
ccatctttgtaatgggtgcaagaga

SEQ ID NO: 4602555 - DNA, 25 bp, Homo sapien
gagagtttcctgaggccagtatcca

SEQ ID NO: 4602556 - DNA, 25 bp, Homo sapien
tgtgaaaggttacatctgacaccac

SEQ ID NO: 4602557 - DNA, 25 bp, Homo sapien
tggaacactccagaagagattcctc

SEQ ID NO: 4602558 - DNA, 25 bp, Homo sapien
tttgactgctcaagggaacagacga

SEQ ID NO: 4602559 - DNA, 25 bp, Homo sapien
cagacgatatattcccagaacttgg

SEQ ID NO: 4602560 - DNA, 25 bp, Homo sapien
tgaataaataacaggtcccaccatg

SEQ ID NO: 4602561 - DNA, 25 bp, Homo sapien
ctgttggtagtctcctcatcaggcc

SEQ ID NO: 4602562 - DNA, 25 bp, Homo sapien
tactgaaatcagcaaggctgggccc

SEQ ID NO: 4602563 - DNA, 25 bp, Homo sapien
caagagcggccatacactatagcga

SEQ ID NO: 4602564 - DNA, 25 bp, Homo sapien
tgtcaacaaagtaaccaggcagccc

SEQ ID NO: 4602565 - DNA, 25 bp, Homo sapien
caagaacttgggtcgtctgcctcaa

SEQ ID NO: 4602566 - DNA, 25 bp, Homo sapien
cacggtgtcgcatgctgagcgcagc

SEQ ID NO: 4602567 - DNA, 25 bp, Homo sapien
acaagtctcagacccgaatcctggg

SEQ ID NO: 4602568 - DNA, 25 bp, Homo sapien
gatccccagggaaggtacactccca

SEQ ID NO: 4602569 - DNA, 25 bp, Homo sapien
tgagcgcagcacgttctcaggtact

SEQ ID NO: 4602570 - DNA, 25 bp, Homo sapien
tggcccagatgggcgtctggagacg

SEQ ID NO: 4602571 - DNA, 25 bp, Homo sapien
ctggcccagatgggcgtctggagac

SEQ ID NO: 4602572 - DNA, 25 bp, Homo sapien
tccacactctggatcatcctttgtg

SEQ ID NO: 4602573 - DNA, 25 bp, Homo sapien
tgtaagcttgcctggtggctgccct

SEQ ID NO: 4602574 - DNA, 25 bp, Homo sapien
gatcatcctttgtgtcttccagttc

SEQ ID NO: 4602575 - DNA, 25 bp, Homo sapien
ccagttcttctccacacatcctctc

SEQ ID NO: 4602576 - DNA, 25 bp, Homo sapien
tccaaaataagcagtatttgtccat

SEQ ID NO: 4602577 - DNA, 25 bp, Homo sapien
gatgtacaagcgtaagtttaaagta

SEQ ID NO: 4602578 - DNA, 25 bp, Homo sapien
gggtctgtcattctgagaagtcctc

SEQ ID NO: 4602579 - DNA, 25 bp, Homo sapien
tctgtcattctgagaagtcctcgca

SEQ ID NO: 4602580 - DNA, 25 bp, Homo sapien
ctgtcattctgagaagtcctcgcat

SEQ ID NO: 4602581 - DNA, 25 bp, Homo sapien
ggtctgtcattctgagaagtcctcg

SEQ ID NO: 4602582 - DNA, 25 bp, Homo sapien
ggctcacgtcctcggaatttcctgg

SEQ ID NO: 4602583 - DNA, 25 bp, Homo sapien
acgtcctcggaatttcctgggtgtg

SEQ ID NO: 4602584 - DNA, 25 bp, Homo sapien
tcacgtcctcggaatttcctgggtg

SEQ ID NO: 4602585 - DNA, 25 bp, Homo sapien
gacggctcacgtcctcggaatttcc

SEQ ID NO: 4602586 - DNA, 25 bp, Homo sapien
ccgacttggaaagggatgactttct

SEQ ID NO: 4602587 - DNA, 25 bp, Homo sapien
cggtggttttgctcacaagagaggt

SEQ ID NO: 4602588 - DNA, 25 bp, Homo sapien
cataatcacccacgttcagtgagtc

SEQ ID NO: 4602589 - DNA, 25 bp, Homo sapien
tctcctaccaaatcagtaccgactt

SEQ ID NO: 4602590 - DNA, 25 bp, Homo sapien
caagaagcaattgattccactgggc

SEQ ID NO: 4602591 - DNA, 25 bp, Homo sapien
gtcaattatttcctgatcccggcaa

SEQ ID NO: 4602592 - DNA, 25 bp, Homo sapien
caatcaggctgcttcagaaatagtc

SEQ ID NO: 4602593 - DNA, 25 bp, Homo sapien
tgttcaggctgaccgggaaatcaca

SEQ ID NO: 4602594 - DNA, 25 bp, Homo sapien
taaccgcctcattaggatcacagca

SEQ ID NO: 4602595 - DNA, 25 bp, Homo sapien
gaaatggcattcgacgctgacggga

SEQ ID NO: 4602596 - DNA, 25 bp, Homo sapien
tcttagtgctgagctgagaagcgct

SEQ ID NO: 4602597 - DNA, 25 bp, Homo sapien
tcaccacgtggagagaaagcctggc

SEQ ID NO: 4602598 - DNA, 25 bp, Homo sapien
agtctggaagccttgcctggtgaag

SEQ ID NO: 4602599 - DNA, 25 bp, Homo sapien
gccagatattggtgcactggcccca

SEQ ID NO: 4602600 - DNA, 25 bp, Homo sapien
ctttgagtaaaaggctctctttcac

SEQ ID NO: 4602601 - DNA, 25 bp, Homo sapien
cagcccttagccttggagtccactg

SEQ ID NO: 4602602 - DNA, 25 bp, Homo sapien
ggagtccactgttcctttgagtaaa

SEQ ID NO: 4602603 - DNA, 25 bp, Homo sapien
cctaaaaccgtgaggtggcctgcac

SEQ ID NO: 4602604 - DNA, 25 bp, Homo sapien
ggcaggagacatcgagcagctaacc

SEQ ID NO: 4602605 - DNA, 25 bp, Homo sapien
gcctcgtcctctgggaatgtctcac

SEQ ID NO: 4602606 - DNA, 25 bp, Homo sapien
aatgtctcacagaagtcccgcagca

SEQ ID NO: 4602607 - DNA, 25 bp, Homo sapien
ttggtacatggcaggagacatcgag

SEQ ID NO: 4602608 - DNA, 25 bp, Homo sapien
ctgttcccaagcctcggtgccagtg

SEQ ID NO: 4602609 - DNA, 25 bp, Homo sapien
ctgatgaacacggtgtcaaagacag

SEQ ID NO: 4602610 - DNA, 25 bp, Homo sapien
aagcctcggtgccagtgtttcctcc

SEQ ID NO: 4602611 - DNA, 25 bp, Homo sapien
cacggtgtcaaagacaggcagcagg

SEQ ID NO: 4602612 - DNA, 25 bp, Homo sapien
cacagctgagcaaaaggtggaccca

SEQ ID NO: 4602613 - DNA, 25 bp, Homo sapien
acagctgagcaaaaggtggacccat

SEQ ID NO: 4602614 - DNA, 25 bp, Homo sapien
gaccacagctgagcaaaaggtggac

SEQ ID NO: 4602615 - DNA, 25 bp, Homo sapien
ccacagctgagcaaaaggtggaccc

SEQ ID NO: 4602616 - DNA, 25 bp, Homo sapien
gactagcactatagtaggtcctggc

SEQ ID NO: 4602617 - DNA, 25 bp, Homo sapien
aaaccaccggccagctggactagca

SEQ ID NO: 4602618 - DNA, 25 bp, Homo sapien
aaccaaaccaccggccagctggact

SEQ ID NO: 4602619 - DNA, 25 bp, Homo sapien
tggactagcactatagtaggtcctg

SEQ ID NO: 4602620 - DNA, 25 bp, Homo sapien
aagcgggtacagttagaggccagtc

SEQ ID NO: 4602621 - DNA, 25 bp, Homo sapien
cttgaaagcgggtacagttagaggc

SEQ ID NO: 4602622 - DNA, 25 bp, Homo sapien
tagaggccagtctggcatcacagca

SEQ ID NO: 4602623 - DNA, 25 bp, Homo sapien
ggtacagttagaggccagtctggca

SEQ ID NO: 4602624 - DNA, 25 bp, Homo sapien
agctcagcatccttaggtcttccct

SEQ ID NO: 4602625 - DNA, 25 bp, Homo sapien
gcatccttaggtcttccctctcctc

SEQ ID NO: 4602626 - DNA, 25 bp, Homo sapien
tcagctcagcatccttaggtcttcc

SEQ ID NO: 4602627 - DNA, 25 bp, Homo sapien
tcagcatccttaggtcttccctctc

SEQ ID NO: 4602628 - DNA, 25 bp, Homo sapien
ttgtgtaaaacccaacagccgctcc

SEQ ID NO: 4602629 - DNA, 25 bp, Homo sapien
tctccacaggattttagcttgttcc

SEQ ID NO: 4602630 - DNA, 25 bp, Homo sapien
tccaaaaataatggcgtttagaatg

SEQ ID NO: 4602631 - DNA, 25 bp, Homo sapien
tggcgtttagaatgaaaagcacaac

SEQ ID NO: 4602632 - DNA, 25 bp, Homo sapien
cttagtgcatcttccgtggagcacc

SEQ ID NO: 4602633 - DNA, 25 bp, Homo sapien
gcaggatcagaggttcttagtgcat

SEQ ID NO: 4602634 - DNA, 25 bp, Homo sapien
ccgtggagcaccaggattcctttat

SEQ ID NO: 4602635 - DNA, 25 bp, Homo sapien
ctcttgcaggatcagaggttcttag

SEQ ID NO: 4602636 - DNA, 25 bp, Homo sapien
gacctggacatgactccaacttcac

SEQ ID NO: 4602637 - DNA, 25 bp, Homo sapien
atgactccaacttcactaagcccaa

SEQ ID NO: 4602638 - DNA, 25 bp, Homo sapien
accattccaagtgtagacatgggtc

SEQ ID NO: 4602639 - DNA, 25 bp, Homo sapien
caagtgtagacatgggtcccgctgc

SEQ ID NO: 4602640 - DNA, 25 bp, Homo sapien
catctgacgtcaaagtccatattca

SEQ ID NO: 4602641 - DNA, 25 bp, Homo sapien
aagtcagctccatctgacgtcaaag

SEQ ID NO: 4602642 - DNA, 25 bp, Homo sapien
ctgacgtcaaagtccatattcatcc

SEQ ID NO: 4602643 - DNA, 25 bp, Homo sapien
gctccatctgacgtcaaagtccata

SEQ ID NO: 4602644 - DNA, 25 bp, Homo sapien
tcgtaacagcagactgccaccacga

SEQ ID NO: 4602645 - DNA, 25 bp, Homo sapien
cgaacgataaccacttgccacaggg

SEQ ID NO: 4602646 - DNA, 25 bp, Homo sapien
tgccaccacgaacgataaccacttg

SEQ ID NO: 4602647 - DNA, 25 bp, Homo sapien
agcagactgccaccacgaacgataa

SEQ ID NO: 4602648 - DNA, 25 bp, Homo sapien
cttcgccaaggaagatcacgtatac

SEQ ID NO: 4602649 - DNA, 25 bp, Homo sapien
agagctcttcgccaaggaagatcac

SEQ ID NO: 4602650 - DNA, 25 bp, Homo sapien
gagctcttcgccaaggaagatcacg

SEQ ID NO: 4602651 - DNA, 25 bp, Homo sapien
gctcttcgccaaggaagatcacgta

SEQ ID NO: 4602652 - DNA, 25 bp, Homo sapien
ccagctccttccctaagtgaggcat

SEQ ID NO: 4602653 - DNA, 25 bp, Homo sapien
gctgcttcctgttgtgcgtcaggat

SEQ ID NO: 4602654 - DNA, 25 bp, Homo sapien
ggcatggtaagccagagctgcttcc

SEQ ID NO: 4602655 - DNA, 25 bp, Homo sapien
tgttgtgcgtcaggatcatcttcca

SEQ ID NO: 4602656 - DNA, 25 bp, Homo sapien
tctgttatcaggtatttagtattgg

SEQ ID NO: 4602657 - DNA, 25 bp, Homo sapien
tgttgatctgttatcaggtatttag

SEQ ID NO: 4602658 - DNA, 25 bp, Homo sapien
agcctgttgatctgttatcaggtat

SEQ ID NO: 4602659 - DNA, 25 bp, Homo sapien
tgatctgttatcaggtatttagtat

SEQ ID NO: 4602660 - DNA, 25 bp, Homo sapien
tctagcgcaggctcgtgctctggag

SEQ ID NO: 4602661 - DNA, 25 bp, Homo sapien
catgcagggcttgggacgggctttt

SEQ ID NO: 4602662 - DNA, 25 bp, Homo sapien
tcaaagaccacgattctgcattccc

SEQ ID NO: 4602663 - DNA, 25 bp, Homo sapien
ccatcccctggtgatatccttctag

SEQ ID NO: 4602664 - DNA, 25 bp, Homo sapien
gagctcgtgcaaacttagaccccag

SEQ ID NO: 4602665 - DNA, 25 bp, Homo sapien
tgggtttccttgactccgcataaac

SEQ ID NO: 4602666 - DNA, 25 bp, Homo sapien
ttccagcccaaatcagaggcggtcg

SEQ ID NO: 4602667 - DNA, 25 bp, Homo sapien
taagagccgatgttgatgaggagcc

SEQ ID NO: 4602668 - DNA, 25 bp, Homo sapien
tagcccacatatctcctgagccacg

SEQ ID NO: 4602669 - DNA, 25 bp, Homo sapien
cacgaacccaacaggtccctccaag

SEQ ID NO: 4602670 - DNA, 25 bp, Homo sapien
ctctctcgtcatagatgaagcccag

SEQ ID NO: 4602671 - DNA, 25 bp, Homo sapien
ctccaagaggatgccactttctctc

SEQ ID NO: 4602672 - DNA, 25 bp, Homo sapien
tactggcatcaattagcctgagtca

SEQ ID NO: 4602673 - DNA, 25 bp, Homo sapien
tgagtcatgaaaccggaccacatta

SEQ ID NO: 4602674 - DNA, 25 bp, Homo sapien
aatcactgtttgtaaaagtccacgt

SEQ ID NO: 4602675 - DNA, 25 bp, Homo sapien
cacattaagggcgacacatggtcca

SEQ ID NO: 4602676 - DNA, 25 bp, Homo sapien
gtgggtttccgcagtagccgctgat

SEQ ID NO: 4602677 - DNA, 25 bp, Homo sapien
gcagtagccgctgatcccgagtgca

SEQ ID NO: 4602678 - DNA, 25 bp, Homo sapien
ccgctgatcccgagtgcatgcggcg

SEQ ID NO: 4602679 - DNA, 25 bp, Homo sapien
tgggaggacccgagacaggtgcggg

SEQ ID NO: 4602680 - DNA, 25 bp, Homo sapien
aaaaggaatgaagtctggctccgga

SEQ ID NO: 4602681 - DNA, 25 bp, Homo sapien
atttcatcccaaataaaaggaatga

SEQ ID NO: 4602682 - DNA, 25 bp, Homo sapien
aatgaagtctggctccggaggaggg

SEQ ID NO: 4602683 - DNA, 25 bp, Homo sapien
tgaagtctggctccggaggagggtc

SEQ ID NO: 4602684 - DNA, 25 bp, Homo sapien
gagaaagtgagtatgtgcccgccgc

SEQ ID NO: 4602685 - DNA, 25 bp, Homo sapien
tgcgccctgtttgcgaaacccgagt

SEQ ID NO: 4602686 - DNA, 25 bp, Homo sapien
tcgctctggccgacgagtggagaaa

SEQ ID NO: 4602687 - DNA, 25 bp, Homo sapien
gcggccactgcgggaacttttcctc

SEQ ID NO: 4602688 - DNA, 25 bp, Homo sapien
cgcagggcggctctgccgggaggga

SEQ ID NO: 4602689 - DNA, 25 bp, Homo sapien
ctcgggagcggcggggtggggcgca

SEQ ID NO: 4602690 - DNA, 25 bp, Homo sapien
gggcgcagggcggctctgccgggag

SEQ ID NO: 4602691 - DNA, 25 bp, Homo sapien
gggcggctctgccgggagggaggct

SEQ ID NO: 4602692 - DNA, 25 bp, Homo sapien
gacccgggctcgttcgtctggagcc

SEQ ID NO: 4602693 - DNA, 25 bp, Homo sapien
ggctcgttcgtctggagccccgcgg

SEQ ID NO: 4602694 - DNA, 25 bp, Homo sapien
ggacccgggctcgttcgtctggagc

SEQ ID NO: 4602695 - DNA, 25 bp, Homo sapien
tcgttcgtctggagccccgcgggcc

SEQ ID NO: 4602696 - DNA, 25 bp, Homo sapien
caacgtgcttttgcccctcgggctc

SEQ ID NO: 4602697 - DNA, 25 bp, Homo sapien
ctcctcgggttcctggccttgcccg

SEQ ID NO: 4602698 - DNA, 25 bp, Homo sapien
ttccatgcgcaagagcctctccgca

SEQ ID NO: 4602699 - DNA, 25 bp, Homo sapien
gcccgctcctcgttgggttacctgc

SEQ ID NO: 4602700 - DNA, 25 bp, Homo sapien
ctagggccgcatccgagtgtgcgtt

SEQ ID NO: 4602701 - DNA, 25 bp, Homo sapien
tagttaataagcagtgtcgctccac

SEQ ID NO: 4602702 - DNA, 25 bp, Homo sapien
gtgcattccgacacacgtgctcgca

SEQ ID NO: 4602703 - DNA, 25 bp, Homo sapien
ttgtgttttgcgagcgcggagccct

SEQ ID NO: 4602704 - DNA, 25 bp, Homo sapien
ctgaaaaagttgaaagtgtggctta

SEQ ID NO: 4602705 - DNA, 25 bp, Homo sapien
tatgagtttttcagatccgtgagtt

SEQ ID NO: 4602706 - DNA, 25 bp, Homo sapien
tcagatccgtgagttgcagcaatac

SEQ ID NO: 4602707 - DNA, 25 bp, Homo sapien
gataattgaagcttagcaacaggga

SEQ ID NO: 4602708 - DNA, 25 bp, Homo sapien
tattacatacatttgacaggctgat

SEQ ID NO: 4602709 - DNA, 25 bp, Homo sapien
aactgatatttccttacttgaactg

SEQ ID NO: 4602710 - DNA, 25 bp, Homo sapien
tgaactgagaaatagtcgttttccc

SEQ ID NO: 4602711 - DNA, 25 bp, Homo sapien
ttttttccactgatgccggctttac

SEQ ID NO: 4602712 - DNA, 25 bp, Homo sapien
tacatgttgagtacttactggatgc

SEQ ID NO: 4602713 - DNA, 25 bp, Homo sapien
tgtccatggagctcacttggtggtt

SEQ ID NO: 4602714 - DNA, 25 bp, Homo sapien
tcacttggtggttggtggtcttgaa

SEQ ID NO: 4602715 - DNA, 25 bp, Homo sapien
gcaatataagttgttgggccttgtg

SEQ ID NO: 4602716 - DNA, 25 bp, Homo sapien
gtagtggggcggctggctagtcaca

SEQ ID NO: 4602717 - DNA, 25 bp, Homo sapien
accataggtctctacttcagtaaga

SEQ ID NO: 4602718 - DNA, 25 bp, Homo sapien
atccgtccatcgtccaaattctgcg

SEQ ID NO: 4602719 - DNA, 25 bp, Homo sapien
taagagttacataatacgaatgccg

SEQ ID NO: 4602720 - DNA, 25 bp, Homo sapien
gaattgtgtatctccatccatccgt

SEQ ID NO: 4602721 - DNA, 25 bp, Homo sapien
agaagacagacttactgctgcagcc

SEQ ID NO: 4602722 - DNA, 25 bp, Homo sapien
gcttcagagccctcagtagtacttt

SEQ ID NO: 4602723 - DNA, 25 bp, Homo sapien
agctgacaccagcatcagtgagttg

SEQ ID NO: 4602724 - DNA, 25 bp, Homo sapien
ccatcagatgtgtggaattctatta

SEQ ID NO: 4602725 - DNA, 25 bp, Homo sapien
ttcggctacagtgggcggcagagtg

SEQ ID NO: 4602726 - DNA, 25 bp, Homo sapien
gctgagagtgccacttggattcggc

SEQ ID NO: 4602727 - DNA, 25 bp, Homo sapien
catttctggtgcttggtagatggta

SEQ ID NO: 4602728 - DNA, 25 bp, Homo sapien
gcactgataagagcatgggctgaga

SEQ ID NO: 4602729 - DNA, 25 bp, Homo sapien
aaatttggagtgtttggatgttcgg

SEQ ID NO: 4602730 - DNA, 25 bp, Homo sapien
agacagagacaaatttggagtgttt

SEQ ID NO: 4602731 - DNA, 25 bp, Homo sapien
gcagatgaggtagatcggggcccca

SEQ ID NO: 4602732 - DNA, 25 bp, Homo sapien
cagagacaaatttggagtgtttgga

SEQ ID NO: 4602733 - DNA, 25 bp, Homo sapien
ctttggtggtgaaggaatgtttcca

SEQ ID NO: 4602734 - DNA, 25 bp, Homo sapien
ggagctgggtgctctgaatgagcag

SEQ ID NO: 4602735 - DNA, 25 bp, Homo sapien
gggagctgggtgctctgaatgagca

SEQ ID NO: 4602736 - DNA, 25 bp, Homo sapien
aaaaggcaaaaactacagtggtcat

SEQ ID NO: 4602737 - DNA, 25 bp, Homo sapien
caaaaggcaaaaactacagtggtca

SEQ ID NO: 4602738 - DNA, 25 bp, Homo sapien
tgagggcggctgcactactttctgc

SEQ ID NO: 4602739 - DNA, 25 bp, Homo sapien
tggcgcatgacatacacctcgttgt

SEQ ID NO: 4602740 - DNA, 25 bp, Homo sapien
tacaagtctgctttgctgatcgatt

SEQ ID NO: 4602741 - DNA, 25 bp, Homo sapien
gtttcgcatgtctacctggcgcatg

SEQ ID NO: 4602742 - DNA, 25 bp, Homo sapien
caggagaaagatgactgtccctctc

SEQ ID NO: 4602743 - DNA, 25 bp, Homo sapien
aggagaaagatgactgtccctctca

SEQ ID NO: 4602744 - DNA, 25 bp, Homo sapien
ggagaaagatgactgtccctctcat

SEQ ID NO: 4602745 - DNA, 25 bp, Homo sapien
gctttgctcctgaactgcagcggtg

SEQ ID NO: 4602746 - DNA, 25 bp, Homo sapien
gggctttgctcctgaactgcagcgg

SEQ ID NO: 4602747 - DNA, 25 bp, Homo sapien
tttgctcctgaactgcagcggtgtc

SEQ ID NO: 4602748 - DNA, 25 bp, Homo sapien
ttgctcctgaactgcagcggtgtct

SEQ ID NO: 4602749 - DNA, 25 bp, Homo sapien
ttagtagaaatcgtaggatgcctca

SEQ ID NO: 4602750 - DNA, 25 bp, Homo sapien
tcagggatgcggattgtcctccgga

SEQ ID NO: 4602751 - DNA, 25 bp, Homo sapien
agaaatcgtaggatgcctcagtgaa

SEQ ID NO: 4602752 - DNA, 25 bp, Homo sapien
gcggattgtcctccggatgcttgga

SEQ ID NO: 4602753 - DNA, 25 bp, Homo sapien
aggcatcgacatccgcaacgactat

SEQ ID NO: 4602754 - DNA, 25 bp, Homo sapien
gaggactaccgcagctaccgcttcc

SEQ ID NO: 4602755 - DNA, 25 bp, Homo sapien
tgatcgagggctacctccacatcct

SEQ ID NO: 4602756 - DNA, 25 bp, Homo sapien
ctatcagcagctgaagcgcctggag

SEQ ID NO: 4602757 - DNA, 25 bp, Homo sapien
ctacttgtgaagagctgagatgttt

SEQ ID NO: 4602758 - DNA, 25 bp, Homo sapien
tacttgtgaagagctgagatgtttc

SEQ ID NO: 4602759 - DNA, 25 bp, Homo sapien
cttgtgaagagctgagatgtttctg

SEQ ID NO: 4602760 - DNA, 25 bp, Homo sapien
acttgtgaagagctgagatgtttct

SEQ ID NO: 4602761 - DNA, 25 bp, Homo sapien
cattttcaggtggactcttgggagg

SEQ ID NO: 4602762 - DNA, 25 bp, Homo sapien
ctgctaagacgatcatgacacaggc

SEQ ID NO: 4602763 - DNA, 25 bp, Homo sapien
atgacacaggcttgcattttcaggt

SEQ ID NO: 4602764 - DNA, 25 bp, Homo sapien
gccactgttccccagactgctaaga

SEQ ID NO: 4602765 - DNA, 25 bp, Homo sapien
tgtgactggtcttcaggatgtttag

SEQ ID NO: 4602766 - DNA, 25 bp, Homo sapien
tgtgcctgccctcactctcagtgtg

SEQ ID NO: 4602767 - DNA, 25 bp, Homo sapien
tccgtgggggcagaagctaccatcc

SEQ ID NO: 4602768 - DNA, 25 bp, Homo sapien
tgtttaggtggctccacatgcggat

SEQ ID NO: 4602769 - DNA, 25 bp, Homo sapien
cccaaatcttccttactgaggactc

SEQ ID NO: 4602770 - DNA, 25 bp, Homo sapien
tccaggttgcttttgtgctcatcca

SEQ ID NO: 4602771 - DNA, 25 bp, Homo sapien
tgatcttccatgaagccccccaaat

SEQ ID NO: 4602772 - DNA, 25 bp, Homo sapien
cttactgaggactcttgcttccagg

SEQ ID NO: 4602773 - DNA, 25 bp, Homo sapien
ttggagcagtttaggccaatccatt

SEQ ID NO: 4602774 - DNA, 25 bp, Homo sapien
gaatttgtattatggcagcgagggc

SEQ ID NO: 4602775 - DNA, 25 bp, Homo sapien
tatcacttatgaaccaagaacctgt

SEQ ID NO: 4602776 - DNA, 25 bp, Homo sapien
caaaacgcatttttaaggagtctca

SEQ ID NO: 4602777 - DNA, 25 bp, Homo sapien
tggtggaatcagagcagtagcatct

SEQ ID NO: 4602778 - DNA, 25 bp, Homo sapien
gcatgccggtctttgggactcctag

SEQ ID NO: 4602779 - DNA, 25 bp, Homo sapien
gaatgaggtaaacctccaggcagcc

SEQ ID NO: 4602780 - DNA, 25 bp, Homo sapien
gaggtttgcagatttgaaccccagt

SEQ ID NO: 4602781 - DNA, 25 bp, Homo sapien
tcttgaagagccctaacagtaggtc

SEQ ID NO: 4602782 - DNA, 25 bp, Homo sapien
tgtggtcttggtgaactgtcccgtt

SEQ ID NO: 4602783 - DNA, 25 bp, Homo sapien
ccggaagtgcttggtgacctccaca

SEQ ID NO: 4602784 - DNA, 25 bp, Homo sapien
ccgttccctggagacagtatctggg

SEQ ID NO: 4602785 - DNA, 25 bp, Homo sapien
tatgattagaagagcttgactcgga

SEQ ID NO: 4602786 - DNA, 25 bp, Homo sapien
tacttagtgcacatagagttggcct

SEQ ID NO: 4602787 - DNA, 25 bp, Homo sapien
gactcggagtggaaacagataacat

SEQ ID NO: 4602788 - DNA, 25 bp, Homo sapien
tatgttcccaatagcatgatgtgtt

SEQ ID NO: 4602789 - DNA, 25 bp, Homo sapien
aatgtggaatcaattagatgaattt

SEQ ID NO: 4602790 - DNA, 25 bp, Homo sapien
gaatgtggaatcaattagatgaatt

SEQ ID NO: 4602791 - DNA, 25 bp, Homo sapien
tgtggaatcaattagatgaattttg

SEQ ID NO: 4602792 - DNA, 25 bp, Homo sapien
gtggaatcaattagatgaattttga

SEQ ID NO: 4602793 - DNA, 25 bp, Homo sapien
ggtgttggcacaaagcgtatcccat

SEQ ID NO: 4602794 - DNA, 25 bp, Homo sapien
tgagaggacagtgcaccctttgggc

SEQ ID NO: 4602795 - DNA, 25 bp, Homo sapien
tgtgtatcgaaactgcaggtagtgc

SEQ ID NO: 4602796 - DNA, 25 bp, Homo sapien
catttccctgaatgtcgtgtggaca

SEQ ID NO: 4602797 - DNA, 25 bp, Homo sapien
agagccctccaaaatcattaagctg

SEQ ID NO: 4602798 - DNA, 25 bp, Homo sapien
ccaaaatcattaagctgatttgtag

SEQ ID NO: 4602799 - DNA, 25 bp, Homo sapien
gccctccaaaatcattaagctgatt

SEQ ID NO: 4602800 - DNA, 25 bp, Homo sapien
gcccccagcatagtcatttgagtga

SEQ ID NO: 4602801 - DNA, 25 bp, Homo sapien
atatggtttcctgtacagtactgcc

SEQ ID NO: 4602802 - DNA, 25 bp, Homo sapien
caatatggtttcctgtacagtactg

SEQ ID NO: 4602803 - DNA, 25 bp, Homo sapien
aatatggtttcctgtacagtactgc

SEQ ID NO: 4602804 - DNA, 25 bp, Homo sapien
ctctgtgccatccaccgtcttggga

SEQ ID NO: 4602805 - DNA, 25 bp, Homo sapien
caccgtcttgggaaccccagcgtgg

SEQ ID NO: 4602806 - DNA, 25 bp, Homo sapien
tcttgggaaccccagcgtggcattc

SEQ ID NO: 4602807 - DNA, 25 bp, Homo sapien
aggatgggaacaggcggcagctgct

SEQ ID NO: 4602808 - DNA, 25 bp, Homo sapien
ccaggattctggcttggatgacaac

SEQ ID NO: 4602809 - DNA, 25 bp, Homo sapien
caatcaggaagcaattggagtaggc

SEQ ID NO: 4602810 - DNA, 25 bp, Homo sapien
caaagtgaacttggactagtggtgg

SEQ ID NO: 4602811 - DNA, 25 bp, Homo sapien
ggatgacaactatggcaatgcccat

SEQ ID NO: 4602812 - DNA, 25 bp, Homo sapien
agaaggaattcccagcagtgacttg

SEQ ID NO: 4602813 - DNA, 25 bp, Homo sapien
ccgagaaggaattcccagcagtgac

SEQ ID NO: 4602814 - DNA, 25 bp, Homo sapien
aaatgtggactggtgccgagaagga

SEQ ID NO: 4602815 - DNA, 25 bp, Homo sapien
ttggaaatgtggactggtgccgaga

SEQ ID NO: 4602816 - DNA, 25 bp, Homo sapien
ctgatgaatgaagtgatggctggaa

SEQ ID NO: 4602817 - DNA, 25 bp, Homo sapien
ctgagagctgatgaatgaagtgatg

SEQ ID NO: 4602818 - DNA, 25 bp, Homo sapien
agagctgatgaatgaagtgatggct

SEQ ID NO: 4602819 - DNA, 25 bp, Homo sapien
atgaatgaagtgatggctggaagca

SEQ ID NO: 4602820 - DNA, 25 bp, Homo sapien
cagactgacactagaagggaaacca

SEQ ID NO: 4602821 - DNA, 25 bp, Homo sapien
ggaaacatctaggtcgggacaggta

SEQ ID NO: 4602822 - DNA, 25 bp, Homo sapien
aatgcgtgttacctttgacccagaa

SEQ ID NO: 4602823 - DNA, 25 bp, Homo sapien
gacaggtatgggagtgacacacctc

SEQ ID NO: 4602824 - DNA, 25 bp, Homo sapien
ttctcttttgtcattctcaacctct

SEQ ID NO: 4602825 - DNA, 25 bp, Homo sapien
ctttctcttttgtcattctcaacct

SEQ ID NO: 4602826 - DNA, 25 bp, Homo sapien
tctcttttgtcattctcaacctctt

SEQ ID NO: 4602827 - DNA, 25 bp, Homo sapien
tcttttgtcattctcaacctcttac

SEQ ID NO: 4602828 - DNA, 25 bp, Homo sapien
tgaagagtccattccctcagtatat

SEQ ID NO: 4602829 - DNA, 25 bp, Homo sapien
cattccctcagtatatagagcatct

SEQ ID NO: 4602830 - DNA, 25 bp, Homo sapien
gagtccattccctcagtatatagag

SEQ ID NO: 4602831 - DNA, 25 bp, Homo sapien
cctcagtatatagagcatctggaag

SEQ ID NO: 4602832 - DNA, 25 bp, Homo sapien
tgaacctttgctgcgttccgaagca

SEQ ID NO: 4602833 - DNA, 25 bp, Homo sapien
ctgcgttccgaagcagcacagccat

SEQ ID NO: 4602834 - DNA, 25 bp, Homo sapien
gagtccccactgaacctttgctgcg

SEQ ID NO: 4602835 - DNA, 25 bp, Homo sapien
tccaggaacactgaacaggagtccc

SEQ ID NO: 4602836 - DNA, 25 bp, Homo sapien
tgttagtgccgaagcacttctctga

SEQ ID NO: 4602837 - DNA, 25 bp, Homo sapien
cttctctgacttggtccgacattga

SEQ ID NO: 4602838 - DNA, 25 bp, Homo sapien
tggtccgacattgaagtaccttccc

SEQ ID NO: 4602839 - DNA, 25 bp, Homo sapien
tcaggatgttagtgccgaagcactt

SEQ ID NO: 4602840 - DNA, 25 bp, Homo sapien
ctgcattacagaagaacggcccccc

SEQ ID NO: 4602841 - DNA, 25 bp, Homo sapien
tgcattacagaagaacggcccccca

SEQ ID NO: 4602842 - DNA, 25 bp, Homo sapien
gcattacagaagaacggccccccag

SEQ ID NO: 4602843 - DNA, 25 bp, Homo sapien
cattacagaagaacggccccccagg

SEQ ID NO: 4602844 - DNA, 25 bp, Homo sapien
taacgatagctgtaatacaagtgcc

SEQ ID NO: 4602845 - DNA, 25 bp, Homo sapien
tacatgggtacttgtgtgtctccag

SEQ ID NO: 4602846 - DNA, 25 bp, Homo sapien
gctccataatggtctcttgaagtgt

SEQ ID NO: 4602847 - DNA, 25 bp, Homo sapien
gctgagtgcatgtcgctgcggcatt

SEQ ID NO: 4602848 - DNA, 25 bp, Homo sapien
cagtctttgcctctgtaagtatctc

SEQ ID NO: 4602849 - DNA, 25 bp, Homo sapien
agtctttgcctctgtaagtatctcc

SEQ ID NO: 4602850 - DNA, 25 bp, Homo sapien
tccctgccaggacagtctttgcctc

SEQ ID NO: 4602851 - DNA, 25 bp, Homo sapien
tcccattcagtccctaggtcctcca

SEQ ID NO: 4602852 - DNA, 25 bp, Homo sapien
ttcaggtcccattcagtccctaggt

SEQ ID NO: 4602853 - DNA, 25 bp, Homo sapien
ctttcaggtcccattcagtccctag

SEQ ID NO: 4602854 - DNA, 25 bp, Homo sapien
aggtcccattcagtccctaggtcct

SEQ ID NO: 4602855 - DNA, 25 bp, Homo sapien
tgaccgaataaagcctacttccaaa

SEQ ID NO: 4602856 - DNA, 25 bp, Homo sapien
ccaaatgagtgggttgtccaggtgt

SEQ ID NO: 4602857 - DNA, 25 bp, Homo sapien
caggtgtgcttgtagatgtcacata

SEQ ID NO: 4602858 - DNA, 25 bp, Homo sapien
gaaagtcgttcagagactcctgacc

SEQ ID NO: 4602859 - DNA, 25 bp, Homo sapien
gatgtcaccttgcccagcgtgacct

SEQ ID NO: 4602860 - DNA, 25 bp, Homo sapien
agctgcgatgtcaccttgcccagcg

SEQ ID NO: 4602861 - DNA, 25 bp, Homo sapien
gctgcgatgtcaccttgcccagcgt

SEQ ID NO: 4602862 - DNA, 25 bp, Homo sapien
tgcgatgtcaccttgcccagcgtga

SEQ ID NO: 4602863 - DNA, 25 bp, Homo sapien
gttttatcacaagacaagaaagagg

SEQ ID NO: 4602864 - DNA, 25 bp, Homo sapien
tggagtaatattcacaaacaggctt

SEQ ID NO: 4602865 - DNA, 25 bp, Homo sapien
agcccacacgtcttcactacaggat

SEQ ID NO: 4602866 - DNA, 25 bp, Homo sapien
tgaagctttcgtgtctttactggga

SEQ ID NO: 4602867 - DNA, 25 bp, Homo sapien
gacttcattcaagaggtcacttaaa

SEQ ID NO: 4602868 - DNA, 25 bp, Homo sapien
tattgaccatgtagcaactgtggaa

SEQ ID NO: 4602869 - DNA, 25 bp, Homo sapien
aatattgaacaagctgttctgaacc

SEQ ID NO: 4602870 - DNA, 25 bp, Homo sapien
agttctcatagtgtggtcggctctg

SEQ ID NO: 4602871 - DNA, 25 bp, Homo sapien
tcaggttggtcccttagaacgctgc

SEQ ID NO: 4602872 - DNA, 25 bp, Homo sapien
ctcagaactgtggtttggtggctct

SEQ ID NO: 4602873 - DNA, 25 bp, Homo sapien
tgaataaggatccacatagctccag

SEQ ID NO: 4602874 - DNA, 25 bp, Homo sapien
gtctgacgacatcttgtgatccggg

SEQ ID NO: 4602875 - DNA, 25 bp, Homo sapien
ttgccgcagtggagacattcctcgt

SEQ ID NO: 4602876 - DNA, 25 bp, Homo sapien
ttcacttggattttgcacttgccgc

SEQ ID NO: 4602877 - DNA, 25 bp, Homo sapien
cacgctcaatttgctgatcagggcc

SEQ ID NO: 4602878 - DNA, 25 bp, Homo sapien
gcgggtgtcctgaagcacgctcaat

SEQ ID NO: 4602879 - DNA, 25 bp, Homo sapien
tgtacttgccaaggttaaagttgag

SEQ ID NO: 4602880 - DNA, 25 bp, Homo sapien
tgtgacctggaacttggttaatgta

SEQ ID NO: 4602881 - DNA, 25 bp, Homo sapien
tgagacgctgtttgttaaacctttc

SEQ ID NO: 4602882 - DNA, 25 bp, Homo sapien
cctggaacttggttaatgtacttgc

SEQ ID NO: 4602883 - DNA, 25 bp, Homo sapien
tgtggatttccggtgactgatgata

SEQ ID NO: 4602884 - DNA, 25 bp, Homo sapien
actgatgatagcctctttggaagtc

SEQ ID NO: 4602885 - DNA, 25 bp, Homo sapien
cttttctgtggatttccggtgactg

SEQ ID NO: 4602886 - DNA, 25 bp, Homo sapien
gatgatagcctctttggaagtcagc

SEQ ID NO: 4602887 - DNA, 25 bp, Homo sapien
ctttagttcatttaccttataatgc

SEQ ID NO: 4602888 - DNA, 25 bp, Homo sapien
gaaacgccagtctagacttccgcag

SEQ ID NO: 4602889 - DNA, 25 bp, Homo sapien
ccgcagttttggattcgtggccata

SEQ ID NO: 4602890 - DNA, 25 bp, Homo sapien
tctctagcttatttagaaacgccag

SEQ ID NO: 4602891 - DNA, 25 bp, Homo sapien
cagctgtgagtttacaagatgtcgc

SEQ ID NO: 4602892 - DNA, 25 bp, Homo sapien
tgtgttcgaaggctctcactcgcga

SEQ ID NO: 4602893 - DNA, 25 bp, Homo sapien
acctgtatggtctttgcgtagctga

SEQ ID NO: 4602894 - DNA, 25 bp, Homo sapien
gataaagaccccatagtcctgtggt

SEQ ID NO: 4602895 - DNA, 25 bp, Homo sapien
cttttgtcgatcaaacagggtgacc

SEQ ID NO: 4602896 - DNA, 25 bp, Homo sapien
gaggcctttccttgatgatcgagct

SEQ ID NO: 4602897 - DNA, 25 bp, Homo sapien
gatttccccaaattggacagcctgg

SEQ ID NO: 4602898 - DNA, 25 bp, Homo sapien
tcacaaagggagctttgaggcccgg

SEQ ID NO: 4602899 - DNA, 25 bp, Homo sapien
ccttgagcacggttttgggaagagc

SEQ ID NO: 4602900 - DNA, 25 bp, Homo sapien
ttttcaaccttgagtgccacatctg

SEQ ID NO: 4602901 - DNA, 25 bp, Homo sapien
tgccattgtgcaccaaagtcccttt

SEQ ID NO: 4602902 - DNA, 25 bp, Homo sapien
catgggtagtacaagctgggtttgt

SEQ ID NO: 4602903 - DNA, 25 bp, Homo sapien
tgtgtcccgttaccaagttgtggcc

SEQ ID NO: 4602904 - DNA, 25 bp, Homo sapien
ttagcacagactccacagggatgag

SEQ ID NO: 4602905 - DNA, 25 bp, Homo sapien
tgagggttcagtcccacgagtctgc

SEQ ID NO: 4602906 - DNA, 25 bp, Homo sapien
gttttgccataccaacaaccagttg

SEQ ID NO: 4602907 - DNA, 25 bp, Homo sapien
ggtgcccacacttctgtctgacttg

SEQ ID NO: 4602908 - DNA, 25 bp, Homo sapien
agtgaaatgctttcttgattgtagc

SEQ ID NO: 4602909 - DNA, 25 bp, Homo sapien
gagaggtagggcaagataaaacgac

SEQ ID NO: 4602910 - DNA, 25 bp, Homo sapien
tgcctgctcgtataagacaccttgg

SEQ ID NO: 4602911 - DNA, 25 bp, Homo sapien
ggttggccattgactgcacagagag

SEQ ID NO: 4602912 - DNA, 25 bp, Homo sapien
aaaacgactcatttgtggatctgac

SEQ ID NO: 4602913 - DNA, 25 bp, Homo sapien
gaatggcagaagactatttttgcta

SEQ ID NO: 4602914 - DNA, 25 bp, Homo sapien
ccttcacacctttcgtgttacacat

SEQ ID NO: 4602915 - DNA, 25 bp, Homo sapien
tgttgctgcagccgtttctgatgtc

SEQ ID NO: 4602916 - DNA, 25 bp, Homo sapien
tgtagaatggcagaagactattttt

SEQ ID NO: 4602917 - DNA, 25 bp, Homo sapien
ctgtggtatagatgtggatgtcttt

SEQ ID NO: 4602918 - DNA, 25 bp, Homo sapien
gataaactccttgctatgatgccat

SEQ ID NO: 4602919 - DNA, 25 bp, Homo sapien
tccttggaacatggagcaccactct

SEQ ID NO: 4602920 - DNA, 25 bp, Homo sapien
cactgttggcctctcgaggagaacg

SEQ ID NO: 4602921 - DNA, 25 bp, Homo sapien
agaagttcacctactccttggaaag

SEQ ID NO: 4602922 - DNA, 25 bp, Homo sapien
ggctctagacttaaggtactcattt

SEQ ID NO: 4602923 - DNA, 25 bp, Homo sapien
gggctctagacttaaggtactcatt

SEQ ID NO: 4602924 - DNA, 25 bp, Homo sapien
ctggggctctagacttaaggtactc

SEQ ID NO: 4602925 - DNA, 25 bp, Homo sapien
tggggctctagacttaaggtactca

SEQ ID NO: 4602926 - DNA, 25 bp, Homo sapien
tcctgtgaactatgcgtttgctgct

SEQ ID NO: 4602927 - DNA, 25 bp, Homo sapien
gaactatgcgtttgctgcttccttt

SEQ ID NO: 4602928 - DNA, 25 bp, Homo sapien
aaattcctgtgaactatgcgtttgc

SEQ ID NO: 4602929 - DNA, 25 bp, Homo sapien
tgtgaactatgcgtttgctgcttcc

SEQ ID NO: 4602930 - DNA, 25 bp, Homo sapien
catgataccacacggtgatggtaac

SEQ ID NO: 4602931 - DNA, 25 bp, Homo sapien
ctctggttcatgcacactggtcttc

SEQ ID NO: 4602932 - DNA, 25 bp, Homo sapien
gataccacacggtgatggtaacaga

SEQ ID NO: 4602933 - DNA, 25 bp, Homo sapien
ctcttcatgataccacacggtgatg

SEQ ID NO: 4602934 - DNA, 25 bp, Homo sapien
gacacagtggagaacagggcagtac

SEQ ID NO: 4602935 - DNA, 25 bp, Homo sapien
tgacacagtggagaacagggcagta

SEQ ID NO: 4602936 - DNA, 25 bp, Homo sapien
cacagtggagaacagggcagtactg

SEQ ID NO: 4602937 - DNA, 25 bp, Homo sapien
acagtggagaacagggcagtactgc

SEQ ID NO: 4602938 - DNA, 25 bp, Homo sapien
tatgcatctagaggcatccccaggt

SEQ ID NO: 4602939 - DNA, 25 bp, Homo sapien
gacctctgaggtgattatgcatcta

SEQ ID NO: 4602940 - DNA, 25 bp, Homo sapien
aagctgggaagtttcccctggctgg

SEQ ID NO: 4602941 - DNA, 25 bp, Homo sapien
ctggactctggctcaggacctctga

SEQ ID NO: 4602942 - DNA, 25 bp, Homo sapien
gattttgattagcaacactgcagca

SEQ ID NO: 4602943 - DNA, 25 bp, Homo sapien
ccacgatgggtcttgaatcctttcc

SEQ ID NO: 4602944 - DNA, 25 bp, Homo sapien
ctggtttgggtcacatcggatgcta

SEQ ID NO: 4602945 - DNA, 25 bp, Homo sapien
taaattgcttggatgggcagatcga

SEQ ID NO: 4602946 - DNA, 25 bp, Homo sapien
gaattatttgcgacagggctgcctg

SEQ ID NO: 4602947 - DNA, 25 bp, Homo sapien
catttccagcagtacaatgtggttg

SEQ ID NO: 4602948 - DNA, 25 bp, Homo sapien
tgtggcattcagttcaaaaatgccc

SEQ ID NO: 4602949 - DNA, 25 bp, Homo sapien
tccaagcaggaagcgcaggcaaaat

SEQ ID NO: 4602950 - DNA, 25 bp, Homo sapien
aatgcagtaaagcaaggagtatatt

SEQ ID NO: 4602951 - DNA, 25 bp, Homo sapien
gaagcttcaggttctcttcggttta

SEQ ID NO: 4602952 - DNA, 25 bp, Homo sapien
gcaaggagtatattaatgcgggcct

SEQ ID NO: 4602953 - DNA, 25 bp, Homo sapien
taaagcaaggagtatattaatgcgg

SEQ ID NO: 4602954 - DNA, 25 bp, Homo sapien
ggtgatgtccgcttgtttgctccca

SEQ ID NO: 4602955 - DNA, 25 bp, Homo sapien
gaaattttcctgttgggatgagagg

SEQ ID NO: 4602956 - DNA, 25 bp, Homo sapien
tcggcagcttaatgaaaccagaaat

SEQ ID NO: 4602957 - DNA, 25 bp, Homo sapien
cagaaatagataagcacgagtgagg

SEQ ID NO: 4602958 - DNA, 25 bp, Homo sapien
cactggatctgggagcacggtgcta

SEQ ID NO: 4602959 - DNA, 25 bp, Homo sapien
tgtgctttccactgtagagctgccc

SEQ ID NO: 4602960 - DNA, 25 bp, Homo sapien
cccagagtggtcagatagtttgccg

SEQ ID NO: 4602961 - DNA, 25 bp, Homo sapien
taagcgtgacctccttcagtttggc

SEQ ID NO: 4602962 - DNA, 25 bp, Homo sapien
ttgttcaatttactcagcacctgtg

SEQ ID NO: 4602963 - DNA, 25 bp, Homo sapien
gaataggtgtgtatcctcctaagga

SEQ ID NO: 4602964 - DNA, 25 bp, Homo sapien
cagtttcctggtaaacagttctgct

SEQ ID NO: 4602965 - DNA, 25 bp, Homo sapien
aaatctaagttccacaggtagtgca

SEQ ID NO: 4602966 - DNA, 25 bp, Homo sapien
aaggctggaaactgcttgcacactt

SEQ ID NO: 4602967 - DNA, 25 bp, Homo sapien
gcaaggctggaaactgcttgcacac

SEQ ID NO: 4602968 - DNA, 25 bp, Homo sapien
caattcatgtagctcagcaaggctg

SEQ ID NO: 4602969 - DNA, 25 bp, Homo sapien
tcagcaaggctggaaactgcttgca

SEQ ID NO: 4602970 - DNA, 25 bp, Homo sapien
cctgagaagcctgtgctcaccgtca

SEQ ID NO: 4602971 - DNA, 25 bp, Homo sapien
tgtgctcaccgtcactctcttcttc

SEQ ID NO: 4602972 - DNA, 25 bp, Homo sapien
agaagcctgtgctcaccgtcactct

SEQ ID NO: 4602973 - DNA, 25 bp, Homo sapien
tcagcctgagaagcctgtgctcacc

SEQ ID NO: 4602974 - DNA, 25 bp, Homo sapien
gatctgggctactgaggctagaatg

SEQ ID NO: 4602975 - DNA, 25 bp, Homo sapien
cagatggtcctggacatatcttgaa

SEQ ID NO: 4602976 - DNA, 25 bp, Homo sapien
tatcttgaatctaccctgcttttcc

SEQ ID NO: 4602977 - DNA, 25 bp, Homo sapien
cttgatctgggctactgaggctaga

SEQ ID NO: 4602978 - DNA, 25 bp, Homo sapien
atgtcagttcacctagagcccctcg

SEQ ID NO: 4602979 - DNA, 25 bp, Homo sapien
tgggtggacttctgttcggcctggg

SEQ ID NO: 4602980 - DNA, 25 bp, Homo sapien
gcttagctgagctaagtcctttctg

SEQ ID NO: 4602981 - DNA, 25 bp, Homo sapien
ctcatttgcttagctgagctaagtc

SEQ ID NO: 4602982 - DNA, 25 bp, Homo sapien
ccctggggacaggattgtcgctgat

SEQ ID NO: 4602983 - DNA, 25 bp, Homo sapien
cttgctgtgtcgtccgttccctggg

SEQ ID NO: 4602984 - DNA, 25 bp, Homo sapien
ggattgtcgctgatcctgcgtgcat

SEQ ID NO: 4602985 - DNA, 25 bp, Homo sapien
tcccgtacttgctgtgtcgtccgtt

SEQ ID NO: 4602986 - DNA, 25 bp, Homo sapien
aacgcagccgtggaagacttgggcc

SEQ ID NO: 4602987 - DNA, 25 bp, Homo sapien
tccacgtgtccagactgttgccaga

SEQ ID NO: 4602988 - DNA, 25 bp, Homo sapien
tagtgacgtaaaaggtcccggctgc

SEQ ID NO: 4602989 - DNA, 25 bp, Homo sapien
ggctttcaggaaacgtagtgacgta

SEQ ID NO: 4602990 - DNA, 25 bp, Homo sapien
ggagggagagacacattcagccccg

SEQ ID NO: 4602991 - DNA, 25 bp, Homo sapien
tcctctgggaatccggtgagcgtcg

SEQ ID NO: 4602992 - DNA, 25 bp, Homo sapien
cagcgtgtgggaatgtgcgggtgcc

SEQ ID NO: 4602993 - DNA, 25 bp, Homo sapien
atgtgcgggtgcctcgtggcctgct

SEQ ID NO: 4602994 - DNA, 25 bp, Homo sapien
tcagggccaagagtgaagtgagaat

SEQ ID NO: 4602995 - DNA, 25 bp, Homo sapien
cagcctgtccagttcaggacatcag

SEQ ID NO: 4602996 - DNA, 25 bp, Homo sapien
tgagaatacggaggcacctctgtgt

SEQ ID NO: 4602997 - DNA, 25 bp, Homo sapien
aggtcacagcctgtccagttcagga

SEQ ID NO: 4602998 - DNA, 25 bp, Homo sapien
ttgccacaagtccagctgggaagcc

SEQ ID NO: 4602999 - DNA, 25 bp, Homo sapien
actgacatgggcctttaagaacctt

SEQ ID NO: 4603000 - DNA, 25 bp, Homo sapien
cctgtacctcagtggatcttcagaa

SEQ ID NO: 4603001 - DNA, 25 bp, Homo sapien
tgggaagccctttttatcagtttga

SEQ ID NO: 4603002 - DNA, 25 bp, Homo sapien
aacatttgcatacacatcgtcttta

SEQ ID NO: 4603003 - DNA, 25 bp, Homo sapien
ctgttcctaggacttcttcatgggt

SEQ ID NO: 4603004 - DNA, 25 bp, Homo sapien
catgggtcttacagttctatgttag

SEQ ID NO: 4603005 - DNA, 25 bp, Homo sapien
gcatacacatcgtctttaatgtcac

SEQ ID NO: 4603006 - DNA, 25 bp, Homo sapien
ctgtacagaaaaaaaaaagctgcta

SEQ ID NO: 4603007 - DNA, 25 bp, Homo sapien
tgtacagaaaaaaaaaagctgctat

SEQ ID NO: 4603008 - DNA, 25 bp, Homo sapien
cagcattggagcctgttacagtgca

SEQ ID NO: 4603009 - DNA, 25 bp, Homo sapien
aagggaactccttcgcactggcgtt

SEQ ID NO: 4603010 - DNA, 25 bp, Homo sapien
aaacagctgctgagtccaagggagc

SEQ ID NO: 4603011 - DNA, 25 bp, Homo sapien
taaccgcagacactaggcatttgga

SEQ ID NO: 4603012 - DNA, 25 bp, Homo sapien
catttcgtccttaagagagcagtgg

SEQ ID NO: 4603013 - DNA, 25 bp, Homo sapien
gagatgtaccaaaccttccggctgg

SEQ ID NO: 4603014 - DNA, 25 bp, Homo sapien
tctctgtgcgaatccccagggtaaa

SEQ ID NO: 4603015 - DNA, 25 bp, Homo sapien
cattcattgagcacaaaggtgcagc

SEQ ID NO: 4603016 - DNA, 25 bp, Homo sapien
tggtgggtacagaaccattgtcaca

SEQ ID NO: 4603017 - DNA, 25 bp, Homo sapien
ggtggtgggtacagaaccattgtca

SEQ ID NO: 4603018 - DNA, 25 bp, Homo sapien
gtgggtacagaaccattgtcacagg

SEQ ID NO: 4603019 - DNA, 25 bp, Homo sapien
cgggtggtgggtacagaaccattgt

SEQ ID NO: 4603020 - DNA, 25 bp, Homo sapien
tgaagctatcagaccacatcgaggc

SEQ ID NO: 4603021 - DNA, 25 bp, Homo sapien
ggctcagcagtcatccgtgggcatt

SEQ ID NO: 4603022 - DNA, 25 bp, Homo sapien
aaactgatctcggagttaaggcgaa

SEQ ID NO: 4603023 - DNA, 25 bp, Homo sapien
acagagaagagttacgagcagcagg

SEQ ID NO: 4603024 - DNA, 25 bp, Homo sapien
gaaacagccgaggtgttggagccca

SEQ ID NO: 4603025 - DNA, 25 bp, Homo sapien
catctggcttgattggtctggctgc

SEQ ID NO: 4603026 - DNA, 25 bp, Homo sapien
catggcaccgttcggcatctggctt

SEQ ID NO: 4603027 - DNA, 25 bp, Homo sapien
ccatggacatgggaagacttgactg

SEQ ID NO: 4603028 - DNA, 25 bp, Homo sapien
gagacgcccggtgaaaacacctgtc

SEQ ID NO: 4603029 - DNA, 25 bp, Homo sapien
catttggatgtttggcgttgcacac

SEQ ID NO: 4603030 - DNA, 25 bp, Homo sapien
tgttagaacacagaagagaccctat

SEQ ID NO: 4603031 - DNA, 25 bp, Homo sapien
tgcgctacataggagaaagatctgg

SEQ ID NO: 4603032 - DNA, 25 bp, Homo sapien
ctctggattctttacataatggaaa

SEQ ID NO: 4603033 - DNA, 25 bp, Homo sapien
aagaatttattcctgttattgcgat

SEQ ID NO: 4603034 - DNA, 25 bp, Homo sapien
tgaatggctgaagctaaggcaacgt

SEQ ID NO: 4603035 - DNA, 25 bp, Homo sapien
gaagctaaggcaacgttagtttctc

SEQ ID NO: 4603036 - DNA, 25 bp, Homo sapien
cagattgccagtaaagacgacaggg

SEQ ID NO: 4603037 - DNA, 25 bp, Homo sapien
cctggaagcgttctccagaaaagca

SEQ ID NO: 4603038 - DNA, 25 bp, Homo sapien
cagtaaagacgacagggaagctatc

SEQ ID NO: 4603039 - DNA, 25 bp, Homo sapien
agctttctcagcatgcagattgcca

SEQ ID NO: 4603040 - DNA, 25 bp, Homo sapien
ggttctcaatctggcttcagcactg

SEQ ID NO: 4603041 - DNA, 25 bp, Homo sapien
gctctgtgcatactgacaagggatg

SEQ ID NO: 4603042 - DNA, 25 bp, Homo sapien
ccagaactaagcaggctctgtgcat

SEQ ID NO: 4603043 - DNA, 25 bp, Homo sapien
gctgtggttctcaatctggcttcag

SEQ ID NO: 4603044 - DNA, 25 bp, Homo sapien
ggacacacaagctcaaaggccagga

SEQ ID NO: 4603045 - DNA, 25 bp, Homo sapien
ctccaaaacaggtctgtggtcccca

SEQ ID NO: 4603046 - DNA, 25 bp, Homo sapien
ggagcagcggctgtctctgtgcttc

SEQ ID NO: 4603047 - DNA, 25 bp, Homo sapien
tgtgcttctgtaagcatctccaaaa

SEQ ID NO: 4603048 - DNA, 25 bp, Homo sapien
tgtcatgaaaaccataactgaagct

SEQ ID NO: 4603049 - DNA, 25 bp, Homo sapien
gttgagtgctacatacaggattgaa

SEQ ID NO: 4603050 - DNA, 25 bp, Homo sapien
aactgaagctagttcatcccctgtg

SEQ ID NO: 4603051 - DNA, 25 bp, Homo sapien
aattttctctagaggagcaatcccc

SEQ ID NO: 4603052 - DNA, 25 bp, Homo sapien
ttggctggaaggaccatggttgagt

SEQ ID NO: 4603053 - DNA, 25 bp, Homo sapien
ttttcttcgaactgggctctgtgct

SEQ ID NO: 4603054 - DNA, 25 bp, Homo sapien
gttttcttcgaactgggctctgtgc

SEQ ID NO: 4603055 - DNA, 25 bp, Homo sapien
tggaaggaccatggttgagttttct

SEQ ID NO: 4603056 - DNA, 25 bp, Homo sapien
ggtaataggtataatcacagacgta

SEQ ID NO: 4603057 - DNA, 25 bp, Homo sapien
gagcccgcgcgatagtggagggaca

SEQ ID NO: 4603058 - DNA, 25 bp, Homo sapien
gcgcagccctttccatgatgcagag

SEQ ID NO: 4603059 - DNA, 25 bp, Homo sapien
acatggatgagtgccgcgcagccct

SEQ ID NO: 4603060 - DNA, 25 bp, Homo sapien
ctgcctgcatctcgggaaaagatca

SEQ ID NO: 4603061 - DNA, 25 bp, Homo sapien
tgcctgcatctcgggaaaagatcac

SEQ ID NO: 4603062 - DNA, 25 bp, Homo sapien
cctcgggccagaagctgcggatgtc

SEQ ID NO: 4603063 - DNA, 25 bp, Homo sapien
tgactccagcacgtctgggctgcca

SEQ ID NO: 4603064 - DNA, 25 bp, Homo sapien
gactgttccagaatgatcgccttgg

SEQ ID NO: 4603065 - DNA, 25 bp, Homo sapien
tacgcgcttgcagactgccttcatg

SEQ ID NO: 4603066 - DNA, 25 bp, Homo sapien
tcttcccagattccggtgaccctcc

SEQ ID NO: 4603067 - DNA, 25 bp, Homo sapien
agagtccgcagctgcaccactgttt

SEQ ID NO: 4603068 - DNA, 25 bp, Homo sapien
cctccgcttagcctccctgtaatct

SEQ ID NO: 4603069 - DNA, 25 bp, Homo sapien
ctccctgtaatctacaggcagctcc

SEQ ID NO: 4603070 - DNA, 25 bp, Homo sapien
tcctccaccaaggtgtggattccat

SEQ ID NO: 4603071 - DNA, 25 bp, Homo sapien
tgcactcgcctcgatccttgggagc

SEQ ID NO: 4603072 - DNA, 25 bp, Homo sapien
gacaccctccatgcatgtggaccgt

SEQ ID NO: 4603073 - DNA, 25 bp, Homo sapien
agtgcggccccttgtgcaggcgact

SEQ ID NO: 4603074 - DNA, 25 bp, Homo sapien
ggatatgttacacaggaccctagag

SEQ ID NO: 4603075 - DNA, 25 bp, Homo sapien
tatctagtgaacacatagccgggcc

SEQ ID NO: 4603076 - DNA, 25 bp, Homo sapien
tcagtgggtactacgaatgaggtcc

SEQ ID NO: 4603077 - DNA, 25 bp, Homo sapien
tattgactcaagatgccatgtgccc

SEQ ID NO: 4603078 - DNA, 25 bp, Homo sapien
cttgatccaacggaggcatgaaatt

SEQ ID NO: 4603079 - DNA, 25 bp, Homo sapien
ttgatggccaagtgtgaataagcag

SEQ ID NO: 4603080 - DNA, 25 bp, Homo sapien
caacggaggcatgaaattgatggcc

SEQ ID NO: 4603081 - DNA, 25 bp, Homo sapien
aagcagttggcggtgtgtcacctga

SEQ ID NO: 4603082 - DNA, 25 bp, Homo sapien
aattcaccaagtgctgccggaaggg

SEQ ID NO: 4603083 - DNA, 25 bp, Homo sapien
tggaattcaccaagtgctgccggaa

SEQ ID NO: 4603084 - DNA, 25 bp, Homo sapien
ttcactgcttcccagctggaattca

SEQ ID NO: 4603085 - DNA, 25 bp, Homo sapien
ccagctggaattcaccaagtgctgc

SEQ ID NO: 4603086 - DNA, 25 bp, Homo sapien
tcaccaccacgcagctgggctggga

SEQ ID NO: 4603087 - DNA, 25 bp, Homo sapien
cagtcaccaccacgcagctgggctg

SEQ ID NO: 4603088 - DNA, 25 bp, Homo sapien
ccaccacgcagctgggctgggaatc

SEQ ID NO: 4603089 - DNA, 25 bp, Homo sapien
caccacgcagctgggctgggaatcc

SEQ ID NO: 4603090 - DNA, 25 bp, Homo sapien
gcgctctgagctccgggcaccttct

SEQ ID NO: 4603091 - DNA, 25 bp, Homo sapien
gctctgcgcgctctgagctccgggc

SEQ ID NO: 4603092 - DNA, 25 bp, Homo sapien
gcgtccgtagcgttctgggccccga

SEQ ID NO: 4603093 - DNA, 25 bp, Homo sapien
tgcctggccgcgtgctcgccgggga

SEQ ID NO: 4603094 - DNA, 25 bp, Homo sapien
cacagaaggcgactccagcaagttg

SEQ ID NO: 4603095 - DNA, 25 bp, Homo sapien
aagctacggaccttcatcatgagtg

SEQ ID NO: 4603096 - DNA, 25 bp, Homo sapien
ccgtgatgtggctggctttaagaac

SEQ ID NO: 4603097 - DNA, 25 bp, Homo sapien
tcatgagtgctacggctcttaaggt

SEQ ID NO: 4603098 - DNA, 25 bp, Homo sapien
cgccgggactgacccgggcttgctt

SEQ ID NO: 4603099 - DNA, 25 bp, Homo sapien
tctttacggccgctcgggttactgc

SEQ ID NO: 4603100 - DNA, 25 bp, Homo sapien
ttcccagggtctccgctgtcttgtc

SEQ ID NO: 4603101 - DNA, 25 bp, Homo sapien
tgtgaaatgggaaccgcacagtggg

SEQ ID NO: 4603102 - DNA, 25 bp, Homo sapien
gagcctgtcgcttcccgggccccag

SEQ ID NO: 4603103 - DNA, 25 bp, Homo sapien
gagcccgggcttcgtgccatttctg

SEQ ID NO: 4603104 - DNA, 25 bp, Homo sapien
gcgtccccgagcctgtcgcttcccg

SEQ ID NO: 4603105 - DNA, 25 bp, Homo sapien
atttctggccctggagcgcgcgcgt

SEQ ID NO: 4603106 - DNA, 25 bp, Homo sapien
taggttccaccagaccatctgttgc

SEQ ID NO: 4603107 - DNA, 25 bp, Homo sapien
gtttttaatttccccgatgctgcag

SEQ ID NO: 4603108 - DNA, 25 bp, Homo sapien
cttcttaggttccaccagaccatct

SEQ ID NO: 4603109 - DNA, 25 bp, Homo sapien
taatttccccgatgctgcagacctt

SEQ ID NO: 4603110 - DNA, 25 bp, Homo sapien
aactttgaagccctagtctggcggc

SEQ ID NO: 4603111 - DNA, 25 bp, Homo sapien
tctggcggccagctgaccggccttt

SEQ ID NO: 4603112 - DNA, 25 bp, Homo sapien
tggtattcagatttacagctcagcc

SEQ ID NO: 4603113 - DNA, 25 bp, Homo sapien
tgaaatgggatctccacagcataag

SEQ ID NO: 4603114 - DNA, 25 bp, Homo sapien
gatgtcctctggatgccgccttcct

SEQ ID NO: 4603115 - DNA, 25 bp, Homo sapien
acgatgatgtcctctggatgccgcc

SEQ ID NO: 4603116 - DNA, 25 bp, Homo sapien
ggccgatagggacgatgatgtcctc

SEQ ID NO: 4603117 - DNA, 25 bp, Homo sapien
gatagggacgatgatgtcctctgga

SEQ ID NO: 4603118 - DNA, 25 bp, Homo sapien
ggcacttgcttagcagtttggagga

SEQ ID NO: 4603119 - DNA, 25 bp, Homo sapien
gcacttgcttagcagtttggaggag

SEQ ID NO: 4603120 - DNA, 25 bp, Homo sapien
gattctgaaagtgaatgtgtggctc

SEQ ID NO: 4603121 - DNA, 25 bp, Homo sapien
gtgaactcttttgtgagaggtggat

SEQ ID NO: 4603122 - DNA, 25 bp, Homo sapien
tgaatgtgtggctcttgaatacggg

SEQ ID NO: 4603123 - DNA, 25 bp, Homo sapien
tcttttgtgagaggtggattctgaa

SEQ ID NO: 4603124 - DNA, 25 bp, Homo sapien
ggggtccaccctctttggcactgtc

SEQ ID NO: 4603125 - DNA, 25 bp, Homo sapien
gggtccaccctctttggcactgtcc

SEQ ID NO: 4603126 - DNA, 25 bp, Homo sapien
aatgatgggatgccagccgctggct

SEQ ID NO: 4603127 - DNA, 25 bp, Homo sapien
gagcaggacaggcttggctgtccca

SEQ ID NO: 4603128 - DNA, 25 bp, Homo sapien
ttctttcggttcccagaatgatggg

SEQ ID NO: 4603129 - DNA, 25 bp, Homo sapien
gctgtgagctgtcacagacatgggt

SEQ ID NO: 4603130 - DNA, 25 bp, Homo sapien
taagaacctttgttctcagggcact

SEQ ID NO: 4603131 - DNA, 25 bp, Homo sapien
cataggatccctcagttaacagaac

SEQ ID NO: 4603132 - DNA, 25 bp, Homo sapien
cctttggtcaaacgtctctggtgtg

SEQ ID NO: 4603133 - DNA, 25 bp, Homo sapien
tcagggcacttgctgatctaggcac

SEQ ID NO: 4603134 - DNA, 25 bp, Homo sapien
ctcagaggagcatgtcagctcctct

SEQ ID NO: 4603135 - DNA, 25 bp, Homo sapien
cctggttctcagacccctgcccaat

SEQ ID NO: 4603136 - DNA, 25 bp, Homo sapien
agctcctctgatccctcctggttct

SEQ ID NO: 4603137 - DNA, 25 bp, Homo sapien
ccaatttctgcacctttgccccacc

SEQ ID NO: 4603138 - DNA, 25 bp, Homo sapien
ctcaggtccaaaatagacctgcaca

SEQ ID NO: 4603139 - DNA, 25 bp, Homo sapien
cctcaggtccaaaatagacctgcac

SEQ ID NO: 4603140 - DNA, 25 bp, Homo sapien
gttcgaatcccagcttggtcacctt

SEQ ID NO: 4603141 - DNA, 25 bp, Homo sapien
gcttggtcaccttcgcctttttgag

SEQ ID NO: 4603142 - DNA, 25 bp, Homo sapien
ggaacaagccttggcgctgaagcgt

SEQ ID NO: 4603143 - DNA, 25 bp, Homo sapien
cgctgaagcgtgaaggacgcggttc

SEQ ID NO: 4603144 - DNA, 25 bp, Homo sapien
gactgcccagcctcggaaccctggc

SEQ ID NO: 4603145 - DNA, 25 bp, Homo sapien
ggaccccgtcggcagctccgccaag

SEQ ID NO: 4603146 - DNA, 25 bp, Homo sapien
gagccaggcgggatcggcgcgaccc

SEQ ID NO: 4603147 - DNA, 25 bp, Homo sapien
agaagtgaagggcggggtgcccgcg

SEQ ID NO: 4603148 - DNA, 25 bp, Homo sapien
cctttcctgtcctggcactagggca

SEQ ID NO: 4603149 - DNA, 25 bp, Homo sapien
ggtactttacccactgcaggattca

SEQ ID NO: 4603150 - DNA, 25 bp, Homo sapien
tccattagctaggtggtaagttcct

SEQ ID NO: 4603151 - DNA, 25 bp, Homo sapien
taaactgtgaactcggaagggaggc

SEQ ID NO: 4603152 - DNA, 25 bp, Homo sapien
gagcccaggctgtctaatggccaag

SEQ ID NO: 4603153 - DNA, 25 bp, Homo sapien
caggacatccgacacatcataggct

SEQ ID NO: 4603154 - DNA, 25 bp, Homo sapien
tgaatgaaccacaaggcatgcccac

SEQ ID NO: 4603155 - DNA, 25 bp, Homo sapien
gataggtcactcatggataatcccc

SEQ ID NO: 4603156 - DNA, 25 bp, Homo sapien
ttcacctccccaagagttcggcaaa

SEQ ID NO: 4603157 - DNA, 25 bp, Homo sapien
ctacgtgatgcaggatgaggcccga

SEQ ID NO: 4603158 - DNA, 25 bp, Homo sapien
cgttcgatccttggttgcttcctgc

SEQ ID NO: 4603159 - DNA, 25 bp, Homo sapien
tcccaggtctgttccgttcgatcct

SEQ ID NO: 4603160 - DNA, 25 bp, Homo sapien
taatagctggtaagggaatcccacc

SEQ ID NO: 4603161 - DNA, 25 bp, Homo sapien
tcctgttatgcataagcaatacccc

SEQ ID NO: 4603162 - DNA, 25 bp, Homo sapien
gcttctcttggcgtcctcaagtgat

SEQ ID NO: 4603163 - DNA, 25 bp, Homo sapien
catcctgtgtctcacaattagttga

SEQ ID NO: 4603164 - DNA, 25 bp, Homo sapien
tcctcacagttgctggcgatggctt

SEQ ID NO: 4603165 - DNA, 25 bp, Homo sapien
atcctcacagttgctggcgatggct

SEQ ID NO: 4603166 - DNA, 25 bp, Homo sapien
tcacagttgctggcgatggcttttc

SEQ ID NO: 4603167 - DNA, 25 bp, Homo sapien
cctcacagttgctggcgatggcttt

SEQ ID NO: 4603168 - DNA, 25 bp, Homo sapien
tccaaactcatccttgcacttgtca

SEQ ID NO: 4603169 - DNA, 25 bp, Homo sapien
aactcatccttgcacttgtcatcag

SEQ ID NO: 4603170 - DNA, 25 bp, Homo sapien
ctttccaaactcatccttgcacttg

SEQ ID NO: 4603171 - DNA, 25 bp, Homo sapien
caaactcatccttgcacttgtcatc

SEQ ID NO: 4603172 - DNA, 25 bp, Homo sapien
ctcaagcgaaggctcagggggtccc

SEQ ID NO: 4603173 - DNA, 25 bp, Homo sapien
gatccacggcgccgctcaagcgaag

SEQ ID NO: 4603174 - DNA, 25 bp, Homo sapien
tgcgggcccgcgctgcttccgatcc

SEQ ID NO: 4603175 - DNA, 25 bp, Homo sapien
ggcccgcgctgcttccgatccacgg

SEQ ID NO: 4603176 - DNA, 25 bp, Homo sapien
tgccccagcggccgggtgttttcac

SEQ ID NO: 4603177 - DNA, 25 bp, Homo sapien
ttccaccctccttgggcggcgctgc

SEQ ID NO: 4603178 - DNA, 25 bp, Homo sapien
cgaccgcgagcttcctaccgttcat

SEQ ID NO: 4603179 - DNA, 25 bp, Homo sapien
tgttttcaccgccgaccgcgagctt

SEQ ID NO: 4603180 - DNA, 25 bp, Homo sapien
tacgcactgctggtggccgagtcgt

SEQ ID NO: 4603181 - DNA, 25 bp, Homo sapien
cccacgaacgcgacgtgagggagct

SEQ ID NO: 4603182 - DNA, 25 bp, Homo sapien
cctgcgggaggtgcacgacagctac

SEQ ID NO: 4603183 - DNA, 25 bp, Homo sapien
agacggtgcagctgtacgaggacga

SEQ ID NO: 4603184 - DNA, 25 bp, Homo sapien
tattcccaaatcacactatcagtag

SEQ ID NO: 4603185 - DNA, 25 bp, Homo sapien
tcagatctctgcgtagtgtaaaagt

SEQ ID NO: 4603186 - DNA, 25 bp, Homo sapien
gatgtaaactatgcccagtccagcc

SEQ ID NO: 4603187 - DNA, 25 bp, Homo sapien
ggccctttggcaggatgttattaca

SEQ ID NO: 4603188 - DNA, 25 bp, Homo sapien
tggcaagtttcaatcacagctcggc

SEQ ID NO: 4603189 - DNA, 25 bp, Homo sapien
cactggttctctgcaaggcgattcc

SEQ ID NO: 4603190 - DNA, 25 bp, Homo sapien
gattccacaattgcccgcgagtcgt

SEQ ID NO: 4603191 - DNA, 25 bp, Homo sapien
gaggtgtccccgaaaggtttgcaga

SEQ ID NO: 4603192 - DNA, 25 bp, Homo sapien
ggtgaatttcatgccgaacccacag

SEQ ID NO: 4603193 - DNA, 25 bp, Homo sapien
ggctgcaaggcacataaaactcggc

SEQ ID NO: 4603194 - DNA, 25 bp, Homo sapien
tacatcccttcaggcgagagcgagg

SEQ ID NO: 4603195 - DNA, 25 bp, Homo sapien
gaagtcaacgtctcacaaactgtgg

SEQ ID NO: 4603196 - DNA, 25 bp, Homo sapien
tggcgacgtgccaacatccaaaggc

SEQ ID NO: 4603197 - DNA, 25 bp, Homo sapien
tcagatgaaaagaaagttgccctcc

SEQ ID NO: 4603198 - DNA, 25 bp, Homo sapien
gagacgcggacagtaggaatgacca

SEQ ID NO: 4603199 - DNA, 25 bp, Homo sapien
cagttggtgtgagctttaaggcctc

SEQ ID NO: 4603200 - DNA, 25 bp, Homo sapien
tatagtatttatggcgaggacagct

SEQ ID NO: 4603201 - DNA, 25 bp, Homo sapien
gaatgcccttttctggagtggccag

SEQ ID NO: 4603202 - DNA, 25 bp, Homo sapien
ggcactaggtcattaagtagcacac

SEQ ID NO: 4603203 - DNA, 25 bp, Homo sapien
tatcagactgtgcagacttgcgctt

SEQ ID NO: 4603204 - DNA, 25 bp, Homo sapien
ggtcagctgtcacgctcctgaggaa

SEQ ID NO: 4603205 - DNA, 25 bp, Homo sapien
tatttcaaaaactcggcatggactc

SEQ ID NO: 4603206 - DNA, 25 bp, Homo sapien
tccccatcaatactggaggtggtgc

SEQ ID NO: 4603207 - DNA, 25 bp, Homo sapien
tagcacactgctgatgtccgacagg

SEQ ID NO: 4603208 - DNA, 25 bp, Homo sapien
ccaggtttgtcctgcctgcagtgga

SEQ ID NO: 4603209 - DNA, 25 bp, Homo sapien
gctccgaagaactctgaggcaggct

SEQ ID NO: 4603210 - DNA, 25 bp, Homo sapien
gacatcgtggaggaaggcactcaaa

SEQ ID NO: 4603211 - DNA, 25 bp, Homo sapien
tgtacacgatagtgtgccaactcag

SEQ ID NO: 4603212 - DNA, 25 bp, Homo sapien
tctaggcggaggtgatttgtacagc

SEQ ID NO: 4603213 - DNA, 25 bp, Homo sapien
cacagggcgcactgaactgttgaag

SEQ ID NO: 4603214 - DNA, 25 bp, Homo sapien
ttgtacagcaccctaaatgacagtg

SEQ ID NO: 4603215 - DNA, 25 bp, Homo sapien
tgtgtgtacaagcagatgccgggct

SEQ ID NO: 4603216 - DNA, 25 bp, Homo sapien
cttggcttcgaagcaaccttggggg

SEQ ID NO: 4603217 - DNA, 25 bp, Homo sapien
tggcttcgaagcaaccttgggggcc

SEQ ID NO: 4603218 - DNA, 25 bp, Homo sapien
cctgccttggcttcgaagcaacctt

SEQ ID NO: 4603219 - DNA, 25 bp, Homo sapien
tgccttggcttcgaagcaaccttgg

SEQ ID NO: 4603220 - DNA, 25 bp, Homo sapien
cattccagagaaggttacacagaac

SEQ ID NO: 4603221 - DNA, 25 bp, Homo sapien
gaagtcagcaaaacattccagagaa

SEQ ID NO: 4603222 - DNA, 25 bp, Homo sapien
caaggaagatcttttacaactcggg

SEQ ID NO: 4603223 - DNA, 25 bp, Homo sapien
tttatgcaagttatgggaagtcagc

SEQ ID NO: 4603224 - DNA, 25 bp, Homo sapien
tccttttgtcctgcggtccatataa

SEQ ID NO: 4603225 - DNA, 25 bp, Homo sapien
cagagtccttttgtcctgcggtcca

SEQ ID NO: 4603226 - DNA, 25 bp, Homo sapien
ttgtcctgcggtccatataagaggg

SEQ ID NO: 4603227 - DNA, 25 bp, Homo sapien
tggccagagtccttttgtcctgcgg

SEQ ID NO: 4603228 - DNA, 25 bp, Homo sapien
tagaacaccaagcagctatcatgag

SEQ ID NO: 4603229 - DNA, 25 bp, Homo sapien
agaacaccaagcagctatcatgagg

SEQ ID NO: 4603230 - DNA, 25 bp, Homo sapien
tgtagaacaccaagcagctatcatg

SEQ ID NO: 4603231 - DNA, 25 bp, Homo sapien
ctgtagaacaccaagcagctatcat

SEQ ID NO: 4603232 - DNA, 25 bp, Homo sapien
agtgtcgctgagagcaggaaactaa

SEQ ID NO: 4603233 - DNA, 25 bp, Homo sapien
ctatggaagtgtcgctgagagcagg

SEQ ID NO: 4603234 - DNA, 25 bp, Homo sapien
gaagtgtcgctgagagcaggaaact

SEQ ID NO: 4603235 - DNA, 25 bp, Homo sapien
tggaagtgtcgctgagagcaggaaa

SEQ ID NO: 4603236 - DNA, 25 bp, Homo sapien
gaaagatgacctcattcttaggccc

SEQ ID NO: 4603237 - DNA, 25 bp, Homo sapien
gatgtctcctagtgactgacctttg

SEQ ID NO: 4603238 - DNA, 25 bp, Homo sapien
tcttaggccctgctgtgatggaatt

SEQ ID NO: 4603239 - DNA, 25 bp, Homo sapien
attagcatgctcctgggatgtctcc

SEQ ID NO: 4603240 - DNA, 25 bp, Homo sapien
gaggatgggctccagtttctatttt

SEQ ID NO: 4603241 - DNA, 25 bp, Homo sapien
tccagtttctatttttaaatgtggc

SEQ ID NO: 4603242 - DNA, 25 bp, Homo sapien
ttttaaatgtggcccttgttatagc

SEQ ID NO: 4603243 - DNA, 25 bp, Homo sapien
cagaggatgggctccagtttctatt

SEQ ID NO: 4603244 - DNA, 25 bp, Homo sapien
gggacttactactgaagcctgttta

SEQ ID NO: 4603245 - DNA, 25 bp, Homo sapien
taaaaatcggatgaattgtgctaca

SEQ ID NO: 4603246 - DNA, 25 bp, Homo sapien
gcctttgtctttataagctgtggaa

SEQ ID NO: 4603247 - DNA, 25 bp, Homo sapien
gggacttcaactggatgggtcatgt

SEQ ID NO: 4603248 - DNA, 25 bp, Homo sapien
tagtacctaatacggaggccagatg

SEQ ID NO: 4603249 - DNA, 25 bp, Homo sapien
gatgatgactggacccaaatccgac

SEQ ID NO: 4603250 - DNA, 25 bp, Homo sapien
tagtgaggcagtggactgaaccctg

SEQ ID NO: 4603251 - DNA, 25 bp, Homo sapien
gaaccctgctgaagatagtacctaa

SEQ ID NO: 4603252 - DNA, 25 bp, Homo sapien
caggtattcccagtggcaggcaatg

SEQ ID NO: 4603253 - DNA, 25 bp, Homo sapien
ggaaaagcttcccagcggcctgcaa

SEQ ID NO: 4603254 - DNA, 25 bp, Homo sapien
ttggctctgcgttttcctctctcct

SEQ ID NO: 4603255 - DNA, 25 bp, Homo sapien
caggcaatgccttggctctgcgttt

SEQ ID NO: 4603256 - DNA, 25 bp, Homo sapien
tcttcactcccgtagatcccagtat

SEQ ID NO: 4603257 - DNA, 25 bp, Homo sapien
cactcccgtagatcccagtatggac

SEQ ID NO: 4603258 - DNA, 25 bp, Homo sapien
ctaaatctcttcactcccgtagatc

SEQ ID NO: 4603259 - DNA, 25 bp, Homo sapien
taaatctcttcactcccgtagatcc

SEQ ID NO: 4603260 - DNA, 25 bp, Homo sapien
ggattcaagccaggcccgtcagtct

SEQ ID NO: 4603261 - DNA, 25 bp, Homo sapien
tcctggccttggctgactgagccag

SEQ ID NO: 4603262 - DNA, 25 bp, Homo sapien
tccctgaggtctttgaggtctttca

SEQ ID NO: 4603263 - DNA, 25 bp, Homo sapien
tgggccctggattcaagccaggccc

SEQ ID NO: 4603264 - DNA, 25 bp, Homo sapien
tctaattaaatggtgctggacaact

SEQ ID NO: 4603265 - DNA, 25 bp, Homo sapien
taaactcagtatagagagagcaccg

SEQ ID NO: 4603266 - DNA, 25 bp, Homo sapien
caccacaagggagagaaattgacct

SEQ ID NO: 4603267 - DNA, 25 bp, Homo sapien
gagagcaccgcaaacataaaggact

SEQ ID NO: 4603268 - DNA, 25 bp, Homo sapien
ctagtctcgtgttagtactggttcc

SEQ ID NO: 4603269 - DNA, 25 bp, Homo sapien
agtctcgtgttagtactggttccag

SEQ ID NO: 4603270 - DNA, 25 bp, Homo sapien
cgtgttagtactggttccagcttta

SEQ ID NO: 4603271 - DNA, 25 bp, Homo sapien
tctcgtgttagtactggttccagct

SEQ ID NO: 4603272 - DNA, 25 bp, Homo sapien
tcgggactgaaatcgccaaatgctt

SEQ ID NO: 4603273 - DNA, 25 bp, Homo sapien
gactctctcaggatcgaggttgctc

SEQ ID NO: 4603274 - DNA, 25 bp, Homo sapien
tcccaggagccggtatgtctctgcc

SEQ ID NO: 4603275 - DNA, 25 bp, Homo sapien
ttcttgcgggccccactgtggttcc

SEQ ID NO: 4603276 - DNA, 25 bp, Homo sapien
gaaattcttccacgatcttccacat

SEQ ID NO: 4603277 - DNA, 25 bp, Homo sapien
cagaaattcttccacgatcttccac

SEQ ID NO: 4603278 - DNA, 25 bp, Homo sapien
agaaattcttccacgatcttccaca

SEQ ID NO: 4603279 - DNA, 25 bp, Homo sapien
tccagaaattcttccacgatcttcc

SEQ ID NO: 4603280 - DNA, 25 bp, Homo sapien
tgattgtggccctactttggcctga

SEQ ID NO: 4603281 - DNA, 25 bp, Homo sapien
cctgagaaacataggtatatcggca

SEQ ID NO: 4603282 - DNA, 25 bp, Homo sapien
cctgaaactccaatttgtcctggtg

SEQ ID NO: 4603283 - DNA, 25 bp, Homo sapien
gagcactccccttgtcttctagaga

SEQ ID NO: 4603284 - DNA, 25 bp, Homo sapien
ccttcagaatccttaagatgagcca

SEQ ID NO: 4603285 - DNA, 25 bp, Homo sapien
cttcagaatccttaagatgagccat

SEQ ID NO: 4603286 - DNA, 25 bp, Homo sapien
cccttcagaatccttaagatgagcc

SEQ ID NO: 4603287 - DNA, 25 bp, Homo sapien
ctcttgaaaatactgctcagctaca

SEQ ID NO: 4603288 - DNA, 25 bp, Homo sapien
tcttgaaaatactgctcagctacat

SEQ ID NO: 4603289 - DNA, 25 bp, Homo sapien
tctcttgaaaatactgctcagctac

SEQ ID NO: 4603290 - DNA, 25 bp, Homo sapien
gctctcttgaaaatactgctcagct

SEQ ID NO: 4603291 - DNA, 25 bp, Homo sapien
tgtgacggtaatgccaggtgcttcc

SEQ ID NO: 4603292 - DNA, 25 bp, Homo sapien
gacggtaatgccaggtgcttcccaa

SEQ ID NO: 4603293 - DNA, 25 bp, Homo sapien
cattctgtgacggtaatgccaggtg

SEQ ID NO: 4603294 - DNA, 25 bp, Homo sapien
taatgccaggtgcttcccaagtggc

SEQ ID NO: 4603295 - DNA, 25 bp, Homo sapien
cagggtgaatgggaaagagagcagg

SEQ ID NO: 4603296 - DNA, 25 bp, Homo sapien
gaggatcaaaaatccaatcagcccc

SEQ ID NO: 4603297 - DNA, 25 bp, Homo sapien
cctgtaaagtgtgctgcttcttgga

SEQ ID NO: 4603298 - DNA, 25 bp, Homo sapien
gcttgcattatctaggcccagattc

SEQ ID NO: 4603299 - DNA, 25 bp, Homo sapien
ctaactgccccgaaaagcaccctgt

SEQ ID NO: 4603300 - DNA, 25 bp, Homo sapien
tctcaacccgagaatggcatgctcc

SEQ ID NO: 4603301 - DNA, 25 bp, Homo sapien
ccctgtttgggctggtcctctcaac

SEQ ID NO: 4603302 - DNA, 25 bp, Homo sapien
gagaatggcatgctcctttccctca

SEQ ID NO: 4603303 - DNA, 25 bp, Homo sapien
tccaaagaggatgcttgtcagtgta

SEQ ID NO: 4603304 - DNA, 25 bp, Homo sapien
tcatattttccaaagaggatgcttg

SEQ ID NO: 4603305 - DNA, 25 bp, Homo sapien
tattttccaaagaggatgcttgtca

SEQ ID NO: 4603306 - DNA, 25 bp, Homo sapien
ttttccaaagaggatgcttgtcagt

SEQ ID NO: 4603307 - DNA, 25 bp, Homo sapien
tcctcaagtcgctgctctctttctt

SEQ ID NO: 4603308 - DNA, 25 bp, Homo sapien
cctggcttctctaaggttttgtgct

SEQ ID NO: 4603309 - DNA, 25 bp, Homo sapien
cttacatgaaggcaacgcggctatc

SEQ ID NO: 4603310 - DNA, 25 bp, Homo sapien
gagtgcggaaggagtgtattcctta

SEQ ID NO: 4603311 - DNA, 25 bp, Homo sapien
ctgcaatctgatgccgaaggcctgg

SEQ ID NO: 4603312 - DNA, 25 bp, Homo sapien
caatctgatgccgaaggcctgggca

SEQ ID NO: 4603313 - DNA, 25 bp, Homo sapien
atctgatgccgaaggcctgggcaga

SEQ ID NO: 4603314 - DNA, 25 bp, Homo sapien
tcctctgcaatctgatgccgaaggc

SEQ ID NO: 4603315 - DNA, 25 bp, Homo sapien
cctccatgaccacaacttggggcca

SEQ ID NO: 4603316 - DNA, 25 bp, Homo sapien
caccaggaaagtgaccagcccccct

SEQ ID NO: 4603317 - DNA, 25 bp, Homo sapien
gaaggcttccagcaacctcaagttc

SEQ ID NO: 4603318 - DNA, 25 bp, Homo sapien
gggccaccatgtagtgaaggcttcc

SEQ ID NO: 4603319 - DNA, 25 bp, Homo sapien
gatgtagatgcgttttccataagct

SEQ ID NO: 4603320 - DNA, 25 bp, Homo sapien
tgatgtagatgcgttttccataagc

SEQ ID NO: 4603321 - DNA, 25 bp, Homo sapien
gtagatgcgttttccataagctgcc

SEQ ID NO: 4603322 - DNA, 25 bp, Homo sapien
atgtagatgcgttttccataagctg

SEQ ID NO: 4603323 - DNA, 25 bp, Homo sapien
tctgcttctagagggaagctgattc

SEQ ID NO: 4603324 - DNA, 25 bp, Homo sapien
cacacgtgcaacacgtgctggcctg

SEQ ID NO: 4603325 - DNA, 25 bp, Homo sapien
tagagggaagctgattccccacacg

SEQ ID NO: 4603326 - DNA, 25 bp, Homo sapien
tgattccccacacgtgcaacacgtg

SEQ ID NO: 4603327 - DNA, 25 bp, Homo sapien
aatagcatcaggatgataaacagtt

SEQ ID NO: 4603328 - DNA, 25 bp, Homo sapien
atagcatcaggatgataaacagttc

SEQ ID NO: 4603329 - DNA, 25 bp, Homo sapien
tagcatcaggatgataaacagttca

SEQ ID NO: 4603330 - DNA, 25 bp, Homo sapien
ggatccagccttcgcacttgttttg

SEQ ID NO: 4603331 - DNA, 25 bp, Homo sapien
gctttccaggtcaaaagtcacggat

SEQ ID NO: 4603332 - DNA, 25 bp, Homo sapien
gactcactcagagccttaaacatat

SEQ ID NO: 4603333 - DNA, 25 bp, Homo sapien
gcaacctgtcactcttgctttccag

SEQ ID NO: 4603334 - DNA, 25 bp, Homo sapien
ctccctgaagcgacagcagcatggg

SEQ ID NO: 4603335 - DNA, 25 bp, Homo sapien
acgatgtgtgccgagtctgctgcct

SEQ ID NO: 4603336 - DNA, 25 bp, Homo sapien
ctccacttgagaggggcttctactc

SEQ ID NO: 4603337 - DNA, 25 bp, Homo sapien
ggtgctcgtgtctccctgaagcgac

SEQ ID NO: 4603338 - DNA, 25 bp, Homo sapien
ggttgatggatacatcgtggagtcc

SEQ ID NO: 4603339 - DNA, 25 bp, Homo sapien
gatggatacatcgtggagtcccagg

SEQ ID NO: 4603340 - DNA, 25 bp, Homo sapien
gatacatcgtggagtcccagggctt

SEQ ID NO: 4603341 - DNA, 25 bp, Homo sapien
acatcgtggagtcccagggcttgct

SEQ ID NO: 4603342 - DNA, 25 bp, Homo sapien
gatctcaacatattccaaagctgct

SEQ ID NO: 4603343 - DNA, 25 bp, Homo sapien
cactcacgacttgtttcacctttac

SEQ ID NO: 4603344 - DNA, 25 bp, Homo sapien
ctctcaatatgggtacacactcacg

SEQ ID NO: 4603345 - DNA, 25 bp, Homo sapien
caaagctgcttgatagtgggacaaa

SEQ ID NO: 4603346 - DNA, 25 bp, Homo sapien
tttttcagcaaacacagcacatatt

SEQ ID NO: 4603347 - DNA, 25 bp, Homo sapien
ttcagcaaacacagcacatatttaa

SEQ ID NO: 4603348 - DNA, 25 bp, Homo sapien
tatttttcagcaaacacagcacata

SEQ ID NO: 4603349 - DNA, 25 bp, Homo sapien
agcaaacacagcacatatttaaaaa

SEQ ID NO: 4603350 - DNA, 25 bp, Homo sapien
tctgatccgtgcttcaatttctatc

SEQ ID NO: 4603351 - DNA, 25 bp, Homo sapien
ttgtagcagctcctttgaaagtctc

SEQ ID NO: 4603352 - DNA, 25 bp, Homo sapien
gtagcagctcctttgaaagtctctc

SEQ ID NO: 4603353 - DNA, 25 bp, Homo sapien
ctgatccgtgcttcaatttctatcc

SEQ ID NO: 4603354 - DNA, 25 bp, Homo sapien
gattctacaccccatgtcctgaact

SEQ ID NO: 4603355 - DNA, 25 bp, Homo sapien
ttccacttggttctagattctacac

SEQ ID NO: 4603356 - DNA, 25 bp, Homo sapien
acttcctaagtcatccatcagcatc

SEQ ID NO: 4603357 - DNA, 25 bp, Homo sapien
tacttggcgtgtaagtgttacgtga

SEQ ID NO: 4603358 - DNA, 25 bp, Homo sapien
tgtaaaagttagaggcaaaaggata

SEQ ID NO: 4603359 - DNA, 25 bp, Homo sapien
tttgaagggagagtaaagctctgcc

SEQ ID NO: 4603360 - DNA, 25 bp, Homo sapien
cacaatggagttggcgaggatttgt

SEQ ID NO: 4603361 - DNA, 25 bp, Homo sapien
taaagctctgcccatggtatggaaa

SEQ ID NO: 4603362 - DNA, 25 bp, Homo sapien
aaacatctgtattctcactataggg

SEQ ID NO: 4603363 - DNA, 25 bp, Homo sapien
ggaggtagccttgagccagattaac

SEQ ID NO: 4603364 - DNA, 25 bp, Homo sapien
gcaaattcttgtcagtgctacgcaa

SEQ ID NO: 4603365 - DNA, 25 bp, Homo sapien
tgctacgcaacgcacaagctcatgg

SEQ ID NO: 4603366 - DNA, 25 bp, Homo sapien
tgctagtttccaatgtgagtctcca

SEQ ID NO: 4603367 - DNA, 25 bp, Homo sapien
tcactggcagatacggaacaatccg

SEQ ID NO: 4603368 - DNA, 25 bp, Homo sapien
tgaaggagtctaaggctggaaagtc

SEQ ID NO: 4603369 - DNA, 25 bp, Homo sapien
ggaaagtcgagatgatttaccagca

SEQ ID NO: 4603370 - DNA, 25 bp, Homo sapien
tggtagcgccaggaagtggttaaac

SEQ ID NO: 4603371 - DNA, 25 bp, Homo sapien
tataccatatagctcaattctcaga

SEQ ID NO: 4603372 - DNA, 25 bp, Homo sapien
tctcttgattataccatatagctca

SEQ ID NO: 4603373 - DNA, 25 bp, Homo sapien
tgattataccatatagctcaattct

SEQ ID NO: 4603374 - DNA, 25 bp, Homo sapien
ttctcttgattataccatatagctc

SEQ ID NO: 4603375 - DNA, 25 bp, Homo sapien
catgactgttggaataggactttgc

SEQ ID NO: 4603376 - DNA, 25 bp, Homo sapien
gagtttctctcgaggaggctggaat

SEQ ID NO: 4603377 - DNA, 25 bp, Homo sapien
ggaacttctttctatgagtgatgct

SEQ ID NO: 4603378 - DNA, 25 bp, Homo sapien
gagtgatgctaacagcagcaacaac

SEQ ID NO: 4603379 - DNA, 25 bp, Homo sapien
aagtaaattcacattgctgtacaac

SEQ ID NO: 4603380 - DNA, 25 bp, Homo sapien
aattcacattgctgtacaaccatta

SEQ ID NO: 4603381 - DNA, 25 bp, Homo sapien
actgtgcccggaccattttaaccat

SEQ ID NO: 4603382 - DNA, 25 bp, Homo sapien
ctgtgcccggaccattttaaccatt

SEQ ID NO: 4603383 - DNA, 25 bp, Homo sapien
cctactcagtcagttgatactgttc

SEQ ID NO: 4603384 - DNA, 25 bp, Homo sapien
cctcttcttgccagccgtgggttca

SEQ ID NO: 4603385 - DNA, 25 bp, Homo sapien
gtagctatagctggggcttaaaatt

SEQ ID NO: 4603386 - DNA, 25 bp, Homo sapien
caactgccaatgagacctactcagt

SEQ ID NO: 4603387 - DNA, 25 bp, Homo sapien
tgtgaaccgttggaggctgacttgt

SEQ ID NO: 4603388 - DNA, 25 bp, Homo sapien
ggctgacttgtggagagatgtaggg

SEQ ID NO: 4603389 - DNA, 25 bp, Homo sapien
ttccaggtgtgaaccgttggaggct

SEQ ID NO: 4603390 - DNA, 25 bp, Homo sapien
gttctgaaggtcccctgcttttcca

SEQ ID NO: 4603391 - DNA, 25 bp, Homo sapien
tatgtaagctaacgcactggaaaaa

SEQ ID NO: 4603392 - DNA, 25 bp, Homo sapien
atatgtaagctaacgcactggaaaa

SEQ ID NO: 4603393 - DNA, 25 bp, Homo sapien
catatgtaagctaacgcactggaaa

SEQ ID NO: 4603394 - DNA, 25 bp, Homo sapien
cactgataatctgggcatgatgctt

SEQ ID NO: 4603395 - DNA, 25 bp, Homo sapien
gccagtttacccagtctgctggaga

SEQ ID NO: 4603396 - DNA, 25 bp, Homo sapien
tcaatcactcctttaaaacttgtaa

SEQ ID NO: 4603397 - DNA, 25 bp, Homo sapien
tatgtcgtaaaatcccttgccagtt

SEQ ID NO: 4603398 - DNA, 25 bp, Homo sapien
tatcagtttggtgattctttgtaca

SEQ ID NO: 4603399 - DNA, 25 bp, Homo sapien
gcagcgtgatttgccctctggttcc

SEQ ID NO: 4603400 - DNA, 25 bp, Homo sapien
gaattacacagttgtcttggcagcg

SEQ ID NO: 4603401 - DNA, 25 bp, Homo sapien
tacagattgataaccatgaaaaagt

SEQ ID NO: 4603402 - DNA, 25 bp, Homo sapien
ttcccataaagcaagcgggtacctc

SEQ ID NO: 4603403 - DNA, 25 bp, Homo sapien
aagtagggcagttccggagcagcct

SEQ ID NO: 4603404 - DNA, 25 bp, Homo sapien
agtagggcagttccggagcagcctt

SEQ ID NO: 4603405 - DNA, 25 bp, Homo sapien
agcaagcgggtacctcacaaaactc

SEQ ID NO: 4603406 - DNA, 25 bp, Homo sapien
gtattttgtcgaagtttgcaaacca

SEQ ID NO: 4603407 - DNA, 25 bp, Homo sapien
gagtattttgtcgaagtttgcaaac

SEQ ID NO: 4603408 - DNA, 25 bp, Homo sapien
gaagagtattttgtcgaagtttgca

SEQ ID NO: 4603409 - DNA, 25 bp, Homo sapien
aagagtattttgtcgaagtttgcaa

SEQ ID NO: 4603410 - DNA, 25 bp, Homo sapien
cgtgaaatcaccagcttagaggatt

SEQ ID NO: 4603411 - DNA, 25 bp, Homo sapien
tttcttaaagtggtatcgttgcctg

SEQ ID NO: 4603412 - DNA, 25 bp, Homo sapien
gatattgaagtttgtcaaagaacgt

SEQ ID NO: 4603413 - DNA, 25 bp, Homo sapien
aaagtggtatcgttgcctgttgata

SEQ ID NO: 4603414 - DNA, 25 bp, Homo sapien
aaaagccactccgtcgacatcaaac

SEQ ID NO: 4603415 - DNA, 25 bp, Homo sapien
cggaagcaagagtagagccgcgggc

SEQ ID NO: 4603416 - DNA, 25 bp, Homo sapien
cccttcaagacgctaagcaaaagcc

SEQ ID NO: 4603417 - DNA, 25 bp, Homo sapien
cacgccggagccggaagcaagagta

SEQ ID NO: 4603418 - DNA, 25 bp, Homo sapien
cttgttaaaggctgtgtatggcccg

SEQ ID NO: 4603419 - DNA, 25 bp, Homo sapien
taaaggctgtgtatggcccgtgaat

SEQ ID NO: 4603420 - DNA, 25 bp, Homo sapien
tatggcccgtgaatgcatactgcaa

SEQ ID NO: 4603421 - DNA, 25 bp, Homo sapien
tgtgtatggcccgtgaatgcatact

SEQ ID NO: 4603422 - DNA, 25 bp, Homo sapien
tttgacaagatatagtgctgcagcg

SEQ ID NO: 4603423 - DNA, 25 bp, Homo sapien
cagcgtgcctgatgggatatattca

SEQ ID NO: 4603424 - DNA, 25 bp, Homo sapien
tatagtgctgcagcgtgcctgatgg

SEQ ID NO: 4603425 - DNA, 25 bp, Homo sapien
caagatatagtgctgcagcgtgcct

SEQ ID NO: 4603426 - DNA, 25 bp, Homo sapien
tcaattttatttgtacccacatttg

SEQ ID NO: 4603427 - DNA, 25 bp, Homo sapien
cacgtggcctatttgatgaatatgg

SEQ ID NO: 4603428 - DNA, 25 bp, Homo sapien
gttccacgtggcctatttgatgaat

SEQ ID NO: 4603429 - DNA, 25 bp, Homo sapien
acccacatttgttccacgtggccta

SEQ ID NO: 4603430 - DNA, 25 bp, Homo sapien
tacaaattaccatgcgagtcggaag

SEQ ID NO: 4603431 - DNA, 25 bp, Homo sapien
attaccatgcgagtcggaagaaaac

SEQ ID NO: 4603432 - DNA, 25 bp, Homo sapien
aaattaccatgcgagtcggaagaaa

SEQ ID NO: 4603433 - DNA, 25 bp, Homo sapien
acaaattaccatgcgagtcggaaga

SEQ ID NO: 4603434 - DNA, 25 bp, Homo sapien
ttcctgttctacagtccagaatttg

SEQ ID NO: 4603435 - DNA, 25 bp, Homo sapien
aaagctagggagattgtgtggctta

SEQ ID NO: 4603436 - DNA, 25 bp, Homo sapien
aatttgcccctagggtgaaagctag

SEQ ID NO: 4603437 - DNA, 25 bp, Homo sapien
tccctgaactctgatatgtgtctcc

SEQ ID NO: 4603438 - DNA, 25 bp, Homo sapien
tgggttcaagagattcttctgcctc

SEQ ID NO: 4603439 - DNA, 25 bp, Homo sapien
ctgggttcaagagattcttctgcct

SEQ ID NO: 4603440 - DNA, 25 bp, Homo sapien
agtcagtggcaacatctcagtgcac

SEQ ID NO: 4603441 - DNA, 25 bp, Homo sapien
tcagtggcaacatctcagtgcactg

SEQ ID NO: 4603442 - DNA, 25 bp, Homo sapien
gacgacagagggagactccttctca

SEQ ID NO: 4603443 - DNA, 25 bp, Homo sapien
cctggacgacagagggagactcctt
